United States Patent Application Publication US 2025/0084491 A1 - sequence listing, part 18

SEQ ID NO: 333069 - DNA, 75 bp, synthetic construct
  source 1..75: mol_type = other DNA
atgctgccaaaccgtcacaaaatgaacctggcggctctggtcgtttccttcctgctgctgattgtatttgttcgc

SEQ ID NO: 333070 - DNA, 75 bp, synthetic construct
  source 1..75: mol_type = other DNA
ccacgtcgagccgaccatccgtgatattccatcgctgctggcgctggctccgtggtatggcaaaaagcaccggga

SEQ ID NO: 333071 - DNA, 75 bp, synthetic construct
  source 1..75: mol_type = other DNA
aggggctgcagcactctgcgcgggcggggctacgttcgctttaccggccagaaccgcaaacagcggttgaatggg

SEQ ID NO: 333072 - DNA, 75 bp, synthetic construct
  source 1..75: mol_type = other DNA
gatcaaaaaaacacggtgttttccgggtgctgccggtaaaaggcgcatctgtctatggcaagccggtgatcacca

SEQ ID NO: 333073 - DNA, 75 bp, synthetic construct
  source 1..75: mol_type = other DNA
ccgcgctccatcatgttccatatctggacggcgtacagtccgttcaccacctgggtacagattgtctatgactgg

SEQ ID NO: 333074 - DNA, 75 bp, synthetic construct
  source 1..75: mol_type = other DNA
caccaccgagcgtccgatttttgatatcgcaatggacctgggttatgtctcgcagcagaccttctcccgcgtttt

SEQ ID NO: 333075 - DNA, 75 bp, synthetic construct
  source 1..75: mol_type = other DNA
gggctgctgatggaatatttgcagcgcattccacaacctggcgaagaagtacaggtaggggattatttgctcaaa

SEQ ID NO: 333076 - DNA, 75 bp, synthetic construct
  source 1..75: mol_type = other DNA
agtcgctgcgcggtgaaccgctcaacctgcgggtgttaattcgccagccgctggtatttccggaaaccttgccat

SEQ ID NO: 333077 - DNA, 75 bp, synthetic construct
  source 1..75: mol_type = other DNA
atgacatttgtcatacaacgaataggttttgtacttactatggaatggattgccgatccgtctatctgggccggg

SEQ ID NO: 333078 - DNA, 75 bp, synthetic construct
  source 1..75: mol_type = other DNA
gatctaaaaccagagacagagaaaataaagggtgaaaccaggcaaatatgggataccacaatgaacagtaatcag

SEQ ID NO: 333079 - DNA, 75 bp, synthetic construct
  source 1..75: mol_type = other DNA
atatcatccctacccgagaaaatgagggggaaaatggcgatatagggccactacgcccctttacgcttaatctca

SEQ ID NO: 333080 - DNA, 75 bp, synthetic construct
  source 1..75: mol_type = other DNA
attatttgcttaaaacgttgcaggtggaaagccatcgcgtgcagaaggtgcagattattccgctgcataaggatg

SEQ ID NO: 333081 - DNA, 75 bp, synthetic construct
  source 1..75: mol_type = other DNA
tggacgtaatgcggtatccactgatggtgctcaggctttgctccgtcaggaccatgccgaccgcaaatttatgat

SEQ ID NO: 333082 - DNA, 75 bp, synthetic construct
  source 1..75: mol_type = other DNA
aatatggggcatggtctggatgttacaggagatataacaactaacgcatgggtgtacgcaaaccgccttgcaatt

SEQ ID NO: 333083 - DNA, 75 bp, synthetic construct
  source 1..75: mol_type = other DNA
atgagaaccaaggtacaggctttacggaagaaacaaaaaaatacattggatcaaatatttaaaactcctgttcct

SEQ ID NO: 333084 - DNA, 75 bp, synthetic construct
  source 1..75: mol_type = other DNA
atccgcaggagcggcggatgatcgagcgggtgcttaatcttaaccagcgtaccgtcagcagcatcatgacctcgc

SEQ ID NO: 333085 - DNA, 75 bp, synthetic construct
  source 1..75: mol_type = other DNA
cccgccatgatattcagaagaatgcggacggttcctggacggcgaatggtcatatgccgctggaagatctggtgc

SEQ ID NO: 333086 - DNA, 75 bp, synthetic construct
  source 1..75: mol_type = other DNA
gactggggaataagcaatttggcatctacatgattaataactcaaggacagccaatggcaccgatggtcaggcgt

SEQ ID NO: 333087 - DNA, 75 bp, synthetic construct
  source 1..75: mol_type = other DNA
atggagacgcgttttattttttctctgttattgggttatatgttgttttattcacaatctgttgcagcgtgggaa

SEQ ID NO: 333088 - DNA, 75 bp, synthetic construct
  source 1..75: mol_type = other DNA
tgcttgttgtctttaaactgttcggtcatacatggacgcttgaccttaaggataatgaccacacagacccccgtt

SEQ ID NO: 333089 - DNA, 75 bp, synthetic construct
  source 1..75: mol_type = other DNA
cagatgagaattattatctcccgaaagagtctgcctaccaggaagggcgctgggaaacactgccatttcagcgtg

SEQ ID NO: 333090 - DNA, 75 bp, synthetic construct
  source 1..75: mol_type = other DNA
gtgaatatatcgaacagtcaggttaaggggctgcagcactctgcgcgggcggggttacgttcgctgtaccggccg

SEQ ID NO: 333091 - DNA, 75 bp, synthetic construct
  source 1..75: mol_type = other DNA
tgcttgttgtctttaaattgttcggtcgtacatggacgcttgaccttaaggataatgaccacacagacccccact

SEQ ID NO: 333092 - DNA, 75 bp, synthetic construct
  source 1..75: mol_type = other DNA
ctggataaaaacaaaaggtgatacgggtaagcgaaaaactttcgttaacacgaccctgggcgaaacgtgggaacc

SEQ ID NO: 333093 - DNA, 75 bp, synthetic construct
  source 1..75: mol_type = other DNA
cgatatcgcgggaagatctgaataagtaccatgaggaaactcaagggcttgagcgcgatatggttaatgagatcc

SEQ ID NO: 333094 - DNA, 75 bp, synthetic construct
  source 1..75: mol_type = other DNA
atgagagctaataaaaaaacagggcttacacgcgaagccattaaagagttcaacgaaagccgtaaagggcttgag

SEQ ID NO: 333095 - DNA, 72 bp, synthetic construct
  source 1..72: mol_type = other DNA
atggcaatatctgcaggtcgtctgacacagatgataagtgttctgaacccggtgttaacccgtaatgctgcc

SEQ ID NO: 333096 - DNA, 75 bp, synthetic construct
  source 1..75: mol_type = other DNA
aatggcgtcaagacgttcattaacaccacgctgggggagccttatgaagaggctgtggcagaaaaactgagcttt

SEQ ID NO: 333097 - DNA, 75 bp, synthetic construct
  source 1..75: mol_type = other DNA
gatccatcagtctgaactggaccagagcaacgggcggtggatctgtgaaaacacgggcatgtggacccgtgacgg

SEQ ID NO: 333098 - DNA, 75 bp, synthetic construct
  source 1..75: mol_type = other DNA
agcacaacggcattactaaaggttattgcaatatttgtggaaaatatgacttcctcacaaaagatcatgttcctc

SEQ ID NO: 333099 - DNA, 75 bp, synthetic construct
  source 1..75: mol_type = other DNA
cttactgggatatagctgctgatatctatttccctgacgattttaatagtgaaaaaaagtatcctgccattatca

SEQ ID NO: 333100 - DNA, 75 bp, synthetic construct
  source 1..75: mol_type = other DNA
atgactggtaaacgcattacacctaccatgacacacgacgaaatggcagccaaatggatggaggatccggctttc

SEQ ID NO: 333101 - DNA, 75 bp, synthetic construct
  source 1..75: mol_type = other DNA
cgtcagcgaaaacccggagcaggttacccttcctgaaaaaatctgtcagtccccccaaagagttcgcgatattat

SEQ ID NO: 333102 - DNA, 75 bp, synthetic construct
  source 1..75: mol_type = other DNA
gctgataacccggagcaaagtatcccgaaagcaactaaccaggttatctaccgcatcctgattttctatattggt

SEQ ID NO: 333103 - DNA, 75 bp, synthetic construct
  source 1..75: mol_type = other DNA
aaatcgatcgcattaagttgcagcagtacatttcctgatcattacctggttaagatcgaccctcaggcgtttaag

SEQ ID NO: 333104 - DNA, 75 bp, synthetic construct
  source 1..75: mol_type = other DNA
gctgggatgcttttcatcttgcagaagtcctgttaactcaaccactaatggttgtagtgggcgatagagtgggcg

SEQ ID NO: 333105 - DNA, 75 bp, synthetic construct
  source 1..75: mol_type = other DNA
ggcattctggttaagtgatcaactagcgcgaaaactgggcggtcatttaaatattaaaacgcgggacgggcttgg

SEQ ID NO: 333106 - DNA, 75 bp, synthetic construct
  source 1..75: mol_type = other DNA
gtggcttttgatctgccgattaatgatttgatcccaccgggtatgccgctggacagtttccgccttgagccagac

SEQ ID NO: 333107 - DNA, 75 bp, synthetic construct
  source 1..75: mol_type = other DNA
gacagaatcgcctctgggcggagatgaaaatgcgcaactccatgccagcggctattatgcgctctttgtagacac

SEQ ID NO: 333108 - DNA, 75 bp, synthetic construct
  source 1..75: mol_type = other DNA
tttaataaagacactatccagattgcggagacggataccacgccggtgctgatatttgcccgcgcctgtgacatc

SEQ ID NO: 333109 - DNA, 75 bp, synthetic construct
  source 1..75: mol_type = other DNA
atcatccagacattcagcggcctgcgccgtgtggtgaaaacgtcctgtatcgacggctgcaccgtcgtatggcaa

SEQ ID NO: 333110 - DNA, 75 bp, synthetic construct
  source 1..75: mol_type = other DNA
aatacgatgtgatgtcgatgcccaccaaagaacgagagcaagttattgcgcacttggggttatccacaccggata

SEQ ID NO: 333111 - DNA, 75 bp, synthetic construct
  source 1..75: mol_type = other DNA
gtcgcgccaagcaggaacaaggtgtggtaactcgcttccctgctctgctctacccgttgggtaactggatctgcc

SEQ ID NO: 333112 - DNA, 75 bp, synthetic construct
  source 1..75: mol_type = other DNA
cgtcgattttcatgaaatagaagagtgccagcgtcgcggtgagtgggacaaaaccggggatattctggctgaggc

SEQ ID NO: 333113 - DNA, 75 bp, synthetic construct
  source 1..75: mol_type = other DNA
gaatgagctgggaatccaccattccttactatcgtctgataaatgaaggcattaaacagcggcttggtgggcttc

SEQ ID NO: 333114 - DNA, 75 bp, synthetic construct
  source 1..75: mol_type = other DNA
cgctgttccgactggaacgtccgtttgcctatcttgatacggataacgtgtataaagagcagggtaaccaggtta

SEQ ID NO: 333115 - DNA, 75 bp, synthetic construct
  source 1..75: mol_type = other DNA
tgtcaacggcgcggggaatgggataaaacaggcgatattctggccgaggcggcgcttggcctacagcgtgcgggg

SEQ ID NO: 333116 - DNA, 75 bp, synthetic construct
  source 1..75: mol_type = other DNA
atgaaaacaattggtttgctgggaggaatgagctgggaatccactattccttactatcgtttgataaatgaaggc

SEQ ID NO: 333117 - DNA, 75 bp, synthetic construct
  source 1..75: mol_type = other DNA
ctccggctatgccggaggatatttattcgttaatagagattgggcacctggccgttgaggcgtttgtctcgttcc

SEQ ID NO: 333118 - DNA, 75 bp, synthetic construct
  source 1..75: mol_type = other DNA
ggtgaaaattaaacaggaagaatttgtttcaagggattttgtctacggagccactcctaacagaacgcttcctac

SEQ ID NO: 333119 - DNA, 75 bp, synthetic construct
  source 1..75: mol_type = other DNA
aatcaaagagctaaaaaatcatatttcgatagaagaatacagaaatgaatatcgcaagctgcgttccgatgatat

SEQ ID NO: 333120 - DNA, 75 bp, synthetic construct
  source 1..75: mol_type = other DNA
gacttgaaaaaaagagagaatctcttatcgaatactttattgacgagttaaatcccatcagcagttcaaaagcta

SEQ ID NO: 333121 - DNA, 75 bp, synthetic construct
  source 1..75: mol_type = other DNA
tccataccggaatgggtttacagcgctaacgtccattatacgggcaaacgcgcggcgaacgataccaacacctct

SEQ ID NO: 333122 - DNA, 75 bp, synthetic construct
  source 1..75: mol_type = other DNA
ggctgaatggtcatattgataccggctctatcggccacgatctgtcactttctaccacgggatatgtctggtcgc

SEQ ID NO: 333123 - DNA, 75 bp, synthetic construct
  source 1..75: mol_type = other DNA
atgataatccagtgatggtaatggaagacatcattgagcgcgttgaaataacgccagcaggatctagatgggggg

SEQ ID NO: 333124 - DNA, 75 bp, synthetic construct
  source 1..75: mol_type = other DNA
tacacgttactccgtgcatatcaaaatgccttcaacaaccccggaggttgcagaggaagaagagcgtttactgga

SEQ ID NO: 333125 - DNA, 75 bp, synthetic construct
  source 1..75: mol_type = other DNA
cgcgggcggtgcagcgttgaagctgttacaggaatccggtattccggaagcgaaagactacgccggttttccggt

SEQ ID NO: 333126 - DNA, 75 bp, synthetic construct
  source 1..75: mol_type = other DNA
tggcgtttgtggcaagcggggcagcgcgtgcagattatcaagcgtgatgccgagaaaggtggcgtactgcgtctg

SEQ ID NO: 333127 - DNA, 75 bp, synthetic construct
  source 1..75: mol_type = other DNA
cgcgaaattgtcgcccgcttcgaactggctgaagacatggcggataatctgattcgtttctacatgcgcaaaatt

SEQ ID NO: 333128 - DNA, 75 bp, synthetic construct
  source 1..75: mol_type = other DNA
tacggtttatataccgctgctgttgcagggattgtcattgctctgacgggggggtcgcgttttagcgtttccggt

SEQ ID NO: 333129 - DNA, 75 bp, synthetic construct
  source 1..75: mol_type = other DNA
tgatttttgctggtcggggaattatgtcttccattatctgattggggatatttcactggcagcagagaggaatga

SEQ ID NO: 333130 - DNA, 75 bp, synthetic construct
  source 1..75: mol_type = other DNA
cgaaagaatacgccggtttcccggtgggcggtcagttcctcgtttcggaaaacccggatgtggttaatcaccatc

SEQ ID NO: 333131 - DNA, 75 bp, synthetic construct
  source 1..75: mol_type = other DNA
caagttgttcgtaaccacggcatagaactacctatagtcaaaacagataatggatggaaactagttggagaaaca

SEQ ID NO: 333132 - DNA, 75 bp, synthetic construct
  source 1..75: mol_type = other DNA
ggaataatgcattttccgggcgttatccgtttaaaatgtcagcagcgatgcttcgcttcccctgctggcaaaata

SEQ ID NO: 333133 - DNA, 75 bp, synthetic construct
  source 1..75: mol_type = other DNA
gcgatgatcctgttgttgttaattcgttatggcagggctattgggttagcgctcaaacaacgctggtcacgtttt

SEQ ID NO: 333134 - DNA, 75 bp, synthetic construct
  source 1..75: mol_type = other DNA
gctgataaagatctcatcaggaagaatgagttattagccttatccctgaaggaattgtatcaacttctcgtttca

SEQ ID NO: 333135 - DNA, 75 bp, synthetic construct
  source 1..75: mol_type = other DNA
cttcttcccggccgtgctgtccgtcattatggtgttctggattggcgctaagatgcgtaaccgtaaacaggacgt

SEQ ID NO: 333136 - DNA, 75 bp, synthetic construct
  source 1..75: mol_type = other DNA
gatttaaacaaggccgagtttgaagtagctagattcactgactatcctcgtatatggtggcacgcaagagaagga

SEQ ID NO: 333137 - DNA, 75 bp, synthetic construct
  source 1..75: mol_type = other DNA
tcgggatcaccatcggtacgatgcagattaaagattttctcggtctgcaaatggcacatgtcccggaacattatc

SEQ ID NO: 333138 - DNA, 75 bp, synthetic construct
  source 1..75: mol_type = other DNA
tcagtaacttccatcctgaccgactggctgaccttatcgcttttaataacgtcgttccggcggtaaaccaggttg

SEQ ID NO: 333139 - DNA, 75 bp, synthetic construct
  source 1..75: mol_type = other DNA
gtattgaaatgcccctgttgggctttggtgtatttcagatgaccgatgccgctgaatgcgaaagagcggtcattg

SEQ ID NO: 333140 - DNA, 75 bp, synthetic construct
  source 1..75: mol_type = other DNA
aatgaaacccaggtcgggaacgcgctgaaacagaccggcatcgcccgtgatgaactgtttgtcaccaccaaactg

SEQ ID NO: 333141 - DNA, 75 bp, synthetic construct
  source 1..75: mol_type = other DNA
ctgttctccgtgcaggatttaattgatgaagttgtgccttcagtgttgcctgccatcaagcgtaaaggtctgcaa

SEQ ID NO: 333142 - DNA, 75 bp, synthetic construct
  source 1..75: mol_type = other DNA
tggacacgggagaaggcgtaagcattcatgaaatggataatttgcacttcccgtttatcaaccagacccaaaacg

SEQ ID NO: 333143 - DNA, 75 bp, synthetic construct
  source 1..75: mol_type = other DNA
gacacgtctgaaacaagatgtctattatctggaaaagccgcgtcgtaaaacggaagcgctgatcttcggctccca

SEQ ID NO: 333144 - DNA, 75 bp, synthetic construct
  source 1..75: mol_type = other DNA
ggaattccagccactgcgcactatggctcgcgcaggcattcaaccgatcccgggacgcctcgcgttcttcccgaa

SEQ ID NO: 333145 - DNA, 75 bp, synthetic construct
  source 1..75: mol_type = other DNA
gtcatgctgctgtgcatgtcgctgaccgtgctgtttgatatggttattgccatcagcgtggggatcgtgctggca

SEQ ID NO: 333146 - DNA, 75 bp, synthetic construct
  source 1..75: mol_type = other DNA
gatgccgcaattggtattgttacgcttgggatcctgattttctggccgcgcctgggcatccgtttacctggtcac

SEQ ID NO: 333147 - DNA, 75 bp, synthetic construct
  source 1..75: mol_type = other DNA
gatcttccagcgaggcatcatttcactggcgaaatcggtgcgcaaagaacgcatggaagagaacatcaatattct

SEQ ID NO: 333148 - DNA, 75 bp, synthetic construct
  source 1..75: mol_type = other DNA
ggtgattttaatgcactattattctctgatcctaaactagaacgaattaatttaattggtaacaggcagcgtaat

SEQ ID NO: 333149 - DNA, 75 bp, synthetic construct
  source 1..75: mol_type = other DNA
gttactatgtcaattaaatacaaccgttaatggtggtggaacagggcgaataacttatatttacagaccgcagtt

SEQ ID NO: 333150 - DNA, 75 bp, synthetic construct
  source 1..75: mol_type = other DNA
gcactggcgcttgctggcgacaccctctcacagggtagtaacgggcgctggctgacggcgggcgacctcaccctc

SEQ ID NO: 333151 - DNA, 75 bp, synthetic construct
  source 1..75: mol_type = other DNA
gatggcgatatcaccctggatagcagcggaagactggctgtgaacaacagtctcgccgcggggaccatcactgca

SEQ ID NO: 333152 - DNA, 75 bp, synthetic construct
  source 1..75: mol_type = other DNA
gctgcgatgacgctgaatgtgacaacagtggcgctggacggggaaaccagtgccggtgacaccctccgggttcag

SEQ ID NO: 333153 - DNA, 75 bp, synthetic construct
  source 1..75: mol_type = other DNA
cggtggtttctgctctgttcagtgccggtgctatggctgccaatagtgttaatgcgaatggtcaagctgataact

SEQ ID NO: 333154 - DNA, 75 bp, synthetic construct
  source 1..75: mol_type = other DNA
acggcaggacaactcacaaacggcgggcatctgcagggcgaaacgctgacgctggccgcctccggtggcgtgaac

SEQ ID NO: 333155 - DNA, 75 bp, synthetic construct
  source 1..75: mol_type = other DNA
ccgcactgacgcttgccgcccgtatggcatcccctcaacctgcgctgatgaataacggaggttcattgctgacca

SEQ ID NO: 333156 - DNA, 75 bp, synthetic construct
  source 1..75: mol_type = other DNA
tgtgaataaagctgatgcagatcggatagcagaagagatcgaaacggcagaacacattaagaagttacgtgacat

SEQ ID NO: 333157 - DNA, 75 bp, synthetic construct
  source 1..75: mol_type = other DNA
acccacagcgggaaaagcagcgccccgtcgctcagcctcagtgcgccggaactgaccagcagcggcgtacttgtt

SEQ ID NO: 333158 - DNA, 75 bp, synthetic construct
  source 1..75: mol_type = other DNA
gtagatatcagcttcccggaaatcgagaagtttgaccgtctaccggaaccgcgcgccgaagggccgaccgcgttt

SEQ ID NO: 333159 - DNA, 75 bp, synthetic construct
  source 1..75: mol_type = other DNA
gtcgtgaacattgccacgccgaacggggccgggatttcgcataacaggtttacggattacaacgtcgggaaggaa

SEQ ID NO: 333160 - DNA, 75 bp, synthetic construct
  source 1..75: mol_type = other DNA
ctgacctgctgctgaacgtggcgaagcttgccggtaatggcactgtgatggcggcgaatcaggcaacgctcacag

SEQ ID NO: 333161 - DNA, 75 bp, synthetic construct
  source 1..75: mol_type = other DNA
ccagtgacacgctgacaacacagggacagataaccgccgggcagaatctcacggccagcgccaccacgctgacac

SEQ ID NO: 333162 - DNA, 75 bp, synthetic construct
  source 1..75: mol_type = other DNA
atgttgcagaaccagaaggtagggccattcaaattggtgaaaataaaaatctcagtgtcgtaaaagatgggcagg

SEQ ID NO: 333163 - DNA, 75 bp, synthetic construct
  source 1..75: mol_type = other DNA
tccgtaatacagtccgcagggccagggattatcctgggttacgccattgctggttttatcgcctttctgatcatg

SEQ ID NO: 333164 - DNA, 75 bp, synthetic construct
  source 1..75: mol_type = other DNA
ttgtggtgattaacgccatcaacctgaccaacgtaaaagtgtttggtgagatggagttctggtttgccattatca

SEQ ID NO: 333165 - DNA, 75 bp, synthetic construct
  source 1..75: mol_type = other DNA
aagttatcgcggtggtagcgatgatcatcttcggcggctggctgctattcagtggcaacggcggcccgcaggcga

SEQ ID NO: 333166 - DNA, 75 bp, synthetic construct
  source 1..75: mol_type = other DNA
agcctggcgcatatgaaattccgtcgcgccaagcaggaacaaggcgtggtaactcgcttccctgctctgctttat

SEQ ID NO: 333167 - DNA, 75 bp, synthetic construct
  source 1..75: mol_type = other DNA
ctaacgccctgaatatcgtggtattgacggcggcgctttcggtttacaacagttgcgtctactgcaacagccgta

SEQ ID NO: 333168 - DNA, 75 bp, synthetic construct
  source 1..75: mol_type = other DNA
aagtgtttggcgagatggagttctggtttgccattatcaaagttatcgcggtggtagcgatgatcatcttcggcg

SEQ ID NO: 333169 - DNA, 75 bp, synthetic construct
  source 1..75: mol_type = other DNA
aataaaggtgataccgttgaaatcacctttgaagatgaaaaaggtggtaagcacaccgtgacgctggagaaaggg

SEQ ID NO: 333170 - DNA, 75 bp, synthetic construct
  source 1..75: mol_type = other DNA
tgatccgacgctgatcccggacagcactggcgataaagcgaccattccggcagataacgtgaaggataacagtga

SEQ ID NO: 333171 - DNA, 75 bp, synthetic construct
  source 1..75: mol_type = other DNA
agtagccattccggaagcagcagacggcgtgaatgccgaagagctgaaggacggtgtgcagaccgaagtcacggt

SEQ ID NO: 333172 - DNA, 75 bp, synthetic construct
  source 1..75: mol_type = other DNA
tacctgtgcgatcagagagcctccgatcaggcgcgtgaccgttaccgcgaagcgctggcctggctgaaagatgtc

SEQ ID NO: 333173 - DNA, 75 bp, synthetic construct
  source 1..75: mol_type = other DNA
tcatgatggggctggttatacgcattctgtggcgtgttatatccccaccacctggtccgttgcaaagttattcga

SEQ ID NO: 333174 - DNA, 75 bp, synthetic construct
  source 1..75: mol_type = other DNA
cggccaggtgacagaagccgtgctgacccaggacggaccggtactggatgatatcactgcgggccagtcgggcac

SEQ ID NO: 333175 - DNA, 75 bp, synthetic construct
  source 1..75: mol_type = other DNA
cgacgaacagggctggcaagagtattgcgaatacctgcaccatgggctttcggcgattaagcgtcggcttgggct

SEQ ID NO: 333176 - DNA, 75 bp, synthetic construct
  source 1..75: mol_type = other DNA
ctaccgagcagatgtggatttcagcatgtatgataaaaaactatctgatatttaccttgaaaatatccataaaca

SEQ ID NO: 333177 - DNA, 75 bp, synthetic construct
  source 1..75: mol_type = other DNA
tgaatgccataaagagacaggagctcattgacgccgactttcagcgcctcagaaacctcatctggccggagaatg

SEQ ID NO: 333178 - DNA, 75 bp, synthetic construct
  source 1..75: mol_type = other DNA
tcagctatgaacaactgacccggtttgcggaaaaacgcattcgggaatgcaatctggacagccaggacgtgattt

SEQ ID NO: 333179 - DNA, 75 bp, synthetic construct
  source 1..75: mol_type = other DNA
gccgatcaaacccagtaccacttcctctctggcttcaccgccaaactggccggtactgagcgtggcatcaccgaa

SEQ ID NO: 333180 - DNA, 75 bp, synthetic construct
  source 1..75: mol_type = other DNA
ggtttgattttttcaggaatttggccatgttgaaggctggaactttgtttacagagacgggaaaaactggatgcc

SEQ ID NO: 333181 - DNA, 75 bp, synthetic construct
  source 1..75: mol_type = other DNA
ggcacgcgggtgtacatggtggaaatagaaataccatctggcaaaagaattcgcttatcaaatcattatcaaaat

SEQ ID NO: 333182 - DNA, 75 bp, synthetic construct
  source 1..75: mol_type = other DNA
atgcaggatatgatttttacctgtcagaacattatcagatggaggtgcaggatggatcaggaaatgacgttttca

SEQ ID NO: 333183 - DNA, 75 bp, synthetic construct
  source 1..75: mol_type = other DNA
tgcttgttgtctttagaatgttcggtcgtacatggacgcttgaccttaaggataatgaccacacacaaccccgtt

SEQ ID NO: 333184 - DNA, 75 bp, synthetic construct
  source 1..75: mol_type = other DNA
agattatttttgaagaactgtgtctggggcaatttaccgaagcgtcgcgcgcttattatgcgcaagtgattgctc

SEQ ID NO: 333185 - DNA, 75 bp, synthetic construct
  source 1..75: mol_type = other DNA
cttctggcatgaactggccataaatggctatgcctcaatgaatgccataaagagacaggagctcattgacgccga

SEQ ID NO: 333186 - DNA, 75 bp, synthetic construct
  source 1..75: mol_type = other DNA
acattagcgaacaaacgttaatggaaaggctcaaggcggacgcaacgggtaacacctcgctcgctgagcatctca

SEQ ID NO: 333187 - DNA, 75 bp, synthetic construct
  source 1..75: mol_type = other DNA
ccacggcactgttcaaactggcggttgccaacaacgttcataactttgttgagcaccgatacgcattgttggaat

SEQ ID NO: 333188 - DNA, 75 bp, synthetic construct
  source 1..75: mol_type = other DNA
aaccctggcgaaactgtttatcgacaacttcgataaatacaccgacacccctgcgggtgccgcgctggtagcggc

SEQ ID NO: 333189 - DNA, 75 bp, synthetic construct
  source 1..75: mol_type = other DNA
atgagacgtgatcggaatactcaagccggtaccggaatcgcaatggccggtacgatgccacggccccaagcggag

SEQ ID NO: 333190 - DNA, 75 bp, synthetic construct
  source 1..75: mol_type = other DNA
gaaccgggcgattactggaacaactggctcagggacgtgttgatggcagctggctgaaatatctgaaacagttgc

SEQ ID NO: 333191 - DNA, 75 bp, synthetic construct
  source 1..75: mol_type = other DNA
ccacgctcaataacccgttctttgtttcgctgaaagatggtgcgcagaaagaggcggataaactcggttataacc

SEQ ID NO: 333192 - DNA, 75 bp, synthetic construct
  source 1..75: mol_type = other DNA
caccgacggtcatctggcctggctggtgccgttacttgaagaatattacgacccaatgtatcgctatcagcttga

SEQ ID NO: 333193 - DNA, 75 bp, synthetic construct
  source 1..75: mol_type = other DNA
gttggcacctgctataaacagcaagggtcagacgcggcgctggcgctggggcataaactggtggcgggtgaaatt

SEQ ID NO: 333194 - DNA, 75 bp, synthetic construct
  source 1..75: mol_type = other DNA
ggtcaacgttcacatattgtgcaacgctggctgcatgaagcggggattgattatccgctggtggaaggcggttat

SEQ ID NO: 333195 - DNA, 75 bp, synthetic construct
  source 1..75: mol_type = other DNA
ttgcaggcattgcggtattggccgcacctgtagctgtgttagggattggcgggtacgcgatagtgaaacacaaaa

SEQ ID NO: 333196 - DNA, 75 bp, synthetic construct
  source 1..75: mol_type = other DNA
tctgttgccgccggtggggttcgccatcgtaacgctggtggtctgcatgctggcagcgtgggaatggggacagct

SEQ ID NO: 333197 - DNA, 75 bp, synthetic construct
  source 1..75: mol_type = other DNA
tctgttcgttgtcgacgctttctgtggtgcgaacccagacacgcgtctttccgtacgtttcattaccgaagtggc

SEQ ID NO: 333198 - DNA, 75 bp, synthetic construct
  source 1..75: mol_type = other DNA
ggatggtcgcagaaccccagcatattataatgagaatgagttgctgggatggttaaatgtttctgagattataga

SEQ ID NO: 333199 - DNA, 75 bp, synthetic construct
  source 1..75: mol_type = other DNA
aatgaggccgaagatgcctatttggattcaaaatatagtgttacactagatgcggagagattgttgcgttgggtg

SEQ ID NO: 333200 - DNA, 75 bp, synthetic construct
  source 1..75: mol_type = other DNA
attcattattcaccacctcaaaggatttagatgaacagcttttcaataaagttgttttttcagtaactgaattaa

SEQ ID NO: 333201 - DNA, 75 bp, synthetic construct
  source 1..75: mol_type = other DNA
gattaacgacggtatcgaccgtggcctgtgggatttgcagaataaagcagaacggcagaatgacattctggtgaa

SEQ ID NO: 333202 - DNA, 75 bp, synthetic construct
  source 1..75: mol_type = other DNA
tcgtaaaaccggacaaacctcgaccatccaggtttcgggtttacaaaataactcaaccgattttttaagccccag

SEQ ID NO: 333203 - DNA, 75 bp, synthetic construct
  source 1..75: mol_type = other DNA
aacggcagaacggcagaacggcagaacggcagaacgacattctggtgaaataccgccatatgtcggttccaccgg

SEQ ID NO: 333204 - DNA, 75 bp, synthetic construct
  source 1..75: mol_type = other DNA
atggcctaatgctaagcgacacaccttttagcgatgaaaccgttataaaggagcatatcgatgccggtatcactc

SEQ ID NO: 333205 - DNA, 75 bp, synthetic construct
  source 1..75: mol_type = other DNA
ttccataaaccggcagcattgtccttcatcatatttgcgacgatgtataacgcctacacacagcgatattgtact

SEQ ID NO: 333206 - DNA, 75 bp, synthetic construct
  source 1..75: mol_type = other DNA
tgataaaattcaacacttcacttattgtgtaaaaaaaatgtataatgcgacgactgctataaccgatgcagctca

SEQ ID NO: 333207 - DNA, 75 bp, synthetic construct
  source 1..75: mol_type = other DNA
atgtttgcagcaaagcccgaacccagtcaaagatgtatttctggcttcctcactactgggccaaatgatgaaaac

SEQ ID NO: 333208 - DNA, 75 bp, synthetic construct
  source 1..75: mol_type = other DNA
ccgcgttgctgtgcgcaactgacacgctggcacttggcgcaagtaaatacctgcaagagcaacgcatcgatacct

SEQ ID NO: 333209 - DNA, 75 bp, synthetic construct
  source 1..75: mol_type = other DNA
ttacgaccccatcatgatggaaagccagttttcaccacaattagttgccgaacatctgggcgttttgaaacgtcg

SEQ ID NO: 333210 - DNA, 75 bp, synthetic construct
  source 1..75: mol_type = other DNA
gattaatgatggtatcgaccgtggtctgtgggatttgcagaacaaagcagaacggcagaatgacattctggtgaa

SEQ ID NO: 333211 - DNA, 75 bp, synthetic construct
  source 1..75: mol_type = other DNA
aaccgccccgcctaaagaagccgccagaccgacattaatgcctcgagctcagagctacaaagatttgacccatct

SEQ ID NO: 333212 - DNA, 75 bp, synthetic construct
  source 1..75: mol_type = other DNA
tcaaactggccaagtgctggctggaaggctaaagattcaggagcgagttaaattccgcgcagacaaccgcattga

SEQ ID NO: 333213 - DNA, 75 bp, synthetic construct
  source 1..75: mol_type = other DNA
agagaaatatgagttagttcgtattgatcgcaatggatttacctctcaggtacaagcaccatatttgactgcgac

SEQ ID NO: 333214 - DNA, 75 bp, synthetic construct
  source 1..75: mol_type = other DNA
agatgattaaaatggcggaacatctgaaaggttactggccgaatcaactgagtttctcagaatcatgcggaatgg

SEQ ID NO: 333215 - DNA, 75 bp, synthetic construct
  source 1..75: mol_type = other DNA
actggcaagcggtgtggatgtttttcttgatatcgactggcagggtgcgcagcaaattcgccagaagatgccgca

SEQ ID NO: 333216 - DNA, 75 bp, synthetic construct
  source 1..75: mol_type = other DNA
atgccgcacgcgcggagtatctttattttaccgccgtccaaaattgaactggaccgccgtctacgcggtcgcggt

SEQ ID NO: 333217 - DNA, 75 bp, synthetic construct
  source 1..75: mol_type = other DNA
ctgctggcaggctacggtggtcgttgcgtaggtattcagaacgaacaactggttcaccatgacatcatcgacgct

SEQ ID NO: 333218 - DNA, 75 bp, synthetic construct
  source 1..75: mol_type = other DNA
attcagcgcggcggttccccggtaccttatgaccgtattctggcttcccgtatgggcgcttatgcgattgagcta

SEQ ID NO: 333219 - DNA, 75 bp, synthetic construct
  source 1..75: mol_type = other DNA
gaactgggatacagggagataaaacagacgatgcaactgagcaggctgacgctgagaagtaaaaagccggagctt

SEQ ID NO: 333220 - DNA, 75 bp, synthetic construct
  source 1..75: mol_type = other DNA
ctgacacgcctgctggaacaacactatggcctgacattggatgacacggcgttcagtgatgaaactgttattaag

SEQ ID NO: 333221 - DNA, 75 bp, synthetic construct
  source 1..75: mol_type = other DNA
catatcaatgccggtattacgctggctgatgccgttaactttctggtggaaaagtacgaactggttcgaatcgat

SEQ ID NO: 333222 - DNA, 75 bp, synthetic construct
  source 1..75: mol_type = other DNA
agtcaccttaccttcgggcggtagatattttacgggcccgacaggcaaccggcctcttgcggcaaagccatcatc

SEQ ID NO: 333223 - DNA, 75 bp, synthetic construct
  source 1..75: mol_type = other DNA
ctgaaaggttactggccgaatcaactgagtttctcagaatcatgcggaatggtgatgagaatgctgatgacattg

SEQ ID NO: 333224 - DNA, 75 bp, synthetic construct
  source 1..75: mol_type = other DNA
gactgtacgaaggaataataatcgagctaagatgaatgtcgagttcgactcatggatttgcaccagatgttgttg

SEQ ID NO: 333225 - DNA, 75 bp, synthetic construct
  source 1..75: mol_type = other DNA
cccagtgccgttattcaggcccgccagcgcctgggaagtgaggctgtccgccgggtgttcacgaaaacagcgcag

SEQ ID NO: 333226 - DNA, 75 bp, synthetic construct
  source 1..75: mol_type = other DNA
gaaaactgggtaaaggcgatcatctggtgaagctgaacatcagcccgcaggcacgaaaaaagtggccgggactgg

SEQ ID NO: 333227 - DNA, 75 bp, synthetic construct
  source 1..75: mol_type = other DNA
ccgctgaacgtgcgcaccagacagaaattatttgccgccttcttgaggtgtaccctgataaattaaatgatggtg

SEQ ID NO: 333228 - DNA, 75 bp, synthetic construct
  source 1..75: mol_type = other DNA
aaggttccccacgtcaggaaggtctaccctctctggaagagatgatgccggaagaaaaagtcgtcctgaataccc

SEQ ID NO: 333229 - DNA, 75 bp, synthetic construct
  source 1..75: mol_type = other DNA
atgttatcaatatttaaaacggggcaagcggcggatagtgttccggcggagaaaattcaggtgacatatcgtcgc

SEQ ID NO: 333230 - DNA, 75 bp, synthetic construct
  source 1..75: mol_type = other DNA
cgattatgttgtgcaacaggacgcattacagaaagagggtgatgcggtttccggcggcgtaacgttgcggaggaa

SEQ ID NO: 333231 - DNA, 75 bp, synthetic construct
  source 1..75: mol_type = other DNA
acttaaacgccttagcggtgaggtctgcgtattcctgagcgatgaacaggaaagaagagcgcttatttctaacga

SEQ ID NO: 333232 - DNA, 75 bp, synthetic construct
  source 1..75: mol_type = other DNA
ttgcggaaagagcgcagcaggttgaaatcatttgccgccttcttgaggtatgccctgacaaacttacggatgccg

SEQ ID NO: 333233 - DNA, 75 bp, synthetic construct
  source 1..75: mol_type = other DNA
gtgagttccatccttgagatttttttcccgctttgcgcctccgacaccatccgctggcagcgccgtacacccgac

SEQ ID NO: 333234 - DNA, 75 bp, synthetic construct
  source 1..75: mol_type = other DNA
gtcagcgatagccagcaccctgaaatcagcgtcactttccgacatcgaaatgcgtggtttcacctttgatcaaaa

SEQ ID NO: 333235 - DNA, 75 bp, synthetic construct
  source 1..75: mol_type = other DNA
ttgtacgagaccgacgagcgatacggcgagggcgtccggcgtatcagcctgctcggccagcatgtgctgtatgag

SEQ ID NO: 333236 - DNA, 75 bp, synthetic construct
  source 1..75: mol_type = other DNA
cgcccttgtcgtcacgtcactgccctcctcaccgccggcaggcaacgacctgacactcaccccggaggaaacgac

SEQ ID NO: 333237 - DNA, 75 bp, synthetic construct
  source 1..75: mol_type = other DNA
tcaaaaccctgactcatgacactcgcgtcgcgaactctcgtttctttgataacgatgtcaatcaggtgccaaaat

SEQ ID NO: 333238 - DNA, 75 bp, synthetic construct
  source 1..75: mol_type = other DNA
accagcagcatatgcgcaacattgcgcagtggttgcagacaaacggcattacccgcgccaccgttgcaccggact

SEQ ID NO: 333239 - DNA, 75 bp, synthetic construct
  source 1..75: mol_type = other DNA
gtgtgacgttatggagcgtcagcgaacaagtggcgcaaagccgcactcaggcagagaagcagttcttaaaactgt

SEQ ID NO: 333240 - DNA, 75 bp, synthetic construct
  source 1..75: mol_type = other DNA
catcatgctgccgggcaatcgccccttcgttgcccccagtgccgttattcaggcccgccagcgtctgggaagtga

SEQ ID NO: 333241 - DNA, 75 bp, synthetic construct
  source 1..75: mol_type = other DNA
tcaccattttacggtagtcgtggactaaaattatctgatagtgcccgttctgccttttcaatgatgctgtgtggt

SEQ ID NO: 333242 - DNA, 75 bp, synthetic construct
  source 1..75: mol_type = other DNA
tcaaacaagcagcatggatggggcatctggagcgtggcctttggaaaacggaaacacgctggaatggaaacgatc

SEQ ID NO: 333243 - DNA, 75 bp, synthetic construct
  source 1..75: mol_type = other DNA
taacactctgacgttaatggataaaggttattactcaccaggactgttaaatgcctggaacctggcgggagaaca

SEQ ID NO: 333244 - DNA, 75 bp, synthetic construct
  source 1..75: mol_type = other DNA
ccgggcctaaaggcgctgcgcaacgtctggggctgaaacgcacgactctgctgtcacggatgaagcgactgggaa

SEQ ID NO: 333245 - DNA, 75 bp, synthetic construct
  source 1..75: mol_type = other DNA
cgccgcatccgcactggtgcggcctgcccctgctggccatcgatggtgtgttctggcgcacaccggatacaccag

SEQ ID NO: 333246 - DNA, 75 bp, synthetic construct
  source 1..75: mol_type = other DNA
ccgtggtcggcattgcaccggaagaactgtctgcatgggctggtgcggacgccgaacgcctgaccgttacggctc

SEQ ID NO: 333247 - DNA, 75 bp, synthetic construct
  source 1..75: mol_type = other DNA
tctggcaggttgaactgcctgatatctcccgcaagcagataccgactattctgcctgccttactggaagaagagc

SEQ ID NO: 333248 - DNA, 75 bp, synthetic construct
  source 1..75: mol_type = other DNA
ctgaaaaaatatcgtccgcagaccgacgatgctgatctactcggtcaactgtctgcgatcgccagcactctgaaa

SEQ ID NO: 333249 - DNA, 75 bp, synthetic construct
  source 1..75: mol_type = other DNA
atttatgctggggttgcattgacgattgctggggctggcggtaatgatgagcaggcaatgtataatgttacgcaa

SEQ ID NO: 333250 - DNA, 75 bp, synthetic construct
  source 1..75: mol_type = other DNA
tggcaacaggcataaataaagttcgttgtgatgcaggaatgaaagagaaacatgtaaacacgctggatatattta

SEQ ID NO: 333251 - DNA, 75 bp, synthetic construct
  source 1..75: mol_type = other DNA
gcatcaccacgctggacaaccaggaagccttcttcatggtgggccaggacgttccggtattaaccggatctaccg

SEQ ID NO: 333252 - DNA, 75 bp, synthetic construct
  source 1..75: mol_type = other DNA
ctttgattcttacggacaactaccaaacaagcttgatgatattttcattggattctgtagaggtgaaggtcaccc

SEQ ID NO: 333253 - DNA, 75 bp, synthetic construct
  source 1..75: mol_type = other DNA
aagcacagtgacgagccatcttcaaagacaagcaaccagacttagctacgaattaccaagtgataaatattgcgc

SEQ ID NO: 333254 - DNA, 75 bp, synthetic construct
  source 1..75: mol_type = other DNA
gttattgagacaattaatcatcatgcggaagttggaaatatcagccttacaaccagtgaaccagactttgaattt

SEQ ID NO: 333255 - DNA, 75 bp, synthetic construct
  source 1..75: mol_type = other DNA
tacaacagaaagctattttatctcctaaagaaccttgatgaaattaactcagccaccgtgacaaatcatcttcag

SEQ ID NO: 333256 - DNA, 75 bp, synthetic construct
  source 1..75: mol_type = other DNA
atgccaaccagaaagagcacaaagaacactatcaagaattatctggctaattttgattcttacgagcaattacca

SEQ ID NO: 333257 - DNA, 75 bp, synthetic construct
  source 1..75: mol_type = other DNA
agctaccgtgacaaattatcttctgaaccgccccgggtttcctggagagtgttttatctgtgaactcaggctgcc

SEQ ID NO: 333258 - DNA, 75 bp, synthetic construct
  source 1..75: mol_type = other DNA
cgatatcaccctcagccataaagaaggcgtgagtgatgaggcggcggcggaacatattcgtcaacacattcctga

SEQ ID NO: 333259 - DNA, 75 bp, synthetic construct
  source 1..75: mol_type = other DNA
tttaaaaactttcttgatgagctttgattcttacgagcaactaccatcaaaaattgaagatttaattatcggcac

SEQ ID NO: 333260 - DNA, 75 bp, synthetic construct
  source 1..75: mol_type = other DNA
aaagttaattggtattgtcgagcatcatattaccgttggtaatatcagtcttacaaccagtgagccagactttga

SEQ ID NO: 333261 - DNA, 75 bp, synthetic construct
  source 1..75: mol_type = other DNA
attgatcgcggctgggatatagccacgggtgagaaagactttgacgatccgcagaaccagcaacaccgcccacgt

SEQ ID NO: 333262 - DNA, 75 bp, synthetic construct
  source 1..75: mol_type = other DNA
agaagcgaaattccgcattccggtttcggacactcaggcctatcgccagttcggtaactcggtggtcgtgccggt

SEQ ID NO: 333263 - DNA, 75 bp, synthetic construct
  source 1..75: mol_type = other DNA
atcgatcgcggctgggatatggccacgggtgagaaagactttgacgatccgcagaatcagcaacatcgtccacgt

SEQ ID NO: 333264 - DNA, 75 bp, synthetic construct
  source 1..75: mol_type = other DNA
tcaaaaattgaagatttaattatcggattttgcagaagtgaaggtcacccgaaatacaacaaaaaactattttat

SEQ ID NO: 333265 - DNA, 75 bp, synthetic construct
  source 1..75: mol_type = other DNA
atgacacaaacttaatgatgcaatgcttctttaaggcacgtaataagtacggattttttaaattaccctctgaaa

SEQ ID NO: 333266 - DNA, 75 bp, synthetic construct
  source 1..75: mol_type = other DNA
agagcaactcccccttttgatgaaaacattggcatttgccagcatcggacgacaaacccgctgtctcattgaatg

SEQ ID NO: 333267 - DNA, 75 bp, synthetic construct
  source 1..75: mol_type = other DNA
ctatgagcaagtatgtgttcccacatattggctctatacccattgctaacatcacggctcagcaattcattggag

SEQ ID NO: 333268 - DNA, 75 bp, synthetic construct
  source 1..75: mol_type = other DNA
caacctggaaaccctgaaacgcgttttacaacgcatcaatgaagtgatggattttgctgccaacagtgggctgat

SEQ ID NO: 333269 - DNA, 75 bp, synthetic construct
  source 1..75: mol_type = other DNA
atggcacgaaaaaccaccccactaactattacggagatcaaaaacgcacgaccaggggaaaaggaatacaccctg

SEQ ID NO: 333270 - DNA, 75 bp, synthetic construct
  source 1..75: mol_type = other DNA
cgaagtaactacctggaaaagcgcgtggtgcttatgcgctggtggggggaatttgtagaggccgcagcaaccgga

SEQ ID NO: 333271 - DNA, 75 bp, synthetic construct
  source 1..75: mol_type = other DNA
tcgtacagggggttttggagggattaacgggggtctgtatggtcattatccttaaggtcaagcgtccatgtacga

SEQ ID NO: 333272 - DNA, 75 bp, synthetic construct
  source 1..75: mol_type = other DNA
gttgggaatattgagccaatggaaaacgagcaaccagactttgagtttgacccgtatattttggaggaattttaa

SEQ ID NO: 333273 - DNA, 75 bp, synthetic construct
  source 1..75: mol_type = other DNA
gattttgcagaagtgaaggtcacccgaaatacaacaaaaaactattttatattctaaagaatcttgatgaaatta

SEQ ID NO: 333274 - DNA, 75 bp, synthetic construct
  source 1..75: mol_type = other DNA
aagtgttaatgtgctggtggggtgattttgtggaagcagccgcaaccggaacaaccatcgccagcgggcacagag

SEQ ID NO: 333275 - DNA, 75 bp, synthetic construct
  source 1..75: mol_type = other DNA
cgttgattcttacgagcaattatcacgcaagtttgaagatgtaattatcggattttgcagaagcgaaggtcaccc

SEQ ID NO: 333276 - DNA, 75 bp, synthetic construct
  source 1..75: mol_type = other DNA
acagcatcaaaaattatttgaataacttcgacagctacgaacaactaccatcaaaaattgaagatttaattatcg

SEQ ID NO: 333277 - DNA, 75 bp, synthetic construct
  source 1..75: mol_type = other DNA
gaaatctacgagcccctgttggatcacctggaacgttatgggccgcagcgccgtgaccagcgcccggacatgccg

SEQ ID NO: 333278 - DNA, 75 bp, synthetic construct
  source 1..75: mol_type = other DNA
ttgactggcatctgctggaaggcggagacaactggcatcacggcgtacagcgtctggtgcgcgatctgaaccaca

SEQ ID NO: 333279 - DNA, 75 bp, synthetic construct
  source 1..75: mol_type = other DNA
tcggtggttggacaatttaactactgggatggtcgacgtcacccgatgcgtttgcgcaaagagagcggcatctgg

SEQ ID NO: 333280 - DNA, 75 bp, synthetic construct
  source 1..75: mol_type = other DNA
cggatacaccagagaacgatgcagccttcccccgccagacacatgccgggaacccggcgctctacccgcaggtca

SEQ ID NO: 333281 - DNA, 75 bp, synthetic construct
  source 1..75: mol_type = other DNA
aagggagcgcaatatgaagagctcagaaaactgggtaaaggcgatcatctggtgaagctgaaaaccagcccgcag

SEQ ID NO: 333282 - DNA, 75 bp, synthetic construct
  source 1..75: mol_type = other DNA
cacgaaaacagcgcagctctggcataacgccacgccgcatccgcaactggtgcgacctgaccctgctggccatcg

SEQ ID NO: 333283 - DNA, 75 bp, synthetic construct
  source 1..75: mol_type = other DNA
gccaagtggatgggctttacccacctcgaactgttgccgattaatgaacatccgttcgatggcagttggggctat

SEQ ID NO: 333284 - DNA, 75 bp, synthetic construct
  source 1..75: mol_type = other DNA
gacaaacctgtctacaccgaatggtttgttgatatgagcaaaccgggcatcaaagtgaccaaacttgagaagctc

SEQ ID NO: 333285 - DNA, 75 bp, synthetic construct
  source 1..75: mol_type = other DNA
atcgacagtctgctgatcccggaagagcacggtggtctggacgcggggtttgttactctcgccgccgtgtggatg

SEQ ID NO: 333286 - DNA, 75 bp, synthetic construct
  source 1..75: mol_type = other DNA
cgggaacccggcgctctacccgcaggtcaaaatggtctgccagatggaactgaccagccatctgctgacggctgc

SEQ ID NO: 333287 - DNA, 75 bp, synthetic construct
  source 1..75: mol_type = other DNA
ctatagatgcacaaaaaacgggcaaaactacctggttcgcaaaactgcgtctaaagttaaactgggacctcgcga

SEQ ID NO: 333288 - DNA, 75 bp, synthetic construct
  source 1..75: mol_type = other DNA
ccagatggaactgaccagccatctgctgacggctgcagccttcggcacgatgaagaacagcgaaaatgagcttgc

SEQ ID NO: 333289 - DNA, 75 bp, synthetic construct
  source 1..75: mol_type = other DNA
gaaccgggcgctggctccgacgtgggtagcctgaaaacgacttatacccgtagagatggtaagatttatcttaat

SEQ ID NO: 333290 - DNA, 75 bp, synthetic construct
  source 1..75: mol_type = other DNA
gacattgcagggcgcttcaccgggacgtataccggagctgatgcacgatcttgcaagtatgggacaacttgtgaa

SEQ ID NO: 333291 - DNA, 75 bp, synthetic construct
  source 1..75: mol_type = other DNA
gtatctggacacagctgaaacagggagttccgggagtgtctgactcaccggtgattactgatgaaagcggttatc

SEQ ID NO: 333292 - DNA, 75 bp, synthetic construct
  source 1..75: mol_type = other DNA
accaatagttctttaattcgaaaagattgctgcatatatctcaatctggctggagccagagcaaacatttatttc

SEQ ID NO: 333293 - DNA, 75 bp, synthetic construct
  source 1..75: mol_type = other DNA
aacggtaactatcgaggatatgaatcagggtcaccagaccatattcacaaaatcgcgccgggggaatttaccctt

SEQ ID NO: 333294 - DNA, 75 bp, synthetic construct
  source 1..75: mol_type = other DNA
agaagaggatggctttggtgccagaatcacccagacactggggaataacagtgctgatgcttatgtttttaatgg

SEQ ID NO: 333295 - DNA, 75 bp, synthetic construct
  source 1..75: mol_type = other DNA
ggcacgtgcttttgagggcagtgagacatccggtgccggtattgttcctgtcattcaactggtgggaagtgacgg

SEQ ID NO: 333296 - DNA, 75 bp, synthetic construct
  source 1..75: mol_type = other DNA
gtgtttaatggcggcatacccgacagcagcacgtggcgcacagtcgacgggcttagtttcatttctcggatgacg

SEQ ID NO: 333297 - DNA, 75 bp, synthetic construct
  source 1..75: mol_type = other DNA
gactctacgaggacaaagattcctcaaaaagatttttgatcatgcactaaaagaaaaagtagatgatatctatgt

SEQ ID NO: 333298 - DNA, 75 bp, synthetic construct
  source 1..75: mol_type = other DNA
gacgataataccattgatggttttatgtatttaaaaattgaattcggtaaaataactgatgtcaccccatcaatt

SEQ ID NO: 333299 - DNA, 75 bp, synthetic construct
  source 1..75: mol_type = other DNA
gaagaaatggcggatctgtacagtaatcgctgggaaatcgaactgggatacagggagataaaacagacgatgcaa

SEQ ID NO: 333300 - DNA, 75 bp, synthetic construct
  source 1..75: mol_type = other DNA
accttaaaactcaaatcatcaataacgcacttaagaaagcgggtatccccaaacgtaaatcagcactacgagctg

SEQ ID NO: 333301 - DNA, 75 bp, synthetic construct
  source 1..75: mol_type = other DNA
ttgatctggtatcccgttacgattctctgcgtaacccactgacttctctgggggattacctcgaccccgaactca

SEQ ID NO: 333302 - DNA, 75 bp, synthetic construct
  source 1..75: mol_type = other DNA
ctcatgctaacagcattagaaaaatatacatatgcagaatgcatgatgtaacaaaaataaaaaacatgacatatt

SEQ ID NO: 333303 - DNA, 75 bp, synthetic construct
  source 1..75: mol_type = other DNA
tctccatcgcgggtatcgaaggcacccagatggcacattgcctgggtgcatactgcccgaacattctgttcccgt

SEQ ID NO: 333304 - DNA, 75 bp, synthetic construct
  source 1..75: mol_type = other DNA
atgctcgtgagtgcatcaccagcatggtatcccgcggtacattcccgcaactgaaccttgcgccggttaacttcg

SEQ ID NO: 333305 - DNA, 75 bp, synthetic construct
  source 1..75: mol_type = other DNA
tcaacgtgacggagtggtgggaaaacagtgacccgcccggcaccttccggcttgatattggtgtactggaaagtg

SEQ ID NO: 333306 - DNA, 75 bp, synthetic construct
  source 1..75: mol_type = other DNA
tgattgccgatgccaaacctgcaagccgccaccttattggcctgaacattacccgggacattcccggctatctgt

SEQ ID NO: 333307 - DNA, 75 bp, synthetic construct
  source 1..75: mol_type = other DNA
acgcgctgttatccgcgatgcgtatttcattcactgccataagggcactattggtgcgattcgccgtgtggtgga

SEQ ID NO: 333308 - DNA, 75 bp, synthetic construct
  source 1..75: mol_type = other DNA
atgagtaattcactgttaccgccatcagccagcaatttcatgcgttgtgccgaagccatcggagcgcgcattaca

SEQ ID NO: 333309 - DNA, 75 bp, synthetic construct
  source 1..75: mol_type = other DNA
gctggagcctgtagtcgacagtaaatatatacttacgccaaaactatgggagtacctttataactacgccaaaaa

SEQ ID NO: 333310 - DNA, 75 bp, synthetic construct
  source 1..75: mol_type = other DNA
gatgtctttgcggccgtcgccaaactgctgaagtcacgaattgaatttgcagcctcccagcgcttgcggcagttt

SEQ ID NO: 333311 - DNA, 75 bp, synthetic construct
  source 1..75: mol_type = other DNA
cagcaggctaatgggcttcgataaacccggggaaagtgttttccgtatccctgtgtccaatacacaggcttacag

SEQ ID NO: 333312 - DNA, 75 bp, synthetic construct
  source 1..75: mol_type = other DNA
ggatgaaaagtggccggaagcgacaaaacgcgccgttatccgcgatgcctatttcatccactgtcataaaggcac

SEQ ID NO: 333313 - DNA, 75 bp, synthetic construct
  source 1..75: mol_type = other DNA
tgccgcaaaagcctgtgcggaaattgaaaaaacaccggtcagtattcgtgagctgtggaacccggacacctgtcc

SEQ ID NO: 333314 - DNA, 75 bp, synthetic construct
  source 1..75: mol_type = other DNA
tgggggctgcaagctatcttggcgaagaaatcacgatctatccgtatatcaacgaaacaattatttccggcggca

SEQ ID NO: 333315 - DNA, 75 bp, synthetic construct
  source 1..75: mol_type = other DNA
cacgtcttgagcaaatcccacaaatcctgaaacgttttcgtcaggcagtgcttgcaagtgctttatcaataacca

SEQ ID NO: 333316 - DNA, 75 bp, synthetic construct
  source 1..75: mol_type = other DNA
taaacatgcggtgcgcacctacaaagctaaccattattgcgacccggcgacgcatcactttaatgaagatatccg

SEQ ID NO: 333317 - DNA, 75 bp, synthetic construct
  source 1..75: mol_type = other DNA
caaatttatgatgtaaaaacgctggtagcgcaacttaatggcgtgggagaaaaccactggagtccggcgatttta

SEQ ID NO: 333318 - DNA, 75 bp, synthetic construct
  source 1..75: mol_type = other DNA
atgggcgtcccctggtgccagctgaaaacggcacaatttccggagccggtcatcacgttctcgagtaattacgag

SEQ ID NO: 333319 - DNA, 75 bp, synthetic construct
  source 1..75: mol_type = other DNA
ggaatggatttctcatactttaggtatatccagtaagaccgtctggacgcatcgtcgtagagtcatggataaact

SEQ ID NO: 333320 - DNA, 75 bp, synthetic construct
  source 1..75: mol_type = other DNA
ctgcttgagccaaaaatcaaacaggcggtggcgttgcgtcagcaagaggcacaacatggccgacgttcacgataa

SEQ ID NO: 333321 - DNA, 75 bp, synthetic construct
  source 1..75: mol_type = other DNA
tggcaaacattttttaccgcagcaccgtgaacgcattgtgctggtgggtttccgtcgcgatcttaatctgaagca

SEQ ID NO: 333322 - DNA, 75 bp, synthetic construct
  source 1..75: mol_type = other DNA
ttatgggcggtgtaggtaacgacggtcatattgcatttaacgaaccggcgtcttctctggcttctcgtactcgta

SEQ ID NO: 333323 - DNA, 75 bp, synthetic construct
  source 1..75: mol_type = other DNA
aaatgcagaaagccgtacggtgttacctaaaataaatcaaaaagatttgagtgagataccagttccaactccgcc

SEQ ID NO: 333324 - DNA, 75 bp, synthetic construct
  source 1..75: mol_type = other DNA
tgcaaagtaactattgcaacgtttgatggtatgtgtagtgctgatatgtaccccattaatagtaaaattaatact

SEQ ID NO: 333325 - DNA, 75 bp, synthetic construct
  source 1..75: mol_type = other DNA
aacgatgttaatcaggtgccaaaatatgccctgactgtcggtgttggtacattgctggatgccgaagaagtgatg

SEQ ID NO: 333326 - DNA, 75 bp, synthetic construct
  source 1..75: mol_type = other DNA
cgctatatgaaagacggatctgaaattcttattgatcggggctggtctcatgaactgggagaaactgatttccat

SEQ ID NO: 333327 - DNA, 75 bp, synthetic construct
  source 1..75: mol_type = other DNA
gtggatttctcaatcattgtttatgccattattgcgctggttagtgtggtcattggctggctgtttgccagttat

SEQ ID NO: 333328 - DNA, 75 bp, synthetic construct
  source 1..75: mol_type = other DNA
ttgccggtgatgagcacgccgcacgccgttccctcgttcgcgattacgtcctctcgtttgctggccgtctgccgg

SEQ ID NO: 333329 - DNA, 75 bp, synthetic construct
  source 1..75: mol_type = other DNA
atgaacaaaatatattatcttaagtattgccatataaccaaaagcctgattgctgtctccgaactggcccgcagg

SEQ ID NO: 333330 - DNA, 75 bp, synthetic construct
  source 1..75: mol_type = other DNA
agctcttataatgggccgattttacacgcagataagcaatcagtatatcagcaggtaggtaagcagattttcaag

SEQ ID NO: 333331 - DNA, 75 bp, synthetic construct
  source 1..75: mol_type = other DNA
acgatgtgatctttgttgctcgtttacaaaaatcttgggcctcattaaattattcttgttctacatggttaaagg

SEQ ID NO: 333332 - DNA, 75 bp, synthetic construct
  source 1..75: mol_type = other DNA
aatccgcaccaacaacagcccgatgaatatcgctgcatttaaagtttttggcgctaacccgatcccgatgccgtt

SEQ ID NO: 333333 - DNA, 75 bp, synthetic construct
  source 1..75: mol_type = other DNA
gcgctgggtactcaggtccgcgacatgttcgttaaagatgttccgcaaggcgccgagctgctgaaagccgtggat

SEQ ID NO: 333334 - DNA, 75 bp, synthetic construct
  source 1..75: mol_type = other DNA
aaggggatgaaccgcttcccggtgccgttcacttcccgaataacccggatatccggtttgataaatatgacggta

SEQ ID NO: 333335 - DNA, 75 bp, synthetic construct
  source 1..75: mol_type = other DNA
atggtgtttacctcacagaggtaggaacagacaccgcaaaagagcagatttataaccgtttcacgctggtggcgc

SEQ ID NO: 333336 - DNA, 75 bp, synthetic construct
  source 1..75: mol_type = other DNA
ctgctgcaagcgcaggtgcacacacacatactgtcggtattggtgctcatacgcactctgttgcgattggttcac

SEQ ID NO: 333337 - DNA, 75 bp, synthetic construct
  source 1..75: mol_type = other DNA
attattcctggaacggtccggaagatgaggggaatcaggggcggattagccagatatcagtcctgcaaaatttca

SEQ ID NO: 333338 - DNA, 75 bp, synthetic construct
  source 1..75: mol_type = other DNA
cccgggcggtgcaacgccagaacaaattatcaaagcctattatcgggcaaaaccgtataccaaacagttggagtt

SEQ ID NO: 333339 - DNA, 75 bp, synthetic construct
  source 1..75: mol_type = other DNA
tgtcatcgtgcggctaccgcaggggaaagacgtggtgatcgacgccaaaatgacgctggtcgcctatgaacgcta

SEQ ID NO: 333340 - DNA, 75 bp, synthetic construct
  source 1..75: mol_type = other DNA
ccataccctgacccacgaaattcgcaatctccagcaactcaacgcgcaaatggcccaggaagcgatcaacctgac

SEQ ID NO: 333341 - DNA, 75 bp, synthetic construct
  source 1..75: mol_type = other DNA
atgaagtagccgacgctcatgaaaccggaaaggatgatcctaaaatcattgatggcaaacatttccttccgcagc

SEQ ID NO: 333342 - DNA, 75 bp, synthetic construct
  source 1..75: mol_type = other DNA
aggcaaactggtataacgacgaaaatagccatacatttaatcatgatatacgtgaggtcacgttaagcgctgatg

SEQ ID NO: 333343 - DNA, 75 bp, synthetic construct
  source 1..75: mol_type = other DNA
aatgaagacatttcagggacgagacattaccggtacagcagaacgccgctacctctttcctatgcagctgtcacg

SEQ ID NO: 333344 - DNA, 75 bp, synthetic construct
  source 1..75: mol_type = other DNA
aaacgctatatcacgggagttctggtagccgacctgtatgccgactgccaacaggctggggaggaagccgtatga

SEQ ID NO: 333345 - DNA, 75 bp, synthetic construct
  source 1..75: mol_type = other DNA
tcaacgctacaccaacccgtaccgataaaaagattgccatttccttacaggatctggagctggactgggttgact

SEQ ID NO: 333346 - DNA, 75 bp, synthetic construct
  source 1..75: mol_type = other DNA
taaaaagattgccatttccttacaggatctggaactggactgggttgactgggataacggtgcactgcggattgg

SEQ ID NO: 333347 - DNA, 75 bp, synthetic construct
  source 1..75: mol_type = other DNA
ccattattgcactggtcagtgtggccatcggctggctgtttgccagttatcaacatgcacagcaaaaagccgagc

SEQ ID NO: 333348 - DNA, 75 bp, synthetic construct
  source 1..75: mol_type = other DNA
acccgcagtttgtctttgtgtttgccgccgttcgtcgctcagaccgtaaaccccgtatctgtatgctccgcaccg

SEQ ID NO: 333349 - DNA, 75 bp, synthetic construct
  source 1..75: mol_type = other DNA
tcctgtcgctcgaagactatcttgccgctccatgtgaccgtctactgacggaaattatcattaaagatccatatc

SEQ ID NO: 333350 - DNA, 75 bp, synthetic construct
  source 1..75: mol_type = other DNA
ctcatttcacaaatcagcaaggcggccacgaatgaaaagcaacagaacattcagcacagcgaggaacagcagagc

SEQ ID NO: 333351 - DNA, 75 bp, synthetic construct
  source 1..75: mol_type = other DNA
attccagcaacagcgtgcagaactatatcctcaccatgaatcacttcgcaggtccgctgcagatgatggtcagcg

SEQ ID NO: 333352 - DNA, 75 bp, synthetic construct
  source 1..75: mol_type = other DNA
tgcttatcgctttgctaaccagcgctgcctcagcccatgcgcaaacggatataagcaccattgaagcccgactca

SEQ ID NO: 333353 - DNA, 75 bp, synthetic construct
  source 1..75: mol_type = other DNA
caggtccgcgacatgtttgtaaaagatgttccgcagggcgctgacctgctgaaagccgtggatgaggtgcaataa

SEQ ID NO: 333354 - DNA, 75 bp, synthetic construct
  source 1..75: mol_type = other DNA
tgcctgcggccgctgttcctgtgcctgatgatgtggctgaccgggtgcggcgggccgtctgtgaaatacgtgccg

SEQ ID NO: 333355 - DNA, 75 bp, synthetic construct
  source 1..75: mol_type = other DNA
atacatcgatataaaacctcgcgacgagtatccgttacatcttcaggttgtttatcggggaattgatgacgggag

SEQ ID NO: 333356 - DNA, 75 bp, synthetic construct
  source 1..75: mol_type = other DNA
aacattcctctgctctggaacagcgctgagctacagggatatgaaagcgatcgctggctgaccttcactcagatt

SEQ ID NO: 333357 - DNA, 75 bp, synthetic construct
  source 1..75: mol_type = other DNA
gagttccggctgtttaacctgtcgcagtgcgacggcctgccgcagtcgctgtccgagccgtttacccggcccgca

SEQ ID NO: 333358 - DNA, 75 bp, synthetic construct
  source 1..75: mol_type = other DNA
gtgccgctgctgtggaacagcgccgacaagcagagcttcgccagcgaccgctggctgacgttccatcaggtcagc

SEQ ID NO: 333359 - DNA, 75 bp, synthetic construct
  source 1..75: mol_type = other DNA
attgtcggtcgccccgatcgcaaaacgccgatgatgagcagtgcccttaacaacgtggtggtaaacccgccgtgg

SEQ ID NO: 333360 - DNA, 75 bp, synthetic construct
  source 1..75: mol_type = other DNA
ctgtggagattccagaaatttccaaggtagccaactacgtgttagacaagatttatgcgtcagatccgcatcaat

SEQ ID NO: 333361 - DNA, 75 bp, synthetic construct
  source 1..75: mol_type = other DNA
tattcctattggtctgtatttgctgaatccctcctcaggagcggatggtaagaagaatagtaatctgagcgcatt

SEQ ID NO: 333362 - DNA, 75 bp, synthetic construct
  source 1..75: mol_type = other DNA
caatctttacgtttcggttatgaaacatcacaaaccgactcgcaacatattgcggcgaaaaaattcaatgaatta

SEQ ID NO: 333363 - DNA, 75 bp, synthetic construct
  source 1..75: mol_type = other DNA
acaaactgcgtagcgcactggcaaccgattatgttgtgcaacaggacgcgttacagaaagagggtgatgcggttt

SEQ ID NO: 333364 - DNA, 75 bp, synthetic construct
  source 1..75: mol_type = other DNA
gttgtttgaatatctggccgagaatgcatctctttgggatgcaaggaacgtgacagagcgtctgatcactgcaac

SEQ ID NO: 333365 - DNA, 75 bp, synthetic construct
  source 1..75: mol_type = other DNA
atgagttatgaaatagaatggcgaccaggtgcgattgaggatataacggcgttgtttgaatatctggccgagaat

SEQ ID NO: 333366 - DNA, 75 bp, synthetic construct
  source 1..75: mol_type = other DNA
gtgagctccatgcttgagatttttttcccactttgcgccgctaatcccatccgttggcagcgccgtacactcgac

SEQ ID NO: 333367 - DNA, 75 bp, synthetic construct
  source 1..75: mol_type = other DNA
ttgtaaataatggtgttgtcgtcaatatcgccgtgtgggatggggaatatgagtggaagccaacggatggcattg

SEQ ID NO: 333368 - DNA, 75 bp, synthetic construct
  source 1..75: mol_type = other DNA
taccacttatggcgaaccggaagggaacctgctaacagggccgtggcagcctcgtgtcagctaccgaaaacagtg

SEQ ID NO: 333369 - DNA, 75 bp, synthetic construct
  source 1..75: mol_type = other DNA
ttgcaggagagaaccaaaggcgagctgaaattaaaactgttcccggatagcaccctcggtaacgcgcaggcgatg

SEQ ID NO: 333370 - DNA, 75 bp, synthetic construct
  source 1..75: mol_type = other DNA
ctgggaaaacggctggcgcgatgtcaccaactcacgccaaccggttaaaacgcctggcgacctgaaagggctgaa

SEQ ID NO: 333371 - DNA, 75 bp, synthetic construct
  source 1..75: mol_type = other DNA
cctttccctgacccatcacgcctattccccgcttctggtggtgatcaacaaagcgaagtttgatggcttaacccc

SEQ ID NO: 333372 - DNA, 75 bp, synthetic construct
  source 1..75: mol_type = other DNA
gtctggcgtgatgtcccgctgcgaccggatggcggagaacgccgatacacgcggcattgaacgcgtgaactatct

SEQ ID NO: 333373 - DNA, 75 bp, synthetic construct
  source 1..75: mol_type = other DNA
aagagattacaacgactggactggcggctccagtaacctgaatatccgacaggcttttgccgaactgggcgcatt

SEQ ID NO: 333374 - DNA, 75 bp, synthetic construct
  source 1..75: mol_type = other DNA
gaagggacggcaaaaacagcactgctatatggccatggcctgggtgcggaagtcaaagggattggctccgatggc

SEQ ID NO: 333375 - DNA, 75 bp, synthetic construct
  source 1..75: mol_type = other DNA
tatacagcctgatgctactgggaatgtaaatacaggttccggatttgcaaaaccaaacggcgatggggcgtttaa

SEQ ID NO: 333376 - DNA, 75 bp, synthetic construct
  source 1..75: mol_type = other DNA
gcgttacgtgacatgcttgcagaagggttgagtagtggtgaagctcagccgtgggaaaaggacgcgtttttacgg

SEQ ID NO: 333377 - DNA, 75 bp, synthetic construct
  source 1..75: mol_type = other DNA
atggccagaacaatgacagtggatctcggtgatgaactccgggaatttatagaatccctcatagaatcaggtgat

SEQ ID NO: 333378 - DNA, 75 bp, synthetic construct
  source 1..75: mol_type = other DNA
gcagaaggcctgagcagcggcgagcctgtggtgtgggaaaaggacgcgttcctgaaaaaagttaaagcaggcaca

SEQ ID NO: 333379 - DNA, 75 bp, synthetic construct
  source 1..75: mol_type = other DNA
gcgttacgtgacatgctcgcagaagggttgagtagtggtgaagctcagccgtgggaaaaggacgcgttcttacgg

SEQ ID NO: 333380 - DNA, 75 bp, synthetic construct
  source 1..75: mol_type = other DNA
atggccagaacgatgacggttgatctcggcgatgagttgcgtgaatttatcgagtccttaattgaatccggcgac

SEQ ID NO: 333381 - DNA, 75 bp, synthetic construct
  source 1..75: mol_type = other DNA
ggttgagtagtggtgaagctcagccgtgggaaaaggacgcgttcttacggaaggtgaaagcagggataaggaaat

SEQ ID NO: 333382 - DNA, 75 bp, synthetic construct
  source 1..75: mol_type = other DNA
agaaatggtttcccgctatatccgtaacattgacgcaggtaagaaagcgatgacgaagttcatgcgtgaggcgct

SEQ ID NO: 333383 - DNA, 75 bp, synthetic construct
  source 1..75: mol_type = other DNA
ccggacagaaaaggcatccatccgcagactcatcttgcttgcttcagcggtgttctgcaagcggatgcgtacgcc

SEQ ID NO: 333384 - DNA, 75 bp, synthetic construct
  source 1..75: mol_type = other DNA
atatttatctaatcaaagcattagaaaacgtgttctttgctgctttttctgatgtttgcgttatctctgttgatg

SEQ ID NO: 333385 - DNA, 75 bp, synthetic construct
  source 1..75: mol_type = other DNA
ctgaaagacaatccgctggaagcccaggttattgataaggaagttgcgaagggcggatatgatatgacgcagcgc

SEQ ID NO: 333386 - DNA, 75 bp, synthetic construct
  source 1..75: mol_type = other DNA
atgctgtatccgggcgtgaaacagtcagacctcagtgaagagcagaagcagacgataagtacgctggcaaccgtg

SEQ ID NO: 333387 - DNA, 75 bp, synthetic construct
  source 1..75: mol_type = other DNA
cgtgccaagaaggtcattcaggcctttgctgaccacaagaatccacgttcgatgaaattttataccctagtgttt

SEQ ID NO: 333388 - DNA, 75 bp, synthetic construct
  source 1..75: mol_type = other DNA
tatggatggggctggctccgctggctggcgcacagccacctaacgtcattatcggtactatcgtcggtacggcat

SEQ ID NO: 333389 - DNA, 75 bp, synthetic construct
  source 1..75: mol_type = other DNA
cttcatatcgtcgtttccccaacgatgatgaatttaaacgggaattaaaagttcgcgatctctataacttccgta

SEQ ID NO: 333390 - DNA, 75 bp, synthetic construct
  source 1..75: mol_type = other DNA
atgaagctgccattcacgcccgagccgatcgtctggcggagcttgcggttcaggtctggcaagcgccttctcttc

SEQ ID NO: 333391 - DNA, 75 bp, synthetic construct
  source 1..75: mol_type = other DNA
ttatcgcactgtcgttgaacgaggaacgggatatgtccttgctgatttcccgcaacttgaagaaggtacgcacat

SEQ ID NO: 333392 - DNA, 75 bp, synthetic construct
  source 1..75: mol_type = other DNA
cgcgaaaaccaggagtgatggatagcgggatggaggcgctggttgcggatattcgtacctatgcggattattttt

SEQ ID NO: 333393 - DNA, 75 bp, synthetic construct
  source 1..75: mol_type = other DNA
ttgttttcacttgctggtttatcagatgtgtcgggcgattatttagatttttcgacccgtggagaaaacaatcag

SEQ ID NO: 333394 - DNA, 75 bp, synthetic construct
  source 1..75: mol_type = other DNA
tacttatgcgcttgtcgctattaatcatgcaccacaaatactcccgggctccatatgggctggaggggatttata

SEQ ID NO: 333395 - DNA, 75 bp, synthetic construct
  source 1..75: mol_type = other DNA
ccctctggctaatgttcttggctgtgatccaatgttgttattgactgatgcttataaacaaaatcaggaggaagc

SEQ ID NO: 333396 - DNA, 75 bp, synthetic construct
  source 1..75: mol_type = other DNA
tatcgaacttaaaccacttcgaaaaagaatcctttgcattaaatattgcaaatctggtaggtgctgctcgtactt

SEQ ID NO: 333397 - DNA, 75 bp, synthetic construct
  source 1..75: mol_type = other DNA
aacaaaaaagattgccgtgatggcatccgcacccaacgcgaaagctgcggtctatccactgctgaactcgccacg

SEQ ID NO: 333398 - DNA, 75 bp, synthetic construct
  source 1..75: mol_type = other DNA
ggtcaattcttcgttatgtaaaaaagcgtcagtggatacatattttaatgttatggaagttaatttaggtgatgc

SEQ ID NO: 333399 - DNA, 75 bp, synthetic construct
  source 1..75: mol_type = other DNA
cggagagtatgaaccaactatcagtatgcttatcccactggcaaatattcttggctgcgatgcgatgtggctgtt

SEQ ID NO: 333400 - DNA, 75 bp, synthetic construct
  source 1..75: mol_type = other DNA
caaatttgctaagtgctgtacgcacattccatcttctggattgtgctcgctcaaaggaactgggcattgaggtaa

SEQ ID NO: 333401 - DNA, 75 bp, synthetic construct
  source 1..75: mol_type = other DNA
atgagcaaatcacttaacgcacgctgcatccgtcgctggaccgtcgaatttaaaggccgctgcgactcaaaatat

SEQ ID NO: 333402 - DNA, 75 bp, synthetic construct
  source 1..75: mol_type = other DNA
cacgccggagaaaagccagtgctggcgatagaacaggagattttacgaagcaagaacatcaacccatcgtctctg

SEQ ID NO: 333403 - DNA, 75 bp, synthetic construct
  source 1..75: mol_type = other DNA
gactctacggaaacaatccggcatgactgccggagatctccagcaagtcactggaataggcttaagcaccttgca

SEQ ID NO: 333404 - DNA, 75 bp, synthetic construct
  source 1..75: mol_type = other DNA
taggcggcgcggcgggcggtttgtttatcggactgatagcctggtggggtctgccgatgggcttaaacagcgcat

SEQ ID NO: 333405 - DNA, 75 bp, synthetic construct
  source 1..75: mol_type = other DNA
gaccgaagtgatggtgaaagtgggcgacaaagttgccgctgaacagtcactgatcaccgtagaaggcgataaagc

SEQ ID NO: 333406 - DNA, 75 bp, synthetic construct
  source 1..75: mol_type = other DNA
tcaaacctacagccgggatttaccttaagcggacttggcgctctggccgaagcctcgctaacctgtgacagggtg

SEQ ID NO: 333407 - DNA, 75 bp, synthetic construct
  source 1..75: mol_type = other DNA
gatgatagtcattgaggatttaaaggtttcgaacatgtcaaaatcagcagcgggtacggtagaccagccggggcg

SEQ ID NO: 333408 - DNA, 75 bp, synthetic construct
  source 1..75: mol_type = other DNA
tgtgaaaaatgtcactgtcagccagtcctgcggtaagcggtacatcagtattcagactgaaaatgaagtatcaac

SEQ ID NO: 333409 - DNA, 75 bp, synthetic construct
  source 1..75: mol_type = other DNA
cgccagttcgattgtcgattatctgatttttgcccgtaaatatattaccgagtgcgaagagcgctatggtgtgga

SEQ ID NO: 333410 - DNA, 75 bp, synthetic construct
  source 1..75: mol_type = other DNA
gagatttctgtggccatcccaagaaacttcaatgccgcacagtatcaactcgatggaatgttcgcgaatcagatg

SEQ ID NO: 333411 - DNA, 75 bp, synthetic construct
  source 1..75: mol_type = other DNA
aatatccgcagagactaccttcataaagtcacaacgaccgtcagcaaaaaccacgcaatgatagtcattgaggat

SEQ ID NO: 333412 - DNA, 75 bp, synthetic construct
  source 1..75: mol_type = other DNA
ttaccttcggctttcgagttgaaccggatgattacagtgtggaaaaaaatgccggaatacatcttcttacaggat

SEQ ID NO: 333413 - DNA, 75 bp, synthetic construct
  source 1..75: mol_type = other DNA
ggatagacgtctttctgctactgatgacaaactgctgatttttcgtcattgtcacgcgaaaccagtagatccgaa

SEQ ID NO: 333414 - DNA, 75 bp, synthetic construct
  source 1..75: mol_type = other DNA
attaccggcaggtgagcaccatgctgccgggggcaggagatcttcgctacgccgaaatgaaagatgcaaacagta

SEQ ID NO: 333415 - DNA, 75 bp, synthetic construct
  source 1..75: mol_type = other DNA
tccctcttgctcctttatcaatattatatgttcttttatcttactcagtttggatgatctatggaattattgcct

SEQ ID NO: 333416 - DNA, 75 bp, synthetic construct
  source 1..75: mol_type = other DNA
aagatctggatttgacttggacactggtagcaaatggttatcgtgtcagacaggcaaaccgatgcattgtttatc

SEQ ID NO: 333417 - DNA, 75 bp, synthetic construct
  source 1..75: mol_type = other DNA
atggataaagtgaatgtcgatttggcggcggcaggggtggcatttaaagaacgctacaatatgccagtgatcgct

SEQ ID NO: 333418 - DNA, 75 bp, synthetic construct
  source 1..75: mol_type = other DNA
tgcgggaggagctttatcaggttaaacaggtggttaaggggatgcggaacgggatgtttagtgtactgaacgaga

SEQ ID NO: 333419 - DNA, 75 bp, synthetic construct
  source 1..75: mol_type = other DNA
ctttgaaatgtcaggcgctgaacgcgataagaaagcagaagccgaatttggagagttagtagattacatcttgag

SEQ ID NO: 333420 - DNA, 75 bp, synthetic construct
  source 1..75: mol_type = other DNA
tttctgaaaaagcaatatcactcggcaacattcgtaaccaaaataccgacgaatgcagtggaagtatttgcctgc

SEQ ID NO: 333421 - DNA, 75 bp, synthetic construct
  source 1..75: mol_type = other DNA
gcgaatggcggaagcgtttgcctgcccgaagttgcactgtatgctgctggttacaggtcaatgaaatcaattact

SEQ ID NO: 333422 - DNA, 75 bp, synthetic construct
  source 1..75: mol_type = other DNA
tttactaccgcaagccacgcagtgaaatgggtgtgacttgctcaggccgccagaagcaacgcggaaaatcaattc

SEQ ID NO: 333423 - DNA, 75 bp, synthetic construct
  source 1..75: mol_type = other DNA
cacagacagtgaggaacctgttcaggaagccccgagaaaacgtttaagcctttctgaaaaagcaatatcactcgg

SEQ ID NO: 333424 - DNA, 75 bp, synthetic construct
  source 1..75: mol_type = other DNA
tcatggacggagccagtaaacgtgtttcaagaaccatttcgcttgccgaaacgcgtcagaaggaagttgaaggtg

SEQ ID NO: 333425 - DNA, 75 bp, synthetic construct
  source 1..75: mol_type = other DNA
gaatgcagtggaagtatttgtcttccaaatgtagctctttacgcggcaggctacaggaaatcaaaacaactgaca

SEQ ID NO: 333426 - DNA, 75 bp, synthetic construct
  source 1..75: mol_type = other DNA
tggaccggtataaacgcccacaaaaaatctcgctgcaagaggagaaagcccggcagaaaagccgcgaagagtact

SEQ ID NO: 333427 - DNA, 75 bp, synthetic construct
  source 1..75: mol_type = other DNA
gaagaacctgacggctgcctctctggcagttgtaaaagctgcccggaaggaaaagcctgtctgcgcgagtggtgg

SEQ ID NO: 333428 - DNA, 75 bp, synthetic construct
  source 1..75: mol_type = other DNA
attttgctggtgacactgcgtgccattcagggatttgccgtcggcggcgaatggggaggcgcggcgttgctttcc

SEQ ID NO: 333429 - DNA, 75 bp, synthetic construct
  source 1..75: mol_type = other DNA
ttatgtaactccggcgaccgttatgtccgcgagtacattatggggaaaaaagacgaaaaaaccggcgagtttgtt

SEQ ID NO: 333430 - DNA, 75 bp, synthetic construct
  source 1..75: mol_type = other DNA
ttgatgtgatgctggaacagcaaaacgaagacggcagcgtcgagttgctggaacgctgcccgccaagaatgggga

SEQ ID NO: 333431 - DNA, 75 bp, synthetic construct
  source 1..75: mol_type = other DNA
cgtaaccgtttatcgtcgcaatataacttaagtaatctggagccaaatattcagatctggaacgtagatttgcgc

SEQ ID NO: 333432 - DNA, 75 bp, synthetic construct
  source 1..75: mol_type = other DNA
aaacagacccaggtgatgaacgaaggttgggcaaccttctggcactacaccatccttaaccatctgtatgatgaa

SEQ ID NO: 333433 - DNA, 75 bp, synthetic construct
  source 1..75: mol_type = other DNA
ggtctggaagaattacgtagctttgatcgcatggaacgtgatccaacttttcgctggtcgatgcgtgtttataca

SEQ ID NO: 333434 - DNA, 75 bp, synthetic construct
  source 1..75: mol_type = other DNA
ccgacgcgcctgtttattcgcaccggcgacgtagacggcaaaccggctgcaggcggtatgttgttgcaggtaatg

SEQ ID NO: 333435 - DNA, 75 bp, synthetic construct
  source 1..75: mol_type = other DNA
aagatgagccggttacccaggcgcgattacaatcttacttcactcaggaggggtataccgtttccgttacagcga

SEQ ID NO: 333436 - DNA, 75 bp, synthetic construct
  source 1..75: mol_type = other DNA
ttaagccagattgataaatggatcgattttaagctggtgctggccgacgataaaaaagaatcattgaaacaaaaa

SEQ ID NO: 333437 - DNA, 75 bp, synthetic construct
  source 1..75: mol_type = other DNA
cattggcttacgcggatcgtgatcaccaacgaagatcagctcacggtttccactcatgcttttgattttttccag

SEQ ID NO: 333438 - DNA, 75 bp, synthetic construct
  source 1..75: mol_type = other DNA
ttgaggaatttaaaaaccacgaaaactacgttgtgatctcagatgatggctcacgtaaccccatctttagtaaag

SEQ ID NO: 333439 - DNA, 75 bp, synthetic construct
  source 1..75: mol_type = other DNA
ggcctatgaaatcgtcattaactctaacccgtgtatcgcttacctgatggaagagaacaccattaccatgcaggc

SEQ ID NO: 333440 - DNA, 75 bp, synthetic construct
  source 1..75: mol_type = other DNA
gaaagagggatataataaaagatgggaacattacactacgaataatgtttttgatttaatagaagagcgtgaagt

SEQ ID NO: 333441 - DNA, 75 bp, synthetic construct
  source 1..75: mol_type = other DNA
gtgaaattctgcgtattgtgcgtaaggtgagccagtatttttatccgcaaaaacagactcaggtgatgaacgaag

SEQ ID NO: 333442 - DNA, 75 bp, synthetic construct
  source 1..75: mol_type = other DNA
tgggcggctactcacaacagatcgtcgttcatgagcgatatgttctgcgtattcgtcacccgcaagagcagctgg

SEQ ID NO: 333443 - DNA, 75 bp, synthetic construct
  source 1..75: mol_type = other DNA
gttgtaaaaagcaacgacgtgcgtgaaccgtttaatgaagagaaattgcgcagcggaatgctgcgggcgctggaa

SEQ ID NO: 333444 - DNA, 75 bp, synthetic construct
  source 1..75: mol_type = other DNA
ggtaaataccacgtacctgcagtacgcgtcaccctggtctgtccgtactgcagtcagcatttttcggcagatgtg

SEQ ID NO: 333445 - DNA, 75 bp, synthetic construct
  source 1..75: mol_type = other DNA
tctttaacagtgaaggtaaaaccgtctggcggccgggacagaccagcctgtgggggctggcactcagcctgcccg

SEQ ID NO: 333446 - DNA, 75 bp, synthetic construct
  source 1..75: mol_type = other DNA
ttcaccaccagctctaaggaagatgccacttttggcctcggctggcgcgtgaatggtaatgccaccatgacgccg

SEQ ID NO: 333447 - DNA, 75 bp, synthetic construct
  source 1..75: mol_type = other DNA
atgaaaagtaaccgtaaacgcctggtaagggcgtatgataaagcattaaaggcttttgacgacctgcgacacaat

SEQ ID NO: 333448 - DNA, 75 bp, synthetic construct
  source 1..75: mol_type = other DNA
cctactccagcgtcggtatgccgattaactatccgcactggtcatttggtaagaagtttatcgaaactgagcgcc

SEQ ID NO: 333449 - DNA, 75 bp, synthetic construct
  source 1..75: mol_type = other DNA
caggagatgctcgatttttgcgccgaacatggcatcgtggctgatatagagatgattcgggccgatcaaattaat

SEQ ID NO: 333450 - DNA, 75 bp, synthetic construct
  source 1..75: mol_type = other DNA
tattcgccacccgcaagagcaactggcagcggtagccccattactgtgcgcggggatcactacttactccccgtt

SEQ ID NO: 333451 - DNA, 75 bp, synthetic construct
  source 1..75: mol_type = other DNA
caccaccgacacgctgtatgatctggcctcaaacaccaagatgtacgccactaactttgctctgcaaaagctaat

SEQ ID NO: 333452 - DNA, 75 bp, synthetic construct
  source 1..75: mol_type = other DNA
aacccgcactacaacagcattttgcgttgtccgaacggttacagctgggaaggcggtgttgataaaaacggtcag

SEQ ID NO: 333453 - DNA, 75 bp, synthetic construct
  source 1..75: mol_type = other DNA
ggctcagaaagaggtcaccattaagtccaatgcgaacgttcctgtgaccgtcaccgtggcgctggacgatcaggc

SEQ ID NO: 333454 - DNA, 75 bp, synthetic construct
  source 1..75: mol_type = other DNA
caaaaacctatgacctgaaagccaatgataaggtgacgttcaaagtcccttacggtggtctgatttacatcaagg

SEQ ID NO: 333455 - DNA, 75 bp, synthetic construct
  source 1..75: mol_type = other DNA
gtcaaaataatacccgtgttgttccggacgatgtacgcaaggtctttgccgaatatcccaacgtgatcaacgaga

SEQ ID NO: 333456 - DNA, 75 bp, synthetic construct
  source 1..75: mol_type = other DNA
cggcgaatacagaacaggtgtgcctgacgttctcctcggtgatcgagagtaaacgtttcgactcgctgtataagc

SEQ ID NO: 333457 - DNA, 75 bp, synthetic construct
  source 1..75: mol_type = other DNA
ggcgcgcggcggtgcgggtgaccgtctgctgatgtacgcgcagctgaaggaatgggcagagaaaaactttgatat

SEQ ID NO: 333458 - DNA, 75 bp, synthetic construct
  source 1..75: mol_type = other DNA
ggcttacagcacgctcgcgtcgcttaatctgccgaaaccggaaaaagggccggaaaccattaacaaggttaccga

SEQ ID NO: 333459 - DNA, 75 bp, synthetic construct
  source 1..75: mol_type = other DNA
cgtatactctggcggctaatggtacggtgaagtttacggttccttacggtggtctgatttatatcaagggcaata

SEQ ID NO: 333460 - DNA, 75 bp, synthetic construct
  source 1..75: mol_type = other DNA
ttacacctggcgaggacgttacttgcgtggcgggtaacacgacaattgccaccttcaacactcagtcagaagctg

SEQ ID NO: 333461 - DNA, 75 bp, synthetic construct
  source 1..75: mol_type = other DNA
aaccggatctgaacgcttccttcgtgtcggctaacgcggaacagttttatcagtatcaacccactgaaatcattc

SEQ ID NO: 333462 - DNA, 75 bp, synthetic construct
  source 1..75: mol_type = other DNA
cccaacgtgatcaacgagattatcaatctctcgttatccaatggcgaggcgttgagcgaaggcgatcaaaccttt

SEQ ID NO: 333463 - DNA, 75 bp, synthetic construct
  source 1..75: mol_type = other DNA
ctgaaaaaatcgctggtcgataacaacatgatctacggtgacggtagcagcaaagcaggcatgatgaacccgagc

SEQ ID NO: 333464 - DNA, 75 bp, synthetic construct
  source 1..75: mol_type = other DNA
ttaccagctgccgggggcgagcgagatgagcttcgagggcggtgtgagccagtcggcgtacaacacgctggcgtc

SEQ ID NO: 333465 - DNA, 75 bp, synthetic construct
  source 1..75: mol_type = other DNA
ccaaagaagaacgcgccgaactggtaaaagaaattaacgaaagcatcactgcaaatatggctaatgcaatcgctg

SEQ ID NO: 333466 - DNA, 75 bp, synthetic construct
  source 1..75: mol_type = other DNA
gaggcattaaaaccagtacaggcaagcgtagaagaattgcagaccaaccagaaagcaattaaaaaagaaattgcc

SEQ ID NO: 333467 - DNA, 75 bp, synthetic construct
  source 1..75: mol_type = other DNA
gtttaaatccctgggcaaagccgcgccgatggcagccaacgcagcaagcgaaggtaaaaaaggcgaagtcccgga

SEQ ID NO: 333468 - DNA, 75 bp, synthetic construct
  source 1..75: mol_type = other DNA
tcgtgaatattacccggaagctgaaattatcgctaattaccagtcgctggagggaacgcttgccccgctgggtca

SEQ ID NO: 333469 - DNA, 75 bp, synthetic construct
  source 1..75: mol_type = other DNA
ataccaaattaaccgctaatacaatccgccgggaaacgtataacgggagagagcatattgtcgtcccttcctaca

SEQ ID NO: 333470 - DNA, 75 bp, synthetic construct
  source 1..75: mol_type = other DNA
tggacttcactgataaagaagtgacgattgctactaacgctgaaaatgctcaagtttgcacgtatgaaaaacagg

SEQ ID NO: 333471 - DNA, 75 bp, synthetic construct
  source 1..75: mol_type = other DNA
gcctggaactacgggctggcggcggcgggcacgtttattaccttgctaccgttgttaagcctcccggcgttgcca

SEQ ID NO: 333472 - DNA, 75 bp, synthetic construct
  source 1..75: mol_type = other DNA
gttttggtttgttgattatcggcgtgttgttgttgctggtactggtggagttgcgtcgttttcgccagacgccgc

SEQ ID NO: 333473 - DNA, 75 bp, synthetic construct
  source 1..75: mol_type = other DNA
ccggttacatccgccagtgtcagtggctttggcttgttgattatcggtgtattgttgttgctggtgctggtggag

SEQ ID NO: 333474 - DNA, 75 bp, synthetic construct
  source 1..75: mol_type = other DNA
acgcgccgcagtagcaaaagtacacggcgaaattgttgctaacgcattaaatggtgaagcgttagaagcaatgtt

SEQ ID NO: 333475 - DNA, 75 bp, synthetic construct
  source 1..75: mol_type = other DNA
taccgttgacggtaaatttgtttccgcatttagcccggaaggattaaacacgggtttttgtggagcgtggaacag

SEQ ID NO: 333476 - DNA, 75 bp, synthetic construct
  source 1..75: mol_type = other DNA
caagtttgcgcatatgaaaaacaggctgataaaattattctcaataatggcgagcttgcaaccaatgaggaaagt

SEQ ID NO: 333477 - DNA, 75 bp, synthetic construct
  source 1..75: mol_type = other DNA
aacctgataaaaaaccgacacttgaagttgccagctggctggaggatgtcaatggcaaacaggaaacgcgttatg

SEQ ID NO: 333478 - DNA, 75 bp, synthetic construct
  source 1..75: mol_type = other DNA
aaaagaacgacgtataaagtagttggtgaattattaaagatacatgagcttattaaacagcgtatttttttgaag

SEQ ID NO: 333479 - DNA, 75 bp, synthetic construct
  source 1..75: mol_type = other DNA
gaggctcttatcagtgaggaagtcggaaaattaggtggaaattacacgagatatgtcgatgacataactattagt

SEQ ID NO: 333480 - DNA, 75 bp, synthetic construct
  source 1..75: mol_type = other DNA
aaattgtacatggtgtaaaagtaatcaaagagcttagaccaacacaaaaaagaaaagataatataagggtgtgtc

SEQ ID NO: 333481 - DNA, 75 bp, synthetic construct
  source 1..75: mol_type = other DNA
catttgctttccatgaggatttcactggtatcacggttaaacagttgaccagctatggcgatctgaatccggaag

SEQ ID NO: 333482 - DNA, 75 bp, synthetic construct
  source 1..75: mol_type = other DNA
gttgcgctgaaccgtccgccaaaagtgacgaaaacctatgatctggatgctcatggcacggtgaaattcaaggtg

SEQ ID NO: 333483 - DNA, 75 bp, synthetic construct
  source 1..75: mol_type = other DNA
atgatgaatccagcgatggctttacctttacaccaggcgacaaagtcacctgtgtggcagggaacaacacgacaa

SEQ ID NO: 333484 - DNA, 75 bp, synthetic construct
  source 1..75: mol_type = other DNA
tggaccggtacaaacgcccgcaaaaaatctcgctgcaagaagagaaagcccggcagaaaagtcgcgaagagtatc

SEQ ID NO: 333485 - DNA, 75 bp, synthetic construct
  source 1..75: mol_type = other DNA
aagtcaccatttccaaaacgcagcgccagtatcaggtgggctatgtcagcgcccgccatcagaacagtaaaacag

SEQ ID NO: 333486 - DNA, 75 bp, synthetic construct
  source 1..75: mol_type = other DNA
tggtttcgtgagcgccttatcgcccaccgtctcacctctgtaaatctgtcacgtttaccttacgaacctaaactt

SEQ ID NO: 333487 - DNA, 75 bp, synthetic construct
  source 1..75: mol_type = other DNA
ctcacaatgtattttaagattaggggattagtaaatacattaaagcagcaaggtgataagaatcatgctgagtat

SEQ ID NO: 333488 - DNA, 75 bp, synthetic construct
  source 1..75: mol_type = other DNA
ctggctggaaacgctgcatttcgcgatgcgtgatttcaaagatgagagttttatcagccagtttctgtcaccgaa

SEQ ID NO: 333489 - DNA, 75 bp, synthetic construct
  source 1..75: mol_type = other DNA
catccttaaccatctgtatgatgaagggaaagtaacggaacgttttatgctggagtttttgcacagccacaccaa

SEQ ID NO: 333490 - DNA, 75 bp, synthetic construct
  source 1..75: mol_type = other DNA
aagtggcgaacaacgtgctggcgctgtacatgcaggatcgctatctcggcaagatgaaccgtgtcgctgacgaca

SEQ ID NO: 333491 - DNA, 75 bp, synthetic construct
  source 1..75: mol_type = other DNA
agcaggatgtgaccgatctgatcgcctatctgaacaaaggtggctcggtgctgatcatggaaaacgtgatgagca

SEQ ID NO: 333492 - DNA, 75 bp, synthetic construct
  source 1..75: mol_type = other DNA
cagcaagctggtcaatgaagaggtggaaaacaatgctgcgactgataaagcgccgtccacccatacctcaacggt

SEQ ID NO: 333493 - DNA, 75 bp, synthetic construct
  source 1..75: mol_type = other DNA
acgttcaccgagttcctgaactgctacgccaacgatgcttacgatgggggcaccaagtgctccgcggaactgaag

SEQ ID NO: 333494 - DNA, 75 bp, synthetic construct
  source 1..75: mol_type = other DNA
agtttaaaacgggccaggctaaggagatcgataccgcgatttgcggtaaaaccaacaactgcaactccgctcgct

SEQ ID NO: 333495 - DNA, 75 bp, synthetic construct
  source 1..75: mol_type = other DNA
gttgaacgaaggcgataaacccgttacgttgccaaacgaattcatcgaacagtttaaaacgggccaggctaagga

SEQ ID NO: 333496 - DNA, 75 bp, synthetic construct
  source 1..75: mol_type = other DNA
tgaccgtctgctgatgtacgcacagctgaaggaatgggcagagaaaaactttgatatcaagaaatggtatccaga

SEQ ID NO: 333497 - DNA, 75 bp, synthetic construct
  source 1..75: mol_type = other DNA
ggttgcaaatggcggaggtgtgcaggttgactgttggtcggattcctccaccacacggagtgaataaccgttttc

SEQ ID NO: 333498 - DNA, 75 bp, synthetic construct
  source 1..75: mol_type = other DNA
ctgtcaatggctctgaacaaatcggtggtgaacaacgatccgcaagggtatccggatcgcgttcgtcagcgtcgc

SEQ ID NO: 333499 - DNA, 75 bp, synthetic construct
  source 1..75: mol_type = other DNA
atgaacagcagcttctcgacgaacagcaccacgctgccgacgacgccgctgaacgactggctgatctggcacgaa

SEQ ID NO: 333500 - DNA, 75 bp, synthetic construct
  source 1..75: mol_type = other DNA
aaggcagtaaaggtgagcgtctgaacagtgttgatctggaacgtctgtaccagaacatgtcggtctggctgtgga

SEQ ID NO: 333501 - DNA, 75 bp, synthetic construct
  source 1..75: mol_type = other DNA
gatgctgtgtgcctcctgggtcgcccagacggatctttcggagttctttaagaaatggaatccgggtgcgaatgc

SEQ ID NO: 333502 - DNA, 75 bp, synthetic construct
  source 1..75: mol_type = other DNA
cgttgcccgaacggttacagctggaacgggggcgttaataaagacggacagtgtacgctcaacagcgacccggat

SEQ ID NO: 333503 - DNA, 75 bp, synthetic construct
  source 1..75: mol_type = other DNA
ggtggtacggatgctgcggccttacctgcagcgttagccaatgtgaaaggctgggtcagcgcgaaattgcaataa

SEQ ID NO: 333504 - DNA, 75 bp, synthetic construct
  source 1..75: mol_type = other DNA
aggttgagcaggtgctgaagactgaagaagagcagtttgcccgtactctggagcgcggtctggcgctgctggatg

SEQ ID NO: 333505 - DNA, 75 bp, synthetic construct
  source 1..75: mol_type = other DNA
tgttccgcacgctgatccaggcggtagcgaaagtcactggcgcgaccgatctgagcaataaatcgctgcgcgtaa

SEQ ID NO: 333506 - DNA, 75 bp, synthetic construct
  source 1..75: mol_type = other DNA
tgctcaggcagcgggtggcgcggcatccactacgggtttttgggacggtccgccgctggtaagcgctgcagcgtt

SEQ ID NO: 333507 - DNA, 75 bp, synthetic construct
  source 1..75: mol_type = other DNA
ctacgcaggaaatacggaacattacgcatcgcttgtttcagcagtggtcgagtcagttccagagtattcagtcat

SEQ ID NO: 333508 - DNA, 75 bp, synthetic construct
  source 1..75: mol_type = other DNA
acctcagcctgttgaaaacgcacccggcgtttcgcgcagtattcctcgctcgttttatctcaattgtgtctctgg

SEQ ID NO: 333509 - DNA, 75 bp, synthetic construct
  source 1..75: mol_type = other DNA
ggtgcatacattgatgcggatgaatctcacctgggcgcaggttggcggtattttaaaatatacccgtccggcgtg

SEQ ID NO: 333510 - DNA, 75 bp, synthetic construct
  source 1..75: mol_type = other DNA
caaggcattcgtctggtgcatacattgatgcggatgaatctcacctgggcgcaggttggcggtattttaaaatat

SEQ ID NO: 333511 - DNA, 75 bp, synthetic construct
  source 1..75: mol_type = other DNA
acagtcgttttccattaacgtggattatggaagctgccgacgacatctcctattgtgtggcagaccttgaagatg

SEQ ID NO: 333512 - DNA, 75 bp, synthetic construct
  source 1..75: mol_type = other DNA
gacttctcacacaacgaagcgatgaaaccagaagagattcgtgcggtcgaagacctggtgaacgcacagattcgc

SEQ ID NO: 333513 - DNA, 75 bp, synthetic construct
  source 1..75: mol_type = other DNA
atgcaggccaggaagcggtagtcgtgctggatcaaacgccattctatgcagaatctggcggtcaggttggcgata

SEQ ID NO: 333514 - DNA, 75 bp, synthetic construct
  source 1..75: mol_type = other DNA
aaataaactggcatcgtcgttatcgttcgccgcaaggtattaaaacggaacatgaaattctgcgaatctttgaaa

SEQ ID NO: 333515 - DNA, 75 bp, synthetic construct
  source 1..75: mol_type = other DNA
ggcgcatggaagccgcgggctggctgcgcaccctgcgcgcgccgaacctgcagctggccgtcgagctgacggagg

SEQ ID NO: 333516 - DNA, 75 bp, synthetic construct
  source 1..75: mol_type = other DNA
tggctggcggcacaggatgtgaagaacgagctggcagggcgtaagacctatgaataccaggagctggcatcactg

SEQ ID NO: 333517 - DNA, 75 bp, synthetic construct
  source 1..75: mol_type = other DNA
agttctcaacctcgtcatggcgccgcgcggttctgtctctcgaagaacatcagaaagcgtggttgctgtggagtt

SEQ ID NO: 333518 - DNA, 75 bp, synthetic construct
  source 1..75: mol_type = other DNA
accttctatactggactggcgttgtttaattcggcgaatgggcatctacaaacagaagtggagccttttgacgtc

SEQ ID NO: 333519 - DNA, 75 bp, synthetic construct
  source 1..75: mol_type = other DNA
caaatctacggtgccaccctgcgtgctatcgggcacagtatgagcgaagaaatcatttatgacgccgaaggccac

SEQ ID NO: 333520 - DNA, 75 bp, synthetic construct
  source 1..75: mol_type = other DNA
gatgaagtgactggaaaaatgataacgcgggataatccaccaatcccgggaaagcaatcgctggcgaagggggcg

SEQ ID NO: 333521 - DNA, 75 bp, synthetic construct
  source 1..75: mol_type = other DNA
tgcgtgaacagctcattatcgccaccgccgatttgagtggagcaacaaaaggtcagcttgaagcctggcaggaga

SEQ ID NO: 333522 - DNA, 75 bp, synthetic construct
  source 1..75: mol_type = other DNA
cgcgggataatccaccaatcccggggaaacaatcgctggcgaaggggacgtcaattcctctggtaagtcaggttg

SEQ ID NO: 333523 - DNA, 75 bp, synthetic construct
  source 1..75: mol_type = other DNA
tcagcctgccgcgcgcaagggcgacaaactggagtgcagcgcggcaatcgtggaaggttcgccggacgtctttat

SEQ ID NO: 333524 - DNA, 75 bp, synthetic construct
  source 1..75: mol_type = other DNA
cgcggttctgtctctcgaagaacatcagaaagcgtggttgctgtggagttacagcgaaagtgttcgctgggagca

SEQ ID NO: 333525 - DNA, 75 bp, synthetic construct
  source 1..75: mol_type = other DNA
caccggtaaaccgttaacggaagaaaatgcccgtctgcaattacgcaaagccagcggcaatatcgtcaccttcta

SEQ ID NO: 333526 - DNA, 75 bp, synthetic construct
  source 1..75: mol_type = other DNA
cttaagcgaggcggagattgataattacgtgcgtaaagaacatcccctgcactgcgctggcagttttaagagtga

SEQ ID NO: 333527 - DNA, 75 bp, synthetic construct
  source 1..75: mol_type = other DNA
gcgggttttttgtgccacttatctcggatagacatggtgaatgcgctggtggaggagataagggtgatttttgaa

SEQ ID NO: 333528 - DNA, 75 bp, synthetic construct
  source 1..75: mol_type = other DNA
tctgtaccgccagggtcaacggcctggaggaaaccatcctctacagccgggacgccgcaggccgcctggcagaag

SEQ ID NO: 333529 - DNA, 75 bp, synthetic construct
  source 1..75: mol_type = other DNA
gcgccatgcgcggggcgttcggctaacagacgcaggcaggcacttcatacagcctctcacggcggccgacgatca

SEQ ID NO: 333530 - DNA, 75 bp, synthetic construct
  source 1..75: mol_type = other DNA
cgttggtaaaactgcgattgcggaaggtctcgcctggcgtattgtccagggcgatgtaccggaagtgatggctga

SEQ ID NO: 333531 - DNA, 75 bp, synthetic construct
  source 1..75: mol_type = other DNA
cttccatgtacagtcctccggtcgcagtgaggttaccggtgcgaatgttctggttgctatctttagcgaacagga

SEQ ID NO: 333532 - DNA, 75 bp, synthetic construct
  source 1..75: mol_type = other DNA
ctgaaaaattaggacgttatggactagggagtgcagaaacgcacgttaaggatttcatgataagacacaaaaaaa

SEQ ID NO: 333533 - DNA, 75 bp, synthetic construct
  source 1..75: mol_type = other DNA
attatttatcttctactatagaaaatagtaaaaactataactactctggcaggcttggcgcagcagaaatacgct

SEQ ID NO: 333534 - DNA, 75 bp, synthetic construct
  source 1..75: mol_type = other DNA
attatctatcttctaccatcgaaaatagtaaaaattccaattactccggaagacttggtgctacagaaattcgtt

SEQ ID NO: 333535 - DNA, 75 bp, synthetic construct
  source 1..75: mol_type = other DNA
atgattcagttcaaaccaacgcgaaacatcgacctgatcgaagcggtaggaaatcaccctgacattatcgccggg

SEQ ID NO: 333536 - DNA, 75 bp, synthetic construct
  source 1..75: mol_type = other DNA
acaagcctgaatgccgttactttgaggtgaacgtgcacgggcagttcggcggaattgtttactatcaggagattc

SEQ ID NO: 333537 - DNA, 75 bp, synthetic construct
  source 1..75: mol_type = other DNA
taagcgtgtaggaaccatcaagaaatacttcaaaggcgtggatgacgtgacgttttacagcgccacacgcgaaga

SEQ ID NO: 333538 - DNA, 75 bp, synthetic construct
  source 1..75: mol_type = other DNA
ttttgatcagggcggtttgctgactgatgcggtcatcaagcatccacatgcggtgctgctgctggacgaaatcga

SEQ ID NO: 333539 - DNA, 75 bp, synthetic construct
  source 1..75: mol_type = other DNA
gaaaggttacgaccgggcaatgggcgcacgtccgatggcgcgtgtcatccaggacaacctgaaaaaaccgctcgc

SEQ ID NO: 333540 - DNA, 75 bp, synthetic construct
  source 1..75: mol_type = other DNA
tggaaatccatgttgatgccattaaaccaggcgacaaagtgttggtcgtagacgatttgctggcaactggcggca

SEQ ID NO: 333541 - DNA, 75 bp, synthetic construct
  source 1..75: mol_type = other DNA
agcactgatgtcaaaaatcaaatcagatattcgccgtaacaaagatcatttggcgacaaatgaacaacttaaagc

SEQ ID NO: 333542 - DNA, 75 bp, synthetic construct
  source 1..75: mol_type = other DNA
taagtgatgattcccgtttccggtgtgcttttttgcgttggcattcgagtatggataatgcaacttcctgtaatt

SEQ ID NO: 333543 - DNA, 75 bp, synthetic construct
  source 1..75: mol_type = other DNA
caccgttacagctgccactgagcgcgaagcacgcgcgcagctgccgcacgcacatctgatttttgtcgcctgtat

SEQ ID NO: 333544 - DNA, 75 bp, synthetic construct
  source 1..75: mol_type = other DNA
cctacggtgttcaggctgatgaacaggattgtcaggacgccattgcctttattcaaccggatcgcgtattaaccg

SEQ ID NO: 333545 - DNA, 75 bp, synthetic construct
  source 1..75: mol_type = other DNA
ccgttaccgctgccactgagcacgaagcacgcgcccagctgccgcacgcacatcttgtttttgtcgcccgtatcc

SEQ ID NO: 333546 - DNA, 75 bp, synthetic construct
  source 1..75: mol_type = other DNA
gccctgtacggcgcgaatatccgcatgatgcaggaatggcaggcaaaacaaaggcgaccacgaaagggtcgccag

SEQ ID NO: 333547 - DNA, 75 bp, synthetic construct
  source 1..75: mol_type = other DNA
ttataaaacggggatcgggattaccaccccgctggagttaacggcgatacatgacgcgccagcgtctttttttgt

SEQ ID NO: 333548 - DNA, 75 bp, synthetic construct
  source 1..75: mol_type = other DNA
gatattcgccgtaacaaagatcatctggcgacaaatgaacaacttaaagcgctgttggcgtcgcaccagcaacca

SEQ ID NO: 333549 - DNA, 75 bp, synthetic construct
  source 1..75: mol_type = other DNA
cagtatgttgtactctcaaaatagaatacttgtggcaaagaaaggcaaaaccacattgatagccatagctggttt

SEQ ID NO: 333550 - DNA, 75 bp, synthetic construct
  source 1..75: mol_type = other DNA
cggcaacgaatgaacgtctgaaagagtttctggagtcgcatcttagagcaccagtgaggttcaagcagatattta

SEQ ID NO: 333551 - DNA, 75 bp, synthetic construct
  source 1..75: mol_type = other DNA
attgaatgagtatgaatactctcttgtcaaatggaataatgaagttgagctcctcaatattgaaaaaaaagcact

SEQ ID NO: 333552 - DNA, 75 bp, synthetic construct
  source 1..75: mol_type = other DNA
agataacatggcaaggattgccgccatcctccactacgtcaatggtaacaaaggtgatatctcattgcatatcac

SEQ ID NO: 333553 - DNA, 75 bp, synthetic construct
  source 1..75: mol_type = other DNA
tccataggacttatgtctgatgaagctggcactatttttgacggctatgcgctgaatgaactgccgttcatcaat

SEQ ID NO: 333554 - DNA, 75 bp, synthetic construct
  source 1..75: mol_type = other DNA
tgtactgagttgtggattggtcgagtgggggacaactactggagtggtaactgcaagatttatgaggagtacacg

SEQ ID NO: 333555 - DNA, 75 bp, synthetic construct
  source 1..75: mol_type = other DNA
ctgttgggggagtttctgattgctgtgaaaagccaaccaatatatctcttgccgattatctgaacctaataatgg

SEQ ID NO: 333556 - DNA, 75 bp, synthetic construct
  source 1..75: mol_type = other DNA
gtttgggttggtaaatcaggtcaggaaactaaagtatggtccggccctgacggcaatttccctccagaaacggct

SEQ ID NO: 333557 - DNA, 75 bp, synthetic construct
  source 1..75: mol_type = other DNA
caatgccaccggcggtgatggatatccgcgccttgataacaaaccgggctatgtgaataccggctttattgatgc

SEQ ID NO: 333558 - DNA, 75 bp, synthetic construct
  source 1..75: mol_type = other DNA
tgaagccagattcaggtgcctacccgcaatttgccaacgttagctttgtggcgaaagacggtaaactgaacgacc

SEQ ID NO: 333559 - DNA, 75 bp, synthetic construct
  source 1..75: mol_type = other DNA
aaagaatttctggaagtcgtgttatcaaaggctctcactgctgtctgctgtaagctggaagtattcgtgacgacc

SEQ ID NO: 333560 - DNA, 75 bp, synthetic construct
  source 1..75: mol_type = other DNA
catgaatgcagattaccaaatcacctggctgtaagtaaccacagagaactttacctgactgtgggggcgagttgt

SEQ ID NO: 333561 - DNA, 75 bp, synthetic construct
  source 1..75: mol_type = other DNA
ttgtggatgagtactgtcatacccacaaactttcgcgctctaaggtaatcaacgcattactcagcgccacagcac

SEQ ID NO: 333562 - DNA, 75 bp, synthetic construct
  source 1..75: mol_type = other DNA
ggcggatcttgggattgagggagaggtacaacatggaagctatattgcttcctggctgaaagcgctaaaaaacga

SEQ ID NO: 333563 - DNA, 75 bp, synthetic construct
  source 1..75: mol_type = other DNA
tctctgtaagtttttttctgacggggtgtgcaaccattgtcggagataaaacgcagactgtacaggtaaacagta

SEQ ID NO: 333564 - DNA, 75 bp, synthetic construct
  source 1..75: mol_type = other DNA
ctgaagtaatacggaagttgcgccataagaaatttatgcgctcgatagctagtaaaagaagcacaacagaaagaa

SEQ ID NO: 333565 - DNA, 75 bp, synthetic construct
  source 1..75: mol_type = other DNA
atgaccaatatattgtcattaatgcatctgtcggaatttctgagagttatgtagcgacacccgaaaaagaagccg

SEQ ID NO: 333566 - DNA, 75 bp, synthetic construct
  source 1..75: mol_type = other DNA
gaattaccagagaagatggaaaaacggaattttctttttacacccccgaaattactgaagatccacagatgttat

SEQ ID NO: 333567 - DNA, 75 bp, synthetic construct
  source 1..75: mol_type = other DNA
atccctgtctcggcggatatccatggcttgagaacaatgaacagccgaaaggaacggttgcagtttatccgaaga

SEQ ID NO: 333568 - DNA, 75 bp, synthetic construct
  source 1..75: mol_type = other DNA
taaccctgtctgcaaatacatatgcagctacatattgtgatcttttgtggcaaatccctcattttcaggctcaat

SEQ ID NO: 333569 - DNA, 75 bp, synthetic construct
  source 1..75: mol_type = other DNA
gataatcctgtttcggttaagttatatttcaaagatactcaaaaaactgttactgaagccttttgcggtaaagat

SEQ ID NO: 333570 - DNA, 75 bp, synthetic construct
  source 1..75: mol_type = other DNA
ccaccttatttatttcctgcaatcaccaggggaaattatcgtcattcgcatccttaaccaaaaccaggacgctac

SEQ ID NO: 333571 - DNA, 75 bp, synthetic construct
  source 1..75: mol_type = other DNA
gagtcatcaatctgtaccgatttacttgaaacgatcattgtctcggatgtgcgttcatttgctcaggatccccga

SEQ ID NO: 333572 - DNA, 75 bp, synthetic construct
  source 1..75: mol_type = other DNA
gagacatttattgcgagagcaaaaagtccatgtcttggcggatatccatggcttgagaacaatgaacaaccaaaa

SEQ ID NO: 333573 - DNA, 75 bp, synthetic construct
  source 1..75: mol_type = other DNA
accagtccgtacaaattctatcagttctggatcaatactgcggacgctgatgtctaccgtttcctgaagttcttc

SEQ ID NO: 333574 - DNA, 75 bp, synthetic construct
  source 1..75: mol_type = other DNA
tcaccattaacggtgaaaaacagtccgatcctgaatacttctttaaagaagaagatcgtctgtttggtcgtttta

SEQ ID NO: 333575 - DNA, 75 bp, synthetic construct
  source 1..75: mol_type = other DNA
tcccatctcaatggcaatctgattggccccggcggatttctcgaaattgcgcaaaatgcccgtaaagtggtgttc

SEQ ID NO: 333576 - DNA, 75 bp, synthetic construct
  source 1..75: mol_type = other DNA
ttagtggaatatatacatattgggtttggtttgatagtggtctctatcgcttacctaatggaattagttttaatg

SEQ ID NO: 333577 - DNA, 75 bp, synthetic construct
  source 1..75: mol_type = other DNA
atgatcaacaaagaagcggttaagcagcgtctcaaccgtgaagatcagggtatttcgttcaccgagttttcttac

SEQ ID NO: 333578 - DNA, 75 bp, synthetic construct
  source 1..75: mol_type = other DNA
cgatcctgaatacttctttaaagaagaagatcgcctgtttggtcgttatactctgctgcgtcgcggtaaaaagaa

SEQ ID NO: 333579 - DNA, 75 bp, synthetic construct
  source 1..75: mol_type = other DNA
gaggtacaacatgaaagctatattgcttcctggctgaaagagctgaaaaacgacaagcgttatattttcaaagcg

SEQ ID NO: 333580 - DNA, 75 bp, synthetic construct
  source 1..75: mol_type = other DNA
atgttaacgaaagatctttctattaccttttgcggcgttaagtttcccaatccgttttgcctctcttcttcgcca

SEQ ID NO: 333581 - DNA, 75 bp, synthetic construct
  source 1..75: mol_type = other DNA
atggcgagcgggttgtcacattatcttgccgatcaggggtttgattcgttgcaggaaatggtaggtctggcgaat

SEQ ID NO: 333582 - DNA, 75 bp, synthetic construct
  source 1..75: mol_type = other DNA
tttttattgctcggcgcagcaacgttacaggtgaccaccggcattatgcagtacggctatcggatagtggaagat

SEQ ID NO: 333583 - DNA, 75 bp, synthetic construct
  source 1..75: mol_type = other DNA
gcggtcacgtttgcccggtgggttgtattgatctcggcgaagtgaagtttaaaaagggagagaaagaacacccgg

SEQ ID NO: 333584 - DNA, 75 bp, synthetic construct
  source 1..75: mol_type = other DNA
gcggcgacattgcaggtcactaccggcatcatgcagtacggttatcgtattgtggaagatatgacgagcggtctg

SEQ ID NO: 333585 - DNA, 75 bp, synthetic construct
  source 1..75: mol_type = other DNA
ttgtctatccccgtatcaatcttgataaatgtgttggctgtggacgctgctatatttcctgggtgatgcctctaa

SEQ ID NO: 333586 - DNA, 75 bp, synthetic construct
  source 1..75: mol_type = other DNA
ctacacacctggtggtcagagcgcgccggaaccgtcaccacttgaccgccgcatgttcggcaagaaaatgcgtca

SEQ ID NO: 333587 - DNA, 75 bp, synthetic construct
  source 1..75: mol_type = other DNA
cgaaaccggcaccggctttggttcactggtgggaactggcagttatatcacgcctgatttcgccttcccgtatgg

SEQ ID NO: 333588 - DNA, 75 bp, synthetic construct
  source 1..75: mol_type = other DNA
tatcaccatggcgttagcggaactggcggaacaattgcagatcgaccaactggaaattattgaacgtaatcgtgt

SEQ ID NO: 333589 - DNA, 75 bp, synthetic construct
  source 1..75: mol_type = other DNA
caggcaacgcggcgcgtatggctgcggaaaatctgcgggagaaaatcctgttccacggtgcacaaatgttgggtg

SEQ ID NO: 333590 - DNA, 75 bp, synthetic construct
  source 1..75: mol_type = other DNA
tcgaagcactgaagctcatcgacgttgaatatgaagtgcttaaaccggtaatgtcgatcgacgaagcaatggcgg

SEQ ID NO: 333591 - DNA, 75 bp, synthetic construct
  source 1..75: mol_type = other DNA
cattcggggcgaaatcgatctcggaaatcggtgtaaatggcgcagctccggcgattgctaccgcaattcacgatg

SEQ ID NO: 333592 - DNA, 75 bp, synthetic construct
  source 1..75: mol_type = other DNA
tacggctatcgcatcgtagaagatatggcgagcgggttatcgcattatctcgccgatcagggatttgattcgttg

SEQ ID NO: 333593 - DNA, 75 bp, synthetic construct
  source 1..75: mol_type = other DNA
tcattaccccggtctataaaattgatcccctgaaacccgtaacagtaaaaaaccggataagatcactgttgtttg

SEQ ID NO: 333594 - DNA, 75 bp, synthetic construct
  source 1..75: mol_type = other DNA
tgaaagacgatcccatgtccggccatgtttcatttccgggcgcagcggcagtcaggttaaactgctgtggtccac

SEQ ID NO: 333595 - DNA, 75 bp, synthetic construct
  source 1..75: mol_type = other DNA
tgcggtgtgaagccggataactggagtcataactacgccgattactggaatgccatgtgcgccatatttgagcga

SEQ ID NO: 333596 - DNA, 75 bp, synthetic construct
  source 1..75: mol_type = other DNA
tttaccgtgtttaacgttcagcaaatcgacggcctggccctgacaactgaaactgtcagcccggaagcaaccttt

SEQ ID NO: 333597 - DNA, 75 bp, synthetic construct
  source 1..75: mol_type = other DNA
tgctggcgggctggtgtgcgatgaagaagatgcgcgtaatgcgattaacgcgggtgttgtggcgctttccaccac

SEQ ID NO: 333598 - DNA, 75 bp, synthetic construct
  source 1..75: mol_type = other DNA
gaagatgcgcgtaatgcgattaacgcgggtgtcgtggcgctttccaccacgaataccggagtctggacgttagcg

SEQ ID NO: 333599 - DNA, 75 bp, synthetic construct
  source 1..75: mol_type = other DNA
gtgggagtgacaacaaaaaactggtccgagacatttactgaacgctgggttgcaatgaagcacatttttctacag

SEQ ID NO: 333600 - DNA, 75 bp, synthetic construct
  source 1..75: mol_type = other DNA
acgggagcgcctgaaaaaattaatctggctggcggcgcaggatgtcaggggatgggtaaccgggcatgagaacta

SEQ ID NO: 333601 - DNA, 75 bp, synthetic construct
  source 1..75: mol_type = other DNA
agttttcgacatcatcgtggcggcgggctgttctgtctcttgaagagcatcataaagcctggttgttgtggtgtt

SEQ ID NO: 333602 - DNA, 75 bp, synthetic construct
  source 1..75: mol_type = other DNA
ccaggtggcaatcacccagtgggcgtgggcagagttccgggaacagcttggtgtgaagaaagtggctggcaagac

SEQ ID NO: 333603 - DNA, 75 bp, synthetic construct
  source 1..75: mol_type = other DNA
cggagctggcgggtaaggatgtgtatcagcatcaggacctggccgccctgtgtggcgttaagccggataactggt

SEQ ID NO: 333604 - DNA, 75 bp, synthetic construct
  source 1..75: mol_type = other DNA
ccaggtggcgatcacccagtgggcgtgggcagagttccgggaacagctcggcgcgaagaaggtggccggcaagac

SEQ ID NO: 333605 - DNA, 75 bp, synthetic construct
  source 1..75: mol_type = other DNA
cacggatgtggtgacgaaagcgattgccggtctcagcgaccgcaaggtgcagttcacgtatgccgacctgctggc

SEQ ID NO: 333606 - DNA, 75 bp, synthetic construct
  source 1..75: mol_type = other DNA
tgcgggtcggaatggcatgtgggagatggagggcgtgccggttgagtcgttttccacgcgcagtcaggaactccg

SEQ ID NO: 333607 - DNA, 75 bp, synthetic construct
  source 1..75: mol_type = other DNA
tggccgccggcaatacgccctttacagggatcaaggtcggtcacggctgggtggaaaacccgggcaggtcagtca

SEQ ID NO: 333608 - DNA, 75 bp, synthetic construct
  source 1..75: mol_type = other DNA
aaacctacgagcccatgctggattactgggaactggttgtgcaaaacgcatcaacaattgcctctcatacagcaa

SEQ ID NO: 333609 - DNA, 75 bp, synthetic construct
  source 1..75: mol_type = other DNA
cagcccactgaccgatcgggacggacggcttgaggctatcggcggggagggacgaattatgggcaatgaagacgc

SEQ ID NO: 333610 - DNA, 75 bp, synthetic construct
  source 1..75: mol_type = other DNA
gcgctgtttacggaactgctgaaagggaagctgccggatggcagcgacctgacccgaatacaggacggcgccaac

SEQ ID NO: 333611 - DNA, 75 bp, synthetic construct
  source 1..75: mol_type = other DNA
aagaaaagttaagcctgacacactggaaaaaataccgtgtgctactgaatcgcgttcagccggaaaatgcccctg

SEQ ID NO: 333612 - DNA, 75 bp, synthetic construct
  source 1..75: mol_type = other DNA
cgcacaaaaacacgcgcagaaagctgaacaacatgagcagcagactaaacaatatgcgcaggatgcagcgaccgc

SEQ ID NO: 333613 - DNA, 75 bp, synthetic construct
  source 1..75: mol_type = other DNA
cgtttgttgataatcctgaactggtgaatgtcgctgtttcaagggcccgaaataaatttacgctggtgactggta

SEQ ID NO: 333614 - DNA, 75 bp, synthetic construct
  source 1..75: mol_type = other DNA
atgaaagggctgggtctggcaatttctatgtcggggatggtggcgtgcggcatgttgttctgcctcgcttctggt

SEQ ID NO: 333615 - DNA, 75 bp, synthetic construct
  source 1..75: mol_type = other DNA
gtttgcaaaactagcggttataggaatatgctttattatgttttatattaatatatatcaccttcagattttaaa

SEQ ID NO: 333616 - DNA, 75 bp, synthetic construct
  source 1..75: mol_type = other DNA
ccaagtcattgtttgctctagctatggctattgctggtgcccattttttacacgacctagatcacaatgctgtca

SEQ ID NO: 333617 - DNA, 75 bp, synthetic construct
  source 1..75: mol_type = other DNA
ataggattagtccggttaagacgaagaagttcagtgagttgggctttactgagcgcaagcatcttcaggagtggt

SEQ ID NO: 333618 - DNA, 75 bp, synthetic construct
  source 1..75: mol_type = other DNA
cgggtttatgattcatccaataatgaaccacgctatattgtccatgccagagtaggaatgaattatcaattatat

SEQ ID NO: 333619 - DNA, 75 bp, synthetic construct
  source 1..75: mol_type = other DNA
gaatgaattatcaattatatgtccgtaattacagtcgtaacaccaactacgagatcgttgctacggttgatggcc

SEQ ID NO: 333620 - DNA, 75 bp, synthetic construct
  source 1..75: mol_type = other DNA
ttcggttgagggctttatcaacatatttgatcgcctgggcattggctatgtggaactacttgagcgccagccggg

SEQ ID NO: 333621 - DNA, 75 bp, synthetic construct
  source 1..75: mol_type = other DNA
cgccgttaccgttttgaggtggaaacccttaaccccttcatcatccattatggcgcatacgaaggggagtatatc

SEQ ID NO: 333622 - DNA, 75 bp, synthetic construct
  source 1..75: mol_type = other DNA
ttgttcactggcaccggattatcagcgtccggcaatgcccgtgccgcagcagttctcactcagccagaacggcct

SEQ ID NO: 333623 - DNA, 75 bp, synthetic construct
  source 1..75: mol_type = other DNA
tggaagctgaacacgcgttaatggcggctaatgccaatattggcgccgcacgcgcggcatttttcccgtctatca

SEQ ID NO: 333624 - DNA, 75 bp, synthetic construct
  source 1..75: mol_type = other DNA
atctgtgatctatttggcaaaattatgctttattgtttacccttgtcagactgcccgtcataaggcggcggagtg

SEQ ID NO: 333625 - DNA, 75 bp, synthetic construct
  source 1..75: mol_type = other DNA
tgtgattgccaaaaagcaactcaatcagctatccacgcttaaagataaagtcagcctgctaacgcgtcagtggga

SEQ ID NO: 333626 - DNA, 75 bp, synthetic construct
  source 1..75: mol_type = other DNA
catcctaaatttggacatcaggcagtaaatagtgaaataccagtaaaaacagaggaacccgttgtgattaaaaag

SEQ ID NO: 333627 - DNA, 75 bp, synthetic construct
  source 1..75: mol_type = other DNA
acctgcacaccggcattactgaacctgctggcgtatgaccgggacataacccgctttgatggtgagccactgagt

SEQ ID NO: 333628 - DNA, 75 bp, synthetic construct
  source 1..75: mol_type = other DNA
atgaaactggtaagccataaagaactgcataacgagtggatgcaggacgatgaatattgcgctgcatggcaggaa

SEQ ID NO: 333629 - DNA, 75 bp, synthetic construct
  source 1..75: mol_type = other DNA
ctactatctcacgtatggagaagaacgctgcgcgaatgagtattcagacgctgattcggtacgccagagcctgcg

SEQ ID NO: 333630 - DNA, 75 bp, synthetic construct
  source 1..75: mol_type = other DNA
ttcgccatgggggttgatttttccgtttggcctgaatgagagtcagttaatggcggttgaacgggcattttcctc

SEQ ID NO: 333631 - DNA, 75 bp, synthetic construct
  source 1..75: mol_type = other DNA
atggtcatatggtaccagcctcagtgaatgtatcccttaacggagatggaaattattatgcacctatcgaaagag

SEQ ID NO: 333632 - DNA, 75 bp, synthetic construct
  source 1..75: mol_type = other DNA
agccagacgggtgctggtggtggggcagggtggcgaggctgatagccatgaaatcgctatgctggctgaaaagct

SEQ ID NO: 333633 - DNA, 75 bp, synthetic construct
  source 1..75: mol_type = other DNA
atgaatgtcgtaatagtgacaataaatcaggacaatgcagctatcgcaggctggctggcagaacaggatttcagc

SEQ ID NO: 333634 - DNA, 75 bp, synthetic construct
  source 1..75: mol_type = other DNA
aaatgtcacgccaggaagtccgtgagcgcgtgaaggcgatgatgatgaaagtcggcttgctacctaacctgatta

SEQ ID NO: 333635 - DNA, 75 bp, synthetic construct
  source 1..75: mol_type = other DNA
gctcgtgctcttattcttgaaccgaagctgattatctgcgatgagccggtgtcggcgctggacgtgtcaattcag

SEQ ID NO: 333636 - DNA, 75 bp, synthetic construct
  source 1..75: mol_type = other DNA
gctgatctttattgcccacgatctggcagtggtaaaacatatttccgatcgtgtactggtcatgtatctcggcca

SEQ ID NO: 333637 - DNA, 75 bp, synthetic construct
  source 1..75: mol_type = other DNA
gcgtaaaagctggtggcagggcgtgtggtatgaaatccgctggtatctgtttctggcaaaacgtccgagtgccga

SEQ ID NO: 333638 - DNA, 75 bp, synthetic construct
  source 1..75: mol_type = other DNA
tcagtcactatgtctttgaagcacccgtgcggatatggcactggctgacagtgttatgcatggcggtgttgatgg

SEQ ID NO: 333639 - DNA, 75 bp, synthetic construct
  source 1..75: mol_type = other DNA
tgaacagttattcatgcgtaaccgggccagttgtgactttgttgtttactataaggtcgggaagactccattagg

SEQ ID NO: 333640 - DNA, 75 bp, synthetic construct
  source 1..75: mol_type = other DNA
acgccacgttgccctctggaatgcaacaactgaacattgtcccgggtgcgcttccggactggctggttagcacag

SEQ ID NO: 333641 - DNA, 75 bp, synthetic construct
  source 1..75: mol_type = other DNA
gcgcgagtgatgaacggtggttttgatgcggaaaaagtgattggaatttccgggcatttgctggcgccagagatt

SEQ ID NO: 333642 - DNA, 75 bp, synthetic construct
  source 1..75: mol_type = other DNA
atgcaacagaaaagcgacaacgttgtcagtcactatgtcttcgaagcgccagtgcggatctggcattggctgacg

SEQ ID NO: 333643 - DNA, 75 bp, synthetic construct
  source 1..75: mol_type = other DNA
cggagtgcgccaaaacacgtcctgtgctggaggggagtttcagacacgccgtttcttgcctgaaagtcgatccgc

SEQ ID NO: 333644 - DNA, 75 bp, synthetic construct
  source 1..75: mol_type = other DNA
cggcgaccgatacactgaccattaagggcacaccgccgaatctgcgcgatcaattgcagcgccggacttctggca

SEQ ID NO: 333645 - DNA, 75 bp, synthetic construct
  source 1..75: mol_type = other DNA
gtggttctcaacgacaatgaaatgtcgatttccgaaaatgtcggcgcgctcaacaaccatctggcgcagctgctt

SEQ ID NO: 333646 - DNA, 75 bp, synthetic construct
  source 1..75: mol_type = other DNA
agatgctctataccggctatcactataacgatggtccgtcggcggtgcgctacccgcgcggcaacgcgctaggcg

SEQ ID NO: 333647 - DNA, 75 bp, synthetic construct
  source 1..75: mol_type = other DNA
cctttgagcatggtgtggagttgcgacttatccagccaggtaagccaacgcagaacggatttattgagagtttca

SEQ ID NO: 333648 - DNA, 75 bp, synthetic construct
  source 1..75: mol_type = other DNA
atgcctgaatgagcactggttcagcgatatcgttcacgcaaggaaaatcattaatgactggcgacaggattataa

SEQ ID NO: 333649 - DNA, 75 bp, synthetic construct
  source 1..75: mol_type = other DNA
aatttgcggctgaaaaaggctacgaactggaagagagtttcccggcagatcgtagcacgctgcgtcagttgacta

SEQ ID NO: 333650 - DNA, 75 bp, synthetic construct
  source 1..75: mol_type = other DNA
cgtgagccgttccagcgggcacttcgcctccgggctgggcacggtcgaactgaccgtggcgctgcactacgtcta

SEQ ID NO: 333651 - DNA, 75 bp, synthetic construct
  source 1..75: mol_type = other DNA
gatcaggtgctgcatgacgtggcgattcaaaagcttccggtcctgttcgccatcgaccgtgcgggcattgttggt

SEQ ID NO: 333652 - DNA, 75 bp, synthetic construct
  source 1..75: mol_type = other DNA
cgtacccgttgcccgattgccggtccggagtgcgccaaaacacgtcctgtgctggaggggagtttcagacacgcc

SEQ ID NO: 333653 - DNA, 75 bp, synthetic construct
  source 1..75: mol_type = other DNA
atgtggggcatcaggcttatccgcataaaaattttgaccggacgccgcgacaaaatcggcaccatccgtcagaaa

SEQ ID NO: 333654 - DNA, 75 bp, synthetic construct
  source 1..75: mol_type = other DNA
gcgaaggcgggaaaaaagttttctctggcgttccgcccattaaagagctactcaaacgtaccgaagaacatatta

SEQ ID NO: 333655 - DNA, 75 bp, synthetic construct
  source 1..75: mol_type = other DNA
tccgcaaggaactcaggaagaaatgcgcgccgaactcggcctcgatgccgctggtatggaagccaaaatcaaggc

SEQ ID NO: 333656 - DNA, 75 bp, synthetic construct
  source 1..75: mol_type = other DNA
aacaacgcgtgatccgcgcgctggcgggtttttcgggttacgggcgggtgatggttgtcggtggcggggcggaga

SEQ ID NO: 333657 - DNA, 75 bp, synthetic construct
  source 1..75: mol_type = other DNA
atgaaacagtatggtttttacgttgactcctcgcgttgctctggctgcaaaacctgccaggtaagctgcaaggat

SEQ ID NO: 333658 - DNA, 75 bp, synthetic construct
  source 1..75: mol_type = other DNA
atgaaaaaatggaaagtacgcgttgcgctggtgggattgttcgtactgctggcaggttgttccagtaatgcgcag

SEQ ID NO: 333659 - DNA, 75 bp, synthetic construct
  source 1..75: mol_type = other DNA
acacgctccagcaccactacaccacggaagccaatatgctggcgcgtatcgtgctgggtggcatgactgcaaaac

SEQ ID NO: 333660 - DNA, 75 bp, synthetic construct
  source 1..75: mol_type = other DNA
catggaatatgagcagcgcaaaggagaactcacccgcctgtcgcaacgctggctcgctaaacgtctggaggtaaa

SEQ ID NO: 333661 - DNA, 75 bp, synthetic construct
  source 1..75: mol_type = other DNA
gaacctgactaaggttcctgatgagcgcttttatctgagctcatccccgcagtttgatttagtcatgggaatgat

SEQ ID NO: 333662 - DNA, 75 bp, synthetic construct
  source 1..75: mol_type = other DNA
gtaaaaacaggcgaactcatagggatggacgcgattgaactcaggatgggggacctacgccgctatatcattacc

SEQ ID NO: 333663 - DNA, 75 bp, synthetic construct
  source 1..75: mol_type = other DNA
atgacgcccgtggaatatattttaagtgagaacaaaaattgcaatatgtggtggacccatacatctccttgcctt

SEQ ID NO: 333664 - DNA, 75 bp, synthetic construct
  source 1..75: mol_type = other DNA
aatatctggtgctgtataacagcaaaaggccccataaggcgctcgcactaatgacgcccgtggaatatattttaa

SEQ ID NO: 333665 - DNA, 75 bp, synthetic construct
  source 1..75: mol_type = other DNA
cagagatgatcgttattagttattcgactactgttccttccggctacgaccgcgtttatagcattcgtattaacg

SEQ ID NO: 333666 - DNA, 75 bp, synthetic construct
  source 1..75: mol_type = other DNA
ctggatgactcgcctcacggaagcaggctattactgctttgaggcgcgcagtgccgatgaagccataaaagctat

SEQ ID NO: 333667 - DNA, 75 bp, synthetic construct
  source 1..75: mol_type = other DNA
atgcttacatctaaaaaagaaatgcagagttctaaaaacaaacaagaggagaatttaacgttattgttaactaat

SEQ ID NO: 333668 - DNA, 75 bp, synthetic construct
  source 1..75: mol_type = other DNA
ccactacacaaacgagagcaatatgatttctcgtatcgttcttggagggctaactgctaagcagtgggcgcggat

SEQ ID NO: 333669 - DNA, 75 bp, synthetic construct
  source 1..75: mol_type = other DNA
gtcatcgccgctgggcgagtggcgagaaacgggcgtcaaactttctaccatgttgaacgtttttgggctgcatta

SEQ ID NO: 333670 - DNA, 75 bp, synthetic construct
  source 1..75: mol_type = other DNA
ggtcgtgaccatccgctgcgcgaaactgcgggaaaacaaggttcgtctgtttgccggagcagggattgtgcctgc

SEQ ID NO: 333671 - DNA, 75 bp, synthetic construct
  source 1..75: mol_type = other DNA
actcctgctctgagtggttttcctcatcaggctgcaactcaagtgattgctgaactggagccattcgaccgggaa

SEQ ID NO: 333672 - DNA, 75 bp, synthetic construct
  source 1..75: mol_type = other DNA
agttacacgttccttcttctccacagctgatcaccacgccgacgctgtggcatctcgcaactccctttgaaggta

SEQ ID NO: 333673 - DNA, 75 bp, synthetic construct
  source 1..75: mol_type = other DNA
caaaccacgtttgaacagatggttgcccgcgctgccgcacttaccgccacgccgcaggtcgacaaagtggtgttg

SEQ ID NO: 333674 - DNA, 75 bp, synthetic construct
  source 1..75: mol_type = other DNA
ggggcgattcccttcgatccacgtcagccttcgtcgctgtatattcctgaatcctggcagtcgttctcccgtcag

SEQ ID NO: 333675 - DNA, 75 bp, synthetic construct
  source 1..75: mol_type = other DNA
gccgtggatcgacggtctgctggacgcaggtgaaaaacacttcgctgctaccggtaagccgctgttctcttctca

SEQ ID NO: 333676 - DNA, 75 bp, synthetic construct
  source 1..75: mol_type = other DNA
gcgtgactctcaggaatatgtttccaagaaacacaatctgccgcacaacagcctgaacttcgtattccacggcgg

SEQ ID NO: 333677 - DNA, 75 bp, synthetic construct
  source 1..75: mol_type = other DNA
gctaaagttaaagcgccggttatcgttcagttctccaacggtggtgcttcctttatcgctggtaaaggcgtgaaa

SEQ ID NO: 333678 - DNA, 75 bp, synthetic construct
  source 1..75: mol_type = other DNA
gtcgtcaccgctgggggagtggcgcgaaacgggcgtcaaactttctaccatgttgaatgtttttggattgcatta

SEQ ID NO: 333679 - DNA, 75 bp, synthetic construct
  source 1..75: mol_type = other DNA
aaccgcatccgaaagcgcggccaaccggcgatacggaaggcgcgattcagaatttacgggaggtgcgtcatgcat

SEQ ID NO: 333680 - DNA, 75 bp, synthetic construct
  source 1..75: mol_type = other DNA
ggctgcgtgccggtcagacttcgatgatcgctcgtctggagaaagcattccaggaactgaacgcaatcgacgttc

SEQ ID NO: 333681 - DNA, 75 bp, synthetic construct
  source 1..75: mol_type = other DNA
atctgtgaacgttttaaccggacgttaagagagcagtttattgaatttaatgagattttactctttgaagatctg

SEQ ID NO: 333682 - DNA, 75 bp, synthetic construct
  source 1..75: mol_type = other DNA
tcgttctcgaagagttgcgttgggggcatttggcgatgcctgtcgtctgggaagcccgcaagcggtggcgttgct

SEQ ID NO: 333683 - DNA, 75 bp, synthetic construct
  source 1..75: mol_type = other DNA
ggcgtcgttgcttgacgatttgcgcgtgaaagcgacgcaatatctggcagatagtatcaatgcggcaccgaccac

SEQ ID NO: 333684 - DNA, 75 bp, synthetic construct
  source 1..75: mol_type = other DNA
tagcctgcgcctgacattggtggaaaaactggcggcgatgcttgatcccgatcatctggcgctgacgcagatcgc

SEQ ID NO: 333685 - DNA, 75 bp, synthetic construct
  source 1..75: mol_type = other DNA
cggagaaatacgccgctacgacaggcgtcagaacataatctgtagcgagtgccggaagagcgaagctatgcagcg

SEQ ID NO: 333686 - DNA, 75 bp, synthetic construct
  source 1..75: mol_type = other DNA
atggcgaaacctttttctctcgaacagcgggaagagctgaaggcacgaattatcggattggtacgcaaaaatgga

SEQ ID NO: 333687 - DNA, 75 bp, synthetic construct
  source 1..75: mol_type = other DNA
tgcctgccgtctgggaagcccgcaagcggtggcgttgttgctgggtgatttgcgcgagaaagcgacacaacatct

SEQ ID NO: 333688 - DNA, 75 bp, synthetic construct
  source 1..75: mol_type = other DNA
tatgaagtgatcaccattaacgagctggatgttcgtgccgggtggttcaccggtgattacgtggtttataccgca

SEQ ID NO: 333689 - DNA, 75 bp, synthetic construct
  source 1..75: mol_type = other DNA
cggcaaccgataccctgaccattaaaggcacgccgccgaatttgcgtgaccaattgcagcgccggacgtctggcg

SEQ ID NO: 333690 - DNA, 75 bp, synthetic construct
  source 1..75: mol_type = other DNA
agatgcgctcggactggtggtcttttctatcattggtgcacaggtcgcgctggatatgggccacggcccggtcat

SEQ ID NO: 333691 - DNA, 75 bp, synthetic construct
  source 1..75: mol_type = other DNA
aaacaggtcgagaacaacggcaaggtatgcccaacgtttccccgtccagatgtacgtcacgtcgccgcaccatac

SEQ ID NO: 333692 - DNA, 75 bp, synthetic construct
  source 1..75: mol_type = other DNA
gacgatttcttggacggtttatacggacatcaatccgaccgcatgacgatactcgatgggactacgcccgccaag

SEQ ID NO: 333693 - DNA, 75 bp, synthetic construct
  source 1..75: mol_type = other DNA
atgacgcccgtggaatatattttaaaagagaataaaaattgcaatatgtggtggacccatacatcttcaaccatg

SEQ ID NO: 333694 - DNA, 75 bp, synthetic construct
  source 1..75: mol_type = other DNA
tatcgtcaatcacttcttcagccgcgcagcccggttgttcccggtcggtatcagccagataatcacagataacgg

SEQ ID NO: 333695 - DNA, 75 bp, synthetic construct
  source 1..75: mol_type = other DNA
gaacccttccggcttgccgctgattttacgattgctttttactgtcagcacccggcaatcttcctcattgcgcga

SEQ ID NO: 333696 - DNA, 75 bp, synthetic construct
  source 1..75: mol_type = other DNA
atgacgcccgtggaatatattttaagagagaacaaaaattgcaatatgtggtggacccatacaccctctttatac

SEQ ID NO: 333697 - DNA, 75 bp, synthetic construct
  source 1..75: mol_type = other DNA
aaagagaataaaaattgcaatatgtggtggacccatacatctccttgcctttcggcacgtaagaggctaacctag

SEQ ID NO: 333698 - DNA, 75 bp, synthetic construct
  source 1..75: mol_type = other DNA
attgacaagacgtttaagtcgctctaaaaccaatataactggaactgccattttagaatttatcagagatgtatt

SEQ ID NO: 333699 - DNA, 75 bp, synthetic construct
  source 1..75: mol_type = other DNA
gtcaacttggcggagtcaccattacgggtatcgatactgaaaatagaatcgttacaacaagtaaaggccttatcc

SEQ ID NO: 333700 - DNA, 75 bp, synthetic construct
  source 1..75: mol_type = other DNA
agttacaaagcgctaatgaacaaattaaaaatctgaacaatcaggttcaggaactgaaaatgaaagccgctggtt

SEQ ID NO: 333701 - DNA, 75 bp, synthetic construct
  source 1..75: mol_type = other DNA
atggcaaaaccttttacacccgaacagcgggaggagctgaagtctcgaatcatcgatctggtgcgcaaaaatgaa

SEQ ID NO: 333702 - DNA, 75 bp, synthetic construct
  source 1..75: mol_type = other DNA
gcccccgcaacattgcgcctcaccggaacccttccggcttgccgctgattttacgattgctttttgccgtcagca

SEQ ID NO: 333703 - DNA, 75 bp, synthetic construct
  source 1..75: mol_type = other DNA
gattttggtcctatcgacgaattgcgggcgaaatatggcagtgaaaatgaaatcgcaccgttacctgccgcttcg

SEQ ID NO: 333704 - DNA, 75 bp, synthetic construct
  source 1..75: mol_type = other DNA
aaccccatccgaaggctcgccctacgggagacaagaaaggggctatcgtgaacatgagtgaggtgcgcaatgcat

SEQ ID NO: 333705 - DNA, 75 bp, synthetic construct
  source 1..75: mol_type = other DNA
gtcaccaacattgaattctgtgggtatgagcaatagcgcagctaatggtactaatgcagttatgtacctgacggc

SEQ ID NO: 333706 - DNA, 75 bp, synthetic construct
  source 1..75: mol_type = other DNA
gcagctcaactaatgaaaccggctactggaactacgatgactgccggtccatttaaagcatccgcaagttatatt

SEQ ID NO: 333707 - DNA, 75 bp, synthetic construct
  source 1..75: mol_type = other DNA
caggttagcaatgttaatttaggtacgcttgctaatactggaacaactgggcaacaagtagctttcaaactcgtt

SEQ ID NO: 333708 - DNA, 75 bp, synthetic construct
  source 1..75: mol_type = other DNA
aaaatcaggtaggttggagtgttaaagttgctagcgaaagcgaaaccacctcaagaggcaatacgctctggaaag

SEQ ID NO: 333709 - DNA, 75 bp, synthetic construct
  source 1..75: mol_type = other DNA
acttgggaatgttcatataacaacaaagctaagacagcgaagatctgctaccaagaacgcatagccagaggtttt

SEQ ID NO: 333710 - DNA, 75 bp, synthetic construct
  source 1..75: mol_type = other DNA
gatgcggcggtgccggatcgggcgcaggcgctgatcgaccaaaccagccagttactgccgcgcatcaagatcacc

SEQ ID NO: 333711 - DNA, 75 bp, synthetic construct
  source 1..75: mol_type = other DNA
tattccgctggaagtgctggagatccagtcgggggcgtaccttggcgaggacgacattattcgtattaaagacca

SEQ ID NO: 333712 - DNA, 75 bp, synthetic construct
  source 1..75: mol_type = other DNA
gcagttccggtcgctgaaccgtcccgacaacgaccgcagcgtgtactgctgtcggacgatcttcccagcaatatt

SEQ ID NO: 333713 - DNA, 75 bp, synthetic construct
  source 1..75: mol_type = other DNA
gcacgcgttgcgtggttgctggagcgcgtgggcctgttacctgaacatgcctggcgttacccgcatgagttttcc

SEQ ID NO: 333714 - DNA, 75 bp, synthetic construct
  source 1..75: mol_type = other DNA
atctccagtgttgatttgggggttctttctagcaccgcaacaactgatggcactgcagctacattcaaattagtt

SEQ ID NO: 333715 - DNA, 75 bp, synthetic construct
  source 1..75: mol_type = other DNA
aatatttcagatgttaatttaggtgtattgtcaacagcaaataatactaatggtacccccgtaacctttaaattg

SEQ ID NO: 333716 - DNA, 75 bp, synthetic construct
  source 1..75: mol_type = other DNA
gcggtggtggtcggtctcgatgctgactggagcgacgttggctcctggtccgccctgtgggaggtcagcccgaaa

SEQ ID NO: 333717 - DNA, 75 bp, synthetic construct
  source 1..75: mol_type = other DNA
tgctgggattagttctgacgcacctgctggcacatcgcaaatttttgctgggaagttttttgctgctggcggcaa

SEQ ID NO: 333718 - DNA, 75 bp, synthetic construct
  source 1..75: mol_type = other DNA
tgagttcgatctcgccatactggagaaagcatggaaccagctcatcgcacgccacgatatgttgcgtatggtggt

SEQ ID NO: 333719 - DNA, 75 bp, synthetic construct
  source 1..75: mol_type = other DNA
cggaaagagagtggttaatccgcgaaggtgaaagctggcgctgccgcattccgctcagcgagattcctgagcctc

SEQ ID NO: 333720 - DNA, 75 bp, synthetic construct
  source 1..75: mol_type = other DNA
accttcggtctgctcaacaccctcatcggggtgatgatgccctacttcacctctgcgttcggcgtattcctaatg

SEQ ID NO: 333721 - DNA, 75 bp, synthetic construct
  source 1..75: mol_type = other DNA
cagcctgcccgcagacacagactacccggacccgcgcggggagcgggacccggaagcggaccccggcctgctgta

SEQ ID NO: 333722 - DNA, 75 bp, synthetic construct
  source 1..75: mol_type = other DNA
atgatggaagccccccacgttcaggcttgtgcgcaacacattacgcgctggctttgcgcaacctcaacgcaaccg

SEQ ID NO: 333723 - DNA, 75 bp, synthetic construct
  source 1..75: mol_type = other DNA
gtggcctctttttgagctggtggtcagcgaaatcgacgattgccattaccgtctgcatatgaacctcgacctttt

SEQ ID NO: 333724 - DNA, 75 bp, synthetic construct
  source 1..75: mol_type = other DNA
agtggtttgcggtgaaagcctgcaagaagccgccaacaatatggaagagctggaggaaacggcaaagctgatttt

SEQ ID NO: 333725 - DNA, 75 bp, synthetic construct
  source 1..75: mol_type = other DNA
ccgcagtcgattagcgccgaaaccaaacggcgtttgcttgacgcgatgcatcaacgtaccgccacgaaagtggcg

SEQ ID NO: 333726 - DNA, 75 bp, synthetic construct
  source 1..75: mol_type = other DNA
tcaacgtaccgccacgaaagtggcggtaacgccagtcccgaatggtttataccagcggcaaaaaaatgccgatgg

SEQ ID NO: 333727 - DNA, 75 bp, synthetic construct
  source 1..75: mol_type = other DNA
ctatttctcaataagcatgagaaaattcattaaagtaaataatactgtgtcacacttgacccggtattatgtaag

SEQ ID NO: 333728 - DNA, 75 bp, synthetic construct
  source 1..75: mol_type = other DNA
ctgctgcgtttactgactgagcatacgccgggcgaaagcgttccggtcccctgtctcatggtgtatgccgccggg

SEQ ID NO: 333729 - DNA, 75 bp, synthetic construct
  source 1..75: mol_type = other DNA
gtggtgatgcggatggggaacgtcccgttggtgccctattatcgcccgggcgataaacgcatcgcacaggatctg

SEQ ID NO: 333730 - DNA, 75 bp, synthetic construct
  source 1..75: mol_type = other DNA
tgtctgtcagtctgctttagggggactctttccatccggtagtttccttcctccccggcagcgattttttgaact

SEQ ID NO: 333731 - DNA, 75 bp, synthetic construct
  source 1..75: mol_type = other DNA
aaaacctcgcgcacacacaaaaacagcgtctcgcgccatgcgcattttatgttagccagatgctgggctttattg

SEQ ID NO: 333732 - DNA, 75 bp, synthetic construct
  source 1..75: mol_type = other DNA
gcagtgatgaaaagcagacccgcagcccgctgtcgctgtactcggaatatcagcgaatggagattgaatttcgtg

SEQ ID NO: 333733 - DNA, 75 bp, synthetic construct
  source 1..75: mol_type = other DNA
taacagataccggaacctgtcagagcatggcgatttttaatctgccgatgcatctgtttctctcctggccgctgg

SEQ ID NO: 333734 - DNA, 75 bp, synthetic construct
  source 1..75: mol_type = other DNA
tttactcatccgtgatgaagaaagtcgatcctgaaataataaaatgccccccaaacataaaattacaccttttag

SEQ ID NO: 333735 - DNA, 75 bp, synthetic construct
  source 1..75: mol_type = other DNA
acgctttgatatgtccgagtatatggagcgtcataccgtcagccgcctgattggtgcacctccgggatacgttgg

SEQ ID NO: 333736 - DNA, 75 bp, synthetic construct
  source 1..75: mol_type = other DNA
gaaggagctggagcgtgctattcaggttctctgccgtcgccgtaaaaacaacccgctgctggtgggggaatctgg

SEQ ID NO: 333737 - DNA, 75 bp, synthetic construct
  source 1..75: mol_type = other DNA
gcagaatcagtcggtagatttaattctgctggatatcaacttacccgatgaaaatggcctgatgttaacccgcgc

SEQ ID NO: 333738 - DNA, 75 bp, synthetic construct
  source 1..75: mol_type = other DNA
atgccacatcatattgttattgttgaagatgagccgattacccaggcacgcttacaaacctactttacccaagag

SEQ ID NO: 333739 - DNA, 75 bp, synthetic construct
  source 1..75: mol_type = other DNA
taaaagaaattaacgaaggcttagccgctaatatcgctaatgcagtagcggaagcattaaaaccagtacaggcaa

SEQ ID NO: 333740 - DNA, 75 bp, synthetic construct
  source 1..75: mol_type = other DNA
tggctcgatgctgggtatcgccggttatcaggcggtggagattgcgattcagcgcaggattaaaaaagggggaag

SEQ ID NO: 333741 - DNA, 75 bp, synthetic construct
  source 1..75: mol_type = other DNA
cactggcggataaatcctctccgaaggtgattttcctgcacatgattggctctcatccgaatccgtgtgaccggc

SEQ ID NO: 333742 - DNA, 75 bp, synthetic construct
  source 1..75: mol_type = other DNA
ctgacgttcagccgtgatgaggcgggacgtgaagtgctccggcacagtaaccggggttttgcctgtgaacagggc

SEQ ID NO: 333743 - DNA, 75 bp, synthetic construct
  source 1..75: mol_type = other DNA
tatcaacttatcagatattaaccgaaggtaaaccaatcgtattacgccattgtcacattcacccaaatgaaaatg

SEQ ID NO: 333744 - DNA, 75 bp, synthetic construct
  source 1..75: mol_type = other DNA
ggacagaaaaaagcgcgtgaaatctggttcctgtgccgtcagtacgacgcgaaacaggcgctggatatgggcctt

SEQ ID NO: 333745 - DNA, 75 bp, synthetic construct
  source 1..75: mol_type = other DNA
tgacggaagaaggtcaggaaggtcgcaacgctttcaaccagaaacgtcagcctgatttcagcaaatttaaacgga

SEQ ID NO: 333746 - DNA, 75 bp, synthetic construct
  source 1..75: mol_type = other DNA
aaagcattacaaaattattatcacacgccggaacttacggcggaacagttcccgtggccggaagcgctcaactga

SEQ ID NO: 333747 - DNA, 75 bp, synthetic construct
  source 1..75: mol_type = other DNA
gtcacgttctgcacatgatgtgcgatctgaccattgcggcagaaaacgccatcttcggtcagactgggccgaaag

SEQ ID NO: 333748 - DNA, 75 bp, synthetic construct
  source 1..75: mol_type = other DNA
ggcgcaggcgataaagcgttctgctctggcggcgatcaaaaagtccgtggtgactacggtggttataaagatgac

SEQ ID NO: 333749 - DNA, 75 bp, synthetic construct
  source 1..75: mol_type = other DNA
gggcagaaaaaagcgcgtgaaatctggttcctgtgccgtcagtacgacgcaaaacaggcgctggatatgggcctt

SEQ ID NO: 333750 - DNA, 75 bp, synthetic construct
  source 1..75: mol_type = other DNA
acgcgatcacaagcattaaccccaacatcccggcaatcctgaaaaagtatgcaggtgaaactatcggccccggtc

SEQ ID NO: 333751 - DNA, 75 bp, synthetic construct
  source 1..75: mol_type = other DNA
acgaggttttctggcttttcgtcggtcattcagcaccattagccgggtctctgcctctttctgttcctgtggagt

SEQ ID NO: 333752 - DNA, 75 bp, synthetic construct
  source 1..75: mol_type = other DNA
aatgcccgcggtaatagtgcattgtgggatgaatatggtcgcctcatcgtccgcgccgattacggttcgttattg

SEQ ID NO: 333753 - DNA, 75 bp, synthetic construct
  source 1..75: mol_type = other DNA
cacggcttttacgccagcgccatccacgagatttcgcactggtgtattgccgggaaagcgcgccgagaactggtt

SEQ ID NO: 333754 - DNA, 75 bp, synthetic construct
  source 1..75: mol_type = other DNA
aatgtttatgagaattacagggagtgattcagtcgacaaatcatcgatgtttaatattgtcgatattataaatga

SEQ ID NO: 333755 - DNA, 75 bp, synthetic construct
  source 1..75: mol_type = other DNA
ttttattatttatttcccagtgcgagagcagatcttacacatttgccgagctttatcaggtcaatattcgcagtg

SEQ ID NO: 333756 - DNA, 75 bp, synthetic construct
  source 1..75: mol_type = other DNA
acggacgtgaacccggacgaacgatagaactgcatttaaccgggcacatggaaaagtttgcctggtcatttaatg

SEQ ID NO: 333757 - DNA, 75 bp, synthetic construct
  source 1..75: mol_type = other DNA
tataaaggcgtggttgataagtactggggagctctggcaacctatattccagcagatcagattgccagagtggag

SEQ ID NO: 333758 - DNA, 75 bp, synthetic construct
  source 1..75: mol_type = other DNA
ccgcttcctcagaaagcatgatatctcatggtcagacagtagtagttctgcgtggcagtcgatgtttgaacagac

SEQ ID NO: 333759 - DNA, 75 bp, synthetic construct
  source 1..75: mol_type = other DNA
atggaagagagcctggccgcaccattgaactgcatcttacagggcatatggaaaagtttgcctggtcctttaacg

SEQ ID NO: 333760 - DNA, 75 bp, synthetic construct
  source 1..75: mol_type = other DNA
gtaaacccggttaccgttgacgaattcaggattgccgttgccgaaacctatgatgtcattgtggagcctcagggt

SEQ ID NO: 333761 - DNA, 75 bp, synthetic construct
  source 1..75: mol_type = other DNA
agcagaacgggacttactggtaccacagccattccggtctgcaggaacaggagggggtatacggtgccattatca

SEQ ID NO: 333762 - DNA, 75 bp, synthetic construct
  source 1..75: mol_type = other DNA
atgagaactggaataaacaaagcgcactgcccgagccgccgcagtttgtggaaacgcagacagtccaggagctgc

SEQ ID NO: 333763 - DNA, 75 bp, synthetic construct
  source 1..75: mol_type = other DNA
ggaaataaaaaatcgacgtgatgaaataacagtagattgcatcatcatcaacaaccatcacttccacagtgatac

SEQ ID NO: 333764 - DNA, 75 bp, synthetic construct
  source 1..75: mol_type = other DNA
ggggaattctacagactgacgggcgataaatggacctacaacgttgatgcgttcgccgctgcgctggcgcaggca

SEQ ID NO: 333765 - DNA, 75 bp, synthetic construct
  source 1..75: mol_type = other DNA
tgcgacaccaccagcgcttctttgcgcttttatttacggtgcattgtggcgcagatacggtcgcaaatggatgta

SEQ ID NO: 333766 - DNA, 75 bp, synthetic construct
  source 1..75: mol_type = other DNA
tgctttctgaaaatccggggaaatttgaaggccaggccagcggttcttttgtgttaggagtggaaaaagacatag

SEQ ID NO: 333767 - DNA, 75 bp, synthetic construct
  source 1..75: mol_type = other DNA
atggaaataaatgtcaccgcgccggcattgctgacggatgagcatatacttcagccatttgactgtggaaatgag

SEQ ID NO: 333768 - DNA, 75 bp, synthetic construct
  source 1..75: mol_type = other DNA
gacagtgaatgccgcctttgtccgggagtcggcggaagtgtatcagcagcggcataagctgcgtaaaggaagcta

SEQ ID NO: 333769 - DNA, 75 bp, synthetic construct
  source 1..75: mol_type = other DNA
acttcctgagcaagcacgtcaacctgcgcaaaggggtgacggatatcggttatggcttacgtccgactcatccgc

SEQ ID NO: 333770 - DNA, 75 bp, synthetic construct
  source 1..75: mol_type = other DNA
ccggaagagctgctggcgaagaaaccagaactgcgtggcaaaacgctgtacgacgttctgtatgccactccggaa

SEQ ID NO: 333771 - DNA, 75 bp, synthetic construct
  source 1..75: mol_type = other DNA
tgaaagctaacgccgttgcggcggttgcggcggctgccggtctcagcgtgccgggcgttgcccgcgccgttgttg

SEQ ID NO: 333772 - DNA, 75 bp, synthetic construct
  source 1..75: mol_type = other DNA
atgtgattattgatgaagcctcacagcaggatattgttccgggcattctgggactgggatgtgcccgtaatgtaa

SEQ ID NO: 333773 - DNA, 75 bp, synthetic construct
  source 1..75: mol_type = other DNA
tgataaacgccagcgtgacaataaaaaaacgccggggaatactgacaaattgaaacccagcaaatcctcaaaaaa

SEQ ID NO: 333774 - DNA, 75 bp, synthetic construct
  source 1..75: mol_type = other DNA
gtggcgttacagcgaaggtaacgacccgtacgtgaaagcgggcgaaggctacaagttctacggtaaaccggatgg

SEQ ID NO: 333775 - DNA, 75 bp, synthetic construct
  source 1..75: mol_type = other DNA
tgtgctaagcgataacgtcaccgcccaggatatgcgcattacccctgaaacattgcgtattcaggctgcgattgc

SEQ ID NO: 333776 - DNA, 75 bp, synthetic construct
  source 1..75: mol_type = other DNA
ctgccagcaactgatccagagcgcctacgcgaccaggctgaattgatgggaaaccttgtcatagacgcagttaaa

SEQ ID NO: 333777 - DNA, 75 bp, synthetic construct
  source 1..75: mol_type = other DNA
ttcgccgagttgcaggccattgccgatgaactggaacacacctggcacgccacggtgaacgccgggtttgtccgc

SEQ ID NO: 333778 - DNA, 75 bp, synthetic construct
  source 1..75: mol_type = other DNA
cgccgcacagctggttaacaaactgacgctggatgcgaccgatccgctctcgaaagagacggacttcaagaagtg

SEQ ID NO: 333779 - DNA, 75 bp, synthetic construct
  source 1..75: mol_type = other DNA
aatcacctgggatcaagccttcgatgtgatggaagagaaattcaaaaccgccctgaaagaaaaagggccggaatc

SEQ ID NO: 333780 - DNA, 75 bp, synthetic construct
  source 1..75: mol_type = other DNA
gcaaaacgctgtacgaagttctgtatgccacccccgaagtgagcaaattcccggtatccgaactggcggaagatc

SEQ ID NO: 333781 - DNA, 75 bp, synthetic construct
  source 1..75: mol_type = other DNA
gtgctttccactcagcactctgaagagatcgaccagaaatcgctgcaagaagcggtaatggaagagatcatcaag

SEQ ID NO: 333782 - DNA, 75 bp, synthetic construct
  source 1..75: mol_type = other DNA
agaaaccgctgaagccgaaatcagactgggcggtgaccgggctctatttctacgacaataacgtggtggagatgg

SEQ ID NO: 333783 - DNA, 75 bp, synthetic construct
  source 1..75: mol_type = other DNA
ttgagctggtggaactacgtaagacgaacaacaaagacagctacgaacaagcactatcccacctcgattgttcaa

SEQ ID NO: 333784 - DNA, 75 bp, synthetic construct
  source 1..75: mol_type = other DNA
ctgattttccagatgttcccggcggtactctcactggtggcgttgtatgcgttgtttgaccgtctgggtgagtac

SEQ ID NO: 333785 - DNA, 75 bp, synthetic construct
  source 1..75: mol_type = other DNA
agggatatatcacccgcctggagaaccagcctgtgcagggtgaagtatcgtctccggtaatccttccggctcagg

SEQ ID NO: 333786 - DNA, 75 bp, synthetic construct
  source 1..75: mol_type = other DNA
tggcgagaagttcatcggcaacgatgcctgtgccctggtgctgggagataacatctactttggccagagcttcgg

SEQ ID NO: 333787 - DNA, 75 bp, synthetic construct
  source 1..75: mol_type = other DNA
atcatcaccaccccggaagatatgccggcattccagcgtctgctgggcgacggttcgcagttcggggtgaacttc

SEQ ID NO: 333788 - DNA, 75 bp, synthetic construct
  source 1..75: mol_type = other DNA
gcgattatgttcccgctgctgatggtcgtcgccatctcgctgcgtcaggggaacttcgcgaccggtagtctgatc

SEQ ID NO: 333789 - DNA, 75 bp, synthetic construct
  source 1..75: mol_type = other DNA
atgaagaagattaaatttactggcttaaatgccagcggacagactcgcccgaaaatcaggatcggggatattttc

SEQ ID NO: 333790 - DNA, 75 bp, synthetic construct
  source 1..75: mol_type = other DNA
catttgaaaaattccgtggtaaacttccgaatgagataactatgtatgtagatagatacacatgtcctaattgcc

SEQ ID NO: 333791 - DNA, 75 bp, synthetic construct
  source 1..75: mol_type = other DNA
gaacttcgcgaccggcagcctgatcccggagcaaatctcgtgggatcactggaaactggcgttaggctttagcgt

SEQ ID NO: 333792 - DNA, 75 bp, synthetic construct
  source 1..75: mol_type = other DNA
attccattcattggcctgaatactcacggcggcgtaattttcgcgtatctgggtgggattgcgctgcatgtctgg

SEQ ID NO: 333793 - DNA, 75 bp, synthetic construct
  source 1..75: mol_type = other DNA
caggccttccgccttgtcctgttgccgctgtcagtaccgattctggcggtggtgttcatcctgtcgtttatcgct

SEQ ID NO: 333794 - DNA, 75 bp, synthetic construct
  source 1..75: mol_type = other DNA
ttgatataaatcaatccactgatgttattactaaacagattgaggaaattcaaaagattgctcgtaatggactgg

SEQ ID NO: 333795 - DNA, 75 bp, synthetic construct
  source 1..75: mol_type = other DNA
atctacaaagaaaccgcagcatacggtcactttggtcgcgaacatttcccgtgggaaaaaaccgacaaagcgcag

SEQ ID NO: 333796 - DNA, 75 bp, synthetic construct
  source 1..75: mol_type = other DNA
gtggcggagcattctctggtaaagatccatcaaaagtggaccgttccgctgcgtacgcagcacgttatgttgcaa

SEQ ID NO: 333797 - DNA, 75 bp, synthetic construct
  source 1..75: mol_type = other DNA
aataacatcattcttcctgatcacgtttcaccgcagattatcatcacaactgaaaccgattacaccaaccacaac

SEQ ID NO: 333798 - DNA, 75 bp, synthetic construct
  source 1..75: mol_type = other DNA
agtccgtctctgaagggcatcctgacaaaattgctgaccaaatctctgatgccgttttagacgcgattctcgaac

SEQ ID NO: 333799 - DNA, 75 bp, synthetic construct
  source 1..75: mol_type = other DNA
agtccgtctctgaagggcatcctgacaaaattgctgaccaaatttctgatgccgttttagacgcgatcctcgaac

SEQ ID NO: 333800 - DNA, 75 bp, synthetic construct
  source 1..75: mol_type = other DNA
ctgaccctgctggtacgtgagttcttcgacctgcgcccatacggtctgattcagatgctagatctgctgcacccg

SEQ ID NO: 333801 - DNA, 75 bp, synthetic construct
  source 1..75: mol_type = other DNA
ctggagaagataattgcggtgacgtactgaaatgtatcaatcatccgctggctgttacgggactcatagacgccg

SEQ ID NO: 333802 - DNA, 75 bp, synthetic construct
  source 1..75: mol_type = other DNA
caggcaatcagcttaattaatgcacgaaagcctgagatgtctgcacgtactatggctgtacttaccttactggaa

SEQ ID NO: 333803 - DNA, 75 bp, synthetic construct
  source 1..75: mol_type = other DNA
ggagcagcagggaaacgagctgcatattaactggggtaaagtcggtaccaacgggcaaagtcaggtaaaaagctt

SEQ ID NO: 333804 - DNA, 75 bp, synthetic construct
  source 1..75: mol_type = other DNA
catccggcaaaaaaaccgcccgcacaataacatcattcttcctgatcacgtttcaccgcagattatcatcacaac

SEQ ID NO: 333805 - DNA, 75 bp, synthetic construct
  source 1..75: mol_type = other DNA
ctgcacaggaagcactgttctccgtgctcgatgccatcaccgccagcgagttgattaacgacatcgaagcactgt

SEQ ID NO: 333806 - DNA, 75 bp, synthetic construct
  source 1..75: mol_type = other DNA
cccagcataaacgcgccaccgtcgggctggatattctcgccgctatcggcagtgacattgccctgatgcaactta

SEQ ID NO: 333807 - DNA, 75 bp, synthetic construct
  source 1..75: mol_type = other DNA
acagataagttaccgctggaattttcttcatgggtagcgagaatgcgtacgccagaagcgttagtagacgctatt

SEQ ID NO: 333808 - DNA, 75 bp, synthetic construct
  source 1..75: mol_type = other DNA
cagtatatttacaatgacaatatattttcagcgctaaggagcattggcctgtttgttactctgatagtactgaac

SEQ ID NO: 333809 - DNA, 75 bp, synthetic construct
  source 1..75: mol_type = other DNA
tcctgtggggaatgtgccccattataatatccatattgcatctgatatatgacacaccaacagaagcatcgataa

SEQ ID NO: 333810 - DNA, 75 bp, synthetic construct
  source 1..75: mol_type = other DNA
cagcaggtgctcttacgatagattccgataataaatcggtcgtaatgagttccgttaaagcaatgggcacactct

SEQ ID NO: 333811 - DNA, 75 bp, synthetic construct
  source 1..75: mol_type = other DNA
tgccagtgctggtactatgccgcgtatactggactttttcacaattccggctggtcatgatctggcaagtcctat

SEQ ID NO: 333812 - DNA, 75 bp, synthetic construct
  source 1..75: mol_type = other DNA
cagatactggatactatacaatcaactcatcatttggcaatggctcaacattgggctatcttgctttaaactttt

SEQ ID NO: 333813 - DNA, 75 bp, synthetic construct
  source 1..75: mol_type = other DNA
caggaggcaggttatggcctggccgcgctgattgacggtttatggctgcgcgcggcattgagcggtaaaccgctg

SEQ ID NO: 333814 - DNA, 75 bp, synthetic construct
  source 1..75: mol_type = other DNA
cgctgattgatggattatggctgcgcgcggctctgagcggcaaaccgctggataaaacccgcgctaattccctga

SEQ ID NO: 333815 - DNA, 75 bp, synthetic construct
  source 1..75: mol_type = other DNA
atgcccaaattggggatgcagtcgatccggcgcagacaactgatcgacgccacactggaagcaataaatgaagtg

SEQ ID NO: 333816 - DNA, 75 bp, synthetic construct
  source 1..75: mol_type = other DNA
aaactgagtgaaacctcaaacgcgtttcttaactggcacagcgagatccgtccacctcagaacggcatccctgcg

SEQ ID NO: 333817 - DNA, 75 bp, synthetic construct
  source 1..75: mol_type = other DNA
acaataatgtctggcacctgctgcaaaccatggtaaacccgacatcatccctgcctgcgtgtatgaacgaaatgc

SEQ ID NO: 333818 - DNA, 75 bp, synthetic construct
  source 1..75: mol_type = other DNA
cttacgccgccagcgcaaatacccgaagcgtgaccggcaggctgctgaagttttgcagcaacttgatgaaatagc

SEQ ID NO: 333819 - DNA, 75 bp, synthetic construct
  source 1..75: mol_type = other DNA
acctcgacgacaaaactattgccagcttccagcagcagctgtcggatatgggctacaagttccagttcatcaccc

SEQ ID NO: 333820 - DNA, 75 bp, synthetic construct
  source 1..75: mol_type = other DNA
gggaaaactgaagaatctggcgagactcggcaaactgggaaacctgctggggaaaagcgggaagctgctgggcgc

SEQ ID NO: 333821 - DNA, 75 bp, synthetic construct
  source 1..75: mol_type = other DNA
gaaatgccgacctggccgtacgccgtcgcgctggtgattgaagctggcgatgagtggcaatgtgaaacgcagtca

SEQ ID NO: 333822 - DNA, 75 bp, synthetic construct
  source 1..75: mol_type = other DNA
aactggagcgcaattaccgcattgttcatgcactggcaaccgaacaggcgctttctccgacggacttcgcgcttt

SEQ ID NO: 333823 - DNA, 75 bp, synthetic construct
  source 1..75: mol_type = other DNA
caagccgagcagatcaaaaccctgctccagtacagcccatccagcaccaactcccagccatggcattttattgtg

SEQ ID NO: 333824 - DNA, 75 bp, synthetic construct
  source 1..75: mol_type = other DNA
tcatcacagcgttgaagatttcaacgcgacgctgccgaaatcgcgtctgccgcaaagtatcaccttaaccgaagt

SEQ ID NO: 333825 - DNA, 75 bp, synthetic construct
  source 1..75: mol_type = other DNA
ctgctgggcgttgcggcgctgggtctggacgcggtacccatcgaaggttttgacgccgcaatcctcgatgaagaa

SEQ ID NO: 333826 - DNA, 75 bp, synthetic construct
  source 1..75: mol_type = other DNA
atgacacgccaacctttgtacaaagcgctctggatgctggtgccagcggctatttgaccaaacgctgtgggccgg

SEQ ID NO: 333827 - DNA, 75 bp, synthetic construct
  source 1..75: mol_type = other DNA
tttatttttccttaaaaaaagaatcgactaattgggagaaggtatggagagacagaggatttctaacatcaccta

SEQ ID NO: 333828 - DNA, 75 bp, synthetic construct
  source 1..75: mol_type = other DNA
agtgggtacaggttacttcgataaagtgacgactattattcagggcggcacgtcgtcggttacagcgctgaccgg

SEQ ID NO: 333829 - DNA, 75 bp, synthetic construct
  source 1..75: mol_type = other DNA
tggcaacgcgaagatggtaaaaatatatctccggtagtttttatccgcgctgcagaagaggaaaatttaattata

SEQ ID NO: 333830 - DNA, 75 bp, synthetic construct
  source 1..75: mol_type = other DNA
aatgtcatccggagaattttctgtgcattatcaaccagtgtgcgacacgacaaccaaagcgtgtctgggggttga

SEQ ID NO: 333831 - DNA, 75 bp, synthetic construct
  source 1..75: mol_type = other DNA
caactgcttcagtcaagtagccaggttcaaacgggtgtataaaattgctttctcggacactaacgtcggaaaacc

SEQ ID NO: 333832 - DNA, 75 bp, synthetic construct
  source 1..75: mol_type = other DNA
gcttatctccctctgcactcattgagttgttcgaactggatatgtcgaatacaacttcaggagggaaactattct

SEQ ID NO: 333833 - DNA, 75 bp, synthetic construct
  source 1..75: mol_type = other DNA
agcacattctggtcaggcgtacggtgcgcgcgacggtagccagttactggatgtctggcgggcagcgtgccgcca

SEQ ID NO: 333834 - DNA, 75 bp, synthetic construct
  source 1..75: mol_type = other DNA
ggcgacggttattgcggaatatgcaacattgctgattggtctgctaatggtgcgtaaaatcctcaaactacgcgg

SEQ ID NO: 333835 - DNA, 75 bp, synthetic construct
  source 1..75: mol_type = other DNA
tatttgtttgtggcaaggggcgatgttgttggatgcgatctttatgggtcagattattgcatccatgtgtttatt

SEQ ID NO: 333836 - DNA, 75 bp, synthetic construct
  source 1..75: mol_type = other DNA
agtttaaatatcttcagcttttagctggggaacatccagaatacgtcctgtgcaaaagggacaagcctaaatgta

SEQ ID NO: 333837 - DNA, 75 bp, synthetic construct
  source 1..75: mol_type = other DNA
cctggcgtcgcaaagaagaacctgtcggaactgcaagcggtacagcacttacaccagtagagtttaaatatcttc

SEQ ID NO: 333838 - DNA, 75 bp, synthetic construct
  source 1..75: mol_type = other DNA
cattagcccgtgcgctggtacagccgttgctgttggctctgggggctggggcgttaattgcgctactgcgtacgc

SEQ ID NO: 333839 - DNA, 75 bp, synthetic construct
  source 1..75: mol_type = other DNA
atggcattaacagacaccgctattcgcaagactaaaccctccaacaaacctttcaaaatgacggacagttccgga

SEQ ID NO: 333840 - DNA, 75 bp, synthetic construct
  source 1..75: mol_type = other DNA
tcccggaagaacgggagcagatcgaaaacgtgcgcttctctcatcgcggcacaaaaatgaaaacgcagcacatcg

SEQ ID NO: 333841 - DNA, 75 bp, synthetic construct
  source 1..75: mol_type = other DNA
gtgaagaagcagttaatcaaatcgaacccggcgcttgatctggacggcgaatttaccccaccagaaaccagccac

SEQ ID NO: 333842 - DNA, 75 bp, synthetic construct
  source 1..75: mol_type = other DNA
gcaagatcaaaccctctgacaaacccttcaaaatgacagacagctctggactgtacctgttgatcaaacccaacg

SEQ ID NO: 333843 - DNA, 75 bp, synthetic construct
  source 1..75: mol_type = other DNA
gaaaaatgggcagacattcagccagatcgccgctaactggcatggcgagcacaaacgctggtctgagcattacgc

SEQ ID NO: 333844 - DNA, 75 bp, synthetic construct
  source 1..75: mol_type = other DNA
tctcgctgttgcaggcccgccgcttacgggaaacggcacgcaacaacatccgggctggtgtcgatccagctgctg

SEQ ID NO: 333845 - DNA, 75 bp, synthetic construct
  source 1..75: mol_type = other DNA
taaggccagtcgttctttatctgttggtgaatatcagtatttattattacttgcaaatatgcatccgtcttacag

SEQ ID NO: 333846 - DNA, 75 bp, synthetic construct
  source 1..75: mol_type = other DNA
ggccatcaatttggggggcgtctgcgaagtggtcgatcttagtcaggtaagccagcaaatgctggcaaaaatcag

SEQ ID NO: 333847 - DNA, 75 bp, synthetic construct
  source 1..75: mol_type = other DNA
cgctgttaatcacccagcatatgccgcccggtttcacccgctcttttgctgaccgacttaacaagctgtgtcaga

SEQ ID NO: 333848 - DNA, 75 bp, synthetic construct
  source 1..75: mol_type = other DNA
tgagcctgaaacgaaaaccggcggagaacagcacggcccccgcagaggcaacccctgctcctggtgtggtgcgcc

SEQ ID NO: 333849 - DNA, 75 bp, synthetic construct
  source 1..75: mol_type = other DNA
cacttcccggatgagatgtggttcatcgaacagaagactctcgaaacccatgaggtcgtcgagtttgagctgtcg

SEQ ID NO: 333850 - DNA, 75 bp, synthetic construct
  source 1..75: mol_type = other DNA
acatacgagccgtggccaatcaaagcatcaggctttgacaaaacgggccagggaacgttgccacgtccaaaaatt

SEQ ID NO: 333851 - DNA, 75 bp, synthetic construct
  source 1..75: mol_type = other DNA
agcaattttgcttaatgatgaagtgagatcggcagaccttctggccattctcaaggcgctgaaggccaaaggcgt

SEQ ID NO: 333852 - DNA, 75 bp, synthetic construct
  source 1..75: mol_type = other DNA
agcttcgatctgggtgaaaaacacaaagtcgccgtactttctgtcaccgaaggcgaagataaaccgctgaaatat

SEQ ID NO: 333853 - DNA, 75 bp, synthetic construct
  source 1..75: mol_type = other DNA
tgaacataaccctcattccgcgtttcgtagcgcgccatttgccccggcagcacgcccgaagatgaaaatcaccgg

SEQ ID NO: 333854 - DNA, 75 bp, synthetic construct
  source 1..75: mol_type = other DNA
gacagttaacgacgccgcgcgcattcgcgctaccggcacaccggcaattcaggtaaacaccggtaaaggctgcca

SEQ ID NO: 333855 - DNA, 75 bp, synthetic construct
  source 1..75: mol_type = other DNA
cctggggcgcgccatatccgattacctggacttctattaatgatgcattcgccaactgcggcggttcaggtatga

SEQ ID NO: 333856 - DNA, 75 bp, synthetic construct
  source 1..75: mol_type = other DNA
ttcttttccgcacttaattattgcctgacactgatatccccggcaggattaaacgatctcatttacacattaatc

SEQ ID NO: 333857 - DNA, 75 bp, synthetic construct
  source 1..75: mol_type = other DNA
tctgaacagcgttttccccaaccttgaaaaagcacaagctatttttactccggtaatgaatggttctgtaaatat

SEQ ID NO: 333858 - DNA, 75 bp, synthetic construct
  source 1..75: mol_type = other DNA
tgctgccaatgttaagtggtgtacaaaaggttactttacaagagcttatgatattaaatgataatgagtacacta

SEQ ID NO: 333859 - DNA, 75 bp, synthetic construct
  source 1..75: mol_type = other DNA
agcgaaaaaattattaatcacaataccgctgcaggaatgtttatgggaaccgccgcactggctggcggtattttt

SEQ ID NO: 333860 - DNA, 75 bp, synthetic construct
  source 1..75: mol_type = other DNA
ttggcttcctgtacgcgccgctggtgatcaccggtgtacaccagaccacgcttgctattgatttgcagatgattc

SEQ ID NO: 333861 - DNA, 75 bp, synthetic construct
  source 1..75: mol_type = other DNA
ccgcagcaggaatgtttatgggaaccgccgcgctggctggcggtatttttaacgcagcttgtatgggtgatgctg

SEQ ID NO: 333862 - DNA, 75 bp, synthetic construct
  source 1..75: mol_type = other DNA
cgtggctatggtgattatttttctgtttatctactccaaaattacaccgcacaacgaatggcagttaatcaaaaa

SEQ ID NO: 333863 - DNA, 75 bp, synthetic construct
  source 1..75: mol_type = other DNA
tactcattggcgatggattccttagaaaagagattgagagaattgcagagagagagatttatcataataaaatag

SEQ ID NO: 333864 - DNA, 75 bp, synthetic construct
  source 1..75: mol_type = other DNA
cagcgatacgcggcactgacaggcagtgaattatcgatgacatttaattttcatcacctgaaggtcgattatccc

SEQ ID NO: 333865 - DNA, 75 bp, synthetic construct
  source 1..75: mol_type = other DNA
acgccaccgaacaactggcgttcaaaatttggcggtagtgcgtggcgctggcatgcggaaagcgaacagtactat

SEQ ID NO: 333866 - DNA, 75 bp, synthetic construct
  source 1..75: mol_type = other DNA
gatcctcgcggtgttcctcgcccatgcgctgattggtccgtttggtcgcatgattggcgatggcgttgcctttgc

SEQ ID NO: 333867 - DNA, 75 bp, synthetic construct
  source 1..75: mol_type = other DNA
aagccatcctgacatggggcaattaccaggatctgctgccaaacagccctgtattgtggtgctatcgccgtgaat

SEQ ID NO: 333868 - DNA, 75 bp, synthetic construct
  source 1..75: mol_type = other DNA
tacggctggcgaaccgtggattggcctgggcgataactatcaacaaatcaacgtagaagccgcgttggccgatga

SEQ ID NO: 333869 - DNA, 75 bp, synthetic construct
  source 1..75: mol_type = other DNA
aatatgtttgccgagctgcgcaacgatgggcgtgatgccgacgagttattggcaatcctcgccagtaaatcccgt

SEQ ID NO: 333870 - DNA, 75 bp, synthetic construct
  source 1..75: mol_type = other DNA
gcccggaaaacgattttcttttcacgctccctggaaattcacgaaaagccattggctcatttatcgaaaacactg

SEQ ID NO: 333871 - DNA, 75 bp, synthetic construct
  source 1..75: mol_type = other DNA
aaagtggtatcagaagaagctaaacggttaaccagcagtcagcaactcagcacgccagaggtgaaagcaaacgta

SEQ ID NO: 333872 - DNA, 75 bp, synthetic construct
  source 1..75: mol_type = other DNA
ctgcaaacctggagtgaagacgacttccgtcgggtgcaggaaaatctgattggtcatctggtgactcagaaaagg

SEQ ID NO: 333873 - DNA, 75 bp, synthetic construct
  source 1..75: mol_type = other DNA
tccacgggctggcggcggctgcggccagcgtggttatcaacgctttgatgcgtgatatctacccgaaagaagagt

SEQ ID NO: 333874 - DNA, 75 bp, synthetic construct
  source 1..75: mol_type = other DNA
accaccatggacgtacaaagtgctgctgatgacacaggcttaccaatgctggtcgttcgcgggccgttcaacgtg

SEQ ID NO: 333875 - DNA, 75 bp, synthetic construct
  source 1..75: mol_type = other DNA
catgccccggcaggaatgattttgccggtgacttccggtgattatgcaataccggtgaccaacggtagcggtgct

SEQ ID NO: 333876 - DNA, 75 bp, synthetic construct
  source 1..75: mol_type = other DNA
cggtgacctccggtgattatgcaatcccggtgaccaacggtagtggtgctgtcggtaaggcgctggacattcgtc

SEQ ID NO: 333877 - DNA, 75 bp, synthetic construct
  source 1..75: mol_type = other DNA
ttctcttctgtctgtacgccagtcggccgaaaaaaacggtgatctattgcacaacgaggaagctaaaaggcttcc

SEQ ID NO: 333878 - DNA, 75 bp, synthetic construct
  source 1..75: mol_type = other DNA
ggtcattaacgccctgatgcgcgatatttacccgaaagaagagttctcgcggatgatgtcgtttgtcatgctggt

SEQ ID NO: 333879 - DNA, 75 bp, synthetic construct
  source 1..75: mol_type = other DNA
ggatgatgtcgttcgttatgctggtgagcaccatcgcgccgctgatggcaccgattgttggcggctgggtgctgg

SEQ ID NO: 333880 - DNA, 75 bp, synthetic construct
  source 1..75: mol_type = other DNA
aattaaccacgtcgcgccggaaaactttggttattactttgcgctaaacattgttttcctgttcgtgatgaccat

SEQ ID NO: 333881 - DNA, 75 bp, synthetic construct
  source 1..75: mol_type = other DNA
tttggttattactttgcactaaacattgttttcctgttcgtgatgaccatttttaacgccgcttcgtccgccgca

SEQ ID NO: 333882 - DNA, 75 bp, synthetic construct
  source 1..75: mol_type = other DNA
ctctgcatggccgatgatttggtcaattgcattctgcgcaaccagctccattctcttctgtctgtacgccagtcg

SEQ ID NO: 333883 - DNA, 75 bp, synthetic construct
  source 1..75: mol_type = other DNA
cggatttcgaaaaaactaaacagattctcgacctgaacccggcattaaacttcgtttgtattgacgtggcgaatg

SEQ ID NO: 333884 - DNA, 75 bp, synthetic construct
  source 1..75: mol_type = other DNA
cctgcagccgctggtcaatctggtgcagcatcatgaaaccagctatcgtgacattcagcaatttattgagaaacc

SEQ ID NO: 333885 - DNA, 75 bp, synthetic construct
  source 1..75: mol_type = other DNA
attccgcctgcgccagtcgccaacgatacgctggttgccgaagtgagcgacgctccgcaggcgaacgacccgaca

SEQ ID NO: 333886 - DNA, 75 bp, synthetic construct
  source 1..75: mol_type = other DNA
ggttacgcgcgcaaagtcatcatgcgctataccacaaaacgcgaatttttcgatccattgcgctttgtccgtgga

SEQ ID NO: 333887 - DNA, 75 bp, synthetic construct
  source 1..75: mol_type = other DNA
tggtggaggcgactgcaagccagatgccgttgcagatggataccgccgcgcggttgtttgatagcggcaaatcgt

SEQ ID NO: 333888 - DNA, 75 bp, synthetic construct
  source 1..75: mol_type = other DNA
tggcttttatcgtagcggagtgtcgctggaaggcattaactacctggatggcgggatcagtgatgcgatcccggt

SEQ ID NO: 333889 - DNA, 75 bp, synthetic construct
  source 1..75: mol_type = other DNA
ctggtgccagtggtgacgccggaatcgattgtcattccgcctgcgccagtcgccaacgatacgctggttgccgaa

SEQ ID NO: 333890 - DNA, 75 bp, synthetic construct
  source 1..75: mol_type = other DNA
catggtatgaccgaacgggaaattaccctttccagtcatggtatctgtccggactgtaatcgtactatcaccaaa

SEQ ID NO: 333891 - DNA, 75 bp, synthetic construct
  source 1..75: mol_type = other DNA
ttgttggcgcagcggtggttccggcaattcaggggtatattgcagatatgttccactcactacagctttcattcc

SEQ ID NO: 333892 - DNA, 75 bp, synthetic construct
  source 1..75: mol_type = other DNA
gtgtgaagtgcttagcctgttacaagcgggctaccagcgcgtgttgatggtcgattttgatggctttctgcctga

SEQ ID NO: 333893 - DNA, 75 bp, synthetic construct
  source 1..75: mol_type = other DNA
caggagattatcaacgggggaaacggaaggagtcagagtttaataatacgagctatatacagcgaattggatata

SEQ ID NO: 333894 - DNA, 75 bp, synthetic construct
  source 1..75: mol_type = other DNA
ggtaaaagcgttattacgcacatgccaaagtctaagtcgagagcgattgaaataattaatagtattgagcagaaa

SEQ ID NO: 333895 - DNA, 75 bp, synthetic construct
  source 1..75: mol_type = other DNA
cgttagctatgcagtgtgctgtttcagttcacccggatacagcactggacgtagcaaaaacggaatcaggtttta

SEQ ID NO: 333896 - DNA, 75 bp, synthetic construct
  source 1..75: mol_type = other DNA
tgattatgtttgcctttatttttggggggtttttattatatgttatattattttttgctaaatatatattggcta

SEQ ID NO: 333897 - DNA, 75 bp, synthetic construct
  source 1..75: mol_type = other DNA
tctcagaaaaataagcagagaaagtctcatcgaacaaatgtttttttattactcaagatttattgaggctagaat

SEQ ID NO: 333898 - DNA, 75 bp, synthetic construct
  source 1..75: mol_type = other DNA
atctattaatatcttcaaccagataatttgtaagatgccgtcaatgcccgatgatgatgtcgttattcttccaaa

SEQ ID NO: 333899 - DNA, 75 bp, synthetic construct
  source 1..75: mol_type = other DNA
tgcatgattaccgccttcattctggggttaacgtggtctgccccactccgggcacaggatcaacgttacatctga

SEQ ID NO: 333900 - DNA, 75 bp, synthetic construct
  source 1..75: mol_type = other DNA
acggcgagaaatttatgctgttctacggcatgagctccgagtctgcgatgaaacgtcacgttggcggcgttgcgg

SEQ ID NO: 333901 - DNA, 75 bp, synthetic construct
  source 1..75: mol_type = other DNA
cgtctgatgcggatttcgaaaaaactaaacagattctcgacctgaacccggcattaaacttcgtttgtattgatg

SEQ ID NO: 333902 - DNA, 75 bp, synthetic construct
  source 1..75: mol_type = other DNA
gtgaattcgcgcttttatatctacgaagcctataaagatgaagacgcagtggcattccataaaaccacgcctcac

SEQ ID NO: 333903 - DNA, 75 bp, synthetic construct
  source 1..75: mol_type = other DNA
acccagggcgatatgcgtttaatctccgtagtgttggggcgaaaaccgaccgtatccgttttaatgagtctgaga

SEQ ID NO: 333904 - DNA, 75 bp, synthetic construct
  source 1..75: mol_type = other DNA
agcaatactgaagctggatcaactttcggaatttcaatgtatcgtcatgagaatgtagctattaaaattttcaca

SEQ ID NO: 333905 - DNA, 75 bp, synthetic construct
  source 1..75: mol_type = other DNA
gtatttttttctgccagactgcaagtgcttacccttatcgcatttacactgccccagaaggtgcaattgtgaaaa

SEQ ID NO: 333906 - DNA, 75 bp, synthetic construct
  source 1..75: mol_type = other DNA
ggtggggattttgtaaataccctggtcaatggcgaagggctaagctggattggttatggtgccctgatcaccgcc

SEQ ID NO: 333907 - DNA, 75 bp, synthetic construct
  source 1..75: mol_type = other DNA
cgcctgcactgggggccgggcagcaaatcttgcgtgatcttggtacgccgatggagatggttgatcagatgggga

SEQ ID NO: 333908 - DNA, 75 bp, synthetic construct
  source 1..75: mol_type = other DNA
tgacttagccattaaagatgtaccgattctcaacggggacaaaattatctgttcgcgtctgaaacgagaagaaac

SEQ ID NO: 333909 - DNA, 75 bp, synthetic construct
  source 1..75: mol_type = other DNA
gggcgatgagtacgacgaggcgctctccactctggcggaactggaagatatcggctggaaagttcgcctgtgtct

SEQ ID NO: 333910 - DNA, 75 bp, synthetic construct
  source 1..75: mol_type = other DNA
gaaagatattttgaaataagattaattgaaagtgagatagactcgattaatgatgaaatattaagcaattcagtt

SEQ ID NO: 333911 - DNA, 75 bp, synthetic construct
  source 1..75: mol_type = other DNA
tcagtggtattatggggataataaaaaaggtggtatgtggtcacaggattatacaactactgataaatattcaac

SEQ ID NO: 333912 - DNA, 75 bp, synthetic construct
  source 1..75: mol_type = other DNA
atggatgatttaaaaacaaatgccaacctcctaaaatactggaatctaacacgtggtggtaatcgtaaatcactt

SEQ ID NO: 333913 - DNA, 75 bp, synthetic construct
  source 1..75: mol_type = other DNA
attattcaggactcactaccagcatttagcgaagaaaaaggaattagtaataatgccatctcttttaaagtaagt

SEQ ID NO: 333914 - DNA, 75 bp, synthetic construct
  source 1..75: mol_type = other DNA
atgactgaactcgcgcaattacaggccagtgccgaacaggcagcagccttattgaaagcaatgagccaccctaaa

SEQ ID NO: 333915 - DNA, 75 bp, synthetic construct
  source 1..75: mol_type = other DNA
agatcacgccggtaactccactgtggcatttaccatccgtgatggtcgtctgtttactctgcgtgagcgtgaact

SEQ ID NO: 333916 - DNA, 75 bp, synthetic construct
  source 1..75: mol_type = other DNA
gccaccgacgctggtcgcttccagctacgggatgaactttgagtttatgccggaactgaagtggagcttcggcta

SEQ ID NO: 333917 - DNA, 75 bp, synthetic construct
  source 1..75: mol_type = other DNA
ggcggcgatgggctttatcaatatcgagcagaaccgcatcattaaaatcttctcggtggtatccgtggtgttcct

SEQ ID NO: 333918 - DNA, 75 bp, synthetic construct
  source 1..75: mol_type = other DNA
ctgtttactctgcgtgagcgtgaactgcccgcttttcgtctgtatcgtatgcgtgcccgtagccagtcgatggta

SEQ ID NO: 333919 - DNA, 75 bp, synthetic construct
  source 1..75: mol_type = other DNA
tacgggatgaactttgagtttatgccagagctgaagtggagtttcggctaccctggcgcgattatctttatgatc

SEQ ID NO: 333920 - DNA, 75 bp, synthetic construct
  source 1..75: mol_type = other DNA
gccgccaacgctggttgcttccagctacgggatgaactttgagtttatgccagagctgaagtggagtttcggcta

SEQ ID NO: 333921 - DNA, 75 bp, synthetic construct
  source 1..75: mol_type = other DNA
tgcgtcattatctgacggtaaaaacgggggagatccctcggacagatgaagtctatgaggcatttaaactccatg

SEQ ID NO: 333922 - DNA, 75 bp, synthetic construct
  source 1..75: mol_type = other DNA
tggcgactttatcgggctggatgcagccgtggcagacctcgtgcacaccctcattgatgagtcgtatcgcggtca

SEQ ID NO: 333923 - DNA, 75 bp, synthetic construct
  source 1..75: mol_type = other DNA
tttttatcaaaactgccgaacgtgctggatgttgaacaggtgacaggccaggtggttaccaccggcgttccgggc

SEQ ID NO: 333924 - DNA, 75 bp, synthetic construct
  source 1..75: mol_type = other DNA
atgacgcatccataatacctcttgtctgcgatgtttatttaaaggcaagagaggcaggcgctatcaccaggccaa

SEQ ID NO: 333925 - DNA, 75 bp, synthetic construct
  source 1..75: mol_type = other DNA
gtttcattcgtcaggtaggcgttgacggtaatgactattccctggttgaaacagacagctgcgccgcactgcgct

SEQ ID NO: 333926 - DNA, 75 bp, synthetic construct
  source 1..75: mol_type = other DNA
acgccgctttctaatctgcatatctacacccagcgcaacacccgtatgcgtaaagcggaatttgttgaagaccgt

SEQ ID NO: 333927 - DNA, 75 bp, synthetic construct
  source 1..75: mol_type = other DNA
cgtaccgagagttatcgggagatgaaagaaaacggctggctggtccacaccgagcgtggtttgcctatcaatatg

SEQ ID NO: 333928 - DNA, 75 bp, synthetic construct
  source 1..75: mol_type = other DNA
tcgccacctgctgattgggataatgcacataaacaaagagtggaaaaacattttaacgattttgatttatcttta

SEQ ID NO: 333929 - DNA, 75 bp, synthetic construct
  source 1..75: mol_type = other DNA
gccttcgctggacggtaataccgtcgatatggatcgcgaacgtacccagtttgccgataacagcctgcaatacca

SEQ ID NO: 333930 - DNA, 75 bp, synthetic construct
  source 1..75: mol_type = other DNA
tacgttgaagcgaccggcggcaaattacgccttgatgttgaactgccggatggttctcactacggattcgtactg

SEQ ID NO: 333931 - DNA, 75 bp, synthetic construct
  source 1..75: mol_type = other DNA
ttttctatgtggatttttgttgtctttaatctggtttgttatgtttttatttctcgctatgttcctgaaacaaag

SEQ ID NO: 333932 - DNA, 75 bp, synthetic construct
  source 1..75: mol_type = other DNA
tgctccgctatattctgttggttggatgctgtatcgccgttttgcaacagttcacaggcgttaacgtaatgaact

SEQ ID NO: 333933 - DNA, 75 bp, synthetic construct
  source 1..75: mol_type = other DNA
cgcgtcatacggtttgtacacccatgatacaggctacattaccatctttggcatcctgttttttatgctgctgtt

SEQ ID NO: 333934 - DNA, 75 bp, synthetic construct
  source 1..75: mol_type = other DNA
gcgtgcccgtagccagtcgatggtggacggtaacgcctacgagctgttgctggatctgttcgaaaccaaaatcga

SEQ ID NO: 333935 - DNA, 75 bp, synthetic construct
  source 1..75: mol_type = other DNA
gacgcagcaagcgtcgcatccagcaattgcaccgcgccactggcggatgcggcgtaaacgccttatccgccctac

SEQ ID NO: 333936 - DNA, 75 bp, synthetic construct
  source 1..75: mol_type = other DNA
ggtgatcgtattgtgcataatgtccgaaccctgataccaggcaataacctgttctggattgcgccactaataaac

SEQ ID NO: 333937 - DNA, 75 bp, synthetic construct
  source 1..75: mol_type = other DNA
gcctggtgttccgtttcccgaccagtgagcaatacccctggccagcgccggtgctttaccacatctgcaccgagc

SEQ ID NO: 333938 - DNA, 75 bp, synthetic construct
  source 1..75: mol_type = other DNA
tacgcaggttgagatgatcctgtttgccggatttgtttatttcgttattagccttagcgcgtcgttgttggtcag

SEQ ID NO: 333939 - DNA, 75 bp, synthetic construct
  source 1..75: mol_type = other DNA
caagtggctgatatagcagcacatttccaagtgtcttcaatggctgtgagaattcgtgctcaacaattaggcttc

SEQ ID NO: 333940 - DNA, 75 bp, synthetic construct
  source 1..75: mol_type = other DNA
cgcccatgaactaggccattttattcgccatacactcaatagaaatagttttacagacacggttttcttcagaaa

SEQ ID NO: 333941 - DNA, 75 bp, synthetic construct
  source 1..75: mol_type = other DNA
tatccgcgattactgagcagtatggataatcctttttcacagacttgtcagcagccagcatttatgttcttttat

SEQ ID NO: 333942 - DNA, 75 bp, synthetic construct
  source 1..75: mol_type = other DNA
gtcaatgtttattcccggtgctcaaggaggggcactggcgcgtattggctcacagattgcgattggtgctgccgg

SEQ ID NO: 333943 - DNA, 75 bp, synthetic construct
  source 1..75: mol_type = other DNA
caaacaataacggatttatttctgctggtttcgccattcctgaacctgatgaacagagttttgatgtgcatccgc

SEQ ID NO: 333944 - DNA, 75 bp, synthetic construct
  source 1..75: mol_type = other DNA
tgatcgtgtagtatcagggagtgctttgttcaggaatgatgcgttggctgaaaatatttcctgttggttgacgaa

SEQ ID NO: 333945 - DNA, 75 bp, synthetic construct
  source 1..75: mol_type = other DNA
tgcccgccgccaggagaagccattcctgccgtcacccggtcagttcgttgcctggtgcaaagaggggcgctgcct

SEQ ID NO: 333946 - DNA, 75 bp, synthetic construct
  source 1..75: mol_type = other DNA
taattgcaggttttagtctttccgccacagcagccgaaactatccgttttgctaccgaagcttcctatcctccgt

SEQ ID NO: 333947 - DNA, 75 bp, synthetic construct
  source 1..75: mol_type = other DNA
atgaaactggccacagcgaatgaactggcaaaaaagtatggtgcctggctcattgaaggaaaggatccccaggca

SEQ ID NO: 333948 - DNA, 75 bp, synthetic construct
  source 1..75: mol_type = other DNA
agcaactattacgcccagccattgctcgacaccatcgcgcgtaacttttccctttccgccagttcggcaggcttt

SEQ ID NO: 333949 - DNA, 75 bp, synthetic construct
  source 1..75: mol_type = other DNA
cggacgacgacgagcgactgcgcgtacaatctgaacttggccagagcctggcaacccgcccggaactggaagaca

SEQ ID NO: 333950 - DNA, 75 bp, synthetic construct
  source 1..75: mol_type = other DNA
ggcaaaatcttcgtcgctgaattgcaacgcgtcattcgtattcgtaccggcgaagccgacgaagcggcgctgtaa

SEQ ID NO: 333951 - DNA, 75 bp, synthetic construct
  source 1..75: mol_type = other DNA
tattgatggggtatttggtgacacagcggtggtaaacgaatggctgaaaaccaatccgcaactgggcgttgctac

SEQ ID NO: 333952 - DNA, 75 bp, synthetic construct
  source 1..75: mol_type = other DNA
gaacgatgtcagttcaaaacattatgatcgatacgattatttgccagaaaaacgcagagcacttgagatctggga

SEQ ID NO: 333953 - DNA, 75 bp, synthetic construct
  source 1..75: mol_type = other DNA
gagcagccaggacaacaatgaccatccggttagagaaatggtcgctgtaacgtcaccagacctaaacattgaagg

SEQ ID NO: 333954 - DNA, 75 bp, synthetic construct
  source 1..75: mol_type = other DNA
gcctggtgttccggtatccaaccagcgaacagtatccatggccagcgccggttttatatcacgtctgcactgagc

SEQ ID NO: 333955 - DNA, 75 bp, synthetic construct
  source 1..75: mol_type = other DNA
gcccggcgctgatcgtgctgatgtcgatcgccaccggtctggcggtcgccagcaactattacgcccaaccgctgc

SEQ ID NO: 333956 - DNA, 75 bp, synthetic construct
  source 1..75: mol_type = other DNA
ccagtgccgaacaggcagcggccttattgaaagcaatgagccatcctaaacgattgctgattctgtgcatgctta

SEQ ID NO: 333957 - DNA, 75 bp, synthetic construct
  source 1..75: mol_type = other DNA
agcgtagggcgcttgagatctgggaagaccgggttaataactatcagcggcagcatgaaaacaacgttgtgaacc

SEQ ID NO: 333958 - DNA, 75 bp, synthetic construct
  source 1..75: mol_type = other DNA
accaagttcatgaatttcatggctaacacgatcaccccactgccatgcaatggagagagggtgagccgtgtttat

SEQ ID NO: 333959 - DNA, 75 bp, synthetic construct
  source 1..75: mol_type = other DNA
agggcggaataatatctccaacgctggcaaatatggttctggatggtctgcaacctctgttgaagaaaaccttct

SEQ ID NO: 333960 - DNA, 75 bp, synthetic construct
  source 1..75: mol_type = other DNA
tgatgagatttcacatgaatggctaatcgccaatatcccaacggatacggcgatcctgaaacgatggctgaaagc

SEQ ID NO: 333961 - DNA, 75 bp, synthetic construct
  source 1..75: mol_type = other DNA
acttacagatgtccgctttttacatcagcgtcgtgatgatttttataaatttagccagagaagccgttataccat

SEQ ID NO: 333962 - DNA, 75 bp, synthetic construct
  source 1..75: mol_type = other DNA
gacaagggatgttattgctgtcaatggttctgcgcaatatctattaagtcataatattattccctatatttatgt

SEQ ID NO: 333963 - DNA, 75 bp, synthetic construct
  source 1..75: mol_type = other DNA
agtatgcgcggattatttgttcaggtctggatttgacgggtagctgttcgcgtttctatgatgaaaataagaatc

SEQ ID NO: 333964 - DNA, 75 bp, synthetic construct
  source 1..75: mol_type = other DNA
agcagcactatctggggccgcttaacgggccggagctgctggtggtgctaccggaagcgaaagcggtgggatcgg

SEQ ID NO: 333965 - DNA, 75 bp, synthetic construct
  source 1..75: mol_type = other DNA
gcagcgtagtctcaccgccgccagcagtctcgacgatatgctgatgcgttttcaccgctgggcgcgcgatctcgg

SEQ ID NO: 333966 - DNA, 75 bp, synthetic construct
  source 1..75: mol_type = other DNA
tatggggcatttttcggttattgttttccatttcatatacctttctgtatcactagaagacaataatattttatg

SEQ ID NO: 333967 - DNA, 75 bp, synthetic construct
  source 1..75: mol_type = other DNA
actacttccttaagaggggagggtggagtcgatttaactctgcctttatgaagtatttgtctacctctttagccg

SEQ ID NO: 333968 - DNA, 75 bp, synthetic construct
  source 1..75: mol_type = other DNA
ttgcgattggtgcttcaacgggtggaactgaggcaattcgtcacgtactgcaaccgttgccgctttccagtccgg

SEQ ID NO: 333969 - DNA, 75 bp, synthetic construct
  source 1..75: mol_type = other DNA
cccgcgcacgtaatcatattcatgttctggaagagaacatggcgctgttgatggaacaggctatcgccaacgaag

SEQ ID NO: 333970 - DNA, 75 bp, synthetic construct
  source 1..75: mol_type = other DNA
ctcatgccatactattgcctttgctgcaattcaaatcgcatattcacttaagtatgcgcggattatttgttctgg

SEQ ID NO: 333971 - DNA, 75 bp, synthetic construct
  source 1..75: mol_type = other DNA
gcaattgatgccgttgccaatgtgctggggaatgcgcagcaaaaactgcaacaggttcagatgctgccagtgttt

SEQ ID NO: 333972 - DNA, 75 bp, synthetic construct
  source 1..75: mol_type = other DNA
ggccgccgaccttattcgctggaaacaatgttccgtattcactgcctgcaactgtggtacagcctcggtgatgaa

SEQ ID NO: 333973 - DNA, 75 bp, synthetic construct
  source 1..75: mol_type = other DNA
acatcatcaaaaataaagcatctttgccaaaatgcaaactaaaatctttacagacccaacatgaaaaaatcgaat

SEQ ID NO: 333974 - DNA, 75 bp, synthetic construct
  source 1..75: mol_type = other DNA
tttgcaggaaaggaatatgagttaaagaacattgatgaaaaaacacctattctttttcagtggtttgaacataat

SEQ ID NO: 333975 - DNA, 75 bp, synthetic construct
  source 1..75: mol_type = other DNA
gtgcagagttccccctgtcaaacggtttcttttgcaggaaaggaatatgagttaaaggtcattgatgaaaaaacg

SEQ ID NO: 333976 - DNA, 75 bp, synthetic construct
  source 1..75: mol_type = other DNA
ttccaatagttaatactaagcagcatccctatttagataatgtcacaaatgcggcaaggatagagagtgatcgta

SEQ ID NO: 333977 - DNA, 75 bp, synthetic construct
  source 1..75: mol_type = other DNA
tcagtgcagaagaatcaaaagatatgacaagaaaaaaaatgcaatatagaacttcaaccgattcttatgctaatt

SEQ ID NO: 333978 - DNA, 75 bp, synthetic construct
  source 1..75: mol_type = other DNA
tctggatttaacagggagttgttcgcgtttttatgatgaaaataagaatcctatgccctcggagttgagtcggga

SEQ ID NO: 333979 - DNA, 75 bp, synthetic construct
  source 1..75: mol_type = other DNA
tgatacagcgattcaatatgatattattccatttatgaaagcgtcagaaattgaagagtcttgtagtttgataaa

SEQ ID NO: 333980 - DNA, 75 bp, synthetic construct
  source 1..75: mol_type = other DNA
ccggggctcctgcccccggtggggcattatctcaggcggtgaaagccggggaaaccatttatctcgccggtcagg

SEQ ID NO: 333981 - DNA, 75 bp, synthetic construct
  source 1..75: mol_type = other DNA
agtatgcgcgggtcatttgttccggcctggatttaacgggtagttgttcgcgtttctatgacgaagataagaatc

SEQ ID NO: 333982 - DNA, 75 bp, synthetic construct
  source 1..75: mol_type = other DNA
atattttgagacagattcacaaagaactgctgatctctgtaccgttgtctaaggaaggtgcgaacaagtccctga

SEQ ID NO: 333983 - DNA, 75 bp, synthetic construct
  source 1..75: mol_type = other DNA
tggatcgctgggccgtgggctgtgcgaaagcagcgcaggaagacatcctcaaggcttacgaagcgtacgatttcc

SEQ ID NO: 333984 - DNA, 75 bp, synthetic construct
  source 1..75: mol_type = other DNA
aaaactcatactggcgttatgagggttacgccctgggcgatcctgacctgtatgccgccgtggatgagtctgcgg

SEQ ID NO: 333985 - DNA, 75 bp, synthetic construct
  source 1..75: mol_type = other DNA
aaaagcaaaagacaaagagggatgcagacattgtcttgctgaaattatgcaacaaaatattgctattttatatca

SEQ ID NO: 333986 - DNA, 75 bp, synthetic construct
  source 1..75: mol_type = other DNA
ttatcatcgctcaaatatgcccatcctgtgtgaaatgattgagcaactgtgggtcaggatgggacctggtttaca

SEQ ID NO: 333987 - DNA, 75 bp, synthetic construct
  source 1..75: mol_type = other DNA
gtgtttgcgtttttcctgcccgacacgccgccaaaaagcaccggcaaaatggatattaaagtcatgctcggcctg

SEQ ID NO: 333988 - DNA, 75 bp, synthetic construct
  source 1..75: mol_type = other DNA
gcaaaaagtgctggcggtattgatgttcgcaggcgcgctgctgatgtatttcgctgcgcaacagaccacttttgc

SEQ ID NO: 333989 - DNA, 75 bp, synthetic construct
  source 1..75: mol_type = other DNA
ggcacagtatcacaacgacccacgacttaccgtactggtcggcgcagaccttgtggctgctgaagaactacgcct

SEQ ID NO: 333990 - DNA, 75 bp, synthetic construct
  source 1..75: mol_type = other DNA
gtcacgttacgccgccgtttttccctggtaagcgcctggccgtgactatcccgaaaaatttacacgtttacacac

SEQ ID NO: 333991 - DNA, 75 bp, synthetic construct
  source 1..75: mol_type = other DNA
tggtaatgaatatgaattacgtgaaactgattcatgcgcccgtctgaaatggtcacttttggcggcgtgggctaa

SEQ ID NO: 333992 - DNA, 75 bp, synthetic construct
  source 1..75: mol_type = other DNA
cgttcttttacaagtcagtcaccaacgacctgttacgcgtggcactgaacggtacacatgccgcagatgaaacca

SEQ ID NO: 333993 - DNA, 75 bp, synthetic construct
  source 1..75: mol_type = other DNA
atgcctggaacggaaaaaatgaaacatgtcagtttgactatgcaggttgagaacgacctgaaacatcaactaagt

SEQ ID NO: 333994 - DNA, 75 bp, synthetic construct
  source 1..75: mol_type = other DNA
gcctgattactaaaaatctggcggagcaattaggtatgagtattacacctgtgcgtgaagcattattacgtctgg

SEQ ID NO: 333995 - DNA, 75 bp, synthetic construct
  source 1..75: mol_type = other DNA
ggtaaacgtattggtatggaaaacggcactacccaccagaaatatattcaggatcagcatccggaagtgaaaacc

SEQ ID NO: 333996 - DNA, 75 bp, synthetic construct
  source 1..75: mol_type = other DNA
atcttctttatgctggcattgccgtttttcaccaaacgctttggtatcaaaaaggtattattacttggtctggtc

SEQ ID NO: 333997 - DNA, 75 bp, synthetic construct
  source 1..75: mol_type = other DNA
atgttattgtcaacgccacgatgtttgaccgtaacggtcaaacatcgtggcgttgacaccggcaagttcatttat

SEQ ID NO: 333998 - DNA, 75 bp, synthetic construct
  source 1..75: mol_type = other DNA
acttaaattcaccttaccccaaccagattcctatatatttaaaatcagcaaaaacgagcagtggttgactatatt

SEQ ID NO: 333999 - DNA, 75 bp, synthetic construct
  source 1..75: mol_type = other DNA
tcgcttaaaggaaatattgatgcggcagcgaaatttgagaaagcatcactttctggcgttaatattgactcatca

SEQ ID NO: 334000 - DNA, 75 bp, synthetic construct
  source 1..75: mol_type = other DNA
ggatggcaccaatcctctccttcaccgctgatgaagtgtggggctacctgccgggcgaacgtgaaaaatacgtct

SEQ ID NO: 334001 - DNA, 75 bp, synthetic construct
  source 1..75: mol_type = other DNA
gcgtggcgatctcgccaagcgcgaaccgggaatgctggtgcgttggactgatgatgatctgtacggcatcatccg

SEQ ID NO: 334002 - DNA, 75 bp, synthetic construct
  source 1..75: mol_type = other DNA
ccgatcgagctgaaagtagagcaagaatacggtaagccgggtgagaaattcaccgccgccgagttccgcgccaag

SEQ ID NO: 334003 - DNA, 75 bp, synthetic construct
  source 1..75: mol_type = other DNA
aaagaatggtaaaagtcatgtagtaacactgcatccgctggcactgtctatcctgaagaaacagcgaattatctc

SEQ ID NO: 334004 - DNA, 75 bp, synthetic construct
  source 1..75: mol_type = other DNA
caagctgaaaaattaaaaaatttatttatagaatgggggaattttattatgaataacgtcattactgtgcagcag

SEQ ID NO: 334005 - DNA, 75 bp, synthetic construct
  source 1..75: mol_type = other DNA
caaatgcgctgggatcaaattaatggagagcgttggaccataccagccactaaaaatgggaaaagccatattgtt

SEQ ID NO: 334006 - DNA, 75 bp, synthetic construct
  source 1..75: mol_type = other DNA
aagcgtgcgaaaaaatccgtcagaacggcggtaacgtcacccgtgaagcgggtccggtaaaaggcggtactacgg

SEQ ID NO: 334007 - DNA, 75 bp, synthetic construct
  source 1..75: mol_type = other DNA
gtgtttattcagtttattagcaggcagggacgaaatcttctggttaatataaaagatatcagtttcgttcttcag

SEQ ID NO: 334008 - DNA, 75 bp, synthetic construct
  source 1..75: mol_type = other DNA
tggaagatgacttcagtgaggtttacagaaaaataaaagaaattccaccacgagtgaataatacagatgaaggtg

SEQ ID NO: 334009 - DNA, 75 bp, synthetic construct
  source 1..75: mol_type = other DNA
cttgataataccgagccgagtcaggtcagtgtagggcgctggaatgaccatctgggcgcgactgagtcgtattat

SEQ ID NO: 334010 - DNA, 75 bp, synthetic construct
  source 1..75: mol_type = other DNA
cccgcctgaatgaacttgggacccagcttaaccgcgaggtcagtaccagcggcaccattcaggaactgacgatgc

SEQ ID NO: 334011 - DNA, 75 bp, synthetic construct
  source 1..75: mol_type = other DNA
accgtgcgtgaactggtggcgattggacgctacccgtggcacggtgcgctggggcgctttggcgcggcagatcgc

SEQ ID NO: 334012 - DNA, 75 bp, synthetic construct
  source 1..75: mol_type = other DNA
caatttcgttcaccccaccagagacgggaaacataaataaaattacaacaaaacgagcagattttggtgcatcta

SEQ ID NO: 334013 - DNA, 75 bp, synthetic construct
  source 1..75: mol_type = other DNA
tatcgttcaacgatgattattggtctggctcctgaagggaaggtaagagtctggctgggagatcgcggtaatccg

SEQ ID NO: 334014 - DNA, 75 bp, synthetic construct
  source 1..75: mol_type = other DNA
tctgggcgcgactgagtcgtattataacaaggggaaagcattacctctgatgttgcgtttttgctgggattcaat

SEQ ID NO: 334015 - DNA, 75 bp, synthetic construct
  source 1..75: mol_type = other DNA
attgtcggtgaagtcgatggtgatgaccccgcagtattcagaccaatacaaaaatacatcaatggcacatggtat

SEQ ID NO: 334016 - DNA, 75 bp, synthetic construct
  source 1..75: mol_type = other DNA
cccttcaggtcatgtattgtctggtattaatgttcaggatacagggtctaactctgccgataatatagcgggcgt

SEQ ID NO: 334017 - DNA, 75 bp, synthetic construct
  source 1..75: mol_type = other DNA
atagagataaactaaacactaattataatatatttagtggaggagaatttgatataaaacctcccctcaactttt

SEQ ID NO: 334018 - DNA, 75 bp, synthetic construct
  source 1..75: mol_type = other DNA
tattaatgacacttgttaatgctggtgtgggaattttgggagcaatgatcaatcctataattcaacctatgataa

SEQ ID NO: 334019 - DNA, 75 bp, synthetic construct
  source 1..75: mol_type = other DNA
atttcgaactatagttgtcttttttagcggactcttggtatggaatattgcccagttcttaatttctggtatagg

SEQ ID NO: 334020 - DNA, 75 bp, synthetic construct
  source 1..75: mol_type = other DNA
agcctataacgcaactattggtggggcatcaacgttaattcttcattttaatatcggggaaggaagttgtcccgc

SEQ ID NO: 334021 - DNA, 75 bp, synthetic construct
  source 1..75: mol_type = other DNA
cgccgacctgactggtcaggcgaaccatctggcggcgaccattggcgcggacatcgtcaaacagaaaatggcgga

SEQ ID NO: 334022 - DNA, 75 bp, synthetic construct
  source 1..75: mol_type = other DNA
gattggcaccaacgtgggtgattactatcaagcactaatagcgtcaaccggacaggcgcaggttgataaagagca

SEQ ID NO: 334023 - DNA, 75 bp, synthetic construct
  source 1..75: mol_type = other DNA
tggggtcactgagcctgcaatgtacggcatcaacctgaaatatcgcttcccgatgctgtgcgcgatgattggttc

SEQ ID NO: 334024 - DNA, 75 bp, synthetic construct
  source 1..75: mol_type = other DNA
tgccagaccgaaagaaattgagcaactccccatggtgaaaggctgtttcaccaatgccgggcaatttcaggtggt

SEQ ID NO: 334025 - DNA, 75 bp, synthetic construct
  source 1..75: mol_type = other DNA
ctgactgcgctggggatttctgcgcttaacaatcgtgatctgatccgtcaggtaagcaccgatttacagcgctgg

SEQ ID NO: 334026 - DNA, 75 bp, synthetic construct
  source 1..75: mol_type = other DNA
tcggtgacgtcagccgcttaactgacgttgtccgcagcatacagacgcagttcccgcgccaggtcggtcagctct

SEQ ID NO: 334027 - DNA, 75 bp, synthetic construct
  source 1..75: mol_type = other DNA
caggttgataaagagcaggtaaaaaaagccgcccggcagaatatgaaatggcatgagcagttgatctctcatttc

SEQ ID NO: 334028 - DNA, 75 bp, synthetic construct
  source 1..75: mol_type = other DNA
gatgaacacgcaaacaggacgcttcgctgcggatatgcaggtatcgctggtcaatgatggccccgtgacattctg

SEQ ID NO: 334029 - DNA, 75 bp, synthetic construct
  source 1..75: mol_type = other DNA
catccgctgtatcctgccaccggaagatgaacgcgacagacaccccgatgaatccctgctgaaaaccacataccg

SEQ ID NO: 334030 - DNA, 75 bp, synthetic construct
  source 1..75: mol_type = other DNA
cgtcgccagattgaagaaatttctgcggcctttgaacgtgcgcatgaactgggcatggtgacagtgctgtgggcc

SEQ ID NO: 334031 - DNA, 75 bp, synthetic construct
  source 1..75: mol_type = other DNA
ggtttgatcctcggttttcgcaatgtgatcggcgatttgcccatgagcaacggtcagacgctggcgcaaatgtac

SEQ ID NO: 334032 - DNA, 75 bp, synthetic construct
  source 1..75: mol_type = other DNA
tttctccacagctgatgaacgcttatctgctcgggcagcagctgccggaagtgtgggactttggcatgttcagca

SEQ ID NO: 334033 - DNA, 75 bp, synthetic construct
  source 1..75: mol_type = other DNA
cgcgatgattggttctggtctggcaggattgctatgcggcctgaacggcgttatggcgaatggtatcggcgtagg

SEQ ID NO: 334034 - DNA, 75 bp, synthetic construct
  source 1..75: mol_type = other DNA
aattataaaaatggcggtattttttatcgttcagcccgtgatggttatggttttgaagccgactggtccgaattt

SEQ ID NO: 334035 - DNA, 75 bp, synthetic construct
  source 1..75: mol_type = other DNA
ctcattactctagaaaatctcgcattagctttaaccggaaagtcagacctgccagtggagctacggctgcgaaat

SEQ ID NO: 334036 - DNA, 75 bp, synthetic construct
  source 1..75: mol_type = other DNA
ccgacagaaagcctgttatcggtcaacgaacaggaaagggtgacaagacccactgtattatttttatgaaggagg

SEQ ID NO: 334037 - DNA, 75 bp, synthetic construct
  source 1..75: mol_type = other DNA
ttttaaatggaatgaaacgcaaatatctgtccgccagatattggcactaaccgacgcgaaaccaatcatcagcca

SEQ ID NO: 334038 - DNA, 75 bp, synthetic construct
  source 1..75: mol_type = other DNA
cgaggcccagggcgtcgccaagatcgtgctggaagccgtgcagatcatgctttttcgcctggccttgcagatggc

SEQ ID NO: 334039 - DNA, 75 bp, synthetic construct
  source 1..75: mol_type = other DNA
gccgagaagatcgaccgcatcagccgcctacctttgcccgaggccgagcgcctggtggcctcgatacaggccaaa

SEQ ID NO: 334040 - DNA, 75 bp, synthetic construct
  source 1..75: mol_type = other DNA
caacgtcttcttggacataaatctgattcaatggcggcgcattatagggacagtcgcgagcgggagtgggacaaa

SEQ ID NO: 334041 - DNA, 75 bp, synthetic construct
  source 1..75: mol_type = other DNA
atatcggcgtcgcgggtttgacgctgatggtgcctttcctcgcggcgtacatcggttattccattgcagaacgct

SEQ ID NO: 334042 - DNA, 75 bp, synthetic construct
  source 1..75: mol_type = other DNA
gcgatatttagcgatatcagaaaggaagagcacacattgtgtgatgggcgacgcctgattatcagtcctgacctg

SEQ ID NO: 334043 - DNA, 75 bp, synthetic construct
  source 1..75: mol_type = other DNA
acgagaagccagccatctggcaacgaacagggaaagcggacaaaacgcactgggtaatcttcgtgaagggggccg

SEQ ID NO: 334044 - DNA, 75 bp, synthetic construct
  source 1..75: mol_type = other DNA
atatgtgctgtggcagccgtatgttctggttcgataagaatgacgaccgggcgatatttagcgatatcagaaagg

SEQ ID NO: 334045 - DNA, 75 bp, synthetic construct
  source 1..75: mol_type = other DNA
gaacgtgctgaaaagtctggcgcgtaaaaatgggtcttcgactgatgaaaaagaagacgacctggatttggattt

SEQ ID NO: 334046 - DNA, 75 bp, synthetic construct
  source 1..75: mol_type = other DNA
agtctggcgcgtaaaaatgggtcttcgactgatgagaaggaagacgacctggatctggattttgaaattaattaa

SEQ ID NO: 334047 - DNA, 75 bp, synthetic construct
  source 1..75: mol_type = other DNA
gggatgagtatgaaaaccgtcgtaaacgccagaaagagggtattgagctggctaaacggcaaggccggtatcagg

SEQ ID NO: 334048 - DNA, 75 bp, synthetic construct
  source 1..75: mol_type = other DNA
agcaatctggttggcattctacctgccgaaagttttcctactgatatccgctctctgggcgtcggttttgcgacc

SEQ ID NO: 334049 - DNA, 75 bp, synthetic construct
  source 1..75: mol_type = other DNA
cgaaagcccggaggcctggcgctggctgctggcatcggcggcgttgccagctttgctgattacgcttttacgctg

SEQ ID NO: 334050 - DNA, 75 bp, synthetic construct
  source 1..75: mol_type = other DNA
tttgctgctggcggtcacgttgatggtgatggcctgtttgccttctggcagttcattaacgctgctgctttttgt

SEQ ID NO: 334051 - DNA, 75 bp, synthetic construct
  source 1..75: mol_type = other DNA
atggcccgaaaactgaagccgttaagtcgcggagaacgggccgtcgtgcggcaactggcgtactgccttgtgctg

SEQ ID NO: 334052 - DNA, 75 bp, synthetic construct
  source 1..75: mol_type = other DNA
attgctgcgctcactttcggcgcacacctgaccgacggttatgtcctcggcgtcattggttacgccattattcag

SEQ ID NO: 334053 - DNA, 75 bp, synthetic construct
  source 1..75: mol_type = other DNA
tgagtcgacttggcgcggcggtaagtactggcctgctgccgtgggtgctggcgcagtggggaatgcaagtcacct

SEQ ID NO: 334054 - DNA, 75 bp, synthetic construct
  source 1..75: mol_type = other DNA
gccctgggccacacgacgcagcgccgttgttcgaccactttatcgagttaattgagcagtaccgtaaaaccgcta

SEQ ID NO: 334055 - DNA, 75 bp, synthetic construct
  source 1..75: mol_type = other DNA
ctatagctggacacaagggagctggacgctggctggcggcctgccggaagcgaaaaaagaagacgagctgccgtt

SEQ ID NO: 334056 - DNA, 75 bp, synthetic construct
  source 1..75: mol_type = other DNA
gagaaaaatgtggtgatgatcaccgcccagaaccacggttttgcggtggacgaagcaacattacctgcaaacctg

SEQ ID NO: 334057 - DNA, 75 bp, synthetic construct
  source 1..75: mol_type = other DNA
taaaactgttgctgccgaattgccagcgatgcagtgtctgcaactggcaagagcagagcaacgacgcggagcgac

SEQ ID NO: 334058 - DNA, 75 bp, synthetic construct
  source 1..75: mol_type = other DNA
aggggcgttgccttttcggcttctcaggcgagaagccgttcttattaccggacaatgaaggggtaaagatgaaca

SEQ ID NO: 334059 - DNA, 75 bp, synthetic construct
  source 1..75: mol_type = other DNA
gtttgaggaagctgtattgctggagacggcggcagatctgcgctttgcgtcggaatttgtcgctcgccatattgc

SEQ ID NO: 334060 - DNA, 75 bp, synthetic construct
  source 1..75: mol_type = other DNA
cgagccgatttacggacaattgttaaagaaggatttgcgcaagagaagaaaattaatgaccagcaagcagcgtac

SEQ ID NO: 334061 - DNA, 75 bp, synthetic construct
  source 1..75: mol_type = other DNA
ttattcctttatcacacttatcgggtgaggaactccaggcccacctgcgctttaaccgggttaccgatgaaaaag

SEQ ID NO: 334062 - DNA, 75 bp, synthetic construct
  source 1..75: mol_type = other DNA
attccgcaggccttcagtcaggcgcttcaggacggcatgagcgtcccgctctatattcatctcgccggtagctag

SEQ ID NO: 334063 - DNA, 75 bp, synthetic construct
  source 1..75: mol_type = other DNA
cagcaaaaatatataaaaatgataatatctcaattaatgagggggagttcaacgctactgcacttataaatgtaa

SEQ ID NO: 334064 - DNA, 75 bp, synthetic construct
  source 1..75: mol_type = other DNA
tggacccggcggcggaagggcatgattatacgatccgtttcggtaacggcgcgtggcatgagtcagatgcggaac

SEQ ID NO: 334065 - DNA, 75 bp, synthetic construct
  source 1..75: mol_type = other DNA
actggggcggcgtggtctggcgttaccgctatgacgctgatggcctgtgtaccgccagggtcaacggcctggagg

SEQ ID NO: 334066 - DNA, 75 bp, synthetic construct
  source 1..75: mol_type = other DNA
catcgtaccgacctgttgaatgaacgacgaccgatgatgcaggcatgggcagattacgttatgtctgcggtctcg

SEQ ID NO: 334067 - DNA, 75 bp, synthetic construct
  source 1..75: mol_type = other DNA
acccactggagattaaaaaggctgaagctgaaaaagttgttatcccaacatttgccgatgcagccaggcgtgtac

SEQ ID NO: 334068 - DNA, 75 bp, synthetic construct
  source 1..75: mol_type = other DNA
atcaggaggatgtgaacaatctccgcaatgcgatgaaaagcgccaaaggccctggcaacttccgcaacctgttta

SEQ ID NO: 334069 - DNA, 75 bp, synthetic construct
  source 1..75: mol_type = other DNA
catcggaggtcatcatcgagaagctgagctgttacatcacagatgggattaaggccaatcagcagcctgtgattt

SEQ ID NO: 334070 - DNA, 75 bp, synthetic construct
  source 1..75: mol_type = other DNA
ttttcagagctcaatcaaataaattacggtaataatgaggaagatgatgaacgtttttttatgttatatgattca

SEQ ID NO: 334071 - DNA, 75 bp, synthetic construct
  source 1..75: mol_type = other DNA
gctgaatctggttttctgtgcgcttatcgtgtgggcgcacgggaatttgtcaaaaatcctttcgttattgcggag

SEQ ID NO: 334072 - DNA, 75 bp, synthetic construct
  source 1..75: mol_type = other DNA
aaaaaaatgttgagaggacgacgttcacgtttacagcaaaaatatataaggctgaaggtgttacaattaatagcg

SEQ ID NO: 334073 - DNA, 75 bp, synthetic construct
  source 1..75: mol_type = other DNA
tcgccacgcactgaagacgagcatatgattgcgggaaatgcccggctgatggcggaaattccgcacttactcgca

SEQ ID NO: 334074 - DNA, 75 bp, synthetic construct
  source 1..75: mol_type = other DNA
ggcggggaagatgaagtactgatgagccgtaccggcgcggataaaccggaagggcaccggacggtactgagccgg

SEQ ID NO: 334075 - DNA, 75 bp, synthetic construct
  source 1..75: mol_type = other DNA
atgtcactgacacccaccgatgaacagtctgccattattcactggcaggggcagaagctggttgtgaacgccttt

SEQ ID NO: 334076 - DNA, 75 bp, synthetic construct
  source 1..75: mol_type = other DNA
gctgcacgcaaattccgccacggtcagatgtactgcgcaatgattggccttaatcgtgtaggaaccatcaagaaa

SEQ ID NO: 334077 - DNA, 75 bp, synthetic construct
  source 1..75: mol_type = other DNA
gggaataaatgacgcgaaatatcgtccaggtgaatttcgtgaaacagatgatgtcgtgatcgccgattatgacgg

SEQ ID NO: 334078 - DNA, 75 bp, synthetic construct
  source 1..75: mol_type = other DNA
gcactggcgctgaaagatcagactgaacggttacgcggggcgggcgccgagttaagtcagttacgcctggaagag

SEQ ID NO: 334079 - DNA, 75 bp, synthetic construct
  source 1..75: mol_type = other DNA
acgggaagtattataattccaccatgtgagataaataatggggatgcaattaacgttgacttcgggaatataagg

SEQ ID NO: 334080 - DNA, 75 bp, synthetic construct
  source 1..75: mol_type = other DNA
acgttgcaaatgcaatattcacatttacagcaaaaatatataaaaatgataacatctcaattaatgagggagagt

SEQ ID NO: 334081 - DNA, 75 bp, synthetic construct
  source 1..75: mol_type = other DNA
tacgaagttattaatgcgctctctgaaaaaaatgttgagaggacgacgttcacgtttacagcaaaaatatataag

SEQ ID NO: 334082 - DNA, 75 bp, synthetic construct
  source 1..75: mol_type = other DNA
ccctggtactgaacagtctgatgcgccagctggtaagtgaacaaagccagaaagctgctgatacatccccgtcag

SEQ ID NO: 334083 - DNA, 75 bp, synthetic construct
  source 1..75: mol_type = other DNA
tcagtttctgtgcagtgctgacaaggagccggggccgcagcatttgccggatgaggacgcccgggccggcacgga

SEQ ID NO: 334084 - DNA, 75 bp, synthetic construct
  source 1..75: mol_type = other DNA
tataaccgttctgtacgcgatgaggctgagcgtaaatttccgtttaatgtggagtgcaaaacctcccaccaactg

SEQ ID NO: 334085 - DNA, 75 bp, synthetic construct
  source 1..75: mol_type = other DNA
attggcgaagcgggagatatcgacaccgcattgatcgttctgaaatatgcctccggcgcgatggcgaccatcgtc

SEQ ID NO: 334086 - DNA, 75 bp, synthetic construct
  source 1..75: mol_type = other DNA
tttttggtggaaaatcagcggaacatgaagtgtctctgcaatcggcaaaaaacattgtcgatgccattgataaaa

SEQ ID NO: 334087 - DNA, 75 bp, synthetic construct
  source 1..75: mol_type = other DNA
agcgatttctatgcctacgacaccaagtacattgacgaagatggcgcgaaagtggtagttccggcagccattgcg

SEQ ID NO: 334088 - DNA, 75 bp, synthetic construct
  source 1..75: mol_type = other DNA
agtatgtatccgaaactgtggcaagccagcggtctgagttacaccgacctcatcacgcgtttgattgaactggcg

SEQ ID NO: 334089 - DNA, 75 bp, synthetic construct
  source 1..75: mol_type = other DNA
aaacaatatgaagtacacaccagtgactttcgatcgctctgacgaatcagcgaaggcactggaatctggtcgctg

SEQ ID NO: 334090 - DNA, 75 bp, synthetic construct
  source 1..75: mol_type = other DNA
gacggcattggcttcctgacgcacgataaagcggggctaaaaagcgcaaaagaactggatggtgcaacagtctgc

SEQ ID NO: 334091 - DNA, 75 bp, synthetic construct
  source 1..75: mol_type = other DNA
aatgctgaagagatgggcatcaattcccagaacgtcgatgaaaaagcggcgaatccggcaacgcctgatatggcg

SEQ ID NO: 334092 - DNA, 75 bp, synthetic construct
  source 1..75: mol_type = other DNA
ttccaccaccatcccctgaaccagaaccggtgccggaaattgtacgactcgatagcctggcactgtttgatgccg

SEQ ID NO: 334093 - DNA, 75 bp, synthetic construct
  source 1..75: mol_type = other DNA
gtgcagaggcggttcgcgactggatgcgggataccggcgatattccccaaagctgttttgccgtgcagggatacg

SEQ ID NO: 334094 - DNA, 75 bp, synthetic construct
  source 1..75: mol_type = other DNA
ctgcagcaggctatcgatacctgggttccgcctttaccagcgccggagccggaagcacctccgcaaatcatccgt

SEQ ID NO: 334095 - DNA, 75 bp, synthetic construct
  source 1..75: mol_type = other DNA
gttgggatgcgcaggcatggcgcgtgtagacgtgtttttaaccccagagaacgaagtggtgatcaacgagatcaa

SEQ ID NO: 334096 - DNA, 75 bp, synthetic construct
  source 1..75: mol_type = other DNA
cctctgccgcctgtatggataaagacgtcaccaaacgtctgctgcgtgatgccggtttgaacattgcgccattta

SEQ ID NO: 334097 - DNA, 75 bp, synthetic construct
  source 1..75: mol_type = other DNA
ttaaccaattttcgatgagtcaagattattggcttattgaaggttatgaaagcgaaagaagtataaagtatagta

SEQ ID NO: 334098 - DNA, 75 bp, synthetic construct
  source 1..75: mol_type = other DNA
ttgagcgtaacgtaggttcagaaagcccgctgaaaattaaacgtgggcaaaataatctctggaataacggcggta

SEQ ID NO: 334099 - DNA, 75 bp, synthetic construct
  source 1..75: mol_type = other DNA
atgacagaaacaacctcacagcaagataattacgaaggcatttgtctggagcctgattcatttgcggtaaatgtt

SEQ ID NO: 334100 - DNA, 75 bp, synthetic construct
  source 1..75: mol_type = other DNA
tacaataagctcaacaaaaaaatgacaagaaattaccatttgagtgagagagaagaatttgaaatgggaatttat

SEQ ID NO: 334101 - DNA, 75 bp, synthetic construct
  source 1..75: mol_type = other DNA
ttttgcgaagtacattatgttgttaatgggcgtaaaggagagagcaatatgataaagaaaaaggtagcacgctct

SEQ ID NO: 334102 - DNA, 75 bp, synthetic construct
  source 1..75: mol_type = other DNA
cgaagccctgaatatgcccatgagatggctgctcaggcgcacaaaaaattgctcgaagcagccaacggtgatcaa

SEQ ID NO: 334103 - DNA, 75 bp, synthetic construct
  source 1..75: mol_type = other DNA
tctcgcagcctttgtcggggatgctcaggttgaacagacacagcttgaagataacatggatagtttgcaaacgca

SEQ ID NO: 334104 - DNA, 75 bp, synthetic construct
  source 1..75: mol_type = other DNA
ctatgccaatagcctgcgcagttttgatagctggcttaatctcaaggccggtagtgaaggcggtatgcattggcg

SEQ ID NO: 334105 - DNA, 75 bp, synthetic construct
  source 1..75: mol_type = other DNA
ggccaattgaaataacatactacacatggcttgataggtattttgtatcaaatagtggaggttctcatcacgcag

SEQ ID NO: 334106 - DNA, 75 bp, synthetic construct
  source 1..75: mol_type = other DNA
cacctgctgggtaaagaaggcgattacggtaaggatctgaaactggataacaagtgggcctacaacatcatcaaa

SEQ ID NO: 334107 - DNA, 75 bp, synthetic construct
  source 1..75: mol_type = other DNA
tcacagcaaaagaacgcttcaccgctttacagtcaggggaagtggatttgctctcccgtaatacgacctggactt

SEQ ID NO: 334108 - DNA, 75 bp, synthetic construct
  source 1..75: mol_type = other DNA
gatgagttaataaaaaacagacatgataatgaatatctccagacattaataaatgatgtagctgaaataaaaaac

SEQ ID NO: 334109 - DNA, 75 bp, synthetic construct
  source 1..75: mol_type = other DNA
tcagccacaggatgtagaactgacagtgacattacctgtgaccgaattctttgataatgacaatcaaccaaatga

SEQ ID NO: 334110 - DNA, 75 bp, synthetic construct
  source 1..75: mol_type = other DNA
gcaggaaatctcaacattctctggtatgaaccgaatctatcttaccggtggaggagcagagcttatttatcctta

SEQ ID NO: 334111 - DNA, 75 bp, synthetic construct
  source 1..75: mol_type = other DNA
tgcacgacaggcgcaaggcgatatcagcattccacaaagcgcattaattatcggcggcggtgatgtcgcgatgga

SEQ ID NO: 334112 - DNA, 75 bp, synthetic construct
  source 1..75: mol_type = other DNA
aaaaccgcgcggtgctggtaaccgtggggttatcgcgtggttccaccctgccgctgtttgagcatagcgacgttg

SEQ ID NO: 334113 - DNA, 75 bp, synthetic construct
  source 1..75: mol_type = other DNA
ttcaaacacattcaaaaacagagttaatgtatttaaaaaaacaagcaagtgtggacttgaatatcagttgcttgt

SEQ ID NO: 334114 - DNA, 75 bp, synthetic construct
  source 1..75: mol_type = other DNA
aaggcgtgaaggtggtaaaggacagcgccagtctggggccgcagataattacagctgtatcgaccatcgcatctg

SEQ ID NO: 334115 - DNA, 75 bp, synthetic construct
  source 1..75: mol_type = other DNA
aacaacaaaccgggatggaaatttatcagcccggtactaaaacgctcggcaaagtcgcgattattggcgcaggtc

SEQ ID NO: 334116 - DNA, 75 bp, synthetic construct
  source 1..75: mol_type = other DNA
gtgacaaaaccgtggtctatgcagtgaaaaccgggaaagaagccgccggggcgattcatcattatttagagggag

SEQ ID NO: 334117 - DNA, 75 bp, synthetic construct
  source 1..75: mol_type = other DNA
agcgcgttcgcaatgatctgcgcttccgtgaactgactgtgctacgcgttgagcgtatcagcgccggttttcagc

SEQ ID NO: 334118 - DNA, 75 bp, synthetic construct
  source 1..75: mol_type = other DNA
ggacggttttacatcgcgcggctttgacgatcacagcaaactcttctttcctcaacctgacgctcactttgtgcc

SEQ ID NO: 334119 - DNA, 75 bp, synthetic construct
  source 1..75: mol_type = other DNA
atcggagccatgaatacagcggaccgttctttagctctgatggacacggctttgcgccgtcgctttgactttgtc

SEQ ID NO: 334120 - DNA, 75 bp, synthetic construct
  source 1..75: mol_type = other DNA
cgggactcggcggcacgttgtttgatcctccgcgttcggcgctggtggtgaaactaatccgcccgcagcagcgtg

SEQ ID NO: 334121 - DNA, 75 bp, synthetic construct
  source 1..75: mol_type = other DNA
tgggcaaatcggcgcaccagccagagcttccgtggatgatgctgggcattattggcatcttcactttccttgcgc

SEQ ID NO: 334122 - DNA, 75 bp, synthetic construct
  source 1..75: mol_type = other DNA
cttcatctgggtcacgggcgaaggaaaggtggtgaagaatttaagccgtcgctttgaagcggaacaatacgatcc

SEQ ID NO: 334123 - DNA, 75 bp, synthetic construct
  source 1..75: mol_type = other DNA
ctggattccatcgtgcgtacacgcaaagttttcgatactaatgatttcattattatcacccaacgtttccactgt

SEQ ID NO: 334124 - DNA, 75 bp, synthetic construct
  source 1..75: mol_type = other DNA
gctgttattgctcaaagcctcgcagaaacacattttgcgttacgccgggctggcggaaacgctggcggcaaactg

SEQ ID NO: 334125 - DNA, 75 bp, synthetic construct
  source 1..75: mol_type = other DNA
gttgccggatacagcgccttctttgtcgaactgtcgaaggagatccaggatgacatcatccgccggacagcgcat

SEQ ID NO: 334126 - DNA, 75 bp, synthetic construct
  source 1..75: mol_type = other DNA
acgaggtggataacatcagcgccgaactgttgcgccactactgcaaagaagtggaaaaataccagaacccgcgcg

SEQ ID NO: 334127 - DNA, 75 bp, synthetic construct
  source 1..75: mol_type = other DNA
cgcatggatatatcgttcgatactggaaagcgtggcgctgacgctgaagaacaattacgacaatatgtgtaatga

SEQ ID NO: 334128 - DNA, 75 bp, synthetic construct
  source 1..75: mol_type = other DNA
tggcaagaaaatataatcgcgaaggtgaagctgtttataaaaccggtcaacttgagcaagccattcaactcttcc

SEQ ID NO: 334129 - DNA, 75 bp, synthetic construct
  source 1..75: mol_type = other DNA
tcgcaatcagggaaaatttttccccgaagttcatgaggatgcatttgactacctgacgatgctgatccagcgatg

SEQ ID NO: 334130 - DNA, 75 bp, synthetic construct
  source 1..75: mol_type = other DNA
aatattatccaaaaaaattgatggaataataggcggccctccatgtcaaggctacagtcggatggggcattctga

SEQ ID NO: 334131 - DNA, 75 bp, synthetic construct
  source 1..75: mol_type = other DNA
atgttcagtgcggggaagtgggcggcctctgtttttctaaagcagtggggaaagcgccgcaaacaggaaaaacgc

SEQ ID NO: 334132 - DNA, 75 bp, synthetic construct
  source 1..75: mol_type = other DNA
cctttatatttttaaacgtgaaccgcgctttttaggaccactggtccctattccggcaatgcaccaggtgcccga

SEQ ID NO: 334133 - DNA, 75 bp, synthetic construct
  source 1..75: mol_type = other DNA
caacgatgaagtggtggtgccagcgttcctcaaccgtggcgtttcgctggaagatgcgcgcgactattccgtagt

SEQ ID NO: 334134 - DNA, 75 bp, synthetic construct
  source 1..75: mol_type = other DNA
gaccttctggcaggcgtgccagttgttctggtacatgaacattattctgcaatatgaatccaacgccagttcgct

SEQ ID NO: 334135 - DNA, 75 bp, synthetic construct
  source 1..75: mol_type = other DNA
tgttgcgctccaccagcagcgcgcgctatttcgcaggtttcccgaccggctataccgccctgctcggtgggttaa

SEQ ID NO: 334136 - DNA, 75 bp, synthetic construct
  source 1..75: mol_type = other DNA
tttcccaacgtgccaatgccgatccaggacatcgctacgccattttcattgatgagatcaatcgcggtaacatat

SEQ ID NO: 334137 - DNA, 75 bp, synthetic construct
  source 1..75: mol_type = other DNA
gactcagcatttgttgttctgacaccgcttgttaagtcgctttcacgtaccagtggaaagtcaattgtcggcctg

SEQ ID NO: 334138 - DNA, 75 bp, synthetic construct
  source 1..75: mol_type = other DNA
ggaagccacggtagcagtgaactggaaagttcgcatgttattggtggtctgcttgttgccattgcagccctgttg

SEQ ID NO: 334139 - DNA, 75 bp, synthetic construct
  source 1..75: mol_type = other DNA
aaagttcattagctctatattatattctctttctcttttgctatctttatttttaggtctgaagttatattcatt

SEQ ID NO: 334140 - DNA, 75 bp, synthetic construct
  source 1..75: mol_type = other DNA
gacgcaatgaataaaggcattttcaaagacctaaccaaacacaccgatgtaattctgaaaaaatcgtatgaagtg

SEQ ID NO: 334141 - DNA, 75 bp, synthetic construct
  source 1..75: mol_type = other DNA
atcttagaaattctcatgctcatcatcaggtagataacattatttttcgagatgcatttttccaagacatacaaa

SEQ ID NO: 334142 - DNA, 75 bp, synthetic construct
  source 1..75: mol_type = other DNA
caaaggcatacataccatccagcggaataaatcaagcataccttcgcatggatcattggaatgactactctttcg

SEQ ID NO: 334143 - DNA, 75 bp, synthetic construct
  source 1..75: mol_type = other DNA
gtgtttctgctttggtcaacggtgccgcgggcatggctacaagtgcgttaaagggggctatcagtggagtgatca

SEQ ID NO: 334144 - DNA, 75 bp, synthetic construct
  source 1..75: mol_type = other DNA
tgcgagaaattaacaaagcctttaactggcatctaccggaagatgatgctcgtactgttaacggcgtcattctgg

SEQ ID NO: 334145 - DNA, 75 bp, synthetic construct
  source 1..75: mol_type = other DNA
cgacagcacccgttcgcagggcagcatggccgtgacctataagccgttgtctgacagcgactggcaggaactggg

SEQ ID NO: 334146 - DNA, 75 bp, synthetic construct
  source 1..75: mol_type = other DNA
ataagcgcatcccgctcgcggcgttcatgaaatggccgctggcgaaacgtcaggacttcatcgaccgggaaatgt

SEQ ID NO: 334147 - DNA, 75 bp, synthetic construct
  source 1..75: mol_type = other DNA
gcgatgaaggtgactaccgagagcctgcggcaaaaatgctggcgatggtgctgcatggtatgcagggaacgcctt

SEQ ID NO: 334148 - DNA, 75 bp, synthetic construct
  source 1..75: mol_type = other DNA
acgaactggtggcgcaggcgaaatcgcgcggtattcgcattattcttgatatggtgtttaaccatacttctaccc

SEQ ID NO: 334149 - DNA, 75 bp, synthetic construct
  source 1..75: mol_type = other DNA
aacaagaaagcgtcttgtgtgccgcctggctgtaatggtctgatgacggtgctggactggctgaccaatccgtgg

SEQ ID NO: 334150 - DNA, 75 bp, synthetic construct
  source 1..75: mol_type = other DNA
tgctatggccctttcctccgtcagcgttatcgtcaatgcgttacgtctcagaagtatcaggctcggcaaagaagc

SEQ ID NO: 334151 - DNA, 75 bp, synthetic construct
  source 1..75: mol_type = other DNA
gtcgggtaaaggggtttcaggggatgttgaagggctgcgggttattatcggtaatgagctggccatgcaggaaaa

SEQ ID NO: 334152 - DNA, 75 bp, synthetic construct
  source 1..75: mol_type = other DNA
ggtggcacacggtctgatagccgcggtttcggtcctgattatcgcctgtccctgcgcgctgggtctggccacccc

SEQ ID NO: 334153 - DNA, 75 bp, synthetic construct
  source 1..75: mol_type = other DNA
aaagcctcccattgcttagagaactcaccgaacgtgttcgtcaacaaccaaatgaagttacctaccaatacgtag

SEQ ID NO: 334154 - DNA, 75 bp, synthetic construct
  source 1..75: mol_type = other DNA
accgccagacgactggatgatgatggtcatgaaacggacattaatgctgaagatgtcctgcctggcgataagctc

SEQ ID NO: 334155 - DNA, 75 bp, synthetic construct
  source 1..75: mol_type = other DNA
gcgatggccggagacggtgtgaatgatgccccggcgctggcagcggctgacgtgggtatagccatgggaacgggt

SEQ ID NO: 334156 - DNA, 75 bp, synthetic construct
  source 1..75: mol_type = other DNA
ctgccggttgtttgtaccaccagtgataaaccggtagaagctctgggagccgggttactggatgatgaaactgcg

SEQ ID NO: 334157 - DNA, 75 bp, synthetic construct
  source 1..75: mol_type = other DNA
cgacgtgttcaaccttccggcacgccgtaacgccattaatggttgtgcaagcctgggggcagcgattaatacggc

SEQ ID NO: 334158 - DNA, 75 bp, synthetic construct
  source 1..75: mol_type = other DNA
gttgctgccgtgcgttattgaaagccgatggtacgccagccgcgccgttgattagctggcaggatgcacgcgtta

SEQ ID NO: 334159 - DNA, 75 bp, synthetic construct
  source 1..75: mol_type = other DNA
cttgttgcaatggggaccggcgcagcctgggtttacagcgtcattgcaaccgtcttcccttcctggtttcctgca

SEQ ID NO: 334160 - DNA, 75 bp, synthetic construct
  source 1..75: mol_type = other DNA
aaggtgtgtggacatgtccgatgcacccggagatacgccgcagtggtcccggaagctgtcctgtctgtggaatgg

SEQ ID NO: 334161 - DNA, 75 bp, synthetic construct
  source 1..75: mol_type = other DNA
gttgctgattgcgacgctggtgcaaaaatgggtgcgtgaaacaccgcaaacgcaggcaccggtcgaaattgacat

SEQ ID NO: 334162 - DNA, 75 bp, synthetic construct
  source 1..75: mol_type = other DNA
aagcctctttgagtccggggccatattgttgtatctggcggagaaaacgggactctttttaagtcatgaaatgcg

SEQ ID NO: 334163 - DNA, 75 bp, synthetic construct
  source 1..75: mol_type = other DNA
atgatcgatctctatttcgccccgacacccaatggtcacaaaattacgctgtttctcgaagaagcagagcttgat

SEQ ID NO: 334164 - DNA, 75 bp, synthetic construct
  source 1..75: mol_type = other DNA
tggtgattgcggagattgtcccggcattcaaaggtatttcagacaagctggttccgaatgccagacctgctctcg

SEQ ID NO: 334165 - DNA, 75 bp, synthetic construct
  source 1..75: mol_type = other DNA
agcatggcacgacacatcgaaaaatgtttcgacctacctgtcggatggctcgatcaagaacaccagacaacgaac

SEQ ID NO: 334166 - DNA, 75 bp, synthetic construct
  source 1..75: mol_type = other DNA
tatcgcttgattaaggtagacctggggaaaggcggtcagtttcgcccggaatttttgcgcatttcgcccaacaac

SEQ ID NO: 334167 - DNA, 75 bp, synthetic construct
  source 1..75: mol_type = other DNA
ggaaaggcggtcagtttcgcccggaatttttgcgcatttcgcctaacaacaaaattccggcaattgttgatcatt

SEQ ID NO: 334168 - DNA, 75 bp, synthetic construct
  source 1..75: mol_type = other DNA
ctgaacggagacccggaccagccggtggtcatggggcggacgtaccatgaagataaccgctccccgggtgacctg

SEQ ID NO: 334169 - DNA, 75 bp, synthetic construct
  source 1..75: mol_type = other DNA
catcgatgccggactgggacagattaatctcggctggaacgggcaatggttcccctcgctgtgcgccagttttga

SEQ ID NO: 334170 - DNA, 75 bp, synthetic construct
  source 1..75: mol_type = other DNA
atgcgtaaaaaatccctgctcacgtttgtcctgctgctgttttccgtgccgttaccggcgcgggaggtaccgccg

SEQ ID NO: 334171 - DNA, 75 bp, synthetic construct
  source 1..75: mol_type = other DNA
tgcagatgcggtgaaagagcttagcggtggtaaaaactggttcatgttctctatcatgcaatccattaccttcgc

SEQ ID NO: 334172 - DNA, 75 bp, synthetic construct
  source 1..75: mol_type = other DNA
acggtgacgacgttattgcattgatgcacgatacaggcgaaaccacctttaagcggttgatagaagatggaacac

SEQ ID NO: 334173 - DNA, 75 bp, synthetic construct
  source 1..75: mol_type = other DNA
ggcaaggtatacccggaaggtgatcgcccgtacaaaatcgaattccactccgttaataccgctctgcaacaagag

SEQ ID NO: 334174 - DNA, 75 bp, synthetic construct
  source 1..75: mol_type = other DNA
tggggccatgatgaggccgagaacgataagtttggtcgtttccgtcgcggtgtaccgccgaagactaaaggagat

SEQ ID NO: 334175 - DNA, 75 bp, synthetic construct
  source 1..75: mol_type = other DNA
acattacccgccattaaacatggtcatttccaggaaatcgcccaacgcgagaatgaagccacctgttttggccgc

SEQ ID NO: 334176 - DNA, 75 bp, synthetic construct
  source 1..75: mol_type = other DNA
gatatgcaggaaaccatcgacgaaacgctggatttcttcctgcgcaccgttgatcttacggataaaccatcatga

SEQ ID NO: 334177 - DNA, 75 bp, synthetic construct
  source 1..75: mol_type = other DNA
tcacttcccaccgtttgcaggctttcgcgtggtagaaagtagcagttactacggcaaaggatatcaggacgtggc

SEQ ID NO: 334178 - DNA, 75 bp, synthetic construct
  source 1..75: mol_type = other DNA
tggttcggtggctcgtctggcggcggaaagaggcattccggtttatgcgccagataacgttaatcatccgctgtg

SEQ ID NO: 334179 - DNA, 75 bp, synthetic construct
  source 1..75: mol_type = other DNA
agtttaccctcttccggccgtttaactggatggggccacggctggataaccttaatgcagcgcgaattggcagtt

SEQ ID NO: 334180 - DNA, 75 bp, synthetic construct
  source 1..75: mol_type = other DNA
attagcgccatttttactcataccgataatcctggcgaaaaagcattttatggttcggtcgctcgcctggcggcg

SEQ ID NO: 334181 - DNA, 75 bp, synthetic construct
  source 1..75: mol_type = other DNA
cctgttcgccagatattggtgctgaccgacagaaaacctgttatcggtcaacgaacaggaaaaaacgataaaacc

SEQ ID NO: 334182 - DNA, 75 bp, synthetic construct
  source 1..75: mol_type = other DNA
cctgcccgccagatattggcactaaccgacgcgaaaccaatcatcagccagcgcaccggcaagaacgataaaacc

SEQ ID NO: 334183 - DNA, 75 bp, synthetic construct
  source 1..75: mol_type = other DNA
gtgcttttccgtggctccagcgaaggtaaaattcgccagaaactgatcgacgaaaatttgctggatgcggtaatt

SEQ ID NO: 334184 - DNA, 75 bp, synthetic construct
  source 1..75: mol_type = other DNA
gtgttgttccgtggctccagcgaaggcaagatccgccagaaattgattgatgaaaatctgctggatgcagtgatt

SEQ ID NO: 334185 - DNA, 75 bp, synthetic construct
  source 1..75: mol_type = other DNA
aattttcaaaaagcagaaagtggatgataaagtgctgtttattgatgccagccgtgaatttaaggcgggtaaaaa

SEQ ID NO: 334186 - DNA, 75 bp, synthetic construct
  source 1..75: mol_type = other DNA
ggaagcgattggctccacgtggtcgctggcgaaaatgaacatgttcctgcacggcgaagacaaccacaaaatcga

SEQ ID NO: 334187 - DNA, 75 bp, synthetic construct
  source 1..75: mol_type = other DNA
gccgccggctgttatcaccatccggcgggcggtcagcccgcagtacgctataaaaatagtgtccggcgtcagctg

SEQ ID NO: 334188 - DNA, 75 bp, synthetic construct
  source 1..75: mol_type = other DNA
tgctctctgaaaatgcacgacaactggccaagtggatcgagaaacacccgaataagttttaccgccatgctaact

SEQ ID NO: 334189 - DNA, 75 bp, synthetic construct
  source 1..75: mol_type = other DNA
caggatcccgccggacggctgtatcaccggcggctcgcacacctgctgacagcccgggggttgctgccagatatc

SEQ ID NO: 334190 - DNA, 75 bp, synthetic construct
  source 1..75: mol_type = other DNA
ccgttacggatgccactcaatgaactgggggggcagtaaaggactcgaccactttcaggacgtctgcatcgtgat

SEQ ID NO: 334191 - DNA, 75 bp, synthetic construct
  source 1..75: mol_type = other DNA
taatcgagggttagctcaagaagatggttcgcacacactaaaaagcctgtggcgccatgctatggcgcgattgcc

SEQ ID NO: 334192 - DNA, 75 bp, synthetic construct
  source 1..75: mol_type = other DNA
cgtctggagaaattagagcgactgttttttcttgctgacgcagcagtggaaagtggtgagataggaactgatcgc

SEQ ID NO: 334193 - DNA, 75 bp, synthetic construct
  source 1..75: mol_type = other DNA
ggatgactttccgtggtttgataaagacaagggaattaggtacagcaatgccttgtttgtactgaacgtaaatca

SEQ ID NO: 334194 - DNA, 75 bp, synthetic construct
  source 1..75: mol_type = other DNA
tcggctttgattccagcatggatatatcgttcgatattggaaagcgtggcgctaacgctgaagaacaattacgac

SEQ ID NO: 334195 - DNA, 75 bp, synthetic construct
  source 1..75: mol_type = other DNA
ggtaggtctggggctatacccggattacgcaacggctgtcgataaaatggttcgcgtgaaagatatctttatacc

SEQ ID NO: 334196 - DNA, 75 bp, synthetic construct
  source 1..75: mol_type = other DNA
cgttgatgatgaacggcaaagcactgccgaaagatccggtagcgtactggccgattatgtcttctattccgcaaa

SEQ ID NO: 334197 - DNA, 75 bp, synthetic construct
  source 1..75: mol_type = other DNA
catgctaggcgagtcgttaattcaggatgccagggcgcaggatctttcaccggaagatttactcaacaaaaaagc

SEQ ID NO: 334198 - DNA, 75 bp, synthetic construct
  source 1..75: mol_type = other DNA
gatcctgaaaaaatcgggtaatgactccaacttattgatagtgttttatgttcagataatgcccgatgactttgt

SEQ ID NO: 334199 - DNA, 75 bp, synthetic construct
  source 1..75: mol_type = other DNA
gctggactggctgaccaacccgtgggaaccgtacaaacgcggaattatgatcggctttgattccagtatggatta

SEQ ID NO: 334200 - DNA, 75 bp, synthetic construct
  source 1..75: mol_type = other DNA
atggctgagattttccagtttaagccaaaggctacgctgacagcagcagaaaaccttgaagcatttatttctaag

SEQ ID NO: 334201 - DNA, 75 bp, synthetic construct
  source 1..75: mol_type = other DNA
atcataagtttgctatttggctacagccacaggtggagatgaccagcggcaaactcgtcagcgcggaagcgttgc

SEQ ID NO: 334202 - DNA, 75 bp, synthetic construct
  source 1..75: mol_type = other DNA
ggcaaacccgcagccaattgcctatctggtgctacaggcggattccttccgcatgtataagttcgtgatgagcac

SEQ ID NO: 334203 - DNA, 75 bp, synthetic construct
  source 1..75: mol_type = other DNA
gccgtggcacgctatcacattaggtcagcaagtgcttactatcatgagcgagcgtttgccaattgaacgtattca

SEQ ID NO: 334204 - DNA, 75 bp, synthetic construct
  source 1..75: mol_type = other DNA
gtggacgctgaatgtggccggtaaaggataccgttatccgacacggcaggccgcctggcaggctttgcagtcatt

SEQ ID NO: 334205 - DNA, 75 bp, synthetic construct
  source 1..75: mol_type = other DNA
ctggggagcaacagcgatggcatgacgagtgcagcagattcaatttctttatcctctgaactgcccggcgagcgc

SEQ ID NO: 334206 - DNA, 75 bp, synthetic construct
  source 1..75: mol_type = other DNA
ctggctggcaaaagcaggtgttggtattgcccagggcttcctttttgcccgtccactccccattgaaatcttcga

SEQ ID NO: 334207 - DNA, 75 bp, synthetic construct
  source 1..75: mol_type = other DNA
cgtgattattcctggtgtggtgccgcacttcttcgtaggtgcagctgcaggggtattcggtaatgcaacgggtgg

SEQ ID NO: 334208 - DNA, 75 bp, synthetic construct
  source 1..75: mol_type = other DNA
cggcacctgctcaacaccattgcccagcgcggcggactgtcaaaccttgaaattgccaagtggtcagggcgggcc

SEQ ID NO: 334209 - DNA, 75 bp, synthetic construct
  source 1..75: mol_type = other DNA
ggatcgtgaaggaatagaacgctacgggtggcgtttctttgcaggtaaaggttatgagggcgatattaaatggat

SEQ ID NO: 334210 - DNA, 75 bp, synthetic construct
  source 1..75: mol_type = other DNA
actgattttgcatccattacgcaatatcgcccgtgaacttaacgcgatccctccacaggagattatcggtcatca

SEQ ID NO: 334211 - DNA, 75 bp, synthetic construct
  source 1..75: mol_type = other DNA
tgtggtcagccgcgccgatgttgtattacctaaccagttccaggcgctacgtaaaagttttattccagagcgccc

SEQ ID NO: 334212 - DNA, 75 bp, synthetic construct
  source 1..75: mol_type = other DNA
gaggtagtatcggcgctgatgagaatcattataaagtattatcatcagcatatctcaaacattttctttagaaac

SEQ ID NO: 334213 - DNA, 75 bp, synthetic construct
  source 1..75: mol_type = other DNA
gatcttttgattgaagcattcacgaacctcctcccaaaatggcgcgaagaactcggaatacctgaaccagataag

SEQ ID NO: 334214 - DNA, 75 bp, synthetic construct
  source 1..75: mol_type = other DNA
gcatccgtcagcgtgaaactggatacgcccgtcgtggaatgcacaaaccttctgagaacggcgacgcttgacgtc

SEQ ID NO: 334215 - DNA, 75 bp, synthetic construct
  source 1..75: mol_type = other DNA
aatacccgttgcataataattacggggatccatttggagaactgaaagaagacgattggttttgtgataaacaaa

SEQ ID NO: 334216 - DNA, 75 bp, synthetic construct
  source 1..75: mol_type = other DNA
atgccagcgaatatatcaggaagctctatcaattctttagggtgcagttcttttaggaggtctaccctcctgggt

SEQ ID NO: 334217 - DNA, 75 bp, synthetic construct
  source 1..75: mol_type = other DNA
ctatcagttctttagggtgcagttcttttaggaagtcctccatcctgagtaagaaggatgatattctgcaatact

SEQ ID NO: 334218 - DNA, 75 bp, synthetic construct
  source 1..75: mol_type = other DNA
cgtcgccgcttatgccaaagggctttttccggctgccattggcgcggtgctcatagcgtttgttatctggtttat

SEQ ID NO: 334219 - DNA, 75 bp, synthetic construct
  source 1..75: mol_type = other DNA
gaacaccacgcgcgcgggagccttcaatgtgtggctgccgccatcaccaggcgaacaggtggcaattgcctgcat

SEQ ID NO: 334220 - DNA, 75 bp, synthetic construct
  source 1..75: mol_type = other DNA
ccggatggcgcggtgttccgctacgacgcggacgcaggcgcactgagcgccagcggcatgaaaacagccaccctg

SEQ ID NO: 334221 - DNA, 75 bp, synthetic construct
  source 1..75: mol_type = other DNA
gtgagcgcagaactcatgcgactgctgagcaatatcatccgcaccgggatcatctctgaagttgatgagggatcc

SEQ ID NO: 334222 - DNA, 75 bp, synthetic construct
  source 1..75: mol_type = other DNA
aagatttaccaaagtcatttgatttaggcaaatatgattgcctagaaaacttgtcggataaagatctatttcgcc

SEQ ID NO: 334223 - DNA, 75 bp, synthetic construct
  source 1..75: mol_type = other DNA
tgtctaacatgctccgtgtgggcgtggtttttgccatatcggaagacggtaagagtgtacgggtgcagagcgatg

SEQ ID NO: 334224 - DNA, 75 bp, synthetic construct
  source 1..75: mol_type = other DNA
cgccaagggtggaatgcacgcagcacctgaaggcaaaaacattcgagctgaccgaaggcgggaagatgaccggta

SEQ ID NO: 334225 - DNA, 75 bp, synthetic construct
  source 1..75: mol_type = other DNA
tttcccggcagagcactaaagatctttcagcatggaaacaagacgaaaaaacagtctatccctcacgattagtca

SEQ ID NO: 334226 - DNA, 75 bp, synthetic construct
  source 1..75: mol_type = other DNA
accatcatcaatgtcaccacgccaccaaaatggaaggtgaaaaagcagaagctggcggagaaagcggctcgggag

SEQ ID NO: 334227 - DNA, 75 bp, synthetic construct
  source 1..75: mol_type = other DNA
gtgaagtccattgagcaaaagtcggctggtggcaaaagcggcaagggatggttcgacgagttgaagacgcgcatc

SEQ ID NO: 334228 - DNA, 75 bp, synthetic construct
  source 1..75: mol_type = other DNA
caagctaaaaatgttatgcattcagttatgagtagctatctggatcaaattaatcgtgatgttcaaggaagagat

SEQ ID NO: 334229 - DNA, 75 bp, synthetic construct
  source 1..75: mol_type = other DNA
aagcgtatgcggcagagcgtctggataaaatccgccgccagaaccggataaaggcagaacttcaggccgtgcttg

SEQ ID NO: 334230 - DNA, 75 bp, synthetic construct
  source 1..75: mol_type = other DNA
ggagttgttgggtgatggcgaggtgcaaaaggcccggcccatcgttgccaatctggccagcgaaatcgtaatcca

SEQ ID NO: 334231 - DNA, 75 bp, synthetic construct
  source 1..75: mol_type = other DNA
atgacagagcagaaacgaccggtactgacactgaaacggaaaacggaaggggagacgcctgtccgcagccggaaa

SEQ ID NO: 334232 - DNA, 75 bp, synthetic construct
  source 1..75: mol_type = other DNA
gagatccaggtttcaatcacggaagagggtaaaccttattatgctgaacaacgtatgattcattggattgatgag

SEQ ID NO: 334233 - DNA, 75 bp, synthetic construct
  source 1..75: mol_type = other DNA
gtggcgaagtgcagaacttactgaaccagatgcagcaggcgagcattaagcacattgagttccgtgacgatcgct

SEQ ID NO: 334234 - DNA, 75 bp, synthetic construct
  source 1..75: mol_type = other DNA
ggcttctggcctgcggtatccgggacgtgttactggaagacgtggcgcagcggaatatcccgctctcgcataaaa

SEQ ID NO: 334235 - DNA, 75 bp, synthetic construct
  source 1..75: mol_type = other DNA
ggccgggattatttgacggtgacacgccccggcttctggcctgcggtatccgggacgtgttactggaagatgtgg

SEQ ID NO: 334236 - DNA, 75 bp, synthetic construct
  source 1..75: mol_type = other DNA
gccattacccgttcagaaagctatcttggcgcaatgaaagccggtgcctgccggtatgacacggaagggtatgtg

SEQ ID NO: 334237 - DNA, 75 bp, synthetic construct
  source 1..75: mol_type = other DNA
tgccatgaaagccggtgcctgccggtatgacacggaagggtatgtgacggagcatatttctcaggaggaggaagc

SEQ ID NO: 334238 - DNA, 75 bp, synthetic construct
  source 1..75: mol_type = other DNA
ctgccgcgcctataatggcggttttacagcttactatttgccctcaaccggcagtcctgcgatcacactcaatgt

SEQ ID NO: 334239 - DNA, 75 bp, synthetic construct
  source 1..75: mol_type = other DNA
gttgataacctacagaggaaagctaccaggaagaattactggttctctgaagacccctccggagtcacaacctta

SEQ ID NO: 334240 - DNA, 75 bp, synthetic construct
  source 1..75: mol_type = other DNA
gctgattccttctgaagatgaaaaaaaacgccgcgatgagcagtttgcggcgttttacgattattgcattgaagt

SEQ ID NO: 334241 - DNA, 75 bp, synthetic construct
  source 1..75: mol_type = other DNA
tgttgctgccgggttatgtgtaggggatgagcagtcgccggaaaagcgccccataattttagaggcgcagaatgt

SEQ ID NO: 334242 - DNA, 75 bp, synthetic construct
  source 1..75: mol_type = other DNA
ataacgcggacaacggcgtggcgcaatttaacccgttaggaaaagtgccggtgctggtgaccgaagagggcgaat

SEQ ID NO: 334243 - DNA, 75 bp, synthetic construct
  source 1..75: mol_type = other DNA
aacgaaaccattatttccggcggcaccgcttatgagggcggggcggtccatgttattgacacgatgagagtgaac

SEQ ID NO: 334244 - DNA, 75 bp, synthetic construct
  source 1..75: mol_type = other DNA
ggcaaatctgctgccgtggctggcgtgggcgttttctgttgacaggtgggatgaaaagtggccggaagcaacaaa

SEQ ID NO: 334245 - DNA, 75 bp, synthetic construct
  source 1..75: mol_type = other DNA
atatcgggatatttctgacggcgtggcaaaacaggtcagggatgaagtccgaaatgaggtgcagaagctggatgt

SEQ ID NO: 334246 - DNA, 75 bp, synthetic construct
  source 1..75: mol_type = other DNA
gaagatcgataaatctttcgttgatgcgctggaatataaaaatgtcacgccacatatcatcgaaatggcaaaaac

SEQ ID NO: 334247 - DNA, 75 bp, synthetic construct
  source 1..75: mol_type = other DNA
gagttattcagtacctgaaggtgatttgctctgttgctatccgtcattgtcgggcgatggcagttactttttcac

SEQ ID NO: 334248 - DNA, 75 bp, synthetic construct
  source 1..75: mol_type = other DNA
gccccgtaattttagaggcgcagaatgtgtggataacctgcaaaggaaaactgccgggaagaattactggctctc

SEQ ID NO: 334249 - DNA, 75 bp, synthetic construct
  source 1..75: mol_type = other DNA
acattgaacaaatcttccctgagctttcgaacttaattgatattattaataaatgggtaagcgtcaacggagcac

SEQ ID NO: 334250 - DNA, 75 bp, synthetic construct
  source 1..75: mol_type = other DNA
atatcgggatatttctgacggtgtggcaaaacaggtcagggatgaagtcagaaatgaggtgcagaagctggacgt

SEQ ID NO: 334251 - DNA, 75 bp, synthetic construct
  source 1..75: mol_type = other DNA
gtggaccgcccacacttagtcaaactggtcgagaatctctttagccgcgaaagcttcgctcgcaccgaaccgcca

SEQ ID NO: 334252 - DNA, 75 bp, synthetic construct
  source 1..75: mol_type = other DNA
cgacgccttgtgtcactggcctcttctctcgctcagcatgcaggcctttctattgtgaaatcatctcagtccact

SEQ ID NO: 334253 - DNA, 75 bp, synthetic construct
  source 1..75: mol_type = other DNA
ctggatgaccaatgcccagttactgggcgatttcagtatcgataactaccagttgtatagcctgggccactatcc

SEQ ID NO: 334254 - DNA, 75 bp, synthetic construct
  source 1..75: mol_type = other DNA
ttattgcggatgcaaaaccagtaagtcgccatctgacagggctggcgatcagtctgagtgtgaacggaaagattt

SEQ ID NO: 334255 - DNA, 75 bp, synthetic construct
  source 1..75: mol_type = other DNA
aggaggtaaataatgacgcaactcaggaggatcagtttgcctgcttaacctttccttcctctcgtcttcgtgatt

SEQ ID NO: 334256 - DNA, 75 bp, synthetic construct
  source 1..75: mol_type = other DNA
ctgccatgcatttgcatgaagacagcggacgataaattagtaccgtggctggctagtcagactgatgttctgtcc

SEQ ID NO: 334257 - DNA, 75 bp, synthetic construct
  source 1..75: mol_type = other DNA
tgccagtcggttttatcgaacagcagcgctggagtcgggtcacggacacctacggtgttaagcaccagcgaaaag

SEQ ID NO: 334258 - DNA, 75 bp, synthetic construct
  source 1..75: mol_type = other DNA
gcatctgctgccttatctcgcctgggcattttccgttgaccgctgggaccgcaactggccggaggaaacaaagcg

SEQ ID NO: 334259 - DNA, 75 bp, synthetic construct
  source 1..75: mol_type = other DNA
gagcagattgataaaatcgcccagggtcacgtctggaccggtcaggatgcaaaagctaacgggctggtcgatagt

SEQ ID NO: 334260 - DNA, 75 bp, synthetic construct
  source 1..75: mol_type = other DNA
gcgggagaaaatcaaccgcagtctggatgtgctggaaggatatctggtcgatggcacactcaaaaccgatacggt

SEQ ID NO: 334261 - DNA, 75 bp, synthetic construct
  source 1..75: mol_type = other DNA
atgaaaagtggccggaagcgacaaaacgcgccgttatccgcgatgcctatttcatccactgtcataagggtactg

SEQ ID NO: 334262 - DNA, 75 bp, synthetic construct
  source 1..75: mol_type = other DNA
acaaacctgcagcgggatttctgatttgcaggtgccgctacgtgacttgtggaatccggcgacctgtccggtcag

SEQ ID NO: 334263 - DNA, 75 bp, synthetic construct
  source 1..75: mol_type = other DNA
cggcttcctgatccgcattattgagtggtggcagaccggagaaacaccgggtacgtttcgcctggatatcggcgt

SEQ ID NO: 334264 - DNA, 75 bp, synthetic construct
  source 1..75: mol_type = other DNA
gcgcgactggggtgtttcccgtcagcgttactggggcgcaccgattccgatggtgacgctggaggacggcactgt

SEQ ID NO: 334265 - DNA, 75 bp, synthetic construct
  source 1..75: mol_type = other DNA
tcgtctgtttatgatgtttgcttctccggcggatatgactctcgaatggcaggaatccggcgtggaaggggctaa

SEQ ID NO: 334266 - DNA, 75 bp, synthetic construct
  source 1..75: mol_type = other DNA
gtgatgttgcggcactgaacgttgatgcgctgactgaagatcagaaagcgctgcgtcgcgatgtgcataaaacga

SEQ ID NO: 334267 - DNA, 75 bp, synthetic construct
  source 1..75: mol_type = other DNA
tatgctgggcaaaaacgtcctgcagccaatcggctgggacgcatttggtctgcctgcggaaggcgcggcggtgaa

SEQ ID NO: 334268 - DNA, 75 bp, synthetic construct
  source 1..75: mol_type = other DNA
ctgcgtcgcgatgtgcataaaactatcgctaaagtgaccgatgatatcggccgtcgtcagaccttcaacaccgca

SEQ ID NO: 334269 - DNA, 75 bp, synthetic construct
  source 1..75: mol_type = other DNA
gagcaaaatgtccaagtcgaagaacaacggtatcgacccgcaggtgatggttgaacgttacggcgcggacaccgt

SEQ ID NO: 334270 - DNA, 75 bp, synthetic construct
  source 1..75: mol_type = other DNA
aaaactatgcctggggaagcaaaacagcgttaactgaactttatggcatggagaatccgtccaaccaaccgatgg

SEQ ID NO: 334271 - DNA, 75 bp, synthetic construct
  source 1..75: mol_type = other DNA
gctggcgacagcatctggtcacgcccggctattcgtgtcttcgcaacctacgccaagtgggatgagaaatggggt

SEQ ID NO: 334272 - DNA, 75 bp, synthetic construct
  source 1..75: mol_type = other DNA
tgaagatgatttggcgcagtttatactcttgtttgattcattgagtgagtcagataaaaagaaaatattagatca

SEQ ID NO: 334273 - DNA, 75 bp, synthetic construct
  source 1..75: mol_type = other DNA
ctgactgatgttgagccgcaatcaattgaagatggtgtaaatgatctggaagatatgatgtccgagtggatgatt

SEQ ID NO: 334274 - DNA, 75 bp, synthetic construct
  source 1..75: mol_type = other DNA
attttaaaatcggccctcgacagtcagcagggtgaaccgtggcaaacgattcgtttaatttctgaattttacccg

SEQ ID NO: 334275 - DNA, 75 bp, synthetic construct
  source 1..75: mol_type = other DNA
agctggtttttgctctgacccctttcctcgcgatgaacgcgtttcgtgagttctccgagattgtttctctgctcc

SEQ ID NO: 334276 - DNA, 75 bp, synthetic construct
  source 1..75: mol_type = other DNA
tactgtgaccatgcgcccctgtatcgtcagaataacatcttcgcccgcgcggatgttgacctgccagagagcacg

SEQ ID NO: 334277 - DNA, 75 bp, synthetic construct
  source 1..75: mol_type = other DNA
cgcggtttcgcaaatctgtataaggccagcagggagccccgtgcagccatggcgctgagaaaaatcgcgggtctt

SEQ ID NO: 334278 - DNA, 75 bp, synthetic construct
  source 1..75: mol_type = other DNA
gaggcctggctgcagggctggtgtggcggtacgctggtgagtgacggatacagcgtgtacaaatctctggcggat

SEQ ID NO: 334279 - DNA, 75 bp, synthetic construct
  source 1..75: mol_type = other DNA
aaaaagatcgccgggttgtacaggctggagaaaaagatcagcagccgtcccgtggagaaaatccgccagtggcga

SEQ ID NO: 334280 - DNA, 75 bp, synthetic construct
  source 1..75: mol_type = other DNA
gctggtgagtgacggatacagcgtgtataaatctctggtggataatcactccggtattacatccgcctgttgctg

SEQ ID NO: 334281 - DNA, 75 bp, synthetic construct
  source 1..75: mol_type = other DNA
cctcagatatcctgaggcctggttacagggctggcatggcggtacgctggtgagtgacgggtacaacgtgtacaa

SEQ ID NO: 334282 - DNA, 75 bp, synthetic construct
  source 1..75: mol_type = other DNA
tgggggtggagctccccgtcagtacaatggcggatatggtcggtgttgctggcgctgcactggccccgctggcaa

SEQ ID NO: 334283 - DNA, 75 bp, synthetic construct
  source 1..75: mol_type = other DNA
atgaatatccatgcgtggtgtcatataatccaccgcatggatatctcgcttctcagtaccaccagtgaccctgaa

SEQ ID NO: 334284 - DNA, 75 bp, synthetic construct
  source 1..75: mol_type = other DNA
ggaagatgtggggctgaaaattcgctacatcgctatgcagattcttactgctattgatattgctgctccggttga

SEQ ID NO: 334285 - DNA, 75 bp, synthetic construct
  source 1..75: mol_type = other DNA
ttggtatatctgataacgtggatccgaacggtacgattgcggttcagcgtgggatcggggttatttcgaaagctg

SEQ ID NO: 334286 - DNA, 75 bp, synthetic construct
  source 1..75: mol_type = other DNA
tgatgcgtctgccggagtggctggaggagcgactggcagagttgctgcctcttgagggatttaccttctccgggt

SEQ ID NO: 334287 - DNA, 75 bp, synthetic construct
  source 1..75: mol_type = other DNA
cgcctgttgctggagccacgcaagacgcggcttcgccagtctgtataaggccagcagggagccccgtgcagccat

SEQ ID NO: 334288 - DNA, 75 bp, synthetic construct
  source 1..75: mol_type = other DNA
cgccagcagcacattttctcccgaatgggggtggagctccccgtcagtacaatggcggatatggtcggtgttgct

SEQ ID NO: 334289 - DNA, 75 bp, synthetic construct
  source 1..75: mol_type = other DNA
atgctgattacaaggttgaaagaagctcgacggcgagcaggactgactcaagaaaaactaggtattcttgctgga

SEQ ID NO: 334290 - DNA, 75 bp, synthetic construct
  source 1..75: mol_type = other DNA
catttcgaagaatatcgacggcttcgcgctggatggtgagaaggacgacgaaaccggggaagacctgaaagaaat

SEQ ID NO: 334291 - DNA, 75 bp, synthetic construct
  source 1..75: mol_type = other DNA
agcggaggacgaaaagccggaacgcagtaagctgctgcgtcgccgtctggcttctcttccgcaatatgtccgccg

SEQ ID NO: 334292 - DNA, 75 bp, synthetic construct
  source 1..75: mol_type = other DNA
acgttgatatcaacagttactggcctggatatggggcttgagcactacgccatcaggtctgacggagcaaaaatt

SEQ ID NO: 334293 - DNA, 75 bp, synthetic construct
  source 1..75: mol_type = other DNA
agacaccgttcgatctcgccagcaccacgccgctcctctttcacctttttattggccaagatatctgcattctgg

SEQ ID NO: 334294 - DNA, 75 bp, synthetic construct
  source 1..75: mol_type = other DNA
gaaagcactgtcccgtaagaaaaaagggagcgcaaacaggcgcaaagccagaatacaacttgcagccgttcacga

SEQ ID NO: 334295 - DNA, 75 bp, synthetic construct
  source 1..75: mol_type = other DNA
atgttaagagcaacaaaagtacgtatatatcccactcctgaacaggcagagtacctcaatgcccagttcggtgca

SEQ ID NO: 334296 - DNA, 75 bp, synthetic construct
  source 1..75: mol_type = other DNA
gtgtatgcggcagagcgtctggataaaatccgccgccagaaccggataaaggcagaacttcaggccgtgcttgat

SEQ ID NO: 334297 - DNA, 75 bp, synthetic construct
  source 1..75: mol_type = other DNA
tgaaagccggcgcctgccgctatgatacggaaggctatgtgacagaacatatcacacaggaagaagaacagtatg

SEQ ID NO: 334298 - DNA, 75 bp, synthetic construct
  source 1..75: mol_type = other DNA
aagcgtatgcggcagcgcgcctggagaaaatccgccgccagaaccggataaaggcagagcttcaggccgtgcttg

SEQ ID NO: 334299 - DNA, 75 bp, synthetic construct
  source 1..75: mol_type = other DNA
tctatccaaccacagaacaggctgagtatcttaatgcccagttcggtgcggtgcgctttgcgtacaacaaagctc

SEQ ID NO: 334300 - DNA, 75 bp, synthetic construct
  source 1..75: mol_type = other DNA
acgtacctgaaggaagaaaagattacaggtctggatatgggactggagcactatgccatcacttctgatgctgta

SEQ ID NO: 334301 - DNA, 75 bp, synthetic construct
  source 1..75: mol_type = other DNA
acggagcatatttctcaggaggaggaagcgtatgcggcagagcgtctggataaaatccgccgccagaaccggata

SEQ ID NO: 334302 - DNA, 75 bp, synthetic construct
  source 1..75: mol_type = other DNA
atgagtacgattttttatcagtccggcatgcagcgtacggaaaaggccagcgaggctgaagaacagatctggttt

SEQ ID NO: 334303 - DNA, 75 bp, synthetic construct
  source 1..75: mol_type = other DNA
tgcgcgtcgtaaaatgatcgttgccttcatcctgatgctcgaagccattatcttcttcgtgctgtacagccagat

SEQ ID NO: 334304 - DNA, 75 bp, synthetic construct
  source 1..75: mol_type = other DNA
cttcattatgggtagctggttcctgaccactgccggtgcaaacctgattggtggttatgttgcgggtatgatggc

SEQ ID NO: 334305 - DNA, 75 bp, synthetic construct
  source 1..75: mol_type = other DNA
aaatgtaaaaatttccactgaagagaggaaaagagtcttttctcttgtgagtcaagaatatgaactggctcttga

SEQ ID NO: 334306 - DNA, 75 bp, synthetic construct
  source 1..75: mol_type = other DNA
agatgacaaacatgatctcatatcagggacttgttcgcaccttccttagcttttctgttcgcaaatttagcggca

SEQ ID NO: 334307 - DNA, 75 bp, synthetic construct
  source 1..75: mol_type = other DNA
cagcgttgggttaaacagtacggttcgaaacctgactttgaaccgatcaactaccgtaatctgctgctgaccatt

SEQ ID NO: 334308 - DNA, 75 bp, synthetic construct
  source 1..75: mol_type = other DNA
gattgcgacgccatggctggcggcaaaatacggctggagcgtcgcattcgctcttagcgtcgtcggcctgttgat

SEQ ID NO: 334309 - DNA, 75 bp, synthetic construct
  source 1..75: mol_type = other DNA
acgtacgagtgatgctgagctatcgtgaggaccattattcttctgctcaggttgatctcatcgctcggacaatcc

SEQ ID NO: 334310 - DNA, 75 bp, synthetic construct
  source 1..75: mol_type = other DNA
actgcatttgcttggcaacttcagagatctgacgataggtacctctgcttccgggcgtaacgatccacgattctt

SEQ ID NO: 334311 - DNA, 75 bp, synthetic construct
  source 1..75: mol_type = other DNA
tcagaggcgttgctgcggttaaaagagacaccgttcgatctcgccagcaccacgccgctccacttttaccttttt

SEQ ID NO: 334312 - DNA, 75 bp, synthetic construct
  source 1..75: mol_type = other DNA
agcaacatactgaaaatggtgggcaagcagtgtactaaaaatattgatggatggataaaagatgagcgggtagta

SEQ ID NO: 334313 - DNA, 75 bp, synthetic construct
  source 1..75: mol_type = other DNA
agcagcgcaaagctctatcaaccatctcataataggaaatggtcgtttcggtgataaaataaatatgctttgcaa

SEQ ID NO: 334314 - DNA, 75 bp, synthetic construct
  source 1..75: mol_type = other DNA
cccaggtgccaaccatcaatgccctgatcgatgacgtgaagcggcaaatcaatgattcaatgccctataccgaca

SEQ ID NO: 334315 - DNA, 75 bp, synthetic construct
  source 1..75: mol_type = other DNA
aaggttcactaatcttagacaagcttggtttcactcaagaagaaaatgaaaaacttgtagaaatatggaagaagc

SEQ ID NO: 334316 - DNA, 75 bp, synthetic construct
  source 1..75: mol_type = other DNA
cgacagcggcagcgccgtcaaatttacccacagtaactttgttgcccacaatgacggcaccatgaacatcagcgg

SEQ ID NO: 334317 - DNA, 75 bp, synthetic construct
  source 1..75: mol_type = other DNA
gtgcaggtagccagcactttaacgtcgatgacggacagaagggcggcggcatcaacagcctggcaagtgtcggcg

SEQ ID NO: 334318 - DNA, 75 bp, synthetic construct
  source 1..75: mol_type = other DNA
tggtgccgaagcgtggggcgaatatttgcgactatcggcaaacttttatcagccgtttgctgcatggcatgaaca

SEQ ID NO: 334319 - DNA, 75 bp, synthetic construct
  source 1..75: mol_type = other DNA
agttcgtactgaataacagtaagaacgccgtgcatattaaccagtccggaacgctgtataacactggacatatgg

SEQ ID NO: 334320 - DNA, 75 bp, synthetic construct
  source 1..75: mol_type = other DNA
ggttgtctgtcaggttcagggacgcactcatacccttagctatccactggcagtgtttcagtccggaaaaatgtt

SEQ ID NO: 334321 - DNA, 75 bp, synthetic construct
  source 1..75: mol_type = other DNA
cgatatgtggtgccagaggtaaatttcgctgtgatgataaggatggttccggttcatggatttgtgtctgtggtc

SEQ ID NO: 334322 - DNA, 75 bp, synthetic construct
  source 1..75: mol_type = other DNA
tggggcccgtggtgtggcggggtatatggcggagcgtattgggtttgacagcgcttccgttgatgcgttgtgtgc

SEQ ID NO: 334323 - DNA, 75 bp, synthetic construct
  source 1..75: mol_type = other DNA
tggcgggtggcggcacattttcttgtgtcatttatcgtcggcgtactgggtgcgcgtttgctttcagcctgggtg

SEQ ID NO: 334324 - DNA, 75 bp, synthetic construct
  source 1..75: mol_type = other DNA
agctgaaggtatcgaaaccgcgttgtccgcacatcagatttacaaagtaaatacctgggcaaccattaacagtgg

SEQ ID NO: 334325 - DNA, 75 bp, synthetic construct
  source 1..75: mol_type = other DNA
gcttcattattaagccacaaacactcccgttgcgaagtgatttctggcgtcacgttaccgttaattgagcagatg

SEQ ID NO: 334326 - DNA, 75 bp, synthetic construct
  source 1..75: mol_type = other DNA
gtgaaacattacaacggaccctgcccgatatgtggtgccagaggtaaatttcgctgtgatgataaagatggctcc

SEQ ID NO: 334327 - DNA, 75 bp, synthetic construct
  source 1..75: mol_type = other DNA
ttgagccgtttcgtttctcgcattaccccgttttatttactcttgcttatagcaggcggtacagctaacgcacaa

SEQ ID NO: 334328 - DNA, 75 bp, synthetic construct
  source 1..75: mol_type = other DNA
gcgtcgcttcgccagcttgaaatgtgtgcacaacagagttacgaccaacttcttgcagcgtcaacagaaaactgg

SEQ ID NO: 334329 - DNA, 75 bp, synthetic construct
  source 1..75: mol_type = other DNA
ctggtgaccttactcgaacaaacggtcgttaataccctggctgaactggatattgaagcgcatcctcgtgctgat

SEQ ID NO: 334330 - DNA, 75 bp, synthetic construct
  source 1..75: mol_type = other DNA
cagtcagcactttaatgtcgatgacggtcagaagggcggcggcatcaacagcctggcaagcgtcggcgtgaagta

SEQ ID NO: 334331 - DNA, 75 bp, synthetic construct
  source 1..75: mol_type = other DNA
tgccagccgtcgctttgtttcggcagaacaactgccgctgatggcgctggaaatcagcattacgccgctggacgc

SEQ ID NO: 334332 - DNA, 75 bp, synthetic construct
  source 1..75: mol_type = other DNA
cgtcagtggtggcagaagcgccgcgtcacggtgaccagccgcgatgagcacgatcagcgggcgctggattttgcc

SEQ ID NO: 334333 - DNA, 75 bp, synthetic construct
  source 1..75: mol_type = other DNA
ctgagcagtggcaacagttgtctttccctctgttctggctgtctcttatacacaaatccccacccggggatttgt

SEQ ID NO: 334334 - DNA, 75 bp, synthetic construct
  source 1..75: mol_type = other DNA
agttgtgtgtgaattactggggcgtaactacaccatcagttacccactggtggcgtttcagtccggaaaaatgtt

SEQ ID NO: 334335 - DNA, 75 bp, synthetic construct
  source 1..75: mol_type = other DNA
tcccgctttttttactcttgctgctggcaggcggtatggctgatgcacagccatcctttgagcagcaatcggcaa

SEQ ID NO: 334336 - DNA, 75 bp, synthetic construct
  source 1..75: mol_type = other DNA
tagtcactgtgacggcccagcataaacagggtgaaagtggcgagaatcaaaataacctcgggctgaatcttaatt

SEQ ID NO: 334337 - DNA, 75 bp, synthetic construct
  source 1..75: mol_type = other DNA
tagcggtgacagcgatgcacgccctggcgtgcgggttgcaacgatgcaccgtattaaagggcttgagttccagta

SEQ ID NO: 334338 - DNA, 75 bp, synthetic construct
  source 1..75: mol_type = other DNA
ttgggccgttggtggagatataagtggatcacttttcatccgtcgttgacacagggggacagacgccatgcggga

SEQ ID NO: 334339 - DNA, 75 bp, synthetic construct
  source 1..75: mol_type = other DNA
tactcattggcgcggcgaaaaccacctcagtggttatgtttctggtggcctcggcacaagtttccgcctggctga

SEQ ID NO: 334340 - DNA, 75 bp, synthetic construct
  source 1..75: mol_type = other DNA
attctgtcgttcatccaccagcaggatattgcatcgctggcgtccggtgtgttctcccgcctgcggggcggaggt

SEQ ID NO: 334341 - DNA, 75 bp, synthetic construct
  source 1..75: mol_type = other DNA
ctttaagacattgccgggaatatgctgctaaaaatgcagagtatatggcaagactggcaggacttattcaccatt

SEQ ID NO: 334342 - DNA, 75 bp, synthetic construct
  source 1..75: mol_type = other DNA
ttactggatttactgtatgagcaaaacagagttgtacagtttattgacgacaaaacgtggtatgtcgcacctaac

SEQ ID NO: 334343 - DNA, 75 bp, synthetic construct
  source 1..75: mol_type = other DNA
cgctggcattggtatgtgggccagtggaagtaatagcaaagttattaatcagggtgagatcaacttaagcagtga

SEQ ID NO: 334344 - DNA, 75 bp, synthetic construct
  source 1..75: mol_type = other DNA
ccgggggaggtgatggtaatagcggaagtacaggctacgccacgctgaattatcgcggtggttacggcaatgcca

SEQ ID NO: 334345 - DNA, 75 bp, synthetic construct
  source 1..75: mol_type = other DNA
aagattataagacaacagaatcagagcttaaaacacatctgaataagtgtcctgttccaccacagatacatcgaa

SEQ ID NO: 334346 - DNA, 75 bp, synthetic construct
  source 1..75: mol_type = other DNA
cgatgagtggtgaacgacgttgccttcacttttctcctcaggctgccagaatctggacggattattacaatgatg

SEQ ID NO: 334347 - DNA, 75 bp, synthetic construct
  source 1..75: mol_type = other DNA
ccccaggacgatatttctatcaaccctggggctacctacccaaacctgaacaatttggatggtagtcccttcttc

SEQ ID NO: 334348 - DNA, 75 bp, synthetic construct
  source 1..75: mol_type = other DNA
gtggaaagtgcggcagtgacgagatgaactttgtcatcaatgaacactgtccagacgatccccagaatgttgcca

SEQ ID NO: 334349 - DNA, 75 bp, synthetic construct
  source 1..75: mol_type = other DNA
gtgtgtccagcgtggtgtgcagttgcgcagtgaggatgatgcggctgacgacgctgaccgcacggaacaggtgca

SEQ ID NO: 334350 - DNA, 75 bp, synthetic construct
  source 1..75: mol_type = other DNA
tgtggaaaaaatacggcaatggcgacaacggtattcccggccgatagtgaacgacctgtttgcctggcttgaaga

SEQ ID NO: 334351 - DNA, 75 bp, synthetic construct
  source 1..75: mol_type = other DNA
gaagctcttaatgcggttttagccaaaaataaagataacgaaaaatggggtataccggcaggattcagagggtga

SEQ ID NO: 334352 - DNA, 75 bp, synthetic construct
  source 1..75: mol_type = other DNA
ctgctgactgcgccgaaactgcaccgcatgacgcaggatgacgctgcagacaaagcggcgaaagctgctgtagcg

SEQ ID NO: 334353 - DNA, 75 bp, synthetic construct
  source 1..75: mol_type = other DNA
tgtcgtcgctactttccgccacgaaacgtccagggcgctagatcctgatttgcacacacacgcttttgtcatgaa

SEQ ID NO: 334354 - DNA, 75 bp, synthetic construct
  source 1..75: mol_type = other DNA
gcggatgcactgtgtgcggtgctggtatcggtggtgtcggtaaagattctgtcgtttatccaccaacaggatatc

SEQ ID NO: 334355 - DNA, 75 bp, synthetic construct
  source 1..75: mol_type = other DNA
gttcagttgttaatgatggtttgatttcaacaacaggcggcaatagttgggggattgtttctaatgacgattctg

SEQ ID NO: 334356 - DNA, 75 bp, synthetic construct
  source 1..75: mol_type = other DNA
ctgacctgcctgaatccgtagccgatgccaccgtcgcaacctggcataaaaaaccgggcgacgcggttgttcgtg

SEQ ID NO: 334357 - DNA, 75 bp, synthetic construct
  source 1..75: mol_type = other DNA
catcggcagatgcgctgtgtgcggtgctggtatcggtggtgtcggtgaagattctgtcgttcatccaccagcagg

SEQ ID NO: 334358 - DNA, 75 bp, synthetic construct
  source 1..75: mol_type = other DNA
tggcgtgtggcagcgcattttctggtgtcgtttatcgtcggtgtacttggcgctcgagtgctgtcagcctggatt

SEQ ID NO: 334359 - DNA, 75 bp, synthetic construct
  source 1..75: mol_type = other DNA
tgtcgtttatcgtgggcgtactgggggcgcgcgtgctgtcagcctggattgctgtaaaaacagggcatgacggca

SEQ ID NO: 334360 - DNA, 75 bp, synthetic construct
  source 1..75: mol_type = other DNA
cgtggcgagtcataccgcgttcttgataccgggccgggcaataaattaacggttgaaagcagcagcggtgagcag

SEQ ID NO: 334361 - DNA, 75 bp, synthetic construct
  source 1..75: mol_type = other DNA
taaacttgccgatcgctacctggctctgtcctcagaacagcaggatgccacactgataatctccggtacgaacgc

SEQ ID NO: 334362 - DNA, 75 bp, synthetic construct
  source 1..75: mol_type = other DNA
gaaaccgccgatgctcagacgaaaagccgcgtctcgatggctacgcgtgaaaagaaaacagagcattcccgtgaa

SEQ ID NO: 334363 - DNA, 75 bp, synthetic construct
  source 1..75: mol_type = other DNA
ccattacgcagaataccggtaatctggttgttgcttccttccggcatgaaacatcacgcgcccttgacccggagc

SEQ ID NO: 334364 - DNA, 75 bp, synthetic construct
  source 1..75: mol_type = other DNA
cctgggcgataccaaacagactaaagccgtcgaagcgggtaaacctttcgagcagcttattaaagccggtatgga

SEQ ID NO: 334365 - DNA, 75 bp, synthetic construct
  source 1..75: mol_type = other DNA
aaacgcacgttgaaaacacgaataagctgattgtcggcaaatttcgacacgaaacgtcacgcgagctagacccgg

SEQ ID NO: 334366 - DNA, 75 bp, synthetic construct
  source 1..75: mol_type = other DNA
actggtacgaatgcacttcgcgccattttactctggcactcacgccgctcagcgtggcggataaattcaaagagt

SEQ ID NO: 334367 - DNA, 75 bp, synthetic construct
  source 1..75: mol_type = other DNA
ccagccagtattttggtcagtcactctccagtcgacaactgctcgacctggcaaaagacatcaccatcgcctacc

SEQ ID NO: 334368 - DNA, 75 bp, synthetic construct
  source 1..75: mol_type = other DNA
ttactgtgcaggaaaagtaactttgtcgtgacttgcgctctggcaaacaagctggccagaatagcctgggcacta

SEQ ID NO: 334369 - DNA, 75 bp, synthetic construct
  source 1..75: mol_type = other DNA
ttactgctcgatgacaccctggaactttgttatgacgtggcgaaactgtcactggggcgttccgccttgctggat

SEQ ID NO: 334370 - DNA, 75 bp, synthetic construct
  source 1..75: mol_type = other DNA
ctcgccggatgatccactgttaaaagcgcgcatggaagattgtcgtttgcgcggtggcgacccgttcgatgaagt

SEQ ID NO: 334371 - DNA, 75 bp, synthetic construct
  source 1..75: mol_type = other DNA
tttgattacagccgccaggcgttactctgtgtgccgcgcaacctgccgcaaactaatcaaccgggttccgcacgg

SEQ ID NO: 334372 - DNA, 75 bp, synthetic construct
  source 1..75: mol_type = other DNA
aacgtatttaacctcagcgatgcggtgctcaccgaccagggcggtaatgccgcgctgaatggcgcgacggtgatt

SEQ ID NO: 334373 - DNA, 75 bp, synthetic construct
  source 1..75: mol_type = other DNA
agtacccttcttgaggacagtagtttgcctctttatctcagccagttactgctgaaattacaacagcattatcac

SEQ ID NO: 334374 - DNA, 75 bp, synthetic construct
  source 1..75: mol_type = other DNA
tgcgttaatcaaaacgcaacgtcttcttttaccgcacgatgacggtaatggtggcggtgccctgaaattttcctg

SEQ ID NO: 334375 - DNA, 75 bp, synthetic construct
  source 1..75: mol_type = other DNA
gcggttttcggggcgcaggggatgaatgtttcactgaaggacgccatgctctgctggggcgaggatgaggataag

SEQ ID NO: 334376 - DNA, 75 bp, synthetic construct
  source 1..75: mol_type = other DNA
gcagttattagtcggctgagcactattcttgaggacaataatttacctctttatctcagccagttattactgaaa

SEQ ID NO: 334377 - DNA, 75 bp, synthetic construct
  source 1..75: mol_type = other DNA
cagtagtttgcctctttatctcagccagttactgctgaaattacaacagcattatcactatcttgttgagcagat

SEQ ID NO: 334378 - DNA, 75 bp, synthetic construct
  source 1..75: mol_type = other DNA
ccttacggtgcgacgttcctcgccagcctcccgcccgcaccgcgtacccgtgacattgctcgtgcggttcgtttc

SEQ ID NO: 334379 - DNA, 75 bp, synthetic construct
  source 1..75: mol_type = other DNA
atggagttaaaattattgaaccggtcgtatatggtgacaacaggggtttttttttagaagtatatcaaaaacaac

SEQ ID NO: 334380 - DNA, 75 bp, synthetic construct
  source 1..75: mol_type = other DNA
tcatcatgacagttcagaaccagatgacggtggtgatacacctgttccaccagatgacggtggtgattcacctgt

SEQ ID NO: 334381 - DNA, 75 bp, synthetic construct
  source 1..75: mol_type = other DNA
cggtcattcaatatcgattcacaggttacagcggctaactctctgaatactgctgaggatgatgttttttcttca

SEQ ID NO: 334382 - DNA, 75 bp, synthetic construct
  source 1..75: mol_type = other DNA
cagcggtttttttgctgatacacctggaaaaatgggattgcttgctgtttatacgggtactgttttcatattatc

SEQ ID NO: 334383 - DNA, 75 bp, synthetic construct
  source 1..75: mol_type = other DNA
atgaacagaaaatattattttaataatatgtggtggggatggtttatgggtgggtatactctgtatatgtcatgg

SEQ ID NO: 334384 - DNA, 75 bp, synthetic construct
  source 1..75: mol_type = other DNA
acagtgcaggtcgggttgcagtggatttaagcgattacgcgatccgttacatgggcagcgcaacggtttcgcttg

SEQ ID NO: 334385 - DNA, 75 bp, synthetic construct
  source 1..75: mol_type = other DNA
tgattcgcgacgccgacgatcgaggggttttggtgatttgcgacaatcggctggtgatgcgcccttacggcgcga

SEQ ID NO: 334386 - DNA, 75 bp, synthetic construct
  source 1..75: mol_type = other DNA
aaagggcgctcaaactatctctgcctcgaacgactggaacagcaggcgctggcgggcggcgatttgccggtacaa

SEQ ID NO: 334387 - DNA, 75 bp, synthetic construct
  source 1..75: mol_type = other DNA
cgttcctcgccagcctcccgcccgcaccgcgtacccgtgacattgcccgtgcggttcgtttccttgcgataccat

SEQ ID NO: 334388 - DNA, 75 bp, synthetic construct
  source 1..75: mol_type = other DNA
aattgaggcgctggcggatggcattatggatgccggactggtatcggtgcgtgaacaggcgcgtccggcggcgca

SEQ ID NO: 334389 - DNA, 75 bp, synthetic construct
  source 1..75: mol_type = other DNA
ctggggtgaggatgacgataagccggaggcggatccgtttgcggcactggaagacgcgctgagccttgcagcaca

SEQ ID NO: 334390 - DNA, 75 bp, synthetic construct
  source 1..75: mol_type = other DNA
aaagcgcgcatggaagattgccgtttgcgtggtggtgacccgttcgatgaagtacaactgccggatgcggtgatt

SEQ ID NO: 334391 - DNA, 75 bp, synthetic construct
  source 1..75: mol_type = other DNA
ttgaagcggaaccgcgcacgctgattttttatgaatcgacccaccgtctgttagatagcctggaagatatcgtcg

SEQ ID NO: 334392 - DNA, 75 bp, synthetic construct
  source 1..75: mol_type = other DNA
gcgagcgcgatgaacgcatcgcgaaggtgcagggcaatcataacccgtatgtgcaacgcgcttgccaggcgcgaa

SEQ ID NO: 334393 - DNA, 75 bp, synthetic construct
  source 1..75: mol_type = other DNA
gcaaacgcgacgaacgcatcgcgaaggtacagggcaatcataatccgtatgtgcaacgcgcttgccaggcgggaa

SEQ ID NO: 334394 - DNA, 75 bp, synthetic construct
  source 1..75: mol_type = other DNA
gccgggtacgttttactgcggatgtaaaattaactggcagggtaaaaaaggcgttgtcgacctgcaatcctgcgg

SEQ ID NO: 334395 - DNA, 75 bp, synthetic construct
  source 1..75: mol_type = other DNA
gcgtaaactcacacctgaagaacgtagcgccgttgaaaattatcttgagagcctgacgcaggtattacaggtgcc

SEQ ID NO: 334396 - DNA, 75 bp, synthetic construct
  source 1..75: mol_type = other DNA
tacttgttaaacgcgctgtatttcacaagcaaatctcctccgtggatgaactgacgaaattaacgacagaaattg

SEQ ID NO: 334397 - DNA, 75 bp, synthetic construct
  source 1..75: mol_type = other DNA
ctgcggtgatactgagcgcagcattttccggccaggtattggccgaaggcatcaatagtttttcccaggcgaaaa

SEQ ID NO: 334398 - DNA, 75 bp, synthetic construct
  source 1..75: mol_type = other DNA
caatactggcagaccacgggggatgaaagtttcattgcgcagaaggcatggcgctacttctggagacggcaaagt

SEQ ID NO: 334399 - DNA, 75 bp, synthetic construct
  source 1..75: mol_type = other DNA
aatctgcaattttatgaaccgcgcactattcacgactcgtcattaagtaaagcaatccacggcattgttgccgca

SEQ ID NO: 334400 - DNA, 75 bp, synthetic construct
  source 1..75: mol_type = other DNA
cagtgatgtggccatcagctgttgctgtaaggtgagcggtgatgtgcagcaatgctataccgccaaagagcgccg

SEQ ID NO: 334401 - DNA, 75 bp, synthetic construct
  source 1..75: mol_type = other DNA
cgaggcatcagtgctgatctcaacaggcattgacgccacgcaaactaaccatggtcgccagcatcttgatgaaac

SEQ ID NO: 334402 - DNA, 75 bp, synthetic construct
  source 1..75: mol_type = other DNA
tgttattgggccagacgaatataccgaacacgttaacaataacgcatacacaagttatatggcctgctacaacgt

SEQ ID NO: 334403 - DNA, 75 bp, synthetic construct
  source 1..75: mol_type = other DNA
tggattattcacgcgcagaagtgaacgagatgcagatcctcaagcaggctgatgtggtgatgctcaattacatgc

SEQ ID NO: 334404 - DNA, 75 bp, synthetic construct
  source 1..75: mol_type = other DNA
acacgctatcacgcgttacggcatctctaccgacgatccgaataaatggcgttactacctcgattcggtagaagt

SEQ ID NO: 334405 - DNA, 75 bp, synthetic construct
  source 1..75: mol_type = other DNA
acgcaggtaaagacggctggagcgctagcgctacgctggaaggcgggccgaacctgagctacgcgaagagccagc

SEQ ID NO: 334406 - DNA, 75 bp, synthetic construct
  source 1..75: mol_type = other DNA
ccagctattgcgctgatgaatttaaaaacttaacgacaaaaggagctggtaatgccggacaacgtagattttatt

SEQ ID NO: 334407 - DNA, 75 bp, synthetic construct
  source 1..75: mol_type = other DNA
caagcaaatttcatccgtggatgaactgacaaaattaacgacagaaatcgccagctattgcgctgatgaatttaa

SEQ ID NO: 334408 - DNA, 75 bp, synthetic construct
  source 1..75: mol_type = other DNA
atcactgcattaagcgccgctggtttaccatccgatcgcttttgttatgaaggctttctgcccgccaaatcgaaa

SEQ ID NO: 334409 - DNA, 75 bp, synthetic construct
  source 1..75: mol_type = other DNA
ccataacgaacaacaaaaagccgaaacgctgctggcgaagctgcaagaggggcaaaacattgcgctggtttccga

SEQ ID NO: 334410 - DNA, 75 bp, synthetic construct
  source 1..75: mol_type = other DNA
gtactgcggatattaccgtaccagaggcatcaaccacgccgccacaaggtaatgttccaacgccacctgtcgatt

SEQ ID NO: 334411 - DNA, 75 bp, synthetic construct
  source 1..75: mol_type = other DNA
ttattctggatcccgctggatatgccgctgaaattcaccctctcgtggatgaaaggcgcacagaccattgaagcc

SEQ ID NO: 334412 - DNA, 75 bp, synthetic construct
  source 1..75: mol_type = other DNA
tacatcaacgatgagaataccgttgaactgattcataccgattcgctgccgctggttatttcactcaacggtcat

SEQ ID NO: 334413 - DNA, 75 bp, synthetic construct
  source 1..75: mol_type = other DNA
gcgtgaatgtgttattacgcccggtgagtgcggaatcgctggataacctggtggcaacctccaccgcgccgttta

SEQ ID NO: 334414 - DNA, 75 bp, synthetic construct
  source 1..75: mol_type = other DNA
taccagcgtcatcgcactcgcatgatggagattcaggcctattatgaaagctgcctgaacccgcaactgatcacc

SEQ ID NO: 334415 - DNA, 75 bp, synthetic construct
  source 1..75: mol_type = other DNA
cccgtcaacgcaggcgtcgattcgcggagaagaaagcgaacaaattgaattactcaatattcgcaaagaaacgca

SEQ ID NO: 334416 - DNA, 75 bp, synthetic construct
  source 1..75: mol_type = other DNA
gctggataacctggtggcgacctccaccgcaccgttcatcacgcatgaaacagcgcgagcggcacagtcacttaa

SEQ ID NO: 334417 - DNA, 75 bp, synthetic construct
  source 1..75: mol_type = other DNA
tgggtggcgcttcccctgaccacggtaaacggtgtatcacagtttcagccggagtggatatgctgggaacctggt

SEQ ID NO: 334418 - DNA, 75 bp, synthetic construct
  source 1..75: mol_type = other DNA
ggcaaagcgaggccagaagccgacttcagttctattttttgctggcagtggcgaatgccgtcgtgttaattgtct

SEQ ID NO: 334419 - DNA, 75 bp, synthetic construct
  source 1..75: mol_type = other DNA
tgcaaaaaaaccacaggatgagcgtacacttcactaaccatgggcaaataaaaatggtggtgtcagaaaaagcgc

SEQ ID NO: 334420 - DNA, 75 bp, synthetic construct
  source 1..75: mol_type = other DNA
cctttcatacgaaaccgggaaacaggccacccgcacggaagagcgcgtgctgaaacgggaggcagatgacgtcgc

SEQ ID NO: 334421 - DNA, 75 bp, synthetic construct
  source 1..75: mol_type = other DNA
gagctggtgcataccgactttcttgggtaccagcccgatgaaacttttgatgttatcgttatgaatccaccattc

SEQ ID NO: 334422 - DNA, 75 bp, synthetic construct
  source 1..75: mol_type = other DNA
gatgacccttgaggatgccggtttggtgatcggtgcctttctgtgggccggaatcctgtgtgacaaggttcatca

SEQ ID NO: 334423 - DNA, 75 bp, synthetic construct
  source 1..75: mol_type = other DNA
aatcgccacgttggttgatatggcggagcaggcgacggggcagagcggaacagtaggcatgggcattcccggctc

SEQ ID NO: 334424 - DNA, 75 bp, synthetic construct
  source 1..75: mol_type = other DNA
aattgccacgttggttgatatggcggagcaggcgacagggcagcgcggaactgtaggcatgggcattcccggctc

SEQ ID NO: 334425 - DNA, 75 bp, synthetic construct
  source 1..75: mol_type = other DNA
gggggcgggatgagcaatgtagaccgtttatatcaaacggttccgcagttgattaaacaatttgtcttcggcggc

SEQ ID NO: 334426 - DNA, 75 bp, synthetic construct
  source 1..75: mol_type = other DNA
ccagacgcaccgaaaagcaaagcgtgggattttgttatcaacagcaaagtctgtcaggggagtgaccgtgataag

SEQ ID NO: 334427 - DNA, 75 bp, synthetic construct
  source 1..75: mol_type = other DNA
tgaggacgataatctcggtatttactcgcctttatttcaggagcttggtcgtgccgctgctgttcagccggatga

SEQ ID NO: 334428 - DNA, 75 bp, synthetic construct
  source 1..75: mol_type = other DNA
actggtctttgctgctcttcgtgacgggattaatgcggcctgctatgacggccagaacttctttgataccgaaca

SEQ ID NO: 334429 - DNA, 75 bp, synthetic construct
  source 1..75: mol_type = other DNA
tggaaggtgcggtacgtgaaaaagcgttgcacacaatgcgcgagcaaacccagagaatggaaggactggtgaagc

SEQ ID NO: 334430 - DNA, 75 bp, synthetic construct
  source 1..75: mol_type = other DNA
cacaggaaattaaaaaacatttattaaccggcatctcgtggatgataccccttattgtggccgccgggatatgta

SEQ ID NO: 334431 - DNA, 75 bp, synthetic construct
  source 1..75: mol_type = other DNA
gtttaaagataaaaaaagggcatatgtttggtgagcgagattccaaacgaaaaattctgtctattcgattaccat

SEQ ID NO: 334432 - DNA, 75 bp, synthetic construct
  source 1..75: mol_type = other DNA
agcaggcgctgggacgcatgatcaccgtagcggcaaaaattgctgagcaagaaggcattgccgaagatggctatc

SEQ ID NO: 334433 - DNA, 75 bp, synthetic construct
  source 1..75: mol_type = other DNA
gtgacgtgatccgcaaaaataatctcaccagcgcctatatccgtccgctgatcttcgtcggtgatgttggcatgg

SEQ ID NO: 334434 - DNA, 75 bp, synthetic construct
  source 1..75: mol_type = other DNA
aacacatcagccacgcggtgccgtggttgcgtgacaaccctgataatctggcggtgtatgtccagaaggggcgca

SEQ ID NO: 334435 - DNA, 75 bp, synthetic construct
  source 1..75: mol_type = other DNA
ccctcattcttgcatgtatttttgcggcagcgattagtgcagtagattattttgcagggggtaagggagcggata

SEQ ID NO: 334436 - DNA, 75 bp, synthetic construct
  source 1..75: mol_type = other DNA
gtgcctgctgcctcgctgacggcaaaaggcaccgtacaattgagcagtgacatcaacagcacgtctgaaatactg

SEQ ID NO: 334437 - DNA, 75 bp, synthetic construct
  source 1..75: mol_type = other DNA
gggccttgtcgctatgcactcaacaagaaatgtccttttcatcaagtcccagcttaaaaaagttactttttcatg

SEQ ID NO: 334438 - DNA, 75 bp, synthetic construct
  source 1..75: mol_type = other DNA
gaaaaggttgatgtacctatgatgctgcgtgtcgttgagcgtgaagcccagactctgagtcagcacaaacagaca

SEQ ID NO: 334439 - DNA, 75 bp, synthetic construct
  source 1..75: mol_type = other DNA
ttaccgttggggggcacctaacatgcgtcgccgtctgctactggacagcatcaggccaataaaacaggtagcaac

SEQ ID NO: 334440 - DNA, 75 bp, synthetic construct
  source 1..75: mol_type = other DNA
gcgtcaggcctatgaagaggcgttgcggtgggcggtaaatccagacgaaaaaaatgctgacaacgaggaggatct

SEQ ID NO: 334441 - DNA, 75 bp, synthetic construct
  source 1..75: mol_type = other DNA
tacagctcggtgcaaacaggtatggcggaactcattcctgtagccaaacagtggcaaatggaagaaccagaaagc

SEQ ID NO: 334442 - DNA, 75 bp, synthetic construct
  source 1..75: mol_type = other DNA
gatcgccacgctggttgatatggcggagcaggcgacagggcagcgcggaacagtggggatgggcattcctggctc

SEQ ID NO: 334443 - DNA, 75 bp, synthetic construct
  source 1..75: mol_type = other DNA
gaaggttgatctggtagcacagcctgaactgctagcgcaggatgagtatgcggcccgcagcgcggcgtggttctt

SEQ ID NO: 334444 - DNA, 75 bp, synthetic construct
  source 1..75: mol_type = other DNA
tgattatcaatggtggccggaacggcatcgacgaccggcgcgcgcggtacgtcactgccagtaaggtgctggctg

SEQ ID NO: 334445 - DNA, 75 bp, synthetic construct
  source 1..75: mol_type = other DNA
tgattatcaatggtggcagaaacggtatcgacgaccggcgtgcgcggtacatcacagcaagtaaggtactggcgg

SEQ ID NO: 334446 - DNA, 75 bp, synthetic construct
  source 1..75: mol_type = other DNA
ccgctggtatcagtgacgtactggccacgcgctggtatctgcatatcaccgcggctatgaaagagtttggtattg

SEQ ID NO: 334447 - DNA, 75 bp, synthetic construct
  source 1..75: mol_type = other DNA
tggctggaattaccgaggtcgcggacttatccagattaccggtttgaataactatcgtgattgcggaaacggcct

SEQ ID NO: 334448 - DNA, 75 bp, synthetic construct
  source 1..75: mol_type = other DNA
ctgctggtattagcgaggcgctggccgcacgctggtttctgcatatcactgctgccatgaatgagtttggcatta

SEQ ID NO: 334449 - DNA, 75 bp, synthetic construct
  source 1..75: mol_type = other DNA
agggtgcaaaaagccgactacaaaagcgacggccagaaaagccacgaaaaaaaccgccgcaaaaccggcgcgcaa

SEQ ID NO: 334450 - DNA, 75 bp, synthetic construct
  source 1..75: mol_type = other DNA
ttcagcgcgtgatggcgcatcatcgggctgatccattcagtcgcgaagagcagcgaacacgaacggcacatgaac

SEQ ID NO: 334451 - DNA, 75 bp, synthetic construct
  source 1..75: mol_type = other DNA
cacgccgcgcgtaccgcgcatgaagaggtgctgtatcgtctgcgtctggcacaggccaggctaaagggcgtacag

SEQ ID NO: 334452 - DNA, 75 bp, synthetic construct
  source 1..75: mol_type = other DNA
ctcacccagggacaggctaacgcactgggccgccgtgctggtgagccaccattgccacttgagcgccagcgcgcg

SEQ ID NO: 334453 - DNA, 75 bp, synthetic construct
  source 1..75: mol_type = other DNA
gctgctatgaatgagtttggcattaccaagccagatgaccaggcgatgtttatcgcgcaggtcgggcatgagtcc

SEQ ID NO: 334454 - DNA, 75 bp, synthetic construct
  source 1..75: mol_type = other DNA
gttgccactggagaggcagcgggccattgccaatctggtgtacagcaaacgtatggggaataacggaccgaccga

SEQ ID NO: 334455 - DNA, 75 bp, synthetic construct
  source 1..75: mol_type = other DNA
ggcggctttacccggcttcaggagaactttaactacagcgttaccgggctggcaggattcgtccgcgccgggcgt

SEQ ID NO: 334456 - DNA, 75 bp, synthetic construct
  source 1..75: mol_type = other DNA
aatctcatgagacgatggcgcggcctgagcgtgtgagaatgtattccggtgcgacggtccggcatgtactggaac

SEQ ID NO: 334457 - DNA, 75 bp, synthetic construct
  source 1..75: mol_type = other DNA
atgacatgggctgaaccggaataccgcaaaagacaactccgtttctggaaactcgggaaacagattgaatctctt

SEQ ID NO: 334458 - DNA, 75 bp, synthetic construct
  source 1..75: mol_type = other DNA
aatcagtgttgttagccctggctgctgaaaaagggcaggcatgggtagccaatgccattactgaagaatatctgc

SEQ ID NO: 334459 - DNA, 75 bp, synthetic construct
  source 1..75: mol_type = other DNA
tgatcacctcgctgatgaccggctaccgtggcgattttcaggccggtatggcaatggccccgtcgcagtaccagc

SEQ ID NO: 334460 - DNA, 75 bp, synthetic construct
  source 1..75: mol_type = other DNA
ttatctcttccgtcaactcggttttaatcagacctggcatgagtggaagcgggacgaacagcacaggcaacaaca

SEQ ID NO: 334461 - DNA, 75 bp, synthetic construct
  source 1..75: mol_type = other DNA
atcacagagaacgggatacacctggcaggctacggtgaggccataaaccgtgatgctgatactccgtacccaccg

SEQ ID NO: 334462 - DNA, 75 bp, synthetic construct
  source 1..75: mol_type = other DNA
ctcacccaagggcaggctaatgcattgggacgccgtgctggtgaaccaccattgccacttgagcgacagcgcgcg

SEQ ID NO: 334463 - DNA, 75 bp, synthetic construct
  source 1..75: mol_type = other DNA
gaaagttgacctgctggagaatcctgaactgctggcgcaggacgaatacgcggctcgtagcgcggcgtggttctt

SEQ ID NO: 334464 - DNA, 75 bp, synthetic construct
  source 1..75: mol_type = other DNA
ggctaatttcgttcgggctgggcgtctcactcagggacaggccaacgcattggggcgtcgtgctggtgaaccacc

SEQ ID NO: 334465 - DNA, 75 bp, synthetic construct
  source 1..75: mol_type = other DNA
aacacaccagaaaaacagccggatcatctgttccgctcgctgggttttaatcgtacctgggatgaatggcggcgc

SEQ ID NO: 334466 - DNA, 75 bp, synthetic construct
  source 1..75: mol_type = other DNA
ggaataccgtagtgagcagggaaaaatccagtctctgagccagcaaatggaaaaattgcgacagcattaccggaa

SEQ ID NO: 334467 - DNA, 75 bp, synthetic construct
  source 1..75: mol_type = other DNA
aagctgcgttttcaaaaacagcagcatcatgcagcctaccaatatacgccgcaagaatatgcagagagcttagca

SEQ ID NO: 334468 - DNA, 75 bp, synthetic construct
  source 1..75: mol_type = other DNA
actgaatggacagtcatatgctggctttggaaccgattttgcttatggacttgggcttcaatttaacccagctcc

SEQ ID NO: 334469 - DNA, 75 bp, synthetic construct
  source 1..75: mol_type = other DNA
gtgttcacgacgcacaaattttcaccactcgcgacggtatggcgatggataccttcatcgtgctggaacccgatg

SEQ ID NO: 334470 - DNA, 75 bp, synthetic construct
  source 1..75: mol_type = other DNA
gccgtatctgtttgctgccgtgtgtgccgaattagaccgccgcaatttaagcgttcatgacgcgcaaattttcac

SEQ ID NO: 334471 - DNA, 75 bp, synthetic construct
  source 1..75: mol_type = other DNA
gaaccacgcagaagtgttcagcgaaaaccaggacattgtggtcgccacgaccggacgtctgctgcaatacataaa

SEQ ID NO: 334472 - DNA, 75 bp, synthetic construct
  source 1..75: mol_type = other DNA
ccatcaccggcggcgtagcctatatgaaccacgcggaagtgttcagcgaaaatcaggacatcgtggtcgccacga

SEQ ID NO: 334473 - DNA, 75 bp, synthetic construct
  source 1..75: mol_type = other DNA
ctggttgaagcccatgaccatctgctgctgggcaaagttagtcgttatattgaagagccgattaaagctcgcgtc

SEQ ID NO: 334474 - DNA, 75 bp, synthetic construct
  source 1..75: mol_type = other DNA
gaaaccgaagtgacgtttttgccaacccataccgaccgcaaatcgttccttgagcttatcgcgctcgaccaacca

SEQ ID NO: 334475 - DNA, 75 bp, synthetic construct
  source 1..75: mol_type = other DNA
ctactttgctaccgaaaagcagctacggcgcggaatgcaaaacacgccggatatgcgcgaacgggttcgccatca

SEQ ID NO: 334476 - DNA, 75 bp, synthetic construct
  source 1..75: mol_type = other DNA
tcgcgctaactattttgtccgccatagcccaaatcaactggcctggcatgcgcgccatttattacagcatgattt

SEQ ID NO: 334477 - DNA, 75 bp, synthetic construct
  source 1..75: mol_type = other DNA
ccagcttcaggcactggcgctgctgcgtatggacaatatcgacgaagaggcgctacaccagatctggtcacgctg

SEQ ID NO: 334478 - DNA, 75 bp, synthetic construct
  source 1..75: mol_type = other DNA
agtttgacctgttccacgcttacacagtggatgaacataccattcgcgtgatgttgaaactggagagttttgcca

SEQ ID NO: 334479 - DNA, 75 bp, synthetic construct
  source 1..75: mol_type = other DNA
tttgacagcggtatctccgcagaacagttaattgaagcgcgtactgaatttatcgaccaactcctgcaacggttg

SEQ ID NO: 334480 - DNA, 75 bp, synthetic construct
  source 1..75: mol_type = other DNA
aaggcaagcgtaacgaagcgatcaagcgtttgaccgaaggtcgcgtaaacgtactggttgcaaccgatgttgccg

SEQ ID NO: 334481 - DNA, 75 bp, synthetic construct
  source 1..75: mol_type = other DNA
ctggttccagcatcgcgcgcatatgcatgtacgattacgttgtcctgccgatagtctggagtgtgaagatcaacc

SEQ ID NO: 334482 - DNA, 75 bp, synthetic construct
  source 1..75: mol_type = other DNA
ggtgctgattggcgatatgggaatgcctgctggtgggcgcttcaacggcggtcacgccagccaccagaccggact

SEQ ID NO: 334483 - DNA, 75 bp, synthetic construct
  source 1..75: mol_type = other DNA
ggatgtggatatcttcctgcaactgccgaaaaaacgctggacctccgcgcagctcttgcgcccgcaggcactgga

SEQ ID NO: 334484 - DNA, 75 bp, synthetic construct
  source 1..75: mol_type = other DNA
ccgagcaggcgctgacggagagcctgaacaggcaactgaatgagaatcgccgttactggcaacagcttgaaattg

SEQ ID NO: 334485 - DNA, 75 bp, synthetic construct
  source 1..75: mol_type = other DNA
catcagcgacctggacgggaaagaactgacggcagatgaaaagagtgtgctggcccgtaaagatgaactgattca

SEQ ID NO: 334486 - DNA, 75 bp, synthetic construct
  source 1..75: mol_type = other DNA
gcactccgtttgattattttcacaggagtgcgccgctctgaagcggcacaaatgcgctgggatcaaattaatgga

SEQ ID NO: 334487 - DNA, 75 bp, synthetic construct
  source 1..75: mol_type = other DNA
cacgtggtatcgatattcctgatgtcagccacgtatttaacttcgatatgccgcgcagtggcgatacctatctac

SEQ ID NO: 334488 - DNA, 75 bp, synthetic construct
  source 1..75: mol_type = other DNA
tgagcgcaaaaagattcatcagtggtattaccgcgccgatgatcttgaacataaaactgcgttgctggtgcatct

SEQ ID NO: 334489 - DNA, 75 bp, synthetic construct
  source 1..75: mol_type = other DNA
agcgtgtgcatgagctggcaaactggctgcgcgaagcaggcatcaacaactgctatctcgaaggtgagatggtac

SEQ ID NO: 334490 - DNA, 75 bp, synthetic construct
  source 1..75: mol_type = other DNA
ctgaaggcggtttatgacctcgggaaaaaagcggcagcggactttatgcaacagcaggcccgtgatggtggtcgg

SEQ ID NO: 334491 - DNA, 75 bp, synthetic construct
  source 1..75: mol_type = other DNA
gcataaacagcttctggctctgcagcagcgcatcagcgacctggacgggaaaaaactgacggcagatgaaaagag

SEQ ID NO: 334492 - DNA, 75 bp, synthetic construct
  source 1..75: mol_type = other DNA
tgctaggcaaagttggccgttatattgaagagccaattaaagctcgcgtaattgatgagttacgcccgaaaacgc

SEQ ID NO: 334493 - DNA, 75 bp, synthetic construct
  source 1..75: mol_type = other DNA
cgagctgattgctctcgaccagcctggactgctggcacgggtagggaaaatttttgccgatctgggaatttcgct

SEQ ID NO: 334494 - DNA, 75 bp, synthetic construct
  source 1..75: mol_type = other DNA
cgaccctggttccagcatcgcgcgcatatgcatgtacgattacgttgtcctgccgatagtctggagtgtgaagat

SEQ ID NO: 334495 - DNA, 75 bp, synthetic construct
  source 1..75: mol_type = other DNA
ggtgctgattggcgatatggggatgcctgctggtggtcgtttcaacggcggtcacgccagccaccagaccggact

SEQ ID NO: 334496 - DNA, 75 bp, synthetic construct
  source 1..75: mol_type = other DNA
tcatttagcccaaccaaagcgaagaattatcagcgttataacgaacggataaaagtaaaacgtcaggagtgggga

SEQ ID NO: 334497 - DNA, 75 bp, synthetic construct
  source 1..75: mol_type = other DNA
gtcacgccagccaccagaccggactggatgtcgatatcttcctgcaactgccaaaaacacgctggacctccgcgc

SEQ ID NO: 334498 - DNA, 75 bp, synthetic construct
  source 1..75: mol_type = other DNA
caatatacaccgtgtcttcaacacccttacaggaatatttcatacccgcattgagcttattgcaattgagctgga

SEQ ID NO: 334499 - DNA, 75 bp, synthetic construct
  source 1..75: mol_type = other DNA
tttacatccgtatatgctttctttaataaaaacacaacgtgaattcactgaaggtgcatatgtttttggttctac

SEQ ID NO: 334500 - DNA, 75 bp, synthetic construct
  source 1..75: mol_type = other DNA
aagcgctggagcaggggatcgatgcgatggtttcctcctggaaccgcgcagcaccaaacaccatcccaaccgcgg

SEQ ID NO: 334501 - DNA, 75 bp, synthetic construct
  source 1..75: mol_type = other DNA
ctatcgcttcccggtttcgcagagcattgatgagctgatggaagcttgtcgtgacgtgatccgcaaaaacaatct

SEQ ID NO: 334502 - DNA, 75 bp, synthetic construct
  source 1..75: mol_type = other DNA
gtattccgtcatcgtgagcatatgcagcgtctgcatgactccgcaaaaatctatcgcttccctgtttcacagagt

SEQ ID NO: 334503 - DNA, 75 bp, synthetic construct
  source 1..75: mol_type = other DNA
aacaaaattgccatttacttgcattggtatcagaaaaaaggtatcgaggtgccacagacccaggacggggacatt

SEQ ID NO: 334504 - DNA, 75 bp, synthetic construct
  source 1..75: mol_type = other DNA
gttcagtccctgcgcgagttgtacaccgatgtcatcgaagagttttactgggttgcgctcccgcttacaacgcaa

SEQ ID NO: 334505 - DNA, 75 bp, synthetic construct
  source 1..75: mol_type = other DNA
gtaattcagtgtgcaattgaaacaggagcatctatagagtggctctcattcggaaaaggcgtgccatttcctaag

SEQ ID NO: 334506 - DNA, 75 bp, synthetic construct
  source 1..75: mol_type = other DNA
tggctatcaagagtcggtgttaactcaggagtcacaggttaaagtactgacattcgctgcatggatcacaggcac

SEQ ID NO: 334507 - DNA, 75 bp, synthetic construct
  source 1..75: mol_type = other DNA
ggctgacactggaggtcaatcgtacctgtactactggtgaacgtaacgctaacagcgcactttatggcgttgtct

SEQ ID NO: 334508 - DNA, 75 bp, synthetic construct
  source 1..75: mol_type = other DNA
ctgggaaccagcgaagaacaaggtcgcttatacggttactggtttctgggtaagggattaacctccattgtactg

SEQ ID NO: 334509 - DNA, 75 bp, synthetic construct
  source 1..75: mol_type = other DNA
tttacgggcgacaattattttttattccgtagtgactattctggcaggtgttttagcctggtttgtttgtcagga

SEQ ID NO: 334510 - DNA, 75 bp, synthetic construct
  source 1..75: mol_type = other DNA
tggattgaagcgggattcagccagattgccgacctggcattggttgccgtcggtggctacggtcgtggcgagctg

SEQ ID NO: 334511 - DNA, 75 bp, synthetic construct
  source 1..75: mol_type = other DNA
acgttgtattacgtacacccaggcagatgaatcaggagcatctcttcgcgcagttggttttgttcgtgtgaaaga

SEQ ID NO: 334512 - DNA, 75 bp, synthetic construct
  source 1..75: mol_type = other DNA
aagcggcgcaggaatttatcgcacagcaccaccgacacaataaaccaccagtggggcataaattcagcattggtc

SEQ ID NO: 334513 - DNA, 75 bp, synthetic construct
  source 1..75: mol_type = other DNA
gtcattcggtacatgacttactggcccagcatgggctggaagttccactggcactgttagtggcgcttggttgtg

SEQ ID NO: 334514 - DNA, 75 bp, synthetic construct
  source 1..75: mol_type = other DNA
tggtcagggatctttactgggtgcgatggcggtattcggtgcggttctgcctgcggcgctgttgttgattttcgc

SEQ ID NO: 334515 - DNA, 75 bp, synthetic construct
  source 1..75: mol_type = other DNA
atgttacagaacaacatcaaacagctccgtacccagctatctatcacccagcgcgagctggcgtttatggtcggc

SEQ ID NO: 334516 - DNA, 75 bp, synthetic construct
  source 1..75: mol_type = other DNA
ctggggcgcagcagccgctggtacaaaagcgaagtggagcagtggatgcaacagcgaatcgaggagtcacgagga

SEQ ID NO: 334517 - DNA, 75 bp, synthetic construct
  source 1..75: mol_type = other DNA
agccgctggtacaaaagtgaagtggagcagtggatgcagcagcgaattgaggaatcacgaggagcagcagcatga

SEQ ID NO: 334518 - DNA, 75 bp, synthetic construct
  source 1..75: mol_type = other DNA
ggttttacaagttgatcagtgaaggccatttccctaaacccatcaaactggggcgcagcagccgcaggtataaaa

SEQ ID NO: 334519 - DNA, 75 bp, synthetic construct
  source 1..75: mol_type = other DNA
cctcaggaaggggaaagggtaatattgaagatcagattcgttcaattaatgagttgattaaaggattagagattt

SEQ ID NO: 334520 - DNA, 75 bp, synthetic construct
  source 1..75: mol_type = other DNA
cgatttagcgcatcactgggaaacctctactgacgggttacgctgggacttttatcttcgttcaaccctacactg

SEQ ID NO: 334521 - DNA, 75 bp, synthetic construct
  source 1..75: mol_type = other DNA
ggccaacttcctaaaaaagccgcaatgaacgttatggctcaactcgctgcggagaaaattatgaaatacagacaa

SEQ ID NO: 334522 - DNA, 75 bp, synthetic construct
  source 1..75: mol_type = other DNA
gagcgatgcaggtggcaattgcggcctgggattgctttactcgcgttggcccggcggaaggtgaacgcgccattg

SEQ ID NO: 334523 - DNA, 75 bp, synthetic construct
  source 1..75: mol_type = other DNA
ttctttttgttgacgaagttcaccgtttcaacaaaagccagcaggatgcatttctgccacatattgaagacggca

SEQ ID NO: 334524 - DNA, 75 bp, synthetic construct
  source 1..75: mol_type = other DNA
attgaaacgggcgctgaaatagcaggtcttcgtttaattgacagatttgtcggtactatagcaccaatttttaga

SEQ ID NO: 334525 - DNA, 75 bp, synthetic construct
  source 1..75: mol_type = other DNA
agaacgtggtcgtattgataaaaactggatcaagcgcctgccagataactctgcgccatacacttccaccattgt

SEQ ID NO: 334526 - DNA, 75 bp, synthetic construct
  source 1..75: mol_type = other DNA
gcgcccgttacgacctgaaggggcagccgtgcggggaggtgacgccacaggagcagaaagaggctgaaacccggc

SEQ ID NO: 334527 - DNA, 75 bp, synthetic construct
  source 1..75: mol_type = other DNA
ggaaggcattgcccgtttatcgcagcaatatgatttacgtgttgccaacgtctttcatgccggagacggcaacat

SEQ ID NO: 334528 - DNA, 75 bp, synthetic construct
  source 1..75: mol_type = other DNA
tgtacagaagccagatatgtttgtcctgtgcaacaaattatagatacccccctgataggctatgaatatgttttg

SEQ ID NO: 334529 - DNA, 75 bp, synthetic construct
  source 1..75: mol_type = other DNA
catttttgctggcagcgaccagcgttatggcaaaggatattcagcttcttaacgtttcgtatgatccaacacgcg

SEQ ID NO: 334530 - DNA, 75 bp, synthetic construct
  source 1..75: mol_type = other DNA
gattttgttcgggcactgtataaaaacgtcgaagttctggattctggcgcgcgcggctccactaacacctttgtc

SEQ ID NO: 334531 - DNA, 75 bp, synthetic construct
  source 1..75: mol_type = other DNA
gcggtaagcgggtcctgaagcctgaattactgaccgaaatcgccggtgaacgtagcgcccgctttgataacaaag

SEQ ID NO: 334532 - DNA, 75 bp, synthetic construct
  source 1..75: mol_type = other DNA
gtcaccaccaaagattgtcagggtaacgtcgcgggtaatattccatttattatcaagcgtaaagatgcccaaaac

SEQ ID NO: 334533 - DNA, 75 bp, synthetic construct
  source 1..75: mol_type = other DNA
ctgaccagaaagtgacgctgaatatcgcgcccgcgcagggcgatttaatttcggtgagcgccagtggttataacg

SEQ ID NO: 334534 - DNA, 75 bp, synthetic construct
  source 1..75: mol_type = other DNA
aaatcattatgcttctgggcatgttggcagcttttatgctgtctgactttgcacgggcaggggcggaatggcaga

SEQ ID NO: 334535 - DNA, 75 bp, synthetic construct
  source 1..75: mol_type = other DNA
tggcatgtcatgaggcggacttcaaaacctcgttaccccattgaagtggtcagcatcccgctggcagctccatta

SEQ ID NO: 334536 - DNA, 75 bp, synthetic construct
  source 1..75: mol_type = other DNA
agtcgtatcaaaagatacgcgcgtaccgcgaaaactggtaaagcaacgcgccagggtgaagcgtgcgacggtcaa

SEQ ID NO: 334537 - DNA, 75 bp, synthetic construct
  source 1..75: mol_type = other DNA
ttcttatggaattttcgttagtagcttgttttttcgtaaaaagcgtcaattgccgcatcactatattgcacttat

SEQ ID NO: 334538 - DNA, 75 bp, synthetic construct
  source 1..75: mol_type = other DNA
tttttaccgcacattgaagacggcactatcacttttatcggcgcgacaactgaaaacccgtcgtttgagctaaac

SEQ ID NO: 334539 - DNA, 75 bp, synthetic construct
  source 1..75: mol_type = other DNA
aatcgtaatgccggccgccgtactattctgtttgtcgatgaagtacaccgcttcaataaaagtcaacaggatgct

SEQ ID NO: 334540 - DNA, 75 bp, synthetic construct
  source 1..75: mol_type = other DNA
tactggtatgcgcgaattattactgccggtggcgatccgttatatgtcgcgcgtcgctgtctggcgatagcgtcg

SEQ ID NO: 334541 - DNA, 75 bp, synthetic construct
  source 1..75: mol_type = other DNA
gcacgctgcttatcagcatcgtgttaattgtactgaccatcgtgaagttcaaattccacccgtttctggcgctgt

SEQ ID NO: 334542 - DNA, 75 bp, synthetic construct
  source 1..75: mol_type = other DNA
gacttcaaaactttagttgataactatttacctaaaccagctattgataaagcatcaatcaagatggcagagttg

SEQ ID NO: 334543 - DNA, 75 bp, synthetic construct
  source 1..75: mol_type = other DNA
gtggattaatgatttaaaagtatgtaaaagcgaaatagatgaattttccactcaggctgcaaaagctgcaggtcg

SEQ ID NO: 334544 - DNA, 75 bp, synthetic construct
  source 1..75: mol_type = other DNA
cccaggccgttgcaccgcataatctctactacgcaccggacccttcctcacaaatcgcctgttccattggcggca

SEQ ID NO: 334545 - DNA, 75 bp, synthetic construct
  source 1..75: mol_type = other DNA
tacagctcggtgcaaacaggtatggcggaactcattcctgtcgctcaacagtggcaagcggaagaaccagaaagc

SEQ ID NO: 334546 - DNA, 75 bp, synthetic construct
  source 1..75: mol_type = other DNA
atgaagatgtcgatgagccaacacctgaaaaccatgaagaaataaatgatgaggatgaaaaaccacagagcatta

SEQ ID NO: 334547 - DNA, 75 bp, synthetic construct
  source 1..75: mol_type = other DNA
aaaatgatcgttttcagccctccgcctggcagaaatttattcagcaattaaatacctggaacatggaggatgtcg

SEQ ID NO: 334548 - DNA, 75 bp, synthetic construct
  source 1..75: mol_type = other DNA
caccctgaccggtaaagacggcggcaaaatggctggcacggcggatatcgaaattcgcgtaccgcactttggtta

SEQ ID NO: 334549 - DNA, 75 bp, synthetic construct
  source 1..75: mol_type = other DNA
cggtcgctaccgtgaaaaccgtccgggctacccggcgattgccatttctgacgttagtcatatttcctgcgtcgg

SEQ ID NO: 334550 - DNA, 75 bp, synthetic construct
  source 1..75: mol_type = other DNA
aaattcgcgtaccgcactttggttatgccgaccgcattcaggagatccacattaaagtgatccatatcctgatcc

SEQ ID NO: 334551 - DNA, 75 bp, synthetic construct
  source 1..75: mol_type = other DNA
ccgtgtaactctgactatggcaaaaaatggcggaattaacttcctgaccggtaacacgattgatgccggtgactc

SEQ ID NO: 334552 - DNA, 75 bp, synthetic construct
  source 1..75: mol_type = other DNA
taatgaccccggtattacatctgcctgttgctggagccacgcaaggcgcggtttcgcaaatctgtataaggccag

SEQ ID NO: 334553 - DNA, 75 bp, synthetic construct
  source 1..75: mol_type = other DNA
cctgtgatccagaacaactaattaccatggtgcaaaaagtcatggctgagaatgcagagcttcagaaccgtatcc

SEQ ID NO: 334554 - DNA, 75 bp, synthetic construct
  source 1..75: mol_type = other DNA
ctggcagcgattcattcagcaattaaattattgctcgatggaagagattgatgaattacgctggtcgctgtgcac

SEQ ID NO: 334555 - DNA, 75 bp, synthetic construct
  source 1..75: mol_type = other DNA
cggcgtatgaagcacagcgtgaatttggtctggacctgggttccctacagttccgcaccctgaaggaatacctgt

SEQ ID NO: 334556 - DNA, 75 bp, synthetic construct
  source 1..75: mol_type = other DNA
cgcaattgagacggaaatcaatattgaagccgctcctgagctgatcccgctgatcaaccacgaaatgaagaaata

SEQ ID NO: 334557 - DNA, 75 bp, synthetic construct
  source 1..75: mol_type = other DNA
ccatgcactttgccgaagagttgaccggtcgctaccgtgaaaatcgtccgggctacccggcgattgccatttctg

SEQ ID NO: 334558 - DNA, 75 bp, synthetic construct
  source 1..75: mol_type = other DNA
ctgtatatctgtcagatgatgaaatagagataattgaaagttataaaaataaatatcagaaagaaaatgggattc

SEQ ID NO: 334559 - DNA, 75 bp, synthetic construct
  source 1..75: mol_type = other DNA
ctgaagcaatggcagctcgccttgatagcctggcgtgtcatatcacatcccgccaactaaaccacgtcgaagcgg

SEQ ID NO: 334560 - DNA, 75 bp, synthetic construct
  source 1..75: mol_type = other DNA
atgaatatcaaacagccacaatacaccttctccgcacttgccctggcggtcgtcgtcggactgagcggaccggct

SEQ ID NO: 334561 - DNA, 75 bp, synthetic construct
  source 1..75: mol_type = other DNA
tttccactgcgtgctggtatatctgcgtcacgcggaagatcccactccgctggtatgccacggtagctggccggg

SEQ ID NO: 334562 - DNA, 75 bp, synthetic construct
  source 1..75: mol_type = other DNA
ctaaaaccggaccggatgatgcaggtcttaatcttttactgacagaggcccgtcttgaagaatgccgggcaaggg

SEQ ID NO: 334563 - DNA, 75 bp, synthetic construct
  source 1..75: mol_type = other DNA
atgcgtaatattgaaaccatcacgactaaaaccggaccggataatgcagggcttaatattttactgacagaggct

SEQ ID NO: 334564 - DNA, 75 bp, synthetic construct
  source 1..75: mol_type = other DNA
aactgaacgaagcggcggaaacgctggctaactttttaaaagatgacgccaatattcacgccattcagcgagcgg

SEQ ID NO: 334565 - DNA, 75 bp, synthetic construct
  source 1..75: mol_type = other DNA
cctgctggtgcgcgtcgcgattggcggacgaatctcactcatggtcggtgtcgctgcggcgctggtggcagtggt

SEQ ID NO: 334566 - DNA, 75 bp, synthetic construct
  source 1..75: mol_type = other DNA
ctctccatggttattgttgttcccagcgggattcctcgtggtgacgctgttttgtttcaacttttatcggcgatg

SEQ ID NO: 334567 - DNA, 75 bp, synthetic construct
  source 1..75: mol_type = other DNA
tgccgaccgcattcaggaaattcacattaaagtgatccatatcctgatccagttaattgaaaaagagatggttaa

SEQ ID NO: 334568 - DNA, 75 bp, synthetic construct
  source 1..75: mol_type = other DNA
gatctccacgtctggtaactctgcaaacgtgatcaaagcgatcgcggcggcgcgtgagaagggaatgaaagtgat

SEQ ID NO: 334569 - DNA, 75 bp, synthetic construct
  source 1..75: mol_type = other DNA
aatattcacgccattcagcgagcggcggtcctgttagcagacagctttaaagccggtggcaaggtgctttcctgc

SEQ ID NO: 334570 - DNA, 75 bp, synthetic construct
  source 1..75: mol_type = other DNA
ggaaggcattgcccgtttatcgcagcaatatgatttacgcgtcgccaacgtctttcatgccggagacggcaacat

SEQ ID NO: 334571 - DNA, 75 bp, synthetic construct
  source 1..75: mol_type = other DNA
cgcgggttctgttagccagctttgactcggtagaaaaagccggactcgccgtcggtgacatcatcgccaatggca

SEQ ID NO: 334572 - DNA, 75 bp, synthetic construct
  source 1..75: mol_type = other DNA
gaaaaaaacgttccaggtggacacggcatatgtgccgtatctgacccgtccgggccaggttcgttacaagctggt

SEQ ID NO: 334573 - DNA, 75 bp, synthetic construct
  source 1..75: mol_type = other DNA
gtacataacttgctgaaaattgaagtgcaaacgctggagggcgaggtgctgatgctgggatcggatgcgctggac

SEQ ID NO: 334574 - DNA, 75 bp, synthetic construct
  source 1..75: mol_type = other DNA
ctattacgcgccggatccttcctcacaaatcgcctgttccattggcggcaatgtggcggaaaatgccggtggcgt

SEQ ID NO: 334575 - DNA, 75 bp, synthetic construct
  source 1..75: mol_type = other DNA
ttatccccggcgggctggagatgatggataacctgtcgatccgcgcggcggaagattttattcatgccggttatc

SEQ ID NO: 334576 - DNA, 75 bp, synthetic construct
  source 1..75: mol_type = other DNA
ggcagtgcgcaggggacggacagccagttcacctggagccgtttctacatgtaccgcgccatcccgcgctggcgc

SEQ ID NO: 334577 - DNA, 75 bp, synthetic construct
  source 1..75: mol_type = other DNA
cacatactggaataacggacaatgtgcggatttccgacagttatccggagtggagatacgcccgaatccggcaga

SEQ ID NO: 334578 - DNA, 75 bp, synthetic construct
  source 1..75: mol_type = other DNA
gggactgcaggtgccaactttggtgcctggcgtctgcgtgcggattatcaggggaacctgaatcactcttccggc

SEQ ID NO: 334579 - DNA, 75 bp, synthetic construct
  source 1..75: mol_type = other DNA
tcaggatatttcaccgtcggcatttcagatagcattccttgagccaccattttctgcttcagacaaagagaagct

SEQ ID NO: 334580 - DNA, 75 bp, synthetic construct
  source 1..75: mol_type = other DNA
cctgaatcacaccaccggcagcgggcagggaacggacagtcagttcacctggagccgtttctacatgtaccgcgc

SEQ ID NO: 334581 - DNA, 75 bp, synthetic construct
  source 1..75: mol_type = other DNA
gaccaggggatttcaccgtcggcatttccggtaacgtttctggagccgccggcttccgacacagacggaaagaag

SEQ ID NO: 334582 - DNA, 75 bp, synthetic construct
  source 1..75: mol_type = other DNA
cggattactactgcatggatggcaccatcccgcgtcgcgccctgcctggcgtactggaaggcattgcccgtttat

SEQ ID NO: 334583 - DNA, 75 bp, synthetic construct
  source 1..75: mol_type = other DNA
gcctgaccgatgcggacagcatggcctcatcactgaagctgctgcgcgaagcgatgcacctgaacccgaacgcag

SEQ ID NO: 334584 - DNA, 75 bp, synthetic construct
  source 1..75: mol_type = other DNA
gaaaaccgtacgtaagtcgcgcgaggctaaagctgcgaaaccggcagcaaaagcccgcgcaccacgtaaaacggc

SEQ ID NO: 334585 - DNA, 75 bp, synthetic construct
  source 1..75: mol_type = other DNA
gaacgaacaagttatcgacggctgttgctggcgctgcgataccaaagttgaacgtaaagagatcccgcagtggtt

SEQ ID NO: 334586 - DNA, 75 bp, synthetic construct
  source 1..75: mol_type = other DNA
cccgattccggcacgcaagggcgacaccttccacgtcgattacggcaacatgggctccattagctgccgctttgt

SEQ ID NO: 334587 - DNA, 75 bp, synthetic construct
  source 1..75: mol_type = other DNA
atcatccggcaaacggcgtggcctggctggcgaacaaactcgcaccgtatgacgtacaactggaagccgggcaaa

SEQ ID NO: 334588 - DNA, 75 bp, synthetic construct
  source 1..75: mol_type = other DNA
agcgagccggattacggtgccctgctggatgacatgttcttccacgatggcagcgatatcccgaccgatcgcttt

SEQ ID NO: 334589 - DNA, 75 bp, synthetic construct
  source 1..75: mol_type = other DNA
gctgccggtgatcctgccggaagatgtggtgatggacggcattaccagcccgattaaagcagatccggagtgggc

SEQ ID NO: 334590 - DNA, 75 bp, synthetic construct
  source 1..75: mol_type = other DNA
aatgccgaccccggacgaccagctgccggtgatcctgccggaagatgtggtaatggacggcattaccagcccgat

SEQ ID NO: 334591 - DNA, 75 bp, synthetic construct
  source 1..75: mol_type = other DNA
tccgcagccgcaccagaagacgccagcgcacagcagacgcaggacgaaagcagcaaaagtaaaaagacaacgcgg

SEQ ID NO: 334592 - DNA, 75 bp, synthetic construct
  source 1..75: mol_type = other DNA
gcaggtatggtgaactctgacgaaccagcgaaacagttgctgtgtcagggtatggtgctggcagatgccttctac

SEQ ID NO: 334593 - DNA, 75 bp, synthetic construct
  source 1..75: mol_type = other DNA
ctggtggtggtgcaggttaacggtaaagtccgtgccaaaatcaccgttccggtagatgcaacggaagaacaggtt

SEQ ID NO: 334594 - DNA, 75 bp, synthetic construct
  source 1..75: mol_type = other DNA
aggtgatgttgcggcactgaacgttgatgcgctgactgaagatcagaaagcgctgcgtcgcgatgtgcataaaac

SEQ ID NO: 334595 - DNA, 75 bp, synthetic construct
  source 1..75: mol_type = other DNA
agttacgtactggaatgacggacagtgtgcagacttcagccagttgccgggagtggaggtacgcccgaatccggc

SEQ ID NO: 334596 - DNA, 75 bp, synthetic construct
  source 1..75: mol_type = other DNA
atgcagtacatcggcaaagctctgaaagagtttcgtgacagcgggaaaccggtttatgccgttggcgagaactac

SEQ ID NO: 334597 - DNA, 75 bp, synthetic construct
  source 1..75: mol_type = other DNA
cgtttttgcctgacctgcgccaacgtgcgttaaatcctgcaaaaatgtggccgatatgctgtcggccacactcct

SEQ ID NO: 334598 - DNA, 75 bp, synthetic construct
  source 1..75: mol_type = other DNA
agagcgcctcgaaagggcagaacgccaaatgatggagttggctgcgaaatggatgggcatcgaattggatgaaga

SEQ ID NO: 334599 - DNA, 75 bp, synthetic construct
  source 1..75: mol_type = other DNA
aaaaatggaatgttaggctaggattccatggaaagagtaaacacttcggatgctttgatgatctggagttagcgg

SEQ ID NO: 334600 - DNA, 75 bp, synthetic construct
  source 1..75: mol_type = other DNA
aaagaaaccgccagtcgtggcgcgttgctgctcgatatctccggcgtgatcgtcgataagcctgacagttcgcag

SEQ ID NO: 334601 - DNA, 75 bp, synthetic construct
  source 1..75: mol_type = other DNA
atggtgcaattatggatggcgaggaaactcaggggaatgtaggcggtgataccactgcggcacaaatccgcgatg

SEQ ID NO: 334602 - DNA, 75 bp, synthetic construct
  source 1..75: mol_type = other DNA
tcctttttttggaggagcacaggagacaacaaatgttagattgagtgacgaggcttacagaacactcatattttg

SEQ ID NO: 334603 - DNA, 75 bp, synthetic construct
  source 1..75: mol_type = other DNA
gtaacacctgttccgagtggtgtactcgtaggaataaaccaagtggtaagtccttactttggattttcatcagat

SEQ ID NO: 334604 - DNA, 75 bp, synthetic construct
  source 1..75: mol_type = other DNA
ttgagttctcacttgctccctacgaagaatcgattttaacaaattacgatgtgactcctgtaccaagtggagttc

SEQ ID NO: 334605 - DNA, 75 bp, synthetic construct
  source 1..75: mol_type = other DNA
ggcgatcaggagttcaaagagcgcctggaacgcgcttatcgcttcaaccatacgcgcgaagtggtaaacctcatc

SEQ ID NO: 334606 - DNA, 75 bp, synthetic construct
  source 1..75: mol_type = other DNA
tcaggaataccaacgttatcgtctgtggacacaaaacgagtggtatctgttccgtgaggaagtgaagaagggcgc

SEQ ID NO: 334607 - DNA, 75 bp, synthetic construct
  source 1..75: mol_type = other DNA
aggtaaatattcgaaaaattattagtccttatttcggtttttcatctgacgcctacccgtttaatgatggcacat

SEQ ID NO: 334608 - DNA, 75 bp, synthetic construct
  source 1..75: mol_type = other DNA
tatgcgctttatgctgggattctcggaagcgccatcattcccggcgaacgcccgtattgtcgccgcctggttccc

SEQ ID NO: 334609 - DNA, 75 bp, synthetic construct
  source 1..75: mol_type = other DNA
acacagtctttagctgagctccaggatgagggatatcaacatggtaagtctttaagagttagctattccaaaaga

SEQ ID NO: 334610 - DNA, 75 bp, synthetic construct
  source 1..75: mol_type = other DNA
atgtcttactaaagatattgtcgaaaaaattgcattaaaacaaaaggtaattgatgaccttaaatggtgggataa

SEQ ID NO: 334611 - DNA, 75 bp, synthetic construct
  source 1..75: mol_type = other DNA
tttcagggcgttctcgcggatatgagcacacgactgaaggtccggtatttatggccggggaagcatcctggggta

SEQ ID NO: 334612 - DNA, 75 bp, synthetic construct
  source 1..75: mol_type = other DNA
gcatttacggtgacatttctggaaccgccggtttccggcacagacgggaagaagccgttaccacaggcctgtctg

SEQ ID NO: 334613 - DNA, 75 bp, synthetic construct
  source 1..75: mol_type = other DNA
gttcgtggaactatacaggagtaagtctggaaagtgatgacagaatgttaccaccaaaacttcgtgggtatgcac

SEQ ID NO: 334614 - DNA, 75 bp, synthetic construct
  source 1..75: mol_type = other DNA
taacagactaactcaaggaacaacggatagatttgtatggaatagactgtatttatatagagcaattccttcact

SEQ ID NO: 334615 - DNA, 75 bp, synthetic construct
  source 1..75: mol_type = other DNA
catccgttaacctgcagtacagccatcagacatactgggatcagaaaatgtctgattattacatggtgtcagtga

SEQ ID NO: 334616 - DNA, 75 bp, synthetic construct
  source 1..75: mol_type = other DNA
tgcactccttcaatgcagcactggttttcgtgggatgttcagcgctgatggcgatggtctgctacctcttcgtag

SEQ ID NO: 334617 - DNA, 75 bp, synthetic construct
  source 1..75: mol_type = other DNA
ctggccagtgatttctgacaccgcgccgaaagagattgttggcctctgcggcggcgtctttaacgtctttggcaa

SEQ ID NO: 334618 - DNA, 75 bp, synthetic construct
  source 1..75: mol_type = other DNA
ccagtacactcgataccgtcgtgttcgataaaaccgggacgctgaccgaagggaagccgcaggttgtcgcagtga

SEQ ID NO: 334619 - DNA, 75 bp, synthetic construct
  source 1..75: mol_type = other DNA
cgtcattcacaactgatggcatttgccggaacgcatccggagcgtggtgtgacgggtgtaattttgagtgagtat

SEQ ID NO: 334620 - DNA, 75 bp, synthetic construct
  source 1..75: mol_type = other DNA
attacaggaatacaacttctgtcgatttgacgaaattaccagatgatatggaggccactcgttctgtcgtcgagt

SEQ ID NO: 334621 - DNA, 75 bp, synthetic construct
  source 1..75: mol_type = other DNA
atccaaaggacgtgttactgaggctgatattcatgtcgccacattgctcatggatcggatgaatttacacggcgc

SEQ ID NO: 334622 - DNA, 75 bp, synthetic construct
  source 1..75: mol_type = other DNA
atgcagtattggggaaaaatcattggcgtggccgtggccttactgatgggcggcggcttttggggcgttgtatta

SEQ ID NO: 334623 - DNA, 75 bp, synthetic construct
  source 1..75: mol_type = other DNA
aaggtcttgaaatgaccgttgcgctacgtgaaacagaggctgggaaaggtgtacctggaaattttcgtgcgctag

SEQ ID NO: 334624 - DNA, 75 bp, synthetic construct
  source 1..75: mol_type = other DNA
gccgccccgaagggagcggctggagctggaaggattttgcctgggatatcgccggtgcaagcaccggctataccg

SEQ ID NO: 334625 - DNA, 75 bp, synthetic construct
  source 1..75: mol_type = other DNA
tcgtccaccagcaaaacgaagattttctcaatcaactacaccatgctcaacattggctggaccatcggtccgccg

SEQ ID NO: 334626 - DNA, 75 bp, synthetic construct
  source 1..75: mol_type = other DNA
gctggcttataatacactcagaccatagagcatatggtgaatattatcgcaatgaatataatcttgcatggattt

SEQ ID NO: 334627 - DNA, 75 bp, synthetic construct
  source 1..75: mol_type = other DNA
atgagccagaatgctacggttaatgttgaggtcaaattaggcgtcaataaattccatgttgatgagggacatccg

SEQ ID NO: 334628 - DNA, 75 bp, synthetic construct
  source 1..75: mol_type = other DNA
atcagacatacagacacagacgaaatactcttccgtctgagtaaacaccatgaaccgccccggaaatactggaga

SEQ ID NO: 334629 - DNA, 75 bp, synthetic construct
  source 1..75: mol_type = other DNA
gatgcgtaatcaaatgagtaaaataatcagacatacagacacagacgaaatactctcgcgtctgagtaaacacca

SEQ ID NO: 334630 - DNA, 75 bp, synthetic construct
  source 1..75: mol_type = other DNA
gcatcatcaagctcacctaagcttattataccgcagtctggtgattcatcttcgacgacaagtaatatcggtatg

SEQ ID NO: 334631 - DNA, 75 bp, synthetic construct
  source 1..75: mol_type = other DNA
aaaagcgagatccgctggtgaccacttcacgtggcactggtgagcttatcttacaggcgctggagagcggcgcga

SEQ ID NO: 334632 - DNA, 75 bp, synthetic construct
  source 1..75: mol_type = other DNA
gtgcggcacctgtcgggtgttgtgcggtaacactattctcgaacagtggaaatatcccgcaggtaccttcggtat

SEQ ID NO: 334633 - DNA, 75 bp, synthetic construct
  source 1..75: mol_type = other DNA
ttgcgtattctttttgtctgttcgctattgttactttctgaatgcagccatatggataacgatagctggagtggg

SEQ ID NO: 334634 - DNA, 75 bp, synthetic construct
  source 1..75: mol_type = other DNA
agaattcagccgctaccacaacaaatgtaaatatgaacgttgcccgctcttactgggaaggtaatgcttatgctt

SEQ ID NO: 334635 - DNA, 75 bp, synthetic construct
  source 1..75: mol_type = other DNA
ccggcgaatgattttgtccgccagttttttggacgtagtgaactgggtgtgcgcctgctttcgttacgtagtgtg

SEQ ID NO: 334636 - DNA, 75 bp, synthetic construct
  source 1..75: mol_type = other DNA
aagtgctgccggtggtgaacacgcagggcgagccttgcggcacgctgcattttcaggatctgctggtggaggcgt

SEQ ID NO: 334637 - DNA, 75 bp, synthetic construct
  source 1..75: mol_type = other DNA
gcatgtcgatggacaatgtcgtcgtgacgctggatcgacacggtaatacctctgccgcttctgtgccttgtgcac

SEQ ID NO: 334638 - DNA, 75 bp, synthetic construct
  source 1..75: mol_type = other DNA
tctgctgcttctgtgccttgtgcacttgatgaagcggtacgcgatgggcgtattaagcctggtcagttggtcctg

SEQ ID NO: 334639 - DNA, 75 bp, synthetic construct
  source 1..75: mol_type = other DNA
ccaccatcacagctcaaggtgaaggcacctatgaccggactgcaatggtcatttcttcaactggtgatgttgtta

SEQ ID NO: 334640 - DNA, 75 bp, synthetic construct
  source 1..75: mol_type = other DNA
gcagagatcgactttgttacagaccagttgggttcccagttaacgctgaaagcgcctaacgccaaaatgcgtaaa

SEQ ID NO: 334641 - DNA, 75 bp, synthetic construct
  source 1..75: mol_type = other DNA
tgaaagaagggatcgagaagcagttgctgaacgaattcccggagctgaaaggtgtgcgcgatctcaccgaacacc

SEQ ID NO: 334642 - DNA, 75 bp, synthetic construct
  source 1..75: mol_type = other DNA
tgtatttctgcacggcggtgtgtgtcttatatctggtgagtggtggttataaaatcatccgcaactacatccgta

SEQ ID NO: 334643 - DNA, 75 bp, synthetic construct
  source 1..75: mol_type = other DNA
agctttccggtggtcagcagcaacgtgtgggagtggcgcgcgcactggctgccgatccgcaagtcttactgatgg

SEQ ID NO: 334644 - DNA, 75 bp, synthetic construct
  source 1..75: mol_type = other DNA
gtggctgacgatgccccgctaatggagcgcgtggagtatatgctgcaatcgcagattaacccgcagcttgccggt

SEQ ID NO: 334645 - DNA, 75 bp, synthetic construct
  source 1..75: mol_type = other DNA
agttaggttctcaattaacactgaaagccccaaatgccaaaatgcgtaaagtagcagacgacgcaccgctaatgg

SEQ ID NO: 334646 - DNA, 75 bp, synthetic construct
  source 1..75: mol_type = other DNA
cgtcgctggctgcgtcagcttcacgaagagttgaaatttaccagtgtgttcgtcactcacgatcaggaagaggcg

SEQ ID NO: 334647 - DNA, 75 bp, synthetic construct
  source 1..75: mol_type = other DNA
tacgagctgctgctggaaggtgtggtgctgtttattatcctcaacctgtatattcgtaaaccgcgcccaatggga

SEQ ID NO: 334648 - DNA, 75 bp, synthetic construct
  source 1..75: mol_type = other DNA
gaattgtgggggcgtgttgatccgaacttcccgtttgccatgctgttcccaggctcccgtactgaagacattctg

SEQ ID NO: 334649 - DNA, 75 bp, synthetic construct
  source 1..75: mol_type = other DNA
ttccggctggctgaaacgacgccttttttattatacaacgccacttttttcttcattactggctcttcataaggg

SEQ ID NO: 334650 - DNA, 75 bp, synthetic construct
  source 1..75: mol_type = other DNA
gtgttcgcgtttcctatgagtgtgggtcgccagtggggcatgggcttcttgctgcaaagcaatgataaacagccc

SEQ ID NO: 334651 - DNA, 75 bp, synthetic construct
  source 1..75: mol_type = other DNA
agagcaaaaaaccggaaatcaccgtgccggtagtcaccgacgcgcaaaagggcattatcattcattacgtcccgg

SEQ ID NO: 334652 - DNA, 75 bp, synthetic construct
  source 1..75: mol_type = other DNA
atgccccgcagcacctggttcaaagcattattgttgttagttgccctttgggcacccttaagtcaggcagaaacg

SEQ ID NO: 334653 - DNA, 75 bp, synthetic construct
  source 1..75: mol_type = other DNA
agttctgcgccatacctcacttctaccggcacagaatatgggcacagcacgtgctttacctgggcaacatgaggc

SEQ ID NO: 334654 - DNA, 75 bp, synthetic construct
  source 1..75: mol_type = other DNA
ttttatattatcgcaaaacggcaattgcttgaagttaatgatcctgcattttgggatgatattaaaaaattgaat

SEQ ID NO: 334655 - DNA, 75 bp, synthetic construct
  source 1..75: mol_type = other DNA
gaaaattgggaagatatgcgcgggcagttgatgggatatccgcacggtgccagatcatctctatttgttaatcag

SEQ ID NO: 334656 - DNA, 75 bp, synthetic construct
  source 1..75: mol_type = other DNA
atgttgaatgcaaggcatcttcccgtactgatgtatcatcatgtcagtcgttgtccggggcttgtgacactctca

SEQ ID NO: 334657 - DNA, 75 bp, synthetic construct
  source 1..75: mol_type = other DNA
aactatgacccttctcgctttgaaggcgataaagtcccaatgatgacgctactgtcagatttgcttctcgcctac

SEQ ID NO: 334658 - DNA, 75 bp, synthetic construct
  source 1..75: mol_type = other DNA
ctggagtctcttaaagaggtggcgttctatgccgttgctgcactggattcgttactggattatcaagactatccg

SEQ ID NO: 334659 - DNA, 75 bp, synthetic construct
  source 1..75: mol_type = other DNA
tccggcagccagaacgggaaagccgaatatgtacatcctgaaggctggaaagtgtgggagaacgtcagcgcgttg

SEQ ID NO: 334660 - DNA, 75 bp, synthetic construct
  source 1..75: mol_type = other DNA
gccgtaccagcctcgattcgccgctgccggtacaggtactggaagccagcccgaaaggtcactacacccaattag

SEQ ID NO: 334661 - DNA, 75 bp, synthetic construct
  source 1..75: mol_type = other DNA
gtcacaaatgatggaaacgataattacacattaagaatgcccaatatggggctggataaaattgttaatgcagca

SEQ ID NO: 334662 - DNA, 75 bp, synthetic construct
  source 1..75: mol_type = other DNA
gggaatgacacctacacactaacattccctgggactattggccttgacaaaattgcaaataaaactactcaggca

SEQ ID NO: 334663 - DNA, 75 bp, synthetic construct
  source 1..75: mol_type = other DNA
atgagcattgagattgccaggattaagaagtcatttggtcgcacccaggtgttgaacgatatctcactggatatt

SEQ ID NO: 334664 - DNA, 75 bp, synthetic construct
  source 1..75: mol_type = other DNA
cgctgttccgccatatgacggtattcgacaatatcgcttttggcctgacggtgctgccgcgtcgcgagcgcccga

SEQ ID NO: 334665 - DNA, 75 bp, synthetic construct
  source 1..75: mol_type = other DNA
gacaaaattgctggagatggtccagcttgcccatctggcggatcgttatccggcgcagctttccggcggccagaa

SEQ ID NO: 334666 - DNA, 75 bp, synthetic construct
  source 1..75: mol_type = other DNA
aaccgggtaatccggtgcagcaggcgctgaaaaattttcatgagaaatactactcagccaatctgatgaaggctg

SEQ ID NO: 334667 - DNA, 75 bp, synthetic construct
  source 1..75: mol_type = other DNA
agaccgcctggccgatgctattgctgaacccttgctcgacaagaaatacgccgaacgtgagcgtaatgcggtgaa

SEQ ID NO: 334668 - DNA, 75 bp, synthetic construct
  source 1..75: mol_type = other DNA
acaatccgtcatctttgaaaaagccggtaacagcaccgactccgcactggcagcggtatttgtaccgactggcta

SEQ ID NO: 334669 - DNA, 75 bp, synthetic construct
  source 1..75: mol_type = other DNA
cgctgaattaaccatggcgcgcacgcgtgacgggatgcgcatggcgcaggtcagcgcagaaaccattaacccggc

SEQ ID NO: 334670 - DNA, 75 bp, synthetic construct
  source 1..75: mol_type = other DNA
gcaaaagcagggattagttgagggcattagcgccaactccgatcctatcgtcaacggcaacagcggcgtattagc

SEQ ID NO: 334671 - DNA, 75 bp, synthetic construct
  source 1..75: mol_type = other DNA
ctcaatctgttacgtgaaaaagggatcgataaacaatacttcgatgaactggcgaatgtgctggatatcgacttc

SEQ ID NO: 334672 - DNA, 75 bp, synthetic construct
  source 1..75: mol_type = other DNA
ttgaagttgttctatcgtccaaaaggtttgccggaaagcaacctcgaggccatgaaacagttacgtttccagtgt

SEQ ID NO: 334673 - DNA, 75 bp, synthetic construct
  source 1..75: mol_type = other DNA
ggtgtcgcggcggtcattgattcatgtcagggatatgatatcaaagcgagttgtcacgccagcaggcaaagcctt

SEQ ID NO: 334674 - DNA, 75 bp, synthetic construct
  source 1..75: mol_type = other DNA
ccgagactctttgtttctgccagcgaaaaaggctggttccctttgtcattgttcgtctcgataccgttttacttc

SEQ ID NO: 334675 - DNA, 75 bp, synthetic construct
  source 1..75: mol_type = other DNA
tataaagatgaagagaagaaaaaatatacgccagcgacggtgaatcgtagcgtaagtacgaatgatcaagggtat

SEQ ID NO: 334676 - DNA, 75 bp, synthetic construct
  source 1..75: mol_type = other DNA
tgttctggaagggctaacggagaatcagaagaaggcatatcgtctggccgacaaccgtattccgctgaatgctgg

SEQ ID NO: 334677 - DNA, 75 bp, synthetic construct
  source 1..75: mol_type = other DNA
ttattgttaagtgctggtgttgacgtacaggacacgtatttagtttgtgaattggtcggttggggaaaaggtaag

SEQ ID NO: 334678 - DNA, 75 bp, synthetic construct
  source 1..75: mol_type = other DNA
ttctgatcgacggcgacaaagccatcgtcaacaacgacggtgacaacgccatcagcaacggcggcaccggcacac

SEQ ID NO: 334679 - DNA, 75 bp, synthetic construct
  source 1..75: mol_type = other DNA
aataacggtaacaccaccgttgatggtcagggctctacaggtaccgaaatcgcaggtaataacgctgtagtgaat

SEQ ID NO: 334680 - DNA, 75 bp, synthetic construct
  source 1..75: mol_type = other DNA
aggaaaaagagggctatgatccggcgttctctgcggcggttaatattgcctctgcacctattggcctgatgatcc

SEQ ID NO: 334681 - DNA, 75 bp, synthetic construct
  source 1..75: mol_type = other DNA
acggcgaccaggccatcgtcaataacgaaggcgagagcactatcaccaatggcggcaccggcactcagatcaacg

SEQ ID NO: 334682 - DNA, 75 bp, synthetic construct
  source 1..75: mol_type = other DNA
tccaactcctggcggagatgagataataccggacgacggtccggatgatactcctgcacctcccaaaccgattgc

SEQ ID NO: 334683 - DNA, 75 bp, synthetic construct
  source 1..75: mol_type = other DNA
tgatatcaccggcgacagcgcgacggtggacaacaaaggcggcatgaccgtcaccgatccggattccatcggtat

SEQ ID NO: 334684 - DNA, 75 bp, synthetic construct
  source 1..75: mol_type = other DNA
gccagtaactttggtcgttatgctggtgcaagtccatttactacctttaatggtcgttattatggtgatcataca

SEQ ID NO: 334685 - DNA, 75 bp, synthetic construct
  source 1..75: mol_type = other DNA
aaattcgcgctcgcgcctttcaaagcagagtttccgcgcccgcagcttttcccaactggcaaacgctggagctgc

SEQ ID NO: 334686 - DNA, 75 bp, synthetic construct
  source 1..75: mol_type = other DNA
tcaaaagggcagaaaaaacgcgtggcgctgttgctggcgctggcagaagaacgcgatattatcctgctggatgaa

SEQ ID NO: 334687 - DNA, 75 bp, synthetic construct
  source 1..75: mol_type = other DNA
gggcatcacttcgtttaccgactgcgtagtgaatttatcaagcggattctggatacccacgtcgagcgcattgaa

SEQ ID NO: 334688 - DNA, 75 bp, synthetic construct
  source 1..75: mol_type = other DNA
gctaccgctgatgcaggagatgggaaaaactattttcgccatcagccatgatgaccattactttatccacgccga

SEQ ID NO: 334689 - DNA, 75 bp, synthetic construct
  source 1..75: mol_type = other DNA
tcctgactggcaaacgctggagctacgtaacgtgacgtttagttatcaggacaacgcgttttccgttggcccact

SEQ ID NO: 334690 - DNA, 75 bp, synthetic construct
  source 1..75: mol_type = other DNA
gggcatcacttcgtttaccgactgcgtagcgaatttatcaagcggattctggatacccacgttgagcgtatcgaa

SEQ ID NO: 334691 - DNA, 75 bp, synthetic construct
  source 1..75: mol_type = other DNA
aactggcgcgacttaacgttgaacgtcatggggcgattcgcgtcggcaccgcacaagagcttgccactctacggc

SEQ ID NO: 334692 - DNA, 75 bp, synthetic construct
  source 1..75: mol_type = other DNA
ttacaggaaaccttccgcacttttcctgacagtgagtttttaatgcgtcagcaagggctggcatggttccggtac

SEQ ID NO: 334693 - DNA, 75 bp, synthetic construct
  source 1..75: mol_type = other DNA
agcagatagatgaactgaaaaaaatctatgctgttgattttttgtcagacctgcgagtattcttcatgattcgtc

SEQ ID NO: 334694 - DNA, 75 bp, synthetic construct
  source 1..75: mol_type = other DNA
tccaagggtacttctcgagcagatataactattgaaagggctggacgtattctttcgattattgaatgtaaatgg

SEQ ID NO: 334695 - DNA, 75 bp, synthetic construct
  source 1..75: mol_type = other DNA
tggaaaaacagagagaagtttcccccaccttagacgacttcagaagggaggtatctggtgaacttcctggccctc

SEQ ID NO: 334696 - DNA, 75 bp, synthetic construct
  source 1..75: mol_type = other DNA
atttgagcaggcgttgggttgtccggttttggatgagttccagctttatcaggaagcggaagaacgcagtaaacg

SEQ ID NO: 334697 - DNA, 75 bp, synthetic construct
  source 1..75: mol_type = other DNA
ccattctgtttgtggggtgcagcattggtaaggtcagtatcgacagggcaataaaaccattactgccgatgtttc

SEQ ID NO: 334698 - DNA, 75 bp, synthetic construct
  source 1..75: mol_type = other DNA
acgaacggcacgtatgacaactgtgaaaccgtgaatgtcagtaaaacggaaatcacgtcgcatgtctgtgagcgg

SEQ ID NO: 334699 - DNA, 75 bp, synthetic construct
  source 1..75: mol_type = other DNA
gtttgattcgaagctggcacagattgttcaggcacaggggcgtaaagggcagctgggtatcggttttggcagcgg

SEQ ID NO: 334700 - DNA, 75 bp, synthetic construct
  source 1..75: mol_type = other DNA
gtttgatacggatatgcaggtctcagcagggcagtcattccctgtggtgaaggcatcaaagacctttgatttttt

SEQ ID NO: 334701 - DNA, 75 bp, synthetic construct
  source 1..75: mol_type = other DNA
ggtatcggttttggcagcggaaagcatcctgactgtcggggcatcacggtggaagagctgcagtccctgaagttt

SEQ ID NO: 334702 - DNA, 75 bp, synthetic construct
  source 1..75: mol_type = other DNA
tggggccggattcatcaggcgtttgatacggatatgcaggtttcagccgggcagtcattcccggtgatgaagaca

SEQ ID NO: 334703 - DNA, 75 bp, synthetic construct
  source 1..75: mol_type = other DNA
accaccattccgtcagacagtgaactggctgaacgtgtgaaagagcaggttgcttcggcgctgcagcagtccgca

SEQ ID NO: 334704 - DNA, 75 bp, synthetic construct
  source 1..75: mol_type = other DNA
tcgaacagtctgcacacccagcgtctggccgtggattttaacctgtttgtgaatggccagtaccagacccgtaca

SEQ ID NO: 334705 - DNA, 75 bp, synthetic construct
  source 1..75: mol_type = other DNA
actggcccactgccgcagatattcccgtggcgagcgataacccagcgcactatgcggatgccattcgttataatg

SEQ ID NO: 334706 - DNA, 75 bp, synthetic construct
  source 1..75: mol_type = other DNA
atgactctgaggtgtctgttaaacccgtggcgattcagtgagcgcattctgaccgaccgtgaaaatggtgaaaaa

SEQ ID NO: 334707 - DNA, 75 bp, synthetic construct
  source 1..75: mol_type = other DNA
tttgaaagccagcatgatgttatgcctgcttttgaagcggggatgctggaccgtgattgtgtcgttgttgtccgt

SEQ ID NO: 334708 - DNA, 75 bp, synthetic construct
  source 1..75: mol_type = other DNA
tgtctgcggcggtggggctgtcccataacatgtttgatggtgctctgttcctcggtgtgtgcgacaagattgtcc

SEQ ID NO: 334709 - DNA, 75 bp, synthetic construct
  source 1..75: mol_type = other DNA
gccaacagtctgcacacctcgcgtctggctgtggattttaatctgtttgtgaatggcgaatataaaacccgcacg

SEQ ID NO: 334710 - DNA, 75 bp, synthetic construct
  source 1..75: mol_type = other DNA
tatcgagagttttaaccggacataccgaacaaaaatactcggtttttgtctgttcagaacgctggatgaaaagcg

SEQ ID NO: 334711 - DNA, 75 bp, synthetic construct
  source 1..75: mol_type = other DNA
aacctttgaataacatttatgcgtggattttagcttttattccaatttgcttcggcattccgaacgaagagtatg

SEQ ID NO: 334712 - DNA, 75 bp, synthetic construct
  source 1..75: mol_type = other DNA
cgccgaaatgtatgaaggtgacaattcaggacaaggtgacggacaagttctataaagcgacggctacgctggata

SEQ ID NO: 334713 - DNA, 75 bp, synthetic construct
  source 1..75: mol_type = other DNA
gctgacagaatggcattgtctgatgcagggtatgaaccaccggccatcctgtggggagtatttctccttccggtc

SEQ ID NO: 334714 - DNA, 75 bp, synthetic construct
  source 1..75: mol_type = other DNA
cagaggccaccggagccgccggatgatttaggcgctctgaaaaggtcagttaatcgcactgaaaaacaaatgggg

SEQ ID NO: 334715 - DNA, 75 bp, synthetic construct
  source 1..75: mol_type = other DNA
taaataatgcgcgaaatcaaaataaatttccaatcgatgtaaaagaaacggttataaaactacaagggcaaaaat

SEQ ID NO: 334716 - DNA, 75 bp, synthetic construct
  source 1..75: mol_type = other DNA
gaattgttcataaagaatatggtatatctttaaaatccgttcctgtatggttggctacagctaaaactccccttg

SEQ ID NO: 334717 - DNA, 75 bp, synthetic construct
  source 1..75: mol_type = other DNA
cgtggtgctccgcgtccgttacccgatactctggcgacaatgacgccgcaggcctataacagcattcaatatgac

SEQ ID NO: 334718 - DNA, 75 bp, synthetic construct
  source 1..75: mol_type = other DNA
gataaggatgtagatcttaccgcgaatattgtatccagcacttgtcaagtagaagtcaataataatggtattgtt

SEQ ID NO: 334719 - DNA, 75 bp, synthetic construct
  source 1..75: mol_type = other DNA
gtgatgcaatagctattaaatcagaagataaaaaacgccgtcgtcagaacgtaaagaaagcgagaatggttagaa

SEQ ID NO: 334720 - DNA, 75 bp, synthetic construct
  source 1..75: mol_type = other DNA
cgcaaatccatgattccgaccgtctttccatgtggcggggcaatggcgagtggatctgccgtccgctgaataatc

SEQ ID NO: 334721 - DNA, 75 bp, synthetic construct
  source 1..75: mol_type = other DNA
tggatttgtcgtccactgaataatccgcagaaattgcaattcaatgcctataccgacaataacccgaaaggattt

SEQ ID NO: 334722 - DNA, 75 bp, synthetic construct
  source 1..75: mol_type = other DNA
tccgacctcggactctaccgaaccggttgatatgcggatgtatctacgttgtcagggcgatgccatcagtgaaac

SEQ ID NO: 334723 - DNA, 75 bp, synthetic construct
  source 1..75: mol_type = other DNA
atgctgggggatttcttcagtcagggagtcgcgcagctcaatttattcgatgacaacgctccgcgccccgggagt

SEQ ID NO: 334724 - DNA, 75 bp, synthetic construct
  source 1..75: mol_type = other DNA
tcctggctgcaagcctggcacatccgcgacgaaacctattcggcggccttggccgagctggtcaaccaccagtat

SEQ ID NO: 334725 - DNA, 75 bp, synthetic construct
  source 1..75: mol_type = other DNA
tcttgctgatggcatcaatcttggcctgacgaaaatggcagaggcctgtcccggatgcactaaatcatcactcga

SEQ ID NO: 334726 - DNA, 75 bp, synthetic construct
  source 1..75: mol_type = other DNA
ttccgcagtgggcacctccctctcctacacgttcacccattttgtgatttatcgcattatcggtggactggcagt

SEQ ID NO: 334727 - DNA, 75 bp, synthetic construct
  source 1..75: mol_type = other DNA
ctcgcagctccgccgggaagcggaaagggggttggtattgttgttcctaatttattgcagtacccacattcggtt

SEQ ID NO: 334728 - DNA, 75 bp, synthetic construct
  source 1..75: mol_type = other DNA
aggcctttaatgttgccacaggaggttaatgaacttccatatcctgaagaactggtgtttatgcagccaacaaaa

SEQ ID NO: 334729 - DNA, 75 bp, synthetic construct
  source 1..75: mol_type = other DNA
gaagcagggcaaggcgatcaacgacaaggtgcgcctgtactccaggatcggccaggcgctgctggaagcgaagga

SEQ ID NO: 334730 - DNA, 75 bp, synthetic construct
  source 1..75: mol_type = other DNA
agaacaagcatcagcagcaattccaggcgtccggcaaggcgatcaacgccaaggtgcggctgttcggccgcatcg

SEQ ID NO: 334731 - DNA, 75 bp, synthetic construct
  source 1..75: mol_type = other DNA
caaccctggagaaagtctggcacgcgccggacaactttcgcttcatggacccgctgccaccgatgcatcgccggg

SEQ ID NO: 334732 - DNA, 75 bp, synthetic construct
  source 1..75: mol_type = other DNA
gtgataactcccactggtattgaccgacaatactatgaattttgtgcacttagtgagctgaaaggggcattacgt

SEQ ID NO: 334733 - DNA, 75 bp, synthetic construct
  source 1..75: mol_type = other DNA
attgccggaaggtattgatcgtaccattcatcaaaacaggttactgaaacttgcgcgagaagggcgaaagatgag

SEQ ID NO: 334734 - DNA, 75 bp, synthetic construct
  source 1..75: mol_type = other DNA
cgtttgcttgaatcatcagacaatcaaccttcccggctgacctggcttctgcaaccgccgggtaaaatcaacggt

SEQ ID NO: 334735 - DNA, 75 bp, synthetic construct
  source 1..75: mol_type = other DNA
tacaaagatatctaacgaggaacatgcacgacatttgctaacagatataaaaacctctctgcaaaatgaccggct

SEQ ID NO: 334736 - DNA, 75 bp, synthetic construct
  source 1..75: mol_type = other DNA
tggtgggcccgagagattcccgtggcgtcacccggtcatgtactggattgtgtgtgatacccggagggcgatgta

SEQ ID NO: 334737 - DNA, 75 bp, synthetic construct
  source 1..75: mol_type = other DNA
cccgtgagcaggtatcggcaggaatgcgccatgcccgcgccagtgaatcaccgttctggccttcgcctgggcaat

SEQ ID NO: 334738 - DNA, 75 bp, synthetic construct
  source 1..75: mol_type = other DNA
acatgtcagcagagaggcttgttgatgcccttttcaaacagctgaaacaactgtttccggcggcagtagtaacca

SEQ ID NO: 334739 - DNA, 75 bp, synthetic construct
  source 1..75: mol_type = other DNA
cgccagccgtcgctttgtttcggcagaccaactgccgctgatcgcgctggaaatcagtattaccccgctggacgc

SEQ ID NO: 334740 - DNA, 75 bp, synthetic construct
  source 1..75: mol_type = other DNA
gggcgaagtttcgggtgcatgcctaatgccgccaccctgggtggaataacaccggcgcagtggcttatggaggaa

SEQ ID NO: 334741 - DNA, 75 bp, synthetic construct
  source 1..75: mol_type = other DNA
atgccgccaccctgggtggaataacaccggcgcagtggcttatggaggaatacaggcggggaaaggaggcaggat

SEQ ID NO: 334742 - DNA, 75 bp, synthetic construct
  source 1..75: mol_type = other DNA
gaaagccagtgatccccgaaatgcgttttactggcgctttgtggagctgggaacgataaacatgcccgcgcatcc

SEQ ID NO: 334743 - DNA, 75 bp, synthetic construct
  source 1..75: mol_type = other DNA
ccggcgctggcggtagcgttaggtcattttctgcttggcctgctgtgcattgtcagccagcgcaatatcctgcgg

SEQ ID NO: 334744 - DNA, 75 bp, synthetic construct
  source 1..75: mol_type = other DNA
tggcattgctcgcggcattaattgtcctgctttgcgcatttgtcgttcagcccgtgaagctaccgatggctaccg

SEQ ID NO: 334745 - DNA, 75 bp, synthetic construct
  source 1..75: mol_type = other DNA
ccggattgaatgacatcgcaaaggatctggaggcgcttagccgtgctgaaaacaacaaggttctgcgtgatgcta

SEQ ID NO: 334746 - DNA, 75 bp, synthetic construct
  source 1..75: mol_type = other DNA
ccagttgctcaacgcttgattctgtcggaaacaaagcgcagccagaacataaagatcagatcatggtttatgcgt

SEQ ID NO: 334747 - DNA, 75 bp, synthetic construct
  source 1..75: mol_type = other DNA
atgtggtgatcctttcccggcgctcccgcgatggcgggatggaatccggtgtccatatccgtggtgttaatccgg

SEQ ID NO: 334748 - DNA, 75 bp, synthetic construct
  source 1..75: mol_type = other DNA
tgacgcgtgaagcgcagttagatattcagtcgcaatcacaaccgccgacagaagaacagctgcgggcgcaattag

SEQ ID NO: 334749 - DNA, 75 bp, synthetic construct
  source 1..75: mol_type = other DNA
aatagttacatgggagctaagttaatatatttgccaattaatgcaaacggcgtaagcagcatattttatgacatg

SEQ ID NO: 334750 - DNA, 75 bp, synthetic construct
  source 1..75: mol_type = other DNA
ctacccgtacccgcaagttacttctcaaccaacgcgaactggactcattgtacggtcgcgtcaatcgagaaggct

SEQ ID NO: 334751 - DNA, 75 bp, synthetic construct
  source 1..75: mol_type = other DNA
atcgaagaagagttcgaagcgggacttgccctgcaaggctgggaggttaaatccctgcgcgcaggaaaagccaat

SEQ ID NO: 334752 - DNA, 75 bp, synthetic construct
  source 1..75: mol_type = other DNA
acaagagtccttgagttgctggcataccgtcgccgttctcaacaacggagggagagcgcgaaaaatacttaccag

SEQ ID NO: 334753 - DNA, 75 bp, synthetic construct
  source 1..75: mol_type = other DNA
aaaccgcgaggtcgccgccccgtaacgggccataattccaggaaggacccgacgacaccagactatcagaacgat

SEQ ID NO: 334754 - DNA, 75 bp, synthetic construct
  source 1..75: mol_type = other DNA
atgacgagaatgactgaaaccgatctactaaaaataattcgctgcgttaccggagtctgccaggcaacaggcaaa

SEQ ID NO: 334755 - DNA, 75 bp, synthetic construct
  source 1..75: mol_type = other DNA
cactatgcccgcaaactcaccaacatgattcagcagatgaaatcgataagcgacaaggtgagcaaaacctacagt

SEQ ID NO: 334756 - DNA, 75 bp, synthetic construct
  source 1..75: mol_type = other DNA
gatgttcgtgcagatgatgttgaaaagcatgcgcgacgctttaccaaaagatggcctgttcagcagcgagcacac

SEQ ID NO: 334757 - DNA, 75 bp, synthetic construct
  source 1..75: mol_type = other DNA
tacggtcgcgtaaatcgtgaaggctataccgtagtggcgctctccctgtactggaaaaatgcctggtgcaaagta

SEQ ID NO: 334758 - DNA, 75 bp, synthetic construct
  source 1..75: mol_type = other DNA
aagagaatctgcgtccgatttgtgtggattcctgcccgcagcgcgcgctggattttgggccgatcgatgaactgc

SEQ ID NO: 334759 - DNA, 75 bp, synthetic construct
  source 1..75: mol_type = other DNA
tggtgacgggcttaaccattgatacggagaataatcaacaggttctgtttacccgccagccagatggcagtttta

SEQ ID NO: 334760 - DNA, 75 bp, synthetic construct
  source 1..75: mol_type = other DNA
ggtggctccggtcgcccctgaaccgatacaggaaggccagccggaagatcagccacaaacttcgcaaacgcaacc

SEQ ID NO: 334761 - DNA, 75 bp, synthetic construct
  source 1..75: mol_type = other DNA
tgagttgctggcataccgtcgccgttctcaacaacggagggagagcgcgaaaaatacttatcagtggaagaagcc

SEQ ID NO: 334762 - DNA, 75 bp, synthetic construct
  source 1..75: mol_type = other DNA
gtcatatcgtcgccgcgtggagatgtaccaggagaaagaaaaaattacttaccactggaagaagccggagcggtt

SEQ ID NO: 334763 - DNA, 75 bp, synthetic construct
  source 1..75: mol_type = other DNA
ctacaatcgccgcgttgaactgtatcgggagaaagaaaaaataacgtaccactggaagaagccggaatggctgcg

SEQ ID NO: 334764 - DNA, 75 bp, synthetic construct
  source 1..75: mol_type = other DNA
tacgcaccagggtactcgagttgttggcctaccgtcgccgcgtgcagatgtaccgggagagcgagaaaaagactt

SEQ ID NO: 334765 - DNA, 75 bp, synthetic construct
  source 1..75: mol_type = other DNA
acattcaaaacatgatttgttaatgatttttcatacaagcgggatgcatagtttattcttggatgaattgttttt

SEQ ID NO: 334766 - DNA, 75 bp, synthetic construct
  source 1..75: mol_type = other DNA
ggataaacagttttttgtcgatgttttttcaatccctgcttgcgttcgaaatactaatggagattttatcggcta

SEQ ID NO: 334767 - DNA, 75 bp, synthetic construct
  source 1..75: mol_type = other DNA
tgcaaaacaacataacgcagttcttgcaagcattagaaagtgttgatctttctcgtccaatgtttcctgttaggg

SEQ ID NO: 334768 - DNA, 75 bp, synthetic construct
  source 1..75: mol_type = other DNA
ttcttgaaatgctggcctaccgtcgccgcgtgcagacgtacagggaaaaagcaaaaattacgtaccactggaaga

SEQ ID NO: 334769 - DNA, 75 bp, synthetic construct
  source 1..75: mol_type = other DNA
ctacaatcgccgcgttgagatgtatcgggagaaagaaaaaataacgtaccactggaagaagccggagcggttgcg

SEQ ID NO: 334770 - DNA, 75 bp, synthetic construct
  source 1..75: mol_type = other DNA
ccagcaggctgacgaacagaccacgcagccggacagcgtgacagccgaaaactatgcgcgtgtggttgctgaggt

SEQ ID NO: 334771 - DNA, 75 bp, synthetic construct
  source 1..75: mol_type = other DNA
taatccgccgcgtcgtcggaatcagccagcagcatgacgaacaggccacacagccggacagcgtgaccgctgaaa

SEQ ID NO: 334772 - DNA, 75 bp, synthetic construct
  source 1..75: mol_type = other DNA
tgttccggatatcacaggagtcctggctgtgtacgccgaacgccgcaggaccgcagcggaccgtatgcttgactg

SEQ ID NO: 334773 - DNA, 75 bp, synthetic construct
  source 1..75: mol_type = other DNA
ttagtcagtgcatctcattcacaaatgtctaagcgctacggctttatttatgtggatcgtgatgataatggcgaa

SEQ ID NO: 334774 - DNA, 75 bp, synthetic construct
  source 1..75: mol_type = other DNA
acgatgaattcataatttatggcgctccatctaattacttacttgatacctgcaacatttacaacaaggctgcct

SEQ ID NO: 334775 - DNA, 75 bp, synthetic construct
  source 1..75: mol_type = other DNA
gatgattgtcgagctggacaataacctctctcactatgccgatgttattaaaaaagcgctgcatgttgatgtgaa

SEQ ID NO: 334776 - DNA, 75 bp, synthetic construct
  source 1..75: mol_type = other DNA
ccgccaatggtaaggagtgtaaagagaattactacctgatgccgggcaagtcgcgtcgttttacccgcgtggaca

SEQ ID NO: 334777 - DNA, 75 bp, synthetic construct
  source 1..75: mol_type = other DNA
aaagtttattctctagttttgttggaacagaaattaatgatgagagtgggcgtaagatatatacaatcccgccgt

SEQ ID NO: 334778 - DNA, 75 bp, synthetic construct
  source 1..75: mol_type = other DNA
gcgggtttactggaccgcgattgtgtcgttgttgtccgtcatcaggggccaaaagcgaacggaatgccagaatta

SEQ ID NO: 334779 - DNA, 75 bp, synthetic construct
  source 1..75: mol_type = other DNA
agaaagtggtggtgaacggtatcgttgcactgctggcgaccggtggttccactaaccacaccatgcacctggtgg

SEQ ID NO: 334780 - DNA, 75 bp, synthetic construct
  source 1..75: mol_type = other DNA
gagcacggcgacaccatcgcctttatgcacagcgtacaggacggcgcggcgagcaaaagctacggcctggcggtt

SEQ ID NO: 334781 - DNA, 75 bp, synthetic construct
  source 1..75: mol_type = other DNA
aactgccggagaaaatggaaggcgtggctaacgtgcacctcgatgcgctggagcacggcgacaccatcgccttta

SEQ ID NO: 334782 - DNA, 75 bp, synthetic construct
  source 1..75: mol_type = other DNA
cggaacgggcctataccctgaactacacctgcccgacctttattgataaacctggcattcgtattaccgaaggtc

SEQ ID NO: 334783 - DNA, 75 bp, synthetic construct
  source 1..75: mol_type = other DNA
ccgtggtgtgtgccatgaatgcgggaaaccttaaacatgtggctatggcgctgcgtgaacgatacggctcgcgca

SEQ ID NO: 334784 - DNA, 75 bp, synthetic construct
  source 1..75: mol_type = other DNA
tcgccgagatgtcgctgattgaaggtcgtcgcggcctgcgtcgtcgcccgctatgggagtttgaaatcgataccg

SEQ ID NO: 334785 - DNA, 75 bp, synthetic construct
  source 1..75: mol_type = other DNA
aagatttcgccgagatgtcgctgattgaaggtcgccgcggcctgcgtcgtcgcccgctgtgggagtttgaaatcg

SEQ ID NO: 334786 - DNA, 75 bp, synthetic construct
  source 1..75: mol_type = other DNA
tgcgccgaaatatggcatccgtggtatcccgactctgctgctgttcaaaaacggtgaagtggcggcaaccaaagt

SEQ ID NO: 334787 - DNA, 75 bp, synthetic construct
  source 1..75: mol_type = other DNA
ctgatggatggtcacgatctgcgcgagtataccctggcgtcgttacgtaaccaggttgctctggtgtcgcagaat

SEQ ID NO: 334788 - DNA, 75 bp, synthetic construct
  source 1..75: mol_type = other DNA
ctgaccaacgttaacgcccagttccagcgcggtatggcggcttgtcagacgctgtttaccattctggacagtgag

SEQ ID NO: 334789 - DNA, 75 bp, synthetic construct
  source 1..75: mol_type = other DNA
agcaattgtatcaacaagatcttcaatcggaacatgtatttacattgggaaaatggctatagtaaattgtgattc

SEQ ID NO: 334790 - DNA, 75 bp, synthetic construct
  source 1..75: mol_type = other DNA
ttgtttctaagcgtttccgcagtattagtaagaacatgcagaacaccatggggcaggtgactaccagtgcggaac

SEQ ID NO: 334791 - DNA, 75 bp, synthetic construct
  source 1..75: mol_type = other DNA
cgtcgccgtctgtttggccatatgatgggaatgccggtgtcattttttgacaaacagtcaaccggaacactgttg

SEQ ID NO: 334792 - DNA, 75 bp, synthetic construct
  source 1..75: mol_type = other DNA
tgcactgatgcgtccgctgaaatcgctgaccaacgttaacgcccaattccagcgtggtatggcggcctgtcagac

SEQ ID NO: 334793 - DNA, 75 bp, synthetic construct
  source 1..75: mol_type = other DNA
ttgataggtaaaaccgattatgtctggacccccgaaaatcccgcacgcctgcatttgatacgaggcaacccctca

SEQ ID NO: 334794 - DNA, 75 bp, synthetic construct
  source 1..75: mol_type = other DNA
tgagggttatacctaccgcacggaaacgcagaacggtgatgtgctgattaaggcacacccggctgctgcgatgaa

SEQ ID NO: 334795 - DNA, 75 bp, synthetic construct
  source 1..75: mol_type = other DNA
ctggaaacgtctgcgcgccatgcttggtgagttcggcatgacgccagccagccgcacgaaagtgaatgcaaaagg

SEQ ID NO: 334796 - DNA, 75 bp, synthetic construct
  source 1..75: mol_type = other DNA
gtatgcgtacatgaaggtgcatggccagatctggaaaatggcttgtgtaaaaacggtagtgcgaacgtgttaacg

SEQ ID NO: 334797 - DNA, 75 bp, synthetic construct
  source 1..75: mol_type = other DNA
cgcgccgatccggtgaaaaatgcgctgggtacaccaagcggcaaaattgagatttactccagaacgctggaaaaa

SEQ ID NO: 334798 - DNA, 75 bp, synthetic construct
  source 1..75: mol_type = other DNA
cacgcctgcatttgatacgaggcaacccctcaaagcgccccgttaaagaccacaaaaaaaccgctaaaaaggatg

SEQ ID NO: 334799 - DNA, 75 bp, synthetic construct
  source 1..75: mol_type = other DNA
ccagaactgcgcgcgcaactggaaggtgtcgatagcgccccggtacaagcgctgcgtgagaagatgggcgagttt

SEQ ID NO: 334800 - DNA, 75 bp, synthetic construct
  source 1..75: mol_type = other DNA
ctaacattttcaccccaacagaagcaggtgcagcagcggtgctaatcgtgctggcgattggcttttttatctatc

SEQ ID NO: 334801 - DNA, 75 bp, synthetic construct
  source 1..75: mol_type = other DNA
cgcccgcaaaactaacgctaaaccctcgcgtgaaagctggcctacgggcaaagaggtggtgttctcgctgggaca

SEQ ID NO: 334802 - DNA, 75 bp, synthetic construct
  source 1..75: mol_type = other DNA
cggcgctgtgtctggcatgcctgcaatccgggaaaccggaccaggaaaaaacttgcaggccataacagtatctac

SEQ ID NO: 334803 - DNA, 75 bp, synthetic construct
  source 1..75: mol_type = other DNA
aaactttactcgacctgaattatgcccgtcaggttaacgaagtttccttatataccgccctgggtggcggttggc

SEQ ID NO: 334804 - DNA, 75 bp, synthetic construct
  source 1..75: mol_type = other DNA
tatttaacgccagcagcgggatgtggaattttattcctaaaattgagatccccatttttaatgccggacgcaacc

SEQ ID NO: 334805 - DNA, 75 bp, synthetic construct
  source 1..75: mol_type = other DNA
aaggaaaagggggaaaatctcaaaacagaaatcgaagcgctggaggatattgccaataagatagattttcttttt

SEQ ID NO: 334806 - DNA, 75 bp, synthetic construct
  source 1..75: mol_type = other DNA
tgtaatactaacagaaggtaaaacagagactactctgctcccatttatttttaacaaagttaaaaataaaacatt

SEQ ID NO: 334807 - DNA, 75 bp, synthetic construct
  source 1..75: mol_type = other DNA
acagcgttcgattcagatggctctaataagacatttagctgatataaccaacggtgatgatattaaaacaactac

SEQ ID NO: 334808 - DNA, 75 bp, synthetic construct
  source 1..75: mol_type = other DNA
gattaatctggcgaaatacaaagcggcggcggggaagcaaaccattctgctggattattcacgcgcagaagtgaa

SEQ ID NO: 334809 - DNA, 75 bp, synthetic construct
  source 1..75: mol_type = other DNA
ccagagcgataaatatcatggcgatgggagatgatattgccagccagcttggggtgcgcgttgagcggacgcgaa

SEQ ID NO: 334810 - DNA, 75 bp, synthetic construct
  source 1..75: mol_type = other DNA
ttattttggttttctgttacgcaagttgacaggtatttatcacccatttacccattgtcagtattgctggttgcg

SEQ ID NO: 334811 - DNA, 75 bp, synthetic construct
  source 1..75: mol_type = other DNA
catcctgcagcgcctgaaatggctcaacgactagtttattttgcaggttatactaatgaacttgggttaccacga

SEQ ID NO: 334812 - DNA, 75 bp, synthetic construct
  source 1..75: mol_type = other DNA
gcatcgctgcaaattactttgcaacgggcgcgggcattatatcagcacggcgcagtaagttatctggaagtgctg

SEQ ID NO: 334813 - DNA, 75 bp, synthetic construct
  source 1..75: mol_type = other DNA
agtgccggaagaaacctcgcccgcggtggaagcgctggaaaatctcgacccggattcactcactccgcgccaggc

SEQ ID NO: 334814 - DNA, 75 bp, synthetic construct
  source 1..75: mol_type = other DNA
ctggatatttcactgaccaaacgcggtgcttcagcgggagagccgatcccgatggcggggatcccctaccatgcg

SEQ ID NO: 334815 - DNA, 75 bp, synthetic construct
  source 1..75: mol_type = other DNA
ctgctcgcccacgcgatctggcccgtatgcgccacgctttccagcaactgccggagctgcgtgcgcagttagaaa

SEQ ID NO: 334816 - DNA, 75 bp, synthetic construct
  source 1..75: mol_type = other DNA
gcatcaggctataacgaagagctggatgagtggcgcgcgctggctgacggcgcgaccgattatctggagcgtctg

SEQ ID NO: 334817 - DNA, 75 bp, synthetic construct
  source 1..75: mol_type = other DNA
cggctatctggcaggacagcaaaggtttcggctacgcgacgctggatatcagttccggtcgttttcgcctgagcg

SEQ ID NO: 334818 - DNA, 75 bp, synthetic construct
  source 1..75: mol_type = other DNA
gaaaatctcgacccggattcactcactccgcgccaggcgctggagtggatttatcggttgaagagtctggtataa

SEQ ID NO: 334819 - DNA, 75 bp, synthetic construct
  source 1..75: mol_type = other DNA
taagcgtctaaatatcgcctgtaaaccaagtgagcgttttctttttttctacggtgacaggctggaaaccaacgg

SEQ ID NO: 334820 - DNA, 75 bp, synthetic construct
  source 1..75: mol_type = other DNA
ttattcctaaaattgagatccccatttttaatgccggacgcaccaagccaatctggatatcgccgaaattcgcca

SEQ ID NO: 334821 - DNA, 75 bp, synthetic construct
  source 1..75: mol_type = other DNA
aagctgccgcaagcgcagacagtaaacagcgacagcctgcaaagcgctgagagatcccctcataatttccccaaa

SEQ ID NO: 334822 - DNA, 75 bp, synthetic construct
  source 1..75: mol_type = other DNA
ataatcgctcacaatcgttaccttgttctggtgatgagccttcccgcagacggcacgcccctagcatcaacaaat

SEQ ID NO: 334823 - DNA, 75 bp, synthetic construct
  source 1..75: mol_type = other DNA
catagccagtgcgaactgctggccagcgatgaaatgcgacgttcggtcagtgaagagtcctacggcaaaaacttc

SEQ ID NO: 334824 - DNA, 75 bp, synthetic construct
  source 1..75: mol_type = other DNA
caaagcattgggcgaaacggcacgcgcaaccgcatcggtgatgctggtaatcatggccagcgccgcattgggatg

SEQ ID NO: 334825 - DNA, 75 bp, synthetic construct
  source 1..75: mol_type = other DNA
atcgacaactttgaatttatcgacggtgttattgacgccatgcgcgagctaaaaaaatgggctttgcgctggtgg

SEQ ID NO: 334826 - DNA, 75 bp, synthetic construct
  source 1..75: mol_type = other DNA
tcgttacgacgcgctggaaaaccagtgtgaggaatctgacctgctggcagcagaaatgaagctgattgactgcat

SEQ ID NO: 334827 - DNA, 75 bp, synthetic construct
  source 1..75: mol_type = other DNA
cgctgggtgcctggctggatgtgttggctgatgccgcctgatgaacaaccacaccgccccgccggagacggggcg

SEQ ID NO: 334828 - DNA, 75 bp, synthetic construct
  source 1..75: mol_type = other DNA
cgccatgcaggcggtggctgtcacagaacaacgtcgtcgtcagggacgcacactttcagcatggccttatgccac

SEQ ID NO: 334829 - DNA, 75 bp, synthetic construct
  source 1..75: mol_type = other DNA
gtcgggatatgcaccctgccgaacagattgccggattccgcgcaatggcgcaggaaggcaaaacacctgcgcaga

SEQ ID NO: 334830 - DNA, 75 bp, synthetic construct
  source 1..75: mol_type = other DNA
ctggcagagcgtggcatcattccggctgactggcctgtacgcgtgaaggttattccgcaggagctggcgacggct

SEQ ID NO: 334831 - DNA, 75 bp, synthetic construct
  source 1..75: mol_type = other DNA
ccgccacgttcagcgaatgctgaaactggctgaccttgccccagtgatcctggatgcgctggcagaagaccgcat

SEQ ID NO: 334832 - DNA, 75 bp, synthetic construct
  source 1..75: mol_type = other DNA
ccgccacgttcagcgaatgctgaaactggcagaccttgccccagtgatcctggatgcgctggcagaagacctcat

SEQ ID NO: 334833 - DNA, 75 bp, synthetic construct
  source 1..75: mol_type = other DNA
ccgccacgttcagcgaatgctgaaactggcagaccttgccccagtgatccttgatgcgctggcagaagaccgcat

SEQ ID NO: 334834 - DNA, 75 bp, synthetic construct
  source 1..75: mol_type = other DNA
aactgcgcaccgatttgttcagcgacaacgagggtggctatgtggactgcgtggcgctcgatgccgccctgctgg

SEQ ID NO: 334835 - DNA, 75 bp, synthetic construct
  source 1..75: mol_type = other DNA
gaaggaaggggccgcattcctgtcgatgatggcagaaaaagcccgtcttactgccctgctgccggagggatggtc

SEQ ID NO: 334836 - DNA, 75 bp, synthetic construct
  source 1..75: mol_type = other DNA
gtgtatccagcgtggtgtgcagttgcgcagtgaggatgacgtggctgacgacgctgaccgcacggaacaggggct

SEQ ID NO: 334837 - DNA, 75 bp, synthetic construct
  source 1..75: mol_type = other DNA
aacgaaaggccgtggacgtaaggccgcgcagcccgagcctcagcagccgtctgaacccgcgtatgacttcgatga

SEQ ID NO: 334838 - DNA, 75 bp, synthetic construct
  source 1..75: mol_type = other DNA
cactgctggcatggacgctctgcctgaatgtgtttggtagcggggcgtacagcaatcccgcaaaaattcgtctgg

SEQ ID NO: 334839 - DNA, 75 bp, synthetic construct
  source 1..75: mol_type = other DNA
cttgttcccgtcggtgcggtttcgtgtcagggaacgcagtcgccataaatccgcgctggtcatgcagaagtacag

SEQ ID NO: 334840 - DNA, 75 bp, synthetic construct
  source 1..75: mol_type = other DNA
tcgccgactggctgcactcaacatgctggcagagcgcaacatccttccggctgactggcttgtacgcgtgaaggt

SEQ ID NO: 334841 - DNA, 75 bp, synthetic construct
  source 1..75: mol_type = other DNA
atggagcggtggatggtgccgaacaaactccgggaggtgcgtgatgcggcaacaatcacacggattgcccgtaaa

SEQ ID NO: 334842 - DNA, 75 bp, synthetic construct
  source 1..75: mol_type = other DNA
ggcgttccattcgccggaaacagtcggaagctggcatgcacgctggagtgaccgggtggcagagcatgacctgga

SEQ ID NO: 334843 - DNA, 75 bp, synthetic construct
  source 1..75: mol_type = other DNA
gtcttgcagccagagaggccggtcatgccgtccgtgagatggagcggtggatggtgccgaacaaactccgggagg

SEQ ID NO: 334844 - DNA, 75 bp, synthetic construct
  source 1..75: mol_type = other DNA
caaagcaagccgtaaatctgcaaaaacgcaggaaaccgtcctgtctgccctgctggcgcagacggaggaagtgag

SEQ ID NO: 334845 - DNA, 75 bp, synthetic construct
  source 1..75: mol_type = other DNA
gggtgaggattacgggttttcgatgacgacattccgttctgatcgggctgatcgtgataaccgccccgtccagtg

SEQ ID NO: 334846 - DNA, 75 bp, synthetic construct
  source 1..75: mol_type = other DNA
gaaaaaaggtggcgcaaaaacgaaaggccgtggacgtaaggccgcgcagccggagcctcagcagccgtctgaacc

SEQ ID NO: 334847 - DNA, 75 bp, synthetic construct
  source 1..75: mol_type = other DNA
gtgcctggctggatgtgtgcaccacgcccacagacggatgccactgaacgaaccgataacctggctgatgccgcc

SEQ ID NO: 334848 - DNA, 75 bp, synthetic construct
  source 1..75: mol_type = other DNA
cgctggaaaatcagtgtgaggaatctgacctgctggaagcagaaatgaagctgatgcgctgcatggcgaaggtca

SEQ ID NO: 334849 - DNA, 75 bp, synthetic construct
  source 1..75: mol_type = other DNA
gagcagacagaatggcatcgcgtggtgttgttcggcaagctcgcggaagtggcaggtgaatatctgcgcaagggc

SEQ ID NO: 334850 - DNA, 75 bp, synthetic construct
  source 1..75: mol_type = other DNA
aaacggagcgtaaatccagccgtaaatcgtcaaaagaacaggaaaccgccctgtctgccctgctggcgcagacgg

SEQ ID NO: 334851 - DNA, 75 bp, synthetic construct
  source 1..75: mol_type = other DNA
aaaaactccaggctgtcgcagagttccttcgggaagccgaaggctgggaatggtgcgccgggcgcatggagcctg

SEQ ID NO: 334852 - DNA, 75 bp, synthetic construct
  source 1..75: mol_type = other DNA
ctggttgttcatgccctgcctggtgaccgctacggtgtcgccgcaggtggtcgccgactggctgcactcaacatg

SEQ ID NO: 334853 - DNA, 75 bp, synthetic construct
  source 1..75: mol_type = other DNA
gaacgactgactgtgacaaccgctccgtcctgtgcggggcatcaccggagagatgaggatgagcgaatatttcag

SEQ ID NO: 334854 - DNA, 75 bp, synthetic construct
  source 1..75: mol_type = other DNA
tgacggaggcagaagaagaacgcctgaacgaactgatggcacgttacgacgcgctggaaaaccagtgtgaggaat

SEQ ID NO: 334855 - DNA, 75 bp, synthetic construct
  source 1..75: mol_type = other DNA
ggactgctgcagaatctggtcgtgcataccctgcctggtgagcgctacggtgtcgccgcaggtggtcgcagactg

SEQ ID NO: 334856 - DNA, 75 bp, synthetic construct
  source 1..75: mol_type = other DNA
tcggtgagtgctgtgaggatgccggaacataccgctgtctgccggagccggaagcggtgctgacggaggcggaag

SEQ ID NO: 334857 - DNA, 75 bp, synthetic construct
  source 1..75: mol_type = other DNA
tgacaaacagacgggggagatgcgggagcagaccgaatggcaccgcgtggtgctgttcggcaagctcgcggaagt

SEQ ID NO: 334858 - DNA, 75 bp, synthetic construct
  source 1..75: mol_type = other DNA
tgacaaacagaccggggagatgcgggagcagacagaatggcaacgcgtggtgctgttcggcaagctcgcggaagt

SEQ ID NO: 334859 - DNA, 75 bp, synthetic construct
  source 1..75: mol_type = other DNA
tgacaaacagactggggagatgcgggagcagacggaatggcatcgcgtggtgctgttcggcaagctcgcggaagt

SEQ ID NO: 334860 - DNA, 75 bp, synthetic construct
  source 1..75: mol_type = other DNA
gagcagactgaatggcagcgcgtggtgctgttcggcaagctcgcggaagtggcaggagaatatctgcgcaagggg

SEQ ID NO: 334861 - DNA, 75 bp, synthetic construct
  source 1..75: mol_type = other DNA
gagcagacagaatggcagcgcgtggtgctgttcggcaagctcgcggaagtggcaggtgaatatctgcgcaagggg

SEQ ID NO: 334862 - DNA, 75 bp, synthetic construct
  source 1..75: mol_type = other DNA
gagcagacagaatggcatcgcgtggtgctgttcggcaagctcgcggaagtggcaggagaatatctgcgcaagggg

SEQ ID NO: 334863 - DNA, 75 bp, synthetic construct
  source 1..75: mol_type = other DNA
agtctgccactgctgacgaaaatgtcctcagagcgcacgctggcagtccaggcggcgcttatgcaacagccggac

SEQ ID NO: 334864 - DNA, 75 bp, synthetic construct
  source 1..75: mol_type = other DNA
tggcagaaagatttcaccacattcttcacgcttgacggacaggccctgatgagtctgatggttttctgtactgcc

SEQ ID NO: 334865 - DNA, 75 bp, synthetic construct
  source 1..75: mol_type = other DNA
gaaggtcagagcgtggacgccggagatgcgtgccggaagcggtgtggtggtgtcctggcgttacggtaatgtgtg

SEQ ID NO: 334866 - DNA, 75 bp, synthetic construct
  source 1..75: mol_type = other DNA
tcgccataaatccgcactggtcatgcagaagtacagccgccagcaggcacgggaggcagagcagaaagcccgtgc

SEQ ID NO: 334867 - DNA, 75 bp, synthetic construct
  source 1..75: mol_type = other DNA
ggggaacagtaaattccgctttgtgggggctgatgccttctcgccagacgaactgcgcaccgatttgttcagcga

SEQ ID NO: 334868 - DNA, 75 bp, synthetic construct
  source 1..75: mol_type = other DNA
tcggtgatttgctgggctattcaccccgccacgttcagcgaatgctgaaactggctgaccttgcgcctgtcatcc

SEQ ID NO: 334869 - DNA, 75 bp, synthetic construct
  source 1..75: mol_type = other DNA
tgtccggtgccgcacgggacgcggagaagatgaagaaaggcgatgcggctgaacatgcagagttccacatgaaag

SEQ ID NO: 334870 - DNA, 75 bp, synthetic construct
  source 1..75: mol_type = other DNA
aggaggtgctgttatcactgctcagtttctgcaccgcgtgcagtatccacggtgtccagacccgtgagtatggtc

SEQ ID NO: 334871 - DNA, 75 bp, synthetic construct
  source 1..75: mol_type = other DNA
tctggaaaaacgtcgcaccaattaccgcgaactgaatgactatcaggaaataaacgctgtagaaacagtaaggaa

SEQ ID NO: 334872 - DNA, 75 bp, synthetic construct
  source 1..75: mol_type = other DNA
acgtaaggccgcgcagcccgagcctcagccgcaaccgccggagggggaggattacgggttttcagacgatatccc

SEQ ID NO: 334873 - DNA, 75 bp, synthetic construct
  source 1..75: mol_type = other DNA
accaacatcgcgctggcaattttctcctgcgccttttatttctttaatccgcacgccacggtgatgattgtggtg

SEQ ID NO: 334874 - DNA, 75 bp, synthetic construct
  source 1..75: mol_type = other DNA
gggcagccacagagtgctgacacgacgaaaaaagggagcgcgaaaacaaaaggccgtggacgtaaggccgagcag

SEQ ID NO: 334875 - DNA, 75 bp, synthetic construct
  source 1..75: mol_type = other DNA
gcggaagtggcaggtgaatatctgcgtaagggggcgcaggtctacattgaaggccagcttcgcacccgtagctgg

SEQ ID NO: 334876 - DNA, 75 bp, synthetic construct
  source 1..75: mol_type = other DNA
tgacggggacggttatgtcgaccgcgtggcgctcgatgctgccctgctggaaaaactccaggctgttgctgaaca

SEQ ID NO: 334877 - DNA, 75 bp, synthetic construct
  source 1..75: mol_type = other DNA
gaaggaaggtgccgcattcatggcgctgatggcagaaaaagcccgtcttgcagccctgctgccggagggatgggc

SEQ ID NO: 334878 - DNA, 75 bp, synthetic construct
  source 1..75: mol_type = other DNA
aggtcgccacgtcagaaacctggcgtgacaaacagacgggggagatgcgggagcagacagaatggcatcgcgtgg

SEQ ID NO: 334879 - DNA, 75 bp, synthetic construct
  source 1..75: mol_type = other DNA
acgggacatgacgacgttcctgtcactcagccaggaggttctgttatccctgctcagtttctgcactgcgtgcag

SEQ ID NO: 334880 - DNA, 75 bp, synthetic construct
  source 1..75: mol_type = other DNA
tgctcagtttctgcaccgcatgcagccttaacggtgtccagacccgtgagtgtggtcacacgttgcgtattaccg

SEQ ID NO: 334881 - DNA, 75 bp, synthetic construct
  source 1..75: mol_type = other DNA
gtgtgtccagcgtggtgtgcagttgcgcagcgaggatgacgcggctgacgacgctgaccgcacggaacaggtgca

SEQ ID NO: 334882 - DNA, 75 bp, synthetic construct
  source 1..75: mol_type = other DNA
aagccaccggttacggtctggtttatttcactgaagcgatgctgaaacgccacggtatgggttttgaaggaatgc

SEQ ID NO: 334883 - DNA, 75 bp, synthetic construct
  source 1..75: mol_type = other DNA
cgaaaggccgcgcagccggagcctcagccgcaacagccggagggtgacgattacgggttttcagacgatatcccg

SEQ ID NO: 334884 - DNA, 75 bp, synthetic construct
  source 1..75: mol_type = other DNA
ccgtggacgtaaggccgagcagccggagcctcagccgcaaccgccggaaggtgacgattacgggttttcagacga

SEQ ID NO: 334885 - DNA, 75 bp, synthetic construct
  source 1..75: mol_type = other DNA
gcagaacgctcaggcgcaaccgcagcctcagcagaatgggcagccacagagtgctgacgcgacgaaaaaaggtgg

SEQ ID NO: 334886 - DNA, 75 bp, synthetic construct
  source 1..75: mol_type = other DNA
cggcgaaggaaagcaaaccaactacgtacaaggcgcgaacattgccggctttgtgaaggttgccgatgctatgct

SEQ ID NO: 334887 - DNA, 75 bp, synthetic construct
  source 1..75: mol_type = other DNA
gcgatggaatttggcgcacgcgtaattaccgcatcagactccagcggcaccgtggttgatgaaagcggatttacc

SEQ ID NO: 334888 - DNA, 75 bp, synthetic construct
  source 1..75: mol_type = other DNA
tgtggttccgtgtcagggaacgcagtcgccataaatccgcactggtcatgcagaagtacagccgtcagcaggcga

SEQ ID NO: 334889 - DNA, 75 bp, synthetic construct
  source 1..75: mol_type = other DNA
tcgccgactggctgcactcaacatgctggcagagcgtggcatcattccggctgactggcctgtgcgcgtgaaggt

SEQ ID NO: 334890 - DNA, 75 bp, synthetic construct
  source 1..75: mol_type = other DNA
cgaacactgtcaggcgctggcgctggagaacgacaccgcgcgtcaggtgcaggtgtttgaagccgcctgccagtc

SEQ ID NO: 334891 - DNA, 75 bp, synthetic construct
  source 1..75: mol_type = other DNA
tgcagagttccacatgaaagacaaccgctgggtgcctggctggatgtgttcaccacgtccacagacggatgccac

SEQ ID NO: 334892 - DNA, 75 bp, synthetic construct
  source 1..75: mol_type = other DNA
ctggggatggtgcgccggacgcatggagcctgtcggtgaatgccgtgaagatgcccgggcataccgcaacctgcc

SEQ ID NO: 334893 - DNA, 75 bp, synthetic construct
  source 1..75: mol_type = other DNA
gattccgcaggagctggcgaccgcggcatcaatgactgaaaacggtcatcgtcgggatatgcaccctgccgaaca

SEQ ID NO: 334894 - DNA, 75 bp, synthetic construct
  source 1..75: mol_type = other DNA
aattccgcaggagctggcgacggcagcatcaatgactgaaaacggtcatcgtcgggatatgcaccctgccgaaca

SEQ ID NO: 334895 - DNA, 75 bp, synthetic construct
  source 1..75: mol_type = other DNA
tggtgtcctggcgttatggcaacgtgtgtgtccagcgtggtgtgcagttgcgcagtgaggatgacgtggctgacg

SEQ ID NO: 334896 - DNA, 75 bp, synthetic construct
  source 1..75: mol_type = other DNA
cgatttgttcagcgatgacggggacggttatgtcgaccgcgtggcgctcgatgccgccctgctggaaaaactcca

SEQ ID NO: 334897 - DNA, 75 bp, synthetic construct
  source 1..75: mol_type = other DNA
tggtgcgccgggcgcatggagcctgttggtgagtgccgtgaggatgccggaacataccgctgtctgccggagccg

SEQ ID NO: 334898 - DNA, 75 bp, synthetic construct
  source 1..75: mol_type = other DNA
aagaacgcctgaacgaactgatggcacgttacgatgcgctggaaaccagtgtgaggaatccgacctgctggaagc

SEQ ID NO: 334899 - DNA, 75 bp, synthetic construct
  source 1..75: mol_type = other DNA
aagaaaggcgatgcggctgaacatgcagagttccatatgaaagacaaccgctgggtgcctggctggatgtgtgca

SEQ ID NO: 334900 - DNA, 75 bp, synthetic construct
  source 1..75: mol_type = other DNA
ggtgtgcagttgcgcagtgaagatgacgcggctgacgacgctgaccgcacggaacaggtgcaggagaaagcgtca

SEQ ID NO: 334901 - DNA, 75 bp, synthetic construct
  source 1..75: mol_type = other DNA
ggcataccgcaacctgccggagccggaagcggtgctgacggaggcagaagaagaacgcctgaacgaactgatgat

SEQ ID NO: 334902 - DNA, 75 bp, synthetic construct
  source 1..75: mol_type = other DNA
ggctggcctgcggataatccggatcttaagccgcgtttaccggcctccattttggtgcatgaaaacagctattaa

SEQ ID NO: 334903 - DNA, 75 bp, synthetic construct
  source 1..75: mol_type = other DNA
atgtgtatctaccttaacttaatgattttgataaaaatcattaggggattcatcagagcgcagcgtgaggcgatt

SEQ ID NO: 334904 - DNA, 75 bp, synthetic construct
  source 1..75: mol_type = other DNA
atttacagatctgtccggatgctcagctcggcctggcggaacaactgttgctcggtgtcgttgatacggcaatga

SEQ ID NO: 334905 - DNA, 75 bp, synthetic construct
  source 1..75: mol_type = other DNA
tcatattttctggcgtccctggtcaaataacatgattcaattctgggcgggagattaccgggaaatgccaacgcg

SEQ ID NO: 334906 - DNA, 75 bp, synthetic construct
  source 1..75: mol_type = other DNA
tgctcattaagatgcgttttcatggggatatgttattaactactcccgtcattagttcgctgaaaaaaaattacc

SEQ ID NO: 334907 - DNA, 75 bp, synthetic construct
  source 1..75: mol_type = other DNA
ttcgccatttcactgatgaacccatttccgacgcgcagtgtgaggcgattattaacagcgcccgtgcgacgtcca

SEQ ID NO: 334908 - DNA, 75 bp, synthetic construct
  source 1..75: mol_type = other DNA
ggagaaagcctccgtggaggaaatcagtctgccactgctgacgaaaatgtcctcagaggggttccgtgggcattt

SEQ ID NO: 334909 - DNA, 75 bp, synthetic construct
  source 1..75: mol_type = other DNA
atgctgccctgctggaaaaactccaggctgttgctgaacaccttcgggaagccgaaggctggagatggtgcgccg

SEQ ID NO: 334910 - DNA, 75 bp, synthetic construct
  source 1..75: mol_type = other DNA
gcgactggtggcagccgacaaaagcaaacttcttcggacacctgaaaaagccgcagattatcgcagccctgaatg

SEQ ID NO: 334911 - DNA, 75 bp, synthetic construct
  source 1..75: mol_type = other DNA
cgcgagtgtggtcacacgtcacgcagcccgctggacacgctggagagcgccatcggttttcacatgcgtgactgg

SEQ ID NO: 334912 - DNA, 75 bp, synthetic construct
  source 1..75: mol_type = other DNA
tatccctgctcagtttctgcaccgcatgcagccttaacggtgtccagacccgtgagtatggtcacacgtcacgca

SEQ ID NO: 334913 - DNA, 75 bp, synthetic construct
  source 1..75: mol_type = other DNA
gccgtccctgaccgcagaagaactgcacggcaaccgtcttcagtggctgtatgccatcgatgtgctgattgaaac

SEQ ID NO: 334914 - DNA, 75 bp, synthetic construct
  source 1..75: mol_type = other DNA
gtgaccttcccggaacttggtgcgttaatcgatcatgcgcagctgtttattggcgttgattccgcaccggcgcat

SEQ ID NO: 334915 - DNA, 75 bp, synthetic construct
  source 1..75: mol_type = other DNA
gaaatgcgtgccggaagcggtgtggtggtgtcctggcgttatggcaacgtatgtgtccagcgtggtgtgcagttg

SEQ ID NO: 334916 - DNA, 75 bp, synthetic construct
  source 1..75: mol_type = other DNA
ttaccgaaagtgaagtggcggtggcagggaacagtaaattccgcttcgtgggggctgatgccttctcgccagaag

SEQ ID NO: 334917 - DNA, 75 bp, synthetic construct
  source 1..75: mol_type = other DNA
taaccgaaagtgaagtggcggtggctgggaacagtaaattccgcttcgtgggggctgatgccttctcgccagaag

SEQ ID NO: 334918 - DNA, 75 bp, synthetic construct
  source 1..75: mol_type = other DNA
tattccgcaggaactggcgactgcagcatcaatgactgaaaacggtcatcgtcgggatatgcaccctgccgaaca

SEQ ID NO: 334919 - DNA, 75 bp, synthetic construct
  source 1..75: mol_type = other DNA
ctgatggcagaaaaagcacgtttggtcgccctgttgccggagggatggtcacgggacatgacgacgttcctgtca

SEQ ID NO: 334920 - DNA, 75 bp, synthetic construct
  source 1..75: mol_type = other DNA
aatctacccgtaaagcaagccgtaaacctgcaaaaacgcaggaaactgtcctgactgctctgctggcgcagacgg

SEQ ID NO: 334921 - DNA, 75 bp, synthetic construct
  source 1..75: mol_type = other DNA
agaggctggtatggcggcaagggtggtcggtcatgctgttcgtgagatggagcggtggatggtgccgaacaaact

SEQ ID NO: 334922 - DNA, 75 bp, synthetic construct
  source 1..75: mol_type = other DNA
tggagtgaccgggtggcagagcatgacctggaaaccctgttctggcagtggggcgagcgttttccgtcactggcc

SEQ ID NO: 334923 - DNA, 75 bp, synthetic construct
  source 1..75: mol_type = other DNA
agtcgttctgacgtccggcccagataaagacgatctggcctgcgtcaatgaaattgcgcagggatgccagacgcc

SEQ ID NO: 334924 - DNA, 75 bp, synthetic construct
  source 1..75: mol_type = other DNA
taaccgaaagtgaagtggcggtggcagggaacagtaaattccgcttcgtgggggctgatgccttctcgccagatg

SEQ ID NO: 334925 - DNA, 75 bp, synthetic construct
  source 1..75: mol_type = other DNA
ggggctgatgccttctcgccagacgaactgcgcaccgatttgttcagcgacgacgagggtggctatgtggactgc

SEQ ID NO: 334926 - DNA, 75 bp, synthetic construct
  source 1..75: mol_type = other DNA
cagaagtacagccgccagcaggcgagggaggcagagcagaaagcccgtgcgtaccaggcgctggtcgcccaggct

SEQ ID NO: 334927 - DNA, 75 bp, synthetic construct
  source 1..75: mol_type = other DNA
atgcgtttggtgtcagtgaaacgattgtcgaagatgattttttcaccgccgttgatgatttgcgccaggcttctg

SEQ ID NO: 334928 - DNA, 75 bp, synthetic construct
  source 1..75: mol_type = other DNA
caacgcgtctgcgcgtttcctcacaaagtctgaaacgtgcgtggcgcacttctgcacattttgaacaggcactgg

SEQ ID NO: 334929 - DNA, 75 bp, synthetic construct
  source 1..75: mol_type = other DNA
aaagagaaagatctcgctttgttacgtaaagaccgtatggcggtagatatcgctatgtttggtcgtatgctggcg

SEQ ID NO: 334930 - DNA, 75 bp, synthetic construct
  source 1..75: mol_type = other DNA
cagaagaccgaatgcgcaagctttgacgtgatgaacaaacagggaagcatgaaggacgtgctggactttatctgc

SEQ ID NO: 334931 - DNA, 75 bp, synthetic construct
  source 1..75: mol_type = other DNA
cacttaaagtctccccaaccggcaaacagaacagctttgccagccgtgcctacgcctcctgggcgctggcagaaa

SEQ ID NO: 334932 - DNA, 75 bp, synthetic construct
  source 1..75: mol_type = other DNA
accctgcgcgcctttacggaagccgcgtttaaagtttccccaaccggtaaacaaaacagctttgccagtcgtgcc

SEQ ID NO: 334933 - DNA, 75 bp, synthetic construct
  source 1..75: mol_type = other DNA
atgatcacctcgcaggtgttattccttgcggcgggggatcaccccttgccgttttcaccttcccatgcggttttc

SEQ ID NO: 334934 - DNA, 75 bp, synthetic construct
  source 1..75: mol_type = other DNA
tttttttaaagcccacgtacgtttgatgatcacctcgcaggtgttattccttgcggcgggggatcaccccttgcc

SEQ ID NO: 334935 - DNA, 75 bp, synthetic construct
  source 1..75: mol_type = other DNA
tctgttcactggctgaaaccagcacgttatttcttgcagggcgctttctacaggggttgggcgcaggctgttgtt

SEQ ID NO: 334936 - DNA, 75 bp, synthetic construct
  source 1..75: mol_type = other DNA
tctgaaacatttgaagacgcaatggaagggtttattggaaaacgcactcgtcgtattggtgttgattatgtttat

SEQ ID NO: 334937 - DNA, 75 bp, synthetic construct
  source 1..75: mol_type = other DNA
agagattctgatcagattgctaccgcaattacgcgattgaagcagcaacgtgcaagttttgacaatgtttacggg

SEQ ID NO: 334938 - DNA, 75 bp, synthetic construct
  source 1..75: mol_type = other DNA
atgacgacgttaactcaatgccagcagcaggtgttggatatgctgatttcttatcagaaagaacgtggcttcccg

SEQ ID NO: 334939 - DNA, 75 bp, synthetic construct
  source 1..75: mol_type = other DNA
gtttggtctggggacgggggggtatattacattccgtggagtgtatatgtattccttgccgatgttgatgaggtc

SEQ ID NO: 334940 - DNA, 75 bp, synthetic construct
  source 1..75: mol_type = other DNA
attcttgttaagaccacgggcaccatgcagatgctgggacgtgtcgcaggtgctcagactcagccggaagagggg

SEQ ID NO: 334941 - DNA, 75 bp, synthetic construct
  source 1..75: mol_type = other DNA
acaccagggttgacaactatttgcgcaataatgcctttccttcaatgatccaggcgttcactgccagcaacccat

SEQ ID NO: 334942 - DNA, 75 bp, synthetic construct
  source 1..75: mol_type = other DNA
gcattagttctaagtaatgttgtaactttagtaataagtaattatcttttatatcgtaatggttatgcgataggc

SEQ ID NO: 334943 - DNA, 75 bp, synthetic construct
  source 1..75: mol_type = other DNA
tgctcagtttctgcaccgcatgcagcatccacggcgttcagacccgcgagtgtggtcacacgtcacgcagcccgc

SEQ ID NO: 334944 - DNA, 75 bp, synthetic construct
  source 1..75: mol_type = other DNA
gtgcctttctgaaaggcgatgcggggaaatatcaggctattttaagttgggttgaggagcagggcggcattcagg

SEQ ID NO: 334945 - DNA, 75 bp, synthetic construct
  source 1..75: mol_type = other DNA
ctggctgaccttgcgcctgtcatcctcgatgcgctggcagaagaccgcatcaccaccgaacactgtcaggcgctg

SEQ ID NO: 334946 - DNA, 75 bp, synthetic construct
  source 1..75: mol_type = other DNA
ctgttatccctgctcagtttctgcaccgcatgcagcatccacggtgttcagacccgtgagtatggtcacacgtca

SEQ ID NO: 334947 - DNA, 75 bp, synthetic construct
  source 1..75: mol_type = other DNA
tacggcattttaagggattattatgccattcctgtcacgcgacaggatctggaagaaaaaacaccggcgggagaa

SEQ ID NO: 334948 - DNA, 75 bp, synthetic construct
  source 1..75: mol_type = other DNA
cgacatttacctatttcattgttttcaaccttgaacaaccgagaacatttgtttctgagatgaactcattaagca

SEQ ID NO: 334949 - DNA, 75 bp, synthetic construct
  source 1..75: mol_type = other DNA
ttgactccatcaatatcctggaagacagaaatttgtttgccagtcaggatatcgccgacaaattgcgtagaaatt

SEQ ID NO: 334950 - DNA, 75 bp, synthetic construct
  source 1..75: mol_type = other DNA
tttcagacggccatcgccagtgagaaagagtcattaatcaaatcatgcgcagcggtggagataactctgattcag

SEQ ID NO: 334951 - DNA, 75 bp, synthetic construct
  source 1..75: mol_type = other DNA
gacacagtttcatcagttacactggggtttgaaaatcttactaccatgatctaccagaatattcatgaaagggca

SEQ ID NO: 334952 - DNA, 75 bp, synthetic construct
  source 1..75: mol_type = other DNA
gttttgagcgcggagaatacgccaccattatggcgctgaccgcaggcgtcagcatgaccgtatcgttctcaacgc

SEQ ID NO: 334953 - DNA, 75 bp, synthetic construct
  source 1..75: mol_type = other DNA
ggtgtacatccattcacgggcggtattgatagcgaggcattagcaggaaaccgtttcgtaacttacaagggaact

SEQ ID NO: 334954 - DNA, 75 bp, synthetic construct
  source 1..75: mol_type = other DNA
gatgcatacgtcacatcacacaaaacccgtggtagcgataacaaagttactaccatcgaatttaaattagatcct

SEQ ID NO: 334955 - DNA, 75 bp, synthetic construct
  source 1..75: mol_type = other DNA
cagaaatcgaagaattacagcgcaatacagcaataaaaatgctccgcctgaaccaccacgcagcatccgccactc

SEQ ID NO: 334956 - DNA, 75 bp, synthetic construct
  source 1..75: mol_type = other DNA
agatgaacgaagacgcctggccgttcagggttgtcggacttgcgccagttgccagcaagatctggagcttatccg

SEQ ID NO: 334957 - DNA, 75 bp, synthetic construct
  source 1..75: mol_type = other DNA
ttacagcacgcacggacgtcaaacatgatctgcgtgcgcgaatatttccccgataccttttcgactgcggttcga

SEQ ID NO: 334958 - DNA, 75 bp, synthetic construct
  source 1..75: mol_type = other DNA
caaagcggcgaaattttgctggatggcaaacctgtcagcggcgaacaaccggaagattatcgcaaactgttttcg

SEQ ID NO: 334959 - DNA, 75 bp, synthetic construct
  source 1..75: mol_type = other DNA
cctgaactggtgcaggggatcattctcactgtgggttcggcggcgtatctgtggatgctgtcgggtaaaatgttg

SEQ ID NO: 334960 - DNA, 75 bp, synthetic construct
  source 1..75: mol_type = other DNA
ttcgcaactggcgctcaccactctggggcatcatttcgtttaccgactgcgtagcgaatttatcaagcggattct

SEQ ID NO: 334961 - DNA, 75 bp, synthetic construct
  source 1..75: mol_type = other DNA
tttcctgctgcacttgcctttttccggtaaggaagaggagttaaaaatttcagtaattgacctgcaccgggcgca

SEQ ID NO: 334962 - DNA, 75 bp, synthetic construct
  source 1..75: mol_type = other DNA
aactggtgacgctgaccggcgggcaaaaacacgtagcgaaagcggcggagttttgggtgttctgtgccgacttta

SEQ ID NO: 334963 - DNA, 75 bp, synthetic construct
  source 1..75: mol_type = other DNA
gcctgccactgaacgaatttcgtgccatcgacagcagtcccgacaaagccaatctcactcgtgctgcaagtaaaa

SEQ ID NO: 334964 - DNA, 75 bp, synthetic construct
  source 1..75: mol_type = other DNA
gatatccaggccctttctgcaagcaatagttcagtcggtaccacaacaaatgtaaacatgaacgttgcccgctct

SEQ ID NO: 334965 - DNA, 75 bp, synthetic construct
  source 1..75: mol_type = other DNA
atggttctgccgttagaccagatgctgaaagggggtaacgcgcctgcggcgaagagcgacaacggtgccagcaat

SEQ ID NO: 334966 - DNA, 75 bp, synthetic construct
  source 1..75: mol_type = other DNA
gaagagcgacaacaacgccagcaacttgttgcgcctgccgccagcgccttcctccacgaacagtggagtaagcaa

SEQ ID NO: 334967 - DNA, 75 bp, synthetic construct
  source 1..75: mol_type = other DNA
tgcgggatgtcggcgttgatactatgtatggggtgggcattggcgcaaaaggcatgaatccgctgaccagaactt

SEQ ID NO: 334968 - DNA, 75 bp, synthetic construct
  source 1..75: mol_type = other DNA
gttatttcttgcagggcgctttctacaggggttgggcgcgggctgttgttacgtggtggcattcgccattttgcg

SEQ ID NO: 334969 - DNA, 75 bp, synthetic construct
  source 1..75: mol_type = other DNA
cgcaggtttgcggttcgtcactgtggatttggctggcagcggtggttggtatcggcgcatggaatatgctgatcg

SEQ ID NO: 334970 - DNA, 75 bp, synthetic construct
  source 1..75: mol_type = other DNA
tcacgtattctggcgtccatggaccgataatattattcaattctgggcagggaattatcagaaaatgccaacccg

SEQ ID NO: 334971 - DNA, 75 bp, synthetic construct
  source 1..75: mol_type = other DNA
aaaagggtagcgtattgaatggttttaacggtgatgcaaccgacaacattacccttgctggctcaaatattatta

SEQ ID NO: 334972 - DNA, 75 bp, synthetic construct
  source 1..75: mol_type = other DNA
ggcggctaataataaacaaacaatttatgcctctgcttcggcacaaggagcaggttcagcaacgcaaaatttaaa

SEQ ID NO: 334973 - DNA, 75 bp, synthetic construct
  source 1..75: mol_type = other DNA
caacggcagacaaaaaattcgttgaaggtgtaaaagttagcggtaacaaaaatgttgtgattaatgctacaggct

SEQ ID NO: 334974 - DNA, 75 bp, synthetic construct
  source 1..75: mol_type = other DNA
cgcttaaagacatactcaagcaggaacaagggctgctgtcgcaagcagaagcaaaagccacgaaaatcagggaaa

SEQ ID NO: 334975 - DNA, 75 bp, synthetic construct
  source 1..75: mol_type = other DNA
cagtaattgacctgcaccgggcgcagatacgtgcaaaagtaccgcgtcgttggcgggataaagatcttattggac

SEQ ID NO: 334976 - DNA, 75 bp, synthetic construct
  source 1..75: mol_type = other DNA
atacaagatcagggagccgctgctgccaaatatggtgcagaggatacatggaatttagctagagagatcgggaga

SEQ ID NO: 334977 - DNA, 75 bp, synthetic construct
  source 1..75: mol_type = other DNA
cgaacatcgccggctatcgcgccattgttgaggcggcgcatgagtttgggcgtttctttaccgggcaaatcaccg

SEQ ID NO: 334978 - DNA, 75 bp, synthetic construct
  source 1..75: mol_type = other DNA
aagtcgggcagtgtgattgtcgatctggcagcacaaaacggcggtaactgtgaatacaccgtgccggggcaaatc

SEQ ID NO: 334979 - DNA, 75 bp, synthetic construct
  source 1..75: mol_type = other DNA
aagcgttgcgccgaaagagtttcttgggcacttcaccgttttcgcgctggcctgcgttgtcggttattacgtggt

SEQ ID NO: 334980 - DNA, 75 bp, synthetic construct
  source 1..75: mol_type = other DNA
atgagtgcacgtggtatcaacaaggtcaccctcgtcgggcgtctgggcaatgatccggaagtccgttacatcccc

SEQ ID NO: 334981 - DNA, 75 bp, synthetic construct
  source 1..75: mol_type = other DNA
cggaattcctcgagctggattttaaagaggaagctggcagcggcgatggctatgccaaagtgatgtcggacgcgt

SEQ ID NO: 334982 - DNA, 75 bp, synthetic construct
  source 1..75: mol_type = other DNA
aaatgttgcaccaaaagagttcctcgggcatttcaccgtgttcgcgctggcgtgcgttgtgggctattacgtggt

SEQ ID NO: 334983 - DNA, 75 bp, synthetic construct
  source 1..75: mol_type = other DNA
cctgcgcccttctcgcctcatcgttgttattaaccatcggacggggtgccacgctaccgtttatgaccatttatt

SEQ ID NO: 334984 - DNA, 75 bp, synthetic construct
  source 1..75: mol_type = other DNA
ctgatgacagcaggcaccctctgtttcgtcatcggtctggtcggttttattttttccggcaacagcctgtatgtc

SEQ ID NO: 334985 - DNA, 75 bp, synthetic construct
  source 1..75: mol_type = other DNA
acctgaaaaagccgcagattatcgcagccctgaatgatgccggactgtccggtgccgcacaggacgcggagaaga

SEQ ID NO: 334986 - DNA, 75 bp, synthetic construct
  source 1..75: mol_type = other DNA
cgtaaatacgcgttgatggcgctggcaatcatccttttcggttggctggcaagcgttgcgccgaaagagtttctt

SEQ ID NO: 334987 - DNA, 75 bp, synthetic construct
  source 1..75: mol_type = other DNA
ggtcacttcaccgttttcgcgctggcgtgcgttgtcggttattacgtggtgtggaatgtctcccacgcgctgcat

SEQ ID NO: 334988 - DNA, 75 bp, synthetic construct
  source 1..75: mol_type = other DNA
ggtgatcattgctgcgtgggtgctgatgttaaaagggattcgtgcaagaccgtgggggcagcccgcgctttgttg

SEQ ID NO: 334989 - DNA, 75 bp, synthetic construct
  source 1..75: mol_type = other DNA
tcatcctcgatgcgctggcagaagaccgcatcaccacagagcactgtcaggcgctggcgctggagaacgacaccg

SEQ ID NO: 334990 - DNA, 75 bp, synthetic construct
  source 1..75: mol_type = other DNA
cttcagtggctgtatgccatcgatgtgctgattgaaacacagggcgaggtctgcctccttccacttcctggtgat

SEQ ID NO: 334991 - DNA, 75 bp, synthetic construct
  source 1..75: mol_type = other DNA
cttcagtggttgtatgccatcgatgtgctgattgaaacacagggcgaggtctgcctccttccgcttcctggcgat

SEQ ID NO: 334992 - DNA, 75 bp, synthetic construct
  source 1..75: mol_type = other DNA
cttcagtggatgtatgccatcgatgtgctgattgaaacacagggcgaggtctgcctccttccccttcctggtgat

SEQ ID NO: 334993 - DNA, 75 bp, synthetic construct
  source 1..75: mol_type = other DNA
tgacaaacagacaggggagatgcgggagcagactgaatggcatcgcgtggtgctgttcggcaagctcgcggaagt

SEQ ID NO: 334994 - DNA, 75 bp, synthetic construct
  source 1..75: mol_type = other DNA
cgcgacaaacagacgggggaaatgaaggaacagacggaatggcaccgcgtggtgctgttcggcaagctcgcggaa

SEQ ID NO: 334995 - DNA, 75 bp, synthetic construct
  source 1..75: mol_type = other DNA
cttcagtggctgtatgccatcgatgtgctgattgaaacacagggcgaggtctgcctccttcctcttcctggggat

SEQ ID NO: 334996 - DNA, 75 bp, synthetic construct
  source 1..75: mol_type = other DNA
ggcgaaggtcagagcgtggacgccggagatgcgtgccggaggtggagtggtggtgtcctggcgttatggaaacgt

SEQ ID NO: 334997 - DNA, 75 bp, synthetic construct
  source 1..75: mol_type = other DNA
aaacggagcgtaaatccagccgtaaaccgtcaaaagagcaggagactgccctgtctgccctgctggcgcagacgg

SEQ ID NO: 334998 - DNA, 75 bp, synthetic construct
  source 1..75: mol_type = other DNA
tgctcagtttctgcaccgcatgcagccttaacggtgtccagacccgcgagtgtggtcacacgtcacgcagtccgc

SEQ ID NO: 334999 - DNA, 75 bp, synthetic construct
  source 1..75: mol_type = other DNA
ctgctggaaaaactccaggctgtcgcagagttccttcgggaagccgaaggctggggatggtgtgccggacgcatg

SEQ ID NO: 335000 - DNA, 75 bp, synthetic construct
  source 1..75: mol_type = other DNA
aaccagcacaaatcagcctggaatgtaaacattattcgctgaccagcgatgcgccgtcagggaaggaaggtgccg

SEQ ID NO: 335001 - DNA, 75 bp, synthetic construct
  source 1..75: mol_type = other DNA
gtggcgctcgatgccgccctgctggaaaaactccaggttgttgcagagtcccttcgggaagcagaaggctgggaa

SEQ ID NO: 335002 - DNA, 75 bp, synthetic construct
  source 1..75: mol_type = other DNA
actaaattccgcttcgtgggggctgatgctttctcacctgacgaactgcgtactgatttgttcagcgatgacgag

SEQ ID NO: 335003 - DNA, 75 bp, synthetic construct
  source 1..75: mol_type = other DNA
atgtcagttacagagtctaagacaaaaacggagcgtaaatccagccgtaaatcgtcaaaagagcaggagactgcc

SEQ ID NO: 335004 - DNA, 75 bp, synthetic construct
  source 1..75: mol_type = other DNA
ccctgctggaaaaactccaggctgtcgcagagttccttcgggaagccgaaggctgggaatggtgcgccggacgca

SEQ ID NO: 335005 - DNA, 75 bp, synthetic construct
  source 1..75: mol_type = other DNA
tgcgtgaaattcctcccgcccggaaaaaaacagcgaccatgccgttctgcaagtcgccattcagagtcgtatcaa

SEQ ID NO: 335006 - DNA, 75 bp, synthetic construct
  source 1..75: mol_type = other DNA
cgcagcgaggatgatgcggctgacgacgctgaccgcacggaacaggtgctggagaaagcggccgtggaggaaatc

SEQ ID NO: 335007 - DNA, 75 bp, synthetic construct
  source 1..75: mol_type = other DNA
cgcagcgaggatgatgcggctgacgacgctgaccgcacggaacaggtgctggacaaagcggcggtggaggaaatc

SEQ ID NO: 335008 - DNA, 75 bp, synthetic construct
  source 1..75: mol_type = other DNA
cgcagcgaggatgatgcggctgacgacgctgaccgcacggaacaggtgcaggaaaaagcggctgtggaggaaatc

SEQ ID NO: 335009 - DNA, 75 bp, synthetic construct
  source 1..75: mol_type = other DNA
cgcgacgaaaaaagggagcgcgaaaacgaaaggccgtggacgtaaggctgcgcagccggagcctcagccgcaacc

SEQ ID NO: 335010 - DNA, 75 bp, synthetic construct
  source 1..75: mol_type = other DNA
catgacctggaaaccctgttctggcagtggggtgagcgttttccgtcactgtccgggatggaacgctggcagtgg

SEQ ID NO: 335011 - DNA, 75 bp, synthetic construct
  source 1..75: mol_type = other DNA
atgctgatgcttgcagatctggattacgaaaacttcattcagatcgcccaagcagatattgctgaaactttaggg

SEQ ID NO: 335012 - DNA, 75 bp, synthetic construct
  source 1..75: mol_type = other DNA
agaagaccgcatcaccacagagcactgtcaggcgctggcgctggagaacgacaccgcgcgtcaggtgcaggtgtt

SEQ ID NO: 335013 - DNA, 75 bp, synthetic construct
  source 1..75: mol_type = other DNA
tgaaagacaaccgctgggtgcctggctggatgtatgcaccacgtccacagacagataccactgaacgcaccgata

SEQ ID NO: 335014 - DNA, 75 bp, synthetic construct
  source 1..75: mol_type = other DNA
ccggagccggaagcggtgctgacggaggcagaagaagaacgcctgaacgaactgatggcacgttacgacgcgctg

SEQ ID NO: 335015 - DNA, 75 bp, synthetic construct
  source 1..75: mol_type = other DNA
cgcagcgaggatgatgcggctgacgacgctgaccgcacggaacaggtgccggataaagcggcggtggaggaaatc

SEQ ID NO: 335016 - DNA, 75 bp, synthetic construct
  source 1..75: mol_type = other DNA
aaccagggctttggcatgctggcgatggagggtggcacggtcatcaaccagggcgaaataaatctgctctcagat

SEQ ID NO: 335017 - DNA, 75 bp, synthetic construct
  source 1..75: mol_type = other DNA
tagatatcgccatgtttggtcgtatgctggcgaataaacccgaatttaatgttgaagccgcctgccaggtcgcgc

SEQ ID NO: 335018 - DNA, 75 bp, synthetic construct
  source 1..75: mol_type = other DNA
ggatgcagcgaaggacgccggagaaccggactgctccgccactgataccgacaccgtaaaccccaccgccgaagc

SEQ ID NO: 335019 - DNA, 75 bp, synthetic construct
  source 1..75: mol_type = other DNA
tgacgacgttcctgtcactcagtcaggaggtgctgttatccctgctcagtttctgcaccgcgtgcagcatccacg

SEQ ID NO: 335020 - DNA, 75 bp, synthetic construct
  source 1..75: mol_type = other DNA
aagccgaaggctgggaatggtgcgccggacgtatggagcctgtcggtttctgccgtgaggatgccggaacatacc

SEQ ID NO: 335021 - DNA, 75 bp, synthetic construct
  source 1..75: mol_type = other DNA
ttatgacgttcacaaccttgacagcagccgttcgattgcatttagcaacacaaacaaaacggctgataccgacgt

SEQ ID NO: 335022 - DNA, 75 bp, synthetic construct
  source 1..75: mol_type = other DNA
atatatgtagttgcaccagcacccaatttatttgatgtgaatggtgtgttaggacggtatagtccatatcccagt

SEQ ID NO: 335023 - DNA, 75 bp, synthetic construct
  source 1..75: mol_type = other DNA
ccgcattcctggctttgatggcagaaaaagcccgtcttgccgccctgctgccggagggatgggcacgggacatga

SEQ ID NO: 335024 - DNA, 75 bp, synthetic construct
  source 1..75: mol_type = other DNA
cgcagcgaggatgatgcggctgacgacgctgaccgcacggaacaggtgcgggataaagcggccgtggaggaaatc

SEQ ID NO: 335025 - DNA, 75 bp, synthetic construct
  source 1..75: mol_type = other DNA
aacggagtgcaggcccgcgaatatggccgcacttcacgcagccccctcgatgcactggaaacggcgctggacttt

SEQ ID NO: 335026 - DNA, 75 bp, synthetic construct
  source 1..75: mol_type = other DNA
cttccgaacgcacgctggcagtccaggcggcgcttatgcaacagccggacaaatccctggcactgctggcatgga

SEQ ID NO: 335027 - DNA, 75 bp, synthetic construct
  source 1..75: mol_type = other DNA
tgtgaggaatctgacctgctggaagcagaaatgaagctgattgactgcatggcgaaggtcagggcgtggacgccg

SEQ ID NO: 335028 - DNA, 75 bp, synthetic construct
  source 1..75: mol_type = other DNA
cagacgggcggagggctggtgaattatccgcgattactgagcagtatggataatcctttttcacagacttgtcag

SEQ ID NO: 335029 - DNA, 75 bp, synthetic construct
  source 1..75: mol_type = other DNA
cttcaatgtctgaaattgtcagggacctatcacgactgggctggacagatgaacgaattggaacagaggctgggc

SEQ ID NO: 335030 - DNA, 75 bp, synthetic construct
  source 1..75: mol_type = other DNA
cgcgccagggggaaacaccagataacgtcaatgtctgaaattgtcagggacctttcccggctgggctggacagat

SEQ ID NO: 335031 - DNA, 75 bp, synthetic construct
  source 1..75: mol_type = other DNA
cgcgccagggggaaacaccagataacgtcaatgtctgaaattgtcagggacctttcccgtctgggctggactgat

SEQ ID NO: 335032 - DNA, 75 bp, synthetic construct
  source 1..75: mol_type = other DNA
cttcaatgtctgaaattgtcagggacctttcacggctgggctggacagatgatcgaattggaacagaggctgggc

SEQ ID NO: 335033 - DNA, 75 bp, synthetic construct
  source 1..75: mol_type = other DNA
cttcaatgtctgaaattgtcagggacctatcacggctgggctggacagatgagcgaattggaacagaggctgggc

SEQ ID NO: 335034 - DNA, 75 bp, synthetic construct
  source 1..75: mol_type = other DNA
cttcaatgtctgaaattgtcagggacctatcacgcctgggctggacagatgaccgaattggaacagaggctgggc

SEQ ID NO: 335035 - DNA, 75 bp, synthetic construct
  source 1..75: mol_type = other DNA
tgtcagcttctggggcgagaactgcccgatgatggaacaggtgatcgcgaacattgcggcgctgcgtgactactg

SEQ ID NO: 335036 - DNA, 75 bp, synthetic construct
  source 1..75: mol_type = other DNA
ttgaattttggccacgtaagcctgcattgggaacggatacttttcgctatcatgttttacgttttgaatctgtcg

SEQ ID NO: 335037 - DNA, 75 bp, synthetic construct
  source 1..75: mol_type = other DNA
cggaaagaaagggacaggcatcacgtattgccgcaaccatacggcataaccgtgccaggggaaaacaccagataa

SEQ ID NO: 335038 - DNA, 75 bp, synthetic construct
  source 1..75: mol_type = other DNA
cgcgccagggggaaacaccagataacgtcaatgtctgaaattgtcagggacctttcccgactgggctggacggat

SEQ ID NO: 335039 - DNA, 75 bp, synthetic construct
  source 1..75: mol_type = other DNA
cgagccagggggaaacaccagataacgtcaatgtctgaaattgtcagggacctttcccgcctgggctggaccgat

SEQ ID NO: 335040 - DNA, 75 bp, synthetic construct
  source 1..75: mol_type = other DNA
atggggcattctctgaccctggagcaggtgactgaactggtacgtggctatcttttacaacagggcacggtggcg

SEQ ID NO: 335041 - DNA, 75 bp, synthetic construct
  source 1..75: mol_type = other DNA
cttcaatgtctgaaattgtcagggacctctcacgcctgggctggacagatgaacgaattggaacagaggctgggc

SEQ ID NO: 335042 - DNA, 75 bp, synthetic construct
  source 1..75: mol_type = other DNA
ttcgaatacggtcgtgttcgtgcaatgcgtaacgaactgggtcaggaagtactggaagcaggtccgtccattccg

SEQ ID NO: 335043 - DNA, 75 bp, synthetic construct
  source 1..75: mol_type = other DNA
cggcattctgccggaagagtggggcggtgaaagccagttcgtacacgtatctgcaaaagcaggtacaggtatcga

SEQ ID NO: 335044 - DNA, 75 bp, synthetic construct
  source 1..75: mol_type = other DNA
cgttggcgaactggcgaacaagatggcggttaaaggctctcaggttatcaaagcgatgatgaaactgggtgcaat

SEQ ID NO: 335045 - DNA, 75 bp, synthetic construct
  source 1..75: mol_type = other DNA
gaaaggggcaggccacacgtatggcggccaccatccggcataaccgggccagagggaaacaccagataacctcaa

SEQ ID NO: 335046 - DNA, 75 bp, synthetic construct
  source 1..75: mol_type = other DNA
ttcatgccgattacacgctggtagtggataccgcattaaccgggcggcgactgggcgcgcagcatatgctggtgg

SEQ ID NO: 335047 - DNA, 75 bp, synthetic construct
  source 1..75: mol_type = other DNA
caggaaaccgcacagctggttgctgaagagatgggccacaaagttatcctacgtcgtgaaaacgagctggaagaa

SEQ ID NO: 335048 - DNA, 75 bp, synthetic construct
  source 1..75: mol_type = other DNA
tctgaaggcagacgttcagggttccgtggaagcgatctccgattccttgctgaaactgtctactgacgaagttaa

SEQ ID NO: 335049 - DNA, 75 bp, synthetic construct
  source 1..75: mol_type = other DNA
tgtgtcagaggagaagaaccattatctggtggtggatggttttcatcgtcagttactgggcagagaagcaggtac

SEQ ID NO: 335050 - DNA, 75 bp, synthetic construct
  source 1..75: mol_type = other DNA
cttcaatgtctgaaattgtcagggacctgtcacggctgggctggacagatgaacgaattggaacagaggctgggc

SEQ ID NO: 335051 - DNA, 75 bp, synthetic construct
  source 1..75: mol_type = other DNA
ctggttggcttcaacgtacgtgctgatgcctctgcacgtaaagtgattgaagcggaaagcctggatctgcgttac

SEQ ID NO: 335052 - DNA, 75 bp, synthetic construct
  source 1..75: mol_type = other DNA
cgtaaactcgaagaagaagcacgtcgcgttgctgaagaagcacgtcgtatggcggaagaaaacaaatggactgat

SEQ ID NO: 335053 - DNA, 75 bp, synthetic construct
  source 1..75: mol_type = other DNA
caagggcgatatcgttctgtgtggcttcgaatacggtcgtgttcgtgcaatgcgtaacgaactgggtcaggaagt

SEQ ID NO: 335054 - DNA, 75 bp, synthetic construct
  source 1..75: mol_type = other DNA
accgggcgcggtgacgttctaaaagttattcggcttgtgaaccataacgccgacgctgggggctatcagggactt

SEQ ID NO: 335055 - DNA, 75 bp, synthetic construct
  source 1..75: mol_type = other DNA
aggaagacgctggatgagctggccggaattattcagaccggtcgttacagcaggcagttacctgaaggtgcggtt

SEQ ID NO: 335056 - DNA, 75 bp, synthetic construct
  source 1..75: mol_type = other DNA
tgtcaacgttatggagaacctgctgccttaccgggaactggggatacccctgccgaaagtacgcacgctggttaa

SEQ ID NO: 335057 - DNA, 75 bp, synthetic construct
  source 1..75: mol_type = other DNA
caacaaaaggcggagccggaaagtcaaccaaagccagcaatattgcgggtttttgtgctgatgcagggttaaaaa

SEQ ID NO: 335058 - DNA, 75 bp, synthetic construct
  source 1..75: mol_type = other DNA
cagcctgagttcacagataaaacactctccaggaaacccggggcggttcagcatgatccggtaaacacgtttggc

SEQ ID NO: 335059 - DNA, 75 bp, synthetic construct
  source 1..75: mol_type = other DNA
atcgttaccgagaactggccgatgaaggcggtgtggatgcgctgattaatcgtagtcgcattggccccggtttgt

SEQ ID NO: 335060 - DNA, 75 bp, synthetic construct
  source 1..75: mol_type = other DNA
actgttgccgaccgcgatgctccacgccgcagacggccgtctgcgcctgcgtaacatacttcagcatcctttctt

SEQ ID NO: 335061 - DNA, 75 bp, synthetic construct
  source 1..75: mol_type = other DNA
actgttgccgaccgcgatgctccacgctgcagacggccgtctgcgcttgcgtaacatacttcagcatcctttctt

SEQ ID NO: 335062 - DNA, 75 bp, synthetic construct
  source 1..75: mol_type = other DNA
tgccggcaatacatattcttgctaattgtgttgaagatacggtgttagatcgtgcaacactgactgaattaactc

SEQ ID NO: 335063 - DNA, 75 bp, synthetic construct
  source 1..75: mol_type = other DNA
gcttgtttgagttgttaatgcaactgaccgatctttcccggccggataccatcatatcacgctccgttatcccta

SEQ ID NO: 335064 - DNA, 75 bp, synthetic construct
  source 1..75: mol_type = other DNA
ccctaccgtgaacttgggatacccctgcctaaagtacgcacgctggttaactgcatggactataccgcgctggcc

SEQ ID NO: 335065 - DNA, 75 bp, synthetic construct
  source 1..75: mol_type = other DNA
ccatgaacagctgaaaacggccatgcttcatgcgccggatggtcgcctccgtctgcgtaatgtgctccagcatcc

SEQ ID NO: 335066 - DNA, 75 bp, synthetic construct
  source 1..75: mol_type = other DNA
cggccgcagccgtcatcatgcacgacctcgcgtgtgaactgttccctgagtggcagagccatttcagtgatgttc

SEQ ID NO: 335067 - DNA, 75 bp, synthetic construct
  source 1..75: mol_type = other DNA
cccgtcagagcaccatcgctgattactttctttcacagccactctgcctgtatgtgcccgtttcgatggcggtac

SEQ ID NO: 335068 - DNA, 75 bp, synthetic construct
  source 1..75: mol_type = other DNA
ttatcaacacactcaagtgtgatattaaatgctttacctcctgatgcacgaaaattacttattagagatcagact

SEQ ID NO: 335069 - DNA, 75 bp, synthetic construct
  source 1..75: mol_type = other DNA
cggttttccgccaccgtgcgtggctggttccgggatgatggccggttatgggatgtcaatctgctgaccggtgtt

SEQ ID NO: 335070 - DNA, 75 bp, synthetic construct
  source 1..75: mol_type = other DNA
cctggaaaactcagaaaccgtggcggatgcgctgacccgtgcggcccggcatcgtggggtgctggtgaccagtaa

SEQ ID NO: 335071 - DNA, 75 bp, synthetic construct
  source 1..75: mol_type = other DNA
cgacgctggcggctatcagggactttctcagcaggaaattgccgacattctgaaactctacccggacgcgtttaa

SEQ ID NO: 335072 - DNA, 75 bp, synthetic construct
  source 1..75: mol_type = other DNA
aggatgaagtgctgagactgaaacagattagtgggctgacggagctgtttaaggaagaggacttcagtccggcat

SEQ ID NO: 335073 - DNA, 75 bp, synthetic construct
  source 1..75: mol_type = other DNA
tgtgtgctctgggtcagggctgatgatgttattgcaaatgattataatccgaacgtcatggcccccccggagaag

SEQ ID NO: 335074 - DNA, 75 bp, synthetic construct
  source 1..75: mol_type = other DNA
tggcgtatttcaggataccgtaattatatcagtgaaatgattaactataatcctcatacccttcgttattacaac

SEQ ID NO: 335075 - DNA, 75 bp, synthetic construct
  source 1..75: mol_type = other DNA
tgtcaaatagcgccagaggatatattcctccagaggagtgggatgagggtattcctgctttccttctgaattata

SEQ ID NO: 335076 - DNA, 75 bp, synthetic construct
  source 1..75: mol_type = other DNA
ctctaaccatgcactggttttaattgatggtgtacgtctgaatttagcaggtgttagcggatcggctgacctgag

SEQ ID NO: 335077 - DNA, 75 bp, synthetic construct
  source 1..75: mol_type = other DNA
atcgcggggtgctggtgaccagtaatgctgacggcgatctggtgttcacccaggcaggaagccagcagacggaca

SEQ ID NO: 335078 - DNA, 75 bp, synthetic construct
  source 1..75: mol_type = other DNA
ctcatcacatacagttaaattaggcggtgtgagcttgtgggatcttgcggttgcatatccggtcacctctcatct

SEQ ID NO: 335079 - DNA, 75 bp, synthetic construct
  source 1..75: mol_type = other DNA
tctggttgactgctctgctgttcaccagggaagtcagtggcggaaccggacgctggcccagatagccgctgattt

SEQ ID NO: 335080 - DNA, 75 bp, synthetic construct
  source 1..75: mol_type = other DNA
gatgaacgcggtattatcatcgtctttaccggcaatggaaaaggcaaaaccaccgcggcatttggtacggcaact

SEQ ID NO: 335081 - DNA, 75 bp, synthetic construct
  source 1..75: mol_type = other DNA
cgggtcgtggttgtcatcgggatattcttgaactggcggatacggtgagtgaattacgccccgtgaaacatgcgt

SEQ ID NO: 335082 - DNA, 75 bp, synthetic construct
  source 1..75: mol_type = other DNA
agcatgggtgccaacattgcgaaaagcaggtattcgttacagaaacccatatcaaaccaggcatacattcgccac

SEQ ID NO: 335083 - DNA, 75 bp, synthetic construct
  source 1..75: mol_type = other DNA
ttatgaaaaatgcctgtcggcgctgtcagcactgcataaatttcatgtgtcagaactgacacctgcagtactcaa

SEQ ID NO: 335084 - DNA, 75 bp, synthetic construct
  source 1..75: mol_type = other DNA
ccgcaaaaaagcctgggtaccgacccttaaaaaggctggagtacgctatcgcaatccgtaccagacacgccacac

SEQ ID NO: 335085 - DNA, 75 bp, synthetic construct
  source 1..75: mol_type = other DNA
aaagtacaactgaacaacgaagcactggcagctcttcaggcacaaaagccctacacggcgctaaaaagcgacttc

SEQ ID NO: 335086 - DNA, 75 bp, synthetic construct
  source 1..75: mol_type = other DNA
caggtacccggaatgggaaaacctgttccgctttgctttcaataccggtctgcggagctccgaactgtgcgcgct

SEQ ID NO: 335087 - DNA, 75 bp, synthetic construct
  source 1..75: mol_type = other DNA
tgaaaaagagtttgtaaaacgcctcaagctgatccgcgctgatatccatagccagcttgaaagcgttggatgtga

SEQ ID NO: 335088 - DNA, 75 bp, synthetic construct
  source 1..75: mol_type = other DNA
acggcatggcccgcgagatcgccgaacgagttagttatctgcgcaatgaatgcccgtacccgtgccagccagcaa

SEQ ID NO: 335089 - DNA, 75 bp, synthetic construct
  source 1..75: mol_type = other DNA
gctggtatccggtaccgtaacccatatcagaccaggcatacattcgccaccagccatatcagccgtggtgcgaac

SEQ ID NO: 335090 - DNA, 75 bp, synthetic construct
  source 1..75: mol_type = other DNA
cgcgctaccaaagtgataagtcagaagcagaaagcagctacgtggttgatccgctatcaccagcagaagttgatg

SEQ ID NO: 335091 - DNA, 75 bp, synthetic construct
  source 1..75: mol_type = other DNA
caccctcaacgattggtggttataaaaaatgccgtagtgcgttagcctcactccacatttgccctgcaagtgaat

SEQ ID NO: 335092 - DNA, 75 bp, synthetic construct
  source 1..75: mol_type = other DNA
attcgctacacggcatatcagccagggggcaaatttattctggcttgccggtcaaatgggtcacaaaggaccaga

SEQ ID NO: 335093 - DNA, 75 bp, synthetic construct
  source 1..75: mol_type = other DNA
ctgatcatcgctcactccaccgtgtttgaaccggtacgtaaagaagttaaaggctatatggttgattcattaggc

SEQ ID NO: 335094 - DNA, 75 bp, synthetic construct
  source 1..75: mol_type = other DNA
attgtcagccagctggcttttgctgacggtgatgttctggttaccggtgggatgagcgagccggagaaagtatcg

SEQ ID NO: 335095 - DNA, 75 bp, synthetic construct
  source 1..75: mol_type = other DNA
atcaatggcgatactttttactacatcctgtatggcatgctgggccgcgccattgggatgataaacacacaacat

SEQ ID NO: 335096 - DNA, 75 bp, synthetic construct
  source 1..75: mol_type = other DNA
ttgaaccggtacgtaaagaagttaaaggctatgtggttgatccattaggcaaacatcacttcgaaaacgtctcta

SEQ ID NO: 335097 - DNA, 75 bp, synthetic construct
  source 1..75: mol_type = other DNA
tgatggaaatgccggggctgaacgtcggctacctctcgtataacgtgcagaaaaaaccgctggatgacgtgaaag

SEQ ID NO: 335098 - DNA, 75 bp, synthetic construct
  source 1..75: mol_type = other DNA
accacctatgacgcctcttccgtaccgctttataaccgcctggttgaatttaaaatcggcaccactgaagtgatc

SEQ ID NO: 335099 - DNA, 75 bp, synthetic construct
  source 1..75: mol_type = other DNA
acagacagatattgataatcagcgtatcggactgtggggcacatcgctgggtggctgtcatattttcagtgcagc

SEQ ID NO: 335100 - DNA, 75 bp, synthetic construct
  source 1..75: mol_type = other DNA
gaggccggattcgcaacgattacttttgattatcgtggattcggtgagagtgaaggtgagcggggccgcctggtt

SEQ ID NO: 335101 - DNA, 75 bp, synthetic construct
  source 1..75: mol_type = other DNA
aacagccgaacgcgatcaaaaatacccttaccgggcgcatcagccacggtcaggttgatttgagcgagctgggac

SEQ ID NO: 335102 - DNA, 75 bp, synthetic construct
  source 1..75: mol_type = other DNA
atgcagcccaaaatttactggattgataacctgcgagggatagcttgcttaatggtggtaatgattcacaccaca

SEQ ID NO: 335103 - DNA, 75 bp, synthetic construct
  source 1..75: mol_type = other DNA
tgggctgatatcccgtcattctctgggtatatacgggttccacgcgttgattatccatgcactgcgcaccagtgg

SEQ ID NO: 335104 - DNA, 75 bp, synthetic construct
  source 1..75: mol_type = other DNA
ttatccatgcgctgcgtacccgggggattgagcttaaaaactggccaatactcgatattatttggatcttttgcg

SEQ ID NO: 335105 - DNA, 75 bp, synthetic construct
  source 1..75: mol_type = other DNA
ttgattgccggaaaattgaaagacggaactagtcttcacgaatgttctgccgtcgaaaaagaattcgtcaagaaa

SEQ ID NO: 335106 - DNA, 75 bp, synthetic construct
  source 1..75: mol_type = other DNA
atgaaagaacagaaaaatttctttgaacggtataaaccggtgtttgaaatcgtttgtcgaatcctggggaacggc

SEQ ID NO: 335107 - DNA, 75 bp, synthetic construct
  source 1..75: mol_type = other DNA
tcgtaaatactccatcattattcgtctggagcgtgaaagattttttatagttggtagcgttgatagtcttgtatg

SEQ ID NO: 335108 - DNA, 75 bp, synthetic construct
  source 1..75: mol_type = other DNA
tcgctgttgagggtgccacctgcgatggtcggacgctggagcgccagcacatcgaacagatggctaaacgcttca

SEQ ID NO: 335109 - DNA, 75 bp, synthetic construct
  source 1..75: mol_type = other DNA
atgaaatcacgcttaccagcgagcaggatgccgttctgcgctatggtcaggtggaagtaccgctgccgccggggg

SEQ ID NO: 335110 - DNA, 75 bp, synthetic construct
  source 1..75: mol_type = other DNA
tgaaaagaaaatcctgacggatgctttagataatgtagatatggcgcgagaatatgaacaacagttacagcgaaa

SEQ ID NO: 335111 - DNA, 75 bp, synthetic construct
  source 1..75: mol_type = other DNA
cgtttgtcgaatcctggggaacggctggcgtgtaaacctgctcgatgattgccagtacaggataaagctaacctc

SEQ ID NO: 335112 - DNA, 75 bp, synthetic construct
  source 1..75: mol_type = other DNA
cgacataaccgggccaggggcaaacatcagataacctcaatgtctgatattgtcagggatctttcacgcctgggc

SEQ ID NO: 335113 - DNA, 75 bp, synthetic construct
  source 1..75: mol_type = other DNA
tggaccaggatgaagtgctcaggctgaaacagattagcgggctgacggaattgtttcaggaagaggatttcagcc

SEQ ID NO: 335114 - DNA, 75 bp, synthetic construct
  source 1..75: mol_type = other DNA
gaaagggacaggcctctcgtattgctgcgaccatccgacataaccgggccagggggaaacaccagataacctcaa

SEQ ID NO: 335115 - DNA, 75 bp, synthetic construct
  source 1..75: mol_type = other DNA
tggaccaggatgaagtgctgaggctgaaacagattagcgggctgacagagctgtttcaggaagcggatttcagta

SEQ ID NO: 335116 - DNA, 75 bp, synthetic construct
  source 1..75: mol_type = other DNA
gggaaaacgcctgaagggctggttgccagtgacctgtattaatccggaaagaaagggacaggcctcacgtattgc

SEQ ID NO: 335117 - DNA, 75 bp, synthetic construct
  source 1..75: mol_type = other DNA
gaaagggacaggcatcacgtattgctgcgaccattcgacataaccgggccaggggaaaacaccagataacctcaa

SEQ ID NO: 335118 - DNA, 75 bp, synthetic construct
  source 1..75: mol_type = other DNA
ctcagtcaacaagcccaacaccgcgaaacagcaggggcagttgctggaaaaagcgcgtaatgaaatgagcgagtt

SEQ ID NO: 335119 - DNA, 75 bp, synthetic construct
  source 1..75: mol_type = other DNA
taaattaagatttgataatgtcactaaaggctataagaaagcacaaagtgaagtagataagattgctcaacagaa

SEQ ID NO: 335120 - DNA, 75 bp, synthetic construct
  source 1..75: mol_type = other DNA
aggcgctggcaccggaacaactaagccagataacagcaattccctggttaacactattaaaagctggtttatgcc

SEQ ID NO: 335121 - DNA, 75 bp, synthetic construct
  source 1..75: mol_type = other DNA
gctttatgaaatctcttgatccgaaagtgattgaagagtttaaaaagagcatggttgcaatgctgccaatgttta

SEQ ID NO: 335122 - DNA, 75 bp, synthetic construct
  source 1..75: mol_type = other DNA
acgttccgttaaagatgtacaagaaagtattaatcagcaaaaagcctctggaaaatggctaacagaaacacagca

SEQ ID NO: 335123 - DNA, 75 bp, synthetic construct
  source 1..75: mol_type = other DNA
agcagcacgtagagagaaagcaaacttaaagctccttgatgtttcaagctctatcactgcaatgcaccgcctttc

SEQ ID NO: 335124 - DNA, 75 bp, synthetic construct
  source 1..75: mol_type = other DNA
gtagcattcgtagacggctttatgaaatctcttgatccaaaagtaacggaagagtttttgaaaaacctttctaat

SEQ ID NO: 335125 - DNA, 75 bp, synthetic construct
  source 1..75: mol_type = other DNA
gacaaagttgaagccgaacagtcgctgatcaccgtagaaggcgataaagcctctatggaagttccgtctccgcag

SEQ ID NO: 335126 - DNA, 75 bp, synthetic construct
  source 1..75: mol_type = other DNA
cgtgccgtttcctgtttaccccaagaggaacgacaggtgatactttctcgactggcgtttatcgatagctggctg

SEQ ID NO: 335127 - DNA, 75 bp, synthetic construct
  source 1..75: mol_type = other DNA
gggcgcatgggctaaacaaaaggcgactggcgggggcgaatactggcgttgggttggtcagggggtgccagacat

SEQ ID NO: 335128 - DNA, 75 bp, synthetic construct
  source 1..75: mol_type = other DNA
gaacgccggtgtcgtacccgccatcgctttcgcgcagaacaaccgtggtgaagtgcgcttcgagtcgggccatgg

SEQ ID NO: 335129 - DNA, 75 bp, synthetic construct
  source 1..75: mol_type = other DNA
ctgattatggtcttcgaagtcgcgggtgaagcaggcgcggcagctccggcggctaaacaggaagcagctccggca

SEQ ID NO: 335130 - DNA, 75 bp, synthetic construct
  source 1..75: mol_type = other DNA
gaacagtcgctgatcaccgtagaaggcgacaaggcttctatggaagttccggctccgtttgctggcaccgtgaaa

SEQ ID NO: 335131 - DNA, 75 bp, synthetic construct
  source 1..75: mol_type = other DNA
ggttcgcgctgttcctcaactccggggatattttgcatgcggacgcggcacattttatccgccagctaaaaatgc

SEQ ID NO: 335132 - DNA, 75 bp, synthetic construct
  source 1..75: mol_type = other DNA
tgtccgttaatgatggccagtccggtgtgcacacgctcgtggtgtttgctgatgagtggttcatcaatccgcagc

SEQ ID NO: 335133 - DNA, 75 bp, synthetic construct
  source 1..75: mol_type = other DNA
aattttgagaacgaaaatgcccgttcaacagaaaatataacacagactatccagcgccttgaccggtacgaacgg

SEQ ID NO: 335134 - DNA, 75 bp, synthetic construct
  source 1..75: mol_type = other DNA
taaccgacagcgggcagcgaaccggtacaggcagtgcgctgatggccatgaaggatgccggggtgaacacgtatc

SEQ ID NO: 335135 - DNA, 75 bp, synthetic construct
  source 1..75: mol_type = other DNA
ccgggcagtaccgttatcgtcgaccagggcgaaaaactctccctgaaagagacgttaaccctgctggatggtgcc

SEQ ID NO: 335136 - DNA, 75 bp, synthetic construct
  source 1..75: mol_type = other DNA
cgatgtcgttgtcgttctggcgcattccgggctatctgccgatccgtataaagtgatggcggaaaactcagttta

SEQ ID NO: 335137 - DNA, 75 bp, synthetic construct
  source 1..75: mol_type = other DNA
tgggttgatccctggcaggatcggggagctttttgataatgaagctatctgccggcgcgttatgggatttcagaa

SEQ ID NO: 335138 - DNA, 75 bp, synthetic construct
  source 1..75: mol_type = other DNA
gctatcctgccgaagtccagggatgcgatgccaaaacgctggatcacattggtgccagaaaagtcgccagctatc

SEQ ID NO: 335139 - DNA, 75 bp, synthetic construct
  source 1..75: mol_type = other DNA
cggtgagttgcagaaagaaggctattctctcagtaatattcagaagcgtgcattagaacgttttgctctgtgctg

SEQ ID NO: 335140 - DNA, 75 bp, synthetic construct
  source 1..75: mol_type = other DNA
gaactcgatacaaagcagcaggcttttctggagaaaaagctggcgctgacggaagaatttgccgaaatagagcgt

SEQ ID NO: 335141 - DNA, 75 bp, synthetic construct
  source 1..75: mol_type = other DNA
acagaagcgctaaaccgattgtctgaactgtgggtggaagagtatcaggaaattgaagccgtgctggctgccatc

SEQ ID NO: 335142 - DNA, 75 bp, synthetic construct
  source 1..75: mol_type = other DNA
cgggaaacggttctgcataagccagtgtattttggccagaaagatctgtccaataccggtgccggatttgaacac

SEQ ID NO: 335143 - DNA, 75 bp, synthetic construct
  source 1..75: mol_type = other DNA
agatgcgatgacggttgttgtgccggggcgggctgaaccggccaccctgcctgtggctgattcaccattcacggc

SEQ ID NO: 335144 - DNA, 75 bp, synthetic construct
  source 1..75: mol_type = other DNA
ggtggcggctcaagtggcggaggctcaggcggcgggtttagcggcggtggcggttcttctggaggtggcggcgcg

SEQ ID NO: 335145 - DNA, 75 bp, synthetic construct
  source 1..75: mol_type = other DNA
attccattatcggtcgctgtaattattttactggcagtactttcgtattttattatttttaccgatccatcaaat

SEQ ID NO: 335146 - DNA, 75 bp, synthetic construct
  source 1..75: mol_type = other DNA
ggatggtattcctctatgttgccgagccaggaccatggacgaatttaatcgttgcctgcggtatgctcacgcctt

SEQ ID NO: 335147 - DNA, 75 bp, synthetic construct
  source 1..75: mol_type = other DNA
acccaaccgctgcgtaaagagatcgcccgtctggaaaaagagatggaaaagctgaacgcacagctggcgcaggcg

SEQ ID NO: 335148 - DNA, 75 bp, synthetic construct
  source 1..75: mol_type = other DNA
taaccgtatggtgtggtttgaagacaagcaaatcctctcggaaatcgtaatcatgcgcggcgtcgagccggcgcg

SEQ ID NO: 335149 - DNA, 75 bp, synthetic construct
  source 1..75: mol_type = other DNA
ggttcttcttcatcctcttccggtggaggctcaagtggcggcggatttagcggcgggggcggttcttctggcggt

SEQ ID NO: 335150 - DNA, 75 bp, synthetic construct
  source 1..75: mol_type = other DNA
ttctgggcagaattatcctggcatttacgccaacgtactacctcaaagacgaaagccttatataacaaaagctga

SEQ ID NO: 335151 - DNA, 75 bp, synthetic construct
  source 1..75: mol_type = other DNA
gtctgaattttccatgggtggggtatctaccaccaataatatggaattgtgtgctgacgcgaaaaaagtccaacg

SEQ ID NO: 335152 - DNA, 75 bp, synthetic construct
  source 1..75: mol_type = other DNA
tgtctacaggcattattctgattgtaaaacgcgcaatatgggcgtcgagttgatgactatcaaccatgctggaga

SEQ ID NO: 335153 - DNA, 75 bp, synthetic construct
  source 1..75: mol_type = other DNA
ctattatcagcaccccttcggttgctatggataatatgtttggcgacagtattatctctgtcaaagacggtaccg

SEQ ID NO: 335154 - DNA, 75 bp, synthetic construct
  source 1..75: mol_type = other DNA
atgcgctatttcatactaatgttcacattcgtgtgttcctttgttgcagcccaaccaactattgtcccatcatta

SEQ ID NO: 335155 - DNA, 75 bp, synthetic construct
  source 1..75: mol_type = other DNA
cattaatcgcagatgagtttacgacatatggtttggctccagatgcagatattttgcctttaactccctttgatt

SEQ ID NO: 335156 - DNA, 75 bp, synthetic construct
  source 1..75: mol_type = other DNA
tgattattattccgaggatctcattaattatcttgataaaggttttgataatgctcaaacaaaaatgattacttt

SEQ ID NO: 335157 - DNA, 75 bp, synthetic construct
  source 1..75: mol_type = other DNA
ggataatctggaggccacagggttgtatcaggtgccgttgtcatcagcacaaccgggcgatgtgctgctgtgctg

SEQ ID NO: 335158 - DNA, 75 bp, synthetic construct
  source 1..75: mol_type = other DNA
agatcaaccgtgttgagtaccttcagctgcaggaagaatttgcacgcagagacgcagcaaaattccagccagaat

SEQ ID NO: 335159 - DNA, 75 bp, synthetic construct
  source 1..75: mol_type = other DNA
gtacctccagctgcaggaagatttcgcgcgtaaaaacgcggcaaaaggcggtaccgaaacggtcgatgacaccgg

SEQ ID NO: 335160 - DNA, 75 bp, synthetic construct
  source 1..75: mol_type = other DNA
aggccttgaacgctggcaaggaaaggcggtgtacctgaatttttggtctgcgggatgcggggggtgcctggcgga

SEQ ID NO: 335161 - DNA, 75 bp, synthetic construct
  source 1..75: mol_type = other DNA
gatgttttcttttcctttgcacctgagtatcgagaaaaaatcctccttagcttaacctctgcacaacgagcctca

SEQ ID NO: 335162 - DNA, 75 bp, synthetic construct
  source 1..75: mol_type = other DNA
atcctctactacatgaaactttaaaagctgaatactcttcgttatgcagtcacgtacatacagctactgtaaaag

SEQ ID NO: 335163 - DNA, 75 bp, synthetic construct
  source 1..75: mol_type = other DNA
tggttgccaaaggcgcacgctctaaacgctctactctgaaaggtgcattacagcctttcacccctctcttgctac

SEQ ID NO: 335164 - DNA, 75 bp, synthetic construct
  source 1..75: mol_type = other DNA
atgtctcatacaatccgtgataaacagaaacagaaacagaaacagaaactgaaagcgcgtgccagtaagattcag

SEQ ID NO: 335165 - DNA, 75 bp, synthetic construct
  source 1..75: mol_type = other DNA
gattcagggtcaggtcgtggcgctcaagaaaatgctcgacgagccgcacgaatgcgcagctgttctacaacagat

SEQ ID NO: 335166 - DNA, 75 bp, synthetic construct
  source 1..75: mol_type = other DNA
taaacgggtgttatggataccggttgaaggcgagcgcagcatcccgctggcgcagcgtcgcgtaggagcaccgtt

SEQ ID NO: 335167 - DNA, 75 bp, synthetic construct
  source 1..75: mol_type = other DNA
tacgcttcggcggtcgcggtgaagtcaaaacgctgcgcagtgccgaagctgtctcgctggcgctgccattaagtg

SEQ ID NO: 335168 - DNA, 75 bp, synthetic construct
  source 1..75: mol_type = other DNA
tgcgcgggaatttcctgacgcagacacattgcgcgccgcgaaacgctttacccgtatggcccttaagccttatct

SEQ ID NO: 335169 - DNA, 75 bp, synthetic construct
  source 1..75: mol_type = other DNA
cttaaagttacaagccaaaccaaagctacgaattggaaatcaacatcgagttatcacctcacacaaaccaaaggt

SEQ ID NO: 335170 - DNA, 75 bp, synthetic construct
  source 1..75: mol_type = other DNA
agcagtgtatctctgggggttagtgtccgtgggaaccttaacattgccgcgataaatgactgggggggagtacag

SEQ ID NO: 335171 - DNA, 75 bp, synthetic construct
  source 1..75: mol_type = other DNA
gcgcgttccggcggtctggttctatggtgcgacgctttctgcaatgcactttgtgcgtattctggataacgccat

SEQ ID NO: 335172 - DNA, 75 bp, synthetic construct
  source 1..75: mol_type = other DNA
tggttttatggtgcgacgctctcggcaatgcactttgtgcgtgttctggataacgccatcggaggtaaagcgtga

SEQ ID NO: 335173 - DNA, 75 bp, synthetic construct
  source 1..75: mol_type = other DNA
agctgattcatcgtccgatatctataaaggatgggcgtaaggaagcggagaaacagctgaagctggagcagcgtg

SEQ ID NO: 335174 - DNA, 75 bp, synthetic construct
  source 1..75: mol_type = other DNA
aaaacctatggaggtcaggtctggattgacaacacaaaccatggcgatggtgtttacatggtaccccagcctccg

SEQ ID NO: 335175 - DNA, 75 bp, synthetic construct
  source 1..75: mol_type = other DNA
tctaccgcccgaaaagtctgctggacggccgcaagggtgctgagaaaaaaattgaggtggttcaccggggcggaa

SEQ ID NO: 335176 - DNA, 75 bp, synthetic construct
  source 1..75: mol_type = other DNA
ctcgtttccggcatgatgcatcacgatattctgaccggaagcgcaaaatcttttgctgatttaaacgcgcaggtt

SEQ ID NO: 335177 - DNA, 75 bp, synthetic construct
  source 1..75: mol_type = other DNA
gcgcaaagtcttttgctgatttaaacgcgcaggttgagcaactcagcaagcgttgttcagaggcttttggctcat

SEQ ID NO: 335178 - DNA, 75 bp, synthetic construct
  source 1..75: mol_type = other DNA
ctttcagtttattctccacgagaaaaagagagctgaaagcggtaaaaacgccggtcaggaatggctggcggtggt

SEQ ID NO: 335179 - DNA, 75 bp, synthetic construct
  source 1..75: mol_type = other DNA
aacgtgaagcatgacggtaagaacatttcactcagtaataacgtgatgaaagaaatcgcacaacttaagccgttc

SEQ ID NO: 335180 - DNA, 75 bp, synthetic construct
  source 1..75: mol_type = other DNA
cctgatgaacgcgaatccggcgctgccgaaggaccgggagtcgctgttctggctgaacgtccaggaggtgccgcc

SEQ ID NO: 335181 - DNA, 75 bp, synthetic construct
  source 1..75: mol_type = other DNA
gacgccgtactacatggccattgttaacgtgaagcatgatggtaaggctgcctccctcagcgacagcgtgatgaa

SEQ ID NO: 335182 - DNA, 75 bp, synthetic construct
  source 1..75: mol_type = other DNA
cggtactacaagccacacaccaaaaaacgggcaatgttaagccttggtgcatatcccgaaatcagcattgccgat

SEQ ID NO: 335183 - DNA, 75 bp, synthetic construct
  source 1..75: mol_type = other DNA
ttgtgctgatgcgctggtggggtgaatttgttgaggcggcggcaacgggcgttacccttgctggtggtaaaaggg

SEQ ID NO: 335184 - DNA, 75 bp, synthetic construct
  source 1..75: mol_type = other DNA
gtacccctgacaatgatttaataagtatcaaacaggattacgagagacgtgattgggctgaaaagtttggagtta

SEQ ID NO: 335185 - DNA, 75 bp, synthetic construct
  source 1..75: mol_type = other DNA
aagcaactacctggaaaaacgtaaagtgttaatgtgctggtggggtgattttgtggaagcagccgcaaccggaac

SEQ ID NO: 335186 - DNA, 75 bp, synthetic construct
  source 1..75: mol_type = other DNA
gcagataaaaaacggactattatcagccttggatcgctaaatgatgtttccctgtctgatgccagagagcgacgg

SEQ ID NO: 335187 - DNA, 75 bp, synthetic construct
  source 1..75: mol_type = other DNA
cacctatccccgccagcaaagcggcgctgcgtgaggtgatcctgccgttgctggacgagtccgatgaaccgttcg

SEQ ID NO: 335188 - DNA, 75 bp, synthetic construct
  source 1..75: mol_type = other DNA
aattccctcattggtctcttcatgacttgagacggacagcacgaacaaatttttctgatcttactgcgcctcata

SEQ ID NO: 335189 - DNA, 75 bp, synthetic construct
  source 1..75: mol_type = other DNA
gagtctgtgatccgtgcctggtatgaagcatattgtgtaaaaaataaaaaaggttctgagcagatactccgctca

SEQ ID NO: 335190 - DNA, 75 bp, synthetic construct
  source 1..75: mol_type = other DNA
gataagagtgattatctagaagaacagcgtaaagcttacctggcatggtggaagagggttgaatcgattgttaat

SEQ ID NO: 335191 - DNA, 75 bp, synthetic construct
  source 1..75: mol_type = other DNA
cgcagtatgacggtgaacaagatgtttttggttcgggtggtggcgatgccttcagccgaaataatacggatgcct

SEQ ID NO: 335192 - DNA, 75 bp, synthetic construct
  source 1..75: mol_type = other DNA
gtatatgttaaggctgttaagattaatccgtctcttaaacaagagcaacgtaactggaataaaactgttcgtgac

SEQ ID NO: 335193 - DNA, 75 bp, synthetic construct
  source 1..75: mol_type = other DNA
tgataaaggcggtaaacttaaaatcaaactggtagatgatgttcctgtgtcttttgtttacaccgacaaatataa

SEQ ID NO: 335194 - DNA, 75 bp, synthetic construct
  source 1..75: mol_type = other DNA
tgggttttagtgggcggctggttgctcatggcttgcgctcaatagcaagtaccgcacttaacgagcaaggttttg

SEQ ID NO: 335195 - DNA, 75 bp, synthetic construct
  source 1..75: mol_type = other DNA
ttgcgacaaaattatcccattggcaaatattcttggctgcgatccaatgtggttactgactggtgcttataaaca

SEQ ID NO: 335196 - DNA, 75 bp, synthetic construct
  source 1..75: mol_type = other DNA
aaacgatcttattgctatcggctccggcggcccttacgcccaggcggcggcgcgcgcgctgttagaaaacactga

SEQ ID NO: 335197 - DNA, 75 bp, synthetic construct
  source 1..75: mol_type = other DNA
gtaccgatcgcatgttgcgcaaacttgaagcactgctggcagtcgcggatgaaaccgcttcgctgatcatcaccg

SEQ ID NO: 335198 - DNA, 75 bp, synthetic construct
  source 1..75: mol_type = other DNA
gaaaatcttgcaaaacaatatcaattaaggatcacgctttataaaatcaatactgataatctccagtgcttgcct

SEQ ID NO: 335199 - DNA, 75 bp, synthetic construct
  source 1..75: mol_type = other DNA
tactgataatcttcagtgcttgccttgtacacaagtctggtcaagagcaatgtacttccgtttatttgcatttca

SEQ ID NO: 335200 - DNA, 75 bp, synthetic construct
  source 1..75: mol_type = other DNA
tgtacttccgtttatttgcttttcaattattgggagtaacacttaatcgtttgctttatcttgatgccgatgtag

SEQ ID NO: 335201 - DNA, 75 bp, synthetic construct
  source 1..75: mol_type = other DNA
agcgtaaagcctaccaggcgtggtgggagagggttgaatcgatcgttacttgtactagcttaggctctaactatc

SEQ ID NO: 335202 - DNA, 75 bp, synthetic construct
  source 1..75: mol_type = other DNA
tcgggagtatccctcacgatgcagctacattgcatgattggttagaggtcctggagcctcttagcactaagactc

SEQ ID NO: 335203 - DNA, 75 bp, synthetic construct
  source 1..75: mol_type = other DNA
aaaagctactgaagccatgacggtagagtctgtgatccgtgcctggtatgaagcatattgtgtaaaaaataaaaa

SEQ ID NO: 335204 - DNA, 75 bp, synthetic construct
  source 1..75: mol_type = other DNA
agcgtaaagcttatcaggcatggtgggataggattgattcgattcttccttacactaatttaggttctaacagac

SEQ ID NO: 335205 - DNA, 75 bp, synthetic construct
  source 1..75: mol_type = other DNA
ggactgtaccaccagaacgacataagactggggagataacgggcgaaccgctaaagcggcccattattgaaccgg

SEQ ID NO: 335206 - DNA, 75 bp, synthetic construct
  source 1..75: mol_type = other DNA
tcgggagtatccctcacgatgcagctacattgcatgattggttagaagtcctagagcctcttagcactaagactc

SEQ ID NO: 335207 - DNA, 75 bp, synthetic construct
  source 1..75: mol_type = other DNA
ctctatgaacaatggttccgatatgctttttactaaggaaggaagcagggaacccgttggtcggacatcattgca

SEQ ID NO: 335208 - DNA, 75 bp, synthetic construct
  source 1..75: mol_type = other DNA
cattgcggatatagcgatttggccgtggtttggcaatgtggtgttaggcggcgtatatgatgccgcagagtttct

SEQ ID NO: 335209 - DNA, 75 bp, synthetic construct
  source 1..75: mol_type = other DNA
agcggcaactatcgcccatgttcaacaaaatgcagctgtgcttgagattgtgctttcgtcagaggaattagccat

SEQ ID NO: 335210 - DNA, 75 bp, synthetic construct
  source 1..75: mol_type = other DNA
agcaacagcagatgccggtgatggcttacagtccattagcccaggccgggcggttgcgcaatggactgttaaaaa

SEQ ID NO: 335211 - DNA, 75 bp, synthetic construct
  source 1..75: mol_type = other DNA
gtgcgccctgctggacgaaacagtcctgagtcgcagcggcatggacgacggtcaggccatctggatgaaggatcc

SEQ ID NO: 335212 - DNA, 75 bp, synthetic construct
  source 1..75: mol_type = other DNA
tcgatgcgctgctgcgcgacacgtttctgacggtggtggaactgcgtcagggaaccaccgtgcgtcacggtatcg

SEQ ID NO: 335213 - DNA, 75 bp, synthetic construct
  source 1..75: mol_type = other DNA
aactgaacaaggcttacccccctcatgatgcaaatatatacaaaatgctaaggaggcaggtaagagtttctatgt

SEQ ID NO: 335214 - DNA, 75 bp, synthetic construct
  source 1..75: mol_type = other DNA
cgcttaatgaaatgcgtatatctccacgcccgacattaatacagatgattttgtccagtatggaggataaagcaa

SEQ ID NO: 335215 - DNA, 75 bp, synthetic construct
  source 1..75: mol_type = other DNA
atgaaaaagctgatcttagccgccctcatcgccatgacgtccggggccgccctcgccgaaaacgagcaaattgtt

SEQ ID NO: 335216 - DNA, 75 bp, synthetic construct
  source 1..75: mol_type = other DNA
ggatgctattgacgcatggagtattcgctcccgtgctgccagcctgctgcacggcctcggtttcagcaatgaaca

SEQ ID NO: 335217 - DNA, 75 bp, synthetic construct
  source 1..75: mol_type = other DNA
gtgccgagaaggtggtcggtgaagcattaaccggtctgcgtgatagagtctttctcgtctctaaagtctatccgt

SEQ ID NO: 335218 - DNA, 75 bp, synthetic construct
  source 1..75: mol_type = other DNA
atgagtattgaattaagatcgtcttatgaatatagaaaaattctcatcgccggaggcatgaaaccggaagatgtg

SEQ ID NO: 335219 - DNA, 75 bp, synthetic construct
  source 1..75: mol_type = other DNA
atgagtattgaattaagatcgtcttatgaatatcgtaaaattctcatcgccggaggcatgaaaccggaagatgca

SEQ ID NO: 335220 - DNA, 75 bp, synthetic construct
  source 1..75: mol_type = other DNA
ttagtgttcccgattgcgattgtgtttgcgattctgggtcgccactatcccagcgcaggcggcgtcgcacacttc

SEQ ID NO: 335221 - DNA, 75 bp, synthetic construct
  source 1..75: mol_type = other DNA
gttcactgagtcgggtattaagcgcattgccgaagccgcatggcaggtgaacgaatccaccgaaaacatcggtgc

SEQ ID NO: 335222 - DNA, 75 bp, synthetic construct
  source 1..75: mol_type = other DNA
ccgaagcaggcgcacagttcgctattagcccgggtctgactgaaccactgctgaaagcagcgactgaaggctcca

SEQ ID NO: 335223 - DNA, 75 bp, synthetic construct
  source 1..75: mol_type = other DNA
taactaccgtgactacctggcgctgaaaagcgtgctgtgcatcggtggctcctggctggttccggcagatgcgct

SEQ ID NO: 335224 - DNA, 75 bp, synthetic construct
  source 1..75: mol_type = other DNA
tacattgcatgattggttagaagtcctggagcctcttagcactaagactccagcaatagcagaccgattgctaat

SEQ ID NO: 335225 - DNA, 75 bp, synthetic construct
  source 1..75: mol_type = other DNA
ctggctggtgttgtttgtggttatcggcctgagcggtgcctggtggtggcaagaccacaaagctcagcaggaaga

SEQ ID NO: 335226 - DNA, 75 bp, synthetic construct
  source 1..75: mol_type = other DNA
ctggcagaagagcgcattctcgacgtgctaatcccaccggccaaaaacaactgggggcagaccgaacagcagcag

SEQ ID NO: 335227 - DNA, 75 bp, synthetic construct
  source 1..75: mol_type = other DNA
ttgaaacggacatgacacgtgcgctgagcgatgaccagcgtgcgggtatcctggcgcaggttcctgcgggtcgcc

SEQ ID NO: 335228 - DNA, 75 bp, synthetic construct
  source 1..75: mol_type = other DNA
gaatttggtgaagtggatatcctggtcaataatgccggtatcactcgtgataacctgttaatgcgaatgaaagat

SEQ ID NO: 335229 - DNA, 75 bp, synthetic construct
  source 1..75: mol_type = other DNA
cgtttcgtaatctcgaagggatagttaaaacacacgcctccctgacgcatctggcgcaggcggaggatatcagct

SEQ ID NO: 335230 - DNA, 75 bp, synthetic construct
  source 1..75: mol_type = other DNA
ccttctggcacgatttagcggctccggtcattgctggcattctcgccagcctgatcgtgaactggctgaataagc

SEQ ID NO: 335231 - DNA, 75 bp, synthetic construct
  source 1..75: mol_type = other DNA
ccttctggcatgatttagtggctccggtcattgctggtattcttgccagtatgatcgtgaactggctgaacaagc

SEQ ID NO: 335232 - DNA, 75 bp, synthetic construct
  source 1..75: mol_type = other DNA
ccttctggcacgatttagcggctccggtcattgctggcattctcgccagcctgatcgtgaactggctgaacaagt

SEQ ID NO: 335233 - DNA, 75 bp, synthetic construct
  source 1..75: mol_type = other DNA
cctctgtcacgccaggtcatttctgttctgcaggaattacatggttttaccggacagtatcgccttatgctaccc

SEQ ID NO: 335234 - DNA, 75 bp, synthetic construct
  source 1..75: mol_type = other DNA
tatggactccgcgcagttgaccgaagaaggctactacagcgtcttcggtaagagtggtgcgcgtatcgagatccc

SEQ ID NO: 335235 - DNA, 75 bp, synthetic construct
  source 1..75: mol_type = other DNA
gccaatcgaagtcgacgtctctaacctgaacatgggcgacgtaattgacgtttacccgtacaaaggtgaagtgcg

SEQ ID NO: 335236 - DNA, 75 bp, synthetic construct
  source 1..75: mol_type = other DNA
actgtttatcaacaccgctggcatgggcgcaattccggcgaatattcactggggcgcacagacgctaaccgcagg

SEQ ID NO: 335237 - DNA, 75 bp, synthetic construct
  source 1..75: mol_type = other DNA
gcagcggcggccaggcgatgcagcaattaatcaacagcctgtttatggaagcctttgccaacccgtggctggcag

SEQ ID NO: 335238 - DNA, 75 bp, synthetic construct
  source 1..75: mol_type = other DNA
cagatgagctccctgtttttctcaggaagctcgctgaatatcatggcagtcctgttacccgcatggcgacaaatc

SEQ ID NO: 335239 - DNA, 75 bp, synthetic construct
  source 1..75: mol_type = other DNA
tgacggccccaaataagtttgaggcgttggcgagctgtgacgcactggtacactctcacggtgcattaaagggac

SEQ ID NO: 335240 - DNA, 75 bp, synthetic construct
  source 1..75: mol_type = other DNA
ggggtatctcaccgagtcagattttgatcaatgggttcgccctgaattgatggttggaagtgtgaaactatcgcg

SEQ ID NO: 335241 - DNA, 75 bp, synthetic construct
  source 1..75: mol_type = other DNA
tgaacaaaagtcagagttcaaatgacgttttcccggcggcgatgcatgtcgccgcattgctggcattacgtaaag

SEQ ID NO: 335242 - DNA, 75 bp, synthetic construct
  source 1..75: mol_type = other DNA
gcccggcgctggctgaaaaactgaccgttaccgtcttcaaagtcactggcgaaaccaacaccgatgacctctctc

SEQ ID NO: 335243 - DNA, 75 bp, synthetic construct
  source 1..75: mol_type = other DNA
actcggctgacatgccattaggtaatcaccatgttcgagtcatgacgggccggccaggagatattgcgactggca

SEQ ID NO: 335244 - DNA, 75 bp, synthetic construct
  source 1..75: mol_type = other DNA
atcgctaacgcatttgaagctctaggtaaaccggggctggcggcatacattgctggaaaattgcctgaaacgaaa

SEQ ID NO: 335245 - DNA, 75 bp, synthetic construct
  source 1..75: mol_type = other DNA
cgatgtattgctggttagcggtacgctcggcgaccacggtgcgactatccttaacttgcgcgaacaactggggct

SEQ ID NO: 335246 - DNA, 75 bp, synthetic construct
  source 1..75: mol_type = other DNA
aaaagaagactgctgcgctgtttgtcgtcacctttatcttcattggctatgcaagtcataatacaaggtgggaca

SEQ ID NO: 335247 - DNA, 75 bp, synthetic construct
  source 1..75: mol_type = other DNA
aaaagaagactgctgcgccgtttgttgtcacatttatcttcattggctatgcaagtcgtaatacaaggtgggaca

SEQ ID NO: 335248 - DNA, 75 bp, synthetic construct
  source 1..75: mol_type = other DNA
gtcacgtttatcttcattggctatgcaagtcgtaatacaaggtgggacaaaactgagacacataaggcctcgcaa

SEQ ID NO: 335249 - DNA, 75 bp, synthetic construct
  source 1..75: mol_type = other DNA
acccgcaagggcaaacgctgggttaagccgtccagcaagcaaatcatggaaaccatgagcatggcccaggcggga

SEQ ID NO: 335250 - DNA, 75 bp, synthetic construct
  source 1..75: mol_type = other DNA
caggcggccgcggacggcacaccgtgggagccgcgcaagcgtggcaaagggaagatgttaaaagggctgcccagg

SEQ ID NO: 335251 - DNA, 75 bp, synthetic construct
  source 1..75: mol_type = other DNA
acgttttcatctgcgacgagtgtgtggaagtgtgcaacagcgttatccgagaagaacaaggaacgcagggagcag

SEQ ID NO: 335252 - DNA, 75 bp, synthetic construct
  source 1..75: mol_type = other DNA
cagagcaagtgctggcagcgttacattcccatccactgggaaaagacgcggcgctgattggtgaagtggtggaac

SEQ ID NO: 335253 - DNA, 75 bp, synthetic construct
  source 1..75: mol_type = other DNA
gcagcggcggccaggcgatgcagcaattaatcaacagcctgtttatggaagcttttgccaatccgtggctggcag

SEQ ID NO: 335254 - DNA, 75 bp, synthetic construct
  source 1..75: mol_type = other DNA
gttaaacctgccgtgcgcggcgtttgtgagctgctggggctggacgccctcaactttgccaatgaaggtaagctg

SEQ ID NO: 335255 - DNA, 75 bp, synthetic construct
  source 1..75: mol_type = other DNA
aaaagaagaccgctgcgccgtttgtcgtcacgtttatcttcattggctatgcaagtcgtaatacaaggtgggaca

SEQ ID NO: 335256 - DNA, 75 bp, synthetic construct
  source 1..75: mol_type = other DNA
cgtcacatttatcttcattggctatgcaagtcgtaatacaaggtgggacaaaactgagacacataaggcctcgca

SEQ ID NO: 335257 - DNA, 75 bp, synthetic construct
  source 1..75: mol_type = other DNA
tatccccaaaaaagcaagataatgaacactgggtatccatgtcagatttaatggcagggctgatgatggttttca

SEQ ID NO: 335258 - DNA, 75 bp, synthetic construct
  source 1..75: mol_type = other DNA
aagcggacatcaccgcgttttttgcgctgacggtagctatcgatctgtggatagtctggacgaatcggtgaaggt

SEQ ID NO: 335259 - DNA, 75 bp, synthetic construct
  source 1..75: mol_type = other DNA
ctgtggatgagtatttctggcgacacatcctgcaccggggacatcagcgggtactgtttgtggtgacgcaggccg

SEQ ID NO: 335260 - DNA, 75 bp, synthetic construct
  source 1..75: mol_type = other DNA
gtccgtacggccctgcgcgctgttcgtgacaccgtggtctctgttgcccgcgcggtatggaactggattttcttc

SEQ ID NO: 335261 - DNA, 75 bp, synthetic construct
  source 1..75: mol_type = other DNA
ccagtcccctgatgacccgactgcaggacgagctgcgcacggaatctgtccggtctcaggcccgtgaacagttta

SEQ ID NO: 335262 - DNA, 75 bp, synthetic construct
  source 1..75: mol_type = other DNA
aactggacctggtactgtggctgattaaagccgatgaccgtgccctgtctgtggatgagtatttctggcgacaca

SEQ ID NO: 335263 - DNA, 75 bp, synthetic construct
  source 1..75: mol_type = other DNA
gtcaggcccgtgaacagtttaccggtgcggtggaccggatatttgacacggcggagagcgtctgtgttgcctctg

SEQ ID NO: 335264 - DNA, 75 bp, synthetic construct
  source 1..75: mol_type = other DNA
tggacctggtactgtggctgattaaagccgatgaccgggccctgtctgtggatgagtatttctggcgacacatcc

SEQ ID NO: 335265 - DNA, 75 bp, synthetic construct
  source 1..75: mol_type = other DNA
aataaatggagccggctaaaccattgttcgcttttggtaattaatcccggaaataataacgataaacaattttca

SEQ ID NO: 335266 - DNA, 75 bp, synthetic construct
  source 1..75: mol_type = other DNA
tgattttcacctcgctaatactgactggctgccagtcccctcagggaaagtttactcctgagcaagtcgccgcta

SEQ ID NO: 335267 - DNA, 75 bp, synthetic construct
  source 1..75: mol_type = other DNA
aatctcactactcagggtttagggaaaaaatatcctatcgccagcaacaagacagcacagggccgggctgaaaac

SEQ ID NO: 335268 - DNA, 75 bp, synthetic construct
  source 1..75: mol_type = other DNA
gtggaccccgtattctctatcggtatctcatccttgtgggatgagctgcgacatatgccagcaggcggcgtctgg

SEQ ID NO: 335269 - DNA, 75 bp, synthetic construct
  source 1..75: mol_type = other DNA
cagcaacggtcgttttctctttacagcaaaatggacaaattgaacctctggcccgcagtattcatactctgcgcc

SEQ ID NO: 335270 - DNA, 75 bp, synthetic construct
  source 1..75: mol_type = other DNA
cctcaaaattaccttttcattcttgtttgcgcaaataacgcatggcaaaacattcctgccgaacgacttcgctcg

SEQ ID NO: 335271 - DNA, 75 bp, synthetic construct
  source 1..75: mol_type = other DNA
actggttgcgggtagatcgtattgagctaacggtgttcgtcgataacgcgccagcaattaaggtctataaaaaat

SEQ ID NO: 335272 - DNA, 75 bp, synthetic construct
  source 1..75: mol_type = other DNA
ccttccagggaatgcagcctataacgggatcaaggaatacgcagacgtattaagcaagccagatttcaagaaagt

SEQ ID NO: 335273 - DNA, 75 bp, synthetic construct
  source 1..75: mol_type = other DNA
acatctgagggggatttcgtttatgagctattcactacggcacaatacagggaatacctgcaaacattggcaaaa

SEQ ID NO: 335274 - DNA, 75 bp, synthetic construct
  source 1..75: mol_type = other DNA
atgaacccatcggggttttgaaggatgttggtgttgaattgcttaagtcttatgccaagaagaagcttggtttat

SEQ ID NO: 335275 - DNA, 75 bp, synthetic construct
  source 1..75: mol_type = other DNA
aggcaatcacagaagccacagcagcaatcatcaccagcacaacacaacgaacctccgatggattttgacgacgat

SEQ ID NO: 335276 - DNA, 75 bp, synthetic construct
  source 1..75: mol_type = other DNA
ttcaggcaccagaatcacccgacgccccggaagcgctgccggggtgtcgttccatttctgatgatgacctgtgcg

SEQ ID NO: 335277 - DNA, 75 bp, synthetic construct
  source 1..75: mol_type = other DNA
atgcagcatgtccctgaaggcgtgattcaggcaccagaatcacccgacgccccagaggcgctgccggggtgtcgt

SEQ ID NO: 335278 - DNA, 75 bp, synthetic construct
  source 1..75: mol_type = other DNA
cattcagccttctcccgcacaggcacggaacattcgcgaaaaaacggaggcggtattccgtctgttccggcccgc

SEQ ID NO: 335279 - DNA, 75 bp, synthetic construct
  source 1..75: mol_type = other DNA
cgcaccggctgggaactggatacgctggtcagtgcgctcatgacagcgcttcccgaccatgccgccagccccctg

SEQ ID NO: 335280 - DNA, 75 bp, synthetic construct
  source 1..75: mol_type = other DNA
accggtgcggtggaccggatatttgacacggcggagagcgtctgtattgcctctgttgcacgcacggttctgcgg

SEQ ID NO: 335281 - DNA, 75 bp, synthetic construct
  source 1..75: mol_type = other DNA
aaaacctcatgcaataatcacaacaaattatgacgacacattagaaaaaatatttgacaattatcaggcaatagt

SEQ ID NO: 335282 - DNA, 75 bp, synthetic construct
  source 1..75: mol_type = other DNA
cggaaattagcgttaatccaaaacttgtgcgtgcatttctagccagaacgtacacattcgcatcagaatcccttg

SEQ ID NO: 335283 - DNA, 75 bp, synthetic construct
  source 1..75: mol_type = other DNA
aaattttatacaaaggaaaaaccaaaagaaggcgaattggtgaaatggtgaatactatggacttaaataaaggac

SEQ ID NO: 335284 - DNA, 75 bp, synthetic construct
  source 1..75: mol_type = other DNA
tgactgaacagaaaaaagtgcacggtgttattactgatttcagacgtatttctggctctgaggaccaggcacaat

SEQ ID NO: 335285 - DNA, 75 bp, synthetic construct
  source 1..75: mol_type = other DNA
ggtgaaatttgatgctgaccgtgatgataaaaatccgggacaggaaagtatgccggtacgtctggccaaacccta

SEQ ID NO: 335286 - DNA, 75 bp, synthetic construct
  source 1..75: mol_type = other DNA
gtagccggaaatctgcgctgcaggtgatgctgagtgctgttccctacagcgagattgtctgctggcgaccaccgt

SEQ ID NO: 335287 - DNA, 75 bp, synthetic construct
  source 1..75: mol_type = other DNA
ataatttcgattttctggcgcgtagttttgccagaatgcattctgaaggccgcccggtcgatattctggccgtca

SEQ ID NO: 335288 - DNA, 75 bp, synthetic construct
  source 1..75: mol_type = other DNA
ataattttgattttctggcacgtagttttgccagaatgcatgcagaaggccgtccggtcgatattctggccatca

SEQ ID NO: 335289 - DNA, 75 bp, synthetic construct
  source 1..75: mol_type = other DNA
tgttgttaataaaagagataaccaacccaaaccatatgtcccgtaccgtatcgaaacacctgatgggagaattat

SEQ ID NO: 335290 - DNA, 75 bp, synthetic construct
  source 1..75: mol_type = other DNA
gaaatttgcaaaaattagaaaatatttacctaattgaacctcaggattatttaccatttgtatatctaatgaagc

SEQ ID NO: 335291 - DNA, 75 bp, synthetic construct
  source 1..75: mol_type = other DNA
tattagataatatatgtaatatttaccttattgagcccttggattatttgccttttgtttatttaatgaatgagt

SEQ ID NO: 335292 - DNA, 75 bp, synthetic construct
  source 1..75: mol_type = other DNA
aaatattgcttatggcctgttgtcacttattgatgaatcagcagaaaaactcaatgacgcaataaatagtgccct

SEQ ID NO: 335293 - DNA, 75 bp, synthetic construct
  source 1..75: mol_type = other DNA
gagattgtctgctggcgaccaccgttacttactcgtccgaaaatcaccgggaccatgacggcccgtgtgaccagt

SEQ ID NO: 335294 - DNA, 75 bp, synthetic construct
  source 1..75: mol_type = other DNA
ccagctgctgccggtgaaattaagcgatgcagaagtggatgagctgtttgcgctggtgaaagccaatccggggat

SEQ ID NO: 335295 - DNA, 75 bp, synthetic construct
  source 1..75: mol_type = other DNA
taccgaatatctgccgatgagtgacagcgaatacgcacaaaagcgggcgctgaaacctctcctgaccatgcctta

SEQ ID NO: 335296 - DNA, 75 bp, synthetic construct
  source 1..75: mol_type = other DNA
gcaccagctcctgcaggcagtagtggttccggcccgctgacactgcatccgtctgtgctatttatccgctggcgg

SEQ ID NO: 335297 - DNA, 75 bp, synthetic construct
  source 1..75: mol_type = other DNA
cgttgaccggcactgtggaacggatgtcgattcgctccgtgggcgtgcgtcaggataccggggcgtatcacatca

SEQ ID NO: 335298 - DNA, 75 bp, synthetic construct
  source 1..75: mol_type = other DNA
ttgggatcgcggcgtttgtttccggtatgttttctcgctggctggcaaaaaccattaccctttcgccacacactc

SEQ ID NO: 335299 - DNA, 75 bp, synthetic construct
  source 1..75: mol_type = other DNA
agagtgcccgctactggtgccgccgccttagctggctaagcggcctgattggttatggactgattgtggctgtac

SEQ ID NO: 335300 - DNA, 75 bp, synthetic construct
  source 1..75: mol_type = other DNA
ccttagctggttaagcagtctgattggttatggactgattgtggcagtgccaattatctctaatcaggtgaatgt

SEQ ID NO: 335301 - DNA, 75 bp, synthetic construct
  source 1..75: mol_type = other DNA
ctgaaaacggcgcgtattctgacagtctgcgtggcggtaatgctgctgttgagcgcatggggattgttcgatttc

SEQ ID NO: 335302 - DNA, 75 bp, synthetic construct
  source 1..75: mol_type = other DNA
accatcactctctcgccacatactcagcgtaactatccggagctgcaaaaacggctgaatggctggctttcggcg

SEQ ID NO: 335303 - DNA, 75 bp, synthetic construct
  source 1..75: mol_type = other DNA
tgatgccctccctgactctgaatctgctcacaaaagcgctgttttcgttactgtctctcttgttcgtgcaatagc

SEQ ID NO: 335304 - DNA, 75 bp, synthetic construct
  source 1..75: mol_type = other DNA
gattttcttctgaacctgtcgtgactgatgccctccctgactctgaatctgctcacaaaagcgctgttttcgtta

SEQ ID NO: 335305 - DNA, 75 bp, synthetic construct
  source 1..75: mol_type = other DNA
aagctttcttcctgccctctggcatggtttgagcagcggtatacgcgcctgtttaatgccccgctctttaaacct

SEQ ID NO: 335306 - DNA, 75 bp, synthetic construct
  source 1..75: mol_type = other DNA
tgaagagcaaaccgtgctgcaaaaggtcaccgaagtcagccgccattatggtgaagccctttccgcccgcttcgg

SEQ ID NO: 335307 - DNA, 75 bp, synthetic construct
  source 1..75: mol_type = other DNA
ccctttccgcccgcttcgggcaactttatcgcaatatcaccggctccccgcataagccgtttaatccacaaacct

SEQ ID NO: 335308 - DNA, 75 bp, synthetic construct
  source 1..75: mol_type = other DNA
gggcgctgtatctgatctttcgtaataaaaaagagattacccagcatttgctcaacttcgcggagcactcgctgg

SEQ ID NO: 335309 - DNA, 75 bp, synthetic construct
  source 1..75: mol_type = other DNA
acttagcaccgttgaaagtactgccaatggtaacaaggccagtatccagacactatcccagacggtaacggataa

SEQ ID NO: 335310 - DNA, 75 bp, synthetic construct
  source 1..75: mol_type = other DNA
ttggtcaggtggcttttgccgcaaagcgtaagcctactgcgtcacagaacaggcggaagaaagggtacgcagtaa

SEQ ID NO: 335311 - DNA, 75 bp, synthetic construct
  source 1..75: mol_type = other DNA
ttatcccggaagaattggtgcccgttcagcgtgtcggcaaaatggtgctcaatcgtaatccggataacttctttg

SEQ ID NO: 335312 - DNA, 75 bp, synthetic construct
  source 1..75: mol_type = other DNA
gcagcaacctttgccggggcgccatcgctgacggtcgatgcagtcattgtcccttgcggtaatatcgccgatatc

SEQ ID NO: 335313 - DNA, 75 bp, synthetic construct
  source 1..75: mol_type = other DNA
aacaattgtatattgacgatgaaccaatcctaaacgtaccaattacggcagatggtaaagttgaaaactggatga

SEQ ID NO: 335314 - DNA, 75 bp, synthetic construct
  source 1..75: mol_type = other DNA
gcaagaacactgggggccgggcgctggcgcgttttctttactatcacgttaccgctgaccttaccgggcattatt

SEQ ID NO: 335315 - DNA, 75 bp, synthetic construct
  source 1..75: mol_type = other DNA
taattgacaaatcgcaggcgacgcaacttatcgccgggcttcaaaaatttatagatggcacatttgagaacgatc

SEQ ID NO: 335316 - DNA, 75 bp, synthetic construct
  source 1..75: mol_type = other DNA
gtcaacagccggcgtgaaaagcgaggtgccggttttgaactgcgaacggatgagcatggtgctgtacgtgcagca

SEQ ID NO: 335317 - DNA, 75 bp, synthetic construct
  source 1..75: mol_type = other DNA
attgcgtaaacatggtctggaagggcaggattttgaattccggctctcccgggagtatccaccccgggagctcat

SEQ ID NO: 335318 - DNA, 75 bp, synthetic construct
  source 1..75: mol_type = other DNA
atgattttatgaaagcactggcgcgacagctgcaggcaataggctttggctgggacgtcaatgcacaggatatgt

SEQ ID NO: 335319 - DNA, 75 bp, synthetic construct
  source 1..75: mol_type = other DNA
ggcaattttatgaatgagttactgactctgatagcggcgcaccgcgtctggtcacgtatccctaagattgacaaa

SEQ ID NO: 335320 - DNA, 75 bp, synthetic construct
  source 1..75: mol_type = other DNA
acctgatggaagcctataaacaccttaaaccgatagccctgacgggagatgcacgcaagttcaaggcaacaatca

SEQ ID NO: 335321 - DNA, 75 bp, synthetic construct
  source 1..75: mol_type = other DNA
tacgcccatctggacgatcagggacggtaccgggtgaaactggacttcgaccgcaacagtactgaacagggttat

SEQ ID NO: 335322 - DNA, 75 bp, synthetic construct
  source 1..75: mol_type = other DNA
gcaagattcactaggtctaattactattacggcagctactacaaatgatggcgtatatgatggtaaagatccggg

SEQ ID NO: 335323 - DNA, 75 bp, synthetic construct
  source 1..75: mol_type = other DNA
gaaatgaaaggtcagagaatattagacctcgtaacagggtcagtactggcgacgtcaaatccaccatcaattatc

SEQ ID NO: 335324 - DNA, 75 bp, synthetic construct
  source 1..75: mol_type = other DNA
atggcaacacgggcaagataacaactctaacacaaacagtagcagataacaataccgcacaaactacggcaatta

SEQ ID NO: 335325 - DNA, 75 bp, synthetic construct
  source 1..75: mol_type = other DNA
gcacgtattgtacaacctcccactaatctagtaattaatcgcaaaggtgatattgtatctggctcagtagttaat

SEQ ID NO: 335326 - DNA, 75 bp, synthetic construct
  source 1..75: mol_type = other DNA
actaccgtcttaacggttccagtacctggacgtatgcggggcagactggcgtacagaagcttgattatgaattat

SEQ ID NO: 335327 - DNA, 75 bp, synthetic construct
  source 1..75: mol_type = other DNA
gtgaaggtcaggatgaatttgtcttccagatttcgaaagacgaatatctcgacctgctgtttgaagatttagcct

SEQ ID NO: 335328 - DNA, 75 bp, synthetic construct
  source 1..75: mol_type = other DNA
agattgccacggttaaccagcagatgagtacaaaggcaactgcaagcactgtagacagccagtactcattgtccg

SEQ ID NO: 335329 - DNA, 75 bp, synthetic construct
  source 1..75: mol_type = other DNA
gagcactaattaccgccgtaatggtagtagcagcagtatatacgggtggtgctacactagcagttgcggcgatgt

SEQ ID NO: 335330 - DNA, 75 bp, synthetic construct
  source 1..75: mol_type = other DNA
atggtctaggtcttgaaccagctttagtaaatcaggattcattcactgaagtaagtcagtattgtttccaacagg

SEQ ID NO: 335331 - DNA, 75 bp, synthetic construct
  source 1..75: mol_type = other DNA
atggattaggacttgaaccagctttagtaaatcaggattcattcactgaagtaagtcagtattgttttcaacagg

SEQ ID NO: 335332 - DNA, 75 bp, synthetic construct
  source 1..75: mol_type = other DNA
taaattcagtctacgtactgtaacctttaccagtgccgaagcgtgggatctcaaagtatgggatagtatcactgt

SEQ ID NO: 335333 - DNA, 75 bp, synthetic construct
  source 1..75: mol_type = other DNA
aagcgtgtctacttctggtaataatgactactataatacgattgatgcacaatatgtaaataccaattcaatgta

SEQ ID NO: 335334 - DNA, 75 bp, synthetic construct
  source 1..75: mol_type = other DNA
caagtaggaggacttacgggatactccgacgtagccagtgcattacagcgttcaactagtcctacaagtggttta

SEQ ID NO: 335335 - DNA, 75 bp, synthetic construct
  source 1..75: mol_type = other DNA
ccacagggaaaatcacaccggcaattgcggatgtcgtaaacgacggctctaaatttatggatgcctatcaaatgg

SEQ ID NO: 335336 - DNA, 75 bp, synthetic construct
  source 1..75: mol_type = other DNA
ttcagaactacatcaaggcgcagcacgcagctggtgaggatgtggaggtacttaccgctgaattagagcgaagca

SEQ ID NO: 335337 - DNA, 75 bp, synthetic construct
  source 1..75: mol_type = other DNA
taatgattgtcttatggtcaggcattatctcgcatggacgaaataagctccttgaactgacaggaaaaagccata

SEQ ID NO: 335338 - DNA, 75 bp, synthetic construct
  source 1..75: mol_type = other DNA
gagatcaagcaggcaatggacgcagcaagcgcgcgcatcgcagcagaacgggaagccaatctgaatcatgcagtc

SEQ ID NO: 335339 - DNA, 75 bp, synthetic construct
  source 1..75: mol_type = other DNA
tcgaaatgcagatgtataccgctaaggatgatggcgaacgtctggcaatgatgcaggttcaaatggataaggcga

SEQ ID NO: 335340 - DNA, 75 bp, synthetic construct
  source 1..75: mol_type = other DNA
ggccgcgcgtcgccgggtattgtcggagtattcagataccggtaccgaaaaagcagagaagtatccgtactttga

SEQ ID NO: 335341 - DNA, 75 bp, synthetic construct
  source 1..75: mol_type = other DNA
agcaggcgaagcagtttttcatggatgttgctgccgggttatgtgaaggggatgagcagtcgccggaaaagcgcc

SEQ ID NO: 335342 - DNA, 75 bp, synthetic construct
  source 1..75: mol_type = other DNA
tggcggagacggttgtggctgtctgtgcccccggcgacagggactcatacgggtgtgtggcaccggacacaacaa

SEQ ID NO: 335343 - DNA, 75 bp, synthetic construct
  source 1..75: mol_type = other DNA
catcccggcggccttttgccgggatgccaggagcgcaggccacggcgcgacagaggcggcgcgaccggaacggtc

SEQ ID NO: 335344 - DNA, 75 bp, synthetic construct
  source 1..75: mol_type = other DNA
ctctattactattttatcggcttctttgggatacttgccgcgatagctataacgcttgtctggcaaaggcatacg

SEQ ID NO: 335345 - DNA, 75 bp, synthetic construct
  source 1..75: mol_type = other DNA
ataaattagattttcagcacgaggccaggatattaaacggtatatggctcattaccgctttgggtatggtggcaa

SEQ ID NO: 335346 - DNA, 75 bp, synthetic construct
  source 1..75: mol_type = other DNA
ggggggggtaatcggccatcttttattgtgacaagcgatgactggaatatcacgatcagtgaagatggaaaagta

SEQ ID NO: 335347 - DNA, 75 bp, synthetic construct
  source 1..75: mol_type = other DNA
ttgcacagaattaacacggtacttgccgggcgcaccgatgaagagaaacaggcagacgctgatcggataaacctg

SEQ ID NO: 335348 - DNA, 75 bp, synthetic construct
  source 1..75: mol_type = other DNA
tcgcagcagggatggttgccgtatggtgtctgccacggttgcacgcgatgatgcatcagattaaaaatccggtgc

SEQ ID NO: 335349 - DNA, 75 bp, synthetic construct
  source 1..75: mol_type = other DNA
tcacgccggcacccgggaagtacggcgcttccgtctgagtggccacggtcacagcatggttatcactgacctgcc

SEQ ID NO: 335350 - DNA, 75 bp, synthetic construct
  source 1..75: mol_type = other DNA
agtagaaaaaagaagaacagtagcagtagcagtagcagtagcaggaacaacaacatcatcagtaacagacaaatg

SEQ ID NO: 335351 - DNA, 75 bp, synthetic construct
  source 1..75: mol_type = other DNA
cgttcccgcagtcccggcggcaattactgtctcctgcgctattctcggtatggtactggtggtaacgcgcgatgg

SEQ ID NO: 335352 - DNA, 75 bp, synthetic construct
  source 1..75: mol_type = other DNA
cgtacccgccgtaccagcggcaataaccgtttcttgcgctattctcggcatcgtgctggtggtaacacgcgatgg

SEQ ID NO: 335353 - DNA, 75 bp, synthetic construct
  source 1..75: mol_type = other DNA
ccagggcttatcgtagcattaattctcggtcttgccggtggcgtcagcctggggccggaacatccgattatgact

SEQ ID NO: 335354 - DNA, 75 bp, synthetic construct
  source 1..75: mol_type = other DNA
gaagtgattgcccatctggtgaactgggagctgaaacaaggcgggactctgcgtgaggctgttctgcgtgctatc

SEQ ID NO: 335355 - DNA, 75 bp, synthetic construct
  source 1..75: mol_type = other DNA
tgtggtacttcttataactccggtatggtttcccgctactggtttgaatcgctagcaggtattccgtgcgacgtc

SEQ ID NO: 335356 - DNA, 75 bp, synthetic construct
  source 1..75: mol_type = other DNA
gcctgcgtctgtcgaaagagctgggttaccttggttcgctggcaatctgtaacgttccgggttcttctctggtgc

SEQ ID NO: 335357 - DNA, 75 bp, synthetic construct
  source 1..75: mol_type = other DNA
cgcaggtgataaaggtatttatcgccactatatgcagaaagagatctatgaacagccgaacgcgatcaaaaacac

SEQ ID NO: 335358 - DNA, 75 bp, synthetic construct
  source 1..75: mol_type = other DNA
cattggccagatacgcgaacctgcagggaaagatatcatcagtggctgctcccttttatttcgcggataagtatc

SEQ ID NO: 335359 - DNA, 75 bp, synthetic construct
  source 1..75: mol_type = other DNA
tggcttaccacgttgcgctgatcaaaggcacagacgttgaccaaccgcgtaacctggcgaaatcggttacggttg

SEQ ID NO: 335360 - DNA, 75 bp, synthetic construct
  source 1..75: mol_type = other DNA
ttgattaccagaatagcgaggtgcgccgactgtccgaagatgggcgcggcatcctgggcttcggcaccgggctgg

SEQ ID NO: 335361 - DNA, 75 bp, synthetic construct
  source 1..75: mol_type = other DNA
taatcttttcaagaagatagctgtaaaaaaccggactcaggcggtctcatgggcaaacgataacctcaggcgata

SEQ ID NO: 335362 - DNA, 75 bp, synthetic construct
  source 1..75: mol_type = other DNA
tattcaacgttctctggacgatatatcttcaggctctattattcttctggatatgatggaagcggataaaaagct

SEQ ID NO: 335363 - DNA, 75 bp, synthetic construct
  source 1..75: mol_type = other DNA
gaagcatttgcccatcttgcctcggaatttaaaaatccagagcgtgattttcctcgcgcgttgatgattggtctg

SEQ ID NO: 335364 - DNA, 75 bp, synthetic construct
  source 1..75: mol_type = other DNA
tggtttcccgttactggtttgaatcgctagcaggtattccgtgcgacgtcgaaatcgcctctgaattccgctatc

SEQ ID NO: 335365 - DNA, 75 bp, synthetic construct
  source 1..75: mol_type = other DNA
cggttatcatggacacccgcaacccggatactttgctggcggctcgttccggtagcccgctggttatcggcctcg

SEQ ID NO: 335366 - DNA, 75 bp, synthetic construct
  source 1..75: mol_type = other DNA
caccggtattgctcacactcgctgggcaacccacggcgaaccttctgaagcgaatgcgcatccgcatgtttctga

SEQ ID NO: 335367 - DNA, 75 bp, synthetic construct
  source 1..75: mol_type = other DNA
ctgcgccgcctctgaacaaggctccaactactcaaaatggtgctacaaaccgtttgaagatctgattcaaccggc

SEQ ID NO: 335368 - DNA, 75 bp, synthetic construct
  source 1..75: mol_type = other DNA
gctcagaaggatctccggaagggtttaacccgcagctgtttacctccggtaccacctatgacgcctcttccgtgc

SEQ ID NO: 335369 - DNA, 75 bp, synthetic construct
  source 1..75: mol_type = other DNA
ctattctgtcaaaagaatatgctgacgcgatgatgaaagccggtacaccggaaaaactggacctcaacccaatcg

SEQ ID NO: 335370 - DNA, 75 bp, synthetic construct
  source 1..75: mol_type = other DNA
gcaggattagtctactggggctgtacggtagtcgtcttacacttcgacgcctatggtgaacaaatggcggcggca

SEQ ID NO: 335371 - DNA, 75 bp, synthetic construct
  source 1..75: mol_type = other DNA
ctggcaggctgtaaattattgcaaggacgttatcgactactggcggtggttggcgggctgttatgcgttctgtta

SEQ ID NO: 335372 - DNA, 75 bp, synthetic construct
  source 1..75: mol_type = other DNA
gcgctgatcatgctggcggggttatggctgttgctgccaaaacgaaaaacgccggaaaatggcataaccacataa

SEQ ID NO: 335373 - DNA, 75 bp, synthetic construct
  source 1..75: mol_type = other DNA
gacagatgaacagcgccagatcctggctgggtacaccggtgaaggcggcattggcgggtccgtctccgaatatta

SEQ ID NO: 335374 - DNA, 75 bp, synthetic construct
  source 1..75: mol_type = other DNA
tctactgagtttatggccaatgcgccggaaggcgattttgaccgttcattctctgatggcgttctcgaagatatc

SEQ ID NO: 335375 - DNA, 75 bp, synthetic construct
  source 1..75: mol_type = other DNA
actgaagcatgcggtttacccggatcgccgtgacggcgcgctgaagtcgtcaattgcaaaatgggtgcttggtat

SEQ ID NO: 335376 - DNA, 75 bp, synthetic construct
  source 1..75: mol_type = other DNA
gcagcaagcgcgcgcatcgcagcagaacgggaagccaatctgaatcatgcagtcgccgcgctgactcaatcgtgg

SEQ ID NO: 335377 - DNA, 75 bp, synthetic construct
  source 1..75: mol_type = other DNA
agttatgcgcgatgccctaaaactggcagatgaagccactatcacggcgcggatgaacgcgatcccgcactcaaa

SEQ ID NO: 335378 - DNA, 75 bp, synthetic construct
  source 1..75: mol_type = other DNA
gcaatgctcttaaccttgaaccttcaaaggtggggatcctgaatgctcagacggttgccgaggcaggtaaaaccg

SEQ ID NO: 335379 - DNA, 75 bp, synthetic construct
  source 1..75: mol_type = other DNA
gtaaagcaggctggatctccgatatcctccgttcagataagtcagaaatggagaacgccgacgccaatgacatga

SEQ ID NO: 335380 - DNA, 75 bp, synthetic construct
  source 1..75: mol_type = other DNA
acaggaggacgtgaggttgctgctgagcggctaaagttgggggcttatcctgaattgtcgctgaaagccgcaagg

SEQ ID NO: 335381 - DNA, 75 bp, synthetic construct
  source 1..75: mol_type = other DNA
gcagcgcctttctctggtatcccgtttgcaggcagagattgaccgctttggtaatcctggtcgcggtcctatagc

SEQ ID NO: 335382 - DNA, 75 bp, synthetic construct
  source 1..75: mol_type = other DNA
gtctggaaaagattgcagccgacttccaggagggccggactccgatcatcatctgcaacaaaaaggcagaggtgg

SEQ ID NO: 335383 - DNA, 75 bp, synthetic construct
  source 1..75: mol_type = other DNA
ttacacccggaagacagcgtacagatttccccgttcgaacagctggctgtaagcacgcctaacgattcattcgac

SEQ ID NO: 335384 - DNA, 75 bp, synthetic construct
  source 1..75: mol_type = other DNA
ccaaatccgggctggaagagtgcgaaatggcgtggctggaagcccaggagcaactggaacaaatactgctggaag

SEQ ID NO: 335385 - DNA, 75 bp, synthetic construct
  source 1..75: mol_type = other DNA
aaactcggctacttcgcccagcatcaactggaatacctgcgcgctgacgaatcgcctattcagcatctggcgcgt

SEQ ID NO: 335386 - DNA, 75 bp, synthetic construct
  source 1..75: mol_type = other DNA
gcctgcctgcaacagcaagccagcgccaaatccggcctggaagagtgcgaaatggcgtggctggaagcccaggag

SEQ ID NO: 335387 - DNA, 75 bp, synthetic construct
  source 1..75: mol_type = other DNA
attattctcgactcgataaaacttaacctggtgccaggttcgcgcataggtctgctaggccgaaacggcgcgggt

SEQ ID NO: 335388 - DNA, 75 bp, synthetic construct
  source 1..75: mol_type = other DNA
ttgaagtgcagcgcgccacccgtctggcgcagcaacaggcgatgtatgaaagccagcaggaacgcgtggcgcatc

SEQ ID NO: 335389 - DNA, 75 bp, synthetic construct
  source 1..75: mol_type = other DNA
ccattgcgaccattcatggcaagctggatgctatcgacgcatggagtattcgctcccgcgccgccagcctgctgc

SEQ ID NO: 335390 - DNA, 75 bp, synthetic construct
  source 1..75: mol_type = other DNA
agcgtatggagctgattgcccccgcgcacgtcgacaacccgttccgctttagcttccgcgcgccggaaagcctgc

SEQ ID NO: 335391 - DNA, 75 bp, synthetic construct
  source 1..75: mol_type = other DNA
attattctcgactcgattaaactgaatctggtccccggctcgcgcattggtctgttaggccgcaacggcgcaggt

SEQ ID NO: 335392 - DNA, 75 bp, synthetic construct
  source 1..75: mol_type = other DNA
tcactctgtaatgccctgtttcaggggaggtcacaccggtcagtgatgttcacgccggcacccgggaagtgcagc

SEQ ID NO: 335393 - DNA, 75 bp, synthetic construct
  source 1..75: mol_type = other DNA
acggcgatctggaagattatcaacagtggttgagcgacgtacaaaaacaggaaactcaaaccgacgaagcgccga

SEQ ID NO: 335394 - DNA, 75 bp, synthetic construct
  source 1..75: mol_type = other DNA
gggaaaaagcccgcctggtactggcgttgatcgtctggcagcgcccaaatctgttgctgctcgacgaaccgacca

SEQ ID NO: 335395 - DNA, 75 bp, synthetic construct
  source 1..75: mol_type = other DNA
caaatccgttactgaagatggaaaaagtcagcgcgggctatggcgatcgcattattctcgactcgattaaactga

SEQ ID NO: 335396 - DNA, 75 bp, synthetic construct
  source 1..75: mol_type = other DNA
atcgcctattcaacatctggcacgtttagcgccgcaggagctggagcaaaaactgcgtgactacctcggcggctt

SEQ ID NO: 335397 - DNA, 75 bp, synthetic construct
  source 1..75: mol_type = other DNA
tgcctctgttgcacgcacagttctgcgtgccgtccgtgacacggtggtctctgttgcccgcgcggtatggaactg

SEQ ID NO: 335398 - DNA, 75 bp, synthetic construct
  source 1..75: mol_type = other DNA
tattatctccgtgaatcccccgccacctttccggtgcgcggggttttgtcttttttcaccgggaatacatgtatg

SEQ ID NO: 335399 - DNA, 75 bp, synthetic construct
  source 1..75: mol_type = other DNA
atgaatccgtctgatgccattgaggcaattgaaaaacccctatcctccctgccttactcactttcccgccatatt

SEQ ID NO: 335400 - DNA, 75 bp, synthetic construct
  source 1..75: mol_type = other DNA
tatgggtggacaaattccacgcagcaatctcaccacacagggtttaggaaaaaaatatcccatagccagtaacaa

SEQ ID NO: 335401 - DNA, 75 bp, synthetic construct
  source 1..75: mol_type = other DNA
ggacgagctgcgcacggagtctgtccgctctcaggcccgtgaacagtttaccggtgcggtggaccggatatttga

SEQ ID NO: 335402 - DNA, 75 bp, synthetic construct
  source 1..75: mol_type = other DNA
gggcgtctgttcctgcccggcctcggttacggcgtggacagcgtgctttacgtggtgaatacccgcaccggtaaa

SEQ ID NO: 335403 - DNA, 75 bp, synthetic construct
  source 1..75: mol_type = other DNA
gccagtcccctgatgacccgactgcaggacgagctgcgcacggaatctgtccgctctcaggcccgtgaacagttt

SEQ ID NO: 335404 - DNA, 75 bp, synthetic construct
  source 1..75: mol_type = other DNA
ccgtaaggttctgcgcgctgttcgtgacaccgtggtctctgttgcccgcgcggtatggaactggattttcttctg

SEQ ID NO: 335405 - DNA, 75 bp, synthetic construct
  source 1..75: mol_type = other DNA
gcacgtcgacaacccgttccgctttagcttccgcgcgccggaaagcctgcctaatccgttgttgaaaatggaaaa

SEQ ID NO: 335406 - DNA, 75 bp, synthetic construct
  source 1..75: mol_type = other DNA
cggcactgttgcaaagttagcgatgaggcagccttttgtcttattcaaaggccttacatttcaaaaactctgctt

SEQ ID NO: 335407 - DNA, 75 bp, synthetic construct
  source 1..75: mol_type = other DNA
tcccgaccatgccgccagtcccctgatgacccgcctgcaggacgggctgcgcacggagtctgtccgctctcaggc

SEQ ID NO: 335408 - DNA, 75 bp, synthetic construct
  source 1..75: mol_type = other DNA
gcaggccgataaaacggagccctgccatgaatgggatatggccggtattcagccttctcccgcacaggcacagaa

SEQ ID NO: 335409 - DNA, 75 bp, synthetic construct
  source 1..75: mol_type = other DNA
ctggaacatctgcgcaaactcaccagtcacgaacccgtgcctggcattatgggtaaaagcgggcccgtaaatcct

SEQ ID NO: 335410 - DNA, 75 bp, synthetic construct
  source 1..75: mol_type = other DNA
ttggcgatagctacacactcatcggtagctggattgtcgatgatgaagcgtgcggaatggggatccgtgaagata

SEQ ID NO: 335411 - DNA, 75 bp, synthetic construct
  source 1..75: mol_type = other DNA
cctggtcatcctaatcttctggcatcctggtttgagggcgagaaaccgcagattgctgcgggcgaaagctacgtg

SEQ ID NO: 335412 - DNA, 75 bp, synthetic construct
  source 1..75: mol_type = other DNA
gacgggatctggaccagatcgccgccgacaacggtttcgactttcatatcatcgacaatgaaatctattgggatg

SEQ ID NO: 335413 - DNA, 75 bp, synthetic construct
  source 1..75: mol_type = other DNA
atcgacaatgaaatctattgggatgagagtcgggcttaccgctttactctgcgccagattgaagagcagatcgaa

SEQ ID NO: 335414 - DNA, 75 bp, synthetic construct
  source 1..75: mol_type = other DNA
tcagaacaacgtcgttgaccatgctgagggtgattacgccgatgaaccgatgatctaccaggcttttcagccttt

SEQ ID NO: 335415 - DNA, 75 bp, synthetic construct
  source 1..75: mol_type = other DNA
cgcacgcgatccttcgttgtatggccgtatggattttgcctggtgtggtaatgcaccggttaagttgctggagta

SEQ ID NO: 335416 - DNA, 75 bp, synthetic construct
  source 1..75: mol_type = other DNA
gcccgctctccgagacggtcatcattaacgcggtgaataactacaagctgcgcaaaatgccgcaaggcagctcgt

SEQ ID NO: 335417 - DNA, 75 bp, synthetic construct
  source 1..75: mol_type = other DNA
ataatgaattttttattttcatggcaatttcagattattttgctctcaaagcaaaggatcgacagaattcaaaag

SEQ ID NO: 335418 - DNA, 75 bp, synthetic construct
  source 1..75: mol_type = other DNA
cacacctgttgcggcggcgttgatattttcgcaaaccttaaatggcagtagtgaagttccgctatgggatcgtct

SEQ ID NO: 335419 - DNA, 75 bp, synthetic construct
  source 1..75: mol_type = other DNA
accagaaggccaaagacttattcgcacagaaagagctgtcagagcgccacataaactgactttaattatttctga

SEQ ID NO: 335420 - DNA, 75 bp, synthetic construct
  source 1..75: mol_type = other DNA
tagaaattggtaaagttatttctgatttacctgaaggtcataaagttattcgtacagaaagagctatcagagcac

SEQ ID NO: 335421 - DNA, 75 bp, synthetic construct
  source 1..75: mol_type = other DNA
tttatcgatgaagactttaacggcgaatggcagatgttcactccgcgtccggcagatgcgccgcgcggcattgag

SEQ ID NO: 335422 - DNA, 75 bp, synthetic construct
  source 1..75: mol_type = other DNA
gcaactggcgatcccgccgttgtactgggatgtgatcgccgaaagctggcgcgcacgcgatccttcgctgtatgg

SEQ ID NO: 335423 - DNA, 75 bp, synthetic construct
  source 1..75: mol_type = other DNA
tctgcattgcctctgttgcacgcacggttctgcgcgccgtccgtgactcggtggtctctgttgcccgcgcggtat

SEQ ID NO: 335424 - DNA, 75 bp, synthetic construct
  source 1..75: mol_type = other DNA
cggggtgggcgagagtcgggacagggatgcagagtatgaagccctgtaccgtgacattctgcctgaactggacct

SEQ ID NO: 335425 - DNA, 75 bp, synthetic construct
  source 1..75: mol_type = other DNA
aatacatgtatgaatccgtctgatgccattgaggcaattgaaaaaccgctctcctccctgccttactcactttcc

SEQ ID NO: 335426 - DNA, 75 bp, synthetic construct
  source 1..75: mol_type = other DNA
gcacactgctggctaacgcacggattaacaaccatatcggccgaacccgaaccgatgaaaacggcgagtttgtca

SEQ ID NO: 335427 - DNA, 75 bp, synthetic construct
  source 1..75: mol_type = other DNA
tggtcagtgcgctcatgacagcgcttcccgaccatgccgccagccccctgatgacccgcctgcaggacgagctgc

SEQ ID NO: 335428 - DNA, 75 bp, synthetic construct
  source 1..75: mol_type = other DNA
cggggtgggcgagagccgggacagggatgcagagtatgaggccctgtaccgtgacattctgcctgaacttgacct

SEQ ID NO: 335429 - DNA, 75 bp, synthetic construct
  source 1..75: mol_type = other DNA
ctctcctccctgccttactcgctttcccgtcacatcctggaacatctgcgcaaactcacccgtcacgaacccgtg

SEQ ID NO: 335430 - DNA, 75 bp, synthetic construct
  source 1..75: mol_type = other DNA
aaaattttgctaggccattcgaatcaaaaaatgaccgatatttacaacgatgtacgcggtaaggagtggaaaaaa

SEQ ID NO: 335431 - DNA, 75 bp, synthetic construct
  source 1..75: mol_type = other DNA
gggatggttaagccagcaacattaaccgttgcatttaaaaaagcccgggattctgtggattacaactggcgtgct

SEQ ID NO: 335432 - DNA, 75 bp, synthetic construct
  source 1..75: mol_type = other DNA
tcactctgtaatgccctgtttcagggggaggtcacaccggtcagtgatgttcacgccggcacccgggaagtgcgg

SEQ ID NO: 335433 - DNA, 75 bp, synthetic construct
  source 1..75: mol_type = other DNA
ggttttagtgcgtcaagcgatggaaaacactggaagttaacatataatgaagaccctcgatattcctatatttta

SEQ ID NO: 335434 - DNA, 75 bp, synthetic construct
  source 1..75: mol_type = other DNA
gaccggatatttgacacagcggagagcgtctgtgttgcctctgttgcccgcgcggtatggaactggattttcttc

SEQ ID NO: 335435 - DNA, 75 bp, synthetic construct
  source 1..75: mol_type = other DNA
gcgccagcaaaggtagccgagcggttaaatgaagtggcgcataaaattatcgcagtgcgtggcaactgcgacagc

SEQ ID NO: 335436 - DNA, 75 bp, synthetic construct
  source 1..75: mol_type = other DNA
tcccgataaccgcaccgtggcaacaggtattactggaaaaacaacgtctgtttctgacgcatggtcatctgtttg

SEQ ID NO: 335437 - DNA, 75 bp, synthetic construct
  source 1..75: mol_type = other DNA
ccagaacgatgtgctggtgtacggtcatacccatctgccagtggcagaacagcggggggagattttccacttcaa

SEQ ID NO: 335438 - DNA, 75 bp, synthetic construct
  source 1..75: mol_type = other DNA
tggaggcgctggaaagcaataacgttccggttgtcgccgcctgtcgtgcgggtgtttgcggctgctgtaagacga

SEQ ID NO: 335439 - DNA, 75 bp, synthetic construct
  source 1..75: mol_type = other DNA
gtgagctgcgtctggcgtacgactgccggggcgcgtgaccacctcccgcctgctgcatacgccaccggggcggtg

SEQ ID NO: 335440 - DNA, 75 bp, synthetic construct
  source 1..75: mol_type = other DNA
ctgccacggtactgaccgaagaaatctgcaacccggtactgacgcaggccgggacggatgccgacgcggatttat

SEQ ID NO: 335441 - DNA, 75 bp, synthetic construct
  source 1..75: mol_type = other DNA
ccaccgaagctgtggcacatgtaacggcagagcttgacgcctggaaacagaaacaggaggcggcgggacggtcga

SEQ ID NO: 335442 - DNA, 75 bp, synthetic construct
  source 1..75: mol_type = other DNA
atgatctgcctcactgatatgtggaaagccagtggtaaaagtgaatctgaatctccgtaccactacctgcgaaac

SEQ ID NO: 335443 - DNA, 75 bp, synthetic construct
  source 1..75: mol_type = other DNA
atgtcatgagtttgaccagaagaaagacatggcgagcttctgcggacaagggctggcagcatggcgctatacgaa

SEQ ID NO: 335444 - DNA, 75 bp, synthetic construct
  source 1..75: mol_type = other DNA
accacggcgcgcctgatgcatgccgccacagaggccgtcgctcacgttaccgccgaactggagatgtggaaacag

SEQ ID NO: 335445 - DNA, 75 bp, synthetic construct
  source 1..75: mol_type = other DNA
acgggaccggcctgtgttgaagcttgcccaacacaagcgttgcaatgcatggatgtcgagaaagtgcagcggcat

SEQ ID NO: 335446 - DNA, 75 bp, synthetic construct
  source 1..75: mol_type = other DNA
acctggaccacggcggttgcctgccatcagtgtgaagatgccccatgcgcgaatgtctgtcctgtgggcgctatt

SEQ ID NO: 335447 - DNA, 75 bp, synthetic construct
  source 1..75: mol_type = other DNA
gcagacgttgcatcaagtcgaaccattgcgggaagttgaggctggcaggcagcgtctggtatttgatgagaatct

SEQ ID NO: 335448 - DNA, 75 bp, synthetic construct
  source 1..75: mol_type = other DNA
tttcgcgtggcggaagataacagctacagcaccgctgacgatgatcttttcaccctgccggaaggcgatatctct

SEQ ID NO: 335449 - DNA, 75 bp, synthetic construct
  source 1..75: mol_type = other DNA
cgattccggtgctggatttagcgccattaggcattgagccaatctgttatctgacagaagaaatcagtaatcaac

SEQ ID NO: 335450 - DNA, 75 bp, synthetic construct
  source 1..75: mol_type = other DNA
acccgcagttgccgtactgaaatcatgccagcaacaactgacacagccctcaaaccatgccagcgccgatctact

SEQ ID NO: 335451 - DNA, 75 bp, synthetic construct
  source 1..75: mol_type = other DNA
tgggcgttcactgcgttaggcgttctcggtaacgatgacaccgcccgcaaactgacgccattaatacgcgcctgg

SEQ ID NO: 335452 - DNA, 75 bp, synthetic construct
  source 1..75: mol_type = other DNA
cggcagttcaccgtcagctttgatgaaaccttaaaaccgtttgtgcgcgatgtttccggcagccgcctgaaagac

SEQ ID NO: 335453 - DNA, 75 bp, synthetic construct
  source 1..75: mol_type = other DNA
actcaaaaccctacgacaagacgcccgcacctggctgctgaaatacccggaacacgccattaccggcctgctacc

SEQ ID NO: 335454 - DNA, 75 bp, synthetic construct
  source 1..75: mol_type = other DNA
cgtgagcgtgcaattattctggcgaaagggggaagcaattggttttacacgtttttatatgcaaaacaggatatg

SEQ ID NO: 335455 - DNA, 75 bp, synthetic construct
  source 1..75: mol_type = other DNA
agccatgttaaacaactacaaatctgatggtgcaagtctatcttatttatcactatgtgcactaataatactgtt

SEQ ID NO: 335456 - DNA, 75 bp, synthetic construct
  source 1..75: mol_type = other DNA
attttcaaataataagacctttacaactgataggggcttggagtttactgatcgttctttcatatagtattggag

SEQ ID NO: 335457 - DNA, 75 bp, synthetic construct
  source 1..75: mol_type = other DNA
gaactgacccgctgggcaggcagaaaatgcccgagcggtgggtcatgggactggcgaataaaggttgggtgcgtg

SEQ ID NO: 335458 - DNA, 75 bp, synthetic construct
  source 1..75: mol_type = other DNA
gatttagcaccgctcaacctcgaatccatatgcacaataaccgacacagaagctaaagagtttcaaactcattgg

SEQ ID NO: 335459 - DNA, 75 bp, synthetic construct
  source 1..75: mol_type = other DNA
agcaagcagcggtgaaagcgctgttcttacgcgagataaagacgcgttttggtaagtatcggttagggtacttgt

SEQ ID NO: 335460 - DNA, 75 bp, synthetic construct
  source 1..75: mol_type = other DNA
atgaaatcattaaccctcttcaatcaaccaattcgtatcggtgaagatggcatgatctgcctcactgatatgtgg

SEQ ID NO: 335461 - DNA, 75 bp, synthetic construct
  source 1..75: mol_type = other DNA
accatggcggagaagttccgtgacgaaggtcgtgacgttctgctgttcgttgacaacatctatcgttacaccctg

SEQ ID NO: 335462 - DNA, 75 bp, synthetic construct
  source 1..75: mol_type = other DNA
gccggtacggaagtatccgcactgctgggccgtatgccttcagcggtaggttatcagccgaccctggcggaagag

SEQ ID NO: 335463 - DNA, 75 bp, synthetic construct
  source 1..75: mol_type = other DNA
cgataatatctatcgttacaccctggccggtacggaagtatccgcactgctgggccgtatgccttcagcggtagg

SEQ ID NO: 335464 - DNA, 75 bp, synthetic construct
  source 1..75: mol_type = other DNA
gctggggccgctttccgacaggattggccgcaggccggtgctgattaccggggcgctaatatttacccttgcctg

SEQ ID NO: 335465 - DNA, 75 bp, synthetic construct
  source 1..75: mol_type = other DNA
gggcgttatcgtcgttttcaccctggcaggattgcttaatcgcgtgcgccaacatcaggctgccgagctggcgga

SEQ ID NO: 335466 - DNA, 75 bp, synthetic construct
  source 1..75: mol_type = other DNA
agatgaacgagccgccggggaaccgtctgcgcgttgctctgaccggtctgaccatggctgagaaattccgtgacg

SEQ ID NO: 335467 - DNA, 75 bp, synthetic construct
  source 1..75: mol_type = other DNA
ctgatatctttaatggatttgaacgaagctagcctgaacgcggcatctacaagggctggggaatcaaaaattaaa

SEQ ID NO: 335468 - DNA, 75 bp, synthetic construct
  source 1..75: mol_type = other DNA
gaacatttaggtaacaaccatctggatattggtgttggcactgggttttaccttactcacgtacctgagagtagt

SEQ ID NO: 335469 - DNA, 75 bp, synthetic construct
  source 1..75: mol_type = other DNA
gatgtcctacaaaggaacaccttcttccacactttctggaacatgtaggtaacaaccatctggatattggtgttg

SEQ ID NO: 335470 - DNA, 75 bp, synthetic construct
  source 1..75: mol_type = other DNA
gtggtgtacagtccatcctgcaacgttatcaggaactgaaagatatcatcgccatcctgggtatggatgaactgt

SEQ ID NO: 335471 - DNA, 75 bp, synthetic construct
  source 1..75: mol_type = other DNA
cgggcgtacgagatgaacgccaaaatggtgtcggctgcggacgatatgttgcagtacatcagccagacgctgtaa

SEQ ID NO: 335472 - DNA, 75 bp, synthetic construct
  source 1..75: mol_type = other DNA
gatgaatgtcgccattatggggcagggatttttgcaggtgcaaaaggccaacggcgatatcgcctatacccgcga

SEQ ID NO: 335473 - DNA, 75 bp, synthetic construct
  source 1..75: mol_type = other DNA
tctcggtcgaaatcggtcgctggctgtggtttaacggcgggcgttatcgtcgttttcaccctggcgggattgctt

SEQ ID NO: 335474 - DNA, 75 bp, synthetic construct
  source 1..75: mol_type = other DNA
gcttacaggagtggacagtggattgtcagtgtagcctgtagcaagggatggcgttggtggaacagaaagaataaa

SEQ ID NO: 335475 - DNA, 75 bp, synthetic construct
  source 1..75: mol_type = other DNA
atcggtacccgtatgggaagtacaagatatatggctcccgagattttatataatgccgagtattcagttaagact

SEQ ID NO: 335476 - DNA, 75 bp, synthetic construct
  source 1..75: mol_type = other DNA
aacctggccatgctggagcttctcgcacagcaggctggtatccctgggcagaaaacggctggcacaacaacagtt

SEQ ID NO: 335477 - DNA, 75 bp, synthetic construct
  source 1..75: mol_type = other DNA
cacgacgtatataagtcaaagcatactaatgctcatatagcctttaatgaatatcttcttcgttcaaatctgcca

SEQ ID NO: 335478 - DNA, 75 bp, synthetic construct
  source 1..75: mol_type = other DNA
catctcaggctaaaacctacgtctcaggcaaaaaaacgggtaagcaatttgttttgaacaattggggggagaggc

SEQ ID NO: 335479 - DNA, 75 bp, synthetic construct
  source 1..75: mol_type = other DNA
cgtctttttggtgattctgaagcctctaaaatactgagatctggaagatgtgcccctgtacgctttggcgcttat

SEQ ID NO: 335480 - DNA, 75 bp, synthetic construct
  source 1..75: mol_type = other DNA
cggggctgtttgttgtgttaacgctggcggggttactgaaacgcgtgcagttgcatcaggcaagcgaactggcgg

SEQ ID NO: 335481 - DNA, 75 bp, synthetic construct
  source 1..75: mol_type = other DNA
taccttcttcactgcctgcctggaaatatatctacaaaaagctgtgtaatacgcaatgcggcgcaggccttaact

SEQ ID NO: 335482 - DNA, 75 bp, synthetic construct
  source 1..75: mol_type = other DNA
ccttgggcacggatttgatctttctgccatggtggagaatggtcaagtatatttatatacatcaagtgtaaccaa

SEQ ID NO: 335483 - DNA, 75 bp, synthetic construct
  source 1..75: mol_type = other DNA
cgacggtgattgctgaatttgaatctctggaagcagcgcaagcctgggccgatgccgatccttacgtagcggccg

SEQ ID NO: 335484 - DNA, 75 bp, synthetic construct
  source 1..75: mol_type = other DNA
agctgatagcctcgaaaaacgcctttccgttcgtccggcacatttagcacgtttacagttactgcatgatgaagg

SEQ ID NO: 335485 - DNA, 75 bp, synthetic construct
  source 1..75: mol_type = other DNA
aattatttgagcagtgcgctggataaaattgaggcgcattacgacggcggtgaatgggatttttatgaactctca

SEQ ID NO: 335486 - DNA, 75 bp, synthetic construct
  source 1..75: mol_type = other DNA
tattattctgcatgagatatggcagggagtgttgtcgggtaaaatcccggtaagccatccttctgttttcaaatt

SEQ ID NO: 335487 - DNA, 75 bp, synthetic construct
  source 1..75: mol_type = other DNA
ccaggcggcatttcctgttattgccgcaatcggcgggatgattgtcccggcattgctctatctggcttttaacta

SEQ ID NO: 335488 - DNA, 75 bp, synthetic construct
  source 1..75: mol_type = other DNA
ggtactcgcggtattgaatctgtgtggtgtacgccgcacgggcgtttatattctggttggcgtggtgctgtggac

SEQ ID NO: 335489 - DNA, 75 bp, synthetic construct
  source 1..75: mol_type = other DNA
cggcgatcaattggggtacggttaccgacgtagctaaacgcaaatcagcgtttgctggtacgccagtcagcgtcg

SEQ ID NO: 335490 - DNA, 75 bp, synthetic construct
  source 1..75: mol_type = other DNA
acacaaggatgcgattaccgcgctggcgaaaagtatcagtatcgcccagctctcaggcttacaactggtgattta

SEQ ID NO: 335491 - DNA, 75 bp, synthetic construct
  source 1..75: mol_type = other DNA
tcactctcaaattcgaacatattagatacagggttcagactatttagcttagatacatcaaatataataccttgg

SEQ ID NO: 335492 - DNA, 75 bp, synthetic construct
  source 1..75: mol_type = other DNA
taccctcgcctaaaattagcaagaaacttacttgccaactctggttttatttttatatcgattgatgaaaatgaa

SEQ ID NO: 335493 - DNA, 75 bp, synthetic construct
  source 1..75: mol_type = other DNA
cagaacagcttgatgcttatgtaagcccaatccttgaaggccgtagtgaagaagacttgctgactgaactgatgc

SEQ ID NO: 335494 - DNA, 75 bp, synthetic construct
  source 1..75: mol_type = other DNA
gcactggagaaatttaatggcgataaaacagcagcggcgaattatttaggtatcagccggacgacgttctggcgg

SEQ ID NO: 335495 - DNA, 75 bp, synthetic construct
  source 1..75: mol_type = other DNA
gggtgcaggcaggtcttgccgacgatgtgatgtcaccggatgaggccttttcttttctgttaaaggagacagcaa

SEQ ID NO: 335496 - DNA, 75 bp, synthetic construct
  source 1..75: mol_type = other DNA
agcgcctgctgaacacgccgctggccattcatccgcgaaaagcggaaatcattgttacggcactggcagaacgac

SEQ ID NO: 335497 - DNA, 75 bp, synthetic construct
  source 1..75: mol_type = other DNA
ggcgtatctataataaagcgcttgaacaaaaagtcagtggtacgtggaatcgtctgaggtcgagcttaaaggggt

SEQ ID NO: 335498 - DNA, 75 bp, synthetic construct
  source 1..75: mol_type = other DNA
ttcttgataccgcaagtgcggaccctctgcgttacaacctggctgccatggttgcgcgttttaatgaaaccgggc

SEQ ID NO: 335499 - DNA, 75 bp, synthetic construct
  source 1..75: mol_type = other DNA
cgacacctcctatgaactggaagctctgctggagcaacgcgttaagcgtcagctgctggcggaagttcagtccat

SEQ ID NO: 335500 - DNA, 75 bp, synthetic construct
  source 1..75: mol_type = other DNA
aagccatattcagggggagcgaaattccaaaataacgatactttattcgctcggataactccatgcctagaaaat

SEQ ID NO: 335501 - DNA, 75 bp, synthetic construct
  source 1..75: mol_type = other DNA
gcgtatcgttgagtttattgaaaaaccggacgagccgcagaccctggactccgatctgatggcggtggggcgcta

SEQ ID NO: 335502 - DNA, 75 bp, synthetic construct
  source 1..75: mol_type = other DNA
attgcgttataacctcgctgcgatggtggcacgttataacgaaacaggccgcagccaggtgctggcgaaacgtat

SEQ ID NO: 335503 - DNA, 75 bp, synthetic construct
  source 1..75: mol_type = other DNA
tgatggccgtagggcgctacgtgctttctgctgatatctgggctgagttggaaaaaactgctccaggtgcctggg

SEQ ID NO: 335504 - DNA, 75 bp, synthetic construct
  source 1..75: mol_type = other DNA
gtcttaaatacgctgacgttggttctttcgattacggccgtaactacggtgtggtttatgatgcactgggttaca

SEQ ID NO: 335505 - DNA, 75 bp, synthetic construct
  source 1..75: mol_type = other DNA
caaagctgtgaggactttcttgaagaaattaacaagaacagtatctcgaatggcagttatcgtggatattattcc

SEQ ID NO: 335506 - DNA, 75 bp, synthetic construct
  source 1..75: mol_type = other DNA
tcatccgcaagtaatgttgaggaagataaatttataccaatcgaaaattttttgaatgttgcagaaataagaaac

SEQ ID NO: 335507 - DNA, 75 bp, synthetic construct
  source 1..75: mol_type = other DNA
gttctatcttttaaaaaaaatagatttgaacaattatagtactggttcaggccaacctctcattaaccaaacaat

SEQ ID NO: 335508 - DNA, 75 bp, synthetic construct
  source 1..75: mol_type = other DNA
taattcttcccctgttgttcaaattaagtacctggctattgataaagaacgtattcccgcgacggatatggaaat

SEQ ID NO: 335509 - DNA, 75 bp, synthetic construct
  source 1..75: mol_type = other DNA
tggtctggttgatggcctgaacttcgctgttcagtacctgggtaaaaacgagcgtgacactgcacgccgttccta

SEQ ID NO: 335510 - DNA, 75 bp, synthetic construct
  source 1..75: mol_type = other DNA
ttgcctttgcacttggtgtgctggcgctgttgggaagtcgtgttccgttagcgctgaagatctttttgatggctc

SEQ ID NO: 335511 - DNA, 75 bp, synthetic construct
  source 1..75: mol_type = other DNA
ggcagtccggcagaagagcgactggcggtcagaaaagccagaacggtaccgctaatgcagtcgttgtatgagtgg

SEQ ID NO: 335512 - DNA, 75 bp, synthetic construct
  source 1..75: mol_type = other DNA
caggcgatgttgtggcaagcctgcccagacccgcaatatgttgttgatgtgacggtcggttctaatcacagccgt

SEQ ID NO: 335513 - DNA, 75 bp, synthetic construct
  source 1..75: mol_type = other DNA
cgctgggcgaagtcctatgcctgatgaagggtcaagccgtcattttgtacccggatggcgctcggtcgctgggtg

SEQ ID NO: 335514 - DNA, 75 bp, synthetic construct
  source 1..75: mol_type = other DNA
ggggctttttaattatcggccagtaaagcccatggatacaataatagccagaaccctgcttgagacactaattta

SEQ ID NO: 335515 - DNA, 75 bp, synthetic construct
  source 1..75: mol_type = other DNA
gtacagtccggaccggaaaggtatccatccacaaaatcacctggccggttacagcggtgtgcttcaggccgatgc

SEQ ID NO: 335516 - DNA, 75 bp, synthetic construct
  source 1..75: mol_type = other DNA
tatcgtgcaggcaccggtgccttcaaaacccattgcacgcagttatgccggagcggggctcctggcccatgtcgt

SEQ ID NO: 335517 - DNA, 75 bp, synthetic construct
  source 1..75: mol_type = other DNA
aaggctttagctggccttggctttggtgatgcgatggcgatgctgaaaagcacctcagacatagccgaggaaaag

SEQ ID NO: 335518 - DNA, 75 bp, synthetic construct
  source 1..75: mol_type = other DNA
acctgctactcacaaccactgacccgatacggaaacagactgtcgagcagaatattttactcaaaccggaccagt

SEQ ID NO: 335519 - DNA, 75 bp, synthetic construct
  source 1..75: mol_type = other DNA
gtgagctggcacccgctgtcgcccgagccttcaacaaactcaaaaccctacgacaagacgcccgtacctggcttc

SEQ ID NO: 335520 - DNA, 75 bp, synthetic construct
  source 1..75: mol_type = other DNA
aaatccctcgatacccgcctttcgccaagggcctgccagtggccccattagacaagatactggcaacccaagccg

SEQ ID NO: 335521 - DNA, 75 bp, synthetic construct
  source 1..75: mol_type = other DNA
atgctgaaagccctgcacaaattatttggtgggcgaagtggagcgatcgaaaccgcgccaagcgccagagtgttg

SEQ ID NO: 335522 - DNA, 75 bp, synthetic construct
  source 1..75: mol_type = other DNA
caagaagggcaagcagcagagtaaaccgggtaaagcaagagcggagaaacaaccccagaaacctgaggtaaaaga

SEQ ID NO: 335523 - DNA, 75 bp, synthetic construct
  source 1..75: mol_type = other DNA
acattcgatcccacagcaatactggacatatctactctggaacccattagtccatgtcgtagagttaagtcgtga

SEQ ID NO: 335524 - DNA, 75 bp, synthetic construct
  source 1..75: mol_type = other DNA
gtgcaatatcgtctgaccgacgataaccgtatctccattacttatcgcgccacagttgataaaccttgcccggtg

SEQ ID NO: 335525 - DNA, 75 bp, synthetic construct
  source 1..75: mol_type = other DNA
gcagattctggcggacgaatatctgccggttgatgaaggcggcattccgcacgacggtctgaaatctgtcgccgg

SEQ ID NO: 335526 - DNA, 75 bp, synthetic construct
  source 1..75: mol_type = other DNA
ggcccggaagggttcgacaaacgtcgctggcagattgtgaaccagaacgatcgtcaggtgctgtttgccctgagt

SEQ ID NO: 335527 - DNA, 75 bp, synthetic construct
  source 1..75: mol_type = other DNA
ccaggccgcatttccagttatcgccgctattggtgggatgattgtgccggcattgctctatctggcctttaacta

SEQ ID NO: 335528 - DNA, 75 bp, synthetic construct
  source 1..75: mol_type = other DNA
tgcaaggatcgctagccagcttacgccaggccgcatttccagttatcgccgctattggtgggatgattgttccgg

SEQ ID NO: 335529 - DNA, 75 bp, synthetic construct
  source 1..75: mol_type = other DNA
ccactggggattagtctgttctgctggttggcgctgcgtttgaaactggcgcatctgcctgagggaacgacttat

SEQ ID NO: 335530 - DNA, 75 bp, synthetic construct
  source 1..75: mol_type = other DNA
ccaaatgaatgctatttccagcaaactaccggaaggcttccatgtcgggataaacttcagtgcatcgcatatcgc

SEQ ID NO: 335531 - DNA, 75 bp, synthetic construct
  source 1..75: mol_type = other DNA
tgcatatgcgggttacaatgctctttacgaaagcggtcaggcaaccgaagcggcttgtatggcacatgcccgacg

SEQ ID NO: 335532 - DNA, 75 bp, synthetic construct
  source 1..75: mol_type = other DNA
ggatacgttatgcaccgtacaatgccggatatttcgttcccagtttttttacttaatggtctgattccctttttt

SEQ ID NO: 335533 - DNA, 75 bp, synthetic construct
  source 1..75: mol_type = other DNA
agagcggaaggttttttctgtattcatcgcctgtttattgttgattcgatttcgtttcacaacattgataagcaa

SEQ ID NO: 335534 - DNA, 75 bp, synthetic construct
  source 1..75: mol_type = other DNA
caaagtactgggctgggtgacggagaaaatccgccaaccgctgattgccggtgggctggtttgcgatgaagaaga

SEQ ID NO: 335535 - DNA, 75 bp, synthetic construct
  source 1..75: mol_type = other DNA
tttggcacgtaagctctccatcagcattgttgccgaaggtgtggaaacgaaggcacaactagactatctgaatca

SEQ ID NO: 335536 - DNA, 75 bp, synthetic construct
  source 1..75: mol_type = other DNA
accggatcgcttttttcgcatcgttgcgcaggagcgcggctggcgtttagcgaaaaactacgccgtcgggatgat

SEQ ID NO: 335537 - DNA, 75 bp, synthetic construct
  source 1..75: mol_type = other DNA
tgaagacttgcccgatgaagaagtgggtagccgcgaactggacgacgacacgcttgccagctaccagaaacagtt

SEQ ID NO: 335538 - DNA, 75 bp, synthetic construct
  source 1..75: mol_type = other DNA
acctgcgcctctgaagtcggtatctgggattatcagcctgacgaagtggtcgaaaaaggccgcgtcgggccaggc

SEQ ID NO: 335539 - DNA, 75 bp, synthetic construct
  source 1..75: mol_type = other DNA
ccacgcctacaacccggacgtggtgcgcacgctgcaacaggcggtacaaagcggcgagtacagcgactatcagga

SEQ ID NO: 335540 - DNA, 75 bp, synthetic construct
  source 1..75: mol_type = other DNA
tgcgatgtctatcggcgcgttaagcccggaagcccacgaggcgctggcggaagcgatgaatagcatcggcggtaa

SEQ ID NO: 335541 - DNA, 75 bp, synthetic construct
  source 1..75: mol_type = other DNA
gacccggcgcgctatggcactaacaaagtgtcgcgcatcaagcaggtggcttctggtcgcttcggcgttactccg

SEQ ID NO: 335542 - DNA, 75 bp, synthetic construct
  source 1..75: mol_type = other DNA
atgactgtactgattcacgtactgggatcggatatccctcaccataaccaaaccgttttgcggtttttcaacgac

SEQ ID NO: 335543 - DNA, 75 bp, synthetic construct
  source 1..75: mol_type = other DNA
ccggctggcacaaaagcgagttggctgcgtatttgctactcgcggtgatttgagcttttttgctaaaacgcatcc

SEQ ID NO: 335544 - DNA, 75 bp, synthetic construct
  source 1..75: mol_type = other DNA
cgcccattacgatgctctcgaaacccgcttctggcagttttatccgcggatgatggcgcaggcgtcacgcaaggc

SEQ ID NO: 335545 - DNA, 75 bp, synthetic construct
  source 1..75: mol_type = other DNA
tgcgtgaagcgcagcgccagttggcgtcggtggataaaaacaccattgccttctttagccctaactatctacaag

SEQ ID NO: 335546 - DNA, 75 bp, synthetic construct
  source 1..75: mol_type = other DNA
gatttgagcttttttgccaaaacgcatccaaaggtgcggggcgaactgctgtacttcccgacgcggatggaccct

SEQ ID NO: 335547 - DNA, 75 bp, synthetic construct
  source 1..75: mol_type = other DNA
gatcggatatccctcaccataatcgaaccgttttgcggtttttcaacgacgtgctggccgcaacgagtgagcacg

SEQ ID NO: 335548 - DNA, 75 bp, synthetic construct
  source 1..75: mol_type = other DNA
ggtgctctccgaccggaatatcgctaaagatcgcctgccggttccggccccgatggcggttggcgcgatccagac

SEQ ID NO: 335549 - DNA, 75 bp, synthetic construct
  source 1..75: mol_type = other DNA
cgacactgcgcgatctgctggcgattactccgggtgaaaacgcggtcaacattgctgatgttgaaccagccagtg

SEQ ID NO: 335550 - DNA, 75 bp, synthetic construct
  source 1..75: mol_type = other DNA
aactgtttaaacgcttcgataccgccgcaatgtctatcggcgcgttaagcccggaagcccacgaggcgctggcgg

SEQ ID NO: 335551 - DNA, 75 bp, synthetic construct
  source 1..75: mol_type = other DNA
ctctttctgtgcccgtgcgcaacggttcggaagtggggttcccgcagagcctgggggaggttcacgatatgttgt

SEQ ID NO: 335552 - DNA, 75 bp, synthetic construct
  source 1..75: mol_type = other DNA
cgattgccaaagattatcgtaccgtgatgctcaactaccgtaacggcatcaacaaaggcttgtacaaaatcatgt

SEQ ID NO: 335553 - DNA, 75 bp, synthetic construct
  source 1..75: mol_type = other DNA
acccgccaatcgacccgctgcgtgaagcgcatgttatgtcgctcgccaccagtatcggtcgtgaaatgaacgtct

SEQ ID NO: 335554 - DNA, 75 bp, synthetic construct
  source 1..75: mol_type = other DNA
caacgaaaccggctctgactccagttcgatggataacatgctggaactgctgctggcaggcgggatggatatcat

SEQ ID NO: 335555 - DNA, 75 bp, synthetic construct
  source 1..75: mol_type = other DNA
cggccatttgcctgttccaccagcgcttctccactaacaccgtaccgcgctggccgctggcgcaaccgttccgct

SEQ ID NO: 335556 - DNA, 75 bp, synthetic construct
  source 1..75: mol_type = other DNA
tcgcccgccgccgcattgaaaagcgtctcgaagccgacaaagacttctacgtctgtagcctgtcgaatctggtga

SEQ ID NO: 335557 - DNA, 75 bp, synthetic construct
  source 1..75: mol_type = other DNA
catctgcgtggtcttatcaccgagcatgttcagcataccggttctcagcgtggtgaagagattctggcgaactgg

SEQ ID NO: 335558 - DNA, 75 bp, synthetic construct
  source 1..75: mol_type = other DNA
ggcagccgatcctatcaaagcgtacttcaacggcactgcaggccagagcttcggcgtgtggaacgcgggcggcgt

SEQ ID NO: 335559 - DNA, 75 bp, synthetic construct
  source 1..75: mol_type = other DNA
atggatatcatccgtgccatgcgtctgttagtgccacctgcctggcagaacaacccggatatggacccggaactg

SEQ ID NO: 335560 - DNA, 75 bp, synthetic construct
  source 1..75: mol_type = other DNA
ttcagattaaagtcgcccagggcgcgaagccgggcgaaggcggtcaattgccgggtgataaagtcactccttaca

SEQ ID NO: 335561 - DNA, 75 bp, synthetic construct
  source 1..75: mol_type = other DNA
gccacgctttatcaatctgaacaactacttatggtcagagcagtggctggtgcgctatcgcgatatggatttcat

SEQ ID NO: 335562 - DNA, 75 bp, synthetic construct
  source 1..75: mol_type = other DNA
tgctcggacaaaatccgctgcggattgctgtcaccagcgaatacctgttccgctccaccgacaacgaaacgctgc

SEQ ID NO: 335563 - DNA, 75 bp, synthetic construct
  source 1..75: mol_type = other DNA
cggagacaatcatcaggccatgtaccagtggttaaaacataatgatccttcacgccctgtacagtatgaaggcgg

SEQ ID NO: 335564 - DNA, 75 bp, synthetic construct
  source 1..75: mol_type = other DNA
ttatcctatagtgtcataaattgtattgtactgaatatttataatccatggtatccaaaagagaaattttgctat

SEQ ID NO: 335565 - DNA, 75 bp, synthetic construct
  source 1..75: mol_type = other DNA
tataacgaagcattaaagcaggagcattcagagcagtcgtttgggtggaattcagataaggacgaagaaaatatg

SEQ ID NO: 335566 - DNA, 75 bp, synthetic construct
  source 1..75: mol_type = other DNA
ttacggcaggtgtctcagggagtattgggaaagataagctgtttggttttgttagcgccaaagctcatgctgatt

SEQ ID NO: 335567 - DNA, 75 bp, synthetic construct
  source 1..75: mol_type = other DNA
ggcggcatttaatggcgtggccacgcttatcggcacatccacatgggactccctgtttcatatagtgggattctt

SEQ ID NO: 335568 - DNA, 75 bp, synthetic construct
  source 1..75: mol_type = other DNA
actgacaccgcaggaagcggaggagtggtatcgcgggcgcgatgtttacccgcaagccgcgccagtggcggatga

SEQ ID NO: 335569 - DNA, 75 bp, synthetic construct
  source 1..75: mol_type = other DNA
cgacgatgaagaggcattaccgttgggcagtaccgccgaacatttaagtggcctgttttatattcaggaagccag

SEQ ID NO: 335570 - DNA, 75 bp, synthetic construct
  source 1..75: mol_type = other DNA
cttcctcatcaggtaacaagcgtgcataccggaaaggtaaccctgttccggccagagagaggcaaagggcttctc

SEQ ID NO: 335571 - DNA, 75 bp, synthetic construct
  source 1..75: mol_type = other DNA
attcgggcgggatattgtgaagttgaaacctgtcgtgactacggtggtaacgagcgcgtgacgcttggtcgctat

SEQ ID NO: 335572 - DNA, 75 bp, synthetic construct
  source 1..75: mol_type = other DNA
ccccgatgcagtagaatttttaccgcttggcgatcttttctctggtgcggacaaggcgctgaccgaagaaggctt

SEQ ID NO: 335573 - DNA, 75 bp, synthetic construct
  source 1..75: mol_type = other DNA
atttcccagacgcctttctgacgcaaatgcgcgaagtgctgccttcgacgctctcttttgatgattttcttgctg

SEQ ID NO: 335574 - DNA, 75 bp, synthetic construct
  source 1..75: mol_type = other DNA
tcacacaaatacagcatggctgaactgatgcagtcatctgacccttatgaaatcatcttccgcaaacccagcccg

SEQ ID NO: 335575 - DNA, 75 bp, synthetic construct
  source 1..75: mol_type = other DNA
acgtggtgcgttttcccgcagacagcgaattgcccgatccctatgacggtttgattcccgggcaggagagtctga

SEQ ID NO: 335576 - DNA, 75 bp, synthetic construct
  source 1..75: mol_type = other DNA
atgagtttttccgttgatgtgctggcgaatatcgccatcgaattgcagcgtgggattggtcatcaggatcgtttt

SEQ ID NO: 335577 - DNA, 75 bp, synthetic construct
  source 1..75: mol_type = other DNA
atactgctggcactgattattgtggtcctgctgactactgtcagcgtcagtgtgtatatactgtgtagctggtga

SEQ ID NO: 335578 - DNA, 75 bp, synthetic construct
  source 1..75: mol_type = other DNA
tcatatgcatcggcgaatcgacgtattaaccgacaatctgccggaagtccgcgaagcgcgggagtggtttcgtaa

SEQ ID NO: 335579 - DNA, 75 bp, synthetic construct
  source 1..75: mol_type = other DNA
gcgaagcgcgggagtggtttcgtaatgaaacgcgccgtgtcgcgcctattacgctggatgtgatgtgggatcact

SEQ ID NO: 335580 - DNA, 75 bp, synthetic construct
  source 1..75: mol_type = other DNA
acgctggatgtcatgtgggatcactttctttcccgccactggtcgcagctgtcgccggactttccgctacaggaa

SEQ ID NO: 335581 - DNA, 75 bp, synthetic construct
  source 1..75: mol_type = other DNA
ttaatgaaccgttaaaaaaccaggaaatatccacaggcaatatcaatgttaattgcccattgaaagatatttaca

SEQ ID NO: 335582 - DNA, 75 bp, synthetic construct
  source 1..75: mol_type = other DNA
aacggtaatattgatgcaaagagcaaacttcaagagctcaaaaagctaaagcgaatggatagaaggaagaataag

SEQ ID NO: 335583 - DNA, 75 bp, synthetic construct
  source 1..75: mol_type = other DNA
cagcaatgacctatgatttaagtgaagaaaagttgatgaaactgaagtataaatcacaacatggtgattcagagg

SEQ ID NO: 335584 - DNA, 75 bp, synthetic construct
  source 1..75: mol_type = other DNA
atttaaacatagaagactctagctcagaagagttactttcagataatggtatcgagaaagacgataattcttctg

SEQ ID NO: 335585 - DNA, 75 bp, synthetic construct
  source 1..75: mol_type = other DNA
gttccaaaaattaattacaatacagatttaaacatagaggactctagctcagaggaattccttccagataataca

SEQ ID NO: 335586 - DNA, 75 bp, synthetic construct
  source 1..75: mol_type = other DNA
atataatcattgaagattatgaaaatatcaaagaaaatgcttatctggtcgtcccccaaattaattatactatgg

SEQ ID NO: 335587 - DNA, 75 bp, synthetic construct
  source 1..75: mol_type = other DNA
ccgccacgctgtttttcccgatggcgttgattttgtatgactttgctgcgtatctgtcgacggatctgatccagc

SEQ ID NO: 335588 - DNA, 75 bp, synthetic construct
  source 1..75: mol_type = other DNA
taatgaaacacgccagttcgcccggatgttgggacttgaaccgaagaacacggcggtgcggagtccggagagtaa

SEQ ID NO: 335589 - DNA, 75 bp, synthetic construct
  source 1..75: mol_type = other DNA
accgccgctgtctggctgggcgcagtgcaatggttcccggagtccgctatctgggcatggccgctggtcactaac

SEQ ID NO: 335590 - DNA, 75 bp, synthetic construct
  source 1..75: mol_type = other DNA
acggttcggtgcacaacggcctgctccaaccgccggccgcgcgctgggccgaggccgtggcgcgtgtcggcgtac

SEQ ID NO: 335591 - DNA, 75 bp, synthetic construct
  source 1..75: mol_type = other DNA
tatcaggatcactggcgtgaccgggatgacgggcattaatgacgttcctctgaccgtgacggtgctgtctcctca

SEQ ID NO: 335592 - DNA, 75 bp, synthetic construct
  source 1..75: mol_type = other DNA
aaggccgccctgacgctgcgcgagctagagcgctggctcacattggcgggcactgttgcaaatagtcggtggtga

SEQ ID NO: 335593 - DNA, 75 bp, synthetic construct
  source 1..75: mol_type = other DNA
ggtatccgtaccgtgctgactgccgcaggtgagaagggcgcgctgatgtacgcgatggggatcgccgcggcgaca

SEQ ID NO: 335594 - DNA, 75 bp, synthetic construct
  source 1..75: mol_type = other DNA
ggctgtttgttgtgttaacgctggcggggttactgaaacgcgtgcagttgcatcaggcaagcgaactggcggtat

SEQ ID NO: 335595 - DNA, 75 bp, synthetic construct
  source 1..75: mol_type = other DNA
gcgttatcgtcgttttcaccctggcaggattgcttaatcgcgtgcgccaacatcaggctgccgagctggcggagg

SEQ ID NO: 335596 - DNA, 75 bp, synthetic construct
  source 1..75: mol_type = other DNA
cggggatcgcgctgggggcagtcataactgcgctgatggtggtgttcctgcgtctgatgatgttccgggtaatga

SEQ ID NO: 335597 - DNA, 75 bp, synthetic construct
  source 1..75: mol_type = other DNA
aattctccggtttcgacctctccttactgaagtttgcctggctgtcacagtcctttggtggcgtgctgtttggct

SEQ ID NO: 335598 - DNA, 75 bp, synthetic construct
  source 1..75: mol_type = other DNA
tgctggcgatgtattacgtgatcacgccgtttggtggctggatcaacggtggcattcgcgccatgttgacggcag

SEQ ID NO: 335599 - DNA, 75 bp, synthetic construct
  source 1..75: mol_type = other DNA
ctcgcaggcggaagtcgagaacgaagtacacgtcaccgttggtgtggtgcgttacgacgtggaaggccgcgcccg

SEQ ID NO: 335600 - DNA, 75 bp, synthetic construct
  source 1..75: mol_type = other DNA
aaactggcctgaacgctttggctgtgtattaagccagtcaggatcgtactggtggccgcatcggggcgggcagca

SEQ ID NO: 335601 - DNA, 75 bp, synthetic construct
  source 1..75: mol_type = other DNA
tgccggactgcactggcctgaacgctttggctgtgtattaagccagtcaggatcgtactggtggccgcatcgggg

SEQ ID NO: 335602 - DNA, 75 bp, synthetic construct
  source 1..75: mol_type = other DNA
gtctggcagtggacgacacaacttaatgccaactggcgcggcagctactgttttattcccaccgaacgcgatgac

SEQ ID NO: 335603 - DNA, 75 bp, synthetic construct
  source 1..75: mol_type = other DNA
gatcacgctggcctttcgcgccaccatcaacaatcaacgtatatatgaaaccctgggtcagttccctcagctctg

SEQ ID NO: 335604 - DNA, 75 bp, synthetic construct
  source 1..75: mol_type = other DNA
tacaatcagaaaggcatcttttcaaacacaaaagattccgaagaaggcttaacacatatactctcagagcatttc

SEQ ID NO: 335605 - DNA, 75 bp, synthetic construct
  source 1..75: mol_type = other DNA
ggaaccttttcccgtatgtgccgggatgctggaataagtggtttacgtatacatgatctccgccggacctttgcg

SEQ ID NO: 335606 - DNA, 75 bp, synthetic construct
  source 1..75: mol_type = other DNA
acgacttattagcggcaaaactgaacgttaagttggtgaacgcaggcgactataaattcaaacaaatcgccagtg

SEQ ID NO: 335607 - DNA, 75 bp, synthetic construct
  source 1..75: mol_type = other DNA
atgatttattggcggcaaaactgaacgttaagctggtgaacgcgggcgactataaattcaaacaaatcgccagcg

SEQ ID NO: 335608 - DNA, 75 bp, synthetic construct
  source 1..75: mol_type = other DNA
accgatttaactcccacccagcttgcctgggtttctggctatttctggggcgtgctcaaccagcagcctgctgcg

SEQ ID NO: 335609 - DNA, 75 bp, synthetic construct
  source 1..75: mol_type = other DNA
cgccgcgcctctattccatcgcctcatcgcaggctgaagtggaaagtgaagtgcacgtcaccgttggtgtcgttc

SEQ ID NO: 335610 - DNA, 75 bp, synthetic construct
  source 1..75: mol_type = other DNA
tacggaagatttcctctatcaggtggaatggcagcgttacgtcaaagaaggcgtgctgacgcgtatcgatctcgc

SEQ ID NO: 335611 - DNA, 75 bp, synthetic construct
  source 1..75: mol_type = other DNA
cgccgcgcctgtattccatcgcctcatcgcaggcggaagtcgagagcgaagtgcacatcaccgtcggcgttgtgc

SEQ ID NO: 335612 - DNA, 75 bp, synthetic construct
  source 1..75: mol_type = other DNA
atcagcgcctgcaaggcgctttccaatcgacgtatgcactggcggcaaaattaagccagctgctgcaacaaacta

SEQ ID NO: 335613 - DNA, 75 bp, synthetic construct
  source 1..75: mol_type = other DNA
ggtgtctgtgtggaagcgatgcgttgatggaattgagatcgttagccttgaaagatatttaggtaaattcgacta

SEQ ID NO: 335614 - DNA, 75 bp, synthetic construct
  source 1..75: mol_type = other DNA
aagtgatgctaccgtccaacaagacgggcgaatcattgctaaagatgtagaatatcgctttgttaaagataaaaa

SEQ ID NO: 335615 - DNA, 75 bp, synthetic construct
  source 1..75: mol_type = other DNA
catggataataagaacgttctcaatagtaaaacaatgaccatccgtgatggtgttttggataaagggaacattaa

SEQ ID NO: 335616 - DNA, 75 bp, synthetic construct
  source 1..75: mol_type = other DNA
tccggttattcgaatcaaaaatcagggtagcacgccaggaactttcgaaggcaatgatctgattatcgaatggga

SEQ ID NO: 335617 - DNA, 75 bp, synthetic construct
  source 1..75: mol_type = other DNA
acgtcatttaggatcagactggaacgacaactacaaaggcaatggtattgcaaccatgtgtattgtgttacgtcg

SEQ ID NO: 335618 - DNA, 75 bp, synthetic construct
  source 1..75: mol_type = other DNA
gcgtagaaggtggcgtaggtccgggcgcttacgtcgcggggcggaaatatccagcaaacgaagtgctaagccatg

SEQ ID NO: 335619 - DNA, 75 bp, synthetic construct
  source 1..75: mol_type = other DNA
aaattattctgcgtacccgcaccgcgtttcaactgaccttgcatggcgaacgctatcggctggcagcacgaattg

SEQ ID NO: 335620 - DNA, 75 bp, synthetic construct
  source 1..75: mol_type = other DNA
catcgcccgtaatttgattgatcagcattcaggcaaaattgaatttaccagttggccaggtcataccgagttctc

SEQ ID NO: 335621 - DNA, 75 bp, synthetic construct
  source 1..75: mol_type = other DNA
ttctgtgacggcccagcgtatgccggacggcatgatcctgctggagatggctccgatggataaccagcgccgctt

SEQ ID NO: 335622 - DNA, 75 bp, synthetic construct
  source 1..75: mol_type = other DNA
cgccgcgatcaccgcggcctatcgtcgcccggaaaccgaagcggtttctatgctgctggaacaagcccgcctgcc

SEQ ID NO: 335623 - DNA, 75 bp, synthetic construct
  source 1..75: mol_type = other DNA
atggtgatacgcaaaaagaagtgcagggagtgtgataacgcgattactcataatacagtgtgttgcccgtattgt

SEQ ID NO: 335624 - DNA, 75 bp, synthetic construct
  source 1..75: mol_type = other DNA
aaatcattctgcgtacccgcaccgcgtttcaactgaccttacacggcgagcgctatcggctggcggcgcggattg

SEQ ID NO: 335625 - DNA, 75 bp, synthetic construct
  source 1..75: mol_type = other DNA
gtaaaaacgttactttgacatgggatgcaccggaagattttaaccgctacggtttccagattgattaccgtgtaa

SEQ ID NO: 335626 - DNA, 75 bp, synthetic construct
  source 1..75: mol_type = other DNA
agttatttgtgatggtgttaacaactataacccaagtgcatatatcagcgatctaacagtaatggtaactaaaaa

SEQ ID NO: 335627 - DNA, 75 bp, synthetic construct
  source 1..75: mol_type = other DNA
cgcgtggctggtattcacatgagcgcaactaacgatccggcacaaccgactaaaatcatctttacggctgataaa

SEQ ID NO: 335628 - DNA, 75 bp, synthetic construct
  source 1..75: mol_type = other DNA
aatataatgatggggaaagttaacctgaaaacaggtggcactaacggttatttcaataccattaacgcaatctat

SEQ ID NO: 335629 - DNA, 75 bp, synthetic construct
  source 1..75: mol_type = other DNA
gggacagacttcacagcaaattttcagtgtcaatgcactggcaaaagatcgttcttatgattaccgagtttgtgc

SEQ ID NO: 335630 - DNA, 75 bp, synthetic construct
  source 1..75: mol_type = other DNA
ggtgataatccgggcagaaccgggtatagccgtatgcgtttagaagtgcgtaaaaatggtactttactgaaagca

SEQ ID NO: 335631 - DNA, 75 bp, synthetic construct
  source 1..75: mol_type = other DNA
tgaaactatcgcggatgctattaagcaagctggcgctaatgccgatgctaaaattgatgcaatgcataaacagat

SEQ ID NO: 335632 - DNA, 75 bp, synthetic construct
  source 1..75: mol_type = other DNA
ctgtaagggcgttaacaactataacccaagtgcatatatcagcgatctaacggtaatggtaactaagaaagccgc

SEQ ID NO: 335633 - DNA, 75 bp, synthetic construct
  source 1..75: mol_type = other DNA
aaggtaatatcactgctgattctggtactctgaacaacgtcacgattaactctagctgtgttattaagggtatgc

SEQ ID NO: 335634 - DNA, 75 bp, synthetic construct
  source 1..75: mol_type = other DNA
agtgaggcagcaagcgcaagtaagattgatcaagttcgggtagaaatggatggcaagattgctggtgtgaatcag

SEQ ID NO: 335635 - DNA, 75 bp, synthetic construct
  source 1..75: mol_type = other DNA
tggtcttaatgcgcgtgaaggctcgaataacaatacttactatgataactgtcgcttgattgttcgcaagaacgg

SEQ ID NO: 335636 - DNA, 75 bp, synthetic construct
  source 1..75: mol_type = other DNA
ttatcttcgtgcggcacattacgatattttcggtatggatgatgctgtttggtctgaaccttatttcatgcaaat

SEQ ID NO: 335637 - DNA, 75 bp, synthetic construct
  source 1..75: mol_type = other DNA
agggtgaaatcgaccattacaaagcactctttattgataataaaaatgttcttgttggtaagaacatgacgatcc

SEQ ID NO: 335638 - DNA, 75 bp, synthetic construct
  source 1..75: mol_type = other DNA
tgcccggtacattttactgagggatttaacaatatccgccatattgacacggtgtcatgtgccgagacagcggtg

SEQ ID NO: 335639 - DNA, 75 bp, synthetic construct
  source 1..75: mol_type = other DNA
atcgtttgaagtatgccgggaatagacgtcgtcgaaaaaactatcatgaatggcggctggaacgtctaacggggc

SEQ ID NO: 335640 - DNA, 75 bp, synthetic construct
  source 1..75: mol_type = other DNA
gcattgaggggattcttcctgaccctgatagtgggctcgaatatcttacgcttccgtgctcagagggggtaaggg

SEQ ID NO: 335641 - DNA, 75 bp, synthetic construct
  source 1..75: mol_type = other DNA
ccctttacacccgaagcaataagggccattcccgtactgagatagctgccggggttcgtcatgaattacacccag

SEQ ID NO: 335642 - DNA, 75 bp, synthetic construct
  source 1..75: mol_type = other DNA
tcccggaaaggagatggtcagctaccgatatcatgttatcactggggtatagtgcacactatggtgacattaata

SEQ ID NO: 335643 - DNA, 75 bp, synthetic construct
  source 1..75: mol_type = other DNA
ccacaaaatgttcggaagagtcgcaggacatcgttactgctggcgatgtcgccaggtaagcaagctgtggcgaca

SEQ ID NO: 335644 - DNA, 75 bp, synthetic construct
  source 1..75: mol_type = other DNA
gctaactacaccaacgatccgatgatgattatgtgcctgatggcgctggcattcttcggcaacggttttgcttcg

SEQ ID NO: 335645 - DNA, 75 bp, synthetic construct
  source 1..75: mol_type = other DNA
tgcaaagtgaaggtgagaaaaatcctattgttgaagagcttgaaagaataagaaaaactcaagaaaaattgatga

SEQ ID NO: 335646 - DNA, 75 bp, synthetic construct
  source 1..75: mol_type = other DNA
tttatggccgtctctatcgattggggaggccatgcgaattatgcaggaagcgtggcaaaatattccggagttgaa

SEQ ID NO: 335647 - DNA, 75 bp, synthetic construct
  source 1..75: mol_type = other DNA
ccgccggccaaagcactaccgtccggtaaagaccggtgagctcattgggatggacgccattgagctcagaatggg

SEQ ID NO: 335648 - DNA, 75 bp, synthetic construct
  source 1..75: mol_type = other DNA
acctgcccgagtgtttccaccatcggcagaatgatcgccaccgcacacgataaaatgcggatgataccagtacgt

SEQ ID NO: 335649 - DNA, 75 bp, synthetic construct
  source 1..75: mol_type = other DNA
tagggcggaagattttcgttaacaccctgcctgatggaaaaattaaggctgaggagatcaagcctttcccacata

SEQ ID NO: 335650 - DNA, 75 bp, synthetic construct
  source 1..75: mol_type = other DNA
aaaccttgttctggaagtcaccgagcgtgagccattgaatgttgatgaaagtctggttcagcggttgaacattct

SEQ ID NO: 335651 - DNA, 75 bp, synthetic construct
  source 1..75: mol_type = other DNA
acctgggcagaccgtatgtatttggcgtattcgattgctggatgttgtgtcgggactatttgaagcgtgagttta

SEQ ID NO: 335652 - DNA, 75 bp, synthetic construct
  source 1..75: mol_type = other DNA
ggctggtgttgctgcaatgattatcaacgatgccctacaccatagcgaaaccccagccaccgacgctttcctggc

SEQ ID NO: 335653 - DNA, 75 bp, synthetic construct
  source 1..75: mol_type = other DNA
cgttctgccgggctcacgattgacaacattgaagccaagtgcgctgcgctggccgctgagaatgcggggctgaaa

SEQ ID NO: 335654 - DNA, 75 bp, synthetic construct
  source 1..75: mol_type = other DNA
atgctgggcttgtatgcatcaaagctgatgccctgaatgctgtaagtgaagcagcaaaaacagcattaattaaaa

SEQ ID NO: 335655 - DNA, 75 bp, synthetic construct
  source 1..75: mol_type = other DNA
atgattattgatttagacactctttttccaagtcggaagacttttacaactattgtaagttattgtactgatccg

SEQ ID NO: 335656 - DNA, 75 bp, synthetic construct
  source 1..75: mol_type = other DNA
cctgaatgccgaaggcgctgtaaaagaagctgctattgcagctctcgctgctaaaggcttccagcttgaaggctt

SEQ ID NO: 335657 - DNA, 75 bp, synthetic construct
  source 1..75: mol_type = other DNA
cgcttaatggacactatccttatactgagaaggttcactccacaagatatcatttcactattatctttaacccac

SEQ ID NO: 335658 - DNA, 75 bp, synthetic construct
  source 1..75: mol_type = other DNA
attctggattgtgtattggatctggcgcgtaaactttcgatcagtatcgtcgctgaaggtgtcgaaacgaaagaa

SEQ ID NO: 335659 - DNA, 75 bp, synthetic construct
  source 1..75: mol_type = other DNA
atgccgccaacaatatcaatcatatacttgaagaagcgtcacaggcgactcaaagcggttaacattgccgggaag

SEQ ID NO: 335660 - DNA, 75 bp, synthetic construct
  source 1..75: mol_type = other DNA
tgaacggacgcagggtgtgattgaacatatttttgtctacgataataaattatgtttaagctatttattaactaa

SEQ ID NO: 335661 - DNA, 75 bp, synthetic construct
  source 1..75: mol_type = other DNA
tttctttttttattgaaataattgatagtaatgtgtttattacgtttgccttagagtataacgaaaatgcgtttt

SEQ ID NO: 335662 - DNA, 75 bp, synthetic construct
  source 1..75: mol_type = other DNA
gagctggctcgtaaggcagttcaggcattctgcgatgttgttggcgacaacaccgaggttatcgctgaggtggtt

SEQ ID NO: 335663 - DNA, 75 bp, synthetic construct
  source 1..75: mol_type = other DNA
cgggcgtggcctgagcggcgatgaccgggcgcggtttgccgggaaaaaggtttatgagattgccatctcgcaggc

SEQ ID NO: 335664 - DNA, 75 bp, synthetic construct
  source 1..75: mol_type = other DNA
caacgagtttgtcctctaaagcagaaccgatgccggttaccatgcgcattaaaaaagacatcatcatgcctaaca

SEQ ID NO: 335665 - DNA, 75 bp, synthetic construct
  source 1..75: mol_type = other DNA
cgcacggaactggaaggcatttttaatgattccaccctgctggcggatctcgacagcgcattgccagaaggctcc

SEQ ID NO: 335666 - DNA, 75 bp, synthetic construct
  source 1..75: mol_type = other DNA
agccgcaacgagcacgatcaaaagatggcggatgccattgatgcttatcagcctgactacgtggtgctggcgaag

SEQ ID NO: 335667 - DNA, 75 bp, synthetic construct
  source 1..75: mol_type = other DNA
gtgtgcgggaactatgaaggtgaaaagcattggcgcacttatcggacgaactgaagcggcagtgagaacgaaggc

SEQ ID NO: 335668 - DNA, 75 bp, synthetic construct
  source 1..75: mol_type = other DNA
gatatccatgatgtatggcatttgatggggcttccatcaatgacagagatcatgcattccattgctgcaggtcag

SEQ ID NO: 335669 - DNA, 75 bp, synthetic construct
  source 1..75: mol_type = other DNA
tggtgcccttagccgtttcctgatggtcttcgagccctctggacagagtttgatagataaggtggttggcagacc

SEQ ID NO: 335670 - DNA, 75 bp, synthetic construct
  source 1..75: mol_type = other DNA
ccctaccattgttaaaagagctaatcaggctcatgaagctctcctaaaaagcctgcgacaaaatttagagggatt

SEQ ID NO: 335671 - DNA, 75 bp, synthetic construct
  source 1..75: mol_type = other DNA
taatgaagaactaagcctcctgctcgataaaccgagggaaagatttgccagacgtttagcgaacctgacaactct

SEQ ID NO: 335672 - DNA, 75 bp, synthetic construct
  source 1..75: mol_type = other DNA
catttcgatagcagaacttaaaaaagaatatataccgggtcttctgcttaatgctggggccataagccattacgg

SEQ ID NO: 335673 - DNA, 75 bp, synthetic construct
  source 1..75: mol_type = other DNA
agcgcattgccagaaggctccgtacgtgagctgaatcctgctggtcgtcgccggatagtgattctggtcactaaa

SEQ ID NO: 335674 - DNA, 75 bp, synthetic construct
  source 1..75: mol_type = other DNA
cttatcaacctgactacgtggtgctggcgaagtatatgcgggtattaacgccggaatttgtggcacgcttcccga

SEQ ID NO: 335675 - DNA, 75 bp, synthetic construct
  source 1..75: mol_type = other DNA
cgtgatgtcgagaaaaacgtattaagccgcgcgctttacaaagtgctggcgcagcgtgtatttgtttacggtaac

SEQ ID NO: 335676 - DNA, 75 bp, synthetic construct
  source 1..75: mol_type = other DNA
aaaaagacttgaccgcgagtggcgcgacattcaactatttaaaataattaacggaatcaatgtatcaggcattga

SEQ ID NO: 335677 - DNA, 75 bp, synthetic construct
  source 1..75: mol_type = other DNA
cagcgtgatattgagctggcgcggcaactgcatcagagaggcatgcaaagaagggaaattgccagaaaattaggc

SEQ ID NO: 335678 - DNA, 75 bp, synthetic construct
  source 1..75: mol_type = other DNA
gtgcggaaattatgatactccggcagtgtgcgggagcgatgacagtcgaaagcatcggttatctgattggccgta

SEQ ID NO: 335679 - DNA, 75 bp, synthetic construct
  source 1..75: mol_type = other DNA
ttgcggggtgattttcatcagtcggtaaaaatcccccagagcagtgttgagctgatgcgaaagctacatgagcag

SEQ ID NO: 335680 - DNA, 75 bp, synthetic construct
  source 1..75: mol_type = other DNA
cgttactctgctggtttttggcgtgctcacttactacgttatcgggccggtgatgtccgacctcatgggcggcta

SEQ ID NO: 335681 - DNA, 75 bp, synthetic construct
  source 1..75: mol_type = other DNA
cgggcgtctctgcggcgctgccgtttgtcatcggtggcggtatcctggtggcgcttgccaacatgctggtgcagt

SEQ ID NO: 335682 - DNA, 75 bp, synthetic construct
  source 1..75: mol_type = other DNA
tgatgtccgacctcatgggcgggctactgcacttcctgaataccattcctccatcaatgaagtttgcggcagcgt

SEQ ID NO: 335683 - DNA, 75 bp, synthetic construct
  source 1..75: mol_type = other DNA
ctgaaatccttattctgcggcagtgcgcgggaacaatgaaggtaaaaagcatcggcagtctgattggtcgtagtg

SEQ ID NO: 335684 - DNA, 75 bp, synthetic construct
  source 1..75: mol_type = other DNA
atattctccgggatattaccgccaccagagaacagcagcggtgagtgggtggaagacgtggtgccgggctgaaat

SEQ ID NO: 335685 - DNA, 75 bp, synthetic construct
  source 1..75: mol_type = other DNA
caactgcatcagagaggcatgcaaagaagggaaattgccagaaaattaggcatgccgctgcgcatagtgaataac

SEQ ID NO: 335686 - DNA, 75 bp, synthetic construct
  source 1..75: mol_type = other DNA
ccgagatactgattctgcggcagtgcgcgggaacaatgacggtcgaaaccatcggcagcctgactggtcgtagtg

SEQ ID NO: 335687 - DNA, 75 bp, synthetic construct
  source 1..75: mol_type = other DNA
gcgggaactgggtatcagtttgatgttgcggggtgattttcaccagccaacaaaatatccgcagagtgatattga

SEQ ID NO: 335688 - DNA, 75 bp, synthetic construct
  source 1..75: mol_type = other DNA
ggcgcgacaactgcatcagcgtggcgtgtccaggagagaaatcgccataaaatttggaatgccgttgcgcacagt

SEQ ID NO: 335689 - DNA, 75 bp, synthetic construct
  source 1..75: mol_type = other DNA
ttagaagaaaaaatattcaataaagttagcgaaagtcatcatgtaaaatacggtgattatgcttcaattaatatt

SEQ ID NO: 335690 - DNA, 75 bp, synthetic construct
  source 1..75: mol_type = other DNA
gtcttgcagccaaaaatacaccttcgggtataagtccatctttttggattgcggtaagaatgaattatttcatgt

SEQ ID NO: 335691 - DNA, 75 bp, synthetic construct
  source 1..75: mol_type = other DNA
aattcagccgcgaatttgtgcagaacctgcgtaatgaaatcgatctggcggatatcgattacatcgtgattaacc

SEQ ID NO: 335692 - DNA, 75 bp, synthetic construct
  source 1..75: mol_type = other DNA
ccaaacaggatcagaaagaacacggtattattctgaggcgtagcaggcttcccgaaaaaagcaaccggggccgac

SEQ ID NO: 335693 - DNA, 75 bp, synthetic construct
  source 1..75: mol_type = other DNA
atggcattactggaaatttgctgttacagcatggaatgcgcgctaacggcgcagcaaaacggcgctgacagagtt

SEQ ID NO: 335694 - DNA, 75 bp, synthetic construct
  source 1..75: mol_type = other DNA
atggcattactggaaatttgctgttacagcatggaatgtgcactaacggcgcagcaaaacggcgcagacagagtt

SEQ ID NO: 335695 - DNA, 75 bp, synthetic construct
  source 1..75: mol_type = other DNA
gtggtgctgatgagcatttgccgccagtggtcctatttaaaaacgctgattcagacgccacagaaaatttttatg

SEQ ID NO: 335696 - DNA, 75 bp, synthetic construct
  source 1..75: mol_type = other DNA
agctgccggaagatgtgcgtcgctggcttgagcgggcgctgactgaatccggcttcagtgggtataacgagctgg

SEQ ID NO: 335697 - DNA, 75 bp, synthetic construct
  source 1..75: mol_type = other DNA
aacgtggccacgctgtcccgcgcttccgtcaacctcaagaagttccagtctgaagtccgggccagagcgcagcag

SEQ ID NO: 335698 - DNA, 75 bp, synthetic construct
  source 1..75: mol_type = other DNA
acgccggggcgctgaccgaactgatggcgcaaattcccgatacgccgatctactgtactgccaacgctatcgact

SEQ ID NO: 335699 - DNA, 75 bp, synthetic construct
  source 1..75: mol_type = other DNA
gtcgcttagcctgaaagccaaatggcgaccggaccaggatgcactggaattatgccgtgaacacggtcgtgaaat

SEQ ID NO: 335700 - DNA, 75 bp, synthetic construct
  source 1..75: mol_type = other DNA
aattttttgtgctcaagtctggcgtggtcagcgaggttgaatgcatcaccagtttcaaccccggcggcaaccctg

SEQ ID NO: 335701 - DNA, 75 bp, synthetic construct
  source 1..75: mol_type = other DNA
accgcgctgtcaattttacgcctgctcccttccccgccggttgaatatctctccggcgatattcgttttcatggc

SEQ ID NO: 335702 - DNA, 75 bp, synthetic construct
  source 1..75: mol_type = other DNA
cggtcaaaatgactgcaatattttagtattgaaagtacttgatttacgtgctggtactgactggtctattattgc

SEQ ID NO: 335703 - DNA, 75 bp, synthetic construct
  source 1..75: mol_type = other DNA
atggatgtttacgaaatatgtaaaaatgcaatagaacaaccttatcagtacggtcaaaatgactgcaatatttta

SEQ ID NO: 335704 - DNA, 75 bp, synthetic construct
  source 1..75: mol_type = other DNA
ctcatccttacacacaaaagctactcaacagtgaaccgtcaggcgatccagtgccgttgccagaacctgcctcaa

SEQ ID NO: 335705 - DNA, 75 bp, synthetic construct
  source 1..75: mol_type = other DNA
ggttcctgaacaagcgagcaaggaagcggctaaatactaagctattcagggttcagccataccctaaaagcactc

SEQ ID NO: 335706 - DNA, 75 bp, synthetic construct
  source 1..75: mol_type = other DNA
taataaagagcgtgccgtggtgcacaaatttaatcagtatcgctacatcaggttcctgaacaagcgagcaaggaa

SEQ ID NO: 335707 - DNA, 75 bp, synthetic construct
  source 1..75: mol_type = other DNA
ccccctactaatggcggtggtggtgtctggtcgcctattgggtgtcaatgatgatcatgacgctttcgtactaat

SEQ ID NO: 335708 - DNA, 75 bp, synthetic construct
  source 1..75: mol_type = other DNA
agtgggcgagtccggttccgggaaaagcacgacgggactggcgctgctgcgactgattaattctcagggcagcat

SEQ ID NO: 335709 - DNA, 75 bp, synthetic construct
  source 1..75: mol_type = other DNA
cgcgtggcagtgatgcaaaacggtcactgcgtggagcaaaataacgccactgcgctatttgcctcccctgctcat

SEQ ID NO: 335710 - DNA, 75 bp, synthetic construct
  source 1..75: mol_type = other DNA
ctccggcgatattcgttttcatggcgaatcgctgcttcatgccagcgatcaaacgttgcgcggtgtacgcggtaa

SEQ ID NO: 335711 - DNA, 75 bp, synthetic construct
  source 1..75: mol_type = other DNA
cgtgaagaacaagtgaaagcggtaatgcatgaagtggggttagatcctgaaacacgctaccgttatccggcagag

SEQ ID NO: 335712 - DNA, 75 bp, synthetic construct
  source 1..75: mol_type = other DNA
tgcaatggcgctattaacgcgcccggaattattaattgccgatgaaccgactaccgcactggacgtctctgtcca

SEQ ID NO: 335713 - DNA, 75 bp, synthetic construct
  source 1..75: mol_type = other DNA
aatgatgtttcactacagattgaggctggcgaaacgctggcgctggtgggcgagtcaggttctggcaagagcgtt

SEQ ID NO: 335714 - DNA, 75 bp, synthetic construct
  source 1..75: mol_type = other DNA
gcttgagcgggcgctgactgaatccggcttcagcgggtataacgagctggagtccctgctgcgtgagcagggtta

SEQ ID NO: 335715 - DNA, 75 bp, synthetic construct
  source 1..75: mol_type = other DNA
gttaaagctaccaaatggtattgaggcatatttttctaagcattacccaaatgtatatgacgactttgatattcc

SEQ ID NO: 335716 - DNA, 75 bp, synthetic construct
  source 1..75: mol_type = other DNA
tgaggtctgcagtgagctgcttgcgcgcgttcataccctaggggaccgccgttacattgaattgattaccgatgc

SEQ ID NO: 335717 - DNA, 75 bp, synthetic construct
  source 1..75: mol_type = other DNA
cgataatgaactggctgaaaaagcgtggcgtgcccgcctcgaagcccatgatggaaggtcctcatctctgttcag

SEQ ID NO: 335718 - DNA, 75 bp, synthetic construct
  source 1..75: mol_type = other DNA
gaagaggataattcttgaagatgatgcttttaatgcactgatgatagccctgagaaaagaaagtgaaatctatga

SEQ ID NO: 335719 - DNA, 75 bp, synthetic construct
  source 1..75: mol_type = other DNA
ctgaggcagaagaagcacaggaacaacctaaaggccataaacagccttcttttgatgttcttgatgatgattggg

SEQ ID NO: 335720 - DNA, 75 bp, synthetic construct
  source 1..75: mol_type = other DNA
ggaggagcatcatttatagaatttgcaacatcgttagcctataagcacaggttaaagctaccaaatggtattgag

SEQ ID NO: 335721 - DNA, 75 bp, synthetic construct
  source 1..75: mol_type = other DNA
gaacgagggcgttcagtaagtcttttacctgaagcgtctgtgtttgttttacgcaaaagtaccattcttcccaga

SEQ ID NO: 335722 - DNA, 75 bp, synthetic construct
  source 1..75: mol_type = other DNA
acgactggttgatacgggaattgcgccattactacaaaaagagatgggcgctgttctgtgggatccggaaaaggg

SEQ ID NO: 335723 - DNA, 75 bp, synthetic construct
  source 1..75: mol_type = other DNA
agcggccctagttcaacggcggatattgagcttatcaaagtcgtcggggttcatggcccggtgaaagcggtgtat

SEQ ID NO: 335724 - DNA, 75 bp, synthetic construct
  source 1..75: mol_type = other DNA
aacgtgttttatcgccgcgtacctgcatatgaatcagcaattgcagaagcaattggtgtggaaccggaagttatc

SEQ ID NO: 335725 - DNA, 75 bp, synthetic construct
  source 1..75: mol_type = other DNA
ctgacttgtttgttcgtcgcggacaagactggtctagcaaagcaattgcagccgcccttgataataaaggggttg

SEQ ID NO: 335726 - DNA, 75 bp, synthetic construct
  source 1..75: mol_type = other DNA
ctcgactttgcgcatgtcatgatcgatatgatgcaggcgaatacgccttttctgaatctgttctggtacaactca

SEQ ID NO: 335727 - DNA, 75 bp, synthetic construct
  source 1..75: mol_type = other DNA
cgaccaaatggtattgaggcatattttgctaagaaacatcccaaagtatatgaagactttgatattccattttaa

SEQ ID NO: 335728 - DNA, 75 bp, synthetic construct
  source 1..75: mol_type = other DNA
ttaggtaaaaaaatacttaattcatcagaaagcaaaggttttgttggtattacgtactatgacggcggtgcgaga

SEQ ID NO: 335729 - DNA, 75 bp, synthetic construct
  source 1..75: mol_type = other DNA
gtgcattacagatggtgaaagtgaacgccgcgtcactggaatcttttgccccggattacagtcttttcagtctgc

SEQ ID NO: 335730 - DNA, 75 bp, synthetic construct
  source 1..75: mol_type = other DNA
agaacaataccgttgtctatgccgatatgcgtcacgccgaagtcgcaaaagtctattcacgtgatgaacacacca

SEQ ID NO: 335731 - DNA, 75 bp, synthetic construct
  source 1..75: mol_type = other DNA
gaatattggtttggaaaacaagttttattctcactatggcgattcaatcgttgataaaaaaataacagaaaacga

SEQ ID NO: 335732 - DNA, 75 bp, synthetic construct
  source 1..75: mol_type = other DNA
aaacttcgtcagacgggcagtattaagacgaggcatatttctggttatcttctcagcaggaaagagcaggggatc

SEQ ID NO: 335733 - DNA, 75 bp, synthetic construct
  source 1..75: mol_type = other DNA
gacaaagaacgcacagcattattaaaagctgccgatgaatcaatgcagcaaatgaaagatgtcatctggcctgca

SEQ ID NO: 335734 - DNA, 75 bp, synthetic construct
  source 1..75: mol_type = other DNA
tgctggttgatggtcgtttgatctataccgccagcgacctgaaagtcggtctgttccaggatacgtctgccttct

SEQ ID NO: 335735 - DNA, 75 bp, synthetic construct
  source 1..75: mol_type = other DNA
tgatcccaagcttaatcgcaaataaagctcaagaattaaacgactgtgagtatgattatgtactcattgatgtac

SEQ ID NO: 335736 - DNA, 75 bp, synthetic construct
  source 1..75: mol_type = other DNA
tatagacacgggctaaaacgaccaaatggtattgaggcatatttttctaagcattacccaaatgtgtatgaagac

SEQ ID NO: 335737 - DNA, 75 bp, synthetic construct
  source 1..75: mol_type = other DNA
gaaaaagccaaaggggaagaggggctaacgcgtgaacaaattgagtcccgtattgttgttccgcaccatactatt

SEQ ID NO: 335738 - DNA, 75 bp, synthetic construct
  source 1..75: mol_type = other DNA
tctggcagacggcgaagtactggttgatggtcgtctgatctacaccgccagcgatctgaaagttggtctgttcca

SEQ ID NO: 335739 - DNA, 75 bp, synthetic construct
  source 1..75: mol_type = other DNA
gtggtcaaaatgaccgagactggcggtaacttcaacaaagggtatgttgaagcagagctggatatcaatccagat

SEQ ID NO: 335740 - DNA, 75 bp, synthetic construct
  source 1..75: mol_type = other DNA
tttgtcgtggtgctgccagacgttgtgatcgacgatgccagcgccgacccgctacgctacaaccttgctgccatg

SEQ ID NO: 335741 - DNA, 75 bp, synthetic construct
  source 1..75: mol_type = other DNA
gctgcgctacaaccttgctgccatgattgcacgattcaacgaaacgggtcgtagccaggtgctggcaaaacgtat

SEQ ID NO: 335742 - DNA, 75 bp, synthetic construct
  source 1..75: mol_type = other DNA
gctgcgctataaccttgctgccatgattgcacgtttcaacgaaacgggacgcagccaggtgctggcaaaacgtat

SEQ ID NO: 335743 - DNA, 75 bp, synthetic construct
  source 1..75: mol_type = other DNA
cctgccagcgtttattggggcacgtccgtatcatcaggcctatgaacgcggcgtgaagataattggcgcaacggc

SEQ ID NO: 335744 - DNA, 75 bp, synthetic construct
  source 1..75: mol_type = other DNA
cgtgacgtcgagaaaaacgtcttaagtcgtgcactatacaaagtactggcacagcgcgtctttgtttacggtaat

SEQ ID NO: 335745 - DNA, 75 bp, synthetic construct
  source 1..75: mol_type = other DNA
ggatctggatatcaaaattgatcgtacagaagcatttaacctgtttatcaagaaatttcagtctgttagcttgct

SEQ ID NO: 335746 - DNA, 75 bp, synthetic construct
  source 1..75: mol_type = other DNA
gtttgggccactccattttatgtgcacgacctgctattggtgacaacccgtttgtcgtggtgctgccggacgtta

SEQ ID NO: 335747 - DNA, 75 bp, synthetic construct
  source 1..75: mol_type = other DNA
tcaagcgtgctcagactgaaggaaagcattgcggtagacctatcaaagcaaccgttgaacaagtacaagaactgt

SEQ ID NO: 335748 - DNA, 75 bp, synthetic construct
  source 1..75: mol_type = other DNA
cgcgggctgggggctgacccacgacagcaaaacctgcccgcgccgtcaggggccgatcgccctgccccagctggt

SEQ ID NO: 335749 - DNA, 75 bp, synthetic construct
  source 1..75: mol_type = other DNA
agctgctggcggaagtacagtccatctgcccgccgggcgtgacaattatgaacgtgcgtcagggtgaacctttgg

SEQ ID NO: 335750 - DNA, 75 bp, synthetic construct
  source 1..75: mol_type = other DNA
gggctatatgcaggcgtttgtgaagtatggactgcgcaacctgaaagaaggggcgaagttccgcaaaggtattga

SEQ ID NO: 335751 - DNA, 75 bp, synthetic construct
  source 1..75: mol_type = other DNA
ctgcccgccgggcgtgaccattatgaacgtgcgtcagggcgaacctttaggtttaggccactccattttgtgtgc

SEQ ID NO: 335752 - DNA, 75 bp, synthetic construct
  source 1..75: mol_type = other DNA
ccgggaggaaggggatcaactcaagttcagcaggtacctccattttcagggggaagtgcaacagaagcaccaatt

SEQ ID NO: 335753 - DNA, 75 bp, synthetic construct
  source 1..75: mol_type = other DNA
ggagggcaggcatattgcgtaaaagatggagtgcaagttaatcccatgtatgcaagagggtggaatgactatcgc

SEQ ID NO: 335754 - DNA, 75 bp, synthetic construct
  source 1..75: mol_type = other DNA
aacacatcctgcgtgacaagctgtctccgtatgacaccgaagagatgcttgaggctatgcgtatttttctggaag

SEQ ID NO: 335755 - DNA, 75 bp, synthetic construct
  source 1..75: mol_type = other DNA
tgcgctggtcagcgtacgtaactcggcagagacgctgcgtgcttatactatttcctccacaccgggcgtgagtga

SEQ ID NO: 335756 - DNA, 75 bp, synthetic construct
  source 1..75: mol_type = other DNA
gccgggtgacctctctgaatactctgttattcagaccaaagaaccgctggatcgcgaaggtaaagtcagccgcat

SEQ ID NO: 335757 - DNA, 75 bp, synthetic construct
  source 1..75: mol_type = other DNA
tcatggccgttggtcgctatgtgctttctgccgatatttggccggaacttgaacgcactcagcctggtgcatggg

SEQ ID NO: 335758 - DNA, 75 bp, synthetic construct
  source 1..75: mol_type = other DNA
gctaatgaaccgcacccgattgatggcctgtccggtgaatatgcggagaaatcccttgaagaatgggcggaacag

SEQ ID NO: 335759 - DNA, 75 bp, synthetic construct
  source 1..75: mol_type = other DNA
ggcggtcagctggcacgttccgcaggtacttacgttcagatcgttgctcgtgatggtgcttatgtcaccctgcgt

SEQ ID NO: 335760 - DNA, 75 bp, synthetic construct
  source 1..75: mol_type = other DNA
atttgctacaagcacgagttaaatatcgtgcagaacaatgaatttgtagatcatcgtaccgggcgcttttttatg

SEQ ID NO: 335761 - DNA, 75 bp, synthetic construct
  source 1..75: mol_type = other DNA
tcgtaacaacaatggccgtatcaccactcgtcatatcggtggtggccacaagcaagcttaccgtattgttgactt

SEQ ID NO: 335762 - DNA, 75 bp, synthetic construct
  source 1..75: mol_type = other DNA
ggctttatcgctggtcgtctcactcgcgaactcctgactcgcgttcctgacttagcttcacgtaccgtgatgacc

SEQ ID NO: 335763 - DNA, 75 bp, synthetic construct
  source 1..75: mol_type = other DNA
tgtggtccagcaccgtatatggattgggtagaacaggaagtgaaggcgctcggcgtgacgcgtttctttaaagaa

SEQ ID NO: 335764 - DNA, 75 bp, synthetic construct
  source 1..75: mol_type = other DNA
cgaagaaccgtccacaggccgatgtgcaggtgatctacaacgtgcgtacgccgcaggatgttattttcgccgatg

SEQ ID NO: 335765 - DNA, 75 bp, synthetic construct
  source 1..75: mol_type = other DNA
caaataaaacagaaagcccaggacctcggcctgccgtactggcagctggaagatggctttatcggttatattggc

SEQ ID NO: 335766 - DNA, 75 bp, synthetic construct
  source 1..75: mol_type = other DNA
cagatgcacctgagtctgggggccaataccagtttgttggggcgaagctattccggtggtggtgctggcggcggt

SEQ ID NO: 335767 - DNA, 75 bp, synthetic construct
  source 1..75: mol_type = other DNA
atgtcgcaaaaatcgcttatcaccgtcacaatttgtatgacggttatcttcactatctggatgttgtacggttcg

SEQ ID NO: 335768 - DNA, 75 bp, synthetic construct
  source 1..75: mol_type = other DNA
gcagccaggtgctggcaaaacgtatgccgggtgagctctctgaatactcagtcattcagacaaaagaaccgctgg

SEQ ID NO: 335769 - DNA, 75 bp, synthetic construct
  source 1..75: mol_type = other DNA
tcaaatgtcaccagtgacccatgccttgtgctatggcatgacgatccggccggaaccgggatggccataacccgg

SEQ ID NO: 335770 - DNA, 75 bp, synthetic construct
  source 1..75: mol_type = other DNA
ttgtttgcccgcgatgatgacaagccttgcgttaatcgtgtaatcatcactttgtttttaccactgatttgttca

SEQ ID NO: 335771 - DNA, 75 bp, synthetic construct
  source 1..75: mol_type = other DNA
ctcactggcatggggtatatttttctgccaaagtttacccaaactggacagcaacgttatgcccacggtgaagct

SEQ ID NO: 335772 - DNA, 75 bp, synthetic construct
  source 1..75: mol_type = other DNA
agaatccggtgattgctgccgttaaagataatgccagcctgcaactggcaatcgattctgaatgccagtttattt

SEQ ID NO: 335773 - DNA, 75 bp, synthetic construct
  source 1..75: mol_type = other DNA
cgcggtattgtgtgctcacccggtagtgggtgatgaaccggtagctgttattttgcctgatgttattctggatga

SEQ ID NO: 335774 - DNA, 75 bp, synthetic construct
  source 1..75: mol_type = other DNA
cgttgagttcatcgaaaaaccggatcagccgcagacgctggattctgacctgatggcggttggtcgttatgtcct

SEQ ID NO: 335775 - DNA, 75 bp, synthetic construct
  source 1..75: mol_type = other DNA
tcgcgacagcggcaaatgctaacgtgacggcccaggctgactgggaatcgcttccggctctgctttctggcttca

SEQ ID NO: 335776 - DNA, 75 bp, synthetic construct
  source 1..75: mol_type = other DNA
ttcatgttgatttgctggaaggcgcatcgaacaaagaagtggtgattcagtttctgaaactggtgaccgaggcgg

SEQ ID NO: 335777 - DNA, 75 bp, synthetic construct
  source 1..75: mol_type = other DNA
agataatgccagcctgcaactggcaatcgattctgaatgccagtttatttccgtgttgtacggcaatatctgcac

SEQ ID NO: 335778 - DNA, 75 bp, synthetic construct
  source 1..75: mol_type = other DNA
tggtttcccccgccgatgccctgcctggacgtaacaccccgatgcccgtagccacgctgcatgcggtcaacggtc

SEQ ID NO: 335779 - DNA, 75 bp, synthetic construct
  source 1..75: mol_type = other DNA
gcattggtcagcaaaatgaactggcctaccggcggatgaatccggtcgggctggtgccgacgctgctgactgacg

SEQ ID NO: 335780 - DNA, 75 bp, synthetic construct
  source 1..75: mol_type = other DNA
gttcagcatcgtaccgggtacgcattgcgctggcgctgaaaggcattaattaccagaccgaaggggtgaatatcc

SEQ ID NO: 335781 - DNA, 75 bp, synthetic construct
  source 1..75: mol_type = other DNA
gtattggtcagcaaaatgaactggcctatcggcggatgaatccggtcgggctggtgccgacgctgctgactgacg

SEQ ID NO: 335782 - DNA, 75 bp, synthetic construct
  source 1..75: mol_type = other DNA
gcatcctggcccgcagtgcgcaaatcagcgcctgccttaaccagcctcttgcccgctttattcatgcagacgccg

SEQ ID NO: 335783 - DNA, 75 bp, synthetic construct
  source 1..75: mol_type = other DNA
gggagacgagcctgaggatctggtcgtttggcaaccgtttgagcactgggaatggaaagacattctggagcaaat

SEQ ID NO: 335784 - DNA, 75 bp, synthetic construct
  source 1..75: mol_type = other DNA
tatcaagggcaccggtatcgttaaagaaattgatatgaatagtaaaaagatcaccatttcgcatgaagcaatccc

SEQ ID NO: 335785 - DNA, 75 bp, synthetic construct
  source 1..75: mol_type = other DNA
ggcaaaacggttacccctgtttatatccaggaaggcggcgagctgcttctgaatagcgacgacgaaattcactac

SEQ ID NO: 335786 - DNA, 75 bp, synthetic construct
  source 1..75: mol_type = other DNA
atgaccgcaataacgacagcatacttacagcaactggtattttttgcaggggaagctacttgtcatccagacgca

SEQ ID NO: 335787 - DNA, 75 bp, synthetic construct
  source 1..75: mol_type = other DNA
tgtgcggtatcggttttactatgtctatctttattgccagcctggcctttggtagcgtagatccagaactgatta

SEQ ID NO: 335788 - DNA, 75 bp, synthetic construct
  source 1..75: mol_type = other DNA
accagtgatgtaaaagcggccgtagaactggcaaaaaagaacggggcaaagattatttgtataacgcatagctac

SEQ ID NO: 335789 - DNA, 75 bp, synthetic construct
  source 1..75: mol_type = other DNA
aaagatgtcgcagaagctctggcggtatctgaagcgatgatagttaaggtatcaaagctgctggggtttagcggc

SEQ ID NO: 335790 - DNA, 75 bp, synthetic construct
  source 1..75: mol_type = other DNA
tttgggcgcaatttttgttgtgagattgagcttccaattggtgatcttgatagcgatgaataccagtcagttgtc

SEQ ID NO: 335791 - DNA, 75 bp, synthetic construct
  source 1..75: mol_type = other DNA
atgcgcatgaatgttttcgaaatggaatggtttcttctcgggaaatgtgtaccgcaagatctgaaagtgaatgaa

SEQ ID NO: 335792 - DNA, 75 bp, synthetic construct
  source 1..75: mol_type = other DNA
ttttcgacgttacacgcatgattttgtcagcgaaagaagagttggctaatgaaccgcatccgattgatggcctgt

SEQ ID NO: 335793 - DNA, 75 bp, synthetic construct
  source 1..75: mol_type = other DNA
gctatagaagctgcaaaaaatctggtggcccaagaatatgagtataaggatttcaaagcggcgcagagtgattgc

SEQ ID NO: 335794 - DNA, 75 bp, synthetic construct
  source 1..75: mol_type = other DNA
tggatggatttctgaaaggtaaatgcatcccaagtgatttaaatgttaacgaaacaaacgctgaatatcttgtcc

SEQ ID NO: 335795 - DNA, 75 bp, synthetic construct
  source 1..75: mol_type = other DNA
aaagtctctgcaatcagacaccccagccaccgatgctttcctggctgaagtacgggcgcagggggtagagatgta

SEQ ID NO: 335796 - DNA, 75 bp, synthetic construct
  source 1..75: mol_type = other DNA
tggatggatttctgaaaggtaaatgcatcccccgagatttaaatgttaacgaaacaaacgctgaatatctggtgc

SEQ ID NO: 335797 - DNA, 75 bp, synthetic construct
  source 1..75: mol_type = other DNA
gaacgtctgttggatgcaggcgtgcgtactctccagctacgcatcaaagatcggcgcgatgaagaggtggaagcc

SEQ ID NO: 335798 - DNA, 75 bp, synthetic construct
  source 1..75: mol_type = other DNA
tatatcgcgctgggacatgtgttcccgacgcaaaccaaacagatgccttctgcaccgcaggggctggaacagctg

SEQ ID NO: 335799 - DNA, 75 bp, synthetic construct
  source 1..75: mol_type = other DNA
aagggtttcttcacgggagatgtgtaccgcgagatctgaaagtgaacgaaacaaacgctgagtacctggtgcgta

SEQ ID NO: 335800 - DNA, 75 bp, synthetic construct
  source 1..75: mol_type = other DNA
ttcaaccgggcgaaaccatctttatcgaaaatggtagcagcaatgccctgctcgcccggactctgggcgagcaga

SEQ ID NO: 335801 - DNA, 75 bp, synthetic construct
  source 1..75: mol_type = other DNA
cataaccgattcgaatattcgcgccggcgattttatgcatcttgaacgcagtaaactgacggttcacatcgtcga

SEQ ID NO: 335802 - DNA, 75 bp, synthetic construct
  source 1..75: mol_type = other DNA
tgagcgattcaatcgcgtgattaccgattcgaaaatacgcgccagcgatctgatgcatcttgagcacagtaaact

SEQ ID NO: 335803 - DNA, 75 bp, synthetic construct
  source 1..75: mol_type = other DNA
tctgaatgcgatgtggcggagtgggaagaaatgaaacaaatgacactaattgagatggatggatttctgaaaggt

SEQ ID NO: 335804 - DNA, 75 bp, synthetic construct
  source 1..75: mol_type = other DNA
atggccgacgtactggaccatttacagatgcaggaagacctgctgaaccggctgcatattcaggctgcccggcag

SEQ ID NO: 335805 - DNA, 75 bp, synthetic construct
  source 1..75: mol_type = other DNA
cgatattcctctcaaacgccagcaaacgatacctggtgtacgaacctgcacggaatgccagcgggtactggaaat

SEQ ID NO: 335806 - DNA, 75 bp, synthetic construct
  source 1..75: mol_type = other DNA
gcatcgtgccaccttcggcttctgcaaccaacgatccgctggaagtgacggtagaaacattcagcgaatggattg

SEQ ID NO: 335807 - DNA, 75 bp, synthetic construct
  source 1..75: mol_type = other DNA
cgcatagcaaaagaaccatcctggttcgcacggtttaccggtaaacatcttgaaaaaatggtgcggtatcagaac

SEQ ID NO: 335808 - DNA, 75 bp, synthetic construct
  source 1..75: mol_type = other DNA
aggagcaggacgaattgctgaaccagcttcatatacaggccgcgaggcagcgatcctgcctgcagggcaaaagcc

SEQ ID NO: 335809 - DNA, 75 bp, synthetic construct
  source 1..75: mol_type = other DNA
ttggtgaagggaaaagtttcatggagcacgtatacgaaatgcttcatgcgcttgaagatctcatggtgattcatc

SEQ ID NO: 335810 - DNA, 75 bp, synthetic construct
  source 1..75: mol_type = other DNA
tacgaccttcgatatggacacccgataaatgcagatgagcgacatgtcatgatacctaaagaaaatggcagttgg

SEQ ID NO: 335811 - DNA, 75 bp, synthetic construct
  source 1..75: mol_type = other DNA
gtgagcgagattaactatcaggcgctacgtgaggcagctcaaaactatcagtcgatgctggcgtggtatcaggaa

SEQ ID NO: 335812 - DNA, 75 bp, synthetic construct
  source 1..75: mol_type = other DNA
cgctgatcggcctgatgtcgccggtaggttcgttttatctggtgctggcgattggtctggcgatgaacaggaagt

SEQ ID NO: 335813 - DNA, 75 bp, synthetic construct
  source 1..75: mol_type = other DNA
ccgtttccggcgtcaatgctgtcagcagcattggtgatgatgtcgttgatctcattgctcaggttgatttagtca

SEQ ID NO: 335814 - DNA, 75 bp, synthetic construct
  source 1..75: mol_type = other DNA
atgcgctacgcttatcaggcctacaaaacaaagcgcagtttgttgaatttgcacgttcttgtaggccggataagg

SEQ ID NO: 335815 - DNA, 75 bp, synthetic construct
  source 1..75: mol_type = other DNA
aactaacgatccgctggaagtaacggtagaaaccttcagcgaatggattgtcgataaaacgcagttcaaaggcgc

SEQ ID NO: 335816 - DNA, 75 bp, synthetic construct
  source 1..75: mol_type = other DNA
acgagtacacagaagtcttgaaagagacagccagagcggcaagatgcttcgccgcccagcttcgaaaaggaggtg

SEQ ID NO: 335817 - DNA, 75 bp, synthetic construct
  source 1..75: mol_type = other DNA
attcatcatgaatggggtgcagatgggttatatcaaggtgccagcagcggaaacagatccagaccttgagacaat

SEQ ID NO: 335818 - DNA, 75 bp, synthetic construct
  source 1..75: mol_type = other DNA
tatggctaatgcgccggaaggcgattttgaccgctcattctctgatggcgttctcgaagatatcgccgcccagct

SEQ ID NO: 335819 - DNA, 75 bp, synthetic construct
  source 1..75: mol_type = other DNA
tggccgtaactcttgagcatgtgtcggtcacggatgcagggcaggctggtgttgctgcaatgattatcaacgatg

SEQ ID NO: 335820 - DNA, 75 bp, synthetic construct
  source 1..75: mol_type = other DNA
gcgctggcggcggagaatgcacttgctcgtaaagcagttcaggcattctgcgatgttgttggcgacaacaccgag

SEQ ID NO: 335821 - DNA, 75 bp, synthetic construct
  source 1..75: mol_type = other DNA
acgcattgcagagctggagactaatcttgcggcactggcggtggagaatgcgggaataaagtctgcaattcctca

SEQ ID NO: 335822 - DNA, 75 bp, synthetic construct
  source 1..75: mol_type = other DNA
tacgtgaacgttatgcaccgaagccagtaccaaaatgccgcatttgtggtgatgaaatgacagtgcagcgtatat

SEQ ID NO: 335823 - DNA, 75 bp, synthetic construct
  source 1..75: mol_type = other DNA
gtttgggccactccattttatgtgcacgacctgctattggtgacaacccatttgtcgtggtgctgccggacgttg

SEQ ID NO: 335824 - DNA, 75 bp, synthetic construct
  source 1..75: mol_type = other DNA
aacgtgcgtcagggcgaacctttaggtttaggccactccattttgtgtgcacgacccgccattggtgacaaccca

SEQ ID NO: 335825 - DNA, 75 bp, synthetic construct
  source 1..75: mol_type = other DNA
gtcatccagaccaaagaaccgctggatcgcgaaggtaaagtcagccgcattgttgaattcatcgaaaaaccggat

SEQ ID NO: 335826 - DNA, 75 bp, synthetic construct
  source 1..75: mol_type = other DNA
catcccaagcgatttaaaggttaacgaaacaaacgctgaatatctggtgcgtaaatttgctgaagcggaggccaa

SEQ ID NO: 335827 - DNA, 75 bp, synthetic construct
  source 1..75: mol_type = other DNA
aagttgggccaaacaagaacgttccggggctgattagaggcgcagagatatgcgtaagtattgctgcccagcttc

SEQ ID NO: 335828 - DNA, 75 bp, synthetic construct
  source 1..75: mol_type = other DNA
gggctatatgcaggcgttcgtgaagtatggattacgaaacctgaaagaaggggcgaagttccgtaaaggcattga

SEQ ID NO: 335829 - DNA, 75 bp, synthetic construct
  source 1..75: mol_type = other DNA
ttcggctgttaagttggcacacgagaagttttcggcgctggcggcggagaatgcggggctgaaggccttcaaaac

SEQ ID NO: 335830 - DNA, 75 bp, synthetic construct
  source 1..75: mol_type = other DNA
gcggcacgctactgactaacgacgctggcgaaatgctatttgccgagcaccatttttctgcgggttctttgcaga

SEQ ID NO: 335831 - DNA, 75 bp, synthetic construct
  source 1..75: mol_type = other DNA
tgcgtgcaaaatcagacagttccacaaactgctggtgagcaggcagtactggcgcagcgcatcgttgacaaactc

SEQ ID NO: 335832 - DNA, 75 bp, synthetic construct
  source 1..75: mol_type = other DNA
gcgctggcggcggagaatgcggggctgaagtctggcgctatggacgaaatcaaggttatcaaccgtggagggcag

SEQ ID NO: 335833 - DNA, 75 bp, synthetic construct
  source 1..75: mol_type = other DNA
gtggcacgctactgactaacgacgcgggtgaaatgctgtttgctgagcatcatttttcagcaggccctttgcaga

SEQ ID NO: 335834 - DNA, 75 bp, synthetic construct
  source 1..75: mol_type = other DNA
gtgaaaaaattacgtatcggcgtagtgggattaggcggcattgcgcaaaaagcgtggttaccggtgctggcggca

SEQ ID NO: 335835 - DNA, 75 bp, synthetic construct
  source 1..75: mol_type = other DNA
tcaccacctgtatgcatcgccgtgccggaagtcagcgtgaaaccgtgcaggccgtgactgacggtgcgctcatcg

SEQ ID NO: 335836 - DNA, 75 bp, synthetic construct
  source 1..75: mol_type = other DNA
atgaggaatgccaggacgatgtaccagaaagaggaatgcttaatgcgttcttcatccttcgtgacagtgtttgca

SEQ ID NO: 335837 - DNA, 75 bp, synthetic construct
  source 1..75: mol_type = other DNA
tcagacctggtagggaaggttgaaatgaccgagtggttagttgactttgccgcagagcttcgcaaaggaggcaac

SEQ ID NO: 335838 - DNA, 75 bp, synthetic construct
  source 1..75: mol_type = other DNA
atgcggcgctgaaggctgcgcaccctcaaccattcggacctgagatgatgaaggctcttgatgcgtatgagaagt

SEQ ID NO: 335839 - DNA, 75 bp, synthetic construct
  source 1..75: mol_type = other DNA
tgattatgccgttaagtttctacgcagtgaagcgtctggtgtacgtttgttcgccgaccagcttcgcaaaggagg

SEQ ID NO: 335840 - DNA, 75 bp, synthetic construct
  source 1..75: mol_type = other DNA
tgctttctgttcctgtaggtgaaaaagccaaattcaactggactccagcctggttgccgcagggctttagcgaag

SEQ ID NO: 335841 - DNA, 75 bp, synthetic construct
  source 1..75: mol_type = other DNA
cttggctgaagtacgggcgcagggcgtggagatgtttgctgaccatctgttgtgcccaaaccttgatgacactat

SEQ ID NO: 335842 - DNA, 75 bp, synthetic construct
  source 1..75: mol_type = other DNA
gccggcctgcccctgaatgccacaaccggacgtcactacagcggtgtgaatgtcctgcttctctggatgtcagcg

SEQ ID NO: 335843 - DNA, 75 bp, synthetic construct
  source 1..75: mol_type = other DNA
cctccggctgttcctggcggccgttttcgaacggtggagacgcgacgcgttcaggggctggagtttgaagaacag

SEQ ID NO: 335844 - DNA, 75 bp, synthetic construct
  source 1..75: mol_type = other DNA
cagcgtgtcacgcagtccatcgatgcgcgcctcatccagcttactgaaaaacagaataaaacaggtggtgacttt

SEQ ID NO: 335845 - DNA, 75 bp, synthetic construct
  source 1..75: mol_type = other DNA
aaaaggcgtgggtggtgagaataacgaaataattatccacaactctctgccgatgccgggagtggataatgtcga

SEQ ID NO: 335846 - DNA, 75 bp, synthetic construct
  source 1..75: mol_type = other DNA
acgctataccgcagacctggatttactggtgagtcagttgatgaccattgtccaggccgaccccaatcagcttgc

SEQ ID NO: 335847 - DNA, 75 bp, synthetic construct
  source 1..75: mol_type = other DNA
tggtggatttgtgttgcacagcggaggactgacgttcagcaacgacagtttcagtgataatgacaccattgctct

SEQ ID NO: 335848 - DNA, 75 bp, synthetic construct
  source 1..75: mol_type = other DNA
gcgcgatggccacgcttaacggcctgacgcagacctacttctccacgccgtcgtcggagatgcacgaggcgtttc

SEQ ID NO: 335849 - DNA, 75 bp, synthetic construct
  source 1..75: mol_type = other DNA
ttccaacggcgcggaactgcattttctggggacatccgccgcgactgcacagtcatatacgggtaatctgtattt

SEQ ID NO: 335850 - DNA, 75 bp, synthetic construct
  source 1..75: mol_type = other DNA
aaggcggggtaatgacctacgtttccgaccgcaaacgcggcagcaatcacggcgatctcgcctgggcatcaatga

SEQ ID NO: 335851 - DNA, 75 bp, synthetic construct
  source 1..75: mol_type = other DNA
ttttttaatgatctggcgcgagaactgctcgccatcatgttgattcccggcctgatacgccgcagtcgctccact

SEQ ID NO: 335852 - DNA, 75 bp, synthetic construct
  source 1..75: mol_type = other DNA
ctcgataacctcgccagtaacctgttggcgattctgcattattctgccgtcagtattaccgttattttactgtgt

SEQ ID NO: 335853 - DNA, 75 bp, synthetic construct
  source 1..75: mol_type = other DNA
atgcgtgcctgaatgagggcgacgcagaggaaatttcattctgtcccgatgaattcggcatttctgaccagcagg

SEQ ID NO: 335854 - DNA, 75 bp, synthetic construct
  source 1..75: mol_type = other DNA
acccccatggcgcagcacatttccgcgggaagatttgaagttaagacgggaacatcgagcacatccaatcacgca

SEQ ID NO: 335855 - DNA, 75 bp, synthetic construct
  source 1..75: mol_type = other DNA
cgctggccacctccgaaacctggcgcgacaaacagacgggggagatgagagaacagaccgaatggcaccgcgtgg

SEQ ID NO: 335856 - DNA, 75 bp, synthetic construct
  source 1..75: mol_type = other DNA
aacggcggcgctgtggccagcattgcgctggccacctccgaaacctggcgtgataaaacgaccggcgagatgaaa

SEQ ID NO: 335857 - DNA, 75 bp, synthetic construct
  source 1..75: mol_type = other DNA
tccagactgtccgaaatgcggtggagaaggtacaggtcagctttatatggctgataccactttgcttgatggaaa

SEQ ID NO: 335858 - DNA, 75 bp, synthetic construct
  source 1..75: mol_type = other DNA
agacctggatttactggtgagtcagttgatggccattgtcctggccgaccccaatcagcttgcacaatttcgccg

SEQ ID NO: 335859 - DNA, 75 bp, synthetic construct
  source 1..75: mol_type = other DNA
atcagtaccagaaacgctataccgcagacctggatttactggtgagtcagttgatggccattgtcctggccgacc

SEQ ID NO: 335860 - DNA, 75 bp, synthetic construct
  source 1..75: mol_type = other DNA
cgtttgctggatatccagcagaagaaagtggagagggcgacaggtgttgatttgccgagttatggcggcgtcgtc

SEQ ID NO: 335861 - DNA, 75 bp, synthetic construct
  source 1..75: mol_type = other DNA
aaagtgcgcagaaaaaatctgcgcagactgcgcaaaagcggaacggaaaatctcagataaaaaagtcagtatccg

SEQ ID NO: 335862 - DNA, 75 bp, synthetic construct
  source 1..75: mol_type = other DNA
aaagtgcgcagaaaaaacctgcgcagactgcgcaaaagctgaacggaaaatctcaggaaaaaaagccagtatccg

SEQ ID NO: 335863 - DNA, 75 bp, synthetic construct
  source 1..75: mol_type = other DNA
ccatgcagatgctgggctcccggcagaatagtgcacagggtggccggggacagcctcaacaaccacaacagggca

SEQ ID NO: 335864 - DNA, 75 bp, synthetic construct
  source 1..75: mol_type = other DNA
atggcctcaaaaggtattaacaaagttattctgatagggaatctgggtcaggacccggatattcgctatatgcca

SEQ ID NO: 335865 - DNA, 75 bp, synthetic construct
  source 1..75: mol_type = other DNA
cgccggagcagttccgcgtaccgatgatggtctggatgtcagataaatatctggaaaatccggtcaatgcgcagg

SEQ ID NO: 335866 - DNA, 75 bp, synthetic construct
  source 1..75: mol_type = other DNA
aaggccattcaggggctgacggagcgttacaacgtccagcacatcgcgattgatgccaccggcattggtgatgcc

SEQ ID NO: 335867 - DNA, 75 bp, synthetic construct
  source 1..75: mol_type = other DNA
cgtttctcattgctggagcagatagaaaaaagtgcgtccaatccagcgatacgccgcactgagcttatgacgagg

SEQ ID NO: 335868 - DNA, 75 bp, synthetic construct
  source 1..75: mol_type = other DNA
atgtactgacatacctgaatacatccacaaccggcagcacacaacaaatccagggcgcgttaccccctccggatg

SEQ ID NO: 335869 - DNA, 75 bp, synthetic construct
  source 1..75: mol_type = other DNA
aactagcaaggggtgaggaggttacagcgctcgatacgatttaccgagccaacctaatcactggggaacttattg

SEQ ID NO: 335870 - DNA, 75 bp, synthetic construct
  source 1..75: mol_type = other DNA
atttacccggctttcgcagtagtcttttttcgtgaaaaaaccaggaaattaattaatgaaaaaaacgttgattag

SEQ ID NO: 335871 - DNA, 75 bp, synthetic construct
  source 1..75: mol_type = other DNA
ccggggcgcgctgtttattgatgaagctactaccggcatcagaaagatgctggatgatcgctattggcaccgtaa

SEQ ID NO: 335872 - DNA, 75 bp, synthetic construct
  source 1..75: mol_type = other DNA
ggtgtcggtgtaccgcgaactgcggaggctggggaatcaacaggccgctgatcaggttaatccgctgtttgccga

SEQ ID NO: 335873 - DNA, 75 bp, synthetic construct
  source 1..75: mol_type = other DNA
cacttcagacggtgtccctagttatttgtatctggctcatgcccgatatatggcgaccttactctgaactgacgt

SEQ ID NO: 335874 - DNA, 75 bp, synthetic construct
  source 1..75: mol_type = other DNA
tgctctttgtgcggatgatttccgctatgcttcgccgttcgggcggtgatgcgggggctgttatgtttgaggcgt

SEQ ID NO: 335875 - DNA, 75 bp, synthetic construct
  source 1..75: mol_type = other DNA
aaacgccgtgatcaggagaacgaggatattgcgctaacggtagggaagctgcgcgttgagcttgaagcagcaaaa

SEQ ID NO: 335876 - DNA, 75 bp, synthetic construct
  source 1..75: mol_type = other DNA
gaaagcagcacatgcaatccggcaggaagaaagcacggtgagcgagaatgttgctgcacttgctgaaaagataat

SEQ ID NO: 335877 - DNA, 75 bp, synthetic construct
  source 1..75: mol_type = other DNA
gcgcgacatcggcgatatctacggctggcaaccgcgtagttatggcgaggagcggctgcgtcttgatgctgtgaa

SEQ ID NO: 335878 - DNA, 75 bp, synthetic construct
  source 1..75: mol_type = other DNA
agcaccaggcgtgcgtacgccaataagtctggcggttcgcagtggtgaaattgttgggctgtttggtctggtagg

SEQ ID NO: 335879 - DNA, 75 bp, synthetic construct
  source 1..75: mol_type = other DNA
accgaagacgagttcctcaatctctatatgtgtgagtttgttcgcgaaggggaatcggcatttaacctgaatatc

SEQ ID NO: 335880 - DNA, 75 bp, synthetic construct
  source 1..75: mol_type = other DNA
cagcgggtcacccagtccattgatgcgcggctgatccagctcaccaccaaaacggagaaaagcggcagtgatttc

SEQ ID NO: 335881 - DNA, 75 bp, synthetic construct
  source 1..75: mol_type = other DNA
ggaaaccttttgctgcgcgtccgatgggcgtgcgggaagtctggctcgggtacgacgccaacggcagtagcggta

SEQ ID NO: 335882 - DNA, 75 bp, synthetic construct
  source 1..75: mol_type = other DNA
gggagagcatgccgtttccggtaaaaagccccgtaaacgcagactgaaaaatcacttcaccgaagaacagattgc

SEQ ID NO: 335883 - DNA, 75 bp, synthetic construct
  source 1..75: mol_type = other DNA
acgggggaagcggtaacggtgactctgccggactggtcgtcatcgttccgccagcggtatcgggcggcaagttcc

SEQ ID NO: 335884 - DNA, 75 bp, synthetic construct
  source 1..75: mol_type = other DNA
cgcagatcgccaaatcgatcggcgtgagtaccaacaccctgtattcatggcgtcgccgcgataagtgggacgagt

SEQ ID NO: 335885 - DNA, 75 bp, synthetic construct
  source 1..75: mol_type = other DNA
ttccgcacgattgagacactacgcatacgagggatggagttcgaagagcaggccaatctaattatcggcatgctc

SEQ ID NO: 335886 - DNA, 75 bp, synthetic construct
  source 1..75: mol_type = other DNA
tcaccgacctacctgaaagaagttaagcatttcgcgctggataaatcctcctgggcctacttcctttatgaatat

SEQ ID NO: 335887 - DNA, 75 bp, synthetic construct
  source 1..75: mol_type = other DNA
atgatttgtatgattgtcattggcttcctgatttatggccctgtcatgctgatcggtctgcatgcgctggaactg

SEQ ID NO: 335888 - DNA, 75 bp, synthetic construct
  source 1..75: mol_type = other DNA
attctggctgcctccgttatgctgtttatgggttttgtgccgtgggcgacatcgagcattgccgtgatgtttgtg

SEQ ID NO: 335889 - DNA, 75 bp, synthetic construct
  source 1..75: mol_type = other DNA
gccgccgctccgatcgggtggatatcgacaccagttataaggcactgaaaaacggcaagctatgcggggataaca

SEQ ID NO: 335890 - DNA, 75 bp, synthetic construct
  source 1..75: mol_type = other DNA
aacagtggaaccggcgtaaccgctttatcctcaaatcgcgccagattggtgccacctggtactttgcccgcgaag

SEQ ID NO: 335891 - DNA, 75 bp, synthetic construct
  source 1..75: mol_type = other DNA
gccctgtgatgctgatcggtctgcatgcgctggaactggcaccgaaaaaagcggcaggtacggcagcgggcttta

SEQ ID NO: 335892 - DNA, 75 bp, synthetic construct
  source 1..75: mol_type = other DNA
aagcagttaggattcagttctgatctctacgctatgcaaagcgaaatgtggttctacagcaacacgatggcagac

SEQ ID NO: 335893 - DNA, 75 bp, synthetic construct
  source 1..75: mol_type = other DNA
ctcttatccttatctggaataaccgctgtcgttacaccttgctccgacaactgcgaaccccagggcagcgtattc

SEQ ID NO: 335894 - DNA, 75 bp, synthetic construct
  source 1..75: mol_type = other DNA
aaagccagaaacttcgccgcatcgctgacagcactgttatcaggcaactacagtgaaagcaaagtcgatatggct

SEQ ID NO: 335895 - DNA, 75 bp, synthetic construct
  source 1..75: mol_type = other DNA
tagcccggtgacagcattatggataatcgccattccgctaatggacatggtggcgattatgtaccgtcgcttgcg

SEQ ID NO: 335896 - DNA, 75 bp, synthetic construct
  source 1..75: mol_type = other DNA
gaaggttgctcgctttattaagcgtgtgaaacgccgactgcgcagaaatcgtggtggcagccccaacttaaccaa

SEQ ID NO: 335897 - DNA, 75 bp, synthetic construct
  source 1..75: mol_type = other DNA
tctggcggcgttccgtggttactcctgtgataccgcaaccaaactctcactgcgttgcatgtttgtacgtcaggg

SEQ ID NO: 335898 - DNA, 75 bp, synthetic construct
  source 1..75: mol_type = other DNA
agcttgccacatgggcagccaccgatccgtccctacgaattcaacggctgctgcgtctgataacacaaccagaat

SEQ ID NO: 335899 - DNA, 75 bp, synthetic construct
  source 1..75: mol_type = other DNA
cgatccgcacggtgaaattacagctcacggactgtggtgaaacccggggacgctgggtgattgaaggcgacctgt

SEQ ID NO: 335900 - DNA, 75 bp, synthetic construct
  source 1..75: mol_type = other DNA
ataaatgttcaggagttgattgaacttcatcgtaagcgtaaactgaccgccgtatgtagccatcagacgagaatt

SEQ ID NO: 335901 - DNA, 75 bp, synthetic construct
  source 1..75: mol_type = other DNA
agatttttttgtctgcgtcgcgtcgtcaggcgttccagtttaaaagcattattcagaaggctgcatctgaagttg

SEQ ID NO: 335902 - DNA, 75 bp, synthetic construct
  source 1..75: mol_type = other DNA
caccttcacgctgtcatcaaaacggtcgctggtactgaaaatgctgcaaataatgcgtgccggacggtgggaata

SEQ ID NO: 335903 - DNA, 75 bp, synthetic construct
  source 1..75: mol_type = other DNA
cgaaacgcacgaggcatacgcctactggaacggcgaccgctggaacgagaaaaaggcctcgcataaacgccagcg

SEQ ID NO: 335904 - DNA, 75 bp, synthetic construct
  source 1..75: mol_type = other DNA
tcatgcgcgccgggtttacttctcgtcaggcgtttgtgttgattacccttgccgccgcactgctcgcctccattg

SEQ ID NO: 335905 - DNA, 75 bp, synthetic construct
  source 1..75: mol_type = other DNA
aatttcaattatgagcgtatgcaggctggtggtttttgttttagcattatcccagcgctgaaaaagattcatcgt

SEQ ID NO: 335906 - DNA, 75 bp, synthetic construct
  source 1..75: mol_type = other DNA
gagtggctgaccatcatccgtgtgaacaaaagcaacggggcggtgagttcagtcacaacgccaaattacagtttt

SEQ ID NO: 335907 - DNA, 75 bp, synthetic construct
  source 1..75: mol_type = other DNA
cagtgggccgccctgccccgggactgtaaggccgtgcgcagtgtggcagagacagaagaccacggggcataccgc

SEQ ID NO: 335908 - DNA, 75 bp, synthetic construct
  source 1..75: mol_type = other DNA
ctcgggtacagcggcacgatgaaagtgacgcacgatcgcatcacggactacagagcgccatcggcagaagaggcc

SEQ ID NO: 335909 - DNA, 75 bp, synthetic construct
  source 1..75: mol_type = other DNA
ccggatgacaacaaactgcgcctgtatgccgcgtcacgcctcgacccggagacgtataaaaaagtccatgatgcc

SEQ ID NO: 335910 - DNA, 75 bp, synthetic construct
  source 1..75: mol_type = other DNA
ccgccccggaagccgccagccctgtgcagatataccgcgcgacctactcaccggatgacaacaaactgcgcctgt

SEQ ID NO: 335911 - DNA, 75 bp, synthetic construct
  source 1..75: mol_type = other DNA
aaaagttagcggttcagctgcgtaaacgtaaccacagaaacgaggagttaaccgtgggtaagcatcactggaaaa

SEQ ID NO: 335912 - DNA, 75 bp, synthetic construct
  source 1..75: mol_type = other DNA
ccggcctgaacgcagagatccataacgcgatctgcacagtgaaattacagctcaccgactgcggggaaacacggg

SEQ ID NO: 335913 - DNA, 75 bp, synthetic construct
  source 1..75: mol_type = other DNA
gccacagggcggtgctatatcgccgctattatcgaacatcatgctgaatgagttcgatcaatacctgcatgagcg

SEQ ID NO: 335914 - DNA, 75 bp, synthetic construct
  source 1..75: mol_type = other DNA
tattgagtcgcctgcaaaaccgcctggaaacagtcaaagaaattcatgacggtatggggttacatgggccgaaaa

SEQ ID NO: 335915 - DNA, 75 bp, synthetic construct
  source 1..75: mol_type = other DNA
atgccgcgtcacgtcttgacccggagacgtataaaaaagtgcatgatgccggtttccgctgggcacccaaacagg

SEQ ID NO: 335916 - DNA, 75 bp, synthetic construct
  source 1..75: mol_type = other DNA
tcatggacagcgcataaatctacagacctcctgactttctgcgtattggtactgaagaatggcttcaccgtcacc

SEQ ID NO: 335917 - DNA, 75 bp, synthetic construct
  source 1..75: mol_type = other DNA
tacagaacaactgaaaccggttattaaagaaggtagtgctgaggtaattggggcagttacgggggctgtctcagg

SEQ ID NO: 335918 - DNA, 75 bp, synthetic construct
  source 1..75: mol_type = other DNA
atgtacggcacttgtatagttgatgaggctgacgcttttacattgtatgacgactatgagatcaacgaccttgct

SEQ ID NO: 335919 - DNA, 75 bp, synthetic construct
  source 1..75: mol_type = other DNA
aaccattctctctgacataacaacagaaaaaataatggaggcggtagacgggatggaaaaccgccgccatcgcct

SEQ ID NO: 335920 - DNA, 75 bp, synthetic construct
  source 1..75: mol_type = other DNA
gaaaacagcaggggctccataagagatgggtatttgtccacaccagacctgcctaccgaagcgacggaacaaaaa

SEQ ID NO: 335921 - DNA, 75 bp, synthetic construct
  source 1..75: mol_type = other DNA
cagcagcagactctttatgcaccgctgctatgccgactggcagcatcgtatgacgcagcttgctacgctcagcca

SEQ ID NO: 335922 - DNA, 75 bp, synthetic construct
  source 1..75: mol_type = other DNA
atgtacgggatgtgcgttaaagctggcgatgaatcatttacgctattcgaagactaccagatcgataatctcaca

SEQ ID NO: 335923 - DNA, 75 bp, synthetic construct
  source 1..75: mol_type = other DNA
tcgcgggcgcttttacattgtttgacgactacgagatcaacgaccttactgtaaaatctgataatggtgagacct

SEQ ID NO: 335924 - DNA, 75 bp, synthetic construct
  source 1..75: mol_type = other DNA
gaagaagatcaagtaaaggtattagatactgttacctcaaataccaaatctctttctaaggttgatggtttatgc

SEQ ID NO: 335925 - DNA, 75 bp, synthetic construct
  source 1..75: mol_type = other DNA
ttgcccagttatcgccggagtttaccgcccgacttgttgaccgctggcaggaactggagagcaacggtggaatga

SEQ ID NO: 335926 - DNA, 75 bp, synthetic construct
  source 1..75: mol_type = other DNA
cagcctgtggcgatcaatattaatgtggttgatgccagagtaaggagtgatgaagatgatctctccgacgcttaa

SEQ ID NO: 335927 - DNA, 75 bp, synthetic construct
  source 1..75: mol_type = other DNA
atatttttgataaaacggttgaaatgtatgccgctacttacgggtcctgtaatcctctgaataaaccagagggga

SEQ ID NO: 335928 - DNA, 75 bp, synthetic construct
  source 1..75: mol_type = other DNA
tcaaggggtgaggacgttcaaccgaagcatataggagctgttatcccgcgaaagtcggtaggtcagggcgttagt

SEQ ID NO: 335929 - DNA, 75 bp, synthetic construct
  source 1..75: mol_type = other DNA
gaagaagatcaggtaaaaaccttagatactgtcacttctaacactaagtcattatctagaatagatggtttatgc

SEQ ID NO: 335930 - DNA, 75 bp, synthetic construct
  source 1..75: mol_type = other DNA
tttcttgccgctgtactgagaagcccggatatctgtcttatcgaagcggacagcagcagactctttatgcaccgc

SEQ ID NO: 335931 - DNA, 75 bp, synthetic construct
  source 1..75: mol_type = other DNA
gggaacatatgacgctggaagggatggcaaaactctattgccgtggccttgatgaccagtggccggaagaagcta

SEQ ID NO: 335932 - DNA, 75 bp, synthetic construct
  source 1..75: mol_type = other DNA
aagtagaaggcggtgttgtagacctgaacacgctgaaagcggctaacattatcggtatccagatcgagttcgcga

SEQ ID NO: 335933 - DNA, 75 bp, synthetic construct
  source 1..75: mol_type = other DNA
atgagttcgatcaatacctgcatgagcgctacctgagcgggaaagccagaaaagatcggtggtactggaataaca

SEQ ID NO: 335934 - DNA, 75 bp, synthetic construct
  source 1..75: mol_type = other DNA
ggcgaaatactgtactggttggtgggcaaggcaagaagctgttccgctggcggctacccgaaggtaatccctatc

SEQ ID NO: 335935 - DNA, 75 bp, synthetic construct
  source 1..75: mol_type = other DNA
accgtgtcgtgttctggaagctggctcactggctggcccgccaaataccgtacaggtatcgcttccctgatgagg

SEQ ID NO: 335936 - DNA, 75 bp, synthetic construct
  source 1..75: mol_type = other DNA
gaccgcattgctgtggaggccacccaggtacgttcactggagttttccctgataatgacggcgcaggatcaggag

SEQ ID NO: 335937 - DNA, 75 bp, synthetic construct
  source 1..75: mol_type = other DNA
gtcttacttttccagcaaaatgaatatcgtggtcgcgcaagatctctacccggaatcgctggaaggcgatgagcc

SEQ ID NO: 335938 - DNA, 75 bp, synthetic construct
  source 1..75: mol_type = other DNA
aagccgccgtcatcgaaagctataccgtgttctacagcggggaagcagagaaaatcagcccccatagcaagggac

SEQ ID NO: 335939 - DNA, 75 bp, synthetic construct
  source 1..75: mol_type = other DNA
gcctgttctcccgtgaatggataacgcttgatgcaattaacgccattcttgaacaacagcaggacagtttcccgt

SEQ ID NO: 335940 - DNA, 75 bp, synthetic construct
  source 1..75: mol_type = other DNA
gggtcagagcaaaacgtgggttttatttggtaaaaccaatcacggcaagctcagcggcgaaatactgtactggtt

SEQ ID NO: 335941 - DNA, 75 bp, synthetic construct
  source 1..75: mol_type = other DNA
ccgctggcgaagataatggatttacttgaagagcctgactttaatgaagcgcgcaatgttagcgcgctgttcctc

SEQ ID NO: 335942 - DNA, 75 bp, synthetic construct
  source 1..75: mol_type = other DNA
ggtaggaactgaatcctacgaactgggattttcgaaaggattaattgatcctggtgaaagcgtctatgaagctgc

SEQ ID NO: 335943 - DNA, 75 bp, synthetic construct
  source 1..75: mol_type = other DNA
ggcattattgctgagtcactgagtcctcactggattattgaaaatctccgcgctattgctgatggcaacgataaa

SEQ ID NO: 335944 - DNA, 75 bp, synthetic construct
  source 1..75: mol_type = other DNA
cctttactaaacattattttgattttgatacaggcgattatctcgaagactactgcacccatcttgtcaaagatc

SEQ ID NO: 335945 - DNA, 75 bp, synthetic construct
  source 1..75: mol_type = other DNA
gtcccttccaggatgagcaatttaaccaactggcgaactacgtttttggtcactgtgacgcgctgatcctgcgcg

SEQ ID NO: 335946 - DNA, 75 bp, synthetic construct
  source 1..75: mol_type = other DNA
ggctggcacaatttgctggatatgggggggacggcgatcatggcgaaagtccgtccttatattggcaccaccacc

SEQ ID NO: 335947 - DNA, 75 bp, synthetic construct
  source 1..75: mol_type = other DNA
gctggtgatgacaatgttattagtgatggtgtttatcatccctattgctttactggttaatagcattgttgacgg

SEQ ID NO: 335948 - DNA, 75 bp, synthetic construct
  source 1..75: mol_type = other DNA
tcagcagccgttgctgcactggatgtgttacggcaaatgagtctgaaattttatcctgaatttattctgagggcc

SEQ ID NO: 335949 - DNA, 75 bp, synthetic construct
  source 1..75: mol_type = other DNA
acgcagcaatatcactaccgcaaaagtcgaacacggcgtcgataccgcctggctggtcgatcatcacactgaaga

SEQ ID NO: 335950 - DNA, 75 bp, synthetic construct
  source 1..75: mol_type = other DNA
gcgtgccgcagtttgaacatgcactttgtactttcatggcgaaaaagccgctgtttatgattggtcacagtgttg

SEQ ID NO: 335951 - DNA, 75 bp, synthetic construct
  source 1..75: mol_type = other DNA
tgcaagcgatggttgcggataccttaggccagcttccggcactgaacacgcgacttaacgaagccgtcagtcgcg

SEQ ID NO: 335952 - DNA, 75 bp, synthetic construct
  source 1..75: mol_type = other DNA
cagcgcggcgggcgttgtcgggcgcgttaaaaaagtcctccgtcgccgctatcaacaccaggtactgctctcacg

SEQ ID NO: 335953 - DNA, 75 bp, synthetic construct
  source 1..75: mol_type = other DNA
acaacagaaaacggtggcaattaccctgcgcgaactggcaccgttcgacaaacgtctcggcaccactcaacaagc

SEQ ID NO: 335954 - DNA, 75 bp, synthetic construct
  source 1..75: mol_type = other DNA
cgcgccagccagaccttacgcggcattcatcgtaaaaatacctggcaggcgctcaacctcaaacgctatggtgct

SEQ ID NO: 335955 - DNA, 75 bp, synthetic construct
  source 1..75: mol_type = other DNA
gtagccaaaaatgcttactctctggccgggtttgacgtttcttttaatgaggaaactgttcagccaggtggtgat

SEQ ID NO: 335956 - DNA, 75 bp, synthetic construct
  source 1..75: mol_type = other DNA
tgttttaatttcttttccgacaggaacgctgggggatattattgcatggtttcactacgctgaaaaattccgtat

SEQ ID NO: 335957 - DNA, 75 bp, synthetic construct
  source 1..75: mol_type = other DNA
tattacagggaaacaggtgtgtggtgtgattagaacgcttcattcatatttaaccaatcatgacaggataattta

SEQ ID NO: 335958 - DNA, 75 bp, synthetic construct
  source 1..75: mol_type = other DNA
tcaccggattatctgcgtggcgacaaccgttttgtcacctttacccgtgattttgtgaatagcggcaaaccggtg

SEQ ID NO: 335959 - DNA, 75 bp, synthetic construct
  source 1..75: mol_type = other DNA
ttccgtctggttggttttcatcgtaatgccggatatatcctgggagtatctcctcaggaagaaccaccccgactc

SEQ ID NO: 335960 - DNA, 75 bp, synthetic construct
  source 1..75: mol_type = other DNA
cgttctgatatcatttccgaccggtacactgggcgacattattgcctggtttcattatgctgagaaattccgtat

SEQ ID NO: 335961 - DNA, 75 bp, synthetic construct
  source 1..75: mol_type = other DNA
tgtgacactcaggcaggatgggtgacaagcacaaaaaaatattatgtcaaattcagaatacaggcatttaaaaag

SEQ ID NO: 335962 - DNA, 75 bp, synthetic construct
  source 1..75: mol_type = other DNA
aacttatattccctaagaagggagatttgctatttagccgtgcaaacaccagagagttagttgctgcgatatgta

SEQ ID NO: 335963 - DNA, 75 bp, synthetic construct
  source 1..75: mol_type = other DNA
gatgccttttgccacctgttttgacagggaaggcaagaaggcatactcgcgacgtaaggatgtggtgcatttact

SEQ ID NO: 335964 - DNA, 75 bp, synthetic construct
  source 1..75: mol_type = other DNA
gggcatgattttgagagtcgctggctggctctgatagcccgcctgtttgataacgcgtcccgttcactgctcctg

SEQ ID NO: 335965 - DNA, 75 bp, synthetic construct
  source 1..75: mol_type = other DNA
atttacttcacccgcagacgcatttcgtaaagccgggcacgaagttgtcactattgaaaagcaagcgggtaaaac

SEQ ID NO: 335966 - DNA, 75 bp, synthetic construct
  source 1..75: mol_type = other DNA
tcaccggattatctgcgtggcgacaaccgttttgtcacctttacccgtgattttgtgaatagcggcaaacctgtt

SEQ ID NO: 335967 - DNA, 75 bp, synthetic construct
  source 1..75: mol_type = other DNA
aacaaagttaataaaaagtaatgaattaactaatgagtcatttaattcattatctcaaaaggtatttcagcaatg

SEQ ID NO: 335968 - DNA, 75 bp, synthetic construct
  source 1..75: mol_type = other DNA
cgcgcctgcactccgccattatctcaatgaactttgccactccggcgattgccatcaactatgaacataaatccg

SEQ ID NO: 335969 - DNA, 75 bp, synthetic construct
  source 1..75: mol_type = other DNA
ggccagactggcgacttacgccagtgaagatttacatgccattgcgccgacgcagccgcgcgtatcggcacagcc

SEQ ID NO: 335970 - DNA, 75 bp, synthetic construct
  source 1..75: mol_type = other DNA
ggcggtggcggagcgcgttcatagcgctaaaaccagtcagcaacaggcgacgcgcccgcaggagaacgatccggt

SEQ ID NO: 335971 - DNA, 75 bp, synthetic construct
  source 1..75: mol_type = other DNA
tccagaagatatgatgtgggtactgaagaaatgacaagtcgcgcgatgagtatttataacgaattaaaaaataaa

SEQ ID NO: 335972 - DNA, 75 bp, synthetic construct
  source 1..75: mol_type = other DNA
atccactttcagctcaacaaacaacagcagatctccaccatccgtctcgatccaccgtcgcttggcaagctctag

SEQ ID NO: 335973 - DNA, 75 bp, synthetic construct
  source 1..75: mol_type = other DNA
atgaatccggcattgcttgccacgctcggaacacttgcggaaaccgcttcgttgaaggcggatattttaccgccg

SEQ ID NO: 335974 - DNA, 75 bp, synthetic construct
  source 1..75: mol_type = other DNA
ctttcgatggacgaactgggcgaaaaactgacgacgcttttgaaagatcagatccactttcagctcaacaaacaa

SEQ ID NO: 335975 - DNA, 75 bp, synthetic construct
  source 1..75: mol_type = other DNA
atatcggccccaaacccgtgaaaaaggatacccttaccgggagtcgtacactgttcccgcgccttgaaccggtgc

SEQ ID NO: 335976 - DNA, 75 bp, synthetic construct
  source 1..75: mol_type = other DNA
gcagttgcggcaggcacagcaggcgcaggaaagagtgcttgctgcgctggcagaagcggagaacagttttgttgt

SEQ ID NO: 335977 - DNA, 75 bp, synthetic construct
  source 1..75: mol_type = other DNA
ttgcgatttaaatacgaaggtaaacaactgaaaatcattaatccttctccctattatctgacggtgacaggaatc

SEQ ID NO: 335978 - DNA, 75 bp, synthetic construct
  source 1..75: mol_type = other DNA
aaggaatcggatttatggagaagtaagccactgtaaggtaaagcaacaccttcgtcagctttggattatctataa

SEQ ID NO: 335979 - DNA, 75 bp, synthetic construct
  source 1..75: mol_type = other DNA
tttattattttctcaacaataaatacaatatgaatgacattatggaaagtatcattaaaaaaacgagatatcatt

SEQ ID NO: 335980 - DNA, 75 bp, synthetic construct
  source 1..75: mol_type = other DNA
agcagtttatcagtgaagcagagtgttgtttcaactgttatatgaataaacgactgcgaaaccagtctgcgcatt

SEQ ID NO: 335981 - DNA, 75 bp, synthetic construct
  source 1..75: mol_type = other DNA
atcaggacacgccgcagccgcgaaacgtcgcaacatcgccggttatccagcaattgacgaaagcggtggtgcaaa

SEQ ID NO: 335982 - DNA, 75 bp, synthetic construct
  source 1..75: mol_type = other DNA
tgaatatatcagcaaatatactgaaaatttctctttgctggcagaaacagggaaactggatccagttactggcag

SEQ ID NO: 335983 - DNA, 75 bp, synthetic construct
  source 1..75: mol_type = other DNA
agtgtgtggataaaaactgtgttgctgatgttgtctcaagctggacaggcgttccactgggagtatgtcttgata

SEQ ID NO: 335984 - DNA, 75 bp, synthetic construct
  source 1..75: mol_type = other DNA
atctgcatggctttatcaaagcaaattagtatctaagatacaaaatacagcggatctttcatcgaagaatatgta

SEQ ID NO: 335985 - DNA, 75 bp, synthetic construct
  source 1..75: mol_type = other DNA
cttaagacttgaattaaagcgattgcgagaaaaatctcaaggctcgcaaacaaagtttctgacaatgccgatttt

SEQ ID NO: 335986 - DNA, 75 bp, synthetic construct
  source 1..75: mol_type = other DNA
tgactctgaaaataataaaacaacaagaaaaataagaatgtcagtaagaaaaaataatattacgttacgtaattc

SEQ ID NO: 335987 - DNA, 75 bp, synthetic construct
  source 1..75: mol_type = other DNA
agtgttattctgcttgatgaaattgaaaaagcacatccggatgttctggagttcttttttcagatattcgatttg

SEQ ID NO: 335988 - DNA, 75 bp, synthetic construct
  source 1..75: mol_type = other DNA
ttaataaattaacaccagaaagtagacgtgctctggattctgctattaattatgcaatgtcaagatcacacaatg

SEQ ID NO: 335989 - DNA, 75 bp, synthetic construct
  source 1..75: mol_type = other DNA
cttaattctttggatggcacagctattttgtttattgatgaggctcattcccttatcggtgcaggaggacttccg

SEQ ID NO: 335990 - DNA, 75 bp, synthetic construct
  source 1..75: mol_type = other DNA
ttaataaattatctccagaaagccgaagtactctggattctgctattaattacgcaatatcacgatcacaccatg

SEQ ID NO: 335991 - DNA, 75 bp, synthetic construct
  source 1..75: mol_type = other DNA
ccgggcagatcttaaagatcctgtaaaaccagatggggtatttttactagcaggcccttctggcaccggtaaaac

SEQ ID NO: 335992 - DNA, 75 bp, synthetic construct
  source 1..75: mol_type = other DNA
ttgggaattatcgaggattctgaaggtaagatggtgtctttcagagattgtcttataattatgacatcaaatctt

SEQ ID NO: 335993 - DNA, 75 bp, synthetic construct
  source 1..75: mol_type = other DNA
tgtatcaatacagcgccacaatcctcacctgtattttctgagtcgatgcagactctactggaaaaaacatggata

SEQ ID NO: 335994 - DNA, 75 bp, synthetic construct
  source 1..75: mol_type = other DNA
aatatcgaactgctggcaacgcgcaaatcggtaagcagttgctgcgcagccagcaccaccggtgattgccattaa

SEQ ID NO: 335995 - DNA, 75 bp, synthetic construct
  source 1..75: mol_type = other DNA
gtaagcaaagttgcgaagctcgggagcgtgatttgtttgaatcatgggtaatgcattcaatttgtatctccaaat

SEQ ID NO: 335996 - DNA, 75 bp, synthetic construct
  source 1..75: mol_type = other DNA
gctgacggggctgatgctcaaatacaccatcatgcgcggcgaagcgacgccgtttgtgatggaactgcctgtcta

SEQ ID NO: 335997 - DNA, 75 bp, synthetic construct
  source 1..75: mol_type = other DNA
ctggcgttaccgtcgaacgtaaagagggtcagttctccaccaccgatcatcaggtcaccctggttgacctgcccg

SEQ ID NO: 335998 - DNA, 75 bp, synthetic construct
  source 1..75: mol_type = other DNA
gatatcgaactgctggcaacgcgcaagtcggtaagcagttgctgcgcagccagcaccaccggtgattgccattaa

SEQ ID NO: 335999 - DNA, 75 bp, synthetic construct
  source 1..75: mol_type = other DNA
atcaaaactcaacgaacagcgtgaatattacgagggagtaatcgcggatggaagtaagcgcatagcagaactgga

SEQ ID NO: 336000 - DNA, 75 bp, synthetic construct
  source 1..75: mol_type = other DNA
atagcaacacacgggccgcagctgatatctacttccaactggtcgaggaatgcgaaattcctgctggcggatctc

SEQ ID NO: 336001 - DNA, 75 bp, synthetic construct
  source 1..75: mol_type = other DNA
tgcctgcgccatgtgggccaaagcttacgactgggcagcatccgatattggggaagaagttctcaaagatgaaga

SEQ ID NO: 336002 - DNA, 75 bp, synthetic construct
  source 1..75: mol_type = other DNA
ttgtttctggttttactggttgcggaaaaagcgccattgccggggaaatagaaatcgcgatgaaggctattggtg

SEQ ID NO: 336003 - DNA, 75 bp, synthetic construct
  source 1..75: mol_type = other DNA
gtgagcaagattgactatgaggcactgcgtgccaaggcagaaaaagcaacgtgtggtgtatggtcgctcgaatat

SEQ ID NO: 336004 - DNA, 75 bp, synthetic construct
  source 1..75: mol_type = other DNA
ttcaaatttctgaccggaccagaaaccgtgctggcactacttgatgaacgggaagcagacaaaaagcgcattgca

SEQ ID NO: 336005 - DNA, 75 bp, synthetic construct
  source 1..75: mol_type = other DNA
gcacattgccgatgcgcgttaccagtgcattgctgtcatctgtgatgtggtgagcaataccctgacggcagaacc

SEQ ID NO: 336006 - DNA, 75 bp, synthetic construct
  source 1..75: mol_type = other DNA
cggcacaccggatgaaattctcaataatccggcgaatgattatgtccgtaccttcttccgtggcgttgatattag

SEQ ID NO: 336007 - DNA, 75 bp, synthetic construct
  source 1..75: mol_type = other DNA
gtattcgatatgcagatgttgaggtcatgaaaattgctggagatgcccagctttctaccccatgcactgacagca

SEQ ID NO: 336008 - DNA, 75 bp, synthetic construct
  source 1..75: mol_type = other DNA
gagaattgctggagatgcccagctttctaccccatgcactgacagcatcataaacagcattgcaacaggcattcg

SEQ ID NO: 336009 - DNA, 75 bp, synthetic construct
  source 1..75: mol_type = other DNA
atctttataaaatatttggcgagcatccacagcgagcgttcaaatatatcgaacaaggactttcaaaagaacaaa

SEQ ID NO: 336010 - DNA, 75 bp, synthetic construct
  source 1..75: mol_type = other DNA
tgccaaaatatccgacgccgaactccgtgaggtgcgcagaaaaaagattgcgatggtcttccagtcctttgcctt

SEQ ID NO: 336011 - DNA, 75 bp, synthetic construct
  source 1..75: mol_type = other DNA
ctcggcgctcgatccattaattcgcaccgagatgcaggatgagctggtaaaattacaggcgaaacatcagcgcac

SEQ ID NO: 336012 - DNA, 75 bp, synthetic construct
  source 1..75: mol_type = other DNA
cgctgactggctgacagcgattgagatgtacaaaccaactgtgcgcatcgtggaagttaatgtgccacgcgtcgc

SEQ ID NO: 336013 - DNA, 75 bp, synthetic construct
  source 1..75: mol_type = other DNA
gctattggtgtgccggttcaatggactaatggcgatgcagaaaagcatatgaccggcgctgactggctgacagcg

SEQ ID NO: 336014 - DNA, 75 bp, synthetic construct
  source 1..75: mol_type = other DNA
aaggctttgttctgcgtgcaggtaaagtgatcatcgtcgtcagcgttttccttagcgccttcaacagcttctcac

SEQ ID NO: 336015 - DNA, 75 bp, synthetic construct
  source 1..75: mol_type = other DNA
acgggaaaggaaccagcaatacatcaaatcccgcgaccaggagaacgaggaaattgcgctaacggtagggaagct

SEQ ID NO: 336016 - DNA, 75 bp, synthetic construct
  source 1..75: mol_type = other DNA
caaaacaactggagtcggcaaaatcaaaactcaacgagcagcgtgaatattacgagggagtaatctcggatggga

SEQ ID NO: 336017 - DNA, 75 bp, synthetic construct
  source 1..75: mol_type = other DNA
gatgtacaaaccaacagtgcgcatcgtggaagttaatgtgccacgcgcccctggcattcgcatcaaaggagagtg

SEQ ID NO: 336018 - DNA, 75 bp, synthetic construct
  source 1..75: mol_type = other DNA
tcagtaataccattcgcgctctgtttgctaccggcaactttgaggatgttcgcgtccttcgtgatggtgataccc

SEQ ID NO: 336019 - DNA, 75 bp, synthetic construct
  source 1..75: mol_type = other DNA
aagcatggtccgctcaggacaaccatatcaaccagctggctgaacgaattgaatcgctggagaagaagaatggcg

SEQ ID NO: 336020 - DNA, 75 bp, synthetic construct
  source 1..75: mol_type = other DNA
acaaaaacaggcgagctatgctataaaaaagacaggatattacaggcacttaaggaacttaagtacgatctggag

SEQ ID NO: 336021 - DNA, 75 bp, synthetic construct
  source 1..75: mol_type = other DNA
attctatgagaacttctatgccggtggctccagtaccgtacgtggcttccagtctaacaccattggtccgaaagc

SEQ ID NO: 336022 - DNA, 75 bp, synthetic construct
  source 1..75: mol_type = other DNA
gggcttctttgaaactgtcgataccgatacccaacgtgttccggggagcccggatcaggttgatgtagtttacaa

SEQ ID NO: 336023 - DNA, 75 bp, synthetic construct
  source 1..75: mol_type = other DNA
cccgatcaacgaatataactcgctgcgtgcaggtctgggttatgtacataactccctgtccaacatgcagcctca

SEQ ID NO: 336024 - DNA, 75 bp, synthetic construct
  source 1..75: mol_type = other DNA
gacataccagagcagtaaggggctggagttcccgtatgtggcggttatcaatgcttctttcgttccttctggtgt

SEQ ID NO: 336025 - DNA, 75 bp, synthetic construct
  source 1..75: mol_type = other DNA
gtcattcatggtgtggccggttccggaaaaaccatgattcttttgttccgttgcctttacctggctgaaaccaca

SEQ ID NO: 336026 - DNA, 75 bp, synthetic construct
  source 1..75: mol_type = other DNA
ctggactatatccacgctgcgtgaggtaaatcaggagcaggtcacactggaaaccagtggtattctgaaatcgga

SEQ ID NO: 336027 - DNA, 75 bp, synthetic construct
  source 1..75: mol_type = other DNA
acagcggaaaaaaacgacttacaggcacaggagagcgaacgaaaacaggcggtccaaaaacgaatcgagggaaaa

SEQ ID NO: 336028 - DNA, 75 bp, synthetic construct
  source 1..75: mol_type = other DNA
acaacgaagacggactcacagaacaggaacgcaaacttctccacgtgctggcaacagcggaaaaaaacgacttac

SEQ ID NO: 336029 - DNA, 75 bp, synthetic construct
  source 1..75: mol_type = other DNA
tgaagaaacggatcggattcatcaggaagctcggagaacagaccgcacgacagagacagattattgacctgatcg

SEQ ID NO: 336030 - DNA, 75 bp, synthetic construct
  source 1..75: mol_type = other DNA
tctatgggtgaacatccgagcacctctgatcaggataacagcttcaaaacggacgacttcacgttcaactatggt

SEQ ID NO: 336031 - DNA, 75 bp, synthetic construct
  source 1..75: mol_type = other DNA
gcaatacatcaaatcccgcgaccaggagaacgaggaaattgcgctaacggtagggaagctgcgcgttgagcttga

SEQ ID NO: 336032 - DNA, 75 bp, synthetic construct
  source 1..75: mol_type = other DNA
cggcggttttattctcggcaatctcgatacccacgatcgcattatgcggctgctggcgaactacactcagtgtac

SEQ ID NO: 336033 - DNA, 75 bp, synthetic construct
  source 1..75: mol_type = other DNA
cggcggttttattctcggcaatctcgatacccacgatcgcattatgcgtctgctggcaaagtacacccagtgtac

SEQ ID NO: 336034 - DNA, 75 bp, synthetic construct
  source 1..75: mol_type = other DNA
tggtgtgccggttcaatggactaatggcgatgcagaaaagcatatgaccggcgctgactggctgacagcgattga

SEQ ID NO: 336035 - DNA, 75 bp, synthetic construct
  source 1..75: mol_type = other DNA
ggaaatatcgctcccagaacgtagcagcatgcttcatcgaacagattttcacgaggattaccaaacggtaatggc

SEQ ID NO: 336036 - DNA, 75 bp, synthetic construct
  source 1..75: mol_type = other DNA
gtgagcaaaattaattaccaggcactgcgtgaggcggcagaacgtgcaactccagcaatggaacgcctgttaatg

SEQ ID NO: 336037 - DNA, 75 bp, synthetic construct
  source 1..75: mol_type = other DNA
accttatggtcaggtcgagactcgcctctactcacccaaaagtcacagcccggcgacactattttatctgcatgg

SEQ ID NO: 336038 - DNA, 75 bp, synthetic construct
  source 1..75: mol_type = other DNA
atcaaaagccgcgatcaggagaacgaggatattgcgctaacggtagggaagctgcgcgttgagcttgaagcagaa

SEQ ID NO: 336039 - DNA, 75 bp, synthetic construct
  source 1..75: mol_type = other DNA
aggagaacgaggatattgcgctaacggtagggaagctgcgcgttgagcttgaagcagcaaaatcaaaactcaacg

SEQ ID NO: 336040 - DNA, 75 bp, synthetic construct
  source 1..75: mol_type = other DNA
gcaacaggatttgcagatgtatgaagaggcgtatttaagcaacgacacagaccgcgagtcgccgtattactgcct

SEQ ID NO: 336041 - DNA, 75 bp, synthetic construct
  source 1..75: mol_type = other DNA
ttggctttgccggtgattccgcaggtgccatgctggcgctcgccagtgcgttgtggttgcgcgataaacagatcg

SEQ ID NO: 336042 - DNA, 75 bp, synthetic construct
  source 1..75: mol_type = other DNA
cggcggatttattctcggcaacctcgatacccacaatcgcattatgcggctgctggcaaactatacccaatgtac

SEQ ID NO: 336043 - DNA, 75 bp, synthetic construct
  source 1..75: mol_type = other DNA
aataccgggattatattcgtcaacgcattcattcgttctctctcggttcctcaggagcaggagcctgccgttcgg

SEQ ID NO: 336044 - DNA, 75 bp, synthetic construct
  source 1..75: mol_type = other DNA
ctgctaataaaccagcaccatatttcggtaggttctggacagatggtttagaactgtgctcagtactgttcgtct

SEQ ID NO: 336045 - DNA, 75 bp, synthetic construct
  source 1..75: mol_type = other DNA
gtgaaaggttaatacattggaatttaataaatgataatgttcgagtcctaataaatgaatcgattattagtcatt

SEQ ID NO: 336046 - DNA, 75 bp, synthetic construct
  source 1..75: mol_type = other DNA
cgaaggcgttgagcgtgtcttccaggctcactctccggtagttgacagcatttctgtcaaacgtcgtggtgctgt

SEQ ID NO: 336047 - DNA, 75 bp, synthetic construct
  source 1..75: mol_type = other DNA
gcagctttatcatctgccgctggacggcgcacaaatcgcgcttaacggtcaggaagcagaaaaccagtttgttgg

SEQ ID NO: 336048 - DNA, 75 bp, synthetic construct
  source 1..75: mol_type = other DNA
ggctaactacgttcgtggcgtggtgaaacatctgcaactgcgtaacaacagcttcggcggtgtggacatggtgat

SEQ ID NO: 336049 - DNA, 75 bp, synthetic construct
  source 1..75: mol_type = other DNA
cagggcaaaatactaaaagcctctccgataacaccagaacaaatcgaaatacgtgagctgaggaaaaagctacaa

SEQ ID NO: 336050 - DNA, 75 bp, synthetic construct
  source 1..75: mol_type = other DNA
gtctacggggtggttagcgaataccagtacagatggtaatcatagccattcactgtccggcacagcagcatctgc

SEQ ID NO: 336051 - DNA, 75 bp, synthetic construct
  source 1..75: mol_type = other DNA
gtaacttcaaacgtaccctggttggcagcgaatacaacacccgtcgtgaacagtgcgaaaccggtgcgcgtttct

SEQ ID NO: 336052 - DNA, 75 bp, synthetic construct
  source 1..75: mol_type = other DNA
acccggcctgcggcacgtcgcgtaatacgctggagatgatccgcaacagcggtacagaaccgaccattatctatt

SEQ ID NO: 336053 - DNA, 75 bp, synthetic construct
  source 1..75: mol_type = other DNA
cgatgaatgtcagttctaccacgcttgagagttgggtgcgccagctcaggcgagagcgtcaggggattgcgccct

SEQ ID NO: 336054 - DNA, 75 bp, synthetic construct
  source 1..75: mol_type = other DNA
ggaacatttattcttgcttctactttcgaagatgacaaaacagcggcagaaacccactatgatggtgtctggctg

SEQ ID NO: 336055 - DNA, 75 bp, synthetic construct
  source 1..75: mol_type = other DNA
agatactcagaaaggggcgtttaccaaggaagacggtgaaaaagtggttgatgattcgggtcaacgattaaaata

SEQ ID NO: 336056 - DNA, 75 bp, synthetic construct
  source 1..75: mol_type = other DNA
atgctaaaacagcaggatatgacagaaaccgccagagcagtgtttaatgaattaagcgtcaccgaaccggcgaca

SEQ ID NO: 336057 - DNA, 75 bp, synthetic construct
  source 1..75: mol_type = other DNA
gtcggggaggttgcgcagaatacttacctttcacgcgaacgctgccagttaatactgactcagcttgttatggcg

SEQ ID NO: 336058 - DNA, 75 bp, synthetic construct
  source 1..75: mol_type = other DNA
atgcgccatgcgccatgcgccatgcgccatgcgccatgcgccatcatcacaggtgcgggtgcaggtattggtaaa

SEQ ID NO: 336059 - DNA, 75 bp, synthetic construct
  source 1..75: mol_type = other DNA
agataaaacaggtattacggttaaaggtacccaggatgcccgtgaactgggcaacgcttttagtgctgatatccc

SEQ ID NO: 336060 - DNA, 75 bp, synthetic construct
  source 1..75: mol_type = other DNA
aaaaatatcgttattttcacccataatcattgcctgacatatattgctaaaaataagcgtgatgcgacatttaaa

SEQ ID NO: 336061 - DNA, 75 bp, synthetic construct
  source 1..75: mol_type = other DNA
ttcctccaatcactgcttgtcagacaaaacaggcattacggtgaaaggtactcaggatgcccgtgaactgggcaa

SEQ ID NO: 336062 - DNA, 75 bp, synthetic construct
  source 1..75: mol_type = other DNA
ttatggttttgaaagtggttgggagcaggtttacacgactggatttagacctcagccggctgatataaacgcacc

SEQ ID NO: 336063 - DNA, 75 bp, synthetic construct
  source 1..75: mol_type = other DNA
atgctaaaacagcaagatatgaccgaaaccgccagagtggtgtttaatgaattgagcgtcaccgaaccggcgact

SEQ ID NO: 336064 - DNA, 75 bp, synthetic construct
  source 1..75: mol_type = other DNA
ctgaacgaagggtttaaattcaccaacccgaacgtcaaagatgaatgtggttgcggcgaaagcttccacgtctga

SEQ ID NO: 336065 - DNA, 75 bp, synthetic construct
  source 1..75: mol_type = other DNA
gcgctgttcctttgctcgcctgcagccagctgggtaagcggacaaattctcaccgtctccggtggtggggtacag

SEQ ID NO: 336066 - DNA, 75 bp, synthetic construct
  source 1..75: mol_type = other DNA
cctgggcaaaccacaggatattgctgatgcagcgctgttcctttgttctccggcagccagttggataagcggaca

SEQ ID NO: 336067 - DNA, 75 bp, synthetic construct
  source 1..75: mol_type = other DNA
tcgacggaaaatgcgccatcatcactggcgccggggctggtattggtaaagaaatcgccatcactttcgctaccg

SEQ ID NO: 336068 - DNA, 75 bp, synthetic construct
  source 1..75: mol_type = other DNA
tgaagtctaaaaaatatatctacattttactggcgcttggggcgattgtggggctgggtacacatgctgcctgga

SEQ ID NO: 336069 - DNA, 75 bp, synthetic construct
  source 1..75: mol_type = other DNA
cgatgcacagaaaagcgcgttcacgaaagaggacggtgagaaggtggttgatgaaaaaggcaacaggctgaacta

SEQ ID NO: 336070 - DNA, 75 bp, synthetic construct
  source 1..75: mol_type = other DNA
agcgttagggctggcggaagaccgttttactgacgagcagttaatcgattttatgttgcagcacccagttctgat

SEQ ID NO: 336071 - DNA, 75 bp, synthetic construct
  source 1..75: mol_type = other DNA
atgctaaaacagcaggatatgaccgaaaccgccagagccgtgtttaatgaattaagcgtcaccgaaccggcgaca

SEQ ID NO: 336072 - DNA, 75 bp, synthetic construct
  source 1..75: mol_type = other DNA
ggatgcgcaaaaaggcgcatttgccaaggaagacggcgagaaagtcgttgatgaaacaggtaatcgactgaaata

SEQ ID NO: 336073 - DNA, 75 bp, synthetic construct
  source 1..75: mol_type = other DNA
actcacacagagatgaaacgtataaagaaactttagatgaacatttatctttgcttaaacgtaatgaaataatcg

SEQ ID NO: 336074 - DNA, 75 bp, synthetic construct
  source 1..75: mol_type = other DNA
atgctgaaacagcaggatatgacagaaaccgccagagtggtttttaatgaattaagtgttaccgaaccggcgaca

SEQ ID NO: 336075 - DNA, 75 bp, synthetic construct
  source 1..75: mol_type = other DNA
atgaaagtatgtctgtattttatttccgtatttttttcatcttgctgtatagctgatgttttccattataggatg

SEQ ID NO: 336076 - DNA, 75 bp, synthetic construct
  source 1..75: mol_type = other DNA
ctaatactgacccagcttgttatggcgggtctggcagactatcagttcggttgttacagacgccttcagtcctga

SEQ ID NO: 336077 - DNA, 75 bp, synthetic construct
  source 1..75: mol_type = other DNA
acctttcacgcgaacgctgccagttaatactgacccagctggttatggcggatctggcagactatcagttcggtt

SEQ ID NO: 336078 - DNA, 75 bp, synthetic construct
  source 1..75: mol_type = other DNA
aatacttacctttcacgcgaacgctgccagttaatactgacccagcttgttatggcgggtctggcagactatcag

SEQ ID NO: 336079 - DNA, 75 bp, synthetic construct
  source 1..75: mol_type = other DNA
attaagcgttaccgacccggcgacagtcggggagattgcgcagaatacttacctttcacgcgaacgctgccagtt

SEQ ID NO: 336080 - DNA, 75 bp, synthetic construct
  source 1..75: mol_type = other DNA
acaacacgtcagttatgttaatggttgatgttaagccatcatcatcatctacgtggacgctggttaaggatatta

SEQ ID NO: 336081 - DNA, 75 bp, synthetic construct
  source 1..75: mol_type = other DNA
ccgcatcgacaacgttatcgcagaggagaaaaaagcgacagcggaatcactggaaaccatcacagccgaaataaa

SEQ ID NO: 336082 - DNA, 75 bp, synthetic construct
  source 1..75: mol_type = other DNA
acacgcttaatcacttccgtgtcccgaacattgaaaacctgaaagtggtaaacatcggatctgaaacagttcaat

SEQ ID NO: 336083 - DNA, 75 bp, synthetic construct
  source 1..75: mol_type = other DNA
cctgataactacgacccggaaacgcgcacatactcaggcttatggcttggtggctttaaaaaggcatacaccaat

SEQ ID NO: 336084 - DNA, 75 bp, synthetic construct
  source 1..75: mol_type = other DNA
agcaggaaaacgagctaatgcagacccgcgccagcctgcaaaacgcagccattgcgcttatgaataactcattag

SEQ ID NO: 336085 - DNA, 75 bp, synthetic construct
  source 1..75: mol_type = other DNA
gccgcgcaacatgggaaacacagacaacaacgcatcgtcttacctttgaaatccgcgtatataatgcagacggtc

SEQ ID NO: 336086 - DNA, 75 bp, synthetic construct
  source 1..75: mol_type = other DNA
tggcgactatttcattaatgtctggtgaatatagatccacttataacgtaacgtttagttgcggagataaaaaca

SEQ ID NO: 336087 - DNA, 75 bp, synthetic construct
  source 1..75: mol_type = other DNA
aacggcaatgcggagttcaacaacgtcactgtacgcggtacggtgtacgcaacatctggtaaattcactggtgag

SEQ ID NO: 336088 - DNA, 75 bp, synthetic construct
  source 1..75: mol_type = other DNA
cggcttcaagaaggcgtacaccaataaccccgcgtggatcttccgttacctggttaaaaacgagcgtttcggtct

SEQ ID NO: 336089 - DNA, 75 bp, synthetic construct
  source 1..75: mol_type = other DNA
acaataaccgcgcaggtgcgcgtttaggtgggcgtatcgtggcgaacaatggaaacgtgataacggtcgataagg

SEQ ID NO: 336090 - DNA, 75 bp, synthetic construct
  source 1..75: mol_type = other DNA
tagaggcgttcgggtgcacttcacgcgggcaagcgcaccgcgctggcaaatggctgatagaaacagcaaaacgcg

SEQ ID NO: 336091 - DNA, 75 bp, synthetic construct
  source 1..75: mol_type = other DNA
ggaatgtcacttggcctaactggcagcggtactgatgttcaatcgcagtgcattttccttgttgaccgattcgtg

SEQ ID NO: 336092 - DNA, 75 bp, synthetic construct
  source 1..75: mol_type = other DNA
acggcagtacatcagtccccggcgttagtgtggcgtggcgtaatggtacggctgaccagtcaccaatcaatggct

SEQ ID NO: 336093 - DNA, 75 bp, synthetic construct
  source 1..75: mol_type = other DNA
taccatttcagcgtcacctctttcgactctgtcgatggcacacgccattatcgggtatggacggccgtgccgaat

SEQ ID NO: 336094 - DNA, 75 bp, synthetic construct
  source 1..75: mol_type = other DNA
caaactaatacgcgcgtcactcttaccgctcaatacaagaaagggcgcagtgagactaaagcgcaaatcgaccgt

SEQ ID NO: 336095 - DNA, 75 bp, synthetic construct
  source 1..75: mol_type = other DNA
taacaaacaagcgatagtcgatgaaggcgcaatctttgaggtcaacaatgatacgcttaatcatttccgcgtgcc

SEQ ID NO: 336096 - DNA, 75 bp, synthetic construct
  source 1..75: mol_type = other DNA
aagtctttggtgatgttggtagtattgaggctgattttcgagaaatcagcacattgattcatcggcgaaaggctc

SEQ ID NO: 336097 - DNA, 75 bp, synthetic construct
  source 1..75: mol_type = other DNA
acatcactggtgttttactttgcctttcagaattgataagcaacctgcatatttacccaactgaaattaataata

SEQ ID NO: 336098 - DNA, 75 bp, synthetic construct
  source 1..75: mol_type = other DNA
aagtctttggtgatgttggtagtattgaggctgattttcgagaaatcagtacactgattcatcggcggaaggcat

SEQ ID NO: 336099 - DNA, 75 bp, synthetic construct
  source 1..75: mol_type = other DNA
aaatgaccttaaaaacgctactgacagcctcaaaactgcaaccgataacctgacaaacatcactgaagatttgag

SEQ ID NO: 336100 - DNA, 75 bp, synthetic construct
  source 1..75: mol_type = other DNA
actgaaaacttcgatgaaatcagcgactacgtcacaaaagacgtgattaattcagaacagtttaaagggatgatt

SEQ ID NO: 336101 - DNA, 75 bp, synthetic construct
  source 1..75: mol_type = other DNA
gtattgatgactgcagcaaacggcacatatacaacgcctttctatgtgtctaacggtgcaatgtatgtgaaagaa

SEQ ID NO: 336102 - DNA, 75 bp, synthetic construct
  source 1..75: mol_type = other DNA
aacgcgccggatgaaaaaccgtttgatattcgcgttcgccgcgtaacggctgatagcacaagcgatctattgcga

SEQ ID NO: 336103 - DNA, 75 bp, synthetic construct
  source 1..75: mol_type = other DNA
tcaccgggcgcgggtatcaatggaccttcggcggtatggcaacgggccatacgtattacgtttacgtgcgcacaa

SEQ ID NO: 336104 - DNA, 75 bp, synthetic construct
  source 1..75: mol_type = other DNA
cttactcaggattatggcttggcggcttcaagcaggcgtacactaataaccccgcttggatcttccgttatctgg

SEQ ID NO: 336105 - DNA, 75 bp, synthetic construct
  source 1..75: mol_type = other DNA
tacaggaatgtcgctcggccttactggtagcgggactaacgttcaatcgcagtgtattttcctcgttgaccgttt

SEQ ID NO: 336106 - DNA, 75 bp, synthetic construct
  source 1..75: mol_type = other DNA
agcctgacgcccgttttcaccttacttccggttacattgccatcacggcagcctgacgcccgttttcaccttact

SEQ ID NO: 336107 - DNA, 75 bp, synthetic construct
  source 1..75: mol_type = other DNA
atgggtgccagatacaaaaaaggccgcaggctgttacccctgcggccggtttcgggcgcatattgccatcacggc

SEQ ID NO: 336108 - DNA, 75 bp, synthetic construct
  source 1..75: mol_type = other DNA
gggctttctgcatggcgtaacaggcaccttttttgattggtgctcgcagcgtgttgttagatattttcactcctg

SEQ ID NO: 336109 - DNA, 75 bp, synthetic construct
  source 1..75: mol_type = other DNA
ggatcagcccgtcattccatctgaaggtgatccgtactttcgatatggtaaccagcacaccggaaaaattatccg

SEQ ID NO: 336110 - DNA, 75 bp, synthetic construct
  source 1..75: mol_type = other DNA
gaaaactccaataacccatggcgtctcgagcgtacagctaccgctgcggaattgagtcagtacggtaacccgact

SEQ ID NO: 336111 - DNA, 75 bp, synthetic construct
  source 1..75: mol_type = other DNA
tcgctgcggtaataattcccgccaggatcggtgctgccaggtcgtcccagaaaatcatggcaaactgcgcgagcg

SEQ ID NO: 336112 - DNA, 75 bp, synthetic construct
  source 1..75: mol_type = other DNA
tcacccccgagttaagactggaatgtgcgcaactgattgttgataagggctactcatatcgacaagccagtgaat

SEQ ID NO: 336113 - DNA, 75 bp, synthetic construct
  source 1..75: mol_type = other DNA
cgatgaatgtcggttcaaccacgcttgagagctgggtacgccagctcaggcgagagcgccagggtattacgccct

SEQ ID NO: 336114 - DNA, 75 bp, synthetic construct
  source 1..75: mol_type = other DNA
aatgcgaatggtcgggtaccttctgcccgtaaggtgaatggtaaggcgctttcagcggatataacactgacgccg

SEQ ID NO: 336115 - DNA, 75 bp, synthetic construct
  source 1..75: mol_type = other DNA
gctcccggaatgctggctgaaacggacgagtacatggccggaggtaaacgaccggcccgtgagcacaaccgggcg

SEQ ID NO: 336116 - DNA, 75 bp, synthetic construct
  source 1..75: mol_type = other DNA
caggttcgccgcctggaggaacaaaatacgatattaaaaaaggctactgtagattcaatctgtcaatgcaaaccg

SEQ ID NO: 336117 - DNA, 75 bp, synthetic construct
  source 1..75: mol_type = other DNA
aatcgaccaggttgttgaaggcaaaaccgtcctctggatgcgatttatcccattgtttatcttgactgtattgta

SEQ ID NO: 336118 - DNA, 75 bp, synthetic construct
  source 1..75: mol_type = other DNA
tatagccgataaaggctccgtgttttaccatttcagcgccacctctttcgactctgtcgatggcacacgccatta

SEQ ID NO: 336119 - DNA, 75 bp, synthetic construct
  source 1..75: mol_type = other DNA
ataacacgtcagtcatgttaatggttgatgttaagccatcatcatcatctacgtggtcgctggttaaaaacatta

SEQ ID NO: 336120 - DNA, 75 bp, synthetic construct
  source 1..75: mol_type = other DNA
tgtcaacgcaaaggtaactcacgatacgccaataatcaggactgtttcagatccaaacgttaaccgcgtaaggct

SEQ ID NO: 336121 - DNA, 75 bp, synthetic construct
  source 1..75: mol_type = other DNA
aatgttggttctgaaactgttcaatgtcgcgctacatgggaaacacagacgacaacgcatcgcctgacctttgaa

SEQ ID NO: 336122 - DNA, 75 bp, synthetic construct
  source 1..75: mol_type = other DNA
aaacaccgactttaattaatgataatctataccataaacaattttatcgtgtactggatattatttcggaaggtc

SEQ ID NO: 336123 - DNA, 75 bp, synthetic construct
  source 1..75: mol_type = other DNA
gcgagtttactcgttcaagtatcgcccgcgcagaatgctacaacgcagtgatcgtatcatggactgacccggaaa

SEQ ID NO: 336124 - DNA, 75 bp, synthetic construct
  source 1..75: mol_type = other DNA
aaaaagttggcagcgaactggcgcaagcaaaagcaagcctgcaaaacgcgtcacttgctcttattaataactcac

SEQ ID NO: 336125 - DNA, 75 bp, synthetic construct
  source 1..75: mol_type = other DNA
aacgccgatgatattggacagcatgagtcgagaatcgactcgctggaggtgtctagcgaaaaagttggcagcgaa

SEQ ID NO: 336126 - DNA, 75 bp, synthetic construct
  source 1..75: mol_type = other DNA
aatggtcacaggctatggcaacggcagacgaggcattgtcaaccagaatcgaccagttgaaagtaactattaacg

SEQ ID NO: 336127 - DNA, 75 bp, synthetic construct
  source 1..75: mol_type = other DNA
tgcctcttttcgccaggcactgttagatatcagtggtgaaaacgcagattacacagcgggctgtcatgagttaag

SEQ ID NO: 336128 - DNA, 75 bp, synthetic construct
  source 1..75: mol_type = other DNA
ggcactaacgttcaatcgcagtgtattttcctcgttgaccgcttcgtgttgatgaccgcagcaaacggcacatac

SEQ ID NO: 336129 - DNA, 75 bp, synthetic construct
  source 1..75: mol_type = other DNA
aaactatggcgcggtaagtggcgaaggtgcaatgaaattaactaataccactatctcggtaaaagacggcaacgg

SEQ ID NO: 336130 - DNA, 75 bp, synthetic construct
  source 1..75: mol_type = other DNA
ataatacatccgttatgttggtggttgatgttaaaccgtcatcatcttctacgtggtcgccggttaaaggtatac

SEQ ID NO: 336131 - DNA, 75 bp, synthetic construct
  source 1..75: mol_type = other DNA
gcatgtattacggcgatagtctggggagtactggcatttggaactctgaaatctaagtacttgtcctataaattc

SEQ ID NO: 336132 - DNA, 75 bp, synthetic construct
  source 1..75: mol_type = other DNA
aatagtgtaaaaccgcgtgctagtgaaataggaagcttagtaggtaaactactagaagacgtaatgctggggttc

SEQ ID NO: 336133 - DNA, 75 bp, synthetic construct
  source 1..75: mol_type = other DNA
cttcattaatctcactggctgtgcctgccgcgcaggctatcaccacgcctgaaatcgccgcctctgcgctgtcgc

SEQ ID NO: 336134 - DNA, 75 bp, synthetic construct
  source 1..75: mol_type = other DNA
gattatgccattgctacggggcgcgctactattaacccagcatcaactctcagcggtgtactgcttcatcctgaa

SEQ ID NO: 336135 - DNA, 75 bp, synthetic construct
  source 1..75: mol_type = other DNA
cgctagggaatcgtcctgtggcagatatacgccctttggaaatattgaatgcactgagggttattgaaaggaatg

SEQ ID NO: 336136 - DNA, 75 bp, synthetic construct
  source 1..75: mol_type = other DNA
aagtgctgcccgatcatcaagcgatgaatccagagcacataaacttggatttaaagacggcaaagagttttctgt

SEQ ID NO: 336137 - DNA, 75 bp, synthetic construct
  source 1..75: mol_type = other DNA
gtgcagatgtggtattgggcggaaaagtatatcgttcctcgggcattatgcttggcaaggtgcttgccagcgggc

SEQ ID NO: 336138 - DNA, 75 bp, synthetic construct
  source 1..75: mol_type = other DNA
aaatcaggaggctgacgtatacccgtctcgatgaggaactggagaaaatcgcccattacccggacagcctccggc

SEQ ID NO: 336139 - DNA, 75 bp, synthetic construct
  source 1..75: mol_type = other DNA
atgacattagcagcaatcaccatgaccgccccggaagccgccagcccggtgcagatgtaccgcgcgacctactca

SEQ ID NO: 336140 - DNA, 75 bp, synthetic construct
  source 1..75: mol_type = other DNA
agcatttaggtcagatcatagtgattgatcccgcgcttcttgggcagggtatagaggttggcccggtcgtagtgt

SEQ ID NO: 336141 - DNA, 75 bp, synthetic construct
  source 1..75: mol_type = other DNA
cttatttcgctcattttctcttacccgtttcacctctgccatttcgtttctttctctacacgctgatgcaagctc

SEQ ID NO: 336142 - DNA, 75 bp, synthetic construct
  source 1..75: mol_type = other DNA
gtaccgcagcaagttgaacggctggcaaacacgcgagcgcgagctgttgccccgggtaatgaccttaggagttat

SEQ ID NO: 336143 - DNA, 75 bp, synthetic construct
  source 1..75: mol_type = other DNA
ttcttactgctgttcgcaccggagaactgcggctggcgacctgggatgaaataaatttcacggaggccctgtggg

SEQ ID NO: 336144 - DNA, 75 bp, synthetic construct
  source 1..75: mol_type = other DNA
ggcgtagctatgcgatgttcctgctggatgtgatgccggaaagaacggcagaacattaccgtaataaaattgctg

SEQ ID NO: 336145 - DNA, 75 bp, synthetic construct
  source 1..75: mol_type = other DNA
gtagcctgctacacgcgcccgatatgtatatgaaaaaactggttgttaatcggctggcggcgggcgcgattgatc

SEQ ID NO: 336146 - DNA, 75 bp, synthetic construct
  source 1..75: mol_type = other DNA
ctgggcgtgaaagtattcgccctgccggatggcgatgttgctgccagtgtgctgacttgctggcaggataatcct

SEQ ID NO: 336147 - DNA, 75 bp, synthetic construct
  source 1..75: mol_type = other DNA
tcagtccaaataaacctcgttattatgaacgttatctgcagcgcatgagaaagaggagagaagaatggggaattt

SEQ ID NO: 336148 - DNA, 75 bp, synthetic construct
  source 1..75: mol_type = other DNA
tggcccgcaggagaaaacgtcatttcactgtactgttcattgactgggaggctcagtaccagtgcaccattgaac

SEQ ID NO: 336149 - DNA, 75 bp, synthetic construct
  source 1..75: mol_type = other DNA
ccgcgatatctggatatataacgccagaacctgtgccatctacaatcccctgtatgacctgatgtaccgtgccgg

SEQ ID NO: 336150 - DNA, 75 bp, synthetic construct
  source 1..75: mol_type = other DNA
tcagtttatgatccacaacagcaggcaatggtgatcacttcgctgtttccttatgatccacaactctgctttgaa

SEQ ID NO: 336151 - DNA, 75 bp, synthetic construct
  source 1..75: mol_type = other DNA
cgaaaagggggtgattgaacatgtcgtcgtcatcgaagggcagcttgaactgtgcgttgatggcgtgtggcatag

SEQ ID NO: 336152 - DNA, 75 bp, synthetic construct
  source 1..75: mol_type = other DNA
cccatatggctcgtcgatggacaactggttaccaggcagaccagcgtgcaagacttgaaaatcatgttttccctg

SEQ ID NO: 336153 - DNA, 75 bp, synthetic construct
  source 1..75: mol_type = other DNA
ttacgctggataaaccgcgcctgagtgccgcgattgaggaagcaacacagctgggcgtgaaggtttttgccctgc

SEQ ID NO: 336154 - DNA, 75 bp, synthetic construct
  source 1..75: mol_type = other DNA
gggccagaagtcgatatcgcggttgacccgattgaaggcacccggatggtggcgatggggcagagcaatgcgctg

SEQ ID NO: 336155 - DNA, 75 bp, synthetic construct
  source 1..75: mol_type = other DNA
agatcgtttcaaaatatgcaaatggtttccgcattgcttacggtaactatgggttctttatccgtaatgacggcg

SEQ ID NO: 336156 - DNA, 75 bp, synthetic construct
  source 1..75: mol_type = other DNA
atgaaaaaaatacttatgatcagtattcttttcctcacagcctgttcctctccacctgaaccgccacaggttgaa

SEQ ID NO: 336157 - DNA, 75 bp, synthetic construct
  source 1..75: mol_type = other DNA
tcggggaaacctgcggtaaaaaccgggtgggccgtattatgcaactgaaccggattaaagccgtgcgcggctata

SEQ ID NO: 336158 - DNA, 75 bp, synthetic construct
  source 1..75: mol_type = other DNA
actttcgtacatttttgatgttgtttctggtatcgttagttcttattagtgcaaaaataaagtcgaatggcctgt

SEQ ID NO: 336159 - DNA, 75 bp, synthetic construct
  source 1..75: mol_type = other DNA
actttcttacatttttgatgctatttctggtatcgttagttcttattagtgcaaaaataaagtcgaatggcctgt

SEQ ID NO: 336160 - DNA, 75 bp, synthetic construct
  source 1..75: mol_type = other DNA
agcggttgaattagcagggactgtaattgaagtttttaacctgcccgatggtgattatacaattcgcttaaccac

SEQ ID NO: 336161 - DNA, 75 bp, synthetic construct
  source 1..75: mol_type = other DNA
gtgcagcggcagttcaccgttgtccgggccaaccaggtctgggtcactgatattacttatatccgcacctggcag

SEQ ID NO: 336162 - DNA, 75 bp, synthetic construct
  source 1..75: mol_type = other DNA
tctactcgcagcgaccgactggccctgaaagatagctggtatcgtctggaggaacactctgcgcagagaacgcct

SEQ ID NO: 336163 - DNA, 75 bp, synthetic construct
  source 1..75: mol_type = other DNA
ccccggaagccgccagccctgtgcagatgtaccgcgcgacctactcaccggatgataacaaactgcgcctgtatg

SEQ ID NO: 336164 - DNA, 75 bp, synthetic construct
  source 1..75: mol_type = other DNA
acattagcagcaatcaccatgaccgccccggaagccgccagccctgtgcagatgtaccgcgcgacctactcaccg

SEQ ID NO: 336165 - DNA, 75 bp, synthetic construct
  source 1..75: mol_type = other DNA
actttcatacatttttgatgctttttctggtatcgttagttcttattagtgcaaaaataaagtcgaatggcctgt

SEQ ID NO: 336166 - DNA, 75 bp, synthetic construct
  source 1..75: mol_type = other DNA
tatgatatacaggaagaattacccttttcatggggatggattcccgtttcaatctggaaagatgttttccaaaaa

SEQ ID NO: 336167 - DNA, 75 bp, synthetic construct
  source 1..75: mol_type = other DNA
aaaagccactcaggctgaccctaatgaagggggagaaagcttttctcgtcgtattgaaaaattgcccagccgtga

SEQ ID NO: 336168 - DNA, 75 bp, synthetic construct
  source 1..75: mol_type = other DNA
ccggatgataacaaacttcgcctgtatgccgcgtcacgcctcgacccggagacgtataaaaaagtgcatgatgcc

SEQ ID NO: 336169 - DNA, 75 bp, synthetic construct
  source 1..75: mol_type = other DNA
gaagtggaaggtacgatggggcagtacagtaacccggaagggggaatgtatctggtcgagtcaccggacgacgtg

SEQ ID NO: 336170 - DNA, 75 bp, synthetic construct
  source 1..75: mol_type = other DNA
gaagtggaagggacgatggggcagtacagcaacccggaagggggaatgtatctggttgaatcgccagacgatgtg

SEQ ID NO: 336171 - DNA, 75 bp, synthetic construct
  source 1..75: mol_type = other DNA
gatgttatcgacgcgctgcgtaaacgcttcccgaaaattgtcgggccgcgcaaagatgacatttgttacgccact

SEQ ID NO: 336172 - DNA, 75 bp, synthetic construct
  source 1..75: mol_type = other DNA
ttattgaatatcagccactaaaaagatggttgaataatgactatgttgaaatttatctgtcaagaataaatgttc

SEQ ID NO: 336173 - DNA, 75 bp, synthetic construct
  source 1..75: mol_type = other DNA
ctaagaaaaaatggtgcaacaggtgttattgaatatcagccactaaaaagatggttgaatagtgactatgttgaa

SEQ ID NO: 336174 - DNA, 75 bp, synthetic construct
  source 1..75: mol_type = other DNA
tgtcatgaacggcagattcagcgtcaacaacgctgggttaaccactatcagaaccgcctgatctatgagcgtgcc

SEQ ID NO: 336175 - DNA, 75 bp, synthetic construct
  source 1..75: mol_type = other DNA
gcaaacctgccagtggtcgagccgtattatctcaggaacaggacggcattaaatcgcacacccacagcgccagcg

SEQ ID NO: 336176 - DNA, 75 bp, synthetic construct
  source 1..75: mol_type = other DNA
ggtttgggagaagcggcaaaacgaaatgtggggacaggggaaaatcagataccggacatggcctcttttgccagt

SEQ ID NO: 336177 - DNA, 75 bp, synthetic construct
  source 1..75: mol_type = other DNA
ggataccccgcagttctattcagctaccttaaggataaaggaattattgacaaagaattatttgagagccgtcag

SEQ ID NO: 336178 - DNA, 75 bp, synthetic construct
  source 1..75: mol_type = other DNA
aaaagggtctggagtacattcctaacatcgatcgtatgatccgtgagaaagaatgtcgggagctaaccactcttg

SEQ ID NO: 336179 - DNA, 75 bp, synthetic construct
  source 1..75: mol_type = other DNA
ggtttgggagaagcggcaaaacggaatgtaggaacaggggaaaatcagataccggacatgacctcttttgccagt

SEQ ID NO: 336180 - DNA, 75 bp, synthetic construct
  source 1..75: mol_type = other DNA
aattctgcttacagaacgtcatcaaccagcgacacggtatcgatgaattacagttggtgggctgttggtgagtaa

SEQ ID NO: 336181 - DNA, 75 bp, synthetic construct
  source 1..75: mol_type = other DNA
ccgttaactcaaatagagatgaactaattgatacaactcaggcaaggccaattcagtattgcattaatgggactt

SEQ ID NO: 336182 - DNA, 75 bp, synthetic construct
  source 1..75: mol_type = other DNA
acaccgtttcgccgcaggatgtgatgaacaaactgggcgcggatattctgcgtctgtgggtggcatcaactgact

SEQ ID NO: 336183 - DNA, 75 bp, synthetic construct
  source 1..75: mol_type = other DNA
tcaaaactgaagccaatatcatccgcgcgctgggcaaaatcatcggcaacggtcacctgcacaaaggcgcgaagc

SEQ ID NO: 336184 - DNA, 75 bp, synthetic construct
  source 1..75: mol_type = other DNA
tactcagactcagccggaagaggcgcaacagttcagcggtcagcctcagccggaatcacagccggaaccgaaaaa

SEQ ID NO: 336185 - DNA, 75 bp, synthetic construct
  source 1..75: mol_type = other DNA
caataaaagagatcaaagaaaaaacagagatagaattcctttcctgtttaatagaaagtaaagaaggtcgtaaag

SEQ ID NO: 336186 - DNA, 75 bp, synthetic construct
  source 1..75: mol_type = other DNA
tgttgactacttcattagtagctggggctgctgagaaaaaaatctatccgcaaaatacccagcgtgtattgccgg

SEQ ID NO: 336187 - DNA, 75 bp, synthetic construct
  source 1..75: mol_type = other DNA
ggcactggtggcgataatgattttcccggtggtgctggtggtaatggtgatataccagcgttacagcacgccgat

SEQ ID NO: 336188 - DNA, 75 bp, synthetic construct
  source 1..75: mol_type = other DNA
gcggatatcaacgacggctttaacgaaatcatcaatggcatgagcgttatccagcagtttcgtcagcaggcgcga

SEQ ID NO: 336189 - DNA, 75 bp, synthetic construct
  source 1..75: mol_type = other DNA
cgagatcctgaaacgcgctgccgacagctatcgtcgtatccgtaatactgcacgcttcctgctggcaaacctgaa

SEQ ID NO: 336190 - DNA, 75 bp, synthetic construct
  source 1..75: mol_type = other DNA
catatactaaagcggaatgtaattcacgatttattacaggtgtccgtttaggaggactgtcatctgttcaaacat

SEQ ID NO: 336191 - DNA, 75 bp, synthetic construct
  source 1..75: mol_type = other DNA
agcaactgctggcactggcgcgcgtgctggtggagacgccgcaaatcctgatccttgatgaggcaaccgccagca

SEQ ID NO: 336192 - DNA, 75 bp, synthetic construct
  source 1..75: mol_type = other DNA
accgctactcatcagctatttcatcgataatatggtggcgaaaaataatctgccgttgaaagtggttgccggtct

SEQ ID NO: 336193 - DNA, 75 bp, synthetic construct
  source 1..75: mol_type = other DNA
tggaagtggttatgcaccaggctggcgtcgttcttataacaccagaaacaaaccaacagcttctgatgtaggagc

SEQ ID NO: 336194 - DNA, 75 bp, synthetic construct
  source 1..75: mol_type = other DNA
tgaacagccgcctgcctggctgctagaagatgccaaaggtctatttaacgccaccgtgcgcgatgcctgggcacc

SEQ ID NO: 336195 - DNA, 75 bp, synthetic construct
  source 1..75: mol_type = other DNA
gagcagatgtgcctggagtcgtgggacgaagccttcagcaaaaccgaagagtaccgcggcggcaatgccaacatg

SEQ ID NO: 336196 - DNA, 75 bp, synthetic construct
  source 1..75: mol_type = other DNA
caggatatttatcacctgctgcattgcctggtgatcccgcgtatcccgttagcgccaggcctggctccggcagtt

SEQ ID NO: 336197 - DNA, 75 bp, synthetic construct
  source 1..75: mol_type = other DNA
aactggtgtatgcctatgcaatgtggatcagcccgtcattccatctgaaggtgatccgtactttcgacatggtaa

SEQ ID NO: 336198 - DNA, 75 bp, synthetic construct
  source 1..75: mol_type = other DNA
gtggatgcctccaaacagggctatcaacatttctttgctctgctgggtgctgccagcgccgtcactaccggtcat

SEQ ID NO: 336199 - DNA, 75 bp, synthetic construct
  source 1..75: mol_type = other DNA
tatcgtcgaagcgatgggtacggcttacgcgctctacaccgtcaccggcgatcgccagtatgaaacctggtatca

SEQ ID NO: 336200 - DNA, 75 bp, synthetic construct
  source 1..75: mol_type = other DNA
atggcagcacgtggcgttaacaaagtcattctggttggacatctgggacaggacccggaagtgcgttacatgccc

SEQ ID NO: 336201 - DNA, 75 bp, synthetic construct
  source 1..75: mol_type = other DNA
ttcctgaacttatgccgatctatgccattgatgcacctgctgatgcgccagatggttcaagccgcccgacactgt

SEQ ID NO: 336202 - DNA, 75 bp, synthetic construct
  source 1..75: mol_type = other DNA
gcatatcaccagatggtgaaactggggatcgtcgagcagcgcgaacgatacagccgtaccgcgattaacaacatc

SEQ ID NO: 336203 - DNA, 75 bp, synthetic construct
  source 1..75: mol_type = other DNA
tcaagtcgccctacgctgtcactgagtgcactgctgaagcagtatggtatccgcctgacggctaatcaggcatat

SEQ ID NO: 336204 - DNA, 75 bp, synthetic construct
  source 1..75: mol_type = other DNA
gcatatcaccagatggcgaagctggggatcgttgaacagcgcgaacgatacagccgtaccgcgattaacaacatc

SEQ ID NO: 336205 - DNA, 75 bp, synthetic construct
  source 1..75: mol_type = other DNA
agaacatcaccagtcctgcaaatccacgcgagacgcagccgcatttcttcgaatcccgattccctgagctgttaa

SEQ ID NO: 336206 - DNA, 75 bp, synthetic construct
  source 1..75: mol_type = other DNA
gggatctcgatgcgaaagagatcctcggcgatgaagctgatcagtacgtgaaagtgccggatactctcgacgtat

SEQ ID NO: 336207 - DNA, 75 bp, synthetic construct
  source 1..75: mol_type = other DNA
aatggccatactaaaattggccgcgataatgagatttatcagttcgcctccatcggtgaagttaaccaggatctg

SEQ ID NO: 336208 - DNA, 75 bp, synthetic construct
  source 1..75: mol_type = other DNA
attggtcctttttgtatcgttggaccccatgtcgaaattggtgagggtaccgtactgaaatctcacgttgtcgtg

SEQ ID NO: 336209 - DNA, 75 bp, synthetic construct
  source 1..75: mol_type = other DNA
ggatgtgatgccggaaagaacagcagaacattaccgtaataaaattgctgtctacctgcgctggtatcagacgag

SEQ ID NO: 336210 - DNA, 75 bp, synthetic construct
  source 1..75: mol_type = other DNA
atatgactggaaagcccgtgatatctggatatataactccagaacccgtgccatctacaaccccctgtatgacct

SEQ ID NO: 336211 - DNA, 75 bp, synthetic construct
  source 1..75: mol_type = other DNA
agagtggatatgctgggaacccggtgtggcgtgggttcgtcagccaccggaatacgccattacggatatggcata

SEQ ID NO: 336212 - DNA, 75 bp, synthetic construct
  source 1..75: mol_type = other DNA
gtagctatgcgatgttcctgctggatgtgatgccggaaagaacggcagaacattaccgtaataaaattgctgtct

SEQ ID NO: 336213 - DNA, 75 bp, synthetic construct
  source 1..75: mol_type = other DNA
ttcctaaagtgatcgaatactgcaaaaaaaacccgcagaaaaatttgtataccttcaaaaatcaagcatctaatg

SEQ ID NO: 336214 - DNA, 75 bp, synthetic construct
  source 1..75: mol_type = other DNA
tctgcgctggcagccaatgaatccgctaaagatatgacctgccaggaatttattgatctgaatccaaaagcaatg

SEQ ID NO: 336215 - DNA, 75 bp, synthetic construct
  source 1..75: mol_type = other DNA
ggtggatgctgcatgaagaaacagtatataaaggtggcgataccgttactttaaatgaaaccgatctcactcaaa

SEQ ID NO: 336216 - DNA, 75 bp, synthetic construct
  source 1..75: mol_type = other DNA
gccctaacaaaccccggcattatgaacgttacctgcaacgtatgaaagaaaggaggaaggaatgggggattctgt

SEQ ID NO: 336217 - DNA, 75 bp, synthetic construct
  source 1..75: mol_type = other DNA
gaccttttactgggtggcacttcccctgaccacggtaaacggtgtctcgcagtttcaaccggagtggatatgctg

SEQ ID NO: 336218 - DNA, 75 bp, synthetic construct
  source 1..75: mol_type = other DNA
aaccttttactgggtggcacttcccctgaccacggtaaacggtgtttctcagtttcagccggagtggatatgctg

SEQ ID NO: 336219 - DNA, 75 bp, synthetic construct
  source 1..75: mol_type = other DNA
atgtttgccgtcgcttccagacgtgtgctgccgggctttaccttaagcctcggcaccagtctgctgtttgtgtgc

SEQ ID NO: 336220 - DNA, 75 bp, synthetic construct
  source 1..75: mol_type = other DNA
gggagatgtatcgggatgtgacggagactttttactgggtggcactccccctgactacggtaaacggtgtctctc

SEQ ID NO: 336221 - DNA, 75 bp, synthetic construct
  source 1..75: mol_type = other DNA
tgactgggaggctcagtaccagtgcacaattgcacacattctgaagatgagggagatgtatcgggatgtgacgga

SEQ ID NO: 336222 - DNA, 75 bp, synthetic construct
  source 1..75: mol_type = other DNA
acgtttgaagaatttgttccggcattttcttcctggtttgccggtaaccggtgtggagtggcaatactgactggt

SEQ ID NO: 336223 - DNA, 75 bp, synthetic construct
  source 1..75: mol_type = other DNA
ccatcgacgtcgctttccaggcggtcgatcaggatgcgctgaaaacgaaatttggcgtaagcaatgttaacggcc

SEQ ID NO: 336224 - DNA, 75 bp, synthetic construct
  source 1..75: mol_type = other DNA
gatgccggtaccggtgccgttcacaccgcgccaggccacggtccggacgactatgtgatcggtcagaaatatggt

SEQ ID NO: 336225 - DNA, 75 bp, synthetic construct
  source 1..75: mol_type = other DNA
taacgggtgaagatgttctgtcagctgcaattcagcgcattgaatggctgtttgatacattttcttcggtgtgtt

SEQ ID NO: 336226 - DNA, 75 bp, synthetic construct
  source 1..75: mol_type = other DNA
aacatattcagaagatgcggaatatgtacggggatgtgacggagaccttttactgggtggcacttcccctgacca

SEQ ID NO: 336227 - DNA, 75 bp, synthetic construct
  source 1..75: mol_type = other DNA
gctcttttccgtgaacggtttttacggtgaatggctggcgaagtttgatatcaaagtcacctatacctggctggg

SEQ ID NO: 336228 - DNA, 75 bp, synthetic construct
  source 1..75: mol_type = other DNA
cagtcgccggtttaacgctggcctcgctcttttccgtaaacggtttttacggtgaatggctggcgaagtttgata

SEQ ID NO: 336229 - DNA, 75 bp, synthetic construct
  source 1..75: mol_type = other DNA
ccccttgattgaagcaaaagaatttaaatctgcacacactaatctccttagattagaccgaaagaaaaaatcact

SEQ ID NO: 336230 - DNA, 75 bp, synthetic construct
  source 1..75: mol_type = other DNA
gtaaacggtgtctctcagtttcagccggaatggatatgctgggaaccaggtgtggagtgggttcgtcagccacca

SEQ ID NO: 336231 - DNA, 75 bp, synthetic construct
  source 1..75: mol_type = other DNA
tttcttcctggtttgccagtaacaggtgtggagtggcagtgctgaccggtgtccgagcagatgaatccctaaacc

SEQ ID NO: 336232 - DNA, 75 bp, synthetic construct
  source 1..75: mol_type = other DNA
gattgttgattttctgaacggggacccggaccagccgctggtcatgggccggacgtaccatgaggacaaccgttc

SEQ ID NO: 336233 - DNA, 75 bp, synthetic construct
  source 1..75: mol_type = other DNA
atgacggaggagagttcgtgctgggtgagggtgtcacaggcgtgggcggggccggggttcggtaacctggcgata

SEQ ID NO: 336234 - DNA, 75 bp, synthetic construct
  source 1..75: mol_type = other DNA
tcactgggacaggtataacccggcaacggaggcgagttcgtgctgggtgagggtgtcacaggcgtgggcggggcc

SEQ ID NO: 336235 - DNA, 75 bp, synthetic construct
  source 1..75: mol_type = other DNA
gcagccaggggagaggaaccacgctgggcaatcagttagaggtgataccggcggaccggacgtggcgtccacggc

SEQ ID NO: 336236 - DNA, 75 bp, synthetic construct
  source 1..75: mol_type = other DNA
gcatcttccagcagcaggatatccggacgatatcggccacgttactgaacgagaacggcgtcacggagtggacgc

SEQ ID NO: 336237 - DNA, 75 bp, synthetic construct
  source 1..75: mol_type = other DNA
gtgacgggaactgataccgaagaagtcgtcaaaaaacagagtattaaaataggtgataattacgaactgaaagtt

SEQ ID NO: 336238 - DNA, 75 bp, synthetic construct
  source 1..75: mol_type = other DNA
ccttacaggccggttatggcgtagggcgtggtgaagcgtttagttatatttattcgaaggattgtaaccgcgacg

SEQ ID NO: 336239 - DNA, 75 bp, synthetic construct
  source 1..75: mol_type = other DNA
aaaaaaattgattttgataaagaattcaacaaagaaaaagagaggcttatgaaaatttactatccaaatggtcaa

SEQ ID NO: 336240 - DNA, 75 bp, synthetic construct
  source 1..75: mol_type = other DNA
gagatgctgctggagaagaacgcaacgctgactatctggcagggtgtcatcccgctgcgttatgtcacaggcgtg

SEQ ID NO: 336241 - DNA, 75 bp, synthetic construct
  source 1..75: mol_type = other DNA
gccgttatattccggtagaaggccatgcgccgtggctggtttctggcaatgcaaatgaactggaacgtattcact

SEQ ID NO: 336242 - DNA, 75 bp, synthetic construct
  source 1..75: mol_type = other DNA
ggttatggtgtagggcgtggtgaagcgttcagctatatttactcgaaagattgtaaccgcgacgtagagatttaa

SEQ ID NO: 336243 - DNA, 75 bp, synthetic construct
  source 1..75: mol_type = other DNA
ggttatggcgtagggcgtggtgaagcgttcagctatatttactcgaaagattgcaaccgcgacgtagagatttaa

SEQ ID NO: 336244 - DNA, 75 bp, synthetic construct
  source 1..75: mol_type = other DNA
cgcacaatcacatggctggtccacggcggcagctgcatcatgcgtcgttcagccagtgcctgttcggcaaaggcg

SEQ ID NO: 336245 - DNA, 75 bp, synthetic construct
  source 1..75: mol_type = other DNA
attatccgccagaaaaaagaacatttgctttggcattatggtcaatgaccgtaattatcgctccgatatgtgggc

SEQ ID NO: 336246 - DNA, 75 bp, synthetic construct
  source 1..75: mol_type = other DNA
aggcttgccagataataaatttgccaatgcctcgagtatgagtaattttttcgtaccttgtcaggatcagttggt

SEQ ID NO: 336247 - DNA, 75 bp, synthetic construct
  source 1..75: mol_type = other DNA
actgtttatttaattggtttttggttttcagttttccaaacaacttgctgcaatacttctctctacctttgccgg

SEQ ID NO: 336248 - DNA, 75 bp, synthetic construct
  source 1..75: mol_type = other DNA
ccgtatggcggctattgcttttatcttacttacagttttagtttggttcgcgagaccgccgtttacagcgaaagg

SEQ ID NO: 336249 - DNA, 75 bp, synthetic construct
  source 1..75: mol_type = other DNA
atatttttaatcaatgtccctatggggattatcgtcctgacattatgcttaaccttacttaaaggaagagaaact

SEQ ID NO: 336250 - DNA, 75 bp, synthetic construct
  source 1..75: mol_type = other DNA
gtgggccgatattgggcggttatatttgcgataactttagctggggttggatatttttaatcaatgtccctatgg

SEQ ID NO: 336251 - DNA, 75 bp, synthetic construct
  source 1..75: mol_type = other DNA
tgcggcgaaggttctcaaacaggtgatggtgaataccggagggaacaaaaggcaggtccccgcaaaacgtcaaaa

SEQ ID NO: 336252 - DNA, 75 bp, synthetic construct
  source 1..75: mol_type = other DNA
ttatcacctgcgtattgagccgccgttatggcggtgcgggctgcggcagaacttccgtatcttccagcagcagga

SEQ ID NO: 336253 - DNA, 75 bp, synthetic construct
  source 1..75: mol_type = other DNA
tttctctagaaccaatgatgcaaatgtagaaattaaactgttaactaatgattattatatatttgaggtgaattg

SEQ ID NO: 336254 - DNA, 75 bp, synthetic construct
  source 1..75: mol_type = other DNA
gggtcaggaggcgcattattgttgcttcttctgttgtttctggcgcgccccagtaccagccagacggcaatggtt

SEQ ID NO: 336255 - DNA, 75 bp, synthetic construct
  source 1..75: mol_type = other DNA
tcgcacaagaaatcaggttcggaaataacctgctctggcatggcggggagaggatcaatggtcaggctttcggta

SEQ ID NO: 336256 - DNA, 75 bp, synthetic construct
  source 1..75: mol_type = other DNA
ataccgcgtgtgggtcaggaagtgatagtggactttctgaacggcgacccggaccagcccattgtgacggggcgg

SEQ ID NO: 336257 - DNA, 75 bp, synthetic construct
  source 1..75: mol_type = other DNA
cgggtacgggtgaagtttcactgggacaggtataacccggcaacggaggcgagttcgtgctgggttagggtatcg

SEQ ID NO: 336258 - DNA, 75 bp, synthetic construct
  source 1..75: mol_type = other DNA
aacccgcagttaactgttgcagtaccaaagcagtggcaagtattaatcccataaaattagccatcaaagatgcat

SEQ ID NO: 336259 - DNA, 75 bp, synthetic construct
  source 1..75: mol_type = other DNA
gtgataccggcggaccggacgtggcgtccacggctgcaaagcaaaccgaaggtggacgggccacagagcgccatt

SEQ ID NO: 336260 - DNA, 75 bp, synthetic construct
  source 1..75: mol_type = other DNA
tagcaaacatgaaattaaagtgaagttgctatttgcgaatgatgattttctctcaatggaaggacactatggacg

SEQ ID NO: 336261 - DNA, 75 bp, synthetic construct
  source 1..75: mol_type = other DNA
gatcagcgtgtcgaaacggtgtatatcccggaagacgaccgcgccacgctttgtgtctcctcgcaggtaggttgt

SEQ ID NO: 336262 - DNA, 75 bp, synthetic construct
  source 1..75: mol_type = other DNA
ccagccggtggtcatgggcaggacgtaccatgaggacaaccgttcaccaggggacctgccggggacgaagacgca

SEQ ID NO: 336263 - DNA, 75 bp, synthetic construct
  source 1..75: mol_type = other DNA
agaatatatgccgtatcaatatataaatgatgtgtctacgttgtcgtttattggtatagttttgttttatgtatt

SEQ ID NO: 336264 - DNA, 75 bp, synthetic construct
  source 1..75: mol_type = other DNA
ttaatgcggtaatgcaagacactaccgactctaccgccctgtacaaggccagtatcctgaatatccattccgtca

SEQ ID NO: 336265 - DNA, 75 bp, synthetic construct
  source 1..75: mol_type = other DNA
aagatgtgtatctaccttaacttaatgatttttaccaaaatcattaggggattcatcagtattaagcggcaactt

SEQ ID NO: 336266 - DNA, 75 bp, synthetic construct
  source 1..75: mol_type = other DNA
acatgccggtggcgattgtcggtatggcgggacgtttccccggtgcggcgaatattgcagcgttgtggacgctgg

SEQ ID NO: 336267 - DNA, 75 bp, synthetic construct
  source 1..75: mol_type = other DNA
cgagtcaaatgcgccatcaccacagcctgcagtacagacgaatacgcgcgcgaatcagatagcaaaacgtgcttt

SEQ ID NO: 336268 - DNA, 75 bp, synthetic construct
  source 1..75: mol_type = other DNA
cggaaattggcgtgccttacagccccgcgacacgtgaagtggaacgcgtgctctgccaaatcctggaagagtatc

SEQ ID NO: 336269 - DNA, 75 bp, synthetic construct
  source 1..75: mol_type = other DNA
gccactctgctgaccgcatcggacggacaggggatggatgtgatccttaactccctcacaggccgtctgcttgac

SEQ ID NO: 336270 - DNA, 75 bp, synthetic construct
  source 1..75: mol_type = other DNA
agatgaccgacatcaataaagtgttgcgcggcaaactgaaagaggtggcggaaatccgcgcaccggaagtggttg

SEQ ID NO: 336271 - DNA, 75 bp, synthetic construct
  source 1..75: mol_type = other DNA
cgggcagggttacggcagaacttccgtatcttccagcagcaggacattcagacgatatcagcgcagcttcttgaa

SEQ ID NO: 336272 - DNA, 75 bp, synthetic construct
  source 1..75: mol_type = other DNA
tgcacagcgttacgtcagcggtatcgtgacagaggtgcagctcggtgagaacaacgactggcagatgcgttattc

SEQ ID NO: 336273 - DNA, 75 bp, synthetic construct
  source 1..75: mol_type = other DNA
cgctgtcggtggacggtattgtggagatggcgacggcggtggtgagcttccgtctgtaccagcaccactgcacac

SEQ ID NO: 336274 - DNA, 75 bp, synthetic construct
  source 1..75: mol_type = other DNA
tgaagttccactgggaccgttatcacgggatgacggaggcgagttcatgctgggtgcgggtatcgcaggcgtggg

SEQ ID NO: 336275 - DNA, 75 bp, synthetic construct
  source 1..75: mol_type = other DNA
ttttttaagtgtatcaaaaacggtgccagcccttggtgttctagtatcagcactatatccaatacctgccggtga

SEQ ID NO: 336276 - DNA, 75 bp, synthetic construct
  source 1..75: mol_type = other DNA
acacacccgcaggttcggaacttgaaggtgttcgggtagcattgatggagtggaataaggaattttcccgttatg

SEQ ID NO: 336277 - DNA, 75 bp, synthetic construct
  source 1..75: mol_type = other DNA
gatacgccgtgtaagatcaacctgattccgtggaacccgttcccgggtgcgccgtatggtcgtagctcgaacagc

SEQ ID NO: 336278 - DNA, 75 bp, synthetic construct
  source 1..75: mol_type = other DNA
aagtacaatatcgaaacgttccttgctgcggtgcgccgctatctggagaaatctaacgccaatcagggccgagtc

SEQ ID NO: 336279 - DNA, 75 bp, synthetic construct
  source 1..75: mol_type = other DNA
tgcgccgttatctggagaaatccaacgccaatcagggccgagtcactattgaatacgtgatgcttgaccacgtta

SEQ ID NO: 336280 - DNA, 75 bp, synthetic construct
  source 1..75: mol_type = other DNA
gcagtacgagatatttgattatccgggaaggttcaaggacgagcagcacggcaaggatttcacgctgtaccagat

SEQ ID NO: 336281 - DNA, 75 bp, synthetic construct
  source 1..75: mol_type = other DNA
gacggtactatcattctcaatggtaaaagtatccagattgaaggaaaagataaaatcaatattttcggcgcagat

SEQ ID NO: 336282 - DNA, 75 bp, synthetic construct
  source 1..75: mol_type = other DNA
aagatctcttgctgttagcggcacggtagatgaatcaggtgagatggttgttgagcaggttttatctggggcaga

SEQ ID NO: 336283 - DNA, 75 bp, synthetic construct
  source 1..75: mol_type = other DNA
atttttcctctcaatttacaggcgggtggcctgtcaactgtaataaaaagagctgcaaaaaatatggatactttt

SEQ ID NO: 336284 - DNA, 75 bp, synthetic construct
  source 1..75: mol_type = other DNA
tctcaatctaccgataaaagttgcttatgaagagaataaaggtaactattctggacagaatggtaatggatggca

SEQ ID NO: 336285 - DNA, 75 bp, synthetic construct
  source 1..75: mol_type = other DNA
taccatacatgggtaaatacatacggatgcagggatgtcgggggaacttatgattttggggttgcatctgtcagt

SEQ ID NO: 336286 - DNA, 75 bp, synthetic construct
  source 1..75: mol_type = other DNA
ggcggcgggcgaagtacatctcacccgtgatgggcggctactaagcgttcagaacttcaccatgggcaatcatga

SEQ ID NO: 336287 - DNA, 75 bp, synthetic construct
  source 1..75: mol_type = other DNA
tttcagcagggaagatttacggcttttcctggggaaaccaggccagctccaccatcttcgacagcagccagtcag

SEQ ID NO: 336288 - DNA, 75 bp, synthetic construct
  source 1..75: mol_type = other DNA
attttgccggtcaccgatttgccggtggaatgctcgacacctggagcttgcagtccttagggccgatgaccgcca

SEQ ID NO: 336289 - DNA, 75 bp, synthetic construct
  source 1..75: mol_type = other DNA
agggcttatgattgggtcagaaatcatttgattcaaagtgaagggacactgccgggtctggaaatggtttcgaag

SEQ ID NO: 336290 - DNA, 75 bp, synthetic construct
  source 1..75: mol_type = other DNA
tgaattagagtccacactgcctcgttgggaggtggctcttgttgggtttaatacctatggtgctcagattagtat

SEQ ID NO: 336291 - DNA, 75 bp, synthetic construct
  source 1..75: mol_type = other DNA
ctatttgcaaactgaatggacagccaacagaagcagcccttgagtgggctttagctgaaacgcagggcgataaca

SEQ ID NO: 336292 - DNA, 75 bp, synthetic construct
  source 1..75: mol_type = other DNA
actggatacagtatccggaagcatggcagacaacccctgacggactaaaatatcgtataaccagcgaactggagg

SEQ ID NO: 336293 - DNA, 75 bp, synthetic construct
  source 1..75: mol_type = other DNA
acagatgttcctttatctgtgaattttaaaagcgactcgcctgttgccgggctctttgaaggatctgctgtactg

SEQ ID NO: 336294 - DNA, 75 bp, synthetic construct
  source 1..75: mol_type = other DNA
gcgccgcttatgtctcttgataccaacactcttccggatgaagctgagattggcaaagcctctcttcgccgccgt

SEQ ID NO: 336295 - DNA, 75 bp, synthetic construct
  source 1..75: mol_type = other DNA
gtgaaggagaaaaacaacaaggacagttcgaatggaaaattttcaaagaaagaggctgaaaccaatggcctacgt

SEQ ID NO: 336296 - DNA, 75 bp, synthetic construct
  source 1..75: mol_type = other DNA
atgtggtggccttttagtcgtaaaaaaagcgatctgcgtaacctgtccattgatgattttctggcgctgtccggc

SEQ ID NO: 336297 - DNA, 75 bp, synthetic construct
  source 1..75: mol_type = other DNA
tttaaacgcacaatgatgcgtcactgcctgctgaacggtaacgcctatgcggttattgagtgggggcgggacggt

SEQ ID NO: 336298 - DNA, 75 bp, synthetic construct
  source 1..75: mol_type = other DNA
tatcgcctatttttcttcaggaatacagcaacagcacctacagcaatttcagtgaggcaagccgcgcgtttctga

SEQ ID NO: 336299 - DNA, 75 bp, synthetic construct
  source 1..75: mol_type = other DNA
cccgtgagcgtgagggaatgccgccgcgtgaaggtggtgacgagttcagccaggcatggaagcaggaagtgacaa

SEQ ID NO: 336300 - DNA, 75 bp, synthetic construct
  source 1..75: mol_type = other DNA
gcaatgagaaggggaaggaggcccgcgagtggcttgattctcatccggtcgatcacatcctcaacgagcgcccga

SEQ ID NO: 336301 - DNA, 75 bp, synthetic construct
  source 1..75: mol_type = other DNA
ccgtcacgatttgccgtgaggcgctggggcttggccttgctcaacagcgtcacggagccagcattatgaaagatg

SEQ ID NO: 336302 - DNA, 75 bp, synthetic construct
  source 1..75: mol_type = other DNA
caggaatacagcaacagcacctacagcaattttagtgaggcgagccgcgcctttcttaccatgacaatgcgcccg

SEQ ID NO: 336303 - DNA, 75 bp, synthetic construct
  source 1..75: mol_type = other DNA
tggacaccgaccgccaaaatgcatgcggaataccgtgcagcaggcgaaccgcttccggctgttgttccggctggt

SEQ ID NO: 336304 - DNA, 75 bp, synthetic construct
  source 1..75: mol_type = other DNA
gttgtgtgcgtctgcgtaacgaagacatcaaattcctgttcgagaaagtgcctgtcggtactcgcgtgcagttta

SEQ ID NO: 336305 - DNA, 75 bp, synthetic construct
  source 1..75: mol_type = other DNA
ccgaatgctcaaatcattttcgcaacgcactctccagatattgttggcataaatcaagatgccattattgatatg

SEQ ID NO: 336306 - DNA, 75 bp, synthetic construct
  source 1..75: mol_type = other DNA
gtggagtttgacagcgcggacctgttacgggccacacctggcgaacgctttgccacctatgagcgcggcatcaaa

SEQ ID NO: 336307 - DNA, 75 bp, synthetic construct
  source 1..75: mol_type = other DNA
gcagcttggcatgagcaatcaggatgccgaatggctggcgtcgcgccggttctccattgaagacattgcccgcat

SEQ ID NO: 336308 - DNA, 75 bp, synthetic construct
  source 1..75: mol_type = other DNA
ttgagaaacaggcttttcacgatctgataatatctctaagagaaaaaagtgaaatatacgattcgataccattct

SEQ ID NO: 336309 - DNA, 75 bp, synthetic construct
  source 1..75: mol_type = other DNA
gtgcgtgatatccgtggttttgccaccaagttctatactgaagagggtatttttgacctcgttggcaataacacg

SEQ ID NO: 336310 - DNA, 75 bp, synthetic construct
  source 1..75: mol_type = other DNA
caccatggaaggcttcggtattcacaccttccgcctgattaatgccgaagggaaggcaacgttcgtacgtttcca

SEQ ID NO: 336311 - DNA, 75 bp, synthetic construct
  source 1..75: mol_type = other DNA
tttccagcgtgacggcatgcatcgtatggggatcgacactaacccggcgaattacgaaccgaactcgatcaacga

SEQ ID NO: 336312 - DNA, 75 bp, synthetic construct
  source 1..75: mol_type = other DNA
gaaattgctgacgcatatattagtttgaaaaaactgaatatcaaaacgaaatatttttatggttctcgtcgagca

SEQ ID NO: 336313 - DNA, 75 bp, synthetic construct
  source 1..75: mol_type = other DNA
gatcagaaaaatgtagactatattaaatcgttaggttttaatgcatgtcattttaaatcaaaagaaggtgctcaa

SEQ ID NO: 336314 - DNA, 75 bp, synthetic construct
  source 1..75: mol_type = other DNA
atcgtggtatcccgcgcagctaccgcactatggaaggctttggtattcataccttccgtctgattaacgccgaag

SEQ ID NO: 336315 - DNA, 75 bp, synthetic construct
  source 1..75: mol_type = other DNA
tttcggcaatctggcgataccgcgggtgggccaggaggtgattgttgatttcctgaacggagacccggaccagcc

SEQ ID NO: 336316 - DNA, 75 bp, synthetic construct
  source 1..75: mol_type = other DNA
ttgccagcgactcttttatgcagacggcggagatgctgctggagaagaaggcgacgctgaccatctggcagggcg

SEQ ID NO: 336317 - DNA, 75 bp, synthetic construct
  source 1..75: mol_type = other DNA
ataacgccagttttgaagaatggcatgaactgttaatggactatgcagagttacgcggtggaagtgccgccgatg

SEQ ID NO: 336318 - DNA, 75 bp, synthetic construct
  source 1..75: mol_type = other DNA
ggccgggtacgggtgaagtttcactgggacaggtataacccggcaacggaggcgagttcgtgctgggtgagggtg

SEQ ID NO: 336319 - DNA, 75 bp, synthetic construct
  source 1..75: mol_type = other DNA
taccagatggagagcctgcgcagtgatgcggaaaaggccacagggcagagtaattcgccgaagctgtggccggga

SEQ ID NO: 336320 - DNA, 75 bp, synthetic construct
  source 1..75: mol_type = other DNA
ggagcctgccggggacgaagacgcagatgacgatacggtcgaagacctataaaggaagcgggtttaacgagctgc

SEQ ID NO: 336321 - DNA, 75 bp, synthetic construct
  source 1..75: mol_type = other DNA
aagttcagatgaaaatttccctgatatatttcatcatgattatgtaacaattcgaatgcaggcagagtcgaattg

SEQ ID NO: 336322 - DNA, 75 bp, synthetic construct
  source 1..75: mol_type = other DNA
atgtctcagaactggatgcggcactttgagctgcagcttattgacgacaagggtgatggtgtttcgctgtcggat

SEQ ID NO: 336323 - DNA, 75 bp, synthetic construct
  source 1..75: mol_type = other DNA
cactagaattatcacgcagtttaatgcgttcacaaatcgaggttctgcgggaggcagctgaagacctttgcacaa

SEQ ID NO: 336324 - DNA, 75 bp, synthetic construct
  source 1..75: mol_type = other DNA
agagctctaacacgagagactattggtgattatttatgtggtatatttgatgacaaactttatagctctttgatt

SEQ ID NO: 336325 - DNA, 75 bp, synthetic construct
  source 1..75: mol_type = other DNA
cctggaagaaataaacgagcctggtggtttaggtggttttcttgttgcgctacgtcaggtaatcgaggcgcgagg

SEQ ID NO: 336326 - DNA, 75 bp, synthetic construct
  source 1..75: mol_type = other DNA
catgcatcaggaaaacacaatgccttccacgccggatatcggtttcttttttcacagaccaaagtatcatttgac

SEQ ID NO: 336327 - DNA, 75 bp, synthetic construct
  source 1..75: mol_type = other DNA
taacggtgatattcgctttaccgttaccggaaaagataacgtcaccgatagttgggtgctcatccagtgtattga

SEQ ID NO: 336328 - DNA, 75 bp, synthetic construct
  source 1..75: mol_type = other DNA
tgttcctgtctgaccaggcagaggcgcagccgcaggcttctgctcctgcccgaatgttgtcgccagctgaggcgc

SEQ ID NO: 336329 - DNA, 75 bp, synthetic construct
  source 1..75: mol_type = other DNA
tcggtgacaactatcgcgggcagtatttcaccccgtattcggttcagtgtctgatggcgcggatgctgatgccgg

SEQ ID NO: 336330 - DNA, 75 bp, synthetic construct
  source 1..75: mol_type = other DNA
ttttaccccgtattcggttcagtgcctgatggcccggatgctgatgccgggcgtcagagacactatccgccggga

SEQ ID NO: 336331 - DNA, 75 bp, synthetic construct
  source 1..75: mol_type = other DNA
gagaattacttgaattctatcatgctgcatatatcgaactgggacggaaaatccgtaaatactcaaaatatgagg

SEQ ID NO: 336332 - DNA, 75 bp, synthetic construct
  source 1..75: mol_type = other DNA
cattggatatttcacgtactttattgcgctcacaaatcgatgttcttcgagaagaggctgaagaactgatcacca

SEQ ID NO: 336333 - DNA, 75 bp, synthetic construct
  source 1..75: mol_type = other DNA
gtacacgccagtgtattacctcaatgaatgggaagcgcgcctgaaactgcgccgccaggtggacgcgatgaaaga

SEQ ID NO: 336334 - DNA, 75 bp, synthetic construct
  source 1..75: mol_type = other DNA
tgatgaatggattgttgacggcggttatacccatgagacagcattaaaagcagcacgggaattattaagccagtc

SEQ ID NO: 336335 - DNA, 75 bp, synthetic construct
  source 1..75: mol_type = other DNA
cggtagtggcgctggcgaaagttggcggcggcgttgatagcctgagcacccccatcggtaaagttgctggcgtgt

SEQ ID NO: 336336 - DNA, 75 bp, synthetic construct
  source 1..75: mol_type = other DNA
ggcgcaatggtgtttggtatcgttattgttaacgcggcgcgttctcgtggcgttaccgaagcgcgtctgctgacc

SEQ ID NO: 336337 - DNA, 75 bp, synthetic construct
  source 1..75: mol_type = other DNA
ctggcccgcgcgctgacctcttcgggctttgatgccattatggtgatttctacccgttcgaccaaaactacggcg

SEQ ID NO: 336338 - DNA, 75 bp, synthetic construct
  source 1..75: mol_type = other DNA
tacatgccatcaccgccaaagcggaagaagaaggtttcgacgtgatattacaaacgtcgcacaatccggcagaag

SEQ ID NO: 336339 - DNA, 75 bp, synthetic construct
  source 1..75: mol_type = other DNA
cgggtaaatggttataagcagagtctggaagatcataatattgcagtgcgtgatgaatggattgttgatggcggt

SEQ ID NO: 336340 - DNA, 75 bp, synthetic construct
  source 1..75: mol_type = other DNA
ccggtaacaatcttcttgatatcctggggtatgtattaaataaaggggttttacagctttcacgccgagggcttg

SEQ ID NO: 336341 - DNA, 75 bp, synthetic construct
  source 1..75: mol_type = other DNA
atgtggttacttgaccagtgggcagagcgccatatagcagaagcgcaagcgaaaggtgagtttgataacctacct

SEQ ID NO: 336342 - DNA, 75 bp, synthetic construct
  source 1..75: mol_type = other DNA
atccgtcacgatgatccgcaatatcaagaggttagtcgtcgattgtcattactggaattgaagctgcgacaagct

SEQ ID NO: 336343 - DNA, 75 bp, synthetic construct
  source 1..75: mol_type = other DNA
atttgcgttgttcgtcggcgcaggtaacattattttccctccaatggtcggcttgcaggcaggcgaacacgtctg

SEQ ID NO: 336344 - DNA, 75 bp, synthetic construct
  source 1..75: mol_type = other DNA
gccctaaaacaaagttagatgctttgctgtgcgcacaaatttcggccagcaacaagactgttttttttcttaaat

SEQ ID NO: 336345 - DNA, 75 bp, synthetic construct
  source 1..75: mol_type = other DNA
tcttcatttaactccgcagcatttcagctatctgaatggcggaaagaacacgcgttattataaattcgttatcag

SEQ ID NO: 336346 - DNA, 75 bp, synthetic construct
  source 1..75: mol_type = other DNA
atacgatattccggtggtggtaattggcaaagttgaaggtcaatatgcccatgtttattctgtcgataccgataa

SEQ ID NO: 336347 - DNA, 75 bp, synthetic construct
  source 1..75: mol_type = other DNA
aacccggtggctaaatggatcctgattgccaacatgctgtttggtcgtctcgaggtctttacattgctggtgctc

SEQ ID NO: 336348 - DNA, 75 bp, synthetic construct
  source 1..75: mol_type = other DNA
tatcctcgaagccgtttggggattttttctccgcctatgcattggtgtttattgtcagtatgctggcgattatcg

SEQ ID NO: 336349 - DNA, 75 bp, synthetic construct
  source 1..75: mol_type = other DNA
tcgttggactactggtcatcttattttcagggaccatgattatccctgggctggtagcactcatctaccgggatg

SEQ ID NO: 336350 - DNA, 75 bp, synthetic construct
  source 1..75: mol_type = other DNA
ggattcaccggtgttattggtggcctgattagcatcgaaagtggattcagtatttacatgattctcgcgacagcg

SEQ ID NO: 336351 - DNA, 75 bp, synthetic construct
  source 1..75: mol_type = other DNA
cttctgccagctctcatcagttgccggaagacaatacagtgatacagagcgtgatgccattaaccactgaaacag

SEQ ID NO: 336352 - DNA, 75 bp, synthetic construct
  source 1..75: mol_type = other DNA
ttgtcagtatgctggcgattatcgccacgggcgtggatgacttttctgcctttgcctcggttgttgcgacattga

SEQ ID NO: 336353 - DNA, 75 bp, synthetic construct
  source 1..75: mol_type = other DNA
atgtttattccgtcgataccgataattatggcgacagtattgcgctgaccaatgcgttaattgaaagcgggcata

SEQ ID NO: 336354 - DNA, 75 bp, synthetic construct
  source 1..75: mol_type = other DNA
tgatgaatggattgttgatggcggttatacccatgaaactgcattaaaagcagcacggcaattattaagccagtc

SEQ ID NO: 336355 - DNA, 75 bp, synthetic construct
  source 1..75: mol_type = other DNA
atgtttattccgtcgataccgataattatggcgacagtattgcgctaaccgatgcgttaattgaaagcgggcata

SEQ ID NO: 336356 - DNA, 75 bp, synthetic construct
  source 1..75: mol_type = other DNA
tgcgtaagattggtctggagctgggtctgccgtacgacatgctgtaccgccacccgttcccggggcctggccttg

SEQ ID NO: 336357 - DNA, 75 bp, synthetic construct
  source 1..75: mol_type = other DNA
atctgccagtgtgaagccctgtggacaccggcgaaaattatcgacgacgcggtagcccgcatccgcgagcaggtg

SEQ ID NO: 336358 - DNA, 75 bp, synthetic construct
  source 1..75: mol_type = other DNA
gcaccgaaagctgcccgtttgccattatggctaacgaagaaaaacgcttctatggtgtgcagttccacccggaag

SEQ ID NO: 336359 - DNA, 75 bp, synthetic construct
  source 1..75: mol_type = other DNA
agactgatatcaccgatgggataaggctgtctgattggtattataaatgtaagaagtcatcagagagtaacgtaa

SEQ ID NO: 336360 - DNA, 75 bp, synthetic construct
  source 1..75: mol_type = other DNA
tgctggtctttgagccgctgtggacggtgatccccggcaacaaagcgattctgccgatcctctggtcgctgttcc

SEQ ID NO: 336361 - DNA, 75 bp, synthetic construct
  source 1..75: mol_type = other DNA
cctggcgggcggcatcaatgaggatttttaccttgcacagcttgctgccctgggcagaccagacgctaccatcac

SEQ ID NO: 336362 - DNA, 75 bp, synthetic construct
  source 1..75: mol_type = other DNA
gtagtccccgccagttaaccactaaacagaccggcgatgcgtgggaagcacaagcgcgtcgctggctggaaggca

SEQ ID NO: 336363 - DNA, 75 bp, synthetic construct
  source 1..75: mol_type = other DNA
ctattctgggctggatgatccagacggaagataccgaatacagcttgccacagccggaaattgcaggcgaactgc

SEQ ID NO: 336364 - DNA, 75 bp, synthetic construct
  source 1..75: mol_type = other DNA
ggcaccatatgattaccggccgaatggacttctgcatggatgagcgtggcctgaaagtctatgaatacaacgccg

SEQ ID NO: 336365 - DNA, 75 bp, synthetic construct
  source 1..75: mol_type = other DNA
ttttctcgctgcgcttcctgcgtgaagtggttaacgacaacatcctgccattgcaggcatttcctaacggctcgc

SEQ ID NO: 336366 - DNA, 75 bp, synthetic construct
  source 1..75: mol_type = other DNA
gcgcgggaaaacttcggctgtggctcctcgcgtgagcacgctccctgggcgctgaccgattacggatttaaggtg

SEQ ID NO: 336367 - DNA, 75 bp, synthetic construct
  source 1..75: mol_type = other DNA
atgctggcgcaagtccatttaccacctttaatggtcgttattatggtgatcacaccggcggaacagcggtacgtc

SEQ ID NO: 336368 - DNA, 75 bp, synthetic construct
  source 1..75: mol_type = other DNA
ttccgtggtcttcgataaccacctttgctaacttcgtccgtggcattggttcggtggtcgcaaattatgatgtcg

SEQ ID NO: 336369 - DNA, 75 bp, synthetic construct
  source 1..75: mol_type = other DNA
tcgccgctctgcgctttatggcggcgcggcagccagtgtgacccgcagcaaacaacacaaattattacagactgc

SEQ ID NO: 336370 - DNA, 75 bp, synthetic construct
  source 1..75: mol_type = other DNA
ctggacagcatcggtctgaccctgcagcacgacgacgccattgcggcttatgaagagaagcaaccggcgtttatg

SEQ ID NO: 336371 - DNA, 75 bp, synthetic construct
  source 1..75: mol_type = other DNA
tcttctacggcaatagctttaacaaccagctgctgccggtgaaattaagcgacgcagaagtggacgaactgtttg

SEQ ID NO: 336372 - DNA, 75 bp, synthetic construct
  source 1..75: mol_type = other DNA
agtaaccgaagaatggggctgttcacacacacggcttatttcgcgatgtgttctcttgacatgcccaccgcggcg

SEQ ID NO: 336373 - DNA, 75 bp, synthetic construct
  source 1..75: mol_type = other DNA
acgatttcagccgcgctgttctcgacgctgaagtccacatgtgtggcgaactacgcgacgatctgcggataacgg

SEQ ID NO: 336374 - DNA, 75 bp, synthetic construct
  source 1..75: mol_type = other DNA
caccagcgaaacggatttttgcatcgagctgggtaataagcgttggcaatttaaccgtcagtcaggctttctttc

SEQ ID NO: 336375 - DNA, 75 bp, synthetic construct
  source 1..75: mol_type = other DNA
cgcagagcgggtaaactggctcggcctggggccgcaagaaaactatcccgaccgccttactgcagcctgttttga

SEQ ID NO: 336376 - DNA, 75 bp, synthetic construct
  source 1..75: mol_type = other DNA
tgaaatattacgggatgatggattgtggtttttgcaaaaagcccagcgcggcgcaaaaccgctggaaaaaccact

SEQ ID NO: 336377 - DNA, 75 bp, synthetic construct
  source 1..75: mol_type = other DNA
agcgtgacgccactctccgcgccccattcctgcccgcaactgcttaccaacgaaacggacttttgcattgaactg

SEQ ID NO: 336378 - DNA, 75 bp, synthetic construct
  source 1..75: mol_type = other DNA
acgatttcagccgtgccgttctcgacgctgaagtccgcatgtgtggcgaactgcgcgacgatctgcgggtaacgg

SEQ ID NO: 336379 - DNA, 75 bp, synthetic construct
  source 1..75: mol_type = other DNA
ggcagcgaaattatcgatgagcgcggcagttataccgatcgcgtcacgctacgtctgagcgtcgaaaatccggcg

SEQ ID NO: 336380 - DNA, 75 bp, synthetic construct
  source 1..75: mol_type = other DNA
ggggattggtggcgacgactcctggagcccgtcagtgtcggcagaataccaactgagtgctggtcgctaccatta

SEQ ID NO: 336381 - DNA, 75 bp, synthetic construct
  source 1..75: mol_type = other DNA
tggtggcgacgactcctggagcccgtcagtttcgccggagtttttattgaacgcgggtcgttattattatcaggt

SEQ ID NO: 336382 - DNA, 75 bp, synthetic construct
  source 1..75: mol_type = other DNA
tggatggcaagccgctaacgagtggtgaagtgcctctggctgtcgcgccacaaggaaaacagttgattgaattgc

SEQ ID NO: 336383 - DNA, 75 bp, synthetic construct
  source 1..75: mol_type = other DNA
cgcctgacggatgatccgcgctggttaccggcgatgagcgagcgcgtaacgcggatggtacagcgcgatcgcaat

SEQ ID NO: 336384 - DNA, 75 bp, synthetic construct
  source 1..75: mol_type = other DNA
ttaaccgccagtcaggccttctttctcagatgtggattggcgatgaaaaacaacttctgacgccgctgcgcgacc

SEQ ID NO: 336385 - DNA, 75 bp, synthetic construct
  source 1..75: mol_type = other DNA
tcgtctggttgtcacccttagccggagttatggcgtccgtctcattcatctggttgccagcgccgaatttctgcc

SEQ ID NO: 336386 - DNA, 75 bp, synthetic construct
  source 1..75: mol_type = other DNA
tcgtctggttgtcactcttagccggggttatggcgtccgtctcattcatctggttgccagcgccgtatttctgcc

SEQ ID NO: 336387 - DNA, 75 bp, synthetic construct
  source 1..75: mol_type = other DNA
tcgtctggttgtcactcttagccggtgttatggcgtccgtctcattcatctggttgccagcgccggatttctgcc

SEQ ID NO: 336388 - DNA, 75 bp, synthetic construct
  source 1..75: mol_type = other DNA
caaaaacgttccgtcgtctggtcgtcacactcatccggcgttatggtgtcagtctcattcatctggatgccagtg

SEQ ID NO: 336389 - DNA, 75 bp, synthetic construct
  source 1..75: mol_type = other DNA
caccgttaacaacccttaccggcatacgttgcagtaccgcacatatcacggaaacggacaacgcctggctgtact

SEQ ID NO: 336390 - DNA, 75 bp, synthetic construct
  source 1..75: mol_type = other DNA
tcgtctggttgtcacgcttagccggcgttatggcgtccgtctcattcatctggttgccagcgccgcatttctgcc

SEQ ID NO: 336391 - DNA, 75 bp, synthetic construct
  source 1..75: mol_type = other DNA
cggtatacgctgcagcaccgcacatatcacggaaacagacaacgcctggctgtactcactgtcgcatcagaccag

SEQ ID NO: 336392 - DNA, 75 bp, synthetic construct
  source 1..75: mol_type = other DNA
taatgggcgatggtcgtaagtatgactgggttgtctctctgcgtactgtcgaaaccatcgactttatgaccgcac

SEQ ID NO: 336393 - DNA, 75 bp, synthetic construct
  source 1..75: mol_type = other DNA
ctgtcaaaaacgttccgtcgtctggtcgtcacactcatccggcgttatggtgtcagtcccattcatctggatgcc

SEQ ID NO: 336394 - DNA, 75 bp, synthetic construct
  source 1..75: mol_type = other DNA
gctgaactgattaacatggtctgtgataacggctactcccttcgtgttgttgatgaatctgaccggacctcagca

SEQ ID NO: 336395 - DNA, 75 bp, synthetic construct
  source 1..75: mol_type = other DNA
atgaaactttccctgacactggaagcagacagcgttaacgtgcgggcactgaacatggggcgcattgtcgttgac

SEQ ID NO: 336396 - DNA, 75 bp, synthetic construct
  source 1..75: mol_type = other DNA
tctgcggcttaaacgcctgggcctgtccagaacgttccgtcgtctggtcgtcactctcacccggcgttatggcgt

SEQ ID NO: 336397 - DNA, 75 bp, synthetic construct
  source 1..75: mol_type = other DNA
acggaaacggacaatgcctggctgtactcgctgtcgcatcagacgaatgacaacggcgaatcagaatggattcat

SEQ ID NO: 336398 - DNA, 75 bp, synthetic construct
  source 1..75: mol_type = other DNA
acgaagatttaggtttactctctgaagagaaagcgagtgctatccgtcaggcagcggatgaagtgctggcgggac

SEQ ID NO: 336399 - DNA, 75 bp, synthetic construct
  source 1..75: mol_type = other DNA
tatctggcagaccggttctggcacacaaagtaacatgaacatgaacgaagtgctggccaatcgggcgagtgaact

SEQ ID NO: 336400 - DNA, 75 bp, synthetic construct
  source 1..75: mol_type = other DNA
agcataatctcaaacatatcgaatacagcctgcctcacgtagcggaactggctcttggcggtacagcggtgggta

SEQ ID NO: 336401 - DNA, 75 bp, synthetic construct
  source 1..75: mol_type = other DNA
tgaagcctgcagaagaagactaatgaatgaaaaacattctcaatttgtacccaacaaagacaaacacgaccagag

SEQ ID NO: 336402 - DNA, 75 bp, synthetic construct
  source 1..75: mol_type = other DNA
gcatcctcattctggacttcggttctcagtacactcaactggttgcgcgccgcgtgcgtgagctgggcgtttact

SEQ ID NO: 336403 - DNA, 75 bp, synthetic construct
  source 1..75: mol_type = other DNA
gccgccgggagctggcagcagacataaaatatgcccgtcagttgactataaaaaagaatgatacacagtatgctc

SEQ ID NO: 336404 - DNA, 75 bp, synthetic construct
  source 1..75: mol_type = other DNA
caatggggctacgcccttaacccaaacagtggtgcacgcgtcgtaacgggtacgcagaaccgagaatatatggag

SEQ ID NO: 336405 - DNA, 75 bp, synthetic construct
  source 1..75: mol_type = other DNA
aaatttaatcagtatcgctacatcagattcctgaataagcgcgcaaaaaagcgcctaaacaccaagctattcaga

SEQ ID NO: 336406 - DNA, 75 bp, synthetic construct
  source 1..75: mol_type = other DNA
ggacaagagagccagaaaacgccttaacacaaagctattcaaagtccagccttacccaaaaccacaaacagttaa

SEQ ID NO: 336407 - DNA, 75 bp, synthetic construct
  source 1..75: mol_type = other DNA
ccatgctctgctgtcaggtgatggggaacgacgtggcgatcaacatgggtggcgcttccggtaactttgaactga

SEQ ID NO: 336408 - DNA, 75 bp, synthetic construct
  source 1..75: mol_type = other DNA
ggcccgcgctgcggaattggtgaaatctcaatcccggaaaatgagccgggcagctcaatcatgccagggaaagtg

SEQ ID NO: 336409 - DNA, 75 bp, synthetic construct
  source 1..75: mol_type = other DNA
gtggggaacagaaagcaagtcacatcccgaatcatcagcacgcctgaacttattcgctataacgacaatatcgtt

SEQ ID NO: 336410 - DNA, 75 bp, synthetic construct
  source 1..75: mol_type = other DNA
gtcgatggtattgagctcgctgaactgattaacaaagtcgctgaaaacggttattcactccgcgtggtgaatgaa

SEQ ID NO: 336411 - DNA, 75 bp, synthetic construct
  source 1..75: mol_type = other DNA
gtacgcgcaattgaaagcgcaatatgctgataaacctaaaaaacgtgtttttctgcaattcggcattaatccgcc

SEQ ID NO: 336412 - DNA, 75 bp, synthetic construct
  source 1..75: mol_type = other DNA
atggactggctggctaaatattggtggattctggtgattgtctttttggtgggcgttctgctgaatgtgatcaaa

SEQ ID NO: 336413 - DNA, 75 bp, synthetic construct
  source 1..75: mol_type = other DNA
gtctggttctcacactaagccaacgttatggcgtcagtctcattcatctggatgccagcgctgaatgcctgccgg

SEQ ID NO: 336414 - DNA, 75 bp, synthetic construct
  source 1..75: mol_type = other DNA
gtcgatggtgttaatctcgctgaactgattaacgtggcctgcgacaatggctactcccttcgtgttgttgatgaa

SEQ ID NO: 336415 - DNA, 75 bp, synthetic construct
  source 1..75: mol_type = other DNA
ttcacaggtagcggatatctgttacgtaccgatgcgtggtcgtacccggttctgcggcttaaacgcctggggctg

SEQ ID NO: 336416 - DNA, 75 bp, synthetic construct
  source 1..75: mol_type = other DNA
agtccacaaccagacaaagccaggaaagccgcgcaaacgttgctggaacaatatgcgcaactgaaagcgcaatac

SEQ ID NO: 336417 - DNA, 75 bp, synthetic construct
  source 1..75: mol_type = other DNA
tctgcggcttaaacgcctggggctgtcaaaaacgttccgtcgtctggttctcacactaaaccaacgttatggcgt

SEQ ID NO: 336418 - DNA, 75 bp, synthetic construct
  source 1..75: mol_type = other DNA
tctgcggcttaaacgcctggggctgtcaaaaacgttccgtcgtctggttatcacactcaaccaacgttatggcgt

SEQ ID NO: 336419 - DNA, 75 bp, synthetic construct
  source 1..75: mol_type = other DNA
tctgcggcttaaacgcctggggctgtcaaaaacgttccgtcgtctggttatcacactaaacccacgttatggcgt

SEQ ID NO: 336420 - DNA, 75 bp, synthetic construct
  source 1..75: mol_type = other DNA
gtctggttctcacactaaaccgacgttatggcgtcagtctcattcatctggatgccagcgctgaatgcctgccgg

SEQ ID NO: 336421 - DNA, 75 bp, synthetic construct
  source 1..75: mol_type = other DNA
gtctggttatcacactaaccccacgttatggcgtcagtctcattcatctggatgccagcgctgaatgcctgccgg

SEQ ID NO: 336422 - DNA, 75 bp, synthetic construct
  source 1..75: mol_type = other DNA
tctgcggcttaaacgcctggggctgtcaaaaacgttccgtcgtctggttgtcacactgaaccgacgttatggcgt

SEQ ID NO: 336423 - DNA, 75 bp, synthetic construct
  source 1..75: mol_type = other DNA
gccagaaaagggagaggctatctcctggctgctctgttgggagccgttaccccgttctgtagttgctcgacaatc

SEQ ID NO: 336424 - DNA, 75 bp, synthetic construct
  source 1..75: mol_type = other DNA
cggcatacgctgcagtaccgcacatatcacggaaaaggacaacgcctggttgtactcgctgtcacaccagaccag

SEQ ID NO: 336425 - DNA, 75 bp, synthetic construct
  source 1..75: mol_type = other DNA
caacccttccccgcatacgatgcagtaccgcacatatcacggaaacggacaacgcctggttgtactcgctgtcac

SEQ ID NO: 336426 - DNA, 75 bp, synthetic construct
  source 1..75: mol_type = other DNA
caacccttcccagcatacgctgcagtaccgcacatatcacggaaacggacaacgcctggttgtactcgctgtcac

SEQ ID NO: 336427 - DNA, 75 bp, synthetic construct
  source 1..75: mol_type = other DNA
tatacgctgcagtaccgcacatatcacggaaacggacaacgcctggctgtactcgctgtcacaccagactaatga

SEQ ID NO: 336428 - DNA, 75 bp, synthetic construct
  source 1..75: mol_type = other DNA
ccgacagcattaatgcgcagacgctgaacatggggcgcattgtcgttgacgtcgatggtgttaatctcactgaac

SEQ ID NO: 336429 - DNA, 75 bp, synthetic construct
  source 1..75: mol_type = other DNA
cgttatggcgtcagtctcattcatctggatgccagcgcagaatgtctgccggatttacccactttcgactggtaa

SEQ ID NO: 336430 - DNA, 75 bp, synthetic construct
  source 1..75: mol_type = other DNA
tgacgtcgatggtgttaatctcactgaactgattaacaaagtcactgaaaacggttattcactccgggtggttga

SEQ ID NO: 336431 - DNA, 75 bp, synthetic construct
  source 1..75: mol_type = other DNA
tgacgtcgatggtgttaatctcaatgaactgattaacaaagtccctgaaaacggttattcactccgggtggttga

SEQ ID NO: 336432 - DNA, 75 bp, synthetic construct
  source 1..75: mol_type = other DNA
tgtgggtgacctttggctggaaagttaccttgttgtacgcgattatcgccgccggcgtctccgtacttgccagta

SEQ ID NO: 336433 - DNA, 75 bp, synthetic construct
  source 1..75: mol_type = other DNA
caaccctttccggcatacgttgcagtaccgcacatatcacggaaacggacaacgcctggttgtactcgctgtcac

SEQ ID NO: 336434 - DNA, 75 bp, synthetic construct
  source 1..75: mol_type = other DNA
caaccctttcctgcatacggtgcagtaccgcacatatcacggaaacggacaacgcctggttgtactcgctgtcac

SEQ ID NO: 336435 - DNA, 75 bp, synthetic construct
  source 1..75: mol_type = other DNA
caacccttacccgcatacgctgcagtaccgcacatatcacggaaacggacaacgcctggttgtactcgctgtcac

SEQ ID NO: 336436 - DNA, 75 bp, synthetic construct
  source 1..75: mol_type = other DNA
cgatggtgcgtcgccgtcgtcagctttgtgatctgatgatttctgagcgtaatcgccgggcgaaaaccgattctt

SEQ ID NO: 336437 - DNA, 75 bp, synthetic construct
  source 1..75: mol_type = other DNA
ccttgcaaaaacagaccggattgatgcacagattctctgtcgtctggctgatgttattgatgtatcgcctgagcg

SEQ ID NO: 336438 - DNA, 75 bp, synthetic construct
  source 1..75: mol_type = other DNA
ctggtcgcctcatcttttgaagcagacgcagatgatgccgatgacgccgccgaactggctgacgatgcggcagcc

SEQ ID NO: 336439 - DNA, 75 bp, synthetic construct
  source 1..75: mol_type = other DNA
tacagatggttttaaattccaggcaacattgaaaggtggtgccacctcaggtgattatcagggtattgcagtata

SEQ ID NO: 336440 - DNA, 75 bp, synthetic construct
  source 1..75: mol_type = other DNA
acgctgtcgtaaaactgacggcaatgaatgcacaaacccctgcgaccactcaggtgacagcatctaataccagca

SEQ ID NO: 336441 - DNA, 75 bp, synthetic construct
  source 1..75: mol_type = other DNA
tcctgattttcaacctagaccgttacgtacaggtgttcgttcggaaagtcgtgaagctctaactgcactgcattt

SEQ ID NO: 336442 - DNA, 75 bp, synthetic construct
  source 1..75: mol_type = other DNA
agaaataacggcagaggaactttgtttgtgtacgcttccggtggaaatagtgccggtggcggtgattgcgccaac

SEQ ID NO: 336443 - DNA, 75 bp, synthetic construct
  source 1..75: mol_type = other DNA
ggacttgtaggccgcgacagcaaaggagcaatactttcgtgccaatccggtgtgtggggtggctttgaatcctac

SEQ ID NO: 336444 - DNA, 75 bp, synthetic construct
  source 1..75: mol_type = other DNA
ctgtctcggcgcgcgttgccgcggattctgctgtacttttgctctgtgctgccgccgtcgcactgccagctgcct

SEQ ID NO: 336445 - DNA, 75 bp, synthetic construct
  source 1..75: mol_type = other DNA
atgcgttcgtttctgatgattttgccgcctcttttgaagccgacgcatccctggctgaggtggcagcttctgacg

SEQ ID NO: 336446 - DNA, 75 bp, synthetic construct
  source 1..75: mol_type = other DNA
gctgccgtttcagaggacctggcgtttgtctcagacgtctttgccgccttcgcggaatttcctgccgccgttgcc

SEQ ID NO: 336447 - DNA, 75 bp, synthetic construct
  source 1..75: mol_type = other DNA
attataccggcggcggtacgctactgctcgatagcgaattaaacggcgatgactcagcaagtgaccaactggtat

SEQ ID NO: 336448 - DNA, 75 bp, synthetic construct
  source 1..75: mol_type = other DNA
tgttattttatcaggcccttgcaaaagagtgccaaattgatctggatttctttaatataagtatattatcagttg

SEQ ID NO: 336449 - DNA, 75 bp, synthetic construct
  source 1..75: mol_type = other DNA
atgacagagaaagagttagaggggttcattgaagtgcgtcacgccgttgacgcggttccataccctaaatttgcc

SEQ ID NO: 336450 - DNA, 75 bp, synthetic construct
  source 1..75: mol_type = other DNA
gatttaacccgcctgggcgatgccgatgagtgggatggctacaaaatgcgctacgtcaacccggtcaccggtggc

SEQ ID NO: 336451 - DNA, 75 bp, synthetic construct
  source 1..75: mol_type = other DNA
caacgacgccggtcaggaagtggagtacttcaacatcacgctggataacgtcaagctggtcagagtcgctccgct

SEQ ID NO: 336452 - DNA, 75 bp, synthetic construct
  source 1..75: mol_type = other DNA
gacggataacaataccggtaagctgaccggtacccgtattcacacgccgttcctgtttaccaaggaaattgattc

SEQ ID NO: 336453 - DNA, 75 bp, synthetic construct
  source 1..75: mol_type = other DNA
agtccccactggcgcgcaaggcatgtgagctcgcgctggcggcccacgcagaacgctacggcgattacgggcgca

SEQ ID NO: 336454 - DNA, 75 bp, synthetic construct
  source 1..75: mol_type = other DNA
aagttggcggttatctcaataacctgcgggcggcaaatcaggcgtttatgatggagcgacgcgatcacgcaggtg

SEQ ID NO: 336455 - DNA, 75 bp, synthetic construct
  source 1..75: mol_type = other DNA
ttacgtgttatcggcggagattatcattacacagcagcagggcaactggctcaacatgaagacacttctacggtg

SEQ ID NO: 336456 - DNA, 75 bp, synthetic construct
  source 1..75: mol_type = other DNA
tgatggcgagtggatgcttgggattgttggtggctacagcgataaccagggcgacagccgctcgaatatgaccgg

SEQ ID NO: 336457 - DNA, 75 bp, synthetic construct
  source 1..75: mol_type = other DNA
ccgctgcgccatcagacggggaactcctcaccgatctttaactatcgttatgaccgtagccgcgaagtgctgcac

SEQ ID NO: 336458 - DNA, 75 bp, synthetic construct
  source 1..75: mol_type = other DNA
tcctgcaactgttgccgaaagggttcgcctcccgcgtggcgcgcacaactgacagcaccatctaccacgtggtgg

SEQ ID NO: 336459 - DNA, 75 bp, synthetic construct
  source 1..75: mol_type = other DNA
tatcgcgaagtgcagcgtgaaactggcatgtcggatgccgaattgcacgaactgaaagaatttgggtcagataaa

SEQ ID NO: 336460 - DNA, 75 bp, synthetic construct
  source 1..75: mol_type = other DNA
aaaagcccgcgactggtaccgtcagcatcatgctgacagcaactggtatgaaaacgtgtatgaggacttcaggga

SEQ ID NO: 336461 - DNA, 75 bp, synthetic construct
  source 1..75: mol_type = other DNA
ggcactggctgaggcctgcccggcacttgttgacgcggcactggcagataatgcagccgctgtttttgagtctgc

SEQ ID NO: 336462 - DNA, 75 bp, synthetic construct
  source 1..75: mol_type = other DNA
acaaaaagttcaacagcagaactttgccaactggccgaaacactctctctctccaccctatttcactttcccttc

SEQ ID NO: 336463 - DNA, 75 bp, synthetic construct
  source 1..75: mol_type = other DNA
agcactggctgaggcctgcccggcacttgttgacgctgcactggcagacgacgcagccgctgtttttgagcctgc

SEQ ID NO: 336464 - DNA, 75 bp, synthetic construct
  source 1..75: mol_type = other DNA
cccgttagccaggtcatacgcggccttaacggcttttggcgttgccgcctgtgactcggaagtgctgttggtcgc

SEQ ID NO: 336465 - DNA, 75 bp, synthetic construct
  source 1..75: mol_type = other DNA
atgcgttcgtttctgatgactttgccgcctcttttgaagccgccgcatcccgggctgaggtggcagcttctgacg

SEQ ID NO: 336466 - DNA, 75 bp, synthetic construct
  source 1..75: mol_type = other DNA
attaaagacagcgagataacacgccgaatttttaatcatggcgtaactgccctgtgtgctttagccgcaaaacag

SEQ ID NO: 336467 - DNA, 75 bp, synthetic construct
  source 1..75: mol_type = other DNA
ggaatggagaaccattcaacagagttatcgaagcagagaacatcaacgactgctatgaccactggatgatatggg

SEQ ID NO: 336468 - DNA, 75 bp, synthetic construct
  source 1..75: mol_type = other DNA
gctacttaaaaatcctgctatgcgcctgcgctggggatcaaaccgtgctgcgcctgcctgtgacggggcgtgttg

SEQ ID NO: 336469 - DNA, 75 bp, synthetic construct
  source 1..75: mol_type = other DNA
agcagacgcagatgatgccgatgacgccgctgaactggctgacgatgcggctgccgccttagaggaagcagcatt

SEQ ID NO: 336470 - DNA, 75 bp, synthetic construct
  source 1..75: mol_type = other DNA
aagataatatttcaagcatcccaattgagttttataaaattgattggttgagtttttccaatgagagaatcaggc

SEQ ID NO: 336471 - DNA, 75 bp, synthetic construct
  source 1..75: mol_type = other DNA
gtgctgttggtcgcactgctgagctgtactatcccctttttcgtcgtgctcgcatcctcaagcgccacggcggat

SEQ ID NO: 336472 - DNA, 75 bp, synthetic construct
  source 1..75: mol_type = other DNA
gcagcattcgtttctgacgtttttgccgcaccggcactggtggccgccgcgctttttgaggactctgcagcggca

SEQ ID NO: 336473 - DNA, 75 bp, synthetic construct
  source 1..75: mol_type = other DNA
gtggcgctgccccgcgctgctgacgcctgtctggtcgcctcatcttttgaagcagacgccgatgaggccgatgac

SEQ ID NO: 336474 - DNA, 75 bp, synthetic construct
  source 1..75: mol_type = other DNA
tttctgccgattttccggcggcgctagcactggctgaggcctgccccgcacttgttgacgctgcactggcagacg

SEQ ID NO: 336475 - DNA, 75 bp, synthetic construct
  source 1..75: mol_type = other DNA
cgtttctgatgattttgccgcctcttttgaggccgccgcatccctggctgacgtggcagcttctgacgctttcga

SEQ ID NO: 336476 - DNA, 75 bp, synthetic construct
  source 1..75: mol_type = other DNA
ttcagtgtgcccggctttgagtcctcatatacagtgataatcccggcgtgtgacggcgggaatccctccaccaac

SEQ ID NO: 336477 - DNA, 75 bp, synthetic construct
  source 1..75: mol_type = other DNA
atgcattcgtttctgatgatttcgctgcctcttttgaggccgccgcaccccgtgccgaggtggcagcttctgacg

SEQ ID NO: 336478 - DNA, 75 bp, synthetic construct
  source 1..75: mol_type = other DNA
tctcggacgtttttgccgccttcgcggaatttcctgccgctgttgccgaggaggctgcactactggcgctcgagg

SEQ ID NO: 336479 - DNA, 75 bp, synthetic construct
  source 1..75: mol_type = other DNA
tcggatgtcttcgctgcggaagctgacctcgctgctgccgtggcctgttcagtggcttcgccagccttcgttgtg

SEQ ID NO: 336480 - DNA, 75 bp, synthetic construct
  source 1..75: mol_type = other DNA
gctgttgaagcggacgatgcggcgctttctgccgattttccggcggcggtggcactggctgaggcctgcccggca

SEQ ID NO: 336481 - DNA, 75 bp, synthetic construct
  source 1..75: mol_type = other DNA
gcgctttttgaggactctgcagcggcagcactttttgatgcctcagaggcttttgctgatgccgttcctgcgctg

SEQ ID NO: 336482 - DNA, 75 bp, synthetic construct
  source 1..75: mol_type = other DNA
cccgccagagaaagagatcgttactgaatttaaagtgccaatatctttcggtgttaatgttatatccgcagtcag

SEQ ID NO: 336483 - DNA, 75 bp, synthetic construct
  source 1..75: mol_type = other DNA
aagcaggttatcaattaatcatcgtcacaggtcgccatcacgtcgctattcatcctttttatcaggcgctggcgc

SEQ ID NO: 336484 - DNA, 75 bp, synthetic construct
  source 1..75: mol_type = other DNA
aatggtcctggcacgatcaggttgatattgcacgcggcggcaacagcaaaggtaaacgtttgacgaaatgggttg

SEQ ID NO: 336485 - DNA, 75 bp, synthetic construct
  source 1..75: mol_type = other DNA
caatgtattaggtgcaaaatcatcaggtatgatgcgttttattcgattaggattaaatgggcaagggatttcgcg

SEQ ID NO: 336486 - DNA, 75 bp, synthetic construct
  source 1..75: mol_type = other DNA
tggggcgttatcagggattaatacccgctttttccattcgtaacagggagagtatgactcatgtttcctattcgt

SEQ ID NO: 336487 - DNA, 75 bp, synthetic construct
  source 1..75: mol_type = other DNA
ccctgacgcacgatgacctgccgcgattgcagcattttggtaagcatgttgaacatgaattgggactggagtgcg

SEQ ID NO: 336488 - DNA, 75 bp, synthetic construct
  source 1..75: mol_type = other DNA
acttagacggcaccttattgaccccgaaaaagaccctgcttccatcatcgatagaagccctggcccgcgctcgcg

SEQ ID NO: 336489 - DNA, 75 bp, synthetic construct
  source 1..75: mol_type = other DNA
cgaaccagagaaagcagacaataagacgataaaagactgagagtcaaaatcggttgaagacgaagatattattcg

SEQ ID NO: 336490 - DNA, 75 bp, synthetic construct
  source 1..75: mol_type = other DNA
atgaacgaagttgtaaattcaggcgtgatgaacattgcgtctttggttgtatcggtggtagttctcgctattggg

SEQ ID NO: 336491 - DNA, 75 bp, synthetic construct
  source 1..75: mol_type = other DNA
gggtttggcttgttaatgaaaaagaaagggattcgaatagaaccccttgaaaattactttgcaacaaaaagcgtt

SEQ ID NO: 336492 - DNA, 75 bp, synthetic construct
  source 1..75: mol_type = other DNA
gattgaactgctcgaggcattgctggatcagcaaaaacgtcagaatgcattgttacgtcgtttgtgcgaggctaa

SEQ ID NO: 336493 - DNA, 75 bp, synthetic construct
  source 1..75: mol_type = other DNA
cgaaccagagaaagcagacaataagacgatgaaagactaagagtcaaaatcggttgaagacgaagatattattcg

SEQ ID NO: 336494 - DNA, 75 bp, synthetic construct
  source 1..75: mol_type = other DNA
cgaaccagagaaagcagacaataagacgattaaagacttagagtcaaaatcggttgaagacgaagatattattcg

SEQ ID NO: 336495 - DNA, 75 bp, synthetic construct
  source 1..75: mol_type = other DNA
ccgcagaagcacgtggctggctgcccggcgggcaactgcacagcgatttgctggtgctgctgcgcgtttatctgg

SEQ ID NO: 336496 - DNA, 75 bp, synthetic construct
  source 1..75: mol_type = other DNA
cccagtattaccgcatctggcgcaaatataactacccggcgtcgtttgaagcaggtgccgtggatgacatttccc

SEQ ID NO: 336497 - DNA, 75 bp, synthetic construct
  source 1..75: mol_type = other DNA
tcttccaaatccaatggctgtgttggcgctttttttatttccaccaaaaggaaaaatagttctccactggcacag

SEQ ID NO: 336498 - DNA, 75 bp, synthetic construct
  source 1..75: mol_type = other DNA
atccctcacgatgcccgcatattgattacttacggcggcggtagcgttaaaaaaaccggcgttctggatcaagta

SEQ ID NO: 336499 - DNA, 75 bp, synthetic construct
  source 1..75: mol_type = other DNA
acgcgtctggtttatccatctgacagtcagcaaattacgttaagtgtgcagaatggtggggccaataccagctat

SEQ ID NO: 336500 - DNA, 75 bp, synthetic construct
  source 1..75: mol_type = other DNA
cgactgatcgcgaaacattattctggatgaatgtgaaagcgattccgccaacggatgagaagaatacccagaaaa

SEQ ID NO: 336501 - DNA, 75 bp, synthetic construct
  source 1..75: mol_type = other DNA
aagatgtttcctcttatttttatgctgctgatattttttgtcttccttctattgaacgctccgaagcatacggcg

SEQ ID NO: 336502 - DNA, 75 bp, synthetic construct
  source 1..75: mol_type = other DNA
agtgatcgaaggtgtcggcccacgctactgtccgtcgatcgaagataaggtcatgcgcttcgctgacagaaatca

SEQ ID NO: 336503 - DNA, 75 bp, synthetic construct
  source 1..75: mol_type = other DNA
taccgccaggtatccggtctttctaacgaagtgatcgccaaacttaacgatcacaaaccggcctctatcggccag

SEQ ID NO: 336504 - DNA, 75 bp, synthetic construct
  source 1..75: mol_type = other DNA
ggggcagatgagctgcaacccggcgatcggcggtattgggaagggacatctggtaaaagaagtggatgcactcgg

SEQ ID NO: 336505 - DNA, 75 bp, synthetic construct
  source 1..75: mol_type = other DNA
acgaagtgatcgccaaactcaacgatcacaaaccggcctctatcggtcaggcttcgcgtatttctggcgtcacgc

SEQ ID NO: 336506 - DNA, 75 bp, synthetic construct
  source 1..75: mol_type = other DNA
taaacgcaagcaagggaccagcggttcgcgctacccgtgctcaggcggatcgtgtgctctaccggcaggcggtac

SEQ ID NO: 336507 - DNA, 75 bp, synthetic construct
  source 1..75: mol_type = other DNA
ggtgatccgccatccattccgctctctcgccgtttgcgtgaactgccgctgcgcgttggtcgtctgaaaaccggt

SEQ ID NO: 336508 - DNA, 75 bp, synthetic construct
  source 1..75: mol_type = other DNA
aattctggtgatttaaagtattgcacttcggatgcttgttttacagttaggcatgaaaatgaaatatcaattaat

SEQ ID NO: 336509 - DNA, 75 bp, synthetic construct
  source 1..75: mol_type = other DNA
tcatttttaaagcactatttattgggtagtcaatttcaggataaattgatgcaagcggcgacaggttcaacagtc

SEQ ID NO: 336510 - DNA, 75 bp, synthetic construct
  source 1..75: mol_type = other DNA
tggaagtgatagagataaattattttcactgatatttactgcctttcatgaattgtctataaaatatgaaataga

SEQ ID NO: 336511 - DNA, 75 bp, synthetic construct
  source 1..75: mol_type = other DNA
aaattccttttctatactcttcaatcaagaaataggattttattgagtttaaaaaaagaaggtggagtacctgct

SEQ ID NO: 336512 - DNA, 75 bp, synthetic construct
  source 1..75: mol_type = other DNA
tgaccaccgccagcctgcctgtagatcgccctttctttgcttaccagcatgaatggaacagtggcgcacgcagca

SEQ ID NO: 336513 - DNA, 75 bp, synthetic construct
  source 1..75: mol_type = other DNA
tgaaaaaagaattatcagcagaggactggaaaatgctgtttatgtgcgaatggcctctcgcaaacgaggagctgg

SEQ ID NO: 336514 - DNA, 75 bp, synthetic construct
  source 1..75: mol_type = other DNA
ggcttagaatagcatctctgaataaactcccaccggttctgcctgaaattaatcgtgaagcatgggttaaactcg

SEQ ID NO: 336515 - DNA, 75 bp, synthetic construct
  source 1..75: mol_type = other DNA
gcccgcaactccgaagtttgatgacaatggtgaaattccatatgtcacttcaaagaatattagtggtgggaacat

SEQ ID NO: 336516 - DNA, 75 bp, synthetic construct
  source 1..75: mol_type = other DNA
gatgctttttctcgttggttcgtctattgtttcccatatattaaaaatgctttcctaaatgagagtaattatacc

SEQ ID NO: 336517 - DNA, 75 bp, synthetic construct
  source 1..75: mol_type = other DNA
gtttactgcataacaagcgtgacggcgtatatcactgtttgatctgcgatgccccgctgtttcattcccaaacca

SEQ ID NO: 336518 - DNA, 75 bp, synthetic construct
  source 1..75: mol_type = other DNA
agttgccgagatctatttgcctttgtcgcgtttgctgaacttctatataagctcgaatctgcgtcgtcaggcggt

SEQ ID NO: 336519 - DNA, 75 bp, synthetic construct
  source 1..75: mol_type = other DNA
ctcgcatcttatttatgatgtaatcccaaatggtgataaaaccgttgttcagcctgatatcctaattcttgaagg

SEQ ID NO: 336520 - DNA, 75 bp, synthetic construct
  source 1..75: mol_type = other DNA
tgccaaacgttacagcccctgtttactcgcatcttatttatgatgtgatcccggatggagataaaacggttgttc

SEQ ID NO: 336521 - DNA, 75 bp, synthetic construct
  source 1..75: mol_type = other DNA
gtatgtacgctcaggaaataggtccaacgccaacggcagagcaagcaatgctgctgaaatacttcaaagaggcgg

SEQ ID NO: 336522 - DNA, 75 bp, synthetic construct
  source 1..75: mol_type = other DNA
gaccgcagcggttcaccttaccttgcaacccgcccgcagaagcccggctacgatggaggcacggcacagcccgca

SEQ ID NO: 336523 - DNA, 75 bp, synthetic construct
  source 1..75: mol_type = other DNA
aaaatcacggcagacgggaaggagggaccgggtgaccgcagcggttcaccttaccttgcaacccgcccgcagaag

SEQ ID NO: 336524 - DNA, 75 bp, synthetic construct
  source 1..75: mol_type = other DNA
acgaattcatatcatctaatcagacaaaagcattgactattcccggtgcattaatagctgctggtggcttagtga

SEQ ID NO: 336525 - DNA, 75 bp, synthetic construct
  source 1..75: mol_type = other DNA
ggatctaatggacatcattgataaggggcttggcttgttaatgaaaagtaattttcaagggattcgaatagaacc

SEQ ID NO: 336526 - DNA, 75 bp, synthetic construct
  source 1..75: mol_type = other DNA
ggaattaatggatatcattgataaggggtttggcggtaatgactccaacttattgatagtgttttatgttcagat

SEQ ID NO: 336527 - DNA, 75 bp, synthetic construct
  source 1..75: mol_type = other DNA
ggcgctggcgctgacaatgtgggggaataatgttcgccttatttccacccacaacggtattgataacctgtttaa

SEQ ID NO: 336528 - DNA, 75 bp, synthetic construct
  source 1..75: mol_type = other DNA
ggcttctggctggaaaaaatcgccggatattgaggattatcaggaacgcccggcgaatggttgggatatccgcgc

SEQ ID NO: 336529 - DNA, 75 bp, synthetic construct
  source 1..75: mol_type = other DNA
tcaactgggcacattacaacaaacgctgaagtttgttgccgggccgcttgatgcagcacattcgtccatcaccct

SEQ ID NO: 336530 - DNA, 75 bp, synthetic construct
  source 1..75: mol_type = other DNA
ccctgagcgctaacgagccgtcaggtgacgtggttgctgatggtcagcaagcctacacgttgacgttgactgcgg

SEQ ID NO: 336531 - DNA, 75 bp, synthetic construct
  source 1..75: mol_type = other DNA
gagcctgccggaaaccgcgtctacagccacgacaattcacctgattcatggcggtgaagatccggttatcgatct

SEQ ID NO: 336532 - DNA, 75 bp, synthetic construct
  source 1..75: mol_type = other DNA
gaaacgctgggtggcggatgatgccgacctgaaaattgccgagaaatcccgccgtaccggtttaacctgggcgga

SEQ ID NO: 336533 - DNA, 75 bp, synthetic construct
  source 1..75: mol_type = other DNA
attgggcgtctaatatcccatcccagcgaatactatactgattatattaaagctgaagaacgattaaaaaaaatt

SEQ ID NO: 336534 - DNA, 75 bp, synthetic construct
  source 1..75: mol_type = other DNA
gttaacgatgaaggtttcagaaataaacagtaaaaaagtcgcgatattaatgaagattgacgatatcaatcagac

SEQ ID NO: 336535 - DNA, 75 bp, synthetic construct
  source 1..75: mol_type = other DNA
ggcccgtggctgttactggccgcagcgctgggcgggatagcggggcgcatgatattacatcagccctcccagcgt

SEQ ID NO: 336536 - DNA, 75 bp, synthetic construct
  source 1..75: mol_type = other DNA
tgttttggcaatctgattgataagcgtcatcttagcgattttattgctatctggtggaggctgattggtcgccat

SEQ ID NO: 336537 - DNA, 75 bp, synthetic construct
  source 1..75: mol_type = other DNA
cggcgctgtttgtgttgatgtctggtaatggctgggccgatggcgaaccgccaactgaaaatgtcttaaaagatc

SEQ ID NO: 336538 - DNA, 75 bp, synthetic construct
  source 1..75: mol_type = other DNA
gcgatgttaaccagtaaaggtacgcctgcgtctggctggacggtgaatttttactcttttcaggcggcagccagc

SEQ ID NO: 336539 - DNA, 75 bp, synthetic construct
  source 1..75: mol_type = other DNA
atatcaacgaacaacggcgacagacttttctgcaatcacaaaaacttagccgtaaattgcaggatgactggataa

SEQ ID NO: 336540 - DNA, 75 bp, synthetic construct
  source 1..75: mol_type = other DNA
gaaattgaaggtctgccggatctgaaagttgagcaggcctttgagctgaccgatgcgtccgccgagcgttctgct

SEQ ID NO: 336541 - DNA, 75 bp, synthetic construct
  source 1..75: mol_type = other DNA
ccgtcaggcgaaagatgtcgctgagagcgatcgcggcttctcgctggcgcagaaaatggtaggccgtgcctgtgg

SEQ ID NO: 336542 - DNA, 75 bp, synthetic construct
  source 1..75: mol_type = other DNA
cacgccatcccgctgtacgccatcaaacaaggcctgctgactgttgagaagaaaggtaagaaaaacattttctct

SEQ ID NO: 336543 - DNA, 75 bp, synthetic construct
  source 1..75: mol_type = other DNA
tgcaaggtggggtgaggcttatcagctcaaagccgaaaacattgtgggcaatagggttatatttacgcttacaaa

SEQ ID NO: 336544 - DNA, 75 bp, synthetic construct
  source 1..75: mol_type = other DNA
gatatcaaagagccaatcctctgtgcaccgaatgacccggacgacgcacgtccgctgtctgcggtacagggcgag

SEQ ID NO: 336545 - DNA, 75 bp, synthetic construct
  source 1..75: mol_type = other DNA
agaaagccaaagcaggtaacaaatacgcgaagcaggttatgcagtcctgggcggatgctgaatggttcctgaatc

SEQ ID NO: 336546 - DNA, 75 bp, synthetic construct
  source 1..75: mol_type = other DNA
caacgttggttgccgcttctctaccgctggaagaggctcttgatgcggtagcaaaacagagcgaaaaaccacgcc

SEQ ID NO: 336547 - DNA, 75 bp, synthetic construct
  source 1..75: mol_type = other DNA
gccaacttaccgaaacactctctctccaccctatttcactttcccttctcgaaatgttgttaaacagcactcggg

SEQ ID NO: 336548 - DNA, 75 bp, synthetic construct
  source 1..75: mol_type = other DNA
actgtgtgatcattaaccaaatcattggttttattggctttcaggcgcggacaattgcgacatttcaggcttatc

SEQ ID NO: 336549 - DNA, 75 bp, synthetic construct
  source 1..75: mol_type = other DNA
gatacgagcaagtttttaagttttgtcctccgacacaaaccggaggcgattggtatcgtacttgaccgtgaagga

SEQ ID NO: 336550 - DNA, 75 bp, synthetic construct
  source 1..75: mol_type = other DNA
attaggatgtgttcaggctcaggggtatctgtaccagaaacccatgccattctccgcctgggataaaagtggaaa

SEQ ID NO: 336551 - DNA, 75 bp, synthetic construct
  source 1..75: mol_type = other DNA
caaattaggatgtgttcaggctcaggggtatctgtaccagaaacccatgccattctccgcctgggataaaagtgg

SEQ ID NO: 336552 - DNA, 75 bp, synthetic construct
  source 1..75: mol_type = other DNA
aatagggcgagacagcgttggtgccgtaacgttattacccgaaaatgaaaccataacacgcccgataatggcatg

SEQ ID NO: 336553 - DNA, 75 bp, synthetic construct
  source 1..75: mol_type = other DNA
aacgaggcatccctttctggcaagcggaaaacggggtctggctgacatcaacggttgctgttgagtttcttgagt

SEQ ID NO: 336554 - DNA, 75 bp, synthetic construct
  source 1..75: mol_type = other DNA
ctggccgttgcgatgggggcgtttccggcgacgtttgaacgactgtactgcgcgatggtggcagcaggtgaaacg

SEQ ID NO: 336555 - DNA, 75 bp, synthetic construct
  source 1..75: mol_type = other DNA
cgttactggtggtgagtatggctggtgtcgtgctgttcatcgtactggctattctgcagccgatcctgcaactca

SEQ ID NO: 336556 - DNA, 75 bp, synthetic construct
  source 1..75: mol_type = other DNA
ggaaaacggggtctggctgacatcaacggttgctgttgagtttcttgagtggccgttcatgccggctggggtaca

SEQ ID NO: 336557 - DNA, 75 bp, synthetic construct
  source 1..75: mol_type = other DNA
catactctgtgcacaaaaagtgggcaagcggttaacccgtgccttactggatgtcgttgtcgccactagcgataa

SEQ ID NO: 336558 - DNA, 75 bp, synthetic construct
  source 1..75: mol_type = other DNA
tggcttcatcgaaaaaaccccgccacaatttctctaccatggtacggcaagccgttttcttgacgagataaaaaa

SEQ ID NO: 336559 - DNA, 75 bp, synthetic construct
  source 1..75: mol_type = other DNA
cggtaccggtggtgattcccatacccgtttcccgatcggcatttctttcccggcaggctccggtctggtggcatt

SEQ ID NO: 336560 - DNA, 75 bp, synthetic construct
  source 1..75: mol_type = other DNA
cgtcaccgacactggcaagctgcgcaatatcgccatcgcccagggattcaccgacttcgtgcgcctgctgtcagg

SEQ ID NO: 336561 - DNA, 75 bp, synthetic construct
  source 1..75: mol_type = other DNA
tgtctacttctttcaatgcaggtagtaaaaggtttgtcatttatcaatcagcacaagataagaatcttcaggttg

SEQ ID NO: 336562 - DNA, 75 bp, synthetic construct
  source 1..75: mol_type = other DNA
ggcttttttcatttctgacaggatattacaaaccacagtttaagaaagaatatgaaatgattaattataatgatg

SEQ ID NO: 336563 - DNA, 75 bp, synthetic construct
  source 1..75: mol_type = other DNA
tacatgtaatctggcaggaacaattaacaggagcaatatctaaactaaatccgaatgctcaaatcattttcgcaa

SEQ ID NO: 336564 - DNA, 75 bp, synthetic construct
  source 1..75: mol_type = other DNA
ttgcgaacagttggacgctattgactggtcgtggctgtcgatggatggttgtatgaccaaatcaccgctggcagg

SEQ ID NO: 336565 - DNA, 75 bp, synthetic construct
  source 1..75: mol_type = other DNA
cactggctggacgttgccgcacaacagaaaacggtggcaattaccctgcgcgaactggcaccgttcgacaaacgt

SEQ ID NO: 336566 - DNA, 75 bp, synthetic construct
  source 1..75: mol_type = other DNA
tttgcaaacgttctggtatcgaacagagtatatttaatttaatattactttctgccgtcaatacattttgtagca

SEQ ID NO: 336567 - DNA, 75 bp, synthetic construct
  source 1..75: mol_type = other DNA
acagtgtcttttgatttttcacaaatcattaaattgaaaaaaatatttgggttgacatattgctttaatgacact

SEQ ID NO: 336568 - DNA, 75 bp, synthetic construct
  source 1..75: mol_type = other DNA
atgacgcttgatgagtttatggcgctggctggcacatcgaacacgggggcgggtgagtacgtatcatcggggaca

SEQ ID NO: 336569 - DNA, 75 bp, synthetic construct
  source 1..75: mol_type = other DNA
gttgaacatggcgtcgataccgcgtggctggtcgatcaccacacagaagacttcaccgccagctatgctgttcaa

SEQ ID NO: 336570 - DNA, 75 bp, synthetic construct
  source 1..75: mol_type = other DNA
aaaaagcgtttgccgaggtggtgaaccgtatgattgacgacggttatcaggtgctggcgctttctacttgcacca

SEQ ID NO: 336571 - DNA, 75 bp, synthetic construct
  source 1..75: mol_type = other DNA
atacctgcggcaaccgtggcgacagcgccatcctgcgcggtttattggatgcaattaacacccttaagcctgaga

SEQ ID NO: 336572 - DNA, 75 bp, synthetic construct
  source 1..75: mol_type = other DNA
tccccacgaatcctcgctacccttcaattatgctggatgatctatcttgcatattgggagtatgctttaaaattc

SEQ ID NO: 336573 - DNA, 75 bp, synthetic construct
  source 1..75: mol_type = other DNA
cgagtttcactcatagcttcagccccttgtatccgttaaatgattcggcaacaatcatcacccaccacgcgcgta

SEQ ID NO: 336574 - DNA, 75 bp, synthetic construct
  source 1..75: mol_type = other DNA
attccctttcattcatggctgacgcccgcacgtgctcttgcggtgaagttgtttcctgaccaacttgcagtgact

SEQ ID NO: 336575 - DNA, 75 bp, synthetic construct
  source 1..75: mol_type = other DNA
gacagctcattttttgctgaagtatcaaccggctggcgtgcctgctacgaaggggaaaaattctctggagagcaa

SEQ ID NO: 336576 - DNA, 75 bp, synthetic construct
  source 1..75: mol_type = other DNA
cgtttcccgattggtatctccttcccggcgggttctggtctggtggcatttgctgccgcgactggcgttatgccg

SEQ ID NO: 336577 - DNA, 75 bp, synthetic construct
  source 1..75: mol_type = other DNA
aagccgcctatgtcaaagcaggcttcctggctgctgtcgccaaaggcgaagctaaatccccactgctgactccgg

SEQ ID NO: 336578 - DNA, 75 bp, synthetic construct
  source 1..75: mol_type = other DNA
ggcagtgatcgacatcgatctggctgatattaaagagccaatcctctgtgcaccgaacgatccggacgacgcacg

SEQ ID NO: 336579 - DNA, 75 bp, synthetic construct
  source 1..75: mol_type = other DNA
agcgtatcgaggtagctatgagaaatcataccacacacccgcaagggcgggactcgcacgacctgaataaattcg

SEQ ID NO: 336580 - DNA, 75 bp, synthetic construct
  source 1..75: mol_type = other DNA
cgcacatggcgcaaatctttcctgttcttgttcgcttaccgcatttttgcgttgttttttcctggatgaggataa

SEQ ID NO: 336581 - DNA, 75 bp, synthetic construct
  source 1..75: mol_type = other DNA
tttttttaaaagacatgacctagtgatcagtttctcaccatgcgcatcgtcttggtttgccataatactaggtat

SEQ ID NO: 336582 - DNA, 75 bp, synthetic construct
  source 1..75: mol_type = other DNA
tcaggaagcggtataacaaataaatatactgactatgacatcaaatatggaattgatgatggggagactattgta

SEQ ID NO: 336583 - DNA, 75 bp, synthetic construct
  source 1..75: mol_type = other DNA
ttgaggccagcagcgaacaggaagcacgccagcaatccccggctggttgcgtgatggtattcgccgcccgtattc

SEQ ID NO: 336584 - DNA, 75 bp, synthetic construct
  source 1..75: mol_type = other DNA
ccccgaaatggagccgcctttctgaacagataacacgctgcgccgtttgtgtgtgtgatcccaaacataagcacg

SEQ ID NO: 336585 - DNA, 75 bp, synthetic construct
  source 1..75: mol_type = other DNA
atgggattaaacgccattgcccgccgtctgcggctgctggttgaccgtgccattgtccgcatggtgtctgacagt

SEQ ID NO: 336586 - DNA, 75 bp, synthetic construct
  source 1..75: mol_type = other DNA
aagatttttgaagaaaagatggttaatgaattaaaaattagaacaagaatgatgaaaatcctccggaagatttac

SEQ ID NO: 336587 - DNA, 75 bp, synthetic construct
  source 1..75: mol_type = other DNA
tgatgaccgtgaagacggggagttacttacagcacagctgcgactgggaccggcagacattctggagtcagatga

SEQ ID NO: 336588 - DNA, 75 bp, synthetic construct
  source 1..75: mol_type = other DNA
ccggaattcataaaccgtattgatgaagttgtggtcttccacccgttgggtgaacaacatatcgcttcgattgcc

SEQ ID NO: 336589 - DNA, 75 bp, synthetic construct
  source 1..75: mol_type = other DNA
cagaagaactcgaccgactcgatcgtcgtatcatccagctcaaactggaacaacaggcgttaatgaaagagtctg

SEQ ID NO: 336590 - DNA, 75 bp, synthetic construct
  source 1..75: mol_type = other DNA
cgacgtccggctgtatcaccaggacggcaaatcacatatcacgttaaggaaaggcggaattattgaaatcacagg

SEQ ID NO: 336591 - DNA, 75 bp, synthetic construct
  source 1..75: mol_type = other DNA
cttacagcacaactgcggctgggaccggcagacatcctggagtccgatgagaatggtattattccggagcaggac

SEQ ID NO: 336592 - DNA, 75 bp, synthetic construct
  source 1..75: mol_type = other DNA
agatacagtgcgtggtaagaccgctgcaaattctgcgtggtgacgggacgtgggaaaatattggcgggatgaagt

SEQ ID NO: 336593 - DNA, 75 bp, synthetic construct
  source 1..75: mol_type = other DNA
gccaccagtgctgtactggctttccggattaacctgcaatgacgagaacttcaccaccaaggcgggtgcccagcg

SEQ ID NO: 336594 - DNA, 75 bp, synthetic construct
  source 1..75: mol_type = other DNA
atgcagtgtctgtgtggttgcggaaagcatgatggccgtgaacacgtgcagtcgcctacagcacagctgcgactg

SEQ ID NO: 336595 - DNA, 75 bp, synthetic construct
  source 1..75: mol_type = other DNA
tcagggttcaagaacttaagcctctcctctttcataattggcctgtgcatggagaaatagcctggttattccctg

SEQ ID NO: 336596 - DNA, 75 bp, synthetic construct
  source 1..75: mol_type = other DNA
atgaacatactaaaaaaacttatgcagcgtctgtgcgggcacggaaagcatgatgaccgtgaacacggggggtta

SEQ ID NO: 336597 - DNA, 75 bp, synthetic construct
  source 1..75: mol_type = other DNA
ttgcgcacagatatcaatcaggcattaaatcgtttaccgcaggttgaaggtactggtggtgatgtccagccatca

SEQ ID NO: 336598 - DNA, 75 bp, synthetic construct
  source 1..75: mol_type = other DNA
catgagcgacgcgttacaggccagcggcgtttactggctggtaggtttgctgggacttctggtgctcgggcaacg

SEQ ID NO: 336599 - DNA, 75 bp, synthetic construct
  source 1..75: mol_type = other DNA
ggcgtttactggctggcgggattgctggcgcttctggtgctggggcaacggctacttaaaaatcctactatgcgc

SEQ ID NO: 336600 - DNA, 75 bp, synthetic construct
  source 1..75: mol_type = other DNA
catgagtgacgcgttacaggccagcggcgtttactggctggcgggattgctggcgcttctggtgttggggcaacg

SEQ ID NO: 336601 - DNA, 75 bp, synthetic construct
  source 1..75: mol_type = other DNA
tcccgcaccttaagcatcctcaccgccagcagtgttccgctgctggaaggcattcagaccgccgccgccgtgtcg

SEQ ID NO: 336602 - DNA, 75 bp, synthetic construct
  source 1..75: mol_type = other DNA
tggggcttctggtgctggggcaacggctactcaaaaatcctgctatgcgcctgcgctgggataaaaccttgctgc

SEQ ID NO: 336603 - DNA, 75 bp, synthetic construct
  source 1..75: mol_type = other DNA
cgaacagcacattgcctcgattgcgcagattcagttgaaacgtctgtacaaacgtctggaagagcgtggttatga

SEQ ID NO: 336604 - DNA, 75 bp, synthetic construct
  source 1..75: mol_type = other DNA
gccgccgcgtactggcactggatatgggcgcgctggtggccggggcgaaatatcgcggtgagtttgaggaacgat

SEQ ID NO: 336605 - DNA, 75 bp, synthetic construct
  source 1..75: mol_type = other DNA
cgaatatcgtcagtacatcgaaaaagatgctgcgctggaacgtcgtttccagaaggtgtttgttgccgaaccaac

SEQ ID NO: 336606 - DNA, 75 bp, synthetic construct
  source 1..75: mol_type = other DNA
atgcacttccgagtcacaggtgaatggaatggagagccattcgacagagttatcgaagcagaggacatcaatgac

SEQ ID NO: 336607 - DNA, 75 bp, synthetic construct
  source 1..75: mol_type = other DNA
aggtatcgatgttgtatcgttagacctaccaacacataaccttgccagcgccgaaggaaagttgatgcttcaaat

SEQ ID NO: 336608 - DNA, 75 bp, synthetic construct
  source 1..75: mol_type = other DNA
tactggatgcggataaaaagcagatacagtgcgtggtaagaccgctgcaaatcctgcgtgctgacgggacgtggg

SEQ ID NO: 336609 - DNA, 75 bp, synthetic construct
  source 1..75: mol_type = other DNA
attttcaggcgccagcaaaggtgctgaaattcccggaagtgcaaattcaggaaatcatgagtaactgtgcgagaa

SEQ ID NO: 336610 - DNA, 75 bp, synthetic construct
  source 1..75: mol_type = other DNA
attttcaggcgccagcaaaggtgctgaaattcccggaagtgcaaattcaggaaatcattagtaactgtgcgagat

SEQ ID NO: 336611 - DNA, 75 bp, synthetic construct
  source 1..75: mol_type = other DNA
attttcaggcgccagcaaaggtgctgaaattcccggaagtgcaaattcaggaaatcataagtaactgtgcgagag

SEQ ID NO: 336612 - DNA, 75 bp, synthetic construct
  source 1..75: mol_type = other DNA
tttcaggcgccagcaaaggtgctgaaattaccggaagtgcacattcatgaaatcgttagtcactatgcgagaatg

SEQ ID NO: 336613 - DNA, 75 bp, synthetic construct
  source 1..75: mol_type = other DNA
tttcaggcgccagcaaaggtgctgaaattaccggaagtgcatattcatgacatcgttagtcactttgcgagaatg

SEQ ID NO: 336614 - DNA, 75 bp, synthetic construct
  source 1..75: mol_type = other DNA
tttcaggcgccagcaaaggtgctgaaattaccggaagtgcaaattcatgacatcgttagtcactatgcgagaatg

SEQ ID NO: 336615 - DNA, 75 bp, synthetic construct
  source 1..75: mol_type = other DNA
cgatgatgctgtacatgatcgcctccggcgaacagagcggcgaactggaaaccatgcttgagcaggccgcagtca

SEQ ID NO: 336616 - DNA, 75 bp, synthetic construct
  source 1..75: mol_type = other DNA
gagccggcgctggtggtgatgatggcgggcgtggtgctgtttatcgtcatcgccatcctcgaaccgatgctgcaa

SEQ ID NO: 336617 - DNA, 75 bp, synthetic construct
  source 1..75: mol_type = other DNA
aaactggcctgaaggcgaacagcctctgtgttgagatcactgaaaccgtgattgagcgaattaatgaacattttt

SEQ ID NO: 336618 - DNA, 75 bp, synthetic construct
  source 1..75: mol_type = other DNA
attttcaggcgacagcaaaggtgctgaaattcccggaagtgcaaattcaggaaatcatcagtaactgtgcgagac

SEQ ID NO: 336619 - DNA, 75 bp, synthetic construct
  source 1..75: mol_type = other DNA
tggcgaaagaactcgggttgaatgttccggacgcagaaatcattaaagcgggaagggtgcgcgcgttagcggtcg

SEQ ID NO: 336620 - DNA, 75 bp, synthetic construct
  source 1..75: mol_type = other DNA
gcgcggactgaatacggcgcgtttttcccgcacgttaagcatcctcaccgccagcagtgttccgctgctggaagg

SEQ ID NO: 336621 - DNA, 75 bp, synthetic construct
  source 1..75: mol_type = other DNA
tttcaggcgccagcaaaggtgctgaaattaccggaagtgcacattcatgacatcgttagtcactctgcgagaatg

SEQ ID NO: 336622 - DNA, 75 bp, synthetic construct
  source 1..75: mol_type = other DNA
tgatggctgtgaacacgggcagtcgcttacagtacaactgcgactggggccggcagacatcctggagtcagatga

SEQ ID NO: 336623 - DNA, 75 bp, synthetic construct
  source 1..75: mol_type = other DNA
atattggcgggatggaagtaacccgacagcttcacaaaaccggagtaccggctccggtttttgttggcatgccat

SEQ ID NO: 336624 - DNA, 75 bp, synthetic construct
  source 1..75: mol_type = other DNA
gggggttgacgttgtctcgcttgatctgcccgtgcgtaatcttgccagttcggaaggaaagctgatgctgcaaat

SEQ ID NO: 336625 - DNA, 75 bp, synthetic construct
  source 1..75: mol_type = other DNA
gataatgagtattactgtctgctgctggcgaaagaacttgggttgaatgttccggacgcagaaatcattaagcgg

SEQ ID NO: 336626 - DNA, 75 bp, synthetic construct
  source 1..75: mol_type = other DNA
gcagcactggataacgtgaagacttcattaccgacagattttccagagaacgtggtgacggcagttgaaaccaat

SEQ ID NO: 336627 - DNA, 75 bp, synthetic construct
  source 1..75: mol_type = other DNA
atgaacatactaaaaaaacttatgcagcgtctgtgcggttgcggaaagcatgatggccgtgaacacggggggtta

SEQ ID NO: 336628 - DNA, 75 bp, synthetic construct
  source 1..75: mol_type = other DNA
tggatgcggataaaaagcagatacagtgtgtggtaagaccgctgcaaatcctgcgtgctgacgggggtgggaaaa

SEQ ID NO: 336629 - DNA, 75 bp, synthetic construct
  source 1..75: mol_type = other DNA
tttcaggcgccagcaaaggtgctgaaattaccggaagtgcagattcatgacatcgttagtcactgtgcgagaatg

SEQ ID NO: 336630 - DNA, 75 bp, synthetic construct
  source 1..75: mol_type = other DNA
tttcaggcgccagcaaaggtgctgaaattaccggaagtgcacattcatgagatcgttagtcactgtgcgagaatg

SEQ ID NO: 336631 - DNA, 75 bp, synthetic construct
  source 1..75: mol_type = other DNA
actgcgaagctttcgtggtcaagtcgaagtcgcgtagatccggcggttgtgcggggaaggatcgcgttcttacct

SEQ ID NO: 336632 - DNA, 75 bp, synthetic construct
  source 1..75: mol_type = other DNA
atatataatattgttacctgtatcagtgttattttcacattacttagcggattatttctttggtaacaagaatta

SEQ ID NO: 336633 - DNA, 75 bp, synthetic construct
  source 1..75: mol_type = other DNA
ggagcattaattgcagctgtattccagtcatcaatgattggtgctgtaatgcttcttactaacatcaaacaacca

SEQ ID NO: 336634 - DNA, 75 bp, synthetic construct
  source 1..75: mol_type = other DNA
ccgagatccgttgatcttcctgcatccgccagaggcgggatgcgaagaatgcgatgccgctcgccagtcgattgg

SEQ ID NO: 336635 - DNA, 75 bp, synthetic construct
  source 1..75: mol_type = other DNA
ggatcacggtggaaagcaccattgagcttataagcattgaaagtatcaagcgatgtgtcgcagcaaatatcggag

SEQ ID NO: 336636 - DNA, 75 bp, synthetic construct
  source 1..75: mol_type = other DNA
ggatcacggtggaaaacaccattgagcttataagtatcgaaagcatcaagcgttgtgtcgcggcaaatatcgggg

SEQ ID NO: 336637 - DNA, 75 bp, synthetic construct
  source 1..75: mol_type = other DNA
ggatcacggtggaaaacaccattgagctgttaagcattgaaagtatcaaacgttgtgtcgcggcgaatatcggtg

SEQ ID NO: 336638 - DNA, 75 bp, synthetic construct
  source 1..75: mol_type = other DNA
tgtggcgttagatctccaccagcgtgcgctgcaacaggggctagcgtcacattttgtctacggttacggcaaagg

SEQ ID NO: 336639 - DNA, 75 bp, synthetic construct
  source 1..75: mol_type = other DNA
ttattatcaacgaaccgcaatgtgtcttccggcagatatttgagagcacgctgcgtcagcggcggatcacggtgg

SEQ ID NO: 336640 - DNA, 75 bp, synthetic construct
  source 1..75: mol_type = other DNA
tatcaaacgttgtgtcgcggcgaatatcggtgtcagttacttgccccgctttgcggtggaaaaagagcttgagag

SEQ ID NO: 336641 - DNA, 75 bp, synthetic construct
  source 1..75: mol_type = other DNA
ggaattctgatcgcaaccggtgaacgcaggaacgtccccaaacaagaatacatatcccgtgggtatttcaccctt

SEQ ID NO: 336642 - DNA, 75 bp, synthetic construct
  source 1..75: mol_type = other DNA
cggcaaaggtcagcagtggctgatgaagcgattgcttgatgctggtgtgctggtacctgtcgcggctacgcgcta

SEQ ID NO: 336643 - DNA, 75 bp, synthetic construct
  source 1..75: mol_type = other DNA
ccgattaaaagcgatcctggcttgttaaagagtgcaggggtgaacgggaacagaagatcattagcgattgattat

SEQ ID NO: 336644 - DNA, 75 bp, synthetic construct
  source 1..75: mol_type = other DNA
agaggtgctggcaaaatccggcggccatacggtggatgaggccgaggtgctcaccctggtacagcaaccgaaagc

SEQ ID NO: 336645 - DNA, 75 bp, synthetic construct
  source 1..75: mol_type = other DNA
ctggtgctggaggggtatttggcaaagtgctggtggaatcgggcgtcggtaaagcccttgccaacatgttacaaa

SEQ ID NO: 336646 - DNA, 75 bp, synthetic construct
  source 1..75: mol_type = other DNA
cttccttccgggtgacatgagcgagaagttcgctccgttctttcgtcccgtttatgacgtgctaaagaagcgttt

SEQ ID NO: 336647 - DNA, 75 bp, synthetic construct
  source 1..75: mol_type = other DNA
gcgctatcgattggcgtgccggtgattgccacccatagcgacgcggcgcgggaagtgttgcaaaaatccggcggt

SEQ ID NO: 336648 - DNA, 75 bp, synthetic construct
  source 1..75: mol_type = other DNA
cacgttggcgactttatcttcacctcgaaactggtggatggtcgcttcccggattaccgccgcgttctgccgaag

SEQ ID NO: 336649 - DNA, 75 bp, synthetic construct
  source 1..75: mol_type = other DNA
tccgggcgtagccgtttttcgctgtctaccctgccagcggcggatttcccgaacctcgatgactggcagagtgaa

SEQ ID NO: 336650 - DNA, 75 bp, synthetic construct
  source 1..75: mol_type = other DNA
accgtcgattactcaggcgtaacgggtttgcttgttcaggtagccagagagtcagacgacaggataacagcactg

SEQ ID NO: 336651 - DNA, 75 bp, synthetic construct
  source 1..75: mol_type = other DNA
ggctggatggtgatatcgcgggcattcccgccgcagtaaaacccgctcgccgtttctatgaactgatgcgccagc

SEQ ID NO: 336652 - DNA, 75 bp, synthetic construct
  source 1..75: mol_type = other DNA
tcagacgacagaataacagtactggaagaagaaaacgcagaattaaggcaaagattatctgcaattgaggcgacg

SEQ ID NO: 336653 - DNA, 75 bp, synthetic construct
  source 1..75: mol_type = other DNA
cgtatggtgtgcggggaagtaacgcgcttattaagtttgactgcacagacacattacaaatcaaatatgctaatc

SEQ ID NO: 336654 - DNA, 75 bp, synthetic construct
  source 1..75: mol_type = other DNA
caaacgaatcaaatacagcccggattatttcactttcggcgatgttcagcatgacaaagacacggtaaaagacct

SEQ ID NO: 336655 - DNA, 75 bp, synthetic construct
  source 1..75: mol_type = other DNA
agagtcagacgacagaataacagcactggaagaagaaaacgcagaattaagacaaagattatctgcaattgatgc

SEQ ID NO: 336656 - DNA, 75 bp, synthetic construct
  source 1..75: mol_type = other DNA
cgttagcaaattaaaaaacgatcaaggaagctacgcaacaaaatcttatgtagacaataaaacaacatggaatgg

SEQ ID NO: 336657 - DNA, 75 bp, synthetic construct
  source 1..75: mol_type = other DNA
ctgattgccattttgaaacagcacggttgccgcggcgtggttgggattggtggcgggaaaacgctggataccgcc

SEQ ID NO: 336658 - DNA, 75 bp, synthetic construct
  source 1..75: mol_type = other DNA
tacctgcgcgataaagtcggcaaactgggcgttgcgccgttaaccagtatgttcctgttcgggccgaaccagcca

SEQ ID NO: 336659 - DNA, 75 bp, synthetic construct
  source 1..75: mol_type = other DNA
tgttcctgttcgggccaaatcaaccgtctccggcaaccaactaccgcccggaattgcacgattctaacggcttat

SEQ ID NO: 336660 - DNA, 75 bp, synthetic construct
  source 1..75: mol_type = other DNA
ataaacttatgctttcaggcattattacagaaacaccattagcattacgtggtgatatgctatcaagtgcagggg

SEQ ID NO: 336661 - DNA, 75 bp, synthetic construct
  source 1..75: mol_type = other DNA
atagtcctgttattaaccgcctgccggacaagggaaatcacccgcgccacttggtcggagatcgatttcaccgcc

SEQ ID NO: 336662 - DNA, 75 bp, synthetic construct
  source 1..75: mol_type = other DNA
ttacgccagcctgccggatagcgtagtggaacaggttcgcgctgcgtggaagaccaatattaaagacagtagcgg

SEQ ID NO: 336663 - DNA, 75 bp, synthetic construct
  source 1..75: mol_type = other DNA
tgtctgatgaaaaattggctcaggaaggcctgttccagttcccgaccgtgattggcggcgtggtgctggcggtta

SEQ ID NO: 336664 - DNA, 75 bp, synthetic construct
  source 1..75: mol_type = other DNA
ggattatgctgaccgttcacgtggcggtacctcctcatccaggcccggtagccgccgcagggttactccatgcag

SEQ ID NO: 336665 - DNA, 75 bp, synthetic construct
  source 1..75: mol_type = other DNA
gtaaaaacgttcgccgggattcacaccaaaggagggaatatgtcggatgatatttcactggcaatggaaggtgcg

SEQ ID NO: 336666 - DNA, 75 bp, synthetic construct
  source 1..75: mol_type = other DNA
aattgctggatggggttgaggttgagtggaagatgttgggagaagttatccattccttaaaaacgggattgaacc

SEQ ID NO: 336667 - DNA, 75 bp, synthetic construct
  source 1..75: mol_type = other DNA
gctgtttctttgctgagtcatgatgatgtcaatgcccgtcaggcctggctggaaaaccagcaaatcacaccgcag

SEQ ID NO: 336668 - DNA, 75 bp, synthetic construct
  source 1..75: mol_type = other DNA
cagagagatatcgacctgcctgatatggcggtaggtatttacgactgggcactgattgtcgaccaccagcgccag

SEQ ID NO: 336669 - DNA, 75 bp, synthetic construct
  source 1..75: mol_type = other DNA
cagcattggctatttgagcttttgcggcaacatggataccagcattactatccgcacgctgactgccattaacgg

SEQ ID NO: 336670 - DNA, 75 bp, synthetic construct
  source 1..75: mol_type = other DNA
ttcagcgtctgccgggtgcaattggttacgttgaatatgcttacgctaagcagaacaacctggcgtacaccaaac

SEQ ID NO: 336671 - DNA, 75 bp, synthetic construct
  source 1..75: mol_type = other DNA
tcgcatcgctgggatcgctggttacgctgggcgcgcagtcgagtttatcgatgaaacaacgcgtaaaattgattt

SEQ ID NO: 336672 - DNA, 75 bp, synthetic construct
  source 1..75: mol_type = other DNA
gaatgacaagggcggcgtagatacagccgttgtatacacaggaaaacccggttcaatcagcatttatccatggtc

SEQ ID NO: 336673 - DNA, 75 bp, synthetic construct
  source 1..75: mol_type = other DNA
attgtcggctacattgcagccagaatgatcaataaacgtcagtacgcgctgtccgttgacgtgctggaacagatg

SEQ ID NO: 336674 - DNA, 75 bp, synthetic construct
  source 1..75: mol_type = other DNA
cagccacgcgcacaggcgatgcgtgccgccgttgagcaagcaaaaagctctcaaacaccctggacgcttgatcca

SEQ ID NO: 336675 - DNA, 75 bp, synthetic construct
  source 1..75: mol_type = other DNA
gctgattaacgttggcacactgacgcagccacgcgcacaggcgatgcgtgccgccatagaacaggcaacacgctc

SEQ ID NO: 336676 - DNA, 75 bp, synthetic construct
  source 1..75: mol_type = other DNA
atgcaagtcgacctgctgagtccggcgcaatcagcgcccgtgttacacctttttcaccaatattccccccttgtg

SEQ ID NO: 336677 - DNA, 75 bp, synthetic construct
  source 1..75: mol_type = other DNA
ctgccgttgagcaagcaaaaagctctcaaacaccctggacgcttgatccagtagcggtgggtgcgctcgattatc

SEQ ID NO: 336678 - DNA, 75 bp, synthetic construct
  source 1..75: mol_type = other DNA
gctaattaacgttggcacgctgacgcagccacgcgcacaggcaatgcgtgctgccgttgaacaggcaacacactc

SEQ ID NO: 336679 - DNA, 75 bp, synthetic construct
  source 1..75: mol_type = other DNA
agcgaagggccgggcagttttgtcccacatttccttgatgcgctctggcagctgacgcaggaggtgcaggcatga

SEQ ID NO: 336680 - DNA, 75 bp, synthetic construct
  source 1..75: mol_type = other DNA
acaccgcgaaactgtatgccagcggcaccaaacgcatcgcgcagaaagtgggcgaagaaggcgtagaaaccgcgc

SEQ ID NO: 336681 - DNA, 75 bp, synthetic construct
  source 1..75: mol_type = other DNA
atgttaacagaacaacaacgtcgcgaactggactgggaaaaaaccgacggactgatgccggtgattgtgcaacac

SEQ ID NO: 336682 - DNA, 75 bp, synthetic construct
  source 1..75: mol_type = other DNA
agctggactgggaaaaaaccgacggactgatgccagtcatcgtgcagcatgcggtttccggtgaagtattgatgc

SEQ ID NO: 336683 - DNA, 75 bp, synthetic construct
  source 1..75: mol_type = other DNA
agcgactgtggaccaaaggcgaaacgtcgggcaatttcctcaacgtagtgagcattgcgccggactgcgacaacg

SEQ ID NO: 336684 - DNA, 75 bp, synthetic construct
  source 1..75: mol_type = other DNA
accagcagctgcttcggcgacaccgctcaccagtggctgttcctgtatcaactggaacaactgctcgccgaacgc

SEQ ID NO: 336685 - DNA, 75 bp, synthetic construct
  source 1..75: mol_type = other DNA
agcattgcaccggactgcgacaacgacaccctgctggtgctggcgaatcccatcggcccaacctgccacaaaggc

SEQ ID NO: 336686 - DNA, 75 bp, synthetic construct
  source 1..75: mol_type = other DNA
ttgaattccctactccttttacttacaaagttatggggcaggcgttacctgagcttgttgatcaggtggttgaag

SEQ ID NO: 336687 - DNA, 75 bp, synthetic construct
  source 1..75: mol_type = other DNA
ctatcactatcaacgccactcatatcgagcaggttgaaacactgtatgaagaactgggcaaaatcgatattgtcc

SEQ ID NO: 336688 - DNA, 75 bp, synthetic construct
  source 1..75: mol_type = other DNA
gttatctggtcagcggattatctaataaagaaattgccgataagttattacttagcaataaaacagttagtgcgc

SEQ ID NO: 336689 - DNA, 75 bp, synthetic construct
  source 1..75: mol_type = other DNA
gtcctgagcgcactgaaacagaaacttcgccataacctggaagcgcgtcttgatgcagaagtggatgccattctg

SEQ ID NO: 336690 - DNA, 75 bp, synthetic construct
  source 1..75: mol_type = other DNA
ctgaaacagcaactccgccagaatcttgaggcgcgtcttgatgctgaagtggatgccattctggatgagctgctg

SEQ ID NO: 336691 - DNA, 75 bp, synthetic construct
  source 1..75: mol_type = other DNA
ggatgccattctggatgaactgctgggcgcaccggcagctccggagccggaaggcatcgcgggagaggggagtgc

SEQ ID NO: 336692 - DNA, 75 bp, synthetic construct
  source 1..75: mol_type = other DNA
ggaagtgttgcaaaaatccggcggtaaaaccgtcagcgaagaagacgtgctgcaactggtgcagttaagcaaacc

SEQ ID NO: 336693 - DNA, 75 bp, synthetic construct
  source 1..75: mol_type = other DNA
atgagcgcgctcaatcagatggatgcgctggtattcagttctcgcgtcgataactacccgctgattttgtgtgag

SEQ ID NO: 336694 - DNA, 75 bp, synthetic construct
  source 1..75: mol_type = other DNA
atcttaagagcgtggtgcgcttttgcgaaaaagtgaaaaaccacaaaccggatgtcactctggtctggacgttac

SEQ ID NO: 336695 - DNA, 75 bp, synthetic construct
  source 1..75: mol_type = other DNA
ccgcagagagcggtgaagttcagcctgaatcaccggtcgccgatgcgactgaacctcaacccgaatcggtcatga

SEQ ID NO: 336696 - DNA, 75 bp, synthetic construct
  source 1..75: mol_type = other DNA
ctgaaacagcaacttcgtcagaatcttgaggcgcgtcttgatgctgaagtggatgccattctggatgaactgctg

SEQ ID NO: 336697 - DNA, 75 bp, synthetic construct
  source 1..75: mol_type = other DNA
ccaaatatctccagggtcctgacgcttctaccttatttggtcaatacgctaaaaatctggcggacagctttttcg

SEQ ID NO: 336698 - DNA, 75 bp, synthetic construct
  source 1..75: mol_type = other DNA
gttttactgaaaatctgctgatgtacccgggaatggcgctgatggttgcctccgttatctggttttatctggccg

SEQ ID NO: 336699 - DNA, 75 bp, synthetic construct
  source 1..75: mol_type = other DNA
tacatcgcgcaaagaaacgccgaaaccgcgcaggcggcattttcaggtctgcagaatattcgtggacgttaccat

SEQ ID NO: 336700 - DNA, 75 bp, synthetic construct
  source 1..75: mol_type = other DNA
tgcatcgcgcaaagaaacgccgaaaccgcgcagcgggcattttcaggtctgcaaaatattcgtggacgttaccat

SEQ ID NO: 336701 - DNA, 75 bp, synthetic construct
  source 1..75: mol_type = other DNA
gagcgttagttggttatatgcttaatgctaataaaatcgcaaccgctgagataacaccagtttatgagataaagt

SEQ ID NO: 336702 - DNA, 75 bp, synthetic construct
  source 1..75: mol_type = other DNA
caagtcacaggtaaaagttactgctgaagaagtaaataaaattatggaggcagcagacatcagtcgaccagatgc

SEQ ID NO: 336703 - DNA, 75 bp, synthetic construct
  source 1..75: mol_type = other DNA
atggcagcggatacagttgaacatcatcaggacccgcagccgctggatgacaagtcacaggtaaaagttactgct

SEQ ID NO: 336704 - DNA, 75 bp, synthetic construct
  source 1..75: mol_type = other DNA
ggaaccggatacaactgaacatcatccggacacgcagccgctggatgctcagccgcaggtgaattctgttgatgc

SEQ ID NO: 336705 - DNA, 75 bp, synthetic construct
  source 1..75: mol_type = other DNA
tggcgcgtggtggcacattttctggtgtcgtttattgtcggtgtgctgggagcgcgtgtgctgtcagcctggatt

SEQ ID NO: 336706 - DNA, 75 bp, synthetic construct
  source 1..75: mol_type = other DNA
attctgtcgttcatccaccagcaggatattgcatcactggtgtccggcctgttctcgcgcctgcgtggcggagga

SEQ ID NO: 336707 - DNA, 75 bp, synthetic construct
  source 1..75: mol_type = other DNA
gagctgtggcagtcaccatcggtggtgccagtgtgtttggtcttctcaccaataccgatttcggggtcgtggtgg

SEQ ID NO: 336708 - DNA, 75 bp, synthetic construct
  source 1..75: mol_type = other DNA
agccagaaaataattaatgagtcagctcatgaagccattgagattttgaaaaacgatggtgtcatcacaggtggc

SEQ ID NO: 336709 - DNA, 75 bp, synthetic construct
  source 1..75: mol_type = other DNA
cgcagcaacaataatggcgcaacccttgccgccatgctggaggcgacttctctcgccgtccagcctgatttacgt

SEQ ID NO: 336710 - DNA, 75 bp, synthetic construct
  source 1..75: mol_type = other DNA
attcctgtggattctaattccagcggagcgttagttggttatatgcttaatgccaataaaattgcaaccgctgag

SEQ ID NO: 336711 - DNA, 75 bp, synthetic construct
  source 1..75: mol_type = other DNA
accgggtccggtggtcctgcattttcatgtgctgcacagctactggttgaatcttaagagcgtggtgcgcttttg

SEQ ID NO: 336712 - DNA, 75 bp, synthetic construct
  source 1..75: mol_type = other DNA
agcagagctgtttggctatgaggaaggggcgtttaccggctcgcgacgcggaggtcgcgccgggctgtttgaaat

SEQ ID NO: 336713 - DNA, 75 bp, synthetic construct
  source 1..75: mol_type = other DNA
gacgcgcatgtcgttacgccataacactcacgatgccacccgcaacgccctgcgtactcgttacgtgctgggcga

SEQ ID NO: 336714 - DNA, 75 bp, synthetic construct
  source 1..75: mol_type = other DNA
tcgtcacctatcaggaaactatcccggcgctggtggcttttcaaaaaacgtttcatttgcgcctcgaccaacgct

SEQ ID NO: 336715 - DNA, 75 bp, synthetic construct
  source 1..75: mol_type = other DNA
tatgcttggtcaatcaccacagatggaacaagtgcggcaaaccattttgctctatgcccgctccagtgcggcggt

SEQ ID NO: 336716 - DNA, 75 bp, synthetic construct
  source 1..75: mol_type = other DNA
tgcgtactcgttacgttctgagcgatatgcttggtcaatcaccacagatggaacaagtgcggcaaaccattttgc

SEQ ID NO: 336717 - DNA, 75 bp, synthetic construct
  source 1..75: mol_type = other DNA
tgtgttacaggcactggcaaaagccggaaaactcacctcatcgattggcgtcgttacttatcaggaaaccattcc

SEQ ID NO: 336718 - DNA, 75 bp, synthetic construct
  source 1..75: mol_type = other DNA
atgacggaactggaaaggcatttgctgaacgccttagagcatttgcaacaggactatacgcagcgactgaaagac

SEQ ID NO: 336719 - DNA, 75 bp, synthetic construct
  source 1..75: mol_type = other DNA
agtatgacagagctggaaatgcacttactgaacgccttagagcaattgcagcaggactatacgcagcggctgaaa

SEQ ID NO: 336720 - DNA, 75 bp, synthetic construct
  source 1..75: mol_type = other DNA
tcgatcgcatttactactacaaagcagcgatcgacacctgtgaaggggtgatcaactatgcgcatcgtattgccg

SEQ ID NO: 336721 - DNA, 75 bp, synthetic construct
  source 1..75: mol_type = other DNA
gctacattaccgaagaagacgcccgcgggcagattaacgagctaaaagctaacggcaccgaagcggtggtcggtg

SEQ ID NO: 336722 - DNA, 75 bp, synthetic construct
  source 1..75: mol_type = other DNA
tattcgtgaactgcgcaatatgatggaacgactggcgctgtttttaagtgtggaaccgacgccggatttaacgcc

SEQ ID NO: 336723 - DNA, 75 bp, synthetic construct
  source 1..75: mol_type = other DNA
aatctggttttgagttgttgcttacctctatccggcatcaggaaaatctgtgcccaaatgggtaatccgcacaca

SEQ ID NO: 336724 - DNA, 75 bp, synthetic construct
  source 1..75: mol_type = other DNA
gcctatatccgcaagaaactggtcagcgaacattgcgacgccatcatcgctgctggctctaacggcgcgtatctg

SEQ ID NO: 336725 - DNA, 75 bp, synthetic construct
  source 1..75: mol_type = other DNA
atgagacccgatttgaatactttacccggagattccggctgcagcgtctggttctatgacggaatgtctcaaccg

SEQ ID NO: 336726 - DNA, 75 bp, synthetic construct
  source 1..75: mol_type = other DNA
atgcctgtgacatttgaagaagttcagcaacataaaaagtttcatggttttgatgatctggaaaccacgacagca

SEQ ID NO: 336727 - DNA, 75 bp, synthetic construct
  source 1..75: mol_type = other DNA
gaagatgaaatggttgggatcgtccggttcggtaaagaggactgcgtacgttcggcactttgccaacgtacgctg

SEQ ID NO: 336728 - DNA, 75 bp, synthetic construct
  source 1..75: mol_type = other DNA
acggtccagggcgttgccggattatcaataatggcattgatatggcaaccgaagcgattctggcggacttgcctc

SEQ ID NO: 336729 - DNA, 75 bp, synthetic construct
  source 1..75: mol_type = other DNA
gcgaagccgggtgcggaaaaacctggatcagcgcagcaaaagcggcagaggccctgatacataaggatgtcgaca

SEQ ID NO: 336730 - DNA, 75 bp, synthetic construct
  source 1..75: mol_type = other DNA
tatgcagtactgcctgcgaccggaaatagggaaggtggaaattgcgccgttcgcctatatgcgtggacgtacctt

SEQ ID NO: 336731 - DNA, 75 bp, synthetic construct
  source 1..75: mol_type = other DNA
agacaaatctctctatatgaccaccgttactgccgacaacattctggaaggcaagttgattggtgactggctggt

SEQ ID NO: 336732 - DNA, 75 bp, synthetic construct
  source 1..75: mol_type = other DNA
ttggggcaagtgttgccatcgaccgtaaaaaaggctttgccgaagccattaagaatgcgccaaatatcaaaatca

SEQ ID NO: 336733 - DNA, 75 bp, synthetic construct
  source 1..75: mol_type = other DNA
actgacgccgaacatggcaggccccgcttttgacgcgctggagaaatacaaaaaagacggcaccatgcctgaaaa

SEQ ID NO: 336734 - DNA, 75 bp, synthetic construct
  source 1..75: mol_type = other DNA
ccttttactccatttcaacacgttgagaaaaaagcgctgcctgactggctgagagcattccacactgacgtttcg

SEQ ID NO: 336735 - DNA, 75 bp, synthetic construct
  source 1..75: mol_type = other DNA
ttccattgacggtgtaccggacatctacaaagcgatgattgatggcgaagcgaacgccagtgttgaactgacgcc

SEQ ID NO: 336736 - DNA, 75 bp, synthetic construct
  source 1..75: mol_type = other DNA
taaaaaaggctttgccgaagctattaagaatgcgccaaacatcaaaatcatccgctcacagtccggtgacttcac

SEQ ID NO: 336737 - DNA, 75 bp, synthetic construct
  source 1..75: mol_type = other DNA
tgggaaacacctgtcaactacagcatcgatgcccctctggttttcaccggcagtttccgccaggcgctggagcag

SEQ ID NO: 336738 - DNA, 75 bp, synthetic construct
  source 1..75: mol_type = other DNA
acggcagtggaaaatggaaaaggggaccacgctgaaggacggactggcccgctggacgtcgtccgaaaaatgccc

SEQ ID NO: 336739 - DNA, 75 bp, synthetic construct
  source 1..75: mol_type = other DNA
gttgagcacaatcctgaaaactggcaaattgccgtctccgcaggtggtcgatacgggccctgatgtggaagatga

SEQ ID NO: 336740 - DNA, 75 bp, synthetic construct
  source 1..75: mol_type = other DNA
ctcttcgcactctacaccccggtggaaaaaccgctgtatgcccggaccagcacagcacaatgtctgctgcgggtg

SEQ ID NO: 336741 - DNA, 75 bp, synthetic construct
  source 1..75: mol_type = other DNA
cgttcaggggcagcaccgcaacaccggcaggcccgacacaggtgacacctgccgtcagcgcttcccggcctcaga

SEQ ID NO: 336742 - DNA, 75 bp, synthetic construct
  source 1..75: mol_type = other DNA
ctggttatgaccggtaaacccggtttctcatccgtcgtttatttacgtgaggcacgtcagcgcaccgtcagcgac

SEQ ID NO: 336743 - DNA, 75 bp, synthetic construct
  source 1..75: mol_type = other DNA
aacagcactggcgcgctgactcccgcatggggtggattgaagatggcttacaagacttacgtcgatttttgattg

SEQ ID NO: 336744 - DNA, 75 bp, synthetic construct
  source 1..75: mol_type = other DNA
atcagaaatcttccatcagaaacacaagggtggctttcccgatatagaaaaaataaaactggaatggatccgctg

SEQ ID NO: 336745 - DNA, 75 bp, synthetic construct
  source 1..75: mol_type = other DNA
tgggccgtcaggctggcaggcggcgcagtggaaagctgaaaaagaacggctgatgtacggtgagcgcaaagagat

SEQ ID NO: 336746 - DNA, 75 bp, synthetic construct
  source 1..75: mol_type = other DNA
gtcgtttaccagcaaaaaggaagcagatgcttatgacaaaatgcttgatacggcggatctgcttgacacctggct

SEQ ID NO: 336747 - DNA, 75 bp, synthetic construct
  source 1..75: mol_type = other DNA
aaactgattgaagtcataaagcgcgttgatgtcatcggcacagagaagcagcaaattattcatctggaatatgca

SEQ ID NO: 336748 - DNA, 75 bp, synthetic construct
  source 1..75: mol_type = other DNA
actggacaatggttttctgaaagtggtgcgctcagctaatgtaaaaacatcgccagggatgattgctgacagttc

SEQ ID NO: 336749 - DNA, 75 bp, synthetic construct
  source 1..75: mol_type = other DNA
gtagccgtaagatgacggaaatcgcgcaaaagctgaaggaaagtaacgagccgatactctatctggcagaacgat

SEQ ID NO: 336750 - DNA, 75 bp, synthetic construct
  source 1..75: mol_type = other DNA
ctggagaaatttaaaggcgataaaacagcagcggcgaattatttaggcataagccggacgaccttctggcggcgg

SEQ ID NO: 336751 - DNA, 75 bp, synthetic construct
  source 1..75: mol_type = other DNA
tagcgccactcactgcaatctggaagaagatatgcagcaagggcagtttcgccgtgacctgttttatcggctgag

SEQ ID NO: 336752 - DNA, 75 bp, synthetic construct
  source 1..75: mol_type = other DNA
ggaactggcgacaatttgccaacagcttgcacagcgcttacagcgccctgtacgcctgcttgaggtgggaacccg

SEQ ID NO: 336753 - DNA, 75 bp, synthetic construct
  source 1..75: mol_type = other DNA
ttaccattcatagcattttggactggatcgaggacaacctggaatcgccactgtcactggagaaagtgtcagagc

SEQ ID NO: 336754 - DNA, 75 bp, synthetic construct
  source 1..75: mol_type = other DNA
aaaaacatctacatgaatcatcctgcacaccaatggtacgtctggaaaatttcatcaatgatgcctgtgagggga

SEQ ID NO: 336755 - DNA, 75 bp, synthetic construct
  source 1..75: mol_type = other DNA
tgcgttccaaactatattgttctactgagcctgtgtacgacttctggagctatttcaaaactgatcctacccacg

SEQ ID NO: 336756 - DNA, 75 bp, synthetic construct
  source 1..75: mol_type = other DNA
agattggcgcggtgcttgaggtcggtgaatcgcgggttagtcagttacacagccaggctattaaacggttacgca

SEQ ID NO: 336757 - DNA, 75 bp, synthetic construct
  source 1..75: mol_type = other DNA
agattggtgcagtgctggaggtcggggaatcgcgggtcagtcagttacacagccaggctattaaacggttacgca

SEQ ID NO: 336758 - DNA, 75 bp, synthetic construct
  source 1..75: mol_type = other DNA
aaagcatcagtaagttcatcggttacctcacttcgtcgaccaatgtttttaaaattcccaatacctgtaccacct

SEQ ID NO: 336759 - DNA, 75 bp, synthetic construct
  source 1..75: mol_type = other DNA
tggcggagctggagcacggctaccgctacccgcaacagctgcttccgccgctgcccgtcaccttcagggattatc

SEQ ID NO: 336760 - DNA, 75 bp, synthetic construct
  source 1..75: mol_type = other DNA
ggtactcaaccccgaagtgtggccggtattcgatctccaggtcggatacgtggacgggatgcctgcccgcctgtg

SEQ ID NO: 336761 - DNA, 75 bp, synthetic construct
  source 1..75: mol_type = other DNA
ggcgacccgtctgaccgggcaacttcatcaggcaggttatgaagcgcaattaagcgacctgtttaatcatccccg

SEQ ID NO: 336762 - DNA, 75 bp, synthetic construct
  source 1..75: mol_type = other DNA
tggtctggacatggataaacaggactcttccgactatgaagaggcccgtaaacgcgtgccgcagagccagcagca

SEQ ID NO: 336763 - DNA, 75 bp, synthetic construct
  source 1..75: mol_type = other DNA
gtgcaacaaatgcgtagatcattggctaagggccggagccgccgcaaagccgaacgaaatcgaaaatcgaaaata

SEQ ID NO: 336764 - DNA, 75 bp, synthetic construct
  source 1..75: mol_type = other DNA
aaggctatggagcggaagaaacgccgtgatagccagagggaagaacgcaaccggaagcgtaaacagttaaatccg

SEQ ID NO: 336765 - DNA, 75 bp, synthetic construct
  source 1..75: mol_type = other DNA
tatctgacgggaagcacattaactggaggtctggtgctctctctggcttcaattgcctcgaaaagtattattcct

SEQ ID NO: 336766 - DNA, 75 bp, synthetic construct
  source 1..75: mol_type = other DNA
gtaaagatcgggtgatcatgcactgccatgccaccaacctcatcgccctcacctatgtgctggaaaacgacacgg

SEQ ID NO: 336767 - DNA, 75 bp, synthetic construct
  source 1..75: mol_type = other DNA
tgccacctatgttggctttaccggcacaccgattgacgcgacgctcgatgtcttcggtgaggtgatcgacagtta

SEQ ID NO: 336768 - DNA, 75 bp, synthetic construct
  source 1..75: mol_type = other DNA
tgcaaacgctatcgccgggatattccgcaactgtttatctacaacgcgctctgcattattagcgatggagttaat

SEQ ID NO: 336769 - DNA, 75 bp, synthetic construct
  source 1..75: mol_type = other DNA
tggtaaatacagcctttactgtgctgttattgttaagaaagttgacgcgaaaacccgcggtaaagtcggcatcaa

SEQ ID NO: 336770 - DNA, 75 bp, synthetic construct
  source 1..75: mol_type = other DNA
tgaaaccggcgaaatccactacggtcgcgttccggcgggatctgtggttgtttcaggtaatctgccgtcgaaaga

SEQ ID NO: 336771 - DNA, 75 bp, synthetic construct
  source 1..75: mol_type = other DNA
tatcaggaagagctgaatctcaaagagattggtgcggtgctggaggtcggggaatcgcgggtcagtcagttacac

SEQ ID NO: 336772 - DNA, 75 bp, synthetic construct
  source 1..75: mol_type = other DNA
ttgtggcaatgatgcagtttattgcggatgaggatactctccagggactggtattctggacaatgggcagtctgg

SEQ ID NO: 336773 - DNA, 75 bp, synthetic construct
  source 1..75: mol_type = other DNA
agatgctatagaacatggcaaatatattttttatgcacgtggacgtgagccattaaagttaaatgtatttgattt

SEQ ID NO: 336774 - DNA, 75 bp, synthetic construct
  source 1..75: mol_type = other DNA
ctctttctggctgctggacagcgaaaaaggcgaagcacgttgcatcgttgcaaaagcaggttttgcagaagacga

SEQ ID NO: 336775 - DNA, 75 bp, synthetic construct
  source 1..75: mol_type = other DNA
ttcgatgggcggcatgaaacagaccatcagccgtgaagagttgatagccctgggcaaacgtttcggcgtcacccc

SEQ ID NO: 336776 - DNA, 75 bp, synthetic construct
  source 1..75: mol_type = other DNA
cgagtcttccgggccgcttatcctgatggattatcgtgttcctgacgagcatgaggctcaccttagcgatagccc

SEQ ID NO: 336777 - DNA, 75 bp, synthetic construct
  source 1..75: mol_type = other DNA
atgcactatcgcaatgtggtttgtttattgtcttgttcgttgttcttatcgtcggcatggggatgtcggcttgat

SEQ ID NO: 336778 - DNA, 75 bp, synthetic construct
  source 1..75: mol_type = other DNA
attttgccgtcgataaaaacagcatttattacaaaggccaacggacagatgaaaatggcggcaagcaacgcgtcg

SEQ ID NO: 336779 - DNA, 75 bp, synthetic construct
  source 1..75: mol_type = other DNA
gaagaaggtgaaggtcagccccccatagacgatgatttattatatctatgtggtcacggtggagatcatattttc

SEQ ID NO: 336780 - DNA, 75 bp, synthetic construct
  source 1..75: mol_type = other DNA
atggcaatattaggtttaggcacggatatcgtggagatcgcccgtattgaagcggtgatcgcccgatccggcgat

SEQ ID NO: 336781 - DNA, 75 bp, synthetic construct
  source 1..75: mol_type = other DNA
ttggtgaagacaccctggaaaccctaactcttgactcttctgcacctttcctgaaccaacgaattaacgccggga

SEQ ID NO: 336782 - DNA, 75 bp, synthetic construct
  source 1..75: mol_type = other DNA
acggtaataactggtttgttgagggacagaaagccgaagcggtgaagtcgggacggtcagctgcggtgtttgaga

SEQ ID NO: 336783 - DNA, 75 bp, synthetic construct
  source 1..75: mol_type = other DNA
tggctgaaggatctttctcatacgggcaggcggttgctgtcataaccgcttaccgcaatgtgtttatccaggata

SEQ ID NO: 336784 - DNA, 75 bp, synthetic construct
  source 1..75: mol_type = other DNA
tcgatcccgctgccaatttaggcgtcgtaaaagtcgacagcgacggtgcgggctaccacattctctgggggctaa

SEQ ID NO: 336785 - DNA, 75 bp, synthetic construct
  source 1..75: mol_type = other DNA
gtggggatgctcgctcggtgaacctgatcataatatttaccagaaacagggaaaaggcgtggtatacctgcgccc

SEQ ID NO: 336786 - DNA, 75 bp, synthetic construct
  source 1..75: mol_type = other DNA
cctaaaatcagaaattttaaaaagattaaaaaatgaatctgttaacatcgataatttaatcaacggacttactaa

SEQ ID NO: 336787 - DNA, 75 bp, synthetic construct
  source 1..75: mol_type = other DNA
aaaaaaacgcttcaatcatctgctttctgtggcagagaaactacccgttaaggcgctaccagatctcattcgcgc

SEQ ID NO: 336788 - DNA, 75 bp, synthetic construct
  source 1..75: mol_type = other DNA
tggctgatggaaggcgaaagctgcggcgttggcgattatcaaagtaccatggcgcaggtatgtgctgcgcaaatc

SEQ ID NO: 336789 - DNA, 75 bp, synthetic construct
  source 1..75: mol_type = other DNA
gcggcatgttaaaaggctttatcgacctggtgttccgccacgaagggcgttattacctgctcgactataaatcca

SEQ ID NO: 336790 - DNA, 75 bp, synthetic construct
  source 1..75: mol_type = other DNA
atgctgcgacccgaacatggcagtcgcagcaaaggcctcttagtgacggaaatcaatcaccatgcggccacggat

SEQ ID NO: 336791 - DNA, 75 bp, synthetic construct
  source 1..75: mol_type = other DNA
cgcaagatgcggcagggcttcgcacctgtattgaagcgttatgcgatgatgatattgcctggcaaacggcacaaa

SEQ ID NO: 336792 - DNA, 75 bp, synthetic construct
  source 1..75: mol_type = other DNA
aaaatactctgcgtagcgcgctggcaacgtcaatgatggggctgaacgcgctggatatcgaaatgctgaataatg

SEQ ID NO: 336793 - DNA, 75 bp, synthetic construct
  source 1..75: mol_type = other DNA
ccgcaacaaggaatttacacgacccgacccgatgctgggttgattgccctgatggatgagatgtttgccggtatg

SEQ ID NO: 336794 - DNA, 75 bp, synthetic construct
  source 1..75: mol_type = other DNA
cagaacaacctggcgtacaccaaactgatctccgctgatggtaaacctgttttgccgaccgaagaaaacttcgct

SEQ ID NO: 336795 - DNA, 75 bp, synthetic construct
  source 1..75: mol_type = other DNA
aggtctgttccagttcccgaccgtgattggcggcgtggtgctggcggttaacattccagggttgaagtctggcga

SEQ ID NO: 336796 - DNA, 75 bp, synthetic construct
  source 1..75: mol_type = other DNA
acctgccgggtctgaaatcaggcgagctggtgctggatggtaaaacccttggtgacatctacctcggcaaaatca

SEQ ID NO: 336797 - DNA, 75 bp, synthetic construct
  source 1..75: mol_type = other DNA
gaaatagttttattaccaatgctcgttagtcacattaaacaaattaagctagcctacctgtcagtaatattgatt

SEQ ID NO: 336798 - DNA, 75 bp, synthetic construct
  source 1..75: mol_type = other DNA
tcaacggaactatctcaaacgaaaccacccttctatgcaacgctcgcgatctgcatgcctttctcgaagtaggta

SEQ ID NO: 336799 - DNA, 75 bp, synthetic construct
  source 1..75: mol_type = other DNA
gttgccgtcacgcaaaaaaataccggtaaaggtggtgcgctgatgaatggcctcaattatgccacctgcgactag

SEQ ID NO: 336800 - DNA, 75 bp, synthetic construct
  source 1..75: mol_type = other DNA
cacggtatcgctcaggatctgatgccacggctggatgttgatgccgcaggcgtggtcagcgtcgttgaagaaccg

SEQ ID NO: 336801 - DNA, 75 bp, synthetic construct
  source 1..75: mol_type = other DNA
acagttcgaccattctttaagtcgagaatataatgtagtgcatcatcccataaaattttacaagccaatagataa

SEQ ID NO: 336802 - DNA, 75 bp, synthetic construct
  source 1..75: mol_type = other DNA
ttattcacggttgaagaagtacggattaaggttgagttctttatgtcagttgacgatggagaactttttcctata

SEQ ID NO: 336803 - DNA, 75 bp, synthetic construct
  source 1..75: mol_type = other DNA
ccgtgaggaagcgaaagagattttaatagaattttaccgtgataatggctatagagacgttcacaacttctttaa

SEQ ID NO: 336804 - DNA, 75 bp, synthetic construct
  source 1..75: mol_type = other DNA
atggaaattattgatgagctggaaccccagcgacgcaacgcctggtgcggtagcattggctatttgagcttttgc

SEQ ID NO: 336805 - DNA, 75 bp, synthetic construct
  source 1..75: mol_type = other DNA
gttgccgtagccggttcggtaaaagtaccagagctgttcgtggtggaacccttccctgccgtgcatcatctggtc

SEQ ID NO: 336806 - DNA, 75 bp, synthetic construct
  source 1..75: mol_type = other DNA
atgtcaatgcccgtcgggcctggctggaaagccagcaattctcgccgcaggaagatttcacgctcacttccgact

SEQ ID NO: 336807 - DNA, 75 bp, synthetic construct
  source 1..75: mol_type = other DNA
gttgctgcgcgatattaatcgttatctgcaaggcgaagcgccggttatcaaagcaccgccgcccgatgatgaaac

SEQ ID NO: 336808 - DNA, 75 bp, synthetic construct
  source 1..75: mol_type = other DNA
tggcattgcagtctcggcgttgcaccgctggtgcgccgtcgtggcgataaaaaaggtgacaccgacgtccaccaa

SEQ ID NO: 336809 - DNA, 75 bp, synthetic construct
  source 1..75: mol_type = other DNA
gcaaacggcacaaaccggtgataatcagccctggcaggttaatgatgtttctacagcagaactgaatgcgaagac

SEQ ID NO: 336810 - DNA, 75 bp, synthetic construct
  source 1..75: mol_type = other DNA
ttgatatcaagcgttattatcgagtggatgacggtccgatctatcggttgcagtggacaccgatcagggaagtgc

SEQ ID NO: 336811 - DNA, 75 bp, synthetic construct
  source 1..75: mol_type = other DNA
actacacaacatctggctttagtcgtgaggaagcgaaagagattttaatagagttttaccgcgataatggttata

SEQ ID NO: 336812 - DNA, 75 bp, synthetic construct
  source 1..75: mol_type = other DNA
caagatcagcgcctgggcagaagaagagaccaacagctatcagttgccggagtcgctggaaaaattctctcagcg

SEQ ID NO: 336813 - DNA, 75 bp, synthetic construct
  source 1..75: mol_type = other DNA
tgtctgacgaaaaactggctcaggaaggcctgttccagttcccgaccgtgattggcggcgtggtgctggcggtta

SEQ ID NO: 336814 - DNA, 75 bp, synthetic construct
  source 1..75: mol_type = other DNA
ttacccgccagacggcaggtgaatttgccgagcagtttaatctgcgcctgtttccgcacacctgggtgacggata

SEQ ID NO: 336815 - DNA, 75 bp, synthetic construct
  source 1..75: mol_type = other DNA
tcgatgccgaagcccgtgtggtgaaaagccagaataatcagtggcaatacgacaagttagtgctggcaaccggtg

SEQ ID NO: 336816 - DNA, 75 bp, synthetic construct
  source 1..75: mol_type = other DNA
tatcgccgggccggatggcggcagtgaagagaagcctgtcggcaccgtctggtttgcttttgccactgcccgcgg

SEQ ID NO: 336817 - DNA, 75 bp, synthetic construct
  source 1..75: mol_type = other DNA
acagcgggtgcatctggcggacggcctggggccagataatatgttgagtgaagaggcaatgacgcgcggtttgaa

SEQ ID NO: 336818 - DNA, 75 bp, synthetic construct
  source 1..75: mol_type = other DNA
tggaaaaaacagattctggcattctggcattctggcaacgctggaccgccagcgcagtatcgaagtggatgcggt

SEQ ID NO: 336819 - DNA, 75 bp, synthetic construct
  source 1..75: mol_type = other DNA
aagccagaataatcagtggcaatacgacaagttagtgctggcaactggtgccagtgcctttgtcccgccagtgcc

SEQ ID NO: 336820 - DNA, 75 bp, synthetic construct
  source 1..75: mol_type = other DNA
gcaaaacccgccagacaaacctcccgtcgatgtcgcctcgttcaaggcgtggggtgattttgccgcagataaaca

SEQ ID NO: 336821 - DNA, 75 bp, synthetic construct
  source 1..75: mol_type = other DNA
gcaaaagctgaaagagagcaacgaaccgattctctatctggcagaacgttatggttttgagtcacagcaaacgct

SEQ ID NO: 336822 - DNA, 75 bp, synthetic construct
  source 1..75: mol_type = other DNA
gatcgaagataacctggaatcgccactgtcactggaaaaagtgtcagaacgttccggttactccaaatggcacct

SEQ ID NO: 336823 - DNA, 75 bp, synthetic construct
  source 1..75: mol_type = other DNA
tgccggtagctccgcctggtttgaacgcggatttgtcacctacagtaacgaagccaaagcgcagatgatcggcgt

SEQ ID NO: 336824 - DNA, 75 bp, synthetic construct
  source 1..75: mol_type = other DNA
ggtgaaattccgttccccctggaaacctgactttttggggctgatattacgtgacgctaatttcttatatgtcga

SEQ ID NO: 336825 - DNA, 75 bp, synthetic construct
  source 1..75: mol_type = other DNA
acccggactcgatccggagcagtttcaacccatcagtgatgctgtcgcccagtatcaggactcgctttataccat

SEQ ID NO: 336826 - DNA, 75 bp, synthetic construct
  source 1..75: mol_type = other DNA
cggcaccattaaagccgcccatgaagtgttgatggagatgggcgagaaagacggaataattaccccggaacgact

SEQ ID NO: 336827 - DNA, 75 bp, synthetic construct
  source 1..75: mol_type = other DNA
tatgccacggacccggcgggtaaccgcctgcccgacccggagctgcacccggacagcaccctcagcatgtggccg

SEQ ID NO: 336828 - DNA, 75 bp, synthetic construct
  source 1..75: mol_type = other DNA
acaaagacagcaagtgattacctgccacagacaaattggccaacaactcaattaccaccaggatatacttgtgca

SEQ ID NO: 336829 - DNA, 75 bp, synthetic construct
  source 1..75: mol_type = other DNA
gaaagaaaaggatcatatccattcaatagcccttgccctaatggtactgagaaagtatcagcttatcatactcat

SEQ ID NO: 336830 - DNA, 75 bp, synthetic construct
  source 1..75: mol_type = other DNA
tgaagaaatcctcaaacgcaaggctatcattgaagacgcgggcctggtgtggtctgtcgtggaaagcgtgccaat

SEQ ID NO: 336831 - DNA, 75 bp, synthetic construct
  source 1..75: mol_type = other DNA
cgaagagatcctcaaacgcaaggctatcgttgaagaagcgggtctggtgtggtccgtcgtggaaagcgtgcctat

SEQ ID NO: 336832 - DNA, 75 bp, synthetic construct
  source 1..75: mol_type = other DNA
cgccacgcggcgaactggcggtggtgtatgaccgtagtggcaaacaggtgcgcagctttacttacgatgataaat

SEQ ID NO: 336833 - DNA, 75 bp, synthetic construct
  source 1..75: mol_type = other DNA
tacgctatcaccgtaaagcgattaagctcgacgatttgccgcgctttaccttgtttaaaaagaaacagtttctgc

SEQ ID NO: 336834 - DNA, 75 bp, synthetic construct
  source 1..75: mol_type = other DNA
caccgccagtagtctggctaaccagtatcatatcgacagtgaacaggcacgacgggtgctggataccactatgca

SEQ ID NO: 336835 - DNA, 75 bp, synthetic construct
  source 1..75: mol_type = other DNA
tcttcgttcctggactggcgattttatgcggtgtgtttgatgctttagccatccgtgaactgcgcctttctgacg

SEQ ID NO: 336836 - DNA, 75 bp, synthetic construct
  source 1..75: mol_type = other DNA
tccgatatcagacatcgaccccctgggtttatctatgtgggaggatgcaaaatcgggggcatgtactaatggtct

SEQ ID NO: 336837 - DNA, 75 bp, synthetic construct
  source 1..75: mol_type = other DNA
ttaatgaaatagttggtgagatatttgggagactctacgaatctttccccgtcaaaattgatataaaggcagttg

SEQ ID NO: 336838 - DNA, 75 bp, synthetic construct
  source 1..75: mol_type = other DNA
atcaaccatagcggattgcatcgccattcggcctatatcctgcaaaacagcgacttaccgggttttaatcaggaa

SEQ ID NO: 336839 - DNA, 75 bp, synthetic construct
  source 1..75: mol_type = other DNA
atgcccccacgaaccccaaaagcctgccgcgttcgcggttgccgcaataccactactgacccgtcaggctactgc

SEQ ID NO: 336840 - DNA, 75 bp, synthetic construct
  source 1..75: mol_type = other DNA
aggccgttaatgatatttttgatggcaaggggattccacgagttgatagtgcgggaaatcaaaaaatatttcagg

SEQ ID NO: 336841 - DNA, 75 bp, synthetic construct
  source 1..75: mol_type = other DNA
tgatgcagactgcaatctgcagagcctgtgctggccgtgtcataagacgaagacggcccgtgaacgactgaagtg

SEQ ID NO: 336842 - DNA, 75 bp, synthetic construct
  source 1..75: mol_type = other DNA
atgccaccacgaactcctaaagcctgccgggtccgagggtgcggcaaaacaactataaatccatctggctgctgt

SEQ ID NO: 336843 - DNA, 75 bp, synthetic construct
  source 1..75: mol_type = other DNA
atgcccccacgaaccccaaaagcctgccgcgttcgcggttgccgcaataccactactgacccgtcaggctattgt

SEQ ID NO: 336844 - DNA, 75 bp, synthetic construct
  source 1..75: mol_type = other DNA
gataaacctctatgcttatggacctaacccgttaagctggatcgatccgcttggtctaaaagtttgctcaattaa

SEQ ID NO: 336845 - DNA, 75 bp, synthetic construct
  source 1..75: mol_type = other DNA
gaaatttagcacccgaatgcaaaaaatcgatccagcgctgaatgtcacctctggcccacttataagccatgtgtt

SEQ ID NO: 336846 - DNA, 75 bp, synthetic construct
  source 1..75: mol_type = other DNA
agggctggcgggcgggctgaacctgtatgcttacgcgcctaatccagtaagctggatagatccgcttggtctgaa

SEQ ID NO: 336847 - DNA, 75 bp, synthetic construct
  source 1..75: mol_type = other DNA
aaacttcgctgttcagtactataccccaacagggagtgtagaagcaggttctgttttaggcagcgtgcagtacgc

SEQ ID NO: 336848 - DNA, 75 bp, synthetic construct
  source 1..75: mol_type = other DNA
gttgaagccagaactgtggaccacatcattccgaaagctcatggtggcacagatgcagacagtaacctgcagagt

SEQ ID NO: 336849 - DNA, 75 bp, synthetic construct
  source 1..75: mol_type = other DNA
gttatgtctgcgtgctggtgtggtgcgtgaggcgaaaactgttgaccacatcatccctaaagcgcatggcggcac

SEQ ID NO: 336850 - DNA, 75 bp, synthetic construct
  source 1..75: mol_type = other DNA
atgccaccacgaaccccaaaagcctgccgcgttcgcggctgcccccataccaccactgactcgtcaggctattgc

SEQ ID NO: 336851 - DNA, 75 bp, synthetic construct
  source 1..75: mol_type = other DNA
gaaagccacaaaagcgaaggctggacgcaatataagccaggtcagtcccgtcatcagcgcggttatggttcgaag

SEQ ID NO: 336852 - DNA, 75 bp, synthetic construct
  source 1..75: mol_type = other DNA
tgaagcgtgacaaaggcctgtgtcagttatgtctgcgtgctggtgtggtgcgtgaggcgaagaccgttgaccaca

SEQ ID NO: 336853 - DNA, 75 bp, synthetic construct
  source 1..75: mol_type = other DNA
atgcccccacgaatcccaaaagcctgccgtgttcgtggctgccgccataccaccactgactcgtcaggctactgc

SEQ ID NO: 336854 - DNA, 75 bp, synthetic construct
  source 1..75: mol_type = other DNA
aactataaatccatctggctgctgtgaacaacacaaaggcgaaggctggaagcaatacaaacctggacaatcccg

SEQ ID NO: 336855 - DNA, 75 bp, synthetic construct
  source 1..75: mol_type = other DNA
gaatgcttatgagtgttgctgtgggatgtttatcgtggtatgtcaccagaccgaaggaccaacagacaaaggccg

SEQ ID NO: 336856 - DNA, 75 bp, synthetic construct
  source 1..75: mol_type = other DNA
gccgtaagcgtggatgtgcaggaacaaccacagacagttctggttactgcgataaacatcgtggcgaaggatggg

SEQ ID NO: 336857 - DNA, 75 bp, synthetic construct
  source 1..75: mol_type = other DNA
tgatgcagacagtaatctgcagagtctgtgctggccgtgtcataaggcgaagacggcccgtgaacggttaaagtg

SEQ ID NO: 336858 - DNA, 75 bp, synthetic construct
  source 1..75: mol_type = other DNA
atgccaccacgaaccccaaaagcctgccgtgttcgcggctgccgcaataccacgactgatccgtcaggctactgc

SEQ ID NO: 336859 - DNA, 75 bp, synthetic construct
  source 1..75: mol_type = other DNA
atgccaccgcgaaccccaaaagcctgccgcgttcgcggctgccgccacaccaccactgacccgtcaggctattgc

SEQ ID NO: 336860 - DNA, 75 bp, synthetic construct
  source 1..75: mol_type = other DNA
tgatgccgaccgtaatctgcagagtctgtgctggccgtgtcataaggcgaagacggcccgtgaacggcttaagtg

SEQ ID NO: 336861 - DNA, 75 bp, synthetic construct
  source 1..75: mol_type = other DNA
gttatgtctgcgtgccggtgtggtgcgtgaagcgaaaaccgttgatcacatcatccctaaagcgcatggcggctc

SEQ ID NO: 336862 - DNA, 75 bp, synthetic construct
  source 1..75: mol_type = other DNA
cacgacagacccgtcaggctactgcgaaagccacaaaagcgaaggctggaagcaatacaagccaggacaatcccg

SEQ ID NO: 336863 - DNA, 75 bp, synthetic construct
  source 1..75: mol_type = other DNA
aacaacagacagttcgggttactgcgataagcatcgcggtgaaggctgggtacagcaccagcgcggactgagtcg

SEQ ID NO: 336864 - DNA, 75 bp, synthetic construct
  source 1..75: mol_type = other DNA
taccaccgttttgaagttctgagaaaaccaagaaatatccgtctgctacccagtcgctcggtaacaactctggaa

SEQ ID NO: 336865 - DNA, 75 bp, synthetic construct
  source 1..75: mol_type = other DNA
gctggggagttacaaagaagatgggacgggcctggcgtccttgatacgagaggcctggctgagtgctttacagct

SEQ ID NO: 336866 - DNA, 75 bp, synthetic construct
  source 1..75: mol_type = other DNA
agactacaaaacggtttacgataaactcactttcaggctgagttattttgcgaaagagcgcaccaagtcatacag

SEQ ID NO: 336867 - DNA, 75 bp, synthetic construct
  source 1..75: mol_type = other DNA
ttggtccacatcccagataatcccctgtattatctggatgccaacgccacagactatcgtgcggtttacgataag

SEQ ID NO: 336868 - DNA, 75 bp, synthetic construct
  source 1..75: mol_type = other DNA
acgctggggttctcccgccgcttccatgtcttcgccgcaccaaaacaggatgctgagcatacctacgaatcactg

SEQ ID NO: 336869 - DNA, 75 bp, synthetic construct
  source 1..75: mol_type = other DNA
gtttcgagcaagcttccgcgattatgggcagcttcttcgtcaaatttatcatgtggggcatccttaccgctctgg

SEQ ID NO: 336870 - DNA, 75 bp, synthetic construct
  source 1..75: mol_type = other DNA
ttgatagctttggcgtaggggcaatgaaagatgtcacgctggtgcgcccgcaagatgccggggcgaatacctgtg

SEQ ID NO: 336871 - DNA, 75 bp, synthetic construct
  source 1..75: mol_type = other DNA
cacagcgcgcggggcttaccgtcaacgatctcgaacatcttgagctgacttatgctccaccttttaacagtgcaa

SEQ ID NO: 336872 - DNA, 75 bp, synthetic construct
  source 1..75: mol_type = other DNA
ggaaaattgcctaaagataaagaaatttttataggatgtcagagtggcctgcgcgggcatgtggcataccgtatt

SEQ ID NO: 336873 - DNA, 75 bp, synthetic construct
  source 1..75: mol_type = other DNA
cacggcttccggacatataatctgagtggtggctttataacttggcaggcggttacggaatcaatgagtcaataa

SEQ ID NO: 336874 - DNA, 75 bp, synthetic construct
  source 1..75: mol_type = other DNA
tcgggaagtgggagaaataaacgagaagtcccattaccacatggtacttttcgtgaacaaagacacattcaatgg

SEQ ID NO: 336875 - DNA, 75 bp, synthetic construct
  source 1..75: mol_type = other DNA
aacgtcatgccccattcaatacaacgtatttgcaacggatgctgggtgtaattgataacgctatagcacaacacc

SEQ ID NO: 336876 - DNA, 75 bp, synthetic construct
  source 1..75: mol_type = other DNA
gaaaaagtgcctaaagataaagagatttttatagggtgccagagtggcctgcgcgggcatgtggcataccgtatt

SEQ ID NO: 336877 - DNA, 75 bp, synthetic construct
  source 1..75: mol_type = other DNA
atacatttatcatagacacactatctaaattccatttggttggaaaagatggtttaaaagatagaacgaagttaa

SEQ ID NO: 336878 - DNA, 75 bp, synthetic construct
  source 1..75: mol_type = other DNA
atgacttcactctggaatggagtggcccgaaagaaaataacatctttgcggtcaacgccagcatgcaaactcatg

SEQ ID NO: 336879 - DNA, 75 bp, synthetic construct
  source 1..75: mol_type = other DNA
gatatttttcaggtaatgttactcctgaaagttatcaaccaggtggaaaagagttcactatcactgtatccgact

SEQ ID NO: 336880 - DNA, 75 bp, synthetic construct
  source 1..75: mol_type = other DNA
ccggggctctttttcgcttatatagtggcgtatatcggtttcggtattttatctgtcggcatgattatttatctt

SEQ ID NO: 336881 - DNA, 75 bp, synthetic construct
  source 1..75: mol_type = other DNA
agatctggctcgtcgctggcatcaccgatatgagaaacggcttcaacggcctggcggcaaaggtgcagacgacgc

SEQ ID NO: 336882 - DNA, 75 bp, synthetic construct
  source 1..75: mol_type = other DNA
ggccacggtattcggtacgccgctgggcattatggcggggatttatctggcggaatatggtcgtaaatcctggct

SEQ ID NO: 336883 - DNA, 75 bp, synthetic construct
  source 1..75: mol_type = other DNA
tggcgacaggttccagtcaaatattcgctaatgaagacaacgccggggctaaaaatgttggggtagttatattct

SEQ ID NO: 336884 - DNA, 75 bp, synthetic construct
  source 1..75: mol_type = other DNA
taattgatgctccttgtggtattgcacaagaatcagcagatcagacaattaatttcggccagatttctaaagcac

SEQ ID NO: 336885 - DNA, 75 bp, synthetic construct
  source 1..75: mol_type = other DNA
atgttaaaatcaactttggggattgctattgctttttcattgtgtgctgttgcacatgcagccaatcaagggcaa

SEQ ID NO: 336886 - DNA, 75 bp, synthetic construct
  source 1..75: mol_type = other DNA
ttcgcttcgaaactcagcctggataccagctccagcacgactggggcgaagttagaggtggaggttgccgggcaa

SEQ ID NO: 336887 - DNA, 75 bp, synthetic construct
  source 1..75: mol_type = other DNA
gatgtgttattcagagattttgatttcacgcctcttaacgagattgtaaaacgttcaaaatcatataataagcat

SEQ ID NO: 336888 - DNA, 75 bp, synthetic construct
  source 1..75: mol_type = other DNA
tacagagctgccgttatttaatcctatgaaatcggataccagtgcagcaatagaacgttccggttctggctcagg

SEQ ID NO: 336889 - DNA, 75 bp, synthetic construct
  source 1..75: mol_type = other DNA
gacttcggtcagatttcgaaatctcttttaactgctgggggtatttctaaggcccaggatttggatataaaattg

SEQ ID NO: 336890 - DNA, 75 bp, synthetic construct
  source 1..75: mol_type = other DNA
tggccctcagcccgcgatggcaaagtgttcctgacgccggcgcaactggcgatgctgatggaaggtatcgactag

SEQ ID NO: 336891 - DNA, 75 bp, synthetic construct
  source 1..75: mol_type = other DNA
atgtccggccatgttttcattttccggggccgcagcggcagtcaggttaaactgctgtggtccaccggtgacggt

SEQ ID NO: 336892 - DNA, 75 bp, synthetic construct
  source 1..75: mol_type = other DNA
gcacagctggcgatgctccttgaaggtatcgactggcggcagcctaaaagactgcttacgtccctgactatgttg

SEQ ID NO: 336893 - DNA, 75 bp, synthetic construct
  source 1..75: mol_type = other DNA
ccttcaatggcgccggggttcgcgataccgccagaacactgaaaattggcattaacaccgtcatccggactttaa

SEQ ID NO: 336894 - DNA, 75 bp, synthetic construct
  source 1..75: mol_type = other DNA
cgatatgagaaatggcttcaacggcctggctgcgaaagtacagacggcgctgaaagacgatcccatgtccggcca

SEQ ID NO: 336895 - DNA, 75 bp, synthetic construct
  source 1..75: mol_type = other DNA
gtatctggctggttgcaggtatcaccgatatgcgaaatggttttaacggcctggcatcaaaagttcagaacgtcc

SEQ ID NO: 336896 - DNA, 75 bp, synthetic construct
  source 1..75: mol_type = other DNA
cgtgactgggtgcggcaattgccggtaaatcatatgtgggatctgttctgcggcgttggtggttttggtttgcat

SEQ ID NO: 336897 - DNA, 75 bp, synthetic construct
  source 1..75: mol_type = other DNA
cgccagccagctgtacgccactgcgcgcgactgggtacgacagctgccggttaaacatatgtgggatctgttctg

SEQ ID NO: 336898 - DNA, 75 bp, synthetic construct
  source 1..75: mol_type = other DNA
ggttaacgccttacaacgtggcgcgtaagcgtggcgaactgaaatacattttgctgactgaaagccagagcgatg

SEQ ID NO: 336899 - DNA, 75 bp, synthetic construct
  source 1..75: mol_type = other DNA
gcaaagtattccttacacaggcgcagctggcgatgctgctggaaggtatcgactggcgacagcctaagcggctgc

SEQ ID NO: 336900 - DNA, 75 bp, synthetic construct
  source 1..75: mol_type = other DNA
ggcattggtaaaccgctgtgtgattatctctcaacgatggcaccgcgttttatcatctactccagctgtaacgcc

SEQ ID NO: 336901 - DNA, 75 bp, synthetic construct
  source 1..75: mol_type = other DNA
ccggagctggtgctggttaatccaccgcgtcgcggcattggtaaaccgctgtgtgattatctttcgacgatggca

SEQ ID NO: 336902 - DNA, 75 bp, synthetic construct
  source 1..75: mol_type = other DNA
tacttatcaagcacgtaagccgggtatgaaagagctgataactgaaatggcctttaatggtgccggggttcgcga

SEQ ID NO: 336903 - DNA, 75 bp, synthetic construct
  source 1..75: mol_type = other DNA
ggacggatactcatgaccgttcgtggcgataatatctccgccccggtcacctggacgaatctgatgccacaactg

SEQ ID NO: 336904 - DNA, 75 bp, synthetic construct
  source 1..75: mol_type = other DNA
ggccgggcaacatgtcgctgatgcgcaacaaattaagagcgactgcgagacgctggcggataacgtacagcagaa

SEQ ID NO: 336905 - DNA, 75 bp, synthetic construct
  source 1..75: mol_type = other DNA
tgcggactcttccacactactggtgggtaccacgaaatttaacggcatcattgatgtgatgtggtccccctttga

SEQ ID NO: 336906 - DNA, 75 bp, synthetic construct
  source 1..75: mol_type = other DNA
gcgcaacaaattaagagcgactgccagacgctggcggataacgtacagcagaatgcagaagccgttgccgaagat

SEQ ID NO: 336907 - DNA, 75 bp, synthetic construct
  source 1..75: mol_type = other DNA
aaccagtattacgaaggtgagcacagtattcatcgcctgacttatcgctggagtggaaacaactggaatgcaaca

SEQ ID NO: 336908 - DNA, 75 bp, synthetic construct
  source 1..75: mol_type = other DNA
cgaatttcttaaatgggtatttgaggtcacaccagggcgttatgcggtaacgcagtacggtgggtctggtagttc

SEQ ID NO: 336909 - DNA, 75 bp, synthetic construct
  source 1..75: mol_type = other DNA
gtcaaagagcaaatcaccgaaatggcgttcaacggagcagggggccgcgataccgcaaggacactcaaaattggt

SEQ ID NO: 336910 - DNA, 75 bp, synthetic construct
  source 1..75: mol_type = other DNA
ctcttatgaagccagaaaacccggcgttaaggagcagagcgttgaaatggcacataacggcacagggggcctgta

SEQ ID NO: 336911 - DNA, 75 bp, synthetic construct
  source 1..75: mol_type = other DNA
atggctatcgttactgttcattgtccgcgttgtaattccgatgaagtttatcgacatggccgcagttgttcccgg

SEQ ID NO: 336912 - DNA, 75 bp, synthetic construct
  source 1..75: mol_type = other DNA
gcactgtccggcatgtacggattcggtcaggcattcaccagtgctgacgctcaggcatttaacggacaggccgat

SEQ ID NO: 336913 - DNA, 75 bp, synthetic construct
  source 1..75: mol_type = other DNA
gcgaaccgaaatcactggtacgtggagaataagctgcactggcatctggacgtggtaatgaataaagacgactgc

SEQ ID NO: 336914 - DNA, 75 bp, synthetic construct
  source 1..75: mol_type = other DNA
ccgtcacgggaagaacccaaaaggacatgatcgatttcgctgccgtgactgtcatcgagtgtttcagctcactta

SEQ ID NO: 336915 - DNA, 75 bp, synthetic construct
  source 1..75: mol_type = other DNA
cggagatctacctgaccgaacaacaggcgctggcagagcgttttaatgacgtaccgctgtggatccgtccgcaaa

SEQ ID NO: 336916 - DNA, 75 bp, synthetic construct
  source 1..75: mol_type = other DNA
cggattacctgccacagcggcggattatgcatcgggcgacgattcttggggataaaccgttttatcgggcggggt

SEQ ID NO: 336917 - DNA, 75 bp, synthetic construct
  source 1..75: mol_type = other DNA
gtatctggctggttgccggtattactgacatgcggaatggctttaacggcctggcatcaaaagttcagaacgtcc

SEQ ID NO: 336918 - DNA, 75 bp, synthetic construct
  source 1..75: mol_type = other DNA
ggaaaatgaactccttaaagaagccgttgaatacgggcatgcaaaaaagtggatagcgcacgcgcccttattgcc

SEQ ID NO: 336919 - DNA, 75 bp, synthetic construct
  source 1..75: mol_type = other DNA
cgctggggccgtatattggcgcacaaattacgggggccgacttaacgcgcccgttaagcgataatcagtttgaac

SEQ ID NO: 336920 - DNA, 75 bp, synthetic construct
  source 1..75: mol_type = other DNA
tccggtgagcggtaaacaggcgttgtttgttaatgaaggatttaccacgcgaattgtcgatgtcagtgagaaaga

SEQ ID NO: 336921 - DNA, 75 bp, synthetic construct
  source 1..75: mol_type = other DNA
gcatattcatcctgtttaccctcatgccgaaggggttgacgagatcatcgtcctggatacccataacgataatcc

SEQ ID NO: 336922 - DNA, 75 bp, synthetic construct
  source 1..75: mol_type = other DNA
ttggtgcgtacggtcccgccacgtccaacagaacaagggcaaaaattgctggcgctgcttcgccaggttgaattg

SEQ ID NO: 336923 - DNA, 75 bp, synthetic construct
  source 1..75: mol_type = other DNA
gaagatgaaacccgcactcaggaacgtctgcgtcgcggcgaagtggtcggcgcggtgagtattcaacatcaggcg

SEQ ID NO: 336924 - DNA, 75 bp, synthetic construct
  source 1..75: mol_type = other DNA
gaatgcttatgagtgttgctgtgggatgtttatcgtggtatgtcaccagaccgaagaaccgacagacaaaggccg

SEQ ID NO: 336925 - DNA, 75 bp, synthetic construct
  source 1..75: mol_type = other DNA
gcgacccaggtcatgacgacgctatcgcaatagttctcgccctcgcctcaccagagcttgatgtcaaagcaatta

SEQ ID NO: 336926 - DNA, 75 bp, synthetic construct
  source 1..75: mol_type = other DNA
ttgaagaacaagctttatcctttattggacgtgaattatatgaggcttttttcaagtcttatacaattaaacagt

SEQ ID NO: 336927 - DNA, 75 bp, synthetic construct
  source 1..75: mol_type = other DNA
ggcactgctgcgccaggtggagttgctggaagaagagtggctgggcgatgaacaaaccggttcaactccgctgct

SEQ ID NO: 336928 - DNA, 75 bp, synthetic construct
  source 1..75: mol_type = other DNA
gaggcggtcgcgaaaaatccgccgttgctacatccggtggtgcgaacgcatccggtgagcggtaaacaggcgctg

SEQ ID NO: 336929 - DNA, 75 bp, synthetic construct
  source 1..75: mol_type = other DNA
tcggtactcgtctgagtaaactggataatggcgaatacgatgccattattcttgctgtggctggcttaaaacgtt

SEQ ID NO: 336930 - DNA, 75 bp, synthetic construct
  source 1..75: mol_type = other DNA
cgcggcgatgtgattcttgatacgccgctggcgaaggttggcggaaaaggcttatttgtgaaagagctggaggtc

SEQ ID NO: 336931 - DNA, 75 bp, synthetic construct
  source 1..75: mol_type = other DNA
cttgccgtagccggactaaaacgtttaggtctggagtcccgcattcgcgccgcgttgccacccgagatttctctt

SEQ ID NO: 336932 - DNA, 75 bp, synthetic construct
  source 1..75: mol_type = other DNA
attgaaagagtgcagcttttcgatatgttcccacataccgcgcattatgaagtgctggtgctattggtgaagcaa

SEQ ID NO: 336933 - DNA, 75 bp, synthetic construct
  source 1..75: mol_type = other DNA
ttcgcctggccgtcagcccgggatggcaaagtgttcctcacaccggcacagctggcgatgctccttgaaggtatc

SEQ ID NO: 336934 - DNA, 75 bp, synthetic construct
  source 1..75: mol_type = other DNA
aaatagagcaactgttgaagaattaatcacctccgagcaatacggacatgtatttttctctggagcgattgatca

SEQ ID NO: 336935 - DNA, 75 bp, synthetic construct
  source 1..75: mol_type = other DNA
cagctggcgatgctgctggaaggtatcgactggcgacagcctaaaaggctgcttacgtccctgactatgttgtaa

SEQ ID NO: 336936 - DNA, 75 bp, synthetic construct
  source 1..75: mol_type = other DNA
tttatcttccgtgggcgtaatggcagtcaggtaaagctcctctggtctaccggcgatggactgtgtctgctgacc

SEQ ID NO: 336937 - DNA, 75 bp, synthetic construct
  source 1..75: mol_type = other DNA
gcaaagtgttccttacacaggcgcagctggcaatgctgctggaaggtatcgactggcgacagcctaagcggctgc

SEQ ID NO: 336938 - DNA, 75 bp, synthetic construct
  source 1..75: mol_type = other DNA
gtattgaatgccgccttgatgatacacgcactcgcgagctgcttgccgcgctgaatcaccacgaaactgcactgc

SEQ ID NO: 336939 - DNA, 75 bp, synthetic construct
  source 1..75: mol_type = other DNA
gccggttgaattcccgcaaggtctggggctggtcaccatttgcgagcgcgaagatccccgcgatgcctttgtatc

SEQ ID NO: 336940 - DNA, 75 bp, synthetic construct
  source 1..75: mol_type = other DNA
taaacaccgccgaacagtttttagaacttcaccaaaacaatcaaagaataccagctttttttgttgatgttttat

SEQ ID NO: 336941 - DNA, 75 bp, synthetic construct
  source 1..75: mol_type = other DNA
ggcgcatcttgccggcgggcaggtgtacccgtatgtggtcccctgctggatggcaggccgtcggtggcgcttccg

SEQ ID NO: 336942 - DNA, 75 bp, synthetic construct
  source 1..75: mol_type = other DNA
gcctgatttcatcggtgtcggcggacgtgatgggcgggcaggcggagtcctcagtgtcggtgcagatagacgttt

SEQ ID NO: 336943 - DNA, 75 bp, synthetic construct
  source 1..75: mol_type = other DNA
cacctgccgggcaactcggtgcaatcattgttgatccctacggtaatgcgcctctgaccgcgctggttgatttag

SEQ ID NO: 336944 - DNA, 75 bp, synthetic construct
  source 1..75: mol_type = other DNA
attcggggtcattaagcgagattcgtacctgctgtgagacactgttacagacggcgcagaacaccatcagtcgcg

SEQ ID NO: 336945 - DNA, 75 bp, synthetic construct
  source 1..75: mol_type = other DNA
actttacgctgcgttttgccgagcttgaatccaccctttgccgggtgttaaccgatgttattcgccccattgagc

SEQ ID NO: 336946 - DNA, 75 bp, synthetic construct
  source 1..75: mol_type = other DNA
ccatgccgcgctcggtaggcgctggcgtcatgccgatctggcggacctcgaacatattcgtcatgctgccgatca

SEQ ID NO: 336947 - DNA, 75 bp, synthetic construct
  source 1..75: mol_type = other DNA
atatggataaccgctccatctccgatctacagcagaccaaagtcattaaagtcgctcccggttttgaagatcgcc

SEQ ID NO: 336948 - DNA, 75 bp, synthetic construct
  source 1..75: mol_type = other DNA
cttcggtggttctattcatttgttcgatgtcgggcagccaaccgtcggtaagttgaacgaaatcgattacaaaac

SEQ ID NO: 336949 - DNA, 75 bp, synthetic construct
  source 1..75: mol_type = other DNA
tcgtagccggaactgtggcgataaccctgggtttgtcagcatcgggggtgatggctgcgggttttaaaccagcgc

SEQ ID NO: 336950 - DNA, 75 bp, synthetic construct
  source 1..75: mol_type = other DNA
acatggataaccgctccatctccgatctacagcagaccaaagttgttaaagtcgcccccggttttgaagaccgcc

SEQ ID NO: 336951 - DNA, 75 bp, synthetic construct
  source 1..75: mol_type = other DNA
gatgacggtgtccatgtcaccactattcgtgatcatatcctcgaagtggataaatctggtcgcgttattgatgta

SEQ ID NO: 336952 - DNA, 75 bp, synthetic construct
  source 1..75: mol_type = other DNA
ggatcaagacaccttctatgacggtcatgaccgcaatattaacaaacgtggttatctgatgggtatccgcgaaac

SEQ ID NO: 336953 - DNA, 75 bp, synthetic construct
  source 1..75: mol_type = other DNA
attaaacatgagatcgaggtggctctggtatcagccaacgactttctgcgtcagcagcaagacgaggtgaatacc

SEQ ID NO: 336954 - DNA, 75 bp, synthetic construct
  source 1..75: mol_type = other DNA
gaattgatccgtttttccagtccggctgctgatgcactggtccgtaatgcgctggcggaagcggtggtggcgcgt

SEQ ID NO: 336955 - DNA, 75 bp, synthetic construct
  source 1..75: mol_type = other DNA
cagatgtctccccggcgtccatcacccatgatgtgaagggcacggcatcaaccggtaacccggatgcggatgcag

SEQ ID NO: 336956 - DNA, 75 bp, synthetic construct
  source 1..75: mol_type = other DNA
acgttctggcagtttcgtcgagacatcgccgttatacgttcagcactaaaaggccataacagcgatttgcggtat

SEQ ID NO: 336957 - DNA, 75 bp, synthetic construct
  source 1..75: mol_type = other DNA
tagttatcgatgaaccgggaaaagatggctttcttgtcagaaaaatatatgcttcaccaaatagcccctacctga

SEQ ID NO: 336958 - DNA, 75 bp, synthetic construct
  source 1..75: mol_type = other DNA
gattgagaagccgaaagcagaccgcaacgacctcgcaattgctcacatctccggaagcctgaaggcgatggcgaa

SEQ ID NO: 336959 - DNA, 75 bp, synthetic construct
  source 1..75: mol_type = other DNA
ggtttaccagcggttctgcaacggacactttgttgcatgtgaaccgccccgggtttcctggagagtgttttatct

SEQ ID NO: 336960 - DNA, 75 bp, synthetic construct
  source 1..75: mol_type = other DNA
atgatatctctccctgcaggttcgcttatctggctggttgccggtatcaccgatatgcgaaatggctttaacggt

SEQ ID NO: 336961 - DNA, 75 bp, synthetic construct
  source 1..75: mol_type = other DNA
ggcaaaatggtgaaaatactgtgggccgatcgtgacgggttgtgcctgttcgccaaacgcctcgagcagggccgc

SEQ ID NO: 336962 - DNA, 75 bp, synthetic construct
  source 1..75: mol_type = other DNA
ggggtgaccagataaaagtgttgtgggctgacagtgacggactgtgcctcttcaccaaacgcctggagcggggcc

SEQ ID NO: 336963 - DNA, 75 bp, synthetic construct
  source 1..75: mol_type = other DNA
tggctgacgaccggcaatatcaagacaggattaccgcagctctcagccaggttgaagagaaaggtgcagagtacg

SEQ ID NO: 336964 - DNA, 75 bp, synthetic construct
  source 1..75: mol_type = other DNA
caggcgaaacctttacgggcaagacgtcacgacgtcagcctgagctggttaatggctttatgcagctggctaccg

SEQ ID NO: 336965 - DNA, 75 bp, synthetic construct
  source 1..75: mol_type = other DNA
gctttatttcgctccggccgatgtgaagcgcgtgcagtttacgccagtaccggcagagcagaccgaacagccagc

SEQ ID NO: 336966 - DNA, 75 bp, synthetic construct
  source 1..75: mol_type = other DNA
gaacggtcatcacgttatcacatccaccagcagagtgtggtatcacctgatgatcgaccttgaaacaatgggaac

SEQ ID NO: 336967 - DNA, 75 bp, synthetic construct
  source 1..75: mol_type = other DNA
tcccaccagacagcgaaacgatgaacgggatttttgcagagattgaacgtaaatatgcgcatcagccgatgacgc

SEQ ID NO: 336968 - DNA, 75 bp, synthetic construct
  source 1..75: mol_type = other DNA
atcgttcagttatatcgcgtcaaccgacagagtcgtccatcacgattagcgcaccggttatcaatatatcagtaa

SEQ ID NO: 336969 - DNA, 75 bp, synthetic construct
  source 1..75: mol_type = other DNA
aatacgaaaccaaccgaagacgaaattgaccagcctgccagtgaacaaaaaaaagaaaaatcgccatatgcggga

SEQ ID NO: 336970 - DNA, 75 bp, synthetic construct
  source 1..75: mol_type = other DNA
ggcttatatggcaacgtatatcgtctatttctctctttgttgtggcgtgtttttactctggcgtaggcgggcctg

SEQ ID NO: 336971 - DNA, 75 bp, synthetic construct
  source 1..75: mol_type = other DNA
cgctgcggttttatatcctggcggaagtcagccagttcactttgttgatggtatttgcccactggttgatccctg

SEQ ID NO: 336972 - DNA, 75 bp, synthetic construct
  source 1..75: mol_type = other DNA
ttctgtgcgtctgtaaataaacacgactcagatagtgtggcaaataaaattgcagaaacgacagcgcaaaacatc

SEQ ID NO: 336973 - DNA, 75 bp, synthetic construct
  source 1..75: mol_type = other DNA
agcgccataatgcacttgatgacgcccgttatcaggcaaaatacgtttcagttatctggcaaaaactgatcccga

SEQ ID NO: 336974 - DNA, 75 bp, synthetic construct
  source 1..75: mol_type = other DNA
tacgcacaatcattgaactgggaaaatccatagacttcgatgccaggacgcctattcaattcgaagacatacgcc

SEQ ID NO: 336975 - DNA, 75 bp, synthetic construct
  source 1..75: mol_type = other DNA
caaattccttaattaatatgcacggtcatcagaaaagaacatccaccagcagaatgtgtcaccatctgatgatcg

SEQ ID NO: 336976 - DNA, 75 bp, synthetic construct
  source 1..75: mol_type = other DNA
caatccaggagattgcagcacacacactacgtcaacgtctgaacgaagctatggctgaatctgcaacgaaagaaa

SEQ ID NO: 336977 - DNA, 75 bp, synthetic construct
  source 1..75: mol_type = other DNA
cgaaattccaactgaatacctggcaagaattcaccaggcattacttaaaaatctggaaacggaagtatttgatgg

SEQ ID NO: 336978 - DNA, 75 bp, synthetic construct
  source 1..75: mol_type = other DNA
acggcagcatccatcgctgggcaaaaaatgaagttatcgacaacggccgcgaagactggaagcgtatctcggcat

SEQ ID NO: 336979 - DNA, 75 bp, synthetic construct
  source 1..75: mol_type = other DNA
ccgttttggtggctatgaaggcgcgttgcttgggctggcgctgattcctgcgttggtggtgattccggctgccat

SEQ ID NO: 336980 - DNA, 75 bp, synthetic construct
  source 1..75: mol_type = other DNA
tcgcgcaacccctggtattctggattattcccgtgccgctatttttgcacttatccgaagtgctcaccctgaact

SEQ ID NO: 336981 - DNA, 75 bp, synthetic construct
  source 1..75: mol_type = other DNA
atggaaggcgctgaacatccacacaaggagaaccctggcggcaatcagcatcacgatagcgataatgaaactggc

SEQ ID NO: 336982 - DNA, 75 bp, synthetic construct
  source 1..75: mol_type = other DNA
tgtaccccacaatgcactggatgacgcccgtcaccaggcaaaatacgtttcagcaatctggcaaaaactgatccc

SEQ ID NO: 336983 - DNA, 75 bp, synthetic construct
  source 1..75: mol_type = other DNA
ccctgaacggtggtttcgctaccgcgatggcgctgaatgccgatgcgaccgaaaaagtaatttcggtgcaggaaa

SEQ ID NO: 336984 - DNA, 75 bp, synthetic construct
  source 1..75: mol_type = other DNA
caaactggtacgcgacactgacaaagttttccctaatcccggtaattcagacctgggactgataactgctttttt

SEQ ID NO: 336985 - DNA, 75 bp, synthetic construct
  source 1..75: mol_type = other DNA
caaaaaaattatctgttgccatctcccgctgcattaccgcaatggatgacaacgattatgatgaagacgacttta

SEQ ID NO: 336986 - DNA, 75 bp, synthetic construct
  source 1..75: mol_type = other DNA
ggtaaagtgatgatcgccgggatgggcggtgtgcttggttccgtcactattattattggtctgggcgctatgctg

SEQ ID NO: 336987 - DNA, 75 bp, synthetic construct
  source 1..75: mol_type = other DNA
accacacttaccgggttcagccagcgcagtcgcaccgcctacagtggacaacagatgctggaggagtatgtcaag

SEQ ID NO: 336988 - DNA, 75 bp, synthetic construct
  source 1..75: mol_type = other DNA
atgacggatattactgacagacatacacttcgccgcatgtcctggtcggaacttaccacggcagcgcaggaagca

SEQ ID NO: 336989 - DNA, 75 bp, synthetic construct
  source 1..75: mol_type = other DNA
gtctgctcgactcgctggagattcgcgacctccacaaactggtgcgtgatactgacaaagttttccctaatcctg

SEQ ID NO: 336990 - DNA, 75 bp, synthetic construct
  source 1..75: mol_type = other DNA
cagccagcactgacaataccaacgtcaacggcgaagacatgactgagattgaggagaatatgctcctgccggttt

SEQ ID NO: 336991 - DNA, 75 bp, synthetic construct
  source 1..75: mol_type = other DNA
ctgttaccagccgcatttattatttcactggctctgcgtgcatcgcaggggtcagcaaccgtagcaatcctgaca

SEQ ID NO: 336992 - DNA, 75 bp, synthetic construct
  source 1..75: mol_type = other DNA
cgtgaaatgtatccaaaagcgcactttgtcaccatcttcgctaaaccggctggtcgtccgctggttgatgattat

SEQ ID NO: 336993 - DNA, 75 bp, synthetic construct
  source 1..75: mol_type = other DNA
cgtccgctggttgatgactatgttgttgatatcccgcaagatacctggatcgaacagccgtgggatatgggcgtc

SEQ ID NO: 336994 - DNA, 75 bp, synthetic construct
  source 1..75: mol_type = other DNA
gtggatcgctcgctgacggccagccacggctcaatcgtagtcgcctgcatccataatgaatttaccgtgaagcgg

SEQ ID NO: 336995 - DNA, 75 bp, synthetic construct
  source 1..75: mol_type = other DNA
gtgttattcatgatgtggcaactgatttctttaaagaaatgtttgtatctcataatgaggttgtacgaaaaattt

SEQ ID NO: 336996 - DNA, 75 bp, synthetic construct
  source 1..75: mol_type = other DNA
ttatcagcgccattcgcgaagaattaatgccccgccttaccgaactggcagaagaaagcgccagtgaaacaggga

SEQ ID NO: 336997 - DNA, 75 bp, synthetic construct
  source 1..75: mol_type = other DNA
cctaaaatagtttatgccataaagcctggcgtagttgttgggttgttattaggccttagcttatggatatgggga

SEQ ID NO: 336998 - DNA, 75 bp, synthetic construct
  source 1..75: mol_type = other DNA
atggctatggttgaaatgcaaaccactgcggcgctggctgaatcccgccgtaaaatgcaggcgcgtcgccgccta

SEQ ID NO: 336999 - DNA, 75 bp, synthetic construct
  source 1..75: mol_type = other DNA
ggcctgggccggggtattgatcatcaccctgtgcgtcctgctgctaaacattctggcgcgcgttgtttttgcgaa

SEQ ID NO: 337000 - DNA, 75 bp, synthetic construct
  source 1..75: mol_type = other DNA
ttttctgatgtgtattcaggctaaacatctgttgttgtcgtttgtccctggtacatttatcggcgcatgtgcgac

SEQ ID NO: 337001 - DNA, 75 bp, synthetic construct
  source 1..75: mol_type = other DNA
gtgggcagtaaccagataattaaagtgggttctgttcaggtggaaacgattggacttgttcgtgcgctgaccgtg

SEQ ID NO: 337002 - DNA, 75 bp, synthetic construct
  source 1..75: mol_type = other DNA
ggcagaagtgattcgcttcattaacgacattctgctctccgcaccgtcgattgtggttggtctgtttgtttacac

SEQ ID NO: 337003 - DNA, 75 bp, synthetic construct
  source 1..75: mol_type = other DNA
gtgacggaaccacccgaagcactggcggtttacacgacattacgcaaccagtgggccggagaacgcgcccgacag

SEQ ID NO: 337004 - DNA, 75 bp, synthetic construct
  source 1..75: mol_type = other DNA
ctgcggcgctggctgaatctcgccgcaaaatgcaggcgcgtcgccgcctcaaaaaccgtattgcgctgacgctct

SEQ ID NO: 337005 - DNA, 75 bp, synthetic construct
  source 1..75: mol_type = other DNA
tgcgccacaagctgatgcccaaacctgcattgcccgttttgaaaaactgatggcggcagagacgttagagcgtta

SEQ ID NO: 337006 - DNA, 75 bp, synthetic construct
  source 1..75: mol_type = other DNA
tggtgaagactcagggcgtggcacgttcagtcatcgccatgcagtggtacatcatcaaactgaagcctgtcgtta

SEQ ID NO: 337007 - DNA, 75 bp, synthetic construct
  source 1..75: mol_type = other DNA
ctgccggttcgctgcatgtggcgctggcgtataacccctcacatctggagatcgtgaatccggtggtgctgggcc

SEQ ID NO: 337008 - DNA, 75 bp, synthetic construct
  source 1..75: mol_type = other DNA
cttcaggcccacggcttcaggacatataatctgagtggtggctttataacctggcaggcggtaacggagtcaata

SEQ ID NO: 337009 - DNA, 75 bp, synthetic construct
  source 1..75: mol_type = other DNA
ggctgtttctatgtttacgacaaaccagtttattctcctttgtcccaaggatattataaggttttatcgggaaag

SEQ ID NO: 337010 - DNA, 75 bp, synthetic construct
  source 1..75: mol_type = other DNA
gtattggtttgttgtgcaactattctatcattgattatgattatttttattttttttataacatctttttttata

SEQ ID NO: 337011 - DNA, 75 bp, synthetic construct
  source 1..75: mol_type = other DNA
agtttttagtaatattgcaacttcagataagagtgttaatttcaaagtgatagctgaactggctttcatgtcata

SEQ ID NO: 337012 - DNA, 75 bp, synthetic construct
  source 1..75: mol_type = other DNA
atgttatctggcctcttccccatggcctttatatacgtgttatactgtgcatttgattttgaccagagtgttaaa

SEQ ID NO: 337013 - DNA, 75 bp, synthetic construct
  source 1..75: mol_type = other DNA
gctctcaggtataagtgacttcaaaatacatagctacattattaaaacaagtgaatatccggaggagtttttttc

SEQ ID NO: 337014 - DNA, 75 bp, synthetic construct
  source 1..75: mol_type = other DNA
cggaagactggcggcgtttttttctttcacctgaactgactgtccaaagcgtatccggtgataacaacgtcagcg

SEQ ID NO: 337015 - DNA, 75 bp, synthetic construct
  source 1..75: mol_type = other DNA
atggagaacatgacctcgcccggcacgctgcttagtggagataacgcgacctggcttgaagattactaccagacc

SEQ ID NO: 337016 - DNA, 75 bp, synthetic construct
  source 1..75: mol_type = other DNA
acgtgttcagatctatcttatcattccgttgtctattgctttactggtgcatcttcaggtaattccactggagat

SEQ ID NO: 337017 - DNA, 75 bp, synthetic construct
  source 1..75: mol_type = other DNA
aaaggactggcaatctccgctgcaacgttgctgagtggcatggtgtgggcgatggttattattcacggtagtgcg

SEQ ID NO: 337018 - DNA, 75 bp, synthetic construct
  source 1..75: mol_type = other DNA
aggagcgttatcctgttttttatcgtctggggtcaggcactcagtatatcaaggacagtagcgggcaactgacaa

SEQ ID NO: 337019 - DNA, 75 bp, synthetic construct
  source 1..75: mol_type = other DNA
tcatcctatcagaatggagaaatgattagcaccagttcaggtctggtttttgattacaaacttaatggtgcaatg

SEQ ID NO: 337020 - DNA, 75 bp, synthetic construct
  source 1..75: mol_type = other DNA
cggaaatatgacgctgaaggcaggtatctggcggaatatcacgctgaacgatatgccgggaatgaccctgcgtga

SEQ ID NO: 337021 - DNA, 75 bp, synthetic construct
  source 1..75: mol_type = other DNA
tttacctttgacagactgtcactgaagaacaccgattttggccttggtcgtaatgccatgctgaacaccacgctt

SEQ ID NO: 337022 - DNA, 75 bp, synthetic construct
  source 1..75: mol_type = other DNA
ccctgacacagggcgccaccacatatgccatgcacgggcagcaggggaatgacctgaatgccggtaagaatctga

SEQ ID NO: 337023 - DNA, 75 bp, synthetic construct
  source 1..75: mol_type = other DNA
ggctgttattccactggattttatcgggcaaaaatttaatgaggacaatgatgccccggttacattcagtgcacc

SEQ ID NO: 337024 - DNA, 75 bp, synthetic construct
  source 1..75: mol_type = other DNA
acagtgcaaaaacaaaaggactagttgctgttagtgaacacgccaaaagaacatcaaaaaaaggcatgaaaaaaa

SEQ ID NO: 337025 - DNA, 75 bp, synthetic construct
  source 1..75: mol_type = other DNA
accagctatagtggcggcggtcatgctgtaaaggcacgtgaccacatgtacgaattaactctatctccagcagag

SEQ ID NO: 337026 - DNA, 75 bp, synthetic construct
  source 1..75: mol_type = other DNA
gacctggaagaaccagaggaagaagtgatatcccgtgggccttgtggtgtcgtattttgtttgattgagtctgac

SEQ ID NO: 337027 - DNA, 75 bp, synthetic construct
  source 1..75: mol_type = other DNA
cgccagtctgctgtcggtaatgcctggtgggggatgggggcagagttttaccgggggcacagcagcacggatgac

SEQ ID NO: 337028 - DNA, 75 bp, synthetic construct
  source 1..75: mol_type = other DNA
aaaacttcggtgcctgggcacgtataatgaatagccatggttctgaaaactctgagttcaaggataaatatactc

SEQ ID NO: 337029 - DNA, 75 bp, synthetic construct
  source 1..75: mol_type = other DNA
gaaccagcgttcgcatattttaggttatgcaaatctgtcggtagaagataatggggagcttattgcatataaagg

SEQ ID NO: 337030 - DNA, 75 bp, synthetic construct
  source 1..75: mol_type = other DNA
ctgaagactactccactcagggagagttgagtgacctgtccggcagggtgaaaagccatatcctgacttccggta

SEQ ID NO: 337031 - DNA, 75 bp, synthetic construct
  source 1..75: mol_type = other DNA
acccaacctggagatctattaattattgggtcaggcagtggtgaaactaccagtttgaaaagtctggcacaaaaa

SEQ ID NO: 337032 - DNA, 75 bp, synthetic construct
  source 1..75: mol_type = other DNA
gcaggaagtgccgagaatgttatggcgttctttaatggtgaagtttcggcaaacttttctgagcaggggatggat

SEQ ID NO: 337033 - DNA, 75 bp, synthetic construct
  source 1..75: mol_type = other DNA
acgttgttgcggacaatatcttggctgaagcgagaaaacattataataaccaggggtactatatcaaccctgagc

SEQ ID NO: 337034 - DNA, 75 bp, synthetic construct
  source 1..75: mol_type = other DNA
caccacatctggaaattctcggttatgtcataactgtcaacgccaagattattggccgtttttcgccatttttaa

SEQ ID NO: 337035 - DNA, 75 bp, synthetic construct
  source 1..75: mol_type = other DNA
atttatcggcgcgtgtgcgacgtttgccgcgcagggaaactggaagctggtattgccatctctggcgcttgggct

SEQ ID NO: 337036 - DNA, 75 bp, synthetic construct
  source 1..75: mol_type = other DNA
gtatttccagctacgatcacgacaaccagcgcgagcttaaagtgctgaaacgcgcagaaggcgatggcgaaggct

SEQ ID NO: 337037 - DNA, 75 bp, synthetic construct
  source 1..75: mol_type = other DNA
ctggacctgtcctccctgtttgaccagactgtcacactgaaaaatgacctgactctggcatctgcaccggtcgga

SEQ ID NO: 337038 - DNA, 75 bp, synthetic construct
  source 1..75: mol_type = other DNA
ggtattattgtggataagaaggcctcagtaaactggcaggttaacggtgttaagggcgataacctgcataaaatt

SEQ ID NO: 337039 - DNA, 75 bp, synthetic construct
  source 1..75: mol_type = other DNA
ccggcaggagcctccatagtgagtgcggaaattgattatcagatatttcgtgattttgctgaaaataaaggcgcg

SEQ ID NO: 337040 - DNA, 75 bp, synthetic construct
  source 1..75: mol_type = other DNA
ttgggtatcagttatttcgtgattttgctgaaaataaaggcgcgttccgcccaggggccacagatattaccattt

SEQ ID NO: 337041 - DNA, 75 bp, synthetic construct
  source 1..75: mol_type = other DNA
ctgtcagtacaggcaaaagtgaacagcagttttgatggttactttaagaccgatgctgaagggagactgggtatt

SEQ ID NO: 337042 - DNA, 75 bp, synthetic construct
  source 1..75: mol_type = other DNA
gctaaaaggaaacgtggatgtaactaatgtggttgaagttgggcagagcgctgtactggtcatggatggctccgc

SEQ ID NO: 337043 - DNA, 75 bp, synthetic construct
  source 1..75: mol_type = other DNA
agcaggcagaaccttcagtctgaatgaaaacacctggattcagccttatctccgtagtacggcattccgggcaga

SEQ ID NO: 337044 - DNA, 75 bp, synthetic construct
  source 1..75: mol_type = other DNA
ttcaccgggtggtgtctggggacggtacaccgggtcagatacccgcatcagtggtggtgccggctcaggttattc

SEQ ID NO: 337045 - DNA, 75 bp, synthetic construct
  source 1..75: mol_type = other DNA
gctggacatcagaaataccggtcttgaacctgtttctgcaggcacaccacttcaggtcgttcataccggcagtgg

SEQ ID NO: 337046 - DNA, 75 bp, synthetic construct
  source 1..75: mol_type = other DNA
agattaagctccacgaaaaactatccaagagtgatatactaaatatattagctgaacaaatgaccatgcttgaag

SEQ ID NO: 337047 - DNA, 75 bp, synthetic construct
  source 1..75: mol_type = other DNA
cctttaaaggcttttatttcttcaaaaataaaagaaagtgttttatctgagggtgatgctgccaacttactgatt

SEQ ID NO: 337048 - DNA, 75 bp, synthetic construct
  source 1..75: mol_type = other DNA
aatcgtctcttttgataaaaatatcgatgtagatagaatacgtttaacagttgaaaatattcagaagcataatcc

SEQ ID NO: 337049 - DNA, 75 bp, synthetic construct
  source 1..75: mol_type = other DNA
cagttacgtgatgcaggcgacctgctttttcaccattggcttttttgtttttggcccgcagatgttaatcggcat

SEQ ID NO: 337050 - DNA, 75 bp, synthetic construct
  source 1..75: mol_type = other DNA
ccgcgggccgatgaatttgattttcgccgccggaattttgctttcagtcggctcgctgtggctgatgccatttgc

SEQ ID NO: 337051 - DNA, 75 bp, synthetic construct
  source 1..75: mol_type = other DNA
ccgacgcgccgctgatgagtgataaacgtgaaattgatgcctgctaccgctactggcgtcggcatattttgttga

SEQ ID NO: 337052 - DNA, 75 bp, synthetic construct
  source 1..75: mol_type = other DNA
tggctttggtggcagcctggaagcaggcagaaccttcagtctgaatgaaaacacctggattcagccttatctccg

SEQ ID NO: 337053 - DNA, 75 bp, synthetic construct
  source 1..75: mol_type = other DNA
gcctgaacggcgggaaagtggatgccggtacctgggaatactatctgaacaaggaaaatactgactggtacctga

SEQ ID NO: 337054 - DNA, 75 bp, synthetic construct
  source 1..75: mol_type = other DNA
ttttttactatcggcttttttgtttttggcccacaaatgttaatcggcatggcggcggcagagtgttctcacaaa

SEQ ID NO: 337055 - DNA, 75 bp, synthetic construct
  source 1..75: mol_type = other DNA
ttgaggttgaaaaatgtcatcgaacagaaattgtgcgaaatcttatttcctatgtgcaggaaggtgttaaaagca

SEQ ID NO: 337056 - DNA, 75 bp, synthetic construct
  source 1..75: mol_type = other DNA
cgcaaggtcaaattcagcaacaactggcaaaagcagaaacgcaaaatacagcgactgcattcctgtatcgcaaat

SEQ ID NO: 337057 - DNA, 75 bp, synthetic construct
  source 1..75: mol_type = other DNA
cacgcaatgatagtcattgaggatttgaaggtcagcaacatgtcaaagtcagcagcgggtacggtcagccagccg

SEQ ID NO: 337058 - DNA, 75 bp, synthetic construct
  source 1..75: mol_type = other DNA
aaaatcgcctgtcacaaagtaaattcagatgccaggcatgtggatatacagcgaacgctgatgtaaatggcgctc

SEQ ID NO: 337059 - DNA, 75 bp, synthetic construct
  source 1..75: mol_type = other DNA
actcctgttcacccttcagcatcaatggtcggactggatgctggcgtggctaaactcgccacgctgtcagatggc

SEQ ID NO: 337060 - DNA, 75 bp, synthetic construct
  source 1..75: mol_type = other DNA
gaaaaaagacactgaaaccgaatggcttaaagattctccctcacagccattgcaacagtcactgaaagaccttga

SEQ ID NO: 337061 - DNA, 75 bp, synthetic construct
  source 1..75: mol_type = other DNA
caaaatacagcgactgcattcctgtatcgcaaatatccgcagggactaccttcacaaagtcacaacgaccgtcag

SEQ ID NO: 337062 - DNA, 75 bp, synthetic construct
  source 1..75: mol_type = other DNA
caggtgcttgctgtttcgccagcgtacacaagccagcgttgcacgtgctgtggtcatacagcgaaagaaaatcgc

SEQ ID NO: 337063 - DNA, 75 bp, synthetic construct
  source 1..75: mol_type = other DNA
agaagcagaaacgcaaaatacagtgtctgcattcccgtatcgccagtatccgcagggactaccttcacaaagtca

SEQ ID NO: 337064 - DNA, 75 bp, synthetic construct
  source 1..75: mol_type = other DNA
taaattcagatgccaggtatgtggatatacagcgaacgccgatgtaaatggcgctcgtaacattttagcggcggg

SEQ ID NO: 337065 - DNA, 75 bp, synthetic construct
  source 1..75: mol_type = other DNA
gttacccacgatcagggcgaagcgttatcgatgtccgatcgggtggcggttttcaataatggacgcattgaacag

SEQ ID NO: 337066 - DNA, 75 bp, synthetic construct
  source 1..75: mol_type = other DNA
atggacggtagcgagatgatgaaactggttggttgggcgcagtcggtagtgaccttccacggtggcgcttctcaa

SEQ ID NO: 337067 - DNA, 75 bp, synthetic construct
  source 1..75: mol_type = other DNA
ccagcgtatacaagccagcgttgcgcgtactgtggtcatacagcgaaagagaaccgcctgtcacaaagtaaattc

SEQ ID NO: 337068 - DNA, 75 bp, synthetic construct
  source 1..75: mol_type = other DNA
cctacgtttaaaacaaaacttgagggagtaacgttaaatatcggacagttatcaggaaatggcaccttcttgatg

SEQ ID NO: 337069 - DNA, 75 bp, synthetic construct
  source 1..75: mol_type = other DNA
gccagtacgtctccagtggtggcagcgccactaacacaaccgtttacagcggtggacgtcagcatgtttacatcg

SEQ ID NO: 337070 - DNA, 75 bp, synthetic construct
  source 1..75: mol_type = other DNA
gagtggcaccaacactaacggcagcttcagtattgccggtggcagtgccgtcaatatgctgctggagaatggtgg

SEQ ID NO: 337071 - DNA, 75 bp, synthetic construct
  source 1..75: mol_type = other DNA
tggcaccaacactaacggcagcttcagtattgccggtggcagtgccgtcaatatgctgctggagaatggtggagg

SEQ ID NO: 337072 - DNA, 75 bp, synthetic construct
  source 1..75: mol_type = other DNA
cgctgcgagagaaaatcagcgcgctggatgaaaaattattagcattactggcagagcggcgcgaattggccgtcg

SEQ ID NO: 337073 - DNA, 75 bp, synthetic construct
  source 1..75: mol_type = other DNA
ccctgactgataaaggggcgctcgtcggtgacgtagtcacaaacgaaggcaacctgtattacctcaacaacagta

SEQ ID NO: 337074 - DNA, 75 bp, synthetic construct
  source 1..75: mol_type = other DNA
caatatgctgctggaaaacggcggatacctgacggtgtttgacggtcatcaggccagcgatacgatggttggcag

SEQ ID NO: 337075 - DNA, 75 bp, synthetic construct
  source 1..75: mol_type = other DNA
atgctggcgtctgggctgaagctcgttatgaaaacggtaagcagaccgagtcaccaataactggtggcgttggtt

SEQ ID NO: 337076 - DNA, 75 bp, synthetic construct
  source 1..75: mol_type = other DNA
ggcggtggcattgccacgaacactacagttaatcgcggagggtatcagcaaatctacagtggtggcagtgctact

SEQ ID NO: 337077 - DNA, 75 bp, synthetic construct
  source 1..75: mol_type = other DNA
aagaaagaagaaaaacccgctaagaaaggcaaacgtaagccgaaatcaaaagaagcgtatgtaccgcgcgtaatg

SEQ ID NO: 337078 - DNA, 75 bp, synthetic construct
  source 1..75: mol_type = other DNA
cggcgctagtgccacaaacactattattaacaatagaggcagtatggctgtcgaagtcggcggtagcgccacgaa

SEQ ID NO: 337079 - DNA, 75 bp, synthetic construct
  source 1..75: mol_type = other DNA
gcgtcagtttgtctccaaaggcggtatcgccattgctacttctattaatagcggcggtcgccagtatgtcagaat

SEQ ID NO: 337080 - DNA, 75 bp, synthetic construct
  source 1..75: mol_type = other DNA
tttacagtggtcatcaggccagcgatacaaccgttggcagcagcgggacgctgaaagtccgcagcggcggaaatg

SEQ ID NO: 337081 - DNA, 75 bp, synthetic construct
  source 1..75: mol_type = other DNA
atccgcagccattccagcaatgcagcaaattccttaatcgttatccgcactggaagattgaatataccgaaagta

SEQ ID NO: 337082 - DNA, 75 bp, synthetic construct
  source 1..75: mol_type = other DNA
tgccactatcccaatgtccgagtggctggataaacgcacccgtctgcgtaagaaaaatttattttctaatcagca

SEQ ID NO: 337083 - DNA, 75 bp, synthetic construct
  source 1..75: mol_type = other DNA
gatttcgaaaccggcgtcgataaggtctttgccctgggtgacagcagtttagctgtgggtaccttcttctcttac

SEQ ID NO: 337084 - DNA, 75 bp, synthetic construct
  source 1..75: mol_type = other DNA
tccggtcgcaggtaaaccagatgcaggtgtgtcgtctccggtgcgtcgcacaacaaaatcagccgacgcggtact

SEQ ID NO: 337085 - DNA, 75 bp, synthetic construct
  source 1..75: mol_type = other DNA
tggttaccagtttgtctccagtggcggcagtgccacgggcaccaccattaacggcagtggttaccagtatatctt

SEQ ID NO: 337086 - DNA, 75 bp, synthetic construct
  source 1..75: mol_type = other DNA
gcagtgccgttgacattactcagaagagcggtgggggaatttctacagacacttcagccactctgagtgggacca

SEQ ID NO: 337087 - DNA, 75 bp, synthetic construct
  source 1..75: mol_type = other DNA
aatcttggcatgaattttgatattgctggaagcgtcatcagaccgtacctgataaccgcaatcagccatgagttt

SEQ ID NO: 337088 - DNA, 75 bp, synthetic construct
  source 1..75: mol_type = other DNA
atttttaacagtgaactgcagaatctacgtttccgtcatggtgatgtcatagagaacacccgtttaccgggtgga

SEQ ID NO: 337089 - DNA, 75 bp, synthetic construct
  source 1..75: mol_type = other DNA
aatggtggactcctgatggttctgcagggtcatcaggctatagatacccaggtatctaaaggtggtgaattacag

SEQ ID NO: 337090 - DNA, 75 bp, synthetic construct
  source 1..75: mol_type = other DNA
tgaaagagctaggtgaaatcactcgctcgatgaaagtcctgggctgttacccaagcgagaatgtggtaccagtcg

SEQ ID NO: 337091 - DNA, 75 bp, synthetic construct
  source 1..75: mol_type = other DNA
tgaatggcaccaatgctaagggtcaattcagtattgccggggggagtgccagcaatatgttgctggagaacggcg

SEQ ID NO: 337092 - DNA, 75 bp, synthetic construct
  source 1..75: mol_type = other DNA
gtactacggtaaacagcggggttcagtatatcaacagcggcggcagtgccacagataccatcattaacagtggtt

SEQ ID NO: 337093 - DNA, 75 bp, synthetic construct
  source 1..75: mol_type = other DNA
cgcaggaaggcggtggcacccgcttcagcggcctgttgtctcaggacggtgggattttccttaagagtggcgggg

SEQ ID NO: 337094 - DNA, 75 bp, synthetic construct
  source 1..75: mol_type = other DNA
taccggtggccatttagtcggcggtaaacgcggcgcagtcatgggcggaatagggacaattggtgtaatcgtcgg

SEQ ID NO: 337095 - DNA, 75 bp, synthetic construct
  source 1..75: mol_type = other DNA
ataaaccgctgatactgattaataactatattggcgatccgaaactcgacactttatttaatcaattaaccgccg

SEQ ID NO: 337096 - DNA, 75 bp, synthetic construct
  source 1..75: mol_type = other DNA
ggcactggaaaaacgcatacctgctggttttgagatggttatcaataacttctcattaggtatcgcggggatgct

SEQ ID NO: 337097 - DNA, 75 bp, synthetic construct
  source 1..75: mol_type = other DNA
cgaaaggctcgttcctggcgacaattgccggagttacggtaggcacgctggtctcctttgtcatcacttcactga

SEQ ID NO: 337098 - DNA, 75 bp, synthetic construct
  source 1..75: mol_type = other DNA
gtgtcctttgtcatcacatccctgatactgaagatggaaaaaacggtggaaacggagagcgaagatgagttcacc

SEQ ID NO: 337099 - DNA, 75 bp, synthetic construct
  source 1..75: mol_type = other DNA
gttatttattcccaccggttggctgcctaacgaacatttcgccaaaattgtcggcccgatgattacctatttatt

SEQ ID NO: 337100 - DNA, 75 bp, synthetic construct
  source 1..75: mol_type = other DNA
ccgcacaacaccttacatgctggttgaggaagtggcgcttgctgcgcagcgcctgcgcgatgccggtgagtctgt

SEQ ID NO: 337101 - DNA, 75 bp, synthetic construct
  source 1..75: mol_type = other DNA
tgatgacagtcatgctgtggcgtctcgatgccggtgatatcgctggcgcgctggaaattgcgccatacgcgctga

SEQ ID NO: 337102 - DNA, 75 bp, synthetic construct
  source 1..75: mol_type = other DNA
aggcaaaatcacccttgatacaccagagatgatgcaggcgctgacctattaccgcgaccttgctgccaacaccat

SEQ ID NO: 337103 - DNA, 75 bp, synthetic construct
  source 1..75: mol_type = other DNA
atgcggggatgggctccagtgcgatgggcgcgaccaccttccgtaaacgcctggaaaaagcggggctggcaattg

SEQ ID NO: 337104 - DNA, 75 bp, synthetic construct
  source 1..75: mol_type = other DNA
cagtcagccaatgcggttaaggcgatgaaacaagaaggcgctttctcattaagccgtgttaagcgtatcgctttt

SEQ ID NO: 337105 - DNA, 75 bp, synthetic construct
  source 1..75: mol_type = other DNA
gtgcgatgggcgcgaccaccttccgtaaacgcctggaaaaagcggggctggcaattgaagtaaaacattacgcca

SEQ ID NO: 337106 - DNA, 75 bp, synthetic construct
  source 1..75: mol_type = other DNA
ctggcactgacgccgaaaggctcgttcctggcgacaattgccggtgttacggtaggtaccctggtgtcctttgct

SEQ ID NO: 337107 - DNA, 75 bp, synthetic construct
  source 1..75: mol_type = other DNA
agcttgagtacaagcagctctggcgtggcggtcaggtgcttgctgttccgccagcgtacacaagccagcgttgcg

SEQ ID NO: 337108 - DNA, 75 bp, synthetic construct
  source 1..75: mol_type = other DNA
caggtgcttgctgttccgccagcgtagacaagccagcgttgcgcgtgctgtggtcatacagcgaaagataatcgc

SEQ ID NO: 337109 - DNA, 75 bp, synthetic construct
  source 1..75: mol_type = other DNA
caggtgcttgctgttccgccagcgtatacaagccagcgttgcgcgtactgtggtcatacagcgaaagacaatcgc

SEQ ID NO: 337110 - DNA, 75 bp, synthetic construct
  source 1..75: mol_type = other DNA
atgtacgccgaaagctgcaaaccggaagacgccattgccgcgcataactgggaaacgctgcgctgctggagtttt

SEQ ID NO: 337111 - DNA, 75 bp, synthetic construct
  source 1..75: mol_type = other DNA
tccacgcccagtgaaactcaccgataacgtgaccgcctttgatgcggtagagattaataactggctggctgagcg

SEQ ID NO: 337112 - DNA, 75 bp, synthetic construct
  source 1..75: mol_type = other DNA
tgcatatgcagagcaagctgctggagaaccgcaataaaatgctgaaggctcaggggattaacgagacgttgttta

SEQ ID NO: 337113 - DNA, 75 bp, synthetic construct
  source 1..75: mol_type = other DNA
gcccgccaaaagatgaagtgcgcctggttccgctgacagatataagctatgtcaggcagatggaaagctggatga

SEQ ID NO: 337114 - DNA, 75 bp, synthetic construct
  source 1..75: mol_type = other DNA
cgcgacacagctcgactgtcaggcaggcgtcaaaaaagagattgaacgactggagcgggagctgaaaccgaagcc

SEQ ID NO: 337115 - DNA, 75 bp, synthetic construct
  source 1..75: mol_type = other DNA
ggagccgcagcccaaagcggtcacccgcgccccgcgtaagacacggagcgtgacaccggcaaaacgtggacgccc

SEQ ID NO: 337116 - DNA, 75 bp, synthetic construct
  source 1..75: mol_type = other DNA
caggtgcttgctgttccgccagcgtaaacaagccagcgttgcgcgttctgtggtcatacagcgaaagacaatcgc

SEQ ID NO: 337117 - DNA, 75 bp, synthetic construct
  source 1..75: mol_type = other DNA
ctggccaccctctggaatacgggcgcccgcattaacgaggcgctggcgcttactcgaggggatttttcgctggca

SEQ ID NO: 337118 - DNA, 75 bp, synthetic construct
  source 1..75: mol_type = other DNA
agtacacttttcgattccggtcacaccacacaccttccggcacagctatatcatgcacatgctctatcaccgcca

SEQ ID NO: 337119 - DNA, 75 bp, synthetic construct
  source 1..75: mol_type = other DNA
gtactgcgtattgtgcgtaccgaagatggtagcgcatggaccggtgttcctgtcagcgcctggattggcggtatc

SEQ ID NO: 337120 - DNA, 75 bp, synthetic construct
  source 1..75: mol_type = other DNA
gctctaacgtctgggatttccaggcacgtcgtatgcaggcacgctgccgcagcaagtctgacaagaaaacccgtc

SEQ ID NO: 337121 - DNA, 75 bp, synthetic construct
  source 1..75: mol_type = other DNA
ggctgcgaccaccactggtttgaaaaccggggtcgaccctgttctgccctggtctatgttgacgatgccaccagt

SEQ ID NO: 337122 - DNA, 75 bp, synthetic construct
  source 1..75: mol_type = other DNA
atataactttccggtgattaattccgctaaccggtggtctgctgctgaattaaattattcacgttcactgtttaa

SEQ ID NO: 337123 - DNA, 75 bp, synthetic construct
  source 1..75: mol_type = other DNA
atcgccgctgcctgcatctgcaattaacggaaaaaggtcacgagtttttgcgcgaggttttaccaccgcagcata

SEQ ID NO: 337124 - DNA, 75 bp, synthetic construct
  source 1..75: mol_type = other DNA
ctgtcgcaatttatgttggatctgcacaccgagcagcacggttatagcgaaaactatgtcccttatctggttaac

SEQ ID NO: 337125 - DNA, 75 bp, synthetic construct
  source 1..75: mol_type = other DNA
tgatcccaacggcagaagttccgctgaccaacctggtgcgcggtgaaatcatcgatgaagatgatctgccaatta

SEQ ID NO: 337126 - DNA, 75 bp, synthetic construct
  source 1..75: mol_type = other DNA
gctaaactcgccacgctgtcagatggcacagtctttgggcctgtaaacagttttcagaaaaaccagaagacgctg

SEQ ID NO: 337127 - DNA, 75 bp, synthetic construct
  source 1..75: mol_type = other DNA
cagatgccaggtatgtggatatacagcgaacgccgatgtaaatggcgctcgcaacattttagcggcggggcacgc

SEQ ID NO: 337128 - DNA, 75 bp, synthetic construct
  source 1..75: mol_type = other DNA
ctgtcacaaagtaaattcagatgccaggcatgtggatatacagcgaacgccgatgtaaacggcgctcgtaacatt

SEQ ID NO: 337129 - DNA, 75 bp, synthetic construct
  source 1..75: mol_type = other DNA
tgactttccgtaaagagctggaaaaaattctgcgtgacccggcactgagccagacgctgcgtgatgaactgcgtg

SEQ ID NO: 337130 - DNA, 75 bp, synthetic construct
  source 1..75: mol_type = other DNA
aggctttccgaaaggaactggaaaaaattctgctcgacccggcattaagcgcagaactcagagccgaactttcag

SEQ ID NO: 337131 - DNA, 75 bp, synthetic construct
  source 1..75: mol_type = other DNA
tggtcatacagcgaaagaaaatcgcctgtcacaaagtcaattcagatgccaggcatgtggatatacagcgaacgc

SEQ ID NO: 337132 - DNA, 75 bp, synthetic construct
  source 1..75: mol_type = other DNA
gccgaaagtcggcaaattgcgtaaagtctttttcaactattgccagtattcctcgcgctatcaacgttacctgga

SEQ ID NO: 337133 - DNA, 75 bp, synthetic construct
  source 1..75: mol_type = other DNA
gagaagcaatcttacacaagcatttgaacggatttatcagagcatccccttcactacaggagtttcccttcatga

SEQ ID NO: 337134 - DNA, 75 bp, synthetic construct
  source 1..75: mol_type = other DNA
ttcataataacgaaaacaaaatacagaataacacttcctccctcgaaatattacattaccctaacgataaaatcg

SEQ ID NO: 337135 - DNA, 75 bp, synthetic construct
  source 1..75: mol_type = other DNA
tcagcttgggaagacatgacctgcttattcgcaccttccttaacatctttgtgataaacatcacatatgcaaatt

SEQ ID NO: 337136 - DNA, 75 bp, synthetic construct
  source 1..75: mol_type = other DNA
ccatgactacgccaaagttatggacaaagagcagcttatcgatcgcaaggcggttgccacggtcatcagcaacgt

SEQ ID NO: 337137 - DNA, 75 bp, synthetic construct
  source 1..75: mol_type = other DNA
tatttctgatgatgttcatgcagacttcaacttcacccaaaaacaacatcaaacaatttcttctataagctcata

SEQ ID NO: 337138 - DNA, 75 bp, synthetic construct
  source 1..75: mol_type = other DNA
gacaatctaaggaaaatagcttcattagcagaaaaatataatgtttttattatttctgatgatgttcatgcagac

SEQ ID NO: 337139 - DNA, 75 bp, synthetic construct
  source 1..75: mol_type = other DNA
gcggtcagtcgcatcaccgccaaattgctgacagagatccgccgccagacaggggtgatttttccggcagatagc

SEQ ID NO: 337140 - DNA, 75 bp, synthetic construct
  source 1..75: mol_type = other DNA
accgccagtttgctggcaagcggcgtagatgcccacggcgtggtggtaatggattacggtgatttcagcgttacg

SEQ ID NO: 337141 - DNA, 75 bp, synthetic construct
  source 1..75: mol_type = other DNA
ccgaaaagcgtgcaggcaaccgccagtttgctggcaagcggtgtagatgcccacggcgtggtggtgatggattac

SEQ ID NO: 337142 - DNA, 75 bp, synthetic construct
  source 1..75: mol_type = other DNA
atgttcccaaaaataatgaatgatgaaaattttttcaaaaaagcggcggcgcacggggaggaaccaccattaact

SEQ ID NO: 337143 - DNA, 75 bp, synthetic construct
  source 1..75: mol_type = other DNA
ctggtggtggctggtgttggtcggctgggcttttgtctggccgcatttagcctggcagttagcgagcagagccat

SEQ ID NO: 337144 - DNA, 75 bp, synthetic construct
  source 1..75: mol_type = other DNA
gtgcggtgattagcgaagagctggccacggcggcagcattgcgtcagcagcaggcgttgctgacacggctggcag

SEQ ID NO: 337145 - DNA, 75 bp, synthetic construct
  source 1..75: mol_type = other DNA
cgggagtataattaacgagcctgaacttgcaggtggtgttttatcacgattagatattactcctgtaagttttca

SEQ ID NO: 337146 - DNA, 75 bp, synthetic construct
  source 1..75: mol_type = other DNA
aacaaattattgtttgttgaatggaaacctgaacttgaagaggccgacattagtgattctgttattcataaaaaa

SEQ ID NO: 337147 - DNA, 75 bp, synthetic construct
  source 1..75: mol_type = other DNA
atcctaacgtcgccaaccgcaacaaaggcccgcgtcgtcagccggaaaagaatgtcttcaccgatgaacagattg

SEQ ID NO: 337148 - DNA, 75 bp, synthetic construct
  source 1..75: mol_type = other DNA
ttacgtgaaataggtggtgcccctatcgtcgatttcatcaaaacaatgctcgcgttcaaatctgatgtaaaccta

SEQ ID NO: 337149 - DNA, 75 bp, synthetic construct
  source 1..75: mol_type = other DNA
atctagctgaatcaatttcagttgcttggggtttagatactgagaaagccgcctcattaactcgtgattgtgcgg

SEQ ID NO: 337150 - DNA, 75 bp, synthetic construct
  source 1..75: mol_type = other DNA
ctcaatccggccagatccctgctgattttatttctgtttttaatgacggtgacgttgtccgtgatattaaattta

SEQ ID NO: 337151 - DNA, 75 bp, synthetic construct
  source 1..75: mol_type = other DNA
accggcgttggtcacggggtttatgagaacgtgaaagcgttctttcctgccgtgcgggagtttgtctacaacccc

SEQ ID NO: 337152 - DNA, 75 bp, synthetic construct
  source 1..75: mol_type = other DNA
ccgccgaacgcgtggaaatcgacgtcagtcataacgcccttgccggaggtcttctctgtgcggacggccagtggc

SEQ ID NO: 337153 - DNA, 75 bp, synthetic construct
  source 1..75: mol_type = other DNA
atgttactcaggaagcgtcctttatcaggaatacacgacccgcgtcgtcaggcggcgctgctgtactggcagggg

SEQ ID NO: 337154 - DNA, 75 bp, synthetic construct
  source 1..75: mol_type = other DNA
gccctggtactcaaggcctacgacattatcagtcaccgccgcctagaatttgacgccggacacaccgacattgcg

SEQ ID NO: 337155 - DNA, 75 bp, synthetic construct
  source 1..75: mol_type = other DNA
accctaacgttgccaaccgcaacaaaggcccgcgccgtcagccggaaaagaatgttttcaccgatgagcagattg

SEQ ID NO: 337156 - DNA, 75 bp, synthetic construct
  source 1..75: mol_type = other DNA
accctaacgtcgccaaccgcaataaaggcccacaccgtcagccggaaaagaatgttttcaccgatgagcagattg

SEQ ID NO: 337157 - DNA, 75 bp, synthetic construct
  source 1..75: mol_type = other DNA
tcaatcaaagcgcaaatccaagcaatgagcaggttgttgtgttcggctggattgctgagtatttcgaaagcattt

SEQ ID NO: 337158 - DNA, 75 bp, synthetic construct
  source 1..75: mol_type = other DNA
gcacaaagaagggaaagatttcaaagagattgacctgctggcgcgccagtctgagcgccacgcgcggatcggcaa

SEQ ID NO: 337159 - DNA, 75 bp, synthetic construct
  source 1..75: mol_type = other DNA
gacttccgcgcccaggctgacgccatcaaaaaactgacccagcagtacaacgtaacctatatcggcatcgactcg

SEQ ID NO: 337160 - DNA, 75 bp, synthetic construct
  source 1..75: mol_type = other DNA
ggatcggctatgacccggcgaaaggcacacagaacggcgacagcgcaggctgcgtggtgatggccccgcctgccg

SEQ ID NO: 337161 - DNA, 75 bp, synthetic construct
  source 1..75: mol_type = other DNA
acttgctctggcactggtgttttcactgcccgttttcgccgctgaacactggatcgatgttcgtgttccagagca

SEQ ID NO: 337162 - DNA, 75 bp, synthetic construct
  source 1..75: mol_type = other DNA
aggcccgcgccgtcagccggaaaagaatgttttcaccgatgagcagattgagaagttggaagaaatcttccattc

SEQ ID NO: 337163 - DNA, 75 bp, synthetic construct
  source 1..75: mol_type = other DNA
gaccgactttcatgcactggcgctgcgcccatttggctggcgcgaagtgtggatcggttatgacccggcaaaagg

SEQ ID NO: 337164 - DNA, 75 bp, synthetic construct
  source 1..75: mol_type = other DNA
agatcattttctcactcctccaatctctattggaaaataatattactaagtagtgttgggtacttatttttttgg

SEQ ID NO: 337165 - DNA, 75 bp, synthetic construct
  source 1..75: mol_type = other DNA
ttgggctgggatatattggtttaccaacagcagcggtgatcgccagcaacggcatccgtgtcgttggtgtggatg

SEQ ID NO: 337166 - DNA, 75 bp, synthetic construct
  source 1..75: mol_type = other DNA
gtttagggtatattggtttacctactgcagcagtgattgcgagcaacaatattcacgttgttggtgtagatatca

SEQ ID NO: 337167 - DNA, 75 bp, synthetic construct
  source 1..75: mol_type = other DNA
gttctggtccggcgcactgttcaaccggggccgcgccaaagcggacaaggtggatattgacctgacccacggcag

SEQ ID NO: 337168 - DNA, 75 bp, synthetic construct
  source 1..75: mol_type = other DNA
acttcgccaaagaagtggaggtggagctgaaaggcgatccgattgtgcttcccaacggggccacgctttacttcc

SEQ ID NO: 337169 - DNA, 75 bp, synthetic construct
  source 1..75: mol_type = other DNA
ccagctcattatgaaggagcacaaagaaggaaaagatttcaaagagattgacctgctggcacgccagtcggaacg

SEQ ID NO: 337170 - DNA, 75 bp, synthetic construct
  source 1..75: mol_type = other DNA
gaccgactttcatgcactggcactgcgcccatttggctggcgcgaagtgtggatcggttatgacccggcgaaagg

SEQ ID NO: 337171 - DNA, 75 bp, synthetic construct
  source 1..75: mol_type = other DNA
atgttacgcagcagggtgacggtgttcggcattctgaatctcaccgaggactccttcttcgatgagagccggcgg

SEQ ID NO: 337172 - DNA, 75 bp, synthetic construct
  source 1..75: mol_type = other DNA
gaaatcgcccgccccacgctggaagcccacgattatgatcgcggggcactgtggagcaaatgggataacgccagc

SEQ ID NO: 337173 - DNA, 75 bp, synthetic construct
  source 1..75: mol_type = other DNA
gctcccttaaaggcgcgaaaaacgtttattacaacatggcgttaatgaatgccggagtgaaaaaagttgtggtca

SEQ ID NO: 337174 - DNA, 75 bp, synthetic construct
  source 1..75: mol_type = other DNA
ccaggcagcaaaagagatatctctggcagaagcaccaaaatttgccgaagccatcattaataaccagatccaggg

SEQ ID NO: 337175 - DNA, 75 bp, synthetic construct
  source 1..75: mol_type = other DNA
gcggactgcaggctggtggttatgcactcagcgcagcgggatggcatcgccacccgcaccggtcaccttcgaccc

SEQ ID NO: 337176 - DNA, 75 bp, synthetic construct
  source 1..75: mol_type = other DNA
gcgctgtcaccgcggcgatcgaaatgctgcgagtcggatcagacgtcgtggatgtcggaccggccgccagccatc

SEQ ID NO: 337177 - DNA, 75 bp, synthetic construct
  source 1..75: mol_type = other DNA
ggaaaaaggctgtatcgttgcaccgggtgtcgcagagtttcatgtgcgtcacggtttgcctgccagcgatatcat

SEQ ID NO: 337178 - DNA, 75 bp, synthetic construct
  source 1..75: mol_type = other DNA
cctcggtattgtccgtcaggtgaaagcggcgaatccacaggcgaaatatttttgcgatccggtaatggggcatcc

SEQ ID NO: 337179 - DNA, 75 bp, synthetic construct
  source 1..75: mol_type = other DNA
cgctggtggattttggtatgcgccagccggtaggtgttggtgatgtgacgagcggtttactgctggtgaaactgc

SEQ ID NO: 337180 - DNA, 75 bp, synthetic construct
  source 1..75: mol_type = other DNA
ggatgtgaaaacccgaaaaattctgggctggcgctgcgatgtaagcgagaacatcgattcaattcgcctctcgtt

SEQ ID NO: 337181 - DNA, 75 bp, synthetic construct
  source 1..75: mol_type = other DNA
agtgtgcgggtttatctggtttacctggttcattaatggggattcacaaaagggcacagagagaaggatggctca

SEQ ID NO: 337182 - DNA, 75 bp, synthetic construct
  source 1..75: mol_type = other DNA
atgatcaaacccacattctggcgagcgttcgccctgaccgctacgcttatcctcaccggctgtagccactcgcaa

SEQ ID NO: 337183 - DNA, 75 bp, synthetic construct
  source 1..75: mol_type = other DNA
tgattcctgggatcgattttgccggaactgtacgcaccagcgaagatccgcgttttcatgccggtcaggacgtgt

SEQ ID NO: 337184 - DNA, 75 bp, synthetic construct
  source 1..75: mol_type = other DNA
gcaaaagagatccttagcgagatgggatatacccacgttgagaacgccggtggcctgaaagacatcgcaatgccg

SEQ ID NO: 337185 - DNA, 75 bp, synthetic construct
  source 1..75: mol_type = other DNA
cgcattgccaccgccgttccggataaaaacgacaccgtgaaagtgtattgcaatgccggacgccagtcagggcag

SEQ ID NO: 337186 - DNA, 75 bp, synthetic construct
  source 1..75: mol_type = other DNA
ctggaaaaaacgcgacaagtggggtgactatgggccgctggatcagatgcagttcaccaccgccgcacgctactg

SEQ ID NO: 337187 - DNA, 75 bp, synthetic construct
  source 1..75: mol_type = other DNA
gtttgtggacgacctcgcgtccgtgttcccgctcagcgaactgcaggcgtgcatggtggacagttgggaagtctg

SEQ ID NO: 337188 - DNA, 75 bp, synthetic construct
  source 1..75: mol_type = other DNA
gctgaaaggcgatccgatggtgcttcccaacggggccacactgtatttcctcggcaccaatgcccgcacggctca

SEQ ID NO: 337189 - DNA, 75 bp, synthetic construct
  source 1..75: mol_type = other DNA
ccgtctggagtttgacgccggacacaccgacattgcgcaatcctttatggcaatccgtcgagcaaccaccgccag

SEQ ID NO: 337190 - DNA, 75 bp, synthetic construct
  source 1..75: mol_type = other DNA
cgttttcatgccggtcaggaagtgttactgacgggttggggcgtcggtgaaaaccactggggcgggctggcacaa

SEQ ID NO: 337191 - DNA, 75 bp, synthetic construct
  source 1..75: mol_type = other DNA
acataagttgggttatcaggtcgttgctgtatctggtcgccagagtacccatgggtatctgaaaagtttaggcgc

SEQ ID NO: 337192 - DNA, 75 bp, synthetic construct
  source 1..75: mol_type = other DNA
gcaggcagcaaaagaaatttcgctggcagatgctccgaagtttgctgaagccattattaataaccaggtgcaagg

SEQ ID NO: 337193 - DNA, 75 bp, synthetic construct
  source 1..75: mol_type = other DNA
tgctattcggtttagtttttttaaccacagtcggcgctgccgagaggacgttaaccccgcaacaacagcgtatga

SEQ ID NO: 337194 - DNA, 75 bp, synthetic construct
  source 1..75: mol_type = other DNA
tgctattcggtctggtttttttaaccactgtcggcgctgccgagaagacgttaaccccacaacaacagcgtatga

SEQ ID NO: 337195 - DNA, 75 bp, synthetic construct
  source 1..75: mol_type = other DNA
gcgtaatggcactggaagatgccggtattcgtccgcaggatggcgagattgtggtgacgggcgccagtggcggcg

SEQ ID NO: 337196 - DNA, 75 bp, synthetic construct
  source 1..75: mol_type = other DNA
tagcctggtcattacaaatgttgggagaaaatgttctggtggtcgatgcctgcccggacaacttgttgcgcctgt

SEQ ID NO: 337197 - DNA, 75 bp, synthetic construct
  source 1..75: mol_type = other DNA
atcgcagtgatgcgctggcggctgaagagatactgacgctggctaactggtgcctgttgaactattccgggctga

SEQ ID NO: 337198 - DNA, 75 bp, synthetic construct
  source 1..75: mol_type = other DNA
tgcggggaggcgtgggtactacaaccattactgctgcgttagcctggtcattgcaaatgttgggagaaaacgtgc

SEQ ID NO: 337199 - DNA, 75 bp, synthetic construct
  source 1..75: mol_type = other DNA
tggcgattgaagaagacaagcccagcgatatggatgacgccattgtggaggaaagcgatcacgatgatggtctgg

SEQ ID NO: 337200 - DNA, 75 bp, synthetic construct
  source 1..75: mol_type = other DNA
cgcgggcatgagcaggataacgaaacgctaaaatccaatgctattcgctggttgcggggagagtacaccaccaaa

SEQ ID NO: 337201 - DNA, 75 bp, synthetic construct
  source 1..75: mol_type = other DNA
atgtctgtaacacgtataagagtgaaagagcgcgacgctatcattcagtcacttaagtcgggagtaacgccaaga

SEQ ID NO: 337202 - DNA, 75 bp, synthetic construct
  source 1..75: mol_type = other DNA
gaaagacgcaatcgcacaaatcgacatcatgcagagtcgtgctgttcaggcaaatcttgcatatcagagcaacca

SEQ ID NO: 337203 - DNA, 75 bp, synthetic construct
  source 1..75: mol_type = other DNA
gaaccgtattgatatttactgagaagtcagatcaactttccagggcaacagatcgcgtacccggtttgccggcca

SEQ ID NO: 337204 - DNA, 75 bp, synthetic construct
  source 1..75: mol_type = other DNA
aagaaaaccggaaaaccagaacattaatcgcgatgccttgccgttgatcaacatctcccggtctatggatatcag

SEQ ID NO: 337205 - DNA, 75 bp, synthetic construct
  source 1..75: mol_type = other DNA
atggccgtactgggattgcagggggtgcggggaggcgtggggacaacaaccatcaccgccgcattagcctggtca

SEQ ID NO: 337206 - DNA, 75 bp, synthetic construct
  source 1..75: mol_type = other DNA
gccagtgatttgagtgcactgatgatgcttttcagccaacaggccggtcagcctatgaccatgttgttgatttgt

SEQ ID NO: 337207 - DNA, 75 bp, synthetic construct
  source 1..75: mol_type = other DNA
tcacacgccagtcatcagacaaaaagccagtgatttgagtgcactggtgatgcttttcagccaacaggccggtca

SEQ ID NO: 337208 - DNA, 75 bp, synthetic construct
  source 1..75: mol_type = other DNA
agccaaaaaggtcgcgaaggtgtggccggcgggcagcgtcgatctggaacaggcgtgggccgcagcaccggattt

SEQ ID NO: 337209 - DNA, 75 bp, synthetic construct
  source 1..75: mol_type = other DNA
ggtgaagaggaagtaaaggggctggacagtattcgggatgcctctgctgtgcttaaaaaaatcccttccatcaat

SEQ ID NO: 337210 - DNA, 75 bp, synthetic construct
  source 1..75: mol_type = other DNA
tcctcgcgtggcgttgctcaatattggtgaagaagaagtaaagggtctcgacagtattcgggatgcctcagctgt

SEQ ID NO: 337211 - DNA, 75 bp, synthetic construct
  source 1..75: mol_type = other DNA
tgtcagtgccggtaataccggggcactgatggggctggcaaaattattactcaagcccctggaggggattgagcg

SEQ ID NO: 337212 - DNA, 75 bp, synthetic construct
  source 1..75: mol_type = other DNA
ggcttcgatatcacggtcggcaaccacacccagctcgatggtgcggttatcgcttccacggcgacggcagataaa

SEQ ID NO: 337213 - DNA, 75 bp, synthetic construct
  source 1..75: mol_type = other DNA
gcagcagtgtccacggtgacggcgggcgataacttcctccttgttgccggtcgtgatattgccagtcaggctgcc

SEQ ID NO: 337214 - DNA, 75 bp, synthetic construct
  source 1..75: mol_type = other DNA
gtacagatacgtcctggcgctttaaggaaacgaagaaatccggtctgatgggtaccggcggtattggtttcacca

SEQ ID NO: 337215 - DNA, 75 bp, synthetic construct
  source 1..75: mol_type = other DNA
accgcgcgctattgaatgatgcgggcttgccggggactgaaaaagagattcaggcgaaatttcaaactatcgctg

SEQ ID NO: 337216 - DNA, 75 bp, synthetic construct
  source 1..75: mol_type = other DNA
ccgtctggaacgtaaggcggcgacgtgcgcccagggcgcggtgacgtttattaaaaccagtgccgatgaaaatgt

SEQ ID NO: 337217 - DNA, 75 bp, synthetic construct
  source 1..75: mol_type = other DNA
cggtatctgaaacaaaagcggataccgagtttttccggatgatgacgctgtccttcctggccctgcgtcttaacg

SEQ ID NO: 337218 - DNA, 75 bp, synthetic construct
  source 1..75: mol_type = other DNA
atggtggttttggcgttggtgcagtggggctttctacgggtaaagatggtgttagtttcacttttggttttggcc

SEQ ID NO: 337219 - DNA, 75 bp, synthetic construct
  source 1..75: mol_type = other DNA
tcatatttcagttaatcaaggggatatttatagtataggtgctcatggcggagcctcgatcggattatcctttgg

SEQ ID NO: 337220 - DNA, 75 bp, synthetic construct
  source 1..75: mol_type = other DNA
gcggtaacggtatacgtcaaaagcgtggaaaacatggaagcggaagacctgagcgcgttaaaaacaggtattacc

SEQ ID NO: 337221 - DNA, 75 bp, synthetic construct
  source 1..75: mol_type = other DNA
ccatcgaaatcatgaatgcaacggaagcttctgatggttaccagactgacctgccgctgtcagtgtttgacccgc

SEQ ID NO: 337222 - DNA, 75 bp, synthetic construct
  source 1..75: mol_type = other DNA
gtggggacaggggcgaacggtcatcatcagcgcccatcgtctttctgcactgacagaagccagtgaaataattgt

SEQ ID NO: 337223 - DNA, 75 bp, synthetic construct
  source 1..75: mol_type = other DNA
cgtacatgacgatattttgcgtctaccgcaaggttacgatacagaagtgggcgagcgcggcgtgatgctttccgg

SEQ ID NO: 337224 - DNA, 75 bp, synthetic construct
  source 1..75: mol_type = other DNA
ggctcgtgcgactaatgacgtcgatcgcgtcgtgtttgccgccggagaaggggtgctgacgctagtggattcact

SEQ ID NO: 337225 - DNA, 75 bp, synthetic construct
  source 1..75: mol_type = other DNA
atgagaaaaagctggactatagaggaagattgtaagctgcttaccttggtacgtcggtacttttccacgttggta

SEQ ID NO: 337226 - DNA, 75 bp, synthetic construct
  source 1..75: mol_type = other DNA
tgggaaatatttaaaaactcggagtctgccggattttcctctcagacaggtgcccttgggttatcattatttgta

SEQ ID NO: 337227 - DNA, 75 bp, synthetic construct
  source 1..75: mol_type = other DNA
tcgcatgagtgaaaatcaacttcttgaactggctaagtatatagtttctcaacacgaagaatcaaaaaaattaag

SEQ ID NO: 337228 - DNA, 75 bp, synthetic construct
  source 1..75: mol_type = other DNA
cgagcgcggcgtgatgctttccggtgggcaaaagcagcgtatctccattgctcgtgcgttattagtcaacgcgga

SEQ ID NO: 337229 - DNA, 75 bp, synthetic construct
  source 1..75: mol_type = other DNA
aacatcgcgttgggttgcccgaatgccacccagcaagagattgagcatgtcgcgcggttagccagcgtacatgac

SEQ ID NO: 337230 - DNA, 75 bp, synthetic construct
  source 1..75: mol_type = other DNA
ctcgtgcgttattagtcaacgcggaaatcctcatccttgatgatgcgctttcggcggtggacggacgcacagagc

SEQ ID NO: 337231 - DNA, 75 bp, synthetic construct
  source 1..75: mol_type = other DNA
ggcgctggcatggatgtttaacattgtggaacgcggtagcgcggcatatagccgcattcgcgcaatgctggccga

SEQ ID NO: 337232 - DNA, 75 bp, synthetic construct
  source 1..75: mol_type = other DNA
caggagagcctcaccagtatccgcatgatcaaagcctttggtctggaagatcgccagtcggcgctatttgccgca

SEQ ID NO: 337233 - DNA, 75 bp, synthetic construct
  source 1..75: mol_type = other DNA
accagatcctgcataacctgcgtcagtgggggcagggaagaacggtaatcatcagtgcccatcgcctttcggcac

SEQ ID NO: 337234 - DNA, 75 bp, synthetic construct
  source 1..75: mol_type = other DNA
aacggcattcaaaaaatgggtacccaaccccaggctagttccgttgctcaaaggcaatgtcggtgaatatctctt

SEQ ID NO: 337235 - DNA, 75 bp, synthetic construct
  source 1..75: mol_type = other DNA
tatctatctgaacgtcgcctacagccagaaccctaataatctgatgtggcaggataatgtggatcacacgatcca

SEQ ID NO: 337236 - DNA, 75 bp, synthetic construct
  source 1..75: mol_type = other DNA
caaataaccatcaatagttaccgtaattgtgagcgtgttggagagaaaactatcaataataatctgcaagatctc

SEQ ID NO: 337237 - DNA, 75 bp, synthetic construct
  source 1..75: mol_type = other DNA
cgcaaacgacctttgagcaagagatggtcaaattcatcactactctgcgcaatttactggcggaaaagtgcgaac

SEQ ID NO: 337238 - DNA, 75 bp, synthetic construct
  source 1..75: mol_type = other DNA
caccggcctcaactactttgttaaataccatgacggcgatcttaatgatatcaatgcaccacgtctggatgtcga

SEQ ID NO: 337239 - DNA, 75 bp, synthetic construct
  source 1..75: mol_type = other DNA
ggctgaaacgcattcgtatgcgcaacagcgaaggcgacataacgcgcaccgagctgtattacgaagtcgaaaatg

SEQ ID NO: 337240 - DNA, 75 bp, synthetic construct
  source 1..75: mol_type = other DNA
ctcgaaactgcgcatgacattggatataaacccaatgttactaaccctgctgggtgtagaaaagttgccgactaa

SEQ ID NO: 337241 - DNA, 75 bp, synthetic construct
  source 1..75: mol_type = other DNA
ggagatgtttcgtgaccagttaggggcatttgaagtcaacggcgacgccgccgaacgcatcatcgcaatcacccg

SEQ ID NO: 337242 - DNA, 75 bp, synthetic construct
  source 1..75: mol_type = other DNA
cggaacaagcccaaagaagcgcaaacgacttttgaacaagagatggtcaaattcattaccatcctgcgagatcta

SEQ ID NO: 337243 - DNA, 75 bp, synthetic construct
  source 1..75: mol_type = other DNA
agtttcgacttgctgattggcggcaagttgctccccaaagctccacagatcagcagcgttgcgactgctgggcat

SEQ ID NO: 337244 - DNA, 75 bp, synthetic construct
  source 1..75: mol_type = other DNA
tcgcgcccaagtctctcaactttaccacgtgcatgaacgtgatggcgctgaggtcatcttcagttccgacggcac

SEQ ID NO: 337245 - DNA, 75 bp, synthetic construct
  source 1..75: mol_type = other DNA
acgtgccggcaaccttgaatatcttgaattgtgtaatttattccgcgattctgactcctttaccgatccccagcg

SEQ ID NO: 337246 - DNA, 75 bp, synthetic construct
  source 1..75: mol_type = other DNA
ttcagtggtacgaaggggcgaaaggtagcaaatatattggcagcgcaatgcgttcgctcaattaccatgtctcac

SEQ ID NO: 337247 - DNA, 75 bp, synthetic construct
  source 1..75: mol_type = other DNA
accgcccggcgaatgggggatgttctgcgtgacaacctcggcggcgacaccgatcgtctgtccggcattttctcc

SEQ ID NO: 337248 - DNA, 75 bp, synthetic construct
  source 1..75: mol_type = other DNA
aaaatcactttgccagtcgatgattgataatcaacaactggtcagccgggtcatcccgacgatgcgccctccttc

SEQ ID NO: 337249 - DNA, 75 bp, synthetic construct
  source 1..75: mol_type = other DNA
agccgctaacagaagcgcagttgcggcgctttccggcggtcaatattgaagacagcgcccgcaccttaaccaaac

SEQ ID NO: 337250 - DNA, 75 bp, synthetic construct
  source 1..75: mol_type = other DNA
agccggtcgcgaactggaagcccacggcatacgggctgacggaagtaaccgcgctgtggaggaagcaatcaggcg

SEQ ID NO: 337251 - DNA, 75 bp, synthetic construct
  source 1..75: mol_type = other DNA
taagtcactccagcgaagcagtgatgcgttttcccgtgcccgccagcaggtgacctcgactgaaaacagcctgaa

SEQ ID NO: 337252 - DNA, 75 bp, synthetic construct
  source 1..75: mol_type = other DNA
tgtctgtcggaggtgggttactgacggggatttttgcaaaacttcagcttggctctgcgcttcttggtggcgggc

SEQ ID NO: 337253 - DNA, 75 bp, synthetic construct
  source 1..75: mol_type = other DNA
attacatgttatcgttgtaaagctatcacgccagtattctttcataataatggaaccgaatatgatgccccacat

SEQ ID NO: 337254 - DNA, 75 bp, synthetic construct
  source 1..75: mol_type = other DNA
ggacggttcacaaaagcttccccagcgtgcgctgacgccctggctgaaattgcatcagcaaaaacaaaacaatgc

SEQ ID NO: 337255 - DNA, 75 bp, synthetic construct
  source 1..75: mol_type = other DNA
gtgtagtaacaggtgaacgtataaatatgccaaaatctatttatattggaaatcatgtctgggttggccgccgag

SEQ ID NO: 337256 - DNA, 75 bp, synthetic construct
  source 1..75: mol_type = other DNA
ctggaaagtatgcccagcgagctgcaacaggtgaatgatggcgtagaacgccaggtaaacatcgtcatcaacaac

SEQ ID NO: 337257 - DNA, 75 bp, synthetic construct
  source 1..75: mol_type = other DNA
agctgagcgaatggggaatacgctgcgtgataatctctccggtgacgttctgaagctgacgggttcgcttgccgg

SEQ ID NO: 337258 - DNA, 75 bp, synthetic construct
  source 1..75: mol_type = other DNA
ggggcgtgctgaggcatccgggtatacacgtcttgttcgtgaactgcatcatgccggtattgctggtgacgctgc

SEQ ID NO: 337259 - DNA, 75 bp, synthetic construct
  source 1..75: mol_type = other DNA
gtgaaaaaagagatctcccgcaacccctctttcacaccttcgcctaagctgcgagcacatctgaactcccacagg

SEQ ID NO: 337260 - DNA, 75 bp, synthetic construct
  source 1..75: mol_type = other DNA
gaatcttggtaaagaggatatcaacagagaacttgaaataatacggcataatattaataagtttaattgtgagat

SEQ ID NO: 337261 - DNA, 75 bp, synthetic construct
  source 1..75: mol_type = other DNA
tctatgtgtttatgcagcagtggcatctcggcaaacttccgtatgaataccaggacgggattcttgatgcgcctg

SEQ ID NO: 337262 - DNA, 75 bp, synthetic construct
  source 1..75: mol_type = other DNA
tttatttatcagattgccgatcgctacgtaacggaagatgtcattccttgcctgggtgacaatggcattgatctt

SEQ ID NO: 337263 - DNA, 75 bp, synthetic construct
  source 1..75: mol_type = other DNA
cggtgatgttgtgaacaaaacacaaaacttcgaagctgttctgcaatatcagttcgactttggtctgcgtccatc

SEQ ID NO: 337264 - DNA, 75 bp, synthetic construct
  source 1..75: mol_type = other DNA
caaaaaaaatgttggcctcctgtcactgacgcgcatatacgaactaaaattcttttatggtatattaaaaatatt

SEQ ID NO: 337265 - DNA, 75 bp, synthetic construct
  source 1..75: mol_type = other DNA
agagaactggaaataatacaacgtaacattaataagtttaattgtgaagttagtgaattaaaactcaaaactgac

SEQ ID NO: 337266 - DNA, 75 bp, synthetic construct
  source 1..75: mol_type = other DNA
cgcaaacagttacgcgctcagcgagtctgaagccgaagatatggccgatttaacggctgtttttgtttttctgaa

SEQ ID NO: 337267 - DNA, 75 bp, synthetic construct
  source 1..75: mol_type = other DNA
gcgtaaaacgttcagaaaataaaaaaatggcggaaatcgcccaattcctgcatgaaaatgatttgagcgttgagg

SEQ ID NO: 337268 - DNA, 75 bp, synthetic construct
  source 1..75: mol_type = other DNA
aaatttctggttaagtctgtcagacacattggagcatatcttactgctgacggcgatgcctgggtgacggttttc

SEQ ID NO: 337269 - DNA, 75 bp, synthetic construct
  source 1..75: mol_type = other DNA
atgtttagcctgtttgctaatgacgatggatctttttcttataaaggcaacatctggctcagtgatgcaacccgt

SEQ ID NO: 337270 - DNA, 75 bp, synthetic construct
  source 1..75: mol_type = other DNA
gtgctggaacgcgaagggttaagcggtgaagagttccgtgtgcaggcgctggagtgtggacaccgtgggctaacc

SEQ ID NO: 337271 - DNA, 75 bp, synthetic construct
  source 1..75: mol_type = other DNA
cgacaatttttctgggacttgtttttcaactcattatgtcgtacacggatatgagattagtttgatgccacatca

SEQ ID NO: 337272 - DNA, 75 bp, synthetic construct
  source 1..75: mol_type = other DNA
caaaagcagagaagtattctgatgaaatgggtaatgagatccagtacgaaggtagttgtgacgtcaaactaattc

SEQ ID NO: 337273 - DNA, 75 bp, synthetic construct
  source 1..75: mol_type = other DNA
gtcggtctgacaggaaactaccgttacgataattttgagtttggtggtgcatttaaatacagcgggtgggtcagg

SEQ ID NO: 337274 - DNA, 75 bp, synthetic construct
  source 1..75: mol_type = other DNA
tagttcttttgtcgatgctacaagtacctggtgctttagcagctatgtacggcacaccatcggaacgagacgggc

SEQ ID NO: 337275 - DNA, 75 bp, synthetic construct
  source 1..75: mol_type = other DNA
aaggtgttagtgctgatcctgagttgcgtattaaggtcgtgaaagctgtgatcgagcagcacatgtcccttaatc

SEQ ID NO: 337276 - DNA, 75 bp, synthetic construct
  source 1..75: mol_type = other DNA
cgagaaaaaggatcaaaagtttattttaatcctaatacaaataatgtggtgatactaaaatcaaatggtgagttc

SEQ ID NO: 337277 - DNA, 75 bp, synthetic construct
  source 1..75: mol_type = other DNA
gataaacagtaacgggcaattagctctggatttactgaaaacagggaatgaaagtatcccagctgcggttcctgt

SEQ ID NO: 337278 - DNA, 75 bp, synthetic construct
  source 1..75: mol_type = other DNA
tgatgcagccagagacgatttaacttactccggcacggcatcgactatagcaacaaaacatgcagaactggattt

SEQ ID NO: 337279 - DNA, 75 bp, synthetic construct
  source 1..75: mol_type = other DNA
cgggaatttgcgaccattcttgccggtatcagcgccggcggtatgtactgcccggagtgtggcacggttcactgg

SEQ ID NO: 337280 - DNA, 75 bp, synthetic construct
  source 1..75: mol_type = other DNA
aaagcaatagataaccacgggaaggaaataacaaacagaaaaggattacctaatgtctgcagagttcatggtaat

SEQ ID NO: 337281 - DNA, 75 bp, synthetic construct
  source 1..75: mol_type = other DNA
ggcaggcgctgccggaagagctgcgcctaagtccgcatcgttatctggcgacgaacagtccgcaggggccgtggt

SEQ ID NO: 337282 - DNA, 75 bp, synthetic construct
  source 1..75: mol_type = other DNA
tgctcggcaaacttgctgacgtcagcgcgcaactattagagcgcctctggttgcgctggaacccggcttatcatc

SEQ ID NO: 337283 - DNA, 75 bp, synthetic construct
  source 1..75: mol_type = other DNA
tcaattcagatgttgcgcaacgtgccgcatctggcgctgatcccactggtgattttgtggtttggcattgatgag

SEQ ID NO: 337284 - DNA, 75 bp, synthetic construct
  source 1..75: mol_type = other DNA
tttgtggtttggcattgatgaatccgcaaaaatctttctggtggcgctcggcacgctattccccatttatatcaa

SEQ ID NO: 337285 - DNA, 75 bp, synthetic construct
  source 1..75: mol_type = other DNA
agccacgcaagcaccttaaaatcaccatcatacactaaatcagtaagttggcagcattacctgcgccttgaagtc

SEQ ID NO: 337286 - DNA, 75 bp, synthetic construct
  source 1..75: mol_type = other DNA
tatcaccctggatacccctgatttagtggttgatcacgtcttcaatggtgggaaaaagcacatttatattatcaa

SEQ ID NO: 337287 - DNA, 75 bp, synthetic construct
  source 1..75: mol_type = other DNA
tcagttgatccagaaaaagcggcgttagcattggagctgtcgaaagaccgacgtattgaggatcttgaaagacaa

SEQ ID NO: 337288 - DNA, 75 bp, synthetic construct
  source 1..75: mol_type = other DNA
aaaagcgccttgaagtcgtgaatcactacttcacaactgatgatggttacaggatcatctctgcacgttttggtg

SEQ ID NO: 337289 - DNA, 75 bp, synthetic construct
  source 1..75: mol_type = other DNA
tcctattgctaactcgttgttattctgattgtttatataaaacaacggcaggaatattcgcaacaaattactttc

SEQ ID NO: 337290 - DNA, 75 bp, synthetic construct
  source 1..75: mol_type = other DNA
agattatcgccgttgccagcaatatcccttctgacatcgtaccggactgcacggttgtcgatctcagcgggcaga

SEQ ID NO: 337291 - DNA, 75 bp, synthetic construct
  source 1..75: mol_type = other DNA
gaaaaaggtttaattcccaaacctaaaggtgttagtgctgatcctgagttgcgtattaaggtcgtgaaagctgtg

SEQ ID NO: 337292 - DNA, 75 bp, synthetic construct
  source 1..75: mol_type = other DNA
gacctgaccgcagaacaggcagcagagcgtttgcgcgcagtcagcgatatccattttcgcgaatccggagtgtaa

SEQ ID NO: 337293 - DNA, 75 bp, synthetic construct
  source 1..75: mol_type = other DNA
cgattacaccgggacttacgtttttaccaatgactttgcggcgctgatgtccgacacgccagacgcgccggaaag

SEQ ID NO: 337294 - DNA, 75 bp, synthetic construct
  source 1..75: mol_type = other DNA
caacgatccgctgatgcgttgccagagcgcgcgtggcaccagtcgggtgatctgcttttcaccggatcacagtaa

SEQ ID NO: 337295 - DNA, 75 bp, synthetic construct
  source 1..75: mol_type = other DNA
tctattaagctgttccacgactatcttgatttgcaccgcagcaacccaaatctggatgtgcagatggtgccagta

SEQ ID NO: 337296 - DNA, 75 bp, synthetic construct
  source 1..75: mol_type = other DNA
gcactggttagccgttgtaccttattgggcagcctggccgtttgaaacattgctgttaccgaaaacccacgttct

SEQ ID NO: 337297 - DNA, 75 bp, synthetic construct
  source 1..75: mol_type = other DNA
gattgcttcctttgcgcgggtaatgtgcgggtcacgggcgataaaaaccccaattacacagggacttatgttttt

SEQ ID NO: 337298 - DNA, 75 bp, synthetic construct
  source 1..75: mol_type = other DNA
cttgagcgtacggtacgcgaactcaacggcgagtcctgcatatccctggaagaagcaccaccggcaaaacagcag

SEQ ID NO: 337299 - DNA, 75 bp, synthetic construct
  source 1..75: mol_type = other DNA
atgttcgctttggctgacgtcaacagcttctacgccagctgtgagaaagtatttcgtccggacctgcgtaacagg

SEQ ID NO: 337300 - DNA, 75 bp, synthetic construct
  source 1..75: mol_type = other DNA
gggacgaggcattgctcctgagtggcaaatgaaacgagaaatgctttcccctgcgtacacaacgcgctggaatga

SEQ ID NO: 337301 - DNA, 75 bp, synthetic construct
  source 1..75: mol_type = other DNA
ctgctttcactgcagccggtggaagaaatctggggagttggcagcaggatatccaggaaactaagcacaatgggc

SEQ ID NO: 337302 - DNA, 75 bp, synthetic construct
  source 1..75: mol_type = other DNA
caataggtgtcgggatggggccaaccaaaacgctggctaaaagcgcgcaatgggcgtccaaggaatggccacaat

SEQ ID NO: 337303 - DNA, 75 bp, synthetic construct
  source 1..75: mol_type = other DNA
gcctcaaaagagtggaaacagtttcatggcgtactcgctctgaccaggggaaatccgcaaaggacgcggaaactg

SEQ ID NO: 337304 - DNA, 75 bp, synthetic construct
  source 1..75: mol_type = other DNA
atggctgcgttattgcccggagtgctgaagccaaacggctgggtataaagatgggaaccccctggttccagctca

SEQ ID NO: 337305 - DNA, 75 bp, synthetic construct
  source 1..75: mol_type = other DNA
atgcagttcagcgatatttacctgacaacgcgaggttttttacccttcgcaccagaggcagacttctgggtcggc

SEQ ID NO: 337306 - DNA, 75 bp, synthetic construct
  source 1..75: mol_type = other DNA
ggcggttatgggcggtagcgttgttttttatctgccttttgcccgggtgcagcattgacagcgacaccgtgccgg

SEQ ID NO: 337307 - DNA, 75 bp, synthetic construct
  source 1..75: mol_type = other DNA
atgatattgggcacggaaagggaattccgtttttttgggtatgaggtcaaatcaataactaaggcggaaaatatg

SEQ ID NO: 337308 - DNA, 75 bp, synthetic construct
  source 1..75: mol_type = other DNA
gccgccgaaacagcagattgtctgcagtcgcagcttcgggcagcggatcaccacctacggagaaatgcgccaggc

SEQ ID NO: 337309 - DNA, 75 bp, synthetic construct
  source 1..75: mol_type = other DNA
catcaagacatccccttttgcggttaatgagccgtattacggtaacgtggccacggaaaaactgaacacccctac

SEQ ID NO: 337310 - DNA, 75 bp, synthetic construct
  source 1..75: mol_type = other DNA
gatgagatgtttctcgacgtgcggggtattgacagctgcatcgatttcgaggatttcggccggcagctgcgtgaa

SEQ ID NO: 337311 - DNA, 75 bp, synthetic construct
  source 1..75: mol_type = other DNA
ttaactcagagcctgataaaaaagcagtcagtacggcggccagttttgctaatagcagctaccgccttttctcta

SEQ ID NO: 337312 - DNA, 75 bp, synthetic construct
  source 1..75: mol_type = other DNA
ctatatgaatataagtgcctattctgaatactttggaaacgagtataaaaatagtgtccatttaaaagagatgtc

SEQ ID NO: 337313 - DNA, 75 bp, synthetic construct
  source 1..75: mol_type = other DNA
tcagcgcaccgcagaaatgcagcaaaaagtggcgcagagcgacagcgtgatcaacgggttaaaagaagaaaatca

SEQ ID NO: 337314 - DNA, 75 bp, synthetic construct
  source 1..75: mol_type = other DNA
gcccattaagcggtcgtatttttcaaggaacattaaacactgaaaaaggaatgtgggtaggaaagaaagaagatg

SEQ ID NO: 337315 - DNA, 75 bp, synthetic construct
  source 1..75: mol_type = other DNA
ggagacacctggcgcggtttggtgcatcgaagtgggtccagcgtaccgccgcagtcattgtgctcgcgggaggcc

SEQ ID NO: 337316 - DNA, 75 bp, synthetic construct
  source 1..75: mol_type = other DNA
ttctttgataacggtttttatactgattttatcgctaaatacatccattcaacaaacgtttatagctatttaagt

SEQ ID NO: 337317 - DNA, 75 bp, synthetic construct
  source 1..75: mol_type = other DNA
tccccgcgttgaacaatacagtattgatgagatgtttcttgatatccgcggtattgataactgtatggggtttga

SEQ ID NO: 337318 - DNA, 75 bp, synthetic construct
  source 1..75: mol_type = other DNA
gctgaaaagctgcgcggcgagcggcagttctgcaggcatattgctgtatttgtgaaaacgtcaccgttcgcggtg

SEQ ID NO: 337319 - DNA, 75 bp, synthetic construct
  source 1..75: mol_type = other DNA
ctgctctcactgcagccggtggaagaaatctggggagtaggtcgcaggatctcaaagacgcttaattcgatgggc

SEQ ID NO: 337320 - DNA, 75 bp, synthetic construct
  source 1..75: mol_type = other DNA
ataaatctacaggtatacagttttcatatgtgggactaaaaagagtaaaaaaaggtgatgagaaaagtctcccgc

SEQ ID NO: 337321 - DNA, 75 bp, synthetic construct
  source 1..75: mol_type = other DNA
attggttctactaaaattggccaattgaatatggcgaaaggtcaaagtagaccaagtatccctgaagctttcgaa

SEQ ID NO: 337322 - DNA, 75 bp, synthetic construct
  source 1..75: mol_type = other DNA
gtgctgataacgtgacggttattccgggatacaccagcgcggaggccctgcagcaggccatcagtcatgctgccg

SEQ ID NO: 337323 - DNA, 75 bp, synthetic construct
  source 1..75: mol_type = other DNA
agctgcgtcgctctctcaataaagaaaccacggcactggggatccttgctggctatcgcaatctgggaaaatcgg

SEQ ID NO: 337324 - DNA, 75 bp, synthetic construct
  source 1..75: mol_type = other DNA
gatccgccagcaggtcgccggactggaggcggggctgaacaacattcccggcaatatcgtgatctcagatattgc

SEQ ID NO: 337325 - DNA, 75 bp, synthetic construct
  source 1..75: mol_type = other DNA
attcgagcaacgagtaacatacattctgctcaactttatccattatctgtgggcaagtctgttcactaagcagaa

SEQ ID NO: 337326 - DNA, 75 bp, synthetic construct
  source 1..75: mol_type = other DNA
gagtgataggaatcagcattattgtcctagtactcattgtgctttactgcctgatgggatttgtatcgtcggcca

SEQ ID NO: 337327 - DNA, 75 bp, synthetic construct
  source 1..75: mol_type = other DNA
aggatatccgggctggcgcactgcagtcctcgttgtccattctgttacacacccattatgccatccgtctttggg

SEQ ID NO: 337328 - DNA, 75 bp, synthetic construct
  source 1..75: mol_type = other DNA
tccggatgtgttaagcggtaaaaaacgttcttcgttctcacctccgcttaaaaacaccatagcagaggaggaatg

SEQ ID NO: 337329 - DNA, 75 bp, synthetic construct
  source 1..75: mol_type = other DNA
tgaaaaaattaatgctgaagtagcccagcttgacgatattctcagaaacataccttccgtgattactatcaagga

SEQ ID NO: 337330 - DNA, 75 bp, synthetic construct
  source 1..75: mol_type = other DNA
atggcggatttgccagcggcatggaaaaagcaatgaagcaaattctcggtgagcaatcgcagtttatcgccatcg

SEQ ID NO: 337331 - DNA, 75 bp, synthetic construct
  source 1..75: mol_type = other DNA
attttccggaaacctcaagcaccgcgctgcttacatcgcagcttgaagaggccatcgcccaactggattgtgaag

SEQ ID NO: 337332 - DNA, 75 bp, synthetic construct
  source 1..75: mol_type = other DNA
catgacaccactgaaatcatgaaagaagcggtagcagatctgcaacccctcattaatgaattaatcgataaggct

SEQ ID NO: 337333 - DNA, 75 bp, synthetic construct
  source 1..75: mol_type = other DNA
atctgatcttcacagagccctattacaacgctgaacggaataactggacttctcctgagctggacgatgccgtcc

SEQ ID NO: 337334 - DNA, 75 bp, synthetic construct
  source 1..75: mol_type = other DNA
gctctgggacaacaaaacacagggcgacgcgtggtcgacagaaatgtatcaacagaacagggccgctcttgagga

SEQ ID NO: 337335 - DNA, 75 bp, synthetic construct
  source 1..75: mol_type = other DNA
ggagtgtggacatcgtgggctgaccagtctggtggacgagttaagccgctgtcatgagaaatgtccggtcgagga

SEQ ID NO: 337336 - DNA, 75 bp, synthetic construct
  source 1..75: mol_type = other DNA
gtggttgtcatacagcactgacagtcatcgccaaaacatggacggcttccacatggttcattgaaggggatatta

SEQ ID NO: 337337 - DNA, 75 bp, synthetic construct
  source 1..75: mol_type = other DNA
cccggaagctcgccgcattgctataccgggcgtggccttttgcgtgacctgtcagcaaatagcagagctcaaatc

SEQ ID NO: 337338 - DNA, 75 bp, synthetic construct
  source 1..75: mol_type = other DNA
caggggagcagcagtgatgttactgtattagaaaaaagatggtggggtattaatccacgtcttatgagtgtaaac

SEQ ID NO: 337339 - DNA, 75 bp, synthetic construct
  source 1..75: mol_type = other DNA
tccgccagcaagacgccgcgccattccgggagtgcagctttgcattacctgccaggaaatagcagagctgaaagg

SEQ ID NO: 337340 - DNA, 75 bp, synthetic construct
  source 1..75: mol_type = other DNA
agccgctttatgccgaagaaaaaagtggaactggatgccggaatagagcagagcgccatcgtgattaaagaacgg

SEQ ID NO: 337341 - DNA, 75 bp, synthetic construct
  source 1..75: mol_type = other DNA
tttgcgttgagtgtgaagcgccaattccgccagcacgccgccgtgccattcctggagtgagctttgcattacctg

SEQ ID NO: 337342 - DNA, 75 bp, synthetic construct
  source 1..75: mol_type = other DNA
aaaacaccgggcgtgtctcgcgtgctttgcattgaatgtgaagcgccaattccgccagcaagacgccgcgtcatt

SEQ ID NO: 337343 - DNA, 75 bp, synthetic construct
  source 1..75: mol_type = other DNA
aggggtaggtaaatcgaatgataagatttacgataagggttggtttttagctaatcttatcagtacggataatgt

SEQ ID NO: 337344 - DNA, 75 bp, synthetic construct
  source 1..75: mol_type = other DNA
ccgggtgtgcagctttgcattacctgccaggaaattgcagagctgaaaggcaaacattacaacagaggtgctgta

SEQ ID NO: 337345 - DNA, 75 bp, synthetic construct
  source 1..75: mol_type = other DNA
ctatcacacttgatcgccctgctacatcagcgattaactggaaagcatccctgccggttcaagtttcttaccagt

SEQ ID NO: 337346 - DNA, 75 bp, synthetic construct
  source 1..75: mol_type = other DNA
gcgccacatccgtgctgcccgtgccaaaacaccgggcgtgtctcgcgtgctttgcattgagtgtgaagcgccaat

SEQ ID NO: 337347 - DNA, 75 bp, synthetic construct
  source 1..75: mol_type = other DNA
agcagcgcgttgaagaagaacgtcagcgccacatccacaccgcccgcaatagaacgccgggcgtttcccgtgtgc

SEQ ID NO: 337348 - DNA, 75 bp, synthetic construct
  source 1..75: mol_type = other DNA
agcagcgcgttgaagaagaacgccagcgccatatccaccacgcccgcagccgaaaggctggggcttcttctcttg

SEQ ID NO: 337349 - DNA, 75 bp, synthetic construct
  source 1..75: mol_type = other DNA
gattctcgataatgtggcctacgggctgatggtcaaaggtgtggagaaaaaacagcgttacatcatggcgcaaga

SEQ ID NO: 337350 - DNA, 75 bp, synthetic construct
  source 1..75: mol_type = other DNA
tttgttcagcaacgtaaaccgtcacaactttctggtggtcagcgccagcgggttgctatcgccagagcattggtg

SEQ ID NO: 337351 - DNA, 75 bp, synthetic construct
  source 1..75: mol_type = other DNA
ttccccgcgcgatctctatatgcgcccgcgcacgccgtttgttgccgggttcgtcgggacatcgaatgtttttga

SEQ ID NO: 337352 - DNA, 75 bp, synthetic construct
  source 1..75: mol_type = other DNA
ctgacagacatcagccatatcagcgaagggcaccgggtggcggtgcattacaggtatgatgagaaaggccggctg

SEQ ID NO: 337353 - DNA, 75 bp, synthetic construct
  source 1..75: mol_type = other DNA
gtaccactgcgaccatcgcggcctgccgctggcgctcatcagcacggaaggggcaacagcgtggtgcgcagaata

SEQ ID NO: 337354 - DNA, 75 bp, synthetic construct
  source 1..75: mol_type = other DNA
tagctgcgaactttcaaacctctactcatccgctgttttcagctatctggcggatgatctgcgcgagcttcagca

SEQ ID NO: 337355 - DNA, 75 bp, synthetic construct
  source 1..75: mol_type = other DNA
tcgtcgggacatcgaatgtttttgatggactgatggcagagaaactttgtggcatgacgggaagcttcgccctgc

SEQ ID NO: 337356 - DNA, 75 bp, synthetic construct
  source 1..75: mol_type = other DNA
agccttgttcatgcgctgtacgaaggtaatccgcagccggtttttgccaatacggaaaaattgaacgatgctgtg

SEQ ID NO: 337357 - DNA, 75 bp, synthetic construct
  source 1..75: mol_type = other DNA
gattcggttgtttccgcatgtgtgccgattacgaagatgaaatggacccaagtaacgagcagcgacgcatcagcc

SEQ ID NO: 337358 - DNA, 75 bp, synthetic construct
  source 1..75: mol_type = other DNA
ctgatggtcaaaggggtggataaaaaacagcgacacgtaatggcgcaagaggcgctggagaaagtggcgctcgga

SEQ ID NO: 337359 - DNA, 75 bp, synthetic construct
  source 1..75: mol_type = other DNA
gcgcgctataccagcgggaaaatgaaagcgtttttttatattgcggtaatgttgccgatgtgggcgagctacatt

SEQ ID NO: 337360 - DNA, 75 bp, synthetic construct
  source 1..75: mol_type = other DNA
gcgcggcaactcgttttgaactgaaattgaacggcggtgaaaaactgcttgtgagtcaggccaatatgacaggcg

SEQ ID NO: 337361 - DNA, 75 bp, synthetic construct
  source 1..75: mol_type = other DNA
atgattaacgtacaaaacgtcagtaaaaccttcatcctgcaccaacaaaacggcgtgcgcctgcctgtattacaa

SEQ ID NO: 337362 - DNA, 75 bp, synthetic construct
  source 1..75: mol_type = other DNA
tggacgctctccgccagcggcgaattgtggcagcatctggcgatcagctcctggcgggcgctcattggcttttca

SEQ ID NO: 337363 - DNA, 75 bp, synthetic construct
  source 1..75: mol_type = other DNA
aacggctggacacttctcgcatcacttgcacggcgattattaaatgtcttcgcccggtctaccgccgcgccggta

SEQ ID NO: 337364 - DNA, 75 bp, synthetic construct
  source 1..75: mol_type = other DNA
gtcggcatcttccatgacgaagccgtacgtaatgacgttgccgaccgcctgcacccaatgggagcctcttcatga

SEQ ID NO: 337365 - DNA, 75 bp, synthetic construct
  source 1..75: mol_type = other DNA
gtgtgacgcgatgactgaacactattatcgcttacgcgacttcgcgctgaaccatccggaatgcagcgccattat

SEQ ID NO: 337366 - DNA, 75 bp, synthetic construct
  source 1..75: mol_type = other DNA
cggctgtgtgccgattaccaaggtggtatctggcgcttttcgacactcagcaacggcggcggttttatggctccc

SEQ ID NO: 337367 - DNA, 75 bp, synthetic construct
  source 1..75: mol_type = other DNA
tggagcagaactcaccagtgaagcggcagggatagtcgcctgcctgatggcatacagttaccacgcctgtcgcat

SEQ ID NO: 337368 - DNA, 75 bp, synthetic construct
  source 1..75: mol_type = other DNA
taccggcgtaccacgtgaagcctgcgctgctaaagccgcgcgtctgctcacccgcctgaacgtgccggaacgcct

SEQ ID NO: 337369 - DNA, 75 bp, synthetic construct
  source 1..75: mol_type = other DNA
gccatcgtcggtatcttccatgacgaagccgtacgcaatgacgtcgccgaccgcctgcacccgatgggagcctct

SEQ ID NO: 337370 - DNA, 75 bp, synthetic construct
  source 1..75: mol_type = other DNA
ctgcgctcgctgtacgccaactatctgcccgatgaaggtcaaatccagatcaaacacggtgacgagtgggtagac

SEQ ID NO: 337371 - DNA, 75 bp, synthetic construct
  source 1..75: mol_type = other DNA
cccgcctgaacgtgcctgaacgcctgtggcaccttgcgccatcgaccttctccggtggcgaacagcagcgtgtca

SEQ ID NO: 337372 - DNA, 75 bp, synthetic construct
  source 1..75: mol_type = other DNA
acatcgcccgtggctttatcgtcgactatccgattctgctgctggatgaacccaccgcctcgctggacgctaaaa

SEQ ID NO: 337373 - DNA, 75 bp, synthetic construct
  source 1..75: mol_type = other DNA
tcgcgaagccaaagcccgtggcgcagccatcgtcggtatcttccatgacgaagccgtacgcaatgacgtcgccga

SEQ ID NO: 337374 - DNA, 75 bp, synthetic construct
  source 1..75: mol_type = other DNA
tccatgctggcacttatctggccacaacgggcgttcatccactggcgcattcaactggcaaaaagtctgaccgag

SEQ ID NO: 337375 - DNA, 75 bp, synthetic construct
  source 1..75: mol_type = other DNA
attcaccagaacgcgtctcgttattgccgatcgccccgggcgttgattttgcaaccgccgtggcattgcgacgca

SEQ ID NO: 337376 - DNA, 75 bp, synthetic construct
  source 1..75: mol_type = other DNA
tgaagcttggcgacacgccgctgctggagtacacgcgcgaccgcatgcaccgtgagacggtgcgcagctttggca

SEQ ID NO: 337377 - DNA, 75 bp, synthetic construct
  source 1..75: mol_type = other DNA
tcagccatctcagcgaaggccaccgggtgacggtgcattacgggtatgatgagaaaggccgcctgaccggtgagc

SEQ ID NO: 337378 - DNA, 75 bp, synthetic construct
  source 1..75: mol_type = other DNA
cagtacgatgaggagtcggggctggattataaccgtcaccggtactacgatccgttgcaggggcggtatatcacc

SEQ ID NO: 337379 - DNA, 75 bp, synthetic construct
  source 1..75: mol_type = other DNA
gctggatatggcggccacactggccgtgccgttcaccggtgacgggcatgatgccgctcagatcctccggacact

SEQ ID NO: 337380 - DNA, 75 bp, synthetic construct
  source 1..75: mol_type = other DNA
gatcagcgtcaccatatgctgttcgccaccctctggaataccggaatgcgtattggcgaagcccggatgctgacg

SEQ ID NO: 337381 - DNA, 75 bp, synthetic construct
  source 1..75: mol_type = other DNA
actcagtgataacggcggcagaagcctgtattttgagcacctgtttcccggtgaggacggttacagccgcagcga

SEQ ID NO: 337382 - DNA, 75 bp, synthetic construct
  source 1..75: mol_type = other DNA
tcgtgcggcctgacggtggagcagatacaaaaccagatggacccggtgtacacgccggcgcgaaaaatccacctg

SEQ ID NO: 337383 - DNA, 75 bp, synthetic construct
  source 1..75: mol_type = other DNA
gtataccggacagcctgcccgccgtggaatggctgacttacggcagcggctggctggcaggcatgaaactcggcg

SEQ ID NO: 337384 - DNA, 75 bp, synthetic construct
  source 1..75: mol_type = other DNA
atggcgaatggtctgacaaacaaggcgtgggtgcaattagatttagaggaaaagatcccctccccccaatagatt

SEQ ID NO: 337385 - DNA, 75 bp, synthetic construct
  source 1..75: mol_type = other DNA
ctggtgtgagcgggtgccggaagcggatgaggtgctgcccgcgccgctgccgccgtaccgggtactgaccgggct

SEQ ID NO: 337386 - DNA, 75 bp, synthetic construct
  source 1..75: mol_type = other DNA
agcgaacctggatatccgcatcccgtatgccacggacccggcaggcaaccgcctgcccgacccggagctgcaccc

SEQ ID NO: 337387 - DNA, 75 bp, synthetic construct
  source 1..75: mol_type = other DNA
caccgggtgacggtgcattacgggtatgatgagaaaggccgcctgaccggtgagcgtcagacggtgcatcacccg

SEQ ID NO: 337388 - DNA, 75 bp, synthetic construct
  source 1..75: mol_type = other DNA
tgaaagtgggcgatatcgttgtctcggacgaagcacgttatcacgacgcggatgtcacggcatttggttatgaat

SEQ ID NO: 337389 - DNA, 75 bp, synthetic construct
  source 1..75: mol_type = other DNA
cacgcactatcaaacatttattccgcctctgttttcagctatctggcggatgatctgcacgagcttcaacagctc

SEQ ID NO: 337390 - DNA, 75 bp, synthetic construct
  source 1..75: mol_type = other DNA
atgagcacgggtggttaaccaccatcagccataccagtgaaggccaccgcgtggcggtccactacggctatgacg

SEQ ID NO: 337391 - DNA, 75 bp, synthetic construct
  source 1..75: mol_type = other DNA
cgtcgctaccgataccgttgatagcatctttaaccggatggacacgcagtcctatatctacatggacaacatggc

SEQ ID NO: 337392 - DNA, 75 bp, synthetic construct
  source 1..75: mol_type = other DNA
gacggcgaagggatggacgacctgaaagaatacaaccgcaatcagttgcttctgtctggcgttatcaagccgaga

SEQ ID NO: 337393 - DNA, 75 bp, synthetic construct
  source 1..75: mol_type = other DNA
tgacgaaacacgttatcacgacgccgacgtgacggcatttggctacgaatacggtcagctacctggctgcccggc

SEQ ID NO: 337394 - DNA, 75 bp, synthetic construct
  source 1..75: mol_type = other DNA
cgtgagacggtgcgcagcttcggcagcatggcaggcagtaatgccgcatacgaactgaccagcacatacaccccc

SEQ ID NO: 337395 - DNA, 75 bp, synthetic construct
  source 1..75: mol_type = other DNA
gaatgaagagaacccgcaccagctgcagcagctcatccgcctgccggggcagcagtatgatgaggagtccggcct

SEQ ID NO: 337396 - DNA, 75 bp, synthetic construct
  source 1..75: mol_type = other DNA
ggaaagtgaaatcctggctgaccgggtgagtgaggaaagccgccgctggctggcatcgtgcggcctgaccgtgga

SEQ ID NO: 337397 - DNA, 75 bp, synthetic construct
  source 1..75: mol_type = other DNA
gtgacgtggtacggatgggacggcgaccggctgacgacggtacagaccgacaccacgcgtatccagacggtatac

SEQ ID NO: 337398 - DNA, 75 bp, synthetic construct
  source 1..75: mol_type = other DNA
gctagtcaccctctggcactacgacgaatcggaccgtatcactcaccgcacggtgaacggcgaaccggcagagca

SEQ ID NO: 337399 - DNA, 75 bp, synthetic construct
  source 1..75: mol_type = other DNA
ctacgggtggagtgacaacggcgacctggtgcgcatcagcggcccgcgacagacgcgggaatacggctacagcgc

SEQ ID NO: 337400 - DNA, 75 bp, synthetic construct
  source 1..75: mol_type = other DNA
cgcatcaccacaccggatggcagggcatcggcattttactataaccaccacagccagttaacgtcagccaccggg

SEQ ID NO: 337401 - DNA, 75 bp, synthetic construct
  source 1..75: mol_type = other DNA
gtaccgcgcatacgacagccgtggacagttaattgcggtgaaagacacgcagggccatgaaacgcggtatgaata

SEQ ID NO: 337402 - DNA, 75 bp, synthetic construct
  source 1..75: mol_type = other DNA
ctcgccgtcagtttcgctgcgccgtatggcggatgaacacggcacggataaaactatcgcgcagaaactggcgcg

SEQ ID NO: 337403 - DNA, 75 bp, synthetic construct
  source 1..75: mol_type = other DNA
tatgccacagacccggcaggtaaccgcctgcccgacccggagctgcacccggacagcaccctcagcatgtggccg

SEQ ID NO: 337404 - DNA, 75 bp, synthetic construct
  source 1..75: mol_type = other DNA
catgaccgcttcgggcagatgacggcggtgcaccgcgaggaagggctgagtcagtaccgcgcatacgacagccgt

SEQ ID NO: 337405 - DNA, 75 bp, synthetic construct
  source 1..75: mol_type = other DNA
atatcactcaggatccgattggactgaaggggggatggaatttttatcagtatccgttgaatccggtcataaatg

SEQ ID NO: 337406 - DNA, 75 bp, synthetic construct
  source 1..75: mol_type = other DNA
ccagacggaaccggttgccgctgatggcaaactgctaatccaggcaaaagacgggactgtgtattccattacacg

SEQ ID NO: 337407 - DNA, 75 bp, synthetic construct
  source 1..75: mol_type = other DNA
aagcggctgttcgctgtttaacagcgaagaagatgtggtaaagatgtccccattgccgaccgttgaaaaccagtt

SEQ ID NO: 337408 - DNA, 75 bp, synthetic construct
  source 1..75: mol_type = other DNA
tgctgtgttgatgcagcagggacagatgatttggcaacagcgtatctcccaggcgacgggttctaccgaaattga

SEQ ID NO: 337409 - DNA, 75 bp, synthetic construct
  source 1..75: mol_type = other DNA
ttaatggttcagaattaggtcagtacctgctgtcacctgcagatttcaaaacatactgggatagttattcaggga

SEQ ID NO: 337410 - DNA, 75 bp, synthetic construct
  source 1..75: mol_type = other DNA
caaacttccccgctatgtcgtgaggcttcacgacgataacttttttgatgaagaagaagctgaggttctgcactt

SEQ ID NO: 337411 - DNA, 75 bp, synthetic construct
  source 1..75: mol_type = other DNA
gatgacgaagggtatcctgaaatagtccgctgcacggagcgggagtttgcgaccattcttgccggtatcagcgcc

SEQ ID NO: 337412 - DNA, 75 bp, synthetic construct
  source 1..75: mol_type = other DNA
gtggagcagatgcaaaaccagatggacccggtgtacacgccggcgcgaaaaatccccctgtaccactgcgcccat

SEQ ID NO: 337413 - DNA, 75 bp, synthetic construct
  source 1..75: mol_type = other DNA
ggcaggcgctgccggaagatcttcgcctaagtccgcatcgttatctggcgacgaacagtccgcaggggccgtggt

SEQ ID NO: 337414 - DNA, 75 bp, synthetic construct
  source 1..75: mol_type = other DNA
ggcaggcgctgccggaagaactccgcataagtccgcatcgttatctggcgacgaacagtccgcaggggccgtggt

SEQ ID NO: 337415 - DNA, 75 bp, synthetic construct
  source 1..75: mol_type = other DNA
ggcaggcgctgccggaagaactacgcctaagtccgcatcgttatctggcgacgaacagtccgcaggggccgtggt

SEQ ID NO: 337416 - DNA, 75 bp, synthetic construct
  source 1..75: mol_type = other DNA
ggcaggcgctgccggaagagctccgcgtaagtccgcatcgttatctggcgacgaacagtccgcaggggccgtggt

SEQ ID NO: 337417 - DNA, 75 bp, synthetic construct
  source 1..75: mol_type = other DNA
ggcaggcgctgccggaagacctccgcctaagtccgcatcgttatctggcgacgaacagtccgcaggggccgtggt

SEQ ID NO: 337418 - DNA, 75 bp, synthetic construct
  source 1..75: mol_type = other DNA
ggcaggcgctgccggaagatctccgcttaagtccgcatcgttatctggcgacgaacagtccgcaggggccgtggt

SEQ ID NO: 337419 - DNA, 75 bp, synthetic construct
  source 1..75: mol_type = other DNA
taccctgccgggttacaccgaatatggccgggacaacggcatccgtctgtctgccgtgtggctgacgcacgaccc

SEQ ID NO: 337420 - DNA, 75 bp, synthetic construct
  source 1..75: mol_type = other DNA
ccggatgtggtgacgggcctcatcacgcgcataaccacgccggatggcagggcatcggcgttttactataaccac

SEQ ID NO: 337421 - DNA, 75 bp, synthetic construct
  source 1..75: mol_type = other DNA
agcgaatctggatatccgcatcccgtatgccacggacccggcgggtaaccgcctgcccgacccggagctgcaccc

SEQ ID NO: 337422 - DNA, 75 bp, synthetic construct
  source 1..75: mol_type = other DNA
gcctgtattttgagcacctgtttcccggtgaggacggttacagccgcagcgagtcactgtggctggtgcgcggcg

SEQ ID NO: 337423 - DNA, 75 bp, synthetic construct
  source 1..75: mol_type = other DNA
gagaaaaccgacctcatcccggaaggggttatccgcacggatgatgagcggactcaccggtaccattacgacagt

SEQ ID NO: 337424 - DNA, 75 bp, synthetic construct
  source 1..75: mol_type = other DNA
gaaccggcagagcagtggcagtatgacgaacgcggctggctgacaggcatcagccatctcagcgaaggccaccgg

SEQ ID NO: 337425 - DNA, 75 bp, synthetic construct
  source 1..75: mol_type = other DNA
gaccattcttgccggtatcagcgccggcggcatgtattgcccggagtgtggcacagttcactggccggacggagt

SEQ ID NO: 337426 - DNA, 75 bp, synthetic construct
  source 1..75: mol_type = other DNA
cttttacaccctcagcaatggcggcgcgtttatggcccccgagtctgacaatgatgagacatggcgtctgtttaa

SEQ ID NO: 337427 - DNA, 75 bp, synthetic construct
  source 1..75: mol_type = other DNA
acgatgagacatggcgtctgtttaactgcctgaacggtaacgatgcccaaatgagtgcagaagcagcaggtattg

SEQ ID NO: 337428 - DNA, 75 bp, synthetic construct
  source 1..75: mol_type = other DNA
gaacactattaccgcctgcgggactacgccctgcagcatccagaggcccacgccattatgcgtatcatcgactga

SEQ ID NO: 337429 - DNA, 75 bp, synthetic construct
  source 1..75: mol_type = other DNA
cgagtgtgacgcgatgactgaacactattatctcttacgcgactacgcgctgaaccatccggaatgcagcgccat

SEQ ID NO: 337430 - DNA, 75 bp, synthetic construct
  source 1..75: mol_type = other DNA
gcgtttatggcccctgatgctgacggtggtgataaatggcatatgttcaacagcatgaacggtaatggtgtggaa

SEQ ID NO: 337431 - DNA, 75 bp, synthetic construct
  source 1..75: mol_type = other DNA
cgcagtactttggctctatcccacgatggataacgctggaaccccgcattttcgcctggatggaccgcttctgtg

SEQ ID NO: 337432 - DNA, 75 bp, synthetic construct
  source 1..75: mol_type = other DNA
tctgacgataaaggaaataaagtaacaaaagaaaatgatgtttatgatagtctaaatttttcaagcaaagattta

SEQ ID NO: 337433 - DNA, 75 bp, synthetic construct
  source 1..75: mol_type = other DNA
ctggtcgaaagccgctatctttacgacccgctgggccgcagggtggcaaaacgggtatggcggcgtgaacgggac

SEQ ID NO: 337434 - DNA, 75 bp, synthetic construct
  source 1..75: mol_type = other DNA
cagggttcagccggggtgagcatcggtgcccccaccggcgtggcctgttcggtgtgccccggtggggtgacgtcc

SEQ ID NO: 337435 - DNA, 75 bp, synthetic construct
  source 1..75: mol_type = other DNA
gattctatagatagcaccgcatatgacgccttaaataaaataaatagccaatctatttgcgaagataaagagttc

SEQ ID NO: 337436 - DNA, 75 bp, synthetic construct
  source 1..75: mol_type = other DNA
ggaacgacaacggcgaactcacccgcatcaacagcccgcgccagacgcggcgctacagctacagcgactccggta

SEQ ID NO: 337437 - DNA, 75 bp, synthetic construct
  source 1..75: mol_type = other DNA
ccgtgaatggcgaaaccgcagagcggtggcagtatgacgaacgcggctggctgacagacatcagccatatcagcg

SEQ ID NO: 337438 - DNA, 75 bp, synthetic construct
  source 1..75: mol_type = other DNA
cgagtgtgacgcgatgactgaacactattttcgcttacgcgactacgcgctgaaccatccagagtgcagcgccat

SEQ ID NO: 337439 - DNA, 75 bp, synthetic construct
  source 1..75: mol_type = other DNA
ctggtgtgattcggaaagacaggagcttagccttgaaacagcagctgattctttcgttcgttggtccgaatcgtt

SEQ ID NO: 337440 - DNA, 75 bp, synthetic construct
  source 1..75: mol_type = other DNA
cccgctattctttggttaatttacgtatcgaaagtgaaatgttgatgttcattgcccaaaccggtttaaaccttc

SEQ ID NO: 337441 - DNA, 75 bp, synthetic construct
  source 1..75: mol_type = other DNA
accggcgaggacggtcgtgagcagactcagctcttcccgttgtcggtgatggccgggcagttaaacccgacaaca

SEQ ID NO: 337442 - DNA, 75 bp, synthetic construct
  source 1..75: mol_type = other DNA
tttccccgattcaaaaagcggggacagaatgatgcattccgctacccgcagggcgttaagctcgatcaggaaaac

SEQ ID NO: 337443 - DNA, 75 bp, synthetic construct
  source 1..75: mol_type = other DNA
tgctgcgctgacctgggtattccgttctttgtggatgcgggaaacaaaaagctggtcttctggtttgtacgtgtt

SEQ ID NO: 337444 - DNA, 75 bp, synthetic construct
  source 1..75: mol_type = other DNA
gaacattcttgccggtatcagcgccggcggtatgtactgtccggaatgcggcatggttcactggccggatggcgt

SEQ ID NO: 337445 - DNA, 75 bp, synthetic construct
  source 1..75: mol_type = other DNA
gccatgacggagcactattaccgcctgcgggattacgctctgcagcaccctgaatccagcgccattatgcgcatt

SEQ ID NO: 337446 - DNA, 75 bp, synthetic construct
  source 1..75: mol_type = other DNA
ggcaaatcgagtcttttgatcagttcgtgatcctgctgaaaaacacggtcagccagatggtttacaagcacgcga

SEQ ID NO: 337447 - DNA, 75 bp, synthetic construct
  source 1..75: mol_type = other DNA
cctgtctgatgacgtacagtcatcacgcctgccgtacggagtgttatgccatgacggttcattattaccgtctgc

SEQ ID NO: 337448 - DNA, 75 bp, synthetic construct
  source 1..75: mol_type = other DNA
tgctgcgcagacctgaatattccgttctttgtggatgtgggaaacaaaaagctggtcttctggtttgtacgtgtt

SEQ ID NO: 337449 - DNA, 75 bp, synthetic construct
  source 1..75: mol_type = other DNA
gaacattcttgccggtatcagcgccggcggtatgtactgtccggaatgcggcacggttcactggccggacggagt

SEQ ID NO: 337450 - DNA, 75 bp, synthetic construct
  source 1..75: mol_type = other DNA
atccggaaatcgcccgctgcacggaacgggaatttgcgaccattcttgccggtatcagcgccggcggtatgtact

SEQ ID NO: 337451 - DNA, 75 bp, synthetic construct
  source 1..75: mol_type = other DNA
gatccagaaaataccggaactccagatccgacaaagctgacatatgagccggaagcgatgtttttccgcatgatt

SEQ ID NO: 337452 - DNA, 75 bp, synthetic construct
  source 1..75: mol_type = other DNA
tatggggattggcaggagtatcgaaaggcgatcaacgtgcgcagtaccttgcccgattcacaccagtatccggtg

SEQ ID NO: 337453 - DNA, 75 bp, synthetic construct
  source 1..75: mol_type = other DNA
gacaaagcgctctactatgctgagagattgataagtatggtagatgaaaaggaggctgaattggttaagcacctc

SEQ ID NO: 337454 - DNA, 75 bp, synthetic construct
  source 1..75: mol_type = other DNA
ggtatttatgactttaccaatgctcaatggatatttaaatctcccttatcaacatcttcatattcgtatatcggt

SEQ ID NO: 337455 - DNA, 75 bp, synthetic construct
  source 1..75: mol_type = other DNA
gttggggtatacgtgttgatgaatgcttgtggctggaagctgcttatcagcgcaggcgttgtgacaggattgaag

SEQ ID NO: 337456 - DNA, 75 bp, synthetic construct
  source 1..75: mol_type = other DNA
gcttattgactatcggtaaaataaacgacgatggttcggttactaatcaccttgaattgtccagtggtctggcta

SEQ ID NO: 337457 - DNA, 75 bp, synthetic construct
  source 1..75: mol_type = other DNA
gatacaggtggactggcgttgttgctccaccttatcgatttggcgaaaaagcagggcaatagcgtgacgcttcag

SEQ ID NO: 337458 - DNA, 75 bp, synthetic construct
  source 1..75: mol_type = other DNA
actaaataccacgttaacttcatgggcggggatctgggcaaagaactgactcaggcatgggcagtggcgatggcg

SEQ ID NO: 337459 - DNA, 75 bp, synthetic construct
  source 1..75: mol_type = other DNA
gtatggataccagcaatatggatgtttttgttcagcagtatgctgatactgtgaaatatctgtccgagaaaaaat

SEQ ID NO: 337460 - DNA, 75 bp, synthetic construct
  source 1..75: mol_type = other DNA
ccaggcatttgtgatggagagacgcgaccatgccggtggcaacagtcaatcgctacatttacgcattttgggtgg

SEQ ID NO: 337461 - DNA, 75 bp, synthetic construct
  source 1..75: mol_type = other DNA
atggtctgagcgttggcagtatcggacagacagataatcaggctgagcttaacgttggaacgactcagcaaacat

SEQ ID NO: 337462 - DNA, 75 bp, synthetic construct
  source 1..75: mol_type = other DNA
cgatcttagccgtgtctcccgcgtggatacgggggactggcactgctgctccatcttatcgatctggcgaaaaag

SEQ ID NO: 337463 - DNA, 75 bp, synthetic construct
  source 1..75: mol_type = other DNA
tcctgaaaaccagattcaggtttatgtagagaatgaagatggctctcacgttcctgtttcgcaaccaatcatcat

SEQ ID NO: 337464 - DNA, 75 bp, synthetic construct
  source 1..75: mol_type = other DNA
aaacttgttactgcgaaaaacattgctgatgccataaaccagtctggctggaaaattaaagcggataaagatatc

SEQ ID NO: 337465 - DNA, 75 bp, synthetic construct
  source 1..75: mol_type = other DNA
atagtccacaaaatatttctattggctcaggttctgtagataagaaagctaatcaagtaaatagtgcgaccatta

SEQ ID NO: 337466 - DNA, 75 bp, synthetic construct
  source 1..75: mol_type = other DNA
tgtggccagtggtctgaacggcactgcgcttgctgacgccggtggagatgttctgaataatgcggccaatatcgg

SEQ ID NO: 337467 - DNA, 75 bp, synthetic construct
  source 1..75: mol_type = other DNA
cggtcagactcgctgataacattcgcctggcagatgacggcagtgtttctgtcggcggaacccggatggataaaa

SEQ ID NO: 337468 - DNA, 75 bp, synthetic construct
  source 1..75: mol_type = other DNA
aatggtgatgacgataagcttgttactgcgaaaaacattgctgaagccataaaccagtctggctggaaaattaaa

SEQ ID NO: 337469 - DNA, 75 bp, synthetic construct
  source 1..75: mol_type = other DNA
cgaaatttacagcaaaagatgaatcaaagggaattaatttcgaccataaatcaccggtggctgaaggacgtaact

SEQ ID NO: 337470 - DNA, 75 bp, synthetic construct
  source 1..75: mol_type = other DNA
cggtgaaaacatggaggacgttaaaaccggtgaggctattgctattgggccaaaagctgaagcgcaaagagagca

SEQ ID NO: 337471 - DNA, 75 bp, synthetic construct
  source 1..75: mol_type = other DNA
ggtgctgaagtcacgcgtcaggctgctgccggctctgttgcagttggcagccatgcccgtgctggccgcgcgaat

SEQ ID NO: 337472 - DNA, 75 bp, synthetic construct
  source 1..75: mol_type = other DNA
accattgctgttaatgcaggcaaaggtggattaacagatgctgccggtaccacgaagacacgtctgacttatgct

SEQ ID NO: 337473 - DNA, 75 bp, synthetic construct
  source 1..75: mol_type = other DNA
gacgatgtcgaaatcgcaggcaaaggcccaatacaaaccagtgtcgttaatggaaataaactggaagtttcagca

SEQ ID NO: 337474 - DNA, 75 bp, synthetic construct
  source 1..75: mol_type = other DNA
agcagaaagtgctctagctgttggggcgttcgcaaaagcaaagcaagttaattctatcgcgattggtgatagagc

SEQ ID NO: 337475 - DNA, 75 bp, synthetic construct
  source 1..75: mol_type = other DNA
tggcgcatcggctgcggccatgagcgggatacctcaggcctatctgccgggtaaaagtctgatggggctgggtgt

SEQ ID NO: 337476 - DNA, 75 bp, synthetic construct
  source 1..75: mol_type = other DNA
aacccagaccattcgttctgcatctgatatccgcgatgtatttatcaacgcaggtattaaaggtgaagagtacga

SEQ ID NO: 337477 - DNA, 75 bp, synthetic construct
  source 1..75: mol_type = other DNA
gggcaggcgattaaagtatccggggacagcaatatcaccaccacagcaatcactgccaatggagataaggggtta

SEQ ID NO: 337478 - DNA, 75 bp, synthetic construct
  source 1..75: mol_type = other DNA
ataggataaaagaatctcagataaaattgatgaataaaagatataagaaactccataaggaatatgaggtcgcaa

SEQ ID NO: 337479 - DNA, 75 bp, synthetic construct
  source 1..75: mol_type = other DNA
agtaaaaaacgaactttccttaaagagaaaagaagttgaatatataaaaaacaaacaagataatgttattgacta

SEQ ID NO: 337480 - DNA, 75 bp, synthetic construct
  source 1..75: mol_type = other DNA
atgatttaactcctttacatggaactagctatggtagaaaaaaaatagatgggcattatgtttcttcagaggcat

SEQ ID NO: 337481 - DNA, 75 bp, synthetic construct
  source 1..75: mol_type = other DNA
gggtgtgttgtctgcgaactcaacggatgccgtcaatggcagtcagttgcatgcaactaaccgtcaggttgccgg

SEQ ID NO: 337482 - DNA, 75 bp, synthetic construct
  source 1..75: mol_type = other DNA
gatgcggttaacgggagccagctggcatctgcagccagaattgctggcggtgataatgttgtctggaaagacgga

SEQ ID NO: 337483 - DNA, 75 bp, synthetic construct
  source 1..75: mol_type = other DNA
atcaaagctgtcgatacggcaggtaaacatgatgttgcgcagcgactgatgcagcgcgtaaacgcaattatgcgt

SEQ ID NO: 337484 - DNA, 75 bp, synthetic construct
  source 1..75: mol_type = other DNA
cgagaattcgggggcatatactttcgaaaccattgctcgtgaatggcatgccagtaacaagcgatggagtgaaga

SEQ ID NO: 337485 - DNA, 75 bp, synthetic construct
  source 1..75: mol_type = other DNA
tttcagaacgccacgatttaagcgttctgcctacaaatcaattctaccgaactcaaccagattccccccacatca

SEQ ID NO: 337486 - DNA, 75 bp, synthetic construct
  source 1..75: mol_type = other DNA
gcgggcatttttaccgcagcgcatggaaaagcctgctgaacggtgcagcgacgatggatacgctggtggcgctgg

SEQ ID NO: 337487 - DNA, 75 bp, synthetic construct
  source 1..75: mol_type = other DNA
taaattaaaagagtgtaaaacagcaggtttctatacattattagctgaaaacaacagactcaagattaagactgt

SEQ ID NO: 337488 - DNA, 75 bp, synthetic construct
  source 1..75: mol_type = other DNA
cttcaatggtgggctgactatctggacgccaatcgagaaaaacatataagcccttatgagttcggaaggagaaca

SEQ ID NO: 337489 - DNA, 75 bp, synthetic construct
  source 1..75: mol_type = other DNA
gataaaaacgggttgacaatcaaggatggtccgtcagtgacggtgaatggtattgatgcggctggtcgggttatt

SEQ ID NO: 337490 - DNA, 75 bp, synthetic construct
  source 1..75: mol_type = other DNA
tgaattcatcgaaaagttaaatgattattttagtggtaagttcttttacaaaaattatatttcattaaaatttga

SEQ ID NO: 337491 - DNA, 75 bp, synthetic construct
  source 1..75: mol_type = other DNA
tgctggctgcagaacagatgaatgtctcgctgacgtcggtctggcatgccgtccgcagctggcacaagccccggc

SEQ ID NO: 337492 - DNA, 75 bp, synthetic construct
  source 1..75: mol_type = other DNA
gacactgagcgtttccgcgcgattggcaaccctgtttcaaccattgttgccgaactgctggatttcttcctcgaa

SEQ ID NO: 337493 - DNA, 75 bp, synthetic construct
  source 1..75: mol_type = other DNA
aaaactgccggaaggcgtgaagatgactaaataccacgtcaacttcatggggggtgacctgggcaaagagctgac

SEQ ID NO: 337494 - DNA, 75 bp, synthetic construct
  source 1..75: mol_type = other DNA
gcgcgagataagagaagcggtgattgctgaaattaatgccgtgtcagagccggtggtggagaaaacagggccaga

SEQ ID NO: 337495 - DNA, 75 bp, synthetic construct
  source 1..75: mol_type = other DNA
aacgctttgtccgtcactgcgcccggtggttatcgtcggtggtggcggtcagatgggacgtctgttcgagaagat

SEQ ID NO: 337496 - DNA, 75 bp, synthetic construct
  source 1..75: mol_type = other DNA
taacgggaaacttattatgaaaatgaatgccgggcaaaattcacgcggaaacttttctgtgggagcaggtgtggg

SEQ ID NO: 337497 - DNA, 75 bp, synthetic construct
  source 1..75: mol_type = other DNA
acactttaactgttaaaggtgatggagatattgcagttactgttaatgataaaggaatgacgattgacggaacta

SEQ ID NO: 337498 - DNA, 75 bp, synthetic construct
  source 1..75: mol_type = other DNA
tctccgataacggtaaggtgataatgaagctgaatgccggtcagaacacccggggtaatttctccgtcggtgctg

SEQ ID NO: 337499 - DNA, 75 bp, synthetic construct
  source 1..75: mol_type = other DNA
attgtcttccagtcagggatcccggtggtgatggccggtctggatgttactcacaaagcacaaattcacgttgag

SEQ ID NO: 337500 - DNA, 75 bp, synthetic construct
  source 1..75: mol_type = other DNA
cccgctcacggccgtctggcatgctgtcagggggtggcatacagccggaagccctgaacaggtaaggaatgcgtc

SEQ ID NO: 337501 - DNA, 75 bp, synthetic construct
  source 1..75: mol_type = other DNA
gcaggcggtcaggttatatctggtgtacaggatggcgttgatgctcatgatgccgtcaatgtatctcagttaaac

SEQ ID NO: 337502 - DNA, 75 bp, synthetic construct
  source 1..75: mol_type = other DNA
agctatctcctgacaggggcgcagtcgatggcattaaccggcgatattgtggtggaagataacgccgtattgtcg

SEQ ID NO: 337503 - DNA, 75 bp, synthetic construct
  source 1..75: mol_type = other DNA
agtgaccgccgtggtgcagccggcgatccgctacatcgagcgcgataacgacggcaacaaattaacgaatgatta

SEQ ID NO: 337504 - DNA, 75 bp, synthetic construct
  source 1..75: mol_type = other DNA
gtggggcgcttgctgaggttctggcgtcagagagaaggacgctcaacgaacaacttcgcgttgcaatgcccggca

SEQ ID NO: 337505 - DNA, 75 bp, synthetic construct
  source 1..75: mol_type = other DNA
cggtacgttgtttctcgacagcgaattaaacggcgatgactcggcaagcgaccaactggtgttgaacggcaatac

SEQ ID NO: 337506 - DNA, 75 bp, synthetic construct
  source 1..75: mol_type = other DNA
gcgttgctggcgacacgctcacggtaaacggtgattacaccggtggcggtacgttgtttctcgacagcgaattaa

SEQ ID NO: 337507 - DNA, 75 bp, synthetic construct
  source 1..75: mol_type = other DNA
cgacatctacaggtattaaagtagttgatttcgcagctgatcccgcgcagtttcaaaacaatgcgcagttcagtc

SEQ ID NO: 337508 - DNA, 75 bp, synthetic construct
  source 1..75: mol_type = other DNA
aacggcaagtcaattgatgatacgcacactcacggcggcgtacagcacggcaccagcaacacagacggggtgaac

SEQ ID NO: 337509 - DNA, 75 bp, synthetic construct
  source 1..75: mol_type = other DNA
atggcagtatctgaccagacccgcagcggcgaccttgccgaaacattcaaatctgaacgggaaacaacaaagaac

SEQ ID NO: 337510 - DNA, 75 bp, synthetic construct
  source 1..75: mol_type = other DNA
ttattcagtcattcgaccctgacgcggttacggcggttgtgcagcctgctgtccgttcggttgaaactgataacg

SEQ ID NO: 337511 - DNA, 75 bp, synthetic construct
  source 1..75: mol_type = other DNA
cagatccgtgtcgccttgcctggcgttattcagtcattcgatcctgatgcgatgacggcagttgtgcagcctgct

SEQ ID NO: 337512 - DNA, 75 bp, synthetic construct
  source 1..75: mol_type = other DNA
tgaattttttgaaacacagcattgacgaaaatgtgcggtcgttatcttcttattccagtaccatcacattacacc

SEQ ID NO: 337513 - DNA, 75 bp, synthetic construct
  source 1..75: mol_type = other DNA
ttgagcttaatcctgataccgggaaaattaaaattgtcgctccgggtggtcttgatgtggttgcccctctggctg

SEQ ID NO: 337514 - DNA, 75 bp, synthetic construct
  source 1..75: mol_type = other DNA
cattacacggcggcagggcaactggctcagcatgaagacacttctacggtgcagcttagcggtgacctgtttagg

SEQ ID NO: 337515 - DNA, 75 bp, synthetic construct
  source 1..75: mol_type = other DNA
taacaacttcatcactgaagttaacaacctgaacaaacgcatgggcgatttgagggatattaatggcgaagccgg

SEQ ID NO: 337516 - DNA, 75 bp, synthetic construct
  source 1..75: mol_type = other DNA
attgtcttccagtcagggattccggtggtgatggctggtctggatgtcacccacaaagcgcaaattcacgttgag

SEQ ID NO: 337517 - DNA, 75 bp, synthetic construct
  source 1..75: mol_type = other DNA
ggttatccatacctataacagtcagactgtggccgataatgtggctgccaccggcgatgattccgtactgacgca

SEQ ID NO: 337518 - DNA, 75 bp, synthetic construct
  source 1..75: mol_type = other DNA
gtccggtgaatatttctgatgccaccctgagtctgaacagccgtcctgatgaggtatctcacacacttttacctg

SEQ ID NO: 337519 - DNA, 75 bp, synthetic construct
  source 1..75: mol_type = other DNA
tgctgaaaataaggggatgttccgcccgggggcaacgaatatcgctatttataataagcagggagaatttgtcgg

SEQ ID NO: 337520 - DNA, 75 bp, synthetic construct
  source 1..75: mol_type = other DNA
gaactcgcgccgataaccagaaccacggttatgccgttgggctgacctcaagctggtatcagcacggtaatcaga

SEQ ID NO: 337521 - DNA, 75 bp, synthetic construct
  source 1..75: mol_type = other DNA
tggaagataacaacgactggtatctgcgatcacaagaagtcaatccgacgccgcctgatccagacccgactccag

SEQ ID NO: 337522 - DNA, 75 bp, synthetic construct
  source 1..75: mol_type = other DNA
aaccggcgatattgtggtggaagataacgccgtattgtcgctggcggggaatcaggccgatttacgggcaatgca

SEQ ID NO: 337523 - DNA, 75 bp, synthetic construct
  source 1..75: mol_type = other DNA
atggataaagataagataatcaagaaaaacagaggtaattactcctatgtagtcagagcgatggatgaagatggg

SEQ ID NO: 337524 - DNA, 75 bp, synthetic construct
  source 1..75: mol_type = other DNA
atgcaacagaatattcatgtttacgacgatcacgctggcatcatctatctatctgatggacgcgaggtgaaattt

SEQ ID NO: 337525 - DNA, 75 bp, synthetic construct
  source 1..75: mol_type = other DNA
aaatcggtggaatcagtaccggagcaacgcagctgcgcagcgacgatgggagcacgtattttgagctcaacccca

SEQ ID NO: 337526 - DNA, 75 bp, synthetic construct
  source 1..75: mol_type = other DNA
cttcgcggtattgttggcgatggctccaccgaattaaaaccgctagtggatgtgccggtcatctttccgcgcggc

SEQ ID NO: 337527 - DNA, 75 bp, synthetic construct
  source 1..75: mol_type = other DNA
aagaagtggaagcattaatgcgcaatattgccgatgcctggaaagagtctttactctccccttctttgattcagg

SEQ ID NO: 337528 - DNA, 75 bp, synthetic construct
  source 1..75: mol_type = other DNA
acctgatcgccggctgcattattggcccgtgggggctgcgactggtgaccgatgccgaatctattctgcactttg

SEQ ID NO: 337529 - DNA, 75 bp, synthetic construct
  source 1..75: mol_type = other DNA
cggcatcgtgtctcgccaatctgcaattttatgaaccgcgtaccattcacgactcgtcattaagtaaagcaatcc

SEQ ID NO: 337530 - DNA, 75 bp, synthetic construct
  source 1..75: mol_type = other DNA
aagcctgggatcgcagcgaccggatcctgcactgttcttcattctcgaagtgtctggttccgggctttcgcattg

SEQ ID NO: 337531 - DNA, 75 bp, synthetic construct
  source 1..75: mol_type = other DNA
atgagcacgctgtcgaccagttcgcccatgcaactggcgctggtcgattacctgtctacccgtcgctatgacgtc

SEQ ID NO: 337532 - DNA, 75 bp, synthetic construct
  source 1..75: mol_type = other DNA
aaactttacggaatacatgctgttacgcaccgcaaaattgctacccttgccggggtaccgttgggatcgatgacc

SEQ ID NO: 337533 - DNA, 75 bp, synthetic construct
  source 1..75: mol_type = other DNA
tcatttgccagagactctaaataaatttattaaaggtattaaaaaggaaaacaaaggcaaggcttatgttgtaat

SEQ ID NO: 337534 - DNA, 75 bp, synthetic construct
  source 1..75: mol_type = other DNA
aactctttttggaaaacaatgagtttattcttctagggttaacaggacgaacaggctctggttgctcaaccgccg

SEQ ID NO: 337535 - DNA, 75 bp, synthetic construct
  source 1..75: mol_type = other DNA
aactattaatagggttattaaattaataagaaaaagcaaaagagataacgcattaattgtcatagatgctattag

SEQ ID NO: 337536 - DNA, 75 bp, synthetic construct
  source 1..75: mol_type = other DNA
agcttatttacgtcgctgaagaatctgttttctgtttgggggattttattttgcccttcaatgggatcgctacca

SEQ ID NO: 337537 - DNA, 75 bp, synthetic construct
  source 1..75: mol_type = other DNA
gcgattaatctggcgaaatacaaagcggcggcggggaagcaaaccattctgctggattattcacgcgcagaagtg

SEQ ID NO: 337538 - DNA, 75 bp, synthetic construct
  source 1..75: mol_type = other DNA
agctttttttagaaaatagtcaatttattcttattggtttaactgggagaactggctcaggatgtactactgcag

SEQ ID NO: 337539 - DNA, 75 bp, synthetic construct
  source 1..75: mol_type = other DNA
ttagactttctaaatgaaatgaaaatatctcttaatgaacgaggtgatggaatcaaagctcgccacattccatta

SEQ ID NO: 337540 - DNA, 75 bp, synthetic construct
  source 1..75: mol_type = other DNA
atggctttaccacgcaagttaaaacacctgaacctgttcaacgacgggaacaactggcaggggatcgttgagtct

SEQ ID NO: 337541 - DNA, 75 bp, synthetic construct
  source 1..75: mol_type = other DNA
gccgtagagcttgtagtgcgtgggcgtcacaaagaagtggattccggtgagtggaagacgggcgaaagcaacacc

SEQ ID NO: 337542 - DNA, 75 bp, synthetic construct
  source 1..75: mol_type = other DNA
agctgcgtttcaccggctctattcagcgtgacgataccggcgaagttcaggccattgagctggttgtgcgggggc

SEQ ID NO: 337543 - DNA, 75 bp, synthetic construct
  source 1..75: mol_type = other DNA
aaatcagcggtatcagtaccagttcggtagagctgcgcagcgatgacggcggcacaaagttaagccttaacccat

SEQ ID NO: 337544 - DNA, 75 bp, synthetic construct
  source 1..75: mol_type = other DNA
agttgcgctttaccggctctatccagcgtgatgataccggagaagtgcaggccgtggagcttgtggtgcgtgggc

SEQ ID NO: 337545 - DNA, 75 bp, synthetic construct
  source 1..75: mol_type = other DNA
agctgcgctttaccggctctatccagcgtgacgataccggggaagtgcagcccgtggagcttgtggtgcgtggac

SEQ ID NO: 337546 - DNA, 75 bp, synthetic construct
  source 1..75: mol_type = other DNA
ctcgaacccgccagtaaaagatcgcgttaactcaatgaatgcaatgttctgcaatgccaatggtgagcgtcgcta

SEQ ID NO: 337547 - DNA, 75 bp, synthetic construct
  source 1..75: mol_type = other DNA
tgaactgctgctgtttaagcagatgggcaaatccacggtggatggcatccagttgcgctttaccggctctatcca

SEQ ID NO: 337548 - DNA, 75 bp, synthetic construct
  source 1..75: mol_type = other DNA
tagaaggaagcaaacttgaaaaaagaaccaattttagtgaaatacttacgactaaaaaaaccaatgagttaatcc

SEQ ID NO: 337549 - DNA, 75 bp, synthetic construct
  source 1..75: mol_type = other DNA
atactgaatatagtttttacattgatattgataacgaccatagctcatgtgtatatcaaggaaaaaacaaagcat

SEQ ID NO: 337550 - DNA, 75 bp, synthetic construct
  source 1..75: mol_type = other DNA
acacagaattttccattggtggtactgaactgctgctgtttaagcagatgggcaaatccacggtggatggcatcc

SEQ ID NO: 337551 - DNA, 75 bp, synthetic construct
  source 1..75: mol_type = other DNA
ggtgctctatgaagtggaccttatcaacatggtggaaattgtggatggtgtggacctgatggaagcgcaccgcaa

SEQ ID NO: 337552 - DNA, 75 bp, synthetic construct
  source 1..75: mol_type = other DNA
gacggcagatggccagtattctgtaactgcggaaatcacagacccggcaggtaacaccagtggccaggggcagcc

SEQ ID NO: 337553 - DNA, 75 bp, synthetic construct
  source 1..75: mol_type = other DNA
actcatgttattttgcaccatattgactgagttttgtggtttactcgcgcagacaattaacggtattcgcagtta

SEQ ID NO: 337554 - DNA, 75 bp, synthetic construct
  source 1..75: mol_type = other DNA
ccatcgtgctttttatccgtatggcactcaatgcgctggatggcatgttggcgcgtgagtgcaatcagcaaacac

SEQ ID NO: 337555 - DNA, 75 bp, synthetic construct
  source 1..75: mol_type = other DNA
cgccggagtgatcacgcgcaatacgacgctgtttgacccaggctggtggcaactgccaggttcggaaaaacgtta

SEQ ID NO: 337556 - DNA, 75 bp, synthetic construct
  source 1..75: mol_type = other DNA
cctgaataatgacggcaaactggccaactatgcggcaacgcatgatatcggtaagctgggcattgagcgttacta

SEQ ID NO: 337557 - DNA, 75 bp, synthetic construct
  source 1..75: mol_type = other DNA
aaacggcggcgcgggcccggcggtcggtacgctaatgcgccagatcctcgaccacattatgcttggcgataacaa

SEQ ID NO: 337558 - DNA, 75 bp, synthetic construct
  source 1..75: mol_type = other DNA
gagaaagatcaatctttaatatattccatatcatggaataaaacggaaataagagagattattgatgctagaatt

SEQ ID NO: 337559 - DNA, 75 bp, synthetic construct
  source 1..75: mol_type = other DNA
cgctttcttcaaacattaaatagctttgttaatccatttaaaagagaaggcgaagaacagattactgatttcaat

SEQ ID NO: 337560 - DNA, 75 bp, synthetic construct
  source 1..75: mol_type = other DNA
tactgtaattaatgctttttttgaggaaaggcattttcaatcttggcctgtgtggaataataaaaccactcacgg

SEQ ID NO: 337561 - DNA, 75 bp, synthetic construct
  source 1..75: mol_type = other DNA
gcaatggaataatcttttatggggcattgcttcaattctgcttatctggactgcgattaatcgttgtcggagtgt

SEQ ID NO: 337562 - DNA, 75 bp, synthetic construct
  source 1..75: mol_type = other DNA
atgacgctctaccagataaaaccgctctttcagatgctgttaagaccgacgatgttttggctttataagcaccat

SEQ ID NO: 337563 - DNA, 75 bp, synthetic construct
  source 1..75: mol_type = other DNA
caatgtgtttatatctgatttgatctcgaaagggatagatttacgtgggttttataaatcgttatggctgcatgt

SEQ ID NO: 337564 - DNA, 75 bp, synthetic construct
  source 1..75: mol_type = other DNA
ggtggggaggggaatgacacaatcaaaataggtactatttcaaatggtaatataaccattgatgcgggtgccggt

SEQ ID NO: 337565 - DNA, 75 bp, synthetic construct
  source 1..75: mol_type = other DNA
aactttaatatttacctcgggacgtatggtaatgactccaacttattgatagtgttttatgttcagataatgccc

SEQ ID NO: 337566 - DNA, 75 bp, synthetic construct
  source 1..75: mol_type = other DNA
acacaacaagccgccgagatccgcgaaattaaaaccgcacagggcaacacgccggtaaacggtcaatcaacgacg

SEQ ID NO: 337567 - DNA, 75 bp, synthetic construct
  source 1..75: mol_type = other DNA
taaataatgcttatggttataccgatagcaagggtaattttgtcgatcagtccgatcgtaccggctatggtatga

SEQ ID NO: 337568 - DNA, 75 bp, synthetic construct
  source 1..75: mol_type = other DNA
tggtgaaaacggtcgcctggtacgataacgaatatggcttcgtcacacagcttattcgcaccctcgaaaaattcg

SEQ ID NO: 337569 - DNA, 75 bp, synthetic construct
  source 1..75: mol_type = other DNA
tacaccattcacaccattcatgcgtcttatcagttcgctaatgtgatggatatggagaactttaatatttacctc

SEQ ID NO: 337570 - DNA, 75 bp, synthetic construct
  source 1..75: mol_type = other DNA
tacgatatgttcccgctgaatcaggatacctttgttgaacattccggtaatactgcgaacgatctttatgacgat

SEQ ID NO: 337571 - DNA, 75 bp, synthetic construct
  source 1..75: mol_type = other DNA
gcgtaaagtgctggctcctcactacatcctgtcactgtccgccgttttgccagttcaggaggtgagccatgttta

SEQ ID NO: 337572 - DNA, 75 bp, synthetic construct
  source 1..75: mol_type = other DNA
gtcgtggaatttttctcgttctactgccctgcatgcagcagcttctacagcccttataaagtcagcaaaaatatt

SEQ ID NO: 337573 - DNA, 75 bp, synthetic construct
  source 1..75: mol_type = other DNA
aagcagaggatgatggttctgtttctgttgagctgccgggtgatgccaataaaggcgataccgtggatgtcacct

SEQ ID NO: 337574 - DNA, 75 bp, synthetic construct
  source 1..75: mol_type = other DNA
aactggtattttgaattaaacacgttactggaagacggaacatctttatataacgatggcaattatcatggccgc

SEQ ID NO: 337575 - DNA, 75 bp, synthetic construct
  source 1..75: mol_type = other DNA
gcacggttcagtaaatatcgatgatgcggtattcttctttggcaaagaaaacgactggaaggtcaaagtaggccg

SEQ ID NO: 337576 - DNA, 75 bp, synthetic construct
  source 1..75: mol_type = other DNA
acgtaaggtgttggcacctcactacatcctgtcactgtccgccgttttgccagttcaggaggtgagccatgttta

SEQ ID NO: 337577 - DNA, 75 bp, synthetic construct
  source 1..75: mol_type = other DNA
agagggcataaacctagccaggctaataaagaacgtataactaaattcaggcactggttgcatgatgcccgcgag

SEQ ID NO: 337578 - DNA, 75 bp, synthetic construct
  source 1..75: mol_type = other DNA
gaacactggacaacaccgtcggtgtgcttttatcgggagatgctctgtctctgaccgcaggcgttgttaacaata

SEQ ID NO: 337579 - DNA, 75 bp, synthetic construct
  source 1..75: mol_type = other DNA
gttggtgatattggtggtggctttgtttctgagttaataaactacggtattaaaaattatcctactcctactaat

SEQ ID NO: 337580 - DNA, 75 bp, synthetic construct
  source 1..75: mol_type = other DNA
ggatacgcagatacagagtgatggtgcattcacccacatcggttcagtggcatcccgtcgtgatacccgtattca

SEQ ID NO: 337581 - DNA, 75 bp, synthetic construct
  source 1..75: mol_type = other DNA
gtgagtcacagccgggataaaatgcacagcaactatgacagcgtgcaggagcagacagggatttttgccggcagg

SEQ ID NO: 337582 - DNA, 75 bp, synthetic construct
  source 1..75: mol_type = other DNA
acggacaacctgctggcgatggccggacgggatatcagtctgaccaccaccactcgtacggcacagagtgacgcc

SEQ ID NO: 337583 - DNA, 75 bp, synthetic construct
  source 1..75: mol_type = other DNA
ccagcagggacgtctgcttgccagccgtgacatcctgattaatacacaggcgctgaataacgacaacggactgat

SEQ ID NO: 337584 - DNA, 75 bp, synthetic construct
  source 1..75: mol_type = other DNA
gtatcagtgcgaaaacggatgtgcatctggcgacaacccgggagttgcataacagtggttctgtttatgcggggc

SEQ ID NO: 337585 - DNA, 75 bp, synthetic construct
  source 1..75: mol_type = other DNA
cggacaggcagccagcgcggcttgtgcaggtgaaagactgagggttattgctgctaaaggcggttatgaaaccgg

SEQ ID NO: 337586 - DNA, 75 bp, synthetic construct
  source 1..75: mol_type = other DNA
atagcaaaacagacgcttaaaaacagtaaagatccggcagagcgcgaaaaggcgcagcagaaatatgatgcattg

SEQ ID NO: 337587 - DNA, 75 bp, synthetic construct
  source 1..75: mol_type = other DNA
tcaacgatgccagcggcctgatacagagcggtgcatcgctgaatctccgtgctgacacactgagtaaccgtaaca

SEQ ID NO: 337588 - DNA, 75 bp, synthetic construct
  source 1..75: mol_type = other DNA
aaacttgccaaaggtgagttaccagatggagccaatataagcaaagttatagttgatggttataaagatggtgta

SEQ ID NO: 337589 - DNA, 75 bp, synthetic construct
  source 1..75: mol_type = other DNA
aacatcgatcacgttgcggagtttatcgtcgtcccaagaacaaacaggtgccagatggactattgatattaaggg

SEQ ID NO: 337590 - DNA, 75 bp, synthetic construct
  source 1..75: mol_type = other DNA
aaagatgacggacgtctggcggcagcgggcaacctgactgtcagtaccaccggcgaactggcggcacacggacag

SEQ ID NO: 337591 - DNA, 75 bp, synthetic construct
  source 1..75: mol_type = other DNA
aaaattcctcctgtgtgcggcagaacgtcacacggtgtttaatttcagcagaattgcggactattacgctcacgc

SEQ ID NO: 337592 - DNA, 75 bp, synthetic construct
  source 1..75: mol_type = other DNA
ttttgatatctccctgacaggattcagccaaacagatattgacgaactgttgacggaagttttgccgggcaccgg

SEQ ID NO: 337593 - DNA, 75 bp, synthetic construct
  source 1..75: mol_type = other DNA
cgtcgggcggtaaaccggataacgctgctggtaatgcggaaaacaccgtcaaaaacatcgcatttaactatattg

SEQ ID NO: 337594 - DNA, 75 bp, synthetic construct
  source 1..75: mol_type = other DNA
actggactaataaagcaggaatacgagtatggcggatattaagtggtaatcgtggcaaaaaaccaagcaaagcta

SEQ ID NO: 337595 - DNA, 75 bp, synthetic construct
  source 1..75: mol_type = other DNA
ggcggttattcgtgaaaaggaagaaacactgaaacaacgcgtgatccgcgcgctggcgggtttttcgggttacgg

SEQ ID NO: 337596 - DNA, 75 bp, synthetic construct
  source 1..75: mol_type = other DNA
caggagctggtcagccggatacgttcggcgtcccttgagcctgatatcgaaaaattcctcctgtgcgcggcagaa

SEQ ID NO: 337597 - DNA, 75 bp, synthetic construct
  source 1..75: mol_type = other DNA
tcaacgatgccggcggcctgatacagagtggtgccacactgaatctccgtgctgacacactgagtaaccgtaaca

SEQ ID NO: 337598 - DNA, 75 bp, synthetic construct
  source 1..75: mol_type = other DNA
ggtgcattctttaccgatggtccaaatacaggctctattggaggggctgctgccggggccggattgggtggagca

SEQ ID NO: 337599 - DNA, 75 bp, synthetic construct
  source 1..75: mol_type = other DNA
acggtctcgacactggcaacggttgctgccggcctggccggtggtctggtgggagattcgggagcttcagcggta

SEQ ID NO: 337600 - DNA, 75 bp, synthetic construct
  source 1..75: mol_type = other DNA
tgttgttgccaccatcctgagcaacgatgcgttacgtgcgatttgggaacaagagctgactgatatgcgccagcg

SEQ ID NO: 337601 - DNA, 75 bp, synthetic construct
  source 1..75: mol_type = other DNA
ccaggtggtactggtgcgttacgcgtagctgccgatttcctggcgaaaaataccagtgttaagcgtgtgtgggta

SEQ ID NO: 337602 - DNA, 75 bp, synthetic construct
  source 1..75: mol_type = other DNA
gtggatgcgacagtagccggtactgaccggataccgcttcgcccggtggtgtcggccggtgaaccggtcattctg

SEQ ID NO: 337603 - DNA, 75 bp, synthetic construct
  source 1..75: mol_type = other DNA
tgccgcagagctgggtatcgccattgaatggggcggggactggagttctctgaaagacggaccacatttccagct

SEQ ID NO: 337604 - DNA, 75 bp, synthetic construct
  source 1..75: mol_type = other DNA
gcagagctgggaactgccatcgaatggggtggggactggaaaacactgaaagatgggcctcactttcagttgaaa

SEQ ID NO: 337605 - DNA, 75 bp, synthetic construct
  source 1..75: mol_type = other DNA
gtcggagcgagaaaaatctggagggcgtcaaaccacaactggttgccgtggttcgtcgtgcgctggagctgacgg

SEQ ID NO: 337606 - DNA, 75 bp, synthetic construct
  source 1..75: mol_type = other DNA
tctgtggttagttatcggcctgataacgctggcggtaatggttttcgccggcgggcatttttaccgtagcgcatg

SEQ ID NO: 337607 - DNA, 75 bp, synthetic construct
  source 1..75: mol_type = other DNA
gaaaccgccgtcgctaccatgaagcgcttccgctggcaggcaattgtcgctctggcggtaggtatcccggtgatg

SEQ ID NO: 337608 - DNA, 75 bp, synthetic construct
  source 1..75: mol_type = other DNA
acgctgccacaggtcaatagcttccgtacattgcgcggactgggggtaagtggcgaagcggaaggccattcactg

SEQ ID NO: 337609 - DNA, 75 bp, synthetic construct
  source 1..75: mol_type = other DNA
catatcggcccgtcagtaggtgatacggcaaaaatacatggagatgtaaaaggccaggtcgctggaggttatgtc

SEQ ID NO: 337610 - DNA, 75 bp, synthetic construct
  source 1..75: mol_type = other DNA
atacaggctctattggaggggctgctgccggggccggattgggtggagcatttggagtatatgctcccggaatag

SEQ ID NO: 337611 - DNA, 75 bp, synthetic construct
  source 1..75: mol_type = other DNA
agttgatggttataaagatggcgtattgattgcaggtgcctggtatctggggcctgcggtgtcagtgggtaaagc

SEQ ID NO: 337612 - DNA, 75 bp, synthetic construct
  source 1..75: mol_type = other DNA
cgtgcgctggagctgacggaggttgatttcggtattacggaaggtctgcgcacgaaagaacgccagaaacaactg

SEQ ID NO: 337613 - DNA, 75 bp, synthetic construct
  source 1..75: mol_type = other DNA
cgttaaaccacagctggttgctgtagttcgccgtgcgctggagctgacggaggttgatttcggtattacggaagg

SEQ ID NO: 337614 - DNA, 75 bp, synthetic construct
  source 1..75: mol_type = other DNA
agtacggtgacatccctgctaacagtttgttggttcacgaagccatagacagggcattgggtgaagatattccgt

SEQ ID NO: 337615 - DNA, 75 bp, synthetic construct
  source 1..75: mol_type = other DNA
agtgcggcaatctggtatttctttggtccggcaccgcaaattgtctataccctggtgattgccaccacggtgctg

SEQ ID NO: 337616 - DNA, 75 bp, synthetic construct
  source 1..75: mol_type = other DNA
tgacctcgataaccaatggctgcccgatgtttttactcagggcgtattgtggaccgggctgattgcggcatgggc

SEQ ID NO: 337617 - DNA, 75 bp, synthetic construct
  source 1..75: mol_type = other DNA
gtggtgttgcgtctgtccgggatgagcggggctgttcatgtggatacggatatcaccgaagtggcgaaaaataac

SEQ ID NO: 337618 - DNA, 75 bp, synthetic construct
  source 1..75: mol_type = other DNA
tgagccaaatcttgaagacattgcgcggattatgcgggcgcttggtcgtcggcaattcactgttactcatgacgg

SEQ ID NO: 337619 - DNA, 75 bp, synthetic construct
  source 1..75: mol_type = other DNA
catttaatacaaattacgattccgagtccggcaccaaattcatatcaacggacctccacggaggtccgtttttcg

SEQ ID NO: 337620 - DNA, 75 bp, synthetic construct
  source 1..75: mol_type = other DNA
attaagtttatttgtatcaatagcctcgatgctttaagagtttttcagcttaaagtagctgggaagttccgtagg

SEQ ID NO: 337621 - DNA, 75 bp, synthetic construct
  source 1..75: mol_type = other DNA
gctgattgccgcgagcatcatcgacctcgatcaccaatggctgcccgatgtttttactcagggcgtattgtggac

SEQ ID NO: 337622 - DNA, 75 bp, synthetic construct
  source 1..75: mol_type = other DNA
cagctggtcgcggaagggaaaagccagaccatgaacagccgccacctgaccggtgatgcggtggatgttgttgcc

SEQ ID NO: 337623 - DNA, 75 bp, synthetic construct
  source 1..75: mol_type = other DNA
ccgcgcaacgctgcgcaatatgaagcagaacctgctcggcgcgtttatctacaacagcattggtattccggtcgc

SEQ ID NO: 337624 - DNA, 75 bp, synthetic construct
  source 1..75: mol_type = other DNA
aacccaaccaccgccaatgcgatcgccaaagaagcagggattgatgaggtgatcgccggggtgctgccggacggt

SEQ ID NO: 337625 - DNA, 75 bp, synthetic construct
  source 1..75: mol_type = other DNA
attattgatggaggtcaaaggcttttacgttcgcttaatccgttgtatccaccaatcccgctaaatcctgaatca

SEQ ID NO: 337626 - DNA, 75 bp, synthetic construct
  source 1..75: mol_type = other DNA
atgtcgggtaaattcagattcagccgtcgcagtgaaaaaaatctggagggcgttaaaccacagctggttgctgta

SEQ ID NO: 337627 - DNA, 75 bp, synthetic construct
  source 1..75: mol_type = other DNA
gtcattgacctgtggtcacgtgccgttattggctggtcaatgtcgccacgcatgacggcgcaactggcctgcgat

SEQ ID NO: 337628 - DNA, 75 bp, synthetic construct
  source 1..75: mol_type = other DNA
ccctggcaggtggtgcagcaccgtatattgctgaaattatcaaacagaccaccccggacggtgcgggacgtgtgg

SEQ ID NO: 337629 - DNA, 75 bp, synthetic construct
  source 1..75: mol_type = other DNA
ttactcaggtaaaagacctggctaacgatggctaccgtgctattcaggtgaccaccggtgctaaaaaagctaacc

SEQ ID NO: 337630 - DNA, 75 bp, synthetic construct
  source 1..75: mol_type = other DNA
aaacatataaaaacttcccatatagaaaagtatatagagagcaggaaggctgacggtctttctctcagaacgtta

SEQ ID NO: 337631 - DNA, 75 bp, synthetic construct
  source 1..75: mol_type = other DNA
acgtttttatagcgggctggaacaactgaaaacgttctgccagccacaaacgctggcagcttttgcttgggatct

SEQ ID NO: 337632 - DNA, 75 bp, synthetic construct
  source 1..75: mol_type = other DNA
tcaataccgctcccggagatattaatgcgggggaatggggattatccgcccttcccggacgtgagcacgaagcac

SEQ ID NO: 337633 - DNA, 75 bp, synthetic construct
  source 1..75: mol_type = other DNA
atgcctcgttttgcagctaatttatccatgatgttcaccgaagtgccttttattgaacgcttcgccgcagcgcga

SEQ ID NO: 337634 - DNA, 75 bp, synthetic construct
  source 1..75: mol_type = other DNA
tctggttcggtcatgaaaaagtaacatattctatgctggaacagaccaattttgcattctccgtccaagagtttg

SEQ ID NO: 337635 - DNA, 75 bp, synthetic construct
  source 1..75: mol_type = other DNA
cgattaatatggggggtttatccggcaaatgaaccgcgttgtttactcaaagcctttcgtgtggccgcagagggg

SEQ ID NO: 337636 - DNA, 75 bp, synthetic construct
  source 1..75: mol_type = other DNA
gcttccgttctcttcgagtgtaccgtgacaataaatccgtcacttttgccgaacttgatgtgtttgatttgagtg

SEQ ID NO: 337637 - DNA, 75 bp, synthetic construct
  source 1..75: mol_type = other DNA
ttgatttttgattttggtccacggcaatttaccgttcgcttcgatgaaaacctcaacccggttatctacgatcaa

SEQ ID NO: 337638 - DNA, 75 bp, synthetic construct
  source 1..75: mol_type = other DNA
gccaattgacctgcctgcggatgctctgattggcattgcccacccgttagaaatgacagcagaaatgcgcagtga

SEQ ID NO: 337639 - DNA, 75 bp, synthetic construct
  source 1..75: mol_type = other DNA
cctctatgaggccattcatattgcctcgatggttgtcggtgctttctcaccgaatatggattttcttattgcctg

SEQ ID NO: 337640 - DNA, 75 bp, synthetic construct
  source 1..75: mol_type = other DNA
actgaaagcccccgaggcactggcccgactaaaagggctaaaaaaagatgcctctcaggtgagcaaaaacctgct

SEQ ID NO: 337641 - DNA, 75 bp, synthetic construct
  source 1..75: mol_type = other DNA
atacgaggagtggtatcgactgtacggcctgaataggccagagaaaggacggcctattcgttttgggcagctaac

SEQ ID NO: 337642 - DNA, 75 bp, synthetic construct
  source 1..75: mol_type = other DNA
tgaccggataccgcttcgcccggtggtgtcagccggtgaaccggtcattctgttgccggggcagcagtttgaagt

SEQ ID NO: 337643 - DNA, 75 bp, synthetic construct
  source 1..75: mol_type = other DNA
ccggcctggccggtggtctggtgggagactcgggggcttcagcggtagccggcgcacagtcaggtaagacgactg

SEQ ID NO: 337644 - DNA, 75 bp, synthetic construct
  source 1..75: mol_type = other DNA
ctgaaaagtaacacaacgttcagcaacagtggtcagaccattgcgaacggaaaccttacgctttccgttaatggc

SEQ ID NO: 337645 - DNA, 75 bp, synthetic construct
  source 1..75: mol_type = other DNA
tcagcattaccgccgccacagaccagcatgtgcagacgcatacggtggagcagaaaacctccggtctgacgcttg

SEQ ID NO: 337646 - DNA, 75 bp, synthetic construct
  source 1..75: mol_type = other DNA
agtgaccggcagcagcgggatgttatcgaaaaccaccacaaccacgcatgatgtcactgaccgccggaccatgac

SEQ ID NO: 337647 - DNA, 75 bp, synthetic construct
  source 1..75: mol_type = other DNA
gcgggcctacaataacggtatggcagcctcaggttttggaacgggaggcaaataccagcaggcgatacaggctgc

SEQ ID NO: 337648 - DNA, 75 bp, synthetic construct
  source 1..75: mol_type = other DNA
tccaaagaaatggtgccgagcaagattccgggggctgcaggtaatatgggggcttctattacatcagaaatgacg

SEQ ID NO: 337649 - DNA, 75 bp, synthetic construct
  source 1..75: mol_type = other DNA
ccggggagtgcccaggctatgtggttacttggtgccgggacaaatgccgggatgcagtatgcagatagtggtgaa

SEQ ID NO: 337650 - DNA, 75 bp, synthetic construct
  source 1..75: mol_type = other DNA
gtaaaggtaaaatccttgaacagattcgagccagccgagacgagaacggaaaacaatctgataagttgcacctgt

SEQ ID NO: 337651 - DNA, 75 bp, synthetic construct
  source 1..75: mol_type = other DNA
gaccattatcagcgggcgggacaccacgcttaccggcgcgcaggctggcggtgaaacggtgaaagtggatgccgg

SEQ ID NO: 337652 - DNA, 75 bp, synthetic construct
  source 1..75: mol_type = other DNA
ggatgtgtccagccttggcggaatgtatgccggaaaaattcgccttgtcggtacggaaacgggggtgggtgttcg

SEQ ID NO: 337653 - DNA, 75 bp, synthetic construct
  source 1..75: mol_type = other DNA
gcagattgagaaaaagaccggtgatgcttcttcactgcctcagatggcactggatgtggccagtcttggcggaat

SEQ ID NO: 337654 - DNA, 75 bp, synthetic construct
  source 1..75: mol_type = other DNA
ccaaggcattcccgaagaattcgcgcagaaagcaatgttggctatcgctggcggcaaagtgcaggacgcgtatat

SEQ ID NO: 337655 - DNA, 75 bp, synthetic construct
  source 1..75: mol_type = other DNA
tttctcgagcagatccgtgaaggtgttaatgaagtgcctgacattagcacagacaaaggcagaaagcgcattgca

SEQ ID NO: 337656 - DNA, 75 bp, synthetic construct
  source 1..75: mol_type = other DNA
ctcattgaacagggtattcctgatgactgggcgaaagcatgtgttgtcgccatcgctcgcgggaaagttccagca

SEQ ID NO: 337657 - DNA, 75 bp, synthetic construct
  source 1..75: mol_type = other DNA
tgattttgtgcatacgttgcaggatacctggcgggcaggaaccagactggtggacaacacacaggatctggtgca

SEQ ID NO: 337658 - DNA, 75 bp, synthetic construct
  source 1..75: mol_type = other DNA
ttgaacaaacaattaatatagtcaataagtccgaactaaagaaaaactttattatctacggccctcagctcattt

SEQ ID NO: 337659 - DNA, 75 bp, synthetic construct
  source 1..75: mol_type = other DNA
taaataatttggtgttctcccgatttattgaccgtctaaatgagagttttttgatatataactacagacagctac

SEQ ID NO: 337660 - DNA, 75 bp, synthetic construct
  source 1..75: mol_type = other DNA
ggtctggtgattcaggtaccagaatacttaagcccgggcgaaaaaattcgtatccatatcgaagaacgccgttat

SEQ ID NO: 337661 - DNA, 75 bp, synthetic construct
  source 1..75: mol_type = other DNA
agagttgctgtttatgccagagggcggcatgccggacatgcaggtgctgacctgggacggtcaactgctggcgct

SEQ ID NO: 337662 - DNA, 75 bp, synthetic construct
  source 1..75: mol_type = other DNA
taaagtaatgacccgcctgaccctggttggtgcgctgtacattacctttatctgcctgatcccggagttcatgcg

SEQ ID NO: 337663 - DNA, 75 bp, synthetic construct
  source 1..75: mol_type = other DNA
tggcaggcatcgcgagcagatattgaaataaccgcgccaaagtttatcgacagcagagaagcattagccaaaggg

SEQ ID NO: 337664 - DNA, 75 bp, synthetic construct
  source 1..75: mol_type = other DNA
tgaagaagagttgctgtttatgcctgagggcggcatgccggacatgcaggtgctgacctgggacggtcaattgct

SEQ ID NO: 337665 - DNA, 75 bp, synthetic construct
  source 1..75: mol_type = other DNA
atgatatcgttgacaccgtaacgctgacccgtcgttacgttgacttctcctacgtcgatggcaacgaatatgtct

SEQ ID NO: 337666 - DNA, 75 bp, synthetic construct
  source 1..75: mol_type = other DNA
agtctgtgttgacggagaagttcgggtcagcacatcgaagagtgaagggcgtattgtccgctttgacctgaagtt

SEQ ID NO: 337667 - DNA, 75 bp, synthetic construct
  source 1..75: mol_type = other DNA
caatgttgtgctggagagaacggtccgtgaactgaggggggagccgtgccttgaactggaagagtttacacccgt

SEQ ID NO: 337668 - DNA, 75 bp, synthetic construct
  source 1..75: mol_type = other DNA
gggtctatgggcgagttcagggggtaggctttcgctataccacgcagtatgaagcgaaaaaactgggattaaccg

SEQ ID NO: 337669 - DNA, 75 bp, synthetic construct
  source 1..75: mol_type = other DNA
catctctatcgattccccgatggcccgcgcattgctgaaaaaagaagtcggcgatctggcggtggtgaatacccc

SEQ ID NO: 337670 - DNA, 75 bp, synthetic construct
  source 1..75: mol_type = other DNA
atggtctgggggcgtcgtctgagatttccatgtcgggcaattttttatctgaatcaggcccagaacgccctgcgt

SEQ ID NO: 337671 - DNA, 75 bp, synthetic construct
  source 1..75: mol_type = other DNA
cctgcatttatcggcaaactgttatccgggaaaaatacggctggcggtcttcgcacctacgcagagttttcatcc

SEQ ID NO: 337672 - DNA, 75 bp, synthetic construct
  source 1..75: mol_type = other DNA
gcctgtctatctgatggcagatgcgatgggattcgtttcggaggatatggcctttttacatggtcatgagcccgt

SEQ ID NO: 337673 - DNA, 75 bp, synthetic construct
  source 1..75: mol_type = other DNA
gtggtcgcgctgacggcagaaaaccgtaatcggatcttgaagctactggggctgcagccagttggtgaggtctgg

SEQ ID NO: 337674 - DNA, 75 bp, synthetic construct
  source 1..75: mol_type = other DNA
gaaaaagttaatgaaaacactcgatgaactgaaccagtcgggaaaagggaaagtgtggtttgcggggcgaggaac

SEQ ID NO: 337675 - DNA, 75 bp, synthetic construct
  source 1..75: mol_type = other DNA
tgtcccgtacaaccagtgatgtgctgtttctggcgctgcgccgggtgaaagcagatctgaatgcggatatcaaca

SEQ ID NO: 337676 - DNA, 75 bp, synthetic construct
  source 1..75: mol_type = other DNA
atgggtgagccgtacttcaggcagaaggactttttccggcgccatggggtggtgtgcttcagcagcaactatgag

SEQ ID NO: 337677 - DNA, 75 bp, synthetic construct
  source 1..75: mol_type = other DNA
ggatagccgggatatcattgcagcagcgacaaggagtctggatgcaatatggaaagacggacacagatatcagaa

SEQ ID NO: 337678 - DNA, 75 bp, synthetic construct
  source 1..75: mol_type = other DNA
acgaagagatgcgccaggcgatatgcttatacgcatcccgtgccgcggagaaactccgtggtgagcatcagtact

SEQ ID NO: 337679 - DNA, 75 bp, synthetic construct
  source 1..75: mol_type = other DNA
ggctcaagtgcaaactctgatgatgtccagtcagtatgagtctgcattgaagaaggcgaacctgaaaggctacgg

SEQ ID NO: 337680 - DNA, 75 bp, synthetic construct
  source 1..75: mol_type = other DNA
cagcgcatggttaatgaccctgctgtggctaaactttggtttgatggttaaccgcatcgtgcagcgggtgatttt

SEQ ID NO: 337681 - DNA, 75 bp, synthetic construct
  source 1..75: mol_type = other DNA
taccggctggaccggaacggtcaggtcacggcggtgacagcctcaggcaccgggctgggctatggcgaaggcgat

SEQ ID NO: 337682 - DNA, 75 bp, synthetic construct
  source 1..75: mol_type = other DNA
agcagcaccataaactgagcggccttgagcgggcagaaaccggcgcagaaggattccgctatgaccgccacggca

SEQ ID NO: 337683 - DNA, 75 bp, synthetic construct
  source 1..75: mol_type = other DNA
tctcagttgtacgacccggaaaaaggcatgtttctgccggatcgttttgtgaaaggcacctgtccaaaatgtaaa

SEQ ID NO: 337684 - DNA, 75 bp, synthetic construct
  source 1..75: mol_type = other DNA
gaaatctggcggcaatatgtgccgcatcagttcctgttcgccgaaatactgaccacgctcggtcatattaatcgt

SEQ ID NO: 337685 - DNA, 75 bp, synthetic construct
  source 1..75: mol_type = other DNA
aggtagtctgcgcgcgtcctggccccaccagcaaagccgactgtctgaacaacgtgctggacgccatcacccaat

SEQ ID NO: 337686 - DNA, 75 bp, synthetic construct
  source 1..75: mol_type = other DNA
cacaatccctgctacagcggtgatggtggtctggacggacaggtggtgattaacggtgagcgctggctgatacag

SEQ ID NO: 337687 - DNA, 75 bp, synthetic construct
  source 1..75: mol_type = other DNA
gggggatgcgcatcgtctgaagtatctgcgcaaaatcaatccgtatgtcttcgaagagctgctgttactggccct

SEQ ID NO: 337688 - DNA, 75 bp, synthetic construct
  source 1..75: mol_type = other DNA
catcgtgcagcgggtgattttcgttactggctactacggcctgacgcagggctgctatctgtcctgcgtcttttc

SEQ ID NO: 337689 - DNA, 75 bp, synthetic construct
  source 1..75: mol_type = other DNA
ctggccgtgttgctgatgcttatcctgcgggcaggacggcgaaaacagaaatgcgccaggacccgccgccatcag

SEQ ID NO: 337690 - DNA, 75 bp, synthetic construct
  source 1..75: mol_type = other DNA
gtacagggccggtcagccgggccaggctgacactgtggccggatatcgaacttgtcagcggtcagcgtctgctga

SEQ ID NO: 337691 - DNA, 75 bp, synthetic construct
  source 1..75: mol_type = other DNA
gctgacactgtggccggatatcgaacttgtcagcggtcagcgtctgctgaaactgctgaatggcacgttactgac

SEQ ID NO: 337692 - DNA, 75 bp, synthetic construct
  source 1..75: mol_type = other DNA
gctactcgatattttcaggtttgagcaaagaagtattgctgaatgttatgaaaagcgtgagttcggtaaggctat

SEQ ID NO: 337693 - DNA, 75 bp, synthetic construct
  source 1..75: mol_type = other DNA
gcggcaaacgcggcattactggcagcacaaattctcgcgactcacgataaagagctacaccagcgtctgaatgac

SEQ ID NO: 337694 - DNA, 75 bp, synthetic construct
  source 1..75: mol_type = other DNA
acggcatcgttacctcagggtttattaaacaacttcaaaaatccggtatggtggtatatgtgatagcaccttcaa

SEQ ID NO: 337695 - DNA, 75 bp, synthetic construct
  source 1..75: mol_type = other DNA
cgtgaagccctcgccggacaggtgcccagcgcaggcgtcggcacctgtttcagccgccgcgccgtgaccgcactg

SEQ ID NO: 337696 - DNA, 75 bp, synthetic construct
  source 1..75: mol_type = other DNA
ttcaaagtgccaaaggtggcttaggcgagctgaaactcagactgctgtttgttatcggtgcgctgattgtgtttc

SEQ ID NO: 337697 - DNA, 75 bp, synthetic construct
  source 1..75: mol_type = other DNA
catatatttcggcatcgatcattatccagcttctgacggtggttcacccaacgttggcagaaattaagaaagaag

SEQ ID NO: 337698 - DNA, 75 bp, synthetic construct
  source 1..75: mol_type = other DNA
tctatctttgctctggggatcatgccatatatttcggcatcgatcattatccagcttctgacggtggttcaccca

SEQ ID NO: 337699 - DNA, 75 bp, synthetic construct
  source 1..75: mol_type = other DNA
tggctggacgcaccgattggctacatgggttccttcaagaatctgtgcgacaaacgcggcgacactaccagcttc

SEQ ID NO: 337700 - DNA, 75 bp, synthetic construct
  source 1..75: mol_type = other DNA
aaccttcactgatgccgctgaagtgattggtgaagcgtgggaaagccgcgaatttggtaaagctatccgtgaaat

SEQ ID NO: 337701 - DNA, 75 bp, synthetic construct
  source 1..75: mol_type = other DNA
aatccgttcaaggcgctgtataaccgtattgacatgaagcaggttgaagcactggtggaagcgtctaaagaagaa

SEQ ID NO: 337702 - DNA, 75 bp, synthetic construct
  source 1..75: mol_type = other DNA
ttccacagcctgttctggccagccatgctggaaggcagcaacttccgcaagccgaccaacctgtttgttcacggc

SEQ ID NO: 337703 - DNA, 75 bp, synthetic construct
  source 1..75: mol_type = other DNA
gatcaatacggcgataactgtgaagtctgcggcgcgacatacagcccgacggaactgatcgagccgaaatcggta

SEQ ID NO: 337704 - DNA, 75 bp, synthetic construct
  source 1..75: mol_type = other DNA
cggccacgaggtcaacttcatctgcgccgacgatgcccacggtacgccgatcatgctgaaagcccagcagcttgg

SEQ ID NO: 337705 - DNA, 75 bp, synthetic construct
  source 1..75: mol_type = other DNA
ctttaacattggttagctttgcttcactggcggaaaattctgactacatgaagtgcggaccatttgtgttttcaa

SEQ ID NO: 337706 - DNA, 75 bp, synthetic construct
  source 1..75: mol_type = other DNA
ctgaatgattgtgataccaatgtttccagtaatgcagctgttgcattcctgggtactactgtcaccagtaatgac

SEQ ID NO: 337707 - DNA, 75 bp, synthetic construct
  source 1..75: mol_type = other DNA
cttatctaccgcaactggggggctgtcagtggttggtttaaacagcgctgggctgacattcaggaagcctttaac

SEQ ID NO: 337708 - DNA, 75 bp, synthetic construct
  source 1..75: mol_type = other DNA
tgaccttaatccgcctggcagaaaacgcaggtaaaggcgcggcggtgatgcgcggcttacaggcagcggcagacg

SEQ ID NO: 337709 - DNA, 75 bp, synthetic construct
  source 1..75: mol_type = other DNA
gtattgtggtggatgacggcagcgatgccgccacgcaacagcaactggataatctggttagcgaacagcctggcg

SEQ ID NO: 337710 - DNA, 75 bp, synthetic construct
  source 1..75: mol_type = other DNA
ctcagcggctcgaggcagcgcagcgagcctatccaggctttaatgatgcatggaaacgcgcaccggtgaatctgg

SEQ ID NO: 337711 - DNA, 75 bp, synthetic construct
  source 1..75: mol_type = other DNA
tgcaagcggtcactgaaccgggcgattgggtgatagtagagaatccttgtttctacggcgcgttgcaggcgctgg

SEQ ID NO: 337712 - DNA, 75 bp, synthetic construct
  source 1..75: mol_type = other DNA
atgaaacggtcgatatcaatacctatatttttgacatgttgcaggccagtcgcgatccttcagtggtgccgtttg

SEQ ID NO: 337713 - DNA, 75 bp, synthetic construct
  source 1..75: mol_type = other DNA
gcgttagaggcattaaacctcagtttgcaagcggtaactgaaccgggtgattgggtgatagtagagaatccttgt

SEQ ID NO: 337714 - DNA, 75 bp, synthetic construct
  source 1..75: mol_type = other DNA
ggtcagaaggtaacttttctcaaaaaagagggtgattacgagaacataaaaatgcaatggatcgtcctgaatgaa

SEQ ID NO: 337715 - DNA, 75 bp, synthetic construct
  source 1..75: mol_type = other DNA
atgaagcagtcgatatcaacacctatatttttgatatgttgcaggccagtcgcgatccgtcggtagttccgtttg

SEQ ID NO: 337716 - DNA, 75 bp, synthetic construct
  source 1..75: mol_type = other DNA
ctctggctggagctccccgagccgttagatgcaggagaattaagcctggtggcactgacgcatcatatcagtatt

SEQ ID NO: 337717 - DNA, 75 bp, synthetic construct
  source 1..75: mol_type = other DNA
acgggcgctgggtcacccacgtctgggtatggatcgaaacgctctccctgcaactgaaagacagcatgtgcggct

SEQ ID NO: 337718 - DNA, 75 bp, synthetic construct
  source 1..75: mol_type = other DNA
agcgtaacgtggttgccagcacccttcgtacgaccgcaatcagcgaagcggcgtatgccgtcacccgattgcctg

SEQ ID NO: 337719 - DNA, 75 bp, synthetic construct
  source 1..75: mol_type = other DNA
acgctgatgtcatcctgttctgcactggatgactgcatcagtgacagcttcagcggtttcagtatcgatggcgtg

SEQ ID NO: 337720 - DNA, 75 bp, synthetic construct
  source 1..75: mol_type = other DNA
tgccgacgtgggaagaactgaccgacattcgcgacacactgaatacggcaattgataaggagttgtcccgtacaa

SEQ ID NO: 337721 - DNA, 75 bp, synthetic construct
  source 1..75: mol_type = other DNA
tggaaaatcccttcttcgcttattgaggaaatgcctgcctctgtggcgctgcattatgcggtgttgccgttgcgc

SEQ ID NO: 337722 - DNA, 75 bp, synthetic construct
  source 1..75: mol_type = other DNA
aacgtgcacaaggtggtttgtgcgcgtcctggccctaccagtaaagccgactgcctgaataatgtgcttgatgcc

SEQ ID NO: 337723 - DNA, 75 bp, synthetic construct
  source 1..75: mol_type = other DNA
aactactttctctggcgcgaccgcaaaggggcaatcagtaactttgtcagcttcctcgcgatgctggtgatgctc

SEQ ID NO: 337724 - DNA, 75 bp, synthetic construct
  source 1..75: mol_type = other DNA
caatgtttccagtaatgcagctgttgcattcctgggtactactgtcaccagtaatgacgatacgttagcgctgca

SEQ ID NO: 337725 - DNA, 75 bp, synthetic construct
  source 1..75: mol_type = other DNA
aacaacagctaaatataaaatatttttatttaaagtcgtatttattttcacacgtatccatcagaataatgttaa

SEQ ID NO: 337726 - DNA, 75 bp, synthetic construct
  source 1..75: mol_type = other DNA
atgcccgttactggatgaatcattgccagcactgccatatgaaacaaggagacttccagttacactgcgaagttg

SEQ ID NO: 337727 - DNA, 75 bp, synthetic construct
  source 1..75: mol_type = other DNA
tggtaacgccagcgacctggtcaccatgatcaaaacgctttccggtgtcagcctcggcagcgatctgcaaccgcg

SEQ ID NO: 337728 - DNA, 75 bp, synthetic construct
  source 1..75: mol_type = other DNA
taactatacagataaccgattcagtcagttaagcaatcaatcaaatcagcggttcgaacaattaaacagtaaaat

SEQ ID NO: 337729 - DNA, 75 bp, synthetic construct
  source 1..75: mol_type = other DNA
gtaaactcatttgtcacgacagtgggcttttttctgtctatttattttgccgataaactaccgcgcagatacacc

SEQ ID NO: 337730 - DNA, 75 bp, synthetic construct
  source 1..75: mol_type = other DNA
ttttcgtatcggctgggtcgccgcaggaaaacatgcgcgtaaaatccaacgattgcaattgatgagtacgctttc

SEQ ID NO: 337731 - DNA, 75 bp, synthetic construct
  source 1..75: mol_type = other DNA
ggcaaccacgaagcgatggcgcttgaggcattcgaaactggcgatggcaatatgtggcttgccagcggtggtgac

SEQ ID NO: 337732 - DNA, 75 bp, synthetic construct
  source 1..75: mol_type = other DNA
gctgaaatttcatcaacttccacatattattgaaattaccaacgacattataaaatatgtcatcgcacatgcgga

SEQ ID NO: 337733 - DNA, 75 bp, synthetic construct
  source 1..75: mol_type = other DNA
gaaataggcggtgccgactgttttatcttcggccatatgatgtttgataacatccagacgttcgctaatcaggtt

SEQ ID NO: 337734 - DNA, 75 bp, synthetic construct
  source 1..75: mol_type = other DNA
taaaagcgaccattgttattttatctgcgggcctgacaggttgcgacctggcaaatgggactgcggaaagtggag

SEQ ID NO: 337735 - DNA, 75 bp, synthetic construct
  source 1..75: mol_type = other DNA
atgcattcgcgactggtgatggcaatatgtggttagccagcggcggtgactggttctttgatttaaatgattcag

SEQ ID NO: 337736 - DNA, 75 bp, synthetic construct
  source 1..75: mol_type = other DNA
gataatattgatcgtgggccggagagtcttaacgtgctgcgcctgctaaaccagccctggtttacgtcggttaaa

SEQ ID NO: 337737 - DNA, 75 bp, synthetic construct
  source 1..75: mol_type = other DNA
gctgacaatgtcagtcagtgccaacgggggaacgccgccgtataaatacgcctggaagaaggatggtcagccggt

SEQ ID NO: 337738 - DNA, 75 bp, synthetic construct
  source 1..75: mol_type = other DNA
ctatgtggtaccgctggcgtttatgaaaaatccggagaagacacttaccgtgaatacaggtgcgctgctgacaat

SEQ ID NO: 337739 - DNA, 75 bp, synthetic construct
  source 1..75: mol_type = other DNA
ggaagtgcgtcagcacacctggtcatccggtaccaacggcgtggtggctgcaacgttttcactgcgtctgaaggg

SEQ ID NO: 337740 - DNA, 75 bp, synthetic construct
  source 1..75: mol_type = other DNA
tttaccatgggcattaatgaaatgtaggcgttatctctatgctaatatggaagttaacggacaacgattttctta

SEQ ID NO: 337741 - DNA, 75 bp, synthetic construct
  source 1..75: mol_type = other DNA
ccgtccggtaagggctttaagttcctggcggaagtgcgtcagcacacctggtcatccggtaccaacggcgtggtg

SEQ ID NO: 337742 - DNA, 75 bp, synthetic construct
  source 1..75: mol_type = other DNA
tgaataccggtgcgctgctgacaatgtcagtcagtgtcaacgggggaacgccgccgtataaatacgcctggaaga

SEQ ID NO: 337743 - DNA, 75 bp, synthetic construct
  source 1..75: mol_type = other DNA
tcgttcaaggtcagcatcatcagacactagttgcaattccggctcaaccccttcttaccgccatgtccgcagaag

SEQ ID NO: 337744 - DNA, 75 bp, synthetic construct
  source 1..75: mol_type = other DNA
tgcagtggcggagattggggccagtttgcaggtcgctatgattggttcaggttcaccggatgagactgcaaacaa

SEQ ID NO: 337745 - DNA, 75 bp, synthetic construct
  source 1..75: mol_type = other DNA
gctggctggtgacaggctttggtgccgtcgccagaggaaccagaacactggggggtgtgctctcaggggggctgg

SEQ ID NO: 337746 - DNA, 75 bp, synthetic construct
  source 1..75: mol_type = other DNA
tttaatcctcagtttttcctcaatggcaaagaaaccgcagcgcctgacgggttgaccggcgcactgaatatgagc

SEQ ID NO: 337747 - DNA, 75 bp, synthetic construct
  source 1..75: mol_type = other DNA
gactttggcgcagttcagaacatcatggcctacgcaggtgaccagggttcttttgaaatccctgaccaggtgaaa

SEQ ID NO: 337748 - DNA, 75 bp, synthetic construct
  source 1..75: mol_type = other DNA
cagcttccgttccgccgtcagcggcacacggcgggcgctggattctctcggtgacacgtcacgtcgactgacgga

SEQ ID NO: 337749 - DNA, 75 bp, synthetic construct
  source 1..75: mol_type = other DNA
ccgacgcttgttcagggtgtggcaaaaaccgtgggcgcactgctggggctgaaaattgccactgtcggtctgaag

SEQ ID NO: 337750 - DNA, 75 bp, synthetic construct
  source 1..75: mol_type = other DNA
cctttgtgaacgtctggaaaactgctgttttactccggaccaactggcgtcgactgactaccgcactcggagaag

SEQ ID NO: 337751 - DNA, 75 bp, synthetic construct
  source 1..75: mol_type = other DNA
gctaaccgcttcacctctaacatcaaaggcctgactcaggctgcgcgtaacgccaatgacggtatctctctggcg

SEQ ID NO: 337752 - DNA, 75 bp, synthetic construct
  source 1..75: mol_type = other DNA
tcaactggcaagtgaagaacaacagaaagtgacttcccggctgagcgatgcgctgcgtaatgggcgagtctggca

SEQ ID NO: 337753 - DNA, 75 bp, synthetic construct
  source 1..75: mol_type = other DNA
tgagcgccgggcgtgccgttctctggattggccgggcgctgctgatgaatcccatcggtctcgttatcaccgccg

SEQ ID NO: 337754 - DNA, 75 bp, synthetic construct
  source 1..75: mol_type = other DNA
ttgctgatgaatcccattggtcttgctatcaccgccgtcgcggcggcggcttatcttatttatcgtaactggggg

SEQ ID NO: 337755 - DNA, 75 bp, synthetic construct
  source 1..75: mol_type = other DNA
ccgtcgccggaaatcatggctgccggatattcaggccgtggcgcaactgcaactggcggtggagcgtctggcggt

SEQ ID NO: 337756 - DNA, 75 bp, synthetic construct
  source 1..75: mol_type = other DNA
ctggccatcgcgggatggtcggttccgccatcaagcgccagctcgaacagcgcggcgatgtggaactggtattgc

SEQ ID NO: 337757 - DNA, 75 bp, synthetic construct
  source 1..75: mol_type = other DNA
ggatcactgttcagttcctcgctaactcaatgagtttcgataactccccacaatctcgtttaatcttaaccatga

SEQ ID NO: 337758 - DNA, 75 bp, synthetic construct
  source 1..75: mol_type = other DNA
tggtggcggtttccccctctggcgtgacggaatattgcttggagggcttggtatcagcggcggtagcgttgaaca

SEQ ID NO: 337759 - DNA, 75 bp, synthetic construct
  source 1..75: mol_type = other DNA
ataccgggcaactcttgcaggggcttggcgctattcgtgcaggtcaggcgcagcagccatccagtcttgcgcgtg

SEQ ID NO: 337760 - DNA, 75 bp, synthetic construct
  source 1..75: mol_type = other DNA
cggattttaaaagaaacattaaagatcattcatagcaggtacgaagagaaaataaacatgagacagaatgcccag

SEQ ID NO: 337761 - DNA, 75 bp, synthetic construct
  source 1..75: mol_type = other DNA
cgccatcacgcggcagctcgaacagcgcggtgatgtggaactggtattacgcacccgcgacgagctgaacctgct

SEQ ID NO: 337762 - DNA, 75 bp, synthetic construct
  source 1..75: mol_type = other DNA
gcatctatgctggcctcgcgtcgcgctgaggcggaagccctgggtgtaccgccagatcttattgaggatatcctg

SEQ ID NO: 337763 - DNA, 75 bp, synthetic construct
  source 1..75: mol_type = other DNA
gttccctgccaccttacggcgtggccagccacaaaattccttaaaacgatcagcaatctatcacgcacaccagaa

SEQ ID NO: 337764 - DNA, 75 bp, synthetic construct
  source 1..75: mol_type = other DNA
tgccaccttacggcgtggccagccacaaaattccttaaacgatcagcaatctatcacgcacaccagaaacaggca

SEQ ID NO: 337765 - DNA, 75 bp, synthetic construct
  source 1..75: mol_type = other DNA
gctggaaaaagcgatcgataacgcaatgaacgctgttcctccggttcacagcttcattctgccaggacgttgtga

SEQ ID NO: 337766 - DNA, 75 bp, synthetic construct
  source 1..75: mol_type = other DNA
caacggccgaagttcacagccagtactgcgacagttcggattatgctgcatttggcgggacttcattctgcccaa

SEQ ID NO: 337767 - DNA, 75 bp, synthetic construct
  source 1..75: mol_type = other DNA
ttcctggagcaaattcaggtctggggtgcgaggctgcatcggattagcgccgtcgaacacgatcagaatatggcg

SEQ ID NO: 337768 - DNA, 75 bp, synthetic construct
  source 1..75: mol_type = other DNA
agaataaattgcttcccatgaatgggtatatgaaaggcggcagcgactccggttctaaagcccaggcacgcgcga

SEQ ID NO: 337769 - DNA, 75 bp, synthetic construct
  source 1..75: mol_type = other DNA
aaaggtgacgttttacaagtcagcggcgatgcccgccgcgtaaaaaccatcgccgatcgcatcggctttatctcg

SEQ ID NO: 337770 - DNA, 75 bp, synthetic construct
  source 1..75: mol_type = other DNA
gcatgggtaatgctgccggattgttatttgccggtattatgctgggctttatgcgcgccaaccatcctaccttcg

SEQ ID NO: 337771 - DNA, 75 bp, synthetic construct
  source 1..75: mol_type = other DNA
tattggcctgacggccggtatgttagcaggctctatgacgtcgacaccggttctggtcggtgctggcgatacact

SEQ ID NO: 337772 - DNA, 75 bp, synthetic construct
  source 1..75: mol_type = other DNA
gctatattccccagggcgcgttaagcatggtgaaagagttcggtttgatggtatttatggcgggcgttggtttaa

SEQ ID NO: 337773 - DNA, 75 bp, synthetic construct
  source 1..75: mol_type = other DNA
cgatgaaatagcgttggtaggatatcccgacgcccacgcccggctcgatcccagcttccgtaacggtaaagaagt

SEQ ID NO: 337774 - DNA, 75 bp, synthetic construct
  source 1..75: mol_type = other DNA
gctatgcgggcacctacgcaatcgccaacgttctgctaacgctggctgggacaatcatcgtcatggtatggccag

SEQ ID NO: 337775 - DNA, 75 bp, synthetic construct
  source 1..75: mol_type = other DNA
aaagtgaaggacgtcaggtggcaatggtgggcgacggcattaacgacgcgccagcgctggcccaggcggatgtcg

SEQ ID NO: 337776 - DNA, 75 bp, synthetic construct
  source 1..75: mol_type = other DNA
gcggcgatctggtacttcttcggcccggcgccgcagattgtctataccctggttgtcgccacgacggtattgatc

SEQ ID NO: 337777 - DNA, 75 bp, synthetic construct
  source 1..75: mol_type = other DNA
tcgtctggtgatgttgaccggggataacccaaccaccgccaatgcgatcgccaaagaagcagggattgatgaagt

SEQ ID NO: 337778 - DNA, 75 bp, synthetic construct
  source 1..75: mol_type = other DNA
cgataccgtcgtgttcgataaaaccgggacgctgaccgaagggaagccgcaggttgtcgcagtgaaaacatttgc

SEQ ID NO: 337779 - DNA, 75 bp, synthetic construct
  source 1..75: mol_type = other DNA
tgaagcagaaggccatgcgctgctgttggggaatcaggcgctgttaaatgatcagcaagtagatacgaaagctat

SEQ ID NO: 337780 - DNA, 75 bp, synthetic construct
  source 1..75: mol_type = other DNA
ccgtgtgcgctggggctggcgacgccgatgtcgattatttccggcgtcgggcgggcggctgagtttggcgtgctg

SEQ ID NO: 337781 - DNA, 75 bp, synthetic construct
  source 1..75: mol_type = other DNA
gtaaatccacatcagaaccagttccctgccaccttatggcgtggccagccacaaaattccttaaacgatcagtaa

SEQ ID NO: 337782 - DNA, 75 bp, synthetic construct
  source 1..75: mol_type = other DNA
cactgaaaaagtttgctcttaatctgacgtccggtagcgatgaactgatcgaaaccgcgagaatgttcccgcata

SEQ ID NO: 337783 - DNA, 75 bp, synthetic construct
  source 1..75: mol_type = other DNA
cagaaagagtagaggtccctctttcctgtctcaaagtgggtgccgcgcgccaatcaaaacgcgacacattgacaa

SEQ ID NO: 337784 - DNA, 75 bp, synthetic construct
  source 1..75: mol_type = other DNA
tcgccatcgcctggtttatgctctatcgcaaccgcgagcaggtggtgctgaccgccgttgaacaaacctatctca

SEQ ID NO: 337785 - DNA, 75 bp, synthetic construct
  source 1..75: mol_type = other DNA
ttgctgaacaggccagtctgcaacaaaaggcgttatttgatcaggtgctgccagccgaacgctataacaatgcgc

SEQ ID NO: 337786 - DNA, 75 bp, synthetic construct
  source 1..75: mol_type = other DNA
ggccaaagcgcctgttcagcaagggcccatgaaggtaaataacaaggtcctcgattccaagaatcgcaaaaaatc

SEQ ID NO: 337787 - DNA, 75 bp, synthetic construct
  source 1..75: mol_type = other DNA
tggtgattatctgggcgttgagaaagagcaaccccagtatcaacaagccgctgcaccgacacgagctcctgtcca

SEQ ID NO: 337788 - DNA, 75 bp, synthetic construct
  source 1..75: mol_type = other DNA
ggaaacgatctttccttccacaatatcagtgcagcagattacggcgcggagttacacaacagcagtaacaaagag

SEQ ID NO: 337789 - DNA, 75 bp, synthetic construct
  source 1..75: mol_type = other DNA
gatggttaccaggttgcacgtaacgacggccagggtaaggctgccgccacattcatgcacatcagctataacaac

SEQ ID NO: 337790 - DNA, 75 bp, synthetic construct
  source 1..75: mol_type = other DNA
agaacattgtttcggacggagcggtgaatattgctgatgccagactgagcctgaacagtcgttctgatgaagtgt

SEQ ID NO: 337791 - DNA, 75 bp, synthetic construct
  source 1..75: mol_type = other DNA
gtggaaaaagaaaatattaccctcgatccgcattcgtcctttcgctcatcgtcgtcggtagatatccccgtgcca

SEQ ID NO: 337792 - DNA, 75 bp, synthetic construct
  source 1..75: mol_type = other DNA
gagcttcagagatgacgacttctatatcaaccactgccaggaaacaggatggtctgtcatgctggtcgcagacgg

SEQ ID NO: 337793 - DNA, 75 bp, synthetic construct
  source 1..75: mol_type = other DNA
gactgtcaccctcggaggggaaggggaactgagtcctgacctgactcttcagaatcagatgttgtacagcctgtt

SEQ ID NO: 337794 - DNA, 75 bp, synthetic construct
  source 1..75: mol_type = other DNA
catgcagcgcgtagtggggatgccagatttacacaccccggacgcggctacccgattggcgcagcgttcttctct

SEQ ID NO: 337795 - DNA, 75 bp, synthetic construct
  source 1..75: mol_type = other DNA
tgtagcgttctatatccataaatccgctttcccgatattattgcaaacaggctttaaagcgcgagttactgtacc

SEQ ID NO: 337796 - DNA, 75 bp, synthetic construct
  source 1..75: mol_type = other DNA
ctgaaatcgcagcggcgaatgttccatcaccagattgaacgtggcaacccgcgacgaacgtttacagggatggct

SEQ ID NO: 337797 - DNA, 75 bp, synthetic construct
  source 1..75: mol_type = other DNA
agagccctataaaaatagccctgaattacaggagttgatttggaaaaagttggttgtatatgtcaatgattttaa

SEQ ID NO: 337798 - DNA, 75 bp, synthetic construct
  source 1..75: mol_type = other DNA
gtaatgcactggaaacacgaccgcgtgatgaccgcctgctgtttgattcagagcaatgtgttcagtataaaagca

SEQ ID NO: 337799 - DNA, 75 bp, synthetic construct
  source 1..75: mol_type = other DNA
actacagtccctctgacagatataagctatatcaggtagatggaaagctggatgatctccaaccggccccggcat

SEQ ID NO: 337800 - DNA, 75 bp, synthetic construct
  source 1..75: mol_type = other DNA
gtccgtggacccgaaataccgggatgcgtactccacgcatatcccggcggtgattctggccgtgaacaataaccc

SEQ ID NO: 337801 - DNA, 75 bp, synthetic construct
  source 1..75: mol_type = other DNA
gtgtgtcacgtcgccgggtgattattcacttcccggagcaaattgcgccggaggaacgcgacccgcagctcaggg

SEQ ID NO: 337802 - DNA, 75 bp, synthetic construct
  source 1..75: mol_type = other DNA
ttctgttatctcagaatgtccgcactttgaagaaaacttcattaacaatatgcctgataatgatgttaagcaatt

SEQ ID NO: 337803 - DNA, 75 bp, synthetic construct
  source 1..75: mol_type = other DNA
tgcctcatgtatgtgatgaatcgatttcatacttactgggcgaaaatggtatacttgaagaaatagataagctct

SEQ ID NO: 337804 - DNA, 75 bp, synthetic construct
  source 1..75: mol_type = other DNA
agcgttaaatgttcccgttgtagtcagcattgttgatgccaacggtacggagtccgtcacatggcggatgcctgg

SEQ ID NO: 337805 - DNA, 75 bp, synthetic construct
  source 1..75: mol_type = other DNA
ttaaagaagctgcccgacaagacgtcgcggtaacggtgttggaaacagaaacgggccgctactctgacacgctgc

SEQ ID NO: 337806 - DNA, 75 bp, synthetic construct
  source 1..75: mol_type = other DNA
atggctaatctttatgatctaaaaaaatttgacctcaatttactggtcatatttgaatgtatttatcaacatctc

SEQ ID NO: 337807 - DNA, 75 bp, synthetic construct
  source 1..75: mol_type = other DNA
atgctaatccgctgtcttagacaagatacttcaatcgatatagaatgccatgacatactgctttcagctgaaaat

SEQ ID NO: 337808 - DNA, 75 bp, synthetic construct
  source 1..75: mol_type = other DNA
gcgtctgcaccagcacgttctgcccgacaggaatattcaccggaatttgaacaggcctggcaggaatatcccaaa

SEQ ID NO: 337809 - DNA, 75 bp, synthetic construct
  source 1..75: mol_type = other DNA
atgtggtaccgctggcgtttgtgaaaaatctggagaagacacttgccgtgaatactggtgcgctgctgacaatgt

SEQ ID NO: 337810 - DNA, 75 bp, synthetic construct
  source 1..75: mol_type = other DNA
cgttttcactgcgtatgaaaggcaaaccggtgtcctttgtggtaccgctggcgtttgtgaaaaatctggataaaa

SEQ ID NO: 337811 - DNA, 75 bp, synthetic construct
  source 1..75: mol_type = other DNA
aagtttcatttcgcagttcttctttgttgactataattaatagtatttctgttactgacttactgggtattgttc

SEQ ID NO: 337812 - DNA, 75 bp, synthetic construct
  source 1..75: mol_type = other DNA
gcgacagacgcgggaatacggctacagcgccacgggcaggctggagagcgtgcgtaccctcgcaccggacctgga

SEQ ID NO: 337813 - DNA, 75 bp, synthetic construct
  source 1..75: mol_type = other DNA
taacgggtaccgcaatacctggagcgggagcctgaatgcaccggatgccaccgtcagcatgacagacacccagtg

SEQ ID NO: 337814 - DNA, 75 bp, synthetic construct
  source 1..75: mol_type = other DNA
tgactgggagaacaggacgttcagctttggttcgctcgtgttaaaagatacagactttggtctgggccgcaatgc

SEQ ID NO: 337815 - DNA, 75 bp, synthetic construct
  source 1..75: mol_type = other DNA
cgacagcgacaggtcgatgtcctgtctggcctgggagccatgtctgacaaattcggtaaatccagtgacaaactg

SEQ ID NO: 337816 - DNA, 75 bp, synthetic construct
  source 1..75: mol_type = other DNA
cgtttgctgagcaatttggcttcgggaaaagggaaaccgcagatgcgctgaagcgtcttcgcgatgcagggttta

SEQ ID NO: 337817 - DNA, 75 bp, synthetic construct
  source 1..75: mol_type = other DNA
gggatgagcataccggggctttgctgggatatcgcaagcgttttcagggtgacaaactgcaaagaagctatcagg

SEQ ID NO: 337818 - DNA, 75 bp, synthetic construct
  source 1..75: mol_type = other DNA
atcacccaatttgagcgtagcgccaatttcgcttttgctggttttattctgcatgacgccgaagatgtgatttca

SEQ ID NO: 337819 - DNA, 75 bp, synthetic construct
  source 1..75: mol_type = other DNA
ttcctcgcttcaacttcgaaaaattcgccggtgctaacgaccgtctgaccactcagatgaaatcggttggcgaag

SEQ ID NO: 337820 - DNA, 75 bp, synthetic construct
  source 1..75: mol_type = other DNA
tggcggtcagaccccgctgaaactggcgcgcgcactggaagccgctggcgtgccggttatcggcaccagcccgga

SEQ ID NO: 337821 - DNA, 75 bp, synthetic construct
  source 1..75: mol_type = other DNA
gcgctgcgcgaagacggttacgaaaccattatggttaactgtaacccggaaaccgtctccaccgactacgacact

SEQ ID NO: 337822 - DNA, 75 bp, synthetic construct
  source 1..75: mol_type = other DNA
agtggtgctgccgttcaacaaattccctggcgttgacccgctgttaggaccagaaatgcgttctaccggggaagt

SEQ ID NO: 337823 - DNA, 75 bp, synthetic construct
  source 1..75: mol_type = other DNA
actggcctgaacgctgacttcctgcgccagctgaaacgcaaaggctttgccgatgcgcgtctggcaaaactcgcg

SEQ ID NO: 337824 - DNA, 75 bp, synthetic construct
  source 1..75: mol_type = other DNA
aggccgtcgcgcgattgaagactcccgcgtgattcgtcgcagtgcgctgcaatataaagtgcattatgacaccac

SEQ ID NO: 337825 - DNA, 75 bp, synthetic construct
  source 1..75: mol_type = other DNA
tttgactactctggcgcgcaagcatgtaaagccctgcgtgaagagggttaccgcgtcattctggtgaactccaac

SEQ ID NO: 337826 - DNA, 75 bp, synthetic construct
  source 1..75: mol_type = other DNA
gccgattcactgggaagtggtacgcaagattattgaaaaagagcgcccggacgcggtgctgccaacgatgggcgg

SEQ ID NO: 337827 - DNA, 75 bp, synthetic construct
  source 1..75: mol_type = other DNA
gttatcagccaggaaacgttggatcgcgtcctgacaattcaacgcgaattacaagtttcgatgcaatcactatta

SEQ ID NO: 337828 - DNA, 75 bp, synthetic construct
  source 1..75: mol_type = other DNA
cgcgaactgaaagatgccggcgcagagcgtatctggtacatcgcagatgccttccgtgcgggcttgtctgtagac

SEQ ID NO: 337829 - DNA, 75 bp, synthetic construct
  source 1..75: mol_type = other DNA
tgggcatccacaccggtgactccatcactgtcgcgccagcccaaacgctgaccgacaaagaatatcaaatcatgc

SEQ ID NO: 337830 - DNA, 75 bp, synthetic construct
  source 1..75: mol_type = other DNA
ggcgttgaaaccggtggttccaacgtccagtttgcggtgaacccgaaaaacggtcgcctgattgttatcgaaatg

SEQ ID NO: 337831 - DNA, 75 bp, synthetic construct
  source 1..75: mol_type = other DNA
tcctgggacataatggtcagattgacctggaaaactctgtcacgcagggtgccggttcactgacatttactgatg

SEQ ID NO: 337832 - DNA, 75 bp, synthetic construct
  source 1..75: mol_type = other DNA
tgattatcaggatctgggtgtatctgcgtttaagggtgctaactccaaaacaggggcgctatctcgtttccttga

SEQ ID NO: 337833 - DNA, 75 bp, synthetic construct
  source 1..75: mol_type = other DNA
atgaaaactaaactgtattcgtatattcgcttctcgtctatgcgtcagaatgatggttcgagttatgaacgacaa

SEQ ID NO: 337834 - DNA, 75 bp, synthetic construct
  source 1..75: mol_type = other DNA
atccatgtttagaaatgctgacagataagaactggaaaccagaagaagaacaaccgggattgttgcaggaatttg

SEQ ID NO: 337835 - DNA, 75 bp, synthetic construct
  source 1..75: mol_type = other DNA
gaatccggcagtggcaatcgaggaagttggaaagaatatgtggtggactgataccacttccggttatgtgctgcc

SEQ ID NO: 337836 - DNA, 75 bp, synthetic construct
  source 1..75: mol_type = other DNA
atgaagcaagcggatggtagttcttatgaacgccagaagagaacagcgaaagagatagccgcaaaatatgatctt

SEQ ID NO: 337837 - DNA, 75 bp, synthetic construct
  source 1..75: mol_type = other DNA
gctttgattggtatcaaggaagtctctgtagatggcgttaactatgagttaaaggattattaccctcgtgttatt

SEQ ID NO: 337838 - DNA, 75 bp, synthetic construct
  source 1..75: mol_type = other DNA
accctgggcggtccaatcatcgcgatgatcctgttcctgatgccgatgtacgcaatccagaaagtaccggcaatg

SEQ ID NO: 337839 - DNA, 75 bp, synthetic construct
  source 1..75: mol_type = other DNA
cacatcagcaacgtattcgttgttgtgatgggtctgattgcaatctccgcaatcttctactctctgttcagctaa

SEQ ID NO: 337840 - DNA, 75 bp, synthetic construct
  source 1..75: mol_type = other DNA
ggtctggacaccgacgccagccgtaaagtctatttacctgtcatccgcgcctaccgcgtcggcccggaactggtt

SEQ ID NO: 337841 - DNA, 75 bp, synthetic construct
  source 1..75: mol_type = other DNA
tttacccgatcctgctggtgtacagcgtggcaatcactaacacggtagaaagcttcatggcccaccaactgggca

SEQ ID NO: 337842 - DNA, 75 bp, synthetic construct
  source 1..75: mol_type = other DNA
ctgtctggtaaaaacccaggcgaagacatcaccgaggttgtagaagaacactttggtattggcgcaggtaaactg

SEQ ID NO: 337843 - DNA, 75 bp, synthetic construct
  source 1..75: mol_type = other DNA
cgattatcgctatcaccaaatccttcctcggtcactacctgggcgcacgtgaaggcttcaacggtatggtgatta

SEQ ID NO: 337844 - DNA, 75 bp, synthetic construct
  source 1..75: mol_type = other DNA
gccctgaaccaaccgggtggcatcgttgaaaaagaagccgctattcaggtttccaacgtagcaatcttcaatgcg

SEQ ID NO: 337845 - DNA, 75 bp, synthetic construct
  source 1..75: mol_type = other DNA
tattggtaccgcccgacagaagtccgggatgagcataccggggctttactgggatatcgcaagcgttttcagggt

SEQ ID NO: 337846 - DNA, 75 bp, synthetic construct
  source 1..75: mol_type = other DNA
cgtttgctgagcagtttggtttcgggaaaagggaaactgcagatgcgctgaagcgtctgcgggatgccggtttta

SEQ ID NO: 337847 - DNA, 75 bp, synthetic construct
  source 1..75: mol_type = other DNA
gtgaaacaactacatactatagggacgagcttacggctcgcctttgtttttagcgccgttcttacgctattcgtt

SEQ ID NO: 337848 - DNA, 75 bp, synthetic construct
  source 1..75: mol_type = other DNA
ggagtgttcagtccatattattatctgaccggcggaactgtgggttctctgatgtcctataatggtgggaaaatg

SEQ ID NO: 337849 - DNA, 75 bp, synthetic construct
  source 1..75: mol_type = other DNA
tgcggtatctgcagccagacgtgaggacccgtacttcaaatccagttacgacaacgtggactacagccagatccc

SEQ ID NO: 337850 - DNA, 75 bp, synthetic construct
  source 1..75: mol_type = other DNA
aagttatggctattggtcaaattaatatttccggcaatgtcacaccgacaacctggtggaaacatatccagctac

SEQ ID NO: 337851 - DNA, 75 bp, synthetic construct
  source 1..75: mol_type = other DNA
cctgtctctggtgtgttatcggcaggtgcagacggtggacgaagataattttccgactaataccgcgcaggctat

SEQ ID NO: 337852 - DNA, 75 bp, synthetic construct
  source 1..75: mol_type = other DNA
cgtacaccagttacggcgccggattcgtccaggcgcattgtgagctggtggactttaacggagggacgccagttg

SEQ ID NO: 337853 - DNA, 75 bp, synthetic construct
  source 1..75: mol_type = other DNA
tgatgtcagcagaaagcgccgaagatttattgacttatcgcaaagcagatctggtcatcacattaatgcctgtca

SEQ ID NO: 337854 - DNA, 75 bp, synthetic construct
  source 1..75: mol_type = other DNA
gtcgacccgtatatagcttacggtgctggctttgtccaggcacattgcgaactgttgccgtttgatgggggaact

SEQ ID NO: 337855 - DNA, 75 bp, synthetic construct
  source 1..75: mol_type = other DNA
tactttttgaccccgatttttgcgacttcaacctgtgggtaacgcgtcgcgtgcaaacggtggacgatgacggga

SEQ ID NO: 337856 - DNA, 75 bp, synthetic construct
  source 1..75: mol_type = other DNA
tcgcaaacggttgacgaggacgggatcggcagcgacagcgaagttaaaacgcagtttgccggggttgttactgtt

SEQ ID NO: 337857 - DNA, 75 bp, synthetic construct
  source 1..75: mol_type = other DNA
gctgagccgtgctgttgcaaaaggcggctccccggtaacgttccataaactgaccaccagtaacctcaccggtca

SEQ ID NO: 337858 - DNA, 75 bp, synthetic construct
  source 1..75: mol_type = other DNA
gaaatgccgtacgtaccactatcaatgaaaatggtcgtcagattgtggctactgaaggaacagcaaataccactg

SEQ ID NO: 337859 - DNA, 75 bp, synthetic construct
  source 1..75: mol_type = other DNA
aggcacgctgacgctgaacgacagtaccgtcaccacggatgtcatcgctcagcgcggcacggccctgaagctgac

SEQ ID NO: 337860 - DNA, 75 bp, synthetic construct
  source 1..75: mol_type = other DNA
tgttctggaatccggtggtcgtctggatgtactggagagccattcagcacagaataccctggtggatgacggcgg

SEQ ID NO: 337861 - DNA, 75 bp, synthetic construct
  source 1..75: mol_type = other DNA
gggaaaccggtacagggcatcccggcttcagtttttttaaccgcgggggagatgtcctgacgtttgatcccctga

SEQ ID NO: 337862 - DNA, 75 bp, synthetic construct
  source 1..75: mol_type = other DNA
atgattagtctgattgcggcgttagcggtagatcgtgttatcggcatggaaaacgccatgccgtggaccctgcct

SEQ ID NO: 337863 - DNA, 75 bp, synthetic construct
  source 1..75: mol_type = other DNA
aatcggtgttcagcgaattccacgacgccgatgcgcagaactctcatagctattgttttgagattctggaacggc

SEQ ID NO: 337864 - DNA, 75 bp, synthetic construct
  source 1..75: mol_type = other DNA
cagaccggtgtaagcggtgaaaataacagcgtccgtctcagcattcagggcggtcatctcggtcacgataacaac

SEQ ID NO: 337865 - DNA, 75 bp, synthetic construct
  source 1..75: mol_type = other DNA
cagctccgtctcagcattcagggcggtcatctcgggcacgtaacaacggtggtattgcccgtggggccacgccgg

SEQ ID NO: 337866 - DNA, 75 bp, synthetic construct
  source 1..75: mol_type = other DNA
cgtttgccctgagtcgcccgcttcaggccggcgcctttaactacaccctgaaccgtgacagcgatgaagactggt

SEQ ID NO: 337867 - DNA, 75 bp, synthetic construct
  source 1..75: mol_type = other DNA
cgacgcagaacctgaaggactatccggatatatcagagaaaatgctgaacatggcggaatggtgggtgtgtctga

SEQ ID NO: 337868 - DNA, 75 bp, synthetic construct
  source 1..75: mol_type = other DNA
gccactgccgtatccatgggaaatggcggggtactgctggccgattccggggccgctgtcagtggtacccggagc

SEQ ID NO: 337869 - DNA, 75 bp, synthetic construct
  source 1..75: mol_type = other DNA
aagcccgtgtccgggaaaatatcaccctgggcgttcaggccggttatgcccacagcatcaacggcagcagcgctg

SEQ ID NO: 337870 - DNA, 75 bp, synthetic construct
  source 1..75: mol_type = other DNA
cgcgagtttttcaccttctgcgcggacgcttcccaactcaaaaattcgaaaccggacccggaaatctttctcgcc

SEQ ID NO: 337871 - DNA, 75 bp, synthetic construct
  source 1..75: mol_type = other DNA
acgggggcaaagagggcgactttaactcgcaggagcgggcgcaactggcgtatcgcaaaaatctgctctacgtcc

SEQ ID NO: 337872 - DNA, 75 bp, synthetic construct
  source 1..75: mol_type = other DNA
cagagcgttaaaagtggcgggctggcaacaggaaccatcatcaacaccggctcagaaggcggcccggattctgac

SEQ ID NO: 337873 - DNA, 75 bp, synthetic construct
  source 1..75: mol_type = other DNA
tttagtgtgccactacagtctctgacgacaggggtgtatggtgctgcaggccattcttccgttgatgttaaggat

SEQ ID NO: 337874 - DNA, 75 bp, synthetic construct
  source 1..75: mol_type = other DNA
cctttggcgaaggcacctcatcccgtgacactctgcgcgacagtacaaaacaccgtgtgagtgaactgccggtga

SEQ ID NO: 337875 - DNA, 75 bp, synthetic construct
  source 1..75: mol_type = other DNA
tgagttgagtgaatcttctgccattgcggagtatctggaagatcgatttgcgccaccgacctgggaacgtattta

SEQ ID NO: 337876 - DNA, 75 bp, synthetic construct
  source 1..75: mol_type = other DNA
tctccggtcaggccagcggcctgctgctggaaaatggcggcagctttacggttaatgccgggggacaggccggta

SEQ ID NO: 337877 - DNA, 75 bp, synthetic construct
  source 1..75: mol_type = other DNA
ggctacgcgctggataccacactgaacggcggtaaccagtatgtgcacaacggcggtacagcgtctgacactgtt

SEQ ID NO: 337878 - DNA, 75 bp, synthetic construct
  source 1..75: mol_type = other DNA
ccctgggcgttcaggccggttatgcccacagcgtcagcggcagcagcgctgaaggttataacggtcaggccacgc

SEQ ID NO: 337879 - DNA, 75 bp, synthetic construct
  source 1..75: mol_type = other DNA
gggtacagccttctgttatccgcaccttcagctcccggggagacatgagcatgggtacagccgcagccggcagta

SEQ ID NO: 337880 - DNA, 75 bp, synthetic construct
  source 1..75: mol_type = other DNA
tgctggagccacaactgcagtacacctggcagggactctccctggatgacggccaggataacgccggttatgtga

SEQ ID NO: 337881 - DNA, 75 bp, synthetic construct
  source 1..75: mol_type = other DNA
gtgtgagtgaattaccggtgaactggtgggtacagccttctgttatccgcaccttcaactcccggggagatatgc

SEQ ID NO: 337882 - DNA, 75 bp, synthetic construct
  source 1..75: mol_type = other DNA
ccggtgtggcggttgcgctgtctcttgctgctgtcacgtcagtcccggcactggctgctgacacggttgtacagg

SEQ ID NO: 337883 - DNA, 75 bp, synthetic construct
  source 1..75: mol_type = other DNA
tgacctgctcagaacagaggttgccggtatgtctctgacgacaggggtgtatggtgctgcaggccattcttccgt

SEQ ID NO: 337884 - DNA, 75 bp, synthetic construct
  source 1..75: mol_type = other DNA
tacggcggcaaccgtcaccggcagcaaccgtctgggcaatttcacggtggaaaacggtaaggctgacggtgttgt

SEQ ID NO: 337885 - DNA, 75 bp, synthetic construct
  source 1..75: mol_type = other DNA
ccggtgtggcggttgcactgtctcttgctgctgtcacatcagtcccggcactggctgctgacacggttgtacagg

SEQ ID NO: 337886 - DNA, 75 bp, synthetic construct
  source 1..75: mol_type = other DNA
cctggcaggggctctccctggatgacggccaggataacgccggttatgtgaagttcgggcatggcagtacacaac

SEQ ID NO: 337887 - DNA, 75 bp, synthetic construct
  source 1..75: mol_type = other DNA
gttaacgcaggggagatttactttgataatcagacaacaccggacgccgtactgagccgtgctgttgcaaaaggc

SEQ ID NO: 337888 - DNA, 75 bp, synthetic construct
  source 1..75: mol_type = other DNA
gaaatgccgtacgtaccactatcaataaaaatggtcgtcagattgtggctgctgaaggaacagcaaataccactg

SEQ ID NO: 337889 - DNA, 75 bp, synthetic construct
  source 1..75: mol_type = other DNA
ggtacagccacgaatgtcaccctgacgcagggcggcgcactggtcaccagtacggcggcaaccgtcaccggcagc

SEQ ID NO: 337890 - DNA, 75 bp, synthetic construct
  source 1..75: mol_type = other DNA
actgagccgtgctgttgcaaaaggcgactccccggtaacgttccataaactgaccaccagtaacctcaccggtca

SEQ ID NO: 337891 - DNA, 75 bp, synthetic construct
  source 1..75: mol_type = other DNA
tgatgaccgactttgcagaaagtctctggttcacgccgccggtgtcggatccggaaaacggcgtgtggtggctgg

SEQ ID NO: 337892 - DNA, 75 bp, synthetic construct
  source 1..75: mol_type = other DNA
accgtcaccacggatgtcattgctcagcgcggtacggccctgaagctgaccggcagcacagtgctgaacggtgcc

SEQ ID NO: 337893 - DNA, 75 bp, synthetic construct
  source 1..75: mol_type = other DNA
cgccttgatggcagcaatacctctgaccagctggtgattaatggtggtcaggcaaccgggcaaaacctggcttgc

SEQ ID NO: 337894 - DNA, 75 bp, synthetic construct
  source 1..75: mol_type = other DNA
aaccgtgacagcgatgaagactggtacctgcgcagtgaagatgcctatcgttctgaagtccccccgtatgcctcc

SEQ ID NO: 337895 - DNA, 75 bp, synthetic construct
  source 1..75: mol_type = other DNA
aaccgtgacagcgatgaagactggtacctgcgcagtgaacatgcgtatcgttctgaagtccccccgtatgcctcc

SEQ ID NO: 337896 - DNA, 75 bp, synthetic construct
  source 1..75: mol_type = other DNA
aaccgtgacagcgatgaagactggtacctgcgcagtgaacatgcctatcgttctgaagtcccccggtatgcctcc

SEQ ID NO: 337897 - DNA, 75 bp, synthetic construct
  source 1..75: mol_type = other DNA
gtgcgtgaactgcctgtgaactggtgggtacagccttctgttatccgcaccttcagctcccggggggacatgagc

SEQ ID NO: 337898 - DNA, 75 bp, synthetic construct
  source 1..75: mol_type = other DNA
acccgactggaggggggtaaccagtatgtacacaacggtggcacggcaacagagacgctgataaaccgtgatggc

SEQ ID NO: 337899 - DNA, 75 bp, synthetic construct
  source 1..75: mol_type = other DNA
gtactggagggccattcagcccggaaaacacgggtggatgacggcggaaccctggcagtgtctgccggtggtaag

SEQ ID NO: 337900 - DNA, 75 bp, synthetic construct
  source 1..75: mol_type = other DNA
accagcgtgaacaactgacttatgtgattggcaccgaagttccggttccgggcggtgaggccagcgccattcagt

SEQ ID NO: 337901 - DNA, 75 bp, synthetic construct
  source 1..75: mol_type = other DNA
ggatttgctcgtgagcgtatcattctcggcggcgaccatctgggaccgaactgctggcagcaagaaaatgcggat

SEQ ID NO: 337902 - DNA, 75 bp, synthetic construct
  source 1..75: mol_type = other DNA
atcgcaacagcacgcgcaaagtgctgattgaagcaacgtcaaaccaggtcaatcaatttggcggttataccggaa

SEQ ID NO: 337903 - DNA, 75 bp, synthetic construct
  source 1..75: mol_type = other DNA
ctggctgctgacacgattgtacaggcgggtgaaaccgtgaacggcgggacactggcaaatcacgacaaccagatt

SEQ ID NO: 337904 - DNA, 75 bp, synthetic construct
  source 1..75: mol_type = other DNA
cactgttgtaaacagtgacggctggcagattatcaaggaaggcggtctggcggatttcaccaccgttaaccagaa

SEQ ID NO: 337905 - DNA, 75 bp, synthetic construct
  source 1..75: mol_type = other DNA
aggcaaccggaaccatcgtcaacaccggtgcagaaggtggtccggagtctgaaaatgtgtccagcggtcagatgg

SEQ ID NO: 337906 - DNA, 75 bp, synthetic construct
  source 1..75: mol_type = other DNA
tacaccctgaaccgtgacagcgatgaagactggtacctgcgcagtgaaaatgcttatcgtgctgaagtccccctg

SEQ ID NO: 337907 - DNA, 75 bp, synthetic construct
  source 1..75: mol_type = other DNA
ccgtgtgcgtgaactgccggtgaactggtgggtacagccttctgttatccgcaccttcagttcccggggtgacat

SEQ ID NO: 337908 - DNA, 75 bp, synthetic construct
  source 1..75: mol_type = other DNA
tctggtcaattttattcggcgcactggtcggcgggctgggaacatggatcctggtcaaagtgcttaagcgcatcc

SEQ ID NO: 337909 - DNA, 75 bp, synthetic construct
  source 1..75: mol_type = other DNA
tgacggccaggataacgccggttatgtgaaattcgggcatggcagtgcacaacatgtacgtgccggtttccgtct

SEQ ID NO: 337910 - DNA, 75 bp, synthetic construct
  source 1..75: mol_type = other DNA
gcggtacagccctgaagctgaccggcagcactgtgctgaacggtgccattgaccccacgaatgtcactctcgcct

SEQ ID NO: 337911 - DNA, 75 bp, synthetic construct
  source 1..75: mol_type = other DNA
cacggttgtgaacagtgacggctggcagattgtcaaaaacgggggtgtggccgggaataccaccgttaatcagaa

SEQ ID NO: 337912 - DNA, 75 bp, synthetic construct
  source 1..75: mol_type = other DNA
tgcgtttgccctgagtcgcccgcttcaggccggcgcctttaactacaccctgaaccgtgacagcgatgaagactg

SEQ ID NO: 337913 - DNA, 75 bp, synthetic construct
  source 1..75: mol_type = other DNA
gccttctgttatccgcaccttcagttcccggggtgacatgagcatgggtacagccgccgccggcagtaacatgac

SEQ ID NO: 337914 - DNA, 75 bp, synthetic construct
  source 1..75: mol_type = other DNA
tgaaaataacagcgtccgtctcagcattcagggcggtcatctcggtcacgataacaacggcggtattgcccgtgg

SEQ ID NO: 337915 - DNA, 75 bp, synthetic construct
  source 1..75: mol_type = other DNA
gcaatgttgcaatcgatcaaagaaggcgtcgttgccgtggacgatcgcggtgaagtcacactcatcaatgatgcc

SEQ ID NO: 337916 - DNA, 75 bp, synthetic construct
  source 1..75: mol_type = other DNA
ggttatgcccacagtgtcagcggcagcagcgctgaaggttataacggtcaggccacgctgaatgtgaccttctga

SEQ ID NO: 337917 - DNA, 75 bp, synthetic construct
  source 1..75: mol_type = other DNA
taacagcgtccgtctcagcattcagggcggccatctcggtcacgataacaacggcggtattgcccgtggggccac

SEQ ID NO: 337918 - DNA, 75 bp, synthetic construct
  source 1..75: mol_type = other DNA
ggtacacggcgaggcacataacacccggctggagggaggaaaccagtatgtgcacaaatacggacttgcgctgaa

SEQ ID NO: 337919 - DNA, 75 bp, synthetic construct
  source 1..75: mol_type = other DNA
cgggagaaaccgtgagcggcggaacactgacaaatcatgacaaccagattgtcttcggtacggtcaacggaatga

SEQ ID NO: 337920 - DNA, 75 bp, synthetic construct
  source 1..75: mol_type = other DNA
cgcctccatgctgacgcaggggatggactacgaccggattctggcaggctcccgcagccatcagagcgatgtgaa

SEQ ID NO: 337921 - DNA, 75 bp, synthetic construct
  source 1..75: mol_type = other DNA
ggaagcgtttcagacacggttatcagtgccggaggcggacagagccttcaggggcaggcagtgaacaccactctg

SEQ ID NO: 337922 - DNA, 75 bp, synthetic construct
  source 1..75: mol_type = other DNA
cattgccgtggaatcagaacccggaattttcacacaattttttgtccaattaccctgggatggggagaggtcgag

SEQ ID NO: 337923 - DNA, 75 bp, synthetic construct
  source 1..75: mol_type = other DNA
tttatgaacaaattacacgtgattctcggattattacatctgaagagttataagcaattggaagattacattcta

SEQ ID NO: 337924 - DNA, 75 bp, synthetic construct
  source 1..75: mol_type = other DNA
caaatctccggttatcgctggttttttaatcagcaagattaaccgcgcgaccgatttaggccatacgctgatttt

SEQ ID NO: 337925 - DNA, 75 bp, synthetic construct
  source 1..75: mol_type = other DNA
gtgtccagcggtcagatggtcggagggacggctgaatccaccaccatcaataaaaatggccggcaggttatctgg

SEQ ID NO: 337926 - DNA, 75 bp, synthetic construct
  source 1..75: mol_type = other DNA
cggccaacggaatgaccatcagtaccgggctggaactggggccggacagtgaagaaaacaccggtgggcaatgga

SEQ ID NO: 337927 - DNA, 75 bp, synthetic construct
  source 1..75: mol_type = other DNA
ctgacagactggtcattgacggcggcagggcaaccggaaaaaccatcctgaacctggtgaacgccggcaacagtg

SEQ ID NO: 337928 - DNA, 75 bp, synthetic construct
  source 1..75: mol_type = other DNA
tcagggtgacgacccgtggggcggtaaacgtgcaggctttgaggccgaaggcaaaatcaagctcaaagacttcaa

SEQ ID NO: 337929 - DNA, 75 bp, synthetic construct
  source 1..75: mol_type = other DNA
gccagataacgaggccaataccggcgggcaatggatacaaaatggcggtatcgccaacaacactactgtcaccgg

SEQ ID NO: 337930 - DNA, 75 bp, synthetic construct
  source 1..75: mol_type = other DNA
gcccgtgtccgggaaaatatcaccctgggcgttcaggccggttatgcccacagcgtcagcggcagcagcgctgaa

SEQ ID NO: 337931 - DNA, 75 bp, synthetic construct
  source 1..75: mol_type = other DNA
acgtcactggacctgcaggccggactggaagcccgtatccgggaaaatatcaccctgggcgttcaggccggttat

SEQ ID NO: 337932 - DNA, 75 bp, synthetic construct
  source 1..75: mol_type = other DNA
gtgaactgccggtgaactggtgggtacagccttctgttatccgcaccttcagctcccggggtgacatgagcatgg

SEQ ID NO: 337933 - DNA, 75 bp, synthetic construct
  source 1..75: mol_type = other DNA
ggaggaagcgtttcagacacggttatcagtgccggagcggacagagccttcagggcaggcagtgaacaccactct

SEQ ID NO: 337934 - DNA, 75 bp, synthetic construct
  source 1..75: mol_type = other DNA
gtatgggctggcggtgaacaccacactgaataacagaggtgaacagtgggtgcatggagatggaaaagccatcgg

SEQ ID NO: 337935 - DNA, 75 bp, synthetic construct
  source 1..75: mol_type = other DNA
ctgaaaataccaccgttaaccagaagggcaaactgcaggtgaatgccagtggtgttgctgttgatgttactcagc

SEQ ID NO: 337936 - DNA, 75 bp, synthetic construct
  source 1..75: mol_type = other DNA
cagaagaaggtgcgtttgccctgagtcgcccgcttcaggccggcgcctttaactacaccctgaaccgtgacagcg

SEQ ID NO: 337937 - DNA, 75 bp, synthetic construct
  source 1..75: mol_type = other DNA
ctgtcagtaccgggcttgagctggggccggacagtgacgaaaacaccggcgggtgtagtggtcaagtaatactgg

SEQ ID NO: 337938 - DNA, 75 bp, synthetic construct
  source 1..75: mol_type = other DNA
ccctggcagtgtctgccggtggtaaggcaacaggtgtcaccatgacatccggtggtgccctgattgcagacagtg

SEQ ID NO: 337939 - DNA, 75 bp, synthetic construct
  source 1..75: mol_type = other DNA
tcaggcaaccggcaaaacctggcttgcgtttacaaatgtcggaaacagtaacctcggggtggcaaccaccggaca

SEQ ID NO: 337940 - DNA, 75 bp, synthetic construct
  source 1..75: mol_type = other DNA
tgttgacacaggcaatggactatgaccggattctggcaggctcccgcagccatcagaccggtgtaaacggtgaaa

SEQ ID NO: 337941 - DNA, 75 bp, synthetic construct
  source 1..75: mol_type = other DNA
gttaacgcaggagagattcactttgataatcagacgacacaggaagccgcgctgagccgtgctgttgcaaaaggc

SEQ ID NO: 337942 - DNA, 75 bp, synthetic construct
  source 1..75: mol_type = other DNA
tatcaagacagatttaggcgcggcttcgcaggaagttgatctgattatttcggttgaaggcatacaacagaagta

SEQ ID NO: 337943 - DNA, 75 bp, synthetic construct
  source 1..75: mol_type = other DNA
acactgaacggcggtaaccagtatgtgcacaacggcggtacagcgtctgacactgttgtgaacagtgacggctgg

SEQ ID NO: 337944 - DNA, 75 bp, synthetic construct
  source 1..75: mol_type = other DNA
gactatgaccggattctggcaggctcccgcagccatcagaccggtgtaaacggtgaaaataacagcgtccgtctc

SEQ ID NO: 337945 - DNA, 75 bp, synthetic construct
  source 1..75: mol_type = other DNA
tgccggtttccgtctgggcagccacaacgatatgacctttggtgaaggcacctcatcccgtgacaccctgcgcga

SEQ ID NO: 337946 - DNA, 75 bp, synthetic construct
  source 1..75: mol_type = other DNA
ggacagtgatgagagctggtatctgcgcagtgaagaacgttatcgtgctgaagtccccctgtacgcctccatgct

SEQ ID NO: 337947 - DNA, 75 bp, synthetic construct
  source 1..75: mol_type = other DNA
tgaactgccggtgaactggtgggtacagccttctgttatccgcaccttcagctcccggggtgacatgagcatggg

SEQ ID NO: 337948 - DNA, 75 bp, synthetic construct
  source 1..75: mol_type = other DNA
aggccggttatgcccacagcgtcagcggcagcagcgctgaagggtataacggtcaggccacactgaatgtgacct

SEQ ID NO: 337949 - DNA, 75 bp, synthetic construct
  source 1..75: mol_type = other DNA
ttgcccgtggggccacgccggaaagcagcggcagctatggcctcgtccgtctggagggtgacctgctcagaacag

SEQ ID NO: 337950 - DNA, 75 bp, synthetic construct
  source 1..75: mol_type = other DNA
cggtcacgctaatgatctcgcgtttgattttgacagccgcctgaatgaataccggaaaaataacggcctgctgcc

SEQ ID NO: 337951 - DNA, 75 bp, synthetic construct
  source 1..75: mol_type = other DNA
aaagcgaatgagagatattagcgcggaaactggcatcccgtggaattacctttcgcgcacgctgcgtttaatggt

SEQ ID NO: 337952 - DNA, 75 bp, synthetic construct
  source 1..75: mol_type = other DNA
gattgatgaaacgctttgcgttgatccaaataggcacggggttaacttttactcactgtttaaacctgggcgatt

SEQ ID NO: 337953 - DNA, 75 bp, synthetic construct
  source 1..75: mol_type = other DNA
aaacacgccttgatgatatagcgcaggcaaagagtgagcttcctgtctatcagcgccatatggagttgctggata

SEQ ID NO: 337954 - DNA, 75 bp, synthetic construct
  source 1..75: mol_type = other DNA
cgcttggcgcaatcaccatctcttgtttcccgtcagattaaccagcagcttgccgaaaataactatttcttcgcc

SEQ ID NO: 337955 - DNA, 75 bp, synthetic construct
  source 1..75: mol_type = other DNA
ttcatccctgtaggggcggtagcgcgtggaggaagtattgctgagacggcagggcgttttgccctggcgaatgct

SEQ ID NO: 337956 - DNA, 75 bp, synthetic construct
  source 1..75: mol_type = other DNA
attaaagaatcaatacatgattgcttatctgagaaggaaagtttcagcggagtcggttttagaaaagcatatata

SEQ ID NO: 337957 - DNA, 75 bp, synthetic construct
  source 1..75: mol_type = other DNA
gcggaactttcaggcggtactgtgatgcttggtgaatatgctcccgttaaacgacgtggactggtttcatctgtt

SEQ ID NO: 337958 - DNA, 75 bp, synthetic construct
  source 1..75: mol_type = other DNA
cgcttcagtggcgaacgtcgcgaaggccgtgcaccgcgtcgtgaagagtctaccggtcgtcgtcgtttcggtggc

SEQ ID NO: 337959 - DNA, 75 bp, synthetic construct
  source 1..75: mol_type = other DNA
ggaaatccgtcagggcttgcagaaaaaaccgcaggagagcggtatccaggccatcgcggaagccgtgcgcaaacg

SEQ ID NO: 337960 - DNA, 75 bp, synthetic construct
  source 1..75: mol_type = other DNA
gggctagctaacaaggctctggcagtagcgcgtaccctcgccgactcgccggaaatccgtcagggcttgcagaaa

SEQ ID NO: 337961 - DNA, 75 bp, synthetic construct
  source 1..75: mol_type = other DNA
gcaaatcagtgatatgacgcgagacgggctagccaacaaggcactggcggtggcgcgtaccctcgccgactcgcc

SEQ ID NO: 337962 - DNA, 75 bp, synthetic construct
  source 1..75: mol_type = other DNA
ccggtgattggcgatattgatagcggaatttatgtcaaacctgaccttcccgaggcgtatcgacaatatttactg

SEQ ID NO: 337963 - DNA, 75 bp, synthetic construct
  source 1..75: mol_type = other DNA
gagaaactgattgagcgcaacgttattgaagtcgcgcctctggcctatatgcgtggtcgtacgctgaatgacgcc

SEQ ID NO: 337964 - DNA, 75 bp, synthetic construct
  source 1..75: mol_type = other DNA
acatgccttacctaccggacgattctttctacagctctactcgccatactcgtcaactaactggcaggttgagtt

SEQ ID NO: 337965 - DNA, 75 bp, synthetic construct
  source 1..75: mol_type = other DNA
gcatacgttacctacggggcgatttctgctacagctctactcgccgtattcgtcaacaaactggcaggtgcaatt

SEQ ID NO: 337966 - DNA, 75 bp, synthetic construct
  source 1..75: mol_type = other DNA
gtgaatttcttctcaaatcagaccagatcgattggcagttagcacagattgggaaaatgaaatttgagttagtgg

SEQ ID NO: 337967 - DNA, 75 bp, synthetic construct
  source 1..75: mol_type = other DNA
gagaaactgattgagcgcaacgttattgaagtcgcgccgctggcctatatgcgtggtcgtacgctgaacgacgcg

SEQ ID NO: 337968 - DNA, 75 bp, synthetic construct
  source 1..75: mol_type = other DNA
ctgcgtagcctgtatgtcgatacagccccgatgcgcggtcagattcaggatatcgaaccggaacagatccacctt

SEQ ID NO: 337969 - DNA, 75 bp, synthetic construct
  source 1..75: mol_type = other DNA
tatgcccaatgggtactacgcccctattgcagaacataatgtaaataaatatttatctccacaacaagatactga

SEQ ID NO: 337970 - DNA, 75 bp, synthetic construct
  source 1..75: mol_type = other DNA
atgatgagactatttctctggattatcttcatcgagcagcggctatcatggaatggtatctcaatcatgctgcag

SEQ ID NO: 337971 - DNA, 75 bp, synthetic construct
  source 1..75: mol_type = other DNA
ttgccgtgcctgcgattaaacagaacggcctgaaggtcttttccgtgccgaccgtgttgctgagcaatacgccgc

SEQ ID NO: 337972 - DNA, 75 bp, synthetic construct
  source 1..75: mol_type = other DNA
gcgtggtcgtatacgttcagcctgggcgacttcgttggcgacaaggggcgcgggctggaagtggtcgagggttaa

SEQ ID NO: 337973 - DNA, 75 bp, synthetic construct
  source 1..75: mol_type = other DNA
ttacgccaccccattgatgttatgtgtggctgtagtggaactctctgacgtaatgtttgccttcgactctgtccc

SEQ ID NO: 337974 - DNA, 75 bp, synthetic construct
  source 1..75: mol_type = other DNA
cctgtatgttgtactgggggttctggtgctgggcattctcgcaagcgttattttccccggcaaacctgaatctga

SEQ ID NO: 337975 - DNA, 75 bp, synthetic construct
  source 1..75: mol_type = other DNA
gcattcagtccagcgtgacgacccgtcctgatatcagccagagctactggactgtgtggggtatgcgtaaaaacg

SEQ ID NO: 337976 - DNA, 75 bp, synthetic construct
  source 1..75: mol_type = other DNA
ccgtacacatcaagcaaaagaacggccctaagtgctgtgtgggtgacatttcggtttacgaagattcaaagcccg

SEQ ID NO: 337977 - DNA, 75 bp, synthetic construct
  source 1..75: mol_type = other DNA
tttgaagcacaaaaaggcaaatacaccgtacacatcaagcaaaagaacggccctaagtgctgtgtgggtgacatt

SEQ ID NO: 337978 - DNA, 75 bp, synthetic construct
  source 1..75: mol_type = other DNA
gcacgttgaacgattttctgaccgctctcgatgaaggcgacctcaagccggatgttgttaaacgttttgaggaac

SEQ ID NO: 337979 - DNA, 75 bp, synthetic construct
  source 1..75: mol_type = other DNA
gtcaccggaagccctggacacgctgaacgagctggcagcggcgctgggcaatgacccggagtttgcgacaacaat

SEQ ID NO: 337980 - DNA, 75 bp, synthetic construct
  source 1..75: mol_type = other DNA
ccaacaccgccggatgatgcagcaggtaatgaaatagccaatgcggagtttgtccgcaaactgctcgctgcgctg

SEQ ID NO: 337981 - DNA, 75 bp, synthetic construct
  source 1..75: mol_type = other DNA
agtgcgtaaattcaaaacgttgctgttttttaaccagtattacgaaggtgagcacagtattcatcgcctgactta

SEQ ID NO: 337982 - DNA, 75 bp, synthetic construct
  source 1..75: mol_type = other DNA
ccggatgacgcagcaggcactgagatagccaatgcggcgtttgtccgcaaactgctcgccgcgctggttgactcg

SEQ ID NO: 337983 - DNA, 75 bp, synthetic construct
  source 1..75: mol_type = other DNA
aaagcccggtcactgctggcacaggccacagtggaaaccatgcgcaatgagcttgagctgaaaagcgcagcggta

SEQ ID NO: 337984 - DNA, 75 bp, synthetic construct
  source 1..75: mol_type = other DNA
gaggtgccggagcatacaattttccggggcgttacaaagctctttccggctccaggagtttgtatggtgatgaag

SEQ ID NO: 337985 - DNA, 75 bp, synthetic construct
  source 1..75: mol_type = other DNA
ccggtcactgctggcacaggccacagtggaagctatgcgcaatgagcttgagctgaaaagcgcagcggtaatgga

SEQ ID NO: 337986 - DNA, 75 bp, synthetic construct
  source 1..75: mol_type = other DNA
agcggcggctggcgataaggcaatcaaaattggtctgggggacattgtgccggggtcacgactcggtccggtaac

SEQ ID NO: 337987 - DNA, 75 bp, synthetic construct
  source 1..75: mol_type = other DNA
aattcaaaacgttgctgtgttttaaccagtattacgaaggcgaacacagcattcatcgcctgacttaccgctgga

SEQ ID NO: 337988 - DNA, 75 bp, synthetic construct
  source 1..75: mol_type = other DNA
gaacaacgtccggggataaagaaatcaaaattggcctgggtgatgtggtgccagggtcacaactgggcggagtta

SEQ ID NO: 337989 - DNA, 75 bp, synthetic construct
  source 1..75: mol_type = other DNA
gcgctccttgcatcatctgccacacaggatgcggcccgcgcagaacaggcggtcaaagatgccgataagatagtc

SEQ ID NO: 337990 - DNA, 75 bp, synthetic construct
  source 1..75: mol_type = other DNA
tgacagtaaaaataaggcagaagagctgaaaaatcaggcacagcagagcgccgaagcggctgccaaaagcgagaa

SEQ ID NO: 337991 - DNA, 75 bp, synthetic construct
  source 1..75: mol_type = other DNA
gtattcactatatgcagtaccggtacaacgacagcgataacagctggaacatgtcatcgcgggtagttgtatacg

SEQ ID NO: 337992 - DNA, 75 bp, synthetic construct
  source 1..75: mol_type = other DNA
tggcactctggacctctctaaactgagcggtctggttctggatgaagctgacgaaatgctgcgcatgggcttcat

SEQ ID NO: 337993 - DNA, 75 bp, synthetic construct
  source 1..75: mol_type = other DNA
ccgatgatgtaattgaaccattcaaagtgcaagataataaaaaaactgaaccgccccggaaatcctggagactaa

SEQ ID NO: 337994 - DNA, 75 bp, synthetic construct
  source 1..75: mol_type = other DNA
atttacgacggcgattcgctggcgttcttactgtcccggacagcaggctcaggttcatatttcaaatacccggca

SEQ ID NO: 337995 - DNA, 75 bp, synthetic construct
  source 1..75: mol_type = other DNA
cgcccgacaggctaaagccagccaggatgcaggtgcagacaatgcgcaggaagcgaaacagtacagggatgagac

SEQ ID NO: 337996 - DNA, 75 bp, synthetic construct
  source 1..75: mol_type = other DNA
aacgttttgcgggtgaggcagaaaacagcgcacagtcatcaggcacatcgcgggatgaatcagtcgatgccgccg

SEQ ID NO: 337997 - DNA, 75 bp, synthetic construct
  source 1..75: mol_type = other DNA
cagtggtaacagctggaatgcaacatcaagccttattgtgtatgacggcaactccctggcatatctgatgtcctc

SEQ ID NO: 337998 - DNA, 75 bp, synthetic construct
  source 1..75: mol_type = other DNA
atgacggcaactccctggcatatctgatgtcctcaaccgccggtaatggcccgttctcatattaccaatacccgg

SEQ ID NO: 337999 - DNA, 75 bp, synthetic construct
  source 1..75: mol_type = other DNA
cacggcgcgtaaattcaaaacgctgctgtactacaaccagtattacgaggatgagcacagcatacattgtatgcg

SEQ ID NO: 338000 - DNA, 75 bp, synthetic construct
  source 1..75: mol_type = other DNA
cgcatgacacggctgaagccatgcgcacggagcttgagctgaacgcggctgcgacgatggaaccccagagtgata

SEQ ID NO: 338001 - DNA, 75 bp, synthetic construct
  source 1..75: mol_type = other DNA
caccctgggcgttcaggcaggttatgtccacagcgtcagcggcagcagcgctgaaggctataacggtcaggccac

SEQ ID NO: 338002 - DNA, 75 bp, synthetic construct
  source 1..75: mol_type = other DNA
ttccgctgagcgacgacgaggcggcggaatgggaaaaactcaacgataaggatgcactccaatggcaacaaaaac

SEQ ID NO: 338003 - DNA, 75 bp, synthetic construct
  source 1..75: mol_type = other DNA
tactgctgtcacgtcagtccaggcgctggctgctgacacgattgtacaggcgggtgaaaccgtgaacggcgggac

SEQ ID NO: 338004 - DNA, 75 bp, synthetic construct
  source 1..75: mol_type = other DNA
tttccattaatagtcagggtgaaggcaacgttcgcgtaatatctaaaagtaatgaagttcagtacatcaaggcga

SEQ ID NO: 338005 - DNA, 75 bp, synthetic construct
  source 1..75: mol_type = other DNA
cggcggtattgcccgtggagccgacgccggaaagtcagcggcagctatggcttcgtccgtctggagggtgacctg

SEQ ID NO: 338006 - DNA, 75 bp, synthetic construct
  source 1..75: mol_type = other DNA
gccgcgatccagaaggtgatcagctttggattggcttcagcgagttggtgactgatattaacattgccgtcagat

SEQ ID NO: 338007 - DNA, 75 bp, synthetic construct
  source 1..75: mol_type = other DNA
cctgacgtttatttcacgcctgctgtcggaagtgggtatctggttccgcttcgccaccgacgcccggctgaaaat

SEQ ID NO: 338008 - DNA, 75 bp, synthetic construct
  source 1..75: mol_type = other DNA
tatgccgacaacttcctgcaacaaggcgataaagaggcagcggaaagcggcgcgttttacgcccgtatccgccac

SEQ ID NO: 338009 - DNA, 75 bp, synthetic construct
  source 1..75: mol_type = other DNA
acgtttacgggccacgaacagctcagctcacccttccgctacgacattgagtttaccagtaccgataaagccatc

SEQ ID NO: 338010 - DNA, 75 bp, synthetic construct
  source 1..75: mol_type = other DNA
ccactgtcggacatcgtggaacactgacgctggctgccgggggaagtctgagtggcagaacacagctcagtaaag

SEQ ID NO: 338011 - DNA, 75 bp, synthetic construct
  source 1..75: mol_type = other DNA
tcggtatcaactttgctcttggcgtggctaccggcctgacgatggagtttcagtttggtactaactggtcattct

SEQ ID NO: 338012 - DNA, 75 bp, synthetic construct
  source 1..75: mol_type = other DNA
accactcacaccacaagctcaaaatccgtggcctgcaaagtccggtggatgtgctgacttttacgggccgggaac

SEQ ID NO: 338013 - DNA, 75 bp, synthetic construct
  source 1..75: mol_type = other DNA
atcgcgttaaatttgaagcggttcccagtattgatgacgttgccacagataaaaaagatctctctatgcagttaa

SEQ ID NO: 338014 - DNA, 75 bp, synthetic construct
  source 1..75: mol_type = other DNA
catgtgcgtgccggcttccgtctgggcagccacaacgatatgaactttggtaaaggcacctcatcccgtgacacc

SEQ ID NO: 338015 - DNA, 75 bp, synthetic construct
  source 1..75: mol_type = other DNA
accggattctggcaggctcccgcagccatcagaccggtgtaagcggtgaaaataacagcgtccgtctcagcattc

SEQ ID NO: 338016 - DNA, 75 bp, synthetic construct
  source 1..75: mol_type = other DNA
acggttaatgccgggggacaggccggtaacaccactgtcggatatcgtggaacactgacgctggctgccggggga

SEQ ID NO: 338017 - DNA, 75 bp, synthetic construct
  source 1..75: mol_type = other DNA
tagccgccaagcacggtttcttatttcaggactgcgtagccgcttaccatgtcacccgaatgcttcgtgacaaga

SEQ ID NO: 338018 - DNA, 75 bp, synthetic construct
  source 1..75: mol_type = other DNA
aaccgtctgggcaatttcacggtggaaaacggtaaggctgacggtgttgttctggagtccggcggtcgcctggat

SEQ ID NO: 338019 - DNA, 75 bp, synthetic construct
  source 1..75: mol_type = other DNA
gatggatacatcgacttcgttcaggtaaaaagcaccggcaaaacacgttggaacatttcggacatcgttcagaat

SEQ ID NO: 338020 - DNA, 75 bp, synthetic construct
  source 1..75: mol_type = other DNA
gtccaggggaacaggctgcaggccggggcctttaactactccctcaaccgggacagtgatgagagctggtatctg

SEQ ID NO: 338021 - DNA, 75 bp, synthetic construct
  source 1..75: mol_type = other DNA
gcgtcatcgggcaataacgacttccgcgcacggggctggggctggctgggctcactggaaaccggtctgcccttc

SEQ ID NO: 338022 - DNA, 75 bp, synthetic construct
  source 1..75: mol_type = other DNA
aacccagtgcactatgcggatgccattcgttataatgctcgaatgcctctgcaaggttctttgctgccgttaacc

SEQ ID NO: 338023 - DNA, 75 bp, synthetic construct
  source 1..75: mol_type = other DNA
tttgtccaggggaatatgttgcaggccggggcctttaactacaccctcaaccgggacagtgatgagagctggtat

SEQ ID NO: 338024 - DNA, 75 bp, synthetic construct
  source 1..75: mol_type = other DNA
cgctgaacgacagtaccgtcaccacggatgtcatcgctcatcgcggcacggccctgaagctgaccggcagcacag

SEQ ID NO: 338025 - DNA, 75 bp, synthetic construct
  source 1..75: mol_type = other DNA
ttcagggacgggcagtgaacaccacgctgaatggtggcgaacagtggatgcatgagggggcgatagccacaggaa

SEQ ID NO: 338026 - DNA, 75 bp, synthetic construct
  source 1..75: mol_type = other DNA
accggctttaaacttctctcctcgtcacgcgacgaagcccgttacgaagtgcgtcttgaaccccgtatggcgctg

SEQ ID NO: 338027 - DNA, 75 bp, synthetic construct
  source 1..75: mol_type = other DNA
agccattgcggcgtgtggtgacgtaccagaaatcatggtgattggcggtggtcgcgtttatgagcagttcctgcc

SEQ ID NO: 338028 - DNA, 75 bp, synthetic construct
  source 1..75: mol_type = other DNA
ggttcagctgatacaggattcactgaatgaagaactggcgcaggtgctgtttcactatctgctgaatggcagtga

SEQ ID NO: 338029 - DNA, 75 bp, synthetic construct
  source 1..75: mol_type = other DNA
ctggtgcaggccctgttctactatctgctgaacggcagtgaacatgtgacggtaaggtttttgcaggcgctggcg

SEQ ID NO: 338030 - DNA, 75 bp, synthetic construct
  source 1..75: mol_type = other DNA
aaaatgaattaccgtttttctcctggtttttggggttgatccttttcatgatggcaatggttcgagtggatgtaa

SEQ ID NO: 338031 - DNA, 75 bp, synthetic construct
  source 1..75: mol_type = other DNA
tcatgcttttggctctcgggggaaatggtgtggccgctgctgcaaaatatctccagcttattcttttcgtaaata

SEQ ID NO: 338032 - DNA, 75 bp, synthetic construct
  source 1..75: mol_type = other DNA
ggatagcatggaacgcattaatcaggcgatgaaaggttcgctgaagaacgcctctgccaacattgtcggtgtgaa

SEQ ID NO: 338033 - DNA, 75 bp, synthetic construct
  source 1..75: mol_type = other DNA
ccgatttggtgtggctgactagggctgcacaacttacctcaaaccaaaactgtgctgtatgggataaagaggtgc

SEQ ID NO: 338034 - DNA, 75 bp, synthetic construct
  source 1..75: mol_type = other DNA
ttcggaataaattccgtcaatgattttttttataaaattcagtcagatgctcctttggtcgcttttcgtaaatct

SEQ ID NO: 338035 - DNA, 75 bp, synthetic construct
  source 1..75: mol_type = other DNA
gtgaatttgttctcaaaactgaaaacatcgattggaagatcgcccagatcggcaagatgaaatttgaattagtgg

SEQ ID NO: 338036 - DNA, 75 bp, synthetic construct
  source 1..75: mol_type = other DNA
gagaagctgattgagcgcaacgttattgaagtcgcgccactggcctatatgcgtggtcgtacgctgaacgacgcg

SEQ ID NO: 338037 - DNA, 75 bp, synthetic construct
  source 1..75: mol_type = other DNA
cgaaacacacggcgcctatcgcttccgccggtgcatgacgcacggttgtacgctcgtgaatgtgtatatcacaga

SEQ ID NO: 338038 - DNA, 75 bp, synthetic construct
  source 1..75: mol_type = other DNA
gcgacagtggcaaattatgctgctgttctacctggaagcggcgtccagcgggctggctggcggtgcgctgggatg

SEQ ID NO: 338039 - DNA, 75 bp, synthetic construct
  source 1..75: mol_type = other DNA
tggtgttgccgctgcggcgaaatatttgcaacttatcctcttcgtgaatatgtggccgcttacggcagtaatggt

SEQ ID NO: 338040 - DNA, 75 bp, synthetic construct
  source 1..75: mol_type = other DNA
ggtgaatgcgcagttagccgcgttgtttcaggatgattcggagtcgttaagtgagatgcgtacccgctgtgagac

SEQ ID NO: 338041 - DNA, 75 bp, synthetic construct
  source 1..75: mol_type = other DNA
ctgaaaacaacaccggttgacatcgatggtgttagtctaaaatcaaaaactcgggaaaaaattgcggaaaaaatt

SEQ ID NO: 338042 - DNA, 75 bp, synthetic construct
  source 1..75: mol_type = other DNA
acgtttacaggaggggtcctccatcgacgtatctctgtgaaccgcgaaccagaaaagacagatgtatggcgattc

SEQ ID NO: 338043 - DNA, 75 bp, synthetic construct
  source 1..75: mol_type = other DNA
tcctgcgcgagcgccatcaaatgcgcggtcaggacttcgtgtttaacctcaaaaacgaatacccggcccgtgaac

SEQ ID NO: 338044 - DNA, 75 bp, synthetic construct
  source 1..75: mol_type = other DNA
attgggggaagcatacctgaatggaaactacaatcaaacggtgaattactctcagtcttttaaatggttgacgaa

SEQ ID NO: 338045 - DNA, 75 bp, synthetic construct
  source 1..75: mol_type = other DNA
gacagcagagacccagtacaccaggcgcttaactggatgattcttggtgatttcaaccgtgaacctgcggattta

SEQ ID NO: 338046 - DNA, 75 bp, synthetic construct
  source 1..75: mol_type = other DNA
tcaggtgacgggtcaggaattaatactatcactcaggcacaggatagaactcctgacagcgtaaatacgtctggc

SEQ ID NO: 338047 - DNA, 75 bp, synthetic construct
  source 1..75: mol_type = other DNA
agagctgagcaacacaaatgagccttaccagtcacgtgtcgataaagcggatcagtggcttaatgaaaataaaag

SEQ ID NO: 338048 - DNA, 75 bp, synthetic construct
  source 1..75: mol_type = other DNA
atgacacagtcgattcacccgatgatgaatgcggttaagggagtgacccccgatgcgccggtggatactggtcat

SEQ ID NO: 338049 - DNA, 75 bp, synthetic construct
  source 1..75: mol_type = other DNA
aaatttaaaactcgggaaagaattgcagaagaaattgcgaaaaaaactgcggaaaaaactgcgaaaaaaattcgg

SEQ ID NO: 338050 - DNA, 75 bp, synthetic construct
  source 1..75: mol_type = other DNA
taatccatgccctgctcctggattacagcgatgagcaacaaatcatattaagaccctttttccaaagtgctcaca

SEQ ID NO: 338051 - DNA, 75 bp, synthetic construct
  source 1..75: mol_type = other DNA
aagaatgcgaaacgaacggggcaatggtcatatgagatgactgataagtacgggcagagtattgaagtgtcctat

SEQ ID NO: 338052 - DNA, 75 bp, synthetic construct
  source 1..75: mol_type = other DNA
ttattgattcaaaagcaattctcacatttgagcaatatcttttggtctcctcagcccttagtgaggcaatgctga

SEQ ID NO: 338053 - DNA, 75 bp, synthetic construct
  source 1..75: mol_type = other DNA
atcatgcagcactacgagcggctcaacagtaccagcctgcaacgccgttcccttttgcagctgcttggcgtcagc

SEQ ID NO: 338054 - DNA, 75 bp, synthetic construct
  source 1..75: mol_type = other DNA
gaataatgccgcacgccactggtggcagcggttggagcaaaaagccggaagttgcaaagcctacaacgataaaaa

SEQ ID NO: 338055 - DNA, 75 bp, synthetic construct
  source 1..75: mol_type = other DNA
tttttaactggttacccgccgtacaaaaagaggcggcacaacgcttgtggcaacgacttgaacaaaaagccgaac

SEQ ID NO: 338056 - DNA, 75 bp, synthetic construct
  source 1..75: mol_type = other DNA
tggtactgtgccccgttctggctcagtccgccgggcagacgaatatgtcgtcagaggcgcaacggacgaccggta

SEQ ID NO: 338057 - DNA, 75 bp, synthetic construct
  source 1..75: mol_type = other DNA
ggttgagtactcgtttgacgatgctcgtcacatgttcgatggcaggaaggcagaaaatatccgcatcattaacgt

SEQ ID NO: 338058 - DNA, 75 bp, synthetic construct
  source 1..75: mol_type = other DNA
tggcgagcattatcaccatgtggttctcgcgtcatcgtgaattccacgccgatgcgggttcagcaaaactggttg

SEQ ID NO: 338059 - DNA, 75 bp, synthetic construct
  source 1..75: mol_type = other DNA
agctgtttgcccgtgagttcataattgacctcaatgccactcaggcagccataagggcgggctacagcgagaagt

SEQ ID NO: 338060 - DNA, 75 bp, synthetic construct
  source 1..75: mol_type = other DNA
tcgaacttcttggtaagcatgtttctgttcaggcgtttaaagagcaaacatctacagaaataactggcgctgatg

SEQ ID NO: 338061 - DNA, 75 bp, synthetic construct
  source 1..75: mol_type = other DNA
acagcatcatgccggtgccgtcctgcgataacgtagacgagtgggaagcagcagcacagaagcagcagagcgagg

SEQ ID NO: 338062 - DNA, 75 bp, synthetic construct
  source 1..75: mol_type = other DNA
ctttctgcattaacggtaagtcgaaatcgctcagtgagttgttcatgactcacccgccgctggataaacgtattg

SEQ ID NO: 338063 - DNA, 75 bp, synthetic construct
  source 1..75: mol_type = other DNA
tatgccgcaagtggcaatctaccatgcgccggatatcaacgctttcgcaaccggtgcacgtcgtgatgcctctct

SEQ ID NO: 338064 - DNA, 75 bp, synthetic construct
  source 1..75: mol_type = other DNA
caacgccttgagcaaaaagcggaacgctgcaaaacctacaacgacaaaaacggtgagctgttgattcgccagtat

SEQ ID NO: 338065 - DNA, 75 bp, synthetic construct
  source 1..75: mol_type = other DNA
taacataacgctggaaaatccttcaccagagctgctcacggtgttgattcgtgaactgaccgggaggggacgatg

SEQ ID NO: 338066 - DNA, 75 bp, synthetic construct
  source 1..75: mol_type = other DNA
attcaaacttcgtatggttgaactggcatcacaacctggagcttgtgttgcacagattgcacgagaaaatggcgt

SEQ ID NO: 338067 - DNA, 75 bp, synthetic construct
  source 1..75: mol_type = other DNA
acggtaacatgacgctggaaaatccatcgccagagctgctcacgatgttaatccgcgaactgagcgggaggggaa

SEQ ID NO: 338068 - DNA, 75 bp, synthetic construct
  source 1..75: mol_type = other DNA
cccgtatcgcccgggaacacgatatcaatgataacctcctgttcaaatggctcaggctctggcagaacgaagggc

SEQ ID NO: 338069 - DNA, 75 bp, synthetic construct
  source 1..75: mol_type = other DNA
atggttaaactggcttcacaaccaggagcctctgttgcccgtattgccagggaacacgatatcaatgataacctc

SEQ ID NO: 338070 - DNA, 75 bp, synthetic construct
  source 1..75: mol_type = other DNA
atgagcagaaagaacctgtggcggccaattgcgccgtctttatccacttccactcagaccagagtcagtgccagt

SEQ ID NO: 338071 - DNA, 75 bp, synthetic construct
  source 1..75: mol_type = other DNA
accatgacggcggccggtgggtgcgctttggtaatggcctgatgccggttttactgcaacaggcgggagacggta

SEQ ID NO: 338072 - DNA, 75 bp, synthetic construct
  source 1..75: mol_type = other DNA
aaatgggtacagcaggaatttgcccgggcggaaaaagagctggcatttcagcgggaagtggatgcagcctggaag

SEQ ID NO: 338073 - DNA, 75 bp, synthetic construct
  source 1..75: mol_type = other DNA
aagtgggtacagcaggaatttgcccgggcggaaaaagagctggcgtttcagcgggaagtggatgcggcctggaaa

SEQ ID NO: 338074 - DNA, 75 bp, synthetic construct
  source 1..75: mol_type = other DNA
ctcaggttctggcagaacgaagggcgtgtttcgcggtgtcttccaataacgacctcttctgacactggcgttgaa

SEQ ID NO: 338075 - DNA, 75 bp, synthetic construct
  source 1..75: mol_type = other DNA
ccggagacgcttgaacacgcagtcatcgtccatgaaccgcttatggcgatgatcccgcacgatcatcccctggca

SEQ ID NO: 338076 - DNA, 75 bp, synthetic construct
  source 1..75: mol_type = other DNA
agcaaatagcaccccttatcgaagggacgctggatatggggctgctacgaaatactgtgttgccggagacgttgg

SEQ ID NO: 338077 - DNA, 75 bp, synthetic construct
  source 1..75: mol_type = other DNA
acattctgcttgccaatggcgaactgaagccgattaaagactggcctaaggtgtggcgtacaacgctatcaggaa

SEQ ID NO: 338078 - DNA, 75 bp, synthetic construct
  source 1..75: mol_type = other DNA
gattatgccaatacccttccgcttaaagagaaaaacgtgaagcgggacttcttgtttctggaggccttctggccc

SEQ ID NO: 338079 - DNA, 75 bp, synthetic construct
  source 1..75: mol_type = other DNA
acaacagtcccaggcagaagcgcgtgctaaccttgcactcgcagaagcagtaagcgcccaacaaaacgtagaaac

SEQ ID NO: 338080 - DNA, 75 bp, synthetic construct
  source 1..75: mol_type = other DNA
taaaccgaggtggcgctgcggggaatgcggcatcaggcagcgttagtggcggaaacctggcagaacaggcattgt

SEQ ID NO: 338081 - DNA, 75 bp, synthetic construct
  source 1..75: mol_type = other DNA
gaaaacccgcgcggtattactgacaaaatgaccagcgccgatatcctgcgcatggcagaagcgctgaacacgaaa

SEQ ID NO: 338082 - DNA, 75 bp, synthetic construct
  source 1..75: mol_type = other DNA
acgctgcgcaactacggctacgacatcgtgatgctgatcgccttgctggtggtcgcatcgatgttcgtgggcgtt

SEQ ID NO: 338083 - DNA, 75 bp, synthetic construct
  source 1..75: mol_type = other DNA
cgccacctactccgaaattcagggtgggcgtaagcaatggaaagatttaggcgcaatggcgggcgtcggtgcggt

SEQ ID NO: 338084 - DNA, 75 bp, synthetic construct
  source 1..75: mol_type = other DNA
caactcagcgcattgattcataacggagggtactctgttgagcagcctgaagaagcatcggtagaactgacgttt

SEQ ID NO: 338085 - DNA, 75 bp, synthetic construct
  source 1..75: mol_type = other DNA
gttatagcagtgcgtttaagaatgctcaggaaacgataaatttactcgatcgctacagcgatgtattaacccagg

SEQ ID NO: 338086 - DNA, 75 bp, synthetic construct
  source 1..75: mol_type = other DNA
catcttagttcgttgattcacaaaggtgcgtactatattgagcaaccggaagaggcggctgttgaactgaccttt

SEQ ID NO: 338087 - DNA, 75 bp, synthetic construct
  source 1..75: mol_type = other DNA
atgagccgaaagaaccgatggctgctcttattccgcccttatccactcagactactgtcagtgccagctcctgca

SEQ ID NO: 338088 - DNA, 75 bp, synthetic construct
  source 1..75: mol_type = other DNA
caatgataatgttattttcaaatgcctcagactctggcaaaacgaagggcgtatatcacggcgtcttccggtaac

SEQ ID NO: 338089 - DNA, 75 bp, synthetic construct
  source 1..75: mol_type = other DNA
tagcaagttctcagcaacaacagattgcagagcttgaaaaacagagtaaagaattagcctgccagacagaagcac

SEQ ID NO: 338090 - DNA, 75 bp, synthetic construct
  source 1..75: mol_type = other DNA
gataaagacaacttcgagtaccactatccgcgtggtttcgatgattgcttcactattgaaccggatctgccgttc

SEQ ID NO: 338091 - DNA, 75 bp, synthetic construct
  source 1..75: mol_type = other DNA
ggctgtttctgaccgcgggtctgggaagtggttctactttccagatgatcgccgtcatctttcgccagataacca

SEQ ID NO: 338092 - DNA, 75 bp, synthetic construct
  source 1..75: mol_type = other DNA
tgccaccttcggttcgtttatcggtttttctgcgggttttgccatgctggcgaaaactcagttcccggatgtgaa

SEQ ID NO: 338093 - DNA, 75 bp, synthetic construct
  source 1..75: mol_type = other DNA
gatgcacaggaggctatgcgacaggatgaacgtaacctggtgatccaacggtcacaccaggatgagcgcgaaccg

SEQ ID NO: 338094 - DNA, 75 bp, synthetic construct
  source 1..75: mol_type = other DNA
ttctgttcaggcgtttaaagagcaaacatctacagaaataactggcgctgatggcgggcctgttcgttatgccga

SEQ ID NO: 338095 - DNA, 75 bp, synthetic construct
  source 1..75: mol_type = other DNA
gttgagatcgacaggctcgatgtggctgacatcctagaggacgatttaagtattaagcctctgtctgcgtggccg

SEQ ID NO: 338096 - DNA, 75 bp, synthetic construct
  source 1..75: mol_type = other DNA
gttacaggagcgttcacgctcttcgtccgcagactccccctggtttttcccttcacgaaaccacacacacatcac

SEQ ID NO: 338097 - DNA, 75 bp, synthetic construct
  source 1..75: mol_type = other DNA
ttccgtgaatttgagtccattcccgattttgacagcgcagccagtacgctgatcccgatggggacaaaagaagat

SEQ ID NO: 338098 - DNA, 75 bp, synthetic construct
  source 1..75: mol_type = other DNA
gccccgcagtccgtggccactggcgaactgcgcgatgcgctgagccgtcagggcagcctgtataacttcgatatg

SEQ ID NO: 338099 - DNA, 75 bp, synthetic construct
  source 1..75: mol_type = other DNA
tggattggctggggcgtaccgaaagagcgttgcatcgtcgttaaaccgggcgacgtagtgaaggtaaaagacatt

SEQ ID NO: 338100 - DNA, 75 bp, synthetic construct
  source 1..75: mol_type = other DNA
ggtttttcgttatctttttgccgttatttttctggttgcgtctgccctgggaaactatccgtaatggcggactgt

SEQ ID NO: 338101 - DNA, 75 bp, synthetic construct
  source 1..75: mol_type = other DNA
gcagctctgtaccagcgacagcggtgagtccggtcgcgacagcattggcgggaggcggggctggcgaaagcaatc

SEQ ID NO: 338102 - DNA, 75 bp, synthetic construct
  source 1..75: mol_type = other DNA
tccgggcacgcggtgatatggccattatttacgataaaggctgttccctgattaaaaagcactttaatgaacggg

SEQ ID NO: 338103 - DNA, 75 bp, synthetic construct
  source 1..75: mol_type = other DNA
atgggcgtcagcgttatgcaactggttgccccgctggtggtatcactgtctattttcgctgcgtttggtagccag

SEQ ID NO: 338104 - DNA, 75 bp, synthetic construct
  source 1..75: mol_type = other DNA
agaaagcaaacgaaatattatatgcattttccataatcggtattattccattaatggctatattaatacttcgaa

SEQ ID NO: 338105 - DNA, 75 bp, synthetic construct
  source 1..75: mol_type = other DNA
ggtagcaaaacagagcgaaaaaccacgccagcgcgcattaatcgcggcagtgcgcacaaaggtgctcgaaggtca

SEQ ID NO: 338106 - DNA, 75 bp, synthetic construct
  source 1..75: mol_type = other DNA
atgggcgtcagcgttatgcagttggttgctccgctggtggtatcactgtcgatttttgctgcatttggtagccag

SEQ ID NO: 338107 - DNA, 75 bp, synthetic construct
  source 1..75: mol_type = other DNA
atgggcgttagcgtcatgcagctggttgctccgctggtggtatcactgtcaatttttgctgcatttggcagccag

SEQ ID NO: 338108 - DNA, 75 bp, synthetic construct
  source 1..75: mol_type = other DNA
atacgctttcttcgggccgtttattggtgcgctggcgcgttctgcaggtggtgcattatctgaccgtctgggcgg

SEQ ID NO: 338109 - DNA, 75 bp, synthetic construct
  source 1..75: mol_type = other DNA
gcgcgtgagtgcaatcagaaaacacgtctgggggcgattttgaatgaaactggcgatgttatttccgatattgcg

SEQ ID NO: 338110 - DNA, 75 bp, synthetic construct
  source 1..75: mol_type = other DNA
gcaaagctaaagcgctgaaaatggaaatggaggttatctcaagcgttctggatcgtttaccgcacctgggcgaca

SEQ ID NO: 338111 - DNA, 75 bp, synthetic construct
  source 1..75: mol_type = other DNA
cctggctgattgccgcgagtgtcatcgacctcgatcaccaatggctgcccgatgtttttactcagggcgtattgt

SEQ ID NO: 338112 - DNA, 75 bp, synthetic construct
  source 1..75: mol_type = other DNA
tgctggtaaatctgggcacgcccgatgcccccactcctgaagcggtaaaacgctacctgaagcaatttttaagcg

SEQ ID NO: 338113 - DNA, 75 bp, synthetic construct
  source 1..75: mol_type = other DNA
cgtagcattccggggatatcgtttattcgtgattacgccgataaccacgattacattaatgcactggcgaacagc

SEQ ID NO: 338114 - DNA, 75 bp, synthetic construct
  source 1..75: mol_type = other DNA
cgctatctgaaacaatttttaagcgacagacgcgtggttgatacctcacggttgttatggtggccgttgctgcgc

SEQ ID NO: 338115 - DNA, 75 bp, synthetic construct
  source 1..75: mol_type = other DNA
cgctgtttagcggaaaatatcgcaacgcctcttcaacgcctggcaacattgcctatgcgctgtttgtactgtttt

SEQ ID NO: 338116 - DNA, 75 bp, synthetic construct
  source 1..75: mol_type = other DNA
ttcagccagcgcaaaccagggtaagggcagtgaaaaaggcaacggtaccacccatacagaaaccacagtggatgc

SEQ ID NO: 338117 - DNA, 75 bp, synthetic construct
  source 1..75: mol_type = other DNA
tgatatgcatactggtggcatgctggatgcgaatggtgccgccacggggaaagccggtgtactgaataatcacag

SEQ ID NO: 338118 - DNA, 75 bp, synthetic construct
  source 1..75: mol_type = other DNA
ggatttattgcgggtcagaaggatgtgaccctgaacactggaacgctcgataaccgtcagggcgcgctggggagc

SEQ ID NO: 338119 - DNA, 75 bp, synthetic construct
  source 1..75: mol_type = other DNA
tgcaggcattgtcgcagaccatggcgcaccggggcatcagcagcccacgattacgcagacggccagcggcattcc

SEQ ID NO: 338120 - DNA, 75 bp, synthetic construct
  source 1..75: mol_type = other DNA
actgccgggcagttcagcaataatggcgccacgataaatgccggcacactgcagatatcggcacagagcctgtca

SEQ ID NO: 338121 - DNA, 75 bp, synthetic construct
  source 1..75: mol_type = other DNA
gtctctgatgatggtctgattcagtccggtggtgacatgacgctggatgtacaggacggggtgctcagtaaccgt

SEQ ID NO: 338122 - DNA, 75 bp, synthetic construct
  source 1..75: mol_type = other DNA
gtagctcttggtatcaaggcatttgtaattaatgttacagtaacagccgttactatctcgaaggtgcaaaatgta

SEQ ID NO: 338123 - DNA, 75 bp, synthetic construct
  source 1..75: mol_type = other DNA
cgggtgttgctgaaccgtgttgatacatcaaccgcacctgatattgagtggccggaagaaccagacacaatgtaa

SEQ ID NO: 338124 - DNA, 75 bp, synthetic construct
  source 1..75: mol_type = other DNA
gtagctctgggtatgaagctgtttgtaactcatgttacagtaacagtcattactatctcgaaggtgcaaaatgta

SEQ ID NO: 338125 - DNA, 75 bp, synthetic construct
  source 1..75: mol_type = other DNA
gggaacaggggatttttcgctgagtctgccgggaagcgtggataaccgggaagggctgcttgcggcaaatggcgc

SEQ ID NO: 338126 - DNA, 75 bp, synthetic construct
  source 1..75: mol_type = other DNA
tggcaggcttgtggcacagcagtcactgacacttacctcgaaagacatcatcaacgatgccggcggcctgataca

SEQ ID NO: 338127 - DNA, 75 bp, synthetic construct
  source 1..75: mol_type = other DNA
cagccagttcgacgtcggtaaccagggtgtcattctgaataatgcccataacaatgtgcagactcagttgggtgg

SEQ ID NO: 338128 - DNA, 75 bp, synthetic construct
  source 1..75: mol_type = other DNA
ctggttggccggaataattctgcgtaaagaagcattaggcatgggcgatgtattactcttcgctgctttaggcgg

SEQ ID NO: 338129 - DNA, 75 bp, synthetic construct
  source 1..75: mol_type = other DNA
tatcatatcgaatatgcaatgggaataaatctatatatgaattgtgaagataaggagtttaatcccgttgatatt

SEQ ID NO: 338130 - DNA, 75 bp, synthetic construct
  source 1..75: mol_type = other DNA
tctttgtggataaggagtccggtgtgagttttgatgtttttcatgtgctttccgtttctttcccggtgacagctg

SEQ ID NO: 338131 - DNA, 75 bp, synthetic construct
  source 1..75: mol_type = other DNA
aacattcagaatcttactgaaaatgtgccatttgtgggcaccggtgatcaatcctgtattcaggttctgtgtcac

SEQ ID NO: 338132 - DNA, 75 bp, synthetic construct
  source 1..75: mol_type = other DNA
ttctttaatcgaacaagttatttttgcacgtctagacaatgatgaaagcgcgttgagttctctcacgatcaaagg

SEQ ID NO: 338133 - DNA, 75 bp, synthetic construct
  source 1..75: mol_type = other DNA
tgtcagtaatgttacaaacaaccaagcatatgattgtatctatggtttcggtttggctggcacatctactacatt

SEQ ID NO: 338134 - DNA, 75 bp, synthetic construct
  source 1..75: mol_type = other DNA
aaaaacagtatctgcgggaaactatcgccttaatcgagcaagtcatcttttctcgtttatctggggacgaagccg

SEQ ID NO: 338135 - DNA, 75 bp, synthetic construct
  source 1..75: mol_type = other DNA
acgcgcacaaatgcaaaatcgcggcgtaatggtcgtcggcgtacattttatgtctctggaactgggtggccgcgt

SEQ ID NO: 338136 - DNA, 75 bp, synthetic construct
  source 1..75: mol_type = other DNA
ttattacctgtagagataacgcctgatgagccgaaagaaccgatggctgctcttactccatccttatccactcag

SEQ ID NO: 338137 - DNA, 75 bp, synthetic construct
  source 1..75: mol_type = other DNA
ttattacaaaaaaaaaaaaaacaagatgaaaaaaaaaaacaggaggaaaaaaaagaaaaaaatttaaccaaaaaa

SEQ ID NO: 338138 - DNA, 75 bp, synthetic construct
  source 1..75: mol_type = other DNA
gtattttcacgacgtttccccatccggaaattaatctgcttcaggcttttgccagtgaaaccatcggaacgctga

SEQ ID NO: 338139 - DNA, 75 bp, synthetic construct
  source 1..75: mol_type = other DNA
tatgtcctctctcgtctctctggcgcagccatgttgaccgtaacgatggtcagaaaaacggattacagcggatat

SEQ ID NO: 338140 - DNA, 75 bp, synthetic construct
  source 1..75: mol_type = other DNA
gttcactcggcatggcgctggtagaaaccggcatggcgctggtagaaaccggcatggcatggttctggcccgaca

SEQ ID NO: 338141 - DNA, 75 bp, synthetic construct
  source 1..75: mol_type = other DNA
aatggacatttcctgaaaaacaccgtcaacctccagttgaccggttcttcgatatataacagctccgatattgtt

SEQ ID NO: 338142 - DNA, 75 bp, synthetic construct
  source 1..75: mol_type = other DNA
acgcatcagcgtcgcatcaggcatcggcacacggtgtcggatgcggcgcgagcgccttatccgacccacggttca

SEQ ID NO: 338143 - DNA, 75 bp, synthetic construct
  source 1..75: mol_type = other DNA
tgcagagaaagaaaggtgttgttatttagaatatcttaatgaaatgaaggtgttcgataagggagaaatttctat

SEQ ID NO: 338144 - DNA, 75 bp, synthetic construct
  source 1..75: mol_type = other DNA
tcaggactttttatctagtgacgaatatccacaatggctaataaatgcaatcacaagtaaatatacgcattcatg

SEQ ID NO: 338145 - DNA, 75 bp, synthetic construct
  source 1..75: mol_type = other DNA
aggcctgttgccctttggaccctgtctcagtttaggcggtttagcgactctctatgtccagagaatgtgtcagtg

SEQ ID NO: 338146 - DNA, 75 bp, synthetic construct
  source 1..75: mol_type = other DNA
aagtggcccagcgagatgaaaaaacctatgttatttgcacccaatggaccgacagacatcgttctgcattttgcc

SEQ ID NO: 338147 - DNA, 75 bp, synthetic construct
  source 1..75: mol_type = other DNA
aattgtccgccactgggcgcttcgttatcccggaacgcaatccgaagcagctgctgcattaacagaagcggctat

SEQ ID NO: 338148 - DNA, 75 bp, synthetic construct
  source 1..75: mol_type = other DNA
agagctttatgacgagattatgacgaacggcggtaaaaccgttttgcgtaggattctggatgcttatggttttac

SEQ ID NO: 338149 - DNA, 75 bp, synthetic construct
  source 1..75: mol_type = other DNA
gatgcaatacccggcaatgtcatagttaggtgttgtcttgatactggtgctgatatcaattggcttgtaagtggt

SEQ ID NO: 338150 - DNA, 75 bp, synthetic construct
  source 1..75: mol_type = other DNA
acagccaggctgacggtgtatcgccatttctgaaagttactttaacgaactctcagtaccaggttaccggatata

SEQ ID NO: 338151 - DNA, 75 bp, synthetic construct
  source 1..75: mol_type = other DNA
caaaaatgtattgtagataataaagtagaacaaattggaacaattgccgtaattgattctatcgaatggatgaat

SEQ ID NO: 338152 - DNA, 75 bp, synthetic construct
  source 1..75: mol_type = other DNA
tcccaggcgatgtagttgttacttgtgcccttgatactggtgtttcgctggaatggttagcaaccggcaaggggc

SEQ ID NO: 338153 - DNA, 75 bp, synthetic construct
  source 1..75: mol_type = other DNA
aggctatcaaataagtctgttgattttgaatgcaacctatcagaaatcacaccatctggtgctgttgtatttact

SEQ ID NO: 338154 - DNA, 75 bp, synthetic construct
  source 1..75: mol_type = other DNA
aaaacagtgaaaagttaatgaaaacactcgatgaactgaacctgtcgggaaaagggaaagtgtggtttacggggc

SEQ ID NO: 338155 - DNA, 75 bp, synthetic construct
  source 1..75: mol_type = other DNA
tccatcgggtatagcgcagccgggattatttgatgaaatccagccccgtaaaaacagtgaaaagttaatgaaaac

SEQ ID NO: 338156 - DNA, 75 bp, synthetic construct
  source 1..75: mol_type = other DNA
gatcgtaaaaccaacgccagactgtcagaaataccgtatttcgaatgctacacggatattccggctatggcacaa

SEQ ID NO: 338157 - DNA, 75 bp, synthetic construct
  source 1..75: mol_type = other DNA
tccaaagcaacctctttcatccccgttgtgggactgcttgcaggtggcgcagactcacaaactaaatctctgaca

SEQ ID NO: 338158 - DNA, 75 bp, synthetic construct
  source 1..75: mol_type = other DNA
ttcagaaaggatcacgataaggttgttaaccggattgaaaacctgtgttgttctgctgaatttttaacccgcaat

SEQ ID NO: 338159 - DNA, 75 bp, synthetic construct
  source 1..75: mol_type = other DNA
gggcaaccctgcacggtcaggctgggcgaggatactgtgctgacggggtatattgatgattttattcccagctat

SEQ ID NO: 338160 - DNA, 75 bp, synthetic construct
  source 1..75: mol_type = other DNA
ctgcctttgtcacgcaacacgccgcactgcttgacttaccggattgcattgccgatgcctttaacaaaggcttaa

SEQ ID NO: 338161 - DNA, 75 bp, synthetic construct
  source 1..75: mol_type = other DNA
taccttttgggatcgattctgttagctataattctttgttttgtaatagtctttacgttacctttatggaccgga

SEQ ID NO: 338162 - DNA, 75 bp, synthetic construct
  source 1..75: mol_type = other DNA
acaatgtcccttgtagcagttattattgcaataataatactcacattcggtatctggacaggaaagataagactg

SEQ ID NO: 338163 - DNA, 75 bp, synthetic construct
  source 1..75: mol_type = other DNA
cgcgagctgcgtctggataaaattaccagctttagccacccggaaatcggtacggtggtggtgagcgagtcctga

SEQ ID NO: 338164 - DNA, 75 bp, synthetic construct
  source 1..75: mol_type = other DNA
ccagggttttctgaggaatccattaaggagctggctgacaccatcaaagcgcggggggtgaaaatgccaatttcc

SEQ ID NO: 338165 - DNA, 75 bp, synthetic construct
  source 1..75: mol_type = other DNA
cagattgctaaaaggcttggcaagtcgccagcgttcgtaacccaacacgccgcgttgctggacctgccggattgt

SEQ ID NO: 338166 - DNA, 75 bp, synthetic construct
  source 1..75: mol_type = other DNA
tctgcaaccacccgtataacggcaaattatgccgccatcatctgcatgactccgttgcgcgaaaggcattgaagg

SEQ ID NO: 338167 - DNA, 75 bp, synthetic construct
  source 1..75: mol_type = other DNA
aatatgtggcagcgggcggtgacagcgcttcgcagtcaggaaaataaaaccatgctgctgcctgcgcaactggat

SEQ ID NO: 338168 - DNA, 75 bp, synthetic construct
  source 1..75: mol_type = other DNA
cttagtccgattatgcaacatgccgaaacaataggcatggggatgagcggtcagaaatacacagaaagcttcttc

SEQ ID NO: 338169 - DNA, 75 bp, synthetic construct
  source 1..75: mol_type = other DNA
gtgctgcttgatgctctgttcagaagtaaatcactggagaatccttccaccccgataaccggggatgccgttgat

SEQ ID NO: 338170 - DNA, 75 bp, synthetic construct
  source 1..75: mol_type = other DNA
ccggcctgaccatggagtttcagtttggtactaactggtcattctattccaactatgtgggcgatatttttggcg

SEQ ID NO: 338171 - DNA, 75 bp, synthetic construct
  source 1..75: mol_type = other DNA
atttatgttatttcatccagtgtggctcagatgcccctgcatgtgatgcgaaaaacgaatgagcatgttcagccg

SEQ ID NO: 338172 - DNA, 75 bp, synthetic construct
  source 1..75: mol_type = other DNA
cgcacagaacgggctgccgggtattacgttcgtttcaaccttacaggattgctccgcgggactccacaggagcgt

SEQ ID NO: 338173 - DNA, 75 bp, synthetic construct
  source 1..75: mol_type = other DNA
agcatgaccaggccgggcgaaactttttatcgtctggtacctgacgcgtcgaagcgcgcacagtctgcggggcaa

SEQ ID NO: 338174 - DNA, 75 bp, synthetic construct
  source 1..75: mol_type = other DNA
atgttcgtgctggcggtggtaccgggaatgccgcacctgccgtttttgctgttcagcgccctgcttggttttacc

SEQ ID NO: 338175 - DNA, 75 bp, synthetic construct
  source 1..75: mol_type = other DNA
ctgggatgattatggcggcgtcaccgccttatcaaaaattctgagctggaatgcctcactgaccgcaccgttttc

SEQ ID NO: 338176 - DNA, 75 bp, synthetic construct
  source 1..75: mol_type = other DNA
agcatgtggcaaaaagctacagctgctttgcgcagccaggagaataaaacaatgcttctcccggcagagctggat

SEQ ID NO: 338177 - DNA, 75 bp, synthetic construct
  source 1..75: mol_type = other DNA
ggaactcaatcgccgcctgttcacccgtgctgaactggctgccggatattacgtcaggtttaacctgacaggcct

SEQ ID NO: 338178 - DNA, 75 bp, synthetic construct
  source 1..75: mol_type = other DNA
atgctgcttgatgctctttttcgcagtgaaccactggaaaatccggccacgccgatcacgagtgaatcggctgaa

SEQ ID NO: 338179 - DNA, 75 bp, synthetic construct
  source 1..75: mol_type = other DNA
ggattttcctttccttcaaagaatatggtgatggatatacgttcatacgcagcactagatggttttgaaatgatg

SEQ ID NO: 338180 - DNA, 75 bp, synthetic construct
  source 1..75: mol_type = other DNA
ctgtcagtaccgggctggagctggggccggattctgatgacaacaccggcgggcagcagataactccgggtggca

SEQ ID NO: 338181 - DNA, 75 bp, synthetic construct
  source 1..75: mol_type = other DNA
tgtggcccagggaacccgccacagcatgaaagcctcatcggacaataacgacttccgcgcccggggctggggctg

SEQ ID NO: 338182 - DNA, 75 bp, synthetic construct
  source 1..75: mol_type = other DNA
tcaccctgggcgttcaggcaggttatgaccacagcgtcagcggcagcagcgctgaaggctataacggtcaggcca

SEQ ID NO: 338183 - DNA, 75 bp, synthetic construct
  source 1..75: mol_type = other DNA
ggtgcagtgcttatccctactccggtcttagctgagtttctcgtcggtattgataaaaaccaacaccaggcatat

SEQ ID NO: 338184 - DNA, 75 bp, synthetic construct
  source 1..75: mol_type = other DNA
tgttagtttgttgggattacaatgagataggtgatttgttaaaatctattcataattttaaacctaatccctatt

SEQ ID NO: 338185 - DNA, 75 bp, synthetic construct
  source 1..75: mol_type = other DNA
cagcgcggcacggccctgaagctgaccggcagcacagtgctgaacggtgccattgaccccacgaatgtcaccctg

SEQ ID NO: 338186 - DNA, 75 bp, synthetic construct
  source 1..75: mol_type = other DNA
tggtttatgccggcggcgaccagacggtacacgggcatgcgctggataccacgctgaatggggggtaccagtatg

SEQ ID NO: 338187 - DNA, 75 bp, synthetic construct
  source 1..75: mol_type = other DNA
agagagagttaatttggaaaaatcgtttaaagaatatgatatgtagcgatctagatttaagtgatttatcaagaa

SEQ ID NO: 338188 - DNA, 75 bp, synthetic construct
  source 1..75: mol_type = other DNA
tacggcggcaaccgtcaccggcagcaaccgtctgggcaatttcactgtggaaaacggtaatgctgacggtgttgt

SEQ ID NO: 338189 - DNA, 75 bp, synthetic construct
  source 1..75: mol_type = other DNA
tgcccttcagtatcactgacaacctgatgctggagccacaactgcagtacacctggcagggactctccctggatg

SEQ ID NO: 338190 - DNA, 75 bp, synthetic construct
  source 1..75: mol_type = other DNA
tgctgctgtcacatcagtcccggcgctggctgctgacacggttgtacaggcgggtgaaaccgtgaacgacggaac

SEQ ID NO: 338191 - DNA, 75 bp, synthetic construct
  source 1..75: mol_type = other DNA
cacgtcaggttcagtttaaatggtccttcgacaaggtgacaggaacggtaagtaacactggcaacacatggttta

SEQ ID NO: 338192 - DNA, 75 bp, synthetic construct
  source 1..75: mol_type = other DNA
gcacgaactaatcgcagtgtattgctgacggcagcaggaaaacagtttcttgcagatagtcggcaaatcctgtct

SEQ ID NO: 338193 - DNA, 75 bp, synthetic construct
  source 1..75: mol_type = other DNA
atgctggcatgcaatatcgcagacagttttgccaaataccgctggtgtccaaacattatcggcccgcaaagcggc

SEQ ID NO: 338194 - DNA, 75 bp, synthetic construct
  source 1..75: mol_type = other DNA
attcaaacatggcacttttaaatatgccatgatcaatataattataatagcattatctcagggcgttgtaataat

SEQ ID NO: 338195 - DNA, 75 bp, synthetic construct
  source 1..75: mol_type = other DNA
caaagccagacttttggcgtcgcctgggacgaccctgccaccaccgcaccggaagcgtttcgctttgatatctgc

SEQ ID NO: 338196 - DNA, 75 bp, synthetic construct
  source 1..75: mol_type = other DNA
gttcagggaatcaaaacattgacatagcatttataactgataaaaatcataaaaaacacctttccgatatattta

SEQ ID NO: 338197 - DNA, 75 bp, synthetic construct
  source 1..75: mol_type = other DNA
ttgagccaaacaggaaaagcaacacaacttgtcattatgtcgcatggaggatggaaagagatctcccatccacaa

SEQ ID NO: 338198 - DNA, 75 bp, synthetic construct
  source 1..75: mol_type = other DNA
tgaatgggtggcgattggatgctgcggcccacacaggcacatacgctctaaatggtgggaacagagaatggatga

SEQ ID NO: 338199 - DNA, 75 bp, synthetic construct
  source 1..75: mol_type = other DNA
gccacgcggtcgctgaatgacgctaaaaatattcttgttgctgattgtgaaaatggggagggggggttatgcgtg

SEQ ID NO: 338200 - DNA, 75 bp, synthetic construct
  source 1..75: mol_type = other DNA
acgctgatgcacgcgcttattgatattgaatgcacggcagagcttgcgcagggagaagaacagaaagaccggaca

SEQ ID NO: 338201 - DNA, 75 bp, synthetic construct
  source 1..75: mol_type = other DNA
tcgccggagcgcagggcgttcttcagctcggacagggcgcagatttcgtagaatttccggtcgaggccttccggg

SEQ ID NO: 338202 - DNA, 75 bp, synthetic construct
  source 1..75: mol_type = other DNA
ccttttggtggattggattacatgacagaaagcgttaaagaacctgagttggacaattttaaacagaaaaaataa

SEQ ID NO: 338203 - DNA, 75 bp, synthetic construct
  source 1..75: mol_type = other DNA
tggaaggctaccgcaatacgaaagaagtccgcgaactggcgcatcgcttcggcgttgaaatgccaataaccgagg

SEQ ID NO: 338204 - DNA, 75 bp, synthetic construct
  source 1..75: mol_type = other DNA
tggctctggatgatacctccggcgcacagggcgtaggcattggtatggaaactactgatggtactgctgttgcta

SEQ ID NO: 338205 - DNA, 75 bp, synthetic construct
  source 1..75: mol_type = other DNA
acacaaagatatcacattacttagattggatgtttttgatgacagaacaagcgaatgtctttctgaagagattaa

SEQ ID NO: 338206 - DNA, 75 bp, synthetic construct
  source 1..75: mol_type = other DNA
gaagccgatcgtgctaaacaagttgccctaatcgctgccgcgcaggatgcagaaaccaaagcggttgaactgacc

SEQ ID NO: 338207 - DNA, 75 bp, synthetic construct
  source 1..75: mol_type = other DNA
ttatttgtagtctgctgttatttagtgggacagtctccgctgccgataatctgcattttaccggtaatttgtttg

SEQ ID NO: 338208 - DNA, 75 bp, synthetic construct
  source 1..75: mol_type = other DNA
gacggaagacagcgaacagcctggatttctggcacctgacccggcatcgggcgcacaggggatagggattggtat

SEQ ID NO: 338209 - DNA, 75 bp, synthetic construct
  source 1..75: mol_type = other DNA
cgtaaaagttactctgaccggaacagaagacagtgggcaaccgggatttctggctctggatgatacctccggtgc

SEQ ID NO: 338210 - DNA, 75 bp, synthetic construct
  source 1..75: mol_type = other DNA
ttgctctgggttggttggctccaagctggcgaacttgaccggatacagtgataaacctctggatgctattggtgc

SEQ ID NO: 338211 - DNA, 75 bp, synthetic construct
  source 1..75: mol_type = other DNA
aatcactctggtatggcatgggaaaaatgtcgcgctttatggacgttgcgaatcaaccactgatttaactccatt

SEQ ID NO: 338212 - DNA, 75 bp, synthetic construct
  source 1..75: mol_type = other DNA
aaaatcctgacgtttctgaataaccaggatatcggttcgctggtggcgctcataacgcgccggggaggttcaggt

SEQ ID NO: 338213 - DNA, 75 bp, synthetic construct
  source 1..75: mol_type = other DNA
aatgaaatcggcgtttcaggcggttcgttggcggcattgacttcaccattggcttcatcgattcccgtcgcagat

SEQ ID NO: 338214 - DNA, 75 bp, synthetic construct
  source 1..75: mol_type = other DNA
aggttaaaacccgtactgccgaacagaatgcacgtattgcggcttttgaagctgaacgtcgtcgtgaagcagagc

SEQ ID NO: 338215 - DNA, 75 bp, synthetic construct
  source 1..75: mol_type = other DNA
tatagaaagtcaggccccggacaaactggtttatgaaccgggtaatccgctggcggatgcaaagggctacgtaaa

SEQ ID NO: 338216 - DNA, 75 bp, synthetic construct
  source 1..75: mol_type = other DNA
ttccccacaattgcggccagcgatttaatgctacgtggtcagtcagagcgtgtgccattagtctttcagttgaaa

SEQ ID NO: 338217 - DNA, 75 bp, synthetic construct
  source 1..75: mol_type = other DNA
catatgattggaaagattgaggatgtctttacccgccaggccaatttctcagccgatatcgcgcacgagatcaga

SEQ ID NO: 338218 - DNA, 75 bp, synthetic construct
  source 1..75: mol_type = other DNA
tctgcgcagggggcagcactacgcccggccgtgaattcagccgattttagcgagcacagccgcgcacgggatgtc

SEQ ID NO: 338219 - DNA, 75 bp, synthetic construct
  source 1..75: mol_type = other DNA
gacgaaaacggcaagaaaaagcagtcttacttccatgatttctttaactatgccgggatccatcgcagcgtaatg

SEQ ID NO: 338220 - DNA, 75 bp, synthetic construct
  source 1..75: mol_type = other DNA
tggtgtgtctctcgcggatatcgggatttcgttgacgcacccaggaactgtcaacgcagctctcttgttcaggat

SEQ ID NO: 338221 - DNA, 75 bp, synthetic construct
  source 1..75: mol_type = other DNA
tcatgcccgtgcacggcgggccgggcatgaagatggaaacctaccggattatcgcctcttcaggaaccgcgacac

SEQ ID NO: 338222 - DNA, 75 bp, synthetic construct
  source 1..75: mol_type = other DNA
ctttctctctcgccctgcggctgaccttttttataagcctgtccacgatactggcgtttatcgcctttacctggt

SEQ ID NO: 338223 - DNA, 75 bp, synthetic construct
  source 1..75: mol_type = other DNA
tgtggggctcactctcaaacgtctcttttcacggttatttagtgcagccgcctaactgcacgattagcaacgctc

SEQ ID NO: 338224 - DNA, 75 bp, synthetic construct
  source 1..75: mol_type = other DNA
tggataccacctcagccgctcagggcgtcgggattgggatggagacgaccgacggtgtgcgggtgtcgattaaca

SEQ ID NO: 338225 - DNA, 75 bp, synthetic construct
  source 1..75: mol_type = other DNA
atgaagacaggacgcatttattcgctcggttacgcgcttttagcgggtctgctgctgaccggtagtactcgtact

SEQ ID NO: 338226 - DNA, 75 bp, synthetic construct
  source 1..75: mol_type = other DNA
atccctgaagagcatttatcaaggttgtttgaccgtttttatcgggtggatccgtccagacaacgaaaaggagaa

SEQ ID NO: 338227 - DNA, 75 bp, synthetic construct
  source 1..75: mol_type = other DNA
tgaagatcaataataactctggtgcgacgtttgttttgagtgatggcagtaatacattgctttttaacacctggg

SEQ ID NO: 338228 - DNA, 75 bp, synthetic construct
  source 1..75: mol_type = other DNA
cattttactgccattgccgccagcgatttaatgaacattgggcagtcagagcgagtgccgttggtcattcaattg

SEQ ID NO: 338229 - DNA, 75 bp, synthetic construct
  source 1..75: mol_type = other DNA
ttttcgcatgatgcgttattccattgcggcaatgcaaaaccatcttgatgcgggctataaagagcttccattggt

SEQ ID NO: 338230 - DNA, 75 bp, synthetic construct
  source 1..75: mol_type = other DNA
attcaaacttcgtatggtggaactggcatcacaacctggagcttgtgttgcacagattgcacgtgaaaatggcgt

SEQ ID NO: 338231 - DNA, 75 bp, synthetic construct
  source 1..75: mol_type = other DNA
cgtgcagggaaagcgagtaaagacccggacaagcgtaaagccaatgcatggctgttcaatcccctgcggcctgtg

SEQ ID NO: 338232 - DNA, 75 bp, synthetic construct
  source 1..75: mol_type = other DNA
cattatcgtctgacgtttggagggcggtattacgatcaagctttccagaatctgcccaatgagttgaaatctaaa

SEQ ID NO: 338233 - DNA, 75 bp, synthetic construct
  source 1..75: mol_type = other DNA
tcagtaccagttcctgtaagatcgagttccatcacggtaaaatgacgctgaaaaatccttcaccagagctgctca

SEQ ID NO: 338234 - DNA, 75 bp, synthetic construct
  source 1..75: mol_type = other DNA
tcacaaagcacagtcagtgccagttcctgtaaagttgagttccattaccgaaagtcaatcagcgatacaaagacg

SEQ ID NO: 338235 - DNA, 75 bp, synthetic construct
  source 1..75: mol_type = other DNA
cccgcgagaactttgttcagggtgtgcagaacaccgttgcggaagacttatccaaaaacggtctggagcttgaaa

SEQ ID NO: 338236 - DNA, 75 bp, synthetic construct
  source 1..75: mol_type = other DNA
gcgtgtaattgaaaatataattgtttttaatattggaaaaagatggagaataaaaatattataccgaaacaaaca

SEQ ID NO: 338237 - DNA, 75 bp, synthetic construct
  source 1..75: mol_type = other DNA
agttacctaaagttcctgttagtgtacttaaaaccattaataatctcgaagagagattacaagatcttgaggaaa

SEQ ID NO: 338238 - DNA, 75 bp, synthetic construct
  source 1..75: mol_type = other DNA
cttacataaggttctcatcaaaaaagcaagaacagggcgattctgtaaggcgccaaatcgcacttgccgaacatt

SEQ ID NO: 338239 - DNA, 75 bp, synthetic construct
  source 1..75: mol_type = other DNA
aaacagatggtccataccaccacctacagaattgggcgtgtgactattggtgttaatgatggccttggggcaaaa

SEQ ID NO: 338240 - DNA, 75 bp, synthetic construct
  source 1..75: mol_type = other DNA
ctggtcgtgtctgcatgctggatcatgatggggtagtggcaacgggcgcgctttcactaccggactggcgtggtt

SEQ ID NO: 338241 - DNA, 75 bp, synthetic construct
  source 1..75: mol_type = other DNA
cttaggcgtgaagcaaacgggctgcgcgggctttggctatgtgctcgacagtgttagcgagccggacaaagacga

SEQ ID NO: 338242 - DNA, 75 bp, synthetic construct
  source 1..75: mol_type = other DNA
atatatattttcgataaaagtaccgatgactgtttcatgaagttttacagaacgagagaaactgacagttctgcg

SEQ ID NO: 338243 - DNA, 75 bp, synthetic construct
  source 1..75: mol_type = other DNA
ggcggatgccgttgacgcattctgtgagcaccttgcgttctccccagcacaagtcgagcgcatttttgatgctgc

SEQ ID NO: 338244 - DNA, 75 bp, synthetic construct
  source 1..75: mol_type = other DNA
gctgctgggcaatgcggcggaaattgttcctgagctggtgaaacgtgcgcatcagggatcgatcaaaccggatct

SEQ ID NO: 338245 - DNA, 75 bp, synthetic construct
  source 1..75: mol_type = other DNA
gtttgctcaacactgcagggggagcaacgtgggtatccctgcatcatggcggcggcgtcgggatggggtattcac

SEQ ID NO: 338246 - DNA, 75 bp, synthetic construct
  source 1..75: mol_type = other DNA
ggcctgctgccgcagatattcccgtggcgagcgataacccagtgcactatgcggatgccattcgttataatgctc

SEQ ID NO: 338247 - DNA, 75 bp, synthetic construct
  source 1..75: mol_type = other DNA
cgggctataaagagcttccattggtgatcccgattgtattgattcacttgaagtacgaaaaaaaccgggaggaca

SEQ ID NO: 338248 - DNA, 75 bp, synthetic construct
  source 1..75: mol_type = other DNA
ggtgcattaatcagccgtggtgactcgattgtctggcttgggaaggccacgcagaccccccgtgaactgacggct

SEQ ID NO: 338249 - DNA, 75 bp, synthetic construct
  source 1..75: mol_type = other DNA
ttattacctgtagaaataacgccggatgagcagaaagaacctgtggcggccatattgcgccgtctttatccactt

SEQ ID NO: 338250 - DNA, 75 bp, synthetic construct
  source 1..75: mol_type = other DNA
cccagggcgaactgatgtttgatgatattgacttgctggtcatgctgcatctggtggcgcgggtggtcgccgatt

SEQ ID NO: 338251 - DNA, 75 bp, synthetic construct
  source 1..75: mol_type = other DNA
tccctgaccgaagaagacaccaacgcgattattcatccgtgcctggccgttgtatcacgcaaacacatggacgga

SEQ ID NO: 338252 - DNA, 75 bp, synthetic construct
  source 1..75: mol_type = other DNA
gatctggtttatggctacctaccgatgggctggagcgtagaacaatggcgcgctgcacagcaggatccacagcaa

SEQ ID NO: 338253 - DNA, 75 bp, synthetic construct
  source 1..75: mol_type = other DNA
catgttaagcagatcccctgtcgaacccgttcaaagcactgcaccccagccgaaagcggagcctgcaaaaccgaa

SEQ ID NO: 338254 - DNA, 75 bp, synthetic construct
  source 1..75: mol_type = other DNA
atggagacgttgagcaccaatctgcaactcgcccggctggttggcgttcaggggacgccggcaaccatcattggc

SEQ ID NO: 338255 - DNA, 75 bp, synthetic construct
  source 1..75: mol_type = other DNA
ctttgtacggtttgcaggtactggagcgtattgaagcgaatcagcgacaaaacttcacccgatttgtggtgttgg

SEQ ID NO: 338256 - DNA, 75 bp, synthetic construct
  source 1..75: mol_type = other DNA
ccgatcgctctacggtggcgaccaacacgactaccgctctggcaaccgcggtgcgtgatttgggaatgtcgccgg

SEQ ID NO: 338257 - DNA, 75 bp, synthetic construct
  source 1..75: mol_type = other DNA
atggcggggcggtggcgctgattctgattgaaggtcaggcaccgctgacgccgctggtgctggataaggttggca

SEQ ID NO: 338258 - DNA, 75 bp, synthetic construct
  source 1..75: mol_type = other DNA
cagccgcgttaactcgctgcaggagcgccgcctgcgccgacacatccgctggctgctggatatctcctggcgctc

SEQ ID NO: 338259 - DNA, 75 bp, synthetic construct
  source 1..75: mol_type = other DNA
aatggcgagttgttctatggacggcgcggaacgttaacccatttctccttacaacaagcgatgtgcgaactggaa

SEQ ID NO: 338260 - DNA, 75 bp, synthetic construct
  source 1..75: mol_type = other DNA
accggagctgaacgatatgtgccgcatcatcagccatgtccaccagcatcatcattatctgctgggccgcgtgga

SEQ ID NO: 338261 - DNA, 75 bp, synthetic construct
  source 1..75: mol_type = other DNA
aacgatcgtttaccgtcgttcactacaagagatgcccgcatggcgcgaagagtatgaagaagcgttgcacgacgg

SEQ ID NO: 338262 - DNA, 75 bp, synthetic construct
  source 1..75: mol_type = other DNA
cattatcgctacgcatgcggattttaagaaaaattgaccgtctggctgcgctgagtggctcgacccgaagtgaag

SEQ ID NO: 338263 - DNA, 75 bp, synthetic construct
  source 1..75: mol_type = other DNA
gcatttgttgcctcatcaacaaaagaaagcgtggttatccgttatggtatcaaaaaaactgaagaaaaggtgtta

SEQ ID NO: 338264 - DNA, 75 bp, synthetic construct
  source 1..75: mol_type = other DNA
gaaaactcatcgttgtatgcagccagaagggcggaatcgttaaatcgcagtcatccagtgaaattgcacatgacc

SEQ ID NO: 338265 - DNA, 75 bp, synthetic construct
  source 1..75: mol_type = other DNA
gcttaacgacctcaggaacatttctgatgtgattgggatcggtggttctatcactgacgaggacatagaagatgc

SEQ ID NO: 338266 - DNA, 75 bp, synthetic construct
  source 1..75: mol_type = other DNA
catcagcactggcaagcaaacgctgcgctgcgatatcagcagcggctatccggagtgggtggaaggaggaacatt

SEQ ID NO: 338267 - DNA, 75 bp, synthetic construct
  source 1..75: mol_type = other DNA
ttttcgtcagacaatcaaccgtctgctgaaggaagccatctgacacttaaagccatcgttgcgctaatttataaa

SEQ ID NO: 338268 - DNA, 75 bp, synthetic construct
  source 1..75: mol_type = other DNA
aatgcacgttgctgggagcagctgcgggagaatgcctatctgatgggccagatggtcgatgccgataccgcctat

SEQ ID NO: 338269 - DNA, 75 bp, synthetic construct
  source 1..75: mol_type = other DNA
ctttatgaccaaactgaaagagcttgcagccactgcatcctctgcggatgaaggcgccagcgtggcctataagat

SEQ ID NO: 338270 - DNA, 75 bp, synthetic construct
  source 1..75: mol_type = other DNA
atgaccaaactgaaagagcttgccgccgctgcatcctctgcagatgaaggggccagcgtggcctataagattaag

SEQ ID NO: 338271 - DNA, 75 bp, synthetic construct
  source 1..75: mol_type = other DNA
tctcggcaaacctgagttttacgacgtggtgaccactgccacgggcattccagcctggcgcatccatcacagtcg

SEQ ID NO: 338272 - DNA, 75 bp, synthetic construct
  source 1..75: mol_type = other DNA
tcgggactttttcggtaaaagcgccatttcattgctattgctgctgcccattgcgctgccgggcattgtcactgg

SEQ ID NO: 338273 - DNA, 75 bp, synthetic construct
  source 1..75: mol_type = other DNA
gtcacttaaagtggcggcgctggcgacattaattgcgctggtattagggacactggccgctgctgcgctgtggcg

SEQ ID NO: 338274 - DNA, 75 bp, synthetic construct
  source 1..75: mol_type = other DNA
agactatcacttatttaagtgatactggttgtctggagatccagggggccagtctagtttccgaggtggattctg

SEQ ID NO: 338275 - DNA, 75 bp, synthetic construct
  source 1..75: mol_type = other DNA
gccgcattaaagatatggggccggacctgggtaaacctgagttttacgatgtggtgaccacagcaacgggaattc

SEQ ID NO: 338276 - DNA, 75 bp, synthetic construct
  source 1..75: mol_type = other DNA
ggtgggtttcatcatgattgaggggcaggcaccaatgaccccgctgcgacccgaaaccatcggtaagggcaagtt

SEQ ID NO: 338277 - DNA, 75 bp, synthetic construct
  source 1..75: mol_type = other DNA
atgataaaaagctggaaacacaaaggacttcaacgtttctttgaaacaggaaatgcatcaggcgtaaatcccaat

SEQ ID NO: 338278 - DNA, 75 bp, synthetic construct
  source 1..75: mol_type = other DNA
tggatgccaaagataccttcgaaacccatcagtacaacttcagtggtctggatgacatcctttcgcagtttgcag

SEQ ID NO: 338279 - DNA, 75 bp, synthetic construct
  source 1..75: mol_type = other DNA
tttcaccagtcgtaaccgcatgctggtggaatggtcctatcgttcgtcctggatcatcggcgaagcagtcgatgc

SEQ ID NO: 338280 - DNA, 75 bp, synthetic construct
  source 1..75: mol_type = other DNA
gtggtgaccacagcaacgggaattcctgcctggcgcattcatcacagtcgcctgattcgctttgatggcgtcacg

SEQ ID NO: 338281 - DNA, 75 bp, synthetic construct
  source 1..75: mol_type = other DNA
gtgctgtgagtgacgaagaagcctgggtaatgaaaagcgcagttgataaattacaacaggcgttaagggaagaag

SEQ ID NO: 338282 - DNA, 75 bp, synthetic construct
  source 1..75: mol_type = other DNA
gacgaagttgcgttgttcggcaccgataatttagaaaaagatccctatgcagtgacgctcggcatgaactatcaa

SEQ ID NO: 338283 - DNA, 75 bp, synthetic construct
  source 1..75: mol_type = other DNA
gggtggaaatatattttatgattatgatttcactcgtggacatcgccgtttagggttagggactgaagcctggac

SEQ ID NO: 338284 - DNA, 75 bp, synthetic construct
  source 1..75: mol_type = other DNA
cggaacggttttttcagttgagtttcaaagcgatgattcatcaacctggaaactaccaataggaacggctttact

SEQ ID NO: 338285 - DNA, 75 bp, synthetic construct
  source 1..75: mol_type = other DNA
gaggccgtgcagaagttcggtgctcaaaaagaagatggcgtgcagggatatggattacgtgtggtttacagcaag

SEQ ID NO: 338286 - DNA, 75 bp, synthetic construct
  source 1..75: mol_type = other DNA
gacgaagttgcgctgttcggcactgataatttagagaaagatccgtatgcggtgacgcttggagttaactatcaa

SEQ ID NO: 338287 - DNA, 75 bp, synthetic construct
  source 1..75: mol_type = other DNA
atccgcgactaaacctgtcaaccttattgataacgacaaagaacatttgccggtggataacgcctaccgttttgt

SEQ ID NO: 338288 - DNA, 75 bp, synthetic construct
  source 1..75: mol_type = other DNA
ttcaaaggaatcctcaacgaatgggattccctcgttgctctgttgaagtctgaaatgaagacgtacgggaacaaa

SEQ ID NO: 338289 - DNA, 75 bp, synthetic construct
  source 1..75: mol_type = other DNA
tcaatcgcatgtggactgaaaaagaatatctatggtcatcacttcggcgctccacatgacgcagccgatttccga

SEQ ID NO: 338290 - DNA, 75 bp, synthetic construct
  source 1..75: mol_type = other DNA
attccctcgtcgctctgttgaagtctgaaatgaagatacacggaaacaaagcaccagagacttacagaagaatta

SEQ ID NO: 338291 - DNA, 75 bp, synthetic construct
  source 1..75: mol_type = other DNA
ctttcgataaactttcggttttagactccttaggcgttattcaacaaggcattggttatagtttaagatacaaat

SEQ ID NO: 338292 - DNA, 75 bp, synthetic construct
  source 1..75: mol_type = other DNA
tggcatcagtagcgcaactcttgcctcaatcgcatgtggactgaaaaagaatatctatggtcatagcttcggtgc

SEQ ID NO: 338293 - DNA, 75 bp, synthetic construct
  source 1..75: mol_type = other DNA
attccctcgttgctctgttgaagtcagaaatgaagatacacggaaacaaagcaccagagacttacaaaagaatta

SEQ ID NO: 338294 - DNA, 75 bp, synthetic construct
  source 1..75: mol_type = other DNA
agcgcaataattttattgttctggaatataaagaaaaagatcctctcgacgttacgttgtggctgaaggctgacg

SEQ ID NO: 338295 - DNA, 75 bp, synthetic construct
  source 1..75: mol_type = other DNA
tagacagcgacagttatcagttactgaaatccgcggacgtcaatatatccggtctggtgaacacggccatgcaga

SEQ ID NO: 338296 - DNA, 75 bp, synthetic construct
  source 1..75: mol_type = other DNA
acgctggcaggctgaaaatcaggaagggatggccgaggttgcccggtttattgaaatgaacggttcattcgccga

SEQ ID NO: 338297 - DNA, 75 bp, synthetic construct
  source 1..75: mol_type = other DNA
ttgacagcgacagctatcagttgctcaaggcatatgatgtcaatatctccggtctggtaagcacaaccatgcaga

SEQ ID NO: 338298 - DNA, 75 bp, synthetic construct
  source 1..75: mol_type = other DNA
tttaaggacgagcccaatatattattccttgatgaaaatttgggattggctggggcacaaaatgtaggtctgaaa

SEQ ID NO: 338299 - DNA, 75 bp, synthetic construct
  source 1..75: mol_type = other DNA
ggcgatattgatggcgcacaaaaacagctcgatcggctgtcgcagttagcgccgagttcaaatgcgtataaatcg

SEQ ID NO: 338300 - DNA, 75 bp, synthetic construct
  source 1..75: mol_type = other DNA
cgccgtctgcgtgcggaacgctggcaggctgaaaatcagcaggggatggctgagatcgcccgttttattgaaatg

SEQ ID NO: 338301 - DNA, 75 bp, synthetic construct
  source 1..75: mol_type = other DNA
actgtacgatgaaaacgacaagaaagtgacgctgaacaccaaaccctgcgtcactgaaacaccgtgtgtcttcat

SEQ ID NO: 338302 - DNA, 75 bp, synthetic construct
  source 1..75: mol_type = other DNA
cactggaagatgagaaaggtaaccgccaaaactcaggtgtcgtcgaaattgtggtgaaacaggatcgtaagatcg

SEQ ID NO: 338303 - DNA, 75 bp, synthetic construct
  source 1..75: mol_type = other DNA
atgacttcgtggaacgtaataatttcattgttctggaatatcgtgaaaaagatccgcttgatgtgacgctgtggc

SEQ ID NO: 338304 - DNA, 75 bp, synthetic construct
  source 1..75: mol_type = other DNA
gttgcaatttatgctgattacaaaacgcgatggcccgcaatggccgatgtttcggagtcagtcgtcgttgggcaa

SEQ ID NO: 338305 - DNA, 75 bp, synthetic construct
  source 1..75: mol_type = other DNA
agtgcaaacggtgaaacaggcgcacaagccaacacgaccaatgaagatattgttatcccggcgaccaatcaggaa

SEQ ID NO: 338306 - DNA, 75 bp, synthetic construct
  source 1..75: mol_type = other DNA
tgaataatacttatcgctttgtgctgtggcgcgacgctaacaaagacggcattttccagcagtcggaaaaattga

SEQ ID NO: 338307 - DNA, 75 bp, synthetic construct
  source 1..75: mol_type = other DNA
gtgagcggaacctggtattttggtgccaatatggaatttattggtgcgacaatgcagcaaaccgttcatgccgaa

SEQ ID NO: 338308 - DNA, 75 bp, synthetic construct
  source 1..75: mol_type = other DNA
tgcgccgttgattcagtgggatgccacctccgcaacgctgaaagcgctcggctgtcacagtatcgaccgcgtgct

SEQ ID NO: 338309 - DNA, 75 bp, synthetic construct
  source 1..75: mol_type = other DNA
aaacgttaattgccgatgatgccttgcgggcgtcgttaaatggtcatctcgaacaagccgcgcaccgcgtcgcgc

SEQ ID NO: 338310 - DNA, 75 bp, synthetic construct
  source 1..75: mol_type = other DNA
gtggggatgcttccggcaccgaaaggtaagcgattcatcatgacagagcagcagacccttttatctcacggcgtg

SEQ ID NO: 338311 - DNA, 75 bp, synthetic construct
  source 1..75: mol_type = other DNA
agcactcgccgccatcaccgttaactacacgccttgcggtcactgccgccagtttatgaatgaactgaatagcgg

SEQ ID NO: 338312 - DNA, 75 bp, synthetic construct
  source 1..75: mol_type = other DNA
attcagtgggatgccacctccgcaacgctgaaagctctcggctgtcacaatatcgaccgcgtgcttctcgcttaa

SEQ ID NO: 338313 - DNA, 75 bp, synthetic construct
  source 1..75: mol_type = other DNA
acttgatgacccacgcgttctttaaagcgctgctgttcctagcatccggttccgtcattctggcctgccatcacg

SEQ ID NO: 338314 - DNA, 75 bp, synthetic construct
  source 1..75: mol_type = other DNA
ctggctgtacgacaaagtgttcgtcaagccgttcctgggtattgcctggttgctgaaacgcgatccgctgaactc

SEQ ID NO: 338315 - DNA, 75 bp, synthetic construct
  source 1..75: mol_type = other DNA
atgaacatgcttgccttaaccattattttgccattgattggcttcgtcctgctggcgttctcccgtgggcgctgg

SEQ ID NO: 338316 - DNA, 75 bp, synthetic construct
  source 1..75: mol_type = other DNA
cgccgcgttggtcagcatctgttgcagatcatgagcggttttctcgaactgaccgatgatgcgcgtattcagcgc

SEQ ID NO: 338317 - DNA, 75 bp, synthetic construct
  source 1..75: mol_type = other DNA
gtgcgcccaccgtccgtgacaggctgctgcatcgacggagcaccaaaccggaagccgaggccgatctggacatga

SEQ ID NO: 338318 - DNA, 75 bp, synthetic construct
  source 1..75: mol_type = other DNA
gcaagttcggcaagaaaagcaagggttatccgcaaaaccagcacaaaaaacagggtaaagccggagcacaaccgt

SEQ ID NO: 338319 - DNA, 75 bp, synthetic construct
  source 1..75: mol_type = other DNA
tcatcatgacagagcagcagacccttttatctcacggcgtggcgacggcttatgtggaaggcggcacgttgcgga

SEQ ID NO: 338320 - DNA, 75 bp, synthetic construct
  source 1..75: mol_type = other DNA
agcactggatgtccgtgctggcgcacagccaaccggctgaactggcagcccgcctgaacgcgctgaacatcaccg

SEQ ID NO: 338321 - DNA, 75 bp, synthetic construct
  source 1..75: mol_type = other DNA
agcactggatgtccgtactggcacacagccaaccggctgaactggcagcccgcctgaacgcgctgaacatcaccg

SEQ ID NO: 338322 - DNA, 75 bp, synthetic construct
  source 1..75: mol_type = other DNA
cccgctggacgctgaccgtatggcacgcattgccgcacgccaggccgaagtgaacgccagccgggtcgacttctt

SEQ ID NO: 338323 - DNA, 75 bp, synthetic construct
  source 1..75: mol_type = other DNA
caggcaccggtgaccaacggcgataacgtcacgacgattgccagcagtatcaaagatgccatcaatgccgttccg

SEQ ID NO: 338324 - DNA, 75 bp, synthetic construct
  source 1..75: mol_type = other DNA
gttgtggagcgtgatgccagcgatccgaaccgcctgaacacgctgttcccgcctgactatgttaaccagttgcgt

SEQ ID NO: 338325 - DNA, 75 bp, synthetic construct
  source 1..75: mol_type = other DNA
acgtcgcgacgattgccagcagtatccaggatgccatcaatgccgttccggccctgccgtttacggcctcatctt

SEQ ID NO: 338326 - DNA, 75 bp, synthetic construct
  source 1..75: mol_type = other DNA
tatatcggcctgccgttcaacgacacggcctccgttaacacgctggtgaccgagatgaacgataccagcggtcgc

SEQ ID NO: 338327 - DNA, 75 bp, synthetic construct
  source 1..75: mol_type = other DNA
ccatcaccgacgatcagcgtttgcaggtgttactgattggtttctcctttggtgcgctgctggaaggggcggctg

SEQ ID NO: 338328 - DNA, 75 bp, synthetic construct
  source 1..75: mol_type = other DNA
cgccagcaagcagctgacctggagtgatgtcaacgccagcaagcagctgacctggagtgatgtcaacgccagcaa

SEQ ID NO: 338329 - DNA, 75 bp, synthetic construct
  source 1..75: mol_type = other DNA
aacgctgtcagagctggttgatgccggagatatgcataatcagcaacatatcacgcttgccggttacgaaaaaga

SEQ ID NO: 338330 - DNA, 75 bp, synthetic construct
  source 1..75: mol_type = other DNA
tctgacgcggtgaattctttgcttgatgatatcagccgcgatcgtgcgcatcagatccgccatgcgtttgatcgc

SEQ ID NO: 338331 - DNA, 75 bp, synthetic construct
  source 1..75: mol_type = other DNA
ggctgaaagcggatatcaacagtgaagattctcgtgtgaaagaacgtatcgcgcgggcgggtcaatggtttggcg

SEQ ID NO: 338332 - DNA, 75 bp, synthetic construct
  source 1..75: mol_type = other DNA
ctgtcagagcatgacgaatttagagacaagtacgcgaaggcaactgaggcacgagctgattctattttcgaagag

SEQ ID NO: 338333 - DNA, 75 bp, synthetic construct
  source 1..75: mol_type = other DNA
tattggatctgatatcggcgggcttaatgctttcatttaccggcttggggtagcgaagccagtcaatttgatcgg

SEQ ID NO: 338334 - DNA, 75 bp, synthetic construct
  source 1..75: mol_type = other DNA
gcgtgacgctaacaaagacggcgtgttccagctatcagagaaattcactgaagaggagatgaaacagtatgacta

SEQ ID NO: 338335 - DNA, 75 bp, synthetic construct
  source 1..75: mol_type = other DNA
ggtggaaatcaccgttcagcaggatcgtaaaattgagctcatcgttaacaacatcgccaatgtaccggatgagaa

SEQ ID NO: 338336 - DNA, 75 bp, synthetic construct
  source 1..75: mol_type = other DNA
gcagcttggcggaaaaattgtcttcgaacaatattatgggaatgaagtcgcgctttttggtaccgatagtctgga

SEQ ID NO: 338337 - DNA, 75 bp, synthetic construct
  source 1..75: mol_type = other DNA
ggcgcaatcctatggtgcaaaagtggaagatggcttgcagggatacggtttacgcgtgctgtacaccaaaaaata

SEQ ID NO: 338338 - DNA, 75 bp, synthetic construct
  source 1..75: mol_type = other DNA
gtaaatggcaataccggtgcgcaaaccaataccacgaacgtcgatatagagattccggcaaccaacaaggacgcg

SEQ ID NO: 338339 - DNA, 75 bp, synthetic construct
  source 1..75: mol_type = other DNA
ctgtgcggctctgagacccagatgacagatgaaatccgcgagcggtatgaaaacaccgttcgttacctggaaaaa

SEQ ID NO: 338340 - DNA, 75 bp, synthetic construct
  source 1..75: mol_type = other DNA
cgctggccgccgccgcgctctggcgacgagactttttcggcaaaaacgccatttcgctgttactgctgctgccta

SEQ ID NO: 338341 - DNA, 75 bp, synthetic construct
  source 1..75: mol_type = other DNA
ctgattatcgccgcctatgcgtttaacactgaagatgcggcgtttagttttccaccgcaaggcctgacgctgcgc

SEQ ID NO: 338342 - DNA, 75 bp, synthetic construct
  source 1..75: mol_type = other DNA
aaggtaatcgacagaattccggcgtggtggaaatcaccgttcagcaggatcgcaaaattgagctcatcgttaaca

SEQ ID NO: 338343 - DNA, 75 bp, synthetic construct
  source 1..75: mol_type = other DNA
aaagtcaaatcacctcaaccgcacaatcttatattgaagacacactttctccctacggtaaggtccgttcgaacc

SEQ ID NO: 338344 - DNA, 75 bp, synthetic construct
  source 1..75: mol_type = other DNA
ggccgcctgaattcgctggggcatccccgtatcggtcttacagtcgccaagaaaaacgttcgacgcgcccatgaa

SEQ ID NO: 338345 - DNA, 75 bp, synthetic construct
  source 1..75: mol_type = other DNA
cgggagatggcttgcagggatacggtttacgcgtgctgtataccaaaaataagattggcgtaaggccagtcggcc

SEQ ID NO: 338346 - DNA, 75 bp, synthetic construct
  source 1..75: mol_type = other DNA
gccagtcgaaggagcggaagatgagcgagaagtgacctttctgtggcgcgcccgacatcctctgcagggcgtttg

SEQ ID NO: 338347 - DNA, 75 bp, synthetic construct
  source 1..75: mol_type = other DNA
aagctcccgccctgtcggaatggaacggcggcttccacaccggacaactgcttacctccatgcgcattatcgccg

SEQ ID NO: 338348 - DNA, 75 bp, synthetic construct
  source 1..75: mol_type = other DNA
gccagtcgaaggagcggaagatgaacgagaagtgacctttctgtggcgcgcccgacatcctctgcagggcgttta

SEQ ID NO: 338349 - DNA, 75 bp, synthetic construct
  source 1..75: mol_type = other DNA
cccgtaagtatggcgacaaggtaactaacgagcttgtcggcaaagacggcggcgcaatccagattgaaacatcac

SEQ ID NO: 338350 - DNA, 75 bp, synthetic construct
  source 1..75: mol_type = other DNA
cgctattcatacggcgggttgggtaagtctgtttaccctgcatgtaatctggccgtttctgtggatctgggcaac

SEQ ID NO: 338351 - DNA, 75 bp, synthetic construct
  source 1..75: mol_type = other DNA
tgtttgaaggcaaagtgattgagcctaaattatggccgctgaacatggccgcgttggttaaacgctggaaagaac

SEQ ID NO: 338352 - DNA, 75 bp, synthetic construct
  source 1..75: mol_type = other DNA
gtggaattattcagattcactaaagtaaaaattgcagaactgccaacgccggagcatgggcaggccgaatatggt

SEQ ID NO: 338353 - DNA, 75 bp, synthetic construct
  source 1..75: mol_type = other DNA
gtgaaattattcagattctctaaagtaaaaattgcagaactgccaacgccggaacatggacaggtcgaatatggt

SEQ ID NO: 338354 - DNA, 75 bp, synthetic construct
  source 1..75: mol_type = other DNA
acgaatcgttacctgatttaggtagccaggcagcacaacaggatgaacaaaccaacaagggtaaatcgctgaaag

SEQ ID NO: 338355 - DNA, 75 bp, synthetic construct
  source 1..75: mol_type = other DNA
aacggaaaatttattcgtgcaacgctggggcgttttcctgatctgagcgtggataatgcaagggctaaagctatg

SEQ ID NO: 338356 - DNA, 75 bp, synthetic construct
  source 1..75: mol_type = other DNA
gaactccttggagaggtcgccataacggggaaaaacccgaacatagcgaagcgcacgaacgacaaggccatgata

SEQ ID NO: 338357 - DNA, 75 bp, synthetic construct
  source 1..75: mol_type = other DNA
tgcgcaattgctttccgcactggagggcatgagtgatgatgaaaaacgtcgtttactatttgctatagtacaaga

SEQ ID NO: 338358 - DNA, 75 bp, synthetic construct
  source 1..75: mol_type = other DNA
ttttggctccagcttgttagatatggcggtggcgcaagagcagcaatcagggcgtcaggtatttatggatttcaa

SEQ ID NO: 338359 - DNA, 75 bp, synthetic construct
  source 1..75: mol_type = other DNA
gcgtcgggcagtatctggctggggataaaggcggcacgctggagatcgctaaacgctttgacagcggcgtggtgg

SEQ ID NO: 338360 - DNA, 75 bp, synthetic construct
  source 1..75: mol_type = other DNA
aacaactacgacaagtttaactacaccaatccgccgcaggactcgcacttaccgcgcgttcgtacccatgtgcgc

SEQ ID NO: 338361 - DNA, 75 bp, synthetic construct
  source 1..75: mol_type = other DNA
aatatcttggtctggaattgccggaagatcgctatggcgcaattctccgttatcagaccgaccatgacgaagccg

SEQ ID NO: 338362 - DNA, 75 bp, synthetic construct
  source 1..75: mol_type = other DNA
ttaccgttatgacgcgctgaatcgctacccgatgagcgatgtgctacgcccctttgaactggcggcgggcatgtg

SEQ ID NO: 338363 - DNA, 75 bp, synthetic construct
  source 1..75: mol_type = other DNA
atgtctcagccagcgaaagttttgctgctgtatgcccatcaggaatctcaggactcggtggcaaaccgggtactg

SEQ ID NO: 338364 - DNA, 75 bp, synthetic construct
  source 1..75: mol_type = other DNA
catgtaccaactgggcgtgatgggaacggcggatttgtggctgacggatcacctgctcaccaccggtagtctgtt

SEQ ID NO: 338365 - DNA, 75 bp, synthetic construct
  source 1..75: mol_type = other DNA
agcaggtgaaatatcgcgattcgcgcgaagggatcattcgtgccaatcggatcgtgatgaacgatctgccggatg

SEQ ID NO: 338366 - DNA, 75 bp, synthetic construct
  source 1..75: mol_type = other DNA
gcgatacctgaaccgcctgcgactgatgaaagcccgacatctgctacgcacagcgaggccagcgttactgacatc

SEQ ID NO: 338367 - DNA, 75 bp, synthetic construct
  source 1..75: mol_type = other DNA
tctgccggaggagtatggcccagccttcccagcaatcgtcgattgttataccagtccacccacgttagtgtggcc

SEQ ID NO: 338368 - DNA, 75 bp, synthetic construct
  source 1..75: mol_type = other DNA
ttgagcaaatatttgggccaattgcacaaattgagcaaggcagcgagacatgggcaagggcgagactcggagtta

SEQ ID NO: 338369 - DNA, 75 bp, synthetic construct
  source 1..75: mol_type = other DNA
tcacctcccgagactttatgaaattccgccttggcggttttgaagccatcaagtctgcgtacatggcccaggtgc

SEQ ID NO: 338370 - DNA, 75 bp, synthetic construct
  source 1..75: mol_type = other DNA
ccgtttacctcccgggatttcatgaaattccggctcggtggtttcgaggcaataaaatcagcttacatggcccag

SEQ ID NO: 338371 - DNA, 75 bp, synthetic construct
  source 1..75: mol_type = other DNA
gcccgttcacctcccgcgacttcatgaagttccgccttggcggtttcgaagccatcaagtctgcgtacatggccc

SEQ ID NO: 338372 - DNA, 75 bp, synthetic construct
  source 1..75: mol_type = other DNA
ttgcctgtgtctacgcctggctggcgcagttgttctcccgtgaactggacgatgaacaactgacgcaaatcgcca

SEQ ID NO: 338373 - DNA, 75 bp, synthetic construct
  source 1..75: mol_type = other DNA
cgtcaatggtggcagaaacgtcgtatcacggtaaatggcggcgaagcgcacgatcagcaagcgttagattatgcg

SEQ ID NO: 338374 - DNA, 75 bp, synthetic construct
  source 1..75: mol_type = other DNA
tgctttggctggctatgggcagcaaaacgttggggggctttgccctgcctgacggcgaatttgctggtgcaggct

SEQ ID NO: 338375 - DNA, 75 bp, synthetic construct
  source 1..75: mol_type = other DNA
aatgtattgttttatgtctcactggaaaagtttcctgttataatccttattatggagaatttcttggtattcctg

SEQ ID NO: 338376 - DNA, 75 bp, synthetic construct
  source 1..75: mol_type = other DNA
ggggatgaaagtttcattgctcatgaaggcatggcgctacttctggagacggcaaagttctggattagccgcgcg

SEQ ID NO: 338377 - DNA, 75 bp, synthetic construct
  source 1..75: mol_type = other DNA
gcagggctttatcatcgagctgggaaaggtgaaatcaacgaactggtgaacctgcctgatgtcgtggggatggag

SEQ ID NO: 338378 - DNA, 75 bp, synthetic construct
  source 1..75: mol_type = other DNA
gacctgccgttctcattagatcgactggacgacgacgttcgcgcgtatctggaaaataacgacgctctggcacca

SEQ ID NO: 338379 - DNA, 75 bp, synthetic construct
  source 1..75: mol_type = other DNA
aatatcttggtctggaattaccggaagatcgctatggcgcgattcttcgttatcaaaccgaccacgacgaagccg

SEQ ID NO: 338380 - DNA, 75 bp, synthetic construct
  source 1..75: mol_type = other DNA
atacgtggattaatgtaccgcccgcagaagaaaagaattacgcctggggatatcgcgaaggtaaggcagtgcatg

SEQ ID NO: 338381 - DNA, 75 bp, synthetic construct
  source 1..75: mol_type = other DNA
gtaaatcaaccgtgtgtttttggtaaacttgcatgtaagaaaatcaaaggccttgattttcacttatcaataata

SEQ ID NO: 338382 - DNA, 75 bp, synthetic construct
  source 1..75: mol_type = other DNA
tacctcaaggttaatggtgaaagtgctgttggaagaagtacagcgcctcgccattccagtgttgaccagtgcaac

SEQ ID NO: 338383 - DNA, 75 bp, synthetic construct
  source 1..75: mol_type = other DNA
ccgaagtaaagtctttacgtatgcaaccgtgtattaacggtatttactttgaaaaaaactggccagactttttaa

SEQ ID NO: 338384 - DNA, 75 bp, synthetic construct
  source 1..75: mol_type = other DNA
atactggacgagtagaagatattgaactagatcgtgaggttagagccggagatagactctcgcttaatattgatg

SEQ ID NO: 338385 - DNA, 75 bp, synthetic construct
  source 1..75: mol_type = other DNA
actgaatccccgatcatctatcgtgacgagactatgcgcaccgcctgctctccagatggtttatgcaatgacggc

SEQ ID NO: 338386 - DNA, 75 bp, synthetic construct
  source 1..75: mol_type = other DNA
ggctgaagcaagagatcagttttatgcagcataccctccacctcagcagcagaaagaagaaccatcattgatgca

SEQ ID NO: 338387 - DNA, 75 bp, synthetic construct
  source 1..75: mol_type = other DNA
ggctgaagcagcgtttggtagagaccttgcaactgatcagttggtaactaatggctctaaggcgttgcagggttc

SEQ ID NO: 338388 - DNA, 75 bp, synthetic construct
  source 1..75: mol_type = other DNA
gatgaacaactgacgcaaatcgccagtgcgcagatggctgaatggttttcgttgctgaaaagtgaaccgccgctc

SEQ ID NO: 338389 - DNA, 75 bp, synthetic construct
  source 1..75: mol_type = other DNA
ttatgcatcggcctacaaacaggacgagcaagagattaaacgcttgttagttgaggcagggatggaaaccagcgg

SEQ ID NO: 338390 - DNA, 75 bp, synthetic construct
  source 1..75: mol_type = other DNA
atgactcctgacattatcctgcaacgtacaggaatcgacgtgagaactgttaaacaaggggatgatgcgtggcac

SEQ ID NO: 338391 - DNA, 75 bp, synthetic construct
  source 1..75: mol_type = other DNA
ccggtttatccaacgtcacatcaacagtgttaaatgcaattgccaactcaacatcaggtgccattgttggtggag

SEQ ID NO: 338392 - DNA, 75 bp, synthetic construct
  source 1..75: mol_type = other DNA
cggcgtctgcggattcagcaaatattgaacaagctttcaaagcactatgtacagaactcaatgcgcaaggcagta

SEQ ID NO: 338393 - DNA, 75 bp, synthetic construct
  source 1..75: mol_type = other DNA
ttgacactgtcatcgcaacattatctggtgatcactgcgctgggtgccgatcgccctggaattgtgaacaccatc

SEQ ID NO: 338394 - DNA, 75 bp, synthetic construct
  source 1..75: mol_type = other DNA
catgctgctttccggttcatggaatgccattactctgattgaatcaacgttaccgttgaaaggtgccgagctgga

SEQ ID NO: 338395 - DNA, 75 bp, synthetic construct
  source 1..75: mol_type = other DNA
gggttaaaaggtgctgtatctaaaattgccaccacgcgtagcggtcgatatgcgatagagaaagcagttcaggaa

SEQ ID NO: 338396 - DNA, 75 bp, synthetic construct
  source 1..75: mol_type = other DNA
atggcctatagtcgcgaacagttgatgacggcgttaaggaatgctgatgctgccggagatactgagggagcacgt

SEQ ID NO: 338397 - DNA, 75 bp, synthetic construct
  source 1..75: mol_type = other DNA
ttttggctccagcttgttagatatggcagtagcgcaagagcagcaatcagggcgtcaggtatttatggatttcaa

SEQ ID NO: 338398 - DNA, 75 bp, synthetic construct
  source 1..75: mol_type = other DNA
cagcaaaccggcttttctgagctgcctgccagtacatctattctggtactcaatgcagtagatgaagagcggagc

SEQ ID NO: 338399 - DNA, 75 bp, synthetic construct
  source 1..75: mol_type = other DNA
atgatccctaatctgaatgaactgacggatactccgattgcccgaaccaatttgatcaagcttgaagaagatcag

SEQ ID NO: 338400 - DNA, 75 bp, synthetic construct
  source 1..75: mol_type = other DNA
tcgatgcgctgacgcacgtcactttcccgaagggttttgtgtcagcagagccaacgtcaattgtcacggtggacg

SEQ ID NO: 338401 - DNA, 75 bp, synthetic construct
  source 1..75: mol_type = other DNA
gcggtagcgcaggaacaacaacgtggtcgccaggtttttatggatttcaatcgcaatcctgaaacagtgctaggt

SEQ ID NO: 338402 - DNA, 75 bp, synthetic construct
  source 1..75: mol_type = other DNA
tcaggcgcacgataacgggaccgggatgccgttgtcggttgtgagagaaaaaattcaggcacgaatgtctgacca

SEQ ID NO: 338403 - DNA, 75 bp, synthetic construct
  source 1..75: mol_type = other DNA
tttcagcgaaaactattgatgccataaacgttatcgggcagtggctggcacaggatgatttctccaatgaggctc

SEQ ID NO: 338404 - DNA, 75 bp, synthetic construct
  source 1..75: mol_type = other DNA
atcgacgccgcttgcaagattgcccgagatcagcaaattccgttactgattagcggtggtatcggtcactcgaca

SEQ ID NO: 338405 - DNA, 75 bp, synthetic construct
  source 1..75: mol_type = other DNA
agtcacccaggcctggcagacgctgaaacacgacgctgtgcttattgaagcgatggaaagtcgttcactacgtta

SEQ ID NO: 338406 - DNA, 75 bp, synthetic construct
  source 1..75: mol_type = other DNA
atgatcgaagcctacaaaatacttattaataacgcgttgcagcgttaccactttgaactcgcaaacaggggcgta

SEQ ID NO: 338407 - DNA, 75 bp, synthetic construct
  source 1..75: mol_type = other DNA
aggatcgtattgttgggctgactggtattagtggctggtacaaaatgacgccggaatttaaaaaggcgatgggct

SEQ ID NO: 338408 - DNA, 75 bp, synthetic construct
  source 1..75: mol_type = other DNA
cagaaatgataatgataaaataacatttacatggcctcttgaaacggtcaggtatgacagttcgatactcgacgt

SEQ ID NO: 338409 - DNA, 75 bp, synthetic construct
  source 1..75: mol_type = other DNA
ccataccactactgaccagtgcaacggtgattaagctcctgcatcagcacggagagaatggcgaagatcgcgttg

SEQ ID NO: 338410 - DNA, 75 bp, synthetic construct
  source 1..75: mol_type = other DNA
acgaatgtattctggtcggcgcattgtttttagttgtccatatggtcatcggcaatattttagagccacggatga

SEQ ID NO: 338411 - DNA, 75 bp, synthetic construct
  source 1..75: mol_type = other DNA
tgtggtggtggtgatgctgatcgcactaaccgcgctggtcggcgtactggcggcatcgtttaacgaatttatctc

SEQ ID NO: 338412 - DNA, 75 bp, synthetic construct
  source 1..75: mol_type = other DNA
acgacaattgaatgaaaattccttcgcaataacgacatcgttagccgcaagtgaaatcgaagatttaatcaggct

SEQ ID NO: 338413 - DNA, 75 bp, synthetic construct
  source 1..75: mol_type = other DNA
atgtcagatttggctatgaaggttttgaaatggcaatcgactggcgatgttggcatcagtagcgcaactcttgcc

SEQ ID NO: 338414 - DNA, 75 bp, synthetic construct
  source 1..75: mol_type = other DNA
agcgaagttcgtcgagcggctggcacactactattgtgaaattaacgtcctgcatcccttccgtgcgggaagtgg

SEQ ID NO: 338415 - DNA, 75 bp, synthetic construct
  source 1..75: mol_type = other DNA
gttatctggttggcctggagaaagcgaagttcgtcgagcggctggcgcattactattgtgaaatcaacgtgctgc

SEQ ID NO: 338416 - DNA, 75 bp, synthetic construct
  source 1..75: mol_type = other DNA
gctgaaaatggtgtttttgaaggtcagaaagagatcttcgtcacccaaccaggtttgtatcgagtcatgtcgagt

SEQ ID NO: 338417 - DNA, 75 bp, synthetic construct
  source 1..75: mol_type = other DNA
aacttaaacgccgccagcaaaatgtgttaatcgccaccgccgggttatatatggggacatcggcatgttctggct

SEQ ID NO: 338418 - DNA, 75 bp, synthetic construct
  source 1..75: mol_type = other DNA
acaacacggtttaaccatcaatcacgcaggcgaaattgccgaactgtttatgtggcggcatatgacgctgacttc

SEQ ID NO: 338419 - DNA, 75 bp, synthetic construct
  source 1..75: mol_type = other DNA
cagtaacacctgggcgcggatgcgcggtatttttgctgcagagcgtattgccgctgacacggtaaaaatcttcca

SEQ ID NO: 338420 - DNA, 75 bp, synthetic construct
  source 1..75: mol_type = other DNA
actgtaaaatcgatggcggggataatcagagcacaattacaggctcttgaccctgatgagtatattaccacggat

SEQ ID NO: 338421 - DNA, 75 bp, synthetic construct
  source 1..75: mol_type = other DNA
tatgcgcagatttatcaactggagcagcagtcgcagtcggagctggatgttcgccagttgcgggcaaagaaattt

SEQ ID NO: 338422 - DNA, 75 bp, synthetic construct
  source 1..75: mol_type = other DNA
cacgtgctgaagggtttccattagctttgcttgaagcaatgagatttggtttaccatgtatagcttctgatattg

SEQ ID NO: 338423 - DNA, 75 bp, synthetic construct
  source 1..75: mol_type = other DNA
ctagggataaaatgcactggggaccatatggtcaccttgtgcgggaggtccatcttcatgcacgtaaactctggc

SEQ ID NO: 338424 - DNA, 75 bp, synthetic construct
  source 1..75: mol_type = other DNA
agtacagcatgtgggtgaccggaaaagacgcatggttctttgcaaactacgacccgcgcatgaaacgcgaaggca

SEQ ID NO: 338425 - DNA, 75 bp, synthetic construct
  source 1..75: mol_type = other DNA
gacccacgaatgaagcgagaaggcattcaccatgtggtcgttgagcgggatccgcagtacatgtccgacttcaac

SEQ ID NO: 338426 - DNA, 75 bp, synthetic construct
  source 1..75: mol_type = other DNA
aaaacatactgcccgactgaaaaatctcggcgttgaggaagttgtcgccaaagttttcgatgtcaatgagccact

SEQ ID NO: 338427 - DNA, 75 bp, synthetic construct
  source 1..75: mol_type = other DNA
ttgtgttccgtggtgttccagaaggcatgaatctggggcagggggttaagtctattcaggctctggcggccaaaa

SEQ ID NO: 338428 - DNA, 75 bp, synthetic construct
  source 1..75: mol_type = other DNA
ccgtaagcaggctgaaaaaggcatctactccgaccatcggatattggttttcgcgtctttgtcgcttggcgaaca

SEQ ID NO: 338429 - DNA, 75 bp, synthetic construct
  source 1..75: mol_type = other DNA
gtgaacggctacgcctttggcggcggctttgaactggcgctggcggcagattttattgtctgtgccgataacgcc

SEQ ID NO: 338430 - DNA, 75 bp, synthetic construct
  source 1..75: mol_type = other DNA
agatctaccgcaccaccagcgaaatgccggtagaagaagcgtatcgctatattcgcagcggcgtgttgaaacact

SEQ ID NO: 338431 - DNA, 75 bp, synthetic construct
  source 1..75: mol_type = other DNA
gtgaaaagaaccacgaagccggtgggatctatcttttttactgatgaaaaaagcgcccttgcctatctggaaaaa

SEQ ID NO: 338432 - DNA, 75 bp, synthetic construct
  source 1..75: mol_type = other DNA
cgattcattttgtccagtgttcactggaagaggcactgaaagcgcggcaagatcagcaacgttattttgaacaat

SEQ ID NO: 338433 - DNA, 75 bp, synthetic construct
  source 1..75: mol_type = other DNA
atcagccattgcggtgcgctggatatgcccgcgttacgcattgcgaatctgctggtcggtaatgatgccaacgca

SEQ ID NO: 338434 - DNA, 75 bp, synthetic construct
  source 1..75: mol_type = other DNA
actgggccgaccgggtcgctaaacgcatgttcctgcaggttgagcaggaggagtggagccagtggcgctcggtat

SEQ ID NO: 338435 - DNA, 75 bp, synthetic construct
  source 1..75: mol_type = other DNA
agtggaatcagtggcgttctgtttcggaagaaatatctgctggtctgcgtgacgtgattagtaacactccagtcg

SEQ ID NO: 338436 - DNA, 75 bp, synthetic construct
  source 1..75: mol_type = other DNA
tctcacggcttgctgccgggcgtggtgcaggtgccgcataacggtcagccgattgtgttgatgaatgatgcacag

SEQ ID NO: 338437 - DNA, 75 bp, synthetic construct
  source 1..75: mol_type = other DNA
atcgcttacaggggcaaattttaaaacgcaccaccgatcgcgaactgttatctcacggtttgttgccgggtgtgg

SEQ ID NO: 338438 - DNA, 75 bp, synthetic construct
  source 1..75: mol_type = other DNA
agccgaaaaatgcttgtcgatatcgaccgcaaagaacgagcagaggagatcttagtatggattttctttggcgcg

SEQ ID NO: 338439 - DNA, 75 bp, synthetic construct
  source 1..75: mol_type = other DNA
ctgcaacatttcttcgatgtggatattcacccttccaggtgatttctatagaaaaaaagccagacattgatacaa

SEQ ID NO: 338440 - DNA, 75 bp, synthetic construct
  source 1..75: mol_type = other DNA
ctgccgctggaagcagccgatcgcgtgatggacatacaacagcgcgcaatgcaggcggttatcagtggcgaacgt

SEQ ID NO: 338441 - DNA, 75 bp, synthetic construct
  source 1..75: mol_type = other DNA
aatggggcaaacctccaacgcttgatggcatgaccggtcacgctggagagctcccgaattgtcgctgttataaag

SEQ ID NO: 338442 - DNA, 75 bp, synthetic construct
  source 1..75: mol_type = other DNA
tcgccgaacaggtcaagtacatcaaatcgctccccctcgaggcggctgacagggtgtacgacatccagaatcggg

SEQ ID NO: 338443 - DNA, 75 bp, synthetic construct
  source 1..75: mol_type = other DNA
cgggaaatggaaggtaaatttgtcgaatggggcaaacctccaacgcttgatggcatgaccggtcacgctggcgag

SEQ ID NO: 338444 - DNA, 75 bp, synthetic construct
  source 1..75: mol_type = other DNA
atggcaaaacatggtgactatgatgttgactggggaactgacctcttcaacgaaatggcaaggcaagcgcgtggt

SEQ ID NO: 338445 - DNA, 75 bp, synthetic construct
  source 1..75: mol_type = other DNA
tttggcgattccagcagaaatcggagcgttgattaggcactatatcgagagagcgcaactaaaacctgatggcaa

SEQ ID NO: 338446 - DNA, 75 bp, synthetic construct
  source 1..75: mol_type = other DNA
tcctggtgtactccatgcctggtctttagcaactaatcattgcataacccaacctgctttcacgtttacggtgtt

SEQ ID NO: 338447 - DNA, 75 bp, synthetic construct
  source 1..75: mol_type = other DNA
aaaagtgctgctggcgctggaacactggcaggccgcaccggagccggagaacaccgccccggagatgagcgacac

SEQ ID NO: 338448 - DNA, 75 bp, synthetic construct
  source 1..75: mol_type = other DNA
accgacagcggtgtggtgttcgcggatgcggtggatatgatgagcgcccgcagtcgcggcggttatgcgcgggcc

SEQ ID NO: 338449 - DNA, 75 bp, synthetic construct
  source 1..75: mol_type = other DNA
aatatccttgacccatttgaaaagaacatgatcagcaaaggtctttttgaaatggctgccgctatctcacgaggc

SEQ ID NO: 338450 - DNA, 75 bp, synthetic construct
  source 1..75: mol_type = other DNA
tttttgagttgcgtacgctgcctcatcaacaactgcaacataataaaacctggcgccacgttaaaaatgaacgca

SEQ ID NO: 338451 - DNA, 75 bp, synthetic construct
  source 1..75: mol_type = other DNA
catcgttcagtgatatgctgtccggcttcaaagataaggtcacatcatcccttaacagcgcggccagttcagtta

SEQ ID NO: 338452 - DNA, 75 bp, synthetic construct
  source 1..75: mol_type = other DNA
catcgttcagcgatatgctgactggcttcaaagataaggtaacctcgtctttaaatagcgtggctaactcagttc

SEQ ID NO: 338453 - DNA, 75 bp, synthetic construct
  source 1..75: mol_type = other DNA
tttatcgtaatgccattgccatccgatgttattctgatcaccaaagaatcgcatgcggattcggtcagtcacttc

SEQ ID NO: 338454 - DNA, 75 bp, synthetic construct
  source 1..75: mol_type = other DNA
tgctttctttaccaggtcactacgaagtgataacgctcgaaaatggggagtttatcgtaacgccattacctcctg

SEQ ID NO: 338455 - DNA, 75 bp, synthetic construct
  source 1..75: mol_type = other DNA
acgttgtccggtgtgctttatcccgaaattaccggcggtgaggtttccctcagccttttaacgacgcaggcttac

SEQ ID NO: 338456 - DNA, 75 bp, synthetic construct
  source 1..75: mol_type = other DNA
cgccatgaccgggcagagcctgttctacctcggcgaaaccaacctgcaacacaagatcctcgccatcgcggaaga

SEQ ID NO: 338457 - DNA, 75 bp, synthetic construct
  source 1..75: mol_type = other DNA
tacgcgcagacgctggaaggactgctggcgtcgaatgaaaaaagttacatcaccgcgctgcaccagaacgcgcag

SEQ ID NO: 338458 - DNA, 75 bp, synthetic construct
  source 1..75: mol_type = other DNA
cggtgaacgagtcgcgggaacagacggaagcgatccatgcggcgcagcgttacgcgcagacgctggaaggactgc

SEQ ID NO: 338459 - DNA, 75 bp, synthetic construct
  source 1..75: mol_type = other DNA
ttcttgcctgtggagggatggtgcagtcaggccgcccgttgaagcaggaacccaccgaaatgattcaggcgacag

SEQ ID NO: 338460 - DNA, 75 bp, synthetic construct
  source 1..75: mol_type = other DNA
tgttcgcggatgcggtggatatgatgagcgcccgcagtcgcggcggttatgcgcgggccgcagccgcagagcttg

SEQ ID NO: 338461 - DNA, 75 bp, synthetic construct
  source 1..75: mol_type = other DNA
cattagctgccggggttgcgaccttacccgcagccgccgcgcctgcaccgggcgtcagcgtggaagcgttgccgg

SEQ ID NO: 338462 - DNA, 75 bp, synthetic construct
  source 1..75: mol_type = other DNA
ggcggcagccggggccacctgctgcaatacgagttgctgtgggacggcagcggcgacggctcgcacctgtgcggc

SEQ ID NO: 338463 - DNA, 75 bp, synthetic construct
  source 1..75: mol_type = other DNA
atgagcgacaagacgcgcacccggcgcgaccatatgaaatatctgacgctgatccaggcgatcgcgctgttgcac

SEQ ID NO: 338464 - DNA, 75 bp, synthetic construct
  source 1..75: mol_type = other DNA
gccatcgacgttgacgaggagttactcaaccgctgtctggtgctgacggtgaacgagtcgtgggaacagacggag

SEQ ID NO: 338465 - DNA, 75 bp, synthetic construct
  source 1..75: mol_type = other DNA
gctgggcgataatcccgccgtggtgccgctggtgacgaaagatgaaccggaaatcttcgcggaagatgaagcggg

SEQ ID NO: 338466 - DNA, 75 bp, synthetic construct
  source 1..75: mol_type = other DNA
gacggtaacgcagacgccgcgcacctgtgcgggctgatcgacgtaccggaaacgccgtatgacgtcgcccggtcg

SEQ ID NO: 338467 - DNA, 75 bp, synthetic construct
  source 1..75: mol_type = other DNA
agaagaaggtgtgcgccaggcagcgtatgcgctcaagctgttgcagtcggacggggaactgaccatcgccagtac

SEQ ID NO: 338468 - DNA, 75 bp, synthetic construct
  source 1..75: mol_type = other DNA
tcgaaccggaggataatcaggtgcatgactccggcaagttggggcatgatgcaggcaagttgcccttaagttgcc

SEQ ID NO: 338469 - DNA, 75 bp, synthetic construct
  source 1..75: mol_type = other DNA
accgtttacgtattggcatgcgtctgcagaccgacccgacggtgatttacgggatgggagagcgttataatggca

SEQ ID NO: 338470 - DNA, 75 bp, synthetic construct
  source 1..75: mol_type = other DNA
atcaagcttttatcgcagtagcccgggaaaaaagcttcacaaaagcggccgctcagttaggtgtctcacagtcgg

SEQ ID NO: 338471 - DNA, 75 bp, synthetic construct
  source 1..75: mol_type = other DNA
ggagacgccggaagctgtggccgagcgtctgactaaggccgtgcgcaaagggtatgacccggcattgattgcggc

SEQ ID NO: 338472 - DNA, 75 bp, synthetic construct
  source 1..75: mol_type = other DNA
caattgcaatgaccatgactgcaggttctgcaatggctgccttgggtgacaaaggttctcatggcgaggttcagt

SEQ ID NO: 338473 - DNA, 75 bp, synthetic construct
  source 1..75: mol_type = other DNA
taccggagaaatccacagcttaaagcctaacaataatagtactattcagccgatagctttgttgcggcttggggt

SEQ ID NO: 338474 - DNA, 75 bp, synthetic construct
  source 1..75: mol_type = other DNA
ctcacaaactacaaaatcatcgctgcatcaatatgcgtctgccaactgccggtggactttatcactgggagtttg

SEQ ID NO: 338475 - DNA, 75 bp, synthetic construct
  source 1..75: mol_type = other DNA
gttgaacacgccgccgatacaattctctggcctaaacttgccccggtgatgcttgagtatcccgatatcaacatt

SEQ ID NO: 338476 - DNA, 75 bp, synthetic construct
  source 1..75: mol_type = other DNA
tgattaccgcgctggcgatgtttctcgccgggtgtgtggggcaacgtgaacctgcaccggtagaagaagtgaaac

SEQ ID NO: 338477 - DNA, 75 bp, synthetic construct
  source 1..75: mol_type = other DNA
aatggtgtgattgagcgggcccgtgccggtatcgatgaggccatcagccgtgagcagctgattcccctcgaccgt

SEQ ID NO: 338478 - DNA, 75 bp, synthetic construct
  source 1..75: mol_type = other DNA
ggaggccgtcggggaagacgcctcgctgaaatcccgggatgtggcggcgctggatacgcgtaaatccaaacagca

SEQ ID NO: 338479 - DNA, 75 bp, synthetic construct
  source 1..75: mol_type = other DNA
tggcttaaagattcgccctcacagccattgcaacagtcactgaaagaccttgagcgggcttacaaaaacttcttc

SEQ ID NO: 338480 - DNA, 75 bp, synthetic construct
  source 1..75: mol_type = other DNA
acgttaacgctccgaccctacaaatgcagctgatgctggtgcagacgggcgaaattatctggtcaggtaaaggtg

SEQ ID NO: 338481 - DNA, 75 bp, synthetic construct
  source 1..75: mol_type = other DNA
aatttaccctggtttccgcccagcagctgtcgatggctaagcaacagttaggtttgtcgccgcaggacagtttag

SEQ ID NO: 338482 - DNA, 75 bp, synthetic construct
  source 1..75: mol_type = other DNA
tggataggcattacatctgcattgtttgactataaaccagataatgatggtgtgatcaccctgacattctctgaa

SEQ ID NO: 338483 - DNA, 75 bp, synthetic construct
  source 1..75: mol_type = other DNA
gatggtcgccatggatcttggacatggtgatggccgtggccgttatatccagcgggtatatggagaacagacgga

SEQ ID NO: 338484 - DNA, 75 bp, synthetic construct
  source 1..75: mol_type = other DNA
aaaaactcgccctgctggctggcggcagttttaaaaccatccatgaccgtatccgcattgccggacgtttaagcc

SEQ ID NO: 338485 - DNA, 75 bp, synthetic construct
  source 1..75: mol_type = other DNA
gtatgtactgactgaaacgaatacgacccgttcgagtttgatcgctacggcaaggcgaaaaaagatagagttttc

SEQ ID NO: 338486 - DNA, 75 bp, synthetic construct
  source 1..75: mol_type = other DNA
cggagtggattgaaggttggttctggccagacacctggatgtataccgccaataccaccgatgtcgcgttactca

SEQ ID NO: 338487 - DNA, 75 bp, synthetic construct
  source 1..75: mol_type = other DNA
agaaaccgccgttgccagtgaacgcgatcaagttgcctcggtatttatcaaccgtttacgcattggtatgcgcct

SEQ ID NO: 338488 - DNA, 75 bp, synthetic construct
  source 1..75: mol_type = other DNA
acaggacgaccctggcctttgattgatggcgtcgggcagatttacggcatgtatgtcctgactggaacgaatacg

SEQ ID NO: 338489 - DNA, 75 bp, synthetic construct
  source 1..75: mol_type = other DNA
atgtggacctgctgacagaggcaaagtcgtttgctgcagaaggaaccagttttgctgacctggggcgggaaatcg

SEQ ID NO: 338490 - DNA, 75 bp, synthetic construct
  source 1..75: mol_type = other DNA
tccccgtgtcgtggggctgggcccctgcggtcggggagatgcgcagcgccggcgtggatgcacagacactggcgt

SEQ ID NO: 338491 - DNA, 75 bp, synthetic construct
  source 1..75: mol_type = other DNA
cgatcctgaagtcagaatggctgaatggatgcagacgctgaaggaaaccgggttcgacatccgggcatatcgtga

SEQ ID NO: 338492 - DNA, 75 bp, synthetic construct
  source 1..75: mol_type = other DNA
gcgtcaacggtacgctggttggtggttgtattggattgatactgtatcttttatcgcaaatcccgactttgttac

SEQ ID NO: 338493 - DNA, 75 bp, synthetic construct
  source 1..75: mol_type = other DNA
gcgcgccgacaatatcaaagcgtatctgaaagaagatgaagcgtttaaccgctatctcggtgaattgtgggggga

SEQ ID NO: 338494 - DNA, 75 bp, synthetic construct
  source 1..75: mol_type = other DNA
gagagaatttgccagtgcgccagccggaaccaataaactgctgctgaccatgtttatttcatacattgtgggtat

SEQ ID NO: 338495 - DNA, 75 bp, synthetic construct
  source 1..75: mol_type = other DNA
ctgcaggcggaattgtcggcagtttgtcacaatcacaactgggagacctgggcgaaaagctagtcaattcgcaat

SEQ ID NO: 338496 - DNA, 75 bp, synthetic construct
  source 1..75: mol_type = other DNA
atgcttaattacgttatcaaacgcttactgggactgattccaacgctgtttattgtctcagtgctggtgtttttg

SEQ ID NO: 338497 - DNA, 75 bp, synthetic construct
  source 1..75: mol_type = other DNA
tacatcaggttaattcacttcagcgccgggatggtttttaccgtggttttgctgatgcggatctactgggctttt

SEQ ID NO: 338498 - DNA, 75 bp, synthetic construct
  source 1..75: mol_type = other DNA
tggcggtgttatgcgaggcttattttcagccggatatgcaaagtaacattactgctttagtagatatcgaggcta

SEQ ID NO: 338499 - DNA, 75 bp, synthetic construct
  source 1..75: mol_type = other DNA
tccgtgattctgagcaggccattcgtaaacaggtgattgaatcggacattattgaagcggtgattggtttgggac

SEQ ID NO: 338500 - DNA, 75 bp, synthetic construct
  source 1..75: mol_type = other DNA
aatacgctaaacgtctgacgacaatttctcgcgcgttaggcgataacatcaacggtcagccggtgaattacaaag

SEQ ID NO: 338501 - DNA, 75 bp, synthetic construct
  source 1..75: mol_type = other DNA
aacgatgtggagcgcagatctctgctcaatgcagttatggcaattacagcggtaaaagaacgttctgtcgtatct

SEQ ID NO: 338502 - DNA, 75 bp, synthetic construct
  source 1..75: mol_type = other DNA
agtaacaaaatacgatgtgacattttcctatgatccgtgtgaggttattcgttacatcggccagataggggagat

SEQ ID NO: 338503 - DNA, 75 bp, synthetic construct
  source 1..75: mol_type = other DNA
tactggaaacgcgttatggcactcactgatgttttgcctatcatgtcggatgccaaacgtaacgaatgggataag

SEQ ID NO: 338504 - DNA, 75 bp, synthetic construct
  source 1..75: mol_type = other DNA
atgagacgttccggcggcacactgtatcttatcgccctgctgacagcggcaacggtcctgacagcctgcacgcca

SEQ ID NO: 338505 - DNA, 75 bp, synthetic construct
  source 1..75: mol_type = other DNA
cccgtgcgacgtccagttccagtttttgcagtgcagtagcattattcgcattaccgacaaagcgttacgtgaaga

SEQ ID NO: 338506 - DNA, 75 bp, synthetic construct
  source 1..75: mol_type = other DNA
ttgtctaattcgtcagattctgaccagacggttcaggctgtacgcttacaaatgctgaacgatgtggagcgcaga

SEQ ID NO: 338507 - DNA, 75 bp, synthetic construct
  source 1..75: mol_type = other DNA
attgaagcagtgattgggctgggaccaaatctgttttacaactcgccgatggaatcttgtgtggtggtgcttaat

SEQ ID NO: 338508 - DNA, 75 bp, synthetic construct
  source 1..75: mol_type = other DNA
tatctctcttggtgttgaaaaggtatcgataagttcagcggccgttgaaaatccaaatattgtaaaagatttggc

SEQ ID NO: 338509 - DNA, 75 bp, synthetic construct
  source 1..75: mol_type = other DNA
gtttacttgtccacgattctggcttagtcaaaacagttaatttcaaatcaccgaagtatgttggtgatccaatta

SEQ ID NO: 338510 - DNA, 75 bp, synthetic construct
  source 1..75: mol_type = other DNA
acttccctgacggacataaatgctctggcttacgggcgcggccccggtagctttactggcgtgcgcattggtatt

SEQ ID NO: 338511 - DNA, 75 bp, synthetic construct
  source 1..75: mol_type = other DNA
tctggtgttatctcatggggtcaggcaaaacttgttcatgctaacgatacctatgagtcaaacgggcttgataaa

SEQ ID NO: 338512 - DNA, 75 bp, synthetic construct
  source 1..75: mol_type = other DNA
ccgcacaaatcagaggaagatatccgcgaagatgaacggaaacgccagcaggaaataatggaaaaagcacaactt

SEQ ID NO: 338513 - DNA, 75 bp, synthetic construct
  source 1..75: mol_type = other DNA
tctggaatgaaattgcagcagaacgtacaagccatttacgcagaatgcaaagcgaaactggaggttgccagtgag

SEQ ID NO: 338514 - DNA, 75 bp, synthetic construct
  source 1..75: mol_type = other DNA
gccccaccgggaatgaaagtgaatgtcgtaaatatcgaaaaagccgtcgcggtttaccataacccacaatataaa

SEQ ID NO: 338515 - DNA, 75 bp, synthetic construct
  source 1..75: mol_type = other DNA
atcaatattatcgacaaaataggtgatgactccaacttactgatagtgttttatgttcagataatgcccgatgac

SEQ ID NO: 338516 - DNA, 75 bp, synthetic construct
  source 1..75: mol_type = other DNA
aacatgcaattgaggcatggaaagtaagtcgcactcaactaaaaaaacaaactaataaattattccaaagccttg

SEQ ID NO: 338517 - DNA, 75 bp, synthetic construct
  source 1..75: mol_type = other DNA
aatgggtgacggtaggtacaggctggcaagcctggccggatctcggtaaagagagcgggctggttttgcgcgacg

SEQ ID NO: 338518 - DNA, 75 bp, synthetic construct
  source 1..75: mol_type = other DNA
tttaaccaaagtggttgtgcgtattcctgtgatcccaggagtgaatgacaattcgcaggaaatccataatattgc

SEQ ID NO: 338519 - DNA, 75 bp, synthetic construct
  source 1..75: mol_type = other DNA
aagaacttacagaagaagttgaaattgaaggcattaaaaaatcagatggaaagctgacagtaacttgcaaaaagg

SEQ ID NO: 338520 - DNA, 75 bp, synthetic construct
  source 1..75: mol_type = other DNA
acttttagcttttttggaaataaaactattactacaggtgaaggtggaatggttgtcacgaatgacaaaacactt

SEQ ID NO: 338521 - DNA, 75 bp, synthetic construct
  source 1..75: mol_type = other DNA
ggtgatatctggcgcggtatttatgggcaagataactggctgtctaatccgtgggtatgggtaattgagtttaag

SEQ ID NO: 338522 - DNA, 75 bp, synthetic construct
  source 1..75: mol_type = other DNA
gtgagcaaggtgaaagagcgcggcatgatttttaatgatgagatggtccgggccatcctcgaaggcaggaagacg

SEQ ID NO: 338523 - DNA, 75 bp, synthetic construct
  source 1..75: mol_type = other DNA
tggcgcagtatttacgggcaggataactggctatctaacccgtgggtatgggtaatcgagtttaagcgcgttcag

SEQ ID NO: 338524 - DNA, 75 bp, synthetic construct
  source 1..75: mol_type = other DNA
ggaatccatctatggtgaagaaagctggaacgctaatccctgggtgtgggtaatcgagtttaagcgcattcagga

SEQ ID NO: 338525 - DNA, 75 bp, synthetic construct
  source 1..75: mol_type = other DNA
tgatttttaatgatgagatggtcagggccatcctcgaaggaaggaagacgcagactcgccgacctgtaaaaaatg

SEQ ID NO: 338526 - DNA, 75 bp, synthetic construct
  source 1..75: mol_type = other DNA
ctggaacgacaacctttgtcgtggcgatgagaagaacgcagcaaggatttatcgggccagttgtgagcaaaaacc

SEQ ID NO: 338527 - DNA, 75 bp, synthetic construct
  source 1..75: mol_type = other DNA
caccgccccggaaatgagcgacacggatcgggacgcggcgctggcgctgctgcgcgacgagtgtcttgcgtcacg

SEQ ID NO: 338528 - DNA, 75 bp, synthetic construct
  source 1..75: mol_type = other DNA
acctggtcacgaaacagtacacggtaaaaggcccggtgatgctgatgctgaccaccaccgccatcgacgttgacg

SEQ ID NO: 338529 - DNA, 75 bp, synthetic construct
  source 1..75: mol_type = other DNA
tgaacccgttcgcgtcacagttgaccttcatgagcgacaagacgcgcacccggcgcgaccatatgaaatatctga

SEQ ID NO: 338530 - DNA, 75 bp, synthetic construct
  source 1..75: mol_type = other DNA
cttgagtacaagcagctctggagtggcggtcaggtgcttgctgttccgccagcgtacacaagccagcgttgcgcg

SEQ ID NO: 338531 - DNA, 75 bp, synthetic construct
  source 1..75: mol_type = other DNA
ggtgtcgcgtaagctggacaggccgctggcggtgctgatccagtcatcgagcgcggcgggcaaatcctcgctgat

SEQ ID NO: 338532 - DNA, 75 bp, synthetic construct
  source 1..75: mol_type = other DNA
gcagacgctggaggggctgctggcgtcgaatgaaaaaagttacatcactcagcttcaccagaacgcgcagcggct

SEQ ID NO: 338533 - DNA, 75 bp, synthetic construct
  source 1..75: mol_type = other DNA
ggggaacatgccgcgcgaagtctggtctggccgaagctaaaaccttttctcagaaagtatcccgaaatcagtgtc

SEQ ID NO: 338534 - DNA, 75 bp, synthetic construct
  source 1..75: mol_type = other DNA
gatgagcttgagcgcgagctggaatcacttatccagctgaatggcgcgccctccgggaatattcgtttatcagcc

SEQ ID NO: 338535 - DNA, 75 bp, synthetic construct
  source 1..75: mol_type = other DNA
agtggtgtccaacttttcccggatattacctttactatcccagccgtaagcagcatccgcctgcttttgcgctgt

SEQ ID NO: 338536 - DNA, 75 bp, synthetic construct
  source 1..75: mol_type = other DNA
ctttactaccccagccgcaagcagcatccgccagcttttgcgctgttgatcgatgcgcttcgctacaccgaataa

SEQ ID NO: 338537 - DNA, 75 bp, synthetic construct
  source 1..75: mol_type = other DNA
agcgatccgggtaaagatggtgatggacgtcatccagtagtgatcgtttgtgatgaggcacacttgtaccttccc

SEQ ID NO: 338538 - DNA, 75 bp, synthetic construct
  source 1..75: mol_type = other DNA
ttagatgacttggttaaatcccttgataagaaaaatgaagaagttattccaactggggaagaatacgtcactggg

SEQ ID NO: 338539 - DNA, 75 bp, synthetic construct
  source 1..75: mol_type = other DNA
acccatttataccagacatgatcattccgataaaagataaacaagttcggttgtctgttttaggaagagagcaaa

SEQ ID NO: 338540 - DNA, 75 bp, synthetic construct
  source 1..75: mol_type = other DNA
tgtcgatattgttgaaggtcgttttgatgccgggatacgtctgggtgaaactgttgataacgatatgattgcagt

SEQ ID NO: 338541 - DNA, 75 bp, synthetic construct
  source 1..75: mol_type = other DNA
tgtcgatattgttgaaggacgttttgatgccgggatacgtctgggtgaaactgtggataacgatatgattgcagt

SEQ ID NO: 338542 - DNA, 75 bp, synthetic construct
  source 1..75: mol_type = other DNA
tcgatattgttgaggggcgttttgatgccgggatccgtctgggcgaaagcgtggataaggacatgattgcggtac

SEQ ID NO: 338543 - DNA, 75 bp, synthetic construct
  source 1..75: mol_type = other DNA
gggagagaataattgcctgtcttgagccacgtatagatgagcttgagcgcgagctggaatcacttatccaactga

SEQ ID NO: 338544 - DNA, 75 bp, synthetic construct
  source 1..75: mol_type = other DNA
tgtcgatattgttgaagggcgttttgatgccgggatacgtctgggtgaaactgtagataacgatatgattgcagt

SEQ ID NO: 338545 - DNA, 75 bp, synthetic construct
  source 1..75: mol_type = other DNA
tgtcgatattgttgaaggccgttttgatgccgggatacgtctgggtgaaactgtcgataaagatatgattgcagt

SEQ ID NO: 338546 - DNA, 75 bp, synthetic construct
  source 1..75: mol_type = other DNA
cgatgtgctggagccgggggctgaccgggaggtcatgaatgcgcagcggctgttcagtacggcgcgggagctgcg

SEQ ID NO: 338547 - DNA, 75 bp, synthetic construct
  source 1..75: mol_type = other DNA
gtcagcggagtacgggaacaggccattctgactcagaccattcgcagtgaactgaaaacgcagggcgtactcggg

SEQ ID NO: 338548 - DNA, 75 bp, synthetic construct
  source 1..75: mol_type = other DNA
ttgccctggtgtgggggctgaatctgtcccgtcatgcgcatatccggcaaccggccattaaccggctgtggggat

SEQ ID NO: 338549 - DNA, 75 bp, synthetic construct
  source 1..75: mol_type = other DNA
agagaaggctgggttacgctattccgcgaataattacgtgaaatggaaggacgaatatctggatcagggtaacca

SEQ ID NO: 338550 - DNA, 75 bp, synthetic construct
  source 1..75: mol_type = other DNA
ccggaaaatggtgtgattgaacgggcacgcgccggtatcgatgaggccatcagccgtgagcagcttatccccctc

SEQ ID NO: 338551 - DNA, 75 bp, synthetic construct
  source 1..75: mol_type = other DNA
cacgtacagggcaagcccgtgatgatagccgacgccgagcaggggtacatcatccagcaactggtggcggcgtta

SEQ ID NO: 338552 - DNA, 75 bp, synthetic construct
  source 1..75: mol_type = other DNA
ttgccgggctggagcgtgaccggtctgccatatctgaacgggaagccgcgctgccggagagtgtactgcgtgaac

SEQ ID NO: 338553 - DNA, 75 bp, synthetic construct
  source 1..75: mol_type = other DNA
taccgacaaggataattactatgtgctgggcagcatgggagaacgctgggccggccagggggctgaacaactggg

SEQ ID NO: 338554 - DNA, 75 bp, synthetic construct
  source 1..75: mol_type = other DNA
gatggccatgctgggagacgacaagcgtcttattgaggcacacaaccgcgcggtggagaccgccattaagcagat

SEQ ID NO: 338555 - DNA, 75 bp, synthetic construct
  source 1..75: mol_type = other DNA
gcagcagcgtggagattgtgttatccgtgccgtatgtcactgcgtcaggtcagacaatctcgcatgtcaccatgc

SEQ ID NO: 338556 - DNA, 75 bp, synthetic construct
  source 1..75: mol_type = other DNA
gtgcagcaggcggtgacacaggccattgccggattaagtgaacgaaaagtgcagtttacgtacacggacgtgctg

SEQ ID NO: 338557 - DNA, 75 bp, synthetic construct
  source 1..75: mol_type = other DNA
ccgggagattgcccgggaaaatctgctgcaggagcgtctgcagcagatggagcgggatatggttcgtgacctgca

SEQ ID NO: 338558 - DNA, 75 bp, synthetic construct
  source 1..75: mol_type = other DNA
ctgcgttacgctattcagctaataactacgtgaaatggaaagacgagtatctggatcagggtaaccaaacccaac

SEQ ID NO: 338559 - DNA, 75 bp, synthetic construct
  source 1..75: mol_type = other DNA
ccaacatgatcgtctggaagcggttatctttacccctaccgactggcatctgttgcgtaaatgcccaagtccggt

SEQ ID NO: 338560 - DNA, 75 bp, synthetic construct
  source 1..75: mol_type = other DNA
acgccaattaatatcgcgattgaactgccggaatttgatccgagcgtttataacgatgccattcgtgggcaacat

SEQ ID NO: 338561 - DNA, 75 bp, synthetic construct
  source 1..75: mol_type = other DNA
gtgaagatgcgatgacggttgttgtgccgggacgggctgaaccggccaccctgcctgtgagcgattcaccgttca

SEQ ID NO: 338562 - DNA, 75 bp, synthetic construct
  source 1..75: mol_type = other DNA
tgctgcgtgaatcacaacgggagcaggaagcggtccgggaggttgcccgggaaaatctgctgcaggagcgtctgc

SEQ ID NO: 338563 - DNA, 75 bp, synthetic construct
  source 1..75: mol_type = other DNA
ggaaaaaacggctgaacattatcgcaataaaattgctgtttatttgcactggtatcaaaaaaaaggcatcgagat

SEQ ID NO: 338564 - DNA, 75 bp, synthetic construct
  source 1..75: mol_type = other DNA
ttgttatcgatcctaaccaggacgaccaaccagcattacggcgagctgtttatttacatcaacggattggtggca

SEQ ID NO: 338565 - DNA, 75 bp, synthetic construct
  source 1..75: mol_type = other DNA
attgccggattaagtgaacgaaaagtgcagtttacgtacacggacgtgctggccagaacggtcggtatactgccg

SEQ ID NO: 338566 - DNA, 75 bp, synthetic construct
  source 1..75: mol_type = other DNA
ctgatgatgtggggatctggccactcgttgtgattcgtggagatgtacattatgtacagatcggagcacgcacca

SEQ ID NO: 338567 - DNA, 75 bp, synthetic construct
  source 1..75: mol_type = other DNA
gtatattacgctttcctctttcagagtcaaccctgaacttcaggattttttctctttgttgttacgaccatcttg

SEQ ID NO: 338568 - DNA, 75 bp, synthetic construct
  source 1..75: mol_type = other DNA
tgccataactgaacgggaagccgcgctgccggagagtgtactgcgtgaaccacaacgggtgcgggaagcggtccg

SEQ ID NO: 338569 - DNA, 75 bp, synthetic construct
  source 1..75: mol_type = other DNA
aggggcgggaggtgcagattatcgccgctgaccgtcgctcacagatgaacctgaagcaggatgaacggctgtccg

SEQ ID NO: 338570 - DNA, 75 bp, synthetic construct
  source 1..75: mol_type = other DNA
gggagcaggggcgggaggtgcagattatcgctgctgaccgtcgctcgcagatgaacctgaagcaggatgaacggt

SEQ ID NO: 338571 - DNA, 75 bp, synthetic construct
  source 1..75: mol_type = other DNA
aaaagactattgctgacattctcacataccttggtttgggagaagcggcgaaaagggatgtgggtacaggagaaa

SEQ ID NO: 338572 - DNA, 75 bp, synthetic construct
  source 1..75: mol_type = other DNA
ccaggatgccatcaatgccgttccggccctgccgtttacggcctcatcttcggcaggcgtggtcacactgaccgc

SEQ ID NO: 338573 - DNA, 75 bp, synthetic construct
  source 1..75: mol_type = other DNA
gatgtcaacgcagttccggcgcgtaacgtgggtttattgctgggagccaggccgggtaatcgctactttacccga

SEQ ID NO: 338574 - DNA, 75 bp, synthetic construct
  source 1..75: mol_type = other DNA
tccgccgcgtttgtttttctcgccgggctctcaagattgcctgttttctgttgcttgcagcgggagcgatgattt

SEQ ID NO: 338575 - DNA, 75 bp, synthetic construct
  source 1..75: mol_type = other DNA
gcgccgtgaccgtcaaatggaaatgcgccagatgggccgtccgtgggaaatcggcaaagcctttgatctctcggc

SEQ ID NO: 338576 - DNA, 75 bp, synthetic construct
  source 1..75: mol_type = other DNA
cccttcttcttctgcaaaccagcagatgccgttattccggtcgccgctggcgaaacgctggcgctgccatatccg

SEQ ID NO: 338577 - DNA, 75 bp, synthetic construct
  source 1..75: mol_type = other DNA
tggcaacctaccgtcagcttgagcgtgcgggatcgtggaaaactacgaactgtttaagcagtacctggttgtgga

SEQ ID NO: 338578 - DNA, 75 bp, synthetic construct
  source 1..75: mol_type = other DNA
catctatcttccgcctcttactcgtggcaataaccataattacgatggaaaaagcgttgtcgaaattagggaagg

SEQ ID NO: 338579 - DNA, 75 bp, synthetic construct
  source 1..75: mol_type = other DNA
attcatcggtggtgtgggtagtgccatattaattatggtgtatggaatatatcctaaaggatttattcttgctat

SEQ ID NO: 338580 - DNA, 75 bp, synthetic construct
  source 1..75: mol_type = other DNA
tgcatggttgggaattgatgaggtaatgattttcttgctaatttcatcagttatatttttattatattctattcc

SEQ ID NO: 338581 - DNA, 75 bp, synthetic construct
  source 1..75: mol_type = other DNA
acgtgggtttattgctgggggcgaggccgggtaatcgctactttacccgacgtattgataccgcagcagagttgt

SEQ ID NO: 338582 - DNA, 75 bp, synthetic construct
  source 1..75: mol_type = other DNA
tttcataaccaacgcgccatctggctggcaaaacaatacggcatcgatgctatcgggtttaacgcaccagacctg

SEQ ID NO: 338583 - DNA, 75 bp, synthetic construct
  source 1..75: mol_type = other DNA
aaaaattacgatgaagcgtcaggaatgcagcgggcgctcatcgctaaaggcgtaccggcgaaagtcatcttctgc

SEQ ID NO: 338584 - DNA, 75 bp, synthetic construct
  source 1..75: mol_type = other DNA
gacagacatgatgaatatggaggcgtgcgattacctggccctggagcggcagtttaatgtttttttgctgccgcc

SEQ ID NO: 338585 - DNA, 75 bp, synthetic construct
  source 1..75: mol_type = other DNA
aagtaatattctcacccagtcatcggtgcgtattattatcgcgctcggtgtggcagggttaattgtcacccaggg

SEQ ID NO: 338586 - DNA, 75 bp, synthetic construct
  source 1..75: mol_type = other DNA
ctcagcctctctgttaacgtcattcagggggtgaataactaccgtcttcagaatgagcaacgcactgccgtgacc

SEQ ID NO: 338587 - DNA, 75 bp, synthetic construct
  source 1..75: mol_type = other DNA
acgggtgggtctaatgataatggactggctaaagtcgtttacccaattgcactgcctaaactttcacgttttatc

SEQ ID NO: 338588 - DNA, 75 bp, synthetic construct
  source 1..75: mol_type = other DNA
agctttatcgcggcagcgctggcgcagtacaccgccaacaaaagcgggctggatgtacttgatgatggtgatctg

SEQ ID NO: 338589 - DNA, 75 bp, synthetic construct
  source 1..75: mol_type = other DNA
gaaatgcgatcgttaggatcttacattgcgcttaatttagaaggtagctcgcaggatcgtacattttcactatcg

SEQ ID NO: 338590 - DNA, 75 bp, synthetic construct
  source 1..75: mol_type = other DNA
cgactcgtcagaaccgtattgatatttactgagagctcagatcaactttccagggcaacagatcgcgtacccggt

SEQ ID NO: 338591 - DNA, 75 bp, synthetic construct
  source 1..75: mol_type = other DNA
atgactcaatacgtattcgaaccacaagcgcccgttaccgtaccggttgttggcagtgatgaacaattccccgtg

SEQ ID NO: 338592 - DNA, 75 bp, synthetic construct
  source 1..75: mol_type = other DNA
cggcatttgatctggtcggtgaatgaaaccataagctacctgtcaggcttctttgagctgcaaccgggcgatctg

SEQ ID NO: 338593 - DNA, 75 bp, synthetic construct
  source 1..75: mol_type = other DNA
gatctggatatgattgccggtctgtgtgggatggacgcggcagacatgatgaacatggaagcgtgtgattacctg

SEQ ID NO: 338594 - DNA, 75 bp, synthetic construct
  source 1..75: mol_type = other DNA
cagtgttatgtctgatgccgttcagtcagacccgtcgaatcctgccccgcaggttttgtctgtaaattttgaaca

SEQ ID NO: 338595 - DNA, 75 bp, synthetic construct
  source 1..75: mol_type = other DNA
tttatgtcagtgcttattgttctcagcctctctgttaacgtcattcagggggtgaataactaccgtcttcagaat

SEQ ID NO: 338596 - DNA, 75 bp, synthetic construct
  source 1..75: mol_type = other DNA
ttactgatatcaaacattacatccttattctgaagcgggaaaacggggtgacctggctggataatttcggggaaa

SEQ ID NO: 338597 - DNA, 75 bp, synthetic construct
  source 1..75: mol_type = other DNA
caaaccagccggagcatctcgccgccatccgtccgcaaggtaagctcgattttagcggtacgttgattcgcctgc

SEQ ID NO: 338598 - DNA, 75 bp, synthetic construct
  source 1..75: mol_type = other DNA
gctgtttaaggcgctggattttggcattgatgtttccattcaggccgctaccaaatatctggtggggcattcaga

SEQ ID NO: 338599 - DNA, 75 bp, synthetic construct
  source 1..75: mol_type = other DNA
tcactatggaagtgcatgatgttccggcgattgtcgccgccgtgcgcagcgtggtgccggacgccatcattatga

SEQ ID NO: 338600 - DNA, 75 bp, synthetic construct
  source 1..75: mol_type = other DNA
atgatctcagtcccatctggcactcgtatctggctggttgccggtgttaccgatatgcgtaaatccttcaatgat

SEQ ID NO: 338601 - DNA, 75 bp, synthetic construct
  source 1..75: mol_type = other DNA
cgcctgcatattggtctggaaaacgtcgacgatctgattgccgatctggacgcgggctttacccgaattgtgtaa

SEQ ID NO: 338602 - DNA, 75 bp, synthetic construct
  source 1..75: mol_type = other DNA
aactggtgaatgcaggacgcagcaaaaaatacactctcggcgcggtaaatagcgtgattcagcgcgcgtcttcgc

SEQ ID NO: 338603 - DNA, 75 bp, synthetic construct
  source 1..75: mol_type = other DNA
atgatctcactcccgtcaggtacccgcatctggctgggtgccggcattaccgatatgcgtaaatccttcaacgga

SEQ ID NO: 338604 - DNA, 75 bp, synthetic construct
  source 1..75: mol_type = other DNA
cgggagctgcgggacgtggcggcagggcgtgccgttcttcgtcaggcggggcttgccgggggagacagtcctgca

SEQ ID NO: 338605 - DNA, 75 bp, synthetic construct
  source 1..75: mol_type = other DNA
tatgtggcactgccggcttttgaccgtaacggcaggtccgccggtatctggctgaacccgctgaccacggatgac

SEQ ID NO: 338606 - DNA, 75 bp, synthetic construct
  source 1..75: mol_type = other DNA
cgctgattggtgccgatatcgttaagcatctgcagccaaacactaaaatcgtgtttctggaatcgccaggttcca

SEQ ID NO: 338607 - DNA, 75 bp, synthetic construct
  source 1..75: mol_type = other DNA
gtatctggctcgttgccggcgttaccgatatgcgtaaatccttcaacggactgggagaacaggtacaactgaggt

SEQ ID NO: 338608 - DNA, 75 bp, synthetic construct
  source 1..75: mol_type = other DNA
tcgccctgtcgttactgtatgctgcctatgcttcgcaaaccctgcgtggcgcactgaaagcggtgcccgtaggcc

SEQ ID NO: 338609 - DNA, 75 bp, synthetic construct
  source 1..75: mol_type = other DNA
catattgatatggaagaagctaacggcgtcggtctgcgtaatggcgataccgttcgcggcataaaacaggctgcg

SEQ ID NO: 338610 - DNA, 75 bp, synthetic construct
  source 1..75: mol_type = other DNA
atgtggacctgatgacagagacaaagtcgtttgctgcagaaggaaccagttttactgaactggggcgggaaatcg

SEQ ID NO: 338611 - DNA, 75 bp, synthetic construct
  source 1..75: mol_type = other DNA
ggaaacgggctgcggggattcagcggtgaaggacgggtgaagggcagcggggatgcgcagttcgtggccctgcag

SEQ ID NO: 338612 - DNA, 75 bp, synthetic construct
  source 1..75: mol_type = other DNA
atgttgagtatcagtgtcgttaaatcggctagcagcgccggtaattactacaccgacaaggataattactacgta

SEQ ID NO: 338613 - DNA, 75 bp, synthetic construct
  source 1..75: mol_type = other DNA
aaacagaaccgggtgaccgtacatccggagaaaagtgttccccggactgccggttacagcgatgcggtcagtgtt

SEQ ID NO: 338614 - DNA, 75 bp, synthetic construct
  source 1..75: mol_type = other DNA
ctgggcagcatgggagaacgctgggccggccagggggctgaacagctgggactgcagggcagtgtcgataaggat

SEQ ID NO: 338615 - DNA, 75 bp, synthetic construct
  source 1..75: mol_type = other DNA
ggaggcgctggcttccacacgggttatgacggacggacagtcagaaacggtgctgaccggtaatctggtgatggc

SEQ ID NO: 338616 - DNA, 75 bp, synthetic construct
  source 1..75: mol_type = other DNA
atgatggcctatgaacgtgaaagccttatcgaaaagcatctcgtcgctgaagtgaaaaaagctggcggggttgcc

SEQ ID NO: 338617 - DNA, 75 bp, synthetic construct
  source 1..75: mol_type = other DNA
gaatgtaaatctcccggcaagccaccacggcctgaccaattgcgcgaacatgaacgtctgcgaaaactgggcttt

SEQ ID NO: 338618 - DNA, 75 bp, synthetic construct
  source 1..75: mol_type = other DNA
cggtaccagatcgcattgttctgctacccggtggtcgtatcgttttcgttgaatgtaaagcacccggcaagccac

SEQ ID NO: 338619 - DNA, 75 bp, synthetic construct
  source 1..75: mol_type = other DNA
caggtccgccggtatctggctgaacccgctgaccacggatgacggaaacgggctgcggggattcagtggtgaagg

SEQ ID NO: 338620 - DNA, 75 bp, synthetic construct
  source 1..75: mol_type = other DNA
ctgttagcctggtcctggatgagatgcgcgagcgccctatccctctgggcgtctccagtcgtcacattcatcttt

SEQ ID NO: 338621 - DNA, 75 bp, synthetic construct
  source 1..75: mol_type = other DNA
gcaatgcaagtcaggtggaaatttcccggacggacgccagaacgttagggatcaccgccccgctacgcatgtcag

SEQ ID NO: 338622 - DNA, 75 bp, synthetic construct
  source 1..75: mol_type = other DNA
ggacgtggcggcaggccgtgccgttctccgtcaggcggggctggccgggggagacagtcctgcacggtttattgc

SEQ ID NO: 338623 - DNA, 75 bp, synthetic construct
  source 1..75: mol_type = other DNA
cggcaggcagaagaggccatccgccgtgaaacggaacgccgtgcagatgaaattgtcagaaaaatggcggagaac

SEQ ID NO: 338624 - DNA, 75 bp, synthetic construct
  source 1..75: mol_type = other DNA
gcactggaactggttgatacctccagtgcgccagatattgaatggcctacgcctccgggggaacaggccagttaa

SEQ ID NO: 338625 - DNA, 75 bp, synthetic construct
  source 1..75: mol_type = other DNA
aggttgcccgggaaaatctgctgcaggagcgtctgcagcagatggagcgggatatggttcgtgacctgcagaaag

SEQ ID NO: 338626 - DNA, 75 bp, synthetic construct
  source 1..75: mol_type = other DNA
gtgacagcggtttccggtgacagtgtcacgctgtcggacggacagcagacccgggtgattcgccccggacaggag

SEQ ID NO: 338627 - DNA, 75 bp, synthetic construct
  source 1..75: mol_type = other DNA
aagccgtacagaaaggaacggctcacgatgtgctggagccgggggttgaccgggaggtcatgaatgcgcagcggc

SEQ ID NO: 338628 - DNA, 75 bp, synthetic construct
  source 1..75: mol_type = other DNA
tttggcactaaaggatcacgttcccgtcagacggtagtgctcgaacctgaaaggctacgcagcatcctgaaccag

SEQ ID NO: 338629 - DNA, 75 bp, synthetic construct
  source 1..75: mol_type = other DNA
attgcccgggaaaatctgctgcaggagcgacttcagcagatggagcgggatatggtccgcgacctgcagaaagag

SEQ ID NO: 338630 - DNA, 75 bp, synthetic construct
  source 1..75: mol_type = other DNA
tcctcagactcaacaaggagatattggctcaaaagacgtcccctcctggcgacgtatctgcaaggtattactcaa

SEQ ID NO: 338631 - DNA, 75 bp, synthetic construct
  source 1..75: mol_type = other DNA
ggaagcggtccgggaggttgcccgggaaaatctgctgcaggagcgactgcagcagatggagcgggatatggttcg

SEQ ID NO: 338632 - DNA, 75 bp, synthetic construct
  source 1..75: mol_type = other DNA
gcagctggtcgctgttccggccggaaaaaatgccggtggcagacggcgagcgtctgagggtgacagggaaaattc

SEQ ID NO: 338633 - DNA, 75 bp, synthetic construct
  source 1..75: mol_type = other DNA
atgtccgctatgcccggctggccggagattttgcggccagcgtgaaagccggagaagagagcgtggcacaggtca

SEQ ID NO: 338634 - DNA, 75 bp, synthetic construct
  source 1..75: mol_type = other DNA
cgacagcgggcagcgaaccggtacaggcagtgcgctgatggccatgaaggatgccggggtgaacacatatcgctg

SEQ ID NO: 338635 - DNA, 75 bp, synthetic construct
  source 1..75: mol_type = other DNA
ggagaccgtcggggaggacgcctcgctgaaatcccgggatgtggcggcgctggatacgcgtaaatccaaacagca

SEQ ID NO: 338636 - DNA, 75 bp, synthetic construct
  source 1..75: mol_type = other DNA
taaccgacagcgggcagcgaaccggtacaggcagtgcgctgatggccatgaaagatgccggggtgaacacatatc

SEQ ID NO: 338637 - DNA, 75 bp, synthetic construct
  source 1..75: mol_type = other DNA
ctggcacaggatcgcccgtcgctggctattgtgtccgggcagggcggtgcagccgggcagcgtgagcgggtggcg

SEQ ID NO: 338638 - DNA, 75 bp, synthetic construct
  source 1..75: mol_type = other DNA
actgaagctggagaacggctgggtggaaacacccgggcattccgtcagtgacagtgcgacggtttttgcctccgt

SEQ ID NO: 338639 - DNA, 75 bp, synthetic construct
  source 1..75: mol_type = other DNA
ttttacaggacgggccggatgtgcagcaggcggtgacacaggccattgccggattaagtgaacgaaaagtgcagt

SEQ ID NO: 338640 - DNA, 75 bp, synthetic construct
  source 1..75: mol_type = other DNA
cggcaggcagtgccggaaactattacaccgacaaggataattactatgtgctgggtagcatgggggaacgctggg

SEQ ID NO: 338641 - DNA, 75 bp, synthetic construct
  source 1..75: mol_type = other DNA
ggaggccgtcggggaggacgcctcgttgaaatccccgggatgtggcggcactggatacgcgaaaatccaaacagc

SEQ ID NO: 338642 - DNA, 75 bp, synthetic construct
  source 1..75: mol_type = other DNA
gcttttgaccgtaacggcaagtcagctggtatctggctgaacccgctgaccacggatgacggaaacgggctgcgg

SEQ ID NO: 338643 - DNA, 75 bp, synthetic construct
  source 1..75: mol_type = other DNA
ccctggtggataatgtgtatcaccggattgccggtatcagcaaggatgacgggctgataaccctgcaggatgcgg

SEQ ID NO: 338644 - DNA, 75 bp, synthetic construct
  source 1..75: mol_type = other DNA
gccccggtcaggagcgggcagagcaacatattgacctggcttatgccatcaccgcccacggtgcgcagggggcaa

SEQ ID NO: 338645 - DNA, 75 bp, synthetic construct
  source 1..75: mol_type = other DNA
cgggaaaaggccggtgagctgggaaaagagcaggtcatggtgcctgtcctgaacacagcgaatatacgcgacggg

SEQ ID NO: 338646 - DNA, 75 bp, synthetic construct
  source 1..75: mol_type = other DNA
tgatgcacgggaaaaggccggtgagctgggcaaagagcaggtcatggtgcctgtcctgaacacagcgaatatacg

SEQ ID NO: 338647 - DNA, 75 bp, synthetic construct
  source 1..75: mol_type = other DNA
gacggcaaaacagagcaggctgtcagggatattgccgggctggagcgtgaccggtctgccatatctgaacgggaa

SEQ ID NO: 338648 - DNA, 75 bp, synthetic construct
  source 1..75: mol_type = other DNA
taccggcaaagcaatcactgacgtagtgaacatcgggatcggcggttctgacctcggcccgtacatggtgaccga

SEQ ID NO: 338649 - DNA, 75 bp, synthetic construct
  source 1..75: mol_type = other DNA
gtcagcacgcgttctatcagctgatccaccagggaaccaaaatggtaccgtgcgatttcatcgccccggctatca

SEQ ID NO: 338650 - DNA, 75 bp, synthetic construct
  source 1..75: mol_type = other DNA
cagggcaatatggagtccaacggtaagtatgttgaccgtaacggtaacgttgtggattaccagactggcccgatt

SEQ ID NO: 338651 - DNA, 75 bp, synthetic construct
  source 1..75: mol_type = other DNA
ctgatataaccaaagagattgattatctggcatcactgcgtaaacaacgcatggtggcggatctgcgcacagagc

SEQ ID NO: 338652 - DNA, 75 bp, synthetic construct
  source 1..75: mol_type = other DNA
cagttgctggttatcacgccgtatgtgtggattgttgacacactggctgacaatgtactgcataatctgtttctg

SEQ ID NO: 338653 - DNA, 75 bp, synthetic construct
  source 1..75: mol_type = other DNA
gtgaacatcgggatcggcggttctgacctcggcccgtacatggtgaccgaagcactgcgtccgtacaaaaatcac

SEQ ID NO: 338654 - DNA, 75 bp, synthetic construct
  source 1..75: mol_type = other DNA
atcaacacgttggggcaccacgggcatggtgatgatatgcagtgttaccccatgccggaaacgcttcacgatctg

SEQ ID NO: 338655 - DNA, 75 bp, synthetic construct
  source 1..75: mol_type = other DNA
ttgaagaggtggtgaaagccagcggaatgccggtgacggaatccgaggtgcgcgaacgctttaatgcgattgcgg

SEQ ID NO: 338656 - DNA, 75 bp, synthetic construct
  source 1..75: mol_type = other DNA
tggccaatttcagcgatgaggacaggaaaaccctgaaggacggggtggagaacatgatccgctgtgcttttcgtg

SEQ ID NO: 338657 - DNA, 75 bp, synthetic construct
  source 1..75: mol_type = other DNA
tggcggtcgttactccctgtggtcagccattggtttgtccatcatcttgtccgtgggcttcgataactttgttga

SEQ ID NO: 338658 - DNA, 75 bp, synthetic construct
  source 1..75: mol_type = other DNA
aagatgaaaaccttctcggaagcgattatctccggtgagtggaagggttataccggcaaagcaatcactgacgta

SEQ ID NO: 338659 - DNA, 75 bp, synthetic construct
  source 1..75: mol_type = other DNA
agactgcgtcagtcaggtatggtgatagtcacccgggaagttgaggtatcagactccctgaccggaaccaccaga

SEQ ID NO: 338660 - DNA, 75 bp, synthetic construct
  source 1..75: mol_type = other DNA
ctgacagtcacactctggctgtatgcggccatgaaccttaacgaggaagaaatccagttactgaaacacaacacg

SEQ ID NO: 338661 - DNA, 75 bp, synthetic construct
  source 1..75: mol_type = other DNA
actatcatccagtggttggttatttggaagctcatccggctacgatcgtgaaagggcgatttatccagaagacgc

SEQ ID NO: 338662 - DNA, 75 bp, synthetic construct
  source 1..75: mol_type = other DNA
ttattattcataaacaccatcttgaaaaatggatgaatggaggccttaccgctgaaaatgtaaaaaaaatgatca

SEQ ID NO: 338663 - DNA, 75 bp, synthetic construct
  source 1..75: mol_type = other DNA
aggatttagagagagcatatcccgagtttgactttgttattcataaacatcatcttgaaaaatggattaatggag

SEQ ID NO: 338664 - DNA, 75 bp, synthetic construct
  source 1..75: mol_type = other DNA
tatcgcacattctggaacagctaaatgagttgtttggcgaagaaacgaccgatgcagacaagctggtatggcttg

SEQ ID NO: 338665 - DNA, 75 bp, synthetic construct
  source 1..75: mol_type = other DNA
atgcaaagaaaagcggtgatgaaacgtggcgagtaaactgtgaacgcagcgttaagcaagcccgtgaagcaaaag

SEQ ID NO: 338666 - DNA, 75 bp, synthetic construct
  source 1..75: mol_type = other DNA
gaatttatccaaaagatacagatgtacattttctcaacgcggttgagagacatctttcggctaaaggaaccttgt

SEQ ID NO: 338667 - DNA, 75 bp, synthetic construct
  source 1..75: mol_type = other DNA
agcacttccatctgatattgatttttataagatacttatatctaaaatcggcgaaaatgaaacaattattcttct

SEQ ID NO: 338668 - DNA, 75 bp, synthetic construct
  source 1..75: mol_type = other DNA
ttaaactcaagtaattcattgattgagatgatatatgatgatgagaaatataaatttataaaaggaaggataaat

SEQ ID NO: 338669 - DNA, 75 bp, synthetic construct
  source 1..75: mol_type = other DNA
cgtcaacctcaccagaaaggaagccacgccggcatcaggtgtgattcgatttatcaaaagcgatatttcccgtcc

SEQ ID NO: 338670 - DNA, 75 bp, synthetic construct
  source 1..75: mol_type = other DNA
taagggattctatactactcaatgatggtgtaatctttgttaaagatgggaaaattgtaaatcttagttctggtc

SEQ ID NO: 338671 - DNA, 75 bp, synthetic construct
  source 1..75: mol_type = other DNA
tctatttcatttgatttttcaatcaaattattaattgaaaatatcgataacacggcaataaagctagatgaatta

SEQ ID NO: 338672 - DNA, 75 bp, synthetic construct
  source 1..75: mol_type = other DNA
ttaaattcaagtgagtcattacttgaaatgatatctgatgataagaaataccaattcattgaaaatcgaataaat

SEQ ID NO: 338673 - DNA, 75 bp, synthetic construct
  source 1..75: mol_type = other DNA
cccgctgctggaagccttagatatcgcaaaatactttagcgtggttatcggcggcgatgacgtacaaaacaaaaa

SEQ ID NO: 338674 - DNA, 75 bp, synthetic construct
  source 1..75: mol_type = other DNA
atttcaaaaaacgccgtatttccatctggatgttcccggaaggtacccgcagccgtggtcgcggcctgctaccgt

SEQ ID NO: 338675 - DNA, 75 bp, synthetic construct
  source 1..75: mol_type = other DNA
acattgtgcagccgccgacagtgacggtaggtaaaaagagtttgttgtggatccccttcttcgggcagttgtatt

SEQ ID NO: 338676 - DNA, 75 bp, synthetic construct
  source 1..75: mol_type = other DNA
cactggcgtctgggaagatattgccggacgtaaagggaatatagaaactgtcgccgcaatccgaaaaaatattat

SEQ ID NO: 338677 - DNA, 75 bp, synthetic construct
  source 1..75: mol_type = other DNA
cgttcgtcaggatgcggacgctgaaacccgccagtttgcggcatggctgcgttctgacgaggcggtgccggcctt

SEQ ID NO: 338678 - DNA, 75 bp, synthetic construct
  source 1..75: mol_type = other DNA
cccgtgtgcgtctctacaacttcgaataagattaatcttaatcggctacacaacggtctggtgattgtcgaaatg

SEQ ID NO: 338679 - DNA, 75 bp, synthetic construct
  source 1..75: mol_type = other DNA
cccgtgtgtgtttccacaacttcgaataagattaatcttaaccgactgaataatggtttagtgatcgtagaaatg

SEQ ID NO: 338680 - DNA, 75 bp, synthetic construct
  source 1..75: mol_type = other DNA
gctaacgattgacgcgctcaatatctcattggctgatacactacagaaatgcagggaggccagcggcagtgaaac

SEQ ID NO: 338681 - DNA, 75 bp, synthetic construct
  source 1..75: mol_type = other DNA
gctggctctaaccattgacgcactcgacatctcactggttgatacactacagaaatgcagggaggccagcagcag

SEQ ID NO: 338682 - DNA, 75 bp, synthetic construct
  source 1..75: mol_type = other DNA
cagtatcgaagtattttacaaaggcgagaaatgcatctggactctcatttgatggagacccaccgacatttcatg

SEQ ID NO: 338683 - DNA, 75 bp, synthetic construct
  source 1..75: mol_type = other DNA
tgctgatatcaatctgtatggacctggtggcccgcatacagccttgctcgatgcggccaggctttacaccgaaaa

SEQ ID NO: 338684 - DNA, 75 bp, synthetic construct
  source 1..75: mol_type = other DNA
ttgatgttgttgacaacgaattaagcatgtttgcaactgatggaaagcgcgtggtgatcgctacatggacgcgca

SEQ ID NO: 338685 - DNA, 75 bp, synthetic construct
  source 1..75: mol_type = other DNA
accggctgataaatttatatggcacgccgtaacgcgtgccgtcgggaatgtgaaaaatcagggcgccgaactaat

SEQ ID NO: 338686 - DNA, 75 bp, synthetic construct
  source 1..75: mol_type = other DNA
tactatggcgaggttgccgaagaggggacgtttttgttcccgcacgttgccgatacgttgggcgcgttgcaggct

SEQ ID NO: 338687 - DNA, 75 bp, synthetic construct
  source 1..75: mol_type = other DNA
caatgatggcgctggcagatattgaaaaaccagagattctgccgggggaaaatatccttgccgtgaaagagccac

SEQ ID NO: 338688 - DNA, 75 bp, synthetic construct
  source 1..75: mol_type = other DNA
ggagcggcgacaggtcgatacgccagtcagtcatatcgatttactgccgacaatgatggcgctggcagatattga

SEQ ID NO: 338689 - DNA, 75 bp, synthetic construct
  source 1..75: mol_type = other DNA
gcgtcgcttttgatctcgatggtacgctggtggacagtgctcctggtcttgctgctgcggtagatatggcgctgt

SEQ ID NO: 338690 - DNA, 75 bp, synthetic construct
  source 1..75: mol_type = other DNA
gtggctgagcggatgggcattgctccacaacagatgctgtttgttggcgactcacgcaatgatattcaggcagca

SEQ ID NO: 338691 - DNA, 75 bp, synthetic construct
  source 1..75: mol_type = other DNA
ccaacaaaccgacgccgttcgtcgcgccgctgctcgaagccttagatatcgccaaatacttcagcgtggtgattg

SEQ ID NO: 338692 - DNA, 75 bp, synthetic construct
  source 1..75: mol_type = other DNA
tgtccgtaaagatgcgaacagcgatattcgtaagtttgccgaatggctcaattctgaggaggcatcaccagcttt

SEQ ID NO: 338693 - DNA, 75 bp, synthetic construct
  source 1..75: mol_type = other DNA
tatggatcacatgggctgactgggcagccagcaaccccggaattggcgatgttgttgaaattgattctgaatata

SEQ ID NO: 338694 - DNA, 75 bp, synthetic construct
  source 1..75: mol_type = other DNA
atcggacgagatgcgcaggcattacgagaagtcgcattaaaaacaggtctgaatattgttgcttcctccggtccc

SEQ ID NO: 338695 - DNA, 75 bp, synthetic construct
  source 1..75: mol_type = other DNA
tgtttaccggtatctacgctaaccagtccggcccgtggaccaacaacgtcgcgccgggcaaaaacatctccacta

SEQ ID NO: 338696 - DNA, 75 bp, synthetic construct
  source 1..75: mol_type = other DNA
tacggtccacaacataaatggaatgaagatgccaaaaagaatgcagatattctatttggtgcatcagaacaatct

SEQ ID NO: 338697 - DNA, 75 bp, synthetic construct
  source 1..75: mol_type = other DNA
cgtacgtcaggatgcaaatgatgaaatccgtcgatttgctgaatggctacaaaccgacgaagcagcgcctgcatt

SEQ ID NO: 338698 - DNA, 75 bp, synthetic construct
  source 1..75: mol_type = other DNA
catcgtgctgctctggaacttaatcgcattcctgaattacttcaccgcattgatcactattctggcaggccgtta

SEQ ID NO: 338699 - DNA, 75 bp, synthetic construct
  source 1..75: mol_type = other DNA
gcaatcagaagtggtcggcatcgcatagcgctcgtgttttgaaaagtctggaggataatctctttactgctatcg

SEQ ID NO: 338700 - DNA, 75 bp, synthetic construct
  source 1..75: mol_type = other DNA
agagcaagaagcgataacgtttgaagtggtcgccagagactggcacgccagcaatcagaagtggtctgcatcaca

SEQ ID NO: 338701 - DNA, 75 bp, synthetic construct
  source 1..75: mol_type = other DNA
gcaatcagaagtggtctgcatcgcatagcgctcgtgtattgaaaagcctcgaagacaatttatttgcttcagttg

SEQ ID NO: 338702 - DNA, 75 bp, synthetic construct
  source 1..75: mol_type = other DNA
aaggctctacgagtgatgggctatgacacgaaaacggaagtctgtgggcatggtttcaggacaatggcctgtagc

SEQ ID NO: 338703 - DNA, 75 bp, synthetic construct
  source 1..75: mol_type = other DNA
gcattcctgaattgcttcaccgcatcgaacactattccggaagaccattaacccgacttgctgtcgaacttacct

SEQ ID NO: 338704 - DNA, 75 bp, synthetic construct
  source 1..75: mol_type = other DNA
atttttgaatcagttggaaccggatgtacgaaaggatttgttacgcagtgctgaagaaaaacagcgagtggccgc

SEQ ID NO: 338705 - DNA, 75 bp, synthetic construct
  source 1..75: mol_type = other DNA
cgctacacaggcggcaacggaaacctacgaggatgaagccgctattcaggttctgatcgacgaaatagaaagtca

SEQ ID NO: 338706 - DNA, 75 bp, synthetic construct
  source 1..75: mol_type = other DNA
gctgggttcctggatggatgcggtcaccagatgtgctacctgacgtcgctgatggtgatgagacaaattctgatg

SEQ ID NO: 338707 - DNA, 75 bp, synthetic construct
  source 1..75: mol_type = other DNA
attgaccacggtaaaacgccagcatcgccctgctctggatctttcacgcttgcctgaatttctgtcgcgtattga

SEQ ID NO: 338708 - DNA, 75 bp, synthetic construct
  source 1..75: mol_type = other DNA
aaaaccacctttgcaaatgcctgtctggaatatataccgcatcatctgcggtgtatttctattgaagatactgat

SEQ ID NO: 338709 - DNA, 75 bp, synthetic construct
  source 1..75: mol_type = other DNA
agcacttggatgaacgcagactgatgttgcagtggtgggctgattatctggatgcgaatcgggagaggggggtta

SEQ ID NO: 338710 - DNA, 75 bp, synthetic construct
  source 1..75: mol_type = other DNA
tgctaatcgcgtaaaaaagagcctggaggacaatatcttcccggcaattggtactcgcaatattgctgaactggg

SEQ ID NO: 338711 - DNA, 75 bp, synthetic construct
  source 1..75: mol_type = other DNA
agccgtcgcctctggcaatcgacagcatcgcccggcgctggaattaaagcgtatccctgagttacttgagaaaat

SEQ ID NO: 338712 - DNA, 75 bp, synthetic construct
  source 1..75: mol_type = other DNA
tggtgccgctttcaaagcaggctctggcaatcctaaagcagataaaacagttttgtggggaacacgagttgattt

SEQ ID NO: 338713 - DNA, 75 bp, synthetic construct
  source 1..75: mol_type = other DNA
gctgcgttttgctcgctggtcagagatcgattttgaaacgtcaatgtggaccatcccgcctgagcgagagcctat

SEQ ID NO: 338714 - DNA, 75 bp, synthetic construct
  source 1..75: mol_type = other DNA
ttctgtggcgaacatgagctgatttttattggcgatcacgatccgcgtaagcccatgagcgagaacacggtaaac

SEQ ID NO: 338715 - DNA, 75 bp, synthetic construct
  source 1..75: mol_type = other DNA
agacagctacaccggcagaccgctaacccactggacgacagaactcactctgcttatctttattcggtccagtaa

SEQ ID NO: 338716 - DNA, 75 bp, synthetic construct
  source 1..75: mol_type = other DNA
agaacttctaaaagccatcagagaaatcagcggcgaatgcgaccttgtattcattggcgatcatgatttcagaaa

SEQ ID NO: 338717 - DNA, 75 bp, synthetic construct
  source 1..75: mol_type = other DNA
ggttcaaaaatgaagaccccacacctcgtgccgttaagtcgtcaggctttagaacttctaaaagccatcagagaa

SEQ ID NO: 338718 - DNA, 75 bp, synthetic construct
  source 1..75: mol_type = other DNA
tctctcttggtgaagctcgcaggaaacgagatgaggccaaaaagttggtatctgatggtatagacccttccgaga

SEQ ID NO: 338719 - DNA, 75 bp, synthetic construct
  source 1..75: mol_type = other DNA
ccatatggaacgtaactcagtacgcgcagcttacattcataaggccgaactgatcttacccagcaatagtggaca

SEQ ID NO: 338720 - DNA, 75 bp, synthetic construct
  source 1..75: mol_type = other DNA
atctggatgagcgcagactgatgctgcagtggtgggctgattttttggatgcgaatcgggaaaaggaagttagtc

SEQ ID NO: 338721 - DNA, 75 bp, synthetic construct
  source 1..75: mol_type = other DNA
gattcagtggtggggtgattatttacaccaatgtagaacttgttataagcaaccattcagctttgataaagcgtg

SEQ ID NO: 338722 - DNA, 75 bp, synthetic construct
  source 1..75: mol_type = other DNA
aagccccccaaaaaaccagtcccagaaaaatcacgaaggcgcaggagcaaaccctgaaggctgcacttgaggccg

SEQ ID NO: 338723 - DNA, 75 bp, synthetic construct
  source 1..75: mol_type = other DNA
tatctagaacaattcctgaacctgtaaaactggaggtaaggcagcgctgtggcttcggttgcgttgtttgtgctt

SEQ ID NO: 338724 - DNA, 75 bp, synthetic construct
  source 1..75: mol_type = other DNA
gcaggcgaacgtattcagtgggacagcggtttgcccggcgaacctctgaaaattacatctgaacagctcgaaagc

SEQ ID NO: 338725 - DNA, 75 bp, synthetic construct
  source 1..75: mol_type = other DNA
actgatgccgactggctggatgcatacggctaccgcgtggcggacttcgaagatttgacagtggctgaagatggc

SEQ ID NO: 338726 - DNA, 75 bp, synthetic construct
  source 1..75: mol_type = other DNA
accgcaacaaaatatcccttttaccctgaaaggttgcggtgcgctggattggggaatgcagtcacgcttatcgcg

SEQ ID NO: 338727 - DNA, 75 bp, synthetic construct
  source 1..75: mol_type = other DNA
tgcgtaatggcgttctttcggcggccgtgacggccagcgttgcccttggtgccgggttctttgcagctccgacac

SEQ ID NO: 338728 - DNA, 75 bp, synthetic construct
  source 1..75: mol_type = other DNA
ggtgccagcggatacagcatcacttctgccaccaacaacaataaattaagcggaactgcggttatctataagtaa

SEQ ID NO: 338729 - DNA, 75 bp, synthetic construct
  source 1..75: mol_type = other DNA
ccgccacgccgaaagccaaaacgctggagctgtttggccgtcgtcctaatccgcaggaaccggcgtcgaaaacga

SEQ ID NO: 338730 - DNA, 75 bp, synthetic construct
  source 1..75: mol_type = other DNA
cgcgctggtgcactttgccgtcagccagtacgaagtgtttatggcgaccaaactcgagggcgataaaaccttctt

SEQ ID NO: 338731 - DNA, 75 bp, synthetic construct
  source 1..75: mol_type = other DNA
ctatggcactttaggcgtgctgcgacatggtatcaaaagccataacgcgcgtttttctctgtgccagtttaagcc

SEQ ID NO: 338732 - DNA, 75 bp, synthetic construct
  source 1..75: mol_type = other DNA
aatacctgatccagcacagcgccggttccggtaaatcgaactccattgcctggaccgcccaccagctttctcgtc

SEQ ID NO: 338733 - DNA, 75 bp, synthetic construct
  source 1..75: mol_type = other DNA
tgataaatacattagcgagaacaattaccagaaaatcagcgcgatggtggcgttttccggggaagttgaattcca

SEQ ID NO: 338734 - DNA, 75 bp, synthetic construct
  source 1..75: mol_type = other DNA
gattgacgagtatgtaaaggccaaagcgatcttcgaacgtactaagaagaccggcgatgttgtgctgatcaccaa

SEQ ID NO: 338735 - DNA, 75 bp, synthetic construct
  source 1..75: mol_type = other DNA
aataagccggtggtactgcgggcgtcaggtgcgaactctattctggcggaattaagtaatgaagccgtggcgtta

SEQ ID NO: 338736 - DNA, 75 bp, synthetic construct
  source 1..75: mol_type = other DNA
ctcgcgtcacgtccagcggatgctgaaactggcgaaccttgccccggaattgattgccctgctggcagagaacac

SEQ ID NO: 338737 - DNA, 75 bp, synthetic construct
  source 1..75: mol_type = other DNA
ctcagtcaggaggtactgttatccctgctcagtttctgcaccgcatgcagccttaacggtgtccagacccgcgag

SEQ ID NO: 338738 - DNA, 75 bp, synthetic construct
  source 1..75: mol_type = other DNA
cggcatggctcaaaggaccggagtcagcgggtgaatccggtgcagacgacgcggcttcagataccgacagccctg

SEQ ID NO: 338739 - DNA, 75 bp, synthetic construct
  source 1..75: mol_type = other DNA
gaagaaggtcaggcatggctgagtctgatgcaggagaaagcccgtctggaggcgctgttgccggagggctggaag

SEQ ID NO: 338740 - DNA, 75 bp, synthetic construct
  source 1..75: mol_type = other DNA
tgatgcaggagaaagcccgtctggaggcgctattgccggagggttgggagaaggattacaccaccttctttacgc

SEQ ID NO: 338741 - DNA, 75 bp, synthetic construct
  source 1..75: mol_type = other DNA
gagcagaaagcagcctgtggcgtggtggtcagtctgtatgacggtgagctttacgtccagcgtggggtacagaag

SEQ ID NO: 338742 - DNA, 75 bp, synthetic construct
  source 1..75: mol_type = other DNA
tcacttaccgacaggggattacggggcgctcacgtattgatgacgcatttgcccgcaaaggtttgctggcagata

SEQ ID NO: 338743 - DNA, 75 bp, synthetic construct
  source 1..75: mol_type = other DNA
tgactgaaccgggcaaagcattactggtcattgcagaacgtattctgaatgaagccagtaatgttcgtcggcttg

SEQ ID NO: 338744 - DNA, 75 bp, synthetic construct
  source 1..75: mol_type = other DNA
aataagccggtggtactgcgggcgtcaggtgcgaactctatcctggcggaattaagcaatgaagccgtggcgtta

SEQ ID NO: 338745 - DNA, 75 bp, synthetic construct
  source 1..75: mol_type = other DNA
tgacggcggtcccggcgcggatcacgccggcgccatccggtgaacgcctgaatattgagaccttccctgtaaaat

SEQ ID NO: 338746 - DNA, 75 bp, synthetic construct
  source 1..75: mol_type = other DNA
ctgaggtcattaaagcttttcgcgaacttttcccggaggttcggctggagctaatccagggtacgccacaggaaa

SEQ ID NO: 338747 - DNA, 75 bp, synthetic construct
  source 1..75: mol_type = other DNA
ggcagatattgtattgagtgctcaggattctgatgtcatcaaaacctatgtcgccctcggtttggggataggatt

SEQ ID NO: 338748 - DNA, 75 bp, synthetic construct
  source 1..75: mol_type = other DNA
ggagaaatgttcggagatcacgtgctggcaacagcgatactggatcggttgctacatcactcaaccacgctgaat

SEQ ID NO: 338749 - DNA, 75 bp, synthetic construct
  source 1..75: mol_type = other DNA
ctaccgattaaaggaaaaacgcaaagcgggagtgctggcaaaaaacgccacgccaatcagtgatgatgaaatggc

SEQ ID NO: 338750 - DNA, 75 bp, synthetic construct
  source 1..75: mol_type = other DNA
tacagaaaatagtcaatggtgccagtggcaccagagtacaaaaaatagccaatggtgccagtggcaccagagtca

SEQ ID NO: 338751 - DNA, 75 bp, synthetic construct
  source 1..75: mol_type = other DNA
gacttccgtcggatgaggaaataaacaatcaaaaggattatattattttggatgagtctgtctctattaatcaaa

SEQ ID NO: 338752 - DNA, 75 bp, synthetic construct
  source 1..75: mol_type = other DNA
atgtccggttactgtttttactctcaggatgcattagccttagcccaggcagctggagttgatgtaataataaac

SEQ ID NO: 338753 - DNA, 75 bp, synthetic construct
  source 1..75: mol_type = other DNA
agtcggcagaatacaggatatcaacgccgttcgtcaggtaaaagcggcattgttgtcatcccgggatttatctgt

SEQ ID NO: 338754 - DNA, 75 bp, synthetic construct
  source 1..75: mol_type = other DNA
aaacaggcggcagagactgcacgaaaacagacccggaccctgaacgataacgcgcgggcgcacgtctcgctggca

SEQ ID NO: 338755 - DNA, 75 bp, synthetic construct
  source 1..75: mol_type = other DNA
atttaaccgccagctgtcgctgacggggcattatgccggagtcactgccgggcagctgtggacgctcagtcgtgc

SEQ ID NO: 338756 - DNA, 75 bp, synthetic construct
  source 1..75: mol_type = other DNA
tggccgccggtttacaaagtaatgtggagatgaacgggctgctaacagacattcataatgcgtctgctcagtggg

SEQ ID NO: 338757 - DNA, 75 bp, synthetic construct
  source 1..75: mol_type = other DNA
cgtgctctggcgcttcagaatgagaatcatgaggccggtaataaatacatcccttacgggaaaatggcttcctgg

SEQ ID NO: 338758 - DNA, 75 bp, synthetic construct
  source 1..75: mol_type = other DNA
gatgaaggcagtaaagggcgtcggttctttattcggcttcacggctaatgctgacggcggtgtttatcagtctgc

SEQ ID NO: 338759 - DNA, 75 bp, synthetic construct
  source 1..75: mol_type = other DNA
ggagatgagatctttgttgatgtatccataacctgttttgatggcgatggcatttatgtgtttgtatacgggaaa

SEQ ID NO: 338760 - DNA, 75 bp, synthetic construct
  source 1..75: mol_type = other DNA
ggtggcaccagagcgttaacgttgtaggaagctatcacacacgtttcggacctcagctccgtaacgatacctacc

SEQ ID NO: 338761 - DNA, 75 bp, synthetic construct
  source 1..75: mol_type = other DNA
tagtgagcgcagagaaattccatggaaaacgtggcccggatacgttctcggatcgaagctccctgccagctacga

SEQ ID NO: 338762 - DNA, 75 bp, synthetic construct
  source 1..75: mol_type = other DNA
cggaaattgcagccgacggtgttgtaccggctgataaatttatatggcacgccgtaacgcgtgccgtcgggaatg

SEQ ID NO: 338763 - DNA, 75 bp, synthetic construct
  source 1..75: mol_type = other DNA
tgatacagcggtaccgcgatgcggaaatggcggtactggagggaaaatctgtcacgtttaacgggcagcaactga

SEQ ID NO: 338764 - DNA, 75 bp, synthetic construct
  source 1..75: mol_type = other DNA
aaaaaaaacattactggcagccggtgcggtactggcgctctcttcgtcttttactgtcaacgcagctgaaaacga

SEQ ID NO: 338765 - DNA, 75 bp, synthetic construct
  source 1..75: mol_type = other DNA
gcagcgaacgaaaacgagtgggacggttaccgtttcaaagttaaatactttgtgccgattaccgatctgtggggc

SEQ ID NO: 338766 - DNA, 75 bp, synthetic construct
  source 1..75: mol_type = other DNA
atctgctgaagcatatgcaggatattgatgagaccagaacgatcacgcttatggaaaaactgatcgttacgggtg

SEQ ID NO: 338767 - DNA, 75 bp, synthetic construct
  source 1..75: mol_type = other DNA
caaaaagctctggcgtaaatatctgttgtcaccggaagctcaaaaagtgattgagtatgctcaggatacttcatc

SEQ ID NO: 338768 - DNA, 75 bp, synthetic construct
  source 1..75: mol_type = other DNA
aaatacgctatcccccgaagggcttcaaaaagctctggcgtaaatatctgttgtcaccggaagctcaaaaagtga

SEQ ID NO: 338769 - DNA, 75 bp, synthetic construct
  source 1..75: mol_type = other DNA
ccctgtttgctctggtcagcggctgcaacatggcgggtaaaaacttacgtcagcacggcctcaaccgcctgtggc

SEQ ID NO: 338770 - DNA, 75 bp, synthetic construct
  source 1..75: mol_type = other DNA
atccggatggtggcgtttgtggcgatggtgggggaccatatagctactgcctttcagctggatatgcccttactg

SEQ ID NO: 338771 - DNA, 75 bp, synthetic construct
  source 1..75: mol_type = other DNA
tggctcctgtttgcagaacctatcaggcaggatctggcggatgcaaaaacaaccgaacgggaccgcgccatcaaa

SEQ ID NO: 338772 - DNA, 75 bp, synthetic construct
  source 1..75: mol_type = other DNA
cattaatgtttgggcaagtatttctgcaaatttacggctctacatcaacaaaagaggatgctgtattagtattta

SEQ ID NO: 338773 - DNA, 75 bp, synthetic construct
  source 1..75: mol_type = other DNA
ccccgcagtacaacatcgagatcaataacgatggtacgaacgggcagataggtccggctgccctgaaggtggttt

SEQ ID NO: 338774 - DNA, 75 bp, synthetic construct
  source 1..75: mol_type = other DNA
cgaaaattctggcgcaggcaaccatgatgaaggctgtcaagggcgttggtagtgcactggggctaggttctgttc

SEQ ID NO: 338775 - DNA, 75 bp, synthetic construct
  source 1..75: mol_type = other DNA
ataatctcaatgcgctgggcagtacgctgcaaaccttgtctgactggtggaagcagttctgggatgcggccatga

SEQ ID NO: 338776 - DNA, 75 bp, synthetic construct
  source 1..75: mol_type = other DNA
ggcaggaactgctgagcagatgtttacagcggcatttaacagtgcaggtaatgcactggcgacgttctgcacgac

SEQ ID NO: 338777 - DNA, 75 bp, synthetic construct
  source 1..75: mol_type = other DNA
atttacaggatgcaaaagcgcaggctgaacgaaattatcaggaacagcagaaacgccggaatgctgaaaatgctg

SEQ ID NO: 338778 - DNA, 75 bp, synthetic construct
  source 1..75: mol_type = other DNA
tgcgggcatcactaccggacagctgtggactctcagtcgcgccatttccgggaatggtatcacgcaacatgctgc

SEQ ID NO: 338779 - DNA, 75 bp, synthetic construct
  source 1..75: mol_type = other DNA
ttgagcgcggtgacgaagccgaaggatttttaattgtcactgcagcagcagaccagggtctggtagatattcatg

SEQ ID NO: 338780 - DNA, 75 bp, synthetic construct
  source 1..75: mol_type = other DNA
tcgctacagcggcacggtggttaaccgaccgacgttttttgcttttgcaaaaggcgcgggtgtgatgggggaagc

SEQ ID NO: 338781 - DNA, 75 bp, synthetic construct
  source 1..75: mol_type = other DNA
tctcgagaatgaccactgctgtgagcgctttgccttggcggacaggtggctcaaggagaagagccttcagaagga

SEQ ID NO: 338782 - DNA, 75 bp, synthetic construct
  source 1..75: mol_type = other DNA
cgcctgccacccgtaatgatgaggccacccggctattactgcagtacagccagcaacaggcgcaggtggagggac

SEQ ID NO: 338783 - DNA, 75 bp, synthetic construct
  source 1..75: mol_type = other DNA
gtgccgcggaggtgtacatccgtaaaatggagaaagctggaaacaccacacattcgctggaactgaaaagtgcgg

SEQ ID NO: 338784 - DNA, 75 bp, synthetic construct
  source 1..75: mol_type = other DNA
ggctgaagaatccgccacccgccagaagacggcctttatccggcggctgaaggagcaggtatccgctcagaatct

SEQ ID NO: 338785 - DNA, 75 bp, synthetic construct
  source 1..75: mol_type = other DNA
ggtggtttatgacctcgggaaaaaagcagcagcggactttatgcaacagcaggcccgtgatggtggtcggttaag

SEQ ID NO: 338786 - DNA, 75 bp, synthetic construct
  source 1..75: mol_type = other DNA
acatggacaaaattcgcgatccgttccgcagttatcaatggaacctgcgtccgtggcgcaaagatgcacaaccgc

SEQ ID NO: 338787 - DNA, 75 bp, synthetic construct
  source 1..75: mol_type = other DNA
ctacgagattgagcatgacagctttggcggttttattccggtgcgttgctgggtaacggatgactttaaactggt

SEQ ID NO: 338788 - DNA, 75 bp, synthetic construct
  source 1..75: mol_type = other DNA
acatggataaaattcgcgatccgttccgcagttaccagtggagtctgcgtccgtggcgtaaagatgcacgaccgc

SEQ ID NO: 338789 - DNA, 75 bp, synthetic construct
  source 1..75: mol_type = other DNA
aaatggaaggtgacttggaatggagagactattatgacattttaaatgacagatcaaataaccttaatgaaaatg

SEQ ID NO: 338790 - DNA, 75 bp, synthetic construct
  source 1..75: mol_type = other DNA
tacctcaatggtttattgcggtgataacctgaagggtgaggttgaggctatttataatagtcttgagaggcgtca

SEQ ID NO: 338791 - DNA, 75 bp, synthetic construct
  source 1..75: mol_type = other DNA
ccttcacctgggcgcaccgcatcagcaatcgggcggtggattttctgcaacagcccgcgcgccgacgaacctttc

SEQ ID NO: 338792 - DNA, 75 bp, synthetic construct
  source 1..75: mol_type = other DNA
tatcgccagagattttaaggcggagcaacctaatcagaaatggctgacagatatcacggagttccacctccctgc

SEQ ID NO: 338793 - DNA, 75 bp, synthetic construct
  source 1..75: mol_type = other DNA
atgtctggaaatataggggcaaatccactggctcccgtcgtacgcgaactgggctacccttcgaaaagaaatctg

SEQ ID NO: 338794 - DNA, 75 bp, synthetic construct
  source 1..75: mol_type = other DNA
gggaagctggacctgaagccattctgccactgcgtcgtggtgctgacggtaagctgggggttgtggcggatattg

SEQ ID NO: 338795 - DNA, 75 bp, synthetic construct
  source 1..75: mol_type = other DNA
tcgcccgactgaatcaggaaatacgccgccggcagatggagctggatattctgaaaaaggcggaggaaatcataa

SEQ ID NO: 338796 - DNA, 75 bp, synthetic construct
  source 1..75: mol_type = other DNA
ggattctcttgatgcgcagattgcagcactgcaggaaaaaattcagcgagcaaagaaattcccgtggacgaacgc

SEQ ID NO: 338797 - DNA, 75 bp, synthetic construct
  source 1..75: mol_type = other DNA
aggagcaggaattgatgcaggcagactggaaaaacggtgccatgcgggcatttcagaattttacagagaatgcgg

SEQ ID NO: 338798 - DNA, 75 bp, synthetic construct
  source 1..75: mol_type = other DNA
gttcacgagtatagcgatgggtcttggcgtgttcaatcagggcttaactggcgatactagccaaataaattacag

SEQ ID NO: 338799 - DNA, 75 bp, synthetic construct
  source 1..75: mol_type = other DNA
gtaggccgaaagttgagtctgttgatccggtgaaagatatctcagccgaaataatgatgttagaaaatggcttaa

SEQ ID NO: 338800 - DNA, 75 bp, synthetic construct
  source 1..75: mol_type = other DNA
gatcgcattgaaggcagcacagcgcgtcaggttatcactggcagcattaacgccgcgatcaagggatctgcatca

SEQ ID NO: 338801 - DNA, 75 bp, synthetic construct
  source 1..75: mol_type = other DNA
tctctgcgtggtgtgactgacttcctgccagtgattaaggatatcgcacatcaagacgcattccgcgaagctgta

SEQ ID NO: 338802 - DNA, 75 bp, synthetic construct
  source 1..75: mol_type = other DNA
tccaagctactcaatcaggcgatgatttcaattccttcaatgatgcgatgtttactagcgtatcaatgggcttag

SEQ ID NO: 338803 - DNA, 75 bp, synthetic construct
  source 1..75: mol_type = other DNA
atctttatcgacaaacaagtagaaaaattccagaaagatttgtctaagcgttctttgggcttagttggtgatcgc

SEQ ID NO: 338804 - DNA, 75 bp, synthetic construct
  source 1..75: mol_type = other DNA
cgtggctaatactatttttctttccgtgctggtgtccgtcagaggcaacgttgcacgtctggttgatcatctgag

SEQ ID NO: 338805 - DNA, 75 bp, synthetic construct
  source 1..75: mol_type = other DNA
ccgctggcgtatctgtgcggtatttacccgtactcatcatgggccactatcggggccaactttattttcctgtcc

SEQ ID NO: 338806 - DNA, 75 bp, synthetic construct
  source 1..75: mol_type = other DNA
aaaacgccaggcaggcagaacgctatgcgcgtgggaccctgcgcaaaatattcgaacgtctggagcgcaccgatc

SEQ ID NO: 338807 - DNA, 75 bp, synthetic construct
  source 1..75: mol_type = other DNA
tcgggattaactcctttttccagcaggtggtgcgcggcgtcatcatcgtggtggcggtgctggcgaatatcttgc

SEQ ID NO: 338808 - DNA, 75 bp, synthetic construct
  source 1..75: mol_type = other DNA
ggctggttacgcttggaaattaatcaaatggggtattagactgtttgatttagttactcgagcactggactactt

SEQ ID NO: 338809 - DNA, 75 bp, synthetic construct
  source 1..75: mol_type = other DNA
cattaaacgctctgatctgtgccggagtggtggttactctgatgttttatcgccggggtgactcccgccatcgcc

SEQ ID NO: 338810 - DNA, 75 bp, synthetic construct
  source 1..75: mol_type = other DNA
aaacaaattgattgaaacagtggtattgccaattttcgaagcgtatctacgccattattccgcgcgtggtattgt

SEQ ID NO: 338811 - DNA, 75 bp, synthetic construct
  source 1..75: mol_type = other DNA
agtaaggcgctcaaggctgacagctaatgagtatgtcgcgattcaccatgcagccgaacctctcccaatctggct

SEQ ID NO: 338812 - DNA, 75 bp, synthetic construct
  source 1..75: mol_type = other DNA
ggggtgcaggagactgccgatgccgtcgctcatctcattgagttgggatacgccgatcagcttgttctcagccac

SEQ ID NO: 338813 - DNA, 75 bp, synthetic construct
  source 1..75: mol_type = other DNA
tggctggaagcatgtcactctgactttggctgatatgggcgcgtttcgacgtgcaccgcctttaccgtatgagtc

SEQ ID NO: 338814 - DNA, 75 bp, synthetic construct
  source 1..75: mol_type = other DNA
gccaacattgagttactctcagacagcggacgggagtcactgatagacagaattaaaggcgctgacacaatcact

SEQ ID NO: 338815 - DNA, 75 bp, synthetic construct
  source 1..75: mol_type = other DNA
ggcggcaacgatcgataaagaattgaatcaagggattggcgatacggatattcgtgccggaatgatcggtgaaat

SEQ ID NO: 338816 - DNA, 75 bp, synthetic construct
  source 1..75: mol_type = other DNA
ttactctcagacagcggacgggagtcactgatagacagaattaaaggcgctgacacaatcactcttcatacgtgg

SEQ ID NO: 338817 - DNA, 75 bp, synthetic construct
  source 1..75: mol_type = other DNA
aaacaaattaattgagacggttgtattgcctattttcgaaagttatcttcgacattattccgcgcgtggtattgt

SEQ ID NO: 338818 - DNA, 75 bp, synthetic construct
  source 1..75: mol_type = other DNA
gaaagattctggtgacgattttgatactggtgaagatgatgaacaatatcaagcgccggaagttattcacgattt

SEQ ID NO: 338819 - DNA, 75 bp, synthetic construct
  source 1..75: mol_type = other DNA
aggcggtagaaactccagttaaaactaatcaccgccagcaacaacaaaaaatctttatcgacaaatctatagaaa

SEQ ID NO: 338820 - DNA, 75 bp, synthetic construct
  source 1..75: mol_type = other DNA
gtacttttgtttacgaaggtgccatcgttcctacgaagacaacatcagaaatagcctggcatccctggttggccc

SEQ ID NO: 338821 - DNA, 75 bp, synthetic construct
  source 1..75: mol_type = other DNA
ttcacccatatagcgatgggtcttggcgtgtttaaacagggcttgactggtgacacttcccagattaactactca

SEQ ID NO: 338822 - DNA, 75 bp, synthetic construct
  source 1..75: mol_type = other DNA
ctttaacagcttcaatgatgcgatgtttactagcgtatcaatgggcttaggcgtgtttaaacagggcttgactgg

SEQ ID NO: 338823 - DNA, 75 bp, synthetic construct
  source 1..75: mol_type = other DNA
agatgataagcctgaaaacatcctgaaaattgtcaaagaatggcggcgttcacaggggttacccttgtttaaaga

SEQ ID NO: 338824 - DNA, 75 bp, synthetic construct
  source 1..75: mol_type = other DNA
taccaccctttcccgtattatggcggggcgtaatgggggagctttatgctcgctggtttcccaatttgccagtct

SEQ ID NO: 338825 - DNA, 75 bp, synthetic construct
  source 1..75: mol_type = other DNA
taatttgcaatattgcttgactcgcttttttgtcatggcgtatcgtttgcccgcacctcataaagcgggtgccgg

SEQ ID NO: 338826 - DNA, 75 bp, synthetic construct
  source 1..75: mol_type = other DNA
gcactggctgtgaagccgtctggtttgagttttgagcaggcgatgaaaactcgtgtcttccagccactcaaactc

SEQ ID NO: 338827 - DNA, 75 bp, synthetic construct
  source 1..75: mol_type = other DNA
aggtctggttacaaaaattagcgcagtggcatcagaccactacgccttatctttttttacatacgccagacattg

SEQ ID NO: 338828 - DNA, 75 bp, synthetic construct
  source 1..75: mol_type = other DNA
gggcggcgatgcgaagaatgcgattctggatatccaggatacctacttcgaccgcttcgaagccagcggcatgga

SEQ ID NO: 338829 - DNA, 75 bp, synthetic construct
  source 1..75: mol_type = other DNA
aatgggggagcctttgtgctcgctggtttctcttacgccagtctgctaaccctgttacgtcccgccaccatgttt

SEQ ID NO: 338830 - DNA, 75 bp, synthetic construct
  source 1..75: mol_type = other DNA
ggttattggcggtattgccgcggctgtctatggtctgggtaaagcctggtatgacggtcagaaggagggggaaga

SEQ ID NO: 338831 - DNA, 75 bp, synthetic construct
  source 1..75: mol_type = other DNA
tgccggagtggttcgtattgaagggttaattaccgaaaaaacctgcattatttctgatgagtcaaaaaattttac

SEQ ID NO: 338832 - DNA, 75 bp, synthetic construct
  source 1..75: mol_type = other DNA
tcggtagaggggcttgcactcacgatttttgataagaataaaggcagtattagtaatgatgttaaaagcatgggt

SEQ ID NO: 338833 - DNA, 75 bp, synthetic construct
  source 1..75: mol_type = other DNA
gatacagctggcacaatctcgctactggcaaaccggcgatatgtatcagggtctgggctgggaaatgctggactg

SEQ ID NO: 338834 - DNA, 75 bp, synthetic construct
  source 1..75: mol_type = other DNA
cttcaggagaaaaaacgccggaaggatttgcaggatgcaaaagcgcaggcagaacggaattaccaggagcaacag

SEQ ID NO: 338835 - DNA, 75 bp, synthetic construct
  source 1..75: mol_type = other DNA
cgctgaagtatctgtctgatttgtggagtcgtttctgggatgcggccatgaatattggtcgtgaagactcgctgg

SEQ ID NO: 338836 - DNA, 75 bp, synthetic construct
  source 1..75: mol_type = other DNA
agctattcatgctgtggtacatggtaatgaaactgctgatcgcgcatatgaactttatctgagcgaaaaaaatta

SEQ ID NO: 338837 - DNA, 75 bp, synthetic construct
  source 1..75: mol_type = other DNA
cccccacccggcgtaccggtaacggcacggcctgcaccattacctttacccggtaaatccggtcttctgagcagg

SEQ ID NO: 338838 - DNA, 75 bp, synthetic construct
  source 1..75: mol_type = other DNA
cgctggctgaaaccgggtaaagatgcgctggcatgggttgaccagaatattgtcagcctgaaaaaactggctgct

SEQ ID NO: 338839 - DNA, 75 bp, synthetic construct
  source 1..75: mol_type = other DNA
ccctctcaacccgtacattccgaatgctgtcagccggggcgctgggtgttgccggggtgggttacaccgccaata

SEQ ID NO: 338840 - DNA, 75 bp, synthetic construct
  source 1..75: mol_type = other DNA
aacccgctctggttaatgccattgagcaaggccttcgggcagagcacggtgttgtcactgaagatgacattctca

SEQ ID NO: 338841 - DNA, 75 bp, synthetic construct
  source 1..75: mol_type = other DNA
atgggtcgaagcctctgataacgacatcctcagtgacatctaccagcaaacgataaattatgtggtcagcggcca

SEQ ID NO: 338842 - DNA, 75 bp, synthetic construct
  source 1..75: mol_type = other DNA
gataacgacatcctcagtgatatctaccagcaaacgatcaattatgtggtcagtggccagcaccctacactttaa

SEQ ID NO: 338843 - DNA, 75 bp, synthetic construct
  source 1..75: mol_type = other DNA
gctcaattgggggaatatttacgtctggggaataatcgtcaggccgtcacggattatatccggcataattttggc

SEQ ID NO: 338844 - DNA, 75 bp, synthetic construct
  source 1..75: mol_type = other DNA
gcgcagcgtagtcccccctgcgaccaataagccggtggtactgcgggcgtcaggtgcgaactctattctggcgga

SEQ ID NO: 338845 - DNA, 75 bp, synthetic construct
  source 1..75: mol_type = other DNA
tgattgatgctggtatcaaggtcggcatgccaatgatggcggtaactggtgtagggaaagacatggtgcgcgatc

SEQ ID NO: 338846 - DNA, 75 bp, synthetic construct
  source 1..75: mol_type = other DNA
agatttaaacgccactcaggcagctatcagggcgggttacagcgaaaaaactgctcgcgccactggtagcgagaa

SEQ ID NO: 338847 - DNA, 75 bp, synthetic construct
  source 1..75: mol_type = other DNA
atggcaaagctcacagacaaacaagagctgtttgcccgtgagtacctgaaagatttaaacgccactcaggcagct

SEQ ID NO: 338848 - DNA, 75 bp, synthetic construct
  source 1..75: mol_type = other DNA
gaggaccagtcagaacagaagttaccaacttaacgccggagcaggttgcagaagcgtatagaaaaatgatgggct

SEQ ID NO: 338849 - DNA, 75 bp, synthetic construct
  source 1..75: mol_type = other DNA
gatccggacctgtttaactggctgatgaatcacggtaaaccggccgatgcagaactggaaatgatggtccgactc

SEQ ID NO: 338850 - DNA, 75 bp, synthetic construct
  source 1..75: mol_type = other DNA
tgaactggttatccgcctggggcgttcgcccgcgcagcgttgcgtaaatcacatttctgaaccggacactgaaat

SEQ ID NO: 338851 - DNA, 75 bp, synthetic construct
  source 1..75: mol_type = other DNA
cgagcaggcggccagcgatgatggcgagatcactagaccgaaagaacccaactggacagcatgggccaatgacgt

SEQ ID NO: 338852 - DNA, 75 bp, synthetic construct
  source 1..75: mol_type = other DNA
caaattttgatggatcaaccgttgataaaaaacagccggttaggggggcgatggttggccccgatccgtcagtat

SEQ ID NO: 338853 - DNA, 75 bp, synthetic construct
  source 1..75: mol_type = other DNA
cgaaatgtttgggcgggtacagcgggatccattctgggtaaaaaacatcatgagcccgtcaaagctccgcgaaaa

SEQ ID NO: 338854 - DNA, 75 bp, synthetic construct
  source 1..75: mol_type = other DNA
tgtgtgtgcaggatggtcgtactcacaaacaaatctgcgagatgtacagccgcgtcagccgcgatccgttctggt

SEQ ID NO: 338855 - DNA, 75 bp, synthetic construct
  source 1..75: mol_type = other DNA
catgaatatgctgacgtccggggagctcggccctctgctatccccagactcatctgatctgagtgacgaacgcca

SEQ ID NO: 338856 - DNA, 75 bp, synthetic construct
  source 1..75: mol_type = other DNA
ctgatcgttgggaccaccggctcgggcaagacccgtatgttcgacatcctgatttcacaggccattctgcgtggg

SEQ ID NO: 338857 - DNA, 75 bp, synthetic construct
  source 1..75: mol_type = other DNA
gcagatggggctaaaaggcaaaccattggcatttatggagctgtcgcatttgcaaaaggtgatggcaaaacatcc

SEQ ID NO: 338858 - DNA, 75 bp, synthetic construct
  source 1..75: mol_type = other DNA
taattgttaaaggtatggaaggcgcaatcaacgcgaagaccgtaacctatgacttcgaacgtctgatggaaggcg

SEQ ID NO: 338859 - DNA, 75 bp, synthetic construct
  source 1..75: mol_type = other DNA
gacttcgaacgtctgatggaaggcgctaagctgctgaaatgttcagagtttggtgaagcgatcatcaagaaaatg

SEQ ID NO: 338860 - DNA, 75 bp, synthetic construct
  source 1..75: mol_type = other DNA
gggaacatcaacaacacttttgctctgcgtattgtcgatggtgaaacccaggaatatatcgcggataacctgcca

SEQ ID NO: 338861 - DNA, 75 bp, synthetic construct
  source 1..75: mol_type = other DNA
tcatcaccggttgagcgatttctggagaaacacccggatgcgcatacctggaatgtcccgaagcgacagtgggga

SEQ ID NO: 338862 - DNA, 75 bp, synthetic construct
  source 1..75: mol_type = other DNA
actgaagctggtgcgtctgtcgaaatattctctcgatgcagcgctgaaagagaaaagcacgcgcaatacccggga

SEQ ID NO: 338863 - DNA, 75 bp, synthetic construct
  source 1..75: mol_type = other DNA
aatcggctattgcagaactggcgaaagagggctggctgacgaaggaagagcgtaaggtcggtgggcgtaacgtaa

SEQ ID NO: 338864 - DNA, 75 bp, synthetic construct
  source 1..75: mol_type = other DNA
tcgacggatgggattttaaacagtacattttgggcgcacttttcaaccgttttatcagcgaaaatttttccagct

SEQ ID NO: 338865 - DNA, 75 bp, synthetic construct
  source 1..75: mol_type = other DNA
cgggcttgtgaacaaagtgcacaatactgtgtaaaacatccgccagtatggctgacatataaaaagtgtgggcgg

SEQ ID NO: 338866 - DNA, 75 bp, synthetic construct
  source 1..75: mol_type = other DNA
gggaggtggggattaaggatgtacgggcgttacgtatacttgggcaaaaatgtgttggttgcgactgcggcagca

SEQ ID NO: 338867 - DNA, 75 bp, synthetic construct
  source 1..75: mol_type = other DNA
cggtggcgcgccgccaggagcttgcagaatgggctgattctattacaccgaaacaggagtttcctgaggaacttg

SEQ ID NO: 338868 - DNA, 75 bp, synthetic construct
  source 1..75: mol_type = other DNA
gcgaaagctggtattaaagcaggtgatgtgatcacctccctgaacggtaagccaatcagcagctttgccgcgctg

SEQ ID NO: 338869 - DNA, 75 bp, synthetic construct
  source 1..75: mol_type = other DNA
gcgaagatggttggcaaagatccgcgctctgatatcgcgctgatccagatccagaacccgaaaaacctgaccgca

SEQ ID NO: 338870 - DNA, 75 bp, synthetic construct
  source 1..75: mol_type = other DNA
gggtgatgtgatcacctcactgaacggtaagccaatcagcagctttgccgcactgcgtgctcaggtgggtactat

SEQ ID NO: 338871 - DNA, 75 bp, synthetic construct
  source 1..75: mol_type = other DNA
actggttatccgcctggggcgttcgcccgagcatcgttgcgtgaatcacatttctgaaccggacactgaaatacc

SEQ ID NO: 338872 - DNA, 75 bp, synthetic construct
  source 1..75: mol_type = other DNA
actggttattcgcctggggcgttcgcccgcgcagcgttgcgtgaatcatatttctgaaccggataccgaaattcc

SEQ ID NO: 338873 - DNA, 75 bp, synthetic construct
  source 1..75: mol_type = other DNA
gcaatatctaccgtcttaatgtggaaaaactagaagcagcagcagcggcggcgcgtgaggcatataaaccgaaaa

SEQ ID NO: 338874 - DNA, 75 bp, synthetic construct
  source 1..75: mol_type = other DNA
gtcctgagcgctttgtgtattttcatccaggttttccagagcattcagtacgtctcaatcccctgagaaacttta

SEQ ID NO: 338875 - DNA, 75 bp, synthetic construct
  source 1..75: mol_type = other DNA
cacatgcggggttgcttatcgacgacgagcagtttgatgaaattaatattgtgcgcggactgcctgttcctggtg

SEQ ID NO: 338876 - DNA, 75 bp, synthetic construct
  source 1..75: mol_type = other DNA
tcgtgacctggacaatattctgaaagcaccactggatgcactgacacatgcggggttgcttatcgacgacgagca

SEQ ID NO: 338877 - DNA, 75 bp, synthetic construct
  source 1..75: mol_type = other DNA
gcgacgccgtggcagcacatattttatctcggaggagggaaagcgttatcgccgggctgtggcgcttattgtttg

SEQ ID NO: 338878 - DNA, 75 bp, synthetic construct
  source 1..75: mol_type = other DNA
taagcttgataatcaaataaaacataactgttttcgtacacgtcaagatgataaccttgttctgggggtggtatg

SEQ ID NO: 338879 - DNA, 75 bp, synthetic construct
  source 1..75: mol_type = other DNA
atgcctatgcttcagtttattttcatttttatatctagtctgtcacttgctatcaatattgctgtaaccaaccag

SEQ ID NO: 338880 - DNA, 75 bp, synthetic construct
  source 1..75: mol_type = other DNA
gtacgtggcaagccagtatctggtggacggctgggggtgaagatttaccccataatgcttgaagggcaggtcaaa

SEQ ID NO: 338881 - DNA, 75 bp, synthetic construct
  source 1..75: mol_type = other DNA
atgactgaacgcatagaatttgttttgccttacccgccgacggtgaatacttactggcgacgtcgcggcagcaca

SEQ ID NO: 338882 - DNA, 75 bp, synthetic construct
  source 1..75: mol_type = other DNA
aacctgtccggaaggctggcgataaagattattgcagagccaccggataagcgccgtcgtgacctggacaatatc

SEQ ID NO: 338883 - DNA, 75 bp, synthetic construct
  source 1..75: mol_type = other DNA
tgagcagtttgatgaaatcaatatcgttcgtgctcagccagtatctggtggacgtctgggggtgaagatttaccc

SEQ ID NO: 338884 - DNA, 75 bp, synthetic construct
  source 1..75: mol_type = other DNA
gtttgatgaaatcaatattgtacgtggtcagcttgttcctggtggtcggctgggtgtgaagatttacaaaattga

SEQ ID NO: 338885 - DNA, 75 bp, synthetic construct
  source 1..75: mol_type = other DNA
cgagcagtttgatgaaatcaatattgtgcgcggtcagcgcgttcctgggggggcggctgggcgtgaagatttacg

SEQ ID NO: 338886 - DNA, 75 bp, synthetic construct
  source 1..75: mol_type = other DNA
ttgcagagccgccggataagcgccgtcgtgacctggacaatattctgaaagcaccactggatgcactgacacatg

SEQ ID NO: 338887 - DNA, 75 bp, synthetic construct
  source 1..75: mol_type = other DNA
ctataataaactatcaagcgcttgataataaaataaaacagaagtgttttagttcacgtcaagatgataaccttg

SEQ ID NO: 338888 - DNA, 75 bp, synthetic construct
  source 1..75: mol_type = other DNA
aagatgtggtatcggtgctggaagagtacaaggccagaggacataacagaatgggacaaattttcaggaaggtac

SEQ ID NO: 338889 - DNA, 75 bp, synthetic construct
  source 1..75: mol_type = other DNA
tgaaacagaaagcatctcctctcagggtgtttgatgaacgttttggtaccagagcattagatgccataaccgtaa

SEQ ID NO: 338890 - DNA, 75 bp, synthetic construct
  source 1..75: mol_type = other DNA
gttactgatgcctgcattagctgggaaatgaccgatgccttgctgcgtgaaattcatcatgatctcaacgggcaa

SEQ ID NO: 338891 - DNA, 75 bp, synthetic construct
  source 1..75: mol_type = other DNA
acccctccctctttccatgagcagagatctttatcagagcgattgttcagagagcagggggttgataccaaaagg

SEQ ID NO: 338892 - DNA, 75 bp, synthetic construct
  source 1..75: mol_type = other DNA
tgattgatgttttccgggaggcccagcaaacgggcgatgtctcgccaggctttaaccctgcagaatcggcaaaaa

SEQ ID NO: 338893 - DNA, 75 bp, synthetic construct
  source 1..75: mol_type = other DNA
ttgctaggtcattcgaatcaaaaaatgactgatatttacaacgatgcacgcggtaaggagtggaaaaaactggtc

SEQ ID NO: 338894 - DNA, 75 bp, synthetic construct
  source 1..75: mol_type = other DNA
atgcaaaaagacgcgctgaataacgtacatattaccgacgaacaggttttaatgactccggaacaactgaaggcc

SEQ ID NO: 338895 - DNA, 75 bp, synthetic construct
  source 1..75: mol_type = other DNA
cattgctcggcatgggaactttgaaacggcttgttctggttgttccaaccgtggctcttgccgacgaaacccgtc

SEQ ID NO: 338896 - DNA, 75 bp, synthetic construct
  source 1..75: mol_type = other DNA
gataccaaaattttgctaggccattcgaatcaaaaaatgaccgatatttacaacgacgcacgcggtaaggaatga

SEQ ID NO: 338897 - DNA, 75 bp, synthetic construct
  source 1..75: mol_type = other DNA
ttggttttaaaaatggcaccgatggcagtctggcaacggcaattaacgccatgcgtgctgctgctcagccgcatc

SEQ ID NO: 338898 - DNA, 75 bp, synthetic construct
  source 1..75: mol_type = other DNA
gttttgttggcattaaccaggcagggcaggttgcgttgctacaaactcaggggaatccggacgggcatgtgatcc

SEQ ID NO: 338899 - DNA, 75 bp, synthetic construct
  source 1..75: mol_type = other DNA
gacggaggcgttagatccaaacagcccgcaatatcttggtgatctgtttagctggtctgcaattggtgctcgcac

SEQ ID NO: 338900 - DNA, 75 bp, synthetic construct
  source 1..75: mol_type = other DNA
tgccgcctgtattaggcggtgtgctggtcgttttactgacgcctggcgatgctccgcttaaagcgtttttaatct

SEQ ID NO: 338901 - DNA, 75 bp, synthetic construct
  source 1..75: mol_type = other DNA
cagcttaacgaggcattgtttcaggaaaaagagcgcctgcacattacgctggattccatcggcgaagccgtggtc

SEQ ID NO: 338902 - DNA, 75 bp, synthetic construct
  source 1..75: mol_type = other DNA
aggtgtggtacgagtgcgtgctgccggaagatcgccagcacgccgaaaaagtgattcgtgattcgttgcaatcac

SEQ ID NO: 338903 - DNA, 75 bp, synthetic construct
  source 1..75: mol_type = other DNA
agctatgcgcaaagtgcgccagcggcagaaatggcggtgagttttaccgcagaggtcgaaaagcagcttttgacg

SEQ ID NO: 338904 - DNA, 75 bp, synthetic construct
  source 1..75: mol_type = other DNA
ggaaggtggctggcgcccgactgtgcgtccgcctcgtctcggcggtaacgccagaatgggcgttttcgccacgcg

SEQ ID NO: 338905 - DNA, 75 bp, synthetic construct
  source 1..75: mol_type = other DNA
cgctgtttatccgcgaagtactggcgcaggacccgcgcccggcctatcgtaaaggtgaggaaacgggcaaaacct

SEQ ID NO: 338906 - DNA, 75 bp, synthetic construct
  source 1..75: mol_type = other DNA
acaactgcgtatcctgctgcaaacggtaaacagtacgggtaatgactccaacttactgatagtgttttatgttca

SEQ ID NO: 338907 - DNA, 75 bp, synthetic construct
  source 1..75: mol_type = other DNA
agccgaatatttttagctgggataagcggatgttcgagctgtatgaaattcctccacatatcaaaccgaactggc

SEQ ID NO: 338908 - DNA, 75 bp, synthetic construct
  source 1..75: mol_type = other DNA
tgattcgttgcaatcacgctcgccctttaaactggaatttcgcattaccgtgaaagacggtattcgccatatccg

SEQ ID NO: 338909 - DNA, 75 bp, synthetic construct
  source 1..75: mol_type = other DNA
aaaatcacctttatgaatccggttgccgagaagatgagcggctggacgcaagaagaggcgttgggtgttccgcta

SEQ ID NO: 338910 - DNA, 75 bp, synthetic construct
  source 1..75: mol_type = other DNA
cgaatactgctgcaaacggtaagcagcacgcatcatcgacatgcactggtgtttatcgatcttgatcactttaaa

SEQ ID NO: 338911 - DNA, 75 bp, synthetic construct
  source 1..75: mol_type = other DNA
cgtggtataaccccttgcaaaatctggctgactggctgcgtctggcactcggcagcgccattgttccacctctgt

SEQ ID NO: 338912 - DNA, 75 bp, synthetic construct
  source 1..75: mol_type = other DNA
aacgtatgtcgcaatctacatcacagaagtcgagggccctcgcgcacgcctcgccctatgaacagcaggtggccg

SEQ ID NO: 338913 - DNA, 75 bp, synthetic construct
  source 1..75: mol_type = other DNA
gtgcggagatggctgaatggttttctttgctgaaaagcgaaccgccgctggctgcggcggtggacgagctggaga

SEQ ID NO: 338914 - DNA, 75 bp, synthetic construct
  source 1..75: mol_type = other DNA
tcgcgcaaaaaaaaggatgtgacatcgtaattattggtaaaggacccagcgtcgataaaattgacctgtctttgt

SEQ ID NO: 338915 - DNA, 75 bp, synthetic construct
  source 1..75: mol_type = other DNA
ttatccttgataactttaccaaggttagaaatatttatctgctgcaatgcacctcggcttatcccacaccgaatg

SEQ ID NO: 338916 - DNA, 75 bp, synthetic construct
  source 1..75: mol_type = other DNA
cggcggatttggtagctatgtcgcgtttattccagaaaaagagctgggtatcgtgatgctggctaacaaaaacta

SEQ ID NO: 338917 - DNA, 75 bp, synthetic construct
  source 1..75: mol_type = other DNA
atgctggctaacaaaaactatcccaatccagcgagagtcaccgccgcctggcagattctcaacgctctacagtaa

SEQ ID NO: 338918 - DNA, 75 bp, synthetic construct
  source 1..75: mol_type = other DNA
atgttcaaaacgacgctctgcgccttattaattaccgcctcttgctccacatttgctgccccccaaaaaatcaac

SEQ ID NO: 338919 - DNA, 75 bp, synthetic construct
  source 1..75: mol_type = other DNA
ctgcggcgcagctgcgctatttatcgcagcgttaatctgcgggatgcaaatattcaaaatacatacgaattactc

SEQ ID NO: 338920 - DNA, 75 bp, synthetic construct
  source 1..75: mol_type = other DNA
tgcctgaccgcaaatttgctggtgcaggctgtctgcgtgctgttaaccctcgccagtagctctcctttattactc

SEQ ID NO: 338921 - DNA, 75 bp, synthetic construct
  source 1..75: mol_type = other DNA
actatgccgggtatctggcggggagcctgctgttttcattcggcgcgtttcatttaccctcacgcctgcgcccgt

SEQ ID NO: 338922 - DNA, 75 bp, synthetic construct
  source 1..75: mol_type = other DNA
ggatgagctgaaacttgagaatcaggcactacagggtcgattagagatccgggacagtaccgtcaaggagttaga

SEQ ID NO: 338923 - DNA, 75 bp, synthetic construct
  source 1..75: mol_type = other DNA
gagatcagatttcgtataaaaacgggttttcgtataattcttgttttgtcggataatgaggatgagcgtaatgtt

SEQ ID NO: 338924 - DNA, 75 bp, synthetic construct
  source 1..75: mol_type = other DNA
tttatcactgccgcagaaaacctgcatcctgacgatactgacgccctgttagcgcgtgttcgtgctcagttagcc

SEQ ID NO: 338925 - DNA, 75 bp, synthetic construct
  source 1..75: mol_type = other DNA
gtggtcggggcagtgctgctacgtaaattgctgccgtggtataaccccttgcaaaatctggctgactggctgcgt

SEQ ID NO: 338926 - DNA, 75 bp, synthetic construct
  source 1..75: mol_type = other DNA
atcgcgctaggcaatgaatatgtgctggctgggctgcatttttccctctcctcgcaaacgctatggcaaggtgcc

SEQ ID NO: 338927 - DNA, 75 bp, synthetic construct
  source 1..75: mol_type = other DNA
tgggcagccaaacggtggggagcattaccttgcctgaccgcgaatttgctggtgcaggcgatctgcgtgctgtta

SEQ ID NO: 338928 - DNA, 75 bp, synthetic construct
  source 1..75: mol_type = other DNA
cccaacatcgtaaaaaagatcccatccgtctgtatcagcagttgctggagtctgcagctatgattgctggtcgtg

SEQ ID NO: 338929 - DNA, 75 bp, synthetic construct
  source 1..75: mol_type = other DNA
aaccttgaagctgttgaagcaaagctatacgacacagagcgtaagaacttgagtatgaacggcattaagttcaac

SEQ ID NO: 338930 - DNA, 75 bp, synthetic construct
  source 1..75: mol_type = other DNA
gatctggagttcgaccgcgacaatctggaggaagtctggcgtcagcaaccgcgtctgttgatggagtatggctct

SEQ ID NO: 338931 - DNA, 75 bp, synthetic construct
  source 1..75: mol_type = other DNA
aacgcttttccttcagcaccgcgcttttcgggatgctggttctgaccttaggtatggggttaggtcgctttcttt

SEQ ID NO: 338932 - DNA, 75 bp, synthetic construct
  source 1..75: mol_type = other DNA
aaaatgaagagttcaatactttccgggcattacttctgagtattgactttgttaaaaaactggtcacagaaatgt

SEQ ID NO: 338933 - DNA, 75 bp, synthetic construct
  source 1..75: mol_type = other DNA
taatttcctataacctcgctactcaccctcaaccttcaatggtgcagactatgcattacggatgcgctgaaacag

SEQ ID NO: 338934 - DNA, 75 bp, synthetic construct
  source 1..75: mol_type = other DNA
attacataaactattataatcaattgaggataaaggaaaaacttggcggtcttatcccggtacaatatcgattga

SEQ ID NO: 338935 - DNA, 75 bp, synthetic construct
  source 1..75: mol_type = other DNA
ttatccaccatttcccgaacaagcaggcgctaatattcgccctgttcgcgcgtctgctggcaatcatggaagaag

SEQ ID NO: 338936 - DNA, 75 bp, synthetic construct
  source 1..75: mol_type = other DNA
caccttgcattggtaattaacaatttaatcccaagttgtagttcatgtaactcaagccttaaaggcacaattgat

SEQ ID NO: 338937 - DNA, 75 bp, synthetic construct
  source 1..75: mol_type = other DNA
tatgtaaaaaatcaataagcagaacatgtccgtattgcaatcaagcatatgctttttcgatacaaaaaaagaatc

SEQ ID NO: 338938 - DNA, 75 bp, synthetic construct
  source 1..75: mol_type = other DNA
caacagtgttggggttatcggttatttcgatggtggaacctatgattccggttgtgcatgggaagtaggctatgc

SEQ ID NO: 338939 - DNA, 75 bp, synthetic construct
  source 1..75: mol_type = other DNA
gcaaggtgcatcagtatttgactttttcggtcaatactcccacacaactggcgcttgccgatatgctgcgggagg

SEQ ID NO: 338940 - DNA, 75 bp, synthetic construct
  source 1..75: mol_type = other DNA
cggctggcgtatcacgttgctcagggcgcaaatcaatacgcgccaatgaccggcgtgcaggcattgcgcgaggcg

SEQ ID NO: 338941 - DNA, 75 bp, synthetic construct
  source 1..75: mol_type = other DNA
attgctcagaaaacggaacggctgtatggctatcaaccagatgccgacagcgatatcaccgtaacagcaggggcg

SEQ ID NO: 338942 - DNA, 75 bp, synthetic construct
  source 1..75: mol_type = other DNA
aagcggtgaaataaacacctattcaatggaaaaacgctactacaaccgtaatggcgatgttgtctgggcgttgct

SEQ ID NO: 338943 - DNA, 75 bp, synthetic construct
  source 1..75: mol_type = other DNA
acgcgccctcacatttcagcaactgacctggccggaagatcttaataaagatctgcaacaggttgagaaactgat

SEQ ID NO: 338944 - DNA, 75 bp, synthetic construct
  source 1..75: mol_type = other DNA
attaaccccgactggcggttattcagcgaagatttaaaggcgtggttaattatcgaccatctggaatataacaga

SEQ ID NO: 338945 - DNA, 75 bp, synthetic construct
  source 1..75: mol_type = other DNA
aacagttgcagctggaagatggcaatacagtgaagtggcagttacgcgatgcccagcactgttttaatctcaatg

SEQ ID NO: 338946 - DNA, 75 bp, synthetic construct
  source 1..75: mol_type = other DNA
tggcgacaacatgaatgatattgcgactgatattgataacttaagaagatccagacaggccattttttattcaga

SEQ ID NO: 338947 - DNA, 75 bp, synthetic construct
  source 1..75: mol_type = other DNA
ctgattctgatgccagtatcagcaactatcgtgaacaaacgacagacatcattaatcgtgcgttgcaaatttttc

SEQ ID NO: 338948 - DNA, 75 bp, synthetic construct
  source 1..75: mol_type = other DNA
atgaataatgaacaacgcggcgtagcactgctcattgtactcatgttactggcgctcatggctgcagacatgacg

SEQ ID NO: 338949 - DNA, 75 bp, synthetic construct
  source 1..75: mol_type = other DNA
cactgctcatcgtactcatgttactggcgctcatgtccgctctggctgcggatatgacactgagttttcacaacc

SEQ ID NO: 338950 - DNA, 75 bp, synthetic construct
  source 1..75: mol_type = other DNA
atgaataatgaacaacgcggcgtcgcgctgctcattgtactcatgttactggcgctcatggctgctctggctgca

SEQ ID NO: 338951 - DNA, 75 bp, synthetic construct
  source 1..75: mol_type = other DNA
gcagcaacgcgcactagatattgaagtgcggcgtagtaaagaggatgaatccgctgttgtatctctacgtagttt

SEQ ID NO: 338952 - DNA, 75 bp, synthetic construct
  source 1..75: mol_type = other DNA
acataccacagcaacgcatcctagaggtagaggtacggcgtaccagagaggagacgtccgccttagtttccttgc

SEQ ID NO: 338953 - DNA, 75 bp, synthetic construct
  source 1..75: mol_type = other DNA
ccttggttgtgtttgcgctggcaggaattgctctaattcagtccacgactcagcaggccgcagggatcgggccga

SEQ ID NO: 338954 - DNA, 75 bp, synthetic construct
  source 1..75: mol_type = other DNA
cggcgtgatggcgcttgagtttgctcctgcgctgtttgaacgcctgggctggaaggtgtcgctcaagcgtctgaa

SEQ ID NO: 338955 - DNA, 75 bp, synthetic construct
  source 1..75: mol_type = other DNA
cggcgtgatggctctggagtttgctccggcactgtttgaacgtctgggctggaaggtgtcgctacagcgtctgaa

SEQ ID NO: 338956 - DNA, 75 bp, synthetic construct
  source 1..75: mol_type = other DNA
caaggtgatgttcttcatcatcgcgctcggtgcgctgctgccgaccatgcaccagtcttcaatggggtcgctgat

SEQ ID NO: 338957 - DNA, 75 bp, synthetic construct
  source 1..75: mol_type = other DNA
gggtgcaagcgcggcgcgggcggtattcattatgtaaaagataatgatggcgatgcgtggcaattttacggcgat

SEQ ID NO: 338958 - DNA, 75 bp, synthetic construct
  source 1..75: mol_type = other DNA
atttcgatgcatcaaaagcaactacggaaggtttcaaatttactgctcaactgaaaggtggtcaaaccccgggtg

SEQ ID NO: 338959 - DNA, 75 bp, synthetic construct
  source 1..75: mol_type = other DNA
cagcacagtttcagcaaaattcagatttgacactcagattatatcaattacattttatactctattttgaatcta

SEQ ID NO: 338960 - DNA, 75 bp, synthetic construct
  source 1..75: mol_type = other DNA
ccatggccgagtacttccgagccgatccgacctatgcagcggagttgcttgccgaagtccgtcgtgacggcaacc

SEQ ID NO: 338961 - DNA, 75 bp, synthetic construct
  source 1..75: mol_type = other DNA
cggccgaactggccattctgttgcgtcagatggccacggcgtcggcaggtgatgagaggtcggataacgccgata

SEQ ID NO: 338962 - DNA, 75 bp, synthetic construct
  source 1..75: mol_type = other DNA
cagccgaactcgccattctgttgcggcagatggccgccgcttcagacaatgaaaacgatgaagcgatcagcttgg

SEQ ID NO: 338963 - DNA, 75 bp, synthetic construct
  source 1..75: mol_type = other DNA
ggaagctgtcactcaaacgtctgaacaaggtgatgttcttcatcatcgcgcttggtgcgctgctgccaactatgc

SEQ ID NO: 338964 - DNA, 75 bp, synthetic construct
  source 1..75: mol_type = other DNA
tcctgagacttggtattcatttttcgtcttgcgacgtcaagaatccgtatcttcgagtgcccacacagattgtct

SEQ ID NO: 338965 - DNA, 75 bp, synthetic construct
  source 1..75: mol_type = other DNA
aaaagtttgatgctcaaagaattaaacttcgtaatgaattacgtgttcactcctgagacttggtattcatttttc

SEQ ID NO: 338966 - DNA, 75 bp, synthetic construct
  source 1..75: mol_type = other DNA
aaagaattaaacttcgtaatgaattacgtgttcactcttgagacttggtattcatttatcgtcttgcgacgttaa

SEQ ID NO: 338967 - DNA, 75 bp, synthetic construct
  source 1..75: mol_type = other DNA
tgatcccgcgcccttacaggcagaattgaactccgccaaaggttcgttggcgaaagcgctgtccaccgccagtaa

SEQ ID NO: 338968 - DNA, 75 bp, synthetic construct
  source 1..75: mol_type = other DNA
aaagttaagccattaatgatctcattatatggaataaaatccaccgaacaaattgacgaaataattttcaagcaa

SEQ ID NO: 338969 - DNA, 75 bp, synthetic construct
  source 1..75: mol_type = other DNA
gattcaggacccgatcatgcgaaaggctgtcgctaacgcacaggagcgcatagggactaatcgacagaaaatggt

SEQ ID NO: 338970 - DNA, 75 bp, synthetic construct
  source 1..75: mol_type = other DNA
gctgtggctaacgcacaggagcgcatagggactaatcgacagaaaatggttgatgaactgggacactgggaggaa

SEQ ID NO: 338971 - DNA, 75 bp, synthetic construct
  source 1..75: mol_type = other DNA
gttctaagtactggcgtttgcagtaccgttatgatggcaagcaaaagatgttggcacttgggatttaccctgaaa

SEQ ID NO: 338972 - DNA, 75 bp, synthetic construct
  source 1..75: mol_type = other DNA
ctacacgtttgagcacaatgggcgtaaatgggactacgggaagtcaacgcagacgcgtcttgagccgtcggtggc

SEQ ID NO: 338973 - DNA, 75 bp, synthetic construct
  source 1..75: mol_type = other DNA
aggcgatgttcaccaaagggatggaaatccacgttcgccagcgcaccatgaagaaggagctggaaaagctgacca

SEQ ID NO: 338974 - DNA, 75 bp, synthetic construct
  source 1..75: mol_type = other DNA
ggcgaactacacgtttgagcacaatggccggaaatgggactacgggaagtcaacgcagacgcgtcttgagccatc

SEQ ID NO: 338975 - DNA, 75 bp, synthetic construct
  source 1..75: mol_type = other DNA
ctggcgctggggaaataccctgaagtctcgctggccgatgccagggggcgccgggatgaagcccgtaagctaata

SEQ ID NO: 338976 - DNA, 75 bp, synthetic construct
  source 1..75: mol_type = other DNA
cgattcctggtgagcgtgaaccgctagaaggtgttaagcattctcagcgtggttcaaagatgcgaacacctcatc

SEQ ID NO: 338977 - DNA, 75 bp, synthetic construct
  source 1..75: mol_type = other DNA
atgaactgatcttccccggcgaccataacccgtataagccaatgtgtgaaaacacggtcaataaggcactgcggg

SEQ ID NO: 338978 - DNA, 75 bp, synthetic construct
  source 1..75: mol_type = other DNA
aattttaaagcagataaaacagttttgtggggctcatgacttgatctttattggtgatcacgattcgcacaaacc

SEQ ID NO: 338979 - DNA, 75 bp, synthetic construct
  source 1..75: mol_type = other DNA
gctaatggtgtcgatcccagtgaaaacaagaaagctgttaaggtagaacaggaacaagaggcgataacgtttgaa

SEQ ID NO: 338980 - DNA, 75 bp, synthetic construct
  source 1..75: mol_type = other DNA
tgataactacaccggcagaccattaacgcggttagctgtggatttgacgttactggttttcatccgttcgagcga

SEQ ID NO: 338981 - DNA, 75 bp, synthetic construct
  source 1..75: mol_type = other DNA
atgattattaagagttttaagctatacacccctgaaaaatctgacgtgccgggtgcgatgtacctgaaatcagag

SEQ ID NO: 338982 - DNA, 75 bp, synthetic construct
  source 1..75: mol_type = other DNA
ccacctatgtgcagatgatgccgcacactaccgccgttaatactggcctctttttcggcctgcgcgggcgggtga

SEQ ID NO: 338983 - DNA, 75 bp, synthetic construct
  source 1..75: mol_type = other DNA
ccagccagcacaatgatgcgccgaaaaccacaccttcaccgttcgatgaaaaccgcgacggactggtgattggtg

SEQ ID NO: 338984 - DNA, 75 bp, synthetic construct
  source 1..75: mol_type = other DNA
ataagcttagtcggttagcggattctgttaaaaatataaatgataaattaaatgaagaaatagatataattgatg

SEQ ID NO: 338985 - DNA, 75 bp, synthetic construct
  source 1..75: mol_type = other DNA
tacatcatgcatgaagcccgcaaggttgattgtgagtttttgcagagtaacaactttgcctttggcggcattaat

SEQ ID NO: 338986 - DNA, 75 bp, synthetic construct
  source 1..75: mol_type = other DNA
gcgcatggtacggcgaccgatcgtggtgatatggcagaaagtctggcgacagcaaccatttacggtgataatgtg

SEQ ID NO: 338987 - DNA, 75 bp, synthetic construct
  source 1..75: mol_type = other DNA
tgacagggaaaaagcctgccatcaccgagagggaaagcaacggtattcgctggcgctggctgggcgatggattac

SEQ ID NO: 338988 - DNA, 75 bp, synthetic construct
  source 1..75: mol_type = other DNA
aaaagtcgttgatactctgaccgcggagaaagcgcgcgggatgaagggcgatgaaataaacgcgtggcgtaatgc

SEQ ID NO: 338989 - DNA, 75 bp, synthetic construct
  source 1..75: mol_type = other DNA
ggcgatgaaattaacgcctggcgtaatgcgatggaagcggcgaactacacgtttgagcacaatgggcgtaaatgg

SEQ ID NO: 338990 - DNA, 75 bp, synthetic construct
  source 1..75: mol_type = other DNA
tgtacaggtgacagcagaagagcgtattgcggtgagtgaagcggcagagcatgcgatgttcactaaagggatgga

SEQ ID NO: 338991 - DNA, 75 bp, synthetic construct
  source 1..75: mol_type = other DNA
attgataatgattcttttatttcatgttttggcttcagtttaaaagatttggttggcttcttttggtttttagat

SEQ ID NO: 338992 - DNA, 75 bp, synthetic construct
  source 1..75: mol_type = other DNA
gccagaagccttttttatgctgttacagtcattgttatattcctgattggatggggaactggtgttgttttcttc

SEQ ID NO: 338993 - DNA, 75 bp, synthetic construct
  source 1..75: mol_type = other DNA
gcattgatgatgtggcccggagtttgttttatgctgtgaccgttatcgttatattccttactggatggggtgttg

SEQ ID NO: 338994 - DNA, 75 bp, synthetic construct
  source 1..75: mol_type = other DNA
atccgccgacagtgaacacttactggcgacgccgtggcagcacatattttgtatcaaaagccggggagcgttatc

SEQ ID NO: 338995 - DNA, 75 bp, synthetic construct
  source 1..75: mol_type = other DNA
gtttgacgaaattaatattgtgcgcggtcagctcgtttctggtggtcggttgggtgtgcagatttacaaaattga

SEQ ID NO: 338996 - DNA, 75 bp, synthetic construct
  source 1..75: mol_type = other DNA
aacctgtccggaaggctggcaataaaaattattgcagagccaccggataagcgccgtcgtgacctggacaatatc

SEQ ID NO: 338997 - DNA, 75 bp, synthetic construct
  source 1..75: mol_type = other DNA
cgttatcgccgggctgtggcgcttattgttcgccagcagcggctgaaattaagcctgtccggaaggctggcgata

SEQ ID NO: 338998 - DNA, 75 bp, synthetic construct
  source 1..75: mol_type = other DNA
gcgacgccgtggcagcacatattttgtatcaaaagtcggtgagcgttatcgccgtgatgtggcgcttattgttcg

SEQ ID NO: 338999 - DNA, 75 bp, synthetic construct
  source 1..75: mol_type = other DNA
tgacattgttaaatctggaaaaaattgaggaaggactctttcgcggccagagtgaagatttaggtttacgccagg

SEQ ID NO: 339000 - DNA, 75 bp, synthetic construct
  source 1..75: mol_type = other DNA
atgagaagagtcttctggttggtcgccgctgctttgttacttgcagggtgtgcaggcgaaaaaggcattgttgag

SEQ ID NO: 339001 - DNA, 75 bp, synthetic construct
  source 1..75: mol_type = other DNA
caccgcgcgagcagcggcgcgtgattatggcgttccagatgcatttccgcccgacgttatataacggcgaagcgg

SEQ ID NO: 339002 - DNA, 75 bp, synthetic construct
  source 1..75: mol_type = other DNA
tacgccaccgcgcgaaggcatcatcaaacgctggacctggcctgccggggaaaacgacgattctgtggcgctact

SEQ ID NO: 339003 - DNA, 75 bp, synthetic construct
  source 1..75: mol_type = other DNA
gtttgatgaaatcaatattgtgcgcggtcagctcgttcctggtggtcggttgggcgtgaagatttacgaaataat

SEQ ID NO: 339004 - DNA, 75 bp, synthetic construct
  source 1..75: mol_type = other DNA
cgggactgttaatggacgatgagcaatttgatgaaatcaatgttgtacgtggtcagccagtatctggtggacggc

SEQ ID NO: 339005 - DNA, 75 bp, synthetic construct
  source 1..75: mol_type = other DNA
atgcgtacagagtttgttttgccctggccgccgacggtgaacacttactggcgtcgtcgtggcagcacatatttt

SEQ ID NO: 339006 - DNA, 75 bp, synthetic construct
  source 1..75: mol_type = other DNA
gtgaaaaaaaccatgatgatggcgcagcgtttgtatgaagctggctacatcacttacatgcgtaccgactcaact

SEQ ID NO: 339007 - DNA, 75 bp, synthetic construct
  source 1..75: mol_type = other DNA
gaacgcatagaatttgttttgccttacccgccaacggtgaacacttactggcgtcgtcgtggcagcacatatttt

SEQ ID NO: 339008 - DNA, 75 bp, synthetic construct
  source 1..75: mol_type = other DNA
ttaagcctgtccggaaggctggcgataaaggtgattgcagagccaccggataagcgtcgtcgcgacctggacaat

SEQ ID NO: 339009 - DNA, 75 bp, synthetic construct
  source 1..75: mol_type = other DNA
ttgccgagccaccggataagcgccgccgtgacctggacaatattctgaaagcgccgctggggtgtgggcaggccg

SEQ ID NO: 339010 - DNA, 75 bp, synthetic construct
  source 1..75: mol_type = other DNA
gttatcgccgggatgtggcgcttattgttcgccagcagcggctgaaattaaacctgtccggaaggctggcgataa

SEQ ID NO: 339011 - DNA, 75 bp, synthetic construct
  source 1..75: mol_type = other DNA
atgaaacgattcgatgaagatcaggctcgccacgcacggattacccgcctgcccggtgagcataatgagcattcg

SEQ ID NO: 339012 - DNA, 75 bp, synthetic construct
  source 1..75: mol_type = other DNA
aagccagcaccgcatggcatgcggcaatgcgcgccacacctggcgacaaagaaaagattcagctttgctttgaag

SEQ ID NO: 339013 - DNA, 75 bp, synthetic construct
  source 1..75: mol_type = other DNA
tttacgtaacggtgaagtcgcgccgccgaaagaagatccggttccgctgccagaattaccgtgcgaaaaatcgga

SEQ ID NO: 339014 - DNA, 75 bp, synthetic construct
  source 1..75: mol_type = other DNA
gggcgaattccgcattaaaggttatgacggcccgatcgttgagtgtgaaaaatgtggctctgaaatgcacctgaa

SEQ ID NO: 339015 - DNA, 75 bp, synthetic construct
  source 1..75: mol_type = other DNA
tcgtccgtctacctatgcgtcgatcatttcgaccattcaggatcgcggctatgtgcgtgtggaaaaccgtcgctt

SEQ ID NO: 339016 - DNA, 75 bp, synthetic construct
  source 1..75: mol_type = other DNA
attattgcagagccaccggataagcgccgtcgtgacctggacaatatcctgaaggcaccactggatgcgctgacg

SEQ ID NO: 339017 - DNA, 75 bp, synthetic construct
  source 1..75: mol_type = other DNA
cgacaggcattttatgaagcctcttttttcttacgctctgctcatttgcaacaggtcgccagcattcttaacgat

SEQ ID NO: 339018 - DNA, 75 bp, synthetic construct
  source 1..75: mol_type = other DNA
gctgaacgtgctggaaggcgaagacgctgaaaccaacgcgttgcgcgcaaaacgtcgttgcccgaaatgcggcac

SEQ ID NO: 339019 - DNA, 75 bp, synthetic construct
  source 1..75: mol_type = other DNA
gaatcatctcacagcccagaacgtgccaaatctgtttgcccgtaacgaacgcgtaatctgtctcttcgataccga

SEQ ID NO: 339020 - DNA, 75 bp, synthetic construct
  source 1..75: mol_type = other DNA
agggatcaccgcaaaagcagagcaacgggcgataaaaatgttcgcttatgccaatatcatccaggattgtggaaa

SEQ ID NO: 339021 - DNA, 75 bp, synthetic construct
  source 1..75: mol_type = other DNA
cctggtgaccaatgaaggtaatgcgcgaatgtgtaccacgctgcctaaaacgcatattgcagtgatgggaatgga

SEQ ID NO: 339022 - DNA, 75 bp, synthetic construct
  source 1..75: mol_type = other DNA
tctcatgttgtggttccggctattcataaagatcgccaccagatccgccgggtgctacacgaacgtctgggctat

SEQ ID NO: 339023 - DNA, 75 bp, synthetic construct
  source 1..75: mol_type = other DNA
ttgaaaccgatctgggggaatatattcttcagttggatcaagatccgccatctcatgttgtggttccggccattc

SEQ ID NO: 339024 - DNA, 75 bp, synthetic construct
  source 1..75: mol_type = other DNA
tctccagttggatcaagatccgccatctcatgtcgtggttccggctatccataaagatcgccaccagatccgccg

SEQ ID NO: 339025 - DNA, 75 bp, synthetic construct
  source 1..75: mol_type = other DNA
cgcacattgcggtgatgggcatggagcgtatcgcgccgacctttgccgaggtggatgtgctgattaccatgctgg

SEQ ID NO: 339026 - DNA, 75 bp, synthetic construct
  source 1..75: mol_type = other DNA
aaaagtttgatgctcaaagaattaaactttgtaatgaattacgtgttcactcttgagacttggtattcatttttc

SEQ ID NO: 339027 - DNA, 75 bp, synthetic construct
  source 1..75: mol_type = other DNA
tctggtttgcaaaaaccaaagaagacgctacccgctacattttacaggttgcccaacgcaaaaatgcccggaagg

SEQ ID NO: 339028 - DNA, 75 bp, synthetic construct
  source 1..75: mol_type = other DNA
caggataaccccacatctgacacgttgaagcatgaagtggagcgatataaccagataaaccaccagcacagtgat

SEQ ID NO: 339029 - DNA, 75 bp, synthetic construct
  source 1..75: mol_type = other DNA
ctgaagacctggtaaaacaggcactgtattccggtgaagtaaataagttgctgaaagcacaggtccgcaaggatt

SEQ ID NO: 339030 - DNA, 75 bp, synthetic construct
  source 1..75: mol_type = other DNA
atgaacaaaaagctacttgccatcgtattagcagcatcttccctttcagccgtttcagtaatggctggtgttgac

SEQ ID NO: 339031 - DNA, 75 bp, synthetic construct
  source 1..75: mol_type = other DNA
cgggagtgttaatggacgatgagcagtttgatgaaatcaatattgtaggtggtcagccagtatctggtggacggc

SEQ ID NO: 339032 - DNA, 75 bp, synthetic construct
  source 1..75: mol_type = other DNA
cagacgaggtagcttcccgtgtgcgggcgctgattgaagaacaaaatctggaaccgggcatgaagttgcccgctg

SEQ ID NO: 339033 - DNA, 75 bp, synthetic construct
  source 1..75: mol_type = other DNA
tgttcgccagcagcggctgaaattaaacctgtccggacggctggcgataaaggtgattgcagagccaccggataa

SEQ ID NO: 339034 - DNA, 75 bp, synthetic construct
  source 1..75: mol_type = other DNA
aagcgctggacctggcctgccggggaaaacgacggttctgtggcactgctgaaaggccaggaaatgggtcgcttt

SEQ ID NO: 339035 - DNA, 75 bp, synthetic construct
  source 1..75: mol_type = other DNA
tgaccacttacctctccccgcgtgactaccaccgcgtacacatgccgtgcaacggtattctgcgtgagatgatct

SEQ ID NO: 339036 - DNA, 75 bp, synthetic construct
  source 1..75: mol_type = other DNA
gtgcgcggtcagctcgttcctggtggtcgactgggcgtgaaaatttacgaaataatgcatgacgggcaggtcaat

SEQ ID NO: 339037 - DNA, 75 bp, synthetic construct
  source 1..75: mol_type = other DNA
gcgccgtcgtgacctggacaatatcctgaaggcaccactggatgtactgacgcatgcggggctgctcatagacga

SEQ ID NO: 339038 - DNA, 75 bp, synthetic construct
  source 1..75: mol_type = other DNA
cgacgagtactatgttggcgacattgctgtatacgacgactcaaagcccggcacgctgaacgactttctgactgc

SEQ ID NO: 339039 - DNA, 75 bp, synthetic construct
  source 1..75: mol_type = other DNA
acccaaccagttatgataacgcggcggctctcgatcaatcgtcatggggcgggctgtttgtagcgaatatagaca

SEQ ID NO: 339040 - DNA, 75 bp, synthetic construct
  source 1..75: mol_type = other DNA
gtctcgaaaaacttggatatccgcatactttcgtttctaccgacttcaatacagtcgcgctagatgttaagacgt

SEQ ID NO: 339041 - DNA, 75 bp, synthetic construct
  source 1..75: mol_type = other DNA
catcccctgtgggagaaccgctgagcggagcaacaataaccctgacctcactacacaatcaacccgggatcctga

SEQ ID NO: 339042 - DNA, 75 bp, synthetic construct
  source 1..75: mol_type = other DNA
gaatgttaatggacgatgagcagtttgatgaaatcaatattgtacgtggccagccagtatctggtggacggctgg

SEQ ID NO: 339043 - DNA, 75 bp, synthetic construct
  source 1..75: mol_type = other DNA
atatgacgtcagcgccaccgacatcaccagctcgtttatggctatccgcaagaccatgaccagcagcggacgcag

SEQ ID NO: 339044 - DNA, 75 bp, synthetic construct
  source 1..75: mol_type = other DNA
ggaggaatgggaggactttgccccgttcgccgaccatccgttcggctctcgtcctgtctggattggctacgaccc

SEQ ID NO: 339045 - DNA, 75 bp, synthetic construct
  source 1..75: mol_type = other DNA
cgcctcgggcatggcctcgcaaaagcacctgcgctcgacctatttttcgacaccttccacgctggcgcacggcgc

SEQ ID NO: 339046 - DNA, 75 bp, synthetic construct
  source 1..75: mol_type = other DNA
gtgtttgctctcaaccgtgatgtcggtattccgccacatttgcgtgatgttggggtacgcaaggaagacattccg

SEQ ID NO: 339047 - DNA, 75 bp, synthetic construct
  source 1..75: mol_type = other DNA
ccattgcctattttggtaatggggcgataaaacgcatccttgatgaagtaaaaaaacgaaaattaacaaaagcat

SEQ ID NO: 339048 - DNA, 75 bp, synthetic construct
  source 1..75: mol_type = other DNA
agccagaccggcaacgaggcagaccttaatccgaacgtcgctaaccgcaacaaaggcgggcgtcgcaaaccgaaa

SEQ ID NO: 339049 - DNA, 75 bp, synthetic construct
  source 1..75: mol_type = other DNA
gcgtcggtgttcccgttcgaggagctgcaacgctgcatggtcgacacgctggaagaatgggaagactatgcgccg

SEQ ID NO: 339050 - DNA, 75 bp, synthetic construct
  source 1..75: mol_type = other DNA
aagcgaaagacaccatccgacgtgggtgtctggaatatgacgccggtgcaaccgacatcacgcagtcgtttatgg

SEQ ID NO: 339051 - DNA, 75 bp, synthetic construct
  source 1..75: mol_type = other DNA
cgtcgagtatatcggcatcgatgcaaccggcatcggccagggggtttaccagctcgtgcgctccttctttccggc

SEQ ID NO: 339052 - DNA, 75 bp, synthetic construct
  source 1..75: mol_type = other DNA
aatggcggaaacgaagccgacttaaaccctaacgttgccaaccgcaacaaaggcccacgtcgtcagccggaaaag

SEQ ID NO: 339053 - DNA, 75 bp, synthetic construct
  source 1..75: mol_type = other DNA
caatccgtcgcgccaccaccgccagcggcaaccgcccgacctatgaagccacccgcagcgaagaagccagccacg

SEQ ID NO: 339054 - DNA, 75 bp, synthetic construct
  source 1..75: mol_type = other DNA
tggatattgacctgacccacagcaatcttgcgcgtggcctgctctgccctgacgggcagtaccgccagatcgtca

SEQ ID NO: 339055 - DNA, 75 bp, synthetic construct
  source 1..75: mol_type = other DNA
tggccccgcagtgggtgacgcggacgaatcatgcggtgagcgacctgacgggccgcccgctgatgctctttaaca

SEQ ID NO: 339056 - DNA, 75 bp, synthetic construct
  source 1..75: mol_type = other DNA
cgagatgcagcgtctggtgaaaggtgaggttgtggcttctacctttgatgaaccggcatctcgccacgttcaggt

SEQ ID NO: 339057 - DNA, 75 bp, synthetic construct
  source 1..75: mol_type = other DNA
atgacatctacgtttccccctagcaaaacccgccgtttcaccctccgcactggtgataccatctctggtaagatt

SEQ ID NO: 339058 - DNA, 75 bp, synthetic construct
  source 1..75: mol_type = other DNA
acaaacttctgaaaagtcttgcaggtaagccgcaggacagacaaaaaatcatggctgatgggcgggggctatctg

SEQ ID NO: 339059 - DNA, 75 bp, synthetic construct
  source 1..75: mol_type = other DNA
gggtgctgcgtctgaaggggcgactgtttctggttggaccgaaaaagatgatggttcctatgtcgctacgctgac

SEQ ID NO: 339060 - DNA, 75 bp, synthetic construct
  source 1..75: mol_type = other DNA
cgggaacccggtcaccgggctgaagccagatgcaccagtgtttagcggtgccgccagcacggggagtgagcgtcc

SEQ ID NO: 339061 - DNA, 75 bp, synthetic construct
  source 1..75: mol_type = other DNA
tggctcgacaaccagcaccggcttattgcttacgatacgctgtttctgggggccatcaacactaccacagtgcat

SEQ ID NO: 339062 - DNA, 75 bp, synthetic construct
  source 1..75: mol_type = other DNA
tgagctgataagccagcagttcagccgggtacggcagccgcatccgtccgtggccccgcagtgggtgacgcggac

SEQ ID NO: 339063 - DNA, 75 bp, synthetic construct
  source 1..75: mol_type = other DNA
tatgtcgatgagatattctggatcccgaattttcagaagctgcgcaaagtcgcgtcaggcatggcctcgcagaag

SEQ ID NO: 339064 - DNA, 75 bp, synthetic construct
  source 1..75: mol_type = other DNA
aactcaacgggttatatacctgcgcgacggatacgagcatgagtgcttcagtcctctcgaacagtttcagcgtaa

SEQ ID NO: 339065 - DNA, 75 bp, synthetic construct
  source 1..75: mol_type = other DNA
ccagattaagattcaggctgaagaacgcttaaagccggtcacagtggaggatgcactaaattactggtatgaaaa

SEQ ID NO: 339066 - DNA, 75 bp, synthetic construct
  source 1..75: mol_type = other DNA
ctgcggtgggccatttgccggtagcgggtctggcgctgatcctcggtatcgaccgctttatgtcagaagctcgtg

SEQ ID NO: 339067 - DNA, 75 bp, synthetic construct
  source 1..75: mol_type = other DNA
gtagcctcttctttgcaaagatgtcaaagtttatgacgaaatatacccttatcgggttgcttgccgtgtgcgcca

SEQ ID NO: 339068 - DNA, 75 bp, synthetic construct
  source 1..75: mol_type = other DNA
gcgattcgcgcgcatcaaccgctacggccagaccggaaacgaggtggatttaaaccccagtattgccagccgtaa

SEQ ID NO: 339069 - DNA, 75 bp, synthetic construct
  source 1..75: mol_type = other DNA
gctgttcaaccgtgggcgcaacaaagctgacaaggtggacatcgacctgtcccacagcaatctggcacccggcct

SEQ ID NO: 339070 - DNA, 75 bp, synthetic construct
  source 1..75: mol_type = other DNA
cgccctggtactcaaggcctacgacattattagccaccgccgcctggagtttgacgccgggcacaccgacattgc

SEQ ID NO: 339071 - DNA, 75 bp, synthetic construct
  source 1..75: mol_type = other DNA
tcgaccttgaccagttgcgcatggagtacagcccggatgaataccagaacctgctgatgtgcgagttcgtggacg

SEQ ID NO: 339072 - DNA, 75 bp, synthetic construct
  source 1..75: mol_type = other DNA
aggcctacgacattatcagtcaccgccgcctggaatttgacgccggacacaccgacattgcgcaatcatttatgg

SEQ ID NO: 339073 - DNA, 75 bp, synthetic construct
  source 1..75: mol_type = other DNA
tcaaaaaactgaccgaacagtataacgtgacctatatcggcatcgactcgaccggcgtcggacacggggtttacg

SEQ ID NO: 339074 - DNA, 75 bp, synthetic construct
  source 1..75: mol_type = other DNA
cagatagtcaccgtggaagatgcggtgcgcggtggctgtaacctgttcgacctcggccagttgcgcatggagtac

SEQ ID NO: 339075 - DNA, 75 bp, synthetic construct
  source 1..75: mol_type = other DNA
atgaacaccacactgacccccgcagatctcgatccccgtcggcaggccatgctgctgtactttcagggataccgc

SEQ ID NO: 339076 - DNA, 75 bp, synthetic construct
  source 1..75: mol_type = other DNA
tgagcgtcaccagtggaaaggcatggactttgccactcaggctgaatccatccgcaaactcaccgaaaaatataa

SEQ ID NO: 339077 - DNA, 75 bp, synthetic construct
  source 1..75: mol_type = other DNA
aataccagaacctgctgatgtgcgagttcgtggacgatctcgcgtccgtgtttccgctcagcgaactgcaggcgt

SEQ ID NO: 339078 - DNA, 75 bp, synthetic construct
  source 1..75: mol_type = other DNA
taaccagattttcctttccgccagtaaggcacaggcccacgtctttaagcagtacatcatcgacttcgccaaaga

SEQ ID NO: 339079 - DNA, 75 bp, synthetic construct
  source 1..75: mol_type = other DNA
gcatggtggacagttgggaagtctggaccgactttcatgcactggccctgcgcccgtttggctggcgcgaagtgt

SEQ ID NO: 339080 - DNA, 75 bp, synthetic construct
  source 1..75: mol_type = other DNA
aaatctattgttttcagttaacttttataagttgcgacgctcatataaagataagatttttggtgatgctgccaa

SEQ ID NO: 339081 - DNA, 75 bp, synthetic construct
  source 1..75: mol_type = other DNA
ccccaacgttaaaaatgccctggtactcaaggcctacgacattatcagtcaccgccgtctggagtttgacgccgg

SEQ ID NO: 339082 - DNA, 75 bp, synthetic construct
  source 1..75: mol_type = other DNA
cgctggaaagctatcttaatcgcctgctggctgccgatctccagcaagccagattatggagcgccgtgcctggcg

SEQ ID NO: 339083 - DNA, 75 bp, synthetic construct
  source 1..75: mol_type = other DNA
tggcaaccgcaaaatcgtgacagtcaggtcaccgacgcccagtggcagggactgatgagtcagttgcatttgcaa

SEQ ID NO: 339084 - DNA, 75 bp, synthetic construct
  source 1..75: mol_type = other DNA
tgcgtcgtcatcgcgccgccagtcgtcgccggtggacgattccgaatcctcgagcgccatcagtggaaagggatg

SEQ ID NO: 339085 - DNA, 75 bp, synthetic construct
  source 1..75: mol_type = other DNA
tctgaatgccgatccagaattttttatgcatcagaagcaatcatctgcggcgctggaaagctattttaattgcct

SEQ ID NO: 339086 - DNA, 75 bp, synthetic construct
  source 1..75: mol_type = other DNA
ctgcatcagaagcagtcatctgcagcgctggaaagctaccttaatcgcctgctggccgccgatctccagcaagcc

SEQ ID NO: 339087 - DNA, 75 bp, synthetic construct
  source 1..75: mol_type = other DNA
ccagccagaacagcgtgcattattgttcagacgagcagcggcagcgcagcacgctggcctgaagctgattgttgg

SEQ ID NO: 339088 - DNA, 75 bp, synthetic construct
  source 1..75: mol_type = other DNA
tgcaatccaggctcgggggttacgtttctgccactgtcgcgatttatccgtcgctttaaccgcgtggagttctgg

SEQ ID NO: 339089 - DNA, 75 bp, synthetic construct
  source 1..75: mol_type = other DNA
ccctgaaaaccggtcataaccagatttttctgtcggccagtaaaacgcaggcgtatgtgttccgcgaatacatca

SEQ ID NO: 339090 - DNA, 75 bp, synthetic construct
  source 1..75: mol_type = other DNA
cctttctgccagtaaggcacaggcccacgtcttcaaacagtacatcatcgactttgccaaagaagtagaggtgga

SEQ ID NO: 339091 - DNA, 75 bp, synthetic construct
  source 1..75: mol_type = other DNA
tacgcaaaacggcgacagcgccggatgcgtagtggtggcaccgccagccgtgcctggtggtaagttccgcattct

SEQ ID NO: 339092 - DNA, 75 bp, synthetic construct
  source 1..75: mol_type = other DNA
ccgtctggagtttgacgccggacacaccgacatagcgcagtcatttatggcaatccgccgcgccaccaccgccag

SEQ ID NO: 339093 - DNA, 75 bp, synthetic construct
  source 1..75: mol_type = other DNA
tccaggagctgcgcaaagtggcttccggtatggctattcacaaaaaatggcggcagacctatttttccacgccat

SEQ ID NO: 339094 - DNA, 75 bp, synthetic construct
  source 1..75: mol_type = other DNA
aaatcgacgttacgttttatttacttgcttcgtgatgatatcttcatttcgaaggatagaaccaaattctttgat

SEQ ID NO: 339095 - DNA, 75 bp, synthetic construct
  source 1..75: mol_type = other DNA
agaaggtaaagttcttaaccagttaattcaccaaattaatgctgatgatattccccagacacattttaaagtaaa

SEQ ID NO: 339096 - DNA, 75 bp, synthetic construct
  source 1..75: mol_type = other DNA
agtattaaagcagttactggaaaacagtaccgttgccagcattgttggggctggcgcaagtgccttaataggctt

SEQ ID NO: 339097 - DNA, 75 bp, synthetic construct
  source 1..75: mol_type = other DNA
attaatctggcaacagaaaagaaagccagcctgctaaaacagacaggagaacaaatcgcaatcttacaggatgct

SEQ ID NO: 339098 - DNA, 75 bp, synthetic construct
  source 1..75: mol_type = other DNA
tattaatttttccaacctgaccttaatgctgagtaaggtttacacgcttaatagtgaagatgatattcgccataa

SEQ ID NO: 339099 - DNA, 75 bp, synthetic construct
  source 1..75: mol_type = other DNA
tttagtgaaaaagacaaccttattattgaagaaataaagaaaatagaaaaagatattagagatagaaaaaaagag

SEQ ID NO: 339100 - DNA, 75 bp, synthetic construct
  source 1..75: mol_type = other DNA
tgcttgccgggatgacatccacggaatatgccgactggcgacgtttttactgcgcgcattattttcaggacacac

SEQ ID NO: 339101 - DNA, 75 bp, synthetic construct
  source 1..75: mol_type = other DNA
cgacgtcagaaaaaccgccagtgctgttgaacagggcctgagccgccaggcgctggctgcacaaaaagcccggga

SEQ ID NO: 339102 - DNA, 75 bp, synthetic construct
  source 1..75: mol_type = other DNA
aactggatatgcatttttccgggctgacgtacgctgtactcagcctgtttttttgcgatccggatatgcatccct

SEQ ID NO: 339103 - DNA, 75 bp, synthetic construct
  source 1..75: mol_type = other DNA
atatgccgactggcaccgtttttaccgcacgcattattttcacgatacccagctggatatgcatttttccgggct

SEQ ID NO: 339104 - DNA, 75 bp, synthetic construct
  source 1..75: mol_type = other DNA
ctgatttcagtctgctggcaccccgacgtgatgatgagcagacggagatgccggatgaggacgatatgctgatgc

SEQ ID NO: 339105 - DNA, 75 bp, synthetic construct
  source 1..75: mol_type = other DNA
tgcttgccgggatgacatccaccgaatatgccgactggcgacatttttaccgtacgcattattttctcgataccc

SEQ ID NO: 339106 - DNA, 75 bp, synthetic construct
  source 1..75: mol_type = other DNA
taagcacggtaagaatcgaacttatgagctggcaagaagcagctataccattggtgctatccatattgccggctc

SEQ ID NO: 339107 - DNA, 75 bp, synthetic construct
  source 1..75: mol_type = other DNA
agttgcttaaagccggtttagtcaccagcaagaaagcagctaaagtcgagagaacagcaaaaaaatcacgtattc

SEQ ID NO: 339108 - DNA, 75 bp, synthetic construct
  source 1..75: mol_type = other DNA
agcgcctaactccgcgccgcgtgtttgggatattgccaacgctaagaatgggcagtcagttatcgctgcggttaa

SEQ ID NO: 339109 - DNA, 75 bp, synthetic construct
  source 1..75: mol_type = other DNA
ggcattcctgtgtgatgcgtatatcaaactaagcgacatgtctgtaacgaagacaggcggcgatgcagacaaact

SEQ ID NO: 339110 - DNA, 75 bp, synthetic construct
  source 1..75: mol_type = other DNA
ggctgcatgtcaggcaaactatatccgggatgttcagggcgggactgtatccccgtcatcaacagctgaagtgac

SEQ ID NO: 339111 - DNA, 75 bp, synthetic construct
  source 1..75: mol_type = other DNA
agtattgtgatcctcgccaagcagcgttttaacctgcgcgagcgcgatgtgcagtcgcttcacgctacttttgtg

SEQ ID NO: 339112 - DNA, 75 bp, synthetic construct
  source 1..75: mol_type = other DNA
tttcaccgacggtaatctgattaagaaaatttttgtcgataagctcacgcaaacgcagttgattaatggtcgtct

SEQ ID NO: 339113 - DNA, 75 bp, synthetic construct
  source 1..75: mol_type = other DNA
tttaatgattcgctggatatgattacgggctattctccgggttataaaaaagtgaagattggcgataatgtggtt

SEQ ID NO: 339114 - DNA, 75 bp, synthetic construct
  source 1..75: mol_type = other DNA
ttgagaaatgggttgctgaatgcaccgccagtaatttaccggcacgccctgacgctattgtttttgcactgatgg

SEQ ID NO: 339115 - DNA, 75 bp, synthetic construct
  source 1..75: mol_type = other DNA
taatcacaactctacctttgttaaggttccgcaccacgaatatgatttatttgaagaactgatattgacgcccta

SEQ ID NO: 339116 - DNA, 75 bp, synthetic construct
  source 1..75: mol_type = other DNA
ttgaattcagtaactccagcttcttggggtaaatctgcaaatatgaatgtcgctgaggttggaactgatagtttt

SEQ ID NO: 339117 - DNA, 75 bp, synthetic construct
  source 1..75: mol_type = other DNA
aagaataacctttataatcttccttttacggttctttgtgaggtacataagaactggtataaaacgccaaatgca

SEQ ID NO: 339118 - DNA, 75 bp, synthetic construct
  source 1..75: mol_type = other DNA
tattcgagtgccggaggggttgatacttcaggggacgaaaagcatgtaactatatcctgtcgggtaaaaagtgaa

SEQ ID NO: 339119 - DNA, 75 bp, synthetic construct
  source 1..75: mol_type = other DNA
tgcttgccgggatgacatccaccgaatatgccgactggcaccgtttttaccgcacgcattattttcacgataccc

SEQ ID NO: 339120 - DNA, 75 bp, synthetic construct
  source 1..75: mol_type = other DNA
gaatacagagctggcgaagctgaaataccagactgcgcagggcgaactgaaaaccctgacggagatgcagaagca

SEQ ID NO: 339121 - DNA, 75 bp, synthetic construct
  source 1..75: mol_type = other DNA
ataatgaggcgaataaacccaaatcccggggcgaaaaatctgagacggaaaaagcggaagacagtttttcccgtc

SEQ ID NO: 339122 - DNA, 75 bp, synthetic construct
  source 1..75: mol_type = other DNA
ggaattcaaccgcctgctggggctgggtaatgaactgctgcaacagcgtcagggactggcgagtgtaccgctgcg

SEQ ID NO: 339123 - DNA, 75 bp, synthetic construct
  source 1..75: mol_type = other DNA
gggagaaagggacttcccccaatacacccacggcgtttacaggtatactcgctaaaaattattcatcgggtttgg

SEQ ID NO: 339124 - DNA, 75 bp, synthetic construct
  source 1..75: mol_type = other DNA
cgttaatcagccagctggggatattacgtgatgaatatgcggccatgccggaaacggtttccagtagtatcacaa

SEQ ID NO: 339125 - DNA, 75 bp, synthetic construct
  source 1..75: mol_type = other DNA
ttccgtaaatgcccgtctgaaacaggcatcacagtcatccgatgaatttgcgtcatcacagaaagtgctgatgga

SEQ ID NO: 339126 - DNA, 75 bp, synthetic construct
  source 1..75: mol_type = other DNA
acaacggcggtgggctcacgtctgatgagcggtgcgctgggactggttggcggtatccccggactggtcatgctg

SEQ ID NO: 339127 - DNA, 75 bp, synthetic construct
  source 1..75: mol_type = other DNA
gtcagctgacggagatccgcgcttcggctgtcggaacggtgggagcgtttgccggggcctttgccacaggacacc

SEQ ID NO: 339128 - DNA, 75 bp, synthetic construct
  source 1..75: mol_type = other DNA
aacgccctgacctatggcgggtacgaaatgaagccagtgacggtgaccattaccgcggtggatgccgatacggca

SEQ ID NO: 339129 - DNA, 75 bp, synthetic construct
  source 1..75: mol_type = other DNA
tggggtacgggcagggggaacgagccagggaacgcatgcgggagttgcagcagatccgcgacagcttccgccaga

SEQ ID NO: 339130 - DNA, 75 bp, synthetic construct
  source 1..75: mol_type = other DNA
tcaggaggcgagacaacgttatatcagtaatgccctggaagcctggcgcaataacgaggcgaataaacccaaatc

SEQ ID NO: 339131 - DNA, 75 bp, synthetic construct
  source 1..75: mol_type = other DNA
taccagaatcaggaacaggccagggagtccgcccgtcagtatgcatcgacgattgatgaaatccgggcaaaggta

SEQ ID NO: 339132 - DNA, 75 bp, synthetic construct
  source 1..75: mol_type = other DNA
gatctttccttcaggaaaaattactgtaggtaaaacatcgacatctaatactggctcctggagcgtgttcgagcc

SEQ ID NO: 339133 - DNA, 75 bp, synthetic construct
  source 1..75: mol_type = other DNA
tggcaaatgccgggattgtggtttctgccggtcactccaacgcgacgttgaaagaagcaaaagccggtttccgcg

SEQ ID NO: 339134 - DNA, 75 bp, synthetic construct
  source 1..75: mol_type = other DNA
ccataatccgaattttgtgcgtaagcccgatgctgcactggttgatttcctttgcgaaaatgcagacgtgatcac

SEQ ID NO: 339135 - DNA, 75 bp, synthetic construct
  source 1..75: mol_type = other DNA
acaacgttcactgaacggggccattctctcccccggttttatcgatgtgcagttaaacggctgcggcggcgtaca

SEQ ID NO: 339136 - DNA, 75 bp, synthetic construct
  source 1..75: mol_type = other DNA
cgcgatattttatcgtctgcggatgtggcggatgtcatggtggatgatgccgcattaatgatggcttcagcgggg

SEQ ID NO: 339137 - DNA, 75 bp, synthetic construct
  source 1..75: mol_type = other DNA
ctgatttcagtctgcttgtcccccggcatgaggaagagcaggtggagaggctggatgaggacaaaatgctgatgc

SEQ ID NO: 339138 - DNA, 75 bp, synthetic construct
  source 1..75: mol_type = other DNA
agggcgtgcgcgttatgcgcgagtacctggcaaaacatccgaatcaggcgttaggtctgcatctggaaggtccgt

SEQ ID NO: 339139 - DNA, 75 bp, synthetic construct
  source 1..75: mol_type = other DNA
gatattttatcgtctgcggatgtggcggatgtcatggtggatgatgccgcattaatgatggcttcagcggggatt

SEQ ID NO: 339140 - DNA, 75 bp, synthetic construct
  source 1..75: mol_type = other DNA
tttcaacaggacgaggtttatcatattgaaatagtggaactattggccaaactaatgaataactccagtaaaaca

SEQ ID NO: 339141 - DNA, 75 bp, synthetic construct
  source 1..75: mol_type = other DNA
tggcgacgcataacaccgaggttgtcgggcatatggcacttgaggcaatgcgtcagggtgtgaagacgtgcatcg

SEQ ID NO: 339142 - DNA, 75 bp, synthetic construct
  source 1..75: mol_type = other DNA
atgtatgcattaacccagggccggatctttaccggccacgaatttcttgatgaccacgcggttgttatcgctgat

SEQ ID NO: 339143 - DNA, 75 bp, synthetic construct
  source 1..75: mol_type = other DNA
gttaaaactggcgtgacatacacatacaaggacgataagcggcatgggatggattcatacgaggcaagaatcaga

SEQ ID NO: 339144 - DNA, 75 bp, synthetic construct
  source 1..75: mol_type = other DNA
cgcatgcattattttcaggatacccagctggatatgcatttttccgggctgatgtacgctgtactcagcctgttt

SEQ ID NO: 339145 - DNA, 75 bp, synthetic construct
  source 1..75: mol_type = other DNA
cgaagctggatgcgacactggaaaaagttcaacaggtgcagcgggagcgacaggttgtttcgggtggaagcattc

SEQ ID NO: 339146 - DNA, 75 bp, synthetic construct
  source 1..75: mol_type = other DNA
aggcagcacagcttgcgacggagggtatctcagggatggtgaataacatcacggagatgctgaacggaaataaag

SEQ ID NO: 339147 - DNA, 75 bp, synthetic construct
  source 1..75: mol_type = other DNA
ctgacagcggataaagtggtgcccgcgttaatcagccagctggggatattacgtgatgaatatgcggccatgccg

SEQ ID NO: 339148 - DNA, 75 bp, synthetic construct
  source 1..75: mol_type = other DNA
acaatgggcggagctcaggattatctggcgcacagaacagtgattgatgaggccgaaaaggccggcatcagtcgc

SEQ ID NO: 339149 - DNA, 75 bp, synthetic construct
  source 1..75: mol_type = other DNA
atgacgccgtggctactctttggcgcaggcggaaaaggtgtgggtgccagaacgcttgaactggcgctggcagag

SEQ ID NO: 339150 - DNA, 75 bp, synthetic construct
  source 1..75: mol_type = other DNA
atggcgacgttacgtgaactgattatcaaaatttcggcaaattcacagtcattccagtcggagatccagcgtgct

SEQ ID NO: 339151 - DNA, 75 bp, synthetic construct
  source 1..75: mol_type = other DNA
gcgcaaatctaaagaagaaaaatatgtgcaagatttgtttgattcgttaactcttggagaaagagcgtatttggc

SEQ ID NO: 339152 - DNA, 75 bp, synthetic construct
  source 1..75: mol_type = other DNA
actgaacggggaggaaaaagagcgggcccgtctggggtatgcggcggatgacctaggttttgtgggggatccgta

SEQ ID NO: 339153 - DNA, 75 bp, synthetic construct
  source 1..75: mol_type = other DNA
actgaacggggaggaaaaagagcgggcccgactggggtatgcggcggatgaccttggttttgtgggggatccgta

SEQ ID NO: 339154 - DNA, 75 bp, synthetic construct
  source 1..75: mol_type = other DNA
gcgattgtcaacggaattaagacggcggcaaacggtatgtccggtgcgggaggatttctcggcagcattggtgac

SEQ ID NO: 339155 - DNA, 75 bp, synthetic construct
  source 1..75: mol_type = other DNA
gcaaaaggcggcgtgtatacctcggcaaacctgagtgcgtacagcaacagcattgtggacacgcccacgtacttt

SEQ ID NO: 339156 - DNA, 75 bp, synthetic construct
  source 1..75: mol_type = other DNA
gccagtgtcagagcatcaaatgaggctcagttactgggatatggtgaaggctcacggatgcgtgaacgacttcag

SEQ ID NO: 339157 - DNA, 75 bp, synthetic construct
  source 1..75: mol_type = other DNA
cgtgccgatgtcgccgcacatatccatgaactggcaaatgcgccagcacttaaccagcaggtctacagtctgatt

SEQ ID NO: 339158 - DNA, 75 bp, synthetic construct
  source 1..75: mol_type = other DNA
gtgcgggtctggtgtattctccggtgtaccacatcgccattcagaatgacggcgctaacgggcagatagggccgg

SEQ ID NO: 339159 - DNA, 75 bp, synthetic construct
  source 1..75: mol_type = other DNA
gtaatgaactgctgcaacagcgtcagggactggcgagtgtaccgctgcgactgccacaggccactctggatgata

SEQ ID NO: 339160 - DNA, 75 bp, synthetic construct
  source 1..75: mol_type = other DNA
tcccgtatgggcagtgaatattaccggaccctgcagaatggcggacgtcaggctgctgcggcagccagggagcag

SEQ ID NO: 339161 - DNA, 75 bp, synthetic construct
  source 1..75: mol_type = other DNA
tgatttcgctggcggatgaatggagctccgtgaatgcccgtctgaaacaggcgtcgcagtcatcggatgaatttt

SEQ ID NO: 339162 - DNA, 75 bp, synthetic construct
  source 1..75: mol_type = other DNA
cccgctcggcagcctcaatgcgtgaatatggctacagtgccggtgatgtactgaaggtgacggaggccatttcca

SEQ ID NO: 339163 - DNA, 75 bp, synthetic construct
  source 1..75: mol_type = other DNA
gaaacggtttccggtagtatcacaaaggtggaaaacgcctttatggcctgggtgggcggtgtgaatgaggccagc

SEQ ID NO: 339164 - DNA, 75 bp, synthetic construct
  source 1..75: mol_type = other DNA
aggtatcacaacgtgaattaatggcaatcagccagagaacgggaacggcgttttctgataacgccagcctttttg

SEQ ID NO: 339165 - DNA, 75 bp, synthetic construct
  source 1..75: mol_type = other DNA
actggcgacgcctgtgatgccagcgtggtcgcggcggcctgccgtgcggctggcccgcaagcgcttgtcatctca

SEQ ID NO: 339166 - DNA, 75 bp, synthetic construct
  source 1..75: mol_type = other DNA
ggccgaaaaagccggtatcaagcgcatgattctggtgacctctttgggatgcggcgatagctggccgtttttatc

SEQ ID NO: 339167 - DNA, 75 bp, synthetic construct
  source 1..75: mol_type = other DNA
cgccagaaggatgcggaccttcagtctcagtatcagaccggggatatcagtgaggatttttacagacaggcgctg

SEQ ID NO: 339168 - DNA, 75 bp, synthetic construct
  source 1..75: mol_type = other DNA
tgcaggttaaaaacactggcagtctgagtgttaatcggtatggatggattaacatctggatggctattttaggtc

SEQ ID NO: 339169 - DNA, 75 bp, synthetic construct
  source 1..75: mol_type = other DNA
atgggcgaggccgggcctgaagcaatcatgccactgacacgggcagcggacggctctcttggggtcagggccatt

SEQ ID NO: 339170 - DNA, 75 bp, synthetic construct
  source 1..75: mol_type = other DNA
actgaatggggaggaaaaagagcgggcccgcctggggtatgcggcggatgacctaggttttgtgggggatccgta

SEQ ID NO: 339171 - DNA, 75 bp, synthetic construct
  source 1..75: mol_type = other DNA
ttgccgttatcggtagcgatggttcaggcaagtcaacggtgtgtgaacatctcattaccgttgtcgaaaaatatg

SEQ ID NO: 339172 - DNA, 75 bp, synthetic construct
  source 1..75: mol_type = other DNA
attgatatcgatgccaatcagccacttgagcaggtgcttgttgatgcagaaaatgccattaaggattttatggca

SEQ ID NO: 339173 - DNA, 75 bp, synthetic construct
  source 1..75: mol_type = other DNA
agcattggtgactggctgggcggtgcggtggccaatgcaaaaggcggcgtgtatacctcggcaaacctgagtgcg

SEQ ID NO: 339174 - DNA, 75 bp, synthetic construct
  source 1..75: mol_type = other DNA
tacgcagattgccacggcgcgggcaagtgcagccgtgtaccgtgcgcagcaggcagtggcggcagcccgcgggac

SEQ ID NO: 339175 - DNA, 75 bp, synthetic construct
  source 1..75: mol_type = other DNA
aacgcagattgccacggcgcgggcaagtgcagccgtgtaccgtgctcagcaggcagtggcggcagcccgcgggac

SEQ ID NO: 339176 - DNA, 75 bp, synthetic construct
  source 1..75: mol_type = other DNA
aaaacaggccggaaatgtcggtcgtgcagtgacaaaattaccgttgatgggaaagtctctgcacaagactattga

SEQ ID NO: 339177 - DNA, 75 bp, synthetic construct
  source 1..75: mol_type = other DNA
aattcttcgcacctgtagaaaatgaaaagatggatcaggacttcaaagctgatttcactgatgaggatttgcacg

SEQ ID NO: 339178 - DNA, 75 bp, synthetic construct
  source 1..75: mol_type = other DNA
ccccacatccggctgctttatatgttgccaataagctgggcgcagatatcggttcggtgatcgtctacggtttgc

SEQ ID NO: 339179 - DNA, 75 bp, synthetic construct
  source 1..75: mol_type = other DNA
tgttgaagtgggcgtcgtgctattgattcctctggctttttcaattgccaaaaaaaccaatacctcattattaaa

SEQ ID NO: 339180 - DNA, 75 bp, synthetic construct
  source 1..75: mol_type = other DNA
tgctgaacggtgttgccggacagattgataatgtggcaacagccgtgggcgcgctggttgccgtcggggtggccc

SEQ ID NO: 339181 - DNA, 75 bp, synthetic construct
  source 1..75: mol_type = other DNA
gtgctacattaggtttgctgggaagaaagacagtcttatggatgaacttatcgctcaggataagcacggcaaaaa

SEQ ID NO: 339182 - DNA, 75 bp, synthetic construct
  source 1..75: mol_type = other DNA
tcaaagcttgtaaaagtagatcgtgactatctccgtgagtatgagagcttgctaaggtcgatacctgcacggcgt

SEQ ID NO: 339183 - DNA, 75 bp, synthetic construct
  source 1..75: mol_type = other DNA
cacgcagattgccacggcgcgggcaagggcagccgtgtaccgtgcacagcaggcagtggcggcagcccgcgggac

SEQ ID NO: 339184 - DNA, 75 bp, synthetic construct
  source 1..75: mol_type = other DNA
cagagcgtgagctggccctgtcccgactgaacggggacgaaaaagagcggggccgtctggggtatgcggcggatg

SEQ ID NO: 339185 - DNA, 75 bp, synthetic construct
  source 1..75: mol_type = other DNA
cagagcgtgagctggccctgtcccgactgaatggggacgaaaaagagcggggccgcctggggtatgcggcggatg

SEQ ID NO: 339186 - DNA, 75 bp, synthetic construct
  source 1..75: mol_type = other DNA
cagagcgtgagctggccctgtcctgactgaacggggacgaaaaagagcggggccgcctggggtatgcggcggatg

SEQ ID NO: 339187 - DNA, 75 bp, synthetic construct
  source 1..75: mol_type = other DNA
actgaatggggaggaaaaagagcgggcccgactggggtatgcggcggatgacctcggttttgtgggggatccgta

SEQ ID NO: 339188 - DNA, 75 bp, synthetic construct
  source 1..75: mol_type = other DNA
actgaaaggggaggaaaaagagcgggcccgcctggggtatgcggcggatgaccttggttttgtgggggatccgta

SEQ ID NO: 339189 - DNA, 75 bp, synthetic construct
  source 1..75: mol_type = other DNA
actgaaaggggaggaaaaagagcgggcccgtctggggtatgcggcggatgacctcggttttgtgggggatccgta

SEQ ID NO: 339190 - DNA, 75 bp, synthetic construct
  source 1..75: mol_type = other DNA
tgaacagaaatattgctgccagaaacgcggcccagaatgagctgaacagtacaacggcggtgggctcacgtctga

SEQ ID NO: 339191 - DNA, 75 bp, synthetic construct
  source 1..75: mol_type = other DNA
tgaacagaaatattgctgccagaaacgcagcccagaatgggctgaacagtacaacggcggtgggctcacgtctga

SEQ ID NO: 339192 - DNA, 75 bp, synthetic construct
  source 1..75: mol_type = other DNA
gacgcagattgccacggcgcgggcaagcgcagccgtgtaccgtgcacagcaggcagtggcggcagcccgcgggac

SEQ ID NO: 339193 - DNA, 75 bp, synthetic construct
  source 1..75: mol_type = other DNA
tgaacagaaatattgctgccagaagcgcagcccagaatgagctgaacagtacaacggcggtgggctcacgtctga

SEQ ID NO: 339194 - DNA, 75 bp, synthetic construct
  source 1..75: mol_type = other DNA
tgaacagaaatattgctgccagaaccgccgcccagaatgcgctgaacagtacaacggcggtgggctcacgtctga

SEQ ID NO: 339195 - DNA, 75 bp, synthetic construct
  source 1..75: mol_type = other DNA
tgaacagaaatattgctgccagaatcgctgcccagaatgagctgaacagtacaacggcggtgggctcacgtctga

SEQ ID NO: 339196 - DNA, 75 bp, synthetic construct
  source 1..75: mol_type = other DNA
ccgcctagaatttgacgccggacacaccgacattgcgcagtcattcatggcaatccgtcgcgccaccaccgccag

SEQ ID NO: 339197 - DNA, 75 bp, synthetic construct
  source 1..75: mol_type = other DNA
cggaagaggaacgtgtggaagaaaaaatgccaccatcggttgcacaaacaatggagcgtatatttacttcaaacc

SEQ ID NO: 339198 - DNA, 75 bp, synthetic construct
  source 1..75: mol_type = other DNA
aacgataccacgaggacaatctggtatctctcccgacgttttggccgggaggatgatatcgaagtcatcaacttc

SEQ ID NO: 339199 - DNA, 75 bp, synthetic construct
  source 1..75: mol_type = other DNA
acataacctacatcaggacccacgaaggctggctgtatcttgccgtggttgttgatctgttctcacgcaaaatta

SEQ ID NO: 339200 - DNA, 75 bp, synthetic construct
  source 1..75: mol_type = other DNA
acccaaacgtcgccaaccgcaacaaaggcccgcgccgtcagccggaaaagaatgttttcaccgatgaacagattg

SEQ ID NO: 339201 - DNA, 75 bp, synthetic construct
  source 1..75: mol_type = other DNA
aataccagaacctgctgatgtgtgagttcgtggacgatctcgcgtccgtcttcccgctcagcgagctgcaggcgt

SEQ ID NO: 339202 - DNA, 75 bp, synthetic construct
  source 1..75: mol_type = other DNA
gttttgaccatcttcgtctgattattgagcaaaataatttatatgtggccgggttcgttaatacggcaacaaata

SEQ ID NO: 339203 - DNA, 75 bp, synthetic construct
  source 1..75: mol_type = other DNA
catcatatctggcgttaatggagttcagtggtaatacaatgaccagagatgcatccagagcagttctgcgttttg

SEQ ID NO: 339204 - DNA, 75 bp, synthetic construct
  source 1..75: mol_type = other DNA
cgccatataatgtttttcgccaccaccggtggtggtaaaacggaaaccatctttgcctgggcgattaacccgctt

SEQ ID NO: 339205 - DNA, 75 bp, synthetic construct
  source 1..75: mol_type = other DNA
acactcagccttgatgacccctcccaggacagaaaggtcaggcgaagcctcttcagcttctggcccaccctgttt

SEQ ID NO: 339206 - DNA, 75 bp, synthetic construct
  source 1..75: mol_type = other DNA
tgacgaagtcggtgcctactacacggaccgcattgctgtggaggccacccaggtacgttcactggagttttccct

SEQ ID NO: 339207 - DNA, 75 bp, synthetic construct
  source 1..75: mol_type = other DNA
agccgcaccgaggaggccagtcacgccgatctcgcctgggcaaccatgcacgtattaatcaatgagccgttaacc

SEQ ID NO: 339208 - DNA, 75 bp, synthetic construct
  source 1..75: mol_type = other DNA
gtctgtatatggcgacgttgtccgctgtgcgctttaatcccgcgctgcgtgcattttatgaacgactgaccgcat

SEQ ID NO: 339209 - DNA, 75 bp, synthetic construct
  source 1..75: mol_type = other DNA
gcgtcgacgacttccgcaatctgtttatgtgcgagttcgttgacgacaaggcgtcggtgttcccgttcgaggatt

SEQ ID NO: 339210 - DNA, 75 bp, synthetic construct
  source 1..75: mol_type = other DNA
ctctgcgacgatggccagtggcggcagattgtcaccattgaggacgcccttgcgggtggctgcaccctgttcgac

SEQ ID NO: 339211 - DNA, 75 bp, synthetic construct
  source 1..75: mol_type = other DNA
aattcagaatacttgagcgtcaccagtggaaaggcatggactttgccactcaggctgaatccatccgcaaactca

SEQ ID NO: 339212 - DNA, 75 bp, synthetic construct
  source 1..75: mol_type = other DNA
gctgaaaggcgatccgatggtgcttcctaacggagccacgctttacttcctcggcaccaatgcccgcacggccca

SEQ ID NO: 339213 - DNA, 75 bp, synthetic construct
  source 1..75: mol_type = other DNA
tttgcacgtgaggcactgttacaggcgctgaagaccggccacaaccagatatttttgtcggccagtaagacgcaa

SEQ ID NO: 339214 - DNA, 75 bp, synthetic construct
  source 1..75: mol_type = other DNA
gagcaccgcatccgcgatatcctgaaatcccgccagattggcgcgacgttttatttttcccgcgaggcgctgctg

SEQ ID NO: 339215 - DNA, 75 bp, synthetic construct
  source 1..75: mol_type = other DNA
attattagcttatccaatatcccttttttacaatgacacaaggttgtttctattaatattgatcatctctttttc

SEQ ID NO: 339216 - DNA, 75 bp, synthetic construct
  source 1..75: mol_type = other DNA
gttaccaattctcgtctgatggctacatacggcggtcagtttacgcttacgatttaatttccgcacatacacaaa

SEQ ID NO: 339217 - DNA, 75 bp, synthetic construct
  source 1..75: mol_type = other DNA
tcgaaatgagtctggaagcgcggctgacccagctcatcatcaaaccgcagaaaaccggcggtgatttcaaggaaa

SEQ ID NO: 339218 - DNA, 75 bp, synthetic construct
  source 1..75: mol_type = other DNA
atgctctttagagatatggggacgtcatcaatattaattcaacggagaagaataagtgaaaattttattaaatcc

SEQ ID NO: 339219 - DNA, 75 bp, synthetic construct
  source 1..75: mol_type = other DNA
gctgaaaggtgatccgatggtgcttcccaacggggccacgctttacttcctcggcaccaatgcccgcacggccca

SEQ ID NO: 339220 - DNA, 75 bp, synthetic construct
  source 1..75: mol_type = other DNA
attaggtaacgttaagttgctggcaaggattggttgtgtgagtgcaataattcaagttatgtcatttgttattgg

SEQ ID NO: 339221 - DNA, 75 bp, synthetic construct
  source 1..75: mol_type = other DNA
atcaacgcacgtgaaagtgccttgtgggaaacagcggtgaatacgcttaaaacgaccacacgggaagagcgacga

SEQ ID NO: 339222 - DNA, 75 bp, synthetic construct
  source 1..75: mol_type = other DNA
acaccacgcgcccgtcgctgcgcaattttgttttaagccataccgacctgatgggcagcgtttccacgccgttcg

SEQ ID NO: 339223 - DNA, 75 bp, synthetic construct
  source 1..75: mol_type = other DNA
agagcggcgcggatctggtcatcaccgactgcgaaacctgcaaatggcagattgagatgtccacgagccttcgct

SEQ ID NO: 339224 - DNA, 75 bp, synthetic construct
  source 1..75: mol_type = other DNA
gcattccggtgattgccacctcctcaacctgtacatttgccctgcgcgacgaatacccggaagtgctgaatgtcg

SEQ ID NO: 339225 - DNA, 75 bp, synthetic construct
  source 1..75: mol_type = other DNA
taacaccattgtggacacgccgacgtactttgcttttgcgaaaggtgccgggctgatgggggaagccggacctga

SEQ ID NO: 339226 - DNA, 75 bp, synthetic construct
  source 1..75: mol_type = other DNA
ccgcagttaggtaaagatttaattaaagtgctcaacgcgatgggtactggcgtgcaactgctcagcaaagaaaaa

SEQ ID NO: 339227 - DNA, 75 bp, synthetic construct
  source 1..75: mol_type = other DNA
cgactgcgaaacctgcaaatggcagattgagatgtccacgagccttcgctgcgagcacccgattacgctgctggc

SEQ ID NO: 339228 - DNA, 75 bp, synthetic construct
  source 1..75: mol_type = other DNA
ccgattggcacggtgcgaacccgctttatcagcgatcaaacccgcttcgaatcgctcagccagcagggagttggg

SEQ ID NO: 339229 - DNA, 75 bp, synthetic construct
  source 1..75: mol_type = other DNA
ggagatacagaagcaggagttgctgcgcaatgctgccctgattgaccagaagaaaatccgggagcagttacgggc

SEQ ID NO: 339230 - DNA, 75 bp, synthetic construct
  source 1..75: mol_type = other DNA
agcgatgtctgccacggcaggacttgtgaccgctgcacgtaatgaagtggcactggctgaggcccagttaagggg

SEQ ID NO: 339231 - DNA, 75 bp, synthetic construct
  source 1..75: mol_type = other DNA
gctgaaaccggtgcggcagttgcttgatgcggcgttaaaaatcgaccaccgtcgcacgctaccgaaatactcctt

SEQ ID NO: 339232 - DNA, 75 bp, synthetic construct
  source 1..75: mol_type = other DNA
tttataaagggcaaggagtttagttgtgaacctgacaaatatcgctttaataagataataccgtatcttttgggt

SEQ ID NO: 339233 - DNA, 75 bp, synthetic construct
  source 1..75: mol_type = other DNA
gcgattccggctctatcgagcaggatgccgacgtgatcttattcctctatcgcgacgaactgtacgatcccaaca

SEQ ID NO: 339234 - DNA, 75 bp, synthetic construct
  source 1..75: mol_type = other DNA
ttgcgaaaggtgccgggctgatgggcgaggccgggcctgaagcaatcatgccactgacacgggcagcggacggct

SEQ ID NO: 339235 - DNA, 75 bp, synthetic construct
  source 1..75: mol_type = other DNA
tacagtttaacgacaccgctgaagcggtcagcgtggaaacgctggaaatcatgcagaaaaccaatgagaaatcag

SEQ ID NO: 339236 - DNA, 75 bp, synthetic construct
  source 1..75: mol_type = other DNA
acgctcgccgcaggtaaagtagccaacctgactgcattcacacctgattttaaaatcaccaggaccatcgttaac

SEQ ID NO: 339237 - DNA, 75 bp, synthetic construct
  source 1..75: mol_type = other DNA
ttggcctgtctctggttcgcgcattgcagggcgaaaaaggcgttgttgaatgtgcttatgttgaaggtgatggtc

SEQ ID NO: 339238 - DNA, 75 bp, synthetic construct
  source 1..75: mol_type = other DNA
aatcagcatcctgatggaaagcaagataaatgttcaggagttgattgaacttcatcctggcgagttcttttctat

SEQ ID NO: 339239 - DNA, 75 bp, synthetic construct
  source 1..75: mol_type = other DNA
tatgtcgatgaaatattctggatcccgaattttcagaagctgcgcaaagtcgcgtcgggcatggcctcgcagaag

SEQ ID NO: 339240 - DNA, 75 bp, synthetic construct
  source 1..75: mol_type = other DNA
cgtcagcgccaccgacatcaccagctcctttatggctatccgcaagaccatgaccagcagcggacgcagcgccac

SEQ ID NO: 339241 - DNA, 75 bp, synthetic construct
  source 1..75: mol_type = other DNA
cctgaagggggaagcccgtgagcgtgcccgactgggttatgctgcggatgatctcggctttgtgggagaggcgta

SEQ ID NO: 339242 - DNA, 75 bp, synthetic construct
  source 1..75: mol_type = other DNA
ctgaaattatccggtgccagtacagcagaagccagttcggtgatcacgcagttcagtcaggcactggcgcaggga

SEQ ID NO: 339243 - DNA, 75 bp, synthetic construct
  source 1..75: mol_type = other DNA
cggcagatgctgtcgtttccacgatggacgggctggtatcaaatatttccgatgcactggccggaaatgttgtgg

SEQ ID NO: 339244 - DNA, 75 bp, synthetic construct
  source 1..75: mol_type = other DNA
ggcccgcatgccgccaatgttgttggactgaccgaccagaccgatctcttctacaccatgaaagccgccctgggg

SEQ ID NO: 339245 - DNA, 75 bp, synthetic construct
  source 1..75: mol_type = other DNA
atacggcagatatccgtaccaaccggatatcacttatcagcaatgcgcctcctcagctgtcgtccggggatgggg

SEQ ID NO: 339246 - DNA, 75 bp, synthetic construct
  source 1..75: mol_type = other DNA
ggtaatgaattacttcagcagcgacaggggctggtgaatgtaccgttacggctgccacaggcaaccctggatgat

SEQ ID NO: 339247 - DNA, 75 bp, synthetic construct
  source 1..75: mol_type = other DNA
aggacaaactgctcatcagcctgctttcgccggaacgtctgctggagatgacccgcttcttcaccctgtttgata

SEQ ID NO: 339248 - DNA, 75 bp, synthetic construct
  source 1..75: mol_type = other DNA
ccggctgagacttaaaagaaccgaccctgcgcatccgttgctgcccctcatctcttcgtcggtggaagcactcag

SEQ ID NO: 339249 - DNA, 75 bp, synthetic construct
  source 1..75: mol_type = other DNA
tcttgccagctatctccgttcgcttactgacagtcagttgttggccatcaaaacactgtcgatggacatgaatgc

SEQ ID NO: 339250 - DNA, 75 bp, synthetic construct
  source 1..75: mol_type = other DNA
aacatgccgcttatcggaaaaagcgttggataacctgatatcgcaggtctgttccccggcgctgaacgaagggct

SEQ ID NO: 339251 - DNA, 75 bp, synthetic construct
  source 1..75: mol_type = other DNA
taccgaagaatttacggtattgcggtcaggcggtgtcgaaacccgcagaccggatattgtctgctttgtgaatgg

SEQ ID NO: 339252 - DNA, 75 bp, synthetic construct
  source 1..75: mol_type = other DNA
attatcttcaccctgatacagaaatttaactcagcgacaaaactgcctgaatgcgttaataccagccccgatatt

SEQ ID NO: 339253 - DNA, 75 bp, synthetic construct
  source 1..75: mol_type = other DNA
gcgggtatcagtcatttcacatggaaattttttgcagataaagatgtttatcttcagacgggtacatgtagtgta

SEQ ID NO: 339254 - DNA, 75 bp, synthetic construct
  source 1..75: mol_type = other DNA
tttagggtaatattaaaacctaaagtctcacctggagatgccatcactgtatttgacctatctgacttcgtcaga

SEQ ID NO: 339255 - DNA, 75 bp, synthetic construct
  source 1..75: mol_type = other DNA
ggaattacagcgtcgcgtcaacgataaagagctgatgattaccgcagctttgcccggtagcggcgagtggggaac

SEQ ID NO: 339256 - DNA, 75 bp, synthetic construct
  source 1..75: mol_type = other DNA
gcggtcagaaaacaacttaaacttagctggaatgccgttgacggcatcatgacccgcgcggttaagcgaggcctg

SEQ ID NO: 339257 - DNA, 75 bp, synthetic construct
  source 1..75: mol_type = other DNA
gatcgcgatggtcgggcgctggccttaacggatgatcgcggcacagagagtcttgccggctatcttcgcacactc

SEQ ID NO: 339258 - DNA, 75 bp, synthetic construct
  source 1..75: mol_type = other DNA
ttcttgccgggcatacgctcaatgagccgtgtttttttctattgagcatgtcggcgtggcttggcttttgtacct

SEQ ID NO: 339259 - DNA, 75 bp, synthetic construct
  source 1..75: mol_type = other DNA
gactgggaacacccggaaaataaccagttccactttgctgaagagttctcggtattgcggtcgggcggtgtcgat

SEQ ID NO: 339260 - DNA, 75 bp, synthetic construct
  source 1..75: mol_type = other DNA
ctaattgtaatagcgtccgctttaattttaatttaaatactattttacaggtaaatttaatgacctgtggttttg

SEQ ID NO: 339261 - DNA, 75 bp, synthetic construct
  source 1..75: mol_type = other DNA
ccctgggatcgcgctgcggtggatgcaaccacggaggttaaggtggcgctgcgcctcgccggcacgccgatcggt

SEQ ID NO: 339262 - DNA, 75 bp, synthetic construct
  source 1..75: mol_type = other DNA
aaaaacgagatttttttaatctgttccggtaccgacattaccgaagagcgccgcactcaggagcgactgcgtatt

SEQ ID NO: 339263 - DNA, 75 bp, synthetic construct
  source 1..75: mol_type = other DNA
cgagcagccagaagctgtgctgaatcgcctggagcagacggtgctgcgcggtcaccgtatcgtggtctcagccat

SEQ ID NO: 339264 - DNA, 75 bp, synthetic construct
  source 1..75: mol_type = other DNA
gcctccccgcgtcacgtgcaactggtcgatgaattctgcgcgcgcctcgatgccatcctgccctgggaccgcgcc

SEQ ID NO: 339265 - DNA, 75 bp, synthetic construct
  source 1..75: mol_type = other DNA
ctgcgcccgcctcgatgccatcctgccctgggatcgcgccgcggtggacgcgaccacggagattaaggtggcgct

SEQ ID NO: 339266 - DNA, 75 bp, synthetic construct
  source 1..75: mol_type = other DNA
atttaacttgcaccatgcgacaaaaatcgacgccgtccagctcgcggcaaaggcgcttggcaaagagttatcgct

SEQ ID NO: 339267 - DNA, 75 bp, synthetic construct
  source 1..75: mol_type = other DNA
gtgaagacgcccgcgcccgcatggtccgcggcgtgaacgtgctcgccaacgccgtcaaggcgaccctgggcccga

SEQ ID NO: 339268 - DNA, 75 bp, synthetic construct
  source 1..75: mol_type = other DNA
tggtctgctgattgattatcgcggcattttggctgaactggacacgactatcggtaaatatcaggatcttgcctc

SEQ ID NO: 339269 - DNA, 75 bp, synthetic construct
  source 1..75: mol_type = other DNA
cgcctggagcaggcggtgctgcgcggccaccgtatcgtggtctcggccatcacctactccgagatgcgcttcggc

SEQ ID NO: 339270 - DNA, 75 bp, synthetic construct
  source 1..75: mol_type = other DNA
gttatcccgtcactcttacacccgcgccggaaagcggttatgtggtttcttttgtggatattcctgaagcgttga

SEQ ID NO: 339271 - DNA, 75 bp, synthetic construct
  source 1..75: mol_type = other DNA
gctatcgggaaaaaagcctcgccccgtcatagccaactggtcgatgcgttctgcgcccgcctcgatgcgattctg

SEQ ID NO: 339272 - DNA, 75 bp, synthetic construct
  source 1..75: mol_type = other DNA
gccaggtgctggagtatgcgcggcacaagcgcaagctgcgtttaggggcgctgaaaggtaacgcctttaccctgg

SEQ ID NO: 339273 - DNA, 75 bp, synthetic construct
  source 1..75: mol_type = other DNA
gtttatatcgaactgcagccaggcgcgaaaggcagcaaaatggataaatacgatttgctggactcgccaccgttg

SEQ ID NO: 339274 - DNA, 75 bp, synthetic construct
  source 1..75: mol_type = other DNA
aatgttttattaccggagagacaggaaagtggaaagacttccgggatgacgtcagaatacgttattctgatggta

SEQ ID NO: 339275 - DNA, 75 bp, synthetic construct
  source 1..75: mol_type = other DNA
gcttcatcttttgctacggttcacgagcacgggcacgtcgtgggtgacgtaaaccagaacagctttatggtaggt

SEQ ID NO: 339276 - DNA, 75 bp, synthetic construct
  source 1..75: mol_type = other DNA
ggcgaaaatgcggatgtcgttaagcatctcggagagttgttgaagcgtggtttacgtggatcgctgaaaaccgga

SEQ ID NO: 339277 - DNA, 75 bp, synthetic construct
  source 1..75: mol_type = other DNA
ggtgctgaaaacgctcaacgagaagagcaacgcgctggtatttgaagcgaaggataagaaagatccagagccgaa

SEQ ID NO: 339278 - DNA, 75 bp, synthetic construct
  source 1..75: mol_type = other DNA
ggggaaaacaaagatgtggttgagcaccttggggagctgttgaaacgaggtttacgtggttcgctgaagaccgga

SEQ ID NO: 339279 - DNA, 75 bp, synthetic construct
  source 1..75: mol_type = other DNA
caggcgttcactgaaagtggcgtggcgagtgcgcgtccgacggcaaaagcgtgggtagcggcactggattctcta

SEQ ID NO: 339280 - DNA, 75 bp, synthetic construct
  source 1..75: mol_type = other DNA
tgtcggctttgaacgcaccgcgaatcacgataattttggccttgcgttgctgatttttcacgtcttgtttggtgg

SEQ ID NO: 339281 - DNA, 75 bp, synthetic construct
  source 1..75: mol_type = other DNA
gtaggtcgcgacagcaaagtggtgttgattgatagcgactcctttcagattaacgctaatggcacgttgcattta

SEQ ID NO: 339282 - DNA, 75 bp, synthetic construct
  source 1..75: mol_type = other DNA
gggcgatgttgaagccatgtttcagcaggcgtttacggaaagtggcgtggcaaccgggcgtccgacggctaaagc

SEQ ID NO: 339283 - DNA, 75 bp, synthetic construct
  source 1..75: mol_type = other DNA
acgcgctctggcagcacttcacgacaccgcaagggaacggcagaagcagaagtttctggagggattttttattga

SEQ ID NO: 339284 - DNA, 75 bp, synthetic construct
  source 1..75: mol_type = other DNA
cagacagacaagcggtaatggcgaaaatgaccgctaaacgtcatcggctggaatctgcgttgacagagggtgcgg

SEQ ID NO: 339285 - DNA, 75 bp, synthetic construct
  source 1..75: mol_type = other DNA
tcccgtgtggatatttcctatcgtcacggcgcttataggggcgtgggttcttttttatcattacagccatcaggg

SEQ ID NO: 339286 - DNA, 75 bp, synthetic construct
  source 1..75: mol_type = other DNA
accgtgcctttttgtggcgaccgccgaaacataaccggacggtgagggtggtatgccgggagtggagcgtcacgg

SEQ ID NO: 339287 - DNA, 75 bp, synthetic construct
  source 1..75: mol_type = other DNA
ggacggtgagggtggtgtgccgggagtggagcgtcacggataacgcccggtacagtgatttcagttgcacgattg

SEQ ID NO: 339288 - DNA, 75 bp, synthetic construct
  source 1..75: mol_type = other DNA
atggactatgaaaatggttcctggtggcaggagctggatgcggacaataaagtcaccacgaaagtctgggacggc

SEQ ID NO: 339289 - DNA, 75 bp, synthetic construct
  source 1..75: mol_type = other DNA
aacggctgcaatacccgttttgtggcggatgcactggcgaaattcctgaaaattcatgcccgtgaagtcagcttt

SEQ ID NO: 339290 - DNA, 75 bp, synthetic construct
  source 1..75: mol_type = other DNA
ggacggtgagggtggtgtgccgggagtggagcgtcacagataacgccaggtacagcgatttcagttgtatgatgg

SEQ ID NO: 339291 - DNA, 75 bp, synthetic construct
  source 1..75: mol_type = other DNA
gtgagtgagaatccgtcgggggcgagggtacggtttgttgacggttatgaacagcgccgctccacagggctgaat

SEQ ID NO: 339292 - DNA, 75 bp, synthetic construct
  source 1..75: mol_type = other DNA
aatatgcagacttcaaaaatttcagggttagagttcttgatcctgcggttgacgctatcaaccgaacgactgacc

SEQ ID NO: 339293 - DNA, 75 bp, synthetic construct
  source 1..75: mol_type = other DNA
gtgagggtgaatgggctaaaacgtgccttgatttggtacgtgagtatgaaaagaagttaaaagaatacgataaaa

SEQ ID NO: 339294 - DNA, 75 bp, synthetic construct
  source 1..75: mol_type = other DNA
accggaacggctgaaaatgcagcttggcgaaaatgcggatgtcgttaagcaccttggagagttgttgaaacgtgg

SEQ ID NO: 339295 - DNA, 75 bp, synthetic construct
  source 1..75: mol_type = other DNA
cattgtctggtgatcccgcgtatcccgttagcgccaggcctggctccggcggttgcggcgggtctgctggatatt

SEQ ID NO: 339296 - DNA, 75 bp, synthetic construct
  source 1..75: mol_type = other DNA
cagaaacacaatgttcagtactggcgtgccggtcgcctgttcgaaacgctggctcagggacgggtggatggtagc

SEQ ID NO: 339297 - DNA, 75 bp, synthetic construct
  source 1..75: mol_type = other DNA
gccaaagtgtacgtctgtgataaccagaacaaatgtctgtcaccctccctgaataacgtgaccatttcggagtca

SEQ ID NO: 339298 - DNA, 75 bp, synthetic construct
  source 1..75: mol_type = other DNA
tctggggcataccgatacgctggtggtgtgtgatgcgggtttacccatccctaaaaatacaacacgtatcgatat

SEQ ID NO: 339299 - DNA, 75 bp, synthetic construct
  source 1..75: mol_type = other DNA
catccctgatgaatgcaatcagccgtttctttgtccagttagcccgacagatgaagcataacccggacggcatta

SEQ ID NO: 339300 - DNA, 75 bp, synthetic construct
  source 1..75: mol_type = other DNA
taatgaagagctgatttcgacggcgaaagtaacaaacaaaaaatcgttggcgttcactggcggtaccaacggcga

SEQ ID NO: 339301 - DNA, 75 bp, synthetic construct
  source 1..75: mol_type = other DNA
gattttaaaaaatgtatgaatgatttatcttatccttcaaaagataaagttgagaaatttatacattatctaatt

SEQ ID NO: 339302 - DNA, 75 bp, synthetic construct
  source 1..75: mol_type = other DNA
aaaacaccagggaaatttcattgaaattcgttacatcacgcatgaacaattcaaacaacaaaccgcaaacagtca

SEQ ID NO: 339303 - DNA, 75 bp, synthetic construct
  source 1..75: mol_type = other DNA
attaaggcttgctgtttataaaggtaattatgaacagattgatagagttatagttatgtttatccctccagaaaa

SEQ ID NO: 339304 - DNA, 75 bp, synthetic construct
  source 1..75: mol_type = other DNA
gatcgtctggtgaccggcctgcaacgtattcaccgtttgctgggataacagggaggcactatggctttattgccg

SEQ ID NO: 339305 - DNA, 75 bp, synthetic construct
  source 1..75: mol_type = other DNA
ttgccgctggcttatctcgacagcgccgccagtgcacagaaaccgagccaggtgattgacgccgaggccgagttt

SEQ ID NO: 339306 - DNA, 75 bp, synthetic construct
  source 1..75: mol_type = other DNA
gcggcgaaagctcgtggcgtcaagaaaaactccgatgtcggcggttggcattactcaccggctggtgaagaacgt

SEQ ID NO: 339307 - DNA, 75 bp, synthetic construct
  source 1..75: mol_type = other DNA
gcatattatgaattttttcaatggggttcaatatgcacggaagttaattaaagaaggtgttatcggcgaaatatt

SEQ ID NO: 339308 - DNA, 75 bp, synthetic construct
  source 1..75: mol_type = other DNA
gggtggtggcacatggtacacaggtacgcaaattcagcctggtgtcgaaaaatttattaaagattttaacgatgc

SEQ ID NO: 339309 - DNA, 75 bp, synthetic construct
  source 1..75: mol_type = other DNA
ctgagtcccgtttttatgccatcgagtggcaggctgattatgttgataataattgttggccgcatgatgccatta

SEQ ID NO: 339310 - DNA, 75 bp, synthetic construct
  source 1..75: mol_type = other DNA
tattcataaccgcgacgtcctctccgtcgccgggccgtttatgcgccgactgatgttgctctctggcgagacggt

SEQ ID NO: 339311 - DNA, 75 bp, synthetic construct
  source 1..75: mol_type = other DNA
ctggaaaagcagcaattgattaatcaggccaacgattatatgaacagtaaacaatggcctggtaaagcggcgatt

SEQ ID NO: 339312 - DNA, 75 bp, synthetic construct
  source 1..75: mol_type = other DNA
ggcgaatggcccggtgatggaatcgaaattgacgacactgttgctgccgaatttatgaaggaagcaccagaagga

SEQ ID NO: 339313 - DNA, 75 bp, synthetic construct
  source 1..75: mol_type = other DNA
aattattgcttaatcaggccaacgaatacatgaacagtaagcaatggcccggtaaagccgctattggtcgtctga

SEQ ID NO: 339314 - DNA, 75 bp, synthetic construct
  source 1..75: mol_type = other DNA
ctttaaacatttttgtgaatcctgcacttaaggatgattacattaatgcaaattcatggccagatgatgctctgg

SEQ ID NO: 339315 - DNA, 75 bp, synthetic construct
  source 1..75: mol_type = other DNA
gaagcggtattaattggtcagttagagtgtaaatcgatggtcaggatgtgtgcgccgctgggcagtcgtctgccg

SEQ ID NO: 339316 - DNA, 75 bp, synthetic construct
  source 1..75: mol_type = other DNA
gccgtgaagtcgatgaaacggcagacttgcccgctgaattgcctcccttgctgcgccgtttatacgccagccggg

SEQ ID NO: 339317 - DNA, 75 bp, synthetic construct
  source 1..75: mol_type = other DNA
atatatctttttttcttgtggctacagctacagctacagctacagctacagcttcggtgatttatccttatcctg

SEQ ID NO: 339318 - DNA, 75 bp, synthetic construct
  source 1..75: mol_type = other DNA
caaactctttctatccgctggagatgaaagaggattacacgcaagctgactcatggccagatgatgctgttgaag

SEQ ID NO: 339319 - DNA, 75 bp, synthetic construct
  source 1..75: mol_type = other DNA
cgcaatataatttgtggctggattatctggacgcactggagctggtcgatacttccggtgcgccagatattgaat

SEQ ID NO: 339320 - DNA, 75 bp, synthetic construct
  source 1..75: mol_type = other DNA
gccggataacggcgtgcgcgaagtgcaactggcttataagctcgatatcaacgagtttcgcggcaaccgcagcct

SEQ ID NO: 339321 - DNA, 75 bp, synthetic construct
  source 1..75: mol_type = other DNA
gcagatgttcccggagccgctgtttgacggtcatttccgtctgctgcaacagcggctggtgggcgaacgtcattt

SEQ ID NO: 339322 - DNA, 75 bp, synthetic construct
  source 1..75: mol_type = other DNA
catcagtcagatggaacaccacgctaacattgttccctggcagatgctttgcgcgcgcgttggcgcagagctgcg

SEQ ID NO: 339323 - DNA, 75 bp, synthetic construct
  source 1..75: mol_type = other DNA
acgagttaatgacgctggttaacaagttcattgaagaaaaacaatctgctaatccacgagatgcggcccaattta

SEQ ID NO: 339324 - DNA, 75 bp, synthetic construct
  source 1..75: mol_type = other DNA
acatccatatgttcgccacctcgccagcgtaggcgaagggatggttatcgaacatcagatcgacgaccatcacca

SEQ ID NO: 339325 - DNA, 75 bp, synthetic construct
  source 1..75: mol_type = other DNA
gtggaatttaatcgctacgagattgagcatgacagctttggcggttttattccggtgcgttgctgggtaacggat

SEQ ID NO: 339326 - DNA, 75 bp, synthetic construct
  source 1..75: mol_type = other DNA
ccgcacagaccgactttgtcacatggggcaatgcactcgcctcggacagccgcagcatcgctgccagtctggcgg

SEQ ID NO: 339327 - DNA, 75 bp, synthetic construct
  source 1..75: mol_type = other DNA
cacaccagagctggagcagcgcatcgctgcgctggaaaccgctggcaagaccgtcgtgatgctggtgggcgcaaa

SEQ ID NO: 339328 - DNA, 75 bp, synthetic construct
  source 1..75: mol_type = other DNA
gattaaagataagcacatgacagctgacgcagctgctcatgaagttatcgaaggtcaggcttctgccctggaaga

SEQ ID NO: 339329 - DNA, 75 bp, synthetic construct
  source 1..75: mol_type = other DNA
cagctttgtctttgaaggagaaacttgctgttactggtgttcttgtcctgatttgcgcacttgttggtgctgggt

SEQ ID NO: 339330 - DNA, 75 bp, synthetic construct
  source 1..75: mol_type = other DNA
agttacttcaatttaataaatggtattcctttaattatttctacaggacaatcggcggaagttcacggaggctta

SEQ ID NO: 339331 - DNA, 75 bp, synthetic construct
  source 1..75: mol_type = other DNA
gccacaggtccgaaggcctcgccacgccacgtgcaactggttgacgcgttctgtgagaggctcgatgccgtcctg

SEQ ID NO: 339332 - DNA, 75 bp, synthetic construct
  source 1..75: mol_type = other DNA
cgattgaagattcgcatgaactcgatttgccgaaccatcctaaccatgttcatttgttctttaagcgtgaaggta

SEQ ID NO: 339333 - DNA, 75 bp, synthetic construct
  source 1..75: mol_type = other DNA
tttcagatttcgaaatttgtggtcgggcttatgtaaaagaaaaacctttgacgggtgagcaattagagcttctcg

SEQ ID NO: 339334 - DNA, 75 bp, synthetic construct
  source 1..75: mol_type = other DNA
acctgacggggagagggggcaaataatcttacctcctgcggctgaggacggtacaatttcctttactattcgcaa

SEQ ID NO: 339335 - DNA, 75 bp, synthetic construct
  source 1..75: mol_type = other DNA
atgccacctgctaaaaatattggcgatgcgcttgaacgaatgatgtacagacatatacctctgatacgtcttgtt

SEQ ID NO: 339336 - DNA, 75 bp, synthetic construct
  source 1..75: mol_type = other DNA
tcaggccacaaatcattcgcgtggtgctgaacccggtaaaactgacctggcctgatctggatggcggcagccgca

SEQ ID NO: 339337 - DNA, 75 bp, synthetic construct
  source 1..75: mol_type = other DNA
tttctactgacgttactgcctgtgctgattctggctgtcgtttcaggcgtcagtgtatttgtactgttgcagtag

SEQ ID NO: 339338 - DNA, 75 bp, synthetic construct
  source 1..75: mol_type = other DNA
actgctaatggggcgactaggaagaaataaagttactcctcttgtttcgggggcgcttgaactacccagtgatat

SEQ ID NO: 339339 - DNA, 75 bp, synthetic construct
  source 1..75: mol_type = other DNA
ggcgcaaaagtgctggtggatggcgctcaggcggtgatgcatcatccggtggatgttcaggcgctggattgcgac

SEQ ID NO: 339340 - DNA, 75 bp, synthetic construct
  source 1..75: mol_type = other DNA
cagccgcatgctgccgaattaccttgaggatctgcaaaatccgctgtggctggtaactcaggaatatgaatcatg

SEQ ID NO: 339341 - DNA, 75 bp, synthetic construct
  source 1..75: mol_type = other DNA
gctgccggtacatccgtggcagtggcagcaaaaaatcgctaccgacttcatcgctgattttgccgaaggcaggat

SEQ ID NO: 339342 - DNA, 75 bp, synthetic construct
  source 1..75: mol_type = other DNA
aagtgttctacaaccgggcccggcgccacagtcacctcggcggcgtcagtccggaggccttcgaacaggcctcgt

SEQ ID NO: 339343 - DNA, 75 bp, synthetic construct
  source 1..75: mol_type = other DNA
ggaaaggtagtatgaagtcaactgtgcttagagtagctttgtcttgcgctaatagtattaaacttaataaatttg

SEQ ID NO: 339344 - DNA, 75 bp, synthetic construct
  source 1..75: mol_type = other DNA
gacacaactattgccttttctgaaaaatttaatgagcgcgaatggcggttagtgttcttacgtaatgaaataaat

SEQ ID NO: 339345 - DNA, 75 bp, synthetic construct
  source 1..75: mol_type = other DNA
gggaacttccgggcggcgttaccacccaccttgaagtgctggaactcgaataccagccagaagccgctggcgaat

SEQ ID NO: 339346 - DNA, 75 bp, synthetic construct
  source 1..75: mol_type = other DNA
actggtggaaagattaaaccagcagatattcgtcccgacctcgcaccattgtttaacgcgagtaattctgccgcc

SEQ ID NO: 339347 - DNA, 75 bp, synthetic construct
  source 1..75: mol_type = other DNA
caaaacgccagcaggcggaagcctcgacccgccgtaacctgctggggagtggcgatcgcagcgaccgtaaccgta

SEQ ID NO: 339348 - DNA, 75 bp, synthetic construct
  source 1..75: mol_type = other DNA
atggaaaacgtggtaacggcgttgcagagcattacgcagaaaacggtcagacagccacaaacgctggcgatggaa

SEQ ID NO: 339349 - DNA, 75 bp, synthetic construct
  source 1..75: mol_type = other DNA
tattccggcggcggtgggcgtggatatcggttgtggaatgaacgcgctgcgtaccgcgttaacggcggcagacct

SEQ ID NO: 339350 - DNA, 75 bp, synthetic construct
  source 1..75: mol_type = other DNA
gtggttaacgcaaaaatatccgcgtttccttaacactaacaactataaacacctgggaacgctgggaacgggtaa

SEQ ID NO: 339351 - DNA, 75 bp, synthetic construct
  source 1..75: mol_type = other DNA
gcgcgtgctggtcaatatggaattattcccggttcgatgggggcgaaaagctttatcgtccgtgggctgggaaat

SEQ ID NO: 339352 - DNA, 75 bp, synthetic construct
  source 1..75: mol_type = other DNA
ccgcctgttaatgtcgatgctaaatgggccgagctggaagcgggttatcagtggttaacgcaaaaatatccgcgt

SEQ ID NO: 339353 - DNA, 75 bp, synthetic construct
  source 1..75: mol_type = other DNA
aaaatgccccggtaaaaatgtggaccaaaggcgtgccggtagaagacgatgcgcgccagcaactgataaatacgg

SEQ ID NO: 339354 - DNA, 75 bp, synthetic construct
  source 1..75: mol_type = other DNA
attgctctggctacggaactggaaacggccgggcagaaatgggctctgggcttcacccccaaattccagcgcgtc

SEQ ID NO: 339355 - DNA, 75 bp, synthetic construct
  source 1..75: mol_type = other DNA
gtacacttgtcgcgtctgccgttttattttcctttaattcaacggccgccacctcatattctgaagcccgtaatg

SEQ ID NO: 339356 - DNA, 75 bp, synthetic construct
  source 1..75: mol_type = other DNA
agccagtctgtcgataaagacaggctgacctctcaggcttttgcccgtgctgcactgatcactgatgtgggcatt

SEQ ID NO: 339357 - DNA, 75 bp, synthetic construct
  source 1..75: mol_type = other DNA
cacccccaaataccagcgcgtggacctgttcaactacaacgtctccgtgcgcgattacgacagcagcaactttga

SEQ ID NO: 339358 - DNA, 75 bp, synthetic construct
  source 1..75: mol_type = other DNA
catataccgacctcgatgacaactggacgctgggtctggtggcgcagaacctcattccacgcagcatcgatacga

SEQ ID NO: 339359 - DNA, 75 bp, synthetic construct
  source 1..75: mol_type = other DNA
gctgacgcacaggtgggcgcttccgctgtggcagcccttcccggtgatactctcgctgcagccctgatgctaaaa

SEQ ID NO: 339360 - DNA, 75 bp, synthetic construct
  source 1..75: mol_type = other DNA
agctttatcgtccgtgggctgggaaatgaagagtcgttctgttcgtgcagccacggtgccgggcgggtaatgagc

SEQ ID NO: 339361 - DNA, 75 bp, synthetic construct
  source 1..75: mol_type = other DNA
aacagggattggccttatgtcgagggtttatgaaagccctatggccaggaatgcgctcttacgtctggcaaacac

SEQ ID NO: 339362 - DNA, 75 bp, synthetic construct
  source 1..75: mol_type = other DNA
aagctggtgaaacaattggcgggtatttagttccaggagttggaacggcaggaagcatggctattggatcactgg

SEQ ID NO: 339363 - DNA, 75 bp, synthetic construct
  source 1..75: mol_type = other DNA
agtcaggaattagccgtgcagtgcgcgagctggaagagcgactgggcgtgcagcttctggtacgcaccacgcgca

SEQ ID NO: 339364 - DNA, 75 bp, synthetic construct
  source 1..75: mol_type = other DNA
gtcgctggccacagaaatgtacgacatggctgtggcggcatcgctgacacaagaacgggggcgagtggctgcggt

SEQ ID NO: 339365 - DNA, 75 bp, synthetic construct
  source 1..75: mol_type = other DNA
ggggaatcccgtgaataccgcgtcaccttccgcgaactgacggcgaaagacagcattgatgcggaaaccgatgct

SEQ ID NO: 339366 - DNA, 75 bp, synthetic construct
  source 1..75: mol_type = other DNA
gattggacagttaagcgagcgcgatctctcccgtctgatggcagcggtcagcctgctggatacagcgcttgccgg

SEQ ID NO: 339367 - DNA, 75 bp, synthetic construct
  source 1..75: mol_type = other DNA
gtgaagagcctgaaaacagaagtcgttttaaaacgctaaaaggttatctggtaaaaggcaggcagatcctggatg

SEQ ID NO: 339368 - DNA, 75 bp, synthetic construct
  source 1..75: mol_type = other DNA
tgacagcggatggagaatgcttacagaaaacgcaggtgctgattgataatgatcattctcaaagaaaacatgagg

SEQ ID NO: 339369 - DNA, 75 bp, synthetic construct
  source 1..75: mol_type = other DNA
gcatttcgttttcgctacagacagcaacatctgcagggcacagaggctcagcaactggcagcggtgatggccggg

SEQ ID NO: 339370 - DNA, 75 bp, synthetic construct
  source 1..75: mol_type = other DNA
atgcttaatcgtctgaaaaaactgcttcccggtaacagcaatacccgcagtgctgagacaaccgacccggaagtc

SEQ ID NO: 339371 - DNA, 75 bp, synthetic construct
  source 1..75: mol_type = other DNA
acgaaaagggcgttatcaacctgtcagcggttacctggtgaaaagccgcagtctgttcagcggaaaagggctccc

SEQ ID NO: 339372 - DNA, 75 bp, synthetic construct
  source 1..75: mol_type = other DNA
tatctgaaacagacggggagtaaccacggtcgccgttatgttcagtccgtatttgagcgtgcgggacttcaccgg

SEQ ID NO: 339373 - DNA, 75 bp, synthetic construct
  source 1..75: mol_type = other DNA
atgatgatgaaaaagcatattacccgtactctcatcgcgtctgctgttttattttcctttaattcaacagccgca

SEQ ID NO: 339374 - DNA, 75 bp, synthetic construct
  source 1..75: mol_type = other DNA
caaatcgattctgacaacaagttgggcgtaggttccgacgatacagttgctgtgggtatcgtttaccagttctaa

SEQ ID NO: 339375 - DNA, 75 bp, synthetic construct
  source 1..75: mol_type = other DNA
ttgactacatcatcaaccagatcgattctgacaacaaactgggcgtaggttctgatgacaccgtggcggtgggta

SEQ ID NO: 339376 - DNA, 75 bp, synthetic construct
  source 1..75: mol_type = other DNA
tcgagcaatgggcaactggcctgaagtacgatgcaaacaacatctacctggcggctaactatggcgaaactcgta

SEQ ID NO: 339377 - DNA, 75 bp, synthetic construct
  source 1..75: mol_type = other DNA
cgaaccggatgaaagcggcggcgaacaggcaatgactgaactgctgggaagggggcgaaatttcactgccgtggc

SEQ ID NO: 339378 - DNA, 75 bp, synthetic construct
  source 1..75: mol_type = other DNA
tgcgttggtcgtccatgccaaaatgatcccggatgccgatttagcctcattaatgaaacaaatgcccggtatggt

SEQ ID NO: 339379 - DNA, 75 bp, synthetic construct
  source 1..75: mol_type = other DNA
gggagacttacccgaaatctgatttattcaacaaagccaggggaaactcaaatcaattccgatctgaccggttat

SEQ ID NO: 339380 - DNA, 75 bp, synthetic construct
  source 1..75: mol_type = other DNA
gtgttaacaaaggaggtatcaacccatggccgaaaaaaacagtggcatgaaacgctacacgaccagtttgggcag

SEQ ID NO: 339381 - DNA, 75 bp, synthetic construct
  source 1..75: mol_type = other DNA
gtactttgcggtagataacgttctgtatcatgaaaagaccgatcaccaggatctgatcatttttgagaacgctgc

SEQ ID NO: 339382 - DNA, 75 bp, synthetic construct
  source 1..75: mol_type = other DNA
tatatccgggatgttcagggcgggactgtatcaccgtcatcaactgctgaactgaccggagtggaaacgcagtaa

SEQ ID NO: 339383 - DNA, 75 bp, synthetic construct
  source 1..75: mol_type = other DNA
tataacaaagatggcaacaaactggatctatacggtaaagctgtcggtttgcattatttctccaagggtaatggt

SEQ ID NO: 339384 - DNA, 75 bp, synthetic construct
  source 1..75: mol_type = other DNA
tattacggcggtatcatgacctttgcatgggcgacagataacgacgccttacgccatctctcaaccgaaattatt

SEQ ID NO: 339385 - DNA, 75 bp, synthetic construct
  source 1..75: mol_type = other DNA
aaacgctacacgaccagtttgggcagtactttgctgtagataacgttctgtatcatgaaaagaccgatcaccagg

SEQ ID NO: 339386 - DNA, 75 bp, synthetic construct
  source 1..75: mol_type = other DNA
cgaaccagacgaaagcggcggcgaacaggcaatgaccgagcttttgggacgaggcagaaatttcactgcggtagc

SEQ ID NO: 339387 - DNA, 75 bp, synthetic construct
  source 1..75: mol_type = other DNA
gacgccgcaatcatgcgcgggatattccaggcaacagatacaggacgccagaatttaatccgacacaggaagatc

SEQ ID NO: 339388 - DNA, 75 bp, synthetic construct
  source 1..75: mol_type = other DNA
cgctaaaacctggcgtcacggggatacgtcaggggctgcgttcttgctcctgttgtacggcaatccttcctgctg

SEQ ID NO: 339389 - DNA, 75 bp, synthetic construct
  source 1..75: mol_type = other DNA
tggcggcctgttgtcagcgattggcgtcgccgggatgagtcggatgctgggcgcgaatgtgattgccaccagcgg

SEQ ID NO: 339390 - DNA, 75 bp, synthetic construct
  source 1..75: mol_type = other DNA
tgccgcactggtcaccgatgtgggtattgctctggctactgaactggaaatgaaccgccccgggaatcctggaga

SEQ ID NO: 339391 - DNA, 75 bp, synthetic construct
  source 1..75: mol_type = other DNA
ctgtggcggcccttcccggtgatactctcgccgcagcactgatgctgaaaaccttcggcactgtcagcgtcgacg

SEQ ID NO: 339392 - DNA, 75 bp, synthetic construct
  source 1..75: mol_type = other DNA
taacgcagactcatcctcatatgttaaggcatgcttgcggttatgaactggcggagcgtggtgcagatactcgtt

SEQ ID NO: 339393 - DNA, 75 bp, synthetic construct
  source 1..75: mol_type = other DNA
atgaattttgaagaacactatggtgaacttacgagtgagataacactgaatggtactacaccagatggtaacagt

SEQ ID NO: 339394 - DNA, 75 bp, synthetic construct
  source 1..75: mol_type = other DNA
taaagtcaaggatgcccttgtgaattactgcaatagtaaaggattgataatttacaacgcggataacagcagtgt

SEQ ID NO: 339395 - DNA, 75 bp, synthetic construct
  source 1..75: mol_type = other DNA
acgatcgttacggtgcctggctggcgacacgtcatttaattcagcaaggccatacccgtattggttacctttgct

SEQ ID NO: 339396 - DNA, 75 bp, synthetic construct
  source 1..75: mol_type = other DNA
ctggcaatgcgctgtttagcgcggcaattagcggctggctgtgggtcaccgtactgttcgctaatttcgccgagg

SEQ ID NO: 339397 - DNA, 75 bp, synthetic construct
  source 1..75: mol_type = other DNA
gccggaaaatagtaacgcccgcgagtgtgcagctccgggcgtcgtggcgtcgattgcttctggttgtggagaaac

SEQ ID NO: 339398 - DNA, 75 bp, synthetic construct
  source 1..75: mol_type = other DNA
attaaaacaggcttacccttccaagtggataggcaaaaaataagggcgtcagaatgcgttatattgcgtttaaag

SEQ ID NO: 339399 - DNA, 75 bp, synthetic construct
  source 1..75: mol_type = other DNA
tccggcaatgtggtcacactcaacgacattcgcggtcgctatgagtgctatacagacgttggaccatccttccag

SEQ ID NO: 339400 - DNA, 75 bp, synthetic construct
  source 1..75: mol_type = other DNA
atggccgaccaagacgacaaattgcgaaccattctccttcggtttgacagggattgggcagcaagcgatgaggcc

SEQ ID NO: 339401 - DNA, 75 bp, synthetic construct
  source 1..75: mol_type = other DNA
ttccgacccagccgctggcatattacgaaaacccggaagtgccgcaggccaacgcctacatgctggaagaagcca

SEQ ID NO: 339402 - DNA, 75 bp, synthetic construct
  source 1..75: mol_type = other DNA
tgttcaccggcatcaggattgatgaatggcatgaacaccctgagaactgcgctacctgcatgaagaaacgcaaaa

SEQ ID NO: 339403 - DNA, 75 bp, synthetic construct
  source 1..75: mol_type = other DNA
aggaccgatgaaaacggtaacgacctgccgattggtccaatctcctacatggaaaaccctgaagtgccgcaagcc

SEQ ID NO: 339404 - DNA, 75 bp, synthetic construct
  source 1..75: mol_type = other DNA
gcctgctcacacgtcatatgggacgccaacagcaagcagatggataagagcgacgctaagcactgcacggtgatt

SEQ ID NO: 339405 - DNA, 75 bp, synthetic construct
  source 1..75: mol_type = other DNA
taacatttattgtctgcatttgtcagaagaaaatggtcttaccggtctgtatggcggtgacaatgctggtatcgt

SEQ ID NO: 339406 - DNA, 75 bp, synthetic construct
  source 1..75: mol_type = other DNA
atgtgaacgacaccatcactgaaggcgcagcaaccttcagcgaacacgttgcgaagctacgtatcctggcaggcg

SEQ ID NO: 339407 - DNA, 75 bp, synthetic construct
  source 1..75: mol_type = other DNA
ccgaaaaccgcccttatctgcgcgcgctttatgcaacaattctcgcaaatgtgcacttacagcgtcatcaggatg

SEQ ID NO: 339408 - DNA, 75 bp, synthetic construct
  source 1..75: mol_type = other DNA
gatagagtccggcgttggtgcatggcgtctggtcacacagtacgaagacaacgacccaacaagcaacaatcaggt

SEQ ID NO: 339409 - DNA, 75 bp, synthetic construct
  source 1..75: mol_type = other DNA
atcagggaaaagacactggaatattaacattaacattgagaggtgaagaccctaagcatttagaacaggttttag

SEQ ID NO: 339410 - DNA, 75 bp, synthetic construct
  source 1..75: mol_type = other DNA
cgttctgagcatcttcgcgcttaccgtgcgctgctgcgaactgtaaacgtaggcccgtccgaaatcatgatggaa

SEQ ID NO: 339411 - DNA, 75 bp, synthetic construct
  source 1..75: mol_type = other DNA
ttcggctgcgtccccatgttgtcggacgtggtgaacatcagcgcaggcgaagccggaaagaccacgaaaaaaatc

SEQ ID NO: 339412 - DNA, 75 bp, synthetic construct
  source 1..75: mol_type = other DNA
cgttacccgacggagcgttaagcaagttagaggttttggtgatcatctgacccaggcggttatcgactggaaagc

SEQ ID NO: 339413 - DNA, 75 bp, synthetic construct
  source 1..75: mol_type = other DNA
gcgtggcaaccgggcgtccgacggctaaagcgtgggtagcggcactggactctctacgccaacagttaaagaaat

SEQ ID NO: 339414 - DNA, 75 bp, synthetic construct
  source 1..75: mol_type = other DNA
ctctgcggtcgatcaccggctggcagaactgaccatgaacaaactttacgatcgcgttcccgcttctgtctggaa

SEQ ID NO: 339415 - DNA, 75 bp, synthetic construct
  source 1..75: mol_type = other DNA
atgaagacaaatataaaagtatttacatcgacaggtgaattgaccactctcgggcgtgaactgggcaaaggtggc

SEQ ID NO: 339416 - DNA, 75 bp, synthetic construct
  source 1..75: mol_type = other DNA
cgccaacagttaaagaaatgtaccgtttcggcaatgcatgtttatcccgctcatttgactgactgcccgtggtgt

SEQ ID NO: 339417 - DNA, 75 bp, synthetic construct
  source 1..75: mol_type = other DNA
agtttctggagggattttttattgatgttgcctctattcccggcgttggccctgcgcgtaaagcggcgttacggt

SEQ ID NO: 339418 - DNA, 75 bp, synthetic construct
  source 1..75: mol_type = other DNA
cacccgacagctgggataaggccttctgttttgtggacgggatttgtgagctgcacctttacagcaatggcgtgg

SEQ ID NO: 339419 - DNA, 75 bp, synthetic construct
  source 1..75: mol_type = other DNA
cttcgacaccatgatgtttggtgataccgaagatgctcacacccttctgactgccgcgcgtaaagctggaatagc

SEQ ID NO: 339420 - DNA, 75 bp, synthetic construct
  source 1..75: mol_type = other DNA
ggtactcccgcgatgccttttaaggatgccatcgttaaaaagctgggcagtcagcattcagcggagctgatgatg

SEQ ID NO: 339421 - DNA, 75 bp, synthetic construct
  source 1..75: mol_type = other DNA
ctctgccgttgacaaccggctggcagaactgacaatgaacaaactttacgatcgcgtgccggcttccgtctggaa

SEQ ID NO: 339422 - DNA, 75 bp, synthetic construct
  source 1..75: mol_type = other DNA
ctctgcggtcgatcaccggctggcagaactgacaatgaacaagctttacgatcgcgttccggcttctgtctggaa

SEQ ID NO: 339423 - DNA, 75 bp, synthetic construct
  source 1..75: mol_type = other DNA
ttctgcggttgatcaccggctggcagaactgaccatgaacaaactttacgatcgcgttcccgcttctgtctggaa

SEQ ID NO: 339424 - DNA, 75 bp, synthetic construct
  source 1..75: mol_type = other DNA
ggcatacaatcctgaagataatcagggtgcccgctggttgttgggttcagagttattacgaacaggtgatcatga

SEQ ID NO: 339425 - DNA, 75 bp, synthetic construct
  source 1..75: mol_type = other DNA
gatgaatatgtctggccctggatattgccgttttcagcagcaggaatgaaacactcaagcatccagcatcagtag

SEQ ID NO: 339426 - DNA, 75 bp, synthetic construct
  source 1..75: mol_type = other DNA
ttctgacgtaaccggcatcggggcatccattaccgacgaggacatcgagaatgccgaagatgaagcgccgcccgg

SEQ ID NO: 339427 - DNA, 75 bp, synthetic construct
  source 1..75: mol_type = other DNA
ggcgaacggcacaggccaccgctgatggctatgagaactttgtcgcccgcgtgggaatgcagacacctaaccagc

SEQ ID NO: 339428 - DNA, 75 bp, synthetic construct
  source 1..75: mol_type = other DNA
tggactcgcgggataagtttgaaacccatcagtacagcttcagtggtctggatgacatcctttcacagtttgcag

SEQ ID NO: 339429 - DNA, 75 bp, synthetic construct
  source 1..75: mol_type = other DNA
cctgtatgcagcaatgctggcaaatgtacatttacagcgccatcaggctgccgtcatgcttattgagaaaatgct

SEQ ID NO: 339430 - DNA, 75 bp, synthetic construct
  source 1..75: mol_type = other DNA
ttgatgcatacgacactgatgaaatcagcgagacaagttacatcaacaaactcagacgccttgctcaacgggagc

SEQ ID NO: 339431 - DNA, 75 bp, synthetic construct
  source 1..75: mol_type = other DNA
ctttgccagcggattgtgaaattacagaatttgatagaaagggcattcaaagatacggattgagatttttttcag

SEQ ID NO: 339432 - DNA, 75 bp, synthetic construct
  source 1..75: mol_type = other DNA
tatcatatttgatgaatgtgcaaggttagcatctgccaaatattcaaaaatacaagcagttggaattggtaaaga

SEQ ID NO: 339433 - DNA, 75 bp, synthetic construct
  source 1..75: mol_type = other DNA
gttggcgaagtgattagcgccgttgacgaatctgtagatgccacccgttgtcagggtaaaggcggctgccagggc

SEQ ID NO: 339434 - DNA, 75 bp, synthetic construct
  source 1..75: mol_type = other DNA
tattatcataaatcgaatgtaatcaaaaaagatttttggaaatggtattctcccaaatatggacttaatttgctc

SEQ ID NO: 339435 - DNA, 75 bp, synthetic construct
  source 1..75: mol_type = other DNA
ctgcgcttaaaggactgaccgttggcaatcgtcttatccctgaaggtttcagtggtgaaatcatctggatgcatc

SEQ ID NO: 339436 - DNA, 75 bp, synthetic construct
  source 1..75: mol_type = other DNA
tctgtgcggaaatctgcatccatttcctcttgctgtatggcataactattctgccgggccggatactgccgaaga

SEQ ID NO: 339437 - DNA, 75 bp, synthetic construct
  source 1..75: mol_type = other DNA
tgttggggctttaaccgatgaggtgaaacgccgtggttatcagaaggcgctgatcgtcaccgataaaacgctggt

SEQ ID NO: 339438 - DNA, 75 bp, synthetic construct
  source 1..75: mol_type = other DNA
tggcgcatttgccagcggtaacattctgcaggtgctgctgtttgccgtactgtttggttttgcgctccaccgtct

SEQ ID NO: 339439 - DNA, 75 bp, synthetic construct
  source 1..75: mol_type = other DNA
aagcgtcggcatggttccagcgatcagatgtcaccgacagaatatgaaaaccagtattatcaacggctcagaagt

SEQ ID NO: 339440 - DNA, 75 bp, synthetic construct
  source 1..75: mol_type = other DNA
tcaggcggtccggatactgctgaagattattatgccacataccacccgttatgggggcaatatccggaagcattg

SEQ ID NO: 339441 - DNA, 75 bp, synthetic construct
  source 1..75: mol_type = other DNA
attgtacagaaatgcagaaatatgaatggtgaatatgtctggccctggatattggtgatgctgccaacttactga

SEQ ID NO: 339442 - DNA, 75 bp, synthetic construct
  source 1..75: mol_type = other DNA
gggcagcaaaggccaactgatttttaacgttatcgaaagtttctcgcaggtcatcttcggcatcatcaatatgat

SEQ ID NO: 339443 - DNA, 75 bp, synthetic construct
  source 1..75: mol_type = other DNA
cctggcgccggaatgaacgtcgatccggcaacgcttgatgcgaaagcggtagcggtttacgccgatcaggcaaaa

SEQ ID NO: 339444 - DNA, 75 bp, synthetic construct
  source 1..75: mol_type = other DNA
tacgtgatcactgacgaagaaaaacggcgcaagtttgtttgcgttgatccgcatgatatcccgcaggtggcgttt

SEQ ID NO: 339445 - DNA, 75 bp, synthetic construct
  source 1..75: mol_type = other DNA
tgtgcgtagcctggaaggactttccccgaccaataaacccagtgtaccgattctggcaatccccaccacagcagg

SEQ ID NO: 339446 - DNA, 75 bp, synthetic construct
  source 1..75: mol_type = other DNA
aaacgccgtggttatcagaaggcgctgatcgtcaccgataaaacgctggtgcaatgcggcgtggtggcgaaagtg

SEQ ID NO: 339447 - DNA, 75 bp, synthetic construct
  source 1..75: mol_type = other DNA
gtgataaggatgccggagaacagatggcgctcggacagtatgtcgcgggcatgggcttctcgaacgttgggttgg

SEQ ID NO: 339448 - DNA, 75 bp, synthetic construct
  source 1..75: mol_type = other DNA
taccgcatgtcatgcgctataacgctgactttaccggtgagaagtaccacgatatcgcgcgcgttatgggcgtga

SEQ ID NO: 339449 - DNA, 75 bp, synthetic construct
  source 1..75: mol_type = other DNA
tggtgtacgcaaggaagacattccggcactggcgcaggcggcactggatgatgtttgtaccggtggcaacccgcg

SEQ ID NO: 339450 - DNA, 75 bp, synthetic construct
  source 1..75: mol_type = other DNA
atgaaagtaaaaataactgcttctaataccagttttgttagtgttggtgatattacagaagtaataacaaaccat

SEQ ID NO: 339451 - DNA, 75 bp, synthetic construct
  source 1..75: mol_type = other DNA
gggctataagaagagctttgtttccgatggtcagacttggaaagaaagtgacgtgttggacacccgcgaagcgcg

SEQ ID NO: 339452 - DNA, 75 bp, synthetic construct
  source 1..75: mol_type = other DNA
attgctgacagatgcagatcccggtgagggtggatggcatagcggcacgatgcgacagagtatcggtaaggagct

SEQ ID NO: 339453 - DNA, 75 bp, synthetic construct
  source 1..75: mol_type = other DNA
gaggtcgatctcacctgggttccggcgcagcaaattcccgccattgaaaaatcactgcctggcgagctacgaatt

SEQ ID NO: 339454 - DNA, 75 bp, synthetic construct
  source 1..75: mol_type = other DNA
atgtatacgcgaaatttattatggctggtcagcctggtaagtgcggctcctctctacgctgctgacgttcccgcc

SEQ ID NO: 339455 - DNA, 75 bp, synthetic construct
  source 1..75: mol_type = other DNA
cagcttcctgaacacgctcaaaagcgatagtgaagaaaacgtcggtcactggaaaaatgcgcagtatgacgcctt

SEQ ID NO: 339456 - DNA, 75 bp, synthetic construct
  source 1..75: mol_type = other DNA
aacaggcagactttgagcgtttggcggcgttctatccataccgcgatgcgcatggattaccaatacttgaagaga

SEQ ID NO: 339457 - DNA, 75 bp, synthetic construct
  source 1..75: mol_type = other DNA
aggcaggctgatagatcggtaattcccgttactcaagaaggaagaaacacaaaacgcaaagtaaatctcttcgca

SEQ ID NO: 339458 - DNA, 75 bp, synthetic construct
  source 1..75: mol_type = other DNA
tccgagcctgtttcattccgtaaggagaacagagcgaggcatgaagccaatgtacggctgcgcagattcgttgaa

SEQ ID NO: 339459 - DNA, 75 bp, synthetic construct
  source 1..75: mol_type = other DNA
tagtgtgtaatggtcaaaccttgactgagaaagaactttcagctgcaccagcaggtctgacttataccgtcaatg

SEQ ID NO: 339460 - DNA, 75 bp, synthetic construct
  source 1..75: mol_type = other DNA
gcccagagccagattttgcctgctcatataaaagaaggcgatcggcagccacatctaacaggtttacgtaagagt

SEQ ID NO: 339461 - DNA, 75 bp, synthetic construct
  source 1..75: mol_type = other DNA
aggcaggctgacagagcactaatacccatcaatcagggcgaaaaaggtgggaagcgaacagtaaatctctacgcg

SEQ ID NO: 339462 - DNA, 75 bp, synthetic construct
  source 1..75: mol_type = other DNA
ggtttacaacggtgcctttgtgcttgatcagtgggtagttaacgaaaagattactgcacgcaaaaatccaaagta

SEQ ID NO: 339463 - DNA, 75 bp, synthetic construct
  source 1..75: mol_type = other DNA
acgataaaggaaggaaaaagcgtaatcgtcttcccattcaggtggtgaaaattccgatggcggccccactgaaac

SEQ ID NO: 339464 - DNA, 75 bp, synthetic construct
  source 1..75: mol_type = other DNA
cttgtgaagtatttactatgcgaataaatactgtcacggaaagtgcaggcctggatgtgatggaaatcatgtttc

SEQ ID NO: 339465 - DNA, 75 bp, synthetic construct
  source 1..75: mol_type = other DNA
tctaaagcgctggattgaagagttttacccaaatgcgcgtcccctggtcattcgctcaggcacaaacaaatgctt

SEQ ID NO: 339466 - DNA, 75 bp, synthetic construct
  source 1..75: mol_type = other DNA
ggtatcagcgctgcagccctctctttaccaaacgccgcccatgcggatgtgctcagctggtttaagggtaacaat

SEQ ID NO: 339467 - DNA, 75 bp, synthetic construct
  source 1..75: mol_type = other DNA
ctggcatgttatgcaacgtcttccccaggccagatataaggagggcaatgacgacaagggaaggaaaaagcgtaa

SEQ ID NO: 339468 - DNA, 75 bp, synthetic construct
  source 1..75: mol_type = other DNA
gtaatagcttatgcatatcagcagaaaaagaaaagtaaaggtgaaactgttaagcatattaaaagtcctcaaagt

SEQ ID NO: 339469 - DNA, 75 bp, synthetic construct
  source 1..75: mol_type = other DNA
atttataacacggtgctgggccggattgcggagctgtacggtgagcgcagaactcatgcgactgctgagcaacat

SEQ ID NO: 339470 - DNA, 75 bp, synthetic construct
  source 1..75: mol_type = other DNA
tatccgcgacagcctgaatcagcaggccatcaataacatcgccagaaagctggcacaggatttacgtcgcgccca

SEQ ID NO: 339471 - DNA, 75 bp, synthetic construct
  source 1..75: mol_type = other DNA
ccgccattcgcgtgctgaaaaaattccctaccgctgaaattcgcaaacacgatctctcgtcgctggaagtgctct

SEQ ID NO: 339472 - DNA, 75 bp, synthetic construct
  source 1..75: mol_type = other DNA
gcgactatcgtttacgaaggattaccgacctggccggactgcggcgtgtggtggaaaatcgtcgagaaatatcag

SEQ ID NO: 339473 - DNA, 75 bp, synthetic construct
  source 1..75: mol_type = other DNA
gttagagatcttcaaatgattgcatatggtaaatgtattagagaagatcaaatttttcccgaaaacaaaaaataa

SEQ ID NO: 339474 - DNA, 75 bp, synthetic construct
  source 1..75: mol_type = other DNA
cctggctgcaaatccgattccggtactggatggcgaactggttggtgcactgcgtccgagcgatgcgccgctgac

SEQ ID NO: 339475 - DNA, 75 bp, synthetic construct
  source 1..75: mol_type = other DNA
ctggtgcgtatggaagccatcatcaactcaatgacgatgaaagagcgcgctaagccagaaatcatcaaaggttcg

SEQ ID NO: 339476 - DNA, 75 bp, synthetic construct
  source 1..75: mol_type = other DNA
atgatggacgagatcaaacaagtccatgcgtcgattaacccggttgaaaccctgtttgtggttgacgccatgacc

SEQ ID NO: 339477 - DNA, 75 bp, synthetic construct
  source 1..75: mol_type = other DNA
taccggcgtagtgttgaccaaagtggacggcgatgcccgcggcggtgcggcgctctctattcgtcacatcactgg

SEQ ID NO: 339478 - DNA, 75 bp, synthetic construct
  source 1..75: mol_type = other DNA
tggtgtgccggaaatggaacgcgtctgtcagtgcggtgtgggtcaccgtgacggcagattttgaacaggtcgtgg

SEQ ID NO: 339479 - DNA, 75 bp, synthetic construct
  source 1..75: mol_type = other DNA
gcaatatcagtggccgtggacgcctacactgaagacaacgtaaaagatacgctgcgcgaagtgcgcatggcgctg

SEQ ID NO: 339480 - DNA, 75 bp, synthetic construct
  source 1..75: mol_type = other DNA
gacattatctgcgcggttgtgtcgtgatacgcaacaattaagggcgtggatagcaagggatttaagaaaatatat

SEQ ID NO: 339481 - DNA, 75 bp, synthetic construct
  source 1..75: mol_type = other DNA
ctgctgttcccgtggcatacccttgagcgccaagtgatggtgatcggtaaagcggaacgactttcgactctcgaa

SEQ ID NO: 339482 - DNA, 75 bp, synthetic construct
  source 1..75: mol_type = other DNA
tctgcccgtggtatccttgaaagtaaattcctggagctgaagcagaagtttcaacagggcgaagtgccattgccg

SEQ ID NO: 339483 - DNA, 75 bp, synthetic construct
  source 1..75: mol_type = other DNA
tgtcgcgcacgctgcgcaatatcagtggccgtggacgcctcactgaagacaacgtaaaagatacgctgcgcgaag

SEQ ID NO: 339484 - DNA, 75 bp, synthetic construct
  source 1..75: mol_type = other DNA
cctattgagcctgttcatatttatgggcgggtaacgacaatgaagcctaaattaaaagaacatctttttgcaaaa

SEQ ID NO: 339485 - DNA, 75 bp, synthetic construct
  source 1..75: mol_type = other DNA
tatttgcaaagctggttaatgacctgacattatccgcgcggttgtgccgtgatacacaacaattgagggcgtgga

SEQ ID NO: 339486 - DNA, 75 bp, synthetic construct
  source 1..75: mol_type = other DNA
ggggttaactttgaagcgcgggctgaattagccagacgccagcaggcagaaagcgatcttaacgcacaggccatg

SEQ ID NO: 339487 - DNA, 75 bp, synthetic construct
  source 1..75: mol_type = other DNA
caaccgcaactgcgcgatcgcctctggtggcctggtgccttgctgaccgactccgcggcgaaagctaaagcgctt

SEQ ID NO: 339488 - DNA, 75 bp, synthetic construct
  source 1..75: mol_type = other DNA
ctccgccagtccaggggtgaaatgcacatcccgcaaaactttttgcccaaaagcaggcaaaaacttttgcggtct

SEQ ID NO: 339489 - DNA, 75 bp, synthetic construct
  source 1..75: mol_type = other DNA
gcgaatgccgctcatcatgctgaaattgatattgctcccggcgtgccgatcaacgtgctttcgcgcaattctcac

SEQ ID NO: 339490 - DNA, 75 bp, synthetic construct
  source 1..75: mol_type = other DNA
gggatcgcatacggtccggaaatggcagcgaaagcgcagtctgacgcaaaagcagccatcgacagcattgttgct

SEQ ID NO: 339491 - DNA, 75 bp, synthetic construct
  source 1..75: mol_type = other DNA
gggatcgcatacggtccggaaatggcagcgaaagcgcagtctgacgcgaaagcggccatcgacagcattgttgct

SEQ ID NO: 339492 - DNA, 75 bp, synthetic construct
  source 1..75: mol_type = other DNA
gcacaactccgtgccctgagtgcccggttgtggggtgccagaatgcgcctcgcggcgcagtatggccaggacgcc

SEQ ID NO: 339493 - DNA, 75 bp, synthetic construct
  source 1..75: mol_type = other DNA
tcgatgttgctcctggtgttccggttaatgttctgtcacgtgatgcgcatatacaggcgctacagaaagcaatga

SEQ ID NO: 339494 - DNA, 75 bp, synthetic construct
  source 1..75: mol_type = other DNA
gcatcatttagtgatattccaggtcggagaaaccttatttctcaggctatcgatgaaaccttgtatcgtactgaa

SEQ ID NO: 339495 - DNA, 75 bp, synthetic construct
  source 1..75: mol_type = other DNA
aacattgcctttggcatggcgcagcgtggtctaacagcaaagacactgcgtgatggcggttataacgaaatggcg

SEQ ID NO: 339496 - DNA, 75 bp, synthetic construct
  source 1..75: mol_type = other DNA
gtcagtgaaagcctgcgcaatgtccgccaccacgaagaagctaaccgggcagcgattgtggagtcacttcgtgtc

SEQ ID NO: 339497 - DNA, 75 bp, synthetic construct
  source 1..75: mol_type = other DNA
gtcagtgaaagcctgcgcaatgtccgccaccatgaagaggctaaccgggctgcgattgtggagtcacttcgtgtc

SEQ ID NO: 339498 - DNA, 75 bp, synthetic construct
  source 1..75: mol_type = other DNA
catgaacaggaaggcgtttctggcctgcgtgctgatgtgcgtcatattaaccggctgcgaaacggcgaaaaaaat

SEQ ID NO: 339499 - DNA, 75 bp, synthetic construct
  source 1..75: mol_type = other DNA
atggcgataaaagggcttgagcaggcgattgataatctgagtcgggttcgtaaaaacgccattccggcggcttct

SEQ ID NO: 339500 - DNA, 75 bp, synthetic construct
  source 1..75: mol_type = other DNA
tcgtccggacagcatacttaaagccggtcagcatcggtatcagcgggcatttattcagcgattaaaaaatggtcg

SEQ ID NO: 339501 - DNA, 75 bp, synthetic construct
  source 1..75: mol_type = other DNA
tgtgtgtcctgtggatgcccgttaacacttcagcggggcaatgacggacaaccaccgtggtttgaacatgactag

SEQ ID NO: 339502 - DNA, 75 bp, synthetic construct
  source 1..75: mol_type = other DNA
catcagcattattgtggattgttcactttttgattctgcgcggcgtgcagactgccgccagcattaacctggtcg

SEQ ID NO: 339503 - DNA, 75 bp, synthetic construct
  source 1..75: mol_type = other DNA
cgtttgcggtgcgtacttaagctggaccatcatggcggcagaagttccgttcctggcagccacccataaagcatt

SEQ ID NO: 339504 - DNA, 75 bp, synthetic construct
  source 1..75: mol_type = other DNA
atgaaatatttcttcactacacgcctgggcgaaacgcgctatctgacggcggacggttcgctgctgtgtaaagac

SEQ ID NO: 339505 - DNA, 75 bp, synthetic construct
  source 1..75: mol_type = other DNA
ttattcagcgattaaaaaatggtcgctggcatgtcatgcagcgtgtggtcgggaaaaaccgttaccccattgatg

SEQ ID NO: 339506 - DNA, 75 bp, synthetic construct
  source 1..75: mol_type = other DNA
gtcgatggccggtctgatggtgaaaatgatggggccatggggcgagattatcatcgctgccggattgatcgtttc

SEQ ID NO: 339507 - DNA, 75 bp, synthetic construct
  source 1..75: mol_type = other DNA
ctgagctggcagagattcgtaatccgtccatggctggtctaatggtggaaatgatggggccatggggagaaatta

SEQ ID NO: 339508 - DNA, 75 bp, synthetic construct
  source 1..75: mol_type = other DNA
tgtgcctgaagtgattactgctcgtcattgtgaaatgaaagtcgttgccgtgtcagccataactaatatggcgga

SEQ ID NO: 339509 - DNA, 75 bp, synthetic construct
  source 1..75: mol_type = other DNA
ataccgaaggcgcgctactcggcaacatcatcttgcaggtactcgaaagccacggcgtaccgacggtcaataaag

SEQ ID NO: 339510 - DNA, 75 bp, synthetic construct
  source 1..75: mol_type = other DNA
cacggcgtaccgacggtgaataaagtgcaactcggaacgactcctgtggtgcgcggggcgattacttccggtgaa

SEQ ID NO: 339511 - DNA, 75 bp, synthetic construct
  source 1..75: mol_type = other DNA
ggtgaaaggattaatggatattggcggtggttacgggccgcatatgatgctggtctgtttgtttgtcttgtcggc

SEQ ID NO: 339512 - DNA, 75 bp, synthetic construct
  source 1..75: mol_type = other DNA
tgaaaacgatgcggcgtggaaaaatgccgggcaaggctacgagaaagtcaaaaagctcgatgcagaacaaaacaa

SEQ ID NO: 339513 - DNA, 75 bp, synthetic construct
  source 1..75: mol_type = other DNA
gtgacgattaaagccgctgcccagcaaacttctggcgttaatgccgcaatggcttacggcactgacggtccggtc

SEQ ID NO: 339514 - DNA, 75 bp, synthetic construct
  source 1..75: mol_type = other DNA
atgccactctcaaagctctgggcaggttcattggttttgttggcagccgtgagcctgccgctacaggcggcttcc

SEQ ID NO: 339515 - DNA, 75 bp, synthetic construct
  source 1..75: mol_type = other DNA
aaacgtttcctggggtgcactgaacacggcatacagtgaacacccggagtggttttctgggcttgtctccgtggt

SEQ ID NO: 339516 - DNA, 75 bp, synthetic construct
  source 1..75: mol_type = other DNA
gtggatcaactcaacgccctgaagcaggaaaacaaagtcaacgtggcagagtatccgtcactgcgcgtcacctat

SEQ ID NO: 339517 - DNA, 75 bp, synthetic construct
  source 1..75: mol_type = other DNA
tataccgagttgccggggtttccggtgagcaccgtacacggccacgcaggagagttggtcctcggcgtactttct

SEQ ID NO: 339518 - DNA, 75 bp, synthetic construct
  source 1..75: mol_type = other DNA
atggcagagatttcattaattcctgagtcagaacttattggtaaatcggtgcgcgaaattggttttcgtacccgc

SEQ ID NO: 339519 - DNA, 75 bp, synthetic construct
  source 1..75: mol_type = other DNA
aaagcgcctataaatccattcactggccgagcattattttgatcgttgggatgatgccgtttgctgtggcattac

SEQ ID NO: 339520 - DNA, 75 bp, synthetic construct
  source 1..75: mol_type = other DNA
caaattgcgggacagtttttatgtggacgtctcctgggatgcgctgaatgtggcatacagtgaacaccctgagtg

SEQ ID NO: 339521 - DNA, 75 bp, synthetic construct
  source 1..75: mol_type = other DNA
agcagcgtttccgcaacggtgcggaacaccacgctaaccgtttcactaccagtgcatcacgcagcaactctcgct

SEQ ID NO: 339522 - DNA, 75 bp, synthetic construct
  source 1..75: mol_type = other DNA
gtgacgacctgtacgatcgagcatcaagtcaggataaacgctatcacattgttgaaggcgctaaccatatggacc

SEQ ID NO: 339523 - DNA, 75 bp, synthetic construct
  source 1..75: mol_type = other DNA
ccaaaatttgatgaaacccgtcaatatccggcaattgtggtatctcacccaggtgggggcgttaaagaacaaacg

SEQ ID NO: 339524 - DNA, 75 bp, synthetic construct
  source 1..75: mol_type = other DNA
cgatgcgccgaacgaagaactgcgtcaggcctgggagtattaccacacccctcgcgcgcagtatccaacagcacc

SEQ ID NO: 339525 - DNA, 75 bp, synthetic construct
  source 1..75: mol_type = other DNA
ggtcagcatcgttatcagcgggcattcatccagcgactgaataatgggcgctggcatgttatgcaacgtctgcca

SEQ ID NO: 339526 - DNA, 75 bp, synthetic construct
  source 1..75: mol_type = other DNA
ggcaccagcaaaacctggaaagtgaatgccgatatggttaatccgatggattcactgcgcatcaacttaccggcc

SEQ ID NO: 339527 - DNA, 75 bp, synthetic construct
  source 1..75: mol_type = other DNA
agccaacgctactgtttaatggttacgccgagcaggtggcatcgctgtatcgtggcctggatttgcgggagaatt

SEQ ID NO: 339528 - DNA, 75 bp, synthetic construct
  source 1..75: mol_type = other DNA
tatgtcgctttcgaaacgatttatgcgccggaacagatgccaggccagcaggaccgctttatcggcggcgggctg

SEQ ID NO: 339529 - DNA, 75 bp, synthetic construct
  source 1..75: mol_type = other DNA
caccggaacagatgccaggccagcaggaccgctttatcggcggcgggctgaaatatccttatgtcgaaggattgc

SEQ ID NO: 339530 - DNA, 75 bp, synthetic construct
  source 1..75: mol_type = other DNA
aaagggaacgatcgtccacccgcccccgccggaaaaccgctggagttcagcaagcctgccgcctggcaaaataac

SEQ ID NO: 339531 - DNA, 75 bp, synthetic construct
  source 1..75: mol_type = other DNA
gaaggcgctaaccatatggacttgtatgacggtgaagcctacgtcgcggaagccgtttccgtattagccccgttc

SEQ ID NO: 339532 - DNA, 75 bp, synthetic construct
  source 1..75: mol_type = other DNA
atgtcactccgccactgaatatttatggtgtcccgttgccgtttaccatgatttacctgctgctgtttccgtatc

SEQ ID NO: 339533 - DNA, 75 bp, synthetic construct
  source 1..75: mol_type = other DNA
cgctgtcgaaacgttaaatgctggcgaacgaccggtgatacacagtgacagaggtgggcatgatcgctggccagg

SEQ ID NO: 339534 - DNA, 75 bp, synthetic construct
  source 1..75: mol_type = other DNA
cacgcaacaccggatggccacgctgtaaaacaaatcggcgagcatgcctggctgattgagaaagctggaatcgtg

SEQ ID NO: 339535 - DNA, 75 bp, synthetic construct
  source 1..75: mol_type = other DNA
agttcgggcaggatttcacattgtacgaagcgctacgcacggttgatcgtctgcttcgcggacaaagttttatta

SEQ ID NO: 339536 - DNA, 75 bp, synthetic construct
  source 1..75: mol_type = other DNA
aaaaggcacgccaggttaatggcgatgaaccctatatcgaaattatttgtatggattcagaagctgaaatacaga

SEQ ID NO: 339537 - DNA, 75 bp, synthetic construct
  source 1..75: mol_type = other DNA
ctacccagtaaaacaaatcggcgagcatgcctggctgattgagaaagctggaatcgtggttcacaaatgcccacg

SEQ ID NO: 339538 - DNA, 75 bp, synthetic construct
  source 1..75: mol_type = other DNA
tttgcactaagcagcggcgacaatcagttcgggcaggatttcacattatacgaagcactacgcacggttgatcgt

SEQ ID NO: 339539 - DNA, 75 bp, synthetic construct
  source 1..75: mol_type = other DNA
agttcgggcaggatttcacattatacgaagcactacgcacggttgatcgtctgcttcgcggacaaagttttatta

SEQ ID NO: 339540 - DNA, 75 bp, synthetic construct
  source 1..75: mol_type = other DNA
agggattggtcgtgctgttgctattgcctatgctcgtgaaggcgctgatgttgcgattaactatttacctgaaga

SEQ ID NO: 339541 - DNA, 75 bp, synthetic construct
  source 1..75: mol_type = other DNA
atgtcatgcagcgtgtggccgggaaaaatcgttaccccattgatgtggtgaaaattccgatggcggtgccgctga

SEQ ID NO: 339542 - DNA, 75 bp, synthetic construct
  source 1..75: mol_type = other DNA
acgccatgctaaccgtttcgctatcagtgcatcacgtagcaactctcgctacagcctgagcgaaacacacgcaac

SEQ ID NO: 339543 - DNA, 75 bp, synthetic construct
  source 1..75: mol_type = other DNA
gcgacaatcacttcgggcaggatttcacattatacgaagcacttcgcacggttgatcgtctgcttcgcgggcaaa

SEQ ID NO: 339544 - DNA, 75 bp, synthetic construct
  source 1..75: mol_type = other DNA
acgccacgctaaccgtttcgctaccagtgcatcacgtagcaactctcgctacagcctgagcgaaacacacgcaac

SEQ ID NO: 339545 - DNA, 75 bp, synthetic construct
  source 1..75: mol_type = other DNA
ctggagcagctacggttgatgaacgcggggatcaacatccgcacatttgaggttgccgcaaccggtccgggcgtc

SEQ ID NO: 339546 - DNA, 75 bp, synthetic construct
  source 1..75: mol_type = other DNA
gcggttatatcgctggtatcaacaacaagatgctcgtgccctcgcccctgccagccgcgactgggcgctcatctg

SEQ ID NO: 339547 - DNA, 75 bp, synthetic construct
  source 1..75: mol_type = other DNA
acaacaggatgctcgcgccctcgcccctgccagccgcgactgggcactcatctggtgggacagcgtgccacagga

SEQ ID NO: 339548 - DNA, 75 bp, synthetic construct
  source 1..75: mol_type = other DNA
atcggcgagcatacctggctgattgagaaagctggaattgtggtccacaaatgcccacgcaatccgtttaccgga

SEQ ID NO: 339549 - DNA, 75 bp, synthetic construct
  source 1..75: mol_type = other DNA
ggggcgacgacgaccgctttgtgaagacgtactggtcgctgttttcccgtccggtgtacgccacttttgactggg

SEQ ID NO: 339550 - DNA, 75 bp, synthetic construct
  source 1..75: mol_type = other DNA
aaacgctgttacaaggaatgcgtgatgatcccgcgttgccagtggcaacgctatgccacgcgatttctgccgaag

SEQ ID NO: 339551 - DNA, 75 bp, synthetic construct
  source 1..75: mol_type = other DNA
aatgatttccatcgggagcacggtattaaccgtgcccgtgaagcctttcgcaacggtctggtgctgtgcggggag

SEQ ID NO: 339552 - DNA, 75 bp, synthetic construct
  source 1..75: mol_type = other DNA
gcacgctggcctgaggtaaaaattatcatcgccggtgataacgattttcaggacgggggcgagaatcccggcaga

SEQ ID NO: 339553 - DNA, 75 bp, synthetic construct
  source 1..75: mol_type = other DNA
ctgaccgaacatgcggcaaaagccggtgagcgtacctttgccgggatggaagtcaggatgatccagatccccagc

SEQ ID NO: 339554 - DNA, 75 bp, synthetic construct
  source 1..75: mol_type = other DNA
tttatggcgttgattacagtcaggggatgctgaacgttgccgcccgtcgcgccgccgcgctgaaggcagacaatg

SEQ ID NO: 339555 - DNA, 75 bp, synthetic construct
  source 1..75: mol_type = other DNA
acaacaagatgctcgtaccctcgcccctgccagccgcgactgggcgctcatctggtgggatagcgtgccgccgga

SEQ ID NO: 339556 - DNA, 75 bp, synthetic construct
  source 1..75: mol_type = other DNA
aaagcggggcgtgggacgtggttttgtaatcagtgcggtcatggcgatggtcttgatctggttcgtctggtgaca

SEQ ID NO: 339557 - DNA, 75 bp, synthetic construct
  source 1..75: mol_type = other DNA
agatatgctgccgattgcgtgtcagatgtttgccgagggtaaaacggtggcggtggaacatgccgaaccggttta

SEQ ID NO: 339558 - DNA, 75 bp, synthetic construct
  source 1..75: mol_type = other DNA
tgcagagggcaaaagcccggtacatctggcggcccctgccgccgtcagcgaaagcctgcgcaatatccgccatca

SEQ ID NO: 339559 - DNA, 75 bp, synthetic construct
  source 1..75: mol_type = other DNA
cactggccggtacaggacagggccggttccgttgccggtcgtgcctgccaggtggtggtgcatgacggcgcattt

SEQ ID NO: 339560 - DNA, 75 bp, synthetic construct
  source 1..75: mol_type = other DNA
gaggaggccggacgaacgttacaggccgcaataaaaggtctgctcgatttgcagcagcagcgtaacagcctctca

SEQ ID NO: 339561 - DNA, 75 bp, synthetic construct
  source 1..75: mol_type = other DNA
tcagatgccgctaatgagcaagcttcaaaggtgcttaataatgctggtacaggtaatgttttgaagaggctgtct

SEQ ID NO: 339562 - DNA, 75 bp, synthetic construct
  source 1..75: mol_type = other DNA
ggacaaactgatatttcagcagctactggcaagaccgctaccactaatgatggtggcgcaacttctaagaagaat

SEQ ID NO: 339563 - DNA, 75 bp, synthetic construct
  source 1..75: mol_type = other DNA
cctggatgccgggctggtacgtctgcgacagggggacgagatcgtgctgggggcactggcgctgaaggtgtttat

SEQ ID NO: 339564 - DNA, 75 bp, synthetic construct
  source 1..75: mol_type = other DNA
gctcccacctctttttatcggcatttccgcgacgtagacgaactgggtctgaccatggttgatgagagcggttta

SEQ ID NO: 339565 - DNA, 75 bp, synthetic construct
  source 1..75: mol_type = other DNA
gcaagcctggccggatctcggcaaagagagcgggctggttttgcgcgatggtgaagtgttactgcccgccgcaga

SEQ ID NO: 339566 - DNA, 75 bp, synthetic construct
  source 1..75: mol_type = other DNA
atgcgcgcctttttattgaaaaaagcacgaagacccatgcgaattctggctatcgataccgcgacagaggcctgc

SEQ ID NO: 339567 - DNA, 75 bp, synthetic construct
  source 1..75: mol_type = other DNA
tttatgagggaaacaaatcttctgcaatagaaaaatatgaaagcaattatttaaatggtgatggttttgaaacta

SEQ ID NO: 339568 - DNA, 75 bp, synthetic construct
  source 1..75: mol_type = other DNA
aggattatgtctatttctcaacacatgaaggcctgaatgctgaaataaaagatttcagctctctcaaggatgcta

SEQ ID NO: 339569 - DNA, 75 bp, synthetic construct
  source 1..75: mol_type = other DNA
agcatattaatcttgcctggaaagatgcgaaatcctttctgcttgaagtttattcacagcagttagaaaacacgc

SEQ ID NO: 339570 - DNA, 75 bp, synthetic construct
  source 1..75: mol_type = other DNA
gcgaggcaggcaatatcgcctacatgctggcaaacggtcagggcaagggccgtgccggtacggacggtgagctgc

SEQ ID NO: 339571 - DNA, 75 bp, synthetic construct
  source 1..75: mol_type = other DNA
gcactgtattaggtgttgcaattggtgctataggtctatatttaccatatagaggtgaaataaatgaagcacttt

SEQ ID NO: 339572 - DNA, 75 bp, synthetic construct
  source 1..75: mol_type = other DNA
aagggaagttggacaaatttgattatgggttactaaatagattttacaatgcgtattacaaaataagttatacac

SEQ ID NO: 339573 - DNA, 75 bp, synthetic construct
  source 1..75: mol_type = other DNA
caatgaagagttttcattcagaatagatcaggcaataaatgagttagtaagcccttatatttcctcatttttaaa

SEQ ID NO: 339574 - DNA, 75 bp, synthetic construct
  source 1..75: mol_type = other DNA
atgagtggacgaatcacaaccttattcactgcatttggggtggttatcgcagcactgggactttacctacaatat

SEQ ID NO: 339575 - DNA, 75 bp, synthetic construct
  source 1..75: mol_type = other DNA
aattaatagatgaagatcgtaagcataaaacgataacttttgatgtggttaacgatcttacaggaaccttacctg

SEQ ID NO: 339576 - DNA, 75 bp, synthetic construct
  source 1..75: mol_type = other DNA
acaattatttgttgataaagatggttctattgatggtgaatttatctcagaaggattatgtgatgcaatgccttt

SEQ ID NO: 339577 - DNA, 75 bp, synthetic construct
  source 1..75: mol_type = other DNA
ccggggcgttgtgcctgttctggtcgtggctggtggcgcgatatctcgaccgtacacagccgtctgtcggcggag

SEQ ID NO: 339578 - DNA, 75 bp, synthetic construct
  source 1..75: mol_type = other DNA
atgatcatgctgattctcgcgcctctggtaggcgtgctgggggcgcttttgctggcgtatggtgcctggctgatt

SEQ ID NO: 339579 - DNA, 75 bp, synthetic construct
  source 1..75: mol_type = other DNA
atgccgcacaaatcagaggaagatatccgcgaagatgaacggaaacgccagcaggaaataatggataaagcacaa

SEQ ID NO: 339580 - DNA, 75 bp, synthetic construct
  source 1..75: mol_type = other DNA
caggtagcgaaggaaaaatggggcgagaagtgggaaaccatttacggccagctggagaaaaagctcaacctctgc

SEQ ID NO: 339581 - DNA, 75 bp, synthetic construct
  source 1..75: mol_type = other DNA
gcgccaatcaacgccagggctgggccaatcttgagatcagactcattcccgagactgacttcaggcgacatatat

SEQ ID NO: 339582 - DNA, 75 bp, synthetic construct
  source 1..75: mol_type = other DNA
atggataaggatacttctttaaaccgcgctttatggattctcagcgagcgcatgaatgaactcaaagccgcttaa

SEQ ID NO: 339583 - DNA, 75 bp, synthetic construct
  source 1..75: mol_type = other DNA
tgctcaggccaaagcgacgccgctggataaatgagacgtacacccgctgggttaaaacacaaccctgtgagtgtt

SEQ ID NO: 339584 - DNA, 75 bp, synthetic construct
  source 1..75: mol_type = other DNA
gcgctggcggacaaactcacgacgatttatggcgttgattacagtcaggggatgctgaacgttgccgcccgtcgc

SEQ ID NO: 339585 - DNA, 75 bp, synthetic construct
  source 1..75: mol_type = other DNA
tatgaagatgccgataaagaactggagatggtagaaatgttgtacgaaatgagagaaaaagcggggttaacaaag

SEQ ID NO: 339586 - DNA, 75 bp, synthetic construct
  source 1..75: mol_type = other DNA
atgcgtatttttctcttacttctgatgctatgcggttttcaggtattcgctgaacaattgccttcagtaactgac

SEQ ID NO: 339587 - DNA, 75 bp, synthetic construct
  source 1..75: mol_type = other DNA
tcagtctggcgtttgctgcccccctgttacggttggttggtatggacggcggcggctatcacctcaagggggaat

SEQ ID NO: 339588 - DNA, 75 bp, synthetic construct
  source 1..75: mol_type = other DNA
gctgctgcaacgcgtgggcagcgcagcgcaaaaagcccattatttgccaaagctggcaacgggggaattgatcgg

SEQ ID NO: 339589 - DNA, 75 bp, synthetic construct
  source 1..75: mol_type = other DNA
atgcgtatttttatcctgattctggcgctattcggttttcctgtattcgctgaacaagtgccatatgtaacggac

SEQ ID NO: 339590 - DNA, 75 bp, synthetic construct
  source 1..75: mol_type = other DNA
gcccgtcagccatcagccggctggaaagtaatcctttaggagccagtatgaaaactttaacaagatatgctcagg

SEQ ID NO: 339591 - DNA, 75 bp, synthetic construct
  source 1..75: mol_type = other DNA
ggtagggatcgaactgatatttagcgctgccagcctgttcagctttgctagtttgttcgtaaaaaataataacta

SEQ ID NO: 339592 - DNA, 75 bp, synthetic construct
  source 1..75: mol_type = other DNA
acggtcgtcggcgcattattgatctgctcgggaattgcgctgattgttggtttattcaacaaccgtagccataat

SEQ ID NO: 339593 - DNA, 75 bp, synthetic construct
  source 1..75: mol_type = other DNA
caatactccagaagctgtcaaagggtatgaagatgccgataaggaactggagatggtagaaatgttgtacgaaat

SEQ ID NO: 339594 - DNA, 75 bp, synthetic construct
  source 1..75: mol_type = other DNA
acgaagtaaaagaaaaactcctcaacactccagaagccgtcaaaggatatgaagaggccgacaaagagctggaga

SEQ ID NO: 339595 - DNA, 75 bp, synthetic construct
  source 1..75: mol_type = other DNA
aagcaatcctttaggggcaagcatgaaaactttatcaaaatatgcccaagcatgcggtgcaacgattaatattaa

SEQ ID NO: 339596 - DNA, 75 bp, synthetic construct
  source 1..75: mol_type = other DNA
aattctttagaatgattacaagaaactggttaaacaaaccagaaaatcagaaatctctccagtatttttacaatg

SEQ ID NO: 339597 - DNA, 75 bp, synthetic construct
  source 1..75: mol_type = other DNA
gttcatgaacggcgttgagacggcaaacgagtgccgattaatcacgcgcgggaggctggcgtttatcaatgctgc

SEQ ID NO: 339598 - DNA, 75 bp, synthetic construct
  source 1..75: mol_type = other DNA
ggcaaacgcattaatcccgcgatatataaccgaagaaatggacacgctccattatccgtggggagcggtggcaat

SEQ ID NO: 339599 - DNA, 75 bp, synthetic construct
  source 1..75: mol_type = other DNA
ggtaaccagttggcgaagtggaacggttggaattacttccagcgaaaggaaccttgcgataacgggagcgaataa

SEQ ID NO: 339600 - DNA, 75 bp, synthetic construct
  source 1..75: mol_type = other DNA
cagagccagagccagagcaagaagaaaaacagcgtaaaaagcctagtcgaaaacctaaggcggcagcagatgaat

SEQ ID NO: 339601 - DNA, 75 bp, synthetic construct
  source 1..75: mol_type = other DNA
agccagagccagagccagagccagagccagaagaaaaacagcgtaaaaagcctggtcgaaaacctaaggcggcag

SEQ ID NO: 339602 - DNA, 75 bp, synthetic construct
  source 1..75: mol_type = other DNA
gaggatgggcagtatcaatatgatgagtatttcatcggtgctctcgttttggtcgggcaggaaactagctctgag

SEQ ID NO: 339603 - DNA, 75 bp, synthetic construct
  source 1..75: mol_type = other DNA
aatgtatgatgcgaaagttgctttaaataatacacgtaaaaatatgcaaaacgagcttaaactacccaatttgcc

SEQ ID NO: 339604 - DNA, 75 bp, synthetic construct
  source 1..75: mol_type = other DNA
tctcgattaaaagatattattgatataagtcgaagtgaagaatataattggcttttagatgtctataatggaaaa

SEQ ID NO: 339605 - DNA, 75 bp, synthetic construct
  source 1..75: mol_type = other DNA
taactggtttatgaacggcctggagacggcaagcgaatgtcgcttaatcacgcgcgggcggctggcgtttattaa

SEQ ID NO: 339606 - DNA, 75 bp, synthetic construct
  source 1..75: mol_type = other DNA
actgaatgttgacggtgaaaaagtgacgttctggtcaggctcatcgggaacggcatcaaagggggatgtgctgac

SEQ ID NO: 339607 - DNA, 75 bp, synthetic construct
  source 1..75: mol_type = other DNA
ggcaaatggcgtaagggggaaattaatccggcaacctttattgacgaattgaaacaggatgccgaattgtatgta

SEQ ID NO: 339608 - DNA, 75 bp, synthetic construct
  source 1..75: mol_type = other DNA
cggaaatcgtcttgcaacctggaatgggtggaacttctttcaccgtaagaacccttgcgacaatgggagtgaatg

SEQ ID NO: 339609 - DNA, 75 bp, synthetic construct
  source 1..75: mol_type = other DNA
agagaatgatcgcgcaactaggggaaaccagggcgcgattactactgagcttgaaaaacgaggttttacctcccg

SEQ ID NO: 339610 - DNA, 75 bp, synthetic construct
  source 1..75: mol_type = other DNA
attagcagcggagaatacgccattatgccactggcaccaatgaaggagtccgatgcgccgaacgaagaactgcgt

SEQ ID NO: 339611 - DNA, 75 bp, synthetic construct
  source 1..75: mol_type = other DNA
caacaatctccataccggagagtcaattaaagcggagtttttcgatggcagaggctatattcaggaagaattggc

SEQ ID NO: 339612 - DNA, 75 bp, synthetic construct
  source 1..75: mol_type = other DNA
acctcggtagccgtaaagcacatcaaattgaaaataatccgcgcgttagcctgctgttcccgtggcatacccttg

SEQ ID NO: 339613 - DNA, 75 bp, synthetic construct
  source 1..75: mol_type = other DNA
atgactatggacaaggccatcaagcgccgttcggctgactggtcggttagtaacactggattaaccggatacatt

SEQ ID NO: 339614 - DNA, 75 bp, synthetic construct
  source 1..75: mol_type = other DNA
gccgttcggctgaatggtcagtgagtaataccggattaaccggatatattgaaggctataacgactgtttacagg

SEQ ID NO: 339615 - DNA, 75 bp, synthetic construct
  source 1..75: mol_type = other DNA
aaaaactgaaccacatgctggaggaaatgtttgaagaatccgatatgtggttggtttctgagttcccgactgttc

SEQ ID NO: 339616 - DNA, 75 bp, synthetic construct
  source 1..75: mol_type = other DNA
agcgatgccagtaaaagcgatcgggaaaagctgaaccgcatgctggaggagatgtttgaagagtcggatcattgg

SEQ ID NO: 339617 - DNA, 75 bp, synthetic construct
  source 1..75: mol_type = other DNA
agtgatgccagcaaaagcgatcgggaaaagttgaaccgcatgctggaggagatgtttgaagaatccgacatgtgg

SEQ ID NO: 339618 - DNA, 75 bp, synthetic construct
  source 1..75: mol_type = other DNA
ttaattccttattattatcaaatcaccgaggacttagttcaaagttgtcccaagtgtaaaaaaaacgcacttaat

SEQ ID NO: 339619 - DNA, 75 bp, synthetic construct
  source 1..75: mol_type = other DNA
tcgcccaggggatcaccataataaaatgctgaggcctggcctttgcgtagtgcacgcatcacctcaatacctttg

SEQ ID NO: 339620 - DNA, 75 bp, synthetic construct
  source 1..75: mol_type = other DNA
atgctgcctatcttgtcgatcgctacagtgaacgaaaagagtctgcagaagaactttcccgacgggttaatcaga

SEQ ID NO: 339621 - DNA, 75 bp, synthetic construct
  source 1..75: mol_type = other DNA
aacgagctcccggcagtcactgccgctggcacaagggcagcagctcacgccatcaacacctgcaggactggctgt

SEQ ID NO: 339622 - DNA, 75 bp, synthetic construct
  source 1..75: mol_type = other DNA
actggcaacactacaacgagccttggaagccctatgctgacctgtaaagagctttttagctattcggcaagtgag

SEQ ID NO: 339623 - DNA, 75 bp, synthetic construct
  source 1..75: mol_type = other DNA
gggcagactgtaacagataatgttcaaagagcacccagaacaattactattagtggtgtggttgtggttggtgaa

SEQ ID NO: 339624 - DNA, 75 bp, synthetic construct
  source 1..75: mol_type = other DNA
gtaaagatggtattaagattgacgactcaattattacaaactttaaagcctctaaagatgttggtatttcaaacg

SEQ ID NO: 339625 - DNA, 75 bp, synthetic construct
  source 1..75: mol_type = other DNA
caactggaagtgctggcactctcctgcggtacgcttaccgacgaaggtgcagagcatcttctcaaacatgccgat

SEQ ID NO: 339626 - DNA, 75 bp, synthetic construct
  source 1..75: mol_type = other DNA
gtttatcggcgatatggaaagcgaagagtgtgaaatttcgtggataaaacaaggcgattattctcgtctgtatgc

SEQ ID NO: 339627 - DNA, 75 bp, synthetic construct
  source 1..75: mol_type = other DNA
gcggtggaaggtacaggccatcactaccgtttgctggtgcatgtaaggcaaagcagtatcgaaatgaaaaaagag

SEQ ID NO: 339628 - DNA, 75 bp, synthetic construct
  source 1..75: mol_type = other DNA
atttaggtgcgggcgaatatgttatggggctggaggtcagtaatagttttcctgacgggcgtgataaagaacgag

SEQ ID NO: 339629 - DNA, 75 bp, synthetic construct
  source 1..75: mol_type = other DNA
ttgatgtccgtactggtgcgggactggcatttacggtggtaaaagatcgcgcgctggatattgcatgggccagct

SEQ ID NO: 339630 - DNA, 75 bp, synthetic construct
  source 1..75: mol_type = other DNA
taggcgagctctcgcaggttgccgggattaaacactatgaattacgtagtggcagagcaaagggcacggaagcgt

SEQ ID NO: 339631 - DNA, 75 bp, synthetic construct
  source 1..75: mol_type = other DNA
agttgagaatggaaaaagcaccttctcagatgccgctaatgagcaagcttcaaaggtgcttaataatgctggtac

SEQ ID NO: 339632 - DNA, 75 bp, synthetic construct
  source 1..75: mol_type = other DNA
ttccattattacgagctttaaagcctctaaagatgttactatctctaacggtcttcgtatccagctaacttttca

SEQ ID NO: 339633 - DNA, 75 bp, synthetic construct
  source 1..75: mol_type = other DNA
tggtatttctaatggtctgagagtccagctaacttttcaggaaattaacttcaaagctgttgtggggcagactga

SEQ ID NO: 339634 - DNA, 75 bp, synthetic construct
  source 1..75: mol_type = other DNA
tctcctgcggtacgcttaccgacgaaggtgcagagcatcttctcaaacatgccgatcgccttagccatctaaagt

SEQ ID NO: 339635 - DNA, 75 bp, synthetic construct
  source 1..75: mol_type = other DNA
cgagtcgttatgcatcggctgtaccgcctgtatggatgcttgtcgggaagtgaacaaggtgccggaaggcgtctc

SEQ ID NO: 339636 - DNA, 75 bp, synthetic construct
  source 1..75: mol_type = other DNA
gcttgatgaagggagcgggcctgtagaacaaccgatcccctatggttcgatgcctcgtttagcgctcgcatgggt

SEQ ID NO: 339637 - DNA, 75 bp, synthetic construct
  source 1..75: mol_type = other DNA
tccacaggcgaaggtagaaaaagttaccgggggaatattactttacccttcccagcctcccatcccattcaagga

SEQ ID NO: 339638 - DNA, 75 bp, synthetic construct
  source 1..75: mol_type = other DNA
aacgtgcgccgggcagccactgccgctggcacagggggaaccgctcccgccatcagcatctgcaggactggctta

SEQ ID NO: 339639 - DNA, 75 bp, synthetic construct
  source 1..75: mol_type = other DNA
aataaccgctttctgtttcatctggaacgggctcccggccacgccagtcgctggtacaaagggcgaacatccatc

SEQ ID NO: 339640 - DNA, 75 bp, synthetic construct
  source 1..75: mol_type = other DNA
ccgggaacactcaccctgtccgaaggctattataacggcctgatagacagcgccgttccgctcgacaacagagcg

SEQ ID NO: 339641 - DNA, 75 bp, synthetic construct
  source 1..75: mol_type = other DNA
gacctctcaccgcccttcaccgctggcaaagggaaacccgtcgcacagcaatcttgtccagatcgaaaaggttta

SEQ ID NO: 339642 - DNA, 75 bp, synthetic construct
  source 1..75: mol_type = other DNA
cactacaaagcgcgtacccactccagctacggcaatattgatgtgttacagcaggcctgcccacaagaggtgtgg

SEQ ID NO: 339643 - DNA, 75 bp, synthetic construct
  source 1..75: mol_type = other DNA
ggaataatgagatcccgcaagaagaatttattaataatattttagctgatgaagacttggtaaaaattcgctctt

SEQ ID NO: 339644 - DNA, 75 bp, synthetic construct
  source 1..75: mol_type = other DNA
ggcttgctggtactctctgaaggttattataaagggctgctggaaagcgctgtgccactggataaccgcgcgctt

SEQ ID NO: 339645 - DNA, 75 bp, synthetic construct
  source 1..75: mol_type = other DNA
cctgcgtccactggaagacaacccgttgcgccttgatatggactatgccaccgcgctgaacgtcatgttcgccga

SEQ ID NO: 339646 - DNA, 75 bp, synthetic construct
  source 1..75: mol_type = other DNA
gatctttaagaaaaaatgcccggaagaacactacgtcgctttccgcgcattccgtgaagatccacaggcaaaccc

SEQ ID NO: 339647 - DNA, 75 bp, synthetic construct
  source 1..75: mol_type = other DNA
ggatacaacttcgcttactggagttacgtcgattagcgccccgatcaccgcaacgcctggtggcactattgtgaa

SEQ ID NO: 339648 - DNA, 75 bp, synthetic construct
  source 1..75: mol_type = other DNA
cataaccgtttataattataatggtgaaacgcgggaatatatttccacatcaacagaatatcttgccattggtgt

SEQ ID NO: 339649 - DNA, 75 bp, synthetic construct
  source 1..75: mol_type = other DNA
ttttaactcatgggaatatgtgccagaccatcgcggtgaaatcgtctatagcaccgaaacaggagaatcaaaaga

SEQ ID NO: 339650 - DNA, 75 bp, synthetic construct
  source 1..75: mol_type = other DNA
gtgcggtatctggtgatgtaaaaactagtgccggtcgtcgtgatgctatcagcagcattaactctgtaacacgac

SEQ ID NO: 339651 - DNA, 75 bp, synthetic construct
  source 1..75: mol_type = other DNA
taaatgaacaggccgacatgatcactttgaatgagatttctgataccgaaaaagcattctgctggtttgaaactt

SEQ ID NO: 339652 - DNA, 75 bp, synthetic construct
  source 1..75: mol_type = other DNA
atgagcaaggaagatctggagaccaggacaaatgaacttggccagttctttactatcagaacgtcgaattcgtct

SEQ ID NO: 339653 - DNA, 75 bp, synthetic construct
  source 1..75: mol_type = other DNA
tgcgtggatgcgccaatcagcaaaaaggacggctttgctgtctgccggacggctgatttgacctgttgggaatac

SEQ ID NO: 339654 - DNA, 75 bp, synthetic construct
  source 1..75: mol_type = other DNA
atgccgtacagaaaggaactgcccacgatgtgctggagccgaaagctgaccgggaggtcatgaatgcagagcggc

SEQ ID NO: 339655 - DNA, 75 bp, synthetic construct
  source 1..75: mol_type = other DNA
ggaggtgaccatgacggcgctgtcaccggtctggctggacagccggagccgttatctgcgggatatgtaccgccc

SEQ ID NO: 339656 - DNA, 75 bp, synthetic construct
  source 1..75: mol_type = other DNA
tttaaactcatgggaatatgtgtcagaccatcgcggtgaaatcatctatagcaccgaaacaggagaatcgaaaga

SEQ ID NO: 339657 - DNA, 75 bp, synthetic construct
  source 1..75: mol_type = other DNA
ctaaacgctgtgctggattacattgatgcggtgacggcaacagataccagaaccgcgccggatgtcatctggcct

SEQ ID NO: 339658 - DNA, 75 bp, synthetic construct
  source 1..75: mol_type = other DNA
aatcacagctccgggtgattaccctgaaaatacaaccactatcgtcccgttaacgccatacgataaatgggatgg

SEQ ID NO: 339659 - DNA, 75 bp, synthetic construct
  source 1..75: mol_type = other DNA
gcaggcgcgcctgcagtccagcccggcgatgggtagtgccgttgatacaatgacgggccttggcgcgtcgttcgg

SEQ ID NO: 339660 - DNA, 75 bp, synthetic construct
  source 1..75: mol_type = other DNA
aaagaaaagacaccgttttccacgtccctcccactggacccgtgagtatactcacgagtgcgtggaaaaaataaa

SEQ ID NO: 339661 - DNA, 75 bp, synthetic construct
  source 1..75: mol_type = other DNA
atgagcgaacaacaggagatgatgacacctgttccggcagataaccccacaacgcgccggcgttcacttctgcgg

SEQ ID NO: 339662 - DNA, 75 bp, synthetic construct
  source 1..75: mol_type = other DNA
cactggaacaacagcagggggagcgtctgacaccggctgcgctggccccgctgcagtcacgactgagtgaactgg

SEQ ID NO: 339663 - DNA, 75 bp, synthetic construct
  source 1..75: mol_type = other DNA
gcccccatcccggatgcgtctcctgcgcctgctgccgtcggaaagaaaaggaaaggaagaccaccacgcaggccc

SEQ ID NO: 339664 - DNA, 75 bp, synthetic construct
  source 1..75: mol_type = other DNA
attcattgtctgccatgtgttccgattaatgaggtggcaaaagagaaattgccgcattacgtcatgagtgcaact

SEQ ID NO: 339665 - DNA, 75 bp, synthetic construct
  source 1..75: mol_type = other DNA
attcactgtctgccatgtgtaccgattaatgaggtagcaaaagagaaactgccgcattacgtcatgagtgcaacc

SEQ ID NO: 339666 - DNA, 75 bp, synthetic construct
  source 1..75: mol_type = other DNA
tttacgccgcctgaattgtggctactgactgacctgaccgaagactcaaccctcgttgatggttttttggcgcag

SEQ ID NO: 339667 - DNA, 75 bp, synthetic construct
  source 1..75: mol_type = other DNA
gcatgcacgtttgcagaccaatccagcaatgacgagtgttgtcgataccatgagcggtattggcgcgtcattcgg

SEQ ID NO: 339668 - DNA, 75 bp, synthetic construct
  source 1..75: mol_type = other DNA
gctggttgacggttttctggctcaaatccattgcctgccgtgcgtgccattgaatgaagtggcaaaagagaagct

SEQ ID NO: 339669 - DNA, 75 bp, synthetic construct
  source 1..75: mol_type = other DNA
gccgtttgtgctgaccggcaccgagcgccggggggcgctgtcatatgcggcggtggcaccccggggatataccag

SEQ ID NO: 339670 - DNA, 75 bp, synthetic construct
  source 1..75: mol_type = other DNA
gcagagatcgggcgtgttgctgcaggtgcagtatctggcgatgtaaaaaccagtgcaggtcgtcgtgatgctatc

SEQ ID NO: 339671 - DNA, 75 bp, synthetic construct
  source 1..75: mol_type = other DNA
ttaatgaggtggcaaaagagaaactgccgcattacatcatgagtgcaacagcagagatcgggcgtgtagctgcag

SEQ ID NO: 339672 - DNA, 75 bp, synthetic construct
  source 1..75: mol_type = other DNA
cgggaggtcatgaatgcagagcggctgttcagtacggcgcgggaactgcgggacgtggcggcaggccgtgccgtt

SEQ ID NO: 339673 - DNA, 75 bp, synthetic construct
  source 1..75: mol_type = other DNA
gaaaatacaaccactatcgccccgttaacgccatacgataaatgggatggtgaaaaatgggtgacagatactgag

SEQ ID NO: 339674 - DNA, 75 bp, synthetic construct
  source 1..75: mol_type = other DNA
tgaaaaatgggtgacagatacagaagcacagcatagcgccgcagtagaagcggcagaagcacagcgccagtcgct

SEQ ID NO: 339675 - DNA, 75 bp, synthetic construct
  source 1..75: mol_type = other DNA
tatgtcacgctttcaccgttaacgccatatgataaatgggatggtgagaaatgggtgacagatactgaggcacaa

SEQ ID NO: 339676 - DNA, 75 bp, synthetic construct
  source 1..75: mol_type = other DNA
ccgggcggaagctgacgcagccagaaaacacccgacttaacgctgtgctggattatattgacgcggtgacggcaa

SEQ ID NO: 339677 - DNA, 75 bp, synthetic construct
  source 1..75: mol_type = other DNA
actgaggcacagcatagcgccgcagtagacgcagcagaagcacagcgccagtcgctgatggatactgcaatggct

SEQ ID NO: 339678 - DNA, 75 bp, synthetic construct
  source 1..75: mol_type = other DNA
gtgccagaccatcgcggtgaaacggtctatagcaccaaaacaggagaatcaaaagaaatcaccgctccgggggat

SEQ ID NO: 339679 - DNA, 75 bp, synthetic construct
  source 1..75: mol_type = other DNA
gatgcaccgggtgagcacaaggacggttttgcaatctgccgcaatgcagattcaaccgggtgggaatatgttgca

SEQ ID NO: 339680 - DNA, 75 bp, synthetic construct
  source 1..75: mol_type = other DNA
gatgctcctggcccatacaaaactggttatgcaatttgccgttctgaagattttaactcatggatatatgtgcca

SEQ ID NO: 339681 - DNA, 75 bp, synthetic construct
  source 1..75: mol_type = other DNA
agtctgattcagctgaaattgcaggccggacgtaaactgacgcaggcagaaacaacccggcttaacgctgtgctg

SEQ ID NO: 339682 - DNA, 75 bp, synthetic construct
  source 1..75: mol_type = other DNA
tagatgcagcagaagcacagcgccagtcactgattgatactgcaatggcttcaatcagtctgattcagctgaaat

SEQ ID NO: 339683 - DNA, 75 bp, synthetic construct
  source 1..75: mol_type = other DNA
gaaacacgggaatatattttcacatcaactgaatatcttgctgtgggtgtcggcattccggcatgctcctgttta

SEQ ID NO: 339684 - DNA, 75 bp, synthetic construct
  source 1..75: mol_type = other DNA
acatctgagtatacgggctggtctgatgaatatattaatactggcgtaagtatgcccgcctgttccactggtatt

SEQ ID NO: 339685 - DNA, 75 bp, synthetic construct
  source 1..75: mol_type = other DNA
acagcgcgccgccacccgtatgatactggaaacgtccgaccgtttcacggtggtgcagggctatgccggtgtggg

SEQ ID NO: 339686 - DNA, 75 bp, synthetic construct
  source 1..75: mol_type = other DNA
ggtgtacaccgataaccgtcagggctggacggatgccatcaacaatgccgtacagaaaggaactgcccacgatgt

SEQ ID NO: 339687 - DNA, 75 bp, synthetic construct
  source 1..75: mol_type = other DNA
tgtcgcgtatgaagcagcatgtgcaggtgtacaccgataaccgtcagggctggacggatgccatcaacaatgccg

SEQ ID NO: 339688 - DNA, 75 bp, synthetic construct
  source 1..75: mol_type = other DNA
gggggccggtgaccggatgcgtttcacgaagagtgaccgggagcgtggttatgtggccaacagcgtctggacggt

SEQ ID NO: 339689 - DNA, 75 bp, synthetic construct
  source 1..75: mol_type = other DNA
cgtcacactgtacaccccggacaccatccgggtgggaaccggtgaccggatgcgcttcacgaagagtgaccggga

SEQ ID NO: 339690 - DNA, 75 bp, synthetic construct
  source 1..75: mol_type = other DNA
gcagaggtgctggcacagcggcaggctgaagaggccatccgccgtgaaacggaacgtcgcgcagatgaaattgtc

SEQ ID NO: 339691 - DNA, 75 bp, synthetic construct
  source 1..75: mol_type = other DNA
ttttgcggccagcgtgaaagccggagaagagagcgtggcacaggtcagcggggtacgggaacaggccatactgac

SEQ ID NO: 339692 - DNA, 75 bp, synthetic construct
  source 1..75: mol_type = other DNA
tgctgaccgtcgctcacagatgaacctgaagcaggatgaacggctgtccggtgaactgataaccgggcgtcgtca

SEQ ID NO: 339693 - DNA, 75 bp, synthetic construct
  source 1..75: mol_type = other DNA
ccggcaggggggctgaacagctgggactgcagggcagtgtcgataaggatgtttttacccgtcttctggagggga

SEQ ID NO: 339694 - DNA, 75 bp, synthetic construct
  source 1..75: mol_type = other DNA
cgggaggtcatgaatgcagagcggctgttcagtacggcgcgggagctgcgggacgtggcagcaggccgtgccgtt

SEQ ID NO: 339695 - DNA, 75 bp, synthetic construct
  source 1..75: mol_type = other DNA
atgaggaccggcgcgtgctgaacagcatgattcatgatgcacgggaaaaggccggtgagctgggaaaagagcagg

SEQ ID NO: 339696 - DNA, 75 bp, synthetic construct
  source 1..75: mol_type = other DNA
gtcgtttgctgcagaaggaaccggttttgctgacctgggaggggaaatcaatgcgcagataaaacggggtgattt

SEQ ID NO: 339697 - DNA, 75 bp, synthetic construct
  source 1..75: mol_type = other DNA
gcaggccattcatctggcccttccggtggtggaaagtaaaaacctggccttcagccatgtggacctgctgacaga

SEQ ID NO: 339698 - DNA, 75 bp, synthetic construct
  source 1..75: mol_type = other DNA
ccacgccagccgtatgtggcccggtcatcggcgtcactgccgccatggaagaggcgcgggccaacggcgcggaaa

SEQ ID NO: 339699 - DNA, 75 bp, synthetic construct
  source 1..75: mol_type = other DNA
ttatgttggaaaactatcagaatacgagaaatatgactatatgaatagagctaaagtttttgctctcccttcgtt

SEQ ID NO: 339700 - DNA, 75 bp, synthetic construct
  source 1..75: mol_type = other DNA
aacgcgggcttcccgttcagccggatggcggatctgtcgcaaaccatcaccgtgatgccgaaaacgcctaacgaa

SEQ ID NO: 339701 - DNA, 75 bp, synthetic construct
  source 1..75: mol_type = other DNA
tatgaaaacaacagctctgcgtctttatggtaaacgtgatttacgcctggaaacctttgaccttcctgaaatgca

SEQ ID NO: 339702 - DNA, 75 bp, synthetic construct
  source 1..75: mol_type = other DNA
cacaaacgcctggcgctgatggctccaccatcaccatgaccgtgcaaaacatcctcgaccagctctgtcccggcc

SEQ ID NO: 339703 - DNA, 75 bp, synthetic construct
  source 1..75: mol_type = other DNA
attaacccggtatggctgattttcgccctgtttggcttagggattatcggtaatgcgctgggcttcctgtcctga

SEQ ID NO: 339704 - DNA, 75 bp, synthetic construct
  source 1..75: mol_type = other DNA
atacactgaaaatgagactttcttctcttatcgtcgcgacaagtgcacgggtcgtatggcaagtttcatttggct

SEQ ID NO: 339705 - DNA, 75 bp, synthetic construct
  source 1..75: mol_type = other DNA
atgagtaagttgattgtcccgcagtggccgttgccaaaaggtgttgcggcctgtagctctacccgtattggcggc

SEQ ID NO: 339706 - DNA, 75 bp, synthetic construct
  source 1..75: mol_type = other DNA
atgagtaagctgattgtcccgcagtggccgctgccaaaaggtgttgcggcctgtagctctactcgtatcggcggc

SEQ ID NO: 339707 - DNA, 75 bp, synthetic construct
  source 1..75: mol_type = other DNA
agcaaaagaatagaatcaggaaaatagctaaatggtgtcttgataaattaccaagtgattgtcagattgtcggtg

SEQ ID NO: 339708 - DNA, 75 bp, synthetic construct
  source 1..75: mol_type = other DNA
tgctacagcgaatgagtaaagagctattcaacactgaattaatttttaaatccgggggacataatgagccgcaca

SEQ ID NO: 339709 - DNA, 75 bp, synthetic construct
  source 1..75: mol_type = other DNA
tgttacagcgaatgagtaaggagttattcaacactgagttaatttttaaatccgggggacataatgagccgcaca

SEQ ID NO: 339710 - DNA, 75 bp, synthetic construct
  source 1..75: mol_type = other DNA
tttcgcaaaggggtgaatatcgtcagcgatatgggcggtaatttgctgcaaaaactcaccgaaggcgcgtcgatt

SEQ ID NO: 339711 - DNA, 75 bp, synthetic construct
  source 1..75: mol_type = other DNA
gtgttgcagcgactggcacgagatggctggttgactattcaacatggcaagccaacgaaggtgaataatttctgg

SEQ ID NO: 339712 - DNA, 75 bp, synthetic construct
  source 1..75: mol_type = other DNA
tttgcaacaggtattgaaggcttttcacagaacgcagccacagcgcagcgcgatgcgctattaggtgaactggcg

SEQ ID NO: 339713 - DNA, 75 bp, synthetic construct
  source 1..75: mol_type = other DNA
actggctgcggtctccgccgatatggtggcagattaccatgctcagctcggtagtgccgatatggcgctgtggca

SEQ ID NO: 339714 - DNA, 75 bp, synthetic construct
  source 1..75: mol_type = other DNA
agtgtcttaagtttccatgcaactaaagtgttcagcacttttgaaggcggagctattgtgtgtaatagtaaagaa

SEQ ID NO: 339715 - DNA, 75 bp, synthetic construct
  source 1..75: mol_type = other DNA
atgatattcctgctgaaacgccgtatgcgccgggagaacgaattaagggagggcaagaatgatgccacgcattaa

SEQ ID NO: 339716 - DNA, 75 bp, synthetic construct
  source 1..75: mol_type = other DNA
gttcatcccagtggtttttacgcctggcttcagcagccgcattcacaacgccatcaggcagacctgaggctgaca

SEQ ID NO: 339717 - DNA, 75 bp, synthetic construct
  source 1..75: mol_type = other DNA
agatttgcatacggacttgccttccattcgttgcgtgggttatcgccagatgtggtcttaccttgaaggcgaaat

SEQ ID NO: 339718 - DNA, 75 bp, synthetic construct
  source 1..75: mol_type = other DNA
tgctaacatggttaaacaacgcgcagcggttgattagcgatgtttcagcaaaaccggtttatatcagtagttttt

SEQ ID NO: 339719 - DNA, 75 bp, synthetic construct
  source 1..75: mol_type = other DNA
gctggctgccgatctccagcaagccagattatggagcgccgtgcctggcgtaacgccggatggctggtacatcag

SEQ ID NO: 339720 - DNA, 75 bp, synthetic construct
  source 1..75: mol_type = other DNA
agtcacgacgacaaagcctggcgcgacacgctgttaaaagtggcggccattttatgtgaacgccagccggattca

SEQ ID NO: 339721 - DNA, 75 bp, synthetic construct
  source 1..75: mol_type = other DNA
cgcagaatatggcgcataaaaaacgctttgccagccagatcattaaacgttttgaaacgggtattgaaggctttt

SEQ ID NO: 339722 - DNA, 75 bp, synthetic construct
  source 1..75: mol_type = other DNA
ccatcaccagtacgccccaggcggaaagcgatggacgtaccccactggctgcggtctctgccgatatggtggcgg

SEQ ID NO: 339723 - DNA, 75 bp, synthetic construct
  source 1..75: mol_type = other DNA
atatacggaaaatgagactttcttctcttatcgtcgcgacaagatcacgggtcgtatggcaagtttcatttggct

SEQ ID NO: 339724 - DNA, 75 bp, synthetic construct
  source 1..75: mol_type = other DNA
aaaaacaatcagcagcctgagtggcgcagtggagagtatgatgaaaaaattagaagatgttggtgtactggtagc

SEQ ID NO: 339725 - DNA, 75 bp, synthetic construct
  source 1..75: mol_type = other DNA
ggtaccactgctgctgacctttgcttgtatgtggctgctgcgcaaaaaagttaacccgctgtggatcatcgttgg

SEQ ID NO: 339726 - DNA, 75 bp, synthetic construct
  source 1..75: mol_type = other DNA
cgtcgcctctaccctgagaacaacgaagctcgtaaacaagctattcgccgtcacctggagttctttaacacccag

SEQ ID NO: 339727 - DNA, 75 bp, synthetic construct
  source 1..75: mol_type = other DNA
aaaaacctgactatcgccggcggatttttgttgctggcaatcaccggtccgggcgcatacagcatcgaccgtttg

SEQ ID NO: 339728 - DNA, 75 bp, synthetic construct
  source 1..75: mol_type = other DNA
gtgatcctgcttgagttcggcggcggtctggcaattctgtttggtttcctgacacgcaccactgcgctatttacc

SEQ ID NO: 339729 - DNA, 75 bp, synthetic construct
  source 1..75: mol_type = other DNA
gcgcattttaatgccgattctgtttattaccgcaggctggggaaaaattactggctacgcgggtacccaacaata

SEQ ID NO: 339730 - DNA, 75 bp, synthetic construct
  source 1..75: mol_type = other DNA
atggaaaaaaatcaggaagaaaggaaaatccccgtcattgtaatgaaaaaacgtcgtaccttttcgttaccttcc

SEQ ID NO: 339731 - DNA, 75 bp, synthetic construct
  source 1..75: mol_type = other DNA
tcatctgccgtcgaaacacatatccccgaagcgccagccaggaagaagaaaaagaaaaaacgccgtttcccacgt

SEQ ID NO: 339732 - DNA, 75 bp, synthetic construct
  source 1..75: mol_type = other DNA
aatgctcagcgctggctggccatccgggaccgccggtgggagaaaaaacaggccgctctggccggggcaacaggc

SEQ ID NO: 339733 - DNA, 75 bp, synthetic construct
  source 1..75: mol_type = other DNA
atgctcttcaaaacaggcttacacttgatgctacccgaatgggagccttccctgctgaaagcactggaacaaaaa

SEQ ID NO: 339734 - DNA, 75 bp, synthetic construct
  source 1..75: mol_type = other DNA
accggatctgcaccggatatgttaccgcacacagtttccgctcagcctcctgttgcagccactccaatcccgcag

SEQ ID NO: 339735 - DNA, 75 bp, synthetic construct
  source 1..75: mol_type = other DNA
atgtatggcttgcacacctgctggaaaacctgccggaagataagctgtccgccgcgcttgatgatggcaatgcag

SEQ ID NO: 339736 - DNA, 75 bp, synthetic construct
  source 1..75: mol_type = other DNA
tttatgctgccgctggtgattttgcttgagtttggcggtggtctggcaattctgtttggtttcctgactcgcacc

SEQ ID NO: 339737 - DNA, 75 bp, synthetic construct
  source 1..75: mol_type = other DNA
cattagaaaatgtaattaatcctggctggaaaaactgggagtggattgatataggtaagggggttagcaaacctt

SEQ ID NO: 339738 - DNA, 75 bp, synthetic construct
  source 1..75: mol_type = other DNA
gcactcaaactggctcgactcggaaagccggttaaaatcatgctcggcgggataaccggctgggaagatgaaggc

SEQ ID NO: 339739 - DNA, 75 bp, synthetic construct
  source 1..75: mol_type = other DNA
acattgtaacggtgcagaccgtgcggcactcaaactggctcgactcggaaagccggttaaaatcatgctcggcgg

SEQ ID NO: 339740 - DNA, 75 bp, synthetic construct
  source 1..75: mol_type = other DNA
ggccgcagccaaaagctgttgctgcctgtagctctacccgtatcggcggcgtgagcttgccgccttacgactcgc

SEQ ID NO: 339741 - DNA, 75 bp, synthetic construct
  source 1..75: mol_type = other DNA
cgcgctttcgtgtcagtgaaggctatccctggaaacttcgtgaactggtttttgatccagtcacggatcgtctgt

SEQ ID NO: 339742 - DNA, 75 bp, synthetic construct
  source 1..75: mol_type = other DNA
ggcgaggtggtgggaatgatagccacacagatgtacggtaagccggtgagtgaactgagcgagacagagaaacag

SEQ ID NO: 339743 - DNA, 75 bp, synthetic construct
  source 1..75: mol_type = other DNA
acgttccccgagtgtttctcgcaactcatcctggcaataagacagtgtatccacatctctctgatgactgagcga

SEQ ID NO: 339744 - DNA, 75 bp, synthetic construct
  source 1..75: mol_type = other DNA
gcgataagtttatatactgctctgccgggaaagatggcacgccatcctgtcatgaagtgacgctcagtgatggtg

SEQ ID NO: 339745 - DNA, 75 bp, synthetic construct
  source 1..75: mol_type = other DNA
aaaaagcgcagattatagcaaagacaatgcgaaagggattttatttcataaatcctaactttgtatttaatggcg

SEQ ID NO: 339746 - DNA, 75 bp, synthetic construct
  source 1..75: mol_type = other DNA
ttacagcttttaaacaaggtcaagcactgatgaatcccctaatgatttttatcaaaatcattaagttaaggtgga

SEQ ID NO: 339747 - DNA, 75 bp, synthetic construct
  source 1..75: mol_type = other DNA
cggtagctatggcagtggtgtcttttggtgtaaatgctgctccaactattccacaggggcagggtaaagtaactt

SEQ ID NO: 339748 - DNA, 75 bp, synthetic construct
  source 1..75: mol_type = other DNA
cccgagtgtttctcgcaactcatcctggcaataagacagtgtatccacatctctctgatgactgagcgatggtaa

SEQ ID NO: 339749 - DNA, 75 bp, synthetic construct
  source 1..75: mol_type = other DNA
gacatcctcaaagatttgatctgggcgttcagtgatttcgcccgcgatcgtcgtggtgtgtgcgatccggaagcc

SEQ ID NO: 339750 - DNA, 75 bp, synthetic construct
  source 1..75: mol_type = other DNA
cctgctcccgggtacggcggatcctgcttcgtctgccgtgggaacatgacaacgccttcaacagcagacagacct

SEQ ID NO: 339751 - DNA, 75 bp, synthetic construct
  source 1..75: mol_type = other DNA
cgtcttatcagcggctggttcagtacaaaacggacggtgataaaggctcaaccgacgttgaaggcgatctggcaa

SEQ ID NO: 339752 - DNA, 75 bp, synthetic construct
  source 1..75: mol_type = other DNA
aaggaagcttatgaagttctgaccgactcgcaaaaacgtgcggcatacgatcagtatggtcatgctgcgtttgag

SEQ ID NO: 339753 - DNA, 75 bp, synthetic construct
  source 1..75: mol_type = other DNA
atgaatgctattccttatttcgactatagcatggcacccttctggccgtcttatcagaacaaaatcatcggtgtc

SEQ ID NO: 339754 - DNA, 75 bp, synthetic construct
  source 1..75: mol_type = other DNA
ttatcagaacaaagtcatcggcgtccttgagcgtgcgctgcgtgagcagtccggctcccggatacggcggatcct

SEQ ID NO: 339755 - DNA, 75 bp, synthetic construct
  source 1..75: mol_type = other DNA
accagatcattgccgttctgaagtccgtcgaagccggacgtaccgtcaaagatgtgtgccgtgaagccgctattt

SEQ ID NO: 339756 - DNA, 75 bp, synthetic construct
  source 1..75: mol_type = other DNA
tatgcagtcagccgtgaacattaacagtgcagcaagcggcggaacgcgcagcgttaccgaaacgcctcactatcg

SEQ ID NO: 339757 - DNA, 75 bp, synthetic construct
  source 1..75: mol_type = other DNA
cgtccggggatccagctgataccggcactgacccgcgtaccggcctacattgataccgaagtggactctgacaat

SEQ ID NO: 339758 - DNA, 75 bp, synthetic construct
  source 1..75: mol_type = other DNA
cgttcagtgatttcgcccgcgatcgccgtggagtgtgcgatccggaagcccgttgcctcgccggtaatcccggtt

SEQ ID NO: 339759 - DNA, 75 bp, synthetic construct
  source 1..75: mol_type = other DNA
agctacaaactatttttgagaaaagcatttcgctcgcccaggattatgcgctgaaaggggagttgctcggctttt

SEQ ID NO: 339760 - DNA, 75 bp, synthetic construct
  source 1..75: mol_type = other DNA
ctgggcgatcgcctgaattactgggatgtgaaaatgagtattcagtatgactgtaagcgtcaacggagcaccgta

SEQ ID NO: 339761 - DNA, 75 bp, synthetic construct
  source 1..75: mol_type = other DNA
cccttgatggtcgcgtcaaactgaaagtgcctggcgaaacccagactggtaagctgttccgtatgcgcggtaaag

SEQ ID NO: 339762 - DNA, 75 bp, synthetic construct
  source 1..75: mol_type = other DNA
atagcatggcccccttctggccatcttatcagaacaaagtcatcggcgtccttgagcgtgcgctgcgtgaacagt

SEQ ID NO: 339763 - DNA, 75 bp, synthetic construct
  source 1..75: mol_type = other DNA
agttccggcagcgctgccgctgcggctggagaaccagtattttgcgctggatatgcacagtgacgcggctaaatc

SEQ ID NO: 339764 - DNA, 75 bp, synthetic construct
  source 1..75: mol_type = other DNA
gccatcgtgctgtggggaatggtgttactgctggtgctgtggtcagtgtttatcagtccgtctggcgtgctgaga

SEQ ID NO: 339765 - DNA, 75 bp, synthetic construct
  source 1..75: mol_type = other DNA
ggcggcatcctcgatgtacagcgccagcctacactactgtttaatggttacgctgatcaggtggcatcactatat

SEQ ID NO: 339766 - DNA, 75 bp, synthetic construct
  source 1..75: mol_type = other DNA
tcaaagtgggcacctcgtggcgttttaagaaagaagagatagatatatggatagcgcagcaacataaccaaatat

SEQ ID NO: 339767 - DNA, 75 bp, synthetic construct
  source 1..75: mol_type = other DNA
ttatcagagcaaagtcatcggcgttcttgagcgtgcgctgcgtgaacagtcctgctcgcgggtacggcggatcct

SEQ ID NO: 339768 - DNA, 75 bp, synthetic construct
  source 1..75: mol_type = other DNA
tgattcttgatgcctggagcaacgtactgggcttcatgtcaccgggtgaagcggcacccgtagtaggccagctct

SEQ ID NO: 339769 - DNA, 75 bp, synthetic construct
  source 1..75: mol_type = other DNA
gccatgtgaatatgacactaccttcagcagcagaaagacctggtttggtatggcctttatcgaaactgtcagtgc

SEQ ID NO: 339770 - DNA, 75 bp, synthetic construct
  source 1..75: mol_type = other DNA
atggctaagcaagattattacgagattttaggcgtttccaaaactgcggaagagcgtgaaatcaaaaaggcctat

SEQ ID NO: 339771 - DNA, 75 bp, synthetic construct
  source 1..75: mol_type = other DNA
ctgaggggacattcctgtcctctcagcagtttcagcagcaggcccgctgggaagcgttcagcaatgactgtattg

SEQ ID NO: 339772 - DNA, 75 bp, synthetic construct
  source 1..75: mol_type = other DNA
tcgcctgcgatctgcacgcgctgacgaacgacagcgcggttgttctgctggcgctgccgcttgcccatggtaacg

SEQ ID NO: 339773 - DNA, 75 bp, synthetic construct
  source 1..75: mol_type = other DNA
aacgccttcaacagcagaaagacctggtttggtatggattttatcgaaaccgtcagtgcgctgatgaatgcaaca

SEQ ID NO: 339774 - DNA, 75 bp, synthetic construct
  source 1..75: mol_type = other DNA
gtgccaccgccctccggacgcccgctcacccaggaagaagcagagcgtcaggcgtctgacaggatccaggcagct

SEQ ID NO: 339775 - DNA, 75 bp, synthetic construct
  source 1..75: mol_type = other DNA
gagaattacaaggctgattatgctgctatcgggcagtgtgattgccggcagagatttcgttttattctgtttctt

SEQ ID NO: 339776 - DNA, 75 bp, synthetic construct
  source 1..75: mol_type = other DNA
atggctaggtctgattacgattttatcaatctgtctctgggacatgagctgaatgagtggctggcagagagaggt

SEQ ID NO: 339777 - DNA, 75 bp, synthetic construct
  source 1..75: mol_type = other DNA
tatgccggactggcggataaccggaatcgcctggcagaagttgttacccgcaaattgcaggacagcttttatata

SEQ ID NO: 339778 - DNA, 75 bp, synthetic construct
  source 1..75: mol_type = other DNA
aaacatcgacatttcggagtttaacgaaaaaatgcgcctgaatgactgcgttaatatttcgcgatacatcccgta

SEQ ID NO: 339779 - DNA, 75 bp, synthetic construct
  source 1..75: mol_type = other DNA
gtcataatcaccgtgacaaaaggtttgtaagtgttatagcggaaaaactagcagatgtttatgggcgtgataacg

SEQ ID NO: 339780 - DNA, 75 bp, synthetic construct
  source 1..75: mol_type = other DNA
tgtgtttatcgctttcttcgacgctacggcagagcaaatcaggcgagccattaaggagcgtaaaaatgggaaata

SEQ ID NO: 339781 - DNA, 75 bp, synthetic construct
  source 1..75: mol_type = other DNA
ataccgaaggcgcgctgctcggcaacattattttgcaagtgctggaaagccacggcgtaccgacggtcaataaag

SEQ ID NO: 339782 - DNA, 75 bp, synthetic construct
  source 1..75: mol_type = other DNA
ggcctatggcaccgacggcccggtagcggcgcttgggctgcaaactttaagcgatccgcagggcgtccagccaat

SEQ ID NO: 339783 - DNA, 75 bp, synthetic construct
  source 1..75: mol_type = other DNA
cacggtgttcctacggtaaataaagtgcaactgggaacgactcccgtggtgcgcggggcgattacttccggtgaa

SEQ ID NO: 339784 - DNA, 75 bp, synthetic construct
  source 1..75: mol_type = other DNA
atggcaaggtccgattatgatattatcaatctgtctctggaacatgaactgaatgagtggctggcagagagaggt

SEQ ID NO: 339785 - DNA, 75 bp, synthetic construct
  source 1..75: mol_type = other DNA
gtcactggccggtggtgacacggcggtgacgattaaagccgctgcccagcaaacttctggtgttaatgccgcaat

SEQ ID NO: 339786 - DNA, 75 bp, synthetic construct
  source 1..75: mol_type = other DNA
cacgacgttcctacggtaaataaagtgcaactgggaacgactcccgtagtgcgcggggcgatcacttctggcgag

SEQ ID NO: 339787 - DNA, 75 bp, synthetic construct
  source 1..75: mol_type = other DNA
cgccagcgggtggaaactactaccttaatctgcacaatagccaggcaaacgttgacgagttcaacgagaaaacgc

SEQ ID NO: 339788 - DNA, 75 bp, synthetic construct
  source 1..75: mol_type = other DNA
ctagtaataacatcgacggatacattaaaataagaaaaacaagaggcgctgaagatcaaacaacaactatctctc

SEQ ID NO: 339789 - DNA, 75 bp, synthetic construct
  source 1..75: mol_type = other DNA
tacacggactcatccgctcatttgaaggtatgcccgttactttttatgtgcataactgccgggaacagttcacgg

SEQ ID NO: 339790 - DNA, 75 bp, synthetic construct
  source 1..75: mol_type = other DNA
tggagattaaggagttctccgaagaaaccgccacggggatgatggactcccttctttacgccccctgcgattatg

SEQ ID NO: 339791 - DNA, 75 bp, synthetic construct
  source 1..75: mol_type = other DNA
gggaatggatatccactttgaccggatgatgtggcggggcatgtttctgaaagtcaatgcatatgccctgaatga

SEQ ID NO: 339792 - DNA, 75 bp, synthetic construct
  source 1..75: mol_type = other DNA
ggcgagcacaacagcccgcgctcaaagagcttctttgatggtgtgaagaagttttttgacgacctgactcgctaa

SEQ ID NO: 339793 - DNA, 75 bp, synthetic construct
  source 1..75: mol_type = other DNA
tcaggtgacagtatcacggggcgaggtcgtctccattctgtttgttgagccggtcatgagcaacgatatcagtac

SEQ ID NO: 339794 - DNA, 75 bp, synthetic construct
  source 1..75: mol_type = other DNA
cgagcgagtagtggtgtagccgcacaacatattacaatggatgcattaaaaaaaatacatcttgtaaggattaaa

SEQ ID NO: 339795 - DNA, 75 bp, synthetic construct
  source 1..75: mol_type = other DNA
gtatcacctgcgcccgcgtctggtgccggtgagcagcctcaactacgccgaaatggtgtcgtttcacaactttca

SEQ ID NO: 339796 - DNA, 75 bp, synthetic construct
  source 1..75: mol_type = other DNA
cgatccaggctcccgccaaatggtgatattaaaaacaccgctgcgccgtggtgaaacaagaccttttatttccct

SEQ ID NO: 339797 - DNA, 75 bp, synthetic construct
  source 1..75: mol_type = other DNA
atggtctggatatccggttgtcgcagtgggcgcagggcggtgagttcggctgggtgtttgataacgaatctgaca

SEQ ID NO: 339798 - DNA, 75 bp, synthetic construct
  source 1..75: mol_type = other DNA
gctgtgatgaatgacgagccgcaatatcgcgtctacggcataacccgaatgctggaaaatttgcctgagccggct

SEQ ID NO: 339799 - DNA, 75 bp, synthetic construct
  source 1..75: mol_type = other DNA
agcgcggtgttttcgtcgcaactggctttctatgaatatctgttaacgcaccagtggcgaaaggtgcgcgtcacc

SEQ ID NO: 339800 - DNA, 75 bp, synthetic construct
  source 1..75: mol_type = other DNA
tattaccgtctataactatgatggtgaaacacgggaatatatttccacttcaaatgaatatcttgccgttggtgt

SEQ ID NO: 339801 - DNA, 75 bp, synthetic construct
  source 1..75: mol_type = other DNA
catctgaatatcttgctgtgggtgttggtattccggcatgttcctgtttagaggctcctggtacacataaggatg

SEQ ID NO: 339802 - DNA, 75 bp, synthetic construct
  source 1..75: mol_type = other DNA
ctatattttccatctgcgtagcggtttgcagtggtcagacggtcagcctctgacggcagaggattttgtcctcgg

SEQ ID NO: 339803 - DNA, 75 bp, synthetic construct
  source 1..75: mol_type = other DNA
gttatgctatctgccgttctgcagattttaactcatgggaatatgtgccagaccatcgcggtgaaatcgtctata

SEQ ID NO: 339804 - DNA, 75 bp, synthetic construct
  source 1..75: mol_type = other DNA
atgttaccgtttataactatgatgtcaaacacgggaatatatttcacttcaaatgaatatcttgctattggtgtc

SEQ ID NO: 339805 - DNA, 75 bp, synthetic construct
  source 1..75: mol_type = other DNA
ggcaaaagacaaaatcacaactgaagctgagcgccagataaacccgttcggactggatattctctcataccgtat

SEQ ID NO: 339806 - DNA, 75 bp, synthetic construct
  source 1..75: mol_type = other DNA
agtgtattactgctggacatgagatgactaaagctatcgcaattgcgcagtttaatgacgatagcccggaggcaa

SEQ ID NO: 339807 - DNA, 75 bp, synthetic construct
  source 1..75: mol_type = other DNA
caccgatccacacctgatgctccgcctggccattgaaaccgtcgctcatgactatgatgtcattgttattgacag

SEQ ID NO: 339808 - DNA, 75 bp, synthetic construct
  source 1..75: mol_type = other DNA
aaggacgatatcaattatgcaataaggcccacttgctggcctgggcttgatattattccttcctgtctagctctg

SEQ ID NO: 339809 - DNA, 75 bp, synthetic construct
  source 1..75: mol_type = other DNA
aaaaatacaaccactatcgccccgttaacaccatacgataaatgggatggtgaaaaatgggtgacagatactgag

SEQ ID NO: 339810 - DNA, 75 bp, synthetic construct
  source 1..75: mol_type = other DNA
gttatgcaatctgccgttctacagattttaactcatgggaatatgtgccagatcatcgcggtgaaatcgtctata

SEQ ID NO: 339811 - DNA, 75 bp, synthetic construct
  source 1..75: mol_type = other DNA
caggtgcttggagaaatgctctttctatctgggaacccgtctgtaatgaaatttttgatcgtttgattaaaccac

SEQ ID NO: 339812 - DNA, 75 bp, synthetic construct
  source 1..75: mol_type = other DNA
gattgatgctgcaatggcttccattagtctgattcaactgaaattgcaggccggacgtaaactgacgcaggcaga

SEQ ID NO: 339813 - DNA, 75 bp, synthetic construct
  source 1..75: mol_type = other DNA
gacccgggcgaatacattccgggaagagtggcagtatttacgggtaagggatggagccatgaagaagaccatcgc

SEQ ID NO: 339814 - DNA, 75 bp, synthetic construct
  source 1..75: mol_type = other DNA
cggcagaagcacagcgccagtcactgattgatgctgcaatggcttccattggtctgattcagctgaaattacagg

SEQ ID NO: 339815 - DNA, 75 bp, synthetic construct
  source 1..75: mol_type = other DNA
gaaaatacaaccactatcgccccgttaacgccatacgatgaatgggatggtgagaaatgggtgacagatactgag

SEQ ID NO: 339816 - DNA, 75 bp, synthetic construct
  source 1..75: mol_type = other DNA
gatgcaccagttacacataaggctggttatgcaatctgccgttctgcagattttaactcatgggaatatgtgcca

SEQ ID NO: 339817 - DNA, 75 bp, synthetic construct
  source 1..75: mol_type = other DNA
atggataaagcaatattaaatagtgagcttattgctacaaagtcgggggatattaccgtttataactatgatagt

SEQ ID NO: 339818 - DNA, 75 bp, synthetic construct
  source 1..75: mol_type = other DNA
gattgatgctgctatggcttccatcagtctgatccagctgaaactgcaggccggacgtaaactgacgcaggcaga

SEQ ID NO: 339819 - DNA, 75 bp, synthetic construct
  source 1..75: mol_type = other DNA
gaaaatacaaccactatcgccccgttaacgccatatgataaatgggatggtgagaaatgggtgaccgacactgag

SEQ ID NO: 339820 - DNA, 75 bp, synthetic construct
  source 1..75: mol_type = other DNA
agaaacaacccggcttaacgctgtgctggattacattgacgcggtgactgcaacagataccagcaccgcgccgga

SEQ ID NO: 339821 - DNA, 75 bp, synthetic construct
  source 1..75: mol_type = other DNA
ggtagctatttacagttattgccagtatcaggacggtgcagcccccgggcgtggtgcctggacgccatttgctga

SEQ ID NO: 339822 - DNA, 75 bp, synthetic construct
  source 1..75: mol_type = other DNA
aattacaggccggacggaagctgacgcaggcagaaacaacccgccttaacgctgtgctggattacattgacgcgg

SEQ ID NO: 339823 - DNA, 75 bp, synthetic construct
  source 1..75: mol_type = other DNA
caactgaatatcttgctgttggcgtcggtattcccgcacattcgtgtttagatgctcctggttcatataagtcag

SEQ ID NO: 339824 - DNA, 75 bp, synthetic construct
  source 1..75: mol_type = other DNA
actgaaattgcaggccggacgtaaactgacgcagacagaaacaacccgccttaacgctgtgctggattacattga

SEQ ID NO: 339825 - DNA, 75 bp, synthetic construct
  source 1..75: mol_type = other DNA
aaggggtggtggtctgttatcgaggacaagttcaccattttgctggaatgtctgtggattgtgtcgatagcacgg

SEQ ID NO: 339826 - DNA, 75 bp, synthetic construct
  source 1..75: mol_type = other DNA
ggtcaggagccgggcgtgcagatttatacgcatatctcagaccaatacagcccgttctatgccaaagtgatcagc

SEQ ID NO: 339827 - DNA, 75 bp, synthetic construct
  source 1..75: mol_type = other DNA
agtctggtttataacatgctcccccatccgaaaattacagaaatactggaagaagttgacagttggactggtttt

SEQ ID NO: 339828 - DNA, 75 bp, synthetic construct
  source 1..75: mol_type = other DNA
acacgacaaacgaaaaaagaaaaactggacgatcaaattccgttagaagaacctcatgttcttgaggaaagttta

SEQ ID NO: 339829 - DNA, 75 bp, synthetic construct
  source 1..75: mol_type = other DNA
aagggctacgtgttctgctcgtggaaggtaacgatccccagggaacagcatcaatgtatcacgggtgggtacctg

SEQ ID NO: 339830 - DNA, 75 bp, synthetic construct
  source 1..75: mol_type = other DNA
gtttcttctcaggccatcagggatgccgagaaagccggtcggttgccacatccggatatggaaacacggggacgg

SEQ ID NO: 339831 - DNA, 75 bp, synthetic construct
  source 1..75: mol_type = other DNA
atatcaatcttaatggggatgatgtctggcgtaataatcttaagctgggtacagggaagtaccgaccattacgca

SEQ ID NO: 339832 - DNA, 75 bp, synthetic construct
  source 1..75: mol_type = other DNA
tttaatgatgacagtccggaagcgagaaaaatcacccgacgctggagaataggcgaagcagcggatttagttggg

SEQ ID NO: 339833 - DNA, 75 bp, synthetic construct
  source 1..75: mol_type = other DNA
cagggtaaattgcctcatcctccacaccttatgctgcgcgcagctattgaatcagtttgggataactacgatgtt

SEQ ID NO: 339834 - DNA, 75 bp, synthetic construct
  source 1..75: mol_type = other DNA
attaccgcaggctggggaaaaatcaccgcttactctggtacccaacaatatatggaagcaatgggtgtcccgggt

SEQ ID NO: 339835 - DNA, 75 bp, synthetic construct
  source 1..75: mol_type = other DNA
gtgccgcgttgtcgtcgaaacaccggtaggcctgaacgagaagcagaaacagctgctgcaagagctgcaagaaag

SEQ ID NO: 339836 - DNA, 75 bp, synthetic construct
  source 1..75: mol_type = other DNA
tggtcaggtgcagatgcgccagggattcttcgctgtacagcagacctgtccacactgtcagggccgcggtacgct

SEQ ID NO: 339837 - DNA, 75 bp, synthetic construct
  source 1..75: mol_type = other DNA
atggctaagcaagattattacgagattttaggcgtttccaaaacagcggaagagcatgaaatcaaaaaggcctac

SEQ ID NO: 339838 - DNA, 75 bp, synthetic construct
  source 1..75: mol_type = other DNA
taatatccatagctacctttctttttctggcggctttatgtttgttcttcatttattctttctttaaacggaaaa

SEQ ID NO: 339839 - DNA, 75 bp, synthetic construct
  source 1..75: mol_type = other DNA
gaccctggcgaaaacattccgggaagagtggcagtatttacaggtaagggatggagccatgaagaggaccatcgc

SEQ ID NO: 339840 - DNA, 75 bp, synthetic construct
  source 1..75: mol_type = other DNA
gtgtacacgccggcgcgaaaaatccacctgtaccactgcgaccatcgcggcctgccgctggcccttatcagtaag

SEQ ID NO: 339841 - DNA, 75 bp, synthetic construct
  source 1..75: mol_type = other DNA
catacccaaacgctggcagcagcggagctttctaagcagaactttatcaacctaatttgcgggtttctgcgcaaa

SEQ ID NO: 339842 - DNA, 75 bp, synthetic construct
  source 1..75: mol_type = other DNA
gattacattgacgcggtgacggcaacagataccagcatcgcgcctgatgtcatctggcctgagctgccggaggcg

SEQ ID NO: 339843 - DNA, 75 bp, synthetic construct
  source 1..75: mol_type = other DNA
gaaaatacaaccactatcgccccgttaacgccattcgataaatgggatggtaagggcactgttgcaaatagtcgg

SEQ ID NO: 339844 - DNA, 75 bp, synthetic construct
  source 1..75: mol_type = other DNA
gcacagcatcacgccgcagtagacgcggcagaagcacagcgtcagtcactgattgatactgcaatggcttccatt

SEQ ID NO: 339845 - DNA, 75 bp, synthetic construct
  source 1..75: mol_type = other DNA
agtttattgctacaaaggcggggaatattaccgtctataactatgatggcgaaatacgggaatatatttccacat

SEQ ID NO: 339846 - DNA, 75 bp, synthetic construct
  source 1..75: mol_type = other DNA
atggcgctgaccaactatctattgcaaacgctgatttgtaccacgcttttttaccacctcggtttgtttatgcat

SEQ ID NO: 339847 - DNA, 75 bp, synthetic construct
  source 1..75: mol_type = other DNA
tattaccgtttataactatgataatgggacacaggaatatatctcaacatcaaccgaatatcttgctgtcggtgt

SEQ ID NO: 339848 - DNA, 75 bp, synthetic construct
  source 1..75: mol_type = other DNA
aatgctttggcagaactcttgcaggtatcgcctaaattttttgaataccctctggctggtgatgtaaaaccagaa

SEQ ID NO: 339849 - DNA, 75 bp, synthetic construct
  source 1..75: mol_type = other DNA
tggtatcccggcatattcctgcctggatgcacctggtatacatagggagggttatgttatctgccgttctgtaga

SEQ ID NO: 339850 - DNA, 75 bp, synthetic construct
  source 1..75: mol_type = other DNA
agtctgattcagctgaaattacaggccgggcggaggctgacgcaggcagaaaccacccgccttaacgccgtgctg

SEQ ID NO: 339851 - DNA, 75 bp, synthetic construct
  source 1..75: mol_type = other DNA
tccgctcagaactactcgattcacgttttggtgccaagcccatttctactatcgctgactcaaaacgatttccgc

SEQ ID NO: 339852 - DNA, 75 bp, synthetic construct
  source 1..75: mol_type = other DNA
tccgctcagaactactcgattcacgttttggtgccaagtcgatttcgactatcgctgactcaaaacgatttccgc

SEQ ID NO: 339853 - DNA, 75 bp, synthetic construct
  source 1..75: mol_type = other DNA
tccgctcagaactactcgattcacgttttggtgccaagtccatttccactatcgctgactcaaaacgatttccgc

SEQ ID NO: 339854 - DNA, 75 bp, synthetic construct
  source 1..75: mol_type = other DNA
atggataagaagcaagtaacggatttaaggtcggaactactcgattcacgttttggcgccaagtctatttctact

SEQ ID NO: 339855 - DNA, 75 bp, synthetic construct
  source 1..75: mol_type = other DNA
atggataagaagcaagtaacggatttaaggtcggaactactcgattcacgttttggcgcaaagtcgatttcaact

SEQ ID NO: 339856 - DNA, 75 bp, synthetic construct
  source 1..75: mol_type = other DNA
tccgctcagaactactcgattcacgttttggtgccaaggcgatttctactatcgctgactcaaaacgatttccgc

SEQ ID NO: 339857 - DNA, 75 bp, synthetic construct
  source 1..75: mol_type = other DNA
gctcggaactactcgattcacgttttggtgccaaggccatttcgactatcgcagaatcaaaacgctttccgctgc

SEQ ID NO: 339858 - DNA, 75 bp, synthetic construct
  source 1..75: mol_type = other DNA
gctccgaactactcgattcacgttttggtgcgaaggccatttcgactatcgcagaatcaaaacgctttccgctgc

SEQ ID NO: 339859 - DNA, 75 bp, synthetic construct
  source 1..75: mol_type = other DNA
gttctgaactactcgattcacgttttggtgcgaaggccatttcgactatcgcagaatcaaaacgctttccgctgc

SEQ ID NO: 339860 - DNA, 75 bp, synthetic construct
  source 1..75: mol_type = other DNA
tccgctcagaactactcgattcacgttttggtgccaagtcaatttcaactatcgctgactcaaaacgatttccgc

SEQ ID NO: 339861 - DNA, 75 bp, synthetic construct
  source 1..75: mol_type = other DNA
tccgctcagaactactcgattcacgttttggtgccaagacaatttctactatcgctgactcaaaacgatttccgc

SEQ ID NO: 339862 - DNA, 75 bp, synthetic construct
  source 1..75: mol_type = other DNA
ggtcggaactactcgattcacgttttggtgcgaaggccatttcgactatcgcagaatcaaaacgctttccgctgc

SEQ ID NO: 339863 - DNA, 75 bp, synthetic construct
  source 1..75: mol_type = other DNA
atggataagaagcaagtaacggatttaaggtcggaactactcgattcacgttttggcgcgaagtccatttcgact

SEQ ID NO: 339864 - DNA, 75 bp, synthetic construct
  source 1..75: mol_type = other DNA
atgcccgtatctttgaggaagaataccttaaagccatcaaaagtcctgcctataaagatttactcccttctcatc

SEQ ID NO: 339865 - DNA, 75 bp, synthetic construct
  source 1..75: mol_type = other DNA
tctgtagccttcgagagatgggaagtgaacgagaacgccgtcagacattaggccgtgggcttcgcctgtgtgtta

SEQ ID NO: 339866 - DNA, 75 bp, synthetic construct
  source 1..75: mol_type = other DNA
atgaaactacattttgaatctgaccttaaatatcaacacaacgctataacatcagtctgcgatctgtttgaaggg

SEQ ID NO: 339867 - DNA, 75 bp, synthetic construct
  source 1..75: mol_type = other DNA
tacaggcgaaccatattgacgaaaccttcacctgggcgcaccgcatcagcaatcgagcggtagattttctgcaat

SEQ ID NO: 339868 - DNA, 75 bp, synthetic construct
  source 1..75: mol_type = other DNA
gtaagaacaaccgtggtgcggccaaggcgctgattgaagcggttacggctgatggtggtggttcaaacatctatt

SEQ ID NO: 339869 - DNA, 75 bp, synthetic construct
  source 1..75: mol_type = other DNA
cagaacatgctaaagacgttcatgatggttatttctccattgataaaaaaggtgcatgggctgaaacaagcgaaa

SEQ ID NO: 339870 - DNA, 75 bp, synthetic construct
  source 1..75: mol_type = other DNA
tcaggcgcagataaacatattgatcgtcatcaggaatcacgtgaggcattaaaaattttaggttgccagcagacc

SEQ ID NO: 339871 - DNA, 75 bp, synthetic construct
  source 1..75: mol_type = other DNA
tcctgaagcaaaatcactgcctgtgattgaactgattgattatgctgaagttgctctcgggacagccgtgcaaac

SEQ ID NO: 339872 - DNA, 75 bp, synthetic construct
  source 1..75: mol_type = other DNA
cgacgccgccagcggtggcttcctggcgccgttcgtggctcctgatattgtctgggacttccgcctgccgcgcgt

SEQ ID NO: 339873 - DNA, 75 bp, synthetic construct
  source 1..75: mol_type = other DNA
ggtatcatcgaaaaagatgcgtttgcccatctgatcttctctgattcctcacaagctgtgggtattgccggttca

SEQ ID NO: 339874 - DNA, 75 bp, synthetic construct
  source 1..75: mol_type = other DNA
cagaacatgctaaagacgttcatgatggttatttctccattgataaaaaaggtggatgggctgaaacaaccgaaa

SEQ ID NO: 339875 - DNA, 75 bp, synthetic construct
  source 1..75: mol_type = other DNA
cagcttccaccttcacctgtgctcgacagccatgattttactgtcgagatggaaacagggacaggtaagacgtat

SEQ ID NO: 339876 - DNA, 75 bp, synthetic construct
  source 1..75: mol_type = other DNA
gatcggaactactcgattcacgttttggtgcaaaggccatttcgactatcgcagaatcaaaacgctttccgctgc

SEQ ID NO: 339877 - DNA, 75 bp, synthetic construct
  source 1..75: mol_type = other DNA
tcactccgtcgcgccagtagacaatcaacagggttggggcaacgtgatgtatatccctgctgcgccaatgtgcga

SEQ ID NO: 339878 - DNA, 75 bp, synthetic construct
  source 1..75: mol_type = other DNA
ggatgacgtaccggacgatgaactgtgcggggttgcacctggcaaagttctgcccatttcagagaaatggcatcc

SEQ ID NO: 339879 - DNA, 75 bp, synthetic construct
  source 1..75: mol_type = other DNA
aaatgttcggtgttccgcacgtttcaaggctggacggcgctctctgatatgttatcgggtcagggattgttacat

SEQ ID NO: 339880 - DNA, 75 bp, synthetic construct
  source 1..75: mol_type = other DNA
tcagcgtggcctggcgtggttcgtggcctcgcgattctcgacggggaaggggtgaagctaacgtttgccgattcg

SEQ ID NO: 339881 - DNA, 75 bp, synthetic construct
  source 1..75: mol_type = other DNA
cttattgatgaaagcactaacgtcaattccggcaataacagcgggggattctgtctggtggcactgcgatgtgat

SEQ ID NO: 339882 - DNA, 75 bp, synthetic construct
  source 1..75: mol_type = other DNA
ctgaaagcacaaggattgccggtttggccggagatctcttatagggatattgcagccggtacagtaaacaatgtc

SEQ ID NO: 339883 - DNA, 75 bp, synthetic construct
  source 1..75: mol_type = other DNA
gcattcttagaaaagcggatttctccggtacgatctgtgaaggcgtggattttacagattgtgatctgcgtaatg

SEQ ID NO: 339884 - DNA, 75 bp, synthetic construct
  source 1..75: mol_type = other DNA
aatactaattttactggtacagaaggttctaatattctatttaaccatgcatggttgttcaatacgatatttata

SEQ ID NO: 339885 - DNA, 75 bp, synthetic construct
  source 1..75: mol_type = other DNA
ctgaaattattgaatgcgcctctcctgaaataagaagtagcgtcctgaacgatctttatagcattgctaatttcc

SEQ ID NO: 339886 - DNA, 75 bp, synthetic construct
  source 1..75: mol_type = other DNA
agcacagatgcaggcgcggcagagcgaaaatatggctgctgtgcaatcttttctaaaccgactgtggacgtctga

SEQ ID NO: 339887 - DNA, 75 bp, synthetic construct
  source 1..75: mol_type = other DNA
actactgcttaaagcgctgacttccattcccgcgataacagcaggggattccgtctggtggcactgcgacgtcat

SEQ ID NO: 339888 - DNA, 75 bp, synthetic construct
  source 1..75: mol_type = other DNA
atgacagtgccgagaaacaagctagtgacagtatcgagaaacaagccagtgacagtatcgagaaacaagccagtg

SEQ ID NO: 339889 - DNA, 75 bp, synthetic construct
  source 1..75: mol_type = other DNA
cagtgttcgcccgttatcatacggttttatttcgcaggacgacctggcaaaaaaattcctgaacgtttctgaaga

SEQ ID NO: 339890 - DNA, 75 bp, synthetic construct
  source 1..75: mol_type = other DNA
gaaatcgatcagtgcttcaggccataaattcggtctggctccgctgggctgcggctgggttatctggcgtgatga

SEQ ID NO: 339891 - DNA, 75 bp, synthetic construct
  source 1..75: mol_type = other DNA
ctgtggtttcccagtcgtgccatttcgcaaatgcatcaagcgcttaatgatcggcttgatgatgccattagccac

SEQ ID NO: 339892 - DNA, 75 bp, synthetic construct
  source 1..75: mol_type = other DNA
ctgttttatgccggattcagtaataatctgccgccgctgcgttttgtgcgtaatctcgggttaatggcggcagag

SEQ ID NO: 339893 - DNA, 75 bp, synthetic construct
  source 1..75: mol_type = other DNA
gatcagaactactcgattcacgttttggtgcgaaggccatttcgactatcgcagaatcaaaacgctttccgctgc

SEQ ID NO: 339894 - DNA, 75 bp, synthetic construct
  source 1..75: mol_type = other DNA
acctggccactttctgccagacctgggacgacgagaacgtccataaattgatggatttttcgatgaaaaaaaact

SEQ ID NO: 339895 - DNA, 75 bp, synthetic construct
  source 1..75: mol_type = other DNA
acctggccactttctgccagacctgggacgacgagaatgtccataaattgatggatttgtcgatcaaaaaaaact

SEQ ID NO: 339896 - DNA, 75 bp, synthetic construct
  source 1..75: mol_type = other DNA
tacggctttatttcgcaggacgacctggcaaaacaattcctgaacgtttctgaagattttaaaccaaatttttaa

SEQ ID NO: 339897 - DNA, 75 bp, synthetic construct
  source 1..75: mol_type = other DNA
aacaattcctgaacgtttctgaagagtttaagccgaacttcggaattacggatatttcccgttcgtcagtaactt

SEQ ID NO: 339898 - DNA, 75 bp, synthetic construct
  source 1..75: mol_type = other DNA
tgatgctggttgacccgaaacagggcagtgttcgcccgttatcatacggttttatttcgcaggacgacctggcaa

SEQ ID NO: 339899 - DNA, 75 bp, synthetic construct
  source 1..75: mol_type = other DNA
tggtgaaaattcccggcaatattctcacaccgatgatcctcgcactttgtgtggtcgggacttatgcgttgaaca

SEQ ID NO: 339900 - DNA, 75 bp, synthetic construct
  source 1..75: mol_type = other DNA
ttggcgctttgcctggtctgacagcgaccatgggtgtggcgattttgctgcctttcacctacggcatggagcctg

SEQ ID NO: 339901 - DNA, 75 bp, synthetic construct
  source 1..75: mol_type = other DNA
ggtgggctatttcatgcagaaaggaggatatccggcatcacccgtagtgctggcattgattatggggccaatggc

SEQ ID NO: 339902 - DNA, 75 bp, synthetic construct
  source 1..75: mol_type = other DNA
tggactggctggcagcgcagggggaaagaagtggttttacactactggatacctcggttgatgcctaccgacaac

SEQ ID NO: 339903 - DNA, 75 bp, synthetic construct
  source 1..75: mol_type = other DNA
cctgcgggcgaatccaacaatctgtaaagcgggcaagcgccacgatctgctgatggaggcgaaacggcaggtgag

SEQ ID NO: 339904 - DNA, 75 bp, synthetic construct
  source 1..75: mol_type = other DNA
aaaaagaagtattcgaattgctgggaaagaaaaaaacagcagtatggcggttacgtaaagatcacgggttccctc

SEQ ID NO: 339905 - DNA, 75 bp, synthetic construct
  source 1..75: mol_type = other DNA
gtggataaggttttagattcagcgatcctttcttcggcaaataaaagaaagggtatccttgccattggcgcgcat

SEQ ID NO: 339906 - DNA, 75 bp, synthetic construct
  source 1..75: mol_type = other DNA
tctcagcctggggtatggcaaaagccgggcgttcggctgcggtctgatgctgatcaaacccggagcagaggcgtg

SEQ ID NO: 339907 - DNA, 75 bp, synthetic construct
  source 1..75: mol_type = other DNA
caggcaatttctttatcgtcgggaagaacttcagggtgcgtttcgcttttttgtccactcgcaggaacgcccggc

SEQ ID NO: 339908 - DNA, 75 bp, synthetic construct
  source 1..75: mol_type = other DNA
aaagcattttatgattatctgaagggaccgcaggctgcggaaatctttaaacgttacggatttacaaccaagtaa

SEQ ID NO: 339909 - DNA, 75 bp, synthetic construct
  source 1..75: mol_type = other DNA
tcacataaaaaagtggaatatccggttgctgttgtggaagggcataacaatgcgacagtgaaagcattttatgat

SEQ ID NO: 339910 - DNA, 75 bp, synthetic construct
  source 1..75: mol_type = other DNA
ggacattgctacgcagtataaaaaagaaaaaggcgtggatgtggtttcttctttcgcttcgtcatctactttggc

SEQ ID NO: 339911 - DNA, 75 bp, synthetic construct
  source 1..75: mol_type = other DNA
gattttgctgaactttctgaagcagtatccacacactatcccagccacaagggggtgattatgacgatagcagag

SEQ ID NO: 339912 - DNA, 75 bp, synthetic construct
  source 1..75: mol_type = other DNA
gaagacgcttgaagatcccgccgcagtaagggactttcttgaacaggtcttgacacacgatcagatatcccgctg

SEQ ID NO: 339913 - DNA, 75 bp, synthetic construct
  source 1..75: mol_type = other DNA
atttatgcgaaagaagcactgcaaaaactgggcgcatgggatacgctctctccgaaactggctccggcggaagat

SEQ ID NO: 339914 - DNA, 75 bp, synthetic construct
  source 1..75: mol_type = other DNA
agagcgtgaagcgattgagcacgagatgcaccactacgaagaccctcgtgcggcgtccattgaagcgctgaaaat

SEQ ID NO: 339915 - DNA, 75 bp, synthetic construct
  source 1..75: mol_type = other DNA
gcccctgcttgtccgtgaacctttcggaaatgctcgcctggccacccgggctgaaaaagccgctatgcaggaaaa

SEQ ID NO: 339916 - DNA, 75 bp, synthetic construct
  source 1..75: mol_type = other DNA
gccactgcttgtccgtgagcctttcggaaatgttcgtctggccacccgggctgaaaaaaccgctatgcaggaaaa

SEQ ID NO: 339917 - DNA, 75 bp, synthetic construct
  source 1..75: mol_type = other DNA
cactttcgccacgaaacttatcgagagtggggctgacatccataccatcaaagatttactgggccacagcaccat

SEQ ID NO: 339918 - DNA, 75 bp, synthetic construct
  source 1..75: mol_type = other DNA
aatgccgcaatagaatgtgtggaattaattgaggtaacccaaaagcttccctgtcaacttttttcaaatgctacc

SEQ ID NO: 339919 - DNA, 75 bp, synthetic construct
  source 1..75: mol_type = other DNA
gaaattaggtgcgtatcaatatttatactcagccacatctgaattcaatgtcgtaaaggaaagcgtagagttaat

SEQ ID NO: 339920 - DNA, 75 bp, synthetic construct
  source 1..75: mol_type = other DNA
tgaggtaagccaaaaaacctcccttcaattttcaagtgctaccagccatgaacacagtgatgtaaacattcaaat

SEQ ID NO: 339921 - DNA, 75 bp, synthetic construct
  source 1..75: mol_type = other DNA
tcatttactttattctggttggtatttctgtagtagattattccaagagtaaaaacccagtcagtgatgttcagt

SEQ ID NO: 339922 - DNA, 75 bp, synthetic construct
  source 1..75: mol_type = other DNA
gcatagtgatgatatataccatagattgaccaaagatagcacgcaagaacaaattaaatgcaatgattttaaccg

SEQ ID NO: 339923 - DNA, 75 bp, synthetic construct
  source 1..75: mol_type = other DNA
gtgatttttgatgtaagagcgaccttcgagatagcactccagacggacaccaacctgatacttatcgatctggat

SEQ ID NO: 339924 - DNA, 75 bp, synthetic construct
  source 1..75: mol_type = other DNA
gaaaagagcatcacagctgctcataaaaattccttcaatgtagatgtggaagctcaggggtattccgactctgga

SEQ ID NO: 339925 - DNA, 75 bp, synthetic construct
  source 1..75: mol_type = other DNA
gcgtcagcatctgggggatgaaggctgggtatttccgggcaaggggaccgacaatccggttgctgagccgcgtcg

SEQ ID NO: 339926 - DNA, 75 bp, synthetic construct
  source 1..75: mol_type = other DNA
acaaacagggaaggccatagatttcatcatggctgcgttagaattaaaacgaaacgaaatgatctatgtagggcg

SEQ ID NO: 339927 - DNA, 75 bp, synthetic construct
  source 1..75: mol_type = other DNA
tggctttcgccggattaacccccgcaggtggtgtacagccgcccaacccaattatggcgggtctgatgactaccg

SEQ ID NO: 339928 - DNA, 75 bp, synthetic construct
  source 1..75: mol_type = other DNA
atccgaacgatttgcgcgtgaagattgatggtactggcaacgttgccgggctaaatatctctgtcgcaaccggcg

SEQ ID NO: 339929 - DNA, 75 bp, synthetic construct
  source 1..75: mol_type = other DNA
cacggaacatcacggcggcgtttgcttcctgatcaaaaagcgtaacggcacaaccgtgcagcagtgggtaagcca

SEQ ID NO: 339930 - DNA, 75 bp, synthetic construct
  source 1..75: mol_type = other DNA
ccgggatacgtatggtctgagtgttattcccgtttccgtggatggcgtgattaatccactgttgccggattcccg

SEQ ID NO: 339931 - DNA, 75 bp, synthetic construct
  source 1..75: mol_type = other DNA
ttcatgatgttgcgctggctgcgggcgtgtcggtaagtaccgtttcgctggtgcttagtggcaaagggcgaatct

SEQ ID NO: 339932 - DNA, 75 bp, synthetic construct
  source 1..75: mol_type = other DNA
gcgtctacggcgaaaatgcctgtcaggcactgttccagagccgtccggaagcgattgttcgcgcctggtttatcc

SEQ ID NO: 339933 - DNA, 75 bp, synthetic construct
  source 1..75: mol_type = other DNA
ggtgctggtactggggcaggaatatgaagggctaccggatgctgcacgtgacccgaatgatgtacgggtaaatat

SEQ ID NO: 339934 - DNA, 75 bp, synthetic construct
  source 1..75: mol_type = other DNA
taagccggataataatggcggtgctgtgactccggttgatccaactccggaaacaccggaaactccagttactcc

SEQ ID NO: 339935 - DNA, 75 bp, synthetic construct
  source 1..75: mol_type = other DNA
ctggttaacggcggcgattccaacatctggtacaaggatgtggacatcgtggacagcccgtacatcaccaccccg

SEQ ID NO: 339936 - DNA, 75 bp, synthetic construct
  source 1..75: mol_type = other DNA
cggaaaaagagatcagcctgtggcgcaatggcctaaacagcgttgaggatttacaggcgaaccatatcgacgaaa

SEQ ID NO: 339937 - DNA, 75 bp, synthetic construct
  source 1..75: mol_type = other DNA
actataacctgcagtacagccattacaacggcacggtacggaaccagctggcggcagaccaggcgcagcagcgac

SEQ ID NO: 339938 - DNA, 75 bp, synthetic construct
  source 1..75: mol_type = other DNA
gggcaccacgaaaaagaccggataaagccagcggcaggtataaaaacaaaatgctgctgggactgccgaaactgc

SEQ ID NO: 339939 - DNA, 75 bp, synthetic construct
  source 1..75: mol_type = other DNA
gaaaggcctccatcccaataagagcgatgcagaaattgacgctatgatgggtaccacgccgatggttggcgtgaa

SEQ ID NO: 339940 - DNA, 75 bp, synthetic construct
  source 1..75: mol_type = other DNA
tggcacagcggttttcactgttactgaatcagggggtcgatggtgtggtcattgccggggctgcaggaagcagcg

SEQ ID NO: 339941 - DNA, 75 bp, synthetic construct
  source 1..75: mol_type = other DNA
tcatgcaggcattcatggacatggcaaaagccgagaagaaagaagagtgccgacgtaagcgagcggaagcaaaag

SEQ ID NO: 339942 - DNA, 75 bp, synthetic construct
  source 1..75: mol_type = other DNA
cctgctggctgtactgtcacctgtggacacggcggtgatggtggtattgaatattttaaattcatggagttttaa

SEQ ID NO: 339943 - DNA, 75 bp, synthetic construct
  source 1..75: mol_type = other DNA
agtacgaactggagaaaaaaacaaaacgattctgtactgcgtaaacaatctgccgtttggatacagcaatcccct

SEQ ID NO: 339944 - DNA, 75 bp, synthetic construct
  source 1..75: mol_type = other DNA
tacgcgcttggcatcactcccacagaattaaagaaacagtgtgaacgtctttataaggctgaaagcaataaacca

SEQ ID NO: 339945 - DNA, 75 bp, synthetic construct
  source 1..75: mol_type = other DNA
aaaagccgagaggaaagaagagcgccggcgtaagcgagcggaagcaaaagcaaaagcaaaagcaaaagcaaaagt

SEQ ID NO: 339946 - DNA, 75 bp, synthetic construct
  source 1..75: mol_type = other DNA
aggccagcaatgtacagcagagtgttaaccatatgcttggcgacgatgttgatcgtgagctgcgcaacaactgga

SEQ ID NO: 339947 - DNA, 75 bp, synthetic construct
  source 1..75: mol_type = other DNA
agccagaagcaagccgcggaagctatcacggcgcttttacgtcataacccgaccatcagtgccgtggtttgctat

SEQ ID NO: 339948 - DNA, 75 bp, synthetic construct
  source 1..75: mol_type = other DNA
cacggcggtaaagacggcgagcagctggcacaacggttttcactgttactgaatcagggggtcgatggtgtggta

SEQ ID NO: 339949 - DNA, 75 bp, synthetic construct
  source 1..75: mol_type = other DNA
catgatgcaaaaaatcactcatgaagagacgcattcacgtaatctaattatccccgcccggctcattgcggcgaa

SEQ ID NO: 339950 - DNA, 75 bp, synthetic construct
  source 1..75: mol_type = other DNA
aaaatccagattgcagtagagaagatatatccctcgctcttgggaagagtgctgtttccatcagtaataaattat

SEQ ID NO: 339951 - DNA, 75 bp, synthetic construct
  source 1..75: mol_type = other DNA
atgattctgtatcgcgtaaacaatctgccgtttggatacaacaatcccctgagcgttatgttcaaccagttactt

SEQ ID NO: 339952 - DNA, 75 bp, synthetic construct
  source 1..75: mol_type = other DNA
gaccatcagtgccgtggtttgctataacgaaactattgcgatgggggcatggtttggtttgctgaaagcagggcg

SEQ ID NO: 339953 - DNA, 75 bp, synthetic construct
  source 1..75: mol_type = other DNA
tactgtttttatatttgaaccgctacggttacaacggcctgtgtcgttacaatctgcgcggtgagtttaacgtgc

SEQ ID NO: 339954 - DNA, 75 bp, synthetic construct
  source 1..75: mol_type = other DNA
tttctccgctgctgatggcgtggtctattgccgcagtgctgcgtatcgcgctgggttctgcaaccgttgcggcaa

SEQ ID NO: 339955 - DNA, 75 bp, synthetic construct
  source 1..75: mol_type = other DNA
ctttgtgctgatgctgccgctggtgtttaccatcgctgcagccgccaatatcccgctgttgtacgttggtgtgcc

SEQ ID NO: 339956 - DNA, 75 bp, synthetic construct
  source 1..75: mol_type = other DNA
atcaaacatgggaattctgaatatccatttggtgcattagagatagattcagtaaagaaaaaatatgcccaccta

SEQ ID NO: 339957 - DNA, 75 bp, synthetic construct
  source 1..75: mol_type = other DNA
ttttacggcgtaccacacaaacagttttacgcttgaacaacaagcgcatctggcggagatcgccgagggactggt

SEQ ID NO: 339958 - DNA, 75 bp, synthetic construct
  source 1..75: mol_type = other DNA
cccaagggcgaatgtttggttgagccttttgtaggtgccgggtcggtgtttctcaacaccgacttttctcgttat

SEQ ID NO: 339959 - DNA, 75 bp, synthetic construct
  source 1..75: mol_type = other DNA
ccgcggtggggaatttgattcgcgaagggaaaacccaccagttaccgcatgttattcaaaccgggcagcaggtgg

SEQ ID NO: 339960 - DNA, 75 bp, synthetic construct
  source 1..75: mol_type = other DNA
ctaccacgctggcggcgatggttggctatctcaatcaacatgccgatgcgcatattctgacgctggaagatcctg

SEQ ID NO: 339961 - DNA, 75 bp, synthetic construct
  source 1..75: mol_type = other DNA
agcctatgaatccggcctaccccacgctttatccggaagaactgcagattttcggggtggtgacggcttttatac

SEQ ID NO: 339962 - DNA, 75 bp, synthetic construct
  source 1..75: mol_type = other DNA
agatcccgatgtgattttgctcggagagctgcgtgacagcgagacaatccgtctggcgctgacggcggcagaaac

SEQ ID NO: 339963 - DNA, 75 bp, synthetic construct
  source 1..75: mol_type = other DNA
gttattcaaactgggcaacaggtggggatgataacgtttcagcagagttatcagcagcgggtgggggaagggcgt

SEQ ID NO: 339964 - DNA, 75 bp, synthetic construct
  source 1..75: mol_type = other DNA
catattctgacgctggaagatcctgtggaatatctctatgccagccagcgatgtttgatccagcagcgggagatt

SEQ ID NO: 339965 - DNA, 75 bp, synthetic construct
  source 1..75: mol_type = other DNA
gtgcgaccgttgtttgccgatcgttgccaggccggttttccttcgcctgccactgattatgctgagcaggaactg

SEQ ID NO: 339966 - DNA, 75 bp, synthetic construct
  source 1..75: mol_type = other DNA
tccagccaagaactgagacccagcaggccatgagggcgttacaccgggtcagagaatcgctcatcagagataagg

SEQ ID NO: 339967 - DNA, 75 bp, synthetic construct
  source 1..75: mol_type = other DNA
gtgatggaagcctgcgccggagctcattttatggctcgccggattgctgatttaggtcatgaagcaaaattgatt

SEQ ID NO: 339968 - DNA, 75 bp, synthetic construct
  source 1..75: mol_type = other DNA
accatcacgaatgcaccaccgaacaggccgacgagctggtggagaaataccgggcgcgcggtgtaaagacagagc

SEQ ID NO: 339969 - DNA, 75 bp, synthetic construct
  source 1..75: mol_type = other DNA
gcggctgggttatctggcgtgatgaagaagcactgccgaaagaactggtgttcaacgttgactatctcggcggtc

SEQ ID NO: 339970 - DNA, 75 bp, synthetic construct
  source 1..75: mol_type = other DNA
cctggcaccgttcgtcgccccggatatcgtctgggacttccgcctgccgcgtgtgaaatcgatcagtgcttcagg

SEQ ID NO: 339971 - DNA, 75 bp, synthetic construct
  source 1..75: mol_type = other DNA
taaggtcagaactactcgattcacgttttggtgcgaaatctatttccactatcgcggaatctaaacgttttccgc

SEQ ID NO: 339972 - DNA, 75 bp, synthetic construct
  source 1..75: mol_type = other DNA
agtgaggatgaaaagaaaccaaatccacatttgttgggtgatatttgttatcgggagtgtgttgatttaaaagat

SEQ ID NO: 339973 - DNA, 75 bp, synthetic construct
  source 1..75: mol_type = other DNA
tagagtcgttaggcttgaaaaaatacttaaaacacttatatgctcctaatgatagatattatgatgatttagatc

SEQ ID NO: 339974 - DNA, 75 bp, synthetic construct
  source 1..75: mol_type = other DNA
caccttctttctgcgcgccagcggtgaatcgatgaaccaggctggcgtgcagaatggtgatctgctggtagtgga

SEQ ID NO: 339975 - DNA, 75 bp, synthetic construct
  source 1..75: mol_type = other DNA
cacagcgaattatgacaattccaggcgtcgggccaattactgccagtttactttcatcacagctcggcgatggaa

SEQ ID NO: 339976 - DNA, 75 bp, synthetic construct
  source 1..75: mol_type = other DNA
acaattcctggtgttggtccgattactgccagcttactatcgtcgcaacttggtgacgggaaacagttctcatgc

SEQ ID NO: 339977 - DNA, 75 bp, synthetic construct
  source 1..75: mol_type = other DNA
aatgattttgttgatgcagaagccatatgcgaagcggcttcacgaccatcaatgcgttttgtccagccaagaact

SEQ ID NO: 339978 - DNA, 75 bp, synthetic construct
  source 1..75: mol_type = other DNA
aggcaatatcggcccggtgactgatgcattaatggatgcactcgacacgccgtttacggtcttttccccggctct

SEQ ID NO: 339979 - DNA, 75 bp, synthetic construct
  source 1..75: mol_type = other DNA
caggttgtacaacgcggtacgggtcgtcagcttggggcgaaatacccgaacctgcatctggcagggaaaacaggg

SEQ ID NO: 339980 - DNA, 75 bp, synthetic construct
  source 1..75: mol_type = other DNA
cggcactgaagaaacagcgtaagttgagcgatcttgaaaccgcgattgtggttgttgaccgctttagcggtgaag

SEQ ID NO: 339981 - DNA, 75 bp, synthetic construct
  source 1..75: mol_type = other DNA
gttcagccgcgcggtggggtgatctctcctcagccagcctttatgcagctggtgcgtcaggagctgcaggcgaaa

SEQ ID NO: 339982 - DNA, 75 bp, synthetic construct
  source 1..75: mol_type = other DNA
tgctgaagtcgataagtctctggctgatctgaacggtaatactgccgaattccgcctgtctgaagaccgagcatt

SEQ ID NO: 339983 - DNA, 75 bp, synthetic construct
  source 1..75: mol_type = other DNA
tgctgaagtcgataagtcactggctgatctgaacggcaataccgctgaattccgcctgtctgaagaccgcgcatt

SEQ ID NO: 339984 - DNA, 75 bp, synthetic construct
  source 1..75: mol_type = other DNA
atgcctataactagctctgagtttttatcttcagcggagcgttgctttgcggaggattctgaagttggttatcgt

SEQ ID NO: 339985 - DNA, 75 bp, synthetic construct
  source 1..75: mol_type = other DNA
gacggttctgctgctgaaaagtttgcaggtagttttcaggatgatgccagcatagaaggtgttgaatttgagtat

SEQ ID NO: 339986 - DNA, 75 bp, synthetic construct
  source 1..75: mol_type = other DNA
aagattgtgagaatttcggtattagaaattctgatctagctaaatgcctgcaaaagggtggtgattgtcagggtt

SEQ ID NO: 339987 - DNA, 75 bp, synthetic construct
  source 1..75: mol_type = other DNA
gatgccagcatagaaggtgttgaatttgagtatgatgaagaggacgaatttgccggtattaagaacacatatcct

SEQ ID NO: 339988 - DNA, 75 bp, synthetic construct
  source 1..75: mol_type = other DNA
gtggatactttgctggcgacagaagaccgtcatttctacgagcatgatgggatcagtctctactcaatcggacgt

SEQ ID NO: 339989 - DNA, 75 bp, synthetic construct
  source 1..75: mol_type = other DNA
tggcgagtttaccgtacaggccaacagcattgagatgatccgccgtccgtttgatttcccggacagcaaagaagg

SEQ ID NO: 339990 - DNA, 75 bp, synthetic construct
  source 1..75: mol_type = other DNA
gctcagaccctgttctatggtgataccagtgttaacccgcagcagtttatggggctggcgtctcgttattccagc

SEQ ID NO: 339991 - DNA, 75 bp, synthetic construct
  source 1..75: mol_type = other DNA
gcaaatattgcgaagttgatggttaaagcactgcatcgcattccaaatcgtggcatgggtcgcccggtgttctac

SEQ ID NO: 339992 - DNA, 75 bp, synthetic construct
  source 1..75: mol_type = other DNA
cgctgaagctcgagcctttggtgaactggcgatgacgtcgcaatcaaaggcattgcgcaatatcttttttgccag

SEQ ID NO: 339993 - DNA, 75 bp, synthetic construct
  source 1..75: mol_type = other DNA
tggcgcagacatcaacatgatcggcaactgcaaaacggcgcaagaagcggaagcactggcgcggcaggggcaaca

SEQ ID NO: 339994 - DNA, 75 bp, synthetic construct
  source 1..75: mol_type = other DNA
ctgagcaagttattggcctgcatttcttcagtccggtggaaaaaatgccgctggtggagattattcctcatgcgg

SEQ ID NO: 339995 - DNA, 75 bp, synthetic construct
  source 1..75: mol_type = other DNA
gcctctcaaccgaaactctggccgcttatgcacacgaactggcagagtgggttctgggccaggaaagtgtacttg

SEQ ID NO: 339996 - DNA, 75 bp, synthetic construct
  source 1..75: mol_type = other DNA
cagagatgcagttaaatgaaaaagggtattattttgccgtgttggtgttagggctgttttcggcagcttcctatc

SEQ ID NO: 339997 - DNA, 75 bp, synthetic construct
  source 1..75: mol_type = other DNA
ccttgtgagcgtttggtcgagatgggcgcgcgtggggaaagtttttggaaaacaactgcaactgacctgcaataa

SEQ ID NO: 339998 - DNA, 75 bp, synthetic construct
  source 1..75: mol_type = other DNA
tggctaccttgaacctttcgacttcggtcaggctgcgttaggcgttgtctgcctgggatatgcgatatcgctgtc

SEQ ID NO: 339999 - DNA, 75 bp, synthetic construct
  source 1..75: mol_type = other DNA
accgctacctggaatatggcctgcaggcgttactgaaggaacacagtgtgatactggcgagggagtttttcctgc

SEQ ID NO: 340000 - DNA, 75 bp, synthetic construct
  source 1..75: mol_type = other DNA
acagaaggcgagtggtggacttcattccgtggtgtaccaatccgtgaaactgatgcgcttctggaaacagaagcc

SEQ ID NO: 340001 - DNA, 75 bp, synthetic construct
  source 1..75: mol_type = other DNA
cggtcagaattaaagatatcaacccgcagggcataaatcatgcgctgaagtacagttgggatcagctggagggca

SEQ ID NO: 340002 - DNA, 75 bp, synthetic construct
  source 1..75: mol_type = other DNA
tacagttgtgcgtcattcaccagatacgtaactcgattaaatatgtggcgtcaaaacaccataaagcgttcatgg

SEQ ID NO: 340003 - DNA, 75 bp, synthetic construct
  source 1..75: mol_type = other DNA
cactcattacggtcaaattactcatctacaaggtcgacgtatattccctgcgtcaggtctcgtgatgtatggcga

SEQ ID NO: 340004 - DNA, 75 bp, synthetic construct
  source 1..75: mol_type = other DNA
ttcaaattcatttgaagtgaaattagatgccactcatcaatatcgacatctgaataacttcatgatttcttttga

SEQ ID NO: 340005 - DNA, 75 bp, synthetic construct
  source 1..75: mol_type = other DNA
cagagaaaaatctttcagacaaagatcttactaatattagctgcatgtataccaatttttcaaacgctaatttaa

SEQ ID NO: 340006 - DNA, 75 bp, synthetic construct
  source 1..75: mol_type = other DNA
ttcaggactgaaaccttgctataacaaaaacaaccaatcatctgatgatattaactcggaaattgaaaccataca

SEQ ID NO: 340007 - DNA, 75 bp, synthetic construct
  source 1..75: mol_type = other DNA
cgttgtggaaacacaggaacatcaggaagtgggggctttccgtaaggtgatgccgcttctgacatggttccgtaa

SEQ ID NO: 340008 - DNA, 75 bp, synthetic construct
  source 1..75: mol_type = other DNA
ctgaattaatggttaggagtgatgtgtttttattgatatcaaaatgggaaggctttccgcgtagtattcttgagg

SEQ ID NO: 340009 - DNA, 75 bp, synthetic construct
  source 1..75: mol_type = other DNA
atcacgaaatctcacggataatagagataaaattaaaaatacaatatccacctctgaaattatagagtgcgcctc

SEQ ID NO: 340010 - DNA, 75 bp, synthetic construct
  source 1..75: mol_type = other DNA
agtgacagtatcgagaaacaagccaatgacagtaccgataaacaagccaagaacagtaccgagcaacaggacagt

SEQ ID NO: 340011 - DNA, 75 bp, synthetic construct
  source 1..75: mol_type = other DNA
acagtaccgagaaacaagccagtgacagtatcgagaaacaagccaatgacagtaccgataaacaagccaataaca

SEQ ID NO: 340012 - DNA, 75 bp, synthetic construct
  source 1..75: mol_type = other DNA
ctctaatcccgacaatctcgaattaaccttaaatcgatattcatcaacaacagaacaaatcatcgccaaaaccaa

SEQ ID NO: 340013 - DNA, 75 bp, synthetic construct
  source 1..75: mol_type = other DNA
gataataataacaagactgaaactttctcgtttacaaacttacaatgggaaaatttgctgcaacactatagagaa

SEQ ID NO: 340014 - DNA, 75 bp, synthetic construct
  source 1..75: mol_type = other DNA
aagaaatggtttacatgaatttgaatttaacgatctaaaaataacatttaatcgacaagatgataatgaaagcgt

SEQ ID NO: 340015 - DNA, 75 bp, synthetic construct
  source 1..75: mol_type = other DNA
ttttcgtaaagttcgccacttgacttatgtaaatttcaaaaacgcaaatctacgaaactgtaacttcagcggaaa

SEQ ID NO: 340016 - DNA, 75 bp, synthetic construct
  source 1..75: mol_type = other DNA
tgccggtgactactggtatgacgtgaatgacataaaagcgtgggtcagcgatacgctgaagacgtttgattttga

SEQ ID NO: 340017 - DNA, 75 bp, synthetic construct
  source 1..75: mol_type = other DNA
gggcagggtatgaacattggggttattgatgaccccgcgaaagattacaaaaccgcatcgtctccaacttaccag

SEQ ID NO: 340018 - DNA, 75 bp, synthetic construct
  source 1..75: mol_type = other DNA
caatccattgttgaatccattgttcttttgccgagtagcaatgaaagaaagttggaaagtgatacagggattaaa

SEQ ID NO: 340019 - DNA, 75 bp, synthetic construct
  source 1..75: mol_type = other DNA
gactatcgtaaaaaggcaaagagttcacgtaggctatctattttctttggtctattggcttttatgtctattctg

SEQ ID NO: 340020 - DNA, 75 bp, synthetic construct
  source 1..75: mol_type = other DNA
acaataacaagactgaaactttctcgtttacaaacttacaatgggaaaatttgctgcaatactacaaagaaaacc

SEQ ID NO: 340021 - DNA, 75 bp, synthetic construct
  source 1..75: mol_type = other DNA
acagtaccgataaacaagccaagaacagtaccgagcaacaggacagtaacagttttaatcaagcccgtttaaaga

SEQ ID NO: 340022 - DNA, 75 bp, synthetic construct
  source 1..75: mol_type = other DNA
aagatatcttcattcacgccaccagcccaaacgaaacattaaaaacagcagttacagcggaatggtttgaacgaa

SEQ ID NO: 340023 - DNA, 75 bp, synthetic construct
  source 1..75: mol_type = other DNA
acatggcagatgcgatcggcaagctgtttaaagcctataaagcgggtaatgtatcggaatacctggtccaaccag

SEQ ID NO: 340024 - DNA, 75 bp, synthetic construct
  source 1..75: mol_type = other DNA
ctatccggcacctgtattaagaaaatggaaaaaagatcatgaaagccttataagctcctgtcttgaaggttcgat

SEQ ID NO: 340025 - DNA, 75 bp, synthetic construct
  source 1..75: mol_type = other DNA
atttacgcggcgtcagttatgacggtctggatcgtagcgtggacgtggctatttcgcggttaagaaaaaaactgc

SEQ ID NO: 340026 - DNA, 75 bp, synthetic construct
  source 1..75: mol_type = other DNA
acaaactaataaatcatcttgatgcaaaaagtagcaatagtgaatttgtaagcacacccgttttagttccacgca

SEQ ID NO: 340027 - DNA, 75 bp, synthetic construct
  source 1..75: mol_type = other DNA
tggaaatcactttctgacatagcccaaaagctaaacaaactaataaatcatcttgacgccaaaagcagcaatagt

SEQ ID NO: 340028 - DNA, 75 bp, synthetic construct
  source 1..75: mol_type = other DNA
atacaaataattttaagcctattagcgataataaatctcaatcattgcgaatacactgtgtaagtgtacgattaa

SEQ ID NO: 340029 - DNA, 75 bp, synthetic construct
  source 1..75: mol_type = other DNA
tgtgatctgcgtaatgcagaattcgaaaatgcctcattagaaaaaatcgattttcgtaaagctcgtcacttgctt

SEQ ID NO: 340030 - DNA, 75 bp, synthetic construct
  source 1..75: mol_type = other DNA
aatcactggtggcgtttccacagttgatggcattgatgggcgaaaacccgcagtgggtacaaaacctcggcgatg

SEQ ID NO: 340031 - DNA, 75 bp, synthetic construct
  source 1..75: mol_type = other DNA
gacacaactggctgtgtctgacgctgccgcagttacgcttcctgcaacggtttccgcacctcccgtaacacccgc

SEQ ID NO: 340032 - DNA, 75 bp, synthetic construct
  source 1..75: mol_type = other DNA
taataaccattgagccagccaatccggatgtggtttatattccgaactacaacccaaacgtggtttacggcagtt

SEQ ID NO: 340033 - DNA, 75 bp, synthetic construct
  source 1..75: mol_type = other DNA
accatcgcgcgacagtcagcgtcaggctgcggcaagccagtttcggcaacgaacacactccacacctgagactac

SEQ ID NO: 340034 - DNA, 75 bp, synthetic construct
  source 1..75: mol_type = other DNA
tgccagattgaataacgatcaacggtcagcagtacgcgaacgtctctctgagcgcggagcaaggcgactggaaag

SEQ ID NO: 340035 - DNA, 75 bp, synthetic construct
  source 1..75: mol_type = other DNA
cagtccgcgtcgcctgagcagcgccaggcggcccgtgagaaaatgcagactagcccgcagaaccagcagcgaaga

SEQ ID NO: 340036 - DNA, 75 bp, synthetic construct
  source 1..75: mol_type = other DNA
atggataagaagcaagtaacggatttaaggtcggaactactcgattcacgttttggtgctaagtccatttcaact

SEQ ID NO: 340037 - DNA, 75 bp, synthetic construct
  source 1..75: mol_type = other DNA
cgtgaaggctataccaaagtacagaacgcctcttaccaggttgccgcttatctggcggatgaaatcgccaaactg

SEQ ID NO: 340038 - DNA, 75 bp, synthetic construct
  source 1..75: mol_type = other DNA
taccggtcgcccggacgaaggcatcccggcggtttgcttcaaactgaaagatggtgaagatccgggatacaccct

SEQ ID NO: 340039 - DNA, 75 bp, synthetic construct
  source 1..75: mol_type = other DNA
atcattacagagcctgcaacaaccgtcatttccattgagcccgccaatcctgatgtggtctatattcccaactac

SEQ ID NO: 340040 - DNA, 75 bp, synthetic construct
  source 1..75: mol_type = other DNA
caacgtcaggctgcggcacagcggtttaatgaggcggaacacgatgggagttatgacgacttccgcgagttcagc

SEQ ID NO: 340041 - DNA, 75 bp, synthetic construct
  source 1..75: mol_type = other DNA
atggataagaagcaagtaacggatttaaggtcggaactactcgattcacgttttggggctaagtcaatttctact

SEQ ID NO: 340042 - DNA, 75 bp, synthetic construct
  source 1..75: mol_type = other DNA
cccatgtgctggcgctaatttgcagtgccgggctttgtgccgcttccggtgctttgtatgtaaaaagccgcactg

SEQ ID NO: 340043 - DNA, 75 bp, synthetic construct
  source 1..75: mol_type = other DNA
ccgaaaccaccaaagacaagatctacgacttctttatgaattacggcaaaacgccggaagagaaagcggtgctgg

SEQ ID NO: 340044 - DNA, 75 bp, synthetic construct
  source 1..75: mol_type = other DNA
atgaacgctaagataattgcctcgctggccttcaccagcatgttaagcccggcacacgccgaagagcaggaaaag

SEQ ID NO: 340045 - DNA, 75 bp, synthetic construct
  source 1..75: mol_type = other DNA
ccgctgatcccaggcgatccgacgtctggcgcaagaatctttccgaaaccaccaaagacaagatctacgacttct

SEQ ID NO: 340046 - DNA, 75 bp, synthetic construct
  source 1..75: mol_type = other DNA
tgctttagttagacaacttaaagagcttcacatttcggtgcggatagtagaaaatttagttaggcaaatttcgcc

SEQ ID NO: 340047 - DNA, 75 bp, synthetic construct
  source 1..75: mol_type = other DNA
atggtgctgacgcttgctctatatattgcatctaaagctgcggttataacattacttatttatgtaatgtggtat

SEQ ID NO: 340048 - DNA, 75 bp, synthetic construct
  source 1..75: mol_type = other DNA
cttctttgccccggactacgcgggcattatccagggaatgcgtttcaacaaagtggatatcgcctggtacggcaa

SEQ ID NO: 340049 - DNA, 75 bp, synthetic construct
  source 1..75: mol_type = other DNA
atattgacgtcaacaatttcaaccgcatcaccggtgagcatcttactgataagaatatggcatggcggcacaatc

SEQ ID NO: 340050 - DNA, 75 bp, synthetic construct
  source 1..75: mol_type = other DNA
tggcggtcatcgtgacggcaacggctggcaacacaacggtgacaacatcaatattgacgtcaacaatttcaaccg

SEQ ID NO: 340051 - DNA, 75 bp, synthetic construct
  source 1..75: mol_type = other DNA
tggaaacgcctgtagaagcgcaaactgtgcctgttgtcactacagctacgcttccagcaacggtttccgcgccgc

SEQ ID NO: 340052 - DNA, 75 bp, synthetic construct
  source 1..75: mol_type = other DNA
gaagttgagctgagcgtgtacctggggaccgttgaaggtgtccccgtgaaagtccttcatcaggaagtggatggt

SEQ ID NO: 340053 - DNA, 75 bp, synthetic construct
  source 1..75: mol_type = other DNA
gacacaacagactgcgcctgacatctccgcagttacgcttcctgcaacggtttccgcgcctcctgtaacacctgc

SEQ ID NO: 340054 - DNA, 75 bp, synthetic construct
  source 1..75: mol_type = other DNA
tcagtccgcctcgcctgagcagcgccaggtgtttaaggaaaaagtacagcagcgcccactgaaccaacagcaacg

SEQ ID NO: 340055 - DNA, 75 bp, synthetic construct
  source 1..75: mol_type = other DNA
tggagacacaccgctgggcgcagtgattatgtcgatcgttatggctgggttacgtattgcctattttggcggcgg

SEQ ID NO: 340056 - DNA, 75 bp, synthetic construct
  source 1..75: mol_type = other DNA
agacctgatagggaaggttgaaatgactgagtggttagttgactttgctgcccagcttcgcaaaggagttcagtc

SEQ ID NO: 340057 - DNA, 75 bp, synthetic construct
  source 1..75: mol_type = other DNA
atccgcttgatggcctgtccggtgaatatgcggagaaatcccttggggaatgggcggaacagattcgtaaaggag

SEQ ID NO: 340058 - DNA, 75 bp, synthetic construct
  source 1..75: mol_type = other DNA
atctgtacactaaccattcccgtagtgtcttaatggaattgccgttattattcccggactacgatacggtgctgg

SEQ ID NO: 340059 - DNA, 75 bp, synthetic construct
  source 1..75: mol_type = other DNA
catcaatccagatgatctccaatggcatgattacgaaaaggctagcagtaagggtaaaatgtactgtgtagcgct

SEQ ID NO: 340060 - DNA, 75 bp, synthetic construct
  source 1..75: mol_type = other DNA
gcgctctgacgctgacttttgcatccgctcttgagtatgtcggatggcctaaatcgctttctgttgccattggtg

SEQ ID NO: 340061 - DNA, 75 bp, synthetic construct
  source 1..75: mol_type = other DNA
ccgaaccgatccagaacggtcgccagcaacgcagcggcggcggtcgtgggcagagcggtggtcgtagtcaacagc

SEQ ID NO: 340062 - DNA, 75 bp, synthetic construct
  source 1..75: mol_type = other DNA
accatctggctgaacagctcaataaagatggcatccgtagtgcggcgatccacggtaataaatcgcaaggtgcgc

SEQ ID NO: 340063 - DNA, 75 bp, synthetic construct
  source 1..75: mol_type = other DNA
accgcatgctcgacatgggctttatccacgatatccgtcgcgtgttaacaaaactgccagcgaagcgccagaacc

SEQ ID NO: 340064 - DNA, 75 bp, synthetic construct
  source 1..75: mol_type = other DNA
cgcctcggcgatgccaaaccggcaggcgaacaacaacgccgtcgccgtccgcgtaaacctgccgctgcgcagtaa

SEQ ID NO: 340065 - DNA, 75 bp, synthetic construct
  source 1..75: mol_type = other DNA
gccctgatatcctgcgcgccgttgccgagcaaggttaccgtgaacccacccctattcagcagcaggcgatccctg

SEQ ID NO: 340066 - DNA, 75 bp, synthetic construct
  source 1..75: mol_type = other DNA
gcaaaaccgtctcgtcgtcttggtgatgccaaaccggcaggcgagcaacaacgtcgccgccgtccgcgtaaacct

SEQ ID NO: 340067 - DNA, 75 bp, synthetic construct
  source 1..75: mol_type = other DNA
gacgtacagaaggtcttctctgaggaagggctggacgcttttgattacggtattttgtgtcgtgatgaatatccg

SEQ ID NO: 340068 - DNA, 75 bp, synthetic construct
  source 1..75: mol_type = other DNA
tgatgttcagcccgccgcttaccgccgtaccggaggccgcacctcatgcgtggctgccgtcaccggtctgggcgg

SEQ ID NO: 340069 - DNA, 75 bp, synthetic construct
  source 1..75: mol_type = other DNA
aggccgctactgggtggctgacgccatgaacacgcaggggctgacggtcaacccggactttatccgcgccctgaa

SEQ ID NO: 340070 - DNA, 75 bp, synthetic construct
  source 1..75: mol_type = other DNA
cctgcgcggcctgatgttcagcccgccgcttaccgctgtaccggaggccgcacctcatgcgtggctgccgtcacc

SEQ ID NO: 340071 - DNA, 75 bp, synthetic construct
  source 1..75: mol_type = other DNA
caggcggcgcattttcttccctgcgcctgcgtggcctgatgttcagcccgccgcttgccgccgtgccggaggccg

SEQ ID NO: 340072 - DNA, 75 bp, synthetic construct
  source 1..75: mol_type = other DNA
aaaccgttgacctcaccgacacccgcgactacgggcggttaatcgccgccagtctgggcgaggaatggagtggct

SEQ ID NO: 340073 - DNA, 75 bp, synthetic construct
  source 1..75: mol_type = other DNA
attggtgtgcgcaatgccgaaaacaccctctaccagaacgtgctgcaacaggtgtcccgcaactacgccgatatg

SEQ ID NO: 340074 - DNA, 75 bp, synthetic construct
  source 1..75: mol_type = other DNA
ggcctgccacggggcgggagcgtcgcggaaaaaggctagtttttgcatttttatcggccaccatcatctttgcat

SEQ ID NO: 340075 - DNA, 75 bp, synthetic construct
  source 1..75: mol_type = other DNA
atgttggtggcttcttcattggagtacatatgcccccacgaaccccaaaaacctgccgtgttcgcggctaccgca

SEQ ID NO: 340076 - DNA, 75 bp, synthetic construct
  source 1..75: mol_type = other DNA
ccgacattcatgttttcaaaagaaccgccatttatactggcgaggatgccgcagcgaccggatcatcaacaataa

SEQ ID NO: 340077 - DNA, 75 bp, synthetic construct
  source 1..75: mol_type = other DNA
atctgtttgctaagtatgtgcatatttttcctcttttctttccggcagaacgaagcctcgacgatatcactatac

SEQ ID NO: 340078 - DNA, 75 bp, synthetic construct
  source 1..75: mol_type = other DNA
ctgaaaaacttccgcctgccgggacaggtatttctgaccgggaagagtatgacggatgcggaagaatatggggaa

SEQ ID NO: 340079 - DNA, 75 bp, synthetic construct
  source 1..75: mol_type = other DNA
tacagaccaaaaaattcggcagaaaacgaccaacccgtatcttctccatcagaggatattttaaccgatctcagc

SEQ ID NO: 340080 - DNA, 75 bp, synthetic construct
  source 1..75: mol_type = other DNA
aagtggcacgccgcaataccgcgtctgatcaggtgacacagcacgttcactttgtcgataagaaacgtaaacggg

SEQ ID NO: 340081 - DNA, 75 bp, synthetic construct
  source 1..75: mol_type = other DNA
atccgctgcgtgccggggcaaatccgaagaaatccgcgttcagtgcctggaaggccaggttacgcgagggggtgc

SEQ ID NO: 340082 - DNA, 75 bp, synthetic construct
  source 1..75: mol_type = other DNA
tgggaggaaagaaaatatcttactcattgagtccagaaaaggtaatgcagcaccaaaatatacaaaggtgaggtt

SEQ ID NO: 340083 - DNA, 75 bp, synthetic construct
  source 1..75: mol_type = other DNA
atatggtatcaaaaaacaatgatgcaaaaatagccattaatattaactggggggttcttgtttataatgaaccag

SEQ ID NO: 340084 - DNA, 75 bp, synthetic construct
  source 1..75: mol_type = other DNA
aggaagaaaaggaaatacactactcatagaatcccggaaaagtaatgcagcaccggaatatacgaaggtagaatt

SEQ ID NO: 340085 - DNA, 75 bp, synthetic construct
  source 1..75: mol_type = other DNA
acgccaggtactgaaggaggataacggtaacgtttcgccaaccgcaaaatccccggcagagcgcaagagagcgca

SEQ ID NO: 340086 - DNA, 75 bp, synthetic construct
  source 1..75: mol_type = other DNA
ttgcagacgatgcaggggcgggtacttgatggtgatttaatcactggatgggaaaaacgccaggtgctgaaagag

SEQ ID NO: 340087 - DNA, 75 bp, synthetic construct
  source 1..75: mol_type = other DNA
tttgtgcaatgaaattatcaggaaagaagtgacagacaaaaaggaaaaaacgcatgaacagaaaacagaaacaag

SEQ ID NO: 340088 - DNA, 75 bp, synthetic construct
  source 1..75: mol_type = other DNA
cacagcgactgattgagcggatggaagcgctggcgaaagaagaaaatgtcaacatccaaaaaatagctgaatgtg

SEQ ID NO: 340089 - DNA, 75 bp, synthetic construct
  source 1..75: mol_type = other DNA
aacaaaatggctgaagtaggtgaactgttgaaatccggagcggcaaatgttagtgcatctcttgaacaaaccagc

SEQ ID NO: 340090 - DNA, 75 bp, synthetic construct
  source 1..75: mol_type = other DNA
atttatttttttctgtattagtttttaatgataacgaatataaaattaccgatgccgccgtcaatttatttatcc

SEQ ID NO: 340091 - DNA, 75 bp, synthetic construct
  source 1..75: mol_type = other DNA
tacttattttttctgtgttcgtttttaattataacgaatctcaaattaccgatgccgccgtcaatttatttatcc

SEQ ID NO: 340092 - DNA, 75 bp, synthetic construct
  source 1..75: mol_type = other DNA
aacatccaaaaaatagctgaatgtggacagatagttcttcgtcgtgaaaaagacctcaaacaactgatgtttggc

SEQ ID NO: 340093 - DNA, 75 bp, synthetic construct
  source 1..75: mol_type = other DNA
gaagcaggccaggcattctaccaaaggtgttgaagttggcagaatttttgccgggatcatcttctgtgtatgcct

SEQ ID NO: 340094 - DNA, 75 bp, synthetic construct
  source 1..75: mol_type = other DNA
gatcctggctgcttcaccgcaggcggatgccggaccatcactccgtgatcagatcatggcactggatgaggcaaa

SEQ ID NO: 340095 - DNA, 75 bp, synthetic construct
  source 1..75: mol_type = other DNA
aaaggtgctacagaacaaattattgatgctttgcgacaagtcattattgattttaatgaaaatttaactgaacag

SEQ ID NO: 340096 - DNA, 75 bp, synthetic construct
  source 1..75: mol_type = other DNA
aaaacaccttggattgtttcttacgataacactcctgagatccaagctatgtataagacatcatcattagtatat

SEQ ID NO: 340097 - DNA, 75 bp, synthetic construct
  source 1..75: mol_type = other DNA
atcctggcggtaaaggcaagcttgcaaatttcatgcttcggattattgaagaaaataatctttcgcctatacatt

SEQ ID NO: 340098 - DNA, 75 bp, synthetic construct
  source 1..75: mol_type = other DNA
ttgaaaagcacctgttcctcaaagaagaagtaacaaaatccgatgttctaaatttatctgtacgtgatcaaccca

SEQ ID NO: 340099 - DNA, 75 bp, synthetic construct
  source 1..75: mol_type = other DNA
acagcgggtaacgtcagtgtacgttatcaggatgggatgctgattacgcctacaggcattccgtatgaaaaactg

SEQ ID NO: 340100 - DNA, 75 bp, synthetic construct
  source 1..75: mol_type = other DNA
ttcgaatgataacgaaaaaaaacaggtttcttcagagagattaacgcttgataattatctcgatgatttacattt

SEQ ID NO: 340101 - DNA, 75 bp, synthetic construct
  source 1..75: mol_type = other DNA
tgttcatctcgttgtggatggggccgcgcatgattgctcatttgcaaaaactttcctttggtcaggttgttcgta

SEQ ID NO: 340102 - DNA, 75 bp, synthetic construct
  source 1..75: mol_type = other DNA
gctcctttaaactgcgcgggcaacgtattttccgcatggcgccgattcatcaccactatgaactgaaaggctggc

SEQ ID NO: 340103 - DNA, 75 bp, synthetic construct
  source 1..75: mol_type = other DNA
atgtttcaaagagtgggcgcaagtctggccgctgctttaaatgaacgtatcaaggagtatgcaatcatgcagaac

SEQ ID NO: 340104 - DNA, 75 bp, synthetic construct
  source 1..75: mol_type = other DNA
caggaagtgtcctgctgttatccggttgcgccggaatgaaaagtgaatttgactgcaatgccacagccagtaata

SEQ ID NO: 340105 - DNA, 75 bp, synthetic construct
  source 1..75: mol_type = other DNA
gatgagttatgggcaaaaacgagcaaggctggtctagaatttcaaacattggtacgtaacaaaacggttatgttt

SEQ ID NO: 340106 - DNA, 75 bp, synthetic construct
  source 1..75: mol_type = other DNA
acgcgcagtatcagggtgcagaccgcgtgaaagcactgctgggcctgagcggtatttttgccgatgatctgccgc

SEQ ID NO: 340107 - DNA, 75 bp, synthetic construct
  source 1..75: mol_type = other DNA
accatgtcatggagggggaatgttaaaattggagaggttgtgacatacatcaggttaaacgtacgaagcgaggcc

SEQ ID NO: 340108 - DNA, 75 bp, synthetic construct
  source 1..75: mol_type = other DNA
agcatcatccacggcatcagggaaagcagcgacagagagtctcattattcctgatcgtggcagtgcgcgccctga

SEQ ID NO: 340109 - DNA, 75 bp, synthetic construct
  source 1..75: mol_type = other DNA
cgttctgatgcaataaaacaaatatcgctaccccgtcttgccggttctggttcacaaccattaaccagccctcta

SEQ ID NO: 340110 - DNA, 75 bp, synthetic construct
  source 1..75: mol_type = other DNA
gtgctggtggtattggtgggttacggcatcattggctttgttgatgattatcgcaaagtggtgcgtaaagacacc

SEQ ID NO: 340111 - DNA, 75 bp, synthetic construct
  source 1..75: mol_type = other DNA
cttcgcggtattgttggcgatggctccaccgaattaaaaccgctggtggatgtgccggttatcttcccgcgcggc

SEQ ID NO: 340112 - DNA, 75 bp, synthetic construct
  source 1..75: mol_type = other DNA
gatatccacaatctggcagagcttcgggggattacgctggcggaagatggcgcgctacgaatcggttccgcgacg

SEQ ID NO: 340113 - DNA, 75 bp, synthetic construct
  source 1..75: mol_type = other DNA
acgccaacgctaatttatgacgcgaaactggagatccactccccacgcggtgttcgtttcgtcccgattaatggc

SEQ ID NO: 340114 - DNA, 75 bp, synthetic construct
  source 1..75: mol_type = other DNA
aagcggggctgaatcagtctgacgatccggcggagatcgctaaatacctgaaagcgaactcggttgatacggtga

SEQ ID NO: 340115 - DNA, 75 bp, synthetic construct
  source 1..75: mol_type = other DNA
ggtctggcgcgtgcagtgcaggacggcctgaagaaaggcaatgctaacgtggtgttctttgatggcatcaccgcc

SEQ ID NO: 340116 - DNA, 75 bp, synthetic construct
  source 1..75: mol_type = other DNA
atgcccgtagcactaaactcccagctcggcagtaaagagcaggcagacgcccagttggcgcaggcgatcatgtct

SEQ ID NO: 340117 - DNA, 75 bp, synthetic construct
  source 1..75: mol_type = other DNA
gccgtgctgatcgccatttacggcgtttatctcgatcaaaaaattcgcagccgtattgatggcaaggtctggcaa

SEQ ID NO: 340118 - DNA, 75 bp, synthetic construct
  source 1..75: mol_type = other DNA
caccgctttctgcgctgcgttcggtaatcgcggaagatggcaaagtgctgtatcagagcttcccgcaggcggaac

SEQ ID NO: 340119 - DNA, 75 bp, synthetic construct
  source 1..75: mol_type = other DNA
ctcaactcaactttattaatctgttggatcaggcaggatatgctctttcagaaattgttgtaaaacgcttcagtg

SEQ ID NO: 340120 - DNA, 75 bp, synthetic construct
  source 1..75: mol_type = other DNA
atggttcatctgctgatgcgtattacattgcaatgggatattaacgaaatgtcatatttttattctgcatcgaca

SEQ ID NO: 340121 - DNA, 75 bp, synthetic construct
  source 1..75: mol_type = other DNA
ctgaccgccgggcgcacggtgcagggggcgagtacgctgactcaacagttagtgaagaacctgttcctctctagc

SEQ ID NO: 340122 - DNA, 75 bp, synthetic construct
  source 1..75: mol_type = other DNA
agcggtggcatgcgtgtcttgccggtctggaccagcgatccgcaatcgctgtgccagcagagtgagatgcagcag

SEQ ID NO: 340123 - DNA, 75 bp, synthetic construct
  source 1..75: mol_type = other DNA
tttgttggcgcggtgacggcggcatatcagcagctgtgtgaacgcggtgcgcgcgagtgtgtggctgcgctgtaa

SEQ ID NO: 340124 - DNA, 75 bp, synthetic construct
  source 1..75: mol_type = other DNA
cgacgtcgtttggcactggcgaacttattctcgccgccctggaacacaatattgataccgttattctatgcctgg

SEQ ID NO: 340125 - DNA, 75 bp, synthetic construct
  source 1..75: mol_type = other DNA
gatctacatcaacgactacggcgggcgtccggtactgccgttcagctgcagcggagaccgttgtacggcggtgaa

SEQ ID NO: 340126 - DNA, 75 bp, synthetic construct
  source 1..75: mol_type = other DNA
gcgaatgtactgcagatagctctgcagaccaaaatcaagctgttttaccgcccgaaagccattgaggcgaaaccc

SEQ ID NO: 340127 - DNA, 75 bp, synthetic construct
  source 1..75: mol_type = other DNA
gcggctatgaaactattgccgacaccatgactaacccggattatcgcaaagcggcctttgccctgatgatgcagg

SEQ ID NO: 340128 - DNA, 75 bp, synthetic construct
  source 1..75: mol_type = other DNA
attcaatatacccaacatttaaaatatgcagcattggcgattgtcggtgaaggtaaattagaccgtcaaagcctg

SEQ ID NO: 340129 - DNA, 75 bp, synthetic construct
  source 1..75: mol_type = other DNA
gcatcgtttacagacgccgaagggctatcagtctctgttaatgggatggggctggcggcaattcaccacattgac

SEQ ID NO: 340130 - DNA, 75 bp, synthetic construct
  source 1..75: mol_type = other DNA
gtgacatgaacgccgcggaacttagcgagcaggatgtctggggtaaatccaccctgcgggtgacgaaatatggta

SEQ ID NO: 340131 - DNA, 75 bp, synthetic construct
  source 1..75: mol_type = other DNA
cacgcgaagaccgggaatttatcgaagccagtgtcggaaaaatgaccgtcgaggaaatggcgaaaaaactgaacg

SEQ ID NO: 340132 - DNA, 75 bp, synthetic construct
  source 1..75: mol_type = other DNA
taactacttctggcttatctctgttcctgttttctctggctgtattaggatttgttatctggcactttggcgatg

SEQ ID NO: 340133 - DNA, 75 bp, synthetic construct
  source 1..75: mol_type = other DNA
tgctgaataagaccggtggagggtatcagattgataatccgacaccgtattatgtgacggtaattggaattggcg

SEQ ID NO: 340134 - DNA, 75 bp, synthetic construct
  source 1..75: mol_type = other DNA
tcatgggcgccagttgcccatgacatcttacccgctcgacaacctggagctggaacgtaccgttgataaggtgtt

SEQ ID NO: 340135 - DNA, 75 bp, synthetic construct
  source 1..75: mol_type = other DNA
accggttctagggatgaacgtaaggctcagcttcgtgctcttcgtgagaaggacttagccgaagaagggaggttt

SEQ ID NO: 340136 - DNA, 75 bp, synthetic construct
  source 1..75: mol_type = other DNA
taatggtcgcccggactgggataaagtgggcgcacagttcgttgcagacgttgtgccgttcgaaatgatgaagct

SEQ ID NO: 340137 - DNA, 75 bp, synthetic construct
  source 1..75: mol_type = other DNA
atcgggcgctcaaatcgctacgtaagatggacaagcagaacgcgcgacggattgtggattttatggatttacgta

SEQ ID NO: 340138 - DNA, 75 bp, synthetic construct
  source 1..75: mol_type = other DNA
cggaatgttaatcagtgcctatgcagttggcgtaatggtgggcgcgccgctgatgacgcttctactttctcatcg

SEQ ID NO: 340139 - DNA, 75 bp, synthetic construct
  source 1..75: mol_type = other DNA
acgtactttccgccatcgcgccggattatatgaccctgatgctttcacgcattttgaccagcctgaatcacgggg

SEQ ID NO: 340140 - DNA, 75 bp, synthetic construct
  source 1..75: mol_type = other DNA
tttatatccccttcactgcagacgttgtctctgacgggttgcagtaatatcgtgttgccggaaaaactcccaaaa

SEQ ID NO: 340141 - DNA, 75 bp, synthetic construct
  source 1..75: mol_type = other DNA
cagtctttggaagcctttggccgctataaatcccgccctgctttccaggactggatctaccgtttgaagaaaggc

SEQ ID NO: 340142 - DNA, 75 bp, synthetic construct
  source 1..75: mol_type = other DNA
cggagataccaatgataaaggcgaatccgttatttaacatcgcccagtgtgatgacctgccggcatatttttacg

SEQ ID NO: 340143 - DNA, 75 bp, synthetic construct
  source 1..75: mol_type = other DNA
tgggccaacgaatcctgtctctgcgatgatcaacgagtcattacggtgagtgttgatggtcagcgacgttccgtg

SEQ ID NO: 340144 - DNA, 75 bp, synthetic construct
  source 1..75: mol_type = other DNA
ttacggggcgcgttaacccctcggattacggcaattttgatggccgatacgtgagggatgtccgacttggcacac

SEQ ID NO: 340145 - DNA, 75 bp, synthetic construct
  source 1..75: mol_type = other DNA
ggaaggcggctttgctcaggggacgcttgagatcctcgaaggcgggaattatggaagaacgcaacgttataccac

SEQ ID NO: 340146 - DNA, 75 bp, synthetic construct
  source 1..75: mol_type = other DNA
ccaggtatttacagcgttacaggtaaagcgaccaacggtccaatactggacggaaacggcgtgacagtcctcggt

SEQ ID NO: 340147 - DNA, 75 bp, synthetic construct
  source 1..75: mol_type = other DNA
tgggcggcttctggatgcgtgagcttggtctgtatgacgatgccggaacactgattgcggtcgccaacatggcag

SEQ ID NO: 340148 - DNA, 75 bp, synthetic construct
  source 1..75: mol_type = other DNA
cacattcacacacggttgctattggctcacacgggcactctattaccgttaatgctacaggtaataccgaaaaca

SEQ ID NO: 340149 - DNA, 75 bp, synthetic construct
  source 1..75: mol_type = other DNA
ttgtatggtcgatctctcgggatacatcgaatcaaaacaacacctacaactatacgattccaatccccggataac

SEQ ID NO: 340150 - DNA, 75 bp, synthetic construct
  source 1..75: mol_type = other DNA
cagagtcgatggagtgagcagggagggtatttttctttgagttttacccgagtaaaggaaaatagtgccattaat

SEQ ID NO: 340151 - DNA, 75 bp, synthetic construct
  source 1..75: mol_type = other DNA
atctttttataggtgcgagttttctttctgttcaagctcaggataatatttattatcaaaaaaatataaactcag

SEQ ID NO: 340152 - DNA, 75 bp, synthetic construct
  source 1..75: mol_type = other DNA
atgagactcgagttttcaatttatcgctataatccggatgttgatgatgctccgcgtatgcaggattacaccctg

SEQ ID NO: 340153 - DNA, 75 bp, synthetic construct
  source 1..75: mol_type = other DNA
accagtttgacccggtactgaaacagctggcacagcagtacggcttttccgtttttccctacaccctggatggtc

SEQ ID NO: 340154 - DNA, 75 bp, synthetic construct
  source 1..75: mol_type = other DNA
gatggctatgataacctcttcatatctggaggtggttcacttggcataacagataatagttatacagtacttgac

SEQ ID NO: 340155 - DNA, 75 bp, synthetic construct
  source 1..75: mol_type = other DNA
gaaaatcaacagggttggggcaacgtgatgtatatccctgctgcgccaatgtgcgagaaaaatcgggcttatgca

SEQ ID NO: 340156 - DNA, 75 bp, synthetic construct
  source 1..75: mol_type = other DNA
gcagagcagcgcgaacagattaaacgtcgcggttgtgcggtgataaaaggccatttcccccgcgaacaagcgcta

SEQ ID NO: 340157 - DNA, 75 bp, synthetic construct
  source 1..75: mol_type = other DNA
ggattttcttttgagagttcagagaatgagaaggaactctttttattaaaagataaaacaatttattcctgttca

SEQ ID NO: 340158 - DNA, 75 bp, synthetic construct
  source 1..75: mol_type = other DNA
gcatccactgttgattgaggcgttaaccagcattccacaactcgaagccggagactccgtctggtggcactgcga

SEQ ID NO: 340159 - DNA, 75 bp, synthetic construct
  source 1..75: mol_type = other DNA
aagttctgcccatttcagagaaatggcatccactactgcttaaagcgctgacttccattcccgcgataacagcag

SEQ ID NO: 340160 - DNA, 75 bp, synthetic construct
  source 1..75: mol_type = other DNA
agttgaagagtacacggtagataacactacaaaatgttcggtgttccgcacgtttcaaggctggacggcgctctc

SEQ ID NO: 340161 - DNA, 75 bp, synthetic construct
  source 1..75: mol_type = other DNA
atcgggcgatattcgcgtactggtggcaactgacattgctgcgcgtggcctggatatcgaagagttgccgcacgt

SEQ ID NO: 340162 - DNA, 75 bp, synthetic construct
  source 1..75: mol_type = other DNA
tgagcagcttaaccagcttggctcatttttatccagtaaacctcgcttaagttctgttggtgggaaattacaaaa

SEQ ID NO: 340163 - DNA, 75 bp, synthetic construct
  source 1..75: mol_type = other DNA
ccgaacgtgacgctacgtgtaccggcctcgctgattgcgttgcatcgcgataatgatcttcaggagctggagctg

SEQ ID NO: 340164 - DNA, 75 bp, synthetic construct
  source 1..75: mol_type = other DNA
gtttccgctgacgcgccgccatgcgttgcagtatgtgcaaccagggctggcgctggtgggcgatgcggcgcacac

SEQ ID NO: 340165 - DNA, 75 bp, synthetic construct
  source 1..75: mol_type = other DNA
tcctgcaacaggcgttgtggcaggcgctggaagcgcatccgaaagtaacgttacgtgtgccaggctcgctgattg

SEQ ID NO: 340166 - DNA, 75 bp, synthetic construct
  source 1..75: mol_type = other DNA
gaagcgggtaattacacggtaacacgtgtacttggtggtgatgttaaggttttacaggaagttgtgaaggagcag

SEQ ID NO: 340167 - DNA, 75 bp, synthetic construct
  source 1..75: mol_type = other DNA
atggccgggtcatcacaccagattcccttaaaaaagcatttgaatatcagcagagtaataatcaagccaattatg

SEQ ID NO: 340168 - DNA, 75 bp, synthetic construct
  source 1..75: mol_type = other DNA
gttgatgtgctggtggcaacgccgggacgtttgctggacctggaacaccagaacgcggtgaagctggatcaggtt

SEQ ID NO: 340169 - DNA, 75 bp, synthetic construct
  source 1..75: mol_type = other DNA
agaagactctctgtctttgcttgctgatttttctcgtcagcatgcagtagaaagagctgtcgcaataacccagca

SEQ ID NO: 340170 - DNA, 75 bp, synthetic construct
  source 1..75: mol_type = other DNA
cttgctaaaaatgtattatccggtggaaaaggtaatgacaagttgtacggcagtgagggagcagatctgcttgat

SEQ ID NO: 340171 - DNA, 75 bp, synthetic construct
  source 1..75: mol_type = other DNA
tgtatgggaatgatgcattagcctatggaagtcaggataatcttaatccattaattaatgaaatcagcaaaatca

SEQ ID NO: 340172 - DNA, 75 bp, synthetic construct
  source 1..75: mol_type = other DNA
cccggggtaattatacttctaatgatgcatttgttgaggggcatctggtttcagatacaaatgtcagttatcgtg

SEQ ID NO: 340173 - DNA, 75 bp, synthetic construct
  source 1..75: mol_type = other DNA
ggtgattttgtcgaacgccatccttcggtaaaaatgctggcgctctctttcctgattctggtgggctttaccctg

SEQ ID NO: 340174 - DNA, 75 bp, synthetic construct
  source 1..75: mol_type = other DNA
atggaagcgctgaagcacgtcaacgactggctgggggaagaagtgatccgctttaaaccttacgccctgctggaa

SEQ ID NO: 340175 - DNA, 75 bp, synthetic construct
  source 1..75: mol_type = other DNA
gcctgactatgcttactgacggtacacagcaacatgatattggtgaagcactgaagcgcgatccagcccttagcg

SEQ ID NO: 340176 - DNA, 75 bp, synthetic construct
  source 1..75: mol_type = other DNA
tccgtaatgaactcattccattacaggagagaataaagtcaataaatgaatggttagatatggaagtcataaaat

SEQ ID NO: 340177 - DNA, 75 bp, synthetic construct
  source 1..75: mol_type = other DNA
ctatgtggaatgcgtacagatggatcgctggtatgagccgcctgtgagtttcgacggactggcgcgaaccttccg

SEQ ID NO: 340178 - DNA, 75 bp, synthetic construct
  source 1..75: mol_type = other DNA
tccgctacagaagcggctgcaagaacttaaccaatgggttggtgaagaggtagctcgctttgaatcatattgtct

SEQ ID NO: 340179 - DNA, 75 bp, synthetic construct
  source 1..75: mol_type = other DNA
agaggcattccatatgcaacctctacgttcctcgacaatggtaatgaggggagtgcctggagaaaatgtatgggg

SEQ ID NO: 340180 - DNA, 75 bp, synthetic construct
  source 1..75: mol_type = other DNA
cgtaccgagcagggaaaatgaattcaggaaactttctctcgaacaagagaaaaaacacatcaagataaatgaaaa

SEQ ID NO: 340181 - DNA, 75 bp, synthetic construct
  source 1..75: mol_type = other DNA
agtcgtacatattttctgcaataatccacatttgcaaggataacttcaccagtaatgatgtagcaaaaattcttg

SEQ ID NO: 340182 - DNA, 75 bp, synthetic construct
  source 1..75: mol_type = other DNA
gttcatgaatgttaaggcggcatcccgtgatgatgtgctggctgcgcaccgtgttccaccgcaactgatgggggc

SEQ ID NO: 340183 - DNA, 75 bp, synthetic construct
  source 1..75: mol_type = other DNA
tacattaacggcagtcatgcaggcttcatcatgtacatgaccgatgcagcgcagaaccaggaggatgtgaacaac

SEQ ID NO: 340184 - DNA, 75 bp, synthetic construct
  source 1..75: mol_type = other DNA
aaggacggacttcagatcatcccgttgtcagaagtcgcagcgaaagatgaatttctgaacatcaagaacgtgagt

SEQ ID NO: 340185 - DNA, 75 bp, synthetic construct
  source 1..75: mol_type = other DNA
aaaccgtaactgcagaagaaactaaaaaacccgttgcggaggctttcagctttggtgatcccattcctgtactgg

SEQ ID NO: 340186 - DNA, 75 bp, synthetic construct
  source 1..75: mol_type = other DNA
ctgcaattacattaaaacaaaatcagtagatgtcatcgttgatgatgttgataatgttgttaacctttttatagg

SEQ ID NO: 340187 - DNA, 75 bp, synthetic construct
  source 1..75: mol_type = other DNA
agcccggcaaacgtcctggcatcagtctgcgctttactttaagcgcaatgtattactcggttgctacatcccgca

SEQ ID NO: 340188 - DNA, 75 bp, synthetic construct
  source 1..75: mol_type = other DNA
taaattacggcacgccctggcgaaatacatgcgacgcggaagcgatcttgaatcatggtggtatgtgcaggatgg

SEQ ID NO: 340189 - DNA, 75 bp, synthetic construct
  source 1..75: mol_type = other DNA
ctcaggactccttgatggttctctcaatagcaaattcactttcctttttggtgacgacacacatggaaactatca

SEQ ID NO: 340190 - DNA, 75 bp, synthetic construct
  source 1..75: mol_type = other DNA
gcgttttaataaaaatagacataatgcagaaggtagactttcaggtcgtataaacaatcgatttggagatttaaa

SEQ ID NO: 340191 - DNA, 75 bp, synthetic construct
  source 1..75: mol_type = other DNA
aggaagaagctctattggtgatatgcaatgggatattttcgttcagggagggaatattgttaatgataatgatcg

SEQ ID NO: 340192 - DNA, 75 bp, synthetic construct
  source 1..75: mol_type = other DNA
accgccattcagcagcaccgtggttgggtgaaggcggaagacagcccgcttggcggtttacggctggtgatttgg

SEQ ID NO: 340193 - DNA, 75 bp, synthetic construct
  source 1..75: mol_type = other DNA
gagtgtttgcgatcaacgaactgatgccggtgatggaggcgatgaagcacgttaatgactggctgggtgaggagg

SEQ ID NO: 340194 - DNA, 75 bp, synthetic construct
  source 1..75: mol_type = other DNA
tttggtgatgtggagaaggcggcaagagtgtttgcgatcaacgaactgatgccggtgatggaggcgatgaagcac

SEQ ID NO: 340195 - DNA, 75 bp, synthetic construct
  source 1..75: mol_type = other DNA
ctgaaagaaacgttacagggtgcgcgtggtggtggtgcatttaaaaacgtgctcattcatgcgcccaacgggggc

SEQ ID NO: 340196 - DNA, 75 bp, synthetic construct
  source 1..75: mol_type = other DNA
cacgcgatcgtgaatctggcggtacgggtctggggctggcgattgtcgaaaccgccattcagcagcaccgtggtt

SEQ ID NO: 340197 - DNA, 75 bp, synthetic construct
  source 1..75: mol_type = other DNA
aagattgaagtgggctttgcggtagataaagacggtatcaccattacggtggacgacgatggtcctggcgttagc

SEQ ID NO: 340198 - DNA, 75 bp, synthetic construct
  source 1..75: mol_type = other DNA
ccctggttgctcccggtaagcagcacgaacaaccagcgttgtgtgaatcatatttctgaaccggataacgaaatt

SEQ ID NO: 340199 - DNA, 75 bp, synthetic construct
  source 1..75: mol_type = other DNA
gaagaaatccgctttcagtgcctggaaggccagattgcgcgagggggtgccaccagaggccatgctggatggtgt

SEQ ID NO: 340200 - DNA, 75 bp, synthetic construct
  source 1..75: mol_type = other DNA
gggcagatccagcatatggttggcggcaacggcgcaaaagtgattgtcgccattaataaagataaaaatgcgcca

SEQ ID NO: 340201 - DNA, 75 bp, synthetic construct
  source 1..75: mol_type = other DNA
gctcttttaccgtctttccggaacgtttcgccaggcgaatccgcaactcgaacattgcgcgattcgcattaaccc

SEQ ID NO: 340202 - DNA, 75 bp, synthetic construct
  source 1..75: mol_type = other DNA
aggattatggaccgcatgaccatgaacggtggtcgatgggtgacgtttaactgggatagctggcgtccaaatgtc

SEQ ID NO: 340203 - DNA, 75 bp, synthetic construct
  source 1..75: mol_type = other DNA
cagcgtatgcgctgaaagccgattcgggcgctgtgcagcaggtgatgaccgcaaggccggagcaatcacaccaac

SEQ ID NO: 340204 - DNA, 75 bp, synthetic construct
  source 1..75: mol_type = other DNA
atgcaatggagtggttcgattttggtgtctatggttttgttgcttacgcattaggtaaagtctttttcccgggcg

SEQ ID NO: 340205 - DNA, 75 bp, synthetic construct
  source 1..75: mol_type = other DNA
cgatgttcccgacgcatatccgatacagcgcgctggcggcggcatttaatatttcggtgctggttgccggtctga

SEQ ID NO: 340206 - DNA, 75 bp, synthetic construct
  source 1..75: mol_type = other DNA
tgtgggacgagtggattatccggatgtgttcgaacaggtctggcgggagtacccgttgcgtgccggagcaaaccc

SEQ ID NO: 340207 - DNA, 75 bp, synthetic construct
  source 1..75: mol_type = other DNA
aaggccagattacgcgagggggtgccaccagaggccatgctggatggtgtgaggcgttacgcgagatacctggcg

SEQ ID NO: 340208 - DNA, 75 bp, synthetic construct
  source 1..75: mol_type = other DNA
ccggaaaacaccgggcagtctgtgggacgagtggattatccggatgtgttcgaacaggtctggcgggagtacccg

SEQ ID NO: 340209 - DNA, 75 bp, synthetic construct
  source 1..75: mol_type = other DNA
cggtgaatataccggggcgtcgatatttgttgcggaatactcacctgaccgtaaacgtggctttatgggcagctg

SEQ ID NO: 340210 - DNA, 75 bp, synthetic construct
  source 1..75: mol_type = other DNA
tacattctggcagaggtgctggcaacgttgcgctcggctggcgttcctgcgttaaccgatgataactatgcggta

SEQ ID NO: 340211 - DNA, 75 bp, synthetic construct
  source 1..75: mol_type = other DNA
ctcctgtttcaagctgtttggaccagagggtgttggcgcggtggtaggcgatgccgatgttatcaaccgtattcg

SEQ ID NO: 340212 - DNA, 75 bp, synthetic construct
  source 1..75: mol_type = other DNA
aatgcggcgcgaatgtctcgacattctcctgcttcaagctgtttgggccggagggcgttggtgcagtggttggcg

SEQ ID NO: 340213 - DNA, 75 bp, synthetic construct
  source 1..75: mol_type = other DNA
agtgaaaagcgccgtcattgccaatgcacagtcgaaggtattgattgtggagtttcatcagccgattgccgccag

SEQ ID NO: 340214 - DNA, 75 bp, synthetic construct
  source 1..75: mol_type = other DNA
aataccggaaatacccgaatttttattacccgatatgggttttgtcatgccgcgaaaaattgtcagtggcagcat

SEQ ID NO: 340215 - DNA, 75 bp, synthetic construct
  source 1..75: mol_type = other DNA
cgccacgctctactctggtggctgtcagatccagggcgcacaggcgttagatgtgttgcgtggcctggtgtttgc

SEQ ID NO: 340216 - DNA, 75 bp, synthetic construct
  source 1..75: mol_type = other DNA
ccttctggtgcataacgcgcctgtttatccgacgacacgggtcatcattgagcagatggggctgacgcttattac

SEQ ID NO: 340217 - DNA, 75 bp, synthetic construct
  source 1..75: mol_type = other DNA
aacattgtgcaattcgcattaacccgaatcgcagcggtgatgagacggtattgcggattttgcgcgagagtattg

SEQ ID NO: 340218 - DNA, 75 bp, synthetic construct
  source 1..75: mol_type = other DNA
tcttctggtgcataacgcgcctgtttacccgacgactcaggtcattattgagcagatggggctgacgcttattac

SEQ ID NO: 340219 - DNA, 75 bp, synthetic construct
  source 1..75: mol_type = other DNA
ttcttactggcggtgatttagggttaactccaggtctgaatcaaccgcgtattacccaacgggtggagcaggtgc

SEQ ID NO: 340220 - DNA, 75 bp, synthetic construct
  source 1..75: mol_type = other DNA
tcttctggtgcatgacgcgccggtttacccgacgacacgggttattattgagcagatggggctaacgctcattac

SEQ ID NO: 340221 - DNA, 75 bp, synthetic construct
  source 1..75: mol_type = other DNA
gctcttttatcgactttccggaacgtttcgccaggcgaatccgcaattagaacattgtgcgattcgcattaaccc

SEQ ID NO: 340222 - DNA, 75 bp, synthetic construct
  source 1..75: mol_type = other DNA
agtgctggaagaggcgcaaaagcgcggtgccttgccttacccggttggtgcagagtcgaaatatgaaatcccgcc

SEQ ID NO: 340223 - DNA, 75 bp, synthetic construct
  source 1..75: mol_type = other DNA
gtgttcgaacaggtctggcgggagtacccgttgcgtgctggggcaaacccgaagaaatccgctttcagtgcctgg

SEQ ID NO: 340224 - DNA, 75 bp, synthetic construct
  source 1..75: mol_type = other DNA
tggtgcagtcgatcattacccgtacggctgacttcattaacaacgtaatgatccccgacgccttagccatcggcc

SEQ ID NO: 340225 - DNA, 75 bp, synthetic construct
  source 1..75: mol_type = other DNA
ggaacgctactcgtggatcaaagcgccacgctggcgcggtaatgcgatggaagtggggccgctggcgcgcacgtt

SEQ ID NO: 340226 - DNA, 75 bp, synthetic construct
  source 1..75: mol_type = other DNA
ccgcctccaccgaaaaatgggagcctgcgacctggccgaaagtgtgccgtggcgtcggctttactgaagcaccgc

SEQ ID NO: 340227 - DNA, 75 bp, synthetic construct
  source 1..75: mol_type = other DNA
tgcgtactctgcacagctttgacccgtgcctcgcctgttcaacacacgtgctgggcgacgacggtagcgagctga

SEQ ID NO: 340228 - DNA, 75 bp, synthetic construct
  source 1..75: mol_type = other DNA
gacagcacctggcagcaatttaccccggacggaccgcgtgcgtttctgccgttgtttgataactgggcatcgctg

SEQ ID NO: 340229 - DNA, 75 bp, synthetic construct
  source 1..75: mol_type = other DNA
ttgaacacgctgaacctgcgccgtttgtagaggacagccagcctgacgtgcgtatttcagcgattagcgctgcgt

SEQ ID NO: 340230 - DNA, 75 bp, synthetic construct
  source 1..75: mol_type = other DNA
atgcgcagtcgtgtatgttgattagcgtgcggtgcgagaatgatcctggcgacagcacctggcagcagtttacac

SEQ ID NO: 340231 - DNA, 75 bp, synthetic construct
  source 1..75: mol_type = other DNA
aagcgttaccagatgcggcgcatggcggataacttcattatgcaaagtggtatggatctgttttatgccggattc

SEQ ID NO: 340232 - DNA, 75 bp, synthetic construct
  source 1..75: mol_type = other DNA
cagcacggattttcggtaacggtgatcgagcacgcagaacctgcaccgtttgtcgctgacagccaaccggacgtg

SEQ ID NO: 340233 - DNA, 75 bp, synthetic construct
  source 1..75: mol_type = other DNA
ggcggatttcattaataacgtgatgatccccgacgctttagccatcggtcagttcaacaaaccgtggagcgaaat

SEQ ID NO: 340234 - DNA, 75 bp, synthetic construct
  source 1..75: mol_type = other DNA
cagcgctatctctgctctcattgccgtaaaacatggcaactacagttcacttacaccgcctctcagcccggtacg

SEQ ID NO: 340235 - DNA, 75 bp, synthetic construct
  source 1..75: mol_type = other DNA
ctgggcgtaagcgcgttttctgctgtaggtgctgagcatcagacagcacgaaaagatatcgtatgtgcagatggc

SEQ ID NO: 340236 - DNA, 75 bp, synthetic construct
  source 1..75: mol_type = other DNA
tgtccctcctgctcagctactgaaggcgtggtgcgtaacggtaaaagtactgccggacatcagcgctatctctgc

SEQ ID NO: 340237 - DNA, 75 bp, synthetic construct
  source 1..75: mol_type = other DNA
gctatctctgctctcattgccgtaaaacatggcaactacagttcacttacaccgcctctcagcccggtacgcacc

SEQ ID NO: 340238 - DNA, 75 bp, synthetic construct
  source 1..75: mol_type = other DNA
acgactttggcgagaaaagtctgctgatgcctggcggcgcggtgattaacggcgacttcaacaatgtgctgccag

SEQ ID NO: 340239 - DNA, 75 bp, synthetic construct
  source 1..75: mol_type = other DNA
cccctggctatttcttcgacgtacaaaaccgactgaagaaatttgttgaaggcgggcagttggggattttccgca

SEQ ID NO: 340240 - DNA, 75 bp, synthetic construct
  source 1..75: mol_type = other DNA
actgccgtaaaacatggcagcttcagttcacttacaccgcctctcagcccagtacacatcagaaaattattgata

SEQ ID NO: 340241 - DNA, 75 bp, synthetic construct
  source 1..75: mol_type = other DNA
caactgaccgaacatggcggtcacgttggcttcattagcggtacgttactccacccgcaaatgtggcttgagtca

SEQ ID NO: 340242 - DNA, 75 bp, synthetic construct
  source 1..75: mol_type = other DNA
agtttatagctctctgggtatcgccgcggtctttatgcctgcattgctggggattgtggccgataaatggatgag

SEQ ID NO: 340243 - DNA, 75 bp, synthetic construct
  source 1..75: mol_type = other DNA
caatccgtatctggggcaccatcggctttatcatggcaatgtgggtagttagcctctctggtttcgaactgagcc

SEQ ID NO: 340244 - DNA, 75 bp, synthetic construct
  source 1..75: mol_type = other DNA
acaagcgcaacataaaccgcgtctggtggtttttcatggtctcgaaggcagtctgaatagcccttacgcacatgg

SEQ ID NO: 340245 - DNA, 75 bp, synthetic construct
  source 1..75: mol_type = other DNA
gtgaaattcaccccgtactggcagcggctggagttgcccgacggcgattttgtcgatctcgcgtggagtgaagat

SEQ ID NO: 340246 - DNA, 75 bp, synthetic construct
  source 1..75: mol_type = other DNA
atctcgcgtggagtgaagaccccgcacaggcgaaacataaaccgcgtttagtggtgtttcacgggctggaaggca

SEQ ID NO: 340247 - DNA, 75 bp, synthetic construct
  source 1..75: mol_type = other DNA
cgctgctggaagtgctgattgctatggctatcagtagcgtattgctgctgggggctgcgcggtttctgccagcat

SEQ ID NO: 340248 - DNA, 75 bp, synthetic construct
  source 1..75: mol_type = other DNA
gaaccggtaaaagagtccgaccagattggatttcgtctgaaggagcatgtgctggaaacgctacgcggtgcgaca

SEQ ID NO: 340249 - DNA, 75 bp, synthetic construct
  source 1..75: mol_type = other DNA
ctgcgacgagatcgaccagatattgcagtcaggtattactacaaaggcgttttgtggagtcctggctattttgcc

SEQ ID NO: 340250 - DNA, 75 bp, synthetic construct
  source 1..75: mol_type = other DNA
ggaggcgatgttccttgtgatattgattaactcgtttgcttatatgccaacgcttgggttaatcaacaccatctc

SEQ ID NO: 340251 - DNA, 75 bp, synthetic construct
  source 1..75: mol_type = other DNA
attgagctggcttcaggtcatcgtagtcgaagtgaagagctgggttatgggagccaggaattcgttccctggata

SEQ ID NO: 340252 - DNA, 75 bp, synthetic construct
  source 1..75: mol_type = other DNA
atctggctgcgggtatttaccgttgcgaagcatctccagagggcgggttattgccatggcagctgtacgggcgaa

SEQ ID NO: 340253 - DNA, 75 bp, synthetic construct
  source 1..75: mol_type = other DNA
gctattttatttgccgttctttatcctcggcgcactggctttcattttccctcatcttaaagccttgtttaccac

SEQ ID NO: 340254 - DNA, 75 bp, synthetic construct
  source 1..75: mol_type = other DNA
gtagccaatggcaaaatttatatcggtaaaattgacactgacccggtaaaccctgaaaaccagattcaggtttat

SEQ ID NO: 340255 - DNA, 75 bp, synthetic construct
  source 1..75: mol_type = other DNA
atggaggaattcgtgggtacggtggcagcaatatcgttatagacggcgtgaatgttcacgatattggaatttcaa

SEQ ID NO: 340256 - DNA, 75 bp, synthetic construct
  source 1..75: mol_type = other DNA
tacgatgtacagacggatgggctgttaattcaaaattgtaatatcaaaaatattggaggtgtagggatacagcgt

SEQ ID NO: 340257 - DNA, 75 bp, synthetic construct
  source 1..75: mol_type = other DNA
tgtacgcgtggattaagcgaagaagaagtgcagggcgagtacgaactgaacaccggcaaagtaattatcgaaacg

SEQ ID NO: 340258 - DNA, 75 bp, synthetic construct
  source 1..75: mol_type = other DNA
gcggtgaactctcatcaaacgggaaggtactgcatacccataaacaccccggcgacagcggcggcacaaccggga

SEQ ID NO: 340259 - DNA, 75 bp, synthetic construct
  source 1..75: mol_type = other DNA
agtgttctttttataataatggtgataaagttcttgagcttcttgaaatattcattagaaaaactcataaatatt

SEQ ID NO: 340260 - DNA, 75 bp, synthetic construct
  source 1..75: mol_type = other DNA
agagtcgtcctggttgctgacactttttaacgatttcatccactcgttccgcatgcaggtatttttcgttatttc

SEQ ID NO: 340261 - DNA, 75 bp, synthetic construct
  source 1..75: mol_type = other DNA
cccatctcgcggctgtaccctcgcggcagcactggcatttatggcttatttgctcaatcaacgttacggcagtgg

SEQ ID NO: 340262 - DNA, 75 bp, synthetic construct
  source 1..75: mol_type = other DNA
tttaacgatttcatccacgccttccgtatgcaggtatttttcgttatttccggatatttttcctacatgctgttt

SEQ ID NO: 340263 - DNA, 75 bp, synthetic construct
  source 1..75: mol_type = other DNA
ctgtactgctgatgggctggtcggtaaatgcctggtcattcgcctgtaaaaccgccaatggtacagctatcccta

SEQ ID NO: 340264 - DNA, 75 bp, synthetic construct
  source 1..75: mol_type = other DNA
ttgggagctctggcttttattttccctaatcttaaatccttgtttaccacgccatctcgtggctgcacactcgct

SEQ ID NO: 340265 - DNA, 75 bp, synthetic construct
  source 1..75: mol_type = other DNA
atttacgcattccgttgttgaagtttttgttctccggcaaaccgatcgtaaaacgcgagaatgacaaagcgccag

SEQ ID NO: 340266 - DNA, 75 bp, synthetic construct
  source 1..75: mol_type = other DNA
attttgaagctgaactggttgaaatggatggcgaaccagatcacgtccatttgttaattaactatcctcccaaac

SEQ ID NO: 340267 - DNA, 75 bp, synthetic construct
  source 1..75: mol_type = other DNA
cgcatgccgcgcggcttccacgaacgttccgttaactctaccggggcgtggacggcaacgatgccgctgtcattt

SEQ ID NO: 340268 - DNA, 75 bp, synthetic construct
  source 1..75: mol_type = other DNA
ggctatgggacgaccataaaactcatggctatcctccgcgccgggtatttggcttctattgcaaggaaagcctgc

SEQ ID NO: 340269 - DNA, 75 bp, synthetic construct
  source 1..75: mol_type = other DNA
aattctctctcccaccattaacacaatcttcaggacgtgctgatgaaaaacgtctggaagatgcaatcagggctc

SEQ ID NO: 340270 - DNA, 75 bp, synthetic construct
  source 1..75: mol_type = other DNA
gggatgggaaggtattaaatatcggttttgaaaacgatccggtatttcgtgtgctgggagatggagccgggttct

SEQ ID NO: 340271 - DNA, 75 bp, synthetic construct
  source 1..75: mol_type = other DNA
gatatctgcgatattgttgattatacacagctcaataatggaaaagcgctgtctgaagcagaaaacctgcttcaa

SEQ ID NO: 340272 - DNA, 75 bp, synthetic construct
  source 1..75: mol_type = other DNA
agcacgaaagttgatcaccgtaaggtgacctttccgaaccggtacgggatcaccttagtcggggatctctatata

SEQ ID NO: 340273 - DNA, 75 bp, synthetic construct
  source 1..75: mol_type = other DNA
gctgggtaaaacgcgtcttgtttctttgtgaccgcaaagagctacgtaaacaggcggcaaatgcctttaatcaat

SEQ ID NO: 340274 - DNA, 75 bp, synthetic construct
  source 1..75: mol_type = other DNA
aagaggccgaagtcacagcgacaaaatcgcttgcacaaaaacgcttcgaagcgtgggttatgctgggggccgctg

SEQ ID NO: 340275 - DNA, 75 bp, synthetic construct
  source 1..75: mol_type = other DNA
ggctgtgggatgaccataaaactcatggttatcccccgcgtcgggtgtttggcttctacagcaaggaaagcctgc

SEQ ID NO: 340276 - DNA, 75 bp, synthetic construct
  source 1..75: mol_type = other DNA
tgttgcgcagccagtggccggaactggctgagctgggattaatggcggaacgttatgttcacaccgatccagaaa

SEQ ID NO: 340277 - DNA, 75 bp, synthetic construct
  source 1..75: mol_type = other DNA
agaatacggtcagcgtccggtcatcttctacaccaacggctatgatatctggctgtgggatgaccataaaactca

SEQ ID NO: 340278 - DNA, 75 bp, synthetic construct
  source 1..75: mol_type = other DNA
tggccgtggcacgcgcctctgttcgggactctacggctacgatgaaaacggcaaaccgctggataaacagaaatt

SEQ ID NO: 340279 - DNA, 75 bp, synthetic construct
  source 1..75: mol_type = other DNA
tgccgggggagaaggagtaagtcttttacacggaggtcgcgggaatgattatcttcatggggcttctggtaatga

SEQ ID NO: 340280 - DNA, 75 bp, synthetic construct
  source 1..75: mol_type = other DNA
gccaatactgcgtatccgccggtttatctgccaccaccagccggagaaccgtttattgacagctttgtgcgcgga

SEQ ID NO: 340281 - DNA, 75 bp, synthetic construct
  source 1..75: mol_type = other DNA
gtcatgtatatcttatgcatgccggagaaaaacagtctttatctgttcttaacctcaccatccctaactcaagta

SEQ ID NO: 340282 - DNA, 75 bp, synthetic construct
  source 1..75: mol_type = other DNA
ggcacatcatttatcgggtaatgcgccacttcctaagcaggcattgtatagagctgtttacgctaatcaaaatta

SEQ ID NO: 340283 - DNA, 75 bp, synthetic construct
  source 1..75: mol_type = other DNA
gtctggtaaacagcctcaaaggcgtatcgggtaggttactgcgacgagatcgaccagatattgcagtcaggtatt

SEQ ID NO: 340284 - DNA, 75 bp, synthetic construct
  source 1..75: mol_type = other DNA
tgcgccggtaaaatctcatgaatcggaaaaccaggacacgacgtctgtcgccagtacaacaaccattattaccca

SEQ ID NO: 340285 - DNA, 75 bp, synthetic construct
  source 1..75: mol_type = other DNA
cgactgggacgacgacgatcatgaccatcatcatcatgacgatgatgattatcatcaccacgatggcggtcatcg

SEQ ID NO: 340286 - DNA, 75 bp, synthetic construct
  source 1..75: mol_type = other DNA
gctcacgatgcggtgcataacgcggtggtgatggaagaagtggcaaaaatggcgtggattgcccgcggcattaac

SEQ ID NO: 340287 - DNA, 75 bp, synthetic construct
  source 1..75: mol_type = other DNA
aggtgcagggtgagtacgaactgaacaccggcaaagtgattatcgaaacgctgggcaacgccgagcctctgcata

SEQ ID NO: 340288 - DNA, 75 bp, synthetic construct
  source 1..75: mol_type = other DNA
gctggagtgcgcattttgcgggttcaaaaactgacgcctttgaaagaattttaggggctcagttttacgactaca

SEQ ID NO: 340289 - DNA, 75 bp, synthetic construct
  source 1..75: mol_type = other DNA
atgcatgttcacctggtctttgtcaccagataccgacgccagatttttgaccatgacgcgacagaaaaactacgc

SEQ ID NO: 340290 - DNA, 75 bp, synthetic construct
  source 1..75: mol_type = other DNA
acaaaggcgttttgtggagtcctggctattttgccagtagctgcggaggtgcgccaatatccgtcatccgccaat

SEQ ID NO: 340291 - DNA, 75 bp, synthetic construct
  source 1..75: mol_type = other DNA
atgttcacctggtctttgtcaccagataccgacgccagattttttgacgcgacagaaaaactacgcacttacttt

SEQ ID NO: 340292 - DNA, 75 bp, synthetic construct
  source 1..75: mol_type = other DNA
gaccaccaccaccagcctcgcgtttcgtaaaatattcgcgcagttaaatctgcatgcaaccgaggtggaaggcga

SEQ ID NO: 340293 - DNA, 75 bp, synthetic construct
  source 1..75: mol_type = other DNA
atcgaaccatcgacagggttggagaagaagggaaacagcaaaggctccatgctgctgatttggcgaccgttcatc

SEQ ID NO: 340294 - DNA, 75 bp, synthetic construct
  source 1..75: mol_type = other DNA
tgggtggaaaaagccgctgagcagtgcatacaacagcgacagacggtagtgatgcttgtgccagaggatatgtca

SEQ ID NO: 340295 - DNA, 75 bp, synthetic construct
  source 1..75: mol_type = other DNA
gaaatctcgtaaatatctgcacacctacgatgaagcggtgccgtggaatcaggtgccggggacattcactccgtg

SEQ ID NO: 340296 - DNA, 75 bp, synthetic construct
  source 1..75: mol_type = other DNA
ttgagtggattcaaaaactgatccgcgacaccagcgagcgcgggcactcacgagaagcagtgatggactcagtag

SEQ ID NO: 340297 - DNA, 75 bp, synthetic construct
  source 1..75: mol_type = other DNA
gaaatggacatggcgatccgcaaagcgcgcgacgccgggcggcatatcagctacttcggccccgaagcgaacgac

SEQ ID NO: 340298 - DNA, 75 bp, synthetic construct
  source 1..75: mol_type = other DNA
tgcaccaaatcagtggattgtggtagatatcgccaacgatccgttaagtacgccgcatatctatttgtgttgcga

SEQ ID NO: 340299 - DNA, 75 bp, synthetic construct
  source 1..75: mol_type = other DNA
gatgtgcaaattcataccgcgcaggataactacgacggcgtgctgcgcgtgggcgatacgcaaggtcgcctgcgt

SEQ ID NO: 340300 - DNA, 75 bp, synthetic construct
  source 1..75: mol_type = other DNA
atggcaatacaacaccctgacatccagcctgctgttaaccatagcgttcaggtggcgatcgctggtgccggtccg

SEQ ID NO: 340301 - DNA, 75 bp, synthetic construct
  source 1..75: mol_type = other DNA
agcgacggcaattggtgatttcggcagtgcggcaggagagctgcccgtgcctgtggagctggcggaggcctgtgc

SEQ ID NO: 340302 - DNA, 75 bp, synthetic construct
  source 1..75: mol_type = other DNA
ggggcaagttttgtccgtcgcaccctgaatgtgccgtttgaaggtaaaactgcgccaaatcagtggattgtggta

SEQ ID NO: 340303 - DNA, 75 bp, synthetic construct
  source 1..75: mol_type = other DNA
ggccttcagccagcaagatgacgaagtgaccttgcacctgaaaacggcagaagggcagcgggaaacggtcaaagc

SEQ ID NO: 340304 - DNA, 75 bp, synthetic construct
  source 1..75: mol_type = other DNA
gtcggcgtggtgcctatcgttaaccttgagtggattcaaaagctcattcgcgacaccagcgagcgcgggcactca

SEQ ID NO: 340305 - DNA, 75 bp, synthetic construct
  source 1..75: mol_type = other DNA
ggcatggggtaactcctcctacaaaattatcctcaaacagagtgcgaaggagttcgcgaaatataaccagttatt

SEQ ID NO: 340306 - DNA, 75 bp, synthetic construct
  source 1..75: mol_type = other DNA
cgtaaagttggtgagtttattcaaaaaggttaccgcacctgtcgccgtcataccggtgcctatatcaccatcaca

SEQ ID NO: 340307 - DNA, 75 bp, synthetic construct
  source 1..75: mol_type = other DNA
gcctcctggctggctaaaaagaagcaggcgcgcattgatgatgtggtggatttcctgaaaaacgcccgtgataac

SEQ ID NO: 340308 - DNA, 75 bp, synthetic construct
  source 1..75: mol_type = other DNA
ggattggcaactgggtgtcacgaaataaaaaatggattgcgaaaactgaccagacgtccattctgttggtggttt

SEQ ID NO: 340309 - DNA, 75 bp, synthetic construct
  source 1..75: mol_type = other DNA
tcatcgtggcgcgttcatcaccatcagccagaacatcaaggactttgatgccgatgatgcctctggcgcggcaaa

SEQ ID NO: 340310 - DNA, 75 bp, synthetic construct
  source 1..75: mol_type = other DNA
tctgcgcctggctgccgagctggctgaacaaaagcaacttctggaacagaaagcccaccagctaaatcagcagct

SEQ ID NO: 340311 - DNA, 75 bp, synthetic construct
  source 1..75: mol_type = other DNA
tctgtgcgctcactggctaactgaggccgacgacgcgctcaattctgagtggataagccacggtgcaatctggaa

SEQ ID NO: 340312 - DNA, 75 bp, synthetic construct
  source 1..75: mol_type = other DNA
cgtaaaatattcgcgcagttaaatctgcatgcagccgaggtggaaggcgacagttttcaccgttacacccgcccg

SEQ ID NO: 340313 - DNA, 75 bp, synthetic construct
  source 1..75: mol_type = other DNA
cgcgcgacgccgggcggcatatcagctacttcggccccgaagctaacgacttcggcctgctggaacaaaccttca

SEQ ID NO: 340314 - DNA, 75 bp, synthetic construct
  source 1..75: mol_type = other DNA
tcagccgtctgctgccgtaccgtgattacaaccaggagtccggcctgttcatgaatgacaccacgatgggcttta

SEQ ID NO: 340315 - DNA, 75 bp, synthetic construct
  source 1..75: mol_type = other DNA
gacggcagacctgcagtgcttgaagagggtgattttcccgctgttgccgtttacctgaccgatgcggaatacacc

SEQ ID NO: 340316 - DNA, 75 bp, synthetic construct
  source 1..75: mol_type = other DNA
gaagctgctaaggccgatggcgacacatctttagccacttggattaaacgcgttctccgcaaagaattacagcaa

SEQ ID NO: 340317 - DNA, 75 bp, synthetic construct
  source 1..75: mol_type = other DNA
cccttttccagctcgatccagagcgcgcgcacgagtttacttttcagcaattacgtcgcatcaccggaacaccgt

SEQ ID NO: 340318 - DNA, 75 bp, synthetic construct
  source 1..75: mol_type = other DNA
atggtttatcgagtatatatctctcattattgccgtatgagcacattatcaaatattcaggaactcgcgcgcgca

SEQ ID NO: 340319 - DNA, 75 bp, synthetic construct
  source 1..75: mol_type = other DNA
tctgtccgtgggcggtgaactcgacacggcgttcgttctgccggggatttattccggcgataaccccgcgccgtc

SEQ ID NO: 340320 - DNA, 75 bp, synthetic construct
  source 1..75: mol_type = other DNA
acgctttacgcctccttcgcaacctgatacgtaccggcgtcgtcgtcgaagttgacctcgatgacgggcgctgtc

SEQ ID NO: 340321 - DNA, 75 bp, synthetic construct
  source 1..75: mol_type = other DNA
ttaatcctgattgtaaaattttaattcattcagatgagttttatgataaacatatattagttattgcaggaacat

SEQ ID NO: 340322 - DNA, 75 bp, synthetic construct
  source 1..75: mol_type = other DNA
ccggctgtatttactcgcctagttgctgacaacgttggtcagtacgaaaaatcattggttatcgatctcggtggt

SEQ ID NO: 340323 - DNA, 75 bp, synthetic construct
  source 1..75: mol_type = other DNA
aagggggaacttttaccattaaaagcgttgaagtgatgcctgaatcactcccggctgtatttactcgcctagttg

SEQ ID NO: 340324 - DNA, 75 bp, synthetic construct
  source 1..75: mol_type = other DNA
aacgcgggctggtggtgatcaagcccagcggcgttgcctacgaaaccatgaaagcagacgatatggtggtggttg

SEQ ID NO: 340325 - DNA, 75 bp, synthetic construct
  source 1..75: mol_type = other DNA
ccacaactcaatcacatcgacagcttcctgatgaataaacacttcatgcgtaaacacggtcctaacgcttattac

SEQ ID NO: 340326 - DNA, 75 bp, synthetic construct
  source 1..75: mol_type = other DNA
ctgggcgacgctgagccgctgcatacgccgggaattgtggtgtatcagcacgggccgttcgcctggggaaaagat

SEQ ID NO: 340327 - DNA, 75 bp, synthetic construct
  source 1..75: mol_type = other DNA
acgctttacgcctccttcgcaacctgatacgcaccggcgtcgttgtcgaagttgacctcgatgacgggcgctgtc

SEQ ID NO: 340328 - DNA, 75 bp, synthetic construct
  source 1..75: mol_type = other DNA
cagcggggtaaaaacggcaagcgtcaccgcgtcggaatccattaccgccaccgtgccggtggtaacggtcaaggc

SEQ ID NO: 340329 - DNA, 75 bp, synthetic construct
  source 1..75: mol_type = other DNA
gtgtgcagaccggcggcatgtgcaccgactggcttcagtggctgacctgtcgtgccgggcgttcgcgcacatggt

SEQ ID NO: 340330 - DNA, 75 bp, synthetic construct
  source 1..75: mol_type = other DNA
gggcaccttccgtgggggagcaggtgctgattctggccgtgggcggtgaactcgacacggcgttcgttctgccgg

SEQ ID NO: 340331 - DNA, 75 bp, synthetic construct
  source 1..75: mol_type = other DNA
ggtctggccctgcttcacccaggtggagcgctttactctcgacgcaccgtttatcaccctcgaacagcgtactga

SEQ ID NO: 340332 - DNA, 75 bp, synthetic construct
  source 1..75: mol_type = other DNA
gagcgtttcactctcgacgcgctgtttatcaccctcgaacagcgtactgaacatggttgcgttgttgccgggttc

SEQ ID NO: 340333 - DNA, 75 bp, synthetic construct
  source 1..75: mol_type = other DNA
agcagcgaagggcagaatgggcaaacgccatttttgctggcggaaatgctgggctggccctgcttcacccaggtg

SEQ ID NO: 340334 - DNA, 75 bp, synthetic construct
  source 1..75: mol_type = other DNA
atgacggcgtccctgggtattaacatcggcaaaaataaagatacgccagtggagcagggcaaagatgactatctg

SEQ ID NO: 340335 - DNA, 75 bp, synthetic construct
  source 1..75: mol_type = other DNA
acggaaattattcgccgcttgtcgcaggaattaaatgggcgcttaccgatcatcggtgtgggcggtattgactcg

SEQ ID NO: 340336 - DNA, 75 bp, synthetic construct
  source 1..75: mol_type = other DNA
ttgaagcactggtgcggcagaaagtgcctgcgaaacctgttaactgcatgggcctgacgtttaaaaatccgcttg

SEQ ID NO: 340337 - DNA, 75 bp, synthetic construct
  source 1..75: mol_type = other DNA
gtgaactcgacacggcgttcgttctgccggggatttattccggcgataaccctgcgcttccctgacggggcggtg

SEQ ID NO: 340338 - DNA, 75 bp, synthetic construct
  source 1..75: mol_type = other DNA
tgcactcacggtaagcggaattaaaacggccagcgtgacggcttctgattctgttactgccacggtgccggtggt

SEQ ID NO: 340339 - DNA, 75 bp, synthetic construct
  source 1..75: mol_type = other DNA
tccttcccgtcatgaacactctcgcaaatattcaggaactcgcgcgcgcactgcgcaacatgattcgtaccggcc

SEQ ID NO: 340340 - DNA, 75 bp, synthetic construct
  source 1..75: mol_type = other DNA
ctggactggctggccgatttccttgacctaaacgctgcgaacgataaagaaatcgttgccgactacggattaggc

SEQ ID NO: 340341 - DNA, 75 bp, synthetic construct
  source 1..75: mol_type = other DNA
aataactatagaaataaatacaccaaaaagaagaagcatgacttcctgtttgttacacacagttcatgtaaaaca

SEQ ID NO: 340342 - DNA, 75 bp, synthetic construct
  source 1..75: mol_type = other DNA
ttcaaacacatatcaatgaaagaaaaggaaattattggaagagtttatgactctttgaggaaaattactaaaggg

SEQ ID NO: 340343 - DNA, 75 bp, synthetic construct
  source 1..75: mol_type = other DNA
ggggcgctcggtcacgtatgaattgcgcattgaaccgtggttgaagctgctgacccacaccagcgactacaaagc

SEQ ID NO: 340344 - DNA, 75 bp, synthetic construct
  source 1..75: mol_type = other DNA
ctgcgtactggaaagtgggtgctggacgattttgattttatgaagccacgttcgctgctgaaaagtaccgtagct

SEQ ID NO: 340345 - DNA, 75 bp, synthetic construct
  source 1..75: mol_type = other DNA
gagatgctgacgcgcattcgtatggaagcgcagcgcagcccaggcagtcgggcacatggggccggtcatatccgt

SEQ ID NO: 340346 - DNA, 75 bp, synthetic construct
  source 1..75: mol_type = other DNA
accctcatgacgggttacacctttacgctgatgaatcatccaacggcagaggtcaaccaggaatacctactggta

SEQ ID NO: 340347 - DNA, 75 bp, synthetic construct
  source 1..75: mol_type = other DNA
ttcgctgcttaaaagtaccgtggctagtccgcgtgataccggtcatgctgaatacgagcattatgaatggcctgg

SEQ ID NO: 340348 - DNA, 75 bp, synthetic construct
  source 1..75: mol_type = other DNA
tggcaggtgcagtacggtgaaacggattttgatttcatccagcgcctgatgcaggaatggggtatctactggtgg

SEQ ID NO: 340349 - DNA, 75 bp, synthetic construct
  source 1..75: mol_type = other DNA
gccatcgtcaccggtccggcggggcaggaaatctggacggataaatatggccgggtgaaggtgcagtttggctgg

SEQ ID NO: 340350 - DNA, 75 bp, synthetic construct
  source 1..75: mol_type = other DNA
cgcattgaaccgtggctgaagctgctgacccacaccagcgactacaaagctttccagaacaaaaccgtggtggag

SEQ ID NO: 340351 - DNA, 75 bp, synthetic construct
  source 1..75: mol_type = other DNA
aaaggggacaaaggcgaacccggagcaacaggtcccgcggggccgcaggggaaaaccggcccggcaggtcctcgt

SEQ ID NO: 340352 - DNA, 75 bp, synthetic construct
  source 1..75: mol_type = other DNA
aaccagttggaaacggtggacccgtcatcaccacaccaccaatagctggcgaaagtggtggtataagccctggtt

SEQ ID NO: 340353 - DNA, 75 bp, synthetic construct
  source 1..75: mol_type = other DNA
taaaacggtggtggaaattctggacgaagtgctggctgaatattcttttccggtggaaaaacgtctggtggaaaa

SEQ ID NO: 340354 - DNA, 75 bp, synthetic construct
  source 1..75: mol_type = other DNA
cggctaacggaaatatgctgcgcttcgatgataaaacgggtgcggaagaagtgaagttccacgcggaaaaagacc

SEQ ID NO: 340355 - DNA, 75 bp, synthetic construct
  source 1..75: mol_type = other DNA
gaaaccatcaaaggcaaccgggatattactgtgacagaaggtgaccagtctctgacggtgaaaacgggtaaacgc

SEQ ID NO: 340356 - DNA, 75 bp, synthetic construct
  source 1..75: mol_type = other DNA
agagtatggtcagtctgttactgatgagtgtctttcatggcaacagacagaacaattattatcaactctggcagc

SEQ ID NO: 340357 - DNA, 75 bp, synthetic construct
  source 1..75: mol_type = other DNA
caaattataaactgggcggtgcacagcaacacgacagtgtacgcctcgatccgtgggtgtttatgttctccgcag

SEQ ID NO: 340358 - DNA, 75 bp, synthetic construct
  source 1..75: mol_type = other DNA
tctgatgtttatgattcatatattgtaacggataagaaaatagttgcagcattaggcttcaacaatatgataatc

SEQ ID NO: 340359 - DNA, 75 bp, synthetic construct
  source 1..75: mol_type = other DNA
cgccgcattgcgctggcgcgtttcgacgtcacgatcaacctgtcgcataacgggaaaatggtccgccagtaccgc

SEQ ID NO: 340360 - DNA, 75 bp, synthetic construct
  source 1..75: mol_type = other DNA
aacggcgtttaggcgcgatttgcggcaccgcttttctcgaacaagcgctggcgattgaatggcaacacggcgatc

SEQ ID NO: 340361 - DNA, 75 bp, synthetic construct
  source 1..75: mol_type = other DNA
ttggtccatgctcaatccatgacgttcaggctgccgttgaatatgcgaaacgattgtccgtattacagaataagt

SEQ ID NO: 340362 - DNA, 75 bp, synthetic construct
  source 1..75: mol_type = other DNA
tgaatgacagagcggcaaatatccctccgcctggagcattagagaaaacagcccttcagacggcaatagacgtca

SEQ ID NO: 340363 - DNA, 75 bp, synthetic construct
  source 1..75: mol_type = other DNA
gaaaccattaaaggagatcgggatattacagtgactgagggtaaacaatcactgacggtgaaaacaggcaatcgt

SEQ ID NO: 340364 - DNA, 75 bp, synthetic construct
  source 1..75: mol_type = other DNA
tgaataccgtagtgaaaaataacgaaacacacacggtaaaggcagatcggacgaaaaccatcatttataacgaaa

SEQ ID NO: 340365 - DNA, 75 bp, synthetic construct
  source 1..75: mol_type = other DNA
gatgccgggatatgtagctggaattatgttggaaagctttttacaaggtggaagacaatcagacagcctcccgcg

SEQ ID NO: 340366 - DNA, 75 bp, synthetic construct
  source 1..75: mol_type = other DNA
gtgaaattaatgcatgatgaaggcatcaatcatcgtctgataattgactgtagccatggtaatagtggtaaagtg

SEQ ID NO: 340367 - DNA, 75 bp, synthetic construct
  source 1..75: mol_type = other DNA
aataccaggatatgtagctggcattatggtggaaagctttttacaagatggaaaacaatccgatagttttccgct

SEQ ID NO: 340368 - DNA, 75 bp, synthetic construct
  source 1..75: mol_type = other DNA
tgcgggtaaaacggggccacgaggtttgcagggagaaacaggaagacagggcccgacaggtccacagggaccgac

SEQ ID NO: 340369 - DNA, 75 bp, synthetic construct
  source 1..75: mol_type = other DNA
aatttgccgttatcttgttcgaagataaaacaggcggtgcatggtgtaagaaagtaactggtgcggaagcgcgtt

SEQ ID NO: 340370 - DNA, 75 bp, synthetic construct
  source 1..75: mol_type = other DNA
taatattgggtatggcaagcgcgttaaatgaaggcgaattgccagccatccctattaagcctgtcaaaatttaca

SEQ ID NO: 340371 - DNA, 75 bp, synthetic construct
  source 1..75: mol_type = other DNA
tgtggctatctgtccgctgggaacgtcactggtggtggcgacaaagggggagccttatctgttcagtggggtatc

SEQ ID NO: 340372 - DNA, 75 bp, synthetic construct
  source 1..75: mol_type = other DNA
gatctgcgtgacattaacggtgagtccggtgcatgggcccgaatcatgagcggaaccgggtctgccggcggtgga

SEQ ID NO: 340373 - DNA, 75 bp, synthetic construct
  source 1..75: mol_type = other DNA
ggtaaggtaatactaaataaagataattcccttggcaatgatcaatatgcggggatattttttactaaacgtggt

SEQ ID NO: 340374 - DNA, 75 bp, synthetic construct
  source 1..75: mol_type = other DNA
ttttctatattgattttaagttatgcactgtacaatgttggtgaatatattgatattggtgataaagaaaggtta

SEQ ID NO: 340375 - DNA, 75 bp, synthetic construct
  source 1..75: mol_type = other DNA
gtcagaggctgagaaaacattcgcgattaagccgaaaaccatttttcattaccgtgacgatttctggtttgcatg

SEQ ID NO: 340376 - DNA, 75 bp, synthetic construct
  source 1..75: mol_type = other DNA
acggacaaaataccggcgaaaaaccttggaccttcgctggcgacatgggattacctgccgccgccagagaatatg

SEQ ID NO: 340377 - DNA, 75 bp, synthetic construct
  source 1..75: mol_type = other DNA
gcaaatgattattcctaaaacacgagttgcgtccctctttgggacaaaaaagaaaggtgtttacaatgatagtca

SEQ ID NO: 340378 - DNA, 75 bp, synthetic construct
  source 1..75: mol_type = other DNA
tacctgctgcaaccgggcaaaactggcagatgctggtttccggttttggtcaggttgaacgtatcacactcagta

SEQ ID NO: 340379 - DNA, 75 bp, synthetic construct
  source 1..75: mol_type = other DNA
tgcgcgggatgatgccaggcgttattgcatctatgcttcctgataattctgctgtactggcagaaaactgtcatt

SEQ ID NO: 340380 - DNA, 75 bp, synthetic construct
  source 1..75: mol_type = other DNA
caaccgggcaaaactggcaggtgatggtatccggattcgggcaggtggaacgaataaccctgagtacatcgatgt

SEQ ID NO: 340381 - DNA, 75 bp, synthetic construct
  source 1..75: mol_type = other DNA
ggacttgtgacggacggttttcttttgcgtggagatgagtttgtcacgtcattacgggcgctgaaagagactgga

SEQ ID NO: 340382 - DNA, 75 bp, synthetic construct
  source 1..75: mol_type = other DNA
ctaaaaacagatccccccctaaatcccccccgggggaatcgaggtgtcaaaaagtttgaccctctggatattgct

SEQ ID NO: 340383 - DNA, 75 bp, synthetic construct
  source 1..75: mol_type = other DNA
gacccgaatatatataatcctttggaatatgcacaaaaaggtaaaaagcatattgatggtttattgggtaattat

SEQ ID NO: 340384 - DNA, 75 bp, synthetic construct
  source 1..75: mol_type = other DNA
attgctgttagtagcggtactgcggcattacacatggcattaatcttggctggtataaaaaaaggcgatgaagtt

SEQ ID NO: 340385 - DNA, 75 bp, synthetic construct
  source 1..75: mol_type = other DNA
ttgtcaccacggtggcgcaggggcagccgggggaaaccggcagttacagttttgatgtggagccggggtggtacc

SEQ ID NO: 340386 - DNA, 75 bp, synthetic construct
  source 1..75: mol_type = other DNA
agagagtatgcggaggtgctgatcgctattacggagtatcaccgtgccctgttatccaggcttatggcagattag

SEQ ID NO: 340387 - DNA, 75 bp, synthetic construct
  source 1..75: mol_type = other DNA
agcagggtttttcacctgagcaggtgattcgacacagcatcgccaatgaataccagggcttgttcgcgccgaaag

SEQ ID NO: 340388 - DNA, 75 bp, synthetic construct
  source 1..75: mol_type = other DNA
cagcaatgtacaggagttgtcacagtgccagaaaaatacaccacgggtatctataaagccacaatggattgccga

SEQ ID NO: 340389 - DNA, 75 bp, synthetic construct
  source 1..75: mol_type = other DNA
agagaaatattacatttgttctttcttcggataaaaaaagtctcattcctcgttttacaaaagcggatctccgtg

SEQ ID NO: 340390 - DNA, 75 bp, synthetic construct
  source 1..75: mol_type = other DNA
tgtgcacgttgagaatggcgctattgtcagccactgccgtattaaatgtttacagtctcaacaaaggaagagtgg

SEQ ID NO: 340391 - DNA, 75 bp, synthetic construct
  source 1..75: mol_type = other DNA
ggtgctaatgtaaaagtacaaaatgcgcagggagtttatactgattattgggggaacgcgattattcctaatatg

SEQ ID NO: 340392 - DNA, 75 bp, synthetic construct
  source 1..75: mol_type = other DNA
gttatcaacaagattattggggaatgcaaggatccgaacgcagcataggaatgggttatagtactagctggagtg

SEQ ID NO: 340393 - DNA, 75 bp, synthetic construct
  source 1..75: mol_type = other DNA
aatgatgcaactggactgtcatggcgtgcaatgtattcgaaagattttccagatactgatacgacattaaatctg

SEQ ID NO: 340394 - DNA, 75 bp, synthetic construct
  source 1..75: mol_type = other DNA
gaagatgtttctctggatgcactaaaacgtatcttacgtccgtggttaagaatgaaagagccgccagataccgtt

SEQ ID NO: 340395 - DNA, 75 bp, synthetic construct
  source 1..75: mol_type = other DNA
acagaaatggacgatgccacttcaggactggcggatagccatgagtcgctttattatcgaattcggtgaccgcct

SEQ ID NO: 340396 - DNA, 75 bp, synthetic construct
  source 1..75: mol_type = other DNA
gtactgcttgccagcgcccggaggaacgacctggatcagattggtgcgaattttcaggtgcaacgtctggtgatt

SEQ ID NO: 340397 - DNA, 75 bp, synthetic construct
  source 1..75: mol_type = other DNA
acgtctgacgcgtccctggggagaaaccaccgcacgactggtttccgatgaagtaggaaaaaatctctacaatga

SEQ ID NO: 340398 - DNA, 75 bp, synthetic construct
  source 1..75: mol_type = other DNA
tgatttacacgctgcgtaaggcacaccgcactggcgcgaagttcatgatgaacaacaacagcctgtttgccatcc

SEQ ID NO: 340399 - DNA, 75 bp, synthetic construct
  source 1..75: mol_type = other DNA
tgttctactgaataagatcacccgatatggtttccagattgaacaatataaaacgtgtttcgaattacacgagaa

SEQ ID NO: 340400 - DNA, 75 bp, synthetic construct
  source 1..75: mol_type = other DNA
gggttgctgcatggaggtgcatccgtggtactggccgaaagtatcggttccgttgccgggttatttatgtacaga

SEQ ID NO: 340401 - DNA, 75 bp, synthetic construct
  source 1..75: mol_type = other DNA
atggctacagacaacatccccaacacaggttacatccgccgctttcgcctggctgaattgctgggcgttagtgta

SEQ ID NO: 340402 - DNA, 75 bp, synthetic construct
  source 1..75: mol_type = other DNA
cacattccctgtaggggatgataatttcacattctatgagcaaaatgcgaatgtcattgcaaaactaaatgattc

SEQ ID NO: 340403 - DNA, 75 bp, synthetic construct
  source 1..75: mol_type = other DNA
atgggacttgatatctacattgagacgcaaccaaaaaacgatctgaataacgatgcatccagaaagaaggttgct

SEQ ID NO: 340404 - DNA, 75 bp, synthetic construct
  source 1..75: mol_type = other DNA
gagcctgccgcgcatagagaaagtcgcagcagttagcgtaaacagcgggcatgaaatcaatcccgaacagattat

SEQ ID NO: 340405 - DNA, 75 bp, synthetic construct
  source 1..75: mol_type = other DNA
atgaaactctcccgtttatttccgctgctggcgctgctggcgctgctgctggcggccagcctgcacgcagaaaat

SEQ ID NO: 340406 - DNA, 75 bp, synthetic construct
  source 1..75: mol_type = other DNA
gtgtcctttgctattacttcgctgatactgaagatggaaaaaacggtggaaacggagagcgaagatgagtttgct

SEQ ID NO: 340407 - DNA, 75 bp, synthetic construct
  source 1..75: mol_type = other DNA
atcaaagctaaagatacctactggctgctcaaagaagcgtatttgttgggaatttggctgtatgttcgctacgcc

SEQ ID NO: 340408 - DNA, 75 bp, synthetic construct
  source 1..75: mol_type = other DNA
tgttgcgcagccagtggccggaactggctgaactcgcgtgtatggcggaacgctatgttcactccgatccggaaa

SEQ ID NO: 340409 - DNA, 75 bp, synthetic construct
  source 1..75: mol_type = other DNA
accaaatgctaattatcattagtataatcatatcaataatactaggaagcatatcctttcatttaatagaaaaac

SEQ ID NO: 340410 - DNA, 75 bp, synthetic construct
  source 1..75: mol_type = other DNA
tatgcggactatgtcttgtgggatgaggcacacaaaccgctggcggtggtggaagcaaaaaaaaccagcgtcaat

SEQ ID NO: 340411 - DNA, 75 bp, synthetic construct
  source 1..75: mol_type = other DNA
tatgcggactatgtcttgtgggacgaagcgcataagccgctggcggtggtggaagccaaaaaaaccagcgtcaat

SEQ ID NO: 340412 - DNA, 75 bp, synthetic construct
  source 1..75: mol_type = other DNA
gcgtaaccagcatgttgccgatattctctctattgatgaagcggaaacccgccgtcgcctgattgactctcgcct

SEQ ID NO: 340413 - DNA, 75 bp, synthetic construct
  source 1..75: mol_type = other DNA
cgcgtgcgaggcggattattccagcgctgttggtgctctgcgtcagcttattgatattgggttggttctggttgc

SEQ ID NO: 340414 - DNA, 75 bp, synthetic construct
  source 1..75: mol_type = other DNA
ttctcgccggatacgccgcacgagggtgaaaagcccgcgccatccaccgatgaggtcactcctgatgagccataa

SEQ ID NO: 340415 - DNA, 75 bp, synthetic construct
  source 1..75: mol_type = other DNA
gcgctgcaactgcaactggcggaagagcgccaacgctacagcaaactccagcagtccagcgacagcgagctggat

SEQ ID NO: 340416 - DNA, 75 bp, synthetic construct
  source 1..75: mol_type = other DNA
ctttacaaaaaaatattcagcgcctaacaaccagttaaacactgagtaccgcactgcattaattaaaacaatgtg

SEQ ID NO: 340417 - DNA, 75 bp, synthetic construct
  source 1..75: mol_type = other DNA
aagtgcatctagaaattttaatgtgttgcgcgacacctgtcatctcgaaccacaaaaaggaattgattctccaca

SEQ ID NO: 340418 - DNA, 75 bp, synthetic construct
  source 1..75: mol_type = other DNA
gagtcgtctaggagctagctcttactcgatctatctgtggcattggccgttagtggtattgctaacttatatcgg

SEQ ID NO: 340419 - DNA, 75 bp, synthetic construct
  source 1..75: mol_type = other DNA
atgatgttttcgattttgtgatgctaagaaaggaatttactgaggataagcaaggtaaccccacccctgaagggc

SEQ ID NO: 340420 - DNA, 75 bp, synthetic construct
  source 1..75: mol_type = other DNA
gtgcggcttcctgccatgtggaattccattacggtaaaatgacgctggaaaatccttcaccagagctgctcacgg

SEQ ID NO: 340421 - DNA, 75 bp, synthetic construct
  source 1..75: mol_type = other DNA
ttcgcgatgcgatgtcctgcatgggcgcggcggtcaatattatcaccacggacggtccagccgggcgcgccgggt

SEQ ID NO: 340422 - DNA, 75 bp, synthetic construct
  source 1..75: mol_type = other DNA
agctgatcctgctccggaggcattatcagttgcttgtgcggcttcctgctatgtggaattccattacggtaaaat

SEQ ID NO: 340423 - DNA, 75 bp, synthetic construct
  source 1..75: mol_type = other DNA
tgtacagtatgggaaagatggagagccatgcaatctatatgtaaaacatgctcaagatctttacactaatagtga

SEQ ID NO: 340424 - DNA, 75 bp, synthetic construct
  source 1..75: mol_type = other DNA
ccattacggtaaaatgacactggaaaatccttcaccagagctgctcacggtgttgatccgtgaactgaccgggag

SEQ ID NO: 340425 - DNA, 75 bp, synthetic construct
  source 1..75: mol_type = other DNA
gaaaagaacctcgtaaaaactattcgaatgaattcaaacttcgtatggtggaactggcatcacaacctggagctt

SEQ ID NO: 340426 - DNA, 75 bp, synthetic construct
  source 1..75: mol_type = other DNA
cgttgataacaatcttatttttaaatggctacgcctctggcagagagaaggccgtatttctcgtagaatgccccc

SEQ ID NO: 340427 - DNA, 75 bp, synthetic construct
  source 1..75: mol_type = other DNA
cccgcgctgtgctacagatgctcctgctccggagcattatcagttgcttgtgcagcttcctgccatgtggaattc

SEQ ID NO: 340428 - DNA, 75 bp, synthetic construct
  source 1..75: mol_type = other DNA
ggcgtaatcattttgcagaaccggcagttcgtgagcctgcagctccgcgctactctcctgcgccagccgcaggta

SEQ ID NO: 340429 - DNA, 75 bp, synthetic construct
  source 1..75: mol_type = other DNA
taacatgacgctggaaaatccttcaccagagctgttcacggtgttgatccgtgaactgaccgggaggggacgatg

SEQ ID NO: 340430 - DNA, 75 bp, synthetic construct
  source 1..75: mol_type = other DNA
ccattacggtaaaatgacgctggaaaatccttcaccagagctgctcacggtgttgatccgtgagctgaccgggag

SEQ ID NO: 340431 - DNA, 75 bp, synthetic construct
  source 1..75: mol_type = other DNA
ccgcgctgtgctacagatgctcctgctccggaggcattatcagttgcttgtgcagcttcctgccatgtggaattc

SEQ ID NO: 340432 - DNA, 75 bp, synthetic construct
  source 1..75: mol_type = other DNA
ccgcgcgctgccagaatcagagcgtgttcctgctatatcatcaatgttgcaagatgctatctcgcatggtgtacg

SEQ ID NO: 340433 - DNA, 75 bp, synthetic construct
  source 1..75: mol_type = other DNA
atcaaaaacgtatgctgtatctgttcgttgaccagatcagaaaatctgatggcaccctacaggaacatgacggta

SEQ ID NO: 340434 - DNA, 75 bp, synthetic construct
  source 1..75: mol_type = other DNA
gcgtgttttcccccgggtgggaagcagccagactgcgttcaagggcgttaatcatggcctatgaggcggtgaaac

SEQ ID NO: 340435 - DNA, 75 bp, synthetic construct
  source 1..75: mol_type = other DNA
cactattcattattcaagcatcgcataacccgcaaaacatcccaaataacccgcaaacgccccaaaataacccgc

SEQ ID NO: 340436 - DNA, 75 bp, synthetic construct
  source 1..75: mol_type = other DNA
agccccgttctaggggatggcgtggatcgcacaacggaaaacaacatcttttcgacagcttacaataattacctt

SEQ ID NO: 340437 - DNA, 75 bp, synthetic construct
  source 1..75: mol_type = other DNA
catttaccttccctgacggtacgagcacggaagatattggctccgccattgatgagtattttgctggtcaggctg

SEQ ID NO: 340438 - DNA, 75 bp, synthetic construct
  source 1..75: mol_type = other DNA
ttcaggaagccaccaaagcagtaagagcaggcggaagtaaagaagcattagcggcggcggaacgcagatttatgg

SEQ ID NO: 340439 - DNA, 75 bp, synthetic construct
  source 1..75: mol_type = other DNA
tgttttcgggcgtgatttggcaacagatgcactgattacgaatggagtaaaatcccttcaatcatcgtcagctaa

SEQ ID NO: 340440 - DNA, 75 bp, synthetic construct
  source 1..75: mol_type = other DNA
cccgggttgccggagaaatgcgcagagctatcactgatgacatgcgcatcatggctgaaaaaggaaacttcctca

SEQ ID NO: 340441 - DNA, 75 bp, synthetic construct
  source 1..75: mol_type = other DNA
agaaatcaacattacgttgaaccgcagtactctggagatgctgagaaatctttcaaaagagatcacagaatcaga

SEQ ID NO: 340442 - DNA, 75 bp, synthetic construct
  source 1..75: mol_type = other DNA
cacagcaagctaatgacaaggtctttaaaacggcccatgttgccttttcagtagttactggcacaggtcgttacg

SEQ ID NO: 340443 - DNA, 75 bp, synthetic construct
  source 1..75: mol_type = other DNA
ttctttcctgctgtttggtatggcactggtgtacgcgcagtctggcgacctgtcgtttgttgcactgggtaaaaa

SEQ ID NO: 340444 - DNA, 75 bp, synthetic construct
  source 1..75: mol_type = other DNA
tattgggcttaacgcggcgctggtttcgctctggtttgttggccaggcgggcgctatggacgttacgccgctgat

SEQ ID NO: 340445 - DNA, 75 bp, synthetic construct
  source 1..75: mol_type = other DNA
tgatgcgctggcgacagctaacgacatgaaccgtaacgtactctgcacctcgaacccttacgagtcgcagctgca

SEQ ID NO: 340446 - DNA, 75 bp, synthetic construct
  source 1..75: mol_type = other DNA
aaatcaacagcggacaggttgatccgctggcggcccattatatatctcccgtcgatgaggacagctatacgctgc

SEQ ID NO: 340447 - DNA, 75 bp, synthetic construct
  source 1..75: mol_type = other DNA
ggtcggttacgctttccgccagaaacgttcgctggaagccagtatcaaatacaccattctctctgccgcagcgtc

SEQ ID NO: 340448 - DNA, 75 bp, synthetic construct
  source 1..75: mol_type = other DNA
ctgggctttatcggtaagttctacgtgctggcggtcggtgtccaggcacacttgtggtgctggtgggtgccgtag

SEQ ID NO: 340449 - DNA, 75 bp, synthetic construct
  source 1..75: mol_type = other DNA
attgatgcgtatgcatacatggcatatgcctttctggagcaggagacaccgcgaaaagcgctgaatattgcactc

SEQ ID NO: 340450 - DNA, 75 bp, synthetic construct
  source 1..75: mol_type = other DNA
tggctaagtggcataacattccgcagggtgtttcgttaagcgaggaacaacaacgttatatcgtggcggtaatct

SEQ ID NO: 340451 - DNA, 75 bp, synthetic construct
  source 1..75: mol_type = other DNA
attgcctgctcgtgtgccagtttccgtataacaactatataaatcaaacccgctgtagcgggtttgatttatttg

SEQ ID NO: 340452 - DNA, 75 bp, synthetic construct
  source 1..75: mol_type = other DNA
gtatgggacgcagattctatcgctggaatcgagacagacgagaagaaagaactttcgtcggcctacagatatgta

SEQ ID NO: 340453 - DNA, 75 bp, synthetic construct
  source 1..75: mol_type = other DNA
gtctgatcgctatggattccgcagagtctatttatcgctttgctcttgattcaatcggtgccgaacataaaggcg

SEQ ID NO: 340454 - DNA, 75 bp, synthetic construct
  source 1..75: mol_type = other DNA
tgcatgtaccagagaatccgtccaccaaaaatatgatgggcacgaaagagatttcgctaatgaaacccggctcgc

SEQ ID NO: 340455 - DNA, 75 bp, synthetic construct
  source 1..75: mol_type = other DNA
aagggcgtattcccggtgccattcagaccgccgtcatggataccgcgcagggctgggtggactccatcaaatcag

SEQ ID NO: 340456 - DNA, 75 bp, synthetic construct
  source 1..75: mol_type = other DNA
atgcagtcacttgatccactcttcgcgcgtttagcccgttcaaaatttcgctctcgctttcgtctgggcgtcaag

SEQ ID NO: 340457 - DNA, 75 bp, synthetic construct
  source 1..75: mol_type = other DNA
gagcgtcagtattgtctggagaaaggcgcgccagtcatcgaacaacatgcggcggattttgtcgctaaacgtctt

SEQ ID NO: 340458 - DNA, 75 bp, synthetic construct
  source 1..75: mol_type = other DNA
ggcaataaaagccgccatgaccggccatctgatgctgaccaccatccatgcgaacgacccgattaacatcctcga

SEQ ID NO: 340459 - DNA, 75 bp, synthetic construct
  source 1..75: mol_type = other DNA
ctgaaaaagaacgtcaagccggcacaccagatgctgcactcggtcgggcttgatgcgctggcaaccgccaacgac

SEQ ID NO: 340460 - DNA, 75 bp, synthetic construct
  source 1..75: mol_type = other DNA
gcgggtgtaccggaaagtgaaaaagcgaagatcgagaagatcgccaaagagagcgggttgatgaatgccgtcaca

SEQ ID NO: 340461 - DNA, 75 bp, synthetic construct
  source 1..75: mol_type = other DNA
cggctttaagggcgataacttcctgctgatccgcttccacggcatgtatcagcaggatgaccgcgacatccgcgc

SEQ ID NO: 340462 - DNA, 75 bp, synthetic construct
  source 1..75: mol_type = other DNA
aaatttgccggtgaaaacaccatctatggcagcattcgcctgaccaaccgccagacgttccagttccacggcatt

SEQ ID NO: 340463 - DNA, 75 bp, synthetic construct
  source 1..75: mol_type = other DNA
gacacgaaatcagcatctgctgggaaaaatcaacagcggacaggttgatccgctggcggcccattacatctctcc

SEQ ID NO: 340464 - DNA, 75 bp, synthetic construct
  source 1..75: mol_type = other DNA
aagaagaaggcctcgaattactgggggccacctattccggcatgaccgatgttatcaaaggcacacagtttgatc

SEQ ID NO: 340465 - DNA, 75 bp, synthetic construct
  source 1..75: mol_type = other DNA
gttgttcatcggactgctcagtcagcgtctggttcagctgatatgtccccactgccgtcatccatggaatgacgt

SEQ ID NO: 340466 - DNA, 75 bp, synthetic construct
  source 1..75: mol_type = other DNA
aaaatcaacagcgggcaggttgatccgctggcggcccattacatctctcccatcgacgaggacagctatacgctg

SEQ ID NO: 340467 - DNA, 75 bp, synthetic construct
  source 1..75: mol_type = other DNA
acggcaataaaagccgccatgaccgggcatctgatgctgaccaccatccatgcgaacgacccgattaacatcctc

SEQ ID NO: 340468 - DNA, 75 bp, synthetic construct
  source 1..75: mol_type = other DNA
atttcgttgcaatacttgattgtgacatggcgcctaatcctctttgggtccagtcttatatggaactacttgaat

SEQ ID NO: 340469 - DNA, 75 bp, synthetic construct
  source 1..75: mol_type = other DNA
ttcagggccgcgcaaaacgctttgccaaaattgcaggcgaaatggtgtcgctggaaatggtggaacaactggcac

SEQ ID NO: 340470 - DNA, 75 bp, synthetic construct
  source 1..75: mol_type = other DNA
acttacaatatattaggtgattttaaaaaatcctctatacaccaatatgattgtgaaccttttttttctcggtgg

SEQ ID NO: 340471 - DNA, 75 bp, synthetic construct
  source 1..75: mol_type = other DNA
ctataacataatttattccccaaataatattaatccgattcttttgggggctaaatgtaagtcaataattactat

SEQ ID NO: 340472 - DNA, 75 bp, synthetic construct
  source 1..75: mol_type = other DNA
ctggtgatgcaaaaatcgttgccacacttttcgaatctctgatcaaagttggcgcacgcaacttgcctgtcacca

SEQ ID NO: 340473 - DNA, 75 bp, synthetic construct
  source 1..75: mol_type = other DNA
tatgatggaagcgcgtatggccgtgcgtccacgtgaaacgctgtacgaatcgctgctgagcgcgatgtaccgttt

SEQ ID NO: 340474 - DNA, 75 bp, synthetic construct
  source 1..75: mol_type = other DNA
ggcgtattttgcctggtatggatgctcgactgctggcggttccgggtatcgaagacggtggtcgcctgcaactaa

SEQ ID NO: 340475 - DNA, 75 bp, synthetic construct
  source 1..75: mol_type = other DNA
aggccgtaaatacgttacgcgaaggcaagagtgactttattatttcgtttcgcgatgaagatcttatgcaatcgc

SEQ ID NO: 340476 - DNA, 75 bp, synthetic construct
  source 1..75: mol_type = other DNA
cttacccaacattaaaattgctgcagcgcactcactatccctgagcgtattaccgaaactggtgcattcacttac

SEQ ID NO: 340477 - DNA, 75 bp, synthetic construct
  source 1..75: mol_type = other DNA
tcaaactgaaagatggtgaagatccgggatacaccctgtacgacctctctgaacgtctgcgtctgcgcggctggc

SEQ ID NO: 340478 - DNA, 75 bp, synthetic construct
  source 1..75: mol_type = other DNA
aatcgctttgctggaggaaacagcgggtatccgcgacgatgtgctggcagcaatgcaagacgaactggataacct

SEQ ID NO: 340479 - DNA, 75 bp, synthetic construct
  source 1..75: mol_type = other DNA
gtgaagcggtgccattactgatcagtcttattttacttctgttggtcattacctatattccggcaatatctttgc

SEQ ID NO: 340480 - DNA, 75 bp, synthetic construct
  source 1..75: mol_type = other DNA
atgaaggccaggaaggcgatgtttcgtggtgaacaactcgcgcagacttatcgtatgtggaaacgtttctatcgt

SEQ ID NO: 340481 - DNA, 75 bp, synthetic construct
  source 1..75: mol_type = other DNA
gacgaactggataacctcccgatcttcgtctccgccgcccaaaaagacgcattccgcctcaaagaacctggtgat

SEQ ID NO: 340482 - DNA, 75 bp, synthetic construct
  source 1..75: mol_type = other DNA
tttaactttaccgccgttacctgagagcacaaacgattatgtttgggcggggaaaagaaaagagcttgatgatta

SEQ ID NO: 340483 - DNA, 75 bp, synthetic construct
  source 1..75: mol_type = other DNA
attggcccctcttattattaattatgtaaagcaaacgatgacttttaggcaatgggtaagtcaatcagaattaaa

SEQ ID NO: 340484 - DNA, 75 bp, synthetic construct
  source 1..75: mol_type = other DNA
gctcaaatacagtgagacagtatggatggaacttaggagagttcaatcactcaacgccttttacatctcatttta

SEQ ID NO: 340485 - DNA, 75 bp, synthetic construct
  source 1..75: mol_type = other DNA
agaaaatatagagcagataattagaaagtttgagcaattaattgatgttaaatatgtccgccaaaaagattacgg

SEQ ID NO: 340486 - DNA, 75 bp, synthetic construct
  source 1..75: mol_type = other DNA
agagttgaacttattttcattgcctgaaagtaccaatgattttaaatggttgtctaataaaaaaataattgttga

SEQ ID NO: 340487 - DNA, 75 bp, synthetic construct
  source 1..75: mol_type = other DNA
tacagcaaaaagttccttatttctatagaaaaaaagaaaaaatagaatccgcgacattaaaaagagtaccactag

SEQ ID NO: 340488 - DNA, 75 bp, synthetic construct
  source 1..75: mol_type = other DNA
tcaccgtctggctggggatttccatcatggttttctcctttaacttctcaccaatcgtctcttctttcgtcgttt

SEQ ID NO: 340489 - DNA, 75 bp, synthetic construct
  source 1..75: mol_type = other DNA
gtgctgatttctctgtcgctgatcccttactggaactctgcggttatcgatcaagttgaccttggtgcgctgtcg

SEQ ID NO: 340490 - DNA, 75 bp, synthetic construct
  source 1..75: mol_type = other DNA
cttcggtcgcgacttcaccgaacgtaaatgttcccaaatcatttctcgtgccagcatgctgatggttgcagtggt

SEQ ID NO: 340491 - DNA, 75 bp, synthetic construct
  source 1..75: mol_type = other DNA
ctgtgcctgttgccgatgtatgccatccgtaaagcgccgtctctggcgaaataccgtggtcgtctggataacgtg

SEQ ID NO: 340492 - DNA, 75 bp, synthetic construct
  source 1..75: mol_type = other DNA
ccagcatgttgatggttgcggtagtgatgttcttcgcctttagctgcctgtttactctttctccggcgaatatgg

SEQ ID NO: 340493 - DNA, 75 bp, synthetic construct
  source 1..75: mol_type = other DNA
ataccgtggtcgtctggataacgtgtttgttaccgtgattggtctgctgaccatcctgaacatcgtatacaaact

SEQ ID NO: 340494 - DNA, 75 bp, synthetic construct
  source 1..75: mol_type = other DNA
gctgcatgtgccaaaaaaggtacatcgatcactgatgtggtgaaccagcttgtagatgaatggctcaaagagaac

SEQ ID NO: 340495 - DNA, 75 bp, synthetic construct
  source 1..75: mol_type = other DNA
aactactacggtggttgtaccgataacctgagtgaacaggaacgtcagcaaatcagcatgctggtcaccattgcc

SEQ ID NO: 340496 - DNA, 75 bp, synthetic construct
  source 1..75: mol_type = other DNA
gcttataacaacttttgttaccgtttttggtgttatgattgctttgatgacatataacgctggagttaaaaataa

SEQ ID NO: 340497 - DNA, 75 bp, synthetic construct
  source 1..75: mol_type = other DNA
tggtaaaactggcggcgtggttatcacgttcctgtacttcttcgcgatttgcccactgctgtggatttatggcgt

SEQ ID NO: 340498 - DNA, 75 bp, synthetic construct
  source 1..75: mol_type = other DNA
cacagaacgatattctgctggctgccgccgctgacacccgacagaccaccgggaagaacagcagcaaaggtggcg

SEQ ID NO: 340499 - DNA, 75 bp, synthetic construct
  source 1..75: mol_type = other DNA
taccggtatgtccggcagcagtggacatgctgaaggtaccacgtcatccgccatcagcggcggaaatctcattat

SEQ ID NO: 340500 - DNA, 75 bp, synthetic construct
  source 1..75: mol_type = other DNA
cattctggctgaatcgctgggaatgtatgtttacttttatgatattgaaaacaaactgccgctgggcaacgccac

SEQ ID NO: 340501 - DNA, 75 bp, synthetic construct
  source 1..75: mol_type = other DNA
cctctccgactctggttccagtggaacttatcgacaccccgcgctgtgctacagatgctcctgctccggaggcat

SEQ ID NO: 340502 - DNA, 75 bp, synthetic construct
  source 1..75: mol_type = other DNA
gcagtcgtattacctcatggtgtgctgtttcgtggcggcgcagagggggcaattcgaaccaaattactgcaagag

SEQ ID NO: 340503 - DNA, 75 bp, synthetic construct
  source 1..75: mol_type = other DNA
tatgtttacttctatgatattgaaaacaaactgccgctgggtaacgcgacgcaggtgcaacatctttccgacttg

SEQ ID NO: 340504 - DNA, 75 bp, synthetic construct
  source 1..75: mol_type = other DNA
tgcatgtaccagagaatccgtccaccaaaaatatgatgggcgcgaaagagatttcgctaatgaagcccggctcgc

SEQ ID NO: 340505 - DNA, 75 bp, synthetic construct
  source 1..75: mol_type = other DNA
tcaggtacagcatctttctgacctgctgaatatgagcgatgtggtgagtctgcatgtaccagagaatccgtccac

SEQ ID NO: 340506 - DNA, 75 bp, synthetic construct
  source 1..75: mol_type = other DNA
actggaaacagttgcttattgtcgtgatgcttgctgcgctggtggtcagtggcgttgttgcctggaatatacacg

SEQ ID NO: 340507 - DNA, 75 bp, synthetic construct
  source 1..75: mol_type = other DNA
ttttgcatcagcaatttctttgagattctatttacgtaagaaatttgcacacagagccgttttcacacataaaag

SEQ ID NO: 340508 - DNA, 75 bp, synthetic construct
  source 1..75: mol_type = other DNA
cattcaaccatcaaatatggagccgtttcatcttggttagctttactaataggaattgtgctgttggcgatagct

SEQ ID NO: 340509 - DNA, 75 bp, synthetic construct
  source 1..75: mol_type = other DNA
ggtatcggtaaaaaaaactgctggcggagaattttccggatggtgtgttacgtccgggattcgcctgagtaaact

SEQ ID NO: 340510 - DNA, 75 bp, synthetic construct
  source 1..75: mol_type = other DNA
ggcggcaacgatcttatgaacgttgtgtcgcttcgccgtccccgggacctgacgctgtatgacagcccgatgggc

SEQ ID NO: 340511 - DNA, 75 bp, synthetic construct
  source 1..75: mol_type = other DNA
gatcttagctggtctggtttccgcccggacatgatcaaccgtctgcatccagcgccacacgcggccagtgcatga

SEQ ID NO: 340512 - DNA, 75 bp, synthetic construct
  source 1..75: mol_type = other DNA
tttacaccaaacttcacccaccaatccagaccaatcagttcattacgtatgttctgcacattgcccaaatccgat

SEQ ID NO: 340513 - DNA, 75 bp, synthetic construct
  source 1..75: mol_type = other DNA
tgcgcaggcgcaggaagaccagaaacaggctgatgataaagcccgtaatcacgatgaacaggagaaagctaccaa

SEQ ID NO: 340514 - DNA, 75 bp, synthetic construct
  source 1..75: mol_type = other DNA
accgacaactggcagagtacgctgaccgggccgccgaagccggacgagtctgtgaaaagcagtacgattcgctga

SEQ ID NO: 340515 - DNA, 75 bp, synthetic construct
  source 1..75: mol_type = other DNA
atgatctgggcattcgtaaaagcatactggaaacatttgattatcgtggcgatgcttgctgttcttgccacatca

SEQ ID NO: 340516 - DNA, 75 bp, synthetic construct
  source 1..75: mol_type = other DNA
ttttacattagtaattttaatgaaattatatattcgcaagaaatttgcacacagagctatttttacacatagaag

SEQ ID NO: 340517 - DNA, 75 bp, synthetic construct
  source 1..75: mol_type = other DNA
atttattagtaggtatcattactttttttgcattagtaattttaatgaaattatatattcgcaagaaatttgcac

SEQ ID NO: 340518 - DNA, 75 bp, synthetic construct
  source 1..75: mol_type = other DNA
actggtaacgggcggttctggtctggcgattggccttgcccggcagtgggcgcaagaaaacggtaaccaggctcg

SEQ ID NO: 340519 - DNA, 75 bp, synthetic construct
  source 1..75: mol_type = other DNA
ctaagtttttgcaaagcgatcgtttagaaactttcgactgcgttgttgccaacccaccatttagcttgaaggaat

SEQ ID NO: 340520 - DNA, 75 bp, synthetic construct
  source 1..75: mol_type = other DNA
gtttggcgttgagctgtatgacctgaatcacccgtatcaggggatcgtccacgtgatggggccagaacagggtgt

SEQ ID NO: 340521 - DNA, 75 bp, synthetic construct
  source 1..75: mol_type = other DNA
gtgatttccgtgaacgacaatattcccgatccggcttcgtttgccgatccggttgaacgcgcgtcggcagaaaaa

SEQ ID NO: 340522 - DNA, 75 bp, synthetic construct
  source 1..75: mol_type = other DNA
tgaccgaagtggctatcgacaaagtgtttatcggttcctgcactaactcgcgtattgaagatttacgcgcggcgg

SEQ ID NO: 340523 - DNA, 75 bp, synthetic construct
  source 1..75: mol_type = other DNA
gaagctccagcgcggcagggcgggggaaatgaacgccttgctgctgggctgcgtggatgaaaacctcaattatgt

SEQ ID NO: 340524 - DNA, 75 bp, synthetic construct
  source 1..75: mol_type = other DNA
cgcatgcgactgtccctgagggtaaatggattatccgggatacagaacatcagacgcaggatgtggcgacgctga

SEQ ID NO: 340525 - DNA, 75 bp, synthetic construct
  source 1..75: mol_type = other DNA
atgagtggggtatttttacggtttcgatggcggtgcgtcgtgataactgaacgtcggaacgtattgctacaaggc

SEQ ID NO: 340526 - DNA, 75 bp, synthetic construct
  source 1..75: mol_type = other DNA
aaatttgccggtgaaaacaccatctatggcagcattcgcctgaccaaccgtcagacgttccagttccacggtatt

SEQ ID NO: 340527 - DNA, 75 bp, synthetic construct
  source 1..75: mol_type = other DNA
gtacccgcgcgtatgcggagatctggctcgaccaggaaaaagtcgccactactgatgaagaaccgatcctcggcc

SEQ ID NO: 340528 - DNA, 75 bp, synthetic construct
  source 1..75: mol_type = other DNA
ataacttaatggcgaaacatggcatcagcgatgagcatatcgtaatgcgtgtgacgggatgcccgaacggctgtg

SEQ ID NO: 340529 - DNA, 75 bp, synthetic construct
  source 1..75: mol_type = other DNA
ctatcatcttcctgcatattcttcattagaatataaaggttcctttggctcaataaatgcaggttatgctgactg

SEQ ID NO: 340530 - DNA, 75 bp, synthetic construct
  source 1..75: mol_type = other DNA
gagtgctttatattaggcggttgtctgatggctaacttacagcacattcatcaaagccggtgccatatttccttt

SEQ ID NO: 340531 - DNA, 75 bp, synthetic construct
  source 1..75: mol_type = other DNA
aatatttatcgtaatcgtgttaatcattcatggagaggggtggtttcacaatgtccagcttgcggaagcacatct

SEQ ID NO: 340532 - DNA, 75 bp, synthetic construct
  source 1..75: mol_type = other DNA
ccggtgtcgacttcaccctctttcaatgtactgatgcggcaatcgccattctggcaggcgttatcggtggcgttg

SEQ ID NO: 340533 - DNA, 75 bp, synthetic construct
  source 1..75: mol_type = other DNA
actaagctcgcggataaagttgatgccatccaaaatatttgatgtcgtcaaatttacgccatcgcaacatactga

SEQ ID NO: 340534 - DNA, 75 bp, synthetic construct
  source 1..75: mol_type = other DNA
ttcaggaagttctgcaccgttgtagcatttcaagatcgtctctttatcgcttaatttccaaggggcacttcccct

SEQ ID NO: 340535 - DNA, 75 bp, synthetic construct
  source 1..75: mol_type = other DNA
gtcgctgccatatttcctttgtcaaagagcgcggtgtggcacccgccaccattgattttccaccgcgattattcc

SEQ ID NO: 340536 - DNA, 75 bp, synthetic construct
  source 1..75: mol_type = other DNA
cttttggcgcggagtcggcactaggcgaaagaggattatttgccggggaagatatttcgttgattggtaatgatg

SEQ ID NO: 340537 - DNA, 75 bp, synthetic construct
  source 1..75: mol_type = other DNA
cgcgcaacctgatgcgccgctcagccattacgtttatcgcccaaccctgcaaattcgcgcttccaccggaaagca

SEQ ID NO: 340538 - DNA, 75 bp, synthetic construct
  source 1..75: mol_type = other DNA
gaaccattggctctggggaaacaggcggcgcagcaaattttacggcgtattgcgcaaccagacgcaccgctcagc

SEQ ID NO: 340539 - DNA, 75 bp, synthetic construct
  source 1..75: mol_type = other DNA
ggaatctgcggttggcaatggagaaggaatttcctgatgaggaatggcgttcggcagatttgcgcaaaattctta

SEQ ID NO: 340540 - DNA, 75 bp, synthetic construct
  source 1..75: mol_type = other DNA
atacccgtcgaccgtcgttggaattatcagaaacctgatcaacgtcgaatcaaaatagcactgccatatgtcgta

SEQ ID NO: 340541 - DNA, 75 bp, synthetic construct
  source 1..75: mol_type = other DNA
ctgcttcctgtttgccggggcattcacgttgctggcggcgtgggttgcttatatccggctgcattcggcaagaga

SEQ ID NO: 340542 - DNA, 75 bp, synthetic construct
  source 1..75: mol_type = other DNA
atcagaaagtcattacttcttaacagcactggacttagccgtgaactgttaaaattagcgcgtgaagcaaactat

SEQ ID NO: 340543 - DNA, 75 bp, synthetic construct
  source 1..75: mol_type = other DNA
ttatggtggtcagtctggttatgttggccagtattatcgctattcattattggccgtgggtacggtgggcttggc

SEQ ID NO: 340544 - DNA, 75 bp, synthetic construct
  source 1..75: mol_type = other DNA
agtctggatcttttatatggattttcgctgttcgtttgtagctcgacattcgaacagcgccgacttgtccaccgg

SEQ ID NO: 340545 - DNA, 75 bp, synthetic construct
  source 1..75: mol_type = other DNA
aggcgatgaatctttcctcgccgaagcgacgcctgccaccacggaattgtgggaaaaagtaatggaaggtatccg

SEQ ID NO: 340546 - DNA, 75 bp, synthetic construct
  source 1..75: mol_type = other DNA
tgcacgaaatgcgcgatgatgtcgcatttcagattatcaatgatgaattatatcttgatggcaacgctcgtcaga

SEQ ID NO: 340547 - DNA, 75 bp, synthetic construct
  source 1..75: mol_type = other DNA
ctggactgtcagcgtgcaactgcccgaaagcgagaaagcgccgcgcccgagccgtgtctggcaaaacagggcgtg

SEQ ID NO: 340548 - DNA, 75 bp, synthetic construct
  source 1..75: mol_type = other DNA
tgcagttctttggtgcgcgcgctaacctggcgaaaacactgctgtacgcaattaacggcggggtggatgagaagc

SEQ ID NO: 340549 - DNA, 75 bp, synthetic construct
  source 1..75: mol_type = other DNA
ggtgcagtacatcagcgcgctgaacctcatccactacatgcatgacaagtacagctacgaagcctcgctgatggc

SEQ ID NO: 340550 - DNA, 75 bp, synthetic construct
  source 1..75: mol_type = other DNA
cagggcgtatttgatgtttactcaccggatatgctgcgctgccgtaaatctggcgtgctgaccggtttaccagat

SEQ ID NO: 340551 - DNA, 75 bp, synthetic construct
  source 1..75: mol_type = other DNA
gaagtatagcagaaaagtatataccatgtataaaaggagggttttatgttacacagcaggatgagagcctcgtat

SEQ ID NO: 340552 - DNA, 75 bp, synthetic construct
  source 1..75: mol_type = other DNA
atcgcccgtcgccgcattcccgcaatgatgaactacactgccggggtaaaagggctgaccagtgctattacggcg

SEQ ID NO: 340553 - DNA, 75 bp, synthetic construct
  source 1..75: mol_type = other DNA
gcttaatgctgcccaatgcaggcatcagtgcggcagtgatttttggggccatcgcccgtcgccgcatgcccgcaa

SEQ ID NO: 340554 - DNA, 75 bp, synthetic construct
  source 1..75: mol_type = other DNA
ggatcgacaaagaagaatatccgcaatccgcagccatcgacctacgttgcgtaaatatggttgccgatctgtggc

SEQ ID NO: 340555 - DNA, 75 bp, synthetic construct
  source 1..75: mol_type = other DNA
tcgtggtgatgcgcattatgtgtcgtcgcggcttcgaaatggactttgctgaactgttgctggaagactacaaag

SEQ ID NO: 340556 - DNA, 75 bp, synthetic construct
  source 1..75: mol_type = other DNA
ggcggtttgcttcaaactgaaagatggtgaagatccgggatacaccctgtatgacctctctgaacgtctgcgtct

SEQ ID NO: 340557 - DNA, 75 bp, synthetic construct
  source 1..75: mol_type = other DNA
gctacacgatcgtgatgtctatcgcaccatggcgtgcggcatcgcgggcctgtcggtggcaacggactccctgtc

SEQ ID NO: 340558 - DNA, 75 bp, synthetic construct
  source 1..75: mol_type = other DNA
gatctcgtacaccttctccatcgtccctgcggcgctgggcaaagaagatccgatacgtaaaacgaaccttgtcgg

SEQ ID NO: 340559 - DNA, 75 bp, synthetic construct
  source 1..75: mol_type = other DNA
ccggaatttgattcgctgttctccggcgacccgatctgggcgacggaagtgatcggcgggatggggctggacggt

SEQ ID NO: 340560 - DNA, 75 bp, synthetic construct
  source 1..75: mol_type = other DNA
cgtccggcgcagaatgcccaggaagcggtgcagtggctctattttgcttacctggcggcagtgaagtcgcagaat

SEQ ID NO: 340561 - DNA, 75 bp, synthetic construct
  source 1..75: mol_type = other DNA
aagatggtgaagatccgggatacaccctgtacgacctctctgaacgtctgcgtctgcgcggctggcaggttccgg

SEQ ID NO: 340562 - DNA, 75 bp, synthetic construct
  source 1..75: mol_type = other DNA
tgtacgggtcgcccggacgaaggcatcccggcggtttgcttcaaactgaaagatggtgaagatccgggatacacc

SEQ ID NO: 340563 - DNA, 75 bp, synthetic construct
  source 1..75: mol_type = other DNA
taccaggttgccgcttatctggcggatgaaatcgccaaactggggccgtatgagttcatctgtacgggtcgcccg

SEQ ID NO: 340564 - DNA, 75 bp, synthetic construct
  source 1..75: mol_type = other DNA
gacggtcgccgcgcgggtacgccgtttgcgccgggcgctaacccgatgcacggtcgtgaccgcaaaggcgcggta

SEQ ID NO: 340565 - DNA, 75 bp, synthetic construct
  source 1..75: mol_type = other DNA
gcaacgccagcgaccacggcattgtgggaaaaagtaatggaaggcattcgtatcgaaaatgcgacccacgcgccg

SEQ ID NO: 340566 - DNA, 75 bp, synthetic construct
  source 1..75: mol_type = other DNA
acctggttgaacgttttatgaagaaaattaaagcgctgccaacctatcgcaacgccgtccctacccagtcgattc

SEQ ID NO: 340567 - DNA, 75 bp, synthetic construct
  source 1..75: mol_type = other DNA
tggtcgtgaccgcaaaggtgccgtggcctcattgacgtcggtggcgaaactgccgttcacctacgccaaagacgg

SEQ ID NO: 340568 - DNA, 75 bp, synthetic construct
  source 1..75: mol_type = other DNA
cgtccggcgcagaatgcacaagaagccgtgcagtggctctacttcgcttacctggcggcagtgaaatcgcaaaat

SEQ ID NO: 340569 - DNA, 75 bp, synthetic construct
  source 1..75: mol_type = other DNA
gaagcggacatcgaaggcggtcaacatctcaacgttaacgttatgaatcgggaaatgttgttggatgccattgag

SEQ ID NO: 340570 - DNA, 75 bp, synthetic construct
  source 1..75: mol_type = other DNA
actctggcatctgccggagcaacttactcaggtacgctgggtctatctggaagatttaaaagcagatgtcaccac

SEQ ID NO: 340571 - DNA, 75 bp, synthetic construct
  source 1..75: mol_type = other DNA
tcagctaagaacaaaaatacggaattttggcctacccattgtcgcgcagattctgcaatcggactttgaagaaaa

SEQ ID NO: 340572 - DNA, 75 bp, synthetic construct
  source 1..75: mol_type = other DNA
aaacttgttaatcagcagtgtctatgtttctctgaagtgtggatcgatggttcattcactacagagaaacctgaa

SEQ ID NO: 340573 - DNA, 75 bp, synthetic construct
  source 1..75: mol_type = other DNA
tttgccaaacacgctgatgccattggttagctcattgttaaatagagattttattaaagaaaactacagcattga

SEQ ID NO: 340574 - DNA, 75 bp, synthetic construct
  source 1..75: mol_type = other DNA
cgacaaagaagaatatccgcaatctgcagcaatcgacctgcgttgcgtaaacatggttgccgatctgtggcatgc

SEQ ID NO: 340575 - DNA, 75 bp, synthetic construct
  source 1..75: mol_type = other DNA
caaattggcattcgggcgatcgatttgctgcgcgcagaaggcgaccgactgcattcacgtaaattacgaaccttt

SEQ ID NO: 340576 - DNA, 75 bp, synthetic construct
  source 1..75: mol_type = other DNA
atggatcgcctaattagagaaatgtcgtacctctttaccaagcagcgttttttggagcttcaggaagcggccaaa

SEQ ID NO: 340577 - DNA, 75 bp, synthetic construct
  source 1..75: mol_type = other DNA
aagcgcataaaatggcacgcaacaataaccatatgcataagatcgggatgatggccgaagcgttcaggatgaagc

SEQ ID NO: 340578 - DNA, 75 bp, synthetic construct
  source 1..75: mol_type = other DNA
atgaaactttttcgtatcctcgatcctttcaccttaaccctgatcacagtggtattactggcttccttcttcccg

SEQ ID NO: 340579 - DNA, 75 bp, synthetic construct
  source 1..75: mol_type = other DNA
aagttggctggggatcattgctgtttatcgtggtggtcagctgcgttcttctggctatcgtgattgtagttaacg

SEQ ID NO: 340580 - DNA, 75 bp, synthetic construct
  source 1..75: mol_type = other DNA
accgttaaaaaagcggtcgcccaactggtaaaagaaggcgtgttgatacaggtccaggggaagggaacatttgtc

SEQ ID NO: 340581 - DNA, 75 bp, synthetic construct
  source 1..75: mol_type = other DNA
aactgtcagtgccggatgctcacccgtgtccggcgcacgcactctacctcacccgtgaataaattaatgattaat

SEQ ID NO: 340582 - DNA, 75 bp, synthetic construct
  source 1..75: mol_type = other DNA
aaagcctcttttgacgcactcaccaaagcaggtttctggctggatgatgctcaggtcgttgattaccgcgttgtg

SEQ ID NO: 340583 - DNA, 75 bp, synthetic construct
  source 1..75: mol_type = other DNA
ccctggttgtgttgaatggcgtggcgttattgcctctgttcgcaccgtggagcggcatacccagaccgttgtatg

SEQ ID NO: 340584 - DNA, 75 bp, synthetic construct
  source 1..75: mol_type = other DNA
ctgcgcctcggtcgtgaaggctataccaaagtacagaacgcttcctaccaggttgctgcttatctggcggatgaa

SEQ ID NO: 340585 - DNA, 75 bp, synthetic construct
  source 1..75: mol_type = other DNA
gtgttcaacgttgactacctcggcggtcagattggtactttcgccatcaacttctcccgcccggcgggtcaggtg

SEQ ID NO: 340586 - DNA, 75 bp, synthetic construct
  source 1..75: mol_type = other DNA
catcaacttctcccgcccggcgggtcaggtaattgcacagtactatgaattcctgcgcctcggtcgtgaaggcta

SEQ ID NO: 340587 - DNA, 75 bp, synthetic construct
  source 1..75: mol_type = other DNA
cgtgcgatcacttattgataaaactgtcgctgaagataaatcccccgcattttataatcgcttttttgtgcttga

SEQ ID NO: 340588 - DNA, 75 bp, synthetic construct
  source 1..75: mol_type = other DNA
acaccctgtacgacctctctgaacgtctgcgtctgcgcggttggcaggttccggccttcactctcggcggtgaag

SEQ ID NO: 340589 - DNA, 75 bp, synthetic construct
  source 1..75: mol_type = other DNA
gccttatccattccatcactttgccgcatggggtttgtcaggtttgttttaatcgattaaaagcctggcattttc

SEQ ID NO: 340590 - DNA, 75 bp, synthetic construct
  source 1..75: mol_type = other DNA
agttcatttagtgttctgtgaactgccagtaggcagtcaatctgctagagcgatggtttcttatggtggttgtct

SEQ ID NO: 340591 - DNA, 75 bp, synthetic construct
  source 1..75: mol_type = other DNA
catccccagaccgttgtatgctttatttgcggggcgaaaggggatgcccgccatttgcgcgatattttatggatg

SEQ ID NO: 340592 - DNA, 75 bp, synthetic construct
  source 1..75: mol_type = other DNA
caggggcttgcgaacggggaactggtgcgcctgttcgcaccgtggagcggcatacccagaccgttgtatgcttta

SEQ ID NO: 340593 - DNA, 75 bp, synthetic construct
  source 1..75: mol_type = other DNA
acttctcccgcccggcgggtcaggtaattgcacagtactatgaattcctgcgcctcggtcgtgaaggctatacca

SEQ ID NO: 340594 - DNA, 75 bp, synthetic construct
  source 1..75: mol_type = other DNA
gtaattgcacagtactatgaattcctgcgcctcggtcgtgaaggctataccaaagtacagaacgcctcttaccag

SEQ ID NO: 340595 - DNA, 75 bp, synthetic construct
  source 1..75: mol_type = other DNA
tacaggtcacgccaaacgagattaagtactatgtcgggaataagctgactacgtcgaaagaagagatcattcagt

SEQ ID NO: 340596 - DNA, 75 bp, synthetic construct
  source 1..75: mol_type = other DNA
gagcatggaaccggcgctggctgccgtttccgggatgattttcctcggagaaacactgacacccatacagctgct

SEQ ID NO: 340597 - DNA, 75 bp, synthetic construct
  source 1..75: mol_type = other DNA
gttggtatgcctggtcacgacaaaccagtcagcatgaagctgagttaaaaattcgctggctgccattacctaaag

SEQ ID NO: 340598 - DNA, 75 bp, synthetic construct
  source 1..75: mol_type = other DNA
cgacctctctgaacgtctgcgtctgcgcggctggcaggttccggccttcactctcggcggtgaagccaccgacat

SEQ ID NO: 340599 - DNA, 75 bp, synthetic construct
  source 1..75: mol_type = other DNA
cagagaacaacggttgccgctgttgttttacggtgtatctctgggtgggatgaactatctcttttatctctctat

SEQ ID NO: 340600 - DNA, 75 bp, synthetic construct
  source 1..75: mol_type = other DNA
ggcgctcggcgctatcatcgccgcttcaatggggtctacgctgacagtacgcaaagagagcaaaataaaagaatt

SEQ ID NO: 340601 - DNA, 75 bp, synthetic construct
  source 1..75: mol_type = other DNA
gtggaccacgctggtccgttttgatccggtgtatgtgacccacttcaagtgtgataagcaccgcatcagcgatta

SEQ ID NO: 340602 - DNA, 75 bp, synthetic construct
  source 1..75: mol_type = other DNA
gtggaccacgctggtgcgttttgatccggtgtatgtcacccacttcaagtgtgataagcaccgcatcagcgatta

SEQ ID NO: 340603 - DNA, 75 bp, synthetic construct
  source 1..75: mol_type = other DNA
cactggcacaggcggttttatcgcagagaaagatcgttatcatctctatatttcactcgcctgcccgtgggcgca

SEQ ID NO: 340604 - DNA, 75 bp, synthetic construct
  source 1..75: mol_type = other DNA
atgcgcattatgtgtcgtcgcggcttcgaaatggactttgctgaactgttgctggaagactataaagcctccctg

SEQ ID NO: 340605 - DNA, 75 bp, synthetic construct
  source 1..75: mol_type = other DNA
agttttccgggtgcaaccggcgatacactctatcaacatgaatttctgtatcagctttatctccacgccgatcca

SEQ ID NO: 340606 - DNA, 75 bp, synthetic construct
  source 1..75: mol_type = other DNA
gacaccgttaacaacggcgtgtataaagctggttttgccaccagccagcaagcctacgacgaggcggtggcgaaa

SEQ ID NO: 340607 - DNA, 75 bp, synthetic construct
  source 1..75: mol_type = other DNA
tcagactgtgcctctgggaattgcggtagcgctggagttcaccgggccgctggcggtggcgctgttctcttctcg

SEQ ID NO: 340608 - DNA, 75 bp, synthetic construct
  source 1..75: mol_type = other DNA
gccgcgtgtgaaatcgatcagtgcttcaggccataaattcggtctggctccgctgggctgcggctgggttatctg

SEQ ID NO: 340609 - DNA, 75 bp, synthetic construct
  source 1..75: mol_type = other DNA
cgtctgcgtctgcgcggctggcaggttccggccttcactctcggcggtgaagccaccgacatcgtggtgatgcgc

SEQ ID NO: 340610 - DNA, 75 bp, synthetic construct
  source 1..75: mol_type = other DNA
tcgatcagtgcttcaggccataaattcggtctggctccgctgggctgcggctgggttatctggcgtgatgaagaa

SEQ ID NO: 340611 - DNA, 75 bp, synthetic construct
  source 1..75: mol_type = other DNA
ggaagactacaaagcctccctgaaatatctcagcgaccacccgaaactgcagggtattgcccagcagaacagctt

SEQ ID NO: 340612 - DNA, 75 bp, synthetic construct
  source 1..75: mol_type = other DNA
tcggtggtcagattgggactttcgccatcaacttctcccgcccggcgggtcaggtgattgcacagtactatgaat

SEQ ID NO: 340613 - DNA, 75 bp, synthetic construct
  source 1..75: mol_type = other DNA
tcttccgaggcctgtatgctcggcgggatggcgatgaaatggcgttggcgcaagcgtatggaagccgcaggcaaa

SEQ ID NO: 340614 - DNA, 75 bp, synthetic construct
  source 1..75: mol_type = other DNA
ccgactttcggcgtgacctacaccggtaactatgagttcccgcagccgctgcacgatgcgctggataaattccag

SEQ ID NO: 340615 - DNA, 75 bp, synthetic construct
  source 1..75: mol_type = other DNA
tcttccgaggcctgtatgcttggcgggatggcgatgaaatggcgttggcgcaagcgtatggaagctgcaggcaaa

SEQ ID NO: 340616 - DNA, 75 bp, synthetic construct
  source 1..75: mol_type = other DNA
cgcttcctaccaggttgctgcttatctggcggatgaaatcgccaaactggggccgtatgagttcatctgtacggg

SEQ ID NO: 340617 - DNA, 75 bp, synthetic construct
  source 1..75: mol_type = other DNA
ttatcaatgatgaattatatcttgatggcaacgctcgtcagaacctggccactttctgccagacctgggacgacg

SEQ ID NO: 340618 - DNA, 75 bp, synthetic construct
  source 1..75: mol_type = other DNA
acctggtgtgcggtccggtacaaatctgctggcataaattcgcccgctactgggatgtggagctgcgtgagatcc

SEQ ID NO: 340619 - DNA, 75 bp, synthetic construct
  source 1..75: mol_type = other DNA
ggtggtcagattgggactttcgccatcaacttctcccgcccggcgggtcaggtgattgcacagtactatgaattc

SEQ ID NO: 340620 - DNA, 75 bp, synthetic construct
  source 1..75: mol_type = other DNA
ttgttgtcgcagattgccttccgtcgccgcctaccgccggaagaagttaaggcgctgaaattcaaagtacctggc

SEQ ID NO: 340621 - DNA, 75 bp, synthetic construct
  source 1..75: mol_type = other DNA
cttcttcagcaacggttggcttgggatggtgatgtcgctgcaaatggtgatgtttgcttacggtgggatcgaaat

SEQ ID NO: 340622 - DNA, 75 bp, synthetic construct
  source 1..75: mol_type = other DNA
atggtgatgtcgttgcaaatggtgatgtttgcctacggtgggatcgaaattatcgggatcaccgccggtgaagca

SEQ ID NO: 340623 - DNA, 75 bp, synthetic construct
  source 1..75: mol_type = other DNA
acctggccactttctgccagacctgggacgacgagaaagtccataaattgatggatttatctataaagaaaaact

SEQ ID NO: 340624 - DNA, 75 bp, synthetic construct
  source 1..75: mol_type = other DNA
atggatttgtcgatcaataaaactggatcgacaaagaagaatatccgcaatccgcagccatcgacctgcgttgcg

SEQ ID NO: 340625 - DNA, 75 bp, synthetic construct
  source 1..75: mol_type = other DNA
cgtatctcgctgtatgttggttttgcgtggattgtggtgctgttgattggctggatgtttaaacgccgccacgat

SEQ ID NO: 340626 - DNA, 75 bp, synthetic construct
  source 1..75: mol_type = other DNA
ctggaccgtcagcgcgcaattgccggaaggcgataacgcgcctcgcccgagccgggtatggcaaagcaaggcgtg

SEQ ID NO: 340627 - DNA, 75 bp, synthetic construct
  source 1..75: mol_type = other DNA
agtaccctgctgcgcctgctggcaggtctggaaacgccaaccgcaggcgatgtgttagcgggcaccacaccgctg

SEQ ID NO: 340628 - DNA, 75 bp, synthetic construct
  source 1..75: mol_type = other DNA
tgatgtttcaggatgcgcgtctgctaccgtggaaatcggtgattgataacgttgggttaggccttaaaggccagt

SEQ ID NO: 340629 - DNA, 75 bp, synthetic construct
  source 1..75: mol_type = other DNA
tgcgtgcgctgggggaaatgtcggtacataacccggcagccagttctttttcccgttatgcgcaggaaaacctcg

SEQ ID NO: 340630 - DNA, 75 bp, synthetic construct
  source 1..75: mol_type = other DNA
gttcccgacggtgccgcactggatttgggtactgagcgtagtgctgattatctgcgccgtaaacctgatgagcgt

SEQ ID NO: 340631 - DNA, 75 bp, synthetic construct
  source 1..75: mol_type = other DNA
atggaaagtaagaacaagctaaagcgtgggctaagtacccgacacatacgctttatggcactgggttcagcaatt

SEQ ID NO: 340632 - DNA, 75 bp, synthetic construct
  source 1..75: mol_type = other DNA
acctggccactttctgccagacctgggacgacgagaatgtccataaattgatggatttatcaataaagaaaaact

SEQ ID NO: 340633 - DNA, 75 bp, synthetic construct
  source 1..75: mol_type = other DNA
ggtccgaactactcgattcacgttttggcgccaagccgatttcgactatcgcagaatcaaaacgttttccgctgc

SEQ ID NO: 340634 - DNA, 75 bp, synthetic construct
  source 1..75: mol_type = other DNA
gctccgaactactcgattcacgttttggcgctaagccgatttcgactatcgcagaatcaaaacggtttccgctgc

SEQ ID NO: 340635 - DNA, 75 bp, synthetic construct
  source 1..75: mol_type = other DNA
gttccgaactactcgattcacgttttggcgccaagccgatttcgactatcgcagaatcaaaacgatttccgctgc

SEQ ID NO: 340636 - DNA, 75 bp, synthetic construct
  source 1..75: mol_type = other DNA
tctcggcggtgaagccaccgacatcgtggtgatgcgcattatgtgtcgtcgcggcttcgaaatggactttgctga

SEQ ID NO: 340637 - DNA, 75 bp, synthetic construct
  source 1..75: mol_type = other DNA
ccgactttcggcgtgacctacaccggtaactatgagttcccacaaccgctgcacgatgcgctggataaattccag

SEQ ID NO: 340638 - DNA, 75 bp, synthetic construct
  source 1..75: mol_type = other DNA
atgcacatcgacgccgccagcggtggcttcctggcaccgttcgtcgccccggatatcgtctgggacttccgcctg

SEQ ID NO: 340639 - DNA, 75 bp, synthetic construct
  source 1..75: mol_type = other DNA
gcacagtactatgaattcctgcgcctcggtcgtgaaggctatacaaaagtacagaacgcatcctaccgcacgttc

SEQ ID NO: 340640 - DNA, 75 bp, synthetic construct
  source 1..75: mol_type = other DNA
acctggccactttctgccagacctgggacgacgagaaggtccataaattgatggatttttccataaagaaaaact

SEQ ID NO: 340641 - DNA, 75 bp, synthetic construct
  source 1..75: mol_type = other DNA
acctggccactttctgccagacctgggacgacgagaacgtccataaattgatggatttttcgataaagaaaaact

SEQ ID NO: 340642 - DNA, 75 bp, synthetic construct
  source 1..75: mol_type = other DNA
gttccgaactactcgattcacgttttggcgcaaagccgatttcgactatcgcagaatcaaaacgctttccgctgc

SEQ ID NO: 340643 - DNA, 75 bp, synthetic construct
  source 1..75: mol_type = other DNA
gcacagtactatgaattcctgcgcctcggtcgtgaaggctatacaaaagtacagaacgcgtccgatcgcacgttc

SEQ ID NO: 340644 - DNA, 75 bp, synthetic construct
  source 1..75: mol_type = other DNA
gcacagtactatgaattcctgcgcctcggtcgtgaaggctatacaaaagtacagaacgcttccaaccgcacgttc

SEQ ID NO: 340645 - DNA, 75 bp, synthetic construct
  source 1..75: mol_type = other DNA
atggccgttatctacaaagtctttgaccttcccaaacaaccatttattttacctgcattcgtcctgtatgccctc

SEQ ID NO: 340646 - DNA, 75 bp, synthetic construct
  source 1..75: mol_type = other DNA
gaagccgacatggtgcgtaccggcgctgctcgcgcagatctgtgcgcccgtttttctctgaaagatacacccgca

SEQ ID NO: 340647 - DNA, 75 bp, synthetic construct
  source 1..75: mol_type = other DNA
gattaaagatcctgctacgttcaaaactggctgggttgttttactgcttctgctggtgggatttttcgtcctgga

SEQ ID NO: 340648 - DNA, 75 bp, synthetic construct
  source 1..75: mol_type = other DNA
ctcgggtggcggaacagtacggtaaaaacgagatggcgctcctgctgctggaagaactggatatcgccgcacagg

SEQ ID NO: 340649 - DNA, 75 bp, synthetic construct
  source 1..75: mol_type = other DNA
aacggacggcagaatccgccaccgcgctgttgctggcaaaccgactgacgcaaaccgcgctgacgccgctggccc

SEQ ID NO: 340650 - DNA, 75 bp, synthetic construct
  source 1..75: mol_type = other DNA
gtgtgcctgcctttatctggtcgctggtctgttcggtgcgctggctggtgtttattacgcaatatattcgtgccg

SEQ ID NO: 340651 - DNA, 75 bp, synthetic construct
  source 1..75: mol_type = other DNA
ggtttatggcctgcgcaatgcggggctaacagaatacctttctggcgtacttaatgtattggcagataacggtct

SEQ ID NO: 340652 - DNA, 75 bp, synthetic construct
  source 1..75: mol_type = other DNA
tgagggattctatgtggatgataaggccattcgtcccaatgaatttgttaacttaagttataatgagataaaaaa

SEQ ID NO: 340653 - DNA, 75 bp, synthetic construct
  source 1..75: mol_type = other DNA
atggtcgatattacccgggtacgccgcgaatccctgcgctggagtctgctggttgccctgaacaagacccgccct

SEQ ID NO: 340654 - DNA, 75 bp, synthetic construct
  source 1..75: mol_type = other DNA
aagcgatggtttatgccaatgtgattggctgcgatttgggaccgaaaattaccccaattggtagcctggctacgc

SEQ ID NO: 340655 - DNA, 75 bp, synthetic construct
  source 1..75: mol_type = other DNA
ggtttatggcctgcgcaatgccggattaacggaatatctttctggcgtactcaacgtgctggcggataacggcct

SEQ ID NO: 340656 - DNA, 75 bp, synthetic construct
  source 1..75: mol_type = other DNA
gatgttacatctctattttcgcaaagatattccgcagaactacgatatggcgctgctgaaatctcccgcagaagc

SEQ ID NO: 340657 - DNA, 75 bp, synthetic construct
  source 1..75: mol_type = other DNA
ccacgggtcgtggtcgccattgcgctggacgatcagcagcgcatcgtcgacaccttgtttatgaaaggactgacc

SEQ ID NO: 340658 - DNA, 75 bp, synthetic construct
  source 1..75: mol_type = other DNA
tccagatgctgggcggcatcaccgatttttatcgctcatggcgcggtgttcgggcagcgacagaatttgccctgt

SEQ ID NO: 340659 - DNA, 75 bp, synthetic construct
  source 1..75: mol_type = other DNA
gaagagatgaacggcgttccggtggtgccgctgtatgacacgccgctttccggggttaaccgcctgataaaacgt

SEQ ID NO: 340660 - DNA, 75 bp, synthetic construct
  source 1..75: mol_type = other DNA
gcgcattttgaatgtttcgccacgccgtttactgaacttccttgaatctcgcggtatggcaccgattgcggaatt

SEQ ID NO: 340661 - DNA, 75 bp, synthetic construct
  source 1..75: mol_type = other DNA
attcctgttaaggatgtattaagtgaatcccagagagcgctttgtggttctgatctgaaatacgccctttctgat

SEQ ID NO: 340662 - DNA, 75 bp, synthetic construct
  source 1..75: mol_type = other DNA
cctgcaacagctggtcgaggatgcgaaagcgggcaagattcataacgtctatatcgcgatgcaaatgtgcgacgg

SEQ ID NO: 340663 - DNA, 75 bp, synthetic construct
  source 1..75: mol_type = other DNA
gctgtgctgtattgcgctggcggtgaaactcagttcacctgggccggttattttccgccagactcgctatggcat

SEQ ID NO: 340664 - DNA, 75 bp, synthetic construct
  source 1..75: mol_type = other DNA
ggctttccagatgaatatggtgtacgcctttggttttgactgtaccgatgtcttcgatttaaccaaagctgagat

SEQ ID NO: 340665 - DNA, 75 bp, synthetic construct
  source 1..75: mol_type = other DNA
aagttgttgccgatcagatgataacggaagctggcgttgagccgttatatcactcctgggttgtggatgtgatca

SEQ ID NO: 340666 - DNA, 75 bp, synthetic construct
  source 1..75: mol_type = other DNA
caccttgtttatgaaaggactgaccgtcttcgcccgaccgcaaaaattcccgcaattaccggcatgcatgtgggt

SEQ ID NO: 340667 - DNA, 75 bp, synthetic construct
  source 1..75: mol_type = other DNA
gactatcaacgcgacccgcggtgtcagtcacttcgtgcgctttggcgcgtcgccagcgatagtcccatcggcggt

SEQ ID NO: 340668 - DNA, 75 bp, synthetic construct
  source 1..75: mol_type = other DNA
ctacgtgctgcgtaatacctttaacagcaccagttttgatgatgccccgctacaacgagcagccattttctacgc

SEQ ID NO: 340669 - DNA, 75 bp, synthetic construct
  source 1..75: mol_type = other DNA
tcggggtagaaagttttgcctggtatcgtcatccggggacggaagattgtgaagggatctgtcgtgagtatgaag

SEQ ID NO: 340670 - DNA, 75 bp, synthetic construct
  source 1..75: mol_type = other DNA
tttttgccacgctgaagatgtgcggcgtacaaccggaaaaatgtgtaccgctggccgatcatcagtctttgaatc

SEQ ID NO: 340671 - DNA, 75 bp, synthetic construct
  source 1..75: mol_type = other DNA
gttatttgccggaagaacattttgccggacgtcaggcggtgatgaatgccatcagcgttcatgcgccgggcttgt

SEQ ID NO: 340672 - DNA, 75 bp, synthetic construct
  source 1..75: mol_type = other DNA
tatcaacctgacggagaacgaagcgaaggtttatagtctgattgctcgtcagtatctgatgcaattctgcccgga

SEQ ID NO: 340673 - DNA, 75 bp, synthetic construct
  source 1..75: mol_type = other DNA
gcgtttctgcactggcgcgagcccgagccgactggctgtacggaatcaatatgacccgcgcttacaccattctcg

SEQ ID NO: 340674 - DNA, 75 bp, synthetic construct
  source 1..75: mol_type = other DNA
catccggagcagaaactgctggcaccacgcccgctgtttaccgctgcccgggaagtgaaaacggttgttccggtc

SEQ ID NO: 340675 - DNA, 75 bp, synthetic construct
  source 1..75: mol_type = other DNA
ttttatttccggctccatgaaacgttttgacggtcagccgctgggtgcactgcccgcaggtaaagaaaaaggctg

SEQ ID NO: 340676 - DNA, 75 bp, synthetic construct
  source 1..75: mol_type = other DNA
tgtggcaccgggtggggagtcagttaaaaaagcacccaataaacgagtgaaaaaagcggcaaagccccaaaaaga

SEQ ID NO: 340677 - DNA, 75 bp, synthetic construct
  source 1..75: mol_type = other DNA
cagtccgccaccagcgaaattggcgtttccggtggcggttatcttaaccacactgaggaggctgccaacatggct

SEQ ID NO: 340678 - DNA, 75 bp, synthetic construct
  source 1..75: mol_type = other DNA
ctggagctggcgaacgatacgcaatatggtctgggcgcgggcgtctggagccgcaacggtaatctggcctataag

SEQ ID NO: 340679 - DNA, 75 bp, synthetic construct
  source 1..75: mol_type = other DNA
tctggcgttttatcacctttggcacgtcagaacgtcaaatcatccacgtaaccgcctggacggaacgcgaagcgc

SEQ ID NO: 340680 - DNA, 75 bp, synthetic construct
  source 1..75: mol_type = other DNA
cgagtctggcgcgcgctattgccgatgtcttgccgaaaccgcaccgtaaaggcgatggctttatcgaatgcggca

SEQ ID NO: 340681 - DNA, 75 bp, synthetic construct
  source 1..75: mol_type = other DNA
cgagtctggcgcgcgccattgctgatgtcctgcccaaaccgcaccgtaaaggcgatggctttatcgagtgcggta

SEQ ID NO: 340682 - DNA, 75 bp, synthetic construct
  source 1..75: mol_type = other DNA
ccatcattctaggctatggaaccgtgattttattaaaaccacggtactgccacgccatggtgaaccggcactgat

SEQ ID NO: 340683 - DNA, 75 bp, synthetic construct
  source 1..75: mol_type = other DNA
aagagatcttatgggtgaaagaaaaactggcggaagccaaacagcaactgcgtaacgaacacattccgtttgatg

SEQ ID NO: 340684 - DNA, 75 bp, synthetic construct
  source 1..75: mol_type = other DNA
tatcaatgtgctcaccggcggcatgtcgatcgtcggcccgcgtcctcatgcggtggcgcataacgaacagtatcg

SEQ ID NO: 340685 - DNA, 75 bp, synthetic construct
  source 1..75: mol_type = other DNA
tgatcctgctgctgatctcgcctgcgctgtgctgcatcgctctggcggtgaaactcacctccgccgggccggtca

SEQ ID NO: 340686 - DNA, 75 bp, synthetic construct
  source 1..75: mol_type = other DNA
cgggcgtgctgcgcaatcacggctataacaaacgctacgtcgcggtggcgggcgaccttccccaggggcaggcgc

SEQ ID NO: 340687 - DNA, 75 bp, synthetic construct
  source 1..75: mol_type = other DNA
tgccgctggcagatcatcaatctttgaatcatgcggatgtcagcgcgttggtaagcgctgggcaaacactggtca

SEQ ID NO: 340688 - DNA, 75 bp, synthetic construct
  source 1..75: mol_type = other DNA
gcgtgcccccgtaccggttgtcgtggttggtaatctcaccgcaggcggcaacggaaaaaccccggtcgttgtctg

SEQ ID NO: 340689 - DNA, 75 bp, synthetic construct
  source 1..75: mol_type = other DNA
atgatcgaaaaaatctggtctggtgaatcccctttgtggcggctattgctgccactctcctggttgtatggcctg

SEQ ID NO: 340690 - DNA, 75 bp, synthetic construct
  source 1..75: mol_type = other DNA
agtatacttgatatatctctggatgcaggatattcttcacaacaatcatttagtcgtgcattcaaaaaagagttt

SEQ ID NO: 340691 - DNA, 75 bp, synthetic construct
  source 1..75: mol_type = other DNA
gtcagagtcgtcgttggtggctggcaccgacggcttccacacttttcggtaacgtcagcgacacattggccttct

SEQ ID NO: 340692 - DNA, 75 bp, synthetic construct
  source 1..75: mol_type = other DNA
gggcaaatggattggtctgtgcggtgaactgggagcgaaaggttccgtgctgccgttgctggtcggtttagggct

SEQ ID NO: 340693 - DNA, 75 bp, synthetic construct
  source 1..75: mol_type = other DNA
tgccgctgtacgacacgccgttatcgggcgtcaaccgtatcatcaaacggctggaagatattgtactcgccagca

SEQ ID NO: 340694 - DNA, 75 bp, synthetic construct
  source 1..75: mol_type = other DNA
aaaatggaaaagcgggtggagttcgatctggaatatatccgcgaatggagcgtctggtttgatatcaggatcgtt

SEQ ID NO: 340695 - DNA, 75 bp, synthetic construct
  source 1..75: mol_type = other DNA
atgaagcacagagaagttgatataatttcggcattaaaaaagaggatatcattatacttgaaatcacataataaa

SEQ ID NO: 340696 - DNA, 75 bp, synthetic construct
  source 1..75: mol_type = other DNA
gtggccaaaaattgaggcatttattacctggctaagagagcaggtatgtcagtcttgtcagtaacggtgataccg

SEQ ID NO: 340697 - DNA, 75 bp, synthetic construct
  source 1..75: mol_type = other DNA
gtggttagggtttgaagtggtgggcgtttaccacgacccgaaaccgggcggcgtttctaacgactgggcgggcaa

SEQ ID NO: 340698 - DNA, 75 bp, synthetic construct
  source 1..75: mol_type = other DNA
gaagatatgaacggtgtgccggtggtgccgctgtatgacacgccgctttccgggattaaccgcctgattaaacgt

SEQ ID NO: 340699 - DNA, 75 bp, synthetic construct
  source 1..75: mol_type = other DNA
gtggccaaaaattgaggcatttattacctggctaagagagcaggtatgtcagtcttgtcagtagctgcgataccg

SEQ ID NO: 340700 - DNA, 75 bp, synthetic construct
  source 1..75: mol_type = other DNA
gtggccaaaaattgaggcatttattacctggctaagagagcaggtatgtcagtcttgtcagtacctgggataccg

SEQ ID NO: 340701 - DNA, 75 bp, synthetic construct
  source 1..75: mol_type = other DNA
gtggccaaaaattgaggcatttattacctggctaagagagcaggtatgtcagtcttgtcagtatcggagataccg

SEQ ID NO: 340702 - DNA, 75 bp, synthetic construct
  source 1..75: mol_type = other DNA
aaattaagtttgattaccaggaatatcccggtctgaaccatgaaatggatgtctggcggcctgcctatgcagcct

SEQ ID NO: 340703 - DNA, 75 bp, synthetic construct
  source 1..75: mol_type = other DNA
tatcccggtctgaaccatgaaatggatgtctggcgaccagcctatgcagcctttgtacagaaattattcaaataa

SEQ ID NO: 340704 - DNA, 75 bp, synthetic construct
  source 1..75: mol_type = other DNA
aaaaaggcatcgtcgaggaaggtcacaaaattaaaggtgcggcggggtcagtggggttacgccatctgcagcagc

SEQ ID NO: 340705 - DNA, 75 bp, synthetic construct
  source 1..75: mol_type = other DNA
cttcaacattctccattcccgtatcgaagagatgaacggcgtaccggtggtgccgctgtacgacacgccgctttc

SEQ ID NO: 340706 - DNA, 75 bp, synthetic construct
  source 1..75: mol_type = other DNA
ctgcaggtgccgctgcgtaacttgtggaatccggcaacctgtccggtcagtttcctgccttatctcgcctgggcg

SEQ ID NO: 340707 - DNA, 75 bp, synthetic construct
  source 1..75: mol_type = other DNA
atggtgaattactgtcttatatcattggcgctgacactgcccgtggcagcatattgtgttcacacttccctgcca

SEQ ID NO: 340708 - DNA, 75 bp, synthetic construct
  source 1..75: mol_type = other DNA
ttctcccaatccgtaaacataaccccggcttcaccgtcagttttggttgggaaaactgttcaacttagtgcaggt

SEQ ID NO: 340709 - DNA, 75 bp, synthetic construct
  source 1..75: mol_type = other DNA
acgttacgaatggctgctctaccggcagttaacctcacgactgaatggacgcatttatttgccaaatgttaccaa

SEQ ID NO: 340710 - DNA, 75 bp, synthetic construct
  source 1..75: mol_type = other DNA
gctttaatccttcggttagccgccgttaatgtgccagtgggttctatgctcgaatggctggaacagctgtcagac

SEQ ID NO: 340711 - DNA, 75 bp, synthetic construct
  source 1..75: mol_type = other DNA
aaccgaaccaacgcatatatgactatcaggatccagaactgataacggccctcgactgcccggatgagatggacg

SEQ ID NO: 340712 - DNA, 75 bp, synthetic construct
  source 1..75: mol_type = other DNA
gccagaaataatgatgatacgggaatttctatttcagcgaaagataaagaccgttttctctggccagctcataac

SEQ ID NO: 340713 - DNA, 75 bp, synthetic construct
  source 1..75: mol_type = other DNA
taagaaactcgacaactcttcaatttttggccaatcaggctggaatagtcagtattgataatgagaagcagacta

SEQ ID NO: 340714 - DNA, 75 bp, synthetic construct
  source 1..75: mol_type = other DNA
ctgctctttttctgaatttgatttgtactcccgtttttgctcaaaactggcaggtggcgacgtttggtcagtcta

SEQ ID NO: 340715 - DNA, 75 bp, synthetic construct
  source 1..75: mol_type = other DNA
tgataaccatgccatcagcctgttcagcgcatatgcttctctggtttacattacccctattctcggcggctggct

SEQ ID NO: 340716 - DNA, 75 bp, synthetic construct
  source 1..75: mol_type = other DNA
cgcgtctggctgaagtttgcctttggcttactgctgatggcttgtggctttatgttgctggcatttgatgcccga

SEQ ID NO: 340717 - DNA, 75 bp, synthetic construct
  source 1..75: mol_type = other DNA
ggattagtaactggcgtagcaccaggcaaagtgaaaattaccgcaactgatcaggaaacccagctttccgcgtca

SEQ ID NO: 340718 - DNA, 75 bp, synthetic construct
  source 1..75: mol_type = other DNA
ccggggagaggcctatcaccaactgcgtcgggccgtgagcagcgtcaatggggatcagttccggggcagttcaga

SEQ ID NO: 340719 - DNA, 75 bp, synthetic construct
  source 1..75: mol_type = other DNA
aatcacgctgcgatcaacgccagagtgatcggcgccaacgaacatgaatcgcactacatctttgatttgttgatg

SEQ ID NO: 340720 - DNA, 75 bp, synthetic construct
  source 1..75: mol_type = other DNA
tttgcaacagtaagacagcaagcactgagcctgctgaccaaaagggatctggaatctgtatgtctcttcctgaac

SEQ ID NO: 340721 - DNA, 75 bp, synthetic construct
  source 1..75: mol_type = other DNA
cgacgctgccgttgccgcatcagatcattaccgacggtacacgtttacgccagatcctgtggaacttaatcagta

SEQ ID NO: 340722 - DNA, 75 bp, synthetic construct
  source 1..75: mol_type = other DNA
caaacgtcacccgcagaagtggaacccaaaatcgctgcaatttatgagcgtttctgagcttaacgaaattcgcga

SEQ ID NO: 340723 - DNA, 75 bp, synthetic construct
  source 1..75: mol_type = other DNA
gagccgtagtgagcacaatattctgtttgattttgcacgttcacgccgcgctttggcgcaatttaatccacatat

SEQ ID NO: 340724 - DNA, 75 bp, synthetic construct
  source 1..75: mol_type = other DNA
tgtctggtatctttcgtatccgtttggcggatttaatgacaaagccgtgaaggcagcaaacgatgccggatttca

SEQ ID NO: 340725 - DNA, 75 bp, synthetic construct
  source 1..75: mol_type = other DNA
tttaatgacaaagccgtgaaggcagcaaaagaagccggatttcacctggcggtgacgaccatgaaaggcaaagta

SEQ ID NO: 340726 - DNA, 75 bp, synthetic construct
  source 1..75: mol_type = other DNA
gggtgacctcaacaagccgctgagtaatcagaacttaataacctggaaagatacgccggtttataacgcgccgag

SEQ ID NO: 340727 - DNA, 75 bp, synthetic construct
  source 1..75: mol_type = other DNA
ccattctgaataaactaaaagacagattgaatcagacctggtatcagatccgcattggcgatcgcctggcctata

SEQ ID NO: 340728 - DNA, 75 bp, synthetic construct
  source 1..75: mol_type = other DNA
gggtagtgaagataactgtcgtgcagtcgctgctgcagtgcgcgatgctggcggttgggtggcattaggctcgga

SEQ ID NO: 340729 - DNA, 75 bp, synthetic construct
  source 1..75: mol_type = other DNA
gtgcacattataagccatccgggaaatccgaaatatcccattgatttcaaagcagtagctgaagctgccgcgaaa

SEQ ID NO: 340730 - DNA, 75 bp, synthetic construct
  source 1..75: mol_type = other DNA
atgtatcccgtcgaccttcatatgcataccgttgccagtacacatgcatatagcacattaagtgattacattgcc

SEQ ID NO: 340731 - DNA, 75 bp, synthetic construct
  source 1..75: mol_type = other DNA
gcagttggaaggttacgtgcagaataaaattaatctcccggcacgtgccgtggtgattacctttgatgatggtct

SEQ ID NO: 340732 - DNA, 75 bp, synthetic construct
  source 1..75: mol_type = other DNA
catttttacactcacgtaagggcagtgaagacaactgtcgtgcggtagccgcagcggtacgtgatgctggaggtt

SEQ ID NO: 340733 - DNA, 75 bp, synthetic construct
  source 1..75: mol_type = other DNA
gaggttgggtcgcgttaggatcggattctcataccgcttttaccatgggcgattttgaagaatgccgtaagatcc

SEQ ID NO: 340734 - DNA, 75 bp, synthetic construct
  source 1..75: mol_type = other DNA
ccaggaacacctcgaaagacaggctgtgaattgcctggcaccgatgatcaccctggaaaaaatcgtgcgtggaaa

SEQ ID NO: 340735 - DNA, 75 bp, synthetic construct
  source 1..75: mol_type = other DNA
cgaattgcgtacaccgctgaacggtatcgtcggcctgagccgcattctgctggataccgaactcaccgccgagca

SEQ ID NO: 340736 - DNA, 75 bp, synthetic construct
  source 1..75: mol_type = other DNA
ggaaattgccgttcgtgaaaaagcggaagcagaactgcaggaaaccttcggccaactgaaaattgaaatcaaaga

SEQ ID NO: 340737 - DNA, 75 bp, synthetic construct
  source 1..75: mol_type = other DNA
gaagagatgaaagaagagtggcgtcacgacgtagaagtgctgaaagcgtgggtggcaaaagccactaaaaaatga

SEQ ID NO: 340738 - DNA, 75 bp, synthetic construct
  source 1..75: mol_type = other DNA
tctcgtcggctggcgaaaaatatgggcggtgatattactgttaccagcgaacagggcaaaggttcaacctttagg

SEQ ID NO: 340739 - DNA, 75 bp, synthetic construct
  source 1..75: mol_type = other DNA
agaggtcgatgatgcgtttgatgaagacgatatgcctttaccggcgctgaatgtgctgctggtggaagacattga

SEQ ID NO: 340740 - DNA, 75 bp, synthetic construct
  source 1..75: mol_type = other DNA
gaaagcattgatgttattcgctctatcttctttggtttattgattacgccgtgggcggtctactttctttcggtg

SEQ ID NO: 340741 - DNA, 75 bp, synthetic construct
  source 1..75: mol_type = other DNA
ggttatcgtgacaattgtggcgctaatttgtacgattatccttgtctcgtttcagcgttgggtggtgcgccggac

SEQ ID NO: 340742 - DNA, 75 bp, synthetic construct
  source 1..75: mol_type = other DNA
acgcaccgcgattctgtgggcggggatttctggactggcagaaattcttggtggtgtgctggcgtggttaatcct

SEQ ID NO: 340743 - DNA, 75 bp, synthetic construct
  source 1..75: mol_type = other DNA
tttaatgcaaaaatcggtgcaaccgttgcccaaatcgatcaagcgcactgctattctgctcactcttggaatcag

SEQ ID NO: 340744 - DNA, 75 bp, synthetic construct
  source 1..75: mol_type = other DNA
ggtgaatggattgaagagatgaaagaagagtggcgtcacgacgtagaagtgctgaaagcgtgggtggcaaaagcc

SEQ ID NO: 340745 - DNA, 75 bp, synthetic construct
  source 1..75: mol_type = other DNA
atggtatttaaacactacgatgtggtcagggcggtgtcgccgtcagaccttgctgatgcacttgctcaaaaaatt

SEQ ID NO: 340746 - DNA, 75 bp, synthetic construct
  source 1..75: mol_type = other DNA
ggatcggatgtgattatccatcaggacccctgttccgtcgtacccagggagggtaaacggtctatgctttcataa

SEQ ID NO: 340747 - DNA, 75 bp, synthetic construct
  source 1..75: mol_type = other DNA
tatacattcacttacagaattctatcaatatgcaaattcttatcaatctttaattcttaggatggttaatgaatc

SEQ ID NO: 340748 - DNA, 75 bp, synthetic construct
  source 1..75: mol_type = other DNA
cgcgactattattggcctgggtgtactggcaaaaatttatcgcaaagcagaaaaccagaaacagcggaaggagct

SEQ ID NO: 340749 - DNA, 75 bp, synthetic construct
  source 1..75: mol_type = other DNA
aggggcgacaaaaagttgaagatggtttgggtgacctcaacaagccgctgagtaatcagaacttaattacctgga

SEQ ID NO: 340750 - DNA, 75 bp, synthetic construct
  source 1..75: mol_type = other DNA
agttagattgtcagggtataaatatttatcaaagaaaacccttttggttttggggttgagtatacccatttcaac

SEQ ID NO: 340751 - DNA, 75 bp, synthetic construct
  source 1..75: mol_type = other DNA
aatataataagctcattgaaaaaataatgaatgataagcgagaacttaaagagaatttgtatagaggtcttttaa

SEQ ID NO: 340752 - DNA, 75 bp, synthetic construct
  source 1..75: mol_type = other DNA
cttacactgcagtaaaattatgtattctttttataagtaattctggcccaacagatagaatatttttctacaatt

SEQ ID NO: 340753 - DNA, 75 bp, synthetic construct
  source 1..75: mol_type = other DNA
ggggaaaaattggcgacaacacggtaactgtcggtaacattcgtgccgggcagattatttcggtcatcccaaccg

SEQ ID NO: 340754 - DNA, 75 bp, synthetic construct
  source 1..75: mol_type = other DNA
cattttacatcgttcggtgtgctggattatgaagggattaacagcactacatttcgtcttttgaaattaaacaaa

SEQ ID NO: 340755 - DNA, 75 bp, synthetic construct
  source 1..75: mol_type = other DNA
aggcatcgactacaacgatgcgttacttgttatacgtgggattcatgggaacattgagtgttgtcgtcgggtggg

SEQ ID NO: 340756 - DNA, 75 bp, synthetic construct
  source 1..75: mol_type = other DNA
gggcaaatcattgccgtggagcccactgccgcaagttattacgcatttaattttggctttggtaaagggtttatc

SEQ ID NO: 340757 - DNA, 75 bp, synthetic construct
  source 1..75: mol_type = other DNA
actggaaggatatctgcgtaattcgatgaatctacctgctcgcgcggttgtgctgacgtttgatgatggtttgaa

SEQ ID NO: 340758 - DNA, 75 bp, synthetic construct
  source 1..75: mol_type = other DNA
tgacgcaatttaatccgcatgtattgtatctttcttacccgtttggcggatttaatgataaagcggttaaagcgg

SEQ ID NO: 340759 - DNA, 75 bp, synthetic construct
  source 1..75: mol_type = other DNA
agactatccagatgaccatctgaaacgttcagaaaaacgcataatcatccgagagttgtggtcatcaccattgat

SEQ ID NO: 340760 - DNA, 75 bp, synthetic construct
  source 1..75: mol_type = other DNA
atgaattactggcaaccggagcggttatctggtcgggacaaaaaaaagctgggtgaagatgacggcctggtggca

SEQ ID NO: 340761 - DNA, 75 bp, synthetic construct
  source 1..75: mol_type = other DNA
cagaagtgaatgatctaccggtccggcaaacgccgatgtttacgctgctgcgtgaggcgggattttcaagttcgc

SEQ ID NO: 340762 - DNA, 75 bp, synthetic construct
  source 1..75: mol_type = other DNA
aatcgttcactcccgccgaagcggatcaggcgaatcgttcggcgctgcaacaagcgatagtcgctgttctggctg

SEQ ID NO: 340763 - DNA, 75 bp, synthetic construct
  source 1..75: mol_type = other DNA
gccctggtcgcacttaagtctccactaggcaatattccagccttccgcgcacaacttcaggcgctactggaaaac

SEQ ID NO: 340764 - DNA, 75 bp, synthetic construct
  source 1..75: mol_type = other DNA
cccaccagcgaaaaactgctgtctgtgctgcgcccggcctccggtcacgtcgctgacgcgctggggataaccgag

SEQ ID NO: 340765 - DNA, 75 bp, synthetic construct
  source 1..75: mol_type = other DNA
gaacgtctgactattgaccgattgcgcgatctggcgacacaagccacgcaaacgcgccactatacaccagtggcg

SEQ ID NO: 340766 - DNA, 75 bp, synthetic construct
  source 1..75: mol_type = other DNA
caacgatccggctaatgtgtggggaaatatcctgccctggcctgcacatccggcaacgctggtgccaacgcgtcg

SEQ ID NO: 340767 - DNA, 75 bp, synthetic construct
  source 1..75: mol_type = other DNA
gttctccgcacagcttctggcgcccgcaccacatgaagatgatgaatatttggaagaagctctttctaaaaacga

SEQ ID NO: 340768 - DNA, 75 bp, synthetic construct
  source 1..75: mol_type = other DNA
atggaaggtaaaaatggcctgaaaatagtgtgcgatagcggtgcggggggggggggggcgacggagcaagctgtt

SEQ ID NO: 340769 - DNA, 75 bp, synthetic construct
  source 1..75: mol_type = other DNA
ttactctatctggcgcaaggtggcaaaaaaatgctggtctggcaggaaaaagaggaattactcgccccagagatt

SEQ ID NO: 340770 - DNA, 75 bp, synthetic construct
  source 1..75: mol_type = other DNA
cgctttacgctaacagaagtgaatgatctaccggtccggcaaacgccgatgtttacgctgctgcgtgaggcggga

SEQ ID NO: 340771 - DNA, 75 bp, synthetic construct
  source 1..75: mol_type = other DNA
aggtggcaaaaaaatgctggtctggcaggaaaaagaggaattactcgccccagaggttttccacgcgctgactac

SEQ ID NO: 340772 - DNA, 75 bp, synthetic construct
  source 1..75: mol_type = other DNA
gaagcggctaaaagaaatgtagggacaggggcgaatcagatacctgatatgggtagttttatgctttctgcttca

SEQ ID NO: 340773 - DNA, 75 bp, synthetic construct
  source 1..75: mol_type = other DNA
ctggttggcttaggtgcagtttgttttacactgttttccatcgtttctatattagaagcgggttcagcgaaaaaa

SEQ ID NO: 340774 - DNA, 75 bp, synthetic construct
  source 1..75: mol_type = other DNA
ttaaattaatccctttgctaatgggggtaatatgcatcgcattaggtgagtttgtattagcaggttctggacaaa

SEQ ID NO: 340775 - DNA, 75 bp, synthetic construct
  source 1..75: mol_type = other DNA
atggcggatgaatttgttgccgggcacgttatttttggtgttgggatgattgccgcctgcgtatcaaccgtcgcg

SEQ ID NO: 340776 - DNA, 75 bp, synthetic construct
  source 1..75: mol_type = other DNA
ttttatgtccgctgccagatgtacgacggaagaccatcaacaagtgctttttcctggagagtttattgtgcgcct

SEQ ID NO: 340777 - DNA, 75 bp, synthetic construct
  source 1..75: mol_type = other DNA
gacctcttttgccagtggtgatggatggatgaaattacccaacgggaaaatcctgcaatatggtcgtggtgcgat

SEQ ID NO: 340778 - DNA, 75 bp, synthetic construct
  source 1..75: mol_type = other DNA
cagcttattcatcaggatctggctggcaaaaattgcctgatggttcaattgaacagtggggaagaattaatttcc

SEQ ID NO: 340779 - DNA, 75 bp, synthetic construct
  source 1..75: mol_type = other DNA
gatggagtaaggggccggatggggtaattacacaatggggtactttcggtttccccgttggacagacagggacga

SEQ ID NO: 340780 - DNA, 75 bp, synthetic construct
  source 1..75: mol_type = other DNA
aaagacgatggtaataccatcatggtggtacagaaacaaggcaacactcgtttctctccgggccaacgtgtcgta

SEQ ID NO: 340781 - DNA, 75 bp, synthetic construct
  source 1..75: mol_type = other DNA
tgccttacagcaagccgcatccgcaagtatatctcgactgcgcagcaaaactgggcgttgacccactgacctgcg

SEQ ID NO: 340782 - DNA, 75 bp, synthetic construct
  source 1..75: mol_type = other DNA
gggtgctggtgtgcaggcgcgcgtcgactatgaagcgatcccgaaactgccgggggttgaagagtacattaagtt

SEQ ID NO: 340783 - DNA, 75 bp, synthetic construct
  source 1..75: mol_type = other DNA
cgcaactttgccagctacggtcatctgatgggtgaaatgccacgcgaagtgcgcgatctgctgtgcgatccgcaa

SEQ ID NO: 340784 - DNA, 75 bp, synthetic construct
  source 1..75: mol_type = other DNA
caggtctgattattcagtggggtatagtcagtggagcatcaaactatacggtgacttacccggtaacattcccaa

SEQ ID NO: 340785 - DNA, 75 bp, synthetic construct
  source 1..75: mol_type = other DNA
ggctctcgaaaaccttggtttgggagaagcggcaaaacgggatgtagggacaggggaaaatcagataccggacat

SEQ ID NO: 340786 - DNA, 75 bp, synthetic construct
  source 1..75: mol_type = other DNA
ggagaaaatcagataccggatatgtcagcctggaaaagaaatccgagttctaatcgctggagaaaattgcctgat

SEQ ID NO: 340787 - DNA, 75 bp, synthetic construct
  source 1..75: mol_type = other DNA
atctggatgatgactactttgacatgttgcaggaggagctttgcagcgttgtggagacctccggtgccagcctgg

SEQ ID NO: 340788 - DNA, 75 bp, synthetic construct
  source 1..75: mol_type = other DNA
ccacttgcccgttatttctgcattttcataaacgttggtttgggagaagcggcaaaacgggatgtgggaacaggg

SEQ ID NO: 340789 - DNA, 75 bp, synthetic construct
  source 1..75: mol_type = other DNA
gcaaatgttggctatatagcttgtgccggttataaccaggacccggtgaaatttatttccagagcaggcgtaccc

SEQ ID NO: 340790 - DNA, 75 bp, synthetic construct
  source 1..75: mol_type = other DNA
gttttgttgaattgctgggatcggggtttgctgttgaatacctgagccgcaagaatccgtttggtgatatcaaat

SEQ ID NO: 340791 - DNA, 75 bp, synthetic construct
  source 1..75: mol_type = other DNA
tggagttaactcaactggtacttcaagaacgggttttacagcccgtatgtcaggtagcggtgggtttaatctttg

SEQ ID NO: 340792 - DNA, 75 bp, synthetic construct
  source 1..75: mol_type = other DNA
ttttcataaacgttcaattgggagaagcggcaaaacgtaatgtcggaaccggtaataatcaactcccggacatgt

SEQ ID NO: 340793 - DNA, 75 bp, synthetic construct
  source 1..75: mol_type = other DNA
ttacattcagcatccctttccccaaaaagcggactgcgccatgcttactcattctggtgatggcggtgcgccttt

SEQ ID NO: 340794 - DNA, 75 bp, synthetic construct
  source 1..75: mol_type = other DNA
cctgcggcactggatacactgaacgaactggcggcagctctggggaatgacccgaactttgccacgacaatgctt

SEQ ID NO: 340795 - DNA, 75 bp, synthetic construct
  source 1..75: mol_type = other DNA
tggatgaaattacccaacggtaaaattctgcaatatggtcgaggcgaggctatgccgaaattatcgacgcaaaca

SEQ ID NO: 340796 - DNA, 75 bp, synthetic construct
  source 1..75: mol_type = other DNA
atgacattctcaagagtccttgctgtcacagttacattgaacgttactggcgcgtcagggcagccgactgtatcg

SEQ ID NO: 340797 - DNA, 75 bp, synthetic construct
  source 1..75: mol_type = other DNA
gagaattacattcagcatcccttttcctaaaaaagtggactgcgccatgcttacccattctggtgatggtggtgc

SEQ ID NO: 340798 - DNA, 75 bp, synthetic construct
  source 1..75: mol_type = other DNA
agtgaagtggcgcatcaacttcatgccgcgtttcttgatggcgatttcctccatccgcgctgcaatatcgaaaaa

SEQ ID NO: 340799 - DNA, 75 bp, synthetic construct
  source 1..75: mol_type = other DNA
atgttaccgataacagttacccgtaacattttttatttcttgtattgtgggggcaccactttgagcacgactaac

SEQ ID NO: 340800 - DNA, 75 bp, synthetic construct
  source 1..75: mol_type = other DNA
tttcgctggtgaaaggctgtagctgggcgcgctggctgtatctgctgacacaaattacggctgccagttatctgt

SEQ ID NO: 340801 - DNA, 75 bp, synthetic construct
  source 1..75: mol_type = other DNA
gcctccgtgatggtgcctgtggatattgccgccattattgccacgctggtgatgctgcatctgtttttccgcaaa

SEQ ID NO: 340802 - DNA, 75 bp, synthetic construct
  source 1..75: mol_type = other DNA
gcagtaaaagacggaattatcgaaatccagggagataagcgtgatttattaaaatcactccttgaagcgaaagga

SEQ ID NO: 340803 - DNA, 75 bp, synthetic construct
  source 1..75: mol_type = other DNA
tgatcgccccatcaatatcatcattcatgcacctccaaagaaatataaacatgcacggcttttcatttaagattg

SEQ ID NO: 340804 - DNA, 75 bp, synthetic construct
  source 1..75: mol_type = other DNA
atgtccggcagtgcttttgccgttacgcaccacgccttcagtagcggagcaggaaggatatctgatggaaatgga

SEQ ID NO: 340805 - DNA, 75 bp, synthetic construct
  source 1..75: mol_type = other DNA
tggcccgaaatctccggcacaaacaattacgttaatgtaccgcattaataatgactatacagttgaagcactggc

SEQ ID NO: 340806 - DNA, 75 bp, synthetic construct
  source 1..75: mol_type = other DNA
acggagttacggggcttgaacaagtcgacgattttattattggtgagacaaactgcacagcgaacctgttgaacg

SEQ ID NO: 340807 - DNA, 75 bp, synthetic construct
  source 1..75: mol_type = other DNA
gcaaaaagagccggatcttaacctgctgcaatttttgcaaaaattggcgaaagagtcaggttttgatggtgaact

SEQ ID NO: 340808 - DNA, 75 bp, synthetic construct
  source 1..75: mol_type = other DNA
atgaaatgtaaacgtctgaatgaagttattgacctcctccagccagcctggcaaaaagagccagaccttaacctg

SEQ ID NO: 340809 - DNA, 75 bp, synthetic construct
  source 1..75: mol_type = other DNA
gagggtgcatgcttggtgataacggcaattccgggagtaccggcggctgatctgtctggagcggatttgctcaaa

SEQ ID NO: 340810 - DNA, 75 bp, synthetic construct
  source 1..75: mol_type = other DNA
taaacctattacgttgttggcaaatactgccgcagaaattgccgttgaattgggcaatggtcaggagccaaaagc

SEQ ID NO: 340811 - DNA, 75 bp, synthetic construct
  source 1..75: mol_type = other DNA
attgctgttgttgattccgataatgctgattcggcaagtgattgtcgaacgtgccgattaccgtagcgatgtgga

SEQ ID NO: 340812 - DNA, 75 bp, synthetic construct
  source 1..75: mol_type = other DNA
tgtttactaactggctcaactattacgtctaccagatcacgccatacgatctacgccatatgaatccaacgctgg

SEQ ID NO: 340813 - DNA, 75 bp, synthetic construct
  source 1..75: mol_type = other DNA
agctggcgtagtcacggtaatttgctatttaccaactggctcaactattacgtctaccagattacgccatacgat

SEQ ID NO: 340814 - DNA, 75 bp, synthetic construct
  source 1..75: mol_type = other DNA
cactgaggaggctgccaacatggctactatccctacccttgtacattctcaaaccgcatttatctggcgctttat

SEQ ID NO: 340815 - DNA, 75 bp, synthetic construct
  source 1..75: mol_type = other DNA
atctcaaatcatccacgtaaccgcctggacggaacgcgaagcgcgtaaccgttgcccgtccggttgtgtcgctgt

SEQ ID NO: 340816 - DNA, 75 bp, synthetic construct
  source 1..75: mol_type = other DNA
gttacattccatcgataaaggaggctgccatcatggctactacccctgccctcgtacattctcagacagccttta

SEQ ID NO: 340817 - DNA, 75 bp, synthetic construct
  source 1..75: mol_type = other DNA
tgtttgcggtggcgaagcgaggccatgccattaacactggcaaagtgcttcgcggtgcgccatggcagatcgtca

SEQ ID NO: 340818 - DNA, 75 bp, synthetic construct
  source 1..75: mol_type = other DNA
tcctgacgctggtactggtcatctggcagccgaaggggctgagcattggctggagtgccgtcatcggtgcggcgc

SEQ ID NO: 340819 - DNA, 75 bp, synthetic construct
  source 1..75: mol_type = other DNA
ttgctgcgttgtttgccaatgacggtgccgcgctgatcctgacgccgattgtgattgcgatgctgctcgcactgg

SEQ ID NO: 340820 - DNA, 75 bp, synthetic construct
  source 1..75: mol_type = other DNA
tcagctgttgcgcatcgattcccgtgaatcgcgcaacacgcccgcagagcatctgaacaacttctactgtaactt

SEQ ID NO: 340821 - DNA, 75 bp, synthetic construct
  source 1..75: mol_type = other DNA
ggcatccggaatacgatgcgcaaacgctggcgcaggaatatttccgcgatgtggaagccgggctaaacccggatg

SEQ ID NO: 340822 - DNA, 75 bp, synthetic construct
  source 1..75: mol_type = other DNA
ttcgaatgggcggcattgcatgtttcgcgctggggtaaaggtcgtggccgtttgctctttacgtatatcgttctg

SEQ ID NO: 340823 - DNA, 75 bp, synthetic construct
  source 1..75: mol_type = other DNA
acaattacgttaatgtaccgcattaataatgattacacagttgaagctctggcctctctttttaaagaaacagtc

SEQ ID NO: 340824 - DNA, 75 bp, synthetic construct
  source 1..75: mol_type = other DNA
taccgttacccgtggcggttttggtgaatctgttgccaaacaaagcactatgcagcgtagcgcaactggcacctc

SEQ ID NO: 340825 - DNA, 75 bp, synthetic construct
  source 1..75: mol_type = other DNA
cccgtgaagactgcgttgccgagtttggcgaaggtcagtgccagcaggcgcctgttcaggcaggaatggcgcctg

SEQ ID NO: 340826 - DNA, 75 bp, synthetic construct
  source 1..75: mol_type = other DNA
aacccggccagcccggcttacggtaaatataccgacgcgaccggtaaaaactatggcgcagcccagccaggccgc

SEQ ID NO: 340827 - DNA, 75 bp, synthetic construct
  source 1..75: mol_type = other DNA
gcaatctccctgcatttcgaatccaacttcaggccttactggaaaacgaggaatcccgggagcagttactcaggg

SEQ ID NO: 340828 - DNA, 75 bp, synthetic construct
  source 1..75: mol_type = other DNA
atcctatgtcccgaagacggacggccagacggctgaagtggagcttccgcttaacatgctcgttgtcggcgatac

SEQ ID NO: 340829 - DNA, 75 bp, synthetic construct
  source 1..75: mol_type = other DNA
aatctgcccgccattatctggcagggaaaccagtacgatccccatccctacgaacttaaggggatggagttatcg

SEQ ID NO: 340830 - DNA, 75 bp, synthetic construct
  source 1..75: mol_type = other DNA
tggttataatagtccaatacgaataatcaaagaatgtatcgaaaatggcattaattcaactccctcgacaggata

SEQ ID NO: 340831 - DNA, 75 bp, synthetic construct
  source 1..75: mol_type = other DNA
tctgctgatgatatgcaatatggtgatatggtagaacaagactttctctcactcggcctaagcgatatctcagca

SEQ ID NO: 340832 - DNA, 75 bp, synthetic construct
  source 1..75: mol_type = other DNA
gcgcatgagcgtaaatctgaaaatcagctcgctggccgatctttctccggacaacattgcctcccaggtgccgga

SEQ ID NO: 340833 - DNA, 75 bp, synthetic construct
  source 1..75: mol_type = other DNA
ttaattcaactccctcgacaggataccaacctcttatcctgcaaagcactgatgaatcccctaatgattttggta

SEQ ID NO: 340834 - DNA, 75 bp, synthetic construct
  source 1..75: mol_type = other DNA
aaagaatcgaaaattatctatgaaaagcaaactccagaaaattatattatgtttatttattctatgctgcatcta

SEQ ID NO: 340835 - DNA, 75 bp, synthetic construct
  source 1..75: mol_type = other DNA
aaagttgatccttaccgcctcattaaataccattttcctgggccgaattctacttatggtgcttttagtgttcca

SEQ ID NO: 340836 - DNA, 75 bp, synthetic construct
  source 1..75: mol_type = other DNA
tggcccggcaggttccggaagtgaataaattgctggaactgcgtgaagcactgactgcgctgaaggggccgatgg

SEQ ID NO: 340837 - DNA, 75 bp, synthetic construct
  source 1..75: mol_type = other DNA
attaatgggatccaactgatttcaaaaggtggtcttggtggtacggcgaccgtcagcgttaaatctggcaagcat

SEQ ID NO: 340838 - DNA, 75 bp, synthetic construct
  source 1..75: mol_type = other DNA
tggtgttattgggttatttttctcggctcaatcacggtgctgcagggcatatacgtcttagtcagttctgatgca

SEQ ID NO: 340839 - DNA, 75 bp, synthetic construct
  source 1..75: mol_type = other DNA
attagaagcaggttctgctaaaaataattgcaacgtaccggataaaaccagcgttgaccatttgcgtaacgctgg

SEQ ID NO: 340840 - DNA, 75 bp, synthetic construct
  source 1..75: mol_type = other DNA
ctggtaatctttatattaatgttgactttggaccgaaatccccggcacaaacaattacgttaatgtaccgcatta

SEQ ID NO: 340841 - DNA, 75 bp, synthetic construct
  source 1..75: mol_type = other DNA
tctacggaattacaggactcgaacaagtcgatgattttataatcggtgaaacgaactgcacagcaaatctgctga

SEQ ID NO: 340842 - DNA, 75 bp, synthetic construct
  source 1..75: mol_type = other DNA
acggtaatgagtcggtggcagaaggtgtgtttactgtgaatgctgcggaagcggacagtgttattcatcttcttt

SEQ ID NO: 340843 - DNA, 75 bp, synthetic construct
  source 1..75: mol_type = other DNA
aaagcttgcgtattgcgtagtcaacgatttcgtctaaagaaaaaccctttgcatcagctagttgttgggctcttc

SEQ ID NO: 340844 - DNA, 75 bp, synthetic construct
  source 1..75: mol_type = other DNA
attcgtaaagcactcgaagcggttgatctaatgaaaaaaaaacagttggcatcaccactggaatcgaatgatgtt

SEQ ID NO: 340845 - DNA, 75 bp, synthetic construct
  source 1..75: mol_type = other DNA
gtaaccttcctgccttccgtacacagctccaggcattgctggaaaatgaggagtcccgcgaacagttactaaaag

SEQ ID NO: 340846 - DNA, 75 bp, synthetic construct
  source 1..75: mol_type = other DNA
atgttattttcggcgttggtatgattgccgcctgtgtatcgacggtggcagcgtcatccggtcactttctgctca

SEQ ID NO: 340847 - DNA, 75 bp, synthetic construct
  source 1..75: mol_type = other DNA
gaaggtgtgtttacagtgaacgctgcggaagcggacagtgttattcatcttctttcactgccagttggtatccgt

SEQ ID NO: 340848 - DNA, 75 bp, synthetic construct
  source 1..75: mol_type = other DNA
atggcggcagaattgccagtaatcacatctcgaaccggagatcttgatagcattgtaaagcatgaaaaaaccgga

SEQ ID NO: 340849 - DNA, 75 bp, synthetic construct
  source 1..75: mol_type = other DNA
ttggatacgaaagcgcttcgcagttgctgatcacggcaggagacaatccccaacgattaagatcagaatcaggtt

SEQ ID NO: 340850 - DNA, 75 bp, synthetic construct
  source 1..75: mol_type = other DNA
cggctgactgtattggctgccgtacctgtgaagttgcctgtgtagtcgctcatccgtctgaacaggagttgaatg

SEQ ID NO: 340851 - DNA, 75 bp, synthetic construct
  source 1..75: mol_type = other DNA
caacgcaggcgttgcagttgatgactgagagagaactcaggcaaatccgccagcagcgtattgctgccagcggcg

SEQ ID NO: 340852 - DNA, 75 bp, synthetic construct
  source 1..75: mol_type = other DNA
attggatgtgaggttctggttagtttcgttcagggaaatcctgactatccaattattgttggaacagtatataat

SEQ ID NO: 340853 - DNA, 75 bp, synthetic construct
  source 1..75: mol_type = other DNA
cgcccagatgatttttgttccggtagtacaggctgaatttaatctggtggaagatttcgacgccaccgaccgcgg

SEQ ID NO: 340854 - DNA, 75 bp, synthetic construct
  source 1..75: mol_type = other DNA
ttaatcaggccaacgaatacatgaacagtaaacaatggcccggtaaagccgctattggtcgtctgaaaggcgagg

SEQ ID NO: 340855 - DNA, 75 bp, synthetic construct
  source 1..75: mol_type = other DNA
ctattaccacgatggttcagactcgtcagaacgaaatcttagacagcgatcagagcaatgccctgagcatgttta

SEQ ID NO: 340856 - DNA, 75 bp, synthetic construct
  source 1..75: mol_type = other DNA
atatcttggcaacccccagtattgttacgctggacaatatggaggccacgttcaatgttggtcaggaagttccgg

SEQ ID NO: 340857 - DNA, 75 bp, synthetic construct
  source 1..75: mol_type = other DNA
attggctggtactcataacgggtttgatgaagtaactgcagcggggacgactatccagctccctaatatacaaca

SEQ ID NO: 340858 - DNA, 75 bp, synthetic construct
  source 1..75: mol_type = other DNA
cccgttgtattggctgtcagagttgcgtcagtggtaagcgtgcagcaagaaccgtattgacggggatgtgttatt

SEQ ID NO: 340859 - DNA, 75 bp, synthetic construct
  source 1..75: mol_type = other DNA
ggagtatggagattattcataacgcctggactcatggtatgaattcattaaggaaggtgcgaataagcggggaaa

SEQ ID NO: 340860 - DNA, 75 bp, synthetic construct
  source 1..75: mol_type = other DNA
gccgaaaaataccagtcgtttaatcaggaacaggtgcagtcgcgtggcaaagaaacaacggcgctgacgctgaat

SEQ ID NO: 340861 - DNA, 75 bp, synthetic construct
  source 1..75: mol_type = other DNA
ttctggaagacagtttatttagtccgccacaagtaattttatataaagaacagaatttgctggagtataagatcc

SEQ ID NO: 340862 - DNA, 75 bp, synthetic construct
  source 1..75: mol_type = other DNA
caccgtatgcaaatcgagtcgctcaagggcggctttttttgtgtctgaaatccagtatccgcaatgccttcctca

SEQ ID NO: 340863 - DNA, 75 bp, synthetic construct
  source 1..75: mol_type = other DNA
tcggaacatcaatagacgtcaacggacgtttttttgtgccagaaatcagtgtcacacaaggcttttcgctatttt

SEQ ID NO: 340864 - DNA, 75 bp, synthetic construct
  source 1..75: mol_type = other DNA
atgtttgagtccggccttcgcaccttcggaacatcaatagacatcaacggacgtttttttatgactgaaatccgc

SEQ ID NO: 340865 - DNA, 75 bp, synthetic construct
  source 1..75: mol_type = other DNA
tagtcgattacgacggtatcaccaaaaatctactgaaaggacaatattttacccatcaaagtttcctgcccgtgg

SEQ ID NO: 340866 - DNA, 75 bp, synthetic construct
  source 1..75: mol_type = other DNA
aaccgcatcaggccatcgtgatggaagccaacgccagctcaccaaccggcgccccgaaactgaaaaacgtcatca

SEQ ID NO: 340867 - DNA, 75 bp, synthetic construct
  source 1..75: mol_type = other DNA
atgtttgagtccggccttcgcaccatcggaacatcaatagacgtcaacggacgtctttttttgtgcctaaaatcc

SEQ ID NO: 340868 - DNA, 75 bp, synthetic construct
  source 1..75: mol_type = other DNA
aatgctgtcaacaacgatactgagcatgctggatcttgttattgtgatttgtgtgcttcagataataaaagttcg

SEQ ID NO: 340869 - DNA, 75 bp, synthetic construct
  source 1..75: mol_type = other DNA
aacaaattcatggtggctgtcatgcggtgaacgtttcagtcttgccggaaaggactacagaattacttcgttgta

SEQ ID NO: 340870 - DNA, 75 bp, synthetic construct
  source 1..75: mol_type = other DNA
taaagaaggatatgatcagcaatattaataactcaatgtcattaactgttgcaaaaggtcgtaattctgaaataa

SEQ ID NO: 340871 - DNA, 75 bp, synthetic construct
  source 1..75: mol_type = other DNA
tgcatttacagttacagcaaatgctggaaagtttgttagcgcagattgcagcacaaacgagtgatgtgcaagttg

SEQ ID NO: 340872 - DNA, 75 bp, synthetic construct
  source 1..75: mol_type = other DNA
ctgatgttaaatccagcaagggaatttatgaagacattattcctgagggaaaacgtgagttaataaagaaacgtt

SEQ ID NO: 340873 - DNA, 75 bp, synthetic construct
  source 1..75: mol_type = other DNA
tgccagagtggttggtcctgactcagaagaatattatacagatgaaaacgggcgtgtaaaaatcagctttctctg

SEQ ID NO: 340874 - DNA, 75 bp, synthetic construct
  source 1..75: mol_type = other DNA
ctagtgttggctggttatgaacaacagagggatgaaacaggtgatcaaggtgtaggacgtcctgactttaaatta

SEQ ID NO: 340875 - DNA, 75 bp, synthetic construct
  source 1..75: mol_type = other DNA
agccgacatcaacaggcatccgttttggtaaccgcgtcattggttattccgtcgctgttcgccaactcgacaatg

SEQ ID NO: 340876 - DNA, 75 bp, synthetic construct
  source 1..75: mol_type = other DNA
tactgcgtaaacaatctgccgtttggatacagcaatcccctaagtgttatgttcaaccagttacttaaacaggta

SEQ ID NO: 340877 - DNA, 75 bp, synthetic construct
  source 1..75: mol_type = other DNA
gaacacggaacaacagatcgcgccgtaatatataacgggaagcatggggttatgacgatatatcccggccccatt

SEQ ID NO: 340878 - DNA, 75 bp, synthetic construct
  source 1..75: mol_type = other DNA
caaattacaggaacgttttggcgttaaacgcgtcaccatggcttccggcattttgctgggattaggcttcttcct

SEQ ID NO: 340879 - DNA, 75 bp, synthetic construct
  source 1..75: mol_type = other DNA
tactgaaagaggtgcaggattttcgcgactgtgtaaaacgagttgtagcgatgctttcaggtaaacagatacctg

SEQ ID NO: 340880 - DNA, 75 bp, synthetic construct
  source 1..75: mol_type = other DNA
gtgaatacgacaatccatactggcacggcttaagaatcatgcaatgtattgctgaagccgatgatgccggattcc

SEQ ID NO: 340881 - DNA, 75 bp, synthetic construct
  source 1..75: mol_type = other DNA
gtgaatcagaaacactggccgcaacaccgaaagcggttaaggctgcatatgacctggctaacgggaaatataccg

SEQ ID NO: 340882 - DNA, 75 bp, synthetic construct
  source 1..75: mol_type = other DNA
ggctggttgatgtgggacccgctgcaggagaacagggcggtcatattctctacagtggtgtacctgaaggtctga

SEQ ID NO: 340883 - DNA, 75 bp, synthetic construct
  source 1..75: mol_type = other DNA
accatcagcaggcctgcaccctgcagacagccatgcactttacgatgctctggagaacctgcgggatgccggaaa

SEQ ID NO: 340884 - DNA, 75 bp, synthetic construct
  source 1..75: mol_type = other DNA
tgctcaaggctggtgttcacttcggtcaccagacccgttattggaacccgaaaatgaagccgttcatcttcggtg

SEQ ID NO: 340885 - DNA, 75 bp, synthetic construct
  source 1..75: mol_type = other DNA
atttttttaataattgcaaatattatctacagcagcgccagtgcatcaacagatatctctactgttgcatctcca

SEQ ID NO: 340886 - DNA, 75 bp, synthetic construct
  source 1..75: mol_type = other DNA
ggttttaattccgcttacagaactgcatcaaccagttccacagtatcgatgaattacagttggtgggctgttggt

SEQ ID NO: 340887 - DNA, 75 bp, synthetic construct
  source 1..75: mol_type = other DNA
attgaagtcatgcaaacgctggttcatgagcagtgccatatgtggcagtaccactacggcaacccgtcgcgtaag

SEQ ID NO: 340888 - DNA, 75 bp, synthetic construct
  source 1..75: mol_type = other DNA
ccgctggggacggtgaaagtgcagtttaacgggatgtatacccggttcagtgattttcctcagggatattatttt

SEQ ID NO: 340889 - DNA, 75 bp, synthetic construct
  source 1..75: mol_type = other DNA
tgcggatttgattttatttttgtaccgcgatgaggtgtatcacgaacactcaccggacaaaggtgtggcagaaat

SEQ ID NO: 340890 - DNA, 75 bp, synthetic construct
  source 1..75: mol_type = other DNA
tattttaaataatgttgttcagcatctggaggaggcattaagtgcaaaagggataaccggtacgccaacggggtt

SEQ ID NO: 340891 - DNA, 75 bp, synthetic construct
  source 1..75: mol_type = other DNA
aacacttggtcaaacggcatctacatcaacagtttctacttcgagcatttcatctggttttgctatgaacctgtt

SEQ ID NO: 340892 - DNA, 75 bp, synthetic construct
  source 1..75: mol_type = other DNA
gaaaaatacgcccagtgcggcaaatatcgttgcttatgcagagtacgttgccagctacggccagaagcgtcagtt

SEQ ID NO: 340893 - DNA, 75 bp, synthetic construct
  source 1..75: mol_type = other DNA
ggaggcggagcagagcgtgctgggcgggctgatgctggataatgaccgctgggatgaagtggcgccgttattaca

SEQ ID NO: 340894 - DNA, 75 bp, synthetic construct
  source 1..75: mol_type = other DNA
caggcagaagcccatatcaaacggcttattaaaacattctccgatattgatttaggaggatatccaatcagccgc

SEQ ID NO: 340895 - DNA, 75 bp, synthetic construct
  source 1..75: mol_type = other DNA
gtcaggtgtttcgtcgacgctggcaaaagacctggaacgtgcaatagcaagcagaaacagagttcagtttatacc

SEQ ID NO: 340896 - DNA, 75 bp, synthetic construct
  source 1..75: mol_type = other DNA
tgagcttcgatggtcgttacaccctgttttcaccgtttgaacgtggctggaattttgaccgttccggaggcaatg

SEQ ID NO: 340897 - DNA, 75 bp, synthetic construct
  source 1..75: mol_type = other DNA
catcaggaaatctggaagaaaatggccgtcctgtgtcagataaacagcccgattgatttaatcacgctcagtgat

SEQ ID NO: 340898 - DNA, 75 bp, synthetic construct
  source 1..75: mol_type = other DNA
cgccggagctggagaaccgcacacaggaaattgctgaaatttcccgttccctgaaagcgctggggaaggagctgg

SEQ ID NO: 340899 - DNA, 75 bp, synthetic construct
  source 1..75: mol_type = other DNA
gccatcggccgccaatattctggcatatgcaggggtagtggcggaaaaaagccggctacgcaaactgcagagcgt

SEQ ID NO: 340900 - DNA, 75 bp, synthetic construct
  source 1..75: mol_type = other DNA
atgaagacgttaacggtgtttgacccggcaatgtgctgcagtaccggcgtatgtggctcagatgtcgatcaggtt

SEQ ID NO: 340901 - DNA, 75 bp, synthetic construct
  source 1..75: mol_type = other DNA
ccgtgttggggcaggcgctgacggataacggtgattatctcgccgactggtctgattgcgcaggtcagcccgaac

SEQ ID NO: 340902 - DNA, 75 bp, synthetic construct
  source 1..75: mol_type = other DNA
gaaaagtaacatgggccatctggataccgcggcgggcattgccggactgctgaaaaccgttctggcagtcagtcg

SEQ ID NO: 340903 - DNA, 75 bp, synthetic construct
  source 1..75: mol_type = other DNA
gaacttccagtgctgttaacgcaggtaaaatgtatatcaccggcaatattctcaatgcgaattacgcctcctgga

SEQ ID NO: 340904 - DNA, 75 bp, synthetic construct
  source 1..75: mol_type = other DNA
tattggactggccacaatactctccacggatgacttggctgttgtagatgcccggatccagaatcatattaaaga

SEQ ID NO: 340905 - DNA, 75 bp, synthetic construct
  source 1..75: mol_type = other DNA
cgttgggcgggcagattgagcaaaaaagctcgtcgcagggcgacgattaatttatcgctttgtttcccagaaaag

SEQ ID NO: 340906 - DNA, 75 bp, synthetic construct
  source 1..75: mol_type = other DNA
cgcggaactcatcggggcgcaggaatgaaatcccattcagactccggatagattcaagcaagcccacttatcgtc

SEQ ID NO: 340907 - DNA, 75 bp, synthetic construct
  source 1..75: mol_type = other DNA
acagtatgtggctgatacgcacacattaacgtacgttttcgttccattggccctcacccccgataacgacccagg

SEQ ID NO: 340908 - DNA, 75 bp, synthetic construct
  source 1..75: mol_type = other DNA
gtgattcagcgtgtcgaaatgtacaacgcatcgctttccgttccgctttcaccgcctgaatgtcgggctattggc

SEQ ID NO: 340909 - DNA, 75 bp, synthetic construct
  source 1..75: mol_type = other DNA
cccgatgcgctcaacgcgcgcctccccaatacggatggcggcagaaaaagtactgcgctgctgctcagcgccgcc

SEQ ID NO: 340910 - DNA, 75 bp, synthetic construct
  source 1..75: mol_type = other DNA
catgccggttatgcccccggcgccgtcccccataagaccggcgttttcgcctcttcccggatgagtacctacccc

SEQ ID NO: 340911 - DNA, 75 bp, synthetic construct
  source 1..75: mol_type = other DNA
acagggcgattcgtcagggctggccagcgttctcacagtggcttgaagcggtgatccagcgtgtcgaaatgtaca

SEQ ID NO: 340912 - DNA, 75 bp, synthetic construct
  source 1..75: mol_type = other DNA
gatgcgggctcatagcatccatgctggatttactttgcgtcagagccccgccaaaacctacggtgagctttacgg

SEQ ID NO: 340913 - DNA, 75 bp, synthetic construct
  source 1..75: mol_type = other DNA
ttgatagaaactcatagcgatcaccttctcaacggaatccgtgtcgtagcaagaacatctcctgacttttcacct

SEQ ID NO: 340914 - DNA, 75 bp, synthetic construct
  source 1..75: mol_type = other DNA
gtgttcgaatggatgagtcagtggaagcaggaaggcgatgacgagcaggcggtacgcagcattctcggtcgtttg

SEQ ID NO: 340915 - DNA, 75 bp, synthetic construct
  source 1..75: mol_type = other DNA
agcaggtctctggacacgcacgaatatcccccgaatggtacaagagattgaccgctgcattgggcttaacgagca

SEQ ID NO: 340916 - DNA, 75 bp, synthetic construct
  source 1..75: mol_type = other DNA
gtgcccgcgtactgctgccggacgaactgccgctggaagaaaaagcagtgacacaactgcttgattttgcagaag

SEQ ID NO: 340917 - DNA, 75 bp, synthetic construct
  source 1..75: mol_type = other DNA
tggctgttcgagctgaacgccaaacagcgtgaagtgctggcacgtcgattcggtttgctggggtacgaagcggca

SEQ ID NO: 340918 - DNA, 75 bp, synthetic construct
  source 1..75: mol_type = other DNA
ttatgggtaaaaatggcaaatggttggaagtgctgggttgcggcatggtgcatccaaatgtgctgcgtaacgtcg

SEQ ID NO: 340919 - DNA, 75 bp, synthetic construct
  source 1..75: mol_type = other DNA
ttatcaacgaagcgaaagagcaggttcagcaggcgctgaatgcacgtaaagcggaactggaaagcgcagcgctga

SEQ ID NO: 340920 - DNA, 75 bp, synthetic construct
  source 1..75: mol_type = other DNA
ccggtgtctgaacgcctggcggtcaggcaaatgcagagtaaaccgctactgacttccctgtataagctgatgcag

SEQ ID NO: 340921 - DNA, 75 bp, synthetic construct
  source 1..75: mol_type = other DNA
gcgcgaacggtagtggtaaatccacctttatgaagatcctcggcggcgacttagagccgacgttgggtaacgttt

SEQ ID NO: 340922 - DNA, 75 bp, synthetic construct
  source 1..75: mol_type = other DNA
aatacagccaaaattggaagttagtgcaaacattgcttataacacaatacaggctgagtcaggaaaacaaactaa

SEQ ID NO: 340923 - DNA, 75 bp, synthetic construct
  source 1..75: mol_type = other DNA
gtatcgacccggaagtttactccggttttgcctttgggatggggatggagcgcctgactatgttgcgttacggcg

SEQ ID NO: 340924 - DNA, 75 bp, synthetic construct
  source 1..75: mol_type = other DNA
agtttggtcacaaggaggcgtttaaatttttctgctcaagaggatcctaggaaacatgaaggaattattaataat

SEQ ID NO: 340925 - DNA, 75 bp, synthetic construct
  source 1..75: mol_type = other DNA
agctggcggaatgggtgaaagcgcgatacggccagatgtttgatgcgatttacgttcctcccggcgcgaatgttg

SEQ ID NO: 340926 - DNA, 75 bp, synthetic construct
  source 1..75: mol_type = other DNA
tgaaggttattgtgccggtggtgttgctgtcggcagtgatgattggcgtgaagtcctgcggtggtcctaagcaga

SEQ ID NO: 340927 - DNA, 75 bp, synthetic construct
  source 1..75: mol_type = other DNA
atggacatgctctttgactggtggttcgtcgcatcaccccgcctccgccagctttgctgggcagtctggttgctg

SEQ ID NO: 340928 - DNA, 75 bp, synthetic construct
  source 1..75: mol_type = other DNA
cacccgtcaactggccattgattatgaagataagggccgtaaggtgcgctacgacttcaccctgccgggtggcgt

SEQ ID NO: 340929 - DNA, 75 bp, synthetic construct
  source 1..75: mol_type = other DNA
cactgtcagccgccggtgcagccggggatgccctgagtgaggggcagtatacctcgcagaacaatgtcaacggta

SEQ ID NO: 340930 - DNA, 75 bp, synthetic construct
  source 1..75: mol_type = other DNA
agatgccgggcaggccgaaacggtggcgcagggtacgctctggattgaaccgcaggatggtgtacaactggatcg

SEQ ID NO: 340931 - DNA, 75 bp, synthetic construct
  source 1..75: mol_type = other DNA
tggtcgattacgacggcatcaccaaaaatctgctgaaaggacaatactttacccatcaaagtttcctgccagtag

SEQ ID NO: 340932 - DNA, 75 bp, synthetic construct
  source 1..75: mol_type = other DNA
agaagctaatgaactctccagtattcagactgtaccaagcttgtatcaacgcgttgtgcagccggatcgtaacga

SEQ ID NO: 340933 - DNA, 75 bp, synthetic construct
  source 1..75: mol_type = other DNA
gatgtggttgccagattattttgacgcacattccaacgccagctctttcgcctataacgatggcaaatccagcac

SEQ ID NO: 340934 - DNA, 75 bp, synthetic construct
  source 1..75: mol_type = other DNA
tatcagccgtcagatcccggtggattatgaatcgcagggacgccgggtgaattacggtttttcactgacagaggg

SEQ ID NO: 340935 - DNA, 75 bp, synthetic construct
  source 1..75: mol_type = other DNA
gaccgggagtgccggggaggcggcactgggtaaggcgatttccggcggaatgaatgagacagcggagtgggtgaa

SEQ ID NO: 340936 - DNA, 75 bp, synthetic construct
  source 1..75: mol_type = other DNA
aaatataatgagtctttaagttcagactatgttgaggctatgaactccttatctaaaattgcgggagggaattca

SEQ ID NO: 340937 - DNA, 75 bp, synthetic construct
  source 1..75: mol_type = other DNA
cagttacagaacgagcagaacgccctgatggcaaaggtgcagtccctgacggagcagctggcgcaacagggacgc

SEQ ID NO: 340938 - DNA, 75 bp, synthetic construct
  source 1..75: mol_type = other DNA
gcggatcgacgggaaatcaaaagcgctggtaggctctgaagatttaccggtgctggatgaaaacacgttcaacag

SEQ ID NO: 340939 - DNA, 75 bp, synthetic construct
  source 1..75: mol_type = other DNA
atgaaccctccaacgttcttattctgaccggtcgtgcctccaccattaataaactgattgaagtcataaagcgcg

SEQ ID NO: 340940 - DNA, 75 bp, synthetic construct
  source 1..75: mol_type = other DNA
aagcctggaagggaacctgaaagcccaggcggagctggatgcggcatttggtgacagttcagcggtgataaaaca

SEQ ID NO: 340941 - DNA, 75 bp, synthetic construct
  source 1..75: mol_type = other DNA
gattctgctggttatcggggcgattgctgcgctggccgctggttgttacctgctgatccgtaactgggaagcgat

SEQ ID NO: 340942 - DNA, 75 bp, synthetic construct
  source 1..75: mol_type = other DNA
cagagaaacatcaccgaactgggcggcgctgacgggctgaagcgtacacaggaaatggccagcaagatggtgaag

SEQ ID NO: 340943 - DNA, 75 bp, synthetic construct
  source 1..75: mol_type = other DNA
aaatcaaaagcgctgattggctcggaagatttgccggtgctggatgagaacacgttcaacagtcacgctcctgcg

SEQ ID NO: 340944 - DNA, 75 bp, synthetic construct
  source 1..75: mol_type = other DNA
aagcctggaagggaatctgaaagcccaggctgaactggatgcggcatttggtgacagttcggcggtggtgaaaca

SEQ ID NO: 340945 - DNA, 75 bp, synthetic construct
  source 1..75: mol_type = other DNA
ccgtgctgggacagcttcagcggacactgggaacggaagccagcagcgcttatgaaggctttatgaccggagcca

SEQ ID NO: 340946 - DNA, 75 bp, synthetic construct
  source 1..75: mol_type = other DNA
gccttattgataaattgtcccgcccgttaaaacaggcgcagggcaacgtaacgggctttgctgaaaaatcaaaag

SEQ ID NO: 340947 - DNA, 75 bp, synthetic construct
  source 1..75: mol_type = other DNA
ggcgtgggactggatgaacagctggccgttctggggcaacttcagcggacactgggaacggaagccagcagcgcc

SEQ ID NO: 340948 - DNA, 75 bp, synthetic construct
  source 1..75: mol_type = other DNA
ggtcacgaagatttacacggccacggtctgggttgcctcaaaagctgttgtggcgtggaacctgacgctgaaatt

SEQ ID NO: 340949 - DNA, 75 bp, synthetic construct
  source 1..75: mol_type = other DNA
gtctggctggggaacattgccgtggttgcctggaacgccacgctgaaatttctgcgcggtacgttgctggcggtt

SEQ ID NO: 340950 - DNA, 75 bp, synthetic construct
  source 1..75: mol_type = other DNA
gaacatgatgattgagagcaacatcattcacgccgcgcatcagaacgacgtgaacaaactgctgtttctcggatc

SEQ ID NO: 340951 - DNA, 75 bp, synthetic construct
  source 1..75: mol_type = other DNA
ggtgtcagccggaaagcgacgttattgcagaattaagccgccgtttcagctgcacgctggagcactggtatgccg

SEQ ID NO: 340952 - DNA, 75 bp, synthetic construct
  source 1..75: mol_type = other DNA
tgttccttctgcatatcactggtatacggaacagtatggcgtgaagtggcctgtggggtatgaggtgaatatcag

SEQ ID NO: 340953 - DNA, 75 bp, synthetic construct
  source 1..75: mol_type = other DNA
aaagaggtgactggtggctctggagtaacgaggatgtatcggtgtggtggaaccgtctgtgtgacaagtctgccg

SEQ ID NO: 340954 - DNA, 75 bp, synthetic construct
  source 1..75: mol_type = other DNA
ggctgacacacctgcaggacggtgtacttctgaatgagcaaaactgcctgatgctgcatgaactctggctgcaga

SEQ ID NO: 340955 - DNA, 75 bp, synthetic construct
  source 1..75: mol_type = other DNA
atgagtaaacaacgcatttttatcgctggccatcgtgggatggtcggttctgccatcaagcggcagctcgaacag

SEQ ID NO: 340956 - DNA, 75 bp, synthetic construct
  source 1..75: mol_type = other DNA
cgggccgcacgacaacttccatccgagtaactcgcatgtgatcccagcattgctgcgtcgcttccacgaggcgac

SEQ ID NO: 340957 - DNA, 75 bp, synthetic construct
  source 1..75: mol_type = other DNA
gatgctgtggaaaacaattctccgaatgttgttgtttggggaagtggtactccaaagcgtgaattcttacatgta

SEQ ID NO: 340958 - DNA, 75 bp, synthetic construct
  source 1..75: mol_type = other DNA
aatcttataaccgtcagtttgggcgtgattaccgttcagtaatgccaaccaatctttatggtccaaatgacaatt

SEQ ID NO: 340959 - DNA, 75 bp, synthetic construct
  source 1..75: mol_type = other DNA
agaattaccggatgatgtcagggaaaccattaccgtgcatttcaccgccaaaagaggtgactggtgtgacttctg

SEQ ID NO: 340960 - DNA, 75 bp, synthetic construct
  source 1..75: mol_type = other DNA
accatcactgtgcatttcaccgcaaaaagaggtgactggtgtgacatctggggtaacgaggatgtatcggtgtgg

SEQ ID NO: 340961 - DNA, 75 bp, synthetic construct
  source 1..75: mol_type = other DNA
ccgccgtttcggctgcacgctggagcactggtacgccgaacagggctgcaatttctgtggctggcagcgatatga

SEQ ID NO: 340962 - DNA, 75 bp, synthetic construct
  source 1..75: mol_type = other DNA
ttctgcgtatcactggtatacggaacagtatggcgtgaagtggcctgtggggtatgaggtgaatatcagcagtca

SEQ ID NO: 340963 - DNA, 75 bp, synthetic construct
  source 1..75: mol_type = other DNA
atcgccggaaaatatcgcgttcacccgctggctgacacacctgcagaacggtgtactgctggatgagcaaaactg

SEQ ID NO: 340964 - DNA, 75 bp, synthetic construct
  source 1..75: mol_type = other DNA
aagaggtgactggtgtggcttctggagtaacgaggatgtatcggtgtggtggaaccgtctgtgtgacaacatcct

SEQ ID NO: 340965 - DNA, 75 bp, synthetic construct
  source 1..75: mol_type = other DNA
aaaaagaggtgactggtgtgacatctggggtaacgaggatgtatcggtgtggtggaaccgtctgtgtgacaacgt

SEQ ID NO: 340966 - DNA, 75 bp, synthetic construct
  source 1..75: mol_type = other DNA
ggcggcagcaagcattcacgtgatggagctggcgcacgaagtctggctggaaaatacccagccgatgctgtcgca

SEQ ID NO: 340967 - DNA, 75 bp, synthetic construct
  source 1..75: mol_type = other DNA
gcgcggagagcttgttgatgtgctgtgggggaactggaatggtcttccccgacagatgacgatgagctgccggaa

SEQ ID NO: 340968 - DNA, 75 bp, synthetic construct
  source 1..75: mol_type = other DNA
gggaagggttaccggatgatgtcagggaaactatcactgtgcatttcaccgcaaaaagaggtgactggtgtgaca

SEQ ID NO: 340969 - DNA, 75 bp, synthetic construct
  source 1..75: mol_type = other DNA
atgcatttttctggtgaaccggcacagattgctgagattaaacgactggccagtggtgccgtcacaccgttttat

SEQ ID NO: 340970 - DNA, 75 bp, synthetic construct
  source 1..75: mol_type = other DNA
tggggggaactggaatggtcttccccgacagatgacgatgagctgccggaagtcaccggacctgcatggatagtc

SEQ ID NO: 340971 - DNA, 75 bp, synthetic construct
  source 1..75: mol_type = other DNA
gccgcgctacaaatgaaggtattcagctgtttctggccggaagtgccggacttctgcagatcactgaaaatatcc

SEQ ID NO: 340972 - DNA, 75 bp, synthetic construct
  source 1..75: mol_type = other DNA
tggggggaactggaatggtcttccccgacagatgatgatgagctgccggaagtcaccgcgccggagtggatagtc

SEQ ID NO: 340973 - DNA, 75 bp, synthetic construct
  source 1..75: mol_type = other DNA
acggtggtgttctgaacggtgtcccctctgcatatcactggtataccgaacagtatggcgtgaagtggcctgtgg

SEQ ID NO: 340974 - DNA, 75 bp, synthetic construct
  source 1..75: mol_type = other DNA
atgccaaactggtgctcgaatcgtatgtatttttctggtgaaccggcacagatagctgagattaaacgactggcc

SEQ ID NO: 340975 - DNA, 75 bp, synthetic construct
  source 1..75: mol_type = other DNA
atggggtgtagattgtctgttaacagatttgatgccattgatggcactcgtgggatattggcgggtatggtcatg

SEQ ID NO: 340976 - DNA, 75 bp, synthetic construct
  source 1..75: mol_type = other DNA
agcaaagaagatacgcagcaggtttaccagcaaatgctggaatgcacagatatcgccttcctgacgctggacgat

SEQ ID NO: 340977 - DNA, 75 bp, synthetic construct
  source 1..75: mol_type = other DNA
cgacagcaccggcgaacgtacgttctactactggcgtaacgaagccgctgccaaattctggctggagagcgagca

SEQ ID NO: 340978 - DNA, 75 bp, synthetic construct
  source 1..75: mol_type = other DNA
tgccgggcctttactacattgaaaccgacagcaccggcgaacgtacgttctactactggcgtaacgaagccgccg

SEQ ID NO: 340979 - DNA, 75 bp, synthetic construct
  source 1..75: mol_type = other DNA
tttaatgcaaaaatcggtgcaaccgttaccaaaatcgatcaagcgtactgccattctgctcactcttggcatcag

SEQ ID NO: 340980 - DNA, 75 bp, synthetic construct
  source 1..75: mol_type = other DNA
acctggagctgggatttggcatcgcactggccgtcgctttgcacaatatccctgaaggtctggcggttgcaggcc

SEQ ID NO: 340981 - DNA, 75 bp, synthetic construct
  source 1..75: mol_type = other DNA
tccgcagcggtattgaccgctatctggagccctcccgcgcgcaaccgcgtgacccgtcttttgtggccggtaatt

SEQ ID NO: 340982 - DNA, 75 bp, synthetic construct
  source 1..75: mol_type = other DNA
atggccagagcgcgtggacgaggtcgtcgcgatctcaagtccgaaatcaacattgtaccgttgctggacgtactg

SEQ ID NO: 340983 - DNA, 75 bp, synthetic construct
  source 1..75: mol_type = other DNA
aatgtggataatggaaataataaatcagcatatttgcgtatagccggtagctataatattattgagcatgtgata

SEQ ID NO: 340984 - DNA, 75 bp, synthetic construct
  source 1..75: mol_type = other DNA
taagtggaatacctggcaagtataaaacaatttccgccattaatccacataaagccatttttataaacaagacat

SEQ ID NO: 340985 - DNA, 75 bp, synthetic construct
  source 1..75: mol_type = other DNA
ccaaattctggctggagagtgagcagtctgcggcgatttgcgaagagctggcgaatttcgattatctctacctga

SEQ ID NO: 340986 - DNA, 75 bp, synthetic construct
  source 1..75: mol_type = other DNA
gtggcattagcctggcgatcctgagtccaaccagtcgtgagaaactcctttccctactgcgcgaatgccgcgcca

SEQ ID NO: 340987 - DNA, 75 bp, synthetic construct
  source 1..75: mol_type = other DNA
cgatgaaataattaaagcactgaacttgttacatagtgcgggtgtgaaatcggttggtttaatgacgcagcctat

SEQ ID NO: 340988 - DNA, 75 bp, synthetic construct
  source 1..75: mol_type = other DNA
gtgacgtattttgcgaagccgggggtgccggctgtgacgccggtgacgtttccgctggtgtttgtgttcagtgcc

SEQ ID NO: 340989 - DNA, 75 bp, synthetic construct
  source 1..75: mol_type = other DNA
aaaagaggtgactggtgtgacatatggggtaacgaggatgtatcggtgtggtggaaccgtctgtgtgacaacgta

SEQ ID NO: 340990 - DNA, 75 bp, synthetic construct
  source 1..75: mol_type = other DNA
attaaaaaatatattatttcttcatggtctttattggcatgacttcaagttagtcaatgaaccatcgtggagtat

SEQ ID NO: 340991 - DNA, 75 bp, synthetic construct
  source 1..75: mol_type = other DNA
ttctgcatatcactggtatacggaacagtatggcgtgaagtggcctgtgggatatggactgaatatcagcagtca

SEQ ID NO: 340992 - DNA, 75 bp, synthetic construct
  source 1..75: mol_type = other DNA
tgctgcgtcgcttccacgaggcgacggcacagaatgcgccggacgtggtggtatggggcagcggtacaccgatgc

SEQ ID NO: 340993 - DNA, 75 bp, synthetic construct
  source 1..75: mol_type = other DNA
ggacagccgcgcggtgcatgatttctttgccagcgaacgtattgaccaggtctatctggcggcggcgaaagtggg

SEQ ID NO: 340994 - DNA, 75 bp, synthetic construct
  source 1..75: mol_type = other DNA
ggctgctgccagcgtatatgtcatggagttgaataaaaatgtatacgatcagtttacggaacctatgctctctca

SEQ ID NO: 340995 - DNA, 75 bp, synthetic construct
  source 1..75: mol_type = other DNA
ggaagtcaccggacctgcgtggataatcgacacgccagcccgtcgcccttttctgatgaacgcccttcaagccgc

SEQ ID NO: 340996 - DNA, 75 bp, synthetic construct
  source 1..75: mol_type = other DNA
gatcgctgagattaaacgactggccagcggtgcagttacaccgctttatcgccgcgccacaaatgaaggtattca

SEQ ID NO: 340997 - DNA, 75 bp, synthetic construct
  source 1..75: mol_type = other DNA
tatctgaactgagctgtcacggtgagtttgcccggctgacctgccggggggcgatcctgaagggcgcgggaggcg

SEQ ID NO: 340998 - DNA, 75 bp, synthetic construct
  source 1..75: mol_type = other DNA
ttactttttatttattgcatttatcccgatgctatttatcgatcatcttccggataatcaactaataaagagagt

SEQ ID NO: 340999 - DNA, 75 bp, synthetic construct
  source 1..75: mol_type = other DNA
actgacggctgccgggcgtggcgttgtatcgccggagaatatcgcgttcacccgctggctgacacacctgcagga

SEQ ID NO: 341000 - DNA, 75 bp, synthetic construct
  source 1..75: mol_type = other DNA
gtcaccgttacttatttttatcggcgtgattttttcctcggacgcaaacagtcacgcgccgggcaactgggccgc

SEQ ID NO: 341001 - DNA, 75 bp, synthetic construct
  source 1..75: mol_type = other DNA
caggggaaagcatggcccctgattgaaggcagcggcacgatttatggcatgtatgtgattgagggactgaatcag

SEQ ID NO: 341002 - DNA, 75 bp, synthetic construct
  source 1..75: mol_type = other DNA
aagttgagaataattctcagtcagtcaagttaaccgcatcggatgtattgagcatgaatgacaattcaacgcttt

SEQ ID NO: 341003 - DNA, 75 bp, synthetic construct
  source 1..75: mol_type = other DNA
caatgatactgttaccgtcactgatggtgcatataacacgactatttcactgggggcgggagatgatgtatttga

SEQ ID NO: 341004 - DNA, 75 bp, synthetic construct
  source 1..75: mol_type = other DNA
tcgctgtctgacatgttcgggagcctgagtgaccagctcagcaacctgcaggactctgctgcctctgcgattggg

SEQ ID NO: 341005 - DNA, 75 bp, synthetic construct
  source 1..75: mol_type = other DNA
gtgtggggcagcggtacaccgatgcgtgaatttctgcacgtcgatgatatggcggcggcaagcattcatgtgatg

SEQ ID NO: 341006 - DNA, 75 bp, synthetic construct
  source 1..75: mol_type = other DNA
ctggccatcgcgggatggtcggttctgccatcaagcggcagctcgaacagcgcggtgatgtggagctggtattac

SEQ ID NO: 341007 - DNA, 75 bp, synthetic construct
  source 1..75: mol_type = other DNA
atgaccaataatcccccttcagcacagattaagcccggcgagtatggtttccccctcaagttaaaagcccgctac

SEQ ID NO: 341008 - DNA, 75 bp, synthetic construct
  source 1..75: mol_type = other DNA
atggcctgggcgcaggcgtctggagtcgtaacggtaatctggcctataagatgggacgcggcattcaggccgggc

SEQ ID NO: 341009 - DNA, 75 bp, synthetic construct
  source 1..75: mol_type = other DNA
gataaatgggcgcatacctcggtgcaggatcgcgcggcgattctgtttaagattgccgatcggatggagcagaac

SEQ ID NO: 341010 - DNA, 75 bp, synthetic construct
  source 1..75: mol_type = other DNA
tcactatcatcttctatcgccgaaaaaggggactttgggtataccattggcgcgaatagtggtgaaaatgatcca

SEQ ID NO: 341011 - DNA, 75 bp, synthetic construct
  source 1..75: mol_type = other DNA
tttttggtccggtgctggcggtaaccaccttcaaaacgatggatgaggcgctggagctggcgaacgacacgcaat

SEQ ID NO: 341012 - DNA, 75 bp, synthetic construct
  source 1..75: mol_type = other DNA
atggggcgcggcattcaggccggacgcgtatggaccaactgttatcatgcctacccggcacacgcagcatttggc

SEQ ID NO: 341013 - DNA, 75 bp, synthetic construct
  source 1..75: mol_type = other DNA
tcagtgcgcagctgaataacctgcaggacacagcaacatctgccttaagcgatattagtaaaacggtgggagggc

SEQ ID NO: 341014 - DNA, 75 bp, synthetic construct
  source 1..75: mol_type = other DNA
cgacagatgctggacacctactgtcccttacgaaggatgtagattttccttgggctcctggaatgtctaaaacgc

SEQ ID NO: 341015 - DNA, 75 bp, synthetic construct
  source 1..75: mol_type = other DNA
cgctgaaagagctaggtcacccgacccgtttgttcatattcaaacacctggtcaaagcgggggagcaaggtttgc

SEQ ID NO: 341016 - DNA, 75 bp, synthetic construct
  source 1..75: mol_type = other DNA
tccaactttaccactccctattcgccgcatcgcggctcaagggcgtcctgctctgcgaggctgccaggctaccgc

SEQ ID NO: 341017 - DNA, 75 bp, synthetic construct
  source 1..75: mol_type = other DNA
gctgacgaggtttatgacctggctgtactggcgctgaatttatcaaatatcgcaaacctgaagcgatacgagctt

SEQ ID NO: 341018 - DNA, 75 bp, synthetic construct
  source 1..75: mol_type = other DNA
atgacgatcacaaaacaacgggtagaagaaatcatatcccgcattgaaatgtatgggcatggcgcagggtatacc

SEQ ID NO: 341019 - DNA, 75 bp, synthetic construct
  source 1..75: mol_type = other DNA
ccggtaaagtccattaactgccaagctcgggctgcagctctttatgtttctttagttcagcgtaatatgttggat

SEQ ID NO: 341020 - DNA, 75 bp, synthetic construct
  source 1..75: mol_type = other DNA
cactgaaagagttaggtcatccgacccgtttgttcatatttaagcatctggtcaaagcgggggaacaaggtttgc

SEQ ID NO: 341021 - DNA, 75 bp, synthetic construct
  source 1..75: mol_type = other DNA
ccctgaaagagctgggacatcctacacgactgagcgtgtacagagagctggttaaagccgggcatgaaggtttac

SEQ ID NO: 341022 - DNA, 75 bp, synthetic construct
  source 1..75: mol_type = other DNA
tcagtgcgcagctgaataatctgcaggacacggcaacgtctgccttaagcgatatcagtaaaacggtgggagggc

SEQ ID NO: 341023 - DNA, 75 bp, synthetic construct
  source 1..75: mol_type = other DNA
cttaccggaagagaagatgcagattgaagcaaatgccgccgctgccggtctgagtgtcgcggcctatttgcgtaa

SEQ ID NO: 341024 - DNA, 75 bp, synthetic construct
  source 1..75: mol_type = other DNA
ctgaataatctgcaggatacggcaacgtctgcattaagcgatatcagtaaaactgtgggagggctgctgtcgtga

SEQ ID NO: 341025 - DNA, 75 bp, synthetic construct
  source 1..75: mol_type = other DNA
tctgggaccggacaacgacatgctgacactttccggtgttcttatgccggagataacaggcggcaggctgtcgtt

SEQ ID NO: 341026 - DNA, 75 bp, synthetic construct
  source 1..75: mol_type = other DNA
ccgcaacggtaatctggcctataagatggggcgcggcatacaggctgggcgcgtgtggaccaactgttatcacgc

SEQ ID NO: 341027 - DNA, 75 bp, synthetic construct
  source 1..75: mol_type = other DNA
gctagcctcctgcaccagtgccggggaaacgttcggtaaggttgtaggtaacgctctatctgcattaacaccaat

SEQ ID NO: 341028 - DNA, 75 bp, synthetic construct
  source 1..75: mol_type = other DNA
tgcgcgagttgggcaacgccatggtgcaaccggatcggtttatggaaggtctggacgcgctggggctgagcgcgg

SEQ ID NO: 341029 - DNA, 75 bp, synthetic construct
  source 1..75: mol_type = other DNA
tgttctgttgcgagtgggcggcactgccgatcagctcggctataagaactcggcggcgttagggtctacattcct

SEQ ID NO: 341030 - DNA, 75 bp, synthetic construct
  source 1..75: mol_type = other DNA
ccatccccgacgcaacaaaagcagcgcagcaagctgcggaaagtatgcacaaagaccctgttgtctgggagtggg

SEQ ID NO: 341031 - DNA, 75 bp, synthetic construct
  source 1..75: mol_type = other DNA
gctggcatcctgcaccagtgccggggaaacgttcggcaaggttgtaggggccgcaatcagcgcgctgacgctacc

SEQ ID NO: 341032 - DNA, 75 bp, synthetic construct
  source 1..75: mol_type = other DNA
ctttgctgcggtagcagtggccgtaattaaattctggcaaccgattaaggcatttttcagcggcttctttaccgg

SEQ ID NO: 341033 - DNA, 75 bp, synthetic construct
  source 1..75: mol_type = other DNA
gcaaactgcgggcacattaacgctacttcctgtcgcgctacgtgaatctgtcactgcggggcagttagcggttga

SEQ ID NO: 341034 - DNA, 75 bp, synthetic construct
  source 1..75: mol_type = other DNA
atcattccggtgctcgacgagttacgggcgcaggggatgaaactcaacgggcctttgcctgccgataccctgttt

SEQ ID NO: 341035 - DNA, 75 bp, synthetic construct
  source 1..75: mol_type = other DNA
acttggctggtatcacgaaatctcactggaggcggggcttgccagcacctaccagtggtttcttgagaatcaaga

SEQ ID NO: 341036 - DNA, 75 bp, synthetic construct
  source 1..75: mol_type = other DNA
agggcggcgctcgtatgggcgtggctaatagcgatgatccatggcagaagcagaaaaaagatctgctgaattttg

SEQ ID NO: 341037 - DNA, 75 bp, synthetic construct
  source 1..75: mol_type = other DNA
atcaccccaccactgctgcatgaagtcatttctattttgcatcacgatttgcggaccaaatttggtattgctgag

SEQ ID NO: 341038 - DNA, 75 bp, synthetic construct
  source 1..75: mol_type = other DNA
atggttaaaacccaacgtgttgtgatccctcccggcgagcccgccgggattggcccggacttagttgtccagctt

SEQ ID NO: 341039 - DNA, 75 bp, synthetic construct
  source 1..75: mol_type = other DNA
gtggcgatgtatataaccttaacttcgactttagcggccagaaactggatgaagaaaccattatcaggcgcgtgc

SEQ ID NO: 341040 - DNA, 75 bp, synthetic construct
  source 1..75: mol_type = other DNA
aggatctgcttgagaaagttgaagtagaagaaaagcagcgacaggaaaatgatagaaaacttattgagcaagtac

SEQ ID NO: 341041 - DNA, 75 bp, synthetic construct
  source 1..75: mol_type = other DNA
tatcacaaagatgggtctgaaattttgatagaccggggctgggatatggctacaggtgaaagagatttcagaaac

SEQ ID NO: 341042 - DNA, 75 bp, synthetic construct
  source 1..75: mol_type = other DNA
atcatcttctatcgccgaaaaaggggactttgggtataccattggcgcgaatagtggtgaaaatgatccaatggt

SEQ ID NO: 341043 - DNA, 75 bp, synthetic construct
  source 1..75: mol_type = other DNA
cagctactgtgcgaagtggcgtcttcgggcaaacgagacatcgatctggcgctggatgctgcgcacaaagtgaaa

SEQ ID NO: 341044 - DNA, 75 bp, synthetic construct
  source 1..75: mol_type = other DNA
tgtcgcccgtataatcaaggcgaagcaaccagccatttttgtgctggagaacgtgaaaaaccttaagagccatga

SEQ ID NO: 341045 - DNA, 75 bp, synthetic construct
  source 1..75: mol_type = other DNA
ggtggcaagccattccggatccccgtttccgacacccaggcctatcgccagttcgggaactcagtggtcgttccc

SEQ ID NO: 341046 - DNA, 75 bp, synthetic construct
  source 1..75: mol_type = other DNA
ggcattgtgaactacctcggcgtcgatcttctgcatctctatgagcaggcaccgctgtggttcgataatccgggc

SEQ ID NO: 341047 - DNA, 75 bp, synthetic construct
  source 1..75: mol_type = other DNA
cgaaaccactggcatgtggagaataagctgcactggcgtctggacgtggtaatgaatgaagacgactgcaaaata

SEQ ID NO: 341048 - DNA, 75 bp, synthetic construct
  source 1..75: mol_type = other DNA
aaggcagggttaagatgtaagatgcgaaaagcagctatggacagaaactatctggcgtcagtccttgcggagagc

SEQ ID NO: 341049 - DNA, 75 bp, synthetic construct
  source 1..75: mol_type = other DNA
agtgaagttaccggggttgccaaagatccgagcggtaatgaaagtgacccgtcaaccgtaacctcaaaaactgat

SEQ ID NO: 341050 - DNA, 75 bp, synthetic construct
  source 1..75: mol_type = other DNA
cgcgctagcagcagagagactattaaatctctgtccgatctaaggaaaaccttagctgaagacacgcaaaaaata

SEQ ID NO: 341051 - DNA, 75 bp, synthetic construct
  source 1..75: mol_type = other DNA
ttcaaggcagggttaagacgtaagatgcgaaaagcagccatggacaggaactatctggcgtcagtccttgcgggg

SEQ ID NO: 341052 - DNA, 75 bp, synthetic construct
  source 1..75: mol_type = other DNA
ataatttctgaattgatgtgggtgtggttgccggggatggtgcttatgggaatgttgtggtggcgcaggcgataa

SEQ ID NO: 341053 - DNA, 75 bp, synthetic construct
  source 1..75: mol_type = other DNA
tggaagaacacggtatcagcgtctatgccagcatcccgctgtcggaatggcagaaagcgcgcgatagcgtcaaaa

SEQ ID NO: 341054 - DNA, 75 bp, synthetic construct
  source 1..75: mol_type = other DNA
cttccgtcaggataaagattctgttgatctgccgctggaagcgaaagcggtgcttgattcaatggtgaacatcga

SEQ ID NO: 341055 - DNA, 75 bp, synthetic construct
  source 1..75: mol_type = other DNA
gaccggatcctgaacgttgtcggggtcccggttccggatgcaaccggcgggcgtctggaaattctctgtcggctg

SEQ ID NO: 341056 - DNA, 75 bp, synthetic construct
  source 1..75: mol_type = other DNA
aaaaaaaatcgtcatttcagatggtaaaaataaccatacctatattttcaatatcagtgatatattatctgatga

SEQ ID NO: 341057 - DNA, 75 bp, synthetic construct
  source 1..75: mol_type = other DNA
tcgaacgtgaaccgcaagatcccggcgttgtacgattaaaacgtgcggttgatgtacataatcttgcagagcttc

SEQ ID NO: 341058 - DNA, 75 bp, synthetic construct
  source 1..75: mol_type = other DNA
ttattcagcgcgatgacctggttcagtacacggcaactgccgatgcaaccagctccggtggtgtcctgcgtgtgc

SEQ ID NO: 341059 - DNA, 75 bp, synthetic construct
  source 1..75: mol_type = other DNA
tttcagacactggaaaggcattggaacggttggcgtgatggtggcgacaaacgatccggaacacccggccccgga

SEQ ID NO: 341060 - DNA, 75 bp, synthetic construct
  source 1..75: mol_type = other DNA
aggcgaacaaggtaagcgcgacagcattattgtcgttgcccagttgtcgccggaattcaccgctcgccttgttga

SEQ ID NO: 341061 - DNA, 75 bp, synthetic construct
  source 1..75: mol_type = other DNA
ttcgccacgccgatttatagtgccgacgcactggtacaaatcgagcaaagcagcggcaattcgttagtgcaggat

SEQ ID NO: 341062 - DNA, 75 bp, synthetic construct
  source 1..75: mol_type = other DNA
acggtcgcgtaacggcgatgccgaaaacccagcaggagattgtccgtctgacgcgcgatgtcgagtctgggcagc

SEQ ID NO: 341063 - DNA, 75 bp, synthetic construct
  source 1..75: mol_type = other DNA
atgcgcaggcccgtgatacatggtaccggtcactggagtacgataattttccggaaatcagcgaagcgaacattc

SEQ ID NO: 341064 - DNA, 75 bp, synthetic construct
  source 1..75: mol_type = other DNA
ggcgaaggcgtatccgcaactggagttacgttttgatgtggaagaccggttggtcgatttggtcaatgaaggggt

SEQ ID NO: 341065 - DNA, 75 bp, synthetic construct
  source 1..75: mol_type = other DNA
ccgcactggactgggccatgaaacaggattttcgctgcggctgctggctcatggagaaacctgaaacggcaatga

SEQ ID NO: 341066 - DNA, 75 bp, synthetic construct
  source 1..75: mol_type = other DNA
ttaaccagactacaggcgcgagcagaaccatggtggctgtaattgactccatcaccacagccatagacaggctga

SEQ ID NO: 341067 - DNA, 75 bp, synthetic construct
  source 1..75: mol_type = other DNA
tgattgatgtcgccgtgagacgtctgagaagtaaaattgatgatgactttgagccaaaactgatccataccgttc

SEQ ID NO: 341068 - DNA, 75 bp, synthetic construct
  source 1..75: mol_type = other DNA
ttgagcgaggagtgatcaacgtcttcagagtgctgagctggaattacaaaaccaactcaccctgtaaatttggca

SEQ ID NO: 341069 - DNA, 75 bp, synthetic construct
  source 1..75: mol_type = other DNA
agatgcactcaatgcaattcagaagcaaaccagcatcgtgaatgcagagttcgcaaaattgccccgcaccttatc

SEQ ID NO: 341070 - DNA, 75 bp, synthetic construct
  source 1..75: mol_type = other DNA
agcaggcctcccggtttataaatcaggaagtgtcagctgcgaaggttcaacgcgatccttacacaggtgaagcgc

SEQ ID NO: 341071 - DNA, 75 bp, synthetic construct
  source 1..75: mol_type = other DNA
cggtaaaccgatccccaacaaccgggggaatatcaccattaatctggatgaccacatacggtccgttcagggtaa

SEQ ID NO: 341072 - DNA, 75 bp, synthetic construct
  source 1..75: mol_type = other DNA
tcgcgactggctacgtcagcgaaggtgcggattacggttgaatttttgcgccagtattttgcccgccaccatccg

SEQ ID NO: 341073 - DNA, 75 bp, synthetic construct
  source 1..75: mol_type = other DNA
gcggaagaattgggtgtttcaccggcttttgtcagcaaacgcattgccttgctggaacaaacgctaaatgtggtg

SEQ ID NO: 341074 - DNA, 75 bp, synthetic construct
  source 1..75: mol_type = other DNA
aatatttatcgactcgcattgccgttatttgtcggcatatttttaatggcattaccgcctgtgtatctgcaagac

SEQ ID NO: 341075 - DNA, 75 bp, synthetic construct
  source 1..75: mol_type = other DNA
cggcgctcacgcgactgttttgtagtatccctttaccggtaagtagcgcggtcatgctggtttcttatctacctt

SEQ ID NO: 341076 - DNA, 75 bp, synthetic construct
  source 1..75: mol_type = other DNA
tggttttagcggattaggccatcgcctggcgcggttatttacgccgtcggtgatggtcttgtttatgttgatgct

SEQ ID NO: 341077 - DNA, 75 bp, synthetic construct
  source 1..75: mol_type = other DNA
gattggaaactttgcaaaggttgttggtattggtccaaacaaactgtttgcgtggatgcgcgatcacaaaatcct

SEQ ID NO: 341078 - DNA, 75 bp, synthetic construct
  source 1..75: mol_type = other DNA
aactggcggcatggattgaagagaacgtgactttcccgtgcacaatggttgaccgcattgttccggcggctactc

SEQ ID NO: 341079 - DNA, 75 bp, synthetic construct
  source 1..75: mol_type = other DNA
ctgggcgtggctggctggatgcgttacacccagggcgtggatgagcagggtaatgccattgacgtggttgacccg

SEQ ID NO: 341080 - DNA, 75 bp, synthetic construct
  source 1..75: mol_type = other DNA
acgcgcagtatcagggcgcagaccgcgtgaaagcgctgctgggcctgagcggtatctttgccgatgatctgccgc

SEQ ID NO: 341081 - DNA, 75 bp, synthetic construct
  source 1..75: mol_type = other DNA
gatgatcacctcgcgtatggtgctcgggaaaaccgttgaggatctggggctggatattgccgtgagcaaaaacac

SEQ ID NO: 341082 - DNA, 75 bp, synthetic construct
  source 1..75: mol_type = other DNA
agaacgcggactttgttggcgcggtgacgactgcatatcagcaactgtgcgaacgtggtgcgcgtgagtgcgtgg

SEQ ID NO: 341083 - DNA, 75 bp, synthetic construct
  source 1..75: mol_type = other DNA
cctgcgacaacgtgcgtgaaaacggtcatgtggcgaaggttgccgttctggggctggctcaggcgcgtgacccgc

SEQ ID NO: 341084 - DNA, 75 bp, synthetic construct
  source 1..75: mol_type = other DNA
ccgtggggagcagatggagcgtaccggcatgatttagtcgattgggaaaagatgacgcaggagaagtttgaagag

SEQ ID NO: 341085 - DNA, 75 bp, synthetic construct
  source 1..75: mol_type = other DNA
gcggcaaatttacatgtggctcgcagtacctggagactgctggtcagctacatcaacaaccgcatgattgttcgc

SEQ ID NO: 341086 - DNA, 75 bp, synthetic construct
  source 1..75: mol_type = other DNA
ctgcgaaatcgctaacggcaatgacgtagcggcagctcgcgaggacggcatcctgtctgaatccattggtgaaac

SEQ ID NO: 341087 - DNA, 75 bp, synthetic construct
  source 1..75: mol_type = other DNA
gccattgcctgcgaaccgttccgtcagtgggtgattgaagataactttgttaatggtcgcccggactgggataaa

SEQ ID NO: 341088 - DNA, 75 bp, synthetic construct
  source 1..75: mol_type = other DNA
acctgatgccaggcaacgaccgcgtgctgatcgaaaacctgaaaaaacagcaactgctgtacaccgtagcggaaa

SEQ ID NO: 341089 - DNA, 75 bp, synthetic construct
  source 1..75: mol_type = other DNA
tcattctcgtctggaatcacgcattgtgcatctcggttgcggggcgtttcaccgcgcgcaccaggcgctgtatac

SEQ ID NO: 341090 - DNA, 75 bp, synthetic construct
  source 1..75: mol_type = other DNA
aaagaagcggagatttccaagctgttcaccaaagcgcatccggcgtaccgcacgctgctggaaaaacgccaggcg

SEQ ID NO: 341091 - DNA, 75 bp, synthetic construct
  source 1..75: mol_type = other DNA
ccattgagtcagtacgcaacgtagagggcgtgctggctgtgtcgctggtttatcaccagcaggaagagcaaggtg

SEQ ID NO: 341092 - DNA, 75 bp, synthetic construct
  source 1..75: mol_type = other DNA
gctcagcgtcagcggtgacagcaccctgcaaagttttatgggttacaacggaacttcgggtgatagcagcaatgg

SEQ ID NO: 341093 - DNA, 75 bp, synthetic construct
  source 1..75: mol_type = other DNA
taaagacacatccaaagctgaaaatgcggttaaagcgtgggtggatgcctataacacattgcaggatacattcag

SEQ ID NO: 341094 - DNA, 75 bp, synthetic construct
  source 1..75: mol_type = other DNA
atgaagatgttgcgcgatccgctgttctggctcattgctctttttgtggcgctgattttctggctaccttacagc

SEQ ID NO: 341095 - DNA, 75 bp, synthetic construct
  source 1..75: mol_type = other DNA
ctggagcatttctggctggtggggatttcaagtttgtttgcagtgattattggcgctggtgccggaattgccgtc

SEQ ID NO: 341096 - DNA, 75 bp, synthetic construct
  source 1..75: mol_type = other DNA
ggctccggtgattctggcgggcgtgcgaacttcggtgattatcaacattggtacggcgacgatcgcctcaacggt

SEQ ID NO: 341097 - DNA, 75 bp, synthetic construct
  source 1..75: mol_type = other DNA
gacaatgtgaaacgtactatcgaaatgctggctaaaaatggtgttatccgacatcctcaaattgaggattgtgga

SEQ ID NO: 341098 - DNA, 75 bp, synthetic construct
  source 1..75: mol_type = other DNA
ggtgatcctcaactcgatattccgccgtgccagcgggtatcaggattacggctactacgaatacgaatatacgtc

SEQ ID NO: 341099 - DNA, 75 bp, synthetic construct
  source 1..75: mol_type = other DNA
aggctatacccacgaactgctggggaccaataacgtcaacggcctgtctgagatcctgattggtaagggggatat

SEQ ID NO: 341100 - DNA, 75 bp, synthetic construct
  source 1..75: mol_type = other DNA
tatcagcgcggctaactcgtcactttccggcattcgcgatgccattaacaacgccaaagctggtgtcagcgccag

SEQ ID NO: 341101 - DNA, 75 bp, synthetic construct
  source 1..75: mol_type = other DNA
agcaatgtaaaagtatccatagatagattggtgaaacgtggcgttatcaagcctcctgcattgcagcacactaac

SEQ ID NO: 341102 - DNA, 75 bp, synthetic construct
  source 1..75: mol_type = other DNA
aaaatcaataacttaggattacttcgtggcgtagaggcttacgtttttgagggcgaacaaggtaagcgcgacagc

SEQ ID NO: 341103 - DNA, 75 bp, synthetic construct
  source 1..75: mol_type = other DNA
gccacattctggctgtacgaaagagtacactgctgcaaatcgacacacttatccggcaactggctgaaatctcag

SEQ ID NO: 341104 - DNA, 75 bp, synthetic construct
  source 1..75: mol_type = other DNA
tgaactggaattacaaaaccaattgcccctgcaaatttggcagtaaaattatcgtcaacaacctggtgaggtggg

SEQ ID NO: 341105 - DNA, 75 bp, synthetic construct
  source 1..75: mol_type = other DNA
ccccggcaacgatgatcgactggcgtcccattgttcatgaaatgcgcctgttcaaatcaccagaagagattgccg

SEQ ID NO: 341106 - DNA, 75 bp, synthetic construct
  source 1..75: mol_type = other DNA
atgagcgaacccctgttaattgcccgcaccacgccggacacagaactgtttttactgccgggaatggctaaccgt

SEQ ID NO: 341107 - DNA, 75 bp, synthetic construct
  source 1..75: mol_type = other DNA
ggccaatccggcatttgataccgaaaaggcaatccaggaactggggaccggcgagacgttaatctcgtttcttga

SEQ ID NO: 341108 - DNA, 75 bp, synthetic construct
  source 1..75: mol_type = other DNA
ggatgcgcaccgataccaacggtaaaggcgttatcaatatcctcagcgccgagaagctttatcagatgccgaaac

SEQ ID NO: 341109 - DNA, 75 bp, synthetic construct
  source 1..75: mol_type = other DNA
gaacctttacgcgccatgcgtttggtttattatcttgcctggctaatgcggcgttgggctgatcccgcgttcccg

SEQ ID NO: 341110 - DNA, 75 bp, synthetic construct
  source 1..75: mol_type = other DNA
ttaacagctatgaaaaccgtgtctatcaatttcaggacgaagatcgtcgacgttttgtcgtcaaattttatcgcc

SEQ ID NO: 341111 - DNA, 75 bp, synthetic construct
  source 1..75: mol_type = other DNA
ctggaactggatgccgacaaactcaccgctgcattgaaaaaagatgccagcggcgtaggtgcattgattgttggc

SEQ ID NO: 341112 - DNA, 75 bp, synthetic construct
  source 1..75: mol_type = other DNA
tgacggcagagatctggtttggtcgtcgcttaggccaggatgccgcgccagaaaaactgggcgttgaccgcgcac

SEQ ID NO: 341113 - DNA, 75 bp, synthetic construct
  source 1..75: mol_type = other DNA
tacttcgccgcgcgggggaaatcaccgccctggcgcatacccgggcgatggaaaaatgccgtccgggaatgttcg

SEQ ID NO: 341114 - DNA, 75 bp, synthetic construct
  source 1..75: mol_type = other DNA
gactgccatgccgggaatattctctggcgtgatggacccctgtttgtcgatttagacgatgcacgtaatggccca

SEQ ID NO: 341115 - DNA, 75 bp, synthetic construct
  source 1..75: mol_type = other DNA
tttggtgagaaaggtcatccagtacgggcaacggtctcggatctgggaccgctgttgcttgcacggctgttaaat

SEQ ID NO: 341116 - DNA, 75 bp, synthetic construct
  source 1..75: mol_type = other DNA
ggactgagctggaattacaaaaccaattcaccctgcaaatttggcagtaaaattatcgtcaacaatctggtgagg

SEQ ID NO: 341117 - DNA, 75 bp, synthetic construct
  source 1..75: mol_type = other DNA
tcagcggcccgcgacagacgcgggaatacggctacagtgccacgggcaggctggagagcgtgcgcaccctcgcac

SEQ ID NO: 341118 - DNA, 75 bp, synthetic construct
  source 1..75: mol_type = other DNA
ccgggaaaacattaccattcatctggatgaccacatccagtctgttcagggaaaagaggactatgaagatgagat

SEQ ID NO: 341119 - DNA, 75 bp, synthetic construct
  source 1..75: mol_type = other DNA
aactggctgaaatctcagcaatgacagtaagtattggcggtaaaactgcactggactgggccatgaaacaggatt

SEQ ID NO: 341120 - DNA, 75 bp, synthetic construct
  source 1..75: mol_type = other DNA
agcacacatcacgttcaggaaaccagaactggttgacagacttaatgagattattgcgaaacactatccgggagt

SEQ ID NO: 341121 - DNA, 75 bp, synthetic construct
  source 1..75: mol_type = other DNA
ctagtgaggtgggaccggtggggggttcatcttatcaccgggcaacagactgaccgactcgtcgacctggaaaga

SEQ ID NO: 341122 - DNA, 75 bp, synthetic construct
  source 1..75: mol_type = other DNA
gttcgcggatggggccggtgacggaagatgagcgtaatggcttgattaatcactccccggtgtatggcaaatatg

SEQ ID NO: 341123 - DNA, 75 bp, synthetic construct
  source 1..75: mol_type = other DNA
aaaagtgccgcccgccaggtcacgaatcaaattatacgcggtgtgctggggagtttacttgggggaagaagaagg

SEQ ID NO: 341124 - DNA, 75 bp, synthetic construct
  source 1..75: mol_type = other DNA
ccgcaggtgttgctggataagattgaacaggtaataagacttatccgctcgaaaggtgtaggcgtctggtttgtt

SEQ ID NO: 341125 - DNA, 75 bp, synthetic construct
  source 1..75: mol_type = other DNA
tggcgtgacctgatgcaacgttcagggatgctgtcattaatggatgcacaagcccgtgatacatggtaccggtca

SEQ ID NO: 341126 - DNA, 75 bp, synthetic construct
  source 1..75: mol_type = other DNA
cgctgctgcaaattgacacacttatccggcaactggctgaaatatcagcaatgacagaaagtattggaggtaaaa

SEQ ID NO: 341127 - DNA, 75 bp, synthetic construct
  source 1..75: mol_type = other DNA
cccctgtaaatttggcagtaaaattatcgtcaacaacctggtgaggtgggacagatggggatttcaccttatcac

SEQ ID NO: 341128 - DNA, 75 bp, synthetic construct
  source 1..75: mol_type = other DNA
catcattaacgtgggtaacggtgaatatcgtctgtcagtcacatcaaatgacaccggccttgacaatgcgatgac

SEQ ID NO: 341129 - DNA, 75 bp, synthetic construct
  source 1..75: mol_type = other DNA
ccggcaactgacagaaatctcagcaatgacagaaagtattggagataaaaccgccccggactgggccatgaaaca

SEQ ID NO: 341130 - DNA, 75 bp, synthetic construct
  source 1..75: mol_type = other DNA
ctgccccggactgggccatgaaacaggattttcgctgcggctgctggctgatggagaaacctgaaacagcaatga

SEQ ID NO: 341131 - DNA, 75 bp, synthetic construct
  source 1..75: mol_type = other DNA
atcgtcaacaatctggtgaggtgggaccggtgggggcttcatctgaacagcgggcaacaggccgatcgacttgcc

SEQ ID NO: 341132 - DNA, 75 bp, synthetic construct
  source 1..75: mol_type = other DNA
cccctgtaaatttggcagtaaaattatcgtcaacaatctggtgagatgggaccgatggggatttcatcttatcac

SEQ ID NO: 341133 - DNA, 75 bp, synthetic construct
  source 1..75: mol_type = other DNA
gatccgcaggcgcgctacttcttcgactacttacaggcgcagcaggacatctctgtcgttgaacaaggcattcgc

SEQ ID NO: 341134 - DNA, 75 bp, synthetic construct
  source 1..75: mol_type = other DNA
ggctccgcgcatatcacgttcagaaaaccaaaactggttgacagactgaatgattttatcgcaaaacactatcct

SEQ ID NO: 341135 - DNA, 75 bp, synthetic construct
  source 1..75: mol_type = other DNA
ttcgccctcacagccattgcaacagtcactgaaaggccttgagcgggcttacaaaaacttcttccggaagcgggc

SEQ ID NO: 341136 - DNA, 75 bp, synthetic construct
  source 1..75: mol_type = other DNA
aatacaaaagaacaaattgaacaagagcgtttgaagaagctttcagcagaacggcagttagcagaattagaatta

SEQ ID NO: 341137 - DNA, 75 bp, synthetic construct
  source 1..75: mol_type = other DNA
caggctgcaatcttggctacagcttgggctcctgccgccgccatggcgagcctcgcttcatttggggccaactca

SEQ ID NO: 341138 - DNA, 75 bp, synthetic construct
  source 1..75: mol_type = other DNA
attataaaaccaactctccctgtaaatttggaagtaaaatcattatcaacaatctggtgagatgggaccggtgga

SEQ ID NO: 341139 - DNA, 75 bp, synthetic construct
  source 1..75: mol_type = other DNA
atgacggtggtcgtaaagccgtccgggaatatatcgtcattaacgatgagcttcgcgacaatctttccggaatgc

SEQ ID NO: 341140 - DNA, 75 bp, synthetic construct
  source 1..75: mol_type = other DNA
tctgcgcacatcacgttcaggaagccagaactggttgacagactgaatgatattatcgcaaaacactatcctgat

SEQ ID NO: 341141 - DNA, 75 bp, synthetic construct
  source 1..75: mol_type = other DNA
cagcggagatgcctccggccgctatggcctgcagcgaggtcagcgtgttcgcctgcgctgccacctgatacaggg

SEQ ID NO: 341142 - DNA, 75 bp, synthetic construct
  source 1..75: mol_type = other DNA
tctgagcacatttgaacaactgcaccagaaaaacgatgaggtgtttgatcggggcgtgatcaacgtcttcatagg

SEQ ID NO: 341143 - DNA, 75 bp, synthetic construct
  source 1..75: mol_type = other DNA
caaagagtggcgacaggaacaaggtgacgatgtgccactggcgtttattattggtcaggattcactgctgacttt

SEQ ID NO: 341144 - DNA, 75 bp, synthetic construct
  source 1..75: mol_type = other DNA
attcactgctgacctttccgacctggtacgaatacgaaacgatactcgacaatgcacatttgatcgtctgtcggc

SEQ ID NO: 341145 - DNA, 75 bp, synthetic construct
  source 1..75: mol_type = other DNA
tctgagcacatttgaacaactgcaccagaacaatgatgaggtgtttgagcggggcgtgatcaacgtcttcatagg

SEQ ID NO: 341146 - DNA, 75 bp, synthetic construct
  source 1..75: mol_type = other DNA
tctgagcacatttgaacaactgcaccagaacaaagatgaggtgtttgatcggggcgtgatcaacgtcttcatagg

SEQ ID NO: 341147 - DNA, 75 bp, synthetic construct
  source 1..75: mol_type = other DNA
tctgagcacatttgaacaactgcaccagaataaggatgaggtgtttgaccggggcgtgatcaacgtcttcatagg

SEQ ID NO: 341148 - DNA, 75 bp, synthetic construct
  source 1..75: mol_type = other DNA
gatgatcacatccgctccgttcagggcaaagcgtgctatgaagatgagatgttcagcatcagatactttaagaag

SEQ ID NO: 341149 - DNA, 75 bp, synthetic construct
  source 1..75: mol_type = other DNA
ccggtcactggaatacgataattttccggaaatcagcgaagcgaacattctgagtacttttgagcaactgcacca

SEQ ID NO: 341150 - DNA, 75 bp, synthetic construct
  source 1..75: mol_type = other DNA
aagataggaaaattaaaatgtatccgcaaaaatataaaaaccggatgattgatgacaatgaatatagtcaggtgc

SEQ ID NO: 341151 - DNA, 75 bp, synthetic construct
  source 1..75: mol_type = other DNA
aaatttggcagtaaaattatcgtcaacaatctggtgagatgggaccggtggggatttcatcttatcaccgggcaa

SEQ ID NO: 341152 - DNA, 75 bp, synthetic construct
  source 1..75: mol_type = other DNA
ggggtgatcaacgtcttcaggggactgaactggaattacaaaactaattgcccctgtaaatttggcagtaaaatt

SEQ ID NO: 341153 - DNA, 75 bp, synthetic construct
  source 1..75: mol_type = other DNA
tgcacctgttcagcggtaaaccaatccccgacaaccggggaaacatcacccttcgtctggatgatcacattcagt

SEQ ID NO: 341154 - DNA, 75 bp, synthetic construct
  source 1..75: mol_type = other DNA
accaagtggcgttattactattcctggctctgttgatgctgacaaagccacagaaataaaaaaagcatgggatgc

SEQ ID NO: 341155 - DNA, 75 bp, synthetic construct
  source 1..75: mol_type = other DNA
gcttgatatcggcgcgctgttacgaatggacagcgaacgcagaatgaaagcgctgggtgatggagttaaaaacac

SEQ ID NO: 341156 - DNA, 75 bp, synthetic construct
  source 1..75: mol_type = other DNA
gaggtccccggcagtattacggaagaaaacgcgaaaaaactgaaggggaactgggacagcggatatacgggcgaa

SEQ ID NO: 341157 - DNA, 75 bp, synthetic construct
  source 1..75: mol_type = other DNA
gaggcagtgagccatattccggttccgcgtgatggtcgtgactacgatccggaagtactgcagaaggcggtgaat

SEQ ID NO: 341158 - DNA, 75 bp, synthetic construct
  source 1..75: mol_type = other DNA
ctgctgagaatggacagcgaacggcgcatgaaaacactgggtgaatcggtgaaaaatacgctgctgacgcccaat

SEQ ID NO: 341159 - DNA, 75 bp, synthetic construct
  source 1..75: mol_type = other DNA
gccggtgcctggcagcagggcgtgaaaaccgatccggaaagtgtcctctcctttcatgcggtgttttcgtgcatt

SEQ ID NO: 341160 - DNA, 75 bp, synthetic construct
  source 1..75: mol_type = other DNA
acctccatacttttttattactacagttgatcgaatagcaaatatcagttttgcttgtatgagaaaggctttatt

SEQ ID NO: 341161 - DNA, 75 bp, synthetic construct
  source 1..75: mol_type = other DNA
ctattaatatgctttaccatgaaatatgggcgagaacatatttcttcaaaccagtaatagaagaaggaatgcaga

SEQ ID NO: 341162 - DNA, 75 bp, synthetic construct
  source 1..75: mol_type = other DNA
aacaactcttgatcgccttgctgaaacgagcattattgctatgcaacgcggaggttttgtttggcatgaaggtaa

SEQ ID NO: 341163 - DNA, 75 bp, synthetic construct
  source 1..75: mol_type = other DNA
cggaccggaactgcgggatcactgaggcggtgacggtgcctgcccgggaagtgatccatgatcggtttaactgtt

SEQ ID NO: 341164 - DNA, 75 bp, synthetic construct
  source 1..75: mol_type = other DNA
cctgacggcgcatctgacggtaataaggccataagcgaaacagagcgtgatgcggtgaaggcgatgttcaggggg

SEQ ID NO: 341165 - DNA, 75 bp, synthetic construct
  source 1..75: mol_type = other DNA
aattgggcgtcaataaattttatgttgatgaaggaaatcctcatattgttctcaatgaacagatcgatccgcagt

SEQ ID NO: 341166 - DNA, 75 bp, synthetic construct
  source 1..75: mol_type = other DNA
gaaaaatacgcttctcacgcccaatgaggcccgtaaacgtgagaacctgccgccccttgccggtggtgatgcact

SEQ ID NO: 341167 - DNA, 75 bp, synthetic construct
  source 1..75: mol_type = other DNA
tgaagaagttgataaggagcgtttaattgctgccgggtttcaggttaatttttttccgattacttctgatttaga

SEQ ID NO: 341168 - DNA, 75 bp, synthetic construct
  source 1..75: mol_type = other DNA
agatttaaacgttttctatccgaaacatcaaataggttattaaatggtcacacatcaatagggattattggtaga

SEQ ID NO: 341169 - DNA, 75 bp, synthetic construct
  source 1..75: mol_type = other DNA
gactgcctatctagttgcattattaccaatcacccgtcgtaagaaattttattatattcaggcatatgaggttag

SEQ ID NO: 341170 - DNA, 75 bp, synthetic construct
  source 1..75: mol_type = other DNA
agccgctgggactgcgcaaccgggcgatcctcgaggtgttatggagtaccgggatcaggcgtatggaggtggcta

SEQ ID NO: 341171 - DNA, 75 bp, synthetic construct
  source 1..75: mol_type = other DNA
tgcgtaaccgggcaatactggaagtgctgtggagcaccgggatcaggcgcatggaagtggcaaacctgatgctgt

SEQ ID NO: 341172 - DNA, 75 bp, synthetic construct
  source 1..75: mol_type = other DNA
tggaagccgcaggctacagcgcgcgcagcgtggaaggctaccgcgaacggctgttaccgttcatgacatggtgcg

SEQ ID NO: 341173 - DNA, 75 bp, synthetic construct
  source 1..75: mol_type = other DNA
acagatggtgaaggaggcggtaagccatattcctgttccgcgcgacggtcgtgactatgatcccgatgttctgca

SEQ ID NO: 341174 - DNA, 75 bp, synthetic construct
  source 1..75: mol_type = other DNA
aagcatgtgacgctggatgaggttcgctctgttctgcaggcgatgttggatgatgcggtgggggccattccggta

SEQ ID NO: 341175 - DNA, 75 bp, synthetic construct
  source 1..75: mol_type = other DNA
gaaaaaaccagaaatcaggacgtgatgtaagagaggtgggctggaccagcctgtttcaggcggtggctgagcctt

SEQ ID NO: 341176 - DNA, 75 bp, synthetic construct
  source 1..75: mol_type = other DNA
aaatagccgcgcaggcacaaacgtttgaagaaaaactggcttctcagtctgtggtattacagaagtgcgtgacgg

SEQ ID NO: 341177 - DNA, 75 bp, synthetic construct
  source 1..75: mol_type = other DNA
aaaaacattttccctgccggtgatgctctaccgtggtgtgttcagaatcggcgaaacttaccaccccggcgatac

SEQ ID NO: 341178 - DNA, 75 bp, synthetic construct
  source 1..75: mol_type = other DNA
gggacagatgaagagatcgctgaatccctaaaggctgcacttcctcaatggcgtaaagtgcgtggcatagaacca

SEQ ID NO: 341179 - DNA, 75 bp, synthetic construct
  source 1..75: mol_type = other DNA
cgggcagtggtcttccggtgaccgggttcaggtggtggccgcactgatggccatcggggacgagctgcgccggct

SEQ ID NO: 341180 - DNA, 75 bp, synthetic construct
  source 1..75: mol_type = other DNA
gaccgggttcaggtggtggccgcactgatggccatcggggatgagctgcgccggctgcgtctggctgtcagggaa

SEQ ID NO: 341181 - DNA, 75 bp, synthetic construct
  source 1..75: mol_type = other DNA
ctggaacgctgtgagggtaaacagctggcggtatggatgcggcgggtctgcctgggtgagccggttgcccgttcc

SEQ ID NO: 341182 - DNA, 75 bp, synthetic construct
  source 1..75: mol_type = other DNA
cactgtcacgctacatatttcacacacgaagacaataacgaccgccgccgggcttgataaggtgctttcccgtcg

SEQ ID NO: 341183 - DNA, 75 bp, synthetic construct
  source 1..75: mol_type = other DNA
cggatgataaaagtgtttctctggctatgcggcgcatccggcgcgaagcggcaactgaaaaaggcgaacgaacag

SEQ ID NO: 341184 - DNA, 75 bp, synthetic construct
  source 1..75: mol_type = other DNA
tttcttcagctgcatgatgccgatctggcttcgaccaccattgataagcactacgccatgctgaacatgctgctt

SEQ ID NO: 341185 - DNA, 75 bp, synthetic construct
  source 1..75: mol_type = other DNA
aacggcgataaccacattcacacgctcgcttacgagacgcagtattccgtggatatattgtgttgagtgggcggc

SEQ ID NO: 341186 - DNA, 75 bp, synthetic construct
  source 1..75: mol_type = other DNA
cagacagtactcaccgaaggcgataacgctttgtgaattgttaagaagtaaaccgctgttgctggtgctgagaaa

SEQ ID NO: 341187 - DNA, 75 bp, synthetic construct
  source 1..75: mol_type = other DNA
cagacgctggagcattggctaaacgtttaccatgagggaggtacacgtttgctccgacagatggaaaaagaagcc

SEQ ID NO: 341188 - DNA, 75 bp, synthetic construct
  source 1..75: mol_type = other DNA
aggtactgcaaacgctgcagaaatctataacaaagatggcaacaaagtagatctgtacggtaactgcattatttt

SEQ ID NO: 341189 - DNA, 75 bp, synthetic construct
  source 1..75: mol_type = other DNA
caggcaaagagaccattgctcacaccgcgctgggcgacgccgtttaccaggcaaaggtcgtgtcagaaatctggc

SEQ ID NO: 341190 - DNA, 75 bp, synthetic construct
  source 1..75: mol_type = other DNA
cctgaaatccgctatcacgcgaacaaccggagataaaagcatcccctggtgttactggaacgagcactgtatgcg

SEQ ID NO: 341191 - DNA, 75 bp, synthetic construct
  source 1..75: mol_type = other DNA
aaagcccgaaacacttatgcgatatttgcgccgtagcggggcatccgttggtgcaaatagtcgcctgatggattc

SEQ ID NO: 341192 - DNA, 75 bp, synthetic construct
  source 1..75: mol_type = other DNA
ggtaacccgactacctgtgaaattgataatggcggcgtcattattgcggatggtttccaggccagcaaagcgtac

SEQ ID NO: 341193 - DNA, 75 bp, synthetic construct
  source 1..75: mol_type = other DNA
gccagaacattcacggtaagtgtgcaacgtctgcgattgccaacctgcattcacaattgaaaggcctccatccca

SEQ ID NO: 341194 - DNA, 75 bp, synthetic construct
  source 1..75: mol_type = other DNA
gcaccggatgtgaaaccggcaccggacgttaaaccggctcctgatgttcagccagccccagctgataagtcaaac

SEQ ID NO: 341195 - DNA, 75 bp, synthetic construct
  source 1..75: mol_type = other DNA
ctcgatagccctgtatcggaagttttgccaaaattgttcagaaatacggtcatggtcgaaattgacctagcaaac

SEQ ID NO: 341196 - DNA, 75 bp, synthetic construct
  source 1..75: mol_type = other DNA
ccgatggttggcgtgaacgacgttcagggtgaggtgttctatctctctagatgctcgtctggtcatgcaggatgc

SEQ ID NO: 341197 - DNA, 75 bp, synthetic construct
  source 1..75: mol_type = other DNA
gcccgtggaagccgttaggtaaggctcagagctatagcaacgaagagctgaataatgcgccgcagtttaatccag

SEQ ID NO: 341198 - DNA, 75 bp, synthetic construct
  source 1..75: mol_type = other DNA
ctcctgttccgttaagccggataataatggcggtgctgtgactccggttgatccaactccggaaacaccggtgac

SEQ ID NO: 341199 - DNA, 75 bp, synthetic construct
  source 1..75: mol_type = other DNA
acagaaactgtggcggacattgtgcagccgttgccatcgtttaccgaaacgcaagcagatgagctgatttttccg

SEQ ID NO: 341200 - DNA, 75 bp, synthetic construct
  source 1..75: mol_type = other DNA
acaactgccgggcattatttcggaatcactgatccgtgcagaaaacgatccactggtagacaccggatcgctgct

SEQ ID NO: 341201 - DNA, 75 bp, synthetic construct
  source 1..75: mol_type = other DNA
ccggatctggctgcgctggctaagaatcataacgtcaaccacttcacgctggcgtttgtggtgagtaaagatgcg

SEQ ID NO: 341202 - DNA, 75 bp, synthetic construct
  source 1..75: mol_type = other DNA
cctcaaaaacaccatcatacactaaatcagtaagttggcagcatcacccgccggctaatggcggttcggctacac

SEQ ID NO: 341203 - DNA, 75 bp, synthetic construct
  source 1..75: mol_type = other DNA
atgcctggtgggtagcctcttctaactgtccgggtgatgcgaaaggcaatgatgccagcaacccatggcgttatg

SEQ ID NO: 341204 - DNA, 75 bp, synthetic construct
  source 1..75: mol_type = other DNA
gctgaaagtggaatgtatccatggagaacactttatcagccgggaaataatgcgggcaacggtgtttaattatat

SEQ ID NO: 341205 - DNA, 75 bp, synthetic construct
  source 1..75: mol_type = other DNA
ttggtacgcctttcgaacgtgttgaaaatgcactggctgcgctgcgtgaaggacgcggggtaatggtgcttgatg

SEQ ID NO: 341206 - DNA, 75 bp, synthetic construct
  source 1..75: mol_type = other DNA
ctttcattcgctgaaagtggaatgtatccatggagaacactttatcagccgggaaataatgcgggcaacggtgtt

SEQ ID NO: 341207 - DNA, 75 bp, synthetic construct
  source 1..75: mol_type = other DNA
ttccatcgattaacgaacaacggatggagatttttaaaaagggaatagatgaagcaatatccgctttacgggaaa

SEQ ID NO: 341208 - DNA, 75 bp, synthetic construct
  source 1..75: mol_type = other DNA
aaacatattcgaaaaacgcagcggccccagtcgagttgtcgcgctacgtagagtttgtagaccaccaaatagcca

SEQ ID NO: 341209 - DNA, 75 bp, synthetic construct
  source 1..75: mol_type = other DNA
gtgcggatagctatccccagctacatgcgccacctgttccaagggaagcgctactttatgaaaagcacagggaca

SEQ ID NO: 341210 - DNA, 75 bp, synthetic construct
  source 1..75: mol_type = other DNA
attgctcgagctactcgaagaagaagagaactaccggaacacacacctgctatatgaatttacgccatacagcaa

SEQ ID NO: 341211 - DNA, 75 bp, synthetic construct
  source 1..75: mol_type = other DNA
tggagtgtattttaaaccgctataaacccgcctggcagacgtttttgtatcagtacgaaaacagtcatgaggaga

SEQ ID NO: 341212 - DNA, 75 bp, synthetic construct
  source 1..75: mol_type = other DNA
gggaagatcgtcaagcttaacgatgacgttctctccgccgttcgctatgcatacatgatgcgccgcttcgccaaa

SEQ ID NO: 341213 - DNA, 75 bp, synthetic construct
  source 1..75: mol_type = other DNA
tggaatgtattctgaaccgttataagcctgcatggcagacgtttatttacgtttatgcaaacagccatgaagagg

SEQ ID NO: 341214 - DNA, 75 bp, synthetic construct
  source 1..75: mol_type = other DNA
gcctgggcctcagccattcgacagcgcgtgtatcctggacgggtaaacagctgcttgccgagcgtttccctgaca

SEQ ID NO: 341215 - DNA, 75 bp, synthetic construct
  source 1..75: mol_type = other DNA
accgaaagaagacatcattagctggaagaagtctcctttctttccgaaccttgttgatcaccttctggttaagca

SEQ ID NO: 341216 - DNA, 75 bp, synthetic construct
  source 1..75: mol_type = other DNA
ctagatgaacgctattttctgacagtagaacaaggctggatcgtaccaccacacactttggttaatgcgtggttt

SEQ ID NO: 341217 - DNA, 75 bp, synthetic construct
  source 1..75: mol_type = other DNA
cggtgatgggggcgattgtcgcggggctggcattgttgctggtatttatgtcagccagaaaacaacctgaagcag

SEQ ID NO: 341218 - DNA, 75 bp, synthetic construct
  source 1..75: mol_type = other DNA
gggtactgggaagactagggttataactggtttggtggttgttgatacaattgttaaaaatgaggaggaaccatg

SEQ ID NO: 341219 - DNA, 75 bp, synthetic construct
  source 1..75: mol_type = other DNA
tgtctggcccggtggcccagtacggtgatcaggagtttactggcgcagagcaggcagttgctgatatcaacgcca

SEQ ID NO: 341220 - DNA, 75 bp, synthetic construct
  source 1..75: mol_type = other DNA
aatttattgaacaactgaaaggtgtttcggttgaggatgatgttgaattcaatttttttgaattgggtggttccg

SEQ ID NO: 341221 - DNA, 75 bp, synthetic construct
  source 1..75: mol_type = other DNA
tcttaaaaaattgagtgaggttagtatggataaggtatctgataaaaatgtggattttgtcactgaaaatttcac

SEQ ID NO: 341222 - DNA, 75 bp, synthetic construct
  source 1..75: mol_type = other DNA
aatttttttgaattgggcggttccggatatctcgaaaatccaacaacggatttgatggctttgtttatgggagca

SEQ ID NO: 341223 - DNA, 75 bp, synthetic construct
  source 1..75: mol_type = other DNA
acctacgccgcgctgcaatctttgcaggcggggctgaatcagtctgacgatccggcggagatcgcgaaatacctg

SEQ ID NO: 341224 - DNA, 75 bp, synthetic construct
  source 1..75: mol_type = other DNA
atgagttttaaaccaacacctgaagaggtgaaacaagcacgtatcaaagctggctttacgcagcaggaagccgct

SEQ ID NO: 341225 - DNA, 75 bp, synthetic construct
  source 1..75: mol_type = other DNA
taaaacgtctcgtggtttagccgctggtacgtatgaattacttttgctcctggctgatgaacatccagattacca

SEQ ID NO: 341226 - DNA, 75 bp, synthetic construct
  source 1..75: mol_type = other DNA
tgacgatccggctgaaatcgccaaatacctgaaagcgaactcggttgataccgtgatggggccgctgacctggga

SEQ ID NO: 341227 - DNA, 75 bp, synthetic construct
  source 1..75: mol_type = other DNA
aactcagtttatggggccggaaggtgtggctaacgtttcgctgtctaacattgcgggcgaatcagcggaagggct

SEQ ID NO: 341228 - DNA, 75 bp, synthetic construct
  source 1..75: mol_type = other DNA
tttaatgatcaccccagcggcaaccgcgccggagctgaccgcccgtggctatcagctgatcctgcgcaccaccgg

SEQ ID NO: 341229 - DNA, 75 bp, synthetic construct
  source 1..75: mol_type = other DNA
gatggtcgcttcaaagtattcaacacctgtgagccattctttgaggagtttcgcctctatcaccgtgatgaaaac

SEQ ID NO: 341230 - DNA, 75 bp, synthetic construct
  source 1..75: mol_type = other DNA
ctataactcaacgtcatctcccggcgttatgtgctgcggccacgtccattgctggaccgcagatccgtaacgtcg

SEQ ID NO: 341231 - DNA, 75 bp, synthetic construct
  source 1..75: mol_type = other DNA
gcagggcgttgcggaacaaaccacgcagccggttgttacttcctgtgccaatgtcgtggttgttcccccatcgca

SEQ ID NO: 341232 - DNA, 75 bp, synthetic construct
  source 1..75: mol_type = other DNA
ccctctgcctttagcggtaagggagaacccgtaaacacccctcaaattatggcggagttaaacagtcatgagtga

SEQ ID NO: 341233 - DNA, 75 bp, synthetic construct
  source 1..75: mol_type = other DNA
cgttcgcgcagcgattgccgatggcgcaaaaccgtcagatctgaatcgtccgggccacgttttcccacttcgcgc

SEQ ID NO: 341234 - DNA, 75 bp, synthetic construct
  source 1..75: mol_type = other DNA
gttatgtgctgcggcctcgtccattgctggaccgcagatccgtaacgtcgctacctacggtggaaatatttgcaa

SEQ ID NO: 341235 - DNA, 75 bp, synthetic construct
  source 1..75: mol_type = other DNA
tttcacaccggaccgggcaaagtgtctcttgagcatgacgaaatccttgtcgcctttcattttccgccccagccg

SEQ ID NO: 341236 - DNA, 75 bp, synthetic construct
  source 1..75: mol_type = other DNA
ggttgaacctctggtggcggatgacggcgaggtgttctaccgcatcacgccggaccggaactgcgggatcactga

SEQ ID NO: 341237 - DNA, 75 bp, synthetic construct
  source 1..75: mol_type = other DNA
acgcagatcggcggggaaaccatccgtgaaaaggcgcggatacagaaaccgggcgcctgccacatcttccgccac

SEQ ID NO: 341238 - DNA, 75 bp, synthetic construct
  source 1..75: mol_type = other DNA
ctgttaccgttcatgacatggtgcgaagaacgcggcctgctgtatgcgccacagataagcctggcggtgctggaa

SEQ ID NO: 341239 - DNA, 75 bp, synthetic construct
  source 1..75: mol_type = other DNA
gagcacggagtttgacgtcaccacgctgctgagaatggacagcgaacggcgcatgaaaacactgggtgaatcggt

SEQ ID NO: 341240 - DNA, 75 bp, synthetic construct
  source 1..75: mol_type = other DNA
aagtatcaccccggatgatgtgcatccgatgcttgaacagatggtgaaggaggcggtaagccatattcctgttcc

SEQ ID NO: 341241 - DNA, 75 bp, synthetic construct
  source 1..75: mol_type = other DNA
cgcgagatggtcgtgactatgatcccgatgtactgcagaaggcggtgaatgatgcggtcgcaaatattcctgtac

SEQ ID NO: 341242 - DNA, 75 bp, synthetic construct
  source 1..75: mol_type = other DNA
tttctgccgctgaccgtattacgaccgttcgcgcagcgattgccgatggcgcaaaaccttcagatctgaatcgcc

SEQ ID NO: 341243 - DNA, 75 bp, synthetic construct
  source 1..75: mol_type = other DNA
gggtagcccggatctgaaaccagaaaccagcgaaagttgggagctggggctttactatatgggtgaagatggttg

SEQ ID NO: 341244 - DNA, 75 bp, synthetic construct
  source 1..75: mol_type = other DNA
ccgatgcgctcggcggtgtagtgaatatcatcaccaaaaaaatcggtcagaaatggtcgggtaccgttaccgtcg

SEQ ID NO: 341245 - DNA, 75 bp, synthetic construct
  source 1..75: mol_type = other DNA
catgatacttttcatcatgcctacgctgtcaacgtatctcatcccggccttaaaccctggcgttccatcggaaat

SEQ ID NO: 341246 - DNA, 75 bp, synthetic construct
  source 1..75: mol_type = other DNA
tctgcgccagcttcgatgaaacgctggcgatgttgcacgcgggggatgttgtgtattgcgatccgccttatgacg

SEQ ID NO: 341247 - DNA, 75 bp, synthetic construct
  source 1..75: mol_type = other DNA
atgatgatggcgaaacgatggttgtcactgcatcttccgttgaaaaaaaccttaaaagatccccccgccagtatc

SEQ ID NO: 341248 - DNA, 75 bp, synthetic construct
  source 1..75: mol_type = other DNA
atggaaactgtcactcaactacacctataacgatggtcgtgatgtcagcaatggcgaaaacaaaccactttccga

SEQ ID NO: 341249 - DNA, 75 bp, synthetic construct
  source 1..75: mol_type = other DNA
tggtcgatttggtcaatgaaggtgtcgatctcgatattcgcattggcgatgatatcgcccctaatttaatcgccc

SEQ ID NO: 341250 - DNA, 75 bp, synthetic construct
  source 1..75: mol_type = other DNA
aaatgctcggcttaagtcaggcatagccggtctgatacacctcggtattcgatatgcagatgttgaggtcatgaa

SEQ ID NO: 341251 - DNA, 75 bp, synthetic construct
  source 1..75: mol_type = other DNA
acgcgatcagcggcccgctcattgccatgatacttttcatcatgcctacgttgtctgatcctacccacgtaatat

SEQ ID NO: 341252 - DNA, 75 bp, synthetic construct
  source 1..75: mol_type = other DNA
acatattggccacataaggccttgtgtcaattcatcctttcctcgaaaacttcggcaggagaagggatcacaggc

SEQ ID NO: 341253 - DNA, 75 bp, synthetic construct
  source 1..75: mol_type = other DNA
gctatggataaatgcaaaaaaattatgaaagtcgcttatctcatcatctgcataagtgtactgttctttgtcttt

SEQ ID NO: 341254 - DNA, 75 bp, synthetic construct
  source 1..75: mol_type = other DNA
tctcaacggacaggcttgccctgccccaagaaatccctgcaacagatcattgataaatgtttgaaggataaaccc

SEQ ID NO: 341255 - DNA, 75 bp, synthetic construct
  source 1..75: mol_type = other DNA
ttcctgttcctgttcctgttcctgttcctgttcctgttcctgttcctgttcctgttcctgttcctgttcctgcaa

SEQ ID NO: 341256 - DNA, 75 bp, synthetic construct
  source 1..75: mol_type = other DNA
atgaatcaaaatacacaatttcaatcactatcagatcgcgtaatccgtgaggatgaatgccgtaagttaacagga

SEQ ID NO: 341257 - DNA, 75 bp, synthetic construct
  source 1..75: mol_type = other DNA
gcttcccttcccgtatcagtctcggcggtcgttctgttggctgggttaagtctgaggttgtggcgtgggtcaaaa

SEQ ID NO: 341258 - DNA, 75 bp, synthetic construct
  source 1..75: mol_type = other DNA
ccagctgatgagcgacacctgtcctgaaatcaccctggacaatgtactgtgggatgcaaataaaatttcatccta

SEQ ID NO: 341259 - DNA, 75 bp, synthetic construct
  source 1..75: mol_type = other DNA
gaagcagaagtatcctggaaggccaatattgcttctaccggcaagatgaatggcttttcattctcttactgcgat

SEQ ID NO: 341260 - DNA, 75 bp, synthetic construct
  source 1..75: mol_type = other DNA
cttgggtaggaatgaaaatctcatcagtacccggattattagtgaacttgaaatcgctcataacctgatagttac

SEQ ID NO: 341261 - DNA, 75 bp, synthetic construct
  source 1..75: mol_type = other DNA
tcactgggattacccaacccggtcacgctacgccaggtcattattccccaggcattgcgggtgattattccaccg

SEQ ID NO: 341262 - DNA, 75 bp, synthetic construct
  source 1..75: mol_type = other DNA
ctatgggaagagcattcttcacaaaacccatatgaccttctcaaatatctccgcaatgaaacctttaaacaaggc

SEQ ID NO: 341263 - DNA, 75 bp, synthetic construct
  source 1..75: mol_type = other DNA
acctcatcagcacacagatcatcagtaaactcgaagtcgcttatggcctgacagtgaccaaaacggcatctcccc

SEQ ID NO: 341264 - DNA, 75 bp, synthetic construct
  source 1..75: mol_type = other DNA
ggggtaagagcttcgctggtgtcgttcaatatgcattgaaaccgggagcacatcataaaagtgatcccatcatca

SEQ ID NO: 341265 - DNA, 75 bp, synthetic construct
  source 1..75: mol_type = other DNA
agggttaaagatatctcacgtactgacggtgggagaatgttaatccatattggcagaacgaaaacgctggttagc

SEQ ID NO: 341266 - DNA, 75 bp, synthetic construct
  source 1..75: mol_type = other DNA
ttctcagcagcaaccacctgcataacatcaccgaagtggcgattcaccgcctggaacagcaacttggcaagcctt

SEQ ID NO: 341267 - DNA, 75 bp, synthetic construct
  source 1..75: mol_type = other DNA
tacccgttataaccacagcacccattacgcaatggcggtctggcagttaggacaagccgtggcgctggcgcgcgt

SEQ ID NO: 341268 - DNA, 75 bp, synthetic construct
  source 1..75: mol_type = other DNA
atggcttcaaaaccaagtacagcatttcacaacttgcagcggcagggctgacgccacagcagccactgggcaatc

SEQ ID NO: 341269 - DNA, 75 bp, synthetic construct
  source 1..75: mol_type = other DNA
gatgctgggcattattggcatcttcactttccttgcgctgggttggcagtttagccagaaacgcgccgcgcgtcg

SEQ ID NO: 341270 - DNA, 75 bp, synthetic construct
  source 1..75: mol_type = other DNA
tttcactggttgaagagactcggccattactgcctggtgtgcgtgaggccgttgcgctgtgcaaagaacacggtt

SEQ ID NO: 341271 - DNA, 75 bp, synthetic construct
  source 1..75: mol_type = other DNA
aacgccgaaagcagaagggcgctgcgccagcacaaccgcgaacagataaaacagcatccagaatggtttcctgcg

SEQ ID NO: 341272 - DNA, 75 bp, synthetic construct
  source 1..75: mol_type = other DNA
agagcaacagtaatttcactcctcaaaggccgctacgctgattttggacctacgcttgcgtgcgaaaaattgcgc

SEQ ID NO: 341273 - DNA, 75 bp, synthetic construct
  source 1..75: mol_type = other DNA
ccgagcgggtgaagaaaaacagtaccgcacacgccggatgcaaactgttcctgacgaaaccgctggggattggcg

SEQ ID NO: 341274 - DNA, 75 bp, synthetic construct
  source 1..75: mol_type = other DNA
cgattaacaaactttccccggaaattgcccgcgaagtgaccgaaggtggacgctatgcatgccgtcaggcgggta

SEQ ID NO: 341275 - DNA, 75 bp, synthetic construct
  source 1..75: mol_type = other DNA
ttaatcgtcatgaatatgataactatcccagtggtgattacagtaacaacactattttgctatttatttaaaatc

SEQ ID NO: 341276 - DNA, 75 bp, synthetic construct
  source 1..75: mol_type = other DNA
gtggaaggcaatgccgaaagcagaagggcgctacgccagcacaaccgggagcagataaaacagcatccagaatgg

SEQ ID NO: 341277 - DNA, 75 bp, synthetic construct
  source 1..75: mol_type = other DNA
acgggggaaaccattcgggtaagccggttagccgaacctttctggcaggaccattttttgggcgcgcggcggata

SEQ ID NO: 341278 - DNA, 75 bp, synthetic construct
  source 1..75: mol_type = other DNA
ctacagccatcgtgaaggccatatgaccagtcagctggagagcggggcgatgaaaacgctgacgagctccgggca

SEQ ID NO: 341279 - DNA, 75 bp, synthetic construct
  source 1..75: mol_type = other DNA
gtttaactggcgcatattccccgcactcgttgcgctacgcatgggcacaggatgccattcgtcattatctggcgc

SEQ ID NO: 341280 - DNA, 75 bp, synthetic construct
  source 1..75: mol_type = other DNA
gtgtttggcactaaaggtggacggccccgagagacgattattctggatgctggcgtagttaaaaaagcgctggat

SEQ ID NO: 341281 - DNA, 75 bp, synthetic construct
  source 1..75: mol_type = other DNA
cggcaatacccggctgaccgtggtactcggcactaaaggcgggcggccccacgacacccttattcaggatactgg

SEQ ID NO: 341282 - DNA, 75 bp, synthetic construct
  source 1..75: mol_type = other DNA
atgggtatgctggaaagagagatgaaaaacctggcgcggcaggctggcgggtcgcacaagactgtccatgaccgt

SEQ ID NO: 341283 - DNA, 75 bp, synthetic construct
  source 1..75: mol_type = other DNA
gatacgttatgtccaccatttaaaggccaggcatattgaggcgtatattcagatgcggctggcgcagggtattaa

SEQ ID NO: 341284 - DNA, 75 bp, synthetic construct
  source 1..75: mol_type = other DNA
gacggccccgtgatactcttattcaggatgctggcgcagttaaacaggcgctggataatgccatcgcggtgacag

SEQ ID NO: 341285 - DNA, 75 bp, synthetic construct
  source 1..75: mol_type = other DNA
gcatgagcggctgacgaataaatcgctgggtttatctggtgcatcgcgcagtggtacgcggcgggcaattacgcc

SEQ ID NO: 341286 - DNA, 75 bp, synthetic construct
  source 1..75: mol_type = other DNA
ccacattggcacagcaggtgggcggcagccacaagaccgtccacgaccgcatggcgatcgcgaagcgattctgtc

SEQ ID NO: 341287 - DNA, 75 bp, synthetic construct
  source 1..75: mol_type = other DNA
ggcgtatgcaatatgaatggtaaggtacagcaaatagctgctggagaaaaccagatgcgtcgctgggtctggaat

SEQ ID NO: 341288 - DNA, 75 bp, synthetic construct
  source 1..75: mol_type = other DNA
cgcaaccagactttgcgtatggggctgacgggcaaatactccccacattcgctgcgttacgcctgggcgcaggac

SEQ ID NO: 341289 - DNA, 75 bp, synthetic construct
  source 1..75: mol_type = other DNA
aaaacctggcgcgacaggctggcgggtcgcacaagactgtccatgaccgtatcaccacggcaggacgtttctgcg

SEQ ID NO: 341290 - DNA, 75 bp, synthetic construct
  source 1..75: mol_type = other DNA
ttcggcaccaaaggcggacgtctccgcgaaacggtagttctggattctggtgcagtcaaaaaagcgctggataat

SEQ ID NO: 341291 - DNA, 75 bp, synthetic construct
  source 1..75: mol_type = other DNA
tggcggcggcactggaactggcgcggctgatggggttgcgctctcaggaggcggtacgctgttccggttcgctga

SEQ ID NO: 341292 - DNA, 75 bp, synthetic construct
  source 1..75: mol_type = other DNA
agaatatggccacgcagaacggtgtgaaagcagagggtgcggtggctacggatgttcaggagcaacgaagtcatg

SEQ ID NO: 341293 - DNA, 75 bp, synthetic construct
  source 1..75: mol_type = other DNA
ctcgcagatgagccagtggagccagcagcggggtaacagcgacaccactgtggcaggtagcgacacctcaagcag

SEQ ID NO: 341294 - DNA, 75 bp, synthetic construct
  source 1..75: mol_type = other DNA
gattcagcgaaaaggaatccctggcgctgacggcgacggatctgggtcatggcgacgggcgcggtcgctgggtga

SEQ ID NO: 341295 - DNA, 75 bp, synthetic construct
  source 1..75: mol_type = other DNA
gtggaggccttcaggtttcacttgatacagaccgccacatactcggtaaaattggtgggctggcaacaggactta

SEQ ID NO: 341296 - DNA, 75 bp, synthetic construct
  source 1..75: mol_type = other DNA
ggagaatcttccggtaaggaatacagagacttgcagaatgaacatgaccagggtaagaaagcattcgatgacgct

SEQ ID NO: 341297 - DNA, 75 bp, synthetic construct
  source 1..75: mol_type = other DNA
tacagtattggcgacctgatgaatgcggcagacccgtactcgctgatattcagtaaacccagcccactgcgtggc

SEQ ID NO: 341298 - DNA, 75 bp, synthetic construct
  source 1..75: mol_type = other DNA
gcggatacgacattcagcgttggaaacctgatccagcattaatgttccatgctgcgaaagcaatgaatgtgaatg

SEQ ID NO: 341299 - DNA, 75 bp, synthetic construct
  source 1..75: mol_type = other DNA
gccgatcgttcatccgaaagtcaccacctttaccgagctggggcagctgcctgcgctctggaaggcacgcagctg

SEQ ID NO: 341300 - DNA, 75 bp, synthetic construct
  source 1..75: mol_type = other DNA
ccaggccgatgccgagcacgtttaccgcgcagaagtagcacgtctgtttgataccgaacttgaggacatcgcagg

SEQ ID NO: 341301 - DNA, 75 bp, synthetic construct
  source 1..75: mol_type = other DNA
gctaacggcaacggatttgggccacggtgacgggcgcgggcgctgggtgaagcaggtgtacgcgcagggctggac

SEQ ID NO: 341302 - DNA, 75 bp, synthetic construct
  source 1..75: mol_type = other DNA
ttcgcttggtaagctcaacatgctgcactacttcccggaaaaactgttctgttcagcggctatgatatccagcgt

SEQ ID NO: 341303 - DNA, 75 bp, synthetic construct
  source 1..75: mol_type = other DNA
ttcgctgggtaagctcaatatgctgcactacttcccggaaaaactgttcagcggctacgatattcagcgttggaa

SEQ ID NO: 341304 - DNA, 75 bp, synthetic construct
  source 1..75: mol_type = other DNA
gccacactgcgtgaggccacccgcaagaacggtaagcgtctctattccatcgcagatgcagtggaaaccctgcgg

SEQ ID NO: 341305 - DNA, 75 bp, synthetic construct
  source 1..75: mol_type = other DNA
tgcacccggaacaactggatgcgcctgcaccgcataccgaagtggccagtctgcaccccaatcatgtctggcaga

SEQ ID NO: 341306 - DNA, 75 bp, synthetic construct
  source 1..75: mol_type = other DNA
gatgcagctgctgcacgcaaaacgaaggcgctaccgttcggcgggcgacttgacccgtacaaacatatcgatgac

SEQ ID NO: 341307 - DNA, 75 bp, synthetic construct
  source 1..75: mol_type = other DNA
gccctgccggagaccccggcgcagacggcggcaaaagaaatcgaagagctggttacgggcaccgataacgccacc

SEQ ID NO: 341308 - DNA, 75 bp, synthetic construct
  source 1..75: mol_type = other DNA
gagccgggtctcaaattccagccggttcatagcctggacgaactgaacgcactggcggtgaaatggcgcagccac

SEQ ID NO: 341309 - DNA, 75 bp, synthetic construct
  source 1..75: mol_type = other DNA
tttcccgttgtccgaagatgccatcagtcgtgccttgcgtaactatggcctgcacccagaacaactggatgcccc

SEQ ID NO: 341310 - DNA, 75 bp, synthetic construct
  source 1..75: mol_type = other DNA
tgcaccgcataccgaagtggccagtctgcatcccaatcatgtctggcagattgacgcctcactctgcacgcttta

SEQ ID NO: 341311 - DNA, 75 bp, synthetic construct
  source 1..75: mol_type = other DNA
atgaatcaaccaatacacaatgcttactggttatcccgttttgacagcctgctcgacagtgccctggcgcagcac

SEQ ID NO: 341312 - DNA, 75 bp, synthetic construct
  source 1..75: mol_type = other DNA
tacttcgtggtctttccgctggcatttggcttcctcgccaatactgcgccggaaggggtacaggtatccaccgac

SEQ ID NO: 341313 - DNA, 75 bp, synthetic construct
  source 1..75: mol_type = other DNA
gatacatgctggtactgaagcagcaactgaaagaggcccgtattccacaggcggtggtggcgagagctgtcgatg

SEQ ID NO: 341314 - DNA, 75 bp, synthetic construct
  source 1..75: mol_type = other DNA
taccgccagttaacggcacagtaaccggacggcgtaccggaagcagcactggatgaagtcatggccacgctgacc

SEQ ID NO: 341315 - DNA, 75 bp, synthetic construct
  source 1..75: mol_type = other DNA
tgacgcggggcatggtaaacgtggtgcaatatacgacgccgcctgcacagaactgggtatatcccgtgccacact

SEQ ID NO: 341316 - DNA, 75 bp, synthetic construct
  source 1..75: mol_type = other DNA
cggatggcgtacctgaagccgcgctggatgaggtgatggttaccctgaccactccggcccgcaacagcgttatca

SEQ ID NO: 341317 - DNA, 75 bp, synthetic construct
  source 1..75: mol_type = other DNA
tcctgcaatatggtcgtggtgcggttacgccgacattatcgacgcaaacaatgagaattacattcagcatccctt

SEQ ID NO: 341318 - DNA, 75 bp, synthetic construct
  source 1..75: mol_type = other DNA
ggctctcgaaaaccttggtttgggagaagcggcgaaacggggggttggaacaggggaaaatcagataccggacat

SEQ ID NO: 341319 - DNA, 75 bp, synthetic construct
  source 1..75: mol_type = other DNA
atgcggcctgaacggcgttatggcgaatggtatcgcgtagggggcctgccgggaattctctcgattcaaccgagc

SEQ ID NO: 341320 - DNA, 75 bp, synthetic construct
  source 1..75: mol_type = other DNA
accactacatatgctggaaaaagtgttgaccatgtttgacttacgcgacagtttcgatgccctcgcctcggctga

SEQ ID NO: 341321 - DNA, 75 bp, synthetic construct
  source 1..75: mol_type = other DNA
acttatcgactcagaacctttatgggatcgagccgaactggatgtgatggcaagcctgggggtggatatctcccg

SEQ ID NO: 341322 - DNA, 75 bp, synthetic construct
  source 1..75: mol_type = other DNA
ggctctcgaaaaccttggtttaggagaagcttctcaaaggaatgtcggtccaggattctggccgatccctgatat

SEQ ID NO: 341323 - DNA, 75 bp, synthetic construct
  source 1..75: mol_type = other DNA
atgagtattggatcagaaatgaataacgatgttggagaaaaagtatctgatctcacaaaaagtaaaaaatgtgac

SEQ ID NO: 341324 - DNA, 75 bp, synthetic construct
  source 1..75: mol_type = other DNA
gcaggctcccgttacctggatgccgtttattccggaacatcatccggtggggagagggtgatatctgtgcctgtg

SEQ ID NO: 341325 - DNA, 75 bp, synthetic construct
  source 1..75: mol_type = other DNA
ccatgcaggagcgcggcggcgcggacgtgctgcacggcgtgccgaaaatactctaccttgatcccggttcggcga

SEQ ID NO: 341326 - DNA, 75 bp, synthetic construct
  source 1..75: mol_type = other DNA
gtttgatttttgctgtcaacgttaatctggatggcgagaccaaacgtggagtcatcatgactgaccgtgttgctc

SEQ ID NO: 341327 - DNA, 75 bp, synthetic construct
  source 1..75: mol_type = other DNA
ccttgcccaggaggaactggaagggggtaaaaattccaatggtcaggacgatgatgacgaagaccctttgcgtga

SEQ ID NO: 341328 - DNA, 75 bp, synthetic construct
  source 1..75: mol_type = other DNA
acgagaaaagacaagaagtttctgctcttaaaaaaaacaagcgtgattccattaatttggctgcggatccgtcag

SEQ ID NO: 341329 - DNA, 75 bp, synthetic construct
  source 1..75: mol_type = other DNA
gcggtgatcgtgatatttctgtgcctggtctatttcgccaatgatatctatcacctggtatccgcgccgttgatc

SEQ ID NO: 341330 - DNA, 75 bp, synthetic construct
  source 1..75: mol_type = other DNA
tagttcttatgagtatcaaattcctactaatggtgctaaaaaagtagaatggaaaataataacagattatggggg

SEQ ID NO: 341331 - DNA, 75 bp, synthetic construct
  source 1..75: mol_type = other DNA
caaggcttcgactgtagcgggttagttttttatgcctacaacaagatccttgaggcgaagctcccacgcacggcc

SEQ ID NO: 341332 - DNA, 75 bp, synthetic construct
  source 1..75: mol_type = other DNA
gccagcacaaccgggagcagataaaacagcatccagaatggtttcctgcgccgctcaaggcgagtgacagacgct

SEQ ID NO: 341333 - DNA, 75 bp, synthetic construct
  source 1..75: mol_type = other DNA
gaatgataaaccgttagataaaaagaaacccggagaaacgctgccctgttcgttaggaacatactatttgcaaaa

SEQ ID NO: 341334 - DNA, 75 bp, synthetic construct
  source 1..75: mol_type = other DNA
cccgacaccattttatattaatatttcagagctgagcgttggtgggaaagaggttaaggagcatcgttatatttc

SEQ ID NO: 341335 - DNA, 75 bp, synthetic construct
  source 1..75: mol_type = other DNA
tgggaaaaatatgttgatggcccggagcctataccactggatgatgaaaaaagtgtccatgaacgtgtggataat

SEQ ID NO: 341336 - DNA, 75 bp, synthetic construct
  source 1..75: mol_type = other DNA
gcaatgataaaaactcaaactgtattgtcgattacaagcttcctgcagtctctcctggaaccttgctgaaccagc

SEQ ID NO: 341337 - DNA, 75 bp, synthetic construct
  source 1..75: mol_type = other DNA
gcgcgttgggataaaactgctcatgacgctaacccacaataataagccgctgccgtttggggcgatggtgacatc

SEQ ID NO: 341338 - DNA, 75 bp, synthetic construct
  source 1..75: mol_type = other DNA
ctatccggtgctacctctggacggaacgcagatatcgtttccgtatgccggtgagtggctgacggaggctgaaat

SEQ ID NO: 341339 - DNA, 75 bp, synthetic construct
  source 1..75: mol_type = other DNA
accggggaaaccattcgggtaagtcggttagctgaacctttctggcaggatcattttttaggcgcgcgccggatt

SEQ ID NO: 341340 - DNA, 75 bp, synthetic construct
  source 1..75: mol_type = other DNA
accatttgcgacagaatatagagaaaatcgtgtcgctcttaacgcgaattcccttgcagataatgttgaactgga

SEQ ID NO: 341341 - DNA, 75 bp, synthetic construct
  source 1..75: mol_type = other DNA
aacagaatggatacgatgtttatcagactactgtcccacccggcccttttactattgatgatatcaactctgcgg

SEQ ID NO: 341342 - DNA, 75 bp, synthetic construct
  source 1..75: mol_type = other DNA
taatttctgtatttatcataaaataaaacaaattatctgtgtaggggcttccatgggaggatatggtgctttaat

SEQ ID NO: 341343 - DNA, 75 bp, synthetic construct
  source 1..75: mol_type = other DNA
cctctgtgccgtggtttacactttcttcgccacgccgatttatagtgccgacgcactggtacaaatcgagcaaaa

SEQ ID NO: 341344 - DNA, 75 bp, synthetic construct
  source 1..75: mol_type = other DNA
aatccaaccgatctggcgattgaagccgtccgcagtctgcgtaccagcctgcacttcgcgatgatgcaggcacaa

SEQ ID NO: 341345 - DNA, 75 bp, synthetic construct
  source 1..75: mol_type = other DNA
cgattaaaggtattaaacgctacaaacagagccagttgttggcggtggggaatccaaccgatctggcgattgaag

SEQ ID NO: 341346 - DNA, 75 bp, synthetic construct
  source 1..75: mol_type = other DNA
ctgcgaacgtatgccggagaacgcattccggcttatctcagcgcgaagaaaatgagcctgcaccagaacagtttc

SEQ ID NO: 341347 - DNA, 75 bp, synthetic construct
  source 1..75: mol_type = other DNA
tggggctgggcaacttgctgtgggctgatgaaggtttcggcgtgcgggtggctgaacggttgtatgcccattacc

SEQ ID NO: 341348 - DNA, 75 bp, synthetic construct
  source 1..75: mol_type = other DNA
cgcaggaatcctgtcggcttctgcaattacatcaaatcagttccgcggtttttcaagcatagcgactgctgcaaa

SEQ ID NO: 341349 - DNA, 75 bp, synthetic construct
  source 1..75: mol_type = other DNA
cttccgtcaggataaagattctgttgatctgccgctggaagcgaaagcggtgctcgattcgatggtgaacattga

SEQ ID NO: 341350 - DNA, 75 bp, synthetic construct
  source 1..75: mol_type = other DNA
atgtattcacctttaattgctcattattcagcgcttcagacgcagtctgctctgctggctcatatcagtcagatg

SEQ ID NO: 341351 - DNA, 75 bp, synthetic construct
  source 1..75: mol_type = other DNA
gagtttgatattgtagatacttattgtgctttatcgatgcgacatgatcgaaatttttcatttttttcatgcact

SEQ ID NO: 341352 - DNA, 75 bp, synthetic construct
  source 1..75: mol_type = other DNA
acaaaaactacactttgagcagtgatggcggctttagcgcccgtgggcaagcgggccagatgctgaaaaaagaag

SEQ ID NO: 341353 - DNA, 75 bp, synthetic construct
  source 1..75: mol_type = other DNA
ctggaagacgaaaaagccaaactgaacggtcgcgtaacggcgatgccgaaaacccagcaggaaattgtgcgtctg

SEQ ID NO: 341354 - DNA, 75 bp, synthetic construct
  source 1..75: mol_type = other DNA
gtggaaaccagtctgagccgctttgagcaaaacggtattccggtgaaaggggtgattctgaactccatcttccgc

SEQ ID NO: 341355 - DNA, 75 bp, synthetic construct
  source 1..75: mol_type = other DNA
atgacagaaagtattggaggtaaaactgctctggactgggccacgaaacaggattttcgctgtggctgctggcta

SEQ ID NO: 341356 - DNA, 75 bp, synthetic construct
  source 1..75: mol_type = other DNA
ggctccgcacacatcacgttcagaaaaccggaactggttgatcggctaaatgacatcattgcgaagcattatccg

SEQ ID NO: 341357 - DNA, 75 bp, synthetic construct
  source 1..75: mol_type = other DNA
gaattttcgctgcggctgctggctgatggagaaacctgaaacggcaatgaaagccatcacccgcaaccttgaccg

SEQ ID NO: 341358 - DNA, 75 bp, synthetic construct
  source 1..75: mol_type = other DNA
aaaaataagaaaccaggtgaataacctcttccagaaacatcccagaataacggcaatacgggtggatctccatta

SEQ ID NO: 341359 - DNA, 75 bp, synthetic construct
  source 1..75: mol_type = other DNA
ggctgtttgacctgggcaaatcggcgcaccagccagagcttccgtggatgatgctgggaattattggcatcttca

SEQ ID NO: 341360 - DNA, 75 bp, synthetic construct
  source 1..75: mol_type = other DNA
cagaccactggaatatgataattttccggaaatcagcgaagcgaacattctgagcacatttaaacaactgcacca

SEQ ID NO: 341361 - DNA, 75 bp, synthetic construct
  source 1..75: mol_type = other DNA
catgccgcttatctcgtgcgtaatctggatcttcccggttttacgcctgcgcagaaaaagctgctggcaacgcta

SEQ ID NO: 341362 - DNA, 75 bp, synthetic construct
  source 1..75: mol_type = other DNA
catgccgcttatttggtacgtaatctggatcttccagggtttactcccgcacagaaaaaactgctagcgacacta

SEQ ID NO: 341363 - DNA, 75 bp, synthetic construct
  source 1..75: mol_type = other DNA
gccctgtctaatgaagcaatggagcgcggttggcaatgtctgcgcctgtttgctgaacgtctgcaagatatccct

SEQ ID NO: 341364 - DNA, 75 bp, synthetic construct
  source 1..75: mol_type = other DNA
atgcacaggcccgtgatacatggtaccgatcactggaatatgataattttccggaaatcagtaaagcgaacattc

SEQ ID NO: 341365 - DNA, 75 bp, synthetic construct
  source 1..75: mol_type = other DNA
gggatggatgaacgcattaccctggaaaagttgcagcaactgaaacagcgcgccattcattgcggtcggctggag

SEQ ID NO: 341366 - DNA, 75 bp, synthetic construct
  source 1..75: mol_type = other DNA
catctggcggttgagcaggatattcgcagtcgtacactgcgtaatattcagcgccgctttatgattgatattgat

SEQ ID NO: 341367 - DNA, 75 bp, synthetic construct
  source 1..75: mol_type = other DNA
ttgaaactcatgcagtgtggctctggaatgagtttatgaaggaacacggccagaaacttattcagatccttggac

SEQ ID NO: 341368 - DNA, 75 bp, synthetic construct
  source 1..75: mol_type = other DNA
tttgctttgcgatccgccacgcgccgatcgtggggatgagggggatttccgttctcttgatgagctggttcagca

SEQ ID NO: 341369 - DNA, 75 bp, synthetic construct
  source 1..75: mol_type = other DNA
ggagcgattctgattaacgcctgccgtggcgcagtcgtcgataatactgcgttgctgacctgcctgaatgaaggc

SEQ ID NO: 341370 - DNA, 75 bp, synthetic construct
  source 1..75: mol_type = other DNA
aacgttggtcggcgtttacaggcgcgactggaagcgctggggatcaaaaccttgctttgcgatccgccgcgtgcc

SEQ ID NO: 341371 - DNA, 75 bp, synthetic construct
  source 1..75: mol_type = other DNA
aaggttacacagagcgggaattcattgagttgcttggcgagtttacaaatccaaccggggataacgctcaattaa

SEQ ID NO: 341372 - DNA, 75 bp, synthetic construct
  source 1..75: mol_type = other DNA
taagcgtggtgctggatgtctgggaaggcgagccggaactaaatgtggaattgctgacaaaagtggatatcggca

SEQ ID NO: 341373 - DNA, 75 bp, synthetic construct
  source 1..75: mol_type = other DNA
cgctgaaaaggctggtgcatttggtgtatgatgtgcgccgcgatgacgcaccgctgcgtaaagtcgccgggatac

SEQ ID NO: 341374 - DNA, 75 bp, synthetic construct
  source 1..75: mol_type = other DNA
gcgatggattttcactgcacgaccgtacggtggggatcgtgggcgttggtaacgttggacgtcgattgcaggcgc

SEQ ID NO: 341375 - DNA, 75 bp, synthetic construct
  source 1..75: mol_type = other DNA
taagcgtagtgctggatgtctgggaaggcgaaccggaacttaacgtggaattgctgaaaaaagtggatatcggca

SEQ ID NO: 341376 - DNA, 75 bp, synthetic construct
  source 1..75: mol_type = other DNA
atgacaactgttaaccagatccctgatgcaaacattaccccctccctcccaccgaaaattcgcgaagcggtggaa

SEQ ID NO: 341377 - DNA, 75 bp, synthetic construct
  source 1..75: mol_type = other DNA
tacgcaagtgtttgaagcctatagcaagtttattgggcatgaacagcacgttgcgctggatacattactgcccgc

SEQ ID NO: 341378 - DNA, 75 bp, synthetic construct
  source 1..75: mol_type = other DNA
ggcacgccgcatatcgcaggctataccctggaaggtaaagcacgcggtactacgcaagtgtttgaagcctatagc

SEQ ID NO: 341379 - DNA, 75 bp, synthetic construct
  source 1..75: mol_type = other DNA
aaacgcggcatctggcggatgaaaaactgatccgcagcctgaagccggggacgattctgattaacgcttgccgtg

SEQ ID NO: 341380 - DNA, 75 bp, synthetic construct
  source 1..75: mol_type = other DNA
atcagatactttaagaagggctccgcgcatatcacgttcagaaaaccagaactggttgacagactgaatgatatt

SEQ ID NO: 341381 - DNA, 75 bp, synthetic construct
  source 1..75: mol_type = other DNA
ttcaaaaggctggaactgattgacagaattaacgatataatagccaggtactttccttctgtgctctcagcctgc

SEQ ID NO: 341382 - DNA, 75 bp, synthetic construct
  source 1..75: mol_type = other DNA
ctgttcagcggcaaaccaatccccgacaaccgggaaaacatcactattcgtctggatggtcacatccagtccgtt

SEQ ID NO: 341383 - DNA, 75 bp, synthetic construct
  source 1..75: mol_type = other DNA
atgacagaaagtattggaggtaaaacggctctggactgggccatgaaacaggattttcgctgcggttgctggctg

SEQ ID NO: 341384 - DNA, 75 bp, synthetic construct
  source 1..75: mol_type = other DNA
tgagcacatttgaacaactgcaccagaataacgatgaagtgtttgaccggggtgtgatcaacgtcttcatagggc

SEQ ID NO: 341385 - DNA, 75 bp, synthetic construct
  source 1..75: mol_type = other DNA
tgagcacatttgaacaactgcaccagaataacgatgaagtgtttgaccggggagtgatcaacgtcttcaaagggc

SEQ ID NO: 341386 - DNA, 75 bp, synthetic construct
  source 1..75: mol_type = other DNA
ttaatggatgcgcaggcccgtgatacatggtaccggtcactggaatacgataattttccggaaatcagtgaagcg

SEQ ID NO: 341387 - DNA, 75 bp, synthetic construct
  source 1..75: mol_type = other DNA
agtaaaattatcgtcaacaatctggtgagatgggaccagtggggatttcatcttatcagtggaatgcaggcagat

SEQ ID NO: 341388 - DNA, 75 bp, synthetic construct
  source 1..75: mol_type = other DNA
atgtctgaaatcacagtctcccgtccgctagtggccaacggacagcagcatacggacgttatctgctcaaccagt

SEQ ID NO: 341389 - DNA, 75 bp, synthetic construct
  source 1..75: mol_type = other DNA
aggaaaccagagctggttgacaggctgaatgatattattgcgaaatactatccggaaaccttatcgtccgtttaa

SEQ ID NO: 341390 - DNA, 75 bp, synthetic construct
  source 1..75: mol_type = other DNA
tgagcacatttgaacaactgcaccagaataaggatgaagtgtttgagcggggagtgatcaacgtcttcaaagggc

SEQ ID NO: 341391 - DNA, 75 bp, synthetic construct
  source 1..75: mol_type = other DNA
atgacagaaagtattggaggtaaaaccgcccgggactgggccatgaaacaggattttcgctgcggttgctggctg

SEQ ID NO: 341392 - DNA, 75 bp, synthetic construct
  source 1..75: mol_type = other DNA
tacaaaaccaattgcccctgcaaatttggcagtaaaattatcgtcaacaacctggtgaggtgggaccggtggggg

SEQ ID NO: 341393 - DNA, 75 bp, synthetic construct
  source 1..75: mol_type = other DNA
tgagcacatttgaacaactgcaccagaataacgatgaagtgtttgaccggggcgtgatcaacgtcttcacagggc

SEQ ID NO: 341394 - DNA, 75 bp, synthetic construct
  source 1..75: mol_type = other DNA
aagaagggctccgcgcatatcacgttcagaaaaccagaactggttgacaggcttaatgatattattgccagacac

SEQ ID NO: 341395 - DNA, 75 bp, synthetic construct
  source 1..75: mol_type = other DNA
atctgttcagtggcaaaccagtccccgacaaccgggaaaatatcatcattcatctggatgaccatatccggtctg

SEQ ID NO: 341396 - DNA, 75 bp, synthetic construct
  source 1..75: mol_type = other DNA
ttcaggaaaccagaactggttgacaggcttaatgatattattgccagacactactcggaagccctggcaagcaca

SEQ ID NO: 341397 - DNA, 75 bp, synthetic construct
  source 1..75: mol_type = other DNA
gagtgatcaacgtcttcaaagggctgagctgggattacaaaaccaactcaccctgtaaatttggcagtaaaatta

SEQ ID NO: 341398 - DNA, 75 bp, synthetic construct
  source 1..75: mol_type = other DNA
ggcgtgacctgatgcaacgttcagggatgctttccttaatggatgcacaggcccgtgatacatggtaccggtcac

SEQ ID NO: 341399 - DNA, 75 bp, synthetic construct
  source 1..75: mol_type = other DNA
atactttaagaagggctctgcgcacatcacgttcaggaagccagaactggttgacagactgaatgatattatcgc

SEQ ID NO: 341400 - DNA, 75 bp, synthetic construct
  source 1..75: mol_type = other DNA
tgagcacatttgaacaactgcaccagaataacgatgatgtgtttgaccggggggtgatcaacgtcttcatagggc

SEQ ID NO: 341401 - DNA, 75 bp, synthetic construct
  source 1..75: mol_type = other DNA
tgagcacatttgaacaactgcaccagaataacgatgatgtgtttgaccggggtgtgatcaacgtcttcaaagggc

SEQ ID NO: 341402 - DNA, 75 bp, synthetic construct
  source 1..75: mol_type = other DNA
tgagcacatttgaacaactgcaccagaataacgatgaagtgtttgaccggggggtgatcaacgtcttcagagggc

SEQ ID NO: 341403 - DNA, 75 bp, synthetic construct
  source 1..75: mol_type = other DNA
cacattctggctgtacgaaagaccacactgatgcaaatcgacacacttatccggcaactgacagaaatctcagca

SEQ ID NO: 341404 - DNA, 75 bp, synthetic construct
  source 1..75: mol_type = other DNA
tgagcacatttgaacaactgcaccagaataacgatgaggtgtttgaccggggggtgatcaacgtcttcaaagggc

SEQ ID NO: 341405 - DNA, 75 bp, synthetic construct
  source 1..75: mol_type = other DNA
tgagcacatttgaacaactgcaccagaataacgatgacgtgtttgaccggggcgtgatcaacgtcttcaaagggc

SEQ ID NO: 341406 - DNA, 75 bp, synthetic construct
  source 1..75: mol_type = other DNA
cagaacatcgcctttatggtgggcctggcgtttgccatcgcggcgagctgtaacttcccgatcattctgctttcc

SEQ ID NO: 341407 - DNA, 75 bp, synthetic construct
  source 1..75: mol_type = other DNA
tgcgaaaggaagcccttcagtggtggaacgggcgatggtgattgccccctgttcacgaatggggccggtgacgga

SEQ ID NO: 341408 - DNA, 75 bp, synthetic construct
  source 1..75: mol_type = other DNA
actgccgggtatggctaaccgtcacgggctgattactggcgcaacagggacgggcaaaaccgttacgctgcaaaa

SEQ ID NO: 341409 - DNA, 75 bp, synthetic construct
  source 1..75: mol_type = other DNA
cgccgcggatgctattagcggggccgtagagcgccagccaacaaactggcaggcgattattatgttcctgatttt

SEQ ID NO: 341410 - DNA, 75 bp, synthetic construct
  source 1..75: mol_type = other DNA
atgttagcaaccacctgggtacagattatcaaagccgttctgttgctgttcggtgccagttttatggcctttatg

SEQ ID NO: 341411 - DNA, 75 bp, synthetic construct
  source 1..75: mol_type = other DNA
ccgatgtggcctcttaccgtctgaaacaagggccgattcgtattctttcggcctgtggttctctggtggtggtgg

SEQ ID NO: 341412 - DNA, 75 bp, synthetic construct
  source 1..75: mol_type = other DNA
tttacgcccaaagatcagaaagcggtaaaagctgcggcgcaaaccatgcgccccaaccctgcatttgatacggaa

SEQ ID NO: 341413 - DNA, 75 bp, synthetic construct
  source 1..75: mol_type = other DNA
cttccagaatcagtacggtaatatcagtagcgcatcggttggtgccatccagcgcgggctgttgtcgctggaaca

SEQ ID NO: 341414 - DNA, 75 bp, synthetic construct
  source 1..75: mol_type = other DNA
gcacgccggacacagaactgtttttactgccgggaatggctaaccgtcatgggctgattaccggcgcaacgggga

SEQ ID NO: 341415 - DNA, 75 bp, synthetic construct
  source 1..75: mol_type = other DNA
gcgaagcgttgatctcttttctggatgcgaaaggaagtccttctgtggtagagcgtgcgatggtgatcgcgcctt

SEQ ID NO: 341416 - DNA, 75 bp, synthetic construct
  source 1..75: mol_type = other DNA
tgcgaaaggaagcccttctgtggtggaacgggcgatggtgattgcgccttgttcgcggatgggaccggtgacgga

SEQ ID NO: 341417 - DNA, 75 bp, synthetic construct
  source 1..75: mol_type = other DNA
atgagcgaacccctgttaattgcccgcacgtcggacacagaactgtttttattgccgggaatggcgaatcgtcac

SEQ ID NO: 341418 - DNA, 75 bp, synthetic construct
  source 1..75: mol_type = other DNA
tgctgtttgagaatcagaacatcgccttcatggtaggcctggcgtttgccatcgcagcgagctgtaacttcccga

SEQ ID NO: 341419 - DNA, 75 bp, synthetic construct
  source 1..75: mol_type = other DNA
ttttagacagccgcccggttcatgtagcacgtccacacagtgaagcaattcgcgacgctcaacgaaaaaaaccta

SEQ ID NO: 341420 - DNA, 75 bp, synthetic construct
  source 1..75: mol_type = other DNA
ctgatgcattattacggttttcatcaccgtctgttccgctggcgacgttccggcatgagcgccacctggtgtgcg

SEQ ID NO: 341421 - DNA, 75 bp, synthetic construct
  source 1..75: mol_type = other DNA
gaacagaccacagatgacttccgcttctgttttaagtttccggcgaccatttcgcatcaggcagcattacgacat

SEQ ID NO: 341422 - DNA, 75 bp, synthetic construct
  source 1..75: mol_type = other DNA
atgaacagaaaattgttggttttattaatggtaaccatagcacttccagccgcggcaacgcagtacgtaaaaccc

SEQ ID NO: 341423 - DNA, 75 bp, synthetic construct
  source 1..75: mol_type = other DNA
gaaagggcaatgctaaattcaacattaatgcctcaacaggagatggctcaggcgtatgcaatatggaagggacgg

SEQ ID NO: 341424 - DNA, 75 bp, synthetic construct
  source 1..75: mol_type = other DNA
cgcagcagcgcagtacgtaaaacccggagcggttctaaccctgcatccgggacagaataacgctgaattcaacat

SEQ ID NO: 341425 - DNA, 75 bp, synthetic construct
  source 1..75: mol_type = other DNA
gtagagcgccagccaacgaactggcaggcaattattatgttcctgattttcgtcgtgtttacgctcggcattacc

SEQ ID NO: 341426 - DNA, 75 bp, synthetic construct
  source 1..75: mol_type = other DNA
ccgtggttctggttggcgtattgatgatgatgtatgtcctgtttggcggcatgttagcaaccacctgggtacaga

SEQ ID NO: 341427 - DNA, 75 bp, synthetic construct
  source 1..75: mol_type = other DNA
atgaaaagagttctgacggcgcttgccgccacactccctttcgcagctaacgctgcggatgctattagcggggcc

SEQ ID NO: 341428 - DNA, 75 bp, synthetic construct
  source 1..75: mol_type = other DNA
ctgtgcctttgttgaaagtgagattgatgaatggattgaacaactgatctattcatcacgcaatacagcagcata

SEQ ID NO: 341429 - DNA, 75 bp, synthetic construct
  source 1..75: mol_type = other DNA
gcttctttacggtcagcgatgcccgtgaagcacgtaagagcgtgttctacgccaccggatttatgggttacttct

SEQ ID NO: 341430 - DNA, 75 bp, synthetic construct
  source 1..75: mol_type = other DNA
cgcgatcatgctggttggtgcgaatccggaatataaagacgcggcgggccatctgattggtggtaacaacatggc

SEQ ID NO: 341431 - DNA, 75 bp, synthetic construct
  source 1..75: mol_type = other DNA
caggcaagcgccgagcagcaaaataatcccccacgaaagggaaagaggtggcggtggatgacggcattcttggtg

SEQ ID NO: 341432 - DNA, 75 bp, synthetic construct
  source 1..75: mol_type = other DNA
tggtggaacgctgaaagcgggcagttggctggttttgttactccctgtatgggaagaatgggaaaaccatcccga

SEQ ID NO: 341433 - DNA, 75 bp, synthetic construct
  source 1..75: mol_type = other DNA
cgcatgacctcgactatctttcggtgagttttggttacaccgaggagttatggcgtttctggcaacgctgcggtt

SEQ ID NO: 341434 - DNA, 75 bp, synthetic construct
  source 1..75: mol_type = other DNA
attttgtccaacatttcaaatgcatacttgcggcagataacgagattattttctggcgtcaaaaccagccgctgg

SEQ ID NO: 341435 - DNA, 75 bp, synthetic construct
  source 1..75: mol_type = other DNA
tgcatggcctcgactatctttcagtgagttttggctacaccgaggaattatggcgtttctggcaacgctgcggtt

SEQ ID NO: 341436 - DNA, 75 bp, synthetic construct
  source 1..75: mol_type = other DNA
attttgtccaacatctcaaatgcgtccttacgacggagaacgatgctattctctggcgacaaaaccagccgctaa

SEQ ID NO: 341437 - DNA, 75 bp, synthetic construct
  source 1..75: mol_type = other DNA
acttacggcggataacgacgctatcctctggcggcaaaaccagccgttctcgttggcgcattttgctccccgtac

SEQ ID NO: 341438 - DNA, 75 bp, synthetic construct
  source 1..75: mol_type = other DNA
gatccgctgggcacagggatgcccgcttgaaaaaatggttagtgaggcactggtttttgacgatgaaaacttcac

SEQ ID NO: 341439 - DNA, 75 bp, synthetic construct
  source 1..75: mol_type = other DNA
ctttattgcgccggatgccttgttagccagcgatgagcaagccgactggctggtggtcgacgaagccgcagccat

SEQ ID NO: 341440 - DNA, 75 bp, synthetic construct
  source 1..75: mol_type = other DNA
agggatccgccgcttgctggtgttgagcggggaagagggttggtgttttgatcatgcgcttaagttgcgtgatgc

SEQ ID NO: 341441 - DNA, 75 bp, synthetic construct
  source 1..75: mol_type = other DNA
gcgctgttcgcacttaatgatgttcgcactgagcgtctgcgcgatcgcataacgcaatggcaattttttcactga

SEQ ID NO: 341442 - DNA, 75 bp, synthetic construct
  source 1..75: mol_type = other DNA
tggcgtttctggcaacgctgcggttttgtgctggtgcgaatgggtaatcatcgtgaagccagcagcggttgctat

SEQ ID NO: 341443 - DNA, 75 bp, synthetic construct
  source 1..75: mol_type = other DNA
tgccgactcgctgcgctggagtgattgccctgaccctattgcgacgccgcattttgtccagcatctcaaacgtgt

SEQ ID NO: 341444 - DNA, 75 bp, synthetic construct
  source 1..75: mol_type = other DNA
ggctggtttgtttcactaattggaaaattatctgagctttctcaaaaagatgtcaaaggctttattaccagtggg

SEQ ID NO: 341445 - DNA, 75 bp, synthetic construct
  source 1..75: mol_type = other DNA
ttacttattagaagaacacttcatgaatgagtttaatctttctaatattttgcttaaacgctatagccatttgtt

SEQ ID NO: 341446 - DNA, 75 bp, synthetic construct
  source 1..75: mol_type = other DNA
aaggtccggggtggcatgatcacaatactccctatggaacaattcatagttatgatggggacagccatagcggtt

SEQ ID NO: 341447 - DNA, 75 bp, synthetic construct
  source 1..75: mol_type = other DNA
caccataaaacagaggcattatctcagaataataaatataatgaagaaaagtcggttcaggaaagaatgcccggg

SEQ ID NO: 341448 - DNA, 75 bp, synthetic construct
  source 1..75: mol_type = other DNA
gggcgacggtttcagacctggggccgctgttgctggcgcggctgttgaatctcaacgatgtgcaatctggcgtgc

SEQ ID NO: 341449 - DNA, 75 bp, synthetic construct
  source 1..75: mol_type = other DNA
tgcgaaaggaagcccttctgtggtggagcgtgcgatggtgatcgcgccttgttcgcggatggggccggtgacgga

SEQ ID NO: 341450 - DNA, 75 bp, synthetic construct
  source 1..75: mol_type = other DNA
atcagattgtacgcgggatgttggggagtttgctgggggggggggagaagaaggtaagtcaggcgagatttgtct

SEQ ID NO: 341451 - DNA, 75 bp, synthetic construct
  source 1..75: mol_type = other DNA
cttttgtgcaagaacaggtacaacctggtgttgataatgcctggcgtgaatcccgtggcgatattggtaaaggaa

SEQ ID NO: 341452 - DNA, 75 bp, synthetic construct
  source 1..75: mol_type = other DNA
cagccatacggacaataatgccgattcccgtgtggaccagctgtctgcagccctgaactcagcaaaacagagtta

SEQ ID NO: 341453 - DNA, 75 bp, synthetic construct
  source 1..75: mol_type = other DNA
taaatgatgaatcaaagttcatcaatggtacatggaaaacgattgtttcattattattactgggggggatggagt

SEQ ID NO: 341454 - DNA, 75 bp, synthetic construct
  source 1..75: mol_type = other DNA
gtaatgatgtaaaacatcaggttgataatatggtcacagaatataaagggaatataggtgatactcagaacagca

SEQ ID NO: 341455 - DNA, 75 bp, synthetic construct
  source 1..75: mol_type = other DNA
tgctgaaatggcatcccgtactgaaagcatgagtgggcagatgagtgaagacctatcgcaacagtttgcacagta

SEQ ID NO: 341456 - DNA, 75 bp, synthetic construct
  source 1..75: mol_type = other DNA
gggcagtattctgaactacaaaatcatcataaaacagaagcattaactcagaataataaatataatgaagaaaag

SEQ ID NO: 341457 - DNA, 75 bp, synthetic construct
  source 1..75: mol_type = other DNA
aggcacaattaacgttggtgaaaatgcggagttaaatattcagggatacccgattgccgataaattcattccgtc

SEQ ID NO: 341458 - DNA, 75 bp, synthetic construct
  source 1..75: mol_type = other DNA
tggtctaaaatacgttactgatgcccagaccaagaaaataacgagtaatctagatgctaacaatagactggcaga

SEQ ID NO: 341459 - DNA, 75 bp, synthetic construct
  source 1..75: mol_type = other DNA
gctgtctgttccggcctttacgttaattgcgggcgaccgcagcgtctctggttctgctaccggcacgccttatga

SEQ ID NO: 341460 - DNA, 75 bp, synthetic construct
  source 1..75: mol_type = other DNA
aaggatcaacccgcccaggcaatgctggaaaatgtcgaaggcttccttctggaaagtaacatcggggaaagcgag

SEQ ID NO: 341461 - DNA, 75 bp, synthetic construct
  source 1..75: mol_type = other DNA
ccagtgccagtgccagtgccatcatgcgagtctgaagagcaggctgcaaaccgggaaacgattctggagaaaatc

SEQ ID NO: 341462 - DNA, 75 bp, synthetic construct
  source 1..75: mol_type = other DNA
gacggcgaatgtcgccagcacaggcaaaatgaacggcttctctttctcttaccgcgatatagccttcaaagcttc

SEQ ID NO: 341463 - DNA, 75 bp, synthetic construct
  source 1..75: mol_type = other DNA
aaccatcaatcaatgattatttgtcttgttttggtgttttattgggtttggtgtgggttgtttttgggttttgtt

SEQ ID NO: 341464 - DNA, 75 bp, synthetic construct
  source 1..75: mol_type = other DNA
taaaatggtttaacgcagataaaggtttcggctttatctccccatctgatggcggcaaggatgtgtttgttcatt

SEQ ID NO: 341465 - DNA, 75 bp, synthetic construct
  source 1..75: mol_type = other DNA
ttttggctttatttctcctgttgatggtagtaaagatgtgtttgtgcatttttctgcgattcagaatgataattt

SEQ ID NO: 341466 - DNA, 75 bp, synthetic construct
  source 1..75: mol_type = other DNA
caaaacgctcgacgaaggccagaaggttgagttctcgattgagaatggtgccaaaggtccggctgccggaaatgt

SEQ ID NO: 341467 - DNA, 75 bp, synthetic construct
  source 1..75: mol_type = other DNA
cattgctggaagtcatggcggcgctggcgattttctcaatgcttagcgtgctggcgtttatgattttttcgcaag

SEQ ID NO: 341468 - DNA, 75 bp, synthetic construct
  source 1..75: mol_type = other DNA
tgttcgtacttctgtggatggatggcaggaaggatcaacccgcccaggcgatgctggaacatgtcgagagctttc

SEQ ID NO: 341469 - DNA, 75 bp, synthetic construct
  source 1..75: mol_type = other DNA
ctgaagccacaagatgttgaagtgcaggtggattactgcgggatctgtcattccgatctgtcaatgatcgataac

SEQ ID NO: 341470 - DNA, 75 bp, synthetic construct
  source 1..75: mol_type = other DNA
gataccccgccagcgtcgcctgaaggcgtggcttttactactcagccaaattgttgtacttctaaggcgcaaggg

SEQ ID NO: 341471 - DNA, 75 bp, synthetic construct
  source 1..75: mol_type = other DNA
tgcgtgccaaggcagagaaagcaacgtgtggtgagtggtcgctcgaatatggagagagccgatttgatggtgatg

SEQ ID NO: 341472 - DNA, 75 bp, synthetic construct
  source 1..75: mol_type = other DNA
agaaccttatcagcacccgtatcatccaggatcttgaaaaagactatcagttaataagaaccaaaggaactgatg

SEQ ID NO: 341473 - DNA, 75 bp, synthetic construct
  source 1..75: mol_type = other DNA
aatgaggctatgttagaggagagaactggtgaaccatgtcctaaatccatcatccagagggctatagattcgata

SEQ ID NO: 341474 - DNA, 75 bp, synthetic construct
  source 1..75: mol_type = other DNA
atggaatataaaaaattgatggaacatatgtctattatccccgattacagacaagcctggaaagtggaacatgaa

SEQ ID NO: 341475 - DNA, 75 bp, synthetic construct
  source 1..75: mol_type = other DNA
tggtgaggagttcttcgaaacgcagagccgcaatgtaacccactggatgccgctaccggaaccgccgcaggaggt

SEQ ID NO: 341476 - DNA, 75 bp, synthetic construct
  source 1..75: mol_type = other DNA
gaaggagcgcatccagaaagcggtttcgatgaagatttccaaatggaacagcaggccaatgctgaattcatcgca

SEQ ID NO: 341477 - DNA, 75 bp, synthetic construct
  source 1..75: mol_type = other DNA
gaggtaagagctttgctggcgtagtgctttatgcattacgatccgcttctcatcacaaagttgctccagtagtta

SEQ ID NO: 341478 - DNA, 75 bp, synthetic construct
  source 1..75: mol_type = other DNA
atgctatcagaacgaactggtgttccctgccccaagaagtcccttcaacagatcatagataaaagtttggcagat

SEQ ID NO: 341479 - DNA, 75 bp, synthetic construct
  source 1..75: mol_type = other DNA
aaaacctcatcagcacccgcataatcagtgaactcgaattcgctcatggtctgacagtgaccaggacagcctctt

SEQ ID NO: 341480 - DNA, 75 bp, synthetic construct
  source 1..75: mol_type = other DNA
agaatgagaatcttatcagcacacgtatcatagaagagctggagcaggactaccagttaaccagaaccaaaggac

SEQ ID NO: 341481 - DNA, 75 bp, synthetic construct
  source 1..75: mol_type = other DNA
agatgctacatcctacatgacgacgaagacggccagcacatccatatcatcgcaagcagagtttctcttgatgca

SEQ ID NO: 341482 - DNA, 75 bp, synthetic construct
  source 1..75: mol_type = other DNA
agaatcttatcagcacacgtatcatccaggaacttgaaaaagactaccagttaaccagaaccaaaggacccaaag

SEQ ID NO: 341483 - DNA, 75 bp, synthetic construct
  source 1..75: mol_type = other DNA
gccaatttcgcaggcttcagccaatcagcgtaaaggccgttgcggacgcgtatcagaagggatctgtattcgtct

SEQ ID NO: 341484 - DNA, 75 bp, synthetic construct
  source 1..75: mol_type = other DNA
taaccgcaatgtgcagaccgtgctggcagaggaaatgtcagacgccgcgcagagcgcaatgcttgccgccaccgg

SEQ ID NO: 341485 - DNA, 75 bp, synthetic construct
  source 1..75: mol_type = other DNA
ctggagatcgggcgtcatgccctacgtcatggctgggtgatgccactgggtaaccgcaatgtgcagaccgtgctg

SEQ ID NO: 341486 - DNA, 75 bp, synthetic construct
  source 1..75: mol_type = other DNA
ctttgatgtcgatctgttgctgcagacgctggagctaacagacggtctggacatgccggaccagtcacgggcgcg

SEQ ID NO: 341487 - DNA, 75 bp, synthetic construct
  source 1..75: mol_type = other DNA
ggccgctcgcgagggtggcagtgttcgccacgcgtcgggctatgacctgatgctgctgcaattggcggaagaccg

SEQ ID NO: 341488 - DNA, 75 bp, synthetic construct
  source 1..75: mol_type = other DNA
tggagctgctgccgaagtacgccgcctgggcggagggggtcctggctgccggaggcgcgcaacaggatgacgtgc

SEQ ID NO: 341489 - DNA, 75 bp, synthetic construct
  source 1..75: mol_type = other DNA
ggccgcccgcgagggcggcagtgttcgccacgcgtcgggctatgacctgatgctgctgcaattggcggaagaccg

SEQ ID NO: 341490 - DNA, 75 bp, synthetic construct
  source 1..75: mol_type = other DNA
tggtcacgccggccattgatctgccgaaggaatttctcgagaagctgatcccgggtccgatggacgcggccgggg

SEQ ID NO: 341491 - DNA, 75 bp, synthetic construct
  source 1..75: mol_type = other DNA
cgcatcctgtgggcgatatttcctccgcacgggcgttatgccaaggctgcaatcattcacgactggatgtacgac

SEQ ID NO: 341492 - DNA, 75 bp, synthetic construct
  source 1..75: mol_type = other DNA
cggcgtctgatgatgtactgcgcagtacatctcttctggcgtggtaactacaaactggcacatcagaagacaatg

SEQ ID NO: 341493 - DNA, 75 bp, synthetic construct
  source 1..75: mol_type = other DNA
ctggaaatcggacgccatgcactgctccatggctgggtgatgccgctgggcaaccgtaacgtgcagaccgtgctg

SEQ ID NO: 341494 - DNA, 75 bp, synthetic construct
  source 1..75: mol_type = other DNA
atatgccggaccagtcacgggcacgtctgcataaagcgattggcgcggtcctgagtgaaagcaatccggcttccg

SEQ ID NO: 341495 - DNA, 75 bp, synthetic construct
  source 1..75: mol_type = other DNA
agagcgcaatgcttgccgccatcggctttgatgctgatctgttgctgcagacgctggaactgacagacggtctgg

SEQ ID NO: 341496 - DNA, 75 bp, synthetic construct
  source 1..75: mol_type = other DNA
taaccgcaacgtgcagaccgtgctggcagaggaaatggcagacgcagcgcagagcgcaatgcttgccgccaccgg

SEQ ID NO: 341497 - DNA, 75 bp, synthetic construct
  source 1..75: mol_type = other DNA
cacagcgcgtatcagtcgttatagctatcgaaccaaagtgcagcgtttgcctattgagcccatttcgcaggcttc

SEQ ID NO: 341498 - DNA, 75 bp, synthetic construct
  source 1..75: mol_type = other DNA
cgttgccgaaaccggtacgccgtaattttgtacccgcgccaaactacgccgaagcgtttttaggccgcgtcacac

SEQ ID NO: 341499 - DNA, 75 bp, synthetic construct
  source 1..75: mol_type = other DNA
ggcgttatgccgtgaactctttattcgccatgcgctggtggaaggtgactggcagacgcgtcacgcattcttccg

SEQ ID NO: 341500 - DNA, 75 bp, synthetic construct
  source 1..75: mol_type = other DNA
gtggaagagctggaacacaaatcacgtcgccgcgatattctggttgatgacgaaacgttgtttgagttttacgac

SEQ ID NO: 341501 - DNA, 75 bp, synthetic construct
  source 1..75: mol_type = other DNA
gtggaagagctggagcacaaatcacgtcggcgcgatattctggtggacgacgaaacgttgtttgagttttacgac

SEQ ID NO: 341502 - DNA, 75 bp, synthetic construct
  source 1..75: mol_type = other DNA
atatcaaagcgcagatgggcgggctggtgtatcgcggttttgtcactggcaacggcttcaaacgtctgggcgata

SEQ ID NO: 341503 - DNA, 75 bp, synthetic construct
  source 1..75: mol_type = other DNA
agaacagaagcagtgcatttcgttttttaccggaagaacatatatctagcgatctcgataaatttgcttatgata

SEQ ID NO: 341504 - DNA, 75 bp, synthetic construct
  source 1..75: mol_type = other DNA
cgctatgtggatgatattcttttagttttttcatccccggacattaaaaaagaagataaaggtgaagaagtaata

SEQ ID NO: 341505 - DNA, 75 bp, synthetic construct
  source 1..75: mol_type = other DNA
gttgcgttggcaaatatgagagttgaacgtcgtaatattgaaagtgcttgcagaaaagatcagtctccaaattta

SEQ ID NO: 341506 - DNA, 75 bp, synthetic construct
  source 1..75: mol_type = other DNA
tggcgctggggctttctgacatcaaagcacaaatgggcggtctggtgtatcgcggttttgtcaccggtaacggct

SEQ ID NO: 341507 - DNA, 75 bp, synthetic construct
  source 1..75: mol_type = other DNA
tgaccattgaatttaaaaccggtgatgagtgggttaaagccgtcgaccgcgtaagtatgaccttaaccgaaggtg

SEQ ID NO: 341508 - DNA, 75 bp, synthetic construct
  source 1..75: mol_type = other DNA
cgccggatagacgataatgtggaagaagtgcaggcacaagggacccgtgaaatcgaaggtgaggtttctgctatc

SEQ ID NO: 341509 - DNA, 75 bp, synthetic construct
  source 1..75: mol_type = other DNA
tgaccattgaatttaaaaccggtgatgagtgggttaaagccgttgaccgcgtgagtatgaccttaaccgaaggcg

SEQ ID NO: 341510 - DNA, 75 bp, synthetic construct
  source 1..75: mol_type = other DNA
tgaccattgaattcaaaaccggtgatgagtgggtaaaagccgttgaccgcgtcagcatgaccttaaacgaaggtg

SEQ ID NO: 341511 - DNA, 75 bp, synthetic construct
  source 1..75: mol_type = other DNA
atgccattactcgatattcgtaacctgactattgaatttaaaaccggtgatgagtgggttaaagccgttgaccgg

SEQ ID NO: 341512 - DNA, 75 bp, synthetic construct
  source 1..75: mol_type = other DNA
agcatggagcaacgaaaaagtgaactgcttgagcagcgggcagagccagttccttcccgcagtgtgccggatggc

SEQ ID NO: 341513 - DNA, 75 bp, synthetic construct
  source 1..75: mol_type = other DNA
ggcgaggaaggaagttcacgccgccttctcatcctatggaacgagtggctcgaaatggtctatgacgcaacgaaa

SEQ ID NO: 341514 - DNA, 75 bp, synthetic construct
  source 1..75: mol_type = other DNA
gcaagctggttgggcacaacgtgtcgatgatttttcaggaaccacaatcgtgtctcgacccttctgaacgtgtgg

SEQ ID NO: 341515 - DNA, 75 bp, synthetic construct
  source 1..75: mol_type = other DNA
atgctggcattcttgctgattctgctgcctctactggtactggcatggcaagcatggcaaagcctgaatgcgctt

SEQ ID NO: 341516 - DNA, 75 bp, synthetic construct
  source 1..75: mol_type = other DNA
acgggctaaaatgatgcataccgacgtcgatctcaaagcaacagcttgcctggcggagccaatgctgctgatgag

SEQ ID NO: 341517 - DNA, 75 bp, synthetic construct
  source 1..75: mol_type = other DNA
cgaaggtttatcaaagccagcgcaagcgttacagcgaaatgctcgatgcccacgcaggcgtactgccagacgata

SEQ ID NO: 341518 - DNA, 75 bp, synthetic construct
  source 1..75: mol_type = other DNA
tgagtgggttaaagccgtcgaccgggtaagtatgaccttaaccgaaggtgaaatccgcggtcttgttggcgaatc

SEQ ID NO: 341519 - DNA, 75 bp, synthetic construct
  source 1..75: mol_type = other DNA
atgccattactcgatattcgtaacctgaccattgaatttaaaaccggtgatgagtgggttaaagccgtcgaccgg

SEQ ID NO: 341520 - DNA, 75 bp, synthetic construct
  source 1..75: mol_type = other DNA
ggattgtattcgccgtatgcaaggggaactgtatctggtcgacgagagcgggcaagacgtttgtttccgcattga

SEQ ID NO: 341521 - DNA, 75 bp, synthetic construct
  source 1..75: mol_type = other DNA
taatgcctataaattctggcgtcgttgccgtcgtgatggccttggtaaacgtatttacctgtttaagggcgacag

SEQ ID NO: 341522 - DNA, 75 bp, synthetic construct
  source 1..75: mol_type = other DNA
gaagctgatgttaatgcgcacatggagttacttaatagcttggctcgtatgggggcggatatcaacaagcttgaa

SEQ ID NO: 341523 - DNA, 75 bp, synthetic construct
  source 1..75: mol_type = other DNA
accatccatgcggtgttcaaggacatacaggacttctacatctgcgtaccacaagatttaaaagataaagagtta

SEQ ID NO: 341524 - DNA, 75 bp, synthetic construct
  source 1..75: mol_type = other DNA
acctgggcaagcttgatgttcttgaagctatcaagaagagaattgatgaattagagcgttcagcaagcatcatta

SEQ ID NO: 341525 - DNA, 75 bp, synthetic construct
  source 1..75: mol_type = other DNA
atagttatgtcattcaagatcggcgtaaagtccgaaatgctaagaaaaatgactacctgttcgtgacatacaagt

SEQ ID NO: 341526 - DNA, 75 bp, synthetic construct
  source 1..75: mol_type = other DNA
ttttccgtggtcagggctgtatcaccacaattgtatgcagcgacagggcattcgttccgccatacatggaatcga

SEQ ID NO: 341527 - DNA, 75 bp, synthetic construct
  source 1..75: mol_type = other DNA
acaggccagataaagagaatagacaatcttttctcgacattaatgacaaaaagtaaaacaaattatgatgataat

SEQ ID NO: 341528 - DNA, 75 bp, synthetic construct
  source 1..75: mol_type = other DNA
agttattacaaatcgttcaggatgctctctcaaagccatcaccgattgcaggctatcgcaacgaagctgaacgct

SEQ ID NO: 341529 - DNA, 75 bp, synthetic construct
  source 1..75: mol_type = other DNA
agacgatcgcggcgggcatcctcaaactaatgaatatggtctgattagcaatgtaacacactggatgccgctacc

SEQ ID NO: 341530 - DNA, 75 bp, synthetic construct
  source 1..75: mol_type = other DNA
ttgtgatgctgatttaggtaatcgctatttcggcaccgtcaccgaggcgttagaacttgatactgccaagaatgg

SEQ ID NO: 341531 - DNA, 75 bp, synthetic construct
  source 1..75: mol_type = other DNA
acaaatacgataatttcaagctttatgagctgccaggattcgaatcatctgacttcactaaggcaaatctgcgcg

SEQ ID NO: 341532 - DNA, 75 bp, synthetic construct
  source 1..75: mol_type = other DNA
caggcaaggttcaacaactgttaaacgtgatggacgtcaccgctgatgactggaacataaaggagcaagtccatg

SEQ ID NO: 341533 - DNA, 75 bp, synthetic construct
  source 1..75: mol_type = other DNA
agcgtatggcagaacaacaatctgagatggttaagaaaattgtctttgatacgcttaagaccatgtatagcaata

SEQ ID NO: 341534 - DNA, 75 bp, synthetic construct
  source 1..75: mol_type = other DNA
gtttttggtgagtctggcgatggtgctgctttttacgcgaatgattatcggcccggtgaagaatatcgagcggat

SEQ ID NO: 341535 - DNA, 75 bp, synthetic construct
  source 1..75: mol_type = other DNA
tcgacccggctaccggtacgctcgacaccagcaatctacggattattcacgatctacaaaaccctgaagagcctc

SEQ ID NO: 341536 - DNA, 75 bp, synthetic construct
  source 1..75: mol_type = other DNA
ttagctgcgaaccgtttatccagtgggtggttgaagataacttcgtcgctgggcgtcctgcctgggaagtcgcag

SEQ ID NO: 341537 - DNA, 75 bp, synthetic construct
  source 1..75: mol_type = other DNA
gttttcggtgatgatctgccagataacccgcattttgtgcaggctatcgaacaagcctggcaacaaatcgcacaa

SEQ ID NO: 341538 - DNA, 75 bp, synthetic construct
  source 1..75: mol_type = other DNA
aagcaacgattaagccgggtaatggcattgagcaggcaactcactggatgccgctaccggaaccgccgcaggagg

SEQ ID NO: 341539 - DNA, 75 bp, synthetic construct
  source 1..75: mol_type = other DNA
agcagaactggaagccgaacctgtaagccaaacttgcaagttgaacgagccatcgggcaactctccggtaactcc

SEQ ID NO: 341540 - DNA, 75 bp, synthetic construct
  source 1..75: mol_type = other DNA
tccgcaaccggttcaaagaactggacctgttaatcgggaaaaacattctggtcatgcaggctgcgattatcgaat

SEQ ID NO: 341541 - DNA, 75 bp, synthetic construct
  source 1..75: mol_type = other DNA
gcaaatcgcgatggatggcagccagaaattaccgcaacgcatgctggcaggtattcgcatacatcaggggcgcga

SEQ ID NO: 341542 - DNA, 75 bp, synthetic construct
  source 1..75: mol_type = other DNA
ggcaactatccggtaactccggatggttggataagctgtagtgatctaatgccggaagacaccaaaatgttactg

SEQ ID NO: 341543 - DNA, 75 bp, synthetic construct
  source 1..75: mol_type = other DNA
atggaacttaaaaaattgatggaacatatttctattatccccgattacagacaagcctggaaagtggaatataaa

SEQ ID NO: 341544 - DNA, 75 bp, synthetic construct
  source 1..75: mol_type = other DNA
aacggactggtcgttgctggcattaggcgttgcaggctggatgcgttacgtcagcggcgttgatgatgccggaaa

SEQ ID NO: 341545 - DNA, 75 bp, synthetic construct
  source 1..75: mol_type = other DNA
gtattcgcatacatcaggggcgcgaaacggactggtcgttgctggcattaggcgttgcaggctggatgcgttacg

SEQ ID NO: 341546 - DNA, 75 bp, synthetic construct
  source 1..75: mol_type = other DNA
cctgcgacaatattcccgacaatggccatgtggtgaaaaatgcggtgttgggaatggcagaaaaacgctcaccag

SEQ ID NO: 341547 - DNA, 75 bp, synthetic construct
  source 1..75: mol_type = other DNA
tgggatgacggtgatggcgaagacctgtatctcaaagaggtaacccactggatgcctctaccagaaccgcctcga

SEQ ID NO: 341548 - DNA, 75 bp, synthetic construct
  source 1..75: mol_type = other DNA
cataaaaccggccagtattaaccgcgaccttacctgcctgagtggtatgtttactgcgctaattgatgcggaact

SEQ ID NO: 341549 - DNA, 75 bp, synthetic construct
  source 1..75: mol_type = other DNA
ttctactggtggacgctggagtgaagtgtctaatttgaaagctgaacacatcattaaccagatggttacgtttat

SEQ ID NO: 341550 - DNA, 75 bp, synthetic construct
  source 1..75: mol_type = other DNA
acaatgacctatgcacatttcgcccctgagtacctgcaggacgcggtaacgcttaatcctttacgcggtggcact

SEQ ID NO: 341551 - DNA, 75 bp, synthetic construct
  source 1..75: mol_type = other DNA
cgataaactctatcaggcattgcgtcaggatttgaacaatctggctcaacttcagtgtaacaacagcggtcccga

SEQ ID NO: 341552 - DNA, 75 bp, synthetic construct
  source 1..75: mol_type = other DNA
gtggaccgagcgagttacgctcggttgggcaacgtattctttggttaagtgagcgcctgtcatggctggaatccc

SEQ ID NO: 341553 - DNA, 75 bp, synthetic construct
  source 1..75: mol_type = other DNA
tgatgcctcatacccgaagttcaggcgaacaatgaaagatgtaaaaccagatctaccggacgggcaagcaactca

SEQ ID NO: 341554 - DNA, 69 bp, synthetic construct
  source 1..69: mol_type = other DNA
atgagcggaaaaccggcggcgcggcagggcgacatgacccgcagggaaagatcatcagaagttcacttt

SEQ ID NO: 341555 - DNA, 75 bp, synthetic construct
  source 1..75: mol_type = other DNA
acctgtaagccaaacttacaagttgaacgagctgtcgggcaactctccggtaactccggatggttgggtcatggt

SEQ ID NO: 341556 - DNA, 75 bp, synthetic construct
  source 1..75: mol_type = other DNA
cgagtttgaacccgactgcattaaattaacccgcgaaaacctgccaacattcgaatggctaccgatgacctgtgc

SEQ ID NO: 341557 - DNA, 75 bp, synthetic construct
  source 1..75: mol_type = other DNA
ctgagtacctacaggacgcgataacgcttaatcctctacgtggtggtgttggctctcagagtgtccacacagtgt

SEQ ID NO: 341558 - DNA, 75 bp, synthetic construct
  source 1..75: mol_type = other DNA
gtcgttatgaagtggacattagacctgcagggcgcaacggaaagcgcatccgcaggaaatttgacaagaaaagcg

SEQ ID NO: 341559 - DNA, 75 bp, synthetic construct
  source 1..75: mol_type = other DNA
actgcgccacccgaagaagtcagggtattaaaccttcgagtatcaatcgtgatttaacatgtattagcggcatgt

SEQ ID NO: 341560 - DNA, 75 bp, synthetic construct
  source 1..75: mol_type = other DNA
tttcggtccataatagcagaacaaaagaaagagccagaaatgacggtcagatattatatcagttctgctgattta

SEQ ID NO: 341561 - DNA, 75 bp, synthetic construct
  source 1..75: mol_type = other DNA
ggggaaactcatctcgattttttaaaacaatatggtgattttgaaaatggtattcctgttcacgataccattgcc

SEQ ID NO: 341562 - DNA, 75 bp, synthetic construct
  source 1..75: mol_type = other DNA
tgccagaaagatattgcagagaagatacaaaaacagggaggtgattacttattcgctgtaaaaggaaatcagcgt

SEQ ID NO: 341563 - DNA, 75 bp, synthetic construct
  source 1..75: mol_type = other DNA
gcctgccatatcagtcaacttgatgccagaacacagcaacatgagatgttaaaaaccacgggtcgccccgtgact

SEQ ID NO: 341564 - DNA, 75 bp, synthetic construct
  source 1..75: mol_type = other DNA
caacaatgcacagtctggtcatcggacagatcaagacggatgagaaatctaatgagattacagctatcccagaac

SEQ ID NO: 341565 - DNA, 75 bp, synthetic construct
  source 1..75: mol_type = other DNA
tattcaaggcagggttaagacgtaagatgcgaaaagcagccatggacagaaactatctggcgtcagtgcttgctg

SEQ ID NO: 341566 - DNA, 75 bp, synthetic construct
  source 1..75: mol_type = other DNA
ttttcagggatacggcacatcgctattaatattttaacgaatgataaggtattcaaggcagggttaagacgtaag

SEQ ID NO: 341567 - DNA, 75 bp, synthetic construct
  source 1..75: mol_type = other DNA
atggtgattttgaaaatggtattcctgttcacgatatcattgccagagttgtatcctgtatcagtgcttactgca

SEQ ID NO: 341568 - DNA, 75 bp, synthetic construct
  source 1..75: mol_type = other DNA
tccagagcatgacagttatgcaattagtgaaaagagtcacggcagagaagatatccgtcttcatattgtttgcga

SEQ ID NO: 341569 - DNA, 75 bp, synthetic construct
  source 1..75: mol_type = other DNA
gatgggttgccagaaagatattgcagagaagatacaaaaacagggaggtgattacttattcgctgtaaaaggaaa

SEQ ID NO: 341570 - DNA, 75 bp, synthetic construct
  source 1..75: mol_type = other DNA
taatgaatgaagacgactgcaaaataagaagaggaaatgcagcagaattattttcagggatacggcacattgcta

SEQ ID NO: 341571 - DNA, 75 bp, synthetic construct
  source 1..75: mol_type = other DNA
atgcgtggcagtctcctttcggtcgataatagcagaacagcagaacagcagaacagcagaacagcagaacaaaag

SEQ ID NO: 341572 - DNA, 75 bp, synthetic construct
  source 1..75: mol_type = other DNA
cgaaccgggagaaagcctgcaaccggcctgccatatcagtcaacttgatgccagaacacagcaacatgagatgtt

SEQ ID NO: 341573 - DNA, 75 bp, synthetic construct
  source 1..75: mol_type = other DNA
ggtaaagcaaaaggcgccaccggtcgtccggtagcgttgctggcacagttcctgttaaaccgcgctgggtttaac

SEQ ID NO: 341574 - DNA, 75 bp, synthetic construct
  source 1..75: mol_type = other DNA
tgtcatcacccgcgttatcggcgaacagcagatgaaagagctggggatgcactcctatctggcagttggtcaggg

SEQ ID NO: 341575 - DNA, 75 bp, synthetic construct
  source 1..75: mol_type = other DNA
gcagggttaagacgtaagatgcgaaatgcagctatggacagaaactatctggcgtcagtccttgcggagagcggg

SEQ ID NO: 341576 - DNA, 75 bp, synthetic construct
  source 1..75: mol_type = other DNA
tatgccgccgaatatctgtaacgccgcttacctcgcctctcaggcgcgccagctggctgacagctacagcaagaa

SEQ ID NO: 341577 - DNA, 75 bp, synthetic construct
  source 1..75: mol_type = other DNA
gaactggaaggaaaaccggggcagacactgttgctgcaccatgtgccaaacgtgctttctgaacgcatcctcctt

SEQ ID NO: 341578 - DNA, 75 bp, synthetic construct
  source 1..75: mol_type = other DNA
ccgctggcccatgagctgattgcggcgtctgaacaatccggtgaccgcgcatggcgtttaccgctgggtgatgag

SEQ ID NO: 341579 - DNA, 75 bp, synthetic construct
  source 1..75: mol_type = other DNA
cgcgcaaaggcggtctggatttatgcgttctcggattggggaaaaacggtcatcttgggctgaacgaaccgggag

SEQ ID NO: 341580 - DNA, 75 bp, synthetic construct
  source 1..75: mol_type = other DNA
cggctaaagtctctaccgctatcccggcttcatttttatggctgcacagtaactttatttgtttaattaacacct

SEQ ID NO: 341581 - DNA, 75 bp, synthetic construct
  source 1..75: mol_type = other DNA
cagccacaatctccaccactatccccgcttcgtttttatggctacataaccatttcacatgtttgattgatggga

SEQ ID NO: 341582 - DNA, 75 bp, synthetic construct
  source 1..75: mol_type = other DNA
agggaaaaataatcacaactgatgcgatgggttgccaaaagatattgctgagaatatacaaaaacagggaggtga

SEQ ID NO: 341583 - DNA, 75 bp, synthetic construct
  source 1..75: mol_type = other DNA
attacagacaagcctggaaagtggagcataaattgtcagatattctactgttgactatttgtgccgttatttatg

SEQ ID NO: 341584 - DNA, 75 bp, synthetic construct
  source 1..75: mol_type = other DNA
tgccagaaagatattgcagagaagatacaaaaacagggcggtgattatttattcgctgtaaaaggaaatcagggg

SEQ ID NO: 341585 - DNA, 75 bp, synthetic construct
  source 1..75: mol_type = other DNA
aggcattcgacgacttcttcggttatcgggcattaatcgacgaagttaacgtctgggtcttgccggaaattgctg

SEQ ID NO: 341586 - DNA, 75 bp, synthetic construct
  source 1..75: mol_type = other DNA
cgggaaattcgcgataccgccgatgcgctgaacaagctaaatctgcggcataccgaaatcttgccgctttatgcg

SEQ ID NO: 341587 - DNA, 75 bp, synthetic construct
  source 1..75: mol_type = other DNA
gccaagctggggctgtactttaacccgtatggcaaagtgctggagctgatcgatgactgtatctcatgcggtgtg

SEQ ID NO: 341588 - DNA, 75 bp, synthetic construct
  source 1..75: mol_type = other DNA
tatccaggatggcgtgcgtctgctcgaagagctgggcgcgatcaccactgatgaacaggccagcgcctataaact

SEQ ID NO: 341589 - DNA, 75 bp, synthetic construct
  source 1..75: mol_type = other DNA
aatgtgttgttcaaacactttggttttacgccggaaaatgtcctggcgcaggcgcgtgagctactgaacagctaa

SEQ ID NO: 341590 - DNA, 75 bp, synthetic construct
  source 1..75: mol_type = other DNA
gtggaagagctggaacacaaatcacgtcgccgcgatattctggttgatgacgaaacgctgtttgagttctacgac

SEQ ID NO: 341591 - DNA, 75 bp, synthetic construct
  source 1..75: mol_type = other DNA
cgctgaactgaacgacacggtggtggatattgcgaagcaggtcgaacaaatcctcactgcggtattcaatatcaa

SEQ ID NO: 341592 - DNA, 75 bp, synthetic construct
  source 1..75: mol_type = other DNA
ctggaaaaactggcggttgatccacatcgcgaccgcgcccagatgctgaaagtcgaaaatgtccagcaggcgtgg

SEQ ID NO: 341593 - DNA, 75 bp, synthetic construct
  source 1..75: mol_type = other DNA
gttgcccagcatttgattaaacgctcctacagcgaaccgcactgggaacgggcgcagggcgcggtgatggcaacg

SEQ ID NO: 341594 - DNA, 75 bp, synthetic construct
  source 1..75: mol_type = other DNA
gatgataaagacgtcattgcaattgatggaaaaacgctccgacactcttatgacaagagtcgccgcaggggagcg

SEQ ID NO: 341595 - DNA, 75 bp, synthetic construct
  source 1..75: mol_type = other DNA
ttgctgcgctgcatgagaaagtgcgtgccgaactgaacgacacggtggtggatattgcgaagcaggtcgagcaaa

SEQ ID NO: 341596 - DNA, 75 bp, synthetic construct
  source 1..75: mol_type = other DNA
ccttgagcgcgagttacggcggatgaccggtgttaccgttgaccgcgaagactggcactgggatcaggtgcccga

SEQ ID NO: 341597 - DNA, 75 bp, synthetic construct
  source 1..75: mol_type = other DNA
cgcggttttgtcactggtaatggcttcaaacggctgggcgacacgctgcgttatttgcaggcgattgaaaagcgt

SEQ ID NO: 341598 - DNA, 75 bp, synthetic construct
  source 1..75: mol_type = other DNA
gattaacgctggatgactggcgcgattttctcaaggttacgctggatcattacgttcgcgagagcaacttcacac

SEQ ID NO: 341599 - DNA, 75 bp, synthetic construct
  source 1..75: mol_type = other DNA
cacgcattgcgaaaaacccgccgggctggaacatctcaccctgaccttttaccaggatcatattgaacatcgggt

SEQ ID NO: 341600 - DNA, 75 bp, synthetic construct
  source 1..75: mol_type = other DNA
gaaaggcccacagggcgaggaaaaagagattgaaagccgactggaggaaggttgttactatttactgttcgacag

SEQ ID NO: 341601 - DNA, 75 bp, synthetic construct
  source 1..75: mol_type = other DNA
gcgcaatggcgaaatgaacctggcgaactggtgccagcaactggtcgccagcaaagcaatggtgccacttatcca

SEQ ID NO: 341602 - DNA, 75 bp, synthetic construct
  source 1..75: mol_type = other DNA
cgcagtatgcgcggcctgcgcatgaataccctcggttggttcgattttaaatcggcgtggtttgcgccgccggat

SEQ ID NO: 341603 - DNA, 75 bp, synthetic construct
  source 1..75: mol_type = other DNA
atacgctgccgctctattcgcatattgctgacattgtgtcgccgacgccctggacgctggatatccatctcacgc

SEQ ID NO: 341604 - DNA, 75 bp, synthetic construct
  source 1..75: mol_type = other DNA
cgaaacccatatcgcccggcaaatcttcagttcgctaacgcgcataaatgaggaaaatggggaactggaagcaga

SEQ ID NO: 341605 - DNA, 75 bp, synthetic construct
  source 1..75: mol_type = other DNA
gccgcaggggagcgattcatgtcattagtgcgttctcaacaatgcacagtctggtcatcggacagatcaggacgg

SEQ ID NO: 341606 - DNA, 75 bp, synthetic construct
  source 1..75: mol_type = other DNA
agtactgcgttggatcgacgtctgttcagggacccaacctaatgcaaaggatcccgcatttcttaaagtcagggc

SEQ ID NO: 341607 - DNA, 75 bp, synthetic construct
  source 1..75: mol_type = other DNA
tggcctgaatatggctgcaagcgtctgtataaatggatgatgtcacaaaaaaatccagtgattggtattaatcct

SEQ ID NO: 341608 - DNA, 75 bp, synthetic construct
  source 1..75: mol_type = other DNA
tgctttctccgacgaatctggtctatttcgctgaggaacagtaccagcaactgtggttcccggcttatggactgc

SEQ ID NO: 341609 - DNA, 75 bp, synthetic construct
  source 1..75: mol_type = other DNA
ataatatggtcacagaatataaagggaatatcggagatactcagaatagtattcatggcgaagaaaatattgtag

SEQ ID NO: 341610 - DNA, 75 bp, synthetic construct
  source 1..75: mol_type = other DNA
aagacaacttatccaagttctgaatttgtaattttaggaggttttgagagtaataatcctttctcattacaaaaa

SEQ ID NO: 341611 - DNA, 75 bp, synthetic construct
  source 1..75: mol_type = other DNA
atatcagttctgctgatttaaccgcagagaagttcgccacagcaatccgaaaccactggcacgtgggaataagct

SEQ ID NO: 341612 - DNA, 75 bp, synthetic construct
  source 1..75: mol_type = other DNA
actatttgtgccgttatttctggtgcagaaggttgggaagatatagaggattttggggaaacacatctcgatttt

SEQ ID NO: 341613 - DNA, 75 bp, synthetic construct
  source 1..75: mol_type = other DNA
agcggttgtgttgctgatcctcgccgaaccgtaccgtatccgccgtgttaccgcattctggaacccgtgggaaga

SEQ ID NO: 341614 - DNA, 75 bp, synthetic construct
  source 1..75: mol_type = other DNA
caaagaaggggcggaaaaaatcagcaagctggattacccgaacttctggcatcagggcaatctcaagctgcgttt

SEQ ID NO: 341615 - DNA, 75 bp, synthetic construct
  source 1..75: mol_type = other DNA
ttaatcatctcaaccatgcgttacagctcgatccccgctgtggcgtgaaaaaagacaaacagcagctggagcgca

SEQ ID NO: 341616 - DNA, 75 bp, synthetic construct
  source 1..75: mol_type = other DNA
ggcagggttaagacgtaagatgcaaaaagcagccatggagagaaactatctggcgtcagtccttgcggggaacgg

SEQ ID NO: 341617 - DNA, 75 bp, synthetic construct
  source 1..75: mol_type = other DNA
aaatccgtcttcatattgtttgcgatgtccctgatgaacttattgattttacgtttgaatggaaaggtctgaaga

SEQ ID NO: 341618 - DNA, 75 bp, synthetic construct
  source 1..75: mol_type = other DNA
attatttattcgctgtaaaaggaaaccaggggcggcttaataaagcctttgaggaaaaatttccgctgaaagaat

SEQ ID NO: 341619 - DNA, 75 bp, synthetic construct
  source 1..75: mol_type = other DNA
acaatgcacagtctggtcatcggacagatcaggacggatgagaaatccaatgagattacagctatccctgaactt

SEQ ID NO: 341620 - DNA, 75 bp, synthetic construct
  source 1..75: mol_type = other DNA
aatggtattcttcgtcgcttttcgtgcgatgtcgattggccgtaaagcgttagaaattgaccaccgcttttctgg

SEQ ID NO: 341621 - DNA, 75 bp, synthetic construct
  source 1..75: mol_type = other DNA
acgtaggcgcggcggcggggatgttaccgaccaaaggtctgacattgccgctgatcagttacggtggttcgagct

SEQ ID NO: 341622 - DNA, 75 bp, synthetic construct
  source 1..75: mol_type = other DNA
gaacttaaaaaattgatggaacatatttctattatccccgattacagacaagcctggaaagtggaacataaatta

SEQ ID NO: 341623 - DNA, 75 bp, synthetic construct
  source 1..75: mol_type = other DNA
ggcgtggcagcaatggttcaacaaactcccgcctgcacgtcgtgaggatgaagacgtgaaagagatccgttggat

SEQ ID NO: 341624 - DNA, 75 bp, synthetic construct
  source 1..75: mol_type = other DNA
tctgcataaagcgattggcgctgttctgagtgaaagcaacccggcttccgcccttaatcatctcaaccatgcgtt

SEQ ID NO: 341625 - DNA, 75 bp, synthetic construct
  source 1..75: mol_type = other DNA
gcacgtggagaataagctgcactggcgtctggacgtggtaatgaatgaagacgactgcaaaataagaagaggaaa

SEQ ID NO: 341626 - DNA, 75 bp, synthetic construct
  source 1..75: mol_type = other DNA
gcagggttaagacgtaagatgcgaaaagcagccatggacagaaactatctggcgtcagtccttgcggggagcggg

SEQ ID NO: 341627 - DNA, 75 bp, synthetic construct
  source 1..75: mol_type = other DNA
gaatgtacttgaagtacctgcctggcggcgtctgatgatgtactgcgcagtacatctcttctggcgtggtaacta

SEQ ID NO: 341628 - DNA, 75 bp, synthetic construct
  source 1..75: mol_type = other DNA
cgcatggtcgttatgcgaaagccgcgattattcatgactggctgtatgacaatgccctgcgcacgaaggcggaag

SEQ ID NO: 341629 - DNA, 75 bp, synthetic construct
  source 1..75: mol_type = other DNA
acggtcaaaaaagcggaaatcaaggtggagctgctgccgaagtacgccgcctgggcagagggcgtcctggctgcc

SEQ ID NO: 341630 - DNA, 75 bp, synthetic construct
  source 1..75: mol_type = other DNA
acggtcaaaaaagcggaaatcaaggtggagctgctaccgaaatatgccgcctgggtggagggcgtcctggctgcc

SEQ ID NO: 341631 - DNA, 75 bp, synthetic construct
  source 1..75: mol_type = other DNA
cattctgatctttatgagcggcgagcgggaaatccgcgataccgctgatgcactgaacaaactgaacttacgcca

SEQ ID NO: 341632 - DNA, 75 bp, synthetic construct
  source 1..75: mol_type = other DNA
ggattaaatacgttatcgaccccggtacagcgcgtatcagccgctacagctatcgcaccaaagtgcagcgtttgc

SEQ ID NO: 341633 - DNA, 75 bp, synthetic construct
  source 1..75: mol_type = other DNA
agggtactttaatgaattagaagatgccaaaaaagcttactgcgactttgccagaaagcatcacggcgaattcta

SEQ ID NO: 341634 - DNA, 75 bp, synthetic construct
  source 1..75: mol_type = other DNA
tggtaatgaatgaagacgactgcaaaataagaagaggaaacgcagcagaattattttcagggatacggcacatcg

SEQ ID NO: 341635 - DNA, 75 bp, synthetic construct
  source 1..75: mol_type = other DNA
aaagaaagagccagaaatgacggtcagatattatatcagttctgctgatttaaccgcagaaaagttcgccacagc

SEQ ID NO: 341636 - DNA, 75 bp, synthetic construct
  source 1..75: mol_type = other DNA
agaggaaatgcagcagaattattttcagggatacggcacatcgctattaatattttgacgaatgataaggtattc

SEQ ID NO: 341637 - DNA, 75 bp, synthetic construct
  source 1..75: mol_type = other DNA
attacagacaagccaggaaagtggagcataaattgtcagatattctacttttgactatttgtgccgttatttctg

SEQ ID NO: 341638 - DNA, 75 bp, synthetic construct
  source 1..75: mol_type = other DNA
tgacaagagtcgccataagggagcgattcatgtcattagtgcgttctcaacaatgcacagtctggtcatcgggca

SEQ ID NO: 341639 - DNA, 75 bp, synthetic construct
  source 1..75: mol_type = other DNA
ttgaatggaaagggctgaagaaattatgcgtggcagtctcctttcggtccataatagcagaacaaagaaagagcc

SEQ ID NO: 341640 - DNA, 75 bp, synthetic construct
  source 1..75: mol_type = other DNA
tgccagagttgtatcctgtatcagtcctagcaaaatttcatgagtgctttattaactggatgcgtgactgccatt

SEQ ID NO: 341641 - DNA, 75 bp, synthetic construct
  source 1..75: mol_type = other DNA
tgtatcagtcctgcaaaatttcatgagtgctttattaactggatgcgtgactgccattcttcagacgataaagac

SEQ ID NO: 341642 - DNA, 75 bp, synthetic construct
  source 1..75: mol_type = other DNA
tattcaaggcagggttaagacgtaagatgcgaaaagcagccatggacagaaactacctggcgtcagtccttgcgg

SEQ ID NO: 341643 - DNA, 75 bp, synthetic construct
  source 1..75: mol_type = other DNA
aacggtaaacccgttgaaggtcacgcttcccagatgcactacgaactggcaaaagattttgtcgttctgacgggt

SEQ ID NO: 341644 - DNA, 75 bp, synthetic construct
  source 1..75: mol_type = other DNA
aaggcagggttaagacgtaagatgcaaaaagcagccatggagagaaactatctggcgtcagtccttgcggggaac

SEQ ID NO: 341645 - DNA, 75 bp, synthetic construct
  source 1..75: mol_type = other DNA
ggcgcaaccggtcgtccggtagcgttgctggcacagttcctgctgaatcgcgctgggtttaacggcgaagagtaa

SEQ ID NO: 341646 - DNA, 75 bp, synthetic construct
  source 1..75: mol_type = other DNA
agagttgtatcctgtatcagtcctgcaaaatttcacgagtgctttattaactggatgcgtgattgccattcatca

SEQ ID NO: 341647 - DNA, 75 bp, synthetic construct
  source 1..75: mol_type = other DNA
cggcgaatgcacgccgtatccgcgttatggggaaagtgatgcctcggtaatggcgcaaattatgagcgtcgtgcc

SEQ ID NO: 341648 - DNA, 75 bp, synthetic construct
  source 1..75: mol_type = other DNA
caggctttcagcgacaaaggcaagcgcgtaaccaccgttctggtaccgtcgcagctgcaggacaaaaacaacaaa

SEQ ID NO: 341649 - DNA, 75 bp, synthetic construct
  source 1..75: mol_type = other DNA
tgataaggtattcaaggcagggttaagacgtaagatgcgaaaagcagctatggacagaaactatctggcgtcagt

SEQ ID NO: 341650 - DNA, 75 bp, synthetic construct
  source 1..75: mol_type = other DNA
taactgcagagaagttcgccacagcgatccgaaatcactggcacgtggagaataagctgcactggcgcctggacg

SEQ ID NO: 341651 - DNA, 75 bp, synthetic construct
  source 1..75: mol_type = other DNA
agttacgcaattagtgaaaagagtcacggcagagaagaaatccgtcttcatattgtttgcgatgtccctgatgaa

SEQ ID NO: 341652 - DNA, 75 bp, synthetic construct
  source 1..75: mol_type = other DNA
gacgaatgataaggtattcaaggcagggttaagacgtaagatgcgaaaagcagccatggacagaaactacctggc

SEQ ID NO: 341653 - DNA, 75 bp, synthetic construct
  source 1..75: mol_type = other DNA
atcaaaactgatgcgatgggttgccagaaagatattgcagagaagatacaaaaacagggtggtgatcatttattc

SEQ ID NO: 341654 - DNA, 75 bp, synthetic construct
  source 1..75: mol_type = other DNA
ccaggggcggctaaataaagcctttgaggaaaaatttccgctgaaagaattaaataatccagagcatgacagtta

SEQ ID NO: 341655 - DNA, 75 bp, synthetic construct
  source 1..75: mol_type = other DNA
gctgaaagaattaaataatccagagcatgacagttacgcaatcagtgaaaagagtcacggcagagaagaaatccg

SEQ ID NO: 341656 - DNA, 75 bp, synthetic construct
  source 1..75: mol_type = other DNA
gagaagttcgccacagcaatccgaaaccactggcacgtggagaataagctgcactggcgtctggacggtgtgccg

SEQ ID NO: 341657 - DNA, 75 bp, synthetic construct
  source 1..75: mol_type = other DNA
acggcacatcgctattaatattttgacgaatgataaggtattcaaggcagggttaagacgtaagatgcgaaaagc

SEQ ID NO: 341658 - DNA, 75 bp, synthetic construct
  source 1..75: mol_type = other DNA
tatgacaagagtcgccgcaggggagcgattcatgtcattagtgcgttctcaacaatgcacagtctggtcatcgga

SEQ ID NO: 341659 - DNA, 75 bp, synthetic construct
  source 1..75: mol_type = other DNA
caggggcggctaaataaagcctttgaggaaaaatttccgctgaaagaattaaataatccagagcatgacagttac

SEQ ID NO: 341660 - DNA, 75 bp, synthetic construct
  source 1..75: mol_type = other DNA
taatagcagaacaaaagaaagagccagaaatgacggtcagatattatatcagttctgctgatttaaccgcagaga

SEQ ID NO: 341661 - DNA, 75 bp, synthetic construct
  source 1..75: mol_type = other DNA
ggtgattatttattcgcggtaaaaggaaaccaggggcggctaaataaagcctttgaggaaaaatttccgctgaaa

SEQ ID NO: 341662 - DNA, 75 bp, synthetic construct
  source 1..75: mol_type = other DNA
tgggaactggcgcggtggctggacagctggatgataacggcgctgtatggttcagatacacattcgagtctgaat

SEQ ID NO: 341663 - DNA, 75 bp, synthetic construct
  source 1..75: mol_type = other DNA
aagtcatacctttcaagctgcatcaaaaagtggtgatcttgcatctagtggaatttcaaaaggtatgaataaata

SEQ ID NO: 341664 - DNA, 75 bp, synthetic construct
  source 1..75: mol_type = other DNA
tatgaaaggcgattacatgacgctgcagtcaaaactcccccgtgcagcttttccctggaatgaatcgcgggacag

SEQ ID NO: 341665 - DNA, 75 bp, synthetic construct
  source 1..75: mol_type = other DNA
tgccgctggtctttaaagtgctggggatctggctgaaagtgcgggaagagggggaggatgagggtaacaaaggtt

SEQ ID NO: 341666 - DNA, 75 bp, synthetic construct
  source 1..75: mol_type = other DNA
agtatgaaatcaggtacggataaagcaacacaagcaggagaaaagggaggggaagttgctaaaaaggctggagct

SEQ ID NO: 341667 - DNA, 75 bp, synthetic construct
  source 1..75: mol_type = other DNA
gcggcggccccgatctggtgggttgttgtgcacaagctttccaaaggggtgacacaggcggccgtggcgtccatt

SEQ ID NO: 341668 - DNA, 75 bp, synthetic construct
  source 1..75: mol_type = other DNA
acgggtaatcgccgcaggaaaatacacacaccggctcaggctcaagaagcaattacccgctggactgccacttgt

SEQ ID NO: 341669 - DNA, 75 bp, synthetic construct
  source 1..75: mol_type = other DNA
acgggtaatcgccgcaggaaaatacacacaccgactcaggctcaagaagcaattgcccgctggactgccacttgt

SEQ ID NO: 341670 - DNA, 75 bp, synthetic construct
  source 1..75: mol_type = other DNA
acgggtaatcgccgcagtaaaatacacacaccgtctcaggctcaagaagcaattgcccgctggactgccacttgt

SEQ ID NO: 341671 - DNA, 75 bp, synthetic construct
  source 1..75: mol_type = other DNA
tcagttggataggcagcagtacctttcttaaaggggactataccaccctgcagtcgaaattgccgcgcaggatgt

SEQ ID NO: 341672 - DNA, 75 bp, synthetic construct
  source 1..75: mol_type = other DNA
gtatttcgtatatacatacctcactggtcagtgttaacgaaagccgccctattgagtcaccaaacggaccacgaa

SEQ ID NO: 341673 - DNA, 75 bp, synthetic construct
  source 1..75: mol_type = other DNA
atgactgaaaacgaaattcaggaaaccattagagcattcggagatgtcacaaaaagggcgattaaagcaggtttt

SEQ ID NO: 341674 - DNA, 75 bp, synthetic construct
  source 1..75: mol_type = other DNA
cctgcctttgatacgatgcgacagtccttaccgatggtgcaggggctgatgttaatggcggtgtatatcatgatc

SEQ ID NO: 341675 - DNA, 75 bp, synthetic construct
  source 1..75: mol_type = other DNA
cgagctgcaagataaccgaacgctggaaattgccgagatttctcgctcactgaaggctttggcgaaggaattaca

SEQ ID NO: 341676 - DNA, 75 bp, synthetic construct
  source 1..75: mol_type = other DNA
tttaatggactgagtgataaaggttccgggcttgctaatgctgaatatttcataaccgatgccgctggagtggag

SEQ ID NO: 341677 - DNA, 75 bp, synthetic construct
  source 1..75: mol_type = other DNA
atttgccgccagagatgacgctaacacctgaacagcgtcaactggcgcaaaactggaatcaggggaacgggaaaa

SEQ ID NO: 341678 - DNA, 75 bp, synthetic construct
  source 1..75: mol_type = other DNA
aacccttttgctgagtatcgtattgaccattttggtcactattttttgttccgtcccgatcatcattgccgggat

SEQ ID NO: 341679 - DNA, 75 bp, synthetic construct
  source 1..75: mol_type = other DNA
atgatgttttataattgcgtgagacaattgatttattcgttttttattgcggttttattatcttttaatgtaacg

SEQ ID NO: 341680 - DNA, 75 bp, synthetic construct
  source 1..75: mol_type = other DNA
tttttgcgcggcgcaacggtcagatattggatccgcgatgttcagaagccgacgacagtgattgaaggcgaacaa

SEQ ID NO: 341681 - DNA, 75 bp, synthetic construct
  source 1..75: mol_type = other DNA
gctatgtgggcctgtcgaatgggcttctaatcgcacaaaaccatgaggttgttgcattagatattttgccttcac

SEQ ID NO: 341682 - DNA, 75 bp, synthetic construct
  source 1..75: mol_type = other DNA
aagattttattgccgatgccattttgtcacgcaaaccgcaagtggtgggtatttatcgtctgattatgaagagcg

SEQ ID NO: 341683 - DNA, 75 bp, synthetic construct
  source 1..75: mol_type = other DNA
gtacgacacaacccgggcaaagagctgtggtgtgtggacgcccaaagcgccggatgaaagcggctatgccggcgt

SEQ ID NO: 341684 - DNA, 75 bp, synthetic construct
  source 1..75: mol_type = other DNA
tgtgccgaataacctgatctcggcaattgtcgatgctaaccgcacgcgtaaagactttattgccgatgccatttt

SEQ ID NO: 341685 - DNA, 75 bp, synthetic construct
  source 1..75: mol_type = other DNA
tgttcccaataatattatctccgccatcgttgaggctaatcgtacccggaaagacttcatcgctgatgctatctt

SEQ ID NO: 341686 - DNA, 75 bp, synthetic construct
  source 1..75: mol_type = other DNA
gataatctccatccttcacgtattgtcatcggtgagcgttcagaacgcgcagaacgttttgctgcgctgttacag

SEQ ID NO: 341687 - DNA, 75 bp, synthetic construct
  source 1..75: mol_type = other DNA
acgggtaatcgccgcagaaaaatacacacaccggctcaggctcaagaagcaattgcccgctggactgccacttgt

SEQ ID NO: 341688 - DNA, 75 bp, synthetic construct
  source 1..75: mol_type = other DNA
ggggcgttggttctagattatggccgctttctagggaacagtacccaaaacaatttcttacattattaaatgata

SEQ ID NO: 341689 - DNA, 75 bp, synthetic construct
  source 1..75: mol_type = other DNA
atgccatcgttgtacctatggatgcagaatggtctgatgttggttcgtggtcttcattatgggatatttcagata

SEQ ID NO: 341690 - DNA, 75 bp, synthetic construct
  source 1..75: mol_type = other DNA
acatcattatgggatatttcggaaaaagatgaaaatggaaaccatattattggtgatagtttactcatagattca

SEQ ID NO: 341691 - DNA, 75 bp, synthetic construct
  source 1..75: mol_type = other DNA
agatattgcacagctggcagctccggcactggcttctataagagagatcattactcaggcgcacgataacgggtc

SEQ ID NO: 341692 - DNA, 75 bp, synthetic construct
  source 1..75: mol_type = other DNA
tcaggcacgaatgtctgaccatgcgggatttatttgccatgccgataaagtccgacgcgccactcgtgatgccct

SEQ ID NO: 341693 - DNA, 75 bp, synthetic construct
  source 1..75: mol_type = other DNA
ttactgtgaggcctggagggaaactatcaatgcaaatacattatcatcgtgctgaacattgggttattgtctctg

SEQ ID NO: 341694 - DNA, 75 bp, synthetic construct
  source 1..75: mol_type = other DNA
ggctatggttacattaagtcaggtgaatctctggatggacaaggttacaaagttgcggcttttgttgaaaaacca

SEQ ID NO: 341695 - DNA, 75 bp, synthetic construct
  source 1..75: mol_type = other DNA
aagttcagcaagttaaaaacatcgtcgctcaacttaaaaagaataatcgaacagaatatttacagcatcgggaaa

SEQ ID NO: 341696 - DNA, 75 bp, synthetic construct
  source 1..75: mol_type = other DNA
ttgtcagcaatccttagcttcctcgactcaagatttagattttatccgcttggataactcttctttttcttgctg

SEQ ID NO: 341697 - DNA, 75 bp, synthetic construct
  source 1..75: mol_type = other DNA
ttggaatagtggtatctttctatttaaagcctctaaattccttgatgagctaaagaaattatcaccatctatcta

SEQ ID NO: 341698 - DNA, 75 bp, synthetic construct
  source 1..75: mol_type = other DNA
aggatggaatgttagtgacgtttggtattgttcctacacatccagaaactgggtatgggtatattaaacaagggc

SEQ ID NO: 341699 - DNA, 75 bp, synthetic construct
  source 1..75: mol_type = other DNA
actcgcagcacttcaggctatggtaactggagatgatcctattctgttggttcttgctgctgatcatgaaatcca

SEQ ID NO: 341700 - DNA, 75 bp, synthetic construct
  source 1..75: mol_type = other DNA
acatgtgggtgaagttgccgagctgtttatgtggcggcatatggcactgacttctgccgccgtattaacgcaatt

SEQ ID NO: 341701 - DNA, 75 bp, synthetic construct
  source 1..75: mol_type = other DNA
gtatttcgtatatacatacctcgctggtcagtattatcatagctaccctgttgaggctgccaaatggcccccgaa

SEQ ID NO: 341702 - DNA, 75 bp, synthetic construct
  source 1..75: mol_type = other DNA
gaactgatccgggcatacggcgaattaaagcagaatgagacaccagaaaggcacagtgagggacaggcagaaaat

SEQ ID NO: 341703 - DNA, 75 bp, synthetic construct
  source 1..75: mol_type = other DNA
tttccggcgtttgatgcgatgcggcaggcgctgccgatggtgcagagtattctgctgatggcggtgtatatcatg

SEQ ID NO: 341704 - DNA, 75 bp, synthetic construct
  source 1..75: mol_type = other DNA
cgcagcaaaatacacacaccgtctcaggctcaagaagcaattacccgctggtctgccacttgttgcgatccgaca

SEQ ID NO: 341705 - DNA, 75 bp, synthetic construct
  source 1..75: mol_type = other DNA
cgcagtaaaatacacacaccgtctcaggctcaagaagcaattacccgctgggctgccacttgttgcgatccggca

SEQ ID NO: 341706 - DNA, 75 bp, synthetic construct
  source 1..75: mol_type = other DNA
cgcagaaaaatacacacaccgtctcaggctcaagaagcaattacccgctgggctgccacttgttgcgatccgtca

SEQ ID NO: 341707 - DNA, 75 bp, synthetic construct
  source 1..75: mol_type = other DNA
tggcttatctgacacgcacctttcgtgcagaggccgggattgtgatttctgcatcgcataacccgttctacgata

SEQ ID NO: 341708 - DNA, 75 bp, synthetic construct
  source 1..75: mol_type = other DNA
aaaaggctggcgtattggcgcggagaactctggtcacgtgatcctgctggataaaacgaccacaggtgacggcat

SEQ ID NO: 341709 - DNA, 75 bp, synthetic construct
  source 1..75: mol_type = other DNA
gcggccgatcatcgaccgccaactcggccgcgaggttatgggcatcgtgcagggcgggtcggtgtcgtggcagtt

SEQ ID NO: 341710 - DNA, 75 bp, synthetic construct
  source 1..75: mol_type = other DNA
gagatagcccagctcaggcaggcgctggagcaggaaaagaaacggggattctggtcccggttgtttggtcgctga

SEQ ID NO: 341711 - DNA, 75 bp, synthetic construct
  source 1..75: mol_type = other DNA
aaaaagagatcagctgcgttgattcggcagaactgggtaaagccagccgtatcgttgatgccgcgggtcgctata

SEQ ID NO: 341712 - DNA, 75 bp, synthetic construct
  source 1..75: mol_type = other DNA
gtgcgttataccgcaggcagcggcgatccgctggagcatgagtctgttaaagccgtgaccgccgaagttgaagcg

SEQ ID NO: 341713 - DNA, 75 bp, synthetic construct
  source 1..75: mol_type = other DNA
ctgcaaggtgcgaaatgggaaattccgcatcaggaaattcagaatgcgacgaaagcctgccacgggctatttcca

SEQ ID NO: 341714 - DNA, 75 bp, synthetic construct
  source 1..75: mol_type = other DNA
cagcacaatcctgttccgcaacagcgaaggtattcctctggcagaaatcacgtttaccctgtgtgaatatcaggg

SEQ ID NO: 341715 - DNA, 75 bp, synthetic construct
  source 1..75: mol_type = other DNA
atgaatatgtcgcagctaaccgaacggacctttacgtcatctgaatctctcagcagcctgtcactttttcttagt

SEQ ID NO: 341716 - DNA, 75 bp, synthetic construct
  source 1..75: mol_type = other DNA
gtatggaaccgctgccgacatttatcgctaatgacgtgataaaaatgcctgatgttccccgctatactgaagaat

SEQ ID NO: 341717 - DNA, 75 bp, synthetic construct
  source 1..75: mol_type = other DNA
gctgtatgccagcgatggccgtacccgcaaagatccgtcaaaaaatacggttccggcggcctggtacagggcaaa

SEQ ID NO: 341718 - DNA, 75 bp, synthetic construct
  source 1..75: mol_type = other DNA
ggccacgctacaacaggatggaactataccaatagaagctggtgagtttaaagccaccagtactttccaggtaac

SEQ ID NO: 341719 - DNA, 75 bp, synthetic construct
  source 1..75: mol_type = other DNA
ctggctgcgaaagtacagacggcgctgaaagacgatccccatgtccggccatgttttcattttccggggccgcag

SEQ ID NO: 341720 - DNA, 75 bp, synthetic construct
  source 1..75: mol_type = other DNA
gtgtatctgccgttccataaagcaaaccaattcctcggtatggaaccgctgccgacatttatcgctaatgacgtg

SEQ ID NO: 341721 - DNA, 75 bp, synthetic construct
  source 1..75: mol_type = other DNA
ttgaaggttggcattatggcactaaagaaatcgttaaaaaattccacatgtatcatcgtgttgcgattgaatata

SEQ ID NO: 341722 - DNA, 75 bp, synthetic construct
  source 1..75: mol_type = other DNA
acagatagcacgaaaagagattgccgaaatcaaaaaaaaaaaaaaaaaaaaaaaaaaaaaaaaaaaaacaaaaaa

SEQ ID NO: 341723 - DNA, 75 bp, synthetic construct
  source 1..75: mol_type = other DNA
ggtatccctctggcggagctcacctttactctttgtgaatatcaggggaaaagaacgatgtttattggcgggcta

SEQ ID NO: 341724 - DNA, 75 bp, synthetic construct
  source 1..75: mol_type = other DNA
atacccccgggctgcaactggcgaagctggaaggaaaaaacggcgagcagtttacgcttgagctgaccatgatga

SEQ ID NO: 341725 - DNA, 75 bp, synthetic construct
  source 1..75: mol_type = other DNA
ttgctgatgaattactgtcactgggtgccgtcagtgttgaaactgcgcgccaggtaacggaagcatcggacatca

SEQ ID NO: 341726 - DNA, 75 bp, synthetic construct
  source 1..75: mol_type = other DNA
tatcggagcgtttgcctgccgagcatcggcccatcatttgcaaggcacgcgcggcgtacctgggtagcgaggacg

SEQ ID NO: 341727 - DNA, 75 bp, synthetic construct
  source 1..75: mol_type = other DNA
gccaggagttatttaatacctgtgcggcaaacggtggcagccagttggatcactctgcgggtgatgctgccaact

SEQ ID NO: 341728 - DNA, 75 bp, synthetic construct
  source 1..75: mol_type = other DNA
tgaacgtgttaaaccgctgtttgaactgctcggtaaaaatatcacccttgtgggcggtaacggcgacggtcaaac

SEQ ID NO: 341729 - DNA, 75 bp, synthetic construct
  source 1..75: mol_type = other DNA
tcgatggaaggcgccgcgattatgggcagttatgccgaacgtgggcaggcatcactggatgcgggttgcgatatg

SEQ ID NO: 341730 - DNA, 75 bp, synthetic construct
  source 1..75: mol_type = other DNA
aaggttacgaactggacgcggaagagcgtgaaatactggcgcatccgctggtgggagggctgattctctttacgc

SEQ ID NO: 341731 - DNA, 75 bp, synthetic construct
  source 1..75: mol_type = other DNA
gtaacggcagactcacacaaagaaacaccgtgcgacccacgtccgcaagcggagattcgcgctaaagatatgtcg

SEQ ID NO: 341732 - DNA, 75 bp, synthetic construct
  source 1..75: mol_type = other DNA
ctgaatctgccaaacaccgcgacctgccaggagttatttaatacctgtgcggcaaacggtggcagccagttggat

SEQ ID NO: 341733 - DNA, 75 bp, synthetic construct
  source 1..75: mol_type = other DNA
cttcctcacgtattctggaagttcacggtgagcgcatgattaaacgcacctttaatccaggtttcaaaattgcgc

SEQ ID NO: 341734 - DNA, 75 bp, synthetic construct
  source 1..75: mol_type = other DNA
cactctgcgttagtgcaggcgggtaatgactccaacttattgatagtgttttatgttcagataatgcccgatgac

SEQ ID NO: 341735 - DNA, 75 bp, synthetic construct
  source 1..75: mol_type = other DNA
ctgcaaagtggcaaatcagattatcgtggcgctcaatattgaagcggtttctgaagccctgctgtttgcttcaaa

SEQ ID NO: 341736 - DNA, 75 bp, synthetic construct
  source 1..75: mol_type = other DNA
gtggcgctcaatattgaagcggtttctgaagccctgctatttgcttcaaaagccggagcggatccggtacgtgtg

SEQ ID NO: 341737 - DNA, 75 bp, synthetic construct
  source 1..75: mol_type = other DNA
tgaagggcaaaaccattgttgatatgagctccatttccccgatcgaaactaaacgtttcgctcgtcaggtgaatg

SEQ ID NO: 341738 - DNA, 75 bp, synthetic construct
  source 1..75: mol_type = other DNA
agttgatagcgcagttttcaagcggtaatcaaacacgtataaaacaaggattaatcgcaaaagcaccacttgaag

SEQ ID NO: 341739 - DNA, 75 bp, synthetic construct
  source 1..75: mol_type = other DNA
acgttctggatggcctgaaagaggttaaactctgcgtggcttaccgtatgacggatggtcgcgaagtgactacca

SEQ ID NO: 341740 - DNA, 75 bp, synthetic construct
  source 1..75: mol_type = other DNA
agaacgccagaactaggcgcctggaaacgcagccagtactttcagagaaaaccggtgttacgtcaggaaaggaaa

SEQ ID NO: 341741 - DNA, 75 bp, synthetic construct
  source 1..75: mol_type = other DNA
agatgcctggcgtgatgattcgcgacagagatttaaagaagcttttcgggtgttgaggccgcacggcgttctgat

SEQ ID NO: 341742 - DNA, 75 bp, synthetic construct
  source 1..75: mol_type = other DNA
atggtggttgacgtttctgacctgctcgaccaggcgcgtcaacgtggcgatttcgtcatgttcgaaggtgcgcag

SEQ ID NO: 341743 - DNA, 75 bp, synthetic construct
  source 1..75: mol_type = other DNA
accagaaagttctggatgatgtgatggcggttgctgacatcctgacttctatggtggttgacgtttctgacctgc

SEQ ID NO: 341744 - DNA, 75 bp, synthetic construct
  source 1..75: mol_type = other DNA
tcgtgcggtacaactgaactccctgtctggcttctgcctgactaaactggacgttctggatggcctgaaagaggt

SEQ ID NO: 341745 - DNA, 75 bp, synthetic construct
  source 1..75: mol_type = other DNA
ttatgacgagaatactcgctacgataactcttttgctgagtatcgtattgaccattttggttaccattttttgtt

SEQ ID NO: 341746 - DNA, 75 bp, synthetic construct
  source 1..75: mol_type = other DNA
tattacgtcatccggagcggcgtggtaaagatgttgaaaccactcggcgctcatgcgagaagtttcgtcggcatc

SEQ ID NO: 341747 - DNA, 75 bp, synthetic construct
  source 1..75: mol_type = other DNA
tgaagcgttattcccgcgcttatttattacgtcatccggagcgacgtggtaaagatgttgaaaccactcggcgtt

SEQ ID NO: 341748 - DNA, 75 bp, synthetic construct
  source 1..75: mol_type = other DNA
cctgttcgccagatattgatactgaccgacagaaaacctgttatcggtcaacgaacaggaaaaaacgataaaacc

SEQ ID NO: 341749 - DNA, 75 bp, synthetic construct
  source 1..75: mol_type = other DNA
ttttaaatggaatgaaacgcaaatacctgttcgccagatattgatactgaccgacagaaaacctgttatcggtca

SEQ ID NO: 341750 - DNA, 75 bp, synthetic construct
  source 1..75: mol_type = other DNA
catcaaaaaacccattcggcatttcaaaatcttctgccgccaaaagctgccggtattgcgatggcactgaatgtg

SEQ ID NO: 341751 - DNA, 75 bp, synthetic construct
  source 1..75: mol_type = other DNA
caagcagggtaacgaatttggcgcgacaacgggtcgtcgccgtcgtaccggctggttggacaccgttgctgttcg

SEQ ID NO: 341752 - DNA, 75 bp, synthetic construct
  source 1..75: mol_type = other DNA
gtgcaacctgttttcatgagaaaagttttggcagtcagatcagagactctctgagagcgtcccgggaaaggcgtg

SEQ ID NO: 341753 - DNA, 75 bp, synthetic construct
  source 1..75: mol_type = other DNA
ttttacaatatgccccatatgctctcaggaaaaaatgtgttctggatgaagcacttgacatactggcggaacaaa

SEQ ID NO: 341754 - DNA, 75 bp, synthetic construct
  source 1..75: mol_type = other DNA
acagtaataacgctggaaagtactaatagcgccatttatctcattgaattttatttcaagcatcttatatataaa

SEQ ID NO: 341755 - DNA, 75 bp, synthetic construct
  source 1..75: mol_type = other DNA
tcgttatgttttcaacattactggctgctttcagttttgtaagtacaatggggctggcgaacgcagtccccccca

SEQ ID NO: 341756 - DNA, 75 bp, synthetic construct
  source 1..75: mol_type = other DNA
ataatccgcgctgttcaaagagtcgcgaaacgctgaacctgctgaaagaaaacggcgtggagccagaagtagtgc

SEQ ID NO: 341757 - DNA, 75 bp, synthetic construct
  source 1..75: mol_type = other DNA
aattgatgcgccagaaagaggatctttataaagaactgaacctggctgacagttcgcttagcgaagaggcgctga

SEQ ID NO: 341758 - DNA, 75 bp, synthetic construct
  source 1..75: mol_type = other DNA
gtacttatccgtacgtaacctcttccaacaccactgcgggcggcgtggcgaccggttccggcctgggcccacgtt

SEQ ID NO: 341759 - DNA, 75 bp, synthetic construct
  source 1..75: mol_type = other DNA
gtacttatccgtacgtaacttcttccaacaccactgctggtggcgtggcgaccggttccggcctgggtccgcgtt

SEQ ID NO: 341760 - DNA, 75 bp, synthetic construct
  source 1..75: mol_type = other DNA
caaagcttactccactcgtgtgggtgcaggtccgttcccgactgaattgtttgatgaaactggcgagttcctctg

SEQ ID NO: 341761 - DNA, 75 bp, synthetic construct
  source 1..75: mol_type = other DNA
atgtttttatgtcgatttatttatcaaataaaaagaacatggaaaatggaatctaaaaataaaaatggcgactat

SEQ ID NO: 341762 - DNA, 75 bp, synthetic construct
  source 1..75: mol_type = other DNA
aagggccggaacagagtcgcttttaattatgaatgttgtaactacatcttcatcgctgtcagtcttctcgctgga

SEQ ID NO: 341763 - DNA, 75 bp, synthetic construct
  source 1..75: mol_type = other DNA
accggctgacgccgggcttcggcggttttactcctgtgccatatgctacaacggagtgccgccttccatgccgct

SEQ ID NO: 341764 - DNA, 75 bp, synthetic construct
  source 1..75: mol_type = other DNA
aaaatccgctgcgctcggcgacgttaaagggccaatggatgccgccagccagcaggcgtggggagcgtttttctg

SEQ ID NO: 341765 - DNA, 75 bp, synthetic construct
  source 1..75: mol_type = other DNA
ggctggcgtctgctgtggctgacgctggaaaatggcgcaagcagcgtgctggtgccggttgaaggggttaaaaat

SEQ ID NO: 341766 - DNA, 75 bp, synthetic construct
  source 1..75: mol_type = other DNA
ggcgggcgattttatgtcgctttgcaaaaacgccgaactggcgtgcgaagtgactttgcagccgctgcgtcgcta

SEQ ID NO: 341767 - DNA, 75 bp, synthetic construct
  source 1..75: mol_type = other DNA
ccgcaccattccgctgaactccctggcgcggcaggaggaagatttagacctgctgaaaacggctgccccgacggt

SEQ ID NO: 341768 - DNA, 75 bp, synthetic construct
  source 1..75: mol_type = other DNA
tcttaaccggcttgttgctggtggcgctggcagtgattgcctgcggcgcagtggcccgtctcggctggcgcaaag

SEQ ID NO: 341769 - DNA, 75 bp, synthetic construct
  source 1..75: mol_type = other DNA
aaaaagacggtcttatcagcaactaccgcactattccgctgaactccctggtgcggcaggaggaagatttacatc

SEQ ID NO: 341770 - DNA, 75 bp, synthetic construct
  source 1..75: mol_type = other DNA
ttagtaataatgccattgatagtaattatgggaatatttatatatatcatgcgtgataaaattatctttctttta

SEQ ID NO: 341771 - DNA, 75 bp, synthetic construct
  source 1..75: mol_type = other DNA
cgtttgatatgcagcaaacccaccagctcatcacgaccctgaatacgctggaaaaggatctgaaaacgcgttacc

SEQ ID NO: 341772 - DNA, 75 bp, synthetic construct
  source 1..75: mol_type = other DNA
cggctatttccggcagatttttcgcaagcacaccggtttaacgcctgccgcctggaaacggcgttacagcaagga

SEQ ID NO: 341773 - DNA, 75 bp, synthetic construct
  source 1..75: mol_type = other DNA
caggatgtgccgccagaacatgctggcgtgtttgtggaggcagtgcatcgcttgtctgaacagtatcaccgctaa

SEQ ID NO: 341774 - DNA, 75 bp, synthetic construct
  source 1..75: mol_type = other DNA
ggatccgtcgatgctgtacgcgccgcctgcccgcattgaagaagaagtggcgacaatccttgccggtttcggtca

SEQ ID NO: 341775 - DNA, 75 bp, synthetic construct
  source 1..75: mol_type = other DNA
tggaaaacggcgaaagcggcgtactggtgccggttgaaggggttaaaagtagcgcgttgttgcaggaaatcgcca

SEQ ID NO: 341776 - DNA, 75 bp, synthetic construct
  source 1..75: mol_type = other DNA
aaccgctgttaatgcaccatattaccgccaccagccgcgtcggggtgattggcattggcgggctggggcatatcg

SEQ ID NO: 341777 - DNA, 75 bp, synthetic construct
  source 1..75: mol_type = other DNA
acaaatggagatttaaccaaagcaaccagcgttaaatggtgggagtggttggaagatttcaagcctgatggggga

SEQ ID NO: 341778 - DNA, 75 bp, synthetic construct
  source 1..75: mol_type = other DNA
aaatcgggtgtgagttattcggcccaaactggattactcctgtctcgcgtatgctggaaattaacgaatcaacaa

SEQ ID NO: 341779 - DNA, 75 bp, synthetic construct
  source 1..75: mol_type = other DNA
ttacttgccaccgataaggctcatgcactcattgcagttcttccacaagccatcaaatcaccaggcatgactgcg

SEQ ID NO: 341780 - DNA, 75 bp, synthetic construct
  source 1..75: mol_type = other DNA
atggtgcaatacaatgacggtgaaaaggtaagcatccagtctgatggctggtatgggctggatagcctgcaaaaa

SEQ ID NO: 341781 - DNA, 75 bp, synthetic construct
  source 1..75: mol_type = other DNA
ctaaagccgtatatcagcatagtgctaacgctaatcctcatcttgcgcccggaacaggcgttcagaataccatct

SEQ ID NO: 341782 - DNA, 75 bp, synthetic construct
  source 1..75: mol_type = other DNA
ctaaagctgtatatcagcatagcgcgaatgctaatccccatctcgctcccggttcgggtgttcagaataccatct

SEQ ID NO: 341783 - DNA, 75 bp, synthetic construct
  source 1..75: mol_type = other DNA
cagaaagagtgatgaggcctttgagctgatatttgagttaattgaacaaagttgttccctctgggcaaaaaagtt

SEQ ID NO: 341784 - DNA, 75 bp, synthetic construct
  source 1..75: mol_type = other DNA
gagaagttgcgtgcggactggcaatgggtaatcccactgccagaaaatatcgacattgaatctgctgggccgctg

SEQ ID NO: 341785 - DNA, 75 bp, synthetic construct
  source 1..75: mol_type = other DNA
gcgcgtggtggcactcgggagcgccgcgcaggataaaggtttgcaggtcggtcagcgtgtcgggattggctggac

SEQ ID NO: 341786 - DNA, 75 bp, synthetic construct
  source 1..75: mol_type = other DNA
tcatccagggcgctgttgataaaggctacttcaagcgtcagaaaaaggtactgcttgcaactgataaggctcatg

SEQ ID NO: 341787 - DNA, 75 bp, synthetic construct
  source 1..75: mol_type = other DNA
ccccagggttagccaaggcgaaccagctttgcttaatggcgcagaactggcgaacaaaatgacgcgaccaccacc

SEQ ID NO: 341788 - DNA, 75 bp, synthetic construct
  source 1..75: mol_type = other DNA
gatgggtttctccatgatggaggaagccgagtaattacctgggcgttcggccacctcctggaattatatatgcca

SEQ ID NO: 341789 - DNA, 75 bp, synthetic construct
  source 1..75: mol_type = other DNA
cgaagccgaaaagctgttaattagcgacgcgcgctcgcttactgaagtggcggcgttgtgcgggtttaatgacgt

SEQ ID NO: 341790 - DNA, 75 bp, synthetic construct
  source 1..75: mol_type = other DNA
aagccctggcgcaggccgggcttgccggattcgaagatattccggtaaatcaactttctgccgggcaacaacgcc

SEQ ID NO: 341791 - DNA, 75 bp, synthetic construct
  source 1..75: mol_type = other DNA
tatcttgtgaaaaataatatcgatctgttccgtgtgtattattatattgtgttatctttccttttattacttatg

SEQ ID NO: 341792 - DNA, 75 bp, synthetic construct
  source 1..75: mol_type = other DNA
taatcaccatactctgcatggctatggtacaacttaattatgagattgggatttcattaatcttggctgtatcta

SEQ ID NO: 341793 - DNA, 75 bp, synthetic construct
  source 1..75: mol_type = other DNA
accagccgctcaacgttgctgaaagtaaaattcgccgcatttcactgacgcaaacggggccgcatgatgttctgg

SEQ ID NO: 341794 - DNA, 75 bp, synthetic construct
  source 1..75: mol_type = other DNA
ggggggatcgtgattctgaccactcaccagccgctcaacgttgctgaaagtaaaatccgccgcatttcgctgacg

SEQ ID NO: 341795 - DNA, 75 bp, synthetic construct
  source 1..75: mol_type = other DNA
caactttctgccgggcaacaacgccgcgtcgctttagcgcgtctgtggctgacccgtgccacgttatggatcctc

SEQ ID NO: 341796 - DNA, 75 bp, synthetic construct
  source 1..75: mol_type = other DNA
aactgggcggagcttgagcgagacgcccaccgcctgctggcgcgcagcaaagatatccgcatcctggtgatccta

SEQ ID NO: 341797 - DNA, 75 bp, synthetic construct
  source 1..75: mol_type = other DNA
ttcccgtgtattacccgactctttttttaacaacccaaatccgcaacagaggggatgctttttcaactatgctag

SEQ ID NO: 341798 - DNA, 75 bp, synthetic construct
  source 1..75: mol_type = other DNA
cattcagcaaaaaggttttgaggccgccttggctttacaagagggaaatggcactcgcttaccaaaggacatgaa

SEQ ID NO: 341799 - DNA, 75 bp, synthetic construct
  source 1..75: mol_type = other DNA
ttaattaaaaaagaggataagcctactctgagattgaacttggaacaaatgattttttatcaaaaatatcgtggt

SEQ ID NO: 341800 - DNA, 75 bp, synthetic construct
  source 1..75: mol_type = other DNA
atggatacatccctgtctgacccaatttcggaagaatgcccctgcggcccggatctggagtacgatccggaatac

SEQ ID NO: 341801 - DNA, 75 bp, synthetic construct
  source 1..75: mol_type = other DNA
gaaatgaccatgaagctcagcgcagaaccccggcagatccgcgaccggaacgacgcgctggaacgtctgcgggtg

SEQ ID NO: 341802 - DNA, 75 bp, synthetic construct
  source 1..75: mol_type = other DNA
caatacaggcaggcaaaacaaggcgagtctggcggccatgaatcttctggtcaatgccggtatcccggttcgcac

SEQ ID NO: 341803 - DNA, 75 bp, synthetic construct
  source 1..75: mol_type = other DNA
ttcagcaagtatctaactctgccagttctcatgtcttttggttttttgaaaggctgatggggctattaacaggtg

SEQ ID NO: 341804 - DNA, 75 bp, synthetic construct
  source 1..75: mol_type = other DNA
gagaaatttcgactgcatcccaccaccattgttaattttgtcgaaggctcccgcttcactgaagagaaacaccag

SEQ ID NO: 341805 - DNA, 75 bp, synthetic construct
  source 1..75: mol_type = other DNA
gcaaattcactatggacagggaaaagtaaattttaacggtaaagaaatgacggatatggagtttttaatgcgcat

SEQ ID NO: 341806 - DNA, 75 bp, synthetic construct
  source 1..75: mol_type = other DNA
atgcatgcgaccacagtgaaaaacaaaatcacgcaaagagacaactataaagaaatcatgtctgtaattgtggtt

SEQ ID NO: 341807 - DNA, 75 bp, synthetic construct
  source 1..75: mol_type = other DNA
agttaatccaggcaagaacggcgcattaacttatgcaaatctcaataagcaacgacgacttgttggtgatgcact

SEQ ID NO: 341808 - DNA, 75 bp, synthetic construct
  source 1..75: mol_type = other DNA
gtctgatgtgctgaatctgaaagcggataccatgtttacgctgttgcctcgcgtgacatcgccgcgactggatga

SEQ ID NO: 341809 - DNA, 75 bp, synthetic construct
  source 1..75: mol_type = other DNA
tcctggcggtctgtttaatagtttcaggtggtgcagtcgctcagccaacggtacaggcaggattttcacccgagg

SEQ ID NO: 341810 - DNA, 75 bp, synthetic construct
  source 1..75: mol_type = other DNA
agtgtcgcagtacaaaattatgcatgacaaagtcatcattgctgatggccgcaatattgaagtcgggtcttttaa

SEQ ID NO: 341811 - DNA, 75 bp, synthetic construct
  source 1..75: mol_type = other DNA
ctacactcgagccgctgatcggttcaattcagagaacgtgctagtcgtgtgggatgaaccagtcgttgctcaacg

SEQ ID NO: 341812 - DNA, 75 bp, synthetic construct
  source 1..75: mol_type = other DNA
gatatgacgctaagttgtaaagattataaaagaggtttttttagttcatcttttcaagtagctctgacctttaat

SEQ ID NO: 341813 - DNA, 75 bp, synthetic construct
  source 1..75: mol_type = other DNA
atggcacgacctcagacggttaatcagttacctgaccccatcaagaagaaactgaataaaaagctgactgaaagt

SEQ ID NO: 341814 - DNA, 75 bp, synthetic construct
  source 1..75: mol_type = other DNA
tatgggcacactggttctgcatcgggaaaatcacaatctgattctcgacggacatttaaaaccaaacgagcttac

SEQ ID NO: 341815 - DNA, 75 bp, synthetic construct
  source 1..75: mol_type = other DNA
gctggctggacaccgttgccgttcgtcgtgcggtacagctgaactccctgtctggcttctgcctgactaaactgg

SEQ ID NO: 341816 - DNA, 75 bp, synthetic construct
  source 1..75: mol_type = other DNA
agagaaagaggtggagaatacggggccaccaccggtagaccaagaaggtgtggatggttagatttggtgatggta

SEQ ID NO: 341817 - DNA, 75 bp, synthetic construct
  source 1..75: mol_type = other DNA
gcgtttgtcacgattggtcagcgtcatatgcgtgatgcccgtcggctggtgatgcgccgtgcgcggtcggcaccg

SEQ ID NO: 341818 - DNA, 75 bp, synthetic construct
  source 1..75: mol_type = other DNA
ggcgtccccctggcggggcgggctgtcgtgaacggagccagcgaagctgtctccgccctggcgggcttccatccc

SEQ ID NO: 341819 - DNA, 75 bp, synthetic construct
  source 1..75: mol_type = other DNA
ttcttgaacgtattcgcagacttgcaccacaggggggcggttccaccgtaccggacggtggaggagtggcgggaa

SEQ ID NO: 341820 - DNA, 75 bp, synthetic construct
  source 1..75: mol_type = other DNA
ctctggaaggtcactgtgcgcggcaaatcagccgccgcctgtgtcgcaactacgacctgattttgaccatggaaa

SEQ ID NO: 341821 - DNA, 75 bp, synthetic construct
  source 1..75: mol_type = other DNA
cattacgactctgacgcataccgtcagcccggataacggttttacgaccagtctggagcttgaagtgaggattga

SEQ ID NO: 341822 - DNA, 75 bp, synthetic construct
  source 1..75: mol_type = other DNA
caatacatccagtgtagaatcagtaattaaagacgtagttgagataaatccttatgcggttatggtaatcaaatc

SEQ ID NO: 341823 - DNA, 75 bp, synthetic construct
  source 1..75: mol_type = other DNA
cagcagtttttgcaatcagataaaatacactttaatgccacattagataaaaatgaagcctaccgggatgctgat

SEQ ID NO: 341824 - DNA, 75 bp, synthetic construct
  source 1..75: mol_type = other DNA
aaaactagtattaagactatcacttatttaagtgatattggttgtctggagattcagggggccagtctaccgcat

SEQ ID NO: 341825 - DNA, 75 bp, synthetic construct
  source 1..75: mol_type = other DNA
gacgcctggctcgttcgattggttacatggtgccgagagccagtaaaaagcgagccggttttatgacacgcattg

SEQ ID NO: 341826 - DNA, 75 bp, synthetic construct
  source 1..75: mol_type = other DNA
aagccgacgtcattatttccaaccgtatggcagaagagcttaaggatgtggcagataaagtctacacccgcgatc

SEQ ID NO: 341827 - DNA, 75 bp, synthetic construct
  source 1..75: mol_type = other DNA
ttcattgaccacgcaaatactggcgtcaatatttttgttactcttctacctggtattgagggagttaacaaagct

SEQ ID NO: 341828 - DNA, 75 bp, synthetic construct
  source 1..75: mol_type = other DNA
ggccttttctgcggatgagcatttctacaacaatgttctgctccctgctggtgggggtgagcgcgttttattcgt

SEQ ID NO: 341829 - DNA, 75 bp, synthetic construct
  source 1..75: mol_type = other DNA
tacctggtgtcggtgagaatgcccggcgggataaggagtatgaagatttataccgcaatttgcttccctccctgg

SEQ ID NO: 341830 - DNA, 75 bp, synthetic construct
  source 1..75: mol_type = other DNA
cgaagttaatcgtctggcaaaagaagggcgttttgatcagcttgtcattgagtccaccggtatatctgagcctct

SEQ ID NO: 341831 - DNA, 75 bp, synthetic construct
  source 1..75: mol_type = other DNA
ccgacaggggccaagtccgcgctggtatcagcaggattgtgcgggcctggtgcgattttcggcgaacgaggcgct

SEQ ID NO: 341832 - DNA, 75 bp, synthetic construct
  source 1..75: mol_type = other DNA
ccgccagggtccaagtccacgctggtatcagcaggattgtgcgggcctggtgcgatttgcggcgaacgaggcgct

SEQ ID NO: 341833 - DNA, 75 bp, synthetic construct
  source 1..75: mol_type = other DNA
tggcagtaaagaggaagtgctctcctattttgaaggcattcatccacgcccgcgccagatgctggataaaccgac

SEQ ID NO: 341834 - DNA, 75 bp, synthetic construct
  source 1..75: mol_type = other DNA
tctgattgttgccggacagttgcgaacaccagagcaagccgagaatgctgttaaagcaggggtatctttgactgc

SEQ ID NO: 341835 - DNA, 75 bp, synthetic construct
  source 1..75: mol_type = other DNA
ggtaaaaaacaagcttatcctgtctcaacgctcagacgaattggcgatccctggaaaactatggcatgtgattca

SEQ ID NO: 341836 - DNA, 75 bp, synthetic construct
  source 1..75: mol_type = other DNA
actcaaatactggcgtcaatatttttgttactcttctacctggtattgagggagttaacaaagctactaatgtga

SEQ ID NO: 341837 - DNA, 75 bp, synthetic construct
  source 1..75: mol_type = other DNA
ttctgaccctcgcttttctacagtacgtgcgatagaaaagctttttcaggaagtgacagctagacaaaaggcgta

SEQ ID NO: 341838 - DNA, 75 bp, synthetic construct
  source 1..75: mol_type = other DNA
tctaccgcgcggttatcgattgtgccgatatgccggaagatttacgcatcaacgcacctgtgctgtgggcggggc

SEQ ID NO: 341839 - DNA, 75 bp, synthetic construct
  source 1..75: mol_type = other DNA
ttgtgggaggcgggatcggcggtgcggcaactgcgctgtcactggcccgccaggggatcaaagtggtgctgctgg

SEQ ID NO: 341840 - DNA, 75 bp, synthetic construct
  source 1..75: mol_type = other DNA
taacaccggctcggtcgggggggtgattcgcgatgtgatcagtatcaaccctaatgcactgatggtgatcaagtc

SEQ ID NO: 341841 - DNA, 75 bp, synthetic construct
  source 1..75: mol_type = other DNA
ctacgctgtttaccgattcgacggaagctgaagcaattaaactctttgccaacacctatctggcaatgcgtgtag

SEQ ID NO: 341842 - DNA, 75 bp, synthetic construct
  source 1..75: mol_type = other DNA
ccggagccggctatgtcggtttatccaatgctatcctactggcacagaaccatgatgttacgttaatagatatta

SEQ ID NO: 341843 - DNA, 75 bp, synthetic construct
  source 1..75: mol_type = other DNA
gtcaccaattattgatgaggacatacaatattatctggttaataaaaagctaaaattatatgcaactcaggataa

SEQ ID NO: 341844 - DNA, 75 bp, synthetic construct
  source 1..75: mol_type = other DNA
caatacgtccagcgttgagtctgttatccgtgacgtcgttgaaatcaaccccaacgcggtgatggttatcaaatc

SEQ ID NO: 341845 - DNA, 75 bp, synthetic construct
  source 1..75: mol_type = other DNA
gaaccgtacgcgtaaggacttcattgcagattctattcttgcgcgtaagcctaaggtggtcggcgtgtaccgttt

SEQ ID NO: 341846 - DNA, 75 bp, synthetic construct
  source 1..75: mol_type = other DNA
ccacattgtttaccgattcgacggaagcagaggcgattaaactctttgccaacacttacctggcaatgcgcgtcg

SEQ ID NO: 341847 - DNA, 75 bp, synthetic construct
  source 1..75: mol_type = other DNA
atggcttatataggcttatttgagcttttttatgtgtgtgcccgatgtggcatgtttgtgatggaggatatgccc

SEQ ID NO: 341848 - DNA, 75 bp, synthetic construct
  source 1..75: mol_type = other DNA
tactaccgcgattatatcgcggcgaacagcaacgatgaaataactttgccttcactggaactggaaaaacagtgg

SEQ ID NO: 341849 - DNA, 75 bp, synthetic construct
  source 1..75: mol_type = other DNA
gtatgcggatggggacaggtccacagggagcaataaagcgcgaactgttttctgataaggaaagtctgtgggggt

SEQ ID NO: 341850 - DNA, 75 bp, synthetic construct
  source 1..75: mol_type = other DNA
ttgtattgtccacgccgggttacaggatgatgtctggaaagacaacttgcgtcgatatggtatatccgaaggcgc

SEQ ID NO: 341851 - DNA, 75 bp, synthetic construct
  source 1..75: mol_type = other DNA
aaaagctcgggtaatagctcaaatacttcataacggcagcacctatgcccgccagtttggcggcgacacgtcgca

SEQ ID NO: 341852 - DNA, 75 bp, synthetic construct
  source 1..75: mol_type = other DNA
gaggagcaaggagttattgaaagttcctgtcttcctgttcctaccgttccacatatcaaacgtcgggtttacacc

SEQ ID NO: 341853 - DNA, 75 bp, synthetic construct
  source 1..75: mol_type = other DNA
aacaactgctggcaaattatgcgtctgtgccaaataacatcgtcggtgcgattgttgacgctaaccgtacccgca

SEQ ID NO: 341854 - DNA, 75 bp, synthetic construct
  source 1..75: mol_type = other DNA
gttgctctgttaaaggcacgcggctttaccgctgaggattttgcgctctcgcatccgggcggcgcactaggtcgt

SEQ ID NO: 341855 - DNA, 75 bp, synthetic construct
  source 1..75: mol_type = other DNA
ggccgcgacctttgccagcaccggtactccgtcatttttcgtccatcctggcgaagccgcgcatggcgatttagg

SEQ ID NO: 341856 - DNA, 75 bp, synthetic construct
  source 1..75: mol_type = other DNA
ccgggtccgaaaccggaatgatgaccctcaaccgctatcgtctgcgacatatggcgaaacagggtaatcgctcgg

SEQ ID NO: 341857 - DNA, 75 bp, synthetic construct
  source 1..75: mol_type = other DNA
tgagtgatgtgattttgtgtaatcggatgtccagtgaactggtcgatattgcagacaaggttttcacaagggatc

SEQ ID NO: 341858 - DNA, 75 bp, synthetic construct
  source 1..75: mol_type = other DNA
ataacctgattttctccccagagttcctgcgtgaaggccgtgctctttatgacaaccttcatccgtcacggatcg

SEQ ID NO: 341859 - DNA, 75 bp, synthetic construct
  source 1..75: mol_type = other DNA
cagtttttttaactcccgcgtcattcgcgaactggatgaattcaaagccattagcgacgtgatactttgcaacag

SEQ ID NO: 341860 - DNA, 75 bp, synthetic construct
  source 1..75: mol_type = other DNA
cgaccctgtttaccgactccactgaagcggaagcgatcaaactgttcgcgaacacctatctggcgctgcgcgttg

SEQ ID NO: 341861 - DNA, 75 bp, synthetic construct
  source 1..75: mol_type = other DNA
aagactttattgccgattctatccttgcacgtaaaccgaaagttgttggcgtctatcgtttgattatgaagagtg

SEQ ID NO: 341862 - DNA, 75 bp, synthetic construct
  source 1..75: mol_type = other DNA
gtatatcgcctcgtcatgaagtcaggatccgacaatttccgcgcatcttcgattcaagggattatgaaacgaatc

SEQ ID NO: 341863 - DNA, 75 bp, synthetic construct
  source 1..75: mol_type = other DNA
caacgttgtttactgactcaaccgaagctgaggcgattaaactttttgctaatacttatctggcgatgcgtgtgg

SEQ ID NO: 341864 - DNA, 75 bp, synthetic construct
  source 1..75: mol_type = other DNA
tgcggaaagtttaggtctgaatactcgccagattatcgaaggcgtttgtctcgatccgcgtattggcaaccatta

SEQ ID NO: 341865 - DNA, 75 bp, synthetic construct
  source 1..75: mol_type = other DNA
gaccatccctgtggggtttacccgcgacatcaaagaacgtttagggatagataatgttattttctctcctgagtt

SEQ ID NO: 341866 - DNA, 75 bp, synthetic construct
  source 1..75: mol_type = other DNA
cgtgctgtggtacacccttttaccctccctcgcctcgattacggcaagcacacttcagctcagcgtcccttgcct

SEQ ID NO: 341867 - DNA, 75 bp, synthetic construct
  source 1..75: mol_type = other DNA
acactctgcgggtatccgcagcaacggcattgagaaagtgctcgccggagaaacctctctcgatgaagtgctgcg

SEQ ID NO: 341868 - DNA, 75 bp, synthetic construct
  source 1..75: mol_type = other DNA
gggcgtagagcctttcctgctctcttccagtctgacgggcgtgatggcgcagcgactggttcgcacgctgtgccc

SEQ ID NO: 341869 - DNA, 75 bp, synthetic construct
  source 1..75: mol_type = other DNA
ccgaaatgaaaagcgtatcacccgatggggaggtggaaggaatcctctgcaagaccctgaaaatacgggggcgtt

SEQ ID NO: 341870 - DNA, 75 bp, synthetic construct
  source 1..75: mol_type = other DNA
ttacctctttacccttcaggaaggtgtttctgttgcccaatttcaggagatgcagcaggaaaatgtcaggttggt

SEQ ID NO: 341871 - DNA, 75 bp, synthetic construct
  source 1..75: mol_type = other DNA
tacccagaagcagttagagaagaattaataacgctcggagcattcattactgagctgatagaactttacgctgaa

SEQ ID NO: 341872 - DNA, 75 bp, synthetic construct
  source 1..75: mol_type = other DNA
cctatcaggctgccgcagtgcaggcggtcgtcgatatttttcaggggcagccaccggcctctgatgcggccatga

SEQ ID NO: 341873 - DNA, 75 bp, synthetic construct
  source 1..75: mol_type = other DNA
ctccgccgggatccggacaaatggtatcgaaaaagtcctttctggtgaaacgacgctcagggaagttctacgcgt

SEQ ID NO: 341874 - DNA, 75 bp, synthetic construct
  source 1..75: mol_type = other DNA
catgtaccgtccgattaccctatagttttagtcgtcggtttaacctgatagcctggtgtgaatcatcgctggaga

SEQ ID NO: 341875 - DNA, 75 bp, synthetic construct
  source 1..75: mol_type = other DNA
tgcgaccggggcgcaaactggcctcgttgctggtatcgcgtatcaaggtgatggcgcggctggatattgccgaaa

SEQ ID NO: 341876 - DNA, 75 bp, synthetic construct
  source 1..75: mol_type = other DNA
ggcattgctttgtcattgctgtccggtgccgtcgcctcagccggtgcctatgtattgtggtatacccttttaccc

SEQ ID NO: 341877 - DNA, 75 bp, synthetic construct
  source 1..75: mol_type = other DNA
gctggccagtggtgcactcgtcctgtcacctttcttgttttatcacgcaaaaactacattatcgctgtggcgtcc

SEQ ID NO: 341878 - DNA, 75 bp, synthetic construct
  source 1..75: mol_type = other DNA
ccggtctccagtgagtaccgtcttccggaagagtggagaacgcatttcccttctggtaaggagattatcgagtat

SEQ ID NO: 341879 - DNA, 75 bp, synthetic construct
  source 1..75: mol_type = other DNA
cgggacaaaacatccaaagcccttagcaaaagaggtgtgctgcccgctcaagaaataccagggccgaaaaacagc

SEQ ID NO: 341880 - DNA, 75 bp, synthetic construct
  source 1..75: mol_type = other DNA
tttcaggacaagggattacccgattattttcttggtatccgttatgttggtgtcaaaggtgctggggagcgaacg

SEQ ID NO: 341881 - DNA, 75 bp, synthetic construct
  source 1..75: mol_type = other DNA
aagtttctcggtaacgttgacggctatgcttcagtcttcagtaaatacaggctactcgaagatgacggtcgtcct

SEQ ID NO: 341882 - DNA, 75 bp, synthetic construct
  source 1..75: mol_type = other DNA
tggttttctgaacatagttgcattaatccagcgggtggaaagtgacgctgagaaaattgcgttaaattgcctgtt

SEQ ID NO: 341883 - DNA, 75 bp, synthetic construct
  source 1..75: mol_type = other DNA
atgaaaaaacattttgcgcagtttcacgcctttatcaccgagcagcaaagctggtttgaacagcatctggcggca

SEQ ID NO: 341884 - DNA, 75 bp, synthetic construct
  source 1..75: mol_type = other DNA
acatttggcgcttgctgaacggcgaaaagcagcctcgttgatgcccctgcaaccgacatcgacagcactaactgc

SEQ ID NO: 341885 - DNA, 75 bp, synthetic construct
  source 1..75: mol_type = other DNA
tagacaaggttgcagaaactgaactggccagtttgcgaaaaaaactgggtgtacaacgtcttcatgccgctgaac

SEQ ID NO: 341886 - DNA, 75 bp, synthetic construct
  source 1..75: mol_type = other DNA
acaatattcgtactctccgtgctcaggctcgtgaactgacactcgaaaccttggaagagatgttagaaaaactca

SEQ ID NO: 341887 - DNA, 75 bp, synthetic construct
  source 1..75: mol_type = other DNA
ccggtaaatcataaatatgttctgcctgaagactggcacctgcgttttccgtccggaagtgaaattattcagtac

SEQ ID NO: 341888 - DNA, 75 bp, synthetic construct
  source 1..75: mol_type = other DNA
ggtcgggcattaaacgaggcttcgctcgcttttgaacagtatatcgcggcccttccagacaaccagttaatacaa

SEQ ID NO: 341889 - DNA, 75 bp, synthetic construct
  source 1..75: mol_type = other DNA
tgttgcaggatccttctctggttaaggattatgtgaccgcacatggctatctgccggaaagttactatcaggcaa

SEQ ID NO: 341890 - DNA, 75 bp, synthetic construct
  source 1..75: mol_type = other DNA
tctgatgtgaagtatatcaacaaaaccaacctgacccgtaaagcccgtgaaactatagaactcaaacgtcaggag

SEQ ID NO: 341891 - DNA, 75 bp, synthetic construct
  source 1..75: mol_type = other DNA
gagaaatcggtggtgtattcgcacgatggcaaggaaatggggaaactctacctgccggagaatcaggagaacaac

SEQ ID NO: 341892 - DNA, 75 bp, synthetic construct
  source 1..75: mol_type = other DNA
gagcaagctgataaagcaaaattaaaagtactgaatacagaagctgcgaccctgaccagccagtttaaccagcgg

SEQ ID NO: 341893 - DNA, 75 bp, synthetic construct
  source 1..75: mol_type = other DNA
ttcaacatctctgaccggggcgacggataacggccagtgtggtgaggtctgcatcaaagagaatgtggtctatgt

SEQ ID NO: 341894 - DNA, 75 bp, synthetic construct
  source 1..75: mol_type = other DNA
tcctggcgctgtccttggcgcttggaacttcaatggcctatgcctcggatgacattcctgttgtcccggccagtg

SEQ ID NO: 341895 - DNA, 75 bp, synthetic construct
  source 1..75: mol_type = other DNA
tatcattcttgataataccgaacacaaggttgtcggtgttcgccagcagttactgacgctggaagcctcattagt

SEQ ID NO: 341896 - DNA, 75 bp, synthetic construct
  source 1..75: mol_type = other DNA
ccgtcgcaaatcaacgaacactgggcaacacatccgcaggtattcgctcgctacgcccggcattatcagagcggg

SEQ ID NO: 341897 - DNA, 75 bp, synthetic construct
  source 1..75: mol_type = other DNA
gtctggttgtgaacgatatcgcgcagctggcaggaatgagtgaacaagagattgcgctggcggcagaggcggctc

SEQ ID NO: 341898 - DNA, 75 bp, synthetic construct
  source 1..75: mol_type = other DNA
gcaatgcgtgaggctggttatgttccggtgcgcactcgcaaactgaccggaaaggatgctcgtttttggctgtac

SEQ ID NO: 341899 - DNA, 75 bp, synthetic construct
  source 1..75: mol_type = other DNA
ggatcggcctggctgtgagtggcaattttaaacagctactcaattactcctacaatagcgcgctctggaccacca

SEQ ID NO: 341900 - DNA, 75 bp, synthetic construct
  source 1..75: mol_type = other DNA
gaagcattttagcctgtatgtggatggagataagcgggttaagaaaatgcgggatcgtgcattttgggagttaat

SEQ ID NO: 341901 - DNA, 75 bp, synthetic construct
  source 1..75: mol_type = other DNA
aagccagagagctattcctgggactggtagattattttaagcaggaaaaagataacgcaatttcgatacacgtaa

SEQ ID NO: 341902 - DNA, 75 bp, synthetic construct
  source 1..75: mol_type = other DNA
ggatagatattgttccccagcgccagatgagccacgaatatgttaagcgtctggtgaaagacaagctaaacgaat

SEQ ID NO: 341903 - DNA, 75 bp, synthetic construct
  source 1..75: mol_type = other DNA
atccgctttctgacgaaaaagcgtcatcgcgtcgatggtgttcgggttcaggggtataccgctggcgggctgaaa

SEQ ID NO: 341904 - DNA, 75 bp, synthetic construct
  source 1..75: mol_type = other DNA
aacatttcagtctgtatgttgatggggataagcgggttagcaagatgcgagatagagcgttttgggagcttgttt

SEQ ID NO: 341905 - DNA, 75 bp, synthetic construct
  source 1..75: mol_type = other DNA
ctaaagtatatggggcgagatgacttaacagtttcccttatcgacctcaaagacaaagtagctgcgctcgataaa

SEQ ID NO: 341906 - DNA, 75 bp, synthetic construct
  source 1..75: mol_type = other DNA
taacgcgacttcttatcgaactcaaggataagataaataagcttgatactgtgtattatcaaactggtctttcac

SEQ ID NO: 341907 - DNA, 75 bp, synthetic construct
  source 1..75: mol_type = other DNA
atgaatgatttaacagaacgcgataaaagaattaaaggggtaatggaaccttttgaagataggttcaatgaaatt

SEQ ID NO: 341908 - DNA, 75 bp, synthetic construct
  source 1..75: mol_type = other DNA
aaatcggtggtgtattcgcacgatggcaaggaaatggggaaactcttgctgccggataaccaggagaaccatcca

SEQ ID NO: 341909 - DNA, 75 bp, synthetic construct
  source 1..75: mol_type = other DNA
ttgccgccttcaaagcgaacccggcaaaggcaagcgtgagcattgacaacctcaacgcactgaacggcatcacca

SEQ ID NO: 341910 - DNA, 75 bp, synthetic construct
  source 1..75: mol_type = other DNA
ttgatcgggtgatggctgagcgccgcagtaatcgcggtacaaccaccgccgaaagaactgcatacgagcagatac

SEQ ID NO: 341911 - DNA, 75 bp, synthetic construct
  source 1..75: mol_type = other DNA
ggtacccggatgtatggcataggtgatggagttgatgaggagcatgttgatgcttactgttgcccgtttaattga

SEQ ID NO: 341912 - DNA, 75 bp, synthetic construct
  source 1..75: mol_type = other DNA
tttattggtatagaaaccagtgatcattattttgatatagcaacacaacggctcaaaacggcgatcgaaccataa

SEQ ID NO: 341913 - DNA, 75 bp, synthetic construct
  source 1..75: mol_type = other DNA
atcaaagcgatttgattcaatttaagcttgtttctggcaattcttgtctgccattcaatattgaagggccgggag

SEQ ID NO: 341914 - DNA, 75 bp, synthetic construct
  source 1..75: mol_type = other DNA
tttgtcgccacgcccgtaacctgctgctggcgcagggctggcctgcgatgtgctgcgtatacctgatgaaccgtc

SEQ ID NO: 341915 - DNA, 75 bp, synthetic construct
  source 1..75: mol_type = other DNA
atgcaagggtacgcttcgccgctgcggtcacccggtccctccttcccgtctgccgtgattttccggtcgttcacc

SEQ ID NO: 341916 - DNA, 75 bp, synthetic construct
  source 1..75: mol_type = other DNA
aggaagtcgccggcggctccgctttacccagccatgcggggcatggccttgtggattttcagttatgtggccgcc

SEQ ID NO: 341917 - DNA, 75 bp, synthetic construct
  source 1..75: mol_type = other DNA
gagcgaacactgacaccagaagaaattggcctgttcttccgcacgttggatgccattggtgctatgggcactatg

SEQ ID NO: 341918 - DNA, 75 bp, synthetic construct
  source 1..75: mol_type = other DNA
caacagcagtacaggccagggagatcatcagcagcgtataccgtcacgccaatgaccgtggtcatggtttgttta

SEQ ID NO: 341919 - DNA, 75 bp, synthetic construct
  source 1..75: mol_type = other DNA
gttatcaaatggctgaatcgacgcgtgatatgcggcgttcggtatatcaaagggagttgaagtcaaaatttgcgc

SEQ ID NO: 341920 - DNA, 75 bp, synthetic construct
  source 1..75: mol_type = other DNA
taaattgtccgtttgataattcttatgatcctttctttgatgcagcattatttgccatatatagatgtaatttca

SEQ ID NO: 341921 - DNA, 75 bp, synthetic construct
  source 1..75: mol_type = other DNA
catggaataaattcaagcggtatgtttgcagctttattactattgtctcttacagtttatgaaaaaaaccatcca

SEQ ID NO: 341922 - DNA, 75 bp, synthetic construct
  source 1..75: mol_type = other DNA
tggcgatcatttctctcactgaaatggtagttttgaaacccgtctattttcacgccgagcgttgggatcctgaag

SEQ ID NO: 341923 - DNA, 75 bp, synthetic construct
  source 1..75: mol_type = other DNA
attgcccgccaggagagcgcctggaatccgaaagtgaagtcgccggtaggcgccagcggcctgatgcagattatg

SEQ ID NO: 341924 - DNA, 75 bp, synthetic construct
  source 1..75: mol_type = other DNA
ggcgaccgttctggcctgaatacctggctggcacgcttgccgatggaagcgaaagagaaagatgaatggcgttac

SEQ ID NO: 341925 - DNA, 75 bp, synthetic construct
  source 1..75: mol_type = other DNA
agtattccgttctccgagacgcgtggttatgtaaagaacgtgctggcttatgacgcttactaccgctatttcatg

SEQ ID NO: 341926 - DNA, 75 bp, synthetic construct
  source 1..75: mol_type = other DNA
gcgtgggccgagaagtggttgcgcggctatcaaatggcagattccacccgcgacatgcgccgtggaacatacgag

SEQ ID NO: 341927 - DNA, 75 bp, synthetic construct
  source 1..75: mol_type = other DNA
gcgaactgaccaacgcaacgtggagcgaaatcaatttcaccgaagcgctctggacaatccccaaggagcggatga

SEQ ID NO: 341928 - DNA, 75 bp, synthetic construct
  source 1..75: mol_type = other DNA
ggctggcgcgtttgccgatggaagcgaaagagaaagatgaatggcgttactggcaggccgatttattgctggaac

SEQ ID NO: 341929 - DNA, 75 bp, synthetic construct
  source 1..75: mol_type = other DNA
caaaagagcaaacacaccatcattgttgatcgtgagaggcatagatatcagatgtatatttcagatatttccggc

SEQ ID NO: 341930 - DNA, 75 bp, synthetic construct
  source 1..75: mol_type = other DNA
ctttgggcgtatatgggatcagtacggcatgctggtggtgtttgcggtgctttttatcgcctgtgccattttttg

SEQ ID NO: 341931 - DNA, 75 bp, synthetic construct
  source 1..75: mol_type = other DNA
ccggatattgaggattatcaggaacgcccggcgaatggctgggatattcgtgctgagggctatttacccgcctag

SEQ ID NO: 341932 - DNA, 75 bp, synthetic construct
  source 1..75: mol_type = other DNA
gcgggtacgaaatgacgcctgtgaaggtgacaattaacgccgttgctgcagagactgaaaatggcgaggaggaga

SEQ ID NO: 341933 - DNA, 75 bp, synthetic construct
  source 1..75: mol_type = other DNA
tttctgtgttactcagggcaaaaaaatgcagatagttgacctgaagacagaaggtgcaggattacatggcgtcgc

SEQ ID NO: 341934 - DNA, 75 bp, synthetic construct
  source 1..75: mol_type = other DNA
ttttcttatgtctggttgtgctgtgcataatgatgagacaagtatcggtaaatttggccttgcatataaaagtaa

SEQ ID NO: 341935 - DNA, 75 bp, synthetic construct
  source 1..75: mol_type = other DNA
atgaaaaagatagctgctatatcattaattagtatttttcttatgtctgggtgtgctgtacataatgatgagaca

SEQ ID NO: 341936 - DNA, 75 bp, synthetic construct
  source 1..75: mol_type = other DNA
tttattcggtttgcgataataaagctgagctggtggattttaaaatggactctctcgatattcaattgcaggcag

SEQ ID NO: 341937 - DNA, 75 bp, synthetic construct
  source 1..75: mol_type = other DNA
attccttcaacctggttaatgctcttcagccggtctttcgtaacaccggctgtgggatgtttgaatatgatcgta

SEQ ID NO: 341938 - DNA, 75 bp, synthetic construct
  source 1..75: mol_type = other DNA
tttagctctacaaaatggacatgataatgtaattgatgaatatggtactttaattaaaaagtcaaatcttaataa

SEQ ID NO: 341939 - DNA, 75 bp, synthetic construct
  source 1..75: mol_type = other DNA
gaagcttctttagccaggggtagaatatctggtgcagaaaatatagtaaaaaatgatggtaatgactccaactta

SEQ ID NO: 341940 - DNA, 75 bp, synthetic construct
  source 1..75: mol_type = other DNA
gtggataaaacaaaatcgaatgacaacaataatgtgtttataaaaaaattacctgataatattctccaaggtgtt

SEQ ID NO: 341941 - DNA, 75 bp, synthetic construct
  source 1..75: mol_type = other DNA
cgcataaacgagtatttttttgcactaataacatttgtgatataataaacctgacagcatatgattttcttagtg

SEQ ID NO: 341942 - DNA, 75 bp, synthetic construct
  source 1..75: mol_type = other DNA
acagtgctggcaggtcagatgcctgctgattatcagactatcgcctcggcgattatttctctggcgaacaaccct

SEQ ID NO: 341943 - DNA, 75 bp, synthetic construct
  source 1..75: mol_type = other DNA
gtatgtatgagtttgtggtgaatgatgctcctgaacaggcagatgacgccgggcctgcagagcctgtttctgcgg

SEQ ID NO: 341944 - DNA, 75 bp, synthetic construct
  source 1..75: mol_type = other DNA
tccgaattgtctgcgctgcagcggtttgattatatgaaacggcaggcagaacaggcggagtcagacagcaaccgg

SEQ ID NO: 341945 - DNA, 75 bp, synthetic construct
  source 1..75: mol_type = other DNA
ccgtaccctattcgtcagtaccgctcctgcagcgtgagggacatacacgttattccattacggctggagagtacc

SEQ ID NO: 341946 - DNA, 75 bp, synthetic construct
  source 1..75: mol_type = other DNA
atgtcatatctgaatttaagactttaccagcgaaacacacaatgcttgcatattcgtaagcatcgtttggctggt

SEQ ID NO: 341947 - DNA, 75 bp, synthetic construct
  source 1..75: mol_type = other DNA
aaactacggcgagtcggagtggatccactatacaggttcgggttatctgcttcgtctggaagcgtggtcatttcc

SEQ ID NO: 341948 - DNA, 75 bp, synthetic construct
  source 1..75: mol_type = other DNA
gatcctgctcgttatcgctacaatgctatgttagcagataagggaatatcgatccgtgagcgcttggaccctgat

SEQ ID NO: 341949 - DNA, 75 bp, synthetic construct
  source 1..75: mol_type = other DNA
ccgacaaaaccggacgtgaggcggtgatgttcagctcttttttacgcgctcaggtttcactggcatgggtcattg

SEQ ID NO: 341950 - DNA, 75 bp, synthetic construct
  source 1..75: mol_type = other DNA
atgctcaaatttagatttacgggcaatcttcgaagatattacggcaaggtgtgtttaaacgttgatacgccagcg

SEQ ID NO: 341951 - DNA, 75 bp, synthetic construct
  source 1..75: mol_type = other DNA
aaaccggcggcagacgaacccgcattgttgctgtgggacgatgttattacattattccatgagtttgggcatacg

SEQ ID NO: 341952 - DNA, 75 bp, synthetic construct
  source 1..75: mol_type = other DNA
cgttattttacggtgatttcttcgcccgtgactcaaaaagcggcggcgcatggatggggaattttgtagaacaat

SEQ ID NO: 341953 - DNA, 75 bp, synthetic construct
  source 1..75: mol_type = other DNA
gaatgtctgagtttgtggtgaataattcccctgaacaggcagaggacgccgggcctgcagagcctgtttctgcgg

SEQ ID NO: 341954 - DNA, 75 bp, synthetic construct
  source 1..75: mol_type = other DNA
caatatatggtggaacgcaactggcggatcgttatcgtgcttttaatttcggtatcgggaaaaacatgggggcac

SEQ ID NO: 341955 - DNA, 75 bp, synthetic construct
  source 1..75: mol_type = other DNA
cgacgccctgaagcccggaagttataccgtcaactggcatgttgtttcggtggacgggcataaaaccaaagggca

SEQ ID NO: 341956 - DNA, 75 bp, synthetic construct
  source 1..75: mol_type = other DNA
aatataacggcgtgaccgtcacgctttctgaactgtcagccctgcagcgtattgagcatcttgcctggttgaaag

SEQ ID NO: 341957 - DNA, 75 bp, synthetic construct
  source 1..75: mol_type = other DNA
ggcgatcgtcgcggcctgaatacttggctggcgcgtctgccgatggaagcaaaagagaaagatgaatggcgttac

SEQ ID NO: 341958 - DNA, 75 bp, synthetic construct
  source 1..75: mol_type = other DNA
ttcaacaaccaatggtgggatcttagcgttcaggcaacgatcgccgggaagctttgggatcatctggaagagcga

SEQ ID NO: 341959 - DNA, 75 bp, synthetic construct
  source 1..75: mol_type = other DNA
aacataacggtgtgaccgtcacgctttctgaactgtcagccctgcagcgtattgagcatcttgcctggttgaaag

SEQ ID NO: 341960 - DNA, 75 bp, synthetic construct
  source 1..75: mol_type = other DNA
cccggctgacgctgggcgatggttatactcaaggggatattttcgatggcatcaactttcgcggtgcggagttgg

SEQ ID NO: 341961 - DNA, 75 bp, synthetic construct
  source 1..75: mol_type = other DNA
gagaatgctcactgtgtcgcagattacaaactgccacctgagagtcagcagcagttattaacccagctatcagtt

SEQ ID NO: 341962 - DNA, 75 bp, synthetic construct
  source 1..75: mol_type = other DNA
tgcgttttctctataacaaatcgctcaatgagtcaggcacgaatattcagttagtgggttaccgttattcgacca

SEQ ID NO: 341963 - DNA, 75 bp, synthetic construct
  source 1..75: mol_type = other DNA
gggacgtatcgcgtcgatatctatttgaataatggttatatggcgacgcgtgacgtcacgtttaatacgggtgac

SEQ ID NO: 341964 - DNA, 75 bp, synthetic construct
  source 1..75: mol_type = other DNA
gtggccgatttatcgcgttttgaaaatgggcaagaattaccgccagggacgtatcgcgtcgatatctatttgaat

SEQ ID NO: 341965 - DNA, 75 bp, synthetic construct
  source 1..75: mol_type = other DNA
tttcactatcgggatgatctttcgctcgaatcctacatttatgcacgtagcgccactattgaagacaataaaacg

SEQ ID NO: 341966 - DNA, 75 bp, synthetic construct
  source 1..75: mol_type = other DNA
gcgggtgaaaccgagacgctggctgatttatacatcaaatgtggcggattacatcacgatgttcccgtgctgtct

SEQ ID NO: 341967 - DNA, 75 bp, synthetic construct
  source 1..75: mol_type = other DNA
atacctttggcagtcctgaactggccgacggtgtatctaaagggatcagagaaagtaagtccttgctgatgcagc

SEQ ID NO: 341968 - DNA, 75 bp, synthetic construct
  source 1..75: mol_type = other DNA
ccgttactgcactaagtttacctatagcatttgtgctggtggcgttgattctggtgtatctatttgataggcaac

SEQ ID NO: 341969 - DNA, 75 bp, synthetic construct
  source 1..75: mol_type = other DNA
atttatacttctactgccaatcgaacccgcattttccgcgcccgttcggttgatgtggttgacccatcacccgag

SEQ ID NO: 341970 - DNA, 75 bp, synthetic construct
  source 1..75: mol_type = other DNA
atgaatgttttcagtcgctatttaatccgccatctcttcctcggttttgctgccgcggccgggctactgttgccg

SEQ ID NO: 341971 - DNA, 75 bp, synthetic construct
  source 1..75: mol_type = other DNA
tcgccgaaagcctgatggcgggaaccattcgtgcggggattgccggtggggcagattcctcgtcggtattgccga

SEQ ID NO: 341972 - DNA, 75 bp, synthetic construct
  source 1..75: mol_type = other DNA
cgcagcgagatccccgccgaagtgattgaacaactggtctttggtcaggtcgtacaaatgcctgaagcccccaac

SEQ ID NO: 341973 - DNA, 75 bp, synthetic construct
  source 1..75: mol_type = other DNA
gtcagacggaaaactcaaagaagaggtgatgactgcctttatccctccttataaacaaccgcttgtcgaagacaa

SEQ ID NO: 341974 - DNA, 75 bp, synthetic construct
  source 1..75: mol_type = other DNA
gtgaacgttttgcccgcgatgtgctggggcgcgcacatgccactggtgaagtggacgacagcaaatttaacgtgc

SEQ ID NO: 341975 - DNA, 75 bp, synthetic construct
  source 1..75: mol_type = other DNA
attagggctggtgccgctggggtatctgcgcagttatgcatttaccgcgatagatgtctggcaggacatgttgct

SEQ ID NO: 341976 - DNA, 75 bp, synthetic construct
  source 1..75: mol_type = other DNA
caatattcgcggtaattcctcgcttgctgattacgcaaagctgcgtccggcgtttgatcgtaaacacggaacggt

SEQ ID NO: 341977 - DNA, 75 bp, synthetic construct
  source 1..75: mol_type = other DNA
tgtggactgtttcgttaggcgcgatagatgagtgggtagcgtcgccattgcagcaacaggcgctgcaaatcaaat

SEQ ID NO: 341978 - DNA, 75 bp, synthetic construct
  source 1..75: mol_type = other DNA
gaatttttacttcttctgccagcacattacgctcatcccgacgctgcgcagtttgctggaacagccggataacgg

SEQ ID NO: 341979 - DNA, 75 bp, synthetic construct
  source 1..75: mol_type = other DNA
tgttgcaggcaaaagcacgcggtgccgatgtgcgcatcgtttactcgccgatggatgcgttgaaactggcgcagg

SEQ ID NO: 341980 - DNA, 75 bp, synthetic construct
  source 1..75: mol_type = other DNA
tgtacacctgacgccggattatcaacgattcgatgccgaagcacatttccgcccggcaccgcagcaggtctgcga

SEQ ID NO: 341981 - DNA, 75 bp, synthetic construct
  source 1..75: mol_type = other DNA
gaacgggacatattaaaaaactgtccatgggtgaaaccccgtcctgagtctcagaaactccccggaaaagttggc

SEQ ID NO: 341982 - DNA, 75 bp, synthetic construct
  source 1..75: mol_type = other DNA
gaatttttacttcttctgccagcatattacgcttatcccgacgctgcgcagtttgctggaacagccggataacgg

SEQ ID NO: 341983 - DNA, 75 bp, synthetic construct
  source 1..75: mol_type = other DNA
ggtgcgctgatggtttcctccgaaggagcgtgcgccgcgtggtatcagtatcgtcagcaggagagtgaagcgtga

SEQ ID NO: 341984 - DNA, 75 bp, synthetic construct
  source 1..75: mol_type = other DNA
cttgcacgcctgctggaacaacattatggcctgacactcaacgacacaccattcagtgatgaaacggtaattcag

SEQ ID NO: 341985 - DNA, 75 bp, synthetic construct
  source 1..75: mol_type = other DNA
aagtctacctagttacgcttttctgaatagaattcagtattataatgatactgaatacggccaaagtagtggttt

SEQ ID NO: 341986 - DNA, 75 bp, synthetic construct
  source 1..75: mol_type = other DNA
tcaggtagtggattttgaccctacttgcgttcgtgctttttacaatattgatcaactgaaattactggaagacaa

SEQ ID NO: 341987 - DNA, 75 bp, synthetic construct
  source 1..75: mol_type = other DNA
gtttgctggaacagccggataacggtatcgatgcgttcctcgcgccgggtcacgtcagtatggttatcggcaccg

SEQ ID NO: 341988 - DNA, 75 bp, synthetic construct
  source 1..75: mol_type = other DNA
tcgccactcacagtctttacgcctggataaagaagtacggcccggattcttccactcataatgaacagtcagatg

SEQ ID NO: 341989 - DNA, 75 bp, synthetic construct
  source 1..75: mol_type = other DNA
atgagcggtaagcgttatcctgaagagtttaaaattgaagcagtcaaacaggttgttgatcgtggtcattctgtt

SEQ ID NO: 341990 - DNA, 75 bp, synthetic construct
  source 1..75: mol_type = other DNA
tagggccaaaaaatgcattacttatcggtgttgtgattatggcgttgcgtactgagagatcccctcataatttcc

SEQ ID NO: 341991 - DNA, 75 bp, synthetic construct
  source 1..75: mol_type = other DNA
atggaaaagaaaacaaatagcaaattcatccataattttatgaatatgttttgtgtgctcattcagttgataaat

SEQ ID NO: 341992 - DNA, 75 bp, synthetic construct
  source 1..75: mol_type = other DNA
ttcgatggcgacggtgtcagctcagatttcatgaatgacagggaacaacccgccgtacaggaaagggacgcattc

SEQ ID NO: 341993 - DNA, 75 bp, synthetic construct
  source 1..75: mol_type = other DNA
ttcgacggaaacagcgtcagcgctgattttatggataacagggaacagcccggcatgcaggaaagggagtcattc

SEQ ID NO: 341994 - DNA, 75 bp, synthetic construct
  source 1..75: mol_type = other DNA
acaagcacgcaaggactggcaaaacgcccgtaaaaaactatcaagagtaaagccgaagaaatcggtagtggttga

SEQ ID NO: 341995 - DNA, 75 bp, synthetic construct
  source 1..75: mol_type = other DNA
ctgtgtgctcattcagttgataaatgacaccctgaaactggttccttttggtctggtaatggggcccgtaatatt

SEQ ID NO: 341996 - DNA, 75 bp, synthetic construct
  source 1..75: mol_type = other DNA
gtggggcatattatcctctgctggagtgccgtcggcttacagatattgaagatgtcaggaaatcagaggatatac

SEQ ID NO: 341997 - DNA, 75 bp, synthetic construct
  source 1..75: mol_type = other DNA
ttttatttttcgccaatatgttattgcactatcaccaatttatgaatcccaatgaaagtgatttgaatgacgtgt

SEQ ID NO: 341998 - DNA, 75 bp, synthetic construct
  source 1..75: mol_type = other DNA
ccattaacgccaaactaacattccaaatagtgtccactggaacgtatgatgtagaaatacaaggtctgggaatgt

SEQ ID NO: 341999 - DNA, 75 bp, synthetic construct
  source 1..75: mol_type = other DNA
ggcatatagcgcagacgacgatacgaccaatcaccaaactaacattcgtaataaactcgtaattacgtatactgc

SEQ ID NO: 342000 - DNA, 75 bp, synthetic construct
  source 1..75: mol_type = other DNA
tattgtgctggtgttagccgttatgcatattgtactggcaccctggatgtatcccctgtttactcgtgttgttgc

SEQ ID NO: 342001 - DNA, 75 bp, synthetic construct
  source 1..75: mol_type = other DNA
gccagaattcccctcgacgccgaaataaaactttttgatggccaacatcgtgcagctggcattgagatattttgc

SEQ ID NO: 342002 - DNA, 75 bp, synthetic construct
  source 1..75: mol_type = other DNA
cggatatcaggctccgacaggctgcgtggtcacctttgttgatggcggcgaaaaaatggagttcatcaagtataa

SEQ ID NO: 342003 - DNA, 75 bp, synthetic construct
  source 1..75: mol_type = other DNA
aaaagaaagcagtccctttgcgccgaccagcgattacgagcaactgtcattctcgaagagttgctatttcgggat

SEQ ID NO: 342004 - DNA, 75 bp, synthetic construct
  source 1..75: mol_type = other DNA
tttccagggaaccattccgtggctctattcggaagggggaagcgctacgacagatgccgaccatgtaacgttgac

SEQ ID NO: 342005 - DNA, 75 bp, synthetic construct
  source 1..75: mol_type = other DNA
atgaagcaggataaaagacgcggtctgacccggatcgcattggcgctggcactggcaggttattgtgtggcacct

SEQ ID NO: 342006 - DNA, 75 bp, synthetic construct
  source 1..75: mol_type = other DNA
tatcggcggcagtacaccgattgcgcttggcaaaacctatgtcgccaaactgtactcggatgaaaacggaaacga

SEQ ID NO: 342007 - DNA, 75 bp, synthetic construct
  source 1..75: mol_type = other DNA
aaaccaacgaagaagccagaaccaaccttaacggccctgcgcgcgatggtaaagaggcacttaccatcccggcca

SEQ ID NO: 342008 - DNA, 75 bp, synthetic construct
  source 1..75: mol_type = other DNA
cgggactgcgctgcatctttatgacatttccactgccagcggcggcggaagcgacagcgataacgttgcgccagg

SEQ ID NO: 342009 - DNA, 75 bp, synthetic construct
  source 1..75: mol_type = other DNA
gggtggtatcgttaactcaagcttcgataatcaaaacctggtcatccctgcgaccaacgacgaagccagaaccaa

SEQ ID NO: 342010 - DNA, 75 bp, synthetic construct
  source 1..75: mol_type = other DNA
aggattgagcaacctgatgcaccaaaggacaatctaatccgtgtggtagctgacgtggcgaagtccaccatcacc

SEQ ID NO: 342011 - DNA, 75 bp, synthetic construct
  source 1..75: mol_type = other DNA
cgtctgtttgatttgctcaaagaccgtttacaggtgccaacgtcaaaaggtgcgctgctggcgaaagatttacgc

SEQ ID NO: 342012 - DNA, 75 bp, synthetic construct
  source 1..75: mol_type = other DNA
atgcaccgcgcactggtacagcggaaaaatctcgcctttgccgcccagtttgaatcctcctttgaacctatttgc

SEQ ID NO: 342013 - DNA, 75 bp, synthetic construct
  source 1..75: mol_type = other DNA
atccgtcctgcaggtagcgagtctgataaacgcctttactcaggggataccatcacgctgggttgggatatcggc

SEQ ID NO: 342014 - DNA, 75 bp, synthetic construct
  source 1..75: mol_type = other DNA
tttttattcacctgacaaagaatatgagggactgtcttttactcatggcgtctattttggcgtggataccaaaaa

SEQ ID NO: 342015 - DNA, 75 bp, synthetic construct
  source 1..75: mol_type = other DNA
ggcgctgttatatcactgccggattgtcgaagtcggtacgcaaacgggtaatgagcagttgttcagcctggcaga

SEQ ID NO: 342016 - DNA, 75 bp, synthetic construct
  source 1..75: mol_type = other DNA
tacaccggagactctgcgtgtctgggtacgacagcatgagcgggataccggaggcggtgatggagggctcaccac

SEQ ID NO: 342017 - DNA, 75 bp, synthetic construct
  source 1..75: mol_type = other DNA
tacgccggagactctgcgtgtctgggttcgccagcatgagcgggataccgggggcggtgatggcgggttcaccac

SEQ ID NO: 342018 - DNA, 75 bp, synthetic construct
  source 1..75: mol_type = other DNA
caatttgttccattgccccaaagattggctgtacaccggagactctgcgtgtctgggtacgccagcatgagcggg

SEQ ID NO: 342019 - DNA, 75 bp, synthetic construct
  source 1..75: mol_type = other DNA
ccgaagtccgtcagcaggcgattcgtatggttctggaaagtcaggatgaatatgactcacagtgggcggcaattt

SEQ ID NO: 342020 - DNA, 75 bp, synthetic construct
  source 1..75: mol_type = other DNA
ctggaacgtgaaaatcgtgaactgcgccgcatcgtctatggaaacgacattcgtgctggatgctctggagcaggc

SEQ ID NO: 342021 - DNA, 75 bp, synthetic construct
  source 1..75: mol_type = other DNA
tacgccggagactctgcgtgtctgggttcgccagcatgagcgggataccgggggcggtgatggtgggctcaccac

SEQ ID NO: 342022 - DNA, 75 bp, synthetic construct
  source 1..75: mol_type = other DNA
cccaggtcgaagagatgtatcgctaccttgccatcgccaactatgaagatcgttttgtcattccaaccagtcatc

SEQ ID NO: 342023 - DNA, 75 bp, synthetic construct
  source 1..75: mol_type = other DNA
gaaggcaagctcgacctgctggtgacgctcgacttccgcatgtccagtacctgcctgttctccgatatcgttctg

SEQ ID NO: 342024 - DNA, 75 bp, synthetic construct
  source 1..75: mol_type = other DNA
actactacggcaccgtcggctcgaaccgcgacgaattcatcatgatccgcaaaatgaagaacgttaactggctgg

SEQ ID NO: 342025 - DNA, 75 bp, synthetic construct
  source 1..75: mol_type = other DNA
actactccgaagtggcgaaactgtgtgatcagtggctggcgccgaaacaaggcaccgatagcgcgctggcgatgg

SEQ ID NO: 342026 - DNA, 75 bp, synthetic construct
  source 1..75: mol_type = other DNA
gccgccggaactcgttatttgtcactgcttggcggcacctgtttaagtttctacgactggtattgtgacctgccg

SEQ ID NO: 342027 - DNA, 75 bp, synthetic construct
  source 1..75: mol_type = other DNA
aagatgaagaacgttaactggctggatgatgaaggtcgcgatcaggtacaggaggcgaaaaatgaaaatccgttc

SEQ ID NO: 342028 - DNA, 75 bp, synthetic construct
  source 1..75: mol_type = other DNA
tacaccagagactctgcgtgtgtgggttcgtcagcatgagcgggataccgggggtggtgatggtggactcaccac

SEQ ID NO: 342029 - DNA, 75 bp, synthetic construct
  source 1..75: mol_type = other DNA
ttgtcgatctgctggagcaacagccgcgcacgcctggcgagctggcgcaacagactggcgtttccggcaggacca

SEQ ID NO: 342030 - DNA, 75 bp, synthetic construct
  source 1..75: mol_type = other DNA
cagaacgcgattgccaccattaatcagctcgccattgagcgcgatgttttacattgtcgggtgattattgcccgt

SEQ ID NO: 342031 - DNA, 75 bp, synthetic construct
  source 1..75: mol_type = other DNA
ctgaaagccgcctggcctgcggcctttgatatgagtctgcactttattacgctactgcgtgaacagctcgatatt

SEQ ID NO: 342032 - DNA, 75 bp, synthetic construct
  source 1..75: mol_type = other DNA
gcggactatcggaaacgatggcgaaagcctatgggctgggccataaacagcagcttaaattagaaaatctgattt

SEQ ID NO: 342033 - DNA, 75 bp, synthetic construct
  source 1..75: mol_type = other DNA
ccaatgctaccaatccacactgctggcggactatcggaaacgatggcgaaagcctatgggctgggccataaacag

SEQ ID NO: 342034 - DNA, 75 bp, synthetic construct
  source 1..75: mol_type = other DNA
ccaatgctaccaatccacaccgctggtggactatcggaaacgatggcgaaagcctatggactgggccataaacag

SEQ ID NO: 342035 - DNA, 75 bp, synthetic construct
  source 1..75: mol_type = other DNA
gttccattgctccaaagaatggctgtacgcctgagactctgcgtgtctgggttcgccagcatgagcgggataccg

SEQ ID NO: 342036 - DNA, 75 bp, synthetic construct
  source 1..75: mol_type = other DNA
agctggaacgtgaaaatcgtgaactgcgccgcagtaacgatatccttcgccaggcttccgcttattttgcgaagg

SEQ ID NO: 342037 - DNA, 75 bp, synthetic construct
  source 1..75: mol_type = other DNA
cgtattaccactgtcagcaacagcgacattatccggataaacgcagtgcccgtgcgcagcgcgatgactggctga

SEQ ID NO: 342038 - DNA, 75 bp, synthetic construct
  source 1..75: mol_type = other DNA
ggtggactcaccaccgctgaacgtcagcgtctgaaagagctggaacgtgaaaatcgtgaactgcgccgcagtaac

SEQ ID NO: 342039 - DNA, 75 bp, synthetic construct
  source 1..75: mol_type = other DNA
gttccattgctccaaagattggctgtacgcccgagactctgcgtgtctgggttcgccaggatgagcgggataccg

SEQ ID NO: 342040 - DNA, 75 bp, synthetic construct
  source 1..75: mol_type = other DNA
gttccattgctccaaagaatggctgtacgcccgagactctgcgtgtctgggttcgccagtatgagcgggataccg

SEQ ID NO: 342041 - DNA, 75 bp, synthetic construct
  source 1..75: mol_type = other DNA
cggaaagtggcattcaggggcaagaacttgggccgacggagggaattcaatcggaagaagtagagtggcaaaccg

SEQ ID NO: 342042 - DNA, 75 bp, synthetic construct
  source 1..75: mol_type = other DNA
acttaagccctatttatttggataattttcgccatgatggggaaattaatattttttgcgctccccacccaaagc

SEQ ID NO: 342043 - DNA, 75 bp, synthetic construct
  source 1..75: mol_type = other DNA
aatattgaatttcaggtagtaataaatttaagccctatttatttagataattttcgccacgatggggaaattaat

SEQ ID NO: 342044 - DNA, 75 bp, synthetic construct
  source 1..75: mol_type = other DNA
gataacgacacgctatacaatgaaaaggttcaatttaaactcacttatcctgttaagaatggaagacataaagaa

SEQ ID NO: 342045 - DNA, 75 bp, synthetic construct
  source 1..75: mol_type = other DNA
tgctgaacgtcagcgtctgaaagagctggaacgtgaaaatcgtgaactgggccgcagcaacaatatccttcgcca

SEQ ID NO: 342046 - DNA, 75 bp, synthetic construct
  source 1..75: mol_type = other DNA
cgacatactataccggcatcagcagcacaggcagcatcctgacaggcgctgtcagcgggcgcagcgagatgacct

SEQ ID NO: 342047 - DNA, 75 bp, synthetic construct
  source 1..75: mol_type = other DNA
ccgcagtaacgatatccttcgccaggcttccgcttattttgcgaaggcggagttcgaccgcctctggaaaaaata

SEQ ID NO: 342048 - DNA, 75 bp, synthetic construct
  source 1..75: mol_type = other DNA
aaaccctacgggaacaattatctataaacacagttactattaaagatatagagaaaaaaataacatctgagatat

SEQ ID NO: 342049 - DNA, 75 bp, synthetic construct
  source 1..75: mol_type = other DNA
tggatagcaagcagttaccagccatattttaatgaagagcaagaaaaaaatttcaccaagaaattcagcaggctc

SEQ ID NO: 342050 - DNA, 75 bp, synthetic construct
  source 1..75: mol_type = other DNA
gaaagagctgaaacgggttaccgacgaacgggacatattaaaaaaaagccgctgtagattcattctccatttcaa

SEQ ID NO: 342051 - DNA, 75 bp, synthetic construct
  source 1..75: mol_type = other DNA
gccgcgcgtgctggagaacctgcgtttgctggtgagcgaaggtgttaatgtgataccgcgcttgccactgatccc

SEQ ID NO: 342052 - DNA, 75 bp, synthetic construct
  source 1..75: mol_type = other DNA
gcgcagagaggcgaaatgtctgcactgcgcgaaatgtttgcgtgatgcggatgaatgcccctccggggcgtttga

SEQ ID NO: 342053 - DNA, 75 bp, synthetic construct
  source 1..75: mol_type = other DNA
gaatactgatgtaactataaaattagaggagttagtcgaaaatattggcttagaaccgtctccactggattatga

SEQ ID NO: 342054 - DNA, 75 bp, synthetic construct
  source 1..75: mol_type = other DNA
ctgcgtgtctgggtacgccagcatgagcgggataccggaggcggtgatggcgggctcaccaccgctgaacgtcag

SEQ ID NO: 342055 - DNA, 75 bp, synthetic construct
  source 1..75: mol_type = other DNA
ccatgatgtatcacgctcaggaacgcattatgaatatccccggctcggaagtgaccggaatgcgcggcggtattc

SEQ ID NO: 342056 - DNA, 75 bp, synthetic construct
  source 1..75: mol_type = other DNA
cccctactttggcggcattgaaaatccgcattttcgcagcgtaaaacacaatccggtgctggtgcgccaattgcc

SEQ ID NO: 342057 - DNA, 75 bp, synthetic construct
  source 1..75: mol_type = other DNA
ccagctgattgccgccgctaacgtctggaccatcaaaacctacggcccggatcgcgttgccggtttctcgccgat

SEQ ID NO: 342058 - DNA, 75 bp, synthetic construct
  source 1..75: mol_type = other DNA
caccggaaactaacggtcatgttgcagtcaaagcgtggcaggcgctgggcgagatcaccgggcgcgaacataccc

SEQ ID NO: 342059 - DNA, 75 bp, synthetic construct
  source 1..75: mol_type = other DNA
agacacgcacgccagacgcccacttctttactgaagtacgctacaaaggcaccaaaactatcgccattactcctg

SEQ ID NO: 342060 - DNA, 75 bp, synthetic construct
  source 1..75: mol_type = other DNA
tccagcacttgtttattctccgatatcgtcttgcccaccgcgacctggtacgaaaaagacgatatgaatacctcg

SEQ ID NO: 342061 - DNA, 75 bp, synthetic construct
  source 1..75: mol_type = other DNA
atcgccctggacaccgcgccccctctcacgcagagaaaaaattcccgtttcagggcagttaacatgttaactggc

SEQ ID NO: 342062 - DNA, 75 bp, synthetic construct
  source 1..75: mol_type = other DNA
tgactcacaatgggcggcaatttgttccattgctccaaagactggctgtacgccagagactctgcgtgtctgggt

SEQ ID NO: 342063 - DNA, 75 bp, synthetic construct
  source 1..75: mol_type = other DNA
tacgccagagactctgcgtgtgtgggttcgtcagcatgagcgggataccgggagtggtgatggtggactcaccac

SEQ ID NO: 342064 - DNA, 75 bp, synthetic construct
  source 1..75: mol_type = other DNA
cggcccggatcgcgttgccggtttctcgccgatcccggcgatgtcgatggtttcttacgccgccggaacgcgtta

SEQ ID NO: 342065 - DNA, 75 bp, synthetic construct
  source 1..75: mol_type = other DNA
tggtatctttacagcgctaaccgcctgaaatacccgctcattcgtaaacgactgattgaactgtggcgcgaagcc

SEQ ID NO: 342066 - DNA, 75 bp, synthetic construct
  source 1..75: mol_type = other DNA
cgttcccgggcgcatgatccgcgcatctgacctggtggatggactgggcgaaagcaacaatccgcagtggaaaac

SEQ ID NO: 342067 - DNA, 75 bp, synthetic construct
  source 1..75: mol_type = other DNA
cttcgtatctccggtaaagggcgcgcgcttcttgcacggtatatccagcagaaccaacctcatgcgcagttctgg

SEQ ID NO: 342068 - DNA, 75 bp, synthetic construct
  source 1..75: mol_type = other DNA
cgccgtgagaaccgcgccggacagctcggttaaggcgctgaaatatgccgccgcgattgaacgttcgctgtgtga

SEQ ID NO: 342069 - DNA, 75 bp, synthetic construct
  source 1..75: mol_type = other DNA
agcattctcacagtggcttgatgccgtgattcagcgtgtcgaaatgtacaacgcatcgcttcccgttccgctttc

SEQ ID NO: 342070 - DNA, 75 bp, synthetic construct
  source 1..75: mol_type = other DNA
aagagtcgctattttcacgcgttgatgaaattcgagtcctggagaaaaccaccgattccgcccgcattcatgttc

SEQ ID NO: 342071 - DNA, 75 bp, synthetic construct
  source 1..75: mol_type = other DNA
gttaatagcgagaatgaaaaaatcctggcaacgctggcatcgctacaaaaagaagagcctgaagcctttgtcgcc

SEQ ID NO: 342072 - DNA, 75 bp, synthetic construct
  source 1..75: mol_type = other DNA
tcagggctggccagcattctcacagtggcttgatgccgtgattcagcgcgtcgaaatgtacaacgcatcgcttcc

SEQ ID NO: 342073 - DNA, 75 bp, synthetic construct
  source 1..75: mol_type = other DNA
tgctgttgaactgtggtatctacggtaacgttatccgttttctctaccctttaacaatcccggatgctcagttca

SEQ ID NO: 342074 - DNA, 75 bp, synthetic construct
  source 1..75: mol_type = other DNA
gcggtgggttccatggtcgtacattcatgaccatggcactcacgggcaaagtcgctccctacaaaacagggtttg

SEQ ID NO: 342075 - DNA, 75 bp, synthetic construct
  source 1..75: mol_type = other DNA
gacttaccaactaatataaaagatattcaaagcctgtatcaaaaaatgacgaagttatatattgagcacagtgaa

SEQ ID NO: 342076 - DNA, 75 bp, synthetic construct
  source 1..75: mol_type = other DNA
ctgaagccgtgggaggcattagggatcagtcgagctacgtactaccgaaaattaaaatgtgatccagatctcgca

SEQ ID NO: 342077 - DNA, 75 bp, synthetic construct
  source 1..75: mol_type = other DNA
cttgtttttgacgtggaccggacgggcgcagcgatagactggagcgaccggaactgtccggccccgaatatcacc

SEQ ID NO: 342078 - DNA, 75 bp, synthetic construct
  source 1..75: mol_type = other DNA
ccgtgattgagcgtgcgctgtgtgaaaaactgggcgcggatgtgaactacagcggcctgatctgcaaaaatccgt

SEQ ID NO: 342079 - DNA, 75 bp, synthetic construct
  source 1..75: mol_type = other DNA
agatatgcaaatcgagcggcaatttatttacgataatccgatctgttttggcgaagaaacgctattttctcgcat

SEQ ID NO: 342080 - DNA, 75 bp, synthetic construct
  source 1..75: mol_type = other DNA
aacagagattgttttacctgctggggagtggcacgccattcccccattcgctggagaggataacccagtgattac

SEQ ID NO: 342081 - DNA, 75 bp, synthetic construct
  source 1..75: mol_type = other DNA
acaacgttgttgctctcccagggtacgccgatgttactggccggtgacgaacatggtcacagccagcatggcaat

SEQ ID NO: 342082 - DNA, 75 bp, synthetic construct
  source 1..75: mol_type = other DNA
ttattctctctgcgtgggatcgacaaccgtagctattattggataagagaagacggtgattatcacaattggaca

SEQ ID NO: 342083 - DNA, 75 bp, synthetic construct
  source 1..75: mol_type = other DNA
gagatcccggtcgagatccgtggcacttataaagccctcgggcatccggtgatgatcaactatttgaaacaattg

SEQ ID NO: 342084 - DNA, 75 bp, synthetic construct
  source 1..75: mol_type = other DNA
tgagttccgcgatgcagtcaaagccctgcacaaagcgggcattgaggtcattctcgacatcgttctcaaccacag

SEQ ID NO: 342085 - DNA, 75 bp, synthetic construct
  source 1..75: mol_type = other DNA
cgggactaacaataattacagtaacaatcatggtaaagaaggattaggtggaactctgaacctgattgaacggcg

SEQ ID NO: 342086 - DNA, 75 bp, synthetic construct
  source 1..75: mol_type = other DNA
gcccggtgcgtattgttgatattgcgcttggtgataacgatattgaaatccagcgtaacctgttgcaggagatgc

SEQ ID NO: 342087 - DNA, 75 bp, synthetic construct
  source 1..75: mol_type = other DNA
atggtatgcaggaggcagctcgcccgctatggtgtggatttaaaagtgctggaggcaggcggctacagccagttg

SEQ ID NO: 342088 - DNA, 75 bp, synthetic construct
  source 1..75: mol_type = other DNA
atcgacgtcgttgccggaacggccattgcggcagaggcggcaatgggtgaagggcgtaacctgaaaacgccgctt

SEQ ID NO: 342089 - DNA, 75 bp, synthetic construct
  source 1..75: mol_type = other DNA
tgagtttcgcgatgcaatcaaagcactgcataaagcgggtatcgaagtcattcttgatatcgtgctcaaccatag

SEQ ID NO: 342090 - DNA, 75 bp, synthetic construct
  source 1..75: mol_type = other DNA
accgccgcgttaatccatctgcgcaagcgcattcctgctttggcagaggatcgctggtgggaagaaggcgacggc

SEQ ID NO: 342091 - DNA, 75 bp, synthetic construct
  source 1..75: mol_type = other DNA
ttgaaatccagcgtaacctgttgcaggagatgctggaacgccatccagaaatcgacgtcgttgccggaacggcca

SEQ ID NO: 342092 - DNA, 75 bp, synthetic construct
  source 1..75: mol_type = other DNA
ggggaagcgccgttcagcgggtggaaacacttaagcctgatatcgtcatcattgatgtcgatatccccggagtta

SEQ ID NO: 342093 - DNA, 75 bp, synthetic construct
  source 1..75: mol_type = other DNA
ttctgcccgatcctgaattttcgagtgaaatgttgatggcggcgttatttgccaaattgcaccggacattgggtg

SEQ ID NO: 342094 - DNA, 75 bp, synthetic construct
  source 1..75: mol_type = other DNA
ttatgtttgactatcgcgggtttggtaaatcaaaaggcacgccgtcccaggctggattactggacgatacgctaa

SEQ ID NO: 342095 - DNA, 75 bp, synthetic construct
  source 1..75: mol_type = other DNA
tccgatcgtcacggcgatgtttatcgcgaacagatggtggactttatccttagcgcgttgaatccgcagaactaa

SEQ ID NO: 342096 - DNA, 75 bp, synthetic construct
  source 1..75: mol_type = other DNA
cgttggcgaccgaagcgcgtgcacaaggttttagcctgatgttgggctgcatgctatgtacttcacgcgccatta

SEQ ID NO: 342097 - DNA, 75 bp, synthetic construct
  source 1..75: mol_type = other DNA
aagcctggccgttacattccccgtttgtgattgcgcgaggtagccgtagtgaagcgcgtgtggtggtggttgaac

SEQ ID NO: 342098 - DNA, 75 bp, synthetic construct
  source 1..75: mol_type = other DNA
acgggtggtctgaccgaagccctggcattggcgaatgaagcgcgcgcccagggtttcggcctgatgttaggctgt

SEQ ID NO: 342099 - DNA, 75 bp, synthetic construct
  source 1..75: mol_type = other DNA
tggttatcatggcgatacctttggcgcgatgtcggtgtgcgatccggacaactcaatgcacagcctgtggaaagg

SEQ ID NO: 342100 - DNA, 75 bp, synthetic construct
  source 1..75: mol_type = other DNA
ccgccacactcaccacgcgcgaggttgcggaaaccatcagtaacggcgaagccggctgctttatgcacgggccaa

SEQ ID NO: 342101 - DNA, 75 bp, synthetic construct
  source 1..75: mol_type = other DNA
taaatagaaaaataatctcaacaccaacaccggtgaagctattatcatatcgaaatgctgatttaataaaagaaa

SEQ ID NO: 342102 - DNA, 75 bp, synthetic construct
  source 1..75: mol_type = other DNA
tccgcttttactgattcacggcaaagccgatcacgttatcccctggcagcacagtgaaaagttatatgctctggc

SEQ ID NO: 342103 - DNA, 75 bp, synthetic construct
  source 1..75: mol_type = other DNA
ctgccatcctgctgtttctggtagtggcagtagattttgccggacggctgatgtcggttctggctgatggcgtgc

SEQ ID NO: 342104 - DNA, 75 bp, synthetic construct
  source 1..75: mol_type = other DNA
gttgcgagctgattttgtctgacggcagacgcctggttgacggtatgtcgtcctggtgggcggcgatccacggct

SEQ ID NO: 342105 - DNA, 75 bp, synthetic construct
  source 1..75: mol_type = other DNA
gcaactggaaaaagggctgacacgtgaagaattacaaaaaattctgcctgcgggcgcggcgcgtaatgcgctgga

SEQ ID NO: 342106 - DNA, 75 bp, synthetic construct
  source 1..75: mol_type = other DNA
gaccagcggtgagcgcgcgatccagcacggtctggcgattgccgccgggattaaagcagcgaaagatctcggcaa

SEQ ID NO: 342107 - DNA, 75 bp, synthetic construct
  source 1..75: mol_type = other DNA
aatatacacataggaaattctcaccagagggattttccgcagtacaggctgctcgaggtcgtaagggcggaacta

SEQ ID NO: 342108 - DNA, 75 bp, synthetic construct
  source 1..75: mol_type = other DNA
gttcgaaatgacgcgcaaatgggcttacagggcgattcgtcagggctggccagcgttctcacagtggcttgaagc

SEQ ID NO: 342109 - DNA, 75 bp, synthetic construct
  source 1..75: mol_type = other DNA
gttggaagtttaacgtccgaccagcaaaaactcgactccttatcgaaacaagaaattagtgtcatgcggtatatt

SEQ ID NO: 342110 - DNA, 75 bp, synthetic construct
  source 1..75: mol_type = other DNA
cgcctgatggaaaaattagaatgtaaatcactgatggatctttacacattcgcacaacgtaacaaaatcggctaa

SEQ ID NO: 342111 - DNA, 75 bp, synthetic construct
  source 1..75: mol_type = other DNA
agttggctgacagctacagcaaaaatgtcatcacccgcgttatcggtgaacagcagatgaaagagctggggatgc

SEQ ID NO: 342112 - DNA, 75 bp, synthetic construct
  source 1..75: mol_type = other DNA
tgacctccagcagtgaagaagtggaagaatatataaacagaaatcattttacagacaagcagaaactggagattt

SEQ ID NO: 342113 - DNA, 75 bp, synthetic construct
  source 1..75: mol_type = other DNA
gaagcgcgcgtggtggtggttgaactggaagaagatggcgtcaaaggtacgggcgaatgtacgccttatccgcgc

SEQ ID NO: 342114 - DNA, 75 bp, synthetic construct
  source 1..75: mol_type = other DNA
gatcaacattcttaaggccctgaaagcgccggtgccggtttacgcgcacgtttctatgatcaatggcgatgacgg

SEQ ID NO: 342115 - DNA, 75 bp, synthetic construct
  source 1..75: mol_type = other DNA
ggaccttatcgaagagggcaacctggggctgatccgcgcggtagagaagtttgacccggaacgtggtttccgctt

SEQ ID NO: 342116 - DNA, 75 bp, synthetic construct
  source 1..75: mol_type = other DNA
agaacattaaatgccacaaggaaagaatatgttaagaagtcgctgagaacgaccagtgaaggcatagaagacgta

SEQ ID NO: 342117 - DNA, 75 bp, synthetic construct
  source 1..75: mol_type = other DNA
aaagagcgaagttctgatatacaaccgggaatagcctatgttcatgctttccttgataatctggaaaaactagga

SEQ ID NO: 342118 - DNA, 75 bp, synthetic construct
  source 1..75: mol_type = other DNA
tttttcgcgtcactttaacaacgcgccgattattgaagtgtccggccgtacttatccggtagaagtccgttatcg

SEQ ID NO: 342119 - DNA, 75 bp, synthetic construct
  source 1..75: mol_type = other DNA
gcattggctacaaagtccgcttcagcgatcacgtcagcgacaacactatggtcaagctgatgaccgacggtattc

SEQ ID NO: 342120 - DNA, 75 bp, synthetic construct
  source 1..75: mol_type = other DNA
ggccatacccagccgcgtcggctggcggcgcgaacggtggcgaaccgtattgcggaagagctaaaaacggagccg

SEQ ID NO: 342121 - DNA, 75 bp, synthetic construct
  source 1..75: mol_type = other DNA
atgttcgacgccattagctatctggtgctggcggggctgtgcgcctcactgctgggcgatgcgctaaccctgttg

SEQ ID NO: 342122 - DNA, 75 bp, synthetic construct
  source 1..75: mol_type = other DNA
acacagaatcaggaaagggaaattggcactgttgcaaagttagcgatgaggcagccttttgtcttattcaaaggc

SEQ ID NO: 342123 - DNA, 75 bp, synthetic construct
  source 1..75: mol_type = other DNA
accaggttgaggagagcgggtttgagtggcagatccccggcctgcgccgtgagctgatcatcgccctgattaaat

SEQ ID NO: 342124 - DNA, 75 bp, synthetic construct
  source 1..75: mol_type = other DNA
cgctgaactgaacgacacggtggtggatattgcgaagcaggtcgagcaaatcctcactgcggtgttcaatatcaa

SEQ ID NO: 342125 - DNA, 75 bp, synthetic construct
  source 1..75: mol_type = other DNA
tgcatttttgcgttttctggatgcagatatccagaacaacccgcaaaaaactcgtccattcaacattcaacattc

SEQ ID NO: 342126 - DNA, 75 bp, synthetic construct
  source 1..75: mol_type = other DNA
gctccaaccgtaacgatgatcgctatggttgcctcgatggtctgcgtggtcattatgaccattcagccagtgacc

SEQ ID NO: 342127 - DNA, 75 bp, synthetic construct
  source 1..75: mol_type = other DNA
caccagacccgacaaagaccctcaccttaaccatcttcaccgaacgacaacccgaaaacagcactggccggaact

SEQ ID NO: 342128 - DNA, 75 bp, synthetic construct
  source 1..75: mol_type = other DNA
acatatctggagttttggtcaacttccggaaagctacgagcagaagcgcggcaactacaaagtgaaggcgtggcc

SEQ ID NO: 342129 - DNA, 75 bp, synthetic construct
  source 1..75: mol_type = other DNA
gtggatgacaaaaacaagaagctaaaagaagggcgctcattacaggatctgaaagacgccctgaaaggcaaagtg

SEQ ID NO: 342130 - DNA, 75 bp, synthetic construct
  source 1..75: mol_type = other DNA
gaggagttccgttggcctgtctgtacttttatcggtatgacgctggtgatggtgtggctggcaggtgaactgtgg

SEQ ID NO: 342131 - DNA, 75 bp, synthetic construct
  source 1..75: mol_type = other DNA
agcgccaatttcgcttttgctggttttattctgcatgacgccgaagatgtgatttcaccgatggaattgcgtctg

SEQ ID NO: 342132 - DNA, 75 bp, synthetic construct
  source 1..75: mol_type = other DNA
tttttgaagcaatatggtgattttgaaaatggtattcctgttcacgatactattgccagagttgtatcatgtatc

SEQ ID NO: 342133 - DNA, 75 bp, synthetic construct
  source 1..75: mol_type = other DNA
attacagacaagcctggaaagtggagcataaattatcggatattctactgttgactatttgcgccgttatttcgg

SEQ ID NO: 342134 - DNA, 75 bp, synthetic construct
  source 1..75: mol_type = other DNA
agagttgtatcatgtatcagtcctgcaaaatttcacgaatgctttattaaccggatgcgtgaatgtcattcttca

SEQ ID NO: 342135 - DNA, 75 bp, synthetic construct
  source 1..75: mol_type = other DNA
tattttgacgaatgataaggtattcaaggcagggttaagacgtaagatgcgaaaagcagccatggacagaaagta

SEQ ID NO: 342136 - DNA, 75 bp, synthetic construct
  source 1..75: mol_type = other DNA
ttatgcaattagtgaaaagagtcacggcagagaagatatccgtcttcatattgtttgcgatgaccctgatgaact

SEQ ID NO: 342137 - DNA, 75 bp, synthetic construct
  source 1..75: mol_type = other DNA
agttcctgaaatacacagaagcgaataatgtaatcattggcaaaaagaatatcctttttcctcggctttttactg

SEQ ID NO: 342138 - DNA, 75 bp, synthetic construct
  source 1..75: mol_type = other DNA
tatatatcgatgttccgtggcagcattggcagcaaagaaaagctcttcgaattcttgccggaagaggcattcgat

SEQ ID NO: 342139 - DNA, 75 bp, synthetic construct
  source 1..75: mol_type = other DNA
atcaatttttctgccgccgtgttctggatgatgaaggggcttgacgcccgccgggcatcatggcctaaagggagc

SEQ ID NO: 342140 - DNA, 75 bp, synthetic construct
  source 1..75: mol_type = other DNA
tgccagaaagatattagtgaaaaaagtcacggcagagaagacatccgtcttcatattgtttgcgatgtccctgat

SEQ ID NO: 342141 - DNA, 75 bp, synthetic construct
  source 1..75: mol_type = other DNA
caatgcacagtctggtcatcggacagatcaagacggatgagaaatctaatgagattacagctatcccggaaattc

SEQ ID NO: 342142 - DNA, 75 bp, synthetic construct
  source 1..75: mol_type = other DNA
attcactgtaaaaggaaatcaggggcggcttaataaagcctttgaggaaaaatttccactgaaagaattaaataa

SEQ ID NO: 342143 - DNA, 75 bp, synthetic construct
  source 1..75: mol_type = other DNA
ataaaaacccccggacgtttgcccgcagtctgggggcagtacgctatatttcctgtgagtatctcagtacggaag

SEQ ID NO: 342144 - DNA, 75 bp, synthetic construct
  source 1..75: mol_type = other DNA
tgcagcgggaacgggcaaaagaaatcaatcagcgtgccagtgaaaattaccgtagaagccaccagcaaaccgcag

SEQ ID NO: 342145 - DNA, 75 bp, synthetic construct
  source 1..75: mol_type = other DNA
tttgatagtgccatttttacgaaggtggattcaaaaatagaatcaggaaatttgaaaaccttgttttctactcaa

SEQ ID NO: 342146 - DNA, 75 bp, synthetic construct
  source 1..75: mol_type = other DNA
cgcgccctgggtggacagtgataacgctttccatcagcccggtcgcgtctcctttgtggtcagcgctgccgactg

SEQ ID NO: 342147 - DNA, 75 bp, synthetic construct
  source 1..75: mol_type = other DNA
attaaaggtctgctgatttctggcctgatcgcctgtgttattggcggcactaccgaaccgctggagttcctgttc

SEQ ID NO: 342148 - DNA, 75 bp, synthetic construct
  source 1..75: mol_type = other DNA
cctcggcttcaccgtcatgtctgtgctcggcgtcaccatcggtaataccgacggcaatatcatcgacttcgtggt

SEQ ID NO: 342149 - DNA, 75 bp, synthetic construct
  source 1..75: mol_type = other DNA
gctgaaatactctcccagtacgcaaatgcaggcgcgcggtggaatggatgtcgggcgcccgcaaagtcgggggat

SEQ ID NO: 342150 - DNA, 75 bp, synthetic construct
  source 1..75: mol_type = other DNA
ccgccctatattattcgcccggaacagttgcagcgcctgaccgcagcgataagtcacgccgtactggatgaaaca

SEQ ID NO: 342151 - DNA, 75 bp, synthetic construct
  source 1..75: mol_type = other DNA
cttgacgcggacgtgaactacagcggactgatctgcaaaaatccgttccacctggaattacaggtgatggagtgg

SEQ ID NO: 342152 - DNA, 75 bp, synthetic construct
  source 1..75: mol_type = other DNA
gtgagaaccgcgccggacagctcggttaaggcgctgaaatacgccgctgcgattgaacgttcgcggcgtgagaaa

SEQ ID NO: 342153 - DNA, 75 bp, synthetic construct
  source 1..75: mol_type = other DNA
cggactccggttccgtggcggtagaagtggcgatgaagatggcgttgcagtactggcaggccaaaggcgaaacgc

SEQ ID NO: 342154 - DNA, 75 bp, synthetic construct
  source 1..75: mol_type = other DNA
ccgccctatattattagcccgcaacagttgctgcgcctgaccacagcggttaaccgcgcggtacaggatgaaaca

SEQ ID NO: 342155 - DNA, 75 bp, synthetic construct
  source 1..75: mol_type = other DNA
actgcgcgagcaactggcaccagcccgtgatgccaaaatggttgccgatgtgcgcgtgctaggggccattggcgt

SEQ ID NO: 342156 - DNA, 75 bp, synthetic construct
  source 1..75: mol_type = other DNA
caatgaccatacgcgttaccacgccgagcacgtccagcggtggcggaatcactaacgctcaattcacttatatta

SEQ ID NO: 342157 - DNA, 75 bp, synthetic construct
  source 1..75: mol_type = other DNA
tcacaaggagatattgagattacatagaaggttgactgaggttgaagaaaagtcgtcttctggggtttcagttga

SEQ ID NO: 342158 - DNA, 75 bp, synthetic construct
  source 1..75: mol_type = other DNA
ccagtatgagtttagccgcgccatgcggcacaaagattgccagaatccgttgcgtgtctattcgcacattgcacc

SEQ ID NO: 342159 - DNA, 75 bp, synthetic construct
  source 1..75: mol_type = other DNA
gcctatcgttacctgtgtaacacctccagccgtaccgatcttaactatctacaaggcgtggatggcccgattggt

SEQ ID NO: 342160 - DNA, 75 bp, synthetic construct
  source 1..75: mol_type = other DNA
atgcaccgcctgctgctgggctggccggaaggtcatctttcgctggaggcgagctacggccccgtcatctggtca

SEQ ID NO: 342161 - DNA, 75 bp, synthetic construct
  source 1..75: mol_type = other DNA
gaaatgaataaaccggtcgtaggttatattgccggtgttactgcaccaaaaggaaaacgcatgggacacgccgga

SEQ ID NO: 342162 - DNA, 75 bp, synthetic construct
  source 1..75: mol_type = other DNA
aatccaccgcccagggcgtattgggattgtttcccgctccggtacattaacctacgaagctgtagcgcaaaccac

SEQ ID NO: 342163 - DNA, 75 bp, synthetic construct
  source 1..75: mol_type = other DNA
tgaaccagcattcacctcgtttaacgcgcggcttgccggagcgtgaagacagcctggaagagtcttactgggatc

SEQ ID NO: 342164 - DNA, 75 bp, synthetic construct
  source 1..75: mol_type = other DNA
gctgctggcctctgacaaggcgctggactgggtggatctggtactgtgcaccgctgggccaattggcttatatat

SEQ ID NO: 342165 - DNA, 75 bp, synthetic construct
  source 1..75: mol_type = other DNA
gactgggtagatctggtgctgtgcaccgccgggccaatcggcttgtatatggcgggctttaccgaagacgaagcg

SEQ ID NO: 342166 - DNA, 75 bp, synthetic construct
  source 1..75: mol_type = other DNA
cagcaatattgaaattggcagctatgcctatcgttacctgtgtaacacctccagccgtaccgatcttaactatct

SEQ ID NO: 342167 - DNA, 75 bp, synthetic construct
  source 1..75: mol_type = other DNA
ctttatcaggaactaaaacagaaaaacctgattacccatcagtttgcgggtggcactattggtaacaccatgcac

SEQ ID NO: 342168 - DNA, 75 bp, synthetic construct
  source 1..75: mol_type = other DNA
acgctgggcactaaatttgtcatcgccgagaatccgcaatggtggcagcaattcctcaaagaacacgtctccatc

SEQ ID NO: 342169 - DNA, 75 bp, synthetic construct
  source 1..75: mol_type = other DNA
gctttttgattgatgactttggaaccggctactcggcattaagctatctgaaacgctttccgttcgacggaataa

SEQ ID NO: 342170 - DNA, 75 bp, synthetic construct
  source 1..75: mol_type = other DNA
gttacgacattaaaacctcgcgtatcgctgctgtcgaagcactggttcgctggcagcatccgcgtctcggtttac

SEQ ID NO: 342171 - DNA, 75 bp, synthetic construct
  source 1..75: mol_type = other DNA
cgaccgtttttccggcgttaccggtcatcattctgacgactggcttgggcggaacatgttggatttcatccacag

SEQ ID NO: 342172 - DNA, 75 bp, synthetic construct
  source 1..75: mol_type = other DNA
accgcagatagcattagaggtatatcaaacgaagccaataatgccatatttggctctgcgtcagccgtgcaagaa

SEQ ID NO: 342173 - DNA, 75 bp, synthetic construct
  source 1..75: mol_type = other DNA
gctatgttgaaggcgctggataacatctgctctatcctgaacgatctgctgaatgtgaacaagaacaatacaaaa

SEQ ID NO: 342174 - DNA, 75 bp, synthetic construct
  source 1..75: mol_type = other DNA
ttggctctgcttcagctgtgcaagaaccttttcttgctatgccgccacaactccctactgtaaccgatctcgcac

SEQ ID NO: 342175 - DNA, 75 bp, synthetic construct
  source 1..75: mol_type = other DNA
cccagggtgccatcggctacgcaaaactgaatgccaccaccggttaccaaatcgtcggcgttattcgtcaggaaa

SEQ ID NO: 342176 - DNA, 75 bp, synthetic construct
  source 1..75: mol_type = other DNA
cgttgaacaataaacgcgcggtaactaatcggtatggcatcggagttattccatcagtcagcagttacataacaa

SEQ ID NO: 342177 - DNA, 75 bp, synthetic construct
  source 1..75: mol_type = other DNA
gcgggctgatcacccattttctcgctgagttcggctatgactggaaccacgcacaaaacagcggtcaggcgatgt

SEQ ID NO: 342178 - DNA, 75 bp, synthetic construct
  source 1..75: mol_type = other DNA
aaaagatgatgtattttgcactcttcatgattactataaccacaataatgaaaccaaatccaccattgacaatta

SEQ ID NO: 342179 - DNA, 75 bp, synthetic construct
  source 1..75: mol_type = other DNA
catccgaaaaatacagggtaatcaacaattgccgtggctaataaacaatgcagtacccactgacacaaaagaaaa

SEQ ID NO: 342180 - DNA, 75 bp, synthetic construct
  source 1..75: mol_type = other DNA
aacttcataaaaaatatccggtatacgtattatacgcaccttcagaaaacacagtggaaatctgttacaatattt

SEQ ID NO: 342181 - DNA, 75 bp, synthetic construct
  source 1..75: mol_type = other DNA
tagatggcacaggcattgttaatgatttggtttatcaggctactgggcagaactcaacaattgccagggctatta

SEQ ID NO: 342182 - DNA, 75 bp, synthetic construct
  source 1..75: mol_type = other DNA
gatgctccccggcagtggctacttacttgatgagagttacagcggcgaaaattacatcgccagcgtcagcccgat

SEQ ID NO: 342183 - DNA, 75 bp, synthetic construct
  source 1..75: mol_type = other DNA
catcaaactgatcaacgccatgctggcagaggcgattaaagaaggcgcttcggatatccacattgagacgtttga

SEQ ID NO: 342184 - DNA, 75 bp, synthetic construct
  source 1..75: mol_type = other DNA
gaactgccagaaacggaagatctgctggaaagtgacgacgatgcgccgatcatcaaactgatcaacgccatgctg

SEQ ID NO: 342185 - DNA, 75 bp, synthetic construct
  source 1..75: mol_type = other DNA
ttaaccgtacgccacggcagaaaaccaacggcacgccgggcgataagcgcgagctgctgctggagctgatgctgc

SEQ ID NO: 342186 - DNA, 75 bp, synthetic construct
  source 1..75: mol_type = other DNA
agacaattgataaagcgctggatgagtaccccagggtactggcagtaagagtggagcttcatatgccagtacgta

SEQ ID NO: 342187 - DNA, 75 bp, synthetic construct
  source 1..75: mol_type = other DNA
ctttttccgatcgtcacggcgatgtttatcgcgaacagatggtggattttatccttagcgcgttgaatccgcaga

SEQ ID NO: 342188 - DNA, 75 bp, synthetic construct
  source 1..75: mol_type = other DNA
agcggttttcccggcgctacgaaaattccgccagttcataacaacaacgattacaaaggctacagcagcaccatc

SEQ ID NO: 342189 - DNA, 75 bp, synthetic construct
  source 1..75: mol_type = other DNA
agtggtcatggatgattgtggtgctggcggcaatgctcgggcagattggcctgccagggggcggttttggtttta

SEQ ID NO: 342190 - DNA, 75 bp, synthetic construct
  source 1..75: mol_type = other DNA
ggatcacgtccataatccggcgcgtatccgctacccgatggtgcgcgtcgactggctgcgcaatcgccatttgag

SEQ ID NO: 342191 - DNA, 75 bp, synthetic construct
  source 1..75: mol_type = other DNA
accgacgaagaaaaacgcctgctggggattaccgatgcgcatgccgtcactctgtaccatccgcagggctgcccc

SEQ ID NO: 342192 - DNA, 75 bp, synthetic construct
  source 1..75: mol_type = other DNA
agcccgcaggatgccagtgcgcgcggcattcgtcacggtgatgtggtacgcgtctttaacgatcgcggtcaggtg

SEQ ID NO: 342193 - DNA, 75 bp, synthetic construct
  source 1..75: mol_type = other DNA
tttgtgcgcgtgagctgggatgaagccctcgacatgttctatgaagagctggaacgtgtgcagaaaacgcacggg

SEQ ID NO: 342194 - DNA, 75 bp, synthetic construct
  source 1..75: mol_type = other DNA
gcgaagcgttgtggtactcgctgcaaagcgtcgatccgtttggtttctccagccagtttgtcggcctggataact

SEQ ID NO: 342195 - DNA, 75 bp, synthetic construct
  source 1..75: mol_type = other DNA
tagtgactacaatggttagtcttaatttgaatggcgtgcaagtttcacagggaacagggttcttttatcaatcta

SEQ ID NO: 342196 - DNA, 75 bp, synthetic construct
  source 1..75: mol_type = other DNA
aaatatgttcagcgcctgacagcgaaacgcaacggcggacagggtgtttccacactggcgtggtgccacggagaa

SEQ ID NO: 342197 - DNA, 75 bp, synthetic construct
  source 1..75: mol_type = other DNA
gcaacggcggacagggtgtttccacactggcgtggtgtcatggcgacacgctgctgacagtcctcgaaacactca

SEQ ID NO: 342198 - DNA, 75 bp, synthetic construct
  source 1..75: mol_type = other DNA
aggctgaaaaactgaaaaacctggtggattctgccagattacaaacttcttctcctgccgtaacatcaacagtcc

SEQ ID NO: 342199 - DNA, 75 bp, synthetic construct
  source 1..75: mol_type = other DNA
ccaactttattgatttcaatatgacaggacagaacctgtccgggttcgttctaaccttgtcaaggttttatttcg

SEQ ID NO: 342200 - DNA, 75 bp, synthetic construct
  source 1..75: mol_type = other DNA
ggagcaccccacagataaagaggcagacattatcttgatgcctttgcctcaagagttgtttgtaaacacaggagt

SEQ ID NO: 342201 - DNA, 75 bp, synthetic construct
  source 1..75: mol_type = other DNA
gtgcgatatgacaaagaattaacggtgaatgtgatgatcaggcagaagattctacagcagctcctggagtggatt

SEQ ID NO: 342202 - DNA, 75 bp, synthetic construct
  source 1..75: mol_type = other DNA
gagaatacattcgcaaacgaaggctttgtcgtgccgccattcttgtccggctcaccgcgaaatctatgcttgata

SEQ ID NO: 342203 - DNA, 75 bp, synthetic construct
  source 1..75: mol_type = other DNA
aaatatgttcagcgcctgacggcgaaacgtaatggcggacagggtgtttccacgctggcgtggtgtcatggcgac

SEQ ID NO: 342204 - DNA, 75 bp, synthetic construct
  source 1..75: mol_type = other DNA
taattcatgttgcccgccgggagttgcacctcgacgatgacacttaccgcgcctttctggtgcagtgcacgggca

SEQ ID NO: 342205 - DNA, 75 bp, synthetic construct
  source 1..75: mol_type = other DNA
aggctaagaacctcaaggccataccgctgtcttatttcgatgctcatgcagaactcaaagcgacaagtaaaacat

SEQ ID NO: 342206 - DNA, 75 bp, synthetic construct
  source 1..75: mol_type = other DNA
tacgacagctcagggcaatccggtaccactcttgtacggtcggcgccgtataggtggcgcgattatctccgcagg

SEQ ID NO: 342207 - DNA, 75 bp, synthetic construct
  source 1..75: mol_type = other DNA
caagggttgtgcgattatatggtgttcttggtgcaacgtttggtagagaatataaattatccgtagcatcaccaa

SEQ ID NO: 342208 - DNA, 75 bp, synthetic construct
  source 1..75: mol_type = other DNA
gcttatcccgctgctgaacactacgcaacaaccggcgcttgcggaactccgcgatcgttccacacgtgaaaaact

SEQ ID NO: 342209 - DNA, 75 bp, synthetic construct
  source 1..75: mol_type = other DNA
ctatctcgactccttctggacgacgataaaattcagcacctttgtcaccgtcagcggtttgctggtgtcgctgtt

SEQ ID NO: 342210 - DNA, 75 bp, synthetic construct
  source 1..75: mol_type = other DNA
tcagcggtttgctggtatcgctgttcttcgcggcgctggtggagtacatcgtgcgcggcagccgtttctatcaaa

SEQ ID NO: 342211 - DNA, 75 bp, synthetic construct
  source 1..75: mol_type = other DNA
ggctcccgccgttgccgccgtattatggatcttcctgtttaaccccggtcgcgggctgatcacccattttctcgc

SEQ ID NO: 342212 - DNA, 75 bp, synthetic construct
  source 1..75: mol_type = other DNA
ttttgttcttgccggtgccaaacttgaagatgctgataaagcaaaattaaaagtgctgaacacagaagccgcaac

SEQ ID NO: 342213 - DNA, 75 bp, synthetic construct
  source 1..75: mol_type = other DNA
attatcagaaacccgctgccggtgagcctgcgttgttactctgggatgatgtaataaccttattccatgaatttg

SEQ ID NO: 342214 - DNA, 75 bp, synthetic construct
  source 1..75: mol_type = other DNA
gggactggcgttattttacggtgatttcttcgcccgtgattcaaaaagcggcggtgcatggatgggcaattttgt

SEQ ID NO: 342215 - DNA, 75 bp, synthetic construct
  source 1..75: mol_type = other DNA
ggaaaatcgccgatcagatggcaaaaacgccagaagcagcactcaactttatgcgggaaattgttccagcggcgc

SEQ ID NO: 342216 - DNA, 75 bp, synthetic construct
  source 1..75: mol_type = other DNA
caacaaccggcccttgccgaactacgcgatcgccagacgcgtgaaaaactgtttactgcaggctggacgcgggct

SEQ ID NO: 342217 - DNA, 75 bp, synthetic construct
  source 1..75: mol_type = other DNA
tgaagcgatgcaggatgtgaatgatttcgaactgcgggcgctggcggcggaaaatatggatcttcccgccgtacc

SEQ ID NO: 342218 - DNA, 75 bp, synthetic construct
  source 1..75: mol_type = other DNA
aagtgggtaacaatcaactggatagttatctgccgatacgtaacaaaaacaatgatattaactggcaatttgtca

SEQ ID NO: 342219 - DNA, 75 bp, synthetic construct
  source 1..75: mol_type = other DNA
gctgaataagctcaataaaaaattaatccgactgggtgaggggccatttgcaaaagaacaaccttatttacccta

SEQ ID NO: 342220 - DNA, 75 bp, synthetic construct
  source 1..75: mol_type = other DNA
aattgactggaactcaaacgattacgattggctaccttatgaagatcataatgaacttgtttaccatgaggtcaa

SEQ ID NO: 342221 - DNA, 75 bp, synthetic construct
  source 1..75: mol_type = other DNA
ggtaaaggcgagtgtgagatgttcatcatccacgcacgtaaagcctggctttctgggttaagcccgaaagaaaac

SEQ ID NO: 342222 - DNA, 75 bp, synthetic construct
  source 1..75: mol_type = other DNA
cagcgccagcttgatcaggagcgtcggcaactggaagatgaagagcggagaatggaagatgagtatgggcgttga

SEQ ID NO: 342223 - DNA, 75 bp, synthetic construct
  source 1..75: mol_type = other DNA
gagcggatgtatttttccagtgaagatatctttcgtgtatctccgctttttttactatttcatgctcagtttgat

SEQ ID NO: 342224 - DNA, 75 bp, synthetic construct
  source 1..75: mol_type = other DNA
tgctactggcgtgggtattgtttttatctcgcataagctgccggaaattcgccagattgccgatcgaattagcgt

SEQ ID NO: 342225 - DNA, 75 bp, synthetic construct
  source 1..75: mol_type = other DNA
acaaacctggcagcggtatttcctcacgcgtcgtgacgccagaagtgaacgagattgtggtgaaccagaatacga

SEQ ID NO: 342226 - DNA, 75 bp, synthetic construct
  source 1..75: mol_type = other DNA
atgctggcacttccttgccatgcacaagtcaatgctgaaaaactcaagcaagatggtatcggcgcgtgtctgctg

SEQ ID NO: 342227 - DNA, 75 bp, synthetic construct
  source 1..75: mol_type = other DNA
tatgtattctcgctcgttatttgtctggtttgtggttggtggcttttttggggacggtttatattttgctattag

SEQ ID NO: 342228 - DNA, 75 bp, synthetic construct
  source 1..75: mol_type = other DNA
ttgcagcattttttcttctgacgccacttattattattatcttaagaaaactctttgtgcgggaaatgtttgagt

SEQ ID NO: 342229 - DNA, 75 bp, synthetic construct
  source 1..75: mol_type = other DNA
ccaggaaccgctgcttttcccaagcctgtcgataaaagaaaacatcctgtttgggatggcaaaaaaacagctctc

SEQ ID NO: 342230 - DNA, 75 bp, synthetic construct
  source 1..75: mol_type = other DNA
attcacggtaaaggtgattacctggcgtacagtgaagaagaacatccggtagcattgcaactgggcggtagcgat

SEQ ID NO: 342231 - DNA, 75 bp, synthetic construct
  source 1..75: mol_type = other DNA
atgacgattatcgctacacagaccggcgaactgtccgatggcctggtttttaacggcaccattcataaaaacttt

SEQ ID NO: 342232 - DNA, 75 bp, synthetic construct
  source 1..75: mol_type = other DNA
ggtggcgaaggtggcgggaaagtgggtgttacaaacacaaacggcggtaacggaggtgtgccgagtactggcgat

SEQ ID NO: 342233 - DNA, 75 bp, synthetic construct
  source 1..75: mol_type = other DNA
ctgatgcggcaagcggtcagctggatctcaataacccactgatcaagcacgatctggaaaacccgactgcgccga

SEQ ID NO: 342234 - DNA, 75 bp, synthetic construct
  source 1..75: mol_type = other DNA
cgacactctcccgatacaataaaattcaaacatgggcagaaatgtctgaatatcaattcgaagtatttcaatacg

SEQ ID NO: 342235 - DNA, 75 bp, synthetic construct
  source 1..75: mol_type = other DNA
gatctgcaaaaccgtggcgttgaagacattctgattgcctgcgtggatgggctgaccggcttccctgaagcgata

SEQ ID NO: 342236 - DNA, 75 bp, synthetic construct
  source 1..75: mol_type = other DNA
agtggcagcagcgcccgctggaaaaggtttatcccttcgtctggctggacgccattcactataaaatccgcgaag

SEQ ID NO: 342237 - DNA, 75 bp, synthetic construct
  source 1..75: mol_type = other DNA
cgcggtttctgaactcacaaaaaagaagaataaaaaaaaggttaaggtacttcttctttcttctttaacatctat

SEQ ID NO: 342238 - DNA, 75 bp, synthetic construct
  source 1..75: mol_type = other DNA
tttcgagtgcctataactggcttactggcggtacagtgggtaacccttcttcatatcagggtggagagatgttat

SEQ ID NO: 342239 - DNA, 75 bp, synthetic construct
  source 1..75: mol_type = other DNA
aatacgttgctttataccgaaatggtaaccacaggcgcgattattcacggcaaaggtgattacctggcatacagc

SEQ ID NO: 342240 - DNA, 75 bp, synthetic construct
  source 1..75: mol_type = other DNA
aagttgtggctcaacttgtaagtcttattactaacattgaatcgataagttcgacaccacttacgcggcaggcac

SEQ ID NO: 342241 - DNA, 75 bp, synthetic construct
  source 1..75: mol_type = other DNA
aaaagatggtaaaggtactgcattctcactggaagaaggtagttctgtggccgaaaaagaatctgacaagagcat

SEQ ID NO: 342242 - DNA, 75 bp, synthetic construct
  source 1..75: mol_type = other DNA
gggctccggtaatcagtacattaaagaccgtaataacgcccttgatcacctttccagtgcctataactggcttac

SEQ ID NO: 342243 - DNA, 75 bp, synthetic construct
  source 1..75: mol_type = other DNA
gatggcaatgtcgctggcggcttatcacgaagagatgcagcacaatatcgaccaggcgacgtccgatctgcgtga

SEQ ID NO: 342244 - DNA, 75 bp, synthetic construct
  source 1..75: mol_type = other DNA
cagcatggatatcaccgtcacccggaacagtccgactggtcaggcaatgacagccgatgcggaagccgcagtcag

SEQ ID NO: 342245 - DNA, 75 bp, synthetic construct
  source 1..75: mol_type = other DNA
ttctggttgtaccgtcagctggaaaacgagtacgactggctgagctcagatgccgctgtggatgaggccctgctc

SEQ ID NO: 342246 - DNA, 75 bp, synthetic construct
  source 1..75: mol_type = other DNA
tgtatacgctgaatgagctatcctccaccgcacagcaaaaagcccgcgactggtaccgtcagcatcatgctgaca

SEQ ID NO: 342247 - DNA, 75 bp, synthetic construct
  source 1..75: mol_type = other DNA
gtgatctgcatcgtatcgcggatgccctgcaggcggttcagaaacgtaacttctggcagttacaggctgaaatca

SEQ ID NO: 342248 - DNA, 75 bp, synthetic construct
  source 1..75: mol_type = other DNA
gtgaactgcatcgtatcgcggatgccctgcaggcggtacagaaacgtaacttctggcagttacaggctgaaatca

SEQ ID NO: 342249 - DNA, 75 bp, synthetic construct
  source 1..75: mol_type = other DNA
atttctgagcttacgcctgattctttttttggtgtttattactaccgtgcgcatgagttgcgatttaactcttta

SEQ ID NO: 342250 - DNA, 75 bp, synthetic construct
  source 1..75: mol_type = other DNA
ttctggttatacagtcaactggaaaacgagtacgactggctgacctcagatgacgccgtggatgaggcgcttctc

SEQ ID NO: 342251 - DNA, 75 bp, synthetic construct
  source 1..75: mol_type = other DNA
cggaacagtccgactggtcaggctatgacagccgatgcggaagccgctgtcagcgaagccctgcgcgacctggcc

SEQ ID NO: 342252 - DNA, 75 bp, synthetic construct
  source 1..75: mol_type = other DNA
atgagcagcattatcaccatcacagtgtatacgctggatgaactttcctgcccggcacggagaaaagcccgcgac

SEQ ID NO: 342253 - DNA, 75 bp, synthetic construct
  source 1..75: mol_type = other DNA
agaattgaaaattgtagtgtgaagacagtgtatacccatcgacgtaatgctgaggccaagctgtactcaaaaata

SEQ ID NO: 342254 - DNA, 75 bp, synthetic construct
  source 1..75: mol_type = other DNA
tggactgagtcgtgatattagaaaagaactggcctatgtgattaatggcaggttcctgagaaaagatattaagaa

SEQ ID NO: 342255 - DNA, 75 bp, synthetic construct
  source 1..75: mol_type = other DNA
acgagtacgactggctgacctcagatgccactgtggatgaggcccttctcatcaacgaatacacctttaccgaag

SEQ ID NO: 342256 - DNA, 75 bp, synthetic construct
  source 1..75: mol_type = other DNA
gtgacctgcatcgtatcgcggatgccctgcaggcggtccagaaacgtaacttctggcagttacaggctgaaatca

SEQ ID NO: 342257 - DNA, 75 bp, synthetic construct
  source 1..75: mol_type = other DNA
cgacgaatcgcccagcagcgatgccaaaaatagtcaaaatatgttgggatatattgcgcttgagctggatcttaa

SEQ ID NO: 342258 - DNA, 75 bp, synthetic construct
  source 1..75: mol_type = other DNA
tatcgtttggaatatatcaagtttagataaaaaagacatattgtctatttcaagaatggtttatgctttttcgac

SEQ ID NO: 342259 - DNA, 75 bp, synthetic construct
  source 1..75: mol_type = other DNA
agtttagataaaaaagatatattgtctatctcaagaatggtttacgcactttcgactttgaaaaaaaagtcctaa

SEQ ID NO: 342260 - DNA, 75 bp, synthetic construct
  source 1..75: mol_type = other DNA
cggcgatatttcgttccatagccagccgaatcgcggttcaactttctggttccacattaatctcgatctgaaccc

SEQ ID NO: 342261 - DNA, 75 bp, synthetic construct
  source 1..75: mol_type = other DNA
tggtgaataccgtcgaccgcatccgtcgcgggcaactcgacagccgagtggaaggatttatgctcggcgagctgg

SEQ ID NO: 342262 - DNA, 75 bp, synthetic construct
  source 1..75: mol_type = other DNA
cgaaccaaactccgcagcagcgcaatgtacgctggatattttaagtgaaacgccgctggaagtggtttatagccc

SEQ ID NO: 342263 - DNA, 75 bp, synthetic construct
  source 1..75: mol_type = other DNA
gtgagctgcatcgtatcgcggatgccctgcaggcggtgcagaaacgtaacttctggcagttacaggctgaaatca

SEQ ID NO: 342264 - DNA, 75 bp, synthetic construct
  source 1..75: mol_type = other DNA
gtgagctccatcgtatcgcggatgccctgcaggcggtccagaaacgtaacttctggcagttacaggctgaaatca

SEQ ID NO: 342265 - DNA, 75 bp, synthetic construct
  source 1..75: mol_type = other DNA
gtgagctacatcgtatcgcggatgccctgcaggcggtacagaaacgtaacttctggcagttacaggctgaaatca

SEQ ID NO: 342266 - DNA, 75 bp, synthetic construct
  source 1..75: mol_type = other DNA
acgaagttgttgatgctcataattttatcgtttggaatatatcaagtttagataaaaaagacatattgtctattt

SEQ ID NO: 342267 - DNA, 75 bp, synthetic construct
  source 1..75: mol_type = other DNA
tcgcgtgatgacggttggcagcgtgaagtgagcgacgatcgtcgcagacaatatgatgatcgccaccgccagttt

SEQ ID NO: 342268 - DNA, 75 bp, synthetic construct
  source 1..75: mol_type = other DNA
acggaattataaaggttaagaagtggaatcatcagaataaaactttcaatattgatacaattcttaaaccagaac

SEQ ID NO: 342269 - DNA, 75 bp, synthetic construct
  source 1..75: mol_type = other DNA
gggatggtgaacgggtattctgtaacccaccatacagcgacattccgtcgttcctcttaaaagcgtctgaagcag

SEQ ID NO: 342270 - DNA, 75 bp, synthetic construct
  source 1..75: mol_type = other DNA
taacagcagacaaaaagactctggtcgctgaagcccgccgtaatctggccactgtacttaaacgcaacgcggacc

SEQ ID NO: 342271 - DNA, 75 bp, synthetic construct
  source 1..75: mol_type = other DNA
taatggcaacgattggcttctctctgttccgctatgttgatcgtgtattctgggatgatacaacgcctgaagcag

SEQ ID NO: 342272 - DNA, 75 bp, synthetic construct
  source 1..75: mol_type = other DNA
tagcggcattatctgtaagttttgccgggttttctgcgaatgtccggagtgcggataccaaaacggccacattta

SEQ ID NO: 342273 - DNA, 75 bp, synthetic construct
  source 1..75: mol_type = other DNA
aagaacttacaccgtgaatttattttcagtctggatggtgctgcaactgagcatgacacgctgttaccacgattc

SEQ ID NO: 342274 - DNA, 75 bp, synthetic construct
  source 1..75: mol_type = other DNA
ggaaacatcatgggggttctgattactggagaactccatttttattattcaagaacttacaccgtgagtttagtt

SEQ ID NO: 342275 - DNA, 75 bp, synthetic construct
  source 1..75: mol_type = other DNA
ggcagcgtcgcatcaggcaatgctgttattgtcggatgcggcgtaagcgccttatccgacctacacacagcactg

SEQ ID NO: 342276 - DNA, 75 bp, synthetic construct
  source 1..75: mol_type = other DNA
aggtggtacagaaagtcgagaagcaactctttgatctgtataaaaacccggatctgaaagtgaaaccgaaagagc

SEQ ID NO: 342277 - DNA, 75 bp, synthetic construct
  source 1..75: mol_type = other DNA
attgcttgatggtgtggcatccgggcagttaaaagcatctggcgttaaaaatattttcgatctgccatttagcga

SEQ ID NO: 342278 - DNA, 75 bp, synthetic construct
  source 1..75: mol_type = other DNA
atcacagcgaccaggtgtttgcgatcagcaacattgatccgttcttcgagtccagcgtgctgtcacgcgggctga

SEQ ID NO: 342279 - DNA, 75 bp, synthetic construct
  source 1..75: mol_type = other DNA
gcatggaagacgaacagttttccgtcaagcattacgacgcgcgagtgaaagacggcgtggtgcagctgcgcggtt

SEQ ID NO: 342280 - DNA, 75 bp, synthetic construct
  source 1..75: mol_type = other DNA
cagcaacatcgacccgttcttcgagtccagcgtgctgtcacgcgggctgattgcggaacaccagggcgagctgtg

SEQ ID NO: 342281 - DNA, 75 bp, synthetic construct
  source 1..75: mol_type = other DNA
gaacatatttatggctggagaacaacaacatacctgtaaaactgacagggcaggattctgatgcattctgcagtg

SEQ ID NO: 342282 - DNA, 75 bp, synthetic construct
  source 1..75: mol_type = other DNA
atatacgcccgttccgccactggaagacatggagctttaccagacgtttactgatgaatactttgaacccgcatt

SEQ ID NO: 342283 - DNA, 75 bp, synthetic construct
  source 1..75: mol_type = other DNA
aaactggattcactggttactgccgggaaactgattggtgcggagtgctggtatgacgtggtggataacggcacc

SEQ ID NO: 342284 - DNA, 75 bp, synthetic construct
  source 1..75: mol_type = other DNA
cgccagcggtggcgatatgaacacactacgcctgggcatcgatggcatcagccaggcaacgccgctggatacgtt

SEQ ID NO: 342285 - DNA, 75 bp, synthetic construct
  source 1..75: mol_type = other DNA
ggggttatgcgtgatgatcgttttaattccctgaaacaggaattttccggcgttcctgatgatgcggctgatgcg

SEQ ID NO: 342286 - DNA, 75 bp, synthetic construct
  source 1..75: mol_type = other DNA
atgtgcaataaaaccacaccggacgcagccgccgaagccatcaaaacgctgatgcacgcgctgattgatatttct

SEQ ID NO: 342287 - DNA, 75 bp, synthetic construct
  source 1..75: mol_type = other DNA
atgtgcaataacacccatccggacgcagccgccgaagctatcaaaacactgattgatgcgctgattgatatttct

SEQ ID NO: 342288 - DNA, 75 bp, synthetic construct
  source 1..75: mol_type = other DNA
gtcgtccgcgtatcctggcagcgcccggtcttgagtccgatgccgttacggcggcactggtgacgattgcgggca

SEQ ID NO: 342289 - DNA, 75 bp, synthetic construct
  source 1..75: mol_type = other DNA
tggccgcgccggagctggacacggaggcggtaacaaaatccctgtgcgtgattgcgggtaaactgcgcgcgtttg

SEQ ID NO: 342290 - DNA, 75 bp, synthetic construct
  source 1..75: mol_type = other DNA
gaagatctgacgctgtatcagaccttcacggatgagtatttcgactccgcttttgcaacgctgggaggtgcgtaa

SEQ ID NO: 342291 - DNA, 75 bp, synthetic construct
  source 1..75: mol_type = other DNA
agattatgcaatatccgatctacagcggtattctggcgggcgctggttggcaatgggtaaatctcgcctggctgg

SEQ ID NO: 342292 - DNA, 75 bp, synthetic construct
  source 1..75: mol_type = other DNA
gctcttatgcaatttagtgctgatatggcgctgaatgaggcaaaagccatcctgattgctgattgtgaaaatggc

SEQ ID NO: 342293 - DNA, 75 bp, synthetic construct
  source 1..75: mol_type = other DNA
ctggcggattttgttgaggcggggatgaaaaccgcgcctgaaaccaaacagacatcggtaggtgaaccatgctaa

SEQ ID NO: 342294 - DNA, 75 bp, synthetic construct
  source 1..75: mol_type = other DNA
cgatcgcgatgctgagctgctggcacgcgagatgattctggcgcacgagaaatggctgccaaattttgccgactg

SEQ ID NO: 342295 - DNA, 75 bp, synthetic construct
  source 1..75: mol_type = other DNA
tggcgggaggtgatggtgttacagcgcagactggaggttctgtccgcatcaccggagaacgatttgccacgctca

SEQ ID NO: 342296 - DNA, 75 bp, synthetic construct
  source 1..75: mol_type = other DNA
ctgtcagcgtcaccggagaaaaatttgccacgctcatggtggctgcgtcttttacagagaggtacccggtcatga

SEQ ID NO: 342297 - DNA, 75 bp, synthetic construct
  source 1..75: mol_type = other DNA
attactgctgaatgcggcagacgcatggcgggaggtaatggcgctgcgataccgtctggaaagattttcagcgcg

SEQ ID NO: 342298 - DNA, 75 bp, synthetic construct
  source 1..75: mol_type = other DNA
gaagacttgcgctaccacgatatgcgccgggagggggccagcaggctttttgaggcgggttttagtatagaagaa

SEQ ID NO: 342299 - DNA, 75 bp, synthetic construct
  source 1..75: mol_type = other DNA
atgacaggccaccagtgtataaggcattactgctgaatgcggcagacgcatggcgggaagtggtggcgttacagc

SEQ ID NO: 342300 - DNA, 75 bp, synthetic construct
  source 1..75: mol_type = other DNA
accgcagagtttgcggcaatgtcggattttattacggaacactactggacgggacagggcagtatcaatgtgtac

SEQ ID NO: 342301 - DNA, 75 bp, synthetic construct
  source 1..75: mol_type = other DNA
atgagcacaaaaacagaattgctggcgcgcatcgatgatctgagcgcccagcttggtcgcgaattaccgcgtagc

SEQ ID NO: 342302 - DNA, 75 bp, synthetic construct
  source 1..75: mol_type = other DNA
ataaagcgattaatcatgacttccgccagctggaaaaatatctggagccgatccctaaagcggactgggagcagg

SEQ ID NO: 342303 - DNA, 75 bp, synthetic construct
  source 1..75: mol_type = other DNA
gcaactggagaaatatctggagccgatccctaaagcggactgggaacaggtgaaagcgtattactacgccatgta

SEQ ID NO: 342304 - DNA, 75 bp, synthetic construct
  source 1..75: mol_type = other DNA
tgcaggcaaatattcctgtctgggcacatgaacaactggctgcatgggatgctgcagagtttgcggcaatgtcgg

SEQ ID NO: 342305 - DNA, 75 bp, synthetic construct
  source 1..75: mol_type = other DNA
tgattgctgttggatttttgctttccggatgtgggcaaacagagccaacagaggctgatatcaataatacgctga

SEQ ID NO: 342306 - DNA, 75 bp, synthetic construct
  source 1..75: mol_type = other DNA
ctgcctattttcataggcgttgagcgcgatgctttgaaatctgaatgggggcagccaggtacaattgccttcctc

SEQ ID NO: 342307 - DNA, 75 bp, synthetic construct
  source 1..75: mol_type = other DNA
tacgcctgcgccaaacgtcgagcattttaatattctcgatccgttccataaaacgctgatcccgctcgacagttg

SEQ ID NO: 342308 - DNA, 75 bp, synthetic construct
  source 1..75: mol_type = other DNA
cggacttacagtccgtgacttactacacaaatatttaaatgacccaaatgccggaggtaaagcaggccgtactaa

SEQ ID NO: 342309 - DNA, 75 bp, synthetic construct
  source 1..75: mol_type = other DNA
tattcgccgtaatcatggtacctgtcgtgatggccatcatcctgggtctgatttacggtcttggtgaagtattca

SEQ ID NO: 342310 - DNA, 75 bp, synthetic construct
  source 1..75: mol_type = other DNA
cctcaacggtttccagcaactgctgctgggtatgcccgcgcctgtggcgattatcgttttcgccctgttagcctg

SEQ ID NO: 342311 - DNA, 75 bp, synthetic construct
  source 1..75: mol_type = other DNA
gcaactggacgaacacggtcagaacctgattcgggtgatggctgaaaatggtcgtctgaaagtgcttccggaagt

SEQ ID NO: 342312 - DNA, 75 bp, synthetic construct
  source 1..75: mol_type = other DNA
ggttaggtaagttgagcgttttaacagaagattccattacagatgtgtttaaccaagtgccttcatcgtgtatat

SEQ ID NO: 342313 - DNA, 75 bp, synthetic construct
  source 1..75: mol_type = other DNA
tttggtggtattagtggtgaagttacgagtcgaacagagggaacagaaccacagcgcagcactcagaatgcaagc

SEQ ID NO: 342314 - DNA, 75 bp, synthetic construct
  source 1..75: mol_type = other DNA
tcacgcagtcgcggcaaccgtcgctggtacaccactggccctgtcggtctgctgacccgcccattcattaagtaa

SEQ ID NO: 342315 - DNA, 75 bp, synthetic construct
  source 1..75: mol_type = other DNA
cattatcctcgaccgcctgacgcaggccgttgggcgcgactcacgcagtcgcggcaaccgtcgctggtacaccac

SEQ ID NO: 342316 - DNA, 75 bp, synthetic construct
  source 1..75: mol_type = other DNA
gatctggctggcgagaagtccgcgagcggcgaaaattattcgtccactgcttgatgccatgcagaccacgccagc

SEQ ID NO: 342317 - DNA, 75 bp, synthetic construct
  source 1..75: mol_type = other DNA
cattatcctcgatcgcctgacgcaggccgttgggcgcgactcacgtagtcgcggcaaccgtcgctggtacaccac

SEQ ID NO: 342318 - DNA, 75 bp, synthetic construct
  source 1..75: mol_type = other DNA
ggcgtggcgacgctggtttcgctgattgccatcggcgcaatcggtgcctggtcacaggcaatggttactctggcg

SEQ ID NO: 342319 - DNA, 75 bp, synthetic construct
  source 1..75: mol_type = other DNA
gtcgcaggcaatggtgactttggcgctggtgttaaccgccctgctattctgtattgtcatcggtttgccgctggg

SEQ ID NO: 342320 - DNA, 75 bp, synthetic construct
  source 1..75: mol_type = other DNA
cacgctgacgtccgatacttattcgcaaggtgaactgtacgattttgcctcgacgcagctggctccgacgatttc

SEQ ID NO: 342321 - DNA, 75 bp, synthetic construct
  source 1..75: mol_type = other DNA
aggcggcgatcaacgccgcacaaagtctgctacccagcgggatgcccagccgtccgacctatcgcaaagcgaacc

SEQ ID NO: 342322 - DNA, 75 bp, synthetic construct
  source 1..75: mol_type = other DNA
cgctggcagatccagaccaacgatgaactgaaaaccgccgctgaatatcagccgctgattattcattacaacaac

SEQ ID NO: 342323 - DNA, 75 bp, synthetic construct
  source 1..75: mol_type = other DNA
gttaatggcgctcaccatcgctactggtttcgtggtggatgacgccatcgtggtgctggaaaacattgcccgtca

SEQ ID NO: 342324 - DNA, 75 bp, synthetic construct
  source 1..75: mol_type = other DNA
gaacagcgggatgatgtttatcaccctcaagccacgcgacgaacgcagcgaaacggcgcagcaaattatcgaccg

SEQ ID NO: 342325 - DNA, 75 bp, synthetic construct
  source 1..75: mol_type = other DNA
acgccgggatgaccaacgccaaaccggctattttgctgatgatccgcaagctgccggaagccaatattatccaga

SEQ ID NO: 342326 - DNA, 75 bp, synthetic construct
  source 1..75: mol_type = other DNA
tcgcaaatcagcacagaagacacggacatgctgacaaaacaactgcaggcgttgccggaagaactggcaggtagt

SEQ ID NO: 342327 - DNA, 75 bp, synthetic construct
  source 1..75: mol_type = other DNA
gaatgaaaacacaggcagagagagtggttcggattccgtacatacccctgcacctgtcgtgcaggtaaccgaact

SEQ ID NO: 342328 - DNA, 75 bp, synthetic construct
  source 1..75: mol_type = other DNA
gctgaacgcatggctgctgatgtgcgggcagacaacatttactccgtcagcctcgacgggctgggtgtcaccatg

SEQ ID NO: 342329 - DNA, 75 bp, synthetic construct
  source 1..75: mol_type = other DNA
attttccaggcctgtctgctgcgttttcgcccgattatgatgactaccctggcggcgctgtttggtgcgctgccg

SEQ ID NO: 342330 - DNA, 75 bp, synthetic construct
  source 1..75: mol_type = other DNA
ggctgctctatattggccttgttaaaatcgacggcgaagtcgtctggcaggccggaaaccaggaaacagaggcag

SEQ ID NO: 342331 - DNA, 75 bp, synthetic construct
  source 1..75: mol_type = other DNA
acaccaccggcgcgaacgcggaagatcttagcgatgcgctgatggaagcgggtgccgtttctatcacttttcagg

SEQ ID NO: 342332 - DNA, 75 bp, synthetic construct
  source 1..75: mol_type = other DNA
ccgtacgcgtcgggctgaatccgcaggcgctgtttaatcagggcgtgtcgctggacgacgtacgcaccgccatca

SEQ ID NO: 342333 - DNA, 75 bp, synthetic construct
  source 1..75: mol_type = other DNA
cgcctgaaactggaatttaccgacggggaattccgccagctggctacgcaactttcaggtgtgcagcgtaccgat

SEQ ID NO: 342334 - DNA, 75 bp, synthetic construct
  source 1..75: mol_type = other DNA
tttcgcccgataatgatgacgaccctggcggcgctgtttggcgcgctgccgctggtattgtcgggcggcgatggc

SEQ ID NO: 342335 - DNA, 75 bp, synthetic construct
  source 1..75: mol_type = other DNA
ggataatgtcactggctttaccggtggctcgcgagttaacagcggaatgatgtttatcacgctgaaaccgcgcga

SEQ ID NO: 342336 - DNA, 75 bp, synthetic construct
  source 1..75: mol_type = other DNA
gatctctatctcaccggcatccaactggcgcaggggtatcttggacgacccgatctgaccgccagccgctttatt

SEQ ID NO: 342337 - DNA, 75 bp, synthetic construct
  source 1..75: mol_type = other DNA
accgctgttcggtccggtactcaatatcaaggtatttgattaccaactggatattcctggtgttcagacgcaaac

SEQ ID NO: 342338 - DNA, 75 bp, synthetic construct
  source 1..75: mol_type = other DNA
tgctataacgccccgcttaccccacagggcagcgcgccgctgcaactttcacaaccgtaccacacggcttatatc

SEQ ID NO: 342339 - DNA, 75 bp, synthetic construct
  source 1..75: mol_type = other DNA
gtcggtcgccattaccctgtgcggcatactgggtttccgtatgctgccggtcgccccgctgccgcaggtcgattt

SEQ ID NO: 342340 - DNA, 75 bp, synthetic construct
  source 1..75: mol_type = other DNA
ggttaatcatcagggattgtcggcggcctcgaccatctcgttcaacctgccaaccgggaaatcgctttctgaggc

SEQ ID NO: 342341 - DNA, 75 bp, synthetic construct
  source 1..75: mol_type = other DNA
aatcgacgtgcaggccgctaacagtctgctgaataacgcctttggtcagcggcaaatctcgaccatttaccagcc

SEQ ID NO: 342342 - DNA, 75 bp, synthetic construct
  source 1..75: mol_type = other DNA
gaagtcggctttacggtgctgtcgatgagtctgtcactggtggcggtgttcctgccgctgctgttgatgggcgga

SEQ ID NO: 342343 - DNA, 75 bp, synthetic construct
  source 1..75: mol_type = other DNA
ccgtgcgcgtcgggctgaacccgcaggcactgtttaatcagggcgtgtcgctggacgacgtacgcactgccatca

SEQ ID NO: 342344 - DNA, 75 bp, synthetic construct
  source 1..75: mol_type = other DNA
gcgcattgccggggtcagtgaaatgacctccagcagttcgctcggcagcacgcgtattattttgcagtttgattt

SEQ ID NO: 342345 - DNA, 75 bp, synthetic construct
  source 1..75: mol_type = other DNA
tacagttctgcacccgctatatttggagtgatcacgtacatcattaatgatgccaggaatgcggagtttgatgac

SEQ ID NO: 342346 - DNA, 75 bp, synthetic construct
  source 1..75: mol_type = other DNA
ctggcacctacacggaccgccgccaccgccgcgccaccataagaaagctcctcatgatcatcacggcggtcatgg

SEQ ID NO: 342347 - DNA, 75 bp, synthetic construct
  source 1..75: mol_type = other DNA
attcagggggccagtctaattaatatcagcctcgacgaacttaacactattgatttatcccccttaatccagagt

SEQ ID NO: 342348 - DNA, 75 bp, synthetic construct
  source 1..75: mol_type = other DNA
atggtggcttgtattgcacattctaatgaaccctacggcgagatactggcaagccacttatggccaagagagtga

SEQ ID NO: 342349 - DNA, 75 bp, synthetic construct
  source 1..75: mol_type = other DNA
gatcaaccaaattattgccgcgcagggaaataaagaaaaattactgccgttggggcgagcactggatcgcgtatt

SEQ ID NO: 342350 - DNA, 75 bp, synthetic construct
  source 1..75: mol_type = other DNA
gaatccaagcgtcaacgtcagtcagcacaaccggctacacccttattacctcgtctacattaatcgcgagggtga

SEQ ID NO: 342351 - DNA, 75 bp, synthetic construct
  source 1..75: mol_type = other DNA
atgctgtctcaaacctcgtcaacaaaatggacgagtcgacgtttacggcgacctacctcagtctgtttaaccaga

SEQ ID NO: 342352 - DNA, 75 bp, synthetic construct
  source 1..75: mol_type = other DNA
gttgctatgcggattatcgctgatatggcaccgaatgaggccagcaaaattatcatggctgatatggaggtggtg

SEQ ID NO: 342353 - DNA, 75 bp, synthetic construct
  source 1..75: mol_type = other DNA
cagccgccgaagccatcataacgctaatgcacgcgctgattgatatttcatgcacggcagcaaccgcagaaaaac

SEQ ID NO: 342354 - DNA, 75 bp, synthetic construct
  source 1..75: mol_type = other DNA
atgcgtgatgatcgttttaattccctgaaacaagaattttccggcgtttctgatgatgcggctgatgcgctttcg

SEQ ID NO: 342355 - DNA, 75 bp, synthetic construct
  source 1..75: mol_type = other DNA
tgaaataccagaacaggttaaagttaaactattcagaattacttctgctggctaattttgtttcatttcaccagg

SEQ ID NO: 342356 - DNA, 75 bp, synthetic construct
  source 1..75: mol_type = other DNA
atggacattgaagattttctggaggcggaagacaatgatctgtctctgtggaatgatgatattttaagcattgac

SEQ ID NO: 342357 - DNA, 75 bp, synthetic construct
  source 1..75: mol_type = other DNA
tatcgttgctatagctggcctgaaaatttaccagaaatataaggctccccctaaagaagaaacagacaagacaat

SEQ ID NO: 342358 - DNA, 75 bp, synthetic construct
  source 1..75: mol_type = other DNA
gcggagacagcatggcggacggtagtctgtacaatggcgatctgctggttgtggacagtgctgaaaagccgcggc

SEQ ID NO: 342359 - DNA, 75 bp, synthetic construct
  source 1..75: mol_type = other DNA
ttgctggcggcctcagaacagcttacagccaataagttagatgaatatgaattagtcggagaactggcgcttaca

SEQ ID NO: 342360 - DNA, 75 bp, synthetic construct
  source 1..75: mol_type = other DNA
ctcgccagccgtattaatggcctgttgccagatttaagcaatgaagaggcactggagagtgccgcaatattaagt

SEQ ID NO: 342361 - DNA, 75 bp, synthetic construct
  source 1..75: mol_type = other DNA
agatcccactaccaccacccggtattttaagtaaagcggtagttcagggggaaaatagcgccaccgttaaacaac

SEQ ID NO: 342362 - DNA, 75 bp, synthetic construct
  source 1..75: mol_type = other DNA
gatgcgtcactttctccctgtgatggctcgctgctgatatgcgcgatagatggggaattcaggataaagcgatac

SEQ ID NO: 342363 - DNA, 75 bp, synthetic construct
  source 1..75: mol_type = other DNA
agggaaggaatattcctgggggcgctgcttgtggtagatgcgtcacttactgcctgcgatggctcactgctgata

SEQ ID NO: 342364 - DNA, 75 bp, synthetic construct
  source 1..75: mol_type = other DNA
ccgtaaaagtcagcagcaaaaaaataagagaattagcacagaaagctaaagagatacttgcagctattgatagtg

SEQ ID NO: 342365 - DNA, 75 bp, synthetic construct
  source 1..75: mol_type = other DNA
atggcaagttatatggagttattaaataaattccagtaccccaaaagcagcctgcttaatttattgaatgtaatg

SEQ ID NO: 342366 - DNA, 75 bp, synthetic construct
  source 1..75: mol_type = other DNA
tacagataggcgatcgtgataatcgtggctattactgggatggaggtcactggcgcgaccacggctggtggaaac

SEQ ID NO: 342367 - DNA, 75 bp, synthetic construct
  source 1..75: mol_type = other DNA
ccggagttccgcacactgtatccggaaaacatctgtatttttggtgttgtcactcacgtgatacacaggacgcgg

SEQ ID NO: 342368 - DNA, 75 bp, synthetic construct
  source 1..75: mol_type = other DNA
cgaagatgaagtggggctaattaacggtgaaggatgcctgatagccgatcatctgcaggctgtctgtgcgtttct

SEQ ID NO: 342369 - DNA, 75 bp, synthetic construct
  source 1..75: mol_type = other DNA
cattagttcgtgctgaaaaaatattaactcacatcgcatgggtaggcgtggcgagttatatggaattattaaaag

SEQ ID NO: 342370 - DNA, 75 bp, synthetic construct
  source 1..75: mol_type = other DNA
tggcagcgctgcgagatgaaggaataatgttggtcgccagcggtaacgtggtgcataacctgcgtacggtgaagt

SEQ ID NO: 342371 - DNA, 75 bp, synthetic construct
  source 1..75: mol_type = other DNA
cgaccttaggcttgattctggcaatctttattgcttctcgccgtgctgattatcgccaggtggcgaaactggcgt

SEQ ID NO: 342372 - DNA, 75 bp, synthetic construct
  source 1..75: mol_type = other DNA
ctggcatcgttgggtagcgtcgtcggctgggcttatgtgatctttgtccctttgctctggttcttcggtattcat

SEQ ID NO: 342373 - DNA, 75 bp, synthetic construct
  source 1..75: mol_type = other DNA
cttcaccctcagcgtttacaaaacaccagccagcttctggcggagcgaatcacccctctgttaacttccttgcga

SEQ ID NO: 342374 - DNA, 75 bp, synthetic construct
  source 1..75: mol_type = other DNA
gtatgcgcatcttcatcctcagcgcttacagaacaccagtcagttactggcggaaaggataacggctcagctacc

SEQ ID NO: 342375 - DNA, 75 bp, synthetic construct
  source 1..75: mol_type = other DNA
gggccggaaggcaaagcatgacctctgttcatccggcaagggtggtacagctactcagggagaacaacgcccgac

SEQ ID NO: 342376 - DNA, 75 bp, synthetic construct
  source 1..75: mol_type = other DNA
tcagaatgatggcctacagctttaccgcccccgatattatgaaagcgctgattgcggccaaacgccgcggtgtag

SEQ ID NO: 342377 - DNA, 75 bp, synthetic construct
  source 1..75: mol_type = other DNA
accttccctcacaggaactgattaatgccgtgctggcacatattgaggaagtccgcccggtcacagcgaaggaca

SEQ ID NO: 342378 - DNA, 75 bp, synthetic construct
  source 1..75: mol_type = other DNA
gatgtggccattacgtcagccaatgacctcccctcgcaggaactgatcaatgccgtgctggcacatattgaggaa

SEQ ID NO: 342379 - DNA, 75 bp, synthetic construct
  source 1..75: mol_type = other DNA
atgaccgtcaccccatatagtgtcggtgaggcctatgcggttggcgcaaactggttaggtggggcgaatatcatc

SEQ ID NO: 342380 - DNA, 75 bp, synthetic construct
  source 1..75: mol_type = other DNA
gataatgtctttaatggcaccgttctttattggcatggcgctggcagaagagcgtaaagtcgatgcgctggcggc

SEQ ID NO: 342381 - DNA, 75 bp, synthetic construct
  source 1..75: mol_type = other DNA
cgccagaactggccgggcagtacctgaagcactggcaatcacgctggaatcagggccgggattttaccccgtctt

SEQ ID NO: 342382 - DNA, 75 bp, synthetic construct
  source 1..75: mol_type = other DNA
gggagaaattgccactgtagctgatattcaggctggtacagccagtaagttggtggatgcggaggggctaaaaaa

SEQ ID NO: 342383 - DNA, 75 bp, synthetic construct
  source 1..75: mol_type = other DNA
atttgccgatacctggcaggcaacgctgaatgccacccattccgaagtcgaatttgacagcaaaatgatgtatgt

SEQ ID NO: 342384 - DNA, 75 bp, synthetic construct
  source 1..75: mol_type = other DNA
ctgggctaacgttttccccaatgaaattggcagtttctacaacttcaacggtaacttcccgcagactaactgggc

SEQ ID NO: 342385 - DNA, 75 bp, synthetic construct
  source 1..75: mol_type = other DNA
atgctttcaacacaatttaacagggataatcaatatcaagccatcaccaaaccgtcactgcttgccacctgcata

SEQ ID NO: 342386 - DNA, 75 bp, synthetic construct
  source 1..75: mol_type = other DNA
ttgatgctgccacagccatgattgcattaggtggaggaaaaggcgtttccgatcgtgcgagtaaaatgcgtaaag

SEQ ID NO: 342387 - DNA, 75 bp, synthetic construct
  source 1..75: mol_type = other DNA
cactatccgcacgtcttggcgaacgggcacaggctataggactcgaaatgcctgtaaattcgcaggctggagacg

SEQ ID NO: 342388 - DNA, 75 bp, synthetic construct
  source 1..75: mol_type = other DNA
ggaaatgtgaatgcttcagctattactaccatgttgttgtcggaattcaaaccccaaaaagtcttgatgatgggg

SEQ ID NO: 342389 - DNA, 75 bp, synthetic construct
  source 1..75: mol_type = other DNA
acctttgtttatatttttatggatggttaatgctttttttcagggatggggatggcctccgtgttcaaaaatttt

SEQ ID NO: 342390 - DNA, 75 bp, synthetic construct
  source 1..75: mol_type = other DNA
atgtccatattttcagagtctcctgacaaagaaataacaatgagtcaagctgatattgataaaacatataaatat

SEQ ID NO: 342391 - DNA, 75 bp, synthetic construct
  source 1..75: mol_type = other DNA
gtatcggcgacaaatgtccagaacactggatttaatattacagtgtcgcccggttcaggatatggttcatctgct

SEQ ID NO: 342392 - DNA, 75 bp, synthetic construct
  source 1..75: mol_type = other DNA
actctgccgattgatgacgaaaatgattacagcgttacgtctacctctgcgggtaccaaaatgcagatgactcag

SEQ ID NO: 342393 - DNA, 75 bp, synthetic construct
  source 1..75: mol_type = other DNA
tggaaaacacgctggggatcagcaaaagtcaggcggattccgatcgtgctctttattattcccgcggattccaga

SEQ ID NO: 342394 - DNA, 75 bp, synthetic construct
  source 1..75: mol_type = other DNA
cgaccagtcgtgaatttaaaggcgatgtctcggcggaatacggtagctggaacaaagaacggtatgtggcggatt

SEQ ID NO: 342395 - DNA, 75 bp, synthetic construct
  source 1..75: mol_type = other DNA
aaatgggaaagtaacacctccatcgcaccagcacagtgaggagctcattgaatttgccattgattacctgaagaa

SEQ ID NO: 342396 - DNA, 75 bp, synthetic construct
  source 1..75: mol_type = other DNA
tggaagaccgtacagagtattatccggcacagctttcgggtggtcagcatcgcgcgggcattgatgaacggcggt

SEQ ID NO: 342397 - DNA, 75 bp, synthetic construct
  source 1..75: mol_type = other DNA
tcaccaccaatggttaccgtctggaacgcgatgtggcgaactggcgcgatgcgggacttactggcattaacgtca

SEQ ID NO: 342398 - DNA, 75 bp, synthetic construct
  source 1..75: mol_type = other DNA
cctgcaaccgcctgcgcgtctcctccattggtaaactccacctctgcctgtttggtgagggtggtgttaatctgc

SEQ ID NO: 342399 - DNA, 75 bp, synthetic construct
  source 1..75: mol_type = other DNA
aaataccagtcattatggtgaaaaaacgtcgaactttttcggaaccttccctatccgaaaaaacagatattatcg

SEQ ID NO: 342400 - DNA, 75 bp, synthetic construct
  source 1..75: mol_type = other DNA
tttattgatgccattgaaaaagtcgtggacaatccaccgcagaaaatgcagcaaaaccgtttcggtgatgctgcc

SEQ ID NO: 342401 - DNA, 75 bp, synthetic construct
  source 1..75: mol_type = other DNA
cgcgatcgcgggcatacggtgattatcgtcacccacgatccgcaggtcgctgctcaggccgagcgggtgatctaa

SEQ ID NO: 342402 - DNA, 75 bp, synthetic construct
  source 1..75: mol_type = other DNA
gcgccgggaatacggtgccgaatgttgaatttactttgaaacgtggtgaggcatcgccgcgtaacgctggggcaa

SEQ ID NO: 342403 - DNA, 75 bp, synthetic construct
  source 1..75: mol_type = other DNA
aacgcccaatgtgaataatgaaacctgggcgctggcacatgttatagattccactaaatgggatgtcgcacggca

SEQ ID NO: 342404 - DNA, 75 bp, synthetic construct
  source 1..75: mol_type = other DNA
atcatcgttagatccagatatgcagtcgtcggtaagtcttttggggtttgaaaaaatataccataactatggtgg

SEQ ID NO: 342405 - DNA, 75 bp, synthetic construct
  source 1..75: mol_type = other DNA
gccccattcagctgcgttttatcgaactgatggaaacgggcgagggtagcgaactcttccgtaagcaccatatct

SEQ ID NO: 342406 - DNA, 75 bp, synthetic construct
  source 1..75: mol_type = other DNA
cctgcaaccgcctgcgcgtctcctccattggtaaactccatctctgcctgtttggtgaaggcggcgttaacctgc

SEQ ID NO: 342407 - DNA, 75 bp, synthetic construct
  source 1..75: mol_type = other DNA
ttcatcgaactgatggaaacgggcgagggcagcgagctcttccgtaagcatcacatctctggtcaggttctgcgt

SEQ ID NO: 342408 - DNA, 75 bp, synthetic construct
  source 1..75: mol_type = other DNA
tattcctgcctggctggctgagcaccctgaagccggactcacccgggatgaatgggactgtgccgtatcctgtat

SEQ ID NO: 342409 - DNA, 75 bp, synthetic construct
  source 1..75: mol_type = other DNA
tgctgaactgaataaaaaactgtcggcgctgatgccttctgaagatgaaaaaaaacgccgcgatgagcagtttgc

SEQ ID NO: 342410 - DNA, 75 bp, synthetic construct
  source 1..75: mol_type = other DNA
gctggccagtggtgcggacaaggattcagttgtgcgggaggcacttcttcgtgattttgataatccgccctttaa

SEQ ID NO: 342411 - DNA, 75 bp, synthetic construct
  source 1..75: mol_type = other DNA
gggaggctcttcttcgtgattttgataatccgccctttaaaaaagtgccggcttactggtttcatccaggactga

SEQ ID NO: 342412 - DNA, 75 bp, synthetic construct
  source 1..75: mol_type = other DNA
ccagcatcgcaccagcacagtgaggcgctcattgaatttgccattgattacctgaagaacaataaaaagcagggg

SEQ ID NO: 342413 - DNA, 75 bp, synthetic construct
  source 1..75: mol_type = other DNA
agaacaataaaaagcaggggctgatgaagcgcattggtcgttgcatgggatatctgcaggtagcagctgagattg

SEQ ID NO: 342414 - DNA, 75 bp, synthetic construct
  source 1..75: mol_type = other DNA
gtgattttgataatccgccttttaaaaaagtgccggcttactggcttcatcccggactgacttatctgaaagtgc

SEQ ID NO: 342415 - DNA, 75 bp, synthetic construct
  source 1..75: mol_type = other DNA
ggtcacgaactgtcgccacatttgttagtacgtgcggttaactatcaacagctcgctacgccgcaactgttactg

SEQ ID NO: 342416 - DNA, 75 bp, synthetic construct
  source 1..75: mol_type = other DNA
acggtcagacaatccgcgagcgagttcagacagcaggggtcgtgggtgctggcggcgcaggatttccaacacata

SEQ ID NO: 342417 - DNA, 75 bp, synthetic construct
  source 1..75: mol_type = other DNA
gaaccaatgttgaaagtggatcaacagttaatggcgcagcaagccagccgcctgcttcgcggtgttcactatgcg

SEQ ID NO: 342418 - DNA, 75 bp, synthetic construct
  source 1..75: mol_type = other DNA
atgaagcgcattggtcgttgcatgggatatctgcagatagctgctgagattgaagcgctggccagtggtgcggac

SEQ ID NO: 342419 - DNA, 75 bp, synthetic construct
  source 1..75: mol_type = other DNA
atgaaatcactgagcttaataaaaaatttgtcggcgttggtgagttctgaagatgaaaacaaacgccgcgatgag

SEQ ID NO: 342420 - DNA, 75 bp, synthetic construct
  source 1..75: mol_type = other DNA
cctgtgcaatatcctgcatcaccacccgacaggtatatctgcttcgtactgctgtcgcaggtatccctcgttatg

SEQ ID NO: 342421 - DNA, 75 bp, synthetic construct
  source 1..75: mol_type = other DNA
atggtcagattgcactgtcatcggcttatgatggcgtaataggtcaaaaaatcgggcgagcatcggatatagcgc

SEQ ID NO: 342422 - DNA, 75 bp, synthetic construct
  source 1..75: mol_type = other DNA
actaccgtgcagtcattgatgctgaatacgagacaacggcgattgtacgcgtgacacaaattgagggcgaaaaag

SEQ ID NO: 342423 - DNA, 75 bp, synthetic construct
  source 1..75: mol_type = other DNA
gttgcaaatgccagagcaggagataggcattatcaatgctacgactgttagccaggctggtggtgttaagctgaa

SEQ ID NO: 342424 - DNA, 75 bp, synthetic construct
  source 1..75: mol_type = other DNA
caatgagtcgatgaaaaccgcgttatcacgccgctttgaaagccgtattaattgggatttgctcggagtaactac

SEQ ID NO: 342425 - DNA, 75 bp, synthetic construct
  source 1..75: mol_type = other DNA
gaatacctggcgaaatttgatgatatcgctattgatgggtatggctgcctgctgccgatggaccgcgccaccagc

SEQ ID NO: 342426 - DNA, 75 bp, synthetic construct
  source 1..75: mol_type = other DNA
tggatggcagggcgtggtttgtccggtcgctcacttaataaagttacttctgaagatattcttagcctgttccgt

SEQ ID NO: 342427 - DNA, 75 bp, synthetic construct
  source 1..75: mol_type = other DNA
ggcttgagcaggctgaaagcaaaagagaagagcaggcggcagtggctgaagccagagctgatgaagcggcgaatg

SEQ ID NO: 342428 - DNA, 75 bp, synthetic construct
  source 1..75: mol_type = other DNA
cgagagttattgactataaaacagcagaaatgtcggttgatattccaccatttcctgaatggaacagtggtcatt

SEQ ID NO: 342429 - DNA, 75 bp, synthetic construct
  source 1..75: mol_type = other DNA
cgtggcaccattcacgcctaaagcgtatgtggcgccgcaggaaacctttgtttatcggcctcgcttccgttccgt

SEQ ID NO: 342430 - DNA, 75 bp, synthetic construct
  source 1..75: mol_type = other DNA
ccagaaaatttctggcgaagtggaagagaaacaggggctggtgggcttccagaaccttgatggtctgcgtggcat

SEQ ID NO: 342431 - DNA, 75 bp, synthetic construct
  source 1..75: mol_type = other DNA
agagcagttcgcatctatcccgttgcgcgatgaaaccatcggagaaaactcacagcaggctgtctttaatgccgc

SEQ ID NO: 342432 - DNA, 75 bp, synthetic construct
  source 1..75: mol_type = other DNA
aacggttatattccatttacccattcagacgcacccctggggcttgaaggcatcagcgggaaacgtataccgctt

SEQ ID NO: 342433 - DNA, 75 bp, synthetic construct
  source 1..75: mol_type = other DNA
catgggatttggtaccgggctgggtaaaaccacgaccgcgcttgcgcttgaggcgtataacttcgaaacaggtcg

SEQ ID NO: 342434 - DNA, 75 bp, synthetic construct
  source 1..75: mol_type = other DNA
tggttttcacctcactaatactgactggctgccagtcccctcagggaaagtttactcctgagcaagtcgccgcta

SEQ ID NO: 342435 - DNA, 75 bp, synthetic construct
  source 1..75: mol_type = other DNA
tgcgtaataatttcgccagcccatatgaaacgcaggaggccatgcggaatgtggttgagatgaagcaacgccgtt

SEQ ID NO: 342436 - DNA, 75 bp, synthetic construct
  source 1..75: mol_type = other DNA
atgttgtccggttttactccccaccctctgaaacgtctgttcacagccaaccagtgctggacgtccttcctggat

SEQ ID NO: 342437 - DNA, 75 bp, synthetic construct
  source 1..75: mol_type = other DNA
ccagctggaaaaatatctggagccgatccccaaagcggactgggagcaggtgaaagcatattactacgctatgta

SEQ ID NO: 342438 - DNA, 75 bp, synthetic construct
  source 1..75: mol_type = other DNA
agcgaagggcaaagaagtggatagggatgctgacattaagcgtctggaaaccctgatgagcgatgcgacgggtag

SEQ ID NO: 342439 - DNA, 75 bp, synthetic construct
  source 1..75: mol_type = other DNA
tctggagcagtttattcacctgcgtgccgtgagtgaggctaccgctgaggtagacgtcatttccgctgccgcact

SEQ ID NO: 342440 - DNA, 75 bp, synthetic construct
  source 1..75: mol_type = other DNA
attatgctggcggcaaacccggaagaacgccgcgcaatcatggctcgccaggcgcaagagcgtgaagaacgtctg

SEQ ID NO: 342441 - DNA, 75 bp, synthetic construct
  source 1..75: mol_type = other DNA
cgcgaataccggtacaacgaagaagcagaatatcccgtactttgaggatatgaacttcgatagcgtgattgccga

SEQ ID NO: 342442 - DNA, 75 bp, synthetic construct
  source 1..75: mol_type = other DNA
atcacgaggcacagagtttctacagtgctgatgccttcgccaatatgatgtttatcggtttggatgaagttcgtg

SEQ ID NO: 342443 - DNA, 75 bp, synthetic construct
  source 1..75: mol_type = other DNA
agtgattttcagccccgaccgctgaaacgcctgttcacagccaaccagtgctggacgtccttcctggatgcgggc

SEQ ID NO: 342444 - DNA, 75 bp, synthetic construct
  source 1..75: mol_type = other DNA
aggtgggggctgtcatcaatgcatttgatgaaaaatacattagtaaggacgattttgctgatgctgtttctgtta

SEQ ID NO: 342445 - DNA, 75 bp, synthetic construct
  source 1..75: mol_type = other DNA
tctggaggaccgtgctggcataccgtttattccagggcaggatgaaagcctttagcaatatcgatgatattgaac

SEQ ID NO: 342446 - DNA, 75 bp, synthetic construct
  source 1..75: mol_type = other DNA
gtgaaagcgaatctgacgtggcaagggccggtagagcagcatcctctggtgaattacctcgaccatgaaggtggc

SEQ ID NO: 342447 - DNA, 75 bp, synthetic construct
  source 1..75: mol_type = other DNA
agacgacacaatgctggtaagcgatgaagacgcggcccatcttgagcgcattttgggtatcagcacttttgagtg

SEQ ID NO: 342448 - DNA, 75 bp, synthetic construct
  source 1..75: mol_type = other DNA
cgacagggttggtcgtcggccggtgatcctcgtcggaatgtccatttttatgttagcgacgctggttgcggtcac

SEQ ID NO: 342449 - DNA, 75 bp, synthetic construct
  source 1..75: mol_type = other DNA
atgaaaaggcatagaaacgtcaatttattattgatgttggtattactcgtggccgtcggtcagatggcgcaaact

SEQ ID NO: 342450 - DNA, 75 bp, synthetic construct
  source 1..75: mol_type = other DNA
ggcaccaacaaagtgtcgcgcatcaagcaggtggcttccggtcgctttggggttactccggcgtatctggtcaat

SEQ ID NO: 342451 - DNA, 75 bp, synthetic construct
  source 1..75: mol_type = other DNA
agcggcgatttccgcaaacgcgttaacccggagctggtcgaggtcttaagcgttgacgatctggcgatccatgaa

SEQ ID NO: 342452 - DNA, 75 bp, synthetic construct
  source 1..75: mol_type = other DNA
ttgataacggcctgctgaacgcgcagttgctgcaacaggcaaaaccgtttgtcgatgaacgccagagcaaaacct

SEQ ID NO: 342453 - DNA, 75 bp, synthetic construct
  source 1..75: mol_type = other DNA
gcgtcgctctctgcgatgttgccgcaaaccggtcagggcagcctggggttgttgatgaccttaattggattgttg

SEQ ID NO: 342454 - DNA, 75 bp, synthetic construct
  source 1..75: mol_type = other DNA
gtgcatggtttgccggacgcccgaataaacggttctcttcgttaatgtggcagtccgttatctgttgcctgctgg

SEQ ID NO: 342455 - DNA, 75 bp, synthetic construct
  source 1..75: mol_type = other DNA
tgaaggatgcgtattttgatagggggcaggatctcgcaaagctttgtgccgcgctagaagagatacatcagtatt

SEQ ID NO: 342456 - DNA, 75 bp, synthetic construct
  source 1..75: mol_type = other DNA
cgaccgtgtgggtcgccgcccggtgatcctcgtcggaatgtccatttttatgttagcaacgctggtggcggtcac

SEQ ID NO: 342457 - DNA, 75 bp, synthetic construct
  source 1..75: mol_type = other DNA
tgtcagtccgttgctcgcaccgctaatcggcggtctgctggatacgatgtggaactggcgcgcctgttatctctt

SEQ ID NO: 342458 - DNA, 75 bp, synthetic construct
  source 1..75: mol_type = other DNA
gaaccggtgtcggtggtgtgatggcgcgtacattgccgcgtgatttgtatgaacggacacagctacgtcacgcta

SEQ ID NO: 342459 - DNA, 75 bp, synthetic construct
  source 1..75: mol_type = other DNA
ttcgtttaaccgcattatgagtggcgcgctcggtcacgttgaccagttccagcaggtggcggagcagcagcaaac

SEQ ID NO: 342460 - DNA, 75 bp, synthetic construct
  source 1..75: mol_type = other DNA
agattacgcagaatacttctgcgatgcattgggcaccatccgcgacatcattgaaccgcgcggcgcaactatcgt

SEQ ID NO: 342461 - DNA, 75 bp, synthetic construct
  source 1..75: mol_type = other DNA
gaactgaccgccgaacgcgtggaaaaatgggtgaaacaaatttctgaagagctgcatctcgacgaaattatcaac

SEQ ID NO: 342462 - DNA, 75 bp, synthetic construct
  source 1..75: mol_type = other DNA
ccaatggggagtattgctaaaaacgcggaaaatcaggaaatcggctacgtcaacaacggcggtattctattaatg

SEQ ID NO: 342463 - DNA, 75 bp, synthetic construct
  source 1..75: mol_type = other DNA
gggttcgcctgcgctggcacagcgtctggttgagctgttagcgccggtcccggtgacgctggataaagaagcctg

SEQ ID NO: 342464 - DNA, 75 bp, synthetic construct
  source 1..75: mol_type = other DNA
aaggtgcattgctaggcgcaggcgttggattacttactggcaatggtgttaatggcgtactgaaaggtgcagctg

SEQ ID NO: 342465 - DNA, 75 bp, synthetic construct
  source 1..75: mol_type = other DNA
aaccggagcatggaaagacgctgttgactgggttctcgaagaggcttgtcaggctgtaaacattcgcatcaaagg

SEQ ID NO: 342466 - DNA, 75 bp, synthetic construct
  source 1..75: mol_type = other DNA
taaggcggtgctagctcatcctgggcggtacaatcttagtgctaaatggctgaaaagattggttgcgcattttgc

SEQ ID NO: 342467 - DNA, 75 bp, synthetic construct
  source 1..75: mol_type = other DNA
accgattatcacttggttaatgaccattatggccggtaccgggtttattgttttctccacactgccggtaattgc

SEQ ID NO: 342468 - DNA, 75 bp, synthetic construct
  source 1..75: mol_type = other DNA
caaacttatccgatgcttttagcattagttctttttttacctgcgctttactttactcacagggagcgactacgc

SEQ ID NO: 342469 - DNA, 75 bp, synthetic construct
  source 1..75: mol_type = other DNA
acggtgctcagcttaaatcgaatcaggatatgtatccgtggaactctcgtgcctattcgccggtaattaatggta

SEQ ID NO: 342470 - DNA, 75 bp, synthetic construct
  source 1..75: mol_type = other DNA
tgtggcaaagccagttcaatagcggatgtctttaaaaaatatctggcacgcgggaaaaccggatacgttccgcca

SEQ ID NO: 342471 - DNA, 75 bp, synthetic construct
  source 1..75: mol_type = other DNA
tcacaaggatctgattttcatcagccatgcccgtggatcgaactgggtcgtaaactctggctgcctgcaggcgtt

SEQ ID NO: 342472 - DNA, 75 bp, synthetic construct
  source 1..75: mol_type = other DNA
cgtggcctggtagcctgcatcgcgctggcgctgattatcgcgacactcggtgtgtatcagcacgccagcaatcaa

SEQ ID NO: 342473 - DNA, 75 bp, synthetic construct
  source 1..75: mol_type = other DNA
gcgaagaggacaaagagacggaatccacggatatgaccaagtggcagatctttgttgagtatgtgctgaaaaaca

SEQ ID NO: 342474 - DNA, 75 bp, synthetic construct
  source 1..75: mol_type = other DNA
aaacaccaaacaattcctgccgttcatgctgatcctgtctgccatttgtatgctgggcttcagtgccagtatggg

SEQ ID NO: 342475 - DNA, 75 bp, synthetic construct
  source 1..75: mol_type = other DNA
acaattgttgattggcgtagcggcagttggctttgtaccgaaaaaagcgatcggcgcggctgacgggatcaaagg

SEQ ID NO: 342476 - DNA, 75 bp, synthetic construct
  source 1..75: mol_type = other DNA
atggcgatagtggcggtgatggaagaacgcaaaatccgccgcgagaaaaaaattcagcagttgacagtggcataa

SEQ ID NO: 342477 - DNA, 75 bp, synthetic construct
  source 1..75: mol_type = other DNA
cattaggtttcctggtatttggtccgcaactgttgattggcgtggcggctgttggctttgtaccgaaaaaagcga

SEQ ID NO: 342478 - DNA, 75 bp, synthetic construct
  source 1..75: mol_type = other DNA
gttatggagcagatgaaaatgctcgataccctgcaaaacactcagctccagagtgcgatagtgaaggccatgtat

SEQ ID NO: 342479 - DNA, 75 bp, synthetic construct
  source 1..75: mol_type = other DNA
tattacgtcagcgacgatggttatcccggctggatggcgcagaactggacctacattcctcgcgaactacccggc

SEQ ID NO: 342480 - DNA, 75 bp, synthetic construct
  source 1..75: mol_type = other DNA
agctttgccaagttaggtctggggatgattgccgatgggacgccggtattcggccttactggctgggcaggcacc

SEQ ID NO: 342481 - DNA, 75 bp, synthetic construct
  source 1..75: mol_type = other DNA
gggcgtccggccatgctgcatattttcgagccggtggaggacgggcagacccgtggggccaaccagttttacagc

SEQ ID NO: 342482 - DNA, 75 bp, synthetic construct
  source 1..75: mol_type = other DNA
atatggcgttattaaattgtgaaaataatattatcgacgtctcctctcttaataacactttggttgctcatatta

SEQ ID NO: 342483 - DNA, 75 bp, synthetic construct
  source 1..75: mol_type = other DNA
cctgacaccagaggtgtttcgcgtcgcagcgcaacacagcataatgcccgctgaaacagagtcggaaaaggaacg

SEQ ID NO: 342484 - DNA, 75 bp, synthetic construct
  source 1..75: mol_type = other DNA
ttactacgtatcaaccgttgaagcatcagaaatcaccccaggggaagcagacgctgtcgttaacgtaacgctgga

SEQ ID NO: 342485 - DNA, 75 bp, synthetic construct
  source 1..75: mol_type = other DNA
atgcgcattgaggccggactgagcacgtatgagaaagagctggcgctgatgggcgaggattatcaggacattttc

SEQ ID NO: 342486 - DNA, 75 bp, synthetic construct
  source 1..75: mol_type = other DNA
atgcgtattgattccggactgagcacgtatgagaaagagctggcgctgatgggtgaggattatcaggacattttc

SEQ ID NO: 342487 - DNA, 75 bp, synthetic construct
  source 1..75: mol_type = other DNA
aatggggctgaatgccttctttgcgtttgtggtggtgggggcaatgggcatctcctggcagaccggtatgggcgc

SEQ ID NO: 342488 - DNA, 75 bp, synthetic construct
  source 1..75: mol_type = other DNA
cacttgtttaattgccggtattggcagcattgcgatggggatatttgctaacttgcccgtggcgctggcaccggc

SEQ ID NO: 342489 - DNA, 75 bp, synthetic construct
  source 1..75: mol_type = other DNA
gttctgggtgtgcgtcctgaatggctttcaacggggcaaggtgagatgttggaatctggcattcgcgaagcaaac

SEQ ID NO: 342490 - DNA, 75 bp, synthetic construct
  source 1..75: mol_type = other DNA
tggtttctattgttgttacttcctgctgtggattatttttcggtgatgttcattttagcggtatctattccattc

SEQ ID NO: 342491 - DNA, 75 bp, synthetic construct
  source 1..75: mol_type = other DNA
ggagtaatgaatcagggacgctttcgcgattatttaaacttcctcagcatggaacaactgtacgtacagaattga

SEQ ID NO: 342492 - DNA, 75 bp, synthetic construct
  source 1..75: mol_type = other DNA
tattgtcgccaataaagacaccctggtgatgattggcgatttaagttctcacggcgtgttgttaggtattttagg

SEQ ID NO: 342493 - DNA, 75 bp, synthetic construct
  source 1..75: mol_type = other DNA
cttgcgtgaagacggtttttatatttttgataaggaatttctaccctctacgtttaaaaaaccttttgtcatcac

SEQ ID NO: 342494 - DNA, 75 bp, synthetic construct
  source 1..75: mol_type = other DNA
cacagctggcgctgaaaccgttgattgatgccgatcttctcgacctcagtcagtggccggtgatcaacgccacca

SEQ ID NO: 342495 - DNA, 75 bp, synthetic construct
  source 1..75: mol_type = other DNA
gtgtttctcgccactgcccatgaagttagccacgatttagcaccgcagtttattgatgcaggctgtgtggtattc

SEQ ID NO: 342496 - DNA, 75 bp, synthetic construct
  source 1..75: mol_type = other DNA
ccaggagatcaaatttttgttgatactggcgtgactcattttgatggtgatggcgtttacgtatttgtgttcgga

SEQ ID NO: 342497 - DNA, 75 bp, synthetic construct
  source 1..75: mol_type = other DNA
tcggtattgccacaaaagccggtgatatgactgtttataactacgacggggaaacgcgcgagtttctgtcgactt

SEQ ID NO: 342498 - DNA, 75 bp, synthetic construct
  source 1..75: mol_type = other DNA
gtggtattgctataaaagccggtgatatgaccgtctataactttgatggtaaaacgcgcgaatatttatctgcat

SEQ ID NO: 342499 - DNA, 75 bp, synthetic construct
  source 1..75: mol_type = other DNA
ttatgtcgtactgcattatgaaagtgtgcactggacgctggcgtgagctgaacctgtgtgtggtcgtggtggcgg

SEQ ID NO: 342500 - DNA, 75 bp, synthetic construct
  source 1..75: mol_type = other DNA
agtggcgacactgaatttggccacctgaacagaggtgatatgctcacctcagaacaacacaggtgctccaatgaa

SEQ ID NO: 342501 - DNA, 75 bp, synthetic construct
  source 1..75: mol_type = other DNA
cgtattgaaatggaaaatgaaatattaaaaaaggctaccgcgctcttgatgtcagattccctgaacagttctcga

SEQ ID NO: 342502 - DNA, 75 bp, synthetic construct
  source 1..75: mol_type = other DNA
cgtattgaaatggaaaatgaaatattaaaaaaggctactgcgctcttgatgtcagattccctgaacaactctcga

SEQ ID NO: 342503 - DNA, 75 bp, synthetic construct
  source 1..75: mol_type = other DNA
tggtatatacgcctttacatactctggaacatcgcacatcaaaagacttcaaaaaatcaaagatactctaacggt

SEQ ID NO: 342504 - DNA, 75 bp, synthetic construct
  source 1..75: mol_type = other DNA
atgaaaaaaagaaatttcagcgcagagtttaaacgcgaatccgttcaactggttgttgaccagaattacacggtg

SEQ ID NO: 342505 - DNA, 75 bp, synthetic construct
  source 1..75: mol_type = other DNA
atattaaaaaaggctactgtagattcaattggtcaacgcaacagttatgtgaaaacatggggttgcggaggtttt

SEQ ID NO: 342506 - DNA, 75 bp, synthetic construct
  source 1..75: mol_type = other DNA
aatcggtgcccgcatttattactacggtgatgatgccctttactttctcgatcactgaaggtatcgcgctgggct

SEQ ID NO: 342507 - DNA, 75 bp, synthetic construct
  source 1..75: mol_type = other DNA
caaggcaaaacaccaaaagcctctccgataacaccagaacaaatcgaaatacgtgagctgaggaaaaagctacaa

SEQ ID NO: 342508 - DNA, 75 bp, synthetic construct
  source 1..75: mol_type = other DNA
aaaatacgtgagctgaggaaaaagctacaacgaattgaaatgaagaatgaaatattaaaaaaggtgaaccgcccc

SEQ ID NO: 342509 - DNA, 75 bp, synthetic construct
  source 1..75: mol_type = other DNA
cggtggcagatgccgccaaagctatgaatgtcgacctttccacaatgacaagatgggtcaaacaactgcgtgatt

SEQ ID NO: 342510 - DNA, 75 bp, synthetic construct
  source 1..75: mol_type = other DNA
cccaactttgtcaacgccaagattattggccgtttttcgccatttttaataacggctatgccgccaacgccatcc

SEQ ID NO: 342511 - DNA, 75 bp, synthetic construct
  source 1..75: mol_type = other DNA
atgtatcagggactggaagtcgggaaactcaccaaactggatttaaatcccggcggcaaagtaacgggtgaaatg

SEQ ID NO: 342512 - DNA, 75 bp, synthetic construct
  source 1..75: mol_type = other DNA
agcgatgccaatctcagcgccctgctgaccggaaaaacctttgagttggtgcccggcgatggcgagccacgcaaa

SEQ ID NO: 342513 - DNA, 75 bp, synthetic construct
  source 1..75: mol_type = other DNA
tctacggtaacgctaatctgtacaataaaatcttcgaagcgaataaaccgatgctaaaaagcccggataaaattt

SEQ ID NO: 342514 - DNA, 75 bp, synthetic construct
  source 1..75: mol_type = other DNA
aatatttccggtattgccagcgtggacgatcaggtaaaaacggcgacgccaggcactgccagccagttttatacc

SEQ ID NO: 342515 - DNA, 75 bp, synthetic construct
  source 1..75: mol_type = other DNA
gttaccggaatgacgctggggacattgtcagatcgggtgatgattgcgatgcgcatcagtaagcgataccagcac

SEQ ID NO: 342516 - DNA, 75 bp, synthetic construct
  source 1..75: mol_type = other DNA
gcggtgccagcgccagtcagcgtaaaggcgacaagcgaattctatatgcttccgaaacagccgctcgtgcggttg

SEQ ID NO: 342517 - DNA, 75 bp, synthetic construct
  source 1..75: mol_type = other DNA
cgatgccggaaaactggcggtcgggatgccaattcgctatctcggtattgatatcgggcaaatccagacgctgga

SEQ ID NO: 342518 - DNA, 75 bp, synthetic construct
  source 1..75: mol_type = other DNA
tctgacgctgaccctgaccgcgccggaaagttacggtattgatgctggtcagccgctcattctccacggtgtgca

SEQ ID NO: 342519 - DNA, 75 bp, synthetic construct
  source 1..75: mol_type = other DNA
atcttcgtaagattgaagtcaaggtcagcatcaagtccgatatgaaagatgcgctgcgcgaagagactcagttct

SEQ ID NO: 342520 - DNA, 75 bp, synthetic construct
  source 1..75: mol_type = other DNA
cccaccaggaacgccactggcaccgaaagctcaggaaggcaaacacttcctgttgctggaaagcgaaccgaaaga

SEQ ID NO: 342521 - DNA, 75 bp, synthetic construct
  source 1..75: mol_type = other DNA
taaagacgatcaggcgaagaaggtgcaggagcatctgaacaaaaccggtataccggatgccgataaagtgaatat

SEQ ID NO: 342522 - DNA, 75 bp, synthetic construct
  source 1..75: mol_type = other DNA
ttcagcttatgcgtctgactgaagacgtaccggatgcgagacaggaactgcttaaccgtctgctgtccggtaaaa

SEQ ID NO: 342523 - DNA, 75 bp, synthetic construct
  source 1..75: mol_type = other DNA
ttaaccgtttgttgtccggtaaaaaactgactggtcgggatgaacaggatatccggcgtctctggcaggagaaag

SEQ ID NO: 342524 - DNA, 75 bp, synthetic construct
  source 1..75: mol_type = other DNA
ccggcaccagatccatcatccccacgaaaggctcagtgccttgtcatgtcagaagttaatgacggtggttttaag

SEQ ID NO: 342525 - DNA, 75 bp, synthetic construct
  source 1..75: mol_type = other DNA
cccctttggcgaatatcaggctcatgacttcaaagggcgggccggacaaccacctcagggggttcgaaaaattca

SEQ ID NO: 342526 - DNA, 75 bp, synthetic construct
  source 1..75: mol_type = other DNA
gcatgtgttgacctggttaacgatgttatgcgggtggtatcaggacaaaacatgtctgcgattgccggagggagt

SEQ ID NO: 342527 - DNA, 75 bp, synthetic construct
  source 1..75: mol_type = other DNA
gtggatgcaatgcaggagtctgccacccgtcagcgtgaacaggataccatccggaagtttgctgaagagagtaaa

SEQ ID NO: 342528 - DNA, 75 bp, synthetic construct
  source 1..75: mol_type = other DNA
agaaaaacatcaatatatttgtgtgcgccataaagatacagatcaagaccatattcatattgtagcaaatagggt

SEQ ID NO: 342529 - DNA, 75 bp, synthetic construct
  source 1..75: mol_type = other DNA
gtaaatcttttaaaaacagagttaaatatatattaaaagatgatcatgatttcatttgtagcaatatggcaagtg

SEQ ID NO: 342530 - DNA, 75 bp, synthetic construct
  source 1..75: mol_type = other DNA
gtggttctatcagtaggatactttatcatgcagaaacagcaacaacagctacccatcaatttagactcaaaggcc

SEQ ID NO: 342531 - DNA, 75 bp, synthetic construct
  source 1..75: mol_type = other DNA
taattatcaactgggatgctaaaggtgaaaaagctgggatggaagttcgcccgtcgacgatgacggtatcggatt

SEQ ID NO: 342532 - DNA, 75 bp, synthetic construct
  source 1..75: mol_type = other DNA
attcagtggaaaccttttctatatgtcatttatggacatcgataaagggtcaatgaatatcggtggcgtgactga

SEQ ID NO: 342533 - DNA, 75 bp, synthetic construct
  source 1..75: mol_type = other DNA
tttagacctgatataaaaaaaccaacatttcatgcatttttatctcttccaaaaaatgagaaactcacaaatgaa

SEQ ID NO: 342534 - DNA, 75 bp, synthetic construct
  source 1..75: mol_type = other DNA
aggtggcaaagttactggtgaaatgaccgttgatcccagcgtagttaccctacttcgtgaaaatactcgcattga

SEQ ID NO: 342535 - DNA, 75 bp, synthetic construct
  source 1..75: mol_type = other DNA
tgatcagctaccgtccgaactggcgctggctggggatgcgggagaccgcggcaaaaagctttgtcgatgaggtgg

SEQ ID NO: 342536 - DNA, 75 bp, synthetic construct
  source 1..75: mol_type = other DNA
tgatccgtgaaggtgtatccatgcatgcgtttaacggtgagttatgtgcacaggccacctgggacagtgattcca

SEQ ID NO: 342537 - DNA, 75 bp, synthetic construct
  source 1..75: mol_type = other DNA
ttcactggagtggcagtccgccatcacgcaggccatcaacttgatcggcgaacacaaaccctcagtcccggccca

SEQ ID NO: 342538 - DNA, 75 bp, synthetic construct
  source 1..75: mol_type = other DNA
aagaatggccattgacgggctcaaggaggttcaggaatcagtgatgcgcattgaggccggactgagcacgtatga

SEQ ID NO: 342539 - DNA, 75 bp, synthetic construct
  source 1..75: mol_type = other DNA
agtggttgccacctgcgcagagtgccgatgcggccctgctgcccgcgttgcgtctggggaatgcccgggcagatg

SEQ ID NO: 342540 - DNA, 75 bp, synthetic construct
  source 1..75: mol_type = other DNA
ttacgaaacattcttcgctctggtgtagatgtagtcaccctgtccgatggtgaacattacacacgagaaagttta

SEQ ID NO: 342541 - DNA, 75 bp, synthetic construct
  source 1..75: mol_type = other DNA
tctttctgtagctaaaactagacgatgtgaagatgaagaggaggaattcaggaagatattaagttcattatataa

SEQ ID NO: 342542 - DNA, 75 bp, synthetic construct
  source 1..75: mol_type = other DNA
tcgtttaagcaaaactaccctgagcttttgggagcacttattgataaatatcttctggtttcgcaaattgattct

SEQ ID NO: 342543 - DNA, 75 bp, synthetic construct
  source 1..75: mol_type = other DNA
tcaggatcgaggcaataccgtcaccatcgattttatgtcggcggatggcattgttccgggtcgcacacctgttcg

SEQ ID NO: 342544 - DNA, 75 bp, synthetic construct
  source 1..75: mol_type = other DNA
aggtgattcactacgcagacagtctaagatggttaatgactggcttaaggctcatcctgagtactaccttgacca

SEQ ID NO: 342545 - DNA, 75 bp, synthetic construct
  source 1..75: mol_type = other DNA
aaagacccgttagctctgattaaaagcattttgataatgcaaagggcgcatgaggaatcattacgtaaggctgag

SEQ ID NO: 342546 - DNA, 75 bp, synthetic construct
  source 1..75: mol_type = other DNA
ttctgggttttgcaattattatggcggctgtgagtgcgcttgttaatgataagtttattgagcaggtcaataaac

SEQ ID NO: 342547 - DNA, 75 bp, synthetic construct
  source 1..75: mol_type = other DNA
ttgtggatttgtatatacagtacaatattattttaatagcaacagctatttgtatgtgaaaaatattgttagaaa

SEQ ID NO: 342548 - DNA, 75 bp, synthetic construct
  source 1..75: mol_type = other DNA
cgccagaagagccccctatatttcaagcgccctgattgctgctgttgggatttacatgggtatacatggctggaa

SEQ ID NO: 342549 - DNA, 75 bp, synthetic construct
  source 1..75: mol_type = other DNA
tggtaacaatgatccgcgtgtagatgacctggctgttgacctggtagaacgtttcatgaagaaaattcagaaact

SEQ ID NO: 342550 - DNA, 75 bp, synthetic construct
  source 1..75: mol_type = other DNA
gttgccgtaaatccggtgttctgaccggtctgccagatgcttatggccgtggtcgtatcatcggtgactaccgtc

SEQ ID NO: 342551 - DNA, 75 bp, synthetic construct
  source 1..75: mol_type = other DNA
ggattcagcgtgaccaataacacgcaactgggcctgacgtttacttatatggcgaccgataacattggtgtggaa

SEQ ID NO: 342552 - DNA, 75 bp, synthetic construct
  source 1..75: mol_type = other DNA
cgttctgctggaatcacgattgataaccttgaggccaagtgcgcggcgctggcagcggagagtgcggggctaaag

SEQ ID NO: 342553 - DNA, 75 bp, synthetic construct
  source 1..75: mol_type = other DNA
tgaagtagatttgagcggcgcgttaacacttgaactcgccggtatcattttctcctttatgctgatcaacctatt

SEQ ID NO: 342554 - DNA, 75 bp, synthetic construct
  source 1..75: mol_type = other DNA
tattgaaagtacttctggtgtggcagtcggtggtcgcacggggctgactgcggttgtggtcggcgttatgttcct

SEQ ID NO: 342555 - DNA, 75 bp, synthetic construct
  source 1..75: mol_type = other DNA
tgcgattgtcagtcataaccactattggggaatctggacttcacgaactaacgaccagactctggaaagttttac

SEQ ID NO: 342556 - DNA, 75 bp, synthetic construct
  source 1..75: mol_type = other DNA
caaataccccaaacaatcctcatttagtcaattttgatgcttcaagagtagtgccaactgcctcagagaacagac

SEQ ID NO: 342557 - DNA, 75 bp, synthetic construct
  source 1..75: mol_type = other DNA
cttggcgcggcgctgggtgccgatcctgccacctttatgggcatggcggggcatctggtgcttacctgtaccgac

SEQ ID NO: 342558 - DNA, 75 bp, synthetic construct
  source 1..75: mol_type = other DNA
gcagtgccggaaggcgggcaaaaagaacggcgcttaggcgcgatttgcggcaccgcttttctcgaacaagcgctg

SEQ ID NO: 342559 - DNA, 75 bp, synthetic construct
  source 1..75: mol_type = other DNA
atcattttgcagaaccggcagttcgtgagccggtagctccacgctacactcctactcctactcctactcctactc

SEQ ID NO: 342560 - DNA, 75 bp, synthetic construct
  source 1..75: mol_type = other DNA
gcagtgctggaaggcgggcaaaaagagcgccgtttaggggcgatttgtggcaccgcttttctcgaacatgcgctg

SEQ ID NO: 342561 - DNA, 75 bp, synthetic construct
  source 1..75: mol_type = other DNA
gcctgctggtttctgtgcctgcctttgcctggcaaccacaaaccggcgacatcatctttcagatctctcgctcat

SEQ ID NO: 342562 - DNA, 75 bp, synthetic construct
  source 1..75: mol_type = other DNA
gacccattccgattacagccacaccggtatgctggtgatacgcaacaaaaagccctacgtttttgaagcggtcgg

SEQ ID NO: 342563 - DNA, 75 bp, synthetic construct
  source 1..75: mol_type = other DNA
caccgcttttctcgaacaagcgctggcgattgaatggcaacacggcgatctcacgctgcgcggctgggtggcaga

SEQ ID NO: 342564 - DNA, 75 bp, synthetic construct
  source 1..75: mol_type = other DNA
actgcgcccgacgctggagccagttgctattccgcgttactggcgcgttattgatgaaatgccagtaaacagtat

SEQ ID NO: 342565 - DNA, 75 bp, synthetic construct
  source 1..75: mol_type = other DNA
tcttgagcagtcactgcagcagtccgcctccagttggggcgagctggaaaaagaattgatgcgatttaaagcgga

SEQ ID NO: 342566 - DNA, 75 bp, synthetic construct
  source 1..75: mol_type = other DNA
cggtggtaggttttctcatcaccttcatgagctttgtcggcggcatggccaaatggttgttcagcaaggctgagg

SEQ ID NO: 342567 - DNA, 75 bp, synthetic construct
  source 1..75: mol_type = other DNA
agtttaaacgcgaatccgctcaactggtcgttgaccagacatacactgtggcagatgccgccaaagctatggatg

SEQ ID NO: 342568 - DNA, 75 bp, synthetic construct
  source 1..75: mol_type = other DNA
aagcaatcatcagtcgaattgaagtaagtcttaagtcagtattgacgcttccgcaaattgctgtgaatgagttga

SEQ ID NO: 342569 - DNA, 75 bp, synthetic construct
  source 1..75: mol_type = other DNA
ataaaagcatggagtccacgattacaggcggcgatcgaaaaagcaaaacagttaccagcatccgtctatgtaatc

SEQ ID NO: 342570 - DNA, 75 bp, synthetic construct
  source 1..75: mol_type = other DNA
aagtggtttccatgctgctgtcgtttctgggggtaatgtttgccgccggtaagatgctgttaacccagattgaga

SEQ ID NO: 342571 - DNA, 75 bp, synthetic construct
  source 1..75: mol_type = other DNA
gttcgcggcctgacgccgaaaatgcttaccaacgccaacctcaacagtctgcgtttattaaatgaaatggcacag

SEQ ID NO: 342572 - DNA, 75 bp, synthetic construct
  source 1..75: mol_type = other DNA
gatgcaatttcaaagtcaaaaaaaatatctcttacatgcgtaggtgattttcgccaaacaatttaccaaacagca

SEQ ID NO: 342573 - DNA, 75 bp, synthetic construct
  source 1..75: mol_type = other DNA
tacaacgaattgaaatgaagaatgaaatattaaaaaaggctaccgcgctctggatgtctgactccctaaacagtt

SEQ ID NO: 342574 - DNA, 75 bp, synthetic construct
  source 1..75: mol_type = other DNA
agtttaaacgcgaatccgctcaactggttgttgaccagagatacacagtggcagatgccgccaaagctatggatg

SEQ ID NO: 342575 - DNA, 75 bp, synthetic construct
  source 1..75: mol_type = other DNA
agtttaaacgcgaatccgctcaactggtagttgaccagatatacaccgtggcagatgccgccaaagctatggatg

SEQ ID NO: 342576 - DNA, 75 bp, synthetic construct
  source 1..75: mol_type = other DNA
aagtgatctcccttatgctttccttcgttggattaatgtttgctgccggaaaactgctgttagcgcaaattgaaa

SEQ ID NO: 342577 - DNA, 75 bp, synthetic construct
  source 1..75: mol_type = other DNA
agatgccttccccatccatcacgacaaagtcatcattgttgacggaaacacggttgaaaccggctcctataactt

SEQ ID NO: 342578 - DNA, 75 bp, synthetic construct
  source 1..75: mol_type = other DNA
cgagcgcgaagccttcctggcggcacagcagggaactgcgtcgacggagctgtttaccaccattgaaggtaatta

SEQ ID NO: 342579 - DNA, 75 bp, synthetic construct
  source 1..75: mol_type = other DNA
atgcaggcgctgccggatgtcgagcaggccgttacccatgcctgtgtgattaaccaggcggcagcaaccggcggc

SEQ ID NO: 342580 - DNA, 75 bp, synthetic construct
  source 1..75: mol_type = other DNA
gcagcggtggacgttagctggtatccggcttttggcgaggaactggcacaggtacgcggcagcagtgtgccgatt

SEQ ID NO: 342581 - DNA, 75 bp, synthetic construct
  source 1..75: mol_type = other DNA
tggataacggcgcggtggagtacctcgggcgcagtgacgatcagctaaaaattcgcgggcagcgtattgaactgg

SEQ ID NO: 342582 - DNA, 75 bp, synthetic construct
  source 1..75: mol_type = other DNA
gaagcggcggtagatgtcagctggtatccggcttttggcgaggaactggcacaggtgcgcggcagcagtgtgccg

SEQ ID NO: 342583 - DNA, 75 bp, synthetic construct
  source 1..75: mol_type = other DNA
ggataccagcgcattgcaggcgcagttgcgcgaaaccttgccaccgcatatggtgcccgtggttctgctacaact

SEQ ID NO: 342584 - DNA, 75 bp, synthetic construct
  source 1..75: mol_type = other DNA
gagaattccgccagttggcagcccaactgccgaccgtacaacgtaccgatttagcacttgcgctggcggccttat

SEQ ID NO: 342585 - DNA, 75 bp, synthetic construct
  source 1..75: mol_type = other DNA
cgccagatcgccaatatttactgcgcattgctgcgtggcgaaccaacgcctgcttcgccgtttacgcctttcgct

SEQ ID NO: 342586 - DNA, 75 bp, synthetic construct
  source 1..75: mol_type = other DNA
cggcctttggtgctgaactggcggcggtacgcggcagcagtgtgccgattggttatcctgtgtggaatacgggtt

SEQ ID NO: 342587 - DNA, 75 bp, synthetic construct
  source 1..75: mol_type = other DNA
ggcgttaaacctggcgacagcgtggcggtggcgctaccgcgctcggtctttttgaccctggcactacatgcgatt

SEQ ID NO: 342588 - DNA, 75 bp, synthetic construct
  source 1..75: mol_type = other DNA
gctggcgaatctgctgcgtgagcgcggcgttaaaccaggcgacagcgtggcggtggcgctaccgcgctcggtctt

SEQ ID NO: 342589 - DNA, 75 bp, synthetic construct
  source 1..75: mol_type = other DNA
taccggggcgcagcgcctcggcagatattctgcgcctgaaactggaatttaccgacggggaattccgccagctgg

SEQ ID NO: 342590 - DNA, 75 bp, synthetic construct
  source 1..75: mol_type = other DNA
ggctggggcgattatgcaaccgcatggactatgccgccggatttatttttatgcgtcgcctgggatcggcggcgt

SEQ ID NO: 342591 - DNA, 75 bp, synthetic construct
  source 1..75: mol_type = other DNA
tcattcatggtaatgttgatatcggtgagaatgtcattatacggcagaatacaaccattggtgaaaaggtttctg

SEQ ID NO: 342592 - DNA, 75 bp, synthetic construct
  source 1..75: mol_type = other DNA
tgtcttttattatggaagatgtacctgataactgtacttatgtcaccaggaaggaatccagagtgataattcgcg

SEQ ID NO: 342593 - DNA, 75 bp, synthetic construct
  source 1..75: mol_type = other DNA
ccacgatgaaaaccggtgcgacggatggcgggcgctacaacgtgatgggcggcggacgtccggtagtcgcattgt

SEQ ID NO: 342594 - DNA, 75 bp, synthetic construct
  source 1..75: mol_type = other DNA
tgtggttaagcaacaataccccgtttaaaaatggtgtcgccattcgcggcggcgtgccggtttgctggccgtggt

SEQ ID NO: 342595 - DNA, 75 bp, synthetic construct
  source 1..75: mol_type = other DNA
aacagcttacgcttcagaaactcaaaaagtgactaaagagcaaccttcccatctggcacaatccattcgcgttgc

SEQ ID NO: 342596 - DNA, 75 bp, synthetic construct
  source 1..75: mol_type = other DNA
gcagagagaattatatcgttattggtgataatgtcgatgtaggtgcccatacgtgtattatcgggcttaacgtaa

SEQ ID NO: 342597 - DNA, 75 bp, synthetic construct
  source 1..75: mol_type = other DNA
tagccgggctggatatctatcgtatagattgtgcgcatgtggatattatttcccctggttattttaaacatatag

SEQ ID NO: 342598 - DNA, 75 bp, synthetic construct
  source 1..75: mol_type = other DNA
actgctcatagtgtgccatttgatggtaaagccacgctgtttgttgctgagcgtacattaccggaaggtgtcagc

SEQ ID NO: 342599 - DNA, 75 bp, synthetic construct
  source 1..75: mol_type = other DNA
acgccgaacgtctgaaaatgctgattgcgcagttcgccgcgaatccggcgctgttgtgcggcgatgtcgatatta

SEQ ID NO: 342600 - DNA, 75 bp, synthetic construct
  source 1..75: mol_type = other DNA
atttttgcctttaatggctgtgaacgcaggttcagacaacctgtaggtgaagataactggaaacaggcaatatca

SEQ ID NO: 342601 - DNA, 75 bp, synthetic construct
  source 1..75: mol_type = other DNA
atgcaatatgcattgtttgatggatttgaacgaaagtttttgctggatgctcttgaattcggtgttctgaaggac

SEQ ID NO: 342602 - DNA, 75 bp, synthetic construct
  source 1..75: mol_type = other DNA
tctggttttgccgtaacagcctttttgagaattaaagaccaggatatcgcaactaatatacttaaccgtgaggga

SEQ ID NO: 342603 - DNA, 75 bp, synthetic construct
  source 1..75: mol_type = other DNA
atgaaagccaatgcctgccagtttttcatcatctgcggcatggcgaatcgcatctgcacaaaaatcgagacgacg

SEQ ID NO: 342604 - DNA, 75 bp, synthetic construct
  source 1..75: mol_type = other DNA
ggggatgatcggcctgggcttctccatcacttatggtgtgggtaaaacactggtttcctattacgccgacggcaa

SEQ ID NO: 342605 - DNA, 75 bp, synthetic construct
  source 1..75: mol_type = other DNA
actccttgataatgaggataaagcttatctgatcgggctgttagcatttgccagccatatcgagcctagtttcat

SEQ ID NO: 342606 - DNA, 75 bp, synthetic construct
  source 1..75: mol_type = other DNA
gccacatcaatgacgatatgaaagccgttgtcatacagaatcgcggtggtcagaaagtaattgagcggatcctca

SEQ ID NO: 342607 - DNA, 75 bp, synthetic construct
  source 1..75: mol_type = other DNA
actcgtttacccggtggaagaatcttcgtcgagggtggaaacagagccttcgaatgcaagatagaagacattgaa

SEQ ID NO: 342608 - DNA, 75 bp, synthetic construct
  source 1..75: mol_type = other DNA
tttatttttgggcacaccttccatatcaaacgcctgcaaatgcaagggatgcaacttgctgttatatcagacaat

SEQ ID NO: 342609 - DNA, 75 bp, synthetic construct
  source 1..75: mol_type = other DNA
cgatgaacaggaagttcgcgacattctgataaacacgctggaaccttgcgttaatgaaatcacctttgatggtct

SEQ ID NO: 342610 - DNA, 75 bp, synthetic construct
  source 1..75: mol_type = other DNA
cccagaaattacgctgtacggcgttggcagtgtggaagaagaagttgggctacgcggggcacaaacctcggcgga

SEQ ID NO: 342611 - DNA, 75 bp, synthetic construct
  source 1..75: mol_type = other DNA
ccaaaagttgccgttgtcgggcatatggatgaagtcggctttatggtcacccacatcgacgagagcggttttctg

SEQ ID NO: 342612 - DNA, 75 bp, synthetic construct
  source 1..75: mol_type = other DNA
ccttctgaatgcgttaaagagggtacaaattctgtcgaactggggtatacccgcaattatacccacacaatgggg

SEQ ID NO: 342613 - DNA, 75 bp, synthetic construct
  source 1..75: mol_type = other DNA
tggctggcgttgacctggttgtttggtgctggatttatcgggatggagatctatgaattccatcacctgattgtt

SEQ ID NO: 342614 - DNA, 75 bp, synthetic construct
  source 1..75: mol_type = other DNA
tacgctgtatggcgttggcagtgtggaagaagaagttgggctacgcggggcgcaaacctcggcggaacacattaa

SEQ ID NO: 342615 - DNA, 75 bp, synthetic construct
  source 1..75: mol_type = other DNA
gttggctttgtacctaaaaaagcgattggcgctgccgatggtattaaaggcaccttcgcttacctgattggtgac

SEQ ID NO: 342616 - DNA, 75 bp, synthetic construct
  source 1..75: mol_type = other DNA
ggcgtgacgctggcaacgggcgacccgagcattattgcaccgactaaaactatcgtcagaactggcgagaagatg

SEQ ID NO: 342617 - DNA, 75 bp, synthetic construct
  source 1..75: mol_type = other DNA
aagcggcaatagaacggatagttaaggcttatggctttaaaactcgtcaagcactggcagatcatcttggtatat

SEQ ID NO: 342618 - DNA, 75 bp, synthetic construct
  source 1..75: mol_type = other DNA
cagaaagtaatcgagcggatactcatggcttatggcttcaagtcacgccaagcattctgtaaccatctaggtatt

SEQ ID NO: 342619 - DNA, 75 bp, synthetic construct
  source 1..75: mol_type = other DNA
acgacggtaacccggcaaacctgcatccgtatggtcaggtggagatgggtaaacgttatgtgcaggcgctgggcg

SEQ ID NO: 342620 - DNA, 75 bp, synthetic construct
  source 1..75: mol_type = other DNA
tatcgctggtcggcagagttactgaaacaggtgattgccgccaatccgggcgaccaggtggcgaagaatctgcaa

SEQ ID NO: 342621 - DNA, 75 bp, synthetic construct
  source 1..75: mol_type = other DNA
cctgttcaaagtcaccgataaaatgtatcaggtgcgcggccaggacatctccaacattacgttcgtggaaggcga

SEQ ID NO: 342622 - DNA, 75 bp, synthetic construct
  source 1..75: mol_type = other DNA
gcatttggtttagatgctgaagaaggagtgccagttccttcgccagaacggcatgctgaaaaacagtctgcagat

SEQ ID NO: 342623 - DNA, 75 bp, synthetic construct
  source 1..75: mol_type = other DNA
tagctatgactatccgcggatactcgcagggaaaactggccagagaggttggcatggctcaatcgagcgtaaata

SEQ ID NO: 342624 - DNA, 75 bp, synthetic construct
  source 1..75: mol_type = other DNA
agcattctgtaaccaccttggtatttcacaaagtacaatggctaacagatatgcacgcgataccttccctgctga

SEQ ID NO: 342625 - DNA, 75 bp, synthetic construct
  source 1..75: mol_type = other DNA
atttcccacgcggcattctggaaaccattacctgccgcctgaaaccgggcgtgagccaggcacaagtcgcgcaag

SEQ ID NO: 342626 - DNA, 75 bp, synthetic construct
  source 1..75: mol_type = other DNA
agcggccatttcaaacagcttttgcgaagttagcctgcaaccatacggtgtctttacccatcgccatcaaccgga

SEQ ID NO: 342627 - DNA, 75 bp, synthetic construct
  source 1..75: mol_type = other DNA
catttgatgaagtaaccgatggaaaatggttagttgaaatcgaaggaaaatttagtgttagagatctaaccagaa

SEQ ID NO: 342628 - DNA, 75 bp, synthetic construct
  source 1..75: mol_type = other DNA
aaacctgcgggtgaagaagaagttctgtggttgagcaacaacacaccgttcaaaaatggcgtcgctattcgcggt

SEQ ID NO: 342629 - DNA, 75 bp, synthetic construct
  source 1..75: mol_type = other DNA
gacagctataccatgctggagatcctgcggaatttgcagcaaagcgcgccaatcagtttttcgctggttgccgtt

SEQ ID NO: 342630 - DNA, 75 bp, synthetic construct
  source 1..75: mol_type = other DNA
gatgcaaaagcgttcccgattatcccgtgtaatctgtgcggctcgcagcctaatctacaacgtcaggtcattgct

SEQ ID NO: 342631 - DNA, 75 bp, synthetic construct
  source 1..75: mol_type = other DNA
gtgattctggcgatgatcatctggggattattgactggcgcatttattacccgactcatacgctttccgcatagc

SEQ ID NO: 342632 - DNA, 75 bp, synthetic construct
  source 1..75: mol_type = other DNA
tgcgtaatttgcagcaaagtgcgccaatcagtttttcgctggttgccgttaacctcgaccagaaacaacctggct

SEQ ID NO: 342633 - DNA, 75 bp, synthetic construct
  source 1..75: mol_type = other DNA
atgaaagaaaatcaacaaattacaaagaaagaacaatacaacctgaacaaattacaaaaacgtctgcgtcgtaac

SEQ ID NO: 342634 - DNA, 75 bp, synthetic construct
  source 1..75: mol_type = other DNA
atcgcaccgcaacggaactgggggcgacgaagatcgcgttgggtcaccatcgtgacgatatcctgcaaacgttgt

SEQ ID NO: 342635 - DNA, 75 bp, synthetic construct
  source 1..75: mol_type = other DNA
tccggtaaaatacaccccgctcaagcagtggatcgcccacggtgaagatagcaaatatattgttcgccgcgttga

SEQ ID NO: 342636 - DNA, 75 bp, synthetic construct
  source 1..75: mol_type = other DNA
tggttcaggcgaaactcaaagaacgttatgggaaaaatattccgcttgaggaaacagtagtttcaccccaggccg

SEQ ID NO: 342637 - DNA, 75 bp, synthetic construct
  source 1..75: mol_type = other DNA
aagcaatcatcagtcgaattgaagtaagtcttaagtcagtattgatacttccgcagatggctgtgaatgagttga

SEQ ID NO: 342638 - DNA, 75 bp, synthetic construct
  source 1..75: mol_type = other DNA
atgcagagcgataaagtgcgcgccgttttaatgaaagcagaggttattgtgttggggacgatagggatgggattt

SEQ ID NO: 342639 - DNA, 75 bp, synthetic construct
  source 1..75: mol_type = other DNA
ggtttacgccgcctggcaaactgccggattatggcgcggttctcacccagaagaagcgacgacaccagggcttta

SEQ ID NO: 342640 - DNA, 75 bp, synthetic construct
  source 1..75: mol_type = other DNA
gaaacggtggtctcgccacaagccgttttcgatgcgccacaactcaccacggttgccaaagaatggccgctgttt

SEQ ID NO: 342641 - DNA, 75 bp, synthetic construct
  source 1..75: mol_type = other DNA
gacagggccgacttttcggcctttatggaaagaaatggctattatgatgacgagtcgatgcaggatgatattctt

SEQ ID NO: 342642 - DNA, 75 bp, synthetic construct
  source 1..75: mol_type = other DNA
ggacaacagcgtccagccgggagccggaaatggcgaaccggtcacggcagaggtgctggcacagcggcaggctga

SEQ ID NO: 342643 - DNA, 75 bp, synthetic construct
  source 1..75: mol_type = other DNA
aacgcagttggttaacgtaaaagcgtttaaacccgcatcgaccaacaaaatcgccctgctgttgccactgaatgg

SEQ ID NO: 342644 - DNA, 75 bp, synthetic construct
  source 1..75: mol_type = other DNA
cgcaagcgtctggaagaaggcctggttgagctgcgcggtgagaagcagattgaaatcaaacaaggcgcgaaagca

SEQ ID NO: 342645 - DNA, 75 bp, synthetic construct
  source 1..75: mol_type = other DNA
tttgctgagttcgatgccgatgcggcgaaaaaacatctgcgtccggtagcgcgtcagccgctggaagtggttcgt

SEQ ID NO: 342646 - DNA, 75 bp, synthetic construct
  source 1..75: mol_type = other DNA
aaaaatgcgacactgattgaagcgattaaagctgcgaacttaccgcacgatcgttaccagaccaccaccattgtt

SEQ ID NO: 342647 - DNA, 75 bp, synthetic construct
  source 1..75: mol_type = other DNA
ttaaatcggcaaaactgccgcatgatcgctaccagacgaccaccattgtgaacaccgacgacgctatccccggtt

SEQ ID NO: 342648 - DNA, 75 bp, synthetic construct
  source 1..75: mol_type = other DNA
gacagggccgacttttcggcctttatggatagtaatggctattatgatgacgagtcgatgcaggatgatattctt

SEQ ID NO: 342649 - DNA, 75 bp, synthetic construct
  source 1..75: mol_type = other DNA
gacagggccgacttttcggcctttatggaaaggagtggctattatgatgacgagtcgatgcaggatgatattctt

SEQ ID NO: 342650 - DNA, 75 bp, synthetic construct
  source 1..75: mol_type = other DNA
gacagggccgacttttcggcctttatggaaagcactggctattatgatgacgagtcgatgcaggatgatattctt

SEQ ID NO: 342651 - DNA, 75 bp, synthetic construct
  source 1..75: mol_type = other DNA
cgcaagcgtctggaagaaggtttggttgaactgcgcggtgagaagcagattgaaatcaaacaaggcgcgaaagcg

SEQ ID NO: 342652 - DNA, 75 bp, synthetic construct
  source 1..75: mol_type = other DNA
gacagggccgacttttcggcctttatggagaggaatggctattatgatgacgagtcgatgcaggatgatattctt

SEQ ID NO: 342653 - DNA, 75 bp, synthetic construct
  source 1..75: mol_type = other DNA
gacagggccgacttttcggcctttatggacagcaatggctattatgatgacgagtcgatgcaggatgatattctt

SEQ ID NO: 342654 - DNA, 75 bp, synthetic construct
  source 1..75: mol_type = other DNA
tccctgcacgcgccgatgaccggcgtcggtctgccggctgacagcagcaaagcggaagtctaccaggctattcac

SEQ ID NO: 342655 - DNA, 75 bp, synthetic construct
  source 1..75: mol_type = other DNA
ccgcacctggcaagctcggaatggggctggcagattgacccgctcggtctgcgcacgctgctgaacgtgctgtgg

SEQ ID NO: 342656 - DNA, 75 bp, synthetic construct
  source 1..75: mol_type = other DNA
tctgcaacccttcctgattattactggcacagcctgggcgatgacgccaatcgctaccggtcagttgagtaaaaa

SEQ ID NO: 342657 - DNA, 75 bp, synthetic construct
  source 1..75: mol_type = other DNA
aatttacctaccagcgcgtgggcgatctcagcaccgaaatgatcgagcacttcttccgttcgctctcatacacca

SEQ ID NO: 342658 - DNA, 75 bp, synthetic construct
  source 1..75: mol_type = other DNA
acattcaactggcggaaaacatgggcattaatggtttacgctacgaccgcgaaaccctgaactggccgatgattg

SEQ ID NO: 342659 - DNA, 75 bp, synthetic construct
  source 1..75: mol_type = other DNA
caaacgaagaattttcacacatcctggcacgccagatgaacgcaatgggctacggcctggacgttgacgcacagg

SEQ ID NO: 342660 - DNA, 75 bp, synthetic construct
  source 1..75: mol_type = other DNA
gtggtcgttcattgccgcataatccaccgcataacgcatcgaattgcgtgcggcgaaattacacattcccgtcaa

SEQ ID NO: 342661 - DNA, 75 bp, synthetic construct
  source 1..75: mol_type = other DNA
cgctggttctgacctttggcaaagtagagccgcgcccgaatacggtgaatgtggtgccgggtaaaaccacgttca

SEQ ID NO: 342662 - DNA, 75 bp, synthetic construct
  source 1..75: mol_type = other DNA
gggcaatcaattggcgtggtgaatgcaattgtcgggcaacgtcgctatacggtgacgctgaatggcgaatcaaac

SEQ ID NO: 342663 - DNA, 75 bp, synthetic construct
  source 1..75: mol_type = other DNA
tttcgccgtcgatcattaagttctttgttaagccgatggtgatcctgttgatcaccgcgccactggcgctggtgg

SEQ ID NO: 342664 - DNA, 75 bp, synthetic construct
  source 1..75: mol_type = other DNA
cgtacggtcgaagtggtggcgatggcagaagaagaaggcagccgcttcccgtatgttttctggggcagtaaaaat

SEQ ID NO: 342665 - DNA, 75 bp, synthetic construct
  source 1..75: mol_type = other DNA
acgacatgcgggcgatttgcgatgaaatggatattggtattgatatcgatttatggatggacgaagaacccgtgc

SEQ ID NO: 342666 - DNA, 75 bp, synthetic construct
  source 1..75: mol_type = other DNA
aggaaggaaactttcctgacagagtaaaaataggtccgaggtgtgttgcttttgttgaaagtgagattgatgaat

SEQ ID NO: 342667 - DNA, 75 bp, synthetic construct
  source 1..75: mol_type = other DNA
gacggtacagttcactggcacctgttgtgttttatgcgcaaaaaaagaccgccgcgccatcactgcattactgcg

SEQ ID NO: 342668 - DNA, 75 bp, synthetic construct
  source 1..75: mol_type = other DNA
cattgacgggcgtggtctggctggtgagatcagcaaggaaacgggtaaatccctgcgtgataacgctgaatacgt

SEQ ID NO: 342669 - DNA, 75 bp, synthetic construct
  source 1..75: mol_type = other DNA
acatgggaaagggtggcggcggaaaccctgcgtctggatgtcatccctcctgcgtttgagcaactccgccggaaa

SEQ ID NO: 342670 - DNA, 75 bp, synthetic construct
  source 1..75: mol_type = other DNA
ttgaaaatatgaacaaatcagggggggatttacccgatattaaaaccatggatgagaaggagctgcaggaatatc

SEQ ID NO: 342671 - DNA, 75 bp, synthetic construct
  source 1..75: mol_type = other DNA
ttcccatatcagcaagccgctgatgcaacgtatcgaatacttcagcagcctgggcaggccaaaggcttattcccg

SEQ ID NO: 342672 - DNA, 75 bp, synthetic construct
  source 1..75: mol_type = other DNA
actcgtggcaataactatccccttgctgaaaatttgtaccaacaagggaaagacaaatcagctgatggggatacc

SEQ ID NO: 342673 - DNA, 75 bp, synthetic construct
  source 1..75: mol_type = other DNA
atgcgcaaaaaagaccgtcgcgccatcactgcattactgcgtaactttgccatccgtgaagaccgcgaggagctg

SEQ ID NO: 342674 - DNA, 75 bp, synthetic construct
  source 1..75: mol_type = other DNA
cggcggaagttgcgccggtttctgcgctttcaaacctgatcactctgtacgctgccgataacgagcaggaacaac

SEQ ID NO: 342675 - DNA, 75 bp, synthetic construct
  source 1..75: mol_type = other DNA
gggcgtctctgcatcgtgttcagcaatttcgcttctttggtattccggggcgtcaggcgtaccgtgaattgcgat

SEQ ID NO: 342676 - DNA, 75 bp, synthetic construct
  source 1..75: mol_type = other DNA
agcattctcatggaacagtccgaaaaaggctgttaacccttatctggacccggcggaagttgcgccggtttctgc

SEQ ID NO: 342677 - DNA, 75 bp, synthetic construct
  source 1..75: mol_type = other DNA
catccgtgtagaccgcgaggagctgggcaacaacacggggccacgctttaagtctgagctgattaacccgcgcaa

SEQ ID NO: 342678 - DNA, 75 bp, synthetic construct
  source 1..75: mol_type = other DNA
tgctgtctgccttgtcagcaaaaaagtatctccctatgtcagctatgaagccgtgttgcataaacgtgagcagcg

SEQ ID NO: 342679 - DNA, 75 bp, synthetic construct
  source 1..75: mol_type = other DNA
accggtggcaaactgatgacctatcggctgatggcggaatgggctaccgacgccgtatgccgcaaactgggcaac

SEQ ID NO: 342680 - DNA, 75 bp, synthetic construct
  source 1..75: mol_type = other DNA
aaaagcaattatacatatcaagttaatttaaatgactactacgtttttttaccaggcaagcatcgctataacgtt

SEQ ID NO: 342681 - DNA, 75 bp, synthetic construct
  source 1..75: mol_type = other DNA
aaatgagtcaggatcaggtgaagcgcctgtctacccttgttgccgcgcatatgagcatgtgccttgatgcagctt

SEQ ID NO: 342682 - DNA, 75 bp, synthetic construct
  source 1..75: mol_type = other DNA
gccgctggcctgaaatattagagcacttcggtctgccgccgataaccggaaaaaatcacttcaagggtgaatgcc

SEQ ID NO: 342683 - DNA, 75 bp, synthetic construct
  source 1..75: mol_type = other DNA
gaactggcagcaaaattacgcatggttaaaccgaaacggcgtaaagactacaaacagcgaattacagagtatcag

SEQ ID NO: 342684 - DNA, 75 bp, synthetic construct
  source 1..75: mol_type = other DNA
gaaagaggtcgatttactccttcgcggcggcagcattccgtcaggagcaggcctgcgtattttctatcggaacca

SEQ ID NO: 342685 - DNA, 75 bp, synthetic construct
  source 1..75: mol_type = other DNA
actggagtcctgcattggggggggcgttcgacaaagctctcaatggggatttatcagatggacgacttgatatgg

SEQ ID NO: 342686 - DNA, 75 bp, synthetic construct
  source 1..75: mol_type = other DNA
atttcgtaaggcgatgcacaaaaccgggttgcgctggtatggcgtacgggttgctgagccgcaccatgacggtac

SEQ ID NO: 342687 - DNA, 75 bp, synthetic construct
  source 1..75: mol_type = other DNA
ctgaaaatttgaaccagcaggagaaagataaatcagctgatggggacaccagaacggacattacccgcatggatg

SEQ ID NO: 342688 - DNA, 75 bp, synthetic construct
  source 1..75: mol_type = other DNA
agagggcaagatctgcactcatgcggtgaagtggaaaatggttcgtaaggccgttgacgttcaggaggcggcagc

SEQ ID NO: 342689 - DNA, 75 bp, synthetic construct
  source 1..75: mol_type = other DNA
cgttaagccagaagaaatccgcaaggcatgggaaaaggtggcagcggaaaccctgcgtctggatgttatcccgcc

SEQ ID NO: 342690 - DNA, 75 bp, synthetic construct
  source 1..75: mol_type = other DNA
ctggacggcctgctgatcctgcctgaaatgagtcaggatcaggtgaaacgcctgtccaccctggtagctgcgcat

SEQ ID NO: 342691 - DNA, 75 bp, synthetic construct
  source 1..75: mol_type = other DNA
ggcaataacacgggcccacgctttaagtctgagctgataaacccacgcaaaggaacgccgacaagctacatcgca

SEQ ID NO: 342692 - DNA, 75 bp, synthetic construct
  source 1..75: mol_type = other DNA
tgtccccttgctgaaaatttgaaccaacaggagaaagataaatcagctgatgggggcaccagaacggacattacc

SEQ ID NO: 342693 - DNA, 75 bp, synthetic construct
  source 1..75: mol_type = other DNA
ctgaaaatttgtaccaacaagggaaagacaaatcagctgatggggataccagaacggatatcacccgtatggatg

SEQ ID NO: 342694 - DNA, 75 bp, synthetic construct
  source 1..75: mol_type = other DNA
cctgtccaccttggtagctgcgcatatgagcatgtgccttgatgcagcttgtggcgatttgtatgccaccgatga

SEQ ID NO: 342695 - DNA, 75 bp, synthetic construct
  source 1..75: mol_type = other DNA
tcgttttatggcaagccatgaagggctggacggtctgctgatcctgcctgaaatgagtcaggatcaggtgaaacg

SEQ ID NO: 342696 - DNA, 75 bp, synthetic construct
  source 1..75: mol_type = other DNA
acatgggaaagggtggcagcagaaaccctgcgactggatgtcatcccacctgcgtttgagcaaatccgccggaaa

SEQ ID NO: 342697 - DNA, 75 bp, synthetic construct
  source 1..75: mol_type = other DNA
gcatctccctatgtcagctatgaagcagtgacacataaacgtgagcagcgccgcaagtcgctggagtttttccgt

SEQ ID NO: 342698 - DNA, 75 bp, synthetic construct
  source 1..75: mol_type = other DNA
ggcgtggtctggctggtgagatcagcaaggaaacgggtaaatccctgcgtgataacgctgaatacgttaatgtct

SEQ ID NO: 342699 - DNA, 75 bp, synthetic construct
  source 1..75: mol_type = other DNA
agacaaatcagctgatggggataccagaacggacatcacccgcatggatgacaaggagttgcacgattacctgca

SEQ ID NO: 342700 - DNA, 75 bp, synthetic construct
  source 1..75: mol_type = other DNA
gcgacacgctggatatggaagatgtggtaaacgccagtagtagcaacccggcgcatcgccgcaatgagatgatgg

SEQ ID NO: 342701 - DNA, 75 bp, synthetic construct
  source 1..75: mol_type = other DNA
actttcaaacctgatcactctgtatgctgccgataacgagcaggaacaactgcgccgcgaggcactgagtgagca

SEQ ID NO: 342702 - DNA, 75 bp, synthetic construct
  source 1..75: mol_type = other DNA
gaatcccatgatcctgtccagcgcgaaatgaagcaggataagctcattagccgggcaaagctggcgcatgagcag

SEQ ID NO: 342703 - DNA, 75 bp, synthetic construct
  source 1..75: mol_type = other DNA
catcagctctacattccgcatattttcagctacctgaatgaggatattgattttgtgctgaatgagctgaaagcc

SEQ ID NO: 342704 - DNA, 75 bp, synthetic construct
  source 1..75: mol_type = other DNA
tgctgtctgcctggtcagcaaaaaagcatctccctatgtcagctatgaagccgtgacgcataaacgtgagcagcg

SEQ ID NO: 342705 - DNA, 75 bp, synthetic construct
  source 1..75: mol_type = other DNA
agttcagccgtaccgcccgtgaaggcggctgggacacgttcagtaatttctttggcctgaaatacgatccctccg

SEQ ID NO: 342706 - DNA, 75 bp, synthetic construct
  source 1..75: mol_type = other DNA
tgccgttcgctgggcttaagcccgcgtcgtatcaagctgactgcctttaccatcagcgccgcgtttgccggtttt

SEQ ID NO: 342707 - DNA, 75 bp, synthetic construct
  source 1..75: mol_type = other DNA
ttccggtgcttcgcttgcgcggtgactatctggcgatcgttaccctcggtttcggcgaaattgtgcgcatattgc

SEQ ID NO: 342708 - DNA, 75 bp, synthetic construct
  source 1..75: mol_type = other DNA
ggttaacatcctgaatagtcggcaaattcactggaacaataccgggctggatatgggctatggtgctgcctgggg

SEQ ID NO: 342709 - DNA, 75 bp, synthetic construct
  source 1..75: mol_type = other DNA
gtaatgctgtcaatattgtttatatttggctggcgcggcgctgttcccgttttatgcgggatgttttgcatcaat

SEQ ID NO: 342710 - DNA, 75 bp, synthetic construct
  source 1..75: mol_type = other DNA
catcagcgccgcgtttgccggttttgccggaacgctgtttgctgcgcgccagggctttgtcagcccggaatcctt

SEQ ID NO: 342711 - DNA, 75 bp, synthetic construct
  source 1..75: mol_type = other DNA
caattatttcggaaaaagcacctttcaatccttatgactcccgttgttcctgtaagaacattgaggtaacagagg

SEQ ID NO: 342712 - DNA, 75 bp, synthetic construct
  source 1..75: mol_type = other DNA
gatcatccgcaacgcgcgcttattctggctgagctggaaaaactggatgctctttttgcggatgatgcgagctaa

SEQ ID NO: 342713 - DNA, 75 bp, synthetic construct
  source 1..75: mol_type = other DNA
actgcgtgaacatcagcactggcgaaacgatgaaccccagccgcatcaatttaacagtacccaaccgttctttat

SEQ ID NO: 342714 - DNA, 75 bp, synthetic construct
  source 1..75: mol_type = other DNA
cgctgctctctgccgccatgttctttgttctcgcgggcgtctttatgggtgtgcaactggagctggacggcacca

SEQ ID NO: 342715 - DNA, 75 bp, synthetic construct
  source 1..75: mol_type = other DNA
acaatatcaccctgaaaatcgaccctgctgtcgtgctggcaacccgtcattatgtagatcaacaaatagaaattc

SEQ ID NO: 342716 - DNA, 75 bp, synthetic construct
  source 1..75: mol_type = other DNA
atgaagttgctagcgacatacattcgttggagcaccaaagagcaagactctggagactccttaagaagacaaaca

SEQ ID NO: 342717 - DNA, 75 bp, synthetic construct
  source 1..75: mol_type = other DNA
tgtgcaatattacgctggcagttaggaacgcgttggcgttatgggttgaccacccgatacgtctggcaacgtctc

SEQ ID NO: 342718 - DNA, 75 bp, synthetic construct
  source 1..75: mol_type = other DNA
aggcatctctttccctatagccgctattttacgctgagtacggaaagtatcagcgacgaacaatcccagggatgg

SEQ ID NO: 342719 - DNA, 75 bp, synthetic construct
  source 1..75: mol_type = other DNA
ttaaaagtaggtctaaaattagaaccggatgagcttatagttttatgtgaacagctactggatttatatgcaagc

SEQ ID NO: 342720 - DNA, 75 bp, synthetic construct
  source 1..75: mol_type = other DNA
atgcaagcgcgagtgaagtgggtcgaagggttaacttttctgggcgaatccgcctctggtcaccagattttaatg

SEQ ID NO: 342721 - DNA, 75 bp, synthetic construct
  source 1..75: mol_type = other DNA
cttcctgttcacctgctttgagcagtacgagaaagaagcgcagcaactgctggcgctggaaaatccgctgccgct

SEQ ID NO: 342722 - DNA, 75 bp, synthetic construct
  source 1..75: mol_type = other DNA
tgggacatattcagaccgcgcgtagaagttgagtatgcgattggcatattcctgcgcagacacacatttggggaa

SEQ ID NO: 342723 - DNA, 75 bp, synthetic construct
  source 1..75: mol_type = other DNA
gattacacaaaacatgcagtcgagtggcttggcgaagaggactgcaattatcaggaattcgctggtgaggttatg

SEQ ID NO: 342724 - DNA, 75 bp, synthetic construct
  source 1..75: mol_type = other DNA
gcgttttgatggcaatcaggaaaccctgcagcccatgctggggcagttaagctggctggcggaacaatcctgcgt

SEQ ID NO: 342725 - DNA, 75 bp, synthetic construct
  source 1..75: mol_type = other DNA
attcactggaacaacaccggcctggatatgggctatggtgccgcctgggggcgttttgatggcaatcaggaaacc

SEQ ID NO: 342726 - DNA, 75 bp, synthetic construct
  source 1..75: mol_type = other DNA
aattacaaccagaattttttacaaggggtcgaaaccgaatattcgctggcatttattctcgcggtgctgatttcc

SEQ ID NO: 342727 - DNA, 75 bp, synthetic construct
  source 1..75: mol_type = other DNA
gtttttgacaggcagtactcaccatttatttttaaatttaatgatcaaataattgttccagcagaaagtgtctat

SEQ ID NO: 342728 - DNA, 75 bp, synthetic construct
  source 1..75: mol_type = other DNA
gattattcgtctgtttaagcgttatcacatctccccggagacagtcattcttgagatcaccgaggagcaggcgtt

SEQ ID NO: 342729 - DNA, 75 bp, synthetic construct
  source 1..75: mol_type = other DNA
gtcaatcaggtcaaagattccggtctgaaagggcgcggcggtgcgggcttctctactggcctgaagtggagcctg

SEQ ID NO: 342730 - DNA, 75 bp, synthetic construct
  source 1..75: mol_type = other DNA
cgtgcaacatccatcgcacaacaggaagatatacatattacgccagcccgattttatcgggccatcgatgaactg

SEQ ID NO: 342731 - DNA, 75 bp, synthetic construct
  source 1..75: mol_type = other DNA
atgaacggcctacttcgtatccgtcagcgttaccaggggcttgcccagagtgataaaaagctggcggattatctc

SEQ ID NO: 342732 - DNA, 75 bp, synthetic construct
  source 1..75: mol_type = other DNA
ctgattcagcaggatctggaactggcaccagaacgtattcgtcatagtgaagcgctggtgaaaaaactggtttga

SEQ ID NO: 342733 - DNA, 75 bp, synthetic construct
  source 1..75: mol_type = other DNA
gtgcgtctgaccagcggaaagatatctgttctgggtattcccacgcgacaggcgctacagaaaaacctggttgcc

SEQ ID NO: 342734 - DNA, 75 bp, synthetic construct
  source 1..75: mol_type = other DNA
gaagaaagcattattactgacgatgaacgcccttttgtggcacatcgaccgtcagcggtgcagagggaaggaaga

SEQ ID NO: 342735 - DNA, 75 bp, synthetic construct
  source 1..75: mol_type = other DNA
gaagaaagcattattactgacgatgaacccccttttgtggcacatcgaccgtcagcggtgcagagggaagcaaga

SEQ ID NO: 342736 - DNA, 75 bp, synthetic construct
  source 1..75: mol_type = other DNA
actcgtggcaataactgtccccttgctgaaaatttgaaccaacatgagaaagatgaatcagcagatggggatacc

SEQ ID NO: 342737 - DNA, 75 bp, synthetic construct
  source 1..75: mol_type = other DNA
tgctgtttgtctggtcagcaaaaaagcatctccctatgttagctatgaagccgtgatgcataaacgtgagcagcg

SEQ ID NO: 342738 - DNA, 75 bp, synthetic construct
  source 1..75: mol_type = other DNA
ttaaaccgaaacggcgtaaagactacaaacagcgaattacagaccatcagcgacagcagctcgtgtatgagctga

SEQ ID NO: 342739 - DNA, 75 bp, synthetic construct
  source 1..75: mol_type = other DNA
ggtgttttgccacctacatcatgaagcagggcggcgtactggttccccgcaaatatcacctcatcagaaccgctt

SEQ ID NO: 342740 - DNA, 75 bp, synthetic construct
  source 1..75: mol_type = other DNA
ccgcttatgaaatcaacgaagagccgaccgcctatggcgatcatggcattcgtatttatggcatctggtcaccca

SEQ ID NO: 342741 - DNA, 75 bp, synthetic construct
  source 1..75: mol_type = other DNA
gccatcactgcattactgcgtaagtttgccatccgtgaagaccgcgaggagctgggcaataacactgggccgcgc

SEQ ID NO: 342742 - DNA, 75 bp, synthetic construct
  source 1..75: mol_type = other DNA
aaaattgactggcaggaagggcgcgacctgtggtggcacgacctggttgagcaagcgagcgatcagcaccaggcg

SEQ ID NO: 342743 - DNA, 75 bp, synthetic construct
  source 1..75: mol_type = other DNA
ggaagagtttttcgcccgtgagtcctgcggctggtgtacgccttgccgcgacggtctgccgtggagcgtgaaaat

SEQ ID NO: 342744 - DNA, 75 bp, synthetic construct
  source 1..75: mol_type = other DNA
ccccccttcccggcaacctccggcgcatggggtaaaccgacctgtgtcaacaacgtcgaaaccctgtgtaacgtt

SEQ ID NO: 342745 - DNA, 75 bp, synthetic construct
  source 1..75: mol_type = other DNA
acagaagcgcaccttgacctgccgatggagttcgaaagtatcggtaaagcgggtagccgtctgggtacagcgctg

SEQ ID NO: 342746 - DNA, 75 bp, synthetic construct
  source 1..75: mol_type = other DNA
aaacgcatccgctgacctggcgtcagcgcgatgacaaacagccagtgtggctggacgaatatcgcagcaaaaacg

SEQ ID NO: 342747 - DNA, 75 bp, synthetic construct
  source 1..75: mol_type = other DNA
ttgagcaactgtgtcgattcttaggcccgggtaaaactttctgtgcccacgcacctggtgcagtggagccgttac

SEQ ID NO: 342748 - DNA, 75 bp, synthetic construct
  source 1..75: mol_type = other DNA
gttactcaggtaaaagactccggcctgaaagggcgcggcggtgcaggcttttctactggcctgaagtggagcctg

SEQ ID NO: 342749 - DNA, 75 bp, synthetic construct
  source 1..75: mol_type = other DNA
ttcctgccaacatcgcagaccattgcctgataaaccctcagcagtatgaggcgatgtaccaacaatccattaacg

SEQ ID NO: 342750 - DNA, 75 bp, synthetic construct
  source 1..75: mol_type = other DNA
cagccattcgcgcgctgatggcggaaggcgataaagcgattgaaggcaccgaccgttcgtcgctgcgcattctcg

SEQ ID NO: 342751 - DNA, 75 bp, synthetic construct
  source 1..75: mol_type = other DNA
taaagcgatcgaaggcactgaccgttcgtcgctgcgcattctcggttccgtaggcgagccaatcaacccggaagc

SEQ ID NO: 342752 - DNA, 75 bp, synthetic construct
  source 1..75: mol_type = other DNA
aagagggatcgtcagattgtcaccgatgcgctggaacgtgtcgatatggtggattttcgccatcgacaaatcggc

SEQ ID NO: 342753 - DNA, 75 bp, synthetic construct
  source 1..75: mol_type = other DNA
aagatcggcaacgagaaatgcccggtggtcgacacatggtggcagaccgaaaccggcggtttcatgattacccca

SEQ ID NO: 342754 - DNA, 75 bp, synthetic construct
  source 1..75: mol_type = other DNA
gcaacctgggcgatacctcgacgcttgccgatcctggcgtagtcgagaagctgcttgaagagaagcaggctatcg

SEQ ID NO: 342755 - DNA, 75 bp, synthetic construct
  source 1..75: mol_type = other DNA
agatgcgccgaagaaatagaaactggccctcgtctttttttctcctcgctccatactgccggcatgaaaacacaa

SEQ ID NO: 342756 - DNA, 75 bp, synthetic construct
  source 1..75: mol_type = other DNA
cgcttcaaaaactcaacgggcgagtggtggctggtggtttcgccgtggggaagactccggctttgtcagcaagga

SEQ ID NO: 342757 - DNA, 75 bp, synthetic construct
  source 1..75: mol_type = other DNA
cccgcaatgttcgcgttaagccgttccgggcttatgttgaagaccactggcggaaattgttcgccggattgaatg

SEQ ID NO: 342758 - DNA, 75 bp, synthetic construct
  source 1..75: mol_type = other DNA
ttgatcatcgtcgcggcacgtccgtcgatgggtaaaacgacatttgcgatgaacctcgttgaaaatgcggcgatg

SEQ ID NO: 342759 - DNA, 75 bp, synthetic construct
  source 1..75: mol_type = other DNA
gggcgtaccagcgaagatctgctggaccttgctgaatcccgcgtctttaaaattgccgaaagtcgtgcaaacaaa

SEQ ID NO: 342760 - DNA, 75 bp, synthetic construct
  source 1..75: mol_type = other DNA
ctctatttacgtgaggatgccaactggcataaccgcgaccacagtatcagcgtcatcagggaggggaagttatgg

SEQ ID NO: 342761 - DNA, 75 bp, synthetic construct
  source 1..75: mol_type = other DNA
gtgaatattttaaattcagtttcagtaactttcaacacttctgagtataaaaacaacactgaataccacaaaaaa

SEQ ID NO: 342762 - DNA, 75 bp, synthetic construct
  source 1..75: mol_type = other DNA
agaggacgaccagggtacgcatttccgtctggttatccgtcatgagcgttgcatggtctggcgagcctggaacgt

SEQ ID NO: 342763 - DNA, 75 bp, synthetic construct
  source 1..75: mol_type = other DNA
gcctggaactttgagccggatgccggttactggctgaacagatatatcgctcgttatggcatccgcaaattccct

SEQ ID NO: 342764 - DNA, 75 bp, synthetic construct
  source 1..75: mol_type = other DNA
gaaatgttcgcgttaagccgttccgggcttatgctgaaaaccactggcggaaattgttcgccgggctgaatggga

SEQ ID NO: 342765 - DNA, 75 bp, synthetic construct
  source 1..75: mol_type = other DNA
atccatacttggacgtgcagcaggaaactggcgagagtagctggtttggtttctcatttatcataaaaaaagatt

SEQ ID NO: 342766 - DNA, 75 bp, synthetic construct
  source 1..75: mol_type = other DNA
taaccattggtgaagcctttgacctgatgaaacagcgtggctatcggtctgaatttgaccgggaggattggtcaa

SEQ ID NO: 342767 - DNA, 75 bp, synthetic construct
  source 1..75: mol_type = other DNA
atgggtattttgctcgaaaaacgcaatatctatatcgatgactcctccggcttgacgccaacggaagtgcgttcc

SEQ ID NO: 342768 - DNA, 75 bp, synthetic construct
  source 1..75: mol_type = other DNA
ccgcaggcgtgctgcgaactgtgtcaccagccagtggcgaaaaagccggacacgctgactcacctgtcggcggaa

SEQ ID NO: 342769 - DNA, 75 bp, synthetic construct
  source 1..75: mol_type = other DNA
ttcagtttccgcacatgttgctccgtggtttacccgccgtcatctattaccgaggcaggaaataattcatacttc

SEQ ID NO: 342770 - DNA, 75 bp, synthetic construct
  source 1..75: mol_type = other DNA
agtgtgaatgacaaggcattccgggcctatcagtttgccggaacgccgtgggtgctcagtgaccgtggtcaggcc

SEQ ID NO: 342771 - DNA, 75 bp, synthetic construct
  source 1..75: mol_type = other DNA
ccacaacaaaagcgaatgaatatctgaatggttcgaaagaacgtaatcctttcacccgtgcaaaaacggaaatgg

SEQ ID NO: 342772 - DNA, 75 bp, synthetic construct
  source 1..75: mol_type = other DNA
tggcgtagcgggcctgcttattggtctggctgctgtggggggaattacctatatcggaagccaatcgaaaatcat

SEQ ID NO: 342773 - DNA, 75 bp, synthetic construct
  source 1..75: mol_type = other DNA
acgatcatctggtgccggaagccagccacgggcgcgatgtggcattgttgaatctgctacggaccaaagtacggg

SEQ ID NO: 342774 - DNA, 75 bp, synthetic construct
  source 1..75: mol_type = other DNA
actcacttggcgtaatttttatgctgttggctattgttgcgcttgttgttaatttttacatggttcgctttagta

SEQ ID NO: 342775 - DNA, 75 bp, synthetic construct
  source 1..75: mol_type = other DNA
taacggccctatcggtacggtacgtttgacctttaatggtcagtggtcacgcttcgataattacgcagggccgca

SEQ ID NO: 342776 - DNA, 75 bp, synthetic construct
  source 1..75: mol_type = other DNA
cgactacctgcaattgatgcgcgtaccggcgctttcagacaaccgtacgctggaaattgcagaaatctcccgctc

SEQ ID NO: 342777 - DNA, 75 bp, synthetic construct
  source 1..75: mol_type = other DNA
tcgccggaaaaagcacgcagagtggttgatgccattgcggatgaaatccgccgcagggagagtaccccggtcata

SEQ ID NO: 342778 - DNA, 75 bp, synthetic construct
  source 1..75: mol_type = other DNA
ctcagggcaatggcgcacatctgatcccaccagaaaagtataaggataattttgggaaagtacggatcgataatg

SEQ ID NO: 342779 - DNA, 75 bp, synthetic construct
  source 1..75: mol_type = other DNA
cgtcattaaatattatggtttattgctttaccaaaaccacggtatgggctgaatggcttgctgcacagcaagacg

SEQ ID NO: 342780 - DNA, 75 bp, synthetic construct
  source 1..75: mol_type = other DNA
cccttcacatagcgccattattgccgagttcgccaacctggcagggtctaccgatgaatacatgatccgtcgctc

SEQ ID NO: 342781 - DNA, 75 bp, synthetic construct
  source 1..75: mol_type = other DNA
tgattagcggacaggagcgtcttgcctgtatggatgatgccgccaggctgcgcgatgccctcggcgtacgactac

SEQ ID NO: 342782 - DNA, 75 bp, synthetic construct
  source 1..75: mol_type = other DNA
attgttactctatctggcgcaaggtggcaaaaaaatgctggtctggcaggaaaaagaggaattactcgccccaga

SEQ ID NO: 342783 - DNA, 75 bp, synthetic construct
  source 1..75: mol_type = other DNA
gcctttaaacagccgaccgctgtccagtcgcaaacctggcatgtggcggcgcgaagcgaacatgcgctggtgatt

SEQ ID NO: 342784 - DNA, 75 bp, synthetic construct
  source 1..75: mol_type = other DNA
cgcacgattacagcgtgccccgactatcgccgttgatgcggcaaattttgagtctacctctggcgcaacctctaa

SEQ ID NO: 342785 - DNA, 75 bp, synthetic construct
  source 1..75: mol_type = other DNA
tcactcccgccgaagcggatcaggcgaatcgttcggcgctgcagcaagcgatagtcgctgttctggctgacggag

SEQ ID NO: 342786 - DNA, 75 bp, synthetic construct
  source 1..75: mol_type = other DNA
gtcagttgctggaaatcgctcagggatatccggattttccggtcattctcgaaaccctacgcgaatgtctgcaag

SEQ ID NO: 342787 - DNA, 75 bp, synthetic construct
  source 1..75: mol_type = other DNA
agaagatactcccgacaacactccggccggaggcaataccggacaagcggaaaagaccagaaactcaggactcac

SEQ ID NO: 342788 - DNA, 75 bp, synthetic construct
  source 1..75: mol_type = other DNA
ccactaatgaaaacacctcgcctccggaagatactcccgacaacactccggccggaggcaataccggacaagcgg

SEQ ID NO: 342789 - DNA, 75 bp, synthetic construct
  source 1..75: mol_type = other DNA
agatatgtcggtcttcagttccttaatccgcgaaaataaactcgatgccattatgcctgcgcatgtgatctacag

SEQ ID NO: 342790 - DNA, 75 bp, synthetic construct
  source 1..75: mol_type = other DNA
cgctgaaactgtccggaaaaatccacaaacagcgtgaaagtattgcccgaagtcgtggcgaccccccacccaaaa

SEQ ID NO: 342791 - DNA, 75 bp, synthetic construct
  source 1..75: mol_type = other DNA
ccctgaaactgtccggaaaaatccacaaacagcatgaaagtattgcccgaagtcgtggcgaccccccgcccaaaa

SEQ ID NO: 342792 - DNA, 75 bp, synthetic construct
  source 1..75: mol_type = other DNA
cactgaaactgtccggaaaaatccacaaacagcctgaaagtattgcccgaagtcgtggcgaccccccgcccaaaa

SEQ ID NO: 342793 - DNA, 75 bp, synthetic construct
  source 1..75: mol_type = other DNA
atctcgtcgggtaggagaactggatgaagagatggtgtatgaatcgcgggtgaatgacattatcaccctcggtgc

SEQ ID NO: 342794 - DNA, 75 bp, synthetic construct
  source 1..75: mol_type = other DNA
gcagcagtaccagcgcgcgtccctcaactcgccgcagtcaccggccccggcgtggacgtcctgcctatacgtcgt

SEQ ID NO: 342795 - DNA, 75 bp, synthetic construct
  source 1..75: mol_type = other DNA
tgaaattggcgactggcgtattattttgcactctccctatggaagacgggtgcatgaaccctgggcgctggcgat

SEQ ID NO: 342796 - DNA, 75 bp, synthetic construct
  source 1..75: mol_type = other DNA
ttgcaggaatatgccgcagaatcgttaacaccagtagaaaatgatcacgcaaaacgttcagcgattcagcaagcg

SEQ ID NO: 342797 - DNA, 75 bp, synthetic construct
  source 1..75: mol_type = other DNA
aagcgattcttcttgatgagctgaaaagtgcccgggagcaacaaaaaaggcgtgatgagcgtgctgatggttccg

SEQ ID NO: 342798 - DNA, 75 bp, synthetic construct
  source 1..75: mol_type = other DNA
tgattgctggtcaggagtgtctggcctgcatggatgatgccgccaggttacgagacgccctcggcgtaaaattac

SEQ ID NO: 342799 - DNA, 75 bp, synthetic construct
  source 1..75: mol_type = other DNA
gaaaccctacgcgaatgtctgcaagatgtttatgatcttcccgcgctggaacgtttgatgcgtcgcctgaacggt

SEQ ID NO: 342800 - DNA, 75 bp, synthetic construct
  source 1..75: mol_type = other DNA
ggcctggtggcactgcatctacaggaatatgccgcagaatcgttcactcccgccgaagcggatcaggcgaatcgt

SEQ ID NO: 342801 - DNA, 75 bp, synthetic construct
  source 1..75: mol_type = other DNA
gaaatcttctgccctggcctgcacatccggcaacgctggttccaacgcgtcgggcgggtgcgctggtggtcgttt

SEQ ID NO: 342802 - DNA, 75 bp, synthetic construct
  source 1..75: mol_type = other DNA
gatgcattacttaatatatcagcacagcgaattggtctttctgccacggtacgttcagctaacgacgtcgcggag

SEQ ID NO: 342803 - DNA, 75 bp, synthetic construct
  source 1..75: mol_type = other DNA
tctacagtctatgcgcgattgctgctggaacgtcagggcgtgttgcccgctaccgatggcagcccggcgcttttt

SEQ ID NO: 342804 - DNA, 75 bp, synthetic construct
  source 1..75: mol_type = other DNA
tgaaattggcgactggcggattattttgcactcgccttatggccgcagagtgcatgaaccgtgggcattagcaat

SEQ ID NO: 342805 - DNA, 75 bp, synthetic construct
  source 1..75: mol_type = other DNA
ctcgcggcgtgtcggcgaactggacgaagagatggtgtatgaatcacgggtgaatgacattatcactctgggcgc

SEQ ID NO: 342806 - DNA, 75 bp, synthetic construct
  source 1..75: mol_type = other DNA
gcgttttgaaaatcgcggcgtcgatccgatgcgcccgctattaccgccacaatcgctctggctgcgcgtggacga

SEQ ID NO: 342807 - DNA, 75 bp, synthetic construct
  source 1..75: mol_type = other DNA
acaaaaacgtcttgaagcgattgcctcgctggaagatctcggggcaggttttgcgctggcaacgcacgatctgga

SEQ ID NO: 342808 - DNA, 75 bp, synthetic construct
  source 1..75: mol_type = other DNA
tggcaatggatcgtctggtgtgcggcgatgttggctttggtaaaacagaagtggcgatgcgcgccgctttcctgg

SEQ ID NO: 342809 - DNA, 75 bp, synthetic construct
  source 1..75: mol_type = other DNA
aatctgttgcccgcccacgaattcccgaccgataaagcggcaattgaactgttccgcagtcagtggcgcgacacc

SEQ ID NO: 342810 - DNA, 75 bp, synthetic construct
  source 1..75: mol_type = other DNA
tgaatctggcggactgggaaacccttccctacgacagtttttcgcctcatcaggacattatctcctcgcgccttt

SEQ ID NO: 342811 - DNA, 75 bp, synthetic construct
  source 1..75: mol_type = other DNA
ccttacgacagtttttcgcctcatcaggacattatctcctcgcgcctttccaccctttaccagctaccgacgatg

SEQ ID NO: 342812 - DNA, 75 bp, synthetic construct
  source 1..75: mol_type = other DNA
agctgtaccggcgcatttgcccgtcagcgtgaaagtgcggcttggctgggacagtggcgagaagaagtttgaaat

SEQ ID NO: 342813 - DNA, 75 bp, synthetic construct
  source 1..75: mol_type = other DNA
aatggctggcagagaacgccgcccgtgcggtggagttaggttcctggggcgtggatctcaattgcggctgcccgt

SEQ ID NO: 342814 - DNA, 75 bp, synthetic construct
  source 1..75: mol_type = other DNA
tacgatctgtgcatcaccgagtttgtccgcgtggtggatcaactgctgccggtaaaagtttttcatcgcatttgc

SEQ ID NO: 342815 - DNA, 75 bp, synthetic construct
  source 1..75: mol_type = other DNA
gagggcctggtacaacggctggaaaatgggcgctttgccatgagcatggcgatgctacaaatcgcccacgctcat

SEQ ID NO: 342816 - DNA, 75 bp, synthetic construct
  source 1..75: mol_type = other DNA
aaaacggttaacggtagcggcggcggggcgacgttactcaaagatcctgaactcatctaccagggtgcaaaagcg

SEQ ID NO: 342817 - DNA, 75 bp, synthetic construct
  source 1..75: mol_type = other DNA
aagcgatgcgtgaagctgtaccggcgcatttgcccgtcagcgtgaaagtgcgtctgggctgggacagcggtgaga

SEQ ID NO: 342818 - DNA, 75 bp, synthetic construct
  source 1..75: mol_type = other DNA
gcaaaaacgtctcgaagcaattgcctcgctggaagatcttggtgcaggttttgcgctggcaacgcacgacctgga

SEQ ID NO: 342819 - DNA, 75 bp, synthetic construct
  source 1..75: mol_type = other DNA
tgttgaaaaattgaaccatacagggggagatctgcccgatattaaaaccatgaatgagcaggaactgcaggatta

SEQ ID NO: 342820 - DNA, 75 bp, synthetic construct
  source 1..75: mol_type = other DNA
gactatttcggatcagcagcgcctgcagcttgaggcagaactgagttccagagggttcgatggtagcgagtcaga

SEQ ID NO: 342821 - DNA, 75 bp, synthetic construct
  source 1..75: mol_type = other DNA
atgcggtactggctgctgctgatgcgggctgctttgccacctacattatgaaacagggtggcgtgctggttcccc

SEQ ID NO: 342822 - DNA, 75 bp, synthetic construct
  source 1..75: mol_type = other DNA
ggaacgtggatctgtgtatgtggtagtggcgatggtatgaaacttgtcaccctgacacaggcgaagccatttaac

SEQ ID NO: 342823 - DNA, 75 bp, synthetic construct
  source 1..75: mol_type = other DNA
ctggacggcctgctgatcctgcctgaaatgagtcaggatcaggtgaagcgcctgtctacccttgtcgctgcgcat

SEQ ID NO: 342824 - DNA, 75 bp, synthetic construct
  source 1..75: mol_type = other DNA
aaatgagtcaggatcaggtaaaacgcctgtccaccttggtagcagcgcatatgagcatgtgtcttgaggccgctt

SEQ ID NO: 342825 - DNA, 75 bp, synthetic construct
  source 1..75: mol_type = other DNA
gcaaaaatggtacgcaaagtggtacgcaaaagagtaaggcgcgtaccagcgaaaagcctgccagctctggccgta

SEQ ID NO: 342826 - DNA, 75 bp, synthetic construct
  source 1..75: mol_type = other DNA
cgcctgtcacgagatgcattgcgtacccaactggacagcgccggttatcgccatgttgatcaggtaatggagcac

SEQ ID NO: 342827 - DNA, 75 bp, synthetic construct
  source 1..75: mol_type = other DNA
cacattgcctgccgggatcgagtactggcagccgctattcttcagcgaaccgctgccgccactgttcagttattt

SEQ ID NO: 342828 - DNA, 75 bp, synthetic construct
  source 1..75: mol_type = other DNA
tgctggctggtcaggccgccagagtgcagggcgagcgcaaagcgggcgcgccggtactggataacccgcgtctgg

SEQ ID NO: 342829 - DNA, 75 bp, synthetic construct
  source 1..75: mol_type = other DNA
atacaaagctattgagaaaatcgcccaacaaaagctggtcgatatggttccagaagagttacgggatatctttgc

SEQ ID NO: 342830 - DNA, 75 bp, synthetic construct
  source 1..75: mol_type = other DNA
accgtcgtattactacgaccatcggtttacgttatgaagacgcggcaaaagtgggtgccgttgtcgaagcagtac

SEQ ID NO: 342831 - DNA, 75 bp, synthetic construct
  source 1..75: mol_type = other DNA
cgacagcactgcacgagtcaccggcaaacatcaaccgggcactcaacaccctcattgaagaagggctggctctga

SEQ ID NO: 342832 - DNA, 75 bp, synthetic construct
  source 1..75: mol_type = other DNA
tgctagctttatcgctgctccatcgactatcgccgccaccaacagtgatttaagtaccttaaaggcaacggttga

SEQ ID NO: 342833 - DNA, 75 bp, synthetic construct
  source 1..75: mol_type = other DNA
cggcagatgtgagcgcaagctttactctcggacaaggcggttccgccattactgacatcaacggcaaggctgaag

SEQ ID NO: 342834 - DNA, 75 bp, synthetic construct
  source 1..75: mol_type = other DNA
aacggcaacccggtagaaggcataaaagttaatttccgcggaacctccgtcacgctaagcagcaccagcgttgaa

SEQ ID NO: 342835 - DNA, 75 bp, synthetic construct
  source 1..75: mol_type = other DNA
cggagagggtatcgcaacgctgatccctgtattgaatggtgttcatcaagctggtctgagtaccacaatacaatt

SEQ ID NO: 342836 - DNA, 75 bp, synthetic construct
  source 1..75: mol_type = other DNA
tacccctgcatcaggtaaccctcagcgtttcgccgagtgaaggcgtgaccctcagtaacaacggtataaatacta

SEQ ID NO: 342837 - DNA, 75 bp, synthetic construct
  source 1..75: mol_type = other DNA
cgatatatcaggccatccgatcaaagtttctgaagggctggaatttgtgcagtcaggtaccaacgtgccctatgt

SEQ ID NO: 342838 - DNA, 75 bp, synthetic construct
  source 1..75: mol_type = other DNA
agcactgacatttgaagatatcagcaccatgcaggcgattgttgttggtcctcccgtgatgattaaattcaccgt

SEQ ID NO: 342839 - DNA, 75 bp, synthetic construct
  source 1..75: mol_type = other DNA
cccctcaacctgatagccctaatccgtatctcaacgcacgtcgttcatggaatatccatatgggacatgtgcagc

SEQ ID NO: 342840 - DNA, 75 bp, synthetic construct
  source 1..75: mol_type = other DNA
ggttgatgattaccgctccagtgcatggaagtttattgaaaatatcaggacggttacgccagatagtgagctgca

SEQ ID NO: 342841 - DNA, 75 bp, synthetic construct
  source 1..75: mol_type = other DNA
atgaacgccggatggcctgtgcggtggggaaatgcggtcactgccgcatgggggatgtctacgtctgcgtcgatg

SEQ ID NO: 342842 - DNA, 75 bp, synthetic construct
  source 1..75: mol_type = other DNA
agcactgacatttgcagatgtcagcaccatgcaggcgatcgtggttggtcctcccgtgatgattaaattcaccgt

SEQ ID NO: 342843 - DNA, 75 bp, synthetic construct
  source 1..75: mol_type = other DNA
agcactgacatttgaagatatcagcaccatgcaggcgatagtagttggtcctcccgtgatgattaaattcaccgt

SEQ ID NO: 342844 - DNA, 75 bp, synthetic construct
  source 1..75: mol_type = other DNA
tatctgtgtggttgccggtggtgtcggcgtgtatgccactgagtatgtgctggaacgctacgggcgggagctgcc

SEQ ID NO: 342845 - DNA, 75 bp, synthetic construct
  source 1..75: mol_type = other DNA
cccatcaccgcagtaaaaaccattgaagcggcggcccgttttggtcgtgaagaagcattaaatctggaaaacaaa

SEQ ID NO: 342846 - DNA, 75 bp, synthetic construct
  source 1..75: mol_type = other DNA
atgagcttcaccatcgctaaagggatggtcgcacaaacagcggggaaacattatccggcccccatcaccgcagta

SEQ ID NO: 342847 - DNA, 75 bp, synthetic construct
  source 1..75: mol_type = other DNA
tttgatgccaaccgctttggtcagaagaattgtctcggtttctggcgctataaagaagacagcaaaggcaagccg

SEQ ID NO: 342848 - DNA, 75 bp, synthetic construct
  source 1..75: mol_type = other DNA
cttatcgaagaaggactggccctgaaactggataacgggcgttttgccccaggagtccagctcttacaaatcgcc

SEQ ID NO: 342849 - DNA, 75 bp, synthetic construct
  source 1..75: mol_type = other DNA
taagccagtggctgcattttgccaatagcgtgtttaatcgcctggaagatctgccggtgccgaccattgctgccg

SEQ ID NO: 342850 - DNA, 75 bp, synthetic construct
  source 1..75: mol_type = other DNA
tgcgcgacggcgcggatttccgcaagatcgacaaagtaatggaaaaacagtttggctggccgatgggtccggcat

SEQ ID NO: 342851 - DNA, 75 bp, synthetic construct
  source 1..75: mol_type = other DNA
ggcatcgctgtttttccggctgatacgtaaagcctgtcgtcagcgtcttgaggggcgggaactatgtcaaagctg

SEQ ID NO: 342852 - DNA, 75 bp, synthetic construct
  source 1..75: mol_type = other DNA
ggcgtcgctgttcttccggttggtacgtacggcctgccgtcagcgctttgaggggcgggaaccatgtcaaagctg

SEQ ID NO: 342853 - DNA, 75 bp, synthetic construct
  source 1..75: mol_type = other DNA
gagttcataagcccttctgatgacaaaaaattttcaaaggcgaaaagttttacatctacatctctaaaagataaa

SEQ ID NO: 342854 - DNA, 75 bp, synthetic construct
  source 1..75: mol_type = other DNA
ccacggcggcgcgttccgctggctggacaccctcggtagcgcaaaatacctcgatatggcacagcaatatcagca

SEQ ID NO: 342855 - DNA, 75 bp, synthetic construct
  source 1..75: mol_type = other DNA
acgttgaaaccccgaaacaggccgctgtgctgggcgcaggcattatgggcggcggcatcgcttaccagtctgcgt

SEQ ID NO: 342856 - DNA, 75 bp, synthetic construct
  source 1..75: mol_type = other DNA
taagtcagtggctgcactttgccaatagcgtgtttaatcgcctggaagatctgccggtgccgaccattgctgccg

SEQ ID NO: 342857 - DNA, 75 bp, synthetic construct
  source 1..75: mol_type = other DNA
gatagtcggtgatgcggatatccgcaaattaccgaaacaatcggtcaacatggcgtttaatgccgtgtcagagat

SEQ ID NO: 342858 - DNA, 75 bp, synthetic construct
  source 1..75: mol_type = other DNA
tattaattactggcggtggtcgtcgcatcggcctcgccctcgcatggcatttcattaatcaaaagcaaccggtga

SEQ ID NO: 342859 - DNA, 75 bp, synthetic construct
  source 1..75: mol_type = other DNA
tgtccctaacgggcgggccggtttccgttgtgcaataggggattctatgccaagcactactaaaaactggtttac

SEQ ID NO: 342860 - DNA, 75 bp, synthetic construct
  source 1..75: mol_type = other DNA
gcaacgggcgataacgacgataagcctgacggcaaagataacaaagaccctaccggcgacggtgaggacgacgaa

SEQ ID NO: 342861 - DNA, 75 bp, synthetic construct
  source 1..75: mol_type = other DNA
ccgctgacaaaacgctggttcgccagatagtcggtgatgcggatatccgcaaattaccgaaacaatcggtcgaca

SEQ ID NO: 342862 - DNA, 75 bp, synthetic construct
  source 1..75: mol_type = other DNA
cctgctggctaagctggaaggaaatgtgacgggcgataacggcaataagcctgacgataatccggccggtgacgg

SEQ ID NO: 342863 - DNA, 75 bp, synthetic construct
  source 1..75: mol_type = other DNA
atgaaatatttctttaaaacccgcctgggcaatactcgatttcaacttgctgatgggtcagtcctgtttaaggac

SEQ ID NO: 342864 - DNA, 75 bp, synthetic construct
  source 1..75: mol_type = other DNA
gatgtcatttggtattcatcgtttatggaagcgattcacgatcgattgtagcggcgtacgccgtgggcagaccgt

SEQ ID NO: 342865 - DNA, 75 bp, synthetic construct
  source 1..75: mol_type = other DNA
caagatgccggattcgaaagtgtcgattattacaacctgacggctggcgttgtggcgctgcatcgtggttataag

SEQ ID NO: 342866 - DNA, 75 bp, synthetic construct
  source 1..75: mol_type = other DNA
tttctgagctggcgaaaaaccgcaataccaaaaccgtcgacagcctgcaaacgcagactgccaccactgttaaaa

SEQ ID NO: 342867 - DNA, 75 bp, synthetic construct
  source 1..75: mol_type = other DNA
ggagggtaaagttaccggcgacgccgcttaccgtgccgatctgattcagcctggcatccagttgccagaaaaggc

SEQ ID NO: 342868 - DNA, 75 bp, synthetic construct
  source 1..75: mol_type = other DNA
gcggaaacatcatcttcgtcacgccagaaaactggcggcaactctctaacgggcacatccagaacgttcgccgag

SEQ ID NO: 342869 - DNA, 75 bp, synthetic construct
  source 1..75: mol_type = other DNA
cgagaactggaaagagcttgctgtcgggcacctccagaatgtccggcgcgggatgggtgagcagtctgatttgat

SEQ ID NO: 342870 - DNA, 75 bp, synthetic construct
  source 1..75: mol_type = other DNA
gatgcgccttggcgatcctgccagctcccgcctcggcagaaccagctttattggtcagccgaaagtaccgcccgc

SEQ ID NO: 342871 - DNA, 75 bp, synthetic construct
  source 1..75: mol_type = other DNA
gacaggagcacctctcaactggggcgaacaatgtttattggcaaaccacgccgtgagaattttatttcaatacgg

SEQ ID NO: 342872 - DNA, 75 bp, synthetic construct
  source 1..75: mol_type = other DNA
gctgggtgatcgttcccgctcctgcatcggacgcacggcgtttattggtcagcccaaaacgccgccctccgtcac

SEQ ID NO: 342873 - DNA, 75 bp, synthetic construct
  source 1..75: mol_type = other DNA
gggtgttgctgacgccattaagtgatcgattaatcaccttttttgacaaatcactaccgggaaaaacaaacattt

SEQ ID NO: 342874 - DNA, 75 bp, synthetic construct
  source 1..75: mol_type = other DNA
agttgcaggccttatcgcccttattatttttgtggttttttgcatttcccagagtaatgattggcgcacactggt

SEQ ID NO: 342875 - DNA, 75 bp, synthetic construct
  source 1..75: mol_type = other DNA
gggtgttgctgacgccattaagtgatcgattaatcaccttttttgacaaatcactacctggaaaaaacaaacatt

SEQ ID NO: 342876 - DNA, 75 bp, synthetic construct
  source 1..75: mol_type = other DNA
ggatagtaactctattccgctggattattcgttactttacagcaatattttcgagttccaggtaaagtacttttt

SEQ ID NO: 342877 - DNA, 75 bp, synthetic construct
  source 1..75: mol_type = other DNA
ttggtccttcaacggtcgaagtcgaatggcttgatgattgccctaggtgccagcacggcaaagccagggtaacag

SEQ ID NO: 342878 - DNA, 75 bp, synthetic construct
  source 1..75: mol_type = other DNA
agctctatggtgctgatgacctgccaaagctgaaacccgataagtttggtgaaatagtcgtcacgcgttctcctg

SEQ ID NO: 342879 - DNA, 75 bp, synthetic construct
  source 1..75: mol_type = other DNA
gcaaggtggatattgaaccggatcagcaaaatagtctggggagctattctcttaaaaatggcgaaaaactggcgg

SEQ ID NO: 342880 - DNA, 75 bp, synthetic construct
  source 1..75: mol_type = other DNA
tcacagcaaaatgctggcgtattccgggatcctggcaaatccgggacgatccccggaaataatctgtggcctggt

SEQ ID NO: 342881 - DNA, 75 bp, synthetic construct
  source 1..75: mol_type = other DNA
ctggctgatggatgaggcggagctggattatccgctggtagaagaactggacaaaatcgctgataaatatgcccg

SEQ ID NO: 342882 - DNA, 75 bp, synthetic construct
  source 1..75: mol_type = other DNA
tgctgaaacccggcggccgcctgctggtgcttgagttctcgaagccaattatcgagccgctgagcaaagcctatg

SEQ ID NO: 342883 - DNA, 75 bp, synthetic construct
  source 1..75: mol_type = other DNA
catcaccattgatgtggcttaccgctatttctccaccgagaagcgtaaatttataatcgccgatacccctgggca

SEQ ID NO: 342884 - DNA, 75 bp, synthetic construct
  source 1..75: mol_type = other DNA
cgatcttactgatcgatgcccgtaaaggcgtgctcgatcaaacccgtcgtcacagttttatctccacgctgctgg

SEQ ID NO: 342885 - DNA, 75 bp, synthetic construct
  source 1..75: mol_type = other DNA
gcggcagacgaagcgttaccggctgtgcagagcgcgtcggtggatgtggtatggatggcggaacagccgctttcc

SEQ ID NO: 342886 - DNA, 75 bp, synthetic construct
  source 1..75: mol_type = other DNA
ggatcaaacatctggtcgtggcgatcaacaaaatggatctggtggattacagtgaagagacgttcacccgtattc

SEQ ID NO: 342887 - DNA, 75 bp, synthetic construct
  source 1..75: mol_type = other DNA
attttcgtggttacgccggaacgctggcatccggtcgcgtggaagtcgggcaacgtgtcaaagtgctgccctctg

SEQ ID NO: 342888 - DNA, 75 bp, synthetic construct
  source 1..75: mol_type = other DNA
aagttgaaaacctgccgctgaacggcatcggcctggtggatctcacttttgacgagccactggtgttagatcgtt

SEQ ID NO: 342889 - DNA, 75 bp, synthetic construct
  source 1..75: mol_type = other DNA
gaagctatagatgttgtgggtagaatgttatctcaaagattaagagtactggaggatgatgaaacgtatttgacg

SEQ ID NO: 342890 - DNA, 75 bp, synthetic construct
  source 1..75: mol_type = other DNA
atggcgtaattagccgggcttttgcttcattgaacgatatggtgagttggtgtcaccatcttccgggcgagaagg

SEQ ID NO: 342891 - DNA, 75 bp, synthetic construct
  source 1..75: mol_type = other DNA
atgcgaattggacacggttttgatgtacacgcctttggtggcgaaggcccaattatcattggtggcgtgcgcatt

SEQ ID NO: 342892 - DNA, 75 bp, synthetic construct
  source 1..75: mol_type = other DNA
cgtgacttttgatggtgatcgcgaagaagcctttgccggagaagcgatcaccctggtgccccctgtgtcagcata

SEQ ID NO: 342893 - DNA, 75 bp, synthetic construct
  source 1..75: mol_type = other DNA
tcgtgatgcgcgatccggtgctgtaccgcattaagtttgctgaacaccaccagactggcaacaagtggtgcatct

SEQ ID NO: 342894 - DNA, 75 bp, synthetic construct
  source 1..75: mol_type = other DNA
ccccaacaagtttagcatttaaaggtgatggggtaaaaagtttagctgcacttggcttattaaaggatcgtgtga

SEQ ID NO: 342895 - DNA, 75 bp, synthetic construct
  source 1..75: mol_type = other DNA
gtgtttgtcgcgggtgtctggctgatgcgcgctgccggatgtgtggtgaatgattatgctgaccgcaagtttgat

SEQ ID NO: 342896 - DNA, 75 bp, synthetic construct
  source 1..75: mol_type = other DNA
agcaaagatgctcatcctatggaagagttaacctcatttcctggagcagggatttacgctatttattacactggc

SEQ ID NO: 342897 - DNA, 75 bp, synthetic construct
  source 1..75: mol_type = other DNA
ttagtgcagccgcctaactgcactattagcaatgctcaaaccattgaaataacctttcaggatgtgtttgttgat

SEQ ID NO: 342898 - DNA, 75 bp, synthetic construct
  source 1..75: mol_type = other DNA
atttgcgctctgctggttgtctctaccgcaccagaagtgatgcacgactcacgccgcttcgtgcccacgctggtt

SEQ ID NO: 342899 - DNA, 75 bp, synthetic construct
  source 1..75: mol_type = other DNA
attccgcaatgtcgtctcattttccttctcgctggatatcgtcagcggcgcggtggcgattgtcggtggcattgc

SEQ ID NO: 342900 - DNA, 75 bp, synthetic construct
  source 1..75: mol_type = other DNA
atgtttggcgtactggtgattgtgcaatcgtacgccaagtcgatcagcgattttattaagtttcagacatggcaa

SEQ ID NO: 342901 - DNA, 75 bp, synthetic construct
  source 1..75: mol_type = other DNA
tgcagggtaagcgcacccgctggcagcaatcgcccttccttttaaccgccaacaactcggtaccggaagaggaag

SEQ ID NO: 342902 - DNA, 75 bp, synthetic construct
  source 1..75: mol_type = other DNA
aatacgataagttgattatcggcattttgcagattggcgtgctggtgctgatggcgattatcggcgagttaaatg

SEQ ID NO: 342903 - DNA, 75 bp, synthetic construct
  source 1..75: mol_type = other DNA
tgacgacgacgtaaagattggcattaagtccacggcaatcttgtttggtcaatacgataagttgattatcggcat

SEQ ID NO: 342904 - DNA, 75 bp, synthetic construct
  source 1..75: mol_type = other DNA
accgcgagcgtgaagcctgctttaaagcgtttatgaataataactatgtgggcctggtgttgtttttagggctgg

SEQ ID NO: 342905 - DNA, 75 bp, synthetic construct
  source 1..75: mol_type = other DNA
agatagcctcaagcacccgcagcaattctacttaacttcccattacctcgccaatatgaaatcggtcagaaagac

SEQ ID NO: 342906 - DNA, 75 bp, synthetic construct
  source 1..75: mol_type = other DNA
ttctacttaactatccttttcccgcaaatcgtttctatcatgtgcaccttatgtccccgtcctttaggactcgga

SEQ ID NO: 342907 - DNA, 75 bp, synthetic construct
  source 1..75: mol_type = other DNA
agacagcctcaagcacccgcagcaattctacttaactatccttttcccgcaaatcgtttctatcatgtgcacctt

SEQ ID NO: 342908 - DNA, 75 bp, synthetic construct
  source 1..75: mol_type = other DNA
ccatcgttcgagggatcgccaaaagcaacgccgaagtcagtattgaacaaaacggctacgttatttatcgcacct

SEQ ID NO: 342909 - DNA, 75 bp, synthetic construct
  source 1..75: mol_type = other DNA
ggaatctctatgggacgaaggtatccctgcgttgctgctggattacagttttagcgggagcaacagtgaatatga

SEQ ID NO: 342910 - DNA, 75 bp, synthetic construct
  source 1..75: mol_type = other DNA
ctctgtttacgtcaatgaacagagaatggaaacccgcacactggaatttaaagaggccacagaagcacagcgcaa

SEQ ID NO: 342911 - DNA, 75 bp, synthetic construct
  source 1..75: mol_type = other DNA
gggtaagcgcggcacatgcgctgccggttgaaatccgcctgtacgatcgcctgttcagcgtgccgaatccaggcg

SEQ ID NO: 342912 - DNA, 75 bp, synthetic construct
  source 1..75: mol_type = other DNA
aaaggcatgactacgcgggaaatcgttgccacgttcaaagaaatgtacgacgccgatgtctcgcccacgctgata

SEQ ID NO: 342913 - DNA, 75 bp, synthetic construct
  source 1..75: mol_type = other DNA
tgaatctttatgggatgaaggtatcccggcattgctactggattacagttttagcggaagcaacagtgaatatga

SEQ ID NO: 342914 - DNA, 75 bp, synthetic construct
  source 1..75: mol_type = other DNA
cgccggttttcctgcaaattggccttggcttctcaccgtttcatgccggactgatgatgatcccgatggtgcttg

SEQ ID NO: 342915 - DNA, 75 bp, synthetic construct
  source 1..75: mol_type = other DNA
ggtagcggcatgttgccctttatgacaccggttttcctgcaaattggccttggcttctcaccgtttcatgccgga

SEQ ID NO: 342916 - DNA, 75 bp, synthetic construct
  source 1..75: mol_type = other DNA
gccctgttcagtctgaaactgttccgtactcgtaccttttcgctgggcctggcggggagctttgccggacgtatc

SEQ ID NO: 342917 - DNA, 75 bp, synthetic construct
  source 1..75: mol_type = other DNA
caaatcagcaggtagggttaagcggcacgctgcttgaggatcgcaacctgagctacagtatccaggaagggtatg

SEQ ID NO: 342918 - DNA, 75 bp, synthetic construct
  source 1..75: mol_type = other DNA
atagctttgccgcgggtgaatatcaggccgggaattatgacagcggctcgccgcgtttcgggcagcttgatctga

SEQ ID NO: 342919 - DNA, 75 bp, synthetic construct
  source 1..75: mol_type = other DNA
ggtacaggtagtgaatcgctttggttatcgtcgggtactggtggcgaccacgctgggcctgtcgctggtcaccct

SEQ ID NO: 342920 - DNA, 75 bp, synthetic construct
  source 1..75: mol_type = other DNA
tggtcatgcgaaatctatctgcctgaacttcgggatcgcccaggactataaaggccagtgcaacctgcgtttcga

SEQ ID NO: 342921 - DNA, 75 bp, synthetic construct
  source 1..75: mol_type = other DNA
tctgaaatacagtctggctgccggtgaatatcgtgctggtaattacgacagcgataaaccacatttcgggcagtt

SEQ ID NO: 342922 - DNA, 75 bp, synthetic construct
  source 1..75: mol_type = other DNA
atcaaagtattccatactcgctcccggcccgttcttttcattgttatcgttcaggtaaccgtggatggttatcgg

SEQ ID NO: 342923 - DNA, 75 bp, synthetic construct
  source 1..75: mol_type = other DNA
gtgttgcggtaaagagagccatgaggaacatgcgctacgcttgcgccaggctctggaacgtttgcgagtagtttg

SEQ ID NO: 342924 - DNA, 75 bp, synthetic construct
  source 1..75: mol_type = other DNA
attttactatcacaaataaaggcgatgaggctgaagcgctttctctggaagtgcttgatggtaatgaagtgattt

SEQ ID NO: 342925 - DNA, 75 bp, synthetic construct
  source 1..75: mol_type = other DNA
atggaagtcgcggcggggggattggtgaaaatattgttacagcgattggtgtttttaaagtaaatgtaaaggctg

SEQ ID NO: 342926 - DNA, 75 bp, synthetic construct
  source 1..75: mol_type = other DNA
gcagaccggtaaatattttgataagggagagcatgcctggcaatgggatggctacagtaatcaaggcatactgga

SEQ ID NO: 342927 - DNA, 75 bp, synthetic construct
  source 1..75: mol_type = other DNA
tcgtaatgcgcgatccggtgctgtaccgcattaaatttgctgaacaccaccagactggcaacaagtggtgcatct

SEQ ID NO: 342928 - DNA, 75 bp, synthetic construct
  source 1..75: mol_type = other DNA
ctgggtactggacaacatcaccattcctgttcacccgcgccagtacgaattttcgcgcctgaatctggaatacac

SEQ ID NO: 342929 - DNA, 75 bp, synthetic construct
  source 1..75: mol_type = other DNA
ctaactttattcgtcagatcattgatgaagatctggccagtggcaagcacaccacagtacacacccgtttcccgc

SEQ ID NO: 342930 - DNA, 75 bp, synthetic construct
  source 1..75: mol_type = other DNA
ggcagcaccgcaaattcatctgctgtctggtgcgaccatgctcggcgcattctttattttgactgacccggttac

SEQ ID NO: 342931 - DNA, 75 bp, synthetic construct
  source 1..75: mol_type = other DNA
ctggtctggtaacgtccgttactcctctgattattttgatcaactccacgcctatgcgatcgaattgattaataa

SEQ ID NO: 342932 - DNA, 75 bp, synthetic construct
  source 1..75: mol_type = other DNA
gatgccgaaggcaatatcaccaccatcttctgtacttacgatgccgacactttaagcaaagatccggctgatggt

SEQ ID NO: 342933 - DNA, 75 bp, synthetic construct
  source 1..75: mol_type = other DNA
gggctgggccatcgtcagcttcgcgataagctggcgattaatcacagcaaaatgctggcgtattctggaatactc

SEQ ID NO: 342934 - DNA, 75 bp, synthetic construct
  source 1..75: mol_type = other DNA
gtgaatacttaccacatcacaattccctggcccccgagcaataaccgctagtaccgccataatcgcgggcgcact

SEQ ID NO: 342935 - DNA, 75 bp, synthetic construct
  source 1..75: mol_type = other DNA
gtgaatacttaccacatcacaataccctggcccccgagcaataaccgctagtaccgccataatcgcgggcgcaca

SEQ ID NO: 342936 - DNA, 75 bp, synthetic construct
  source 1..75: mol_type = other DNA
gtgaatacttacaacatcacaatcccctggcccccgagcaataaccgctagtaccgccataatcgcgggcgcaca

SEQ ID NO: 342937 - DNA, 75 bp, synthetic construct
  source 1..75: mol_type = other DNA
gtgaatacttacgacatcacaatcccctggcccccgagcaataaccgctagtaccgccataatcgcgggcgcacg

SEQ ID NO: 342938 - DNA, 75 bp, synthetic construct
  source 1..75: mol_type = other DNA
gtgaatacttaccacatcacaatgccctggcccccgagcaataaccgctagtaccgccataatcgcgggcgcacg

SEQ ID NO: 342939 - DNA, 75 bp, synthetic construct
  source 1..75: mol_type = other DNA
gtgaatacttaccacatcacaatcccctggcccccgagcaataaccgctagtaccgccataatcgcgggcgcacc

SEQ ID NO: 342940 - DNA, 75 bp, synthetic construct
  source 1..75: mol_type = other DNA
cgattcattaaggataatgcggcacaattagggaaggtgcgaataagcaggtcatttcttcccaagctgactcgc

SEQ ID NO: 342941 - DNA, 75 bp, synthetic construct
  source 1..75: mol_type = other DNA
ccagcgtgatgacaccggcgcgatttctgccgtcgaggtggtgatgcgtggccgtcacaaagagtatgacggcgg

SEQ ID NO: 342942 - DNA, 75 bp, synthetic construct
  source 1..75: mol_type = other DNA
cctattaccagctcacgattgatggccgcgaagtcatcgagattgacgtcgttaacatggtgctgaaagtcgacg

SEQ ID NO: 342943 - DNA, 75 bp, synthetic construct
  source 1..75: mol_type = other DNA
tgaaaaagcctatgagaaattaattactgattattcaatggatgttttaataaaaaaaatcacgttcgctttaga

SEQ ID NO: 342944 - DNA, 75 bp, synthetic construct
  source 1..75: mol_type = other DNA
ataagaatagtggtgatgcgccagcaactgctccaggtaataatgaggctactgaacctgtgggtacaacgaaat

SEQ ID NO: 342945 - DNA, 75 bp, synthetic construct
  source 1..75: mol_type = other DNA
gcaggttgactactacagcgtgaagagaatgcctgtcgtcaaaggtgggcggcttgagctaaccattaccgaaat

SEQ ID NO: 342946 - DNA, 75 bp, synthetic construct
  source 1..75: mol_type = other DNA
cgtggccgccgagcaacaaccgctactaccggcataaccgcgggcgcacgcacatcagcacagaggggcaggcgt

SEQ ID NO: 342947 - DNA, 75 bp, synthetic construct
  source 1..75: mol_type = other DNA
gacagtcaacgggggtttgcccctgtagtgcgtggtattgcgaaaagtaacgcggaagttagtattgaacaaaat

SEQ ID NO: 342948 - DNA, 75 bp, synthetic construct
  source 1..75: mol_type = other DNA
gtgaatacttaccacatcacactaccctggccgccgagcaataaccgctactaccgccataatcgcgggcgcacg

SEQ ID NO: 342949 - DNA, 75 bp, synthetic construct
  source 1..75: mol_type = other DNA
cctggccgccgagcaataatcgctattaccgccataatcgtggacgcacgcatatcagcgcagaggggcaggcat

SEQ ID NO: 342950 - DNA, 75 bp, synthetic construct
  source 1..75: mol_type = other DNA
aatgctggcgtattccgggatcctggcaaatccgggacgatccccggaaattatctgtggcctggtgtcccactg

SEQ ID NO: 342951 - DNA, 75 bp, synthetic construct
  source 1..75: mol_type = other DNA
cagggtgaaaaaggaacgccagaattatccctgcgcgatgatccgatacaggaaaacctgcgtttcagcgccgac

SEQ ID NO: 342952 - DNA, 75 bp, synthetic construct
  source 1..75: mol_type = other DNA
tttgccagcggcacagatttccgtttattgggttacaagtattctaccagtggtttttataccttccaggaagca

SEQ ID NO: 342953 - DNA, 75 bp, synthetic construct
  source 1..75: mol_type = other DNA
cctggcctccgagcaataaccgctattaccgccataatcgcgggcgcacacacatcagcgcagaagggcaggcat

SEQ ID NO: 342954 - DNA, 75 bp, synthetic construct
  source 1..75: mol_type = other DNA
aaggctatatgacccgtgtctttgagcgcgactctttccttgcttccttaactgaagcagaacgtgaaatgcgtc

SEQ ID NO: 342955 - DNA, 75 bp, synthetic construct
  source 1..75: mol_type = other DNA
taaaaacgcaatgctggatatcggcctggctatgccagtgaaaatccgtattgagtgccacatgccggatcgccg

SEQ ID NO: 342956 - DNA, 75 bp, synthetic construct
  source 1..75: mol_type = other DNA
cctggcctccgagcaataatcgctattaccgccataatcgcgggcgcacgcacatcagcgcagaagggctggcat

SEQ ID NO: 342957 - DNA, 75 bp, synthetic construct
  source 1..75: mol_type = other DNA
agctggagctgaccatcaccgaactgaaccgccccgggtttcctggagagtgttttatctgtgaactcaggctgc

SEQ ID NO: 342958 - DNA, 75 bp, synthetic construct
  source 1..75: mol_type = other DNA
cctggccgccgagcaataaccgctactaccggcataatcgcgggcacacgcacatcagcgcagaagggcaggcat

SEQ ID NO: 342959 - DNA, 75 bp, synthetic construct
  source 1..75: mol_type = other DNA
aaagcagtatcagcattgccgacccggacggggggcgaaacatccgactgaagggagccatctatgagcagtctt

SEQ ID NO: 342960 - DNA, 75 bp, synthetic construct
  source 1..75: mol_type = other DNA
ggctggacgaatgggagagcgccttcgcggaatggcggagcatgtgtgggcttatgcaacgggagaacgcggtgc

SEQ ID NO: 342961 - DNA, 75 bp, synthetic construct
  source 1..75: mol_type = other DNA
acatgagctattcctagagcgtgagcgccatctggaaatacaggaacggacactggatggcccgtcgctgggatg

SEQ ID NO: 342962 - DNA, 75 bp, synthetic construct
  source 1..75: mol_type = other DNA
attttcgtggctacgccggaacgctggcatccggtcgtgtggaagtcgggcaacgagtcaaagtgttgccttcgg

SEQ ID NO: 342963 - DNA, 75 bp, synthetic construct
  source 1..75: mol_type = other DNA
tgcccagccaatgcgcttcccggtgcagtacgttaaccgcccgaatcttgattttcgtggctacgccggaacgct

SEQ ID NO: 342964 - DNA, 75 bp, synthetic construct
  source 1..75: mol_type = other DNA
atcggtcgcttgctgtacgactcgaagatgatcttcgaggaccagttggcggccctggaggccgacagccggaag

SEQ ID NO: 342965 - DNA, 75 bp, synthetic construct
  source 1..75: mol_type = other DNA
acaacgcttacatttcattagttttgagaaatttcccctcgcccgtgcggatttagcgctggcgcatcaacactg

SEQ ID NO: 342966 - DNA, 75 bp, synthetic construct
  source 1..75: mol_type = other DNA
tacggcgcggctggcaggtaacgctttattgcgcggatgaagcccccgcgctgggtgcttccggcaatcgccagg

SEQ ID NO: 342967 - DNA, 75 bp, synthetic construct
  source 1..75: mol_type = other DNA
gggggaatctgctctcgcagtgtttgccggatgcggcgtgaacgccttatccgacctacgtgtgacgtgtaggcc

SEQ ID NO: 342968 - DNA, 75 bp, synthetic construct
  source 1..75: mol_type = other DNA
tgtgattcaggcgctcacggaagcagggattgaagtggtcagggtgacgcgaagcagtatcagcattgcagaccc

SEQ ID NO: 342969 - DNA, 75 bp, synthetic construct
  source 1..75: mol_type = other DNA
tacagagaaaatgctgaacgacgaattcagcaggctcggcgaatctgtaagcgaggctgtgacctcaaacgagac

SEQ ID NO: 342970 - DNA, 75 bp, synthetic construct
  source 1..75: mol_type = other DNA
ggtgcagctattagccggacaagtcgaccgcttgagtcggttatttatcacgaacaacagataagggatgaacag

SEQ ID NO: 342971 - DNA, 75 bp, synthetic construct
  source 1..75: mol_type = other DNA
aacgtgaccgtgggtgctggtatggtgcatgagacgaaaaacgaggccaccgttgcaccgtcggaatttagcacg

SEQ ID NO: 342972 - DNA, 75 bp, synthetic construct
  source 1..75: mol_type = other DNA
cgccatgcttcacttctgtgaaaacccaggcaaaattcagtctcgtgctgaactgctgaagaaaatgaccggccg

SEQ ID NO: 342973 - DNA, 75 bp, synthetic construct
  source 1..75: mol_type = other DNA
tgccaccattgcggcactgatgacagtttacgatcaggagctgctcatgaaggagttacgtaaactcactggtca

SEQ ID NO: 342974 - DNA, 75 bp, synthetic construct
  source 1..75: mol_type = other DNA
ccattgcggcactgatgacagtttacgatcaggagctgctcatgaaggagttacgtaaactcactggtcagtcaa

SEQ ID NO: 342975 - DNA, 75 bp, synthetic construct
  source 1..75: mol_type = other DNA
ataacctctctgccggtctgtctaactttcttgcccctgcgatagccgtggtgctgttaccttatttcagtacaa

SEQ ID NO: 342976 - DNA, 75 bp, synthetic construct
  source 1..75: mol_type = other DNA
tgggattacctttaaatctggtctggggatatattgccattgctatctttatgaccggcgatggttttgaactgg

SEQ ID NO: 342977 - DNA, 75 bp, synthetic construct
  source 1..75: mol_type = other DNA
tttaatcctgcaagttataatgatttaataaatggattaagtgatgactttaaaaaacgtacggttatgcttatc

SEQ ID NO: 342978 - DNA, 75 bp, synthetic construct
  source 1..75: mol_type = other DNA
tactgaccgtggcggtgatgctgcccgccagcggctggctggcggacaaagtcggcgtgcgcaatattttcttta

SEQ ID NO: 342979 - DNA, 75 bp, synthetic construct
  source 1..75: mol_type = other DNA
atgacagatcttcccgacagcacccgctggcaattgtggattgtggctttcggcttctttatgcagtcgctggac

SEQ ID NO: 342980 - DNA, 75 bp, synthetic construct
  source 1..75: mol_type = other DNA
gaggtggcgttgtgcggggggagaggaagatccgtgactatcagaaaccggatctgcgcggcggaaaacgggcaa

SEQ ID NO: 342981 - DNA, 75 bp, synthetic construct
  source 1..75: mol_type = other DNA
ccgggctgttgctgggactttttggttcgcagcatgtcagcgtcgacagcggcaccacacaaaccgtctttatgt

SEQ ID NO: 342982 - DNA, 75 bp, synthetic construct
  source 1..75: mol_type = other DNA
cggtttctcgccgtttcatgccggactgatgatgatcccgatggtactcggcagcatgggaatgaagcgaattgt

SEQ ID NO: 342983 - DNA, 75 bp, synthetic construct
  source 1..75: mol_type = other DNA
ggcagcggcatgttaccttttatgacccccgttttcctacagattggcctcggcttttcgccgtttcatgccgga

SEQ ID NO: 342984 - DNA, 75 bp, synthetic construct
  source 1..75: mol_type = other DNA
aaagccagcataaaatcgcacagatgttgtcgatggaattacccgcagatctggcgagtgcggtagaagcgagtg

SEQ ID NO: 342985 - DNA, 75 bp, synthetic construct
  source 1..75: mol_type = other DNA
ggtggcaagtgatgacgatcccagtggacgtaatgttagccgtggcatcgttttactcgatcacgctgagcgcga

SEQ ID NO: 342986 - DNA, 75 bp, synthetic construct
  source 1..75: mol_type = other DNA
actgcgttgaaccaaccaacggcctgtttatcaccctgccggaagatgacctctccttccaggccacttttattc

SEQ ID NO: 342987 - DNA, 75 bp, synthetic construct
  source 1..75: mol_type = other DNA
tggtctggacggatttatcaccatcaccggtggcaaactgatgacctatcggctgatggctgaatgggctaccga

SEQ ID NO: 342988 - DNA, 75 bp, synthetic construct
  source 1..75: mol_type = other DNA
gtttatcaccctgccagaagatgacctctcctttcaaaccacttttattcgcgcttgcgaagaagcaggaataag

SEQ ID NO: 342989 - DNA, 75 bp, synthetic construct
  source 1..75: mol_type = other DNA
gcctgccgcgccgccggactgctgcaacgctttaacgtcaccacatccgcgcaatctatcgaacaactttccacc

SEQ ID NO: 342990 - DNA, 75 bp, synthetic construct
  source 1..75: mol_type = other DNA
gcgaatgcgaagctgtcactgcaggcgaagtgcaatacgcggtagaaaatttaaacgtcaacagcctgctggact

SEQ ID NO: 342991 - DNA, 75 bp, synthetic construct
  source 1..75: mol_type = other DNA
cattaatctgtctcctaaaggcgcagcagcactccttcgtctttgcctccaaaagctaatggtccacttaggcga

SEQ ID NO: 342992 - DNA, 75 bp, synthetic construct
  source 1..75: mol_type = other DNA
agcgaattggcctttctgccactgtgcgctcagccagcgatgtggcagaatttcttggtggcgatcgcccggtta

SEQ ID NO: 342993 - DNA, 75 bp, synthetic construct
  source 1..75: mol_type = other DNA
ggcgtagatagcgtttatgacctggtctggtgcgacggcccgctgggtaaaaccacctacggtgacgtcttccat

SEQ ID NO: 342994 - DNA, 75 bp, synthetic construct
  source 1..75: mol_type = other DNA
cggattgcatattggtatgacaagcgaatgattgtccctcaagcgagtgggattgagcctcctaatacagatatg

SEQ ID NO: 342995 - DNA, 75 bp, synthetic construct
  source 1..75: mol_type = other DNA
agatatctgtcgtattgtcggcaatcaggcggtccatcccggagagattagtcttgatgatgacccgcagttggc

SEQ ID NO: 342996 - DNA, 75 bp, synthetic construct
  source 1..75: mol_type = other DNA
cattaatctgtctcctaaaggggccgctgcactccttcgtctttgccttcagaagctaatggtccacttaggcga

SEQ ID NO: 342997 - DNA, 75 bp, synthetic construct
  source 1..75: mol_type = other DNA
ggcctgattcgtgaaggcgcgacggtgtgtggcgttcgtgtgcgtaaccatctcaccggcgaaacccaggcactt

SEQ ID NO: 342998 - DNA, 75 bp, synthetic construct
  source 1..75: mol_type = other DNA
gccatattccgacaacgccggaactggcaaaactgaagcaggtgctgtgctatgacggttatctcacgccacaaa

SEQ ID NO: 342999 - DNA, 75 bp, synthetic construct
  source 1..75: mol_type = other DNA
ccctgttccacgccgtggtttaaccgtacgggtagcaacaaacgggaagcggcgattattggcggtggtatcgcc

SEQ ID NO: 343000 - DNA, 75 bp, synthetic construct
  source 1..75: mol_type = other DNA
gccatattccgacaacgccggaactggcagagctgaagcaggtgctgtgctatgacggttatctcacgccacaaa

SEQ ID NO: 343001 - DNA, 75 bp, synthetic construct
  source 1..75: mol_type = other DNA
attcgttatcaacatcagttacaggatttatcccgtaaggatgacggttggttgttgaattttgcaggtgatcag

SEQ ID NO: 343002 - DNA, 75 bp, synthetic construct
  source 1..75: mol_type = other DNA
tggcgaacgggcatcaaatcagccgtttcagccaaacatcgtctctgccagtgtattcggttgccggtcaggtca

SEQ ID NO: 343003 - DNA, 75 bp, synthetic construct
  source 1..75: mol_type = other DNA
ctgggtgcttccggcaatcgccagggggcgttgtatccgttattaagcaaacacgatgaggcgctaaaccgcttt

SEQ ID NO: 343004 - DNA, 75 bp, synthetic construct
  source 1..75: mol_type = other DNA
acacggtctctttaagctgctgaacattattgtcgatgaccgaatcacgagaccgaaagaaattgagactatgtt

SEQ ID NO: 343005 - DNA, 75 bp, synthetic construct
  source 1..75: mol_type = other DNA
gtacatccgggtgaaattaacattgatgacgaccctcagttagcgcatggtctttttaagctgctgaacattatt

SEQ ID NO: 343006 - DNA, 75 bp, synthetic construct
  source 1..75: mol_type = other DNA
tatccttaccgcccacgaagtgaccggggtgattcgcgaaggcgcaacggtgtgcggcgttcatgtacgcaacca

SEQ ID NO: 343007 - DNA, 75 bp, synthetic construct
  source 1..75: mol_type = other DNA
gggcatacgagcagcgacagcacgaaaaagagctggcggaagcccgttcccgtcagcggagctataacggtccga

SEQ ID NO: 343008 - DNA, 75 bp, synthetic construct
  source 1..75: mol_type = other DNA
aagctggaagccgctcaggcgattacacgagggttgctggccttagcctcatccggggagctcaaaacgcgcgag

SEQ ID NO: 343009 - DNA, 75 bp, synthetic construct
  source 1..75: mol_type = other DNA
cgagcactttatcccatgtgcctttgttactcagccaatatgggtattcaacctatcgtggcagttaatgcgtaa

SEQ ID NO: 343010 - DNA, 75 bp, synthetic construct
  source 1..75: mol_type = other DNA
gcacgggttgcattgggttatgacgttgccggggaaaagcaagaacgcaaagctgaagcgctgaggaagatggag

SEQ ID NO: 343011 - DNA, 75 bp, synthetic construct
  source 1..75: mol_type = other DNA
catccagatatcctgcgccgtcgtatcgacaaagacatcaatcctagtattgggcatcttaaaatcgaagatgtt

SEQ ID NO: 343012 - DNA, 75 bp, synthetic construct
  source 1..75: mol_type = other DNA
aaccgaagcactggcgaagatggaagcagagaagaacgctatgcgcgtttcagagcttgccgctgaatactttga

SEQ ID NO: 343013 - DNA, 75 bp, synthetic construct
  source 1..75: mol_type = other DNA
cgtagtgacgacggcagcacctattttgagcttaatcctgataccaggaaaattaaaattgtcgctccggggggg

SEQ ID NO: 343014 - DNA, 75 bp, synthetic construct
  source 1..75: mol_type = other DNA
cattaacccggatgaagggggccgccatgcgactgaccgggatgctgtaccggaatccggatctggctgagcggg

SEQ ID NO: 343015 - DNA, 75 bp, synthetic construct
  source 1..75: mol_type = other DNA
tttttttagtcatcctgtttacctctttctcagggaatttagtctccaggattcccggggcggttcaatccggcc

SEQ ID NO: 343016 - DNA, 75 bp, synthetic construct
  source 1..75: mol_type = other DNA
caatgctacagcgcattattgaccgtggagcgccaacagtcgccaatgatgttttgcgatggactaaacggatat

SEQ ID NO: 343017 - DNA, 75 bp, synthetic construct
  source 1..75: mol_type = other DNA
tggaaacatcccgatattctccgccgccgcatagacaaagatatcaaccctcagattggcagcctgaaagtcgaa

SEQ ID NO: 343018 - DNA, 75 bp, synthetic construct
  source 1..75: mol_type = other DNA
gattaacccatgctctgcgtttgaagtctctgatgctggtggcaaggagtcctcccgcgaccgttggctgactcg

SEQ ID NO: 343019 - DNA, 75 bp, synthetic construct
  source 1..75: mol_type = other DNA
cgcgttaacacagtgggcgggattgctggtggcactggagcgcggcgaagagtacaacgttacaccgctgagaaa

SEQ ID NO: 343020 - DNA, 75 bp, synthetic construct
  source 1..75: mol_type = other DNA
cgcgttaacacagtgggcgggattgctggtggcactggagcgcggcgaagaatacaacgtgacgcctatcagaaa

SEQ ID NO: 343021 - DNA, 75 bp, synthetic construct
  source 1..75: mol_type = other DNA
tgccgaaaaatggagttgtgcgccgcacagtgggatgaatttgatttagatagtgctgtatggcgactccctgcc

SEQ ID NO: 343022 - DNA, 75 bp, synthetic construct
  source 1..75: mol_type = other DNA
attaaaggctatgagccggactcaaatggaatcaaccagtcgacgacattacccctgctggtggatgtaccagtg

SEQ ID NO: 343023 - DNA, 75 bp, synthetic construct
  source 1..75: mol_type = other DNA
gcaaaagacagcgttgaagcggatggttcgatacaggacgattatcgaattgcctatttaaacgatcacctggta

SEQ ID NO: 343024 - DNA, 75 bp, synthetic construct
  source 1..75: mol_type = other DNA
ggcgaggcggaagtttatcaggcgatccatcatcaactggttgccagtgcgcgggcagttaaagcctgtcatagc

SEQ ID NO: 343025 - DNA, 75 bp, synthetic construct
  source 1..75: mol_type = other DNA
gggggatggatgcgcctgtcgccgatttcgccgggcagttccagcaggaatccgactggaatcccgccgcccgtt

SEQ ID NO: 343026 - DNA, 75 bp, synthetic construct
  source 1..75: mol_type = other DNA
caggcgccgaagatgctgccgcacattccacaaatgcgcgtgttcattgccgaagatctcggctgccatatggat

SEQ ID NO: 343027 - DNA, 75 bp, synthetic construct
  source 1..75: mol_type = other DNA
aattatcattggtggcgtacgcattccttacgaaaaaggactgctggcgcattctgatggcgatgtagcgctgca

SEQ ID NO: 343028 - DNA, 75 bp, synthetic construct
  source 1..75: mol_type = other DNA
caggcaccgaagatgttgccgcacattccacaaatgcgcgtgtttattgccgaagatctcggctgccatatggat

SEQ ID NO: 343029 - DNA, 75 bp, synthetic construct
  source 1..75: mol_type = other DNA
cggatcgtaacatgtgaaaaccatagtattcataatggattaggttcagcggttgctgaagtgcttgtagaaact

SEQ ID NO: 343030 - DNA, 75 bp, synthetic construct
  source 1..75: mol_type = other DNA
ttcaacgtatcaccagcggatgccagggaatggtgatggtagaagacgcagaaggtgggctagcgggcattatca

SEQ ID NO: 343031 - DNA, 75 bp, synthetic construct
  source 1..75: mol_type = other DNA
ttttagcagttggttttttcatcggtattgtggtgatgtccagttgcatcaatgactacattaaaagcggtgtta

SEQ ID NO: 343032 - DNA, 75 bp, synthetic construct
  source 1..75: mol_type = other DNA
acgacgttgaatggttaggttttcactggtctggtaacgtccgttactcctccgattattttgatcagctccacg

SEQ ID NO: 343033 - DNA, 75 bp, synthetic construct
  source 1..75: mol_type = other DNA
gcggcagtaattgatatgtttactcttaaacctgttgaccgaatgttgattaaaaattatgccgagaaaacgggg

SEQ ID NO: 343034 - DNA, 75 bp, synthetic construct
  source 1..75: mol_type = other DNA
tcaactggagcagagtggcgtgagtgccgcggtgattgatatgtttacccttaaacctgtggatcgcatgttgat

SEQ ID NO: 343035 - DNA, 75 bp, synthetic construct
  source 1..75: mol_type = other DNA
gccgacagaacgagctaaccttcaagttgctactggcgctttgcgtcaggaagatggagttgtgcgccgccagat

SEQ ID NO: 343036 - DNA, 75 bp, synthetic construct
  source 1..75: mol_type = other DNA
accgccgagtgattttcaggtggaccgttttgacaaactcgcctttgaaccgggcgtgatcccggaactgctgaa

SEQ ID NO: 343037 - DNA, 75 bp, synthetic construct
  source 1..75: mol_type = other DNA
cagccaggaagatgcaaaacagaatgatcccacatattcaggaaagcactttgcccgtagcactggctaaggttc

SEQ ID NO: 343038 - DNA, 75 bp, synthetic construct
  source 1..75: mol_type = other DNA
gctgaaagcacagcttaaacgcactgaggaagagcgggatattctgaaaaaggcagcgcggtactttgcaaggga

SEQ ID NO: 343039 - DNA, 75 bp, synthetic construct
  source 1..75: mol_type = other DNA
atagacgatcaccacaccgttgaagataccggtctggcgctgggcgaagccttaaagctggcgttaggcgataaa

SEQ ID NO: 343040 - DNA, 75 bp, synthetic construct
  source 1..75: mol_type = other DNA
ccgctgtgcactggatatctctggtcgcccgcacctggaatataaggccgaatttacctaccagcgcgtgggcga

SEQ ID NO: 343041 - DNA, 75 bp, synthetic construct
  source 1..75: mol_type = other DNA
atattcaactggccgaaaacatgggcattaatggtttacgttacgaccgcgatactctgaactggccgatgattg

SEQ ID NO: 343042 - DNA, 75 bp, synthetic construct
  source 1..75: mol_type = other DNA
ggcagtcttcttctttaccaccatcttctctaacgtattctggggcgtgctggcagagaaaatgggctggatgaa

SEQ ID NO: 343043 - DNA, 75 bp, synthetic construct
  source 1..75: mol_type = other DNA
gcatatccacaatctgcgcgacaaagtgggcaaagcccgtatccgcaccgtgcgcggctttggctatatgctggt

SEQ ID NO: 343044 - DNA, 75 bp, synthetic construct
  source 1..75: mol_type = other DNA
ctggcggtattcttgcgctggtttcaatgcgtaaaatccagactccgcatcatatgcaagctctgacgactaaag

SEQ ID NO: 343045 - DNA, 75 bp, synthetic construct
  source 1..75: mol_type = other DNA
acggatatcatttcctgggatgatatcgtcaacaataaaaatgcctggaatactttcttctggtttgccacgctg

SEQ ID NO: 343046 - DNA, 75 bp, synthetic construct
  source 1..75: mol_type = other DNA
aatgggaacccttggattaggctgcgcaatataatcaccgctccctatgacttcgatgctgcatttttcaatatt

SEQ ID NO: 343047 - DNA, 75 bp, synthetic construct
  source 1..75: mol_type = other DNA
tggctggcgctggcattttgcgtaactggcggcattcttgcgttggtttcgatgcgtaaagttcagactccgcat

SEQ ID NO: 343048 - DNA, 75 bp, synthetic construct
  source 1..75: mol_type = other DNA
ttgcccacacttcccggcggataactgcgattgccgcaaaccgaaaacgaagctggtcaccgcatggctcgccga

SEQ ID NO: 343049 - DNA, 75 bp, synthetic construct
  source 1..75: mol_type = other DNA
gcgggtggcgttgccgccgctgtcgaacagctttatcagtctggtaaaagatacgtcgctggccgcgacaatcca

SEQ ID NO: 343050 - DNA, 75 bp, synthetic construct
  source 1..75: mol_type = other DNA
ttacccgtagcactggctaaggttcgcgccgaaatgccggatgtgcctaatttcacgattcacgacttccgacgc

SEQ ID NO: 343051 - DNA, 75 bp, synthetic construct
  source 1..75: mol_type = other DNA
ctgcccgttgcgctggcgaaggttaagcaggcaatgccgggcgtacctaacttcactattcacgaccttaggcgc

SEQ ID NO: 343052 - DNA, 75 bp, synthetic construct
  source 1..75: mol_type = other DNA
ggcgggcgattttaccgcaggcggcgcgggtggcgctgccgccgctgtcgaacagctttatcagcctggtgaaag

SEQ ID NO: 343053 - DNA, 75 bp, synthetic construct
  source 1..75: mol_type = other DNA
aattagatccgattccgtcggcgatgattggtctgtcactgaacaccgctgcctatgctgccgaaacgctgcgcg

SEQ ID NO: 343054 - DNA, 75 bp, synthetic construct
  source 1..75: mol_type = other DNA
ttgattccttgccgttcctgttgaaaggggctgggtatacgctgcaactcagtatcggcggcatgttttttggct

SEQ ID NO: 343055 - DNA, 75 bp, synthetic construct
  source 1..75: mol_type = other DNA
ggacgaattaatccaattttttcaggcaatgcgtaaagccaaaggattcagccgccagaacgaattaacctttaa

SEQ ID NO: 343056 - DNA, 75 bp, synthetic construct
  source 1..75: mol_type = other DNA
gtggagagcctgttcaaggcctttggccgtaccctacgccaggcaattcgtgtggaaggtgacgccctgccctca

SEQ ID NO: 343057 - DNA, 75 bp, synthetic construct
  source 1..75: mol_type = other DNA
gtgatgatcaccaaccaggacggtctgggtaccgacagcttcccgcaggccgactttgacggcccgcataatctg

SEQ ID NO: 343058 - DNA, 75 bp, synthetic construct
  source 1..75: mol_type = other DNA
gatttagatggtgcggtatggcatttgccggaagaacgcagcaaaaacggagaccctattgatatacctctacct

SEQ ID NO: 343059 - DNA, 75 bp, synthetic construct
  source 1..75: mol_type = other DNA
gccgggttttaccgttcacgatttccgacgcacggccagaactcaccttgccgcgcttggagtagaccctgtagt

SEQ ID NO: 343060 - DNA, 75 bp, synthetic construct
  source 1..75: mol_type = other DNA
agcactggcacagtgggctgatctgctggtggcactggaaagcggaaaagactacaacgtgacaccaattagagc

SEQ ID NO: 343061 - DNA, 75 bp, synthetic construct
  source 1..75: mol_type = other DNA
tgaagctaccagatcatccaggttatgtacgccagacctgtgcgacgccagattttcaccccggcaatggcgtcc

SEQ ID NO: 343062 - DNA, 75 bp, synthetic construct
  source 1..75: mol_type = other DNA
acgtattaccactgtcagcaacagcgacatcatcctgataaacgctgttcacatgcgcagcgcgatgactggctg

SEQ ID NO: 343063 - DNA, 75 bp, synthetic construct
  source 1..75: mol_type = other DNA
acgtattaccactgtcagcaacagcgacatcatcctgataaacgcagttcacatgctcagcgcgatgactggctg

SEQ ID NO: 343064 - DNA, 75 bp, synthetic construct
  source 1..75: mol_type = other DNA
acgtattaccactgtcagcaacagcgacatcatcctgataaacgcagtacacatgcgcagcgcgatgactggctg

SEQ ID NO: 343065 - DNA, 75 bp, synthetic construct
  source 1..75: mol_type = other DNA
acgtattaccactgtcagcaacagcgacatcatcctgataaacgccgtgcacatgcccagcgcgatgactggctg

SEQ ID NO: 343066 - DNA, 75 bp, synthetic construct
  source 1..75: mol_type = other DNA
acgtattaccactgtcagcaacagcgacatcatcctgataaacgccgtccacatgcgcagcgcgatgactggctg

SEQ ID NO: 343067 - DNA, 75 bp, synthetic construct
  source 1..75: mol_type = other DNA
acgtattaccactgtcagcaacagcgacatcatcctgataaacgctgtgcacatgctcagcgcgatgactggctg

SEQ ID NO: 343068 - DNA, 75 bp, synthetic construct
  source 1..75: mol_type = other DNA
gctgggagctatcggcgcgctggttggtgtatgggcgcagtcgttcccggatgctgcgctgcacgcctgggcggt

SEQ ID NO: 343069 - DNA, 75 bp, synthetic construct
  source 1..75: mol_type = other DNA
ggatggaacctgtataattacccactgaatccgataataaggatggatcctttgggtttgtataatttatatcaa

SEQ ID NO: 343070 - DNA, 75 bp, synthetic construct
  source 1..75: mol_type = other DNA
ctttacaaagcggaggtaatacaccgtaagagctggaaaaaccgtgcagaagtggaactggccacactcacgtgg

SEQ ID NO: 343071 - DNA, 75 bp, synthetic construct
  source 1..75: mol_type = other DNA
gtgttgtcggggctcagggtgtgacagggaggatgtatccatgtctgtcgaaagcgcgccggactggtggcggta

SEQ ID NO: 343072 - DNA, 75 bp, synthetic construct
  source 1..75: mol_type = other DNA
cagcggcttaaggaagccggattactggcatcaacagggagcacaggcgactcgtatgacaacgagatggttgag

SEQ ID NO: 343073 - DNA, 75 bp, synthetic construct
  source 1..75: mol_type = other DNA
gtggccagatgtacagtggcgcacgtcatggcggttatgagacttgccggtgttgtctggggtacaaaggtccgc

SEQ ID NO: 343074 - DNA, 75 bp, synthetic construct
  source 1..75: mol_type = other DNA
acgtattaccactgtcagcaacagcgacatcatcctgataaacgcggtgcacatgcgcagcgcgatgactggctg

SEQ ID NO: 343075 - DNA, 75 bp, synthetic construct
  source 1..75: mol_type = other DNA
atcattgatgtgtttgccggatacatcgtggggtggcgggtatcatcgtccatggaaacgacattcgtgctggat

SEQ ID NO: 343076 - DNA, 75 bp, synthetic construct
  source 1..75: mol_type = other DNA
agccggaaagccgttgccgcaggcgaccgcgtaaaccgtcagtttgtggcagaacgtcctgaccagttgtgggtg

SEQ ID NO: 343077 - DNA, 75 bp, synthetic construct
  source 1..75: mol_type = other DNA
cagtatgtatcgctggcctacacgcagcggcttaaggaagccggattactggcatcaacagggagcacaggcgac

SEQ ID NO: 343078 - DNA, 75 bp, synthetic construct
  source 1..75: mol_type = other DNA
tgctcctcggtgaggatgaaaaaagaagtattttaagaaataaaaatgggtatatgaaaagcaaactacgggatg

SEQ ID NO: 343079 - DNA, 75 bp, synthetic construct
  source 1..75: mol_type = other DNA
taagagctggaaaaaccgtgcagaagtggaactggccacactcacgtgggtggactggtataacaatcgacgatt

SEQ ID NO: 343080 - DNA, 75 bp, synthetic construct
  source 1..75: mol_type = other DNA
ctgggccatatttctccggcagaagcagaaaaagcttattatgcttccatcggaaacgatgatctggcagcctga

SEQ ID NO: 343081 - DNA, 75 bp, synthetic construct
  source 1..75: mol_type = other DNA
cagaagtggaactggccacactcacgtgggtggactggtataacaatcgaagattgctggtaaggccgggccata

SEQ ID NO: 343082 - DNA, 75 bp, synthetic construct
  source 1..75: mol_type = other DNA
ttgttcttttactgtccacaggcaggaggctttctggaaaacgaaaattcagacatcaaaaaactgttcggcgag

SEQ ID NO: 343083 - DNA, 75 bp, synthetic construct
  source 1..75: mol_type = other DNA
cccattctcgttgtgagagcttctcagcaccaacagagagcagaacggtatcgatacttttgcgggttaacacag

SEQ ID NO: 343084 - DNA, 75 bp, synthetic construct
  source 1..75: mol_type = other DNA
cagaagtggaactggccacactcacgtgggtggactggtataacaatcgaggattgctggcaaggctgggccata

SEQ ID NO: 343085 - DNA, 75 bp, synthetic construct
  source 1..75: mol_type = other DNA
cagaagtggaactggccacactcacgtgggtggactggtataacaatcgacgattgctggtaaggcagggccata

SEQ ID NO: 343086 - DNA, 75 bp, synthetic construct
  source 1..75: mol_type = other DNA
cagaagtggaactggccacactcacgtgggtggactggtataacaatcgatgattgctggcaaggcggggccata

SEQ ID NO: 343087 - DNA, 75 bp, synthetic construct
  source 1..75: mol_type = other DNA
attggtataagccaagtcagctaaacacaaaagacaatatacaaaagacaataaatacaaatacccccttacccc

SEQ ID NO: 343088 - DNA, 75 bp, synthetic construct
  source 1..75: mol_type = other DNA
gttcgttggaaagcgcggctcaggcagcgaaaaacgatctcattgaaccgttcttcgacgatacccaaatcttta

SEQ ID NO: 343089 - DNA, 75 bp, synthetic construct
  source 1..75: mol_type = other DNA
cacggattttaaagtctggctggggataatacgctccatgtcggagtatggggtaaaaagtgacaccctggaact

SEQ ID NO: 343090 - DNA, 75 bp, synthetic construct
  source 1..75: mol_type = other DNA
ttctctgggcggctatgccagttgggaacatgaaagtggtttctatctggacggtgtcgtgaagctgaaccgttt

SEQ ID NO: 343091 - DNA, 75 bp, synthetic construct
  source 1..75: mol_type = other DNA
caaaccatcaaactggggatatgcaaaatcaacgttgcaacggagctgaaaaatgccttctcgcaggcgttaaaa

SEQ ID NO: 343092 - DNA, 75 bp, synthetic construct
  source 1..75: mol_type = other DNA
atgatttcattatattttgaaatcgaaaacaaacgacagaatatgaaaatgtacgtggtatcgacaaagcagatg

SEQ ID NO: 343093 - DNA, 75 bp, synthetic construct
  source 1..75: mol_type = other DNA
ccgtaccgatgagaagcacacccgggaatacatcacccatctggtacagtcagcctactacgatactgaacggga

SEQ ID NO: 343094 - DNA, 75 bp, synthetic construct
  source 1..75: mol_type = other DNA
caccgaattcagggctggcggacaaaaactgtacctgtccccgatacttgatttgtttaacggggaaatcgtggc

SEQ ID NO: 343095 - DNA, 75 bp, synthetic construct
  source 1..75: mol_type = other DNA
tgacgctgtcgatggcggcgatgctgagtccgcaggtcgatgtccggtttgcaaccttatgccacgatctcggaa

SEQ ID NO: 343096 - DNA, 75 bp, synthetic construct
  source 1..75: mol_type = other DNA
aactatcgtcaaattatttgattccatcgatgcctggcgtaaaccgcagcgtgtcgagcaactggcgctgaccag

SEQ ID NO: 343097 - DNA, 75 bp, synthetic construct
  source 1..75: mol_type = other DNA
gcgcaaagaatttgtcgatgataaccgggtgaaagtgaatagtgacggtaatttcgtcaattatttgtcgggcag

SEQ ID NO: 343098 - DNA, 75 bp, synthetic construct
  source 1..75: mol_type = other DNA
cccgtctttcagaagaaagcggatgcagataaaaccaaaacatttgctgaaattaaagattattatcgcaaaggt

SEQ ID NO: 343099 - DNA, 75 bp, synthetic construct
  source 1..75: mol_type = other DNA
ggaaactgcctgcaggctacagaggagctggtgaagcgcatgttaaataaggggctggaaagccttgcagaagga

SEQ ID NO: 343100 - DNA, 75 bp, synthetic construct
  source 1..75: mol_type = other DNA
gcgcgatggcgaagcaatatcaccatccactggcaattcatctcgaccatcacacgaaatttgacgatatcgctc

SEQ ID NO: 343101 - DNA, 75 bp, synthetic construct
  source 1..75: mol_type = other DNA
atgatattcctgaaggaattaccacgctaggcgcttttatgggctattcccattcacatatcggttttgatcgcg

SEQ ID NO: 343102 - DNA, 75 bp, synthetic construct
  source 1..75: mol_type = other DNA
cgcgaaaataatattgatattgttgaatgtgttaagtgcggacatcagatgcgagaagcggacaaagaagcccgc

SEQ ID NO: 343103 - DNA, 75 bp, synthetic construct
  source 1..75: mol_type = other DNA
atggcaatccgaaaacgttttattgcgggcgcaaaatgcccggcctgtcaggcgcaggattcaatggcgatgtgg

SEQ ID NO: 343104 - DNA, 75 bp, synthetic construct
  source 1..75: mol_type = other DNA
ataataactctgattatacagaagcattaattaagagcgttattaatcaagaaaaagatagctttgtaattgttg

SEQ ID NO: 343105 - DNA, 75 bp, synthetic construct
  source 1..75: mol_type = other DNA
actagatctacaagaggttatggttcactggggtggggaaacctttcatcgcgaccctccggtatacgcctggtg

SEQ ID NO: 343106 - DNA, 75 bp, synthetic construct
  source 1..75: mol_type = other DNA
ccgcactgacgagaagcacacacgggaatatatcacccatctggtacagtcagcatattacgacactgaacggga

SEQ ID NO: 343107 - DNA, 75 bp, synthetic construct
  source 1..75: mol_type = other DNA
tgacactgacaccaaacaataacaacaccgtacaacctgtggcgctgatgcgtctgggcgtctttgtacctaccc

SEQ ID NO: 343108 - DNA, 75 bp, synthetic construct
  source 1..75: mol_type = other DNA
acactaattttgaagatatagctcagaaagtccgctccggcgtgcgctcggtaatgattgacgcctcgcatttga

SEQ ID NO: 343109 - DNA, 75 bp, synthetic construct
  source 1..75: mol_type = other DNA
gtgcgtcgggactgtcttctgcggatattcgtcaaagcattaacctgggaatttgcaaaatcaatgtcgcgacgg

SEQ ID NO: 343110 - DNA, 75 bp, synthetic construct
  source 1..75: mol_type = other DNA
gagattggctacctggattacactgagatccagcggggacgcaccaaactcttctgcattcattaccgccggccc

SEQ ID NO: 343111 - DNA, 75 bp, synthetic construct
  source 1..75: mol_type = other DNA
gaatccgctcaggccctgtatacctttatagagagtctgccgcgggatccggcgcctatatcactggcgcgtctg

SEQ ID NO: 343112 - DNA, 75 bp, synthetic construct
  source 1..75: mol_type = other DNA
atggcggagaagcttgccctgcttgaaaaactgggcatcacgctggatgacttggaaaaactcttcaaatcccgc

SEQ ID NO: 343113 - DNA, 75 bp, synthetic construct
  source 1..75: mol_type = other DNA
cgcaatttttcccaggcggcagtcagtcgcaacgtctcgcaaccggcattcagccgccgcatccgtgcactggaa

SEQ ID NO: 343114 - DNA, 75 bp, synthetic construct
  source 1..75: mol_type = other DNA
cagcgggcacagcgtgatgacctgctgaagccggagatacagcgcgtgtacgatgtaaaccacagcgtgtacggt

SEQ ID NO: 343115 - DNA, 75 bp, synthetic construct
  source 1..75: mol_type = other DNA
gtcatcatcctgataaacgcagtgcccgtgcgcagcgcgatgactggctgaagaaagagatactgcgcgtatacg

SEQ ID NO: 343116 - DNA, 75 bp, synthetic construct
  source 1..75: mol_type = other DNA
tggaattgcctggttgccggagtatgccatccaacaagaaattcgcagcgggaagctcgttgtgcttaatcggga

SEQ ID NO: 343117 - DNA, 75 bp, synthetic construct
  source 1..75: mol_type = other DNA
tgactgtggtgcggttttgcataatattgaaaccaaatggctttatgattttctgaccctggaaaaatgccgcaa

SEQ ID NO: 343118 - DNA, 75 bp, synthetic construct
  source 1..75: mol_type = other DNA
tcgcttatttgaatctcaattgttccccgtttgcgccagtgacgaacacggagaagcactttttaacctcgcgca

SEQ ID NO: 343119 - DNA, 75 bp, synthetic construct
  source 1..75: mol_type = other DNA
ctgtggatggctgattttacttacgtcagcacatggcagggcttcgtctatgtggcgttcatcattgatgtgttt

SEQ ID NO: 343120 - DNA, 75 bp, synthetic construct
  source 1..75: mol_type = other DNA
tgggtatcatcgtccatggaaacgacattcgtgctggatgcactggagcaggcgttgtgggcccgtcgtccgtcc

SEQ ID NO: 343121 - DNA, 75 bp, synthetic construct
  source 1..75: mol_type = other DNA
gtgctggatgcgctggagcaggcgttgtgggcccgccgtccgtccggcaccatccatcacagcgataaaggctct

SEQ ID NO: 343122 - DNA, 75 bp, synthetic construct
  source 1..75: mol_type = other DNA
gtgtcactggcctatacggagcgactaaaagaagccggattactggcatcaacagggagtacaggcgactcgtat

SEQ ID NO: 343123 - DNA, 75 bp, synthetic construct
  source 1..75: mol_type = other DNA
acctattatcagggaccgtacgaccacgaatttacttttgagaaattactggaaaagcaattcgcgatcttttgc

SEQ ID NO: 343124 - DNA, 75 bp, synthetic construct
  source 1..75: mol_type = other DNA
cagggagtacaggtgactcgtatgacaacgcgatggcggagagcatcaatggtctttacaaagcggaggtaatac

SEQ ID NO: 343125 - DNA, 75 bp, synthetic construct
  source 1..75: mol_type = other DNA
acgaccgcgtaaaccgccagttcagggcaaagttgtgggtggctgattttacttacggtgtgcccggaattcagg

SEQ ID NO: 343126 - DNA, 75 bp, synthetic construct
  source 1..75: mol_type = other DNA
gcctttacaaagcggaggtaatacaccgtaagtgctggaaaaaccggacagaagtggagctggccacactcacgt

SEQ ID NO: 343127 - DNA, 75 bp, synthetic construct
  source 1..75: mol_type = other DNA
cactcaccgacggcgaaagcggcaagaattatctctcagacgcttttaaatttggcggcgagcacaaactgcaac

SEQ ID NO: 343128 - DNA, 75 bp, synthetic construct
  source 1..75: mol_type = other DNA
gtccattccagaacttctttaaaatcacgctgccgctgctgatcaagccgctgacaccgctgatgatcgccagct

SEQ ID NO: 343129 - DNA, 75 bp, synthetic construct
  source 1..75: mol_type = other DNA
cagcgataaaggctctcagtatgtgtcactggcctatacggagcgactaaaagtaagccggattactggcatcaa

SEQ ID NO: 343130 - DNA, 75 bp, synthetic construct
  source 1..75: mol_type = other DNA
gcactgtggcacgtctcatggcggttatgggacttgccggtgttctccggggtaaaaggtccgtacgaccatcag

SEQ ID NO: 343131 - DNA, 75 bp, synthetic construct
  source 1..75: mol_type = other DNA
gccggaaagccgttgtcgcaggcgaccgcgtaaaccgtcagttcgtggcagaacgtcctgaccagttgtgggtgg

SEQ ID NO: 343132 - DNA, 75 bp, synthetic construct
  source 1..75: mol_type = other DNA
ctattgctttaggcgtatttattgtcagcagccctgtcttttcgcatgaccatcattcacacggaacccctttaa

SEQ ID NO: 343133 - DNA, 75 bp, synthetic construct
  source 1..75: mol_type = other DNA
atggcggagagcatcaatggcctttacaaagcggaggtaataccccgtaagcgctggaaaaaccgtgcagaagtg

SEQ ID NO: 343134 - DNA, 75 bp, synthetic construct
  source 1..75: mol_type = other DNA
ataccctgcgtggtgcgcacggggtcggaccggtatgccacgagctggctgtcgccccgtcaacgtattaccggc

SEQ ID NO: 343135 - DNA, 75 bp, synthetic construct
  source 1..75: mol_type = other DNA
aaggctgggtcatatccctccggcagaagcagaaaaagcttattatgcttccatcagaaacgatgatctggcagc

SEQ ID NO: 343136 - DNA, 75 bp, synthetic construct
  source 1..75: mol_type = other DNA
cttgccggtgttctccggggtaaaaaggtccgcactaccgtcagccggaaagctgttgccgcaggcgacagcgta

SEQ ID NO: 343137 - DNA, 75 bp, synthetic construct
  source 1..75: mol_type = other DNA
ttggcgattcgtcttcataaactggctgttgctttaggtgtctttattgttagcgctcctgccttttcgcatggt

SEQ ID NO: 343138 - DNA, 75 bp, synthetic construct
  source 1..75: mol_type = other DNA
ggtaaaaaggtccgtactaccgtcagccggaaagccattaccgcaggcgaccgcgtaaaccgtcagttcgtggca

SEQ ID NO: 343139 - DNA, 75 bp, synthetic construct
  source 1..75: mol_type = other DNA
catcgtccatggaaacgacattcgtgctggatgcactggagcaggcgttatgggcccgtcgaccgtccggcacgg

SEQ ID NO: 343140 - DNA, 75 bp, synthetic construct
  source 1..75: mol_type = other DNA
atgtatcgctggcctacacgcagcgggcttaaggaagccggattactggcatcaacagggagtactggcgactcg

SEQ ID NO: 343141 - DNA, 75 bp, synthetic construct
  source 1..75: mol_type = other DNA
cgttagattgttagcattaactgagaagattatctcatctattaaaaatgatgatgataaagctaaattgctcaa

SEQ ID NO: 343142 - DNA, 75 bp, synthetic construct
  source 1..75: mol_type = other DNA
ctgtttgaagtcgaatttaatgatcaacgttcggtgctggatattctcaacagcatcggccatatgccgctgccg

SEQ ID NO: 343143 - DNA, 75 bp, synthetic construct
  source 1..75: mol_type = other DNA
gaacgccctgaccagctgtgggtggctgattttacttacgtcagcacatggcagggcttcgtttatgtggcgttc

SEQ ID NO: 343144 - DNA, 75 bp, synthetic construct
  source 1..75: mol_type = other DNA
gccgcaggcgaccgcgtaaaccgtcagttcgtggcagaacgacctgaccagctgtgggtggctgattttacttac

SEQ ID NO: 343145 - DNA, 75 bp, synthetic construct
  source 1..75: mol_type = other DNA
ccgtgcgcagcacgacgactggctgaagagagagatacagcgcgtatacgatagaaaatcatcaggtgtacggtg

SEQ ID NO: 343146 - DNA, 75 bp, synthetic construct
  source 1..75: mol_type = other DNA
ccggatacatcgtggggtggcgggtctcatcgtccatggaaacgacattcgtgctggatgcactggagcaggcgt

SEQ ID NO: 343147 - DNA, 75 bp, synthetic construct
  source 1..75: mol_type = other DNA
aacgcgatggcggagaacatcaatggtctttacaaagcggaggtaatacaccgtaagagctggaaaaaccgtgca

SEQ ID NO: 343148 - DNA, 75 bp, synthetic construct
  source 1..75: mol_type = other DNA
gtgacgccactgctggataagctgcgtaagctgtacgggatcggaccggtatgcagtgaactgcatattgccccg

SEQ ID NO: 343149 - DNA, 75 bp, synthetic construct
  source 1..75: mol_type = other DNA
cagcacatggcagggcttcgtttatgtggcgttcatcattgatgtgttcgccggatacatcgtgggatggcgggt

SEQ ID NO: 343150 - DNA, 75 bp, synthetic construct
  source 1..75: mol_type = other DNA
cctgatggggcataagtccatcagctcaacagaggtctacacgaaggtggtgtttgcgctggatgtggctgcacg

SEQ ID NO: 343151 - DNA, 75 bp, synthetic construct
  source 1..75: mol_type = other DNA
atgtggcgttcatcattgatgtgtttgccggatacatcgtggggtgccatggaaacgacattcgtgctggatgca

SEQ ID NO: 343152 - DNA, 75 bp, synthetic construct
  source 1..75: mol_type = other DNA
actgctggcatcaacaggtagtaccggcgactcgtatgacaacgcgatggcggagagcatcaatggcctttacaa

SEQ ID NO: 343153 - DNA, 75 bp, synthetic construct
  source 1..75: mol_type = other DNA
actcctggcatcaacaggtagtacgggcgactcgtatgacaacgcgatggcggagagcatcaatggcctttacaa

SEQ ID NO: 343154 - DNA, 75 bp, synthetic construct
  source 1..75: mol_type = other DNA
acttctggcatcaacaggaagtaccggcgactcgtatgacaacgcgatggcggagagcatcaatggcctttacaa

SEQ ID NO: 343155 - DNA, 75 bp, synthetic construct
  source 1..75: mol_type = other DNA
gggtggactggtataataatcgacgattgctggaaaggctgggccacatccctccggcagaagcagaaaaagctt

SEQ ID NO: 343156 - DNA, 75 bp, synthetic construct
  source 1..75: mol_type = other DNA
attgctggaaaggctgggccacatccctccggcagaagcagaaaaagcttattatgcttctatcggaaacgatga

SEQ ID NO: 343157 - DNA, 75 bp, synthetic construct
  source 1..75: mol_type = other DNA
gaacgtcctggccagctgtgggtgctgattttactacgtcagcacatggcagggcttcgtctatgtggcgttcat

SEQ ID NO: 343158 - DNA, 75 bp, synthetic construct
  source 1..75: mol_type = other DNA
ctcatcgtctatggaaacgacattcgtgctggatgccctggagcaggcgttttgggcccgccggccgtccggcac

SEQ ID NO: 343159 - DNA, 75 bp, synthetic construct
  source 1..75: mol_type = other DNA
gcgtatacgatgaaaatcaccaggtgtacggtgtgcgtaaagtctggcgccagttgttacgggaaggaatcaggg

SEQ ID NO: 343160 - DNA, 75 bp, synthetic construct
  source 1..75: mol_type = other DNA
gtgttctccggggtaaaaaggtccgtacgaccatcagccggaaagccgttgccgcaggcgaccgcgtaaaccgtc

SEQ ID NO: 343161 - DNA, 75 bp, synthetic construct
  source 1..75: mol_type = other DNA
actactggcatcaacagggagtactggcgactcgtatgacaacgcgatggcggagagcatcaatggcctttacaa

SEQ ID NO: 343162 - DNA, 75 bp, synthetic construct
  source 1..75: mol_type = other DNA
ctcatcgtctatggaaacgacattcgtgctggatgcgctggagcaggcgttttgggcccgccgcccgtccggcac

SEQ ID NO: 343163 - DNA, 75 bp, synthetic construct
  source 1..75: mol_type = other DNA
ctcatcgtctatggaaacgacattcgtgctggatgccctggagcaggcgttttgggcccggcgcccgtccggcac

SEQ ID NO: 343164 - DNA, 75 bp, synthetic construct
  source 1..75: mol_type = other DNA
tgcgaatggcggcagaaaatgcaacctctggcgaatggtgttctgatgattatggggtaattgccgatgccggac

SEQ ID NO: 343165 - DNA, 75 bp, synthetic construct
  source 1..75: mol_type = other DNA
cccaataagcgattcatagcagcagccaatccggctaccgtgctggcactgttggatgaacgggaagcacaaagc

SEQ ID NO: 343166 - DNA, 75 bp, synthetic construct
  source 1..75: mol_type = other DNA
acgatgataatggtgccacggacaaaggagccattcaggaggtattcggtaaactggggctgaaagcgggcgtaa

SEQ ID NO: 343167 - DNA, 75 bp, synthetic construct
  source 1..75: mol_type = other DNA
gaccggggcgagctgacggcagcttcgatgacagaggagctgtgggggcaatttttaattgccctgttcgagtgt

SEQ ID NO: 343168 - DNA, 75 bp, synthetic construct
  source 1..75: mol_type = other DNA
aacccgcaaccgcgccgtgactgccaggcgtgcgactggcatcgcctgtgcccgcacgctcgccaggagacgcca

SEQ ID NO: 343169 - DNA, 75 bp, synthetic construct
  source 1..75: mol_type = other DNA
gaaggagcgcatccagaaagcggtttcgatgaagatttccaaatggaacagcagtccaatgctgaattcatcgct

SEQ ID NO: 343170 - DNA, 75 bp, synthetic construct
  source 1..75: mol_type = other DNA
tcaccggttttttaggcgcgggcaaaactaccctgctgcgccatattcttaacgaacagcacggctacaagattg

SEQ ID NO: 343171 - DNA, 75 bp, synthetic construct
  source 1..75: mol_type = other DNA
gtttgcggcttcatacggttacggtctggacggactgacgttgcgcgccggtggtgtgtttaaccaggactggca

SEQ ID NO: 343172 - DNA, 75 bp, synthetic construct
  source 1..75: mol_type = other DNA
agatgacgaacaccggactgcgggtgagctggtcacggcagagtgaggaatatgaggatatgtcctcctttgatc

SEQ ID NO: 343173 - DNA, 75 bp, synthetic construct
  source 1..75: mol_type = other DNA
gagagcaataatacgagcaggaaaaggacatagatactggtcctctttccctgaggataagactaaaaagataga

SEQ ID NO: 343174 - DNA, 75 bp, synthetic construct
  source 1..75: mol_type = other DNA
agatccagaaacgctacggcatggtcggcgatccggtgattatcggcgtagtgctcggtctgatttttggcctgg

SEQ ID NO: 343175 - DNA, 75 bp, synthetic construct
  source 1..75: mol_type = other DNA
ttacccctcgcagacctgccggtagcaccgttctttatctgtatggctacggttatccaccgcggagacctggtc

SEQ ID NO: 343176 - DNA, 75 bp, synthetic construct
  source 1..75: mol_type = other DNA
cctgcaaaaatggtgcaggagcgaaaaactgcaaccccggcgaggctgtcagggatgtgactggcatcgtctttg

SEQ ID NO: 343177 - DNA, 75 bp, synthetic construct
  source 1..75: mol_type = other DNA
ggtgccagcgcggtactgaaccggaattcggaaacggcagagcgggcagggatagcccggagttatggggtggat

SEQ ID NO: 343178 - DNA, 75 bp, synthetic construct
  source 1..75: mol_type = other DNA
acagccgaacctgaatacctggacggcctgagcgaacccatcgggaaattttcgatgactactgtctggcagccg

SEQ ID NO: 343179 - DNA, 75 bp, synthetic construct
  source 1..75: mol_type = other DNA
tcgggcagcacgtgagcagtgggaacgtgaaaacggatttatcagcgacggaaacggtctggaagctgtgggaac

SEQ ID NO: 343180 - DNA, 75 bp, synthetic construct
  source 1..75: mol_type = other DNA
ttcagaccggcacctggcaaggcatctggctggggaacatcgcatccacggcggatcgcgtcgcatcatcgcgac

SEQ ID NO: 343181 - DNA, 75 bp, synthetic construct
  source 1..75: mol_type = other DNA
tgccgagcctgaatacacccaaaaacgggagtctttaaaggtgggtaaaatcggtgctgttaataaaaacagtac

SEQ ID NO: 343182 - DNA, 75 bp, synthetic construct
  source 1..75: mol_type = other DNA
acggcagaggatttggcaagtgcacttgacgtgacagaagaggttattgattcaattttgcaggcgatgcagggg

SEQ ID NO: 343183 - DNA, 75 bp, synthetic construct
  source 1..75: mol_type = other DNA
gacgccaccttacaaaaatggtgtggcagcgaaaacccgcaaccgcgccgtgactgccaggcgtgcgactggcat

SEQ ID NO: 343184 - DNA, 75 bp, synthetic construct
  source 1..75: mol_type = other DNA
gctgcaaaaatggtgcgggaacgaaagccaacaaccacagagggggtgtcaggagtgtgactggtatctcctttg

SEQ ID NO: 343185 - DNA, 75 bp, synthetic construct
  source 1..75: mol_type = other DNA
aagctttttattcccactcggcaccgtacatgcgggtgatgcgcgacttgataaagcagcatcgttctcccatgg

SEQ ID NO: 343186 - DNA, 75 bp, synthetic construct
  source 1..75: mol_type = other DNA
tcgcctccatgcgactgtttgcccgcttatccctggatagcgccgtgccggagcgcaccaccatcatgaatttcc

SEQ ID NO: 343187 - DNA, 75 bp, synthetic construct
  source 1..75: mol_type = other DNA
gcaaagccgaagccagtaccttgcagcaacgtttgcaaaccgaagcccaattacagtcatttattaccaccgcgc

SEQ ID NO: 343188 - DNA, 75 bp, synthetic construct
  source 1..75: mol_type = other DNA
ggaacgtacggggtatcgctgagccggaacaacagtatgaaaccgggcaatctggggtataccccagtgtttagc

SEQ ID NO: 343189 - DNA, 75 bp, synthetic construct
  source 1..75: mol_type = other DNA
gtggtgataataatgcatcgataaatatgtttactgccacccgggcgattcgttcgctgagtgcggacctggcgg

SEQ ID NO: 343190 - DNA, 75 bp, synthetic construct
  source 1..75: mol_type = other DNA
tgccggagataatctgctcgggagtaccggaatgtatggtatctcgcttacgcgaaataacagtatgaaactagg

SEQ ID NO: 343191 - DNA, 75 bp, synthetic construct
  source 1..75: mol_type = other DNA
cagatggggtatggtctgttgcaaaatatgataagcagccatcacaaagtggtagtaaaacagggttagcgtggt

SEQ ID NO: 343192 - DNA, 75 bp, synthetic construct
  source 1..75: mol_type = other DNA
agcaactcgggctgttcgttcactgagtgcagacttagcggtaggtaagactcagacaggtaataatttgcttgg

SEQ ID NO: 343193 - DNA, 75 bp, synthetic construct
  source 1..75: mol_type = other DNA
cagtgttgcagctggtattccggacgaacaaagcagtgttgaaggagaggtgttatcggcgtcgtatggttatgg

SEQ ID NO: 343194 - DNA, 75 bp, synthetic construct
  source 1..75: mol_type = other DNA
accgtcgaccttttcgtcgcacgctgctggtaatggctgttatggctgctcttgaaagtggggcgtcatatgcag

SEQ ID NO: 343195 - DNA, 75 bp, synthetic construct
  source 1..75: mol_type = other DNA
cggcagccgcaatctacagtgataacaattatcagcgtgaaatgaacgtcaagcgtgcgcttgagcagtatttta

SEQ ID NO: 343196 - DNA, 75 bp, synthetic construct
  source 1..75: mol_type = other DNA
ttacagcaaattatcgatcacgtatcggcagccgcaatctatagcgataacaattatcagcgtgaaatgaacgtc

SEQ ID NO: 343197 - DNA, 75 bp, synthetic construct
  source 1..75: mol_type = other DNA
ttgcagcaaattatcgatcacatatcggcagcagcaatctatgcagataataattatcatcgtgaaatgaacgta

SEQ ID NO: 343198 - DNA, 75 bp, synthetic construct
  source 1..75: mol_type = other DNA
accttctggtcgggaagacgtccaccggtgacagcatgctgggcagcacggggacgtacggggtgtcactgagcc

SEQ ID NO: 343199 - DNA, 75 bp, synthetic construct
  source 1..75: mol_type = other DNA
ggcgcgaagctcttgagctggcagcgcacagctacagagatcttcacatcaacccagactattcgcagaagtctg

SEQ ID NO: 343200 - DNA, 75 bp, synthetic construct
  source 1..75: mol_type = other DNA
aattctcggcaatgtgccgcgacctgacgagcctctcttcccttatcaaacgactacctccacggtacgcaaaag

SEQ ID NO: 343201 - DNA, 75 bp, synthetic construct
  source 1..75: mol_type = other DNA
cgataaagtgttgctggggtggagtaaagattctttttctccgtatgaagatcttcacaacggggggaacaagac

SEQ ID NO: 343202 - DNA, 75 bp, synthetic construct
  source 1..75: mol_type = other DNA
cgtgccattcgcgcactgagtgcggacttggccgtcgggaaaacatcgacaggtgacagtctgctgggtggcacg

SEQ ID NO: 343203 - DNA, 75 bp, synthetic construct
  source 1..75: mol_type = other DNA
ggagtgaaggtgacgtccggtgacggacagactgacagtgacggcaacctggtggtaccgctgaacagctatgac

SEQ ID NO: 343204 - DNA, 75 bp, synthetic construct
  source 1..75: mol_type = other DNA
ggggtcaatccggaggtctgggcggcactgaacggtaattatgcgccggggcgttatctggttgacctgtccctg

SEQ ID NO: 343205 - DNA, 75 bp, synthetic construct
  source 1..75: mol_type = other DNA
cgctgtacaccagtggggatgtgaagatgacggtgaccggcgaggatggccgggaacatgtgcagaacttcccgc

SEQ ID NO: 343206 - DNA, 75 bp, synthetic construct
  source 1..75: mol_type = other DNA
ccggttcacggaacacccggggagaaaacaactggtctgcatcggcgtcagtgtcggtaccgttcacactgtttg

SEQ ID NO: 343207 - DNA, 75 bp, synthetic construct
  source 1..75: mol_type = other DNA
gcggtggtgtggatgccgtttgatgccctgaaagttaagcgttacctgctgcaggtgaagcagcgtgacggtgag

SEQ ID NO: 343208 - DNA, 75 bp, synthetic construct
  source 1..75: mol_type = other DNA
aatatctggcaaaaatggggtcgccggagctggcgagagcggtggcgcagaaaaacggccagggagaatggtttg

SEQ ID NO: 343209 - DNA, 75 bp, synthetic construct
  source 1..75: mol_type = other DNA
ctcaacaccctgagacgttccggactggaaggtcatacggcactgagtgccagtgaaaacaccagtctcggcttc

SEQ ID NO: 343210 - DNA, 75 bp, synthetic construct
  source 1..75: mol_type = other DNA
cgcccacagcaggggaaaccggggcggtcaggtgtatacagggaagacactgctcagtctcttcttctgtgccgg

SEQ ID NO: 343211 - DNA, 75 bp, synthetic construct
  source 1..75: mol_type = other DNA
gtgcgtgtaaaaacaaaatcagtcgccagaaatatgcctccggtattttttcgccgtgctgcactggcgcttgcc

SEQ ID NO: 343212 - DNA, 75 bp, synthetic construct
  source 1..75: mol_type = other DNA
tcttctgcctcagccagcggtggtgacagcggggataactccgccacgataaacgcgttcacggccacccgggcc

SEQ ID NO: 343213 - DNA, 75 bp, synthetic construct
  source 1..75: mol_type = other DNA
cctacaaaaatggtgtggcagcgaaaacccgcaaccgcgtcgtggctgccaggcgtgcgactggcatcgcctgtg

SEQ ID NO: 343214 - DNA, 75 bp, synthetic construct
  source 1..75: mol_type = other DNA
ctccccaaatggggtatggctatatggaattcatcgggtgagcttgttttgacaaatgaatcaagaatattaact

SEQ ID NO: 343215 - DNA, 75 bp, synthetic construct
  source 1..75: mol_type = other DNA
atggcttttgtggatggggttgtgattatgagtgaaccgcgttgtattgctcagttactgcgtaacgaaagcccc

SEQ ID NO: 343216 - DNA, 75 bp, synthetic construct
  source 1..75: mol_type = other DNA
agctacttcgtaaggaaagtccccagcctatggcgttcaatattactcatggtaagggacgtaaaggcatcatca

SEQ ID NO: 343217 - DNA, 75 bp, synthetic construct
  source 1..75: mol_type = other DNA
gcttggtgaactcattacccgtgcgccacagctgacgctggaagactgggagcctgctttgttgtttgaagtccg

SEQ ID NO: 343218 - DNA, 75 bp, synthetic construct
  source 1..75: mol_type = other DNA
tactacctgatccgcgcctttgacagccctgaaagcatggctgcgtttctcgatgctttttacgcaagcgcagac

SEQ ID NO: 343219 - DNA, 75 bp, synthetic construct
  source 1..75: mol_type = other DNA
atgcaggaaatcagcgttcccctacaccgctgccacgggatcgatgttgtttcgtttggcaactcgcttcatgac

SEQ ID NO: 343220 - DNA, 75 bp, synthetic construct
  source 1..75: mol_type = other DNA
tggattttccatgagcaatcgcatcaagcgcaaaacgctggatgaagcagatatcgccagagaaagcgccgctat

SEQ ID NO: 343221 - DNA, 75 bp, synthetic construct
  source 1..75: mol_type = other DNA
gacaacaggactgggacgacatccgcctgcgtatcaacagcaaaacggctgctgacgtagagcgggcgctgagta

SEQ ID NO: 343222 - DNA, 75 bp, synthetic construct
  source 1..75: mol_type = other DNA
ccatcatttgaaaggcaaaaaacaggactttttctggcggctggaaacgccggatcggctgggccgcgcggggat

SEQ ID NO: 343223 - DNA, 75 bp, synthetic construct
  source 1..75: mol_type = other DNA
ttaaccgctcagggtttgcagccggtatggaaagactgggacagctatctgggacgcgcctcgcaaaggccatga

SEQ ID NO: 343224 - DNA, 75 bp, synthetic construct
  source 1..75: mol_type = other DNA
gctgccgcgttaaccgctcagggtttgcagccggtatggaaagactgggacagctatctgggacgcgcctcgcaa

SEQ ID NO: 343225 - DNA, 75 bp, synthetic construct
  source 1..75: mol_type = other DNA
aacgggcgcagcgtctgacccgtcagcgatttggcaacgtcgtcagcttctacgtcccgctttatctttccaatc

SEQ ID NO: 343226 - DNA, 75 bp, synthetic construct
  source 1..75: mol_type = other DNA
tttatcctcttgatgagcttctcagggctgcggagataccgcgcagtacgttttattaccatctaaaggctctca

SEQ ID NO: 343227 - DNA, 75 bp, synthetic construct
  source 1..75: mol_type = other DNA
gttcgaggtaaaagcccgacagctgaaactgctgcgactgcgggcgcaccgctatgcggataaagccctgctgaa

SEQ ID NO: 343228 - DNA, 75 bp, synthetic construct
  source 1..75: mol_type = other DNA
ctgctgaaccgaaaaatggaaatcctgctgggaacgctggtgacaatcgatccggtacgggcagcggtattgtgt

SEQ ID NO: 343229 - DNA, 75 bp, synthetic construct
  source 1..75: mol_type = other DNA
ccgcgcaccgagtcacgcaatcagcttaagcggctgtatgcccagcagaactggacggaactgctggagcaggcc

SEQ ID NO: 343230 - DNA, 75 bp, synthetic construct
  source 1..75: mol_type = other DNA
ggttttgaagcggcggactacccgcaaggacgctggttgcgcgaagcctgggaagtggcacaatcagtgccgaca

SEQ ID NO: 343231 - DNA, 75 bp, synthetic construct
  source 1..75: mol_type = other DNA
atgaacaccggggatgttatgggtactgagcttcagaaaagaggtcttaagttcagtggcaaaacggtgcgaaaa

SEQ ID NO: 343232 - DNA, 75 bp, synthetic construct
  source 1..75: mol_type = other DNA
tgccagcttgccgaatccctgctgctgacgcaggcaaaagacgtgcgcatcgccacttactacatctgggcgcga

SEQ ID NO: 343233 - DNA, 75 bp, synthetic construct
  source 1..75: mol_type = other DNA
gaaacagctcatagcctccatcttccatgaacaccggggatgttatgggtaccggcggatccattgtgagcttca

SEQ ID NO: 343234 - DNA, 75 bp, synthetic construct
  source 1..75: mol_type = other DNA
atgtactaccagctgtcactgcagaaggctaaggacaagtatgctgatgtgaaacagctcatagcctccatcttc

SEQ ID NO: 343235 - DNA, 75 bp, synthetic construct
  source 1..75: mol_type = other DNA
gcgggcatcttggggtggggtatagccatagtgccggtgtggaatccccgtggaacgcggtagctggtgtgaact

SEQ ID NO: 343236 - DNA, 75 bp, synthetic construct
  source 1..75: mol_type = other DNA
ggcccgaagaccagcattccccctccctgatgccgctgattaacgcgctggaatcgcgtctggcgcagtcgggtg

SEQ ID NO: 343237 - DNA, 75 bp, synthetic construct
  source 1..75: mol_type = other DNA
ccgttacccacggcgacatcgacctgggcctgctgttcaacaccaacggttttatgctggaagaaaacgtcgtca

SEQ ID NO: 343238 - DNA, 75 bp, synthetic construct
  source 1..75: mol_type = other DNA
tcaccggttttttaggcgcaggcaaaaccaccctgctgcgccatattcttaatgaacagcacggctacaaaattg

SEQ ID NO: 343239 - DNA, 75 bp, synthetic construct
  source 1..75: mol_type = other DNA
atgagatggggcgcaaaatctttccgtattacttctgtaaccggtccgaataccctccatggaacagcagtaatt

SEQ ID NO: 343240 - DNA, 75 bp, synthetic construct
  source 1..75: mol_type = other DNA
tcgcctccatgcggctgtttgcccgtttatccctggatagcgccatgccggatcgcaccaccatcatgaatttcc

SEQ ID NO: 343241 - DNA, 75 bp, synthetic construct
  source 1..75: mol_type = other DNA
tcgcctccatgcggctgtttgcccgattatccctggatagcgccatgccggaacgcaccaccatcatgaatttcc

SEQ ID NO: 343242 - DNA, 75 bp, synthetic construct
  source 1..75: mol_type = other DNA
tcgcctccatgcggctgtttgcccgtttatccctggatagcgccttgccggaacgcaccaccatcatgaatttcc

SEQ ID NO: 343243 - DNA, 75 bp, synthetic construct
  source 1..75: mol_type = other DNA
tcccgcatggagcagattttgccatggcagaatatgaccgctgtcatcgagccgttttatcccaaggcgggcaat

SEQ ID NO: 343244 - DNA, 75 bp, synthetic construct
  source 1..75: mol_type = other DNA
gcattggtacaacctgagcgacggtgccatggaaaatgccctgtacgaaatcgcctccatgcgcctgtttgcccg

SEQ ID NO: 343245 - DNA, 75 bp, synthetic construct
  source 1..75: mol_type = other DNA
ttaaaaccggttttgggctttcggttggttccgggttgacgctggcagcgggcactgccgctgtgcttaaccgga

SEQ ID NO: 343246 - DNA, 75 bp, synthetic construct
  source 1..75: mol_type = other DNA
atgtggactggctgatcgccgagcgtcccggcaaggtaaaaaccttgaagcagaatccgcgcaagaacaaaacgg

SEQ ID NO: 343247 - DNA, 75 bp, synthetic construct
  source 1..75: mol_type = other DNA
gccatggaagatgccctgtacgaaatcgcctccatgcgcctgtttgcccgattatccctggatagcgcccagccg

SEQ ID NO: 343248 - DNA, 75 bp, synthetic construct
  source 1..75: mol_type = other DNA
gccggatgccgacgagctgcttaactggctgcgtcgccagcctttgctgcaaatcgacgaagagaaaaagctggt

SEQ ID NO: 343249 - DNA, 75 bp, synthetic construct
  source 1..75: mol_type = other DNA
atggcgacataccttattggcgacgttcatggttgttacgatgaactgatcgcattgctgcataaagtggaattt

SEQ ID NO: 343250 - DNA, 75 bp, synthetic construct
  source 1..75: mol_type = other DNA
aaatcgacgaagagaaaaagctggtgatggcccacgcagggatcacgccgcagtgggatctgcagaccgccaaag

SEQ ID NO: 343251 - DNA, 75 bp, synthetic construct
  source 1..75: mol_type = other DNA
gctggaagagcagctggcgcaaaaagcggatgagatgggcgcaaaatctttccgtattacttctgtaaccggtcc

SEQ ID NO: 343252 - DNA, 75 bp, synthetic construct
  source 1..75: mol_type = other DNA
atgaaaaacgtaaaaaccctcatcgctgcggcgattttaagctccatgtcatttgccagctttgcggctgtcgaa

SEQ ID NO: 343253 - DNA, 75 bp, synthetic construct
  source 1..75: mol_type = other DNA
tggctgcgtcgccaacctctgctgcaaatcgacgaagagaaaaagctggtgatggctcacgcggggatcacgccg

SEQ ID NO: 343254 - DNA, 75 bp, synthetic construct
  source 1..75: mol_type = other DNA
attcgtcgtttttccgatgttccgatcgtgatggtgacagcaaaaatcgaagagatcgaccgcctgctggggctg

SEQ ID NO: 343255 - DNA, 75 bp, synthetic construct
  source 1..75: mol_type = other DNA
ggtagcgcgcgtcaaaaccattttgcgccgttgcaaaccgcagcgcgagttgcagcaacaggatgctgaaagccc

SEQ ID NO: 343256 - DNA, 75 bp, synthetic construct
  source 1..75: mol_type = other DNA
aggtggatgtggactggctgagcgccgagcgtcccggcaaggtaaaaaccttgaagcagcatccgcgcaagaaca

SEQ ID NO: 343257 - DNA, 75 bp, synthetic construct
  source 1..75: mol_type = other DNA
tcgcctccatgcgcctgtttgcccgattattcctggatagcgccctgccggatcgcaccaccatcatgaatttcc

SEQ ID NO: 343258 - DNA, 75 bp, synthetic construct
  source 1..75: mol_type = other DNA
agcagcgaggtctgcttctgcagcaaaaacctctgaaacaaatgcaaagacttcagcagacaatgctgcttcctc

SEQ ID NO: 343259 - DNA, 75 bp, synthetic construct
  source 1..75: mol_type = other DNA
gacgagatggcggaaatgcagaccaccatcacagaaacccgcaatgaaatcacgcagacggtcagtaaaacgctg

SEQ ID NO: 343260 - DNA, 75 bp, synthetic construct
  source 1..75: mol_type = other DNA
caacagcacttccgagtcactggcggcaacgccaaaagcggttaaggcggtaatgggtgaaacgaacaagaaagc

SEQ ID NO: 343261 - DNA, 75 bp, synthetic construct
  source 1..75: mol_type = other DNA
cgcgacagaacgaacggttactgtcattgatgatcagtcgtttgaccggaatattgttatcccgccggtttttta

SEQ ID NO: 343262 - DNA, 75 bp, synthetic construct
  source 1..75: mol_type = other DNA
tgagttctggttttcggaggcaaaaattgcagacgccgcacaggtggaaacctctgtccgttatctggggaccgg

SEQ ID NO: 343263 - DNA, 75 bp, synthetic construct
  source 1..75: mol_type = other DNA
caccgccatcactgccgacacggagcaccgtttcagtggcctgcctctgggggaatacaccctgacggtcagggc

SEQ ID NO: 343264 - DNA, 75 bp, synthetic construct
  source 1..75: mol_type = other DNA
accaaacgggacggttacagtcaccatcagtgatgatcataactttgaccgtcaaatcattattccgcccattat

SEQ ID NO: 343265 - DNA, 75 bp, synthetic construct
  source 1..75: mol_type = other DNA
taacgcactgggtgaaaactccattgttctgggagataacgacaccggatttaggcaagatggagatggtattat

SEQ ID NO: 343266 - DNA, 75 bp, synthetic construct
  source 1..75: mol_type = other DNA
tgtttgcggtgagtattacctcatcaggtgagcctccgacgttttccctgacgccggacgggaaactgacagccc

SEQ ID NO: 343267 - DNA, 75 bp, synthetic construct
  source 1..75: mol_type = other DNA
tgcactggtcacacagggcggacagacgtttattaatgaggcgctgatcaagttccttattgctcccacgattac

SEQ ID NO: 343268 - DNA, 75 bp, synthetic construct
  source 1..75: mol_type = other DNA
gtggtgttattgatatgccagctggtcacggccacatgacgctggagttttcggtgtcagcatggctggtaaatg

SEQ ID NO: 343269 - DNA, 75 bp, synthetic construct
  source 1..75: mol_type = other DNA
gatggtgacggtgcgacctcaatctgtacgctgacggtgagtgtgaatgatcgggtggtgttcagcaaaacctca

SEQ ID NO: 343270 - DNA, 75 bp, synthetic construct
  source 1..75: mol_type = other DNA
ataataacctgaacagcatgtgggcagtgaagctgcagcagatgcaggacggacgcctttatattgcgggtatcg

SEQ ID NO: 343271 - DNA, 75 bp, synthetic construct
  source 1..75: mol_type = other DNA
gccgacagcgacactgattcatacatgtggtttgaaacaggcgacaacggcaatgaatatttcaaatggagaagc

SEQ ID NO: 343272 - DNA, 75 bp, synthetic construct
  source 1..75: mol_type = other DNA
tggtctgatagatgagacgctgctggggcaggcactgaaaaagcgcattgatgcgtcagccctgcgatcggatgt

SEQ ID NO: 343273 - DNA, 75 bp, synthetic construct
  source 1..75: mol_type = other DNA
aggttgaaaccgcagcccgctatcttggctcggcgctgtactggatagctgccagtatcaatatcaaaccgggcc

SEQ ID NO: 343274 - DNA, 75 bp, synthetic construct
  source 1..75: mol_type = other DNA
aagcggattgcggatatcaggcaggttgaaaccacagcacgctatcttggtacggcgttgtactggatagccgcc

SEQ ID NO: 343275 - DNA, 75 bp, synthetic construct
  source 1..75: mol_type = other DNA
ggctgtgaagctgcagcagatgcaggacggacgcctttatatcgcgggtattggtgccggtattgagaatactcc

SEQ ID NO: 343276 - DNA, 75 bp, synthetic construct
  source 1..75: mol_type = other DNA
tgacctggctgaaatcaggacgtccattacgaatgtcagcaatgaaatcacgcagaccgtcaataaaaaactgga

SEQ ID NO: 343277 - DNA, 75 bp, synthetic construct
  source 1..75: mol_type = other DNA
ctggcgtgccggggagcaggagcagacaccaccggaaggctttgagtcctccggagctgaaaccggactgggcgt

SEQ ID NO: 343278 - DNA, 75 bp, synthetic construct
  source 1..75: mol_type = other DNA
atttactcctcatgccgtctgatagtgcggaaaaacggtgctgaaatttataaccgtaccgcgctggataatacg

SEQ ID NO: 343279 - DNA, 75 bp, synthetic construct
  source 1..75: mol_type = other DNA
gccgtcattgatattgccatgccggacgaaaacggcctcagtttgcttaagcgcctgcgtgcacaaaaaccgcaa

SEQ ID NO: 343280 - DNA, 75 bp, synthetic construct
  source 1..75: mol_type = other DNA
tttttggctcgatgatgcatgtcgggattattgagttgcgacgctgtcagtcagaaaattgccagcaagaattga

SEQ ID NO: 343281 - DNA, 75 bp, synthetic construct
  source 1..75: mol_type = other DNA
ctcaacaatgtcacaattaatgagaactgtcagattaaggggaaactgtcagccaaccagattgaaggcgatata

SEQ ID NO: 343282 - DNA, 75 bp, synthetic construct
  source 1..75: mol_type = other DNA
actcggaggaaggcaagctgagccagtttctggttgccgctaaccgtatcgcgtttattgacccggcaaacggga

SEQ ID NO: 343283 - DNA, 75 bp, synthetic construct
  source 1..75: mol_type = other DNA
gtgaggtgacactgccggagaccggtgccgccacggtgaacctgattaacggcagcggtaagccggtgagtgtgg

SEQ ID NO: 343284 - DNA, 75 bp, synthetic construct
  source 1..75: mol_type = other DNA
taaggttttccataaaggcaatcagcgggcaggtaatatcaccgactgtacggtgattgtgaccaaaaaagccgc

SEQ ID NO: 343285 - DNA, 75 bp, synthetic construct
  source 1..75: mol_type = other DNA
attaacgagaactgtcgggttctgggaaaactgtccgcgaaccagattgaaggcgatctcgttaaaacagtgggc

SEQ ID NO: 343286 - DNA, 75 bp, synthetic construct
  source 1..75: mol_type = other DNA
tcagaaaattgccagcaagaattgaaagcgataaatacaggtaatgactccaacttattgatagtgttttatgtt

SEQ ID NO: 343287 - DNA, 75 bp, synthetic construct
  source 1..75: mol_type = other DNA
cgccgggacgctcaacaacgtcacggtaaatgaaaactgtacgattaagggcatgctggaggcgactcaggtcag

SEQ ID NO: 343288 - DNA, 75 bp, synthetic construct
  source 1..75: mol_type = other DNA
tgctggaaacgcagacggtggatttcacgctcgggtcacaggggctgcggcatacgcccggtgacatcattgaaa

SEQ ID NO: 343289 - DNA, 75 bp, synthetic construct
  source 1..75: mol_type = other DNA
gtacgattaagggcatgctggaggcgacccaggtcagaggggatttcgttaaagctgtatcaaaagccttcccga

SEQ ID NO: 343290 - DNA, 75 bp, synthetic construct
  source 1..75: mol_type = other DNA
cagggggaggtgatgtcaggatcaagttccggattgaggtcatctattatggaactgcaccgggttttatgacca

SEQ ID NO: 343291 - DNA, 75 bp, synthetic construct
  source 1..75: mol_type = other DNA
agggcgaacccgccaccaccacgttccggattaacgcaccggcggcaccggccagcattgaactgacgccggggt

SEQ ID NO: 343292 - DNA, 75 bp, synthetic construct
  source 1..75: mol_type = other DNA
cggctcccaccattaccagcggtggaaatccgccggcattttccctgacaccggacggaaaactgaccgctaaaa

SEQ ID NO: 343293 - DNA, 75 bp, synthetic construct
  source 1..75: mol_type = other DNA
gttgacgggcaggggaatccggtcagcgtggaggtccagtccgtcaccgacggcgtgaaggtgaaagtgagccgt

SEQ ID NO: 343294 - DNA, 75 bp, synthetic construct
  source 1..75: mol_type = other DNA
ggaagtgaagtacgacacgccgattacccggaccatcacgtcggcaaacatcgaccgtctgcgcctgaccttcgg

SEQ ID NO: 343295 - DNA, 75 bp, synthetic construct
  source 1..75: mol_type = other DNA
cttcaatctgtacgctgacggtaagtgtgaatgatcgggtagtgttcagcaaaagctcatccatcgggaccgggc

SEQ ID NO: 343296 - DNA, 75 bp, synthetic construct
  source 1..75: mol_type = other DNA
gaaaaacgcatcacggacacggcacaggtgggaatctctgcccgttatctggggacaggcagccagtggagtgtc

SEQ ID NO: 343297 - DNA, 75 bp, synthetic construct
  source 1..75: mol_type = other DNA
ttgcctggcaacaactcgtcgaaaaaagccaactcatgttacgcctggcgacagaaggacgatgggatgaactca

SEQ ID NO: 343298 - DNA, 75 bp, synthetic construct
  source 1..75: mol_type = other DNA
aatctggatcagggtgttcaggcttaatgcggggacacccgtgacggtgtcggtttcagacaatgcggtgacggt

SEQ ID NO: 343299 - DNA, 75 bp, synthetic construct
  source 1..75: mol_type = other DNA
tgaagttgagcaactggagaatgcgattaaccgcgaaatgacgcagctggagaaagatgtgaggcagcgtgcgga

SEQ ID NO: 343300 - DNA, 75 bp, synthetic construct
  source 1..75: mol_type = other DNA
tcccggaaacaggcgtaacctgttcgagaaatattacgaatatccgttactctcctgcgtacaggctggcgcatt

SEQ ID NO: 343301 - DNA, 75 bp, synthetic construct
  source 1..75: mol_type = other DNA
atctcagcgagtggacaaagtcattatcaacgtgccactggagaccgaacaggcgcagaaaatcgccgctgacaa

SEQ ID NO: 343302 - DNA, 75 bp, synthetic construct
  source 1..75: mol_type = other DNA
agcggctatgccggtgcgctgcagatgctgcgcgaaacgcccaattttagcgctgtgctggtaggaaatgaccag

SEQ ID NO: 343303 - DNA, 75 bp, synthetic construct
  source 1..75: mol_type = other DNA
gcatgtgggctgtgaagctgcagcagatgcaggacggacgcctttatatcgcgggtattggtgccggtattgaga

SEQ ID NO: 343304 - DNA, 75 bp, synthetic construct
  source 1..75: mol_type = other DNA
tcattgatatgcctgccggacacggccatgtcaccctgactttcaatgtttcttcatatggtgctaataactgga

SEQ ID NO: 343305 - DNA, 75 bp, synthetic construct
  source 1..75: mol_type = other DNA
aggtgcagaaaacgaaaaacggcattccgtatgttgccggtattggtgcggggattgaggatgctgatggccaga

SEQ ID NO: 343306 - DNA, 75 bp, synthetic construct
  source 1..75: mol_type = other DNA
actgcagcagatgaaggacggacgcctttatattgcgggtatcggagccggtattgagaatacgccagcaggtat

SEQ ID NO: 343307 - DNA, 75 bp, synthetic construct
  source 1..75: mol_type = other DNA
aatgtcagcaatgaaatcacgcagaccgtcaataaaaaactggaaaatcagagcgcggcaatccagcagatacag

SEQ ID NO: 343308 - DNA, 75 bp, synthetic construct
  source 1..75: mol_type = other DNA
gctgcggcacacacccggtgacatcattgaaatctgtgataacgactatgccgggaccctgaccggcggacgtgt

SEQ ID NO: 343309 - DNA, 75 bp, synthetic construct
  source 1..75: mol_type = other DNA
aggtcgctatttcagtagcgaaaaaagtaaaatataaaagtctgactcgctatgtgctgctttcggtgtgcatct

SEQ ID NO: 343310 - DNA, 75 bp, synthetic construct
  source 1..75: mol_type = other DNA
caccgtttcagtggcctgccactgggggaatacaccctgacggtcagggcgattaacagttatggccagcagggc

SEQ ID NO: 343311 - DNA, 75 bp, synthetic construct
  source 1..75: mol_type = other DNA
ctctgcactcacaacaggctgatctgatgaatattgccgaacaccttcgcacgctggcagatgagctaacacgca

SEQ ID NO: 343312 - DNA, 75 bp, synthetic construct
  source 1..75: mol_type = other DNA
ggttttatgtgcgcagtgtcaacctggtgggcaagtctgcatttgtggaagccagcgggcaggccagcaatgatg

SEQ ID NO: 343313 - DNA, 75 bp, synthetic construct
  source 1..75: mol_type = other DNA
tccggattaacgcgcctgcaaaacccgccaccattgagctgacgccggggtattttcagataacggcggtcccgc

SEQ ID NO: 343314 - DNA, 75 bp, synthetic construct
  source 1..75: mol_type = other DNA
gaccaccgccatcaccgcagacacggagcaccgtttcagcggcctgccgctggggcgttacacgctgacggtccg

SEQ ID NO: 343315 - DNA, 75 bp, synthetic construct
  source 1..75: mol_type = other DNA
ttaaggggaaactgtcagccaaccagattgaaggtgatattgtcaaaacggtcagcaagtctttcccccgcacga

SEQ ID NO: 343316 - DNA, 75 bp, synthetic construct
  source 1..75: mol_type = other DNA
acaaatctgcccgctatcttggtacggcactgtactgggtagcctccggccagaatattaagccgggccatgatt

SEQ ID NO: 343317 - DNA, 75 bp, synthetic construct
  source 1..75: mol_type = other DNA
tccagtccgtcaccgacggcgtgaaggtgaaagtgagccgtgttcctgacggcgttgctgaatacagcgtgtggg

SEQ ID NO: 343318 - DNA, 75 bp, synthetic construct
  source 1..75: mol_type = other DNA
acggtaacaccactccagcactggtcacgcaggggggacagacgtttatcaatgaagcgctgattaagaccctta

SEQ ID NO: 343319 - DNA, 75 bp, synthetic construct
  source 1..75: mol_type = other DNA
gcagcagatgcaggatggtcgcctttacattgcgggtatcggtgccggtattgagaatacccctgacggtatgca

SEQ ID NO: 343320 - DNA, 75 bp, synthetic construct
  source 1..75: mol_type = other DNA
gaggctgtcggccagccgggtaataatcctgaagagtatctcaatttttttgaagggaaaataaacagcaccctg

SEQ ID NO: 343321 - DNA, 75 bp, synthetic construct
  source 1..75: mol_type = other DNA
cggcaatccccctgtgttctccctgacgccggaaggcaggctgacggcccgtaatgcggatatcagcggaaatat

SEQ ID NO: 343322 - DNA, 75 bp, synthetic construct
  source 1..75: mol_type = other DNA
atgttaccgggcagccatcacctgacaggatacagatcagcacactgcctgacggggtggtggaacacagtatct

SEQ ID NO: 343323 - DNA, 75 bp, synthetic construct
  source 1..75: mol_type = other DNA
cagttcggtgggcagcagatggcggtgaactaccatatccgcgggcgcatcatccaggtgccgtcaaactatgac

SEQ ID NO: 343324 - DNA, 75 bp, synthetic construct
  source 1..75: mol_type = other DNA
ccattcccggtagttacagtgcagttattgatatgcctagtggtggtggtagcgtcactctggagtttaagattt

SEQ ID NO: 343325 - DNA, 75 bp, synthetic construct
  source 1..75: mol_type = other DNA
ctttaacggaatagcgtatagctatccgggaagtggtaataacccgggaggtacaagttacacgggttatggttt

SEQ ID NO: 343326 - DNA, 75 bp, synthetic construct
  source 1..75: mol_type = other DNA
tcaccgcacaaccggcccctgaccggatacaggtcagcgccctgcctgagggtgtggaaatttacggtgtctggg

SEQ ID NO: 343327 - DNA, 75 bp, synthetic construct
  source 1..75: mol_type = other DNA
tcttcttcaatggtcaataactggacaccgacaaccagtatcagcgatttgcttgttgtggtgatgaagaaatcc

SEQ ID NO: 343328 - DNA, 75 bp, synthetic construct
  source 1..75: mol_type = other DNA
cgccaaccagattgaaggcgatattgtcaaaacggtcagcaagtctttcccccgcacgagcacttatgccagcgg

SEQ ID NO: 343329 - DNA, 75 bp, synthetic construct
  source 1..75: mol_type = other DNA
ggacgccaacgaccagtatcagcgaccttcttgttattgtgatgaagaaatctacagccggtatcagtatcagtt

SEQ ID NO: 343330 - DNA, 75 bp, synthetic construct
  source 1..75: mol_type = other DNA
cataactttgaccgtcaaatcattattccgcccattatttttaacggtgtggcgtatgacgatccggggagcgga

SEQ ID NO: 343331 - DNA, 75 bp, synthetic construct
  source 1..75: mol_type = other DNA
agggtatcaggtgttgatctccatgattgatgagagcgtcaaccacagcgtccaggattcgattaatgaactgaa

SEQ ID NO: 343332 - DNA, 75 bp, synthetic construct
  source 1..75: mol_type = other DNA
tcaacaacggatgctccggcggttttttcttccgttattgatatgcctgcggggcagggaacgttgacgttaaag

SEQ ID NO: 343333 - DNA, 75 bp, synthetic construct
  source 1..75: mol_type = other DNA
tttcaacagtaataaccaacagtcatactggtattcaacctgccggttaagagtgacccgcaatggtcaggagat

SEQ ID NO: 343334 - DNA, 75 bp, synthetic construct
  source 1..75: mol_type = other DNA
gattaacagctatggccagcagggcgaaccggccaccaccaccttccggattaacgcgccagcaaaacccgccag

SEQ ID NO: 343335 - DNA, 75 bp, synthetic construct
  source 1..75: mol_type = other DNA
aaaagaatgaggatcagacgctggccatcgcgcaggtgagtcagaaagtggaccgtgtcagcagtgaaatctcac

SEQ ID NO: 343336 - DNA, 75 bp, synthetic construct
  source 1..75: mol_type = other DNA
tgaagagccattaactcgtgtccctgcttacgaatatccgttactctcctgcgtacaggctggcgcattcacaat

SEQ ID NO: 343337 - DNA, 75 bp, synthetic construct
  source 1..75: mol_type = other DNA
ttcgccttaccgtggcagcggacgacggcagtgagcggctggtcagcatggcccggacgacggaaaccacatacc

SEQ ID NO: 343338 - DNA, 75 bp, synthetic construct
  source 1..75: mol_type = other DNA
ttacgacatcggtatatcgacgatttatcgttatcaccctgtaggcgatatacaggctgaagaaacaaccgggca

SEQ ID NO: 343339 - DNA, 75 bp, synthetic construct
  source 1..75: mol_type = other DNA
tggtctggaagctggatcggctggggcgtagtatgcggcatctggtcattctggttgaggagttgcgcgaacgtg

SEQ ID NO: 343340 - DNA, 75 bp, synthetic construct
  source 1..75: mol_type = other DNA
acttacaccagaacaatgggcgcaggccgggcgactaattgcatcaggagttcatcgccagaatgtggcgatcat

SEQ ID NO: 343341 - DNA, 75 bp, synthetic construct
  source 1..75: mol_type = other DNA
actgatagttgaacgtacccgggcagggctggctgcagctcgtgctaaaggcagagtaggtggacgccgtcctaa

SEQ ID NO: 343342 - DNA, 75 bp, synthetic construct
  source 1..75: mol_type = other DNA
aatcacgtcaacgtgtggcgctgatttttgatattggcctgtccacgctctataaaaaattcccctcatcagcga

SEQ ID NO: 343343 - DNA, 75 bp, synthetic construct
  source 1..75: mol_type = other DNA
tgtcaacaaatgaccagaacacggaattgcagcgtaacgcgctggagtgcgcaggatgtgagctgatttttgagg

SEQ ID NO: 343344 - DNA, 75 bp, synthetic construct
  source 1..75: mol_type = other DNA
ggagggcgaatgataaaatcgttgtttatcatcaggaacaagtaaatggaccgcttgtcgacgagtcagggcggg

SEQ ID NO: 343345 - DNA, 75 bp, synthetic construct
  source 1..75: mol_type = other DNA
ccgtcatcctgaaaatggaaatgatgccatttttagattcagtggggctggtactggataataataaatattatc

SEQ ID NO: 343346 - DNA, 75 bp, synthetic construct
  source 1..75: mol_type = other DNA
tccgtcggcaattttctgaaatgacagatttggtcaatacgctggcgtttttgcctgactctacggatcaaatcg

SEQ ID NO: 343347 - DNA, 75 bp, synthetic construct
  source 1..75: mol_type = other DNA
caacaaatgaccagaacacggatttacaacgcaatgcactgaactgcgcaggatgtgaactgatttttgaagata

SEQ ID NO: 343348 - DNA, 75 bp, synthetic construct
  source 1..75: mol_type = other DNA
gtgttaatttccgtagtctgacggacagcattgacacatcaacacccatggggcgtttcttttttcacgtcatgg

SEQ ID NO: 343349 - DNA, 75 bp, synthetic construct
  source 1..75: mol_type = other DNA
cgattattgagtcaaacaataatcagtatctggccgccgggatcatcaaactgtgcggactggaagccgtcgaag

SEQ ID NO: 343350 - DNA, 75 bp, synthetic construct
  source 1..75: mol_type = other DNA
cagcattgacacatcaacacccatggggcgtttcttttttcacgtcatgggagctttagccgaaatggaacgtga

SEQ ID NO: 343351 - DNA, 75 bp, synthetic construct
  source 1..75: mol_type = other DNA
ttcctgtcggtgctggtgccgttctggctggtggcgatgatggacggctggaaaggtgtgaaagagacatggccg

SEQ ID NO: 343352 - DNA, 75 bp, synthetic construct
  source 1..75: mol_type = other DNA
ggtggcgtttggtgcgttgggcgtgccgattctggtcgccggtcaggtaacgggaatcgatccgttccacattgg

SEQ ID NO: 343353 - DNA, 75 bp, synthetic construct
  source 1..75: mol_type = other DNA
atggtagcgtcaacgtacgtcgcttcggtggcatgaaaatcgagcgtacctggttcgccgccgataagaccggct

SEQ ID NO: 343354 - DNA, 75 bp, synthetic construct
  source 1..75: mol_type = other DNA
gaaaggggtgaaagagacgtggccagcggcgctggttgctgggggaagcttcgctgtcacgcagttctttacctc

SEQ ID NO: 343355 - DNA, 75 bp, synthetic construct
  source 1..75: mol_type = other DNA
agcacagtctgatctttgccagtgttatcggcattatcaccctgctacaggcatatgtatttaccggaatgttag

SEQ ID NO: 343356 - DNA, 75 bp, synthetic construct
  source 1..75: mol_type = other DNA
cgctaattagcctgaagtggccgatattatcgattggcatggtgctggcatttgcttttgtgactaactattccg

SEQ ID NO: 343357 - DNA, 75 bp, synthetic construct
  source 1..75: mol_type = other DNA
acattatcggcaggtgacactctggttgtctggaaactggatcggctggggcgcagtatgcggcatctggtcatt

SEQ ID NO: 343358 - DNA, 75 bp, synthetic construct
  source 1..75: mol_type = other DNA
gcaacgtaatgcactgaactgcacgggatgtgagcggatttttgaggataaaatcagtggcactaagtccgacag

SEQ ID NO: 343359 - DNA, 75 bp, synthetic construct
  source 1..75: mol_type = other DNA
ctactcggcaacagatcgcagatgtgataggcgtagatgtgaagactatttacaaaaatttgccggtacaatgcg

SEQ ID NO: 343360 - DNA, 75 bp, synthetic construct
  source 1..75: mol_type = other DNA
tggttcgccgccgataagaccggcttccatatgctgcacacgctgttccagacctctctgcaattcccgcagatc

SEQ ID NO: 343361 - DNA, 75 bp, synthetic construct
  source 1..75: mol_type = other DNA
agggataaaaattagcacttcaattggccgctttgcctacacgatgctgagtgcagtcgcagagatggagcggga

SEQ ID NO: 343362 - DNA, 75 bp, synthetic construct
  source 1..75: mol_type = other DNA
gcaacgaaacgctcttgtttgtgcaggatgtgaacagatatttgaagataaattaagcgggacaaagacagaccg

SEQ ID NO: 343363 - DNA, 75 bp, synthetic construct
  source 1..75: mol_type = other DNA
aaatcagcggcacgaagtctgaccgaccgggactgaaaaaactgctcagaacattatcagcaggtgacactctgg

SEQ ID NO: 343364 - DNA, 75 bp, synthetic construct
  source 1..75: mol_type = other DNA
attggacgtttactcgaggccggagaatcaagacagcgtattgcactgatttttgatgtaggcgtttctaccatt

SEQ ID NO: 343365 - DNA, 75 bp, synthetic construct
  source 1..75: mol_type = other DNA
ggccgtttcttttttcatgtcatggggggcctggctgaaatggagcgcgaactgatagttgaacgtaccagggcg

SEQ ID NO: 343366 - DNA, 75 bp, synthetic construct
  source 1..75: mol_type = other DNA
caacaaatgaccagaacacggaattgcagcgtaatgcgctggagtgcgcaggatgtgagctgatttttgaggata

SEQ ID NO: 343367 - DNA, 75 bp, synthetic construct
  source 1..75: mol_type = other DNA
tggcggttacccgtcgataagctcaacgaacgctgccggtggcggcggcggtggcggcggtggtgtgagcgagtc

SEQ ID NO: 343368 - DNA, 75 bp, synthetic construct
  source 1..75: mol_type = other DNA
gtgttaatttccgtagtctgacagacagtattgacacatcaacacccatggggcgtttcttttttcatgtcatgg

SEQ ID NO: 343369 - DNA, 75 bp, synthetic construct
  source 1..75: mol_type = other DNA
accttgcctccggaagatactcccgacaacactccggccggaggcaataccggacaagcggaaaagaccagaaac

SEQ ID NO: 343370 - DNA, 75 bp, synthetic construct
  source 1..75: mol_type = other DNA
atcgtcaaagagctggcggctatcctcgatgtttcgaacgtagctcttcgtcaggctcgtatcgaacgagacgct

SEQ ID NO: 343371 - DNA, 75 bp, synthetic construct
  source 1..75: mol_type = other DNA
cgggaaggaatcagggtggccagatgtacagtggcgcgcctcatggcggttatgggacttgccggtattctccgg

SEQ ID NO: 343372 - DNA, 75 bp, synthetic construct
  source 1..75: mol_type = other DNA
cgtcagccggaaagccgttgccgcaggcgaccgcgtaaaccgtcagtttgtggcagaacgtcctgaccagttgtg

SEQ ID NO: 343373 - DNA, 75 bp, synthetic construct
  source 1..75: mol_type = other DNA
atggctaagacagcaaatcaattgattaaacaggcgtacgaaatagccaaaactatgccaccagaacaggcagca

SEQ ID NO: 343374 - DNA, 75 bp, synthetic construct
  source 1..75: mol_type = other DNA
caacaaatgaccagaacacggaattgcagcgtaacgcgctggagtgtgcaggatgtgagctgatttttgaggata

SEQ ID NO: 343375 - DNA, 75 bp, synthetic construct
  source 1..75: mol_type = other DNA
ttatgatgttgggatatctacgctttacaaaaaattcccagcgaccagagataagaattccggcacgcatggccg

SEQ ID NO: 343376 - DNA, 75 bp, synthetic construct
  source 1..75: mol_type = other DNA
actgattgttgaacgaacaaaagcaggactggaagctgctcgcgcacagggacgaattggtggacgacgtcccaa

SEQ ID NO: 343377 - DNA, 75 bp, synthetic construct
  source 1..75: mol_type = other DNA
agggcagggctggctgcagctcgtgccaaaggcagagtaggtgggcgtcgtcctaagttgaccaccgaacagtgg

SEQ ID NO: 343378 - DNA, 75 bp, synthetic construct
  source 1..75: mol_type = other DNA
ttttgatgtaggcgtttctaccatttatcgaaaatttcggcaaataagaacaataaatctccctgaatcagcttt

SEQ ID NO: 343379 - DNA, 75 bp, synthetic construct
  source 1..75: mol_type = other DNA
caacaaatgaccagaacaccgcgctgcaaagaaatgcgctggaaagcgcaggatgtgaacaaatatttgaagaca

SEQ ID NO: 343380 - DNA, 75 bp, synthetic construct
  source 1..75: mol_type = other DNA
atgatcatcctgcctacctgccgaagcgaggccaggcctctgacgtacgcggaccgcgcactgaacagcgtccca

SEQ ID NO: 343381 - DNA, 75 bp, synthetic construct
  source 1..75: mol_type = other DNA
gcgaggccaggcctctgacgtacgcggaccgcgcactgaacagcgtcccatgactcatgtggaggccgcgaaagc

SEQ ID NO: 343382 - DNA, 75 bp, synthetic construct
  source 1..75: mol_type = other DNA
aggacaaaatcagtggtactaagtccgacagaccggggcttaaaaaactgctcaggacactatcggcaggtgaca

SEQ ID NO: 343383 - DNA, 75 bp, synthetic construct
  source 1..75: mol_type = other DNA
accgggattaaaacgcgctttaaagcgccttcaacaaggtgacacgctggttgtctggaaactggatcgcctcgg

SEQ ID NO: 343384 - DNA, 75 bp, synthetic construct
  source 1..75: mol_type = other DNA
gcaacgtaatgcactgaactgtgcgggatgtgagcggatttttgaggataaaatcagtggcaccaagtccgacag

SEQ ID NO: 343385 - DNA, 75 bp, synthetic construct
  source 1..75: mol_type = other DNA
ctgatagaagagttgcgtcagcgaggcgtgaatttccgaagcctgactgacagtattgataccagcaccccaatg

SEQ ID NO: 343386 - DNA, 75 bp, synthetic construct
  source 1..75: mol_type = other DNA
gcgggacattatcgaacgcaagctggagccgggtctgaagttccggccggttcacagtctggaagaactcaacgc

SEQ ID NO: 343387 - DNA, 75 bp, synthetic construct
  source 1..75: mol_type = other DNA
ctcctcgccagaaggtggcgattatctatgatgttggtgtgtcaactttgtataagaggtttcctgcaggggata

SEQ ID NO: 343388 - DNA, 75 bp, synthetic construct
  source 1..75: mol_type = other DNA
aaacacgtcagcgcgtggcgctgctttttgatgtgggtatttccacgctgtataagaaatttcccgccagccagc

SEQ ID NO: 343389 - DNA, 75 bp, synthetic construct
  source 1..75: mol_type = other DNA
tgccaccatttgcggcccttaccggcatacgctgcagtaccgcacatatcacggagcaggacaatgcctggctgt

SEQ ID NO: 343390 - DNA, 75 bp, synthetic construct
  source 1..75: mol_type = other DNA
atgctgcccggcctgtggtggcgaactcagttctctgggatgtgatgtgtcagagcagctggagcttatcagcag

SEQ ID NO: 343391 - DNA, 75 bp, synthetic construct
  source 1..75: mol_type = other DNA
gccgcgggtggtgaagggggtgcgcttcagtctgcgactgaccagcggaagcggtcaggacagccgtctggtgac

SEQ ID NO: 343392 - DNA, 75 bp, synthetic construct
  source 1..75: mol_type = other DNA
attattacttttatatccgcagcgtgaacaccgtaggtaaatcggcatttgtggaggccgtcggtcgggcgagcg

SEQ ID NO: 343393 - DNA, 75 bp, synthetic construct
  source 1..75: mol_type = other DNA
atcacgaacacggcacaggtggaaaaatctgcccgttatctggggagcggcagtcagtggactgtccagggaagc

SEQ ID NO: 343394 - DNA, 75 bp, synthetic construct
  source 1..75: mol_type = other DNA
tctgaccggacctcagcagactgcatgccaccatttgcggcccttaccggcatacgctgcagtaccgcacatatc

SEQ ID NO: 343395 - DNA, 75 bp, synthetic construct
  source 1..75: mol_type = other DNA
ataaaattgaatttgacatgtcaatcaaatttcctccagtgtataaacgtttcttaatagaagaaattaaagata

SEQ ID NO: 343396 - DNA, 75 bp, synthetic construct
  source 1..75: mol_type = other DNA
gggtaaatggctggtatcccacagcaagtatcagcgatttgctggttgttgtgatgaagaaagccactgcaggca

SEQ ID NO: 343397 - DNA, 75 bp, synthetic construct
  source 1..75: mol_type = other DNA
gaccgggtgagcagtgaaatctcacagactgtcagccaggggcagtcagaaaatgcccgacagatagcacaggtc

SEQ ID NO: 343398 - DNA, 75 bp, synthetic construct
  source 1..75: mol_type = other DNA
ttgacaacaaatcatctctccaggttgacaggaattcctctctttctttgcaaacaaatggaacagaacaatttt

SEQ ID NO: 343399 - DNA, 75 bp, synthetic construct
  source 1..75: mol_type = other DNA
cacagctttgaccggcagattataatcccgccgataatctatgtcgggtcaaaacaggaatcccgcaccagtaat

SEQ ID NO: 343400 - DNA, 75 bp, synthetic construct
  source 1..75: mol_type = other DNA
gataaacagctatggccagcagggtgaacctgccaccaccacattccggattgccgcaccggcagcaccgtcgcg

SEQ ID NO: 343401 - DNA, 75 bp, synthetic construct
  source 1..75: mol_type = other DNA
ccactgacggacacggacggcaatcccgtgatacacggtgtgaccgcggtctggcacgccggggagcaggagcag

SEQ ID NO: 343402 - DNA, 75 bp, synthetic construct
  source 1..75: mol_type = other DNA
tcactgatccacgagcaatgattgctctgatgcggcagttagcagctttccctcgcgccattgttgtcgccattt

SEQ ID NO: 343403 - DNA, 75 bp, synthetic construct
  source 1..75: mol_type = other DNA
ggcgtttcgtggcgctaaacatgagcgggagaataacgatatttattcgtcatgccgcctgatagtgaagaaaaa

SEQ ID NO: 343404 - DNA, 75 bp, synthetic construct
  source 1..75: mol_type = other DNA
gagggagataactcagggagacggtaaatatcatcgatgtgaacacaaggagaactataaggctgacatcaataa

SEQ ID NO: 343405 - DNA, 75 bp, synthetic construct
  source 1..75: mol_type = other DNA
ggtggccatcagggaccattaccgtcagggtttatgacgatcagccgtttgaccggcagattgttattcctgcgg

SEQ ID NO: 343406 - DNA, 75 bp, synthetic construct
  source 1..75: mol_type = other DNA
gatagctgccagtatcaatatcaggccgggccatgattattatttttacgttcgcagtgtgaacaccgttggcaa

SEQ ID NO: 343407 - DNA, 75 bp, synthetic construct
  source 1..75: mol_type = other DNA
tgcgcagcgtcaacctggtggggaaatctgcgtttgtggaagccagtggccgggcgagcaatgatgcggaagggt

SEQ ID NO: 343408 - DNA, 75 bp, synthetic construct
  source 1..75: mol_type = other DNA
ggtgacatcattgaaatctgtgataacgactatgccggaaccctgaccggcggacgcatcctgtccatcgatgcc

SEQ ID NO: 343409 - DNA, 75 bp, synthetic construct
  source 1..75: mol_type = other DNA
catacgatgcagtaccgcacatatcacggaaaaggacaacgcctggttgtactcgctgtcacaccagaccaatga

SEQ ID NO: 343410 - DNA, 75 bp, synthetic construct
  source 1..75: mol_type = other DNA
ctcgggcacgctcaataatgtcgtgatagcggagaactgcacgataaatggcacgctgaaagcggagaacattat

SEQ ID NO: 343411 - DNA, 75 bp, synthetic construct
  source 1..75: mol_type = other DNA
atgctgatggccagcccctgagcaatattctgctgcaggcggaccgtatcgcgatgattaacccggagaacggca

SEQ ID NO: 343412 - DNA, 75 bp, synthetic construct
  source 1..75: mol_type = other DNA
tgaattctggttttcggaggcaaaaatcgcagacacatctcaggtggaaacctctgcccgttatctggggacagg

SEQ ID NO: 343413 - DNA, 75 bp, synthetic construct
  source 1..75: mol_type = other DNA
gtgaggttaccctgccggagacaggtacatcagcggtgaacctgattaacggcagcggtaagccggtgagtgtgg

SEQ ID NO: 343414 - DNA, 75 bp, synthetic construct
  source 1..75: mol_type = other DNA
cgccttcaacaaggtgacacgctggttgtctggaaactggatcgcctcgggcgaagcatgaaacatctgatttct

SEQ ID NO: 343415 - DNA, 75 bp, synthetic construct
  source 1..75: mol_type = other DNA
ttgtctggaagctggatcggctggggcgtagtatgcggcatcttgtcgtgttggtggaggagttgcgcgaacgag

SEQ ID NO: 343416 - DNA, 75 bp, synthetic construct
  source 1..75: mol_type = other DNA
acattatcggcaggtgatacgctggtggtctggaaactggaccggctggggcgcagtatgcggcatcttgtcgtg

SEQ ID NO: 343417 - DNA, 75 bp, synthetic construct
  source 1..75: mol_type = other DNA
cagcatagatacatcttctccaatgggacgttttttcttccacgtgatgggtgccctggctgaaatggaacgtga

SEQ ID NO: 343418 - DNA, 75 bp, synthetic construct
  source 1..75: mol_type = other DNA
gacagatgctattgataccagcacgccgatggggcgttttttctttcatgtgatgggtgccctggctgaaatgga

SEQ ID NO: 343419 - DNA, 75 bp, synthetic construct
  source 1..75: mol_type = other DNA
ttacggcattggtacatcgacgatttatcgttaccaccccgcaggagaatcaagcggaacaattgagaagagtca

SEQ ID NO: 343420 - DNA, 75 bp, synthetic construct
  source 1..75: mol_type = other DNA
ccatcaccgacgatcagcgtttgcaggtgttactgattggtttctcctttggcgcgttgctggaaggggcggctg

SEQ ID NO: 343421 - DNA, 75 bp, synthetic construct
  source 1..75: mol_type = other DNA
aatggatgcggtgtttaaattcgaccccctctctgctggtggcaccgctatttttattgcggcgattatctcgat

SEQ ID NO: 343422 - DNA, 75 bp, synthetic construct
  source 1..75: mol_type = other DNA
ccgttcttctcaccgttccttggctggctgggggtattccttaccggctcggacacatcctcgaatgccctgttt

SEQ ID NO: 343423 - DNA, 75 bp, synthetic construct
  source 1..75: mol_type = other DNA
gtatgacagaaagcggctggcaattatctatgatattggactgtcaacgatctaccgctatcaccctgttgggac

SEQ ID NO: 343424 - DNA, 75 bp, synthetic construct
  source 1..75: mol_type = other DNA
ggacggttgctggctgcgggggaatctcgtcaacgcgtggcgctgatttttgatattggcctgtccacgctctat

SEQ ID NO: 343425 - DNA, 75 bp, synthetic construct
  source 1..75: mol_type = other DNA
aggataaaatcagcggcacgaagtccgaccgaccgggactgaaaaaactgctcagaacattatcagcaggtgaca

SEQ ID NO: 343426 - DNA, 75 bp, synthetic construct
  source 1..75: mol_type = other DNA
atatcgacgatttatcgttaccaccccgcaggagaatcaagcggaacaatagagaagagtcaggaaacaaaataa

SEQ ID NO: 343427 - DNA, 75 bp, synthetic construct
  source 1..75: mol_type = other DNA
cgtcatagtgacggcactggtaacgaggaaagacctctgcgaggtacgaatccgaaccggccagacggaggtcgc

SEQ ID NO: 343428 - DNA, 75 bp, synthetic construct
  source 1..75: mol_type = other DNA
ggtaacgaggaaagacctttgcgaggtacgaattcgaaccggccagacggaggtcgctgtcttcacagcttacga

SEQ ID NO: 343429 - DNA, 75 bp, synthetic construct
  source 1..75: mol_type = other DNA
gacctctgcgaggtacgaatccgaaccggccagacggaggtcgctgttttcacagtctacgaacctgaggagtaa

SEQ ID NO: 343430 - DNA, 75 bp, synthetic construct
  source 1..75: mol_type = other DNA
aaggatgtcaccattaacggcaagaccacctcgcagttcctggcgtcggtgattctggagaatctgcctgagcgg

SEQ ID NO: 343431 - DNA, 75 bp, synthetic construct
  source 1..75: mol_type = other DNA
ttaatgcacctgcggtacccgccacgattgagctgacaccggggctattttcagataacagcggtcccgcgtctt

SEQ ID NO: 343432 - DNA, 75 bp, synthetic construct
  source 1..75: mol_type = other DNA
ataaaagaggcagacggcagtattcagacattatatgttccttattcgtctgttccggttctccaacgtgctgga

SEQ ID NO: 343433 - DNA, 75 bp, synthetic construct
  source 1..75: mol_type = other DNA
gacctctgtgaggtacggatcagaaccggccagacggaggtcgctgtcttcgtagactacgaatttgagaagtaa

SEQ ID NO: 343434 - DNA, 75 bp, synthetic construct
  source 1..75: mol_type = other DNA
aatctccccttacttatccggaggcaattgcaatatctctgtgaacttacacaggagaagcaggctatgaagcag

SEQ ID NO: 343435 - DNA, 75 bp, synthetic construct
  source 1..75: mol_type = other DNA
cgtacctttgatcatggtatgaagctggatgtcactcgctttaatcctgccagtccattccgccccagagatgcg

SEQ ID NO: 343436 - DNA, 75 bp, synthetic construct
  source 1..75: mol_type = other DNA
aaaaaaagatgacaatcaatgaactaaaaatgtatgtagaaaacgaattattcaagtttcccgatgacatagtta

SEQ ID NO: 343437 - DNA, 75 bp, synthetic construct
  source 1..75: mol_type = other DNA
tctttctattttcagaacttgaaaaaaaccataaaataaagacaagtttttttactatcacgaatgtatctatcg

SEQ ID NO: 343438 - DNA, 75 bp, synthetic construct
  source 1..75: mol_type = other DNA
aaagacctctgcgaggtacgaatccgaaccggccagacggaggtcgctgttttcacggcttacgaatccgagtaa

SEQ ID NO: 343439 - DNA, 75 bp, synthetic construct
  source 1..75: mol_type = other DNA
ttgtattgtgaaattactgacggaaaaagcattacgtacatgatcgccgggttaaacaaagaatatggcgatgtg

SEQ ID NO: 343440 - DNA, 75 bp, synthetic construct
  source 1..75: mol_type = other DNA
gcgacgatattaatcaccgaagcattctgggatctgaaagagcgcccgaacatcgatgttcagcgtgtcacgttt

SEQ ID NO: 343441 - DNA, 75 bp, synthetic construct
  source 1..75: mol_type = other DNA
gcgcgtcctctgcttggctttaccggtgaggatgtgcagatgattgaagagattatcctggctcacctgaatcgt

SEQ ID NO: 343442 - DNA, 75 bp, synthetic construct
  source 1..75: mol_type = other DNA
cgtgagttatttggttttgacaaggaatctatacaattgatagaaagggagttattagtgattctatcgaaagat

SEQ ID NO: 343443 - DNA, 75 bp, synthetic construct
  source 1..75: mol_type = other DNA
atgaatgagtttaagcgttttgaagaccggctgaccggactgactgaatcgttgtcaccgtcagggcgtcggaga

SEQ ID NO: 343444 - DNA, 75 bp, synthetic construct
  source 1..75: mol_type = other DNA
cgaccaggaatgacacaggagcaggcgacgatattaatcactgaagcattctgggctttgaaagagcgcccgaac

SEQ ID NO: 343445 - DNA, 75 bp, synthetic construct
  source 1..75: mol_type = other DNA
tagcaaataataactttaaagccaacgaactttctggttctgggcttgggatatctccttataaaactgtttttg

SEQ ID NO: 343446 - DNA, 75 bp, synthetic construct
  source 1..75: mol_type = other DNA
gcctcgttcgccgacgaagcgcagcaacaccgctccattgccgagcaactggcgcaccaggcgaatttagttaac

SEQ ID NO: 343447 - DNA, 75 bp, synthetic construct
  source 1..75: mol_type = other DNA
tgtttggtggagatcttacccgtcgttacgggcaaaaggtgcataaactgacgctgcacggtggttttagctgtc

SEQ ID NO: 343448 - DNA, 75 bp, synthetic construct
  source 1..75: mol_type = other DNA
atgaaaatcactcctgaacaggtttgcgaggctctggatgcctgggtatgcaaaccaggaatgacacaggagcag

SEQ ID NO: 343449 - DNA, 75 bp, synthetic construct
  source 1..75: mol_type = other DNA
aagcacttgctgtaagcatactaatgtatagttgcagactctggattgacaataataaaccaaaatctatattat

SEQ ID NO: 343450 - DNA, 75 bp, synthetic construct
  source 1..75: mol_type = other DNA
accagggataagcgtgaaaagttcacggcgctagtgcctgcgattatggaggctatccggattagtgatttcagg

SEQ ID NO: 343451 - DNA, 75 bp, synthetic construct
  source 1..75: mol_type = other DNA
ggttgagtttaccggcaaggtgcagcgcatggcgcgggtgcatcagtacggcctcaaagaccggccaaaccgtca

SEQ ID NO: 343452 - DNA, 75 bp, synthetic construct
  source 1..75: mol_type = other DNA
caacaaaccccagcgctcgctgaacgaagaagatatgcttgaagccataataaagcttcaggggagctctgaggc

SEQ ID NO: 343453 - DNA, 75 bp, synthetic construct
  source 1..75: mol_type = other DNA
ggtcaagcttccggctgctttcaggaaaggcacgtatacattttctaatgttgaagtgcttgatttggggcatac

SEQ ID NO: 343454 - DNA, 75 bp, synthetic construct
  source 1..75: mol_type = other DNA
acgatatcaatcgacaagacatttgatatatcaagtattaccagagactggatagagttaggtgagtttccgtat

SEQ ID NO: 343455 - DNA, 75 bp, synthetic construct
  source 1..75: mol_type = other DNA
actgctggcagccattccaagtatcgtttacggcatgtgggggctgtttatttttgcaccgctgtttgccgtcta

SEQ ID NO: 343456 - DNA, 75 bp, synthetic construct
  source 1..75: mol_type = other DNA
tatcggtatcctcgcggcaggcgtgatcctcgccatcatgatcattccgtacattgcggcggtaatgcgcgatgt

SEQ ID NO: 343457 - DNA, 75 bp, synthetic construct
  source 1..75: mol_type = other DNA
gcggaagcggaatccggtctgcacgttgccgcactgatggaactgggcctgatcctgtttgtgattaccttcatc

SEQ ID NO: 343458 - DNA, 75 bp, synthetic construct
  source 1..75: mol_type = other DNA
tcaaatcggatggcactgtgcaaacggctctcgaaaaccttggtattaaaaacgcatcaacaacacaggtgggtt

SEQ ID NO: 343459 - DNA, 75 bp, synthetic construct
  source 1..75: mol_type = other DNA
caagcgattggatgtcgattatctatataaactggctgaatcatttggaaaagcaacggcatcaatgaaaaacaa

SEQ ID NO: 343460 - DNA, 75 bp, synthetic construct
  source 1..75: mol_type = other DNA
cgttaagcgaaaaatgtttgcgaaacttatcaccagtcgttttttgcatatccgcgccagccctgaacaggcatc

SEQ ID NO: 343461 - DNA, 75 bp, synthetic construct
  source 1..75: mol_type = other DNA
ctgggtaaggtaaacaatgccctttcaatcagttcagcaaggtccaaagcgttaacagcttccatgatgaaataa

SEQ ID NO: 343462 - DNA, 75 bp, synthetic construct
  source 1..75: mol_type = other DNA
aagccgctgccgcacttggcgtcgatccactgtatgtcgctctgccaagctatgttgtcatcatgggcggcggcg

SEQ ID NO: 343463 - DNA, 75 bp, synthetic construct
  source 1..75: mol_type = other DNA
tgtcgtatacaccaacagccagtctttcgccatatttgtaagcgtcaatgcggtgctgtctgacggtagttcatt

SEQ ID NO: 343464 - DNA, 75 bp, synthetic construct
  source 1..75: mol_type = other DNA
acatggcgtacagggatcggcgctggaacgtccgtggatacctccaacggagtgggtcgttgaggggaattccgc

SEQ ID NO: 343465 - DNA, 75 bp, synthetic construct
  source 1..75: mol_type = other DNA
agaaaattactcaggcagaagccgctggtgaaacgtatatcaccacaccatggaatgacagccaattaccgttgg

SEQ ID NO: 343466 - DNA, 75 bp, synthetic construct
  source 1..75: mol_type = other DNA
cattacgtctgcgtaaagcaacagttgccgataccgcagttatcgaaattgaacctcatttcgaggaccagcctg

SEQ ID NO: 343467 - DNA, 75 bp, synthetic construct
  source 1..75: mol_type = other DNA
tccctacacctggattggtgaagaggcgagccaggtgctcgatcctgacgtttacgagcagaatttacaggacgc

SEQ ID NO: 343468 - DNA, 75 bp, synthetic construct
  source 1..75: mol_type = other DNA
atatcatgtggatgatacatatgtagcggacaaatatgcattatctagtttttttcaacgaatacctggagtgat

SEQ ID NO: 343469 - DNA, 75 bp, synthetic construct
  source 1..75: mol_type = other DNA
catgtggatgatacatatgtagcggacaaatatgcattatctagtttttttcaacgaatacctggagtgatatat

SEQ ID NO: 343470 - DNA, 75 bp, synthetic construct
  source 1..75: mol_type = other DNA
tgacgggtaaccgtcagcagatagaacgccatcttaggaatcagtatcaggttgaggaaaacggactcagctttc

SEQ ID NO: 343471 - DNA, 75 bp, synthetic construct
  source 1..75: mol_type = other DNA
accgacacggcgggcttcaccgatcacgtcttcgccctgatgcacctcttgggcttccgcttcgcgccgcgcatc

SEQ ID NO: 343472 - DNA, 75 bp, synthetic construct
  source 1..75: mol_type = other DNA
attgtgcaagcgggagccaatattcaggatggctgcattatgcatggctacagcgatactgacaccattgtcggg

SEQ ID NO: 343473 - DNA, 75 bp, synthetic construct
  source 1..75: mol_type = other DNA
gacacggccggcttcaccgatcacgtctttgccctgatgcacctgctaggcttccgcttcgcgccgcgcatccgc

SEQ ID NO: 343474 - DNA, 75 bp, synthetic construct
  source 1..75: mol_type = other DNA
atcgtgctgtggaacacggtctacctggagcgtgcggcgcatgcgttgcgcgcgcaatggtcatgccgtcgatga

SEQ ID NO: 343475 - DNA, 75 bp, synthetic construct
  source 1..75: mol_type = other DNA
cggcctcaacctggtgacggcggctatcgtgctgtggaacacggtgtacctggaacgcgccacccaggggttggt

SEQ ID NO: 343476 - DNA, 75 bp, synthetic construct
  source 1..75: mol_type = other DNA
tgcagcaaaaaaactgatagattattttaccttcaattcaaaatcacatgatcttaatgattgcccatttattcc

SEQ ID NO: 343477 - DNA, 75 bp, synthetic construct
  source 1..75: mol_type = other DNA
gccggacagggcgttaatcttggtgccaaaaagcttcgtcaggcagctattgagagagcaaagaaaatgtatggt

SEQ ID NO: 343478 - DNA, 75 bp, synthetic construct
  source 1..75: mol_type = other DNA
tgggaggttaccccgcatgaaattcgcccagacatttaccctaatccgaccgacggtttacctgtcgagtgtcag

SEQ ID NO: 343479 - DNA, 75 bp, synthetic construct
  source 1..75: mol_type = other DNA
cttaatgcctgcattaatagcaaatagctcagtgactcgctctctaatgtcattatttggttccaaaagaatttc

SEQ ID NO: 343480 - DNA, 75 bp, synthetic construct
  source 1..75: mol_type = other DNA
aactgggagacgctcataaccgcaagcagggaacacctattaacagcaataccctgttgcttaactttaaagcct

SEQ ID NO: 343481 - DNA, 75 bp, synthetic construct
  source 1..75: mol_type = other DNA
atgtgcaggcgactcccgatgctctggcacagaaaagtgtgacgccgggcagttatgcatccacagcaaattttg

SEQ ID NO: 343482 - DNA, 75 bp, synthetic construct
  source 1..75: mol_type = other DNA
aagcgggaatgacgttccttaatggcattctgacaatctcgatagctaacgcagatgaattaaatctgatatcaa

SEQ ID NO: 343483 - DNA, 75 bp, synthetic construct
  source 1..75: mol_type = other DNA
aactaaaatatcttttatgcactatgttttttggatttttataattacattaatttactcgttaaatgctaagaa

SEQ ID NO: 343484 - DNA, 75 bp, synthetic construct
  source 1..75: mol_type = other DNA
taatagcgatttttttttcctctttggttaaccatgggaatgcgaaattcataccagttttattaataattttat

SEQ ID NO: 343485 - DNA, 75 bp, synthetic construct
  source 1..75: mol_type = other DNA
gatctgatgccaggttccacgctgagttctggcgaagatatcgtaaccattacgtctgcgcagggagtgaacctg

SEQ ID NO: 343486 - DNA, 75 bp, synthetic construct
  source 1..75: mol_type = other DNA
atccggcatcgaaggaaaaatttaatggtcgggccgttgggcaaggtcaatacgtaaaccgcctttgggcattta

SEQ ID NO: 343487 - DNA, 75 bp, synthetic construct
  source 1..75: mol_type = other DNA
acacgtatttagtagtggcggatttgcttgagtatatgtcaaataccaaaacctctgtatctaagcctgatatca

SEQ ID NO: 343488 - DNA, 75 bp, synthetic construct
  source 1..75: mol_type = other DNA
gatgacgacggtattctggggaaaatgagcggcccaaagccggttaaatccgtctctatctctccggattctccg

SEQ ID NO: 343489 - DNA, 75 bp, synthetic construct
  source 1..75: mol_type = other DNA
cgctgtatgccgatccagatgctgattttgacaaactggctgctgagcagggccgtctggaagaaatcattcagg

SEQ ID NO: 343490 - DNA, 75 bp, synthetic construct
  source 1..75: mol_type = other DNA
aaagatcagcgcctggcgcaggaagcttcacaagaagctgcgcgtcgtaagtcgattgagaaagagctggagtgg

SEQ ID NO: 343491 - DNA, 75 bp, synthetic construct
  source 1..75: mol_type = other DNA
gtatatggaactggtgatctctgcacagctccatgggagcttatcattaaggcttatagaaaggatttaggctct

SEQ ID NO: 343492 - DNA, 75 bp, synthetic construct
  source 1..75: mol_type = other DNA
gcttacatattgccaaaaaactgcttccgtatatcccgaataacgcggggatcctgctggtaccatgctgtcgtg

SEQ ID NO: 343493 - DNA, 75 bp, synthetic construct
  source 1..75: mol_type = other DNA
gagcttctcgatcccgaaaggggcgatcgtcgggatcatcggtccgaacggcgcgggtaaatcaaccctgttccg

SEQ ID NO: 343494 - DNA, 75 bp, synthetic construct
  source 1..75: mol_type = other DNA
tctggcagtgggactaaatgcactgacgctgacggatattaccaaaaatgcaacgtatggcgttgagatagaaag

SEQ ID NO: 343495 - DNA, 75 bp, synthetic construct
  source 1..75: mol_type = other DNA
cacattgttcctgtgcgtaattgccatgtcgcaccagcctctttaccgctaaaagtgttggcctttgccgaaccg

SEQ ID NO: 343496 - DNA, 75 bp, synthetic construct
  source 1..75: mol_type = other DNA
acaatctccctgctgccggcagccggagaggctgctgcgcagggctggagcattaaggatggcggaattcagttg

SEQ ID NO: 343497 - DNA, 75 bp, synthetic construct
  source 1..75: mol_type = other DNA
accaacgaactgtttattccacctggaccgcgtctgggcgataaagtgctggaagtcagcaacctgcgtaaatcc

SEQ ID NO: 343498 - DNA, 75 bp, synthetic construct
  source 1..75: mol_type = other DNA
ctgcgtctgccggactgggacgcgaaaatcgctaacctctccggtggtgagcgtcgtcgcgtggcgttgtgccgc

SEQ ID NO: 343499 - DNA, 75 bp, synthetic construct
  source 1..75: mol_type = other DNA
attatggcgggcattgataaagacatcgaaggcgaagcgcgtccgcaaccggatatcaagattggttatctgccg

SEQ ID NO: 343500 - DNA, 75 bp, synthetic construct
  source 1..75: mol_type = other DNA
ggcgcactgacaacaatcagttcgggctggggatttatctgtatacggatgctcccgttcctgatggtgtggcga

SEQ ID NO: 343501 - DNA, 75 bp, synthetic construct
  source 1..75: mol_type = other DNA
tctccactggtggcggcgcattccttgaattcgtagaaggtaaagtactgcctgcagtagcgatgctcgaagagc

SEQ ID NO: 343502 - DNA, 75 bp, synthetic construct
  source 1..75: mol_type = other DNA
tcagggtggcgtcgccgtcagaccttgcgaaacgaataactcaaaaactgaaggaagggtggcagccttatggta

SEQ ID NO: 343503 - DNA, 75 bp, synthetic construct
  source 1..75: mol_type = other DNA
ttacgcccagcagccagcagcatttcttgcaatggtacagcagttccgtgctgaccttgccgggctggcggcgca

SEQ ID NO: 343504 - DNA, 75 bp, synthetic construct
  source 1..75: mol_type = other DNA
caggcggtcgttatgacggtcttgtggaacaactgggcggtcgcgccacaccggcagtcggttttgcgatgggcc

SEQ ID NO: 343505 - DNA, 75 bp, synthetic construct
  source 1..75: mol_type = other DNA
attctaaaaatccggaagtgcaggcgttactcaacgacgctccggcgttgggcgattatctggatgaagagtctc

SEQ ID NO: 343506 - DNA, 75 bp, synthetic construct
  source 1..75: mol_type = other DNA
accagctgatcgttggtggtggtattgctaacacctttatcgcggcacaaggccacgatgtgggtaaatccctgt

SEQ ID NO: 343507 - DNA, 75 bp, synthetic construct
  source 1..75: mol_type = other DNA
acgtgttcgtaatggatgcattcggtactgctcaccgcgctcaggcttctacgcacggtatcggtaaatttgctg

SEQ ID NO: 343508 - DNA, 75 bp, synthetic construct
  source 1..75: mol_type = other DNA
ctgctgcgcagggctggagcattaaggatggcggaattcagttgtcagatggtgtatttaagatcaccaagcaga

SEQ ID NO: 343509 - DNA, 75 bp, synthetic construct
  source 1..75: mol_type = other DNA
cgactggcagacgctggagctggtgttcaccgccggcagtgccacggttactccgaaactgaatggagtggctgg

SEQ ID NO: 343510 - DNA, 75 bp, synthetic construct
  source 1..75: mol_type = other DNA
ttgcggccatgctgaaacagtttcgtgcggacattaccgagtttaacacgcagtgtcatggaggcagagcggcaa

SEQ ID NO: 343511 - DNA, 75 bp, synthetic construct
  source 1..75: mol_type = other DNA
ctggactccctgtctaaaatcgctgaccagctgattgttggtggtggtattgctaacacctttatcgcggcacaa

SEQ ID NO: 343512 - DNA, 75 bp, synthetic construct
  source 1..75: mol_type = other DNA
gacgtgaaagctgacgagcagatcctggatatcggtgatgcttccgctcaggaactggctgaaatcctgaagaat

SEQ ID NO: 343513 - DNA, 75 bp, synthetic construct
  source 1..75: mol_type = other DNA
ctgctgcgcagggctggagcagttaaggatggcggaattcagttgtcagatggtgtatttaagatcaccaagcag

SEQ ID NO: 343514 - DNA, 75 bp, synthetic construct
  source 1..75: mol_type = other DNA
ttgcgctgcttaagcacaacggtgatagccgtgcggaaaatcaccgtgaaagctttgagacctgcccggactgta

SEQ ID NO: 343515 - DNA, 75 bp, synthetic construct
  source 1..75: mol_type = other DNA
gtcgcaagagtacgaactggcggtgtggaagaaagaagatttcctgcaacagtctcgcttcgcgctgtgcaactg

SEQ ID NO: 343516 - DNA, 75 bp, synthetic construct
  source 1..75: mol_type = other DNA
agtcccgcttcgcgctgtgcaactgccgggtctgcaatcgtcctttcgccgtccagaaagagatcgactacgcca

SEQ ID NO: 343517 - DNA, 75 bp, synthetic construct
  source 1..75: mol_type = other DNA
gccaacgcgtctgttaccgggaatgaatcaactgtaccgatgcagttgcgtatcaccggtcgcgtggaaatgcca

SEQ ID NO: 343518 - DNA, 75 bp, synthetic construct
  source 1..75: mol_type = other DNA
acgctccagttattcttcatcgcgaccagcatcaccggttggatccactggctgaaaggtcagggtggcgatgtc

SEQ ID NO: 343519 - DNA, 75 bp, synthetic construct
  source 1..75: mol_type = other DNA
taaccaatgctggtgatagccataccctgcagcagccaattcctttagattatgcattagttaaatattgcaaag

SEQ ID NO: 343520 - DNA, 75 bp, synthetic construct
  source 1..75: mol_type = other DNA
atcttgctaccgctcaacatcttattattggtgaaaaacacgataatgccgagcatcatcagattgagctttggc

SEQ ID NO: 343521 - DNA, 75 bp, synthetic construct
  source 1..75: mol_type = other DNA
cgactcaggggataaaaatggccgctatgtttcataatcaaaagcaaacagtaattgattatgtctggaacaaag

SEQ ID NO: 343522 - DNA, 75 bp, synthetic construct
  source 1..75: mol_type = other DNA
tggttccccatggctggagcgtggatattcctgcaatgttgctggcagctcagggggaaaaaatggccgccatgt

SEQ ID NO: 343523 - DNA, 75 bp, synthetic construct
  source 1..75: mol_type = other DNA
tgctacaaccagtaatgtgaggctttcaatcagtcaaatcgaagaactagtaaccaatgctggtgatagccatgc

SEQ ID NO: 343524 - DNA, 75 bp, synthetic construct
  source 1..75: mol_type = other DNA
attcaccggtggcgtcgtgtgacctctgagccatacggcccctatccttggcattatggtgattttatcggcttc

SEQ ID NO: 343525 - DNA, 75 bp, synthetic construct
  source 1..75: mol_type = other DNA
tgttgattgcaggtggttatcacgcgtcaaaaagcatgggcgtaccgttacacatggaagatcttgccaccggca

SEQ ID NO: 343526 - DNA, 75 bp, synthetic construct
  source 1..75: mol_type = other DNA
gcgactgccgctgatctcaacaagcgttttgactccctgcagggggaagtggaactactgagtaaggcgcgaacc

SEQ ID NO: 343527 - DNA, 75 bp, synthetic construct
  source 1..75: mol_type = other DNA
gtcgcaagagtacgaactggcggtgtggaagaaagaagacttcctgcaaaagtcccgtttcgcgctgtgtaactg

SEQ ID NO: 343528 - DNA, 75 bp, synthetic construct
  source 1..75: mol_type = other DNA
atcttctgtggacgctgcgaagaagtctgcccgacggcggcaatcaaactgtcgcaagagtacgaactggcggtg

SEQ ID NO: 343529 - DNA, 75 bp, synthetic construct
  source 1..75: mol_type = other DNA
tttgcccgacggcggcgattaagctgtcgcaagagtacgaactggcggtgtggaagaaagaagacttcctgcaac

SEQ ID NO: 343530 - DNA, 75 bp, synthetic construct
  source 1..75: mol_type = other DNA
ctgacctttccggatttaacgcgcagtgccatggcggcagtgctgcagttgtaccgtggatttgtggtgacacga

SEQ ID NO: 343531 - DNA, 75 bp, synthetic construct
  source 1..75: mol_type = other DNA
cagtatgaccgcgattacacctggaacgacaacggcgaactcatccgcatcagcagcccgcgccagacccggagt

SEQ ID NO: 343532 - DNA, 75 bp, synthetic construct
  source 1..75: mol_type = other DNA
aaagatggcaataaactggatctgtacggcaagatggttggtgagcgcattctgaccgaccgtgaaaatggttaa

SEQ ID NO: 343533 - DNA, 75 bp, synthetic construct
  source 1..75: mol_type = other DNA
gtccggtggccatcacgccctataccctgatgcaggccattgcggcggaaggtgatgtcaccacaccggtggtgg

SEQ ID NO: 343534 - DNA, 75 bp, synthetic construct
  source 1..75: mol_type = other DNA
acagactgtcacatagctatgctgtaagaccaatgagcagagttcaattgttcaactatgggcgggctatgtatc

SEQ ID NO: 343535 - DNA, 75 bp, synthetic construct
  source 1..75: mol_type = other DNA
agaacaaacagtttatgtggctgggtgtcatcgccgtatctgctgtcgccattatcggtggcggtatgtatctct

SEQ ID NO: 343536 - DNA, 75 bp, synthetic construct
  source 1..75: mol_type = other DNA
ccgtcaaacgccttaacggttgaaactgacctcgccacaggagagcttgcctgggagtttaatctcgggcgctgc

SEQ ID NO: 343537 - DNA, 75 bp, synthetic construct
  source 1..75: mol_type = other DNA
atcttctgtggacgctgcgaagaagtctgtccgacggcggcgattaagctgtcgcaagagtacgaactggcggtg

SEQ ID NO: 343538 - DNA, 75 bp, synthetic construct
  source 1..75: mol_type = other DNA
ggagtttattgcagtactggaaaacgcttactttcggggaacacatcaggagttggctattttactggctgatga

SEQ ID NO: 343539 - DNA, 75 bp, synthetic construct
  source 1..75: mol_type = other DNA
tctttaggtaaacctgtgttggttatgcgggacaccacagagcgtccagaagctattgtggctggcacagttaaa

SEQ ID NO: 343540 - DNA, 75 bp, synthetic construct
  source 1..75: mol_type = other DNA
tgagtaaagctcataatccttatggagatggctatgcctgcaaaaggattctgaatggtttgatgaatttgaatg

SEQ ID NO: 343541 - DNA, 75 bp, synthetic construct
  source 1..75: mol_type = other DNA
gccgtgatctctggaacggtgaagctaattgggactgatgtggaaaaaatcacccggaatataaatattttactc

SEQ ID NO: 343542 - DNA, 75 bp, synthetic construct
  source 1..75: mol_type = other DNA
gatcggtgagtcgaacggtacgccatcgcagacaacggagcccgaatatctggacggcatgagcgaacccatcgg

SEQ ID NO: 343543 - DNA, 75 bp, synthetic construct
  source 1..75: mol_type = other DNA
atcccatgccaaaaactaaggcaaacaatgagccttatcgcaaggtaaaaataacgatatgggatgatcccaaat

SEQ ID NO: 343544 - DNA, 75 bp, synthetic construct
  source 1..75: mol_type = other DNA
aattactgttactgggaatactgttattgatgccctacatatggtaaaagacaaaatagataaaaatttaagtct

SEQ ID NO: 343545 - DNA, 75 bp, synthetic construct
  source 1..75: mol_type = other DNA
attcgtgacccggtgtgtttgctccaatgggacagaactccggatgaggctgaacaaactacgcaggacaacaac

SEQ ID NO: 343546 - DNA, 75 bp, synthetic construct
  source 1..75: mol_type = other DNA
gcaatacacccgtggtaaccagacccgtgctgctctgatgatgggcatcaaccgtggtacgctgcgtaaaaaatt

SEQ ID NO: 343547 - DNA, 75 bp, synthetic construct
  source 1..75: mol_type = other DNA
ccgtccgcttgatgatatcgatctgatgtttggcttaaccgggcaaggtgccacctataccatcctgagtgaccg

SEQ ID NO: 343548 - DNA, 75 bp, synthetic construct
  source 1..75: mol_type = other DNA
gacaagggtgcagaagcctcgcatagtctacgctcccgcgtttggcagtatgtgtggccgggcttcgcaatgcag

SEQ ID NO: 343549 - DNA, 75 bp, synthetic construct
  source 1..75: mol_type = other DNA
ggttcttcacgctgcctgatggctcgattgtggagggtgataccgctgagtacgtgccttcggacaatgacctca

SEQ ID NO: 343550 - DNA, 75 bp, synthetic construct
  source 1..75: mol_type = other DNA
ccaacatgacttcggtgcatcagggggacgtttgagtatccctgtcaaaccggctatccctgatgtggtcggttc

SEQ ID NO: 343551 - DNA, 75 bp, synthetic construct
  source 1..75: mol_type = other DNA
ccgccggtgaattcagcggcgaaatcaccggcgtgacggatggtgccgggcgtcacttccggctggtactgacca

SEQ ID NO: 343552 - DNA, 75 bp, synthetic construct
  source 1..75: mol_type = other DNA
cctgccggaaaaaatcaggaaatgccctgtttattttcctgatgacagaacaaacagaaacaacggagataaaaa

SEQ ID NO: 343553 - DNA, 75 bp, synthetic construct
  source 1..75: mol_type = other DNA
attgatgtatgtctcactggccgcgatcaccgggaaatatccgatgatgtggcccggaaaaatgaaatgtgtccg

SEQ ID NO: 343554 - DNA, 75 bp, synthetic construct
  source 1..75: mol_type = other DNA
gcacttatgtatatgtcgtttgcggcaggcaccgggaaatatccggtgcgacccggaaaaatgaaatgtgtccgt

SEQ ID NO: 343555 - DNA, 75 bp, synthetic construct
  source 1..75: mol_type = other DNA
atgctgcacacattacatcgttcaccctggctgacggactttgctgcgctgctgcgtctgctcagtgaaggtgac

SEQ ID NO: 343556 - DNA, 75 bp, synthetic construct
  source 1..75: mol_type = other DNA
aggaagttcttgcagaagacacttccctgccgggaaaaatcagggaatgccatgtttatttccctgatgacagaa

SEQ ID NO: 343557 - DNA, 75 bp, synthetic construct
  source 1..75: mol_type = other DNA
aagacaaacagcccctgccgggcagtttcctgtaagagaatgtctgccttctctgcatgatcttcctggaggaga

SEQ ID NO: 343558 - DNA, 75 bp, synthetic construct
  source 1..75: mol_type = other DNA
tggtcaaatttcgaacgacatcattcccattgactatactgatttcgtcagacttacggttaagcactccagcca

SEQ ID NO: 343559 - DNA, 75 bp, synthetic construct
  source 1..75: mol_type = other DNA
atcgctgcctgtacgttttatcccgatcctggccaccctattcatcaactggccgatcagcaaaaagcgcggcct

SEQ ID NO: 343560 - DNA, 75 bp, synthetic construct
  source 1..75: mol_type = other DNA
atggccgcattaccatacatgcaactgtacatcgctgattacctggctgacaccatgcatttatcagcagaggag

SEQ ID NO: 343561 - DNA, 75 bp, synthetic construct
  source 1..75: mol_type = other DNA
ctggccagaactcgacaagaaaatgaatttttttattctaatatgaatataccatatcgtgtggctgttattcat

SEQ ID NO: 343562 - DNA, 75 bp, synthetic construct
  source 1..75: mol_type = other DNA
cgcttccctgccgggaaaaatcaggaaatgccctgtttatcttcctgatgacagaacaaacagaaacaacggaga

SEQ ID NO: 343563 - DNA, 75 bp, synthetic construct
  source 1..75: mol_type = other DNA
atatccgcttacagctgcgcgataacacactgatactcagtgataacggcggcagaagcctgtattttgagcacc

SEQ ID NO: 343564 - DNA, 75 bp, synthetic construct
  source 1..75: mol_type = other DNA
atgttatctcgatgcgcaaaaggtatcggaggcgagatggtttgaaaataataaagagtatgaaaaatccatcaa

SEQ ID NO: 343565 - DNA, 75 bp, synthetic construct
  source 1..75: mol_type = other DNA
tatatgaaatgcgggggcaaaatactggcaatgctaaagcaagaaaaggtgctaaggcgtggagagaagtgacag

SEQ ID NO: 343566 - DNA, 75 bp, synthetic construct
  source 1..75: mol_type = other DNA
ttgccacaggtggcctgaataaactcactgataccggtatgcgtatttccggtgcgcgggcaaaccgtggcaacg

SEQ ID NO: 343567 - DNA, 75 bp, synthetic construct
  source 1..75: mol_type = other DNA
tgcaacaggcagcacagcgcactcttacagcccgagaaatacagaatatcgaagaccgcatttaccgcaatatgc

SEQ ID NO: 343568 - DNA, 75 bp, synthetic construct
  source 1..75: mol_type = other DNA
tatgctcatagtctggaatcgattattcctggatttgcagaagaggcgcctgtggagcggctggttgttcgagaa

SEQ ID NO: 343569 - DNA, 75 bp, synthetic construct
  source 1..75: mol_type = other DNA
cgaagaagttgacatggctgtgataactccgggcgcgcgtgagcagatggttaccggttcaggtattcagcgcgg

SEQ ID NO: 343570 - DNA, 75 bp, synthetic construct
  source 1..75: mol_type = other DNA
agcggcgcgctggcgtcgatgcttggcccggtagctggtctggttgatgacgtagtgaagattgctcagggcata

SEQ ID NO: 343571 - DNA, 75 bp, synthetic construct
  source 1..75: mol_type = other DNA
tgggattcaacaaggaagattttcatgaaaatggaaagctgtatgctctggggaaatatacaggaactatacgga

SEQ ID NO: 343572 - DNA, 75 bp, synthetic construct
  source 1..75: mol_type = other DNA
gtcaggggggcattatcgttgcttcggacagcactggaggttaaagtaaatagaaaaaatataaagtatggctcg

SEQ ID NO: 343573 - DNA, 75 bp, synthetic construct
  source 1..75: mol_type = other DNA
agcgatcgcattgatgcgcaggtcgcgcgctacaaagaacaatttacccaactggacgttttaatgacctcgtta

SEQ ID NO: 343574 - DNA, 75 bp, synthetic construct
  source 1..75: mol_type = other DNA
tccagcaggcggcgcagcgcacgttaacggcgcgagaaatacagaacattgaagaccgcatttatcgaaatatgc

SEQ ID NO: 343575 - DNA, 75 bp, synthetic construct
  source 1..75: mol_type = other DNA
acgttgtccgcagtgccagaatcagaacttactggaatccaatgcgccggtggcagtcagtatgcgccatcaggt

SEQ ID NO: 343576 - DNA, 75 bp, synthetic construct
  source 1..75: mol_type = other DNA
tgctgttatttacctgttttgcgcgcgctcaggttgtagacacctggcaattcgccaatccgcaacaacagcaac

SEQ ID NO: 343577 - DNA, 75 bp, synthetic construct
  source 1..75: mol_type = other DNA
ttaccgatggtggcgttgtcactcgcctatatcgccagtatcgcgcgtattacccgtggttcaatgattgaagtt

SEQ ID NO: 343578 - DNA, 75 bp, synthetic construct
  source 1..75: mol_type = other DNA
agggtggggtaggtaaaagtacactggcggtatctatagctgcgtatctgatgtcactaggcaatagagtgatta

SEQ ID NO: 343579 - DNA, 75 bp, synthetic construct
  source 1..75: mol_type = other DNA
aaattacccaagacggtcgtaaagagccgctggaaatcaagctcaataaagatcagacgtcattggatgagatca

SEQ ID NO: 343580 - DNA, 75 bp, synthetic construct
  source 1..75: mol_type = other DNA
gcaaagccattaacgatgccgatagtggaatttccgctagtatcgttaaagtcaaagatggtgactatcaattgg

SEQ ID NO: 343581 - DNA, 75 bp, synthetic construct
  source 1..75: mol_type = other DNA
cgctgatgcttacctggtggtggcaggccagtcgccttaatttaccccgccagcaaaaagcaacgatgcaggaaa

SEQ ID NO: 343582 - DNA, 75 bp, synthetic construct
  source 1..75: mol_type = other DNA
ccggtggcgcgagaacttaacctgaccaacgagcaagcgcaaaagctggttgatgcttatccgaagattctggca

SEQ ID NO: 343583 - DNA, 75 bp, synthetic construct
  source 1..75: mol_type = other DNA
gcgtcagaaccgtcagcgcctgcaggtgataaccctgctccagttggtgatccatcacaacaggaaggtgataag

SEQ ID NO: 343584 - DNA, 75 bp, synthetic construct
  source 1..75: mol_type = other DNA
ctactgctggaaaaaccggacatgttactgctcgacgaaccaaccaaccacttggacgcagagtccgttgcctgg

SEQ ID NO: 343585 - DNA, 75 bp, synthetic construct
  source 1..75: mol_type = other DNA
gcaacgtctgcaaacgctgaaactggtgcgcgagatgcgcgccgacgtgtcggagctggtagaaatgctgcttgc

SEQ ID NO: 343586 - DNA, 75 bp, synthetic construct
  source 1..75: mol_type = other DNA
gcgaaatatcacctaaatgattcgatcatgacgcagtatttcagttatctgaaacaactggcgcatggcgatttt

SEQ ID NO: 343587 - DNA, 75 bp, synthetic construct
  source 1..75: mol_type = other DNA
tacgacgtggtggaaatggtactggcagaccaggaaggctgggaccggtatgaggcagcgaaatggctgaccatg

SEQ ID NO: 343588 - DNA, 75 bp, synthetic construct
  source 1..75: mol_type = other DNA
ttgttttatcggtgttatttatgtcaggacaaacagattttatgccaacccatcgttggcaatacttggcttcag

SEQ ID NO: 343589 - DNA, 75 bp, synthetic construct
  source 1..75: mol_type = other DNA
tggattttatttctatctgtttcaataatgtcctttgattgggtttttattgaaagattggttagatttatttta

SEQ ID NO: 343590 - DNA, 75 bp, synthetic construct
  source 1..75: mol_type = other DNA
tataaagacaaaaatataaatactgaagaagaaagactaaaagggaactttgaagaagaatctcttaagaaggga

SEQ ID NO: 343591 - DNA, 75 bp, synthetic construct
  source 1..75: mol_type = other DNA
gaatttggttacatgtaatactgaatataaagacaaaaatataaatactgaagaagaaagactaaaagggaactt

SEQ ID NO: 343592 - DNA, 75 bp, synthetic construct
  source 1..75: mol_type = other DNA
accgaatggctgaaagataacccgaaactggcggcagtgggcgataaagtgaccgataaagattacttcggtact

SEQ ID NO: 343593 - DNA, 75 bp, synthetic construct
  source 1..75: mol_type = other DNA
gaggcgcgcaatgcgctggccagggcagtgtttttcaaccgcctgggtgaaatccgcgaccgcagtttcgagcag

SEQ ID NO: 343594 - DNA, 75 bp, synthetic construct
  source 1..75: mol_type = other DNA
aagctctacatcccgaagggcgacgccgcctatgacgcgctgaaacccatgatcggcggcacgctcaacatcaag

SEQ ID NO: 343595 - DNA, 75 bp, synthetic construct
  source 1..75: mol_type = other DNA
atggacgggcttcactcggcatttcgcgcatctgaaatcgggcgacccggccaaagacaagaacctgttgctgac

SEQ ID NO: 343596 - DNA, 75 bp, synthetic construct
  source 1..75: mol_type = other DNA
gtgcgatttttaacggtggtgagaaatcgatgacgctgaatgtggccaatgacaacaaacagcttccgtacctgg

SEQ ID NO: 343597 - DNA, 75 bp, synthetic construct
  source 1..75: mol_type = other DNA
aggaagatatcaaagtggctgttgcggatgatgattgtgcttcacgtcctgtgcctgctgtcgctgctgaccggt

SEQ ID NO: 343598 - DNA, 75 bp, synthetic construct
  source 1..75: mol_type = other DNA
gtgcctgctgccgctgctgaccggttgcggaagtacgcggacagtttacgtgagcactccggttacaccactacc

SEQ ID NO: 343599 - DNA, 75 bp, synthetic construct
  source 1..75: mol_type = other DNA
gtcgcatagagataaaaataatgagtggagattaaaggttcgggtccctcactcaaatacgaagtatcttagaac

SEQ ID NO: 343600 - DNA, 75 bp, synthetic construct
  source 1..75: mol_type = other DNA
aaaaggtgaacgaattttaaaggccaatatgctttatgtcggaggaattcctgcaattgtatccaagatacgctc

SEQ ID NO: 343601 - DNA, 75 bp, synthetic construct
  source 1..75: mol_type = other DNA
attgtggtcacgccgccggtgcagcgtcttgagccgggagccagaagtatggtccgtctggccagcaccccggat

SEQ ID NO: 343602 - DNA, 75 bp, synthetic construct
  source 1..75: mol_type = other DNA
acctggtgacggcggccatcgtgctgtggaacacggtctacctggagcgtgcggcgcatgcgttgcgcggcaatg

SEQ ID NO: 343603 - DNA, 75 bp, synthetic construct
  source 1..75: mol_type = other DNA
ggaagataacggctggctggctgacgaagccctgatttatgtcgaaagcgaagtcgaaaacggtctgcccaccgt

SEQ ID NO: 343604 - DNA, 75 bp, synthetic construct
  source 1..75: mol_type = other DNA
tagctatgcagaaatcaggccgtttaagtgatgattcacgcgagttgctggcgcgctgtgggattaaaatcaatc

SEQ ID NO: 343605 - DNA, 75 bp, synthetic construct
  source 1..75: mol_type = other DNA
agcctgcctgatccagcgcgatggcgaaatggaagaatccaaacagcaactgatcgacaaactgctgacccgtat

SEQ ID NO: 343606 - DNA, 75 bp, synthetic construct
  source 1..75: mol_type = other DNA
gtgagctattacgcctttgaggggttaattccggttgttcacccgacggcgtttgtccatcccagtgcagtcttg

SEQ ID NO: 343607 - DNA, 75 bp, synthetic construct
  source 1..75: mol_type = other DNA
cacggcgagaaacgtcagttgttgatgggtacgccagcccgcgcggtacgcactgttagtgacgacgagttacac

SEQ ID NO: 343608 - DNA, 75 bp, synthetic construct
  source 1..75: mol_type = other DNA
taccaaagagtatcaggatcttgtcggccgctgccatgtagcgttacatgaaacgcagccgttgagacaaatgga

SEQ ID NO: 343609 - DNA, 75 bp, synthetic construct
  source 1..75: mol_type = other DNA
acgtcttcgcgttgatgcacctgctgggcttccgcttcgccccgcgcattcgtgacctgggcgacaccaagctct

SEQ ID NO: 343610 - DNA, 75 bp, synthetic construct
  source 1..75: mol_type = other DNA
ccggcttcatcaagccgcgctggcagaaactggtgatgaccgacgccggcatcgaccggcgctactacgaactgt

SEQ ID NO: 343611 - DNA, 75 bp, synthetic construct
  source 1..75: mol_type = other DNA
ctcgccaccgtcaaccgcatggcgctggccaacgagctgccggacgccatcatcacggagtcgggcctgaagatc

SEQ ID NO: 343612 - DNA, 75 bp, synthetic construct
  source 1..75: mol_type = other DNA
gtgctggaagaagaactgcttaaccgccgcgcccagggtgaggatccacgctactttaccctgcgtcgtctggat

SEQ ID NO: 343613 - DNA, 75 bp, synthetic construct
  source 1..75: mol_type = other DNA
cggcccgctctccttaaacggtaaacgtatcgccacctcttatcctcacctgctcaagcgttatctcgaccagaa

SEQ ID NO: 343614 - DNA, 75 bp, synthetic construct
  source 1..75: mol_type = other DNA
tctttgcgccgctgttcgccgtttacttccaggagccggtcggcaatatcatgtcgaatatcccgattgtcggcg

SEQ ID NO: 343615 - DNA, 75 bp, synthetic construct
  source 1..75: mol_type = other DNA
gtgcctgctgccgctgctgagcggttgcggaagtacgcggacagtttacgtgaacactccgacggcaccactgcc

SEQ ID NO: 343616 - DNA, 75 bp, synthetic construct
  source 1..75: mol_type = other DNA
aagtactgtggcagcacaacccgaaactggttatcgctcacctgtccggttttggtcagtacggctccgaggagt

SEQ ID NO: 343617 - DNA, 75 bp, synthetic construct
  source 1..75: mol_type = other DNA
aactggtcaccgcattctgggcaacgctggcacttatgtatatgtcgtttgcggcaggcaccgggaaatatccgg

SEQ ID NO: 343618 - DNA, 75 bp, synthetic construct
  source 1..75: mol_type = other DNA
cagcgtgatggccggagtcggtacgctggcccccaccgtggtgccaatggtgaacggtggtcaggccagtattgc

SEQ ID NO: 343619 - DNA, 75 bp, synthetic construct
  source 1..75: mol_type = other DNA
aggtattcctggcggatggcagggaaatgactgtagctctgtataaggatgaaggcgaggcacttactgacgcgc

SEQ ID NO: 343620 - DNA, 75 bp, synthetic construct
  source 1..75: mol_type = other DNA
accattccgcaaagccacatatacccacttccctgaatatatcgacccgcggctgcgtaattaccgctcacgcta

SEQ ID NO: 343621 - DNA, 75 bp, synthetic construct
  source 1..75: mol_type = other DNA
atggatcatctaaccatgccgaaattcgggccgctgtccggattgcgcgttgtcttctccggtatcgaaatcgcc

SEQ ID NO: 343622 - DNA, 75 bp, synthetic construct
  source 1..75: mol_type = other DNA
cctctgattcttcaggcagatcagaaatacaggatatctgccattaccgcgcggctgatgctgcagattatgtca

SEQ ID NO: 343623 - DNA, 75 bp, synthetic construct
  source 1..75: mol_type = other DNA
gaagacgcttccctgccgggaaaaatcaggaaatgccctgtttatcttcctgatgacagaacaaacagaaacaac

SEQ ID NO: 343624 - DNA, 75 bp, synthetic construct
  source 1..75: mol_type = other DNA
cctggctgacggattttcctgcgctgctgcgtctgctcagcgagggggatgaactgctgttattgcaggatggcg

SEQ ID NO: 343625 - DNA, 75 bp, synthetic construct
  source 1..75: mol_type = other DNA
tgttcaccagaaaagatccggagaacaaaaaatgtatccgtgttgcaaccgcagatgaacgtctgaaagacattt

SEQ ID NO: 343626 - DNA, 75 bp, synthetic construct
  source 1..75: mol_type = other DNA
ggtcaccgcattctgggcaacgctggcacttatgtatatgtcgtttgcggcaggcaccgggaaatatccggtgcg

SEQ ID NO: 343627 - DNA, 75 bp, synthetic construct
  source 1..75: mol_type = other DNA
gccgggaaaaatcaggaaatgccatgcttatttccctgataacagaacaaacagaaacaacggagataaaaatga

SEQ ID NO: 343628 - DNA, 75 bp, synthetic construct
  source 1..75: mol_type = other DNA
ttgccatattcctcctttgcctgttcggcggggcgtgctggtcggcatggtattacagcgacaaagccagtagcg

SEQ ID NO: 343629 - DNA, 75 bp, synthetic construct
  source 1..75: mol_type = other DNA
agatgatgactgtgcttcacgtcctgtgcctgttgtcgctgctgaccggttgcgaaagttcgcggacggtttacg

SEQ ID NO: 343630 - DNA, 75 bp, synthetic construct
  source 1..75: mol_type = other DNA
gaccggttgcggaagtacgcgaacagtttacgtgcctattccggcggtaccgttgccagcaagcctgactactga

SEQ ID NO: 343631 - DNA, 75 bp, synthetic construct
  source 1..75: mol_type = other DNA
atttcccagagcggtcaaacctgtgcgctgctctctaaagtcttcccgacccgttcccataccgtttctgcgcaa

SEQ ID NO: 343632 - DNA, 75 bp, synthetic construct
  source 1..75: mol_type = other DNA
tacaaatcgtcaatacagttctggaggctaaccagcatgcaaaacaacagatcgcactggagtcacagagaaccc

SEQ ID NO: 343633 - DNA, 75 bp, synthetic construct
  source 1..75: mol_type = other DNA
atcgcactggagtcacagagagcccaggaagatatcaaaatggccgttgcggatgatgattgtgcttcacgtctt

SEQ ID NO: 343634 - DNA, 75 bp, synthetic construct
  source 1..75: mol_type = other DNA
acgaaatgctgaatcagcaactgccattacccgtaacgttctgcaatcactgcaaatcgtcaatacagttctgga

SEQ ID NO: 343635 - DNA, 75 bp, synthetic construct
  source 1..75: mol_type = other DNA
gtcctgcaatcactgcaaatcgtcaatacagttatagaggttaaccagcatgcaaaacagcagatcgcacaggag

SEQ ID NO: 343636 - DNA, 75 bp, synthetic construct
  source 1..75: mol_type = other DNA
atgaagttgagctataagctggttatcgctgcattcttcgttactgtcattggttcttttatctggtctgccaac

SEQ ID NO: 343637 - DNA, 75 bp, synthetic construct
  source 1..75: mol_type = other DNA
ttgttgccttctttgttaccgtcattggttccttcatctggtctgccgggcattactacagcaaatatctgcacg

SEQ ID NO: 343638 - DNA, 75 bp, synthetic construct
  source 1..75: mol_type = other DNA
atgaagttgagctataagctggttatcgcagcattcttctctactgtcatcggttctttcatctggtctgctaac

SEQ ID NO: 343639 - DNA, 75 bp, synthetic construct
  source 1..75: mol_type = other DNA
tacaaatcgtaaatacagcactggaggctagccagcatgcaaaacaacaaatcgcactggagtcacagagaaccc

SEQ ID NO: 343640 - DNA, 75 bp, synthetic construct
  source 1..75: mol_type = other DNA
gaatgatgattgcgcttcccgtcttgttcctgctcgtgcaactgagcggctgcgccggtacgcggacaatttacg

SEQ ID NO: 343641 - DNA, 75 bp, synthetic construct
  source 1..75: mol_type = other DNA
atgaatacagtaaccatcaataacaaacagcttccggcagtcgaatatcgcggtcagcgtgttgtgacgctggcg

SEQ ID NO: 343642 - DNA, 75 bp, synthetic construct
  source 1..75: mol_type = other DNA
agaaacggatcactcaggtggaagaaaaagtcagccacgttgccgaaaccgtcgaacaaatcaaaagaggcaaca

SEQ ID NO: 343643 - DNA, 75 bp, synthetic construct
  source 1..75: mol_type = other DNA
ttatggaggaagcagaaccgcgagggactcgctggtattacccgaaaatggggggatttcaggttattggttggc

SEQ ID NO: 343644 - DNA, 75 bp, synthetic construct
  source 1..75: mol_type = other DNA
tgcaggtggctgaacctgaatttctggatggcctgagtgaacccatcgggaaatttccgatgaccgatggctggc

SEQ ID NO: 343645 - DNA, 75 bp, synthetic construct
  source 1..75: mol_type = other DNA
cgcagtggatggcggcctgaagccatacagcgatattgatttgttggttactgtggccgtaaagcttgatgaaac

SEQ ID NO: 343646 - DNA, 75 bp, synthetic construct
  source 1..75: mol_type = other DNA
tgtcgtgcatgacgacatcatcccgtggcgttatccggctaagcgcgagctgcaatttggagaatggcagcgcaa

SEQ ID NO: 343647 - DNA, 75 bp, synthetic construct
  source 1..75: mol_type = other DNA
atatcaagctctccaggtgacacctataataaatcacagggaccattagccagttatgggcagatgggtgaccag

SEQ ID NO: 343648 - DNA, 75 bp, synthetic construct
  source 1..75: mol_type = other DNA
gtggagactccatatataggtttgagaaaaattgaacatcattttagatatgcgggagaacattatttttgtgtt

SEQ ID NO: 343649 - DNA, 75 bp, synthetic construct
  source 1..75: mol_type = other DNA
tgtttctccatgtgtggggagtctgtcggaggtttttaatgataccggtgaaacgcgaaaggatgctcacgatac

SEQ ID NO: 343650 - DNA, 75 bp, synthetic construct
  source 1..75: mol_type = other DNA
agctgttcgtcagcagaaacgccttgagcgggtagaagaaaaagtcagtcacgttaccgaaactgtcgaacaaat

SEQ ID NO: 343651 - DNA, 75 bp, synthetic construct
  source 1..75: mol_type = other DNA
aataattcggcatggaacgtatctctttccagtatttcagtttgcggaaagaaagtcgagggaaaaatggtcagc

SEQ ID NO: 343652 - DNA, 75 bp, synthetic construct
  source 1..75: mol_type = other DNA
agagcagttgcgacacgctttagcgcactgtcgcgaggtggcgtatattacgctttcctctttcagagtcaaccc

SEQ ID NO: 343653 - DNA, 75 bp, synthetic construct
  source 1..75: mol_type = other DNA
aaaagcgatgagcttgactggaataacactgactggatagaaggggtgtgggatgaaatcaactccagaacttct

SEQ ID NO: 343654 - DNA, 75 bp, synthetic construct
  source 1..75: mol_type = other DNA
gcctggcgatggttggtatgaccgcgctggcaccggtactggcccacgtactcgggccggtgattatcccggttt

SEQ ID NO: 343655 - DNA, 75 bp, synthetic construct
  source 1..75: mol_type = other DNA
tgcgcttatcctgatgaacatgatcccggtacttatcgttgcggtactggtggcgctggggctgaaattcatccc

SEQ ID NO: 343656 - DNA, 75 bp, synthetic construct
  source 1..75: mol_type = other DNA
tttgcgatccggatatgcatccctcggacttcagtctgcttgcaccacgacgtgatgatgagcagacggagatgc

SEQ ID NO: 343657 - DNA, 75 bp, synthetic construct
  source 1..75: mol_type = other DNA
agcagatggatacccgcggcaaagttatcaactgcgccttcgctgtctccgcggcgttcgccctgggtgaccact

SEQ ID NO: 343658 - DNA, 75 bp, synthetic construct
  source 1..75: mol_type = other DNA
acggcttccagatcttcgccaaattcctcgttgcattgatcaccctcggtcttgccgctgcggtagtgaaattcc

SEQ ID NO: 343659 - DNA, 75 bp, synthetic construct
  source 1..75: mol_type = other DNA
acgaaatgctcggcgcaaacccatcaatgttcgccggaacactgctggcgtgcgatatgggcggcttcttcctcg

SEQ ID NO: 343660 - DNA, 75 bp, synthetic construct
  source 1..75: mol_type = other DNA
acagtgaaactgcagagcgggcagggatagcccggagttacggtgtggattatgagacgtatgcagcgtgggatt

SEQ ID NO: 343661 - DNA, 75 bp, synthetic construct
  source 1..75: mol_type = other DNA
aagttgcgatcacaaatttggacagtcttttggagggagtagacccactaagtgatatcggagatattgagtccg

SEQ ID NO: 343662 - DNA, 75 bp, synthetic construct
  source 1..75: mol_type = other DNA
acagccttcagatatttagtaaaaaaacataaagacgcttcagttttgtttgcaaaagctcgggcaacagaggaa

SEQ ID NO: 343663 - DNA, 75 bp, synthetic construct
  source 1..75: mol_type = other DNA
tccatatgcacagaacaggataccgccgggatcaataactggcaggaatggttgcgggaagtgctaaataaccct

SEQ ID NO: 343664 - DNA, 75 bp, synthetic construct
  source 1..75: mol_type = other DNA
atggaaacgaaaaaaaataatagtgaatacattcctgagtttgataaatcctttcgccatccgcgttactgggga

SEQ ID NO: 343665 - DNA, 75 bp, synthetic construct
  source 1..75: mol_type = other DNA
ggtttttgattatgtctggaacacggtacgacgtcgttttggtggtcgtttgcacgcgcgaaatgatggtattaa

SEQ ID NO: 343666 - DNA, 75 bp, synthetic construct
  source 1..75: mol_type = other DNA
ttgcctttattggcctgatgatgccgcacatggcgcgctggctggtaggtgccgatcatcgctggtcgctgcccg

SEQ ID NO: 343667 - DNA, 75 bp, synthetic construct
  source 1..75: mol_type = other DNA
acatgtgcagtaagtaacgggcgtatatccagcgaaacaaaaaccacatgggaatatatccggagtacagcaacc

SEQ ID NO: 343668 - DNA, 75 bp, synthetic construct
  source 1..75: mol_type = other DNA
aaatctgcaaatatgaatgtcgctgaggttggaactgatagttttggttttacttatggaaagtttgtttgtaat

SEQ ID NO: 343669 - DNA, 75 bp, synthetic construct
  source 1..75: mol_type = other DNA
taacggatggttacgcatcgaatttacatataaatcaccagaaccgaaaagtattcacgctcgttttgagatggc

SEQ ID NO: 343670 - DNA, 75 bp, synthetic construct
  source 1..75: mol_type = other DNA
taacgattcgctggatatgattacgggcttttcgccctcatataaaaaaattgttattggtgacgatgaaataac

SEQ ID NO: 343671 - DNA, 75 bp, synthetic construct
  source 1..75: mol_type = other DNA
cagccgggttacgtcatttatttggtcatgtcaggaatttcagaatatggcacaaggcattgactgatgctcagg

SEQ ID NO: 343672 - DNA, 75 bp, synthetic construct
  source 1..75: mol_type = other DNA
acattaagaaatctggtgtgctgacagaggctgccattgacgagccacgatttgaacgtgatggcctgcttattg

SEQ ID NO: 343673 - DNA, 75 bp, synthetic construct
  source 1..75: mol_type = other DNA
agcatggatgttgagcatggccagtacagcgtcaccctgctggttgaaggttttccgccttcacatgccggaacc

SEQ ID NO: 343674 - DNA, 75 bp, synthetic construct
  source 1..75: mol_type = other DNA
ttcacatgccggaaccattaccgtctatgaaggttccagaccaggtacgctgaatgattttctcggtgccatgac

SEQ ID NO: 343675 - DNA, 75 bp, synthetic construct
  source 1..75: mol_type = other DNA
tcagcaattgatgagtaaggcgctggaatcgtgtactcgccactggccggagaagccgatttatctgggggcgca

SEQ ID NO: 343676 - DNA, 75 bp, synthetic construct
  source 1..75: mol_type = other DNA
tgcagcagccgaaagcgagagcgcggcagccggttctgcgactgcagcagctggatcagcaactgctgcggctaa

SEQ ID NO: 343677 - DNA, 75 bp, synthetic construct
  source 1..75: mol_type = other DNA
gaaccgcgatttgaacgagaaggtttgctgattgaaggacagagaacaaactatttcagaaattcaaatacacca

SEQ ID NO: 343678 - DNA, 75 bp, synthetic construct
  source 1..75: mol_type = other DNA
ataagcaaataaccgtaggtgatgatgttattaaaatgccatccgataaggttgttagcttcaaacgcgcatcag

SEQ ID NO: 343679 - DNA, 75 bp, synthetic construct
  source 1..75: mol_type = other DNA
gtgagcgaaacagcggctgcgaactcagcgaaagcatcggcagcaagccagacggcagctaaagcaagcgaagat

SEQ ID NO: 343680 - DNA, 75 bp, synthetic construct
  source 1..75: mol_type = other DNA
gcgtttccgtggtcagcgcctttattggcgcaccggtattaatcttcctcgtccgacgtaaaacgcgaggtggcg

SEQ ID NO: 343681 - DNA, 75 bp, synthetic construct
  source 1..75: mol_type = other DNA
ttgcctttattggcctgatgatgccgcatatggcgcgttggctggtaggtgccgatcatcgctggtcgctgcccg

SEQ ID NO: 343682 - DNA, 75 bp, synthetic construct
  source 1..75: mol_type = other DNA
atcccagtgctgatcgccggagcaaccgcgctattactgagccgcgcgctgaatagtctgagtctcggcagcgac

SEQ ID NO: 343683 - DNA, 75 bp, synthetic construct
  source 1..75: mol_type = other DNA
gctgctgtttgccgatattatcgggcgggtgattgttcccggcgaactgcgcgtttctgtagtcagtgcctttat

SEQ ID NO: 343684 - DNA, 75 bp, synthetic construct
  source 1..75: mol_type = other DNA
ttaagcctgctcattggggcaaaatcactccccgcttccgtagtgctggaggcgctctccggcacctgccagagc

SEQ ID NO: 343685 - DNA, 75 bp, synthetic construct
  source 1..75: mol_type = other DNA
ctgcgctattactgagtcgcgcgctgaacagtttaagcctcggcagtgacaccgcgacggcgctgggcagtcgcg

SEQ ID NO: 343686 - DNA, 75 bp, synthetic construct
  source 1..75: mol_type = other DNA
caacgccgaagccgcctctcagagcgcagcggcggcaaagaaatccgaaactgcagcggcatcatcgaagaacgc

SEQ ID NO: 343687 - DNA, 75 bp, synthetic construct
  source 1..75: mol_type = other DNA
cctaattcaaaactcactttgaaatctaggaaagatattcttggtataattgtgtcttgttacattagattgaaa

SEQ ID NO: 343688 - DNA, 75 bp, synthetic construct
  source 1..75: mol_type = other DNA
aaaatttcgatcttcattatatttcaaaagaggctaccaaattacttggtgctatgctggagttggttttgccta

SEQ ID NO: 343689 - DNA, 75 bp, synthetic construct
  source 1..75: mol_type = other DNA
cggcatcgccctgcttaatcctgacgtctacgatcaactgcgtttctggcaagccggttcgctggatattcgcaa

SEQ ID NO: 343690 - DNA, 75 bp, synthetic construct
  source 1..75: mol_type = other DNA
gtccagccagacggcagcgaaaaccagcgaaacgaatgctaaagccagtgaaactgcagcaaaaaacagccaggt

SEQ ID NO: 343691 - DNA, 75 bp, synthetic construct
  source 1..75: mol_type = other DNA
actgggtgctaattttgataagactagttttatggatgtaaccacccctcaaatagagctaggttcttgcttatc

SEQ ID NO: 343692 - DNA, 75 bp, synthetic construct
  source 1..75: mol_type = other DNA
aaccagtgcgatgtcagggcatgaatcgaaacattaccccttccttaccgttgaggagttaccagacttctttaa

SEQ ID NO: 343693 - DNA, 75 bp, synthetic construct
  source 1..75: mol_type = other DNA
gtgctgcgtcgaatggaaagccgtggtgcgacagagaaggctaagaaggttcgccagcgctgcagcgaagtcttt

SEQ ID NO: 343694 - DNA, 75 bp, synthetic construct
  source 1..75: mol_type = other DNA
tcgcttcaatggaaaagagaagcgtatggcttttggtgtttatccagcagtgtctctcgcacaagcgagggcact

SEQ ID NO: 343695 - DNA, 75 bp, synthetic construct
  source 1..75: mol_type = other DNA
gaagtaaaagctggcgatttcgttatcgctatgcaggtaaacctaaaatgatctcgcttggtgtttatccaacga

SEQ ID NO: 343696 - DNA, 75 bp, synthetic construct
  source 1..75: mol_type = other DNA
tgctgatcctcacgggagttcgcactggcgaactccgaggtgctttctggagtgagtttgatcttgaaaaagcgg

SEQ ID NO: 343697 - DNA, 75 bp, synthetic construct
  source 1..75: mol_type = other DNA
cccctctctacccaagcgctggaaatcgtacagcaactcaaagtgatgtctgggcaatatcctcttgtgtttcca

SEQ ID NO: 343698 - DNA, 75 bp, synthetic construct
  source 1..75: mol_type = other DNA
aaagacgaagtagtaactaagacatttacacttgctgtagatggggctgctatcgattcaggtctaatcactacg

SEQ ID NO: 343699 - DNA, 75 bp, synthetic construct
  source 1..75: mol_type = other DNA
aactcagcatatgaccgtaaactattgggtactaaatctatccctgacatttcacttgcggttaactatcttgca

SEQ ID NO: 343700 - DNA, 75 bp, synthetic construct
  source 1..75: mol_type = other DNA
atgaacttgcccatttatattgtctcacttaaaagagatattgagcgaagaaataaaataaatgatgtttttcat

SEQ ID NO: 343701 - DNA, 75 bp, synthetic construct
  source 1..75: mol_type = other DNA
aagcagtaaaggatgcgggaaagtctttatctgaagtagctcgtcgctttggttttaaatctactcaatctgtcg

SEQ ID NO: 343702 - DNA, 75 bp, synthetic construct
  source 1..75: mol_type = other DNA
agctggaagaagagcgcgggaaggtccgggaactgacagctgcgcttaaagcagcgcagaaagcggacaaaaagg

SEQ ID NO: 343703 - DNA, 75 bp, synthetic construct
  source 1..75: mol_type = other DNA
tgaagccagggctaaaataagagaaatggctctcaccctcgcattgaaagaatgggaacttcaccaaaccatatc

SEQ ID NO: 343704 - DNA, 75 bp, synthetic construct
  source 1..75: mol_type = other DNA
catcgaagaagtcaaaaacacctttcagcaaattgcgctcgaatggcacaacatgaaagtgaagaaatggtctgc

SEQ ID NO: 343705 - DNA, 75 bp, synthetic construct
  source 1..75: mol_type = other DNA
cgggaaatgcttcagtggtacgccgattatatggattcgctcgagcatggcggaaatgtggtgcatggtgagttc

SEQ ID NO: 343706 - DNA, 75 bp, synthetic construct
  source 1..75: mol_type = other DNA
aggagccagagccgctttcggaagtgacgcgggtgaaatatcgtggtattgcggtggcggataccgcccgtgagc

SEQ ID NO: 343707 - DNA, 75 bp, synthetic construct
  source 1..75: mol_type = other DNA
gcgttagtagttttagccgctcgtctgctgattataaccggcttgcgtaccggcgaactccgcggggcattttgg

SEQ ID NO: 343708 - DNA, 75 bp, synthetic construct
  source 1..75: mol_type = other DNA
ggatatgcagatcaacaatacattccagtttgtcgcgctggagtggcatagttcgaaagcaagccgatggtcagt

SEQ ID NO: 343709 - DNA, 75 bp, synthetic construct
  source 1..75: mol_type = other DNA
ctggcatttggagtttacccgacagtatcccttgcacaggcgcgagcattgcgtgatgaagctaagaaaaagttg

SEQ ID NO: 343710 - DNA, 75 bp, synthetic construct
  source 1..75: mol_type = other DNA
agcgcggactggaacatttaaaacagatccgccgcaaatacttcagtgaaagcagcgaggccgctgaatggtggg

SEQ ID NO: 343711 - DNA, 75 bp, synthetic construct
  source 1..75: mol_type = other DNA
ccactagttgttcttgccgctcgtctgctgatccttacgggagttcgcactggcgagctccgaggtgcttgctgg

SEQ ID NO: 343712 - DNA, 75 bp, synthetic construct
  source 1..75: mol_type = other DNA
ggcgagcaaatttggcaatacttttgagggtatcgctcgcgaatggtatgaaaagaggatcgacaggtggtcatc

SEQ ID NO: 343713 - DNA, 75 bp, synthetic construct
  source 1..75: mol_type = other DNA
atatcggcagcaaaccgatagcagaaataaaaccgatggaattgctcgcggttctctctcgtcttaatgaccgtg

SEQ ID NO: 343714 - DNA, 75 bp, synthetic construct
  source 1..75: mol_type = other DNA
ctcgaggcgctatggagaaagcgaagaaagtccgtcagcgatgcggtgaagtttttcgctatgccatcgtaacgg

SEQ ID NO: 343715 - DNA, 75 bp, synthetic construct
  source 1..75: mol_type = other DNA
agatgaagtcggcaaaatggtctgctgggtatgcctcagatattattgaggcgttccaaaatgatatttttccgt

SEQ ID NO: 343716 - DNA, 75 bp, synthetic construct
  source 1..75: mol_type = other DNA
tcacccttgccgatgctcgttcccgtcgtgatgaagctcgaaaacttgtggcagaaggaaagaaccctagtgagg

SEQ ID NO: 343717 - DNA, 75 bp, synthetic construct
  source 1..75: mol_type = other DNA
gttacttacaactctgcttataatcgcaagctactaggaacaaaatccgtgcctgattgtgaactaactgttaac

SEQ ID NO: 343718 - DNA, 75 bp, synthetic construct
  source 1..75: mol_type = other DNA
cgtcgttatctggcgctcggcgtgctggcgggcattgtgaccattccaataggctgtattgctggtggcctggtg

SEQ ID NO: 343719 - DNA, 75 bp, synthetic construct
  source 1..75: mol_type = other DNA
gcctggcgatggtcggtatgaccgcgctggcaccggtactggctcacgtactcgggccggtaattatcccggttt

SEQ ID NO: 343720 - DNA, 75 bp, synthetic construct
  source 1..75: mol_type = other DNA
gaactgatccccggtcttgatcccatctttatgtctcctggcgacaaacccggcgaagtgatgcgcgccattgaa

SEQ ID NO: 343721 - DNA, 75 bp, synthetic construct
  source 1..75: mol_type = other DNA
ggtcgcaatttgaacggatttttgtacgctcaataaatgttattgaatttactgaaactcaaaaaagtgttttgc

SEQ ID NO: 343722 - DNA, 75 bp, synthetic construct
  source 1..75: mol_type = other DNA
tgtccgctttggggctgacgggaaggaaatcgttacggtcagtgatgacatgcggatcagtacagaggatgaagc

SEQ ID NO: 343723 - DNA, 75 bp, synthetic construct
  source 1..75: mol_type = other DNA
gaggatgatgtcgcattaatgatggcttcagcggggattcctggaggtgtgagatatgtcccagccggttggtga

SEQ ID NO: 343724 - DNA, 75 bp, synthetic construct
  source 1..75: mol_type = other DNA
ttccccggtgtttttttcttcccggcaacaagaagcgtgtacgacgcggtgttgacgtggatatttcgggtactc

SEQ ID NO: 343725 - DNA, 75 bp, synthetic construct
  source 1..75: mol_type = other DNA
ggaaactggtgttccatcgtaaactgatcggcgtttatcttgggcaatttcggtggcttctacactgtggttttt

SEQ ID NO: 343726 - DNA, 75 bp, synthetic construct
  source 1..75: mol_type = other DNA
atggatattcccgttaatgcagcaaagccggggcgtcggcgttatctgacgccgctgctgatctggattcaggag

SEQ ID NO: 343727 - DNA, 75 bp, synthetic construct
  source 1..75: mol_type = other DNA
ctaacctaaaagtagagttaggcacttataccgctggtagctctaccgctgccgcagattttcaagaaatcccag

SEQ ID NO: 343728 - DNA, 75 bp, synthetic construct
  source 1..75: mol_type = other DNA
cgggatgtacatttcacccctggactggcggagacggttgtggctgtctatgcccccggcgacaggggcttaaac

SEQ ID NO: 343729 - DNA, 75 bp, synthetic construct
  source 1..75: mol_type = other DNA
gataaagatgcagtagttacccgtgaattcgtcctcgctgtagatggcggtccactagctactggtctagtagaa

SEQ ID NO: 343730 - DNA, 75 bp, synthetic construct
  source 1..75: mol_type = other DNA
gtcggtctggcgtttttgactccgctgctgatctggattcaggagatgttgagctggcactgggtgttcattgtc

SEQ ID NO: 343731 - DNA, 75 bp, synthetic construct
  source 1..75: mol_type = other DNA
acctggccgtggcttccgcccatattcaggaagagttcggtattacgaaagcggaaatgggctatgtattttcgg

SEQ ID NO: 343732 - DNA, 75 bp, synthetic construct
  source 1..75: mol_type = other DNA
accgccggcagtgccacggttactccgaaactgaatggagtggctggcccggcattccaggttataaaagacagt

SEQ ID NO: 343733 - DNA, 75 bp, synthetic construct
  source 1..75: mol_type = other DNA
atcccgaataacgcggggatcctgctggcaccatgctgtcgtggtggttcggcattcacccagggcgcggagggg

SEQ ID NO: 343734 - DNA, 75 bp, synthetic construct
  source 1..75: mol_type = other DNA
cctgatgcaggcgattgccgcggagggggatgtgaccacgccagtggttgtgcccggcacgggggatggtggcca

SEQ ID NO: 343735 - DNA, 75 bp, synthetic construct
  source 1..75: mol_type = other DNA
tttgataatggcagaatatgaggagttaattttcaaagaagataatgatttatttataactcttcatgatcttta

SEQ ID NO: 343736 - DNA, 75 bp, synthetic construct
  source 1..75: mol_type = other DNA
acgaagagcttgcattagttactggttcatatccagagtttaagagactggcgaaaaaacacactaacacaatta

SEQ ID NO: 343737 - DNA, 75 bp, synthetic construct
  source 1..75: mol_type = other DNA
ttagtcaattgctaatatccataatctctatatctttaggatcatttctttttgctggaatcctagagagctaca

SEQ ID NO: 343738 - DNA, 75 bp, synthetic construct
  source 1..75: mol_type = other DNA
ctgacacataaactgaaagagggctggcagccgtttggtagtccggtggccataaccccttataccctgatgcag

SEQ ID NO: 343739 - DNA, 75 bp, synthetic construct
  source 1..75: mol_type = other DNA
ccttagccttcattagtggtaaggcaccggaaatcaaaccctcgcccggcggcgacactccatcggggccgtctg

SEQ ID NO: 343740 - DNA, 75 bp, synthetic construct
  source 1..75: mol_type = other DNA
agcattattccggatcgtatggcaaccgctattctgaacgtagccggtcgcaccttagccttcatcagtggtaag

SEQ ID NO: 343741 - DNA, 75 bp, synthetic construct
  source 1..75: mol_type = other DNA
accggaaatcaaaccctcgcccggcggcaacacgccatcggggccgtctgaagatgcatccgtacgcacaatctc

SEQ ID NO: 343742 - DNA, 75 bp, synthetic construct
  source 1..75: mol_type = other DNA
tcagggcggcgtcgccgtcagaccttgctgatgcacttgcgcaaaaaattcgtgaaggatggcaaccatatggtg

SEQ ID NO: 343743 - DNA, 75 bp, synthetic construct
  source 1..75: mol_type = other DNA
gtccggtggccataaccccttatactctgatgcaggccattgcggcggaaggtgatgtcaccacacctgtgttgg

SEQ ID NO: 343744 - DNA, 75 bp, synthetic construct
  source 1..75: mol_type = other DNA
cgttttggctttactccggttagcgatatttatgaagaggacggtattgcgcatatcgggatggcgcgcgaagtc

SEQ ID NO: 343745 - DNA, 75 bp, synthetic construct
  source 1..75: mol_type = other DNA
cggcagcgaagaccagcgaaacgaatgccaaagccagtgaaactgcggcgaaaaacagtcaggatgctgcagccc

SEQ ID NO: 343746 - DNA, 75 bp, synthetic construct
  source 1..75: mol_type = other DNA
tgcaagcgcggcggctgcttctgccactgcatcagccaacagtcaaaaagcggcaaaaaccagtgaaaccaatgc

SEQ ID NO: 343747 - DNA, 75 bp, synthetic construct
  source 1..75: mol_type = other DNA
gacagcagccaaaaaatcagaaaccaacgcgaaaaatagcgagacagccacaaaggccagcgaaaaaaacgcaaa

SEQ ID NO: 343748 - DNA, 75 bp, synthetic construct
  source 1..75: mol_type = other DNA
ctgctaatcaattcaacaaatccgactaaatggaacaagtcgtcaaatatgatcttaagtgcatcaggtgtagat

SEQ ID NO: 343749 - DNA, 75 bp, synthetic construct
  source 1..75: mol_type = other DNA
actcggcgcaagcatcggcagcaagccagacagcagctaaagcaagtgaagacgcagccagagagtatgcaagcc

SEQ ID NO: 343750 - DNA, 75 bp, synthetic construct
  source 1..75: mol_type = other DNA
agcaaaaaccagtgaaaccaacgcaaaggcgagcgagactgcggcggcgaactcggcgcaagcatcggcagcaag

SEQ ID NO: 343751 - DNA, 75 bp, synthetic construct
  source 1..75: mol_type = other DNA
ccgccagcctgatccgcgttttccgcgagccggtcatccctggcaggaagacgaaaaaaccttactgagtgatgc

SEQ ID NO: 343752 - DNA, 75 bp, synthetic construct
  source 1..75: mol_type = other DNA
ttgaccagcttgtccttatctataaaaagataaataatgctgaatgggattgcgaaaataacacaaaaaaacaca

SEQ ID NO: 343753 - DNA, 75 bp, synthetic construct
  source 1..75: mol_type = other DNA
aaccgaaggaagagaaacaggcacctgtacctgacccacgctttccgaatgcccgccaggcctgggtggctgaag

SEQ ID NO: 343754 - DNA, 75 bp, synthetic construct
  source 1..75: mol_type = other DNA
agtaaagaaacttacataacctctgcaatacaatacgcaccaaaaaaaggtggtgtcgttgaatctggtgactat

SEQ ID NO: 343755 - DNA, 75 bp, synthetic construct
  source 1..75: mol_type = other DNA
gtctttattggttgaaatcaccggtgtagctgccgacaggctcaccgcacgagttaacaaagatgaagttacggg

SEQ ID NO: 343756 - DNA, 75 bp, synthetic construct
  source 1..75: mol_type = other DNA
ggtgactatatttatctggccaccccacaagtagaagatgggccttgtgtatcatcttttattatatcaggagcg

SEQ ID NO: 343757 - DNA, 75 bp, synthetic construct
  source 1..75: mol_type = other DNA
ctgtataccgatgtagcgttacctgacgtcgtggcgatgaccgggactggtaacccgttcctgatgtcgttcttc

SEQ ID NO: 343758 - DNA, 75 bp, synthetic construct
  source 1..75: mol_type = other DNA
acactgggactgaatgcgctgacgctgacggatgttacaaaaaatgcagcgtatggcgttgagatagaaagtctg

SEQ ID NO: 343759 - DNA, 75 bp, synthetic construct
  source 1..75: mol_type = other DNA
gctcgctggggagtgggtaagccgttatatcaggatctgcttttccgcacgaaggcagcattgcagaaaaacccg

SEQ ID NO: 343760 - DNA, 75 bp, synthetic construct
  source 1..75: mol_type = other DNA
ccggtggtgaagtatgcgtatttaacgacatcattcctgctgaccattgtctgcatgatgttcaggatatgagta

SEQ ID NO: 343761 - DNA, 75 bp, synthetic construct
  source 1..75: mol_type = other DNA
gctgacggatgttacaaaaaatgcagcgtatggcgttgagatagaaagtctggtgctggagataaatgcaccggc

SEQ ID NO: 343762 - DNA, 75 bp, synthetic construct
  source 1..75: mol_type = other DNA
tggtgttcaccgccagcagtgccacggttactccgaaactgaatggagtggctggcccggcattccaggtcataa

SEQ ID NO: 343763 - DNA, 75 bp, synthetic construct
  source 1..75: mol_type = other DNA
ccgggcgcacctcagccttcattagtggtaaggcaccggaaatcaaaccctcgcccggcggcgacacgccatcgg

SEQ ID NO: 343764 - DNA, 75 bp, synthetic construct
  source 1..75: mol_type = other DNA
gatcctgttgtcgatatatacctggtggcatctggtgccgatacgcaacccgcggcactggcattagccgagcgt

SEQ ID NO: 343765 - DNA, 75 bp, synthetic construct
  source 1..75: mol_type = other DNA
gcagaaagggcgttatcgtcagttccatcagttgggctgcgaagttttcggtctgcaaggcccggatatcgacgc

SEQ ID NO: 343766 - DNA, 75 bp, synthetic construct
  source 1..75: mol_type = other DNA
cgaaacggccatctggcagcgcattgaaggcacactgaaaaacgtgctcagcagctacggttacagtgaaatccg

SEQ ID NO: 343767 - DNA, 75 bp, synthetic construct
  source 1..75: mol_type = other DNA
agtgccaccagcgacccggagtattactttgttgtggttctggcagggcagtcaaatggcatgtcgtatggtgaa

SEQ ID NO: 343768 - DNA, 75 bp, synthetic construct
  source 1..75: mol_type = other DNA
tcgatatatacctggtggcttcaggtgctgatacacaatctgcggctatggcattagctgagcgtctgcgtgatg

SEQ ID NO: 343769 - DNA, 75 bp, synthetic construct
  source 1..75: mol_type = other DNA
attcaaaaaatccggaagtgcaggcgcttctcaacgacgctccggcattaggcgattatctggacgaggaatctc

SEQ ID NO: 343770 - DNA, 75 bp, synthetic construct
  source 1..75: mol_type = other DNA
gtctggacccgtggttgatggaacaagccgaacaggctggcgcgcagtttatcccgggcgttcgtgtcgatgcgc

SEQ ID NO: 343771 - DNA, 75 bp, synthetic construct
  source 1..75: mol_type = other DNA
gggcgcggaggggacattcagcgagtccacgggggccagtcaggattcggcacgctggggggtgggcaagccgtt

SEQ ID NO: 343772 - DNA, 75 bp, synthetic construct
  source 1..75: mol_type = other DNA
ggtaacgactggcagacgctggagctggtgttcaccgccggcggtgccacggttactccgaaactgaatggagtg

SEQ ID NO: 343773 - DNA, 75 bp, synthetic construct
  source 1..75: mol_type = other DNA
tacaaacagggcggctggctgtcggtgctgtttggtaacgacgaacgcaaactgaatggtcattacgccgtttac

SEQ ID NO: 343774 - DNA, 75 bp, synthetic construct
  source 1..75: mol_type = other DNA
cggcgattacggtaacgactggcagacgctggagctggtgttcaccgccggcagtgccacggttactccgaaact

SEQ ID NO: 343775 - DNA, 75 bp, synthetic construct
  source 1..75: mol_type = other DNA
gccttcatcagtggtaaggcaccggaaatcaaaccctcgcccggcggcaacacgccatcgggtccgtctgcagat

SEQ ID NO: 343776 - DNA, 75 bp, synthetic construct
  source 1..75: mol_type = other DNA
gctgcgcagggctggaccattaaggacggcggaattcagttgtcagatggtgtatttaagatcaccaagcagagc

SEQ ID NO: 343777 - DNA, 75 bp, synthetic construct
  source 1..75: mol_type = other DNA
ggttactccgaaactgaatggagtggctggcccggcattccaggccataaaagacagtctggcagtgggactaaa

SEQ ID NO: 343778 - DNA, 75 bp, synthetic construct
  source 1..75: mol_type = other DNA
acgcagccgggcgcacctcagccttcatcagtggtaaggcaccggaaatcaaaccctcgcccggcggcaacacgc

SEQ ID NO: 343779 - DNA, 75 bp, synthetic construct
  source 1..75: mol_type = other DNA
ggttaacgatggcgtgatgatcgttggtgacgccgcaggcttctgcctgaatttgggttttacagttcgtggcat

SEQ ID NO: 343780 - DNA, 75 bp, synthetic construct
  source 1..75: mol_type = other DNA
cggcggcggtgtggggcgagcgtgaagtgcgcgatatgtacggtttgattccggttggtctgccggatgaacgtc

SEQ ID NO: 343781 - DNA, 75 bp, synthetic construct
  source 1..75: mol_type = other DNA
tatccgtccgtgacgccgcgcgttccggcggcggtgtggggcgagcgtgaagtgcgcgatatgtacggtttgatt

SEQ ID NO: 343782 - DNA, 75 bp, synthetic construct
  source 1..75: mol_type = other DNA
atgtctgaagaaaaattaggtcaacattatctcgccgcgctgaatgaggcatttccgggcgtcgtgctggaccac

SEQ ID NO: 343783 - DNA, 75 bp, synthetic construct
  source 1..75: mol_type = other DNA
agactgcggcggctaactcggcgaaagcatccgctgcaagccagacagcagctaaagcaagtgaggatgcagcca

SEQ ID NO: 343784 - DNA, 75 bp, synthetic construct
  source 1..75: mol_type = other DNA
actccagcttcttggggtaaatctgcaaatatgaatgtcgctgaggttggaactgatagttttggttttacttat

SEQ ID NO: 343785 - DNA, 75 bp, synthetic construct
  source 1..75: mol_type = other DNA
ggatcaagtgcttcgtcatttattgtaactgatacaactgcaagcacccgcgcaagcgatatagttacagttcca

SEQ ID NO: 343786 - DNA, 75 bp, synthetic construct
  source 1..75: mol_type = other DNA
aaaaaccagtgaaaccaacgcaaaggcgagcgagactgcggcggctaactcggcgaaagcatccgctgcaagcca

SEQ ID NO: 343787 - DNA, 75 bp, synthetic construct
  source 1..75: mol_type = other DNA
cggcgacccgcgcaagcgatatagttacagttccaattaagaataatctttataatcttccttttacggttcttt

SEQ ID NO: 343788 - DNA, 75 bp, synthetic construct
  source 1..75: mol_type = other DNA
agtaacgggcgcatatccagcgaaacaaagactacgtggtcctatattcagaactctgcaaccatccgtattgga

SEQ ID NO: 343789 - DNA, 75 bp, synthetic construct
  source 1..75: mol_type = other DNA
ccgtttaacgattcactggatatgattacggggttttcgccgtcatataaaaagattgttattggtgatgatgaa

SEQ ID NO: 343790 - DNA, 75 bp, synthetic construct
  source 1..75: mol_type = other DNA
agtgcacaggcggcagcgacctcacagactgcatcagcaaactccgcgacagcagccaaaaaatcagaaaccaac

SEQ ID NO: 343791 - DNA, 75 bp, synthetic construct
  source 1..75: mol_type = other DNA
tgaatttggtttttcatatgccaaaatgcgaacaaaagataatatgacaggacaatcatctgcacttagtctgca

SEQ ID NO: 343792 - DNA, 75 bp, synthetic construct
  source 1..75: mol_type = other DNA
accgtatctggtgactatatttatctggccaccccacaagtagaaaatgggccttgtgtatcatcttttattata

SEQ ID NO: 343793 - DNA, 75 bp, synthetic construct
  source 1..75: mol_type = other DNA
aacctatattaataaatctggtgtgctgacagaggctgccattgacgagccacgatttgaacgtgatggcctgct

SEQ ID NO: 343794 - DNA, 75 bp, synthetic construct
  source 1..75: mol_type = other DNA
cgcagccagagagtatgcaagccaggcagcagatccgtataaatatgtcttacagccgctacctgatgtgtggat

SEQ ID NO: 343795 - DNA, 75 bp, synthetic construct
  source 1..75: mol_type = other DNA
catcaattgctgctacaaagtcagttgatgtttcaggcgataacaagtacgtgacaacctcatgtcgttttaaaa

SEQ ID NO: 343796 - DNA, 75 bp, synthetic construct
  source 1..75: mol_type = other DNA
ttctgatggtactaaacgagtagtttctaacggtgaggctactaaaactatgaaaacggagtggacgggcgtaaa

SEQ ID NO: 343797 - DNA, 75 bp, synthetic construct
  source 1..75: mol_type = other DNA
gcgaaaaatagcgagacagccgcaaagacgagcgaaaccaacgcaaagtccagccagacggcagcgaaaaccagc

SEQ ID NO: 343798 - DNA, 75 bp, synthetic construct
  source 1..75: mol_type = other DNA
atggatgttgagtatggccagtacagcgttatcctgctggttgaaggttttccgccttcacatgccgggaccatc

SEQ ID NO: 343799 - DNA, 75 bp, synthetic construct
  source 1..75: mol_type = other DNA
attctgatttatccgtttctcagctttatgccttattacaactgcgttgtgcggtatttgtagtggaacaaaact

SEQ ID NO: 343800 - DNA, 75 bp, synthetic construct
  source 1..75: mol_type = other DNA
aaacgaatgcagctaacagcgcacaggcggcagcggcctcgcagactgcatcggcaaattccgcgacagcagcta

SEQ ID NO: 343801 - DNA, 75 bp, synthetic construct
  source 1..75: mol_type = other DNA
gccggttctgcgacttcagcagctggatcagcaactgctgcggctaacagccagaaagctgcgaagacgagtgaa

SEQ ID NO: 343802 - DNA, 75 bp, synthetic construct
  source 1..75: mol_type = other DNA
caacagaaaatacggttggtggtttcgtccagtattctccggatacaggtcagatggtggcatcaggggattgtc

SEQ ID NO: 343803 - DNA, 75 bp, synthetic construct
  source 1..75: mol_type = other DNA
caagtgaagatgctgccagagaatacgcaaaccagacagcagagccgtacagatatgttttacagccgctgccgg

SEQ ID NO: 343804 - DNA, 75 bp, synthetic construct
  source 1..75: mol_type = other DNA
aaaataggctctcagatacagtattctcctgagcagggtggggcaacagtatctggtgactatatttatcttgcc

SEQ ID NO: 343805 - DNA, 75 bp, synthetic construct
  source 1..75: mol_type = other DNA
gacggtagtgcaacaacttttcttggtgatgcatatattgatacacaaacgcttgaaattaatatgacaggtggc

SEQ ID NO: 343806 - DNA, 75 bp, synthetic construct
  source 1..75: mol_type = other DNA
ttccttttacggttctttgtgaggtacataagaactggtataaaacgccaaatgcagcaccgcgtgtttttgaaa

SEQ ID NO: 343807 - DNA, 75 bp, synthetic construct
  source 1..75: mol_type = other DNA
tgcagcggcccaaagcgagagtgccgcagctggttctgcaagtgcggcggcttcttctgccactgcatcagccaa

SEQ ID NO: 343808 - DNA, 75 bp, synthetic construct
  source 1..75: mol_type = other DNA
gtcttttgcaacaggtgactggatagaagtaaccaccccgcaattcgagtatggtgcttgtgcaacttccttcat

SEQ ID NO: 343809 - DNA, 75 bp, synthetic construct
  source 1..75: mol_type = other DNA
tggtacaggcgcatcatcttttattgttacggggacggcaccggcaacgcgggcaagcgatatggtgacagtccc

SEQ ID NO: 343810 - DNA, 75 bp, synthetic construct
  source 1..75: mol_type = other DNA
tgcgatattggaggagctaacagacgggtaaacgaaaacgcatcgcttgaaaaaatggttatggggatgcgtgta

SEQ ID NO: 343811 - DNA, 75 bp, synthetic construct
  source 1..75: mol_type = other DNA
tctaaatggaataagtcaagcaatctggaactcacagaaatatccacggattcttttaattttacttatggtaga

SEQ ID NO: 343812 - DNA, 75 bp, synthetic construct
  source 1..75: mol_type = other DNA
cgaagctaccggatggatttttgcagaggcaacaattcaggcaattgatggggagttaaaaataggctctcagat

SEQ ID NO: 343813 - DNA, 75 bp, synthetic construct
  source 1..75: mol_type = other DNA
gcactgtttcttgtcgtgttaaggctcctgatggcctccgttgccgtttacgctttgaaaaatacgacggatcag

SEQ ID NO: 343814 - DNA, 75 bp, synthetic construct
  source 1..75: mol_type = other DNA
atggatgttgagtacggtcagtacagcgtcagtctgttggtggaggggttcccgccgtcacatgccgggaccatc

SEQ ID NO: 343815 - DNA, 75 bp, synthetic construct
  source 1..75: mol_type = other DNA
ccggcacgctgaatgattttctcggcgccatgacggaagaggatgtcatgccggaggcattgcgtcgttttgagg

SEQ ID NO: 343816 - DNA, 75 bp, synthetic construct
  source 1..75: mol_type = other DNA
caggcacgctgaatgattttctcggagccatgacggaagacgatgtcatgccggaggcattgcgtcgttttgagg

SEQ ID NO: 343817 - DNA, 75 bp, synthetic construct
  source 1..75: mol_type = other DNA
atacagagagcatgattggtgcgatggttcaatatgctccagtaaaaggttcaggcacagcatctggagactatc

SEQ ID NO: 343818 - DNA, 75 bp, synthetic construct
  source 1..75: mol_type = other DNA
gataccatttaacgattcactggatatgattacggggttttcgccgtcatataaaaagattgttattggtgatga

SEQ ID NO: 343819 - DNA, 75 bp, synthetic construct
  source 1..75: mol_type = other DNA
cggcagcgaagaccagcgaaacgaatgccaaaaccagcgaaactgcggcgaaaaacagtcaggatgcagcagccc

SEQ ID NO: 343820 - DNA, 75 bp, synthetic construct
  source 1..75: mol_type = other DNA
gtcacctatttggacacgttcgaaatctgcgtatttggcacaaggcattgactgatgctcagatgggggagtcaa

SEQ ID NO: 343821 - DNA, 75 bp, synthetic construct
  source 1..75: mol_type = other DNA
gaggccagactacagccgggttgcgtcatttatttggtcatgtcaggaatttcagaatatggcacaaggcattga

SEQ ID NO: 343822 - DNA, 75 bp, synthetic construct
  source 1..75: mol_type = other DNA
ccttttacggttctttgtgaggtacataagaactggtataaaacgccaaatgcagcgccgcgtgtttttgacacc

SEQ ID NO: 343823 - DNA, 75 bp, synthetic construct
  source 1..75: mol_type = other DNA
tgcttattgaggggcaaagaacaaactacatgctcaattcggaaagccctgccagttgggggcgatcgtcaaata

SEQ ID NO: 343824 - DNA, 75 bp, synthetic construct
  source 1..75: mol_type = other DNA
ctgttaatggcatatgccaatttagccgggcttcatcagcaacgtatattgataagtccgggcatattaccgtag

SEQ ID NO: 343825 - DNA, 75 bp, synthetic construct
  source 1..75: mol_type = other DNA
catctggagactatctggatatcgcaactccacaagtggaaggtggatcaagtgcttcgtcatttattgtaactg

SEQ ID NO: 343826 - DNA, 75 bp, synthetic construct
  source 1..75: mol_type = other DNA
caaagaccagcgaaactaatgcgaaaaatagcgaggtggctgcagaatcgagtcagagtgctgcagcaaactccg

SEQ ID NO: 343827 - DNA, 75 bp, synthetic construct
  source 1..75: mol_type = other DNA
aaatctggtgtgctgacagaggctgccattgacgagccacgatttgaacgtgatggcctgcttattgaggggcaa

SEQ ID NO: 343828 - DNA, 75 bp, synthetic construct
  source 1..75: mol_type = other DNA
tgagtttggctttacttatgggcggtttcaaataaaggacgaaaaaattgggacaaatacgacaatgaatatcgc

SEQ ID NO: 343829 - DNA, 75 bp, synthetic construct
  source 1..75: mol_type = other DNA
aacgtcacttattcggtcatattcgaaattttaggaactggcataaagaattgaccgagacacaaatgggagaaa

SEQ ID NO: 343830 - DNA, 75 bp, synthetic construct
  source 1..75: mol_type = other DNA
cagccgggttgcgtcatttatttggtcatgtcaggaatttcagaatatggcacaaggcattgactgatgctcaga

SEQ ID NO: 343831 - DNA, 75 bp, synthetic construct
  source 1..75: mol_type = other DNA
atggggtttggttcatcaggtgggtacgacggttttccgtattgtgatataggtggttcagaccgacgaataaat

SEQ ID NO: 343832 - DNA, 75 bp, synthetic construct
  source 1..75: mol_type = other DNA
tattgattgaaggacagcgcactaactattttgttaaatccaatatccccgctgaatggacgagtaccagcaata

SEQ ID NO: 343833 - DNA, 75 bp, synthetic construct
  source 1..75: mol_type = other DNA
agcatggatgtcgagtatggccagtacagcgtcaccctgctggttgaaggttttccgccttcacatgccggaacc

SEQ ID NO: 343834 - DNA, 75 bp, synthetic construct
  source 1..75: mol_type = other DNA
gcatcagcttctggccgcagcagtttggcctcattccacagtgggtgaccctggaaccccgtgtcttcggctgga

SEQ ID NO: 343835 - DNA, 75 bp, synthetic construct
  source 1..75: mol_type = other DNA
gcatcagcttctggccgcagcactttggcctcattccacagtgggtaaccctggagccccgtgtcttcggctgga

SEQ ID NO: 343836 - DNA, 75 bp, synthetic construct
  source 1..75: mol_type = other DNA
gcatcagcttctggccgcagcaatttggcctcattccacagtgggtcaccctggagccccgtgtcttcggctgga

SEQ ID NO: 343837 - DNA, 75 bp, synthetic construct
  source 1..75: mol_type = other DNA
aacggtatagatccggaagcgtatctgcgccatatcctgggtgtactgccggaatggccttccaaccgtgttgac

SEQ ID NO: 343838 - DNA, 75 bp, synthetic construct
  source 1..75: mol_type = other DNA
tcgcacccgctaaccaacccgaatttgaactgaccgtcacgccggtctccgatgaacaacgtatcgatttctggc

SEQ ID NO: 343839 - DNA, 75 bp, synthetic construct
  source 1..75: mol_type = other DNA
tacaccctgaacaacggtggcgcatttatggcacccgaaccggatgacgatgatgacgaaacatgggtgctgttt

SEQ ID NO: 343840 - DNA, 75 bp, synthetic construct
  source 1..75: mol_type = other DNA
tggaccgtctgtgcgaagactactgcggaggcatctggaatctgtacaccctgaacaacggtggtgcatttatgg

SEQ ID NO: 343841 - DNA, 75 bp, synthetic construct
  source 1..75: mol_type = other DNA
tggaccgtctgtgcgaagactactgcggaggcatctggaatctgtacaccctgaacaacggaggagcatttatgg

SEQ ID NO: 343842 - DNA, 75 bp, synthetic construct
  source 1..75: mol_type = other DNA
tggaccgtctgtgcgaagactactgcggaggaatctggaatctgtacaccctgaacaacggaggcgcatttatgg

SEQ ID NO: 343843 - DNA, 75 bp, synthetic construct
  source 1..75: mol_type = other DNA
tggaccgtctgtgcgaagactactgcggagggatctggaatctgtacaccctgaacaacgggggcgcatttatgg

SEQ ID NO: 343844 - DNA, 75 bp, synthetic construct
  source 1..75: mol_type = other DNA
tggaccgtctgtgcgaagactactgcggaggcatctggaatctgtacaccctgaacaacgggggggcatttatgg

SEQ ID NO: 343845 - DNA, 75 bp, synthetic construct
  source 1..75: mol_type = other DNA
tggaccgtctgtgcgaagactactgcggaggcatctggaatctgtacaccctgaacaacggcggcgcatttatgg

SEQ ID NO: 343846 - DNA, 75 bp, synthetic construct
  source 1..75: mol_type = other DNA
cggtgtgctggctgtgtttgcagaacgccggaaggacagttttggtccgtatgtccggctgatgagcgtcaccct

SEQ ID NO: 343847 - DNA, 75 bp, synthetic construct
  source 1..75: mol_type = other DNA
gggaaaacatccggtacaacaccttcgtcccttccggggtatcctgcaggcggatgcattcagcggttacgatcg

SEQ ID NO: 343848 - DNA, 75 bp, synthetic construct
  source 1..75: mol_type = other DNA
gaaaacagggcgtatctggacgtatgtccgggatgatcgcaatgtgggttcgtcatctcctccagcggtctggtt

SEQ ID NO: 343849 - DNA, 75 bp, synthetic construct
  source 1..75: mol_type = other DNA
gcccgccagggcatcgaactgagccgggcattactctccaactgggttgacgcatgctgtcagttaatgactccg

SEQ ID NO: 343850 - DNA, 75 bp, synthetic construct
  source 1..75: mol_type = other DNA
ttatcggcacttgccttctgaacgacattgatccggaagcgtatctgcgccatatactgagcctactgccggaat

SEQ ID NO: 343851 - DNA, 75 bp, synthetic construct
  source 1..75: mol_type = other DNA
cggaagccctgcagcgtatcggtgaactgtatgctatcgaggcagaggtccggggctgttcagcagaacagcgtc

SEQ ID NO: 343852 - DNA, 75 bp, synthetic construct
  source 1..75: mol_type = other DNA
cgttactgacgtcgctgcatgaatggatggtggagaagaatggcacgctgtcgaaaaaatccagactgggcgaag

SEQ ID NO: 343853 - DNA, 75 bp, synthetic construct
  source 1..75: mol_type = other DNA
ccacctcgccgaacgacattgtggttaacacgccgttccatgtggagattggcaacctgaccggcgaatttaata

SEQ ID NO: 343854 - DNA, 75 bp, synthetic construct
  source 1..75: mol_type = other DNA
gtgggtgaccctggagccccgggtcttcggctggatggaccgtctgtatgaagactactgcggtggtatctggaa

SEQ ID NO: 343855 - DNA, 75 bp, synthetic construct
  source 1..75: mol_type = other DNA
gaacctccggcggtctggtttgcctactcaccggaccatcagggtaaacatccggagcaacaccttcgtcccttc

SEQ ID NO: 343856 - DNA, 75 bp, synthetic construct
  source 1..75: mol_type = other DNA
gccgcggaaagagcgcttcgtgcagtctgtctcggaaagaaaaactcttatgacctttgtcaaatattaagccca

SEQ ID NO: 343857 - DNA, 75 bp, synthetic construct
  source 1..75: mol_type = other DNA
tgatgacgaaacatgggtactgttcaataccatgaacggtaaccgcgctgaaatgagcccggaagccgccggtat

SEQ ID NO: 343858 - DNA, 75 bp, synthetic construct
  source 1..75: mol_type = other DNA
cctttgtcaaatattaagtccaaaaagaccttacgcagctccgggagcttcgttatatcgcggattaaagaacct

SEQ ID NO: 343859 - DNA, 75 bp, synthetic construct
  source 1..75: mol_type = other DNA
atgtttttcaaaaagaacctcacaacagctgctatttgtgcagcactttctgttgcagcattcagtgccatggca

SEQ ID NO: 343860 - DNA, 75 bp, synthetic construct
  source 1..75: mol_type = other DNA
gacatcccgtctttttccgttctgtaccggtaaataccgctggcacggcagtgctgaggcgtataccggtcgtga

SEQ ID NO: 343861 - DNA, 75 bp, synthetic construct
  source 1..75: mol_type = other DNA
gaaatttaactgggaccgctataacccgtcaaaccaggaaagttcatgctggatccgtgtggcacaggcgtgggc

SEQ ID NO: 343862 - DNA, 75 bp, synthetic construct
  source 1..75: mol_type = other DNA
gattccacccggctggagcacagcctggcaacgcttgccgagcaactgaacctgtgctggcaagcggcgtcggcg

SEQ ID NO: 343863 - DNA, 75 bp, synthetic construct
  source 1..75: mol_type = other DNA
tagttgaagcgccagcgccgtcccgcccgatagcgcgcggcatcgcgggctccggattacttgcccgcgtgttaa

SEQ ID NO: 343864 - DNA, 75 bp, synthetic construct
  source 1..75: mol_type = other DNA
ggacgacgaattgcgctgacggggcatccgcaggcgaacctgaaccgggaatggcaggtggtggcgagcgatctt

SEQ ID NO: 343865 - DNA, 75 bp, synthetic construct
  source 1..75: mol_type = other DNA
tgcatcccgtctttttccgttctgtaccggcaaataccgctggcacggcagtgctgaggcgtataccggtcgtga

SEQ ID NO: 343866 - DNA, 75 bp, synthetic construct
  source 1..75: mol_type = other DNA
ccaacagcaccacgtcgtttggtcagatgatgtaccagaccggcagtggcgcaactgccacacagacccgtgacg

SEQ ID NO: 343867 - DNA, 75 bp, synthetic construct
  source 1..75: mol_type = other DNA
cgttaccggcacaccttccccgtgaaatacaccgtctggagtctgaagaaagttgttgcccggaatgtggcggcg

SEQ ID NO: 343868 - DNA, 75 bp, synthetic construct
  source 1..75: mol_type = other DNA
ccatgcgtattcaccgtcagcatccggcatcccgtcttttcccgttctgtaccggcaaataccgctggcacggca

SEQ ID NO: 343869 - DNA, 75 bp, synthetic construct
  source 1..75: mol_type = other DNA
atggtattcctgttcacgatactattgccagagttgtatcctgtatcagccctacaaaatttcatgagtgcttta

SEQ ID NO: 343870 - DNA, 75 bp, synthetic construct
  source 1..75: mol_type = other DNA
gtgctggggcgtatacaggtcgtgaagtacaggatattcccggtgtgctggctgtgtttgctgaacgccgtaagg

SEQ ID NO: 343871 - DNA, 75 bp, synthetic construct
  source 1..75: mol_type = other DNA
gggtttgtgtaagcccagaagaagaggatgtactggaatcagctgttggggagatcattcctggaactttaatgt

SEQ ID NO: 343872 - DNA, 75 bp, synthetic construct
  source 1..75: mol_type = other DNA
gaaaagatcgaagaagatgaacgggaaatagaacatctgcgggctcagatagaaaaactgcgccggatgctgttc

SEQ ID NO: 343873 - DNA, 75 bp, synthetic construct
  source 1..75: mol_type = other DNA
ctactgcggtggtatctggaatctgtacagtctgaacaacggcggagcatttatggcccccgaaccggatgacga

SEQ ID NO: 343874 - DNA, 75 bp, synthetic construct
  source 1..75: mol_type = other DNA
gatgtcaccctgccgctcagcgagcgccccggccacacgctggtgctcggtaccacccacgtcggcaagacccgg

SEQ ID NO: 343875 - DNA, 75 bp, synthetic construct
  source 1..75: mol_type = other DNA
ggcaactttaataacctgattatgctgcgagtgcgtgaaaccgctaccgctgaactgttgacgaaacaactgcca

SEQ ID NO: 343876 - DNA, 75 bp, synthetic construct
  source 1..75: mol_type = other DNA
tcgtgatactgcagagaaaaaactggcagaattaatccagcaactcgagtttgatataactgcagcagaactgtc

SEQ ID NO: 343877 - DNA, 75 bp, synthetic construct
  source 1..75: mol_type = other DNA
acctctggtgctaaaaacggatatctcaaaagttaataaggtaggtataaagaattggtcgtacaaagggacttg

SEQ ID NO: 343878 - DNA, 75 bp, synthetic construct
  source 1..75: mol_type = other DNA
gtggtatctggaatctgtacactctgaacaacggcggggcatttatggcccccgaaccggatgacgatgatgacg

SEQ ID NO: 343879 - DNA, 75 bp, synthetic construct
  source 1..75: mol_type = other DNA
tccgtggtgaccaaagactacacctttaaacgccccggctgggccggacgttttgatcaggaaggccagcaccag

SEQ ID NO: 343880 - DNA, 75 bp, synthetic construct
  source 1..75: mol_type = other DNA
gcattttggcctcattccacagtgggtgaccctggagccccgtgttttcggctggatggaccgtctgtgcgaaga

SEQ ID NO: 343881 - DNA, 75 bp, synthetic construct
  source 1..75: mol_type = other DNA
ggcacggcagtgctgaagcgtataccggtcgtgaagtgcaggatattcccggtgtgctggccgtgtttgctgaac

SEQ ID NO: 343882 - DNA, 75 bp, synthetic construct
  source 1..75: mol_type = other DNA
cgagtgtgacgctatgactggacactattatcgcttacgcgactacgcgctaaaccatccggaatgcagcgccat

SEQ ID NO: 343883 - DNA, 75 bp, synthetic construct
  source 1..75: mol_type = other DNA
cagcaccgtcatcgctggctgtggcgcattaatctgcctgacgcaggccccgctgctgatgctgacgccgtggca

SEQ ID NO: 343884 - DNA, 75 bp, synthetic construct
  source 1..75: mol_type = other DNA
caatacggcgtggcgcggggagtatgatgaatggggcaaccagcttaatgaggagaacccgcatcacctgcacca

SEQ ID NO: 343885 - DNA, 75 bp, synthetic construct
  source 1..75: mol_type = other DNA
gggcggtaagtctgggtcgtaaaaacttcctgttcttcggctctggccatggtggtgagcggggagcgctactgt

SEQ ID NO: 343886 - DNA, 75 bp, synthetic construct
  source 1..75: mol_type = other DNA
atatcaccacggaagccctgcagcgtatcggtgaactgtatgccatcgaggcagaagtccggggatgttcagcaa

SEQ ID NO: 343887 - DNA, 75 bp, synthetic construct
  source 1..75: mol_type = other DNA
ggaaaaactggctgttcgcaggttccgacagcggtggcgaacatgcggcggtgttgtactcgctgatcggcacat

SEQ ID NO: 343888 - DNA, 75 bp, synthetic construct
  source 1..75: mol_type = other DNA
ctggccgtgtttgctgaacgccgtaaggacagttttggcccgtatgtccggttgatgagcgtcaccctgaactga

SEQ ID NO: 343889 - DNA, 75 bp, synthetic construct
  source 1..75: mol_type = other DNA
cgtacaggatatcagcggcgtactggccgtgtacgctgaacgacgccgggaccgccacggcccgtacacccacct

SEQ ID NO: 343890 - DNA, 75 bp, synthetic construct
  source 1..75: mol_type = other DNA
accggaaaatatcagtggcacggtagcgtctgtcattacaccggtaaggtagttcctgacattcccggcgtgctg

SEQ ID NO: 343891 - DNA, 75 bp, synthetic construct
  source 1..75: mol_type = other DNA
ccgacagcggtggcgaacatgcggcggtgttgtactcgctaatcggcacatgccgtctgaacaatatagagccag

SEQ ID NO: 343892 - DNA, 75 bp, synthetic construct
  source 1..75: mol_type = other DNA
aaatgagcccggcagccgccggcattgccgcctgtctgatggcgtacagtcatcatgcctgtcgtacagagaatt

SEQ ID NO: 343893 - DNA, 75 bp, synthetic construct
  source 1..75: mol_type = other DNA
gtatctggaatctgtacacgctgaacaacggcggggcatttatggcgcccgaaccggatgacgatgatgacgaaa

SEQ ID NO: 343894 - DNA, 75 bp, synthetic construct
  source 1..75: mol_type = other DNA
ctgcgttacgttattgagcatctccaggactggccggcaaaccgggtacgcgatctgttgccctggaatgaggtg

SEQ ID NO: 343895 - DNA, 75 bp, synthetic construct
  source 1..75: mol_type = other DNA
ctgtgggtctacgtccgtgatgaccgtaacgccggttcggagatgcccccggcggtctggttcgcgtactgtccg

SEQ ID NO: 343896 - DNA, 75 bp, synthetic construct
  source 1..75: mol_type = other DNA
atggacacctcacttgctcatgagaatgcccgcctgcgggcactgttgcagacgcaacaggacaccatacgccag

SEQ ID NO: 343897 - DNA, 75 bp, synthetic construct
  source 1..75: mol_type = other DNA
gatcagtagccgccccgtggaaaaaatccgccagtggcgacagcgttatgcccgtccgatactggaagatctgtg

SEQ ID NO: 343898 - DNA, 75 bp, synthetic construct
  source 1..75: mol_type = other DNA
tgtgactgcatcgttgaagcaccggcaccatcccgtccgatagagcgtggtatcgcgggcccggagttacttgcc

SEQ ID NO: 343899 - DNA, 75 bp, synthetic construct
  source 1..75: mol_type = other DNA
gaggcggacaataacacagcggaaagagcgcttcgtgcagtctgtctcggaaagaaaaattacgtgttcttcggt

SEQ ID NO: 343900 - DNA, 75 bp, synthetic construct
  source 1..75: mol_type = other DNA
ggtgaagccatgcgtattcaccgtcagcatcctgcatcccgtctttttccgttctgtaccggtaaataccgctga

SEQ ID NO: 343901 - DNA, 75 bp, synthetic construct
  source 1..75: mol_type = other DNA
atgggtactgttcagtaccatgaacggtaaccgcgctgaaatgagcccggaagccgccggcattgctgcctgtct

SEQ ID NO: 343902 - DNA, 75 bp, synthetic construct
  source 1..75: mol_type = other DNA
cgaaacatgggtactgttcaatgccatgaacggtaaccgcgcagaaatgagcccggaagccgccggtagtcggtg

SEQ ID NO: 343903 - DNA, 75 bp, synthetic construct
  source 1..75: mol_type = other DNA
agcacgaaatacgcgggttgccggtgtctgaacgcctggcggtcaggcaaatgcagagtaaaccgctactgactt

SEQ ID NO: 343904 - DNA, 75 bp, synthetic construct
  source 1..75: mol_type = other DNA
atatcaccacggaagccctgcagcgtatcggtgaactgtatgccatcgaagcagaagtccggggatgttcagcag

SEQ ID NO: 343905 - DNA, 75 bp, synthetic construct
  source 1..75: mol_type = other DNA
cgggaaaatactgcgaacacctgccactgtatcgtcagagtgaaatctttgcccgtcagggtgtcgaactgagcc

SEQ ID NO: 343906 - DNA, 75 bp, synthetic construct
  source 1..75: mol_type = other DNA
atgttcttcggcagcgatcacggcggcgagcgtggagcactgttgtacgggctgatcggcacctgccgtctgaac

SEQ ID NO: 343907 - DNA, 75 bp, synthetic construct
  source 1..75: mol_type = other DNA
acaatgatatatacaacgacagtgcccgctggtccttttgaaataactgattatttgttatcaggctcaaattct

SEQ ID NO: 343908 - DNA, 75 bp, synthetic construct
  source 1..75: mol_type = other DNA
gcaggggaaacacccggagcaacacctccgccccttccggggtatcctgcaggcggatgcgttcacaggttatga

SEQ ID NO: 343909 - DNA, 72 bp, synthetic construct
  source 1..72: mol_type = other DNA
atgaaaatcatcacccgtggcgaagccatgcgtattcaccgtcagcatccggcatcccgtctttttccgttc

SEQ ID NO: 343910 - DNA, 75 bp, synthetic construct
  source 1..75: mol_type = other DNA
gtatctggaatctgtacacgctgaacaacggcggggcatttatggcacccgaaccggatgacgatgatggcgaaa

SEQ ID NO: 343911 - DNA, 75 bp, synthetic construct
  source 1..75: mol_type = other DNA
tgatgacgagacatgggtgctgtttaacgtcatgaacggtaaccgcgctgaaatgagcccggaagccgccggcat

SEQ ID NO: 343912 - DNA, 75 bp, synthetic construct
  source 1..75: mol_type = other DNA
aagccgccggcattgccgcctgcctgatggcctacagtcatcacgcctgccgtacggagcattatgccatgacgg

SEQ ID NO: 343913 - DNA, 75 bp, synthetic construct
  source 1..75: mol_type = other DNA
atgaaaaccgtttttcagaatacccccacaatttattcagctacaacaccagagaataatccgcctcagttggtt

SEQ ID NO: 343914 - DNA, 75 bp, synthetic construct
  source 1..75: mol_type = other DNA
tcgaaacacaacatccgaaactggcctgttgccggtgcgaccatatcgtgcaggctccggtgccttcaaaaccca

SEQ ID NO: 343915 - DNA, 75 bp, synthetic construct
  source 1..75: mol_type = other DNA
ccccgaatcttcggctggatggaccgtctgtgtgaagactacagtgggggtatctggaatatgtacaccctgaac

SEQ ID NO: 343916 - DNA, 75 bp, synthetic construct
  source 1..75: mol_type = other DNA
tttccgcaaccactgcatccgggaataatccacctcagctggttgccagcccagtgcctgacgaacagcgcatca

SEQ ID NO: 343917 - DNA, 75 bp, synthetic construct
  source 1..75: mol_type = other DNA
ccgtctgaacaatgtggaaccagaaaaatggctgcgttacgtcattgaacatatccaggactggccggaaaaccg

SEQ ID NO: 343918 - DNA, 75 bp, synthetic construct
  source 1..75: mol_type = other DNA
ggtaacggtataaatcctctagaagcttttaacacaattgttgataaaattgtggcttcaaatccagcatataaa

SEQ ID NO: 343919 - DNA, 75 bp, synthetic construct
  source 1..75: mol_type = other DNA
ctttactccctctcatttattcacattacaaggatttcatacatgaaaacattggtaagcgtgcagcaagaaccg

SEQ ID NO: 343920 - DNA, 75 bp, synthetic construct
  source 1..75: mol_type = other DNA
cacgttatcgaaaaaatgtaagcggctcgtcagaaccgtattgatatttactgagagctcagatcaactttccag

SEQ ID NO: 343921 - DNA, 75 bp, synthetic construct
  source 1..75: mol_type = other DNA
gggagcttcgttatatcgcggattaaagaacctgaaacagtcagactgtattgaaccgccccgggaatcctggag

SEQ ID NO: 343922 - DNA, 75 bp, synthetic construct
  source 1..75: mol_type = other DNA
gctgaatgctctgtttgcaggtaatcttgatgaaaagacggctatgaaaatattgcctgatattactcgttatgc

SEQ ID NO: 343923 - DNA, 75 bp, synthetic construct
  source 1..75: mol_type = other DNA
ctcctgcagggggagttccgtctgctggcggtactgctctggggcgcacctggtccgctatccggggtggtgcag

SEQ ID NO: 343924 - DNA, 75 bp, synthetic construct
  source 1..75: mol_type = other DNA
gtatctggaatctgtacacactgaacaacggcggggcatttatggcacccgaaccggatgacgatgatgacgaaa

SEQ ID NO: 343925 - DNA, 75 bp, synthetic construct
  source 1..75: mol_type = other DNA
gtggccctggagccccgtgtcttcggctggatggaccgtctgtgtgaagactactgcggtggtatctggaatctg

SEQ ID NO: 343926 - DNA, 75 bp, synthetic construct
  source 1..75: mol_type = other DNA
cgggctgggtggatgcatgctgccggctgctgtctccgctggaagaggcgcttcatggctatgtcatgactgacg

SEQ ID NO: 343927 - DNA, 75 bp, synthetic construct
  source 1..75: mol_type = other DNA
gtatctggaatctgtacaccctgaacaacggcggggcatttatggcccccgaaccggatgacgatgatgacgaaa

SEQ ID NO: 343928 - DNA, 75 bp, synthetic construct
  source 1..75: mol_type = other DNA
gtatctggaatctgtacaccctgaacaacggcggggcatttatggcacccgaaccggatgacgatgatgccgaaa

SEQ ID NO: 343929 - DNA, 75 bp, synthetic construct
  source 1..75: mol_type = other DNA
gtatctggaatctgtacactctgaacaacggcggggcatttatggctcccgaaccggatgacgatgatgacgaaa

SEQ ID NO: 343930 - DNA, 75 bp, synthetic construct
  source 1..75: mol_type = other DNA
ccggagcaacaccttcgtcccttccggggtatcctgcaggcagatgcgttcgcaggttacgatcggctgttcagt

SEQ ID NO: 343931 - DNA, 75 bp, synthetic construct
  source 1..75: mol_type = other DNA
acctcttcgcataattccaccacaccttctgtttccgtggccgctgcatcagggaataaccagtctcagttggtt

SEQ ID NO: 343932 - DNA, 75 bp, synthetic construct
  source 1..75: mol_type = other DNA
tacaccctgaacaacggcggcgcatttatggcccccgaaccggatgatgatgacgacgaaacatgggtactgttc

SEQ ID NO: 343933 - DNA, 75 bp, synthetic construct
  source 1..75: mol_type = other DNA
tattttaaagatgagaaaccaacttatgctcgaatgacagcacatctcccgaacaaaaatgagtcttacgaatgt

SEQ ID NO: 343934 - DNA, 75 bp, synthetic construct
  source 1..75: mol_type = other DNA
cctgaacgcctggcggtcaggcaaatgcagagtaaaccgctactgacttccctgtataagctgatgcaggagaaa

SEQ ID NO: 343935 - DNA, 75 bp, synthetic construct
  source 1..75: mol_type = other DNA
gttgcatcagacccgcacccgtaagccgttccctgaatcactaccccgtgacgaaaagcgactgttgcctgcggc

SEQ ID NO: 343936 - DNA, 75 bp, synthetic construct
  source 1..75: mol_type = other DNA
gttgtggtaaaccagccgacgatccccatcacctgattggccatgggcagggaggaatggggacaaaatcccacg

SEQ ID NO: 343937 - DNA, 75 bp, synthetic construct
  source 1..75: mol_type = other DNA
gaatccatgccggtattccacaatacccgggtactggtggagccggaaccgaaaagcatgcgtaatctgccgtcc

SEQ ID NO: 343938 - DNA, 75 bp, synthetic construct
  source 1..75: mol_type = other DNA
ggagaacagacagccatcagcatactgaagcagcgcacaaaaaatattgcgctgccacttcacgtccaccagcaa

SEQ ID NO: 343939 - DNA, 75 bp, synthetic construct
  source 1..75: mol_type = other DNA
tacgcgctgggtaaagacacagccgtgtgcgtgttgtggtaagccagccgacgatccccatcacctgattggtca

SEQ ID NO: 343940 - DNA, 75 bp, synthetic construct
  source 1..75: mol_type = other DNA
acgcgctgggtaaagacacagccgtgtgcgtgttgtggtaagcctgctgacgatccgcatcacctgattggtcat

SEQ ID NO: 343941 - DNA, 75 bp, synthetic construct
  source 1..75: mol_type = other DNA
ggcactgcgacaaccagctgcgcgaccagacctccgaatcactcgggcaacttgctcaccaaaacctgtgtgcat

SEQ ID NO: 343942 - DNA, 75 bp, synthetic construct
  source 1..75: mol_type = other DNA
ggcaacttgctcatcaaaacttgtcagcatggatgattgacgtcatccgtcacgcaatcagcggtacgcaggaga

SEQ ID NO: 343943 - DNA, 75 bp, synthetic construct
  source 1..75: mol_type = other DNA
agcatggatgattgatgtcatacgccatgcaatgaatggcacgcaggagcgggaattatcgctggctgaattatc

SEQ ID NO: 343944 - DNA, 75 bp, synthetic construct
  source 1..75: mol_type = other DNA
cacaggaaaagacggtggtaagcatcgccgttgatccggaggcaccggctcagtatctccagcgccagaaaccac

SEQ ID NO: 343945 - DNA, 75 bp, synthetic construct
  source 1..75: mol_type = other DNA
gcggacgcgctaccggaggcagtattgcgtcgttcgctgggattacgtgcggaaaaaatccgcccggtgtaccgc

SEQ ID NO: 343946 - DNA, 75 bp, synthetic construct
  source 1..75: mol_type = other DNA
aggataaatcattactgccatttttcagcgatgagcgggtgattcgtgctgctggcggcgctggtgcactgtctg

SEQ ID NO: 343947 - DNA, 75 bp, synthetic construct
  source 1..75: mol_type = other DNA
atcatcacagtgaaaccgttattcaccgttatggtaccggcgcaatggtgttgtgctggcactgcgacaaccagc

SEQ ID NO: 343948 - DNA, 75 bp, synthetic construct
  source 1..75: mol_type = other DNA
atgattgacgtcatcggtcacgcaataagcggtacgcaggagcgtgaattatctctggctgaattatcctggtgg

SEQ ID NO: 343949 - DNA, 75 bp, synthetic construct
  source 1..75: mol_type = other DNA
gcgcgggctgccgtccggggtcgttcctgccgctcgccagccgctggcggaagataaatctctgctgccattttt

SEQ ID NO: 343950 - DNA, 75 bp, synthetic construct
  source 1..75: mol_type = other DNA
gggagggatgggaacaaaggcccacgatattttcacgctaccgttgtgccgggaacatcacaacgaacttcatgc

SEQ ID NO: 343951 - DNA, 75 bp, synthetic construct
  source 1..75: mol_type = other DNA
gctggttacttcgtgaaaaaggctgccagtggcctcattccggatggcacagcgagaacatgaccacaatgcgac

SEQ ID NO: 343952 - DNA, 75 bp, synthetic construct
  source 1..75: mol_type = other DNA
gtgggcggtccgcaatcaggtggcggacgcgctaccggaggccgtattacgtcgttctctggggttacgtgcgga

SEQ ID NO: 343953 - DNA, 75 bp, synthetic construct
  source 1..75: mol_type = other DNA
cctgccgttcgccagccgctggcggaggataaatcattactgccgtttttcagtaacgcacgggtgattcgtgct

SEQ ID NO: 343954 - DNA, 75 bp, synthetic construct
  source 1..75: mol_type = other DNA
tgtgtcgggagcatcacaacgagcttcatgcggatccgcaggcattcgaagaaaagcatggttctcaggttgatt

SEQ ID NO: 343955 - DNA, 75 bp, synthetic construct
  source 1..75: mol_type = other DNA
tcagtggcctcattccgactggcacagcgagaacatgaccacaatgcgacacgcgccgggcgcaatccgtctgtg

SEQ ID NO: 343956 - DNA, 75 bp, synthetic construct
  source 1..75: mol_type = other DNA
caatggcaacggataactgtgcccgctgggtgttatctgttgtgcgccgtgatctcggttttgatgacagtcacg

SEQ ID NO: 343957 - DNA, 75 bp, synthetic construct
  source 1..75: mol_type = other DNA
accaactgcgtgacctgacatcggaatcactggagctgcttgctcaacaaaatctgacagcatgggtgattgacg

SEQ ID NO: 343958 - DNA, 75 bp, synthetic construct
  source 1..75: mol_type = other DNA
catcacactgaaacagtcattcaccgttatggtaccggcgcaatggtgttgtgttggcactgcgacaaccaactg

SEQ ID NO: 343959 - DNA, 75 bp, synthetic construct
  source 1..75: mol_type = other DNA
catcacagcgaaactgtcatacatcgttacggtaccggcgcgatggtgttgtgctggcactgcgacaaccagctg

SEQ ID NO: 343960 - DNA, 75 bp, synthetic construct
  source 1..75: mol_type = other DNA
tggtgccggaacttggggtggttatcgttaagcctggtcgtgaatccatgcaggtattccataacggcagagtgc

SEQ ID NO: 343961 - DNA, 75 bp, synthetic construct
  source 1..75: mol_type = other DNA
tacgtcgttctctgggattgcgtgcggaaaaaatccactcggtgtatcgcgaaagcgacatcgtaccgggagagc

SEQ ID NO: 343962 - DNA, 75 bp, synthetic construct
  source 1..75: mol_type = other DNA
gtgcgggtattgcttcgacctgttcctgtaccggaacttgggctggtggtccttaagcctggccgtgaatccatg

SEQ ID NO: 343963 - DNA, 75 bp, synthetic construct
  source 1..75: mol_type = other DNA
aggccgccaccagcatactgaagcagcgcacaaaaaatattgcgctgccacttcacgtccaccagcaacaaaatc

SEQ ID NO: 343964 - DNA, 75 bp, synthetic construct
  source 1..75: mol_type = other DNA
ccgtaatgaggcagtgatccgtcgtgctggtggggtggaatgtcttgaaagctggttacttcgtgaaaaaggctg

SEQ ID NO: 343965 - DNA, 75 bp, synthetic construct
  source 1..75: mol_type = other DNA
gcgcacaaaaaatattgcgctgccacttcacgtccaccagcaacagcccccaccccaggaaaagacgttagtaag

SEQ ID NO: 343966 - DNA, 75 bp, synthetic construct
  source 1..75: mol_type = other DNA
cgttcgaagaaaagcatggttctcaggttgatttaatttttcgttttcttgatcacgcctttgcaactggcgtgc

SEQ ID NO: 343967 - DNA, 75 bp, synthetic construct
  source 1..75: mol_type = other DNA
ggaaaaaatctgctcggtgtaccgcgagagcgacatcgtaccgggagagcagaccgccaccagcatattgaaaca

SEQ ID NO: 343968 - DNA, 75 bp, synthetic construct
  source 1..75: mol_type = other DNA
tcagtacccacacagcgagtggcatgatcgcaactacaccatcacccggcatgcgcctggctcaatccgcacgtg

SEQ ID NO: 343969 - DNA, 75 bp, synthetic construct
  source 1..75: mol_type = other DNA
ttggtcatggtcagggcggaatggggacaaaatctcacgatattttcacgctaccgctgtgtcgggagcatcaca

SEQ ID NO: 343970 - DNA, 75 bp, synthetic construct
  source 1..75: mol_type = other DNA
agtgaccttgttccttcggttcctgccaccagcattatccaggataaagcgaaaaaggtgctggcgctgaaagtg

SEQ ID NO: 343971 - DNA, 75 bp, synthetic construct
  source 1..75: mol_type = other DNA
gttaagacgcagccgtgtgcatgttgtggaaagcctgcagatgatccccaccacctgatagtccacggtcagggt

SEQ ID NO: 343972 - DNA, 75 bp, synthetic construct
  source 1..75: mol_type = other DNA
actgtggcatttgaagataaatatggctctcaactggagctgatatttcgttttatcgatcgtgtgctggcaact

SEQ ID NO: 343973 - DNA, 75 bp, synthetic construct
  source 1..75: mol_type = other DNA
ctttgaagcgggaacatttagcggcagcgaagggacgctgaatacctggtacgtccagccacaggtgcaaatcac

SEQ ID NO: 343974 - DNA, 75 bp, synthetic construct
  source 1..75: mol_type = other DNA
taatctgccgtccggggtcgttcctgccgttcgccagccgctggaggaagataaagcattcctgccatttttcag

SEQ ID NO: 343975 - DNA, 75 bp, synthetic construct
  source 1..75: mol_type = other DNA
ccagcatcatccaggataaagcgaaaaaggtgctggcgctgaaagtggatccggagtcgccggagtcttttatgt

SEQ ID NO: 343976 - DNA, 75 bp, synthetic construct
  source 1..75: mol_type = other DNA
caaaatctgatatttacttggcgtgaatatgcacacagtatagaagaaaataaatccatgctatcctttttatct

SEQ ID NO: 343977 - DNA, 75 bp, synthetic construct
  source 1..75: mol_type = other DNA
ttgatccggagtctccggaatccttcatgaaacgacctaaacgtcgccgctgggtaaatgagaaatacacacgct

SEQ ID NO: 343978 - DNA, 75 bp, synthetic construct
  source 1..75: mol_type = other DNA
atgcgggtattgcttcgacctgttctggtaccggaactcggactggttatcgttaagcctggccgtgaatccatg

SEQ ID NO: 343979 - DNA, 75 bp, synthetic construct
  source 1..75: mol_type = other DNA
gggaattatcgctggctgaattgtgctgctgggcttctgtaaatgatgtagtggatgccatgaccgaaaatatgg

SEQ ID NO: 343980 - DNA, 75 bp, synthetic construct
  source 1..75: mol_type = other DNA
ttaccgaagcctgttgtgccgtctgtcacccgggaaagtgaccttgtgccttcggttcctgccaccagcatcatc

SEQ ID NO: 343981 - DNA, 75 bp, synthetic construct
  source 1..75: mol_type = other DNA
taatctgccgtccggggtcgttcctgccgttcgccagccgctggaggacgataaagcattgctgccgtttttcag

SEQ ID NO: 343982 - DNA, 75 bp, synthetic construct
  source 1..75: mol_type = other DNA
taatctgccgtccggggtcgttcctgccgttcgccagccgctggaggacgataaagcattcctgccctttttcag

SEQ ID NO: 343983 - DNA, 75 bp, synthetic construct
  source 1..75: mol_type = other DNA
taatctgccgtccggggtcgttcctgccgttcgccagccgctggaggacgataaagcattactgccatttttcag

SEQ ID NO: 343984 - DNA, 75 bp, synthetic construct
  source 1..75: mol_type = other DNA
tgtgtgtgttgtggtaagccagctgacgatccgcatcacctgattggtcatggtcaggggggaatggggacaaag

SEQ ID NO: 343985 - DNA, 75 bp, synthetic construct
  source 1..75: mol_type = other DNA
ctctcctcggtgaacaccagtaagacgatactttcctatgaagttcaggccggggttttccgctttattgactac

SEQ ID NO: 343986 - DNA, 75 bp, synthetic construct
  source 1..75: mol_type = other DNA
taatctgccgtccggggtcgttcctgccgttcgccagccgctggaggaggataaagcattcctgccgtttttcag

SEQ ID NO: 343987 - DNA, 75 bp, synthetic construct
  source 1..75: mol_type = other DNA
cttgacgacaagcgcctcatcaagtcatttgacgacgccgtaaataatgtacccgatgctaaagccgattgggtg

SEQ ID NO: 343988 - DNA, 75 bp, synthetic construct
  source 1..75: mol_type = other DNA
gcacaccgggattcttcggtcttggcggtgggatcaacagtgaaaacgacgacaccattctcgtggtgctgatca

SEQ ID NO: 343989 - DNA, 75 bp, synthetic construct
  source 1..75: mol_type = other DNA
gcaaacccattaccgataaaacagtgttgattcactatacagggataactaaaccatggcatagctgggctggat

SEQ ID NO: 343990 - DNA, 75 bp, synthetic construct
  source 1..75: mol_type = other DNA
gataaagtaactccgtcacagtgggctgcaatcggtgtgctgggtagcctggtttttggcctgctgacgtatctg

SEQ ID NO: 343991 - DNA, 75 bp, synthetic construct
  source 1..75: mol_type = other DNA
gtttccccgtctcagtgggcggcaataggcgtgctggggagtctgctgtttggtctgctgacatatctgactaac

SEQ ID NO: 343992 - DNA, 75 bp, synthetic construct
  source 1..75: mol_type = other DNA
ggcgattggtctctccagcgattgaagaaaggcggcgcggacaagaagccaaccccgacgtatatccatgttttc

SEQ ID NO: 343993 - DNA, 75 bp, synthetic construct
  source 1..75: mol_type = other DNA
agctgcatgcggataccgtggcatttgaagagaagtatggctcccagctggagctgatatttcgttttatcgatc

SEQ ID NO: 343994 - DNA, 75 bp, synthetic construct
  source 1..75: mol_type = other DNA
atgcacgacgagcggacccaccactaccattacgacagccagcaccgtctggtgttctacacgcggatacagcac

SEQ ID NO: 343995 - DNA, 75 bp, synthetic construct
  source 1..75: mol_type = other DNA
cgacaaaaataaatgtaatttataattcattaaattatgaagagcaaaaaaaatatcgatctttattgcaaaata

SEQ ID NO: 343996 - DNA, 75 bp, synthetic construct
  source 1..75: mol_type = other DNA
gtgacgtttgtaccactgagtccgatcccgttaaaagatcgcacctctatgatcttcctccagtacggtcaaatc

SEQ ID NO: 343997 - DNA, 75 bp, synthetic construct
  source 1..75: mol_type = other DNA
atggataagttaacaacaggtgtcgcctatggcacatcggcaggtaatgccggcttctgggcactgcagttactc

SEQ ID NO: 343998 - DNA, 75 bp, synthetic construct
  source 1..75: mol_type = other DNA
tggcacattatggtgtcgttgtaagcgatacgcagcagaccgctggcggcatatatatctggctctatatggctc

SEQ ID NO: 343999 - DNA, 75 bp, synthetic construct
  source 1..75: mol_type = other DNA
aggtgtgctgggaagtctgctgtttggcctgctgacgtatctgacaaatctttatttcaagattaaagaagataa

SEQ ID NO: 344000 - DNA, 75 bp, synthetic construct
  source 1..75: mol_type = other DNA
atggccttttttctttccggtagcacaggtctgttggggcgggatatgtatcagatggaaaaaatatcaacaggc

SEQ ID NO: 344001 - DNA, 75 bp, synthetic construct
  source 1..75: mol_type = other DNA
ctggcattgcctacggaacatccgctggtagtgcgggatactggtttttacagtggttggatcaggtcagtccat

SEQ ID NO: 344002 - DNA, 75 bp, synthetic construct
  source 1..75: mol_type = other DNA
ctgctgtttggcctgctgacgtatctgactaacctgtatttcaaaattaaagaggaccgtcgcaaggctgcccgg

SEQ ID NO: 344003 - DNA, 75 bp, synthetic construct
  source 1..75: mol_type = other DNA
actgctggagccgctgtatgacgtcctgcgccagtatgtgctgatgcccggtaaagtccatgctgatgatatccc

SEQ ID NO: 344004 - DNA, 75 bp, synthetic construct
  source 1..75: mol_type = other DNA
ggcactgggctttctgacttatctgacgaatctgtatttcaagattaaagaggaccgtcgcaaagcggcgcgggg

SEQ ID NO: 344005 - DNA, 75 bp, synthetic construct
  source 1..75: mol_type = other DNA
cctatggtacttctgcaggcagtgccggctactggtttttacagtggcttgatcaggtcagtccgtcacagtggg

SEQ ID NO: 344006 - DNA, 75 bp, synthetic construct
  source 1..75: mol_type = other DNA
ttgtttttctttactttcattttctgtcggcggtgacggagacatacatcagatggaaaaaatcacaacaggtgt

SEQ ID NO: 344007 - DNA, 75 bp, synthetic construct
  source 1..75: mol_type = other DNA
gtgtgctggggagtctgctgtttggcctgctgacgtatctgactaacctgtatttcaaaatcagagaggaccgtc

SEQ ID NO: 344008 - DNA, 75 bp, synthetic construct
  source 1..75: mol_type = other DNA
ggagtctgctgtttgggctgctgacatatctgactaacctgtatttcaaaatcagagaggaccgtcgtaaggcgg

SEQ ID NO: 344009 - DNA, 75 bp, synthetic construct
  source 1..75: mol_type = other DNA
ataggtgtgctggggagtctgctgtttggcctgctgacgtatctgactaacctgtatttcaaaatcagagaggac

SEQ ID NO: 344010 - DNA, 69 bp, synthetic construct
  source 1..69: mol_type = other DNA
atgtaccagatggaaaaaatcacaacaggtgtgtcatacaccacgtcagcggtgggaacgggctactgg

SEQ ID NO: 344011 - DNA, 75 bp, synthetic construct
  source 1..75: mol_type = other DNA
tggtgtcctggcgagtgtgtttctgggggtgctgacgtacctgacgaatctgtatttcaggattaaagaggaccg

SEQ ID NO: 344012 - DNA, 75 bp, synthetic construct
  source 1..75: mol_type = other DNA
gcagacggtggagaacccggagacaggggagatgctgtgggagcatgagacggggcatgcgtacagcgaacaggg

SEQ ID NO: 344013 - DNA, 75 bp, synthetic construct
  source 1..75: mol_type = other DNA
cgtgaccagacatccgaatcactcgggcaacttgctcatcaaaatctggcagcctggatgattggcgtcatccgc

SEQ ID NO: 344014 - DNA, 75 bp, synthetic construct
  source 1..75: mol_type = other DNA
actggctcctgcgtcatgttaaatcctgccagtggcctcatagtgactaccatcacagtgaaatcgtcatacatc

SEQ ID NO: 344015 - DNA, 75 bp, synthetic construct
  source 1..75: mol_type = other DNA
gtgaattatcgctggctgaattatcctggtgggcggtctgcaatcaggtggctgatgcgcttcctgagtctgtat

SEQ ID NO: 344016 - DNA, 75 bp, synthetic construct
  source 1..75: mol_type = other DNA
cctgccgttcgccagccgttggcggaagataaatcattactgccatttttcagcgatgagcgggtgattcgtgcg

SEQ ID NO: 344017 - DNA, 75 bp, synthetic construct
  source 1..75: mol_type = other DNA
tgcgacaaccaactgcgtgaccagacatccgaatcactcgagcaacttgctcatcaaaacctgtcagcatggatg

SEQ ID NO: 344018 - DNA, 75 bp, synthetic construct
  source 1..75: mol_type = other DNA
gtgctggcactgcgacaaccagctgcgtgaccagacttccgaatcactcgggcagcttgctcaccaaaatttgtc

SEQ ID NO: 344019 - DNA, 75 bp, synthetic construct
  source 1..75: mol_type = other DNA
ctggtgggcggtctgcaatcaggtggcggacgcgctaccggaggcagtattacgtcgttctctggggttacgtgc

SEQ ID NO: 344020 - DNA, 75 bp, synthetic construct
  source 1..75: mol_type = other DNA
gcgtggtctgccgtccggagttgttcctgccgttcgccagccgctggcggaagataaatcattactgccattttt

SEQ ID NO: 344021 - DNA, 75 bp, synthetic construct
  source 1..75: mol_type = other DNA
cattgccgttgatcctgagtctccggaatctttcatgaagcgacctaaacgtcgccgttgggtaaatgagaaata

SEQ ID NO: 344022 - DNA, 75 bp, synthetic construct
  source 1..75: mol_type = other DNA
gctggtagtgctggtgcattgtctgactggctgttgcgccatattaaatcctgccagtggccacacggcgattat

SEQ ID NO: 344023 - DNA, 75 bp, synthetic construct
  source 1..75: mol_type = other DNA
gcatgcagataccttggcatttgaagagaaatatggttcccaactggagctgatatatcgttttatcgatcgcgc

SEQ ID NO: 344024 - DNA, 75 bp, synthetic construct
  source 1..75: mol_type = other DNA
gcgcacaaaaaatcttgcgccgttgcctcactcccaccagcaaaacccgccacaggaaaagacggtggtaaacat

SEQ ID NO: 344025 - DNA, 75 bp, synthetic construct
  source 1..75: mol_type = other DNA
gcgccatgtcaaatcctgccagtggccacacggcgattatcatcacagcgaaaccgtcattcaccgttatggtac

SEQ ID NO: 344026 - DNA, 75 bp, synthetic construct
  source 1..75: mol_type = other DNA
tgaatggcacacaggagcgtgaattatcgctggctgaattatcctggtgggcggcctgcaatcaggtggtggatg

SEQ ID NO: 344027 - DNA, 75 bp, synthetic construct
  source 1..75: mol_type = other DNA
gtcacgcaataagcggtacgcaggagcgtgaattatctttggctgaattatcctggtgggcggtccgcaatcagg

SEQ ID NO: 344028 - DNA, 75 bp, synthetic construct
  source 1..75: mol_type = other DNA
tcagggcggaatggggacaaaatctcacgatattttcacgctaccgctgtgtcgggagcatcacaacgagcttca

SEQ ID NO: 344029 - DNA, 75 bp, synthetic construct
  source 1..75: mol_type = other DNA
atgcacttgatgataagaagcaattattaaaagagttaagtgatgaattatattcaatcagtgacagggaaaaat

SEQ ID NO: 344030 - DNA, 75 bp, synthetic construct
  source 1..75: mol_type = other DNA
cccccggcgatagctggcgccaggccagtattattggtagccagtttacggctcactatacccgccatggcgaga

SEQ ID NO: 344031 - DNA, 75 bp, synthetic construct
  source 1..75: mol_type = other DNA
agtcatcctgtttacctctttctcagggagtttagtctccaggatttccggggcggttcagatgatccccaccat

SEQ ID NO: 344032 - DNA, 75 bp, synthetic construct
  source 1..75: mol_type = other DNA
tcatgcagatccgttggcgttcgaagaaaagcatggttctcaggttgatttaatttttcgttttcttgatcacgc

SEQ ID NO: 344033 - DNA, 75 bp, synthetic construct
  source 1..75: mol_type = other DNA
cctgccgttcgccagccgctggcagaggataaaacattactgtcatttttcagcgatgagcgggttattcgtgca

SEQ ID NO: 344034 - DNA, 75 bp, synthetic construct
  source 1..75: mol_type = other DNA
gggttaatgaaaagtacacgcgctgggttaagacacagccgtgtgcatgttgtggaaagcccgctgatgatcccc

SEQ ID NO: 344035 - DNA, 75 bp, synthetic construct
  source 1..75: mol_type = other DNA
cctcacgcccaccaggaacaacacccactacaggaaaagacggtggtaagcattgccgttgatcctgagtctccg

SEQ ID NO: 344036 - DNA, 75 bp, synthetic construct
  source 1..75: mol_type = other DNA
ctgccagtggccacacggcgattatcatcacagcgaaaccgtcattcaccgttacggtaccggcgcgatggtgtt

SEQ ID NO: 344037 - DNA, 75 bp, synthetic construct
  source 1..75: mol_type = other DNA
gttatggtaccggcgcgatggtgttgtgctggcactgtgacaaccagctgcgcgaccagacatcagaatcactcg

SEQ ID NO: 344038 - DNA, 75 bp, synthetic construct
  source 1..75: mol_type = other DNA
gtgctgaagcgtataccagtcgtgaagtgcaggatattcccggtgtgctggccgtgtttgcagaacgccgtaagg

SEQ ID NO: 344039 - DNA, 75 bp, synthetic construct
  source 1..75: mol_type = other DNA
gggctgatcggtacctgccgactgaacggtatcgatccggaagcgtatctgcgccatatcctgagcgtgctgccg

SEQ ID NO: 344040 - DNA, 75 bp, synthetic construct
  source 1..75: mol_type = other DNA
ggaagcgtatctgcgccatatcctgagcgtactgccggaatggccttccaaccgagttgacgaactcctgccatg

SEQ ID NO: 344041 - DNA, 75 bp, synthetic construct
  source 1..75: mol_type = other DNA
gcacgtaatcagcaagcgttacactcagcgcattgagcgacataacctgaatctgagacaacatctggcaaggct

SEQ ID NO: 344042 - DNA, 75 bp, synthetic construct
  source 1..75: mol_type = other DNA
tcgctgcgctggaagacgcgcttcgccagaaagacagtcagctcagtctcgttgcagagactgagtcgttcctgc

SEQ ID NO: 344043 - DNA, 75 bp, synthetic construct
  source 1..75: mol_type = other DNA
ggtaaccgcgctgaaatgagcccggaagccgccggcattgctgcctgtctgatggcgtacagtcatcatgcctgt

SEQ ID NO: 344044 - DNA, 75 bp, synthetic construct
  source 1..75: mol_type = other DNA
gcgtatctgcgccatatcctgagcgtactgccggaatggccttccaaccgagttgacgaactgctgccatggaac

SEQ ID NO: 344045 - DNA, 75 bp, synthetic construct
  source 1..75: mol_type = other DNA
acgcctggcggtcaggcaaatgcagagtaaaccgctactgacttccctgtataagcttatgcaggagaaagaaca

SEQ ID NO: 344046 - DNA, 75 bp, synthetic construct
  source 1..75: mol_type = other DNA
ctgcgaacacctgccactgtatcgtcagagtgaaatctttgcccgacagggtgtcgaactgagccgtgcattact

SEQ ID NO: 344047 - DNA, 75 bp, synthetic construct
  source 1..75: mol_type = other DNA
gcactgttgtacgggctgatcggcacctgccgtctgaacggtatcgatccggaagcgtatctgcgccatatcctg

SEQ ID NO: 344048 - DNA, 75 bp, synthetic construct
  source 1..75: mol_type = other DNA
ctccggctggctggataagctgtagtgatgcagttcctgctgaatattgcgatgtgattcttctcgatgatctcg

SEQ ID NO: 344049 - DNA, 75 bp, synthetic construct
  source 1..75: mol_type = other DNA
gcacgttatcagcaagcgttacactcagcgcattgagcgacataacctgaatctgagactacatctggcaaggct

SEQ ID NO: 344050 - DNA, 75 bp, synthetic construct
  source 1..75: mol_type = other DNA
cataacctgaatctgaggcagcatctggcaaggctgggcaggaagtcactgtcgttctcaaaatcggtggagctg

SEQ ID NO: 344051 - DNA, 75 bp, synthetic construct
  source 1..75: mol_type = other DNA
atatactgatggctggaacgcttgccgtgtcgccatgcttcaggccgaaaactttcgggaaagtaagaattcgtc

SEQ ID NO: 344052 - DNA, 75 bp, synthetic construct
  source 1..75: mol_type = other DNA
gtggcgcacgtcttcggtgaacgcactctggccacattggagcgtcttctgagcctgctgtcggcctttgaggtc

SEQ ID NO: 344053 - DNA, 75 bp, synthetic construct
  source 1..75: mol_type = other DNA
ccatgcgtattcaccaacaacatccgacatcccgtcttttcccgttctgtaccggtaaataccgctggcacggca

SEQ ID NO: 344054 - DNA, 75 bp, synthetic construct
  source 1..75: mol_type = other DNA
cgccagttcaggcacgctcaacaatgtgacgataaaccaggactgtgtgattaagggaaatttatctgcagcaca

SEQ ID NO: 344055 - DNA, 75 bp, synthetic construct
  source 1..75: mol_type = other DNA
aaatatgcagaccatctgccgttataccgccagtcagagatataccgtcgtcagggtgtggagctgagccgtgcc

SEQ ID NO: 344056 - DNA, 75 bp, synthetic construct
  source 1..75: mol_type = other DNA
gaaaagtggctgcgttacgtcattgaacatatccaggactggccggcaaaccgggtacgcgatctgttgccctgg

SEQ ID NO: 344057 - DNA, 75 bp, synthetic construct
  source 1..75: mol_type = other DNA
aacgacgtgttcctgaaacgcctgacggctccgaccattaccagcggcggtaatcctccggcattttccctgaca

SEQ ID NO: 344058 - DNA, 75 bp, synthetic construct
  source 1..75: mol_type = other DNA
ggcattcagcggcgctaaacatgagcgggagaataacgatatttattcgtcatgccgcctgatagtacggaaaaa

SEQ ID NO: 344059 - DNA, 75 bp, synthetic construct
  source 1..75: mol_type = other DNA
tcgaaacacaacgtccgaaactggcctgttgtcggtgcgaccatatcgtgcaggcaccagtaccttcaaaaccca

SEQ ID NO: 344060 - DNA, 75 bp, synthetic construct
  source 1..75: mol_type = other DNA
ccatgcgtattcaccgtcagcatccggcatcccgtcttttttcgttctgtaccggcaaataccgctggcacggca

SEQ ID NO: 344061 - DNA, 75 bp, synthetic construct
  source 1..75: mol_type = other DNA
gtatcagcttctggccgcagcattttggcctcattccacagtgggtgaccctggagccccgtgtcttcggctgga

SEQ ID NO: 344062 - DNA, 75 bp, synthetic construct
  source 1..75: mol_type = other DNA
aaaaatggctgcgttacgtcattgagcatatccaggactggccgacaaaccgggtacgcgatctgttgccctgga

SEQ ID NO: 344063 - DNA, 75 bp, synthetic construct
  source 1..75: mol_type = other DNA
atgcagttcggtaaaagctcagaaaaacttcgtgcaaaaaccgaacggcagatacaggaagcacaggagcgaatc

SEQ ID NO: 344064 - DNA, 75 bp, synthetic construct
  source 1..75: mol_type = other DNA
gaggcagaggtccggggctgttcagcagaacagcgtctggcggcaagaaaagccagagccgcgccactgatgcag

SEQ ID NO: 344065 - DNA, 75 bp, synthetic construct
  source 1..75: mol_type = other DNA
tgcgttacgtcattgatcatatccaggactggccggcaaaccgggtacgcgatctgttgctctggaaagttgatc

SEQ ID NO: 344066 - DNA, 75 bp, synthetic construct
  source 1..75: mol_type = other DNA
cgcgtgctgccagttaatgactccgctgaatgatgccctgtaccgttatgtaatgaacacccgcaaggttcacac

SEQ ID NO: 344067 - DNA, 75 bp, synthetic construct
  source 1..75: mol_type = other DNA
agtgatccgcactgttcgggtaaaaaaagcctgtacaaaatgtgactatatagttgaagcgccagcgccgtcccg

SEQ ID NO: 344068 - DNA, 75 bp, synthetic construct
  source 1..75: mol_type = other DNA
taccgtcagagtgaaatctttgcccgtcagggcgtcgagctgagccgtgcattactctccaactgggttgacaca

SEQ ID NO: 344069 - DNA, 75 bp, synthetic construct
  source 1..75: mol_type = other DNA
tccgtaccccgtcagccctgacggaggaggcgctgaaacggatcggcgagctgtatgccatcgagtcggagctca

SEQ ID NO: 344070 - DNA, 75 bp, synthetic construct
  source 1..75: mol_type = other DNA
gctgggtggatgcgtgttgtcgtctgctggcaccgctggatgaagcccttcagcactatgtcctgaccgacggca

SEQ ID NO: 344071 - DNA, 75 bp, synthetic construct
  source 1..75: mol_type = other DNA
cggcgaagcgacgccttgcagaacgtcagcaaaaagctaaaccgcgactgaaatccctggaaagctggctgcgtg

SEQ ID NO: 344072 - DNA, 75 bp, synthetic construct
  source 1..75: mol_type = other DNA
ctgtatgaaccccgcctgaagggaaagctgcacgttatcagcaagcgttacactcagcgcattgagcgacataac

SEQ ID NO: 344073 - DNA, 75 bp, synthetic construct
  source 1..75: mol_type = other DNA
aggacagttgtggcgcacgttttcggtgaacgcactctggccacactggcgcgtcttctgagcctgctgtcggcc

SEQ ID NO: 344074 - DNA, 75 bp, synthetic construct
  source 1..75: mol_type = other DNA
agggaaagctgcacgttatcagcaagcgatatacgcagcgcattgagcgacataatctgaatctgagacaacatc

SEQ ID NO: 344075 - DNA, 75 bp, synthetic construct
  source 1..75: mol_type = other DNA
ctgggacggaagttactgtcgttctcaaaatcggtggagttgcatgacaaggtcatcgggcattatctgaacata

SEQ ID NO: 344076 - DNA, 75 bp, synthetic construct
  source 1..75: mol_type = other DNA
tgagacaacatctggcaaggccgggacggaagttactgtcgttctcaaaatcggtggagttgcatgacaaggtca

SEQ ID NO: 344077 - DNA, 75 bp, synthetic construct
  source 1..75: mol_type = other DNA
ctgaatctgaggcagcatctggcccggctgggaaggaagtcactgtcgttctcaaaatcggtggaactgcatgaa

SEQ ID NO: 344078 - DNA, 75 bp, synthetic construct
  source 1..75: mol_type = other DNA
gagctgcatgacaaggtcatcgggcattatctgaacataaaacagcgacgaatgttgctctacaaatgtatctgc

SEQ ID NO: 344079 - DNA, 75 bp, synthetic construct
  source 1..75: mol_type = other DNA
cagcaagcgttatactcagcgcattgagcggcataatctgaatctgaggcagcatctggcacggctgggacggaa

SEQ ID NO: 344080 - DNA, 75 bp, synthetic construct
  source 1..75: mol_type = other DNA
ggccgctgtatgaatcacgcctgaagggaaagctgcacgttatcagcaagcgttacactcagcgcattgagcgac

SEQ ID NO: 344081 - DNA, 75 bp, synthetic construct
  source 1..75: mol_type = other DNA
aagacggttgtggcgcacgttttcggtgaacgcactatggccacactggagcgtcttctgagcctgctgtcggcc

SEQ ID NO: 344082 - DNA, 75 bp, synthetic construct
  source 1..75: mol_type = other DNA
cgctgtatgaatcacgcctgaagggaaagctgcacgttatcagcaagcgttacactcagcgcattgtgcggcata

SEQ ID NO: 344083 - DNA, 75 bp, synthetic construct
  source 1..75: mol_type = other DNA
tgctggcgtggcagtggagtttgctgttcggcatcaccggcgccatcgtctgcgcggaaatggacgaacagtggg

SEQ ID NO: 344084 - DNA, 75 bp, synthetic construct
  source 1..75: mol_type = other DNA
tacactcagcgcattgagcgacataatctgaatctgagacaacatctggcaaggccgggacgaaagtcactgtcg

SEQ ID NO: 344085 - DNA, 75 bp, synthetic construct
  source 1..75: mol_type = other DNA
gtgctgcctttgccaatgtcaccgtccagccggtgctgatagtgccggatgaaatggatttgcttacctgccatc

SEQ ID NO: 344086 - DNA, 75 bp, synthetic construct
  source 1..75: mol_type = other DNA
ggatacggaggacggttgtggcgcacgtcttcggtgaacgcactctggccacactggagcgtcttctgagcctgc

SEQ ID NO: 344087 - DNA, 75 bp, synthetic construct
  source 1..75: mol_type = other DNA
tgggacggaagttactgtcgttctcaaaatcggtggagttgcatgacaaggtcatcgggcattatctgaacataa

SEQ ID NO: 344088 - DNA, 75 bp, synthetic construct
  source 1..75: mol_type = other DNA
gacggatggctggccgctgtatgaatcacgcctgaagggaaagctgcacgttatcagcaagcgttacactcagcg

SEQ ID NO: 344089 - DNA, 75 bp, synthetic construct
  source 1..75: mol_type = other DNA
gtgaacgcacgatggcgacgctggggcgtcttctgagcctgctgtcggcctttgaggtcgtggtatggatgacgg

SEQ ID NO: 344090 - DNA, 75 bp, synthetic construct
  source 1..75: mol_type = other DNA
gttattcttgggataattatcaatgcaaactgtacaaaaaaagtttagggttctctgatgttgtagttgagtttg

SEQ ID NO: 344091 - DNA, 75 bp, synthetic construct
  source 1..75: mol_type = other DNA
agggaataaccagtctcaactggttgccactcccgtccctgatgaacagcgcatcagcttctggccgcagcactt

SEQ ID NO: 344092 - DNA, 75 bp, synthetic construct
  source 1..75: mol_type = other DNA
ctgaacaacggcggggcatttatggcacccgaccggatgacgatgatgacgaaacatgggtactgttcaatgcca

SEQ ID NO: 344093 - DNA, 75 bp, synthetic construct
  source 1..75: mol_type = other DNA
aaccggcaggggaaacacccggagcaacgcctccgccccttccggggtatcctgcaggcggatgcgttcacaggt

SEQ ID NO: 344094 - DNA, 75 bp, synthetic construct
  source 1..75: mol_type = other DNA
atgaaaatcatcacccgtggtgaagtcatgcgtattcaccgtcagcatccggcatcccgtctttttccgttctgc

SEQ ID NO: 344095 - DNA, 75 bp, synthetic construct
  source 1..75: mol_type = other DNA
gctatcgaggatgaaatacggggcttaccggagtctgaacgtcttgcagccaggcagcagcgaagtaaagcgtta

SEQ ID NO: 344096 - DNA, 75 bp, synthetic construct
  source 1..75: mol_type = other DNA
agtgcaggatattcccggagtgctggccgtgtttgctgaacgccataaggacagttttggcccgtatgtccggct

SEQ ID NO: 344097 - DNA, 75 bp, synthetic construct
  source 1..75: mol_type = other DNA
gccttctgcctgctgaaagcagttgcccggcctgtggtggtcctctgaaagaaatgggggaaacaatctcagagc

SEQ ID NO: 344098 - DNA, 75 bp, synthetic construct
  source 1..75: mol_type = other DNA
gcagaataacggaagccgcgtgtatggctcatgcccggagaaaaatccacgatgtgcatgcaagagcgcccaccg

SEQ ID NO: 344099 - DNA, 75 bp, synthetic construct
  source 1..75: mol_type = other DNA
ctttctcagggagtttagtctccaggatttccggggcggttcatgatgaacaatgggaggtatttgtccatgatt

SEQ ID NO: 344100 - DNA, 75 bp, synthetic construct
  source 1..75: mol_type = other DNA
gtgaccctggagccccgtatcttcggctggatggaccgtctgtgtgaagactactgcggtggtatctggaatctg

SEQ ID NO: 344101 - DNA, 75 bp, synthetic construct
  source 1..75: mol_type = other DNA
ccatgcgtattcaccaacaacatccgacatcccgtctttttccgttctgtaccggtaaataccgctggcacggta

SEQ ID NO: 344102 - DNA, 75 bp, synthetic construct
  source 1..75: mol_type = other DNA
ttactgacgtcgctgcatgaatggatggtggagaagaatggcacgctgtcgaaaaaatccagactgggcgaagcg

SEQ ID NO: 344103 - DNA, 75 bp, synthetic construct
  source 1..75: mol_type = other DNA
cgcgtgctgccagttaatgacaccggtgaatgatgccctgtaccgttatgtgatgaatacccgcaagcttcacac

SEQ ID NO: 344104 - DNA, 75 bp, synthetic construct
  source 1..75: mol_type = other DNA
tgggcgaagcgttcagctatgtactgaatcagtgggatgccctctgttattacagtgatgacggtctggcggagg

SEQ ID NO: 344105 - DNA, 75 bp, synthetic construct
  source 1..75: mol_type = other DNA
taccggagtctgaacgtcttgcagccaggcagcagcgaagcaaagcgttactgacgtcgctgcatgaatggatgg

SEQ ID NO: 344106 - DNA, 75 bp, synthetic construct
  source 1..75: mol_type = other DNA
gcacggatacgtataccggccgtgaagtgcaggatactcccggtgtgctggctgtgtttgcagaacgccgtaagg

SEQ ID NO: 344107 - DNA, 75 bp, synthetic construct
  source 1..75: mol_type = other DNA
caggctccggtgccttcaaaacccattgtacgcagttatgccggaccggggcttctggtccatgttatcaccggg

SEQ ID NO: 344108 - DNA, 75 bp, synthetic construct
  source 1..75: mol_type = other DNA
ttcacactgatgacacaccagtaaaagtactggcaccgggcaggaagaaggcgaaaacaggatatatctggacgt

SEQ ID NO: 344109 - DNA, 75 bp, synthetic construct
  source 1..75: mol_type = other DNA
ctttctcagggagtttagtctccaggattcccggggcggttcatgtggcggtgagctggattatctgggggaagt

SEQ ID NO: 344110 - DNA, 75 bp, synthetic construct
  source 1..75: mol_type = other DNA
ttgacggacctcgggggaaaaacgtgtatttttagtcatcctgtttacctctttctcagggagtttagtctccag

SEQ ID NO: 344111 - DNA, 75 bp, synthetic construct
  source 1..75: mol_type = other DNA
gcccggagaaaaatccacgatgtgcatgcaagagcgccaaccgatatcaccacggaagccctgcagcgtatcggt

SEQ ID NO: 344112 - DNA, 75 bp, synthetic construct
  source 1..75: mol_type = other DNA
ccggcacaccttccccgtgaaatacaccgcctggagccagaagaaagctgttgcccggagtgtggcggtgagctg

SEQ ID NO: 344113 - DNA, 75 bp, synthetic construct
  source 1..75: mol_type = other DNA
ggtaaccgcgctgaaatgagcccggaagccgccggcattaccgcctgcctgatgacgtacagccatcacgcctgt

SEQ ID NO: 344114 - DNA, 75 bp, synthetic construct
  source 1..75: mol_type = other DNA
tgtatcgtcagagtgaaatctttgcccgacagggtgtcgaactgagccgtgcattactctccaactgggttgacg

SEQ ID NO: 344115 - DNA, 75 bp, synthetic construct
  source 1..75: mol_type = other DNA
cagtctgggtcgtaaaaacttcctgttcttcggctctgaccatggtggtgagcggggagcgctactgtacagcct

SEQ ID NO: 344116 - DNA, 75 bp, synthetic construct
  source 1..75: mol_type = other DNA
tacatgttcttcggcaacgatcatggaggcgagcgcggagctctgctgtgcggactaatcgggagctgtcggttg

SEQ ID NO: 344117 - DNA, 75 bp, synthetic construct
  source 1..75: mol_type = other DNA
ttgtacgactggatacagactcagatgaaaacactgtcgcgtcactcggatacggcaaaagcgttcgcatacctg

SEQ ID NO: 344118 - DNA, 75 bp, synthetic construct
  source 1..75: mol_type = other DNA
atatgtaaaatttaatccgctggacaatattgatgtttgtataacaactgcactattaaaggagattggtgttgt

SEQ ID NO: 344119 - DNA, 75 bp, synthetic construct
  source 1..75: mol_type = other DNA
aaaatagtttttgaagatgattttattgatggtatagcagatataaagcaattagaaatatctccttttcctgct

SEQ ID NO: 344120 - DNA, 75 bp, synthetic construct
  source 1..75: mol_type = other DNA
agccctgaagcgaatcagtgaactgtacgccatcgaggatgaaatacggggattaccagagtcagagcgtcttgc

SEQ ID NO: 344121 - DNA, 75 bp, synthetic construct
  source 1..75: mol_type = other DNA
cccggcttgcttgcccgtgtgttaacgggaaatactgcgaacatctgccactgtaccgtcagagtgaaatctttg

SEQ ID NO: 344122 - DNA, 75 bp, synthetic construct
  source 1..75: mol_type = other DNA
tctgaacggtatcgatccggaagcgtatctgcgccatattctgagcgtactgccggaatggccttccaaccgagt

SEQ ID NO: 344123 - DNA, 75 bp, synthetic construct
  source 1..75: mol_type = other DNA
gacgccctctgttattacagtgatgatggtttggcagaagcggacaataacacagcggaaagagcgcttcgtgca

SEQ ID NO: 344124 - DNA, 75 bp, synthetic construct
  source 1..75: mol_type = other DNA
aagacactggagttattgaagttgtctggggagatagaaatcatcctaaaagaaaaaacattagatatagcttgc

SEQ ID NO: 344125 - DNA, 75 bp, synthetic construct
  source 1..75: mol_type = other DNA
cacggaagccctgcagcgtatcggtgaactgtatgccatcgaggcagaggtccggggctgttcagcagaacagcg

SEQ ID NO: 344126 - DNA, 75 bp, synthetic construct
  source 1..75: mol_type = other DNA
atgagtcagaaatacctcattcgcattgcagaactggaaagccagctgcgtcagaaagaccagcaactgagtctg

SEQ ID NO: 344127 - DNA, 75 bp, synthetic construct
  source 1..75: mol_type = other DNA
tgcgtgttgccagttaatgacgccgctgaatgatgctctgtaccgttacgtgatgaataccttcaagcttcacac

SEQ ID NO: 344128 - DNA, 75 bp, synthetic construct
  source 1..75: mol_type = other DNA
tcgttaaagcaccggcaccgtcccgtccgatagagcgtggtatcgcgggccaggggttacttgcccgcgtgttaa

SEQ ID NO: 344129 - DNA, 75 bp, synthetic construct
  source 1..75: mol_type = other DNA
gttgcgtcagacccgctcccgtaagccgttccctgaatcactaccccgtgacgaaaagcgactgttgccagcggc

SEQ ID NO: 344130 - DNA, 75 bp, synthetic construct
  source 1..75: mol_type = other DNA
tgcagtctgtctcggaaagaaaaattctacgtgttcttcggtagcgatcacggcggcgagcgtggtgcactgttg

SEQ ID NO: 344131 - DNA, 75 bp, synthetic construct
  source 1..75: mol_type = other DNA
tggtgcactgttgtacgggctgatcggcacctgccggttgaatggtatcgatccggaagcgtatctgcgccatat

SEQ ID NO: 344132 - DNA, 75 bp, synthetic construct
  source 1..75: mol_type = other DNA
cgacactcagagttggcgaaggcgttcgcgtacgcacttaaccagtggccggcactgacgtactatgcgaacgat

SEQ ID NO: 344133 - DNA, 75 bp, synthetic construct
  source 1..75: mol_type = other DNA
atgaacgacatctcttctgacgacatcttcctgctgaaacagcgcctggccgaacaggaggcgctgatccacgcc

SEQ ID NO: 344134 - DNA, 75 bp, synthetic construct
  source 1..75: mol_type = other DNA
gttgcgtcagacccgcgcccgtaagccgttccctgaatcactaccccgtgacgaaaagcgactgttgcctgcggc

SEQ ID NO: 344135 - DNA, 75 bp, synthetic construct
  source 1..75: mol_type = other DNA
gcgttcagctatgtactgaatcagtgggatgccctctgttattacagtgatgacggtctggcggaggcggacaat

SEQ ID NO: 344136 - DNA, 75 bp, synthetic construct
  source 1..75: mol_type = other DNA
agaacaactggaactggtgagcagcgccctgaaagtgatccgcactgttcgggtaaaaaagcctgtacaaaatgt

SEQ ID NO: 344137 - DNA, 75 bp, synthetic construct
  source 1..75: mol_type = other DNA
gctcgtcagggtgtcgaactgagccgtgcgttactctccaactgggttgacgcatgctgtcagttaatgacgcct

SEQ ID NO: 344138 - DNA, 75 bp, synthetic construct
  source 1..75: mol_type = other DNA
tcgtcagagtgaaatctttgcccgccagggtgtcgaactgagccgtgccttactctccaactgggttgatgcgtg

SEQ ID NO: 344139 - DNA, 75 bp, synthetic construct
  source 1..75: mol_type = other DNA
atcagtgtaatcaacacctggcctgccaaccgcgtgaaagagttgttgccctggaatgtcactcaatctgtaaac

SEQ ID NO: 344140 - DNA, 75 bp, synthetic construct
  source 1..75: mol_type = other DNA
cctgaacaacggcggggcatttatggcacccgaaccggatgacgatgatgacgaaacatgggtactgttcaatgc

SEQ ID NO: 344141 - DNA, 75 bp, synthetic construct
  source 1..75: mol_type = other DNA
cattccacagtgggttaccctggacccccgtgtcttcggctggatggaccgtctatgcgaaaactactgcggtgg

SEQ ID NO: 344142 - DNA, 75 bp, synthetic construct
  source 1..75: mol_type = other DNA
cattccacagtgggtaaccctggatccccgtgtcttcggctggatggaccgtctgtgcgaaaactactgcggtgg

SEQ ID NO: 344143 - DNA, 75 bp, synthetic construct
  source 1..75: mol_type = other DNA
ttcctttgcaaacaatatccataatttattatgcgcagttatcgtattacaaatgtcagacaacgacgcaataaa

SEQ ID NO: 344144 - DNA, 75 bp, synthetic construct
  source 1..75: mol_type = other DNA
tgcatcagggaatgaccagcctcagctggttgccaccatagtccctgacgaacagcgcatcagcttctggccgca

SEQ ID NO: 344145 - DNA, 75 bp, synthetic construct
  source 1..75: mol_type = other DNA
cattccacagtgggtgaccctggacccccgtgtcttcggctggatggaccgtctttgcgaaaactactgcggtgg

SEQ ID NO: 344146 - DNA, 75 bp, synthetic construct
  source 1..75: mol_type = other DNA
cattccacagtgggtcaccctggagccccgtgtcttcggctggatggaccgtctttgcgaaaactactgcggtgg

SEQ ID NO: 344147 - DNA, 75 bp, synthetic construct
  source 1..75: mol_type = other DNA
cgtacagtcatcatgcctgtcgtacggagaattatgccatgacggtccattattaccggttgcgggattacgccc

SEQ ID NO: 344148 - DNA, 75 bp, synthetic construct
  source 1..75: mol_type = other DNA
atgctgttcggtacccgttctgaaaaactgcagcgtgaggttgaacaggctgaggcccaactgaaacaacgcgaa

SEQ ID NO: 344149 - DNA, 75 bp, synthetic construct
  source 1..75: mol_type = other DNA
cctcttcggcctgtgcaccggagactggcctgcaacaactggttgccaccattgtccctgatgaacagcgcatca

SEQ ID NO: 344150 - DNA, 75 bp, synthetic construct
  source 1..75: mol_type = other DNA
atgaaaatcatcacccgtggtgaagctatgcgtattcaccaacaacatccgacatcccgtctttttccgttctgt

SEQ ID NO: 344151 - DNA, 75 bp, synthetic construct
  source 1..75: mol_type = other DNA
atccgacatcccgtctttttccgttctgtaccggtaaataccgctggcacggcagtgctgaagcgtataccggtc

SEQ ID NO: 344152 - DNA, 75 bp, synthetic construct
  source 1..75: mol_type = other DNA
accgctcctgacttccatgtataagctgatgcaggagaaagaacacacgttatcgaagaaatgtcgtctgggaga

SEQ ID NO: 344153 - DNA, 75 bp, synthetic construct
  source 1..75: mol_type = other DNA
ggggcaaatccagcgatgaaaaacggctgctgccggcagcgtcatgctgcccggaatgtggaggctcgctgagct

SEQ ID NO: 344154 - DNA, 75 bp, synthetic construct
  source 1..75: mol_type = other DNA
ccgcgcactgctctccaactgggtggatacgtgctgccgtttaatggcgccgctggacgaagccctttatcacta

SEQ ID NO: 344155 - DNA, 75 bp, synthetic construct
  source 1..75: mol_type = other DNA
gtgctaaggcgtataccggtcgtgaagtgcagaatattcccggtgtgctggccgtgtttgcagaacgccgtaagg

SEQ ID NO: 344156 - DNA, 75 bp, synthetic construct
  source 1..75: mol_type = other DNA
aacctcaatttgaccttactgcaacaccagtacctgacgaacagcgtctcgatttctggccgctgtactttggca

SEQ ID NO: 344157 - DNA, 75 bp, synthetic construct
  source 1..75: mol_type = other DNA
ccacatcttctgtttccgtaaccgctgcatcagggaataacccacctcagctggttgccactctcgtccctgatg

SEQ ID NO: 344158 - DNA, 75 bp, synthetic construct
  source 1..75: mol_type = other DNA
tggtggcgaacgtggtgcactgctgtacggactgatcggaacgtgccgtctgaacggtatcgatccagaagcgta

SEQ ID NO: 344159 - DNA, 75 bp, synthetic construct
  source 1..75: mol_type = other DNA
tcttcctgctgaaacagcgcctagccgaacaggaagcgctgatccacgccctgcaggaaaagctgagcaaccggg

SEQ ID NO: 344160 - DNA, 75 bp, synthetic construct
  source 1..75: mol_type = other DNA
cgtattcaccaacaacatccgacatcccgtctttttccgttctgtaccggtaaataccgctggcacggcagtgct

SEQ ID NO: 344161 - DNA, 75 bp, synthetic construct
  source 1..75: mol_type = other DNA
tgcatcagggaataatccgcctcagatggttgccaccctcgtccctgatgaacagcgcatcagcttctggccgca

SEQ ID NO: 344162 - DNA, 75 bp, synthetic construct
  source 1..75: mol_type = other DNA
tacaccctgaacaacggcggggcatttatggccccgaaccggatgacgatgatgacgaaacatgggtactgttca

SEQ ID NO: 344163 - DNA, 75 bp, synthetic construct
  source 1..75: mol_type = other DNA
cggaaaaactggctcttctcaggttccgacagcggtggcgaacatgcggcggtgttgtactcgctgatcggcaca

SEQ ID NO: 344164 - DNA, 75 bp, synthetic construct
  source 1..75: mol_type = other DNA
tatcggtgaactgtatgccatagaggcagaatccggggatgtacagcagaacagcgtctggcggcaagaaaagcc

SEQ ID NO: 344165 - DNA, 75 bp, synthetic construct
  source 1..75: mol_type = other DNA
agtgatccgcacagaacgggtaaaaaagcctgtacaaaatgtgactgtattgttgaagcaccggcgccgtcccgc

SEQ ID NO: 344166 - DNA, 75 bp, synthetic construct
  source 1..75: mol_type = other DNA
tgtatcagagaataacccgcctcaactggttgccaccatagtccctgatgaacagcgcatcagcttctggccgca

SEQ ID NO: 344167 - DNA, 75 bp, synthetic construct
  source 1..75: mol_type = other DNA
gtctgaagaaagctgttgcccggagtgtggcggtgagctggattatctgggggaggtcagtgcagaacaactgga

SEQ ID NO: 344168 - DNA, 75 bp, synthetic construct
  source 1..75: mol_type = other DNA
acggaagccgcgtgtatggctcatgcccggagaaaaacccacgatgtgcatgcaagagtgccaaccgacatcacc

SEQ ID NO: 344169 - DNA, 75 bp, synthetic construct
  source 1..75: mol_type = other DNA
cagagtaaagcgctactgacgtccctgcataagctgatgcaggagaaagaacacacattatcgaaaaaatgtcgt

SEQ ID NO: 344170 - DNA, 75 bp, synthetic construct
  source 1..75: mol_type = other DNA
accggtaagtaccgctggcacggcagcgctgaagcacatacctgtcgtgaagtgcaggatattcccggcgtgctg

SEQ ID NO: 344171 - DNA, 75 bp, synthetic construct
  source 1..75: mol_type = other DNA
ccggaccggaaaggtatccatccacaaaatcatctggccggttacagcggtgtgcttcaggccgatgcttacggt

SEQ ID NO: 344172 - DNA, 75 bp, synthetic construct
  source 1..75: mol_type = other DNA
aagcaccagcttgaaaatctaaataagcgagcgagttcttcaaacaactatcgtcctactgattttgaatttgag

SEQ ID NO: 344173 - DNA, 75 bp, synthetic construct
  source 1..75: mol_type = other DNA
atgaaaaccatttcacataattccaccacatcttctgtttccgtaaccgctgcatcagggaatgaccagtctcag

SEQ ID NO: 344174 - DNA, 75 bp, synthetic construct
  source 1..75: mol_type = other DNA
gacgccctctgttattacagtgatgacggtctggcggaggcggacaataacacagcggaaagagcgcttcgtgcc

SEQ ID NO: 344175 - DNA, 75 bp, synthetic construct
  source 1..75: mol_type = other DNA
gaacagctggaactggtgagcagtgccctgaaagtgatccgcacagaacgggtaaaaagcctgtacagaatgtga

SEQ ID NO: 344176 - DNA, 75 bp, synthetic construct
  source 1..75: mol_type = other DNA
gatgcagtcactgtatgactggatacagcaacagatgaaaacactgtcgcgtcattcggatacggcaaaagcgtt

SEQ ID NO: 344177 - DNA, 75 bp, synthetic construct
  source 1..75: mol_type = other DNA
cagactcagatgaaaacactgtctcgtcactcggatacggcaaaagcgttcgcatacctgctgaaacagtgggag

SEQ ID NO: 344178 - DNA, 75 bp, synthetic construct
  source 1..75: mol_type = other DNA
tgtactgcagtaatggctgggtggaaatcgacaacaacatcgcagagaacgccttacggggtgtggccgtaggcc

SEQ ID NO: 344179 - DNA, 75 bp, synthetic construct
  source 1..75: mol_type = other DNA
ttcaggaagaaatggcggaaacgctgggtgagcaatatgacccggcactgccatctgcactgcgccagtcttcag

SEQ ID NO: 344180 - DNA, 75 bp, synthetic construct
  source 1..75: mol_type = other DNA
ccggaagaggaatgctgtcctgcctgtggtggcgaactcagttctctgggatgtgatgtgtcagagcaactggag

SEQ ID NO: 344181 - DNA, 75 bp, synthetic construct
  source 1..75: mol_type = other DNA
tgcatcagggaataaccagtctcagctggttgccaccatagtccctgatgaacagcgcatcagcttctggccgca

SEQ ID NO: 344182 - DNA, 75 bp, synthetic construct
  source 1..75: mol_type = other DNA
acgccgctgaatgatgccctgtatcgttatgtgatgaatacccgcaagcttcacactgacgacacaccggtaaag

SEQ ID NO: 344183 - DNA, 75 bp, synthetic construct
  source 1..75: mol_type = other DNA
cgccttatcctgagcgtactgccggaatggccttccaaccgagttgatgaactcctgccatggaacgtagtactc

SEQ ID NO: 344184 - DNA, 75 bp, synthetic construct
  source 1..75: mol_type = other DNA
cggtgtgcttcaggccgatgcttacggtggttaccgggcgttatacgaatccggcagaataacggaagccgcgtg

SEQ ID NO: 344185 - DNA, 75 bp, synthetic construct
  source 1..75: mol_type = other DNA
agtgcgatgccatcgtgcaggcacctgcaccttcgcggcccatcgagcggggtgtcgccggaccggggctgctgg

SEQ ID NO: 344186 - DNA, 75 bp, synthetic construct
  source 1..75: mol_type = other DNA
ggtaaccgcgctgaaatgagcccggaagctgccggtattgccgcctgtctgatgacgtacagccatcacgcctgc

SEQ ID NO: 344187 - DNA, 75 bp, synthetic construct
  source 1..75: mol_type = other DNA
atacaaataataacctgaacagcatgtgggctgtgaagctgcagcagatgcaggacggacgcctttatattgcgg

SEQ ID NO: 344188 - DNA, 75 bp, synthetic construct
  source 1..75: mol_type = other DNA
cacacacccggtgacattattgaaatctgtgataacgactatgccgggaccatgaccggcggacgtgtcctgtcc

SEQ ID NO: 344189 - DNA, 75 bp, synthetic construct
  source 1..75: mol_type = other DNA
ttcctgaaacgactgtttgcggtgagcatcacgtcatccggcaatcctccggcattttccctgacgccggacggg

SEQ ID NO: 344190 - DNA, 75 bp, synthetic construct
  source 1..75: mol_type = other DNA
atgcgtttggctgtaccagccgcggtcaggctcaccgtgcaggtctgtgggtgataaagaccgaactgctggaaa

SEQ ID NO: 344191 - DNA, 75 bp, synthetic construct
  source 1..75: mol_type = other DNA
gatcagccgtttgaccggcaaattgttattccggcggtggcattcagcggtgccagacatgagcgggagaataac

SEQ ID NO: 344192 - DNA, 75 bp, synthetic construct
  source 1..75: mol_type = other DNA
gacggcgttgccgaatacagcgtgtggggggctgaagctgccgacgctgcgccagcgcctgttccgctgtgtgag

SEQ ID NO: 344193 - DNA, 75 bp, synthetic construct
  source 1..75: mol_type = other DNA
cccgtgcaccggagcggtggccatcaggaaccattaccgtcagggtttatgacgatcagccgtttgaccggcaga

SEQ ID NO: 344194 - DNA, 75 bp, synthetic construct
  source 1..75: mol_type = other DNA
gccggatacagcgtatgggggctgaagctgccgacgctgcgccagcgcctgttccgctgcgtgagtatccgtgag

SEQ ID NO: 344195 - DNA, 75 bp, synthetic construct
  source 1..75: mol_type = other DNA
ctgtatgtcatcggccagaattgcgaccagtcggtgccggacggctttggcggtacggagccgcgcatcacctgt

SEQ ID NO: 344196 - DNA, 75 bp, synthetic construct
  source 1..75: mol_type = other DNA
atgagcgagaaattaaagatagtctatcgcccattacaagaattgtcaccgtatgcgcacaacgccaggacgcac

SEQ ID NO: 344197 - DNA, 75 bp, synthetic construct
  source 1..75: mol_type = other DNA
catgtcaccctgactttcaatgtttcttcatatggtgctaataactggacgccaacgaccagtatcagcgacctt

SEQ ID NO: 344198 - DNA, 75 bp, synthetic construct
  source 1..75: mol_type = other DNA
gtggaggctgttggccagccgggtaacgatgctgagaaatatctccatttttttgaagggaaaataaacagcacc

SEQ ID NO: 344199 - DNA, 75 bp, synthetic construct
  source 1..75: mol_type = other DNA
tgtcactattgaactgataccggggtattttcagataacggcggtcccgaaactggctgtatatgacccgacggt

SEQ ID NO: 344200 - DNA, 75 bp, synthetic construct
  source 1..75: mol_type = other DNA
cgtcaagaaagcccagcgctgtctggttttgtaccgaggtacattgatcagcatacgtaatgcaggccaaatcag

SEQ ID NO: 344201 - DNA, 75 bp, synthetic construct
  source 1..75: mol_type = other DNA
attaaggggaaactgtcagccaatcagattgaaggcgatattgtcaaaacggtcagcaagtctttcccccgcacg

SEQ ID NO: 344202 - DNA, 75 bp, synthetic construct
  source 1..75: mol_type = other DNA
gattattacttttatatccgcagtgtgaacatcgtcggtaaatcagcgtttgtggaagctgtcggccggccggtt

SEQ ID NO: 344203 - DNA, 75 bp, synthetic construct
  source 1..75: mol_type = other DNA
tttcccgcgggactcccgggcaccggagcggtggccatcagggaccattaccgtcaggatttatgacgatcagcc

SEQ ID NO: 344204 - DNA, 75 bp, synthetic construct
  source 1..75: mol_type = other DNA
caggtgctgctggcggcagacaggattgcgatgattaatcctgcaaatggcaacacaaaaccgatgtttgttggt

SEQ ID NO: 344205 - DNA, 75 bp, synthetic construct
  source 1..75: mol_type = other DNA
tttacgacatagccttggcaagaatgctcacaatagacttttagaactttttactgtggataggatgagttctca

SEQ ID NO: 344206 - DNA, 75 bp, synthetic construct
  source 1..75: mol_type = other DNA
tgccgaagggcttcgccatgtgccgggcgatatcattgaaatctgcgatgatgactatgcgggtatcagcatcgg

SEQ ID NO: 344207 - DNA, 75 bp, synthetic construct
  source 1..75: mol_type = other DNA
ccgtgatacacggtgtgaccgcggtctggcgcgccggggagcaggagcagacaccgccggaaggttttgagtcat

SEQ ID NO: 344208 - DNA, 75 bp, synthetic construct
  source 1..75: mol_type = other DNA
gcagagtattctggtgaacaaaaccccgctgacggacacggacggcaatcccgtgatacacggtgtgaccgcggt

SEQ ID NO: 344209 - DNA, 75 bp, synthetic construct
  source 1..75: mol_type = other DNA
gtgcgcagcgtcaacctggtgggtaaatctgcttttgtggaagccagtggacgggcgagcaatgatgctgcgggc

SEQ ID NO: 344210 - DNA, 75 bp, synthetic construct
  source 1..75: mol_type = other DNA
atcagcgatgatcataactttgaccgtcagattattattccgcccattatttttaacggtatagcgtataccgat

SEQ ID NO: 344211 - DNA, 75 bp, synthetic construct
  source 1..75: mol_type = other DNA
gagaactgtcagattaaggggaaactgtcagccaatcagattgaaggcgatattgtcaaaacggtcagcaagtct

SEQ ID NO: 344212 - DNA, 75 bp, synthetic construct
  source 1..75: mol_type = other DNA
gctgtgggcagagattgacaacagtcagttgaaggacgagatggcggaaatgcagaccaccatcacagaaacccg

SEQ ID NO: 344213 - DNA, 75 bp, synthetic construct
  source 1..75: mol_type = other DNA
ccgcaccctgacactggaccgtgaggtgaccctgccggagacaggtgccgccacggtgaacctgattaacggcag

SEQ ID NO: 344214 - DNA, 75 bp, synthetic construct
  source 1..75: mol_type = other DNA
gaccagacggtcccggatggtttcgggggcacagagccgcggatgacctttaatgcgtacctgtcacagcagcgt

SEQ ID NO: 344215 - DNA, 75 bp, synthetic construct
  source 1..75: mol_type = other DNA
ccctttaacatccggatggtccgggagacagcggacagcacctcggaccagctgcagaataagacgctctggtcc

SEQ ID NO: 344216 - DNA, 75 bp, synthetic construct
  source 1..75: mol_type = other DNA
aagcctttccgagaaatggcagttatgccagcggtacaataacggtcactgtgtacgatgaccaggcttttgacc

SEQ ID NO: 344217 - DNA, 75 bp, synthetic construct
  source 1..75: mol_type = other DNA
aaacatgagagagagcatactgatatttactcctcatgccgtctgatagtgcggaaaaacggtgctgaaatttat

SEQ ID NO: 344218 - DNA, 75 bp, synthetic construct
  source 1..75: mol_type = other DNA
tgggcactgtatgccatcgggcagtactgtgaccagacggtcccggatggtttcgggggcacagagccgcggatg

SEQ ID NO: 344219 - DNA, 75 bp, synthetic construct
  source 1..75: mol_type = other DNA
ttcatcaggagcgaataactggacaccaacaaccagtatcagcgatctgctggttgtggtgatgaagaaatccac

SEQ ID NO: 344220 - DNA, 75 bp, synthetic construct
  source 1..75: mol_type = other DNA
attaacggcagcggtaagccggtgcgcgtggacatcactgcacaactggccccggaccggatacaggtcagcgcc

SEQ ID NO: 344221 - DNA, 75 bp, synthetic construct
  source 1..75: mol_type = other DNA
tgcagtgatttatgacggcgtggcgaatgatgcacctcaggttttcgcccgaattgtggatatgcgtgcgggagg

SEQ ID NO: 344222 - DNA, 75 bp, synthetic construct
  source 1..75: mol_type = other DNA
cattccggattaatgcaccggcggcaccggccagcattgaactgacgccgggctattttcagataacggtggtcc

SEQ ID NO: 344223 - DNA, 75 bp, synthetic construct
  source 1..75: mol_type = other DNA
cgcgtcttgcggtgtatgacccgacggtacagtttgagttctggttttcggagacaaaaatcgcagacacatctc

SEQ ID NO: 344224 - DNA, 75 bp, synthetic construct
  source 1..75: mol_type = other DNA
ggaagtgacgaaggtaaagccggtgacgcgcaccattacgtccgcgaacattgaccgcctgcgggtcaccttcgg

SEQ ID NO: 344225 - DNA, 75 bp, synthetic construct
  source 1..75: mol_type = other DNA
cagctggcggtggtcatatcaccctgagttttaccgtgagctcacggcgtcagaatgacagttggggcagttcac

SEQ ID NO: 344226 - DNA, 75 bp, synthetic construct
  source 1..75: mol_type = other DNA
cagcagatgacggtgaactaccatatccgcggtcgcatcatccaggtgccgtcaaactatgacccggaaaaacgc

SEQ ID NO: 344227 - DNA, 75 bp, synthetic construct
  source 1..75: mol_type = other DNA
acagtgggtaaggcttttccgcgggactcccgggcaccggagcggtggccatcagggaccattaccgtcaggatt

SEQ ID NO: 344228 - DNA, 75 bp, synthetic construct
  source 1..75: mol_type = other DNA
acacgcctcgtgaggcgaaggataatcagatgatgagcgtgattgatgcgattggtgagggaccgatagaaggcc

SEQ ID NO: 344229 - DNA, 75 bp, synthetic construct
  source 1..75: mol_type = other DNA
caacagcacgccgttatttgtggcgcaggggaatcagctgttcatgaacgatgtgttcctgaagcggctgtttgc

SEQ ID NO: 344230 - DNA, 75 bp, synthetic construct
  source 1..75: mol_type = other DNA
gggcagtcagaaaacgcccgacagatagcacaggtccgccagtacgtggataaaaaagggagtgaaattacctcg

SEQ ID NO: 344231 - DNA, 75 bp, synthetic construct
  source 1..75: mol_type = other DNA
cggatgtggtgtggccgtacaccagcagcgatgtggtggtggatgataacggcgtgggtttccgctacagcttca

SEQ ID NO: 344232 - DNA, 75 bp, synthetic construct
  source 1..75: mol_type = other DNA
atcagcgccggttccgtcctggtgggcaaaatgtactcctgcttacaccactcagccggaaggtgtggtgaactg

SEQ ID NO: 344233 - DNA, 75 bp, synthetic construct
  source 1..75: mol_type = other DNA
ccatcaccgcacaccccgcgcctgaccggatacaggtcagcaccctgccggatggtgtggagacatacggtgtgt

SEQ ID NO: 344234 - DNA, 75 bp, synthetic construct
  source 1..75: mol_type = other DNA
tccggcagtgcagcacctgacggtggaggtgagcgcagctgacggccagtatctggcacaggcgaaatgggacac

SEQ ID NO: 344235 - DNA, 75 bp, synthetic construct
  source 1..75: mol_type = other DNA
aacagcgatgtggtggtggatgataacggcgtggggttccgctacagcttcagtgccctgaaggaccggcacacg

SEQ ID NO: 344236 - DNA, 75 bp, synthetic construct
  source 1..75: mol_type = other DNA
aaagacgctaacgataaatggaatgccatgtggggcgtcagaattgagcagaccgaagacggtaagcattatgtc

SEQ ID NO: 344237 - DNA, 75 bp, synthetic construct
  source 1..75: mol_type = other DNA
cagataacggcggtcccgaaactggctgtatatgacccgacggtacagtttgaattctggttttcggaacagcag

SEQ ID NO: 344238 - DNA, 75 bp, synthetic construct
  source 1..75: mol_type = other DNA
ggtgtggccctacaccaacagcgatgtggtggcggatgataacggtgtgggcttccgctacagcttcagcgccct

SEQ ID NO: 344239 - DNA, 75 bp, synthetic construct
  source 1..75: mol_type = other DNA
atgcgaactccgggacgctcaacaacgtcacgattaacgagaactgtcgggttctgggaaaattgtccgccaacc

SEQ ID NO: 344240 - DNA, 75 bp, synthetic construct
  source 1..75: mol_type = other DNA
ctggataatctgcctccccggccctttaacatccggatggtcagggagacggcggacagcaccacggaccagctg

SEQ ID NO: 344241 - DNA, 75 bp, synthetic construct
  source 1..75: mol_type = other DNA
agggcttcgaccggcagatcatcattcccccggtgctgtttcgcgggacgaaacaccagaatttcaacagcccga

SEQ ID NO: 344242 - DNA, 75 bp, synthetic construct
  source 1..75: mol_type = other DNA
accagacggtcccggatggtttcgggggaacagagccgcggatgactttcaatgcgtacctgtcacagcagcgta

SEQ ID NO: 344243 - DNA, 75 bp, synthetic construct
  source 1..75: mol_type = other DNA
ggcagcggtaagccggtgagtgtggacatcgccgcacaccccgcgccggaccggatacaggtcagtaccctgcct

SEQ ID NO: 344244 - DNA, 75 bp, synthetic construct
  source 1..75: mol_type = other DNA
gcagtgcagcacctgacggtggaggtgagcgcggctgacggtcagtatctggcacaggcgaaatgggacacgccg

SEQ ID NO: 344245 - DNA, 75 bp, synthetic construct
  source 1..75: mol_type = other DNA
gggcaggggagtccggtcagcgtggaggttcagtccgtcaccgacggcgtgaaggtgaaagtgagccgtgttcct

SEQ ID NO: 344246 - DNA, 75 bp, synthetic construct
  source 1..75: mol_type = other DNA
ttccctatgtggccgggattggtgcagggattgaggatactgatggccagccactgagcaacatactgctgctgg

SEQ ID NO: 344247 - DNA, 75 bp, synthetic construct
  source 1..75: mol_type = other DNA
ggaggcgactcaggtcagaggtgacttcgttaaagctgtatccaaatcattcccgaaacaggctggtacgtgggg

SEQ ID NO: 344248 - DNA, 75 bp, synthetic construct
  source 1..75: mol_type = other DNA
acggttacagtaaccatcagcgatgatcataactttgaccgccagattattattccgcccattatttttaacggt

SEQ ID NO: 344249 - DNA, 75 bp, synthetic construct
  source 1..75: mol_type = other DNA
gggacgctcaacaatgtcacggtaaatgaaaactgtacgattaagggcatgctggaggcgactcaggtcagaggt

SEQ ID NO: 344250 - DNA, 75 bp, synthetic construct
  source 1..75: mol_type = other DNA
cgctggggcggtacatgctgacagtccgggcagtaaatgcctgggggcagcagggagacccggcgtcggtatcgt

SEQ ID NO: 344251 - DNA, 75 bp, synthetic construct
  source 1..75: mol_type = other DNA
tgcacttttgttgaccagcgatgatgttgcgcaaaaatataacctgccgcatccagcccgtctgctacgcccgat

SEQ ID NO: 344252 - DNA, 75 bp, synthetic construct
  source 1..75: mol_type = other DNA
atcgcgtttattgatccgtctaatggcaacacaagaccaatgtttgttggtcagggcgatcagatattcatgaac

SEQ ID NO: 344253 - DNA, 75 bp, synthetic construct
  source 1..75: mol_type = other DNA
ttataaccgtaccgcgctggataatacgctgatttacagtggcgttattgatatgcctgccggtcacggtcacat

SEQ ID NO: 344254 - DNA, 75 bp, synthetic construct
  source 1..75: mol_type = other DNA
gaggttagcaaaagagattgttcgtattttctctgataggttagatgttcgcgaacttcgtaaactttcaaccca

SEQ ID NO: 344255 - DNA, 75 bp, synthetic construct
  source 1..75: mol_type = other DNA
taccagcggtggcaatcccccaacgttttcactgacacctgatggtcgactttctgcgaaaaatgcggatatcag

SEQ ID NO: 344256 - DNA, 75 bp, synthetic construct
  source 1..75: mol_type = other DNA
aaaaagaatttgaattcctgctactggcagcagaaaagaaatatgaatccccgatatcacgctatatgcttcgta

SEQ ID NO: 344257 - DNA, 75 bp, synthetic construct
  source 1..75: mol_type = other DNA
gcggctcctttgcgtatcttggcacggcgctgtactggatagctgccagtatcaatatcaggccgggccatgatt

SEQ ID NO: 344258 - DNA, 75 bp, synthetic construct
  source 1..75: mol_type = other DNA
gcgccaccattcagcagatacagcgcgtgcagaaggacacaaatgatgacctggctgcgctgtacatgctgaagg

SEQ ID NO: 344259 - DNA, 75 bp, synthetic construct
  source 1..75: mol_type = other DNA
aacgaagtgttcctgaaacgcctgacggcccccaccattaccagtggtggaaatccaccggtattttccctgaca

SEQ ID NO: 344260 - DNA, 75 bp, synthetic construct
  source 1..75: mol_type = other DNA
ccctttaacatccggatggtcagggagacgcggacagcaccacggaccagctgcagaataagacgctgtggtcgt

SEQ ID NO: 344261 - DNA, 75 bp, synthetic construct
  source 1..75: mol_type = other DNA
taagcccgggaaggatttctggttttacgtgcgcagcgtcaacctggtggggaaatctgcttttgtggaagccag

SEQ ID NO: 344262 - DNA, 75 bp, synthetic construct
  source 1..75: mol_type = other DNA
ccccggaataacagttatgccagtggctcgataacggtcacggtttacgatgaccagggcttcgaccggcagatt

SEQ ID NO: 344263 - DNA, 75 bp, synthetic construct
  source 1..75: mol_type = other DNA
tgacgttcgttcaggaccgcccgtcggatgtggtgtggccgtacaccaactgcgatgtggtggtggatgataacg

SEQ ID NO: 344264 - DNA, 75 bp, synthetic construct
  source 1..75: mol_type = other DNA
ggtgataaagaccggactgctggaaacgcagacggtggatttcacgctcgggtcacaggggctgcgtcacacacc

SEQ ID NO: 344265 - DNA, 75 bp, synthetic construct
  source 1..75: mol_type = other DNA
ttatcctgccacctgccgcgcctgcaggcatcacgctgctgcgctgtagcgtaaacgctgcccacagtcgtgagc

SEQ ID NO: 344266 - DNA, 75 bp, synthetic construct
  source 1..75: mol_type = other DNA
tgtggaggccgtcggccgggccagcgatgatgccgaaggctacctgaatttttacaaagggctgattaataaaac

SEQ ID NO: 344267 - DNA, 75 bp, synthetic construct
  source 1..75: mol_type = other DNA
catactgcgctacggacgcaacctgctgaagatggatgcgttcggctgtaccagacgcggtcaggcacaacgagc

SEQ ID NO: 344268 - DNA, 75 bp, synthetic construct
  source 1..75: mol_type = other DNA
cagatgacggtaaactaccatatccgcggtcgcatcatccaggtgccgtcaaactacgacccggaaaaacgcact

SEQ ID NO: 344269 - DNA, 75 bp, synthetic construct
  source 1..75: mol_type = other DNA
tgcagtttgagttctggttttcggaggcaaaagtcgcagacaccgcacaggtggaaacgtccggccgttatctgg

SEQ ID NO: 344270 - DNA, 75 bp, synthetic construct
  source 1..75: mol_type = other DNA
tgtggccatccgggaaaacacggacggcacctttgccatcacggcggtgcagcacgtaccggaaaaagaagccat

SEQ ID NO: 344271 - DNA, 75 bp, synthetic construct
  source 1..75: mol_type = other DNA
cagtgtgaatgcgaacgccgggacgctcaacaatgtcacggtaaatgaaaactgtacgattaagggcatgctgga

SEQ ID NO: 344272 - DNA, 75 bp, synthetic construct
  source 1..75: mol_type = other DNA
cagcggatgacggcagtgagcggctggtcagcacagcccggacggcggaaaccacataccgcttcacacaactgg

SEQ ID NO: 344273 - DNA, 75 bp, synthetic construct
  source 1..75: mol_type = other DNA
agggaccattaccgtcagggtttatgacgatcagtcgtttgaccggcaaattgttattccagcggtggctttcag

SEQ ID NO: 344274 - DNA, 75 bp, synthetic construct
  source 1..75: mol_type = other DNA
cagcagactggatcagttttcgaaagagtggaaagacgccaacgataaatggaatgccatgtggggcgtcaaaat

SEQ ID NO: 344275 - DNA, 75 bp, synthetic construct
  source 1..75: mol_type = other DNA
aacggggccagctttgagccactgtccggttcgctgaacagcgtcatcccgccggctgtgcagcacctgacggtg

SEQ ID NO: 344276 - DNA, 75 bp, synthetic construct
  source 1..75: mol_type = other DNA
tagatgagacgcttctgggccaggcactgaaagagcgcattgatgcttcagcgctgcgtacggaggtcacgcaac

SEQ ID NO: 344277 - DNA, 75 bp, synthetic construct
  source 1..75: mol_type = other DNA
gatgatgagaaggctataacccgagccttagactccctgaaaagccagctacgggctgagcacctgcgttcaggc

SEQ ID NO: 344278 - DNA, 75 bp, synthetic construct
  source 1..75: mol_type = other DNA
caatattaagccgggttatgattattacttttatatccgcagcgtgaacaccgtaggtaaatcggcatttgtgga

SEQ ID NO: 344279 - DNA, 75 bp, synthetic construct
  source 1..75: mol_type = other DNA
gatctcgttaaaacagtgggcaaagctttcccccgggactcccgtgcaccggagcggtggccatcagggaccatt

SEQ ID NO: 344280 - DNA, 75 bp, synthetic construct
  source 1..75: mol_type = other DNA
actggaagaccagagtgcggcaattcagcagatacagaaggttcaggttgatacaaataataacctgaacagcat

SEQ ID NO: 344281 - DNA, 75 bp, synthetic construct
  source 1..75: mol_type = other DNA
tctgctgggcggcaccgcaggcaggcagcggctggcagttcagggtccggctcatgacaaccgcaccggacgatg

SEQ ID NO: 344282 - DNA, 75 bp, synthetic construct
  source 1..75: mol_type = other DNA
acacgccgcatgaagccccggataacctgaaatccacacaacggctgagtgtgactgacgtgctgagtgaaggtc

SEQ ID NO: 344283 - DNA, 75 bp, synthetic construct
  source 1..75: mol_type = other DNA
tttcaccggacgcgtactggtttacctggataaagggaaagtgaaatcacaatgccgactgaaaagtaatgagat

SEQ ID NO: 344284 - DNA, 75 bp, synthetic construct
  source 1..75: mol_type = other DNA
ctgattaaaacggagctgctggaaacgcagaccgtggacttcagcgtgggtgccgaagggcttcgccatgtaccg

SEQ ID NO: 344285 - DNA, 75 bp, synthetic construct
  source 1..75: mol_type = other DNA
tgaagttcgcaaaaacggcatattaatcgcatccagagaaactaaaggggccattcccggtagttacagtgcagt

SEQ ID NO: 344286 - DNA, 75 bp, synthetic construct
  source 1..75: mol_type = other DNA
gtgaatgcgaactcagggacgctcaacaacgtcacgattaatgagaactgtcagattaaggggaaactgtcagcc

SEQ ID NO: 344287 - DNA, 75 bp, synthetic construct
  source 1..75: mol_type = other DNA
aactgtcagattaaggggaaactgtcagccaatcagattgaaggcgatattgtcaaaacggtcagcaagtctttc

SEQ ID NO: 344288 - DNA, 75 bp, synthetic construct
  source 1..75: mol_type = other DNA
ggccgcggacgtggacaaatgggcgctgtatgccatcgggcagtactgtgaccagcgtgttccggacggcttcgg

SEQ ID NO: 344289 - DNA, 75 bp, synthetic construct
  source 1..75: mol_type = other DNA
ggacaggggaatccggtcagcgtggaggtccagtccgtcaccgacggcgtgaagataaaagtgagccgggttcct

SEQ ID NO: 344290 - DNA, 75 bp, synthetic construct
  source 1..75: mol_type = other DNA
acaccctgacagtcagggcaattaacagttatggccagcagggggaaccggccaccaccacgttcaggattaatg

SEQ ID NO: 344291 - DNA, 75 bp, synthetic construct
  source 1..75: mol_type = other DNA
gcctgatagtgaagaaaaacggggctgaaatttataaccgaacggctctggataatactctgatttacacgggtg

SEQ ID NO: 344292 - DNA, 75 bp, synthetic construct
  source 1..75: mol_type = other DNA
ctgcggtgccagacatgagcgggagaatagcgatacttattcgtcatgccgcctgatagtgaagaaaaacggggc

SEQ ID NO: 344293 - DNA, 75 bp, synthetic construct
  source 1..75: mol_type = other DNA
cggtcagccatgaagaacgcgaatttttgaaacgcctcacaatgatcgagaaagacctacacacgcagttagcca

SEQ ID NO: 344294 - DNA, 75 bp, synthetic construct
  source 1..75: mol_type = other DNA
tttacgttcgcagtgtgaacaccgtcggcaaatcgacattcgtggaggctgtcggccgggcgagcgatgatgcgg

SEQ ID NO: 344295 - DNA, 75 bp, synthetic construct
  source 1..75: mol_type = other DNA
gaaaaatgcggatatcagcggtaacgtgaacgcgaactccgggacgctcaacaacgtcacgattaatcagaactg

SEQ ID NO: 344296 - DNA, 75 bp, synthetic construct
  source 1..75: mol_type = other DNA
accagtcggtgccggatggctttggtggcacggagccgcgcatcacctgtaacgcttacctgaccacacagcgta

SEQ ID NO: 344297 - DNA, 75 bp, synthetic construct
  source 1..75: mol_type = other DNA
cggcccccaccattaccagtggtggaaatccaccggcattttccctgacaccggatgggcggctgactgctaaaa

SEQ ID NO: 344298 - DNA, 75 bp, synthetic construct
  source 1..75: mol_type = other DNA
gtgccggtgttgagaatactcctgacggtatgcagagtcaggtgctgctggcggcggacaggattgcgatgatta

SEQ ID NO: 344299 - DNA, 75 bp, synthetic construct
  source 1..75: mol_type = other DNA
cggcggtggcattcagcggcgctaaacatgagaaagagcatactgatatttactcctcatgccgtctgatagtgc

SEQ ID NO: 344300 - DNA, 75 bp, synthetic construct
  source 1..75: mol_type = other DNA
gtgtgcgcttcagtctgcgcctgaccagcggaagcggagaagacagccgtctggtgaccaccgccatcactgcgg

SEQ ID NO: 344301 - DNA, 75 bp, synthetic construct
  source 1..75: mol_type = other DNA
gggtgttctcatcggtgatagatatgccggcagggcggggtcatgtcaccctgacgtttaatgtgtcgtcggccg

SEQ ID NO: 344302 - DNA, 75 bp, synthetic construct
  source 1..75: mol_type = other DNA
gtccgggaaaacacggacggcacctttgccatcacggcggtgcagcacgtaccggaaaaagaagccatcgtggat

SEQ ID NO: 344303 - DNA, 75 bp, synthetic construct
  source 1..75: mol_type = other DNA
gtgctgctggcggcagacaggattgcgatggttaatcctgcgaatggcaacacaaaaccgatgtttgttggtcag

SEQ ID NO: 344304 - DNA, 75 bp, synthetic construct
  source 1..75: mol_type = other DNA
aaatgatgacctggctgcgctgtacatgctgaaggttcaaaaaacgaaagacggcattccctatgtggccgggat

SEQ ID NO: 344305 - DNA, 75 bp, synthetic construct
  source 1..75: mol_type = other DNA
tccctgacaccggacgggcgactgacggcgaaaaatgccgatatcagcggtagcgtgaatgcgaactccgggacg

SEQ ID NO: 344306 - DNA, 75 bp, synthetic construct
  source 1..75: mol_type = other DNA
agttctggttctcggaaaagcggattgcggatatcaggcaggttgaaaccacagcccgctatcttggcacggcgc

SEQ ID NO: 344307 - DNA, 75 bp, synthetic construct
  source 1..75: mol_type = other DNA
aacgggagaatagcgatacttattcgtcatgccgcctgatagtgaagaaaaacggggctgaaatttataaccgaa

SEQ ID NO: 344308 - DNA, 75 bp, synthetic construct
  source 1..75: mol_type = other DNA
agggcaattaacaggtatggccagcagggcgaaccggccaccaccaccttccggattaacgcgccagcaaaaccc

SEQ ID NO: 344309 - DNA, 75 bp, synthetic construct
  source 1..75: mol_type = other DNA
catgccgcctgatagtgcggaaaaacggtgctgaaatttataaccgtaccgcgctggataatacgctgatttaca

SEQ ID NO: 344310 - DNA, 75 bp, synthetic construct
  source 1..75: mol_type = other DNA
tgacggtgaactaccatatccgcggtcgcatcattcaggtgccgtcaaactatgacccggaaaaacgcacgtaca

SEQ ID NO: 344311 - DNA, 75 bp, synthetic construct
  source 1..75: mol_type = other DNA
cagtgcagcacctgacggtggaggtgagcgcagctgacggtcagtatctggcgcaggcgaaatgggacacgccga

SEQ ID NO: 344312 - DNA, 75 bp, synthetic construct
  source 1..75: mol_type = other DNA
gtggcttgtggtagcgtgttattgcgctatgcgatggcatccagaaaacaggatgccatgatggcagaccactta

SEQ ID NO: 344313 - DNA, 75 bp, synthetic construct
  source 1..75: mol_type = other DNA
actgacggcgaaaaatgcggatatcagtggcagtgtgaatgcgaactcaggaacgctcaacaatgtcacgattaa

SEQ ID NO: 344314 - DNA, 75 bp, synthetic construct
  source 1..75: mol_type = other DNA
tgaattctggttctcagaaaaacgcatcacggacacggcacaggtggaaatctctgcccgttatctggggacagg

SEQ ID NO: 344315 - DNA, 75 bp, synthetic construct
  source 1..75: mol_type = other DNA
cggatatcagtggcagtgtgaatgcgaactccgggacgctcaacaacgtcacgattaatgagaactgtcagatta

SEQ ID NO: 344316 - DNA, 75 bp, synthetic construct
  source 1..75: mol_type = other DNA
tttgagccgcagtcaggcaccctgaacagcgtcatccctccggcagtgcagcacctgacggtggaggtgagcgca

SEQ ID NO: 344317 - DNA, 75 bp, synthetic construct
  source 1..75: mol_type = other DNA
cgccggaccggatacaggtcagtaccctgcctgatggtgtggagacatacggtgtctggggactctccctgccgt

SEQ ID NO: 344318 - DNA, 75 bp, synthetic construct
  source 1..75: mol_type = other DNA
atggtagttaccttgcgaacggtacacgaacgctgacggtgtatgacgatcacagctttgaccggcagattataa

SEQ ID NO: 344319 - DNA, 75 bp, synthetic construct
  source 1..75: mol_type = other DNA
tgctgctggctgaccgtattgcgatgattaacccggaggacggcaacagcacgccgttatttgtggcgcagggga

SEQ ID NO: 344320 - DNA, 75 bp, synthetic construct
  source 1..75: mol_type = other DNA
tcctccggcattttccctgacaccggacgggcggctgacggcgaaaaatgccgatatcagcggtaacgtgaatgc

SEQ ID NO: 344321 - DNA, 75 bp, synthetic construct
  source 1..75: mol_type = other DNA
accattaccagcggtggaaatccgccggcattttccctgacaccagacggaaagctgactgctaaaaatgcggat

SEQ ID NO: 344322 - DNA, 75 bp, synthetic construct
  source 1..75: mol_type = other DNA
gtttcagtggcctgccgctcggggaatacaccctgacagtcagggcaattaacagttatggccagcagggcgaac

SEQ ID NO: 344323 - DNA, 75 bp, synthetic construct
  source 1..75: mol_type = other DNA
aatgtcacgattaaccagaactgtacgattaagggcatgctggaggcgacccaggtcagaggagatttcgttaaa

SEQ ID NO: 344324 - DNA, 75 bp, synthetic construct
  source 1..75: mol_type = other DNA
cttcgaccggcagattatcattcccccggtgctgtttcgcgggacgaaacaccagaatttcaacagcccgaatca

SEQ ID NO: 344325 - DNA, 75 bp, synthetic construct
  source 1..75: mol_type = other DNA
aaatacgacacgccgatcacccggaccatcacgtcggcaaacattgaccgactgcgttttaccttcggcgtgcag

SEQ ID NO: 344326 - DNA, 75 bp, synthetic construct
  source 1..75: mol_type = other DNA
gatcagaagtttgaccggcaggtcatgatacctccagtgttattccgcggtggtaagcatgagaatttcaacagt

SEQ ID NO: 344327 - DNA, 75 bp, synthetic construct
  source 1..75: mol_type = other DNA
tgccggtgttgagaatactcctgacggtatgcagagtcaggtgctgctggcggcggacaggattgcgatgattaa

SEQ ID NO: 344328 - DNA, 75 bp, synthetic construct
  source 1..75: mol_type = other DNA
atcgtggataacggggccagctttgagccgcagtcaggcaccctgaacagcgtcatccctccggcagtgcagcac

SEQ ID NO: 344329 - DNA, 75 bp, synthetic construct
  source 1..75: mol_type = other DNA
caggcgaaatgggacacgccgcgggtggtgaagggtgtgcgcttcagtctgcgcctgaccagcggaagcggagaa

SEQ ID NO: 344330 - DNA, 75 bp, synthetic construct
  source 1..75: mol_type = other DNA
gcgtcactctggagtttaagattttccagaaaggcaatcagggggcaggcaatatcaccgactgtacggtgattg

SEQ ID NO: 344331 - DNA, 75 bp, synthetic construct
  source 1..75: mol_type = other DNA
gggattcccgtgcaccggagcggtggccatcagggaccattaccgtcagggtttatgacgatcagccgtttgacc

SEQ ID NO: 344332 - DNA, 75 bp, synthetic construct
  source 1..75: mol_type = other DNA
gtggataacggtgcccgctttgagccgcagtcaggttccctgaacagcgtcatcccaccggcagtacagcacctg

SEQ ID NO: 344333 - DNA, 75 bp, synthetic construct
  source 1..75: mol_type = other DNA
agcggtaagccggtgagtgtggacatcaccgcacaccccgcgccggaccggatacaggtcagtaccctgccggat

SEQ ID NO: 344334 - DNA, 75 bp, synthetic construct
  source 1..75: mol_type = other DNA
aatctgcccgttatctggggacaggcagtcagtggagtgttaccggttcccgtattaaaccgggacaggatttct

SEQ ID NO: 344335 - DNA, 75 bp, synthetic construct
  source 1..75: mol_type = other DNA
caccgtttcagcggtctgcctctgggggagtacaccctgacggtcagggtgataaacagctatggccagcagggg

SEQ ID NO: 344336 - DNA, 75 bp, synthetic construct
  source 1..75: mol_type = other DNA
caccgccatcactgcggatacagagcatcgtttcagtggtctgccgctcggggaatacaccctgacagtccgggc

SEQ ID NO: 344337 - DNA, 75 bp, synthetic construct
  source 1..75: mol_type = other DNA
cggattaagccggggacggatttctggttttacgtgcgcagcgtcaacctggtggggaaatctgcgtttgtggaa

SEQ ID NO: 344338 - DNA, 75 bp, synthetic construct
  source 1..75: mol_type = other DNA
accggaaaaagaagccatcgtggataacggggccagctttgagccgcagtcaggcaccctgaacagcgttattcc

SEQ ID NO: 344339 - DNA, 75 bp, synthetic construct
  source 1..75: mol_type = other DNA
gtggtgaagggcgtgagcttcctgcttcgcctgaccgtggcagcggatgacggccgtgagcggctggtcagcacg

SEQ ID NO: 344340 - DNA, 75 bp, synthetic construct
  source 1..75: mol_type = other DNA
tggagacatacggtgtatggggactctccctgccgtcactgcgtcgtcgcctgttccgctgtgtctccatccggg

SEQ ID NO: 344341 - DNA, 75 bp, synthetic construct
  source 1..75: mol_type = other DNA
gtgttcctgaagcgcctgacggctcccaccattaccagcggcggtaatccccctgcattttccctgactgcggat

SEQ ID NO: 344342 - DNA, 75 bp, synthetic construct
  source 1..75: mol_type = other DNA
gtcagacacgcgcaatgagctgaatgccatgtatatgctgaaggtgcagaaaacaaaaaacggtattccctatgt

SEQ ID NO: 344343 - DNA, 75 bp, synthetic construct
  source 1..75: mol_type = other DNA
aaaacagtgggtaaggcttttccgcgggactcccgggcaccggagcggtggccatcagggaccattaccgtcagg

SEQ ID NO: 344344 - DNA, 75 bp, synthetic construct
  source 1..75: mol_type = other DNA
gcgttattgatatgcctgccggtcacggtcacatgacgctggagttttcggtatcagcatggctggtgaataact

SEQ ID NO: 344345 - DNA, 75 bp, synthetic construct
  source 1..75: mol_type = other DNA
acggtcagcttgcgcctgacctggctgaaatcaggacgtccattacggatgtcagcaatgaaatcacgcagaccg

SEQ ID NO: 344346 - DNA, 75 bp, synthetic construct
  source 1..75: mol_type = other DNA
ctggacgccaacgaccagtatcagcgaccttcttgttgtcgtgatgaagaaatcaacagccggcatcagtatcag

SEQ ID NO: 344347 - DNA, 75 bp, synthetic construct
  source 1..75: mol_type = other DNA
ggtggcaatcccccaacgttttcactgacacctgatggtcgactttctgcgagaaatgcggatatcagcggtaac

SEQ ID NO: 344348 - DNA, 75 bp, synthetic construct
  source 1..75: mol_type = other DNA
aaaacagcctcacgcagctggttgcgaaaaagaatgaggaccagacactggccatcgcgcaggtgagccagaaag

SEQ ID NO: 344349 - DNA, 75 bp, synthetic construct
  source 1..75: mol_type = other DNA
ttttacgtgcgaagcgtcaacctggtgggaaaatctgcttttgtggaagccagcgggcagcccagcaatgatggt

SEQ ID NO: 344350 - DNA, 75 bp, synthetic construct
  source 1..75: mol_type = other DNA
aggtgacactgccggagaccggtgccgccacggtgaacctgattaacggcagcggtaagccggtgagcgtggcca

SEQ ID NO: 344351 - DNA, 75 bp, synthetic construct
  source 1..75: mol_type = other DNA
gacctttaatgcgtacctggcacaacagcgtaaggcgtgggacgttctcagtgatttctgctctgcgatgcgctg

SEQ ID NO: 344352 - DNA, 75 bp, synthetic construct
  source 1..75: mol_type = other DNA
gccgcctgatagtacggaaaaacggtgctgaaatttataaccgtaccgcgctggataatacgctgatttacagtg

SEQ ID NO: 344353 - DNA, 75 bp, synthetic construct
  source 1..75: mol_type = other DNA
gcaggggaatcagctgttcatgaacgacgtgttcctgaagcgactgtttgcggtgagcatcacgtcatccggtaa

SEQ ID NO: 344354 - DNA, 75 bp, synthetic construct
  source 1..75: mol_type = other DNA
tcatgccgtctgatagtacggaaaaacggtgctgaaatttataaccgtaccgcgctggataatacgctgatttac

SEQ ID NO: 344355 - DNA, 75 bp, synthetic construct
  source 1..75: mol_type = other DNA
agctttatgcttcgcctgaccgtggcagcggatgacggcagtgagcggctggtcagcacggccaggacgacggaa

SEQ ID NO: 344356 - DNA, 75 bp, synthetic construct
  source 1..75: mol_type = other DNA
ctcaacaatgtcacgattaatgagaactgtcagattaaggggaaactgtcagccaatcagattgaaggcgatatt

SEQ ID NO: 344357 - DNA, 75 bp, synthetic construct
  source 1..75: mol_type = other DNA
attgcgatgattaatcctgcgaatggcaacacaaagccgatgtttgttggtcagggcgatcagatattcatgaac

SEQ ID NO: 344358 - DNA, 75 bp, synthetic construct
  source 1..75: mol_type = other DNA
ggtgaacctgattaacggcagcggtaagccggtgagcgtggccatcactgcacaccccgcgccggaccggataca

SEQ ID NO: 344359 - DNA, 75 bp, synthetic construct
  source 1..75: mol_type = other DNA
gttttccataaaggcaatcagtgggcaggtaatatcaccgactgtacggtgattgtgaccaaaaaagccgcttcc

SEQ ID NO: 344360 - DNA, 75 bp, synthetic construct
  source 1..75: mol_type = other DNA
aataccaggtgctggcccgctgggacacgccgaaggtggtgaagggcgtgagcttcctgcttcgcctgaccgtgg

SEQ ID NO: 344361 - DNA, 75 bp, synthetic construct
  source 1..75: mol_type = other DNA
ccgtcaataaaaaactggaaaatcagagtgcggcaatccagcagatacagaaagttcaggttgatacaaataata

SEQ ID NO: 344362 - DNA, 75 bp, synthetic construct
  source 1..75: mol_type = other DNA
gagagcgacatcgtaccgggagaacagacagccaccagcatactgaagcagcgcacaaaaaatattgcgctgcca

SEQ ID NO: 344363 - DNA, 75 bp, synthetic construct
  source 1..75: mol_type = other DNA
gggaactgtcgctggcagagttatgctggtgggcggtttgtcatcaggtggctgatgcaattccggagtctgtat

SEQ ID NO: 344364 - DNA, 75 bp, synthetic construct
  source 1..75: mol_type = other DNA
caccactggaaaaggcggtggtcagcattgccgttgatccggactctccggaatctttcatgaggcgacctaaac

SEQ ID NO: 344365 - DNA, 75 bp, synthetic construct
  source 1..75: mol_type = other DNA
cacacgttgggttaagacacagccgtgtgcttgctgcggtatgccagccgacgatccgcatcatctgattggtca

SEQ ID NO: 344366 - DNA, 75 bp, synthetic construct
  source 1..75: mol_type = other DNA
taggccgggctgtgaatccatgcaagtatttcataaccctcgagtgctggtggagcctgaaccgaaaagcatgcg

SEQ ID NO: 344367 - DNA, 75 bp, synthetic construct
  source 1..75: mol_type = other DNA
atgagccgcatcacctgattggccatgggcagggcggtatggggacaaaatcccacgatattttcacactaccgt

SEQ ID NO: 344368 - DNA, 75 bp, synthetic construct
  source 1..75: mol_type = other DNA
taatctgccgtccggggtcgttcctgccgttcgccagccgctgggggatgaaaaaccatttctgccttttttcag

SEQ ID NO: 344369 - DNA, 75 bp, synthetic construct
  source 1..75: mol_type = other DNA
tgtgcgtgttgtggtaagccagccgacgatccccatcacctgattggtcatggtcagggagggatgggaacaaag

SEQ ID NO: 344370 - DNA, 75 bp, synthetic construct
  source 1..75: mol_type = other DNA
agcatggatgattgacgtcatacgccatgcaatgaatggcacgcaggagcgggaattatctctgggtgaattatc

SEQ ID NO: 344371 - DNA, 75 bp, synthetic construct
  source 1..75: mol_type = other DNA
taatctgccgtccggggtcgttcctgccgttcgccagccgctgggggatgacaaatcatttctgccgtttttcag

SEQ ID NO: 344372 - DNA, 75 bp, synthetic construct
  source 1..75: mol_type = other DNA
taatctgccgtccggggtcgttcctgccgttcgccagccgctgggggatgacaaaacatttctgccttttttcag

SEQ ID NO: 344373 - DNA, 75 bp, synthetic construct
  source 1..75: mol_type = other DNA
taatctgccgtccggggtcgttcctgccgttcgccagccgctgggggatgataaaccatttctgccgtttttcag

SEQ ID NO: 344374 - DNA, 75 bp, synthetic construct
  source 1..75: mol_type = other DNA
gcctgagccggaacgttattcatcttttgccagtggtgccgttccggcggcatcacaaccgctggcggatgatcc

SEQ ID NO: 344375 - DNA, 75 bp, synthetic construct
  source 1..75: mol_type = other DNA
agcaacagaacccaccacaggaaaagacggtggtcagcatcaccattgatccggagtctccggaatccttcatga

SEQ ID NO: 344376 - DNA, 75 bp, synthetic construct
  source 1..75: mol_type = other DNA
caccacaggaaaagacggtggtcagcattgccgttgatccagagactccggaatctttcatgaaacgacctaaac

SEQ ID NO: 344377 - DNA, 75 bp, synthetic construct
  source 1..75: mol_type = other DNA
agatgaatggtcaaaccgtaagccgtgatggtgcgcgtaatctcggtgaagtacgtaccggggttgaggcgaaag

SEQ ID NO: 344378 - DNA, 75 bp, synthetic construct
  source 1..75: mol_type = other DNA
attggtcatggactgggagggatgggaacaaaggctgatgatttgtttgttattccgctgtgccgtaaatgtcat

SEQ ID NO: 344379 - DNA, 75 bp, synthetic construct
  source 1..75: mol_type = other DNA
tcctgctggagcctgagccggaacgttattcatctttcgccagtggtgccgttccggcggcatcacaaccgctgg

SEQ ID NO: 344380 - DNA, 75 bp, synthetic construct
  source 1..75: mol_type = other DNA
gtgattgatgccatcagcgaagggccggttgaaggtccggtggatggattaaaaagcgtgctgctgaacagtacg

SEQ ID NO: 344381 - DNA, 75 bp, synthetic construct
  source 1..75: mol_type = other DNA
gttggtatcccaccgcaagtatcagcgatttgctggttgtggtgatgaaaaaatccacagcaggtatcagtatca

SEQ ID NO: 344382 - DNA, 75 bp, synthetic construct
  source 1..75: mol_type = other DNA
atacgccccgtgaagccagagataacctgaaatcctcccagttgctgagtgtgattgacgctatcagtgaaggac

SEQ ID NO: 344383 - DNA, 75 bp, synthetic construct
  source 1..75: mol_type = other DNA
ctgacggcgaaaaatgccgatatcagcggtaacgtgaatgcgaactccgggacgctcaacaacgtcacgattaac

SEQ ID NO: 344384 - DNA, 75 bp, synthetic construct
  source 1..75: mol_type = other DNA
cgcaatggtgttgtgctggcactgcgacaaccaactgcgtgaccagacatcggaatcactggagctgcttgctca

SEQ ID NO: 344385 - DNA, 75 bp, synthetic construct
  source 1..75: mol_type = other DNA
gttaagacacagccttgcgcgtgttgtggtaagccagccgacgatccacatcacctgattggtcatggtcagggt

SEQ ID NO: 344386 - DNA, 75 bp, synthetic construct
  source 1..75: mol_type = other DNA
agcttatcaaagagcattaactttatatcagggcaaaaatgatacgaaaaaggttaatgctattagagaaaaaat

SEQ ID NO: 344387 - DNA, 75 bp, synthetic construct
  source 1..75: mol_type = other DNA
tatcaaaaaaatcagctgaattcattttatcttgggaagcatatgtttccacaccctatgttcctgatggggatc

SEQ ID NO: 344388 - DNA, 75 bp, synthetic construct
  source 1..75: mol_type = other DNA
gtagtccgtcgggatctcggttttgatgataaccatgccgtgacaatgccggaactgtgctggtggctgattcgt

SEQ ID NO: 344389 - DNA, 75 bp, synthetic construct
  source 1..75: mol_type = other DNA
gttatggtaccggcgcaatggtgttgtgctggcactgtgataaccagctgcgcgatcagttcacggaacggctgg

SEQ ID NO: 344390 - DNA, 75 bp, synthetic construct
  source 1..75: mol_type = other DNA
gagctggacgcgctgggttaagtcccagcagtgtatctgctgtaacaaacaagcagatgatccccatcacctgat

SEQ ID NO: 344391 - DNA, 75 bp, synthetic construct
  source 1..75: mol_type = other DNA
tgcaccgggttttatgaccacagggatacagatcacaacgatgaaggcgtcagcttcaggatttgtggaaagtta

SEQ ID NO: 344392 - DNA, 75 bp, synthetic construct
  source 1..75: mol_type = other DNA
gctcaataatgtcacggtaaatgaaaactgtacgattaagggcatgctggaggcgaaccaggtcagaggtgactt

SEQ ID NO: 344393 - DNA, 75 bp, synthetic construct
  source 1..75: mol_type = other DNA
tatgccagtggcaccatcacggtaagaatcagtgatgatcagaaatttgaccggcaggtcatgataccgccagtg

SEQ ID NO: 344394 - DNA, 75 bp, synthetic construct
  source 1..75: mol_type = other DNA
tgcagacagacacaaataacgacctggctgcgctgtacatgctgaaggtgcagaaaacaaaaaacggcattccgt

SEQ ID NO: 344395 - DNA, 75 bp, synthetic construct
  source 1..75: mol_type = other DNA
tggggaggatttcacgcttagtgatgctgctagaaataaagtggccgattatccacattgtgttaagtcagcgtt

SEQ ID NO: 344396 - DNA, 75 bp, synthetic construct
  source 1..75: mol_type = other DNA
ccggtttatctgacctggcaaactgatgtaccgttatttgataagggggaacagggtatggttgcgggagagcga

SEQ ID NO: 344397 - DNA, 75 bp, synthetic construct
  source 1..75: mol_type = other DNA
tgcctgtatacacgcgctgggtaaaaacgcagaaatgcatgacgtgtggcaatcaggcagatgatccgcatcaca

SEQ ID NO: 344398 - DNA, 75 bp, synthetic construct
  source 1..75: mol_type = other DNA
ggccccaccttcaatttgaatgaaggttttaactacaggccacaagtacttatagataagttcgcatattatcgt

SEQ ID NO: 344399 - DNA, 75 bp, synthetic construct
  source 1..75: mol_type = other DNA
tggtaccggaactcgggctggtggtccttaagccgggccgtgaatccatgcaggtatttcataatccccgggtgc

SEQ ID NO: 344400 - DNA, 75 bp, synthetic construct
  source 1..75: mol_type = other DNA
agtatctccagcgccagaaatcacaacgggaagagatgcctgtatacacgcgttgggtaaaaacgcagaaatgca

SEQ ID NO: 344401 - DNA, 75 bp, synthetic construct
  source 1..75: mol_type = other DNA
gtggctgattcgtaatgatctggcggatgccttaccggaaagtgcagcccgtaaggcactgagattaccgaagcc

SEQ ID NO: 344402 - DNA, 75 bp, synthetic construct
  source 1..75: mol_type = other DNA
tggtaagcatgaaaacttcaacagcaacaaccaacagtcatactggtattcaacctgtaagctgcaggtgctgaa

SEQ ID NO: 344403 - DNA, 75 bp, synthetic construct
  source 1..75: mol_type = other DNA
tctgggacggaacgtttaagccagcgtacagcgacaacatggcctggtgtctgtgggacatgctgacccacccgc

SEQ ID NO: 344404 - DNA, 75 bp, synthetic construct
  source 1..75: mol_type = other DNA
aaatgagaactgtacgattaagggcatgctggaggcggatcaggtcaggggagacttcgttaaaactgtatcaaa

SEQ ID NO: 344405 - DNA, 75 bp, synthetic construct
  source 1..75: mol_type = other DNA
cgaagacggcaggcattatgtcgcggggcttggcctcagcatggaggatacggaggaaggcaaactgagccagtt

SEQ ID NO: 344406 - DNA, 75 bp, synthetic construct
  source 1..75: mol_type = other DNA
agaacggcaacaccacgccgctgtttgtggcgcaggggaatcagctgttcatgaacgatgtgttcctgaagcggt

SEQ ID NO: 344407 - DNA, 75 bp, synthetic construct
  source 1..75: mol_type = other DNA
gaaggtacagaaaacaaaaaatggcataccctatgtggccgggattggtgcagggattgaggatactgatggcca

SEQ ID NO: 344408 - DNA, 75 bp, synthetic construct
  source 1..75: mol_type = other DNA
tggcgcacgcccggcgatgtgcgccagcagagtcgtgcggcttcgtggtgagaacgccggagggagaggggaata

SEQ ID NO: 344409 - DNA, 75 bp, synthetic construct
  source 1..75: mol_type = other DNA
gagcatcgtttcagtggtctgccgctcggggaatacaccctgacagtcagggcaattaacagttatggccagcag

SEQ ID NO: 344410 - DNA, 75 bp, synthetic construct
  source 1..75: mol_type = other DNA
atccgggaaaacacggacggcacctttgccatcacggcggtgcagcacgtaccggaaaaggaagccatcgtggat

SEQ ID NO: 344411 - DNA, 75 bp, synthetic construct
  source 1..75: mol_type = other DNA
tttcagataacagcggtcccgcgtcttgcggtgtatgacccgacggtacagtttgagttctggttttcggagaca

SEQ ID NO: 344412 - DNA, 75 bp, synthetic construct
  source 1..75: mol_type = other DNA
gtaagccggtaagtgtggacatcaccgcacaccccgcgccggaccggatacaggtcagtaccctgcctgatggtg

SEQ ID NO: 344413 - DNA, 75 bp, synthetic construct
  source 1..75: mol_type = other DNA
cgggacgctcaacaatgtcacaattaatgagaactgtcagattaaggggaaactgtcagccaaccagattgaagg

SEQ ID NO: 344414 - DNA, 75 bp, synthetic construct
  source 1..75: mol_type = other DNA
aaaatcgcagacatatctcaggtggaaacctctgcccgttatctggggaccggcagtcagtggagtgtatccggc

SEQ ID NO: 344415 - DNA, 75 bp, synthetic construct
  source 1..75: mol_type = other DNA
gacgttttccctgacgccggaagggaagctgacagccaggaacgcggatatcagcggagcaattaccgcgaattc

SEQ ID NO: 344416 - DNA, 75 bp, synthetic construct
  source 1..75: mol_type = other DNA
gaaatacctgacggctcccaccattaccagcggcggtaatcctccggcattttccctgacaccggacgggcggct

SEQ ID NO: 344417 - DNA, 75 bp, synthetic construct
  source 1..75: mol_type = other DNA
tgataaagacagaactgctggaaacgcagacggtggatttcacactcgggtctcaggggctgcggcacacacccg

SEQ ID NO: 344418 - DNA, 75 bp, synthetic construct
  source 1..75: mol_type = other DNA
tgtgataacgactacgccgggaccctgaccggcggacgcatcctgtccatggatgccgccagtcgcaccctgacg

SEQ ID NO: 344419 - DNA, 75 bp, synthetic construct
  source 1..75: mol_type = other DNA
cccgctttgagccgcagtcaggctccctgaacagcgtcatcccaccggcagtgcagcacctgacggtggaggtga

SEQ ID NO: 344420 - DNA, 75 bp, synthetic construct
  source 1..75: mol_type = other DNA
aaaacacatctggcccaggagctgtggacgcagattgataacggtcagcttgcgcctgacctggctgaaatcagg

SEQ ID NO: 344421 - DNA, 75 bp, synthetic construct
  source 1..75: mol_type = other DNA
gataccacacccgcactggtcacgcaggggggacagacgtttatcaatgaggccctgataaaggttcttaccgcc

SEQ ID NO: 344422 - DNA, 75 bp, synthetic construct
  source 1..75: mol_type = other DNA
gtcacgccgccagcagttcagcacctgaccgcagaagtcaccgcagacagcggggaataccaggtgctggcgcgc

SEQ ID NO: 344423 - DNA, 75 bp, synthetic construct
  source 1..75: mol_type = other DNA
taccacgctgataagcctggttgacggacagggaattccggtcagcgtggaggtacagtccgtcaccgacggcgt

SEQ ID NO: 344424 - DNA, 75 bp, synthetic construct
  source 1..75: mol_type = other DNA
ctgattaaaactgaactgctggagacgcagaccgtggatttcagcgtgggcgctgaagggcttcgccatgtaccg

SEQ ID NO: 344425 - DNA, 75 bp, synthetic construct
  source 1..75: mol_type = other DNA
ctgattaaaactgaactgctggagacgcagaccgtggatttcagcgtcggtgcggaagggcttcgccatgtaccg

SEQ ID NO: 344426 - DNA, 75 bp, synthetic construct
  source 1..75: mol_type = other DNA
aacagcactccgttatttgtggcgcaggggaatcagctgttcatgaacgacgtgttcctgaaacgactgtttgcg

SEQ ID NO: 344427 - DNA, 75 bp, synthetic construct
  source 1..75: mol_type = other DNA
tgtgcgcagttcacctcgggggcacagtgtggcagcgaagttcagggggtttttgacgatcagccgtttgaccgg

SEQ ID NO: 344428 - DNA, 75 bp, synthetic construct
  source 1..75: mol_type = other DNA
tcagtggcgctaagcatgagagagagcatactgatatttactcctcatgccgtctgatagtgcggaaaaacggtg

SEQ ID NO: 344429 - DNA, 75 bp, synthetic construct
  source 1..75: mol_type = other DNA
cggggcttggcctcagcatggaggatacggaggaaggcaaactgagccagttcctggttgccgctaaccgtatcg

SEQ ID NO: 344430 - DNA, 75 bp, synthetic construct
  source 1..75: mol_type = other DNA
tgtttgttggtcagggcgatcagatattcatgaatgaagtgttcctgaaacgcctgacggcccccaccattacca

SEQ ID NO: 344431 - DNA, 75 bp, synthetic construct
  source 1..75: mol_type = other DNA
taccacgctgataagcctggttgacggtcagggaaatccggtcagcgtggaggtacagtccgtcaccgacggcgt

SEQ ID NO: 344432 - DNA, 75 bp, synthetic construct
  source 1..75: mol_type = other DNA
gagatagggaaaacccatctggctcaggagttgtggacgcagattgataacggtcagcttgcgcctgacctggct

SEQ ID NO: 344433 - DNA, 75 bp, synthetic construct
  source 1..75: mol_type = other DNA
ccagaaaggcaatcagggggcaggcaatatcaccgactgtacggtgattgtgaccaaaaaagcggcttccggcat

SEQ ID NO: 344434 - DNA, 75 bp, synthetic construct
  source 1..75: mol_type = other DNA
cggggagcggaaataacccaggaggcacgcgatacacgggttatggttttgaagttcgcaaaaacggcgtattaa

SEQ ID NO: 344435 - DNA, 75 bp, synthetic construct
  source 1..75: mol_type = other DNA
gcccgcacattaagcccgggaaggatttctggttttacgtgcgcagcgtcaacctggtggggaaatctgcttttg

SEQ ID NO: 344436 - DNA, 75 bp, synthetic construct
  source 1..75: mol_type = other DNA
taccacgctgataagcctggttgacggccagggcattccggtcagcgtggaggtacagtccgtcaccgacggcgt

SEQ ID NO: 344437 - DNA, 75 bp, synthetic construct
  source 1..75: mol_type = other DNA
taccacgctgataagcctggttgacggtcaggggagtccggtcagcgtggaggtacagtccgtcaccgacggcgt

SEQ ID NO: 344438 - DNA, 75 bp, synthetic construct
  source 1..75: mol_type = other DNA
taccacgctgataagcctggttgacggtcagggcactccggtcagcgtggaggtacagtccgtcaccgacggcgt

SEQ ID NO: 344439 - DNA, 75 bp, synthetic construct
  source 1..75: mol_type = other DNA
caatcagattgaaggcgatattgtcaaaacggtcagcaagtctttcccccgcacgaacagttatgccagtggcac

SEQ ID NO: 344440 - DNA, 75 bp, synthetic construct
  source 1..75: mol_type = other DNA
catctggctcaggagttgtggacgcagattgataacggtcagcttgcgcctgacctggcggaaatcagaacgtcc

SEQ ID NO: 344441 - DNA, 75 bp, synthetic construct
  source 1..75: mol_type = other DNA
taccacgctgataagcctggttgacgggcaggggattccggtcagcgtggaggtacagtccgtcaccgacggcgt

SEQ ID NO: 344442 - DNA, 75 bp, synthetic construct
  source 1..75: mol_type = other DNA
ggctgtttgcggtgagtatcacctcgtccggcaatcccccgacgttttccctgacgccggagggcaggctgaccg

SEQ ID NO: 344443 - DNA, 75 bp, synthetic construct
  source 1..75: mol_type = other DNA
acgtgcgaagcgtcaacctggtgggaaaatctgcttttgtggaagccagcgggcagcccagcaatgatggtgaag

SEQ ID NO: 344444 - DNA, 75 bp, synthetic construct
  source 1..75: mol_type = other DNA
gcagcacctgactgccgaagtcactgcagacagcggggagtatcaggtactggcccgctgggacacgccgaaggt

SEQ ID NO: 344445 - DNA, 75 bp, synthetic construct
  source 1..75: mol_type = other DNA
aatcagaactgccggatccttggaaaactgtcagccagccatattgaaggcgatattgtcaaaacggtgggtaag

SEQ ID NO: 344446 - DNA, 75 bp, synthetic construct
  source 1..75: mol_type = other DNA
cctgacctggctgaaatcaggacgtccattacgggtgtcagcaatgaaatcacgcagaccgtcaataagaaactg

SEQ ID NO: 344447 - DNA, 75 bp, synthetic construct
  source 1..75: mol_type = other DNA
cagtggtctgccgctcggggaatacaccctgacagtcagggcaattaacagttatggccagcagggggaaccggc

SEQ ID NO: 344448 - DNA, 75 bp, synthetic construct
  source 1..75: mol_type = other DNA
tcctgaaacgcctgacggctccgaccattaccagcggcggtaatcctccggcattttccctgacaccggacgggc

SEQ ID NO: 344449 - DNA, 75 bp, synthetic construct
  source 1..75: mol_type = other DNA
tcggaaaagcggattaccgatatcaggcaggttgaaaccacagcccgctatcttggtacggcgctgtactggata

SEQ ID NO: 344450 - DNA, 75 bp, synthetic construct
  source 1..75: mol_type = other DNA
gaactgtcggattctgggaaaactgtcagctaaccagattgaaggtgatattgtcaaaacggtgggaaaagcctt

SEQ ID NO: 344451 - DNA, 75 bp, synthetic construct
  source 1..75: mol_type = other DNA
ccagcaatgatggtgaagggtatctggaatttttccgggaaaaaataggaaaactgcatctggctcaggggctat

SEQ ID NO: 344452 - DNA, 75 bp, synthetic construct
  source 1..75: mol_type = other DNA
ccggggtattttcagataacggcggtaccggtgctggcggtgtatgacccgacggtgcagtttgagttctggttt

SEQ ID NO: 344453 - DNA, 75 bp, synthetic construct
  source 1..75: mol_type = other DNA
acggtgtgtgggggctctccctgccgtcactgcgtcgtcgcctgttccgctgtgtctccatccgggaaaacacgg

SEQ ID NO: 344454 - DNA, 75 bp, synthetic construct
  source 1..75: mol_type = other DNA
ctgacattcaccgtatcttcatcaggagcgaataactggacaccaacaaccagtatcagcgatctgctggttgtg

SEQ ID NO: 344455 - DNA, 75 bp, synthetic construct
  source 1..75: mol_type = other DNA
ggtattcaacctgccggttaagagtgacccgcaatggtcaggagatttttaatcagtccacgacggatgctcagg

SEQ ID NO: 344456 - DNA, 75 bp, synthetic construct
  source 1..75: mol_type = other DNA
acagtttgaattctggttttcggaggcaaaaatcgcagacacatctcaggtggaaacctctgcccgttatctggg

SEQ ID NO: 344457 - DNA, 75 bp, synthetic construct
  source 1..75: mol_type = other DNA
gtgcagctgacagccagtatctggcgcaggcgaaatgggacacgccgcgggtggtgaagggcgtgcgcttcagtc

SEQ ID NO: 344458 - DNA, 75 bp, synthetic construct
  source 1..75: mol_type = other DNA
ttcagcggcgctaaacatgagagagagcatactgatatttactcctcatgccgtctgatagtgcggaaaaacggt

SEQ ID NO: 344459 - DNA, 75 bp, synthetic construct
  source 1..75: mol_type = other DNA
tattgaaatctgtgataacgactatgccgggaccatgaccggcggacgtatcctgtccatcgatgccgccagccg

SEQ ID NO: 344460 - DNA, 75 bp, synthetic construct
  source 1..75: mol_type = other DNA
tggccatcagggaccattaccgtcagggtttatgacgatcagccgtttgaccggcaaattgttattccggcggtg

SEQ ID NO: 344461 - DNA, 75 bp, synthetic construct
  source 1..75: mol_type = other DNA
gagcgccaccattcagcagatacagcgcgtgcagaaggacacaaatgatgacctggctgcactgtacatgctgaa

SEQ ID NO: 344462 - DNA, 75 bp, synthetic construct
  source 1..75: mol_type = other DNA
gcgaactccgggacgctcaacaacgttacgataaatgagaactgtcagattaaagggaaactgtcagccaaccag

SEQ ID NO: 344463 - DNA, 75 bp, synthetic construct
  source 1..75: mol_type = other DNA
ggagcaattaccgcgaataccggcacgctcaataatgtcaccattaacgagaactgtgtcatcagagggaaactg

SEQ ID NO: 344464 - DNA, 75 bp, synthetic construct
  source 1..75: mol_type = other DNA
gccatcaccaccttccggattaacgcgccagcaaaacccgccaccattgaactgacgccggggtattttcagata

SEQ ID NO: 344465 - DNA, 75 bp, synthetic construct
  source 1..75: mol_type = other DNA
aactggtatcccacagcaagtatcagcgatttgctggttgtggtgatgaagaaagccactgcaggcatcacgatt

SEQ ID NO: 344466 - DNA, 75 bp, synthetic construct
  source 1..75: mol_type = other DNA
gaaagagcatactgatatttactcctcatgccgtctgatagtgcggaaaaacggtgctgaaatttataaccgtac

SEQ ID NO: 344467 - DNA, 75 bp, synthetic construct
  source 1..75: mol_type = other DNA
aagaacggggttgagattttccatgaaccggcaacggatgtcagccgggtgttctcatcggtgatagatatgccg

SEQ ID NO: 344468 - DNA, 75 bp, synthetic construct
  source 1..75: mol_type = other DNA
ggtattcaacctgtaagctgcaggtgctgaagaacggacaggaaatctttcagcaacccgcgacggatgtcagca

SEQ ID NO: 344469 - DNA, 75 bp, synthetic construct
  source 1..75: mol_type = other DNA
tgaacgatgtgttcctgaagcggttgtttgcagtgagcatcacctcgtccggcaatcccccgacgttctccctga

SEQ ID NO: 344470 - DNA, 75 bp, synthetic construct
  source 1..75: mol_type = other DNA
cctggctgcgctgtacatgctgaaggtgcagaaaacaaaaaacggcattccgtatgttgccggtataggtgcggg

SEQ ID NO: 344471 - DNA, 75 bp, synthetic construct
  source 1..75: mol_type = other DNA
catacaggtgccgtcaaactatgacccggaaaaacgcacctacagcggtatctgggacggaagactgaaaccggc

SEQ ID NO: 344472 - DNA, 75 bp, synthetic construct
  source 1..75: mol_type = other DNA
gaactgccgggttctgggaaaactgtccgcgaaccagattgaaggcgatctcgttaaaacagtgggcaaagcttt

SEQ ID NO: 344473 - DNA, 75 bp, synthetic construct
  source 1..75: mol_type = other DNA
ctaatacgggaacggctggttattttgacagatacgacaatcctgtttacacgcgcaccaacctcgggaacaccg

SEQ ID NO: 344474 - DNA, 75 bp, synthetic construct
  source 1..75: mol_type = other DNA
acgactatgccgggactatgaccggcggacgtgtcctgtccattgatgctgccacccgcaccctgacgctggacc

SEQ ID NO: 344475 - DNA, 75 bp, synthetic construct
  source 1..75: mol_type = other DNA
gtatggaacggccagacgctgacgttcgttcaggaccgtccgtcggatgtggtgtggccgtacactaacagcgat

SEQ ID NO: 344476 - DNA, 75 bp, synthetic construct
  source 1..75: mol_type = other DNA
attgaactgacgccggggtattatcagataacagcagtaccggtgctggcggtgtatgacccgacggtacagttt

SEQ ID NO: 344477 - DNA, 75 bp, synthetic construct
  source 1..75: mol_type = other DNA
tctggcgctggcgaaatgggacacgccgcgggtggtgaagggcgtgcgcttcagtctgcgcctgaccagcggaaa

SEQ ID NO: 344478 - DNA, 75 bp, synthetic construct
  source 1..75: mol_type = other DNA
gaaacccgcaatgaaatcacgcagacggtcagtaaaaccatggaggaccagagtgccaccatacagcagatacag

SEQ ID NO: 344479 - DNA, 75 bp, synthetic construct
  source 1..75: mol_type = other DNA
atgcgaacaattttaccctgatgcgtgttattaagatgtataattgtatgcttgaaaagatcagtacgaaaccat

SEQ ID NO: 344480 - DNA, 75 bp, synthetic construct
  source 1..75: mol_type = other DNA
tgaagagaatggcggctgggttgtcggttatgaaaactgcaccggggcgaaagcgaccgagcaatgcgtggcaga

SEQ ID NO: 344481 - DNA, 75 bp, synthetic construct
  source 1..75: mol_type = other DNA
caggttcgcgccgaaggccagcaattagtgaatcaggcaatgggtggaattttacaggacagcattaatgaaatg

SEQ ID NO: 344482 - DNA, 75 bp, synthetic construct
  source 1..75: mol_type = other DNA
atgtcagctctgaggcatgttctgtccggcatattgttcagcgggaagaacaggttacaagtcctggccaaaaca

SEQ ID NO: 344483 - DNA, 75 bp, synthetic construct
  source 1..75: mol_type = other DNA
caaaactaccccgtcaatgacggtagacacgatattttcgggcacaggtttcactcctcttcagtgggtggctat

SEQ ID NO: 344484 - DNA, 75 bp, synthetic construct
  source 1..75: mol_type = other DNA
tgaagaagaactggcgcagcgtcaggcaggcattgattgacggaaactaccagccgcggacaatacgccggatgg

SEQ ID NO: 344485 - DNA, 75 bp, synthetic construct
  source 1..75: mol_type = other DNA
gttcgtcagcagtgggaagaaggccagcgactggacccgcgtccacgcattttaatcaccggctgcccaattggc

SEQ ID NO: 344486 - DNA, 75 bp, synthetic construct
  source 1..75: mol_type = other DNA
atggacgcatttgatgtactgacaaacaaaggcgatgaactggtagcacagcgtgataaaaccgccaacgaaggg

SEQ ID NO: 344487 - DNA, 75 bp, synthetic construct
  source 1..75: mol_type = other DNA
agcccttacccaatcggtagaaaacttgagcgataaagtcgcaggtcacctaaaagccatgggcttggagtggac

SEQ ID NO: 344488 - DNA, 75 bp, synthetic construct
  source 1..75: mol_type = other DNA
tccagcgaaccggaagacctgcacgatttaagcgcccatctgcaaggcggtattccaaaccgcgatattgatgcg

SEQ ID NO: 344489 - DNA, 75 bp, synthetic construct
  source 1..75: mol_type = other DNA
catcatcaatcagcgcacaaagtttctataatacaatatggactccggcagtattttacgcagttgctcattcaa

SEQ ID NO: 344490 - DNA, 75 bp, synthetic construct
  source 1..75: mol_type = other DNA
aactggcttcggcagaatggagcaaaaggtgttattgaataccagcctgtctttaattgtctgacgtgcagagaa

SEQ ID NO: 344491 - DNA, 75 bp, synthetic construct
  source 1..75: mol_type = other DNA
acaaaggcgatgaactggtagcacagcgtgataaaaccgccaacgaaggggaacgcgcactgctaaataaacaga

SEQ ID NO: 344492 - DNA, 75 bp, synthetic construct
  source 1..75: mol_type = other DNA
ctgatttaaaaaatgatacaaatgctgattttttgaactctgttgaagagtatgcaaatactcatcaaatgcaga

SEQ ID NO: 344493 - DNA, 75 bp, synthetic construct
  source 1..75: mol_type = other DNA
atgtataaaattaccgccacaattgaaaaggaaggtggcacacctgttaactggacaagatactcaaaatctaaa

SEQ ID NO: 344494 - DNA, 75 bp, synthetic construct
  source 1..75: mol_type = other DNA
atcccttcaataccagaaagaaagcgtcgagcgagctttaacgtgcgctaactgcggtcagaagctgcatgtgct

SEQ ID NO: 344495 - DNA, 75 bp, synthetic construct
  source 1..75: mol_type = other DNA
tggaggaagtgaaaaagctgccctcgaaagatggaataaacgaaccattggaaataataatggaggtgttcatgt

SEQ ID NO: 344496 - DNA, 75 bp, synthetic construct
  source 1..75: mol_type = other DNA
ctggacaagatattcaaaatctaaactaacgaaatcagaatgcgaaaaaatgctctcaggtaaaatttccagaga

SEQ ID NO: 344497 - DNA, 75 bp, synthetic construct
  source 1..75: mol_type = other DNA
tgctctcaggtaaaaaagaagcaggagtttccagagagcagaaagtaaaactgattaatttcaattgcgagaaac

SEQ ID NO: 344498 - DNA, 75 bp, synthetic construct
  source 1..75: mol_type = other DNA
cagaaggtggaacaagtcgcagcgttaaagtcctgggtggagttttaatgagtgtaggtgttctagccgctatcg

SEQ ID NO: 344499 - DNA, 75 bp, synthetic construct
  source 1..75: mol_type = other DNA
gatgagaaaacaggagtgatgcaaccagaaggtggaacaagtcgtaacgttagaatcctagctggagttttgata

SEQ ID NO: 344500 - DNA, 75 bp, synthetic construct
  source 1..75: mol_type = other DNA
atacaattataaagatacaattggtaggcctcgagcgtggaaagataaacttgttactgagtgctcatacgctga

SEQ ID NO: 344501 - DNA, 75 bp, synthetic construct
  source 1..75: mol_type = other DNA
ggcggtgtagctgctgataatgagcagagtacacaagatcctgacaaacagggtgaacaaaaagagcagccgaag

SEQ ID NO: 344502 - DNA, 75 bp, synthetic construct
  source 1..75: mol_type = other DNA
ctggtgcagtattaccgctggcggcctcactcaatggaaataacacagtggatgacaagacaggagtgatgacac

SEQ ID NO: 344503 - DNA, 75 bp, synthetic construct
  source 1..75: mol_type = other DNA
ctggcggagtattaccactggcagccacaatcaatggaaatgtttcggtggatgaaaatacaggagtaatgacac

SEQ ID NO: 344504 - DNA, 75 bp, synthetic construct
  source 1..75: mol_type = other DNA
gtgaaatcgccggtaacgactacaacctcaatattccgcgttatatcgactccagcgaaccggaagacctgcacg

SEQ ID NO: 344505 - DNA, 75 bp, synthetic construct
  source 1..75: mol_type = other DNA
attcagttctgaatcattgccgcacaattttaatatggctgctgtcggtgtgatgaagaagggtatgtcgatgag

SEQ ID NO: 344506 - DNA, 75 bp, synthetic construct
  source 1..75: mol_type = other DNA
aaatttaatatggctgctgtcggtgtgatgaagaaggggatgtcgatgcgtttattttcttctcctgggcatatt

SEQ ID NO: 344507 - DNA, 75 bp, synthetic construct
  source 1..75: mol_type = other DNA
atgaacatgcgtaatattaatgttattactgcccgcgctgtgccgggtaaaaccgtatcagatgattttatacat

SEQ ID NO: 344508 - DNA, 75 bp, synthetic construct
  source 1..75: mol_type = other DNA
gatgaagacaagctgggcaaaggcaaggagatgatcgaccgcctttccaagctggtggcaatcttcgaagggttg

SEQ ID NO: 344509 - DNA, 75 bp, synthetic construct
  source 1..75: mol_type = other DNA
accacaggaatcgtacttccttcacaggagaaattcagtcctgaattattaccgcgcaattttaatatggctgct

SEQ ID NO: 344510 - DNA, 75 bp, synthetic construct
  source 1..75: mol_type = other DNA
gaacatgcgtaatattcatgttattacggccctctctgtaccggataaacgcatatcagatgattttatgcatgc

SEQ ID NO: 344511 - DNA, 75 bp, synthetic construct
  source 1..75: mol_type = other DNA
gcgacagcggcagatgttgccgctaatcatggcgtgtcgctcgaaggacacgccggacgtaagctaaccgctgag

SEQ ID NO: 344512 - DNA, 75 bp, synthetic construct
  source 1..75: mol_type = other DNA
caccacctctctctttatgaaattctggatttaccaagcgctaatttatcatttcaatctacctttaagcattgc

SEQ ID NO: 344513 - DNA, 75 bp, synthetic construct
  source 1..75: mol_type = other DNA
atcctgacgctaatgatggttggataattcctggtgcgtcgtggattccatcacactggatgccgctgccagaac

SEQ ID NO: 344514 - DNA, 75 bp, synthetic construct
  source 1..75: mol_type = other DNA
aatatggccgctgttggtgtgatgaagaacggtatgtcgaagagtttattttcttcttcgggaaatacagcagtc

SEQ ID NO: 344515 - DNA, 75 bp, synthetic construct
  source 1..75: mol_type = other DNA
gccatggtaccagccagtctcttacggttgttattgatacatttatggaaaacgctgttaatctcagtcaaaaat

SEQ ID NO: 344516 - DNA, 75 bp, synthetic construct
  source 1..75: mol_type = other DNA
gaagagctgttgccggttatttcgtttaacgccaaaacgtcaaccgacgagcagaagaaacacgacgactttgtc

SEQ ID NO: 344517 - DNA, 75 bp, synthetic construct
  source 1..75: mol_type = other DNA
atcagcaaacagacaccacaggatgctaccgtttatgaccctacttgtggttcaggctcactgctgttgaaagcc

SEQ ID NO: 344518 - DNA, 75 bp, synthetic construct
  source 1..75: mol_type = other DNA
ccaacagcaactggctggggagcaggtggcgctctctgatgaagtgaatcagtcagagcagaccaccaacttcca

SEQ ID NO: 344519 - DNA, 75 bp, synthetic construct
  source 1..75: mol_type = other DNA
atttcactcacttaacggcggacaaaatgccgattacattccctttctggcgaatgtacctggtcaactggcagc

SEQ ID NO: 344520 - DNA, 75 bp, synthetic construct
  source 1..75: mol_type = other DNA
atgaagagggcaacagcgtacgcggacaaaaaatggtggcatcggtcgctaaacaactcggctataacgtgttta

SEQ ID NO: 344521 - DNA, 75 bp, synthetic construct
  source 1..75: mol_type = other DNA
cgccaccagtgccttggcacgtatgaacatgatcctgcacaacaacgccaccgccaaaatatggaaaggcaacac

SEQ ID NO: 344522 - DNA, 75 bp, synthetic construct
  source 1..75: mol_type = other DNA
cgctaccagtgcactggcgcggatgaacatgattctgcataacaatgccaccgcgaaaatctggcagggtaatac

SEQ ID NO: 344523 - DNA, 75 bp, synthetic construct
  source 1..75: mol_type = other DNA
gcgacgatctgttgggcgatgcctatgaatatctgatgcgtcacttcgcaaccgaatccggcaagagtaaagggc

SEQ ID NO: 344524 - DNA, 75 bp, synthetic construct
  source 1..75: mol_type = other DNA
atttcactcacttagcggcgggcaaaatgccgattacattccctttctggcgaatgtccccagccaactggcggg

SEQ ID NO: 344525 - DNA, 75 bp, synthetic construct
  source 1..75: mol_type = other DNA
tactctgcctgatttaactttaaaagttactgagctcgaaaatgcagttaccgcgcatctgaaagctttaggatt

SEQ ID NO: 344526 - DNA, 75 bp, synthetic construct
  source 1..75: mol_type = other DNA
atctatcagttgctaatggattactggatggaagtgatgcaggacgacgtttatgtcctgagccaagatggttgg

SEQ ID NO: 344527 - DNA, 75 bp, synthetic construct
  source 1..75: mol_type = other DNA
agcgctggcagcgaattttgactattcagcaacaacttgccagcagccagataacgctctctgacgaagtgaatc

SEQ ID NO: 344528 - DNA, 75 bp, synthetic construct
  source 1..75: mol_type = other DNA
tgcaggcgctatcgccactaccagtctgatcaaagccgataatgctgaacaacgctggcagagaattttacacat

SEQ ID NO: 344529 - DNA, 75 bp, synthetic construct
  source 1..75: mol_type = other DNA
aggcagtggatcaggcttacacccaatttcactcacttaacggcggacaaaatgccgactacattccctttctgg

SEQ ID NO: 344530 - DNA, 75 bp, synthetic construct
  source 1..75: mol_type = other DNA
caatgggcggcaggaaaaaacgatttgggctggtactcgcttgatgaaggcgataaccagcaagaacgtttcgcc

SEQ ID NO: 344531 - DNA, 75 bp, synthetic construct
  source 1..75: mol_type = other DNA
ggtcctggggctgatttactccggttacagcaacgaacaaatagcgggtgaactggaagtggcggcaaccaccat

SEQ ID NO: 344532 - DNA, 75 bp, synthetic construct
  source 1..75: mol_type = other DNA
gcatatccgcaatctgtaccaaaaactcggcgtcgcccaccgtcaggctgccgtgcagcacgcgcagaaactgct

SEQ ID NO: 344533 - DNA, 75 bp, synthetic construct
  source 1..75: mol_type = other DNA
accacttcctgcaaggccaatggcgcaacattgcccgtgcacaaattttgctgggcgagtttgagcctgcggaaa

SEQ ID NO: 344534 - DNA, 75 bp, synthetic construct
  source 1..75: mol_type = other DNA
ttaaaactggcgaatcgtaccggatttatcagtcactttgtcatcgaaggcgaagcgatggcgcaacagttacgc

SEQ ID NO: 344535 - DNA, 75 bp, synthetic construct
  source 1..75: mol_type = other DNA
tgggctggtactcgcttgatgaaggcgataaccagcaagaacgtttcgccagctatctgatcgccgccgtgcaac

SEQ ID NO: 344536 - DNA, 75 bp, synthetic construct
  source 1..75: mol_type = other DNA
cagttaaaagagcagatgaatcgcattatcgaaacgcgcagcgatggtctgacattccactacaaagccattgat

SEQ ID NO: 344537 - DNA, 75 bp, synthetic construct
  source 1..75: mol_type = other DNA
gcgctggataaaattatcgttcaggagatgggcgaaagcagcaaaatgcgcagccgtctgaccaaacttgatgcg

SEQ ID NO: 344538 - DNA, 75 bp, synthetic construct
  source 1..75: mol_type = other DNA
tggtcgccgggaaacaggtcgcggagaaaggtattcgggtgaatattgtcgcgccaggccctatctggacggcac

SEQ ID NO: 344539 - DNA, 75 bp, synthetic construct
  source 1..75: mol_type = other DNA
gcagttttttgaccgtcgtctgacatcacctatcgaagctgcggaaagcagccgtatgtgtgacgacgtctctgg

SEQ ID NO: 344540 - DNA, 75 bp, synthetic construct
  source 1..75: mol_type = other DNA
gcaccgcgcccagcgtattctccgagaaatcaatcaacatcatcggcataaattcgcccatttcgatgagaattt

SEQ ID NO: 344541 - DNA, 75 bp, synthetic construct
  source 1..75: mol_type = other DNA
cgattaacgatggtaatccggatgaagcggaacggctggcaaaactggcactggaagagctgccgccgggctggt

SEQ ID NO: 344542 - DNA, 75 bp, synthetic construct
  source 1..75: mol_type = other DNA
acttgaagagtcacttaaagccctgccatgggagagtttgctggaaaatccgcagttggtgttattacaagcgtg

SEQ ID NO: 344543 - DNA, 75 bp, synthetic construct
  source 1..75: mol_type = other DNA
ttggataacgttaacttcacgctcaataaaggcgaagttcgcgcgctgttaggtaaaaacggcgcgggcaaatcg

SEQ ID NO: 344544 - DNA, 75 bp, synthetic construct
  source 1..75: mol_type = other DNA
cttggcaagcaaattccagtggcgatgactctggaaaagaatatgccgatcggttcgggcttaggctccagcgcc

SEQ ID NO: 344545 - DNA, 75 bp, synthetic construct
  source 1..75: mol_type = other DNA
cggttcgggcttaggctccagtgcctgttcggtggtcgcggcgctgatggcgatgaatgaacactgcggcaagcc

SEQ ID NO: 344546 - DNA, 75 bp, synthetic construct
  source 1..75: mol_type = other DNA
gattgggacttgggggggctgaaaagcaagtatgcttattggctgatcgactggctgaggcagagcatcaaatat

SEQ ID NO: 344547 - DNA, 75 bp, synthetic construct
  source 1..75: mol_type = other DNA
atcgcatgggcgatttctcgtgccattgatggagaaagctggtcagcgattgtcgattcgctgccttcgattgcg

SEQ ID NO: 344548 - DNA, 75 bp, synthetic construct
  source 1..75: mol_type = other DNA
ttattacagcacggtacgttctcgcaggagtttcactcgccggtcaatgtggatgagctgatgtccgccattctg

SEQ ID NO: 344549 - DNA, 75 bp, synthetic construct
  source 1..75: mol_type = other DNA
gtggtcgatccggatcaaacccaactgtatggcggtgcgccggttaaccgctttatttctggtgacttcaccctt

SEQ ID NO: 344550 - DNA, 75 bp, synthetic construct
  source 1..75: mol_type = other DNA
aaagaatggcgtaaagttgcacatacgcaccatattacgttagtcgtgagacagctttattggttggcgcagact

SEQ ID NO: 344551 - DNA, 75 bp, synthetic construct
  source 1..75: mol_type = other DNA
cgtcagttagcgccgcagttaccggatatgcagcaaacgctgctggataaacactatctgcgtaagcatggtgcg

SEQ ID NO: 344552 - DNA, 75 bp, synthetic construct
  source 1..75: mol_type = other DNA
gtgataaaaacgggttacagcgtaaagtcctcgacaaggaaaatctggcgtgggatgaggatctaacaaagcact

SEQ ID NO: 344553 - DNA, 75 bp, synthetic construct
  source 1..75: mol_type = other DNA
tctccggctctggcccgaccttgttcgctctgtgtgacaagccggataccgcccagcgcgttgccgactggttgg

SEQ ID NO: 344554 - DNA, 75 bp, synthetic construct
  source 1..75: mol_type = other DNA
cgaagaaaatcgtgttctgcggcacattaactgcgggcagtttaaaaacagaaattaccgacggcaaattaaata

SEQ ID NO: 344555 - DNA, 75 bp, synthetic construct
  source 1..75: mol_type = other DNA
gtgagaatatgttttccattccaaaagagcctggtcgttcttttggcgataaggtaaaagtacaggattttctgt

SEQ ID NO: 344556 - DNA, 75 bp, synthetic construct
  source 1..75: mol_type = other DNA
gatgagtgaggtagacgatcagattaaacagctgatcgacactgttgccagccagcatcagggaacgacagaaac

SEQ ID NO: 344557 - DNA, 75 bp, synthetic construct
  source 1..75: mol_type = other DNA
atgcaggctggcatgaatgacatgctcactagccttcaggcctcggtggctaaaattggcgcagaaggtgaaggt

SEQ ID NO: 344558 - DNA, 75 bp, synthetic construct
  source 1..75: mol_type = other DNA
ttgtggctgattatcgtaacaatcgggaagcggttagcaaatccattgccatgctggagttgctcgccgcaaata

SEQ ID NO: 344559 - DNA, 75 bp, synthetic construct
  source 1..75: mol_type = other DNA
atgaaacaacagcacgaacccaggccattaatgctgaatcggcacgtactgatagtcttcttcttcaggagcaga

SEQ ID NO: 344560 - DNA, 75 bp, synthetic construct
  source 1..75: mol_type = other DNA
aagcagaactgaataccagcattgataatgtaacagatcgcgccatcagctcggcaaacagctacactgacagca

SEQ ID NO: 344561 - DNA, 75 bp, synthetic construct
  source 1..75: mol_type = other DNA
cggttcagaccgccagcggcgatcaaagcggcatggtacaaaacatgctgcaggatgtactgaccgcgtttatgg

SEQ ID NO: 344562 - DNA, 75 bp, synthetic construct
  source 1..75: mol_type = other DNA
gctggtgcgcgctgctggcggttcgctggcgcttgccggtgcgacaaccctgtttatgctgccctgggcgctgaa

SEQ ID NO: 344563 - DNA, 75 bp, synthetic construct
  source 1..75: mol_type = other DNA
atcacccgcgaaagcgagggcgaaggaaaaagagaattaacaacctgagcgaatgctcagaaccggttaatggtg

SEQ ID NO: 344564 - DNA, 75 bp, synthetic construct
  source 1..75: mol_type = other DNA
gaagatctggcgctatttaaccagaagctggcggaatatctggtgctgtataacagcaaaagcccccacaaggcg

SEQ ID NO: 344565 - DNA, 75 bp, synthetic construct
  source 1..75: mol_type = other DNA
gccgaggctaatcaattgaccgccgaggtgctgaatagcacgcaacaggcagggcgcacgctttccggtgcctgc

SEQ ID NO: 344566 - DNA, 75 bp, synthetic construct
  source 1..75: mol_type = other DNA
ttgcttatatccggctgcattcggcaagagaactgatgacaagcgcaattgatccgggaataacacagagaggta

SEQ ID NO: 344567 - DNA, 75 bp, synthetic construct
  source 1..75: mol_type = other DNA
gcgatcctgactattgccgcagcgattggctggtttgggcgagaagggggattccccgatacgcaaatcgtcgcg

SEQ ID NO: 344568 - DNA, 75 bp, synthetic construct
  source 1..75: mol_type = other DNA
tactaattatatctacagtgggtttaaatatgtaagggatttttttttgtttctcctggcgagtttcgtcagatt

SEQ ID NO: 344569 - DNA, 75 bp, synthetic construct
  source 1..75: mol_type = other DNA
ccgctggtctggttgctgaatgctattacccgaatgttaatgcgcatgatgggcatcaaaaccgatatcgtggtt

SEQ ID NO: 344570 - DNA, 75 bp, synthetic construct
  source 1..75: mol_type = other DNA
gatgtcgccaacacttgccgaagaggtcactccgcaaaacgacggttcggtgattatcgatggcaccgccaacgt

SEQ ID NO: 344571 - DNA, 75 bp, synthetic construct
  source 1..75: mol_type = other DNA
gcataatacatcacatatgttcttacctgttgcggatacaatggttatcgatttaagtcgacaggaaatatacct

SEQ ID NO: 344572 - DNA, 75 bp, synthetic construct
  source 1..75: mol_type = other DNA
caataataatgaagcccggtaatccaccggtgctctggacccgttactccggaaacaaaatgacccgggctgagt

SEQ ID NO: 344573 - DNA, 75 bp, synthetic construct
  source 1..75: mol_type = other DNA
agagcccggccgctcttttggcgataaggtcaaagtgcaggattttcggtgtgtggcggttgagaacgaaaaagt

SEQ ID NO: 344574 - DNA, 75 bp, synthetic construct
  source 1..75: mol_type = other DNA
gcgctgcggacgaaatttattttgttccggaaggcacgccgctcagtacacaattagttaaatttcaacgcaata

SEQ ID NO: 344575 - DNA, 75 bp, synthetic construct
  source 1..75: mol_type = other DNA
tacctgctgatagtaaaacttttcagattattcgttggatgcccggagagttgttggtttaccgcgataaaagcg

SEQ ID NO: 344576 - DNA, 75 bp, synthetic construct
  source 1..75: mol_type = other DNA
attaatccttttgttgaggggggatatcttcccaacgtcggacctgggtttatcgcaacccatgaaactgaagat

SEQ ID NO: 344577 - DNA, 75 bp, synthetic construct
  source 1..75: mol_type = other DNA
tatggctttcacgaaccttattcgacttgccaataagcgggtggatagtttggcatcgccaggtgatgcttttac

SEQ ID NO: 344578 - DNA, 75 bp, synthetic construct
  source 1..75: mol_type = other DNA
gttaacggcaatgatggcggacaatggaataatggcaatatcgcaaatcagcaagaccagaacgctgacagcgct

SEQ ID NO: 344579 - DNA, 75 bp, synthetic construct
  source 1..75: mol_type = other DNA
tgacacgtttaaaaggagaaacgtcgctacgagtttctcctttctcggatatgacttcaaagtgcgtactctgaa

SEQ ID NO: 344580 - DNA, 75 bp, synthetic construct
  source 1..75: mol_type = other DNA
tttatataagaaccaaatttataaagtaacaaccaacgccttgggtgaaggtgaattgattaatcttaagtcgga

SEQ ID NO: 344581 - DNA, 75 bp, synthetic construct
  source 1..75: mol_type = other DNA
agcaatgacccggcgtgtacatgccatgtatgcgcgtcatgccgggacatataccggacgtcatcagtttgacgg

SEQ ID NO: 344582 - DNA, 75 bp, synthetic construct
  source 1..75: mol_type = other DNA
ctgggcggtgaccgggctttatttctacgacagtaaagtcgtggagtacgcaaagctggtgaagccgtcggagcg

SEQ ID NO: 344583 - DNA, 75 bp, synthetic construct
  source 1..75: mol_type = other DNA
acctgaccgttgaactgctcgggcgcggatttgcctggctggacaccggcactcacgacagcctgattgaagcca

SEQ ID NO: 344584 - DNA, 75 bp, synthetic construct
  source 1..75: mol_type = other DNA
ataaataatatgcttatcgacctgatggctgcaatgtcgcataaagactggctgagtcgtcgtcaacgacaaaaa

SEQ ID NO: 344585 - DNA, 75 bp, synthetic construct
  source 1..75: mol_type = other DNA
aagaaactgagcatccgtgaaacggcagaggcgacaggctatagtacttcccaggtttgtcgcattcaggctctc

SEQ ID NO: 344586 - DNA, 75 bp, synthetic construct
  source 1..75: mol_type = other DNA
gttttgaaaagggctttatgctccgtggcgtggacattgaggtcacgctgaatatggataattttgccggcgagg

SEQ ID NO: 344587 - DNA, 75 bp, synthetic construct
  source 1..75: mol_type = other DNA
ttttgcccgcgccagcgcctttacccatgtgctgctgctgaaaagcccacaggagatccgcccaaccatcgacac

SEQ ID NO: 344588 - DNA, 75 bp, synthetic construct
  source 1..75: mol_type = other DNA
atgtttcatcgcttatggacgttaatccgcaaagagttgcagtcgctgctgcgcgaaccgcaaacccgcgcgatt

SEQ ID NO: 344589 - DNA, 75 bp, synthetic construct
  source 1..75: mol_type = other DNA
aggtagtccaggaattaaaccaacaggtacaactttgactcttgagtgcaaaacaggtaacagtagtatacgaag

SEQ ID NO: 344590 - DNA, 75 bp, synthetic construct
  source 1..75: mol_type = other DNA
agatgtcaccacggaaaatggtgatattcagccggagtcaccggtgacggatatgacagacacacatcctgaatc

SEQ ID NO: 344591 - DNA, 75 bp, synthetic construct
  source 1..75: mol_type = other DNA
ctgctgatgcagtgaaagacgcgctgcgctcagaagatgtgcgtggagcactgaaacagaaagtccgccagacat

SEQ ID NO: 344592 - DNA, 75 bp, synthetic construct
  source 1..75: mol_type = other DNA
tggtttcgccgctcaccacctggcagatattcatcggcaaagccgtaccggcattaattgtcgccaccttccagg

SEQ ID NO: 344593 - DNA, 75 bp, synthetic construct
  source 1..75: mol_type = other DNA
catcgacggaagaccagttcgccgatcgggcaaaagagatgctggagcagttcgtccaggaacgggggcataaaa

SEQ ID NO: 344594 - DNA, 75 bp, synthetic construct
  source 1..75: mol_type = other DNA
tgcgacgctgtcgcgtcttatcaggcctacaactattgccgacctgtaggccggataaggcacttgtgccgcatc

SEQ ID NO: 344595 - DNA, 75 bp, synthetic construct
  source 1..75: mol_type = other DNA
gtggcggctgcgcaatcgcaactggcagaacagcaaaaacagctggccgatcctgctttccgcgctcgtgcgcaa

SEQ ID NO: 344596 - DNA, 75 bp, synthetic construct
  source 1..75: mol_type = other DNA
agagatggctcgctggcgatgggataagccggttattgaagcaaatgtcgagtactggcgcgagcaactgcagtt

SEQ ID NO: 344597 - DNA, 75 bp, synthetic construct
  source 1..75: mol_type = other DNA
tttaatcaccggctgcccgattggcggcgcagcagaaaaagtggtgcgcgcgattgaagagaatggcggctgggt

SEQ ID NO: 344598 - DNA, 75 bp, synthetic construct
  source 1..75: mol_type = other DNA
gagatgatcaaagcaggtaaagctggcgattataaaaaagcacgcgcgatacatgaccgtctgctgccagtaacg

SEQ ID NO: 344599 - DNA, 75 bp, synthetic construct
  source 1..75: mol_type = other DNA
atgtggactagacatagggatgcctcgtggtggttaatgaaaattaacttactacggggctatcttctttctgcc

SEQ ID NO: 344600 - DNA, 75 bp, synthetic construct
  source 1..75: mol_type = other DNA
agatcgcgtactggatctgttctgcggtatgggcaactttacactgccattggcgacacaagctgccagtgtggt

SEQ ID NO: 344601 - DNA, 75 bp, synthetic construct
  source 1..75: mol_type = other DNA
tcttttggtcagggcgtggcacgacataacggcaaagcgttatttattcctggattattgccacaggaaaacgcg

SEQ ID NO: 344602 - DNA, 75 bp, synthetic construct
  source 1..75: mol_type = other DNA
ttcgtccaggaacgggggcataaaattgccagttattatcgggagaacataagcggtacaaaacttgaccgtccg

SEQ ID NO: 344603 - DNA, 75 bp, synthetic construct
  source 1..75: mol_type = other DNA
cctgacctgcgcaccgtcgatgtgttaattcgtcgtttacgccataaactcagtgcggatttactggtgacacaa

SEQ ID NO: 344604 - DNA, 75 bp, synthetic construct
  source 1..75: mol_type = other DNA
cttagcaacagcgactggataacgctgaaaaagcaaattgaacaacatgaattgcgaattgtcagtctggatgtt

SEQ ID NO: 344605 - DNA, 75 bp, synthetic construct
  source 1..75: mol_type = other DNA
cagcggaacaaaacttgaccgcccggaactgggacgcttactgatggacagtcaccacagtgatattttgctggt

SEQ ID NO: 344606 - DNA, 75 bp, synthetic construct
  source 1..75: mol_type = other DNA
ttgatccggaaggtgtcagattattgtctttcaggggaagaagtataccgttttctccttcattcattagtttta

SEQ ID NO: 344607 - DNA, 75 bp, synthetic construct
  source 1..75: mol_type = other DNA
gtggttgcggttaaagaggctgggggccagattatcgtgatgccgcattgcgatactgcggtgatccgtcgcgcc

SEQ ID NO: 344608 - DNA, 75 bp, synthetic construct
  source 1..75: mol_type = other DNA
attttcacgatctccgccatgaggccatcagccgtttgttcgagctcggcacactgaacgttatggagattgcag

SEQ ID NO: 344609 - DNA, 75 bp, synthetic construct
  source 1..75: mol_type = other DNA
cacaagctctgcacattgaagacctgcattttcacgatctacggcatgaagcaatcagccgcttcttcgaactgg

SEQ ID NO: 344610 - DNA, 75 bp, synthetic construct
  source 1..75: mol_type = other DNA
tttattaataatcgtatattctctaagagaacagttaagtgaattgtttagtattcccacaggatgggttttcct

SEQ ID NO: 344611 - DNA, 75 bp, synthetic construct
  source 1..75: mol_type = other DNA
tatatttattttccaacatattgaatgcattaattccatttctgttgctacctattctaacacataatttgaccc

SEQ ID NO: 344612 - DNA, 75 bp, synthetic construct
  source 1..75: mol_type = other DNA
ttatctgagccacggtgcaaacggctttggtctcggttctgcgctttatcgccctggcatgacgccagagcaggt

SEQ ID NO: 344613 - DNA, 75 bp, synthetic construct
  source 1..75: mol_type = other DNA
gactcatccgcgctgtgtgtggaacttgctgaaagcgcacgtttcccgctacacgccggacgtagtagaaaacat

SEQ ID NO: 344614 - DNA, 75 bp, synthetic construct
  source 1..75: mol_type = other DNA
agggcaaccagatggctaaccgcgataactccgacccgtccggtctggggaatacgctgggatgggcctgggcgt

SEQ ID NO: 344615 - DNA, 75 bp, synthetic construct
  source 1..75: mol_type = other DNA
ttgcgcttctcgccacgaagttcatttgcccgtacgttattgctcatcgtcaccttgctgttcgtcagcctggtg

SEQ ID NO: 344616 - DNA, 75 bp, synthetic construct
  source 1..75: mol_type = other DNA
catctcccggagcgttacctgttaacgaccctgactacattatgatttgccctctgaacccgggtagcaccccgc

SEQ ID NO: 344617 - DNA, 75 bp, synthetic construct
  source 1..75: mol_type = other DNA
ctgtaccaggccgaaggtggtaaaggcgtagaaccgctgatgaagatgagctggaactacaagcagccgcacgaa

SEQ ID NO: 344618 - DNA, 75 bp, synthetic construct
  source 1..75: mol_type = other DNA
gaccgacttaggcctgctctctaccagcctgccaggttatctgacgctgccgtcagaaaaacaggttgatttgca

SEQ ID NO: 344619 - DNA, 75 bp, synthetic construct
  source 1..75: mol_type = other DNA
tctttatttatggtaagcatagtatatgcgctggttagtctttatagtttatataaaagcaaattaatcatgctt

SEQ ID NO: 344620 - DNA, 75 bp, synthetic construct
  source 1..75: mol_type = other DNA
atccagtgattgattctgtatgggacatttatgaacggcaaaactatcaacttctcgaccatgctgtcacttata

SEQ ID NO: 344621 - DNA, 75 bp, synthetic construct
  source 1..75: mol_type = other DNA
taaccagaccttatgataaaatatcatcaatagcttcactggctttagaaagagatgagatacaaaaaaattatg

SEQ ID NO: 344622 - DNA, 75 bp, synthetic construct
  source 1..75: mol_type = other DNA
aggtaatataggcgttaaaccaacaggtaccagtctgactcttaagtgcaaaacaggaaatagtaatatacgaag

SEQ ID NO: 344623 - DNA, 75 bp, synthetic construct
  source 1..75: mol_type = other DNA
acatactgtatttcccatttaaacctgcgttggatgataaatatttatttttcagagagtcccttcgtaaaaata

SEQ ID NO: 344624 - DNA, 75 bp, synthetic construct
  source 1..75: mol_type = other DNA
tggatgatctaaaacattcactggatgtgtttatttccacattcagtatcgataatgtgtttttttctcagacag

SEQ ID NO: 344625 - DNA, 75 bp, synthetic construct
  source 1..75: mol_type = other DNA
acacttacatcataatattcctgtctttctggtgataagtggatgtgagcacatcagtggatattcagcactggc

SEQ ID NO: 344626 - DNA, 75 bp, synthetic construct
  source 1..75: mol_type = other DNA
atggcgatggtatttattttgctaaatcttgatttccgttatcaaaaaatctctctttatataaattggaatata

SEQ ID NO: 344627 - DNA, 75 bp, synthetic construct
  source 1..75: mol_type = other DNA
tcacagccttacaagatcacgataggtagtgcgcctgcgacaattccaggaaatacagtagttaaaccaataggt

SEQ ID NO: 344628 - DNA, 75 bp, synthetic construct
  source 1..75: mol_type = other DNA
tcttttgtgcttttgtttgtttattggttttatctgtttgctatggtattggttttttaagaaactggacagata

SEQ ID NO: 344629 - DNA, 75 bp, synthetic construct
  source 1..75: mol_type = other DNA
ttagttatattatttgatgagtttgaaaaggttcgttcaattattaacggaagtaatacagaaccagtaattgat

SEQ ID NO: 344630 - DNA, 75 bp, synthetic construct
  source 1..75: mol_type = other DNA
tcatctgagcatagattctttcagtttgtagatgatgaattacacaatataccaacgagttcggcgcaggactgg

SEQ ID NO: 344631 - DNA, 75 bp, synthetic construct
  source 1..75: mol_type = other DNA
tggacacaaccgggacagaataaacttcatcagtggtatgagactatcaaagaggcatatggacgtgatacggtt

SEQ ID NO: 344632 - DNA, 75 bp, synthetic construct
  source 1..75: mol_type = other DNA
caacaccacctatcttggctggatctggagcggctttcaggtgacgatcgctttgtcgatctgcgcctggattat

SEQ ID NO: 344633 - DNA, 75 bp, synthetic construct
  source 1..75: mol_type = other DNA
aaggcggagctggatcccaatattcagtttttcctttcttccatgctctgcctggggctgtttactgccgctcgt

SEQ ID NO: 344634 - DNA, 75 bp, synthetic construct
  source 1..75: mol_type = other DNA
atgatgaatctggtgaaaaactccgctatcgcgtcaaccatcggtctggtggatatggcggcgcaggccggtaaa

SEQ ID NO: 344635 - DNA, 75 bp, synthetic construct
  source 1..75: mol_type = other DNA
cattttttagctaaatatcaaatagaagcgtggcagcttatttttgaggtaacagaaagtaatatcctgaccaat

SEQ ID NO: 344636 - DNA, 75 bp, synthetic construct
  source 1..75: mol_type = other DNA
tttggtttatcgtcgagtatcgacatgtgggtcattgagcatacgctgcaatttatggctgaaaacagagcgaag

SEQ ID NO: 344637 - DNA, 75 bp, synthetic construct
  source 1..75: mol_type = other DNA
ggctcgttttcctgttgaagtcagttgctggctaaatatcagattgaagcgtggcaacttatttttgaagtcacc

SEQ ID NO: 344638 - DNA, 75 bp, synthetic construct
  source 1..75: mol_type = other DNA
gaaatttgtcttcgccgaagggatcgcatacggtccggaaatggcagcgaaagcgcagtctgacgcgaaagcggc

SEQ ID NO: 344639 - DNA, 75 bp, synthetic construct
  source 1..75: mol_type = other DNA
atgctattccacatccagggatgggtttataaacggcaagatgatatcggatttttagccatgacaaagataaaa

SEQ ID NO: 344640 - DNA, 75 bp, synthetic construct
  source 1..75: mol_type = other DNA
tcccggtacagaccggccttcacctggtgttttctgctgcgttaattcgccgtgcactgattgttgcagcggtct

SEQ ID NO: 344641 - DNA, 75 bp, synthetic construct
  source 1..75: mol_type = other DNA
ccatcgcctcgaccatcgggctggtggatatggcggcgcaggccgggaaattgctcgattactccgcccacgcct

SEQ ID NO: 344642 - DNA, 75 bp, synthetic construct
  source 1..75: mol_type = other DNA
caccgaaggccgcaaattcattcatgttgatatcgaacctgcacaaattggccggatatttgcgccggatctggg

SEQ ID NO: 344643 - DNA, 75 bp, synthetic construct
  source 1..75: mol_type = other DNA
ggctctcgaaaaccttggtttgggagatggctccgggaggcttatacagtgtcaggtgtttaaaagctcaggtac

SEQ ID NO: 344644 - DNA, 75 bp, synthetic construct
  source 1..75: mol_type = other DNA
ggcgtaacaacgtttcacatggtgatatccgcttaatttcccagcgaattttctggcagattgtttttcctgcaa

SEQ ID NO: 344645 - DNA, 75 bp, synthetic construct
  source 1..75: mol_type = other DNA
ggactaacgttgccaggcttgctgaacaggcaccaattcattgggtttcggtcgcacaaattgaaaatagcctcg

SEQ ID NO: 344646 - DNA, 75 bp, synthetic construct
  source 1..75: mol_type = other DNA
cgtgatgttggcattcgtggtatccgtattctgcgagcctccaactctacctacaaacccttgccacaagcgggt

SEQ ID NO: 344647 - DNA, 75 bp, synthetic construct
  source 1..75: mol_type = other DNA
tggctggaagggcattcatgcagcgacgacagactgggtaaagccgagaatcaaacagtacacggcaaccaggct

SEQ ID NO: 344648 - DNA, 75 bp, synthetic construct
  source 1..75: mol_type = other DNA
ccgataaggccggaggctattgaaaacgcaatagaatacatccgcagtatcgcttttcacatcgatgaagacgat

SEQ ID NO: 344649 - DNA, 75 bp, synthetic construct
  source 1..75: mol_type = other DNA
cgcaccgccagcgccgatagcgttggaggccattgaaaatgcaatagaatacatccgcagtatcgcttttcacat

SEQ ID NO: 344650 - DNA, 75 bp, synthetic construct
  source 1..75: mol_type = other DNA
acaaaaacgcagtggttgcaggataaaaatatccgaatgttttatggtgattcggacaacgatattaccgcagcg

SEQ ID NO: 344651 - DNA, 75 bp, synthetic construct
  source 1..75: mol_type = other DNA
ctgccaataccgcccaggcggcaggaaatggtgcggctcgcgatcgctggcttcagcaggcagaacaacgtgggc

SEQ ID NO: 344652 - DNA, 75 bp, synthetic construct
  source 1..75: mol_type = other DNA
aagcaatttcgttcttttgggatggcatgccgatgcaaccgcagattggcgtcagttactgctatgtgcgctcgc

SEQ ID NO: 344653 - DNA, 75 bp, synthetic construct
  source 1..75: mol_type = other DNA
cgccctgaatcgagcgttgcgtgatgcgccctggtccgcactatgctatttacgtattccaggcatggagatgct

SEQ ID NO: 344654 - DNA, 75 bp, synthetic construct
  source 1..75: mol_type = other DNA
tatgtcacgaaaatcgatgattggacagctactgaatgttgggccgtctgagcgtctgagcggcagtctggcttg

SEQ ID NO: 344655 - DNA, 75 bp, synthetic construct
  source 1..75: mol_type = other DNA
atgagggaccggtgtcccgcgaatccgtggagtattacagagaccatgagcaggcggcacaggcgctggaaaacg

SEQ ID NO: 344656 - DNA, 75 bp, synthetic construct
  source 1..75: mol_type = other DNA
gatgggattaaatctaaaggccaccatcacacagctcagggggaatacgcttcgacaacggaggctcaggcatga

SEQ ID NO: 344657 - DNA, 75 bp, synthetic construct
  source 1..75: mol_type = other DNA
ggtcttttccgctgcgctaatccgccgtgcgctgattgttgcagcggtctgtctggccgtggctacggggctgtg

SEQ ID NO: 344658 - DNA, 75 bp, synthetic construct
  source 1..75: mol_type = other DNA
ttttcaggcatcaaaaatgtaacgcagcgtcattattgcggctacaggcaatttgcagaaatgtgaagaatttca

SEQ ID NO: 344659 - DNA, 75 bp, synthetic construct
  source 1..75: mol_type = other DNA
aagccagttggcgctattcccgcaatgcagacgagagaagggcgctttatttttaccgtagcttttcaaaccata

SEQ ID NO: 344660 - DNA, 75 bp, synthetic construct
  source 1..75: mol_type = other DNA
aacaagaaacgctgcttaattatctgcaaagcggtaatttgcaaagcctgcggatgtggatcaaagagcgcggtc

SEQ ID NO: 344661 - DNA, 75 bp, synthetic construct
  source 1..75: mol_type = other DNA
caaagacaaaagagaatgattgttatttacttttcaaaaaagtgtcatattgtccatataaagtcaagaggtatt

SEQ ID NO: 344662 - DNA, 75 bp, synthetic construct
  source 1..75: mol_type = other DNA
attgtccatataaagtcaagcgatattttacgttatgtaactgatgcaattgttagtcagggtctcatggttgtc

SEQ ID NO: 344663 - DNA, 75 bp, synthetic construct
  source 1..75: mol_type = other DNA
gctggccagcgtcttaaagcgcaatttgcccagcaaggtcgtatcgtcgatgctgataaccctctgtttgtctat

SEQ ID NO: 344664 - DNA, 75 bp, synthetic construct
  source 1..75: mol_type = other DNA
cgttacggattgctgaaaccacagcggaccgacggcggtcatcgcctgttcaacgatgcggatatcgaccggatc

SEQ ID NO: 344665 - DNA, 75 bp, synthetic construct
  source 1..75: mol_type = other DNA
gccggtgcggttgtggtttcactctgctccacctccgatgaaaccatcgaagaagccgagaaagacctgccgcgc

SEQ ID NO: 344666 - DNA, 75 bp, synthetic construct
  source 1..75: mol_type = other DNA
gctggccgacaagtatctggcgattggctgctcctgtgtttctccgaatgatcaacgtctgaaaatgctcagcca

SEQ ID NO: 344667 - DNA, 75 bp, synthetic construct
  source 1..75: mol_type = other DNA
cacacatctgttcattcctctgcgccgacgtcttcagtgtcagcaaccaactctccaggcgttactggcgatcct

SEQ ID NO: 344668 - DNA, 75 bp, synthetic construct
  source 1..75: mol_type = other DNA
aggattaccccgcccagacgctcaccacacatctgttcattcctctgcgccgacgtcttcagtgtcagcaaccaa

SEQ ID NO: 344669 - DNA, 75 bp, synthetic construct
  source 1..75: mol_type = other DNA
cgacgacttcagtgccaacaaccgactctccaggcgctgctggcgatcctcgacggcgtactgatcaactacatc

SEQ ID NO: 344670 - DNA, 75 bp, synthetic construct
  source 1..75: mol_type = other DNA
tgtcgctggaagacaaacagtttacagcgtcaatcgatcgtgcggggaaactgcttactcgatttggtgagcagg

SEQ ID NO: 344671 - DNA, 75 bp, synthetic construct
  source 1..75: mol_type = other DNA
ttgtcggttagttggttagggaaaatgtcagagaaggaatacgtagacggagttactcccatgacagccatgagg

SEQ ID NO: 344672 - DNA, 75 bp, synthetic construct
  source 1..75: mol_type = other DNA
gtctcccgcatcatcggcgttctggagtccaagctcgatgccacggcagacaaactacaggatgtagctgccggc

SEQ ID NO: 344673 - DNA, 75 bp, synthetic construct
  source 1..75: mol_type = other DNA
tgtctgtgtgggctggtggcggattcgatggattgatgtctggttcttctggttcatattctggattcaataatc

SEQ ID NO: 344674 - DNA, 75 bp, synthetic construct
  source 1..75: mol_type = other DNA
atggcgcagctggcggcgcactattcccgcgtagatggcattcgcaagcctgccacacctttattaccaggcact

SEQ ID NO: 344675 - DNA, 75 bp, synthetic construct
  source 1..75: mol_type = other DNA
tgctgataaccctctgtttgtctatctgccgtgtggtgttggcggtggtcctggtggcgtcgcattcggacttaa

SEQ ID NO: 344676 - DNA, 75 bp, synthetic construct
  source 1..75: mol_type = other DNA
cacgttgttccttggatattccgtcgcaggccagcgtcttaaggcgcaatttgctcagcaaggtcgcatcgtcga

SEQ ID NO: 344677 - DNA, 75 bp, synthetic construct
  source 1..75: mol_type = other DNA
tgtttgggtggcagaagcctattgttgaagctgcggccgaaatggaacgtatgcgggtgatgcttcgagggttga

SEQ ID NO: 344678 - DNA, 75 bp, synthetic construct
  source 1..75: mol_type = other DNA
aaatagccactcttaatgatcagcttgaaaaagcgaaaaaggaaggaaacaccgagcagatcaagaaactgcaag

SEQ ID NO: 344679 - DNA, 75 bp, synthetic construct
  source 1..75: mol_type = other DNA
tgctggcctgactgcgtttattgcggcgaatccgataggttttgttttcactgctgcaatgaccgctgttgctgg

SEQ ID NO: 344680 - DNA, 75 bp, synthetic construct
  source 1..75: mol_type = other DNA
caatggcagacgctgccggcattactatgggggaactgaccaaagcagtctccagcggtactgtggaagcgaaac

SEQ ID NO: 344681 - DNA, 75 bp, synthetic construct
  source 1..75: mol_type = other DNA
cgactcttaatgatcagcttgaaaaagccaaaaaggatggcaataccgagcaaatccagaaactgcaaggcagta

SEQ ID NO: 344682 - DNA, 75 bp, synthetic construct
  source 1..75: mol_type = other DNA
ccggcgatacagaaagcatatggaacaatgccgctcaacggatgaaagcaatcgcgcttgagactatcgctcaag

SEQ ID NO: 344683 - DNA, 75 bp, synthetic construct
  source 1..75: mol_type = other DNA
ccctaaaggtctgatgcgtacgcaaatacgcgttgtaggcatgatggatgggctaccagatgcctcattgccgtg

SEQ ID NO: 344684 - DNA, 75 bp, synthetic construct
  source 1..75: mol_type = other DNA
atgggtagtttgacagggaagtatcgggctgtagtggtaagcgtcgatgaccctaaaggtctgatgcgtacgcaa

SEQ ID NO: 344685 - DNA, 75 bp, synthetic construct
  source 1..75: mol_type = other DNA
tgatatgcccgcacaaactgcaccgccaacaacggcgaaccttaacgcctggctgaataatttctataacgcgga

SEQ ID NO: 344686 - DNA, 75 bp, synthetic construct
  source 1..75: mol_type = other DNA
atagtcatcagcgttggggcatccggggcaattatgggaatagcgggcgctgcgatagcaacacagcttgcttca

SEQ ID NO: 344687 - DNA, 75 bp, synthetic construct
  source 1..75: mol_type = other DNA
tatggtggcgctgacactgttgtatggtacccggcaaacaggaatagataacgcttgccacattggcggcctgat

SEQ ID NO: 344688 - DNA, 75 bp, synthetic construct
  source 1..75: mol_type = other DNA
gtgcaccagcacaaccatcaaccagcgccaaaaaagactttatttcgtcgcggaacggactaatggagatccgga

SEQ ID NO: 344689 - DNA, 75 bp, synthetic construct
  source 1..75: mol_type = other DNA
gtaacgccaaaccagataaggacaacaacaaaattaaaaaacttcgagacgggaaagggctgtatctctatgttc

SEQ ID NO: 344690 - DNA, 75 bp, synthetic construct
  source 1..75: mol_type = other DNA
tcgctaatcatgacttgcaattgtccagcaggaagtaaaggtattctatgtagacaccgtaaagctttaattacc

SEQ ID NO: 344691 - DNA, 75 bp, synthetic construct
  source 1..75: mol_type = other DNA
acgagcagaacagacttggataagtgttcgcgataatttgagagcaatgataaacgctcttgttgaaccacctaa

SEQ ID NO: 344692 - DNA, 75 bp, synthetic construct
  source 1..75: mol_type = other DNA
tataccattaataatgacgtttatttaagtgatgttatttttgataacaaccaggcggtaatgactccaacttat

SEQ ID NO: 344693 - DNA, 75 bp, synthetic construct
  source 1..75: mol_type = other DNA
agcaagcatccttcaggttatacgatagtaaataacactgcctttacaaataacactgccgaaggggtgatgctg

SEQ ID NO: 344694 - DNA, 75 bp, synthetic construct
  source 1..75: mol_type = other DNA
tggattcagggctatggcctgctccgctctgacagaatcaggcatatggacaagggaagctgtcgagctccagat

SEQ ID NO: 344695 - DNA, 75 bp, synthetic construct
  source 1..75: mol_type = other DNA
actggatgtttaagccgggtgctatgaaacaggtggcagaatatgctgacggtatcggaccggattaccatatgc

SEQ ID NO: 344696 - DNA, 75 bp, synthetic construct
  source 1..75: mol_type = other DNA
aacaataaggaaaaggcttgagtcagagtatattacttttaaccagatccttatgcaatcaagaatgagcaaagc

SEQ ID NO: 344697 - DNA, 75 bp, synthetic construct
  source 1..75: mol_type = other DNA
cttgagagaggaataaatatatcagtaagattgcaaaagaagaaatcaacagcaaatccatttatcgcaatcaga

SEQ ID NO: 344698 - DNA, 75 bp, synthetic construct
  source 1..75: mol_type = other DNA
caaactatctggctggtgtttgcaggatatgctctttttctcgcagtgatatttttctttgggtttaaatataat

SEQ ID NO: 344699 - DNA, 75 bp, synthetic construct
  source 1..75: mol_type = other DNA
aaatgctatctggactccgaagcggatactgtcagcttcgcactccaaccttttgatcatgatgatgcgctgtta

SEQ ID NO: 344700 - DNA, 75 bp, synthetic construct
  source 1..75: mol_type = other DNA
gaaggcggcgaactggtcgtcaatgacaccttcgggcagcatcgggtaaaactcccggcaggcgatctggtgttg

SEQ ID NO: 344701 - DNA, 75 bp, synthetic construct
  source 1..75: mol_type = other DNA
tgatgatgttaagttattcaaaacggtaaaaactaccgcgttgaataagcacaaggaaacaatatataaagcact

SEQ ID NO: 344702 - DNA, 75 bp, synthetic construct
  source 1..75: mol_type = other DNA
atggctgattatcagggtaaaaatgtcgtcattatcggcctgggcctcaccgggctttcctgcgtggactttttc

SEQ ID NO: 344703 - DNA, 75 bp, synthetic construct
  source 1..75: mol_type = other DNA
gcggcatttagttgggcgagtggcaatatcttcaacaaaaagatcatgtctcattcatcccgtccggcggtaatg

SEQ ID NO: 344704 - DNA, 75 bp, synthetic construct
  source 1..75: mol_type = other DNA
atgagcaacgacacgccatttgatgcgttgtggcaacgaatgctggcgcgcggctggacgccggttagtgaattc

SEQ ID NO: 344705 - DNA, 75 bp, synthetic construct
  source 1..75: mol_type = other DNA
atctgaatggcgataacgtgcgtctgtattgtttcggtcgtgatggcgcacagttggcggcgttacgcccggaag

SEQ ID NO: 344706 - DNA, 75 bp, synthetic construct
  source 1..75: mol_type = other DNA
cagttagcggctttacgcccggaagtggctgaacaaaccgaaaccatggagcaggcgatgcgtctattggctccg

SEQ ID NO: 344707 - DNA, 75 bp, synthetic construct
  source 1..75: mol_type = other DNA
cacggtcaccacgctagtgggtgaaatggcgaaagcggcgggggttaacgttggtgtgggtggcaatattggcct

SEQ ID NO: 344708 - DNA, 75 bp, synthetic construct
  source 1..75: mol_type = other DNA
aagacgcttgaggctgcccgtcggatgcagaagatggggatgtcgcctgagagtattcaggagatcctgcagctt

SEQ ID NO: 344709 - DNA, 75 bp, synthetic construct
  source 1..75: mol_type = other DNA
ccatcttcagaagaagtggcgatggagagcaacggtaaggcgctggccgatattaccgatccggcaaccggtgcg

SEQ ID NO: 344710 - DNA, 75 bp, synthetic construct
  source 1..75: mol_type = other DNA
gactacagcgcagcgcctccgggcagcggcgtcgggccgtttatcatgcagcaggaaggcatggggcgtctgttt

SEQ ID NO: 344711 - DNA, 75 bp, synthetic construct
  source 1..75: mol_type = other DNA
tgtggaacttgctgaaacagcacgtttcccgctacacgccagatgtggttgaaaacatctgcggtacgccaaaag

SEQ ID NO: 344712 - DNA, 75 bp, synthetic construct
  source 1..75: mol_type = other DNA
ttttctgggggaaaagctttacctgcatacagccccgttttatgtagaagcaaccggccccagtatgcctgaaat

SEQ ID NO: 344713 - DNA, 75 bp, synthetic construct
  source 1..75: mol_type = other DNA
gttgtctgtcgaaactgaagttcctcgtcaccatcgacccgctgaacactgaaacctctaacttctggcagaacc

SEQ ID NO: 344714 - DNA, 75 bp, synthetic construct
  source 1..75: mol_type = other DNA
atggaactacgccattccgcatgagccatcttcagaagaagtggcgatggagagcaacggtaaggcgctggccga

SEQ ID NO: 344715 - DNA, 75 bp, synthetic construct
  source 1..75: mol_type = other DNA
ctttttttagccttcttcctgtattgtattgggttttcaagatgatgtttgataggttacgctttgcgcttacat

SEQ ID NO: 344716 - DNA, 75 bp, synthetic construct
  source 1..75: mol_type = other DNA
ggtcattatcgcggcgtattgaatggcattcacccgtgggcagagctgataaacctgatgcgcggccttgtcgaa

SEQ ID NO: 344717 - DNA, 75 bp, synthetic construct
  source 1..75: mol_type = other DNA
gtgttctccggggtaaaaaggtccgtactaccgtcagccggaaagccgttgccgcatgcgaccgcgtaaaccgtc

SEQ ID NO: 344718 - DNA, 75 bp, synthetic construct
  source 1..75: mol_type = other DNA
gcctgttcaccggctacgacgcggaaaaacgcaagtacgataaatcctcctggacttacgaactggacgaaaacg

SEQ ID NO: 344719 - DNA, 75 bp, synthetic construct
  source 1..75: mol_type = other DNA
cggcgcccccctgcaatggaaatttgacagcagcaccggcactggctctctgaaacagggttccgatgaatatgc

SEQ ID NO: 344720 - DNA, 75 bp, synthetic construct
  source 1..75: mol_type = other DNA
atgcaatccattgatgttacttctgatgatgaattctatgaagtcgcaatgtccgccatccgtaaggggagagct

SEQ ID NO: 344721 - DNA, 75 bp, synthetic construct
  source 1..75: mol_type = other DNA
atgaataaattcttaggcaacgttgaacctgatggatcagtattcagcaaatatcaattactggaggaggatggc

SEQ ID NO: 344722 - DNA, 75 bp, synthetic construct
  source 1..75: mol_type = other DNA
aatcgctggatgacgcagccaaaattctttcttttggcgcggataaaatctccatcaactctcctgcgctggcgg

SEQ ID NO: 344723 - DNA, 75 bp, synthetic construct
  source 1..75: mol_type = other DNA
acccgacgttaatcactcgcctggcggatcgctttggcgtgcagtgtattgtggtcggtattgatacctggtacg

SEQ ID NO: 344724 - DNA, 75 bp, synthetic construct
  source 1..75: mol_type = other DNA
tccacaaacaaataatcaatattggtgaattaaaagcgtacctggcaatacagggcgtggagatcaggatatgtt

SEQ ID NO: 344725 - DNA, 75 bp, synthetic construct
  source 1..75: mol_type = other DNA
aagggccgccaggaggagagagaaaaggctcttcaggagaattacgcatcggcccgtcgcatgcagcagatgggt

SEQ ID NO: 344726 - DNA, 75 bp, synthetic construct
  source 1..75: mol_type = other DNA
atgtctcaggctgagcgtcgttatgaccgcctgtctgtccggctttcgctgattatcagccgtctgctgagcggg

SEQ ID NO: 344727 - DNA, 75 bp, synthetic construct
  source 1..75: mol_type = other DNA
tctttcttttggcgcggataaaatttccatcaactcccctgcgctggcggacccgacgttaattactcgcctggc

SEQ ID NO: 344728 - DNA, 75 bp, synthetic construct
  source 1..75: mol_type = other DNA
agggatagaaagaactgtcgaaagattggtagtaaaagtgcatcttcgcgcagcaagcgtgcagcagatgctgag

SEQ ID NO: 344729 - DNA, 75 bp, synthetic construct
  source 1..75: mol_type = other DNA
cctgcgtcaaaaccagccacaccacccgcacctgaagtggtgcgctatgaccgttacctgctgatcaacacccgc

SEQ ID NO: 344730 - DNA, 75 bp, synthetic construct
  source 1..75: mol_type = other DNA
cgactgaaatgccagagtgctgccttttgtgaacatttcacgctgacaggccggatagatgagctaccaaatctg

SEQ ID NO: 344731 - DNA, 75 bp, synthetic construct
  source 1..75: mol_type = other DNA
gttgtcgggatcgacacctggtatgacgcgaccaccggcaagtatcacgtcaaccagtataccggcgacgaaagc

SEQ ID NO: 344732 - DNA, 75 bp, synthetic construct
  source 1..75: mol_type = other DNA
gacggtgcgctggcagcttccgtattccacaaacaaattatcaatattggtgaattaaaagcgtacctggcaaca

SEQ ID NO: 344733 - DNA, 75 bp, synthetic construct
  source 1..75: mol_type = other DNA
ttcaggccttaccccattttcgctttatccagcagtcactgcttgcgtttattccggccgacagcccaccggaat

SEQ ID NO: 344734 - DNA, 75 bp, synthetic construct
  source 1..75: mol_type = other DNA
gtaacgaccaataccaaccgctgcttgcagtgccacggtgtcgaaagctatcgcaccactggcgcgccgcgcatc

SEQ ID NO: 344735 - DNA, 75 bp, synthetic construct
  source 1..75: mol_type = other DNA
cagcgataaagcgtgaactcgtccgctatctgacggtgcaatttgccatgggtttaagccaggcctgcaggacgt

SEQ ID NO: 344736 - DNA, 75 bp, synthetic construct
  source 1..75: mol_type = other DNA
ggtcgatgcggtttatacatcgagtttaaataccaatagtacctggatgggacaacacggtctgcgaataatctc

SEQ ID NO: 344737 - DNA, 75 bp, synthetic construct
  source 1..75: mol_type = other DNA
tcaacgcggttgccgaagctggcagcattacgcaggctgcagcaaaagtgcatcgcgtgccgtcgaatctcacta

SEQ ID NO: 344738 - DNA, 75 bp, synthetic construct
  source 1..75: mol_type = other DNA
accgcgaggagttgatgattgtcacgccgcaaggacatgcaccagtaacccgcgccagtcaggttaatggctgta

SEQ ID NO: 344739 - DNA, 75 bp, synthetic construct
  source 1..75: mol_type = other DNA
catctgcccgaatccgcaccagtcgtccggaaaatgattcaaacaccgtgcggcaaaagtattaccagtgtaaca

SEQ ID NO: 344740 - DNA, 75 bp, synthetic construct
  source 1..75: mol_type = other DNA
atatcagtaaatatataaaggatgatattgggttcagctatcaggggtacttccgctcaggctggggtactggta

SEQ ID NO: 344741 - DNA, 75 bp, synthetic construct
  source 1..75: mol_type = other DNA
catggtgacgcagccggagattttaatgctcgacgaaccggcggcaggtcttaacccgaaagagacgaaagagct

SEQ ID NO: 344742 - DNA, 75 bp, synthetic construct
  source 1..75: mol_type = other DNA
ttcctgcgcccgcatttccagcttgaaggattaacggggtcgctgcgtctggtcacaaaactgccgtcagtaaaa

SEQ ID NO: 344743 - DNA, 75 bp, synthetic construct
  source 1..75: mol_type = other DNA
acatcaggcggggaatatgaggcgcaatatcagtccatttttgatgcaacggacccgttgttgttgaaaattgaa

SEQ ID NO: 344744 - DNA, 75 bp, synthetic construct
  source 1..75: mol_type = other DNA
gtcttttgtctgtttctattgttgcagcattatttccaataaattccctggctgctaaattaacgattgaacaga

SEQ ID NO: 344745 - DNA, 75 bp, synthetic construct
  source 1..75: mol_type = other DNA
ttatcgcaatatcccgttatgggatgatgcgacattatcattaatggctaaatattccgcacctaataaaacgga

SEQ ID NO: 344746 - DNA, 75 bp, synthetic construct
  source 1..75: mol_type = other DNA
attgtcgccggggtgatctccgctggcatcctgtactttattggacatcactggccgctgggtattctgtcgtag

SEQ ID NO: 344747 - DNA, 75 bp, synthetic construct
  source 1..75: mol_type = other DNA
tctaaccaccacggggccttgctacaggctggtgcaacaccggtttatctggaaaccgcacgtaacccgtatggt

SEQ ID NO: 344748 - DNA, 75 bp, synthetic construct
  source 1..75: mol_type = other DNA
ccggagcctccgtgcgctggatcttgctgccacagacctggaacccacgatgcgcaaaatcgccggaaccctgct

SEQ ID NO: 344749 - DNA, 75 bp, synthetic construct
  source 1..75: mol_type = other DNA
gctgccacagacctggagcccgcgatgcgcaaaatcgccggaaccctgctggcggaaacacagtttaactttctt

SEQ ID NO: 344750 - DNA, 75 bp, synthetic construct
  source 1..75: mol_type = other DNA
tgtataacaaagcgggtgtaaatgggctatttactgatttccctgataaggcagtaaaatttcttaataaagagt

SEQ ID NO: 344751 - DNA, 75 bp, synthetic construct
  source 1..75: mol_type = other DNA
cggctggtggcgcaatcagacgtcagcgttttgattaacggccagagcggcaccgggaaagagattttcgcccag

SEQ ID NO: 344752 - DNA, 75 bp, synthetic construct
  source 1..75: mol_type = other DNA
acagcaaaccatttattgctattaactgtggcgcattgcccgagcaattgctggagtcggagctgtttggtcatg

SEQ ID NO: 344753 - DNA, 75 bp, synthetic construct
  source 1..75: mol_type = other DNA
atcgataccgaatggcgttccgactggaaatgggatcgtgttctgccccatctttctgatttaaccgggcgcacc

SEQ ID NO: 344754 - DNA, 75 bp, synthetic construct
  source 1..75: mol_type = other DNA
ctctgattgccaaaaatcatctttcacactggctggaaacgctgcccgcgcagattgctaactggcagcgcgagc

SEQ ID NO: 344755 - DNA, 75 bp, synthetic construct
  source 1..75: mol_type = other DNA
gccagtttgaagcggtgcgcaaactgctgggtaacgatcagcgcgctcatctgttaccgttaggtattgaacagc

SEQ ID NO: 344756 - DNA, 75 bp, synthetic construct
  source 1..75: mol_type = other DNA
gatggtgctgctcaagcccgttctgcctgctgcactaccgccagccagcctctggccgtggctgtgggcgctggg

SEQ ID NO: 344757 - DNA, 75 bp, synthetic construct
  source 1..75: mol_type = other DNA
agcggtgcgctgctgctgtcgctttgcggcggctggctgggtgcgcgactgcttaagggtaaggcgctgttcagg

SEQ ID NO: 344758 - DNA, 75 bp, synthetic construct
  source 1..75: mol_type = other DNA
ggcgctcgatggaacgctcgcaacagttcctgctgctttcggcgcttctgaccttgctgctggcagtggcagcgg

SEQ ID NO: 344759 - DNA, 75 bp, synthetic construct
  source 1..75: mol_type = other DNA
cctggcaggaactggccaacccgcgtgacctgaccaaaattgtgacccagaacctcgaatatgcaccgtggaact

SEQ ID NO: 344760 - DNA, 75 bp, synthetic construct
  source 1..75: mol_type = other DNA
tggaaataataaaggctcgatgctcattatctggcacccatacccccgtacacactgccactttacgaccgttga

SEQ ID NO: 344761 - DNA, 75 bp, synthetic construct
  source 1..75: mol_type = other DNA
gctggcatggttattaagtgcggtgttctggtgtgcgttgggggcattgtgtttcttatttatcagcagtttgtt

SEQ ID NO: 344762 - DNA, 75 bp, synthetic construct
  source 1..75: mol_type = other DNA
gataagaacggcaacagagtaacagtaaaatcgataatgtttgaccgtgtgtactttattcgtgatggctattca

SEQ ID NO: 344763 - DNA, 75 bp, synthetic construct
  source 1..75: mol_type = other DNA
aagtggttcgttactctgcttaaccaaagaaaatttgactaatttcggtcttaatacggaatttattgaattatt

SEQ ID NO: 344764 - DNA, 75 bp, synthetic construct
  source 1..75: mol_type = other DNA
atggctggcagaaagagctggctacacgattattccacctgcaggagagaaggacaatggccctgacagcaatac

SEQ ID NO: 344765 - DNA, 75 bp, synthetic construct
  source 1..75: mol_type = other DNA
aacgatgctgtcctctgcaaaaacatacgatattgaaacgccaaaggaaactctggagagtttcgaccttgttga

SEQ ID NO: 344766 - DNA, 75 bp, synthetic construct
  source 1..75: mol_type = other DNA
ccgcaagaagaacgctatgagaaaaaaacggcaagtaacggcaaattctatttcaatctgaaagccgctaatcat

SEQ ID NO: 344767 - DNA, 75 bp, synthetic construct
  source 1..75: mol_type = other DNA
ccgaccgtggacaggtagatggcatcaatggtccggtggattttaatgtatttcatggcacggtggaggagttgc

SEQ ID NO: 344768 - DNA, 75 bp, synthetic construct
  source 1..75: mol_type = other DNA
tgcccgcgctgttcctgacgctcgctttactgagcggttgcaccagcacgcagaacgcgtccgcgccgccgccgt

SEQ ID NO: 344769 - DNA, 75 bp, synthetic construct
  source 1..75: mol_type = other DNA
ttcggtggatggcgtaaaagactggcaaactatctggctggtgtttgcaggatatgctctttttctcgcagtgat

SEQ ID NO: 344770 - DNA, 75 bp, synthetic construct
  source 1..75: mol_type = other DNA
catcgcgtcggtacgtagcaacagcccgcaagaagaacgctatgagaaaaaacggcaagcaacggcaaattctat

SEQ ID NO: 344771 - DNA, 75 bp, synthetic construct
  source 1..75: mol_type = other DNA
cctcaaaagccgctgcggaaaagggcattgcctcggtgcaaagcaacagcccgcaggacgaacgctatgagaaaa

SEQ ID NO: 344772 - DNA, 75 bp, synthetic construct
  source 1..75: mol_type = other DNA
gcgagctgattgccagcatggatacattcatacggctggcagaaagagcggggtatcagataacagcacctgctc

SEQ ID NO: 344773 - DNA, 75 bp, synthetic construct
  source 1..75: mol_type = other DNA
aagctgcccctgatgctgagctgcccgctgcatggctgctggctggaatcctattggggcgtgccagggcggttt

SEQ ID NO: 344774 - DNA, 75 bp, synthetic construct
  source 1..75: mol_type = other DNA
gacttcattgatacatcgtcaatcggcctcagcgccggacttagcccgaaagagacctatcagcaactgctggat

SEQ ID NO: 344775 - DNA, 75 bp, synthetic construct
  source 1..75: mol_type = other DNA
aaccctgaacccggcagtacgattgcagatgctggaggcggcggcaacggcaatcagcttgattgaggtgaggga

SEQ ID NO: 344776 - DNA, 75 bp, synthetic construct
  source 1..75: mol_type = other DNA
gtgaagccagcgccacgctggccgctgcatccggctcccaaggaaggcgaagccttgtcttcatggctcaaccgc

SEQ ID NO: 344777 - DNA, 75 bp, synthetic construct
  source 1..75: mol_type = other DNA
ggggtatccccgccaagtctgggaaggctgcgggcatccgctgcgtgctgggcaaagtctgtggcgaccgtatga

SEQ ID NO: 344778 - DNA, 75 bp, synthetic construct
  source 1..75: mol_type = other DNA
accgttcacgccgagaaattaaactcagtcggcggccgaccgatcccttgccgattggcgcggcatttaccggtt

SEQ ID NO: 344779 - DNA, 75 bp, synthetic construct
  source 1..75: mol_type = other DNA
aaatcaataaatgagatgtttgcaaaggattatttttcggaagctcataggcttatgagccagaatgtgtatata

SEQ ID NO: 344780 - DNA, 75 bp, synthetic construct
  source 1..75: mol_type = other DNA
cttcaaagaaacacagaaagaaaaccgtgagttgcgccgccagcttgaggaagcattagccaagcctgcggaaca

SEQ ID NO: 344781 - DNA, 75 bp, synthetic construct
  source 1..75: mol_type = other DNA
cgagggagtcggaacgtctgctgtgcagaatacaggcaccaaaacaacggtgctgccgaataattccattctgaa

SEQ ID NO: 344782 - DNA, 75 bp, synthetic construct
  source 1..75: mol_type = other DNA
agcagaagaggttggtactaaagtgggatcaccatgccctacttgtggcaaagcctactgcgaagaagatctatc

SEQ ID NO: 344783 - DNA, 75 bp, synthetic construct
  source 1..75: mol_type = other DNA
ctggtgaacaccttttactggtgtacaaatcagggcatcgtgcaacgcacgctggcgtcaaaaagcctggcgtaa

SEQ ID NO: 344784 - DNA, 75 bp, synthetic construct
  source 1..75: mol_type = other DNA
caaaattctggcaatgattcaggagcaggtgacatggcttgccggcagtttcctgctgaccggacatgagattga

SEQ ID NO: 344785 - DNA, 75 bp, synthetic construct
  source 1..75: mol_type = other DNA
cccggttcgggaccatcgaatcagtcacttatgatattgccgagggttcggttgtcagtctggcggccggaggga

SEQ ID NO: 344786 - DNA, 75 bp, synthetic construct
  source 1..75: mol_type = other DNA
gccggaaacctggagtacaaatgagaaaatgtttgcttccggagggcagggacatgggtttgccgctgaacgggg

SEQ ID NO: 344787 - DNA, 75 bp, synthetic construct
  source 1..75: mol_type = other DNA
gcagccgttacctgtttatcgccgactggccgacaacgcttgctggtcgcatttattcctacgtaagcattatcg

SEQ ID NO: 344788 - DNA, 75 bp, synthetic construct
  source 1..75: mol_type = other DNA
tgctcctctctttgtcacgaaacagaaacactgtgtcaggacatttatgaacgttcttacaccggttttatttcc

SEQ ID NO: 344789 - DNA, 75 bp, synthetic construct
  source 1..75: mol_type = other DNA
ggaatatgatgcatcccatctcggcaatatggttaaccgactggaagaagcattacccccggagttaccggcata

SEQ ID NO: 344790 - DNA, 75 bp, synthetic construct
  source 1..75: mol_type = other DNA
gacagggcgtgtggttggcggtgttctggggggaatgattgcctccgctgtatcaggaaaaattgccggagcgct

SEQ ID NO: 344791 - DNA, 75 bp, synthetic construct
  source 1..75: mol_type = other DNA
tctgacgattgccggaatgatcatcagcttcatgtggggacttgatggtaaacatatcgcactggaggctcatac

SEQ ID NO: 344792 - DNA, 75 bp, synthetic construct
  source 1..75: mol_type = other DNA
gtggcaggtggtgctgtcgggtcagtggcgggcgggatactgttcagtccactgggaccatttggtgcactgaca

SEQ ID NO: 344793 - DNA, 75 bp, synthetic construct
  source 1..75: mol_type = other DNA
aacttcgcgagttcacgcttgaacatggtattgaagataaggttctgattcccgcagacggcgagacaatggctt

SEQ ID NO: 344794 - DNA, 75 bp, synthetic construct
  source 1..75: mol_type = other DNA
atgttactcaccgatctccttcacggtaatacgcagctgtgtctgttcggcccggctttactggctggctatatc

SEQ ID NO: 344795 - DNA, 75 bp, synthetic construct
  source 1..75: mol_type = other DNA
caggaaaaaccttcacccgcacactggctgtctacgtcacaacccagcaactccaccggctcagtgttgttcagg

SEQ ID NO: 344796 - DNA, 75 bp, synthetic construct
  source 1..75: mol_type = other DNA
ctggccgacaacgcttgctggtcgcatttattcctacgtaagcattatcggccatttcagcttcctggtgttcgc

SEQ ID NO: 344797 - DNA, 75 bp, synthetic construct
  source 1..75: mol_type = other DNA
atgttaatcaaaccactggtggtcagtatcatcaggcaacgccccgtcatggaatatgatgcatcccatctcggc

SEQ ID NO: 344798 - DNA, 75 bp, synthetic construct
  source 1..75: mol_type = other DNA
aagtacccggtgtaaccgatcccgaagaagcgtcccggctgattcgtcggggacatctgacttatacccaggccc

SEQ ID NO: 344799 - DNA, 75 bp, synthetic construct
  source 1..75: mol_type = other DNA
aacgccccccgaaccgatctatccagacttctactatcgcgccaccgacccgaatggcattgtcgaaaatgaagt

SEQ ID NO: 344800 - DNA, 75 bp, synthetic construct
  source 1..75: mol_type = other DNA
tggtgactacgtgtgccggtttgatgatatttacgacggcccgttactttatgcgctgggatactggaaattcac

SEQ ID NO: 344801 - DNA, 75 bp, synthetic construct
  source 1..75: mol_type = other DNA
cccgactactcattgaccatatatcaggccgttgctgtcggctatgctgccgtgatcatgccaacggtgttagtt

SEQ ID NO: 344802 - DNA, 75 bp, synthetic construct
  source 1..75: mol_type = other DNA
ttggtttttcaccgctatcaaaaactatcatgctggcaaaaatgcgcgatgttgaaggtggacgtatgcgcgttg

SEQ ID NO: 344803 - DNA, 75 bp, synthetic construct
  source 1..75: mol_type = other DNA
gtcgatgaccagatcaaccgcgtgctcaatgcactgcgtgattctggcaaactggacaatacggtggtgattatc

SEQ ID NO: 344804 - DNA, 75 bp, synthetic construct
  source 1..75: mol_type = other DNA
gtatttgcgacgtggagctggcaaaagctgcgcagcctgacacgtcgtcggcgcttcgcccgtccgctggccgca

SEQ ID NO: 344805 - DNA, 75 bp, synthetic construct
  source 1..75: mol_type = other DNA
atacgctggcaattaccaccccgaaaaagacgctggtgctgaacaataacggtaaataccgcacttacaacttac

SEQ ID NO: 344806 - DNA, 75 bp, synthetic construct
  source 1..75: mol_type = other DNA
atgcaaacggaacacgtcattttactgaatgcacagggagtcccttcgggtacactggaaaaatatgctgcacac

SEQ ID NO: 344807 - DNA, 75 bp, synthetic construct
  source 1..75: mol_type = other DNA
gcgcatgcgcggggattgcctttaacgccggggagtggccgctgctgacgttaaccgttccccgtgaagaactta

SEQ ID NO: 344808 - DNA, 75 bp, synthetic construct
  source 1..75: mol_type = other DNA
agcatatcctttctgtcaaagaagctattgctgaactggaggctgtttgccagccgggcagcgtggtggttgaag

SEQ ID NO: 344809 - DNA, 75 bp, synthetic construct
  source 1..75: mol_type = other DNA
atgcctggtatgaaagaaacatggcgggtttcaacgaaaagctgagagagagcctgtcatttacccctgatgaac

SEQ ID NO: 344810 - DNA, 75 bp, synthetic construct
  source 1..75: mol_type = other DNA
aacctgcacaacagagtgatttgattaatgtcgcccaactgacggcgcaatattatgtactgaaaccagaagcag

SEQ ID NO: 344811 - DNA, 75 bp, synthetic construct
  source 1..75: mol_type = other DNA
ctactgcgaaagcttcctcggtgaagagcatcgcaagcagatcgagaaagaagcggttgagattgttagtgaagt

SEQ ID NO: 344812 - DNA, 75 bp, synthetic construct
  source 1..75: mol_type = other DNA
tgttgccgtgggtaaaacgctggtttcttctgcgatgatcgaccgtgtggtcaacgatttggggcgcaagctggt

SEQ ID NO: 344813 - DNA, 75 bp, synthetic construct
  source 1..75: mol_type = other DNA
gtccagcgcaaatcccggcggttctggtacattctcacggcccgttcgcctggggaaaaaatgccgccgatgcag

SEQ ID NO: 344814 - DNA, 75 bp, synthetic construct
  source 1..75: mol_type = other DNA
atgaaggctaaatttatgagtcttcctataagattcgatccttactcagcaaatgcgatagaggaatatgaagag

SEQ ID NO: 344815 - DNA, 75 bp, synthetic construct
  source 1..75: mol_type = other DNA
ttatggcaattatcaaaataatgttttagccaatattattttcgtcgacttccagcaacaaggtgcaagaggact

SEQ ID NO: 344816 - DNA, 75 bp, synthetic construct
  source 1..75: mol_type = other DNA
cgatgaatgagcactgtggcaagccgctcaacgatacccgcctgttggccttgatgggcgagctggaagggcgta

SEQ ID NO: 344817 - DNA, 75 bp, synthetic construct
  source 1..75: mol_type = other DNA
atggaagttaggagtctgacatggttaaagtttatgcccccggcttccagtgccaatatgagcgtcgggtttgat

SEQ ID NO: 344818 - DNA, 75 bp, synthetic construct
  source 1..75: mol_type = other DNA
attgaaatttaccaccttaatatggataaaagcctaataagtttctttttaggtgttataaaattacgtaatatt

SEQ ID NO: 344819 - DNA, 75 bp, synthetic construct
  source 1..75: mol_type = other DNA
cgcgcactgagcaaaaaagcgtggcctggcgtgtggactaactcggtttgtgggcacccacaactgggagaaagc

SEQ ID NO: 344820 - DNA, 75 bp, synthetic construct
  source 1..75: mol_type = other DNA
caatatttacaactataattcaagtagctaactccaactggcaaaaattaagcacagaaaccaaagatattattc

SEQ ID NO: 344821 - DNA, 75 bp, synthetic construct
  source 1..75: mol_type = other DNA
ttagatagagtcgaccccaataaagattactctgggaaaatcaagaaattactacagacatttagtgaaacaaaa

SEQ ID NO: 344822 - DNA, 75 bp, synthetic construct
  source 1..75: mol_type = other DNA
ggtgcattctcacggcccgttcgcatggggtaaaaacgccgccgatgccgtgcataacgccgtagtactggaaga

SEQ ID NO: 344823 - DNA, 75 bp, synthetic construct
  source 1..75: mol_type = other DNA
gcgtgtgcgcatcagtaagttaccaacagatgcacggtttcagcgcagaacaactgcgtaatgccactcatctgg

SEQ ID NO: 344824 - DNA, 75 bp, synthetic construct
  source 1..75: mol_type = other DNA
caatatggcaaccggcgaaggtatgcccctgcctgacagctacgaccgtcccgatccacgcattaagcagctggc

SEQ ID NO: 344825 - DNA, 75 bp, synthetic construct
  source 1..75: mol_type = other DNA
attgccgcagaaggggatgtcaccacgcctgtagtggtgacaccggaggaaggcggtgcggtggtgagcgatccg

SEQ ID NO: 344826 - DNA, 75 bp, synthetic construct
  source 1..75: mol_type = other DNA
tggagagctgagggaatttgaactggcagacggaaactggctactggacaatgcctggtatgaaagaaacatggc

SEQ ID NO: 344827 - DNA, 75 bp, synthetic construct
  source 1..75: mol_type = other DNA
gttgtcagtctggcggccggagggatcagttttgccctgacggcatcgatcttctggctcagcaccggcgatcgc

SEQ ID NO: 344828 - DNA, 75 bp, synthetic construct
  source 1..75: mol_type = other DNA
caactgcgtaatgccactcatctggtgtgggcgacgggaggtggaatggtgccggaagaagagatggagcaatat

SEQ ID NO: 344829 - DNA, 75 bp, synthetic construct
  source 1..75: mol_type = other DNA
gagcggcgttcacactggtgaagtcaccggcatcgggggcggcggacaaactgcaactgaccgatatatcaaaat

SEQ ID NO: 344830 - DNA, 75 bp, synthetic construct
  source 1..75: mol_type = other DNA
gcattaagcagctggcgcgccgcagtacggtgacaccgggcggtgcagcatgcaaatataacgacatcattccgg

SEQ ID NO: 344831 - DNA, 75 bp, synthetic construct
  source 1..75: mol_type = other DNA
tatcaacccgaataacaaattgccggtcacctgcaccaactgccacggtcagccatcaccgcaacaccgcgaagg

SEQ ID NO: 344832 - DNA, 75 bp, synthetic construct
  source 1..75: mol_type = other DNA
gcgaagatggctatctcaatacttactttacggtaaaagcgcccgaagaacgctggagcaatctggcggagtgtc

SEQ ID NO: 344833 - DNA, 75 bp, synthetic construct
  source 1..75: mol_type = other DNA
agatactgacatttatatgcccatggtttctcgacttgcacagctgaccgtgatagatgtgctggcgacaggatt

SEQ ID NO: 344834 - DNA, 75 bp, synthetic construct
  source 1..75: mol_type = other DNA
tggtacagcagttccgtgctgaccttgccgggctggcagcgcagtgtcacggtggaagtccggcatcagtcccct

SEQ ID NO: 344835 - DNA, 75 bp, synthetic construct
  source 1..75: mol_type = other DNA
ggacgatgccggaaaggcgcataaattcgccgacatccggttgtgctggccgcagggaagttgtctggtaacagg

SEQ ID NO: 344836 - DNA, 75 bp, synthetic construct
  source 1..75: mol_type = other DNA
actctgatttcgaatctattcgtgcggttgttcgcccggcctatatttgggaccaatataaccagacaggtgttg

SEQ ID NO: 344837 - DNA, 75 bp, synthetic construct
  source 1..75: mol_type = other DNA
atgcctgcttgtgagcttcgcccggctacgcagtacgacaccgacgcagtttacgcgctgatttgtgagctaaaa

SEQ ID NO: 344838 - DNA, 75 bp, synthetic construct
  source 1..75: mol_type = other DNA
ggtcaaggccgccagtagcgaaacgcccatcggcacgctttctggcggcaatcagcaaaaagtggtgatcggtcg

SEQ ID NO: 344839 - DNA, 75 bp, synthetic construct
  source 1..75: mol_type = other DNA
gcatgggcatgtagcagttgccatgacgagatagaccgcagaacgcatatcatcgaccacgaatttgcaaagata

SEQ ID NO: 344840 - DNA, 75 bp, synthetic construct
  source 1..75: mol_type = other DNA
catcgaccacgaatttgcaaagatataccacctggaaggtgtaatgcgcactcaggacattctgcgcaaggaggg

SEQ ID NO: 344841 - DNA, 75 bp, synthetic construct
  source 1..75: mol_type = other DNA
ttgcacctgattatctccaggatgcggtaaggttcaatcctgtcgcggagttgtccagatattgtccacaaatag

SEQ ID NO: 344842 - DNA, 75 bp, synthetic construct
  source 1..75: mol_type = other DNA
gacgtaagatcctgcttacctgcattattgcgggcgtgatgatcgcgatacttgtcagttgccttcagtttttag

SEQ ID NO: 344843 - DNA, 75 bp, synthetic construct
  source 1..75: mol_type = other DNA
acaaaacgtactaccggtaggggtgaaatttggcattaatatcgcgccggatcatctgcacagcgaaagttttaa

SEQ ID NO: 344844 - DNA, 75 bp, synthetic construct
  source 1..75: mol_type = other DNA
atgcctgcttgtgagcttcgcccggccacgcagtacgataccgacgcagtttacgcgctgatttgtgagctaaaa

SEQ ID NO: 344845 - DNA, 75 bp, synthetic construct
  source 1..75: mol_type = other DNA
ggcggttatctgaactgatagaggactggtggatgcttgacggacgtaatcagccttacggagattcctacaggg

SEQ ID NO: 344846 - DNA, 75 bp, synthetic construct
  source 1..75: mol_type = other DNA
cggacttgccgaaagggcaggccacccatgtcatgcgtcatacattcgctacacatttcatgatgaatggcggaa

SEQ ID NO: 344847 - DNA, 75 bp, synthetic construct
  source 1..75: mol_type = other DNA
ccgaagaggtgatgcagcggatgacggtcaaggccgccagtagcgaaacgcccatcggcacgctttctggcggca

SEQ ID NO: 344848 - DNA, 75 bp, synthetic construct
  source 1..75: mol_type = other DNA
tcactgatgtggtggggcgggttgttgtactggctggctgcattagtgacgctgctatgggcggccagccaaatc

SEQ ID NO: 344849 - DNA, 75 bp, synthetic construct
  source 1..75: mol_type = other DNA
tttatcaccggaagcgaatgacgattttctcgatcgttgcctggacggcggtgactggtatcccttttcagaagg

SEQ ID NO: 344850 - DNA, 75 bp, synthetic construct
  source 1..75: mol_type = other DNA
cttacagacaaagatgatccaggtatagcgtctgataatgggatggttgctgaaggtgtgatgtatgatcgtctg

SEQ ID NO: 344851 - DNA, 75 bp, synthetic construct
  source 1..75: mol_type = other DNA
cagaagtggaactgcagaagtggaactggctggaaaaaccggacagaagtggaactggccacactaacgtgggtg

SEQ ID NO: 344852 - DNA, 75 bp, synthetic construct
  source 1..75: mol_type = other DNA
gctgccctgcagacagctgctgtccaggcaggaaaaaccttcacccgcacactggctgtctacgtcacaacccag

SEQ ID NO: 344853 - DNA, 75 bp, synthetic construct
  source 1..75: mol_type = other DNA
ggtgataataatgccagaaatggagcagacagactggtcagcggaacagaaatccagacgaaatattgttcaact

SEQ ID NO: 344854 - DNA, 75 bp, synthetic construct
  source 1..75: mol_type = other DNA
tctcgacaacaaagacgccagactttaccacctcgaaggcgtaatcaggacgcaggcggtattgctgaaggaggg

SEQ ID NO: 344855 - DNA, 75 bp, synthetic construct
  source 1..75: mol_type = other DNA
ggtgacgaagctacgttgactcgccgtgccgctgaactgggggttcgtgcggtttatcaggaattaagtctggtg

SEQ ID NO: 344856 - DNA, 75 bp, synthetic construct
  source 1..75: mol_type = other DNA
ggatgagctgatgtccgccattgacagtgtgaaaatcatgctgccttcactggcgattaacgccggagcgcaggc

SEQ ID NO: 344857 - DNA, 75 bp, synthetic construct
  source 1..75: mol_type = other DNA
aacaacacatccggcgatacatatgatatttacgttgagactggcaattatgcgacgagtgtaaatatccattgg

SEQ ID NO: 344858 - DNA, 75 bp, synthetic construct
  source 1..75: mol_type = other DNA
gcgaaagcgtcggaaacccgtgcagaatcctcaaaaacggcagccgcatcgtccgccagttcggcggcgtcatcg

SEQ ID NO: 344859 - DNA, 75 bp, synthetic construct
  source 1..75: mol_type = other DNA
atggctaacctacgcaaagaagcgcgcggaagagaatgccaggtacgtatttacggcatatgcaatggaaatcct

SEQ ID NO: 344860 - DNA, 75 bp, synthetic construct
  source 1..75: mol_type = other DNA
gctccagccgctgaccttagatacctgccagcaggctaaccccgaactgaccgcccgcgcggcgtttagcatgaa

SEQ ID NO: 344861 - DNA, 75 bp, synthetic construct
  source 1..75: mol_type = other DNA
agataacatctctcctcgctgccacagaaaaaccagcagattatgcccgacagctcgaattactgcgggaacgtc

SEQ ID NO: 344862 - DNA, 75 bp, synthetic construct
  source 1..75: mol_type = other DNA
aagcccgcatttactggactatgcggctacgaaggcggcgattctgaactacagccgtggcctggcaaaacaggt

SEQ ID NO: 344863 - DNA, 75 bp, synthetic construct
  source 1..75: mol_type = other DNA
atcaggaacgcctagcagcagctgaggcaagaattattcctgacgatgaatatgatgagctggatttttggcgca

SEQ ID NO: 344864 - DNA, 75 bp, synthetic construct
  source 1..75: mol_type = other DNA
acgtcaacatgcgcattactggtgacgatgttgatttgtcgccgctggaaaaattcatcattccagatcccggcg

SEQ ID NO: 344865 - DNA, 75 bp, synthetic construct
  source 1..75: mol_type = other DNA
gccagggtacttacactccggcacaacatctgcgctttcagcaacgcctgaatgacattaacgatatgcaggagt

SEQ ID NO: 344866 - DNA, 75 bp, synthetic construct
  source 1..75: mol_type = other DNA
accaatcagcaaaccgtgtttattaatgacattggttttgttcttgtattcgatgatccagaaagcgacacgcct

SEQ ID NO: 344867 - DNA, 75 bp, synthetic construct
  source 1..75: mol_type = other DNA
gttctcgagggggagtatggtgaatacccggattttatccgcaacagcgatattattgatctggcgatgaacagg

SEQ ID NO: 344868 - DNA, 75 bp, synthetic construct
  source 1..75: mol_type = other DNA
aaaaaattacgtttgcaggtttaacgatatttatgaggggcctacgcctgaaggaggcttgtactggcggtattc

SEQ ID NO: 344869 - DNA, 75 bp, synthetic construct
  source 1..75: mol_type = other DNA
cgaccaattcttgcacctggttgggctgatttcccggattacattatcaacagcagcattattgatattgcgctc

SEQ ID NO: 344870 - DNA, 75 bp, synthetic construct
  source 1..75: mol_type = other DNA
agaaagtcaatgtagggccaagtttaacttaattgatgaaaatgagaagcaagggaatctgaaaagaataaattt

SEQ ID NO: 344871 - DNA, 75 bp, synthetic construct
  source 1..75: mol_type = other DNA
ctggatgtcatgctgccttatctcgacgggtggcaaattatcacgtcgctgcgggcctcgggtcatgaagagcca

SEQ ID NO: 344872 - DNA, 75 bp, synthetic construct
  source 1..75: mol_type = other DNA
gcgccgggcacgctcgcaggccgcaacagtctgcaccatcgccgatatgaccgttgatatggtgcgccggaccgt

SEQ ID NO: 344873 - DNA, 75 bp, synthetic construct
  source 1..75: mol_type = other DNA
gtcgcacgaccgaaagtaccactgaatttgctgctggggtatggattaaccatcagttttgcgcagtttgctttt

SEQ ID NO: 344874 - DNA, 75 bp, synthetic construct
  source 1..75: mol_type = other DNA
cgttcggctttatgcagatgactggacatggaacgatgtgtggtacgcatttttactgggtggcatgagtggaac

SEQ ID NO: 344875 - DNA, 75 bp, synthetic construct
  source 1..75: mol_type = other DNA
ctaaccgcgcttttatctggcgataatcttaaggctgtattgttgtgtctggctacaggtgggcgctggggtgag

SEQ ID NO: 344876 - DNA, 75 bp, synthetic construct
  source 1..75: mol_type = other DNA
tgacggtagaaacaggtccgattggcggaattacttcacaggggatcgcctttggcgcgaacgtgaatacccgtg

SEQ ID NO: 344877 - DNA, 75 bp, synthetic construct
  source 1..75: mol_type = other DNA
tgttgcaggcgtgatgattgcgatactggtgagctgccttcagtttttagtggcctggcataagcacgaagtcaa

SEQ ID NO: 344878 - DNA, 75 bp, synthetic construct
  source 1..75: mol_type = other DNA
caactcttcgcctggctgcactcggtcggcgtagaaattgctattgatgacttcggcaccgggcacagcgcgctt

SEQ ID NO: 344879 - DNA, 75 bp, synthetic construct
  source 1..75: mol_type = other DNA
ggcgttaatttcatgcaaggctactggatcagtcgcccattaccgctggacgattttgtccgctggctgaagaaa

SEQ ID NO: 344880 - DNA, 75 bp, synthetic construct
  source 1..75: mol_type = other DNA
ttttatttctggtgacttcacactggatgacagtacccaacttagcttgcctcttaatcagcgtaaattagtcgc

SEQ ID NO: 344881 - DNA, 75 bp, synthetic construct
  source 1..75: mol_type = other DNA
atttatccgtgaactaccggaaatcacgttcagcggaaaaatcgctctcgaacggggactggatgttcgttatat

SEQ ID NO: 344882 - DNA, 75 bp, synthetic construct
  source 1..75: mol_type = other DNA
tgcctgctggactggcctcgctggtgttacaggcacaagcgttttttactatcgtgcttggcgcgtttactttcg

SEQ ID NO: 344883 - DNA, 75 bp, synthetic construct
  source 1..75: mol_type = other DNA
attattcgaaatgcgtaaaggcgcggtggggaatgtcggcgtcggtattgctgacggcattggcctggtcgcccg

SEQ ID NO: 344884 - DNA, 75 bp, synthetic construct
  source 1..75: mol_type = other DNA
atttattcgggaactaccggaaattactttcagcggaaaaatcgctctcgagcgagggctggatgttcgttatat

SEQ ID NO: 344885 - DNA, 75 bp, synthetic construct
  source 1..75: mol_type = other DNA
tccaacagggcttggcgatcgcgccgaccgtggtattagtccgctggcgcaagaaggtctggtgaaatgggcatt

SEQ ID NO: 344886 - DNA, 75 bp, synthetic construct
  source 1..75: mol_type = other DNA
tgataccggcccaggttcggtcagtcatccagtctgtgcgcgacatcgtggtatcagtcgcccgtgcagtctgga

SEQ ID NO: 344887 - DNA, 75 bp, synthetic construct
  source 1..75: mol_type = other DNA
ccctgcagcaaccgctttccggcctgccccagtgggtctctgaacgcattctgcagcagataaatcagttaaccc

SEQ ID NO: 344888 - DNA, 75 bp, synthetic construct
  source 1..75: mol_type = other DNA
tgattgcattatgtttgccggtatctgtttttgccaccacattgcgattgtccagcgatgtcgatctactggtac

SEQ ID NO: 344889 - DNA, 75 bp, synthetic construct
  source 1..75: mol_type = other DNA
ggtattgtggctgatcaaggccgatgatcgggcgctggcggtggatgagcatttttatcatcaggtaattggtga

SEQ ID NO: 344890 - DNA, 75 bp, synthetic construct
  source 1..75: mol_type = other DNA
gccacagtgggtgtctgaacgtatattgcagcagataaatcgattaacccactacgagccagtgatcggcattat

SEQ ID NO: 344891 - DNA, 75 bp, synthetic construct
  source 1..75: mol_type = other DNA
ggaaatcttaaagcgaagcaggctgcgattatggcgatgtttaaaccgcttcatccggtctgtgtggtgtccgcc

SEQ ID NO: 344892 - DNA, 75 bp, synthetic construct
  source 1..75: mol_type = other DNA
cagttcgcattcattattctgggaatactgtatggcacggcaatgattgttggtttttacatcgtgtttgtatgg

SEQ ID NO: 344893 - DNA, 75 bp, synthetic construct
  source 1..75: mol_type = other DNA
gatgatttagggcgcaaagtcactgttcctgctcatccaaagagaattgtctctttacacgatcttgatatcact

SEQ ID NO: 344894 - DNA, 75 bp, synthetic construct
  source 1..75: mol_type = other DNA
gaaccattcctgaatacattaaaattgatggggaagaaaagaggtttgcttttagttagtggagctacaggctct

SEQ ID NO: 344895 - DNA, 75 bp, synthetic construct
  source 1..75: mol_type = other DNA
ccaggtgaattttcgccttccccgtctggagaatgaacgggaagcgacccattttgatgccactccgcgccttga

SEQ ID NO: 344896 - DNA, 75 bp, synthetic construct
  source 1..75: mol_type = other DNA
gaactggataacggcccgcatcaattagtgtttcgcgtcgagaaaaccatcaacctttctggtaatgaagaacgt

SEQ ID NO: 344897 - DNA, 75 bp, synthetic construct
  source 1..75: mol_type = other DNA
gggtaaaactggttcgggcaagagcagcttatgtaatgccctgtttgccggtgagatttcccccatcagcgatgt

SEQ ID NO: 344898 - DNA, 75 bp, synthetic construct
  source 1..75: mol_type = other DNA
gccacagtgggtgtctgaacgtatattgcagcagataaatcagttaacccactacgagccagtgatcggcattat

SEQ ID NO: 344899 - DNA, 75 bp, synthetic construct
  source 1..75: mol_type = other DNA
ataaaattaacctgattgacgaaaacaaatttactcagaaagccggtattactacagatgatattgttgctgtgg

SEQ ID NO: 344900 - DNA, 75 bp, synthetic construct
  source 1..75: mol_type = other DNA
acatttatctggcgacaatatattctgagactcagaatatgacgacctttggcgacaaaggggtggcagataaag

SEQ ID NO: 344901 - DNA, 75 bp, synthetic construct
  source 1..75: mol_type = other DNA
ctgctgttgcagtggcagtgatgtttgctgcgggggctcaggcagcagaagtttataataaagatggtaataagc

SEQ ID NO: 344902 - DNA, 75 bp, synthetic construct
  source 1..75: mol_type = other DNA
ctatagcatcgcgactgatagagcttgagcatgatgttgagaagttaaaatgtatgcatggcaatggtgaaaaat

SEQ ID NO: 344903 - DNA, 75 bp, synthetic construct
  source 1..75: mol_type = other DNA
ctatagcatcacgattgatagatcttgagcatgatgttgagaagttgaaatgcatgtatggcaacgatgaaaaca

SEQ ID NO: 344904 - DNA, 75 bp, synthetic construct
  source 1..75: mol_type = other DNA
aatttcatttttgcctttcttattatcttttttaacgatggggaagcaggttttcttgttatagtctctaccatc

SEQ ID NO: 344905 - DNA, 75 bp, synthetic construct
  source 1..75: mol_type = other DNA
tagtccgggagcaggctcgtagcgattttggtgaaaccgtcggtgctgtactcgatagcatcagtgcctttcccc

SEQ ID NO: 344906 - DNA, 75 bp, synthetic construct
  source 1..75: mol_type = other DNA
tggggactaagggtgatggcagagcggatgattaagtgtctgccgcgtgaggccagcagcccggtagtagcgcta

SEQ ID NO: 344907 - DNA, 75 bp, synthetic construct
  source 1..75: mol_type = other DNA
gctatatgacgctggtggacctgcccggcgtgggcgaaagtggtgctcgcgataccgagtatgctgcgatgtacc

SEQ ID NO: 344908 - DNA, 75 bp, synthetic construct
  source 1..75: mol_type = other DNA
aaacatgctgaattctggggaactggtcttaaatatgatgccaataacctgtatctggcagcagtgtattctgaa

SEQ ID NO: 344909 - DNA, 75 bp, synthetic construct
  source 1..75: mol_type = other DNA
gtcccgcggacaggatgttatggttggtggtgtgaaccatggcgatcaggatctggttaaatatattgatgtcgg

SEQ ID NO: 344910 - DNA, 75 bp, synthetic construct
  source 1..75: mol_type = other DNA
cacctatgttgattataaaatcaatctgattgatgaaagtcagtttacccaggatgcaggtgttgcaacggataa

SEQ ID NO: 344911 - DNA, 75 bp, synthetic construct
  source 1..75: mol_type = other DNA
aaatatatcccattcggtccgttcctttgtggcggaatgtttgtttactcactcgtaccgggaatattattctga

SEQ ID NO: 344912 - DNA, 75 bp, synthetic construct
  source 1..75: mol_type = other DNA
ggcggcaaccctgtggcatccggaagcgcattttgactgggttcgacctggcattattttatatggtgcttcgcc

SEQ ID NO: 344913 - DNA, 75 bp, synthetic construct
  source 1..75: mol_type = other DNA
tctgaccattgtccgccaggccgcgccgcacgcgcgcgtctggtcggtggtaaaagcgaacgcttacgggcacgg

SEQ ID NO: 344914 - DNA, 75 bp, synthetic construct
  source 1..75: mol_type = other DNA
tgtcgccgccggatacgccgacggctatccgcgtcatgcaccaaccggaacacctgttttagtggacggcgtgcg

SEQ ID NO: 344915 - DNA, 75 bp, synthetic construct
  source 1..75: mol_type = other DNA
cgccagtaactgatgacatcagcagagcacaggcttttgctattaagtgggtggcggtcggtatcgctgtgtctc

SEQ ID NO: 344916 - DNA, 75 bp, synthetic construct
  source 1..75: mol_type = other DNA
ccgggcggaaacagaaacgatgggagggtgcatgtaaggcgttgcaagaactgaataaataccgtgacttgatca

SEQ ID NO: 344917 - DNA, 75 bp, synthetic construct
  source 1..75: mol_type = other DNA
taaacgaattctgttgaggttgactatgaaaaacggccttgaactgaaagcgcctgtaactgatgacatcagcag

SEQ ID NO: 344918 - DNA, 75 bp, synthetic construct
  source 1..75: mol_type = other DNA
agccagcatacaatcacaaccagtttagtggtgcgattgcgaacggcgcagaaagcatgatcagcaccttctcgc

SEQ ID NO: 344919 - DNA, 75 bp, synthetic construct
  source 1..75: mol_type = other DNA
gtattgcagaactcgacggaagctggagaccgttcaggtagctatttgactgccgtcagggggtacaacatagca

SEQ ID NO: 344920 - DNA, 75 bp, synthetic construct
  source 1..75: mol_type = other DNA
agctcattgaaggctacatgctgcgccataaagtgaaaccgggcattaccggctgggcgcagattaacggctggc

SEQ ID NO: 344921 - DNA, 75 bp, synthetic construct
  source 1..75: mol_type = other DNA
tgtcgccgcaggatacgccgacggttatccgcgccacgcgcctaccggtacccctgttttagtggacggcgttcg

SEQ ID NO: 344922 - DNA, 75 bp, synthetic construct
  source 1..75: mol_type = other DNA
cggaagccgctaaagggatgagcattgaggaacgcggcgcgttctatgcagcagcgctatcctctgccgcagaag

SEQ ID NO: 344923 - DNA, 75 bp, synthetic construct
  source 1..75: mol_type = other DNA
agtaagtcaggatcaagcctactcaagactctccaatgttgggcgcaacgtttcgtctcaaagcacagctcagag

SEQ ID NO: 344924 - DNA, 75 bp, synthetic construct
  source 1..75: mol_type = other DNA
ggtggtggtggcaatcttaattagccataaagaaaaactggcgctggagaaagatattttctggagcgtcgggcg

SEQ ID NO: 344925 - DNA, 75 bp, synthetic construct
  source 1..75: mol_type = other DNA
aattatttgccagatgatgtcgccgcagtaagtaaagctccaacaatagattttagccagaatactaatgcccat

SEQ ID NO: 344926 - DNA, 75 bp, synthetic construct
  source 1..75: mol_type = other DNA
gtcattgagggaatcagactgctcggtgatgcacaacgtgaactggtcaggactgaaacagaaatgaatgacgcc

SEQ ID NO: 344927 - DNA, 75 bp, synthetic construct
  source 1..75: mol_type = other DNA
ggataatgtcattgaactgctgagacgtctggggcttgagcgctttattcgtgtaaaagaggaaataaataaaga

SEQ ID NO: 344928 - DNA, 75 bp, synthetic construct
  source 1..75: mol_type = other DNA
gcgaggaagatatattaaagccattgaacaatataatgtcactatccgcaaattccccgctgtgttaaccgcaaa

SEQ ID NO: 344929 - DNA, 75 bp, synthetic construct
  source 1..75: mol_type = other DNA
aatcgcgccagtagcgatcttcagcaaactccgggagatgaacaaaaattacaagcctggcaacaggcgcaggcg

SEQ ID NO: 344930 - DNA, 75 bp, synthetic construct
  source 1..75: mol_type = other DNA
gtcgccagtattaaaggttattccagccatgaacaagaggtactggaagccgtaacattggcacgtagccaggct

SEQ ID NO: 344931 - DNA, 75 bp, synthetic construct
  source 1..75: mol_type = other DNA
tctgaagtccgtgcgccagcatgttacgatccccgtacatccgatcatccgtccacgcggtggcgatttttgcta

SEQ ID NO: 344932 - DNA, 75 bp, synthetic construct
  source 1..75: mol_type = other DNA
caacaatttagggcaacgggtcattagcgaacagcaacagattcaggagaaactgagtcttggcgcgacgccgaa

SEQ ID NO: 344933 - DNA, 75 bp, synthetic construct
  source 1..75: mol_type = other DNA
atgaacacgcataatattactaacgagtcgttggcgctggcattaatgctggtggtggtggcaatcttaattagc

SEQ ID NO: 344934 - DNA, 75 bp, synthetic construct
  source 1..75: mol_type = other DNA
gtgaaaaatattcccggtatttccattaaaagtgatattgaggatttttcaataattccttttgagcaggatgtg

SEQ ID NO: 344935 - DNA, 75 bp, synthetic construct
  source 1..75: mol_type = other DNA
tgccattctgaatgaaaaagaggctgtgaaaaatattcccggtattaccattaaaagcgacattgaggatttttc

SEQ ID NO: 344936 - DNA, 75 bp, synthetic construct
  source 1..75: mol_type = other DNA
gtcattgagggaatcagactgcttggtgacgcgcaacgtgaactggtcagggctgaaacagaaatgaatgacacc

SEQ ID NO: 344937 - DNA, 75 bp, synthetic construct
  source 1..75: mol_type = other DNA
gtgaatgacctcattgaccccttgtggaaatttgtcgaagagtcaaattttgaaattaataatcaaagtaaaaaa

SEQ ID NO: 344938 - DNA, 75 bp, synthetic construct
  source 1..75: mol_type = other DNA
gtcattgtttcatgtttctgtatctacccaaaaaaaattatcacatgttagagctaaggccggaaaagaaggtgg

SEQ ID NO: 344939 - DNA, 75 bp, synthetic construct
  source 1..75: mol_type = other DNA
tcactatcaatgggatgaaagcgatctcaagcagcgcaatatcattgctgttgatgagcatatgaccattctcag

SEQ ID NO: 344940 - DNA, 75 bp, synthetic construct
  source 1..75: mol_type = other DNA
ggcggtgctgccggtgtggttactgctggccccgcgtgactacctctctaccttcctgaaaatcgggactatcgt

SEQ ID NO: 344941 - DNA, 75 bp, synthetic construct
  source 1..75: mol_type = other DNA
tggcgtatcaatggggaaagtcggtaatgtcggagaatgaacgtattgcgcttaaggcatttattactgcctcta

SEQ ID NO: 344942 - DNA, 75 bp, synthetic construct
  source 1..75: mol_type = other DNA
gggactttattaaagagtcaaattttgacattaataatgaaagtaaaaaatatcgtatcgcaacaatgagccaag

SEQ ID NO: 344943 - DNA, 75 bp, synthetic construct
  source 1..75: mol_type = other DNA
gcaactatggctaagccgcggaacaggtgcttacacctacgactggacgccagaaacacgctacggcagcatgaa

SEQ ID NO: 344944 - DNA, 75 bp, synthetic construct
  source 1..75: mol_type = other DNA
cttaatatggggttgacggcaggtaaaagttggtacgacacaccaaccagtgaatatagtggattacaagttgca

SEQ ID NO: 344945 - DNA, 75 bp, synthetic construct
  source 1..75: mol_type = other DNA
cgaagctgaaagctgaaatcgaaaagatggggttgccaatcctgactgaaggaaaggaaaaagcgccacgtccag

SEQ ID NO: 344946 - DNA, 75 bp, synthetic construct
  source 1..75: mol_type = other DNA
agcggcaggcgtcagtccggtagtagtacgagaatatcttttgaaattcggtcgttataatcttattcaaagcga

SEQ ID NO: 344947 - DNA, 75 bp, synthetic construct
  source 1..75: mol_type = other DNA
actgaacatttcaatgccactcgcggccagggtgcagtctggtacaaatggaataactggctgacaacccgaacg

SEQ ID NO: 344948 - DNA, 75 bp, synthetic construct
  source 1..75: mol_type = other DNA
gcctttgcggataatacgccggtctttgcccgccaggattttcgacaggatattaacctagccctgttgccaaaa

SEQ ID NO: 344949 - DNA, 75 bp, synthetic construct
  source 1..75: mol_type = other DNA
aatccttcgtggcgattatggcgctggtttctgcctgtatcatcgatccaggtgtgtacttcgctatgaacagcc

SEQ ID NO: 344950 - DNA, 75 bp, synthetic construct
  source 1..75: mol_type = other DNA
ttcatttctaccgttctgtccgcagctgcgcgccgtctgtgggacaaattgcctcgcccccagcatctctggcag

SEQ ID NO: 344951 - DNA, 75 bp, synthetic construct
  source 1..75: mol_type = other DNA
aatggaaatcgttccagagcgccttatttccgcccactttccagaagaactggaagaagcacggcggtttattga

SEQ ID NO: 344952 - DNA, 75 bp, synthetic construct
  source 1..75: mol_type = other DNA
cacttccgtatcgtgacgctgcctcgggtcgatgatatcgaactgtccttaagtaaattcgcccgtttcctttcc

SEQ ID NO: 344953 - DNA, 75 bp, synthetic construct
  source 1..75: mol_type = other DNA
gaggtgctgggactggttgatgtgaaaacgctcgatcacctggttgtcggtcaggatggcattgtgtcgtttgca

SEQ ID NO: 344954 - DNA, 75 bp, synthetic construct
  source 1..75: mol_type = other DNA
ggcgattatggcccagcatggttgtttgctctccgcgacctccggattaaccccctatgcccaacgcaccattcg

SEQ ID NO: 344955 - DNA, 75 bp, synthetic construct
  source 1..75: mol_type = other DNA
acgacccgattcaagaacgctattttgagtggattctggagcgtctgcgtggcattacccgagataaacgcatcc

SEQ ID NO: 344956 - DNA, 75 bp, synthetic construct
  source 1..75: mol_type = other DNA
agttctcgtatgttatcggaatggcgagagacgttttaatcaatcacacacgagatgttgatattaatgagccag

SEQ ID NO: 344957 - DNA, 75 bp, synthetic construct
  source 1..75: mol_type = other DNA
ggaagtagaggatcgcatattaaattctgaagatctgattaaaattttgtggcaaatatcttcgggtatttctga

SEQ ID NO: 344958 - DNA, 75 bp, synthetic construct
  source 1..75: mol_type = other DNA
aacgtgatgagcagctaattagcagtcagaaaaaagagaaggactatacgtggtatatatactcaataaacctca

SEQ ID NO: 344959 - DNA, 75 bp, synthetic construct
  source 1..75: mol_type = other DNA
tgttcccgaaaatcgacgccaaacgctttaatattcacgacgatcagaagatggtactggatttcctgttacagg

SEQ ID NO: 344960 - DNA, 75 bp, synthetic construct
  source 1..75: mol_type = other DNA
ctatcagagtatcagcgagtttatcatgccgggtggacgtctttacgagcagcgtaatcgcgcctgggaattgat

SEQ ID NO: 344961 - DNA, 75 bp, synthetic construct
  source 1..75: mol_type = other DNA
tatattccaaagagcttttaatggagattgtggagattgcacgtcagcataatctcattatcttcgccgatgaaa

SEQ ID NO: 344962 - DNA, 75 bp, synthetic construct
  source 1..75: mol_type = other DNA
atgtgatctgattgttacaagccatgttagcgcaggggcagaattgatcgcagatggtaacattcatgtctatgg

SEQ ID NO: 344963 - DNA, 75 bp, synthetic construct
  source 1..75: mol_type = other DNA
ctggttaaagaatctgttgctgataaaaatttgaaagtcagaacagtacgtatgtggcttctgatgcgcaagcta

SEQ ID NO: 344964 - DNA, 75 bp, synthetic construct
  source 1..75: mol_type = other DNA
aattcgtgttgggtggtgcgggcctggtgatgttcggtatggttctggctacagggattcgtattctgtcccgct

SEQ ID NO: 344965 - DNA, 75 bp, synthetic construct
  source 1..75: mol_type = other DNA
aatccgcaatatggtaatcccgtttatttaggaatctccttcgcagtcttaattttcatcttgcttattactcgc

SEQ ID NO: 344966 - DNA, 75 bp, synthetic construct
  source 1..75: mol_type = other DNA
actaacggtcttaaagctggtactgtagatgcaactggcgtactgacaattcgtgcaaattacaaagcaaacact

SEQ ID NO: 344967 - DNA, 75 bp, synthetic construct
  source 1..75: mol_type = other DNA
aggttaatattggtaccgcacaaacactgaacgttgtatctaatggcgctaccgcactttcagagcaggtcattc

SEQ ID NO: 344968 - DNA, 75 bp, synthetic construct
  source 1..75: mol_type = other DNA
gcggtgctggtagcttccattccgcaatttgtgctgggcggcgctgggctggtgattgtagtggtcaacaaaaac

SEQ ID NO: 344969 - DNA, 75 bp, synthetic construct
  source 1..75: mol_type = other DNA
ggtaaagccatcaaaggcacgcttaaggcgctgccgttactgtttcgccgctccaaatacaccaaagcaatgtat

SEQ ID NO: 344970 - DNA, 75 bp, synthetic construct
  source 1..75: mol_type = other DNA
tgaatatctgaatgcgatagttaattggtattataaacagtataaaacagatattaaaccagaatggataaccta

SEQ ID NO: 344971 - DNA, 75 bp, synthetic construct
  source 1..75: mol_type = other DNA
atgaattctacagtcgattaattcatgaaggcaaagtgggcattatggcggggaatgtctatggaacggaggggg

SEQ ID NO: 344972 - DNA, 75 bp, synthetic construct
  source 1..75: mol_type = other DNA
cgcgctgtaactacaccaccaaccgttacaacctctatattgtggcgatcagtctcggcgttggcatgactccga

SEQ ID NO: 344973 - DNA, 75 bp, synthetic construct
  source 1..75: mol_type = other DNA
catgtttggcatggtgcccaaaatggcggtgctggtagcctcgattccgcaatttgtgcttggcggcgcagggct

SEQ ID NO: 344974 - DNA, 75 bp, synthetic construct
  source 1..75: mol_type = other DNA
tgtgctggctgatgcgaacaataacggtactactactgcttacctggttccaaaatcaggtgatactgctgcaac

SEQ ID NO: 344975 - DNA, 75 bp, synthetic construct
  source 1..75: mol_type = other DNA
atacgcagactctgacggttacgaaaaatggtactgatgctctttctgaacaagtaattcctctgcgtgcctata

SEQ ID NO: 344976 - DNA, 75 bp, synthetic construct
  source 1..75: mol_type = other DNA
acaagcctggaaagtggagcataaattgtcagatattctacttttgactatttgtgccgttatttctggtgcaga

SEQ ID NO: 344977 - DNA, 75 bp, synthetic construct
  source 1..75: mol_type = other DNA
atatttctattcctcccgattacagacaagcctggaaagtggaacataaattgtcagatatcctggcgctgacaa

SEQ ID NO: 344978 - DNA, 75 bp, synthetic construct
  source 1..75: mol_type = other DNA
ttgactatttgtgccgttatttctggtgcagaaggttgggaagatatagaggatttcggggaaacacatctcgat

SEQ ID NO: 344979 - DNA, 75 bp, synthetic construct
  source 1..75: mol_type = other DNA
ccagcagaattttatggcaaagcggcgcgactgcagttagtcgaaaacgctttgaccgttcaaccgttaaattga

SEQ ID NO: 344980 - DNA, 75 bp, synthetic construct
  source 1..75: mol_type = other DNA
ctggttatacacaactatggctaagccgcggaacaggtgcttacacctatgactggacgccagaaacacgatacg

SEQ ID NO: 344981 - DNA, 75 bp, synthetic construct
  source 1..75: mol_type = other DNA
acaagccagaaaagtggaacataaattatcggatattctactgttgactatttatgccgttatttctggtgcaga

SEQ ID NO: 344982 - DNA, 75 bp, synthetic construct
  source 1..75: mol_type = other DNA
tatagcctctaacattcaattcacccagcagtatctgaatgaaaatattccagaattgatcgtaaggccagctga

SEQ ID NO: 344983 - DNA, 75 bp, synthetic construct
  source 1..75: mol_type = other DNA
aaactggtcctcatccttagtcacgggaccggtagtgttaaaaatgctttttgatgaagctattgaatatgtaac

SEQ ID NO: 344984 - DNA, 75 bp, synthetic construct
  source 1..75: mol_type = other DNA
ttggcgttttcgttcagctcgaaacgcctatagctttcgatgccatcgacaaccaaccggtggacttactttttg

SEQ ID NO: 344985 - DNA, 75 bp, synthetic construct
  source 1..75: mol_type = other DNA
gccgttatttctggtgcagaaggttgggaagatatagaggattttggggaaacacatcccgatgttttgaagtga

SEQ ID NO: 344986 - DNA, 75 bp, synthetic construct
  source 1..75: mol_type = other DNA
aaattatcggatattctactgttgactatttgtgccgttatttctggtgcagaaggctgggaagatatagaggat

SEQ ID NO: 344987 - DNA, 75 bp, synthetic construct
  source 1..75: mol_type = other DNA
tgccgctgcgaccgaaatttttggcggtcatatggtggccgttaacgcatccggttatgccgttccggccagtgc

SEQ ID NO: 344988 - DNA, 75 bp, synthetic construct
  source 1..75: mol_type = other DNA
atggatatgctggcggtcgatttaacgccttgcccgcagcgggatattggtacgccagttggagctgtggggcaa

SEQ ID NO: 344989 - DNA, 75 bp, synthetic construct
  source 1..75: mol_type = other DNA
gttggcgaaatgaccctgatgtcgcattttgccgaggcggaacatcctgatggaatttccggcgcgatggcgcgt

SEQ ID NO: 344990 - DNA, 75 bp, synthetic construct
  source 1..75: mol_type = other DNA
tttttatgtggataaaagatgcactggtttggatccgggctacggatccaaacttactgattaaaaattatttaa

SEQ ID NO: 344991 - DNA, 75 bp, synthetic construct
  source 1..75: mol_type = other DNA
tcaaaatagagaaccagaccgggaaacggggagcgaaaatgatcgccatcaatcctctacaggaacgtggcctgg

SEQ ID NO: 344992 - DNA, 75 bp, synthetic construct
  source 1..75: mol_type = other DNA
gatattacttttattgcagatgataataacgcagaactcatcccatgcctgagtacagatcttcttgtcagtctt

SEQ ID NO: 344993 - DNA, 75 bp, synthetic construct
  source 1..75: mol_type = other DNA
aagccgcgcagcgtgcccgtctggctgaagccggtaaccgcaagatggaattgcaactcgacgagcaggaaatgg

SEQ ID NO: 344994 - DNA, 75 bp, synthetic construct
  source 1..75: mol_type = other DNA
aacatacacaaaattatcattgatgagggctatgtggcagggcttatcaccgaacttatctcactgtttgagcta

SEQ ID NO: 344995 - DNA, 75 bp, synthetic construct
  source 1..75: mol_type = other DNA
tcatccgtagatacgaaagcaagcatggtagctacgaagttccacttccgcaggaggcatcacgaacagccctat

SEQ ID NO: 344996 - DNA, 75 bp, synthetic construct
  source 1..75: mol_type = other DNA
caggcatgttctggttcactccgaaggtgagatagagaaacacagagcggagcggctggctgatataaaaagcta

SEQ ID NO: 344997 - DNA, 75 bp, synthetic construct
  source 1..75: mol_type = other DNA
tgagtttatctcactgtttgacctactggacaggcaggtgaacgctttcatccgtagatacgaaagcgagcatgg

SEQ ID NO: 344998 - DNA, 75 bp, synthetic construct
  source 1..75: mol_type = other DNA
acccgaatgttatcgatttcttcggtacgaccctttttcatctgtgtcatttcacaacaatagatctgcataatt

SEQ ID NO: 344999 - DNA, 75 bp, synthetic construct
  source 1..75: mol_type = other DNA
acccgaatgttatcgatttctggggtactacactttatcatctttgccattttacctctttagaccttgataaat

SEQ ID NO: 345000 - DNA, 75 bp, synthetic construct
  source 1..75: mol_type = other DNA
atgctgatggcatcacctttggacagccgctgggcgacacaatggttctggttaaggctcctggtgctgataatg

SEQ ID NO: 345001 - DNA, 75 bp, synthetic construct
  source 1..75: mol_type = other DNA
gtcactgtcatcccaactcacggtgctattgccagagcaacatttaatgcacaaatcggcgggaaagtattaatg

SEQ ID NO: 345002 - DNA, 75 bp, synthetic construct
  source 1..75: mol_type = other DNA
taatgttgaactggatgaaaccgtagtcactgtcatcccaactcacggtgctattgccagagcaacatttaatgc

SEQ ID NO: 345003 - DNA, 75 bp, synthetic construct
  source 1..75: mol_type = other DNA
tgcgactaatggcggtgatctgcaagttacgataaaagaggcagacggcagtattcagactttatatgtccctta

SEQ ID NO: 345004 - DNA, 75 bp, synthetic construct
  source 1..75: mol_type = other DNA
ttacgcagcattagtgcgccggatatgaaggtcaacgatcgtgtcgcgactgaacgccaacatgtgctggcgttt

SEQ ID NO: 345005 - DNA, 75 bp, synthetic construct
  source 1..75: mol_type = other DNA
acgtgggcgagcggggcgttgctcgatgatttaatgccctggcgctggccgcgaattatggcggcgctgtttgcg

SEQ ID NO: 345006 - DNA, 75 bp, synthetic construct
  source 1..75: mol_type = other DNA
gggattagctccggcgcggcgtttggcgtggtgttgatgctgtttctggtgccgggtaatgcctttggctggctg

SEQ ID NO: 345007 - DNA, 75 bp, synthetic construct
  source 1..75: mol_type = other DNA
attagacaataaagaacattcggcagaaaaacatgtgccggacaacagcgcatgcacaccacttcaggatcgttt

SEQ ID NO: 345008 - DNA, 75 bp, synthetic construct
  source 1..75: mol_type = other DNA
ccggacaacagcgcatgcacaccacttcaggatcgtttggctgacgcatcatctgagtttgatgttggtcagcaa

SEQ ID NO: 345009 - DNA, 75 bp, synthetic construct
  source 1..75: mol_type = other DNA
gcgattgattcagaatcaatgaaccaaacggttgagctgggtcaggtccgttcttctcgtctggctaaagcgggt

SEQ ID NO: 345010 - DNA, 75 bp, synthetic construct
  source 1..75: mol_type = other DNA
cgtagtaaccataacgccagcaaaaccaactatgcatatctgaatttgcagagtggcatcaacattggcagctgg

SEQ ID NO: 345011 - DNA, 75 bp, synthetic construct
  source 1..75: mol_type = other DNA
tgtgccgtttggtgatattacgacttcgctgaattacagctattccaataatatattggcaaaacgatcgggatc

SEQ ID NO: 345012 - DNA, 75 bp, synthetic construct
  source 1..75: mol_type = other DNA
atgcaaactacgcgtaccccctactctatttcctttagtttggccgacgcatcaactgagtttgatgttggtcag

SEQ ID NO: 345013 - DNA, 75 bp, synthetic construct
  source 1..75: mol_type = other DNA
gaataaaggaaagtgataagaaataccacgaggatattatcgatagctaccatcaggagatgcaggaatttggtg

SEQ ID NO: 345014 - DNA, 75 bp, synthetic construct
  source 1..75: mol_type = other DNA
agctgccggacacccatcttggtcgtttaatgcaatttaaaaagtggggattaccggtcagcgatcgtgtcacgt

SEQ ID NO: 345015 - DNA, 75 bp, synthetic construct
  source 1..75: mol_type = other DNA
tggccttgccgtcagcattctgtatgagaatggcgttctggtcagtgcggcgacccgtggtgatggcaccaccgg

SEQ ID NO: 345016 - DNA, 75 bp, synthetic construct
  source 1..75: mol_type = other DNA
tggtcttgccgtcagtattctgtatgaaaatggcgttttagtcagtgccgcgacccgtggcgatggcaccaccgg

SEQ ID NO: 345017 - DNA, 75 bp, synthetic construct
  source 1..75: mol_type = other DNA
ccagatttcaacaccaaatgtcagtgccagattttaggtgaagggattggtttttttgccggattacatggtccg

SEQ ID NO: 345018 - DNA, 75 bp, synthetic construct
  source 1..75: mol_type = other DNA
cggtatgtggttctgacgtcgagcgtgtggaaggtgaagcggttgcccgctgtaccggtggcctgatttgcggtg

SEQ ID NO: 345019 - DNA, 75 bp, synthetic construct
  source 1..75: mol_type = other DNA
cccgcttcctctatgcacttggcatccgcgaagtgggcgaggccaccgcgacggggctggcggcttatttcggta

SEQ ID NO: 345020 - DNA, 75 bp, synthetic construct
  source 1..75: mol_type = other DNA
cagcacgaagatgcgcgaccgctcaaccttcacgcccggcgcgacggatgataccgccgaatacctcgacgcaaa

SEQ ID NO: 345021 - DNA, 75 bp, synthetic construct
  source 1..75: mol_type = other DNA
acgccatacacccgcgcggtgtccatgtatatgtggacggcgctggcgggcagggtgctggagcccggcgtcaaa

SEQ ID NO: 345022 - DNA, 75 bp, synthetic construct
  source 1..75: mol_type = other DNA
ctacgcctgatgagtggtttcatttcgacctggtattggggagaactgagcatcttctcccagttgtatgtaacc

SEQ ID NO: 345023 - DNA, 75 bp, synthetic construct
  source 1..75: mol_type = other DNA
tcccgcaggtggttaacgtcgtgctttctgaacgcccggaagatacccgtgaggttgtattcccgacgcattgtc

SEQ ID NO: 345024 - DNA, 75 bp, synthetic construct
  source 1..75: mol_type = other DNA
tgctcagggaacactttccaacctgccagatagctattactacagaggtgtataatggcgtctgggattcactca

SEQ ID NO: 345025 - DNA, 75 bp, synthetic construct
  source 1..75: mol_type = other DNA
atgcgccagataccgccaaacggcttcccggagaaagcccttaacttcctgacgccgcaccagaaatggggcatt

SEQ ID NO: 345026 - DNA, 75 bp, synthetic construct
  source 1..75: mol_type = other DNA
ttttttccgcaaagctaccgacctgctgaatgattttcacgccatcaaacgtagcatagatactatttcgcaggg

SEQ ID NO: 345027 - DNA, 75 bp, synthetic construct
  source 1..75: mol_type = other DNA
gttagctaacccattaacaactgtcgcgctatttcttggcctggcaggcaacatgaacagtgccgaacgtaatcg

SEQ ID NO: 345028 - DNA, 75 bp, synthetic construct
  source 1..75: mol_type = other DNA
gtctttgccattatgatggtcgcttattacgccgggcagttggtaatggatacattcggaatttcgattcccggt

SEQ ID NO: 345029 - DNA, 75 bp, synthetic construct
  source 1..75: mol_type = other DNA
aatgccggtccgctggcagtgacttttcatcgcgccttcgatatgtgcgctaaccctttaaatacactcaataat

SEQ ID NO: 345030 - DNA, 75 bp, synthetic construct
  source 1..75: mol_type = other DNA
tttcgccttcgggatggggatggagcgtctgactatgttgcgttacggcgttaccgacctgcgttcattcttcga

SEQ ID NO: 345031 - DNA, 75 bp, synthetic construct
  source 1..75: mol_type = other DNA
cgaattacgcagccgcgatggcgggatcattggcgaagcaacgctcgattttatctcccagttccgccttgattt

SEQ ID NO: 345032 - DNA, 75 bp, synthetic construct
  source 1..75: mol_type = other DNA
tgaattgcgtagccgcgatggcgggatcattggcgaagcgaccctggattttatctctcagttccgcctcgattt

SEQ ID NO: 345033 - DNA, 75 bp, synthetic construct
  source 1..75: mol_type = other DNA
atgcgttatacggatagcagaaaactcacgcctgaaacggatgccaatcacaagaccgcttccccgcagcccatc

SEQ ID NO: 345034 - DNA, 75 bp, synthetic construct
  source 1..75: mol_type = other DNA
taggtccggatggcaaactgattatcgatcatgacgggcaagaatatctgctccgtaaaactcaggctggcaagc

SEQ ID NO: 345035 - DNA, 75 bp, synthetic construct
  source 1..75: mol_type = other DNA
atgcgttatacggatagcagaaaactcacgcctgaaacggatgccaatcacaagaccgcttccccgcagcctatt

SEQ ID NO: 345036 - DNA, 75 bp, synthetic construct
  source 1..75: mol_type = other DNA
tatttcagtccaaaaactggtttcttgttgctacccgcaccagaaatttacaggtgtttcggatggaagacgtta

SEQ ID NO: 345037 - DNA, 75 bp, synthetic construct
  source 1..75: mol_type = other DNA
cctctgccgaactatcgtctctgtggcagtcgccatttgaagataaagcgatgggcagcatgttaggcgctatta

SEQ ID NO: 345038 - DNA, 75 bp, synthetic construct
  source 1..75: mol_type = other DNA
agcggcagaaaaagccgccgcagacaaaaaagcggcagcggcaaaagcagcagctgaaaaagccgctgcagcaaa

SEQ ID NO: 345039 - DNA, 75 bp, synthetic construct
  source 1..75: mol_type = other DNA
tccctccatattggagcgctatgacttgggcaacaattgggaacgagacgaagaaggtggattccgcaacaccgg

SEQ ID NO: 345040 - DNA, 75 bp, synthetic construct
  source 1..75: mol_type = other DNA
ccgccaaggcttggcaaccgaatctgctgacccgtggctgggagttgacgctggaccctcacgaaactgcccgcg

SEQ ID NO: 345041 - DNA, 75 bp, synthetic construct
  source 1..75: mol_type = other DNA
ttgaatctcatcgttttagctcgttgggctttgcggtatttattgtgctattggtgttttgcgttatgaatcgag

SEQ ID NO: 345042 - DNA, 75 bp, synthetic construct
  source 1..75: mol_type = other DNA
ttgcggtactgggtaccaacggcgtcggtaaatcaacgctgctgaaaacgctggtgggcgatctgcaaccggaca

SEQ ID NO: 345043 - DNA, 75 bp, synthetic construct
  source 1..75: mol_type = other DNA
catccgttttgaacaggataagaaactgttccgtaacgcgctggaagtggaaggtctgaccaaagggtttgataa

SEQ ID NO: 345044 - DNA, 75 bp, synthetic construct
  source 1..75: mol_type = other DNA
tttcgttagccgctttagcgccaacgcctcgaaatctcgccaggcaacttcgcgcgcgcgcgccagattgataaa

SEQ ID NO: 345045 - DNA, 75 bp, synthetic construct
  source 1..75: mol_type = other DNA
atgaactcaatttttaccgaagaaaatctgctggcgtttactaccgctgcacgttttggcagcttcagtaaagcc

SEQ ID NO: 345046 - DNA, 75 bp, synthetic construct
  source 1..75: mol_type = other DNA
ccagctgcgtctctaccctaatatcatggtggaggacaccgcgcatacgattaataaaaaagtgggctggttgct

SEQ ID NO: 345047 - DNA, 75 bp, synthetic construct
  source 1..75: mol_type = other DNA
atgaactcaatttttaccgaagaaaacctgttagcgtttactaccgctgcgcgttttggcagcttcagtaaagcg

SEQ ID NO: 345048 - DNA, 75 bp, synthetic construct
  source 1..75: mol_type = other DNA
ataacgacgacaacggcttgtacttatcgttttcgttatctgacacgccaacgatggatagcaataacaacagcc

SEQ ID NO: 345049 - DNA, 75 bp, synthetic construct
  source 1..75: mol_type = other DNA
ctcgaagcgcgggtggctggcagcagaacattgcagcttggtcaacgcgacagcgtgttattcccctatcctgga

SEQ ID NO: 345050 - DNA, 75 bp, synthetic construct
  source 1..75: mol_type = other DNA
acgatatatcaggcaatccgatcaaagtttctgaagggatggaatttgtgcaatcaggtactaacgtgccctata

SEQ ID NO: 345051 - DNA, 75 bp, synthetic construct
  source 1..75: mol_type = other DNA
ccgcaataaaaggcatatccgatctggatatgctttatattatgccccccaatcagtatgaatattataaccgta

SEQ ID NO: 345052 - DNA, 75 bp, synthetic construct
  source 1..75: mol_type = other DNA
cacttcgaaaacaagacccaactgtttaatgagatatggctgcaacaaccatcattgcgggagttaatccaggag

SEQ ID NO: 345053 - DNA, 75 bp, synthetic construct
  source 1..75: mol_type = other DNA
acaggcattctatatttcaccaaattacctctcgcacctgtttcaaaaaacgggggccattggttttaacgaata

SEQ ID NO: 345054 - DNA, 75 bp, synthetic construct
  source 1..75: mol_type = other DNA
ggtccgcgtccgcatgcggtggcgcataacgaacagtatcgacagctcattgaaggctacatgctgcgccataag

SEQ ID NO: 345055 - DNA, 75 bp, synthetic construct
  source 1..75: mol_type = other DNA
aaactcggtgatctaattgtattaagttcgatttatcgtgaactttacagtaaaggggttaaaataaccattctc

SEQ ID NO: 345056 - DNA, 75 bp, synthetic construct
  source 1..75: mol_type = other DNA
ttgtattagacccctttgaaactatgccctcatttaagcatagcttaatattatcaagtttaaaagattcttaca

SEQ ID NO: 345057 - DNA, 75 bp, synthetic construct
  source 1..75: mol_type = other DNA
tgggatggcaagcaataccaaaatctggcaaagcagcacgtcgcccgacgcggcccgcgcattggttcattcttg

SEQ ID NO: 345058 - DNA, 75 bp, synthetic construct
  source 1..75: mol_type = other DNA
taataacgtcctgtaccaaaggtaagcacagccagtgcggctccatgccagaactgagtatccggtctggacaga

SEQ ID NO: 345059 - DNA, 75 bp, synthetic construct
  source 1..75: mol_type = other DNA
caactggcggagcaggcagaggtactggctatcctccaaaaggccgcgacatactttgcgaagcgcctgaaatga

SEQ ID NO: 345060 - DNA, 75 bp, synthetic construct
  source 1..75: mol_type = other DNA
tctcccgcctaatcaacggcccgctgttactccgccaggtttacttcgcgagcagcaacggcccggcccccgatc

SEQ ID NO: 345061 - DNA, 75 bp, synthetic construct
  source 1..75: mol_type = other DNA
gccaaatccagaccgcctcacgcagccaggcactattcgaagctattcgtgattatatcgacgaacgctatgcct

SEQ ID NO: 345062 - DNA, 75 bp, synthetic construct
  source 1..75: mol_type = other DNA
cctttagcgtgctgtttggcaaacagcaactcggcttcagcgtcgtgcaatgggatggcaaacagtatcaaaatc

SEQ ID NO: 345063 - DNA, 75 bp, synthetic construct
  source 1..75: mol_type = other DNA
atggtgttcatcaggcgggcctgagtaccacgatagaattcattagcgcggaaaccagaccaatgaccggtacag

SEQ ID NO: 345064 - DNA, 75 bp, synthetic construct
  source 1..75: mol_type = other DNA
tcatatgcggcaggttatttttcgacgtatcagactaatgagcgcgcaatccattccattgtaacaagccttaaa

SEQ ID NO: 345065 - DNA, 75 bp, synthetic construct
  source 1..75: mol_type = other DNA
ggtgttaatacgactggtaatcagaatacaacaggtaatgcggctactgctacgaagttgcagactgcgcgtact

SEQ ID NO: 345066 - DNA, 75 bp, synthetic construct
  source 1..75: mol_type = other DNA
ggtgtaaacactacgggtaatcagaacaccactggtaatgccgcaactgctacaaaactacagacggcaagaact

SEQ ID NO: 345067 - DNA, 75 bp, synthetic construct
  source 1..75: mol_type = other DNA
tacatccagtgctcttggcggtaattccattgttctgggtgacaatgacaccggctttaaacagaacggagatgg

SEQ ID NO: 345068 - DNA, 75 bp, synthetic construct
  source 1..75: mol_type = other DNA
gagcattaccgctttctggaggagcgttaactggcggattaactgctgctggcgagattatttcaaaatcggcga

SEQ ID NO: 345069 - DNA, 75 bp, synthetic construct
  source 1..75: mol_type = other DNA
atgctgcaactgctacaaaacttcagacggtaagaaaaatatccggtgttccatttgatggttctactgatatca

SEQ ID NO: 345070 - DNA, 75 bp, synthetic construct
  source 1..75: mol_type = other DNA
caatcaccacgcacggggccgtcattctcacgcctgaaggcaaacccgacgaggagtggaaggcccatatgctcg

SEQ ID NO: 345071 - DNA, 75 bp, synthetic construct
  source 1..75: mol_type = other DNA
cgtaattggtttgggcgacagcctgagcgatcatcgttttatgaaactgtgcagctggtttggcatcccgcgtca

SEQ ID NO: 345072 - DNA, 75 bp, synthetic construct
  source 1..75: mol_type = other DNA
gacgctgttgatcattatgatcgccgccggacgcggtggattttccccacaccgcatgttactggcggggatggc

SEQ ID NO: 345073 - DNA, 75 bp, synthetic construct
  source 1..75: mol_type = other DNA
tgtatagcacacatcagaaaccgacgccgttagatattggagcactgccaacaaccggaggaacagtttcaggtc

SEQ ID NO: 345074 - DNA, 75 bp, synthetic construct
  source 1..75: mol_type = other DNA
cgtcatcggcatcatcggcgtctgcttcaaaagatgaggcgaccagacaggcgtcagcagcgaagggcagcgcca

SEQ ID NO: 345075 - DNA, 75 bp, synthetic construct
  source 1..75: mol_type = other DNA
ggcggcaggtagtgcgacggctgcatctcagagcaaagctgctgctgaatccgctgcgacccgtgcagaagctgc

SEQ ID NO: 345076 - DNA, 75 bp, synthetic construct
  source 1..75: mol_type = other DNA
tgtctggtactgcagcaagttctggcgcacatgcacatactgtaggtattggtgcgcatacgcactcggttgcga

SEQ ID NO: 345077 - DNA, 75 bp, synthetic construct
  source 1..75: mol_type = other DNA
gcgaaacgactggcggaaggatttgcttatgttgaagtattgccgaagatgagtctggaaggcgttgcccgcgtg

SEQ ID NO: 345078 - DNA, 75 bp, synthetic construct
  source 1..75: mol_type = other DNA
actgggtggtggaagaagggttcgcacagattccttcctggcacgccgccgttgagcgagttattcctgtggcaa

SEQ ID NO: 345079 - DNA, 75 bp, synthetic construct
  source 1..75: mol_type = other DNA
ttgcgaaacagcagcacgccgtagaacgaacccgtgagttgttcgctaaaagcctggggtatagcaaaccacaaa

SEQ ID NO: 345080 - DNA, 75 bp, synthetic construct
  source 1..75: mol_type = other DNA
atgctaccggtaaagtgacatttaaaaatgtcggcagcaattcggaaaggattacggcgacgccaaaatcaggag

SEQ ID NO: 345081 - DNA, 75 bp, synthetic construct
  source 1..75: mol_type = other DNA
gacaactacattcccttcgcaggggttcaccggggcgtattatcagttgaataatgacaactttgccccaggaaa

SEQ ID NO: 345082 - DNA, 75 bp, synthetic construct
  source 1..75: mol_type = other DNA
aactgcggctctggataaaccaaatattactgtatatggaccgaccgatccgggattaattggcgggtatgggaa

SEQ ID NO: 345083 - DNA, 75 bp, synthetic construct
  source 1..75: mol_type = other DNA
cggtttgcgaccgattacaattaacaataccagcggtgctgtgtccattggtaatggactaaatgttactggtgg

SEQ ID NO: 345084 - DNA, 75 bp, synthetic construct
  source 1..75: mol_type = other DNA
ggtggttcaaactggctactgttacaatgccacaagcgagttccatcgtttacatcgcattgattggtggcgctg

SEQ ID NO: 345085 - DNA, 75 bp, synthetic construct
  source 1..75: mol_type = other DNA
cactgccaacaaccggaggaacagtttcaggtccgttgtctgttactggtgggatcaccggaacattaaatggta

SEQ ID NO: 345086 - DNA, 75 bp, synthetic construct
  source 1..75: mol_type = other DNA
tcgcgtgttgtttgttgatcagggcgatgagcaggcattacgggcggcactggcagaaaaacctaaactggtgct

SEQ ID NO: 345087 - DNA, 75 bp, synthetic construct
  source 1..75: mol_type = other DNA
ctgcaacaaaactgcaaacagcacgcacaataggcggcgtgtcattcgatggctccgccaatatcaacctgccgg

SEQ ID NO: 345088 - DNA, 75 bp, synthetic construct
  source 1..75: mol_type = other DNA
cagcctgggaacctataataggttaaggccgcttatcattaacaatgccaatggtgctgttacgatcggtaatgg

SEQ ID NO: 345089 - DNA, 75 bp, synthetic construct
  source 1..75: mol_type = other DNA
cacgttctgacggcttcgttgaaaaagtctatcccctgacaacaggcgatcatgtgaagaaagggacgccgctta

SEQ ID NO: 345090 - DNA, 75 bp, synthetic construct
  source 1..75: mol_type = other DNA
ttatccggtacaggcggtacgccaacccagataaaaggggttctggagcgacttcgtctggctggtatgccggaa

SEQ ID NO: 345091 - DNA, 75 bp, synthetic construct
  source 1..75: mol_type = other DNA
gatgtatgatatatcttttatatagattcaatttcaaatttactgatatttcaattagcttacggcaattatcca

SEQ ID NO: 345092 - DNA, 75 bp, synthetic construct
  source 1..75: mol_type = other DNA
gaacaggagtatgaagcgacaggaagcgaagaaacactcagggcggttatcaacaccgactggggattaccttat

SEQ ID NO: 345093 - DNA, 75 bp, synthetic construct
  source 1..75: mol_type = other DNA
tgcactgaaagaccgggtgaataacgcgttatggcgtgactcgccaggtcccggctatgtgcatttccctgactg

SEQ ID NO: 345094 - DNA, 75 bp, synthetic construct
  source 1..75: mol_type = other DNA
atccttctcaacaaatgcgactgatggcaatggcggtggactccggcggtgaagacggggtcactgataatgcct

SEQ ID NO: 345095 - DNA, 75 bp, synthetic construct
  source 1..75: mol_type = other DNA
tagaaatagaacaggtggaaagctggatggcgaaccagttagcgcagatggaaaaatgcggtccggtggcactgg

SEQ ID NO: 345096 - DNA, 75 bp, synthetic construct
  source 1..75: mol_type = other DNA
ccgaacctgcgtgcctcctgccggcgcatggaagcctcgggctggctgcgcacgctacgtgcgccgaatctgcag

SEQ ID NO: 345097 - DNA, 75 bp, synthetic construct
  source 1..75: mol_type = other DNA
atgttagataataaaataaaaaaatcaagaagaggtctacctcgccatgtaaaaaacccattccttaatgataca

SEQ ID NO: 345098 - DNA, 75 bp, synthetic construct
  source 1..75: mol_type = other DNA
tatccactctgtctttttaattattttcactattatggggacgctttattttttattgtttaatgtcaaaagccc

SEQ ID NO: 345099 - DNA, 75 bp, synthetic construct
  source 1..75: mol_type = other DNA
tatatggaagaataatttcttactggacaaatgtagatataaaattgcaatcagaggttgctgctggttttattt

SEQ ID NO: 345100 - DNA, 75 bp, synthetic construct
  source 1..75: mol_type = other DNA
gcggcgaatttaattgatgaagtggtagaaaaagaacaggtggaaagctggatggcgaaccagttagcgcagctg

SEQ ID NO: 345101 - DNA, 75 bp, synthetic construct
  source 1..75: mol_type = other DNA
tggtgaatttcacgccagcaacgccattttcaaacccatcgattttcagcaaacgttgaataatttttgcccgga

SEQ ID NO: 345102 - DNA, 75 bp, synthetic construct
  source 1..75: mol_type = other DNA
actggggattaccttatcttccccgtgccagcatggagcaacgaaaaagtgaactgcttgagcagcgggcagagc

SEQ ID NO: 345103 - DNA, 75 bp, synthetic construct
  source 1..75: mol_type = other DNA
cttgtgctgcgatattcgtattgctcgccccggcgcgaaattctctaacccggaagtgatgctcggcatggtgcc

SEQ ID NO: 345104 - DNA, 75 bp, synthetic construct
  source 1..75: mol_type = other DNA
cgccccggcgcgaaattctctaacccggaagtgatgctcggcactgagagatcccctcataatttccccaaaacg

SEQ ID NO: 345105 - DNA, 75 bp, synthetic construct
  source 1..75: mol_type = other DNA
gaaaaagcgtgagctcaatagtgcaggagtctggttacgtgaaggtcaggtcattgatcgtaacggcaacgtttc

SEQ ID NO: 345106 - DNA, 75 bp, synthetic construct
  source 1..75: mol_type = other DNA
gcgccaccgacgactggtattctttccctttacaatcgtggtgaccgccgccgctggtactggccatgtccgcac

SEQ ID NO: 345107 - DNA, 75 bp, synthetic construct
  source 1..75: mol_type = other DNA
aacgaaaaagtgaactgcttgagcagcgggcagagccagttccttcccgcagtgtgccggatggcgttaatttcc

SEQ ID NO: 345108 - DNA, 75 bp, synthetic construct
  source 1..75: mol_type = other DNA
gtcaccccatcaccggattaaccattaacttccgtgaccctgaatactcaccggaaaagggcggctggcatccgg

SEQ ID NO: 345109 - DNA, 75 bp, synthetic construct
  source 1..75: mol_type = other DNA
tttacgtgctggccgtgaatgaagacgtgacactgcctgccggggttgaaagcgggctggttcccgtcacggcga

SEQ ID NO: 345110 - DNA, 75 bp, synthetic construct
  source 1..75: mol_type = other DNA
tatcgctttttattctgcggcgggcgtgcatgtcagtaaggcgctacctgttttaatcttgaagagttgccggta

SEQ ID NO: 345111 - DNA, 75 bp, synthetic construct
  source 1..75: mol_type = other DNA
gggaagacgcgaacggtgagttcttgatgctggttccgggaaagatgctgttttgcagcttttgcgtgttgatta

SEQ ID NO: 345112 - DNA, 75 bp, synthetic construct
  source 1..75: mol_type = other DNA
gggaagacgcgaaaggtgagttcttgatgtcggttccgcgaaaaatgctgctttacagcttttgcgtgatgacga

SEQ ID NO: 345113 - DNA, 75 bp, synthetic construct
  source 1..75: mol_type = other DNA
ctggtcgctgtgggaaagtaactttatggcttaccacgatatgggggttttcacggtccgtacgttgtgggaaag

SEQ ID NO: 345114 - DNA, 75 bp, synthetic construct
  source 1..75: mol_type = other DNA
cgcaaacgggtaacgaccaggcagtgaaagccgattgcgataaagtctggcaggaaattcgcagtaataacaaat

SEQ ID NO: 345115 - DNA, 75 bp, synthetic construct
  source 1..75: mol_type = other DNA
agatcatctcagtcatctttcattttcactatcaatgggacgaaagcgatcttaaacagcgcaatatcattgccg

SEQ ID NO: 345116 - DNA, 75 bp, synthetic construct
  source 1..75: mol_type = other DNA
aatgggcagataaagatcacactgctgtcaattgcatggtgaagtttgagcacattgagcaggcggttcctttca

SEQ ID NO: 345117 - DNA, 75 bp, synthetic construct
  source 1..75: mol_type = other DNA
actgccggaggcgtttttctggacggatgcggacaataatgacgtaccgatggacgctgaaacactgattgctct

SEQ ID NO: 345118 - DNA, 75 bp, synthetic construct
  source 1..75: mol_type = other DNA
ctcattgcttttatcagccgctgacaacatcttttttaatcaatcacttgaaatcatctctgtcatctttcattt

SEQ ID NO: 345119 - DNA, 75 bp, synthetic construct
  source 1..75: mol_type = other DNA
ggcgttataatctgattcagagtgaaaaacgcggtcaatggagtatgaagcaatttgatcaatcctacgccgagc

SEQ ID NO: 345120 - DNA, 75 bp, synthetic construct
  source 1..75: mol_type = other DNA
ttgatcaatcgcttgagatcatctcagtcatctttcattttcactatcaatgggacgaaagcgatcttaaacagc

SEQ ID NO: 345121 - DNA, 75 bp, synthetic construct
  source 1..75: mol_type = other DNA
cgccagcgactgccgaaatacgtctggatcaccgaaactggctggaaaatgctgggagttgatctggtgaaactt

SEQ ID NO: 345122 - DNA, 75 bp, synthetic construct
  source 1..75: mol_type = other DNA
gtatgatgaacagcgaaacgaaattgcgcggtttattctgaagcgtatgccgccggacgaagcgtactggtgcac

SEQ ID NO: 345123 - DNA, 75 bp, synthetic construct
  source 1..75: mol_type = other DNA
actttcctggttgaaccggaaaggaagcgcacgaagcgccgtcgcggtgagcactccaccaaacccaaatgcgaa

SEQ ID NO: 345124 - DNA, 75 bp, synthetic construct
  source 1..75: mol_type = other DNA
cgcaaaccggtaatgaccaggcggtaaaagccgattgtgataaggtctggcaggaaattcgcagtaataacaaat

SEQ ID NO: 345125 - DNA, 75 bp, synthetic construct
  source 1..75: mol_type = other DNA
aaatgggactacggcaaacagacacaggcgcgtcttgagccgtcagtggctgccgcgaaagcaggaatactgccg

SEQ ID NO: 345126 - DNA, 75 bp, synthetic construct
  source 1..75: mol_type = other DNA
ataatgacgtaccgatggacgctgaaacactgattgctctgagtgctgctgcagagcaggcgatgttcaccaaag

SEQ ID NO: 345127 - DNA, 75 bp, synthetic construct
  source 1..75: mol_type = other DNA
gttaaaagtacctgtcggggagctggtttttgccgcccgacacaaccagccgctacacggacaggcgctacctcc

SEQ ID NO: 345128 - DNA, 75 bp, synthetic construct
  source 1..75: mol_type = other DNA
cgccgctgaccgacaccatcaacagcatggcgtcgcagttcgccgatgcggtcaacaaccagctggcgcagggct

SEQ ID NO: 345129 - DNA, 75 bp, synthetic construct
  source 1..75: mol_type = other DNA
tatcgacaacacgctggattacatcgactcgcaaagcacggaaatcatcagccagcagcaggcgatggtgtcgca

SEQ ID NO: 345130 - DNA, 75 bp, synthetic construct
  source 1..75: mol_type = other DNA
catcggtgccagcggtggttcgccgaacagcgccggtaacggcgtgcaggtcgacagcattcgccgcgtctccaa

SEQ ID NO: 345131 - DNA, 75 bp, synthetic construct
  source 1..75: mol_type = other DNA
cgaagcgaccaccagccccgatgattccgccctgcgcgagcaggtgatcagcgaagccggggcgctgtcgttgcg

SEQ ID NO: 345132 - DNA, 75 bp, synthetic construct
  source 1..75: mol_type = other DNA
cgccgttgaccgacaccatcaacagcatggcgtcgcagtttgccgatgcggtcaacaaccagctggcgcagggct

SEQ ID NO: 345133 - DNA, 75 bp, synthetic construct
  source 1..75: mol_type = other DNA
tatgccgccagcgattacggctattacaacacccagcaagggtatctcacgcaactggaagcggtattgagcgac

SEQ ID NO: 345134 - DNA, 75 bp, synthetic construct
  source 1..75: mol_type = other DNA
caaagggaaggatatctggcacctgctgagtgaagatgaaaagcgggagctggtggacgcggtacacagcgagtt

SEQ ID NO: 345135 - DNA, 75 bp, synthetic construct
  source 1..75: mol_type = other DNA
agatgttgttttaaacaggcaatatgcgttttatctaaacgagaaggccattcagatttactctcaaatcttcct

SEQ ID NO: 345136 - DNA, 75 bp, synthetic construct
  source 1..75: mol_type = other DNA
gtagagccagatgtagcggcaaaaacccaacaaggcattgatatacttgcagatgttgttttaaacaggcaatat

SEQ ID NO: 345137 - DNA, 75 bp, synthetic construct
  source 1..75: mol_type = other DNA
tatttcttcaatgtaaaacttaaagcactttcttaccaccaaagccaacagcacagaaattatatgcaaccagaa

SEQ ID NO: 345138 - DNA, 75 bp, synthetic construct
  source 1..75: mol_type = other DNA
caagtagctgaacgtatggggattacccagccagcagtaagtaaattggaaaaaaacgccagtaaagccagtgtt

SEQ ID NO: 345139 - DNA, 75 bp, synthetic construct
  source 1..75: mol_type = other DNA
tatcgagtctttctcgtggtatagcgactgcagttcgaagcagcagtttctctgtatcaccgcaaaaagtgtcac

SEQ ID NO: 345140 - DNA, 75 bp, synthetic construct
  source 1..75: mol_type = other DNA
cagccagcaatttcatgcgttgtgccgaagctgtcggaacacgcattacagacatcccggtagacctcaacacgc

SEQ ID NO: 345141 - DNA, 75 bp, synthetic construct
  source 1..75: mol_type = other DNA
tatggggattttgctttcagcatctgacctgaatgatattgaaagaataacgtatataaaagcaggcaggaagtt

SEQ ID NO: 345142 - DNA, 75 bp, synthetic construct
  source 1..75: mol_type = other DNA
gcagtagatttgaaagcgctgggtgagttcaccattacgctggactgcgacgtgcttcaggctgatggtggcacg

SEQ ID NO: 345143 - DNA, 75 bp, synthetic construct
  source 1..75: mol_type = other DNA
taagaacccttacagaccagttttatgctgataacaaaggcctacaagaggctctcgacggcagtaatgatggaa

SEQ ID NO: 345144 - DNA, 75 bp, synthetic construct
  source 1..75: mol_type = other DNA
taactggcaaccggaggccatatttctcacccaccatcaccacgatcacgttggcggcgtaaaagaactggtgga

SEQ ID NO: 345145 - DNA, 75 bp, synthetic construct
  source 1..75: mol_type = other DNA
aaagtttccgcaaattgtggtgtatggtccacaagagacacaagataagggaacaacacaggtagtcaaagatgg

SEQ ID NO: 345146 - DNA, 75 bp, synthetic construct
  source 1..75: mol_type = other DNA
ctgctgaccattctttaccaccatgtaccgtcggtcacatcgatgccggtctacctggggcaactggatgcgttg

SEQ ID NO: 345147 - DNA, 75 bp, synthetic construct
  source 1..75: mol_type = other DNA
tcggtattaccatgatggatattaccgctatctggcacaacattgagtcggtgatggtggaagccataaatcagg

SEQ ID NO: 345148 - DNA, 75 bp, synthetic construct
  source 1..75: mol_type = other DNA
atggctaccctcaccactggcgtggttcttcttcgctggcaacttcttagtgccgtaatgatgtttctggccagc

SEQ ID NO: 345149 - DNA, 75 bp, synthetic construct
  source 1..75: mol_type = other DNA
gttttttttctttcccctgtttttcaggcgataagattaaaatcgtgaaaacctgtcaactgaaaaaaaatgaaa

SEQ ID NO: 345150 - DNA, 75 bp, synthetic construct
  source 1..75: mol_type = other DNA
cgaaaaagtcaggagaaagagcatactcatcagataatctaccatcaaaagatggttacatattttttgcattaa

SEQ ID NO: 345151 - DNA, 75 bp, synthetic construct
  source 1..75: mol_type = other DNA
gtcagcgaagtaaacaggacttgttgaatgatggcgtgcctcagagtattgcagataaacttgacggatattata

SEQ ID NO: 345152 - DNA, 75 bp, synthetic construct
  source 1..75: mol_type = other DNA
gtggggcgctggccacgactgcaaaaggagcgatgacagcactacctcgtcgtcataatttaaacaactatatat

SEQ ID NO: 345153 - DNA, 75 bp, synthetic construct
  source 1..75: mol_type = other DNA
tatagttatcttttaacaataaaagaatcacataaaaataacagtgataatgatatcgatcataagatttataca

SEQ ID NO: 345154 - DNA, 75 bp, synthetic construct
  source 1..75: mol_type = other DNA
taatggcagccttcgcattgtgtataggatatgctcacgctgaatctcaaacgccaatacgccttgtaattcatg

SEQ ID NO: 345155 - DNA, 75 bp, synthetic construct
  source 1..75: mol_type = other DNA
atggtaaatccagaacctatagtatatatagtttccttcgcagtggttacctgtatagaatttatttttaatttt

SEQ ID NO: 345156 - DNA, 75 bp, synthetic construct
  source 1..75: mol_type = other DNA
gccgcatggtagaagaagatccggcgcatccgcgttacattcagaccgtctggggtctgggctacgtctttgtac

SEQ ID NO: 345157 - DNA, 75 bp, synthetic construct
  source 1..75: mol_type = other DNA
aagaggcggtaattgctttcggtaagttcaaacttaacctcggtacgcgcgaaatgttccggcgaagaggagccg

SEQ ID NO: 345158 - DNA, 75 bp, synthetic construct
  source 1..75: mol_type = other DNA
taaaaaatatccccaaagaggagattgaagattatgttaaaaaagaagcgtttgttcaattcaaggcatgcgacg

SEQ ID NO: 345159 - DNA, 75 bp, synthetic construct
  source 1..75: mol_type = other DNA
gtccagacgcgtaaagccttccagtgccgaactaaaattgatgcgcctgatccaggccaacccagcattaagtaa

SEQ ID NO: 345160 - DNA, 75 bp, synthetic construct
  source 1..75: mol_type = other DNA
tataaaacaggcatgcctcgctccaactattttagtgaacgttgcaaaggtgaaatattcctcaaattcgaaaac

SEQ ID NO: 345161 - DNA, 75 bp, synthetic construct
  source 1..75: mol_type = other DNA
gctggtaacacaaggaaaagatggtgtaactgtctactggaaaaacagattttatcattttccttgccagatggt

SEQ ID NO: 345162 - DNA, 75 bp, synthetic construct
  source 1..75: mol_type = other DNA
gtgggcgatgaaaaagtacttgagcagatcgaaaagcaattgcataaactggtcgatgtcttgcgcgtcagcgaa

SEQ ID NO: 345163 - DNA, 75 bp, synthetic construct
  source 1..75: mol_type = other DNA
ggcaccagcgataagcttgatgcatttttagcatcgattcgcgatgtggcgaaaattgtggaagttgctcgctct

SEQ ID NO: 345164 - DNA, 75 bp, synthetic construct
  source 1..75: mol_type = other DNA
caaggttgccccgctaatcagcattgagcgttttatctggttggttgggtatttaaacaaccgttgggggacgga

SEQ ID NO: 345165 - DNA, 75 bp, synthetic construct
  source 1..75: mol_type = other DNA
acgtcagccaaagcaatttgttaagactgcgaatggagtcgcccttgaccgccaattggtggctgatgcaagaga

SEQ ID NO: 345166 - DNA, 75 bp, synthetic construct
  source 1..75: mol_type = other DNA
aaaaattcctccacaatgggaatcattctatcttgggcgtatagcacaaacaaacgataaaatacaaaaatgtgt

SEQ ID NO: 345167 - DNA, 75 bp, synthetic construct
  source 1..75: mol_type = other DNA
gggcgggttacagaaaaatatctattttcaaagtttttggcagttagacgttgataacagaagacaacggtttga

SEQ ID NO: 345168 - DNA, 75 bp, synthetic construct
  source 1..75: mol_type = other DNA
ttatcggcagcgctctcctgctcctggcggcggcgatgttctggtgtttcaaccgcctgaatgccctgacgctgg

SEQ ID NO: 345169 - DNA, 75 bp, synthetic construct
  source 1..75: mol_type = other DNA
ttattctgcatgggtacgagaaaattcagtggccggatgcgccggaatgggcatgcagggaaacctggctggaat

SEQ ID NO: 345170 - DNA, 75 bp, synthetic construct
  source 1..75: mol_type = other DNA
gtggcgatgtggttgctggttttcgtgatattgccgatcccgtgctggcaagtgaggcagcttatattcagtgcc

SEQ ID NO: 345171 - DNA, 75 bp, synthetic construct
  source 1..75: mol_type = other DNA
cactgtggtgagtattttcagccctgcggcgatgtggttgctggtttccgtgatattgccgatcccgtgctggca

SEQ ID NO: 345172 - DNA, 75 bp, synthetic construct
  source 1..75: mol_type = other DNA
gttttcaccgatggtgatgataccccgtggtcaaaagggtttctcgcgtcatcctatgcttctcgtggcttaaaa

SEQ ID NO: 345173 - DNA, 75 bp, synthetic construct
  source 1..75: mol_type = other DNA
gcattgagaattacatggcgcaagttaacgattcgctttgtctgttggtgcaggtggaaagtaaaacggcactgg

SEQ ID NO: 345174 - DNA, 75 bp, synthetic construct
  source 1..75: mol_type = other DNA
atgaacgcattattaagcaatccctttaaagaacgtttacgcaagggcgaagtgcaaattggtctgtggttaagc

SEQ ID NO: 345175 - DNA, 75 bp, synthetic construct
  source 1..75: mol_type = other DNA
gcatctttatcaccaaaggcgcgggcgtacaggggctgcaaaacggtgcggtcagctgtattggcatgaccggcg

SEQ ID NO: 345176 - DNA, 75 bp, synthetic construct
  source 1..75: mol_type = other DNA
tatgctgagacagcgtgttaccggtgattacctgcaaacgtcggctattctggatcgccagttcgacgtcgtcag

SEQ ID NO: 345177 - DNA, 75 bp, synthetic construct
  source 1..75: mol_type = other DNA
tgaagtacagatgggttacgcggaaggcaaatcaatgctttacctcgaggctcgttgcatttacatcaccaaagc

SEQ ID NO: 345178 - DNA, 75 bp, synthetic construct
  source 1..75: mol_type = other DNA
caatcatttgaataaagcaggtattccgtgggccattgtgacttctggctccatgccggtagcgcgagcgcgcca

SEQ ID NO: 345179 - DNA, 75 bp, synthetic construct
  source 1..75: mol_type = other DNA
ctgttacgcagaaaccatctctgtttatggtactgaacctgtctttactgacggcgacgatactccgtggtcaaa

SEQ ID NO: 345180 - DNA, 75 bp, synthetic construct
  source 1..75: mol_type = other DNA
gcacgctatgcgccgtttaacgctatcgccctgctcgtgggctctcaggttggccgtccgggcgtattaacccag

SEQ ID NO: 345181 - DNA, 75 bp, synthetic construct
  source 1..75: mol_type = other DNA
tcagggcctgcagaatggctcggtaagctgcatcggtgttccatcagctgtgccatcaggcatccgcgcagtatt

SEQ ID NO: 345182 - DNA, 75 bp, synthetic construct
  source 1..75: mol_type = other DNA
cgcgctcgtcagatgcaggtaggcggaaaggatccgctagtaccggaagaaaacgataaaaccacagtaatcgcg

SEQ ID NO: 345183 - DNA, 75 bp, synthetic construct
  source 1..75: mol_type = other DNA
tcgcccaggaaattatcaataaaaaccgtaacagcctggaagtggtgaaagccctggcgcaaggcggttttaccg

SEQ ID NO: 345184 - DNA, 75 bp, synthetic construct
  source 1..75: mol_type = other DNA
aattgttaacggcgccatcaccgaactggatggaaaacctgccagccagtttgacctgattgaccactttatcgc

SEQ ID NO: 345185 - DNA, 75 bp, synthetic construct
  source 1..75: mol_type = other DNA
ccgtgggctattgtgacttctggctccatgccggtagcgcgagcgcgtcataaaatagcgggcttcccgcgccag

SEQ ID NO: 345186 - DNA, 75 bp, synthetic construct
  source 1..75: mol_type = other DNA
tgcgtatctgttaggcgcgcagctgctggggcttgcgccgcaggaatgtgtggtggtggaagatgctcccgctgg

SEQ ID NO: 345187 - DNA, 75 bp, synthetic construct
  source 1..75: mol_type = other DNA
cggcagataccccgcgcctgaatgaggtcgatttagtcctccacagtctggagcaaattactgtgatcaaacagc

SEQ ID NO: 345188 - DNA, 75 bp, synthetic construct
  source 1..75: mol_type = other DNA
aagcctcaatttaaccgtcgtggcggaaggcgtcgaaaccaaagagcaatttgagatgctacgcaagatccactg

SEQ ID NO: 345189 - DNA, 75 bp, synthetic construct
  source 1..75: mol_type = other DNA
tagcgccggaagaggtgctggctttcattcacggtaaacaggccatcacctctttgcgccattttatggtgggca

SEQ ID NO: 345190 - DNA, 75 bp, synthetic construct
  source 1..75: mol_type = other DNA
ggtagatttggttctccatagtctggagcaaattactgtgaccaaacagccaaatggcgatgttattatttcgtg

SEQ ID NO: 345191 - DNA, 75 bp, synthetic construct
  source 1..75: mol_type = other DNA
aatacgttataatgtagcattaggtaattacagaaacacgtctgttaaaaacaaaatgaattctgagccgcattt

SEQ ID NO: 345192 - DNA, 75 bp, synthetic construct
  source 1..75: mol_type = other DNA
cgtcaccatctctgtgctgtcacgtgaaaataacggtgtggcatccgaagacctgctggcggtggtgcgcaacgc

SEQ ID NO: 345193 - DNA, 75 bp, synthetic construct
  source 1..75: mol_type = other DNA
tttatgcggcgctgcatgttgaaggggtgcagcgcgtcgagctgacatcaccgcaggccgacattgttctgagta

SEQ ID NO: 345194 - DNA, 75 bp, synthetic construct
  source 1..75: mol_type = other DNA
ctgccgccattgttgaataccagataaacgccacgctttacctttaccctggtcccgaaagcgaacccatccgcg

SEQ ID NO: 345195 - DNA, 75 bp, synthetic construct
  source 1..75: mol_type = other DNA
ctgccggtaatgaccttgatgtgattggtgccaattacaacaccacgcgcctgactatcaccccggcagatgatt

SEQ ID NO: 345196 - DNA, 75 bp, synthetic construct
  source 1..75: mol_type = other DNA
gtatgtgcaacacgattactctttatttcagggggggcagttaacgttagggcagacttctacagacggttcagt

SEQ ID NO: 345197 - DNA, 75 bp, synthetic construct
  source 1..75: mol_type = other DNA
gctgaatgccgaagatgtgcgccccgtggccgaccgggtgactgtccagtcagccgagattgtgccgtaccagat

SEQ ID NO: 345198 - DNA, 75 bp, synthetic construct
  source 1..75: mol_type = other DNA
gtggctgaccgcgtgaccgtgcagtctgccgccattgttgaatatcagataaacgccacgctttacctttaccct

SEQ ID NO: 345199 - DNA, 75 bp, synthetic construct
  source 1..75: mol_type = other DNA
ctgattatcaccccggcagatgattcgaccctcccgccgacaccggccgtgatggaatctgacaccgattatcgt

SEQ ID NO: 345200 - DNA, 75 bp, synthetic construct
  source 1..75: mol_type = other DNA
gcttgagcgtggcggggccggtcggcgcatatgagtatcacggtcgcagcgccgacgggcgggtcgcagacgtgt

SEQ ID NO: 345201 - DNA, 75 bp, synthetic construct
  source 1..75: mol_type = other DNA
ccgccggtaatgaccttgatgtgattggtgccaattacaacaccacgcgtctgactatcaccccggcagatgatt

SEQ ID NO: 345202 - DNA, 75 bp, synthetic construct
  source 1..75: mol_type = other DNA
gttggattatgaaaccatcctgacagagcgaaaggtgacgctcgtctcactctatcccgaagagcaacaggacgc

SEQ ID NO: 345203 - DNA, 75 bp, synthetic construct
  source 1..75: mol_type = other DNA
agaccggtggccgaccgtgtgaccgtgcagtctgccgtcatcgttgaataccagataaatgccacgctttacctt

SEQ ID NO: 345204 - DNA, 75 bp, synthetic construct
  source 1..75: mol_type = other DNA
aggatacacttattgcacaatggggtgaggagccttctcaaaagtgtaaagtaaattacaaattgcaaaataaaa

SEQ ID NO: 345205 - DNA, 75 bp, synthetic construct
  source 1..75: mol_type = other DNA
acaactctacctctcagcaagtaaagatcagtactgggataccgctgatggatataacttatctgcgagttactc

SEQ ID NO: 345206 - DNA, 75 bp, synthetic construct
  source 1..75: mol_type = other DNA
gcctccccgcgtctgtaaaaaaacgtgcatggcagtactgccagatggcatggagtggtgtgaccactaaaaaag

SEQ ID NO: 345207 - DNA, 75 bp, synthetic construct
  source 1..75: mol_type = other DNA
atgcctgttgttcctactacatccggacgccaggtgcaaagtcgtggagttcagtcagcaggcttgcagacgttt

SEQ ID NO: 345208 - DNA, 75 bp, synthetic construct
  source 1..75: mol_type = other DNA
cagatcgaacaactggctatgtcgctgccggatgaacaggctcgtaatgctttcatgcagcaggcgcagcagcag

SEQ ID NO: 345209 - DNA, 75 bp, synthetic construct
  source 1..75: mol_type = other DNA
tctggaattatctgatggtaacaatgctaaaaacattgacctaggttattttatgaatgcgagtggggcggcgcc

SEQ ID NO: 345210 - DNA, 75 bp, synthetic construct
  source 1..75: mol_type = other DNA
agaagtcaatttgcctaaccaactaggacgctcgagtactacaggtaatacaccacaaacccgcgatgaaatgct

SEQ ID NO: 345211 - DNA, 75 bp, synthetic construct
  source 1..75: mol_type = other DNA
aggatgatccagaagcagaccagattcgtcgcaataaaatgcgtgattttgttgaggccgtaaaagctaaaacgg

SEQ ID NO: 345212 - DNA, 75 bp, synthetic construct
  source 1..75: mol_type = other DNA
caacggtattcagctgataatgaagcccaaaaatgaacgaatttatgttgattactttgaaacaaatctgaagga

SEQ ID NO: 345213 - DNA, 75 bp, synthetic construct
  source 1..75: mol_type = other DNA
tgcatggcattattgccagatggcatggcgtggagtgtgtaccccaaaagcactgtcccgtctggctgcgttctc

SEQ ID NO: 345214 - DNA, 75 bp, synthetic construct
  source 1..75: mol_type = other DNA
tatcaaaaccaagaacctgcttattctgctgggcctcgttgtggttattgtcttcaccaccgttggtctgacatt

SEQ ID NO: 345215 - DNA, 75 bp, synthetic construct
  source 1..75: mol_type = other DNA
tggcgggggggcaaggacgatgtaaaagcgacctttggtgccgactcatttgtcatcatgtgtatttatatcgct

SEQ ID NO: 345216 - DNA, 75 bp, synthetic construct
  source 1..75: mol_type = other DNA
ccatagggagcgatctggaccagctcgctgccaattacaacgtgaaacgcctgacggtgacgcctgctgataatg

SEQ ID NO: 345217 - DNA, 75 bp, synthetic construct
  source 1..75: mol_type = other DNA
aggcggcgtatcactctatactggcccggtgatcaccagttaccgctatacccagtatgactccagcgatgcagg

SEQ ID NO: 345218 - DNA, 75 bp, synthetic construct
  source 1..75: mol_type = other DNA
aggcggcgtatcactctatactggcccggtgatcaccagataccgctatacccattatgactccagcgatgcagg

SEQ ID NO: 345219 - DNA, 75 bp, synthetic construct
  source 1..75: mol_type = other DNA
aggcggcctatcactctatactggcccggtgatcaccagttaccgctatacccactatgactccagcgatgcagg

SEQ ID NO: 345220 - DNA, 75 bp, synthetic construct
  source 1..75: mol_type = other DNA
aacaggctgttgttgattacgccgtcgctttcccggcacacggtcagcaccggaccagcaacgagctgcgtaaac

SEQ ID NO: 345221 - DNA, 75 bp, synthetic construct
  source 1..75: mol_type = other DNA
cccatcagggaaaaatgtgcaatgggcggacgccaatggaaacgttacttgatggaaagcgcatctgggccgaga

SEQ ID NO: 345222 - DNA, 75 bp, synthetic construct
  source 1..75: mol_type = other DNA
atagtgaaggcgttagcactggtagaagtgcgagtgctggatcatttggttgttgggaatgaagtagtttctttt

SEQ ID NO: 345223 - DNA, 75 bp, synthetic construct
  source 1..75: mol_type = other DNA
aggcggcttatcactctatactggcccggtgatcaccagataccgctatacccaatatgactccagcgatgcagg

SEQ ID NO: 345224 - DNA, 75 bp, synthetic construct
  source 1..75: mol_type = other DNA
aggcggcatatcactctatactggcccggtgatcaccaggtaccgctatacccattatgactccagcgatgcagg

SEQ ID NO: 345225 - DNA, 75 bp, synthetic construct
  source 1..75: mol_type = other DNA
aggcggcatatcactctatactggcccggtgatcaccagttaccgctatacccaatatgactccagcgatgcagg

SEQ ID NO: 345226 - DNA, 75 bp, synthetic construct
  source 1..75: mol_type = other DNA
aggcggcttatcactctatactggcccggtgatcaccaggtaccgctatacccagtatgactccagcgatgcagg

SEQ ID NO: 345227 - DNA, 75 bp, synthetic construct
  source 1..75: mol_type = other DNA
aggcggcttatcactctatactggcccggtgatcaccagctaccgctatacccactatgactccagcgatgcagg

SEQ ID NO: 345228 - DNA, 75 bp, synthetic construct
  source 1..75: mol_type = other DNA
aggcggcttatcactctatactggcccggtgatcaccagttaccgctatacccattatgactccagcgatgcagg

SEQ ID NO: 345229 - DNA, 75 bp, synthetic construct
  source 1..75: mol_type = other DNA
cgcggctgacttactgaatgatcgtgtactgccgttttatgcgtctcagagtctgccgatgctgagaatactgac

SEQ ID NO: 345230 - DNA, 75 bp, synthetic construct
  source 1..75: mol_type = other DNA
ttcatccgaaagatgagcaggaagcagtaatgcgtacgctggagcttgaatctgaacccgtcaccaaattgctgc

SEQ ID NO: 345231 - DNA, 75 bp, synthetic construct
  source 1..75: mol_type = other DNA
ccggatatgaaggaaccagagcaaaactgggtgataattactcaattaatgggttcaatattggcgtggggtatc

SEQ ID NO: 345232 - DNA, 75 bp, synthetic construct
  source 1..75: mol_type = other DNA
gtttacggtgtagctgtagctttggcgttgcggcagaaaaagaatgcacaacagcagaagcgctaaagctgttag

SEQ ID NO: 345233 - DNA, 75 bp, synthetic construct
  source 1..75: mol_type = other DNA
tgcctgcaccgcagattgtggatatgccggactttgagacgctgcttgccgaacgcaaggctgaatttgtggcgc

SEQ ID NO: 345234 - DNA, 75 bp, synthetic construct
  source 1..75: mol_type = other DNA
gacaggacctgtatatcgtattaacgattacgtgtcactgtatgcagctggcggtgtagcccatgttaaagctga

SEQ ID NO: 345235 - DNA, 75 bp, synthetic construct
  source 1..75: mol_type = other DNA
tccccgcgcctgacgtcgtggaaacgctggattttgagactattctcgcggaacgcaaagcgacgctggtctcgc

SEQ ID NO: 345236 - DNA, 75 bp, synthetic construct
  source 1..75: mol_type = other DNA
atgaaatcactgtttaaagtaacactgctggcgaccacaatggccgttgccctgcatgcaccaatcacttttgct

SEQ ID NO: 345237 - DNA, 75 bp, synthetic construct
  source 1..75: mol_type = other DNA
cgccgggcggaaacagaaacgatgggagggtgcatgtaaggcgttgcaagaactgaataaataccgtgacttgat

SEQ ID NO: 345238 - DNA, 75 bp, synthetic construct
  source 1..75: mol_type = other DNA
ccgctgcagggctgacactcaataatccaacgccttatcacatcaccgtcggttatatcggtactaacggcaaga

SEQ ID NO: 345239 - DNA, 75 bp, synthetic construct
  source 1..75: mol_type = other DNA
atgttagatatggtagaggataaagtcaaaaagaaaaaatctggcagtttggagacagatgaattgatgaatcaa

SEQ ID NO: 345240 - DNA, 75 bp, synthetic construct
  source 1..75: mol_type = other DNA
caccggcgtggcggcaggcaccgctgacgttattgttatgaccagcgacggtaatttcgttgcggtctgcaaagt

SEQ ID NO: 345241 - DNA, 75 bp, synthetic construct
  source 1..75: mol_type = other DNA
ccttatgccaacccgctttcagatattgactggctgcgtctggcaaagattaaagacctgcagcccggtgaactg

SEQ ID NO: 345242 - DNA, 75 bp, synthetic construct
  source 1..75: mol_type = other DNA
aaagttcctgcaggagccaccagcgtagaccgtctggtaacgctggaagtgctgtcagaaccgggtgccagcgcc

SEQ ID NO: 345243 - DNA, 75 bp, synthetic construct
  source 1..75: mol_type = other DNA
gaatctgcggtgcaaaaagcgggctattccctgcgcgatgagcaggccgccgacgagccacaagcatcgcgcctg

SEQ ID NO: 345244 - DNA, 75 bp, synthetic construct
  source 1..75: mol_type = other DNA
aatgatttaggcgtacaggcggctatcgctgtgcttaatgatgcacggaaaaacgcacagccaatgccggaaccg

SEQ ID NO: 345245 - DNA, 75 bp, synthetic construct
  source 1..75: mol_type = other DNA
tgaaaccagaaaccgccacgcgcctgcgtaacggtgagcgtgaagaggtggcgattaacagcctgcgccctggcg

SEQ ID NO: 345246 - DNA, 75 bp, synthetic construct
  source 1..75: mol_type = other DNA
attcatccggcaacggggattagtgaatctgaactgctgtcgctggcagcggcggtagaacaaggcgcgacgcat

SEQ ID NO: 345247 - DNA, 75 bp, synthetic construct
  source 1..75: mol_type = other DNA
atgtcgactcctgacaatcacggcaagaaagcccctcaatttgccgcgttcaaaccgctaaccacggttcagaac

SEQ ID NO: 345248 - DNA, 75 bp, synthetic construct
  source 1..75: mol_type = other DNA
ttgctcggcggctatattgttctggaaccacgcagcgccagccattacctgttaagcgatcaaaaatcccgcctg

SEQ ID NO: 345249 - DNA, 75 bp, synthetic construct
  source 1..75: mol_type = other DNA
gggcggggtttcgttcaacaatgcgaaagagagcaaagaagccagccgtcgcgtagaactgcggatgcaattctt

SEQ ID NO: 345250 - DNA, 75 bp, synthetic construct
  source 1..75: mol_type = other DNA
tggcctgaaagacaaaaagcacgatgaaagcatggatgttgttccaggcattagccaggaaacctgtcagctagg

SEQ ID NO: 345251 - DNA, 75 bp, synthetic construct
  source 1..75: mol_type = other DNA
tgctggtgcgtatgacgctgatttgaatctggcgttacacattgttgatattatgatggacgcatcgatccgcga

SEQ ID NO: 345252 - DNA, 75 bp, synthetic construct
  source 1..75: mol_type = other DNA
tttcacgaagtgttaactaaggactatcacgaagtattaaaagatatgaacgcaggcgcatatgacggtgattta

SEQ ID NO: 345253 - DNA, 75 bp, synthetic construct
  source 1..75: mol_type = other DNA
aaaactgccgtagctcgttatgtcttctgcctcactttcgtaaaacgaatggaagaagaatttgggcgagtacca

SEQ ID NO: 345254 - DNA, 75 bp, synthetic construct
  source 1..75: mol_type = other DNA
gaatcagcgcgcaccgttggcgatggtgggtgacggcattaacgacgcaccagccatgaaagccgctgccattgg

SEQ ID NO: 345255 - DNA, 75 bp, synthetic construct
  source 1..75: mol_type = other DNA
ctgtcggctgaagatatcgccgctgcccatctgctgggtaaaaccgaagccgagttcctgaaaatgaaagaggaa

SEQ ID NO: 345256 - DNA, 75 bp, synthetic construct
  source 1..75: mol_type = other DNA
aaatcgtagagtttagcgccaaagaatactggattgagaactatgcaactggggggcgtgacacatcggcaccaa

SEQ ID NO: 345257 - DNA, 75 bp, synthetic construct
  source 1..75: mol_type = other DNA
atgatgtgttggctattcggggaatcgatgaagttacatggagcgctctgaaaaacagtatttaccctggggcaa

SEQ ID NO: 345258 - DNA, 75 bp, synthetic construct
  source 1..75: mol_type = other DNA
cgccctgcgtaccgaatacgttgcgctgtcggcgcagcacggcagcaccacgctggagcaggtgctggacaaggc

SEQ ID NO: 345259 - DNA, 75 bp, synthetic construct
  source 1..75: mol_type = other DNA
cgctggagcagttgctggacaaggccgagtccgaaggacgcatcttcaaaagtgaacgcggctatctggaacaac

SEQ ID NO: 345260 - DNA, 75 bp, synthetic construct
  source 1..75: mol_type = other DNA
accccatgaatgagcaattacgccagttgctgacggcgctcggtctgaccgtggctgacggtgacgaatttacgc

SEQ ID NO: 345261 - DNA, 75 bp, synthetic construct
  source 1..75: mol_type = other DNA
attcatccggcaacaggtattagcgaatctgaactgctggcgctggcggcagcagtagaacaaggtgcaacacat

SEQ ID NO: 345262 - DNA, 75 bp, synthetic construct
  source 1..75: mol_type = other DNA
tcgaccgactggttacactggaagtgctatcagaaccgggtgccagcgccattgaccgcattctgaaactgatcg

SEQ ID NO: 345263 - DNA, 75 bp, synthetic construct
  source 1..75: mol_type = other DNA
aaaaagcccctcaatttgccgcgttcaaaccgctaaccacggcacagaacgccaacgactgttgctgcgacggtg

SEQ ID NO: 345264 - DNA, 75 bp, synthetic construct
  source 1..75: mol_type = other DNA
aaagaggcatatatcaatgcctttaaccagatggagaaacagctttcaaagccctctgtaccgagcgacgttgca

SEQ ID NO: 345265 - DNA, 75 bp, synthetic construct
  source 1..75: mol_type = other DNA
agttttttggtgatcttacaaaggaaatatatggggaaagatacatttttgatctttcctttgatgttgataaag

SEQ ID NO: 345266 - DNA, 75 bp, synthetic construct
  source 1..75: mol_type = other DNA
gaaagaaggtgagatagtgaaaggtatttccttctattcagcagagcgtttctttgatgttgaagtatttgtttc

SEQ ID NO: 345267 - DNA, 75 bp, synthetic construct
  source 1..75: mol_type = other DNA
aaggattacaggcgctacaggatgtggtgccgttagtgctggaggcggcaaatagcgatgaaggcaaaaaatggt

SEQ ID NO: 345268 - DNA, 75 bp, synthetic construct
  source 1..75: mol_type = other DNA
acggggcgcggagagagtcaaaaaatctggtattaccatacggacctgacgggcacggtgcaggaggtgaccgcg

SEQ ID NO: 345269 - DNA, 75 bp, synthetic construct
  source 1..75: mol_type = other DNA
acggtgcgccagtttgcctatcaaaatggcctgatgacagagcaccgcaacgcgacgggcttcacctgtacctac

SEQ ID NO: 345270 - DNA, 75 bp, synthetic construct
  source 1..75: mol_type = other DNA
tgtaaccagtaatgaaaaacgaccaccaaatacaggaaatgtttcagatcaagattttagagtgaagggagagtg

SEQ ID NO: 345271 - DNA, 75 bp, synthetic construct
  source 1..75: mol_type = other DNA
gatatcaccttaccggacgggcagcacctcagccatctttactacggcagcgggcatctgctccagacggcactg

SEQ ID NO: 345272 - DNA, 75 bp, synthetic construct
  source 1..75: mol_type = other DNA
aacggctgcaccacatgcaggcggacagggtgcgttttgcgtatgaccgcagcgggtggctgacggcggagtaca

SEQ ID NO: 345273 - DNA, 75 bp, synthetic construct
  source 1..75: mol_type = other DNA
gctaccaggcgggatttggcgaaaaccggggcaacatcagcaacagcggggcgtactttgagcagccgctgcggc

SEQ ID NO: 345274 - DNA, 75 bp, synthetic construct
  source 1..75: mol_type = other DNA
caaactttccagcaaattgaggattacggcattgcacatggctggagtgacgagcaaatccaggccaagaaaatc

SEQ ID NO: 345275 - DNA, 75 bp, synthetic construct
  source 1..75: mol_type = other DNA
atgcttctcttagcttaagccagataagcagcgatctgctgaataaccctgaaacaggtttgcttaacctgaaag

SEQ ID NO: 345276 - DNA, 75 bp, synthetic construct
  source 1..75: mol_type = other DNA
gccgtcaggttcagagcagagggatttcgacgcagggattctcatcgtttcagacaccaaatgtcggtgatgtac

SEQ ID NO: 345277 - DNA, 75 bp, synthetic construct
  source 1..75: mol_type = other DNA
atggcgacaagcccctttcccggaaggcggctcgcaaaatcagaaagatcacagggaaagacagagcaccgtaac

SEQ ID NO: 345278 - DNA, 75 bp, synthetic construct
  source 1..75: mol_type = other DNA
cgacggctgcgtatatgcgtggcgttgaatttcctaacccaccaggtgaggatgattttattgcagcttatggcg

SEQ ID NO: 345279 - DNA, 75 bp, synthetic construct
  source 1..75: mol_type = other DNA
aaactgttgcagagcatgggggaaaagctacctgcgccagcaatacggcaggtggcatctgtaattgctccgaac

SEQ ID NO: 345280 - DNA, 75 bp, synthetic construct
  source 1..75: mol_type = other DNA
acctcagccatctttactacggcagcgggcatctgctccagacggcactggacggtatcacggtcagtgaatatg

SEQ ID NO: 345281 - DNA, 75 bp, synthetic construct
  source 1..75: mol_type = other DNA
gtgctggataaccgcctgcggggctacgggcgtgaccgttaccgctataacgaatggggcgaactgacagagcgc

SEQ ID NO: 345282 - DNA, 75 bp, synthetic construct
  source 1..75: mol_type = other DNA
aatcatcccggtaaacagcaggaccgttacacctggaacgcgctggggttactgagcagccaccgtcgcatcacg

SEQ ID NO: 345283 - DNA, 75 bp, synthetic construct
  source 1..75: mol_type = other DNA
agcgggtggctgacggcagagcagagcgtgcacggcagcataaagtaccggcgcgacgcgctgggcaaccccacc

SEQ ID NO: 345284 - DNA, 75 bp, synthetic construct
  source 1..75: mol_type = other DNA
gctgaatgatgagagtgttcgcccgattgccgaccgtctgacagtggtgtcggccgagattgtcaattatgcggt

SEQ ID NO: 345285 - DNA, 75 bp, synthetic construct
  source 1..75: mol_type = other DNA
gcgtatcactctatactggcccggtgatcaccagctaccgctatacccattatgactccagcgatgcaggtggta

SEQ ID NO: 345286 - DNA, 75 bp, synthetic construct
  source 1..75: mol_type = other DNA
gctggcggcaaatttcaacgtggagcgcctgaccatcacgccggaagatgacagcgttgtaccgcctgtgcctgc

SEQ ID NO: 345287 - DNA, 75 bp, synthetic construct
  source 1..75: mol_type = other DNA
ctttcgggcgagagaacggcaggctggtgcgggtggcttccagcagcgggcaccatctgttattgcaccgcacaa

SEQ ID NO: 345288 - DNA, 75 bp, synthetic construct
  source 1..75: mol_type = other DNA
accctgcgcaccgatgagaaatatatcactctgattggcggccaggggcgtgagttaagttatccgaaagacatg

SEQ ID NO: 345289 - DNA, 75 bp, synthetic construct
  source 1..75: mol_type = other DNA
cgcgcgcgccgtactgagtacggtgatatgcgaagaccattctccggaaatccgcattgcccagggttccggcaa

SEQ ID NO: 345290 - DNA, 75 bp, synthetic construct
  source 1..75: mol_type = other DNA
acacagacggtactggaaatcagcccggaaatcccggactggctgcgtcaggtggtggatgtgctgtatgtggtc

SEQ ID NO: 345291 - DNA, 75 bp, synthetic construct
  source 1..75: mol_type = other DNA
tcccaacgtctttctcggcggcggtacacagacggtactggaaatcagcccggaaatcccggactggctgcgtca

SEQ ID NO: 345292 - DNA, 75 bp, synthetic construct
  source 1..75: mol_type = other DNA
cagggtgcgcttcgcgtatgaccgcagcgggtggctgacggcagagcacagcgtacacggcagcataaagtaccg

SEQ ID NO: 345293 - DNA, 75 bp, synthetic construct
  source 1..75: mol_type = other DNA
ttggttggggttatcaagcccggcgacagcagcggcaattcttgcctccaaagatcccgcaaaaacctggcaaca

SEQ ID NO: 345294 - DNA, 75 bp, synthetic construct
  source 1..75: mol_type = other DNA
tggcgatggcgaacaaacttgcacggactgtgtgggcgatagcagctcatgaccgaaaatacaataaagatcata

SEQ ID NO: 345295 - DNA, 75 bp, synthetic construct
  source 1..75: mol_type = other DNA
aagttcgcctgctggggataagtaaacgtggtgacacttatctgagaaccctgtttatccacggagcaagatcgg

SEQ ID NO: 345296 - DNA, 75 bp, synthetic construct
  source 1..75: mol_type = other DNA
cggctgacgcggcgcggcataaacgctgcctgtggtcagtgtcccgcgtccggcgggcacggggcgggcgcgttt

SEQ ID NO: 345297 - DNA, 75 bp, synthetic construct
  source 1..75: mol_type = other DNA
agccggacgcgaaatgtggcagcgaatggaacaatcccactggctcctcgacggtaaaaaggacgctcccgttgt

SEQ ID NO: 345298 - DNA, 75 bp, synthetic construct
  source 1..75: mol_type = other DNA
aggaatgaaaggttatctcggcaagtatcaggatatgggcgtcaccatctacctgactccagatggtaagcacgc

SEQ ID NO: 345299 - DNA, 75 bp, synthetic construct
  source 1..75: mol_type = other DNA
agattaactctctgcacggcacgctcctggagtttggtgaaagcattcacaaaggccgggcagcgatggagcggg

SEQ ID NO: 345300 - DNA, 75 bp, synthetic construct
  source 1..75: mol_type = other DNA
ttaaaacagaagaacaacagtcagtgctggttttgcaccgttcccgcagacaattggttaagttccgcaccatgc

SEQ ID NO: 345301 - DNA, 75 bp, synthetic construct
  source 1..75: mol_type = other DNA
cgataacgttagaatccttaaagggttaatagaggagtatcgttttgctgaagctattcggaagaatggtctatc

SEQ ID NO: 345302 - DNA, 75 bp, synthetic construct
  source 1..75: mol_type = other DNA
tggcgttgggccacttattgcgacggcagcggtggccaccatgggggaagcatcagcgtttaaatcagggcgaga

SEQ ID NO: 345303 - DNA, 75 bp, synthetic construct
  source 1..75: mol_type = other DNA
gatagaggatattgaaaaacagcttaccagcgtggcgaggcagaatgaaacctgtaagcggttgctggatattcc

SEQ ID NO: 345304 - DNA, 75 bp, synthetic construct
  source 1..75: mol_type = other DNA
cccaaacagactggctcaggaggaaaaatccgcctgctggggataagtaaacgtggtgatacctacctccggaca

SEQ ID NO: 345305 - DNA, 75 bp, synthetic construct
  source 1..75: mol_type = other DNA
cgtactttgctcaatgacgatccgatgtttaagggcgttttaacccgtgacggggattactttatttcggtgatg

SEQ ID NO: 345306 - DNA, 75 bp, synthetic construct
  source 1..75: mol_type = other DNA
cagatggtgctgcgatagcaatgttaataactgaaatatttgtatcctttacaatgttttgttttttgaaaaata

SEQ ID NO: 345307 - DNA, 75 bp, synthetic construct
  source 1..75: mol_type = other DNA
tttttagctgcatgttgttttcttattgaaaaatataaggaactgtgggttgtattattttcatttagtcccttg

SEQ ID NO: 345308 - DNA, 75 bp, synthetic construct
  source 1..75: mol_type = other DNA
gctacgctatgttggagggttagcttttttggggtcaatattcttatatctattggctccatttataataaatat

SEQ ID NO: 345309 - DNA, 75 bp, synthetic construct
  source 1..75: mol_type = other DNA
atggctaatattgcaggcatcgttaatgaagcgaagaaaaaaagcaaagatgtgtttttctttgatgcaggcgac

SEQ ID NO: 345310 - DNA, 75 bp, synthetic construct
  source 1..75: mol_type = other DNA
tcccgctgttgataagaacagacttgtaggtggtatggctaatatcgcaggcatcgttaatgaagcgaagaaaaa

SEQ ID NO: 345311 - DNA, 75 bp, synthetic construct
  source 1..75: mol_type = other DNA
cccagagtctaatgaatcctatttatcaagctgtttatccaagaattaattcattgtttgaagaaaattatgcaa

SEQ ID NO: 345312 - DNA, 75 bp, synthetic construct
  source 1..75: mol_type = other DNA
caagccgcgccagtggcggatgatgtattggttactttccagcatcagccgattggtttagccaaacggattggt

SEQ ID NO: 345313 - DNA, 75 bp, synthetic construct
  source 1..75: mol_type = other DNA
tagccaaacggattggttcgcgattgaaaaacagctatccgcgtgaactggtgcgcgatgggaaactttttaccg

SEQ ID NO: 345314 - DNA, 75 bp, synthetic construct
  source 1..75: mol_type = other DNA
tggcgttggaccacttattgcgacggcagcggtggccaccatgggggaagcatcagcgtttaaatcggggcgaga

SEQ ID NO: 345315 - DNA, 75 bp, synthetic construct
  source 1..75: mol_type = other DNA
actatgctatatatgataatgtttgttgaatatggtttcaatctcacagcaactcagagtattgccaaagcagca

SEQ ID NO: 345316 - DNA, 75 bp, synthetic construct
  source 1..75: mol_type = other DNA
gctttacccggccatgcgggcatggccttatgggttttcagttatgtggcctcagcgccgtgtgcgggctgtgct

SEQ ID NO: 345317 - DNA, 75 bp, synthetic construct
  source 1..75: mol_type = other DNA
ccggccatgcggggcatggccttgtgggttttcagctctgtggcctcagcgtcgtgtgcgggctgtgccgtgcct

SEQ ID NO: 345318 - DNA, 75 bp, synthetic construct
  source 1..75: mol_type = other DNA
gcagcagaagcatttaaggatacacttaattatcagtctgaacctttaacccttggtaaggcaaataaaattgca

SEQ ID NO: 345319 - DNA, 75 bp, synthetic construct
  source 1..75: mol_type = other DNA
tctcgtgttgaaacctatggttttgatagagaaggacagaagaactttagctataagatgtatcacgaaggtgat

SEQ ID NO: 345320 - DNA, 75 bp, synthetic construct
  source 1..75: mol_type = other DNA
aagttactttaggcggtgatggtaacgaaggtgcattaattcttgaaagagatagccgtgctgcccgttttagca

SEQ ID NO: 345321 - DNA, 75 bp, synthetic construct
  source 1..75: mol_type = other DNA
gcagtggcaataagcatttgtggtttagagatccaaatggcttagaattgggtctgttgtactgcgatgatgctg

SEQ ID NO: 345322 - DNA, 75 bp, synthetic construct
  source 1..75: mol_type = other DNA
atactggtaaagttactttaggtggtgatggtaacgaaggtgcattaattcttgaaagagatagccgtgctgccc

SEQ ID NO: 345323 - DNA, 75 bp, synthetic construct
  source 1..75: mol_type = other DNA
aagcccagacgtggaaacttgcggataagatgatccagttggaatctggtactgtaaccggtggcggtaatggcc

SEQ ID NO: 345324 - DNA, 75 bp, synthetic construct
  source 1..75: mol_type = other DNA
aacaaaccgaagtctggaaattcggcggtaagatgattcaccttgaaacgggcactgtatccggtggcggtaatg

SEQ ID NO: 345325 - DNA, 75 bp, synthetic construct
  source 1..75: mol_type = other DNA
caattgccgcagctaaccagcgaattgattctattgaaggtagtgccgatgctgcttacatcaagaagaatacca

SEQ ID NO: 345326 - DNA, 75 bp, synthetic construct
  source 1..75: mol_type = other DNA
cagggacagttgcatctaacaaatcagctatagaaactactgtagcaaataataaacgagatgcggacaataaaa

SEQ ID NO: 345327 - DNA, 75 bp, synthetic construct
  source 1..75: mol_type = other DNA
tcagcacgttgataaagctggaagagttcagaaaggaaaacccctgtaagggtctggaaccactgaaagaagcgc

SEQ ID NO: 345328 - DNA, 75 bp, synthetic construct
  source 1..75: mol_type = other DNA
gggcgggtggaatggaaacagaccgttcatttacgatttgactaacggtaaagttactttaggcggtgatggtaa

SEQ ID NO: 345329 - DNA, 75 bp, synthetic construct
  source 1..75: mol_type = other DNA
cacacaacgaccgggcggtccgggtactgaattaatcgagtttgccatcaacggtactgttaaacctaaagcaat

SEQ ID NO: 345330 - DNA, 75 bp, synthetic construct
  source 1..75: mol_type = other DNA
agaactttagctataagatgtatcacgaaggtgataagccgactcctggcgagattggtgcatacaccaaagccg

SEQ ID NO: 345331 - DNA, 75 bp, synthetic construct
  source 1..75: mol_type = other DNA
agattagagcgtcctagtaatcaatcaaactatattgaatggcaagaccgccgcaatggtgctaatgctcgtcaa

SEQ ID NO: 345332 - DNA, 75 bp, synthetic construct
  source 1..75: mol_type = other DNA
gtcttcttaatggacagttggatgcctttgatgctcagcaactgcaagaatacacatcaataggactattgcgta

SEQ ID NO: 345333 - DNA, 75 bp, synthetic construct
  source 1..75: mol_type = other DNA
cctgaaatccccgtttcaccaccatggcgtgggagaaagaaaaagacttccatacgtcacttttcgctgcctgat

SEQ ID NO: 345334 - DNA, 75 bp, synthetic construct
  source 1..75: mol_type = other DNA
cctgaaatgctcgtttcaccaccgtggcgtagtaagaaaaaaatgacagctccacgtcttgatttggcaccgctc

SEQ ID NO: 345335 - DNA, 75 bp, synthetic construct
  source 1..75: mol_type = other DNA
gattgctggcgatagccgaaaaacacccggagatcggcgacgtacgcgggctgggagcgatgatcgccatcgagc

SEQ ID NO: 345336 - DNA, 75 bp, synthetic construct
  source 1..75: mol_type = other DNA
tggaagtgttgaaggtgtttgagcaggaaaatctgctgcaaaaagccaacgatctggggcagaaactgaaagacg

SEQ ID NO: 345337 - DNA, 75 bp, synthetic construct
  source 1..75: mol_type = other DNA
agtgtctggaacctgtatttattggcacagttgccgcgtgagatggctttgaccttctggctgcgggtgatgctg

SEQ ID NO: 345338 - DNA, 75 bp, synthetic construct
  source 1..75: mol_type = other DNA
tcttgaaagctcccggtcaagtctccattcaaaggagtggttaaaggtcattgctactgataatacggcggtaaa

SEQ ID NO: 345339 - DNA, 75 bp, synthetic construct
  source 1..75: mol_type = other DNA
accgggcaatgtatgagggtaagcaaaccggaagaaatcgctgcatgtttattgacgaacaaaatgtgattaacc

SEQ ID NO: 345340 - DNA, 75 bp, synthetic construct
  source 1..75: mol_type = other DNA
tttacggtaactatggtgcattctggcgtaatgatggtcaaaacgtatattttctgtctactgccgaaaatgata

SEQ ID NO: 345341 - DNA, 75 bp, synthetic construct
  source 1..75: mol_type = other DNA
cggataacgcccaactggaactgaaatataaaaaaggcaaaacaccactcagtcatcgcaattggccgggcgaac

SEQ ID NO: 345342 - DNA, 75 bp, synthetic construct
  source 1..75: mol_type = other DNA
acattgtctggcgttatgaaaatttttcactggagtggcagtccgccatcacgcaggccatcaacttgatcggcg

SEQ ID NO: 345343 - DNA, 75 bp, synthetic construct
  source 1..75: mol_type = other DNA
gctacatgtcgcatgaaaaccgcttcggctacgcggcctgcgccgcccttttgcgcgaacaaggactggcatcca

SEQ ID NO: 345344 - DNA, 75 bp, synthetic construct
  source 1..75: mol_type = other DNA
ggaataattctgaggacacaatttcttgtatttcgacactgctaaaacaaaactatatatattttagaattgttt

SEQ ID NO: 345345 - DNA, 75 bp, synthetic construct
  source 1..75: mol_type = other DNA
ctgtatgcctctttccgctatgaaggtgagtgggagcactactctgaatgggcgcgaaacctctatctgatggaa

SEQ ID NO: 345346 - DNA, 75 bp, synthetic construct
  source 1..75: mol_type = other DNA
atgatctggataatgctcgccacgctggcggtagtgtttgtgattggttttcgggtgctgacatccggggccaga

SEQ ID NO: 345347 - DNA, 75 bp, synthetic construct
  source 1..75: mol_type = other DNA
tctaagtatgataacgatactatctctaagcaaatagattatattataggtgctgctttatttgttaaggctgag

SEQ ID NO: 345348 - DNA, 75 bp, synthetic construct
  source 1..75: mol_type = other DNA
ctaaagaaatcgtgccaaaactatttgcacttaagtgaatctgaatcatatttagatgaggaaattcatacaaat

SEQ ID NO: 345349 - DNA, 75 bp, synthetic construct
  source 1..75: mol_type = other DNA
tagaggtcagtttgatctcgcaaaagctaacttaaaagtccttcttggaataaaatatgttaactcaaaaacatg

SEQ ID NO: 345350 - DNA, 75 bp, synthetic construct
  source 1..75: mol_type = other DNA
ttcgtcgtttggttatggaacatttagctgtattaggagtagagattgatacagaaatgaataatcgatctaact

SEQ ID NO: 345351 - DNA, 75 bp, synthetic construct
  source 1..75: mol_type = other DNA
catcgggcagcgttagtctgggttcttcatttgctgatgatcaagatgcgttattaatcgtcaaaaaagacggtt

SEQ ID NO: 345352 - DNA, 75 bp, synthetic construct
  source 1..75: mol_type = other DNA
tttctcaaaggcggtaaccccgttatccacagaatccggggataacccgggaaagaacatgtgcgcaaaaaaacg

SEQ ID NO: 345353 - DNA, 75 bp, synthetic construct
  source 1..75: mol_type = other DNA
aagaggacatactttagggtgccattgtaaaccttacgcatgccacggagatgttcttgctgagtatcttaataa

SEQ ID NO: 345354 - DNA, 75 bp, synthetic construct
  source 1..75: mol_type = other DNA
aaattatcaggggtactaagccaagcctgtcaatcgacgctgattcctcaagatgagtttgaacctattgagtaa

SEQ ID NO: 345355 - DNA, 75 bp, synthetic construct
  source 1..75: mol_type = other DNA
atgaaattcatataaatgcgttttcagttttgaactgggtaaatgaaaagttcccagcaaaaacggaagatgaaa

SEQ ID NO: 345356 - DNA, 75 bp, synthetic construct
  source 1..75: mol_type = other DNA
tgtagcatcacgctcattatatccagtcataagtagaatgaaaaataataatgaaggtaatgtgaccgatttgta

SEQ ID NO: 345357 - DNA, 75 bp, synthetic construct
  source 1..75: mol_type = other DNA
aagctgatccgcccgatgattgttattgtctcagcggtgatgagtgccaaattactttacgatagccacggacag

SEQ ID NO: 345358 - DNA, 75 bp, synthetic construct
  source 1..75: mol_type = other DNA
caacgcggccgagttcaaaagcgaagcgctgcgccgtggctgcgaacagcatggcatccggctggactatcgccc

SEQ ID NO: 345359 - DNA, 75 bp, synthetic construct
  source 1..75: mol_type = other DNA
gcaagcccaggctgctctatctggacaacgcggccgagttcaaaagcgaagcgctgcgccgtggctgcgaacagc

SEQ ID NO: 345360 - DNA, 75 bp, synthetic construct
  source 1..75: mol_type = other DNA
aagagggcatactttaggctgtcattgtaaaccatacgcatgccacggggatgttcttgctgaatatcttaataa

SEQ ID NO: 345361 - DNA, 75 bp, synthetic construct
  source 1..75: mol_type = other DNA
gataaatcttagtcaatttaattattatgagtatttaaacccagtaagtaatttgaaaaaaatggatgtttgcta

SEQ ID NO: 345362 - DNA, 75 bp, synthetic construct
  source 1..75: mol_type = other DNA
ttcacccgctgcgtgctcggcatggtcgtcacgctggaagcgccgtctgccgtttcggttggcctgtgcctcgtg

SEQ ID NO: 345363 - DNA, 75 bp, synthetic construct
  source 1..75: mol_type = other DNA
gacaccccacggattccagaacaaggcgtggccactctgcctgatgaggcttgggagcgtgcgcgccgtcgtgcg

SEQ ID NO: 345364 - DNA, 75 bp, synthetic construct
  source 1..75: mol_type = other DNA
gccaccgcatcgcccacggcggcagtatttttaccgagtccgctattattaccgatgaggtcattgataatatcc

SEQ ID NO: 345365 - DNA, 75 bp, synthetic construct
  source 1..75: mol_type = other DNA
tattcagaagaacagattgaatccttccgcaactggccctctctcggtcgagggaatcatcgcaagtccgcattc

SEQ ID NO: 345366 - DNA, 75 bp, synthetic construct
  source 1..75: mol_type = other DNA
agcacgacggcaaagccttgcttgtgccgtttgacttctctgacacgccctactcagaagaacagatcgaatctt

SEQ ID NO: 345367 - DNA, 75 bp, synthetic construct
  source 1..75: mol_type = other DNA
caaagtcattgccagttgtttcttcgaagcctcaacccgtacccgtctctcttttgaaacctcaatgcaccgcct

SEQ ID NO: 345368 - DNA, 75 bp, synthetic construct
  source 1..75: mol_type = other DNA
gcggaagatgctacccgtctgcgtaaggaactggatgagaagcttatcaacgttgccaatacgctggccgccgcg

SEQ ID NO: 345369 - DNA, 75 bp, synthetic construct
  source 1..75: mol_type = other DNA
gttatcagcctcggttaacagcacagaagtaaagaaactgatgaagtatgatggcaaggccttgcttgtcctgtt

SEQ ID NO: 345370 - DNA, 75 bp, synthetic construct
  source 1..75: mol_type = other DNA
cggaatgctttgagtattttttcagttctctttatcgcagggagttcgtcaaaacactgcgtctgaacgaatgta

SEQ ID NO: 345371 - DNA, 75 bp, synthetic construct
  source 1..75: mol_type = other DNA
cgaaaaaccggaagatgacgtggatattgaactgctgaaaaacgccatgctggcggcacagcgtctggaatccac

SEQ ID NO: 345372 - DNA, 75 bp, synthetic construct
  source 1..75: mol_type = other DNA
atggaaacgtttaatagcctgtttatggtttccccgctgttgctggggctcctcttttttgtcgccatactggcg

SEQ ID NO: 345373 - DNA, 75 bp, synthetic construct
  source 1..75: mol_type = other DNA
gtgcagtatgttcaggccgatgtcttacggcagattttgcctattctggtgatttgtatcggtctttatttcttg

SEQ ID NO: 345374 - DNA, 75 bp, synthetic construct
  source 1..75: mol_type = other DNA
gaagcttcaacccgtacccgcctctctttcgaaacctccatgcaccgcctgggcgccagcgtggtgggcttctcc

SEQ ID NO: 345375 - DNA, 75 bp, synthetic construct
  source 1..75: mol_type = other DNA
aggaaggtgcggcgcgcctggccaccgagttttccggcaatgtaccggtactgaatgccggtgatggctccaacc

SEQ ID NO: 345376 - DNA, 75 bp, synthetic construct
  source 1..75: mol_type = other DNA
atggacaggaaaacacggggccgggcttcaaaagtggatttactgccggaaaacgtacgtaaaacgctgcatgaa

SEQ ID NO: 345377 - DNA, 75 bp, synthetic construct
  source 1..75: mol_type = other DNA
aaacataaagttttgaatgagcgttattttgtcgatgcgataaatgatgaacatcgaagaaatagtggtgttgaa

SEQ ID NO: 345378 - DNA, 75 bp, synthetic construct
  source 1..75: mol_type = other DNA
aaacgttggaaacgtcttctgaaacccttgaggcgggatctggctttactactggatcattacgaaggcacagca

SEQ ID NO: 345379 - DNA, 75 bp, synthetic construct
  source 1..75: mol_type = other DNA
ataagggggtttgtgcactggagcacgatgggtttgtttcttatgaagaggtaacggactggtcccatccatatc

SEQ ID NO: 345380 - DNA, 75 bp, synthetic construct
  source 1..75: mol_type = other DNA
atattttagtaacattatgtacattgaaaaaatttaaggagattgtattcagtatccccattagcaaatgttatg

SEQ ID NO: 345381 - DNA, 75 bp, synthetic construct
  source 1..75: mol_type = other DNA
gttgtattgaaacatatccaatagataaagccaaagagaaatgggattatattactaattgcatcgaagctagag

SEQ ID NO: 345382 - DNA, 75 bp, synthetic construct
  source 1..75: mol_type = other DNA
aaagaagagataaatctagaagtctttcgcaaaaaagtttaatagagtgtctaatgtgtttagagagattccact

SEQ ID NO: 345383 - DNA, 75 bp, synthetic construct
  source 1..75: mol_type = other DNA
ctatgacatcaagggatgccagcttgagatactacggcatgagctgttgagtattggcatttcggccaagtcgct

SEQ ID NO: 345384 - DNA, 75 bp, synthetic construct
  source 1..75: mol_type = other DNA
cgggctggtgtacccatattagctgtattgcgctgaaaggggcagggctgaaagtgtgcaaattccccgcccgcg

SEQ ID NO: 345385 - DNA, 75 bp, synthetic construct
  source 1..75: mol_type = other DNA
ttatcccagagttatatcagatgatttgttttacgctgtaggtaatgactccaacttattgatagtgttttatgt

SEQ ID NO: 345386 - DNA, 75 bp, synthetic construct
  source 1..75: mol_type = other DNA
agcgaacacacccgaggcctactaaaggatattgagtcaagcaatgtacttacagttgagcagcaggcagagaca

SEQ ID NO: 345387 - DNA, 75 bp, synthetic construct
  source 1..75: mol_type = other DNA
tgtgattggtaatcaggttggtgtcaaagcgaaaggaattgtcgagatgattgaaggcatcctgaaagcacaagg

SEQ ID NO: 345388 - DNA, 75 bp, synthetic construct
  source 1..75: mol_type = other DNA
ccacctggcaagggatccgtgccgcagaaacgctggaaaaagagggtatccagtgtaacctcacgctactgttct

SEQ ID NO: 345389 - DNA, 75 bp, synthetic construct
  source 1..75: mol_type = other DNA
ctaccacacgcttgggcaactccatcagctttggcaaaacggtgtagtggagattcgtttgtgccatgaggggga

SEQ ID NO: 345390 - DNA, 75 bp, synthetic construct
  source 1..75: mol_type = other DNA
taaccaacctccgcgacaccctgctccccaaactcatctccggcgagctatccgtggaggatctcccggctctca

SEQ ID NO: 345391 - DNA, 75 bp, synthetic construct
  source 1..75: mol_type = other DNA
gttcatttcaggtcagcttgttgtcgattttgaagcagcagctcatgctgagcgctggtgaaattcagagaaggg

SEQ ID NO: 345392 - DNA, 75 bp, synthetic construct
  source 1..75: mol_type = other DNA
tatcatcgactaatgacaaacgatgccgccacggtgcagcactttgcatgtgatatcgcgatgctgaagcggaac

SEQ ID NO: 345393 - DNA, 75 bp, synthetic construct
  source 1..75: mol_type = other DNA
cattagacatgaaaatggccgaggtccgctgaaaactcccaatagctggtatacaccagaacttatcgaagaagg

SEQ ID NO: 345394 - DNA, 75 bp, synthetic construct
  source 1..75: mol_type = other DNA
aaaaccttagaacaaatgtcccaaaccttgttcaaatcctggtttgtggattttgatccggtgattgataacgct

SEQ ID NO: 345395 - DNA, 75 bp, synthetic construct
  source 1..75: mol_type = other DNA
caaaaacaaatcagatattgttgacgccaggaaatgtgagaatcggaggtggatttaaatttgacaaactcaaat

SEQ ID NO: 345396 - DNA, 75 bp, synthetic construct
  source 1..75: mol_type = other DNA
gtggctgtgcaattaatacagttaagtcgtcactcatatttatatcgtggcttcacgattcaaaagtgcccgcgt

SEQ ID NO: 345397 - DNA, 75 bp, synthetic construct
  source 1..75: mol_type = other DNA
gcctgttagtgggtaatgctgaaattgtaccattcagcccacgcaggtatctctatcatgcctatctggcttata

SEQ ID NO: 345398 - DNA, 75 bp, synthetic construct
  source 1..75: mol_type = other DNA
gcttacgcccatgctcaacactggattgaaagtgaaggacgaaaacacggcgataacgtgcctcctgtttacctg

SEQ ID NO: 345399 - DNA, 75 bp, synthetic construct
  source 1..75: mol_type = other DNA
ctgaaccgttgccagcacttgaagccgccgttgaggcgttgagcgagaaagtggccgggcatttgcgggcgatgg

SEQ ID NO: 345400 - DNA, 75 bp, synthetic construct
  source 1..75: mol_type = other DNA
ccttttactgagttccctgaacaagagtggaatgatgtgatcgcagtaaaccagaccgccgtgttcctggtatcg

SEQ ID NO: 345401 - DNA, 75 bp, synthetic construct
  source 1..75: mol_type = other DNA
ggtggggttccggctaaacacataaaatttaggtttgaagataatattattgagcaattaattgaaattaaatgg

SEQ ID NO: 345402 - DNA, 75 bp, synthetic construct
  source 1..75: mol_type = other DNA
gctggcaactgccgctcgccgcgctggtgcctcccgttaaacacgcagggcaatgcgcagagcgctcaccgcgcg

SEQ ID NO: 345403 - DNA, 75 bp, synthetic construct
  source 1..75: mol_type = other DNA
agggagcgatttgcctgcaaaccagtgcgaaagaaatttcacctgacttcatcaatgtgaaaggggaagttaccg

SEQ ID NO: 345404 - DNA, 75 bp, synthetic construct
  source 1..75: mol_type = other DNA
cagggcggtgtctttatgctggcggggaaagccagcgatacgacacttgtgggcggtgccatgaataatcttggt

SEQ ID NO: 345405 - DNA, 75 bp, synthetic construct
  source 1..75: mol_type = other DNA
cactgatgcggcaacgcaggtgcatctgaaagtgaaacgcctgcgtggagagggagccatttgcctgcaaaccag

SEQ ID NO: 345406 - DNA, 75 bp, synthetic construct
  source 1..75: mol_type = other DNA
agaacgctctgctggagatcccaaccgggttaattgaagcttcccgcgcaatgggtgccacgccgatgcagatcg

SEQ ID NO: 345407 - DNA, 75 bp, synthetic construct
  source 1..75: mol_type = other DNA
cggtcagtaaaacagactttgctgataagcgtggtatgcgttatgtgcgggttaacgctcctgcaggtgcaacat

SEQ ID NO: 345408 - DNA, 75 bp, synthetic construct
  source 1..75: mol_type = other DNA
ttgatcaaggttatgcctgcggtttgttgctggaaaatggcggtaacctgcgtgtactggaaggccatcgcgcgg

SEQ ID NO: 345409 - DNA, 75 bp, synthetic construct
  source 1..75: mol_type = other DNA
taatgcgattagcgcaaccattatcggtcagctggatacgaactttaaaattggtcgtcgagcggcgttacgtga

SEQ ID NO: 345410 - DNA, 75 bp, synthetic construct
  source 1..75: mol_type = other DNA
gaacaggtattacgtaaccagcccgccttgtccgcgtttacgtcagaaattaatgcgattggcgcaaccatcact

SEQ ID NO: 345411 - DNA, 75 bp, synthetic construct
  source 1..75: mol_type = other DNA
acgccagtttgttagttctgcggcacaaaaaccggcatcggcatccgcagtaacgcgtataaatctgacaatgac

SEQ ID NO: 345412 - DNA, 75 bp, synthetic construct
  source 1..75: mol_type = other DNA
cagtacggtaaaaggtgacaacgtcactttaaatgttggcaacgtcaatctcgatggcggaaaagtgtggctgat

SEQ ID NO: 345413 - DNA, 75 bp, synthetic construct
  source 1..75: mol_type = other DNA
caacaatcaacggttacggtacagcagggtggcgtgttgattctcgatggcagtacggtaaaaggtgacaacgtc

SEQ ID NO: 345414 - DNA, 75 bp, synthetic construct
  source 1..75: mol_type = other DNA
cgttgtctgcgtttacctcggaaattaatgcgattagcgcaactattatcggtcagctggataccaattttaaaa

SEQ ID NO: 345415 - DNA, 75 bp, synthetic construct
  source 1..75: mol_type = other DNA
gcatgccattatgatatttatgaaggcgcgttttttgaacgtgtggcggcagtacagacgcaatggtttaaaaaa

SEQ ID NO: 345416 - DNA, 75 bp, synthetic construct
  source 1..75: mol_type = other DNA
tgagctgctgagcgtggcgcagagcctgcgcggatttgcatatctgtccgcctatggctgcaagacggtggaaga

SEQ ID NO: 345417 - DNA, 75 bp, synthetic construct
  source 1..75: mol_type = other DNA
aaagccgttgctactgagttgctgggcgtggcgcaaagcctgcgtgggtttgcttacctgtcagcgtatggctgc

SEQ ID NO: 345418 - DNA, 75 bp, synthetic construct
  source 1..75: mol_type = other DNA
gacggacacaatggcagaagcacacatgtgggcggtggataaaccgcttaacccgtcgctggcccgcgacattat

SEQ ID NO: 345419 - DNA, 75 bp, synthetic construct
  source 1..75: mol_type = other DNA
atctgcacaggcacagctcggcgttaaaccgcgcattctcggcgtgccaggtcacgataacaaagccgttgctac

SEQ ID NO: 345420 - DNA, 75 bp, synthetic construct
  source 1..75: mol_type = other DNA
gtttcctcttaataaacctgtactgatcactgatgtgcttaccgccagcggtaaagcgggtgagtccggcacgct

SEQ ID NO: 345421 - DNA, 75 bp, synthetic construct
  source 1..75: mol_type = other DNA
gacggacacaatggcagaagcgcacatgtgggcagtggataaaccgcttaacccgtcgctggcccgcgacattat

SEQ ID NO: 345422 - DNA, 75 bp, synthetic construct
  source 1..75: mol_type = other DNA
ggtgctgaatgccgaagcaacggcatatgccaccgcccgtgcgcttggtctgcgcgccaaaattgacgagcagac

SEQ ID NO: 345423 - DNA, 75 bp, synthetic construct
  source 1..75: mol_type = other DNA
gcaggacccggcaacagatgcaggtctgcttaaccagaacgacgtcaccacgcttatccgcaaagacggtttccg

SEQ ID NO: 345424 - DNA, 75 bp, synthetic construct
  source 1..75: mol_type = other DNA
atgatggcggggaaaatccccgctttttttctgccggtccccggacagagcacaaaggaagtcgccgccggctcc

SEQ ID NO: 345425 - DNA, 75 bp, synthetic construct
  source 1..75: mol_type = other DNA
acagcggaagggttgtataaaactgatatgctgacggcgatggcagaacagaaaatgctgagtgtagtaggaaaa

SEQ ID NO: 345426 - DNA, 75 bp, synthetic construct
  source 1..75: mol_type = other DNA
aacatgagagcgtgatcatcatgggcgggcagtacaataaaagccagtccatcaccttaagcccgcagggcagtg

SEQ ID NO: 345427 - DNA, 75 bp, synthetic construct
  source 1..75: mol_type = other DNA
attgtgacattgtttcctatacgcactttgccaccaagaatggtggcattacaaccaatggtcacattatgtcct

SEQ ID NO: 345428 - DNA, 75 bp, synthetic construct
  source 1..75: mol_type = other DNA
cttctggggttcccgctgtctgagtgatgacccactctttgccttcgaaaacaacacccgcacggcgcaggtgct

SEQ ID NO: 345429 - DNA, 75 bp, synthetic construct
  source 1..75: mol_type = other DNA
ggctggacgagtatgctaagggcaaatgggaaatcgggcgacccaaggcatccgactgtaacgctgctcccccct

SEQ ID NO: 345430 - DNA, 75 bp, synthetic construct
  source 1..75: mol_type = other DNA
atgggaaatcgggcgacccaaggcatccgactgtaacgctgctcccccctgtttaacggcaccccaccccctgtt

SEQ ID NO: 345431 - DNA, 75 bp, synthetic construct
  source 1..75: mol_type = other DNA
cacaccagttgaagtctacgaaaagcccgccagcctgtttgtggcgagttttatcggcagcccggcgatgaacct

SEQ ID NO: 345432 - DNA, 75 bp, synthetic construct
  source 1..75: mol_type = other DNA
cttatgcgtaagtctctgggttctcttcctgttgtgcccctaagtgttgaaaatccaattgagttaacgctgacc

SEQ ID NO: 345433 - DNA, 75 bp, synthetic construct
  source 1..75: mol_type = other DNA
atgtttaagcactggaaaaacattactatttataaactttctcgtgaggcggatctgaccgacttagaagataaa

SEQ ID NO: 345434 - DNA, 75 bp, synthetic construct
  source 1..75: mol_type = other DNA
caaggcggcaggctgcccccccccactctattgtaaacaagacatttttatcttttatattcaatggcttatttt

SEQ ID NO: 345435 - DNA, 75 bp, synthetic construct
  source 1..75: mol_type = other DNA
tttttactgataggtatttcttctattcacagtgacagggtcattctggctatgaaggactatctggtaggtggg

SEQ ID NO: 345436 - DNA, 75 bp, synthetic construct
  source 1..75: mol_type = other DNA
tacgcctccgcacgtgcgctcggtctgcgcgccaaaatcgacgaacagaccggatggcacaaaaccctgtccaac

SEQ ID NO: 345437 - DNA, 75 bp, synthetic construct
  source 1..75: mol_type = other DNA
atgacattatctttttttataacggtaattccagaccatgacaagccgcagccgccaggctgcctactcggtgtt

SEQ ID NO: 345438 - DNA, 75 bp, synthetic construct
  source 1..75: mol_type = other DNA
ttatcggcagcccggcgatgaacctgctgacaggccgcgtgaataacgaaggcacgcatttcgaactggacggcg

SEQ ID NO: 345439 - DNA, 75 bp, synthetic construct
  source 1..75: mol_type = other DNA
ccgctaaacggtggctaccgtcagtatgccgggcgtaaaatgaccctcggcattcgcccggaacatatagcgcta

SEQ ID NO: 345440 - DNA, 75 bp, synthetic construct
  source 1..75: mol_type = other DNA
cacgccagttgaagtgtacgaaaagcccgccagcctgtttgtagcgagttttatcggcagcccggcgatgaacct

SEQ ID NO: 345441 - DNA, 75 bp, synthetic construct
  source 1..75: mol_type = other DNA
acgctgccgcctgaactgaaaaacggcggcattaagatttcacgtcaggcgctaaaagagtgggtgcaacgccag

SEQ ID NO: 345442 - DNA, 75 bp, synthetic construct
  source 1..75: mol_type = other DNA
ctgtgggtaagcctgcgcaataactttgcctcctttctcggcctgcaggcgctaccgttcaaactggcgatgaat

SEQ ID NO: 345443 - DNA, 75 bp, synthetic construct
  source 1..75: mol_type = other DNA
aaaaatcctcccggatttcagcaaaatcagcccattaaaaggcattggtcggctgttttccagcgaacatctggc

SEQ ID NO: 345444 - DNA, 75 bp, synthetic construct
  source 1..75: mol_type = other DNA
acgttaccatcagaactgaaaaacggcggtattaaaatttcacgtcgggcgctaaaagagtgggtgcaacgccag

SEQ ID NO: 345445 - DNA, 75 bp, synthetic construct
  source 1..75: mol_type = other DNA
ggtggagtatgaccagcaaaccgttgatcttggcgaatgggtgaaagataagctggctcgttttcaacaaccggt

SEQ ID NO: 345446 - DNA, 75 bp, synthetic construct
  source 1..75: mol_type = other DNA
agccgctggagcaaatgctggcaggctgtactcacgcttcgctggtgccgacgcagctctggcgtttgctggtta

SEQ ID NO: 345447 - DNA, 75 bp, synthetic construct
  source 1..75: mol_type = other DNA
ttaaaagtattgccggacggtgcgttacttaccgccgtgatgggtacagctacgactgcgtgatgcctgtttatc

SEQ ID NO: 345448 - DNA, 75 bp, synthetic construct
  source 1..75: mol_type = other DNA
aacctaccgtcgtgaaggctacgaatatgattgcgtgatgcctgtttatcagttcgaccgtgatttttctctggt

SEQ ID NO: 345449 - DNA, 75 bp, synthetic construct
  source 1..75: mol_type = other DNA
ccacagcagatctgcttacacaacgtatccagttacatgagaaaactgcctggatgttgcgtagcctgcttgaat

SEQ ID NO: 345450 - DNA, 75 bp, synthetic construct
  source 1..75: mol_type = other DNA
aaacagagaaaccctcggcgcaaaagctgcgtaaagcgcgtgaagaggggcaactgccgcgctcgaaggatatgg

SEQ ID NO: 345451 - DNA, 75 bp, synthetic construct
  source 1..75: mol_type = other DNA
aactggcatgatgttgcgtttactctctgatagcggcaaacgtcagcacctgtggctggcagccgacagtatgga

SEQ ID NO: 345452 - DNA, 75 bp, synthetic construct
  source 1..75: mol_type = other DNA
ttacccagcagcgcccacgctggacgccgatgaatctgcatcaggcgcagaaccatgatgaaaaagtacgtatcg

SEQ ID NO: 345453 - DNA, 75 bp, synthetic construct
  source 1..75: mol_type = other DNA
gccgctgttcatacttatcaggctcatcttgccagcgccgaaggggtgttatcgctgattccgtttggcgatcac

SEQ ID NO: 345454 - DNA, 75 bp, synthetic construct
  source 1..75: mol_type = other DNA
gtcagtgttcacccccgtgaagttatcaagcgtgtactgaaacataacgccgccgcagtcatccttgttcacaac

SEQ ID NO: 345455 - DNA, 75 bp, synthetic construct
  source 1..75: mol_type = other DNA
ctacgtggagagcatatcgttggcaaccgggtgacgttctttaacaccaaaaacggaaaatcccgttcggttcct

SEQ ID NO: 345456 - DNA, 75 bp, synthetic construct
  source 1..75: mol_type = other DNA
ggtgagcatgagctccagttgtttcatcagcagcggaaaggcctggtccagatggtatgcatctgcgtcgctgaa

SEQ ID NO: 345457 - DNA, 75 bp, synthetic construct
  source 1..75: mol_type = other DNA
ggaaaccaaaaatgggaagcgtcgcgttatacctatatcgtcagaactggagtgcatgattaaaacaaaggccac

SEQ ID NO: 345458 - DNA, 75 bp, synthetic construct
  source 1..75: mol_type = other DNA
gcaaattttgtgtggacgtgcggccagctggatcagaaggaaagagattcaggcggcgatttgatactcgtggtg

SEQ ID NO: 345459 - DNA, 75 bp, synthetic construct
  source 1..75: mol_type = other DNA
gctgtattccaatgccacgttgacagatgctgaccctcaggcaattgaagatgccattaatgacctcgaagacat

SEQ ID NO: 345460 - DNA, 75 bp, synthetic construct
  source 1..75: mol_type = other DNA
ctcggcctgaaatcagacacggagatatttaccgcgacaccagacgtgggggacgagtggttattcgtcacgtta

SEQ ID NO: 345461 - DNA, 75 bp, synthetic construct
  source 1..75: mol_type = other DNA
ttatgctcggcagtctggtttacccttttattgccatcgcaggcagtaatgcacaaggtggcgtgatctattttc

SEQ ID NO: 345462 - DNA, 75 bp, synthetic construct
  source 1..75: mol_type = other DNA
tggcaagctgactattgtcgggcgcttagacaacctgttctttagcggcggcgaaggtattcagccagaagaggt

SEQ ID NO: 345463 - DNA, 75 bp, synthetic construct
  source 1..75: mol_type = other DNA
gaagaaacgctgatccatctggggttatcgattcgtgcctggcagcggttattgaaagttgcacgaaccattgct

SEQ ID NO: 345464 - DNA, 75 bp, synthetic construct
  source 1..75: mol_type = other DNA
gagtctctaccccgggtagctgcccggtttaatattcccagccacaacacggttaaaaactggataaaaggctac

SEQ ID NO: 345465 - DNA, 75 bp, synthetic construct
  source 1..75: mol_type = other DNA
gaatatgactgcgtaatgccgcgccgtcagtttgatcgtgattttattctggtggaaaacaaacaacaggcagtg

SEQ ID NO: 345466 - DNA, 75 bp, synthetic construct
  source 1..75: mol_type = other DNA
cccctttaaagaccattaacagcgtgattaaaaaaatccagacggtgcgtgccacgctggtaaataccctgctga

SEQ ID NO: 345467 - DNA, 75 bp, synthetic construct
  source 1..75: mol_type = other DNA
gtaaccaacccggctgcggctactgtcggttcaccagcagaaaccgacgcagagctgcgcattcggcaggggcaa

SEQ ID NO: 345468 - DNA, 75 bp, synthetic construct
  source 1..75: mol_type = other DNA
ttttcaccgacgacagcgcaggccgcagcgcttagcagcaatgtgaaaattaacgggatcacgcgaaaagtagcg

SEQ ID NO: 345469 - DNA, 75 bp, synthetic construct
  source 1..75: mol_type = other DNA
gcgattgaaaaacagggaattacgattattaaatcgttcgatgcgccaggcggtatgaaaggttatctggggaaa

SEQ ID NO: 345470 - DNA, 75 bp, synthetic construct
  source 1..75: mol_type = other DNA
acaaactctacggtcgatgagctgatcgagggtgaggccggaacgttaatcacaaacggctctgtgaaagatgcc

SEQ ID NO: 345471 - DNA, 75 bp, synthetic construct
  source 1..75: mol_type = other DNA
gactatattaacggcctgacaattggcgacgacgttctgctgagccgtatttattccccggcaaaccttggcgta

SEQ ID NO: 345472 - DNA, 75 bp, synthetic construct
  source 1..75: mol_type = other DNA
cacaaactatatgagaacgacactggggcaaccgacagcaacgggctgccgccacactctatttccgccatcgtc

SEQ ID NO: 345473 - DNA, 75 bp, synthetic construct
  source 1..75: mol_type = other DNA
tactgtggtcagccattgcggcgggtctgtcgatgggcgcttcgctactggcaaaagggatatttcatgtcgaac

SEQ ID NO: 345474 - DNA, 75 bp, synthetic construct
  source 1..75: mol_type = other DNA
ttgtagcgcgtggtggtaatcagattcgaatgataggtggagagtatggtgcattatggcgtaatgatggcgcta

SEQ ID NO: 345475 - DNA, 75 bp, synthetic construct
  source 1..75: mol_type = other DNA
tggttcgtggcgtatgggaaacgctgacaatgaccttcgtatccggattttttggctttgtgattggtctgccgg

SEQ ID NO: 345476 - DNA, 75 bp, synthetic construct
  source 1..75: mol_type = other DNA
ccctgctatttattacatgagcccagaaaacacattacagcaggctgtcggattaccagatcaaaaaacatttaa

SEQ ID NO: 345477 - DNA, 75 bp, synthetic construct
  source 1..75: mol_type = other DNA
aagggagaaaacctcagtaacgcccttattgaaaaagagatttacgcacctgccggacgcgaaatgtggcagcgc

SEQ ID NO: 345478 - DNA, 75 bp, synthetic construct
  source 1..75: mol_type = other DNA
cgtgctgctgggtaatattctcgggacaggtattgctgcgtgggcatttgaatatatgcctatcttcaatgaaga

SEQ ID NO: 345479 - DNA, 75 bp, synthetic construct
  source 1..75: mol_type = other DNA
caattcgctatctcaaaccgcaaatgccgaaaagctggcattttgtttcccatggtgaaatgtgggtgcccatgc

SEQ ID NO: 345480 - DNA, 75 bp, synthetic construct
  source 1..75: mol_type = other DNA
cattaatggcagcgtgaaagatggtaataatgtgatatggcgtttgcctgcgtcagtggtggtcggtgtggatgg

SEQ ID NO: 345481 - DNA, 75 bp, synthetic construct
  source 1..75: mol_type = other DNA
tggatttgtctgcgctggggtatacctccacagccctgactctcagggatgcccgcctggcgttgacagaagatc

SEQ ID NO: 345482 - DNA, 75 bp, synthetic construct
  source 1..75: mol_type = other DNA
gatgataaacagctttgaaagccgttacagcgccgatgaacagcgcattgttgaattcacaattaatgtgtctcc

SEQ ID NO: 345483 - DNA, 75 bp, synthetic construct
  source 1..75: mol_type = other DNA
cgagttttccggcaatgtaccggtactgaatgccggtgatggctccaaccaacatccgacgcaaaccttgctgga

SEQ ID NO: 345484 - DNA, 75 bp, synthetic construct
  source 1..75: mol_type = other DNA
ttattactcagcggatatggcgttttgattggaagcaaagagaatgccgcgggattaggtttgcaatgtacctaa

SEQ ID NO: 345485 - DNA, 75 bp, synthetic construct
  source 1..75: mol_type = other DNA
gccacactctgttgctgtaattgtggatggcggtgatgtgacggatattgctcaggctatcagagggaataaagg

SEQ ID NO: 345486 - DNA, 75 bp, synthetic construct
  source 1..75: mol_type = other DNA
ggctatcggcaacggtaaccgcccaggggattagtgcgcctgattaccagacaatcctcgatacactgaccagct

SEQ ID NO: 345487 - DNA, 75 bp, synthetic construct
  source 1..75: mol_type = other DNA
gtcagcggcggtagcgcgcgttattacgacatccaggaattactcatcggtaaatcagcaggatccgtagcatcg

SEQ ID NO: 345488 - DNA, 75 bp, synthetic construct
  source 1..75: mol_type = other DNA
tacggccatatcacactgaaagcctttacgggctacacgtcgcaaattggcgtacagattcagcaggccgttgcg

SEQ ID NO: 345489 - DNA, 75 bp, synthetic construct
  source 1..75: mol_type = other DNA
gtaaccaatcctgctgcagccactgtgggcactccggcagaaactgacgctgagttacgtatccgccagtcgcaa

SEQ ID NO: 345490 - DNA, 75 bp, synthetic construct
  source 1..75: mol_type = other DNA
cgctggcgattcatgatgccaataatatggcgataactgtctacaactgtttttcaccggcaaccggctatgggg

SEQ ID NO: 345491 - DNA, 75 bp, synthetic construct
  source 1..75: mol_type = other DNA
caaatctgccggaacggtagcggcggcgaatatcaatatcgcctacaacgaatcagcgtcctgtaaggcggaaaa

SEQ ID NO: 345492 - DNA, 75 bp, synthetic construct
  source 1..75: mol_type = other DNA
aggggccggttcaacaatgcggatgcataccatctggaccaggcttttccactgctgatgaaacaactggaactc

SEQ ID NO: 345493 - DNA, 75 bp, synthetic construct
  source 1..75: mol_type = other DNA
cgcttcccgacgacaacaaagaccgcccctggtggggactgccctgcaccgtgacgccctgtttcggggcacgtc

SEQ ID NO: 345494 - DNA, 75 bp, synthetic construct
  source 1..75: mol_type = other DNA
gtatgcgaaggggctgacctgtgaagctgacactctcggtagcggtggttacgtttatctggctgtttatccgac

SEQ ID NO: 345495 - DNA, 75 bp, synthetic construct
  source 1..75: mol_type = other DNA
caactggaactcatgctcaccagcggtgaactgaatccccgccatcagcataccgtcacgctgtatgcgaaaggt

SEQ ID NO: 345496 - DNA, 75 bp, synthetic construct
  source 1..75: mol_type = other DNA
cgcatcccgatgacaatcacgaccgtccctggtgggggctaccctgcaccgtgacgccctgtttcggggcacgtc

SEQ ID NO: 345497 - DNA, 75 bp, synthetic construct
  source 1..75: mol_type = other DNA
gtgtcagacacactctccgggacaacgcatcccgatgacaatcacgaccgtccctggtgggggctaccctgcacc

SEQ ID NO: 345498 - DNA, 75 bp, synthetic construct
  source 1..75: mol_type = other DNA
tgcgaagccgacaccctcggctcctgtggttacgtttatctggctgtttatccgacgcccgaaatgaaaaattaa

SEQ ID NO: 345499 - DNA, 75 bp, synthetic construct
  source 1..75: mol_type = other DNA
ctcatcccgatgacaacaacagccacccctggtgggggctgccctgcaccgtgacgccctgtttcggggcctgtc

SEQ ID NO: 345500 - DNA, 75 bp, synthetic construct
  source 1..75: mol_type = other DNA
actcatgctcaccagcggtgaactgaatccccgccatcagcataccgtgacgctgtatgcgaacggactgacctg

SEQ ID NO: 345501 - DNA, 75 bp, synthetic construct
  source 1..75: mol_type = other DNA
agggcttacctgtgaatcagatacgctgggatcgcatgggtacgtgtacctggcgatttatccgacacctgcaac

SEQ ID NO: 345502 - DNA, 75 bp, synthetic construct
  source 1..75: mol_type = other DNA
cgcatcccgatgacaatgacgaccatccctggtggggactaccctgcacagtgacgccctgttttggcgctcgtc

SEQ ID NO: 345503 - DNA, 75 bp, synthetic construct
  source 1..75: mol_type = other DNA
gttggctggcaaaacaacatgttgtcacctggtgtgtgcagcaggaaggggaactctggtgcgctaatgcctttt

SEQ ID NO: 345504 - DNA, 75 bp, synthetic construct
  source 1..75: mol_type = other DNA
cggaaatatcgcatccggtacaaaattcattaccgtaatgaagagtaaagaaatcggcggaaaacccaaaagaaa

SEQ ID NO: 345505 - DNA, 75 bp, synthetic construct
  source 1..75: mol_type = other DNA
ggctggtaatacggtcatgcgctggattaaaactgcccgtgaccgtgatgaaatggaaaggctaatggaagctgc

SEQ ID NO: 345506 - DNA, 75 bp, synthetic construct
  source 1..75: mol_type = other DNA
gcggtcgcggcgtctggcggcggtggttatttacagcccggatcatggggagatcgggcgctttgtttattaccc

SEQ ID NO: 345507 - DNA, 75 bp, synthetic construct
  source 1..75: mol_type = other DNA
aaatggaaaggctaatgcaatcggcttgcgacgctttcacggaagagataccacgcgcggaggccgtgccagtgc

SEQ ID NO: 345508 - DNA, 75 bp, synthetic construct
  source 1..75: mol_type = other DNA
gaaacttgaacgagagggaaaattcccaccgcgtaaaaccattgggaagaaatcttgcgggtggttgttaagtga

SEQ ID NO: 345509 - DNA, 75 bp, synthetic construct
  source 1..75: mol_type = other DNA
gtttacgtggcgatccggtcggtccggcgtgcggtcgggaagatgttactaaatcataaggatgtcgagatccag

SEQ ID NO: 345510 - DNA, 75 bp, synthetic construct
  source 1..75: mol_type = other DNA
cacactgacagactgttaccagtgacgccatcaagtaatcacgttttggattgtgattcacgctacgcaaaactt

SEQ ID NO: 345511 - DNA, 75 bp, synthetic construct
  source 1..75: mol_type = other DNA
tcgtgctggtggaagaggaaaacagctttattactggtcgagttggccagcgtgtaaggttgcgcgatcccttca

SEQ ID NO: 345512 - DNA, 75 bp, synthetic construct
  source 1..75: mol_type = other DNA
tgctgattattatgaagagcgttaccgtagtcacgtactcaatggacttaaacaaagagcaacatcactgggtta

SEQ ID NO: 345513 - DNA, 75 bp, synthetic construct
  source 1..75: mol_type = other DNA
aaattcaccttggtcagggttatgaagatatgctgaaagaaatatacactgcgcgaaaaaggttattaaaaaaag

SEQ ID NO: 345514 - DNA, 75 bp, synthetic construct
  source 1..75: mol_type = other DNA
gatttcttcgactacgcggtaggcgctgcgccaatgtctgaaaaggctgttttacttctcggcggtgatgtgctt

SEQ ID NO: 345515 - DNA, 75 bp, synthetic construct
  source 1..75: mol_type = other DNA
atttaaacgggtttttgttccaattcgtgaagcgttacaggcgctgcgcggtgaattaagaaacacaatgcgtat

SEQ ID NO: 345516 - DNA, 75 bp, synthetic construct
  source 1..75: mol_type = other DNA
cgtgtaaggttgcgtgatcccttcatgaacggcagaccggtactgattgaagcaatgcagatttacaaggaactg

SEQ ID NO: 345517 - DNA, 75 bp, synthetic construct
  source 1..75: mol_type = other DNA
actcatgctcaccagcggtgaactgaatccccgccatcagcataccgtgaccctgtatgcgaagggactgacctg

SEQ ID NO: 345518 - DNA, 75 bp, synthetic construct
  source 1..75: mol_type = other DNA
atcacgaccgcccctggtgggggctgccctgcaccgtgacgccctgtttcggggcccgtctggtgcaggagggta

SEQ ID NO: 345519 - DNA, 75 bp, synthetic construct
  source 1..75: mol_type = other DNA
gtgacgccctgttttggtgcccgtctggtacaggaaggcaaccggttgcattaccttgccgaccgcgccggtatc

SEQ ID NO: 345520 - DNA, 75 bp, synthetic construct
  source 1..75: mol_type = other DNA
gctgctgatgaaacaactggaattaatgctcaccagcggtgaactgaatccccgtcatcagcataccgtcacgct

SEQ ID NO: 345521 - DNA, 75 bp, synthetic construct
  source 1..75: mol_type = other DNA
tcagcagtattttgctgtgcgaaaacatctatccggtacgccaggaactctattttggcatggtggtggatcgtg

SEQ ID NO: 345522 - DNA, 75 bp, synthetic construct
  source 1..75: mol_type = other DNA
atgacctcacgtccccctggtggggactccgccgcgatatgtccccgtgttttggtgcacggctggttcaggagg

SEQ ID NO: 345523 - DNA, 75 bp, synthetic construct
  source 1..75: mol_type = other DNA
ttaccttgccgaccgcgccggtatcagagggcggttcagcgacgcagatgcataccatccggaccaggcctttcc

SEQ ID NO: 345524 - DNA, 75 bp, synthetic construct
  source 1..75: mol_type = other DNA
gtttgacgaagtcgcggggatcactttcaaagataaagacggcgtgcaaatcatgaaagattacatggcgtcagg

SEQ ID NO: 345525 - DNA, 75 bp, synthetic construct
  source 1..75: mol_type = other DNA
aaagatggcgtgcagatcatgaaggattacatggcatcaggctcattctctcgtggtcgggactccattgaaggc

SEQ ID NO: 345526 - DNA, 75 bp, synthetic construct
  source 1..75: mol_type = other DNA
gccgataccctaggctcctgtggttacgtttatctggctgtttatcctgcgaccgaaacggaaaatgtagtggtc

SEQ ID NO: 345527 - DNA, 75 bp, synthetic construct
  source 1..75: mol_type = other DNA
gtgtcagacacgcaccatgagacaaattatcccgacgactataacaaccgcccctggtgggggctaccctgcacc

SEQ ID NO: 345528 - DNA, 75 bp, synthetic construct
  source 1..75: mol_type = other DNA
tcgtcggcaacatcaatcaaagcgtagagacactcgttaaaaccagccatttgctggcgccgtttccggctgcga

SEQ ID NO: 345529 - DNA, 75 bp, synthetic construct
  source 1..75: mol_type = other DNA
aaacacagatgactgccggtaatggtaagcatagtgtatcgggtctgggttcaaatacctccgcgaaagaagcta

SEQ ID NO: 345530 - DNA, 75 bp, synthetic construct
  source 1..75: mol_type = other DNA
cgatatcagcataccgtcacgctgaatgcaaaagggctgacctgcgaagccgacaccctcggctcctgtggttac

SEQ ID NO: 345531 - DNA, 75 bp, synthetic construct
  source 1..75: mol_type = other DNA
ctgcgaagccgataccctcggcagttgtggttacgtttatctggctgtttatccaacatccgaaacgaaaaagta

SEQ ID NO: 345532 - DNA, 75 bp, synthetic construct
  source 1..75: mol_type = other DNA
tggtgcaggagggtaaccggttgcattaccttgcagaccgcgccagtatcagaggccggttcagggacgcagatg

SEQ ID NO: 345533 - DNA, 75 bp, synthetic construct
  source 1..75: mol_type = other DNA
agcataccgtcacgctgtatgccagagggctgacctgcgaagccgacaccctcggcagctgtggttacgtttata

SEQ ID NO: 345534 - DNA, 75 bp, synthetic construct
  source 1..75: mol_type = other DNA
actcatgctcaccagcggtgaactgaatccccgccatcagcataccgtcacgctgtatgcgaagggactgacctg

SEQ ID NO: 345535 - DNA, 75 bp, synthetic construct
  source 1..75: mol_type = other DNA
actcatgctcaccagcggtgaactgaatccccgccatcagcataccgttactctgtatgcgaaaggactgacctg

SEQ ID NO: 345536 - DNA, 75 bp, synthetic construct
  source 1..75: mol_type = other DNA
actcatgctcaccagcggtgaactgaatccccgccatcagcataccgttacactgtatgcgaatggactgacctg

SEQ ID NO: 345537 - DNA, 75 bp, synthetic construct
  source 1..75: mol_type = other DNA
gaccgcgccggtatcagaggacagttcagcgacgcggatgcctaccatctggagcaggcctttccgctgctgatg

SEQ ID NO: 345538 - DNA, 75 bp, synthetic construct
  source 1..75: mol_type = other DNA
gacctgcgatgccgacaccctcggctcctgtggttacgtttatctggctgtttatccgacccccgaaacgaaaaa

SEQ ID NO: 345539 - DNA, 75 bp, synthetic construct
  source 1..75: mol_type = other DNA
gtgtcagacacactttccgggacaacgcatcccgatgacaatgacgaccatccctggtggggaccaccctgcaca

SEQ ID NO: 345540 - DNA, 75 bp, synthetic construct
  source 1..75: mol_type = other DNA
gtgtcagacacactccatgagacaaattatcccaacgacaatcacaaccgcccctggtggggactgccctgcacc

SEQ ID NO: 345541 - DNA, 75 bp, synthetic construct
  source 1..75: mol_type = other DNA
atcacgaccgcccctggtgggggctgccctgcacagtgacgccctgtttcggggcacgtctggtgcaggagggta

SEQ ID NO: 345542 - DNA, 75 bp, synthetic construct
  source 1..75: mol_type = other DNA
cccgccatcagcataccgtcacgctatatgctaaagggctgacctgcgatgccgacaccctcggctcctgtggtt

SEQ ID NO: 345543 - DNA, 75 bp, synthetic construct
  source 1..75: mol_type = other DNA
ggagaccagaagagttgaagccggtctggagatgtttgcgccccatgacctgcgacgcacctttgcctcctcgat

SEQ ID NO: 345544 - DNA, 75 bp, synthetic construct
  source 1..75: mol_type = other DNA
gaccagtaagaacccagcttacacgccaaaagaccctgcaggagcagttcatcgtcgcgcggttttctacccata

SEQ ID NO: 345545 - DNA, 75 bp, synthetic construct
  source 1..75: mol_type = other DNA
caaactttgatgcgaactttaaagtcgctcaagcgtcgcgccgcgctgaatttaaagaacagtttagtgtggata

SEQ ID NO: 345546 - DNA, 75 bp, synthetic construct
  source 1..75: mol_type = other DNA
ggagtcagctccgcacggcatctgccgctggcgctggccgctgccggaacagcttccccgggtgtcggtgatcat

SEQ ID NO: 345547 - DNA, 75 bp, synthetic construct
  source 1..75: mol_type = other DNA
ccgattgaagaagagcgattgcataatttgttgttgcgctacaagcctggcagcggtatttcctctcgcgtcgtg

SEQ ID NO: 345548 - DNA, 75 bp, synthetic construct
  source 1..75: mol_type = other DNA
ggacgatgaagcaaattgatacggatagcttccagcacgtacgtggatctcgacttcctaaagggcgggcacttg

SEQ ID NO: 345549 - DNA, 75 bp, synthetic construct
  source 1..75: mol_type = other DNA
tacgacagccagcaccgcctggtgttccacacgcggatacagcatggcgagccactggtcgagagccgctacctc

SEQ ID NO: 345550 - DNA, 75 bp, synthetic construct
  source 1..75: mol_type = other DNA
aagtgcgacagcgttcgacaagtggggagtaactcccgttgagcgtaaaggccgtgaggcgttttatgatgttgc

SEQ ID NO: 345551 - DNA, 75 bp, synthetic construct
  source 1..75: mol_type = other DNA
gcaacgtttgtcattgttgccattccatccaccctggccgaaatgttccgcgttctggaaaagtaccactggcgc

SEQ ID NO: 345552 - DNA, 75 bp, synthetic construct
  source 1..75: mol_type = other DNA
catatgatagtatgctgactgaattgaataatatgcaaactgcgtataacacggctgttaaacgcagtgaccata

SEQ ID NO: 345553 - DNA, 75 bp, synthetic construct
  source 1..75: mol_type = other DNA
ggagtaactcccgttgagcgtaaaggccgtgaggcgttttatgatgttgctagcgtgatagacaatagggttaac

SEQ ID NO: 345554 - DNA, 75 bp, synthetic construct
  source 1..75: mol_type = other DNA
cttgacgaaaacataccgctgatgctgtccgattatctgatggaaactgccggaaatgtaccggataagttgcag

SEQ ID NO: 345555 - DNA, 75 bp, synthetic construct
  source 1..75: mol_type = other DNA
atttcgaccatatcaaccgggaatacggggtgcgggttatcgcctgggaccatccatttaactactccgccatca

SEQ ID NO: 345556 - DNA, 75 bp, synthetic construct
  source 1..75: mol_type = other DNA
atatgaggcatggcgcgattattattttccattttcctttacctttttctgtattaattgaaggtaagattattc

SEQ ID NO: 345557 - DNA, 75 bp, synthetic construct
  source 1..75: mol_type = other DNA
tgtcggaacttaggctatctcctacgttattagatatgctttcccctgtatctgacagtgccggagctgacgtca

SEQ ID NO: 345558 - DNA, 75 bp, synthetic construct
  source 1..75: mol_type = other DNA
atccttcatgttagtcgtaataatgtggatgagggttctccagttgtaggtgttgaaacaggatattccacgcca

SEQ ID NO: 345559 - DNA, 75 bp, synthetic construct
  source 1..75: mol_type = other DNA
aaaattaatgatgtgctgcatcattatgatgacatggaaagaaaaggattgtttgctgaattaccttcaggatat

SEQ ID NO: 345560 - DNA, 75 bp, synthetic construct
  source 1..75: mol_type = other DNA
cacaggcagtaagaaatatactttactgcaatgtgttgagaagcttggtgtattagttcactacgtgaaatcacc

SEQ ID NO: 345561 - DNA, 75 bp, synthetic construct
  source 1..75: mol_type = other DNA
gcgaacttattattaactgccgcttatatctttcagagggaaggtattgtacctgtggagattaaggagagaatt

SEQ ID NO: 345562 - DNA, 75 bp, synthetic construct
  source 1..75: mol_type = other DNA
gtcgatgtgtatatcccgggctgtccgccgcgccctgaagcgtatatgcaggcactgatgctgttgcaggaatca

SEQ ID NO: 345563 - DNA, 75 bp, synthetic construct
  source 1..75: mol_type = other DNA
atgttgccggtcactcgtcgaggcacgttgctggagctggtttatctacccacgggagctagtcatttgtctttg

SEQ ID NO: 345564 - DNA, 75 bp, synthetic construct
  source 1..75: mol_type = other DNA
aacgacaccgaggtgatcaacccgctttggctggatgagatggtctctcacctgctgcgtccgggggtcgggatc

SEQ ID NO: 345565 - DNA, 75 bp, synthetic construct
  source 1..75: mol_type = other DNA
tgaatatgagtcgcagaagaaggttgctatgcagggtgatattgagcagcttacgaagatttctagcaaatatgc

SEQ ID NO: 345566 - DNA, 75 bp, synthetic construct
  source 1..75: mol_type = other DNA
ttcaggatgaattgtcacagaaaccatttgtctattaccaatatgaagacaatgatggttttggtacttttccag

SEQ ID NO: 345567 - DNA, 75 bp, synthetic construct
  source 1..75: mol_type = other DNA
accatctttgtggctcctgaacctcaagagatgcctgatgtttgcaagggttcagcattacttgagcttgaaaag

SEQ ID NO: 345568 - DNA, 75 bp, synthetic construct
  source 1..75: mol_type = other DNA
gccacctgaccgcagcggactttgaacactttatttctaccctgttcggctaccagcagcgactgcatgagaact

SEQ ID NO: 345569 - DNA, 75 bp, synthetic construct
  source 1..75: mol_type = other DNA
ggccagctttatggctatccggcgcacgacaaccaacagcggcaacgcgctgacgtttgttgccgaacgttcaga

SEQ ID NO: 345570 - DNA, 75 bp, synthetic construct
  source 1..75: mol_type = other DNA
ggtgcgcttgtcgatattgaacggctgcgcaacaaatacagcccgaccgcgttcgccatgctctacatgtgccag

SEQ ID NO: 345571 - DNA, 75 bp, synthetic construct
  source 1..75: mol_type = other DNA
tgcgggcggtttcaacctggcgaacatcgagaaacttcgcaaccgctacaacgacgccacttttaacatgctcta

SEQ ID NO: 345572 - DNA, 75 bp, synthetic construct
  source 1..75: mol_type = other DNA
gcgctggtgctgttaactgcgccgggtaaacagggcgcggatattgtttttggttcggcgcaacgcttcggcgtg

SEQ ID NO: 345573 - DNA, 75 bp, synthetic construct
  source 1..75: mol_type = other DNA
cgatggcgaaacgcgtcagcaaactgaaaaatgccaaccgcttcttcgtggcttccgatgtgcatccgcaaacgc

SEQ ID NO: 345574 - DNA, 75 bp, synthetic construct
  source 1..75: mol_type = other DNA
agtcgcaataaacgcttcacgtcttacatcggcatgggttacaccgccgtgcagctaccgccggttatcctgcgt

SEQ ID NO: 345575 - DNA, 75 bp, synthetic construct
  source 1..75: mol_type = other DNA
ggcgataacgccacgtttgtggtgctggcaccgccgctggttgcggcagaacgattccgcgtgctggaaaaacac

SEQ ID NO: 345576 - DNA, 75 bp, synthetic construct
  source 1..75: mol_type = other DNA
tctcgatgaagatacaaacaaccgacttattaaggccaaagatcgtagtggaagaagtaaaacgatagaagtcca

SEQ ID NO: 345577 - DNA, 75 bp, synthetic construct
  source 1..75: mol_type = other DNA
tctggtcattttgaaagcttatgggattgaatacgacagactggtacgtgaaaaggaacgatatgagatcacgtc

SEQ ID NO: 345578 - DNA, 75 bp, synthetic construct
  source 1..75: mol_type = other DNA
ttgataataaaaataaactggtgcttaagatgattgacctcattgagcggcgacgtatccagtgggtgaaagatg

SEQ ID NO: 345579 - DNA, 75 bp, synthetic construct
  source 1..75: mol_type = other DNA
tcgtgaggtgtgggcgggctttgacccgtcaaggtccggggataattccacgtttgtaattgtggctccgcctgt

SEQ ID NO: 345580 - DNA, 75 bp, synthetic construct
  source 1..75: mol_type = other DNA
cacgatgagctcgatcgcctgattggtcatcacgtcaaactgatgtcggtcagaaacaagcacacggaacgaatg

SEQ ID NO: 345581 - DNA, 75 bp, synthetic construct
  source 1..75: mol_type = other DNA
cggccctggtatgggaccgatcggcgtgaaagcgcatctggcaccgtttgtgccaggtcatagcgtggtacaaat

SEQ ID NO: 345582 - DNA, 75 bp, synthetic construct
  source 1..75: mol_type = other DNA
gaagggctgaaaaaagcaagccaggtggcaattcttaacgccaactatattgccagccgcctgcaggatgccttc

SEQ ID NO: 345583 - DNA, 75 bp, synthetic construct
  source 1..75: mol_type = other DNA
actggatcgctttatcgacgcgatgctggctatccgcgcagaaattgaccaggtgaaagctggtgtctggccgct

SEQ ID NO: 345584 - DNA, 75 bp, synthetic construct
  source 1..75: mol_type = other DNA
ctcgccgggctttattggcgcggacgtttcgcaccttaacctgcataaaactttctgcattccacacggcggtgg

SEQ ID NO: 345585 - DNA, 75 bp, synthetic construct
  source 1..75: mol_type = other DNA
ggtgcaacctggtattttgccggtgaagcactggaagatgccgtattaaacggcaaaccgcaggtgtttttgtca

SEQ ID NO: 345586 - DNA, 75 bp, synthetic construct
  source 1..75: mol_type = other DNA
agggccatttttgtgattgttgcaccacctattcacgccgttgaaaaattccgcttgctgaagaaatgggcctgg

SEQ ID NO: 345587 - DNA, 75 bp, synthetic construct
  source 1..75: mol_type = other DNA
actggatcgctttatcgacgcgatgctggctatccgcgcggagatcgaccaggtgaaagccggtgtctggccgct

SEQ ID NO: 345588 - DNA, 75 bp, synthetic construct
  source 1..75: mol_type = other DNA
actggatcgctttatcgacgcgatgctggctatccgcgcagaaatcgaccaggttaaagccggagtctggccgct

SEQ ID NO: 345589 - DNA, 75 bp, synthetic construct
  source 1..75: mol_type = other DNA
actggatcgctttatcgacgcgatgctggctatccgcgcagaaattgatcaggtgaaagccggtgtctggccgct

SEQ ID NO: 345590 - DNA, 75 bp, synthetic construct
  source 1..75: mol_type = other DNA
ccaaacgtctgatcgactacggtttccacgcgccgacaatgtcattcccggttgcggggacgctgatggtggaac

SEQ ID NO: 345591 - DNA, 75 bp, synthetic construct
  source 1..75: mol_type = other DNA
tgaagttgcggtattcccggcaggtgtggcagacaaatactggccgacagtgaaacgtctggatgatgtttacgg

SEQ ID NO: 345592 - DNA, 75 bp, synthetic construct
  source 1..75: mol_type = other DNA
tgaagtttctcaggggcgcctggaagcactgctcaacttccagcaggtaacgctggatttaaccgggctggatat

SEQ ID NO: 345593 - DNA, 75 bp, synthetic construct
  source 1..75: mol_type = other DNA
ccaagcgcctgatcgactacggtttccacgcgccgacgatgtcgttcccggtggcaggtacgctgatggttgaac

SEQ ID NO: 345594 - DNA, 75 bp, synthetic construct
  source 1..75: mol_type = other DNA
taccgctgcgccgcactggtggaaaatatccagattggcgatttcagcgccgccgcagcagaaaccggagcgtaa

SEQ ID NO: 345595 - DNA, 75 bp, synthetic construct
  source 1..75: mol_type = other DNA
cgtctacctggcagggcatccgtgctgcagaacaactggagaaagaaggtatcaactgtaacctgactctgctgt

SEQ ID NO: 345596 - DNA, 75 bp, synthetic construct
  source 1..75: mol_type = other DNA
tggcggtgaaactggcggtaggtggcgtgacattgctggcagtcggcggtgtagtttattcgctcggggtcattt

SEQ ID NO: 345597 - DNA, 75 bp, synthetic construct
  source 1..75: mol_type = other DNA
agccgtctgtgcagcagacgctggaagaccagatccagcagtccgccgctttcctgacgctgattaacgtcacgc

SEQ ID NO: 345598 - DNA, 75 bp, synthetic construct
  source 1..75: mol_type = other DNA
gatgcgcaccgccgcgccatcattgaagagccgaaaaaagaccgtatcgaaaactacgagtcaatgaatattgac

SEQ ID NO: 345599 - DNA, 75 bp, synthetic construct
  source 1..75: mol_type = other DNA
tttcactgcgctcgaatccaacaaatacgagtgcgcgcaaatcaactttgatttccatatccgttacaaacagct

SEQ ID NO: 345600 - DNA, 75 bp, synthetic construct
  source 1..75: mol_type = other DNA
ttaacgcttacctgcagcaactggcgcgtctgaacggtgtggccgttgaagaactgtccagcaagttcactgtag

SEQ ID NO: 345601 - DNA, 75 bp, synthetic construct
  source 1..75: mol_type = other DNA
tcagagatgagataacatctgaccaagatatggtcctatatggtataccagcttctgatgaggagatcattcagg

SEQ ID NO: 345602 - DNA, 75 bp, synthetic construct
  source 1..75: mol_type = other DNA
ttattcgctggcagaatgctcgactgacggtggcagcggcaatcttcgcgcatcgtacaccaatactgcgggcgc

SEQ ID NO: 345603 - DNA, 75 bp, synthetic construct
  source 1..75: mol_type = other DNA
tacgctgatggtcgatgcggaatacaaatgcgagcagaccaactttgacacggtactgacctacgcgaagctgga

SEQ ID NO: 345604 - DNA, 75 bp, synthetic construct
  source 1..75: mol_type = other DNA
cagtgactgagcagtccggtcagctgctggggctgggggttggcagcaccattgccggaaccactgacaccaccg

SEQ ID NO: 345605 - DNA, 75 bp, synthetic construct
  source 1..75: mol_type = other DNA
gttgaggactaccgctgcgctgcactggtggaaaacatccagattggcgatttcagcgccgctgcagcagaaacc

SEQ ID NO: 345606 - DNA, 75 bp, synthetic construct
  source 1..75: mol_type = other DNA
gaccaccaacctgattgatgagatttatcaggatgacccggagctcgtcgttatcactggccgtaagctgatggc

SEQ ID NO: 345607 - DNA, 75 bp, synthetic construct
  source 1..75: mol_type = other DNA
tatcaggaagattcggagctcgtcgcgattgtgggccgtaagctgctggccgacaaatatttcccgatcgtcaac

SEQ ID NO: 345608 - DNA, 75 bp, synthetic construct
  source 1..75: mol_type = other DNA
gtccgtgtgccgtacttcccggcgaacgcgattatggtgacgcgtctcgataacctgtccatctatttcatggat

SEQ ID NO: 345609 - DNA, 75 bp, synthetic construct
  source 1..75: mol_type = other DNA
catgatcggttttaacggcgtgaagcgtgcgaaaacctccaaccgtagcgaaaacccactgctgcaggatgtaaa

SEQ ID NO: 345610 - DNA, 75 bp, synthetic construct
  source 1..75: mol_type = other DNA
cgaaaaaattcaccgttgaaccgtcggtcacccagaccctgatgaacaccatgcaggagtcctctgactttctga

SEQ ID NO: 345611 - DNA, 75 bp, synthetic construct
  source 1..75: mol_type = other DNA
tacgtggtggaagactacgccgccggttgtctggtggaaaaaatcaaggtcggtgacttctccacaccggctaaa

SEQ ID NO: 345612 - DNA, 75 bp, synthetic construct
  source 1..75: mol_type = other DNA
tcaatgcctatctgacccgcgtcgctgagctgaacggcatcaacactgatgacgtcagtaaaaagttcaccgtcg

SEQ ID NO: 345613 - DNA, 75 bp, synthetic construct
  source 1..75: mol_type = other DNA
cacaccgggtgcggtgaaagtcgggaaagggggcgaatatgccaacctggacgctgtggtgatggatgccgtcaa

SEQ ID NO: 345614 - DNA, 75 bp, synthetic construct
  source 1..75: mol_type = other DNA
gcagcaccaccacgggtggtgaaaccacaccgggcgcggtgaaagtcggcaaaggtggcgaatatgccaacctgg

SEQ ID NO: 345615 - DNA, 75 bp, synthetic construct
  source 1..75: mol_type = other DNA
gaagcgcatcggcaacctgcctgccgtgcgtgtgccgtatttcccggcgaatgcggtattcgtgaccacgctgga

SEQ ID NO: 345616 - DNA, 75 bp, synthetic construct
  source 1..75: mol_type = other DNA
attgccggaaccactgatactaccgcaaaagagcgtgagcctgtcgatccgacgctaatggtcgatgtggaatat

SEQ ID NO: 345617 - DNA, 75 bp, synthetic construct
  source 1..75: mol_type = other DNA
atgccgtggtgatggatgccgttaacgagcttatcgacgtggtctatcaggacgatgacgatctggtggtgattt

SEQ ID NO: 345618 - DNA, 75 bp, synthetic construct
  source 1..75: mol_type = other DNA
ctttgaatccgtcaacgaggcgtatgtggtcgaggactaccgctgcgcggcattggtggaaaacatcgaaatcgg

SEQ ID NO: 345619 - DNA, 75 bp, synthetic construct
  source 1..75: mol_type = other DNA
atgagttcaacgcagaaacccgccgacgtcacggcagaacgatgcatccactggtggtggatggtgccgggatgc

SEQ ID NO: 345620 - DNA, 75 bp, synthetic construct
  source 1..75: mol_type = other DNA
atcttccctaccgatccagagcttcgtaaacgggttttggcgcggtgttatggtgaactggtgcaaacgtctata

SEQ ID NO: 345621 - DNA, 75 bp, synthetic construct
  source 1..75: mol_type = other DNA
gaatatgacaatgaccggatatagggccgctgtacgcgctaaaacgccgccagacgaaagaaacgagagaagcaa

SEQ ID NO: 345622 - DNA, 75 bp, synthetic construct
  source 1..75: mol_type = other DNA
gaatatgacaatgaccggatatagggccgctgtacgcgctaaaacgccgccagaagcaagaaacaaacaaaaacg

SEQ ID NO: 345623 - DNA, 75 bp, synthetic construct
  source 1..75: mol_type = other DNA
gcgcgtgggggcgttttgccgccgataaagatagtctctattttgatggtgaatgcacggatgataatcgcgacg

SEQ ID NO: 345624 - DNA, 75 bp, synthetic construct
  source 1..75: mol_type = other DNA
ttgcggttgtggttgatggcagacgttacgaattcaatccctgctttgctgcaatggctaagatcggcagtgaca

SEQ ID NO: 345625 - DNA, 75 bp, synthetic construct
  source 1..75: mol_type = other DNA
tcgttctggctttattttcaatcaattcaatagcctgctctggcgtaccctctgcctctttttattaccaaccgt

SEQ ID NO: 345626 - DNA, 75 bp, synthetic construct
  source 1..75: mol_type = other DNA
aaagaggcagtagagaatatcggacaactataccccgaacacagagtagacttagaaggtgacgggtatctaatt

SEQ ID NO: 345627 - DNA, 75 bp, synthetic construct
  source 1..75: mol_type = other DNA
taagcaggtcagcgacgatgctcgcctgaatgatgtgcatgaagcggtgaccaccgtcagcgaacatgtgcaaac

SEQ ID NO: 345628 - DNA, 75 bp, synthetic construct
  source 1..75: mol_type = other DNA
atgaaacttggtagttatgtgaatgtttttactgaaaaaagcatttattctgatactgctaaccagtattacttt

SEQ ID NO: 345629 - DNA, 75 bp, synthetic construct
  source 1..75: mol_type = other DNA
gaatatgacaatgaccggatacagggccgcagtgcgcgctaaaacgccgccagacgaaagaaatgaaagaagtag

SEQ ID NO: 345630 - DNA, 75 bp, synthetic construct
  source 1..75: mol_type = other DNA
caagccgacatttgacgtacttgagtttgtttattctgccgttgctcacctgggattgtcagaatcagaagcatg

SEQ ID NO: 345631 - DNA, 75 bp, synthetic construct
  source 1..75: mol_type = other DNA
gccaaacgttcacataaataaacgtgcttatgacgagcaaatggaggccgctaaaaaggcactagaaagaatgaa

SEQ ID NO: 345632 - DNA, 75 bp, synthetic construct
  source 1..75: mol_type = other DNA
taaagacggggagaaacgttatgcgttcggtaaaaattgtcggagtacgtttgacctgcagcgggataaattaac

SEQ ID NO: 345633 - DNA, 75 bp, synthetic construct
  source 1..75: mol_type = other DNA
acctgtacggtggaaaatgcgctgtggatggtgccgccacaatatgcagtatggattcccggtggtgtggagcat

SEQ ID NO: 345634 - DNA, 75 bp, synthetic construct
  source 1..75: mol_type = other DNA
acaccgtgaaaggcatcttcagccgtaaacagactgacgacgatgcgcgtttcggtgatgtacatgaggccgtga

SEQ ID NO: 345635 - DNA, 75 bp, synthetic construct
  source 1..75: mol_type = other DNA
attctggtgtcgcctgccgtggtacagggggcaccggatatcacccgggaaatccagcaggatattgcccggcga

SEQ ID NO: 345636 - DNA, 75 bp, synthetic construct
  source 1..75: mol_type = other DNA
atgagttcaacgcagaaacccgccgacgtcacggcagaacgacgcagccactggtggtggacggtgccaggatgt

SEQ ID NO: 345637 - DNA, 75 bp, synthetic construct
  source 1..75: mol_type = other DNA
ttcttgccgctgatcgttacgtgggttttgatgctggtggttcagatactggcaccggctgtaattaacaacaaa

SEQ ID NO: 345638 - DNA, 75 bp, synthetic construct
  source 1..75: mol_type = other DNA
tcagcaaccgcaacaacagttgcagttacccgtttcttcacaccccaaaatccgcgtgatggtggatacgatggc

SEQ ID NO: 345639 - DNA, 75 bp, synthetic construct
  source 1..75: mol_type = other DNA
tgtttgccagaatcgccccgcttgatgagctggtcagcatggtgcgcgccggtcagaaggtttacacttcgatgg

SEQ ID NO: 345640 - DNA, 75 bp, synthetic construct
  source 1..75: mol_type = other DNA
cttaacgccctgaaaagctccctcgataacaccgaaagctatcgccagccgcgccgcgagaaatcgaaaggcggg

SEQ ID NO: 345641 - DNA, 75 bp, synthetic construct
  source 1..75: mol_type = other DNA
ttaatgggcattggacgtggtataaaagccccgatggcacaacattaaattatttggcacatgatgaccgctata

SEQ ID NO: 345642 - DNA, 75 bp, synthetic construct
  source 1..75: mol_type = other DNA
ttcagccactggatgcgttcggacagcacatctgcatggagaaacgccagtgcccgttacagtcagaccctggaa

SEQ ID NO: 345643 - DNA, 75 bp, synthetic construct
  source 1..75: mol_type = other DNA
gcaacgtgaagggcatctgaaatatgctctcagtgccggagagtttcgcagtggcggacatcagcaggataaccc

SEQ ID NO: 345644 - DNA, 75 bp, synthetic construct
  source 1..75: mol_type = other DNA
caatgagtcaggtacgaatattcagttagtgggttaccgttattcgaccagtgggtattttaatttcgctgatac

SEQ ID NO: 345645 - DNA, 75 bp, synthetic construct
  source 1..75: mol_type = other DNA
aaagaagaaaatcgctggcagtgcgcggaaagtattgcactgctggcggctatcgctgggctatttcatgatttt

SEQ ID NO: 345646 - DNA, 75 bp, synthetic construct
  source 1..75: mol_type = other DNA
tttctattcccgcatgggcgacaacgagcgtaaagagcaggggaatttcaaacgagaagaagtgatatgcgccag

SEQ ID NO: 345647 - DNA, 75 bp, synthetic construct
  source 1..75: mol_type = other DNA
atatggcgcgtttttgcctgatgcttgccgatcactactattcatctaacgacgcgcagcaaaaatggcaagatc

SEQ ID NO: 345648 - DNA, 75 bp, synthetic construct
  source 1..75: mol_type = other DNA
ttgtgtttaccactcccgacacccgctggcggtgcgttcagatattgagaagcgcctggatcgcgcttttacccg

SEQ ID NO: 345649 - DNA, 75 bp, synthetic construct
  source 1..75: mol_type = other DNA
gcaaacttaaggcgttagtaagcgcaccgattctggtagcgaccattgatcatcttatttctgcgaccgaaggtg

SEQ ID NO: 345650 - DNA, 75 bp, synthetic construct
  source 1..75: mol_type = other DNA
ctgccgtattattgatcaatttgccgaacgcactggtgacgccgcatggcaaacggtgattaccctggaaggggt

SEQ ID NO: 345651 - DNA, 75 bp, synthetic construct
  source 1..75: mol_type = other DNA
cccgccatcagcataccgtcacgctgtatgccagagggctgacctgcaaagccgacaccctcggcagttgtggtt

SEQ ID NO: 345652 - DNA, 75 bp, synthetic construct
  source 1..75: mol_type = other DNA
gctgggttaattattcctgtcgcgcgactgcgcccggtgctgacgctcaaaaacagtggagggaaaaaaggatga

SEQ ID NO: 345653 - DNA, 75 bp, synthetic construct
  source 1..75: mol_type = other DNA
aacaactcatctttgaagaagcgccacaagcctataaatcggctgaaagcgtggtgcaatgtctggtgcaggccg

SEQ ID NO: 345654 - DNA, 75 bp, synthetic construct
  source 1..75: mol_type = other DNA
gcctcatttttccaatagtccattcagttcgctgcaaccactcgccaaaacggtaggctggttgatcctttccca

SEQ ID NO: 345655 - DNA, 75 bp, synthetic construct
  source 1..75: mol_type = other DNA
tggatttcgctgcggctttttcaggcttttgtcggtaagcagtcagatgatgtgtggctggaaaaacttggggaa

SEQ ID NO: 345656 - DNA, 75 bp, synthetic construct
  source 1..75: mol_type = other DNA
gccgacaccctcggcagttgtggttacgtttatctggctgtttatccaacatccgaaacgaaaagtaacccccca

SEQ ID NO: 345657 - DNA, 75 bp, synthetic construct
  source 1..75: mol_type = other DNA
gtatgcgaaagggctgacctgcgatgccgacaccctcgggtcctgtggttacgtttatctggctgtttatcctgc

SEQ ID NO: 345658 - DNA, 75 bp, synthetic construct
  source 1..75: mol_type = other DNA
tggatgagtgtcacgctgaccatgcgtgtgacggaaaaaaaatgggttccggacgtgaaatgggtcgagttctgt

SEQ ID NO: 345659 - DNA, 75 bp, synthetic construct
  source 1..75: mol_type = other DNA
ggcgcatggggcagggcgcaaatggggacgtactgagtgtaaagggcgtctggcagcgaaatacacagcgacgca

SEQ ID NO: 345660 - DNA, 75 bp, synthetic construct
  source 1..75: mol_type = other DNA
aagatcttgcaggcagtcttcagttagctatggacagtggcgcaaagcgtattttgctcccaatggcctcagcct

SEQ ID NO: 345661 - DNA, 75 bp, synthetic construct
  source 1..75: mol_type = other DNA
agaggccggttcagcaatgcggatgcataccatctggaccaggcttttccactgctgatgaaacaactggaactc

SEQ ID NO: 345662 - DNA, 75 bp, synthetic construct
  source 1..75: mol_type = other DNA
gagagtaaatcatgagaggtcttgcatacaatcccggcattcttccggcagaaatgattattcgccaacgcgtaa

SEQ ID NO: 345663 - DNA, 75 bp, synthetic construct
  source 1..75: mol_type = other DNA
ttattacagcaagtttgagcatctggttaaagagttatgcaaccgtgaaatcctgttatctcaggcgcagacgct

SEQ ID NO: 345664 - DNA, 75 bp, synthetic construct
  source 1..75: mol_type = other DNA
ataacatggaaatggcctctgcattggctcaggacctggattcattattgaatcagcactttcgtggtcgcgtgg

SEQ ID NO: 345665 - DNA, 75 bp, synthetic construct
  source 1..75: mol_type = other DNA
atgctcaccagcggtgaactaaatccccgccatcagcataccgtcacgctgtatgcaaaaggtctgacctgcaaa

SEQ ID NO: 345666 - DNA, 75 bp, synthetic construct
  source 1..75: mol_type = other DNA
gtctggaagcgattccgacgctatttattcttattactatttcgttctttatgatgcgcctcgcgccgggaagcc

SEQ ID NO: 345667 - DNA, 75 bp, synthetic construct
  source 1..75: mol_type = other DNA
gccaagtacaaagtcatcgctcgctgcattaattgcgttctgttcaattctgatgaaccgaccgattcaagagca

SEQ ID NO: 345668 - DNA, 75 bp, synthetic construct
  source 1..75: mol_type = other DNA
tggtttctggtgggcaaaccaccgtggcgaacctgttttacaatatggccagccgtcagattggtctagtcggca

SEQ ID NO: 345669 - DNA, 75 bp, synthetic construct
  source 1..75: mol_type = other DNA
aataaaatctctgatccgtgaacgtggttcgtacaaaatcatcgacaaagtcaccgtaaaactaaatcaaaagaa

SEQ ID NO: 345670 - DNA, 75 bp, synthetic construct
  source 1..75: mol_type = other DNA
tgcgaagcagacaccctcggcagttgtggttacgtttatctggctgtttatccgacgcccgaaacgaaaaagtaa

SEQ ID NO: 345671 - DNA, 75 bp, synthetic construct
  source 1..75: mol_type = other DNA
ctatcctgatttgagcgaagaagaggccgcgatgcttgcagctgacggaccgcgttacaaagcgatcggcaatag

SEQ ID NO: 345672 - DNA, 75 bp, synthetic construct
  source 1..75: mol_type = other DNA
ctacagtgcttgagcatctaccacacggcaagcggttaatagaaccattcgttggtggcggttccgtatttacga

SEQ ID NO: 345673 - DNA, 75 bp, synthetic construct
  source 1..75: mol_type = other DNA
tttccccatcgtcaacaaggagcaggacaacagcgagatgctggccgctgacgtcatcatcagccagaaacgcat

SEQ ID NO: 345674 - DNA, 75 bp, synthetic construct
  source 1..75: mol_type = other DNA
gaaaaaagctttctggctggcggcaagtggtcgcccggggccggttgtggttgatttacctaaagacattcttaa

SEQ ID NO: 345675 - DNA, 75 bp, synthetic construct
  source 1..75: mol_type = other DNA
aaatggcgttgccagaagaaaccgtggtttgcgtcactggcgacggcagtattcagatgaacatccaggaactgt

SEQ ID NO: 345676 - DNA, 75 bp, synthetic construct
  source 1..75: mol_type = other DNA
gttgtctggtggaaaaattaaggtcggtgatttctccacactggctaaagcgaccgcagagccgggagcgtaacc

SEQ ID NO: 345677 - DNA, 75 bp, synthetic construct
  source 1..75: mol_type = other DNA
aggacaacagcgaaatgctggccgctgacgtcatcatcagccagaaacgcatcggtaacctgccggcggtacgcg

SEQ ID NO: 345678 - DNA, 75 bp, synthetic construct
  source 1..75: mol_type = other DNA
cgcactggtgatggatgcgaccaacaacctgattgagccgtggtatcaggaagaccctgaccttgtggtgattgt

SEQ ID NO: 345679 - DNA, 75 bp, synthetic construct
  source 1..75: mol_type = other DNA
agggcggtgattatgccagccttgacgcactggtgatggatgcgaccaacaacctgattgagccgtggtatcagg

SEQ ID NO: 345680 - DNA, 75 bp, synthetic construct
  source 1..75: mol_type = other DNA
gaacaccatgcaggagtcctctgactttctgacccgcatcaacattgtgccggtcagcgaaatgaaaggggaaaa

SEQ ID NO: 345681 - DNA, 75 bp, synthetic construct
  source 1..75: mol_type = other DNA
gtattttccgctggtcaacaaagagcaggagaacagtgaaaaactggctgcagatatgatcatcagccagaaacg

SEQ ID NO: 345682 - DNA, 75 bp, synthetic construct
  source 1..75: mol_type = other DNA
aaaggtggcgaatatgccaacctggacgctgttgtgatggatgcggtcaatgagcttatcgacgtggtctaccag

SEQ ID NO: 345683 - DNA, 75 bp, synthetic construct
  source 1..75: mol_type = other DNA
tggtcgtccgatcgcttatcgatcagggcgttaaacaagtattcggttatcctggaggcgcggtccttgatattt

SEQ ID NO: 345684 - DNA, 75 bp, synthetic construct
  source 1..75: mol_type = other DNA
ttcgtcgtttggtcatggagcatttggctgtattaggcgtagagattgatacagaaatgaataaccgctctaact

SEQ ID NO: 345685 - DNA, 75 bp, synthetic construct
  source 1..75: mol_type = other DNA
catattgccggacacgcagcttcattacgtcgcctggatggaattatattcaccggcggaataggagagaattca

SEQ ID NO: 345686 - DNA, 75 bp, synthetic construct
  source 1..75: mol_type = other DNA
agtgctcgaacagacctcgatcccgcaacggtactttttgagttcgaaggcgtgcgccggaatattgcgccgagc

SEQ ID NO: 345687 - DNA, 75 bp, synthetic construct
  source 1..75: mol_type = other DNA
agaggcctgttcagcgatgcagatgcgtaccctctggaccaggcctttccgctgctgatgaaacaactgaaactc

SEQ ID NO: 345688 - DNA, 75 bp, synthetic construct
  source 1..75: mol_type = other DNA
agaggcctgttcagcgatgcagatgcgtaccctctggaccaggcctttccactgctgatgaaacaactggaactc

SEQ ID NO: 345689 - DNA, 75 bp, synthetic construct
  source 1..75: mol_type = other DNA
agaggcctgttcagcgatgcagatgcgtaccctctggaccaggcatttcccctgctgatgaaacaactgcaactc

SEQ ID NO: 345690 - DNA, 75 bp, synthetic construct
  source 1..75: mol_type = other DNA
cgcccgccgggtattaacagaaaaatcagagtggtgtgtcgaacgtggtcagcgacagaacatatcacctatacc

SEQ ID NO: 345691 - DNA, 75 bp, synthetic construct
  source 1..75: mol_type = other DNA
aagccgacaccctcggcagctgtggttacgtttatatggctgtttatccgacactggcacccgcaaccacctcat

SEQ ID NO: 345692 - DNA, 75 bp, synthetic construct
  source 1..75: mol_type = other DNA
gatgagattatgaaaaatcaaccaaatgatgttattaatgaaaaaattaataatgaattaaaacttaggtttaga

SEQ ID NO: 345693 - DNA, 75 bp, synthetic construct
  source 1..75: mol_type = other DNA
agctttatcatgacagtggcttcagagtggaacctctttttgccagacgttctgtgtcttgtaaggggacactcg

SEQ ID NO: 345694 - DNA, 75 bp, synthetic construct
  source 1..75: mol_type = other DNA
atggacatacattgatccctacggaaaagcgtaaaaaagtttcttcagatgaactggcataccttcgcaaaaact

SEQ ID NO: 345695 - DNA, 75 bp, synthetic construct
  source 1..75: mol_type = other DNA
ccacaccggatgacaacggtctggtgattattcccggttcacgcggtgattactcctggctggttcagcccgtca

SEQ ID NO: 345696 - DNA, 75 bp, synthetic construct
  source 1..75: mol_type = other DNA
atgcgtaagatcattaaactggtgctggcgggtttacttagcgtctctacacttgctgttgccgcggagtcttcg

SEQ ID NO: 345697 - DNA, 75 bp, synthetic construct
  source 1..75: mol_type = other DNA
ctctgttgcacgcacggttctgcgggccgtccgtgactccgtggtctctgttgcccgcgcagtatggaactggat

SEQ ID NO: 345698 - DNA, 75 bp, synthetic construct
  source 1..75: mol_type = other DNA
ctctgttgcacgcacggttctgcgggccgtccgtgactcagtggtctctgttgcccgcgccgtatggaactggat

SEQ ID NO: 345699 - DNA, 75 bp, synthetic construct
  source 1..75: mol_type = other DNA
gaacaggcacacgggcttattgctgggggaagtgaaacaggaaacaagcgtgtcgcagtacggcagattagcgca

SEQ ID NO: 345700 - DNA, 75 bp, synthetic construct
  source 1..75: mol_type = other DNA
ttatgaaaaccgtctggtgccgaaaaaagtcgatattcgccagcgcatctggcagcccactcaactggaaggaaa

SEQ ID NO: 345701 - DNA, 75 bp, synthetic construct
  source 1..75: mol_type = other DNA
ccagcgcgagcaaagcatcgctttactggcaaaaacgatgggcttaccggcaccggtgattgcctcttacttaga

SEQ ID NO: 345702 - DNA, 75 bp, synthetic construct
  source 1..75: mol_type = other DNA
ctctgttgcacgcacggttctgcgagccgtccgtgactcggtggtctctgttgcccgcgccgtatggaactggat

SEQ ID NO: 345703 - DNA, 75 bp, synthetic construct
  source 1..75: mol_type = other DNA
ctctgttgcacgcacggttctgcgagccgtccgtgactccgtggtctctgttgcccgcgcggtatggaactggat

SEQ ID NO: 345704 - DNA, 75 bp, synthetic construct
  source 1..75: mol_type = other DNA
atgaatccgtctgatgccattgaggcaattgaaaaacccctttcttccctgccttattcactttcccgtcacatc

SEQ ID NO: 345705 - DNA, 75 bp, synthetic construct
  source 1..75: mol_type = other DNA
ctctgttgcacgcacggttctgcgcgccgtccgtgactcggtggtctctgttgcccgcgcagtatggaactggat

SEQ ID NO: 345706 - DNA, 75 bp, synthetic construct
  source 1..75: mol_type = other DNA
ctctgttgcacgcacggttctgcgcgccgtccgtgactcagtggtctctgttgcccgcgcggtatggaactggat

SEQ ID NO: 345707 - DNA, 75 bp, synthetic construct
  source 1..75: mol_type = other DNA
ctctgttgcacgcacggttctgcgtgccgtccgtgactccgtggtctctgttgcccgcgctgtatggaactggat

SEQ ID NO: 345708 - DNA, 75 bp, synthetic construct
  source 1..75: mol_type = other DNA
ctaccaaagaactgggcgaattattgcaggcactggacaaaaaaatattctccccctactacatcgcgttaatcc

SEQ ID NO: 345709 - DNA, 75 bp, synthetic construct
  source 1..75: mol_type = other DNA
agacattaccgactggcagacggcgaaaatcatgcgcgaagcggtggcgattgtcccggaaggacgccgcgtctt

SEQ ID NO: 345710 - DNA, 75 bp, synthetic construct
  source 1..75: mol_type = other DNA
aaaatcatgcgcgaagcggtggcgattgtcccggaagggcgtcgcgttttctcgcggatgacggtggaagagaac

SEQ ID NO: 345711 - DNA, 75 bp, synthetic construct
  source 1..75: mol_type = other DNA
tgctggaaaacggccacgtcgtgctcgaagacaccggcgatgcgctgctggcgaacgaggcggtaagaagcgcgt

SEQ ID NO: 345712 - DNA, 75 bp, synthetic construct
  source 1..75: mol_type = other DNA
ggttttaacattcagctgaatgattgcgataccactgttgcagacaaagcagccattgccttccttggcacagca

SEQ ID NO: 345713 - DNA, 75 bp, synthetic construct
  source 1..75: mol_type = other DNA
attgatgcggctcataccaacgttctggctctgcagagttcagctgcgggtagcgcaacaaacgttggtgtgcag

SEQ ID NO: 345714 - DNA, 75 bp, synthetic construct
  source 1..75: mol_type = other DNA
gcaatttacttgctgttcctctcagcgcagctaccgattttactgaactggccgaatactgcgatcgcttcgccc

SEQ ID NO: 345715 - DNA, 75 bp, synthetic construct
  source 1..75: mol_type = other DNA
tgaactttgtcgttattgccttgctatcacgcaaaccctctcggggctgggatttgcctctgaaacggaaaaata

SEQ ID NO: 345716 - DNA, 75 bp, synthetic construct
  source 1..75: mol_type = other DNA
gtctggtattttgccgccgaaatgaaagccccgcgttggctgcgtactgccggtggcgtgaagtttatcggcggt

SEQ ID NO: 345717 - DNA, 75 bp, synthetic construct
  source 1..75: mol_type = other DNA
acccgttacttgctgttcccttcaatgctgccacagattttaccgtactggctgaccactgtgaaaacttcgccg

SEQ ID NO: 345718 - DNA, 75 bp, synthetic construct
  source 1..75: mol_type = other DNA
ctaaagctggcggatcgcggctacgtgctggaaaacggccatgtagtgctctccgataccggcgacgcgctgctg

SEQ ID NO: 345719 - DNA, 75 bp, synthetic construct
  source 1..75: mol_type = other DNA
aatccaggcgctgcatgaggtgagcctgcatatcaatcagggcgagattgtcacgctgattggcgcgaacggggc

SEQ ID NO: 345720 - DNA, 75 bp, synthetic construct
  source 1..75: mol_type = other DNA
gttgtgcgttcggctatatctcaatggtgggctggacgagggcatcgcaaggtgcgccggtatccagtatggccg

SEQ ID NO: 345721 - DNA, 75 bp, synthetic construct
  source 1..75: mol_type = other DNA
ctctgttgtccgtacggccctgcgcgccgtccgtgactcggtggtctctgttgcccgcgcggtatggaactggat

SEQ ID NO: 345722 - DNA, 75 bp, synthetic construct
  source 1..75: mol_type = other DNA
agctccgccgttggcttcaatatcaagctgaatgattgtgataccaatgtttccagtaatgcagctgttgcattc

SEQ ID NO: 345723 - DNA, 75 bp, synthetic construct
  source 1..75: mol_type = other DNA
agcggcaggctctgcccaaaatgtcggtattcaaattttggaccgtacgggtgaggtattaatacttgatggggc

SEQ ID NO: 345724 - DNA, 75 bp, synthetic construct
  source 1..75: mol_type = other DNA
actttaaaggagaagttgttaacgccgcttgcgcagttgatgcaggctctgctgatcaaaccgttcagttagggc

SEQ ID NO: 345725 - DNA, 75 bp, synthetic construct
  source 1..75: mol_type = other DNA
tggtgttcttatggctgcgtatcattggtggcgaaaggtagttaacaatctcccagactgggacagtctggagta

SEQ ID NO: 345726 - DNA, 75 bp, synthetic construct
  source 1..75: mol_type = other DNA
atcaacaaagcgcagatttacgcctggcgcaagggtatcaaaacgctctattacattcgcctgcgtcagatggcg

SEQ ID NO: 345727 - DNA, 75 bp, synthetic construct
  source 1..75: mol_type = other DNA
gcagccgaaaacggcgaaagttggcgaactgtttgcccgtagcggtattacgttacctacccgtgagatgtgggc

SEQ ID NO: 345728 - DNA, 75 bp, synthetic construct
  source 1..75: mol_type = other DNA
aggaattggtggtgtggcgcacactcggcgcgggcaaaaagctgctgcgcacaacattgtggtgtgagtttgcca

SEQ ID NO: 345729 - DNA, 75 bp, synthetic construct
  source 1..75: mol_type = other DNA
gctgctcgccggattaatgggtggcagtatgctgctgtgggcggtgctggcgggcgcgatagtgctggctttgct

SEQ ID NO: 345730 - DNA, 75 bp, synthetic construct
  source 1..75: mol_type = other DNA
ctgtcgcttttcggcggctggctgggtgcgagactggttaagggtaaggcgctgttcaggcagtttgcggggtga

SEQ ID NO: 345731 - DNA, 75 bp, synthetic construct
  source 1..75: mol_type = other DNA
ggctctgttgatcaaaccgttcagttgggccaggttcgtaccgcttcgctggacaagaatggagcaaccagctct

SEQ ID NO: 345732 - DNA, 75 bp, synthetic construct
  source 1..75: mol_type = other DNA
cgctgttgccttcttaggtacggcaattgatgctacgcgtactgatgttctggctctgcagagttctgctgcagg

SEQ ID NO: 345733 - DNA, 75 bp, synthetic construct
  source 1..75: mol_type = other DNA
gctggctcaccagtttccgctgggagaacggcaacggcatgttgacgcaactcaaccgccagttcccgaccatta

SEQ ID NO: 345734 - DNA, 75 bp, synthetic construct
  source 1..75: mol_type = other DNA
cgggaagtctgttcctttctcacttcaaccgcgcgcgtgatgcgggctggcatattaccgtccatgcaggcgaag

SEQ ID NO: 345735 - DNA, 75 bp, synthetic construct
  source 1..75: mol_type = other DNA
gatgctgatggtaatccggtcgagctaaaagaaattcttgttcatgatgaatcagcggtagacctatcagtatta

SEQ ID NO: 345736 - DNA, 75 bp, synthetic construct
  source 1..75: mol_type = other DNA
tatgcagcgtggtcgtgctgctcgcggtggctctgtattcgttccggctgctgctatgcgtgctgctgctgctgg

SEQ ID NO: 345737 - DNA, 75 bp, synthetic construct
  source 1..75: mol_type = other DNA
aaacgtgaaaatggctccgaaaacttttgctggtggcaacccgatcagccgtcaatctctgaaaactgttcctaa

SEQ ID NO: 345738 - DNA, 75 bp, synthetic construct
  source 1..75: mol_type = other DNA
gtctgtgttgcctctgttgcacgcacggttctgcgtgccgtccgtgacacagtggtctctgttgcccgcgcggta

SEQ ID NO: 345739 - DNA, 75 bp, synthetic construct
  source 1..75: mol_type = other DNA
cggtaaactggctggttacgacgtagttacttctggtgttattccggtagaccacatcgttctgggatcgttcga

SEQ ID NO: 345740 - DNA, 75 bp, synthetic construct
  source 1..75: mol_type = other DNA
ttgatgctttcggtttcgttgatgaaaacggtgctgcaccggaaagcaaagctgaatttgcaaacgtgaaaatgg

SEQ ID NO: 345741 - DNA, 75 bp, synthetic construct
  source 1..75: mol_type = other DNA
aagtggttcgtggcccgatgtcgtcgctatacggctccgatgcgctcggcggtgtagtgaatatcatcaccaaaa

SEQ ID NO: 345742 - DNA, 75 bp, synthetic construct
  source 1..75: mol_type = other DNA
caccaacatgctcggagatattgcagcagaagctcagctttatgctgaaattgctgacgaacgctacatcgcagg

SEQ ID NO: 345743 - DNA, 75 bp, synthetic construct
  source 1..75: mol_type = other DNA
tggtgttcttatggctacgtatcattggtggcgaaaggtcgttaacaacctgcctgactggaatagtcttggatg

SEQ ID NO: 345744 - DNA, 75 bp, synthetic construct
  source 1..75: mol_type = other DNA
gcaatggactctgcgacccaggccccgctgcctgaatataaagaatatcaaaaagatgatccgctgcgtgcgagc

SEQ ID NO: 345745 - DNA, 75 bp, synthetic construct
  source 1..75: mol_type = other DNA
acagggcggcgtgcgggtgctaaaagacggtaccgatctcaatcaaaccggatcgttttatctggctgcccgtcc

SEQ ID NO: 345746 - DNA, 75 bp, synthetic construct
  source 1..75: mol_type = other DNA
cagccggagccgacgccgcagtgctcgccgacatgctcggccgccttacagaagaagctcgatattatgctgagc

SEQ ID NO: 345747 - DNA, 75 bp, synthetic construct
  source 1..75: mol_type = other DNA
ggtcgtgaagcgcagcctgccggtaatagcgcgatgatggatgcgctggcggcggcaatgggcaaaaaacgttaa

SEQ ID NO: 345748 - DNA, 75 bp, synthetic construct
  source 1..75: mol_type = other DNA
acgtctttgcccgtaacctgcacgatctgctgatggcggcccctgccggactgcgtgcaacgatgggcctcgatc

SEQ ID NO: 345749 - DNA, 75 bp, synthetic construct
  source 1..75: mol_type = other DNA
ctggtggcgaccgacaccatttacccgcacaccggacaagccgcaaaagcagcgatgaccgttgctgccctgtgt

SEQ ID NO: 345750 - DNA, 75 bp, synthetic construct
  source 1..75: mol_type = other DNA
aaattctgcgccgattataaacgcggttttgtattaggctactcgcaccggatgtatgaaaagaccggcgatcgt

SEQ ID NO: 345751 - DNA, 75 bp, synthetic construct
  source 1..75: mol_type = other DNA
atccgggcaaactgctggcttataactgctcgccgtcgttcaactggcagaaaaacctcgacgacaaaactattg

SEQ ID NO: 345752 - DNA, 75 bp, synthetic construct
  source 1..75: mol_type = other DNA
catttagtccgcgcgtggaaacgtacctatggtttaccgaccattgtgactaattgctctaacaattatggtcct

SEQ ID NO: 345753 - DNA, 75 bp, synthetic construct
  source 1..75: mol_type = other DNA
tttgcgatgctgctgcaatggcgcggatttttgctcagcatcagccggatgcagtgatgcacctggctgctgaaa

SEQ ID NO: 345754 - DNA, 75 bp, synthetic construct
  source 1..75: mol_type = other DNA
acgaagtgtatggtgatctgccgcaccctgatgaagtggctgccggtactgaacttccgttgtttactgagaaaa

SEQ ID NO: 345755 - DNA, 75 bp, synthetic construct
  source 1..75: mol_type = other DNA
gagagctattgcgagcaaatcatcatggatcatctcggcctgcgcctgaacaatgccccggcggatagctggcgc

SEQ ID NO: 345756 - DNA, 75 bp, synthetic construct
  source 1..75: mol_type = other DNA
atgaagtgtatggtgatctagctcatccagatgtactggatgaaggttcaccattgcctttatttactgaaaaaa

SEQ ID NO: 345757 - DNA, 75 bp, synthetic construct
  source 1..75: mol_type = other DNA
catgaccgtcgctatgccattgatgctaccaaaattacagagcatttaggttggcaaccaattgagacatttgag

SEQ ID NO: 345758 - DNA, 75 bp, synthetic construct
  source 1..75: mol_type = other DNA
ccaataacaaagcaataaatgctacagctattacacaagtatttggtgacggagttcgacttattgcaatagctg

SEQ ID NO: 345759 - DNA, 75 bp, synthetic construct
  source 1..75: mol_type = other DNA
aacgtgaaattgatctgtctcgcctttacaatgagtatcgtgattatgtaagtatgaaccgccccgggaatcctg

SEQ ID NO: 345760 - DNA, 75 bp, synthetic construct
  source 1..75: mol_type = other DNA
ataaatattgagttatgccccggcatcgtagaaatcgactttaatcaacataatttatttcccacaattgaaaat

SEQ ID NO: 345761 - DNA, 75 bp, synthetic construct
  source 1..75: mol_type = other DNA
gaagacgcacccgttttgcatctggagcagttagtctttttggtgatgcttccaattagtagaacatgtgttttt

SEQ ID NO: 345762 - DNA, 75 bp, synthetic construct
  source 1..75: mol_type = other DNA
gatcgttttatctggcagctcgtccctatgcagaaaaaaacggcgcttttattcagggcgtactggcaaccttta

SEQ ID NO: 345763 - DNA, 75 bp, synthetic construct
  source 1..75: mol_type = other DNA
aacgtgaaattgatctgtctcgtctttacaatgagtatcgtgattatgtaagtaaggacttgccttcacaacgag

SEQ ID NO: 345764 - DNA, 75 bp, synthetic construct
  source 1..75: mol_type = other DNA
ctgagcatgaaaatattaatgctattgaattatatgaaaatgagtggaagagctttgaagatacatactggtcgg

SEQ ID NO: 345765 - DNA, 75 bp, synthetic construct
  source 1..75: mol_type = other DNA
tgaatcggccaattacttagcaagcaaggcgaaaccgacagatgattggaagtcatctatttcaattcctggaac

SEQ ID NO: 345766 - DNA, 75 bp, synthetic construct
  source 1..75: mol_type = other DNA
caatggcgtcagtatgttcagccaagggttcagtttgcatttgattccatagaatcaacgtacacgcctgcaatt

SEQ ID NO: 345767 - DNA, 75 bp, synthetic construct
  source 1..75: mol_type = other DNA
ttcaatattagcaggaaaaataatctaatcgtttttgtttgggcaatgtcgcttcctgtaataacagttttcatt

SEQ ID NO: 345768 - DNA, 75 bp, synthetic construct
  source 1..75: mol_type = other DNA
aacgcttacgctcaattggtgatgaaaaagcgatgctgatagagaaccgtatcaatattgagctatgccccggta

SEQ ID NO: 345769 - DNA, 75 bp, synthetic construct
  source 1..75: mol_type = other DNA
atgagcagcagtgacctgtatctgagcaagaaacacgggtgtactttgtcacccggaaaaatgtcagagagccag

SEQ ID NO: 345770 - DNA, 75 bp, synthetic construct
  source 1..75: mol_type = other DNA
taaagcgaagatactggctatcttcaaagcggaaagcaaaagcctgaaacctgcgccggttaaatctgtagtggt

SEQ ID NO: 345771 - DNA, 75 bp, synthetic construct
  source 1..75: mol_type = other DNA
caggattttcgccggagctacaaggtgtctatagcgaaaccgatgcggatggtatgaaacggttgtacggctatg

SEQ ID NO: 345772 - DNA, 75 bp, synthetic construct
  source 1..75: mol_type = other DNA
gccgaagagagcgagctgatgcagtcactacgccaggtgtgcaaactgtcggcgcgtaaacaaaagcaggtgcag

SEQ ID NO: 345773 - DNA, 75 bp, synthetic construct
  source 1..75: mol_type = other DNA
agttatgcgagccgctacccggattacagccgtattcccgccatcaccctgaaaggtcagtggctggaaaccgcc

SEQ ID NO: 345774 - DNA, 75 bp, synthetic construct
  source 1..75: mol_type = other DNA
cactgcgccaggtgtgcaaactgtcggcacgtaaacaaaagcaggtgcaggagtttattggggtgattgcgggta

SEQ ID NO: 345775 - DNA, 75 bp, synthetic construct
  source 1..75: mol_type = other DNA
cgctgcgccaggtgtgcaagctgtcggcgcgtaaacaaaagcagatacaggaatttattggggtgattgcgggta

SEQ ID NO: 345776 - DNA, 75 bp, synthetic construct
  source 1..75: mol_type = other DNA
cgctgcgccaggtgtgcaagctgtcagcacgtaaacaaaagcaggtgcaggaatttattggggtgattgcgggta

SEQ ID NO: 345777 - DNA, 75 bp, synthetic construct
  source 1..75: mol_type = other DNA
gccgaagagagcgaactgatgcagtcgctgcgccaggtgtgcaagctgtcggcgcgtaaacaaaagcaggtgcag

SEQ ID NO: 345778 - DNA, 75 bp, synthetic construct
  source 1..75: mol_type = other DNA
caggaggatgaaatggggtttgatgtcaatgaaactcttaactctcttatacggaaaattaatgattttgataaa

SEQ ID NO: 345779 - DNA, 75 bp, synthetic construct
  source 1..75: mol_type = other DNA
tttcgcgttatgccctgacttttcagggaaatatcctttcagtaaactgtcagtgccggatgctcacccgtgtcc

SEQ ID NO: 345780 - DNA, 75 bp, synthetic construct
  source 1..75: mol_type = other DNA
acgccagattaataattttgataaagcattgcaacatgctgcggcgcgtagtgatataactcttttagcaatttc

SEQ ID NO: 345781 - DNA, 75 bp, synthetic construct
  source 1..75: mol_type = other DNA
taatgccaccagcatgatgaatattatgcgcgccggaataaaaggcggaaaaacggtggaaatacgctgcgacgg

SEQ ID NO: 345782 - DNA, 75 bp, synthetic construct
  source 1..75: mol_type = other DNA
cgctgcgccaggtgtgcaagctgtcggcacgtaaacaaaagcaggtgcaggagtttattggggtgattgcgggta

SEQ ID NO: 345783 - DNA, 75 bp, synthetic construct
  source 1..75: mol_type = other DNA
cgacagagtcttgttgattatatcgactcgcttcaacctggcactttcaatcatgagagcttcaatcatgagaaa

SEQ ID NO: 345784 - DNA, 75 bp, synthetic construct
  source 1..75: mol_type = other DNA
ccgggttacacgaaacccaagcacacgatcaatccgaatatgagcatcaagcgcgcagccggtgagcagattggc

SEQ ID NO: 345785 - DNA, 75 bp, synthetic construct
  source 1..75: mol_type = other DNA
gggggggccggctttatcggctcagcggttgtacgacatattattaaaaatacccaggacgacgtcgtcaatgta

SEQ ID NO: 345786 - DNA, 75 bp, synthetic construct
  source 1..75: mol_type = other DNA
agaacttggatgtggtccatacgatttgcgatctgcttgatgagattgtgccaaaagagggatcttatcgcgatc

SEQ ID NO: 345787 - DNA, 75 bp, synthetic construct
  source 1..75: mol_type = other DNA
gcgggtacaacgagaagaaaaatctcgacgtaattcataatatttgtgatctgctcgatgagatcatacccaaag

SEQ ID NO: 345788 - DNA, 75 bp, synthetic construct
  source 1..75: mol_type = other DNA
ctggaagaaggcgtgaatttgctgccggggttttcgccggagctacaaggtgtctatagcgaaaccgatgcggac

SEQ ID NO: 345789 - DNA, 75 bp, synthetic construct
  source 1..75: mol_type = other DNA
ctggcgcaatttgaacagcatattgaggatgactcgccgctggctgaggtgttgccgagcgtttataacaaatat

SEQ ID NO: 345790 - DNA, 75 bp, synthetic construct
  source 1..75: mol_type = other DNA
tgagttgggtattgagtcgcgcaaggctattcttgcgcgctgtaagctgttccgcccgtttatcccgcccgttgt

SEQ ID NO: 345791 - DNA, 75 bp, synthetic construct
  source 1..75: mol_type = other DNA
aaaatgtattattaatgatggattccgtaactcgttatgcccgagccgcgcgtgatgttgggcttgcatcgggag

SEQ ID NO: 345792 - DNA, 75 bp, synthetic construct
  source 1..75: mol_type = other DNA
ccgggttacacgaagccgaaacacacgatcaatccgaatatgagcatcaagcgcgccgcaggtgagcagattggc

SEQ ID NO: 345793 - DNA, 75 bp, synthetic construct
  source 1..75: mol_type = other DNA
ggcagtgacgcaaacaatgacgcaatccgcgccagcaatggtcctcacggacgccgacgcgttcgttgtcgtaaa

SEQ ID NO: 345794 - DNA, 75 bp, synthetic construct
  source 1..75: mol_type = other DNA
ccctgctgcatttattgaaacgaatattgtgggtacttatgttcttttagaaacagcccgtcaatactggtcctc

SEQ ID NO: 345795 - DNA, 75 bp, synthetic construct
  source 1..75: mol_type = other DNA
gctggccgaggtcgcagcgagcgaccgttacgccttcgaacaggtggatatctgcaatcgtgcagagctggatcg

SEQ ID NO: 345796 - DNA, 75 bp, synthetic construct
  source 1..75: mol_type = other DNA
gaattacccctctttactgagacgacagcttacgcgccaagcagcccatattctgcttctaaagcatccagcgat

SEQ ID NO: 345797 - DNA, 75 bp, synthetic construct
  source 1..75: mol_type = other DNA
cgaacacggattacaccactggtaatttaactaatacgacttcttctggtgcatctaatgttcagattcagctac

SEQ ID NO: 345798 - DNA, 75 bp, synthetic construct
  source 1..75: mol_type = other DNA
tcaccgagtggttgcttactctacccatatactacggaatccggtgctgacctcagctttgaacttgatgataag

SEQ ID NO: 345799 - DNA, 75 bp, synthetic construct
  source 1..75: mol_type = other DNA
gaaaggttattgattctgggagcaaggcgtatgtggtcaaagaccaataatgattcagcacttggaaacgttcat

SEQ ID NO: 345800 - DNA, 75 bp, synthetic construct
  source 1..75: mol_type = other DNA
tggaacaatgcaggacgccgtccggtaacggtgttgagcctcggttgtgtggtgattattgtcgccgctaacatc

SEQ ID NO: 345801 - DNA, 75 bp, synthetic construct
  source 1..75: mol_type = other DNA
tgggccatcagcgccctgttactaccggatttctgggcgtattacagctcgtttagtctctctacgctgctgcct

SEQ ID NO: 345802 - DNA, 75 bp, synthetic construct
  source 1..75: mol_type = other DNA
tcaaaaatcaactgggaatggacgccagtaaatattcactgcaatattcggaaaagtctatcggatacggtatgt

SEQ ID NO: 345803 - DNA, 75 bp, synthetic construct
  source 1..75: mol_type = other DNA
atgtcatcaatccgcttaactacgagaatgaaagagaaaatcgctcgtaacgctttaattaagtctggggttttc

SEQ ID NO: 345804 - DNA, 75 bp, synthetic construct
  source 1..75: mol_type = other DNA
atgaactatctggaatttccggatggttcattgttttggcagcaaaccacttatttgagaggaattaatatgtca

SEQ ID NO: 345805 - DNA, 75 bp, synthetic construct
  source 1..75: mol_type = other DNA
tatcatccaagttggtagctataagtgaagaacttggaaagatgggatgttcattttactcatacgattctcgtt

SEQ ID NO: 345806 - DNA, 75 bp, synthetic construct
  source 1..75: mol_type = other DNA
ttgattcatatcagggccaggaaaacaagataattatcctcagtctggttcgcgataatcccaacaaactacaag

SEQ ID NO: 345807 - DNA, 75 bp, synthetic construct
  source 1..75: mol_type = other DNA
ttgcgtctcgaaacaggacgtacgcatcagatccgcgtgcatatggcgcatatcactcatccgctggtgggtgat

SEQ ID NO: 345808 - DNA, 75 bp, synthetic construct
  source 1..75: mol_type = other DNA
tgactcactatcgcatcatggaacacttccgtgtgcacacgcgtctgcggttgcgtctggaaactggacgtacgc

SEQ ID NO: 345809 - DNA, 75 bp, synthetic construct
  source 1..75: mol_type = other DNA
atgggaattggcatcgccattggcattacgttgattgtcggtacgctgatgacgccaattatcaacggcaatttc

SEQ ID NO: 345810 - DNA, 75 bp, synthetic construct
  source 1..75: mol_type = other DNA
aacatgctggtgaaggtgaaaggcacgccgcttgccgataacgatgatgtcgatgcctttgattttattcgcacc

SEQ ID NO: 345811 - DNA, 75 bp, synthetic construct
  source 1..75: mol_type = other DNA
ttgaaacaggcgacaacggcaatgaatatttcaaatggagaagcaaacaaagcaccacaacaaaagacctgatga

SEQ ID NO: 345812 - DNA, 75 bp, synthetic construct
  source 1..75: mol_type = other DNA
aagcgaatgcaattacaagcaacatcctgaatcgaattgctgtacgtggtcagcgaaaggttgctgatgcgttag

SEQ ID NO: 345813 - DNA, 75 bp, synthetic construct
  source 1..75: mol_type = other DNA
gaacccgcctccctcgaactggtgcaaagccgcctgcaaatcctctttcctggtgtcaaaaaggcagaacagtaa

SEQ ID NO: 345814 - DNA, 75 bp, synthetic construct
  source 1..75: mol_type = other DNA
tgcgcccgcgcggtgctggacgggcatatcgtattaacccgcaaactggcggaagcggggcattatccggccatt

SEQ ID NO: 345815 - DNA, 75 bp, synthetic construct
  source 1..75: mol_type = other DNA
atggggcgcttcgtcaaggccaactgttgcagagcttggcgatgattctggctggcatttctatagtcagcgaaa

SEQ ID NO: 345816 - DNA, 75 bp, synthetic construct
  source 1..75: mol_type = other DNA
gttcgatcggcaaatggctgggacgctacccgtcggtgcgtaatgcgtcggataacatccgtaacgccatgaata

SEQ ID NO: 345817 - DNA, 75 bp, synthetic construct
  source 1..75: mol_type = other DNA
aatcgaacctccgcccaacagcagcaactcaccagttggcaggaacaaggccatgatattttcccactcggcatt

SEQ ID NO: 345818 - DNA, 75 bp, synthetic construct
  source 1..75: mol_type = other DNA
tttcgtacatatgcgtcctgtcaggggcatggtttccctgttacgaaactgccgccttatattgcctttgtctgt

SEQ ID NO: 345819 - DNA, 75 bp, synthetic construct
  source 1..75: mol_type = other DNA
ggcggaactggcaaagaaagtagccaaggtgctgacaaaagaaaaagccccgaagaacggcgaattcttcgaggc

SEQ ID NO: 345820 - DNA, 75 bp, synthetic construct
  source 1..75: mol_type = other DNA
accgctggacgtgggcgtgaaagcgattaacggcctgctgaccatcggcaaaggccagcgtgtcgggctgatggc

SEQ ID NO: 345821 - DNA, 75 bp, synthetic construct
  source 1..75: mol_type = other DNA
ccaggagatgcgcgaacccgcctccctcgaactggtgcaaagccgcctgcaaattctctttcctggcgtcaaaaa

SEQ ID NO: 345822 - DNA, 75 bp, synthetic construct
  source 1..75: mol_type = other DNA
gcgttgaagcaggccgcgctggaatactgggataacccccaactgaaaagccagcagaataaatggcatcagtat

SEQ ID NO: 345823 - DNA, 75 bp, synthetic construct
  source 1..75: mol_type = other DNA
atgaaccagcgacgggaggactacgcagacaatatttatgccatctaccggaaactgaaccgggagcgccgcaac

SEQ ID NO: 345824 - DNA, 75 bp, synthetic construct
  source 1..75: mol_type = other DNA
cgcctggcgattattcagctgggaacctatgacggcactgtctataacgcccgtcaggtggtcgataccgttggg

SEQ ID NO: 345825 - DNA, 75 bp, synthetic construct
  source 1..75: mol_type = other DNA
tcgccgctgctgttagaacttaacgaaaacgatccggggatctttgtgactcagtcggtgcacaaacagcaggcg

SEQ ID NO: 345826 - DNA, 75 bp, synthetic construct
  source 1..75: mol_type = other DNA
gaaaaaatacgctgggcgttgatgcggtacgtgaggtcaccgaaaagctgaatgagcacgcacgcttaggtggtg

SEQ ID NO: 345827 - DNA, 75 bp, synthetic construct
  source 1..75: mol_type = other DNA
atgtcagttgatgcaggctggcacgcatcccgattactacaccctggctcccgaaaaagggaaaaatacgctggc

SEQ ID NO: 345828 - DNA, 75 bp, synthetic construct
  source 1..75: mol_type = other DNA
agcttgtcatcaccgatcttttactacgtattgagcattacctgcaaccgggtgttgtgttaccggttcctcatc

SEQ ID NO: 345829 - DNA, 75 bp, synthetic construct
  source 1..75: mol_type = other DNA
gctgcgcgccatccgtgacgcagagcacgcacaacgcatcagtgcaaccacaaagcatgtacgccgcaaagctga

SEQ ID NO: 345830 - DNA, 75 bp, synthetic construct
  source 1..75: mol_type = other DNA
ttgggccgttggtggagatataagtggatcacttttcatccgtcgttgacaccttggactcgtggcaataactgt

SEQ ID NO: 345831 - DNA, 75 bp, synthetic construct
  source 1..75: mol_type = other DNA
atgaaagttttgtcttttgttaaatctaaaattgcagtagcttcaacagcgctttttgtttctgcgagttctttt

SEQ ID NO: 345832 - DNA, 75 bp, synthetic construct
  source 1..75: mol_type = other DNA
gactcaagcatcaccagattcgccgtacacgccatcgcttatcagcttcctgacccagagccctcgtgaattgag

SEQ ID NO: 345833 - DNA, 75 bp, synthetic construct
  source 1..75: mol_type = other DNA
atttcgtgcaaccaaattctatagtgttagcttttacattttatattgtggtgacctttctgactgatattcagc

SEQ ID NO: 345834 - DNA, 75 bp, synthetic construct
  source 1..75: mol_type = other DNA
ctaaaattgctgtggcttcaaccgcactttttgtttctgcaagttgttttgctgctgatggcgcaacgggtagca

SEQ ID NO: 345835 - DNA, 75 bp, synthetic construct
  source 1..75: mol_type = other DNA
tgggcacgttgattgtccgttctggcattctggtttcggttcatgcgttcgccctggataatgtccgcgctgtgc

SEQ ID NO: 345836 - DNA, 75 bp, synthetic construct
  source 1..75: mol_type = other DNA
ttttattcgcaccattgccgtagcgcggatcatgatgccgacctcttacgtacgcctttctgccggacgcgagca

SEQ ID NO: 345837 - DNA, 75 bp, synthetic construct
  source 1..75: mol_type = other DNA
caaggccaaagcgtctttttttgaaaaacgcccctgcatccgtacaaaaaagggtttgcctgatgctgggttcca

SEQ ID NO: 345838 - DNA, 75 bp, synthetic construct
  source 1..75: mol_type = other DNA
gccagcagagtttcccgtcagtggtgatgaatccccaggatgcgcatagcgcttatattcgcggtgaagtggagt

SEQ ID NO: 345839 - DNA, 75 bp, synthetic construct
  source 1..75: mol_type = other DNA
cccgataaaaattgttcgctgcataaacaacactgtgttgtacagaagaatggatgggcgaacacagtcggtaaa

SEQ ID NO: 345840 - DNA, 75 bp, synthetic construct
  source 1..75: mol_type = other DNA
aataacactgtgttgtacagaagaatggatgggcgaacacagtcggtaaaaataaacgattttaatgaactgttt

SEQ ID NO: 345841 - DNA, 75 bp, synthetic construct
  source 1..75: mol_type = other DNA
agttttacggcaatatcatcaccacgcgtacttatcaggaacgcctcgatacgctggaaaaagtgcgcgatgccg

SEQ ID NO: 345842 - DNA, 75 bp, synthetic construct
  source 1..75: mol_type = other DNA
cgaatttgctggcgttgggcactacctggctggagcgcattaacggcggggatcatcctcggttcctggtgggcc

SEQ ID NO: 345843 - DNA, 75 bp, synthetic construct
  source 1..75: mol_type = other DNA
tgggcaccttaattgtccgttctggcattctggtttcggttcatgcgttcgcgctggataacgtccgcgccgtgc

SEQ ID NO: 345844 - DNA, 75 bp, synthetic construct
  source 1..75: mol_type = other DNA
atcgaaggccgcgatctcaatccgatgctgcaacatcccggtcttatcttccatccgccgctgctttatctcggc

SEQ ID NO: 345845 - DNA, 75 bp, synthetic construct
  source 1..75: mol_type = other DNA
cgatttctcggtcatttatgtcgcccaacatagctacagcctgctgtcgtgggaactcaaactggcggcggtgtg

SEQ ID NO: 345846 - DNA, 75 bp, synthetic construct
  source 1..75: mol_type = other DNA
tttgccgctggggtcgtggtttccagcgtcagccgtcaggaaatcagcctgaatttacagccgggtcagccggtg

SEQ ID NO: 345847 - DNA, 75 bp, synthetic construct
  source 1..75: mol_type = other DNA
tatggtggtttgatggtggcggcgagtgtggcgctggcgagtctactgcgcggtgagtttgatgctgccagcgcc

SEQ ID NO: 345848 - DNA, 75 bp, synthetic construct
  source 1..75: mol_type = other DNA
ctttgtgaaacagatcaagaatataaatacatgctcgaagagttacaagagtatcttcagccccgtccaggtcga

SEQ ID NO: 345849 - DNA, 75 bp, synthetic construct
  source 1..75: mol_type = other DNA
gctgttcgcactgcgcaacgggatgccgatacactgggcgtcatcttcccacggtgcagatgcacaattacctcg

SEQ ID NO: 345850 - DNA, 75 bp, synthetic construct
  source 1..75: mol_type = other DNA
agccgatcttgattactactggctacaggagcggggtagcatgtgccagccagcgtatatggtacttgatcgttc

SEQ ID NO: 345851 - DNA, 75 bp, synthetic construct
  source 1..75: mol_type = other DNA
cgtacagagctggatcgcgctgggttatcagtggttttttgtgaatagcggttttactggctggttgcagtcgct

SEQ ID NO: 345852 - DNA, 75 bp, synthetic construct
  source 1..75: mol_type = other DNA
tggcactggccgtgggccatcatcgggatattactggcctcctgggtatgcagtctggtgattgaatgggtaggg

SEQ ID NO: 345853 - DNA, 75 bp, synthetic construct
  source 1..75: mol_type = other DNA
tgagccagtggctggcatatcatcttcatgattacctgctggcaacggtttatgtggcggtggtgacgatggtca

SEQ ID NO: 345854 - DNA, 75 bp, synthetic construct
  source 1..75: mol_type = other DNA
ggataactcgcggatgaaaagcgatacccagtgggtgattgattcgatgcgggtaaaaacgccgggtcatcggac

SEQ ID NO: 345855 - DNA, 75 bp, synthetic construct
  source 1..75: mol_type = other DNA
ggcatttattcgccagcaaccggagcgttttttctctgcccccggaagttttcattattcgaatgtacgcggtga

SEQ ID NO: 345856 - DNA, 75 bp, synthetic construct
  source 1..75: mol_type = other DNA
accgaatcttttcttacagtgacaaatcattaacgccaacgcaattaagggaaacagtagagttagcagccaaga

SEQ ID NO: 345857 - DNA, 75 bp, synthetic construct
  source 1..75: mol_type = other DNA
gtcgccagaatattttctgaccaccaataatattacccagatttttgtgcaaagctccgtgacggtactgatcgg

SEQ ID NO: 345858 - DNA, 75 bp, synthetic construct
  source 1..75: mol_type = other DNA
ctgtttaattatcgcggcgataatccgttttatcaggcgttaaataaagaattacatattaaacgacgggcagtt

SEQ ID NO: 345859 - DNA, 75 bp, synthetic construct
  source 1..75: mol_type = other DNA
taaggttcagtttgacgagcatgggattacgattggtaaagatattcatatagataagcatcgttgtcagcgttg

SEQ ID NO: 345860 - DNA, 75 bp, synthetic construct
  source 1..75: mol_type = other DNA
cctttcctggcccactgcagtctaccccaatctgttgttgttgccggcggctgtcctgttgggtatcgctgtgac

SEQ ID NO: 345861 - DNA, 75 bp, synthetic construct
  source 1..75: mol_type = other DNA
gacgaccgcgcttcagggactggcgggtggtaatttagcgggtgctctggccggagcttctgcaccggaactggc

SEQ ID NO: 345862 - DNA, 75 bp, synthetic construct
  source 1..75: mol_type = other DNA
tcgcgtggatatcggtaacttgcattatattgataccggcgccgtcttcggaggtgagttgactcttgtgcaact

SEQ ID NO: 345863 - DNA, 75 bp, synthetic construct
  source 1..75: mol_type = other DNA
cgatagatgcgctggattcacagcagatgtctttgtggtttatgaatggcggtgactggtttgccacactgaccg

SEQ ID NO: 345864 - DNA, 75 bp, synthetic construct
  source 1..75: mol_type = other DNA
atgaatctggcggatgtcgataaaaccggagccgtgcagccggggagtcgggtcacctggcgctataaattcggc

SEQ ID NO: 345865 - DNA, 75 bp, synthetic construct
  source 1..75: mol_type = other DNA
atggcaacgaatgaaagcatcatgacgctaccgctggcgagtaaatttaaagccgaagcgcgggcaatggctgac

SEQ ID NO: 345866 - DNA, 75 bp, synthetic construct
  source 1..75: mol_type = other DNA
gtccgaaagccgtatcagctggtatggcatacgatggcagaaacccgggcgatgaaggcgacatcgatcgcatac

SEQ ID NO: 345867 - DNA, 75 bp, synthetic construct
  source 1..75: mol_type = other DNA
ccgccgtcaccggcaaaatcgacctacgcaactggaccgcccccatctccgaagcggaaacacccacggaggcca

SEQ ID NO: 345868 - DNA, 75 bp, synthetic construct
  source 1..75: mol_type = other DNA
gtcactcttggaaatattcaaacacttatgaacagcttgtggctcttctcaagaatcgtgggtatttcaacttta

SEQ ID NO: 345869 - DNA, 75 bp, synthetic construct
  source 1..75: mol_type = other DNA
tttagggccgatgctttacccgaaggcatggaagaagatgatctctgcgatgaccaatttgcccgataatatttt

SEQ ID NO: 345870 - DNA, 75 bp, synthetic construct
  source 1..75: mol_type = other DNA
aaatcctgatgtgccgatgaaagattctggggttgagtggttggacgaaatccctgaacactggaggatatgcaa

SEQ ID NO: 345871 - DNA, 75 bp, synthetic construct
  source 1..75: mol_type = other DNA
gagtttcattaggtgactttaaaacaaccaagtttatatttcccccattgggtgaagcacaatcaatcgtcaacg

SEQ ID NO: 345872 - DNA, 75 bp, synthetic construct
  source 1..75: mol_type = other DNA
agtgaccaaagggctaaatcctgatgtgccgatgaaagattctggggttgagtggttgggtgaagttccgaaaca

SEQ ID NO: 345873 - DNA, 75 bp, synthetic construct
  source 1..75: mol_type = other DNA
aaatgatacgaaaacggagcgaaaagagcttttctgatggtggtgatgggcttttgaaagtggttgggcgaggcg

SEQ ID NO: 345874 - DNA, 75 bp, synthetic construct
  source 1..75: mol_type = other DNA
gatgcaacccagcaactggggaaattttgattcccgctatgtgaaagatgttcgcctgggtacgcgagttgttca

SEQ ID NO: 345875 - DNA, 75 bp, synthetic construct
  source 1..75: mol_type = other DNA
actgggggaattttgattcacgctatgtaaaagatgttcgcctgggtacgcgtgttgttcaattgatggcgcgtg

SEQ ID NO: 345876 - DNA, 75 bp, synthetic construct
  source 1..75: mol_type = other DNA
tgatggcgatgatccggctgtgttcagaccaatacaaaaatacatcaatggcacatggtataacgttgcacaggt

SEQ ID NO: 345877 - DNA, 75 bp, synthetic construct
  source 1..75: mol_type = other DNA
gcgccacgccggaagatgttgagcagttggctggcgcgttaaaggagcgcggggtaagtcgattgatatttccgg

SEQ ID NO: 345878 - DNA, 75 bp, synthetic construct
  source 1..75: mol_type = other DNA
gacagtaacggcatgttgagcgaaaccggctgggaaaaattactcccggtgtgcgacggcgcgatgctcgatctc

SEQ ID NO: 345879 - DNA, 75 bp, synthetic construct
  source 1..75: mol_type = other DNA
ctgtttttgcagggctgcaatctgcgctgcaaaaactgtcacaatccgtggacgatgggacgttgcaatgactgt

SEQ ID NO: 345880 - DNA, 75 bp, synthetic construct
  source 1..75: mol_type = other DNA
gaaaactccattgttctgggagataacgacaccggatttaggcaagatggagatggtattattagcttctattca

SEQ ID NO: 345881 - DNA, 75 bp, synthetic construct
  source 1..75: mol_type = other DNA
atcagggagtagctccagatgggagtggcgcatttgcagaccagttaaataatgccaccgcgccttttgttcaga

SEQ ID NO: 345882 - DNA, 75 bp, synthetic construct
  source 1..75: mol_type = other DNA
ctggtgcgccttaacggcatcctgctggagagcgtcggctgcccgctaatgaccgggcagctgtgccgcatcgaa

SEQ ID NO: 345883 - DNA, 75 bp, synthetic construct
  source 1..75: mol_type = other DNA
gtctattcgcaatggacaggggtatccgggtgctgtcagctttggctatttactgacagaacaaatgggatttcc

SEQ ID NO: 345884 - DNA, 75 bp, synthetic construct
  source 1..75: mol_type = other DNA
aggcctcgttcagctaaccagtgccactgacagccccagtgaaacgctggcagccaccgcaaaagcggtgaaaat

SEQ ID NO: 345885 - DNA, 75 bp, synthetic construct
  source 1..75: mol_type = other DNA
tttttgtggaaagataaagatggtgatggtgttcatattaataatggttcaagcggtggcggtgatttcgttttt

SEQ ID NO: 345886 - DNA, 75 bp, synthetic construct
  source 1..75: mol_type = other DNA
cggtgctgtttatcgaagggataacggtgagcggcggcgaagccacgacccagctgccgtttgtggtggcgctgt

SEQ ID NO: 345887 - DNA, 75 bp, synthetic construct
  source 1..75: mol_type = other DNA
taattcttaaatctgtaaaagaactggcagctattagcgatgactcaataatcaatgtcagtgccttatgcagaa

SEQ ID NO: 345888 - DNA, 75 bp, synthetic construct
  source 1..75: mol_type = other DNA
atgaatacagaaaattcacaggcattaattcttaaatctgtaaaagaactggcagctattagcgatgactcaata

SEQ ID NO: 345889 - DNA, 75 bp, synthetic construct
  source 1..75: mol_type = other DNA
gcgccagcgtgtctttcagactgggtgcagcactttcgaagcaattcaatactattgctctaaaaacaataataa

SEQ ID NO: 345890 - DNA, 75 bp, synthetic construct
  source 1..75: mol_type = other DNA
atagcacgtcgtcagtgatggggagcatggctggtacaggccttggctataacattggtgcttcaattactaata

SEQ ID NO: 345891 - DNA, 75 bp, synthetic construct
  source 1..75: mol_type = other DNA
ttttagaaattgatgcaaataatgtgcgccagcgtgtctttcagactgggtgcagcacttttgaagcaattacat

SEQ ID NO: 345892 - DNA, 75 bp, synthetic construct
  source 1..75: mol_type = other DNA
ttattcttaaagctgtaaaagaactggcagctattagcgaggaatcagttataaacacatcggcgctttgccgcc

SEQ ID NO: 345893 - DNA, 75 bp, synthetic construct
  source 1..75: mol_type = other DNA
ggtaagcggcggcgaagccacgacccaactgccgtttgtagtggcgctgtttactgccatcaaaaacgatccgca

SEQ ID NO: 345894 - DNA, 75 bp, synthetic construct
  source 1..75: mol_type = other DNA
ggggagtgcgtgccgcagtgtccacatcaggcgttgcagattgtcgacagcaaagtggtgtggagcgttgcggtc

SEQ ID NO: 345895 - DNA, 75 bp, synthetic construct
  source 1..75: mol_type = other DNA
gggagcgagtgccatcaacagttaaccggacgcgataatcagcaaattaagcgcagcatcagcctgcttgcagag

SEQ ID NO: 345896 - DNA, 75 bp, synthetic construct
  source 1..75: mol_type = other DNA
tcaccgggtgctcttattgcgggtggcgtccgttataacaccgatggaaatatatttggtgggtgctggggtcaa

SEQ ID NO: 345897 - DNA, 75 bp, synthetic construct
  source 1..75: mol_type = other DNA
gcgccacgccggaagacgttgagctgctggctgatgcgttacgggagcgcggggtgagccgcttaatattcccgg

SEQ ID NO: 345898 - DNA, 75 bp, synthetic construct
  source 1..75: mol_type = other DNA
gcggcgtttatcaagggacttggcgatgttccggtacgcctgaacgcgtttcatgcccacggcgtgtatggcgag

SEQ ID NO: 345899 - DNA, 75 bp, synthetic construct
  source 1..75: mol_type = other DNA
gcgtgaacgtactggcaaaagataacaccatgaagattcaggttggtgcgaacgatggtcagactatatccatcg

SEQ ID NO: 345900 - DNA, 75 bp, synthetic construct
  source 1..75: mol_type = other DNA
cggttgcaacggcgcttgatgacgacactgcagcaacagccacagggaacaaggttgttgttgaattatctacag

SEQ ID NO: 345901 - DNA, 75 bp, synthetic construct
  source 1..75: mol_type = other DNA
gtttccggtcagacccagttcaacggcgtgaacgtgctggcgaaagacggttcgatgaagattcaggttggcgcg

SEQ ID NO: 345902 - DNA, 75 bp, synthetic construct
  source 1..75: mol_type = other DNA
aaaagctggtaaagcatgggataaagacatttacagcgcgtggaagcgtcagggaagcaatgctgaaaagttatc

SEQ ID NO: 345903 - DNA, 75 bp, synthetic construct
  source 1..75: mol_type = other DNA
caaaaagcatacacaccaagtggcgaaaatgtgaaagttgacactacaacttatactggtggcactgctatcaat

SEQ ID NO: 345904 - DNA, 75 bp, synthetic construct
  source 1..75: mol_type = other DNA
agtggtactgttgcttataaagatgcaaaagatgctggtggcgatccgatcaaactgacaggtatagataatgat

SEQ ID NO: 345905 - DNA, 75 bp, synthetic construct
  source 1..75: mol_type = other DNA
gctgggcgcgctgggtctggtcactaacgccgtggtgctgtggaactcactctatatgcaggaagcactttcgca

SEQ ID NO: 345906 - DNA, 75 bp, synthetic construct
  source 1..75: mol_type = other DNA
tgctgttcgaaatcgacgccagaaccggttttacccgtgagtttacgcacgtcagtgaatcagaagccagagcaa

SEQ ID NO: 345907 - DNA, 75 bp, synthetic construct
  source 1..75: mol_type = other DNA
ctgcgtaatctggcccgctacgccggcatggcatcagcaaggtatatcgccagaatgccggaagcacggcggctg

SEQ ID NO: 345908 - DNA, 75 bp, synthetic construct
  source 1..75: mol_type = other DNA
gcaacttacgatgttagtgcagatggtaaaacgataacggagactgcttctggtaacaataaagtcatgtatctg

SEQ ID NO: 345909 - DNA, 75 bp, synthetic construct
  source 1..75: mol_type = other DNA
gcgtgaacgtgctggctaaagatggttcgatgaaaattcaggttggcgcgaatgatgggcaaactgtttccattg

SEQ ID NO: 345910 - DNA, 75 bp, synthetic construct
  source 1..75: mol_type = other DNA
gcgtgaactgaccgtacaggcgacaaccggaacgaactccgaatctgacctgtcctctatccaggacgaaatcaa

SEQ ID NO: 345911 - DNA, 75 bp, synthetic construct
  source 1..75: mol_type = other DNA
agagagggttgcatagtactggagttgacccaatcaaccttcacaggcatcgataaaaatgaacgctactataaa

SEQ ID NO: 345912 - DNA, 75 bp, synthetic construct
  source 1..75: mol_type = other DNA
aaggaactcgccacaacgcgcttgatgatgccatccaccaagccaaatacgtttcagcgatctggaaaaagttag

SEQ ID NO: 345913 - DNA, 75 bp, synthetic construct
  source 1..75: mol_type = other DNA
tattaaacgtttacgcgccaaagttgatgccccattcgacgttaagttgcttcataccgttcgcggcatggggta

SEQ ID NO: 345914 - DNA, 75 bp, synthetic construct
  source 1..75: mol_type = other DNA
atctcgacctgctggctcgtcgcgtatttcgcgccggaacacggctggagctgaccgcgaaagagttttccctgt

SEQ ID NO: 345915 - DNA, 75 bp, synthetic construct
  source 1..75: mol_type = other DNA
gcctcagcctgtatcattgactgtgactttgcctatcagtgagttctatacgaaagagtgtcaaaaaaatgaact

SEQ ID NO: 345916 - DNA, 75 bp, synthetic construct
  source 1..75: mol_type = other DNA
gtttaaggtcaaattgtatgtgccgtttgctcgccaggggctggaattgatgtatcgcctgcgcggtcttttctt

SEQ ID NO: 345917 - DNA, 75 bp, synthetic construct
  source 1..75: mol_type = other DNA
aaacaatgggcaataaaccaaacgcccctatcgtctccatcggtgcggttttttttgagccctcaactggcgaac

SEQ ID NO: 345918 - DNA, 75 bp, synthetic construct
  source 1..75: mol_type = other DNA
caggtgaccaaactgttgttagcgattttggcaagcacagtggtgatattgagtcaatgtcacgaaattctggta

SEQ ID NO: 345919 - DNA, 75 bp, synthetic construct
  source 1..75: mol_type = other DNA
tatttggcagtaatctggtcgcgaaaagtacggattttttgtcacaaaatcctcagattacgacgctgttctccg

SEQ ID NO: 345920 - DNA, 75 bp, synthetic construct
  source 1..75: mol_type = other DNA
aaaactgggatgaccattatcctgatgaagtatcgaaagcactgtcagcaatcagcaaagccattggagatgagt

SEQ ID NO: 345921 - DNA, 75 bp, synthetic construct
  source 1..75: mol_type = other DNA
tgatactgttggccagtctggtcgacattccagcgatagcagacatgatataagtagtcaggccgctaaagattt

SEQ ID NO: 345922 - DNA, 75 bp, synthetic construct
  source 1..75: mol_type = other DNA
taaagctgaattcggtgggaggatgtcggcgagagggacagcaagttctggatctcaggacaatactactgagtc

SEQ ID NO: 345923 - DNA, 75 bp, synthetic construct
  source 1..75: mol_type = other DNA
cgatattttcctcaatcataagtactcttttgaagaattactgaattcacctgacccgtataccctgatttttgc

SEQ ID NO: 345924 - DNA, 75 bp, synthetic construct
  source 1..75: mol_type = other DNA
cgtcggcggatcctgacgcagctaaaccggggagaaggccgccatgctgtggcgagggcgatctgctacgggcag

SEQ ID NO: 345925 - DNA, 75 bp, synthetic construct
  source 1..75: mol_type = other DNA
gccagcgtgttgatggcgttggggatgatgatggtgccccccgcgaccattgctctaccatttaaactgatgctg

SEQ ID NO: 345926 - DNA, 75 bp, synthetic construct
  source 1..75: mol_type = other DNA
attctcttccagcatgtttacgtgttttaggttatgcaacaccattatcaagaaagcaaaaagaattcatcatga

SEQ ID NO: 345927 - DNA, 75 bp, synthetic construct
  source 1..75: mol_type = other DNA
gattcacgctgatgccgcaccgaaccgcagtgcgactggcgcttccgtatgggtgctctctaaccgtcgtgccaa

SEQ ID NO: 345928 - DNA, 75 bp, synthetic construct
  source 1..75: mol_type = other DNA
ttgccggtaactgtgccgacgcaatagcctattatcaacgcacgttggacgcggaactgctgtataaaatcagct

SEQ ID NO: 345929 - DNA, 75 bp, synthetic construct
  source 1..75: mol_type = other DNA
atgcgtcgtttgttgtctgtcgcccctgtccttctctggctggttacgcccctcgccttcgcgcaactgccaggt

SEQ ID NO: 345930 - DNA, 75 bp, synthetic construct
  source 1..75: mol_type = other DNA
agataggcttcacgattttcattccttttttgattatcgacctggtgattgccagcgtgttgatggcattgggga

SEQ ID NO: 345931 - DNA, 75 bp, synthetic construct
  source 1..75: mol_type = other DNA
tggtgctgaatcagtgagttcacctgatgcctcctctttaattaaagaaaccagaccacggaacctagcatttgc

SEQ ID NO: 345932 - DNA, 75 bp, synthetic construct
  source 1..75: mol_type = other DNA
ttacttatacctctggtggaagaaatggtgctgaatcagtgagttcacctgatgcctcctctttaattaaagaaa

SEQ ID NO: 345933 - DNA, 75 bp, synthetic construct
  source 1..75: mol_type = other DNA
cggtgaatttattcgtggctgggatgatggacgtggagtggatgcggggcgagccttgctaagtcttcaggatga

SEQ ID NO: 345934 - DNA, 75 bp, synthetic construct
  source 1..75: mol_type = other DNA
tcagtctgacccctatttaagccaggcggtgctggatttacagttcggtcattcccagcgggtagggtatgatgt

SEQ ID NO: 345935 - DNA, 75 bp, synthetic construct
  source 1..75: mol_type = other DNA
attgatcgcaagttgcggctcatgctctctaggagagaagagtttgaaggctcgcttaagacatctaatcatgac

SEQ ID NO: 345936 - DNA, 75 bp, synthetic construct
  source 1..75: mol_type = other DNA
atcctccagactggtcgcaggttactaaggctggttggaatatgttggacgctatatcagaaaaagttcctagag

SEQ ID NO: 345937 - DNA, 75 bp, synthetic construct
  source 1..75: mol_type = other DNA
ggaatgcaatttcccgataccgccatcgcccacgccaatgtgcgcattgccggaagcgacatcatgatgagcgat

SEQ ID NO: 345938 - DNA, 75 bp, synthetic construct
  source 1..75: mol_type = other DNA
tgcaggcagctctggatcatctccgggcgcagggtgaaacactgaatgatgaagatatcgcacgcctctccccgc

SEQ ID NO: 345939 - DNA, 75 bp, synthetic construct
  source 1..75: mol_type = other DNA
tctcagtgatggagcacctaaaaagaggccctgtcactatcagcggccccgcattcactgaagcacttgaacgtt

SEQ ID NO: 345940 - DNA, 75 bp, synthetic construct
  source 1..75: mol_type = other DNA
cgctgggtcatccatcagacggaactaaagcagcagaacaactggctacgcggcttgatgacacatggaaatcag

SEQ ID NO: 345941 - DNA, 75 bp, synthetic construct
  source 1..75: mol_type = other DNA
ctcgtgcggcgaagaaaacggggcagaaaaaacggctcaggacgcttaaagatcttgatcgtgctgcgctaatat

SEQ ID NO: 345942 - DNA, 75 bp, synthetic construct
  source 1..75: mol_type = other DNA
tggagcacctaaaaagaggccctgtcactatcagcggccccgcattcactgaagcacttgaacgttacactcgcc

SEQ ID NO: 345943 - DNA, 75 bp, synthetic construct
  source 1..75: mol_type = other DNA
aacgggatctggccttcattaaccaacgacggggcaaacataataggctgggcattgcgcttcagctcaccacag

SEQ ID NO: 345944 - DNA, 75 bp, synthetic construct
  source 1..75: mol_type = other DNA
atgatgagcgatgccatgccgtcaggaaaagccagctactccggctttacgctggtgctcgattcgcaacaggtc

SEQ ID NO: 345945 - DNA, 75 bp, synthetic construct
  source 1..75: mol_type = other DNA
ttgccggtaactgtgccgacgccatagcctattaccaacgcacgttagatgcggaactgctctataaaatcagct

SEQ ID NO: 345946 - DNA, 75 bp, synthetic construct
  source 1..75: mol_type = other DNA
gctataccgtcaggaaaagccagctactccggctttacgctggtgctcgattcgcaacaggtcgaagaaggaaaa

SEQ ID NO: 345947 - DNA, 75 bp, synthetic construct
  source 1..75: mol_type = other DNA
ctggatatgcttattctggatatcacgcgttctgcaaaaaatatcgggcagaaaaagcggctcaggacccttaaa

SEQ ID NO: 345948 - DNA, 75 bp, synthetic construct
  source 1..75: mol_type = other DNA
acggctaccagcctgctcggcctgagtcctcagcagacgtatcaggagctactgggtctgcaggaaagccgtatc

SEQ ID NO: 345949 - DNA, 75 bp, synthetic construct
  source 1..75: mol_type = other DNA
gagaagcatacagatatgcttgaaataacagagcatccggtagaggtcggggccgctgtcgctgatcatgcctat

SEQ ID NO: 345950 - DNA, 75 bp, synthetic construct
  source 1..75: mol_type = other DNA
ctggggtggcggttacggcaacatcttccaggatgagcgtgacgtgaaattcatggttatcgcgccgttcactat

SEQ ID NO: 345951 - DNA, 75 bp, synthetic construct
  source 1..75: mol_type = other DNA
agccgcagttgggcatcagcgatccgtatcaactcaccgaagaacagtaccaggcggtgctgaaagtgctgcgcg

SEQ ID NO: 345952 - DNA, 75 bp, synthetic construct
  source 1..75: mol_type = other DNA
ccggaagggtgtaaagccagtccgttattaggcgaaaaggttgtgaaaccaacggttttaactatttcgacaaaa

SEQ ID NO: 345953 - DNA, 75 bp, synthetic construct
  source 1..75: mol_type = other DNA
atgttcaaactgcacttcaccgaatacgacaaccactccgacatcccaagctggggcggcggttacggtaacatc

SEQ ID NO: 345954 - DNA, 75 bp, synthetic construct
  source 1..75: mol_type = other DNA
atgctaaaccggcgacctggcagaacagcccggatgcgtactacgacaaaaaccggactattgaagagtctgcct

SEQ ID NO: 345955 - DNA, 75 bp, synthetic construct
  source 1..75: mol_type = other DNA
ctcgattttcagtctggttatgctgctgatatgttcggccttgatattgctgcgtttacggcgattgaaatggcg

SEQ ID NO: 345956 - DNA, 75 bp, synthetic construct
  source 1..75: mol_type = other DNA
gcggcaaagtttatggcacgccgtatcagtgggggccgaacctgctgatgtacaacaccaaaacctttccgacgc

SEQ ID NO: 345957 - DNA, 75 bp, synthetic construct
  source 1..75: mol_type = other DNA
cagcgtgaaccagcgttactggctggcgctggcgtgctggcgtctgagagtgaagggatgcgctttgtgcgcggc

SEQ ID NO: 345958 - DNA, 75 bp, synthetic construct
  source 1..75: mol_type = other DNA
gacaatgcaaaagttgattccggcggattcgctccgtttgcagttctacgacggcacgcgctggcaggagagctg

SEQ ID NO: 345959 - DNA, 75 bp, synthetic construct
  source 1..75: mol_type = other DNA
atcaggccaacgcactgaaaggcgaaggtcaaccgatagccactgtcttcccgaaagagggcgtcaccggatggg

SEQ ID NO: 345960 - DNA, 75 bp, synthetic construct
  source 1..75: mol_type = other DNA
atatcaggcagtgctgaaagtactgcgcgatcaacatggtttgatccatcgctactggcatgacaccactgtgca

SEQ ID NO: 345961 - DNA, 75 bp, synthetic construct
  source 1..75: mol_type = other DNA
tacaacactaaaaccttcccgacgccgccggatagctggcaagtggtttttgttgagcaaaatctgccggacggc

SEQ ID NO: 345962 - DNA, 75 bp, synthetic construct
  source 1..75: mol_type = other DNA
gataaagttgacgatcgcagcgtcaacgacctttacgacggcactgcctggctgcaagcgttgacctttggttac

SEQ ID NO: 345963 - DNA, 75 bp, synthetic construct
  source 1..75: mol_type = other DNA
gcggaatggatgcaaatgagcaatctgctgctggataaaccgcatcacgaaacgccgcgcggccttaagtttgag

SEQ ID NO: 345964 - DNA, 75 bp, synthetic construct
  source 1..75: mol_type = other DNA
gtcacgataacaaagccgttgcgactgagttgctgagtgtggcgcaaagcctgcgtgggtttgcctacctgtcag

SEQ ID NO: 345965 - DNA, 75 bp, synthetic construct
  source 1..75: mol_type = other DNA
atctgcccagacacagctcggcgttaaaccgcgcattctcggcgtacctggtcacgataacaaagccgttgcgac

SEQ ID NO: 345966 - DNA, 75 bp, synthetic construct
  source 1..75: mol_type = other DNA
gtttatggcagcgcaacccgataatctgctcctggcgaccgcgccgcgctactgtcagtactacaatcaactcca

SEQ ID NO: 345967 - DNA, 75 bp, synthetic construct
  source 1..75: mol_type = other DNA
atctcaatttgctgctttgtctgcaactgctgatgcaggaacgcagtgtgaccaaagcagcaaagcgaatgaatg

SEQ ID NO: 345968 - DNA, 75 bp, synthetic construct
  source 1..75: mol_type = other DNA
gctttggcataaacggaacagccataatccgaagatcgtctggttacgggaaaccattaaaaatctttacgcgtc

SEQ ID NO: 345969 - DNA, 75 bp, synthetic construct
  source 1..75: mol_type = other DNA
atattgataagatgctttctctgccgcgtcaagaatcgagactccgaccagaggccaaagaacgtatacgtgatt

SEQ ID NO: 345970 - DNA, 75 bp, synthetic construct
  source 1..75: mol_type = other DNA
ttctcactccacctggaacgctaatctcgattttcagtctggctatgccgctgatatgttcggtctggatattgc

SEQ ID NO: 345971 - DNA, 75 bp, synthetic construct
  source 1..75: mol_type = other DNA
cggcaccgcctggctgcaagcgttgacctttggttaccgggcggctgacgtagtggatttgcgcctcgaaggcac

SEQ ID NO: 345972 - DNA, 75 bp, synthetic construct
  source 1..75: mol_type = other DNA
atctgcccagacacagctcggcgttaaaccacgcattctcggcgtgccgggtcacgataacaaagccgttgctac

SEQ ID NO: 345973 - DNA, 75 bp, synthetic construct
  source 1..75: mol_type = other DNA
agcctggtcagtcagggctatctcattggtggtgattgctggctggacgagtcggtgaacgataaagacacgctg

SEQ ID NO: 345974 - DNA, 75 bp, synthetic construct
  source 1..75: mol_type = other DNA
ggctgacaccatggcggaagcgcatatgtgggcagttgatatgccgctgaatccatcactggcccgcgacattat

SEQ ID NO: 345975 - DNA, 75 bp, synthetic construct
  source 1..75: mol_type = other DNA
ggtattagttagtgccggtatcctggggcaatggccgattggtcgtctggcggataaatttggtcgcctgttggt

SEQ ID NO: 345976 - DNA, 75 bp, synthetic construct
  source 1..75: mol_type = other DNA
cttatattttaaataaaaaaaaacaaagcgatattacaaactgggattggacgtggataaaaaaaggtataaagc

SEQ ID NO: 345977 - DNA, 75 bp, synthetic construct
  source 1..75: mol_type = other DNA
aaataatatcctggatgatattggtggttataaagaaagagataaaaaatccgaaatggtagatttacttatatt

SEQ ID NO: 345978 - DNA, 75 bp, synthetic construct
  source 1..75: mol_type = other DNA
aaggggtatggaccacctgatcttcttggtcgaataggatttgtggctctttgtggaagagtttatgagggtaaa

SEQ ID NO: 345979 - DNA, 75 bp, synthetic construct
  source 1..75: mol_type = other DNA
atgcagcaaacgatgagttttctgacccacgatctgacccaaataatgccgcgtccggtaagaagcgatcagggc

SEQ ID NO: 345980 - DNA, 75 bp, synthetic construct
  source 1..75: mol_type = other DNA
cgttactggaaatactggtggcgatagccatttttgcctcgctggcactgatggcgcagcaggtgactaacggcg

SEQ ID NO: 345981 - DNA, 75 bp, synthetic construct
  source 1..75: mol_type = other DNA
cgtcatggtacacctagcgacgttgaaggacagaagcttttagtgaaaaaaggccagataatttttggcaagcgt

SEQ ID NO: 345982 - DNA, 75 bp, synthetic construct
  source 1..75: mol_type = other DNA
cgcgggagctgttaagctcgctaccgttagccattgattatgaagtgctgtttagtgatgtgccctgcgtctggt

SEQ ID NO: 345983 - DNA, 75 bp, synthetic construct
  source 1..75: mol_type = other DNA
accaaagcggcgaagcggatgaacgtgaccccttcggcggtgagtaagtcgctggcaaagttaagagcgtggttt

SEQ ID NO: 345984 - DNA, 75 bp, synthetic construct
  source 1..75: mol_type = other DNA
cagcagtgacacaggtctcaaagatatacaacaattagtagagagtaataattttgaagagctcaacctagaaaa

SEQ ID NO: 345985 - DNA, 75 bp, synthetic construct
  source 1..75: mol_type = other DNA
gacaccgcgcggcctgaagtttgagctggcagcagaatcaccgctaatgatgatcatgcttaatgcgctgtcgaa

SEQ ID NO: 345986 - DNA, 75 bp, synthetic construct
  source 1..75: mol_type = other DNA
ccctgcaccgacggaggcgcacgcgatggcacagcacgccatgaaactgtacaacgaggcgacgggaggtaaagc

SEQ ID NO: 345987 - DNA, 75 bp, synthetic construct
  source 1..75: mol_type = other DNA
agccgggaaccggacgtgatgtccgccctgcaccgacggaggcgcacgcgatggcacagcacgccatgaaactgt

SEQ ID NO: 345988 - DNA, 75 bp, synthetic construct
  source 1..75: mol_type = other DNA
tggaggaatgcgttttgtgcgcggcggtgtggttaacccgttgatgcgtctgccacgcagcaatctgctcaccgt

SEQ ID NO: 345989 - DNA, 75 bp, synthetic construct
  source 1..75: mol_type = other DNA
ctggcctccttcatttttgccgctggctgtgccggccttggcctgatgattggattctggagctggttggcttgg

SEQ ID NO: 345990 - DNA, 75 bp, synthetic construct
  source 1..75: mol_type = other DNA
gtgagaaggactcgcgctggtttcacgttactggaaatgctggtggcaattgccatttttgcctcgctggcactg

SEQ ID NO: 345991 - DNA, 75 bp, synthetic construct
  source 1..75: mol_type = other DNA
ctcgaacggttagcctggccgctgaccgatgccgcaggcagcgtgaagccgacaatgcaaaagttgattccggcc

SEQ ID NO: 345992 - DNA, 75 bp, synthetic construct
  source 1..75: mol_type = other DNA
ctctctttatggtctgatgccgctgtatctcaatcatcaggggatcagcaatgccagtattggattctggatggc

SEQ ID NO: 345993 - DNA, 75 bp, synthetic construct
  source 1..75: mol_type = other DNA
tgctgacagggtatgtcattaaacgcattggctttaaccgcagctattatctggcctccttcatttttgccgctg

SEQ ID NO: 345994 - DNA, 75 bp, synthetic construct
  source 1..75: mol_type = other DNA
cgggcaatggccaattggccgtctggcggataaatttggtcgtctgctggtactgcgtgttcaggtatttgtcgt

SEQ ID NO: 345995 - DNA, 75 bp, synthetic construct
  source 1..75: mol_type = other DNA
tctgaaggaccgcttcgcccatgccagacagttcgctgcttttgcgggtctgacaccacggcgttatgaatcagg

SEQ ID NO: 345996 - DNA, 75 bp, synthetic construct
  source 1..75: mol_type = other DNA
ttcgccaaaaaaacgctgctggtaacgaccggttccgaagcggtggagaacgcggtgaaaatcgcccgcgccgcc

SEQ ID NO: 345997 - DNA, 75 bp, synthetic construct
  source 1..75: mol_type = other DNA
gctgtacgtatgatcctgcattcgccgcaatggggcgagattgaacgtatctggttgttacgcgggccgcaatta

SEQ ID NO: 345998 - DNA, 75 bp, synthetic construct
  source 1..75: mol_type = other DNA
cggacacgatcaaaaactaaacctcatgcagcaaacgatgagttttctgacccacgatctgacccaaatgatgcc

SEQ ID NO: 345999 - DNA, 75 bp, synthetic construct
  source 1..75: mol_type = other DNA
aatggtagccaccagtaagacgagtggggacgggcgttccgcgaccgtctggcggctaatggcaagaaaggaaag

SEQ ID NO: 346000 - DNA, 75 bp, synthetic construct
  source 1..75: mol_type = other DNA
agacagttcgctgcttttgcgggtctgacaccacggcgttatgaatcaggtagcagtgtgagaggggcgagccgg

SEQ ID NO: 346001 - DNA, 75 bp, synthetic construct
  source 1..75: mol_type = other DNA
ttggtgtacgaatggaattcacccgcggtgatatgctgaaggtctgcccgaaatttgtcacgtcacttgccgatt

SEQ ID NO: 346002 - DNA, 75 bp, synthetic construct
  source 1..75: mol_type = other DNA
tgcttttcactgttgcatccttctccgcctccgccggtaactgggctgtcaaaaacggctggtgccagaccatga

SEQ ID NO: 346003 - DNA, 75 bp, synthetic construct
  source 1..75: mol_type = other DNA
aagtaaaaggcaataaggttgagtttgaagtgttcaatcctgaagaccgtgcgtacgacaaagtgaccgtcacgg

SEQ ID NO: 346004 - DNA, 75 bp, synthetic construct
  source 1..75: mol_type = other DNA
tggctcaatagctggtaatcctgctcatgcactggatgataagactatgaacgccatcattcagaactgcacgac

SEQ ID NO: 346005 - DNA, 75 bp, synthetic construct
  source 1..75: mol_type = other DNA
attttcaatacagatgcatctttttgggtgaaactgcaagagctacatgaggcatggtttaataaacaaaagtaa

SEQ ID NO: 346006 - DNA, 75 bp, synthetic construct
  source 1..75: mol_type = other DNA
cgcctccgccggcaactgggctgtcaaaaatggctggtgtcagaccatgacggaggatggtcaggcgctggtgat

SEQ ID NO: 346007 - DNA, 75 bp, synthetic construct
  source 1..75: mol_type = other DNA
tgacttggagcttggcattggtcgctatcacgcctgggaagacgagaatcgagccagaaactatggtagccgagt

SEQ ID NO: 346008 - DNA, 75 bp, synthetic construct
  source 1..75: mol_type = other DNA
ttctgtctgcggcagtcctgtcatcagcggccaatggcattgacctgagcggaacagtcttcgacaaagcggcga

SEQ ID NO: 346009 - DNA, 75 bp, synthetic construct
  source 1..75: mol_type = other DNA
atctgcgtttcaaaaaaaataagagatatccaccgcagtatattttagcatatagtttctatatgtgtttcttca

SEQ ID NO: 346010 - DNA, 75 bp, synthetic construct
  source 1..75: mol_type = other DNA
tgccggtttttccccgaaacagacgaccactattaataaagattccgtcctgcaggctgcccgacaggcatacgc

SEQ ID NO: 346011 - DNA, 75 bp, synthetic construct
  source 1..75: mol_type = other DNA
aatttaagagccaattatataagaatcgctgatacaactacgccaggtaatgtgaaggcaatagcaacaattaca

SEQ ID NO: 346012 - DNA, 75 bp, synthetic construct
  source 1..75: mol_type = other DNA
gagttatggagtgcattgctcccgcgaaagacagcgttaacggcgcggtaattaagcaggctacacaaaacgcat

SEQ ID NO: 346013 - DNA, 75 bp, synthetic construct
  source 1..75: mol_type = other DNA
caccatctgatattaacaaggttaaagagactcattctgatgacgagttaaaccgtttgctggaagctgttaatc

SEQ ID NO: 346014 - DNA, 75 bp, synthetic construct
  source 1..75: mol_type = other DNA
ggtagtgaggcgctgaacatcggaaaactggtacttacgaaggcttccggggtatttgctgacggtacacctttt

SEQ ID NO: 346015 - DNA, 75 bp, synthetic construct
  source 1..75: mol_type = other DNA
aaacacggccatgaggcggcggaagtgtcggattacctgctattgcaaattctcaatcgttttggccccttactg

SEQ ID NO: 346016 - DNA, 75 bp, synthetic construct
  source 1..75: mol_type = other DNA
gctgacgcgcatcacggcgctgcatcccgatggccgggtcgatattgacaaagatttgatcccgccggtggcgaa

SEQ ID NO: 346017 - DNA, 75 bp, synthetic construct
  source 1..75: mol_type = other DNA
cacttcattgatgagcaagagctgcttgatctttctaatgagcaaatcaatgcggaacaatcaaacgcactcgaa

SEQ ID NO: 346018 - DNA, 75 bp, synthetic construct
  source 1..75: mol_type = other DNA
gagtacctgctgccccaatcgaacaagattaaacgcgccgatggtaagcgcggcccgtggtattcgcaggcattc

SEQ ID NO: 346019 - DNA, 75 bp, synthetic construct
  source 1..75: mol_type = other DNA
taacttcgccatgccaggttgtgacacctgtgcataccagcctttctgtggagcagatccttgccagaacattag

SEQ ID NO: 346020 - DNA, 75 bp, synthetic construct
  source 1..75: mol_type = other DNA
agcacagggcggcgcgtcagcaagaacgcgcagcacgcaacccagcgccagagcgccaacaggaactggagcaaa

SEQ ID NO: 346021 - DNA, 75 bp, synthetic construct
  source 1..75: mol_type = other DNA
cgttcattgaaagaacagggtatcaaccgaacgcctgaaattcattttggccctgttcacgccgccaatctgaac

SEQ ID NO: 346022 - DNA, 75 bp, synthetic construct
  source 1..75: mol_type = other DNA
cattatgtctgtccctcactgcatgtggtagtggcctgaataccggtaaaccgaattccggcgttatcccaaaac

SEQ ID NO: 346023 - DNA, 75 bp, synthetic construct
  source 1..75: mol_type = other DNA
gtgcatgaaaatgaaatccgcgatgccaactcgctggggcgcggcgcacaactgttgcagctcagccacctgcgc

SEQ ID NO: 346024 - DNA, 75 bp, synthetic construct
  source 1..75: mol_type = other DNA
gaaagaacaactaaaaaaaatggacgggcagcgttctgtttataagaacaagattgatgagaaaaaacagaatat

SEQ ID NO: 346025 - DNA, 75 bp, synthetic construct
  source 1..75: mol_type = other DNA
gcactgcgtatacagcgatcctgggccagggaggcatcacgtagtaacgaacgtgatcaagatatggagcgttga

SEQ ID NO: 346026 - DNA, 75 bp, synthetic construct
  source 1..75: mol_type = other DNA
tgggtcagtaaaagtgaaattaaacgtgatgccgaggagctaaaacgcctgggcgcggaaattgttgatctgggg

SEQ ID NO: 346027 - DNA, 75 bp, synthetic construct
  source 1..75: mol_type = other DNA
agcgtgcggaagtacgtatttttgccggtaatgatccggctcacaccgccacaggcagcagcgggatttcctcgg

SEQ ID NO: 346028 - DNA, 75 bp, synthetic construct
  source 1..75: mol_type = other DNA
agcgtgcggaagtacgtatttttgccggtaatgatccggctcataccgccacaggcagcagcgggatttcttcgg

SEQ ID NO: 346029 - DNA, 75 bp, synthetic construct
  source 1..75: mol_type = other DNA
ttgcgacggaggcaatccgctggcctgaaagtgtggatgaacacaaaaaggccaacgcctttatgcggcgaaggg

SEQ ID NO: 346030 - DNA, 75 bp, synthetic construct
  source 1..75: mol_type = other DNA
gcgcggcaccggcgttagcgtaacccgcagcggggacaacattatccttaacatgccgaacaatgtgacctttga

SEQ ID NO: 346031 - DNA, 75 bp, synthetic construct
  source 1..75: mol_type = other DNA
acctgaacatgcgtctctcccagcagcgtgcagattccgttgccagcgcgttgatcacccagggcgtggacgcca

SEQ ID NO: 346032 - DNA, 75 bp, synthetic construct
  source 1..75: mol_type = other DNA
agcttcggagctcgtttatttgttgcttttgtcgcaacgggaagattacccaatggatatataacaatacccacc

SEQ ID NO: 346033 - DNA, 75 bp, synthetic construct
  source 1..75: mol_type = other DNA
aaagtcgatattcgccagcgcatctggcagccactcaactggaaggaaaacaattatgagtctgaatatgttctg

SEQ ID NO: 346034 - DNA, 75 bp, synthetic construct
  source 1..75: mol_type = other DNA
aacgttgacgcctgggctatctgggatccctactactccgctgcgttattacagggcggcgtgcgggtgctgaaa

SEQ ID NO: 346035 - DNA, 75 bp, synthetic construct
  source 1..75: mol_type = other DNA
cgtctggtgccgaaaaaagtcgatattcgccagcgcatctggcagcccactcaactggaaggaaaacaattatga

SEQ ID NO: 346036 - DNA, 75 bp, synthetic construct
  source 1..75: mol_type = other DNA
agtagtgaatccactgcaaaaggatttggcatcagactatataaagacagtgatgtaactgccatcagctatggt

SEQ ID NO: 346037 - DNA, 75 bp, synthetic construct
  source 1..75: mol_type = other DNA
ttcaaccacccgccgtcactagaggcattatggttttttactgaagcctttataaaatggattaaaatagaaaaa

SEQ ID NO: 346038 - DNA, 75 bp, synthetic construct
  source 1..75: mol_type = other DNA
aaacgctatccgcaaacaaaaatttcatgggtggaatttcctgcgggtccgcagatgctggaagcactcaacatc

SEQ ID NO: 346039 - DNA, 75 bp, synthetic construct
  source 1..75: mol_type = other DNA
ggtatctggctgtaccactaacccttacaccggcgaacgcgaagcgggtaaatccgctatcggcgcaggtctggg

SEQ ID NO: 346040 - DNA, 75 bp, synthetic construct
  source 1..75: mol_type = other DNA
tatttcttagtaatataccttgactctttgtctctttggatctctttatcaataaaggcaatgatcatttttatt

SEQ ID NO: 346041 - DNA, 75 bp, synthetic construct
  source 1..75: mol_type = other DNA
ctgttggttataaatgtgtctggttactcgtcggggttgatcaacttgctttgcgtgtattgcagggagagcatt

SEQ ID NO: 346042 - DNA, 75 bp, synthetic construct
  source 1..75: mol_type = other DNA
ttcagatcgacggcgacaaggcagttgtcaataacgaaggtgacaacgccatcagtaacggcggcaccggcacgc

SEQ ID NO: 346043 - DNA, 75 bp, synthetic construct
  source 1..75: mol_type = other DNA
cagacgtgagtcagaactgcgctttcagggaaacggcatcagcgcatactctccagcagcgtttcagccatcacc

SEQ ID NO: 346044 - DNA, 75 bp, synthetic construct
  source 1..75: mol_type = other DNA
tcgctatgcgagcatcaccagtaagaggtggaaattatcttgaaagagcattgaaagatatagaaaaagagatga

SEQ ID NO: 346045 - DNA, 75 bp, synthetic construct
  source 1..75: mol_type = other DNA
agcaatggctacgtcactcaggtactgatccgcccaggtacatacgcagctgccttgccgctgcgtccggtgatg

SEQ ID NO: 346046 - DNA, 75 bp, synthetic construct
  source 1..75: mol_type = other DNA
aagccgctcgtaattactggtctgcattggatgatgaaaagaaaagccgcttccgctttcaccatatttctactg

SEQ ID NO: 346047 - DNA, 75 bp, synthetic construct
  source 1..75: mol_type = other DNA
aaggatcttatcgcgatcaaattacttacgtgactgaccgcctaggtcatgaccgtcgttatgccatcaatgccg

SEQ ID NO: 346048 - DNA, 75 bp, synthetic construct
  source 1..75: mol_type = other DNA
gagtccataaaaaagggtaaggccgtcgctgatgcagaagttagtgaccgtctttatcaacgcgctatgggcttc

SEQ ID NO: 346049 - DNA, 75 bp, synthetic construct
  source 1..75: mol_type = other DNA
ccgcttccagtgtttcccgctggctccgctgccggaatcactcagtcatcgcgtaccagacatcctgtatccccc

SEQ ID NO: 346050 - DNA, 75 bp, synthetic construct
  source 1..75: mol_type = other DNA
ctcccgggatgaagttcccgatggaggataacgcccggaaatacatcaccacggaagcggtgatcgttgaaaaca

SEQ ID NO: 346051 - DNA, 75 bp, synthetic construct
  source 1..75: mol_type = other DNA
ccactgagtcgctggtctggcctgattctgtggatgcggtgaaaaaagccaacgcatttgtgggaagtgccatca

SEQ ID NO: 346052 - DNA, 75 bp, synthetic construct
  source 1..75: mol_type = other DNA
tccgaccatttcagccatgtttcggtgatgcggaaggtgctgctaagaatgaccagttggatgcattatctttat

SEQ ID NO: 346053 - DNA, 75 bp, synthetic construct
  source 1..75: mol_type = other DNA
gaaactgaccagcattttacctgtcgtgccgggcggctcgtatcaggcccagggcgtactgcaatcgctgaccgt

SEQ ID NO: 346054 - DNA, 75 bp, synthetic construct
  source 1..75: mol_type = other DNA
cttcagaggatgaaggtacagctacaggagaaagcgaggaaaaagccggtttaagagagcgagtgaaaaatgcac

SEQ ID NO: 346055 - DNA, 75 bp, synthetic construct
  source 1..75: mol_type = other DNA
aactgaccgaagcgaaatataaccttgagcaaaccattattcgcgcgccgagcaacggctacgttactcaggtac

SEQ ID NO: 346056 - DNA, 75 bp, synthetic construct
  source 1..75: mol_type = other DNA
gtcttcatccccgagcaaaaacggcaaattgtcgcccaatttcggcaaaactcgctgttacgtctgaaacctggt

SEQ ID NO: 346057 - DNA, 75 bp, synthetic construct
  source 1..75: mol_type = other DNA
tcacagattgtgagcttaagggcgcaactgaccgaagcgaaatataaccttgagcaaactattattcgcgcgccg

SEQ ID NO: 346058 - DNA, 75 bp, synthetic construct
  source 1..75: mol_type = other DNA
ccctgtaaatctgttttttgtctttatggtaaagctgtaggtagaagtggagggagtgagtgcagtagtgccgaa

SEQ ID NO: 346059 - DNA, 75 bp, synthetic construct
  source 1..75: mol_type = other DNA
gaaaaggatttttttaatatactgaaaaagaaaaaaggaaacattcgctggagtaaaacatttgatgcccgcaag

SEQ ID NO: 346060 - DNA, 75 bp, synthetic construct
  source 1..75: mol_type = other DNA
gcgatgttatccagcaatatatcgaacagtttgttgccaattccaacaagatgaccgccgtcggggcatgtggcc

SEQ ID NO: 346061 - DNA, 75 bp, synthetic construct
  source 1..75: mol_type = other DNA
gcaatattcacgtcgaaataacagacgccagccggcaacctatctgcgccgcgcataaattgcagccggatgcag

SEQ ID NO: 346062 - DNA, 75 bp, synthetic construct
  source 1..75: mol_type = other DNA
tcaggccggcatcgccggacgctcaaaagaaatgcgtccctatcagacgctgaatcaaaggtcacaatggctggg

SEQ ID NO: 346063 - DNA, 75 bp, synthetic construct
  source 1..75: mol_type = other DNA
tttatggtaaagctgtcggtagtagtggagggagtgagtgcagtagtgccgaaaaggatttttttaaaaatgttg

SEQ ID NO: 346064 - DNA, 75 bp, synthetic construct
  source 1..75: mol_type = other DNA
tgagcagaccattattcgtgcaccgagcaatggctatgttactcaggtgctaatccgtccaggcacttacgcggc

SEQ ID NO: 346065 - DNA, 75 bp, synthetic construct
  source 1..75: mol_type = other DNA
tccggttttgatgataatgatactggggatatcagttcactcagctcaacacaatacggatttggtgacacttta

SEQ ID NO: 346066 - DNA, 75 bp, synthetic construct
  source 1..75: mol_type = other DNA
tttttataaacgttggtttaggagaaggctcagcattgcctgttggcgtacctgttccgtggccctcagccactc

SEQ ID NO: 346067 - DNA, 75 bp, synthetic construct
  source 1..75: mol_type = other DNA
tgatgatgaacgccggatagtgattaatagcgtgttggtgcgcacgtggaaggcaatcaggtgctggttgatcct

SEQ ID NO: 346068 - DNA, 75 bp, synthetic construct
  source 1..75: mol_type = other DNA
ggagaaggttctgcactgcccgttggtgtgcccgttccgtggccctcagcaacaccaccaacgggctggctgaaa

SEQ ID NO: 346069 - DNA, 75 bp, synthetic construct
  source 1..75: mol_type = other DNA
cggtgagtttattcgtggctgggatgacgggcgtggagctgacagtggtcggggattattaagctttcaaaaagc

SEQ ID NO: 346070 - DNA, 75 bp, synthetic construct
  source 1..75: mol_type = other DNA
agatgctgaaacgcctgcttttaaacaatcaacacaacactattttttcaaaaaacagccactccccgtcgtcga

SEQ ID NO: 346071 - DNA, 75 bp, synthetic construct
  source 1..75: mol_type = other DNA
ctctggagctactacaaaatgtggggacgcatgacaacagaaactctccgccgtaacgaaaacgagttgtactaa

SEQ ID NO: 346072 - DNA, 75 bp, synthetic construct
  source 1..75: mol_type = other DNA
acggacaaagcagcacgatagtggtaagccagttcccggtagataaatggcatggtctgatggagaacccaacaa

SEQ ID NO: 346073 - DNA, 75 bp, synthetic construct
  source 1..75: mol_type = other DNA
agctcattgatgaggcaaatgtttatataaacaaacgtcagtggccgggaaaagcagcgataggccgtttaaagg

SEQ ID NO: 346074 - DNA, 75 bp, synthetic construct
  source 1..75: mol_type = other DNA
cggttggtgtgcctgttccgtggccttcagccactccgccaacggggtggctaaaatgtaacggagcagtatttt

SEQ ID NO: 346075 - DNA, 75 bp, synthetic construct
  source 1..75: mol_type = other DNA
tacacttagctcagcatatgcatgaacgtcgtcggatgatgcaatggtggtctaattatattgaagctaacactg

SEQ ID NO: 346076 - DNA, 75 bp, synthetic construct
  source 1..75: mol_type = other DNA
ttgctctacactgtatggagctactacaaaatgtgggggcgcatgacaactgaaacgcttcgccgtcacgatagt

SEQ ID NO: 346077 - DNA, 75 bp, synthetic construct
  source 1..75: mol_type = other DNA
ggtgtatcgtcttgcttggcgcggaaattactgtcactctcggggaataccgcaaactaaaacaagctgctgaac

SEQ ID NO: 346078 - DNA, 75 bp, synthetic construct
  source 1..75: mol_type = other DNA
taatgtcaacaatgtggataaatgcggaagaacaatacttttttacgtaaaaaatcactctatctttgatttgat

SEQ ID NO: 346079 - DNA, 75 bp, synthetic construct
  source 1..75: mol_type = other DNA
ccggatgacgccaccgtccggaatacgttctacaacttcgataatcaccctcaacgattcagtcttgaaccgttg

SEQ ID NO: 346080 - DNA, 75 bp, synthetic construct
  source 1..75: mol_type = other DNA
tatcgccatcaatatgatcggcgggcaactggccagcatggtcaaattacctatttttctcgactccatcggcac

SEQ ID NO: 346081 - DNA, 75 bp, synthetic construct
  source 1..75: mol_type = other DNA
ccgcccggcaaccaaaccgcgcggtcgtgatgcacaacctgccggtaatagcgcaatgatggatgcgctggcagc

SEQ ID NO: 346082 - DNA, 75 bp, synthetic construct
  source 1..75: mol_type = other DNA
acgtttttgcccgtaacctgcacgatctgctgatggccgctcctgccgggctgcgtgcgacaatgggcctcgatc

SEQ ID NO: 346083 - DNA, 75 bp, synthetic construct
  source 1..75: mol_type = other DNA
atgtttctgaaaaccgaacaatttgaatataacggtgtgtctgtcacgctttccgagttgtctgcgctgcagcgt

SEQ ID NO: 346084 - DNA, 75 bp, synthetic construct
  source 1..75: mol_type = other DNA
gtgagtcgaaaaaaggctacatcaacagcctcggtgcactgactggcggtcaggcgctgcaacaggcgaaagcgg

SEQ ID NO: 346085 - DNA, 75 bp, synthetic construct
  source 1..75: mol_type = other DNA
ttgttcccacaggctaacaaaattaaccgcgctgacggtaagaaaggcccgttctactctcaagcgttcaccagg

SEQ ID NO: 346086 - DNA, 75 bp, synthetic construct
  source 1..75: mol_type = other DNA
gcctttcgcacctactcacaaggggcaagcattcaagaattagctgaatatgtagaattagtaagatatgaatta

SEQ ID NO: 346087 - DNA, 75 bp, synthetic construct
  source 1..75: mol_type = other DNA
acttattagtgcggtactgcttggtccggtgatcggaatgctgaccggcttactgaccaatttactctggggatt

SEQ ID NO: 346088 - DNA, 75 bp, synthetic construct
  source 1..75: mol_type = other DNA
tttttcccgtttcgttgtagtcggctacggtttgacggtgtttaacgccgctcaacgctttttagcggccttgtt

SEQ ID NO: 346089 - DNA, 75 bp, synthetic construct
  source 1..75: mol_type = other DNA
ggtgtcctgaatgcctttgaactgatgaaagcgatgattgaagccggtgcagcggcagttcacttcgaagatcag

SEQ ID NO: 346090 - DNA, 75 bp, synthetic construct
  source 1..75: mol_type = other DNA
ggcggtggtcgatgccactggcaaactggtggcgaccgataccatttacccgcacaccggacaagccgcaaaagc

SEQ ID NO: 346091 - DNA, 75 bp, synthetic construct
  source 1..75: mol_type = other DNA
cagcaccatgatgaacgcaagtttgacaatgtgggatgcaacttccagccagctgacgcttaacgtcatgacctg

SEQ ID NO: 346092 - DNA, 75 bp, synthetic construct
  source 1..75: mol_type = other DNA
atattgcgattggtcgccgtcccgagcggttttccgtcaaccatccaatccagaaggcggtgaccatgcgactga

SEQ ID NO: 346093 - DNA, 75 bp, synthetic construct
  source 1..75: mol_type = other DNA
tcggtatcgccttcggcaacttgttgctcggcgtgccgtttgccttcacaccgcaattacgcgtggagtatctcg

SEQ ID NO: 346094 - DNA, 75 bp, synthetic construct
  source 1..75: mol_type = other DNA
tgatcgtcacgtcgttattgttgatgtattccattgatagcgcattgaatgccatctggcgcagtaaacgggtac

SEQ ID NO: 346095 - DNA, 75 bp, synthetic construct
  source 1..75: mol_type = other DNA
gcgatgttatccagcgatatatcgaacagtttgtcgccaattccaacaaaatgaccgccgtcggggcgtgcgggc

SEQ ID NO: 346096 - DNA, 75 bp, synthetic construct
  source 1..75: mol_type = other DNA
gcgctgggcgagcgatctcaatactgtcatcgataacgtgctgcgtatttttccgctgctgttgtcgtggatctc

SEQ ID NO: 346097 - DNA, 75 bp, synthetic construct
  source 1..75: mol_type = other DNA
tcgatcatcacgaaccgctgtcaacggtgccttctcaccgcgcactggcgatgttccgtggtcgtaacgaaggca

SEQ ID NO: 346098 - DNA, 75 bp, synthetic construct
  source 1..75: mol_type = other DNA
tggatcatctcggcctgcgcctgaacaatgctccggcggatagctggcgcaaaggcgtggtgagctggacctggc

SEQ ID NO: 346099 - DNA, 75 bp, synthetic construct
  source 1..75: mol_type = other DNA
ggtgctgtgctcgctgttcttccgcccgctggcctttgattatcgcggaaaaatcgccgatgcacgctggcgtaa

SEQ ID NO: 346100 - DNA, 75 bp, synthetic construct
  source 1..75: mol_type = other DNA
ctatttacgattatgaggtccctgtacctgaaaatccgttttccttcagacttgagatccataaatgctctgaat

SEQ ID NO: 346101 - DNA, 75 bp, synthetic construct
  source 1..75: mol_type = other DNA
tggcaacctgcaggtgtctgtagaggagcttatcagaggcggggcgtttctggtggcgatgtctctgtggcataa

SEQ ID NO: 346102 - DNA, 75 bp, synthetic construct
  source 1..75: mol_type = other DNA
tgctgtggaacgctacggcgggtgcattcagtgccaaacacggcaccaacggtactgacagcaaaatcaccaact

SEQ ID NO: 346103 - DNA, 75 bp, synthetic construct
  source 1..75: mol_type = other DNA
gtgacgatgacggtactcttaccgaaccctcctacatattaaaaaacggtactagaaccaacgttggcgatgcgc

SEQ ID NO: 346104 - DNA, 75 bp, synthetic construct
  source 1..75: mol_type = other DNA
gaaaatatgtcggtgataaagaaggcaaacggcacgccgtcgtcaacggtgtccttatggttcaccgtggatggg

SEQ ID NO: 346105 - DNA, 75 bp, synthetic construct
  source 1..75: mol_type = other DNA
caccaacctgactgacgctgttgacagtctcggtgatgactctctgctgtggaacgctacggcgggtgcattcag

SEQ ID NO: 346106 - DNA, 75 bp, synthetic construct
  source 1..75: mol_type = other DNA
ggcctctattggtggcggtacttacaacggtgaatcggctgttgctttaggtgtgtcgatggtgagcgccaatgg

SEQ ID NO: 346107 - DNA, 75 bp, synthetic construct
  source 1..75: mol_type = other DNA
gatgactctctgctgtggaacgctactgcgggggcattcagtgccgcgcacggtaccgatgccaccagcaaaatc

SEQ ID NO: 346108 - DNA, 75 bp, synthetic construct
  source 1..75: mol_type = other DNA
gcgctggagatggcgcaacttgtgcaggccgaacgggataataaccggtcacaatcagtgccatccggtgacggc

SEQ ID NO: 346109 - DNA, 75 bp, synthetic construct
  source 1..75: mol_type = other DNA
aagatatagaaaagaaggaagatgttgctcaaacatttgtatatataggaccaacaatccctcaactctcaattt

SEQ ID NO: 346110 - DNA, 75 bp, synthetic construct
  source 1..75: mol_type = other DNA
tcagcagttacaaacgctgggcgaagtgatggaaaacacgctggggatcagcaaaagtcaggcggattcgatcac

SEQ ID NO: 346111 - DNA, 75 bp, synthetic construct
  source 1..75: mol_type = other DNA
cgacatgattttgacgtacaccgtgctgtagaacatgatgaggacctggggcttattttcactgttcgtgaaaaa

SEQ ID NO: 346112 - DNA, 75 bp, synthetic construct
  source 1..75: mol_type = other DNA
gtgcgatgcatgaactgaacattcagaccatttgtgcagaaaccagtgctgccaaaggccgcgttgaacgggcgc

SEQ ID NO: 346113 - DNA, 75 bp, synthetic construct
  source 1..75: mol_type = other DNA
cagtaacaaccagttgcctcagggactggccgcatacgcgctgaacattattcgcgaacgctataacgatttcgg

SEQ ID NO: 346114 - DNA, 75 bp, synthetic construct
  source 1..75: mol_type = other DNA
aaaatcaactaatgaagtgatttttgataaaggtcaaaaattagttgtaaaaaataacgaaacggaagaactgtt

SEQ ID NO: 346115 - DNA, 75 bp, synthetic construct
  source 1..75: mol_type = other DNA
atgacgcatacccatatcaactttattggttccggcttgccattgaaactgcaacgtgaagtggcgaaagaactt

SEQ ID NO: 346116 - DNA, 75 bp, synthetic construct
  source 1..75: mol_type = other DNA
atgaaatacttcatgatgaagcgtgtattgctggcgattgcactccctgtccttgttgcttactttggaggttct

SEQ ID NO: 346117 - DNA, 75 bp, synthetic construct
  source 1..75: mol_type = other DNA
tcgtaagggtcttaatgatctcaaagcacaacttaatcaatggattgagatctttgatcaaaacttaaatgcagc

SEQ ID NO: 346118 - DNA, 75 bp, synthetic construct
  source 1..75: mol_type = other DNA
tatagaccagcgcctgaaagattattaaaaagttggagtaaaggaacccatcttgtatttactggtgatggagaa

SEQ ID NO: 346119 - DNA, 75 bp, synthetic construct
  source 1..75: mol_type = other DNA
cgcaagcgttgcaaggcaatgggcgttgacgttaaccgtgtgtactcgctcgatgaactggtgagggggaacgat

SEQ ID NO: 346120 - DNA, 75 bp, synthetic construct
  source 1..75: mol_type = other DNA
ttgctgaattttcttattcgtttaaacattatgaaatctaatgcttttgacgtcatggggaaggttgcatggcta

SEQ ID NO: 346121 - DNA, 75 bp, synthetic construct
  source 1..75: mol_type = other DNA
agtctgcttactatgaatcactgcacgaactgccgctgattgctaacaccatcgcccgtaagcgtctgtacgaaa

SEQ ID NO: 346122 - DNA, 75 bp, synthetic construct
  source 1..75: mol_type = other DNA
agcaatcttttacagacgggcgcggagttcgagaaaaagctgaaagagagagccgaatctacagagaaaatgctg

SEQ ID NO: 346123 - DNA, 75 bp, synthetic construct
  source 1..75: mol_type = other DNA
gagagccgaatctacagagaaaatgctgaacgacgaattcagcaggctcggcgaatctgtaagcgaggctgtgac

SEQ ID NO: 346124 - DNA, 75 bp, synthetic construct
  source 1..75: mol_type = other DNA
aagcactttttcctgatcgaaggcgatgaattacgggaactgaagcacagaaactctttaagggtttctgtgaaa

SEQ ID NO: 346125 - DNA, 75 bp, synthetic construct
  source 1..75: mol_type = other DNA
agcagcactccgacgtggtgcgcgctgtacagccgctgatgaaagatggcgcggcgctgggctattcgcacggtt

SEQ ID NO: 346126 - DNA, 75 bp, synthetic construct
  source 1..75: mol_type = other DNA
ccatgcaattgagcaggtaggtaaaaaactgcgtggctatatgacggatatgaaacgtattgctgttgcgggtta

SEQ ID NO: 346127 - DNA, 75 bp, synthetic construct
  source 1..75: mol_type = other DNA
caacgccatcctcgcaacaccactcgataaagacaagccagttaccatccgcattactgactacaagcgcaacct

SEQ ID NO: 346128 - DNA, 75 bp, synthetic construct
  source 1..75: mol_type = other DNA
tttttatgcgccagacgctgccgcaccagaccatgcagcgtgaatcggattatcgctggccgtcaaattcccgta

SEQ ID NO: 346129 - DNA, 75 bp, synthetic construct
  source 1..75: mol_type = other DNA
gtagcggacagattggtcacaccatcgttaatccggatggcgtcgtctgcgactgtggacgttacggctgcctgg

SEQ ID NO: 346130 - DNA, 75 bp, synthetic construct
  source 1..75: mol_type = other DNA
attaacgagcaaatttatcgcggcagtttgtatggtagcggacaaattggtcacaccatcgttaatccggatggc

SEQ ID NO: 346131 - DNA, 75 bp, synthetic construct
  source 1..75: mol_type = other DNA
ataaaaaatgcttactgtgaggggtattttggttatcgtgattttacatggccaaaggatgaagactatattgat

SEQ ID NO: 346132 - DNA, 75 bp, synthetic construct
  source 1..75: mol_type = other DNA
tcttgtctgcatttgagattttttatacagaagaacatgctgattatagttattacaatcaaaagataggggcca

SEQ ID NO: 346133 - DNA, 75 bp, synthetic construct
  source 1..75: mol_type = other DNA
caacttagtaaatcatacaaacatcatctatacaaaaggttactcaattgaaaatactatagtcgatgagaaagt

SEQ ID NO: 346134 - DNA, 75 bp, synthetic construct
  source 1..75: mol_type = other DNA
ggagagatggttttagaccggaaacctgactctgccgggcgtaaggatcactgcaggcagctgtctcaacaaagg

SEQ ID NO: 346135 - DNA, 75 bp, synthetic construct
  source 1..75: mol_type = other DNA
atctgcaatgactcaggtgctgacgttgatattcctggctctgataatacaggtactgaaaacattaattacggc

SEQ ID NO: 346136 - DNA, 75 bp, synthetic construct
  source 1..75: mol_type = other DNA
aagccgttctgcaatttatgaatgcatctgcaatgactcaggtgctgacgttgatattcctggctctgataatac

SEQ ID NO: 346137 - DNA, 75 bp, synthetic construct
  source 1..75: mol_type = other DNA
aaaccatgccgcaagcgccgtggacaacaccggttgaggtgaagtatctgctggaagagaagctgggcattcggg

SEQ ID NO: 346138 - DNA, 75 bp, synthetic construct
  source 1..75: mol_type = other DNA
aactttcactctaccttcacccggaggactctgccgattgtcttgcactggctgaaatcgaaactgttccccgga

SEQ ID NO: 346139 - DNA, 75 bp, synthetic construct
  source 1..75: mol_type = other DNA
aaggtaggggaattgtagggcttgaatccgacgaacttgtttttggtaaaaatattactgaattttacggaccta

SEQ ID NO: 346140 - DNA, 75 bp, synthetic construct
  source 1..75: mol_type = other DNA
ccgcaagaaatacaggataacaattctgtttcacaattttcggttgaacctgagagcagggtgacaaggaaggcg

SEQ ID NO: 346141 - DNA, 75 bp, synthetic construct
  source 1..75: mol_type = other DNA
acgaagagaccgatgacttggtagaaatagcctccagaaagtataggtcacccattgacctcaatattctcaacc

SEQ ID NO: 346142 - DNA, 75 bp, synthetic construct
  source 1..75: mol_type = other DNA
ctggcgtatttggccaaaaccagaactaaggatacctacagcggttaccgtaactttggcacaagtcagtgctta

SEQ ID NO: 346143 - DNA, 75 bp, synthetic construct
  source 1..75: mol_type = other DNA
cgagcaagccatcgtccgcatatggggccagatacgcttaaccgtgccatttctaagctctttggtcgcgagcct

SEQ ID NO: 346144 - DNA, 75 bp, synthetic construct
  source 1..75: mol_type = other DNA
tgaagcgtatggcaagcctgattgagtacacaacatcctgggccgtggatcagggtgtcagatttaccgacagga

SEQ ID NO: 346145 - DNA, 75 bp, synthetic construct
  source 1..75: mol_type = other DNA
gctccaactactaataccttcgaccatggtataaatggcagacctacctttaatctccatgaactttcaataata

SEQ ID NO: 346146 - DNA, 75 bp, synthetic construct
  source 1..75: mol_type = other DNA
tgaagcgtatggcaagtctgattgagtacacgacagcatgggctattggtcagggtgtcaggttcactgacggga

SEQ ID NO: 346147 - DNA, 75 bp, synthetic construct
  source 1..75: mol_type = other DNA
gctgccgggctggacagcgaatcgaatctgatggctcgtgtacgagcatcgctggctgaagtgcgtgatcaggtg

SEQ ID NO: 346148 - DNA, 75 bp, synthetic construct
  source 1..75: mol_type = other DNA
cgatagcagagacacaaggacagcacttcctgaggagaaaaaggaattttattctgcattaacaccctcaacaga

SEQ ID NO: 346149 - DNA, 75 bp, synthetic construct
  source 1..75: mol_type = other DNA
ctatgtcagaatggcttgaagaactacttaaagataatgattctatggaacaaataaaccgtgttttaaaaggat

SEQ ID NO: 346150 - DNA, 75 bp, synthetic construct
  source 1..75: mol_type = other DNA
aagagatgacagacacacactatattggccgcttcgccccctctccttccggcgagcttcattttggctctctga

SEQ ID NO: 346151 - DNA, 75 bp, synthetic construct
  source 1..75: mol_type = other DNA
tatccgccagcagcatccggtcacgcaatttactgaccagctgcgcggcattattcacgccgacgaaaaactggc

SEQ ID NO: 346152 - DNA, 75 bp, synthetic construct
  source 1..75: mol_type = other DNA
cttctgtccagatacctcatcaaacgtatattgataatggattttatgatcgtatctctggtaaggagaaaggcg

SEQ ID NO: 346153 - DNA, 75 bp, synthetic construct
  source 1..75: mol_type = other DNA
ttctgcacttgatatagcacatcgagtggattgggatttcagagaagcggagcgactcgctaaagagcaggcgaa

SEQ ID NO: 346154 - DNA, 75 bp, synthetic construct
  source 1..75: mol_type = other DNA
cgttgggggcaacaaaactttactacggtgcaaattttgcaccgtgggaaaaaggtcggtacggaacgcatctgg

SEQ ID NO: 346155 - DNA, 75 bp, synthetic construct
  source 1..75: mol_type = other DNA
gaaattaagcatgatgataaaatgtttcctttaaagttgtcaactttcaccggcaaaaatctttattatactggg

SEQ ID NO: 346156 - DNA, 75 bp, synthetic construct
  source 1..75: mol_type = other DNA
atacgccagcgatcgtttctaccgacgcggacgaaatgagcacccagatggcgaaactgtttgccgcagcgggcc

SEQ ID NO: 346157 - DNA, 75 bp, synthetic construct
  source 1..75: mol_type = other DNA
tgctggaaaaactggcgaaagacgatgcggaaaaataccagaccttctggcaacagtttggcctggtactgaaag

SEQ ID NO: 346158 - DNA, 75 bp, synthetic construct
  source 1..75: mol_type = other DNA
ccgacaaagtgaccgtgcgtactcgcgcggcaggcgaaaaaccagaaaacggcgtcttctgggaatcggctggcg

SEQ ID NO: 346159 - DNA, 75 bp, synthetic construct
  source 1..75: mol_type = other DNA
agctgaacccgatcatcacccgggtgttgtttccggcgtttgccaaaattcaggacgataccgaaaagctgcgca

SEQ ID NO: 346160 - DNA, 75 bp, synthetic construct
  source 1..75: mol_type = other DNA
ctcattggtgacgtgctgaataacccggacctggcaccgttgattaaaacattgtcgctggcgtttgtggtgatc

SEQ ID NO: 346161 - DNA, 75 bp, synthetic construct
  source 1..75: mol_type = other DNA
aactggcgctggggatgctgctggcggtgcaaatagccgcgggcgtgctggcgtttgtggtgatgattgtgctgt

SEQ ID NO: 346162 - DNA, 75 bp, synthetic construct
  source 1..75: mol_type = other DNA
atatttcggggatcgcttcaggcccgtcacgggtaaccgtgacccagaacggctatacgatttattcccgcatgg

SEQ ID NO: 346163 - DNA, 75 bp, synthetic construct
  source 1..75: mol_type = other DNA
tttgaccttggtttcaatgtcgggcgatgggtattatccagtaatattaacgtatcccgctcaggaggagaaaca

SEQ ID NO: 346164 - DNA, 75 bp, synthetic construct
  source 1..75: mol_type = other DNA
acatactctttgcatgacattatttttgacaatgcaattacgacaccttcatgtttaaagataatttcaggcctc

SEQ ID NO: 346165 - DNA, 75 bp, synthetic construct
  source 1..75: mol_type = other DNA
gtgatggcgaactgcgcgttcgtgtctctttcgataaagacaagcgcacgctgactatttccgacaacggcgtgg

SEQ ID NO: 346166 - DNA, 75 bp, synthetic construct
  source 1..75: mol_type = other DNA
ccagttatcgccagtacatcctgagtttatggctgccgttttatctctcgctgccgacgctggtggttagttatg

SEQ ID NO: 346167 - DNA, 75 bp, synthetic construct
  source 1..75: mol_type = other DNA
aacgtggccgttgtgccgccgatgaagctgaacccaatcatcacccgtgtgttgtttccggcgtttgccaaaatt

SEQ ID NO: 346168 - DNA, 75 bp, synthetic construct
  source 1..75: mol_type = other DNA
ctgttgggattgatggtggtagccaataattttgtgccgctggtatttggtgagaaatggaacagcatcattccg

SEQ ID NO: 346169 - DNA, 75 bp, synthetic construct
  source 1..75: mol_type = other DNA
catataaatatcagccaaacaccaagtttatttgatgctgtgacaattctacttgttattgctatttcggtattt

SEQ ID NO: 346170 - DNA, 75 bp, synthetic construct
  source 1..75: mol_type = other DNA
gccgtgctggcgggctttacctttacggtggttagcgctcatttctggccactggcgatgaccgcaatccttggt

SEQ ID NO: 346171 - DNA, 75 bp, synthetic construct
  source 1..75: mol_type = other DNA
gatgattaaaccggtgctcggttccagttatcgccagtacatcctgagtttgtggctgccgttttatctctcgct

SEQ ID NO: 346172 - DNA, 75 bp, synthetic construct
  source 1..75: mol_type = other DNA
actggcgctggggatgctgctggcggtgcaaatagccgcgggcgtgctggcgtttgtggtgatgattgtgctgtc

SEQ ID NO: 346173 - DNA, 75 bp, synthetic construct
  source 1..75: mol_type = other DNA
cctgctcggcgagcgtgtgaaagatgtccgtctgactcaccgtctgaccgatacgccagcgattgtgtctactga

SEQ ID NO: 346174 - DNA, 75 bp, synthetic construct
  source 1..75: mol_type = other DNA
cttcgaactgaacccggatcacgtactggtgaaacgtgcggcagatactgaagatgaagcgaagttcagcgagtg

SEQ ID NO: 346175 - DNA, 75 bp, synthetic construct
  source 1..75: mol_type = other DNA
agcccgcatcgggcatctggatgaggtcacgcacattatttctgatgagcgccaggttgcggcttctttggtaac

SEQ ID NO: 346176 - DNA, 75 bp, synthetic construct
  source 1..75: mol_type = other DNA
actggcgctggggatgctgctggcggtgcaaatagccgcaggcgtgctggcgtttgtagtgatgattgtgctgtc

SEQ ID NO: 346177 - DNA, 75 bp, synthetic construct
  source 1..75: mol_type = other DNA
ctgctggggctaatggtggtgtcgaataactttgtaccgctggtatttggcgaaaagtggagcagcattattccg

SEQ ID NO: 346178 - DNA, 75 bp, synthetic construct
  source 1..75: mol_type = other DNA
ctcatcggcgacgtgctgaataacccggacctggcaccgttgattaaaacattgtcgctggcgtttgtggtgatc

SEQ ID NO: 346179 - DNA, 75 bp, synthetic construct
  source 1..75: mol_type = other DNA
ttgcgcatcaggtgcgacagggcttctggctggcgggttttgtttccgttctcattatgctggtgctgtggaatg

SEQ ID NO: 346180 - DNA, 75 bp, synthetic construct
  source 1..75: mol_type = other DNA
gggattttgcgtggttataaagatacgcggtcgattttttatattacctttacggcgtattgggtattaggcttg

SEQ ID NO: 346181 - DNA, 75 bp, synthetic construct
  source 1..75: mol_type = other DNA
attatcggcctgacatcggcagccattatgatgatgctgcgtatgcggttcctgcaacgtctgccgtcagttatc

SEQ ID NO: 346182 - DNA, 75 bp, synthetic construct
  source 1..75: mol_type = other DNA
ctccatgccgacgaacagcgacggtaacacggtggtgtggctgtctgagtattcagagaacagcatcaacatcaa

SEQ ID NO: 346183 - DNA, 75 bp, synthetic construct
  source 1..75: mol_type = other DNA
gaatggcagctcaacattctgcgcgaagaggcgtaccgcgacacactgtcgcaggatgcagcaggtgcacaattc

SEQ ID NO: 346184 - DNA, 75 bp, synthetic construct
  source 1..75: mol_type = other DNA
ccctgaccgtctggcactgcaccagaaggctgtggaactgtcgaaaaaagaaggcatcagctatgaggctgctgt

SEQ ID NO: 346185 - DNA, 75 bp, synthetic construct
  source 1..75: mol_type = other DNA
tggttctgtcagaaggtcacattcagcgtggcctgaccgttatagccttcagcgctgctgccgctgacgctgtgg

SEQ ID NO: 346186 - DNA, 75 bp, synthetic construct
  source 1..75: mol_type = other DNA
agctgtatcgccacaatggtgagtggaaattccgcgcagtaggccagggttatgctggtggtctggcatctgtat

SEQ ID NO: 346187 - DNA, 75 bp, synthetic construct
  source 1..75: mol_type = other DNA
atacatcaggtaagccatcagaatactttggccttcctgcatcctttgcattagaggttgatggtttccctgttc

SEQ ID NO: 346188 - DNA, 75 bp, synthetic construct
  source 1..75: mol_type = other DNA
aacaggaagacggcgtcgtggaatttgctgactggaatgataccaccaatgcctccttatgggggcgtctgcggg

SEQ ID NO: 346189 - DNA, 75 bp, synthetic construct
  source 1..75: mol_type = other DNA
tgcctcattttatcttccggactcctcaagcaatcccaaaccgggcacgctttacctgcgtcatgtcggttttct

SEQ ID NO: 346190 - DNA, 75 bp, synthetic construct
  source 1..75: mol_type = other DNA
ccggaacgcataccgatatgcacggcacaaaactgccgttcacgcaacgcgatcttgccgcctgcgtgaacgcct

SEQ ID NO: 346191 - DNA, 75 bp, synthetic construct
  source 1..75: mol_type = other DNA
acgcaaagagctttacagatcggaccgacctacagttactgacgtaccgttaccagagtaaagggtatgtggaat

SEQ ID NO: 346192 - DNA, 75 bp, synthetic construct
  source 1..75: mol_type = other DNA
gagtttgagaccacgtcgtacaacgtggtgccgaccgaaaaagcgatggtttaccgcaaattcggcttcgagaat

SEQ ID NO: 346193 - DNA, 75 bp, synthetic construct
  source 1..75: mol_type = other DNA
cattacagcagtaacagcgtggggtatacccggacgggcggaacgacatttaacagcagcgtgtctgcgacaccg

SEQ ID NO: 346194 - DNA, 75 bp, synthetic construct
  source 1..75: mol_type = other DNA
gcgctcccgttatgaggcgcgtctgtcgcagcgctttgatggtacatacctgagtggctcttactggtggcagga

SEQ ID NO: 346195 - DNA, 75 bp, synthetic construct
  source 1..75: mol_type = other DNA
tcgttatgaagcacgggtgtcacaccgctttgatggcacatatctgagcggttcttactggtggcaggattactg

SEQ ID NO: 346196 - DNA, 75 bp, synthetic construct
  source 1..75: mol_type = other DNA
taagttcggttttgaaaacgtactgcgttacatcctgcgcgtgaaagattcgcagggcaactacctgactggtgg

SEQ ID NO: 346197 - DNA, 75 bp, synthetic construct
  source 1..75: mol_type = other DNA
ataatgaaaaaaccggtacggctgagttaaacattacaccggcagatgaaaaaaacaacatgctctgtttctcac

SEQ ID NO: 346198 - DNA, 75 bp, synthetic construct
  source 1..75: mol_type = other DNA
aaagagtaacggggagcagtgccgctttgacggcgcgcagctgaaacccaacaccggaaccgtacaggagatacg

SEQ ID NO: 346199 - DNA, 75 bp, synthetic construct
  source 1..75: mol_type = other DNA
ggtgctgttcagacccaccgcctaccaggacacctttgataaggaccgggaatgctacacgctcgccaggaagga

SEQ ID NO: 346200 - DNA, 75 bp, synthetic construct
  source 1..75: mol_type = other DNA
ggtgatgttgaataaggatgtctaccatgatgtttttgatgaaggcaaagggtgctatctcctagcgaagaagtc

SEQ ID NO: 346201 - DNA, 75 bp, synthetic construct
  source 1..75: mol_type = other DNA
aacctggatgctgccattaacatggggcgctgggtgttatccggtaacatgaacgtttcgcactctgataataaa

SEQ ID NO: 346202 - DNA, 75 bp, synthetic construct
  source 1..75: mol_type = other DNA
gacctggtggtgaccgttgaggatgaaagcggtaacaaaaccgaacaggtctatccggtcaccacgctgccaacg

SEQ ID NO: 346203 - DNA, 75 bp, synthetic construct
  source 1..75: mol_type = other DNA
caccagtaatgagctggataaagctttttcctctgacacggggctgttctggttaggtagcgttgattatggttt

SEQ ID NO: 346204 - DNA, 75 bp, synthetic construct
  source 1..75: mol_type = other DNA
gttaaccgcgctttaccctaatgaaccacataccaccggagatgaaatattacgtattgaacatctgacggcatg

SEQ ID NO: 346205 - DNA, 75 bp, synthetic construct
  source 1..75: mol_type = other DNA
cagcgtcgcactgggtaccggttccgttgcagaggaagaaaatacaatctctgtaggttcttctactaaccaacg

SEQ ID NO: 346206 - DNA, 75 bp, synthetic construct
  source 1..75: mol_type = other DNA
gttacggttcgccagttgcagaacgctattggagcggtcgccactacgccaaccaagtactttcacgccaactca

SEQ ID NO: 346207 - DNA, 75 bp, synthetic construct
  source 1..75: mol_type = other DNA
cggctgaagactcactggcagtcggtgaagactcgctggcaatgggcgcgaaaaccatcgttaatggtaatgcgg

SEQ ID NO: 346208 - DNA, 75 bp, synthetic construct
  source 1..75: mol_type = other DNA
gttgaaattgccaaggcacttaataaacaggtgcgcttgttaattctcgatgagccgacagcctcattaactgag

SEQ ID NO: 346209 - DNA, 75 bp, synthetic construct
  source 1..75: mol_type = other DNA
cccacaatggtattatggattatgacctgatgacgctacgctgtcagaagctgctcgcacaggtcagtttatcca

SEQ ID NO: 346210 - DNA, 75 bp, synthetic construct
  source 1..75: mol_type = other DNA
ccgtagaaaaatttagtgccaaacacggtactaatggtgacgcaagcgtgatcactgatgtcgcaaatggagatg

SEQ ID NO: 346211 - DNA, 75 bp, synthetic construct
  source 1..75: mol_type = other DNA
caacgttaaagatggcgacctgacggctggcagcaccgatgccgttaatggctctcagctgaaaaccaccaacga

SEQ ID NO: 346212 - DNA, 75 bp, synthetic construct
  source 1..75: mol_type = other DNA
gatggtaaatatcgtcaaatcatcaacgtagccgatggttccgaagcccatgacgctgttactgttcgccagttg

SEQ ID NO: 346213 - DNA, 75 bp, synthetic construct
  source 1..75: mol_type = other DNA
aaaatggcgtggtgattggttatgacaccactgacggcgaactgctaggtgcattgtcaattggtgatgacggta

SEQ ID NO: 346214 - DNA, 75 bp, synthetic construct
  source 1..75: mol_type = other DNA
atgccgacctgacggctggcagcaccgatgccgttaacggctctcagctgaaaaccaccaacgatgctgtggcga

SEQ ID NO: 346215 - DNA, 75 bp, synthetic construct
  source 1..75: mol_type = other DNA
cagcagcagcaccgttgataccggtattgcgctgggtagcagctccgtttccagccgtgtgattgccaaaggttc

SEQ ID NO: 346216 - DNA, 75 bp, synthetic construct
  source 1..75: mol_type = other DNA
ttaatgtaaaaaatggcgcgatcaaggctgacagccacgacgccattaatggctcacagctttatgccatcagcg

SEQ ID NO: 346217 - DNA, 75 bp, synthetic construct
  source 1..75: mol_type = other DNA
agcgccagttatattgtcaaaaatgccgatgggacgattgccagtaacgtagcagaaaacaaaatcatcaatgtg

SEQ ID NO: 346218 - DNA, 75 bp, synthetic construct
  source 1..75: mol_type = other DNA
aagcaaagtgtgcaggaaacgaagcaatacaccgatcagcgcatggttgagatggataacaaactgtccaaaact

SEQ ID NO: 346219 - DNA, 75 bp, synthetic construct
  source 1..75: mol_type = other DNA
cagcgccgtatcaccaacgttgctgccggtgttaatgccaccgatgcggttaacgtttcgcaactgaagtcttct

SEQ ID NO: 346220 - DNA, 75 bp, synthetic construct
  source 1..75: mol_type = other DNA
gcgctagcagcaggtaatgaacctggtacatctgtcggaacaggatctggctgggttgctttaggccagaattca

SEQ ID NO: 346221 - DNA, 75 bp, synthetic construct
  source 1..75: mol_type = other DNA
aaagataaaactgccagtgtaatcactaacgtcgctaacggtgcagtctctgccaccagtagagacgccattaat

SEQ ID NO: 346222 - DNA, 75 bp, synthetic construct
  source 1..75: mol_type = other DNA
gggatacaacagccaatggcggtaacggtgcatttagcgctgctcacgggaaagataaaactgccagtgtaatca

SEQ ID NO: 346223 - DNA, 75 bp, synthetic construct
  source 1..75: mol_type = other DNA
tattaactatgtacgtaccaacgacaacggcttagcgttcaacgatgccagcgcctcaggtattggtgctacggc

SEQ ID NO: 346224 - DNA, 75 bp, synthetic construct
  source 1..75: mol_type = other DNA
cgcgcacggtaccgaagctaccagcaagatcaccaacttactggctggcaagatatcttctaacagcactgatgc

SEQ ID NO: 346225 - DNA, 75 bp, synthetic construct
  source 1..75: mol_type = other DNA
caaagcgtgcaggaaacgaagcaatacaccgatcagcgcatggttgagatggataacaaactgtccaaaaccgaa

SEQ ID NO: 346226 - DNA, 75 bp, synthetic construct
  source 1..75: mol_type = other DNA
gcgagtgcggagttggcacttgatggaggggaaggtattgaatctccaatagaaggccataactggattgcaatt

SEQ ID NO: 346227 - DNA, 75 bp, synthetic construct
  source 1..75: mol_type = other DNA
ccaccagcaagatcaccaacttactggctggcaaggtatcttctgacagcaccgatgccattaacggatcacaac

SEQ ID NO: 346228 - DNA, 75 bp, synthetic construct
  source 1..75: mol_type = other DNA
gtgacggacgcacaggtttcccagaacacccagagcattactaacctgaatactcaggtaacgaatctggatacc

SEQ ID NO: 346229 - DNA, 75 bp, synthetic construct
  source 1..75: mol_type = other DNA
gaaaacggcattggcgatatcgtaaccaccggtagcaccaaatacttcaagaccaacaccgatggcgtagatgcc

SEQ ID NO: 346230 - DNA, 75 bp, synthetic construct
  source 1..75: mol_type = other DNA
agtaaggctggtaataacgggccatgggtaactcactgggaagaaatggcaaaaaaaaacggctattcgtcgcct

SEQ ID NO: 346231 - DNA, 75 bp, synthetic construct
  source 1..75: mol_type = other DNA
ggcagcagctcttccacgccatatgacggctgaacgtatgatccgtatcgccaccacagaaattcgtaaagttcc

SEQ ID NO: 346232 - DNA, 75 bp, synthetic construct
  source 1..75: mol_type = other DNA
ccgtgaaggtgacgagtttagcttcgaatttggccttgatgaaaagttaatacaccgcccgggagaaaacgaaga

SEQ ID NO: 346233 - DNA, 75 bp, synthetic construct
  source 1..75: mol_type = other DNA
ggacggtaaagccgttcagtcggttacatatcgtgactcaggggtgatattcaaagttaagccggttatcacgtc

SEQ ID NO: 346234 - DNA, 75 bp, synthetic construct
  source 1..75: mol_type = other DNA
cgtatctgaatgaagaagtggtcggcgaatgtcacgaacggtgcaatagtgatccacacccaacgcctgaaatca

SEQ ID NO: 346235 - DNA, 75 bp, synthetic construct
  source 1..75: mol_type = other DNA
tatagcctagtagaaaaatctctcaacaaagctgctaatgcagccttatggagcctagacaatgaacctaaccga

SEQ ID NO: 346236 - DNA, 75 bp, synthetic construct
  source 1..75: mol_type = other DNA
tttccgcatggatgtcacgcttgagacgcgcgggctgactgaggatgaatttaacgcgctgattgtgctgatcca

SEQ ID NO: 346237 - DNA, 75 bp, synthetic construct
  source 1..75: mol_type = other DNA
aacaacaacccggccagtaaaagcaatcgatggtgatgttaaactcaataaggcattgtggttaattgcggagaa

SEQ ID NO: 346238 - DNA, 75 bp, synthetic construct
  source 1..75: mol_type = other DNA
actgctaaagacgcaatgcagtcaccaagcagggtatggacctgctcttcctgtggctgtcagttgatacttcat

SEQ ID NO: 346239 - DNA, 75 bp, synthetic construct
  source 1..75: mol_type = other DNA
ccaccacagaaattcgtaaagttccggcgttaggaaactgtgacactatgagttttgtcagtgcaatcgtacagt

SEQ ID NO: 346240 - DNA, 75 bp, synthetic construct
  source 1..75: mol_type = other DNA
atggtgaataccggagggaacaaacggcaggtccccgcaaaacgtcaaaaccgcggctcccgaaactcaacagat

SEQ ID NO: 346241 - DNA, 75 bp, synthetic construct
  source 1..75: mol_type = other DNA
ttctcaaacaggtgatggtgaataccggagggaacaaaaggcaggtccccgcaaaacgtcaaaaccgcggctccc

SEQ ID NO: 346242 - DNA, 75 bp, synthetic construct
  source 1..75: mol_type = other DNA
tgaaagctaacggtttaatggaagcctctaccattgcggcgattttgctcggttccgtagccggtggtgtactgg

SEQ ID NO: 346243 - DNA, 75 bp, synthetic construct
  source 1..75: mol_type = other DNA
aagaaaacaccatctctgtgggttcttctaccaaccagcgccgtatcaccaacgttgctgccggtgttaatgcca

SEQ ID NO: 346244 - DNA, 75 bp, synthetic construct
  source 1..75: mol_type = other DNA
cactaatctggatactcgcgtgaccaatatcgaaaatggcattggcgatatcgtaaccaccggtagtactaagta

SEQ ID NO: 346245 - DNA, 75 bp, synthetic construct
  source 1..75: mol_type = other DNA
aacgcgagtgcaaatcatgcaaacagtattgcgatgggtagtggttcccagaccacccgtggtgcgcagactgac

SEQ ID NO: 346246 - DNA, 75 bp, synthetic construct
  source 1..75: mol_type = other DNA
tgctgatggtaacattggtgaagatagcaccgacgctatctacggttctcagttgaatgcaaccaacatgatgat

SEQ ID NO: 346247 - DNA, 75 bp, synthetic construct
  source 1..75: mol_type = other DNA
aggttataacgcagttgcctctcatgccagcagtgtagccatcggtcaggacagcatcagcgaagttgatacggg

SEQ ID NO: 346248 - DNA, 75 bp, synthetic construct
  source 1..75: mol_type = other DNA
caccgatggcgcagacgccaacgcgcagggtaaagacagtgttgcgattggttctggttccattgctgccgctga

SEQ ID NO: 346249 - DNA, 75 bp, synthetic construct
  source 1..75: mol_type = other DNA
tgaaagctaacggtttaatggaggcgtctactattgcggcgattttgctcggttctgtcgccggtggtgtgctgg

SEQ ID NO: 346250 - DNA, 75 bp, synthetic construct
  source 1..75: mol_type = other DNA
gttacgctggaaaccgtgtcacgctgtatgccagccgggattttgattggcgtggtggtactgattttctccctg

SEQ ID NO: 346251 - DNA, 75 bp, synthetic construct
  source 1..75: mol_type = other DNA
tgcgtttcctgttggtgctgtgggtaccggtggcgctgggcattaccgataacgctacgccgacctatctcaacg

SEQ ID NO: 346252 - DNA, 75 bp, synthetic construct
  source 1..75: mol_type = other DNA
gtcagttgaaagtaacggatgcgcaggtttcccagaatacccagagcattactaacctgaacaatcaggtcacta

SEQ ID NO: 346253 - DNA, 75 bp, synthetic construct
  source 1..75: mol_type = other DNA
aggaagggatgcccgtcgtggctgatgttgaccagcgtattctgggaatcagtctggctcagctaaggcagattg

SEQ ID NO: 346254 - DNA, 75 bp, synthetic construct
  source 1..75: mol_type = other DNA
ctggtcacgctggaaaccgtttcacgctgtatgcccgccgggattttaattggcgtggtggtgctgattttctcc

SEQ ID NO: 346255 - DNA, 75 bp, synthetic construct
  source 1..75: mol_type = other DNA
ttaaactcgattgccctgggcaagaccagtgttgtcactggcgataatagtcttgcgcttggtagtaataccaat

SEQ ID NO: 346256 - DNA, 75 bp, synthetic construct
  source 1..75: mol_type = other DNA
tcggtaaacaggcggaatcgctcatcggtaaggctggcagtatggcgactaaattcacggatatgacgggggcgg

SEQ ID NO: 346257 - DNA, 75 bp, synthetic construct
  source 1..75: mol_type = other DNA
ctaagggagaggtcattattggtgacaatgtatggatatgcgatggtgttatgatcttgccaggagttacgattg

SEQ ID NO: 346258 - DNA, 75 bp, synthetic construct
  source 1..75: mol_type = other DNA
accagtaccgatgccatcaacggctcacagctttatacgatcagtgattcagtcgccaaacggctcgggggaggc

SEQ ID NO: 346259 - DNA, 75 bp, synthetic construct
  source 1..75: mol_type = other DNA
gatgctctgtcaggaatcgacaataataccctacaatggaataaaaccgcgggggcgttcagcgccaatcacggt

SEQ ID NO: 346260 - DNA, 75 bp, synthetic construct
  source 1..75: mol_type = other DNA
ggtggtaagaattacaccaatgttggcgcagctcttaccgctctggacaatgacgccctgttgtgggatgcaacc

SEQ ID NO: 346261 - DNA, 75 bp, synthetic construct
  source 1..75: mol_type = other DNA
cgttacggttcgccagttgcagaacgctattggagcggtcgccactacgccaaccaagtactttcacgccaactc

SEQ ID NO: 346262 - DNA, 75 bp, synthetic construct
  source 1..75: mol_type = other DNA
taactctgttgccgaaggccatagtagcgtggccatcggtcagggcagctacagcggcgttgagacgagtattgc

SEQ ID NO: 346263 - DNA, 75 bp, synthetic construct
  source 1..75: mol_type = other DNA
agcgccagtcatgacggcaaggccagcattatcacaaacgttgctgatggtaacattgctgaagatagcaccgac

SEQ ID NO: 346264 - DNA, 75 bp, synthetic construct
  source 1..75: mol_type = other DNA
ctccgccagaaggtaatgatcaaatttatcatgaggttatcgaaatccctggcaaacgccgatccaaagaatcca

SEQ ID NO: 346265 - DNA, 75 bp, synthetic construct
  source 1..75: mol_type = other DNA
gtgccagcatggcctctattggtggcggtacttacaacggtgaatcggcagttgctttaggtgtatcgatggtga

SEQ ID NO: 346266 - DNA, 75 bp, synthetic construct
  source 1..75: mol_type = other DNA
accaccggtagcaccaagtacttcaagaccaataccgatggtgtagatgccagcgcgcagggtaaagatagcgtc

SEQ ID NO: 346267 - DNA, 75 bp, synthetic construct
  source 1..75: mol_type = other DNA
tacaccattgcaaataccgattacaacaacgtcggtgaagccctggatgcgctcgataataacgcgctgctgtgg

SEQ ID NO: 346268 - DNA, 75 bp, synthetic construct
  source 1..75: mol_type = other DNA
tgttgtcagtaatgtctcggagaccggcacggtattttttgaggatgggacgccacgaaaaatcagcttcaccct

SEQ ID NO: 346269 - DNA, 75 bp, synthetic construct
  source 1..75: mol_type = other DNA
ttggtaaacaggcggaatcgctcatcggtaaggccggcagtctggcgaccagattcacaggtatgatgggggcgg

SEQ ID NO: 346270 - DNA, 75 bp, synthetic construct
  source 1..75: mol_type = other DNA
ttgctactaacaccgccagcattaatactctgaatacatccattgacgctctggaacaggatgcgctgctttggg

SEQ ID NO: 346271 - DNA, 75 bp, synthetic construct
  source 1..75: mol_type = other DNA
aatgacactgctgattgaagatgatgagcgcatcacacccggcacggtcagtgtgacagaagaaaccccgctttc

SEQ ID NO: 346272 - DNA, 75 bp, synthetic construct
  source 1..75: mol_type = other DNA
cgggaaagataaaactgccagtgtaatcactaacgtcgctaacggtgcagtctctgccaccagcagcgatgccat

SEQ ID NO: 346273 - DNA, 75 bp, synthetic construct
  source 1..75: mol_type = other DNA
cgggctatgtgcaacgggaatttgaagaatttctccaatgcgggcggctggagcatggctttctacgggttcgct

SEQ ID NO: 346274 - DNA, 75 bp, synthetic construct
  source 1..75: mol_type = other DNA
cagctcaaaaccaccaacgacaacgtgacgaccaacaccaccaacatcgccactaacaccaccaatatcaccaac

SEQ ID NO: 346275 - DNA, 75 bp, synthetic construct
  source 1..75: mol_type = other DNA
agcgcagcaggtattggctctaccgctgtggggtataacactgttgccaaaggcgatagcagcgtggccatcggt

SEQ ID NO: 346276 - DNA, 75 bp, synthetic construct
  source 1..75: mol_type = other DNA
gtgacctgacagctggcagcactgacgccgttaacggctctcagctcaaaaccaccaacgataacgtgtcgacca

SEQ ID NO: 346277 - DNA, 75 bp, synthetic construct
  source 1..75: mol_type = other DNA
tgatgcaatcaacggtattgctatcggtagcaacgcgagtgcaaatcatgcaaacagtattgcgatgggtagtgg

SEQ ID NO: 346278 - DNA, 75 bp, synthetic construct
  source 1..75: mol_type = other DNA
ttccatgctaattcaacggaagaagattcactggctgtcggtgaagactcactggcaatgggtgcgaaaaccatt

SEQ ID NO: 346279 - DNA, 75 bp, synthetic construct
  source 1..75: mol_type = other DNA
ctcacggcggtctatggcgatatcggaaaacaggccgagagtctggtcggtaaagcgggtgatctgctgtctaag

SEQ ID NO: 346280 - DNA, 75 bp, synthetic construct
  source 1..75: mol_type = other DNA
cttctgaagcaggcggcgttcgctacgacaccaaagctgatggctctatcgactacagcaacatcactctcggtg

SEQ ID NO: 346281 - DNA, 75 bp, synthetic construct
  source 1..75: mol_type = other DNA
accgatgccagcgcagcaggtattggctctaccgctgtgggttataactctgttgccgatggcgataacagcgtg

SEQ ID NO: 346282 - DNA, 75 bp, synthetic construct
  source 1..75: mol_type = other DNA
catcgctgatgcgctgggtggtgatgcagaagtcaacgctgacggaactatcactgcaccgacttacaccattgc

SEQ ID NO: 346283 - DNA, 75 bp, synthetic construct
  source 1..75: mol_type = other DNA
acgctgttgacagtctcggtgacgactccctgctgtggaacaaaacagctggcgcattcagcgccgctcacggca

SEQ ID NO: 346284 - DNA, 75 bp, synthetic construct
  source 1..75: mol_type = other DNA
ctggcgagctctctgacaccagcaccgacgccgttaatggttctcagctgaaatcgaccaaggacgatgtggcga

SEQ ID NO: 346285 - DNA, 75 bp, synthetic construct
  source 1..75: mol_type = other DNA
atgatattatttgttggttttttgttgatggaatttgttatgcctcaaattagccggaccgcactcgtaccctac

SEQ ID NO: 346286 - DNA, 75 bp, synthetic construct
  source 1..75: mol_type = other DNA
gcaatcggtcatggcagcaacagcatcgttgagacgagtattgcgctgggtagcgaatcagtctccagccgtgtg

SEQ ID NO: 346287 - DNA, 75 bp, synthetic construct
  source 1..75: mol_type = other DNA
ccagttaaacgcaaccaatattctggttacgcaaaatagccaaatgattaaccagcttgctggtaacaccagcga

SEQ ID NO: 346288 - DNA, 75 bp, synthetic construct
  source 1..75: mol_type = other DNA
gcgagtgcttctgtcagtcttgatggtggtacatattctgatggcaccgaacttactgatgcatggattgctatt

SEQ ID NO: 346289 - DNA, 75 bp, synthetic construct
  source 1..75: mol_type = other DNA
gccagctgcaaaatgccattggtgcagtcgctaccacgccgactaaatacttccacgctaactcaacggctgaag

SEQ ID NO: 346290 - DNA, 75 bp, synthetic construct
  source 1..75: mol_type = other DNA
ccaacgttgctgccggtgttaatgccaccgatgcggttaacgtttcgcaactgaagtcttctgaagcaggcggcg

SEQ ID NO: 346291 - DNA, 75 bp, synthetic construct
  source 1..75: mol_type = other DNA
gcgggtattaactatgtacgtaccaacgacaacggcttagcgttcaacgatgccagcgcctcaggtattggtgct

SEQ ID NO: 346292 - DNA, 75 bp, synthetic construct
  source 1..75: mol_type = other DNA
aactcttttgccaaaggcgatagcagcgtggccatcggtcagggcagctacagcggcgttgatacgggtatcgct

SEQ ID NO: 346293 - DNA, 75 bp, synthetic construct
  source 1..75: mol_type = other DNA
atgaacaaaatatttaaagttatctggaatccggcgacgggcagctatagcgttgccagcgaaacggcgaagagc

SEQ ID NO: 346294 - DNA, 75 bp, synthetic construct
  source 1..75: mol_type = other DNA
actatcactgcaccgacttacaccattgcaaataccgattacaacaacgtcggtgaagccctggatgcgctcgat

SEQ ID NO: 346295 - DNA, 75 bp, synthetic construct
  source 1..75: mol_type = other DNA
tgtgcgtaccaatgacaccggtttaaccttcaccgatgccagcgcagcaggtattggctctaccgctgtggggta

SEQ ID NO: 346296 - DNA, 75 bp, synthetic construct
  source 1..75: mol_type = other DNA
ccaacaaaatcagcaacgtacaagctggcatagtctcctctgacagcactgacgccataaatggctcacaactat

SEQ ID NO: 346297 - DNA, 75 bp, synthetic construct
  source 1..75: mol_type = other DNA
gcatatgccgaagtatcacttgatggtggtacaagtgctgaaacaaccccactaaccaatggttggattgctatt

SEQ ID NO: 346298 - DNA, 75 bp, synthetic construct
  source 1..75: mol_type = other DNA
ctacccgtggtgcgcagaccaactacagcgcctacaacatggacgcaccacagaactctgtgggtgagttctctg

SEQ ID NO: 346299 - DNA, 75 bp, synthetic construct
  source 1..75: mol_type = other DNA
tcagactactcgtggtgcgcagaccaactacactgcctacaacatggatgcaccgcagaactctgtgggtgagtt

SEQ ID NO: 346300 - DNA, 75 bp, synthetic construct
  source 1..75: mol_type = other DNA
cactgacgccgttaacggctcacagctcaaaaccaccaacgaaaacgtgtcgaccaacaccaccaacatcgccac

SEQ ID NO: 346301 - DNA, 75 bp, synthetic construct
  source 1..75: mol_type = other DNA
cacggtgcaaatgccaccaacaaaatcactaatgttgctaaaggtacggtttctgcaacccgcaccgatgtagta

SEQ ID NO: 346302 - DNA, 75 bp, synthetic construct
  source 1..75: mol_type = other DNA
tatgtgcgtaccaatgacaccggtttaaccttcaccgatgccagcgcagcaggcattggctctaccgctgtgggt

SEQ ID NO: 346303 - DNA, 75 bp, synthetic construct
  source 1..75: mol_type = other DNA
cactgacgccgttaacggctcgcagctcaaaaccaccaacgataacgtgccgaccaacaccaccaacatcgccac

SEQ ID NO: 346304 - DNA, 75 bp, synthetic construct
  source 1..75: mol_type = other DNA
cactgacgccgttaacggctcccagctcaaaaccaccaacgataacgtggcgaccaacaccaccaacatcgccac

SEQ ID NO: 346305 - DNA, 75 bp, synthetic construct
  source 1..75: mol_type = other DNA
cactgacgccgttaacggctctcagctcaaaaccaccaacgaaaacgtgacgaccaacaccaccaacatcgccac

SEQ ID NO: 346306 - DNA, 75 bp, synthetic construct
  source 1..75: mol_type = other DNA
cgcttaccaatttgagtgggaaggatgttgccggtcttcttgcataccttggtttgggagaagcggcaaaacgga

SEQ ID NO: 346307 - DNA, 75 bp, synthetic construct
  source 1..75: mol_type = other DNA
tatgtggatgacaaggcattggagctgaaggtgtacgtggatgacctgatggcaaaacatcttgccgcaccggac

SEQ ID NO: 346308 - DNA, 75 bp, synthetic construct
  source 1..75: mol_type = other DNA
tgatggttacgacacaaaagatgaatgggaactggctacgattttcaaaaagacatacacacaaggacggggact

SEQ ID NO: 346309 - DNA, 75 bp, synthetic construct
  source 1..75: mol_type = other DNA
tttgacggacagaaaaacgcagagaacaacgctcgttatatcgcagctttcaacccagcagtagtgcaggcacta

SEQ ID NO: 346310 - DNA, 75 bp, synthetic construct
  source 1..75: mol_type = other DNA
atgctgaaagtgattgatatgcttgaacagtggcagccactctgtgctcgttatcagtgcacaattcccactctg

SEQ ID NO: 346311 - DNA, 75 bp, synthetic construct
  source 1..75: mol_type = other DNA
tgttgccggtcttcttgcataccttggtttgggagaagcggcaaaacggaatgtgggaacaggggaaaatcagat

SEQ ID NO: 346312 - DNA, 75 bp, synthetic construct
  source 1..75: mol_type = other DNA
gatttatcgttatcggtccccacggcaagcgaaaaccgcccacgcagtatcgcatttaactatatcgtgagggct

SEQ ID NO: 346313 - DNA, 75 bp, synthetic construct
  source 1..75: mol_type = other DNA
acattgaccggaacacccaaagcgccaacgccagcggaggggaataacaccacgcagattgcgaccaccgcgttt

SEQ ID NO: 346314 - DNA, 75 bp, synthetic construct
  source 1..75: mol_type = other DNA
tcgcgaaacggacaaactgcctgggatattctcccaaatggtatgattcgacaggctggcactgtgacactgaca

SEQ ID NO: 346315 - DNA, 75 bp, synthetic construct
  source 1..75: mol_type = other DNA
acatatcagtaattcagcgtggcgtgtggcaaccagtgatatctcatatcaatacagattcagttatatttcgat

SEQ ID NO: 346316 - DNA, 75 bp, synthetic construct
  source 1..75: mol_type = other DNA
acaatatcaccctgaaaatcgatcctgccgtcgtgctggcaacccgcaagtatgtggatgacaaggcactggagc

SEQ ID NO: 346317 - DNA, 75 bp, synthetic construct
  source 1..75: mol_type = other DNA
ggcaatcacacacaattatggatcatgcacacaatatggaattgtggacgggggacgggcttgccgcaggaagtg

SEQ ID NO: 346318 - DNA, 75 bp, synthetic construct
  source 1..75: mol_type = other DNA
agatgaacttcaaagtgatgagcattctggacgcaggcgaaaccggtaaatacggtcacccgacgccaactcagg

SEQ ID NO: 346319 - DNA, 75 bp, synthetic construct
  source 1..75: mol_type = other DNA
ctccgaggcatctttaacctatcgtaactacgtctctactgacctcagtgcacctgcttctgttccatacactct

SEQ ID NO: 346320 - DNA, 75 bp, synthetic construct
  source 1..75: mol_type = other DNA
tgtatgccagcggcggcagtgagatcctcttcaacacgctgcagattaccgtcggcggccagacttactggctgg

SEQ ID NO: 346321 - DNA, 75 bp, synthetic construct
  source 1..75: mol_type = other DNA
atacaaaacggtagttggtgccgctggcaaccatgttgactgtgaaaacccgttgaactggatcaagctgaccca

SEQ ID NO: 346322 - DNA, 75 bp, synthetic construct
  source 1..75: mol_type = other DNA
atgcactgtgaagatcccggctgcctgaaggcgtgcccgtctgctggtgcaatcattcagtacgctaacgggatt

SEQ ID NO: 346323 - DNA, 75 bp, synthetic construct
  source 1..75: mol_type = other DNA
tgaaggcgtgcccgtctgccggtgcaatcattcagtacgctaacgggattgtcgatttccagtcggaaaactgca

SEQ ID NO: 346324 - DNA, 75 bp, synthetic construct
  source 1..75: mol_type = other DNA
aatgcagcagcgattgatattgctcttcctgcccggaatagtgatggaactcaggacttgcagtttgctatcgat

SEQ ID NO: 346325 - DNA, 75 bp, synthetic construct
  source 1..75: mol_type = other DNA
tggcagcctgagttcacagataaaacactctccaggaaacccggggcggttcatataccttttttattatctctc

SEQ ID NO: 346326 - DNA, 75 bp, synthetic construct
  source 1..75: mol_type = other DNA
caatgtctggcagtggatgcaaacgctcatgtcgataacccgatggctgacctgcaactggtgagcgacgatctc

SEQ ID NO: 346327 - DNA, 75 bp, synthetic construct
  source 1..75: mol_type = other DNA
caatgcctggctgtagatgccaacgcccacgtcgataatccgatggcggacttacaactggcgagcgacgatctc

SEQ ID NO: 346328 - DNA, 75 bp, synthetic construct
  source 1..75: mol_type = other DNA
ttatggatgatggtgaggaaattatagctccttcctatttccgacctttacttgcttccccgagcatacgtaaat

SEQ ID NO: 346329 - DNA, 75 bp, synthetic construct
  source 1..75: mol_type = other DNA
atgatctggcagcctgagttcacagataaaacactctccaggaaacccggggcggttcattccctgtcattaata

SEQ ID NO: 346330 - DNA, 75 bp, synthetic construct
  source 1..75: mol_type = other DNA
gaccagaactacacggtggcagatgccgccaaagctatggatgttggcctttccacaatgacaagatgggtcaaa

SEQ ID NO: 346331 - DNA, 75 bp, synthetic construct
  source 1..75: mol_type = other DNA
aaaggtttatccgacaaataaattgcctgatttacgcggtgaatttattcgtggctgggatgacggacgtggagt

SEQ ID NO: 346332 - DNA, 75 bp, synthetic construct
  source 1..75: mol_type = other DNA
attctcccggtctcagaaaaccccaactgggtgcacttcatgcaattgcaggctatttcgccactgatttgcagg

SEQ ID NO: 346333 - DNA, 75 bp, synthetic construct
  source 1..75: mol_type = other DNA
ttcagccactccgccaacaggctggctgaaatgcaacggtgccgcttttggcgctgttgcaaatagtcggtggtg

SEQ ID NO: 346334 - DNA, 75 bp, synthetic construct
  source 1..75: mol_type = other DNA
ccatgaacaaccaggcgaacattacagggattaacggtaaggcaattatcatcccagataaagcagggacaatgg

SEQ ID NO: 346335 - DNA, 75 bp, synthetic construct
  source 1..75: mol_type = other DNA
tcagctcaatggggtgagtatttgcttactacgttcgaagataaagttatttttcattttgatgctatatcagct

SEQ ID NO: 346336 - DNA, 75 bp, synthetic construct
  source 1..75: mol_type = other DNA
ttgctcattgggatcaaagcagatccgccttgtttgtattctcaaatgactataaagcattccgggttgagaatc

SEQ ID NO: 346337 - DNA, 75 bp, synthetic construct
  source 1..75: mol_type = other DNA
aattatctataactacacgatgggggaagcccaacgagcaggctattttacaaatgtaaatttgctgcctgtaga

SEQ ID NO: 346338 - DNA, 75 bp, synthetic construct
  source 1..75: mol_type = other DNA
atagaggggaagtcttttattatccaatggggaagaatcggaccttctgatagtaaaactggtgttgcaacagga

SEQ ID NO: 346339 - DNA, 75 bp, synthetic construct
  source 1..75: mol_type = other DNA
gtttaatacctatccttctgattctggtgcttttacaaccagcgtcatcggagatgcttcatctgattcaattaa

SEQ ID NO: 346340 - DNA, 75 bp, synthetic construct
  source 1..75: mol_type = other DNA
tattttgatgcctcacgtgttgccagaacatcaacggaaacacgtgcgcgaaatattgcatttaactatatagtg

SEQ ID NO: 346341 - DNA, 75 bp, synthetic construct
  source 1..75: mol_type = other DNA
cgcttaccaatttgagtggaaaggatgtagctggtcttctcgcataccttggtttgggagaagcggcgaaaatga

SEQ ID NO: 346342 - DNA, 75 bp, synthetic construct
  source 1..75: mol_type = other DNA
gtaatttcagcgccaacgataactaatttaggatgcggcgtccgaaatctgatgattccaacagcgggcggagca

SEQ ID NO: 346343 - DNA, 75 bp, synthetic construct
  source 1..75: mol_type = other DNA
tcaggcggtatcggtggtgcaagttcttcatcattcagcggacgtggtggtggtaaagctgagggctttggtgct

SEQ ID NO: 346344 - DNA, 75 bp, synthetic construct
  source 1..75: mol_type = other DNA
tgttattattaatgacgacggtaaaggtgagtcagctgatttagttgggttaagaatagttgatgactgtattgt

SEQ ID NO: 346345 - DNA, 75 bp, synthetic construct
  source 1..75: mol_type = other DNA
ccgtttaaggcaaaatatctgaagttgactgacagtggtgttgcatctggtacagttaactcttcattggttatg

SEQ ID NO: 346346 - DNA, 75 bp, synthetic construct
  source 1..75: mol_type = other DNA
atgaaacgttcaattattgctgccgctgtcttttcttctttttttatgagcgctggagtatttgctgcagacgtt

SEQ ID NO: 346347 - DNA, 75 bp, synthetic construct
  source 1..75: mol_type = other DNA
gccttcagccactccgccgacaggctggctgaaatgcaacggtgcagctttttctgctgaagaatacccggaact

SEQ ID NO: 346348 - DNA, 75 bp, synthetic construct
  source 1..75: mol_type = other DNA
acattcgatgcttccagagttgttccaactgcaaacgaaaaccgacctcgtaacattgcctttaattatatcgtg

SEQ ID NO: 346349 - DNA, 75 bp, synthetic construct
  source 1..75: mol_type = other DNA
cgttatggcggaatgagccgtagcggggtggactgttcggggtttgttgttgtgacgatgcgagatcgttttgat

SEQ ID NO: 346350 - DNA, 75 bp, synthetic construct
  source 1..75: mol_type = other DNA
cgccttttaatattgaaagctataaaacagcggatggtcaatatgcgattccgtttaaagcgaaatacctgaaac

SEQ ID NO: 346351 - DNA, 75 bp, synthetic construct
  source 1..75: mol_type = other DNA
ccatctgcgtaatggcgggtggcctggtggctcagtcggtctatgccgagccgctggtcattcaggaacaaggaa

SEQ ID NO: 346352 - DNA, 75 bp, synthetic construct
  source 1..75: mol_type = other DNA
gccaataccgaagagttctgcattagctgccacgaaatgcgcaacacggtgtatcaggaatacatggattccgtg

SEQ ID NO: 346353 - DNA, 75 bp, synthetic construct
  source 1..75: mol_type = other DNA
tccctacctttggtagacctgagaatcttcttagggcaatcagcagtgtaatgagacaaacatataataatttag

SEQ ID NO: 346354 - DNA, 75 bp, synthetic construct
  source 1..75: mol_type = other DNA
ataatccgacatttaccggagaaccaaaagcgccgacgcctgccgcaggaaataacaccacgcggattgcgacta

SEQ ID NO: 346355 - DNA, 75 bp, synthetic construct
  source 1..75: mol_type = other DNA
gaggattctggatccgtgagattggtctttatgatgatgaaggcgtactcattgcggtggcgaactgcccggaaa

SEQ ID NO: 346356 - DNA, 75 bp, synthetic construct
  source 1..75: mol_type = other DNA
ccgctggtcattcaggaacaaggaagcttttctgctggtggcaccatcattaccgccccaggaacatttgatgcg

SEQ ID NO: 346357 - DNA, 75 bp, synthetic construct
  source 1..75: mol_type = other DNA
tactggcagacgccaaaattgccgatgcaggcaaaatcctttcgcgtatgtgcttcgaagccaacgctgactggg

SEQ ID NO: 346358 - DNA, 75 bp, synthetic construct
  source 1..75: mol_type = other DNA
ttatcattgatcctcgctataccgactctgttatcaccgaacatgctgagtggttacctattcgtccaactactg

SEQ ID NO: 346359 - DNA, 75 bp, synthetic construct
  source 1..75: mol_type = other DNA
tgttcactatctgcgcccacgactcgcccgctatggaatgaatgaaatagagatctatatctgggatcatgataa

SEQ ID NO: 346360 - DNA, 75 bp, synthetic construct
  source 1..75: mol_type = other DNA
tgggcaccattctgtgtgtgggcgaaggcgtgcgtgcggttcgtgacctcaaagcactctacccgcacaaaatcg

SEQ ID NO: 346361 - DNA, 75 bp, synthetic construct
  source 1..75: mol_type = other DNA
tttatcaccgcagccgtgacgcgcaggccgcaggcgtggcgtggggcgaagcggacatcaccgcgatcaaacgtc

SEQ ID NO: 346362 - DNA, 75 bp, synthetic construct
  source 1..75: mol_type = other DNA
gacctgggaacaggcgcaacagtggcgcgacgcaggcattcagcaggtggtttatcaccgcagccgtgacgcaca

SEQ ID NO: 346363 - DNA, 75 bp, synthetic construct
  source 1..75: mol_type = other DNA
aatatcatatgagtatgacggaagatttaaacataagatcaaataagtttgtcattatttttgcgaataactgta

SEQ ID NO: 346364 - DNA, 75 bp, synthetic construct
  source 1..75: mol_type = other DNA
gctggcaggccatttgtgatgcggcgcggcagattggtatgccggaagagacgttgcaggctttctgtcagcagt

SEQ ID NO: 346365 - DNA, 75 bp, synthetic construct
  source 1..75: mol_type = other DNA
atcattaacccggagctgttcggtgcgccagattgtgcaacgcagtccgaagcctttgccgagtgggtgaaagcc

SEQ ID NO: 346366 - DNA, 75 bp, synthetic construct
  source 1..75: mol_type = other DNA
atccgtatcgtcagcaattccttgttgagcgtgcggtctctttttcgcatcgtcagcgtgattgcagtgaattaa

SEQ ID NO: 346367 - DNA, 75 bp, synthetic construct
  source 1..75: mol_type = other DNA
atggcatccctgagagtctgtatccttataagaatggaaaaccgacggcgttgccaaatcatggaataagtatgg

SEQ ID NO: 346368 - DNA, 75 bp, synthetic construct
  source 1..75: mol_type = other DNA
tcattctactgtatagcgccagttcatatgcaaaaagcgaatcccctcccgcaagcactataactttcattgcac

SEQ ID NO: 346369 - DNA, 75 bp, synthetic construct
  source 1..75: mol_type = other DNA
cgcgacgcaggcattgggcaggtggtttatcaccgcagccgtgacgcgcaggccgcaggcgtggcgtggggcgaa

SEQ ID NO: 346370 - DNA, 75 bp, synthetic construct
  source 1..75: mol_type = other DNA
agagagtcacacatacctctgctcagttgccggtggccattgattatccggcggcactggcgttgcgtcagatgg

SEQ ID NO: 346371 - DNA, 75 bp, synthetic construct
  source 1..75: mol_type = other DNA
ttggcacgtgaaatggccggagctcgggcctgtttcattgctcagggatggggaccacagcgtcatgcgaatggt

SEQ ID NO: 346372 - DNA, 75 bp, synthetic construct
  source 1..75: mol_type = other DNA
gagcctgatggggcataagtccatcagctcaacggaggtctacacgaaggtgtttgcactggatgtggctgcacg

SEQ ID NO: 346373 - DNA, 75 bp, synthetic construct
  source 1..75: mol_type = other DNA
aatagtatacgggttaaattatttttctgttctaagtgttggtgttttgttttattttgttgttataacagaaca

SEQ ID NO: 346374 - DNA, 75 bp, synthetic construct
  source 1..75: mol_type = other DNA
cgtgcacaacattggccatgctgcgcgtattatcgcgtatggcgatgctgacgtgatggttgcaggtggcgcaga

SEQ ID NO: 346375 - DNA, 75 bp, synthetic construct
  source 1..75: mol_type = other DNA
acggggtgacgttctcagtaccggtgaccccccatacgttccgtcactcctacgcgatgcacatgctgtatgctg

SEQ ID NO: 346376 - DNA, 75 bp, synthetic construct
  source 1..75: mol_type = other DNA
aatgggtgaatgagctgccggacggcgaaccggtattggtggcgggtgatttcaacgactggcggcaaaaagcta

SEQ ID NO: 346377 - DNA, 75 bp, synthetic construct
  source 1..75: mol_type = other DNA
tgatgctaaaaggctggtcgctgattggcgatgcgttgtcgcactctattgtcccgggtgttgcgggggcatata

SEQ ID NO: 346378 - DNA, 75 bp, synthetic construct
  source 1..75: mol_type = other DNA
gcatcacgggaacgcggtgctgtcacgctatcccattgaacattatgagaatcgcgatgtttcggtcgatggcgc

SEQ ID NO: 346379 - DNA, 75 bp, synthetic construct
  source 1..75: mol_type = other DNA
ctgatggagtacctgcgggcagatttgacggatattgcacacagctgcgcactgattgaaggaggtgccagatga

SEQ ID NO: 346380 - DNA, 75 bp, synthetic construct
  source 1..75: mol_type = other DNA
gtgctcagggccacactttgcctgaaaaacacaataccggtgcttttgcctatgggttgtcagaggacggtttcg

SEQ ID NO: 346381 - DNA, 75 bp, synthetic construct
  source 1..75: mol_type = other DNA
tgttatgagctatttcgggttaataccgggagtcaagacgcggtttgaaattcgtagtgcgtacacagactccta

SEQ ID NO: 346382 - DNA, 75 bp, synthetic construct
  source 1..75: mol_type = other DNA
ggcatgatcccgaattatgtgcgttcctggcagcagggctatttgcagatcaaccatcacgccaaaattgtcaaa

SEQ ID NO: 346383 - DNA, 75 bp, synthetic construct
  source 1..75: mol_type = other DNA
acaaagatatgttgggctttaaaatcccattacctgaaaatacagaagaacaagccgccatcgccgccatcctct

SEQ ID NO: 346384 - DNA, 75 bp, synthetic construct
  source 1..75: mol_type = other DNA
gtcagcatagaaccacctgagcgtacaattgtgaaagaaggtgatatcttggtatgtgtaagaaatggcagtcgc

SEQ ID NO: 346385 - DNA, 75 bp, synthetic construct
  source 1..75: mol_type = other DNA
gtccatcaaaactgccacaatgcagcaactactgactggtaaaacccgtttgccacagtttgcgttgcgcaaaga

SEQ ID NO: 346386 - DNA, 75 bp, synthetic construct
  source 1..75: mol_type = other DNA
tggaactccgagtactaaaatttcagcatattggggaggaactcatccttggatgagttccggcgaattacacct

SEQ ID NO: 346387 - DNA, 75 bp, synthetic construct
  source 1..75: mol_type = other DNA
tcgcattgaattatgtactaatcagtctattgctgcgattttccccagcaaacatcattccacagaattcctgtt

SEQ ID NO: 346388 - DNA, 75 bp, synthetic construct
  source 1..75: mol_type = other DNA
tatgctgtagccgattatataaccgacgaagggcttgttaactccagtacaaagtatgtgcctaaaaattctgta

SEQ ID NO: 346389 - DNA, 75 bp, synthetic construct
  source 1..75: mol_type = other DNA
gtccactgccagcatcacgttcaggaaatacatttccactgaccttacagcgccagcggagccgccttacgtcat

SEQ ID NO: 346390 - DNA, 75 bp, synthetic construct
  source 1..75: mol_type = other DNA
cctcatccggtcaggaggtgattattgaaacgttgcagattaacatgggtgatcagcagtattttctttgtaccg

SEQ ID NO: 346391 - DNA, 75 bp, synthetic construct
  source 1..75: mol_type = other DNA
aggggttggtggcacgcacgttatgtatgtgttgcatcacgccgatcagccggagctgtatcacggtctgccgaa

SEQ ID NO: 346392 - DNA, 75 bp, synthetic construct
  source 1..75: mol_type = other DNA
tgcacgtgctcgataaagtgcagggcgcggcgcatttcgtggtgagcgatgatgaagcacggcagattatgcgtg

SEQ ID NO: 346393 - DNA, 75 bp, synthetic construct
  source 1..75: mol_type = other DNA
aaacgttccgtcaggcgatggctaaattgcgccgggtcggcgtcaccctgcttaatcagagtgttttactgcgtg

SEQ ID NO: 346394 - DNA, 75 bp, synthetic construct
  source 1..75: mol_type = other DNA
cagcacaacagcgcgtactcgctgacaaaaatgaaaaaatagactcactctccaccagactggagaagaaatccc

SEQ ID NO: 346395 - DNA, 75 bp, synthetic construct
  source 1..75: mol_type = other DNA
tcaaaagcaaatcgctgaagttatgggtgccactatcaatcagataactaacaaagatatgttgggctttaaaat

SEQ ID NO: 346396 - DNA, 75 bp, synthetic construct
  source 1..75: mol_type = other DNA
gtgcgccagctcaggcggctaaacagaaagcggctccggcagcaggcccgtgcatcagcggctggcgtgaaagaa

SEQ ID NO: 346397 - DNA, 75 bp, synthetic construct
  source 1..75: mol_type = other DNA
gagcgccagctcaggcggctaaacaggaagcggctccggcagcaggcccttgcatcagcggctggcgtgaaagaa

SEQ ID NO: 346398 - DNA, 75 bp, synthetic construct
  source 1..75: mol_type = other DNA
attattgctatcggttcttgctccgcgtggggcggtgtcgccgcagctggggttaaccccaccggcgcggtcagc

SEQ ID NO: 346399 - DNA, 75 bp, synthetic construct
  source 1..75: mol_type = other DNA
ggcagggcatgattctcatggtattggcatgatcccaagctatgtgcgttcctggagtcaggggcatctgcaaat

SEQ ID NO: 346400 - DNA, 75 bp, synthetic construct
  source 1..75: mol_type = other DNA
gggcgccagctcaggcggctaaacagaaagcggctccggcagcaggcccttgcatcagcggctggcgtgaaagaa

SEQ ID NO: 346401 - DNA, 75 bp, synthetic construct
  source 1..75: mol_type = other DNA
gtgcgccagctcaggcggctaaacaggaagcggctccggcagcaggcccatgcatcagcggctggcgtgaaagaa

SEQ ID NO: 346402 - DNA, 75 bp, synthetic construct
  source 1..75: mol_type = other DNA
gccagtcaaaggtgtaacgacagaagtggttgttgcaggtagcgatagcaaacgtcgggtgatgctgccaactta

SEQ ID NO: 346403 - DNA, 75 bp, synthetic construct
  source 1..75: mol_type = other DNA
ctgacgaggactcgtctgactgacattccgctttacctgttgctggaacccaacaatcctgcgttggctgcggct

SEQ ID NO: 346404 - DNA, 75 bp, synthetic construct
  source 1..75: mol_type = other DNA
aaatgcggttattcaagcaggtcctactttatttctgtatttcaccgctattatggcttcccgccagacagatat

SEQ ID NO: 346405 - DNA, 75 bp, synthetic construct
  source 1..75: mol_type = other DNA
ctgttatcaatattcctggctgcccgccgaacccgcacaacttcctcgcgaccgttgcgcacatcatcacttacg

SEQ ID NO: 346406 - DNA, 75 bp, synthetic construct
  source 1..75: mol_type = other DNA
ctgcaagaagttctgccaggcaaaaccgttatcaatattccgggctgcccgccgaacccgcacaacttcctcgcg

SEQ ID NO: 346407 - DNA, 75 bp, synthetic construct
  source 1..75: mol_type = other DNA
gcaccggttgtacggaatctctgcttcgtgcaacgcatccaacggtagaaaacctcgtgctggagactatctctc

SEQ ID NO: 346408 - DNA, 75 bp, synthetic construct
  source 1..75: mol_type = other DNA
ttccatgccggattacgattttcatcgggtggcgttacttatcgatgagcttcaggatgccattgacgcagtttt

SEQ ID NO: 346409 - DNA, 75 bp, synthetic construct
  source 1..75: mol_type = other DNA
tgttctggtttatgaagttgacagccagtggggaaaagtgtatatcctgcgcgtattgcatactgcacagaagtg

SEQ ID NO: 346410 - DNA, 75 bp, synthetic construct
  source 1..75: mol_type = other DNA
tggccagccaggacaggaagcgcattcgtgagtacattgcggagcagaacctggtggccgccattgaactggacg

SEQ ID NO: 346411 - DNA, 75 bp, synthetic construct
  source 1..75: mol_type = other DNA
atgctggaagatctgcgcgccaacagctggagtttacgcccgtgctgcatggttcttgcctatcgcgtcgctcat

SEQ ID NO: 346412 - DNA, 75 bp, synthetic construct
  source 1..75: mol_type = other DNA
ctgttattgattttgtcctgagattaacgctaacaataatcattatttctccggtgatttatttctcctgggatg

SEQ ID NO: 346413 - DNA, 75 bp, synthetic construct
  source 1..75: mol_type = other DNA
tgttctggtttatgaggtcgacagccagtggggaaaagtgtatatcctgcgcgtgttgcataccgcacagaagtg

SEQ ID NO: 346414 - DNA, 75 bp, synthetic construct
  source 1..75: mol_type = other DNA
ttacatgattgcaatgcaaaaaacgatcacaccgatgtgggaagtacgcagtacctatgatatctgtgcagatat

SEQ ID NO: 346415 - DNA, 75 bp, synthetic construct
  source 1..75: mol_type = other DNA
cgcaacggtcgtgtggaaggaacccgggaactggttattcacgggggaaccgcagaattcggaaaaaatcgtacg

SEQ ID NO: 346416 - DNA, 75 bp, synthetic construct
  source 1..75: mol_type = other DNA
tctggtttatgaggtcgatagccagtgggaaaaagtgtatatcctgcgtgtattgcatacaacacagaagtggcc

SEQ ID NO: 346417 - DNA, 75 bp, synthetic construct
  source 1..75: mol_type = other DNA
cgtagcatcaccctaccggtgatcctgtacaactttccggatctgacgggtcaggacttaaccccggaaaccgtg

SEQ ID NO: 346418 - DNA, 75 bp, synthetic construct
  source 1..75: mol_type = other DNA
caccggtatccagcacgtttcatcgtgacggaaccattgataaaacggcaatgcgtcaggttgctgacttcctga

SEQ ID NO: 346419 - DNA, 75 bp, synthetic construct
  source 1..75: mol_type = other DNA
gtctggttttgcggcggaaaacattcctttttcacctcagcctccagagattcatgccgggtcctgggtattgat

SEQ ID NO: 346420 - DNA, 75 bp, synthetic construct
  source 1..75: mol_type = other DNA
gtcaatttgctattaacttcaaaccaatagccggagagtgccctgagtgtcattatccgctactcatcgaaaaga

SEQ ID NO: 346421 - DNA, 75 bp, synthetic construct
  source 1..75: mol_type = other DNA
tgcgtaataatgagtcctgcccaaagtgcggggctgaactggttattcgatccgggaaacacggtccgtttcttg

SEQ ID NO: 346422 - DNA, 75 bp, synthetic construct
  source 1..75: mol_type = other DNA
ggtgctgccaaaagcggagattcctaatatcaaagcaaaatacacccttgatagtaaagaactgaccgcgccaat

SEQ ID NO: 346423 - DNA, 75 bp, synthetic construct
  source 1..75: mol_type = other DNA
aacgcccggctattctcgcggcgttaaaaggcggatggatcaacggcctggtgaccgatgaacacaccgctcgtt

SEQ ID NO: 346424 - DNA, 75 bp, synthetic construct
  source 1..75: mol_type = other DNA
gaaaagaaaaccgcgcagggtgtaaaacacttttgtgccagtaaacaatgtggaaagccgatttcggcggaataa

SEQ ID NO: 346425 - DNA, 75 bp, synthetic construct
  source 1..75: mol_type = other DNA
tggcgcaaatctggtattacgccagggacgctttggtatgtttattggttgcagtaactaccctgaatgcgaaca

SEQ ID NO: 346426 - DNA, 75 bp, synthetic construct
  source 1..75: mol_type = other DNA
attgaactttacgaccgtgataaacaggtggcgcactggccgctggttaccctggaatctgtcggggaaggcagc

SEQ ID NO: 346427 - DNA, 75 bp, synthetic construct
  source 1..75: mol_type = other DNA
cgccgctcaccagcgagtaggggaaatcgaactttatgaccgcgataaacaggtggcgcactggccgctggtcac

SEQ ID NO: 346428 - DNA, 75 bp, synthetic construct
  source 1..75: mol_type = other DNA
taacggtttattgtgggacaaaaccatgaatgttgacggcctgaaaacgggccatacttccggcgccgggtttaa

SEQ ID NO: 346429 - DNA, 75 bp, synthetic construct
  source 1..75: mol_type = other DNA
atgaatgttgacggcctgaaaacgggccatacttctggtgccgggtttaatcttattgcttcggctgtagacggg

SEQ ID NO: 346430 - DNA, 75 bp, synthetic construct
  source 1..75: mol_type = other DNA
tgcaaattttgcaccgtgggaaaaaggtcggtacggaacgcatctggtatggcgataaagaaaatatcgccctgg

SEQ ID NO: 346431 - DNA, 75 bp, synthetic construct
  source 1..75: mol_type = other DNA
ggtacgtgatttaagccgtggtttaattgtggactccggaaatgacgcttgtgttgcactggctgattatattgc

SEQ ID NO: 346432 - DNA, 75 bp, synthetic construct
  source 1..75: mol_type = other DNA
caattacaggcttacaaaaaggataaaagccagaacaaatgttaaaatcgggaacaaaactacgaaaattacatt

SEQ ID NO: 346433 - DNA, 75 bp, synthetic construct
  source 1..75: mol_type = other DNA
aaagaatgtgatggataaaggtgcagtagcaggtcttaaggagtggtttgttaactgtgtaggggtagattatga

SEQ ID NO: 346434 - DNA, 75 bp, synthetic construct
  source 1..75: mol_type = other DNA
taacgggttattgtgggataagaccatgaatgttgacggcctgaaaacgggccatacttctggtgccgggtttaa

SEQ ID NO: 346435 - DNA, 75 bp, synthetic construct
  source 1..75: mol_type = other DNA
aatggtgtttttaacgatattgcagaattacttccgcgattcattaagacgcaccgtcgggataatggtcagccc

SEQ ID NO: 346436 - DNA, 75 bp, synthetic construct
  source 1..75: mol_type = other DNA
gttcgcgcctgtctgcgtgggcgttccatgcgtcgccgtgtctacaatccggaccgcctgaaatatccgatgaaa

SEQ ID NO: 346437 - DNA, 75 bp, synthetic construct
  source 1..75: mol_type = other DNA
aaaacgccggaatgggcctcgcaaatcactggtgttccggcagacaaaatcatcaaactggctcgtgaaatcggt

SEQ ID NO: 346438 - DNA, 75 bp, synthetic construct
  source 1..75: mol_type = other DNA
tgtaatgacggagccgccaaaatctggaattaaatgggatgatgttgttgcactcattaaagctgtgggtggaac

SEQ ID NO: 346439 - DNA, 75 bp, synthetic construct
  source 1..75: mol_type = other DNA
catagcaggcagtttcagacgacgactttaggaacctgtgctgctgtggcagtacctggatgcaattgccctttc

SEQ ID NO: 346440 - DNA, 75 bp, synthetic construct
  source 1..75: mol_type = other DNA
tgaccgacattggggggtatataggcgcatatgcaatatggggaataggatatgcaggaggtgcaatattaattt

SEQ ID NO: 346441 - DNA, 75 bp, synthetic construct
  source 1..75: mol_type = other DNA
tggagatgaattgtcttctgctttgactggacagtctgatatagccaattcaatagataatctttggcaagcatt

SEQ ID NO: 346442 - DNA, 75 bp, synthetic construct
  source 1..75: mol_type = other DNA
ctacggaaactttgatgcccgctaccagaccaaaacaggtggcgtacagaattttcagtataccagtgaggtgtt

SEQ ID NO: 346443 - DNA, 75 bp, synthetic construct
  source 1..75: mol_type = other DNA
ggcgtacagaattttcagtataccagtgaggtgttttacaacccgggcgggaacgagcacagcaggacgtttcga

SEQ ID NO: 346444 - DNA, 75 bp, synthetic construct
  source 1..75: mol_type = other DNA
cactggcgcacgcgaaggttcatacagcttaccgtttgttcgtatgcctactctcgagaatccgatccagaccag

SEQ ID NO: 346445 - DNA, 75 bp, synthetic construct
  source 1..75: mol_type = other DNA
tacgtgcagcaaatactccagaacaacacgttcaggctgtttacaaagcagaacaagatataaactctacaaaaa

SEQ ID NO: 346446 - DNA, 75 bp, synthetic construct
  source 1..75: mol_type = other DNA
gacgaccgacagaatcacaagtaaacagcacaagtaacgatagcaacggtagaacaactaaagggggtaacggct

SEQ ID NO: 346447 - DNA, 75 bp, synthetic construct
  source 1..75: mol_type = other DNA
gagtatcaagctcttagttttgacgctgtggaatcgaccaaggttaaccgcaatgcagacgttacaagttatgcc

SEQ ID NO: 346448 - DNA, 75 bp, synthetic construct
  source 1..75: mol_type = other DNA
atgtggaaggctggcagaacagcgatattaatagcgcgatgtatcagaatttagagaagttgttaaatactgtgc

SEQ ID NO: 346449 - DNA, 75 bp, synthetic construct
  source 1..75: mol_type = other DNA
ccattgacttcggtacaggtgtgggagttggtactgatagttatagtggtgcagggaaaaatgcaacagcaatta

SEQ ID NO: 346450 - DNA, 75 bp, synthetic construct
  source 1..75: mol_type = other DNA
cagaaaataaaacttttgagaacgttgttttaacaggcatcgaatacacagaagaggcaagcgaatctctggtat

SEQ ID NO: 346451 - DNA, 75 bp, synthetic construct
  source 1..75: mol_type = other DNA
tgatcgtctgaaatatccgatgaaacgggtaggggcgcgtggtgaaggcaaatttgagcgcattagctgggaaga

SEQ ID NO: 346452 - DNA, 75 bp, synthetic construct
  source 1..75: mol_type = other DNA
agcggcttgccgccaggaaatgtggatcaacccgcttgatgcgcaaaaacgcggtatcagcaacggcgataaagt

SEQ ID NO: 346453 - DNA, 75 bp, synthetic construct
  source 1..75: mol_type = other DNA
cggcgctgcgtgatggggttcgcgggaaagataagctggatgtgccgatcaagatgatctggaactatgccggta

SEQ ID NO: 346454 - DNA, 75 bp, synthetic construct
  source 1..75: mol_type = other DNA
aaagggggtaacggctttgcgatcattacctctaacctcggcagtggtgcaaatgctgcttacaatgactaccag

SEQ ID NO: 346455 - DNA, 75 bp, synthetic construct
  source 1..75: mol_type = other DNA
gtatggcactgtaaacactgtagctatcaaaacacagccatctaagaacatcggggctaatatgaaaaaacgtgt

SEQ ID NO: 346456 - DNA, 75 bp, synthetic construct
  source 1..75: mol_type = other DNA
atgtcgaaacagacaataccggcgatgataattacgacgggctgcaccaggtacgcgcctgcctgcgtgggcgtt

SEQ ID NO: 346457 - DNA, 75 bp, synthetic construct
  source 1..75: mol_type = other DNA
tgccactgattaccctgtgctggcgaaagtgtttccttcgctggtattacctgaagcccgcggtgatttcattcg

SEQ ID NO: 346458 - DNA, 75 bp, synthetic construct
  source 1..75: mol_type = other DNA
tgtcgctggtcttctcgcataccttggtttgggagaaggtgctccagctattggcgttccgttcttctggccgtc

SEQ ID NO: 346459 - DNA, 75 bp, synthetic construct
  source 1..75: mol_type = other DNA
ggcactgaccggaacgccaacaacaccaacagcgccacaggggactaatagtacccagatcgcaagcacggcttt

SEQ ID NO: 346460 - DNA, 75 bp, synthetic construct
  source 1..75: mol_type = other DNA
gatacgggatggggtatggtgtcagtggggtacaatgtccagtttgtcactgcctctgataacccggtccgctcg

SEQ ID NO: 346461 - DNA, 75 bp, synthetic construct
  source 1..75: mol_type = other DNA
aactctgtgggtgatggtgtgaattttgttgcagtcagaccgcgaaatattgcatttaactttctggtgagggct

SEQ ID NO: 346462 - DNA, 75 bp, synthetic construct
  source 1..75: mol_type = other DNA
aataataccacgcagcttgcgaccaccgcgtttgttcaggcagcactcacggcccttattaatggtgcgccagcc

SEQ ID NO: 346463 - DNA, 75 bp, synthetic construct
  source 1..75: mol_type = other DNA
accgtcatattgttgttgccaatgatggttacgacacaaaagatgaatgggaactggctacgattttcaaaaaga

SEQ ID NO: 346464 - DNA, 75 bp, synthetic construct
  source 1..75: mol_type = other DNA
atgattctggttgtcacgaataccgaagctattacgctgaaaatcgacccatcggtggtactggcgacccgtaaa

SEQ ID NO: 346465 - DNA, 75 bp, synthetic construct
  source 1..75: mol_type = other DNA
acggcgggtcagttgcctggaaagtgatgtgactgaaatcaaaaacaacctgattactctcaccacaagaagcga

SEQ ID NO: 346466 - DNA, 75 bp, synthetic construct
  source 1..75: mol_type = other DNA
acacaaaaagggattgttcagctcagtagcgccacgaacagcacgtctgaaacgctggcagcgacaccaaaagct

SEQ ID NO: 346467 - DNA, 75 bp, synthetic construct
  source 1..75: mol_type = other DNA
aaatcggcgattgcagcaatggtggggtctgcacctgcggcactggatacattgaacgaactggcggcggcgctg

SEQ ID NO: 346468 - DNA, 75 bp, synthetic construct
  source 1..75: mol_type = other DNA
cctgatttacgtggtgagtttattcgtggctgggatgatgggcgcggggtagattctggtcgttccctactttcg

SEQ ID NO: 346469 - DNA, 75 bp, synthetic construct
  source 1..75: mol_type = other DNA
tgagaaaacgccggaatgggcggcgcagatcaccggtatcccggcaacgcgtataaaacagctggcgcgggaaat

SEQ ID NO: 346470 - DNA, 75 bp, synthetic construct
  source 1..75: mol_type = other DNA
ttttccttggctgttccggtccgaaagtgctgacacaggagatggtgaagaaaatggctcgcgcgccgatgatcc

SEQ ID NO: 346471 - DNA, 75 bp, synthetic construct
  source 1..75: mol_type = other DNA
cgccagaactgatgattgatggtgaaatgcacggtgatgcggcgctggtggaagcgattcgcaacgatcgtatgc

SEQ ID NO: 346472 - DNA, 75 bp, synthetic construct
  source 1..75: mol_type = other DNA
ggcgttcacaccgcaggcgcaatgaacgcgctgctgctgccgagtggtaacacctttattgctgatacttacgtc

SEQ ID NO: 346473 - DNA, 75 bp, synthetic construct
  source 1..75: mol_type = other DNA
aagctgattgacgaagcgctggtcaatcaatactgcgtcggttttgaccgctccacactgccggaaaacgcggcg

SEQ ID NO: 346474 - DNA, 75 bp, synthetic construct
  source 1..75: mol_type = other DNA
tttatcttccgtggcgcgctggacgttggcgcaacggctatcaatgaagagatgaaactggcggcggtacgcgcg

SEQ ID NO: 346475 - DNA, 75 bp, synthetic construct
  source 1..75: mol_type = other DNA
gtaacccgacagtgatcggcgcgattatggttcagcgtggtgaagccgatgcgatgatctgcggtacggtggggg

SEQ ID NO: 346476 - DNA, 75 bp, synthetic construct
  source 1..75: mol_type = other DNA
cgatggagtcgggcgtggcgacgcgtccgattgctgatttcgacgtctacatcgacaagctgactgagttcgttt

SEQ ID NO: 346477 - DNA, 75 bp, synthetic construct
  source 1..75: mol_type = other DNA
ctcaggaactggtgacgttggggctggcgaaaccgatccttattggtcgtccaaacgtgatcgaaatgcgcattc

SEQ ID NO: 346478 - DNA, 75 bp, synthetic construct
  source 1..75: mol_type = other DNA
cgcgagcggatgaatattccggtattccacgacgatcagcacggcacggcaattatcagcactgccgccatcctc

SEQ ID NO: 346479 - DNA, 75 bp, synthetic construct
  source 1..75: mol_type = other DNA
taacgccaatcgcgtcagtgcgtcgtatcgttaacatggtggcgctggccgtggttgaagcgcaaactcaaccgc

SEQ ID NO: 346480 - DNA, 75 bp, synthetic construct
  source 1..75: mol_type = other DNA
cccgtcgtcaagcaagatgcgtaaagcgctggagctggtgagagaacgtgctcctgaactgatgattgatggtga

SEQ ID NO: 346481 - DNA, 75 bp, synthetic construct
  source 1..75: mol_type = other DNA
aacacctttattgccgatacctacgtcaatgacgaaccagacgcagaagagctggcggagatcaccttgatggcg

SEQ ID NO: 346482 - DNA, 75 bp, synthetic construct
  source 1..75: mol_type = other DNA
gttactgccttcgctgtctttttcctgtagctttcacctttcagttcgaacatatatccgtgatggatcagccgg

SEQ ID NO: 346483 - DNA, 75 bp, synthetic construct
  source 1..75: mol_type = other DNA
acacgatcggcgtcggcgttaaccgtccgggctgcttcgccgagtatctggtgattccggcgttcaacgccttca

SEQ ID NO: 346484 - DNA, 75 bp, synthetic construct
  source 1..75: mol_type = other DNA
agaaaacctcaatgatgtaatggcagaactcggcatgaccgaagggtttgatgttggtctggagatgtccggtgc

SEQ ID NO: 346485 - DNA, 75 bp, synthetic construct
  source 1..75: mol_type = other DNA
gcgtttctggcgaaggccatatcacctgcggtcactgtcgcaactgtcgtggcggtcgtacccatctgtgccgca

SEQ ID NO: 346486 - DNA, 75 bp, synthetic construct
  source 1..75: mol_type = other DNA
ggggatgggcgtgggaggacggttgatacgcactggcatcgagcacctgaggttgatgggctgccagacggtttt

SEQ ID NO: 346487 - DNA, 75 bp, synthetic construct
  source 1..75: mol_type = other DNA
atggatgcagcaattcagcatctcaggcgtgaggagtacccggtcctggattcagacgttgagaaactgtcacca

SEQ ID NO: 346488 - DNA, 75 bp, synthetic construct
  source 1..75: mol_type = other DNA
agttgaaatcaggcgatatggtccatgtattcaacgatcgcggtgtggtggagatcccctgcaaggtgacacagc

SEQ ID NO: 346489 - DNA, 75 bp, synthetic construct
  source 1..75: mol_type = other DNA
aatcgtccgggggctggatgatatctggcaggccattcaaatcatcctgcgaactcctcgcggcagcgacccgca

SEQ ID NO: 346490 - DNA, 75 bp, synthetic construct
  source 1..75: mol_type = other DNA
cagtgaaacccctcattgacggtgagcatcttacgctttgtgtgagctggaaagggaatgacggggaaactcaca

SEQ ID NO: 346491 - DNA, 75 bp, synthetic construct
  source 1..75: mol_type = other DNA
gggattgtgtcaattggattacatcatccggtggcgaattgtctcgattacgcgcaacttttaaaggaaaagtac

SEQ ID NO: 346492 - DNA, 75 bp, synthetic construct
  source 1..75: mol_type = other DNA
cgccgatcattacccatcgtttctctatcgatgatttccagaagggctttgacgctatgcgttcgggccagtccg

SEQ ID NO: 346493 - DNA, 75 bp, synthetic construct
  source 1..75: mol_type = other DNA
gagaatgagtctatttatattccttcaggatcgcctcactgtttacaaaatcctgggaaaatccccctcaatctt

SEQ ID NO: 346494 - DNA, 75 bp, synthetic construct
  source 1..75: mol_type = other DNA
gcgataaccgagtatctgattctgagcaccagcgtttagtggctaccaaagcagctcttgaaattatcaaggccg

SEQ ID NO: 346495 - DNA, 75 bp, synthetic construct
  source 1..75: mol_type = other DNA
tcgccctgctcaaggtgcgtaacgtattcggcgacgtcgtggctcttgagccgcttccgtcgctgtatctccggc

SEQ ID NO: 346496 - DNA, 75 bp, synthetic construct
  source 1..75: mol_type = other DNA
tggtgggctgattttctggatgcgaacagagagaagggtatcagtccgtttgaatatgcaaaggttaacaatccg

SEQ ID NO: 346497 - DNA, 75 bp, synthetic construct
  source 1..75: mol_type = other DNA
aatacctgctcaacacagaacgtgatcttgccgctcgcgtgcgtgatcgttatgacatgtaccagaaatccctgc

SEQ ID NO: 346498 - DNA, 75 bp, synthetic construct
  source 1..75: mol_type = other DNA
caaaagatgagttcctgaatataaaaaccatcagtgcccaggatcagctcgtcgcgcaccgtttcccacccggac

SEQ ID NO: 346499 - DNA, 75 bp, synthetic construct
  source 1..75: mol_type = other DNA
atgaccctggctgaattgaaaaaggtcattgccgatatctatcccggtcagacacagttttatgtaattgaattt

SEQ ID NO: 346500 - DNA, 75 bp, synthetic construct
  source 1..75: mol_type = other DNA
gctggagtttacgtccgtgctgcatggttctagcctatcgcgtcgctcatttttgttcggtgtggcgcaaaaaga

SEQ ID NO: 346501 - DNA, 75 bp, synthetic construct
  source 1..75: mol_type = other DNA
cctgagtaaattaccacaggggattagtatgattatctcagcaatggctactcgctttattattcgacgcattcc

SEQ ID NO: 346502 - DNA, 75 bp, synthetic construct
  source 1..75: mol_type = other DNA
gacgaccgatcagatggaaatggctgtctttgactacctgctgtttggtgatgtggccattctgaaggtccgtaa

SEQ ID NO: 346503 - DNA, 75 bp, synthetic construct
  source 1..75: mol_type = other DNA
gtgatcgacctgctgccgctgccgtcgctgtatctgcgctgccggaaagacggctcgtttgccgttctgcaggaa

SEQ ID NO: 346504 - DNA, 75 bp, synthetic construct
  source 1..75: mol_type = other DNA
gacaatgagtatgaccactggcgactcccgattgatcgcctggcgctggcccagttgccgaaccttaacggccag

SEQ ID NO: 346505 - DNA, 75 bp, synthetic construct
  source 1..75: mol_type = other DNA
catggagggaatcaacagtgacccggatatcaggcgactgggggaggtgaaatttattcttgaatttgatgagcc

SEQ ID NO: 346506 - DNA, 75 bp, synthetic construct
  source 1..75: mol_type = other DNA
ctgttaccgccgaaaacaccgcgccggcgcagcaaaaaatgtcgatgatctcttttggcaatccggagcgggcta

SEQ ID NO: 346507 - DNA, 75 bp, synthetic construct
  source 1..75: mol_type = other DNA
tatgcgacggctgataatggaaagtatcaacagtgaccgtgatattctccgcctcgggcgcgtggtgtttgacct

SEQ ID NO: 346508 - DNA, 75 bp, synthetic construct
  source 1..75: mol_type = other DNA
gctaccgttgggcaacttatgggaatgcgatacaaaggctgggagtcaggctatgaggacgcatttgtctatgac

SEQ ID NO: 346509 - DNA, 75 bp, synthetic construct
  source 1..75: mol_type = other DNA
ctggaaaaaatacttacccagaacccgatggaaatttacccggcacgcattccaaaagcccctgatttctggcat

SEQ ID NO: 346510 - DNA, 75 bp, synthetic construct
  source 1..75: mol_type = other DNA
cgcgcctcgcgatgtatgcccataaagaagattgcggcagtctgctggtacaaattaaccatccgcaagtcatcc

SEQ ID NO: 346511 - DNA, 75 bp, synthetic construct
  source 1..75: mol_type = other DNA
ggtcgccgaataaacactggacgccggaacagcaaactgcaattgaccattttagcgccatgtcttttgacgaac

SEQ ID NO: 346512 - DNA, 75 bp, synthetic construct
  source 1..75: mol_type = other DNA
ttgaacaactttttgccgattacgagattattccgccatttcgtcaactggcacgacgcacggtacttctcacgc

SEQ ID NO: 346513 - DNA, 75 bp, synthetic construct
  source 1..75: mol_type = other DNA
atttttactctctgtttgttaaacatccttttacccgactggttgcccagcgactgatatggggcatttatccgg

SEQ ID NO: 346514 - DNA, 75 bp, synthetic construct
  source 1..75: mol_type = other DNA
ccgggcagtggtgaagagttatttatcggcatcgtcaaaaccggttatagattgcaccgataacagcagtctgcc

SEQ ID NO: 346515 - DNA, 75 bp, synthetic construct
  source 1..75: mol_type = other DNA
atctgtcacttttgccgaactcgatacgtttgatttgagtgaagcgttaagcgcacctgacgtcattttccatta

SEQ ID NO: 346516 - DNA, 75 bp, synthetic construct
  source 1..75: mol_type = other DNA
caaaaacctgctcccgcgtcttgaaactgccctacgcaccacccgacgctggtcgctggcagattttcattctct

SEQ ID NO: 346517 - DNA, 75 bp, synthetic construct
  source 1..75: mol_type = other DNA
ctgcaaaccgtggcaaaccgctggcagcgtacagatgtatggcctgccctggagcaattacttaaacagagtcca

SEQ ID NO: 346518 - DNA, 75 bp, synthetic construct
  source 1..75: mol_type = other DNA
gagggcaaatctgcccgtgccgtcagcggcctgaagatccttaccctgatgaataatgatatggcgctgatacaa

SEQ ID NO: 346519 - DNA, 75 bp, synthetic construct
  source 1..75: mol_type = other DNA
agctgcattacttgccctgcgtttactttacgaacagggacatggcgaattgctacaaaccgtggcaaaccgctg

SEQ ID NO: 346520 - DNA, 75 bp, synthetic construct
  source 1..75: mol_type = other DNA
acaatcaatctgtcacttttgctgaactcgatgtatttgatttgagtgaagccttaagtacgccggacatcattt

SEQ ID NO: 346521 - DNA, 75 bp, synthetic construct
  source 1..75: mol_type = other DNA
atctgaggatggtgttaactataatgtgtatacacatgacgcagcaccaggcattaaaatattaatcgatgaaca

SEQ ID NO: 346522 - DNA, 75 bp, synthetic construct
  source 1..75: mol_type = other DNA
actaactcacaatagtcactacttactcacctggagaaaactatgtcgaaagaacacactacggaacatctgcgt

SEQ ID NO: 346523 - DNA, 75 bp, synthetic construct
  source 1..75: mol_type = other DNA
ttcaacaccttcagttgaggttcagtcaattcacgctggttttgattgggattccgggaaagtgctgattttccc

SEQ ID NO: 346524 - DNA, 75 bp, synthetic construct
  source 1..75: mol_type = other DNA
atacacttataatggattggagggcagcgatatcatatcaacaggctattctattggtggcactggcagaacaat

SEQ ID NO: 346525 - DNA, 75 bp, synthetic construct
  source 1..75: mol_type = other DNA
tatgcatttggctttggtaaacctactggtaatccagaagcaagcactagtacatggcgtgaagttcttaatcaa

SEQ ID NO: 346526 - DNA, 75 bp, synthetic construct
  source 1..75: mol_type = other DNA
gtggatgcactggacggtatccaggtaccggaagtgaacgatcaggacggtaacggcaaggcggatgcagaggaa

SEQ ID NO: 346527 - DNA, 75 bp, synthetic construct
  source 1..75: mol_type = other DNA
ccggcaatgtggtccaggccgcgccttatcactaataatcagcctgttaccgatgacgctctggaaattatcggc

SEQ ID NO: 346528 - DNA, 75 bp, synthetic construct
  source 1..75: mol_type = other DNA
tactgcccggcaaactggatgcggcgcgcaaatcattagtgggtcagtggcattactccccgcgcagagtagagg

SEQ ID NO: 346529 - DNA, 75 bp, synthetic construct
  source 1..75: mol_type = other DNA
agcctgtatcgcgcaaaatgacagccaacagttgctcgacgaaatcgtccaacaagaggggctggaatatgcgac

SEQ ID NO: 346530 - DNA, 75 bp, synthetic construct
  source 1..75: mol_type = other DNA
gatattactgatagtgtgcgcaaaggtcagtcttggcacgcatatcaggaatataaaaagcataaagagcagttg

SEQ ID NO: 346531 - DNA, 75 bp, synthetic construct
  source 1..75: mol_type = other DNA
gggtctggaaggtaaactggttcagcagttcaccaaaatcttcatgggcctggcgaccattttcctggagcgcga

SEQ ID NO: 346532 - DNA, 75 bp, synthetic construct
  source 1..75: mol_type = other DNA
ttatcaggggttgttgctacgtgtttgatggccagcaggatgaaatatctgatgcgtatatctgcgcaacagacg

SEQ ID NO: 346533 - DNA, 75 bp, synthetic construct
  source 1..75: mol_type = other DNA
atggctttgaccttctggctgcgtatcaatgagaaaaagcatctgttcgcgggtgaggactattttctcagtatc

SEQ ID NO: 346534 - DNA, 75 bp, synthetic construct
  source 1..75: mol_type = other DNA
gctgtggcggattatcgcgctgctaccgtggcccatgaaaaaatcaaaaagcaggctacgcagggcgatgaatta

SEQ ID NO: 346535 - DNA, 75 bp, synthetic construct
  source 1..75: mol_type = other DNA
gccaccgtttgttaaacgtgttgatgtggtaaccgcactggagatggaagccgccgtgaaggcatccgtgcaaca

SEQ ID NO: 346536 - DNA, 75 bp, synthetic construct
  source 1..75: mol_type = other DNA
ccagatagcggcagccaggcctgtggtgatatcggccctgggcgaatgctcgatccgttaaccattgttgatatg

SEQ ID NO: 346537 - DNA, 75 bp, synthetic construct
  source 1..75: mol_type = other DNA
aatacctccgtgctgctgcttgaagcgggcggcccggactatcgctttgacttccgcacccagatgcccgctgcc

SEQ ID NO: 346538 - DNA, 75 bp, synthetic construct
  source 1..75: mol_type = other DNA
cgtaccggtcgtggtacgtctggaaggtaacaacgccgaactcggtgcgaagaaactggctgacagcggcctgaa

SEQ ID NO: 346539 - DNA, 75 bp, synthetic construct
  source 1..75: mol_type = other DNA
ccttgccgaaggcgaagaagctctcagcttcagcgaatttaaacaggcgctttccagttcggcaaaatctaacgg

SEQ ID NO: 346540 - DNA, 75 bp, synthetic construct
  source 1..75: mol_type = other DNA
cgttggcgtaggcacttaccgttccatgaaagcgggtttacccaatgaagatgcgccgggcgtttatgacgcgct

SEQ ID NO: 346541 - DNA, 75 bp, synthetic construct
  source 1..75: mol_type = other DNA
gccgtgtgtggtgcggatctggtggttaccgcaatggcagaaggacgtcatgcggacaggggatcattgactggc

SEQ ID NO: 346542 - DNA, 75 bp, synthetic construct
  source 1..75: mol_type = other DNA
tcttttcttttcaatattagtttcaatctattggtatttaactgtaactaaaaaatatttaatggaacgtgcaaa

SEQ ID NO: 346543 - DNA, 75 bp, synthetic construct
  source 1..75: mol_type = other DNA
ccttaccgaaggcgaagaagctctcagcttcagtgagtttaaacaggcgctttccagctcggcaaaatctaacgg

SEQ ID NO: 346544 - DNA, 75 bp, synthetic construct
  source 1..75: mol_type = other DNA
ctccggcatggcgaaatcccgccgcttgcgcaccgcacgtcaggaacatcaaccgtggcatgccagtaccgcggc

SEQ ID NO: 346545 - DNA, 75 bp, synthetic construct
  source 1..75: mol_type = other DNA
aagaggtgaagaacgcccgcgaagagggggccaacttcgaatttaacgtccagccggtggcgcttgagctgaatg

SEQ ID NO: 346546 - DNA, 75 bp, synthetic construct
  source 1..75: mol_type = other DNA
cgggcggcccggactatcgctttgacttccgcacccagatgcccgctgccctggcattcccgctacagggtaaac

SEQ ID NO: 346547 - DNA, 75 bp, synthetic construct
  source 1..75: mol_type = other DNA
aaggaaacataccaggataatcagcctagcggagttgaatgcaatttttataaaattgcaaagaatattcagacc

SEQ ID NO: 346548 - DNA, 75 bp, synthetic construct
  source 1..75: mol_type = other DNA
ctctggctggcttgatgaatactgagtccgaacgtcgttatcagatgagtgaccggctcacgcttaaaggctggt

SEQ ID NO: 346549 - DNA, 75 bp, synthetic construct
  source 1..75: mol_type = other DNA
gcgctggatctcgataactgggcgcaagaacccggtctggagaactggagttatctcgactgcctgccctactac

SEQ ID NO: 346550 - DNA, 75 bp, synthetic construct
  source 1..75: mol_type = other DNA
aggagggagcttactttgtggcgaacagaatgctggctgcctgggaagctggttttattgatgatactgcaaaga

SEQ ID NO: 346551 - DNA, 75 bp, synthetic construct
  source 1..75: mol_type = other DNA
cggcggcaaaaacaaacgggtcatgcgcaacctgatcatcgataacctgaccgttagccacgctaattacgccat

SEQ ID NO: 346552 - DNA, 75 bp, synthetic construct
  source 1..75: mol_type = other DNA
gtatgtgttatttattatttgcaagataatgatactccttctattgatgcactcgaaagttggttagataattgt

SEQ ID NO: 346553 - DNA, 75 bp, synthetic construct
  source 1..75: mol_type = other DNA
gcacgctgccagggcttgagaaattagccgacgccccccaatttaaattcaaagagatacgtcatgtaggcccgg

SEQ ID NO: 346554 - DNA, 75 bp, synthetic construct
  source 1..75: mol_type = other DNA
aggcttacgaagaatacttcgaaggccttgccgaaggcgaagaagctcacagcttcaacgaatttaaacaggtgc

SEQ ID NO: 346555 - DNA, 75 bp, synthetic construct
  source 1..75: mol_type = other DNA
gtgccggctctgccggcaacgtcctcgctacacgtctgactgaagatcccaacacgaccgtattgctgcttgaag

SEQ ID NO: 346556 - DNA, 75 bp, synthetic construct
  source 1..75: mol_type = other DNA
agcaaatggtatttcgcggttgttaaaacgctggggtctgtcaccgcaaaatgtggtagcgattggcgacagcgg

SEQ ID NO: 346557 - DNA, 75 bp, synthetic construct
  source 1..75: mol_type = other DNA
tgcgctcgacggcattatgaagccggttaccagtggttttggctttatcgacctgattattcctggcctgcataa

SEQ ID NO: 346558 - DNA, 75 bp, synthetic construct
  source 1..75: mol_type = other DNA
atggcgaaattgtcggtgaaggttaccaccaacgagcgggtgaaccacatgccgaagtacacgcgttgcgtatgg

SEQ ID NO: 346559 - DNA, 75 bp, synthetic construct
  source 1..75: mol_type = other DNA
cgatggcgcgaccgtttcttgctgatgcggagctgctgtcaaaagcgcaatcggggcgagccgatgagatcaaca

SEQ ID NO: 346560 - DNA, 75 bp, synthetic construct
  source 1..75: mol_type = other DNA
ggtacttttgccgaaacggtagagctggcgcaggccattgaagcggcgggcgcgaccattatcaacaccggcatt

SEQ ID NO: 346561 - DNA, 75 bp, synthetic construct
  source 1..75: mol_type = other DNA
acttcattattatctatcggctgtcgatgctcgacctggtagaaggcggcgggacttttaccgaaacggtagaac

SEQ ID NO: 346562 - DNA, 75 bp, synthetic construct
  source 1..75: mol_type = other DNA
ctgattgatagcgggaaaacggtgcatttaattggcggctgcgatgtggctatggagctggacgcacgacgggca

SEQ ID NO: 346563 - DNA, 75 bp, synthetic construct
  source 1..75: mol_type = other DNA
ggatgatcgaagtgactggcgtgacactgaaacttaatcacaccgtgaccgcagatcagttaaaggcgttcgatg

SEQ ID NO: 346564 - DNA, 75 bp, synthetic construct
  source 1..75: mol_type = other DNA
atcccgcgtagcccacggcagattgtgatgctccaacgcaaagccagcaaaccaggacaagggttgggcaaaact

SEQ ID NO: 346565 - DNA, 75 bp, synthetic construct
  source 1..75: mol_type = other DNA
tgtattttctttggatgtggtgcttcctgttgtggtatcggcgatgtttacgcgtttctttattcgtcgtattcc

SEQ ID NO: 346566 - DNA, 75 bp, synthetic construct
  source 1..75: mol_type = other DNA
tctgatgtcttttgatgttgttttgcccatgatggtttcagccatgtttacgcgtttctttatacgccgtattcc

SEQ ID NO: 346567 - DNA, 75 bp, synthetic construct
  source 1..75: mol_type = other DNA
aagtacgaggtcgaggcggcgatgtctgagccgggggctattttttcaaagcctctcgatggcagaggcccattt

SEQ ID NO: 346568 - DNA, 75 bp, synthetic construct
  source 1..75: mol_type = other DNA
ttaagttatctctgtggtcatccgttgccggcagactggctggtagtgatgctgaacctggtgtttggtgtcatg

SEQ ID NO: 346569 - DNA, 75 bp, synthetic construct
  source 1..75: mol_type = other DNA
ttttaacctgctggtctgtgtgctggtgatacgcgcacgcgggaacgtttcaaaaatccttgtattacgaaggcg

SEQ ID NO: 346570 - DNA, 75 bp, synthetic construct
  source 1..75: mol_type = other DNA
atgacaaataatcttccaggattactgaatgcggcgttatgtacggttatcgtgctgacgctttttttctaccgc

SEQ ID NO: 346571 - DNA, 75 bp, synthetic construct
  source 1..75: mol_type = other DNA
attttattattatttatcgcctgtcaatgctcgatctggtagaagacggcagcacatttgctgaaacagtacaac

SEQ ID NO: 346572 - DNA, 75 bp, synthetic construct
  source 1..75: mol_type = other DNA
atgcacaccgggctggaggaatacccggacggtgccgagcggctggcggcgttttatgctgaacgcgcccgtcac

SEQ ID NO: 346573 - DNA, 75 bp, synthetic construct
  source 1..75: mol_type = other DNA
tacgaaacgctgcgctactaccggcggatgatcgaagtaacgggcgtgacgctgaaactcaatcacaccgtaaca

SEQ ID NO: 346574 - DNA, 75 bp, synthetic construct
  source 1..75: mol_type = other DNA
ccacgtctcgctgccgctggtgaccaccaaccggattaacgatccgcaggttgccgacgacattctctcgcgcgg

SEQ ID NO: 346575 - DNA, 75 bp, synthetic construct
  source 1..75: mol_type = other DNA
gcccgtggtcagcaagaacagtatgtggcgctcaaacagcctgcggtgaaaaaagcgaagaagccgccgcgccaa

SEQ ID NO: 346576 - DNA, 75 bp, synthetic construct
  source 1..75: mol_type = other DNA
caatatggcgacgcgcattgtcgatctcgatcgcggcaaactggtgacctacccggggaattacgaccagtatct

SEQ ID NO: 346577 - DNA, 75 bp, synthetic construct
  source 1..75: mol_type = other DNA
atctcacggaaataggtacgtttatcgcgcggcgcatcaatgagatcaacacttgtattggctgcaaccaggcct

SEQ ID NO: 346578 - DNA, 75 bp, synthetic construct
  source 1..75: mol_type = other DNA
ggggcggcgattaccgcaaccggatgcgatttgccgtagaagtagtgcgtgcggtgcgcgaacgcgtcggcaacg

SEQ ID NO: 346579 - DNA, 75 bp, synthetic construct
  source 1..75: mol_type = other DNA
tggcatggaaggtggcgcaatgctcaacgacgccagccagatcccacaccatcgcaccattaccgaagccgtaca

SEQ ID NO: 346580 - DNA, 75 bp, synthetic construct
  source 1..75: mol_type = other DNA
gtcacctcgtgcctggtaaatcctcgcgcctgccatgaaaccaaaatgccgatccttcccaccgtgcagaaaaaa

SEQ ID NO: 346581 - DNA, 75 bp, synthetic construct
  source 1..75: mol_type = other DNA
cttgtattggctgcaatcaggcctgcctcgatcagatcttcgttggcaaagtcacctcgtgcctggtgaatcctc

SEQ ID NO: 346582 - DNA, 75 bp, synthetic construct
  source 1..75: mol_type = other DNA
agattgtgatgctccagcgcaaagccagcaaaccaggacaggggttaggcaaaaccaccggctggatccatcgca

SEQ ID NO: 346583 - DNA, 75 bp, synthetic construct
  source 1..75: mol_type = other DNA
ggggcggcgattaccctaaccggatgcgctttgcagttgaagtggtgcgagcagtgcgcgaacgcgtcggcaatg

SEQ ID NO: 346584 - DNA, 75 bp, synthetic construct
  source 1..75: mol_type = other DNA
gttgccggcgcgttgcgtgccgcaaaaaaacggggcgtatcggtggtggtggtggccgatcgcaaagcgaacgac

SEQ ID NO: 346585 - DNA, 75 bp, synthetic construct
  source 1..75: mol_type = other DNA
agattctggaaaaagagtatggcattcctcgccgttatctcggcaccatcatgtcgccgtgggctgcgaagcgtc

SEQ ID NO: 346586 - DNA, 75 bp, synthetic construct
  source 1..75: mol_type = other DNA
tcccgcaagagcaggcagaacgctatctggagttcctgaaaggttacttgatcccgaaatatgccgagtttatcg

SEQ ID NO: 346587 - DNA, 75 bp, synthetic construct
  source 1..75: mol_type = other DNA
cgaagccttcctcgatcgtgtttacatcgtgaaggtgccgtattgcttgcgcatttccgaagagatcaaaaatct

SEQ ID NO: 346588 - DNA, 75 bp, synthetic construct
  source 1..75: mol_type = other DNA
aaaccccggttcgcgtgctggacgaagaagtctccaccgaccaggcgcgctggcataaccgctattggatcgaca

SEQ ID NO: 346589 - DNA, 75 bp, synthetic construct
  source 1..75: mol_type = other DNA
acccgcgggaatcagtaatccgaaggattttcgtaatgagatcgtcaactttgtgctgcgtgccagagcgaataa

SEQ ID NO: 346590 - DNA, 75 bp, synthetic construct
  source 1..75: mol_type = other DNA
agatgcgcgtttatgatggtgaaagcctgaaagacaccgacccgaaagccaaatcgtatcaggaatatcgtgatt

SEQ ID NO: 346591 - DNA, 75 bp, synthetic construct
  source 1..75: mol_type = other DNA
aggttaaaataaccaaaagtaaaattgcggaattgctttatattgtattgaataaagaactgggtgattctgatg

SEQ ID NO: 346592 - DNA, 75 bp, synthetic construct
  source 1..75: mol_type = other DNA
tattacagtaggcgaaagctttggtggcacaggcttaaacatggcagcgacacgtaatgacatgaaggtaatgac

SEQ ID NO: 346593 - DNA, 75 bp, synthetic construct
  source 1..75: mol_type = other DNA
ttggctaaatccacggcccaatggacaacaatccttgagaagaatgctggagctcagatgtctcaagatcagaat

SEQ ID NO: 346594 - DNA, 75 bp, synthetic construct
  source 1..75: mol_type = other DNA
ataaaagaacctatgatatgatttgtacatctaccccaggtgtatctacggcccggttaaatagttttttagaca

SEQ ID NO: 346595 - DNA, 75 bp, synthetic construct
  source 1..75: mol_type = other DNA
ttaaaaaacattaatacagatgttcgcaccgaaatatcaccaaaacatgaggaaggtgaaggttacgaagtttct

SEQ ID NO: 346596 - DNA, 75 bp, synthetic construct
  source 1..75: mol_type = other DNA
ggagataagctcgcaacatttaatgttaaaggccctgcaaatttatctcgcagcgaaagtggtgccacaattttc

SEQ ID NO: 346597 - DNA, 75 bp, synthetic construct
  source 1..75: mol_type = other DNA
gtgctgccttactgcggggccgatccggtattgtgtaaacgtctggaagaagtcggctgtgcagcggtgatgccg

SEQ ID NO: 346598 - DNA, 75 bp, synthetic construct
  source 1..75: mol_type = other DNA
tttaccaggaagatttgaatcttcaaatggtgtgactctcagaacaaatattcctatggggttggataatattat

SEQ ID NO: 346599 - DNA, 75 bp, synthetic construct
  source 1..75: mol_type = other DNA
cgggcaaaaggtcaggttcagaagtgggagcgagtctgcgccgcgctgcgggagctgaacaagtgccgggatatt

SEQ ID NO: 346600 - DNA, 75 bp, synthetic construct
  source 1..75: mol_type = other DNA
aagcactgaaaagagcctcgtcgcacgagattgcagcccgtgttgaaatcagccgtgacgatgctgttaccgaac

SEQ ID NO: 346601 - DNA, 75 bp, synthetic construct
  source 1..75: mol_type = other DNA
tcgtgtcatcgttggcgctggattactgactggtctgggcgaagatgagattttcgctgcagttaaagaagagat

SEQ ID NO: 346602 - DNA, 75 bp, synthetic construct
  source 1..75: mol_type = other DNA
acatctcgggaaaaacttttttttgcgatagcaataaatttgtctttttagaaagaggggttaacttgtctgtca

SEQ ID NO: 346603 - DNA, 75 bp, synthetic construct
  source 1..75: mol_type = other DNA
tcgcaatggtaatactctggttctggcaggatatgagaagaagagaaacgaaagtgtggatcagggcgttgggac

SEQ ID NO: 346604 - DNA, 75 bp, synthetic construct
  source 1..75: mol_type = other DNA
atggctctgaagaagaaggggtcgccaactgatacaattttgcgtacttgcttcataagcatcacgcaaaagctg

SEQ ID NO: 346605 - DNA, 75 bp, synthetic construct
  source 1..75: mol_type = other DNA
gcagcctatgaccttgctaacgggaaatatactgctcaggacgctacgacagcacaaaaaggaattgtccagctc

SEQ ID NO: 346606 - DNA, 75 bp, synthetic construct
  source 1..75: mol_type = other DNA
gcaggcctgctggcacgtcagtccggaccgggcagccgcagtcattttgctcatgccaccagcccgctgaccgga

SEQ ID NO: 346607 - DNA, 75 bp, synthetic construct
  source 1..75: mol_type = other DNA
taacggaaactgctggtaaagcctttcctcagccagcaggtgttgcgttaccagtccgggaagcggaaacacagg

SEQ ID NO: 346608 - DNA, 75 bp, synthetic construct
  source 1..75: mol_type = other DNA
atggaaaccgtttttgacgcactgaaagcactgaaaaaagcctcgtcgcacgagattgcagcccgtcttgaaatc

SEQ ID NO: 346609 - DNA, 75 bp, synthetic construct
  source 1..75: mol_type = other DNA
aattacttcccgccgggcgaattcatcgctggcaatggcaatcagcaaagggcgtctgattcgcgtgaatcaggg

SEQ ID NO: 346610 - DNA, 75 bp, synthetic construct
  source 1..75: mol_type = other DNA
aagcgagtgcgaaacttcttaaaacgacgctacaacaacagggtagttgcactgaagtcttaagcggtcagcagg

SEQ ID NO: 346611 - DNA, 75 bp, synthetic construct
  source 1..75: mol_type = other DNA
gtggtgtccattttacttaccgggtctggtggccctttccgtgagacgccattgcgcgatttggcaacaatgacg

SEQ ID NO: 346612 - DNA, 75 bp, synthetic construct
  source 1..75: mol_type = other DNA
cttaatcaacataacctgcaggttgttatcgggccgcaagttcagtcagtaaaagacgaaatggctggcctgatg

SEQ ID NO: 346613 - DNA, 75 bp, synthetic construct
  source 1..75: mol_type = other DNA
cttaatgtgtggcatgcctgcccgcgtcagtaccatttgagcgccaacgaaattaatcaaattattaacgcctga

SEQ ID NO: 346614 - DNA, 75 bp, synthetic construct
  source 1..75: mol_type = other DNA
ccgttgcaagcacatgcgcagcgggttgccatcgcttcaaccggaattattcgcgacggcagcttgctggcgctg

SEQ ID NO: 346615 - DNA, 75 bp, synthetic construct
  source 1..75: mol_type = other DNA
agcggggaaacaggccgcagggggggcggcggaagggcagacaactgcgccatcaggcgcagtttccttacacac

SEQ ID NO: 346616 - DNA, 75 bp, synthetic construct
  source 1..75: mol_type = other DNA
gaccatcttccaggcgcaattgagttgcccgaccactcacggtttttctgaaagcgccacgcgtttcctttcgca

SEQ ID NO: 346617 - DNA, 75 bp, synthetic construct
  source 1..75: mol_type = other DNA
tggaagcactgaatgctatgggtgaaggaaacatggtggggttcctggatattcgctttgaacatattggtgatg

SEQ ID NO: 346618 - DNA, 75 bp, synthetic construct
  source 1..75: mol_type = other DNA
atgacaatacctttacgcttaatggcggtgtccattttgtcggtgaaaaaaatgtcatggatgatggctcaaaac

SEQ ID NO: 346619 - DNA, 75 bp, synthetic construct
  source 1..75: mol_type = other DNA
gatgcagccgttctgaaagccaataacatccagagcattcttgggatccagtcgatcgacaccgggatcctcggt

SEQ ID NO: 346620 - DNA, 75 bp, synthetic construct
  source 1..75: mol_type = other DNA
gttctgtatgtcatccacgcgctgttaaccggcctcggcttcaccgtcatgtctgtgctcggcgtcaccatcggt

SEQ ID NO: 346621 - DNA, 75 bp, synthetic construct
  source 1..75: mol_type = other DNA
cgctatcacccgcttcaatctgaaaaccccggggcgcgatagcgaagttgccagttcaatcgaaaaagccgttgc

SEQ ID NO: 346622 - DNA, 75 bp, synthetic construct
  source 1..75: mol_type = other DNA
atactacagaacgtcagccggaacgcgacatcaccccggttaacgaagaaaccatgtcggaaattaacgcccttc

SEQ ID NO: 346623 - DNA, 75 bp, synthetic construct
  source 1..75: mol_type = other DNA
ttctgagagagaaaaccaaataatacttctggatgaacctgagatatctctacatctttcatggcaagaaatact

SEQ ID NO: 346624 - DNA, 75 bp, synthetic construct
  source 1..75: mol_type = other DNA
cagccatcaacccgacgacgttcaaaaagaggccgtcagccgcctggaaattatttatcaggaactcgtcaatag

SEQ ID NO: 346625 - DNA, 75 bp, synthetic construct
  source 1..75: mol_type = other DNA
gatgggggaaaaagagaaaggaaagcaagaagaaaaagataaaatcaatacaacttacatatcaaccattaacat

SEQ ID NO: 346626 - DNA, 75 bp, synthetic construct
  source 1..75: mol_type = other DNA
tcgtcagaactgtcccaggccgaagcagagaaggttcttggattcctgaaacagaaagccacggagcagaaggtg

SEQ ID NO: 346627 - DNA, 75 bp, synthetic construct
  source 1..75: mol_type = other DNA
catcgtcagaactgacacaggtcgaagcagtgaaagctcttggattcctgaaacaaaaagccactgaacagaagg

SEQ ID NO: 346628 - DNA, 75 bp, synthetic construct
  source 1..75: mol_type = other DNA
cataatcagtggcttgatgtgaacatcacccactgccacttcagctatctgcagggcgacgccattgagtggaac

SEQ ID NO: 346629 - DNA, 75 bp, synthetic construct
  source 1..75: mol_type = other DNA
cagatttttcgccgcaacatttacacatcttcagaactaacacaggctgaagctgtgaaggttcttggattcctg

SEQ ID NO: 346630 - DNA, 75 bp, synthetic construct
  source 1..75: mol_type = other DNA
tggtattagactttgaaataaaagaggagaaggatgccgcattaaaaaaaatagcaagcggctcaaggagcagcg

SEQ ID NO: 346631 - DNA, 75 bp, synthetic construct
  source 1..75: mol_type = other DNA
ctttgatggcgtaaatacctcaggtggcatcacctggagttacgacgatgatggactcatccacatcactaaaga

SEQ ID NO: 346632 - DNA, 75 bp, synthetic construct
  source 1..75: mol_type = other DNA
tagttataccagcgttattgtcgttagtggtgagtcgtcggtatatctgaatggagatacgacaatcagcggaga

SEQ ID NO: 346633 - DNA, 75 bp, synthetic construct
  source 1..75: mol_type = other DNA
gtatgaggtgaaattcatggcggctgagctttactctatcgaacagaacttaaagtgttctgaatcgataagtac

SEQ ID NO: 346634 - DNA, 75 bp, synthetic construct
  source 1..75: mol_type = other DNA
aagctattttgattagaaatggcgttgaaccagtaaatataagcgaatcatctaagttatctttgaaacaaccac

SEQ ID NO: 346635 - DNA, 75 bp, synthetic construct
  source 1..75: mol_type = other DNA
acgacgatggtcaccttaatgtgacgaaagtagagggtgttgtcgtcgatggcgctgacggaaagcatatcaaag

SEQ ID NO: 346636 - DNA, 75 bp, synthetic construct
  source 1..75: mol_type = other DNA
agggaaaaatgcaacagcaattaaccaattgggcggtgttataactatttataacgccggcgcaggtatggcggc

SEQ ID NO: 346637 - DNA, 75 bp, synthetic construct
  source 1..75: mol_type = other DNA
cgctggaaggcgggccgaacctgagctacgcgaagagccagcgtacggcaagcctggcaggcgcaggcagtcagc

SEQ ID NO: 346638 - DNA, 75 bp, synthetic construct
  source 1..75: mol_type = other DNA
ttcgcacagaagtgaaaaaactcatcaatatcaaatcggacagtacgctacaggccatgattaaggcaggggaat

SEQ ID NO: 346639 - DNA, 75 bp, synthetic construct
  source 1..75: mol_type = other DNA
gcgtcgtgttggatggtatgaagatgaggtactggcctggctgaaagaacgccaggaagaagcgcgcggaacggc

SEQ ID NO: 346640 - DNA, 75 bp, synthetic construct
  source 1..75: mol_type = other DNA
tccgatctcgggcaaaaacttggcgtggataccagtacagcttccagtttactggcagaacaattgccgaagatt

SEQ ID NO: 346641 - DNA, 75 bp, synthetic construct
  source 1..75: mol_type = other DNA
gtttttgataatcagcaagatgttcttgctgaaatgttcaaaatggattttcctacagatactgtctgtcaaata

SEQ ID NO: 346642 - DNA, 75 bp, synthetic construct
  source 1..75: mol_type = other DNA
ccggttgttcatacttgatgaggcatgggagtatatccgtccggacaatgcttcaggttccagtaatcattcaaa

SEQ ID NO: 346643 - DNA, 75 bp, synthetic construct
  source 1..75: mol_type = other DNA
gcgtcgtcgcggatggtatgaggatgaagtgctggcctggctgaaagagcgtgaacaggaagcacgcggcgcagt

SEQ ID NO: 346644 - DNA, 75 bp, synthetic construct
  source 1..75: mol_type = other DNA
caggaagggatttcccgctatctggtgtcggtgggcggcgcgctgaacagccgtggtatgaacggtgaaggccag

SEQ ID NO: 346645 - DNA, 75 bp, synthetic construct
  source 1..75: mol_type = other DNA
gctggagcgcgaatatgacgctggaaggcgggccgaacctgagctatagcaagagtcagcgcaccgcgagtctgg

SEQ ID NO: 346646 - DNA, 75 bp, synthetic construct
  source 1..75: mol_type = other DNA
ggtggatgcgaaagtcactgtggcggtaagtaccgctggtgcgacagaaagcgatgccttcctgtggaaccagga

SEQ ID NO: 346647 - DNA, 75 bp, synthetic construct
  source 1..75: mol_type = other DNA
ttctgaaaaccatgtctaccgaagaactggaagactatcgtaacgccggtgaggattttcgtcgtgaactgagcc

SEQ ID NO: 346648 - DNA, 75 bp, synthetic construct
  source 1..75: mol_type = other DNA
acggcggtgatacgccggttccgccagatgacggcggtgatacgccagttccgccagatgacggcggtgatacgc

SEQ ID NO: 346649 - DNA, 75 bp, synthetic construct
  source 1..75: mol_type = other DNA
cgactcgaccatcaccaatggcggtacgggtagccttatcaatggcgataatgcgcgggttgataataaaggtac

SEQ ID NO: 346650 - DNA, 75 bp, synthetic construct
  source 1..75: mol_type = other DNA
tggaccgccaaaggcagcaccgatgccagcggcaacgttgacgtcatcatgagcaaaaacgcctacaccgatgtg

SEQ ID NO: 346651 - DNA, 75 bp, synthetic construct
  source 1..75: mol_type = other DNA
atgatcaccaaagaaggcgatagctttaaaacctggatgtcgccgcagtttaaaagcttcctggtgagcgaaaaa

SEQ ID NO: 346652 - DNA, 75 bp, synthetic construct
  source 1..75: mol_type = other DNA
atctggtatccgtgacggtgattgccccgacggcgctggaagccgatgcctgggatactggcttgatggtactcg

SEQ ID NO: 346653 - DNA, 75 bp, synthetic construct
  source 1..75: mol_type = other DNA
acgtctttctcatgttatcgatccgcaaaccgggcgtcccatcgaacacaatctggtatccgtgacggtgattgc

SEQ ID NO: 346654 - DNA, 75 bp, synthetic construct
  source 1..75: mol_type = other DNA
aagttcttggtttagctggctttgactggctggtgctggatggcgaacatgcgccaaacgatatctccacgttca

SEQ ID NO: 346655 - DNA, 75 bp, synthetic construct
  source 1..75: mol_type = other DNA
atttgaagactggcgtgaggcgggtgaagacttgcgacgcgaactgacccatgccgtcatgcgtgagctgagttg

SEQ ID NO: 346656 - DNA, 75 bp, synthetic construct
  source 1..75: mol_type = other DNA
tccttccagcggtcgtccgttttctgttatcagcaccctgccagcctggtcgccggaggttatttctcatacgct

SEQ ID NO: 346657 - DNA, 75 bp, synthetic construct
  source 1..75: mol_type = other DNA
tcgacgggttggatgaaattgtcgctaaggcgttggcgcagcactcttccgtgcgcgacgccagtgcgatctctc

SEQ ID NO: 346658 - DNA, 75 bp, synthetic construct
  source 1..75: mol_type = other DNA
cgctagcggtaatcagtattaccagcttatttcgttctttcctgagctaaaggatgagatctcttttgtcgcgga

SEQ ID NO: 346659 - DNA, 75 bp, synthetic construct
  source 1..75: mol_type = other DNA
ttgatggtgcctctttcgatcataacgtcctttgcatcgccgaaaaatgcgtcatcgtggtcgatagcatcgccg

SEQ ID NO: 346660 - DNA, 75 bp, synthetic construct
  source 1..75: mol_type = other DNA
gcattgccattggtcgctttccttggtaatggtaacgataaagcaggctttatatatactgccatagtctttgcc

SEQ ID NO: 346661 - DNA, 75 bp, synthetic construct
  source 1..75: mol_type = other DNA
gcgctaccgttagtggcttttcttggaaacggtaatgataaggcaggatttatttatactgctatcgtcttttcc

SEQ ID NO: 346662 - DNA, 75 bp, synthetic construct
  source 1..75: mol_type = other DNA
gtgcttaatgaaaaaggcactgggccgaataccgcctttgtcggcaaagatgcgcgctatatcctgcaacaactg

SEQ ID NO: 346663 - DNA, 75 bp, synthetic construct
  source 1..75: mol_type = other DNA
cccacccaactatcgcgattccagaactgctgcgcgtgctgatcgatgagcaccagatgagctgggatgacgcct

SEQ ID NO: 346664 - DNA, 75 bp, synthetic construct
  source 1..75: mol_type = other DNA
gcgatgaaaaagtgtgggccaaactggcggttgtgcacgataagcaagtgcatatggcaaatctgtgcgtagtcg

SEQ ID NO: 346665 - DNA, 75 bp, synthetic construct
  source 1..75: mol_type = other DNA
tcgcgccattggtgtggcgctgaacgataccgcctctaaagtgttgcgtgatcaaacaggcaagcatcacaaatg

SEQ ID NO: 346666 - DNA, 75 bp, synthetic construct
  source 1..75: mol_type = other DNA
tccgtggttccgccacaatgaagcactggatgtgcaggtagggattggcggtaaagtgacgaaagacggacgctg

SEQ ID NO: 346667 - DNA, 75 bp, synthetic construct
  source 1..75: mol_type = other DNA
gcaccgggctactacctggcgaaaaatattatctttgcgatcaacaaagtggctgacgtgatcaacaacgatccg

SEQ ID NO: 346668 - DNA, 75 bp, synthetic construct
  source 1..75: mol_type = other DNA
ccaagccggtggcgaatcagcgacatgttaactacatctcaatggagtttttgattggtcgcctgacgggcaaca

SEQ ID NO: 346669 - DNA, 75 bp, synthetic construct
  source 1..75: mol_type = other DNA
ggtctgaagctacgtttgctggatgaaaacgcctcgccttataccttcaataaatatgctgaatacgccgatttc

SEQ ID NO: 346670 - DNA, 75 bp, synthetic construct
  source 1..75: mol_type = other DNA
ggggagcgggtgatgttctccccgccgggacacgtcacaaaggaaggttttttcgggatcgacgggctgagaatt

SEQ ID NO: 346671 - DNA, 75 bp, synthetic construct
  source 1..75: mol_type = other DNA
tttatgccggcagaggcctttgaggaactggtaagtgagctcacggtgaaatgccaggaaggccccctggcgaaa

SEQ ID NO: 346672 - DNA, 75 bp, synthetic construct
  source 1..75: mol_type = other DNA
gcctgcacctgatgatcaccggccaggattttgtggtgccctgtgactggccggcgttctgcgaactgctgggcc

SEQ ID NO: 346673 - DNA, 75 bp, synthetic construct
  source 1..75: mol_type = other DNA
gcgttctacccgccgaacggctggcgctgccgttgtggcgtgattgccctgagcgcggcggatgtgcgtgcccgt

SEQ ID NO: 346674 - DNA, 75 bp, synthetic construct
  source 1..75: mol_type = other DNA
actggcggagctctaccctcagatgaacacggacgatctgcaggagcggctggggggccatctcttttttttcaa

SEQ ID NO: 346675 - DNA, 75 bp, synthetic construct
  source 1..75: mol_type = other DNA
caccgctgccggggacgggtattttcagctgatcgccgatccggaggccacggcccgccagttgtaccggcatat

SEQ ID NO: 346676 - DNA, 75 bp, synthetic construct
  source 1..75: mol_type = other DNA
catggttttgtttgaatactccccgtttggggttattggctcggtcacgccaagcaccaaccccacggaaaccat

SEQ ID NO: 346677 - DNA, 75 bp, synthetic construct
  source 1..75: mol_type = other DNA
gtgattgatttgggtaaatttaacttactggatattattcgccgccacacaatgtcgaaaacattcagtatcaag

SEQ ID NO: 346678 - DNA, 75 bp, synthetic construct
  source 1..75: mol_type = other DNA
gtgattgattttggtaaatttaatctgctggatattcgccgccacacaatgtcgaaaacattcagtattaacacg

SEQ ID NO: 346679 - DNA, 75 bp, synthetic construct
  source 1..75: mol_type = other DNA
cagctcattgccgatccggaggccacgatccggcagctgtaccggcatatcattctgggccagaccttcggcacg

SEQ ID NO: 346680 - DNA, 75 bp, synthetic construct
  source 1..75: mol_type = other DNA
tgggaaataaagaagataagtacttaaaaaacaaagcggcactcgataacacacctggaattgaagatttaacga

SEQ ID NO: 346681 - DNA, 75 bp, synthetic construct
  source 1..75: mol_type = other DNA
cttctggaagcggctggaattcctctaccgcagaaaatgccacgattactgattgccgttgttgacgccgatgat

SEQ ID NO: 346682 - DNA, 75 bp, synthetic construct
  source 1..75: mol_type = other DNA
ctcgacctgtaccatatgcaggaagaggcgccaggaatggtgttctggcataacgacggctggacaatcttccgt

SEQ ID NO: 346683 - DNA, 75 bp, synthetic construct
  source 1..75: mol_type = other DNA
tgaaaaatatcaccgatgtcgtacatgatgtgcgttccaaccgcaatttttcccgacgagtttcggaagaacgta

SEQ ID NO: 346684 - DNA, 75 bp, synthetic construct
  source 1..75: mol_type = other DNA
tgaagccttggccgcgttagtctccccgttgcaagctcatgcgcagcaggttgccatcgcttcaaccgggatcat

SEQ ID NO: 346685 - DNA, 75 bp, synthetic construct
  source 1..75: mol_type = other DNA
tgacggcatggactttgaacaggacaacgaatcctgcacatgccggatttaccgcaaagaccgcaatcatccaat

SEQ ID NO: 346686 - DNA, 75 bp, synthetic construct
  source 1..75: mol_type = other DNA
ggtctgctgcacggcggcgcgtcggcggcgctggcagaaacgttgggatcgatggctggatttatgatgactcgc

SEQ ID NO: 346687 - DNA, 75 bp, synthetic construct
  source 1..75: mol_type = other DNA
ccgctttgctctcgacttcaatagtctgctggatgaaatggaagagtggcagcttcgtttacaggcaaaaaatgc

SEQ ID NO: 346688 - DNA, 75 bp, synthetic construct
  source 1..75: mol_type = other DNA
agcgaccaacgtttaaaagagcattacgcaacatcagcatgaccagcatctttatcaccatgacgctgatctggc

SEQ ID NO: 346689 - DNA, 75 bp, synthetic construct
  source 1..75: mol_type = other DNA
gcaactgaaacactggcagcgctggggcagcaaggccaattttcaactgcagaagtgcgtgataagcagcaaaat

SEQ ID NO: 346690 - DNA, 75 bp, synthetic construct
  source 1..75: mol_type = other DNA
gcggggcacatcgggcatacgcttgccgatccgcaggggcctgtctgtggctgtggacgcacaggttgcgtggaa

SEQ ID NO: 346691 - DNA, 75 bp, synthetic construct
  source 1..75: mol_type = other DNA
agctggacttctctttgccttctcgtctgagcgcttcttatgtaggcgaagacaatgaacgtaaagtaccggtaa

SEQ ID NO: 346692 - DNA, 75 bp, synthetic construct
  source 1..75: mol_type = other DNA
ctgccatcatttcaaactaatgaaaacggcaggggcttactggcgtggcgacagcaacaacaaaatgttgcaacg

SEQ ID NO: 346693 - DNA, 75 bp, synthetic construct
  source 1..75: mol_type = other DNA
agttgcgctggaagaaaacaacatcccgtttgagtatcaattgggtgaaggcgctttctatggtccgaaaattga

SEQ ID NO: 346694 - DNA, 75 bp, synthetic construct
  source 1..75: mol_type = other DNA
agctggacttctccttgccgtctcgtctgagcgcttcctatgtgggcgaagacaacgagcgtaaggtgccggtaa

SEQ ID NO: 346695 - DNA, 75 bp, synthetic construct
  source 1..75: mol_type = other DNA
aagcgccgggtatggtgttctggcacaacgacggctggacaatcttccgtgaactggaagtgttcgttcgttcta

SEQ ID NO: 346696 - DNA, 75 bp, synthetic construct
  source 1..75: mol_type = other DNA
tttatcactgtttctactggtgttggcggcggtgtggtcagcggcggcaaactgctgactggccctggaggtctg

SEQ ID NO: 346697 - DNA, 75 bp, synthetic construct
  source 1..75: mol_type = other DNA
tgaatccttagctgagttagttgctccgctacagactcaggcacagcaggtcgctatcgcttcaaccgggattat

SEQ ID NO: 346698 - DNA, 75 bp, synthetic construct
  source 1..75: mol_type = other DNA
ggaacagcttaccgacttgccgacgattgccattaacgacgcacaggccgcagcgtgggcagagtatcaggcgct

SEQ ID NO: 346699 - DNA, 75 bp, synthetic construct
  source 1..75: mol_type = other DNA
gcggtactaaacttgccgccgcgctgattggcgctgatgggcagatccgcgatcgtcgtgaacttcctacgccag

SEQ ID NO: 346700 - DNA, 75 bp, synthetic construct
  source 1..75: mol_type = other DNA
gcaatacgacaccgaacgtccctggtttgaacacactggcgaagggctggctgagcacggtcatgagtgccctta

SEQ ID NO: 346701 - DNA, 75 bp, synthetic construct
  source 1..75: mol_type = other DNA
atcgtttatctttctgcataaagacaagcaacttcgaccattcataaatacggaatatcaaccagcaggtgccac

SEQ ID NO: 346702 - DNA, 75 bp, synthetic construct
  source 1..75: mol_type = other DNA
ctggcggtgaagccgaaaatgatgctgttcgatgaaccgacttccgctcttgacccggaactgcgccatgaagtg

SEQ ID NO: 346703 - DNA, 75 bp, synthetic construct
  source 1..75: mol_type = other DNA
cgcttgatttatcgtctgcagcaattcgttccggatgccttacccgtggttcgtaaagccagctggcactgcagt

SEQ ID NO: 346704 - DNA, 75 bp, synthetic construct
  source 1..75: mol_type = other DNA
cgcttgatttatcgtctgcagcaattcgttccggatgccttacccgtggtacgtaaagccagctggcactgcagg

SEQ ID NO: 346705 - DNA, 75 bp, synthetic construct
  source 1..75: mol_type = other DNA
aaattgcacttaatggcgatggacttctttcgtggccaaattcacccggacagactatgcgctgcccaacgtgta

SEQ ID NO: 346706 - DNA, 75 bp, synthetic construct
  source 1..75: mol_type = other DNA
cagctgggggtaagcagtgctgcagaagtgtatatccgcaaaatggagcaggcaggaaaagccacgcattcgctg

SEQ ID NO: 346707 - DNA, 75 bp, synthetic construct
  source 1..75: mol_type = other DNA
caaaggattgagtatgacggtaagtacagctatcacgtatggtggtcggtaacaagtacggtaggttttacatac

SEQ ID NO: 346708 - DNA, 75 bp, synthetic construct
  source 1..75: mol_type = other DNA
aacgcagctaaaagctaccgctcgactcaggggatgatcgatttctttatggctaaggtcatggatatggagaag

SEQ ID NO: 346709 - DNA, 75 bp, synthetic construct
  source 1..75: mol_type = other DNA
gatgttcagccagcctgtcagtcagatactggccggtgcgcgcatggatgtgtatgtcattcgtgacggggaggg

SEQ ID NO: 346710 - DNA, 75 bp, synthetic construct
  source 1..75: mol_type = other DNA
cgtaccggatgccttacccgtggtgcgtaaagccagctggcactgcagacaatgtcaccacgattattatgggga

SEQ ID NO: 346711 - DNA, 75 bp, synthetic construct
  source 1..75: mol_type = other DNA
tgcaggcaatgtcaccacgattattatggggagcggtactgcacacactgccagaccgggcgcttcagtgaggag

SEQ ID NO: 346712 - DNA, 75 bp, synthetic construct
  source 1..75: mol_type = other DNA
cgcttgatttatcgtctgcagcaattcgttccggatgccttacccgtggtgcgtaaagccagctggcactgcaga

SEQ ID NO: 346713 - DNA, 75 bp, synthetic construct
  source 1..75: mol_type = other DNA
atgtacgcaaaatcctttttcgctcttgatagcaacggacgtctgacgggcgcccgtactgtacaggccgcacct

SEQ ID NO: 346714 - DNA, 75 bp, synthetic construct
  source 1..75: mol_type = other DNA
atgtacgcaaaatcctttatcgctcttgattgcaacggacgtctgacgggcgcccgtactgtacaggccgcacct

SEQ ID NO: 346715 - DNA, 75 bp, synthetic construct
  source 1..75: mol_type = other DNA
gcaatacgacactgaacttccctggtttgaacacactgacgacgggctgacggagcacggtcagcagtgccctta

SEQ ID NO: 346716 - DNA, 75 bp, synthetic construct
  source 1..75: mol_type = other DNA
atgtacgcaaaatcctttgtcgctcttgatggcaacggacgtctgacgggcgcccgtactgcacaggccgcacct

SEQ ID NO: 346717 - DNA, 75 bp, synthetic construct
  source 1..75: mol_type = other DNA
atgtacgcaaaatcctttgtcgctcttgatcgcaacggacgtctgacgggcgcccgtactggacaggccgcacct

SEQ ID NO: 346718 - DNA, 75 bp, synthetic construct
  source 1..75: mol_type = other DNA
atgtacgcaaaatcctttctcgctcttgatggcaacggacgtctgacgggcgcccgtactggacaggccgcacct

SEQ ID NO: 346719 - DNA, 75 bp, synthetic construct
  source 1..75: mol_type = other DNA
caatgtcaccacgattattatggggagccgtactgcacacactgccagaccgggcggttcagtgaggaggcggta

SEQ ID NO: 346720 - DNA, 75 bp, synthetic construct
  source 1..75: mol_type = other DNA
caatgtcaccacgattattatggggagctgtactgcacacactgccagaccgggcgtttcagtgaggaggaggta

SEQ ID NO: 346721 - DNA, 75 bp, synthetic construct
  source 1..75: mol_type = other DNA
caatgtcaccacgattattatggggagcagtactgcacacactgccagaccgggcggttcagtgaggaggaggta

SEQ ID NO: 346722 - DNA, 75 bp, synthetic construct
  source 1..75: mol_type = other DNA
caatgtcaccacgattattatggggagcggtactgcacacactgccagaccgggcggttcagtgaggagggggta

SEQ ID NO: 346723 - DNA, 75 bp, synthetic construct
  source 1..75: mol_type = other DNA
caatgtcaccacgattattatggggagcggtactgcacacactgccagaccgggcgcttcagtgaggaggcggta

SEQ ID NO: 346724 - DNA, 75 bp, synthetic construct
  source 1..75: mol_type = other DNA
caatgtcaccacgattattatggggagcggtactgcacacactgccagaccgggcgattcagtgaggaggaggta

SEQ ID NO: 346725 - DNA, 75 bp, synthetic construct
  source 1..75: mol_type = other DNA
ccctggaacaatcgtaactttcgattcatcgctaaaggctgtttctggtgactttgtgatgtgtgtgctaaatga

SEQ ID NO: 346726 - DNA, 75 bp, synthetic construct
  source 1..75: mol_type = other DNA
ttatcgccaggctattacttcggccggtacaggctgcatggcagcacttgatgcggaacgctacctcgatggttt

SEQ ID NO: 346727 - DNA, 75 bp, synthetic construct
  source 1..75: mol_type = other DNA
ggttcacgacttcgtttatggtgacgaacgccacagcatgattaaccgcttgctgcgactcaaccaccggccgga

SEQ ID NO: 346728 - DNA, 75 bp, synthetic construct
  source 1..75: mol_type = other DNA
atccgatattgattccctgcgtggtcagattcaggaaaatcagtatcaactgaatcaggtcgtggagcggcaaaa

SEQ ID NO: 346729 - DNA, 75 bp, synthetic construct
  source 1..75: mol_type = other DNA
atgctgccgattgcacaaattgttaacaaaatcgtcatactcttttttacgtctgtaaattccctacaatcctgc

SEQ ID NO: 346730 - DNA, 75 bp, synthetic construct
  source 1..75: mol_type = other DNA
tgattaccggcatggaaaaaggcggccaactgaccaccaccacggaagtggaaaactggccaggcgatccaaacg

SEQ ID NO: 346731 - DNA, 75 bp, synthetic construct
  source 1..75: mol_type = other DNA
ttatcgtcaagccatcacctctgccggtactggctgcatggctgcactggacgcagaacgctacctcgacagttt

SEQ ID NO: 346732 - DNA, 75 bp, synthetic construct
  source 1..75: mol_type = other DNA
gtgaacatcttaattgcatggccatacggcatgtaccgggatctgtttatgcgcgcggcacgcaaagttagccag

SEQ ID NO: 346733 - DNA, 75 bp, synthetic construct
  source 1..75: mol_type = other DNA
taagaatattgtggttattctgccatcatcgggtgagcgttatttaagcaccgcattatttgccgatctctttac

SEQ ID NO: 346734 - DNA, 75 bp, synthetic construct
  source 1..75: mol_type = other DNA
ggttcgcctgaatcgcatcggtaacggacgtattctggcgaaggtggaatctcgtaaccccagcttcagcgttaa

SEQ ID NO: 346735 - DNA, 75 bp, synthetic construct
  source 1..75: mol_type = other DNA
gtcaccggtgtatgtggcgatcttgttagtggttggcgcggactggcaccagattatggctgcggtcagttctaa

SEQ ID NO: 346736 - DNA, 75 bp, synthetic construct
  source 1..75: mol_type = other DNA
ttagtggtaggcgcagactggcaccagattatggcagcggtcagttcaaacatcgttgtttcgatgctgatgggg

SEQ ID NO: 346737 - DNA, 75 bp, synthetic construct
  source 1..75: mol_type = other DNA
gtcaccggtgtatgtggcgatcttgttagtggtggcgcagactggcatcagattatggcggcggtcagttcaaac

SEQ ID NO: 346738 - DNA, 75 bp, synthetic construct
  source 1..75: mol_type = other DNA
gaccatcagccaggccgtccgtggcggaaaattacctgcaggctggtatcaggtcccggtgacaaaagaaaccct

SEQ ID NO: 346739 - DNA, 75 bp, synthetic construct
  source 1..75: mol_type = other DNA
ctggcacctacagtagttccgacggtcaatggcggtcaggcaagtattgccatcagtaataccagcccgaatctg

SEQ ID NO: 346740 - DNA, 75 bp, synthetic construct
  source 1..75: mol_type = other DNA
tcaacaaaaagccttttacgttcattctggaaacagagcgtggtctgaatctttccattcaggccgttccccgtg

SEQ ID NO: 346741 - DNA, 75 bp, synthetic construct
  source 1..75: mol_type = other DNA
atcacctgaagatggtccgctttgccgtggaaaataaaacgctgtctgccctgaatatccgggaaagtgatttct

SEQ ID NO: 346742 - DNA, 75 bp, synthetic construct
  source 1..75: mol_type = other DNA
cttcaaaaccttgcggctgcattgggaactaccactgaatggcttacgcaagggaaaggagatggccctgacgtt

SEQ ID NO: 346743 - DNA, 75 bp, synthetic construct
  source 1..75: mol_type = other DNA
atccccgtgacaaaggaaaccctgcaggcccctgcccgtatggatgtgtacgtcattcgtgacggggagggtaac

SEQ ID NO: 346744 - DNA, 75 bp, synthetic construct
  source 1..75: mol_type = other DNA
tgagcagactgcgtccggtggtgtggtggtggccaccatcaacaaaaagccttttacgttcattctggaaacaga

SEQ ID NO: 346745 - DNA, 75 bp, synthetic construct
  source 1..75: mol_type = other DNA
gactctggaaaagtcaaaggagaaagtgtgtttgattttagcaaactgattcgggagattcgagtgatggctgaa

SEQ ID NO: 346746 - DNA, 75 bp, synthetic construct
  source 1..75: mol_type = other DNA
gtgaagccgttctttgtgcgcaccgtggcgatccttggcggcgagtcgagcggtaaatccaccctggtaaacaaa

SEQ ID NO: 346747 - DNA, 75 bp, synthetic construct
  source 1..75: mol_type = other DNA
cgaaacgtacctttatgagtatcagcggtgcgcagatccgcgaaaacccgttccgctactgggaatatattccta

SEQ ID NO: 346748 - DNA, 75 bp, synthetic construct
  source 1..75: mol_type = other DNA
ctacgatggttgtttttttgatttgagcagcattgtgattatgccaatctttgaacttattacatttggagttga

SEQ ID NO: 346749 - DNA, 75 bp, synthetic construct
  source 1..75: mol_type = other DNA
tgaacgccatggtggagttagctaagaacagagtaccgctttaccacatcatggatgttgcaagacaaatggaga

SEQ ID NO: 346750 - DNA, 75 bp, synthetic construct
  source 1..75: mol_type = other DNA
gggaatgggcataccagttgtattttccaggagtcctgcaaggataatctggttgttgaaagtaatggagacatt

SEQ ID NO: 346751 - DNA, 75 bp, synthetic construct
  source 1..75: mol_type = other DNA
caggggatggcagtcagtgccggtgtacaggaagagggggcgacagtgccggcagggatgtcgctggtcggcgga

SEQ ID NO: 346752 - DNA, 75 bp, synthetic construct
  source 1..75: mol_type = other DNA
aagaaccgtttatcttcattgctgttaatgaatcaaaattttggcgccgggatgagcgcagtggataacgggcaa

SEQ ID NO: 346753 - DNA, 75 bp, synthetic construct
  source 1..75: mol_type = other DNA
gctaaccactctgcgcccttcaccactggcgaagggaaacccgcagcacactaatctggtcgagatcgaaaaaat

SEQ ID NO: 346754 - DNA, 75 bp, synthetic construct
  source 1..75: mol_type = other DNA
caaagtgtgacagatgttcagtcaggcagtcttccgcaggggctgaagaaccgtctgtctgccttattgctgatg

SEQ ID NO: 346755 - DNA, 75 bp, synthetic construct
  source 1..75: mol_type = other DNA
ccgcctttccacactacttctgatgaaccagggttttggcaatggcatgagtgccacagacaatggtcaggttat

SEQ ID NO: 346756 - DNA, 75 bp, synthetic construct
  source 1..75: mol_type = other DNA
gaactgcggttgccggcagagggcacaccggctcgctggcaggcagggctgaatgtgacggttacagtacagtga

SEQ ID NO: 346757 - DNA, 75 bp, synthetic construct
  source 1..75: mol_type = other DNA
ttgtacagctactgcgtgagcaaccacaggcgctttcccatatacagctgttgggctttaaccatgtgcttataa

SEQ ID NO: 346758 - DNA, 75 bp, synthetic construct
  source 1..75: mol_type = other DNA
tgtttgctgcatttttcacaacgtttgcgttcgctccccagagcataaaaactatcaggacacgcaataccgaag

SEQ ID NO: 346759 - DNA, 75 bp, synthetic construct
  source 1..75: mol_type = other DNA
aattccggcgcggggaagtatcggcgcagcggatattatgctcgcttcgcacgttggtctggtgatgatgggcga

SEQ ID NO: 346760 - DNA, 75 bp, synthetic construct
  source 1..75: mol_type = other DNA
attgaaatttattccagcaggctggcggaaattgcccgtacctgggaactggaaaaagatgaagtgataagccca

SEQ ID NO: 346761 - DNA, 75 bp, synthetic construct
  source 1..75: mol_type = other DNA
caacggcgatatggtgcgggtgtttaaccatcgtggcgaagttcggctaccagccaaagtgacaccacgcattct

SEQ ID NO: 346762 - DNA, 75 bp, synthetic construct
  source 1..75: mol_type = other DNA
gagcgctacaataaccagcttgcggctgtacagcagtccaatgccggatgcgtctgctttgagttcgagttcgcc

SEQ ID NO: 346763 - DNA, 75 bp, synthetic construct
  source 1..75: mol_type = other DNA
aaattcagtttaatggctttgtcactgacgaagcccccaaatggacctggcagataagttctcccgaccagacct

SEQ ID NO: 346764 - DNA, 75 bp, synthetic construct
  source 1..75: mol_type = other DNA
catttccgcgcctctgtcccggtgcgtgacccggagacggggaacgtgtcggggcagctttctttcaccctgaat

SEQ ID NO: 346765 - DNA, 75 bp, synthetic construct
  source 1..75: mol_type = other DNA
ttcacgccatttattaccttcagcagtaacggacagcctttcgccgtaaaggaaggcagtggcactacggcgcaa

SEQ ID NO: 346766 - DNA, 75 bp, synthetic construct
  source 1..75: mol_type = other DNA
cacttccgcgcctctgttcctgtgcgtgatctggagacgggaaatgtgtcaggacagctttctttcaccctgaat

SEQ ID NO: 346767 - DNA, 75 bp, synthetic construct
  source 1..75: mol_type = other DNA
ttgtggcgtggctactgctgcggtgtattgggtcatgttccttgccatggtttcttacattaaacgcgcccgctc

SEQ ID NO: 346768 - DNA, 75 bp, synthetic construct
  source 1..75: mol_type = other DNA
atattatgtctgccctgatgtcggtggctttattttattcggtagcatcacatgcagatattcttgatggtggtg

SEQ ID NO: 346769 - DNA, 75 bp, synthetic construct
  source 1..75: mol_type = other DNA
gaatgcggtggataacggacaggttatcagtcagggggtactggctgacggtcgggtgatgaatctggctgcggc

SEQ ID NO: 346770 - DNA, 75 bp, synthetic construct
  source 1..75: mol_type = other DNA
ttcgtaatccggagacggggaatgtgtcgggacagctttcttttaccctgaatcagggtatggcggtcagtgccg

SEQ ID NO: 346771 - DNA, 75 bp, synthetic construct
  source 1..75: mol_type = other DNA
ggattcaccccctttattaccttcagcagtaacggacagcctttcgccgtaaaggaaggcagtggcactacggcg

SEQ ID NO: 346772 - DNA, 75 bp, synthetic construct
  source 1..75: mol_type = other DNA
gtgacccggagacgggaaatgtgtcgggacagctttctttcaccctgaaccaggggatggtcgtcagcgccggca

SEQ ID NO: 346773 - DNA, 75 bp, synthetic construct
  source 1..75: mol_type = other DNA
gtcgggacagctttcttttaccctgaatcagggtatggcggtcagtgccggtcgacaggaagacggggtatccgt

SEQ ID NO: 346774 - DNA, 75 bp, synthetic construct
  source 1..75: mol_type = other DNA
gacaggaagacggcgcatccgtaccggccgggatgtcgctggtcagtgggcagagcgtgacggaggtacagtcag

SEQ ID NO: 346775 - DNA, 75 bp, synthetic construct
  source 1..75: mol_type = other DNA
cgggcctggttttactccgtacattacgttcagcagtaatggaaagccttttacgatactcgaagggaaaggtag

SEQ ID NO: 346776 - DNA, 75 bp, synthetic construct
  source 1..75: mol_type = other DNA
tgcacctggaagatgagcactttaccggtttaacgcgcttcctgtcggcacccggtaataaaggtcacggcttcg

SEQ ID NO: 346777 - DNA, 75 bp, synthetic construct
  source 1..75: mol_type = other DNA
tttgaacacactgacgacgggctgacggctcacggtcagcagtgcccttatgtcaggccggaatgcagagaaata

SEQ ID NO: 346778 - DNA, 75 bp, synthetic construct
  source 1..75: mol_type = other DNA
ataacggaaactgtgcgcaagtacgtacctgaaatgcgcgagaaaggtgccgatctcgttgtcgttttggcgcat

SEQ ID NO: 346779 - DNA, 75 bp, synthetic construct
  source 1..75: mol_type = other DNA
aaagtgacggtgaatgatattaccgaaaccgtgcgcaaatacgtgcctgaaatgcgcgagaaaggtgccgatgtc

SEQ ID NO: 346780 - DNA, 75 bp, synthetic construct
  source 1..75: mol_type = other DNA
tttgaacaccagcctgacgcgctgacagagaacggtcgacagcactgcccatacgttaaaccggaccggaaagaa

SEQ ID NO: 346781 - DNA, 75 bp, synthetic construct
  source 1..75: mol_type = other DNA
ggtcaggaaagctgactggcactgttcgcaatgttctggtgattaccatggggaacgttattgcctgaactgcca

SEQ ID NO: 346782 - DNA, 75 bp, synthetic construct
  source 1..75: mol_type = other DNA
tcgtaccggatgccttacccgtggtgcgtaaagccagctggcactgcagacaatgtcaccatgattattatgggg

SEQ ID NO: 346783 - DNA, 75 bp, synthetic construct
  source 1..75: mol_type = other DNA
cgatgtcgttgtcgttctggcacattccgggctgtctgccgatccgtataaagtgatggcggaaaactcagttta

SEQ ID NO: 346784 - DNA, 75 bp, synthetic construct
  source 1..75: mol_type = other DNA
aattcccttatgtaaatgccaacgtcattgacgccagaaccaaacagccaatgtttacaccgtatttaattaaag

SEQ ID NO: 346785 - DNA, 75 bp, synthetic construct
  source 1..75: mol_type = other DNA
tgttagaccggagcgcagagaaatactgttgattaaacgcttacagcaatgggtaccggatgccttacccgtggt

SEQ ID NO: 346786 - DNA, 75 bp, synthetic construct
  source 1..75: mol_type = other DNA
cggcggtaatgccgggcatgtggggcgatcatcttggtgtggtcgacttacaactcagtaatgacagcggtaaat

SEQ ID NO: 346787 - DNA, 75 bp, synthetic construct
  source 1..75: mol_type = other DNA
agcacggccgatttacgacatcgccaataaaaaatcactggcggcggaagacagcaaactggtcgaaacgctcaa

SEQ ID NO: 346788 - DNA, 75 bp, synthetic construct
  source 1..75: mol_type = other DNA
cacgccgttttcccaggtaaagattttgctgatatcgaaggggctgatatcgcgaaaggcacgctgaatggtgtt

SEQ ID NO: 346789 - DNA, 75 bp, synthetic construct
  source 1..75: mol_type = other DNA
gcgtaaagcccaccggcactgcagacaatgtcaccacgattattatggggaacgctattgtacacactgtcatac

SEQ ID NO: 346790 - DNA, 75 bp, synthetic construct
  source 1..75: mol_type = other DNA
gagtgtggcttctttggttgggcttgttttacacggccatgaatacacgccgggacactttgggaatatgaccgc

SEQ ID NO: 346791 - DNA, 75 bp, synthetic construct
  source 1..75: mol_type = other DNA
gatgaaggctcctgatgaagcaaccttctttcgtgattgcaatcgccttagctggtggtatgcagataacgcttg

SEQ ID NO: 346792 - DNA, 75 bp, synthetic construct
  source 1..75: mol_type = other DNA
cctactgcgaaggtgatgtggtcatgatgaaggctcctgatgaagcaaccttctttcgtgattgcaatcgcctta

SEQ ID NO: 346793 - DNA, 75 bp, synthetic construct
  source 1..75: mol_type = other DNA
atcgcgccgaaagctctgggcagaatggaaaaaagttatgatctggtgatgaccgccgcacattctggaacaccc

SEQ ID NO: 346794 - DNA, 75 bp, synthetic construct
  source 1..75: mol_type = other DNA
aagcatgacaaacgtgcattgcaggatccgttatcgttcagaacgacggtgtataccatttctgaggcaatgcgc

SEQ ID NO: 346795 - DNA, 75 bp, synthetic construct
  source 1..75: mol_type = other DNA
ccggattatcttacccgtctctcaatggtgttacgtttaaatactatgttgcatgggcaaaccggcgcgcagcct

SEQ ID NO: 346796 - DNA, 75 bp, synthetic construct
  source 1..75: mol_type = other DNA
atgtacgcaaaatcctttatcgctcttgatggcaacggacatctgacgggcgcccgtactgcacaggccgcacct

SEQ ID NO: 346797 - DNA, 75 bp, synthetic construct
  source 1..75: mol_type = other DNA
tgccagaccggagcgcagagaaatactgttgattaaacgcttacagcaatgggtaccggatgccttacccgtggt

SEQ ID NO: 346798 - DNA, 75 bp, synthetic construct
  source 1..75: mol_type = other DNA
tgtcaggccggagctcagagaaatacagttgattaaacgtctgcagcaattcgtaccggatgccttacccgtggt

SEQ ID NO: 346799 - DNA, 75 bp, synthetic construct
  source 1..75: mol_type = other DNA
cttcccttatggtgacactctcgatttcttccatcggtacttgcgacatcccaaatgggaggttgtgtatcaaga

SEQ ID NO: 346800 - DNA, 75 bp, synthetic construct
  source 1..75: mol_type = other DNA
atcttcaccgtgttcttcctgtggttcccgtcaggtctggtgctgtactatatcgtcagcaacctggtaaccatt

SEQ ID NO: 346801 - DNA, 75 bp, synthetic construct
  source 1..75: mol_type = other DNA
tatcgtcagcaacctggtaaccattatccagcagcagctgatttaccgtggtctggaaaaacgtggcctgcatag

SEQ ID NO: 346802 - DNA, 75 bp, synthetic construct
  source 1..75: mol_type = other DNA
atcctgtgcctgtacgtgctggaagaaaatctgttccgcgtgctgttaaaacgcaaaggcgagctggcgctggat

SEQ ID NO: 346803 - DNA, 75 bp, synthetic construct
  source 1..75: mol_type = other DNA
gccagataacgaaactggctggtacgatttctacaacggcgaatggttcagtggcggtcagtggatcaccctcga

SEQ ID NO: 346804 - DNA, 75 bp, synthetic construct
  source 1..75: mol_type = other DNA
aaccgtggatgtatccgggcgtcactccggcgatccgcagcgctattgagttgcgctatcgcctgctgccctact

SEQ ID NO: 346805 - DNA, 75 bp, synthetic construct
  source 1..75: mol_type = other DNA
ttggcggcaccgatgcaaacgggcgctttaccggcatgtacgcgctgctgtctgccgaaatgcgcgtaggtgtgc

SEQ ID NO: 346806 - DNA, 75 bp, synthetic construct
  source 1..75: mol_type = other DNA
gtttaccaccctgaaagcgatttcagaccagaccagcccgcaaaccattgtgatccgcgttgctgatgctgcaaa

SEQ ID NO: 346807 - DNA, 75 bp, synthetic construct
  source 1..75: mol_type = other DNA
acgtccgtacttgatctcccgctccggctgcgcgggaatgcagcgctatgtgcagacctggagcggcgataaccg

SEQ ID NO: 346808 - DNA, 75 bp, synthetic construct
  source 1..75: mol_type = other DNA
aaaacaccggaatgggcctcgcaaatcaccggtgttccggcagacaaaatcatcaaactggctcgtgaaatcggc

SEQ ID NO: 346809 - DNA, 75 bp, synthetic construct
  source 1..75: mol_type = other DNA
gttgggcattgccggtgtcccctttgctgagcacgggcagttctatttcgaagataaaaattgccgtgtctgggg

SEQ ID NO: 346810 - DNA, 75 bp, synthetic construct
  source 1..75: mol_type = other DNA
aatacagtaagaaagccggaattgataacgctacggtagcaatatatggatgtgataatttcgttatcgatggtg

SEQ ID NO: 346811 - DNA, 75 bp, synthetic construct
  source 1..75: mol_type = other DNA
ggatgcgccggattgcaacgttatgttcagacatggagtggagacaaccgaactaactgggatacccttcgatac

SEQ ID NO: 346812 - DNA, 75 bp, synthetic construct
  source 1..75: mol_type = other DNA
gaacccacaaacagtcgcatggtggcaggaaggtgtaaccacacaactacttgaaatgggcattgattccacctg

SEQ ID NO: 346813 - DNA, 75 bp, synthetic construct
  source 1..75: mol_type = other DNA
cactcttcggacctaaatggagccttggatacagcggttccaccatgcactatacagatgcaccggatgctcaga

SEQ ID NO: 346814 - DNA, 75 bp, synthetic construct
  source 1..75: mol_type = other DNA
accagtgaaactggagctgtgcaaatcaagtcgattggaaatggtcaatgtttggggaatggagaaagtgttaca

SEQ ID NO: 346815 - DNA, 75 bp, synthetic construct
  source 1..75: mol_type = other DNA
tatttgacaacaacgccccggcgttttatgccgtcacgcctgcacgcctggctgaactgctggcgctggaagaaa

SEQ ID NO: 346816 - DNA, 75 bp, synthetic construct
  source 1..75: mol_type = other DNA
cgctctggacgatcaactctatcaggaaccgcaaactgcccccgttgccgtaccgatggggaaatttgccatgta

SEQ ID NO: 346817 - DNA, 75 bp, synthetic construct
  source 1..75: mol_type = other DNA
acgtcgttggtattgacgccctggtacacgatcaccagaccgttctggcaaaagctgaaggcggaatggttgccg

SEQ ID NO: 346818 - DNA, 75 bp, synthetic construct
  source 1..75: mol_type = other DNA
aatgaaggtgaatgtaagccttgacgattttatctctctggtgagcgatttagagcagctatctgaggacgatgc

SEQ ID NO: 346819 - DNA, 75 bp, synthetic construct
  source 1..75: mol_type = other DNA
atgacagacaacattctggaagttatggacactctttcggatcggatgatcaccctacagacacgtatcaatcaa

SEQ ID NO: 346820 - DNA, 75 bp, synthetic construct
  source 1..75: mol_type = other DNA
cgatcaccgttatgctgaaatcaaaaccgggaagctgtttgacaaagtaccaccttatgtctggagtctggttcg

SEQ ID NO: 346821 - DNA, 75 bp, synthetic construct
  source 1..75: mol_type = other DNA
gcccttactgcctcaaagcccgcatgattttcggcctgaaaaatatccccgtcgaattacatgttctgctcaacg

SEQ ID NO: 346822 - DNA, 75 bp, synthetic construct
  source 1..75: mol_type = other DNA
gcctactggcaggcgggagggaaagtctttcaccatgtgcagtggcaacaaaaactggcgcgcagcctgcaaatc

SEQ ID NO: 346823 - DNA, 75 bp, synthetic construct
  source 1..75: mol_type = other DNA
ctttactcctggcaggatgtacttctgatgtaacgaaccagcgaaattttataactcagtttaatggaggtactg

SEQ ID NO: 346824 - DNA, 75 bp, synthetic construct
  source 1..75: mol_type = other DNA
aaaaacagcctgagtggtacgtgaaagctgtcagaaaaactatcgcggcgttgccgggtggttacgctgaagccg

SEQ ID NO: 346825 - DNA, 75 bp, synthetic construct
  source 1..75: mol_type = other DNA
tctttgtgtctcttcctgacgtcgaggatgtggacaacgccgatatcaaccaacgcctgctggaagtcattgaac

SEQ ID NO: 346826 - DNA, 75 bp, synthetic construct
  source 1..75: mol_type = other DNA
ctgcaaaaagatgacagccgctatatgccagaaagcatggacatcgttcactatgtcgataaactcgacggcaaa

SEQ ID NO: 346827 - DNA, 75 bp, synthetic construct
  source 1..75: mol_type = other DNA
catcggcggcaaacaaaaaaggacgatgcgcaatctcaccatcacgcggattaatatcagccaggctaactacgg

SEQ ID NO: 346828 - DNA, 75 bp, synthetic construct
  source 1..75: mol_type = other DNA
acttggcgagccagtatttgatcgcctggatgccgacatcgcccatgcgctgatgagcattaacgcggtgaaagg

SEQ ID NO: 346829 - DNA, 75 bp, synthetic construct
  source 1..75: mol_type = other DNA
ccggggcgcaccattaaccgctttggcgaagaagttgagatgatcaccaaaggccgtcacgatccctgtgtcggg

SEQ ID NO: 346830 - DNA, 75 bp, synthetic construct
  source 1..75: mol_type = other DNA
ccgtgcgcttgaccgttcagtagcatacctgcgagaagctctttccgtctggctggccgcaggaaatgaaattaa

SEQ ID NO: 346831 - DNA, 75 bp, synthetic construct
  source 1..75: mol_type = other DNA
cttttgaggtctgccagaataacaaagcggcatggctgcaacgcaaaaatgagctggcagcggccgaacaggaat

SEQ ID NO: 346832 - DNA, 75 bp, synthetic construct
  source 1..75: mol_type = other DNA
aaaagtgcgcaactggcatcacgtcagtctgtgtataattccccgaaaatccgcccgtttttactgaaaaaagcc

SEQ ID NO: 346833 - DNA, 75 bp, synthetic construct
  source 1..75: mol_type = other DNA
aatggcaggtgaatcaggccgccagtcgttatattcgttcgcatgaagccgttcagcacatcagcatccgcgacc

SEQ ID NO: 346834 - DNA, 75 bp, synthetic construct
  source 1..75: mol_type = other DNA
catggctgtcgttcagcgacgcgccacttctcgataacgcagaactgcatatcgaagataacgaacgtgtttgtc

SEQ ID NO: 346835 - DNA, 75 bp, synthetic construct
  source 1..75: mol_type = other DNA
ttgatcgcaaactggcacaggaagaggtgtggatccgtcaggggatcaaagcgcgtcgtacccgtaatgaaggtc

SEQ ID NO: 346836 - DNA, 75 bp, synthetic construct
  source 1..75: mol_type = other DNA
agctggaaaaccgcatcaacgaagtgctggcgcaactggggttagatcctaatgttgcgctgtcgtcgctttccg

SEQ ID NO: 346837 - DNA, 75 bp, synthetic construct
  source 1..75: mol_type = other DNA
cggcgcggagctggccgccgccctcgccccggagctgatgaattatcccgggcaacaccccgccattcagcgctg

SEQ ID NO: 346838 - DNA, 75 bp, synthetic construct
  source 1..75: mol_type = other DNA
tcgtcgtgcctggcggattggtttgtgacaatatcaacaccggcatctttatccctcccggtaaaacgttacaca

SEQ ID NO: 346839 - DNA, 75 bp, synthetic construct
  source 1..75: mol_type = other DNA
gcgttgcggcaggggcgattgccaaaaaatatctcgctgagaaatttggcatcgaaattcgcggctgcctgaccc

SEQ ID NO: 346840 - DNA, 75 bp, synthetic construct
  source 1..75: mol_type = other DNA
tcgctgcgtgacctgattgacgtaaaaaaatgggaggtcaatcaggccgccggtcgctacatcttctcgcacgag

SEQ ID NO: 346841 - DNA, 75 bp, synthetic construct
  source 1..75: mol_type = other DNA
ttctggtgcttcaggtattccgcaaagacgattacgcggtgaagtatgctgtagaaccgttactcgacggcgatg

SEQ ID NO: 346842 - DNA, 75 bp, synthetic construct
  source 1..75: mol_type = other DNA
ttcttgggccatttggcgagctgcactgcgtggcggcgatccctccgccgccacaatttgaaccaaccgactcca

SEQ ID NO: 346843 - DNA, 75 bp, synthetic construct
  source 1..75: mol_type = other DNA
acataacgccagcgttctctgttcctacatttcatcaattcatcaggtctggctgcagcagctttatcctatgtt

SEQ ID NO: 346844 - DNA, 75 bp, synthetic construct
  source 1..75: mol_type = other DNA
ctatgggtcagggggcatggcacgaagccgatatgtctggtgataaaatcgatcacggcggttgtattaataccc

SEQ ID NO: 346845 - DNA, 75 bp, synthetic construct
  source 1..75: mol_type = other DNA
gatcaaccctatcgatgcgcagaagcgaggtattgccaacggcgatatggtacgggtgtttaaccatcgtggcga

SEQ ID NO: 346846 - DNA, 75 bp, synthetic construct
  source 1..75: mol_type = other DNA
aactacgagaggaaaacaatcgtctcgctaatacgttcagcggtaattttcgttatttcatcgtaattcatttta

SEQ ID NO: 346847 - DNA, 75 bp, synthetic construct
  source 1..75: mol_type = other DNA
atggaaagcacagccttacagcaggcctttgacacgtgtcagaataacaaagcagcatggctgcaacgcaaaaat

SEQ ID NO: 346848 - DNA, 75 bp, synthetic construct
  source 1..75: mol_type = other DNA
cctttgaggcctgtcagacgaacaaaaacacctggctgaaacgtaaagccgaactggcagaccttgaacaggaat

SEQ ID NO: 346849 - DNA, 75 bp, synthetic construct
  source 1..75: mol_type = other DNA
ttgcaaagggtgaaaaaattaattattccgcacaggatagcgacattttaacgaccatcggattcaggcctgacg

SEQ ID NO: 346850 - DNA, 75 bp, synthetic construct
  source 1..75: mol_type = other DNA
gcgtcccatgtggtgagttttcaaaattcgcacatgaggatgtcactatggcaaccacccctacccaaactcact

SEQ ID NO: 346851 - DNA, 75 bp, synthetic construct
  source 1..75: mol_type = other DNA
aaaagtgggaaattaatcaggccgccggtcactatatccgctcacatgaggaggtgcagcacatcagtatccgaa

SEQ ID NO: 346852 - DNA, 75 bp, synthetic construct
  source 1..75: mol_type = other DNA
agcagcatggctgcaacgcaaaaatgagctggctgcggccgaacaggaatatctgcggcttctgtccggggaagg

SEQ ID NO: 346853 - DNA, 75 bp, synthetic construct
  source 1..75: mol_type = other DNA
gagacgcatattcttccgcaacaggcgatacgcgatccctttgtgctcgaatttctggaattgaaagatgaatac

SEQ ID NO: 346854 - DNA, 75 bp, synthetic construct
  source 1..75: mol_type = other DNA
cggatttcaccatggttattagtaaccgatgatacggcaaccatcaccgcgtttttgcagctgattcaggaaggg

SEQ ID NO: 346855 - DNA, 75 bp, synthetic construct
  source 1..75: mol_type = other DNA
aaccgctggcatcgcgcccggtaaggttgcgcttaccgttcaacaacggtcaggagacgaatgaactggagttga

SEQ ID NO: 346856 - DNA, 75 bp, synthetic construct
  source 1..75: mol_type = other DNA
ccaatgtagctatttttcccaaccctataccttttatgtatcaagaagttacttgcaaagatattgatgttattt

SEQ ID NO: 346857 - DNA, 75 bp, synthetic construct
  source 1..75: mol_type = other DNA
gctttctactatgttcgcaagcatccggtgacgctgctgccttatcaggtctggcgtcacgccatcggtacgcca

SEQ ID NO: 346858 - DNA, 75 bp, synthetic construct
  source 1..75: mol_type = other DNA
caggcgaattaacaccattgggaattccgcagacaccgtctgcagaattcccatcggcaaagatttggcagacgc

SEQ ID NO: 346859 - DNA, 75 bp, synthetic construct
  source 1..75: mol_type = other DNA
tggtcgtcactcctgtcgatatgcgccgggttatcgataccctgacacagtacgtccagaacgaacttaacgctg

SEQ ID NO: 346860 - DNA, 75 bp, synthetic construct
  source 1..75: mol_type = other DNA
accccgcctcgttgttatcctcgcgacagacgtggttaccagatatggctaggtgaaacgcgtgttcgtactgct

SEQ ID NO: 346861 - DNA, 75 bp, synthetic construct
  source 1..75: mol_type = other DNA
catgatgctggttggcgataatctggatggaataaagggaatgattcatgacttcgatcccaacgctggcgctta

SEQ ID NO: 346862 - DNA, 75 bp, synthetic construct
  source 1..75: mol_type = other DNA
tttttttcgctttgttgccgacgtctttggtgtgggcggcaccagcgcaacgggcgttttccgactggcaggtca

SEQ ID NO: 346863 - DNA, 75 bp, synthetic construct
  source 1..75: mol_type = other DNA
tcataaaagccgttttgcgattcgttttatgccactggacagtgaaaatggacaagtaccggaacgtctggattt

SEQ ID NO: 346864 - DNA, 75 bp, synthetic construct
  source 1..75: mol_type = other DNA
atgatcgaaagcgtgcaagggcagaagtttagtcgctatgtgccggaagatatcactaccttgctgtcaatgacc

SEQ ID NO: 346865 - DNA, 75 bp, synthetic construct
  source 1..75: mol_type = other DNA
tcagcctgctaacggcatttaccagccactccttaaaatctcccgccgttccaccaaccgtggtacaaatccagg

SEQ ID NO: 346866 - DNA, 75 bp, synthetic construct
  source 1..75: mol_type = other DNA
tcgtagccagcaatgtgttggtgtagaaatattgctgcgctggaataacccgcgtcaggggtggatctcaccaga

SEQ ID NO: 346867 - DNA, 75 bp, synthetic construct
  source 1..75: mol_type = other DNA
gatttacccgcatcacagccacttttacgtctggcgaccgatagtgtattgattaaaggcagcccggttttaatc

SEQ ID NO: 346868 - DNA, 75 bp, synthetic construct
  source 1..75: mol_type = other DNA
cacaactgccgcaaatcagtagcgccagcctgacggtggacaatcggcatttgctctatggtaatgggctggtag

SEQ ID NO: 346869 - DNA, 75 bp, synthetic construct
  source 1..75: mol_type = other DNA
taagaatattgtggttatcctgccgtcatcgggtgagcgttatttaagcactgcattgtttgccgatcttttcac

SEQ ID NO: 346870 - DNA, 75 bp, synthetic construct
  source 1..75: mol_type = other DNA
gcgtcagccgctacattaaaggcaccaaaggcaagaccgatcttatctctgtcgccgttgagccaaccgattctc

SEQ ID NO: 346871 - DNA, 75 bp, synthetic construct
  source 1..75: mol_type = other DNA
ctcgtaaccccagcttcagcgttaagtgccgtatcggtgccaacatgatttgggatgccgaaaagcgcggcgtgc

SEQ ID NO: 346872 - DNA, 75 bp, synthetic construct
  source 1..75: mol_type = other DNA
ggttccgtagccggtggtgtgctggctgactggcatgtcctggtcgccctggccgcatgcgcactggcctacggt

SEQ ID NO: 346873 - DNA, 75 bp, synthetic construct
  source 1..75: mol_type = other DNA
gtaaaaaaagcgtcggggcggggaatgcgattgcagtacaaaaccttggcgaaaacagcgccatgttgttgatgc

SEQ ID NO: 346874 - DNA, 75 bp, synthetic construct
  source 1..75: mol_type = other DNA
cagccagaaggtcgatttgcagaaactggtgcacgaagatatggcgaagaattttgccgagtacccgcaaaaatg

SEQ ID NO: 346875 - DNA, 75 bp, synthetic construct
  source 1..75: mol_type = other DNA
ttgctacagagacctgtattcgtggggaaaggaaatgcctcacacagaaaaacttaaggcagaagatgagtccga

SEQ ID NO: 346876 - DNA, 75 bp, synthetic construct
  source 1..75: mol_type = other DNA
caacatccacacccacccggtcagcggtgtggagagcggcggcagcgcggtgacaagtcaggcaaccacggagac

SEQ ID NO: 346877 - DNA, 75 bp, synthetic construct
  source 1..75: mol_type = other DNA
tatctgctgcggcaatcagccaggcacaaaaggcggcgggtgccgggtttgatatcgaagggctgaaaaaacagc

SEQ ID NO: 346878 - DNA, 75 bp, synthetic construct
  source 1..75: mol_type = other DNA
ttcatcccgaaaggaaggcagttatcgtcctgacgatcaccggttgatggtgtggagcgggcagtcaatctatgc

SEQ ID NO: 346879 - DNA, 75 bp, synthetic construct
  source 1..75: mol_type = other DNA
gccacgcatgcattattgatgttgatgggctggtggttccgggaaaatttcctccagacgtggttggtacacctg

SEQ ID NO: 346880 - DNA, 75 bp, synthetic construct
  source 1..75: mol_type = other DNA
gggtattgttgtacctgcttaccagcagcatttcttcttccgatatggttccaaaaacaatgatttcctcgggat

SEQ ID NO: 346881 - DNA, 75 bp, synthetic construct
  source 1..75: mol_type = other DNA
cgtattgtcggtccgctggtgatggtcggttattctttgacccatattgacggtgtagtcagatttggctcactt

SEQ ID NO: 346882 - DNA, 75 bp, synthetic construct
  source 1..75: mol_type = other DNA
ctgttttttaccggttcgatatttagcccggaatatgcgtttttaatcgtctgcccgtttattttgcgaaaagcg

SEQ ID NO: 346883 - DNA, 75 bp, synthetic construct
  source 1..75: mol_type = other DNA
acagtttggtatcaaaacgcctaaaaccgatgctatgattctcgcagggataatattatccggatcgttttcagg

SEQ ID NO: 346884 - DNA, 75 bp, synthetic construct
  source 1..75: mol_type = other DNA
gattttatctctctggtgagcgatttagagcagctatctgaggacgatgccaagctgtgcactcgaaccatcacg

SEQ ID NO: 346885 - DNA, 75 bp, synthetic construct
  source 1..75: mol_type = other DNA
tggaacaacttttagttctgactatctcactacaaacaagaataaatcaagcctattcagatttatgcgattata

SEQ ID NO: 346886 - DNA, 75 bp, synthetic construct
  source 1..75: mol_type = other DNA
ggatgaggcgctttccatgggagagcgggcactttttatcgaacacccgactgacagaagcaatgcagttaaagt

SEQ ID NO: 346887 - DNA, 75 bp, synthetic construct
  source 1..75: mol_type = other DNA
tgggcagtttgattacgcagcaagcctggttaaatcgcttgcctctctgctggtagtaaccagcggcagtgcaat

SEQ ID NO: 346888 - DNA, 75 bp, synthetic construct
  source 1..75: mol_type = other DNA
tgacgatcgagcgggacaactggcaaaagatgctgacgaggcaagagccagagggttagcctgtgaagctgctta

SEQ ID NO: 346889 - DNA, 75 bp, synthetic construct
  source 1..75: mol_type = other DNA
aactggcagaccgtgaacgcgcctgcggtaccggaactcccggcagaagcgaggcagaaaccagcggcgccgtac

SEQ ID NO: 346890 - DNA, 75 bp, synthetic construct
  source 1..75: mol_type = other DNA
cgttacagcgtcggttacggtgatgccgatcagcactggcgtgaagagtgggcgcaacgtgatgcacgcgatgcc

SEQ ID NO: 346891 - DNA, 75 bp, synthetic construct
  source 1..75: mol_type = other DNA
ataacgcccaaccgctgacccaggatcaatgcttacgcgtactgcatcacctacgcgttcagtccatcagcaaag

SEQ ID NO: 346892 - DNA, 75 bp, synthetic construct
  source 1..75: mol_type = other DNA
acaaggtgaaattgatgcgatcagaaaacaaaccagtcagcagcttgctggcgtgcaggctgctgccgatcgtgc

SEQ ID NO: 346893 - DNA, 75 bp, synthetic construct
  source 1..75: mol_type = other DNA
ctactgggaatatatccccactgaagtgaagccgttttttgtgcgtaccgtggcgatccttggcggcgagtcgag

SEQ ID NO: 346894 - DNA, 75 bp, synthetic construct
  source 1..75: mol_type = other DNA
ccaaatctttccccctgccctggtccacctacgtccgtttactttctgttaaaaaccctgatgcccgcagctttt

SEQ ID NO: 346895 - DNA, 75 bp, synthetic construct
  source 1..75: mol_type = other DNA
gcaaagatttggcagacgctgtctgccaaatctttccccctgccctggtccacctacgtccgtttactttctgtt

SEQ ID NO: 346896 - DNA, 75 bp, synthetic construct
  source 1..75: mol_type = other DNA
cgcagcttttatgagaaagagacactccgctgtggctggtctgctcgtcagctcgaacgacaaattgcgacccag

SEQ ID NO: 346897 - DNA, 75 bp, synthetic construct
  source 1..75: mol_type = other DNA
ctacctgatgaaaaacgactcgcggatgaactcgttcgaacacaggcggtgctagggaaggtgcgaataagcggg

SEQ ID NO: 346898 - DNA, 75 bp, synthetic construct
  source 1..75: mol_type = other DNA
ctactgggaatatattcctaccgaagtgaagccgttctttgtgcgcaccgtggcgatcctcggcggcgagtcgag

SEQ ID NO: 346899 - DNA, 75 bp, synthetic construct
  source 1..75: mol_type = other DNA
gcattactgctggcgcgtaaagacggtcagacaacgctactcgatttaaaacttccggcgctggacttagcagaa

SEQ ID NO: 346900 - DNA, 75 bp, synthetic construct
  source 1..75: mol_type = other DNA
caggccaccattagcgggttagcgttaccgggtgaaaccgttgccgatcagcataagcagtggaaaatcggcgtc

SEQ ID NO: 346901 - DNA, 75 bp, synthetic construct
  source 1..75: mol_type = other DNA
cagtggaaggaaacgcattccccattgcaggttattttccagggcagtttgctggaatcgggcggtcgcccggtg

SEQ ID NO: 346902 - DNA, 75 bp, synthetic construct
  source 1..75: mol_type = other DNA
cagcaggtgcgcattattgccttcccgctggcgctggtggtgctgtacatcatcattaaactcgccaccacaaaa

SEQ ID NO: 346903 - DNA, 75 bp, synthetic construct
  source 1..75: mol_type = other DNA
tctcgattatcgtcgggtgcacagtcagcaggtgcgcattattgccttcccgctggcgctggtggtgctgtacat

SEQ ID NO: 346904 - DNA, 75 bp, synthetic construct
  source 1..75: mol_type = other DNA
cagaggtagcagaaagcgtgcattcctgctgttaaaacatatacgccggaaacgtccgggtctgtttgtacactg

SEQ ID NO: 346905 - DNA, 75 bp, synthetic construct
  source 1..75: mol_type = other DNA
agcggcgatctggtgctggtgtggttgcaggttaaagccagtaacagtgtaccggatgcgttagtcgtggatctg

SEQ ID NO: 346906 - DNA, 75 bp, synthetic construct
  source 1..75: mol_type = other DNA
cagaagttgctaaagacacatcgtcgggaaatacgaattctgcaaaaacctccgcggtagagcgacaaaaactgg

SEQ ID NO: 346907 - DNA, 75 bp, synthetic construct
  source 1..75: mol_type = other DNA
gcgatacctcgcgcctgacgctggatatcactaatcttaccgataaaccgcaaaaacttaatgttgctctgaccg

SEQ ID NO: 346908 - DNA, 75 bp, synthetic construct
  source 1..75: mol_type = other DNA
accagaacctggctaacggcaacgccagtctggagcaaagtggtagcgaagtgcaaaacctgcttaatcaaatgc

SEQ ID NO: 346909 - DNA, 75 bp, synthetic construct
  source 1..75: mol_type = other DNA
ttgcaaaacttctcgcctgttacgctgcaaggtcagctattgttgagcggcaaaccaccgctgaacatcgcacgt

SEQ ID NO: 346910 - DNA, 75 bp, synthetic construct
  source 1..75: mol_type = other DNA
acggtacggcgttgcagcctggtgaaacctgggcgctcccggcggatggattgcaaaacttctcgcctgttacgc

SEQ ID NO: 346911 - DNA, 75 bp, synthetic construct
  source 1..75: mol_type = other DNA
cgagcaagaccaagattgtctactgcaaggatgggatgggaagcgaacagacgattatcctgagatcagttttga

SEQ ID NO: 346912 - DNA, 75 bp, synthetic construct
  source 1..75: mol_type = other DNA
gacagaacgcttgagccagttatacagcgagaacaggagataagggatgaacggctgatgcaggaacgcgaacat

SEQ ID NO: 346913 - DNA, 75 bp, synthetic construct
  source 1..75: mol_type = other DNA
ttgaatatctcctctgctttacgccaggttgttcacggcactcgctggcacgccaaacgcaagagctacaaagtg

SEQ ID NO: 346914 - DNA, 75 bp, synthetic construct
  source 1..75: mol_type = other DNA
gcatctgggcgatttaagtgacgatggcatccagatgcagtggcgcgaagcgttacgcctgatgcaaaacatcta

SEQ ID NO: 346915 - DNA, 75 bp, synthetic construct
  source 1..75: mol_type = other DNA
gctggcgcgtattgatagcgtcgaatgtgagcagtttatctggatgcagccgcccactgagttcaccatccgcca

SEQ ID NO: 346916 - DNA, 75 bp, synthetic construct
  source 1..75: mol_type = other DNA
aggagcgcgaatatgcgttatccctggagcgggagcgccagccggaaattcaggaacggacactggatggccctt

SEQ ID NO: 346917 - DNA, 75 bp, synthetic construct
  source 1..75: mol_type = other DNA
ggcagtcattggtgatcatgacgttgtttgccgtactgttggcaacgcttattcatcattttggcgaacaaatta

SEQ ID NO: 346918 - DNA, 75 bp, synthetic construct
  source 1..75: mol_type = other DNA
atggatgattttagtacagagcgtaataataagggtatgaaaatgaaatggtatgaactggctagatccagaatg

SEQ ID NO: 346919 - DNA, 75 bp, synthetic construct
  source 1..75: mol_type = other DNA
gggaccagtgttattgccggaaattttatcgcgttttcaattgcggctcttatcaacttacccggaagtgcgctc

SEQ ID NO: 346920 - DNA, 75 bp, synthetic construct
  source 1..75: mol_type = other DNA
actcgctggcacgctaaacgcaagagctacaaagtgttgttctggcgcgagataaccccgcttgctgttcctatc

SEQ ID NO: 346921 - DNA, 75 bp, synthetic construct
  source 1..75: mol_type = other DNA
tggttactggacgttggctatggaaataccctcgacccgagccgcaaaagtgtgaaaaaaagccagttgtgtcgg

SEQ ID NO: 346922 - DNA, 75 bp, synthetic construct
  source 1..75: mol_type = other DNA
aaaaatgcgccccaatcagccattaactgtgaaaatcaaagccagcaataaaaatggtgagatgccaaaacaggt

SEQ ID NO: 346923 - DNA, 75 bp, synthetic construct
  source 1..75: mol_type = other DNA
attatcaacgcaacgttcaggaacgtatcaaccgcaagggtgccagtaaggaggttgttgtcaaaatctcaggag

SEQ ID NO: 346924 - DNA, 75 bp, synthetic construct
  source 1..75: mol_type = other DNA
gaggttgttgtcaaaatatctggaggtgctattactcgtcaggggattcggaacagtattgattatatgagccgt

SEQ ID NO: 346925 - DNA, 75 bp, synthetic construct
  source 1..75: mol_type = other DNA
gttttactggcgaatggttactggacgttggctatggaaataccctcgatccgagccgcaaaagtgtgaaaaaaa

SEQ ID NO: 346926 - DNA, 75 bp, synthetic construct
  source 1..75: mol_type = other DNA
attcaggacgagcaagcggatgatagtaaccttgatttaaaattaaacgaaatttctctctctcacaatacatct

SEQ ID NO: 346927 - DNA, 75 bp, synthetic construct
  source 1..75: mol_type = other DNA
tcatcaacggagacggtgacagggaatggctgccgatagtaaacagcatgaagatacatattatcagcaagctgc

SEQ ID NO: 346928 - DNA, 75 bp, synthetic construct
  source 1..75: mol_type = other DNA
aaaaatgctgaaaaggtccagtgtcacacctggtcggcaattgcggaaaagatgcttgagacgtttatcacgcag

SEQ ID NO: 346929 - DNA, 75 bp, synthetic construct
  source 1..75: mol_type = other DNA
acaatgccacaatgaatattgcaagattcaatcatccagaattaattaccatgaaacaagatgcatcattaacga

SEQ ID NO: 346930 - DNA, 75 bp, synthetic construct
  source 1..75: mol_type = other DNA
cagcttgatagtaatttgacaagttctttagggcaacttgaaaggaagtttaataaggcttttgacaagattgag

SEQ ID NO: 346931 - DNA, 75 bp, synthetic construct
  source 1..75: mol_type = other DNA
agggcaagattcaggctgaagagcttcgtggacagttgggtgaccgtatggcaggggcatttaagctattcgctg

SEQ ID NO: 346932 - DNA, 75 bp, synthetic construct
  source 1..75: mol_type = other DNA
gtcattatggctttttttgcagctatcgatcttggtactactgtcgttgtggcatttagtctcggtaagcgggat

SEQ ID NO: 346933 - DNA, 75 bp, synthetic construct
  source 1..75: mol_type = other DNA
aagttctattacagccttgatgacactaaacgaaaactacttgatgaagtcggtgatggttttatcaacttcgtc

SEQ ID NO: 346934 - DNA, 75 bp, synthetic construct
  source 1..75: mol_type = other DNA
taacaaggcctttgacaagattgaacagagagcaagaaatactaaagctttccagtttaccaccagatttaatga

SEQ ID NO: 346935 - DNA, 75 bp, synthetic construct
  source 1..75: mol_type = other DNA
aggtggtcagacaaggaccgaaaaaattacatgtgtaagaattgagactgacatagataagaaaggtattataga

SEQ ID NO: 346936 - DNA, 75 bp, synthetic construct
  source 1..75: mol_type = other DNA
aggatttaccgggcaaatggcaggcgcaaaccactttctctgctgagccgttgacaggcgagaaagcgcaaacca

SEQ ID NO: 346937 - DNA, 75 bp, synthetic construct
  source 1..75: mol_type = other DNA
caggttattttccagggtagtttgctggaatcgggcggtcgcccggtgacgcgccgcgctgagcaggctatctgg

SEQ ID NO: 346938 - DNA, 75 bp, synthetic construct
  source 1..75: mol_type = other DNA
gtgaagaagcaattgcgctggcgctgaaaacgccgcgtaatgatgagcggaaatggctgggtgattacggtagcc

SEQ ID NO: 346939 - DNA, 75 bp, synthetic construct
  source 1..75: mol_type = other DNA
gggtaaatggcaggcgcaaacctctttctcagctgagccgctgacaggcgagaaaacgctaaacagcaatctgaa

SEQ ID NO: 346940 - DNA, 75 bp, synthetic construct
  source 1..75: mol_type = other DNA
cattccgcttgacccggagcaagatttctcgcgtgtcgtccatgttgtcgataaaaaaagcggcaaagtggatgg

SEQ ID NO: 346941 - DNA, 75 bp, synthetic construct
  source 1..75: mol_type = other DNA
gcgccaggcgtgcgaaccacgctgtttatcccggtgcgagcattgccgggttatggcgatggtgaaattcaggcg

SEQ ID NO: 346942 - DNA, 75 bp, synthetic construct
  source 1..75: mol_type = other DNA
ctgaagcctcatgaggtgatcggtgctctggccgatgaaggcgaccagttgaacaacgccaccccggtttatatc

SEQ ID NO: 346943 - DNA, 75 bp, synthetic construct
  source 1..75: mol_type = other DNA
agcaggctgtaaataaagaagctttaattgaaatcgagcctattgataaaggttatagcatccgtcgtcccgata

SEQ ID NO: 346944 - DNA, 75 bp, synthetic construct
  source 1..75: mol_type = other DNA
ggcagcagagaagttaaaaaaagaaataactgctcaggatgattattgtaaaattattattgatggttctcgagt

SEQ ID NO: 346945 - DNA, 75 bp, synthetic construct
  source 1..75: mol_type = other DNA
gtccactgcgcgacaacgcattgatgctctccttgctggaagagaacaaattgctacccgatgagcagtaccctc

SEQ ID NO: 346946 - DNA, 75 bp, synthetic construct
  source 1..75: mol_type = other DNA
cttgaactggtcagcgattcacccgcagccgttgaattagcgccaggtgtgcgtactacgctgtttatcccggtg

SEQ ID NO: 346947 - DNA, 75 bp, synthetic construct
  source 1..75: mol_type = other DNA
aaaatggtgagatgccaaaacaggtgaatgtgctggtgtctgccgttgatagcggtgtgctgaatattactgatt

SEQ ID NO: 346948 - DNA, 75 bp, synthetic construct
  source 1..75: mol_type = other DNA
tggcgctggtgtttggtcgcgaacgtgtcggcctgaccaatgaagagttgcagaagtgtcattatcatgtcgcga

SEQ ID NO: 346949 - DNA, 75 bp, synthetic construct
  source 1..75: mol_type = other DNA
cgagcaggtcgagcatgaagagacgccgtatccgctggtcgatgatctggagcgtttttatggtcatctggaaca

SEQ ID NO: 346950 - DNA, 75 bp, synthetic construct
  source 1..75: mol_type = other DNA
cagttcaatccggatgctccggatgagcgttgggtaacggacataacctacataaggacccacgaaggctggctg

SEQ ID NO: 346951 - DNA, 75 bp, synthetic construct
  source 1..75: mol_type = other DNA
actgtcataccgggctcagtatttctgaggttgagcatatcaggcagagcgtgcgcgacattctggtcacgccgg

SEQ ID NO: 346952 - DNA, 75 bp, synthetic construct
  source 1..75: mol_type = other DNA
ctacatggcgatcctgaagtgggaaccgcgcgtcaggctgaccagcatcactacagcgcggcagtttgacggaca

SEQ ID NO: 346953 - DNA, 75 bp, synthetic construct
  source 1..75: mol_type = other DNA
attcgccgcttcttacgcaatcatggtagcattgtcagcacggttaaggctgatgattctgctacaaaatggctc

SEQ ID NO: 346954 - DNA, 75 bp, synthetic construct
  source 1..75: mol_type = other DNA
ggaggcgtaatcctcaaaagcaggtactggttcactctgatcagggtagtcagtacacgagccatgagtggcagt

SEQ ID NO: 346955 - DNA, 75 bp, synthetic construct
  source 1..75: mol_type = other DNA
acggtccgctggtatctggataacccgacctggtggcagcgcgtgctggacggctcctacgccggcgaacgtctt

SEQ ID NO: 346956 - DNA, 75 bp, synthetic construct
  source 1..75: mol_type = other DNA
ggcggcgtaatcccgaaaaaaaggtgctggttcattcggatcagggcagtcagtacacaagccatgagtggcagt

SEQ ID NO: 346957 - DNA, 75 bp, synthetic construct
  source 1..75: mol_type = other DNA
tttacgcctggcttcagcagccggattcacggcggcatcatgctgacctgaggctgacggggctgataaagcagt

SEQ ID NO: 346958 - DNA, 75 bp, synthetic construct
  source 1..75: mol_type = other DNA
taacagtaagcgtcggcatggttcgagcgagcagatgccaccggctgaatatgaaaacctatattatcaacggct

SEQ ID NO: 346959 - DNA, 75 bp, synthetic construct
  source 1..75: mol_type = other DNA
tgccacgacaacgcggttgcggaaagctttttccagctactgaaacgcgaacggattaagaaaaggatctacgga

SEQ ID NO: 346960 - DNA, 75 bp, synthetic construct
  source 1..75: mol_type = other DNA
ttaacgcgttctaccgaaaacaccgaaaaatgggattctctgttaccgctgccggaaccttatgtcgtgccgggc

SEQ ID NO: 346961 - DNA, 75 bp, synthetic construct
  source 1..75: mol_type = other DNA
tcgcgccagtaaaatggcaacggcgaccagaacgcatctgctgcaacctggcggactgaacaccacctcggtgaa

SEQ ID NO: 346962 - DNA, 75 bp, synthetic construct
  source 1..75: mol_type = other DNA
tgcaaagaatggcgttaattcccaccaccgttttattgtgttttgccacgctatcggcacaggcggaagaaatcg

SEQ ID NO: 346963 - DNA, 75 bp, synthetic construct
  source 1..75: mol_type = other DNA
cgaaagcgcaaccgtgtgacaacgttccggcaagtcgcccactcagtaaatcaacaacaccgccggttaaacaaa

SEQ ID NO: 346964 - DNA, 75 bp, synthetic construct
  source 1..75: mol_type = other DNA
cggctgacgctggattccatcaccattaaaagcaattttgacggttcaatggtggtggggctgaccgggcggcgt

SEQ ID NO: 346965 - DNA, 75 bp, synthetic construct
  source 1..75: mol_type = other DNA
gaccagccacaaaatccagcattacgcctgcaggtcatgtcggcagtgtatgtggcgctgagcgggcagcgtaat

SEQ ID NO: 346966 - DNA, 75 bp, synthetic construct
  source 1..75: mol_type = other DNA
cgaaagaaaaaccgtgtgacaacgttccggcaacgcgcccgaccagtgcttccgcaacgcagccaacaaaagtca

SEQ ID NO: 346967 - DNA, 75 bp, synthetic construct
  source 1..75: mol_type = other DNA
caaaagagcaaccgtgtgacaatgttccggcaagaccgctccatgaatcaacacaacagtccacaactaaagcgg

SEQ ID NO: 346968 - DNA, 75 bp, synthetic construct
  source 1..75: mol_type = other DNA
gatggacaatccgcagcagttaaataccttacgcaccaccagcatcgtaccggtcgatctgaacagcctgatgtt

SEQ ID NO: 346969 - DNA, 75 bp, synthetic construct
  source 1..75: mol_type = other DNA
tagctatggttttttctacacagacggtttttcaagtcctggcgggaagtattgcgcaaatgtttgccatacgtg

SEQ ID NO: 346970 - DNA, 75 bp, synthetic construct
  source 1..75: mol_type = other DNA
ctgccactgaaatttaccgcgacctgcgctctgccgctgcgtctggctgggatttcagctcgcgctggatggaca

SEQ ID NO: 346971 - DNA, 75 bp, synthetic construct
  source 1..75: mol_type = other DNA
atggcgttaattccagcctgtatctttttgtgtttcgctgcgctatcggtgcaggcagaagaaacaccggtaaca

SEQ ID NO: 346972 - DNA, 75 bp, synthetic construct
  source 1..75: mol_type = other DNA
cgaaagagcaaccgtgtgacaatgttccggcgacgcgtccactcagtgaatcaacaacacagccggtaaaacaaa

SEQ ID NO: 346973 - DNA, 75 bp, synthetic construct
  source 1..75: mol_type = other DNA
tttataacagtaagcgtcggcatggttctagcgaacagatgtcaccgacagaatatgaaaaccagtattatcaac

SEQ ID NO: 346974 - DNA, 75 bp, synthetic construct
  source 1..75: mol_type = other DNA
cgtattcatcgccataaaaccggcgcattgattcgcgccgccgttcgtcttggtgcattaagcgccggagataaa

SEQ ID NO: 346975 - DNA, 75 bp, synthetic construct
  source 1..75: mol_type = other DNA
atccacgcttactcattaattcatgatgatttaccggcaatggatgatgacgatctgcgtcgcggtttgccgacc

SEQ ID NO: 346976 - DNA, 75 bp, synthetic construct
  source 1..75: mol_type = other DNA
cattgattcgcgccgccgttcgccttggtgcattaagcgccggagataaagggcgtcgtgctctgccagtactcg

SEQ ID NO: 346977 - DNA, 75 bp, synthetic construct
  source 1..75: mol_type = other DNA
tggatcatgtcggtcttgatcccagccgtattgccgcccaggtcgtcactggcgtcggatttatcggtgcgggga

SEQ ID NO: 346978 - DNA, 75 bp, synthetic construct
  source 1..75: mol_type = other DNA
atcaattaaccttccgcctgatgagcaaaaattatcatttgcagcttacgttggtgaacggtaatacagtgtcga

SEQ ID NO: 346979 - DNA, 75 bp, synthetic construct
  source 1..75: mol_type = other DNA
tatggttttgctgatgtgctggcgttcgaccatgtcgggcttgatcccagccgtattgccgctcaggtcgtcact

SEQ ID NO: 346980 - DNA, 75 bp, synthetic construct
  source 1..75: mol_type = other DNA
attgccggaatgtgcggtggtcaggcgttggatttagacgcggaaggcaaacacgtacctctggacgcgcttgag

SEQ ID NO: 346981 - DNA, 75 bp, synthetic construct
  source 1..75: mol_type = other DNA
cgcattatctcgctgatttcacattgctctttccacagagtttaccggcgggtgatggcggcttgtctctggggc

SEQ ID NO: 346982 - DNA, 75 bp, synthetic construct
  source 1..75: mol_type = other DNA
tggcggtgatgtcattgctttgacgctcgacggtattggtatgggcgagaacggcgctttatggggcggcgagtg

SEQ ID NO: 346983 - DNA, 75 bp, synthetic construct
  source 1..75: mol_type = other DNA
gctgagccgttttatcgccccactgccctttaagaacactcccgtggtcgaaaccatgcagtatggcgcattatt

SEQ ID NO: 346984 - DNA, 75 bp, synthetic construct
  source 1..75: mol_type = other DNA
cgacgatgcccgccagtcattgagtcaactggctgaacagtcactcgatatctcggcactggaagcgctagcggg

SEQ ID NO: 346985 - DNA, 75 bp, synthetic construct
  source 1..75: mol_type = other DNA
ctggtttatgccaccggtcatatgtttggcgttagcacaaacacgctggacgcacccgctgccgccgtagagtgt

SEQ ID NO: 346986 - DNA, 75 bp, synthetic construct
  source 1..75: mol_type = other DNA
tcaccgccacagtactgtcaggatgcgcaggcagcagcacgcaaccggcgtcagggatgcagacgttactcccgg

SEQ ID NO: 346987 - DNA, 75 bp, synthetic construct
  source 1..75: mol_type = other DNA
attagaattaatgacattctatattctgccgtaataacttcagaagcgcgactaatgagttcgcatcaagttcct

SEQ ID NO: 346988 - DNA, 75 bp, synthetic construct
  source 1..75: mol_type = other DNA
tctaaattaggtaaattcacgatgcatcctcttggagcaatcggacgctatcgacctaacaaaactgccagtaaa

SEQ ID NO: 346989 - DNA, 75 bp, synthetic construct
  source 1..75: mol_type = other DNA
cgtgccgcacccacgtgttgaacgccccgaaatcatcgagatggactacgggatgaccggtggctcgattaggat

SEQ ID NO: 346990 - DNA, 75 bp, synthetic construct
  source 1..75: mol_type = other DNA
ttccagttgttgaaacgcgaacggataaagaaaaagatctacggaacgcgggaagaagtccgcagcgatattttt

SEQ ID NO: 346991 - DNA, 75 bp, synthetic construct
  source 1..75: mol_type = other DNA
gccatgtggaccgttccattgatggcccggccgcgtttatccagaccaacgtgatcggtaccttcactctgctgg

SEQ ID NO: 346992 - DNA, 75 bp, synthetic construct
  source 1..75: mol_type = other DNA
aaaagatggaccaatgagcagccaagaattgatatctatattgatcagataataactgtctcaggggtagcaaat

SEQ ID NO: 346993 - DNA, 75 bp, synthetic construct
  source 1..75: mol_type = other DNA
gcttctgatgcgcttaaccgtctacagcgtcacgatctgcgctggctggttaaacgtctggtcgatgaatcgcaa

SEQ ID NO: 346994 - DNA, 75 bp, synthetic construct
  source 1..75: mol_type = other DNA
atgaataccaattctgtggatgttcgttatcgcaatatcccgttatgggatgatgcgacattatcattaatggct

SEQ ID NO: 346995 - DNA, 75 bp, synthetic construct
  source 1..75: mol_type = other DNA
cgggcggttggcatgaaaggctggcaaccgcgcgacatgcttaattattgcgattggaacctgatagcgaaatac

SEQ ID NO: 346996 - DNA, 75 bp, synthetic construct
  source 1..75: mol_type = other DNA
ggcgctggctctgggctttggcgatggcgtgaatggcccaatgcaggcgttgctaccctgtgaatcccccacagc

SEQ ID NO: 346997 - DNA, 75 bp, synthetic construct
  source 1..75: mol_type = other DNA
actgctcacctgatcattgccttcgtggaccggagtaccggttatggctcaaagatcatctcgcaatttacggcg

SEQ ID NO: 346998 - DNA, 75 bp, synthetic construct
  source 1..75: mol_type = other DNA
ggtgcaggtgggaatgcgtcagcgtcatcaggagctggtggtgtggcgcacactcggtgcggggaaaaaactgct

SEQ ID NO: 346999 - DNA, 75 bp, synthetic construct
  source 1..75: mol_type = other DNA
acgtccggcaccctttttccttttttcacatagccaggtttccggcaatcagagggggagggtacgccatggctg

SEQ ID NO: 347000 - DNA, 75 bp, synthetic construct
  source 1..75: mol_type = other DNA
agctgtacgtccggcacccttttttctttttttacacagccaggtttccggctgtcagagggggagggtgcgcca

SEQ ID NO: 347001 - DNA, 75 bp, synthetic construct
  source 1..75: mol_type = other DNA
ctgccgtccaggtcgtttttatggaattgactatgagcaaaatcaaaaagcattagaaaaattaatcaatcatat

SEQ ID NO: 347002 - DNA, 75 bp, synthetic construct
  source 1..75: mol_type = other DNA
gttgcgtcgattccaggccaggttgccgatcaggcccctctccccagtctggctccaatgctggaaaaagtgctt

SEQ ID NO: 347003 - DNA, 75 bp, synthetic construct
  source 1..75: mol_type = other DNA
acgtccggcacccttttcccttttttcacacagccaggtttccggcagtcagagggggagggtacgccatggctg

SEQ ID NO: 347004 - DNA, 75 bp, synthetic construct
  source 1..75: mol_type = other DNA
acgtccggcaccctttttccttttttcacgtagccaggtttccggctgtcagagggggagggggcgccatggctg

SEQ ID NO: 347005 - DNA, 75 bp, synthetic construct
  source 1..75: mol_type = other DNA
atggcggtaacgcaaacagcccaggcctgtgacctggtcattttcggcgcgaaaggcgaccttgcgcgtcgtaaa

SEQ ID NO: 347006 - DNA, 75 bp, synthetic construct
  source 1..75: mol_type = other DNA
gaaaaacttcgtgcaaaaaccgaacggcagatacaggaagcacaggagcgaatcagcgcacttcaggaagaaatg

SEQ ID NO: 347007 - DNA, 75 bp, synthetic construct
  source 1..75: mol_type = other DNA
cgcaaaaaaataggcaacgataattatgtctatatgttgtggcgttacaatgactgttgtgttcgctacgttccg

SEQ ID NO: 347008 - DNA, 75 bp, synthetic construct
  source 1..75: mol_type = other DNA
ggataccagaaatcggatggcagctaagttttttccaaccagtaaaaattgttgaagtggtgaaaagtccgtggt

SEQ ID NO: 347009 - DNA, 75 bp, synthetic construct
  source 1..75: mol_type = other DNA
tgggacaatcgcaccattgatcatgttgagattaccgtggcagaagaagtggggatcgaagggcgctggggctat

SEQ ID NO: 347010 - DNA, 75 bp, synthetic construct
  source 1..75: mol_type = other DNA
tgctgagatgatcacaccagcgctggaaggcgcaacgttgagcgatggtcagctaaaagatggcagcaaaggcat

SEQ ID NO: 347011 - DNA, 75 bp, synthetic construct
  source 1..75: mol_type = other DNA
cggtgcgtaaggatgcagccttcggcgtcacggtgaatggggtttccgcagctcctggggagagcaaaaatgttc

SEQ ID NO: 347012 - DNA, 75 bp, synthetic construct
  source 1..75: mol_type = other DNA
cagatccgtttcaatgtgcaggcaaggccctacgaccaaaaaattactggcggtgccacctgcaacatccctgcc

SEQ ID NO: 347013 - DNA, 75 bp, synthetic construct
  source 1..75: mol_type = other DNA
tcattgccacggccatagcttcagtttatccggcggcggctcagattttcagctattcgtatactgacaccaatc

SEQ ID NO: 347014 - DNA, 75 bp, synthetic construct
  source 1..75: mol_type = other DNA
ccaattaacgatatctattacgccgaagcgcacgagaaaatgacctttgtctatacgcggcgtgaatcctacgta

SEQ ID NO: 347015 - DNA, 75 bp, synthetic construct
  source 1..75: mol_type = other DNA
cgacatggacaaatatggttccacggatgttcgtaaggcattgattaataaatgggtcagcgaagtgaagatggg

SEQ ID NO: 347016 - DNA, 75 bp, synthetic construct
  source 1..75: mol_type = other DNA
ccgcagcttccctatttttccttcgacttccggcgtcgttggaacttctgaatttatgctgaatatagaggaact

SEQ ID NO: 347017 - DNA, 75 bp, synthetic construct
  source 1..75: mol_type = other DNA
gatgctgttaagcctggtgttcgcaccgacctggcttgggttatcgttttacgatagccgcaccacgtcgttgtt

SEQ ID NO: 347018 - DNA, 75 bp, synthetic construct
  source 1..75: mol_type = other DNA
cgccagtgcacgcattatgggcgttggcctcaacacggttttacgtcacttaaaaaactcaggccgtagtcggta

SEQ ID NO: 347019 - DNA, 75 bp, synthetic construct
  source 1..75: mol_type = other DNA
attcatcttttttccattttaagtcaattagttatgagtataaagatgctgtccgtaccttctgaccggggttgc

SEQ ID NO: 347020 - DNA, 75 bp, synthetic construct
  source 1..75: mol_type = other DNA
ctggatattgtgctgcgcggcgaatacggcaatcaactggcagcaaaacagcaacgcatggtggaaggggaaata

SEQ ID NO: 347021 - DNA, 75 bp, synthetic construct
  source 1..75: mol_type = other DNA
ccgacctggcttggtttatcgtattacgatagccgcaccacgtcgttgttgcatccggttcgccagatccaactt

SEQ ID NO: 347022 - DNA, 75 bp, synthetic construct
  source 1..75: mol_type = other DNA
gtttgcgctgcatgggacgatgcgatttatcgaatatgtgcgttgggtgcggatggcgaaggcgaggatgatttt

SEQ ID NO: 347023 - DNA, 75 bp, synthetic construct
  source 1..75: mol_type = other DNA
gcagagaagtttcaggcgggtcatgttgtcggggtgaagatagaaggatttacggaccatcttggcgggcaggcg

SEQ ID NO: 347024 - DNA, 75 bp, synthetic construct
  source 1..75: mol_type = other DNA
tgttgttcagtatgcagagcgggccgcagagaaactacgtggggaacgtcagtattgccggcaggtgacgacatt

SEQ ID NO: 347025 - DNA, 75 bp, synthetic construct
  source 1..75: mol_type = other DNA
agtgggaatttttaggtctggaaatgccgcagtggctgctcggtatttttatcacttacctgattgtcgcggtgc

SEQ ID NO: 347026 - DNA, 75 bp, synthetic construct
  source 1..75: mol_type = other DNA
gtgccaggtaaaattgctgtagaggtagcttacgcgttaccagagaagcagtatttgcagcgtgtaacattgctg

SEQ ID NO: 347027 - DNA, 75 bp, synthetic construct
  source 1..75: mol_type = other DNA
aagagggcgcggtggtattgccggaaggggagtttaacaccgcgtttaacctggaagccgtggtgaaagtgaccg

SEQ ID NO: 347028 - DNA, 75 bp, synthetic construct
  source 1..75: mol_type = other DNA
aacggcagccgtggttttgttggcactcgcgacacttgatgtgccaaacgtgaaactgtacgacggcgcatggag

SEQ ID NO: 347029 - DNA, 75 bp, synthetic construct
  source 1..75: mol_type = other DNA
tctgaatggacatattcccggcgcagtgttttttgatatcgaagcgctttctgatcacacttccccgcttccgca

SEQ ID NO: 347030 - DNA, 75 bp, synthetic construct
  source 1..75: mol_type = other DNA
cttatgccaacgcggctgagcggctattgatggctatcggtgactgtcatggtcgatacagcccaggaacccaga

SEQ ID NO: 347031 - DNA, 75 bp, synthetic construct
  source 1..75: mol_type = other DNA
cacacccagcgacatgaaatgatgaaagcgtctgatcccattggcaaagataacgatagccacttgatacgtctt

SEQ ID NO: 347032 - DNA, 75 bp, synthetic construct
  source 1..75: mol_type = other DNA
aactaaaaaacagaaaaactaaacgggattatgattatgaatgcagggtttctgatatatattttgatctgtttt

SEQ ID NO: 347033 - DNA, 75 bp, synthetic construct
  source 1..75: mol_type = other DNA
gcgtaccgatatcgatttaactaaaaacaaagtcggcatttacagccgtccggcaaaactaagcgatagtgtgca

SEQ ID NO: 347034 - DNA, 75 bp, synthetic construct
  source 1..75: mol_type = other DNA
ccttacctgccgggcaaaatgcctttgcccccggtcaaataaatgtggcggtacagggcattgaaggtgatgagg

SEQ ID NO: 347035 - DNA, 75 bp, synthetic construct
  source 1..75: mol_type = other DNA
ataacgaccccgtaaatagcgaagtggcacttgacctctgcctgcagctttgccagcaaggcggtttaatcgcca

SEQ ID NO: 347036 - DNA, 75 bp, synthetic construct
  source 1..75: mol_type = other DNA
atgttcgccctggccgacgtcaactccttctacgccagttgcgagagggttttcaggccggatttgcgcggaaaa

SEQ ID NO: 347037 - DNA, 75 bp, synthetic construct
  source 1..75: mol_type = other DNA
ttcgttgcgcctctgctgctggccgtcgggataacgctaatactgcgtctgacaggcagcgccgaagcgcgcata

SEQ ID NO: 347038 - DNA, 75 bp, synthetic construct
  source 1..75: mol_type = other DNA
aacgccgttttgcttcaggcggaacaacaactcgcccacagcttacagataacgaaaccacgtttgctggaacgc

SEQ ID NO: 347039 - DNA, 75 bp, synthetic construct
  source 1..75: mol_type = other DNA
gattcccggactggctgccgctggataaatgggtgccacaagtgtttgtcgcctctggtgattgcgctgagcgtc

SEQ ID NO: 347040 - DNA, 75 bp, synthetic construct
  source 1..75: mol_type = other DNA
ttgaactataccaacaccgaaatgaaagaagcgatagcgcagcgtaaaccactggttaccaccgctgggccgcgt

SEQ ID NO: 347041 - DNA, 75 bp, synthetic construct
  source 1..75: mol_type = other DNA
ggtgatctaccccatcgcctttttttgtctgcttgtttggtcaaatgcgtttgtttcgctcggtatgagcaacat

SEQ ID NO: 347042 - DNA, 75 bp, synthetic construct
  source 1..75: mol_type = other DNA
atgaaaacctcaaagactgttgcaaaactattatttgttgttggggcgctggtttatctggttgggctatggatc

SEQ ID NO: 347043 - DNA, 75 bp, synthetic construct
  source 1..75: mol_type = other DNA
gcctcaaaagagtggaaacagcttcgtggcgtacttgctctgaccaggggaaatccgcagagaacgcggaaactg

SEQ ID NO: 347044 - DNA, 75 bp, synthetic construct
  source 1..75: mol_type = other DNA
ggaactccgtggtttcagataaaaaacgaaaggtacccggaaaaaatatattcgttttcaagtaactatgaactt

SEQ ID NO: 347045 - DNA, 75 bp, synthetic construct
  source 1..75: mol_type = other DNA
cccgggacattatcgcggcagcggtcaggtctctggacagaatctggctcgatggccaccgctacgcaaaagcgg

SEQ ID NO: 347046 - DNA, 75 bp, synthetic construct
  source 1..75: mol_type = other DNA
gccgcagtggctgctcggtatttttatcgcttacctgattgtcgcggtgctggtggtgatttcccagccgtttaa

SEQ ID NO: 347047 - DNA, 75 bp, synthetic construct
  source 1..75: mol_type = other DNA
cgccaactaagaaacaaatcgtctgtagccgttcatttggcgtaaaagtgacgcaatttgaattgttacgtgagg

SEQ ID NO: 347048 - DNA, 75 bp, synthetic construct
  source 1..75: mol_type = other DNA
gccgcgcgtggagcaatacagcatcgacgagatgtttctggacattcgcggcatagacaattgcatcgattttga

SEQ ID NO: 347049 - DNA, 75 bp, synthetic construct
  source 1..75: mol_type = other DNA
ctcacgaaatgggctttgctcgccatgtttctactcacgtcattttcctccatcaggggaaaatagaggaagaag

SEQ ID NO: 347050 - DNA, 75 bp, synthetic construct
  source 1..75: mol_type = other DNA
ccagcggcgcgatggtcgggtttaacgttcatttccactctctggcaagcgcctcgattaccgcgatgtttagtt

SEQ ID NO: 347051 - DNA, 75 bp, synthetic construct
  source 1..75: mol_type = other DNA
tggcgtgggatgatgttcctgcgggaacgaaaagttttgttgtcacctgctacgacccggatgcgccaaccggct

SEQ ID NO: 347052 - DNA, 75 bp, synthetic construct
  source 1..75: mol_type = other DNA
gcgtctgactatggtgttccagcacttcaatctctggagccatatgacggtactggaaaacgtcatggaagcgcc

SEQ ID NO: 347053 - DNA, 75 bp, synthetic construct
  source 1..75: mol_type = other DNA
catcaggggaaaatagaggaagagggcgcgccggagcagttatttggcaacccgcaaagccctcgtctgcaacag

SEQ ID NO: 347054 - DNA, 75 bp, synthetic construct
  source 1..75: mol_type = other DNA
gtgcatctttccggtggtcagcaacagcgtgtttctatcgcgcgggcgctggcgatggaaccggaagttttactg

SEQ ID NO: 347055 - DNA, 75 bp, synthetic construct
  source 1..75: mol_type = other DNA
ggcgttgtgctcgatttacgctacgaagcacgagacatcgaccaaaatgtcacgtcgcaaaaaaagatcgatgaa

SEQ ID NO: 347056 - DNA, 75 bp, synthetic construct
  source 1..75: mol_type = other DNA
gaagttcacaaaccgctttgtgcggtgggagcccccgctcaggtacggaaagcagtagttaagctattaaaatcg

SEQ ID NO: 347057 - DNA, 75 bp, synthetic construct
  source 1..75: mol_type = other DNA
gatacgactgaaccaggtgaactgcgtcgtgctgagtatcatgctcgttatctcgatatccagattgtattaaaa

SEQ ID NO: 347058 - DNA, 75 bp, synthetic construct
  source 1..75: mol_type = other DNA
ataatggacagcctaaatacaaaccaactatgctttgggaaagtgacggtaggttaagtggttttgtcttaccat

SEQ ID NO: 347059 - DNA, 75 bp, synthetic construct
  source 1..75: mol_type = other DNA
cgctggcgattgccagtacgccgatcccgctggtacaaagtcaggatattcagccgctggtggaagtcgaaaaag

SEQ ID NO: 347060 - DNA, 75 bp, synthetic construct
  source 1..75: mol_type = other DNA
tgttggtctgctctagtgtctatcaagcttgtaaagcttatgaaatgttcagccaaacagatttagccggtaagg

SEQ ID NO: 347061 - DNA, 75 bp, synthetic construct
  source 1..75: mol_type = other DNA
ttcaatctctggagccatatgacggtgctggaaaatgtcatggaagcgccgattcaggtgttgggcctgagcaag

SEQ ID NO: 347062 - DNA, 75 bp, synthetic construct
  source 1..75: mol_type = other DNA
cacagaccaagcattgactggtgacatgaactctttagccgctgttttatgggctatggttcagggcaaatcaaa

SEQ ID NO: 347063 - DNA, 75 bp, synthetic construct
  source 1..75: mol_type = other DNA
tcctgattgagttaagctttagctctcagaaagttttaaaaggtctggaaaaagccgagaaacaaacgatgcaaa

SEQ ID NO: 347064 - DNA, 75 bp, synthetic construct
  source 1..75: mol_type = other DNA
tttttaagcagtcagccagatagcgatgcgacacgtaactttattaccggaatggccacagctaaagctaactag

SEQ ID NO: 347065 - DNA, 75 bp, synthetic construct
  source 1..75: mol_type = other DNA
attcaatcatccagaattaaacaacattaagcaagattcagcattaacgagtgcagatattcagggtctgagaga

SEQ ID NO: 347066 - DNA, 75 bp, synthetic construct
  source 1..75: mol_type = other DNA
cgaatcacaggagttattcatgacagagaaaggaatcagctatctgcagggataccgctatgcacctccgttacc

SEQ ID NO: 347067 - DNA, 75 bp, synthetic construct
  source 1..75: mol_type = other DNA
aaaagaagcatcacaacgagcggcacaatttgtattaggcgatgaaggcgctaaacgagctacagacttcgttaa

SEQ ID NO: 347068 - DNA, 75 bp, synthetic construct
  source 1..75: mol_type = other DNA
ggaagaagcgtggaaatgggtggactctattactgaagcgtgggcgatggacaacgatgcgccgaaaccatacca

SEQ ID NO: 347069 - DNA, 75 bp, synthetic construct
  source 1..75: mol_type = other DNA
tcgatttgcacaaacgctacggcgaacatgaagtgctgaaaggggtttccctgcaggcgaacgccggagatgtga

SEQ ID NO: 347070 - DNA, 75 bp, synthetic construct
  source 1..75: mol_type = other DNA
gacggtcaactcaaagtcgccgataaaaatcagctgcgcttactgcgcacacgcctgacgatggtattccagcac

SEQ ID NO: 347071 - DNA, 75 bp, synthetic construct
  source 1..75: mol_type = other DNA
ccagcggcgcgatggtcggttttaacgttcatttccactctctcgccagcgcatcaattaccgcgatgttcagtt

SEQ ID NO: 347072 - DNA, 75 bp, synthetic construct
  source 1..75: mol_type = other DNA
agaagggaaagcctaaatacaaaccgactatgatttgggaaagtaacggtgagattagttttctaatcttaccat

SEQ ID NO: 347073 - DNA, 75 bp, synthetic construct
  source 1..75: mol_type = other DNA
ccaccgtctgatctgagtgcagacagtatccgcgatgaaaaagtgaaagtactgaagtctctgcgccgcatcgat

SEQ ID NO: 347074 - DNA, 75 bp, synthetic construct
  source 1..75: mol_type = other DNA
tacaatcctggctgccggaagaacttcgcgaagcaattgagtacatcaaatcacatgtcagcgatgagacagcaa

SEQ ID NO: 347075 - DNA, 75 bp, synthetic construct
  source 1..75: mol_type = other DNA
tcaacgatctggaacggcgcatggtccgcctcggtgaacgggcgaaagaggcgattattatcgttgaaggcatct

SEQ ID NO: 347076 - DNA, 75 bp, synthetic construct
  source 1..75: mol_type = other DNA
aataattatctcggtttaactttcaatcatgatgccatcaccgaaggtcaggcagcattagcggcacaaggcacc

SEQ ID NO: 347077 - DNA, 75 bp, synthetic construct
  source 1..75: mol_type = other DNA
gctcgtcgttaagaactattgccacacaaccagagctgcggcaaaagctgatggataatgccaaccatctgtatg

SEQ ID NO: 347078 - DNA, 75 bp, synthetic construct
  source 1..75: mol_type = other DNA
ggtggaacgtaatgttccagcgcctacaggcagtcagttgccagctttccattttaatcctggaaaaaagaggaa

SEQ ID NO: 347079 - DNA, 75 bp, synthetic construct
  source 1..75: mol_type = other DNA
aatttgtcaggtttctggtcccgacgcattacagaggagcaccgtctggtatacgcggttaccgacgattcactg

SEQ ID NO: 347080 - DNA, 75 bp, synthetic construct
  source 1..75: mol_type = other DNA
aagatcaatgaacttatcaaagatacccgcagaacgccatttgaaggtaaggggaagccagaacccctgaaacat

SEQ ID NO: 347081 - DNA, 75 bp, synthetic construct
  source 1..75: mol_type = other DNA
gcgagttacgccgggaaccggcggatgagattgcgcaagcgttgcttaataacacctatacgttgtttaacgtgc

SEQ ID NO: 347082 - DNA, 75 bp, synthetic construct
  source 1..75: mol_type = other DNA
cgctggaaaggcgtccggcgaaggtggtggcggtgggggagatcggtctggatctcttcggcgacgatccgcaat

SEQ ID NO: 347083 - DNA, 75 bp, synthetic construct
  source 1..75: mol_type = other DNA
ccgggatgctacaaaaactggaagcggcctggcagcaacagcaaaccagcagtacgcctgcggtaacagtaacgc

SEQ ID NO: 347084 - DNA, 75 bp, synthetic construct
  source 1..75: mol_type = other DNA
acaaccagagctgcggcaaaagctgatggataacccaaccatctgtatgacggtctgcaaaaactgggttatgag

SEQ ID NO: 347085 - DNA, 75 bp, synthetic construct
  source 1..75: mol_type = other DNA
cgtcgtctcggcggatatttaattgtcgatgaagcacattcgtttggcgtgttaggcgcaacggggcgcggactg

SEQ ID NO: 347086 - DNA, 75 bp, synthetic construct
  source 1..75: mol_type = other DNA
gctggcggaaattgttgatatcaaacgtcgtctcggtggttatttgattgtcgatgaagcgcattcgtttggcgt

SEQ ID NO: 347087 - DNA, 75 bp, synthetic construct
  source 1..75: mol_type = other DNA
gaatggttactggacgttggctatggaaataccctcgacccgaaccgcaaaagtgtgaaaaaaagccagttgtgt

SEQ ID NO: 347088 - DNA, 75 bp, synthetic construct
  source 1..75: mol_type = other DNA
aaatttggctggttgccggtatcaccgatatgagaaatggcttcaacggcctgttaagaatttcctggcgaagaa

SEQ ID NO: 347089 - DNA, 75 bp, synthetic construct
  source 1..75: mol_type = other DNA
gctggctgaccagccgcacgggtcagatgtacgaccatgaccattattattacgacaaagcgggcaacctgctga

SEQ ID NO: 347090 - DNA, 75 bp, synthetic construct
  source 1..75: mol_type = other DNA
ttcagatattatgcgccggagtgcgggaggttcgtaagccaggatccgatttcgatccgtggcgggctgaatctt

SEQ ID NO: 347091 - DNA, 75 bp, synthetic construct
  source 1..75: mol_type = other DNA
tttccacatgctccgcagaatatttgatgtagatgcttatttcagagaggccaccaatgaagaattaacaagctt

SEQ ID NO: 347092 - DNA, 75 bp, synthetic construct
  source 1..75: mol_type = other DNA
ttgctgactctgttattagaaagaaagtttccttgattaataaatcaagaatacttgaggactactctgtgactg

SEQ ID NO: 347093 - DNA, 75 bp, synthetic construct
  source 1..75: mol_type = other DNA
gcttttttgccggaaggcgttgaagagaagaccgtcatcctcaatgaaggggactttgtcgtgttctatccgggt

SEQ ID NO: 347094 - DNA, 75 bp, synthetic construct
  source 1..75: mol_type = other DNA
ttgagaggcagcagtggttactcgacgaacaactgaaactggcgaaacgctacgatctgccggtgatcctgcatt

SEQ ID NO: 347095 - DNA, 75 bp, synthetic construct
  source 1..75: mol_type = other DNA
ggggaagcctaatcgcccggaacaggccgcgcgggtgtttgccgtgctttgcgagttacgcccggaacccgcgga

SEQ ID NO: 347096 - DNA, 75 bp, synthetic construct
  source 1..75: mol_type = other DNA
tgaatttgttagcggcaaaatagacagtgacgataagttcgaagctcatcgccaggaaatggccgaaacagtatg

SEQ ID NO: 347097 - DNA, 75 bp, synthetic construct
  source 1..75: mol_type = other DNA
atacgtatgcgttgtttagcgttagtgggtagtttacccttcgtaggcagcatccggcagtcggcgcataatgcc

SEQ ID NO: 347098 - DNA, 75 bp, synthetic construct
  source 1..75: mol_type = other DNA
cgccgtttagtggcgatgaagaggccagcctgcaacgcgcggcacaagcgggcgtaggcaagatcattgttccgg

SEQ ID NO: 347099 - DNA, 75 bp, synthetic construct
  source 1..75: mol_type = other DNA
gcagcccgtgtgtttgccgtgctttgcgagttacgaccggaacccgcggatgagattgccgaagtgttgcttaat

SEQ ID NO: 347100 - DNA, 75 bp, synthetic construct
  source 1..75: mol_type = other DNA
agcactccctatacaatgtattttaattttgataaagcgctggtgccatttttgttagtcctgtgtacagcttct

SEQ ID NO: 347101 - DNA, 75 bp, synthetic construct
  source 1..75: mol_type = other DNA
tctgtcgctctctgttcctcttatcctgtttttggctgttttttttggtggattaaagccagagattcattttcc

SEQ ID NO: 347102 - DNA, 75 bp, synthetic construct
  source 1..75: mol_type = other DNA
cttctggcctgagtggaaccaccaggcattgtgccagacgtgccataaccgtaagacaacacgggaagatccagc

SEQ ID NO: 347103 - DNA, 75 bp, synthetic construct
  source 1..75: mol_type = other DNA
ttgaaaaacagccagcaactatgcgccggataattggtaagcatcttgccgttcctcgctggcaggatacatgtg

SEQ ID NO: 347104 - DNA, 75 bp, synthetic construct
  source 1..75: mol_type = other DNA
atagcattatttttccatctatggccagggtttcacaatcctgtagtgctaaattctgttactgttggccctcaa

SEQ ID NO: 347105 - DNA, 75 bp, synthetic construct
  source 1..75: mol_type = other DNA
cagaggagtcattatttagagggtatattcaatcacggctatcagaagtgacgtctccattggttgcgttaattg

SEQ ID NO: 347106 - DNA, 75 bp, synthetic construct
  source 1..75: mol_type = other DNA
ccgaccgtcttggcccgttccagccttccgaacggcaggccgaggcgaaggcgaaccgcaagcggtacgagccac

SEQ ID NO: 347107 - DNA, 75 bp, synthetic construct
  source 1..75: mol_type = other DNA
cttgaagtcgcccagctcgccggcatgcacggcctcaaggtcacattcaccgatccgacgatggaacagatgcgc

SEQ ID NO: 347108 - DNA, 75 bp, synthetic construct
  source 1..75: mol_type = other DNA
gcgaggaacggacacgccgctggaacggggagctactgaccgccgaccgggccgacaaggccaaggctgttgttc

SEQ ID NO: 347109 - DNA, 75 bp, synthetic construct
  source 1..75: mol_type = other DNA
cgcaggtggggccggcggcgttagtgcgacgaacggcctcaagggcggtgatagctcgttcggatcggtaatagc

SEQ ID NO: 347110 - DNA, 75 bp, synthetic construct
  source 1..75: mol_type = other DNA
ccattgtgtcaggcgtgccataaccagaaaacgaaatggcttgatccggcaacaaaaagcaagcgtgccgcaggt

SEQ ID NO: 347111 - DNA, 75 bp, synthetic construct
  source 1..75: mol_type = other DNA
gttacgtaactgcgacaccagccactacatggaaaacaaagggcggatggtgcgtctggcggaatacagccgtga

SEQ ID NO: 347112 - DNA, 75 bp, synthetic construct
  source 1..75: mol_type = other DNA
ggcgtgatgctttatttcgtgccttgcgggagctttttaatttatttgagtatgcaccaacaatattaacctcgg

SEQ ID NO: 347113 - DNA, 75 bp, synthetic construct
  source 1..75: mol_type = other DNA
ccctacagtgaaaagcgccttgatgtgctggcaggatacctttccggaatgcctgccccggtctggcaaaactgg

SEQ ID NO: 347114 - DNA, 75 bp, synthetic construct
  source 1..75: mol_type = other DNA
tcaactggcctgtcagccggcatttatcgccggtttcagcagtcatttaaatcaactaagtgatgccgattttat

SEQ ID NO: 347115 - DNA, 75 bp, synthetic construct
  source 1..75: mol_type = other DNA
accacttacccgcatctaccgctgatatggctgccgcgcatctacatgcgatggcactggcacaattgcgcggtc

SEQ ID NO: 347116 - DNA, 75 bp, synthetic construct
  source 1..75: mol_type = other DNA
gaagcctttatggcccgctggattgcatgggcgatgcagcaaaacaatggcgacgtgttagtcgtctgcggcggc

SEQ ID NO: 347117 - DNA, 75 bp, synthetic construct
  source 1..75: mol_type = other DNA
tccggcatcatagtccggcctgcgccaggctggtgaaatcgctaatcgaaagccagcgaccgagatacgtgttga

SEQ ID NO: 347118 - DNA, 75 bp, synthetic construct
  source 1..75: mol_type = other DNA
gcaatctctcttccggcggagcttaccttaaatcgctttaaccccaatggactagcgcaaagtcaggtgttacat

SEQ ID NO: 347119 - DNA, 75 bp, synthetic construct
  source 1..75: mol_type = other DNA
cgtcgaacgtgaacggctggtttgtgcaattgatgaactgcgtggggcattctcaaaacgccgtcaggtcggtgc

SEQ ID NO: 347120 - DNA, 75 bp, synthetic construct
  source 1..75: mol_type = other DNA
atggcgtttggttcttactcgacggcgatgctcaaaggcatagttgatattccggtgtatccgctgaaaggctac

SEQ ID NO: 347121 - DNA, 75 bp, synthetic construct
  source 1..75: mol_type = other DNA
gctcagttaaagcagcgtcacgcgacgatgcgttttgaagaaatgaacgatgtagaccgtgagcgattagtttgc

SEQ ID NO: 347122 - DNA, 75 bp, synthetic construct
  source 1..75: mol_type = other DNA
aagtacactgacgcttgcgggtaacggtgaagaacagtggaaattaacccagccgcttagccagcatgcggcatt

SEQ ID NO: 347123 - DNA, 75 bp, synthetic construct
  source 1..75: mol_type = other DNA
gccattgcacatcatcaacaactcgaacagcaggcactggcatcgctgcaacactggggagttttccatgtctga

SEQ ID NO: 347124 - DNA, 75 bp, synthetic construct
  source 1..75: mol_type = other DNA
caagcgttgtgtcatatcctgcgcgatctacatagcggtgtgcaactccccggcatttctctttctgcggcggta

SEQ ID NO: 347125 - DNA, 75 bp, synthetic construct
  source 1..75: mol_type = other DNA
gaggcgctggccgtgctgcgcgaccgcgaggaacggacacgccgctggaacggggagctactgaccgccgaccgg

SEQ ID NO: 347126 - DNA, 75 bp, synthetic construct
  source 1..75: mol_type = other DNA
tgacctgtgccgcctggtcatcacgggttcgcatgctgggggttgaattcagagctgagtttaagcaggtggtga

SEQ ID NO: 347127 - DNA, 75 bp, synthetic construct
  source 1..75: mol_type = other DNA
tgacctgtgccgcctggtcatcacgggttcgcatgctgtgggttgaattcagagcagagtttaagcaggtggtga

SEQ ID NO: 347128 - DNA, 75 bp, synthetic construct
  source 1..75: mol_type = other DNA
tgacctgtgccgcctggtcatcacgggttcgcatgctgagggttgaattcagtgccgagtttaagcaggtggtga

SEQ ID NO: 347129 - DNA, 75 bp, synthetic construct
  source 1..75: mol_type = other DNA
atgaaaacctttcgctggaaagtgaagccggatatggaggtgaactcgcagccatcggtgagtgaagtgcgtttt

SEQ ID NO: 347130 - DNA, 75 bp, synthetic construct
  source 1..75: mol_type = other DNA
aacataccgtgtgacgctttccgtgacccgggaggaggcccgacatctggaggcattcctggcagagcacggagg

SEQ ID NO: 347131 - DNA, 75 bp, synthetic construct
  source 1..75: mol_type = other DNA
tgacctgtgccgcctggtcatcacgggttcgcatgttgcgcgttgagttcagcgcggagtttaagcaggtggtga

SEQ ID NO: 347132 - DNA, 75 bp, synthetic construct
  source 1..75: mol_type = other DNA
caagaaaaatattgacttcacccgtttttcagaagccggttatgttctgccggggcaatatcttctggatgtgat

SEQ ID NO: 347133 - DNA, 75 bp, synthetic construct
  source 1..75: mol_type = other DNA
gtcagattgtcgagcaaggacgttacgcggagttaagcgtggctaacggtcctttcgccacattactggcccatc

SEQ ID NO: 347134 - DNA, 75 bp, synthetic construct
  source 1..75: mol_type = other DNA
gtagcggttcaggtaaaagctcactattgaatgcgctttccggttttctttcctatcagggatcgctacgagtca

SEQ ID NO: 347135 - DNA, 75 bp, synthetic construct
  source 1..75: mol_type = other DNA
cggacgatgaaacctttacgctggaaagtgaagccggatatggaggtgaactcgcagccatcggtgcgtgaagtg

SEQ ID NO: 347136 - DNA, 75 bp, synthetic construct
  source 1..75: mol_type = other DNA
tggcttgtcgtaaatggtcggcaagcgtgggggcgttatgggtgactgtaacggccgattttgaacaggtggtga

SEQ ID NO: 347137 - DNA, 75 bp, synthetic construct
  source 1..75: mol_type = other DNA
aagccaccctatgcataccggcagataaaggtgacctgtgccgggtggtctgcgcgggtcgggatgttgcgcgtt

SEQ ID NO: 347138 - DNA, 75 bp, synthetic construct
  source 1..75: mol_type = other DNA
gccaatctgaagctggctgaaattcgccagcaacagtccgtggttaattacgaacaaaaaattcagtcagccttt

SEQ ID NO: 347139 - DNA, 75 bp, synthetic construct
  source 1..75: mol_type = other DNA
gcgcgggcggcctttttcccgtccattaccctgaccagtggcctttccgcaagcagtacggagctgtccagtctc

SEQ ID NO: 347140 - DNA, 75 bp, synthetic construct
  source 1..75: mol_type = other DNA
tatatttttggtattatgatttctttgataatatattacttgatatattatttcgttgatagaaagatagtattg

SEQ ID NO: 347141 - DNA, 75 bp, synthetic construct
  source 1..75: mol_type = other DNA
gaggcgagcgatatgccaggcgtggccccacagagtaggcagatgcaaccgaaggaccgctctaatggactgata

SEQ ID NO: 347142 - DNA, 75 bp, synthetic construct
  source 1..75: mol_type = other DNA
ggcgagaaggtcgccagctaccgcgttaccaactgcggcacggatgatccggcagatgccgcaatcttaatccaa

SEQ ID NO: 347143 - DNA, 75 bp, synthetic construct
  source 1..75: mol_type = other DNA
cttcgccatgacgaccacggcttaggagatagaaaccatgagcacaccagagaacgaagcgaccgaatccagctt

SEQ ID NO: 347144 - DNA, 75 bp, synthetic construct
  source 1..75: mol_type = other DNA
gccagcaacagtcggtggttaattacgaacaaaaaattcagtcagcctttaaggatgtttccgacacgcttgcgc

SEQ ID NO: 347145 - DNA, 75 bp, synthetic construct
  source 1..75: mol_type = other DNA
ttcgctggaaagtgaagccggatatggaggtgaactcgcagccatcggtgcgtgaagtgcgttttggtgacgggt

SEQ ID NO: 347146 - DNA, 75 bp, synthetic construct
  source 1..75: mol_type = other DNA
tgatctgtgccgggtggtctgcgcgggtcgggatgttgcgcgttgagttcagcgcggagtttaagcaggtggtga

SEQ ID NO: 347147 - DNA, 75 bp, synthetic construct
  source 1..75: mol_type = other DNA
aagttatctggaagtgctggatgccgagcgttctttatttgcaacccgacaaactttacttgacctgaattatgc

SEQ ID NO: 347148 - DNA, 75 bp, synthetic construct
  source 1..75: mol_type = other DNA
gcagcgggatgtggaattttatacccaaaattgagatccccatttttaatgccggacgcaaccaggccaatctgg

SEQ ID NO: 347149 - DNA, 75 bp, synthetic construct
  source 1..75: mol_type = other DNA
tgaacacgcgttaatggcggctaatgccaatattggcgctgcacgcgcggcattttttccgtctataagcctgac

SEQ ID NO: 347150 - DNA, 75 bp, synthetic construct
  source 1..75: mol_type = other DNA
aagacggcaaatacaaggggcgtaagcctaatcaggccagatatgacgcaattaacaggttgattgagagtggta

SEQ ID NO: 347151 - DNA, 75 bp, synthetic construct
  source 1..75: mol_type = other DNA
tgacatgaggaattgtgtcgtggatgatatgacgctgacaaacgagaagactggcaagagctggaatgagtatga

SEQ ID NO: 347152 - DNA, 75 bp, synthetic construct
  source 1..75: mol_type = other DNA
ctggcgaatatagccggcgcgactaatcagcttcagggcgatttatttgaatatattgtcgctgagaccgtgcgt

SEQ ID NO: 347153 - DNA, 75 bp, synthetic construct
  source 1..75: mol_type = other DNA
cgctcagtggaacgaaaactcacgttaagcaacgttttctgcctctgacgcctcttttaatggtctcagatgtcc

SEQ ID NO: 347154 - DNA, 75 bp, synthetic construct
  source 1..75: mol_type = other DNA
cgggaaagtgctcactttgcgatggcatgtgcagccctgtcgcgtgccagtgccagcatcaataacccaacactt

SEQ ID NO: 347155 - DNA, 75 bp, synthetic construct
  source 1..75: mol_type = other DNA
atggacaacagagaaaaagagatactcaggatcctgcgtcacaacccactgatccagcagaatgaaattgctgag

SEQ ID NO: 347156 - DNA, 75 bp, synthetic construct
  source 1..75: mol_type = other DNA
ggtatcagctgtaccggatggactggttaaagcagtgcgcttctatgaacaggttaagcatgaaaatccgccagt

SEQ ID NO: 347157 - DNA, 75 bp, synthetic construct
  source 1..75: mol_type = other DNA
aagagaaactttatatacaagcggtgctcactcacgtgggttgcatagcttgcattattgatggccgtgaaattg

SEQ ID NO: 347158 - DNA, 75 bp, synthetic construct
  source 1..75: mol_type = other DNA
aacccgaagaaatccgcgttcaatgcctggagggccagattacgcgaaggggtgtcaccggatgtcgtgctggat

SEQ ID NO: 347159 - DNA, 75 bp, synthetic construct
  source 1..75: mol_type = other DNA
tggcgcatacgatgccggttatagcggaaccagtatgacgggcgggaaaggcgcttcagggatttgtattatcga

SEQ ID NO: 347160 - DNA, 75 bp, synthetic construct
  source 1..75: mol_type = other DNA
gcgcgagggggtgccaccagagaccatgctggatggtgtgaggcgttacgcgagatacctggcggcgaccgggaa

SEQ ID NO: 347161 - DNA, 75 bp, synthetic construct
  source 1..75: mol_type = other DNA
ttataccttgctcatgaaaccgggcttggtctggaaggggcttcaaaggggcttaaaagggctgttgaagctggt

SEQ ID NO: 347162 - DNA, 75 bp, synthetic construct
  source 1..75: mol_type = other DNA
tccacactctgaaaccaacacaaaatgaactggaaattttgtggggcaaccgattaaagacgacaacgatcgcat

SEQ ID NO: 347163 - DNA, 75 bp, synthetic construct
  source 1..75: mol_type = other DNA
ttatccttgggcgtttctttccattgcgcaaaacatcgcgctggcaagaaaaagccattggctggctgaaacgct

SEQ ID NO: 347164 - DNA, 75 bp, synthetic construct
  source 1..75: mol_type = other DNA
cgttgtttgccagtagttttctcagcgctacactactacccggcaattcggaagttgtgctggtcgcaatgttac

SEQ ID NO: 347165 - DNA, 75 bp, synthetic construct
  source 1..75: mol_type = other DNA
aaatcacaaacagtcagtcggggcgctgaatgagatcagttctggcgaggtgttaagcgatgatgaaattgctgt

SEQ ID NO: 347166 - DNA, 75 bp, synthetic construct
  source 1..75: mol_type = other DNA
gcgttgatcaatggtgctggttctgctattggatatggcattggtaaaggcctttcatggggcattaatagtggt

SEQ ID NO: 347167 - DNA, 75 bp, synthetic construct
  source 1..75: mol_type = other DNA
ccaactggatggtgcggtgattgcctccactgccacaccggataaaaaccacctggataccggaacgctggggtt

SEQ ID NO: 347168 - DNA, 75 bp, synthetic construct
  source 1..75: mol_type = other DNA
ccggtaatctttttttgtgccttggtaaagcgttacgctatgttgcagttgcagcagcgaccgttcagggcatga

SEQ ID NO: 347169 - DNA, 75 bp, synthetic construct
  source 1..75: mol_type = other DNA
tataaaattgcctgcagcaggaagaaatgccgggctggctgttgctgtccatccacatatgctgagacatgggtg

SEQ ID NO: 347170 - DNA, 75 bp, synthetic construct
  source 1..75: mol_type = other DNA
aggaaaaacggcagtattacaataacgtcacgaaactattttatatacgaatccagcaccttaaggacaacatcc

SEQ ID NO: 347171 - DNA, 75 bp, synthetic construct
  source 1..75: mol_type = other DNA
gtgtggttgtgggtgcaatcaatatggagatatatccttaccgagcaggattactgtgtggttgtgggtgcaatc

SEQ ID NO: 347172 - DNA, 75 bp, synthetic construct
  source 1..75: mol_type = other DNA
cagcgaggaggaaaaaatcgaggtgttcggctgcgtccccatgttgtcggacgtggtgaacatcagcgcaggtga

SEQ ID NO: 347173 - DNA, 75 bp, synthetic construct
  source 1..75: mol_type = other DNA
ttcgtgacaagtccgaagttcgtcaacatcaacggtgtgccgtatctggaagcggaagccacggaaaacctgatt

SEQ ID NO: 347174 - DNA, 75 bp, synthetic construct
  source 1..75: mol_type = other DNA
ggtgtggctaccgccctgtcgtgccatttaattcgccctgacgcaatgacagtggcagcaatcgacgctggcaac

SEQ ID NO: 347175 - DNA, 75 bp, synthetic construct
  source 1..75: mol_type = other DNA
gggtaagaaatgaatattccgcgttgctggaaaatccttttttatcatccttttatgatagatataaggatgatt

SEQ ID NO: 347176 - DNA, 75 bp, synthetic construct
  source 1..75: mol_type = other DNA
atgtctgggaaaaatcctttttggaattatgattataatgcggcgcaacgtaatagagaaattgtagactcttac

SEQ ID NO: 347177 - DNA, 75 bp, synthetic construct
  source 1..75: mol_type = other DNA
atgagactccctgatttggaatcacttgagcatttcggagccagaggagcagtatcaggaagaccatttaatccc

SEQ ID NO: 347178 - DNA, 75 bp, synthetic construct
  source 1..75: mol_type = other DNA
tgggctgtggcgcgcaaacgggaaaagcgcgagcttgaactgatgattgacgagtatctgttatacgcctgttga

SEQ ID NO: 347179 - DNA, 75 bp, synthetic construct
  source 1..75: mol_type = other DNA
ccacaacggactcacctgcgaagccgacacactcggctcctgtggctatgtcttcattgctatctatcctgagca

SEQ ID NO: 347180 - DNA, 75 bp, synthetic construct
  source 1..75: mol_type = other DNA
atgatggtggccttacaccagaagctaattgcttaaaattcccttacccagagcgcgagataaagaacaagacat

SEQ ID NO: 347181 - DNA, 75 bp, synthetic construct
  source 1..75: mol_type = other DNA
tgatcatgaaggtaaatatatttgagagaacgttaaatcgccttcaagagcaatggcctgaaaaaaaagaaagca

SEQ ID NO: 347182 - DNA, 75 bp, synthetic construct
  source 1..75: mol_type = other DNA
tcagaaacgcaggctgccacaccaaaggcagtgaaggcggcatatgaccttgcagcaggtaaggcacctgtcagt

SEQ ID NO: 347183 - DNA, 75 bp, synthetic construct
  source 1..75: mol_type = other DNA
gcacagttaaaacagcgtcacgcaacgatgcgttttgaagaaatgaacgacgtcgaacgtgaacgactggtttgt

SEQ ID NO: 347184 - DNA, 75 bp, synthetic construct
  source 1..75: mol_type = other DNA
tctggcgaactttagtgagcagttactggaacaactcgcgttgctcatcgcccaggaaaatcagtttgctgagat

SEQ ID NO: 347185 - DNA, 75 bp, synthetic construct
  source 1..75: mol_type = other DNA
gatcaagaattagaaataatccagtcaatgccaggcgtttactttcgcccaagaacaagaaaacaaacaataatt

SEQ ID NO: 347186 - DNA, 75 bp, synthetic construct
  source 1..75: mol_type = other DNA
atgccaggcgtttactttcgcccaagaacaagaaaacaaactatcatttctgatggcactctgaaacgttggcag

SEQ ID NO: 347187 - DNA, 75 bp, synthetic construct
  source 1..75: mol_type = other DNA
aatcacacgcagaacttgaacgctgggctgtggcacgcaaacgggaaaagcgcgagcttgaactgatgattgacg

SEQ ID NO: 347188 - DNA, 75 bp, synthetic construct
  source 1..75: mol_type = other DNA
acaatcaacagggaaggtatcgctattgttgaaaaacaaatagccagatttggtcatgaccctgtaaatgaagtg

SEQ ID NO: 347189 - DNA, 75 bp, synthetic construct
  source 1..75: mol_type = other DNA
gatctccctcgcggtgttatctcttgcaatactgtttgctgtaacgcatatacatcaaattatcgtattaattga

SEQ ID NO: 347190 - DNA, 75 bp, synthetic construct
  source 1..75: mol_type = other DNA
taaaacccttctggtccatggcgaaaaaatcgccacggacccacagggggatttttgtcctgttctgactgaacg

SEQ ID NO: 347191 - DNA, 75 bp, synthetic construct
  source 1..75: mol_type = other DNA
tcactacttaataatcggcgagcgtttgttaaaaaacgttattctgaacagaaagaaatcacatctccggtgctt

SEQ ID NO: 347192 - DNA, 75 bp, synthetic construct
  source 1..75: mol_type = other DNA
ctaacggcagcagcctgtccgtcagtaacccaacgcccttttatatcaccgtaagccgtatctcccgtaacggcg

SEQ ID NO: 347193 - DNA, 75 bp, synthetic construct
  source 1..75: mol_type = other DNA
gccattcagcgggaagccgatcgggtagtcccggaaaacaccgggcagcctgtgggacgagtggattatccggat

SEQ ID NO: 347194 - DNA, 75 bp, synthetic construct
  source 1..75: mol_type = other DNA
agctggagggtgctggtctctggcgcagggctgccagtcgctggcttgatgtgatgcagcaccatgggctgacgg

SEQ ID NO: 347195 - DNA, 75 bp, synthetic construct
  source 1..75: mol_type = other DNA
aatggtgaaacagcttgagcggatgctgacaactggcgagcttgatcctcacaaccagcactgcgtcacactgca

SEQ ID NO: 347196 - DNA, 75 bp, synthetic construct
  source 1..75: mol_type = other DNA
gcagaatctttgaagttggatgaagtattcccacgttttatcagccagatggaatcgatgttgaccactggtgaa

SEQ ID NO: 347197 - DNA, 75 bp, synthetic construct
  source 1..75: mol_type = other DNA
atcccgaccttgccggtggtccaatagaaaacctgacgatagatggcgtaacaatcaacagggaaggtatcgcta

SEQ ID NO: 347198 - DNA, 75 bp, synthetic construct
  source 1..75: mol_type = other DNA
gcaatcacaccaactgcagcagcctgaagccgattccgccattcagcgggaagccgatcgggtagtcccggaaaa

SEQ ID NO: 347199 - DNA, 75 bp, synthetic construct
  source 1..75: mol_type = other DNA
gcgagagagggaaagaaagcgggaacaaaatggcgattgtcacggcgcgtcacgaaatgtcacgcatatgtcacg

SEQ ID NO: 347200 - DNA, 75 bp, synthetic construct
  source 1..75: mol_type = other DNA
tcacaacggacttacttgtgaagctgacactctcggctctcatggctacgtttacattgccatatatccccagtc

SEQ ID NO: 347201 - DNA, 75 bp, synthetic construct
  source 1..75: mol_type = other DNA
tattgttgcggcggcactgctgtatttaatcgccagcggtaaagccggatttgacgcggcggccagcggttttgc

SEQ ID NO: 347202 - DNA, 75 bp, synthetic construct
  source 1..75: mol_type = other DNA
gcgttagagcagttgtggttcttctgggtagtgccaattgtcggcggcattatcggtggtctgatttaccggacc

SEQ ID NO: 347203 - DNA, 75 bp, synthetic construct
  source 1..75: mol_type = other DNA
aattattttatgtgatggcgcattcgttctttatgcgcaatatcgagacggagagtttttcgatattgtccgcaa

SEQ ID NO: 347204 - DNA, 75 bp, synthetic construct
  source 1..75: mol_type = other DNA
gttttggtactttctggcttgtatttggtggctgcggtagcgcagtgctggcagcagcgttcccggaattaggca

SEQ ID NO: 347205 - DNA, 75 bp, synthetic construct
  source 1..75: mol_type = other DNA
gtggtcattttaacccggcggtcactattggtttatgggctggcggacgtttcccggcaaaagaagtcgttggct

SEQ ID NO: 347206 - DNA, 75 bp, synthetic construct
  source 1..75: mol_type = other DNA
atcagtattccggtcactaacacctccgttaacccggcgcgcagcactgcggttgctatcttccagggtggctgg

SEQ ID NO: 347207 - DNA, 75 bp, synthetic construct
  source 1..75: mol_type = other DNA
attggtggtgcatcaacgttaattattcatttttatatgggagacggaagttgtcctgcagctcagtttcggatt

SEQ ID NO: 347208 - DNA, 75 bp, synthetic construct
  source 1..75: mol_type = other DNA
aaggaagaacagaaggccactgaagagaaagccgcagccacaaagcggttcatggaagaacacaatattacggct

SEQ ID NO: 347209 - DNA, 75 bp, synthetic construct
  source 1..75: mol_type = other DNA
ttgtattgggtgataatgacacgggctttaaacaaaatggcgatggtaatctggatgtttatgctaataacgtcc

SEQ ID NO: 347210 - DNA, 75 bp, synthetic construct
  source 1..75: mol_type = other DNA
ttcgatatgatcaaaaccgttggcgatggtgcaaaaggctccagcagttcatttgtggccatcggtcaggttatt

SEQ ID NO: 347211 - DNA, 75 bp, synthetic construct
  source 1..75: mol_type = other DNA
ggatggttgggtcatggtgccgaagagactaacagccgagaacggcgctaagggtgtgctattcggtgaattttc

SEQ ID NO: 347212 - DNA, 75 bp, synthetic construct
  source 1..75: mol_type = other DNA
ttttgaagccgactggtccgaattttacaccaccaccagaaaaccttcagcaggagatgttgggtgcactgccgt

SEQ ID NO: 347213 - DNA, 75 bp, synthetic construct
  source 1..75: mol_type = other DNA
cggagatgcaacgattaagccgggtaatggtattgagcaagcaactcactggatgccgctaccggaaccgccgca

SEQ ID NO: 347214 - DNA, 75 bp, synthetic construct
  source 1..75: mol_type = other DNA
gtgagcctcgcttgcacattaaagaacgcggcaactctccggtaactccgggtggttggataagctgtagtgatc

SEQ ID NO: 347215 - DNA, 75 bp, synthetic construct
  source 1..75: mol_type = other DNA
tcgctgtcggtcgtggatgtggcgattattcttgggccaggtaatccaccgacgctggcagtaattagctggcag

SEQ ID NO: 347216 - DNA, 75 bp, synthetic construct
  source 1..75: mol_type = other DNA
ggctgttgcagcaggttattgtactggattcgctgggctacagccgctggcaatgtctgaactggttgttgttgc

SEQ ID NO: 347217 - DNA, 75 bp, synthetic construct
  source 1..75: mol_type = other DNA
gccgggtaatggtattgagcaagcaactcactggatgccgctaccggaaccgccgcaggaggtaaaccgtggcta

SEQ ID NO: 347218 - DNA, 75 bp, synthetic construct
  source 1..75: mol_type = other DNA
ttaagccgggtaatggtattgagcaggcaactcactggatgccgctaccggaaccgccgcaggaggttaaccgtg

SEQ ID NO: 347219 - DNA, 75 bp, synthetic construct
  source 1..75: mol_type = other DNA
ccgggtttattggttctgccgtcgttcgtcatattattgagaatacccaggatgaagtccgcgtcgtggactgcc

SEQ ID NO: 347220 - DNA, 75 bp, synthetic construct
  source 1..75: mol_type = other DNA
acgctgtggctgggcgcggggcgttttccgacgctcaccactgaggcggtggcattaagcagcggcggcagcaac

SEQ ID NO: 347221 - DNA, 75 bp, synthetic construct
  source 1..75: mol_type = other DNA
atggctacaccgttacggtacgcattaatctttttgctgtgggcgatggtggcggtgatttatgcaccgctgatc

SEQ ID NO: 347222 - DNA, 75 bp, synthetic construct
  source 1..75: mol_type = other DNA
ggctgttgcagcaggtcattgtgctggattcgctgggctacagccgctggcaatgcctgaactggctgctgttgc

SEQ ID NO: 347223 - DNA, 75 bp, synthetic construct
  source 1..75: mol_type = other DNA
gatgctgtttatcctgcaacccgcctggcagcgcattgattcacggttaattttgattgcgcaaacactgggctg

SEQ ID NO: 347224 - DNA, 75 bp, synthetic construct
  source 1..75: mol_type = other DNA
gtggatgtggcgattattcttgggccaggtaatcccccgacgctggcggtaattagctggcagtggttaactcag

SEQ ID NO: 347225 - DNA, 75 bp, synthetic construct
  source 1..75: mol_type = other DNA
caatgtctgaactggctgttgctgccctccgtcgctcccgcactggctatggcgatgctggcggttgtggcatgg

SEQ ID NO: 347226 - DNA, 75 bp, synthetic construct
  source 1..75: mol_type = other DNA
ataaggctggtgttaatgttttttactcttctgctcatagaacaagaaatcatgatagaagaataccagggggaa

SEQ ID NO: 347227 - DNA, 75 bp, synthetic construct
  source 1..75: mol_type = other DNA
agaagtcatccgcgaaatagcccagaaaaaaccggccgggagtgtggtcaatatcctgacacattgtaacgcagg

SEQ ID NO: 347228 - DNA, 75 bp, synthetic construct
  source 1..75: mol_type = other DNA
gatttcggttttgtggatattgacttctggaacaaaactcagcatcgattcctgagattagtgcgcaaaattgaa

SEQ ID NO: 347229 - DNA, 75 bp, synthetic construct
  source 1..75: mol_type = other DNA
atgctcgtgctgcacttcagcaaaaacaagatagtgaatataaaaagaaagttagtgaaatgagaagacgccttg

SEQ ID NO: 347230 - DNA, 75 bp, synthetic construct
  source 1..75: mol_type = other DNA
gtgcaggggaaatcgcctggtatcgattcaccatcagtgcctgcaacaccagaagttcaggcagcaccacaggag

SEQ ID NO: 347231 - DNA, 75 bp, synthetic construct
  source 1..75: mol_type = other DNA
tcgtagttctacgctgcttaccggttctcagggcgacacatcaaccgctaataccagcggtaaaacgctgcttgg

SEQ ID NO: 347232 - DNA, 75 bp, synthetic construct
  source 1..75: mol_type = other DNA
atgacgctgtatatcggcatgagtcagagcaacggaaaagctattacagacacggaccatctgcgccagtcggtg

SEQ ID NO: 347233 - DNA, 75 bp, synthetic construct
  source 1..75: mol_type = other DNA
atgacgttgtatatcggtatgagcaggaatgacgggcaggccattgcagatacagaacatctgcgccagtcggtg

SEQ ID NO: 347234 - DNA, 75 bp, synthetic construct
  source 1..75: mol_type = other DNA
gtagccgtattgcccgtcgggaatatggatctctgctgtcggctttaatagatcagccacaaaatccggcattac

SEQ ID NO: 347235 - DNA, 75 bp, synthetic construct
  source 1..75: mol_type = other DNA
ctgaccgggcggcggaataacggtgtacctgtgtccctttccgtatcgacaggagcagagaatggcagtgattga

SEQ ID NO: 347236 - DNA, 75 bp, synthetic construct
  source 1..75: mol_type = other DNA
gtagccgtattgcccgtcgggaatatggttctctgctgtcggcactgatagaccagccacaaaatccggcattac

SEQ ID NO: 347237 - DNA, 75 bp, synthetic construct
  source 1..75: mol_type = other DNA
gtagccgcattacccgtcgtgaatatggttccctgctgttggcactgatagaccagccacaaaatccggcgttac

SEQ ID NO: 347238 - DNA, 75 bp, synthetic construct
  source 1..75: mol_type = other DNA
catgaaagcgcgctgttggtacgaacaccatttcccgctgctgctcaataaaaaagaaggccagataccgaagct

SEQ ID NO: 347239 - DNA, 75 bp, synthetic construct
  source 1..75: mol_type = other DNA
tgctgcgccagcaactggataaattgccggatgccccttacatttccgatcgtcgctggaaaaaagcgatccgtt

SEQ ID NO: 347240 - DNA, 75 bp, synthetic construct
  source 1..75: mol_type = other DNA
atggctcaccctcatttattagcggaaagaatttcccgtctaagcagtgcgctggaaaagggactttatgaacgt

SEQ ID NO: 347241 - DNA, 75 bp, synthetic construct
  source 1..75: mol_type = other DNA
agatgaaggccgctatgagcgtttaaccagcggctacctgccggaagcagaaatcgtctttcttgatgagatctg

SEQ ID NO: 347242 - DNA, 75 bp, synthetic construct
  source 1..75: mol_type = other DNA
gttcgctgcatatgccagagtgctatccaataaaagaggatgttatttatactgaaagcgtaccatttcaggata

SEQ ID NO: 347243 - DNA, 75 bp, synthetic construct
  source 1..75: mol_type = other DNA
gaagtggttcatatctcctttgagcgtagcgcgctggaacagtggctgagtaaaggtggtgaaattcgcggcaaa

SEQ ID NO: 347244 - DNA, 75 bp, synthetic construct
  source 1..75: mol_type = other DNA
aaagaatttcccgtctgagcagttcgctggaaaaagggctttatgaacgtagccacgccatccgcctgtgtttgt

SEQ ID NO: 347245 - DNA, 75 bp, synthetic construct
  source 1..75: mol_type = other DNA
cagataaagaaaaaatgcttaaggaaatgaaagagaaaaaggaaacgatggaagagacagttgcacgatggctag

SEQ ID NO: 347246 - DNA, 75 bp, synthetic construct
  source 1..75: mol_type = other DNA
gtctcggcaggatgttttttggccgcaggatttgaaaaagagtgtctgaacctggttaagaaattaggtaacgat

SEQ ID NO: 347247 - DNA, 75 bp, synthetic construct
  source 1..75: mol_type = other DNA
tacagaaatctcacagtacagaaatcgcagtgcaaagacaatttcacatcaaaagaagcagctgtatgaaaaact

SEQ ID NO: 347248 - DNA, 75 bp, synthetic construct
  source 1..75: mol_type = other DNA
tggttagataaagtgcaggataaagcgaatttccgctccatgctgactagtcaacaggatgaaaacgacaatccg

SEQ ID NO: 347249 - DNA, 75 bp, synthetic construct
  source 1..75: mol_type = other DNA
agtttgcaggaggcgactctggcgctgcccggcgcatcggcagaggggctacccagcgaaataaaacaacaacta

SEQ ID NO: 347250 - DNA, 75 bp, synthetic construct
  source 1..75: mol_type = other DNA
gatgaaagataaaaaagaatcaatggatcgtacggttgcgcggtggttagctgcacaaaaaggccgtcgcgccta

SEQ ID NO: 347251 - DNA, 75 bp, synthetic construct
  source 1..75: mol_type = other DNA
cgccatttatcctggctgttctttgtatttacttcagctacttcctgcacggcattagtgttattacgcttgccc

SEQ ID NO: 347252 - DNA, 75 bp, synthetic construct
  source 1..75: mol_type = other DNA
aatgctaaaggtcgtgaactgggaatggtcgcagacagtggactttcgtggttgagtggggtaacccccggagaa

SEQ ID NO: 347253 - DNA, 75 bp, synthetic construct
  source 1..75: mol_type = other DNA
gccttccgtattttacggggaatgatacagccagcctgacaaccctgactaacgttggacggaatattctggata

SEQ ID NO: 347254 - DNA, 75 bp, synthetic construct
  source 1..75: mol_type = other DNA
ttaccgcgtcttcattattcctgagaatgatgtgcggtttggcgaacgcaattttaacaccccagttaagcacaa

SEQ ID NO: 347255 - DNA, 75 bp, synthetic construct
  source 1..75: mol_type = other DNA
ggcattagtgttattacgcttgcccaaaacatgacatctctggcagaaaagttttccactgacaacgcgggcatt

SEQ ID NO: 347256 - DNA, 75 bp, synthetic construct
  source 1..75: mol_type = other DNA
tgttgaaaagcaaattccccagccagttggtggacgccagcgtagctaatgaattaccgcaaatgaacagcaaac

SEQ ID NO: 347257 - DNA, 75 bp, synthetic construct
  source 1..75: mol_type = other DNA
ccatctggttcgcgcctggaaccgcacctacggcctgccggtggtggtgaccaactgctccaacaactatggtcc

SEQ ID NO: 347258 - DNA, 75 bp, synthetic construct
  source 1..75: mol_type = other DNA
cgctactcgttttcccagactgatatcaccgatgctgctgctgtggcagcccagttcagcgagttccgcccggat

SEQ ID NO: 347259 - DNA, 75 bp, synthetic construct
  source 1..75: mol_type = other DNA
gccatcggtgcgtgaagtgcgttttggtgacgggtattcacagcgtatggcggcagggctgaatgctgacctgaa

SEQ ID NO: 347260 - DNA, 75 bp, synthetic construct
  source 1..75: mol_type = other DNA
tctgctcacccaatacgattcgcttaaaccccaacttaaagctcttgttgatgatcatgagcagaagatacagtc

SEQ ID NO: 347261 - DNA, 75 bp, synthetic construct
  source 1..75: mol_type = other DNA
cctggctgccgccgtcacgctgggataacggtattccggggttgttgtttgactacaacatcaacgggacggtga

SEQ ID NO: 347262 - DNA, 75 bp, synthetic construct
  source 1..75: mol_type = other DNA
gggcgtggcggttggattgtcagcctcaaggtctaaatatctggggcgtgataacgattctgcttacctgcgtat

SEQ ID NO: 347263 - DNA, 75 bp, synthetic construct
  source 1..75: mol_type = other DNA
atgcaccgcagattaccgggattgcggagactaatgcccgtgttgtggtgtcgcagcagggacgggtgctgtacg

SEQ ID NO: 347264 - DNA, 75 bp, synthetic construct
  source 1..75: mol_type = other DNA
tttcagattgcgtttcttgaaccacctttttcggattcggataacgagaaaccgttaccagaaccctgcctgaca

SEQ ID NO: 347265 - DNA, 75 bp, synthetic construct
  source 1..75: mol_type = other DNA
tgtcaattgctctggtggcggtctactttggtttttcctatctcggcgagctggattttggtcactacgataccg

SEQ ID NO: 347266 - DNA, 75 bp, synthetic construct
  source 1..75: mol_type = other DNA
tcagtcacacgcacccgtggaatcagataacggatgtgcctgcagcttcactgacggtaaaaggcaccgtgcaac

SEQ ID NO: 347267 - DNA, 75 bp, synthetic construct
  source 1..75: mol_type = other DNA
cggtttatcgtcgtttaacaccgcaaaaaagcgatccacaacgtctgcaggaaatatatcaggatattattagta

SEQ ID NO: 347268 - DNA, 75 bp, synthetic construct
  source 1..75: mol_type = other DNA
gttaccgcaggcctgcctgacgccggagatggtcagccggatggggctgaccgaggcttctcaggagaaggtcac

SEQ ID NO: 347269 - DNA, 75 bp, synthetic construct
  source 1..75: mol_type = other DNA
tatgccgtcgactttaatacagatgttctggatgcagcagacagacagaatatagatttttcccgtttctctcag

SEQ ID NO: 347270 - DNA, 75 bp, synthetic construct
  source 1..75: mol_type = other DNA
tttccgctgatgtaacccagtccgtggcccgcattccgggagaagagacgaagcaggggaaatcctggcgtctga

SEQ ID NO: 347271 - DNA, 75 bp, synthetic construct
  source 1..75: mol_type = other DNA
cagggaacggacagtcagttcacctggagccgtttctacatgtaccgcgccatcccgcgctggcgcgcaaatctc

SEQ ID NO: 347272 - DNA, 75 bp, synthetic construct
  source 1..75: mol_type = other DNA
acgatggatcagtacctcaatgcacgttaccggaatgacttcacgggacgtgagaaggagctgtatacagccaca

SEQ ID NO: 347273 - DNA, 75 bp, synthetic construct
  source 1..75: mol_type = other DNA
atgaaaaataaaaaaagtgcttcttttgctgttaacagcattacatatgcgctgatgctttccctggcaggcaca

SEQ ID NO: 347274 - DNA, 75 bp, synthetic construct
  source 1..75: mol_type = other DNA
cgaacaggttgaaaaatacatgtcaggtgcatggtggaataaagaccctgtcattgctgcccgtaatattcatat

SEQ ID NO: 347275 - DNA, 75 bp, synthetic construct
  source 1..75: mol_type = other DNA
tcacctatcaaggtgaatctgctgaagcggcacaaaagcagctggcgcaatacattcagcaggtagacgaacaaa

SEQ ID NO: 347276 - DNA, 75 bp, synthetic construct
  source 1..75: mol_type = other DNA
acattcaggttcatcgtgccttatctgagattgacctgactgatactacctcaatgcgcaatctacttggtttta

SEQ ID NO: 347277 - DNA, 75 bp, synthetic construct
  source 1..75: mol_type = other DNA
ttgtggattttttatgtcagcccggggcagcgactgccatatgctcagccttctatcaatccttcaatgtaccaa

SEQ ID NO: 347278 - DNA, 75 bp, synthetic construct
  source 1..75: mol_type = other DNA
aaataaataaaagcatccaagaaaatgctcgatggatagttgctttatatagaggtgagaaaaaatcaggcagtt

SEQ ID NO: 347279 - DNA, 75 bp, synthetic construct
  source 1..75: mol_type = other DNA
aaaacctgctggatatcgaaagcttaaaggttgatgatcttgatattcatgcttaccgctatgtaatgaaaccga

SEQ ID NO: 347280 - DNA, 75 bp, synthetic construct
  source 1..75: mol_type = other DNA
gcagtgctgctgggcggtatggtgggtgcggggattgtgctggggcgtaacgctctgcgtaattacaacgtgaag

SEQ ID NO: 347281 - DNA, 75 bp, synthetic construct
  source 1..75: mol_type = other DNA
aagaacccggcaactctccggtaattccggatagttggataagctgtagtgagcgaatgccggatgatggtcagc

SEQ ID NO: 347282 - DNA, 75 bp, synthetic construct
  source 1..75: mol_type = other DNA
gagcacattgcagcctttatgcagcgtatggctgaaagaccggcggtgaaagccgcgttgacggcggaaggcttg

SEQ ID NO: 347283 - DNA, 75 bp, synthetic construct
  source 1..75: mol_type = other DNA
atgcagtttctgttgtgggatgcacagcgccgtgctggcatcagcgatgctgaaattaccgctgctatggaagat

SEQ ID NO: 347284 - DNA, 75 bp, synthetic construct
  source 1..75: mol_type = other DNA
tgcgctagggcttagaagtacaaactcatcacccgctcaatatgttgttaagaatggcatttctcgccattatgc

SEQ ID NO: 347285 - DNA, 75 bp, synthetic construct
  source 1..75: mol_type = other DNA
ggcactgatgcgcagaaagatcaacttgtggattttttatgtcagcccggggcagcgactgccatatgctcggcc

SEQ ID NO: 347286 - DNA, 75 bp, synthetic construct
  source 1..75: mol_type = other DNA
tgcacagcgccgtgctggtatcagtgatgctgaaattaccgctgctatggaagataaattgaagatcaacatgaa

SEQ ID NO: 347287 - DNA, 75 bp, synthetic construct
  source 1..75: mol_type = other DNA
agaggtgagaaaaaatcaggcagtttagaagattatggtatcagaggctcaaatatttcttacgtacagtatgaa

SEQ ID NO: 347288 - DNA, 75 bp, synthetic construct
  source 1..75: mol_type = other DNA
tacttaatgctaatattgaaatgggaaatgacccaataattggtatagaagcctatcctggtaccgcggagatcc

SEQ ID NO: 347289 - DNA, 75 bp, synthetic construct
  source 1..75: mol_type = other DNA
gaaaccgctgctggcattccttatgaaaccggcctgctgattttcggcatcagtattgcgttgtataccgccttt

SEQ ID NO: 347290 - DNA, 75 bp, synthetic construct
  source 1..75: mol_type = other DNA
agcagtacatcgtgggatcatcattggtacggttgtagtggcgatcctgatgtttggaatgcatcttgccggagc

SEQ ID NO: 347291 - DNA, 75 bp, synthetic construct
  source 1..75: mol_type = other DNA
tttaattatgtgacagaaacatgcagagaatccgatggtattacaacaacaggacgtatgctctatcgaaacttg

SEQ ID NO: 347292 - DNA, 75 bp, synthetic construct
  source 1..75: mol_type = other DNA
ggattcgcccttgccgcattacttaatgctaatattggaatgggaaatgacccaataattggtatagaagctggt

SEQ ID NO: 347293 - DNA, 75 bp, synthetic construct
  source 1..75: mol_type = other DNA
atgacccaatcattggtatagaagcctatcctggtaccgcggagatccatgcaaaaatgggatataaagttatcc

SEQ ID NO: 347294 - DNA, 75 bp, synthetic construct
  source 1..75: mol_type = other DNA
caaaccagtatttgttggagacaacctcccctggctggcagacgacgcccaaatcattttaccgacagaggttgc

SEQ ID NO: 347295 - DNA, 75 bp, synthetic construct
  source 1..75: mol_type = other DNA
ttaaggataaaaatttcacgctgggatgtttttttctttttctggaggggttgggatattctctactgtatattt

SEQ ID NO: 347296 - DNA, 75 bp, synthetic construct
  source 1..75: mol_type = other DNA
gtatctttttacccctataacccacgaatggggatggcaggagttactgtttccacaggcaattagagggatttc

SEQ ID NO: 347297 - DNA, 75 bp, synthetic construct
  source 1..75: mol_type = other DNA
acgctcaccgcgacctatatcagtgccagttcgtttatcggcgggcctggagctgcttataaatacggcctgggc

SEQ ID NO: 347298 - DNA, 75 bp, synthetic construct
  source 1..75: mol_type = other DNA
accgtttgctgccggaaatcttcctggctgcacctatggctgcgatcatgtcgacgatcaatgcccagttgctgc

SEQ ID NO: 347299 - DNA, 75 bp, synthetic construct
  source 1..75: mol_type = other DNA
agaatgaattaactctgctacgctccgtcgccgcgaatactcaccgacgttttaaaaaggtgatcaccttcgatt

SEQ ID NO: 347300 - DNA, 75 bp, synthetic construct
  source 1..75: mol_type = other DNA
gtggtatcatcaaagttggtgaagaagttgaaatcgttggtatcaaagagactcagaagtctacctgtactggcg

SEQ ID NO: 347301 - DNA, 75 bp, synthetic construct
  source 1..75: mol_type = other DNA
gcgctgtttgaacagctgcgcgcggataactatcagggctatgtagtgtacgaagggcgtatccgggcggaagat

SEQ ID NO: 347302 - DNA, 75 bp, synthetic construct
  source 1..75: mol_type = other DNA
caaaaccgcacgttaacgtgggtactatcggccacgttgaccatggtaaaactacactgaccgctgcaatcacga

SEQ ID NO: 347303 - DNA, 75 bp, synthetic construct
  source 1..75: mol_type = other DNA
actgacgtgactggtaccatccgaactgccggaagcgtagagatggtaatgccgggcgacaacatcaaaatggtt

SEQ ID NO: 347304 - DNA, 75 bp, synthetic construct
  source 1..75: mol_type = other DNA
tcgccgatgctcgtcgttacatcgtcgaaaacgatcttaaacatgtgcagattatcggcgatttctatcacatga

SEQ ID NO: 347305 - DNA, 75 bp, synthetic construct
  source 1..75: mol_type = other DNA
cctggacggcgaccgcaaaatggtgagtgattccctgcgcgtactggaacaggtcgccgcgcgtaccggaaccgt

SEQ ID NO: 347306 - DNA, 75 bp, synthetic construct
  source 1..75: mol_type = other DNA
agggctatgtggtgtatgaagggcgtatccgggcagaaaatcctgcccaggcgtaccgtgattctttggcttggt

SEQ ID NO: 347307 - DNA, 75 bp, synthetic construct
  source 1..75: mol_type = other DNA
aacgcgccggagaaaaaagctcgtggtatcaccatcaacacttctcacgttgaatacgacaccccgacccgtcac

SEQ ID NO: 347308 - DNA, 72 bp, synthetic construct
  source 1..72: mol_type = other DNA
ggtctgcgtttcgcaatccgtgaaggcggccgtaccgttggcgcgggcgttgtagcaaaagttctgagctaa

SEQ ID NO: 347309 - DNA, 75 bp, synthetic construct
  source 1..75: mol_type = other DNA
ttaaagatacggcgatcatgtcgtattcgaccaagttcgcctcttccttttatggtccgttccgtgaagctgccg

SEQ ID NO: 347310 - DNA, 75 bp, synthetic construct
  source 1..75: mol_type = other DNA
atgcagatcatgagcgagcaagaaactaaacgcctgcgggttatttcagaaatgattgcggaaaaaccacttctc

SEQ ID NO: 347311 - DNA, 75 bp, synthetic construct
  source 1..75: mol_type = other DNA
tgatgccctagaaatagaagttacggtagaacagggttcttcaatagtagaaatcaacattgatggctttttaac

SEQ ID NO: 347312 - DNA, 75 bp, synthetic construct
  source 1..75: mol_type = other DNA
ctgtacatttgagcattaacgcaaaacacgtcgatggtgacattaagtcagcagtaattctctatgttcgagatg

SEQ ID NO: 347313 - DNA, 75 bp, synthetic construct
  source 1..75: mol_type = other DNA
cgactacaaagccgttgaagccatgccgggcgtaatgcgtattccagagaaacatctggcgcgcgaaatcgaacg

SEQ ID NO: 347314 - DNA, 75 bp, synthetic construct
  source 1..75: mol_type = other DNA
ctggcgggaagatggtctggtggcgcgtatgtcacgcatctgcaagcagaccgtgcctgaaatgatcgttatgtc

SEQ ID NO: 347315 - DNA, 75 bp, synthetic construct
  source 1..75: mol_type = other DNA
tatcggccacgttgaccagggtaaaactaccctgaccgctgcaatcactaccgtactggctaaaacctacggcgg

SEQ ID NO: 347316 - DNA, 75 bp, synthetic construct
  source 1..75: mol_type = other DNA
tacgcgatgattaagttcgccgcgctggcgggtgctatagatgaagagaaagtcgtgctcgaaagcttaggttca

SEQ ID NO: 347317 - DNA, 75 bp, synthetic construct
  source 1..75: mol_type = other DNA
tgcgtgaacgtactgaattgccgattggcgcgtatcaggtgagcggtgagtacgcgatgattaagttcgccgcgc

SEQ ID NO: 347318 - DNA, 75 bp, synthetic construct
  source 1..75: mol_type = other DNA
gaagcgcattaaaaggcgaccgcaaaagctatcagatgaacccaatgaaccgtcgtgaggcgattcgtgagtcac

SEQ ID NO: 347319 - DNA, 75 bp, synthetic construct
  source 1..75: mol_type = other DNA
agagtgggaagcgaaaatcctggaactggctggcttcctggattcctacattccggaaccagagcgtgcgattga

SEQ ID NO: 347320 - DNA, 75 bp, synthetic construct
  source 1..75: mol_type = other DNA
ccattccaacggtggcgaaaaagcccaggcactggcagaaagcattgaagagcaggatgacgataccaacctgat

SEQ ID NO: 347321 - DNA, 75 bp, synthetic construct
  source 1..75: mol_type = other DNA
aagcctgctaatttagaaatcgcttgtcagagaataaaaaggctcgaaactgaaaacgaagctttgatagcatta

SEQ ID NO: 347322 - DNA, 75 bp, synthetic construct
  source 1..75: mol_type = other DNA
gagtgggaagcgaaaatcctggaactggctggcttccttgattcttacattccggaaccagagcgtgcgattgac

SEQ ID NO: 347323 - DNA, 75 bp, synthetic construct
  source 1..75: mol_type = other DNA
attttgcagggcttaaaagccgacgttgtcacttataaccaggtgacagacgtgcagatcctgcacgacaaaggc

SEQ ID NO: 347324 - DNA, 75 bp, synthetic construct
  source 1..75: mol_type = other DNA
tatcggccacgttgaccaaggtaaaacgacgctgaccgctgcaatcacgaccgtactggctaaaacctacggcgg

SEQ ID NO: 347325 - DNA, 75 bp, synthetic construct
  source 1..75: mol_type = other DNA
tatcggccacgttgaccaaggtaaaacgaccctgaccgctgcaatcaccaccgtactggctaaaacctacggcgg

SEQ ID NO: 347326 - DNA, 75 bp, synthetic construct
  source 1..75: mol_type = other DNA
tatcggccacgttgaccaaggtaaaacgacactgaccgctgcaatcacaaccgtactggctaaaacctacggcgg

SEQ ID NO: 347327 - DNA, 75 bp, synthetic construct
  source 1..75: mol_type = other DNA
acgacactgaccgctgcaatcaccaccgtactggctaaaacctacggcggtgctgctcgtgcattcgaccagatc

SEQ ID NO: 347328 - DNA, 75 bp, synthetic construct
  source 1..75: mol_type = other DNA
accaccctgaccgctgcaatcacaaccgtactggctaaaacctacggcggtgctgctcgtgcattcgaccagatc

SEQ ID NO: 347329 - DNA, 75 bp, synthetic construct
  source 1..75: mol_type = other DNA
acaacgctgaccgctgcaatcaccaccgtactggctaaaacctacggcggtgctgctcgtgcattcgaccagatc

SEQ ID NO: 347330 - DNA, 75 bp, synthetic construct
  source 1..75: mol_type = other DNA
cggcgctggcgcatatcaacagcctgccgcgcgcgcagtggaacagcaatattcaggagctggttaatcgactgc

SEQ ID NO: 347331 - DNA, 75 bp, synthetic construct
  source 1..75: mol_type = other DNA
attctcgaagtcgaagacgtgccgtttactgacatgcacgatattttcgagaaagcgttggttcagtatcgcgat

SEQ ID NO: 347332 - DNA, 75 bp, synthetic construct
  source 1..75: mol_type = other DNA
gaaagcgttggttcagtaccgtgaccaactggaaggtaagaccttctgtgtacgcgtgaagcgtcgcggtaagca

SEQ ID NO: 347333 - DNA, 75 bp, synthetic construct
  source 1..75: mol_type = other DNA
attctcgagaaaatcgacgacggtcagatgggcgttatcctcaaacgtatgatggtgcgtgccgcgtctaaagtg

SEQ ID NO: 347334 - DNA, 75 bp, synthetic construct
  source 1..75: mol_type = other DNA
aaggcgtagagatggtaatgccgggcgacaacatcaaaatggttgttaccctgatccacccgatcgcgatggacg

SEQ ID NO: 347335 - DNA, 75 bp, synthetic construct
  source 1..75: mol_type = other DNA
ctgcgtttgatcgataacgtctccgatacgctgatcctgcgtccgctgatctcttacgacaaagaacacatcatc

SEQ ID NO: 347336 - DNA, 75 bp, synthetic construct
  source 1..75: mol_type = other DNA
ctcagtacgacttcccgggcgacgacactccgatcgatcgaagacgtattctccatctccggtcgtggtaccgtt

SEQ ID NO: 347337 - DNA, 75 bp, synthetic construct
  source 1..75: mol_type = other DNA
ttaaccttggcggcgcggcgcatgaaattggcgtgcgtcaggtggcgcattatctgtggaaccgttttggcagct

SEQ ID NO: 347338 - DNA, 75 bp, synthetic construct
  source 1..75: mol_type = other DNA
gaaagcgttggttcagtatcgcgatcagctggaaggtaaaaccttctgcgtacgcgtgaagcgccgtggtaaaca

SEQ ID NO: 347339 - DNA, 75 bp, synthetic construct
  source 1..75: mol_type = other DNA
atggtaatgccgggcgacaacatcaaaatggttgttaccctgatccacccgatcgcgatggacgacggtctgcgt

SEQ ID NO: 347340 - DNA, 75 bp, synthetic construct
  source 1..75: mol_type = other DNA
ttctaccctgaaaggatttattccaaatccaatcgtaatattgataacataatgactatgtttagctcggtatac

SEQ ID NO: 347341 - DNA, 75 bp, synthetic construct
  source 1..75: mol_type = other DNA
tatgacgatgttcagttctgtatacaaatgccttacaagtactttgttgcagcgattgaacaataaggaggctgt

SEQ ID NO: 347342 - DNA, 75 bp, synthetic construct
  source 1..75: mol_type = other DNA
tgcgtgattccggttcactgtcactgaaggattttgcggcatatacggatgtgacggtggcggcctatctggtga

SEQ ID NO: 347343 - DNA, 75 bp, synthetic construct
  source 1..75: mol_type = other DNA
gcaggaaaagcgggataaaacccgttcgttccgtgtcgtcgccagaagctggtttgccaccaaaacaaaatggtc

SEQ ID NO: 347344 - DNA, 75 bp, synthetic construct
  source 1..75: mol_type = other DNA
ttttatcccagacagatctacacccgttctaaccgaaacatagacaacatcatgacgatgtttagttcagtatat

SEQ ID NO: 347345 - DNA, 75 bp, synthetic construct
  source 1..75: mol_type = other DNA
taaagctcaatatgaaatgagagtcatagagaaagaaataattcatgagatcatttgtgttaatcgtgttagatt

SEQ ID NO: 347346 - DNA, 75 bp, synthetic construct
  source 1..75: mol_type = other DNA
tgtgactcacgatcaaagtgaagctttcgcggtgtccgacaccgtgttggtgatgaacaaaggtcacatcatgca

SEQ ID NO: 347347 - DNA, 75 bp, synthetic construct
  source 1..75: mol_type = other DNA
aatctcaccatcccacaagggcaaatggttacgctgctcggtccttccggatgcggcaaaaccaccattctgcgt

SEQ ID NO: 347348 - DNA, 75 bp, synthetic construct
  source 1..75: mol_type = other DNA
gaaagaggcgctggcaatggtggatctggaagggttcgaggaccgctatgtcgatcagatttccggtggtcagca

SEQ ID NO: 347349 - DNA, 75 bp, synthetic construct
  source 1..75: mol_type = other DNA
atgtcggtgctggcagatggtgtgctggtggcgatggcgctggtcgtgctccggcctttactgcgcaaatctgaa

SEQ ID NO: 347350 - DNA, 75 bp, synthetic construct
  source 1..75: mol_type = other DNA
ggtggtggatttcaccggacggctgatgtcggtgctggcagatggtgtgctggtggcgatggcgctggtcgtgct

SEQ ID NO: 347351 - DNA, 75 bp, synthetic construct
  source 1..75: mol_type = other DNA
tgagtgatgtgttttattttatctgtttgttttataaggataaattaactaaaatggcaccatcaacaaaaccgg

SEQ ID NO: 347352 - DNA, 75 bp, synthetic construct
  source 1..75: mol_type = other DNA
cggacattggcgacagcaacgtttcagatctggacacgggtgatctgcttgttccggttaaaaaagcggaaacgc

SEQ ID NO: 347353 - DNA, 75 bp, synthetic construct
  source 1..75: mol_type = other DNA
aagacttgcaggtactggtggaaatcgtccatagcgggagttttagtgctgcagcggcgacgcttgggcaaacgc

SEQ ID NO: 347354 - DNA, 75 bp, synthetic construct
  source 1..75: mol_type = other DNA
atgggcaaaaccgaccgcagcgccaacccttcgccgggcaacaaaaagggcgggctcgccaacgtggtaaagaaa

SEQ ID NO: 347355 - DNA, 75 bp, synthetic construct
  source 1..75: mol_type = other DNA
atgggcaaaaccgaccgcagcgccaacccttcgccgggcaacaaaaacggcgggctcgcgaacgtggtaaagaaa

SEQ ID NO: 347356 - DNA, 75 bp, synthetic construct
  source 1..75: mol_type = other DNA
gccttatccgacctacggttctactcctgcgcaggcctgataagacgtgccatcgtcgcatcaggcaagaccgta

SEQ ID NO: 347357 - DNA, 75 bp, synthetic construct
  source 1..75: mol_type = other DNA
gccatattgcgccagctattaccgaactgatgcgcaattatcctgagttacaggtgcattttgaattgttcgatc

SEQ ID NO: 347358 - DNA, 75 bp, synthetic construct
  source 1..75: mol_type = other DNA
gcgcccggaggggatgatccgcattggttgcagttttggttttgggcgcagccatattgcgccagctattaccga

SEQ ID NO: 347359 - DNA, 75 bp, synthetic construct
  source 1..75: mol_type = other DNA
atgaaaaatataaaattcagcctggcctggcagattctgtttgctatggtgctgggcattctcctgggaagctac

SEQ ID NO: 347360 - DNA, 75 bp, synthetic construct
  source 1..75: mol_type = other DNA
tggctgttatgactcattcaaacccatgagtgaaaacaccatcaataaagcgctgcgtaagatgggctatgatac

SEQ ID NO: 347361 - DNA, 75 bp, synthetic construct
  source 1..75: mol_type = other DNA
agttatgggtgataccagaaaagcgtgaagcgattgagcgcgtcaaatattccacgcgtggcgcaaaaatgaaac

SEQ ID NO: 347362 - DNA, 75 bp, synthetic construct
  source 1..75: mol_type = other DNA
atgggcaaaaccgaccgcagcgccaacccttcgccgggcaacaaaaacggcggcctcgccaacgtggtaaagaaa

SEQ ID NO: 347363 - DNA, 75 bp, synthetic construct
  source 1..75: mol_type = other DNA
atgggcaaaaccgaccgcagcgccaacccttcgccgggcaacaaaaacggcggactcgcaaacgtggtaaagaaa

SEQ ID NO: 347364 - DNA, 75 bp, synthetic construct
  source 1..75: mol_type = other DNA
atgggcaaaaccgaccgcagcgccaacccttcgccgggcaacaaaaaaggcggactcgccaacgtggtaaagaaa

SEQ ID NO: 347365 - DNA, 75 bp, synthetic construct
  source 1..75: mol_type = other DNA
ctcctgaaggggcagtaaagctcgttaccggttctcagcagtccagcattgagatagcactggatcgtgttccgg

SEQ ID NO: 347366 - DNA, 75 bp, synthetic construct
  source 1..75: mol_type = other DNA
ggcaaaagtcgatgccaacttcaaaaaggtcgataccattctggcgaaataccgtactaaagacggttttgaaac

SEQ ID NO: 347367 - DNA, 75 bp, synthetic construct
  source 1..75: mol_type = other DNA
atgacctgcggtctgctgactaacccgaaagggaagttgatcgtcaaaggtgaggcaacggcggatgcggcgcaa

SEQ ID NO: 347368 - DNA, 75 bp, synthetic construct
  source 1..75: mol_type = other DNA
ggccgctattcagtttgatgatcaggtcgatgtagtcttccagttagaacctgtggatcaaccacccgctaaaac

SEQ ID NO: 347369 - DNA, 75 bp, synthetic construct
  source 1..75: mol_type = other DNA
ttaagtcaagttggtttctacattttactattcaaaatatctattcacttttgtagattccatgaaaacatacaa

SEQ ID NO: 347370 - DNA, 75 bp, synthetic construct
  source 1..75: mol_type = other DNA
gtttgttcttttgccgctgtcagggggaataatacgattgtgttcaaagtcgacaaaccactgaatgcagccttt

SEQ ID NO: 347371 - DNA, 75 bp, synthetic construct
  source 1..75: mol_type = other DNA
ggcaaaagtcgatgccaatttcaaaaaggtcgataccattctggcgaaataccgaaccaaagacggttatgaaac

SEQ ID NO: 347372 - DNA, 75 bp, synthetic construct
  source 1..75: mol_type = other DNA
ctcagtacgacttcccgggcgacgacactccgatcgttcgtggttctgccctgaaagcgctggaaggcgacgcag

SEQ ID NO: 347373 - DNA, 75 bp, synthetic construct
  source 1..75: mol_type = other DNA
cgaagacgtattctccatctccggtcgtggtactgttgttaccggtcgtgtagaacgcggtatcatcaaagttgg

SEQ ID NO: 347374 - DNA, 75 bp, synthetic construct
  source 1..75: mol_type = other DNA
ttggcgcgggcgttgtagcaaaagttctggacaccccgacccgtcactacgcacacgtagactgcccggggcacg

SEQ ID NO: 347375 - DNA, 75 bp, synthetic construct
  source 1..75: mol_type = other DNA
acaagatttggctgttgtatcaactcttgttgatgggatgaagaatattgatacatcaataccagtgaaccgccc

SEQ ID NO: 347376 - DNA, 75 bp, synthetic construct
  source 1..75: mol_type = other DNA
aggagaaatagatatgcaattaagaaagtagcaaaaaatgcagaaagatcttttgcattcccgacgaagaaactt

SEQ ID NO: 347377 - DNA, 75 bp, synthetic construct
  source 1..75: mol_type = other DNA
ttgaaatgttccgcaaactgctggatgaaggccgtgctggtgagaacgtaggtgttctgctgcgtggtatcaaac

SEQ ID NO: 347378 - DNA, 75 bp, synthetic construct
  source 1..75: mol_type = other DNA
tattggcagggagggcaatgtaaaccagaatatggcgaagaacggttttgttctgaactgataaaatacggtgca

SEQ ID NO: 347379 - DNA, 75 bp, synthetic construct
  source 1..75: mol_type = other DNA
ttcaaaccccgatacagcagctgctatttctcaattaataatgtcagatctgacctcctgtgccggtagtcgcta

SEQ ID NO: 347380 - DNA, 75 bp, synthetic construct
  source 1..75: mol_type = other DNA
gcttttcaagaaggccggaaaagttactttgcgtcaaaatctcgatatcaaaaatcttaataaatttctaaggaa

SEQ ID NO: 347381 - DNA, 75 bp, synthetic construct
  source 1..75: mol_type = other DNA
gcgtgtaattaacaaaagtaactttttctccaatgagcgaaagtatcgtcaactggttcaggattatcaaaataa

SEQ ID NO: 347382 - DNA, 75 bp, synthetic construct
  source 1..75: mol_type = other DNA
taaacctatttatgctatacaatctactttgtttggtcctggcaatcccatttggattgctaggactttttatat

SEQ ID NO: 347383 - DNA, 75 bp, synthetic construct
  source 1..75: mol_type = other DNA
tttgttgagacttgccgcaatttacctgcaacgcgcgtggctaaatatgtagaggatacgctcgcagcatcctga

SEQ ID NO: 347384 - DNA, 75 bp, synthetic construct
  source 1..75: mol_type = other DNA
gagatagcactggatcgtgttcctgcgaacatcagtaaaattgcaatcacagttgtcattgatggtgaagatacc

SEQ ID NO: 347385 - DNA, 75 bp, synthetic construct
  source 1..75: mol_type = other DNA
atgaaaaatatcgttcctgattaccgtcttgatatggtgggtgaaccctgcccttatccggcagtcgccaccctt

SEQ ID NO: 347386 - DNA, 75 bp, synthetic construct
  source 1..75: mol_type = other DNA
gtatacgacaggatctgaaaccactttgccgcataataacttctctgggtcaatatcagaaagaaagcaaacaac

SEQ ID NO: 347387 - DNA, 75 bp, synthetic construct
  source 1..75: mol_type = other DNA
tggtcagtgaaagccggagagggcaggatttttatattcttggcggacataccacatcactgacaactgcccgtc

SEQ ID NO: 347388 - DNA, 75 bp, synthetic construct
  source 1..75: mol_type = other DNA
aatggagtcatgttacgcgagatattatggttacgatgtctggaccgaaaaagttaagtacgtcgctaacgatac

SEQ ID NO: 347389 - DNA, 75 bp, synthetic construct
  source 1..75: mol_type = other DNA
agctattatgttggatagcgagagaacggaatcatatctttcgcatgttaaagaatatctggcaaaacgctttga

SEQ ID NO: 347390 - DNA, 75 bp, synthetic construct
  source 1..75: mol_type = other DNA
atgaaaaatatcgttcctgattaccgccttgatatggtgggtgaaccctgcccttatccggcagtcgcaactctt

SEQ ID NO: 347391 - DNA, 75 bp, synthetic construct
  source 1..75: mol_type = other DNA
gctggtaacgctggcggaaatggcgtttgccggtcattgcggcattgaagcgaatatcgccacactgggtgacga

SEQ ID NO: 347392 - DNA, 75 bp, synthetic construct
  source 1..75: mol_type = other DNA
tgatttgggcaaaggcaataacgcgctgggcgcaacggcgctggcgcaggtttatcgtcagcttggcgacaaacc

SEQ ID NO: 347393 - DNA, 75 bp, synthetic construct
  source 1..75: mol_type = other DNA
atgatggtaattctgcgtggttcgcctgcactgtcggcattccgaatcaacaaactgctggcacgttttcaggct

SEQ ID NO: 347394 - DNA, 75 bp, synthetic construct
  source 1..75: mol_type = other DNA
tctgccgaccgtggcggagaaaaccttcctcgttaccattggcgaccgtagcgtaaccggcatggtggcgcgcga

SEQ ID NO: 347395 - DNA, 75 bp, synthetic construct
  source 1..75: mol_type = other DNA
gattctccgtttccaacctgcgtattccaggctttgaacagccgtgggaagaagattttggtaaaccggaacgta

SEQ ID NO: 347396 - DNA, 75 bp, synthetic construct
  source 1..75: mol_type = other DNA
aggaaccggctcacatcctgatgaaagtggaaacccacaaccatccgacggcaatttctccgtggccgggtgcgg

SEQ ID NO: 347397 - DNA, 75 bp, synthetic construct
  source 1..75: mol_type = other DNA
accatcaacagaaattacggtatgccacaaaaatggtacaggagacgcaacagcaggataaaaccacatcggcat

SEQ ID NO: 347398 - DNA, 75 bp, synthetic construct
  source 1..75: mol_type = other DNA
aggtggaattccgtcacggtaacatgacgctggaaaatccatcgccagagctgctcacggtgttgatccgtgaac

SEQ ID NO: 347399 - DNA, 75 bp, synthetic construct
  source 1..75: mol_type = other DNA
cggatctgcaccgcaaaatgttgctggccaccctgtggaacacgggcgcacgtataaacgaagcgctggcgctga

SEQ ID NO: 347400 - DNA, 75 bp, synthetic construct
  source 1..75: mol_type = other DNA
ccctggctttgaacagccgtgggaagaagatttcggtaagcctgaacgtattgttactgcactggatatcatgac

SEQ ID NO: 347401 - DNA, 75 bp, synthetic construct
  source 1..75: mol_type = other DNA
gtcagtctgatgccgacctcgactttgcttccgtacagcgcgacaacccggagatggagcgtcgctgccaggaag

SEQ ID NO: 347402 - DNA, 75 bp, synthetic construct
  source 1..75: mol_type = other DNA
ccgccacaagatttttaacgccgattgggttatcgacggtgagcaacagccgaaatcgctgtttaagatgatcaa

SEQ ID NO: 347403 - DNA, 75 bp, synthetic construct
  source 1..75: mol_type = other DNA
ctggtgtaacgaatcccaggaacgctacgtgctggcggttgctgctgatcaattaccgctgtttgacgagctgtg

SEQ ID NO: 347404 - DNA, 75 bp, synthetic construct
  source 1..75: mol_type = other DNA
gcgcgatcagatggtggggccgtggcaggtgccggtcgctaactgcgcggtcactaccgccagcctcgacagcta

SEQ ID NO: 347405 - DNA, 75 bp, synthetic construct
  source 1..75: mol_type = other DNA
cgaagcgatggcgattggcgagcgtgcgccggttgcgctgctggatttcgccgcctctgcccgtctggcggtcgg

SEQ ID NO: 347406 - DNA, 75 bp, synthetic construct
  source 1..75: mol_type = other DNA
tgacgcgattcaggcgctggttgcacagcgtaagctgctcgcgtaccacgaccgctctgatggcggcctgctggt

SEQ ID NO: 347407 - DNA, 75 bp, synthetic construct
  source 1..75: mol_type = other DNA
agaagcaggataaaaccacatcggcacataaagtgatgcccggtaaccagaaagcgcagcagaagcccacagggg

SEQ ID NO: 347408 - DNA, 75 bp, synthetic construct
  source 1..75: mol_type = other DNA
tttacgagcaaatccttaaagatttgcagtctgcggggaatgcgggtgaattctatactccacgtgcagtcaccc

SEQ ID NO: 347409 - DNA, 75 bp, synthetic construct
  source 1..75: mol_type = other DNA
aatccattatggacccggcctgcggtacgggcggttttcttgcctgcgcatttgatcatgtaaagaacaaatacg

SEQ ID NO: 347410 - DNA, 75 bp, synthetic construct
  source 1..75: mol_type = other DNA
cgcagcgtaaccggcatggtggcgcgcgatcagatggtggggccgtggcaggtgccggtcgctaactgcgcggtc

SEQ ID NO: 347411 - DNA, 75 bp, synthetic construct
  source 1..75: mol_type = other DNA
gacgcgctggcccgtgaagggatcaccattgcagatgcggtgaaacgtgtgctgcatctgccgactgtggcggaa

SEQ ID NO: 347412 - DNA, 75 bp, synthetic construct
  source 1..75: mol_type = other DNA
accgctctgatggcggcctgctggtaacgctggcggaaatggcctttgctggtcattgcggcattgacgcggata

SEQ ID NO: 347413 - DNA, 75 bp, synthetic construct
  source 1..75: mol_type = other DNA
gaagggcgcgtggaagtgcgtgatgcggcgcatctggcggcactggaaagcaaagggctggtggcactgcgctat

SEQ ID NO: 347414 - DNA, 75 bp, synthetic construct
  source 1..75: mol_type = other DNA
tgtcagcaactcctggcatcctgaaaactggggcgaggatggcccatggatgcgcattttccgcaatgcacgtaa

SEQ ID NO: 347415 - DNA, 75 bp, synthetic construct
  source 1..75: mol_type = other DNA
gcgccagttgcactgctggatttcgccgcttctgcccgcctggcggtcggtgaagcgttaactaacatcgccgct

SEQ ID NO: 347416 - DNA, 75 bp, synthetic construct
  source 1..75: mol_type = other DNA
gtggctgcacggcaccgggtgcagttttcgatgcctgagtccgatgcggtgtctatgctcaaaagaattccttaa

SEQ ID NO: 347417 - DNA, 75 bp, synthetic construct
  source 1..75: mol_type = other DNA
acacgtcccggtggacgagccgggatccctgactgtgatcaaacccgatctttttgtcactttttgtataaaatg

SEQ ID NO: 347418 - DNA, 75 bp, synthetic construct
  source 1..75: mol_type = other DNA
cgttagcggagtcagtccggtttgccagcggcgttgcagcgctgaaatgtacgcgtcctggtggcagagctggga

SEQ ID NO: 347419 - DNA, 75 bp, synthetic construct
  source 1..75: mol_type = other DNA
agagatggccagtgcgctaaaacaggcacaaacgctcacaaatggtcatgtctatgtgacccagggtagcgcagg

SEQ ID NO: 347420 - DNA, 75 bp, synthetic construct
  source 1..75: mol_type = other DNA
gcagactcaccggctggttccgctctccgactcctggtacgtcagccagctgcagacgatggtggcaacactgaa

SEQ ID NO: 347421 - DNA, 75 bp, synthetic construct
  source 1..75: mol_type = other DNA
tggaaatgatggtggccacgctgaagataccgctggagcggcgcaacaaacgcaccggcagaacggaaaaggctc

SEQ ID NO: 347422 - DNA, 75 bp, synthetic construct
  source 1..75: mol_type = other DNA
agcaaactatcccggttgctcaactgccggtggctatcgattacccggccgccctggcgcttcgccagatggctc

SEQ ID NO: 347423 - DNA, 75 bp, synthetic construct
  source 1..75: mol_type = other DNA
caacgtgccgagaaggctgccagaacagcaggacgtctgcccgcctgcagtcaggcccatcgtctggttccgcta

SEQ ID NO: 347424 - DNA, 75 bp, synthetic construct
  source 1..75: mol_type = other DNA
tgctttgaagccaacgctgactgggtgaccgtaatttgctgtgcagatatcaacaccgccaaaggcgcgctggac

SEQ ID NO: 347425 - DNA, 75 bp, synthetic construct
  source 1..75: mol_type = other DNA
gatgggacacaaatcagtgagctcgacggaagtatacactaaggtgtttgcgcttgatgttgccgcacggcaccg

SEQ ID NO: 347426 - DNA, 75 bp, synthetic construct
  source 1..75: mol_type = other DNA
atgattcgtgttgcttgtgtaggtataaccgtgatggatcgcatctattacgtggaagggttaccgacggagagc

SEQ ID NO: 347427 - DNA, 75 bp, synthetic construct
  source 1..75: mol_type = other DNA
atgctccgtttacttcgtcattatttttactttgttcccgcgcagttatcaaaagcaaaaggaatgggtgaaaat

SEQ ID NO: 347428 - DNA, 75 bp, synthetic construct
  source 1..75: mol_type = other DNA
ttgcgctggatgttgctgcccggcacagggtgcagtttttgatgcctgagtccgatgcggtcacaatgctgaaaa

SEQ ID NO: 347429 - DNA, 75 bp, synthetic construct
  source 1..75: mol_type = other DNA
tggatgtggctgcacggcaccgggtgcagtttgcgatgccggaatctgatgcggttgtgatgctgaaacaattat

SEQ ID NO: 347430 - DNA, 75 bp, synthetic construct
  source 1..75: mol_type = other DNA
gctgcagacgatggtggcaacactgaaaattcctctggaacggcgtaataaacgaacaggcaggacagagaaagc

SEQ ID NO: 347431 - DNA, 75 bp, synthetic construct
  source 1..75: mol_type = other DNA
ccgctggcggtggctgccgcgcacgcggtgctcaacattatcgacaaagaatcactctgtgaacgcgcgaatcaa

SEQ ID NO: 347432 - DNA, 75 bp, synthetic construct
  source 1..75: mol_type = other DNA
cactgaaggtattgcagagtctcatgggacacaagtcggtcagctcgacggaggtgtacacgaaggtgtttgcgc

SEQ ID NO: 347433 - DNA, 75 bp, synthetic construct
  source 1..75: mol_type = other DNA
agtccatcagctcaacggaggtctacacgaaggtgtttgcactggatgtggctgcacggcaccgggtgcagtttt

SEQ ID NO: 347434 - DNA, 75 bp, synthetic construct
  source 1..75: mol_type = other DNA
atttttcgctcacgcctccgtatccgtttgtgcagctggccactctgaagcagcggaccgaaaaagccgccagga

SEQ ID NO: 347435 - DNA, 75 bp, synthetic construct
  source 1..75: mol_type = other DNA
atgcacagccagtctgcagccatggtaccggcagcgtattctgccggacagtctgcacaacttcctgttgccatt

SEQ ID NO: 347436 - DNA, 75 bp, synthetic construct
  source 1..75: mol_type = other DNA
cagcagactcaccggctggttccgctctccgactcctggtacgtcagccagctgcagacgatggtggccacactg

SEQ ID NO: 347437 - DNA, 75 bp, synthetic construct
  source 1..75: mol_type = other DNA
ggcggcgcgcccgctcggggcgcagatggtggtgcgcgaagatggtcgttactgcggttttgtctctggcggctg

SEQ ID NO: 347438 - DNA, 75 bp, synthetic construct
  source 1..75: mol_type = other DNA
gccgtttacacgaagccaatattcccgtcattctctgtagcagtaaaactttagcggaaatgctgtacttgcaaa

SEQ ID NO: 347439 - DNA, 75 bp, synthetic construct
  source 1..75: mol_type = other DNA
tggatgtcgcggcgcgtcatcgtgtgcagttcgccatgccggaagccgatgcggtagcgctgataaaacaacttg

SEQ ID NO: 347440 - DNA, 75 bp, synthetic construct
  source 1..75: mol_type = other DNA
cagcagactcaccggctggttccgctctccgacacttggtacgtcagccagctgcagacgatggtagcaacactg

SEQ ID NO: 347441 - DNA, 75 bp, synthetic construct
  source 1..75: mol_type = other DNA
gctggatgtggctgcccggcaccgggtgcagttttcgaggcctgagtccgatgcggtagcgctgataaaacaact

SEQ ID NO: 347442 - DNA, 75 bp, synthetic construct
  source 1..75: mol_type = other DNA
caccatcaagccgcacaccaagttcgaatctgaagtgtacattctgtccaaagatgaaggcggtcgtcatactcc

SEQ ID NO: 347443 - DNA, 75 bp, synthetic construct
  source 1..75: mol_type = other DNA
aacgtaattgttggctcaggagggatgggtggcactacatctaatccttacgcaagcagcggtggcacttcgtct

SEQ ID NO: 347444 - DNA, 75 bp, synthetic construct
  source 1..75: mol_type = other DNA
cggcagcctgatgacggcggcaggtggcagttcaggggaaccagcagggccaactaacaatttccctttttctac

SEQ ID NO: 347445 - DNA, 75 bp, synthetic construct
  source 1..75: mol_type = other DNA
gctaagccgggcaccatcaagccgcacaccaagttcgaatctgaagtgtacattctgtccaaagatgaaggcggt

SEQ ID NO: 347446 - DNA, 75 bp, synthetic construct
  source 1..75: mol_type = other DNA
atatgttgctattgctgcaaatgagattgcaactaaccagggtttcaaaagttttgcttttccttcggacatttt

SEQ ID NO: 347447 - DNA, 75 bp, synthetic construct
  source 1..75: mol_type = other DNA
aactggttgaaatggaagttcgtgaacttctgtctcagtacgacttcccgggcgacgacactccgatcgttcgtg

SEQ ID NO: 347448 - DNA, 75 bp, synthetic construct
  source 1..75: mol_type = other DNA
caaaaccgcacgttaacgtgggtactatcggccacgttgaccagggtaaaaccacgctgaccgctgcaatcacga

SEQ ID NO: 347449 - DNA, 75 bp, synthetic construct
  source 1..75: mol_type = other DNA
caaaaccgcacgttaacgtaggtactatcggccacgttgaccaaggtaaaaccaccctgaccgctgcaatcacga

SEQ ID NO: 347450 - DNA, 75 bp, synthetic construct
  source 1..75: mol_type = other DNA
tggagcatatactgagccgggatttacaggtgcaaatattatcgggtctggaagcggttatagctcaccaggcgt

SEQ ID NO: 347451 - DNA, 75 bp, synthetic construct
  source 1..75: mol_type = other DNA
cggttacgccaaccctgtctgggctaccaccagcgaaattggcgtttccggtggtagcgtaacctgctatctgaa

SEQ ID NO: 347452 - DNA, 75 bp, synthetic construct
  source 1..75: mol_type = other DNA
tatcggccacgttgaccacggtaaaacaactctgaccgctgcaatcactaccgtactggctaaaacctacggcgg

SEQ ID NO: 347453 - DNA, 75 bp, synthetic construct
  source 1..75: mol_type = other DNA
tacgctgaaaaataaggttgaggcggcatatcatcgtactgatctactggagcagcgtgtaccgatgatgcaggc

SEQ ID NO: 347454 - DNA, 75 bp, synthetic construct
  source 1..75: mol_type = other DNA
attcctgcactggttatggctaaccgtctgtatcaggatgccttacgggcaaatgaactgatacaggaagccagt

SEQ ID NO: 347455 - DNA, 75 bp, synthetic construct
  source 1..75: mol_type = other DNA
gtaggttataacgctgtcgcgtctggtgccagcagcgtagccattggtcagaacagcagcagcaccgttgatacc

SEQ ID NO: 347456 - DNA, 75 bp, synthetic construct
  source 1..75: mol_type = other DNA
tatcggccacgttgaccaaggtaaaaccaccctgaccgctgcaatcacgaccgtactggctaaaacctacggcgg

SEQ ID NO: 347457 - DNA, 75 bp, synthetic construct
  source 1..75: mol_type = other DNA
tatcggccacgttgaccaaggtaaaacaacactgaccgctgcaatcacgaccgtactggctaaaacctacggcgg

SEQ ID NO: 347458 - DNA, 75 bp, synthetic construct
  source 1..75: mol_type = other DNA
cggtagtgcggatggtcaacgtgggtcagttgaaagtaacggatgcgcaggtttcccagaatacccagagcatta

SEQ ID NO: 347459 - DNA, 75 bp, synthetic construct
  source 1..75: mol_type = other DNA
ataaagtcaatactatcgcattaggaaatggcagccaggctctggcagataatgcaatcgccataggccagggca

SEQ ID NO: 347460 - DNA, 75 bp, synthetic construct
  source 1..75: mol_type = other DNA
cagcgcagcgaacgctattgcgataggtgctgagaccgaagccgctgaaaatgcaactgctattggcaataatgc

SEQ ID NO: 347461 - DNA, 75 bp, synthetic construct
  source 1..75: mol_type = other DNA
accaccaataagtacgtcgtagatgcgctgggtggtggtgccgaagtcaatgctgacggcagcatcagtgcgccg

SEQ ID NO: 347462 - DNA, 75 bp, synthetic construct
  source 1..75: mol_type = other DNA
ctgaaagctaccaatgacgatgtcgaagccaataccgccaatatcgctactaataccagcaacattgccacgaat

SEQ ID NO: 347463 - DNA, 75 bp, synthetic construct
  source 1..75: mol_type = other DNA
aactgtctaaaactgaaagcaagttgagcggtggtatcgcttctgcaatggcaatgaccggtctgccgcaggctt

SEQ ID NO: 347464 - DNA, 75 bp, synthetic construct
  source 1..75: mol_type = other DNA
agccgcaagaatccgtttggtgatatcaaatcggacggcacggtgaaaacggctctcgaaaatcttggtttggga

SEQ ID NO: 347465 - DNA, 75 bp, synthetic construct
  source 1..75: mol_type = other DNA
aacgtgattcgtttcctgtatccgctgaccatcccggatgcgcaattcgatgcggcaatgaaaattttgcaggat

SEQ ID NO: 347466 - DNA, 75 bp, synthetic construct
  source 1..75: mol_type = other DNA
tttgctgcaagattatcgtgatctgaacgatcaatttgaccgcattgtttctgttgggatgttcgagcacgtcgg

SEQ ID NO: 347467 - DNA, 75 bp, synthetic construct
  source 1..75: mol_type = other DNA
atatttttccgaacggttgcctgccctctgtacgccagattgctcaatccagcgaaccccacttcgtgatggaag

SEQ ID NO: 347468 - DNA, 75 bp, synthetic construct
  source 1..75: mol_type = other DNA
ggtgatttcattcgtgtctgggatgacgggcgaggtgtagacggtggtcgcgaattattaagctggcagaacgct

SEQ ID NO: 347469 - DNA, 75 bp, synthetic construct
  source 1..75: mol_type = other DNA
tgattaccctgtgctggcgaaagtgtttccttcgctggtattacctgaagcccgcggtgatttcattcgtatctg

SEQ ID NO: 347470 - DNA, 75 bp, synthetic construct
  source 1..75: mol_type = other DNA
ggacattgaagcgaagcaggtggcggcgattattttcgaaccggtgcagggcgaaggcggtttcaacgttgcacc

SEQ ID NO: 347471 - DNA, 75 bp, synthetic construct
  source 1..75: mol_type = other DNA
actggttacacatctgaagtttttatcctggcgtattcttgaacatgcttcaattaacgatagtgatgaatcatt

SEQ ID NO: 347472 - DNA, 75 bp, synthetic construct
  source 1..75: mol_type = other DNA
cggaaatatggaggatgttgcaggtgtcacgcaattaatgcgtaatgcgcgaaatgctgcaattaataaaatttc

SEQ ID NO: 347473 - DNA, 75 bp, synthetic construct
  source 1..75: mol_type = other DNA
tcgggccgggggcattacgtgcgacgctggcatcttatgcgcagtctccgcgctattaccgcgccttaatggctg

SEQ ID NO: 347474 - DNA, 75 bp, synthetic construct
  source 1..75: mol_type = other DNA
aacgaccagtttgatcgtattgtttctgtggggatgttcgagcacgtcggaccgaaaaattacgatacctatttt

SEQ ID NO: 347475 - DNA, 75 bp, synthetic construct
  source 1..75: mol_type = other DNA
acatggcatctaattatgacgtaagtgtggtgggtgtcacgatttctgccgaacagcaaaaaatggctcaggagc

SEQ ID NO: 347476 - DNA, 75 bp, synthetic construct
  source 1..75: mol_type = other DNA
tgtgatcgtattatctctctggcgcaggagcgcctgggaaagttgcaggacagtatttatatctcgctaactgac

SEQ ID NO: 347477 - DNA, 75 bp, synthetic construct
  source 1..75: mol_type = other DNA
ggtgatttcattcgtatctgggatgacgggcgaggtgcagatggtggtcgcgaattattaagctggcaggcagct

SEQ ID NO: 347478 - DNA, 75 bp, synthetic construct
  source 1..75: mol_type = other DNA
caaaaccgcacgttaacgtaggtactatcggccacgttgaccaaggtaaaacaacactgaccgctgcaatcacca

SEQ ID NO: 347479 - DNA, 75 bp, synthetic construct
  source 1..75: mol_type = other DNA
gtcgcaccgtacaaaattggctttggcccgttccccggttcggtttatcacgtgccgtatccgtcagatttgcat

SEQ ID NO: 347480 - DNA, 75 bp, synthetic construct
  source 1..75: mol_type = other DNA
tatcggccacgttgaccatggtaaaacaaccctgaccgctgcaatcactaccgtactggctaaaacctacggcgg

SEQ ID NO: 347481 - DNA, 75 bp, synthetic construct
  source 1..75: mol_type = other DNA
caaaaccgcacgttaacgtgggtactatcggccacgttgaccaaggtaaaacaactctgaccgctgcaatcacta

SEQ ID NO: 347482 - DNA, 75 bp, synthetic construct
  source 1..75: mol_type = other DNA
caaaaccgcacgttaacgtcggtactatcggccacgttgaccaaggtaaaacaaccctgaccgctgcaatcacga

SEQ ID NO: 347483 - DNA, 75 bp, synthetic construct
  source 1..75: mol_type = other DNA
gttaacagggttttattctgcctttagaacaacctcgacaagtccaactgttaccatgaattactgttggtggac

SEQ ID NO: 347484 - DNA, 75 bp, synthetic construct
  source 1..75: mol_type = other DNA
ggcgcgaaattctctgccactgattaccctgtgctggcgaaagtgtttccggcgctagcattacctgacgcacgc

SEQ ID NO: 347485 - DNA, 75 bp, synthetic construct
  source 1..75: mol_type = other DNA
acggcaggatggtacaagtttttctcattacggaggtaatttcgacattgggtctggtcattcaatcaataacta

SEQ ID NO: 347486 - DNA, 75 bp, synthetic construct
  source 1..75: mol_type = other DNA
tgaaggatgtagagggcaacgaatatatcgatttcgccgcaggcattgcggtgctgaataccgggcatcgccacc

SEQ ID NO: 347487 - DNA, 75 bp, synthetic construct
  source 1..75: mol_type = other DNA
acgccatcgaacgtttgtttaaatcagacatcgaagcgaaacaggtcgcggcgattatttttgaaccggttcagg

SEQ ID NO: 347488 - DNA, 75 bp, synthetic construct
  source 1..75: mol_type = other DNA
ccccggaaagtcttgatgcgctttccggcgtgtttgccccggaactgcaacagcgtattggcatgcccgattcaa

SEQ ID NO: 347489 - DNA, 75 bp, synthetic construct
  source 1..75: mol_type = other DNA
tgccgcatcaacagaaagttcagcaacggaaaacgcaacagcttttacagaagtggcagccgtgggcggcgggcg

SEQ ID NO: 347490 - DNA, 75 bp, synthetic construct
  source 1..75: mol_type = other DNA
gcagaaaatctttgatgataagccggacagggcgattgcttcgctgaataccccggaaaatctcgatgtgttttc

SEQ ID NO: 347491 - DNA, 75 bp, synthetic construct
  source 1..75: mol_type = other DNA
ctcagtggtaacagagtggcgacgcttatggcgcttgcgccagcgtgcgcacgaacgcgatgaagcgcgcgattt

SEQ ID NO: 347492 - DNA, 75 bp, synthetic construct
  source 1..75: mol_type = other DNA
gcagcagcagggactttctctggcgaaacttcaggaaggagccagcaacgtagcggcggacgcgatcaagaatgg

SEQ ID NO: 347493 - DNA, 75 bp, synthetic construct
  source 1..75: mol_type = other DNA
gcataaacctgtaacagaatacggcagtgcgcaccctgatgatcaaaccgtgctggcgatacccgttgataaggc

SEQ ID NO: 347494 - DNA, 75 bp, synthetic construct
  source 1..75: mol_type = other DNA
gctacagcgccgtgaacagctcaaagctgaacgccggacctatggtgagaacctccgcagtgctacccattccgc

SEQ ID NO: 347495 - DNA, 75 bp, synthetic construct
  source 1..75: mol_type = other DNA
atgttatttgaccaaaacgactggaaactcaaagtcaccgacatcgacctttacgcaaatacttgtaagctggac

SEQ ID NO: 347496 - DNA, 75 bp, synthetic construct
  source 1..75: mol_type = other DNA
ctgacgagtcgcttactgtctagcaaagctagtgcgttattcaataaccaagactggaaactgtcagtcaccgac

SEQ ID NO: 347497 - DNA, 75 bp, synthetic construct
  source 1..75: mol_type = other DNA
caggattggcagtatcgtaccggcacagcaggaagggtacgtacttatcggacttgatctcacatacagcgatgg

SEQ ID NO: 347498 - DNA, 75 bp, synthetic construct
  source 1..75: mol_type = other DNA
ttgtcagagggtaatccgctgaggctgatggcgaatgatggctatgctgcgaaagcggggcaggccgtgaacaac

SEQ ID NO: 347499 - DNA, 75 bp, synthetic construct
  source 1..75: mol_type = other DNA
gaaagggagtttaacgccaaccagaattaccggaatgcgtcgctgggtatggagcagcagcgactccggatgcag

SEQ ID NO: 347500 - DNA, 75 bp, synthetic construct
  source 1..75: mol_type = other DNA
attgttgccgaccggcttagccatgcctccttgctggaggctgcaagtttaagcccgtcgccgcttcgccgtttt

SEQ ID NO: 347501 - DNA, 75 bp, synthetic construct
  source 1..75: mol_type = other DNA
gcccaggcgcggcgcgaaatcagccgttcggcagcggaatcaacgttaatgatcgccgttagcccgctggcgctg

SEQ ID NO: 347502 - DNA, 75 bp, synthetic construct
  source 1..75: mol_type = other DNA
tccagccgggagcaccgttatatgatacgattgttattgtcactggtgagagtgtgcgcagggattatatgtcag

SEQ ID NO: 347503 - DNA, 75 bp, synthetic construct
  source 1..75: mol_type = other DNA
gaacattgtcgagtgaaagggataccagaggaactcatccaaggtctgtcggacactattgcccaccagattctc

SEQ ID NO: 347504 - DNA, 75 bp, synthetic construct
  source 1..75: mol_type = other DNA
atgaacgcgacgaagcgcgtgatttattgcacagccacggcaccggcaaaggccgcgcattttgcgaaaaactgg

SEQ ID NO: 347505 - DNA, 75 bp, synthetic construct
  source 1..75: mol_type = other DNA
ggccgcgcattttgcgaaaaactggcgcagcaggcgggtattgatcagtctcatccagcgctgcaacgctggtat

SEQ ID NO: 347506 - DNA, 75 bp, synthetic construct
  source 1..75: mol_type = other DNA
gcccaggcgcggcgcgaaatcagccgttcggcagcggaatcaacgttgatgattgcggtcagcccgctggcgctg

SEQ ID NO: 347507 - DNA, 75 bp, synthetic construct
  source 1..75: mol_type = other DNA
tggcgcaccaggtgctggaagaagaactggccgaatggctgggctattcgcgggcactgctgtttatttctggtt

SEQ ID NO: 347508 - DNA, 75 bp, synthetic construct
  source 1..75: mol_type = other DNA
tgcttccccctgtccggggcagcaactggtagtgacagaaggtgtgttcagcatggacggcgatagtgcgccact

SEQ ID NO: 347509 - DNA, 75 bp, synthetic construct
  source 1..75: mol_type = other DNA
ttggcaaaggatttggcgtcagtggggctgcggtgctttgctccagtacggtggcggattatctgctgcaattcg

SEQ ID NO: 347510 - DNA, 75 bp, synthetic construct
  source 1..75: mol_type = other DNA
gaagtgacggataagaaaaatacgctgattaaaaaaggtgaagtgctatttcgactggacccgacgcgttatcag

SEQ ID NO: 347511 - DNA, 75 bp, synthetic construct
  source 1..75: mol_type = other DNA
tctcaaatcgccagcctgaaagcacagctcgcggaagcaaaatataaccttgagcagacgatagtgcgtgcgccg

SEQ ID NO: 347512 - DNA, 75 bp, synthetic construct
  source 1..75: mol_type = other DNA
cgggtacattaacgtatctttttatgtcgatttctcttgctgtaagttttattattgcagcaaactctgttattg

SEQ ID NO: 347513 - DNA, 75 bp, synthetic construct
  source 1..75: mol_type = other DNA
cattggcaacttcttcagtaatgacttgatgaccgcctatggtcgccgccagcttaacaaacgagctgaggctga

SEQ ID NO: 347514 - DNA, 75 bp, synthetic construct
  source 1..75: mol_type = other DNA
tcgctcaatgacgcctgctggggctgcaaaaatttgctcatctgatgagaatagcatcagtttcgttatgcaata

SEQ ID NO: 347515 - DNA, 75 bp, synthetic construct
  source 1..75: mol_type = other DNA
atgcttcaggcgaagtgctcacactgacctgcacacgcggaaagctggctgctgcttacagcgtacctacggagg

SEQ ID NO: 347516 - DNA, 75 bp, synthetic construct
  source 1..75: mol_type = other DNA
atgtgaatggcaacccggtgctgcttgaaaccaacatgcgtccgtcagggggggtgggttatacccttcacagcg

SEQ ID NO: 347517 - DNA, 75 bp, synthetic construct
  source 1..75: mol_type = other DNA
ttgataaaaaagcgcagaagcgtaaaagctccctcctttttcagaagggcttgtcattaatcgaggcctctatgg

SEQ ID NO: 347518 - DNA, 75 bp, synthetic construct
  source 1..75: mol_type = other DNA
aggtgatgagtgttatgtctgctattaacggtttgtatgtaggtcaggcatcatatgatggtctgtctgatgctg

SEQ ID NO: 347519 - DNA, 75 bp, synthetic construct
  source 1..75: mol_type = other DNA
gggtgttgtatattcaggcacactgactcctgctaacgcagctgctctttgttctgaggtggctaacagtattac

SEQ ID NO: 347520 - DNA, 75 bp, synthetic construct
  source 1..75: mol_type = other DNA
cccgaatcaggtaaacacaaaagacaaactaacaaaagacaatataaaacctttttcgtccgagaattctggcga

SEQ ID NO: 347521 - DNA, 75 bp, synthetic construct
  source 1..75: mol_type = other DNA
atgacaggctcagaaatggcgaaagccggtctgcgggaacagagccgactttcaggtgcaaatcgtaacgcactc

SEQ ID NO: 347522 - DNA, 75 bp, synthetic construct
  source 1..75: mol_type = other DNA
ttgttttgatgccgtacctgccaggcccggaattttccgtcgatatcctcgcggataagggcgaaatactcgcag

SEQ ID NO: 347523 - DNA, 75 bp, synthetic construct
  source 1..75: mol_type = other DNA
ttcagaacgttaacagatgaagacatcgctggctatgttgccagtggtgaaccgttagataaagcaggtgcatac

SEQ ID NO: 347524 - DNA, 75 bp, synthetic construct
  source 1..75: mol_type = other DNA
tttttaatgaccagggaagcagcacatatgctttcttttgaaaaagcattacattcaattcgtaacacttttcca

SEQ ID NO: 347525 - DNA, 75 bp, synthetic construct
  source 1..75: mol_type = other DNA
ttctgttactggtaaggacggtaaaggtaacttcaccaaaaatgctctgactccaaaactggcttccgaagcttg

SEQ ID NO: 347526 - DNA, 75 bp, synthetic construct
  source 1..75: mol_type = other DNA
agcgtgaccgcgataattgggagaagacgcacggcaggctggcgatgcatcaacgattgttctttgattacgcgc

SEQ ID NO: 347527 - DNA, 75 bp, synthetic construct
  source 1..75: mol_type = other DNA
tttaatatcatggacaacatgggcagcgagcgcgagttgccaaagataatgaatagatccctgtggcggcagagt

SEQ ID NO: 347528 - DNA, 75 bp, synthetic construct
  source 1..75: mol_type = other DNA
atggaacgtcgtttccatcggcattggggcaatggtggggcggggatcttcgcgctgctggggcaggctgcattg

SEQ ID NO: 347529 - DNA, 75 bp, synthetic construct
  source 1..75: mol_type = other DNA
acctccgcagcgctacccattctgctggtcgttcccgtgccgctatcgtcgctgaccttgagtcaggcggcaact

SEQ ID NO: 347530 - DNA, 75 bp, synthetic construct
  source 1..75: mol_type = other DNA
atgagcggatttgcacagggtttacttgccggattcagcacggttgaccaggcaatgacccgtcgtaaggaactt

SEQ ID NO: 347531 - DNA, 75 bp, synthetic construct
  source 1..75: mol_type = other DNA
tctgcgtctatggagctgctggaggccctcgctgaagctggtgtgacgattagcaacttcttcagtaacgacctc

SEQ ID NO: 347532 - DNA, 75 bp, synthetic construct
  source 1..75: mol_type = other DNA
acgcgctggcgatcattgccctgatgacgctgttcaactccttaagcaaccatgcggtagggcgactggaagtga

SEQ ID NO: 347533 - DNA, 75 bp, synthetic construct
  source 1..75: mol_type = other DNA
ttcggcggtattgtggcgatgttttctggctatgcttatgcgcgtcttggcgcccattacccaagtaatggcgga

SEQ ID NO: 347534 - DNA, 75 bp, synthetic construct
  source 1..75: mol_type = other DNA
aacctctgccgtccccgaaaattataagtccaaagatggaaccaccattatgcatccgttcggggggagtctgac

SEQ ID NO: 347535 - DNA, 75 bp, synthetic construct
  source 1..75: mol_type = other DNA
tgctggtcatgctactggtcatcattggttttatttacagcttgtggtcccagggcagcagtgcgttgatgtgga

SEQ ID NO: 347536 - DNA, 75 bp, synthetic construct
  source 1..75: mol_type = other DNA
tatccgcctgcgtcatgatattcacgcctcgttaccgatccttgttgttggcacgctggttatgttgttggtgat

SEQ ID NO: 347537 - DNA, 75 bp, synthetic construct
  source 1..75: mol_type = other DNA
ctgatatggattattggcgcactcttactcagccttattgtggcaatggtcatgaagcgcaataaagccgtataa

SEQ ID NO: 347538 - DNA, 75 bp, synthetic construct
  source 1..75: mol_type = other DNA
tgctctgcctgacgctattcctcaaacgctggcagccggtacgcgttttccgcttcggcgatctgggtgcatcgc

SEQ ID NO: 347539 - DNA, 75 bp, synthetic construct
  source 1..75: mol_type = other DNA
gacattatctcttcgctggtatcgctgctctgcctgacactgttcctcaaacgttggcagccggtgcgcgttttc

SEQ ID NO: 347540 - DNA, 75 bp, synthetic construct
  source 1..75: mol_type = other DNA
caacaaattggcgtctctgacctgttgctggttgccgccaataccaccggtggcgtcaccggtaagatgatctcc

SEQ ID NO: 347541 - DNA, 75 bp, synthetic construct
  source 1..75: mol_type = other DNA
actcacctgccttgcggatatcagtaccgcgttgagccgtctggcgggtaaagaaccgatgctgactcgctcgaa

SEQ ID NO: 347542 - DNA, 75 bp, synthetic construct
  source 1..75: mol_type = other DNA
gccggtactcacctgccttgcggatatcagtaccgcgttgagtcgcctggcaggtaaagaacctatgctgacccg

SEQ ID NO: 347543 - DNA, 75 bp, synthetic construct
  source 1..75: mol_type = other DNA
aactggttgccggagccagcgcggtggtccattgcgccgggcaagtgcgcgggcacaaagaagagattttcaccc

SEQ ID NO: 347544 - DNA, 75 bp, synthetic construct
  source 1..75: mol_type = other DNA
tgacagctaccgtaacactgtggagtatcccgccgtttaaagccctgttcgcatcgggtggtgcgctgtatgagt

SEQ ID NO: 347545 - DNA, 75 bp, synthetic construct
  source 1..75: mol_type = other DNA
gacattatctcttcgctggtatcactgctctgcctgacgctgttcctcaaacgctggcagccagtgcgcgtattc

SEQ ID NO: 347546 - DNA, 75 bp, synthetic construct
  source 1..75: mol_type = other DNA
tggtatgaccgccgcggtgaagagtacctggcaacgcttagtgaggcagacagtgcggcgctttatgacatctgc

SEQ ID NO: 347547 - DNA, 75 bp, synthetic construct
  source 1..75: mol_type = other DNA
atgacgcagacccacaccggttacaccacaggtcaggtgttgcttgcctggacaccgttcctgttcctgaccgcc

SEQ ID NO: 347548 - DNA, 75 bp, synthetic construct
  source 1..75: mol_type = other DNA
gttcgcctttatctcgaactattccggactgtcatcaacactggcgctggcactggcgcacaccggtcatgcatt

SEQ ID NO: 347549 - DNA, 75 bp, synthetic construct
  source 1..75: mol_type = other DNA
cgccacatggacagtcgttatcgctctgaccgtcgcgctattgttctacaaaatgccggtcgccaatgcgctggc

SEQ ID NO: 347550 - DNA, 75 bp, synthetic construct
  source 1..75: mol_type = other DNA
gctgccgcccgtcgtggttccgtgcgaatggtcgacattcctctgccgctactcacctgtcttgcggatattagt

SEQ ID NO: 347551 - DNA, 75 bp, synthetic construct
  source 1..75: mol_type = other DNA
agcatggaactgctgctggcaggttgcaccaccaccgtgactcaccgtttcactaaaaatctgcgtcaccacgta

SEQ ID NO: 347552 - DNA, 75 bp, synthetic construct
  source 1..75: mol_type = other DNA
gaagctgttttagaggctgtatttaaagatatggacagtgctgaactgaagcctcagaagcctgtaggtaatgcg

SEQ ID NO: 347553 - DNA, 75 bp, synthetic construct
  source 1..75: mol_type = other DNA
tacagataaagtgtatatcaatcaagtatttgataaacaacacgatttatccaatatactaacatttcttgatat

SEQ ID NO: 347554 - DNA, 75 bp, synthetic construct
  source 1..75: mol_type = other DNA
gcgcgccgcgtctacgtccttgcaccccgcgtggtatcgtcacactgcttgagcgatacaacattgataccttcg

SEQ ID NO: 347555 - DNA, 75 bp, synthetic construct
  source 1..75: mol_type = other DNA
gagcgttacaacattgataccttcggcctcaacgccgtggtgattggcgcatcgaatatcgttggccgcccgatg

SEQ ID NO: 347556 - DNA, 75 bp, synthetic construct
  source 1..75: mol_type = other DNA
ccgttggcaagccaggctttattcccggtgactggatcaaagaaggcgcaattgtgattgatgtcggcatcaacc

SEQ ID NO: 347557 - DNA, 75 bp, synthetic construct
  source 1..75: mol_type = other DNA
gtttaccagacgctgcccgtcagttgcttaccacgcccgccgcgccgattgtgctggtggataaaaaatacgttc

SEQ ID NO: 347558 - DNA, 75 bp, synthetic construct
  source 1..75: mol_type = other DNA
tggcgcttccggggggcgatttggctgcgaagcagccgtggcgaaacctgctggcgcagtgcctgcgctttgtgc

SEQ ID NO: 347559 - DNA, 75 bp, synthetic construct
  source 1..75: mol_type = other DNA
tggcggtgatgtcattgcgttgacgctcgacggtatcggtatgggggagaacggcgctttatggggcggcgagtg

SEQ ID NO: 347560 - DNA, 75 bp, synthetic construct
  source 1..75: mol_type = other DNA
atgaaggtaaatctaatgatgtaaaaatactacaaggttctgttctggaagttattgaggatattgaagataata

SEQ ID NO: 347561 - DNA, 75 bp, synthetic construct
  source 1..75: mol_type = other DNA
gactgcgcctgaccttaaccgcagctcatgaaacgcaggatatcgaccgtctggtggaggtgctgcatggcaacg

SEQ ID NO: 347562 - DNA, 75 bp, synthetic construct
  source 1..75: mol_type = other DNA
gactgcgcttaacactaaccgccgcgcatgaaatgcaggatatcgaccgtctgctggaggtgctgcatggcaacg

SEQ ID NO: 347563 - DNA, 75 bp, synthetic construct
  source 1..75: mol_type = other DNA
atcgacgccctctggcaggaggtccgccaggcaatagcgcaactgagcgccgcttcgccgctgccggtcaggcgg

SEQ ID NO: 347564 - DNA, 75 bp, synthetic construct
  source 1..75: mol_type = other DNA
gaaagacgagctgattctggcgtactccactgccagctctgaaagtgtgctgccgcggattatcgagaagatgga

SEQ ID NO: 347565 - DNA, 75 bp, synthetic construct
  source 1..75: mol_type = other DNA
cgcatcgtgaaccgctggtgaccgtgttccgctccatctctgaaaccatgtttaaagtgactcacatggtgatgc

SEQ ID NO: 347566 - DNA, 75 bp, synthetic construct
  source 1..75: mol_type = other DNA
tcctgaaggaataggtgaaaggtttattgctaaaggcgagttgaatccacaggatggaagaatgctaaaaacagg

SEQ ID NO: 347567 - DNA, 75 bp, synthetic construct
  source 1..75: mol_type = other DNA
acgtagataccgttctgctggatatggacggcacattgctcgacctcgccttcgataactatttctggcaaaagc

SEQ ID NO: 347568 - DNA, 75 bp, synthetic construct
  source 1..75: mol_type = other DNA
tgcatgtgcagggggtgcagcgcgtagttttgctgaatcctcaggaagatatcgtgatcgatgatacccaggcgg

SEQ ID NO: 347569 - DNA, 75 bp, synthetic construct
  source 1..75: mol_type = other DNA
gccgaacagcgtgaagccgtctccgccgcgctggagctggaatcggaacccctgaacgttatcgcccagacaaca

SEQ ID NO: 347570 - DNA, 75 bp, synthetic construct
  source 1..75: mol_type = other DNA
gtcggaagatggcaacaccgtggaactgaacagcgaacaggcgcggttttcacaaaatagtatggattatcaaag

SEQ ID NO: 347571 - DNA, 75 bp, synthetic construct
  source 1..75: mol_type = other DNA
atgtatcttacgaaaaagattataataagtatgatgttaatattaacatccgctgcattttcatcagatccacct

SEQ ID NO: 347572 - DNA, 75 bp, synthetic construct
  source 1..75: mol_type = other DNA
gcatttggtccagccagttttagatgcccaggcgcggcgcgaaatcagccgttcggcggcggaatcaacgttgat

SEQ ID NO: 347573 - DNA, 75 bp, synthetic construct
  source 1..75: mol_type = other DNA
gaaaacattttatctaaatacgaaatgcatacagataatgtatgcgcgatgatgcaaaagatagagaagcagcaa

SEQ ID NO: 347574 - DNA, 75 bp, synthetic construct
  source 1..75: mol_type = other DNA
tcaggaatttcaggatctgccagacggtgctgagacgacgcttacgatgtttctgaaacagggcacgtttaatta

SEQ ID NO: 347575 - DNA, 75 bp, synthetic construct
  source 1..75: mol_type = other DNA
tctttatgagtttcctgctcgcctctttccagcgcaaacaatctctttgcgttaccgcagcgttagttggtgccc

SEQ ID NO: 347576 - DNA, 75 bp, synthetic construct
  source 1..75: mol_type = other DNA
ccacacatttggttatccgaaagaggatcagcggttatggcatgcggtggccgaagctacgggtctgaaagctga

SEQ ID NO: 347577 - DNA, 75 bp, synthetic construct
  source 1..75: mol_type = other DNA
gttttacggggctgaagcggggctaccgtctggcagagctggtcctgatgcatgagccgctggccggatgcggtg

SEQ ID NO: 347578 - DNA, 75 bp, synthetic construct
  source 1..75: mol_type = other DNA
ctggcgtaggttctgtggtaacagagtggcggcgcttatggcgcttgcgacagcgcgcccatgaacgcgacgaag

SEQ ID NO: 347579 - DNA, 75 bp, synthetic construct
  source 1..75: mol_type = other DNA
aaaacagcctgcgctacactgacagcggcggcagcctgcaaatctctgccgggcagcgcgacaaaacggtgcgcc

SEQ ID NO: 347580 - DNA, 75 bp, synthetic construct
  source 1..75: mol_type = other DNA
gcttagtgatacgttaaatatcgatatgttaattgccagtatttcactgggattaaccatggaatttgccaactg

SEQ ID NO: 347581 - DNA, 75 bp, synthetic construct
  source 1..75: mol_type = other DNA
gattaaccatggaatttgccaactgcttcgcctgttttaatgtgcctggcaccagcgcgttaaaagtgataggtc

SEQ ID NO: 347582 - DNA, 75 bp, synthetic construct
  source 1..75: mol_type = other DNA
atgtatcagaggttactgaaggttgacccgctgaagtgcgtgctgtgcgggagtcagatgcgttttacggggctg

SEQ ID NO: 347583 - DNA, 75 bp, synthetic construct
  source 1..75: mol_type = other DNA
cgggcgtatgacggtctgagtgttgctggcccgtcaggtgcatacgagtattttgcacgcagcgccagcggtctg

SEQ ID NO: 347584 - DNA, 75 bp, synthetic construct
  source 1..75: mol_type = other DNA
ttcaggaagtggctggctgagcaggggcttatcggtcaggacgtggcgttgtccgccattgctgccgcactgcat

SEQ ID NO: 347585 - DNA, 75 bp, synthetic construct
  source 1..75: mol_type = other DNA
gttacgccagcgggttaacgagggcgcacgcgcctgcatgttaagccacggttcagggacaaacctggacaacct

SEQ ID NO: 347586 - DNA, 75 bp, synthetic construct
  source 1..75: mol_type = other DNA
tgattatgagcgtcactttaaagacaggcgctatattgaagaagtgattgctaaagtgatcgaacgaacaaaaca

SEQ ID NO: 347587 - DNA, 75 bp, synthetic construct
  source 1..75: mol_type = other DNA
atagcgaaggttacttctttgatgaagcttcctccagtgatggggaactggtgtttaaacgctacgagcagcgtt

SEQ ID NO: 347588 - DNA, 75 bp, synthetic construct
  source 1..75: mol_type = other DNA
gcctgactttgaggcaattctggctgacacaaaggccatgatgattgcggcttatcccgccgaacagcgtgaagc

SEQ ID NO: 347589 - DNA, 75 bp, synthetic construct
  source 1..75: mol_type = other DNA
gaggcagacaaggttcggctcgggccagccatggaaaaattgctcggcgggctgattcaactcgatccggcgcgg

SEQ ID NO: 347590 - DNA, 75 bp, synthetic construct
  source 1..75: mol_type = other DNA
tggctggacattcagtggtatctgcatcaggcgctgactaaggcgggcgtaccgtgggacaggtggacagcggtt

SEQ ID NO: 347591 - DNA, 75 bp, synthetic construct
  source 1..75: mol_type = other DNA
ttgcgactgctgatggcgcgggtggcggaacagtacggtaaaaacgagatggcgctcctgctgctggaagaactg

SEQ ID NO: 347592 - DNA, 75 bp, synthetic construct
  source 1..75: mol_type = other DNA
cgttatacaccgggtaaagttgtttttaacggacaggagatgagcgaagaagaatttatgtctcgtgccggacgt

SEQ ID NO: 347593 - DNA, 75 bp, synthetic construct
  source 1..75: mol_type = other DNA
acattgcgatgcagaagcagcttgctgcacaccctgagttagcaaacgatgaagttgctctgcaagaagtgaatg

SEQ ID NO: 347594 - DNA, 75 bp, synthetic construct
  source 1..75: mol_type = other DNA
ggaagtcgttgcccaaatcgatgctttcgttgcaaaaaccaggctggatcgcgttaaagacaaagattatatcaa

SEQ ID NO: 347595 - DNA, 75 bp, synthetic construct
  source 1..75: mol_type = other DNA
cggctcctgctccgggatgtttaccgctaactcaatgaactgcctgaccgaagcgctgggtctgtcgcagccggg

SEQ ID NO: 347596 - DNA, 75 bp, synthetic construct
  source 1..75: mol_type = other DNA
caacggctcgctgctggcaacccacgcggaccgtaagcagctgttccttaatgctggtaaacgcattgttgaatt

SEQ ID NO: 347597 - DNA, 75 bp, synthetic construct
  source 1..75: mol_type = other DNA
ccactcatggtcgtaatatggcgggggggcgtgcgctgtggcgcgccaccggaatgaccgacgccgatttcggta

SEQ ID NO: 347598 - DNA, 75 bp, synthetic construct
  source 1..75: mol_type = other DNA
atgctcgacagccttgcccgctacccggaagtggcaaaagaggattttgcgaacattgttgccgctcttaatcaa

SEQ ID NO: 347599 - DNA, 75 bp, synthetic construct
  source 1..75: mol_type = other DNA
gcggcggcagcattggcctgattgaagatggtgacctgatcgctatcgacattccgaaccgtggcattcagttac

SEQ ID NO: 347600 - DNA, 75 bp, synthetic construct
  source 1..75: mol_type = other DNA
atgccgaactggcggcgcgtcgtgaagcgcaggaagctcggggtgacaaagcctggacgccgaaaaaccgtgaac

SEQ ID NO: 347601 - DNA, 75 bp, synthetic construct
  source 1..75: mol_type = other DNA
ttcagttaatcacgattgacaacaataccgcctcgctgcaactgcgttatacaccgggtaaagttgtttttaacg

SEQ ID NO: 347602 - DNA, 75 bp, synthetic construct
  source 1..75: mol_type = other DNA
catgactcaaaaatcagcgcggcaaaagacaccattgcacagactgcaggtggtcagcttgcttctcaaatccgc

SEQ ID NO: 347603 - DNA, 75 bp, synthetic construct
  source 1..75: mol_type = other DNA
cctgcctgacaatcttgttattttttttaagtacacaagtacaggcagcgccattagatagtgcagggctacttg

SEQ ID NO: 347604 - DNA, 75 bp, synthetic construct
  source 1..75: mol_type = other DNA
acaatcacccgtccggtgaagtcacacccagtaaggcagaccggcttatcaccgaacgtctggtacaggcactgg

SEQ ID NO: 347605 - DNA, 75 bp, synthetic construct
  source 1..75: mol_type = other DNA
cgatgacattaatcattgggattgggcaatcatttatagatcagtatttttctattattaaaaatgatattcctg

SEQ ID NO: 347606 - DNA, 75 bp, synthetic construct
  source 1..75: mol_type = other DNA
ttatagatcaatatttttctcttattaaagatgatgttcctgatcttaatagtcttatcgttttgcttctggcgt

SEQ ID NO: 347607 - DNA, 75 bp, synthetic construct
  source 1..75: mol_type = other DNA
gcaggtgctgcagcgactgcaggtgctgcaagtgctgcaggtggcgcatcagcactcaaagcggcgtttgaatca

SEQ ID NO: 347608 - DNA, 75 bp, synthetic construct
  source 1..75: mol_type = other DNA
tcattctccacgacattagatgttgcccctgcagagtatggaaagttttcttttggtgagggccagtttactttt

SEQ ID NO: 347609 - DNA, 75 bp, synthetic construct
  source 1..75: mol_type = other DNA
ggaaggaaataaatttccgattggtgaaaatgagtcaaaatttaatcaggtcagcattatcaatcgtggtgaaga

SEQ ID NO: 347610 - DNA, 75 bp, synthetic construct
  source 1..75: mol_type = other DNA
ttgacaaaggcttttttaattctcattttcaaatgcaaataacatttgataacggtgcacccgatctcaatatca

SEQ ID NO: 347611 - DNA, 75 bp, synthetic construct
  source 1..75: mol_type = other DNA
tgcatggcgcatcagggatcagtgatgccgacattaaaactgcaatttcgttgggtattgcgaaaatcaacattc

SEQ ID NO: 347612 - DNA, 75 bp, synthetic construct
  source 1..75: mol_type = other DNA
gtaataactcattgggatcatggtcggagtatggaaattattcataacgcctggactcatggtatgaattcatta

SEQ ID NO: 347613 - DNA, 75 bp, synthetic construct
  source 1..75: mol_type = other DNA
atgccaggtaaagttgttttcaatgggcaggagatgagtgaagaagaatttatgtctcgtgcagggcgttttatt

SEQ ID NO: 347614 - DNA, 75 bp, synthetic construct
  source 1..75: mol_type = other DNA
cgcagttgtgcaaagttgcgccgagcaccccaaaataccatatggaagatgttcaccgtgctggtggagtgatcg

SEQ ID NO: 347615 - DNA, 75 bp, synthetic construct
  source 1..75: mol_type = other DNA
aacagaccaggggcaggcacagcgtctcggtgtgaaatatttcccggccatgatgctggtagacccgaaacaggg

SEQ ID NO: 347616 - DNA, 75 bp, synthetic construct
  source 1..75: mol_type = other DNA
gagttaccggcggaaccatcggtaccgctgacctctctgccgccttccacccagatgaaggtgctgcagagaatg

SEQ ID NO: 347617 - DNA, 75 bp, synthetic construct
  source 1..75: mol_type = other DNA
gcgtactgcgctgaatgtggtgggtaatgcgctggcggtgctggtgattgccaaatgggaacacaaatttgaccg

SEQ ID NO: 347618 - DNA, 75 bp, synthetic construct
  source 1..75: mol_type = other DNA
tgaaccgcgctcctgtgaggagtaggaaacagaccaagccccgccagaatggtttgtttaaacgtttcacgctac

SEQ ID NO: 347619 - DNA, 75 bp, synthetic construct
  source 1..75: mol_type = other DNA
gcgagattagcgtaggaattatggctgcgataatcggcggaccgttctttgtgctgctggttaaacgctggcagg

SEQ ID NO: 347620 - DNA, 75 bp, synthetic construct
  source 1..75: mol_type = other DNA
gaatatgagttaattgttgcccactttgtaataggcgtttctttgagaaagatcgcaaaaagaaagaaatgtgcg

SEQ ID NO: 347621 - DNA, 75 bp, synthetic construct
  source 1..75: mol_type = other DNA
cttgccgtggctttgctgttctataaaatgccggtcgctaatgcgctgtcctcggtggtatacggcttcttctac

SEQ ID NO: 347622 - DNA, 75 bp, synthetic construct
  source 1..75: mol_type = other DNA
aattcattattgctgagagattaaatgaacagaacatacctgcagaaaatggaacattatggactcgtgcaaaaa

SEQ ID NO: 347623 - DNA, 75 bp, synthetic construct
  source 1..75: mol_type = other DNA
cagggcagccgtgcgttgatatggattattggtgcaatcttactcagccttattgtggcaatggtcatgaagcgc

SEQ ID NO: 347624 - DNA, 75 bp, synthetic construct
  source 1..75: mol_type = other DNA
caccgtcgccatcattttggggatcactctggcgaacgtcttccagcccggtgccggggtggatatgtcgcagct

SEQ ID NO: 347625 - DNA, 75 bp, synthetic construct
  source 1..75: mol_type = other DNA
gcgcggtatcaaagaaacctggcctgcggttgtggttgcgggcggttcatttgccatcgcacagtttctcagctc

SEQ ID NO: 347626 - DNA, 75 bp, synthetic construct
  source 1..75: mol_type = other DNA
ccaattctggtggccgggcaggtcacaggcatcgacagctttgagattagccagatggtggggcggcagctgccg

SEQ ID NO: 347627 - DNA, 75 bp, synthetic construct
  source 1..75: mol_type = other DNA
tgcagatgaactggtacaggaagcgcgcgtaccgcatccggcgtttatgccgacaaccatgaaggtactgaggca

SEQ ID NO: 347628 - DNA, 75 bp, synthetic construct
  source 1..75: mol_type = other DNA
tgctgcttcagcagatgtgcgtttttttagtcattgcgtggttaatgagtaaaacgccattattcataccgttaa

SEQ ID NO: 347629 - DNA, 75 bp, synthetic construct
  source 1..75: mol_type = other DNA
tgaaacgcgatccagctcttctacaaatgacgaacaaagacctttactggtagcaccagctcctcatactcgtat

SEQ ID NO: 347630 - DNA, 75 bp, synthetic construct
  source 1..75: mol_type = other DNA
aaatccaaagtcagtaaggttgttgctggtaagaaaccattggtcagtatttctgattctggaacaaatactatt

SEQ ID NO: 347631 - DNA, 75 bp, synthetic construct
  source 1..75: mol_type = other DNA
gcatcgttaaaaccgcaggcgtcgatgacagcatcctcaaattcactggcccggcgaaagtctacgaaagccagg

SEQ ID NO: 347632 - DNA, 75 bp, synthetic construct
  source 1..75: mol_type = other DNA
cggatcttgctccgggatgtttaccgctaactctatgaattgcctgaccgaagcactgggcctgtcgcagccggg

SEQ ID NO: 347633 - DNA, 75 bp, synthetic construct
  source 1..75: mol_type = other DNA
cgccggatatccgcgttaacgtctggctgcataaagaaaccgccagtatcgctcttgatctgagtggtgatggtt

SEQ ID NO: 347634 - DNA, 75 bp, synthetic construct
  source 1..75: mol_type = other DNA
catgctcgtacacgtataacagatgaaagaacaggtgatacgtatgattacagtcgccgtactgatttatatggg

SEQ ID NO: 347635 - DNA, 75 bp, synthetic construct
  source 1..75: mol_type = other DNA
atgcaacgtgttcatcgtgctaaatggaatgacgaagagtctcaggaacagcgagctactgaacaagctcaacgc

SEQ ID NO: 347636 - DNA, 75 bp, synthetic construct
  source 1..75: mol_type = other DNA
agtcaatgcagataataacatggattttataccgactgtttcaacaataaatgataaaaatcatactcctcgttt

SEQ ID NO: 347637 - DNA, 75 bp, synthetic construct
  source 1..75: mol_type = other DNA
aacgtattgatcatcgttcccttcaggcccagcacgaggaagctttagaaaaagcagcagtagctttagataatg

SEQ ID NO: 347638 - DNA, 75 bp, synthetic construct
  source 1..75: mol_type = other DNA
ctgagcacgattgccagggttaagagtgaaatccgcggtgtcacacaggctataaacaccatcagaggcacggtc

SEQ ID NO: 347639 - DNA, 75 bp, synthetic construct
  source 1..75: mol_type = other DNA
aagaacaagcgctatggcttgccaaggccgctgaaacaaatcgccctgcgatgaaacgtatccacagtgccaaat

SEQ ID NO: 347640 - DNA, 75 bp, synthetic construct
  source 1..75: mol_type = other DNA
aatcaggtaaaggcgtttacccgaatcaggtaaacacaaaagacaaactaacaaaagacaatataaaaccttatt

SEQ ID NO: 347641 - DNA, 75 bp, synthetic construct
  source 1..75: mol_type = other DNA
tgttctgctgcaaaaagtgttctggtaaagcgtgggatttttattcagagtgggcggaataccggcattaataat

SEQ ID NO: 347642 - DNA, 75 bp, synthetic construct
  source 1..75: mol_type = other DNA
aagccgctgcctttgaaggtgagctgatcccggcgtctcagatcgaccgcctggcaactctgccgacctacgaag

SEQ ID NO: 347643 - DNA, 75 bp, synthetic construct
  source 1..75: mol_type = other DNA
tcaagacggagaacaagttaatttgaccgacttccagggacaacgtgttctggtttatttctacccgaaagccat

SEQ ID NO: 347644 - DNA, 75 bp, synthetic construct
  source 1..75: mol_type = other DNA
gaacaattcggcgtctggggagagaagtccttcatgggcaaaacctacgatggtattcaccgcatcagcttcttg

SEQ ID NO: 347645 - DNA, 75 bp, synthetic construct
  source 1..75: mol_type = other DNA
gaaagcatcaatcgaagccgaggtaaaacagaagtaactctggaagagtactgttcgttaatctggaaaacgaac

SEQ ID NO: 347646 - DNA, 75 bp, synthetic construct
  source 1..75: mol_type = other DNA
ggcaggctctactcttgtcaacatcccaattgattatattcgggataaatgaagttcttagaagaaaggggattg

SEQ ID NO: 347647 - DNA, 75 bp, synthetic construct
  source 1..75: mol_type = other DNA
ctggtcttcctggctgtcatgcgcaaaacatatggctttaataaaaaactggattgggtgagcaacgagcaactt

SEQ ID NO: 347648 - DNA, 75 bp, synthetic construct
  source 1..75: mol_type = other DNA
atggcgaaagccggtctgcgggaacagaaccgactttcaggtgcaaatcgtaacgcactcattgcgggaggaatt

SEQ ID NO: 347649 - DNA, 75 bp, synthetic construct
  source 1..75: mol_type = other DNA
aaccaatcgctgaactgttctctgatctggatggcagcattgacgcgcgtgaggatgattacgaacaaaaagcgg

SEQ ID NO: 347650 - DNA, 75 bp, synthetic construct
  source 1..75: mol_type = other DNA
ttgaccaagaaactatgaattggttggttgacctgaacaagtcaggtttcaatattcactttgcgaattgctttg

SEQ ID NO: 347651 - DNA, 75 bp, synthetic construct
  source 1..75: mol_type = other DNA
cacaagcgaatgcaaccgacttgatttaagcccggagcaattattgaagctgaatgtattcttgacctattcaga

SEQ ID NO: 347652 - DNA, 75 bp, synthetic construct
  source 1..75: mol_type = other DNA
ctattgggcggcgtaaggttggtgtgcttcagtatctggagaatgaaggggaagcgattgaacttgccatcgact

SEQ ID NO: 347653 - DNA, 75 bp, synthetic construct
  source 1..75: mol_type = other DNA
ttgaccaggaaaccatgaattggttgattgacctgaataggtcaggatttaatatctatttcatgcattgttttg

SEQ ID NO: 347654 - DNA, 75 bp, synthetic construct
  source 1..75: mol_type = other DNA
acccaatgcaaattatggttgaccaggaaactatgaattggttgattgacctgaacaggtcgggctttaatatct

SEQ ID NO: 347655 - DNA, 75 bp, synthetic construct
  source 1..75: mol_type = other DNA
ttaagcccagagcaactactaaagctgaatgtattcctggcttatcagaacgaattaaacccttacagtgagatt

SEQ ID NO: 347656 - DNA, 75 bp, synthetic construct
  source 1..75: mol_type = other DNA
gtgcaattactgcatataaagcctatgtcatggcggaaaccacgcagctggtgaccgacactaaggcctttaccg

SEQ ID NO: 347657 - DNA, 75 bp, synthetic construct
  source 1..75: mol_type = other DNA
gtgcaattaccgcatataagacgtatgtcatggcggaaactacgcagctggtgaccgacactaaagcctttaccg

SEQ ID NO: 347658 - DNA, 75 bp, synthetic construct
  source 1..75: mol_type = other DNA
gaagatgattacgagcaaaaagccgccgacccaaaattcactggtttccaccgtctggaaaaagcattgtttggc

SEQ ID NO: 347659 - DNA, 75 bp, synthetic construct
  source 1..75: mol_type = other DNA
atggcgaaagccggtctgcgggaacagagccgactttcaggtgcaaatcgtaacgcactcattgcggaaggaatt

SEQ ID NO: 347660 - DNA, 75 bp, synthetic construct
  source 1..75: mol_type = other DNA
aaaaatgcccgtttatttttactggatgaaccaactgtaggcattgatattcagtacagaatgatgttatgggaa

SEQ ID NO: 347661 - DNA, 75 bp, synthetic construct
  source 1..75: mol_type = other DNA
gaagatgattacgagcaaaaagccgccgatccaaaattcaccggtttccaccgtctggaaaaagcattgtttggc

SEQ ID NO: 347662 - DNA, 75 bp, synthetic construct
  source 1..75: mol_type = other DNA
acgggcatccgattgaggttgatgatattaacgatcaggcgcgtcatctggtgcggttgatgcctgttctgcgct

SEQ ID NO: 347663 - DNA, 75 bp, synthetic construct
  source 1..75: mol_type = other DNA
cggctggccactgagctgaacgggagtggaggacttctgaaagactgtggaactacacgcagtttttactgccgg

SEQ ID NO: 347664 - DNA, 75 bp, synthetic construct
  source 1..75: mol_type = other DNA
ttatagaggctaatgctttgatggcagcagcactggcgacacaaattaaagtcgtgagtgaaatcatcaaaacct

SEQ ID NO: 347665 - DNA, 75 bp, synthetic construct
  source 1..75: mol_type = other DNA
gaaacgagccagacgcgacacgatccgcaactttctgaatgccaaaggtggtcgcgctatggcccttaccgagca

SEQ ID NO: 347666 - DNA, 75 bp, synthetic construct
  source 1..75: mol_type = other DNA
aaaattgcaaatgaagtcgcacactccttaactttgtattgttggagtcattacgcatttactccagatggagat

SEQ ID NO: 347667 - DNA, 75 bp, synthetic construct
  source 1..75: mol_type = other DNA
aatctatatcaagcggtggttggtgggatagagtatgtaactccaagtgacttggatagtgttgtcggactgtat

SEQ ID NO: 347668 - DNA, 75 bp, synthetic construct
  source 1..75: mol_type = other DNA
agtattctgactggtttggtctggtcggactgagtgaacacattgatgccgaagcctgctggagccggctgtcgg

SEQ ID NO: 347669 - DNA, 75 bp, synthetic construct
  source 1..75: mol_type = other DNA
ctcacgagctggccgcatggcttctcacatggcgagcgggctgtctaatggagctgcggagtatcagatgatgaa

SEQ ID NO: 347670 - DNA, 75 bp, synthetic construct
  source 1..75: mol_type = other DNA
gtctaacggagcttcggagtatcagatgatgaagggaagtactaatgatcctacccacgtaatatggacacaggc

SEQ ID NO: 347671 - DNA, 75 bp, synthetic construct
  source 1..75: mol_type = other DNA
ctcagatacgtaagcaaacagctactcatcgggataaccgcgaacatgatgattttgccgatgatagcttatcgg

SEQ ID NO: 347672 - DNA, 75 bp, synthetic construct
  source 1..75: mol_type = other DNA
agaatgcttaagcgcctttttgattatgctgttgtacgcgggatgattgaagtaaaccccgcgatttcatttagt

SEQ ID NO: 347673 - DNA, 75 bp, synthetic construct
  source 1..75: mol_type = other DNA
gagtaccaggcaatgaagcgaagtagcaactcttcccgagtccaacaaacttttggaggggaattggcggctcag

SEQ ID NO: 347674 - DNA, 75 bp, synthetic construct
  source 1..75: mol_type = other DNA
gttgtaggaggggcatccttacaaggcatcggaggttttggagcaggtatgattacgggcgctgccgctactgca

SEQ ID NO: 347675 - DNA, 75 bp, synthetic construct
  source 1..75: mol_type = other DNA
gtctggcttaataccttgcttaaatatggatatagaaaaacgaatgatcttgatgaggttcttattgatatggtt

SEQ ID NO: 347676 - DNA, 75 bp, synthetic construct
  source 1..75: mol_type = other DNA
gagttgctttcgttaacgccggtagagcatgtttgccgactggtacgtgagtcctctcgcgttgccgcctggcgt

SEQ ID NO: 347677 - DNA, 75 bp, synthetic construct
  source 1..75: mol_type = other DNA
aagacgcccgtccattattgctgatagaagatccagaaacccgtttacaccccattatgctttcagttgcctggc

SEQ ID NO: 347678 - DNA, 75 bp, synthetic construct
  source 1..75: mol_type = other DNA
attggataatgatattttttctcctaagaatagtgatgatttatataagttaagcactcattggttcactgtcag

SEQ ID NO: 347679 - DNA, 75 bp, synthetic construct
  source 1..75: mol_type = other DNA
tgggctttcgtggtatcaaccgactatcgttgatgctggaacaaaacaacgtcctgattggggagaacgcgtggg

SEQ ID NO: 347680 - DNA, 75 bp, synthetic construct
  source 1..75: mol_type = other DNA
cgccgcggtgtggaatctgtccccactctgttgaaaaaaatgttctcgcgtgtgctgtggctagcgcgtggtcgg

SEQ ID NO: 347681 - DNA, 75 bp, synthetic construct
  source 1..75: mol_type = other DNA
gtattttttatcgcctggaaggggagagtgcggaagacggcagtgtgatgacactccgcagttttctcgataaag

SEQ ID NO: 347682 - DNA, 75 bp, synthetic construct
  source 1..75: mol_type = other DNA
aagattaatgattttttcattgctaaaattattttggatgcagatagtctcattcaatatgttcaacttgatttt

SEQ ID NO: 347683 - DNA, 75 bp, synthetic construct
  source 1..75: mol_type = other DNA
tagtcaattatcaaaaaattttgatgtttttgtcaatttaaatctgacgagccaacaaactgtggctgtttatca

SEQ ID NO: 347684 - DNA, 75 bp, synthetic construct
  source 1..75: mol_type = other DNA
tggagttgttatacaaaatgctgctgtttcagcaccatcaaaagagttagtcgatattgtatccaaatatgcatc

SEQ ID NO: 347685 - DNA, 75 bp, synthetic construct
  source 1..75: mol_type = other DNA
aacagtcttttttctttaaggataatgttagtgaatttgactttggtaattatagagttgtttcttcccaagaca

SEQ ID NO: 347686 - DNA, 75 bp, synthetic construct
  source 1..75: mol_type = other DNA
gcaaaacagatgcttcctaccgtgttaatgcaccggatgacatcatcataaacccatactcgcaggagagcagaa

SEQ ID NO: 347687 - DNA, 75 bp, synthetic construct
  source 1..75: mol_type = other DNA
gtaaaacagatgtttccaaccgtgttaatgcaccggatgacatcattataaacccatactcacaggagagcagaa

SEQ ID NO: 347688 - DNA, 75 bp, synthetic construct
  source 1..75: mol_type = other DNA
tggctgagtaatcaacagggcaatcaatcggttagtggcgagcaactggaatcggcgctcggcacaaatgcggtg

SEQ ID NO: 347689 - DNA, 75 bp, synthetic construct
  source 1..75: mol_type = other DNA
gtggctgctgaaggtgaattctgcaatgtacaagacgaacccattattttgcctccagatgcgctgattggcatt

SEQ ID NO: 347690 - DNA, 75 bp, synthetic construct
  source 1..75: mol_type = other DNA
taaaaattgatggtgtaagagattttattgccccatataaattggataaaaacattaccgctgagtattatgaag

SEQ ID NO: 347691 - DNA, 75 bp, synthetic construct
  source 1..75: mol_type = other DNA
gttatctgaaaaatatcatagtatccccattgatctaaaaagaatttactatataacaattgatgagttcgaatt

SEQ ID NO: 347692 - DNA, 75 bp, synthetic construct
  source 1..75: mol_type = other DNA
ccgtgatggttatggttttgaatctggctggtctgatttctataccacaacacgaaaaccatcagcgggagatgt

SEQ ID NO: 347693 - DNA, 75 bp, synthetic construct
  source 1..75: mol_type = other DNA
ccaaaagcggtgaagtctgcctatgacaatgctgaaaaacgtcttcagaaagatcagaacggtgcggatattcct

SEQ ID NO: 347694 - DNA, 75 bp, synthetic construct
  source 1..75: mol_type = other DNA
atgaaagcccaggcatacccaccatcagtcattcgtaaaggcgctgtgttgtacgcagccctttattacatctct

SEQ ID NO: 347695 - DNA, 75 bp, synthetic construct
  source 1..75: mol_type = other DNA
tcgaatttaccgcaaaaagcaaacgtgcgacccctccggtcgaatatgaaaccagaatcattaaagtttgtcaag

SEQ ID NO: 347696 - DNA, 75 bp, synthetic construct
  source 1..75: mol_type = other DNA
cgacaactacattcccttcgcaggggttcaccggggcgtattatcagttgaataatgacaactttgccccaggaa

SEQ ID NO: 347697 - DNA, 75 bp, synthetic construct
  source 1..75: mol_type = other DNA
acgatctatcaggtcatccgatcaatgtttctgaagggctggaatttgtgcaatcaggtactaacgtgccctatg

SEQ ID NO: 347698 - DNA, 75 bp, synthetic construct
  source 1..75: mol_type = other DNA
tgaatattcacacacgtttgattgcggctggaaagctggtgatttagaaagtggcatcaaaaaacacatcaaagg

SEQ ID NO: 347699 - DNA, 75 bp, synthetic construct
  source 1..75: mol_type = other DNA
gcaatggctacacacttccccgtgcagatcatttaaaccatagtcgttcccgaggcatcgggtcactgtacagtg

SEQ ID NO: 347700 - DNA, 75 bp, synthetic construct
  source 1..75: mol_type = other DNA
atgaatagcggattcacagaaacgctaccgattagcaagctgaaagatgttaaatcattcatcaatgaatacatc

SEQ ID NO: 347701 - DNA, 75 bp, synthetic construct
  source 1..75: mol_type = other DNA
gttttgacccgtcagaatctggtggggatccgtcagtaaaatcaaaacaagaaccacaagtaacttcaaaaccct

SEQ ID NO: 347702 - DNA, 75 bp, synthetic construct
  source 1..75: mol_type = other DNA
attcacgctctaaggtgatttcaacaccgcgcattcttactcagtccggtcagactggttatatttccgtaggta

SEQ ID NO: 347703 - DNA, 75 bp, synthetic construct
  source 1..75: mol_type = other DNA
tcgcctgctcgccagacaaaatggcttccttgacccagtgaactatcgtaatcactttgttactgttctcggcac

SEQ ID NO: 347704 - DNA, 75 bp, synthetic construct
  source 1..75: mol_type = other DNA
acggttacggcgctttctggccagaaccgggttggggtgcgccgtactataccaatgcagttagccaggtaacac

SEQ ID NO: 347705 - DNA, 75 bp, synthetic construct
  source 1..75: mol_type = other DNA
gcccgccaggcccggatgttcatcagttacagcgaagtcagcataaaaaatcccgacaacagcggccaggcgctc

SEQ ID NO: 347706 - DNA, 75 bp, synthetic construct
  source 1..75: mol_type = other DNA
cctgttctgtccaatttcattaactcagttgatgttgcccgtgatcaggtactcattcaatcgctcatgtttgaa

SEQ ID NO: 347707 - DNA, 75 bp, synthetic construct
  source 1..75: mol_type = other DNA
ttccagttataagtaaaattcctcttataggctggattttcagtagcaaggcacacagcaatgaacagcgtatta

SEQ ID NO: 347708 - DNA, 75 bp, synthetic construct
  source 1..75: mol_type = other DNA
ctgcaggcggtcagggcctcctggctggctaaagagaacagggcgcgcattgatgatgtggtggatttcctgaaa

SEQ ID NO: 347709 - DNA, 75 bp, synthetic construct
  source 1..75: mol_type = other DNA
ccgtacggcccgccgtcataccggtgcctatatcaccatcacacagaacatcgtcgactttgactctgataaggc

SEQ ID NO: 347710 - DNA, 75 bp, synthetic construct
  source 1..75: mol_type = other DNA
acgatcgtattcagattagtgcgttttggttatcggaacgacaatctccgtatgcatataattttttgaaaaaaa

SEQ ID NO: 347711 - DNA, 75 bp, synthetic construct
  source 1..75: mol_type = other DNA
cagcagctcccggtttgctgatcccacttttcttacatcatgtgaaagatcagcgtggtattgcagcgttcgttg

SEQ ID NO: 347712 - DNA, 75 bp, synthetic construct
  source 1..75: mol_type = other DNA
tcttttcttacatcatgtgaaagatcagcgtggtattgcagcgttcgttgccttgatgtgcgcagtgggcgctgt

SEQ ID NO: 347713 - DNA, 75 bp, synthetic construct
  source 1..75: mol_type = other DNA
cggtgcctatatcaccatcacacagaacatcgtcgactttgactctgataaggcctccagtgctgcccgcgcggc

SEQ ID NO: 347714 - DNA, 75 bp, synthetic construct
  source 1..75: mol_type = other DNA
aaggggatgacttcacctacggcaatgcgctggagagcactttttttaacaccctggctggcgggcttatgcacg

SEQ ID NO: 347715 - DNA, 75 bp, synthetic construct
  source 1..75: mol_type = other DNA
aaaaaatgcgccaggcgaccgcggcgttaacagcacttagcgatgtcgataacgacgaagaaacgcgcaaaattc

SEQ ID NO: 347716 - DNA, 75 bp, synthetic construct
  source 1..75: mol_type = other DNA
cggatgaactggaaaacatgaccaaccgcatcgcggatttgcgtctcgaacagtttgaagtcaaccagcagcgtg

SEQ ID NO: 347717 - DNA, 75 bp, synthetic construct
  source 1..75: mol_type = other DNA
atctttctgcccaggacaaactggtgcagcaggatcttacggacaccttagccaccctcgacaaaattgatcgcg

SEQ ID NO: 347718 - DNA, 75 bp, synthetic construct
  source 1..75: mol_type = other DNA
gctgactgccacgggttatttctacaccacgctgcgcctctccgggcgttggattgaaaccgtttatctggtgat

SEQ ID NO: 347719 - DNA, 75 bp, synthetic construct
  source 1..75: mol_type = other DNA
aggatgaattcaagtcgatgaaaattacggtgaactgggaaaaagcctggcctgccgtctttatcgctttcctcg

SEQ ID NO: 347720 - DNA, 75 bp, synthetic construct
  source 1..75: mol_type = other DNA
agtgcatctgcacaacgagaagggcgatgaggaggtgacggaagtcaaacgcgactacaaaggcgacgatccgac

SEQ ID NO: 347721 - DNA, 75 bp, synthetic construct
  source 1..75: mol_type = other DNA
gacgaagctgcgcgtattcaggctaacccgctggtgaagcaggaactggaaattaaccagcaattaagtcagcgt

SEQ ID NO: 347722 - DNA, 75 bp, synthetic construct
  source 1..75: mol_type = other DNA
cagcaacaacaaacgctgccctcggcggatgaactggaaaacatgaccaaccgcattgcggatttgcgtctcgaa

SEQ ID NO: 347723 - DNA, 75 bp, synthetic construct
  source 1..75: mol_type = other DNA
agcattatccgtaggtcttggttttggtttacaagaaattttcggtaacttcgtctccggtttgatcattctgtt

SEQ ID NO: 347724 - DNA, 75 bp, synthetic construct
  source 1..75: mol_type = other DNA
acgaacccatgccggaagtcttcttcactgcgtttggtgccagcacgctggatcatgagctgcgtttgtatgttc

SEQ ID NO: 347725 - DNA, 75 bp, synthetic construct
  source 1..75: mol_type = other DNA
atcgcctcaatggtggcctgggcgctgatccgcaacctgccaggtttgctggaagtgctggtgctgtcgcggctg

SEQ ID NO: 347726 - DNA, 75 bp, synthetic construct
  source 1..75: mol_type = other DNA
atcaaagcgttcccacaaacgctgaaagatgaatttaagtcgatgaagatcacggtaaactgggaaaaagcctgg

SEQ ID NO: 347727 - DNA, 75 bp, synthetic construct
  source 1..75: mol_type = other DNA
caggagagcaggccggagggaacaagcagcctgtatatctacagtgaccaggggagttatgaaccgctggcgcgg

SEQ ID NO: 347728 - DNA, 75 bp, synthetic construct
  source 1..75: mol_type = other DNA
aaggagatgacttcacatatggcaacgcgctggagagcaccttctttaacaccatcgctggcgggttgatgcacg

SEQ ID NO: 347729 - DNA, 75 bp, synthetic construct
  source 1..75: mol_type = other DNA
caactggcaaatgacccaaattcgaccatcgtcagtaaatctgacgcggaaacacgccttaaagagtacggcgtt

SEQ ID NO: 347730 - DNA, 75 bp, synthetic construct
  source 1..75: mol_type = other DNA
cggagtttgaaacctcaacaattccgcttgcggccatatcggaacgctatctaggtatgaaacctgccacagcgg

SEQ ID NO: 347731 - DNA, 75 bp, synthetic construct
  source 1..75: mol_type = other DNA
cagtgatgcgctgctgaacgacattgccactgacaatcctgacctggctgcgtcgatgcgggagaatattgcagc

SEQ ID NO: 347732 - DNA, 75 bp, synthetic construct
  source 1..75: mol_type = other DNA
gatattgaggttgagaaagacgccatcaccgcgcgtaaccaggaaattacgcaacagattgaacgtaatgctgca

SEQ ID NO: 347733 - DNA, 75 bp, synthetic construct
  source 1..75: mol_type = other DNA
tgcgaactgagttggtgaccaacaacaggcaaagtgaggcacttgacgcaactctggcccagcgcacgaccgatt

SEQ ID NO: 347734 - DNA, 75 bp, synthetic construct
  source 1..75: mol_type = other DNA
aattcaaagaaatcgtggttgaaattgataatcgtaaaaaagtgcagcagcaattaatcagcgatatcactaatt

SEQ ID NO: 347735 - DNA, 75 bp, synthetic construct
  source 1..75: mol_type = other DNA
atggtgttgtgtccgttaggtgcggttaatcaaatttttgccggatgcggcgtgaatgccttatccggcctacaa

SEQ ID NO: 347736 - DNA, 75 bp, synthetic construct
  source 1..75: mol_type = other DNA
ggacagtacctcgacagggaaacggggctgcactacaatctgcacaggtactatgatccggatgtcgggcggttc

SEQ ID NO: 347737 - DNA, 75 bp, synthetic construct
  source 1..75: mol_type = other DNA
catagacaaaaggcgagaagaaggacgtatcgagtgggaacaggtcagaacagtcaaacagaaggacaaagaaca

SEQ ID NO: 347738 - DNA, 75 bp, synthetic construct
  source 1..75: mol_type = other DNA
tgaaaaacaccaaagaaactgaaatcggtggtgccacaggcgttggcgtacgtattctggatagccagagcggcg

SEQ ID NO: 347739 - DNA, 75 bp, synthetic construct
  source 1..75: mol_type = other DNA
acggtattgtgcgatgatggcgagatcgaacttaacacgccgcgtgaccgtgaaaataccttcgaaccgcaacta

SEQ ID NO: 347740 - DNA, 75 bp, synthetic construct
  source 1..75: mol_type = other DNA
gttgcaagaatcagatatggggaattaaaagagaaagttaatacttttaatgaaattacaaatgatgaaatattc

SEQ ID NO: 347741 - DNA, 75 bp, synthetic construct
  source 1..75: mol_type = other DNA
aacttcggaagaacgtacctgtcggtatccaggttgccagacgtttgttagagaggactggcggtgatgttgatg

SEQ ID NO: 347742 - DNA, 75 bp, synthetic construct
  source 1..75: mol_type = other DNA
ctccgtcgttaaaaaataccgccatcgccctggtgctgatatttatgcccacgctgctggtcgcagcgcagcctg

SEQ ID NO: 347743 - DNA, 75 bp, synthetic construct
  source 1..75: mol_type = other DNA
acctcgatcactgtctggaagatgtgctcagcaatgaacatgagccttccggcaacgcgctgaacgaatttaaag

SEQ ID NO: 347744 - DNA, 75 bp, synthetic construct
  source 1..75: mol_type = other DNA
ctgactggtcatatcatgttccagcaggcggggctgattgccgttacgttgtttattttcggctactccatgtga

SEQ ID NO: 347745 - DNA, 75 bp, synthetic construct
  source 1..75: mol_type = other DNA
aacttgcaagagatgttgactctgtattactgcaatttgtgaaagataatattgatgcttttccttgtcgccata

SEQ ID NO: 347746 - DNA, 75 bp, synthetic construct
  source 1..75: mol_type = other DNA
atgactttacttaacgtctccgacctttcccatcactacgcgcacggtggatttagcggcaaacatcaacaccag

SEQ ID NO: 347747 - DNA, 75 bp, synthetic construct
  source 1..75: mol_type = other DNA
agagtgaagcagataagagtatttctggcgcaatggctggtttcctaagttcaagcgtaatcaatggcagaaaac

SEQ ID NO: 347748 - DNA, 75 bp, synthetic construct
  source 1..75: mol_type = other DNA
gcggttctgccagttggaaacccgttcgggtatataacgatggggttaaaactattatccaattccctaaaacaa

SEQ ID NO: 347749 - DNA, 75 bp, synthetic construct
  source 1..75: mol_type = other DNA
acattctgctgatcatgcgcgggctgtggatagccgccagagcgcaaaccacctttggtcgcgtcatggctggcg

SEQ ID NO: 347750 - DNA, 75 bp, synthetic construct
  source 1..75: mol_type = other DNA
caaaggctggctgcacggcactcagtcacagcttgaatttctgcccgaacgccataccgactttatcttcgcggt

SEQ ID NO: 347751 - DNA, 75 bp, synthetic construct
  source 1..75: mol_type = other DNA
tcacagcttgaatttctccccgaacgccataccgactttatcttcgcggtactggcggaagagctgggattagtg

SEQ ID NO: 347752 - DNA, 75 bp, synthetic construct
  source 1..75: mol_type = other DNA
ttcgtctttctacagtaattgacaaaacgggcttgtcacgttcaacaatctatgactggatcaatccgaaatcgc

SEQ ID NO: 347753 - DNA, 75 bp, synthetic construct
  source 1..75: mol_type = other DNA
aagtggaattaattaactctctggctactgagtgggcattgtcgaatttcacgtatctggcttcggtgaatcagg

SEQ ID NO: 347754 - DNA, 75 bp, synthetic construct
  source 1..75: mol_type = other DNA
attacctgcccaacagtactcgtgttggtgcaaaaatgtttcatgaacttgctcaagaatttatccagcgtgggc

SEQ ID NO: 347755 - DNA, 75 bp, synthetic construct
  source 1..75: mol_type = other DNA
agggaatcagctacaactgatgaccgagtcagatgatgtgatgcaggcgttaatccgcgacatccagctcgcccg

SEQ ID NO: 347756 - DNA, 75 bp, synthetic construct
  source 1..75: mol_type = other DNA
ttccacagtgggtcattgatgcaggtatgttgaaagccggttcgccaattgaaaaatatttcaggtattttgaaa

SEQ ID NO: 347757 - DNA, 75 bp, synthetic construct
  source 1..75: mol_type = other DNA
tccctcaatgggcaattgatgcaggtatcttaaaaaaacattcgccaatcacatattattttcgttatttcgagt

SEQ ID NO: 347758 - DNA, 75 bp, synthetic construct
  source 1..75: mol_type = other DNA
aggattaatccatatcaatggagaggatgacaagctttaccattctgcgctgttaatgctttatgacattgatgc

SEQ ID NO: 347759 - DNA, 75 bp, synthetic construct
  source 1..75: mol_type = other DNA
aaaatacggatgtatggtatagacgctcctgaatctaaacaggcttttggccaaaaagcaaaacaggccttaacc

SEQ ID NO: 347760 - DNA, 75 bp, synthetic construct
  source 1..75: mol_type = other DNA
attccgttaattaaaaccatacttgattttattgttagccttggtttgtttgccttcgttaatttacctgtattg

SEQ ID NO: 347761 - DNA, 75 bp, synthetic construct
  source 1..75: mol_type = other DNA
tactacggttaccagcggttatccaaaaaacaggtatggcacgggccaccatctatgactggttgaaccccaaat

SEQ ID NO: 347762 - DNA, 75 bp, synthetic construct
  source 1..75: mol_type = other DNA
ctactttgtgccaagcgatgatttacttcatgcgatttgcacggcggcacagcgcggggtggatgtcagtattat

SEQ ID NO: 347763 - DNA, 75 bp, synthetic construct
  source 1..75: mol_type = other DNA
atagaaaaatatgatgggataactatctggagattcaggagcggtccgataaaagatgttggtcgtatccagcgg

SEQ ID NO: 347764 - DNA, 75 bp, synthetic construct
  source 1..75: mol_type = other DNA
gcccccggatgcgacgggcagactttgaaaatgttcgaccagcaacgtgatggcaatctatacaagatctggaac

SEQ ID NO: 347765 - DNA, 75 bp, synthetic construct
  source 1..75: mol_type = other DNA
gcgtaacggtatctccttcaatcactggttctggtgcagcgcagcagctgcatctgatcatcaagcctctggatg

SEQ ID NO: 347766 - DNA, 75 bp, synthetic construct
  source 1..75: mol_type = other DNA
taaacgtaatggcgaatttaccgttaacattgcactcatcgacaagggtaaaccgattttaggtgtggtgtatgc

SEQ ID NO: 347767 - DNA, 75 bp, synthetic construct
  source 1..75: mol_type = other DNA
gttctccggacgtgaagtgatggcggagtttcggcgggcgaccggcttgcccgtcgcgactaatatgatcgccac

SEQ ID NO: 347768 - DNA, 75 bp, synthetic construct
  source 1..75: mol_type = other DNA
ggccgggcatgacagcatgttgcttaatattggtggtgcacataacgcatatttcacccgcaatattgtggtact

SEQ ID NO: 347769 - DNA, 75 bp, synthetic construct
  source 1..75: mol_type = other DNA
ctcctaccgttgccgcccgccaggccgccacgcttgaccgtctctcgaatggtcgtgcgttgtttaatctggtca

SEQ ID NO: 347770 - DNA, 75 bp, synthetic construct
  source 1..75: mol_type = other DNA
gcgcgaagcatcgcatcgccatctggcctttatcgaagaaattttgctcgacagaagccgtgaagagagccgccg

SEQ ID NO: 347771 - DNA, 75 bp, synthetic construct
  source 1..75: mol_type = other DNA
tcccggttgggaagtccgccagcactggcaacgttactggctggtagatccgctggacggcaccaaagagtttat

SEQ ID NO: 347772 - DNA, 75 bp, synthetic construct
  source 1..75: mol_type = other DNA
ggaactggcatagcgtcgccatttatttgctggctggatgcctgatttctgcaatgaccgctttgttgatgaaag

SEQ ID NO: 347773 - DNA, 75 bp, synthetic construct
  source 1..75: mol_type = other DNA
atgctggcaaacattgcgcatgatatggtggtgtgtgtgcaacaaccgatgtttaccgaaatgtttggtgccagt

SEQ ID NO: 347774 - DNA, 75 bp, synthetic construct
  source 1..75: mol_type = other DNA
ttccgaccgctcggcggtgtcattttcggtcactttggcgaccgactgggacgtaagcgcatgttaatgctgacc

SEQ ID NO: 347775 - DNA, 75 bp, synthetic construct
  source 1..75: mol_type = other DNA
gatggcggagtttcggcgggcgaccggcttgcccgtcgcgactaacatgatcgccaccaactggcgcgaaatggg

SEQ ID NO: 347776 - DNA, 75 bp, synthetic construct
  source 1..75: mol_type = other DNA
acgtctgcctggcggtgcgcgtaacgacgcaggcccgatgcagtacctgatccccggctggacctttgaccgtaa

SEQ ID NO: 347777 - DNA, 75 bp, synthetic construct
  source 1..75: mol_type = other DNA
attcataagaagtgtacaattacattcaatggcactacagacaaatgctgtagaaaatcagcttttaaatttatg

SEQ ID NO: 347778 - DNA, 75 bp, synthetic construct
  source 1..75: mol_type = other DNA
ccggttgatcacggttatctgcaacaaattgcgcaagcggcggatcgtctgggctataccggtgtgctgatccca

SEQ ID NO: 347779 - DNA, 75 bp, synthetic construct
  source 1..75: mol_type = other DNA
catggactgcaagctgggtatcgggtgcatttggcgctatggggattgttatgccactggttatccctttatgga

SEQ ID NO: 347780 - DNA, 75 bp, synthetic construct
  source 1..75: mol_type = other DNA
ttagctgcctacacactgattgccggaaccatgtcaacggcacatgacggagaaatgctgggtaagaaatggtct

SEQ ID NO: 347781 - DNA, 75 bp, synthetic construct
  source 1..75: mol_type = other DNA
gattcatgacgtaatagttcaggccgcgtggtttgtaaaggcatcactggagcagaatgcactatcgggcaactc

SEQ ID NO: 347782 - DNA, 75 bp, synthetic construct
  source 1..75: mol_type = other DNA
tagaactattgtcgatggtctttttgacaaggcatatctggttattggtgtcggttcgagccaagaaaaagtgac

SEQ ID NO: 347783 - DNA, 75 bp, synthetic construct
  source 1..75: mol_type = other DNA
cgcactgcagcctggtgaaaacgtcaataacattaacagcggtgatccgcgttttattgttgaaccctcaattac

SEQ ID NO: 347784 - DNA, 75 bp, synthetic construct
  source 1..75: mol_type = other DNA
cattcagaactcatatgagtaatgctggcccactggatcagcaggatgaatatcagtctcttgaaagtgctaact

SEQ ID NO: 347785 - DNA, 75 bp, synthetic construct
  source 1..75: mol_type = other DNA
cgcgatggatgttgcccctgaatatgccgatatacgccaggttgagtcatcgacagcggtgctgtacctgtttag

SEQ ID NO: 347786 - DNA, 75 bp, synthetic construct
  source 1..75: mol_type = other DNA
ttacaccccaagcccgggcgtcatctacccgacgctggattttctccaggagcagtcgctgattaccatccgcga

SEQ ID NO: 347787 - DNA, 75 bp, synthetic construct
  source 1..75: mol_type = other DNA
tctggatattctctcgcgcgatgacagccacggttacgagttgattaaagcgattgaaaatctgacccaggggaa

SEQ ID NO: 347788 - DNA, 75 bp, synthetic construct
  source 1..75: mol_type = other DNA
ctcatgtaaccccggctcgcctgcctggtggtttcaccattgaggatgcgaaggtgttacatgaagaccttgtac

SEQ ID NO: 347789 - DNA, 75 bp, synthetic construct
  source 1..75: mol_type = other DNA
gcgatgaggccatcaaagcatttgtcgtgctgaatgagggtgaaacattaagtgaagaagaattcttctgtttct

SEQ ID NO: 347790 - DNA, 75 bp, synthetic construct
  source 1..75: mol_type = other DNA
accgccgctatcgactgacgatacggcggaaattctcttcacctccggcaccacctcccgaccgaaaggtgtggt

SEQ ID NO: 347791 - DNA, 75 bp, synthetic construct
  source 1..75: mol_type = other DNA
atgaagccaacgatgctactcatgattaccgtattcctgacttttccagccatttctcaggccgagtcgccattc

SEQ ID NO: 347792 - DNA, 75 bp, synthetic construct
  source 1..75: mol_type = other DNA
acaacatatccgcgaagctattgtggcgatggagcgtaataatcagaataactactgggaagcgctgggtaaggt

SEQ ID NO: 347793 - DNA, 75 bp, synthetic construct
  source 1..75: mol_type = other DNA
aggtaatgtcttactgccaggattaattaaacgcgatttccctcattccgtcgccagacttaccggcgcatattc

SEQ ID NO: 347794 - DNA, 75 bp, synthetic construct
  source 1..75: mol_type = other DNA
ggtacgtgccgtagcgccgaaatacgattcagcactgcccgacgccgacccgcgcatcgttgcgctcgatgtgct

SEQ ID NO: 347795 - DNA, 75 bp, synthetic construct
  source 1..75: mol_type = other DNA
ctctgactcctcaggccgtcggcgttgtacagcaggccattgatgacctgcgatacactcttcaggaaaaatcct

SEQ ID NO: 347796 - DNA, 75 bp, synthetic construct
  source 1..75: mol_type = other DNA
ggttcgtaagccaggacccgataggattaaacggtgggttgaacttatatgcttatgcgcctaatccgttaggtt

SEQ ID NO: 347797 - DNA, 75 bp, synthetic construct
  source 1..75: mol_type = other DNA
ttgcgggtcactctgaaaactttagccatcttgagcgcagcttcacgttgcgaggtcagacggtgtatgcgctaa

SEQ ID NO: 347798 - DNA, 75 bp, synthetic construct
  source 1..75: mol_type = other DNA
acgcacgtcgtcgttctggcgagtatcgcgtatggagcgcggcggcttcgaccggcgaagagccgtacagcattg

SEQ ID NO: 347799 - DNA, 75 bp, synthetic construct
  source 1..75: mol_type = other DNA
tgtttgcggggcactctgaaaatttcagccaccttgagcgcagcttcacgctgcgtgggcagacggtgtatgcgc

SEQ ID NO: 347800 - DNA, 75 bp, synthetic construct
  source 1..75: mol_type = other DNA
gtctattacgtgattattggctggcttccggcgatcctcatcagtcacggctatagcgaagcacaggcgggttca

SEQ ID NO: 347801 - DNA, 75 bp, synthetic construct
  source 1..75: mol_type = other DNA
acttttcttacatcatgtgaaagatcagcgtggtattgcagcgttcgttgccttgatgtgcgcagtgggcgcggt

SEQ ID NO: 347802 - DNA, 75 bp, synthetic construct
  source 1..75: mol_type = other DNA
gagctggcgaactatgttgattttgccccgctgaatttactggcgaaacagtacaccgtgccggggccgtttgat

SEQ ID NO: 347803 - DNA, 75 bp, synthetic construct
  source 1..75: mol_type = other DNA
ggcgcggtggaatccgatcagggagtgccattcgaagaatcagaagcgtacctgatgaataaagacaaggttgat

SEQ ID NO: 347804 - DNA, 75 bp, synthetic construct
  source 1..75: mol_type = other DNA
tgaacatcttgtagaagtaagcgagaattccgaaggaaatcatataaaagacaatgactcaatgtctattcgtta

SEQ ID NO: 347805 - DNA, 75 bp, synthetic construct
  source 1..75: mol_type = other DNA
caacgggcacacccatctgttattatatttataatgaggataaatcttccttaggttatggtccaacatccaata

SEQ ID NO: 347806 - DNA, 75 bp, synthetic construct
  source 1..75: mol_type = other DNA
gcacacccgtctgttattatattcataatgaggataaaccttccttaggttatggtccaacagccaataattggt

SEQ ID NO: 347807 - DNA, 75 bp, synthetic construct
  source 1..75: mol_type = other DNA
gcaggtgctggaacaccgggtgggtggggaccggataatgaagaaaaagcccgtcatcaggaggttcagcaacaa

SEQ ID NO: 347808 - DNA, 75 bp, synthetic construct
  source 1..75: mol_type = other DNA
tgccagtaaggataccgggaatgataatagctgggatattggtggtggttgtgaaggctcacgggaacagtgtgc

SEQ ID NO: 347809 - DNA, 75 bp, synthetic construct
  source 1..75: mol_type = other DNA
agcgtctggtgcacgttacaccgacggaatctatgttttctggtcgaaaggcgaggaagcgactgtctataaacg

SEQ ID NO: 347810 - DNA, 75 bp, synthetic construct
  source 1..75: mol_type = other DNA
accggcgttgcgtccatgcaatctgcacaaacaggtcacatcacgttcatggttaacccaaaataccgtgagcat

SEQ ID NO: 347811 - DNA, 75 bp, synthetic construct
  source 1..75: mol_type = other DNA
gacaaacaaggataagattgatgcggtaatccgtttacctgtacttaaaaaggatcttcacggacaggattttgc

SEQ ID NO: 347812 - DNA, 75 bp, synthetic construct
  source 1..75: mol_type = other DNA
gtggattgaagaggctggcgaccatgacgttatcattgataacggcgcaccctccttcatcccgttatcgagtta

SEQ ID NO: 347813 - DNA, 75 bp, synthetic construct
  source 1..75: mol_type = other DNA
aaatcagcattcattggttaatctggaagcgcaaaataacaaactgacaaaaattaatatttctgatagttataa

SEQ ID NO: 347814 - DNA, 75 bp, synthetic construct
  source 1..75: mol_type = other DNA
ctggatgtggtggttctgatgcgggagttttgaacgcaggtttcaatgtgcttatggcaaatgatattttgcctt

SEQ ID NO: 347815 - DNA, 75 bp, synthetic construct
  source 1..75: mol_type = other DNA
ttgtcggcacgctggcgatgttcctcgtcggcggcgggattgtggtacatggaattgcgccgctgcatcacgcca

SEQ ID NO: 347816 - DNA, 75 bp, synthetic construct
  source 1..75: mol_type = other DNA
atgaaaatttttgcaatagtcattacatgtatgctggcatcgattgcaggattatggctttatatggatcctggt

SEQ ID NO: 347817 - DNA, 75 bp, synthetic construct
  source 1..75: mol_type = other DNA
atgccagggagggtattaatatcgctattgttgagcgttacaggattattaagtggctgtgccagccataatgaa

SEQ ID NO: 347818 - DNA, 75 bp, synthetic construct
  source 1..75: mol_type = other DNA
ggcctgcggcacacggatactgggtgtaaaagagttcgggtgtgataacccggactgtcatcacgtaaagtacct

SEQ ID NO: 347819 - DNA, 75 bp, synthetic construct
  source 1..75: mol_type = other DNA
atgcacaaatggtgaaacagttcctgagtcgtgacccgttcgaatgcgtgctgtgtggcggccggatggtatacc

SEQ ID NO: 347820 - DNA, 75 bp, synthetic construct
  source 1..75: mol_type = other DNA
attaattacagcataacgattaatgatacacgtacaggtaaccagtatcagcggaaactggatcgtaccacctgt

SEQ ID NO: 347821 - DNA, 75 bp, synthetic construct
  source 1..75: mol_type = other DNA
cgcaaagtagcggcacgacggtaaaaatgaccattatcagcgaagcgggtgctcagaccacgcagacgcctgatg

SEQ ID NO: 347822 - DNA, 75 bp, synthetic construct
  source 1..75: mol_type = other DNA
tactggcgaaaaaacaggcgcaaaatatcagtcaaaacctgccgattaaatctgcgggatataccttagtgctgg

SEQ ID NO: 347823 - DNA, 75 bp, synthetic construct
  source 1..75: mol_type = other DNA
ttgcttaacgtgagttttcgttccactgagcgtcagacccctgataacccggactgtcagcacgtaaagtacctg

SEQ ID NO: 347824 - DNA, 75 bp, synthetic construct
  source 1..75: mol_type = other DNA
cacagccaaccagtgctggacgtccttcctggatgcgggcggtctgcgcgatatcgaggttgaggcagtcaccaa

SEQ ID NO: 347825 - DNA, 75 bp, synthetic construct
  source 1..75: mol_type = other DNA
tgaagaagccaccaatagcggcttcccggctggcgcattacaacggaggagcgagtctgagcttccgttacctgg

SEQ ID NO: 347826 - DNA, 75 bp, synthetic construct
  source 1..75: mol_type = other DNA
catatcacgacggaatcacagtggagaagcctggtgctgaaagccggcggaaaatactggcatgtgtacatgtcg

SEQ ID NO: 347827 - DNA, 75 bp, synthetic construct
  source 1..75: mol_type = other DNA
gaaaatactggcatgtgtacatgtcgaagaaaacggccggcgggaggaatacggcgcgctacctgggtcgttatc

SEQ ID NO: 347828 - DNA, 75 bp, synthetic construct
  source 1..75: mol_type = other DNA
gactgggtgcacctggtcttcaccctgccggacacgctgtggccggtgttcgaaagcaaccgctggctgctgaat

SEQ ID NO: 347829 - DNA, 75 bp, synthetic construct
  source 1..75: mol_type = other DNA
atttatgatctgtattataaacaaagttgaagatacagaacttggattgaaattaactcttgaaaacggcaacaa

SEQ ID NO: 347830 - DNA, 75 bp, synthetic construct
  source 1..75: mol_type = other DNA
tatcgctttaaggctgctaatggcctgtttggggcggcgcagtccatcaaccgcctgcccctgttcggaagcaaa

SEQ ID NO: 347831 - DNA, 75 bp, synthetic construct
  source 1..75: mol_type = other DNA
agtctcatcaggcgatgctggaagccgatcgcatacaacgtatccgtcagcagctaacgggtatcagtgccctgt

SEQ ID NO: 347832 - DNA, 75 bp, synthetic construct
  source 1..75: mol_type = other DNA
agtctcatcaggcgatgctggaagccgatcgcatacaacgtatccgtcagcagttaacgggcatcagtgccctgt

SEQ ID NO: 347833 - DNA, 75 bp, synthetic construct
  source 1..75: mol_type = other DNA
atactgaacttgatctgtcagcctttaactactggatagccaaaaagacctttagcctgaaccgttcgtctttct

SEQ ID NO: 347834 - DNA, 75 bp, synthetic construct
  source 1..75: mol_type = other DNA
tctccgatgtctgtgaagccggagaccgctaccttgacgaaatctttgaacgcatccaaaccgaactcaataaaa

SEQ ID NO: 347835 - DNA, 75 bp, synthetic construct
  source 1..75: mol_type = other DNA
ctgaggccggggaacggggtgaagccccgaacgccgcccttccgggggctgaaaccgtgcaggcaccgacgaaca

SEQ ID NO: 347836 - DNA, 75 bp, synthetic construct
  source 1..75: mol_type = other DNA
cgttgttattgagatcccggctaacgcagatccaatcaaatacgaaatcgacaaagagagcggcgcactgttcgt

SEQ ID NO: 347837 - DNA, 75 bp, synthetic construct
  source 1..75: mol_type = other DNA
gttgtaataaagaaaggttaaagagtatttatattcgcttggtttcagaactcacgcagatgagtgaagaaacta

SEQ ID NO: 347838 - DNA, 75 bp, synthetic construct
  source 1..75: mol_type = other DNA
tcttccatccccttgaaaaaacaccatttatggtctgtattataaacaaagtagaagatacagaacttggattga

SEQ ID NO: 347839 - DNA, 75 bp, synthetic construct
  source 1..75: mol_type = other DNA
taccaggaaattcgaccgtcgatctgcgggaagttgcagtgccgacgccggggattaaccaggtactgatcaaaa

SEQ ID NO: 347840 - DNA, 75 bp, synthetic construct
  source 1..75: mol_type = other DNA
cgttctgaaaatgaccgacgaagccggtgaagatgcgaaactggttgcggttccgcacagcaagctgagcaaaga

SEQ ID NO: 347841 - DNA, 75 bp, synthetic construct
  source 1..75: mol_type = other DNA
caaagacctcgaaaaaggcaagtgggttaaagttgaaggttgggaaaacgcagaagccgctaaagctgaaatcgt

SEQ ID NO: 347842 - DNA, 75 bp, synthetic construct
  source 1..75: mol_type = other DNA
atgattagtatcttagtagaactattaaaatctggtatggattttttcatcaggaaaaaaatagtggaaaaagaa

SEQ ID NO: 347843 - DNA, 75 bp, synthetic construct
  source 1..75: mol_type = other DNA
tatctaaaggttttgattttttcatcaaaaggaaaaccttagagaaggaagtacaaactactaatgccgaagggc

SEQ ID NO: 347844 - DNA, 75 bp, synthetic construct
  source 1..75: mol_type = other DNA
tgcggccaggaggaagcagacgcgaaaccacaggtacacagggtaatcagccaccaacgggaggcgacgccactt

SEQ ID NO: 347845 - DNA, 75 bp, synthetic construct
  source 1..75: mol_type = other DNA
tggcggaccagatcacgtccatttgttaattaactatcctcccaaactggcgatatccagtctggtaaacagcct

SEQ ID NO: 347846 - DNA, 75 bp, synthetic construct
  source 1..75: mol_type = other DNA
atatatacaaaaaagaatacgctggttttttcacggaagattccattgagaatcttgaagatgtaataaatgtta

SEQ ID NO: 347847 - DNA, 75 bp, synthetic construct
  source 1..75: mol_type = other DNA
gaagtacaaaaaacaaattccgaggggcagattgaaacaaacaaagaagagattgaaaaagtgtcattccactgg

SEQ ID NO: 347848 - DNA, 75 bp, synthetic construct
  source 1..75: mol_type = other DNA
aaccgcgcgtaattcacatcgaggccaccagcgaacaggaagcgcgtcagcaatctcctgatggctgcgtgatgg

SEQ ID NO: 347849 - DNA, 75 bp, synthetic construct
  source 1..75: mol_type = other DNA
tatgcccgcgctaattattccgctaacacacaatgcgctaaacgatctggctatccgtggtgcggcgctggacat

SEQ ID NO: 347850 - DNA, 75 bp, synthetic construct
  source 1..75: mol_type = other DNA
atgcaaagtgttgatgtagccattgttggcggcggcatggtcgggctggcggttgcctgcggcttacaggggagc

SEQ ID NO: 347851 - DNA, 75 bp, synthetic construct
  source 1..75: mol_type = other DNA
atggctggggcacagcatacccaaactcaccctaaatttatatacaccttcctggcggtgcaccgtgattgcatg

SEQ ID NO: 347852 - DNA, 75 bp, synthetic construct
  source 1..75: mol_type = other DNA
atggctggaacacagcatacccaaactcaccctaaatttatatacaccttcctggcggtgcaccgtgattgcatg

SEQ ID NO: 347853 - DNA, 75 bp, synthetic construct
  source 1..75: mol_type = other DNA
caccagcgaacaggaagcccgccagcaatccccggctggctgcgtgatggtattcgccgcccgtattcgtcagga

SEQ ID NO: 347854 - DNA, 75 bp, synthetic construct
  source 1..75: mol_type = other DNA
tcttgtaactttcccactcttgagctccacatagtccaaacgccggatgcaaaaaaatcacacgtgcatttctga

SEQ ID NO: 347855 - DNA, 75 bp, synthetic construct
  source 1..75: mol_type = other DNA
tccaatggactgggactggatcaaagcgttcccgcaaagcctgaaagatgaatttaagtcgatgaaaatcacggt

SEQ ID NO: 347856 - DNA, 75 bp, synthetic construct
  source 1..75: mol_type = other DNA
gaagtcaacagcgaagttcacgatgcgttattgcaagtagttgatatgcgtcgcgaattgctggatcagcttaac

SEQ ID NO: 347857 - DNA, 75 bp, synthetic construct
  source 1..75: mol_type = other DNA
agaaacgcgcaaaattctgagcacgctttcgttgcgccagctggaaactcgcgttgcccaggcgctggacgattt

SEQ ID NO: 347858 - DNA, 75 bp, synthetic construct
  source 1..75: mol_type = other DNA
gcgctgcggtggtgaaaaacgtcaccatgggcagtctgttgtttgcgattatcgcctcaatggtggcctgggcgt

SEQ ID NO: 347859 - DNA, 75 bp, synthetic construct
  source 1..75: mol_type = other DNA
taaccagcagcagttaatgagcgtatcgaaaaatctgaaatccatcctgacgcagcaaattttttgggtgaacag

SEQ ID NO: 347860 - DNA, 75 bp, synthetic construct
  source 1..75: mol_type = other DNA
caccatgggcagtctgttgtttgcgattatcgcctcaatggtggcctgggcgttgattcgcaacctgcctggttt

SEQ ID NO: 347861 - DNA, 75 bp, synthetic construct
  source 1..75: mol_type = other DNA
gtcagcttgtggcacagcttgaaaaagtgcttgcaacgacggattacaaaaaattctttgcgagcgtcgcaggat

SEQ ID NO: 347862 - DNA, 75 bp, synthetic construct
  source 1..75: mol_type = other DNA
gtgtccggatacccgtcgggcgcggggtgtgcggcactgcggttgcccgcaatcaagtgcagcgtatcgaggatg

SEQ ID NO: 347863 - DNA, 75 bp, synthetic construct
  source 1..75: mol_type = other DNA
actccggtcaataaagtcagatatgcattattcgggtggcatattctccagatacaaagctgaaaccgccgggat

SEQ ID NO: 347864 - DNA, 75 bp, synthetic construct
  source 1..75: mol_type = other DNA
catcctcacggcgctggtactgaatcaccggagctggcaccacagtaaccatgaccatgaggagctgtgtcgcca

SEQ ID NO: 347865 - DNA, 75 bp, synthetic construct
  source 1..75: mol_type = other DNA
gtgtacggatccccgtcgggcgtggcgtgtgcggcactgcggttgcccgcaatcaagtacaacgaatcgaggatg

SEQ ID NO: 347866 - DNA, 75 bp, synthetic construct
  source 1..75: mol_type = other DNA
ttcacgccttcgacgggcatattgcctgcgatgcggcgagtaattctgaaattgtcctgccattggcggtgaaaa

SEQ ID NO: 347867 - DNA, 75 bp, synthetic construct
  source 1..75: mol_type = other DNA
gacacgcttcctggcgttaaaccacaacttatccgtcaggcaatgggattaaacgatttgcctgaatggctgcgc

SEQ ID NO: 347868 - DNA, 75 bp, synthetic construct
  source 1..75: mol_type = other DNA
cgccgacaccatagaaaaacaggtcaacaacgccctggcccgcgtcaacaacctgacgcaatccatcctggcaaa

SEQ ID NO: 347869 - DNA, 75 bp, synthetic construct
  source 1..75: mol_type = other DNA
ttctttgtgtgtcattttttgttctgcaaggatgtagtgactctaaacacctaaaacaaactactaatactaata

SEQ ID NO: 347870 - DNA, 75 bp, synthetic construct
  source 1..75: mol_type = other DNA
gaacagttgcagggtcgccgttcagcggtgtttattcctttcgctggcgtaacgcaaacctgggatgattacacc

SEQ ID NO: 347871 - DNA, 75 bp, synthetic construct
  source 1..75: mol_type = other DNA
atggaacaagcgcatacccagcttatcgctcagttgaacgagcgtattttagcggcggataacacgccgctttat

SEQ ID NO: 347872 - DNA, 75 bp, synthetic construct
  source 1..75: mol_type = other DNA
gatcaagcaagtggcgcttgaccaacagcaacggcctattgaatacagcatcagccactgtcgcagcgatctata

SEQ ID NO: 347873 - DNA, 75 bp, synthetic construct
  source 1..75: mol_type = other DNA
cccgaattattaaagccgctggctattcctggaaaggcttgcgcgcagcatggattaatgaagcggccttccgtc

SEQ ID NO: 347874 - DNA, 75 bp, synthetic construct
  source 1..75: mol_type = other DNA
cgacgctgccgggtaaagcctggctggaacatgcgctgccgctaattgctgaacagttgcagggtcgccgctcag

SEQ ID NO: 347875 - DNA, 75 bp, synthetic construct
  source 1..75: mol_type = other DNA
taaaggtcacgcaacgctgggtggcccgaacaccacctatgtgtttaaggccggtgaagaagcggttccgctgga

SEQ ID NO: 347876 - DNA, 75 bp, synthetic construct
  source 1..75: mol_type = other DNA
gcggtttacgcggtgctgtttgcgggctggtcaagtaacaacaaatactcgttgctgggtgcgatgcgtgcttct

SEQ ID NO: 347877 - DNA, 75 bp, synthetic construct
  source 1..75: mol_type = other DNA
cgacgctgccgggaaaagcctggctggaacatgcgctgccgctgattgctgaacagttgcagggtcgccgttcag

SEQ ID NO: 347878 - DNA, 75 bp, synthetic construct
  source 1..75: mol_type = other DNA
tagtgaaacgcggcgcgctgtatattggctggagcgcaggcgctaacctcgcttgcccaaccattcgcacgacca

SEQ ID NO: 347879 - DNA, 75 bp, synthetic construct
  source 1..75: mol_type = other DNA
atggaactgcttttattgagtaactcaacgctgccgggtaaagcctggctggaacatgcactgccgctgattgct

SEQ ID NO: 347880 - DNA, 75 bp, synthetic construct
  source 1..75: mol_type = other DNA
gttcctcacaggaaaattggtctggaagcaggaaatgttttgctggaacgaattaaagaaggtaactggagcaat

SEQ ID NO: 347881 - DNA, 75 bp, synthetic construct
  source 1..75: mol_type = other DNA
cagggctttcgcgatctcttttccggcgctaatccggcgaaaaaactgctgcgcgatattggtctgaaactggct

SEQ ID NO: 347882 - DNA, 75 bp, synthetic construct
  source 1..75: mol_type = other DNA
gacataactgtcgcggtttgttttgccataccggaaaaaccggcgcagcgtcaaaagctgttagcttcgccagtg

SEQ ID NO: 347883 - DNA, 75 bp, synthetic construct
  source 1..75: mol_type = other DNA
gtattgaaaacgtatggcgaagaacgtttcgctaaacgtattgcgcgcgccattgtcgagcgtaaccgcgaacag

SEQ ID NO: 347884 - DNA, 75 bp, synthetic construct
  source 1..75: mol_type = other DNA
ttcctggttgcgcaacaaagccgatattccgctgactttctgggattatcagcatcacgcgctggtagcgaccat

SEQ ID NO: 347885 - DNA, 75 bp, synthetic construct
  source 1..75: mol_type = other DNA
agctgttatcacggtatggaagtgtgggacaaagacagctttggtcacatttcgtttgacgatcaaagcatgggc

SEQ ID NO: 347886 - DNA, 75 bp, synthetic construct
  source 1..75: mol_type = other DNA
ttcgtttgacgatcaaagcatgggctatagccatcttgggcatatcgttgaaaactcagtgattcactacgcgct

SEQ ID NO: 347887 - DNA, 75 bp, synthetic construct
  source 1..75: mol_type = other DNA
tacgatgtgcaaagatggtcgctgcccggacattaataaaaaagtacaaaccggtgatggcatcaacaatgatgt

SEQ ID NO: 347888 - DNA, 75 bp, synthetic construct
  source 1..75: mol_type = other DNA
gggccaggttgccccagatgcccgtgaaaatgtcgcgccaaataacgtcgataatagcggggttaatagcaactc

SEQ ID NO: 347889 - DNA, 75 bp, synthetic construct
  source 1..75: mol_type = other DNA
gcaacatgtgctacagcctgcgggatatcagataatcctggccgaatcacgtcaccgcctggaacaagaagaaaa

SEQ ID NO: 347890 - DNA, 75 bp, synthetic construct
  source 1..75: mol_type = other DNA
ggcggctttcgatcatcagcttccactcgctggaagaccgcattgtgaaacgttttatgcgtgaaaacagccgcg

SEQ ID NO: 347891 - DNA, 75 bp, synthetic construct
  source 1..75: mol_type = other DNA
cattgtcgagcgtaaccgcgaacagccgatgacccgcaccaaagaactggcggaagtcgtggctgctgcaacgcc

SEQ ID NO: 347892 - DNA, 75 bp, synthetic construct
  source 1..75: mol_type = other DNA
gaaggatttgaagcgcatggcttcagaaccatcagaaacaaacgctataccggcgatggaggcattgacggccag

SEQ ID NO: 347893 - DNA, 75 bp, synthetic construct
  source 1..75: mol_type = other DNA
gaccatcgtcagctcctgagcgaacaagtcaacgccttccatgctctggcggcatcgttaaaggaacacgcctga

SEQ ID NO: 347894 - DNA, 75 bp, synthetic construct
  source 1..75: mol_type = other DNA
aaattttccttggccgcgatgaccatcgccaactgctgaatgatcaagttaacgctttccattcgctggctgcgt

SEQ ID NO: 347895 - DNA, 75 bp, synthetic construct
  source 1..75: mol_type = other DNA
acatggcatgtccgggcatatcaaagcagaaaactgcacgcatattgccctggtcgaacgtaaatttatgggtat

SEQ ID NO: 347896 - DNA, 75 bp, synthetic construct
  source 1..75: mol_type = other DNA
caggttgccagtgtggttggcggtggatttacaccttttattgccgctgcactcatcacttactttgccgggaac

SEQ ID NO: 347897 - DNA, 75 bp, synthetic construct
  source 1..75: mol_type = other DNA
cagctcgaatcaacccggcgaactcttgaaagtatggttgctggtgggttgcttgagcgtgtgacggtgtatgag

SEQ ID NO: 347898 - DNA, 75 bp, synthetic construct
  source 1..75: mol_type = other DNA
atgagaatgaccagtcgcaaaaaagagatacttagctactttgaaccggataacctcgaatgggtgactggtgag

SEQ ID NO: 347899 - DNA, 75 bp, synthetic construct
  source 1..75: mol_type = other DNA
aagagtggtgatggcagtgattccggagaagaaaatgaagactctggagggaactgcgtgaccggaagtggtggt

SEQ ID NO: 347900 - DNA, 75 bp, synthetic construct
  source 1..75: mol_type = other DNA
agataacggtggtgaaggggcagacggttcaggtcgggaccagaaaagaagggggccacgaccagagtatcacgg

SEQ ID NO: 347901 - DNA, 75 bp, synthetic construct
  source 1..75: mol_type = other DNA
acgtaccatgaggacaaccgttcgccggggagcctgccggggacgaagacgcagatgacgatacggtcgaagacc

SEQ ID NO: 347902 - DNA, 75 bp, synthetic construct
  source 1..75: mol_type = other DNA
acctataaaggaagcggttttaatgagttgcgctttgaggatgcgacggataaggaacaggtctatatccacgcg

SEQ ID NO: 347903 - DNA, 75 bp, synthetic construct
  source 1..75: mol_type = other DNA
tgctgggtgagggtgtcacaggcgtgggcggggccggggttcggtaacctggcgataccgcgtgtgggtcaggaa

SEQ ID NO: 347904 - DNA, 75 bp, synthetic construct
  source 1..75: mol_type = other DNA
gtgagggtgtcacaggcgtgggcggggccggggtttggtaacctggcgataccgcgcgtgggccaggaggtgatt

SEQ ID NO: 347905 - DNA, 75 bp, synthetic construct
  source 1..75: mol_type = other DNA
ggaactggcatagcgtcgccatgtatttgctggctggatgtctgatttctgcaataaccgctttgttgatgaaag

SEQ ID NO: 347906 - DNA, 75 bp, synthetic construct
  source 1..75: mol_type = other DNA
cagctgcatggatgcaacgcgcggaggaaaccgggcttttcgggccactggcgttggcggcaggcgatccgctgc

SEQ ID NO: 347907 - DNA, 75 bp, synthetic construct
  source 1..75: mol_type = other DNA
attatgcggcaatgaacgaccacaggttgtggctcaagggattcgcctcgggcgtttcacggttaaacagccaca

SEQ ID NO: 347908 - DNA, 75 bp, synthetic construct
  source 1..75: mol_type = other DNA
aaaggagacgcagggaacggttgaagaaggaaggcacatcaagacgggactggattctggaacctgacgagttac

SEQ ID NO: 347909 - DNA, 75 bp, synthetic construct
  source 1..75: mol_type = other DNA
caatttcgataagatcttatgggcgatttttatcggtatcatgcttctatgataagctatttataaaaaacattt

SEQ ID NO: 347910 - DNA, 75 bp, synthetic construct
  source 1..75: mol_type = other DNA
gattcaggtacctcttttgctactgtcagcagcgattgcgctggcggttacaatttcgataagatcttatgggcg

SEQ ID NO: 347911 - DNA, 75 bp, synthetic construct
  source 1..75: mol_type = other DNA
actggcaaaaagctaatgatctgtcaaaagcaagatttacagcacaagaacaggctgaagcagcgtttagaaacc

SEQ ID NO: 347912 - DNA, 75 bp, synthetic construct
  source 1..75: mol_type = other DNA
gtcccgatgaaggaacgctttcgttaagtcgcgcccgacgagctgcattaggcagttttgccggtgccgtcgtcg

SEQ ID NO: 347913 - DNA, 75 bp, synthetic construct
  source 1..75: mol_type = other DNA
cattaccgccgcactggtgtttaatcgcgagtttttcccgcaagtaagcccggcgatgggaacgctcgccgcatt

SEQ ID NO: 347914 - DNA, 75 bp, synthetic construct
  source 1..75: mol_type = other DNA
acgtaagcgcatgttaatgctgaccgtctggatgatgggcatcgcgacagccttgattggtattcttccttcctt

SEQ ID NO: 347915 - DNA, 75 bp, synthetic construct
  source 1..75: mol_type = other DNA
caatcaaatatctggccagtatctatttattatcgtttgctttcatttgattatttttctgcgcgattggattca

SEQ ID NO: 347916 - DNA, 75 bp, synthetic construct
  source 1..75: mol_type = other DNA
tcggccattttggcgaccgtctgggacgtaaacgcatgttaatgctgaccgtctggatgatgggcatcgcaacag

SEQ ID NO: 347917 - DNA, 75 bp, synthetic construct
  source 1..75: mol_type = other DNA
tcggccattttggcgaccgcctggggcgtaagcgcatgttgatgctgactgtctggatgatggggatcgcaacag

SEQ ID NO: 347918 - DNA, 75 bp, synthetic construct
  source 1..75: mol_type = other DNA
gacggatgtgaaggctgaccacacggagaccattggtaacgaccagaagataacggtggtgaaggggcagacggt

SEQ ID NO: 347919 - DNA, 75 bp, synthetic construct
  source 1..75: mol_type = other DNA
ccagctaacgctggcgtgggctgccgcgctgatattaccgctgaccacaccgtcgatgatggcagacttcagcgc

SEQ ID NO: 347920 - DNA, 75 bp, synthetic construct
  source 1..75: mol_type = other DNA
gtggtcatcggcccttttatcaacgcgagtgcagtcttactgggtggcgttatcggcgcactgctcagccaacgt

SEQ ID NO: 347921 - DNA, 75 bp, synthetic construct
  source 1..75: mol_type = other DNA
atggaggcaattcatttcttgatgtattcagtacatatatggggcaggttatttctgaatttatgcatagtaatg

SEQ ID NO: 347922 - DNA, 75 bp, synthetic construct
  source 1..75: mol_type = other DNA
ttttgttgaggtgttgaaaaaaaatgcgctttcagtctcacatattcctgatgttgcaggggatgaaaagtgttc

SEQ ID NO: 347923 - DNA, 75 bp, synthetic construct
  source 1..75: mol_type = other DNA
gtaccgcggtgtcggcgtctcctatcgaatgattaacctggttagcaggatgcataaccggccaatcatcgagat

SEQ ID NO: 347924 - DNA, 75 bp, synthetic construct
  source 1..75: mol_type = other DNA
cgtcgatgatggcagacttcaagcgccgtaggcggtttattgctgctggcaaccggattacgcatctgtggcatt

SEQ ID NO: 347925 - DNA, 75 bp, synthetic construct
  source 1..75: mol_type = other DNA
gctgctcgggagggctttggcgagttggtgattgcggaactgcttgaccatacggacacccaaaacgcaggcgtt

SEQ ID NO: 347926 - DNA, 75 bp, synthetic construct
  source 1..75: mol_type = other DNA
catgaagctatgtggagattagataaaaacaacaatatttcggttggtatgatacatgaccttctggatcctgag

SEQ ID NO: 347927 - DNA, 75 bp, synthetic construct
  source 1..75: mol_type = other DNA
atgtcccgtatatcctatagcaaaacagcatcatatgacagacggccactggagcatctttccctgtcagatttc

SEQ ID NO: 347928 - DNA, 75 bp, synthetic construct
  source 1..75: mol_type = other DNA
atcgtctcgccttattaaatcgtttgagcctatcacattattgagtcggacagttgacattctcccttatactgt

SEQ ID NO: 347929 - DNA, 75 bp, synthetic construct
  source 1..75: mol_type = other DNA
gcctgaaatttatttctgctggtataacagccgttattttttcacttgagtcagtatttattcttatactatctg

SEQ ID NO: 347930 - DNA, 75 bp, synthetic construct
  source 1..75: mol_type = other DNA
cttgtggagaacatggcttttgtggtgccaatgttcctattccttgctacacctgcatgcatttccagccttggc

SEQ ID NO: 347931 - DNA, 75 bp, synthetic construct
  source 1..75: mol_type = other DNA
atcttaaaaatatttatcttagtttgatgcagaataagaatgaggaaataacatcattttctctttatccctttc

SEQ ID NO: 347932 - DNA, 75 bp, synthetic construct
  source 1..75: mol_type = other DNA
tcggatgcgaacgcatgcgccgttcctcaggtccccgcagccggtgagaccccggcaggcatttctgccgggatt

SEQ ID NO: 347933 - DNA, 75 bp, synthetic construct
  source 1..75: mol_type = other DNA
gtgacctttgagcagaaaaaagcccggccatgccctgatggacagcaaaaagatgtggcggagcaattatgcccc

SEQ ID NO: 347934 - DNA, 75 bp, synthetic construct
  source 1..75: mol_type = other DNA
aacagcggtcggttgacattcggaacttaccgcaagtccacggagacgcctgtgccaccacgagatttcacggtg

SEQ ID NO: 347935 - DNA, 75 bp, synthetic construct
  source 1..75: mol_type = other DNA
ggtacgtaatgaccagacgctgcaggtgacgaatgaccggacggtgagcgtgagtaatgatgacggcctgtacgt

SEQ ID NO: 347936 - DNA, 75 bp, synthetic construct
  source 1..75: mol_type = other DNA
ttctgggaatcctcggatgtggtaaagcatttgcagccactgaattacagctccagcaaaaacgcgttatgcatt

SEQ ID NO: 347937 - DNA, 75 bp, synthetic construct
  source 1..75: mol_type = other DNA
agcacgccggtgagcgttctgggcattattgctgtcgaggccggggccgctgtcagccgtggtgtggctgttcag

SEQ ID NO: 347938 - DNA, 75 bp, synthetic construct
  source 1..75: mol_type = other DNA
ttctgtcactggatattctggcagaactgagttcctggatgaatgatgatggcctgcgactgacactgcttaaac

SEQ ID NO: 347939 - DNA, 75 bp, synthetic construct
  source 1..75: mol_type = other DNA
ttgtattcatcaactggatgatataattaatcgttctgagtcttcgggtagtaatatttatagcatgctgttgca

SEQ ID NO: 347940 - DNA, 75 bp, synthetic construct
  source 1..75: mol_type = other DNA
ataaagtggaccttctgaaaggcgctgttacaacccgggcatcatcaccttctttacttaatgtctatattgatg

SEQ ID NO: 347941 - DNA, 75 bp, synthetic construct
  source 1..75: mol_type = other DNA
gtaagcgtattaatcgtcttgtggaactctggcctgagttattcaaccgggaaaaaccccaaccgcttaaagttg

SEQ ID NO: 347942 - DNA, 75 bp, synthetic construct
  source 1..75: mol_type = other DNA
tggtgttcatcgtacgaaatgaccaacagcacctaccaaccggcaagtacaccctgaacctcgaaggcgggttct

SEQ ID NO: 347943 - DNA, 75 bp, synthetic construct
  source 1..75: mol_type = other DNA
atgcttaatccgttgagcctcaatattcgccgtttacttcagcgtaaaaaaacgtcaattcctacagttgggcag

SEQ ID NO: 347944 - DNA, 75 bp, synthetic construct
  source 1..75: mol_type = other DNA
aggtagtttcggaactggacacatcggtagcagtgagcgtggttaatggtgaagaggggcgtcgtcaggggactg

SEQ ID NO: 347945 - DNA, 75 bp, synthetic construct
  source 1..75: mol_type = other DNA
ttgtcaatgagtcaaacgggcgatattacgaaccttcgcccggacgaaattatggtgtcggcatgaatattgcgt

SEQ ID NO: 347946 - DNA, 75 bp, synthetic construct
  source 1..75: mol_type = other DNA
ttgttaatgaatcgaatggtcgatattacgagcctgcgcctgggcggaattatggtgtaggcgtaaatctcgcat

SEQ ID NO: 347947 - DNA, 75 bp, synthetic construct
  source 1..75: mol_type = other DNA
taatcgccagttacgtgcagaactgaaggaaatggaggcaaagatagcagggatgcctgtggtggatatggagca

SEQ ID NO: 347948 - DNA, 75 bp, synthetic construct
  source 1..75: mol_type = other DNA
tcaggcgtctgccgggattctggagaggttgccttctggggctgttgttctgtctgacgaataatgcgctggccg

SEQ ID NO: 347949 - DNA, 75 bp, synthetic construct
  source 1..75: mol_type = other DNA
aagatttagcaataaatcaccaacagaatatcgcaatagtgaagcatgggatgttactactctgcaacattcctt

SEQ ID NO: 347950 - DNA, 75 bp, synthetic construct
  source 1..75: mol_type = other DNA
ctggaggccagcgatattccgtatcgtcatgaccgccagttgttacataacgcactggaaaaggcgttacaggca

SEQ ID NO: 347951 - DNA, 75 bp, synthetic construct
  source 1..75: mol_type = other DNA
gtcgcctccgcgatgtttgaataccgttttggcggcaatggcgaactttccggtcataatctcggaaacttgatg

SEQ ID NO: 347952 - DNA, 75 bp, synthetic construct
  source 1..75: mol_type = other DNA
gtaattgatgcggtcatcgtcgggccaaaagtggatgtctcggcggtgaaagagcggattgtgattcaggaagtg

SEQ ID NO: 347953 - DNA, 75 bp, synthetic construct
  source 1..75: mol_type = other DNA
ccaacgatacaattgagatcggcagtaaaacgcgtattggtgatgggctgcttagtctcgcattgtttcagaccg

SEQ ID NO: 347954 - DNA, 75 bp, synthetic construct
  source 1..75: mol_type = other DNA
taatatgggctttgcgtcgataggttatgtaccggaagatggctggtatgcaggcacggaagcgcgttatatggg

SEQ ID NO: 347955 - DNA, 75 bp, synthetic construct
  source 1..75: mol_type = other DNA
actgaggccagcgatattccgtatcgtcatgaccgccagttgttacatacgcgctggaaaggacgtataactcgt

SEQ ID NO: 347956 - DNA, 75 bp, synthetic construct
  source 1..75: mol_type = other DNA
gcgtgagcaggagttacgtcagctgaagaaggaaaatcagtccttacgtggtcgcctggagaccctgtcagttgc

SEQ ID NO: 347957 - DNA, 75 bp, synthetic construct
  source 1..75: mol_type = other DNA
tactcactctttcatctcatgttattgctcaggactgttttgaactggctggtagagattacaaaatcgatcccg

SEQ ID NO: 347958 - DNA, 75 bp, synthetic construct
  source 1..75: mol_type = other DNA
ggggcacgcactgtgtaatctgctgccggagatggtgcagggtttccgcgtggtgaccccttccggtgaaatctg

SEQ ID NO: 347959 - DNA, 75 bp, synthetic construct
  source 1..75: mol_type = other DNA
cgctacacttttaataataaagatgacagcaatggctgggatttgctggcacaggcagaagccgcgctaaataac

SEQ ID NO: 347960 - DNA, 75 bp, synthetic construct
  source 1..75: mol_type = other DNA
tactttggcgtccaagcggaatagctccggtagataaaaaaagcctttctcaattaaatatcaaaaagaaaaata

SEQ ID NO: 347961 - DNA, 75 bp, synthetic construct
  source 1..75: mol_type = other DNA
ggtggtggaaccgggccacataaagatggctggggcatcaccttttacgaaggtaaaggctgtcgcacatttaaa

SEQ ID NO: 347962 - DNA, 75 bp, synthetic construct
  source 1..75: mol_type = other DNA
ccaacgtccctaccgatatctgctttagtttcaccgggcttgtacagcgtggtggtggaaccgggccacataaag

SEQ ID NO: 347963 - DNA, 75 bp, synthetic construct
  source 1..75: mol_type = other DNA
acgtgccctgcgtaacacccgttttatggctgatttacagcagcatgtaaaagacggatgctcacaccggcaggc

SEQ ID NO: 347964 - DNA, 75 bp, synthetic construct
  source 1..75: mol_type = other DNA
atgagtaacgaatatcaaagcaccagtataaacccggatgtttttgaacaatttcttaccctcctgaatacacac

SEQ ID NO: 347965 - DNA, 75 bp, synthetic construct
  source 1..75: mol_type = other DNA
gatgacactctggtggatgttgtggtgacagaaaaactgacggatggcacggttgttgaagatatggatgcaaga

SEQ ID NO: 347966 - DNA, 75 bp, synthetic construct
  source 1..75: mol_type = other DNA
attaattcgctgggaatgcgtctggtttcgcatgccaattcggttaagacaccgtttcatttttttctgatcaac

SEQ ID NO: 347967 - DNA, 75 bp, synthetic construct
  source 1..75: mol_type = other DNA
tttattgactcacccgttgccggaaagtcgtctggcagatgcccgcaaccgtgctaatcagatgcgcccgatggt

SEQ ID NO: 347968 - DNA, 75 bp, synthetic construct
  source 1..75: mol_type = other DNA
gcatggcaactgatacaccgacgacaaaaacagacttcgctgaaaagccccacccaggtggggctttttgattaa

SEQ ID NO: 347969 - DNA, 75 bp, synthetic construct
  source 1..75: mol_type = other DNA
aaaacctgatcgcgaacgcaggaaatcacgctgacatcggtgttgtgaagaatatgtttatcggtgtgggtcagg

SEQ ID NO: 347970 - DNA, 75 bp, synthetic construct
  source 1..75: mol_type = other DNA
aaaatcccgcaattgctgcgtgaaatgatcaatcactatcaggttaatcccagacagatcgcgcttgaactcact

SEQ ID NO: 347971 - DNA, 75 bp, synthetic construct
  source 1..75: mol_type = other DNA
tcaccagcattccggaagccgttaagtttgcgcttattcatcagcatcactggctccccgcaacggttgagcaga

SEQ ID NO: 347972 - DNA, 75 bp, synthetic construct
  source 1..75: mol_type = other DNA
tgagcaccgacgatgtggaacggtgcaaaaccttctttgaccagggaacagaaatctttcccggagctgaccgga

SEQ ID NO: 347973 - DNA, 75 bp, synthetic construct
  source 1..75: mol_type = other DNA
aggagcgggttaatctgctgcgtcatgccagcttcttcattggcctggccagtggactgtcatggctggcatggg

SEQ ID NO: 347974 - DNA, 75 bp, synthetic construct
  source 1..75: mol_type = other DNA
cgagattggcatgaaaaaatgaagggctatatctgcgatttcttacgtaaatgcaacggattcagggtgatgtga

SEQ ID NO: 347975 - DNA, 75 bp, synthetic construct
  source 1..75: mol_type = other DNA
aataatagcgttatttagtatcattgctagtaatatattatttcttaatgatatacatgataaaagaaataaacg

SEQ ID NO: 347976 - DNA, 75 bp, synthetic construct
  source 1..75: mol_type = other DNA
ttttctggcaatattgctgctttttattccacctgttctggagttttcggtaattcatcagcacgttgagccaga

SEQ ID NO: 347977 - DNA, 75 bp, synthetic construct
  source 1..75: mol_type = other DNA
tcgcgcgtctggaaatgcgcgttggaaagattgtggaagttaaacgccatgaaaacgctgacaagctgtacatcg

SEQ ID NO: 347978 - DNA, 75 bp, synthetic construct
  source 1..75: mol_type = other DNA
atggaaaccgtggcttacgctgattttgcgcgtctggaaatgcgtgtcgggaagattgtggaagttaaacgccat

SEQ ID NO: 347979 - DNA, 75 bp, synthetic construct
  source 1..75: mol_type = other DNA
actgatgaaaatcatcaaacggttaaattaaaaatcgtcaggggaaaaactacccaacaagaaattcttgctgcc

SEQ ID NO: 347980 - DNA, 75 bp, synthetic construct
  source 1..75: mol_type = other DNA
tacttctttcaatgcaggtagtaaaaggtttgtgatttatcaatcagcacaagataagaatcttcaggttgatat

SEQ ID NO: 347981 - DNA, 75 bp, synthetic construct
  source 1..75: mol_type = other DNA
ggtcaggaagaagacttattttagtcaaatgtttttcggaagtatcttttattcgtcatcacttgattgagtgta

SEQ ID NO: 347982 - DNA, 75 bp, synthetic construct
  source 1..75: mol_type = other DNA
aaaatgtgtatgttttcccgctctcgtgaatggcatgcaactgacatgtgcgatctctggcgagagtctggcgta

SEQ ID NO: 347983 - DNA, 75 bp, synthetic construct
  source 1..75: mol_type = other DNA
gatgagatcaagatcaccgcgaagaagaaaatcacccttaacggcggtggcagctacatccggctggatgcctgc

SEQ ID NO: 347984 - DNA, 75 bp, synthetic construct
  source 1..75: mol_type = other DNA
atcgatagtgatcaccagtacggaagatgagatcaagatcaccgcgaagaagaaaatcacccttaacggcggtgg

SEQ ID NO: 347985 - DNA, 75 bp, synthetic construct
  source 1..75: mol_type = other DNA
agcgaagaaaaaaataacgattaatggtggtgggagttatatccggatagagggtagcggcattgagccgggaac

SEQ ID NO: 347986 - DNA, 75 bp, synthetic construct
  source 1..75: mol_type = other DNA
aactggcggcatcgaaaaacctgatcgcgaacgcaggaaatcacgctgacatcggtgttgtgaagaatatgttta

SEQ ID NO: 347987 - DNA, 75 bp, synthetic construct
  source 1..75: mol_type = other DNA
tgaccacagcggcaggtattttgctgatggcttttctctccagcctgctgctgccggcccctgcgctgggactgg

SEQ ID NO: 347988 - DNA, 75 bp, synthetic construct
  source 1..75: mol_type = other DNA
ttgccaataaaggcgcagtatcggtacaggcgcagcacgatctgatggagttactggcgaaaaaatcgatagaga

SEQ ID NO: 347989 - DNA, 75 bp, synthetic construct
  source 1..75: mol_type = other DNA
ttatgtatgtatcgcgacacaatccacttgtcaggcgaaatactggaacaacggtactggctggagtgaggttgt

SEQ ID NO: 347990 - DNA, 75 bp, synthetic construct
  source 1..75: mol_type = other DNA
acagggaagagtggaacgagagtaaaaaatgcgtttgttttcccgctcttgtaaatggtatgcagctcacttgcg

SEQ ID NO: 347991 - DNA, 75 bp, synthetic construct
  source 1..75: mol_type = other DNA
atcgctgggatctggaagaagaagctgaaagcttgattcaggatcaaggcgaagatgatcaaggttgggtttggt

SEQ ID NO: 347992 - DNA, 75 bp, synthetic construct
  source 1..75: mol_type = other DNA
aggactgtattttggtggcgatacaactaaccagccaattgattttcgccaggtcggttttcatcgttccgctgg

SEQ ID NO: 347993 - DNA, 75 bp, synthetic construct
  source 1..75: mol_type = other DNA
acggcaccggctggagtgaggttatcgcacacctgaaatcactgggttaccgggtgctgtgcattgaccgggatg

SEQ ID NO: 347994 - DNA, 75 bp, synthetic construct
  source 1..75: mol_type = other DNA
tggataaaggctgggtaaccagcagtaagaaatatttcgtgcgctttcgtattcaggtattccgtcagggggaag

SEQ ID NO: 347995 - DNA, 75 bp, synthetic construct
  source 1..75: mol_type = other DNA
tatgcgtttacgcccaatcctgatgacttctctggcctttattctcggcgtgctgccgctggttatcagtcatgg

SEQ ID NO: 347996 - DNA, 75 bp, synthetic construct
  source 1..75: mol_type = other DNA
gatcgtcgaatttgcggttgagatgatgcagaaagaagggaaaacacctgtagaggcgattatcgaagcggcccg

SEQ ID NO: 347997 - DNA, 75 bp, synthetic construct
  source 1..75: mol_type = other DNA
cgatggggcagatccaacgtgcgctggtcggtattgccgttgttctttccgcagtgtttatgccgatggccttta

SEQ ID NO: 347998 - DNA, 75 bp, synthetic construct
  source 1..75: mol_type = other DNA
atgataacgaccttatttgttgaatcagatgaacctcttgtgtgtgctgccggaatgccggtctgtggcggaaaa

SEQ ID NO: 347999 - DNA, 75 bp, synthetic construct
  source 1..75: mol_type = other DNA
ttacctgctgatttgtgcggggatggcggtgctgttcctgcgtacaccgacctctttcttaccggaagaggatca

SEQ ID NO: 348000 - DNA, 75 bp, synthetic construct
  source 1..75: mol_type = other DNA
actggctaccggggcaaacgcgctcgatacctcgcgggcagtaaaagcagaactcaaccgcttatcagcctattt

SEQ ID NO: 348001 - DNA, 75 bp, synthetic construct
  source 1..75: mol_type = other DNA
cctctttcttaccagaagaggatcagggggtatttatgaccaccgcgcagttaccttccggtgccaccatggtta

SEQ ID NO: 348002 - DNA, 75 bp, synthetic construct
  source 1..75: mol_type = other DNA
aaatatgaatgggcttgatggcctgatgtacatgtcttcaaccagtgatgcggcgggtaatgcctctatcactct

SEQ ID NO: 348003 - DNA, 75 bp, synthetic construct
  source 1..75: mol_type = other DNA
ggtgttggcattggtggtggtggcggcggcggcggcggtagctgcggtggtgaaccacggcagcctggcggctgc

SEQ ID NO: 348004 - DNA, 75 bp, synthetic construct
  source 1..75: mol_type = other DNA
ggtcgggattgccgttgttctgtctgcagtgtttatgccgatggcctttatgagtggggcaaccggcgagattta

SEQ ID NO: 348005 - DNA, 75 bp, synthetic construct
  source 1..75: mol_type = other DNA
gccttcggcagcagctacgtgaacgacttcctcaaccaggggcgggtgaaaaaagtgtatgtccaggcaggcacg

SEQ ID NO: 348006 - DNA, 75 bp, synthetic construct
  source 1..75: mol_type = other DNA
taccgcgatcattcagcgggcaatgattgcgttaagcagtatcaataaagccgtcgtcttcccgttcaacttacc

SEQ ID NO: 348007 - DNA, 75 bp, synthetic construct
  source 1..75: mol_type = other DNA
accttatctatccggtacccatgcctctttagaacaacgtgttgcgatcatgaatgaatgcattgattcaagtat

SEQ ID NO: 348008 - DNA, 75 bp, synthetic construct
  source 1..75: mol_type = other DNA
agccacgagccgtccttgagatctttgccgaacacgtagcaccttcatcatggttcggtagtcgtgcgaacgtga

SEQ ID NO: 348009 - DNA, 75 bp, synthetic construct
  source 1..75: mol_type = other DNA
caattggatctacaacacaaatctcaacgtgatgtttcggtcattcgaggtttcattgaagagactcattctatc

SEQ ID NO: 348010 - DNA, 75 bp, synthetic construct
  source 1..75: mol_type = other DNA
ccctacggagcctggagcaatccaccacaaggtgttatagacactttaatctcagccccaggcgtaaccattact

SEQ ID NO: 348011 - DNA, 75 bp, synthetic construct
  source 1..75: mol_type = other DNA
cctgctgggacgcagcggctgcggaaaaagcaccctcgcgcggctgctggtaggcttagagtctccctcacaagg

SEQ ID NO: 348012 - DNA, 75 bp, synthetic construct
  source 1..75: mol_type = other DNA
ggatgagcaaatcaatatatatgaatatattaatgaaaaacagttagaaaaattaaatcctcagggaaatttacg

SEQ ID NO: 348013 - DNA, 75 bp, synthetic construct
  source 1..75: mol_type = other DNA
ttttagtgaatgatatttttttgaaggattttttcatgaagcaacctgattttgctaagtggtacttctatcaat

SEQ ID NO: 348014 - DNA, 75 bp, synthetic construct
  source 1..75: mol_type = other DNA
gtcgccaacgtttattaatatcattcgcacaccggctaggattgctccatgaacacgctgtagcgaaagaaatcg

SEQ ID NO: 348015 - DNA, 75 bp, synthetic construct
  source 1..75: mol_type = other DNA
cagatgaaccccttgtgtgtgccgccggaatgccggtctgtggcggaacgctgaccggtgtttatttcggggatt

SEQ ID NO: 348016 - DNA, 75 bp, synthetic construct
  source 1..75: mol_type = other DNA
gacctccgtggacaggattcggaattaatgagtttggtgctaggccaagagattatggatttcgacccagttacg

SEQ ID NO: 348017 - DNA, 75 bp, synthetic construct
  source 1..75: mol_type = other DNA
taatgagtttggtgctaggccaagagattatggatttcgacccagttacgatgaacttgttgcgtggctattcgc

SEQ ID NO: 348018 - DNA, 75 bp, synthetic construct
  source 1..75: mol_type = other DNA
acgctatcggtatcaccgctgcatggatgccaaaagaatttctcagtcgcatttttgatggtacggaggatcaac

SEQ ID NO: 348019 - DNA, 75 bp, synthetic construct
  source 1..75: mol_type = other DNA
tttatcgacgagacagatactattgattcaatattagcccaagaatttctcgatcaatgtgtgcgtcatcctgag

SEQ ID NO: 348020 - DNA, 75 bp, synthetic construct
  source 1..75: mol_type = other DNA
ttgtagctttagcacatcatttcggtgttcattaccttgctgaaaaagagagagctgataagttgcaagcgactt

SEQ ID NO: 348021 - DNA, 75 bp, synthetic construct
  source 1..75: mol_type = other DNA
ggatgcgcgtattctcggcaaacagatcatccgcgaaattctgtactacgtgctgaccggaccttgcggcggcgc

SEQ ID NO: 348022 - DNA, 75 bp, synthetic construct
  source 1..75: mol_type = other DNA
atgtgtaagcaagcactcaagttctgccgggttcatcggtatgcggtgagtaacgtcctggacgatctgaccatt

SEQ ID NO: 348023 - DNA, 75 bp, synthetic construct
  source 1..75: mol_type = other DNA
ttacctgaaaagctggatgcactgaataaatggatgcagagattagatgttattacctctgatatctcaaatgtt

SEQ ID NO: 348024 - DNA, 75 bp, synthetic construct
  source 1..75: mol_type = other DNA
tcagtcggcagactcatttcagcctgattagccgcgtgttgaaacggattgagaataaatacactgaaaacctga

SEQ ID NO: 348025 - DNA, 75 bp, synthetic construct
  source 1..75: mol_type = other DNA
tgcggcggtgcgttactggcgctggtcagtcggcagactcatttcagcctgattagccgcgtgttgaaacggatt

SEQ ID NO: 348026 - DNA, 75 bp, synthetic construct
  source 1..75: mol_type = other DNA
cgcttgttgtatggtgagacgcctggcgcacgtacgccagtgatgtacgatcctggcatcataatcctcttttcc

SEQ ID NO: 348027 - DNA, 75 bp, synthetic construct
  source 1..75: mol_type = other DNA
ttatataaatggtaatgatgaggagctttttcaagctgctttggccttgttaaaagataaaaatttaagacataa

SEQ ID NO: 348028 - DNA, 75 bp, synthetic construct
  source 1..75: mol_type = other DNA
ctgggccacattgggtacggccctttcggtgaattaggtatgaatacgctggacgacgacggcgacagcaggacg

SEQ ID NO: 348029 - DNA, 75 bp, synthetic construct
  source 1..75: mol_type = other DNA
tattcgagaaactaaaattgatggtgttgtgtactactcaccatctattttttttggaaaattagcaaataaaat

SEQ ID NO: 348030 - DNA, 75 bp, synthetic construct
  source 1..75: mol_type = other DNA
ttcagcggttcggttgctggctctagctataagcaaaatgtggttaacacgggaacgatggctgtaatggctgac

SEQ ID NO: 348031 - DNA, 75 bp, synthetic construct
  source 1..75: mol_type = other DNA
ataatcgaagttatcaaatctgttaattctgagtgggtgggagcacactgtgatataggtaatggaatgatggca

SEQ ID NO: 348032 - DNA, 75 bp, synthetic construct
  source 1..75: mol_type = other DNA
catatcatctgttctttcagcagggggtgatggatattttcgacttcattgctaaaaccagtgaactggggctgg

SEQ ID NO: 348033 - DNA, 75 bp, synthetic construct
  source 1..75: mol_type = other DNA
caggacggcgagctggatgtgagcggcggcggtcacggcattgatatcactggtgatagcgccactgtaatcaac

SEQ ID NO: 348034 - DNA, 75 bp, synthetic construct
  source 1..75: mol_type = other DNA
gcaacacccagattttggggcttactcgtgatacccaaatttggggtatcggcggcaaccataacgactttcgtt

SEQ ID NO: 348035 - DNA, 75 bp, synthetic construct
  source 1..75: mol_type = other DNA
gctggatttgcagatgttgcaggatccgtatggacgacaggttgttgcggtgctgatgcagatgggcacggtatg

SEQ ID NO: 348036 - DNA, 75 bp, synthetic construct
  source 1..75: mol_type = other DNA
atgaacctgcgtccgtcactggagggatttatccgcttcgttcgtgatgacatgcaagtaccggttcacgctatt

SEQ ID NO: 348037 - DNA, 75 bp, synthetic construct
  source 1..75: mol_type = other DNA
ggagcaatggccgaccaactcgacgacacaaagagtcgccttgaagacatgatgcgtgagttaagccatcgacat

SEQ ID NO: 348038 - DNA, 75 bp, synthetic construct
  source 1..75: mol_type = other DNA
gaagttaaaaccaggatatctcgagacattagttttgcaccgggaggcaaacaatcttattttggatggtgtact

SEQ ID NO: 348039 - DNA, 75 bp, synthetic construct
  source 1..75: mol_type = other DNA
ctgtgaggaaaattttagacttgtcgtatcagagtaaaaatgctgttgtgtttactcataatcattgcctctctc

SEQ ID NO: 348040 - DNA, 75 bp, synthetic construct
  source 1..75: mol_type = other DNA
cagctataggcaaaatgtggttaataccggaagtatgacagtcacggctgatggtacatcgctcatcggcggcag

SEQ ID NO: 348041 - DNA, 75 bp, synthetic construct
  source 1..75: mol_type = other DNA
ttacttatgatgagttgtttaataatagcgttacgggcataaccggaatgctttctaaaaccggtgctatgggca

SEQ ID NO: 348042 - DNA, 75 bp, synthetic construct
  source 1..75: mol_type = other DNA
tggcaacagcgtgacgctggcagtagaagatcttaatgttactgggcagaaagcgatgggtgtcgacatttctgg

SEQ ID NO: 348043 - DNA, 75 bp, synthetic construct
  source 1..75: mol_type = other DNA
ggaatcatattgaacaatgcactgcgcttatttatttcaccgagttaatggaggaacttctctttgattacaccc

SEQ ID NO: 348044 - DNA, 75 bp, synthetic construct
  source 1..75: mol_type = other DNA
cgcaggttatgtgttccagatgtgcaaacaagccctgaaattctgccgggttcgtcgctatgctgtgagtaccgc

SEQ ID NO: 348045 - DNA, 75 bp, synthetic construct
  source 1..75: mol_type = other DNA
ggatgaaaaagaaaacgccagtcgccgcaggttatgtgttccagatgtgcaaacaagccctgaaattctgccggg

SEQ ID NO: 348046 - DNA, 75 bp, synthetic construct
  source 1..75: mol_type = other DNA
attgttggtaataccaaacacgtggccgccgtgttaaatcacaaatctgcaagtgggtgttcattaggtgatttt

SEQ ID NO: 348047 - DNA, 75 bp, synthetic construct
  source 1..75: mol_type = other DNA
cacacacgccaatcgccactaccacgtccaatgatgcaccaccagcgaataccatctgggaatttaccgggggta

SEQ ID NO: 348048 - DNA, 75 bp, synthetic construct
  source 1..75: mol_type = other DNA
ggctgaagaggtggcggagctgctgttagcacgcttcaactcgccgtgggtgcgtatcaaactcagcaagccagg

SEQ ID NO: 348049 - DNA, 75 bp, synthetic construct
  source 1..75: mol_type = other DNA
gtggaattatatgagctcaagccgacgcgtgaacaaagtagtacgttacacgatcgcggcataaccggtaattca

SEQ ID NO: 348050 - DNA, 75 bp, synthetic construct
  source 1..75: mol_type = other DNA
gtcaaatagctgcatacgagggtggtgaggctaaaccacggcttcgggtattgcaggcattagccaacgcattag

SEQ ID NO: 348051 - DNA, 75 bp, synthetic construct
  source 1..75: mol_type = other DNA
atcggttactggtcagacatgaaagagttttccggcccgaaccgaccatcctgggaaaaagcaaaacaagctgct

SEQ ID NO: 348052 - DNA, 75 bp, synthetic construct
  source 1..75: mol_type = other DNA
acggcgttaatcggcttgcaaaacctgtcggctcgttttaattctgccatggcgatccccgctcaggggctgtgc

SEQ ID NO: 348053 - DNA, 75 bp, synthetic construct
  source 1..75: mol_type = other DNA
gaggtgctaagccccattcgctggtgggggcgaattccgtttatcttttatctggtgtcgatgtttgtcggctgg

SEQ ID NO: 348054 - DNA, 75 bp, synthetic construct
  source 1..75: mol_type = other DNA
gctgactggcggcaaagcccgctctttagtgatgaagaacggctggcgctggagtacgccgaagccgcaagcgta

SEQ ID NO: 348055 - DNA, 75 bp, synthetic construct
  source 1..75: mol_type = other DNA
atcggtcacatcactgagcgatacagcagccacgcgtattccttatcccacggagtcacagaattataatcttgg

SEQ ID NO: 348056 - DNA, 75 bp, synthetic construct
  source 1..75: mol_type = other DNA
cgccagtgtttccgtaatcagtcaggaggaattgcagtccagccagtaccacgatctggcggaggcactgagagc

SEQ ID NO: 348057 - DNA, 75 bp, synthetic construct
  source 1..75: mol_type = other DNA
ttctccaacaagattgtctcttattccataaatgataacaccaatagctatgtaaacagcggaaaggcccggttg

SEQ ID NO: 348058 - DNA, 75 bp, synthetic construct
  source 1..75: mol_type = other DNA
aaaccggtgaagcgcagtttgctttccctattccttatgaacaagccgcgttactggagaagaacaaaaatatcg

SEQ ID NO: 348059 - DNA, 75 bp, synthetic construct
  source 1..75: mol_type = other DNA
atggtgcactcggcgctgttcatgcaatattatgaggctttgtggggagaagtactggctcaaatattaccttat

SEQ ID NO: 348060 - DNA, 75 bp, synthetic construct
  source 1..75: mol_type = other DNA
gtctggataaacaacctgttcaggatccaaaacagatctgttatccacgatggaacacgaaaacgtacgcggcag

SEQ ID NO: 348061 - DNA, 75 bp, synthetic construct
  source 1..75: mol_type = other DNA
cacaaatcctgggattacctgtacgaacccgatccgaaggcgttgctggataccctgctgcgtcgttatgtcgaa

SEQ ID NO: 348062 - DNA, 75 bp, synthetic construct
  source 1..75: mol_type = other DNA
ccaccatctggttgagcaaataccccgctacatcagtcagatggtaagctatgaatgccgtttaattggtttctg

SEQ ID NO: 348063 - DNA, 75 bp, synthetic construct
  source 1..75: mol_type = other DNA
tggtacgtgagcctgttgttcgcccggcgcattttgaacgggcaccttacttccaagtaaaaccggagtattcca

SEQ ID NO: 348064 - DNA, 75 bp, synthetic construct
  source 1..75: mol_type = other DNA
gtcagttaattcacgatgcctgtcgggttagatctgtgatccacaagctgccaggatatctacctgtaccaccgg

SEQ ID NO: 348065 - DNA, 75 bp, synthetic construct
  source 1..75: mol_type = other DNA
aagttggcgttcaggttgtgaacgctggatcatggcccgaatcaggcatgagatcttctacagccttgcatcgct

SEQ ID NO: 348066 - DNA, 75 bp, synthetic construct
  source 1..75: mol_type = other DNA
tggatcatggcccgaatcaggcatgagatcttctacagccttgcatcgcttaatcagcgcattcgggagttgctg

SEQ ID NO: 348067 - DNA, 75 bp, synthetic construct
  source 1..75: mol_type = other DNA
taaaagcgaatctggatcgggccagtgacccagcgaatcatcttaaacgctataacttgtataagaatattgcca

SEQ ID NO: 348068 - DNA, 75 bp, synthetic construct
  source 1..75: mol_type = other DNA
accgtggtttgtgcggtggtttgaacattaacctgttcaaaaaactgctggcggaaatgaagacctggaccgaca

SEQ ID NO: 348069 - DNA, 75 bp, synthetic construct
  source 1..75: mol_type = other DNA
ccgtatggtggcgatgaaagccgcgaccgacaatggcggcagtctgattaaagagctgcagttggtatacaacaa

SEQ ID NO: 348070 - DNA, 75 bp, synthetic construct
  source 1..75: mol_type = other DNA
ccgtccttatgcagaaaccatgcgcaaagtgattggtcaccttgcacacggtaatctggaatataagcaccctta

SEQ ID NO: 348071 - DNA, 75 bp, synthetic construct
  source 1..75: mol_type = other DNA
acaccgccaacggtcgatgatgccctgcgtacccgactggctgcgcattttgacgctcaggcgctcaccgaactg

SEQ ID NO: 348072 - DNA, 75 bp, synthetic construct
  source 1..75: mol_type = other DNA
agttcgtccatgaaagatggggttgtccttgccagcacaggtgaaactttccgacagaaaagctggtcggtattt

SEQ ID NO: 348073 - DNA, 75 bp, synthetic construct
  source 1..75: mol_type = other DNA
acaatacaaacagttacatgaacagcggcaaagccagaacatatggtatagaatttgccagcaccattccgcttt

SEQ ID NO: 348074 - DNA, 75 bp, synthetic construct
  source 1..75: mol_type = other DNA
ttcgaggtccgatgtccacactctatggttctgatgccatgggaggggtcgtcaatatcatcacaaaaaagaatt

SEQ ID NO: 348075 - DNA, 75 bp, synthetic construct
  source 1..75: mol_type = other DNA
acaaaatttcagctggctatgatcatgctttcaccttcggtacctggaaatcgtatctgaactggaacgagacgg

SEQ ID NO: 348076 - DNA, 75 bp, synthetic construct
  source 1..75: mol_type = other DNA
gggatcagcggtgtgtccggtcaggggcgtacgaatcttctcggtaacccggacctgaagccggaggagagtgtc

SEQ ID NO: 348077 - DNA, 75 bp, synthetic construct
  source 1..75: mol_type = other DNA
cggaattattcgtcgctgagcgctgtacagaagaaagtgtatgatgagaaaggagaatatctgaaagcctggacg

SEQ ID NO: 348078 - DNA, 75 bp, synthetic construct
  source 1..75: mol_type = other DNA
atgttagttagtaaaagcaacggatttaacgctagcgcagttttgggtagtggaagttataatgaaaataaatct

SEQ ID NO: 348079 - DNA, 75 bp, synthetic construct
  source 1..75: mol_type = other DNA
gtaaagccttccgccgtgatattcagatggtgtttcaggactccatcagtgccgtgaatccgcgcaaaaccgtgc

SEQ ID NO: 348080 - DNA, 75 bp, synthetic construct
  source 1..75: mol_type = other DNA
cagctaagcggcggtcaactccagcgcgtctgcctggcgcgcgcgctggcagtcgaaccgaaattgctgattctg

SEQ ID NO: 348081 - DNA, 75 bp, synthetic construct
  source 1..75: mol_type = other DNA
ggtgctcttgaaactttacaaaaaataatgtctgaatgtatatatcaagaaggcaacgcctttgtcattatggga

SEQ ID NO: 348082 - DNA, 75 bp, synthetic construct
  source 1..75: mol_type = other DNA
tgtaaaggacttaacggtctgttgaccattgaactgaaatctcagtatacccagaaaaatgctgaagccttcatt

SEQ ID NO: 348083 - DNA, 75 bp, synthetic construct
  source 1..75: mol_type = other DNA
attgtgctggctgcaaccgacagtaccagccacattgaagcgatttctcaactcgccaagttattcgataacgaa

SEQ ID NO: 348084 - DNA, 75 bp, synthetic construct
  source 1..75: mol_type = other DNA
gtgccggcagtggtacgctttatgcgggtgattacttccagacgggggcatcgacaacaggttatgtgataccgg

SEQ ID NO: 348085 - DNA, 75 bp, synthetic construct
  source 1..75: mol_type = other DNA
aaaataaaggtcgtgagcttgtacgtagtgtactgaagagcgacaaatgggggcttgccggtaaaccgcgggagc

SEQ ID NO: 348086 - DNA, 75 bp, synthetic construct
  source 1..75: mol_type = other DNA
gcatatcacggatgcggttgcactgactgtgggcagtcgttatgaacatcatgaggtgttcggaggacacctcag

SEQ ID NO: 348087 - DNA, 75 bp, synthetic construct
  source 1..75: mol_type = other DNA
tagccatcccttgtctcgggttttcagtcagcagtatggctgcggaagatgtgatggtagtcacggcgtctggct

SEQ ID NO: 348088 - DNA, 75 bp, synthetic construct
  source 1..75: mol_type = other DNA
agcattacaatgaaaaccatccgcatagtgtgttgggttatcgctctccgcaagaatatcgacgtcagcgggtaa

SEQ ID NO: 348089 - DNA, 75 bp, synthetic construct
  source 1..75: mol_type = other DNA
agttatgaagcgggggtatattacgataacctcgccggtctgaatgctaatattacaggctttataacagacttc

SEQ ID NO: 348090 - DNA, 75 bp, synthetic construct
  source 1..75: mol_type = other DNA
gcggagtgaccacgggatataaggcccccagcatgggacagttacataaggggatcagcggcgtatccgggcagg

SEQ ID NO: 348091 - DNA, 75 bp, synthetic construct
  source 1..75: mol_type = other DNA
gttgccattccacagattccccaaccacagccattgaacctgcaaggcgaagcggtagcgaatgagttcatccca

SEQ ID NO: 348092 - DNA, 75 bp, synthetic construct
  source 1..75: mol_type = other DNA
ttacataacggcaagcgcgacaatctggagatcagccccaatttatgggcgggcgttggcttagtgcgcggcggt

SEQ ID NO: 348093 - DNA, 75 bp, synthetic construct
  source 1..75: mol_type = other DNA
aaggtgcaccactgagctatactcctgaacacatggtgaatgcgaaactgaactggcagatcaccgaagaagttg

SEQ ID NO: 348094 - DNA, 75 bp, synthetic construct
  source 1..75: mol_type = other DNA
tcgtatctgaactggaacgagacggaaaataaaggtcgtgagcttgtacgtagtgttctgaagagcgataaatgg

SEQ ID NO: 348095 - DNA, 75 bp, synthetic construct
  source 1..75: mol_type = other DNA
aactgtggcagcatctggcgatcagctcctggcgggcgctgattggcttttcaattggcggatcgctggggttga

SEQ ID NO: 348096 - DNA, 75 bp, synthetic construct
  source 1..75: mol_type = other DNA
ggctggttgccgcatcgatgatcccggtgacgcagcggctgaagtttcttgtcgccctgcgtcccagcgtaacct

SEQ ID NO: 348097 - DNA, 75 bp, synthetic construct
  source 1..75: mol_type = other DNA
gtcgaagcggtttatttcgatacgccgtggctgccacgcgttaatcttatcgccagtcagatccagcgcggctat

SEQ ID NO: 348098 - DNA, 75 bp, synthetic construct
  source 1..75: mol_type = other DNA
cgccagtcagattcagcgtggctatggtggttgggtattgacgatgcgttgcctcgggcatgagaaggtcgcgca

SEQ ID NO: 348099 - DNA, 75 bp, synthetic construct
  source 1..75: mol_type = other DNA
gacaacccgctgctttatttctgccagcatcgttggcgggtaaccccgcgcggtgaactccagcaactggaatag

SEQ ID NO: 348100 - DNA, 75 bp, synthetic construct
  source 1..75: mol_type = other DNA
aaatctctaccggctgatgcgcggctatgccaccggcggttatgtcggtggcaccggaagtccggcgcaaatgcg

SEQ ID NO: 348101 - DNA, 75 bp, synthetic construct
  source 1..75: mol_type = other DNA
acagtaatcaggacaatccgctgctttatttttgccagcatcgctggcgcgtaacgtcgcgtggcgaactccagc

SEQ ID NO: 348102 - DNA, 75 bp, synthetic construct
  source 1..75: mol_type = other DNA
gcattattaatcaaggggcgagcggcacgttggccgatgagtctgctgctatggggctgtacctttggtcatagc

SEQ ID NO: 348103 - DNA, 75 bp, synthetic construct
  source 1..75: mol_type = other DNA
tgttaccgtggagtcgtgaactgccgcgccgtcatcacattatgttggcatttcctgccagccgcacgttacaga

SEQ ID NO: 348104 - DNA, 75 bp, synthetic construct
  source 1..75: mol_type = other DNA
aagtatcgcgatatgtggtgaaggcggatttgatccctgggatgcggtttctgtccggcaacccccgctaccgcc

SEQ ID NO: 348105 - DNA, 75 bp, synthetic construct
  source 1..75: mol_type = other DNA
acatggctgctcgtctgggagtttcgcaaccgacggtggctaaaatgcttaagcggctggcaaccatggggctga

SEQ ID NO: 348106 - DNA, 75 bp, synthetic construct
  source 1..75: mol_type = other DNA
ttttttaccttctcatcagcaatgtctggcctggcgtgataacgaacagtggctgtgggcgacgcgctatagctg

SEQ ID NO: 348107 - DNA, 75 bp, synthetic construct
  source 1..75: mol_type = other DNA
ggtggcggttgccgctggcgcacgacattatcaaagatgggcggattgttgatgcgcagcagctggctaaaacgt

SEQ ID NO: 348108 - DNA, 75 bp, synthetic construct
  source 1..75: mol_type = other DNA
gctgggggcgcaaactggcggtggggatgactagcgcgaaggagctggcggcagcgttatccgttgatcccgaca

SEQ ID NO: 348109 - DNA, 75 bp, synthetic construct
  source 1..75: mol_type = other DNA
tatcaggagcacctgaatgcgctggcgcagcaggcggataagttcgcacagcaacaacgggcaaaacgggcagcc

SEQ ID NO: 348110 - DNA, 75 bp, synthetic construct
  source 1..75: mol_type = other DNA
tgtgggcgcggtgcctgcttttgctgcgttaatatggtcaatcatcatttttcgccgctggccagtgacactcga

SEQ ID NO: 348111 - DNA, 75 bp, synthetic construct
  source 1..75: mol_type = other DNA
cgttcagagggtatcaggtttgagcagaacaacaacgtggtgattcagaacgacggtacgaatggtctgccaggt

SEQ ID NO: 348112 - DNA, 75 bp, synthetic construct
  source 1..75: mol_type = other DNA
aggcggataaaaaatggcagtggtaccagagtcgcagtaaccggcgcggaaaaacgtcagcgtttctctctaatc

SEQ ID NO: 348113 - DNA, 75 bp, synthetic construct
  source 1..75: mol_type = other DNA
agcaaaatcgccgacctgttaggcattaccccgcgcgcactgcgctatcgactggcctccatgcgcaagcacggt

SEQ ID NO: 348114 - DNA, 75 bp, synthetic construct
  source 1..75: mol_type = other DNA
aaggtggttatgtgggcggtgccggaagtccggcgcagatgcggcgggctgaaggcattaattttaatcagaaca

SEQ ID NO: 348115 - DNA, 75 bp, synthetic construct
  source 1..75: mol_type = other DNA
gtatgccatccatagcaacgctcaatcgctggatgtgtgaagacgaagacttccgccaggctgtaaacgactgcc

SEQ ID NO: 348116 - DNA, 75 bp, synthetic construct
  source 1..75: mol_type = other DNA
agctcgcactcactcttattgctgatttagcgaacagtgaaagtgctgaggatgacccggatattttctataaag

SEQ ID NO: 348117 - DNA, 75 bp, synthetic construct
  source 1..75: mol_type = other DNA
gccttcgggaagctgaccactgacccgacgtcgggactgatagcgatggcgcgccagttccgtaacgtgacggca

SEQ ID NO: 348118 - DNA, 75 bp, synthetic construct
  source 1..75: mol_type = other DNA
gcatcaagtttgaagagcgttttgctggcaagaccatcgtgcgcgtcaacatcagcgatgcagtaaaacgtgctg

SEQ ID NO: 348119 - DNA, 75 bp, synthetic construct
  source 1..75: mol_type = other DNA
gcgcctttttactggagcaggcaaaacagatagccgccagcatgagagccgaagccaaccgcaaagcaccgcgta

SEQ ID NO: 348120 - DNA, 75 bp, synthetic construct
  source 1..75: mol_type = other DNA
atcctattgagcgcgcggcaaagttattagactgcgatattgacgatcttattcattgggctgtgacaggctgca

SEQ ID NO: 348121 - DNA, 75 bp, synthetic construct
  source 1..75: mol_type = other DNA
atagcttaacacaaggtggagcagaaaaaattgcattgcaactttacctaaatttgagtaattcagttaatgtta

SEQ ID NO: 348122 - DNA, 75 bp, synthetic construct
  source 1..75: mol_type = other DNA
tcattttggatacaagagtcaggaaagtggtttcgctggctttaaggataaaattaacgaaaggtggcaacgttt

SEQ ID NO: 348123 - DNA, 75 bp, synthetic construct
  source 1..75: mol_type = other DNA
tcggtacaccgggcagcatggcggacagccggtcgcaggcgtccgggaagtttgagcagaataaccatgtggtga

SEQ ID NO: 348124 - DNA, 75 bp, synthetic construct
  source 1..75: mol_type = other DNA
aagttcgctgaatctggatgcgtacaactggaaagaggatggcatcagcgataaaggcgtgatgctgaacttcaa

SEQ ID NO: 348125 - DNA, 75 bp, synthetic construct
  source 1..75: mol_type = other DNA
aataacgccctgcgttatgatgtgcaccagctcgacagcagtcgctcgatagcttacggcgacgtcaacaaaacc

SEQ ID NO: 348126 - DNA, 75 bp, synthetic construct
  source 1..75: mol_type = other DNA
acgtcacgatgaccaaaaacgcctatacggatgttgtgacggattcttcagttaataatgtcgctcaggtactgg

SEQ ID NO: 348127 - DNA, 75 bp, synthetic construct
  source 1..75: mol_type = other DNA
ataatggcggggtacggggaattgcgtctgagtggtgatgtccctgaacgctggcaggcatccctgccggtaagt

SEQ ID NO: 348128 - DNA, 75 bp, synthetic construct
  source 1..75: mol_type = other DNA
tatgacgatagtctggcagcaaatactctggtagggatggctgtttatgagcatggtactgctatcaacgaccag

SEQ ID NO: 348129 - DNA, 75 bp, synthetic construct
  source 1..75: mol_type = other DNA
tgggtacagtaggtcatgtggttaacaacggcacggtggtgattgccgatggggttacgggttctggactgatca

SEQ ID NO: 348130 - DNA, 75 bp, synthetic construct
  source 1..75: mol_type = other DNA
ggccgtcgcgaaccgcatgatgcaggtctggggcgggcaaaacgtttatttcccgatgggcatggtatggaagta

SEQ ID NO: 348131 - DNA, 75 bp, synthetic construct
  source 1..75: mol_type = other DNA
tatataatcatgacaataaatatgactctgatttaattgagaaattaaatggagcagccacagcaagttatgatt

SEQ ID NO: 348132 - DNA, 75 bp, synthetic construct
  source 1..75: mol_type = other DNA
cgccttcgtgacgtgtacggtgataatccggatgcgctggcgaaggccacatctgcactgaagaacacctggtct

SEQ ID NO: 348133 - DNA, 75 bp, synthetic construct
  source 1..75: mol_type = other DNA
agctatttgatctttatataaagatggccgcttctgctgcaccggccaaaggcaagaagcgtaaagtgagaacta

SEQ ID NO: 348134 - DNA, 75 bp, synthetic construct
  source 1..75: mol_type = other DNA
attgatggcgcgtggtggtcgttatgaaaaagccggacacgcaattaccggattaagaatcattggtgaagtaga

SEQ ID NO: 348135 - DNA, 75 bp, synthetic construct
  source 1..75: mol_type = other DNA
ctccgtttcagctttcaaatgctttactttatcataaaaaaaatgatagtgttattgtcaggctcaacggagaaa

SEQ ID NO: 348136 - DNA, 75 bp, synthetic construct
  source 1..75: mol_type = other DNA
ggctcagcagttccataacgttacggccgaacagattgcccatgtggcgcagctgcagcgtgccggtgatgaggc

SEQ ID NO: 348137 - DNA, 75 bp, synthetic construct
  source 1..75: mol_type = other DNA
gttaagcgggtcagaaaagaagaactggatcggatgcagggcaggttgtttgatgaagatctgccagaggagacg

SEQ ID NO: 348138 - DNA, 75 bp, synthetic construct
  source 1..75: mol_type = other DNA
cggatgcgctggcgaagaccacatctgcactgaagaacacctggtctgcggaggagcagcttcgtggaagctgga

SEQ ID NO: 348139 - DNA, 75 bp, synthetic construct
  source 1..75: mol_type = other DNA
cccatgagaaagagacgctggagtacaaacgccagctggctgacctgggcgacaaggttgaacaccagaaacggc

SEQ ID NO: 348140 - DNA, 75 bp, synthetic construct
  source 1..75: mol_type = other DNA
agcaggcggataaattcgcacagcaacaacgggcaaaacgggcagccattgatgcgaaaaaccgggggctgactg

SEQ ID NO: 348141 - DNA, 75 bp, synthetic construct
  source 1..75: mol_type = other DNA
agttgattgttcgcgtgctgaaagaaacaaacggcgtggttgccgggcctaaaggcgctgcgcaacgtctggggc

SEQ ID NO: 348142 - DNA, 75 bp, synthetic construct
  source 1..75: mol_type = other DNA
ggcggaaagtgcgacggacagtttttcgcaggttaaaaacgcggccacgcagacctttgacggtattgcacagaa

SEQ ID NO: 348143 - DNA, 75 bp, synthetic construct
  source 1..75: mol_type = other DNA
gagcgcgaagcaggcagccatcagcgcaaaagcccgcggcctcaccgaccgtcaggcgcagcgggagtcggaaga

SEQ ID NO: 348144 - DNA, 75 bp, synthetic construct
  source 1..75: mol_type = other DNA
ccctgagtcatcagcagaaatgctgaacaaggcacagcaggcattcgatgaggcggataaaaaatggcagtggta

SEQ ID NO: 348145 - DNA, 75 bp, synthetic construct
  source 1..75: mol_type = other DNA
gacagagatttttctgaagcaggcgatggtggggattgtcgggcgtatcggcagcgccattggtggtgctttcgg

SEQ ID NO: 348146 - DNA, 75 bp, synthetic construct
  source 1..75: mol_type = other DNA
caaacgccagctggctgacctgggcgacaaggttgaacaccagaaacggctgaatgagctggcacagcaggcggc

SEQ ID NO: 348147 - DNA, 75 bp, synthetic construct
  source 1..75: mol_type = other DNA
cgaaggaggcaaccagccggattggtgtcggcaacctgtaccgcctgatgcggggctatgcggaaggggggtatg

SEQ ID NO: 348148 - DNA, 75 bp, synthetic construct
  source 1..75: mol_type = other DNA
tatatttccgaacgcgagctgccgctggcgattgccagtacgccgatcccgctggggcaaagtcaggatattcag

SEQ ID NO: 348149 - DNA, 75 bp, synthetic construct
  source 1..75: mol_type = other DNA
gctggctggccattttctgcagcgctttgccgagcgtaatcgcaaggcggtaaaaggttttacgccccaggcgat

SEQ ID NO: 348150 - DNA, 75 bp, synthetic construct
  source 1..75: mol_type = other DNA
ggcaacggcgggaagatatccctctgctggctggccattttctgcagcgctttgccgagcgtaatcgcaaggcgg

SEQ ID NO: 348151 - DNA, 75 bp, synthetic construct
  source 1..75: mol_type = other DNA
atttgatattgactctgcggttggtgtgcaacttgacatccttggattgtggatcggacgtagccgtgttgtcag

SEQ ID NO: 348152 - DNA, 75 bp, synthetic construct
  source 1..75: mol_type = other DNA
gatactgccatctgtgtcggtgcggcactgattgtgctggaaggttttttgccttctaaagcgaaaaaacaataa

SEQ ID NO: 348153 - DNA, 75 bp, synthetic construct
  source 1..75: mol_type = other DNA
atcgcaaggcggtaaaaggctttacgccccaggcgatggatctgctgattcactacgactggccgggaaatattc

SEQ ID NO: 348154 - DNA, 75 bp, synthetic construct
  source 1..75: mol_type = other DNA
gcagtcgcatatcgatcgtgaagagtacgtagccagagttctggatcgcgaggcgaaaagcacgcctccagaggc

SEQ ID NO: 348155 - DNA, 75 bp, synthetic construct
  source 1..75: mol_type = other DNA
caactgcaggctctggcctgaagatgcagatcgtcgacaaccaggacatgacgatctcggtctgggtatttcccg

SEQ ID NO: 348156 - DNA, 75 bp, synthetic construct
  source 1..75: mol_type = other DNA
acttcgctggcagttgccaccggagcgctggcgtatgcctggtatcagggggactcaaccctgtccagtttcaat

SEQ ID NO: 348157 - DNA, 75 bp, synthetic construct
  source 1..75: mol_type = other DNA
ggagcaggtgcgggaacaggtttttgatcttgtgctttgcgatgtgcgaatggcggagatggacggcatcgccac

SEQ ID NO: 348158 - DNA, 75 bp, synthetic construct
  source 1..75: mol_type = other DNA
tattggcgttggttactctgtcgacgattgcaggggaaccaccgctacaactggcgctgcggggcgcgcagcatg

SEQ ID NO: 348159 - DNA, 75 bp, synthetic construct
  source 1..75: mol_type = other DNA
tttttacacttcaggatcgactggatttaactcatgagtacctgcatcttgcctttgatggataccccaccgggc

SEQ ID NO: 348160 - DNA, 75 bp, synthetic construct
  source 1..75: mol_type = other DNA
gttacatgaaaagctgcttgtggatgcacaggccggacagaaaaaatcacttgcattgcaggaaaaatccctgct

SEQ ID NO: 348161 - DNA, 75 bp, synthetic construct
  source 1..75: mol_type = other DNA
gctggtgcgatcacactgcctgctgtcgggatcacatcactggtcgcagcgaccggtgcgctggcgtatgcctgg

SEQ ID NO: 348162 - DNA, 75 bp, synthetic construct
  source 1..75: mol_type = other DNA
ggcacagaaggcgtatgaacggatgctgtcgccgctggataaatataccgcccgtcagaaagagctgaatcaggc

SEQ ID NO: 348163 - DNA, 75 bp, synthetic construct
  source 1..75: mol_type = other DNA
tgataataccggggccggatggtggcgcaccgtcacacgggccggccggaaatccgttaccgttacgacagcgac

SEQ ID NO: 348164 - DNA, 75 bp, synthetic construct
  source 1..75: mol_type = other DNA
agatgcggcgggaagacgtcattaattttaatcagaataacaatgtggtgattcagaatgacggtatcaacggac

SEQ ID NO: 348165 - DNA, 75 bp, synthetic construct
  source 1..75: mol_type = other DNA
gtaaaaaaagaactgggtgaaaccagtgcgcttgctgatttgatgtccgggaaagtcagtcagtctttcagaaaa

SEQ ID NO: 348166 - DNA, 75 bp, synthetic construct
  source 1..75: mol_type = other DNA
ataaaacatctcatggaggcattgttattagtgccagtgcggattttttgcatgaaggtcagcctgtagcttgtg

SEQ ID NO: 348167 - DNA, 75 bp, synthetic construct
  source 1..75: mol_type = other DNA
attaaggcagagactgcgtttaagaaagcagacgacatctggaatctccgcaaggatgattattttgttaacgat

SEQ ID NO: 348168 - DNA, 75 bp, synthetic construct
  source 1..75: mol_type = other DNA
aggactccttcggcgggatgatccccatgttccgggggcttgcaggtgcgatcagcctgccaatggccggtgtca

SEQ ID NO: 348169 - DNA, 75 bp, synthetic construct
  source 1..75: mol_type = other DNA
cctgctgcaacagggcggtcaggtgaaagactcgttcggtggtcttatcccgatgttccggggactggcgggagc

SEQ ID NO: 348170 - DNA, 75 bp, synthetic construct
  source 1..75: mol_type = other DNA
ccgccacgaaacggcagttatctgagcaggaaaaatccctgctggcccatgagaaagaaacgctggagtacaaac

SEQ ID NO: 348171 - DNA, 75 bp, synthetic construct
  source 1..75: mol_type = other DNA
tgagctggcacagcaggcggtgcggtttgaagagcagcagagcgtgaagcaggccgccatcagcgcaaaagcccg

SEQ ID NO: 348172 - DNA, 75 bp, synthetic construct
  source 1..75: mol_type = other DNA
gtggtgctttcggtggtggggcgtctgcctccacggggacggccattgaggctgcggcggcgaacttccatttcg

SEQ ID NO: 348173 - DNA, 75 bp, synthetic construct
  source 1..75: mol_type = other DNA
cggggctatgcggaaggtggttatgtgggcggtgccggaagtccggcgcagatgcggcgggctgaaggcattaat

SEQ ID NO: 348174 - DNA, 75 bp, synthetic construct
  source 1..75: mol_type = other DNA
cgtcaggaagaactgaacaaggccctgagagacgggaaaatcctgcaggtggattacaacacgctgatggtgtcg

SEQ ID NO: 348175 - DNA, 75 bp, synthetic construct
  source 1..75: mol_type = other DNA
cccgtctgggtctggcagcggccacgctgcagtcggatatggaaaaagccggtgaactggcggcaagggaccggg

SEQ ID NO: 348176 - DNA, 75 bp, synthetic construct
  source 1..75: mol_type = other DNA
cagcccctgcctgtttagcccgtaagacttataatgatcctacggttgttgccgcgttaaaaagtatgttctttg

SEQ ID NO: 348177 - DNA, 75 bp, synthetic construct
  source 1..75: mol_type = other DNA
accaaaaaagcgtcaaccgtttctcgcggcggctatggtcgttcttccagcgcccgtgggcattggggaggctaa

SEQ ID NO: 348178 - DNA, 75 bp, synthetic construct
  source 1..75: mol_type = other DNA
agatcgcgatgagccgttcgtctataacagcggcggatcctcatttgcttcccgccccgtctggcgcaacacttc

SEQ ID NO: 348179 - DNA, 75 bp, synthetic construct
  source 1..75: mol_type = other DNA
aggtaacgaatctgacgtttattccagcgagatcccggcagagttccagaaactggagcgttttgctgcacgtaa

SEQ ID NO: 348180 - DNA, 75 bp, synthetic construct
  source 1..75: mol_type = other DNA
tacgctgaagccagaaacctcggtaacggttaaatcactgcttgattcattagcgacgttacccgcgcaaaacaa

SEQ ID NO: 348181 - DNA, 75 bp, synthetic construct
  source 1..75: mol_type = other DNA
ggagagcgttatgatcagatacttgccttcgcttatcctgacaatagccttagccgttgggggacgccacgttca

SEQ ID NO: 348182 - DNA, 75 bp, synthetic construct
  source 1..75: mol_type = other DNA
gagtaatttggcgcatctgcaacaggtggtaggtcatgaaaagagtggagtagggattacccagcgttatctgca

SEQ ID NO: 348183 - DNA, 75 bp, synthetic construct
  source 1..75: mol_type = other DNA
tggttctcttctgcgctgtggaccttctctaccctaggctggccggaaaacaccgacgcactgcgccagttccac

SEQ ID NO: 348184 - DNA, 75 bp, synthetic construct
  source 1..75: mol_type = other DNA
ggacagcttccgcttcgatatcgccgcaggcattctgtatgaattcacctggaaccagttctgtgactggtatct

SEQ ID NO: 348185 - DNA, 75 bp, synthetic construct
  source 1..75: mol_type = other DNA
tctctacccttggctggccggaaaataccgacgccctgcatcagttccacccaaccagcgtgatggtatctggtt

SEQ ID NO: 348186 - DNA, 75 bp, synthetic construct
  source 1..75: mol_type = other DNA
ctgcgtggttgcagcgcggatgcagaacgtcgagtgaacgaaaaccgtggcttcctgcaaacgctggcgcgtctg

SEQ ID NO: 348187 - DNA, 75 bp, synthetic construct
  source 1..75: mol_type = other DNA
gtatcccggcatggtacgacgaagcaggtaacgtttatgttggtcgcaatgaagacgaagtgcgtcaggaaaata

SEQ ID NO: 348188 - DNA, 75 bp, synthetic construct
  source 1..75: mol_type = other DNA
aactggagcgttttgctgcacgtaaagcagtcgttgctgcggttgacgcactcggcctgctggaagaaattaaac

SEQ ID NO: 348189 - DNA, 75 bp, synthetic construct
  source 1..75: mol_type = other DNA
gtgaactggtacagaatcgtctggctattggcgttggttactctgccaacgctggcggaggaaacgccgttacaa

SEQ ID NO: 348190 - DNA, 75 bp, synthetic construct
  source 1..75: mol_type = other DNA
attttgcttatctggtgcaaaggaacgaaagaatacggtggcttctggcgcgttacattatcgctgctgctggaa

SEQ ID NO: 348191 - DNA, 75 bp, synthetic construct
  source 1..75: mol_type = other DNA
gtgtggaattcaccgcagcgtgatgatgactccacttcctggggtgaagcgttcaaacgccacggctcacagctg

SEQ ID NO: 348192 - DNA, 75 bp, synthetic construct
  source 1..75: mol_type = other DNA
atccagttgatatggtcgatcaggatttgtgggtttcctttatgcagcttctgccttacatgctgcaaaccggta

SEQ ID NO: 348193 - DNA, 75 bp, synthetic construct
  source 1..75: mol_type = other DNA
ccggaagtccggcgcagatgcggcgggcggaaggcattaattttaatcagaacaatcacgtggtgattcagaacg

SEQ ID NO: 348194 - DNA, 75 bp, synthetic construct
  source 1..75: mol_type = other DNA
tatatctgcgtcaaccgttggtgatgagccgttaaatccggagcatcgcacggcattgatcatgcctatttgtaa

SEQ ID NO: 348195 - DNA, 75 bp, synthetic construct
  source 1..75: mol_type = other DNA
accagggggcaccgattgtcatcgaccaaccaagcagtttcctggcaatttctgatctggtggttcgcgttctcg

SEQ ID NO: 348196 - DNA, 75 bp, synthetic construct
  source 1..75: mol_type = other DNA
tgctggggatagtcggtgccgtagtcggcggatggatcagcacgctgtttggctttggtaaagtcgatggggtaa

SEQ ID NO: 348197 - DNA, 75 bp, synthetic construct
  source 1..75: mol_type = other DNA
gcgcgcggacgatgaccgcctggacgcaggatctcatctatgcgggcgatccggttcattatcatggcagccggg

SEQ ID NO: 348198 - DNA, 75 bp, synthetic construct
  source 1..75: mol_type = other DNA
ggcagccagtacagctacatggtggtgctggatgctgactcggtaatgaccggtgattgtttatgcgggctggtg

SEQ ID NO: 348199 - DNA, 75 bp, synthetic construct
  source 1..75: mol_type = other DNA
cggaagagtattcaccgccgcaggtgctggttgataccgatcggttccttgagatgaaccgtcaacgctcccttg

SEQ ID NO: 348200 - DNA, 75 bp, synthetic construct
  source 1..75: mol_type = other DNA
cgctggctggacgttaccgaaaaagataaaaacagccgtagtgccacgttctacaacacgcttccactgcatgac

SEQ ID NO: 348201 - DNA, 75 bp, synthetic construct
  source 1..75: mol_type = other DNA
ggaaccagttctgtgactggtatctcgagctgactaagccggtaatgaacggtggcaccgaagccgaactgcgcg

SEQ ID NO: 348202 - DNA, 75 bp, synthetic construct
  source 1..75: mol_type = other DNA
gagaatcactctccattggatgtcactacattgctgcgatcccacgcgaaagaattcattgtcatcttcttaatt

SEQ ID NO: 348203 - DNA, 75 bp, synthetic construct
  source 1..75: mol_type = other DNA
atgaattatcactatcgcgccatgacccaggatggtcaaaaattgcagggagtcattgatgctaacgatgagcgt

SEQ ID NO: 348204 - DNA, 75 bp, synthetic construct
  source 1..75: mol_type = other DNA
gcgtatggtgcacagactgtggcaggcagtggtgaattacgtctgaacggcatgatgccggaacgctggcgggtg

SEQ ID NO: 348205 - DNA, 75 bp, synthetic construct
  source 1..75: mol_type = other DNA
gtttccctcgtgtggatgaaggcgatatgagccggatgcgcgccacgctggtccgtggcaatacgctggctgaac

SEQ ID NO: 348206 - DNA, 75 bp, synthetic construct
  source 1..75: mol_type = other DNA
tttaggcgactctattttgagctacgttatcgccaatgcgctgtatcaccgtttccctcgtgtggatgaagggga

SEQ ID NO: 348207 - DNA, 75 bp, synthetic construct
  source 1..75: mol_type = other DNA
ccgttgcgatttatctgggaagtgccaggcggtgggcggttaattccaccgctaaaggtacaacgtaatgaagtg

SEQ ID NO: 348208 - DNA, 75 bp, synthetic construct
  source 1..75: mol_type = other DNA
cttcctgggaacaaatggtcagtctaaccgtaaggccgagcactacttcctcaacggcaaactttctgctgtgcg

SEQ ID NO: 348209 - DNA, 75 bp, synthetic construct
  source 1..75: mol_type = other DNA
ttgcatgatcaaggttacgtcactcaggccatcggtaaatggcatatgggagaaaacaaagagtcgcagccacag

SEQ ID NO: 348210 - DNA, 75 bp, synthetic construct
  source 1..75: mol_type = other DNA
ggagaaatcagtctgtgcagactgagtatacaggcaatggcatctggccatccgtctgtgaccggaacggttacg

SEQ ID NO: 348211 - DNA, 75 bp, synthetic construct
  source 1..75: mol_type = other DNA
cagcgccgtcaactcaacttgttgattgataacattgttgatgttagcaaggaagaatcgtttgttgtttggcgt

SEQ ID NO: 348212 - DNA, 75 bp, synthetic construct
  source 1..75: mol_type = other DNA
ctacagacagaaatgcacgcgtatatggatatcctgaaaaaatatccgccacgcgcgcagattaaatctgattaa

SEQ ID NO: 348213 - DNA, 75 bp, synthetic construct
  source 1..75: mol_type = other DNA
tatggaagatctggatcaacgctggatggaatatggcgttaagttcctcgacaagatggcgaagagcgataagcc

SEQ ID NO: 348214 - DNA, 75 bp, synthetic construct
  source 1..75: mol_type = other DNA
tcccatacggaatgaattcagttccccaggcgctccatcaaaaacacaaccaggcagtaaacacccacaacagca

SEQ ID NO: 348215 - DNA, 75 bp, synthetic construct
  source 1..75: mol_type = other DNA
ccgttaacccggaagatccgcgttacaaagatctgattggcaaatatgtcattctgccgctggttaaccgtcgta

SEQ ID NO: 348216 - DNA, 75 bp, synthetic construct
  source 1..75: mol_type = other DNA
ctgctgaggctgccgttgaccctgctgaagttgtgaagggctacaacgagattctgggcgacctgctacctatag

SEQ ID NO: 348217 - DNA, 75 bp, synthetic construct
  source 1..75: mol_type = other DNA
gtcaagttgacccatgcgctaaggtcaaaatgacccaatctcttacagagaatacaacagagagtactacagaga

SEQ ID NO: 348218 - DNA, 75 bp, synthetic construct
  source 1..75: mol_type = other DNA
aactggagcgttttgccgcgcgtaaagcagtcgttgccgccgttgacgccctcggcctgctggaagaaattaaac

SEQ ID NO: 348219 - DNA, 75 bp, synthetic construct
  source 1..75: mol_type = other DNA
catccgatcattccgttcatcaccgaaaccatctggcagcgtgtgaaagtactttgcggtatcactgccgacacc

SEQ ID NO: 348220 - DNA, 75 bp, synthetic construct
  source 1..75: mol_type = other DNA
gccgggcaaaccgctggagctgctgctgcgtggttgcagcgcggatgcagagcgtcgcgtaaatgaaaaccgtgg

SEQ ID NO: 348221 - DNA, 75 bp, synthetic construct
  source 1..75: mol_type = other DNA
ttagaagaggtcgcaaccgacatcatcaacctagaacaaaaagccgaaggtttgattgcgcagattcttggtgcg

SEQ ID NO: 348222 - DNA, 75 bp, synthetic construct
  source 1..75: mol_type = other DNA
ctggctacgggtcagatcagaaaaagagcttcttaaaatccatcgagaaagacattatttcttggtgtgaagata

SEQ ID NO: 348223 - DNA, 75 bp, synthetic construct
  source 1..75: mol_type = other DNA
ttgttactacgacaacgttgaacagagttggatcccggtaatatctggatttttgttaagccgggttattcgtaa

SEQ ID NO: 348224 - DNA, 75 bp, synthetic construct
  source 1..75: mol_type = other DNA
ttgtcggttcatttagatttactccttacttagaaaaattaaaaagtaaagggcgaggaaaaagtcctagggtaa

SEQ ID NO: 348225 - DNA, 75 bp, synthetic construct
  source 1..75: mol_type = other DNA
tgccactaccaatagcgccaccgtcaacagtaaaaaatagtggttcagaaagagcgaagaagtcaggaaggagaa

SEQ ID NO: 348226 - DNA, 75 bp, synthetic construct
  source 1..75: mol_type = other DNA
taaaaacatttacgagaacaaagagaaagatgaacgttataacgcactagttgggcgtatgcaggaggtcggagc

SEQ ID NO: 348227 - DNA, 75 bp, synthetic construct
  source 1..75: mol_type = other DNA
ccgtcagggacctgccagtcctgtggtagccgtaccatcagagaagattgccctgcatgatgccaccctgcaggc

SEQ ID NO: 348228 - DNA, 75 bp, synthetic construct
  source 1..75: mol_type = other DNA
ctttgcgaacgtcttggacttgttgagaaagtcaaaggaatgggaagcgcaaaagctggtacacagcaatatcgc

SEQ ID NO: 348229 - DNA, 75 bp, synthetic construct
  source 1..75: mol_type = other DNA
gcaaacaagcgccagaagtatttttccgtgatgcaatgactaatagttattcactggaaaaactggtttatctgg

SEQ ID NO: 348230 - DNA, 75 bp, synthetic construct
  source 1..75: mol_type = other DNA
cgaacggggattggcgctattacgctgattgatatggatgatgtctgcgtcaccaataccaatcggcaaattcat

SEQ ID NO: 348231 - DNA, 75 bp, synthetic construct
  source 1..75: mol_type = other DNA
attgatgccattgatagtgtacgacccaaagcggcgctgattgcttattgtcggcgcaataaaatcccgctggtc

SEQ ID NO: 348232 - DNA, 75 bp, synthetic construct
  source 1..75: mol_type = other DNA
atgtctgtggtaattagtgatgcatggcgtcagcgttttggtggcacagcgcgtctgtatggtgaaaaagcgctg

SEQ ID NO: 348233 - DNA, 75 bp, synthetic construct
  source 1..75: mol_type = other DNA
acccgcgacgggctatatgtttgcctgcgtgagggcgagtgcgaagggtggggggagatctccccactgcctggc

SEQ ID NO: 348234 - DNA, 75 bp, synthetic construct
  source 1..75: mol_type = other DNA
gccgctgaaggggcagcagtttgcgaaatacgtcaaccctgattaccgcgaccgcatcgccttccttgaagaacc

SEQ ID NO: 348235 - DNA, 75 bp, synthetic construct
  source 1..75: mol_type = other DNA
gtgcaaaacacgcgatgattcccgcgcctttgcccgtgaaactggcattgccattgcctgggatgaaagcctgcg

SEQ ID NO: 348236 - DNA, 75 bp, synthetic construct
  source 1..75: mol_type = other DNA
cgtttattccgtcgctgatatgtcaggatctcgtgtatttgctttaatcgatatgattaacgacgagatcgacac

SEQ ID NO: 348237 - DNA, 75 bp, synthetic construct
  source 1..75: mol_type = other DNA
ggatctgatgcaggcgcagcaggttcgtcgctggccgggtagcccactgccgttagtggacattaatgcactgga

SEQ ID NO: 348238 - DNA, 75 bp, synthetic construct
  source 1..75: mol_type = other DNA
cgcaaagtgtgctgcttgcctgggtaaatgactggctggcaggcgattgcgaattaccgcaaatgccttccgtcg

SEQ ID NO: 348239 - DNA, 75 bp, synthetic construct
  source 1..75: mol_type = other DNA
gatggtaaccgccacttttggctttgttgcggtttctcatgcgctgaagaagatgatggcgaaagcggcgcgtca

SEQ ID NO: 348240 - DNA, 75 bp, synthetic construct
  source 1..75: mol_type = other DNA
tgagggggattctgatctgctaatctggaacgtgaccggtaaccactggccgtttgaaatttataagaccctatt

SEQ ID NO: 348241 - DNA, 75 bp, synthetic construct
  source 1..75: mol_type = other DNA
ttctttacggtaacctgagtcctgtaggctgggcaggaatgagtctggtgggcgatatgtttattatgatctgct

SEQ ID NO: 348242 - DNA, 75 bp, synthetic construct
  source 1..75: mol_type = other DNA
ggtggactggcaatattggcggtcattctttacggtaacttgagtcctgtaggctgggcaggaatgagtctggtg

SEQ ID NO: 348243 - DNA, 75 bp, synthetic construct
  source 1..75: mol_type = other DNA
gtgcttcactgggcgcgcgtgaacgggttgtggtggtcgatgtggaagatgcacggcgttaccgcagggcaaatc

SEQ ID NO: 348244 - DNA, 75 bp, synthetic construct
  source 1..75: mol_type = other DNA
cggaactctcaggatgaaaggtgaactgacaccggcgttattacagacatttatccgcgaaatgaaagagagcag

SEQ ID NO: 348245 - DNA, 75 bp, synthetic construct
  source 1..75: mol_type = other DNA
ctggtgggcgatatgtttattatgatctgctggcttcttccttttttattttgttcccttgagcttttgtttgcc

SEQ ID NO: 348246 - DNA, 75 bp, synthetic construct
  source 1..75: mol_type = other DNA
agcccggttgtctccatcccgacggataaaatcgccctgcatgatgcaacattacaggcatttctggatggtatt

SEQ ID NO: 348247 - DNA, 75 bp, synthetic construct
  source 1..75: mol_type = other DNA
ccggcggggacctgccagcccggtggtgtccataccgtcagaaaaaattgccctgcatgacgccactctgcaggc

SEQ ID NO: 348248 - DNA, 75 bp, synthetic construct
  source 1..75: mol_type = other DNA
caccaatactaatcggcaaattcacgcgctgcgcgataacgtcgggctggcaaaagctgaagtgatggcggaacg

SEQ ID NO: 348249 - DNA, 75 bp, synthetic construct
  source 1..75: mol_type = other DNA
tctttaccggagaagagggcgacacatatcgaaatggccgcatccttgaggacggaagaattgaatcccgcgatc

SEQ ID NO: 348250 - DNA, 75 bp, synthetic construct
  source 1..75: mol_type = other DNA
acgccggagccggataataaaatcccggcccccgcacaggaaccagagcagataaatacaccgtccgacagtctg

SEQ ID NO: 348251 - DNA, 75 bp, synthetic construct
  source 1..75: mol_type = other DNA
tgtggcgcgaatgcccgcaagaaattaacaagccagaattgccgtcgctggcagatgccgttacaggttgctatc

SEQ ID NO: 348252 - DNA, 75 bp, synthetic construct
  source 1..75: mol_type = other DNA
gtcttgacgcgaatcgcgcctggacgccgctgaagagccagcagtttgccaaatatgtcaatccggattatcgcg

SEQ ID NO: 348253 - DNA, 75 bp, synthetic construct
  source 1..75: mol_type = other DNA
acttcccccttctgcgccaacggaagagatgccacaggccgatttccagtcgctaatgaaaaatttgctcaagcg

SEQ ID NO: 348254 - DNA, 75 bp, synthetic construct
  source 1..75: mol_type = other DNA
tgccgttcttttcgttctggtcggcgcttacacgatgggcgggaatgcggcgcgacgagcaatggaagagaaggc

SEQ ID NO: 348255 - DNA, 75 bp, synthetic construct
  source 1..75: mol_type = other DNA
cagtctttccgccgaagatttcacatggcaccccgtcagccgggctgttggcaatccgaaaaatcaggggccgga

SEQ ID NO: 348256 - DNA, 75 bp, synthetic construct
  source 1..75: mol_type = other DNA
caaccacgccggtttccaccgcgccgctcctgcaggtgagtggcgcattaattgccattattgtcctgattctca

SEQ ID NO: 348257 - DNA, 75 bp, synthetic construct
  source 1..75: mol_type = other DNA
gtcaacgggctgaaagtcagcgccagcgtctcactgggcgcacgcgaacgagtggtcgtggttaatgtggaggat

SEQ ID NO: 348258 - DNA, 75 bp, synthetic construct
  source 1..75: mol_type = other DNA
cccacggaagagataccacaggccgattttcagtcggtcatgaaaaacttgctcaagcgtagcgggagatcctga

SEQ ID NO: 348259 - DNA, 75 bp, synthetic construct
  source 1..75: mol_type = other DNA
gacagaaatcctgcttaaacaggccatggtgggaattgtcgggcgtatcggcagcgccattggtggtgctttcgg

SEQ ID NO: 348260 - DNA, 75 bp, synthetic construct
  source 1..75: mol_type = other DNA
gcccggcgcggtaaaaacgtatttgccggataccaacgaactggcaggcttgctgtattatctacatcaacaacc

SEQ ID NO: 348261 - DNA, 75 bp, synthetic construct
  source 1..75: mol_type = other DNA
ctttttcccgcagtttcatcccgtcacgacgtttaatagtgggcttagtggcgggagttttctcattgaacatca

SEQ ID NO: 348262 - DNA, 75 bp, synthetic construct
  source 1..75: mol_type = other DNA
gtctgccggtgagcgccaggaagaccgggcacatgcagccatgctggcgcttgaaaccgagctccggacgctgga

SEQ ID NO: 348263 - DNA, 75 bp, synthetic construct
  source 1..75: mol_type = other DNA
aggatttacgggaaccggtggcaaatacgaacctgccggtattgtccaccgcggggagtttgtcttcacgaagga

SEQ ID NO: 348264 - DNA, 75 bp, synthetic construct
  source 1..75: mol_type = other DNA
gcacggctggtgctcggcgttaccgcagggcaaatcaatctgctgcataaacttcccccttcagcaccaacggaa

SEQ ID NO: 348265 - DNA, 75 bp, synthetic construct
  source 1..75: mol_type = other DNA
tgctggtcagcggtgaaaaaaatgggcggcacgccgatccttggtatcgtgcttggcgtgacactggtttccccc

SEQ ID NO: 348266 - DNA, 75 bp, synthetic construct
  source 1..75: mol_type = other DNA
gaaggcctggagcagtgaaccggcctcgcttgacggtggcggggagatctccgtgaagttcgccagcgcctccag

SEQ ID NO: 348267 - DNA, 75 bp, synthetic construct
  source 1..75: mol_type = other DNA
gaggcgacgctggactgtaaatttccggctggcggagaaggttcaccggctgccgatgaaatcaacacctggact

SEQ ID NO: 348268 - DNA, 75 bp, synthetic construct
  source 1..75: mol_type = other DNA
cgcagagcgtgctgctttcctgggtaaataactggctggcaggtgattgcgagctaccgcagatgccttccgtcg

SEQ ID NO: 348269 - DNA, 75 bp, synthetic construct
  source 1..75: mol_type = other DNA
gcggccaattatcgtgctgcgccgctgtgtaatggcgatcctgacgatctgatcctcaaacttgccgatatgcct

SEQ ID NO: 348270 - DNA, 75 bp, synthetic construct
  source 1..75: mol_type = other DNA
ccagggggattccacgctttcagcgtttaataaaaccctggttctttccggtaatcagtccggactgactgccga

SEQ ID NO: 348271 - DNA, 75 bp, synthetic construct
  source 1..75: mol_type = other DNA
acgtaaggctgcggtacgacggcggaatctggagaaacgtatcaacaggcatgcaccactgtttgcggatgaact

SEQ ID NO: 348272 - DNA, 75 bp, synthetic construct
  source 1..75: mol_type = other DNA
cgtaaggctgcggtacgacggcggaatctggagaaacgtatcaacaggcatgcaccactgtttgcggatgaactg

SEQ ID NO: 348273 - DNA, 75 bp, synthetic construct
  source 1..75: mol_type = other DNA
tggagaacaaagtcgggacaagggtggttcctataaaacatgaagatattgttcgttttgcgaaacgaagaaatc

SEQ ID NO: 348274 - DNA, 75 bp, synthetic construct
  source 1..75: mol_type = other DNA
tgccgatgaaatcaacacctggactgcggtcacgattgagttcgtggccgataccggtgaagtccacatgatgac

SEQ ID NO: 348275 - DNA, 75 bp, synthetic construct
  source 1..75: mol_type = other DNA
caaagcctggagtgtggagcccgcgtctttagatggtggtggcgatatctctgcgaagttcgccagcgcaaccag

SEQ ID NO: 348276 - DNA, 75 bp, synthetic construct
  source 1..75: mol_type = other DNA
ggaaagaagccgcaaacagaaaaatgcttgcattgctgacattccttaaagaagaaacatactccgattttaaaa

SEQ ID NO: 348277 - DNA, 75 bp, synthetic construct
  source 1..75: mol_type = other DNA
gtatgcaggttaaagtgctggcgctggcaccagatgccaccgacgtcgcgatggcgctattctccgggatattta

SEQ ID NO: 348278 - DNA, 75 bp, synthetic construct
  source 1..75: mol_type = other DNA
ccgcaacgatatcgaaatgcttcgcgaaaacatggtgaagtcgaaaggccgcaacaactttaaaaacctgtttct

SEQ ID NO: 348279 - DNA, 75 bp, synthetic construct
  source 1..75: mol_type = other DNA
gtactactatccgatcctgatacgggaaccgggaagtaacggcaatatgcacgccagcgcggatatttatcgcta

SEQ ID NO: 348280 - DNA, 75 bp, synthetic construct
  source 1..75: mol_type = other DNA
tgtacgtcaccgatgccgtgcaggaccgcaacgatatcgaaatgcttcgcgaaaacatggttaagtcgaaaggcc

SEQ ID NO: 348281 - DNA, 75 bp, synthetic construct
  source 1..75: mol_type = other DNA
gcgagatacacctcggcgtgctgagcattttctgggggattgcgatgatgatcatcgggcttgggatgcaggtta

SEQ ID NO: 348282 - DNA, 75 bp, synthetic construct
  source 1..75: mol_type = other DNA
ggggcacttatcactctgctatgcctcataaaattactgcccttgcttcccagcgaacattcaggatcgctgaaa

SEQ ID NO: 348283 - DNA, 75 bp, synthetic construct
  source 1..75: mol_type = other DNA
atcaactgttttactgcctgcaacgcgggatcagcgaagaagacgccatctcgatgattgttaacggtttctgca

SEQ ID NO: 348284 - DNA, 75 bp, synthetic construct
  source 1..75: mol_type = other DNA
tgcgcggcgataactccattggtgagttttactcagtggcactgaccagcggtcatcagcaagcggataccggca

SEQ ID NO: 348285 - DNA, 75 bp, synthetic construct
  source 1..75: mol_type = other DNA
ccaagatgatccacatcggtaaaaacaccaaatcgaccattatctcgaaagggatctctgccggacacagccaga

SEQ ID NO: 348286 - DNA, 75 bp, synthetic construct
  source 1..75: mol_type = other DNA
gtaaaaacaccaaatcgaccattatctcgaaagggatctctgccggacatagtcagaacagttatcgcggcttag

SEQ ID NO: 348287 - DNA, 75 bp, synthetic construct
  source 1..75: mol_type = other DNA
aatgccgaggtgaaatattccacggtgcaaaactggttccctggcgataacaatagcggcggtattctcaacttc

SEQ ID NO: 348288 - DNA, 75 bp, synthetic construct
  source 1..75: mol_type = other DNA
ggttttggggatgtggaaaaggccagccttgtttttgtaagaaacgaactaatccccctccaaaaaaggctgcaa

SEQ ID NO: 348289 - DNA, 75 bp, synthetic construct
  source 1..75: mol_type = other DNA
gctcagccagcaggctttttcgcgttttgtacaggactatctggtttttggtaacacctacctggaaaaacgcac

SEQ ID NO: 348290 - DNA, 75 bp, synthetic construct
  source 1..75: mol_type = other DNA
tttacaaaaacggttacaagaactaaattattggatagatgaagatataatccaatttgaagattatagtttaac

SEQ ID NO: 348291 - DNA, 75 bp, synthetic construct
  source 1..75: mol_type = other DNA
ggggatgtggagaaagcctgcaaagtatttgttagaaatgagttaacagtattacaaaaaaaaatactggaactg

SEQ ID NO: 348292 - DNA, 75 bp, synthetic construct
  source 1..75: mol_type = other DNA
ttgacggactggcgcgcaccttccgcgccgccgtgcaccacagctcaccgattgcagtgaagtgcaacattctga

SEQ ID NO: 348293 - DNA, 75 bp, synthetic construct
  source 1..75: mol_type = other DNA
taaaagccagacttcagcagaggcattcagcttcggcgatcccgttcctgttctggaccgccgcgaactgctgga

SEQ ID NO: 348294 - DNA, 75 bp, synthetic construct
  source 1..75: mol_type = other DNA
ttccgtcagccctgctcaatgagtccgccacgctgttccgtcgcaagtattacattaacggcagtcacgcgggct

SEQ ID NO: 348295 - DNA, 75 bp, synthetic construct
  source 1..75: mol_type = other DNA
acaacccagccgtatcagttcacaaaaggcagcatttttcatctgatggaaccggatattaatcaggagatctac

SEQ ID NO: 348296 - DNA, 75 bp, synthetic construct
  source 1..75: mol_type = other DNA
tgctgtccatgatgacagaaatcctgcttaaacaggccatggtgggcattgtcgggcgtatcggcagcgccattg

SEQ ID NO: 348297 - DNA, 75 bp, synthetic construct
  source 1..75: mol_type = other DNA
gcagaaccaggaggatgtaaacaacctccgtaacgcgatgaaaagcgccaaaggaccaggtaacttccgcaatct

SEQ ID NO: 348298 - DNA, 75 bp, synthetic construct
  source 1..75: mol_type = other DNA
tcatcatgtacatgaccgacgccgcgcagaaccaggaggatgtaaacaacctccgtaacgcgatgaaaagcgcca

SEQ ID NO: 348299 - DNA, 75 bp, synthetic construct
  source 1..75: mol_type = other DNA
aatgcctagtaatgtcggggggtttggggatgtggagaaggctagtaaggtttttgtaagaaacgagttaattcc

SEQ ID NO: 348300 - DNA, 75 bp, synthetic construct
  source 1..75: mol_type = other DNA
ttcgtctaaacgcctatcgcgcatggctggagatggaagaaccgcactggttgaaagcgcactacgacaagctga

SEQ ID NO: 348301 - DNA, 75 bp, synthetic construct
  source 1..75: mol_type = other DNA
cggtgagcgccaggaagaccgggcgcatgcagccctgctggcgcttgaaaccgagctcaggacgctggaaaaaca

SEQ ID NO: 348302 - DNA, 75 bp, synthetic construct
  source 1..75: mol_type = other DNA
gcgtggtggtgaacagtttgatgccatcaaccagagtgtcgcgcgttttgcgtctgcatccggtgtggaggtgga

SEQ ID NO: 348303 - DNA, 75 bp, synthetic construct
  source 1..75: mol_type = other DNA
accagagtgtcgcgcgttttgcgtctgcatccggtgtggaggtggataaagtcgctgaagccttcgggaagctga

SEQ ID NO: 348304 - DNA, 75 bp, synthetic construct
  source 1..75: mol_type = other DNA
cggggattgttcaccgtggtgaatttgtcttcacgaaggaggcaacaagccggattggcgtgggaaatctctacc

SEQ ID NO: 348305 - DNA, 75 bp, synthetic construct
  source 1..75: mol_type = other DNA
atgtcggcggtgccggaagtccggcgcagatgcggcgggcggaaggcattaattttaatcagaacaatcacgtgg

SEQ ID NO: 348306 - DNA, 75 bp, synthetic construct
  source 1..75: mol_type = other DNA
gattctgtgttttgtctggatggtgagggattcgctttgcgtactccggctccagcagggaaacacagtgcttgt

SEQ ID NO: 348307 - DNA, 75 bp, synthetic construct
  source 1..75: mol_type = other DNA
gtggataaactggatacaaacaacagtgttctggctttacggacaaacctgaacagcgctgaccacctgacagtt

SEQ ID NO: 348308 - DNA, 75 bp, synthetic construct
  source 1..75: mol_type = other DNA
aaaagcagcaaccattcagtttggttctgaaaaaaatatcagcacagacccgtctgtcagccctgtgctgaccac

SEQ ID NO: 348309 - DNA, 75 bp, synthetic construct
  source 1..75: mol_type = other DNA
acgctgaatgttaatgtttctcaaggtaataatctgaaaactggcaatggcattgtcgtattaaatagcgctaat

SEQ ID NO: 348310 - DNA, 75 bp, synthetic construct
  source 1..75: mol_type = other DNA
ttttgttgtcctctctggttatggggtgttcgcaacataaaactgatatgccacgacagttggttaaggcgttac

SEQ ID NO: 348311 - DNA, 75 bp, synthetic construct
  source 1..75: mol_type = other DNA
ggcctgcccggttatctttctgccattccgtcagctctgctcaacgagtccgccacgctgttccgccgcaagtat

SEQ ID NO: 348312 - DNA, 75 bp, synthetic construct
  source 1..75: mol_type = other DNA
taaatgacactcaggttacaaaaccggccagaataatcggcgccaggcggactgagttattgtcgtttcatatgg

SEQ ID NO: 348313 - DNA, 75 bp, synthetic construct
  source 1..75: mol_type = other DNA
caggcgctggctgcacaaaaagccgggatttccgtcgggcagtataaagcggccatgcgcaccctgcccgcacag

SEQ ID NO: 348314 - DNA, 75 bp, synthetic construct
  source 1..75: mol_type = other DNA
cagcggtgtgaatgagaaaatcagccagcagcgccgggatttatgggaagcggaaagtcagtatgtggtcctgaa

SEQ ID NO: 348315 - DNA, 75 bp, synthetic construct
  source 1..75: mol_type = other DNA
gacagaaatcctgcttaaacaggccatggtgggcattgtcgggcgtatcggcagcgccatcgggggagccattgg

SEQ ID NO: 348316 - DNA, 75 bp, synthetic construct
  source 1..75: mol_type = other DNA
acctgctggcgaacggagaaacggttctgcgggatgcatccggagagaaacgttttgaaggtgaaaaggacagca

SEQ ID NO: 348317 - DNA, 75 bp, synthetic construct
  source 1..75: mol_type = other DNA
gcggggagtttgtcttcacgaaggaggcaaccagccggattggcgtcggcaacctgtatcgtctgatgcggggct

SEQ ID NO: 348318 - DNA, 75 bp, synthetic construct
  source 1..75: mol_type = other DNA
gccttcttcagaggctctacgtacccgaacaggggcagatactgattgatggccatgatatttccctggttaacc

SEQ ID NO: 348319 - DNA, 75 bp, synthetic construct
  source 1..75: mol_type = other DNA
tgaggggtataacaccattgtcggggaacaggggcaggattatccggaggtcaacgtcaacgcatcgcaattgca

SEQ ID NO: 348320 - DNA, 75 bp, synthetic construct
  source 1..75: mol_type = other DNA
ccaactgaaagttatcatgggaaactggcattaccggaaattaatggtgatatcacttttcgtaatatccggttt

SEQ ID NO: 348321 - DNA, 75 bp, synthetic construct
  source 1..75: mol_type = other DNA
aggttactataaaaattactttggagacatttatctgaatgatatatccttacgtaatatcagtgatgaggattt

SEQ ID NO: 348322 - DNA, 75 bp, synthetic construct
  source 1..75: mol_type = other DNA
acctgctggctggcgcaacccccaaacaacagggctacctggcgaacaccgaagcggctggcgcgcaggatatcc

SEQ ID NO: 348323 - DNA, 75 bp, synthetic construct
  source 1..75: mol_type = other DNA
ggcagcgatgcgaacgtttatctgtcaccagtgactttaacggaagttaaagctgccgcggcggatacctatctg

SEQ ID NO: 348324 - DNA, 75 bp, synthetic construct
  source 1..75: mol_type = other DNA
cgaaggcggaacaggaagaagcgcagcgtcaggaggatgccagaacgttcctggatgtggccggggaatatctgg

SEQ ID NO: 348325 - DNA, 75 bp, synthetic construct
  source 1..75: mol_type = other DNA
atgaacatgccagcccgtgctcctgttatgccattagcgcaaactcgtgaggaaataaatgcaacggcggcagcg

SEQ ID NO: 348326 - DNA, 75 bp, synthetic construct
  source 1..75: mol_type = other DNA
ggggtctggcgcgaactataccggcaattgggcaagaccctatttacaccatctggcgatggaatgattgctgta

SEQ ID NO: 348327 - DNA, 75 bp, synthetic construct
  source 1..75: mol_type = other DNA
taattcacgggattattgaagaacaggaggagcgcgatttaatcctcatgagtgaagagcagacagaacgccagc

SEQ ID NO: 348328 - DNA, 75 bp, synthetic construct
  source 1..75: mol_type = other DNA
taattcacgggattattgaagagcaggaggaacgcgagttaatcctcatgattgaagagcagagagaacaccagc

SEQ ID NO: 348329 - DNA, 75 bp, synthetic construct
  source 1..75: mol_type = other DNA
aagcaagaatttgacagttacgctaccaactgtctcctctaattcattaacttcaaatggggaggtggcaggcct

SEQ ID NO: 348330 - DNA, 75 bp, synthetic construct
  source 1..75: mol_type = other DNA
gatttgggctactggctggtggaaaaatccagtacggttatgcaagcgacaggcaaggggttgttgattattgcc

SEQ ID NO: 348331 - DNA, 75 bp, synthetic construct
  source 1..75: mol_type = other DNA
ggtgcaagaagtcgcccacgtgacgttctctggcaaacgcgcgatggcgcgaggtcaacaagtgcaatacatcac

SEQ ID NO: 348332 - DNA, 75 bp, synthetic construct
  source 1..75: mol_type = other DNA
cgacattctcgcccaaagcgatgccccactccgtctggcagacgatctcaaactaatgaatcccctctattttca

SEQ ID NO: 348333 - DNA, 75 bp, synthetic construct
  source 1..75: mol_type = other DNA
aattcacctatttccagggcggtggctttgatctcactctgatgtcatttttacaaatcggcgcagatggctcag

SEQ ID NO: 348334 - DNA, 75 bp, synthetic construct
  source 1..75: mol_type = other DNA
gataatggcaaagcgacagatatcgtccagaacagcggtgccgctctccagacgagcacggctaacggtatttaa

SEQ ID NO: 348335 - DNA, 75 bp, synthetic construct
  source 1..75: mol_type = other DNA
gagtcgtgacccgttcgaatgcgtgctgtgtggcggccggatggtataccgccgggccatcgcggggctgaatgt

SEQ ID NO: 348336 - DNA, 75 bp, synthetic construct
  source 1..75: mol_type = other DNA
ttgccccgggtattgagcctgaacgcgacattctctcccaaagcgatgccccactccgtctggcagacgatctca

SEQ ID NO: 348337 - DNA, 75 bp, synthetic construct
  source 1..75: mol_type = other DNA
attgaagagcagccaggatgtttcaatggcggaaaggcacaggtttttcagtactatgtgattacttttcgaaaa

SEQ ID NO: 348338 - DNA, 75 bp, synthetic construct
  source 1..75: mol_type = other DNA
aaatctttagaactaaaggtaaaacaggtaaaaaaaacaattgaccgattaaactttatttctttgcccgcatta

SEQ ID NO: 348339 - DNA, 75 bp, synthetic construct
  source 1..75: mol_type = other DNA
gttgatgattggcggcgcgtttctctgctttgaaggggtagagaaagtgctgcatatgctggaggcgcgtaaaca

SEQ ID NO: 348340 - DNA, 75 bp, synthetic construct
  source 1..75: mol_type = other DNA
cggcaggttgctgccggaagcctgaaaccaaaagaggtgcgtattcctggtgtattggtggattacatcgtaatt

SEQ ID NO: 348341 - DNA, 75 bp, synthetic construct
  source 1..75: mol_type = other DNA
tctatgctaatgagaaaaggaaatatgatgcttcgaccctaaaaagatcgttatccatcaaagagaagaaaagaa

SEQ ID NO: 348342 - DNA, 75 bp, synthetic construct
  source 1..75: mol_type = other DNA
gttttctaatactttttgaacgcttcattaaaaagctcgaagagtctggattgtctgagtcagacatattagaaa

SEQ ID NO: 348343 - DNA, 75 bp, synthetic construct
  source 1..75: mol_type = other DNA
gctaaagccgaactgacctgcccagacgcgggtttattgtcaggtaagttgctgacggatgtttgctggtcatgc

SEQ ID NO: 348344 - DNA, 75 bp, synthetic construct
  source 1..75: mol_type = other DNA
ggggatgtggagaaggcagcgaatgtttttgttcgaaatgaacttttaccattacaaaaaaggatgaaagaagtt

SEQ ID NO: 348345 - DNA, 75 bp, synthetic construct
  source 1..75: mol_type = other DNA
ggggatgtggagaaggcaagtaatgtatttgttcgtaacgaacttatccccttacaaaaacgtatcgaacaatta

SEQ ID NO: 348346 - DNA, 75 bp, synthetic construct
  source 1..75: mol_type = other DNA
gtccgccacgctgttccgtcgaaagtattacattaacggcagtcatgctggcttcatcatgtacatgaccgatgc

SEQ ID NO: 348347 - DNA, 75 bp, synthetic construct
  source 1..75: mol_type = other DNA
gtttctgaacatcaagaacgtgagccgggatgacatgatggcagcgcaccgtgtaccgccgcagatgatggggat

SEQ ID NO: 348348 - DNA, 75 bp, synthetic construct
  source 1..75: mol_type = other DNA
atgggaaagagtaaaaaaaaatgcgctgcggcgacgaaccagatccagcataaaagccaagcttcagccgaagca

SEQ ID NO: 348349 - DNA, 75 bp, synthetic construct
  source 1..75: mol_type = other DNA
catgcagaaaagatttgatcaattaaacgactggcttgaaatagaaataattagatttagaccatacgtactttg

SEQ ID NO: 348350 - DNA, 75 bp, synthetic construct
  source 1..75: mol_type = other DNA
aataactggttggacgaagaagtgctcaatttttcaacctatgagctttatttaaagggttctttccatattttt

SEQ ID NO: 348351 - DNA, 75 bp, synthetic construct
  source 1..75: mol_type = other DNA
gcgtgccgccgcaaatgatggggataatgcctaataatgttgggggttttggggatgtggagaaggccgcgaaag

SEQ ID NO: 348352 - DNA, 75 bp, synthetic construct
  source 1..75: mol_type = other DNA
tatgccaagtaatgttgggggatttggggatgtggaaaaagcgagtttagtgtttgttcgcaatgagttaatccc

SEQ ID NO: 348353 - DNA, 75 bp, synthetic construct
  source 1..75: mol_type = other DNA
ttcagctttggcgatcccgttcctgttctggaccgccgtgaactgctggactatgtggaatgcgtacagatggat

SEQ ID NO: 348354 - DNA, 75 bp, synthetic construct
  source 1..75: mol_type = other DNA
ggtccggagggtaagagaatgtattatggcatgtaccattgtgaagagggatatgttgaatatgcgaatgactaa

SEQ ID NO: 348355 - DNA, 75 bp, synthetic construct
  source 1..75: mol_type = other DNA
aaggacgggcttcagatcatcccgttgtcggaagtcgcggcgaaggatgaatttctgaacatcaagaacgtgagt

SEQ ID NO: 348356 - DNA, 75 bp, synthetic construct
  source 1..75: mol_type = other DNA
tattacattaacggcagccatgcaggcttcatcatgtacatgaccgacgccgcgcagaaccaggaggatgtgaac

SEQ ID NO: 348357 - DNA, 75 bp, synthetic construct
  source 1..75: mol_type = other DNA
gcggaactgctgtatgcagaagattttgctgaaatgtcgttaattgaggccgtcgcggcctgcgccgtcgcccgc

SEQ ID NO: 348358 - DNA, 75 bp, synthetic construct
  source 1..75: mol_type = other DNA
atgagtgcaatagaaaattttgatgcccatacgccaatgatgcagcagtatctcaagctgaaagcccagcatccc

SEQ ID NO: 348359 - DNA, 75 bp, synthetic construct
  source 1..75: mol_type = other DNA
gaaccgcttcggtgaagttatcgcccttgaacctgccctggcaaaatatacccgacgcgggttagacctggatac

SEQ ID NO: 348360 - DNA, 75 bp, synthetic construct
  source 1..75: mol_type = other DNA
gcagccagtgcgtattctctgcgctcgtgaactgcaaaacagtatcagcgattcggtaatccggctgcttgaaga

SEQ ID NO: 348361 - DNA, 75 bp, synthetic construct
  source 1..75: mol_type = other DNA
cggaagcgttctccggtaagaaaatcaccgccacgatgttcaagggcagcgaatcgccatttgatgaagatgcac

SEQ ID NO: 348362 - DNA, 75 bp, synthetic construct
  source 1..75: mol_type = other DNA
gatgcgcacaagaaactcggatggaaagcgaatgaaccgccccgggaatcctggagactaaacttcctgagaaag

SEQ ID NO: 348363 - DNA, 75 bp, synthetic construct
  source 1..75: mol_type = other DNA
cattcccaacaacactggtggcttcggtgatgtggaaaaggcgagccgtgttttcgtccgcaatgaactgatgcc

SEQ ID NO: 348364 - DNA, 75 bp, synthetic construct
  source 1..75: mol_type = other DNA
atgggaaagagtaagaaaaaccgcgctgcggcgatgaatcacatccagtataaaagccagacttcagccgaagca

SEQ ID NO: 348365 - DNA, 75 bp, synthetic construct
  source 1..75: mol_type = other DNA
cgcgatgacatgatggcagcacaccgcgtaccgccgcagatgatgggcattattcccaacaataccggcggcttt

SEQ ID NO: 348366 - DNA, 75 bp, synthetic construct
  source 1..75: mol_type = other DNA
atgggaaagagtaagaagaaccgcgctgcatcgacgaaccagatccagcctaaaagccaaacttcagccgaagca

SEQ ID NO: 348367 - DNA, 75 bp, synthetic construct
  source 1..75: mol_type = other DNA
tgtcagaagtcgcggcgaaagatgaatttctgaacatcaagaacgtcagccgcgatgacatgatggcggcgcatc

SEQ ID NO: 348368 - DNA, 75 bp, synthetic construct
  source 1..75: mol_type = other DNA
cgctggtatgagcctcccgtcagctttgacggactggcgcgcaccttccgcgctgccgtgcatcacagttcacca

SEQ ID NO: 348369 - DNA, 75 bp, synthetic construct
  source 1..75: mol_type = other DNA
cgcattccacggaagcgcactttgttcaccggatggaaatccctgtggtatggggtgaaatcttcctgctggtgg

SEQ ID NO: 348370 - DNA, 75 bp, synthetic construct
  source 1..75: mol_type = other DNA
acgttgctgcgtaccacgctgtttgtcgggcctggcgcggtgatcctcggtttgttgatcctcgtcttccacctg

SEQ ID NO: 348371 - DNA, 75 bp, synthetic construct
  source 1..75: mol_type = other DNA
aggttgaacaccagaaacggctgaatgagctggcacagcaggcggcgcggtttgagcagcagcagggcgcgaagc

SEQ ID NO: 348372 - DNA, 75 bp, synthetic construct
  source 1..75: mol_type = other DNA
ggcggcgtgtggagccagcctggtcggcgtgttgatgttgcgctttttcattctctacgccgggcagttaacggt

SEQ ID NO: 348373 - DNA, 75 bp, synthetic construct
  source 1..75: mol_type = other DNA
atggcgatacgtcagcgcagtaatccgcattccacggaagcgcactttgttcaccgcatggaaattcctgtggta

SEQ ID NO: 348374 - DNA, 75 bp, synthetic construct
  source 1..75: mol_type = other DNA
gcccgttcaccgcggactggaaacgctgatgctggtgctggcggtgttgctgggggcttataccggctttctgct

SEQ ID NO: 348375 - DNA, 75 bp, synthetic construct
  source 1..75: mol_type = other DNA
ttcacccgttctgtgctctccatgctgacagagatttttctgaagcaggccatggtggggattgtcgggagtatt

SEQ ID NO: 348376 - DNA, 75 bp, synthetic construct
  source 1..75: mol_type = other DNA
atttgatgaggcggataaaaaatggcagtggtaccagagccggagccagcgccgcggtaaaacctcctctttccg

SEQ ID NO: 348377 - DNA, 75 bp, synthetic construct
  source 1..75: mol_type = other DNA
ttggcgtcggcaacctgtaccgcctgatgcggggctatgcggaaggtggttatgtgggcggtgccggaagtccgg

SEQ ID NO: 348378 - DNA, 75 bp, synthetic construct
  source 1..75: mol_type = other DNA
ccggatgcgctggcgaaggccacatctgcactgaagaacacctggtctgcggaggagcagcttcgtggaagctgg

SEQ ID NO: 348379 - DNA, 75 bp, synthetic construct
  source 1..75: mol_type = other DNA
cgaccggcggatttacgggcacgggcggcaaatatgagcctgcggggatagttcaccgcggggagtttgttttca

SEQ ID NO: 348380 - DNA, 75 bp, synthetic construct
  source 1..75: mol_type = other DNA
cctgtaccgcctgatgcggggctatgcggaaggtggttatgtgggcggtgccggaagtccggcgcagatgcggcg

SEQ ID NO: 348381 - DNA, 75 bp, synthetic construct
  source 1..75: mol_type = other DNA
cagatgcggcgggccgaaggtattaattttaatcagaacaatcacgtggtgattcagaacgacggtatcaacgga

SEQ ID NO: 348382 - DNA, 75 bp, synthetic construct
  source 1..75: mol_type = other DNA
ctggagactgacgccagaaaaaccgtcggtgtcgttgagcagaacctgagtcgtcaggcgctggctgcacaaaaa

SEQ ID NO: 348383 - DNA, 75 bp, synthetic construct
  source 1..75: mol_type = other DNA
tctgagcaggaaaaatccctgctgacccatgagaaagagacgctggagtacaaacgccagctggctgagcttggc

SEQ ID NO: 348384 - DNA, 75 bp, synthetic construct
  source 1..75: mol_type = other DNA
gtaaggcgtcatttttcaggtctggataccgacgtcagaaaaaccgccagtgctgttgaacagggcctgagccgc

SEQ ID NO: 348385 - DNA, 75 bp, synthetic construct
  source 1..75: mol_type = other DNA
aacggcggcgcaggcagcgtgctgcgagtcttttcgaatgataagattcaggctgccaatattattaacaccatg

SEQ ID NO: 348386 - DNA, 75 bp, synthetic construct
  source 1..75: mol_type = other DNA
gaagagagtgccacggacagtatgtcgcaggttaaaagtgctgccacgcagacctttgatggtattgcgcagaat

SEQ ID NO: 348387 - DNA, 75 bp, synthetic construct
  source 1..75: mol_type = other DNA
aggcggataaaaaatggcagtggtaccagagccggagccagcgccggggaaagacctcctctttccgtgccaacc

SEQ ID NO: 348388 - DNA, 75 bp, synthetic construct
  source 1..75: mol_type = other DNA
aaaacacagcggtgcgaatgagaaaatcagccagcagcgtcgcgatttatggaaagcggaaaatcagtatgcggt

SEQ ID NO: 348389 - DNA, 75 bp, synthetic construct
  source 1..75: mol_type = other DNA
ctggttctttccggtaatcagtccggactgactgccgatcgcatgctgacgctctccagagccggacaggccgca

SEQ ID NO: 348390 - DNA, 75 bp, synthetic construct
  source 1..75: mol_type = other DNA
cgacggcaccaacggacaggcggggccgcagctgatgaaggcggtgtatgacatggcccgcaagggggcgcagga

SEQ ID NO: 348391 - DNA, 75 bp, synthetic construct
  source 1..75: mol_type = other DNA
acggggacggccattcaggctgcggcggcgaacttccatttcgcgaccggaggatttacgggaaccggtggcaaa

SEQ ID NO: 348392 - DNA, 75 bp, synthetic construct
  source 1..75: mol_type = other DNA
cgacgtcgggactgatggcgatggcgcgccagttccgtaacgtgacggcagagcagattgcgtatgttgcgcagc

SEQ ID NO: 348393 - DNA, 75 bp, synthetic construct
  source 1..75: mol_type = other DNA
cccatgagaaagagacgctggagtacaaacgccagctggctgagctgggagacaaagttgaacaccagaaacggc

SEQ ID NO: 348394 - DNA, 75 bp, synthetic construct
  source 1..75: mol_type = other DNA
ggcgagtgggcagaaagtgcgacggacagtttttcgcaggttaaaagcgtggccacgcagacctttgacggtatt

SEQ ID NO: 348395 - DNA, 75 bp, synthetic construct
  source 1..75: mol_type = other DNA
acagtttttcgcaggttaaaagcgtggccacgcagacctttgacggtattgcacagaatatggcagcgatgctga

SEQ ID NO: 348396 - DNA, 75 bp, synthetic construct
  source 1..75: mol_type = other DNA
tcttttcgaatgataagattcaggcggctaatattattaacaccatgacgccgggcgatgtttatcagacgctga

SEQ ID NO: 348397 - DNA, 75 bp, synthetic construct
  source 1..75: mol_type = other DNA
aaatccggcacgccgagccgcagtttcttgtttgatcctgccagcaatattgataccggcaccgcgtatctggcg

SEQ ID NO: 348398 - DNA, 75 bp, synthetic construct
  source 1..75: mol_type = other DNA
gatttatggaaagcggaaaatcagtatgtggtcctgaaagaggccgccacgaaacggcagttatctgagcaggaa

SEQ ID NO: 348399 - DNA, 75 bp, synthetic construct
  source 1..75: mol_type = other DNA
gtggtgattcagaacgacggccccaacgggcaggccgggccacagatgctgaaggctgtgtatgacatggcccgt

SEQ ID NO: 348400 - DNA, 75 bp, synthetic construct
  source 1..75: mol_type = other DNA
acgaaggaggcaaccagccggattggtgtcggcaacctgtaccgcctgatgcggggctatgcggatggcggttat

SEQ ID NO: 348401 - DNA, 75 bp, synthetic construct
  source 1..75: mol_type = other DNA
accatccaaatggtgcgctggaaactgatttggggctgcctcttaacgcaggtaattactggtgggcgtacgatc

SEQ ID NO: 348402 - DNA, 75 bp, synthetic construct
  source 1..75: mol_type = other DNA
gtgacgtgtacggtgataatccggatgcgctggcgaaggccacatctgcactgaagaacacctggtctgcggagg

SEQ ID NO: 348403 - DNA, 75 bp, synthetic construct
  source 1..75: mol_type = other DNA
tccggaatcctcagcggatatgctcgccagtgcgcagaaggcattcgatgaggcggataaaaaatggcagtggta

SEQ ID NO: 348404 - DNA, 75 bp, synthetic construct
  source 1..75: mol_type = other DNA
tgctggtgttaagcgacaagtcactgattgcgccgccaaaacttaccgcctggatcgaaaccgtggcggcagaaa

SEQ ID NO: 348405 - DNA, 75 bp, synthetic construct
  source 1..75: mol_type = other DNA
cccgcgcggtttcaccggacgttgcgattgtgctggataccgcctgctgggcgaaaaactttgattatggcgcgg

SEQ ID NO: 348406 - DNA, 75 bp, synthetic construct
  source 1..75: mol_type = other DNA
caccggcgtgcccacagtggtgatggggccagcaacccgccatggacattgcgccgcatcgattgccgattgccg

SEQ ID NO: 348407 - DNA, 75 bp, synthetic construct
  source 1..75: mol_type = other DNA
ttcaaatgctcaggcacaaaccgtaccggaaggctatcaactgcagcaagtccttatgatgagccgccataactt

SEQ ID NO: 348408 - DNA, 75 bp, synthetic construct
  source 1..75: mol_type = other DNA
gaaggggcgatcgatgtgctgccggttggcaacgtacgcatggctgcccgccagcttcagcctgtgcggatcacc

SEQ ID NO: 348409 - DNA, 75 bp, synthetic construct
  source 1..75: mol_type = other DNA
acttttcaggttctccctcaccagcgggtaatggggaaagcctttgatgaccgcctcggttgctatctgctggtg

SEQ ID NO: 348410 - DNA, 75 bp, synthetic construct
  source 1..75: mol_type = other DNA
gtggtttcacccgttctgtgctgtccatgctgacagagatttttctgaagcaggcgatggtggggatagtcggga

SEQ ID NO: 348411 - DNA, 75 bp, synthetic construct
  source 1..75: mol_type = other DNA
cagaagatcaccaatcagacaaaactcatttatgttcgggatagctacaataactccaacggttattttaatgat

SEQ ID NO: 348412 - DNA, 75 bp, synthetic construct
  source 1..75: mol_type = other DNA
gaatgatgtcagcgccatgcgcgtggatattggcgcgcgctcgtatgacgaagtgatgcaggcgggaattcgtcc

SEQ ID NO: 348413 - DNA, 75 bp, synthetic construct
  source 1..75: mol_type = other DNA
cgtttaataaaaccctggttctttccggtaatcagtccggactgactgccgatcgcatgctgacgctctccagag

SEQ ID NO: 348414 - DNA, 75 bp, synthetic construct
  source 1..75: mol_type = other DNA
accaggaaaaaatgggcactatggacccaacctttaacccggtgatcaccgatgattccgccgcattcagtgaac

SEQ ID NO: 348415 - DNA, 75 bp, synthetic construct
  source 1..75: mol_type = other DNA
cgctggcgtacgcctggtacctgggggattccacgctttcagcgtttaataaaaccctggttctttccggtaatc

SEQ ID NO: 348416 - DNA, 75 bp, synthetic construct
  source 1..75: mol_type = other DNA
gtattaattttaatcagaacaatcacgtggtgattcagaacgacggtatcaacggacaggcggggccgcagctga

SEQ ID NO: 348417 - DNA, 75 bp, synthetic construct
  source 1..75: mol_type = other DNA
agctggatggccgggctgaagtccggctggggcgagtgggcggaaagtgcgacggacagtttttcgcaggttaaa

SEQ ID NO: 348418 - DNA, 75 bp, synthetic construct
  source 1..75: mol_type = other DNA
tttgctatgctggatagcgccatcgctgcgctgaaaacaccggttgcagatagtgaagcggataaagaaaccgct

SEQ ID NO: 348419 - DNA, 75 bp, synthetic construct
  source 1..75: mol_type = other DNA
accggcgcattccccgggtgtgatattcctgtgcatcaccaggaaaaaatgggcactatggacccaacctttaac

SEQ ID NO: 348420 - DNA, 75 bp, synthetic construct
  source 1..75: mol_type = other DNA
ctctccagcctgtaaagagaagcagcaatgttcgctggtggatggcaaaaataccttcagtgcgaagtatcaaca

SEQ ID NO: 348421 - DNA, 75 bp, synthetic construct
  source 1..75: mol_type = other DNA
cgccttagggcaaacgcagcagatgagtgatttggttgatgtagactggaacgcgaccatttcatcttacgtgat

SEQ ID NO: 348422 - DNA, 75 bp, synthetic construct
  source 1..75: mol_type = other DNA
acatttttgccggttataaaacagagactgcgccgtttagtgaggttaacggtgattatgtcggcggaacagaaa

SEQ ID NO: 348423 - DNA, 75 bp, synthetic construct
  source 1..75: mol_type = other DNA
acagccagtatacgctggcgcgaactttcgccactcaaaaagtgtcactggaggagagtgtgcttggccaggtta

SEQ ID NO: 348424 - DNA, 75 bp, synthetic construct
  source 1..75: mol_type = other DNA
tatgggaacgttggatccccttgggacgaatatcaaactgggtaaaacaagttattcagagtttctgaatcaatt

SEQ ID NO: 348425 - DNA, 75 bp, synthetic construct
  source 1..75: mol_type = other DNA
ggcaaccagccggatttgcgtgggggatcttttccggcctgatgcggggctattctcctctggggtcttgttctt

SEQ ID NO: 348426 - DNA, 75 bp, synthetic construct
  source 1..75: mol_type = other DNA
ggggaatctttaccgtctgatgcgcggctatgcggaaggggggtatgtgggtggtgccggaagtccggcgcagat

SEQ ID NO: 348427 - DNA, 75 bp, synthetic construct
  source 1..75: mol_type = other DNA
tgacgtagcccgtaaggcggcaatggatgttgtgaccgggcagatgcgtgatggtggtctgttctccggaggtgg

SEQ ID NO: 348428 - DNA, 75 bp, synthetic construct
  source 1..75: mol_type = other DNA
aggcggacaaaaaatggcagtggtatcagagccggagccaccggcgcggtaaaacgtcagcatttcttgccaatc

SEQ ID NO: 348429 - DNA, 75 bp, synthetic construct
  source 1..75: mol_type = other DNA
ttcagaacgacggtacgaatggtctgccaggtccacagatgatgaaagcagtgtatgacatggcccgcaagggtg

SEQ ID NO: 348430 - DNA, 75 bp, synthetic construct
  source 1..75: mol_type = other DNA
gcggcggcgaacttccatttcgcgaccggaggatttacggggacgggcggcaaatatgagcctgcggggatagtt

SEQ ID NO: 348431 - DNA, 75 bp, synthetic construct
  source 1..75: mol_type = other DNA
caggcgctggctgcgcaaaaagccgggatttccgtcggacagtataaagcggccatgcgcaccctgcccgcacag

SEQ ID NO: 348432 - DNA, 75 bp, synthetic construct
  source 1..75: mol_type = other DNA
cagcaccttcgtgacgtgtacggtgataatccggatgcgctggcgaaggccacatctgcactgaagaacacctgg

SEQ ID NO: 348433 - DNA, 75 bp, synthetic construct
  source 1..75: mol_type = other DNA
aggcagactggcggggattcacccgttcggtgctgtccatgatgacagaaatcctgcttaaacaggccatggtgg

SEQ ID NO: 348434 - DNA, 75 bp, synthetic construct
  source 1..75: mol_type = other DNA
gaaacaggtaacgattgcgcagcttgagaatgtaaaaccgctgctgatgaaaagtattcacgacgatgatgatga

SEQ ID NO: 348435 - DNA, 75 bp, synthetic construct
  source 1..75: mol_type = other DNA
cagttcaggccagcggtcgttgaaagcgtcgcacgagggacatccgttcgtatgggaacgttggatccccttggg

SEQ ID NO: 348436 - DNA, 75 bp, synthetic construct
  source 1..75: mol_type = other DNA
aattcggactgacaccgcttggtcattttaccgttaacccagagattcaaccgggcgcgcagcgtttacatgaaa

SEQ ID NO: 348437 - DNA, 75 bp, synthetic construct
  source 1..75: mol_type = other DNA
gaaaaagccgaagtcgtcaggcgtgaaagtgtcagccggtgagcgtcaggaagaccagacgcatgccgcactgct

SEQ ID NO: 348438 - DNA, 75 bp, synthetic construct
  source 1..75: mol_type = other DNA
gaaaaagccgaagtcgtcaggcgtcaaagtgtcagccggtgagcgtcaggaagaccaggcgcatgccgcgctgct

SEQ ID NO: 348439 - DNA, 75 bp, synthetic construct
  source 1..75: mol_type = other DNA
gaaaaagccgaagtcgtcaggcgttaaagtgtcagccggtgagcgtcaggaagaccagtcgcatgccgccctgct

SEQ ID NO: 348440 - DNA, 75 bp, synthetic construct
  source 1..75: mol_type = other DNA
acgctggagtacaaacgccagctggctgacctgggtgacaaggttgaataccagaaacggctgaatgagctggca

SEQ ID NO: 348441 - DNA, 75 bp, synthetic construct
  source 1..75: mol_type = other DNA
gaaaaaaccattgcagcacttcctgcctttgcgccgttctccggtgaaattgcccagatgagcgccaatattcgc

SEQ ID NO: 348442 - DNA, 75 bp, synthetic construct
  source 1..75: mol_type = other DNA
cctttgcgccgttctccggtgagattgcccagatgagcgccaatatccgcgcccgttatgaagcatccccgcgtt

SEQ ID NO: 348443 - DNA, 75 bp, synthetic construct
  source 1..75: mol_type = other DNA
gccattacatatctgattcatattggtttacttgatagagttgtaaaaaaagctatcgtagataagccattagat

SEQ ID NO: 348444 - DNA, 75 bp, synthetic construct
  source 1..75: mol_type = other DNA
ggcgcgcagcaaggcgcaccaaatttctcctggagcgccgcgcatttgtatatgttgtataacgattttttccgt

SEQ ID NO: 348445 - DNA, 75 bp, synthetic construct
  source 1..75: mol_type = other DNA
tataacaccgtcacgccgtcggtgaccgggcgctggttctccggcaatcagacctggccgtgggatacctggaag

SEQ ID NO: 348446 - DNA, 75 bp, synthetic construct
  source 1..75: mol_type = other DNA
aaccgccgatggcccaattcaggagaattacaacccgctgactggcgcgcagcaaggcgcaccaaatttctcctg

SEQ ID NO: 348447 - DNA, 75 bp, synthetic construct
  source 1..75: mol_type = other DNA
atcagcttaagtacaaccggcaacatttttgccggtgcgggatgctatcacggcgacgccctgacggtttatccc

SEQ ID NO: 348448 - DNA, 75 bp, synthetic construct
  source 1..75: mol_type = other DNA
gtctttacgccgcaccgcatcactgacggggaatgtcctgaaaactgtagtaggtgtgccggttgcacttttgcg

SEQ ID NO: 348449 - DNA, 75 bp, synthetic construct
  source 1..75: mol_type = other DNA
atgatgcgctcggttccatgcagaaagaatccgacatcaacaaggactcactttctgctcagtggttgctggtta

SEQ ID NO: 348450 - DNA, 75 bp, synthetic construct
  source 1..75: mol_type = other DNA
cattatggataggaaaccagatcgctgaattcagcgatctggatacagcaaaggctatagcagcattaaaaattt

SEQ ID NO: 348451 - DNA, 75 bp, synthetic construct
  source 1..75: mol_type = other DNA
atgaaatttcaggccattgtattagcaagttttcttgtcatgccttatgcgttggcagatgacccgggcggttta

SEQ ID NO: 348452 - DNA, 75 bp, synthetic construct
  source 1..75: mol_type = other DNA
atgagtaattcactgttaccgccatcagccagcagtttcatgcgtcgtgccgaagctgtcggaacgcgcattaca

SEQ ID NO: 348453 - DNA, 75 bp, synthetic construct
  source 1..75: mol_type = other DNA
caaggggcaccaaatttctcctggagtgccgcgcatttgtatatgttgtataacgattttttccgtaagcagtaa

SEQ ID NO: 348454 - DNA, 75 bp, synthetic construct
  source 1..75: mol_type = other DNA
caacccgcgaaacccagttacatcatcagaaggtggcgcgcaaacgcccgttggtgatcctcgaccgtgatttcg

SEQ ID NO: 348455 - DNA, 75 bp, synthetic construct
  source 1..75: mol_type = other DNA
caggtagccctgttaaatacacagctaagcgagtttgccccaaccatgccccaaaacgaggtggtgcaaaattaa

SEQ ID NO: 348456 - DNA, 75 bp, synthetic construct
  source 1..75: mol_type = other DNA
atccccaaaagtaactatattgttacacaaccagggagatcggctgtaactgtaaataattacatgacaaatctt

SEQ ID NO: 348457 - DNA, 75 bp, synthetic construct
  source 1..75: mol_type = other DNA
acagaagatggggtacgaatcaccacaaacgcagaaaccagtgggcgttatcacacagactggttgaatatgatt

SEQ ID NO: 348458 - DNA, 75 bp, synthetic construct
  source 1..75: mol_type = other DNA
gatgaaacaatcagtgatagcgaacggtggcagcaaattggtgacgtgatacccgctaaaacatggcaacacaaa

SEQ ID NO: 348459 - DNA, 75 bp, synthetic construct
  source 1..75: mol_type = other DNA
atcgatcagttacttgctgccggtcgctggttgctggtactgctggtggcgtggctgctgtggcgtaaagcggta

SEQ ID NO: 348460 - DNA, 75 bp, synthetic construct
  source 1..75: mol_type = other DNA
actggctgacgtggcaggaacagcagaagcggttgatgtgctgtgcctgtgtctggatatcgcagaccaggatgg

SEQ ID NO: 348461 - DNA, 75 bp, synthetic construct
  source 1..75: mol_type = other DNA
gaaaaaaccatttcggcactgcctgccttcgcaccattcgccggagaaattgcgcagatgagcagcaacattcgc

SEQ ID NO: 348462 - DNA, 75 bp, synthetic construct
  source 1..75: mol_type = other DNA
cgacgcaaaggaaatttccattcttgagaaaacaattgcagctctgcctgcattttctccttttgctggtgagat

SEQ ID NO: 348463 - DNA, 75 bp, synthetic construct
  source 1..75: mol_type = other DNA
acgcaataaaaactggtgttttcgactatgcaaaacagtttccctcctcacgcaatctggaaaaatttggtgagg

SEQ ID NO: 348464 - DNA, 75 bp, synthetic construct
  source 1..75: mol_type = other DNA
tgcacaaatgagtgcaaatatccgcgcccgttatgaagcatcgccgcgttctgccaatgccgaagccctccgcca

SEQ ID NO: 348465 - DNA, 75 bp, synthetic construct
  source 1..75: mol_type = other DNA
gctggctgatgttgccggtactgatgacgcagttaatgtgctgtgcctgtgtctggatatcgctgaccaggatgg

SEQ ID NO: 348466 - DNA, 75 bp, synthetic construct
  source 1..75: mol_type = other DNA
gttgctgtgatgtttatgaatcctctggcggtactgcgcggtggactggctgccgcaggcgcggtgcttcgtgtg

SEQ ID NO: 348467 - DNA, 75 bp, synthetic construct
  source 1..75: mol_type = other DNA
tgacatgcaggatgccattaaggctgccagtgagcagctgccgatggagaatggcgctatagattatgccgcgct

SEQ ID NO: 348468 - DNA, 75 bp, synthetic construct
  source 1..75: mol_type = other DNA
cctgttccatggccgtcagccacaccgccagagggatggctgaaatgcaacggcgcagcattttcttctgaaatg

SEQ ID NO: 348469 - DNA, 75 bp, synthetic construct
  source 1..75: mol_type = other DNA
tcacgtttaactcgccggatctctcatggtttggcagtggatcgctattgttcctgccaacgccggtcattatcg

SEQ ID NO: 348470 - DNA, 75 bp, synthetic construct
  source 1..75: mol_type = other DNA
tcaaaggatagagccgcgccagttgaacataacgcaatattatataaagacactccagaggcattcgaatttata

SEQ ID NO: 348471 - DNA, 75 bp, synthetic construct
  source 1..75: mol_type = other DNA
accacggatgccatgggaactattcagcgcgtactggagaaggtcaacaagctgccgcaggataagcgcctgtca

SEQ ID NO: 348472 - DNA, 75 bp, synthetic construct
  source 1..75: mol_type = other DNA
gcccgtattgatggattccgcaaggtccgcacccagctcgagggggcaaaacacgatcttgcggctgcgcgccag

SEQ ID NO: 348473 - DNA, 75 bp, synthetic construct
  source 1..75: mol_type = other DNA
gtgctgcgtgaggcaacccgtgcgggtgcgaatgtgctgaaagaagaagtggtgtcacgggcaccggtacgcagg

SEQ ID NO: 348474 - DNA, 75 bp, synthetic construct
  source 1..75: mol_type = other DNA
gaaggtggataacccgcgcaatgctttctactggcggtttgtggaaatggggaccgtgaatatgccaccgcaccc

SEQ ID NO: 348475 - DNA, 75 bp, synthetic construct
  source 1..75: mol_type = other DNA
catttgatagtctcggttctgtgacagcgggtaatgcatcatccataaacgatggcgcagctgcggtaatgatga

SEQ ID NO: 348476 - DNA, 75 bp, synthetic construct
  source 1..75: mol_type = other DNA
ctatcgcctcagtggtaattggcggtacgcttttgagtggtggcgttggaacggtattagggacgctttttggcg

SEQ ID NO: 348477 - DNA, 75 bp, synthetic construct
  source 1..75: mol_type = other DNA
agccgtttgtcgccactctgatcctgatggtcgccgggcgcggcgtggcgcaactgatcaccgccgggcagatcg

SEQ ID NO: 348478 - DNA, 75 bp, synthetic construct
  source 1..75: mol_type = other DNA
gctgttgacccgcaaaacggcgctggggatgtttatcgaagccgttggtatcaacattcgggcggcaaaaaatgc

SEQ ID NO: 348479 - DNA, 75 bp, synthetic construct
  source 1..75: mol_type = other DNA
ctggcaacccatcaccgcatttctcggtggcgtggtggaaggattcaaagcggcggcaggtcccatcagtgcagc

SEQ ID NO: 348480 - DNA, 75 bp, synthetic construct
  source 1..75: mol_type = other DNA
agcaacctgcgacggtgaatgcagacggtaaagtgatgataccatcgggtggttttccgtcatggggatatggct

SEQ ID NO: 348481 - DNA, 75 bp, synthetic construct
  source 1..75: mol_type = other DNA
agcaacctgcgacggtgaatgcagacggaaaagtgatgattccatcgggtggttttccgtcatggggatatggct

SEQ ID NO: 348482 - DNA, 75 bp, synthetic construct
  source 1..75: mol_type = other DNA
gcagacggcgcttgtgcgtgcagaactttatcgtgctggtatttcagctaatgatggcgccagtgcgacggcccg

SEQ ID NO: 348483 - DNA, 75 bp, synthetic construct
  source 1..75: mol_type = other DNA
ctggttgctggagaagctcggcattgtcagtaaagaggccgcaaaggcaaaactgccggaaagcgtgacgcgtca

SEQ ID NO: 348484 - DNA, 75 bp, synthetic construct
  source 1..75: mol_type = other DNA
agcaacctgcgacggtgaatgcagacgggaaagtgatgatcccatcgggtggttttccttcatggggatatggct

SEQ ID NO: 348485 - DNA, 75 bp, synthetic construct
  source 1..75: mol_type = other DNA
agcaacctgcgacggtgaatgcagacggcaaagtgatgatgccatcgggtggttttccttcatggggatatggct

SEQ ID NO: 348486 - DNA, 75 bp, synthetic construct
  source 1..75: mol_type = other DNA
cgccatgtcgaaagggtcagacatcattgatgtcatgcaacgcctgggcggtgtggcagatcgtctggattatcg

SEQ ID NO: 348487 - DNA, 75 bp, synthetic construct
  source 1..75: mol_type = other DNA
acccgcaatattgaacagctcggtgatgcgctgaactatctggatgataacgccatgtcgaaagggtcagacatc

SEQ ID NO: 348488 - DNA, 75 bp, synthetic construct
  source 1..75: mol_type = other DNA
cgcccatttaccggattgaagcaccgacgcagatcatcatccagacacagccaggacaaagtgcgcaggatattg

SEQ ID NO: 348489 - DNA, 75 bp, synthetic construct
  source 1..75: mol_type = other DNA
tactgtgccgcccatttaccggattgaagcaccgacgcagatcatcatccagacacagccaggacaaagtgcgca

SEQ ID NO: 348490 - DNA, 75 bp, synthetic construct
  source 1..75: mol_type = other DNA
ctgtaccgggcgggaatttctgcgaaagacgatgcgggagcaactgcccgtttagcccgtgaaacatcacgttat

SEQ ID NO: 348491 - DNA, 75 bp, synthetic construct
  source 1..75: mol_type = other DNA
gtctttgcgccgcaccgcatcactgacggggaatgtcctgaaaactgtagcaggtgtgccggttgcactgttgcg

SEQ ID NO: 348492 - DNA, 75 bp, synthetic construct
  source 1..75: mol_type = other DNA
gatgagagcaaaacaggcttttatatgaccggtaaggcggggacttccgttttatctctttccaaccagcgtctt

SEQ ID NO: 348493 - DNA, 75 bp, synthetic construct
  source 1..75: mol_type = other DNA
tgcagggattggctacgccagaattcaccagaaaacaaccggtatcagtacctgggattacgggtacggatacag

SEQ ID NO: 348494 - DNA, 75 bp, synthetic construct
  source 1..75: mol_type = other DNA
ctgctgataactttgcatggagccttggcgcaggtgtccgctatgacgtcaccccggatatcgcgctggacctca

SEQ ID NO: 348495 - DNA, 75 bp, synthetic construct
  source 1..75: mol_type = other DNA
ctatggccgcggagctgcggactcccgttatacactggatacatggcattctccgatagtcggtggtggtcggga

SEQ ID NO: 348496 - DNA, 75 bp, synthetic construct
  source 1..75: mol_type = other DNA
gcagtttaattctggttactggataaccagtctgtatcaggtaaaagacgccaaatggcagcgtgttcacggctg

SEQ ID NO: 348497 - DNA, 75 bp, synthetic construct
  source 1..75: mol_type = other DNA
aaatgcaacagctcatttccagaaatttagtaatcagaagatgcagaatgaaattggactaaatgggcgggcatt

SEQ ID NO: 348498 - DNA, 75 bp, synthetic construct
  source 1..75: mol_type = other DNA
aggatgacgataccaacctgatcgccttcgccatgaacctgttcgatattatggtatcaatcaggacgatcgcgg

SEQ ID NO: 348499 - DNA, 75 bp, synthetic construct
  source 1..75: mol_type = other DNA
gtggctgatgggctatctgaccagtcatcgctcacagaaagtgttggtgatctgcgccaaagccgccaccgcgct

SEQ ID NO: 348500 - DNA, 75 bp, synthetic construct
  source 1..75: mol_type = other DNA
acgaactgaccgccattgagagcaaccgtcagcaggtaatggaaagcctggatcaggcaggctggcgtctggatg

SEQ ID NO: 348501 - DNA, 75 bp, synthetic construct
  source 1..75: mol_type = other DNA
cgcgaatcgttgtcacgctcaggctctgctgataactttgcatggagccttggcgcaggtgtccgctatgacgtc

SEQ ID NO: 348502 - DNA, 75 bp, synthetic construct
  source 1..75: mol_type = other DNA
aactggagttttatgctcgcggaaaagctgacacaaaatacaatctttataaagatgactggtcgcatgatgatc

SEQ ID NO: 348503 - DNA, 75 bp, synthetic construct
  source 1..75: mol_type = other DNA
aataaagaggaaacatcaaagtatagggggggagatggccataacacggtattcagtggaggtatagcgtttggt

SEQ ID NO: 348504 - DNA, 75 bp, synthetic construct
  source 1..75: mol_type = other DNA
attcagtggcggtattgcggccggttatgatttttatccgcagttcagtattccggttcgtacggaactggagtt

SEQ ID NO: 348505 - DNA, 75 bp, synthetic construct
  source 1..75: mol_type = other DNA
tcagcgacctacttcatgagggcagctgatagtcatcatcgtgagggaatattacagggtgcattgctggtggtc

SEQ ID NO: 348506 - DNA, 75 bp, synthetic construct
  source 1..75: mol_type = other DNA
ctgatagccatcaccgtgagggaatattgcagggtgctttgctggtggttgattcctcgcttactccggttgatg

SEQ ID NO: 348507 - DNA, 75 bp, synthetic construct
  source 1..75: mol_type = other DNA
attatgctgaaagccgcatttctcttgatcagcaaataatcaggcatccttcagcgacctacttcatgagggcgg

SEQ ID NO: 348508 - DNA, 75 bp, synthetic construct
  source 1..75: mol_type = other DNA
tctgcgctatatcgtgcagaaagcagactcctcctttctttatgataagtatcagaatcagagtattgccgcgca

SEQ ID NO: 348509 - DNA, 75 bp, synthetic construct
  source 1..75: mol_type = other DNA
acaagttaaagcaaattaatgacacccttggtcatcaggagggcgatttagcgattacattattagcccaggcga

SEQ ID NO: 348510 - DNA, 75 bp, synthetic construct
  source 1..75: mol_type = other DNA
atggccttcccttctcctgcggcggattatgttgaaagcagaatttctcttgatcagcaactaatcaggcatcca

SEQ ID NO: 348511 - DNA, 75 bp, synthetic construct
  source 1..75: mol_type = other DNA
tagtggaaaaaaagtcgctgttttaggtccagcatttaaggatgagaaaactggaaaggtaacaggtgcaattca

SEQ ID NO: 348512 - DNA, 75 bp, synthetic construct
  source 1..75: mol_type = other DNA
ttgcagtcgtggtccttttcagacctgaaattgcacgcatacatggattgctaaaaagtataattatgcaagttg

SEQ ID NO: 348513 - DNA, 75 bp, synthetic construct
  source 1..75: mol_type = other DNA
gataagctttcattcaatcatcgtgtatatttattcatccggttgccattatttatagctgttcacactcttaat

SEQ ID NO: 348514 - DNA, 75 bp, synthetic construct
  source 1..75: mol_type = other DNA
tgcacgggcagtaatgctgtgtttggtgtgatcactcatgtcattaatgatgcccgaagtggggaatttgatgat

SEQ ID NO: 348515 - DNA, 75 bp, synthetic construct
  source 1..75: mol_type = other DNA
cgcagtgggttcgtgcggacttccatctgcacacccgcgcggatcgagagttcaagtacacaggcgatgacaact

SEQ ID NO: 348516 - DNA, 75 bp, synthetic construct
  source 1..75: mol_type = other DNA
ctggaaaaataacaggtgcaattcatattagtccattttataaaaccacggtatgtcatggtgttcatccgttag

SEQ ID NO: 348517 - DNA, 75 bp, synthetic construct
  source 1..75: mol_type = other DNA
agaaatgctgcgccgtttcaacctgcgctttgccctgtttgatgatgagcgttatgccgaagctcagcacgatgc

SEQ ID NO: 348518 - DNA, 75 bp, synthetic construct
  source 1..75: mol_type = other DNA
atgaataaatacagttactctccttcagaaaatgccttttatgctgttgcgttaaaaaatacctatgaattgagt

SEQ ID NO: 348519 - DNA, 75 bp, synthetic construct
  source 1..75: mol_type = other DNA
ccgctattggtcgtctgaaaggtgaggaactggcgcaatataatttgtggctggattatctggaggcactggagc

SEQ ID NO: 348520 - DNA, 75 bp, synthetic construct
  source 1..75: mol_type = other DNA
catcaataccaatcagtggcctggcaaagctgctattggtcgtctgaaaggttacgagctggaacaatataattt

SEQ ID NO: 348521 - DNA, 75 bp, synthetic construct
  source 1..75: mol_type = other DNA
caagaaagtttaataaaaactatgatgagttaaggagaacagatccttttctatcaagcaaagagttccgcgatt

SEQ ID NO: 348522 - DNA, 75 bp, synthetic construct
  source 1..75: mol_type = other DNA
tcccggtgaaacagtatgtgactcaggtcaatgccgataacagcgtgacctttcgctactttgcccctaggggca

SEQ ID NO: 348523 - DNA, 75 bp, synthetic construct
  source 1..75: mol_type = other DNA
atgtggggcttgggcgagcctgtaggggcgttgaccaacagcctgactcagtggcttcaggggatgcagcaggca

SEQ ID NO: 348524 - DNA, 75 bp, synthetic construct
  source 1..75: mol_type = other DNA
gctttatttctctgttgagccagaacataactggcgcggaggtgagcgaacgtatctgggcggactggccgtaac

SEQ ID NO: 348525 - DNA, 75 bp, synthetic construct
  source 1..75: mol_type = other DNA
tatgccggtaattttggcgaagtgctaaaggcgatgtggcaggacggggaagatgggctggcacgattatatgtg

SEQ ID NO: 348526 - DNA, 75 bp, synthetic construct
  source 1..75: mol_type = other DNA
tcgatgtatatgccttatcgcttccccgaggtctgggatttggggatgatcctccagttagcgcttggggtagtc

SEQ ID NO: 348527 - DNA, 75 bp, synthetic construct
  source 1..75: mol_type = other DNA
caacgaatacatgaacagtaagcaatggcctggtaaagccgctattggtcgtctgaaaggtgaggaactggcgca

SEQ ID NO: 348528 - DNA, 75 bp, synthetic construct
  source 1..75: mol_type = other DNA
gtgagttgtattaatgacctgaacacaggcgatatcagaggcggttccgttcatctggatgcgcagaccgttatg

SEQ ID NO: 348529 - DNA, 75 bp, synthetic construct
  source 1..75: mol_type = other DNA
tgagcgactcgatttgcatacgatgtggtgcgaaggccggactcaaacatcaaaataagttaatgataaaaaaca

SEQ ID NO: 348530 - DNA, 75 bp, synthetic construct
  source 1..75: mol_type = other DNA
atttcatcaccggcaaagggtctataggtatggcaatgcgcgctaaaacgccgatctttgatgatgatggcaaag

SEQ ID NO: 348531 - DNA, 75 bp, synthetic construct
  source 1..75: mol_type = other DNA
cagcgaagatgcacagagcgcccgtcaggaactggtttcgatgctgatggatcgccacggcaccagccgcgtgct

SEQ ID NO: 348532 - DNA, 75 bp, synthetic construct
  source 1..75: mol_type = other DNA
tccgcaacggtctggatctgatcctctctggcgataccggtagcagcacgatttcactgttgaaaaacaaagcgt

SEQ ID NO: 348533 - DNA, 75 bp, synthetic construct
  source 1..75: mol_type = other DNA
aggcctggcaggaatatcccaaacgtgctggtggtaattccaagtcggcagccttcaaagcctggaaagcccgtc

SEQ ID NO: 348534 - DNA, 75 bp, synthetic construct
  source 1..75: mol_type = other DNA
tgctggagcagcgtattggtcgtctggatcgtatcggtcaggcgcacgatattcagatccatgtgccttatctgg

SEQ ID NO: 348535 - DNA, 75 bp, synthetic construct
  source 1..75: mol_type = other DNA
gccgcgtgctgttccgtaacacgcgtaacggtgtgaaaggcttcccgaaacgcgagctgcacaccattaagctgc

SEQ ID NO: 348536 - DNA, 75 bp, synthetic construct
  source 1..75: mol_type = other DNA
ctacgatagcgtgtacaacgatttgattaactatctggcctcgccggatgagaccgaaggctttgacgatctgat

SEQ ID NO: 348537 - DNA, 75 bp, synthetic construct
  source 1..75: mol_type = other DNA
ccctacctatgcgctatgccgattttccaacgctggttgatgctttggactacgccgctctgagtagcgccggaa

SEQ ID NO: 348538 - DNA, 75 bp, synthetic construct
  source 1..75: mol_type = other DNA
accatcctaatccggagaaaattggttatcctatgcagttcaccaaaccgggcgcgctggagaaaggggagagct

SEQ ID NO: 348539 - DNA, 75 bp, synthetic construct
  source 1..75: mol_type = other DNA
acccattgctgaagtggtcaggcccgccgatttctttaccgaacagattgatgaaaaacgtcaggatgtggtggc

SEQ ID NO: 348540 - DNA, 75 bp, synthetic construct
  source 1..75: mol_type = other DNA
atcgtcacttcgaagatttctggcaacagccagcagctcccggaggtgggcgacagcgacaggtcgatgtcctgg

SEQ ID NO: 348541 - DNA, 75 bp, synthetic construct
  source 1..75: mol_type = other DNA
caccagaaaacaaccagtatcagtacctgggattatgggtacggaagcagtggtcgcaaatcgttgtcacgttca

SEQ ID NO: 348542 - DNA, 75 bp, synthetic construct
  source 1..75: mol_type = other DNA
aaagaaagtatcaaagacaccggtgttaaagcatttcgtacagctattacacaacgtcaggtttacgtgaaatcg

SEQ ID NO: 348543 - DNA, 75 bp, synthetic construct
  source 1..75: mol_type = other DNA
aaaggcaaaattcctctgttgcaacggttattaagcttgcatcagccatcctcttgcgtggtgttttgcaatacc

SEQ ID NO: 348544 - DNA, 75 bp, synthetic construct
  source 1..75: mol_type = other DNA
gtcaaccgttcggtatgcagcgtgattcgttgcaacatgcgccgcatattatcgtggcaacgccgggtcgtttgc

SEQ ID NO: 348545 - DNA, 75 bp, synthetic construct
  source 1..75: mol_type = other DNA
cagacctaaagagctatcagggggcaaggtagaagtaaacatgatagccatgctcaaggatgcaatagccaatag

SEQ ID NO: 348546 - DNA, 75 bp, synthetic construct
  source 1..75: mol_type = other DNA
ggcgcagatattggcaaaatcgccgtgcatccggcgcatgtctatgtcgcggtgcgtcaggctgttgctcataaa

SEQ ID NO: 348547 - DNA, 75 bp, synthetic construct
  source 1..75: mol_type = other DNA
gtgcaggaaatagcggtctggcgatcagtttctgtgccccggaagaagcacagcgggccaatatcatttctgaca

SEQ ID NO: 348548 - DNA, 75 bp, synthetic construct
  source 1..75: mol_type = other DNA
gtgatggatgaggccgaccgcatgctggatatgggatttagcgacgccattgatgatgtcatccgttttgcgcca

SEQ ID NO: 348549 - DNA, 75 bp, synthetic construct
  source 1..75: mol_type = other DNA
aggcggtgttaaacgccatgccactagtaaaacctgatcaggtgcgtactccgtggcatgagttctggcgacgtt

SEQ ID NO: 348550 - DNA, 75 bp, synthetic construct
  source 1..75: mol_type = other DNA
tatttttagccgcgttctggtcggcgctcaaatttcactggcagccggcgtgtttgctgtttttatcggcgcggc

SEQ ID NO: 348551 - DNA, 75 bp, synthetic construct
  source 1..75: mol_type = other DNA
aggcagtgttaaacgccatgccactggtaaaaccggaccaggtgcgcacaccgtggcatgagttctggcggcgtt

SEQ ID NO: 348552 - DNA, 75 bp, synthetic construct
  source 1..75: mol_type = other DNA
aaaggcgttttttcttctgtacgtgagtatttaccgttctctgacgcgaaaaaaggtccattctcacagctaaca

SEQ ID NO: 348553 - DNA, 75 bp, synthetic construct
  source 1..75: mol_type = other DNA
atgcagcaaatttcaatcgtgaaaacaaaatgattggtcttacggcagatatgaagccggaagaagttcaggcga

SEQ ID NO: 348554 - DNA, 75 bp, synthetic construct
  source 1..75: mol_type = other DNA
ctgttggctgatatcccttcgcttccttcgggggagttagttcttctggcttgtcttgtccgcttgcggagtgat

SEQ ID NO: 348555 - DNA, 75 bp, synthetic construct
  source 1..75: mol_type = other DNA
taagcgtcggtgaaactcttcccgcgcgcgattttcagcacatcgataaatatgtattcgacaacggtcagggcg

SEQ ID NO: 348556 - DNA, 75 bp, synthetic construct
  source 1..75: mol_type = other DNA
aattaatcacgctattagcgaatggcgaatttcactctggtgagcagctgggtgaaacgttaggaatgagccggg

SEQ ID NO: 348557 - DNA, 75 bp, synthetic construct
  source 1..75: mol_type = other DNA
cggctattaataaacacattcagacactgcgtgactggggcgttgatgtctttaccgttccgggtaaaggataca

SEQ ID NO: 348558 - DNA, 75 bp, synthetic construct
  source 1..75: mol_type = other DNA
ggagatggttgccgggatgatagaagagggtgaaagtgtggaagatgttgcccgtcgcgaagcgattgaagaggc

SEQ ID NO: 348559 - DNA, 75 bp, synthetic construct
  source 1..75: mol_type = other DNA
ggtctacacgaaggtgtttgcactggatgtggctgcgcggcaccgggtgcagtttgcgatgcctgagtccgatgc

SEQ ID NO: 348560 - DNA, 75 bp, synthetic construct
  source 1..75: mol_type = other DNA
accgcgttaaagctggctgaaatttacagcgaagcgggcctgccggacggcgtatttaacgtgttgccgggcgtg

SEQ ID NO: 348561 - DNA, 75 bp, synthetic construct
  source 1..75: mol_type = other DNA
gatgtccattctgacctacgagtcggaagaggaagtcattcgccgcgctaacgataccgactacggcctggcggc

SEQ ID NO: 348562 - DNA, 75 bp, synthetic construct
  source 1..75: mol_type = other DNA
ggtggtagtgacaatctaaaagcgattgacgcctgtattactcgtctgcgtttgactgtggctgactcagcacgt

SEQ ID NO: 348563 - DNA, 75 bp, synthetic construct
  source 1..75: mol_type = other DNA
gcgctggaaggtaaaggctttaaacgtctggtggaagagggcgcgcaggtaagcgcagggcaaccgattctggaa

SEQ ID NO: 348564 - DNA, 75 bp, synthetic construct
  source 1..75: mol_type = other DNA
aaaccgaaaaaggcgctgagattgtcgtccatatgggtatcgacaccgtagcgctggaaggcaaaggctttaaac

SEQ ID NO: 348565 - DNA, 75 bp, synthetic construct
  source 1..75: mol_type = other DNA
ccatcagttcaacggaagtctacacgaaggtttttgcgctggatatggctgcccggcaccgggtgcagtttgcga

SEQ ID NO: 348566 - DNA, 75 bp, synthetic construct
  source 1..75: mol_type = other DNA
ggattggggaggcggttgccgccgctgctgctgacggtgtgacgttctccgttccggtcacaccacatacgttcc

SEQ ID NO: 348567 - DNA, 75 bp, synthetic construct
  source 1..75: mol_type = other DNA
gcaccactattcgcatttatatgctctccaccggactggcaacgctggcggggattgtcttctcgatttataccc

SEQ ID NO: 348568 - DNA, 75 bp, synthetic construct
  source 1..75: mol_type = other DNA
gccctggctatttttctgaccgtactggcgttcaatttgttgggcgatggtttacgcgatgcgctggatccgaaa

SEQ ID NO: 348569 - DNA, 75 bp, synthetic construct
  source 1..75: mol_type = other DNA
ggtttttgtgtattctccattaaatcgttcagttggttatttgtctgatattctctctggttttgtatctggtca

SEQ ID NO: 348570 - DNA, 75 bp, synthetic construct
  source 1..75: mol_type = other DNA
acgacttgtttcatttaaaataaccaaggatgttaatgagcgtgattttattgaacgttatttttctaatatgaa

SEQ ID NO: 348571 - DNA, 75 bp, synthetic construct
  source 1..75: mol_type = other DNA
tctgcaattatagataagaatgcaaaaagcactgaagtatctatatcaactcttttagataaaccaaaagctaag

SEQ ID NO: 348572 - DNA, 75 bp, synthetic construct
  source 1..75: mol_type = other DNA
atggcgggaacctggctacttaccgtgctattaagcggatattcgtcgctgggggcgattgtcagcgcgctaatt

SEQ ID NO: 348573 - DNA, 75 bp, synthetic construct
  source 1..75: mol_type = other DNA
tcgttccagcggtgttttgtttaacgtgacgccatcaatcaaaagtcggacaatggatctcaagattcagcagca

SEQ ID NO: 348574 - DNA, 75 bp, synthetic construct
  source 1..75: mol_type = other DNA
gtggagccgtgatttctgacgattcgctaaaaggttcatcaggggcaagcaactacattaatcgaaccggtgata

SEQ ID NO: 348575 - DNA, 75 bp, synthetic construct
  source 1..75: mol_type = other DNA
gacctttgtagtcatcctgctgataggtctggatatgccttcccggatgcagcgctggttaagacccgaagccct

SEQ ID NO: 348576 - DNA, 75 bp, synthetic construct
  source 1..75: mol_type = other DNA
gcgagcactcacttacgtgacctgttgacccaatgcgaagcgaccatcgcttctgcggtgtctgccgtaacggcg

SEQ ID NO: 348577 - DNA, 75 bp, synthetic construct
  source 1..75: mol_type = other DNA
ccgtgggtaaacgcactggataagcctgtctcactcgcccttaaatctggcaacttcggtgatgaagcctttttt

SEQ ID NO: 348578 - DNA, 75 bp, synthetic construct
  source 1..75: mol_type = other DNA
agaaaaatacattttatgttgaaccatctactgggaagaatttatctgacttgttaagtgaagatgatttagata

SEQ ID NO: 348579 - DNA, 75 bp, synthetic construct
  source 1..75: mol_type = other DNA
agatgggtaatgctatctgtcgtgattggtcataatgaatatcaggaactaaaaaatgctcctgtcattgaggaa

SEQ ID NO: 348580 - DNA, 75 bp, synthetic construct
  source 1..75: mol_type = other DNA
gttctttttttcatcggtattttacccattatttttgcactctggttgcgtaaaaatattccggaagcagaggac

SEQ ID NO: 348581 - DNA, 75 bp, synthetic construct
  source 1..75: mol_type = other DNA
tgctattaagcggatattcgtcgctgggggcgattgtcagcgcgctaattgcgcctttttacgtgtggtggttta

SEQ ID NO: 348582 - DNA, 75 bp, synthetic construct
  source 1..75: mol_type = other DNA
tgatggctttatccccattgatgaaatcggtcagggtgggcggattagcgatgttgcgcagtcagcctacagcct

SEQ ID NO: 348583 - DNA, 75 bp, synthetic construct
  source 1..75: mol_type = other DNA
ataatcgaacttgaaccagagggaatggaaaaaattatttatgaggccatgccccgcaatgaaatcggcctccct

SEQ ID NO: 348584 - DNA, 75 bp, synthetic construct
  source 1..75: mol_type = other DNA
aatgcctggctgggaaatctgcctgaaaatgcctcgtcacaggtaaggcgagtggcatcgcgattcgccatgctg

SEQ ID NO: 348585 - DNA, 75 bp, synthetic construct
  source 1..75: mol_type = other DNA
accctgaagccgctgaggcggttgttcgtgagcacatgcagtcccctgaatgggcgtctgcacaggctgaccttg

SEQ ID NO: 348586 - DNA, 75 bp, synthetic construct
  source 1..75: mol_type = other DNA
agaacatcgcatcaagtttatggggagagccggacgcgcagcggctgacctggtacggcacggcgttaggtattg

SEQ ID NO: 348587 - DNA, 75 bp, synthetic construct
  source 1..75: mol_type = other DNA
tattgcggagcagcgggtcgtgagtggatcggctggttgtcagccaacaaagaacttgcggtcagtgtggttaac

SEQ ID NO: 348588 - DNA, 75 bp, synthetic construct
  source 1..75: mol_type = other DNA
tatggttttgatgctgccttcggcggcgcgcgccgcgatgaagagaaatcccgcgctaaagaacgtatctactct

SEQ ID NO: 348589 - DNA, 75 bp, synthetic construct
  source 1..75: mol_type = other DNA
cagcaaatgcttggacaagggatcgccgggatcttgccgaaactgatcggcggctatttcgatactgaccaacgt

SEQ ID NO: 348590 - DNA, 75 bp, synthetic construct
  source 1..75: mol_type = other DNA
ttgagaaggcagtttgcttctgtgagaagataaacaatttattcccaggtgttttagttgtcattcacgaggcta

SEQ ID NO: 348591 - DNA, 75 bp, synthetic construct
  source 1..75: mol_type = other DNA
ttactgaaaaaactgctgaaaaattttttaccttgattaagtcgcagccaatcaaaaccctagttgatgtccggc

SEQ ID NO: 348592 - DNA, 75 bp, synthetic construct
  source 1..75: mol_type = other DNA
cactgcatcctttcgaaatacctgaaaaatgcccaaaagaaattaccgaaccgcttgaagcctcattttccattt

SEQ ID NO: 348593 - DNA, 75 bp, synthetic construct
  source 1..75: mol_type = other DNA
tggtgattggtctgctgccaggctatgccacgattggtattttcgccccgctgctgctggcgctggctcgatttg

SEQ ID NO: 348594 - DNA, 75 bp, synthetic construct
  source 1..75: mol_type = other DNA
gtcggagagcaaaaaacggcgataacgaatacatggcatgggatatgactctcggttggatcgtctggcagcaac

SEQ ID NO: 348595 - DNA, 75 bp, synthetic construct
  source 1..75: mol_type = other DNA
atggttacgttttggggaaattatgaggggatctctcagtgcagagcattacttgcgctgccgttttgctacgcc

SEQ ID NO: 348596 - DNA, 75 bp, synthetic construct
  source 1..75: mol_type = other DNA
gaaggcggataacccgcgcaatgccttctactggcggtttgtggaaatggggaccgtgaatatgccaccgcaccc

SEQ ID NO: 348597 - DNA, 75 bp, synthetic construct
  source 1..75: mol_type = other DNA
gaaccggaaacagtgataacagcatgaaagccagtgatccccgaaatgcgttttactggcgctttgtcgaactgg

SEQ ID NO: 348598 - DNA, 75 bp, synthetic construct
  source 1..75: mol_type = other DNA
ggaccgtgaatatgccaccgcacccgtttgtgcgcccggcatttgatgtgcgcagtgaacaggcggcacaggtgg

SEQ ID NO: 348599 - DNA, 75 bp, synthetic construct
  source 1..75: mol_type = other DNA
attttacggtaccaaaaacacaggcgggaaccaatcgtgtaattcaccttattaagccagcaatcgacgcactcc

SEQ ID NO: 348600 - DNA, 75 bp, synthetic construct
  source 1..75: mol_type = other DNA
aaaaaatcttgcctcatcgattaataaagaaaaattactggaggttcgtaaagagttactgactggataccagat

SEQ ID NO: 348601 - DNA, 75 bp, synthetic construct
  source 1..75: mol_type = other DNA
aaaatattctgagcataatcggtgaaaaaaatcttgcatcatcgattaataaagaaaaattgctggcggtacgta

SEQ ID NO: 348602 - DNA, 75 bp, synthetic construct
  source 1..75: mol_type = other DNA
atgcgataccgacgtgaggacgacgacggcgattacacttttggcagcggcgatgatacctggctgattaactca

SEQ ID NO: 348603 - DNA, 75 bp, synthetic construct
  source 1..75: mol_type = other DNA
tacttccactaccgttatctcgatgtcagcaccctgaaagagctggcgcgccgctggaagccggaaattcttgat

SEQ ID NO: 348604 - DNA, 75 bp, synthetic construct
  source 1..75: mol_type = other DNA
tcggccaggatcgtcgcttcctgtttaaatacatgccggagctggaagcctacttccactaccgttatcttgatg

SEQ ID NO: 348605 - DNA, 75 bp, synthetic construct
  source 1..75: mol_type = other DNA
attgaagccgcagaacgcggtctgagttttggtgcgccaaccgaaatggaagtgaaaatggcagcactggtcacc

SEQ ID NO: 348606 - DNA, 75 bp, synthetic construct
  source 1..75: mol_type = other DNA
cctgttccgtggccctcagccacacccccaaccgggtggctgaaatgtaacggtgcagcattttcttctgaaatg

SEQ ID NO: 348607 - DNA, 75 bp, synthetic construct
  source 1..75: mol_type = other DNA
cctgttccgtggccctcagccacacctccaacgggttggctgaaatgtaacggtgcagcattttcttctgaaatg

SEQ ID NO: 348608 - DNA, 75 bp, synthetic construct
  source 1..75: mol_type = other DNA
cctgttccgtggccctcagccacaccaccaacgggatggctgaaatgtaacggtgcagcattttcttctgaaatg

SEQ ID NO: 348609 - DNA, 75 bp, synthetic construct
  source 1..75: mol_type = other DNA
caggggcagggcagaatccggcaaggcaatcggctattaaaggtggtcttcctaatagcgtttctgcaatcacga

SEQ ID NO: 348610 - DNA, 75 bp, synthetic construct
  source 1..75: mol_type = other DNA
cctgttccgtggccctcagccacaccgccaacggggtggctgaaatgtaacggtgcagcattttcttctgaaatg

SEQ ID NO: 348611 - DNA, 75 bp, synthetic construct
  source 1..75: mol_type = other DNA
cctgttccgtggccctcagccacacccccaacgggctggctgaaatgtaacggtgcagcattttcttctgaaatg

SEQ ID NO: 348612 - DNA, 75 bp, synthetic construct
  source 1..75: mol_type = other DNA
gtgaaagccggttctggcgcactcacgttaggccagccaaactcgccgggcgttccggcagatttcgccaaacat

SEQ ID NO: 348613 - DNA, 75 bp, synthetic construct
  source 1..75: mol_type = other DNA
cggcggcggaatgccggttggcgcgtttggcggtcgtcgtgatgtaatggatgcgctggccccaaccggtccggt

SEQ ID NO: 348614 - DNA, 75 bp, synthetic construct
  source 1..75: mol_type = other DNA
ctatctgtacgatgttgatggcaaagcctatatcgattatgtcggttcctgggggccgatggtgctgggccataa

SEQ ID NO: 348615 - DNA, 75 bp, synthetic construct
  source 1..75: mol_type = other DNA
cctgttccgtggccctcagccacaccaccaacagggtggctgaaatgtaacggtgcagcattttcttctgaaatg

SEQ ID NO: 348616 - DNA, 75 bp, synthetic construct
  source 1..75: mol_type = other DNA
acagtacccgcaagagattgcctgtattatcgtcgagccggtggcaggcaatatgaactgcgttccaccgctgcc

SEQ ID NO: 348617 - DNA, 75 bp, synthetic construct
  source 1..75: mol_type = other DNA
atgagtaagtctgaaaatctttacagcgcagcgcgcgagctgatccctggcggtgtgaactctcctgttcgcgcc

SEQ ID NO: 348618 - DNA, 75 bp, synthetic construct
  source 1..75: mol_type = other DNA
ttctctttttactgcccgccctgtgcggccttcagtagccgttttcaggtcagtcaggctgtggacaaaatcctg

SEQ ID NO: 348619 - DNA, 75 bp, synthetic construct
  source 1..75: mol_type = other DNA
atttgcactggatgtggctgcacggcaccgggtgcagttttcgatgcttgagtccgatgcggtgtctatgctcaa

SEQ ID NO: 348620 - DNA, 75 bp, synthetic construct
  source 1..75: mol_type = other DNA
gaaggtttttgcgctggacgtggctgcccggcaccgggggcagtttgcgatgccggaatctgatgcggttgcgat

SEQ ID NO: 348621 - DNA, 75 bp, synthetic construct
  source 1..75: mol_type = other DNA
cgccattcctatgcgatgcacatgctgtatgccggtataccgctgaaagttctgcaaagcctgatgggacataag

SEQ ID NO: 348622 - DNA, 75 bp, synthetic construct
  source 1..75: mol_type = other DNA
gaaagccgtacaccaggcagtgcaggcgatccgttgcggtgatgcacagataattatcgcaggtggccaggaaag

SEQ ID NO: 348623 - DNA, 75 bp, synthetic construct
  source 1..75: mol_type = other DNA
cagcgacgagcaaccacgccgcgacaccaccaacgagtccctggcccggctgcggccggtattcaagaaggacgg

SEQ ID NO: 348624 - DNA, 75 bp, synthetic construct
  source 1..75: mol_type = other DNA
gttctttagtggctttggcgcggcggtgggatgctgcgtaggtggcttcctcggtgactggctgggaacccgcaa

SEQ ID NO: 348625 - DNA, 75 bp, synthetic construct
  source 1..75: mol_type = other DNA
ggctttccagcctgacccgtgcagtggatgagcttaacctgatcacccagaaaaatgccgagctggtggaagaga

SEQ ID NO: 348626 - DNA, 75 bp, synthetic construct
  source 1..75: mol_type = other DNA
agcaaaatatcccgctggctgacgataccactctgatgtctactaccaatctacaaagctatatcacacatgcta

SEQ ID NO: 348627 - DNA, 75 bp, synthetic construct
  source 1..75: mol_type = other DNA
ccgatggtgcgcgagggaaaaatcagtggctatatgtcgattcgtacccgggcgacggatgaagagattgcggcg

SEQ ID NO: 348628 - DNA, 75 bp, synthetic construct
  source 1..75: mol_type = other DNA
tagtggtattgttggcaagcgcctgttttgaatggcagattgtccgcccgatagaaaatgtcgcccgtcaggcac

SEQ ID NO: 348629 - DNA, 75 bp, synthetic construct
  source 1..75: mol_type = other DNA
acgatattgcgtttcagaccaatatcctcgccctgaatgcggcggtggaagcggcgcgcgccggagaacaaggca

SEQ ID NO: 348630 - DNA, 75 bp, synthetic construct
  source 1..75: mol_type = other DNA
tacgtccgatagaaaatgtcgccagccaggcactgaaagtggcgaccggagaacgtaatagtgttgagcatctga

SEQ ID NO: 348631 - DNA, 75 bp, synthetic construct
  source 1..75: mol_type = other DNA
catcaggcgatggatgatatccgtgaatcggtggcggagttggcttactaccgcgagcattttatcaagctgtaa

SEQ ID NO: 348632 - DNA, 75 bp, synthetic construct
  source 1..75: mol_type = other DNA
aacgcgcgcggtgctgaaactggcgagccaactggtatcgcaaaccggattgcgtcagggcagcctgagcaaagc

SEQ ID NO: 348633 - DNA, 75 bp, synthetic construct
  source 1..75: mol_type = other DNA
ccgccgatctcgcttcccgcgtacaaccgctgttcagcaccgatttttatcgcgaaaaatggctggtggcggtcg

SEQ ID NO: 348634 - DNA, 75 bp, synthetic construct
  source 1..75: mol_type = other DNA
agccctggtttataaaagcgttaagagcggatgggcaaccattaacgtttggttatgaagtcaatgatatccacg

SEQ ID NO: 348635 - DNA, 75 bp, synthetic construct
  source 1..75: mol_type = other DNA
agccgattttatgtaaagacttcattatcgacccttaccagatctatctggcgcgctattaccaggccgatgcct

SEQ ID NO: 348636 - DNA, 75 bp, synthetic construct
  source 1..75: mol_type = other DNA
aacgttctgctggcgggtggcttaggcgcagataactgcgtggaagcggcacaaaccggctgcgccgggcttgat

SEQ ID NO: 348637 - DNA, 75 bp, synthetic construct
  source 1..75: mol_type = other DNA
gcctcgtcggcaaatatatatgtctaactcaacgacgtttgatgatcaggggtttgcctcaaataatacgggatt

SEQ ID NO: 348638 - DNA, 75 bp, synthetic construct
  source 1..75: mol_type = other DNA
tgcttccagcattcgcatttcagacaacacggtgatgaccacttcccgcgatgtgctggaaacgctcggcaccga

SEQ ID NO: 348639 - DNA, 75 bp, synthetic construct
  source 1..75: mol_type = other DNA
ttcttattgccatgcctgctctccaggatccgattttccgtcgttccgtggtctacatttgcgaacataatacca

SEQ ID NO: 348640 - DNA, 75 bp, synthetic construct
  source 1..75: mol_type = other DNA
agaacccaaaacctgaagtgtatatacgagcaaagtacaaaatagtgaaaggatactttgacttaacattcaggg

SEQ ID NO: 348641 - DNA, 75 bp, synthetic construct
  source 1..75: mol_type = other DNA
ttaatactgactcagctggttatggcgggtctggcagactatcagttcggttgttacagacgccttccgcagtga

SEQ ID NO: 348642 - DNA, 75 bp, synthetic construct
  source 1..75: mol_type = other DNA
atgcaattttctacaaccccaactctggaaggccagaccatcgttgaatattgcggtgtggtgactggcgaagcg

SEQ ID NO: 348643 - DNA, 75 bp, synthetic construct
  source 1..75: mol_type = other DNA
atttctttgctggtatccgcgatatcgttggcggacgctccggtgcgtatgaaaaagaactgcgcaaagcgcggg

SEQ ID NO: 348644 - DNA, 75 bp, synthetic construct
  source 1..75: mol_type = other DNA
tgaagcgcgtacaccgctgatcatttccggcccggcagaagacagctcggaaatgtataaacgcgtgaataaaat

SEQ ID NO: 348645 - DNA, 75 bp, synthetic construct
  source 1..75: mol_type = other DNA
gattattctggctttccgccaggcaggttacgaagtggcaattgatgattttggtattggctactctaacttgca

SEQ ID NO: 348646 - DNA, 75 bp, synthetic construct
  source 1..75: mol_type = other DNA
tgcgcaagcgccgcgagcaatgggtggaaccgttatggaaaagtatcttgagcaacaaagggttaatgccgctgc

SEQ ID NO: 348647 - DNA, 75 bp, synthetic construct
  source 1..75: mol_type = other DNA
ccgtagtcgttccgaccaaccgtccgatgattcgtaaagatttgccagacctggtctacatgaccgaagcagaaa

SEQ ID NO: 348648 - DNA, 75 bp, synthetic construct
  source 1..75: mol_type = other DNA
tacatcgttaaagatggtgaagttatcatcgttgacgaacacaccggtcgtaccatgcaggggcgtcgctggtcc

SEQ ID NO: 348649 - DNA, 75 bp, synthetic construct
  source 1..75: mol_type = other DNA
tccgccacagtctctggaagaaatgtgggacattccggggctgcaggaacgtctgaaaaacgattttgatcttga

SEQ ID NO: 348650 - DNA, 75 bp, synthetic construct
  source 1..75: mol_type = other DNA
tacggtagataatcaaggaaatatttttatacctgatgtaggtccaataaatgtaaaaaatgttcctgcaagcca

SEQ ID NO: 348651 - DNA, 75 bp, synthetic construct
  source 1..75: mol_type = other DNA
agataaaggtgttattgccaatatccaattagaacaaggcgatcaaatagttattccaaataagactgatcttat

SEQ ID NO: 348652 - DNA, 75 bp, synthetic construct
  source 1..75: mol_type = other DNA
ggcgagcaagcgatgagcggccaggcaaacacctcctccaccaccgggactttcgcacagcaaaaccgccagggc

SEQ ID NO: 348653 - DNA, 75 bp, synthetic construct
  source 1..75: mol_type = other DNA
atgcgcgacgcaacggcattattccgcgtgatgctgatcagtataatgccatccaggagcgtttgatttcgcgct

SEQ ID NO: 348654 - DNA, 75 bp, synthetic construct
  source 1..75: mol_type = other DNA
acttcatttccaggctacattaaaacaagacggtaatattgctatagaaccgggggattttaaagccaccagcac

SEQ ID NO: 348655 - DNA, 75 bp, synthetic construct
  source 1..75: mol_type = other DNA
attaatacgggtggcgcaattgcagtcgaaagggctaatccagttgttcctaaaataacacctgttgatgcggat

SEQ ID NO: 348656 - DNA, 75 bp, synthetic construct
  source 1..75: mol_type = other DNA
tcgaaaaatcggaattggtgtcaaacgagctgaccaaagccggtatcaaacacaacgttctgaacgccaaattcc

SEQ ID NO: 348657 - DNA, 75 bp, synthetic construct
  source 1..75: mol_type = other DNA
gatgtcacagatatcgaaacgcatctggtgatgagccaggcagcgcgccagaccttatccctcgaaacggatttt

SEQ ID NO: 348658 - DNA, 75 bp, synthetic construct
  source 1..75: mol_type = other DNA
gcggtgccagcggcgcgatttatggcgtgcgcttattacaggttctgcgcgatgtcacagatatcgaaacgcatc

SEQ ID NO: 348659 - DNA, 75 bp, synthetic construct
  source 1..75: mol_type = other DNA
ctgatcaatgggcttttcttgcatcggtgatcccgatgaatgtgcagaatattgaaccgacgatattacgggcta

SEQ ID NO: 348660 - DNA, 75 bp, synthetic construct
  source 1..75: mol_type = other DNA
taccgcagcggcagtgattgccagacggaaagtgaatacactgatactggtacaccggactgaattgctgaagca

SEQ ID NO: 348661 - DNA, 75 bp, synthetic construct
  source 1..75: mol_type = other DNA
tctttccagacgctggggatggtgattttaccctgttcaatcaaaaccctttccggcattgtccatagctatacc

SEQ ID NO: 348662 - DNA, 75 bp, synthetic construct
  source 1..75: mol_type = other DNA
tggtgatgagccaggccgcgcgccagaccttatctcttgaaacggatttttccctgcgcgaagtgcaggcgttag

SEQ ID NO: 348663 - DNA, 75 bp, synthetic construct
  source 1..75: mol_type = other DNA
gtattagaagaagctgaaaaatgcatagccgaatggaaagcctttgttgatctgtgtcgcaaggatgatgacaaa

SEQ ID NO: 348664 - DNA, 75 bp, synthetic construct
  source 1..75: mol_type = other DNA
gcgcacacggagccttagtgttcgcaaaacttccgaacaccacagtgcccgttgttaataatgtcggcgaacgtc

SEQ ID NO: 348665 - DNA, 75 bp, synthetic construct
  source 1..75: mol_type = other DNA
ccgtgagtggtgatgttgattgtcatcaggttaatggcgatataaccactgtcagcggagatataaacagaaaat

SEQ ID NO: 348666 - DNA, 75 bp, synthetic construct
  source 1..75: mol_type = other DNA
gaccgtctgtctcaatcgctgtttgatgcaagcgtagatctaaaccctcatcaaattgaggcggctctttttgct

SEQ ID NO: 348667 - DNA, 75 bp, synthetic construct
  source 1..75: mol_type = other DNA
gataattattattgtggtttgggtgaaattgaagggcttaccaaagaactaataaaaaaaatatgtaataagcag

SEQ ID NO: 348668 - DNA, 75 bp, synthetic construct
  source 1..75: mol_type = other DNA
ggatactaatcagagtacgcatatcgttatgcaaagcgcaaccacaacgagaacatttacgcgcgaagacctgct

SEQ ID NO: 348669 - DNA, 75 bp, synthetic construct
  source 1..75: mol_type = other DNA
tgagtgccgtcctgttactggcctgcgtctcctgcgcctctttcgccgcccccacccagcaagaagcccaggcat

SEQ ID NO: 348670 - DNA, 75 bp, synthetic construct
  source 1..75: mol_type = other DNA
gattctctgtgaccgtaatctggaaaggcttacatactgtatgttctgtgggcgtcgttttcttgtcattcctgt

SEQ ID NO: 348671 - DNA, 75 bp, synthetic construct
  source 1..75: mol_type = other DNA
cgcataagaaatattgaaacgaagcttgtctccgcaaaagtgggcactgaaaataataagctactcggtaatacg

SEQ ID NO: 348672 - DNA, 75 bp, synthetic construct
  source 1..75: mol_type = other DNA
cagcacaaccgctaatacctcctctatagttgttggtaatcgaacggatggttggtatgatggcttccgttttca

SEQ ID NO: 348673 - DNA, 75 bp, synthetic construct
  source 1..75: mol_type = other DNA
ttgccgtcaattaccggaaatattgatagtcatgttgaattccttcccagcgaactctcgccggcagtggggatt

SEQ ID NO: 348674 - DNA, 75 bp, synthetic construct
  source 1..75: mol_type = other DNA
gtctggtcgtggacgtgcgccgaaaccgattgctgaagccctggctggcggtcgctcccttgatgagtttctcat

SEQ ID NO: 348675 - DNA, 75 bp, synthetic construct
  source 1..75: mol_type = other DNA
aaagcgcctcccaagtatcagtttgaagaaaatggtgaaactaaatactggtctggtcgtggacgtgcgccaaaa

SEQ ID NO: 348676 - DNA, 75 bp, synthetic construct
  source 1..75: mol_type = other DNA
ccgtccacgtccatgagcgcagacggtccattcaacctgtataacgcggtagtgaccgcagctgataaagcctcc

SEQ ID NO: 348677 - DNA, 75 bp, synthetic construct
  source 1..75: mol_type = other DNA
tccggctaaagcactggtagatgcgggctatgatggcatcgttagcgctggtgtgggtaacggcaacctgtataa

SEQ ID NO: 348678 - DNA, 75 bp, synthetic construct
  source 1..75: mol_type = other DNA
acggtaccgacacgatggaagaaacggcttacttcctcgacctgacggtgaaatgtgacaaaccggtggtgatgg

SEQ ID NO: 348679 - DNA, 75 bp, synthetic construct
  source 1..75: mol_type = other DNA
gccgggcagtccgtagaacgtaccgcgcagcaggcagcagcatttgttaaggcgtatcgagaggcagtgcaatga

SEQ ID NO: 348680 - DNA, 75 bp, synthetic construct
  source 1..75: mol_type = other DNA
atgcagtggcaaactaaactcccgctgatcgccattttgcgcggcattacgcccgacgaggcactggcacatgtt

SEQ ID NO: 348681 - DNA, 75 bp, synthetic construct
  source 1..75: mol_type = other DNA
cggccctatcactgtcagaaataaaatggttgattcagggctcgtttacgggggacataaattattcaaaacatc

SEQ ID NO: 348682 - DNA, 75 bp, synthetic construct
  source 1..75: mol_type = other DNA
gagtgatacggcattactgaaatatgctgctgacatcgagagttataagcagcgcacagccgtgccgatgatcaa

SEQ ID NO: 348683 - DNA, 75 bp, synthetic construct
  source 1..75: mol_type = other DNA
tttacggttacgtccgtccttacacttcgctggttactcagcaatcagggaatacctgtaagattttctctactg

SEQ ID NO: 348684 - DNA, 75 bp, synthetic construct
  source 1..75: mol_type = other DNA
aagctcaaaataagggtaagctggtggtgtctataacggcttacgatgacagcggtgattcagcgacaagtttca

SEQ ID NO: 348685 - DNA, 75 bp, synthetic construct
  source 1..75: mol_type = other DNA
gtgaaagaaagtacggttacagctattccggtatctgagggatgcgaggtgtcctctgatcctaatgtcaaaagt

SEQ ID NO: 348686 - DNA, 75 bp, synthetic construct
  source 1..75: mol_type = other DNA
cccgaacatggcagattacggctcgatctacatcatgcgtaagagcgtggccgcgcggcagaaagagatgctgga

SEQ ID NO: 348687 - DNA, 75 bp, synthetic construct
  source 1..75: mol_type = other DNA
aatatgccggccagtcttccgacagcgtgctctatttcctgaaacgcgcaggcggtatcgactccgatcgcggca

SEQ ID NO: 348688 - DNA, 75 bp, synthetic construct
  source 1..75: mol_type = other DNA
gataagctgaatatctggatctggggcgcagtcaatttctccaacgtcgtcaccgttgataatcagggtaatatt

SEQ ID NO: 348689 - DNA, 75 bp, synthetic construct
  source 1..75: mol_type = other DNA
acgaaccacaaaggcatttattatctgccggttggggatgatctagaagtgaatgctgaccatgaaatcacggtc

SEQ ID NO: 348690 - DNA, 75 bp, synthetic construct
  source 1..75: mol_type = other DNA
tggccgtagccgtcaaagtgcctcaggaagaaactgagggtgagtggtggttaccaaccgctatgacgctaacga

SEQ ID NO: 348691 - DNA, 75 bp, synthetic construct
  source 1..75: mol_type = other DNA
cgtaacaacgaacagcgtattgaaaataccttcgtagtcgatgagcaaacgcccatgactgtagaaatgacaccg

SEQ ID NO: 348692 - DNA, 75 bp, synthetic construct
  source 1..75: mol_type = other DNA
cacagcacgtgacagttttcggaccggctgaagaggcaagtaagtctgaaaacactgtatcaataccaagcagtg

SEQ ID NO: 348693 - DNA, 75 bp, synthetic construct
  source 1..75: mol_type = other DNA
ggctaaaacaatcaaagtaggtggccaggacatctataccggagccaaaaccgttgctgtggccgttaaggtacc

SEQ ID NO: 348694 - DNA, 75 bp, synthetic construct
  source 1..75: mol_type = other DNA
atgatgccggggtggttgaaaccaagatcaagatagaaaatatggacctcgggaacgtgcgacttgtcgggattg

SEQ ID NO: 348695 - DNA, 75 bp, synthetic construct
  source 1..75: mol_type = other DNA
agtcccggtgacatcagaaggactggttaaagccgtgcgcttttatgaacaggtaaagcgtgagaatccgccagt

SEQ ID NO: 348696 - DNA, 75 bp, synthetic construct
  source 1..75: mol_type = other DNA
accgacgatgccactgtatcccccggcaaatgaccggtttcactggcgggtgatgagtcacctcggatcaaactt

SEQ ID NO: 348697 - DNA, 75 bp, synthetic construct
  source 1..75: mol_type = other DNA
ggacgatgaacttaatcaccgtcggcttgatgccattctggctgtacagcatcatcgtattcagcgttttgaaaa

SEQ ID NO: 348698 - DNA, 75 bp, synthetic construct
  source 1..75: mol_type = other DNA
agcttcggtgacatcagaaggactggttaaagctgtgcgcttttatgaacaggtacggcgtgaggatccgccagt

SEQ ID NO: 348699 - DNA, 75 bp, synthetic construct
  source 1..75: mol_type = other DNA
aaaaatatcgattacgaaatgccaccccaattcagggatggcgcgagtagagggcgagttattcaaaattgcact

SEQ ID NO: 348700 - DNA, 75 bp, synthetic construct
  source 1..75: mol_type = other DNA
atgaaggcgtttacctatgaacgagtgaacacccccgccgaggcggcacttagcgctcagcgcgtacccggcgca

SEQ ID NO: 348701 - DNA, 75 bp, synthetic construct
  source 1..75: mol_type = other DNA
ttcactccgcaccaactgacagcgatgaaaaatgggctgttggatttagtcactgcattggatcggcaacctgac

SEQ ID NO: 348702 - DNA, 75 bp, synthetic construct
  source 1..75: mol_type = other DNA
cgattattgcgttaattattataactttacctatgaacgccacattgcaggtgccgcgcaacgcgtggagagtta

SEQ ID NO: 348703 - DNA, 75 bp, synthetic construct
  source 1..75: mol_type = other DNA
attacatcggtgtgcaggcgcaaccttcactccgctattttcatattgatcactttaatagtgatatctataccg

SEQ ID NO: 348704 - DNA, 75 bp, synthetic construct
  source 1..75: mol_type = other DNA
ggtttgccggagagggagatattcacctgtttggcgaaatgctcaaccgtttcctggccctgtacgccgatatga

SEQ ID NO: 348705 - DNA, 75 bp, synthetic construct
  source 1..75: mol_type = other DNA
gcgcacctcaggtagaaagtgcggcggtggcggtgattgatgatgtgcaggggcagcacagcgggttgctagcct

SEQ ID NO: 348706 - DNA, 75 bp, synthetic construct
  source 1..75: mol_type = other DNA
tcgcagcggtgatattggctacgccatcgctcctaatacgctggtttatcagggacgtaaagacgatcaggtcaa

SEQ ID NO: 348707 - DNA, 75 bp, synthetic construct
  source 1..75: mol_type = other DNA
cgacaacccaccagcttccggcaatcaggttagcgaattaacaatgtgggttaaacgactggtcagccaactgaa

SEQ ID NO: 348708 - DNA, 75 bp, synthetic construct
  source 1..75: mol_type = other DNA
ctgaaagcgtatatccagaaaaactcgccgctggatgtcaatgcctacgagccgaaaggcgaggtaagctggcag

SEQ ID NO: 348709 - DNA, 75 bp, synthetic construct
  source 1..75: mol_type = other DNA
ccggcggtgcttgacgcccagtgcggcgtgctggcgattaacccgaatgacgcggtgagcggttattatcaggtc

SEQ ID NO: 348710 - DNA, 75 bp, synthetic construct
  source 1..75: mol_type = other DNA
tgcgattgcccgttatgccgggcaaccggcgggcttgacgcccagtgcggcgtgctggcgattaacccgaatgac

SEQ ID NO: 348711 - DNA, 75 bp, synthetic construct
  source 1..75: mol_type = other DNA
attaaacttcaatgccaccggcggtgatggatatccgcgccttgataacaaaccgggctatgtgaataccggctt

SEQ ID NO: 348712 - DNA, 75 bp, synthetic construct
  source 1..75: mol_type = other DNA
ctgtttaaaccctgggcgctgtttaaacgtcaggatctgaaaatagctgttattgggctgacaaccgatgacacg

SEQ ID NO: 348713 - DNA, 75 bp, synthetic construct
  source 1..75: mol_type = other DNA
gcgttttgtacagaccaatatggggcggttgattctggcagcccaaatggatcgcactggtgccgactttgcggt

SEQ ID NO: 348714 - DNA, 75 bp, synthetic construct
  source 1..75: mol_type = other DNA
gacggtcgcgaacagttcgaagcgcttatcaggttctatgcggatgataaaaaccatgaaacattgttgcttcgt

SEQ ID NO: 348715 - DNA, 75 bp, synthetic construct
  source 1..75: mol_type = other DNA
tgagaatccgccagtcgaaaccggagcatggaaagacgctgttgactgggtgctcaaagaggcttgccaggctgt

SEQ ID NO: 348716 - DNA, 75 bp, synthetic construct
  source 1..75: mol_type = other DNA
attaaagcagtgcgtttctatgaacaggtaaagcgtgagaatccgccagtcgaaaccggagcatggaaagacgct

SEQ ID NO: 348717 - DNA, 75 bp, synthetic construct
  source 1..75: mol_type = other DNA
ctggtcggattgcttggttatctgatctccgttttttgctggtataaagcgttacatcaactggcactcagcaaa

SEQ ID NO: 348718 - DNA, 75 bp, synthetic construct
  source 1..75: mol_type = other DNA
gggattttatcgcggctctgttagcttttggcctggatgcccggatactgttactcgggctgctgggttatctgc

SEQ ID NO: 348719 - DNA, 75 bp, synthetic construct
  source 1..75: mol_type = other DNA
aaaaactaatccagactgcaaattaccggataaagcgatggactacctgaagcgaaatggactgataagcgcgga

SEQ ID NO: 348720 - DNA, 75 bp, synthetic construct
  source 1..75: mol_type = other DNA
attgacgtagaagcgatgatgatggatttccgcgcaatccaagaggacatgcgggcgctcatggggaggatttcc

SEQ ID NO: 348721 - DNA, 75 bp, synthetic construct
  source 1..75: mol_type = other DNA
gtgcttcatcaattgcttttgctttggggtgctaggctatcagagctgcgcctggctaccgccagcgagttcaac

SEQ ID NO: 348722 - DNA, 75 bp, synthetic construct
  source 1..75: mol_type = other DNA
gtgcttcatcagctgcttttgctttggggagccaggctatcagagctgcgtctggctaccgccagtgaatttaac

SEQ ID NO: 348723 - DNA, 75 bp, synthetic construct
  source 1..75: mol_type = other DNA
ggcatgggtgcgtttctttgataagcaggaaaagaagaacagcaaaaaggccagggtgcttcttctacagctacg

SEQ ID NO: 348724 - DNA, 75 bp, synthetic construct
  source 1..75: mol_type = other DNA
cagcaacggacgagggcatacagcagcgtgtgctggatgcagccggggaattaggctgggaagtgcactttcttg

SEQ ID NO: 348725 - DNA, 75 bp, synthetic construct
  source 1..75: mol_type = other DNA
gccgatgaactggaatcatggagtgaagccgggctaaacgccctagctgaatgggaaaaatcagaccatcaatga

SEQ ID NO: 348726 - DNA, 75 bp, synthetic construct
  source 1..75: mol_type = other DNA
tccttcatcagatgcttatgctgtggggggcgaggctctcagagcttaggctggcaacaaagacagaatttgacc

SEQ ID NO: 348727 - DNA, 75 bp, synthetic construct
  source 1..75: mol_type = other DNA
gtctcactagtcgaggttgaggaactcaacgaaacggaacgtggtgctggtggctttggtagcacatcggaaggc

SEQ ID NO: 348728 - DNA, 75 bp, synthetic construct
  source 1..75: mol_type = other DNA
catcatattggcgcggtttcattttctgcgattctgaaggaaacgaatgccagatatctgcttggcctgacggca

SEQ ID NO: 348729 - DNA, 75 bp, synthetic construct
  source 1..75: mol_type = other DNA
atgtgggataaacgccagcggggttataaggcgatggggtacaggattgtggctgatggtgaagggctttcattt

SEQ ID NO: 348730 - DNA, 75 bp, synthetic construct
  source 1..75: mol_type = other DNA
tttccgaaccctgagttttataaggctcaggcaatgcgtatgtcagtctggaataagccccgtgttataggttgt

SEQ ID NO: 348731 - DNA, 75 bp, synthetic construct
  source 1..75: mol_type = other DNA
ggaagcgtttttgttgatattaatttccagccttattctgatcaatgggcttttcttgcatcggtgatcccgatg

SEQ ID NO: 348732 - DNA, 75 bp, synthetic construct
  source 1..75: mol_type = other DNA
accggcctcgctatggcgatccctcctggctggtgtctgaaactttatcctcgttccggattgggctgcaaaaag

SEQ ID NO: 348733 - DNA, 75 bp, synthetic construct
  source 1..75: mol_type = other DNA
gcgctggctgaaatcagacccgcgtggatcttcgttcatgcagaaacgctggactatccttcggaaacgttaact

SEQ ID NO: 348734 - DNA, 75 bp, synthetic construct
  source 1..75: mol_type = other DNA
ggtccgctgtctatgacgctgggtattcacggttatgtgccgatggggcgggcgttgactcgttctggcgcaaag

SEQ ID NO: 348735 - DNA, 75 bp, synthetic construct
  source 1..75: mol_type = other DNA
aacagaccctggcgatcagcactgatacgctggtggcgggtaaccatttcctccctgatatcgatcctgctgatc

SEQ ID NO: 348736 - DNA, 75 bp, synthetic construct
  source 1..75: mol_type = other DNA
aaaaaattgagattgcaaaaatagcaagtgactttgttatcgctggcatgaatacgaataaacagccagcgtgtc

SEQ ID NO: 348737 - DNA, 75 bp, synthetic construct
  source 1..75: mol_type = other DNA
agtcgcagagggaattgcctggataattcgccgatggaaagagtctttcgcagccttaaaagtgaatggcttccg

SEQ ID NO: 348738 - DNA, 75 bp, synthetic construct
  source 1..75: mol_type = other DNA
gaaggcgtcaattttacccgtgacggcgaacctgtcacgtttgactggaaaggatatgaccattttgccacgcca

SEQ ID NO: 348739 - DNA, 75 bp, synthetic construct
  source 1..75: mol_type = other DNA
ccggaacaggcgctgcgctgggcgctctctggcggtgaagattacgagttgtgtttcacggtgccggaactgaac

SEQ ID NO: 348740 - DNA, 75 bp, synthetic construct
  source 1..75: mol_type = other DNA
tcgcgttacctctgcaaaaaagaccgcgtgcatcggggggaagcgtttttgttgatattaatttccagccttatt

SEQ ID NO: 348741 - DNA, 75 bp, synthetic construct
  source 1..75: mol_type = other DNA
gtaacaactcagcgggcggctaagccgtgcccgtctcccgtgacagtctggcagatgctgcttacaacattatgg

SEQ ID NO: 348742 - DNA, 75 bp, synthetic construct
  source 1..75: mol_type = other DNA
ggatcttcgttcatgcagaaacgctggactatccttcggaaacgttaactgagatccgccataccggcgcacgag

SEQ ID NO: 348743 - DNA, 75 bp, synthetic construct
  source 1..75: mol_type = other DNA
actaaatcagtaagttggcagcatcacccagagcatgaagtcgtcattcaggaatcggtatttacccgccgtggt

SEQ ID NO: 348744 - DNA, 75 bp, synthetic construct
  source 1..75: mol_type = other DNA
ttgccgacgcgatttgcaaaattattttgcgttaaggtcaaaccagtttatttgaaccgcgtcactgacgcggtt

SEQ ID NO: 348745 - DNA, 75 bp, synthetic construct
  source 1..75: mol_type = other DNA
taatgcttttcggtgtgtttatgattgtgatttttaagagctatttagactcatggagtgggataattcttagca

SEQ ID NO: 348746 - DNA, 75 bp, synthetic construct
  source 1..75: mol_type = other DNA
gcgtgacgcatcagcaacctgcgacggtgaatgctgacggtaaagtgatgatgccatcgggtggttttccgtcat

SEQ ID NO: 348747 - DNA, 75 bp, synthetic construct
  source 1..75: mol_type = other DNA
gcaagagtttctttgaaggaatgaatctgctgaaactcaatcctgaagtgattgaaaagcagatgacgaaggatg

SEQ ID NO: 348748 - DNA, 75 bp, synthetic construct
  source 1..75: mol_type = other DNA
ctatctggatgataacgctatgtcgaaaggggcagacatcattgatgtcatgcaacgcctgggcggtgtggctga

SEQ ID NO: 348749 - DNA, 75 bp, synthetic construct
  source 1..75: mol_type = other DNA
ggtgaatacagacggtaaagtgatgatgccatcaggtggttttccatcatggggatatggttttgcggggatgta

SEQ ID NO: 348750 - DNA, 75 bp, synthetic construct
  source 1..75: mol_type = other DNA
tttctcggtggtgtggtggagggattcaaagcagcggcaggtcccgtcagtgccgcgttcgaaccacttaagcct

SEQ ID NO: 348751 - DNA, 75 bp, synthetic construct
  source 1..75: mol_type = other DNA
atgcgctgaactatctggatgataatgccatgtcgaaaggggcggacatcattgatgtgatgcaacgtctgggcg

SEQ ID NO: 348752 - DNA, 75 bp, synthetic construct
  source 1..75: mol_type = other DNA
gtcatgcatccgctggactccctgaaatctggcgtttcctggttgctggagaaactcggcattgtcagtaaagag

SEQ ID NO: 348753 - DNA, 75 bp, synthetic construct
  source 1..75: mol_type = other DNA
ctggttcactgatttactttcgccagttaaatcgacttctgaggaactgaacagcgcagctgcaatgggccgtag

SEQ ID NO: 348754 - DNA, 75 bp, synthetic construct
  source 1..75: mol_type = other DNA
atcagcgcttttctgggtggtgtggttgaaggctttaaagcggctgctggcccgatcagtgctgcatttgaacca

SEQ ID NO: 348755 - DNA, 75 bp, synthetic construct
  source 1..75: mol_type = other DNA
gtgaagcgatggtgagtcgcgcagctgctgtgccgcccgttcaccggattgaggcaccgacgcagatcatcatcc

SEQ ID NO: 348756 - DNA, 75 bp, synthetic construct
  source 1..75: mol_type = other DNA
agccactaccacggctgcagggctggcaatggggacgccagtgatagcggcagtaaaaagctataccagcatgga

SEQ ID NO: 348757 - DNA, 75 bp, synthetic construct
  source 1..75: mol_type = other DNA
gcgaagcgatggtgagtcgtgcagccactgtgccgcccgttcaacggcttgaggcaccgacgcagatcatcattc

SEQ ID NO: 348758 - DNA, 75 bp, synthetic construct
  source 1..75: mol_type = other DNA
tccactggcagtgctgcgacgcgggcttgcttcatcgggtaacgcagcgggtttacttactgcgccgttgtcgtc

SEQ ID NO: 348759 - DNA, 75 bp, synthetic construct
  source 1..75: mol_type = other DNA
gcccggtcgacactcgggcgattgtttgatttcaacaagctggcgatttaccaggagcagagcgcatcaaaattt

SEQ ID NO: 348760 - DNA, 75 bp, synthetic construct
  source 1..75: mol_type = other DNA
ggaacgatgctcgcggcagcaggcagaactttaccggaagtgggcggagatggataagctcatcctgacggatgg

SEQ ID NO: 348761 - DNA, 75 bp, synthetic construct
  source 1..75: mol_type = other DNA
cgtaaaaatgccaaatcaacgctttgctccggcgtggggctttatatggctggcgccgacggcgagggcggtgct

SEQ ID NO: 348762 - DNA, 75 bp, synthetic construct
  source 1..75: mol_type = other DNA
gaaaaacttttcctgtgccccatccgaaaaaagacttgccactgggtactgtcagatcgatcagaaaaatggcgg

SEQ ID NO: 348763 - DNA, 75 bp, synthetic construct
  source 1..75: mol_type = other DNA
cagaaggcgaatcctgggctgggtatctgtaagcgctgggatgacctgcgccgcctggctaaaaaggcgaaagag

SEQ ID NO: 348764 - DNA, 75 bp, synthetic construct
  source 1..75: mol_type = other DNA
gctatgccgagagggtggtggcgggggaaattattgcctgtgagtatgtgcgccttgcctgccagcgttttcttg

SEQ ID NO: 348765 - DNA, 75 bp, synthetic construct
  source 1..75: mol_type = other DNA
tgaaatgcaggatgccatcaaggctgtcagcgaacagttgccgatggaaaatggtgcggtggacttcgctgcact

SEQ ID NO: 348766 - DNA, 75 bp, synthetic construct
  source 1..75: mol_type = other DNA
cggcctcggcaccttagcggtggcgctagctgcagtgctggggccgctggcagtgatccgtctgggattctctgt

SEQ ID NO: 348767 - DNA, 75 bp, synthetic construct
  source 1..75: mol_type = other DNA
gttgctgtgatgtttatgaatccactggcggtactgcgcggtggactgaccgccgcaggcgcggtgctgcgagtg

SEQ ID NO: 348768 - DNA, 75 bp, synthetic construct
  source 1..75: mol_type = other DNA
tcactaagcacatgaatatctgggttaccgctgagtcagcttggatggacatgatgaaatgggagaaatgcgagt

SEQ ID NO: 348769 - DNA, 75 bp, synthetic construct
  source 1..75: mol_type = other DNA
acagctgcactggctgccgttgttgccgaaatgatgggcgttgctgccgcgcctgcagagcttccaccgttgcat

SEQ ID NO: 348770 - DNA, 75 bp, synthetic construct
  source 1..75: mol_type = other DNA
cgggtttacttactgctccgttgtcgtctttgcgtcgcacggtatcactgatggggaatgtcctgaaaactgtag

SEQ ID NO: 348771 - DNA, 75 bp, synthetic construct
  source 1..75: mol_type = other DNA
gctgggtatcaaaacgttatcttccgttacggcagcagtaactcgaaccagcagcgcgttgtcctggctggctgg

SEQ ID NO: 348772 - DNA, 75 bp, synthetic construct
  source 1..75: mol_type = other DNA
ggctacggagatgatatttaccatcgtatttataacaaacgcgtcgtagattttccatcctggataagcaagaaa

SEQ ID NO: 348773 - DNA, 75 bp, synthetic construct
  source 1..75: mol_type = other DNA
cagacgctggtgaccagaaaaatggaaacggaagcttttggtgacagtaatgaaccgccccgggtttcctggaga

SEQ ID NO: 348774 - DNA, 75 bp, synthetic construct
  source 1..75: mol_type = other DNA
gtgctgccggtggcggcactgttgctgcgattcggtcagccagatttacttaacgttgcgtttattgcccaggcg

SEQ ID NO: 348775 - DNA, 75 bp, synthetic construct
  source 1..75: mol_type = other DNA
ttcccgcgtaccgacgggcgctaccactcaggatgccgaagtggatgatgcgaaatatggcttcgtcgcctctgg

SEQ ID NO: 348776 - DNA, 75 bp, synthetic construct
  source 1..75: mol_type = other DNA
atggctgatgaagatatcaacccggtagtgcttctcgcagatcctaaagtaaatcatcgcgtgtgggctgcctgt

SEQ ID NO: 348777 - DNA, 75 bp, synthetic construct
  source 1..75: mol_type = other DNA
ttttagtcatcctgtttacctctttctcagggagtttagtctccaggattcccggggcggttcacaatacagata

SEQ ID NO: 348778 - DNA, 75 bp, synthetic construct
  source 1..75: mol_type = other DNA
gtctggccgccggtacagcacgctatccatgcaggaggcgagtggatcgtttctgcgggcgcgctgggttccggt

SEQ ID NO: 348779 - DNA, 75 bp, synthetic construct
  source 1..75: mol_type = other DNA
gcagctgataaagcctccgctaatcgtggcgtactggtagtaatgaacgacactgttctggatggccgtgacgtc

SEQ ID NO: 348780 - DNA, 75 bp, synthetic construct
  source 1..75: mol_type = other DNA
ttcagtatgtcagttacgtccatgacttgcctggcggcattcgtgtttcgttatccattgatattctttacttta

SEQ ID NO: 348781 - DNA, 75 bp, synthetic construct
  source 1..75: mol_type = other DNA
gccgctggaattcctgttcatgttccttgctccgctgctgtacctcctgcacgcactgctgaccggtatcagcct

SEQ ID NO: 348782 - DNA, 75 bp, synthetic construct
  source 1..75: mol_type = other DNA
tccgcatgttcaacctgaaaacgccaggccgtgaagataaagaagacgaaattgttactgaagaagccaacagca

SEQ ID NO: 348783 - DNA, 75 bp, synthetic construct
  source 1..75: mol_type = other DNA
attgttactgaagaagccaacagcaataccgaagaaggtctgactcaactggccaccaactatattgctgcagtg

SEQ ID NO: 348784 - DNA, 75 bp, synthetic construct
  source 1..75: mol_type = other DNA
cgacactgttctggatggccgtgacgtcactaaaaccaacaccaccaacgtagcgaccttcaagtctgttaacta

SEQ ID NO: 348785 - DNA, 75 bp, synthetic construct
  source 1..75: mol_type = other DNA
tgctgcattcgaaccacttaagcctgtgttccagtggattggcgacaaagtacaggcgctgtggggctggtttac

SEQ ID NO: 348786 - DNA, 75 bp, synthetic construct
  source 1..75: mol_type = other DNA
acgaaggatgcgatgggaaccatccagcgcgtgctggagaaggtgaacgcgctgccgcaggacaagcgcctgtct

SEQ ID NO: 348787 - DNA, 75 bp, synthetic construct
  source 1..75: mol_type = other DNA
ccggaatgatgggcgttgctgccgcgcctgcagagcttctaccgttgcaccctttggcacttcccgcgaaaggcg

SEQ ID NO: 348788 - DNA, 75 bp, synthetic construct
  source 1..75: mol_type = other DNA
ccgctgatggaaatcatggaagcggtaaggcgcgtgacgggagtaatgcgccgctgggtggaagctaatccggaa

SEQ ID NO: 348789 - DNA, 75 bp, synthetic construct
  source 1..75: mol_type = other DNA
tggcgggcgtagcgctggttgtctggaaatactggcaacctatcaccgcatttctcggtggtgtggtggaaggat

SEQ ID NO: 348790 - DNA, 75 bp, synthetic construct
  source 1..75: mol_type = other DNA
gaggcaccgacgcagatcatcatccagacgcagccaggacaaagtgcgcaggatattgcgcgggaggtggcacgc

SEQ ID NO: 348791 - DNA, 75 bp, synthetic construct
  source 1..75: mol_type = other DNA
ggtattaacgatgatgtcaacacaaccggagaaaaacatcctcctgttattcgcctttggcggcgtaatcatttt

SEQ ID NO: 348792 - DNA, 75 bp, synthetic construct
  source 1..75: mol_type = other DNA
gattatgattttgaacaactccagtcactggctgaccgtcgactttatctcgctaaacaggccgggcgtaatcgg

SEQ ID NO: 348793 - DNA, 75 bp, synthetic construct
  source 1..75: mol_type = other DNA
tcgccacaaccgaaatcattaaagcaactgaagaaagtaacggccatcgtgtcagtctgccgttatcggttttcg

SEQ ID NO: 348794 - DNA, 75 bp, synthetic construct
  source 1..75: mol_type = other DNA
tcaaagcggcggcaggtcccatcagtgccgcattcgaaccacttaagcccgtgtttcagtggattggtgacaaag

SEQ ID NO: 348795 - DNA, 75 bp, synthetic construct
  source 1..75: mol_type = other DNA
gtgtggctgatcgtctggattatcgtaaagcggcggctctgggttccaccttcctgacattgggcgctgcgccag

SEQ ID NO: 348796 - DNA, 75 bp, synthetic construct
  source 1..75: mol_type = other DNA
gtgaagcaatggtgagtcgtgcagccactgtgccgcccgctcaacggattgaggaaccgacgcagatcatcattc

SEQ ID NO: 348797 - DNA, 75 bp, synthetic construct
  source 1..75: mol_type = other DNA
ttcaggcgacattgaagcaagacgggaatagtacgataaaagctggcgacttcgaagccaccggcagattccaga

SEQ ID NO: 348798 - DNA, 75 bp, synthetic construct
  source 1..75: mol_type = other DNA
tatcgggcaaatgactgccgatatcgaagggctttgttttattcgtgacggcgaacctgtcacatttgactggaa

SEQ ID NO: 348799 - DNA, 75 bp, synthetic construct
  source 1..75: mol_type = other DNA
cctggctgacgctggcattaaccttaccggacgtagacgaagcgtggcttgagtccttcagcgacagtttgtttg

SEQ ID NO: 348800 - DNA, 75 bp, synthetic construct
  source 1..75: mol_type = other DNA
gtgttgttgatcacagccatcacctttatatcgactttgatctactcaatgttaaattaactaaccccacctgct

SEQ ID NO: 348801 - DNA, 75 bp, synthetic construct
  source 1..75: mol_type = other DNA
atagattctgggccatcggcggtgttgtacacgatcttacgattgaattttatactgataccgattttaacccta

SEQ ID NO: 348802 - DNA, 75 bp, synthetic construct
  source 1..75: mol_type = other DNA
gttcgcgttggtgatatagagacaaagctatcttcagggaagctgggtacagaaaataagcaactccttggtaac

SEQ ID NO: 348803 - DNA, 75 bp, synthetic construct
  source 1..75: mol_type = other DNA
tacgttagtgctgctcggcacgcaatttccctaccgcgcgttctacccgaccgatgccaaaattattcagattga

SEQ ID NO: 348804 - DNA, 75 bp, synthetic construct
  source 1..75: mol_type = other DNA
ggccaaaggtttcagcctgtatatgctgcgcgcaatcatcagcggacgcggcgatgaagtgatcgaactggcgaa

SEQ ID NO: 348805 - DNA, 75 bp, synthetic construct
  source 1..75: mol_type = other DNA
ctcgaacaggccaaaggtttcagcctgtatatgctgcgcgcaatcatcagcggacgcggcgatgaagtgatcgaa

SEQ ID NO: 348806 - DNA, 75 bp, synthetic construct
  source 1..75: mol_type = other DNA
atggcatgtggcgagttctccctgattgcccgttattttgaccgtgtaagaagttctcgtcttgatgtcgaactg

SEQ ID NO: 348807 - DNA, 75 bp, synthetic construct
  source 1..75: mol_type = other DNA
aaacgcaagcatttttaaagtgctgcattctgctcttattatctctttctagtatttctttcgcggctaacactg

SEQ ID NO: 348808 - DNA, 75 bp, synthetic construct
  source 1..75: mol_type = other DNA
atgaagccctgcaacgcgccttctctatcgacggtccggtgttggtggatgtggtggtcgccaaagaagaattag

SEQ ID NO: 348809 - DNA, 75 bp, synthetic construct
  source 1..75: mol_type = other DNA
ggcccaaccggggtgtcattaaaatgggcgcagttagattccgcttcaggtggaggtttcctttactgtaacagg

SEQ ID NO: 348810 - DNA, 75 bp, synthetic construct
  source 1..75: mol_type = other DNA
acccgacaacgaaccaacgggtaacattatccagaacagataattatctctactcattcaaaggatatggtgttg

SEQ ID NO: 348811 - DNA, 75 bp, synthetic construct
  source 1..75: mol_type = other DNA
tttttttagcactgtgctcttgttgttatacagcaagtgttggtgcagctaataacgtcagctatgttgttggga

SEQ ID NO: 348812 - DNA, 75 bp, synthetic construct
  source 1..75: mol_type = other DNA
gcacaaatggtactgaaaccaaatgatgcaacgtctatttataaagattatgaaacagaaaatgacactaccgga

SEQ ID NO: 348813 - DNA, 75 bp, synthetic construct
  source 1..75: mol_type = other DNA
acggtaccgacacgatggaagaaaccgcttacttcctggacctgacggtgaaatgtgacaaaccggtggtgatgg

SEQ ID NO: 348814 - DNA, 75 bp, synthetic construct
  source 1..75: mol_type = other DNA
acggtaccgacacgatggaagaaactgcttacttcctagacctgacggtgaaatgggacaaaccggtggtgatgg

SEQ ID NO: 348815 - DNA, 75 bp, synthetic construct
  source 1..75: mol_type = other DNA
acggtaccgacacgatggaagaaacagcttacttccttgacctgacggtgaaatgggacaaaccggtggtgatgg

SEQ ID NO: 348816 - DNA, 75 bp, synthetic construct
  source 1..75: mol_type = other DNA
aggcaacgttaaaacaagacggaaatatcgctatcgaatccggtgaattcaaagccaccagtaccttccaggtaa

SEQ ID NO: 348817 - DNA, 75 bp, synthetic construct
  source 1..75: mol_type = other DNA
gtatctcaaataccgtattagcggtaaagaatcccgcattgcgctgggtgcctatccagccatctccctgtctga

SEQ ID NO: 348818 - DNA, 75 bp, synthetic construct
  source 1..75: mol_type = other DNA
tcacagctatttccttaaaatagattttgacctggataatatgacgttatccaacccaacgtgttttactgctgc

SEQ ID NO: 348819 - DNA, 75 bp, synthetic construct
  source 1..75: mol_type = other DNA
tttttttagcactatgctcttgttgttatacagcaatcgccggcatcaatgatgacgtcggctatattgttggga

SEQ ID NO: 348820 - DNA, 75 bp, synthetic construct
  source 1..75: mol_type = other DNA
aaataaaaaatggcgcaacagcggttccttttgatatcacgctacagaactgtattcgtgttcgcaatatagaaa

SEQ ID NO: 348821 - DNA, 75 bp, synthetic construct
  source 1..75: mol_type = other DNA
agtcctggtacaaaagttgtagatcacagcaaccacatttatgtcaatgaaccgccccgggaatcctggagacta

SEQ ID NO: 348822 - DNA, 75 bp, synthetic construct
  source 1..75: mol_type = other DNA
caaagcggtagacggtgaaatgatcacagttaccgtcgaaggtaaagatgaagtgttcgcgctgagtaatatcca

SEQ ID NO: 348823 - DNA, 75 bp, synthetic construct
  source 1..75: mol_type = other DNA
taatccccgccacgcgcgaagctattgaaggcgtgcgttactctggtcgtggtgccaaaatgcgcaggcctcata

SEQ ID NO: 348824 - DNA, 75 bp, synthetic construct
  source 1..75: mol_type = other DNA
cgatgtcagtttcagaactgaaaccccgtcacttcatcactttattaaaaggaattgaggaaaagggtctactgg

SEQ ID NO: 348825 - DNA, 75 bp, synthetic construct
  source 1..75: mol_type = other DNA
agacaacgcgccacggccatagcaaaaattcgccgggcgcttaacgagtatgagaggctactgaacaagacgcat

SEQ ID NO: 348826 - DNA, 75 bp, synthetic construct
  source 1..75: mol_type = other DNA
caaaggacgcagtagaacgccagatgagtcatcaggagcgtaataccgtgcgcatggcttatattcataaggcag

SEQ ID NO: 348827 - DNA, 75 bp, synthetic construct
  source 1..75: mol_type = other DNA
ctggcacttggggtttatcctgaaatcacactagcggatgccagagtacgtcgtgacgaggcgcgtaacctgctt

SEQ ID NO: 348828 - DNA, 75 bp, synthetic construct
  source 1..75: mol_type = other DNA
acctggatggtctgaacatccactgcgccattattgatgagctgcatgcacataaaacccgcgacgtgtgggacg

SEQ ID NO: 348829 - DNA, 75 bp, synthetic construct
  source 1..75: mol_type = other DNA
atgatgaacttggcaaaggatatgattatgcgtattaaacctcaagattttaagtttgatgtgttgactgttgct

SEQ ID NO: 348830 - DNA, 75 bp, synthetic construct
  source 1..75: mol_type = other DNA
acataccaagcatgtatcattgatgctgaacaagaatgtattggtatactagttcaactgtctgaaaaaacttga

SEQ ID NO: 348831 - DNA, 75 bp, synthetic construct
  source 1..75: mol_type = other DNA
gtgagtctaccaacagagcgatggctagatctgctagatccgaagctcgaagaagaacgatccgagataacagag

SEQ ID NO: 348832 - DNA, 75 bp, synthetic construct
  source 1..75: mol_type = other DNA
gcagggtatgtccacaggaccgtctttgtgaaggcgcatgtactttgaaagatcactctggcgcagtctctatcg

SEQ ID NO: 348833 - DNA, 75 bp, synthetic construct
  source 1..75: mol_type = other DNA
gcggacttccatccgccttaatgccgccagcgtgacctgtgcgtatcgtcgtgatgaagtcagtatgccgggctc

SEQ ID NO: 348834 - DNA, 75 bp, synthetic construct
  source 1..75: mol_type = other DNA
cactgttgtatgggcttatcggcacttgccttatgaacgacattgatccggaagcgtatctgcaccatatcctca

SEQ ID NO: 348835 - DNA, 75 bp, synthetic construct
  source 1..75: mol_type = other DNA
ttcgagcgaatccgtatgccactggaacgggcaattcgcgatgccaaacttaatattagccaattagaccaggtt

SEQ ID NO: 348836 - DNA, 75 bp, synthetic construct
  source 1..75: mol_type = other DNA
gccgctcgcgaccggcaattgctctttccacaaaattgtgcggcgaattttaaacgcatgatgggtacgtcaaag

SEQ ID NO: 348837 - DNA, 75 bp, synthetic construct
  source 1..75: mol_type = other DNA
tggcaggcttaaacgtcgaacgtttaattaacgaaccaaccgccgctgcactggcgtatggtttgcataataaag

SEQ ID NO: 348838 - DNA, 75 bp, synthetic construct
  source 1..75: mol_type = other DNA
cagagatgattactgcgccagttgaggccctgggttttgaactggttggcatcgaatttattcgcggtcgcacat

SEQ ID NO: 348839 - DNA, 75 bp, synthetic construct
  source 1..75: mol_type = other DNA
acgttacgacggtggttttccatgtgggcgtatcgttgaagtcttcgggccaccaagcgcggggaaatgtgttac

SEQ ID NO: 348840 - DNA, 75 bp, synthetic construct
  source 1..75: mol_type = other DNA
ttcaagcgtattaagctggcatcaggcggttacatcgaggctacgttccgtcacccaattcgtgtggttgacgac

SEQ ID NO: 348841 - DNA, 75 bp, synthetic construct
  source 1..75: mol_type = other DNA
tattagaagccaatttggcgctgccaaaacataacctggtcacgctcacctggggcaacgtcagcgccgttgatc

SEQ ID NO: 348842 - DNA, 75 bp, synthetic construct
  source 1..75: mol_type = other DNA
aaaacacaacctggtcacgctgacctggggcaacgtcagcgccgttgatcgcgagcgcggcgtctttgtgatcaa

SEQ ID NO: 348843 - DNA, 75 bp, synthetic construct
  source 1..75: mol_type = other DNA
ggtccattctcacggcccgtttgcatggggtaaaaacgccgaagacgcagtgcataacgccatcgtgctggaaga

SEQ ID NO: 348844 - DNA, 75 bp, synthetic construct
  source 1..75: mol_type = other DNA
ctcacgggccgaaaacacctgatatgaaaggcagtgccaccacgccacaggttgccgacgcgatttgcaaaatta

SEQ ID NO: 348845 - DNA, 75 bp, synthetic construct
  source 1..75: mol_type = other DNA
cggacgactggcatgagcaacttagccgtttcgacgccatctattttggtgccgtcggctggccggacaccgttc

SEQ ID NO: 348846 - DNA, 75 bp, synthetic construct
  source 1..75: mol_type = other DNA
atgatgaaaacgatgcgtattgctgcgatcccgggagacgggattggcaaagaagtccttcctgaagggattcgc

SEQ ID NO: 348847 - DNA, 75 bp, synthetic construct
  source 1..75: mol_type = other DNA
acaatggtgggccgattttctggatgcaaacagagaaaaatttatcagtccatttgaatatgcaaaaattaacaa

SEQ ID NO: 348848 - DNA, 75 bp, synthetic construct
  source 1..75: mol_type = other DNA
cgctgaactgcgcaatcattccgcattccgacggggatggctggctggtgacagcccttgtgacaggatcggcga

SEQ ID NO: 348849 - DNA, 75 bp, synthetic construct
  source 1..75: mol_type = other DNA
acctggaagaacgccgactgatgctacagtggtgggcggattttctggatgcaaatcgagaagagcacatcagcc

SEQ ID NO: 348850 - DNA, 75 bp, synthetic construct
  source 1..75: mol_type = other DNA
gccatcatgcgctatgcagtacaaagtgggttaattgattataacccggcacaagagatggctggggcggttgct

SEQ ID NO: 348851 - DNA, 75 bp, synthetic construct
  source 1..75: mol_type = other DNA
attaaaaaagttgatgccagtggtaaacacgacgtcgctcagcgcctacaacagcgcgtcacggccattatgcgg

SEQ ID NO: 348852 - DNA, 75 bp, synthetic construct
  source 1..75: mol_type = other DNA
gggcgtaaaattctcgcaccggggctctaagatgcgaacaccgcatcttgttcctctcagcaaacaggctgtagc

SEQ ID NO: 348853 - DNA, 75 bp, synthetic construct
  source 1..75: mol_type = other DNA
cgattttctggatgcaaacagagaaagatttatcagtccatttgaatatgcaaagattaataatccattaaaaca

SEQ ID NO: 348854 - DNA, 75 bp, synthetic construct
  source 1..75: mol_type = other DNA
ctggcagttatgctgaatttactggtttttattcgttccagtgaactcagatacgcccgttggtctgaaattgat

SEQ ID NO: 348855 - DNA, 75 bp, synthetic construct
  source 1..75: mol_type = other DNA
ctcgctgttatgctgaatttactggtttttattcgttccagtgaactcagatatgcccgttggtctgaaattgat

SEQ ID NO: 348856 - DNA, 75 bp, synthetic construct
  source 1..75: mol_type = other DNA
gtattccggcgtatggtctgcagataaatattatgaccttgcccgcctgcctgtaagggttggtgataagttaac

SEQ ID NO: 348857 - DNA, 75 bp, synthetic construct
  source 1..75: mol_type = other DNA
cccggagctgcttatccctgttcgtgctgcagaagctaaacaaatttatgaaatcgccagtcgtctgcagcaaag

SEQ ID NO: 348858 - DNA, 75 bp, synthetic construct
  source 1..75: mol_type = other DNA
aatcagtgaaaatactgtaaataaagccctgagggtgatggggtatgacacaatgaaccgccccgggtttcctgg

SEQ ID NO: 348859 - DNA, 75 bp, synthetic construct
  source 1..75: mol_type = other DNA
acagtggtgggcagattttctggatgcgaacagagaacaatgtatcagcccgtttgaatatgcaaagggtgatgc

SEQ ID NO: 348860 - DNA, 75 bp, synthetic construct
  source 1..75: mol_type = other DNA
cgcttgatgctacaatggtgggccgattttctggatgcaaacagagaaagatttatcagtccatttgaatatgca

SEQ ID NO: 348861 - DNA, 75 bp, synthetic construct
  source 1..75: mol_type = other DNA
gatgttgcaatggtgggccgattttctggatgcgaaccgggagaagggtatcagtccgtttgaatatgcaaagat

SEQ ID NO: 348862 - DNA, 75 bp, synthetic construct
  source 1..75: mol_type = other DNA
aaattctcacaccggggctccaagatgcgaacaccacatcttgtgccactcagcaaacaggctgtagccatactg

SEQ ID NO: 348863 - DNA, 75 bp, synthetic construct
  source 1..75: mol_type = other DNA
tttctctctccgaagctcgtacaaaacgggcccgaaaactgatttcagaggggattgacccttgcgaacagaaaa

SEQ ID NO: 348864 - DNA, 75 bp, synthetic construct
  source 1..75: mol_type = other DNA
tcgactgatgctacagtggtgggcagattttctggatgcgaacagagataagggtatcagcccgtttgaatatgc

SEQ ID NO: 348865 - DNA, 75 bp, synthetic construct
  source 1..75: mol_type = other DNA
attgaccacggtaaaacgccagcatcgccctgctctgaatctttcacgcctgcctgaacttctgtcgcgtattga

SEQ ID NO: 348866 - DNA, 75 bp, synthetic construct
  source 1..75: mol_type = other DNA
gtgggcagattttctggatgcaaacagggaggagtgtatcagtccgtttgaatatgcaaaagttaacaatccact

SEQ ID NO: 348867 - DNA, 75 bp, synthetic construct
  source 1..75: mol_type = other DNA
tgggccgattttctggatgcgaaccgggagaagggtatcagtccgtttgaatatgcaaagattaacaatccatta

SEQ ID NO: 348868 - DNA, 75 bp, synthetic construct
  source 1..75: mol_type = other DNA
ttttattatttatacttgctataagtagtaatgttcgtttcataccatggttgtttataggttatttttgtgtgg

SEQ ID NO: 348869 - DNA, 75 bp, synthetic construct
  source 1..75: mol_type = other DNA
aatcaggtttgtggtcccgcgatgctgtggaacgccagatgagccatcaggagcgtaatggtgtacgtgctgcgt

SEQ ID NO: 348870 - DNA, 75 bp, synthetic construct
  source 1..75: mol_type = other DNA
aatattccgttgctggcccctacgacatcatcatacccgacacacggtttgaaggggtgctcagcatccggtgga

SEQ ID NO: 348871 - DNA, 75 bp, synthetic construct
  source 1..75: mol_type = other DNA
accccggacctgcttatccctgttcgtgctgcagaagctaaacaaatttatgaaatcgccagtcgtctgcagcaa

SEQ ID NO: 348872 - DNA, 75 bp, synthetic construct
  source 1..75: mol_type = other DNA
ctcgcagttatgctgaatttactggtttttattcgttccagtgaactcagataggcccgttggtctgaaattgat

SEQ ID NO: 348873 - DNA, 75 bp, synthetic construct
  source 1..75: mol_type = other DNA
aatactacacgtttagcccgttgttaataaagcaaaaccatctcattttcctgctaccaccctttttttatcctt

SEQ ID NO: 348874 - DNA, 75 bp, synthetic construct
  source 1..75: mol_type = other DNA
ttatctgtctgtacggcagtgaacatggtgggcgggtggagtatgttacctgtgaatttctaagctgcctgtacg

SEQ ID NO: 348875 - DNA, 75 bp, synthetic construct
  source 1..75: mol_type = other DNA
cgtttagcccgttgttaataaagcaaaaccatctcaatctcctgctgccacccttttttatccttacctacccgc

SEQ ID NO: 348876 - DNA, 75 bp, synthetic construct
  source 1..75: mol_type = other DNA
aagagtttggaaaagatatatatattgttgcaaatgggcattcggcaaatacatctgaaatagctgataagttaa

SEQ ID NO: 348877 - DNA, 75 bp, synthetic construct
  source 1..75: mol_type = other DNA
gctgcctgtacggcagtgaacgcgttcgcaaaggttttaccgcaccccgtcgatttctaagctgcctgtacggca

SEQ ID NO: 348878 - DNA, 75 bp, synthetic construct
  source 1..75: mol_type = other DNA
gcagggcgagcgaagcgagtcaatcccccctcaccgccatatttaaagaaaagctcgtacgaaagtacgagtttt

SEQ ID NO: 348879 - DNA, 75 bp, synthetic construct
  source 1..75: mol_type = other DNA
ccctgcctatgcgctatgccgattttccaacgctggttgatgctttggattatgccgctctgggtagcgccggaa

SEQ ID NO: 348880 - DNA, 75 bp, synthetic construct
  source 1..75: mol_type = other DNA
acgggctggcagagaacgcgcttgccgtcagtttttctgacgaaacctccggcgttgtagttaacgaagtggatc

SEQ ID NO: 348881 - DNA, 75 bp, synthetic construct
  source 1..75: mol_type = other DNA
gacgataaaactttcatgccatgctacgggctggcagagaacgcgcttgccgtcagtttttctgacgaaacctcc

SEQ ID NO: 348882 - DNA, 75 bp, synthetic construct
  source 1..75: mol_type = other DNA
gcggcggccggttctgcgacttcagcagccggatcagcaactgctgcggctaacagccagaaagctgcgaagacg

SEQ ID NO: 348883 - DNA, 75 bp, synthetic construct
  source 1..75: mol_type = other DNA
taacaggacaacccgcaggtttattgctggatttaagtttacagagcagaaagaattgcgtgctgttataaacgg

SEQ ID NO: 348884 - DNA, 75 bp, synthetic construct
  source 1..75: mol_type = other DNA
cattactcatcgcgaagtaatggcaaatctacgtgccatcagtcatgacggcattaaattacgtccgggcgatcg

SEQ ID NO: 348885 - DNA, 75 bp, synthetic construct
  source 1..75: mol_type = other DNA
cagataaaaaatattagagaagcatataaacagctaaaacagcataatatcggacttttcaattgctcaaaaaat

SEQ ID NO: 348886 - DNA, 75 bp, synthetic construct
  source 1..75: mol_type = other DNA
gcattgaccacggtaaaacgccagcatcgccccgctcttgatctttcgcgcctgcctgaacttctgtcgcgtatt

SEQ ID NO: 348887 - DNA, 75 bp, synthetic construct
  source 1..75: mol_type = other DNA
gcattgaccacggtaaaacgccagcatcgccccgctcttgatctttcccgcctgcctgaacttgtgtcgcgtatt

SEQ ID NO: 348888 - DNA, 75 bp, synthetic construct
  source 1..75: mol_type = other DNA
ctttcggttcctgccggaagccgctattcgttacttgatcaattacgtaccggacctactaaagtgaatgccaca

SEQ ID NO: 348889 - DNA, 75 bp, synthetic construct
  source 1..75: mol_type = other DNA
ctagcggttatgctgaatttactggtttttattcgttccagtgaactcagatacgcccgttggtctgaaattgat

SEQ ID NO: 348890 - DNA, 75 bp, synthetic construct
  source 1..75: mol_type = other DNA
ctagccgttatgctgaatttactggtttttattcgttccagtgaactcagataggcccgttggtctgaaattgat

SEQ ID NO: 348891 - DNA, 75 bp, synthetic construct
  source 1..75: mol_type = other DNA
gcattgaccacggtaaaacgccagcatcgcccggctcttgatctttcccgcctgcctgaacttctgtcgcgtatt

SEQ ID NO: 348892 - DNA, 75 bp, synthetic construct
  source 1..75: mol_type = other DNA
tgcagccccaccatttaccgaaatagcgagtctggaaagggctagccgggcaattgaagaagatcctgataataa

SEQ ID NO: 348893 - DNA, 75 bp, synthetic construct
  source 1..75: mol_type = other DNA
gcggattggttatttacacagtcgccgcactcggacgcgtgagatatttgagtttgagtacgataaaaaggcgct

SEQ ID NO: 348894 - DNA, 75 bp, synthetic construct
  source 1..75: mol_type = other DNA
tacagtggtgggccgattttctggatgcaaacagagaaagatttatcagtccatttgaatatgcaaagattaata

SEQ ID NO: 348895 - DNA, 75 bp, synthetic construct
  source 1..75: mol_type = other DNA
tagctatactggtaggccgctaacccgatgggcgacagaacttactttgctgatctttattcggtccagtgagct

SEQ ID NO: 348896 - DNA, 75 bp, synthetic construct
  source 1..75: mol_type = other DNA
gagtaaagcacggacctttaaagaagtcgcgatcgagtggtatggcaccaataaaaagtggtcagaagatcatgc

SEQ ID NO: 348897 - DNA, 75 bp, synthetic construct
  source 1..75: mol_type = other DNA
taataccgatgaccatttacgtaatcatggatatatcttgataccgggaaaaggttggcggctttctgaggcata

SEQ ID NO: 348898 - DNA, 75 bp, synthetic construct
  source 1..75: mol_type = other DNA
ccggtcgtagcagtaatgatcaccggtattctgctgaatgttctttactggcttggcctgttcgttccggcttaa

SEQ ID NO: 348899 - DNA, 75 bp, synthetic construct
  source 1..75: mol_type = other DNA
gctcgccggtggtttctgcttttgcgctgttcccgctggtggcgattttctaccagtttggctggaagcaaagcc

SEQ ID NO: 348900 - DNA, 75 bp, synthetic construct
  source 1..75: mol_type = other DNA
cctttgtttatgcggtgggctatctctcgccgaatccgatggttgcagcggtattaggtgcagtggttatttcgg

SEQ ID NO: 348901 - DNA, 75 bp, synthetic construct
  source 1..75: mol_type = other DNA
attttcgcggcgattaaaatggcgggttataccggattctctattgccgtggcgatttatttcctcaatgaatcg

SEQ ID NO: 348902 - DNA, 75 bp, synthetic construct
  source 1..75: mol_type = other DNA
agcgaagtgaccatctttaccctcgagaaagcgtattccgctggggtgacgcctgaagagtcacagacgcttatc

SEQ ID NO: 348903 - DNA, 75 bp, synthetic construct
  source 1..75: mol_type = other DNA
atgttgggcagtttaggggaattgagttcgccagtggtttctgcgtttgcgctctttccgttggtcgcaattttt

SEQ ID NO: 348904 - DNA, 75 bp, synthetic construct
  source 1..75: mol_type = other DNA
tggcgttcatggaattggtgtggcgaaattcgcccagttaaaggggattgccgaactggcgcggcgttactacaa

SEQ ID NO: 348905 - DNA, 75 bp, synthetic construct
  source 1..75: mol_type = other DNA
ggcgactgatgttgcaatggtgggccgattttctggatgcgaaccgggagaagggtatcagtccgtttgaatatg

SEQ ID NO: 348906 - DNA, 75 bp, synthetic construct
  source 1..75: mol_type = other DNA
ggagaaaaccctggcacttggtgtgtatccggaagtttctctctccgaagctcgtacaaaacgggatgaggcccg

SEQ ID NO: 348907 - DNA, 75 bp, synthetic construct
  source 1..75: mol_type = other DNA
aactcacgacctgcgtcatcgtgatgaaaatgacattgatgccagcgggctttcggtgtttgaagaacgcacgtc

SEQ ID NO: 348908 - DNA, 75 bp, synthetic construct
  source 1..75: mol_type = other DNA
aacgcatggttactctttcttcctaccgatatcctcggcgtcctggcgataaacagcctgatggcgtttggtctt

SEQ ID NO: 348909 - DNA, 75 bp, synthetic construct
  source 1..75: mol_type = other DNA
aaccctggcaaaagagatgctggagaatttcggctctctttacggcttgttaacctctgaatatgaacaatttag

SEQ ID NO: 348910 - DNA, 75 bp, synthetic construct
  source 1..75: mol_type = other DNA
tcgaaatctttattggcatggtgatgctgctggggatcgcaataactcatgacctgcgtcatcgtgatgaaaatg

SEQ ID NO: 348911 - DNA, 75 bp, synthetic construct
  source 1..75: mol_type = other DNA
ggctaaacaaaatgctttcattatttccagttcaaaagtaattgaagatgatgagaaagaccctccggcctatcg

SEQ ID NO: 348912 - DNA, 75 bp, synthetic construct
  source 1..75: mol_type = other DNA
aacaaaacgaaattgttgccgttgagcatattcctacagaaaatattgcagaagccgtggagttagtgtacgaca

SEQ ID NO: 348913 - DNA, 75 bp, synthetic construct
  source 1..75: mol_type = other DNA
atatcgctacaggatcagagcgaatcatgagttttattcgcttgagccatctgttcagttactgagaggacgtgg

SEQ ID NO: 348914 - DNA, 75 bp, synthetic construct
  source 1..75: mol_type = other DNA
tgtggattgttccatggtgcgacgccaatgcaggaacgagaaggtcttatccacgcttggcgtaacgatgggctg

SEQ ID NO: 348915 - DNA, 75 bp, synthetic construct
  source 1..75: mol_type = other DNA
taaaatttttataaatgagatatggtcaagcccgattgtatttaggcgacaccatgcacaaaaccatccattatg

SEQ ID NO: 348916 - DNA, 75 bp, synthetic construct
  source 1..75: mol_type = other DNA
cgagatagcgaagggcgtcttttcgtcaatctttttatttggacgcatcctgattcagatcattgtgatggagta

SEQ ID NO: 348917 - DNA, 75 bp, synthetic construct
  source 1..75: mol_type = other DNA
ttatttctttctcatggtatgcgaatgctacggattttgtttatagagtggattctcgcccgccagaggaaatat

SEQ ID NO: 348918 - DNA, 75 bp, synthetic construct
  source 1..75: mol_type = other DNA
ccaggaacctgttaaaagttagtacaaccaagaaccctgctaaaataaaagaggccgcattgcttcatattcgcg

SEQ ID NO: 348919 - DNA, 75 bp, synthetic construct
  source 1..75: mol_type = other DNA
ccggtcgtggcagtaatgatcaccggcatcctgctgaatgttctttactggcttggcctgttcgttccggcttaa

SEQ ID NO: 348920 - DNA, 75 bp, synthetic construct
  source 1..75: mol_type = other DNA
tgagaatattgttgaggctgtggagttgacttatgacagattcaacagtcaagtatctgatggacccggaaccac

SEQ ID NO: 348921 - DNA, 75 bp, synthetic construct
  source 1..75: mol_type = other DNA
ttaagaggggactcatgtgcggcaggaagtagggatagtgcatttattgcgaccacaaccagtttaattgaaaca

SEQ ID NO: 348922 - DNA, 75 bp, synthetic construct
  source 1..75: mol_type = other DNA
tttaaataaaagagctacttattatgaacccgagttttatgatgcaagaggtgtgttaaaagaaattataaaatg

SEQ ID NO: 348923 - DNA, 75 bp, synthetic construct
  source 1..75: mol_type = other DNA
cttgccgttatgctgaatttactggtttttattcgttccagtgaactcagataagcccgatggtctgaaattgat

SEQ ID NO: 348924 - DNA, 75 bp, synthetic construct
  source 1..75: mol_type = other DNA
cgttatgctgaatttactggtttttattcgttccagtgaactcagatacgcccgctggtctgaaattgatattga

SEQ ID NO: 348925 - DNA, 75 bp, synthetic construct
  source 1..75: mol_type = other DNA
tcgtattctgggtaaggagaagactctggcacttggtgtgtatccagaagtttctctctccgaagctcgtacaaa

SEQ ID NO: 348926 - DNA, 75 bp, synthetic construct
  source 1..75: mol_type = other DNA
gctttatctgacggttagcatcggcgtcggtagtggggatgcttcataccgcacactaaccgatgacttcaataa

SEQ ID NO: 348927 - DNA, 75 bp, synthetic construct
  source 1..75: mol_type = other DNA
cagttataaaggtcagcctgttacccgacttgctgttatgctgaatttactggtttttattcgctccagtgaact

SEQ ID NO: 348928 - DNA, 75 bp, synthetic construct
  source 1..75: mol_type = other DNA
gctgcagaagcaaaacaaatttatgaaatcgccagtcgtctgcagcaaagaatatctgctgtaatgcgttatgcc

SEQ ID NO: 348929 - DNA, 75 bp, synthetic construct
  source 1..75: mol_type = other DNA
tttctctctccgaagttcgtgcaaaacgggatgaggcccgaaaactaatttcggcggggattgacccttgcgaac

SEQ ID NO: 348930 - DNA, 75 bp, synthetic construct
  source 1..75: mol_type = other DNA
cggttgttatcgctgaacctgaaaaaaggcgatcgcgtggcactgattgccgaaacaagtagcgagttcgtagag

SEQ ID NO: 348931 - DNA, 75 bp, synthetic construct
  source 1..75: mol_type = other DNA
atggtctgatctttacgggagcacatgacccacgtaaaccaatcagtgaaaacaccgtaaataaagccctgaggg

SEQ ID NO: 348932 - DNA, 75 bp, synthetic construct
  source 1..75: mol_type = other DNA
cacatggagcgaaattcagtgagggccgcgtatatccataaagcagagcatctggaagaacgccgcttgatgcta

SEQ ID NO: 348933 - DNA, 75 bp, synthetic construct
  source 1..75: mol_type = other DNA
ttacggttatttaattattgtctgattgccgctttattatgtgccatcgtcggggcgattggttcggtcagtatt

SEQ ID NO: 348934 - DNA, 75 bp, synthetic construct
  source 1..75: mol_type = other DNA
taaaaatattaatgacaactatggtcacgaatgtggcgataaagttttaagtgtatttgcgcagcatatacaaaa

SEQ ID NO: 348935 - DNA, 75 bp, synthetic construct
  source 1..75: mol_type = other DNA
tgtcaccggacgcattaaagatctgattattattcgtggccgtaatatctggccgcaggatattgaatatattgc

SEQ ID NO: 348936 - DNA, 75 bp, synthetic construct
  source 1..75: mol_type = other DNA
atattccagccgaacgcgaacctctgcccggcgtaaaattctcacaccggggctccaagatgcgaacaccacatc

SEQ ID NO: 348937 - DNA, 75 bp, synthetic construct
  source 1..75: mol_type = other DNA
gaccacggtaaaacgccagcatcgccctgctctggatctttcacgcctgcctgaacttctgtcgcgtattgacgg

SEQ ID NO: 348938 - DNA, 75 bp, synthetic construct
  source 1..75: mol_type = other DNA
gctgcagaagctaaacaaatttatgaaatcgccagtcgtctgcagcaaagaatatctgaaccgccccgggtttcc

SEQ ID NO: 348939 - DNA, 75 bp, synthetic construct
  source 1..75: mol_type = other DNA
cccggacctgcttatccctgttcgtgctgcagaagcaaaacaaatttatgaaatcgctagtcgtctgcagcaaag

SEQ ID NO: 348940 - DNA, 75 bp, synthetic construct
  source 1..75: mol_type = other DNA
ctagctgttatgctgaatttactggtttttattcgttccagtgaactcagataagcccggtggtctgaaattgat

SEQ ID NO: 348941 - DNA, 75 bp, synthetic construct
  source 1..75: mol_type = other DNA
gcattgaccacggtaaaacgccagcatcgccctgctctggatctttcccgcctgcctgaacttatgtcgcgtatt

SEQ ID NO: 348942 - DNA, 75 bp, synthetic construct
  source 1..75: mol_type = other DNA
gcattgaccacggtaaaacgccagcatcgccctgctctagatctttcgcgcctgcctgaacttgtgtcgcgtatt

SEQ ID NO: 348943 - DNA, 75 bp, synthetic construct
  source 1..75: mol_type = other DNA
gtaatggtgtacgtgctgcgtatatccataaagcagaacatctggaagaacgtcgactgatgctacagtggtggg

SEQ ID NO: 348944 - DNA, 75 bp, synthetic construct
  source 1..75: mol_type = other DNA
cccgcgatgctgtggaacgtcagatgagccatcaggagcgtaatggtgtacgtgctgcgtatatccataaagcag

SEQ ID NO: 348945 - DNA, 75 bp, synthetic construct
  source 1..75: mol_type = other DNA
gatggggcatgacacaacccaggaagtctgtggccatggattccgggcgatggcgtgcagtgcattgattgaatc

SEQ ID NO: 348946 - DNA, 75 bp, synthetic construct
  source 1..75: mol_type = other DNA
cgattttctgaatgcaaacagagaaagatttatcagtccatttgaatatgcaaagattaataatccgttaaaaca

SEQ ID NO: 348947 - DNA, 75 bp, synthetic construct
  source 1..75: mol_type = other DNA
caccgtaaataaagccctcagagttatggggtatgacacaacccaggatatctgtgggcatggattcaggacgat

SEQ ID NO: 348948 - DNA, 75 bp, synthetic construct
  source 1..75: mol_type = other DNA
gagctttcacgcctgcctgaacttctgtcgcgtattgacggttataaaggccagcctgtcacccgactggcagtt

SEQ ID NO: 348949 - DNA, 75 bp, synthetic construct
  source 1..75: mol_type = other DNA
atccgcgtcactggggaacctggcagcggatgctttgctggcagcagcaggtaaagacacacaattagcgttaac

SEQ ID NO: 348950 - DNA, 75 bp, synthetic construct
  source 1..75: mol_type = other DNA
atccagtatggggagtactgatgtacgtcgtgcgctggataaagatattcagactgcaggacaggtaaaaggatt

SEQ ID NO: 348951 - DNA, 75 bp, synthetic construct
  source 1..75: mol_type = other DNA
ggtgactattttaccgggccgtatatcagcagcctgactaaaggcaaggcgattatcgatattatgaataccatg

SEQ ID NO: 348952 - DNA, 75 bp, synthetic construct
  source 1..75: mol_type = other DNA
gctggtcagaacctgaaattcaacgttgaagttgtggcgattcgcgaagcgaccgaagaagaactggctcatggt

SEQ ID NO: 348953 - DNA, 75 bp, synthetic construct
  source 1..75: mol_type = other DNA
aaaaatttcttggaacacaatacatttttcagtattaccggtatagatgagtctctctatgaaaagtatataatc

SEQ ID NO: 348954 - DNA, 75 bp, synthetic construct
  source 1..75: mol_type = other DNA
attgaagatgcgacggtttaccacattgctactcagagtttccttgctgatggtggagatggttttaccgcgttt

SEQ ID NO: 348955 - DNA, 75 bp, synthetic construct
  source 1..75: mol_type = other DNA
tttcgatctgtctgaagatgcctcaaccgaaaccgctatggtcttcggtgaactgtatcgtcatggcgctgagtg

SEQ ID NO: 348956 - DNA, 75 bp, synthetic construct
  source 1..75: mol_type = other DNA
cgcttccgtattcgcagtaggtgaagacggtaaagtgctgtcagatgcccatttcattttcttcaataacaaaac

SEQ ID NO: 348957 - DNA, 75 bp, synthetic construct
  source 1..75: mol_type = other DNA
tggttatcaggagtggtgatcagcccgttgatatggattatgcgctggaaacgttaggcggagcatcggaagtta

SEQ ID NO: 348958 - DNA, 75 bp, synthetic construct
  source 1..75: mol_type = other DNA
aagttggagtcattaccgccctataccatcattgaaaaagacggcgtgaaaattggcgtgattggtttgcacggt

SEQ ID NO: 348959 - DNA, 75 bp, synthetic construct
  source 1..75: mol_type = other DNA
ggcggctgggcaaatatcactacgctggttaagcaagaaaaagcaaaaaataaagcgacatggttttttgatgcg

SEQ ID NO: 348960 - DNA, 75 bp, synthetic construct
  source 1..75: mol_type = other DNA
ttgaaatgctggatcgtaactgagccacgcgccgcttcaggcattcgccttgcgagtttggtgagtacatcgcgt

SEQ ID NO: 348961 - DNA, 75 bp, synthetic construct
  source 1..75: mol_type = other DNA
acggcgcaagtttaagtaatggcgttttacaggtatcgaaaggcctggaaatgaagtacgacagcagcaagccgg

SEQ ID NO: 348962 - DNA, 75 bp, synthetic construct
  source 1..75: mol_type = other DNA
ctgcaactcgttaccacagcggtgagcgtcagttatttacgttatgccgcgcaaggatatttcgcctcgccctcc

SEQ ID NO: 348963 - DNA, 75 bp, synthetic construct
  source 1..75: mol_type = other DNA
tgatgcagcaggaattaaccatatcgcagggatacttaccccacaaaatgtaaaagccattagcagatattcctc

SEQ ID NO: 348964 - DNA, 75 bp, synthetic construct
  source 1..75: mol_type = other DNA
tatccatggtcatctgatgatggcttttcggtaattgattatcaacaggtcgccagtgaagcgggggagtggtag

SEQ ID NO: 348965 - DNA, 75 bp, synthetic construct
  source 1..75: mol_type = other DNA
aatcggcatagtgaccaaagcagatctggctgccacggagcaaatttcttttgtcgccacctggctcacccaggc

SEQ ID NO: 348966 - DNA, 75 bp, synthetic construct
  source 1..75: mol_type = other DNA
cggaaagcggtgaactgttaacgctgcatcgtcagggtagtggtttcggccccggaggatgggtgcttcgccgcg

SEQ ID NO: 348967 - DNA, 75 bp, synthetic construct
  source 1..75: mol_type = other DNA
ccagccgtagcgcaccgaattatcgccagtcctggcggttagcgggagtgtggcggcgggcgattaacctgatga

SEQ ID NO: 348968 - DNA, 75 bp, synthetic construct
  source 1..75: mol_type = other DNA
gcccctgaatggcaaatgaaacaggaaatgctatcgccttcgtatacaacacaatggactgagatccccattgct

SEQ ID NO: 348969 - DNA, 75 bp, synthetic construct
  source 1..75: mol_type = other DNA
gtcgggaaaagggaaagtgtggtttgcggggcgaggaaccgcccctgaatggcaaatgaaacgggaaatgttgag

SEQ ID NO: 348970 - DNA, 75 bp, synthetic construct
  source 1..75: mol_type = other DNA
ttggcggtgttgtgggggctgtttctggatctatagctaaagggacgatagaaaagttagctgcatcccgcagtg

SEQ ID NO: 348971 - DNA, 75 bp, synthetic construct
  source 1..75: mol_type = other DNA
cattgcccacacaggacagccgggacattattgccgccgcatgcagagccttaaaccatgtctggcgtgaagggt

SEQ ID NO: 348972 - DNA, 75 bp, synthetic construct
  source 1..75: mol_type = other DNA
atgatctggcagcctgagttcacagataaaacactctccaggaaacccggggcggttcagtgggcaacaaagcaa

SEQ ID NO: 348973 - DNA, 75 bp, synthetic construct
  source 1..75: mol_type = other DNA
attcatccggaaaaacttcagcgtcattcttgagcgtacggtacgcgaactcaacggcgagtcctgcatatccct

SEQ ID NO: 348974 - DNA, 75 bp, synthetic construct
  source 1..75: mol_type = other DNA
tgataggaccgagcattaagaactccagcccggaagagatggtgtcggtataccatttctggacaattgtgctgg

SEQ ID NO: 348975 - DNA, 75 bp, synthetic construct
  source 1..75: mol_type = other DNA
ggaaagggtttatgaaccagtattctctgaacactctcatggattcagaccaaaacgttcgtgtgaaactgcgct

SEQ ID NO: 348976 - DNA, 75 bp, synthetic construct
  source 1..75: mol_type = other DNA
tgtgaaggctgtacatcgttcaagtctacaaaatctcagtgaagctgaaattgttctgactttcaacgcggaaat

SEQ ID NO: 348977 - DNA, 75 bp, synthetic construct
  source 1..75: mol_type = other DNA
gcgtcgattaggggcaaggatctgcgagtattgtgcgaagactgggcgctgcgaagtacatcatgtcagaaagct

SEQ ID NO: 348978 - DNA, 75 bp, synthetic construct
  source 1..75: mol_type = other DNA
acattaacgccatcgtgaatctaattcgaggatggcaggaaccaaaactgtcctggtcagtaatttgtgaggcgg

SEQ ID NO: 348979 - DNA, 75 bp, synthetic construct
  source 1..75: mol_type = other DNA
aacatggcggcagtgtttaaatatatcgcctcactggcggatgaactgcggcagaagggcgttttcaacatgctg

SEQ ID NO: 348980 - DNA, 75 bp, synthetic construct
  source 1..75: mol_type = other DNA
accgccagagccaacacccgtgcagtttgaaaaggcaaatgaagtgatcaatccctcattgccatatgtccccga

SEQ ID NO: 348981 - DNA, 75 bp, synthetic construct
  source 1..75: mol_type = other DNA
taatccctgctctgaaagccgatgatggctccactgatgtggaaagtgttgatacagctatagatgctgtgccgg

SEQ ID NO: 348982 - DNA, 75 bp, synthetic construct
  source 1..75: mol_type = other DNA
gattgtcggtgataaggggctggtggcgcgaatgggcggcgaagaatttgctgttgcagtgccgtcggtgaatcc

SEQ ID NO: 348983 - DNA, 75 bp, synthetic construct
  source 1..75: mol_type = other DNA
agaaggcactgcgaaagacaaagatcagctgaacatgaacgacaacacggcgctggcgcgcgcgacaagtgcgaa

SEQ ID NO: 348984 - DNA, 75 bp, synthetic construct
  source 1..75: mol_type = other DNA
ctcctgcccggtgctggagccaaccggaccgctgcatacccaattcggttaccacatcattaaggtgctgtaccg

SEQ ID NO: 348985 - DNA, 75 bp, synthetic construct
  source 1..75: mol_type = other DNA
ccggtgctggagccaacgggtccactgcacacgcaattcggttaccacatcattaaagtgctgtaccgtaactaa

SEQ ID NO: 348986 - DNA, 75 bp, synthetic construct
  source 1..75: mol_type = other DNA
aaggaatactggcggatgagtgcgcggcgctactcagcgattttttccgaatgcgccgccaggaaatcaaagcgc

SEQ ID NO: 348987 - DNA, 75 bp, synthetic construct
  source 1..75: mol_type = other DNA
ttcctttacgcgaaacagttggcttaatcccgccgggatgctaccacgcccggagttacagtgggtaggttaccg

SEQ ID NO: 348988 - DNA, 75 bp, synthetic construct
  source 1..75: mol_type = other DNA
ggttgcgttggccatcgcatcaattggccagggcgttaccatgaccgtgatgtgggcactggaagctgataccgt

SEQ ID NO: 348989 - DNA, 75 bp, synthetic construct
  source 1..75: mol_type = other DNA
cggaatggtgctttacttcatctgcttcaaatcgacgcgtgagaatgtggtacgtatcgtggcgcagccgtcatt

SEQ ID NO: 348990 - DNA, 75 bp, synthetic construct
  source 1..75: mol_type = other DNA
gtaaaagcaatacgcgatgctattggtagcgatgaattcaatcgcttgtcgagagttggtattgtcgcctcgtta

SEQ ID NO: 348991 - DNA, 75 bp, synthetic construct
  source 1..75: mol_type = other DNA
tgacctttgtctgcctggcatttctgataggaccgagcattaagaactccagcccggaagagatggtgtcggtat

SEQ ID NO: 348992 - DNA, 75 bp, synthetic construct
  source 1..75: mol_type = other DNA
ccagcccggaggagatggtgtcggtataccatttctggacgattaccctggcgattgccgggatggtgctttact

SEQ ID NO: 348993 - DNA, 75 bp, synthetic construct
  source 1..75: mol_type = other DNA
gctggaagctgataccgtagaatacggtgaatacctgaccggcgtgcgaattgaagggctcacctattcactagg

SEQ ID NO: 348994 - DNA, 75 bp, synthetic construct
  source 1..75: mol_type = other DNA
ttacgctgctggaaatgttgctggcgttggcaattgtttccgcactaaccctcagtgcatttcaagtattacaga

SEQ ID NO: 348995 - DNA, 75 bp, synthetic construct
  source 1..75: mol_type = other DNA
gagctgcagagggggggcagccagatagagcgagatcttatgcagatgatcccaagacatagccgggggagtgaa

SEQ ID NO: 348996 - DNA, 75 bp, synthetic construct
  source 1..75: mol_type = other DNA
ctgagctactttcatgtcgatcacccttccggtgtttctccggatgtcagggtgaaccgccccggaaatcctgga

SEQ ID NO: 348997 - DNA, 75 bp, synthetic construct
  source 1..75: mol_type = other DNA
gggactgcctgaaaaggtgttcccggcggatatcgtccggggcgcgccggtccggttgcaggtgggagacgagac

SEQ ID NO: 348998 - DNA, 75 bp, synthetic construct
  source 1..75: mol_type = other DNA
gtggattattaccgcccgcagataatcacccagggcgacaccagcaacatggagcaggtgaactggcgcgcaaaa

SEQ ID NO: 348999 - DNA, 75 bp, synthetic construct
  source 1..75: mol_type = other DNA
atgagttcctcttcaacgagaaaccgcatcacaacgccaaagccgaaacgctccgcgagaagatcgcagataagc

SEQ ID NO: 349000 - DNA, 75 bp, synthetic construct
  source 1..75: mol_type = other DNA
gtttcattatcttctctctcatcctgcgattgccgatcgcaaggtgaatcagccgcgtgccttaattatggcacc

SEQ ID NO: 349001 - DNA, 75 bp, synthetic construct
  source 1..75: mol_type = other DNA
cagaaccacattaacctcggtgccattcaggtggtggtactggacgaagccgatcgcatgtacgatctgggcttt

SEQ ID NO: 349002 - DNA, 75 bp, synthetic construct
  source 1..75: mol_type = other DNA
tggcgtgtgaagagtatgcattgaatttgcctgctattgagacctatattggtcactcaattccggtaagcaaat

SEQ ID NO: 349003 - DNA, 75 bp, synthetic construct
  source 1..75: mol_type = other DNA
ttcccgcccgtcagcataaatctcctgtttaccgtcttgctcgcggtcattgctggcacggcgggatgcctgttg

SEQ ID NO: 349004 - DNA, 75 bp, synthetic construct
  source 1..75: mol_type = other DNA
gacgccggtgatgttgtatcacaaacagttacggcattacattttgctaccatcgtgcctggtgcttattgctgg

SEQ ID NO: 349005 - DNA, 75 bp, synthetic construct
  source 1..75: mol_type = other DNA
attctgaggctgatagcctccctcaaacttggacgactgaacgtaatgtccataatgaaaacactgcaaacaggt

SEQ ID NO: 349006 - DNA, 75 bp, synthetic construct
  source 1..75: mol_type = other DNA
tgttttaccgaccgtcgggtattgccccggtaaataaagcaacatttaagaaattgctggtaaatcgtagcggca

SEQ ID NO: 349007 - DNA, 75 bp, synthetic construct
  source 1..75: mol_type = other DNA
tattatgattgcccccttagaaagtcagagtgttaatgtcaaaagtaataatgcaaataactggcatctgaccat

SEQ ID NO: 349008 - DNA, 75 bp, synthetic construct
  source 1..75: mol_type = other DNA
attagaaagtcagagcgttaacgtcaaaaataataatgcaaatagctggcatctgaccattattgatgatcatgg

SEQ ID NO: 349009 - DNA, 75 bp, synthetic construct
  source 1..75: mol_type = other DNA
cgatcgtatgtacgatctgggctttattaaagatattcgctggctgtttcgccgtatgccgccagcaaatcagcg

SEQ ID NO: 349010 - DNA, 75 bp, synthetic construct
  source 1..75: mol_type = other DNA
aaaagtaataatgcgaataactggcatctgaccattatcgatgaccatggcaactatattagtgacaaaatttaa

SEQ ID NO: 349011 - DNA, 75 bp, synthetic construct
  source 1..75: mol_type = other DNA
cattttttatctgaatgttctggatattccaccaaatagtccagagcaagaaggcaagaatgcactgaagtttgc

SEQ ID NO: 349012 - DNA, 75 bp, synthetic construct
  source 1..75: mol_type = other DNA
ccggcggcactattacttgggccgatgatcgccgggatcatctttagtatgcgcggaattactctgcaacttccc

SEQ ID NO: 349013 - DNA, 75 bp, synthetic construct
  source 1..75: mol_type = other DNA
tttgccagcggcaacgatgatcgcccgtgaaattattatttctgctctacgtgaatggatggctgaactcggtaa

SEQ ID NO: 349014 - DNA, 75 bp, synthetic construct
  source 1..75: mol_type = other DNA
tttctggcgcgtcgctggaaccagagtacccggtttggtgctttccttgatccagtagcagataaagtgctggta

SEQ ID NO: 349015 - DNA, 75 bp, synthetic construct
  source 1..75: mol_type = other DNA
tacgcggggattgcacttttcttcgtggctgcagtactgaccctatggtcaatgttgcaatatttgagcgctgca

SEQ ID NO: 349016 - DNA, 75 bp, synthetic construct
  source 1..75: mol_type = other DNA
cttacggcaccgtaaaagggatgacgccggaagaagttgaagccactggcgcacaaattatcctcggcaatactt

SEQ ID NO: 349017 - DNA, 75 bp, synthetic construct
  source 1..75: mol_type = other DNA
cagttacggcattacgttttactaccatcgtgcctggcgcttatttctggcgtcatgttaatgataataaagtgg

SEQ ID NO: 349018 - DNA, 75 bp, synthetic construct
  source 1..75: mol_type = other DNA
ctgaatattacacaggcaataaattcggtgaaagtaaatcattttatatcactattccttttgagtttaaatcta

SEQ ID NO: 349019 - DNA, 75 bp, synthetic construct
  source 1..75: mol_type = other DNA
tatgtgtgctatcacttctcctttctattggtttcctcggattacatctcccggcggcactcttacttggaccga

SEQ ID NO: 349020 - DNA, 75 bp, synthetic construct
  source 1..75: mol_type = other DNA
tatgtgtgctgtcacttctcctgtctattggctttcttggtttgcatctcccggcggcactcttgcttggtccga

SEQ ID NO: 349021 - DNA, 75 bp, synthetic construct
  source 1..75: mol_type = other DNA
atgccagttttgcagtggggaatgttatgtgtgctctcacttctcctttctattggcttcctcggattacatctc

SEQ ID NO: 349022 - DNA, 75 bp, synthetic construct
  source 1..75: mol_type = other DNA
tgccggtacagtgggatgcctgctgcgtcttccttccggcacgatgctcatcccgatgctggcgggcgcagtgct

SEQ ID NO: 349023 - DNA, 75 bp, synthetic construct
  source 1..75: mol_type = other DNA
ggtcgttgccggtacggcgggatgcttgctacgtcttccttccggcacgatgctcatcccgatgctggcgggcgc

SEQ ID NO: 349024 - DNA, 75 bp, synthetic construct
  source 1..75: mol_type = other DNA
cgctccgcttttctcgccgcgcaggccattcttggctgcatgattgcacaaaacctgaccggttcgattctcacg

SEQ ID NO: 349025 - DNA, 75 bp, synthetic construct
  source 1..75: mol_type = other DNA
tttcttctatggtccttcctgcacatgccggaattgttatctacgggacgcgcattatttacccggcagaaaata

SEQ ID NO: 349026 - DNA, 75 bp, synthetic construct
  source 1..75: mol_type = other DNA
cattggggtagtaaccaaagcggatttagccagcgtagaacaaatatctttggtgaaatgctggttacgggaagc

SEQ ID NO: 349027 - DNA, 75 bp, synthetic construct
  source 1..75: mol_type = other DNA
agcctgaaccttgttcagccgcaggaagtgcaggaggggaatgatgcatttgatgcttatctgaatggtatatgg

SEQ ID NO: 349028 - DNA, 75 bp, synthetic construct
  source 1..75: mol_type = other DNA
tggctgagtgcaatgcgggttcgtgactggtcggaatacctgacgctgattcactttgctgataatcctctggca

SEQ ID NO: 349029 - DNA, 75 bp, synthetic construct
  source 1..75: mol_type = other DNA
gcacaaattatcctcggtaacaccttccacctgtggctgcgcccgggccaggaaatcatgaaactgcacggcgat

SEQ ID NO: 349030 - DNA, 75 bp, synthetic construct
  source 1..75: mol_type = other DNA
ggtctggtagatatcggttttgatggctacgctgtcggcggtctggctgtgggtgagccgaaagcagatatgcac

SEQ ID NO: 349031 - DNA, 75 bp, synthetic construct
  source 1..75: mol_type = other DNA
tcgtctggtccccgaccaccattgatacaccaggcgaatacctcgaaaaccgcagcctctacagtgcattgttgg

SEQ ID NO: 349032 - DNA, 75 bp, synthetic construct
  source 1..75: mol_type = other DNA
accctgcgcgtcactggcggcccggcgcattccgatgtctggatgcaaatgctggcggacgtcagcgggctgcgt

SEQ ID NO: 349033 - DNA, 75 bp, synthetic construct
  source 1..75: mol_type = other DNA
aaaaagaaccctcgttatgacgatctcgttgggatttatgctgggaaagaagcgtttcgctacaaacaaataaaa

SEQ ID NO: 349034 - DNA, 75 bp, synthetic construct
  source 1..75: mol_type = other DNA
tggcgcacaaaaagtgttcatcacaagcgtagttacagaaatcggtatcaatgaactgatgagctttttgaatac

SEQ ID NO: 349035 - DNA, 75 bp, synthetic construct
  source 1..75: mol_type = other DNA
ctgcgcaggaagcgggtaactaccagcgcaaactggttgctgaagatcagcaaaaaatcatcgatggcatgaaag

SEQ ID NO: 349036 - DNA, 75 bp, synthetic construct
  source 1..75: mol_type = other DNA
aatatcgcagcattcaaagtctttggcgctaacccgatcccgatgccgtttgccgaagtctataccgggctggaa

SEQ ID NO: 349037 - DNA, 75 bp, synthetic construct
  source 1..75: mol_type = other DNA
gaaaaactctacccgctggcccgacaaaccttgtggaccgggcatccggtgtcgctgttacgctggctgaaagag

SEQ ID NO: 349038 - DNA, 75 bp, synthetic construct
  source 1..75: mol_type = other DNA
ctatagggctcggaagagtgcgggaaaccagcgtagctaaagtctggcaaaattatgaactggaaaaagcaaaac

SEQ ID NO: 349039 - DNA, 75 bp, synthetic construct
  source 1..75: mol_type = other DNA
ctgattacatccggggttaaggaacagttgacatcctcccccaccttcgcacttcgtgactcaggagggggattc

SEQ ID NO: 349040 - DNA, 75 bp, synthetic construct
  source 1..75: mol_type = other DNA
ctccctgctgattgtggatatcggtggaaccacgctggatatcgcgcacgttcgcagcaaaatgtccggcttcac

SEQ ID NO: 349041 - DNA, 75 bp, synthetic construct
  source 1..75: mol_type = other DNA
ttgcaatggagatatcctatctttgtgcggcaaggctcggtgatgtactcgagctgaaatggcaggatattatgg

SEQ ID NO: 349042 - DNA, 75 bp, synthetic construct
  source 1..75: mol_type = other DNA
gctaataatgttaaagtcaattatgaaactattatgattgcccccttagaaagtcagagtgttaatatcaaaagt

SEQ ID NO: 349043 - DNA, 75 bp, synthetic construct
  source 1..75: mol_type = other DNA
acctggctgattttgggaatactccgcagcgtggcactaagacactacaagcagctactgagatcggagacaaga

SEQ ID NO: 349044 - DNA, 75 bp, synthetic construct
  source 1..75: mol_type = other DNA
tattcttattgaagccgactattacaaaaaaaatggtaaatttaaatcatctagtgaaatcatcaaaatcagatt

SEQ ID NO: 349045 - DNA, 75 bp, synthetic construct
  source 1..75: mol_type = other DNA
ccggcaggcgccagcctgccaggggttttcgcgcgggctgacaggcggcctccaccgcctgccctgtatcacctg

SEQ ID NO: 349046 - DNA, 75 bp, synthetic construct
  source 1..75: mol_type = other DNA
agcgggaaacaggccgcaggggtggcggcggaagggcagacaactgcgccatcaggcgcagtggccttacacacc

SEQ ID NO: 349047 - DNA, 75 bp, synthetic construct
  source 1..75: mol_type = other DNA
gcgtttccggcaggcgtcagcctgccaggggttttcgcgcgggctgacaggcggcctccaccgcctgcccctgta

SEQ ID NO: 349048 - DNA, 75 bp, synthetic construct
  source 1..75: mol_type = other DNA
gtgcagccacactcaaccagggaacacgcctgtgctcccatgacgatacgcaaaaaatttacgcgtacctttccc

SEQ ID NO: 349049 - DNA, 75 bp, synthetic construct
  source 1..75: mol_type = other DNA
tggtcataagcggcagtctgcccccaggtgtgaagctggaaaaattaactcaacttatctccgctgcacaaaaac

SEQ ID NO: 349050 - DNA, 75 bp, synthetic construct
  source 1..75: mol_type = other DNA
agcccgaaaccgcgccagcgggttcggcggagactggcgggtgcgccagcagctgcccgtcggagtcgggcctga

SEQ ID NO: 349051 - DNA, 75 bp, synthetic construct
  source 1..75: mol_type = other DNA
gcgatcgtccgattgtcattatgcttgaccctggccacggtggcgaagactccggtgcggtggggaaatacaaaa

SEQ ID NO: 349052 - DNA, 75 bp, synthetic construct
  source 1..75: mol_type = other DNA
ggcccacagcctggcaaggcagggcgcgatcgcccgattgtcatcatgcttgatcccggtcacggtggcgaagac

SEQ ID NO: 349053 - DNA, 75 bp, synthetic construct
  source 1..75: mol_type = other DNA
aaattcgctttagtttcccctggctgtagggatgcctcaatgccactcactacttcatgtggaaatctggcattc

SEQ ID NO: 349054 - DNA, 75 bp, synthetic construct
  source 1..75: mol_type = other DNA
gcgatcgtccgattgtcattatgctcgaccctggccacggcggcgaagactccggtgcggtggggaaatacaaaa

SEQ ID NO: 349055 - DNA, 75 bp, synthetic construct
  source 1..75: mol_type = other DNA
tacacaaaaatcaacgccccgcagtgctgggaacacatacggggcgtctaaccaacaacgtaaactaggagccgt

SEQ ID NO: 349056 - DNA, 75 bp, synthetic construct
  source 1..75: mol_type = other DNA
tggcgcgaatctttctgattcatgctctatctttctgcgccgtcttttccgtgccggtgataatgttttggtcaa

SEQ ID NO: 349057 - DNA, 75 bp, synthetic construct
  source 1..75: mol_type = other DNA
tatgtcagcatttgttgattataaaataaaccaactgaatagcgataataagctgaatatcaataatgatgatat

SEQ ID NO: 349058 - DNA, 75 bp, synthetic construct
  source 1..75: mol_type = other DNA
ttttggtcaattctttatcggtcattgtgttgtcctgcatagcaatgcgccgtaataccttacaccacggcgctg

SEQ ID NO: 349059 - DNA, 75 bp, synthetic construct
  source 1..75: mol_type = other DNA
tatctttctgcgtcgtcttttccgtgtcggtgataatgttttggtcaattctttatcggtcattgtgttgtcctg

SEQ ID NO: 349060 - DNA, 75 bp, synthetic construct
  source 1..75: mol_type = other DNA
aacccggcagtgcgctaacactaaccgggcttctaaccaccaacgatagaaagcgtatcgaggtagctatgagaa

SEQ ID NO: 349061 - DNA, 75 bp, synthetic construct
  source 1..75: mol_type = other DNA
ggggctattcctgctctttggccttgcgacgctggcggtattcaacttctcgctttaatgctgctgttacaaact

SEQ ID NO: 349062 - DNA, 75 bp, synthetic construct
  source 1..75: mol_type = other DNA
gcaaagccgtggcacaggcaagcgtgcagaagcatgggcaacaggtctgaaatacgatgccaataatatttatct

SEQ ID NO: 349063 - DNA, 75 bp, synthetic construct
  source 1..75: mol_type = other DNA
ttaccagccgccagccaagcggctcctcggtgtttgcgctttcgaccaaaggcgcaaccagtactgcggcaaaat

SEQ ID NO: 349064 - DNA, 75 bp, synthetic construct
  source 1..75: mol_type = other DNA
gtggaggatggtgtgttgcaaccggagcagcggatggtcagtacagggcgtgctgttgtgtacggtggtgcgaat

SEQ ID NO: 349065 - DNA, 75 bp, synthetic construct
  source 1..75: mol_type = other DNA
tcccgctttctaactggaccgagcaggatatctggcaatatatctggctggaaaatatcgacattgttccgctgt

SEQ ID NO: 349066 - DNA, 75 bp, synthetic construct
  source 1..75: mol_type = other DNA
acaactaccggactgcctccatgccgatggatgcgacggtcagcgtgcgtaatgatgcggtcaccaccggggagc

SEQ ID NO: 349067 - DNA, 75 bp, synthetic construct
  source 1..75: mol_type = other DNA
gtctggctgcactgctggtgagttgcagtatgaatagtgtattacaggcggatgaactgataataaaggatgatt

SEQ ID NO: 349068 - DNA, 75 bp, synthetic construct
  source 1..75: mol_type = other DNA
gtctggctgtactgctagtgagctgcggcatgaatggtgtgctgcgggctaatgaactggtaatgcgggataact

SEQ ID NO: 349069 - DNA, 75 bp, synthetic construct
  source 1..75: mol_type = other DNA
cagttcacatactggctgagtgagtcgcagcaacaggccctggtgggacggtgggtgacagagcgaatgcagggg

SEQ ID NO: 349070 - DNA, 75 bp, synthetic construct
  source 1..75: mol_type = other DNA
ctgggctggcatacgccgctcattgatggcaccgaagtggcgattgcatacagcaatggcgatattgacctgccc

SEQ ID NO: 349071 - DNA, 75 bp, synthetic construct
  source 1..75: mol_type = other DNA
gcaggaagttgcggagtctattcttgcggggattaaagcgtattttgccgatggggcgactggggcgacgctggc

SEQ ID NO: 349072 - DNA, 75 bp, synthetic construct
  source 1..75: mol_type = other DNA
gttcatcaagtcggcgcgcgtcgggcaatttgacccgcaaaccgtacggatggtttttgaattaaagcaaaacgt

SEQ ID NO: 349073 - DNA, 75 bp, synthetic construct
  source 1..75: mol_type = other DNA
tgaaccgccgatgataaagggagctgaggtttccagtgacttaccggggcaggataatctttcagattctgtctg

SEQ ID NO: 349074 - DNA, 75 bp, synthetic construct
  source 1..75: mol_type = other DNA
aaacgtatcacgctgattggcggggggagttacctgaggctggaggcggggaaaatagagtacggtacgacggcg

SEQ ID NO: 349075 - DNA, 75 bp, synthetic construct
  source 1..75: mol_type = other DNA
gtagaaaagggaaaaagaccctcattaattaaaagattaagcttcagaaaaaataccaggtctgaaccaacgtca

SEQ ID NO: 349076 - DNA, 75 bp, synthetic construct
  source 1..75: mol_type = other DNA
caacaggtaggcggaaacgactctgttctatccgaacagactaacagcaatggtaacgttgttgacctggatgaa

SEQ ID NO: 349077 - DNA, 75 bp, synthetic construct
  source 1..75: mol_type = other DNA
tccactcggtttattggctgggtgctggagaaataaacttaggaaaatagacgatgcggtgaaaactcctggaaa

SEQ ID NO: 349078 - DNA, 75 bp, synthetic construct
  source 1..75: mol_type = other DNA
ctaacgagcaattagagtgggtaacaaaccctcgataccatatagatgaattgactgtgaaaggtgatattgttc

SEQ ID NO: 349079 - DNA, 75 bp, synthetic construct
  source 1..75: mol_type = other DNA
cagtacagctacagcggcgaggatgaactgctgaagacgcggcacagccggcggggggaaacggattacttctac

SEQ ID NO: 349080 - DNA, 75 bp, synthetic construct
  source 1..75: mol_type = other DNA
ccgtagccttgaacctgtcgttcgcgagcgtattcgctctcgtctgacacgagggaaagtggaatgtactttgcg

SEQ ID NO: 349081 - DNA, 75 bp, synthetic construct
  source 1..75: mol_type = other DNA
cccggcgtgaaatcaagggtgaatgggggagcgcaacctgggaaatgcgctcgataaaccagcgttatctggaaa

SEQ ID NO: 349082 - DNA, 75 bp, synthetic construct
  source 1..75: mol_type = other DNA
agcccaggagcaggatctcgacgcgattgccgctgaaattctcgcggcgctggatggtacgctggacgactttat

SEQ ID NO: 349083 - DNA, 75 bp, synthetic construct
  source 1..75: mol_type = other DNA
gttccagatatggcaagggttgttgtaaaacccgacggttctgtacgtacatcgttcccattcaattcatcacac

SEQ ID NO: 349084 - DNA, 75 bp, synthetic construct
  source 1..75: mol_type = other DNA
attacttctacgaccccacggggcgcatcacggcgtgtcgttcggaggatgaggggtatctggcgagctggcagt

SEQ ID NO: 349085 - DNA, 75 bp, synthetic construct
  source 1..75: mol_type = other DNA
gaagaaatataaaggccggtggaatagtaccagataaaggattaaattctcgaccggaaagaacatcaagaggtt

SEQ ID NO: 349086 - DNA, 75 bp, synthetic construct
  source 1..75: mol_type = other DNA
attaccagtcggacgcggcgggcaggctggggaagtacaccagcccgatggggaggataacgcgctggcagcggg

SEQ ID NO: 349087 - DNA, 75 bp, synthetic construct
  source 1..75: mol_type = other DNA
agtggcacccggtgtggcaccagccggaaacggaggtggacgcggcggggaacagctggtgctgtgagtacgatg

SEQ ID NO: 349088 - DNA, 75 bp, synthetic construct
  source 1..75: mol_type = other DNA
gggtgacggggcaccacacggacagcggtgaacagtaccggctggcgtggagcctggcggcacgcaggctgtgcg

SEQ ID NO: 349089 - DNA, 75 bp, synthetic construct
  source 1..75: mol_type = other DNA
gcctggtcgcgaaactggaagatgcccaggtacagttggaaaacaaccgtctggaacaggagctggttctgctgg

SEQ ID NO: 349090 - DNA, 75 bp, synthetic construct
  source 1..75: mol_type = other DNA
tgatcgggttttcaatggccgagtgcatccagtgcgcaagacgcctgatgaagtttacgccgctattgcccgccg

SEQ ID NO: 349091 - DNA, 75 bp, synthetic construct
  source 1..75: mol_type = other DNA
atgcgctacgcttatcaggcctacaacgtgtgttgcaatctactgatttctttggatcttgtaggccggataagg

SEQ ID NO: 349092 - DNA, 75 bp, synthetic construct
  source 1..75: mol_type = other DNA
tgcctggagtggtaagtatcggggcgctgacacaccagaattggggggatgttggttcactggccggcttcatga

SEQ ID NO: 349093 - DNA, 75 bp, synthetic construct
  source 1..75: mol_type = other DNA
cggttacgatgcgtgctatccagaaagctatcgcattgattgaactcaagtttaccccacaaagtgaatcccatt

SEQ ID NO: 349094 - DNA, 75 bp, synthetic construct
  source 1..75: mol_type = other DNA
aagcctgtgcatcaagaagtgatacagcacatccgtgcgcttggcctgttaccagttggagataaccaccaatga

SEQ ID NO: 349095 - DNA, 75 bp, synthetic construct
  source 1..75: mol_type = other DNA
taaccgcgaggctttgttacgtcaagcaagtacgccgctacagcggtattgcctgctgaatggttgcgaggcgtg

SEQ ID NO: 349096 - DNA, 75 bp, synthetic construct
  source 1..75: mol_type = other DNA
actatcttcaaccttaagctaccgatgaaaaaacgctacgaagaagtgtcacacaatctggcgtacattcaggca

SEQ ID NO: 349097 - DNA, 75 bp, synthetic construct
  source 1..75: mol_type = other DNA
atgacgacattaaatacggctgttcctgatgtaaccatcactgaaaacggtctttcagtccccgatatagcagat

SEQ ID NO: 349098 - DNA, 75 bp, synthetic construct
  source 1..75: mol_type = other DNA
agtctatcaatgccgaagtaactaattcagctattgaactgaaagtactgatcgaacaaatgcgcgaacagattc

SEQ ID NO: 349099 - DNA, 75 bp, synthetic construct
  source 1..75: mol_type = other DNA
aacggcaaaagtcactatcgacggtgatatcaaactgcttggtgaaaacgagtccatttatattccgctgggggc

SEQ ID NO: 349100 - DNA, 75 bp, synthetic construct
  source 1..75: mol_type = other DNA
tagaaggtgataatcatgacgttgttatccatacatccattaacaaagccattccaacaatgcctgacgtcggta

SEQ ID NO: 349101 - DNA, 75 bp, synthetic construct
  source 1..75: mol_type = other DNA
gttggtaaaccagtggataccatacctcagatattcatacatggagagcatattggggggtatacggaatttgcg

SEQ ID NO: 349102 - DNA, 75 bp, synthetic construct
  source 1..75: mol_type = other DNA
tggtgaccggtcagccctggcgtggtcagcagcgacggacccggatggtggtgtaccgccgtatcgggaaaaaca

SEQ ID NO: 349103 - DNA, 75 bp, synthetic construct
  source 1..75: mol_type = other DNA
ggtgtcattcaacatattaatcacgctatcctcgacgaaattccgatgatggttgaggaaggactgagcagtttt

SEQ ID NO: 349104 - DNA, 75 bp, synthetic construct
  source 1..75: mol_type = other DNA
aactcaacgatgatgaagtgttgcaggcattacgccgcttgcatgagtccggcgcgctgaccaccgtgcacccgg

SEQ ID NO: 349105 - DNA, 75 bp, synthetic construct
  source 1..75: mol_type = other DNA
ccctgtgggagatttcccgggacagccagcgtaatgaagtgcgccgggtgaaagcggcagagatggccgaagccc

SEQ ID NO: 349106 - DNA, 75 bp, synthetic construct
  source 1..75: mol_type = other DNA
gatattctgggagaaatggaaatttctgcccgcatgatgctcaccggtggtgatccgaaggaagaagcggcgctc

SEQ ID NO: 349107 - DNA, 75 bp, synthetic construct
  source 1..75: mol_type = other DNA
tgccctgatggatacgttccctgaaggcaccatgctgtgcatgaccattgtggtacagccgcaggacacactcga

SEQ ID NO: 349108 - DNA, 75 bp, synthetic construct
  source 1..75: mol_type = other DNA
ctggcaaaacttgccggtaacgtaccgctctatatcgtccacctgtctaacggcttaggcctggattatctgcgc

SEQ ID NO: 349109 - DNA, 75 bp, synthetic construct
  source 1..75: mol_type = other DNA
agaagctatcgcccggatgatcaacctggcgcagcttgccggtaatgccccactttatatcgttcatctgtctaa

SEQ ID NO: 349110 - DNA, 75 bp, synthetic construct
  source 1..75: mol_type = other DNA
gttgtcaaaacatcgcagccgcagccgcgaccacgtgcgagcacaactattaatgaccagtcgctggatgctctg

SEQ ID NO: 349111 - DNA, 75 bp, synthetic construct
  source 1..75: mol_type = other DNA
tttatcgtggctatgccgcccataaggcggtcatcgactacagctttcacggtgtgatccagcacattaatcacg

SEQ ID NO: 349112 - DNA, 75 bp, synthetic construct
  source 1..75: mol_type = other DNA
tggggtcgtctcagaaaacggaatctatggtcactcccgtttttgcaacaccgattttgacgacaagttggcttg

SEQ ID NO: 349113 - DNA, 75 bp, synthetic construct
  source 1..75: mol_type = other DNA
gacggcttccatcaccggacacaaacgaccgatcccctcgggaaggtcacgcaggtgctctacaaggataccggc

SEQ ID NO: 349114 - DNA, 75 bp, synthetic construct
  source 1..75: mol_type = other DNA
cggtttcccgcccggagggctacttcctggatgatgcggtcagccatacccgctggcgtgcccagcagcgccata

SEQ ID NO: 349115 - DNA, 75 bp, synthetic construct
  source 1..75: mol_type = other DNA
accagcgatgatgcgccgaccgacgacgtgttaagcgcggagtttgtggtgcgcaatgaacacggcctgcatgct

SEQ ID NO: 349116 - DNA, 75 bp, synthetic construct
  source 1..75: mol_type = other DNA
aaagaagcgggcgcggttgacgctacttttgttaccaaagccatcaacgaacaaccgctgaacctcggacagggg

SEQ ID NO: 349117 - DNA, 75 bp, synthetic construct
  source 1..75: mol_type = other DNA
atgcctgcccatatcaaacctgctttcaaaacgggtgaagaattactggcctggcagaaagaacaaggggcgatc

SEQ ID NO: 349118 - DNA, 75 bp, synthetic construct
  source 1..75: mol_type = other DNA
ccgagctagagcaagtcgcctcttaataaataatcaaagaaacgatttgttatcttggaaaggtttttttatgtt

SEQ ID NO: 349119 - DNA, 75 bp, synthetic construct
  source 1..75: mol_type = other DNA
atgtagctgaaggctacgtcaatggcatgctggcgcgcgaacagcaaacctcaacgttcctcggcaatggtattg

SEQ ID NO: 349120 - DNA, 75 bp, synthetic construct
  source 1..75: mol_type = other DNA
gccagctcggatgaacatctgggcctgctacgccagttgacccacgtactgagcgatgattccgttgctgaacaa

SEQ ID NO: 349121 - DNA, 75 bp, synthetic construct
  source 1..75: mol_type = other DNA
tggagaaaaccacgctctatcggcaggctgcttatgcagaccctcgcgagacgcctgaaggcaccgtgccggtca

SEQ ID NO: 349122 - DNA, 75 bp, synthetic construct
  source 1..75: mol_type = other DNA
gcgtactggccggcggcggaggaagccccgggcaccctgccggtgctgaaggattttgcggaaacgctgtggttt

SEQ ID NO: 349123 - DNA, 75 bp, synthetic construct
  source 1..75: mol_type = other DNA
cgacgtgagcgtcacactggccacattgcgggactatatcctgccggcggcccggggcaccgcgtttaccgaagc

SEQ ID NO: 349124 - DNA, 75 bp, synthetic construct
  source 1..75: mol_type = other DNA
attgccagccggatgttgaactggcgcggctgcgtgacgcgatggtggcacatcaggcgctggcgctggtgttcg

SEQ ID NO: 349125 - DNA, 75 bp, synthetic construct
  source 1..75: mol_type = other DNA
ctggaagcggcaaaacgcgtcgcgcagaatctcgaccgtctgcgcggtctgacggagaaacaacaggggcctgct

SEQ ID NO: 349126 - DNA, 75 bp, synthetic construct
  source 1..75: mol_type = other DNA
gcgctggccaccgtattgctgggtgccggtctgcagccggtacgtccggagtttgaagaaggtccactgaactgc

SEQ ID NO: 349127 - DNA, 75 bp, synthetic construct
  source 1..75: mol_type = other DNA
cgtatcgcaataattgacgctattcagggggcgagcacaaacgaacttaaggctcttgctgagatcaaagatgcc

SEQ ID NO: 349128 - DNA, 75 bp, synthetic construct
  source 1..75: mol_type = other DNA
aaaccaggtttccagctattacaacggcaccagtgccgcagcgggatatcagaagttgcagacggtatccagcat

SEQ ID NO: 349129 - DNA, 75 bp, synthetic construct
  source 1..75: mol_type = other DNA
aataataatctcggcaatcttgtttttgccaaccaggaaggggcgacactggaatcgccaaatgcaaaaggtgaa

SEQ ID NO: 349130 - DNA, 75 bp, synthetic construct
  source 1..75: mol_type = other DNA
ccttaaggatacatttttatccactgacgaaaacacgaaacaagtaaaaaaagctgttgaagacggcaccaaaaa

SEQ ID NO: 349131 - DNA, 75 bp, synthetic construct
  source 1..75: mol_type = other DNA
atgccgcatcggtgaatatcaaaatagtcggcaacaacgttcaccctggctcggcaaaaggcgtgatggttaatg

SEQ ID NO: 349132 - DNA, 75 bp, synthetic construct
  source 1..75: mol_type = other DNA
ccggaaatgacagaaggctatgaaggtttctatcacctggcgagcatgaaaggcaccgttgaacgggccgatatg

SEQ ID NO: 349133 - DNA, 75 bp, synthetic construct
  source 1..75: mol_type = other DNA
atcagtggtgcaagtaatttatttggcggcgcggctaccagccttgctggaacaagtctggatctggtaaaggat

SEQ ID NO: 349134 - DNA, 75 bp, synthetic construct
  source 1..75: mol_type = other DNA
gcgacttttggtcaggcggtggccaaaggtaataccgtcgccaaagccgaagaagagctcttgaaaaagaaagcc

SEQ ID NO: 349135 - DNA, 75 bp, synthetic construct
  source 1..75: mol_type = other DNA
cgggaaattacagcgtagttatcggttggttggcggatgatctgacagaagaagagcatgctgatcttgtcgatg

SEQ ID NO: 349136 - DNA, 75 bp, synthetic construct
  source 1..75: mol_type = other DNA
gaatgggttcaggcatctgggctacccttaacgaaagtaatgcagattagccagctctccccttgccacactgtg

SEQ ID NO: 349137 - DNA, 75 bp, synthetic construct
  source 1..75: mol_type = other DNA
gccgttggcgataacctttcacgacttgttggggggattgatagtacagggatattgaacgatcttgtaatgcag

SEQ ID NO: 349138 - DNA, 75 bp, synthetic construct
  source 1..75: mol_type = other DNA
tctggaaaacgaactgtcacggcaccaagtgatgtgcagatttatgacaacggctacaaggtggttacaggtgag

SEQ ID NO: 349139 - DNA, 75 bp, synthetic construct
  source 1..75: mol_type = other DNA
cctagaagatattctgattcgtttgctgtgcgattacaccgatcgtttttataaggcactgaaaaccggttacga

SEQ ID NO: 349140 - DNA, 75 bp, synthetic construct
  source 1..75: mol_type = other DNA
tgcagcggatctgaatattggcggcagcaacgctaaaaaccgcaattaccggaataataatctcggcaaccttgt

SEQ ID NO: 349141 - DNA, 75 bp, synthetic construct
  source 1..75: mol_type = other DNA
gtgaacacggctacaaatcgccagacgaatttaaagcgcctgaaaaaaatacaataacgactgatctgaatatag

SEQ ID NO: 349142 - DNA, 75 bp, synthetic construct
  source 1..75: mol_type = other DNA
atcaagcagcgaaggcactgcgcaggttaagaaagccgttgaagatggcaccaagcaaacggtagccgcaattaa

SEQ ID NO: 349143 - DNA, 75 bp, synthetic construct
  source 1..75: mol_type = other DNA
aactacaaggcgggcgtgatggtgaagatggtgttggtgagcacgggtatacttccccggctgaatttaatgccc

SEQ ID NO: 349144 - DNA, 75 bp, synthetic construct
  source 1..75: mol_type = other DNA
tatataaagaaatcaagaatcttgaacataaattatcggatgataacttatcattaagtgcatttattgtttctg

SEQ ID NO: 349145 - DNA, 75 bp, synthetic construct
  source 1..75: mol_type = other DNA
aagcagttaaaaaagagactaacagcaagctgagctttcataagcaattggttttaaaccgctttatgttccatt

SEQ ID NO: 349146 - DNA, 75 bp, synthetic construct
  source 1..75: mol_type = other DNA
cttggttcattcaacgctaaaactgggcgttgggaagggcaattcaataatgaaacgctggaacacattaataaa

SEQ ID NO: 349147 - DNA, 75 bp, synthetic construct
  source 1..75: mol_type = other DNA
cagcatttaacaacgcgattgaagcaaagtcagtacgagtagttgaagaacaaaccaaagttcttcaatccaatg

SEQ ID NO: 349148 - DNA, 75 bp, synthetic construct
  source 1..75: mol_type = other DNA
tggctctgcgtcagccgtgcaagaaccttttcttgctatgccaccacagcttcctactgtaacagatctcgcacg

SEQ ID NO: 349149 - DNA, 75 bp, synthetic construct
  source 1..75: mol_type = other DNA
ggacgaaaggcaaggcagagttagcaacagactatcacgcaggcgtaaagagtacgagcaaagtacatctgatag

SEQ ID NO: 349150 - DNA, 75 bp, synthetic construct
  source 1..75: mol_type = other DNA
aagcagttaaaaataagatcagcaaacccaaagatgtaagcactatcagcgatacatcaaaggggattgcaaagg

SEQ ID NO: 349151 - DNA, 75 bp, synthetic construct
  source 1..75: mol_type = other DNA
agatgtcagcaacccagaggttatgacgcaattagttcgtgcaattgcgacgaaagaaggcggaaatccggcagt

SEQ ID NO: 349152 - DNA, 75 bp, synthetic construct
  source 1..75: mol_type = other DNA
tgcaaaagcgttcaataacgctgttgagacaaaatccgcacaagcagtagaagagcaaaccaaaatccttcagac

SEQ ID NO: 349153 - DNA, 75 bp, synthetic construct
  source 1..75: mol_type = other DNA
gggaaaaacgggaaagaaaccaacgaagcgtgggcaaacgctacgatagaccactggccacatgtgggtggcgat

SEQ ID NO: 349154 - DNA, 75 bp, synthetic construct
  source 1..75: mol_type = other DNA
ttgctttcctggcgtcggcctggtacagcgttgtgaaatacagaaaggaaaaaatttccgtccctgacacttccg

SEQ ID NO: 349155 - DNA, 75 bp, synthetic construct
  source 1..75: mol_type = other DNA
ggcaggctcagcaaatccggcgcaggtggctggcgatttccatgcgcaaatcgacgctatctggggaggcaagcg

SEQ ID NO: 349156 - DNA, 75 bp, synthetic construct
  source 1..75: mol_type = other DNA
ttttcaggcttaacagagcagccgaattattagaaatagatattgatgatcttttgattatggcggcggcagaat

SEQ ID NO: 349157 - DNA, 75 bp, synthetic construct
  source 1..75: mol_type = other DNA
catgttaacgcctcctatatactcgacatcgcagggcttgattctattgacactcccgcacgcatattcagcccc

SEQ ID NO: 349158 - DNA, 75 bp, synthetic construct
  source 1..75: mol_type = other DNA
ctttattcccagacgtcaaagaagactgcttattacttgccgacataatcactgaagtagaggacgaaaaaagct

SEQ ID NO: 349159 - DNA, 75 bp, synthetic construct
  source 1..75: mol_type = other DNA
gcccaacgtgacttgcgacacccggtgcgcaccctgctgccagatatgaccgcccatcagctttaccaaaaaaaa

SEQ ID NO: 349160 - DNA, 75 bp, synthetic construct
  source 1..75: mol_type = other DNA
tgcaggccattcacacccgcgcacacctgttgcaggccatttatgaaggggtggtgttcagccatatgacccacc

SEQ ID NO: 349161 - DNA, 75 bp, synthetic construct
  source 1..75: mol_type = other DNA
attgcaggcgtgtttatcctatctgagagaaggcgacaccttacacgtgcactctctcgaccgtttagggcgtaa

SEQ ID NO: 349162 - DNA, 75 bp, synthetic construct
  source 1..75: mol_type = other DNA
cgggctgtatgaccgagaaggccgggaggcgggcgtgcagcgcctgccgctgtgcgcattaagtccacagccagg

SEQ ID NO: 349163 - DNA, 75 bp, synthetic construct
  source 1..75: mol_type = other DNA
gtggaagaaacgggatgctttggcgcggcgctcgctgcccgtgtcggtacgggcgtttatcgcaacttcagcgaa

SEQ ID NO: 349164 - DNA, 75 bp, synthetic construct
  source 1..75: mol_type = other DNA
agcaatatttccgagtccaatctctacaacatgagtcgcggggaatatgacccgtgcctcaccgactggctgggg

SEQ ID NO: 349165 - DNA, 75 bp, synthetic construct
  source 1..75: mol_type = other DNA
gcgccggacgggacgctggtgtgggcgggctaccaggcgggatttggcgaaaaccggggcgacatcagcaacagc

SEQ ID NO: 349166 - DNA, 75 bp, synthetic construct
  source 1..75: mol_type = other DNA
cgagaacaaaaccttgttcttcaagctgtcgattgtcgggacgtggcccagcggaaccgccaacaggtcaatgca

SEQ ID NO: 349167 - DNA, 75 bp, synthetic construct
  source 1..75: mol_type = other DNA
atggctgattcgaatctcaatgagccggtaatcatccaggctacgcggctcgacacatcagtccttccgcgtaat

SEQ ID NO: 349168 - DNA, 75 bp, synthetic construct
  source 1..75: mol_type = other DNA
cttgattcgcgattaacgacagcagaaaacgatattgattatctgactgatgaagttgtcgccattcaaaacacg

SEQ ID NO: 349169 - DNA, 75 bp, synthetic construct
  source 1..75: mol_type = other DNA
ttcctgaagaaatcaatagaaaattggttgatcatatttctgatattaatttgacttatagtcacatagctcgtg

SEQ ID NO: 349170 - DNA, 75 bp, synthetic construct
  source 1..75: mol_type = other DNA
agttaatccgcaggcactattaattttaggtgataccaatagtgccttggtggcaatatctgcaaaaagaagaaa

SEQ ID NO: 349171 - DNA, 75 bp, synthetic construct
  source 1..75: mol_type = other DNA
tagttgtttctactcatccgcgcactcgcaaccgcatcaatgaaaacggtattcaattccataaaaatatcttgc

SEQ ID NO: 349172 - DNA, 75 bp, synthetic construct
  source 1..75: mol_type = other DNA
cttacgtattatatgcctcaaatcgataattcggatgtactgtcgcgtctgaacctgcgttcaggcgaatttttc

SEQ ID NO: 349173 - DNA, 75 bp, synthetic construct
  source 1..75: mol_type = other DNA
ccaaatgtgtcggataaagttgtcagaattgttcactcttacacagattatgttaagagagtcgtctggaaagaa

SEQ ID NO: 349174 - DNA, 75 bp, synthetic construct
  source 1..75: mol_type = other DNA
ctttcgtactatatgcctcaaattgatggttcggatgtgttgtcacgtctaaatttgcgccctggtgaattcttt

SEQ ID NO: 349175 - DNA, 75 bp, synthetic construct
  source 1..75: mol_type = other DNA
tgtgattctggtcgatcacgaaattcgactggcatcagctgaagcgaagatacaggaccacgaaacaaggatcac

SEQ ID NO: 349176 - DNA, 75 bp, synthetic construct
  source 1..75: mol_type = other DNA
atcctgttagctacgttcttcagcgtggataaagacggctttcttgccacaaatggcagtacgttaaccattcag

SEQ ID NO: 349177 - DNA, 75 bp, synthetic construct
  source 1..75: mol_type = other DNA
tgtcacccttgcagaccatgaatccagaattgaagctgctgaagcaactctcatcaatcatgaacatagaattgc

SEQ ID NO: 349178 - DNA, 75 bp, synthetic construct
  source 1..75: mol_type = other DNA
gtaaacagtttgaagcgcgtaaacgtaaaatgatggagatcgccaaaaaagtgggcaaagggttacatcctgatt

SEQ ID NO: 349179 - DNA, 75 bp, synthetic construct
  source 1..75: mol_type = other DNA
ccgacgctgttgacgcaaattgatacccggttaaatcagttgctgaatcgctatgtaattttactggatacgaag

SEQ ID NO: 349180 - DNA, 75 bp, synthetic construct
  source 1..75: mol_type = other DNA
atgaactttaccaaactgactgaccacctgaaacttgccaccgatcgactcattggatttaagccagaaccatat

SEQ ID NO: 349181 - DNA, 75 bp, synthetic construct
  source 1..75: mol_type = other DNA
tcactccccctgaattaccccgccgggaaatgaatcaaccgaaaaagtcagaggaaagtccacagccggtttttg

SEQ ID NO: 349182 - DNA, 75 bp, synthetic construct
  source 1..75: mol_type = other DNA
tatttacgctacgcgaactggcattttttattttactgctggtcctcgacatcattgtttttattctactgcatt

SEQ ID NO: 349183 - DNA, 75 bp, synthetic construct
  source 1..75: mol_type = other DNA
agattgatacccggttaaatcagttgctgaatcgctatgtcattttactggatacgaaggtggaacaaagtcagt

SEQ ID NO: 349184 - DNA, 75 bp, synthetic construct
  source 1..75: mol_type = other DNA
atgcagaattaatctatttgccgataaatgccaatggcgtctctagcataatttatgacattatgtgtttaatta

SEQ ID NO: 349185 - DNA, 75 bp, synthetic construct
  source 1..75: mol_type = other DNA
agcagcaccattgtggcaatacgaagaattgcacagcgcagtaatggatgcagagaataagataaaaaatgcgga

SEQ ID NO: 349186 - DNA, 75 bp, synthetic construct
  source 1..75: mol_type = other DNA
gcctttctggtgttcgcttgccgttgatgaagaaaacgcctgctgggacgaactggtgctggtgttgcccgacga

SEQ ID NO: 349187 - DNA, 75 bp, synthetic construct
  source 1..75: mol_type = other DNA
cgtccgttccgtcttgcatgtcgcagttcctgaaaatttagatcgtttctaccaagagagcggtcgtggcggtcg

SEQ ID NO: 349188 - DNA, 75 bp, synthetic construct
  source 1..75: mol_type = other DNA
aggtcgtcaggtacgacgctacttcattgaatgcgagaaacgtttaagacaacaagaaacaaaagtggagaaggt

SEQ ID NO: 349189 - DNA, 75 bp, synthetic construct
  source 1..75: mol_type = other DNA
taaagaacgtcttgataatgccaatagtaaagcaaatgagctgatctcaaatgctaatgacaatgcagtgaaaat

SEQ ID NO: 349190 - DNA, 75 bp, synthetic construct
  source 1..75: mol_type = other DNA
caaagaacgtcttgataatgctaataataaagcaaatgagctaatctcaaatgctaatgacaatgcagtaaaaat

SEQ ID NO: 349191 - DNA, 75 bp, synthetic construct
  source 1..75: mol_type = other DNA
aaaaaagacgatcgcgcagataaaatatttacgctacgcgaactggcattttttattttactgctggtcctcgac

SEQ ID NO: 349192 - DNA, 75 bp, synthetic construct
  source 1..75: mol_type = other DNA
tggacgccgggaactggtaccgccaatctcggcactttcaatgccgatcagtcattcactgtcggcgcggcatac

SEQ ID NO: 349193 - DNA, 75 bp, synthetic construct
  source 1..75: mol_type = other DNA
ctaacaccggaacgggggtccgccctattcaatgatgccgaggagttattggcgaacgggcttggggcagcaaat

SEQ ID NO: 349194 - DNA, 75 bp, synthetic construct
  source 1..75: mol_type = other DNA
tgatagctgaggcctacagccgggatttgcaaaagcctgagctggtatcgttcaaagaggtgagtcgctgggggc

SEQ ID NO: 349195 - DNA, 75 bp, synthetic construct
  source 1..75: mol_type = other DNA
acaggtttgcagcaggcgcggcagcgtattctggcgcttgaaacagcacttagattacatgggctgattgactga

SEQ ID NO: 349196 - DNA, 75 bp, synthetic construct
  source 1..75: mol_type = other DNA
atggctgattcgaatctcaacacccctgttattgtgcaggctacgcggctcgatacatcaatccttccacgcaat

SEQ ID NO: 349197 - DNA, 75 bp, synthetic construct
  source 1..75: mol_type = other DNA
tcaagctgtcgattgtcgggacgtggcccagcggaaccgcaaacaggtcaatgcagctaaccttttccggctctg

SEQ ID NO: 349198 - DNA, 75 bp, synthetic construct
  source 1..75: mol_type = other DNA
tacgctggcgaaggctgcaaaatggtcgaaggaaaatgccagcgtgctggttgatacccactggattggcggcga

SEQ ID NO: 349199 - DNA, 75 bp, synthetic construct
  source 1..75: mol_type = other DNA
caggggcgcttccctccgcgctgtcactttggccgcaatagctgtgcctggcttctttcggatgtgctctggtgg

SEQ ID NO: 349200 - DNA, 75 bp, synthetic construct
  source 1..75: mol_type = other DNA
ccaggaacctgttaaaagttagtacgaccaagaaccctgctaaaataaaagaggccgcattgggtaatgactcca

SEQ ID NO: 349201 - DNA, 75 bp, synthetic construct
  source 1..75: mol_type = other DNA
ctatgaagcaacaaccaatctcaacgtagaactgaaaactccaattcagccagagacgccggttagctttaccac

SEQ ID NO: 349202 - DNA, 75 bp, synthetic construct
  source 1..75: mol_type = other DNA
aataacgataatattgccctctcgtttgatgatacaaactcgacgattgtgctgaaggaccgtagaactaaccat

SEQ ID NO: 349203 - DNA, 75 bp, synthetic construct
  source 1..75: mol_type = other DNA
aaaaccgtgcccgttgagtataaaaacgcgacggtgattacgttgcagccgctggaaacgctggtgtttgaggcg

SEQ ID NO: 349204 - DNA, 75 bp, synthetic construct
  source 1..75: mol_type = other DNA
gccgggaacatcccgaccaggagaatccgccactggcgcatatggcctgtccggtcaatccgctggggctgggct

SEQ ID NO: 349205 - DNA, 75 bp, synthetic construct
  source 1..75: mol_type = other DNA
accggaacccttcacctccctgccgcttgactaccgttacgctttcggcggcgaatgccgcgtggaggcaggcag

SEQ ID NO: 349206 - DNA, 75 bp, synthetic construct
  source 1..75: mol_type = other DNA
cgacaaacacaacgagcgtcattgtgtggtcgccatgaaaaccggcttccggctgaagcaggacgagaatggtca

SEQ ID NO: 349207 - DNA, 75 bp, synthetic construct
  source 1..75: mol_type = other DNA
gttgattccagtgagcatatttttattaccgaaggcggtaacgagtatgatggtgcgaagtgttgggtagttttg

SEQ ID NO: 349208 - DNA, 75 bp, synthetic construct
  source 1..75: mol_type = other DNA
agtgttttctgtttgaggctgacccgcaccacccgcagcgccagcggctgaaaatgctgggcgaccgtaacagca

SEQ ID NO: 349209 - DNA, 75 bp, synthetic construct
  source 1..75: mol_type = other DNA
gccgctaagctatgagcagttctcccacggttggcaggcggtatttgttgcgctacgaccggaagtgatcgccat

SEQ ID NO: 349210 - DNA, 75 bp, synthetic construct
  source 1..75: mol_type = other DNA
ggtaaaaatgaaggtacaggcaactacaaagcaaatggcgatggccatggtttatctgtaacttacactattgac

SEQ ID NO: 349211 - DNA, 75 bp, synthetic construct
  source 1..75: mol_type = other DNA
ctggcgcagcaaatgcggctgaaatttataataaaaatggcaataaagttgagctatacggcaagatggttggtg

SEQ ID NO: 349212 - DNA, 75 bp, synthetic construct
  source 1..75: mol_type = other DNA
cgctgaccgtgtgaactacattgaagttggtacctggtactacttcaataagaacatgaacgtttatactgcata

SEQ ID NO: 349213 - DNA, 75 bp, synthetic construct
  source 1..75: mol_type = other DNA
agcgctgccgaccatatctacttgtcgcaaaatttaggtatgcgcaaaccggaagcgcgaatttaccagcatgtt

SEQ ID NO: 349214 - DNA, 75 bp, synthetic construct
  source 1..75: mol_type = other DNA
cgccgataatatagaaggggctaatcagctaggcattaccagcattctggtgaaagataaaaccaccatcccgga

SEQ ID NO: 349215 - DNA, 75 bp, synthetic construct
  source 1..75: mol_type = other DNA
ggcgtttcatcagcatgagcgtggggaaattagtgatgaagagttcgctgaggcgctgtgtcatgagatggcctt

SEQ ID NO: 349216 - DNA, 75 bp, synthetic construct
  source 1..75: mol_type = other DNA
gtgcagtctctgaccattgccgacagcctgaagttgggtaaagcggtgctgaataagctcggtaaaatcaacaag

SEQ ID NO: 349217 - DNA, 75 bp, synthetic construct
  source 1..75: mol_type = other DNA
cgccactttccggagggggaacagcagttactgcggcgctacagttatgacgccgccgggcagctgaccggcgtg

SEQ ID NO: 349218 - DNA, 75 bp, synthetic construct
  source 1..75: mol_type = other DNA
ccttccgcatccggtcaatgccgccaccggggccaaatacctggccgatgacgatgacttcgatttcagtctgcc

SEQ ID NO: 349219 - DNA, 75 bp, synthetic construct
  source 1..75: mol_type = other DNA
cagctacaacggtcaggacgaactgctgaagacgcggcacagccggcggggggaaacggattacttctatgacac

SEQ ID NO: 349220 - DNA, 75 bp, synthetic construct
  source 1..75: mol_type = other DNA
gggcgcacgcgttatcatcagtgggatgcgcagaaccaggtgacggcgtaccgggacgaggccgggcaggtgatg

SEQ ID NO: 349221 - DNA, 75 bp, synthetic construct
  source 1..75: mol_type = other DNA
gcgagtttgcctacaacgctaaccactgtatgaccatgcaccgccagccgggcggcgagggatattattatcagt

SEQ ID NO: 349222 - DNA, 75 bp, synthetic construct
  source 1..75: mol_type = other DNA
gcgtcaggaggatgccagaacgttccgggatgtggccggggaatatctggaaatggcgggggccatagccctggc

SEQ ID NO: 349223 - DNA, 75 bp, synthetic construct
  source 1..75: mol_type = other DNA
aatatcgatattattctctggcatggttttccttttgccggtgaacacgctcaggaatattgcggcgttcttctg

SEQ ID NO: 349224 - DNA, 75 bp, synthetic construct
  source 1..75: mol_type = other DNA
catgcaggtgcatgagctcagcccggtcaccatggccacattactggcaccctggaatatccgccctgccgtctt

SEQ ID NO: 349225 - DNA, 75 bp, synthetic construct
  source 1..75: mol_type = other DNA
cggcaatgcacacacgtaaataatgccagaatattcccggtactttctttattaccggtggcaatgacagaagaa

SEQ ID NO: 349226 - DNA, 75 bp, synthetic construct
  source 1..75: mol_type = other DNA
cgtatcaacagccagccggcggcacgcagcggggcacgctgtacctgcgaggccagggtggtgaatgagccgggg

SEQ ID NO: 349227 - DNA, 75 bp, synthetic construct
  source 1..75: mol_type = other DNA
gaagatgtaaacctgaactcagtgctcaaggggatggcggcacaaattcgtgctgatgacccgttcatcaagtcg

SEQ ID NO: 349228 - DNA, 75 bp, synthetic construct
  source 1..75: mol_type = other DNA
cagggccgtcacgctcagtccggtacaggcggaatatctggtcacaggaaaaatattaccggctgagttattccg

SEQ ID NO: 349229 - DNA, 75 bp, synthetic construct
  source 1..75: mol_type = other DNA
tgaattacagttgacatctggcggtagtcatttttcatttcataacttcctaaatgaattaaacgacgcgattcc

SEQ ID NO: 349230 - DNA, 75 bp, synthetic construct
  source 1..75: mol_type = other DNA
tgaacgaattaaatgacgcaattccgcagacgctttcctttaaaagaaaaatagaaactatcagaactgtatggc

SEQ ID NO: 349231 - DNA, 75 bp, synthetic construct
  source 1..75: mol_type = other DNA
aaatatagaaaaaatcttctcaatttcttctatagaaaaaatcaggtcagaacttcaggatagaaaaattcttcc

SEQ ID NO: 349232 - DNA, 75 bp, synthetic construct
  source 1..75: mol_type = other DNA
gtgtggtattgaaactcagtctgcaaaacaggaaattgattttggtcagatctctaaatccttcctgcaagaggg

SEQ ID NO: 349233 - DNA, 75 bp, synthetic construct
  source 1..75: mol_type = other DNA
tttcaaaaagttttcttgcaaatgatggtcaatccaagccaatgaacttggatattgaattagttaattgtgaca

SEQ ID NO: 349234 - DNA, 75 bp, synthetic construct
  source 1..75: mol_type = other DNA
tctgggtattgtgaggactactatttatggatgcaaattataaaacttggcaaaattattaatgtgagtgtacca

SEQ ID NO: 349235 - DNA, 75 bp, synthetic construct
  source 1..75: mol_type = other DNA
gtgttgaacttttatgcttctaaaattgatgcgtctttatctttacaaaagatgaatgtcgaagaaaataaatat

SEQ ID NO: 349236 - DNA, 75 bp, synthetic construct
  source 1..75: mol_type = other DNA
tttaatgatttgaatattagaatgccagatgtttttcttgaatgtgcaggaaatacttcagcagaaacaattgca

SEQ ID NO: 349237 - DNA, 75 bp, synthetic construct
  source 1..75: mol_type = other DNA
tttaatgatttgaatatacgagctcctaatatttttcttgaatgcgcaggcgatactcccgcagaaacaatcgct

SEQ ID NO: 349238 - DNA, 75 bp, synthetic construct
  source 1..75: mol_type = other DNA
tgccaacatggtttgatttagataactacactcaatttattggcatgtcagataaagacttattttatcagttgg

SEQ ID NO: 349239 - DNA, 75 bp, synthetic construct
  source 1..75: mol_type = other DNA
ggactgctgcactttgttcaggactggggtcagcacgctttttttaatacgttatggaataccggggcacgcctg

SEQ ID NO: 349240 - DNA, 75 bp, synthetic construct
  source 1..75: mol_type = other DNA
atgcatatagtcttctgttatccggaaaatcgataaagtgtattgatactaataatattagaatacatcataact

SEQ ID NO: 349241 - DNA, 75 bp, synthetic construct
  source 1..75: mol_type = other DNA
atgtggtattgatgctcagtctgctgatcaatctattgattttggacaagtatcaaaattatttctggagaatga

SEQ ID NO: 349242 - DNA, 75 bp, synthetic construct
  source 1..75: mol_type = other DNA
cccgatggtcgcgaattaacgctacactgcccgaatacgggtgcgatgaccggttgtgcaacgcctggcgatacc

SEQ ID NO: 349243 - DNA, 75 bp, synthetic construct
  source 1..75: mol_type = other DNA
aacctgattgatactgcgccaggatataactttggcaatagtgaagttatcgtcggtcaggcgttaaaaaaactg

SEQ ID NO: 349244 - DNA, 75 bp, synthetic construct
  source 1..75: mol_type = other DNA
caggtacgcgaaaatgtcgcggcactgaatatcaacttatcggatgcagacgcaacattgatgagggaaatggca

SEQ ID NO: 349245 - DNA, 75 bp, synthetic construct
  source 1..75: mol_type = other DNA
gaaattagcgacgaagcgttcgcagaggcactgtgtcatgagatggccctgccgctaagctatgagcagttctcc

SEQ ID NO: 349246 - DNA, 75 bp, synthetic construct
  source 1..75: mol_type = other DNA
gaacagcattgcgtcagatagacaaccgaaacatcaagattgatcttactgtaaataacgataatgttgatattc

SEQ ID NO: 349247 - DNA, 75 bp, synthetic construct
  source 1..75: mol_type = other DNA
cggttgtgcaacgcctggcgataccgtctggtattcaacttcagacaacaccaaacggaaatacccacacacctg

SEQ ID NO: 349248 - DNA, 75 bp, synthetic construct
  source 1..75: mol_type = other DNA
atggataagcaatcactgcttgaaacggcgaaacgcctggcgcttgagctgcctttcgtcgagctttgctggccg

SEQ ID NO: 349249 - DNA, 75 bp, synthetic construct
  source 1..75: mol_type = other DNA
gctccagcgtccagttccaaacgatatcgcctacctccagtacacctccggcagcacccgttttccccgtggcgt

SEQ ID NO: 349250 - DNA, 75 bp, synthetic construct
  source 1..75: mol_type = other DNA
actggatctttcctgctggcgcgtcgctggtattggtgctgagccgatctccgcagaacaactccatcaattcgc

SEQ ID NO: 349251 - DNA, 75 bp, synthetic construct
  source 1..75: mol_type = other DNA
tcagtgcactatccccactttggcgctggcgtggatacttaaacagagtgatttaatctccatacttagtggggc

SEQ ID NO: 349252 - DNA, 75 bp, synthetic construct
  source 1..75: mol_type = other DNA
actgggcttattttttgcctttcaattttgatcgcttcagcttttttgcccgtatcaatagctaatttttttggc

SEQ ID NO: 349253 - DNA, 75 bp, synthetic construct
  source 1..75: mol_type = other DNA
ggctgtcatcatggttttccttggtctgattgtcgcaaaactatatccagactggtggaaaggggcattagcaac

SEQ ID NO: 349254 - DNA, 75 bp, synthetic construct
  source 1..75: mol_type = other DNA
aaacacttcctgctaatgcaacagagaaacaacgtcaggaatatcttgcgaaactgcgtgacacgcaggcttaca

SEQ ID NO: 349255 - DNA, 75 bp, synthetic construct
  source 1..75: mol_type = other DNA
acattggcaagcgccctattgccgaaatcaaaccaatggagttactggaagcactacgtaaaatggaaaaacgtg

SEQ ID NO: 349256 - DNA, 75 bp, synthetic construct
  source 1..75: mol_type = other DNA
ttgttatttctgattatagcggagcaatatttgacgctgtttactttaaaaagccaataatacttttgaataata

SEQ ID NO: 349257 - DNA, 75 bp, synthetic construct
  source 1..75: mol_type = other DNA
ttgttggctggaatccatttcaatttttgcatgttaaagaattggccaaagctatacctggagctgtatttataa

SEQ ID NO: 349258 - DNA, 75 bp, synthetic construct
  source 1..75: mol_type = other DNA
gaagaggttgaccttgagaaaggtatatgggagatcccagctgaacggatgaaaatgcgtaggcctcatattgtt

SEQ ID NO: 349259 - DNA, 75 bp, synthetic construct
  source 1..75: mol_type = other DNA
gttttttttgtattctattgttaggctcagtattaattcggggtaataataatcttatttcaccagtggttagac

SEQ ID NO: 349260 - DNA, 75 bp, synthetic construct
  source 1..75: mol_type = other DNA
gcagtaaaggctggcgttttcgctatcgctttgcaggtaagcctaagatgatttcctttggcgtatatggcgatg

SEQ ID NO: 349261 - DNA, 75 bp, synthetic construct
  source 1..75: mol_type = other DNA
ttaaagtgccgttcagcgtgaagtgggggcaaatcaaacagttgctaggttcgcggatgatgatcggcgtttata

SEQ ID NO: 349262 - DNA, 75 bp, synthetic construct
  source 1..75: mol_type = other DNA
tcgcacgggttcgctgaacattgcgcgtaaaacgccgatcgtaatgggaatgctgctgtcgatggtgatggtgtt

SEQ ID NO: 349263 - DNA, 75 bp, synthetic construct
  source 1..75: mol_type = other DNA
ttggttcaaaacgcgtctacttctggtcgatctttatctggtcgatgtttaccttgctgcaaggcttcgtcgata

SEQ ID NO: 349264 - DNA, 75 bp, synthetic construct
  source 1..75: mol_type = other DNA
ctgcaactacgtcaacgttgagtggatgattatcggctttatgcgctggccttcttcggtaagggcattggggcg

SEQ ID NO: 349265 - DNA, 75 bp, synthetic construct
  source 1..75: mol_type = other DNA
cggttcggaaatggccaaagatatcggccttgatcccgtgggaatgggctatgtgttctctgctttctcatgggc

SEQ ID NO: 349266 - DNA, 75 bp, synthetic construct
  source 1..75: mol_type = other DNA
aactcgtgttatcaccaataaaatcgcccatctgatccgcggttgcggttatcaggcgcggcacattgcggcggt

SEQ ID NO: 349267 - DNA, 75 bp, synthetic construct
  source 1..75: mol_type = other DNA
catgacaaggtggttacagatttgtgcatcgttaacgcgcctgtcttccccgcatcgcctgactatgtggagcag

SEQ ID NO: 349268 - DNA, 75 bp, synthetic construct
  source 1..75: mol_type = other DNA
ttccttgcgggttcgtgggcgtgtcacgtttccacgggccgccagtggggaggccgcagggtggcgcatggcgct

SEQ ID NO: 349269 - DNA, 75 bp, synthetic construct
  source 1..75: mol_type = other DNA
cgatggcggcggcattcaccctggtgccgattgttctcatcgcactttacctggcgttcgtgaaacgtctgggag

SEQ ID NO: 349270 - DNA, 75 bp, synthetic construct
  source 1..75: mol_type = other DNA
ctcacactgggcgattttattgtcccgcagctggttggccctccaggatattttatcggcaatatggtttattcc

SEQ ID NO: 349271 - DNA, 75 bp, synthetic construct
  source 1..75: mol_type = other DNA
ccaacagaccgaatgaccttgagtctcacgagaataaaaagtaatgcaggtcgcaaatgggcacatactcgagga

SEQ ID NO: 349272 - DNA, 75 bp, synthetic construct
  source 1..75: mol_type = other DNA
agtgtgggtggcagatgcaccttcccatttaatccactttaacggcgtgcgtttcctcgggccgtatccggccga

SEQ ID NO: 349273 - DNA, 75 bp, synthetic construct
  source 1..75: mol_type = other DNA
ggggccacggtgctggtggttcaccattccggcaaggatgaaacaaagggggcgcgtggttccagtgcatttcgt

SEQ ID NO: 349274 - DNA, 75 bp, synthetic construct
  source 1..75: mol_type = other DNA
gggccaaagcaactggcagacctggcgaatatccgcattgtcgacgatgaacgccgctttgcgcgtgtctatctc

SEQ ID NO: 349275 - DNA, 75 bp, synthetic construct
  source 1..75: mol_type = other DNA
tcctcgtcgtatcaaggcatgggaactggtgaacagtgagcaggtgaaaaatctgtacctggtaaatcgtccaat

SEQ ID NO: 349276 - DNA, 75 bp, synthetic construct
  source 1..75: mol_type = other DNA
gtctctgttatacgtgatgatattaccactctgtttggagagaacggccgcaaaggttttaaacgctggcttgat

SEQ ID NO: 349277 - DNA, 75 bp, synthetic construct
  source 1..75: mol_type = other DNA
acgatatgaaaaagctggggtatgagatgaagcacttcagccgctggttacgcaagctggaaaaagacggggtta

SEQ ID NO: 349278 - DNA, 75 bp, synthetic construct
  source 1..75: mol_type = other DNA
cgcaggaagcgaagcgctggttatctcatgcaccaaaatgaaggacgcggaggaactcaaagaagccgcatatga

SEQ ID NO: 349279 - DNA, 75 bp, synthetic construct
  source 1..75: mol_type = other DNA
tgcacgatcccgctgctacgtgacgacatgaaaaagctgggatatgacacaaaacaccttaaacgatggttagca

SEQ ID NO: 349280 - DNA, 75 bp, synthetic construct
  source 1..75: mol_type = other DNA
catcagctttatctggttgaaagtcatccacgagccaaatcaacatccgggcgtaaatcagaaagagctggacta

SEQ ID NO: 349281 - DNA, 75 bp, synthetic construct
  source 1..75: mol_type = other DNA
cgctgttttttgaatactgcctgacgacaatatgggccttcacctgcctggtcggtttcattatttacgcagtcc

SEQ ID NO: 349282 - DNA, 75 bp, synthetic construct
  source 1..75: mol_type = other DNA
gacaatatgggccttcacctgcctggtcggtttcattatttacgcagtccaacttgccggtgtaccgttaaatat

SEQ ID NO: 349283 - DNA, 75 bp, synthetic construct
  source 1..75: mol_type = other DNA
acacatatcgctgcgacacatactgccggaatattattgtgtacgttatgtttactgcaatttattgtcagcctg

SEQ ID NO: 349284 - DNA, 75 bp, synthetic construct
  source 1..75: mol_type = other DNA
atccctgcatccgacagtggcggatgccctgcgctataccctgaagcagtccggctattcactttgcgccacggg

SEQ ID NO: 349285 - DNA, 75 bp, synthetic construct
  source 1..75: mol_type = other DNA
cgaccggtggatggtgaactacttttcgccccccgccagctggcgttgcaggctggtgagagcgagtattttaaa

SEQ ID NO: 349286 - DNA, 75 bp, synthetic construct
  source 1..75: mol_type = other DNA
atgattaacctgttaatcattgttctgcgtgctgtagtcgcgctgtcaaacgcgctgattgcggtactggagctg

SEQ ID NO: 349287 - DNA, 75 bp, synthetic construct
  source 1..75: mol_type = other DNA
cgcgatgcatggatgattgtgcaacgtatctgtggcgtatgtacgactactcacgcgctctcttccgttcgtgcg

SEQ ID NO: 349288 - DNA, 75 bp, synthetic construct
  source 1..75: mol_type = other DNA
atggtgatcaaagacggtatcatcagcaactaccaggcagttgttccatcaacctggaactctggcccgcgtaac

SEQ ID NO: 349289 - DNA, 75 bp, synthetic construct
  source 1..75: mol_type = other DNA
gcgatgaaactgccgccggaagtgaacctgattgcggtagcgcactacctgcaggcgctggagtgccagcgtgac

SEQ ID NO: 349290 - DNA, 75 bp, synthetic construct
  source 1..75: mol_type = other DNA
cgttaaaagggctgtggaaacagcgcctgcgctgggctcagggcggtgcagaagtattcctcaaaaatatgacaa

SEQ ID NO: 349291 - DNA, 75 bp, synthetic construct
  source 1..75: mol_type = other DNA
tgacacatatcgcagcgacacatgctgccggaatattattgtgtacgttatgtttactgcaatttattgtcagtc

SEQ ID NO: 349292 - DNA, 75 bp, synthetic construct
  source 1..75: mol_type = other DNA
cctggcggtaggcggtgtcgcgaacccaatcaacctcgacggtttgggcgtgctgaaccttgagcgcctgatgta

SEQ ID NO: 349293 - DNA, 75 bp, synthetic construct
  source 1..75: mol_type = other DNA
atgcgtatgaaaactctcccgatatgtcttgccctgacctcactgctgttggggggctgtgcagataaaccctcc

SEQ ID NO: 349294 - DNA, 75 bp, synthetic construct
  source 1..75: mol_type = other DNA
ctggcttcgcagggctggacgctgacagatgtcaaaaacacgctggtcagtgacagtggttcaggtaaaaaagcc

SEQ ID NO: 349295 - DNA, 75 bp, synthetic construct
  source 1..75: mol_type = other DNA
cagatggacgaatgcagcctttgaggccaacgcgctggcaattacggatattaccggaaatgcggcaacttaccc

SEQ ID NO: 349296 - DNA, 75 bp, synthetic construct
  source 1..75: mol_type = other DNA
aatcttgaaacaaccagaaacaagtatgcctttggtttgtactggcgaatagcggaatggccgggtgagggtggt

SEQ ID NO: 349297 - DNA, 75 bp, synthetic construct
  source 1..75: mol_type = other DNA
acgttgacagcaccccgattctggatcgggtgatcgaggcttacggatttacgcagaagttacagctagcagaac

SEQ ID NO: 349298 - DNA, 75 bp, synthetic construct
  source 1..75: mol_type = other DNA
cgtaaaatgataggttacaaccctgacttggcatcagattatgctactggcaaagttcctgatgatgtttcagtt

SEQ ID NO: 349299 - DNA, 75 bp, synthetic construct
  source 1..75: mol_type = other DNA
cgtaaggcgttctctgcgatgttgttgtcgatttccacccagccattactgcagtacacgttcagtgcatcccac

SEQ ID NO: 349300 - DNA, 75 bp, synthetic construct
  source 1..75: mol_type = other DNA
gtgtatgaacatcgcagcggtgtctatcactatcgggtaagtcaggcgtttcatttaacggcggatacgctgacg

SEQ ID NO: 349301 - DNA, 75 bp, synthetic construct
  source 1..75: mol_type = other DNA
tccgaagaaggatggcagtaaaagacttttaggaataccgacagtaagcgatcgaatagcgcagatgacggtgct

SEQ ID NO: 349302 - DNA, 75 bp, synthetic construct
  source 1..75: mol_type = other DNA
gcatgtgggcagagtggcagattttgtttccgggaaagtgacaaaagccgcggtttcttcaggcggaggcgtatc

SEQ ID NO: 349303 - DNA, 75 bp, synthetic construct
  source 1..75: mol_type = other DNA
atgcgtctcgcgtagcgatgatagcttgtgtctggtgtatgaacatcgcagcggtgtttatcattaccgggcaag

SEQ ID NO: 349304 - DNA, 75 bp, synthetic construct
  source 1..75: mol_type = other DNA
cggatgaccatcatcgtccggaaggaggtgacctcattgcgcttgctccgggggaatcaataacgtcagagatgt

SEQ ID NO: 349305 - DNA, 75 bp, synthetic construct
  source 1..75: mol_type = other DNA
gtgccgtttgcaaaccgggtgagcggcaaccgttttgtctggcaggggcgtgagtatcaactgcaaccgaatgtt

SEQ ID NO: 349306 - DNA, 75 bp, synthetic construct
  source 1..75: mol_type = other DNA
cacgcaggctgcagaacacttaccggttcgtatgccccgtctctgctctgcagaacgcctctctgaaagtatggt

SEQ ID NO: 349307 - DNA, 75 bp, synthetic construct
  source 1..75: mol_type = other DNA
aggaggtcagcgcggacgattttaaccgtatctttgccagcggcggcgtgctggatgccttctggacgaagcaac

SEQ ID NO: 349308 - DNA, 75 bp, synthetic construct
  source 1..75: mol_type = other DNA
gcagcagggaacgcgaaaaatcaacgccggcaccggtgaagtgctgaacgcgcagatggaagcggtgatcggtga

SEQ ID NO: 349309 - DNA, 75 bp, synthetic construct
  source 1..75: mol_type = other DNA
ttggcaatatggcctccggagcggtgtctgccacggcaggacttgtgacggctgcacgtaatgaagttgcactgg

SEQ ID NO: 349310 - DNA, 75 bp, synthetic construct
  source 1..75: mol_type = other DNA
cgtctgaacacactggactggcttggtggtcagcgccgggaacaggctgataacgaatggcatgaagcggttaac

SEQ ID NO: 349311 - DNA, 75 bp, synthetic construct
  source 1..75: mol_type = other DNA
cgcgtcattttcccctgccggacgttgttatgtggcgcttgaagagcttcgctggggcgcgtttggtgatgtgat

SEQ ID NO: 349312 - DNA, 75 bp, synthetic construct
  source 1..75: mol_type = other DNA
ggtggcaggggaaattaaagccgacttacgcaccgtcagccatattgttactcgcgctattcggcaactgaaaca

SEQ ID NO: 349313 - DNA, 75 bp, synthetic construct
  source 1..75: mol_type = other DNA
ttgcaggaagagtacgaccttaaaagccgccaacggctctaccgcttcccgcgtgaatttgccgcgctgggcacg

SEQ ID NO: 349314 - DNA, 75 bp, synthetic construct
  source 1..75: mol_type = other DNA
tttcccgccgtgcgctggtcgttgtctgcgtggtggcgttggcgctactggtctggtttctcgggccgctggtgg

SEQ ID NO: 349315 - DNA, 75 bp, synthetic construct
  source 1..75: mol_type = other DNA
gacagcggtacggggaacgcagcaggtggagtacagttttgatgggcggcgggtggtgctggagattaccgctgg

SEQ ID NO: 349316 - DNA, 75 bp, synthetic construct
  source 1..75: mol_type = other DNA
cagcactgagcgtatctacactcgagccctggcttccatggagagcgaagcaccgcaggagttttcgctggttcg

SEQ ID NO: 349317 - DNA, 75 bp, synthetic construct
  source 1..75: mol_type = other DNA
ggtgatggagagcgtggcatccctgtatgaccgcctgcttgaccagttactgctaccgccgttggtgaagcgcat

SEQ ID NO: 349318 - DNA, 75 bp, synthetic construct
  source 1..75: mol_type = other DNA
ctccccggacgtgcagggcgcactgcttacgacgcttcttcaccatatatcgacatatcaacaggtttgacaatc

SEQ ID NO: 349319 - DNA, 75 bp, synthetic construct
  source 1..75: mol_type = other DNA
ctaccaccacggttattacatctgattattccggcagacgcgattttagatcacgcagaaagcgtgcaaaaactg

SEQ ID NO: 349320 - DNA, 75 bp, synthetic construct
  source 1..75: mol_type = other DNA
gttcgcatgcctcgcctctgctctgcagagcgcctctctgaaagtatggtcgatgaaatatttcagaagggggct

SEQ ID NO: 349321 - DNA, 75 bp, synthetic construct
  source 1..75: mol_type = other DNA
gcacagttacatcttgagcagatattctcatggtggagtgccgggcgatatgcgtccttttccccggccggacgt

SEQ ID NO: 349322 - DNA, 75 bp, synthetic construct
  source 1..75: mol_type = other DNA
tggtggcccgcgattgaagcaggtgccgaggcaattttgcaaaccgccagcggttgcggcgcgttcgtcaaagag

SEQ ID NO: 349323 - DNA, 75 bp, synthetic construct
  source 1..75: mol_type = other DNA
ggcccgcgattgaagcaggtgccgaggcaattttgcaaaccgccagcggttgcggcgcgttcgtcaaagagtatg

SEQ ID NO: 349324 - DNA, 75 bp, synthetic construct
  source 1..75: mol_type = other DNA
ccaaaaatggtggacggggccgggtgacggtttacgaaccacagcaagctgccgcacatagcgaacgggcggcga

SEQ ID NO: 349325 - DNA, 75 bp, synthetic construct
  source 1..75: mol_type = other DNA
aaccggtaccgaaaaaaacgcatctggtgaatgtcgccagtgagatgcgtaatgaaccgccccgggtttcctgga

SEQ ID NO: 349326 - DNA, 75 bp, synthetic construct
  source 1..75: mol_type = other DNA
acaaaaacgctctccggcgtgctgaacggtgttgccggtaatattgataatgtggcaacagccgcgggggcgctg

SEQ ID NO: 349327 - DNA, 75 bp, synthetic construct
  source 1..75: mol_type = other DNA
tgttatgtggcacttgaagagcttcgctggggcgcgtttggtgatgtgatacgtcagagcgaaacaggccaggtt

SEQ ID NO: 349328 - DNA, 75 bp, synthetic construct
  source 1..75: mol_type = other DNA
gtggttgattttgcaaacggtattgatgttgcacaggagcatatcagcacggccggggggcgtacgttcttccgg

SEQ ID NO: 349329 - DNA, 75 bp, synthetic construct
  source 1..75: mol_type = other DNA
agatgacaacgtcacttgccaccacaaactacgcgattacccgggtaaacgacagggtcagttcactggtcagtg

SEQ ID NO: 349330 - DNA, 75 bp, synthetic construct
  source 1..75: mol_type = other DNA
acctgcgtgcccaggtctggggcttcaccctgccttacagccgcaggcgtcacgccagcgatccgcagtcgttgc

SEQ ID NO: 349331 - DNA, 75 bp, synthetic construct
  source 1..75: mol_type = other DNA
cagacctgaaaattatcgacgatggtcgctattgtgtccggctgtacaaggcaggccacatcaagccgtcaaata

SEQ ID NO: 349332 - DNA, 75 bp, synthetic construct
  source 1..75: mol_type = other DNA
atacggggctagcgggtcctataaatcattccttgcgggttcgtgggcgtgtcatgtttccactggtcgccagtg

SEQ ID NO: 349333 - DNA, 75 bp, synthetic construct
  source 1..75: mol_type = other DNA
gcgtaatggtgatgagtttatcttcctgaccaacgaagaaaaagagatcgaaaacgagatccgtcacactgacgt

SEQ ID NO: 349334 - DNA, 75 bp, synthetic construct
  source 1..75: mol_type = other DNA
agaagcgggagaactggcgcgaatatctggaacgggagcgggggaaaaagccaggggaagaaaaacaccaccagc

SEQ ID NO: 349335 - DNA, 75 bp, synthetic construct
  source 1..75: mol_type = other DNA
tgtccctcgtcgtatcaaagcatgggaaatcgttaatgatgaacgggtgaaaaatctgtacctggtaaaccgccc

SEQ ID NO: 349336 - DNA, 75 bp, synthetic construct
  source 1..75: mol_type = other DNA
aagaagccgcatatgacttacgcgtggtggagctttttaccgacgctgacggggaattaatcacgtcgctggtgg

SEQ ID NO: 349337 - DNA, 75 bp, synthetic construct
  source 1..75: mol_type = other DNA
cgatatccgtctgatgcgtgaacgtgatggacgtaaccaccgcgacatgtgtgtactgttccgctgggcctgcca

SEQ ID NO: 349338 - DNA, 75 bp, synthetic construct
  source 1..75: mol_type = other DNA
gggaagcggtatgctgagcttgctaggctttttgccggctcaactgcaggacttgtctatgtaaccgcctttccg

SEQ ID NO: 349339 - DNA, 75 bp, synthetic construct
  source 1..75: mol_type = other DNA
ctgacactttggttcccactacttatttggtggacaccactttgtctaattcgtcagattctgaccagacggttc

SEQ ID NO: 349340 - DNA, 75 bp, synthetic construct
  source 1..75: mol_type = other DNA
tgagttgactcaatcaacttgggaaaaggagcgtgacgcctatgacttctatcgagacgaactttcagaagcact

SEQ ID NO: 349341 - DNA, 75 bp, synthetic construct
  source 1..75: mol_type = other DNA
tgcggcagaacgcgcgcgcgctggaagccgacagcatcctgcgcgcctgtgttcactgcggattttgtaccgcaa

SEQ ID NO: 349342 - DNA, 75 bp, synthetic construct
  source 1..75: mol_type = other DNA
aacaagacggaaaaccataccgcgctatggggctgcatccggtcacgcacacagcacggcgacaagtgcactatt

SEQ ID NO: 349343 - DNA, 75 bp, synthetic construct
  source 1..75: mol_type = other DNA
cggcgtggtgatgcttgcgctgctggtctggtttatcggaccgctggtggcgtttgacaccctgcatccgctggt

SEQ ID NO: 349344 - DNA, 75 bp, synthetic construct
  source 1..75: mol_type = other DNA
gcacggagccggtggtggtgatggataccattctggtagtacgaccacgtcaggttcagtttaaatggtccttcg

SEQ ID NO: 349345 - DNA, 75 bp, synthetic construct
  source 1..75: mol_type = other DNA
ttaaattttactatcatggtccacgggataaccgcgagcgctactaccgggtctcatttcgcgaggtccccactc

SEQ ID NO: 349346 - DNA, 75 bp, synthetic construct
  source 1..75: mol_type = other DNA
cgcaaatggaggcggtgatcggtgatgagtgccgtgacgccattgacgggcgctatccctttaccgacagcccgc

SEQ ID NO: 349347 - DNA, 75 bp, synthetic construct
  source 1..75: mol_type = other DNA
agacgctgggtattcgttttccggtctatctggtcgtcaccaagatggatctgctgccgggctttacggagtatt

SEQ ID NO: 349348 - DNA, 75 bp, synthetic construct
  source 1..75: mol_type = other DNA
tgaaaaatattctgctggatctcacgcagcagggaacgcgcaaaatcaacgccggcaccggtgaagtgctgaacg

SEQ ID NO: 349349 - DNA, 75 bp, synthetic construct
  source 1..75: mol_type = other DNA
gtaaaaaccgatgcggcaataccggcgctggaagctatctggcaggaaaaaggcgatattctgcgtaaccagttg

SEQ ID NO: 349350 - DNA, 75 bp, synthetic construct
  source 1..75: mol_type = other DNA
gctaccaatgagtattggatctgcagggtacgacacacagcttgattatgtcgttaagggcgtgattccggctaa

SEQ ID NO: 349351 - DNA, 75 bp, synthetic construct
  source 1..75: mol_type = other DNA
ccgatgagcgttggatctaccggatacgacacgcaactggattacgtggttaaggggattattccggcggtatcg

SEQ ID NO: 349352 - DNA, 75 bp, synthetic construct
  source 1..75: mol_type = other DNA
ccgctatcccgttcggtccgtttatctgtgcatcactgtacattttcactttttttcctggtgccatttttcaca

SEQ ID NO: 349353 - DNA, 75 bp, synthetic construct
  source 1..75: mol_type = other DNA
atatgagtccattcatcatagatatttctacaggagaacatgacgattatatcatacaaacattagatgtaggca

SEQ ID NO: 349354 - DNA, 75 bp, synthetic construct
  source 1..75: mol_type = other DNA
aggcaacactgttggcggaaaaaggccgtgaaaatggcatgcgcgaaaaaacgctgaaggcgcagattgaaggct

SEQ ID NO: 349355 - DNA, 75 bp, synthetic construct
  source 1..75: mol_type = other DNA
atgagcaatcttacttatcttcagggttatcccgagcagctactttcccaggtgcgaacactgattaacgaacag

SEQ ID NO: 349356 - DNA, 75 bp, synthetic construct
  source 1..75: mol_type = other DNA
gatcgtggtgcacgaactggcgcacctgaaggagaaagagcataacaaagcgttttaccagttgtgctgccatat

SEQ ID NO: 349357 - DNA, 75 bp, synthetic construct
  source 1..75: mol_type = other DNA
actcgaacagcgtatgattgtgctgggcgcactggaagcggtcgactgggtagtgtcgtttgaagaagacacgcc

SEQ ID NO: 349358 - DNA, 75 bp, synthetic construct
  source 1..75: mol_type = other DNA
cggaagcgcaaacctacgcgagacgagcgccacgctatccgggactttttaatcagtattgaacgatgggataca

SEQ ID NO: 349359 - DNA, 75 bp, synthetic construct
  source 1..75: mol_type = other DNA
aattaactacaaagcttgaggggcgatatcaatttaaaaaaccatctcagcgacaaaatagtttcactcaacgtc

SEQ ID NO: 349360 - DNA, 75 bp, synthetic construct
  source 1..75: mol_type = other DNA
aaattatcaaataaatataaagagtggcaattcgccatttctgatttaactagcgataactggaaagataagcgc

SEQ ID NO: 349361 - DNA, 75 bp, synthetic construct
  source 1..75: mol_type = other DNA
ccaatccactggacgggattcgcgtattcaaagaagctgagaaagaaatgtcctggctaactttgtctcagctcc

SEQ ID NO: 349362 - DNA, 75 bp, synthetic construct
  source 1..75: mol_type = other DNA
caaagcttcaaatcgtatgtaacgggttgggcgaccctattgcatctcgtcttaccgctaaagattgggctcatt

SEQ ID NO: 349363 - DNA, 75 bp, synthetic construct
  source 1..75: mol_type = other DNA
ttaaaccctgctatcaggagtttaagaagatgctcaaactaacgaatattgaattgacggaagggcagaagacgc

SEQ ID NO: 349364 - DNA, 75 bp, synthetic construct
  source 1..75: mol_type = other DNA
gctgttgtcggtaaatgtaagaccgaagaagagattgttgagcgcggcatgaaactgattgccgattacgaactc

SEQ ID NO: 349365 - DNA, 75 bp, synthetic construct
  source 1..75: mol_type = other DNA
tcgctactgctcggagagtgtaaacggcatgaccaccctgatttagaaactgtggtaagaatttgtctcgccact

SEQ ID NO: 349366 - DNA, 75 bp, synthetic construct
  source 1..75: mol_type = other DNA
aaggtatgcttggctaccggcgcgcgctggagtgaagcggaaaacttacagggccaccaattatcaaaataccgt

SEQ ID NO: 349367 - DNA, 75 bp, synthetic construct
  source 1..75: mol_type = other DNA
tacggcgatgtcgccagactggcaggctctccccgcgccgcgcgccaggtgggtggtgtgttaaaacgtctcccc

SEQ ID NO: 349368 - DNA, 75 bp, synthetic construct
  source 1..75: mol_type = other DNA
caagcgccagcaggcacccgacggcaccccgtatgcggcacgaaagcgccagccggtgcggagcaagaaaggtcg

SEQ ID NO: 349369 - DNA, 75 bp, synthetic construct
  source 1..75: mol_type = other DNA
atgagtgagttaaccgcgctgcaggaacgccttgccggtctgattgccagcctgtcaccggcggcgcgtcggcaa

SEQ ID NO: 349370 - DNA, 75 bp, synthetic construct
  source 1..75: mol_type = other DNA
gccgatatttttgccgccgggctaaagcgcaaagagagccacggtaaagtagtatttggcagcgtgcagtcggtc

SEQ ID NO: 349371 - DNA, 75 bp, synthetic construct
  source 1..75: mol_type = other DNA
aacccgctgaaaacttcggtcaagtagcgatttttgctcagccagtggttgatgactgctgtggataccaccatc

SEQ ID NO: 349372 - DNA, 75 bp, synthetic construct
  source 1..75: mol_type = other DNA
cgcgtcaaagtctttagcacgcatattaatttgagtcatccagcggcatcctggctagcaactcaaacttgcgct

SEQ ID NO: 349373 - DNA, 75 bp, synthetic construct
  source 1..75: mol_type = other DNA
gtggggcatggaacttgtaaagcagccaaaagcgctaggcatttaattgaaagtaaagagaaaaacagaagtagt

SEQ ID NO: 349374 - DNA, 75 bp, synthetic construct
  source 1..75: mol_type = other DNA
catctctggcaatgcgggctaagcatggatgagctggcggaaatggggctgacgctgggcgcagatgttcctgtc

SEQ ID NO: 349375 - DNA, 75 bp, synthetic construct
  source 1..75: mol_type = other DNA
attcgcctgttaacgcccgttgaaggcgtggaaaacgaagataacctgattgttcgcgcggcacgcttgctgatg

SEQ ID NO: 349376 - DNA, 75 bp, synthetic construct
  source 1..75: mol_type = other DNA
ggagctgttcctagcgctgcgtaccgcattacggcaaggcgacattcccaaagcgcagcgtttgcagcagcagat

SEQ ID NO: 349377 - DNA, 75 bp, synthetic construct
  source 1..75: mol_type = other DNA
aaggtattgctgcgtaaaagtttacccgtaccaaacttattgagtttctggcaggctgtgcctcgtctaccgttg

SEQ ID NO: 349378 - DNA, 75 bp, synthetic construct
  source 1..75: mol_type = other DNA
tagatcttggcaagcattcctttcacattcactgccaagataagtcaggcaaggtattgctgcgtaaaagtttac

SEQ ID NO: 349379 - DNA, 75 bp, synthetic construct
  source 1..75: mol_type = other DNA
aactgaggaacatgacacacgaagagtcaccatggagatcaaactatattgagggtgttggtggttctgaaatta

SEQ ID NO: 349380 - DNA, 75 bp, synthetic construct
  source 1..75: mol_type = other DNA
cagatatcaagatgaccatggtatatgcacatttttcccctgaacatcttgaagatgcagtaaccaaaaacccac

SEQ ID NO: 349381 - DNA, 75 bp, synthetic construct
  source 1..75: mol_type = other DNA
gagctgcagaatgccgttctggttgatgagattggttttacgttcagggagacagatgtttctgatgacggagaa

SEQ ID NO: 349382 - DNA, 75 bp, synthetic construct
  source 1..75: mol_type = other DNA
tggaaaatcagagacggaaaaagcggaagacagtttttcccggctactgaagcagcagaaagagcaactggcact

SEQ ID NO: 349383 - DNA, 75 bp, synthetic construct
  source 1..75: mol_type = other DNA
atgcgccgtgacggtatcgggattaacggcgtggatatgcgcgatatatgccgctaccccccctcaacagtaata

SEQ ID NO: 349384 - DNA, 75 bp, synthetic construct
  source 1..75: mol_type = other DNA
gcggtgtcgatttttaactccgcccaatacttcgcaacggtgatcttcgcgccgattatgggctggctgactcat

SEQ ID NO: 349385 - DNA, 75 bp, synthetic construct
  source 1..75: mol_type = other DNA
tttatgttggtgttcatgccttaatcgcggtactgagctacctggtgctggtgggcgatatcaagcgtatcgagc

SEQ ID NO: 349386 - DNA, 75 bp, synthetic construct
  source 1..75: mol_type = other DNA
tggttgatgagattggttttacgttcagtgagtcaggtgtttctgctgacggggagcctgaatacacgcgagacg

SEQ ID NO: 349387 - DNA, 75 bp, synthetic construct
  source 1..75: mol_type = other DNA
gactggctgcatgggctgacgatgaagcgttatcagtgacacaaaccagggcagaacgccacatgttacagacag

SEQ ID NO: 349388 - DNA, 75 bp, synthetic construct
  source 1..75: mol_type = other DNA
actgaacgccccgtgtcacagtcagtaccaaccgcacagataaccaatcagatggccggaaatatcagggcgtta

SEQ ID NO: 349389 - DNA, 75 bp, synthetic construct
  source 1..75: mol_type = other DNA
ggcgttatcagtgacacaaaccaggacagaacgccccgcgtcacagccagtaccaaccgcacagataaccagtca

SEQ ID NO: 349390 - DNA, 75 bp, synthetic construct
  source 1..75: mol_type = other DNA
ctgatgtaattagtaaattattgcttactaaatcattgcattggaaatatgaagaagaagttagaataataaagc

SEQ ID NO: 349391 - DNA, 75 bp, synthetic construct
  source 1..75: mol_type = other DNA
cggaatgtctcatagcgcgctggcggcgactcctgcggcgaaaccggcgacggtagaaaccaaagcggaagcacc

SEQ ID NO: 349392 - DNA, 75 bp, synthetic construct
  source 1..75: mol_type = other DNA
tggctggacagccttacaccagaagcgcgcaaaagcggccaacgcgtggcttttctggccgggctggcacttctg

SEQ ID NO: 349393 - DNA, 75 bp, synthetic construct
  source 1..75: mol_type = other DNA
gcattaaaaaccctgcactccaccgggctggtcgtgaacatcgccacgctggcgcggttgaatgtcctgcgggcc

SEQ ID NO: 349394 - DNA, 75 bp, synthetic construct
  source 1..75: mol_type = other DNA
cgaagctggattgtgacgcggagcagatgattgcttcccagtttggtctgcgcgctattccgaccgtgtatctgt

SEQ ID NO: 349395 - DNA, 75 bp, synthetic construct
  source 1..75: mol_type = other DNA
aggagatcctcgctgcgctggggaccggtgatgcgctggcgtcgaagtatcgccgccagttgtacgcgttgttgt

SEQ ID NO: 349396 - DNA, 75 bp, synthetic construct
  source 1..75: mol_type = other DNA
atcccggtttctgcactggtatcgcgatttaccgtggaacccgcggtgcagcagcgttttgaaaacgcctcaaag

SEQ ID NO: 349397 - DNA, 75 bp, synthetic construct
  source 1..75: mol_type = other DNA
gtattaagagatattctgggccatgccgatataaaaatgacgatgatttacgctcactttgcccctaatcatctt

SEQ ID NO: 349398 - DNA, 75 bp, synthetic construct
  source 1..75: mol_type = other DNA
atgacgatcagaaaacagccgaacggaaaatggttgtgtgagtgctacccgaacgggcgcgacggcaaacgcgtg

SEQ ID NO: 349399 - DNA, 75 bp, synthetic construct
  source 1..75: mol_type = other DNA
agaaaaaccgtactgtgccgatatctcaggatctgtatgatgaactccccaaaaacagaagaaagttattcacgc

SEQ ID NO: 349400 - DNA, 75 bp, synthetic construct
  source 1..75: mol_type = other DNA
gcgaacaggtgaactacgataccttcatcagttacgcacagattgacgcgtggagcacccagaagaactttcagc

SEQ ID NO: 349401 - DNA, 75 bp, synthetic construct
  source 1..75: mol_type = other DNA
gatgaccctgacccgtcgcgatgatgaaaacaaactggtggcaaaaggtgactatggtaacccggatgccatggt

SEQ ID NO: 349402 - DNA, 75 bp, synthetic construct
  source 1..75: mol_type = other DNA
ccaggaaggtgaaaaagtcctgattgacaccagcggccccattgccagcacgaacgcaacgagcgacggagtgaa

SEQ ID NO: 349403 - DNA, 75 bp, synthetic construct
  source 1..75: mol_type = other DNA
gaaagtaccgaatttacgaaaagaattaatgtaatcggtgtaactgaccagaaaggcgaaaaagttctcctggac

SEQ ID NO: 349404 - DNA, 75 bp, synthetic construct
  source 1..75: mol_type = other DNA
atgaagtctcgtcagtaccagtgcgaacaggtgaactacgatacctttatttcgtacccacagcttgatacctgg

SEQ ID NO: 349405 - DNA, 75 bp, synthetic construct
  source 1..75: mol_type = other DNA
cggaactgatggccggtcagttgattacctcctcacgcctgattggtggtctgccggtatatctcgcgccgttct

SEQ ID NO: 349406 - DNA, 75 bp, synthetic construct
  source 1..75: mol_type = other DNA
actaatggactgattgatactggttttgcgcggctcactgccgatggtgaatgggttaacaatccggggaatgaa

SEQ ID NO: 349407 - DNA, 75 bp, synthetic construct
  source 1..75: mol_type = other DNA
agcggtaagggaagcattcagttcgcggggcaaccactggaagcatggtctgcaacaaaactcgcgctgcatcgc

SEQ ID NO: 349408 - DNA, 75 bp, synthetic construct
  source 1..75: mol_type = other DNA
gccgctttctggcgaggttcgggctggggagatcctgcacctggtggggccgaatggcgcgggtaagagtacctt

SEQ ID NO: 349409 - DNA, 75 bp, synthetic construct
  source 1..75: mol_type = other DNA
ggaacagagtggtgttgagttaaatatgccgccaatggacggcgccgagtggctggcgctattccagaaaggcgc

SEQ ID NO: 349410 - DNA, 75 bp, synthetic construct
  source 1..75: mol_type = other DNA
gcgcgacctataacgtagagctgaacggcgatctgaagaatgtgagtagtcacttaccttcgccgttagccaaac

SEQ ID NO: 349411 - DNA, 75 bp, synthetic construct
  source 1..75: mol_type = other DNA
ctgcgtattgctttaccgcatcttgacgcctggcgtccggaaatcctcaacaaaatagaatccgcgactggcatg

SEQ ID NO: 349412 - DNA, 75 bp, synthetic construct
  source 1..75: mol_type = other DNA
ggccaggtcattggctatgtggcattcagtccggtagatgtgcagggcgaagacctgcaatgggttggcatggct

SEQ ID NO: 349413 - DNA, 75 bp, synthetic construct
  source 1..75: mol_type = other DNA
gctgcgtcgttcattcgaaagtgatgcggaagcgaagctggttcacgatctgcgtgaagatggctttctgacgct

SEQ ID NO: 349414 - DNA, 75 bp, synthetic construct
  source 1..75: mol_type = other DNA
cagcgccggtacgcttgcgcgcagcgacgagctggcgcaatacggcatcattcacgatccgcacgcctcttcacg

SEQ ID NO: 349415 - DNA, 75 bp, synthetic construct
  source 1..75: mol_type = other DNA
aacccatgaacagccttgatgttgcccagcaaagtgcgttagacaaaattctgagcgcgctgtgccagcaaggac

SEQ ID NO: 349416 - DNA, 75 bp, synthetic construct
  source 1..75: mol_type = other DNA
atgccgcagacagaaaatgcagtgacttcctcatcaggcactaagcgtgcataccggaaaggtaaccctgttccg

SEQ ID NO: 349417 - DNA, 75 bp, synthetic construct
  source 1..75: mol_type = other DNA
tgacattgtggtgatagaacgcggcaggctgcatgcggtggcctctgacgttaacgatccggcaacgacgtgtac

SEQ ID NO: 349418 - DNA, 75 bp, synthetic construct
  source 1..75: mol_type = other DNA
cgcttcaggcggcagacaagacccgttttcaggcatcgtggagcgatctggcctggaagcaatggaaattattac

SEQ ID NO: 349419 - DNA, 75 bp, synthetic construct
  source 1..75: mol_type = other DNA
tgcatcgtgctgccatgaacgccacaacgctttgtaaaaacacgctcgtggtcgccatttccagttcaggatcca

SEQ ID NO: 349420 - DNA, 75 bp, synthetic construct
  source 1..75: mol_type = other DNA
aacgctaagcaaagacacgctggtagtggcaatatccagttcaggctccacacgcgatctgctgcatgtggttaa

SEQ ID NO: 349421 - DNA, 75 bp, synthetic construct
  source 1..75: mol_type = other DNA
gcgatacgttaacgctgaccaatggactgattgatactggtttctcgcggcttactgccgatggtgaatgggtta

SEQ ID NO: 349422 - DNA, 75 bp, synthetic construct
  source 1..75: mol_type = other DNA
gatccgaccaaagcctccgaaatgctgaaaggcgtttcgacctggcatctgaacagcccggaagagttcaccaaa

SEQ ID NO: 349423 - DNA, 75 bp, synthetic construct
  source 1..75: mol_type = other DNA
atacctgatcaaaggcattcaggaaagcgcgaagcactcctggtataaagacgaagcgccgcaggcaccgtggga

SEQ ID NO: 349424 - DNA, 75 bp, synthetic construct
  source 1..75: mol_type = other DNA
attgtgctctcgcgcgcggactttcatgcgctggagaagctgctggagcagaaggtaacctgggagcaggtggtc

SEQ ID NO: 349425 - DNA, 75 bp, synthetic construct
  source 1..75: mol_type = other DNA
gttctcccttgaaggctggatgacgatcgataaaggcgatgtaaccggcggcgacgtctggctgaaacagggcgg

SEQ ID NO: 349426 - DNA, 75 bp, synthetic construct
  source 1..75: mol_type = other DNA
atgcgctggcagtttcgcgacctcactttctggcagctgcgctttcgcaccaacactcctatcaccagcggcggt

SEQ ID NO: 349427 - DNA, 75 bp, synthetic construct
  source 1..75: mol_type = other DNA
acagtaaaacgctcccgccgttgccggaacaaagtggcgttgaactcaatatgccgccgatgaatggtgccgagt

SEQ ID NO: 349428 - DNA, 75 bp, synthetic construct
  source 1..75: mol_type = other DNA
ggatgtctggcaaagcctgttacatatgcgctggcagtttcgtgacctcactttctggcagctgcgctttcgcac

SEQ ID NO: 349429 - DNA, 75 bp, synthetic construct
  source 1..75: mol_type = other DNA
caaaattgaatccgcgacgggtatgccggtggtagccagtcagctctccgccagttggcaaaattttggaccaac

SEQ ID NO: 349430 - DNA, 75 bp, synthetic construct
  source 1..75: mol_type = other DNA
gtacaccgatgttgtcgctgggaaatcagcaatggaataacctgagcattgtttcgcaaccgatggcaaatggta

SEQ ID NO: 349431 - DNA, 75 bp, synthetic construct
  source 1..75: mol_type = other DNA
gctggctgcacagcgcgcagtcactacagcagcggctgagccagaacctcaaccacggctgcacagcgcgcagtc

SEQ ID NO: 349432 - DNA, 75 bp, synthetic construct
  source 1..75: mol_type = other DNA
actggatgattgccaacattccggtgagtctgcgtgtgggcatcaccagcggtatcggtctgttcattggtatga

SEQ ID NO: 349433 - DNA, 75 bp, synthetic construct
  source 1..75: mol_type = other DNA
cgagcgtgatgacggtagtgggtcatgtggatttagccgggtcattaaacctcggtctggcaggggtaattttct

SEQ ID NO: 349434 - DNA, 75 bp, synthetic construct
  source 1..75: mol_type = other DNA
gggctggatgctgggtgatgtgcactacaacggcattgtctccgcgccgccgagcgtgatgacggtagtgggtca

SEQ ID NO: 349435 - DNA, 75 bp, synthetic construct
  source 1..75: mol_type = other DNA
tgtagatttagccgggtcgtttaacctcgggctggcaggggtgattttctctttcatgctggtcaacttgtttga

SEQ ID NO: 349436 - DNA, 75 bp, synthetic construct
  source 1..75: mol_type = other DNA
cttctggccaggggatgctggaacgcgtgtttaaactgcgcgatcatggcacgacggcacggaccgaagtgatcg

SEQ ID NO: 349437 - DNA, 75 bp, synthetic construct
  source 1..75: mol_type = other DNA
cgtgtttaaactgcgcgaacatggcacaacggcacggaccgaagtgatcgccggttttaccaccttcctgacgat

SEQ ID NO: 349438 - DNA, 75 bp, synthetic construct
  source 1..75: mol_type = other DNA
ccccgacgaaggacactatattggtcctaaagaaacacttaaaaaatttcagatacatcattttattgctattga

SEQ ID NO: 349439 - DNA, 75 bp, synthetic construct
  source 1..75: mol_type = other DNA
tttcctgctggctataatagcttatttattccgcctaaaagtccacctgccagtaatcttaagcctgaaccgcta

SEQ ID NO: 349440 - DNA, 75 bp, synthetic construct
  source 1..75: mol_type = other DNA
ttctggggaactgacattcacggcaagcctcaggtgtatggtgttcatacgggtgaaggtacgccgtatgaaaac

SEQ ID NO: 349441 - DNA, 75 bp, synthetic construct
  source 1..75: mol_type = other DNA
cgtggcaagtcgggatgggcgcaatcttctggggcgcgattggtctgctgttactgacgattttccgcgttcgct

SEQ ID NO: 349442 - DNA, 75 bp, synthetic construct
  source 1..75: mol_type = other DNA
ctgtctgattgctgcattcggcagtattatgatggggctgtttgctaacctgccagttgcactggcacccgctat

SEQ ID NO: 349443 - DNA, 75 bp, synthetic construct
  source 1..75: mol_type = other DNA
ggggggcgtaccggcctgacggcagtcgttgttggtctgctgttcctgctggttatcttcctgtcgccgctggcg

SEQ ID NO: 349444 - DNA, 75 bp, synthetic construct
  source 1..75: mol_type = other DNA
actgtatacctcctggacgctaagttttaccgcgccaaccagtgaagaggcgcagaccgttttgagcgggtatat

SEQ ID NO: 349445 - DNA, 75 bp, synthetic construct
  source 1..75: mol_type = other DNA
acaactggaacaccggttacggcggcgcggagttaggcttaagttacccgatcaccaaacatgtgcgcctttata

SEQ ID NO: 349446 - DNA, 75 bp, synthetic construct
  source 1..75: mol_type = other DNA
ctttttatctctacccggtgctcggtacgttgggagcgggcagtctgatgctgtttgtggtgggggaacctgtcg

SEQ ID NO: 349447 - DNA, 75 bp, synthetic construct
  source 1..75: mol_type = other DNA
cggtcgttggcggattgatagccggttatctgatgcgctgggtgaaaaatcacttgcgtcttagcagtaaattca

SEQ ID NO: 349448 - DNA, 75 bp, synthetic construct
  source 1..75: mol_type = other DNA
cccgacgaatcatcctggccgaacatgaccgaaagtacccccttcccattgacgccagtacagcacgcctacctg

SEQ ID NO: 349449 - DNA, 75 bp, synthetic construct
  source 1..75: mol_type = other DNA
tacgactgggcggaaaacgcgcgtaaggatgaagtaaagttccagttgagcctggcgtttccgctgtggcgtggg

SEQ ID NO: 349450 - DNA, 75 bp, synthetic construct
  source 1..75: mol_type = other DNA
ggtacaatcatgactctaacgggcgttccgacccgacgtcccgtagctggaaccgtatctatactcgtctgatgg

SEQ ID NO: 349451 - DNA, 75 bp, synthetic construct
  source 1..75: mol_type = other DNA
tcggtaaaagctcagaaaaacttcgtgcaaaaactgaacggcagatacaggatgcacaggagcgaatcagcgcac

SEQ ID NO: 349452 - DNA, 75 bp, synthetic construct
  source 1..75: mol_type = other DNA
cccgtaaaccgttaccggcctcacttccccgtgaaacccgggttatccggaccggaagaggaatgctgtcctgcc

SEQ ID NO: 349453 - DNA, 75 bp, synthetic construct
  source 1..75: mol_type = other DNA
cgaaacacaacgtccgaaactggcctgttgccggtgcgaccatatcgtgcaggctccggtgccttcaaaacccat

SEQ ID NO: 349454 - DNA, 75 bp, synthetic construct
  source 1..75: mol_type = other DNA
actgctgacagcgctgaccacgcgcctggcggatgatgagattcgggcgcgtatacagtcggcgacgacgcctga

SEQ ID NO: 349455 - DNA, 75 bp, synthetic construct
  source 1..75: mol_type = other DNA
cgatcagggtgaataagcaggatcacaataaacgtgcgttcacgcatatgggcgacgcccttcgctgggccggtg

SEQ ID NO: 349456 - DNA, 75 bp, synthetic construct
  source 1..75: mol_type = other DNA
atgctcgtgaggttattcagcatgttctgaacacgcatccgcatattattccatcagtgttagtaccgaatgtga

SEQ ID NO: 349457 - DNA, 75 bp, synthetic construct
  source 1..75: mol_type = other DNA
gcagaagtcgaaaatgacgattcctcttttgatcttctctgtaaaattcgcacaggagaaacagtgacgacaaaa

SEQ ID NO: 349458 - DNA, 75 bp, synthetic construct
  source 1..75: mol_type = other DNA
aggcacaggccgaaaaactggttaaatcagggaaaaccgatttgattaagggatttaaaaagaaaagtggtggaa

SEQ ID NO: 349459 - DNA, 75 bp, synthetic construct
  source 1..75: mol_type = other DNA
ggtgactgcgcatactgctataatcccgacagccagtgtgcctgatgttaacgcactcagcaccgacgagcgcaa

SEQ ID NO: 349460 - DNA, 75 bp, synthetic construct
  source 1..75: mol_type = other DNA
cacagttgaagcggcagcaacagatgataaaaaaacggctgcaccgttgccctttaacctggtacgacttcagca

SEQ ID NO: 349461 - DNA, 75 bp, synthetic construct
  source 1..75: mol_type = other DNA
ggcggcattggtacgccagctacccgcgcagccattctggaaacgctgaagaaaagaaactatatcacgctggaa

SEQ ID NO: 349462 - DNA, 75 bp, synthetic construct
  source 1..75: mol_type = other DNA
cgattaaaaaattgttgaaggataaagataaagacaaaaaagatgaacatggcggcattggtacgccagctaccc

SEQ ID NO: 349463 - DNA, 75 bp, synthetic construct
  source 1..75: mol_type = other DNA
agaaacagtgacgacaaaagaagtggttgtgaatgagaagaaaacaacgccaccgccattattcaccgaagccac

SEQ ID NO: 349464 - DNA, 75 bp, synthetic construct
  source 1..75: mol_type = other DNA
cagcgtggtgctgatgttatcagggcgaactggaaaccaggggaatttgctccgctgacagaccgtaaattactt

SEQ ID NO: 349465 - DNA, 75 bp, synthetic construct
  source 1..75: mol_type = other DNA
tgatgtgaccgaaattattcatgctggcgatcctgatgacgaaggacagctacttgtcgatgaggtcctggaata

SEQ ID NO: 349466 - DNA, 75 bp, synthetic construct
  source 1..75: mol_type = other DNA
ggggtgacaaatcttgttttattcaaccccccaatagcagcaacttaaccaccggaacggttattttaccgtgta

SEQ ID NO: 349467 - DNA, 75 bp, synthetic construct
  source 1..75: mol_type = other DNA
aaagtaaggcgtttaacagtgcaaagataacggcacatacagctataattccgaccgtcagtgtacctgatatta

SEQ ID NO: 349468 - DNA, 75 bp, synthetic construct
  source 1..75: mol_type = other DNA
aaagggaaacttattccgactgataccggatatgcgcttattgatgccctgcctggtatagcggttaatcctgat

SEQ ID NO: 349469 - DNA, 75 bp, synthetic construct
  source 1..75: mol_type = other DNA
cattcagtgtggtgatgagtcgttttatgcccgtgccaggaaaactacagacagcggatttgaagcgtttcttgg

SEQ ID NO: 349470 - DNA, 75 bp, synthetic construct
  source 1..75: mol_type = other DNA
atgagactttttattgcagaaaaacccgcagtagcaaatgatattgttaaggcacttggtggcaattttacccgc

SEQ ID NO: 349471 - DNA, 75 bp, synthetic construct
  source 1..75: mol_type = other DNA
gctgaagaaaagaaactatatcacgctggaaaaagggaaacttattcctactgataccggatatgcgcttattga

SEQ ID NO: 349472 - DNA, 75 bp, synthetic construct
  source 1..75: mol_type = other DNA
aggttaaaacgattctcgaacttatcagacgtggagacgtgactgaaattgttcacgctggcgatcctgatgatg

SEQ ID NO: 349473 - DNA, 75 bp, synthetic construct
  source 1..75: mol_type = other DNA
aaggatttgttagttcaaaaacgaataagaatttctcggctaaggttaaacttgttgataaaacggccggaaagc

SEQ ID NO: 349474 - DNA, 75 bp, synthetic construct
  source 1..75: mol_type = other DNA
taaagacaaaaaagatgaacatggcggcattggtacgccagctacccgcgcggctatgcttgaagccctgaaaaa

SEQ ID NO: 349475 - DNA, 75 bp, synthetic construct
  source 1..75: mol_type = other DNA
gaagattgaagcagcagcgccagcaggccaatctcaacgcctgaatgctccctgcccttcctgtggtaagcagat

SEQ ID NO: 349476 - DNA, 75 bp, synthetic construct
  source 1..75: mol_type = other DNA
cggcttcccttgcaggaaaaccagcgacagttgaagcagcagcaacagacgataaaaaaacggctgcgccattgc

SEQ ID NO: 349477 - DNA, 75 bp, synthetic construct
  source 1..75: mol_type = other DNA
tgccctgaagtcagttttcgatcagccaatgaatgttgatacaacacgtaaaagcaaggcttttgacagcgcgaa

SEQ ID NO: 349478 - DNA, 75 bp, synthetic construct
  source 1..75: mol_type = other DNA
caaactggaaaccaggcgaatttgctccgctgacagatcgtaaattgattgataaggcatgggcaaacggaacgg

SEQ ID NO: 349479 - DNA, 75 bp, synthetic construct
  source 1..75: mol_type = other DNA
cgagcagggcgtgggtgaattaacggcgtccacaccactgcaagaacaagctgttgccgatgcgcttgatagtga

SEQ ID NO: 349480 - DNA, 75 bp, synthetic construct
  source 1..75: mol_type = other DNA
caccggtgttaaaatcggtacaccgtttagcgacctttacagcaaagcatttggcaattgccaaaaagctgatgg

SEQ ID NO: 349481 - DNA, 75 bp, synthetic construct
  source 1..75: mol_type = other DNA
ggcggtattggtacgccagctacacgcgctgccattctggaaacgctgaagaagagaaactatatcacgctcgaa

SEQ ID NO: 349482 - DNA, 75 bp, synthetic construct
  source 1..75: mol_type = other DNA
ccgcagtagcaaatgatattgttaaggctcttgggggcaatttcacccgtcatgatggctggtttgaaagtgata

SEQ ID NO: 349483 - DNA, 75 bp, synthetic construct
  source 1..75: mol_type = other DNA
gcatctgccggggatcgacgattattacgagccgttcgattttgattatcagaacctgcataccgcgccggaagg

SEQ ID NO: 349484 - DNA, 75 bp, synthetic construct
  source 1..75: mol_type = other DNA
tgcgcgaaacggcgttgcgccttacatcccggcgtcgttttgccgggatgccaggagcgcaggccacggcgcgac

SEQ ID NO: 349485 - DNA, 75 bp, synthetic construct
  source 1..75: mol_type = other DNA
gacgtttcttacccgccttgatcaggctccagcgccaaaccccgcgctgcgtaaaactatgcagacccctgcgcc

SEQ ID NO: 349486 - DNA, 75 bp, synthetic construct
  source 1..75: mol_type = other DNA
tggattagttggtggaggcggaaaggagcaatatgttgagaatttagcgctttgggaaaatattataaaaaccgc

SEQ ID NO: 349487 - DNA, 75 bp, synthetic construct
  source 1..75: mol_type = other DNA
ggcttcccgactgactgggaaaaccaggaaaaatacaaaggcggctggatccgtaaaatcaacggcaaactgcag

SEQ ID NO: 349488 - DNA, 75 bp, synthetic construct
  source 1..75: mol_type = other DNA
ggatggcgaaaatcgaaaaagggccgaactgggaagatgacctgggcggtgagtttgacaagctggcgaaagaca

SEQ ID NO: 349489 - DNA, 75 bp, synthetic construct
  source 1..75: mol_type = other DNA
gttacgcttttaatgcagtaccttgctgaggtcatgtataacggtttacctgctgatttctcccatttaatggcg

SEQ ID NO: 349490 - DNA, 75 bp, synthetic construct
  source 1..75: mol_type = other DNA
atgcctttattattaggtattcctgcattgttgcgttttcttattggtcttgttcctttgcttattggctatgcg

SEQ ID NO: 349491 - DNA, 75 bp, synthetic construct
  source 1..75: mol_type = other DNA
tcgcccaggtcgaagagatgtatcgttacctcgccattgccaactatgaagatcgtttcgtcatcccgacaagcc

SEQ ID NO: 349492 - DNA, 75 bp, synthetic construct
  source 1..75: mol_type = other DNA
tcaggatcgattctgatgattaccagctatttttgaatcgtctggatcagccccccgcgcccaatgctgcattac

SEQ ID NO: 349493 - DNA, 75 bp, synthetic construct
  source 1..75: mol_type = other DNA
gcatcgctcattcatcctggcatttgttgctatgacatgttctatcagaaaggaaaaacgccttttctggcatgg

SEQ ID NO: 349494 - DNA, 75 bp, synthetic construct
  source 1..75: mol_type = other DNA
atccgatagcccacagcaaatcgccatttattcatcagcaatttgcacagcaattgcatattgaacatccctatg

SEQ ID NO: 349495 - DNA, 75 bp, synthetic construct
  source 1..75: mol_type = other DNA
tattgcgttagagcaaatcagccctatataaatgctgggtatgttaatgatattgcagtctttggtccattatat

SEQ ID NO: 349496 - DNA, 75 bp, synthetic construct
  source 1..75: mol_type = other DNA
cccgacgtacggcagaaatcatcgcccaggcttgcggctgtgacatcatctttgattcccgcctgcgtgagttga

SEQ ID NO: 349497 - DNA, 75 bp, synthetic construct
  source 1..75: mol_type = other DNA
atgttacaggtatacctagtccgccacggtgaaacgcagtggaacgccgaacgacgtattcagggccagtctgac

SEQ ID NO: 349498 - DNA, 75 bp, synthetic construct
  source 1..75: mol_type = other DNA
tattgattctctgaccgaagaagaagagaactggcgtcgccagttagtgaatggcaccgttgacgggcgtattcc

SEQ ID NO: 349499 - DNA, 75 bp, synthetic construct
  source 1..75: mol_type = other DNA
ttaaaacgattctcgaacttatcagacgtgaagacgtgactgaaattgttcacgctggcgatcctgatgatgagg

SEQ ID NO: 349500 - DNA, 75 bp, synthetic construct
  source 1..75: mol_type = other DNA
atgccaatggagtttgaatgggatgaaaacaaggccaaaagtaatcgggtgaaacatggcatccgctttgaagat

SEQ ID NO: 349501 - DNA, 75 bp, synthetic construct
  source 1..75: mol_type = other DNA
ggaaacaagcaccgggaaaaccacctatatgaaaatgttgatagggtatattcctgtacatcttcggatatcaac

SEQ ID NO: 349502 - DNA, 75 bp, synthetic construct
  source 1..75: mol_type = other DNA
tggtgatggttttggtttatttcacatcaacggaaccgacagcaccgccatcagctggtcgtcgtcagagatgac

SEQ ID NO: 349503 - DNA, 75 bp, synthetic construct
  source 1..75: mol_type = other DNA
cgccagacgcgtcaccacatacggggatttctccttcaccgttgacgaccgttaccgcgtggacgtgaaaggcga

SEQ ID NO: 349504 - DNA, 75 bp, synthetic construct
  source 1..75: mol_type = other DNA
atgaaagataaatacattgccaaaatcaaaaaactgttacgccttgccagaggaacatcaagcccggaagaagcc

SEQ ID NO: 349505 - DNA, 75 bp, synthetic construct
  source 1..75: mol_type = other DNA
tgggtggttacggttgcaaaaccgttcagggcaaacaaacaggctgaatgcgattatctgttcagtgctctgcgt

SEQ ID NO: 349506 - DNA, 75 bp, synthetic construct
  source 1..75: mol_type = other DNA
atggacggatgttgccagcaagtgaacaggaggcgttacgtaatgtagcaagaagcaatcagagtgatgtgcttt

SEQ ID NO: 349507 - DNA, 75 bp, synthetic construct
  source 1..75: mol_type = other DNA
aatggtgctcgttctggaaatgaccacccacagcgtggtcgtgaaagggattaaaacagcagaagactttatcgc

SEQ ID NO: 349508 - DNA, 75 bp, synthetic construct
  source 1..75: mol_type = other DNA
agcccggacagaaaaggtatccaccctcagacccatcttgcaggcttcagtggcgtactgcaggctgatgcctac

SEQ ID NO: 349509 - DNA, 75 bp, synthetic construct
  source 1..75: mol_type = other DNA
acgatacgcctgtcccggtgctgttgccgggcaataagaagacgaagaccgggcgcttatggacgtacgttcgag

SEQ ID NO: 349510 - DNA, 75 bp, synthetic construct
  source 1..75: mol_type = other DNA
ttatccggacagtccgtgaaaagcatgcctgccgtcggtgcgatcgcatcgttcaggccccggctccttcgcgcc

SEQ ID NO: 349511 - DNA, 75 bp, synthetic construct
  source 1..75: mol_type = other DNA
cgctgttgaaatccctggaaagctggttgcgtgaaaagatgaagaccctgtcgcgatactcagagttggcgaagg

SEQ ID NO: 349512 - DNA, 75 bp, synthetic construct
  source 1..75: mol_type = other DNA
gtagaaacatattatgctgctataaatgtaatcagccaaagcatgagttttagtgctgatgaattaaagacgtat

SEQ ID NO: 349513 - DNA, 75 bp, synthetic construct
  source 1..75: mol_type = other DNA
ctctctaaaattaatggcatcgcctttaaatacaagttgagcaaagctagcacatggaacccctgctttatacat

SEQ ID NO: 349514 - DNA, 75 bp, synthetic construct
  source 1..75: mol_type = other DNA
tccagaaagctaccttcgccatgtgcttgccgtcatagcagactggccggtcaaccgggtcagcgaactgcttcc

SEQ ID NO: 349515 - DNA, 75 bp, synthetic construct
  source 1..75: mol_type = other DNA
ggagtggatatctgtactggaagcattatttttaacgccagcggggttatctataaacgatataccacctgattg

SEQ ID NO: 349516 - DNA, 75 bp, synthetic construct
  source 1..75: mol_type = other DNA
gacgtcagcagaaagctaaaccgctactgaaatccctggagagctggctgcgtgaaaagatgaaaacgatgtcgc

SEQ ID NO: 349517 - DNA, 75 bp, synthetic construct
  source 1..75: mol_type = other DNA
cccgccgaaagatccacgatgtgcacgtccgcatcccgtcagcactgacggaagcagccctggagcagatcggtc

SEQ ID NO: 349518 - DNA, 75 bp, synthetic construct
  source 1..75: mol_type = other DNA
cctatgttcgtgacgaccgtaacgccgggtcaacgctggcgccggcggtgtggttcgcttacagcccggacagaa

SEQ ID NO: 349519 - DNA, 75 bp, synthetic construct
  source 1..75: mol_type = other DNA
cttgccgtcatagcagactggccggtcaaccgggtcagcgaactgcttccgtggcgcatagcactgccagctgaa

SEQ ID NO: 349520 - DNA, 75 bp, synthetic construct
  source 1..75: mol_type = other DNA
tcatggaggagagcggggagcgctgctgtacagcctgatcgggacgtgcaaactgaacggagtggagccagaaag

SEQ ID NO: 349521 - DNA, 75 bp, synthetic construct
  source 1..75: mol_type = other DNA
cagcgtgaactggggcaatacattcgcctatccatgctgcgcagtgtgctgtcggtagatagagtcacggtgtaa

SEQ ID NO: 349522 - DNA, 75 bp, synthetic construct
  source 1..75: mol_type = other DNA
tggctgggtggctaaccgtatcaacccagggttagcacattacgctgaaatcattgatgtattgggtaaaaaact

SEQ ID NO: 349523 - DNA, 75 bp, synthetic construct
  source 1..75: mol_type = other DNA
ttcagcactatgtcctgaccgacggcaaactccatgctgacgatatgcctgtcccggtgctgttgccgggcaata

SEQ ID NO: 349524 - DNA, 75 bp, synthetic construct
  source 1..75: mol_type = other DNA
gtggatccagaaagctaccttcgccatgtgcttggcgtcatagcagactggccggtcaaccgggcccgccacctg

SEQ ID NO: 349525 - DNA, 75 bp, synthetic construct
  source 1..75: mol_type = other DNA
tcagtctgggtcgtaaaaacttcctgttcttcggctctgaccatggtggtgagcggggagcgctactgtacagcc

SEQ ID NO: 349526 - DNA, 75 bp, synthetic construct
  source 1..75: mol_type = other DNA
agatattgatatcgaactgcacaccgctgggcagtataagcgcacgctgaccttgctgggtgaaaacaccgaaga

SEQ ID NO: 349527 - DNA, 75 bp, synthetic construct
  source 1..75: mol_type = other DNA
aataacatcgctgaaaatgcgttgcggatggtcagtctgggccgcaaaaactacctgttcttcggttcggatcat

SEQ ID NO: 349528 - DNA, 75 bp, synthetic construct
  source 1..75: mol_type = other DNA
tcgatctgatgagtaacattatgcaagttggtgaaaaaacgtttatgaaactgcgcgatccccttgacgatgaat

SEQ ID NO: 349529 - DNA, 75 bp, synthetic construct
  source 1..75: mol_type = other DNA
cgaaaaagtctcccgccgtatcgcacaaatggaagccgatctgaaccggcttcagaaagagagcgatagagagcg

SEQ ID NO: 349530 - DNA, 75 bp, synthetic construct
  source 1..75: mol_type = other DNA
aaaggcatccatccgcagactcatcttgcctgcttcagcggtgtgctgcaagcggatgcgtacgccgggttcaac

SEQ ID NO: 349531 - DNA, 75 bp, synthetic construct
  source 1..75: mol_type = other DNA
aagaggtgtttgtctttaataaagcaattggggtatgacttacaaaccggagtttggttatgtttgatagagaca

SEQ ID NO: 349532 - DNA, 75 bp, synthetic construct
  source 1..75: mol_type = other DNA
tactcaggaggtggcgaatgctgcttcacaagtcgcggcattcccacgcgttcgtgaagcattattgcgtcgcca

SEQ ID NO: 349533 - DNA, 75 bp, synthetic construct
  source 1..75: mol_type = other DNA
aagctacctacgcaatgtacttgacgtcatagcggactggccgctgaaccgggtcagcgaactgctcccgtggcg

SEQ ID NO: 349534 - DNA, 75 bp, synthetic construct
  source 1..75: mol_type = other DNA
tgatcaggcagatggtcgctttctggccagcggtgacaacgggggattacttactgacttattgctagtggggtt

SEQ ID NO: 349535 - DNA, 75 bp, synthetic construct
  source 1..75: mol_type = other DNA
ttgccattaacctcagatattggatcacgttcatttaatcttgggctggaggtttttcgtgcccgaattgcagcc

SEQ ID NO: 349536 - DNA, 75 bp, synthetic construct
  source 1..75: mol_type = other DNA
gacttcagtgcccgcttgaggctattcaatgtccaattacactggagcaaccagcagaaggcgtatttgtcagaa

SEQ ID NO: 349537 - DNA, 75 bp, synthetic construct
  source 1..75: mol_type = other DNA
aagaaatacacgtccggtgtgctgtcgttcgcggagaaggagctgccaccgggaggacgtgaaaaagtgatggcg

SEQ ID NO: 349538 - DNA, 75 bp, synthetic construct
  source 1..75: mol_type = other DNA
gcttgcagcaaatgctgccagaagcgcccgtcgtcatctcagaagggcgctcgtttccggttgaacgccgttatt

SEQ ID NO: 349539 - DNA, 75 bp, synthetic construct
  source 1..75: mol_type = other DNA
tttgagcgccttctggaaaggagcgtaccgtgaggtgcaaaaagagatgaaagggcgttatcccaaacatgtctg

SEQ ID NO: 349540 - DNA, 75 bp, synthetic construct
  source 1..75: mol_type = other DNA
gggtattcagagcaaaatatctcaatataagttttctgtttgtccagagagacttcagtgcccgccagagtctgc

SEQ ID NO: 349541 - DNA, 75 bp, synthetic construct
  source 1..75: mol_type = other DNA
tgcattttctcggttagttagtgaaaaatcacctcacccactgacacgagagaaactaacggcatcaatggttgt

SEQ ID NO: 349542 - DNA, 75 bp, synthetic construct
  source 1..75: mol_type = other DNA
aagattgcagtgcttgacatgcctgaattacgtaaggaatttttcaagcatcacggaggccgtactgctgacaat

SEQ ID NO: 349543 - DNA, 75 bp, synthetic construct
  source 1..75: mol_type = other DNA
ctttctcgcgtggttaatgacggttcagttcaccctctgacacgagctccaataaccccatcaatgattgttaaa

SEQ ID NO: 349544 - DNA, 75 bp, synthetic construct
  source 1..75: mol_type = other DNA
taatagtggacctcaagctcttggcgagagaatgttaagtattctttcaggatcagatgcaggtgaaacacaatc

SEQ ID NO: 349545 - DNA, 75 bp, synthetic construct
  source 1..75: mol_type = other DNA
gaatttgaaacaggtgaacaatcgccagatgatcctgacgagctaagtgtttatagcgaattagaaattcgtgca

SEQ ID NO: 349546 - DNA, 75 bp, synthetic construct
  source 1..75: mol_type = other DNA
tctgacgagtaaaggggtcagtttggagatcggaaatttttgtacgttaagcgcattatttaaccaattgagcta

SEQ ID NO: 349547 - DNA, 75 bp, synthetic construct
  source 1..75: mol_type = other DNA
tgttcggtacccgttctgaaaaactgcgtcgtgaagttgaactggctgaggctctgctgaaacaacgtgaacagg

SEQ ID NO: 349548 - DNA, 75 bp, synthetic construct
  source 1..75: mol_type = other DNA
cagaattttaacaccgcgaaagtcagtgatatcaaggctctaactcagagggcgattgcagaaaatgtgcaggat

SEQ ID NO: 349549 - DNA, 75 bp, synthetic construct
  source 1..75: mol_type = other DNA
caccaggaacggattacttttacgtccagaacagtaaataaaacactggatgagtattgtatgagtaatcgttcg

SEQ ID NO: 349550 - DNA, 75 bp, synthetic construct
  source 1..75: mol_type = other DNA
aagctacctacgcaatgtacttgacgtcatagccgactggccgttgaaccgggtcagcgaactgctcccttggcg

SEQ ID NO: 349551 - DNA, 75 bp, synthetic construct
  source 1..75: mol_type = other DNA
aagctacctacgcaatgtacttgacgtcatagctgactggccgttgaaccgggtcagcgaactgctcccctggcg

SEQ ID NO: 349552 - DNA, 75 bp, synthetic construct
  source 1..75: mol_type = other DNA
aagctacctacgcaatgtacttgacgtcatagcagactggccggtgaaccgggtcagcgaactgctcccatggcg

SEQ ID NO: 349553 - DNA, 75 bp, synthetic construct
  source 1..75: mol_type = other DNA
cggcggcaaatgcaggcccgacgggtgttacagcagatgagtgatgaacggttgagggatactgggttacgctgg

SEQ ID NO: 349554 - DNA, 75 bp, synthetic construct
  source 1..75: mol_type = other DNA
cggcggcaaatgcaggcccgacgggtgttacagcagatgagtgatgaacggttgagggaaagtgggttatgctgg

SEQ ID NO: 349555 - DNA, 75 bp, synthetic construct
  source 1..75: mol_type = other DNA
cggcggcaaatgcaggcccgacgggtgttacagcagatgagtgatgaacggttgagggaaattgggttaggctgg

SEQ ID NO: 349556 - DNA, 75 bp, synthetic construct
  source 1..75: mol_type = other DNA
ttaacactcaaaccaggatgatagaacaggcctcgcgagaaatctttgaacagaattttggcaccgtgaaagtca

SEQ ID NO: 349557 - DNA, 75 bp, synthetic construct
  source 1..75: mol_type = other DNA
acaagtctcgcaagaaatctttgagcagaatttttgcggcttaaaagtcagcgatatcaaggctattactcagag

SEQ ID NO: 349558 - DNA, 75 bp, synthetic construct
  source 1..75: mol_type = other DNA
tcagaaagttgatgagcagtgcggcaaaagagtggatccaataacacgttttaacacccagacgaagatgataga

SEQ ID NO: 349559 - DNA, 75 bp, synthetic construct
  source 1..75: mol_type = other DNA
gcggaagccagcggtgatttatggcgtgacgcccgctgggccatcagccgggtgcaggacgcgccgcactgcaca

SEQ ID NO: 349560 - DNA, 75 bp, synthetic construct
  source 1..75: mol_type = other DNA
accaggactatgacgccacggcattgggtgtgaagcggggcgaggaactggcggaagcaagcggtgatttgtggc

SEQ ID NO: 349561 - DNA, 75 bp, synthetic construct
  source 1..75: mol_type = other DNA
agctgtatgagtttcgcagacgtcaacagatgctgggatatgcctcgctggcagaggttccggcggaacagctgg

SEQ ID NO: 349562 - DNA, 75 bp, synthetic construct
  source 1..75: mol_type = other DNA
gacctgtcggagtttcgcagtgtcatgcgcactgacggcacggtgacgccgccgcgtttaaagcaggttgcgctg

SEQ ID NO: 349563 - DNA, 75 bp, synthetic construct
  source 1..75: mol_type = other DNA
gcagaggttccggcggaacagctggacggcaaaagtgagcgcattcagcactattttaacgcggtttactgctgg

SEQ ID NO: 349564 - DNA, 75 bp, synthetic construct
  source 1..75: mol_type = other DNA
cgacaacaattgcgttaatgccgggaacacagaccatagcgttttatgcccgtctgaaagccacttatcttccgg

SEQ ID NO: 349565 - DNA, 75 bp, synthetic construct
  source 1..75: mol_type = other DNA
taatgatctggtgctcggctcccacatgctggaagtctgcccgtcgatcgctgtagaagataaaccgatcctcga

SEQ ID NO: 349566 - DNA, 75 bp, synthetic construct
  source 1..75: mol_type = other DNA
taatgacctggtgctcggctcccatatgctggaagtctgtccgtcgatcgctgtggaagagaaaccgatcctcga

SEQ ID NO: 349567 - DNA, 75 bp, synthetic construct
  source 1..75: mol_type = other DNA
ggtatctaaacaggatacccgtcatctgaaagtctgccgttttggcgataacatgcgtgaagtggcggtcaccga

SEQ ID NO: 349568 - DNA, 75 bp, synthetic construct
  source 1..75: mol_type = other DNA
atgaagtttgttgcgcccgaacaggcaccggaacaggccgaagtcatcaaaaatacgccgttctggcctgatgtt

SEQ ID NO: 349569 - DNA, 75 bp, synthetic construct
  source 1..75: mol_type = other DNA
caccggaacaggcggaaatcatcaggaatacgccgttctggcctgatgtggagctgtcggagtttcgcagtgtga

SEQ ID NO: 349570 - DNA, 75 bp, synthetic construct
  source 1..75: mol_type = other DNA
tgaagagaataattctgtttctgtcattactgtttcccattacctggtcagcgatcgctggacaggatattgacc

SEQ ID NO: 349571 - DNA, 75 bp, synthetic construct
  source 1..75: mol_type = other DNA
accaggactatgacgctacggcatccggtgtgaagcgaggcgaggaactggcggaatcctgcggtgatttgtggc

SEQ ID NO: 349572 - DNA, 75 bp, synthetic construct
  source 1..75: mol_type = other DNA
acgacatcatcatccgcacactgacgatggcagtggcggtgaccatcgccagcgctattctggcctttccgatgg

SEQ ID NO: 349573 - DNA, 75 bp, synthetic construct
  source 1..75: mol_type = other DNA
tgcgttccttacattacctgcggtgggcggaaatacgctgtcaacttccgggctggggcgctttctggtgtttct

SEQ ID NO: 349574 - DNA, 75 bp, synthetic construct
  source 1..75: mol_type = other DNA
cagcaaggggcgattggcaatatgccgatggcggcggcttttactctggtgccaattgttctcatcgcactgtac

SEQ ID NO: 349575 - DNA, 75 bp, synthetic construct
  source 1..75: mol_type = other DNA
ttgttggataattatagtataatttcctatataaccgatgaagaatcaccgattgaaatcaaaaataatacttct

SEQ ID NO: 349576 - DNA, 75 bp, synthetic construct
  source 1..75: mol_type = other DNA
ttgatgatttcactatgtcggtaacaccggaactgactctggcgaatatccgcgcgctgtttaatccggccaatt

SEQ ID NO: 349577 - DNA, 75 bp, synthetic construct
  source 1..75: mol_type = other DNA
caagctacattgttaaagcttatgcctggacattattgctggcaaaagatggcgtggcgcagtggtttttacaac

SEQ ID NO: 349578 - DNA, 75 bp, synthetic construct
  source 1..75: mol_type = other DNA
gccgcgtttaaagcaggttgccctgtcggcaatttcggaggtcaacgctgagttgtatgagtttcgcagacgtca

SEQ ID NO: 349579 - DNA, 75 bp, synthetic construct
  source 1..75: mol_type = other DNA
ctatttcaacgcggtttactgctgggctcgcgccatgctcaacgagcgttatcaggactatgacgccacggcatc

SEQ ID NO: 349580 - DNA, 75 bp, synthetic construct
  source 1..75: mol_type = other DNA
gcagatgctggggtatgcctcgctggcagcagtcccggcggaacaactggacggcaaaagcgagcgcattcagca

SEQ ID NO: 349581 - DNA, 75 bp, synthetic construct
  source 1..75: mol_type = other DNA
atttcaccatgtcggtaacgccggaactgacgctggcgaatatccgtgcgctgtttaatccggcgaattacgaca

SEQ ID NO: 349582 - DNA, 75 bp, synthetic construct
  source 1..75: mol_type = other DNA
gacctgtcggagtttcgcagtgtgatgcgcactgacggcacggtgacacagccgcgtttaaagcaggttgcgctg

SEQ ID NO: 349583 - DNA, 75 bp, synthetic construct
  source 1..75: mol_type = other DNA
ctatttcaacgcggtttactgctggcacgcgccatgctcaacgaacgttaccaggactatgacgccacggcatcc

SEQ ID NO: 349584 - DNA, 75 bp, synthetic construct
  source 1..75: mol_type = other DNA
gaaaaacagggtatcgatgcagcgcaaatgcccggcgtgctggtccattctcacggcccgtttgcatggggcaaa

SEQ ID NO: 349585 - DNA, 75 bp, synthetic construct
  source 1..75: mol_type = other DNA
acttcatcatcaaactggtcagttgcgtgatgccattatcagcaaggttctccgaagcatagatgacaggcttgc

SEQ ID NO: 349586 - DNA, 75 bp, synthetic construct
  source 1..75: mol_type = other DNA
tcgccagaacagcggcgagccggtaatgactccaacttattgatagtgttttatgttcagataatgcccgatgac

SEQ ID NO: 349587 - DNA, 75 bp, synthetic construct
  source 1..75: mol_type = other DNA
catattcgtttacgagtctatgaacgtggggcaggagaaactcaggcctgtggcagcggcgcgtgtgcggcagta

SEQ ID NO: 349588 - DNA, 75 bp, synthetic construct
  source 1..75: mol_type = other DNA
atggttggcgtgctcggcaccggattaaccaacgtcattatcgccatcgccctgtcgcactgggcgtggtatgca

SEQ ID NO: 349589 - DNA, 75 bp, synthetic construct
  source 1..75: mol_type = other DNA
tatgaattcgagaggctgctgaatgattatgctttgcgagaaaaactacagcataaaacgggggcgttgagagat

SEQ ID NO: 349590 - DNA, 75 bp, synthetic construct
  source 1..75: mol_type = other DNA
aaaaaaatctttattctgaatgggttatccgaaacaccctatactggatgactcctgtaagtccatggaaacttg

SEQ ID NO: 349591 - DNA, 75 bp, synthetic construct
  source 1..75: mol_type = other DNA
agttaattgcattgaattatactctttccagagcattaactagcaaatatgagatgcaaatcatagccattgact

SEQ ID NO: 349592 - DNA, 75 bp, synthetic construct
  source 1..75: mol_type = other DNA
caaacaaaaggagcaggagctgctggtgcccaccgagatcctgatgacgccagtttacgccagcgtggcctatcg

SEQ ID NO: 349593 - DNA, 75 bp, synthetic construct
  source 1..75: mol_type = other DNA
caagcagaaggaacaggagcttctagtgcccaccgaaatcctgatgacgccggtttacgccagtgtggcctatcg

SEQ ID NO: 349594 - DNA, 75 bp, synthetic construct
  source 1..75: mol_type = other DNA
tgccggtgctccggcgtttgcgcaggatggcagttcctgggcgtctccggacacagcctctgcatcagagactga

SEQ ID NO: 349595 - DNA, 75 bp, synthetic construct
  source 1..75: mol_type = other DNA
gggaaccgcggcatatgtaggtgacaaggccggaaacggtatggctctcggcagctggtcggcgtcagatgcaac

SEQ ID NO: 349596 - DNA, 75 bp, synthetic construct
  source 1..75: mol_type = other DNA
tgccgtttttttctcatgtgagcatgaaacagggggctgcgatgaaagtgattctggcgacccgtaaccgttatc

SEQ ID NO: 349597 - DNA, 75 bp, synthetic construct
  source 1..75: mol_type = other DNA
cagcactggctgggcaccgatcacttaggacgcgatattttctcacggctgatggcggcgacccgtgtgtcgctt

SEQ ID NO: 349598 - DNA, 75 bp, synthetic construct
  source 1..75: mol_type = other DNA
cagggcggcacttcctttatggaagactatacctatcacttcgagaaaggtaatgacatggtgctcggctcccac

SEQ ID NO: 349599 - DNA, 75 bp, synthetic construct
  source 1..75: mol_type = other DNA
ctccctgccgaaactgccggtggcgaatgcgctgtggaaagcgcaaccggatctgccaacagcttccgaagcgtg

SEQ ID NO: 349600 - DNA, 75 bp, synthetic construct
  source 1..75: mol_type = other DNA
atatgcgtgaagtggcggtcactgacggcgataaagttgccgcgcagatcaagttcggtttctccgttaatacct

SEQ ID NO: 349601 - DNA, 75 bp, synthetic construct
  source 1..75: mol_type = other DNA
gtatcggctcctggatgcgtcaggcggtctctaaacaggatacccgtcatctgaaagtttgccgctttggcgata

SEQ ID NO: 349602 - DNA, 75 bp, synthetic construct
  source 1..75: mol_type = other DNA
tgtcgccagcctgattgatctcggcgatcgttaccgtctgctggttaactgcatcgacacggtgaaaaccccgca

SEQ ID NO: 349603 - DNA, 75 bp, synthetic construct
  source 1..75: mol_type = other DNA
gttgccgcacagatcaagttcggtttctccgtcaatacctgggcggttggcgatctggtgcaggtggtgaactcc

SEQ ID NO: 349604 - DNA, 75 bp, synthetic construct
  source 1..75: mol_type = other DNA
gattgtgtttctaatatggatgttagtggtggtgtggtttctaatccatcttccgaagacccgtatacaacaacg

SEQ ID NO: 349605 - DNA, 75 bp, synthetic construct
  source 1..75: mol_type = other DNA
gctggtgctggcgacgctggatattggtcatatgatgctccacgtcgcggggatgtccttcctcggcctcggcgt

SEQ ID NO: 349606 - DNA, 75 bp, synthetic construct
  source 1..75: mol_type = other DNA
atatctggacccagccgctgcaaatgttctggccggggctggcgctgtttatcagcgtgatggcctttaacctgg

SEQ ID NO: 349607 - DNA, 75 bp, synthetic construct
  source 1..75: mol_type = other DNA
cactggcggatgagtggagttccgtgaatgcccgtctgaaacaggcatcacagtcatccgatgaattttcgtcat

SEQ ID NO: 349608 - DNA, 75 bp, synthetic construct
  source 1..75: mol_type = other DNA
gccgggcttgaggagatcagcggcggcgatctgttgatcgacggcaaacgaatgaatgacgttccagccaaagca

SEQ ID NO: 349609 - DNA, 75 bp, synthetic construct
  source 1..75: mol_type = other DNA
gccaaagaggtgattgatgagcgggtgaactgggcggcgcaaattctcggcctgcgtgagtacctgaaacgctag

SEQ ID NO: 349610 - DNA, 75 bp, synthetic construct
  source 1..75: mol_type = other DNA
ttcaaaaaatctacgataaccaggtgcatgtggtgaaggacttcaacctggaaattgccgataaagagttcatcg

SEQ ID NO: 349611 - DNA, 75 bp, synthetic construct
  source 1..75: mol_type = other DNA
aacttgcgcctgtagactgggccagttttaccattggcggcggtacgccactgctgcttaatgtcgggcaactgt

SEQ ID NO: 349612 - DNA, 75 bp, synthetic construct
  source 1..75: mol_type = other DNA
tattgatattatttacggtattcctggtcaaacagccgcaagtttaatggcgtcgcttaatcaagcattagatta

SEQ ID NO: 349613 - DNA, 75 bp, synthetic construct
  source 1..75: mol_type = other DNA
gagtacctgaaacgcaagccggcgcgctttctggcgggcaacgccagcgtgtggcgctcgggcgggcgattgtgc

SEQ ID NO: 349614 - DNA, 75 bp, synthetic construct
  source 1..75: mol_type = other DNA
tggcgttagatggagagcaacatcttcaggaacaggtatcggaaaaagtattagccgaaaatgtgttaattgccc

SEQ ID NO: 349615 - DNA, 75 bp, synthetic construct
  source 1..75: mol_type = other DNA
tttgtgcgcgtgagctgggatgaagccctcgacatgttctatgaagaactggaacgcgtacagaaaactcacggg

SEQ ID NO: 349616 - DNA, 75 bp, synthetic construct
  source 1..75: mol_type = other DNA
gccttacggggagtggccgtaggccggaaaaactggctgttcgcgggttccgacagcggtggcgaacatgcggcg

SEQ ID NO: 349617 - DNA, 75 bp, synthetic construct
  source 1..75: mol_type = other DNA
acatactggattttgacgatcttgcaagactgctgtctaaagatgcagacaggctgtcccgcgctgaaacactgc

SEQ ID NO: 349618 - DNA, 75 bp, synthetic construct
  source 1..75: mol_type = other DNA
ctggagggaaagtctgggcaaactgcggggcgtccccctccagcgcacatcaaaaacaggaaattggacaagcct

SEQ ID NO: 349619 - DNA, 75 bp, synthetic construct
  source 1..75: mol_type = other DNA
attttgtcagtatcgtctggcgtaaagggcaaaatccccttgttcttcagggcaaagtgaaccttgcggtttcgt

SEQ ID NO: 349620 - DNA, 75 bp, synthetic construct
  source 1..75: mol_type = other DNA
aacctgaccaaaaagaaaaatcattacttctcatatagcaaagatacgttatcaaaaatagatgctgacatgata

SEQ ID NO: 349621 - DNA, 75 bp, synthetic construct
  source 1..75: mol_type = other DNA
gctttctgccaactcattcttgccacaaccacacccaggcaactgtggcaaaacctttgtgattgataaagcagg

SEQ ID NO: 349622 - DNA, 75 bp, synthetic construct
  source 1..75: mol_type = other DNA
atgaaagcattctggcgtaacgccgcgttgctcgcggtttctctgcttcccttctcttctgccaacgccgtagcg

SEQ ID NO: 349623 - DNA, 75 bp, synthetic construct
  source 1..75: mol_type = other DNA
ggcagaggcgagtctgcaggtttcgtttaaaagtttattcgaagcagtcgtccagttacagagctccagcccaga

SEQ ID NO: 349624 - DNA, 75 bp, synthetic construct
  source 1..75: mol_type = other DNA
gcgaaggaggggcaaacatgtcctctaacgcgaagaatttacgctatgtgattacgggattagataatatttcat

SEQ ID NO: 349625 - DNA, 75 bp, synthetic construct
  source 1..75: mol_type = other DNA
cgttgatgaacgccgctggatgcgcttcggatgcgccactcgtccaatcccgaacttgccggaagctcgcgccag

SEQ ID NO: 349626 - DNA, 75 bp, synthetic construct
  source 1..75: mol_type = other DNA
agctgagtaaagttatgcctggcgctggcgggcgttcttgtctggaacgttatgaatacgctaaacatggcgcct

SEQ ID NO: 349627 - DNA, 75 bp, synthetic construct
  source 1..75: mol_type = other DNA
gtataaaattgaatattatgatgagaaaaaaacaagaggtatgtttaatgcagatgacagattatggcagtcatt

SEQ ID NO: 349628 - DNA, 75 bp, synthetic construct
  source 1..75: mol_type = other DNA
tatcattagttaccatcgtatggcccgcgaagggcaaacaatgagttcagctctatataaattagcggcccttgc

SEQ ID NO: 349629 - DNA, 75 bp, synthetic construct
  source 1..75: mol_type = other DNA
acgctatattaaatattgaaagaattgaaagtttaggattcgattgcaaagaacaagaatctgaaattaatgatg

SEQ ID NO: 349630 - DNA, 75 bp, synthetic construct
  source 1..75: mol_type = other DNA
atgagcagtaaagtcagtggcatgaatacgttgctctccgttagcgcacggactaataaccctgaacctggtttt

SEQ ID NO: 349631 - DNA, 75 bp, synthetic construct
  source 1..75: mol_type = other DNA
attgatgagcatctgaaacgtcgcgagcgtttaatcgcgcttacggcggcgaaaaaaccgggtgctcagccgtat

SEQ ID NO: 349632 - DNA, 75 bp, synthetic construct
  source 1..75: mol_type = other DNA
atccatggaatcgtattataaaaacagatttactacatgatgaaaatattttctttggtcctactgttgtgcata

SEQ ID NO: 349633 - DNA, 75 bp, synthetic construct
  source 1..75: mol_type = other DNA
atgaacagtgaactccccgacgacattgagcagcttaaagccatgttgcgtaagcaacagagtcggcttcgccag

SEQ ID NO: 349634 - DNA, 75 bp, synthetic construct
  source 1..75: mol_type = other DNA
gtactcattgagcctaacaccaaagtattcccgggtgatgaggtgtttgtcagaaccgttgaaggacacaacatg

SEQ ID NO: 349635 - DNA, 75 bp, synthetic construct
  source 1..75: mol_type = other DNA
acagattctggcacaggccggaacgcgcgggcttcatgaaagtgaacaacgggcgcttgccgcactgcaacggga

SEQ ID NO: 349636 - DNA, 75 bp, synthetic construct
  source 1..75: mol_type = other DNA
acctggtgacgttgttaaaagaggtcgcggatttcgatatctccgtggcggcgtatccggaagtgcatccggaag

SEQ ID NO: 349637 - DNA, 75 bp, synthetic construct
  source 1..75: mol_type = other DNA
aagctatcactttattggctacggtgattagtagccgttctggtggttgtgatggtggtatgaaaaaagttattt

SEQ ID NO: 349638 - DNA, 75 bp, synthetic construct
  source 1..75: mol_type = other DNA
atgactattcagcagaataatgaatacagaggggcgaattatctcttggccttgctggtcgttatcctgcaagct

SEQ ID NO: 349639 - DNA, 75 bp, synthetic construct
  source 1..75: mol_type = other DNA
agttgggctagggatggtgctggggaatatgctaagtggcaggatttcaggacgttattcaccactgcgcattgc

SEQ ID NO: 349640 - DNA, 75 bp, synthetic construct
  source 1..75: mol_type = other DNA
gcctaaccttggtaaaaaatctcttaccgagattaaagacgtgctggcttcccgtgggctgtctctgggcatgcg

SEQ ID NO: 349641 - DNA, 75 bp, synthetic construct
  source 1..75: mol_type = other DNA
agtaagcacaacaacaggaaactggacgactgcacagtttatcgagtggctggattctcagggagcatttaacca

SEQ ID NO: 349642 - DNA, 75 bp, synthetic construct
  source 1..75: mol_type = other DNA
gcgttttcgcgatcgctgcgtctcggcgggtatcgatgtggaaattattccgggtattttgccggtctctaactt

SEQ ID NO: 349643 - DNA, 75 bp, synthetic construct
  source 1..75: mol_type = other DNA
ccagtgaaatggagcagaccctgtggaactccatcgatcgccttagcagcctgaaaccgaagtttgtatcggtga

SEQ ID NO: 349644 - DNA, 75 bp, synthetic construct
  source 1..75: mol_type = other DNA
taaacaggcgaagaaatttgccgacatgaccaatgtgcgtattccggcgtggatggcacaaatgttcgacgggct

SEQ ID NO: 349645 - DNA, 75 bp, synthetic construct
  source 1..75: mol_type = other DNA
ggcattaaagatcgcaccggcctggaagcggcaccgcatcttacctgtattgatgcgacgcctgccgagctgcgg

SEQ ID NO: 349646 - DNA, 75 bp, synthetic construct
  source 1..75: mol_type = other DNA
atcgctgtttttaatattgcggtgatggcatcggtctatttttgggtgccggatattcgcgacgaggcgaaagga

SEQ ID NO: 349647 - DNA, 75 bp, synthetic construct
  source 1..75: mol_type = other DNA
aaacgggtcgtctgtgggtatacgtcagggattgtcaacgacggatgaaaagtgatccacttatatctccaccaa

SEQ ID NO: 349648 - DNA, 75 bp, synthetic construct
  source 1..75: mol_type = other DNA
actatatcctgaatcactggaatgcgctgaacgagttctgtcgtgacggccgggtggaaatagacaacaacatcg

SEQ ID NO: 349649 - DNA, 75 bp, synthetic construct
  source 1..75: mol_type = other DNA
cgaaaagcggacgcagtttcctgaaaggcttgctgaccaatctcgccaatccgaaagcgattatctactttggct

SEQ ID NO: 349650 - DNA, 75 bp, synthetic construct
  source 1..75: mol_type = other DNA
aaacgggtcgtctgtgggtatacgtcagggatgatcgtgatgcgggttcatccctgccggcaggtgtctggttcg

SEQ ID NO: 349651 - DNA, 75 bp, synthetic construct
  source 1..75: mol_type = other DNA
gggcagcggtaaaacccggaccgcccggctgtgggtctacgtccgtgatgaccgtaacgccggttcggaaatgcc

SEQ ID NO: 349652 - DNA, 75 bp, synthetic construct
  source 1..75: mol_type = other DNA
aaggcagtaaaagcagccaatgacaatgctgagaaacgtctgcagaaagatcagaacggtgcggatatccctggc

SEQ ID NO: 349653 - DNA, 75 bp, synthetic construct
  source 1..75: mol_type = other DNA
gtggttggtgaggcaattcttggtgttgatggtgccatcgagatgaccgaagagcgcgatgggtggctcaagatt

SEQ ID NO: 349654 - DNA, 75 bp, synthetic construct
  source 1..75: mol_type = other DNA
gtggcccagaataaaatcaggagaatatgtactcattgagcctaacaccaaagtattcccaggtgatgaggtgtt

SEQ ID NO: 349655 - DNA, 75 bp, synthetic construct
  source 1..75: mol_type = other DNA
ttcgtttgctgcgatgtcgtcattgctgctgtatggtcgctataagcgccagcaagcggcggatagtccggtgct

SEQ ID NO: 349656 - DNA, 75 bp, synthetic construct
  source 1..75: mol_type = other DNA
ccgaaagcgattatctactttggctcggtattctcattgtttgtcggtgataacgttggcactaccgcgcgctgg

SEQ ID NO: 349657 - DNA, 75 bp, synthetic construct
  source 1..75: mol_type = other DNA
tgccagcctgtttgctctgccgcaaatgcgccgtggttatcaacgtctggcgaagtggattgatggttttgccgg

SEQ ID NO: 349658 - DNA, 75 bp, synthetic construct
  source 1..75: mol_type = other DNA
atgcttgcagatagcaaagttggatctgcagaccatcttgagtttgcgggtaacgttcgtgcgggttttgttccg

SEQ ID NO: 349659 - DNA, 75 bp, synthetic construct
  source 1..75: mol_type = other DNA
cgctggcattgatgcgcttgttggaacaggcgggcggtttagtgcagtgcgatcaaatgctgttgcggcggcgca

SEQ ID NO: 349660 - DNA, 75 bp, synthetic construct
  source 1..75: mol_type = other DNA
gataaaatgctgttgcagcggcgcagtcgcgaagtgattgaacttagcgagcagagcgctgcacaaatgcgccat

SEQ ID NO: 349661 - DNA, 75 bp, synthetic construct
  source 1..75: mol_type = other DNA
ttgccacacagtgatgaacttgatgccggtaatgtgctggcggttgaaaatctgaatattgcctttatgcaggac

SEQ ID NO: 349662 - DNA, 75 bp, synthetic construct
  source 1..75: mol_type = other DNA
gtcaccattcaggcgcagatcctgcaattaatcaaagtgttgcaaaaagagatgtcgatgggcgtcatctttatc

SEQ ID NO: 349663 - DNA, 75 bp, synthetic construct
  source 1..75: mol_type = other DNA
aaatccggtatttaccgtgggcgaacagattgccgagtctatccgtctgcatcagaacgccagtcgtgaagaagc

SEQ ID NO: 349664 - DNA, 75 bp, synthetic construct
  source 1..75: mol_type = other DNA
agattgccgatcgggtactggtgatgtatcagggcgaggcggtggaaacgggtagcgtcgaacagatttttcatg

SEQ ID NO: 349665 - DNA, 75 bp, synthetic construct
  source 1..75: mol_type = other DNA
tttggcgtgatggtgccggtagccggtttgctggcagatgcctttggtcgtcgtaaaagcatggtgatcatcacc

SEQ ID NO: 349666 - DNA, 75 bp, synthetic construct
  source 1..75: mol_type = other DNA
aggaagcggtggaaggcgtcgcaacgtcacaggccgacattatcgaccgttttaatgtgctggaaacccgccatc

SEQ ID NO: 349667 - DNA, 75 bp, synthetic construct
  source 1..75: mol_type = other DNA
gcacgctgacctgcttgaccgtttcaacgcacaggaacgccagcgcgacgaagaccgcgcacaaatcacccgtct

SEQ ID NO: 349668 - DNA, 75 bp, synthetic construct
  source 1..75: mol_type = other DNA
ctgctgctggcgctggctcgatttggtcagggtctgggcttaggcggcgaatggggcggagcggcgctgctggcg

SEQ ID NO: 349669 - DNA, 75 bp, synthetic construct
  source 1..75: mol_type = other DNA
gttgggcgcaccgattggcttcttctttgccaacggcactttcctgctgctttcctggctgctaaccgacgagca

SEQ ID NO: 349670 - DNA, 75 bp, synthetic construct
  source 1..75: mol_type = other DNA
tatctggcggcgatggccggactgacgttaattgccctgctgttaacgcatgagacgcggcaccagtcgttgtag

SEQ ID NO: 349671 - DNA, 75 bp, synthetic construct
  source 1..75: mol_type = other DNA
tgtcgaaataggcccccggcgcgcggtctttgaaaatccacagcacccttatacgcgtaaattactggcggcagt

SEQ ID NO: 349672 - DNA, 75 bp, synthetic construct
  source 1..75: mol_type = other DNA
gtatccatcttgaagttataggagagcgtcgaaagtttacctggcgaaaagtgattacgcgagtaatgcggcaca

SEQ ID NO: 349673 - DNA, 75 bp, synthetic construct
  source 1..75: mol_type = other DNA
ggaaataatgtaaccattggctgtaacgccaccatccttggtggcaaagtgcatatagggaataatgtaaaaata

SEQ ID NO: 349674 - DNA, 75 bp, synthetic construct
  source 1..75: mol_type = other DNA
ggtcacaaagtaacaatcggtgaaaattgttcaattaagcccggagtaactattggacttcgcggggaatttaat

SEQ ID NO: 349675 - DNA, 75 bp, synthetic construct
  source 1..75: mol_type = other DNA
catttccgccaaaattagcgtggcagaattaaccggtgctgaatttatgctctacaccacggttggggggcacga

SEQ ID NO: 349676 - DNA, 75 bp, synthetic construct
  source 1..75: mol_type = other DNA
aaacgatctctctactacctaaagaacagcaaaaaattgcaaccgctaagttaaatgcactggaaagccgcagta

SEQ ID NO: 349677 - DNA, 75 bp, synthetic construct
  source 1..75: mol_type = other DNA
ggatatgcccttctgtgattttttcattcgccgccagcagtttatttatccgggtgtacccccgacaaaatcagg

SEQ ID NO: 349678 - DNA, 75 bp, synthetic construct
  source 1..75: mol_type = other DNA
atgaaactgaaacttgatgctaacggaaatgtggtcgttgaaaacggtatgcctgtgtacatccatgatgatggc

SEQ ID NO: 349679 - DNA, 75 bp, synthetic construct
  source 1..75: mol_type = other DNA
gcctgtgtacatccatgatgatggcaaagaaatcccgttcgacgcagccgcagcgatgaccaaaatcacctccct

SEQ ID NO: 349680 - DNA, 75 bp, synthetic construct
  source 1..75: mol_type = other DNA
cgcgggaagtacatgccgttgagaaggttagttttgatctctggccgggcgaaactttatcgctggtaggggaat

SEQ ID NO: 349681 - DNA, 75 bp, synthetic construct
  source 1..75: mol_type = other DNA
aattacagaacttaatggcgaggcaaaaaatcatcgcctggctaaagaagctgcagaggaaaaactggctaagtt

SEQ ID NO: 349682 - DNA, 75 bp, synthetic construct
  source 1..75: mol_type = other DNA
tctgaaccacttgggcaacgctataaagcgacggaagcattatttaagtatgtcgcggttgatcctgaaggaaag

SEQ ID NO: 349683 - DNA, 75 bp, synthetic construct
  source 1..75: mol_type = other DNA
ggatttcgccttgccgttgggtagatgcgaccacatttaccctgagcgtgtgcagcacgttttcaatccagacga

SEQ ID NO: 349684 - DNA, 75 bp, synthetic construct
  source 1..75: mol_type = other DNA
gtcttggcactgagcgtctgcaatttgccgcacagcagcgcgcgcaggcgatggcgtttaacaatcagcagtgtg

SEQ ID NO: 349685 - DNA, 75 bp, synthetic construct
  source 1..75: mol_type = other DNA
tcgcgttctggcctattacaaaccggaaggtgagttgtgtacccgtaacgatccggaagggcgtccaacggtgtt

SEQ ID NO: 349686 - DNA, 75 bp, synthetic construct
  source 1..75: mol_type = other DNA
gtttctatctgaagccagccgcagtcaagaacgaaagcgaagcgtgtgcctggctggacagtcttacaccagaag

SEQ ID NO: 349687 - DNA, 75 bp, synthetic construct
  source 1..75: mol_type = other DNA
aaaatgaatccggcagaggcttaccgactggctgcatgggctgatgatgaggcgttatcagtgacacaaaccagg

SEQ ID NO: 349688 - DNA, 75 bp, synthetic construct
  source 1..75: mol_type = other DNA
tgaccgtctgccaaaactgcgtggcgcacgctggattgccgtgggtcgcttggacgttaatacctgtggtctgct

SEQ ID NO: 349689 - DNA, 75 bp, synthetic construct
  source 1..75: mol_type = other DNA
gcgaaactgcgcgatttaagtcgtggagttcaactggaagatggtccggcagcatttaaaacgatcaaattcagt

SEQ ID NO: 349690 - DNA, 75 bp, synthetic construct
  source 1..75: mol_type = other DNA
cgtattgatggtcacctggtttcggtgcgcgagtcagtcgaacaaatttgtcgtgttctggcttattacaaaccg

SEQ ID NO: 349691 - DNA, 75 bp, synthetic construct
  source 1..75: mol_type = other DNA
gagtcggtgtcgattactggatatggagtctccagctatccggtataggtacgacgcttaccggtatcaacttct

SEQ ID NO: 349692 - DNA, 75 bp, synthetic construct
  source 1..75: mol_type = other DNA
gtttctatctgaagccagccgccgtcaagagtgaacaggaggcgtgcaattacctcgacaacctgccagcctcgg

SEQ ID NO: 349693 - DNA, 75 bp, synthetic construct
  source 1..75: mol_type = other DNA
aatgcgacgcatcgccgacttgcactccggtgaagccaaaaccgatgcccgtgatgcggccatcattgccgaagc

SEQ ID NO: 349694 - DNA, 75 bp, synthetic construct
  source 1..75: mol_type = other DNA
gactggcagcatgggctgacgatgaggcgttatcagtgacacaaaccaggacagaacgccccctgtcacagccag

SEQ ID NO: 349695 - DNA, 75 bp, synthetic construct
  source 1..75: mol_type = other DNA
gcgcgaacgtactgattattgcttccttcccaattctgacggttaccgtcgcgttattgaccctggatcgctatc

SEQ ID NO: 349696 - DNA, 75 bp, synthetic construct
  source 1..75: mol_type = other DNA
ccatcggttttattgtcaccttctcggtaggcggtatgactggtgtactgctggcagtaccgggcgcggacttcg

SEQ ID NO: 349697 - DNA, 75 bp, synthetic construct
  source 1..75: mol_type = other DNA
taaaaatactcgtttttcccccgaagtccgtcagagggcgattcgtatggttctggaaagtcagggcgaatatga

SEQ ID NO: 349698 - DNA, 75 bp, synthetic construct
  source 1..75: mol_type = other DNA
acaaccagcgggtaggcgagttaacgaatacccgaagacgaaaccgtaacgcgtccgataatggcatgggaaaag

SEQ ID NO: 349699 - DNA, 75 bp, synthetic construct
  source 1..75: mol_type = other DNA
tgaagtgtgggtgaaaaaagtggcgtctgaaccaatcgggcaacgctataaagcaacagaagcattatttaagta

SEQ ID NO: 349700 - DNA, 75 bp, synthetic construct
  source 1..75: mol_type = other DNA
aggctcgctgtatatcgccaccacgcatacccaggcacgctacgcgttaccaaacgtcatcaaaggctttattga

SEQ ID NO: 349701 - DNA, 75 bp, synthetic construct
  source 1..75: mol_type = other DNA
aaaaattccgcgtggccgtttccggtacgacctcagacgggcgcgaaatctgtggcgacatgctgaaagctgccg

SEQ ID NO: 349702 - DNA, 75 bp, synthetic construct
  source 1..75: mol_type = other DNA
caccgatcgcatgaaaaacatgctcaatgaagggaagaaagtatattcaagcattgaactgttaccggaccttga

SEQ ID NO: 349703 - DNA, 75 bp, synthetic construct
  source 1..75: mol_type = other DNA
cacgctctttcgctgtggccctccagtgaactctgcgcgatgggcgatctgatcgcactgtcaaccgatgaaatc

SEQ ID NO: 349704 - DNA, 75 bp, synthetic construct
  source 1..75: mol_type = other DNA
ggagggaagtaaaacacaccgcgagtggtgtgtgccgatcgtggagccactgaaagcccccctggaacttctcct

SEQ ID NO: 349705 - DNA, 75 bp, synthetic construct
  source 1..75: mol_type = other DNA
tctgggataatctgatggatgagtattttttttgtaagtcgttacggagagcctcggagtggagttatcgcaagg

SEQ ID NO: 349706 - DNA, 75 bp, synthetic construct
  source 1..75: mol_type = other DNA
tagtcgtcgacgcaatgctatataccctgcctggtactggctgacagttctggatgttctgcgttataccggaat

SEQ ID NO: 349707 - DNA, 75 bp, synthetic construct
  source 1..75: mol_type = other DNA
tgaagtgtgggtgaaaaaagtagcgtctgaaccaatcgggcaacgctataaagcgacagaagcattatttaagta

SEQ ID NO: 349708 - DNA, 75 bp, synthetic construct
  source 1..75: mol_type = other DNA
aatatcgaaaatgttattgttgtctgtaattttgaacatcgttttttagtcgcagagactttgaggaaacatgat

SEQ ID NO: 349709 - DNA, 75 bp, synthetic construct
  source 1..75: mol_type = other DNA
aatatgaaacacagcagagagtaccctgcgatcggcgacgtaatgccctgtatccggcaagatactggctgacgg

SEQ ID NO: 349710 - DNA, 75 bp, synthetic construct
  source 1..75: mol_type = other DNA
ttggaataagttggttgtatatgtcaatgattttaacttaagcaatcgagaaaaaatatatttaatccaaaggct

SEQ ID NO: 349711 - DNA, 75 bp, synthetic construct
  source 1..75: mol_type = other DNA
tgctacatatctcatgcgcaaacagggcgtagcgccaaccgtggcgattgttcacaggcgtgccgtttgccatac

SEQ ID NO: 349712 - DNA, 75 bp, synthetic construct
  source 1..75: mol_type = other DNA
ttttgaaggattttttcatgaagcaacctgattttgctaagtggtacttctatcaattacttaagagttatgagg

SEQ ID NO: 349713 - DNA, 75 bp, synthetic construct
  source 1..75: mol_type = other DNA
agtggtgttttaataaaagcatgcaatattttgatgattctgcaaagataaagcatgcatgctccgtaatgaatc

SEQ ID NO: 349714 - DNA, 75 bp, synthetic construct
  source 1..75: mol_type = other DNA
cagttagtacggaataataccacaatcgcatacgggagtattataaaaatcaacgaagatttttattttactatt

SEQ ID NO: 349715 - DNA, 75 bp, synthetic construct
  source 1..75: mol_type = other DNA
cggttaatacgcaataatacgactatagcatacggaagcattgtaaaaatcaacgaagatttttattttactgtt

SEQ ID NO: 349716 - DNA, 75 bp, synthetic construct
  source 1..75: mol_type = other DNA
ggtcgcctctatattacgtcagaagggcatgcttgccatgcatattttcgtgaagtcagcggtaatggtattcgt

SEQ ID NO: 349717 - DNA, 75 bp, synthetic construct
  source 1..75: mol_type = other DNA
atgacagcgacgtcgccagtgtggaggcaatactcccgttacacgccggaaatgaaaaccgcaatggtgctcaag

SEQ ID NO: 349718 - DNA, 75 bp, synthetic construct
  source 1..75: mol_type = other DNA
ttttagtaaatgatatttttttgaagggttttttcatgaagcaacctgattttgctaagtggtacttctatcaat

SEQ ID NO: 349719 - DNA, 75 bp, synthetic construct
  source 1..75: mol_type = other DNA
agaatttaatgaaccaacagcaatgatctttaaaaatgaaagcatcgataactctctgaataaatctatactttc

SEQ ID NO: 349720 - DNA, 75 bp, synthetic construct
  source 1..75: mol_type = other DNA
cgtgcggttgatatagcaaaaacagagcagtgggggagagttgttgagaaagagtgcggaagatgtaaaggcgtc

SEQ ID NO: 349721 - DNA, 75 bp, synthetic construct
  source 1..75: mol_type = other DNA
tgaatcagttacgtcattccgaaggcgagacactgagtgagatattgaataactgcgttttactctgtgaacagt

SEQ ID NO: 349722 - DNA, 75 bp, synthetic construct
  source 1..75: mol_type = other DNA
attatgagggcgaacagctgtatcttaatgagttaggatatgtttatggtaatgaagaaaaaacaaatgaaattg

SEQ ID NO: 349723 - DNA, 75 bp, synthetic construct
  source 1..75: mol_type = other DNA
aaataatctacagaaattaaataatctacagaagttaaataatctactgaagttaaataatctactgaagttaaa

SEQ ID NO: 349724 - DNA, 75 bp, synthetic construct
  source 1..75: mol_type = other DNA
atcaattgcgtactacagagggagaggctctgggtgaaacattaaacaactgcgttttactctgcgaacagttgt

SEQ ID NO: 349725 - DNA, 75 bp, synthetic construct
  source 1..75: mol_type = other DNA
ttgagttgttctgtgcgccgggcgaaattccctctgcccgcttaccgatgagcgatgtgcgtttttattcccgca

SEQ ID NO: 349726 - DNA, 75 bp, synthetic construct
  source 1..75: mol_type = other DNA
ttaagagctatgaggatgaaaagatttattttgataagttagggtataattttaataataaagagtctaatgaag

SEQ ID NO: 349727 - DNA, 75 bp, synthetic construct
  source 1..75: mol_type = other DNA
gctatttgataatgttgagtctatatttaatgaagtacctgtcagcattttagtgaatgatatttttatgaatga

SEQ ID NO: 349728 - DNA, 75 bp, synthetic construct
  source 1..75: mol_type = other DNA
ttaatcttacaccggtcatccattcgatgttgatgacttttttagaattgccatataataatgatgtaaaaatac

SEQ ID NO: 349729 - DNA, 75 bp, synthetic construct
  source 1..75: mol_type = other DNA
caattttaaacaaaaaaatgaagccttagatacctggtatgtgggaatgaatgattttgcccgaattgccggggg

SEQ ID NO: 349730 - DNA, 75 bp, synthetic construct
  source 1..75: mol_type = other DNA
gcatgcaatattttgatgatactaaaaagataaagcatgcatgctccgtaataaatcatattaatcttcgcagcg

SEQ ID NO: 349731 - DNA, 75 bp, synthetic construct
  source 1..75: mol_type = other DNA
atacttactgggcgaaaatggtatacttgaagaaatagataagctctacgaattaaatgatcacggaattgataa

SEQ ID NO: 349732 - DNA, 75 bp, synthetic construct
  source 1..75: mol_type = other DNA
ggggattatttcagcatcattgaaactaaacacggctcattcctgccggatcacacagcgaaaaaaagaaaaaaa

SEQ ID NO: 349733 - DNA, 75 bp, synthetic construct
  source 1..75: mol_type = other DNA
aatgccgcaacggctcttgttgcactggtcttcagtattcttaccggaagcgctttaggcattatcgggtatggt

SEQ ID NO: 349734 - DNA, 75 bp, synthetic construct
  source 1..75: mol_type = other DNA
cgctttaggcattatcgggtatggtttactgatggctgtcaccggtgcgctgattgatgaatcgcttgtggaaaa

SEQ ID NO: 349735 - DNA, 75 bp, synthetic construct
  source 1..75: mol_type = other DNA
tccagtcgttgaaggtcgtgctggttcgtggagctgttgcattgggcctgggttttggcattggcaggcttgtat

SEQ ID NO: 349736 - DNA, 75 bp, synthetic construct
  source 1..75: mol_type = other DNA
ctgggtggcaatagcgatggcatgacaagcgcggcagatacagtatcaatttcggcagaactgcccggcgaccgc

SEQ ID NO: 349737 - DNA, 75 bp, synthetic construct
  source 1..75: mol_type = other DNA
gacatagtgtcgttgctcgttccggcctgtctgctttacgtccaggcatcctggggagcaatagcgatggcatga

SEQ ID NO: 349738 - DNA, 75 bp, synthetic construct
  source 1..75: mol_type = other DNA
tcgcggtcttgccggtttccggcacgctggtcagtaaaacccgtgcgcttcagccttattccggcatgacgggtt

SEQ ID NO: 349739 - DNA, 75 bp, synthetic construct
  source 1..75: mol_type = other DNA
cacaggctattagtatcctcagaacaatgcaggaaataaaaagagggcgttatgtgtttttttcctccagaacaa

SEQ ID NO: 349740 - DNA, 75 bp, synthetic construct
  source 1..75: mol_type = other DNA
attgtggagcattgaaagcaaatccattacttaagataaagactgcattcacaggaaagaaaaataaatcattag

SEQ ID NO: 349741 - DNA, 75 bp, synthetic construct
  source 1..75: mol_type = other DNA
aagaaacggcagacatacacgatagggcgttttcctgaattctcactcgcggaagcacgggaagtacgtgatgaa

SEQ ID NO: 349742 - DNA, 75 bp, synthetic construct
  source 1..75: mol_type = other DNA
ggcgttttcctgaattctcactcgcggaagcacgggaagtacgtgatgaacttcggcgaatgattgcacgtggag

SEQ ID NO: 349743 - DNA, 75 bp, synthetic construct
  source 1..75: mol_type = other DNA
ttttttgatgaggcgagaaaaggggtaattaatagatcctgtgggaagaaaggtttgagaatagtaaatggttga

SEQ ID NO: 349744 - DNA, 75 bp, synthetic construct
  source 1..75: mol_type = other DNA
agatatttataatagaactacttatttagaacaacgcaaaattatgatgcaatgggtaggcgatttttttgatga

SEQ ID NO: 349745 - DNA, 75 bp, synthetic construct
  source 1..75: mol_type = other DNA
cgccgttgtcgtccggtgacgatccggaaaactggacgcaagaacaattaatcaactttgcaaaatttgtgatga

SEQ ID NO: 349746 - DNA, 75 bp, synthetic construct
  source 1..75: mol_type = other DNA
gacaatttcgtaatacagaaggcgaggcacggggagaagcaatgaataactgcgttttgctttgcgaacaattat

SEQ ID NO: 349747 - DNA, 75 bp, synthetic construct
  source 1..75: mol_type = other DNA
aacagtgcacaagagatagcgcgacgtgacagtgtcggtgaagtaccgcccataccgtggcgcacggtcgttggc

SEQ ID NO: 349748 - DNA, 75 bp, synthetic construct
  source 1..75: mol_type = other DNA
gccttccacgcccgcgccagccactatcatgccggaaaatgcttgtgccagcttgcggcgttaaccagtcgcttg

SEQ ID NO: 349749 - DNA, 75 bp, synthetic construct
  source 1..75: mol_type = other DNA
atgaattcactacgtccggaattattagaactgacaccgcaggccctgacggcgttaagcaatgccggttttgtt

SEQ ID NO: 349750 - DNA, 75 bp, synthetic construct
  source 1..75: mol_type = other DNA
gcgcagcaagcggcggaacgctgcaactggcgatgggtgagtgaatcgctacggcaattgcgcgccagcgttgat

SEQ ID NO: 349751 - DNA, 75 bp, synthetic construct
  source 1..75: mol_type = other DNA
ggctcagtgcagctgcggggccagcggcatgtgccgccatcgcgtgatgctggtgttaagttatcagcgactttg

SEQ ID NO: 349752 - DNA, 75 bp, synthetic construct
  source 1..75: mol_type = other DNA
aaaaaagaagaagagtgggatccggcaatctggctgaaagaactggctaccttgcccgatgccacccgcaaacgc

SEQ ID NO: 349753 - DNA, 75 bp, synthetic construct
  source 1..75: mol_type = other DNA
agcgttttgcctgtgccgtctactggtcatcagttgctgatacgctgccaggcgctacttattcagctgctccat

SEQ ID NO: 349754 - DNA, 75 bp, synthetic construct
  source 1..75: mol_type = other DNA
cttaacaagccgcatatcctgcaacactaccgcgaacgttttaccaacatcctggtggacgaattccaggatacc

SEQ ID NO: 349755 - DNA, 75 bp, synthetic construct
  source 1..75: mol_type = other DNA
accggaggcggtcagctgtaatttgttgtccctgtgtgtgctggcaccggtattctgtacacccagaaagctggc

SEQ ID NO: 349756 - DNA, 75 bp, synthetic construct
  source 1..75: mol_type = other DNA
gggcttgcgggttcgctggacacactgcgccgccatatcctggacaacttcccgcgtatcgagcagaccctgacg

SEQ ID NO: 349757 - DNA, 75 bp, synthetic construct
  source 1..75: mol_type = other DNA
cttaacaagccgcatatcctgcaacactaccgcgaacgttttaccaatatcctggtggatgaattccaggacact

SEQ ID NO: 349758 - DNA, 75 bp, synthetic construct
  source 1..75: mol_type = other DNA
gaagagggcatgttcccaagccagatgtcgctggatgaaggcggacgtctggaagaagaacgccgtctggcctac

SEQ ID NO: 349759 - DNA, 75 bp, synthetic construct
  source 1..75: mol_type = other DNA
gcctgctggcgggtgataccggcaaagtgatgatcgtcggtgatgatgaccagtcaatttatggctggcgcggtg

SEQ ID NO: 349760 - DNA, 75 bp, synthetic construct
  source 1..75: mol_type = other DNA
caggcgggggcttctcttgaacgcccgggcgggcgatttgccagatttgaaactgcttttgatggattacgggct

SEQ ID NO: 349761 - DNA, 75 bp, synthetic construct
  source 1..75: mol_type = other DNA
tctggatgtcgccggttggcctcattaccgcgctggcggcggggattgccctcctgtgggaggactatcagacct

SEQ ID NO: 349762 - DNA, 75 bp, synthetic construct
  source 1..75: mol_type = other DNA
ccggtctggataatctttactgggcgtcacagcgcaccggcgcgacagtccagggaattcagtctattggctatg

SEQ ID NO: 349763 - DNA, 75 bp, synthetic construct
  source 1..75: mol_type = other DNA
tctggatgtcgccgattggtctcattaccgcgctggcggcggggattgcccttctgtgggaggactatcagacct

SEQ ID NO: 349764 - DNA, 75 bp, synthetic construct
  source 1..75: mol_type = other DNA
ccggtctggataatctctactgggcgtcacagcgcactggcgcgacggtacaggggattcagtctattggctatg

SEQ ID NO: 349765 - DNA, 75 bp, synthetic construct
  source 1..75: mol_type = other DNA
ccggacggggaataaacagcgtggagaaaattgtctctacctgggcgcctgcgtctgataataacaacacaactg

SEQ ID NO: 349766 - DNA, 75 bp, synthetic construct
  source 1..75: mol_type = other DNA
gtaagacgcgcgtactggtgcatcgtatcgcctggctgatgagcgtggaaaactgctcgccgtactcgattatgg

SEQ ID NO: 349767 - DNA, 75 bp, synthetic construct
  source 1..75: mol_type = other DNA
aagaacaggctctgcaagaaataaaagaactggaagccaaacaaacctctgcaacacaggctgcggaaaaaatga

SEQ ID NO: 349768 - DNA, 75 bp, synthetic construct
  source 1..75: mol_type = other DNA
tagattatattattatcgataattcgttgcctgtagggttcccgacatcaccagctttcagcaatgcatgtttat

SEQ ID NO: 349769 - DNA, 75 bp, synthetic construct
  source 1..75: mol_type = other DNA
agcggctgaaacaaatcgccctccaatgaagcgtattcattgtggtaaatggcgtactaaagctgctaaggagca

SEQ ID NO: 349770 - DNA, 75 bp, synthetic construct
  source 1..75: mol_type = other DNA
accactggaaatcgttgttgatgtcagaagctttacgataactgttcttcctgaaccagaagaaatcgttatccc

SEQ ID NO: 349771 - DNA, 75 bp, synthetic construct
  source 1..75: mol_type = other DNA
gacaagaaaaaattggttgccgaatactgccagaagaactttgttgataaaggaatgattgctgatatcgcattc

SEQ ID NO: 349772 - DNA, 75 bp, synthetic construct
  source 1..75: mol_type = other DNA
taagcagaagacctgctgcaaagtcttaccgtgaccccaataaggtcagtaaagtaaatgtttcagggaagaaat

SEQ ID NO: 349773 - DNA, 75 bp, synthetic construct
  source 1..75: mol_type = other DNA
agcgatttatggaattaatcgacgccttagcgcaagaaactgccgatatgccgctgcatgtacagactgaccggg

SEQ ID NO: 349774 - DNA, 75 bp, synthetic construct
  source 1..75: mol_type = other DNA
agccgcccggtcagccatcagcgtatgggtacaccgatggctgagaacgacagcggttacaaactcggccagcgc

SEQ ID NO: 349775 - DNA, 75 bp, synthetic construct
  source 1..75: mol_type = other DNA
gcatgtgggtcggcaccttccacgggctggcgcaccgcctgctgcgtgcgcaccatatggacgccaacctgccgc

SEQ ID NO: 349776 - DNA, 75 bp, synthetic construct
  source 1..75: mol_type = other DNA
gcgtggcgttaaatcttaccgtgataaaacaaaagtcagtaaggtcgttgcaggtaagaaaccatcagtcagtat

SEQ ID NO: 349777 - DNA, 75 bp, synthetic construct
  source 1..75: mol_type = other DNA
aggatttccagatcctcgacagcgaagaccagctgcgcctgcttaagcgtctgatcaaagccatgaacctcgacg

SEQ ID NO: 349778 - DNA, 75 bp, synthetic construct
  source 1..75: mol_type = other DNA
gatttccctctattgcgcctttaacgaactcgacgaagcgcgttttgtggttaaccgcatcaaaacctggcagga

SEQ ID NO: 349779 - DNA, 75 bp, synthetic construct
  source 1..75: mol_type = other DNA
gaagctcagcggcatgccgtattaccgggctaaccagtatgcgcagatgctgggcattgacgaaaatacccttat

SEQ ID NO: 349780 - DNA, 75 bp, synthetic construct
  source 1..75: mol_type = other DNA
aaagaatattgaaaccttccacactgcgcaaaaactgccgccggtagatgtagaaactcagccaggcgtacgttg

SEQ ID NO: 349781 - DNA, 75 bp, synthetic construct
  source 1..75: mol_type = other DNA
atctccgcttctgaaagcattacccgcactgttaacgatattctcgatagcgtgaaagcacgcggtgatgacgcc

SEQ ID NO: 349782 - DNA, 75 bp, synthetic construct
  source 1..75: mol_type = other DNA
aggctgaacacggcccggattcacaggtgattttactgacgcccgatgctgatatggcgcgtcgcgttgccgaag

SEQ ID NO: 349783 - DNA, 75 bp, synthetic construct
  source 1..75: mol_type = other DNA
ccaccgggcagcagagtacggcagtggggcagggcagtatggcgctggggaataatatgacggcggaacaggcac

SEQ ID NO: 349784 - DNA, 75 bp, synthetic construct
  source 1..75: mol_type = other DNA
gcaccgttaacgatattctcgataacgtgaaagcacgcggcgatgaggccctgcgggaatatagtgcgaagtttg

SEQ ID NO: 349785 - DNA, 75 bp, synthetic construct
  source 1..75: mol_type = other DNA
gtgattacgcctccggcaccaaccacgtgctgccgacttacggttataccgccacctgttccagcctcgggctgg

SEQ ID NO: 349786 - DNA, 75 bp, synthetic construct
  source 1..75: mol_type = other DNA
agcgaagtcgccaaacgcttaggaccagacgtttatcaaacctttactgaaggtcgcagtcagcatgaatggatc

SEQ ID NO: 349787 - DNA, 75 bp, synthetic construct
  source 1..75: mol_type = other DNA
tgaggagatgaaaacgaccgggatctttaagaaaaaatgtccagaagagcactatgtcgctttccgagcattccg

SEQ ID NO: 349788 - DNA, 75 bp, synthetic construct
  source 1..75: mol_type = other DNA
tttgggtacacttttgttgcacttgatcctgatggacatcgtattcgcctatgtgcaacggacacaagtgggatc

SEQ ID NO: 349789 - DNA, 75 bp, synthetic construct
  source 1..75: mol_type = other DNA
atgagctttaacacaatcattgactggaatagctgtactgcggagcaacaacgccagctgttaatgcgcccggcg

SEQ ID NO: 349790 - DNA, 75 bp, synthetic construct
  source 1..75: mol_type = other DNA
ccatgaagcgcgtcggcaagcgcggtgaaggtaaatttgaacggataagttgggatgaagccctggataccatca

SEQ ID NO: 349791 - DNA, 75 bp, synthetic construct
  source 1..75: mol_type = other DNA
cgtatgagcggcggcggcgtcacttactatgttgagcaagcgcgtgaacgctcaaatgcgcgcatgatcgtcatc

SEQ ID NO: 349792 - DNA, 75 bp, synthetic construct
  source 1..75: mol_type = other DNA
cgcgaagcatcgggaaaacaataaacgggtggattttcggcaaagaagagggcggctcagaccagcaggagagcg

SEQ ID NO: 349793 - DNA, 75 bp, synthetic construct
  source 1..75: mol_type = other DNA
cagtatggaaaaatattattgttagtgacgagtccctgacaagatgtatctattctttgcgctgcatttttgaaa

SEQ ID NO: 349794 - DNA, 75 bp, synthetic construct
  source 1..75: mol_type = other DNA
agtatcgtgtacgatttgactagcaatacagatgtagaaaatatagagaaactaaaaaaaaatctaatagagaaa

SEQ ID NO: 349795 - DNA, 75 bp, synthetic construct
  source 1..75: mol_type = other DNA
ggttaagaattcgacttaactccgcggatttcacgctaaacagccttcttcccggtgaaaaaaagctggcggaag

SEQ ID NO: 349796 - DNA, 75 bp, synthetic construct
  source 1..75: mol_type = other DNA
tgttacagagaaggtatcttccggcaggactgcaggcgggtattaccacctgcatacagggtacacctggtctgt

SEQ ID NO: 349797 - DNA, 75 bp, synthetic construct
  source 1..75: mol_type = other DNA
taacaatattgatgctgaccttttactggttactggaggacttatttttatattgttcctcatgatgcttgttat

SEQ ID NO: 349798 - DNA, 75 bp, synthetic construct
  source 1..75: mol_type = other DNA
gaattaactgaaatactgacaaaaatatcttttcctgaaaaatccgggagcaattcgcttaaaccggaagcggtc

SEQ ID NO: 349799 - DNA, 75 bp, synthetic construct
  source 1..75: mol_type = other DNA
caaaatcggctctaatcttgctggtggcctggcgggttcgctggacacgctgcgccgtcatatcctggataactt

SEQ ID NO: 349800 - DNA, 75 bp, synthetic construct
  source 1..75: mol_type = other DNA
tcgcctgggtgtacagacccgtgacgccagcggtaacatgcgcgatatggccgctatctttacgggtgtcggcca

SEQ ID NO: 349801 - DNA, 75 bp, synthetic construct
  source 1..75: mol_type = other DNA
aatgcggcgaggaatgtccggcttcacggctgaataccagtcgatgatgcagaagacaggcttcgatgctgacag

SEQ ID NO: 349802 - DNA, 75 bp, synthetic construct
  source 1..75: mol_type = other DNA
cagcgctgagtcggccatgtcctccctcgaagggttggctggcttcatgcgtagcaatccgggggcggaagggtt

SEQ ID NO: 349803 - DNA, 75 bp, synthetic construct
  source 1..75: mol_type = other DNA
gcgtcttagcagcatgccgtattaccgcgcgaaccagtacgctcagatgctgggtctggatgaaaacaccctgat

SEQ ID NO: 349804 - DNA, 75 bp, synthetic construct
  source 1..75: mol_type = other DNA
tcctcgtctcgctcggttttgatatcgatgaagcaggcgcgtcaaagctcgactctgttctcgccggtacgaccg

SEQ ID NO: 349805 - DNA, 75 bp, synthetic construct
  source 1..75: mol_type = other DNA
ttttatctgggcaatcgggaaaataattgagccagttattgaattgtataacgacgtggtatgggcgtcgttcaa

SEQ ID NO: 349806 - DNA, 75 bp, synthetic construct
  source 1..75: mol_type = other DNA
gcgctttaatcaactgaagcatatccgtgtgagggatgtctgtccggatgaaagcataattgatcttaagctgga

SEQ ID NO: 349807 - DNA, 75 bp, synthetic construct
  source 1..75: mol_type = other DNA
atgaggtgcagcggaaatgtaacccgacacgacgagcgctggcaagcggtttttgtgttgcgtgttgatgtggtt

SEQ ID NO: 349808 - DNA, 75 bp, synthetic construct
  source 1..75: mol_type = other DNA
cttgcttatcacaagaaaggccagatcgaatacattccgttcccggataaactgaaaggccgctaccaggcgttc

SEQ ID NO: 349809 - DNA, 75 bp, synthetic construct
  source 1..75: mol_type = other DNA
ggcagatgtaaacctgtggttcctggaaaatggcgtttccggcatcttcaacctcggtactggtcgtgcggaatc

SEQ ID NO: 349810 - DNA, 75 bp, synthetic construct
  source 1..75: mol_type = other DNA
gaattgtataacgacgtggtatgggcgtcgttcaacacactgcacaataaaattaatccgtataaggaaaactga

SEQ ID NO: 349811 - DNA, 75 bp, synthetic construct
  source 1..75: mol_type = other DNA
tcagcagcggtcgaccgtttattgagaaactcaaacgtgccgccgccggagccagtgcgattatcgcctggggaa

SEQ ID NO: 349812 - DNA, 75 bp, synthetic construct
  source 1..75: mol_type = other DNA
tgcagtcgccagcgccgttgaccagcgcagacgtcataaccagcaacttgcagaagccgaacaacagccgggcaa

SEQ ID NO: 349813 - DNA, 75 bp, synthetic construct
  source 1..75: mol_type = other DNA
tgccggagagttcgtccagagttgggatgatgacgccgcgcgtaaaggttactgcctgtacaaaatgggctgcaa

SEQ ID NO: 349814 - DNA, 75 bp, synthetic construct
  source 1..75: mol_type = other DNA
ctgaatgaggttaagagtattcttgaaaaaggatatgaggatgcgcaaaaagcattcgcagataacgcgaataaa

SEQ ID NO: 349815 - DNA, 75 bp, synthetic construct
  source 1..75: mol_type = other DNA
gagctggatgcggccggtgagctgggaaactgggaatatgatctcgatacctacaatcactgtattgcggtgcta

SEQ ID NO: 349816 - DNA, 75 bp, synthetic construct
  source 1..75: mol_type = other DNA
cagcgccgttgaccagcgcagacgtcataaccagcaacctacagaaaccgaacatcagccaggcaatgaggataa

SEQ ID NO: 349817 - DNA, 75 bp, synthetic construct
  source 1..75: mol_type = other DNA
aagacggcaccaagtttgtgaacctggtggatctgaatatcgcagactatatggataaggaagacttcctgatcc

SEQ ID NO: 349818 - DNA, 75 bp, synthetic construct
  source 1..75: mol_type = other DNA
aaatcgccgaactctccatgctctgcggcttcgatgatgatcttgccgcacagacaacgcagaccagcaaccgta

SEQ ID NO: 349819 - DNA, 75 bp, synthetic construct
  source 1..75: mol_type = other DNA
atatctgacctgaaacagcatggacagatactgctggtcgttgaccagtctgctaccatcggagcgttacccgtc

SEQ ID NO: 349820 - DNA, 75 bp, synthetic construct
  source 1..75: mol_type = other DNA
agcgatcttattcaggataactcgttgctgggcggagatttagcgacgcaatatctgatcgacaaaggttatacc

SEQ ID NO: 349821 - DNA, 75 bp, synthetic construct
  source 1..75: mol_type = other DNA
tcgccatgatgcgcgacgggactttttctgttcgccatgatgcgcgacgggactttttataccccgcaggcgtca

SEQ ID NO: 349822 - DNA, 75 bp, synthetic construct
  source 1..75: mol_type = other DNA
catgcgccgcatagccgacttacacgccagtgaagctaaaactgatgctcgtgacgctgccatcattgccgaagc

SEQ ID NO: 349823 - DNA, 75 bp, synthetic construct
  source 1..75: mol_type = other DNA
ccgagacttgagcacccggcggtactcgatcttctccagcgatatccctcaccagaaaaactcgcttcgctgggt

SEQ ID NO: 349824 - DNA, 75 bp, synthetic construct
  source 1..75: mol_type = other DNA
ggtcatacccgtatcgcctgtattaccggtccgctggataaaactccggcgcgcctgcggttggaaggttatcgg

SEQ ID NO: 349825 - DNA, 75 bp, synthetic construct
  source 1..75: mol_type = other DNA
aataattgagccagttattgaattgtataccgacgttgtatgggcgtcgttcaacacactgcacaacaaaatcaa

SEQ ID NO: 349826 - DNA, 75 bp, synthetic construct
  source 1..75: mol_type = other DNA
cttccaggcagtagcagatgcaacactggcttatcacaagaagggtcagatcgaatacattccgttcccggataa

SEQ ID NO: 349827 - DNA, 75 bp, synthetic construct
  source 1..75: mol_type = other DNA
tgttgcccgcctggcgggcgtttctacctcaacagtttctcacgttatcaataaagatcgcttcgtcagtgaagc

SEQ ID NO: 349828 - DNA, 75 bp, synthetic construct
  source 1..75: mol_type = other DNA
aggcagagttacaggttccgcaggatatcgcggtgattggctatgacgatatcgaactggcaagctttatgacgc

SEQ ID NO: 349829 - DNA, 75 bp, synthetic construct
  source 1..75: mol_type = other DNA
gattggctatgacgatatcgaactggcaagctttatgacgccaccattaacaactatccaccaaccgaaagatga

SEQ ID NO: 349830 - DNA, 75 bp, synthetic construct
  source 1..75: mol_type = other DNA
tcagcagtggtcgaccgtttattgaaaaactcaaacgcgccgccgccggagccagtgcgattatcgcctggggaa

SEQ ID NO: 349831 - DNA, 75 bp, synthetic construct
  source 1..75: mol_type = other DNA
atcggtcgtctggatatggggcttgccaccgttggcggcgtcgggattgtgatcctcgccattatcctcgaccgc

SEQ ID NO: 349832 - DNA, 75 bp, synthetic construct
  source 1..75: mol_type = other DNA
agcaacggaaactaaccgcccggcaatgcagcgtgttcatcgtgctaaatggaataacaccgagtctcaggaaca

SEQ ID NO: 349833 - DNA, 75 bp, synthetic construct
  source 1..75: mol_type = other DNA
aaaaaagacaggagctggaatgataagaagataatgctccaatggcgtgagtcgtgggccacaatgtcaaacagc

SEQ ID NO: 349834 - DNA, 75 bp, synthetic construct
  source 1..75: mol_type = other DNA
cgtatcgatggtcacctgatttcggtacgtgagtccgctgaacaaatttgtcgcgttctggcctattacaaaccg

SEQ ID NO: 349835 - DNA, 75 bp, synthetic construct
  source 1..75: mol_type = other DNA
aaagcgaaatatcctcagatttaatgaaaactttagattcctcaatgcgactgagtaatttcaataatgactaca

SEQ ID NO: 349836 - DNA, 75 bp, synthetic construct
  source 1..75: mol_type = other DNA
atatgttttatgatgactttgggaatttatctgctgattttacatatgatgggttacatttcaacggaaaagcat

SEQ ID NO: 349837 - DNA, 75 bp, synthetic construct
  source 1..75: mol_type = other DNA
ctgaaccggaagaaatcgttctccctgactacccggcaacaacaaagcagcaaccgactcatgcagagtcagaac

SEQ ID NO: 349838 - DNA, 75 bp, synthetic construct
  source 1..75: mol_type = other DNA
gatctcataccatccatcccatcagatggcataaaaaagagtacaatactaaaccaaaaccatcatggattcatg

SEQ ID NO: 349839 - DNA, 75 bp, synthetic construct
  source 1..75: mol_type = other DNA
gaatcagaccatgacaagaccgttcgttttccaagccgtcctaaactggaagagcctaattttgataagaacatg

SEQ ID NO: 349840 - DNA, 75 bp, synthetic construct
  source 1..75: mol_type = other DNA
ggcatcaccttcattacctcccgaactaatgaagggggtaaaatttctaaaactcaaaccatcagtctctaatat

SEQ ID NO: 349841 - DNA, 75 bp, synthetic construct
  source 1..75: mol_type = other DNA
agccggaagtaaatagaagcttagatctcacaccttcaatgccaccagaacacatgaggcaaggaagcgcaccaa

SEQ ID NO: 349842 - DNA, 75 bp, synthetic construct
  source 1..75: mol_type = other DNA
tattcccgtagaactcagcaatgatgacaagaaaagattagttgccgaatactgccagaaaaactttgtcgataa

SEQ ID NO: 349843 - DNA, 75 bp, synthetic construct
  source 1..75: mol_type = other DNA
gaaggtgagttgtgtacccgtaacgatccggaagggcgtccaacggtgtttgaccgtctgccaaagctgcgcggt

SEQ ID NO: 349844 - DNA, 75 bp, synthetic construct
  source 1..75: mol_type = other DNA
actctggaatccatggccgaaaccctgtttaggcagtggtttattttagatagtactggtgtatcagttagtata

SEQ ID NO: 349845 - DNA, 75 bp, synthetic construct
  source 1..75: mol_type = other DNA
gtattaaatcatctatccttaaaaaaattccaatatctctgccaccttataatgagcaagttgctataagttctg

SEQ ID NO: 349846 - DNA, 75 bp, synthetic construct
  source 1..75: mol_type = other DNA
tcagtacgacctctcatccctttcgccggatacccgtcatcgttgctctcgtgtttttcgccctggcaaccagcg

SEQ ID NO: 349847 - DNA, 75 bp, synthetic construct
  source 1..75: mol_type = other DNA
gaaactcaaacgtgccgctgccggagccagcgcgattatcgcctggggaacctgcgcgtcctggggctgcgtgca

SEQ ID NO: 349848 - DNA, 75 bp, synthetic construct
  source 1..75: mol_type = other DNA
ccgacaaacccattatcaaagtgcctggctgcccgccgatcccggatgtgatgagcgccatcattacctatatgg

SEQ ID NO: 349849 - DNA, 75 bp, synthetic construct
  source 1..75: mol_type = other DNA
gaactggatgcggccggtgagctgggaaactgggaatatgatctcgatacctacaatcactgtattgcggtgctg

SEQ ID NO: 349850 - DNA, 75 bp, synthetic construct
  source 1..75: mol_type = other DNA
agagtaataagaattcagaattaattaaaccattagatgaactgcacaggttaacaaattttggaagtgatttca

SEQ ID NO: 349851 - DNA, 75 bp, synthetic construct
  source 1..75: mol_type = other DNA
cttagctgtacctccagtaaatggacgagttgatcgtaacaactatattattaatgagttgaatcatttgttgtt

SEQ ID NO: 349852 - DNA, 75 bp, synthetic construct
  source 1..75: mol_type = other DNA
gcctgatccgtgttcgttacggtgatatcccactgccaaaaggtctgccacgcggtggctggacggagctggacc

SEQ ID NO: 349853 - DNA, 75 bp, synthetic construct
  source 1..75: mol_type = other DNA
attattggaatgttactcatttaaatggacgtgaagtgaataatttaggtattgctggcatcaatagtaaggagt

SEQ ID NO: 349854 - DNA, 75 bp, synthetic construct
  source 1..75: mol_type = other DNA
atttttattggttatgtttctaattatttaagacaaaaacatttctttggtgctgacagtatagcctatattatg

SEQ ID NO: 349855 - DNA, 75 bp, synthetic construct
  source 1..75: mol_type = other DNA
acgacattgtgaacgatggttggactgttgaatacactataaaatggacaaaaaatctgatcaatagagtaaaaa

SEQ ID NO: 349856 - DNA, 75 bp, synthetic construct
  source 1..75: mol_type = other DNA
ggcggagtgaacgcatattcatcgctaccgcgcgacccggatttttatcgtaagttgccagatatgcctgcgccg

SEQ ID NO: 349857 - DNA, 75 bp, synthetic construct
  source 1..75: mol_type = other DNA
aaagaagtggtatataaagccgagaaacaccagtcaacaccaccagagactgaacagccggtatccagagagtat

SEQ ID NO: 349858 - DNA, 75 bp, synthetic construct
  source 1..75: mol_type = other DNA
ggccaggagatggtttataaggctgaaaaaacggactcccagccgccacaaaatggcaccatgcaacagcaatac

SEQ ID NO: 349859 - DNA, 75 bp, synthetic construct
  source 1..75: mol_type = other DNA
tgttgtattcaacggtggggatcgtttttactgccgccatcgacaatacctggcttactaccaaacgccgaaaga

SEQ ID NO: 349860 - DNA, 75 bp, synthetic construct
  source 1..75: mol_type = other DNA
cgttattatcttgccgttttgcaggtatataacgatagccagattcgtaaccacagcaattataacgatgtgcgt

SEQ ID NO: 349861 - DNA, 75 bp, synthetic construct
  source 1..75: mol_type = other DNA
ttcagtgatgttgccgagtggctagagtcattaggtcgtaacgctgtgaatgtagtattcaacggcgggggtcgt

SEQ ID NO: 349862 - DNA, 75 bp, synthetic construct
  source 1..75: mol_type = other DNA
ttattgttttatgctttatcagtgggtttattttattcattgcctatcattattctaaagaacaaatcgcatata

SEQ ID NO: 349863 - DNA, 75 bp, synthetic construct
  source 1..75: mol_type = other DNA
caggaacagctactggttcctggaataccggaagcggtgacggaagaagaagcctttaatgccatggttcagttc

SEQ ID NO: 349864 - DNA, 75 bp, synthetic construct
  source 1..75: mol_type = other DNA
acgattagagacggttcaattcaggagcactggtttagtacagtcggtatctttgtgatcgattcagtgctgatc

SEQ ID NO: 349865 - DNA, 75 bp, synthetic construct
  source 1..75: mol_type = other DNA
gataatccggcctacgtccgttttgacatttctgtctcaggtaaagaggctaccagccttatcacccgctgccag

SEQ ID NO: 349866 - DNA, 75 bp, synthetic construct
  source 1..75: mol_type = other DNA
ctgcaaaatctgagtacttcaacctgacaatcaaaggcatcgggtatctcagcaacatccgccaggttaaccatc

SEQ ID NO: 349867 - DNA, 75 bp, synthetic construct
  source 1..75: mol_type = other DNA
ggtacctcagtaatgtgcgtcaggttaaccatcagaatggctcgttcctttgctgcgtgattaacgcactgagtg

SEQ ID NO: 349868 - DNA, 75 bp, synthetic construct
  source 1..75: mol_type = other DNA
tatgaaactgtttaagaagtttcgggggtatttattggtgaagacgcaggttaatgcaacttattatggaatttt

SEQ ID NO: 349869 - DNA, 75 bp, synthetic construct
  source 1..75: mol_type = other DNA
gctggcaattaattggggtacaaagttcggctcctgccgcgaaagatcgctggcgcgccgataaccgggccattt

SEQ ID NO: 349870 - DNA, 75 bp, synthetic construct
  source 1..75: mol_type = other DNA
tgggtgcaatgtgtctgacgtctgcatttgtttttgcagataaaccagatgaatctaaatcggcaaacgataaag

SEQ ID NO: 349871 - DNA, 75 bp, synthetic construct
  source 1..75: mol_type = other DNA
gcaaaatcggtgacggtaaaattttcgtctttgacgtggcgcgggttattcgtatccgtaccggtgaagaggacg

SEQ ID NO: 349872 - DNA, 75 bp, synthetic construct
  source 1..75: mol_type = other DNA
aacaagaaagttattctgttgttaatttagaaaaacaactaatgagtaataaatcaccgaagcaaacgctattaa

SEQ ID NO: 349873 - DNA, 75 bp, synthetic construct
  source 1..75: mol_type = other DNA
accctgccgaaaattgctccggcgagcatggaagtcaatgcgttaccttccattgccgacattcccctgtatgac

SEQ ID NO: 349874 - DNA, 75 bp, synthetic construct
  source 1..75: mol_type = other DNA
ttaatgcggtttattatgggggagtaaaatttgagaatgcattgggtatgaataaggatcttttgtttggatcaa

SEQ ID NO: 349875 - DNA, 75 bp, synthetic construct
  source 1..75: mol_type = other DNA
agcggtggtgacaattaacagtacggtggggatctctgcactgattcataacaaaccactcaaagtgatgggcaa

SEQ ID NO: 349876 - DNA, 75 bp, synthetic construct
  source 1..75: mol_type = other DNA
gtactcagtacatcagtaagcaggagtacgatcaggcactggcagatgcacaacaggcaaatgctgctgtcactg

SEQ ID NO: 349877 - DNA, 75 bp, synthetic construct
  source 1..75: mol_type = other DNA
gcactcagtacatcagtaagcaagagtacgatcaggcactggctaacgcgcaacaagcgaacgctgcagttactg

SEQ ID NO: 349878 - DNA, 75 bp, synthetic construct
  source 1..75: mol_type = other DNA
accgatcagcaaaccttgatcctcaacaccgcgaccgcttatttcaacgtgttgaatgctattgacgttctttcc

SEQ ID NO: 349879 - DNA, 75 bp, synthetic construct
  source 1..75: mol_type = other DNA
ccgaacgaaagcacgccgggcctgaacggcgcgggactgctgtatcaagggtatgttgaaacgtctaacgtcaac

SEQ ID NO: 349880 - DNA, 75 bp, synthetic construct
  source 1..75: mol_type = other DNA
ggtgattcgtctgggacgtggtccgacgcagcgttgtgtgaatcatgtttctgaaccggataccgaaattccacc

SEQ ID NO: 349881 - DNA, 75 bp, synthetic construct
  source 1..75: mol_type = other DNA
cggtagcttttcctgtgggtgtggggctggcactggctctgggtgtgatcaccacctatatcggcaatccgcagg

SEQ ID NO: 349882 - DNA, 75 bp, synthetic construct
  source 1..75: mol_type = other DNA
tgtctgggccaatgatgtgcgcacaatgcggatgctggatggcagaagccacagacaaatttgtgaaatgtttgg

SEQ ID NO: 349883 - DNA, 75 bp, synthetic construct
  source 1..75: mol_type = other DNA
aaaccaccttaccatccggattacaaatcggtacgggggtacgcccggtcgccactgaacgcttacacagccagg

SEQ ID NO: 349884 - DNA, 75 bp, synthetic construct
  source 1..75: mol_type = other DNA
atgatcagttcattatggatcgccaaaacgggccttgatgcccagcaaaccaatatggacgtcattgccaacaac

SEQ ID NO: 349885 - DNA, 75 bp, synthetic construct
  source 1..75: mol_type = other DNA
gctacagctaccagggcaacagcgatcaccgccagaccaccgtgtcgaacggcgtggaagtggacaccaacgtgg

SEQ ID NO: 349886 - DNA, 75 bp, synthetic construct
  source 1..75: mol_type = other DNA
tccctgtcgcaggagctgcaaaacccgggcgtcgacccggcagatccgcaggtgcaaagcgatattcagaacgcc

SEQ ID NO: 349887 - DNA, 75 bp, synthetic construct
  source 1..75: mol_type = other DNA
acgacctcaacgcctcgattgcgtcgctcggcgagacacaaaacaccatgtcgatgttgagcgatgcacagaccg

SEQ ID NO: 349888 - DNA, 75 bp, synthetic construct
  source 1..75: mol_type = other DNA
tataacacaactgaacaatggctggaacagttcccgttctggtcagagtcaacgttaaaacgcgcatttgcaagt

SEQ ID NO: 349889 - DNA, 75 bp, synthetic construct
  source 1..75: mol_type = other DNA
gctgccagcgatgatggcgagatcacgcgaccgaaagaaccaaactggaccgcatgggccaatgacgtgcgcaca

SEQ ID NO: 349890 - DNA, 75 bp, synthetic construct
  source 1..75: mol_type = other DNA
atgacgcaaagttttaataatctctccggctctctggcgcatgtggtcgagcagatggcaaccggcaaggaaatt

SEQ ID NO: 349891 - DNA, 75 bp, synthetic construct
  source 1..75: mol_type = other DNA
aaacgtatgagccgccaactggaaatgcgtgatggacgtctgacggcggaactgagcctgatgggggcggagtaa

SEQ ID NO: 349892 - DNA, 75 bp, synthetic construct
  source 1..75: mol_type = other DNA
agagtgggccaatgacgtgcgcatgatgcgggtgcttgacggcagaactcacaggcaaatttgcgaaatgtttag

SEQ ID NO: 349893 - DNA, 75 bp, synthetic construct
  source 1..75: mol_type = other DNA
aacgttaaaacgcgcgtttgcaagtctgaaaacgctggggcttttgcgttgtgaaaagctcaataaatcaaagcg

SEQ ID NO: 349894 - DNA, 75 bp, synthetic construct
  source 1..75: mol_type = other DNA
actcttcatttaattgcttattctgtatttgtgacttttttgatctactatgcttttgacgtatttaagttagtt

SEQ ID NO: 349895 - DNA, 75 bp, synthetic construct
  source 1..75: mol_type = other DNA
tcgtagcgtcgtgcaaaccgtgcgttcctccttcaacaacattaatgcatctatcagtagcattaacgcctacaa

SEQ ID NO: 349896 - DNA, 75 bp, synthetic construct
  source 1..75: mol_type = other DNA
gtaaaaaacgtcatgagcccgtcaaagcttcgcgaaaaatgggatgagctggttattcgtctggggcgttcgcct

SEQ ID NO: 349897 - DNA, 75 bp, synthetic construct
  source 1..75: mol_type = other DNA
caaaatgacacgatggaagaggtcaaaatgaaacgttccattggttcaaaacggcccaatgtcatcaggtcaaaa

SEQ ID NO: 349898 - DNA, 75 bp, synthetic construct
  source 1..75: mol_type = other DNA
gtaaaaaacatcatgagcccttcaaagctccgcgaaaaatgggatgaactggtcattcgcctggggcgttcacct

SEQ ID NO: 349899 - DNA, 75 bp, synthetic construct
  source 1..75: mol_type = other DNA
aggcagtgtgcaaaccgacgtgctgcacaatgtcagtttcagcgtgggtgaaggcgaaatgatggctatcgtcgg

SEQ ID NO: 349900 - DNA, 75 bp, synthetic construct
  source 1..75: mol_type = other DNA
tcgtttgcagggcaccgccttcctggtggttactcacgacctgcaactggcgaaacgtatgagccgccaactgga

SEQ ID NO: 349901 - DNA, 75 bp, synthetic construct
  source 1..75: mol_type = other DNA
agtatttcgacaaggccaaaaaatgggaggccgccggacgcccagcctggactggcggcaagtgggttaagcagg

SEQ ID NO: 349902 - DNA, 75 bp, synthetic construct
  source 1..75: mol_type = other DNA
actggcggcaagtgggttaagcaggatgatagtttcaaatccagtttcgccaatgtggtttatacagtgccagcg

SEQ ID NO: 349903 - DNA, 75 bp, synthetic construct
  source 1..75: mol_type = other DNA
cgttcacctgtacagcgttgtatgaatcatatttctgaaccggatacagaaattccgcctggtttcagaggataa

SEQ ID NO: 349904 - DNA, 75 bp, synthetic construct
  source 1..75: mol_type = other DNA
cggtggcgcgctgggggctgccgccggtccggtcggggttgccattggctccacggtgggcagttatctcggtga

SEQ ID NO: 349905 - DNA, 75 bp, synthetic construct
  source 1..75: mol_type = other DNA
caggaagcgcggaccggggcgcggaagaccggtcacaccacccctgccaccgtcccctgtgccaccgccttcctc

SEQ ID NO: 349906 - DNA, 75 bp, synthetic construct
  source 1..75: mol_type = other DNA
gtctcggcgcaacccccttacgctatggcatggcgatgacctccgtgctgacgtcgcccttccgcaaaccgcaga

SEQ ID NO: 349907 - DNA, 75 bp, synthetic construct
  source 1..75: mol_type = other DNA
cagacagttttcagaaattgaaagtgttattttcactttttcagagccattacccattgcggtttcgtcaatact

SEQ ID NO: 349908 - DNA, 75 bp, synthetic construct
  source 1..75: mol_type = other DNA
gctgaaaggggaagaaaaagagcgtgcccggctggggtatgcggcggatgaccttggtctggtgggggatacgta

SEQ ID NO: 349909 - DNA, 75 bp, synthetic construct
  source 1..75: mol_type = other DNA
tgccagagacgcagcggcgggtttttaccgggccattcagaaagtcagggaaacgcttcaggcattgcgtgacgc

SEQ ID NO: 349910 - DNA, 75 bp, synthetic construct
  source 1..75: mol_type = other DNA
ggggtgacaaaaacgctctccggcgtgctgaacggtgttgccggacagattgataatgtggcaacagctgtgggg

SEQ ID NO: 349911 - DNA, 75 bp, synthetic construct
  source 1..75: mol_type = other DNA
ccacggtgggcagctatctcggtgattatctggggggctggctgacgcaggcctggcagaaactgcgtggcagca

SEQ ID NO: 349912 - DNA, 75 bp, synthetic construct
  source 1..75: mol_type = other DNA
ttcagcccgtgctggtcaccaactggcctgcgggtggcctggcctcaggtggcggggatgtggtggtcagcggtg

SEQ ID NO: 349913 - DNA, 75 bp, synthetic construct
  source 1..75: mol_type = other DNA
cggttatggcgatgcgctggatcgtattggtcagggtgcgcagaccgccgcaaagtacctgatgtatatgtatct

SEQ ID NO: 349914 - DNA, 75 bp, synthetic construct
  source 1..75: mol_type = other DNA
ggcggggatgtgatggtcagcggtgacggcaaaaccgtgcgcggccgtaaaaagcgcggccccggacgcgggcgt

SEQ ID NO: 349915 - DNA, 75 bp, synthetic construct
  source 1..75: mol_type = other DNA
tgatagttgatttgctcggcaatatctcagccaaatcccgccagtggtctcaggagctgggggcattctcacgct

SEQ ID NO: 349916 - DNA, 75 bp, synthetic construct
  source 1..75: mol_type = other DNA
tagagaacgaaaaattcacaggcacggacgagcagtgttttgccctaatgtttcgttcgttgtctaaagaaattt

SEQ ID NO: 349917 - DNA, 75 bp, synthetic construct
  source 1..75: mol_type = other DNA
aaattcgtgggcaaaatcgaagatgtaggtatggctatttttgggattgaaaaatctcgcacagcaaggtcgggt

SEQ ID NO: 349918 - DNA, 75 bp, synthetic construct
  source 1..75: mol_type = other DNA
atgaacagcagtgacctgtatctgagcaagaagcacgggcgtaccttgtcgcccggaaaaatgtcagagagccag

SEQ ID NO: 349919 - DNA, 75 bp, synthetic construct
  source 1..75: mol_type = other DNA
gccctgcattcagaaattttgcgggagcccccatcacagcgtcaaaagaaaaagcgctaaacgccagtccaatcg

SEQ ID NO: 349920 - DNA, 75 bp, synthetic construct
  source 1..75: mol_type = other DNA
gcagaacgccctgcgacacctccaacgccaaccacacagataaccagccagatggccgggaatatccgggcgtta

SEQ ID NO: 349921 - DNA, 75 bp, synthetic construct
  source 1..75: mol_type = other DNA
cacataaccagtttaaaagagactacctacgtcagcgtgagcgtttttaccatgccgagtcactgaaaaattttg

SEQ ID NO: 349922 - DNA, 75 bp, synthetic construct
  source 1..75: mol_type = other DNA
cacacaatcaatttcgtagtgactatcttcgccagcgcgaacgtttttatcacgcagaatcgctaaagaattttg

SEQ ID NO: 349923 - DNA, 75 bp, synthetic construct
  source 1..75: mol_type = other DNA
acaatgtcagacatgcgcgttgcctataacggacaccatcacaaagaaaacggacagggaaataaaaccgatgcg

SEQ ID NO: 349924 - DNA, 75 bp, synthetic construct
  source 1..75: mol_type = other DNA
gggggaggtcgctctctacgatgaccaggggcagtcagtcacgctgacacgcgccgggattgttgttgatggtgg

SEQ ID NO: 349925 - DNA, 75 bp, synthetic construct
  source 1..75: mol_type = other DNA
atgaggacgattgaagccatgcagcgacaacttctcggcctgattggacgggccgtggtgaaaagcatcagtgcc

SEQ ID NO: 349926 - DNA, 75 bp, synthetic construct
  source 1..75: mol_type = other DNA
gagttctgggtgactctgccggtggatggcttgctcagatgatgggaactacaaatggtgacaaaacctttgata

SEQ ID NO: 349927 - DNA, 75 bp, synthetic construct
  source 1..75: mol_type = other DNA
caggggcagtccgtgacgctgacccgggcggggatcgtggtggacggtgcagggaaaacgatcacgtttcgcaat

SEQ ID NO: 349928 - DNA, 75 bp, synthetic construct
  source 1..75: mol_type = other DNA
gtagcgaatgggaaaacctgagtgcgccggcgaaaaccgaacaaactcagccagctgctccggctaagccgacca

SEQ ID NO: 349929 - DNA, 75 bp, synthetic construct
  source 1..75: mol_type = other DNA
atggcaaaaaacctgaaagcctccctgattgtcgatttactcggcaatgtttccgccaaatcccgccagtggtca

SEQ ID NO: 349930 - DNA, 75 bp, synthetic construct
  source 1..75: mol_type = other DNA
cgggtgattcaggatcaggaaagagaaatcgccgcccttaaaaagctactccacggtaaatctgccgggcaagga

SEQ ID NO: 349931 - DNA, 75 bp, synthetic construct
  source 1..75: mol_type = other DNA
aacaaagccgcttatgcattctgcctgggcgcaatggcgaacggcgtttacggcccgtatgccattttcgcctcc

SEQ ID NO: 349932 - DNA, 75 bp, synthetic construct
  source 1..75: mol_type = other DNA
ataaacatcgcagaagaaaagggggtttctttagattggttgctaacaggtagaaaacaaggtttatcaaaagaa

SEQ ID NO: 349933 - DNA, 75 bp, synthetic construct
  source 1..75: mol_type = other DNA
ttggtgcgtattcagcaggcacttgaggcgattatcgggcaggagattcccattgtcgatctgttccgtctgcca

SEQ ID NO: 349934 - DNA, 75 bp, synthetic construct
  source 1..75: mol_type = other DNA
agccgatgcatggagtctggagttgttcattcgggaactagcttatcactaccgccatccgcaggcggcattgcc

SEQ ID NO: 349935 - DNA, 75 bp, synthetic construct
  source 1..75: mol_type = other DNA
atcgagggattaagttgctatctgctcgaacaaggcggcagtgagacagcggtttcagcattgcctgatacggtc

SEQ ID NO: 349936 - DNA, 75 bp, synthetic construct
  source 1..75: mol_type = other DNA
atcaggggtgcggttcgctgcaactgaacggtgccgacctgctgacggatgacagtctgctgacggccgttctga

SEQ ID NO: 349937 - DNA, 75 bp, synthetic construct
  source 1..75: mol_type = other DNA
taagctataatatacaaacacaaggtaatcgcggttttctttttaacattagtaacagagccatcatgtattgtg

SEQ ID NO: 349938 - DNA, 75 bp, synthetic construct
  source 1..75: mol_type = other DNA
atgaatcttttaatgcgcgctatattcagtctgctgttgctttttactctctctattcctgtcatttctgattgt

SEQ ID NO: 349939 - DNA, 75 bp, synthetic construct
  source 1..75: mol_type = other DNA
ctttcgacacccggtgccggcattttctcgctctttttacttcatgataatggcgcgggcggtgttatggcggca

SEQ ID NO: 349940 - DNA, 75 bp, synthetic construct
  source 1..75: mol_type = other DNA
tacgccaagctgtcctggctgcaagcctggcacatccgcgacgaaacctattcggggtcggttccggctgagggc

SEQ ID NO: 349941 - DNA, 75 bp, synthetic construct
  source 1..75: mol_type = other DNA
aggacggggccgaggccaaagacaggacgttgctgctgtccgcaatcctcggtgatgcgatcaacctcgggctga

SEQ ID NO: 349942 - DNA, 75 bp, synthetic construct
  source 1..75: mol_type = other DNA
tctttccttgatcaaggtattaatcaggatgtgtcatcgttgttaagtaagttaagtgaatatcaagaaaacata

SEQ ID NO: 349943 - DNA, 75 bp, synthetic construct
  source 1..75: mol_type = other DNA
ctgcgcattacggtgcatgggcgcaggccgcgctggaagatatttgtctgcgcagtaacccgcgtaccgccagcc

SEQ ID NO: 349944 - DNA, 75 bp, synthetic construct
  source 1..75: mol_type = other DNA
cgggctgacgcgtagcctggccgttaaaggcatcgccatgacgctctggccatgtccggtgggcgaaccgtgcat

SEQ ID NO: 349945 - DNA, 75 bp, synthetic construct
  source 1..75: mol_type = other DNA
gctacaccgtttaccgacagcctggcgattggtgccattgcgatgattggcaaatcgctgccgaaagcggtgggc

SEQ ID NO: 349946 - DNA, 75 bp, synthetic construct
  source 1..75: mol_type = other DNA
gccagaatactgaactggcgaaggttaaataccaggtcagccagggcgaacttgcttctctgacagaagcccaga

SEQ ID NO: 349947 - DNA, 75 bp, synthetic construct
  source 1..75: mol_type = other DNA
ggggcgttttgccgggctgttccgtggtgccggtcggctgggtggtggtgccctgtgggccggtgccatggcggc

SEQ ID NO: 349948 - DNA, 75 bp, synthetic construct
  source 1..75: mol_type = other DNA
ggtcttgggttgtgccacgcgatggcgcatccgccagtggcgcggtgcaattgccggatgcgacgcttgccgcgt

SEQ ID NO: 349949 - DNA, 75 bp, synthetic construct
  source 1..75: mol_type = other DNA
agtggcctctgtacgagaaaatcgcacaggcatttaagcaggctgccgcagagctgggatcgctatcgaatgggg

SEQ ID NO: 349950 - DNA, 75 bp, synthetic construct
  source 1..75: mol_type = other DNA
gatcaaaaaaaagttagccgtaaagttactgttaaggatgctattggtaggttgccaaaagtaggggcaggtgag

SEQ ID NO: 349951 - DNA, 75 bp, synthetic construct
  source 1..75: mol_type = other DNA
cggtgcgatggtggaagaaacaggaagctgtattacagaaagtgctactactgtatcccgatgcgatgtatgtaa

SEQ ID NO: 349952 - DNA, 75 bp, synthetic construct
  source 1..75: mol_type = other DNA
tattccgcacggtctggcgaacgccatgctactgccaacggtgatggagtttaaccggatggtctgtcgtgaacg

SEQ ID NO: 349953 - DNA, 75 bp, synthetic construct
  source 1..75: mol_type = other DNA
catctgttcgtgatggcagacagctttttgcatcaggcagggatgaccgccgggctgacgcgtagcctggccgtt

SEQ ID NO: 349954 - DNA, 75 bp, synthetic construct
  source 1..75: mol_type = other DNA
ggcgggaatggcgttttccagtgcggggcttgggttatgccacgcgatggcgcatcagccgggggcggcgctgca

SEQ ID NO: 349955 - DNA, 75 bp, synthetic construct
  source 1..75: mol_type = other DNA
gaggagattgccgctaccgtcgccaaatgtgtagaggcattaaaagagcgattccaggcatccgtaataacttcg

SEQ ID NO: 349956 - DNA, 75 bp, synthetic construct
  source 1..75: mol_type = other DNA
tgaacgtattggttttgttggggttgttcatcctgaactggaacgtaaactggatcttaacggtcgcactctggt

SEQ ID NO: 349957 - DNA, 75 bp, synthetic construct
  source 1..75: mol_type = other DNA
tggcgtttcgacatggagattgaagaagatctggtcgaagaagtcgcgcgtgtttacggctacaacaacattccg

SEQ ID NO: 349958 - DNA, 75 bp, synthetic construct
  source 1..75: mol_type = other DNA
tgcgtgaagcggcagaaaaagcaacgtggggagactgggactcatataaaccacaccgtggcgcacgtggttatg

SEQ ID NO: 349959 - DNA, 75 bp, synthetic construct
  source 1..75: mol_type = other DNA
tgcgtgaggcggcagaacgtgcaactccagcaatggaacgcctgttaatgttgccagttgatgatgatttgttaa

SEQ ID NO: 349960 - DNA, 75 bp, synthetic construct
  source 1..75: mol_type = other DNA
ttatcgaactgcctgcggatgcgccaattggcaccgacattcgtgaatacctgaaactcgatgacaacaccatcg

SEQ ID NO: 349961 - DNA, 75 bp, synthetic construct
  source 1..75: mol_type = other DNA
gcggcggtgaagcaggtccggttatcgatatcaccaacgaagcaacgctgccgaagcgtgcgactatcactttac

SEQ ID NO: 349962 - DNA, 75 bp, synthetic construct
  source 1..75: mol_type = other DNA
atcgcctgatcggccatcatattgcggatgagcaggtaactgacattctgcgtcgtctcggctgcgaagtgaccg

SEQ ID NO: 349963 - DNA, 75 bp, synthetic construct
  source 1..75: mol_type = other DNA
acatcgcggtggtggtcgcagaaaacgttcccgcagcggatattttatccgaatgtaagaaagttggcgtaaatc

SEQ ID NO: 349964 - DNA, 75 bp, synthetic construct
  source 1..75: mol_type = other DNA
atgcgccgattggcaccgacatcaggcgaatacctgaaactcgatgacaacaccatcgaaattagcgtgacgcca

SEQ ID NO: 349965 - DNA, 75 bp, synthetic construct
  source 1..75: mol_type = other DNA
gacgagccggtgcaggcgagcctgattatgggcactcaccgcgaagctgacctgtcgctcaagcgtgtgaaaacg

SEQ ID NO: 349966 - DNA, 75 bp, synthetic construct
  source 1..75: mol_type = other DNA
cgatatcaccaacgaagcaacgctgccgaagcgtgcgactatcactttacgtcgcagcaaactggatcgcctgat

SEQ ID NO: 349967 - DNA, 75 bp, synthetic construct
  source 1..75: mol_type = other DNA
aggtccgactaagtagtcaggccattgcgcaacacgttctgaaaaacaacgctgaatttattgctgcctttaatc

SEQ ID NO: 349968 - DNA, 75 bp, synthetic construct
  source 1..75: mol_type = other DNA
cctggcgctggccgactgagggcaaagtgatcgaaacctttggcgcttctgaggggggcaacaaggggattgata

SEQ ID NO: 349969 - DNA, 75 bp, synthetic construct
  source 1..75: mol_type = other DNA
acgcagtctgtggctgactcacgttatgttcaaagcattcgaagaggttcaaggtcaacgattggaatgcaatat

SEQ ID NO: 349970 - DNA, 75 bp, synthetic construct
  source 1..75: mol_type = other DNA
tcaacgttatgtcacaggagtcaggctgggggcagtaaagagttattcacctgcaggtaactggtatacatggac

SEQ ID NO: 349971 - DNA, 75 bp, synthetic construct
  source 1..75: mol_type = other DNA
gtgcatcctgtgcggaggtcagatgcgttttacggggctgaagcggggctaccgtctgacagagctggtcctgat

SEQ ID NO: 349972 - DNA, 75 bp, synthetic construct
  source 1..75: mol_type = other DNA
aaggttgacccgctgaagtgcatcctgtgcggatgtcagatgcgttttacggggctgaagcggggctaccgtctg

SEQ ID NO: 349973 - DNA, 75 bp, synthetic construct
  source 1..75: mol_type = other DNA
cagatgcgttttacggggctgaagcggggctaccgtctggcagagctggtcctgatgcatgagccgttggcccgg

SEQ ID NO: 349974 - DNA, 75 bp, synthetic construct
  source 1..75: mol_type = other DNA
agcaaacagactcgccaccccaagaaatattaatggtgttcctttcgacgggacgcgggatataaacattacgtc

SEQ ID NO: 349975 - DNA, 75 bp, synthetic construct
  source 1..75: mol_type = other DNA
ccactgacattctgctgcagctcaaaactttctccgagcaataccgactggtttttccgggacgttgtgatatca

SEQ ID NO: 349976 - DNA, 75 bp, synthetic construct
  source 1..75: mol_type = other DNA
agcaccggaaccagttcaacacgcttgcattttgaaattcgttacaaggggaaatccgtaaacccgctgcgttat

SEQ ID NO: 349977 - DNA, 75 bp, synthetic construct
  source 1..75: mol_type = other DNA
cattgtcgattgccatcgcggtgattggttataacaaaagttgcaccatcgctaagccgggaattaaagcgaaag

SEQ ID NO: 349978 - DNA, 75 bp, synthetic construct
  source 1..75: mol_type = other DNA
gcaggcattaagcggcggactggaatataattactccctgtcatcaggaaatgtgattaccggttttaagactga

SEQ ID NO: 349979 - DNA, 75 bp, synthetic construct
  source 1..75: mol_type = other DNA
atgttacaggggtaagactgggagcgcaggcattaagcggcggactggaatataattactccctgtcatcaggaa

SEQ ID NO: 349980 - DNA, 75 bp, synthetic construct
  source 1..75: mol_type = other DNA
tggccgtgtggtaaaaggcattaacgttaaagcgccaactccgctgtggatgaaagaaaaactgcgtcgttgcgg

SEQ ID NO: 349981 - DNA, 75 bp, synthetic construct
  source 1..75: mol_type = other DNA
accattttcgtggagagcggcaacattgaaacgaccggagaaacgccctcgtttgtttaccgctatcagatggtg

SEQ ID NO: 349982 - DNA, 75 bp, synthetic construct
  source 1..75: mol_type = other DNA
taacggtgtactgcttacccaatacggccttgtatttgaaagatgccgcatcttggcaggattcgtattacagcc

SEQ ID NO: 349983 - DNA, 75 bp, synthetic construct
  source 1..75: mol_type = other DNA
aatacctgagggcgtttaagcgaaacacaaaaattaatatattcactgaattgcttatcaagtctatggctgtaa

SEQ ID NO: 349984 - DNA, 75 bp, synthetic construct
  source 1..75: mol_type = other DNA
ttcgccagtatgagcgggataccggaggcggtgatggtgggcttaccaccgctgaacgtcagcgtctgaaagagc

SEQ ID NO: 349985 - DNA, 75 bp, synthetic construct
  source 1..75: mol_type = other DNA
cacaagccagagcctcgcccacgtataccgccggaatggagtggaattattgaggacgttacctggagtgcgtcc

SEQ ID NO: 349986 - DNA, 75 bp, synthetic construct
  source 1..75: mol_type = other DNA
tgttgaacgcatggcagctctgttacaacaaacagaggaccccgtgagtctggtttctggctttgtcagttttgt

SEQ ID NO: 349987 - DNA, 75 bp, synthetic construct
  source 1..75: mol_type = other DNA
aattgcgcacaagagatggcgcgccgcgacagtatcagtgaagttcctcccatgccgtggcgaacggtggttggc

SEQ ID NO: 349988 - DNA, 75 bp, synthetic construct
  source 1..75: mol_type = other DNA
gcacgggtagaagcaatgaataacggtgttttgctgtgcgaacaattattccccatgcttcagcaacaaggatga

SEQ ID NO: 349989 - DNA, 75 bp, synthetic construct
  source 1..75: mol_type = other DNA
atgaaaacgggaccgttaaacgaaagtgagttggaatggctggacgatattctgaccaaatacaacactgaccac

SEQ ID NO: 349990 - DNA, 75 bp, synthetic construct
  source 1..75: mol_type = other DNA
gacagaaatatttggtgtacagcctcagctgagagcccggatagaactttcgggtggacacatcaccgatgtgaa

SEQ ID NO: 349991 - DNA, 75 bp, synthetic construct
  source 1..75: mol_type = other DNA
cagataatcgcttcaggtaagctaattaatttggacgttttagatcaagtcggttttatggaagatgatttattt

SEQ ID NO: 349992 - DNA, 75 bp, synthetic construct
  source 1..75: mol_type = other DNA
tatggttctggaaagtcaggacgaatatgactcacaatgggcgacaatttgttccattgctccaaagagtggctg

SEQ ID NO: 349993 - DNA, 75 bp, synthetic construct
  source 1..75: mol_type = other DNA
gtggtgaactcaacaagttacgtgcgggtttatcagcgcatcggtgatagcgataaataccagcccgtcgtgctg

SEQ ID NO: 349994 - DNA, 75 bp, synthetic construct
  source 1..75: mol_type = other DNA
taagctataatatacaaacacagggtaatcgcggttttctttttaacattagtaacagggcaattatgtactgtg

SEQ ID NO: 349995 - DNA, 75 bp, synthetic construct
  source 1..75: mol_type = other DNA
ccagcgacacatcctgtcggcgtgagtgtgtcagaacagacgctcccacagtgtgatcagcaggtggataatgcg

SEQ ID NO: 349996 - DNA, 75 bp, synthetic construct
  source 1..75: mol_type = other DNA
ctggtcatcgccgaccacaacaaggcgctggcgatgggcggcatctttggtggcgaacactctggcgtgaatgac

SEQ ID NO: 349997 - DNA, 75 bp, synthetic construct
  source 1..75: mol_type = other DNA
cggttacaggccgccgctgttctgatgccatattttcacgaaaccctgaccccgtgttaccaagaggaagacgaa

SEQ ID NO: 349998 - DNA, 75 bp, synthetic construct
  source 1..75: mol_type = other DNA
agaaagcattcgcagaagataaagagggcaacatctccaccgggcgcgtactggcgctgcgccgctatgaaatta

SEQ ID NO: 349999 - DNA, 75 bp, synthetic construct
  source 1..75: mol_type = other DNA
gttaagactgaattaccaggccgcaccaatgcttaccgtatagccgaagttcgcccacaggttagcgggatcgta

SEQ ID NO: 350000 - DNA, 75 bp, synthetic construct
  source 1..75: mol_type = other DNA
tatctctatggcactcgacagattatttcgaaaaaacccattcgcaccgttgacgatctcgcaggtttaaaaatt

SEQ ID NO: 350001 - DNA, 75 bp, synthetic construct
  source 1..75: mol_type = other DNA
tatggttctggaaagtcaggacgaatatgactcacaatgggcggcaatttgttccattgctccaaagaatggctg

SEQ ID NO: 350002 - DNA, 75 bp, synthetic construct
  source 1..75: mol_type = other DNA
cataaaaagaagaatgctcgttaatccagcgacacatcctgtcggcgtgagtgtgtcagaacagacgatcccaca

SEQ ID NO: 350003 - DNA, 75 bp, synthetic construct
  source 1..75: mol_type = other DNA
ctcgtaacggggattctgaacttgaagtcaccaatgccattttcggtaccaatgagttccgggcgtcagattatg

SEQ ID NO: 350004 - DNA, 75 bp, synthetic construct
  source 1..75: mol_type = other DNA
gcagtgatctgcatattgccccgtcaacgtattaccattgtcagcaacagcgacatcatcctgataaacgcagtg

SEQ ID NO: 350005 - DNA, 75 bp, synthetic construct
  source 1..75: mol_type = other DNA
ccacggcattaataaaagagataaccagcagtacagacaacctgttaaaactgttttgtattaccgcattgctgt

SEQ ID NO: 350006 - DNA, 75 bp, synthetic construct
  source 1..75: mol_type = other DNA
caaagtcatcgggcattatctgaacataaaacactatcaataagttggagtcattacctcgcttacgaagatcat

SEQ ID NO: 350007 - DNA, 75 bp, synthetic construct
  source 1..75: mol_type = other DNA
ttccgctactacaaagggctgcacattctgctggatgccgccgagcgtagccggctgccggtggtgatcgtcggg

SEQ ID NO: 350008 - DNA, 75 bp, synthetic construct
  source 1..75: mol_type = other DNA
tccgccgaagtggcactgcgccaacagggccgtaacagtaaagagcttgttaatgcacaaaaaaccggggaccgc

SEQ ID NO: 350009 - DNA, 75 bp, synthetic construct
  source 1..75: mol_type = other DNA
attgtgtttgaagcgagcaaacatgaagacagcaaagggatcatcagtatccgtaccgttaaaaaaatggcggct

SEQ ID NO: 350010 - DNA, 75 bp, synthetic construct
  source 1..75: mol_type = other DNA
atgctgagggtacagaaacgtcgtactacggcattaataaaagagataaccagcagcacagacaacctgataaaa

SEQ ID NO: 350011 - DNA, 75 bp, synthetic construct
  source 1..75: mol_type = other DNA
aaatgcgttctatagatttaaggagttatttacttctaacaatatgtgtaagaaatatgttgagttatatacaag

SEQ ID NO: 350012 - DNA, 75 bp, synthetic construct
  source 1..75: mol_type = other DNA
aaaaggcatgtcgattctgaaagtgggtctggtcgcctcgattccggcactgtgtggctttgcgggcggcgtgct

SEQ ID NO: 350013 - DNA, 75 bp, synthetic construct
  source 1..75: mol_type = other DNA
ggcctgacgcaagaacggtggtgacctatcactcggatattgtgaaacaaaaacggttaatgaagttgtaccagc

SEQ ID NO: 350014 - DNA, 75 bp, synthetic construct
  source 1..75: mol_type = other DNA
tgcagctggctgacgtaccaggagtcagagagcggaaccagccggtgagtctgctgaccggcgggcattctcccc

SEQ ID NO: 350015 - DNA, 75 bp, synthetic construct
  source 1..75: mol_type = other DNA
aaaacgattatcggctctatgagcagtatgtatttcaggccaaggcgcgcacattaacctgtccgatcgtgctat

SEQ ID NO: 350016 - DNA, 75 bp, synthetic construct
  source 1..75: mol_type = other DNA
ttgctgctgaactatataaagaaatcatagccttaaaacctgaatggcacagcgatgatttaaatgacggtataa

SEQ ID NO: 350017 - DNA, 75 bp, synthetic construct
  source 1..75: mol_type = other DNA
tgccgcgcgatcctgacttttatcgtaaattaccagatatgcctgcaccacatgttgagaacttaaaaccctcga

SEQ ID NO: 350018 - DNA, 75 bp, synthetic construct
  source 1..75: mol_type = other DNA
cattactcgcagggaaaaaatatctgctgctgcaaggaccgatggggcctttctttaatgatgtcgctaactggc

SEQ ID NO: 350019 - DNA, 75 bp, synthetic construct
  source 1..75: mol_type = other DNA
atgacagtgcgggagggcgggcctcccggcgggttattgcgttggctgttgtttgatgacattaatcatccacgg

SEQ ID NO: 350020 - DNA, 75 bp, synthetic construct
  source 1..75: mol_type = other DNA
ctaaacgcagaggaatgggactggggttggcgatcgtcagcgaaattgtccgtaattcgaacggtactctccacg

SEQ ID NO: 350021 - DNA, 75 bp, synthetic construct
  source 1..75: mol_type = other DNA
ggcgttacttaatcacagcatggagaaaaataacattgagcgacgaataaaagccccatccatgccgttatttgt

SEQ ID NO: 350022 - DNA, 75 bp, synthetic construct
  source 1..75: mol_type = other DNA
taacactggcgaatgaaacattagaaaaacaggttaaagagcgtacatctgccctggaattgatcaatcaaaaat

SEQ ID NO: 350023 - DNA, 75 bp, synthetic construct
  source 1..75: mol_type = other DNA
aattccttactttaagagtcttgccgccagcctgggctacaccatcaccattacggagccgcgagcgttccgggt

SEQ ID NO: 350024 - DNA, 75 bp, synthetic construct
  source 1..75: mol_type = other DNA
ccactgacagcctttggtgaatccattttagaaaatacctttaaagaccttaaaccggcttttacagactgttat

SEQ ID NO: 350025 - DNA, 75 bp, synthetic construct
  source 1..75: mol_type = other DNA
ttatttatgccggaaaccgggatattcaggacgaggtgcaggagatcctcgggcataaagacctgaccatcgtcg

SEQ ID NO: 350026 - DNA, 75 bp, synthetic construct
  source 1..75: mol_type = other DNA
cgccggttttgcggtgacccacattcgagccgattacaccttaggtcatggcttcagcgttaatgcgtcggtcaa

SEQ ID NO: 350027 - DNA, 75 bp, synthetic construct
  source 1..75: mol_type = other DNA
cgctggactgtcgaagagtgcagggcgatcaaggcggagtatcaacagaaacttaaagacctgcgaaacagcaga

SEQ ID NO: 350028 - DNA, 75 bp, synthetic construct
  source 1..75: mol_type = other DNA
gttgcgtcgcaaccgacaattacgtattctgaatcttcgggtgaacagagtgctaacaaaatgttgccgaacaac

SEQ ID NO: 350029 - DNA, 75 bp, synthetic construct
  source 1..75: mol_type = other DNA
gatgattaaccggcttattcagcgcaccaccggcaaagcgatgggtgactatggttgtatgctgcgcgcctatcg

SEQ ID NO: 350030 - DNA, 75 bp, synthetic construct
  source 1..75: mol_type = other DNA
aaatcccccgcctggtggcaaaagccgatgaaggttacgacgtggtagggactgtacgccagaaccgccaggaca

SEQ ID NO: 350031 - DNA, 75 bp, synthetic construct
  source 1..75: mol_type = other DNA
agaaaccgccaaaatcctcagcccggaaaaaacaattctgatgcccacacttaaggccgaatgttcactggatct

SEQ ID NO: 350032 - DNA, 75 bp, synthetic construct
  source 1..75: mol_type = other DNA
gcgccggataaacatttggggcgttacgtgcaaaaacagactggtgcagacatcttgtgctggcagggaacctgt

SEQ ID NO: 350033 - DNA, 75 bp, synthetic construct
  source 1..75: mol_type = other DNA
gtactgtcgttgtctacgctaacacttctgccgcggtaaaagctcgtgcggactgggtggtgacttcaagtattg

SEQ ID NO: 350034 - DNA, 75 bp, synthetic construct
  source 1..75: mol_type = other DNA
ttaaaaattagaacaagaatgatgaaaatcctccggaatggcaaaatcaatatatatgaatatataaatatatga

SEQ ID NO: 350035 - DNA, 75 bp, synthetic construct
  source 1..75: mol_type = other DNA
catatcgtccccctctcagaacagtccatcgccattctgaaacagattaaggatatcaccggtaataatgaactg

SEQ ID NO: 350036 - DNA, 75 bp, synthetic construct
  source 1..75: mol_type = other DNA
aggtcagatgcggtttacggggctgaagaggggttaccgtctggcagagcaggttatgatgcatgagccgctggc

SEQ ID NO: 350037 - DNA, 75 bp, synthetic construct
  source 1..75: mol_type = other DNA
gggtttaagcgcaacctatggacaaacaggaaacaaggttgcagccggaaccgtccagtcagtcattggtgtcac

SEQ ID NO: 350038 - DNA, 75 bp, synthetic construct
  source 1..75: mol_type = other DNA
tactaccactactatggggactcgtcaaggacatacagccattatatttccacaatctgattttttgagttttcg

SEQ ID NO: 350039 - DNA, 75 bp, synthetic construct
  source 1..75: mol_type = other DNA
ttcactactatggggactcgtcaaggacatacggctattatatttcaacaacctgatggttcgactaatcgttat

SEQ ID NO: 350040 - DNA, 75 bp, synthetic construct
  source 1..75: mol_type = other DNA
tacctataccaactctgtatttttcacgaaacaaagaggatgttttttatgcaaattggctatattcgtgtgtca

SEQ ID NO: 350041 - DNA, 75 bp, synthetic construct
  source 1..75: mol_type = other DNA
gtgatggaaaacacgctggggatcagcaaaagccaggcggattccgatcgtgctctttattattcccgcggattc

SEQ ID NO: 350042 - DNA, 75 bp, synthetic construct
  source 1..75: mol_type = other DNA
aactcttgaagagtacaattcccacagagcaactcacgctaacgacaacgcggagttgcaaaaaattcttgaaga

SEQ ID NO: 350043 - DNA, 75 bp, synthetic construct
  source 1..75: mol_type = other DNA
cagcaaactgccgcaaatgataattctgaacttcaaggtatgcttgagaaccagaagcagaaccaaaaagtcact

SEQ ID NO: 350044 - DNA, 75 bp, synthetic construct
  source 1..75: mol_type = other DNA
tttcccttttccatttatggatatgcttcactttatctgtagaataaaaaaacctacggttgttagctatcactc

SEQ ID NO: 350045 - DNA, 75 bp, synthetic construct
  source 1..75: mol_type = other DNA
aaaattggatcacatcgagtgtgctatgctaaaacgaacttcgaaatagcttcaacgcctttctctttttcaagt

SEQ ID NO: 350046 - DNA, 75 bp, synthetic construct
  source 1..75: mol_type = other DNA
ctggaatctgggcgacgcactttctgatatggcactgtttgaacgcgtagaagtagtgcgtggcgcgacaggact

SEQ ID NO: 350047 - DNA, 75 bp, synthetic construct
  source 1..75: mol_type = other DNA
tctggtattcatggtgattttctggcgaacacaccaccgcggtcaccgtaactggctggcactgctgctgttcgt

SEQ ID NO: 350048 - DNA, 75 bp, synthetic construct
  source 1..75: mol_type = other DNA
cgggcaacactccccggataatattgtttttattcttttttgttgtttctgtcataaccacaattgcatgcggat

SEQ ID NO: 350049 - DNA, 75 bp, synthetic construct
  source 1..75: mol_type = other DNA
atgcgctcgccagcaacattgcgctgaccgcggagaattttggtgatgcactggaagatccgtcatttctcgcga

SEQ ID NO: 350050 - DNA, 75 bp, synthetic construct
  source 1..75: mol_type = other DNA
cgtcatgaactggatatcgcgccgccagagccgccttatcagccggatgaaatctacgatgcgctgaaacaaggt

SEQ ID NO: 350051 - DNA, 75 bp, synthetic construct
  source 1..75: mol_type = other DNA
agctgatcagcggttttgccgattatgttctgcaacgtgagctgggcggtaattattacagcgatccggatatcc

SEQ ID NO: 350052 - DNA, 75 bp, synthetic construct
  source 1..75: mol_type = other DNA
tacgctgcgcccggagatgagcagcgacgaaattgagcgcattattcgtagtgcggtcaataacgtgccctatgc

SEQ ID NO: 350053 - DNA, 75 bp, synthetic construct
  source 1..75: mol_type = other DNA
gtgaccgattttcgtatggcggtaaaagctgaagagaatgaagaggttgtctttagctggattgaatacccttca

SEQ ID NO: 350054 - DNA, 75 bp, synthetic construct
  source 1..75: mol_type = other DNA
cggataaatctcgctataccggacacttgatcgactttaacgtccgtgcagaacgcatgggctggctgccgtctg

SEQ ID NO: 350055 - DNA, 75 bp, synthetic construct
  source 1..75: mol_type = other DNA
cgatatttgccctgaatcagaaataaaacgtatccagaaggaatctaaatcatctacaaagcttaatatttgtat

SEQ ID NO: 350056 - DNA, 75 bp, synthetic construct
  source 1..75: mol_type = other DNA
cacgctgatcgtttacttccagcatcagtggcaaggctggggcaaacagcctgaagcggcgaagcttaacgctag

SEQ ID NO: 350057 - DNA, 75 bp, synthetic construct
  source 1..75: mol_type = other DNA
tcgcgcaattgatctggcgcgtcgcaacggttcaaccattgccattgggcatcctcacccttcaacggtacgcgt

SEQ ID NO: 350058 - DNA, 75 bp, synthetic construct
  source 1..75: mol_type = other DNA
tggtatctttacagtgccaaccgcctgaaatacccgatgatgcgcaaacgcctgatgaaaatgtggcgtgaagcg

SEQ ID NO: 350059 - DNA, 75 bp, synthetic construct
  source 1..75: mol_type = other DNA
acagaggagaacggtcagaatcgtttgatccggagaaacattttaatcgttatacggtgcgttatctgtatctgc

SEQ ID NO: 350060 - DNA, 75 bp, synthetic construct
  source 1..75: mol_type = other DNA
cataatggcacttgagctaaggtcagatacacggattaaggttgaggtaggtcaatggtatcgcatgacgggtaa

SEQ ID NO: 350061 - DNA, 75 bp, synthetic construct
  source 1..75: mol_type = other DNA
tcccgtggcgtacgctctctggccgtcagcagctgtatcaggatcaccaatggatgcgtgatttcggtgaaagcc

SEQ ID NO: 350062 - DNA, 75 bp, synthetic construct
  source 1..75: mol_type = other DNA
tgaaagcctgctggtttatcgtccgccgatcgacacccgttcggtgaaagaagtgatgggccagaaatccaatgg

SEQ ID NO: 350063 - DNA, 75 bp, synthetic construct
  source 1..75: mol_type = other DNA
cgaactgatcgccgcatctaacgtttacaccatcaaaaactacggcccggaccgtgttgctggtttctcgccaat

SEQ ID NO: 350064 - DNA, 75 bp, synthetic construct
  source 1..75: mol_type = other DNA
gctatgtttatacaaaaaatgaagatattaataatcagttggcaaataatataataggaggtttatctggttttt

SEQ ID NO: 350065 - DNA, 75 bp, synthetic construct
  source 1..75: mol_type = other DNA
ttttggtgccgtcgaaaccctgacgccgctgatcggctggggaatgggcatgttagccagccggtttgtccttga

SEQ ID NO: 350066 - DNA, 75 bp, synthetic construct
  source 1..75: mol_type = other DNA
ggcgtttacagatttcgctaacctggatgtgctgggactccccgttccgctgattatcttcctgatatgtctcct

SEQ ID NO: 350067 - DNA, 75 bp, synthetic construct
  source 1..75: mol_type = other DNA
aagcccgcgcgtggcgctttatagcgcgattccagttaaccgcaccttatgtgcgctctatgccatgacggggct

SEQ ID NO: 350068 - DNA, 75 bp, synthetic construct
  source 1..75: mol_type = other DNA
ggcgatgccatagggtgtaaatctcttggggatagtaaggcagttcactttcttaatacagctgacccaagttta

SEQ ID NO: 350069 - DNA, 75 bp, synthetic construct
  source 1..75: mol_type = other DNA
tggatgccatggctgtgggtgttggtcttgctttcctgcaggttaacattatcgcgaccgcattggccattggtt

SEQ ID NO: 350070 - DNA, 75 bp, synthetic construct
  source 1..75: mol_type = other DNA
gtggaaccactggattgcgtttgtactgctgatatttctcggcgggcgaatgattattgagggttttcgtggtgg

SEQ ID NO: 350071 - DNA, 75 bp, synthetic construct
  source 1..75: mol_type = other DNA
agaaaaggttttgttgatagagtttataggaagtacaatttcaaacgttacactgagatcacaaaaatatggcta

SEQ ID NO: 350072 - DNA, 75 bp, synthetic construct
  source 1..75: mol_type = other DNA
aagaaataaaataattgatgagcttaaaatttatctcaaagaaggtgcacaattccgagtgtatcgcttagatat

SEQ ID NO: 350073 - DNA, 75 bp, synthetic construct
  source 1..75: mol_type = other DNA
gtcgattaatccgcacgtcggatttatggtcggctggtcatcactgctggattatctctttttgccaatgatcaa

SEQ ID NO: 350074 - DNA, 75 bp, synthetic construct
  source 1..75: mol_type = other DNA
gttttctggctctggctgcataaaacccatgccggacgtaacgtgtttttgattgggcaaagcccgcgcgtggcg

SEQ ID NO: 350075 - DNA, 75 bp, synthetic construct
  source 1..75: mol_type = other DNA
ttgggcgtactgtttcaaagtggtgtgccgatgccgctggcgatactcctgaccttactgctcggcgcattgtgc

SEQ ID NO: 350076 - DNA, 75 bp, synthetic construct
  source 1..75: mol_type = other DNA
atgcgtattcgctacggttgggaactggctcttgccgcactgctcgttattgagattgtcgcatttggtgcaatt

SEQ ID NO: 350077 - DNA, 75 bp, synthetic construct
  source 1..75: mol_type = other DNA
aagcgttctgcaacaaaatgacggaaaaatacctgattgaaccgccccgggtttcctggagagtgttttatctgt

SEQ ID NO: 350078 - DNA, 75 bp, synthetic construct
  source 1..75: mol_type = other DNA
ggcaggcggtctgggaaatgtattgccaacgtcacgataccccagcgggtagcgaatggctggagagcgtgcggg

SEQ ID NO: 350079 - DNA, 75 bp, synthetic construct
  source 1..75: mol_type = other DNA
tgagttttatatgggttatgccaccagccgccagactgcgctgtgcctggatgccggacacttccacccgactga

SEQ ID NO: 350080 - DNA, 75 bp, synthetic construct
  source 1..75: mol_type = other DNA
tatcaccgttgaccgtctcgctccgcgccagcgtctgctggcagctctggatgaggtgatcagcgagaagctgga

SEQ ID NO: 350081 - DNA, 75 bp, synthetic construct
  source 1..75: mol_type = other DNA
caaaacgatcgggatcatttactcgcttttacacttaatgttccctttagtcattggatgcgtacagacagtcag

SEQ ID NO: 350082 - DNA, 75 bp, synthetic construct
  source 1..75: mol_type = other DNA
gggggaatatcgtagtggaaataacctgcaaagctctcccaagttcatacaaggtagcttgatgcatggtctgga

SEQ ID NO: 350083 - DNA, 75 bp, synthetic construct
  source 1..75: mol_type = other DNA
gagagcaaattgtttggtattggcgcggagagctacacggttggctccaatgagttttacatggggtatgccacc

SEQ ID NO: 350084 - DNA, 75 bp, synthetic construct
  source 1..75: mol_type = other DNA
ggaaaccttttttgcctgtctgggcgggcagcgtgatcagaccgtggtgcttgtggtggaagaccgccgcagtcg

SEQ ID NO: 350085 - DNA, 75 bp, synthetic construct
  source 1..75: mol_type = other DNA
atgaatgatgaagtgttcagccgcctgattgccccggtgacacgcggtattcgtctgctgtttggccggggtgtt

SEQ ID NO: 350086 - DNA, 75 bp, synthetic construct
  source 1..75: mol_type = other DNA
gtgacgattcttgatcctaaatgtacggctaaaacattcccggattacttcgagcaactggaacgtattagccaa

SEQ ID NO: 350087 - DNA, 75 bp, synthetic construct
  source 1..75: mol_type = other DNA
ctgggttgaatgggcgaaagctaatcaactcggtctggattttaacccttcctgtttctcgcatccgctaagcgc

SEQ ID NO: 350088 - DNA, 75 bp, synthetic construct
  source 1..75: mol_type = other DNA
ccagcgtcacgatacgccagcgggtagcgaatggctggaaagcgtacgggcttatgagaacgcaattttgcgtca

SEQ ID NO: 350089 - DNA, 75 bp, synthetic construct
  source 1..75: mol_type = other DNA
tattactgccccggatgccatcatcaatggcaaatcgacggataagcatatccaccgcggcgacagcggcggaac

SEQ ID NO: 350090 - DNA, 75 bp, synthetic construct
  source 1..75: mol_type = other DNA
ctaacgcccggagattgatggactcaatcgatagcctgaaatcaggcaaaggaacggaaaaggacattattgagt

SEQ ID NO: 350091 - DNA, 75 bp, synthetic construct
  source 1..75: mol_type = other DNA
ccttgggcgggcgctgttacttttgcaaaaagagaaactgattacgttgaaagaagggaaaggtttactgccaac

SEQ ID NO: 350092 - DNA, 75 bp, synthetic construct
  source 1..75: mol_type = other DNA
atgagtacgcaagaggccacctcgcaacaaccgctgttgcaggctatcgacctgaaaaaacattacccggtgaag

SEQ ID NO: 350093 - DNA, 75 bp, synthetic construct
  source 1..75: mol_type = other DNA
gtcgatgatggcgaaagtcggcctgaaaaccgagcactatgaccgctatccgcatatgttctccggcggacaacg

SEQ ID NO: 350094 - DNA, 75 bp, synthetic construct
  source 1..75: mol_type = other DNA
actacattgaagagttctgcaacaaaatgacggaaaagtacctgatatccgcagccaagagacactaccaaaaga

SEQ ID NO: 350095 - DNA, 75 bp, synthetic construct
  source 1..75: mol_type = other DNA
aaatctcagtcatgggatttagtccacgggctgtggcccgacctgttcttcggtcagcatccccgacgtttgaac

SEQ ID NO: 350096 - DNA, 75 bp, synthetic construct
  source 1..75: mol_type = other DNA
aaaaaagtggccaaagagaagtatggccttgaggttgaactggtaggatttagtggctcattgctgcctaatgat

SEQ ID NO: 350097 - DNA, 75 bp, synthetic construct
  source 1..75: mol_type = other DNA
aacccggagtttgctgacagttttgtggtgaaatatccctccattttactgtcagtttcacagatggcagaagtg

SEQ ID NO: 350098 - DNA, 75 bp, synthetic construct
  source 1..75: mol_type = other DNA
accgtcatgctgatgagtatggtggcctggacgctgcgctttggcttcttcgcctatggcgatccgtcaacaacc

SEQ ID NO: 350099 - DNA, 75 bp, synthetic construct
  source 1..75: mol_type = other DNA
acgctcagctatagcctgacgaaaaacgcctggcaaaaaggacgtgatcagatgttagcgcttaacgtcaatatt

SEQ ID NO: 350100 - DNA, 75 bp, synthetic construct
  source 1..75: mol_type = other DNA
attatcagcaccacttacattcagcagaccgggctttctccggtgcacgacagcgtatttattgaagataagaat

SEQ ID NO: 350101 - DNA, 75 bp, synthetic construct
  source 1..75: mol_type = other DNA
aaacgtgaaggaatttctgcaatcttatcaatcatccgaagtcgctaaagcggcagaaaccatctttaacggtgg

SEQ ID NO: 350102 - DNA, 75 bp, synthetic construct
  source 1..75: mol_type = other DNA
cgcgctggatataaccgagaatcctcgtcatttgcagattatggaactcgagggggcgcagctcccgcgcgtact

SEQ ID NO: 350103 - DNA, 75 bp, synthetic construct
  source 1..75: mol_type = other DNA
cgtttttctacaatcactccagtcagtggcgctatgaaaaagtcaccgcgcaggaattgctctcaccgctcgccg

SEQ ID NO: 350104 - DNA, 75 bp, synthetic construct
  source 1..75: mol_type = other DNA
accgtggcagttaataccgcaggtgaattggtggtgccgaacggttcgattggttttcgctggggagaaaaaggc

SEQ ID NO: 350105 - DNA, 75 bp, synthetic construct
  source 1..75: mol_type = other DNA
gctgcacaaagaggacgagaagattcgctttcgcgatattcaggcacagccacgtaaaattatctccagccccac

SEQ ID NO: 350106 - DNA, 75 bp, synthetic construct
  source 1..75: mol_type = other DNA
attttcgcagcgtaaaacacaatcctgtcctggtgcgccaattgcccgttaaaaatctgacattagccgatggta

SEQ ID NO: 350107 - DNA, 75 bp, synthetic construct
  source 1..75: mol_type = other DNA
gccccacatggtctggtctggaaagcgatcacgtctcctataacgcgggatacaccaacgttcatgagttaattc

SEQ ID NO: 350108 - DNA, 75 bp, synthetic construct
  source 1..75: mol_type = other DNA
atcgcgggctggaagatgaaaacagcgcgaaagattacgctgaaatcaaaccgtacaccccagcctggggtgagc

SEQ ID NO: 350109 - DNA, 75 bp, synthetic construct
  source 1..75: mol_type = other DNA
gttgaaggcagcaaggtgagcaatctcgatgcaatggatattaccgcgccgtacaccccaggagcactgcgcggc

SEQ ID NO: 350110 - DNA, 75 bp, synthetic construct
  source 1..75: mol_type = other DNA
gcaactgtggcttatctcgccacagggcggtgaaccacgccagttaacccataataaaacggatattcagtctgc

SEQ ID NO: 350111 - DNA, 75 bp, synthetic construct
  source 1..75: mol_type = other DNA
tctgcggacgccgtggtcttctcgccggatggtcagtggctggcgtggatggaaggcggccagctgtggatcacc

SEQ ID NO: 350112 - DNA, 75 bp, synthetic construct
  source 1..75: mol_type = other DNA
ccactttctcaaaagacgagcaggacaaagtatcggtcgataaagcggccgcagctgttgcctggcaggaacgga

SEQ ID NO: 350113 - DNA, 75 bp, synthetic construct
  source 1..75: mol_type = other DNA
cagtgaaattgctggcgcgtctggaaggcattctgcttgatcctgtgtataccggaaaagcgatggcggggctga

SEQ ID NO: 350114 - DNA, 75 bp, synthetic construct
  source 1..75: mol_type = other DNA
acaggcttctgaaactgaaggtgtcactgccggccaagaaaggaatcctgcactgccagagctctggtacgctcg

SEQ ID NO: 350115 - DNA, 75 bp, synthetic construct
  source 1..75: mol_type = other DNA
ttcctcggtaaactcaattacaccaagcgtgatggcccggcacaggggcgtccgctgattgataccgccattgac

SEQ ID NO: 350116 - DNA, 75 bp, synthetic construct
  source 1..75: mol_type = other DNA
ccaaagcaaagaaaagctctgaagaaacattatgtgataccacaaaccaatttcgtggtagcgttgagtcctccg

SEQ ID NO: 350117 - DNA, 75 bp, synthetic construct
  source 1..75: mol_type = other DNA
gagtatttctgggggcggctggagcattatcgtcaggtcagtgcgcagctcccggacaaaaatgccacggaatat

SEQ ID NO: 350118 - DNA, 75 bp, synthetic construct
  source 1..75: mol_type = other DNA
catcgaaagaagaccaggataaggtggccattgacctcgttgcttcaggtgtggcgtataaagaaaggctggcta

SEQ ID NO: 350119 - DNA, 75 bp, synthetic construct
  source 1..75: mol_type = other DNA
ttatttcgggtgatggcatggggccggggctttctccggacaatgatgagacgcttatctccatgctggcgccgg

SEQ ID NO: 350120 - DNA, 75 bp, synthetic construct
  source 1..75: mol_type = other DNA
tatcagaagttgcagagcgcgatccgggctacctgcgctggttgtttaataacctcgacagtatgagcccggaat

SEQ ID NO: 350121 - DNA, 75 bp, synthetic construct
  source 1..75: mol_type = other DNA
catcgcatcaccgaagccatggtcgccgataaaccgtggattgaagatgtgatcccacactattacggtagtgaa

SEQ ID NO: 350122 - DNA, 75 bp, synthetic construct
  source 1..75: mol_type = other DNA
ggtgttaactgtacaggctcctgcagctggaaaatctacgttaaaaatggtctggtaacctgggaaatccaacag

SEQ ID NO: 350123 - DNA, 75 bp, synthetic construct
  source 1..75: mol_type = other DNA
ggtgttaactgtacaggctcctgcagctggaaaatctacgttaaaaaaggtctggtgacctgggaaaaccaacag

SEQ ID NO: 350124 - DNA, 75 bp, synthetic construct
  source 1..75: mol_type = other DNA
ggtgttaactgtacaggctcctgcagctggaaaatctacgttaaaaaaggtctggtaacctgggaaagccaacag

SEQ ID NO: 350125 - DNA, 75 bp, synthetic construct
  source 1..75: mol_type = other DNA
cgtgtgaagtgctcgactggcgcaaaggcgaatgcgatctgattccaggcaaaaccgcgccgaatattgtggcgg

SEQ ID NO: 350126 - DNA, 75 bp, synthetic construct
  source 1..75: mol_type = other DNA
ggtgttaactgtacaggctcctgcagctggaaaatctacgttaaaaagggtctggtaacctgggaaaaccaacag

SEQ ID NO: 350127 - DNA, 75 bp, synthetic construct
  source 1..75: mol_type = other DNA
ggtgttaactgtacaggctcctgcagctggaaaatctacgttaaaaacggtctggtcacctgggaaacccaacag

SEQ ID NO: 350128 - DNA, 75 bp, synthetic construct
  source 1..75: mol_type = other DNA
cgcagtggtcactgatgtggggatttcctttgcaaaagaactggaaaccgccgatcagaaatggtcactgggctt

SEQ ID NO: 350129 - DNA, 75 bp, synthetic construct
  source 1..75: mol_type = other DNA
ataggtaataatgatcaaccatggataaattttttcgttgatacaagctccgttcatttttacgttgacgaaccg

SEQ ID NO: 350130 - DNA, 75 bp, synthetic construct
  source 1..75: mol_type = other DNA
taattcagttatgcagtgcgatactgctattttttaccacatcctggtatgcattggcgactgaatgttatatag

SEQ ID NO: 350131 - DNA, 75 bp, synthetic construct
  source 1..75: mol_type = other DNA
accaggtagaatcgcctcctggtatataggtaatactgaccagccatggataaatttctacgttaaagatacctc

SEQ ID NO: 350132 - DNA, 75 bp, synthetic construct
  source 1..75: mol_type = other DNA
gtattggattagcaagtgatagagtgattgatgtcgttaagtttttctacctgggcgataagtggtctattgctc

SEQ ID NO: 350133 - DNA, 75 bp, synthetic construct
  source 1..75: mol_type = other DNA
ggcacagttggtaccggatggtagcggtaatgctgtcggtgttggaaccttctctggtaacgcgaccttctcctt

SEQ ID NO: 350134 - DNA, 75 bp, synthetic construct
  source 1..75: mol_type = other DNA
gggcctatgagtatagtgacgatagctggtttttacgattccgttttttctggactccggaatttaaacctcaaa

SEQ ID NO: 350135 - DNA, 75 bp, synthetic construct
  source 1..75: mol_type = other DNA
attagcgtttattccacagttcaccgcatgggcagatgcaggcatgttaaccctcgtcgaagggccatttgatga

SEQ ID NO: 350136 - DNA, 75 bp, synthetic construct
  source 1..75: mol_type = other DNA
ggtaacgcttgggaacagctatgtttcggaagtgaaaaatgggcttacgcgggaaattcctttttctatccgtgc

SEQ ID NO: 350137 - DNA, 75 bp, synthetic construct
  source 1..75: mol_type = other DNA
ttattatgccttagttgtggtgccgcagatgaacttgatttatggctacctgcacaaagtggcgcagataacttc

SEQ ID NO: 350138 - DNA, 75 bp, synthetic construct
  source 1..75: mol_type = other DNA
cagacgctggtgttctatatggggctgaatcaggccgcgaccattcagcaaaagctgattgaacacggaatgcct

SEQ ID NO: 350139 - DNA, 75 bp, synthetic construct
  source 1..75: mol_type = other DNA
aggcaaacgcgtggtacgtttgaaaggcggcgatccgtttattttcggccgtggcggcgaagagctggaaacact

SEQ ID NO: 350140 - DNA, 75 bp, synthetic construct
  source 1..75: mol_type = other DNA
cgccgtttctgggaaaaactgttcgtcaatgaccgtctggcgcaatcgctggcgaacaacgaccagaaagccatc

SEQ ID NO: 350141 - DNA, 75 bp, synthetic construct
  source 1..75: mol_type = other DNA
taattcgccatcgtacacatccagaagtttacccttcttttgaagtttcaacatgccgaaacgaataccaatatg

SEQ ID NO: 350142 - DNA, 75 bp, synthetic construct
  source 1..75: mol_type = other DNA
gaatgcttatggcgcggatatggggatggtttatatctatggcgtactggtgacgatcccaagtgtaatctgcgc

SEQ ID NO: 350143 - DNA, 75 bp, synthetic construct
  source 1..75: mol_type = other DNA
agactatgaagaaaacgcaatggcagcagagaaaaaatggacgggaaaacggatctcaatcgcaaatgcgactgt

SEQ ID NO: 350144 - DNA, 75 bp, synthetic construct
  source 1..75: mol_type = other DNA
cagtttttctggaaccaagatatattgtaatacctggggtgatgctgattggtttagcgggttcagtagcgacgg

SEQ ID NO: 350145 - DNA, 75 bp, synthetic construct
  source 1..75: mol_type = other DNA
ccgttgcggcactgccgaatgacacgctgccggttgccctgatggtgaaatcctacggtacggtcagcgttgacg

SEQ ID NO: 350146 - DNA, 75 bp, synthetic construct
  source 1..75: mol_type = other DNA
agttcgccagcatcggcgcagaattcaacgcctggaaatggacacaactgcgtgccggttatcgccagaatatgg

SEQ ID NO: 350147 - DNA, 75 bp, synthetic construct
  source 1..75: mol_type = other DNA
gtgccagtacggacctggatgacaactggacgctggggctggtcgcacagaacctgatcccccgtagtattgaga

SEQ ID NO: 350148 - DNA, 75 bp, synthetic construct
  source 1..75: mol_type = other DNA
gttccgccgcatgttctccggcgaatatgacagcgccgattgctacctcgatatccaggcgggctccggcggtac

SEQ ID NO: 350149 - DNA, 75 bp, synthetic construct
  source 1..75: mol_type = other DNA
cagaatcgcgtggtttcaaaactgaaatcatcgaagagtcggaaggtgaagtggcgggtattaaatccgtgacga

SEQ ID NO: 350150 - DNA, 75 bp, synthetic construct
  source 1..75: mol_type = other DNA
gcagaaagtcgaggagtggcagccaggagaaagaccgccgttaaatgtatggctcgaattttacccaggggaatt

SEQ ID NO: 350151 - DNA, 75 bp, synthetic construct
  source 1..75: mol_type = other DNA
ttaaccgtgataatgattattcgcgtgattatcgcaatatggcgcaagctattattgatggatgtatcgggcacg

SEQ ID NO: 350152 - DNA, 75 bp, synthetic construct
  source 1..75: mol_type = other DNA
cccgcattaaagatctgcgcaccggggtagaaacccgcaacacgcaggccgtgctggacggcagcctggatcaat

SEQ ID NO: 350153 - DNA, 75 bp, synthetic construct
  source 1..75: mol_type = other DNA
atctgcgtaccggggtagaaacccgcaacacgcaggccgtgctggacggcagcctggatcaatttatcgaagcaa

SEQ ID NO: 350154 - DNA, 75 bp, synthetic construct
  source 1..75: mol_type = other DNA
ctgggcattttgcctggtgtgcactggttgccctgcatctggcccgcagggaggggctggtgcagtccgacatgc

SEQ ID NO: 350155 - DNA, 75 bp, synthetic construct
  source 1..75: mol_type = other DNA
aacggctgaagactcactggcagtcggtgaagactcgctggcaatgggcgcgaaaaccatcgttaatggtaatgc

SEQ ID NO: 350156 - DNA, 75 bp, synthetic construct
  source 1..75: mol_type = other DNA
cgtaataatattattaatacgttagcagaaaactgcgatgtcatcatttgcggtatgggaactcccgtacaataa

SEQ ID NO: 350157 - DNA, 75 bp, synthetic construct
  source 1..75: mol_type = other DNA
tgaaattgccgccatacccttacataggatatataaaaaacgaaaacggaaaactaataatcaatcttggtgggt

SEQ ID NO: 350158 - DNA, 75 bp, synthetic construct
  source 1..75: mol_type = other DNA
ccgggcattttgcctggtgtgcactggttgccctgcatctggcagaacaggacggacaggtcaaatccgacatgc

SEQ ID NO: 350159 - DNA, 75 bp, synthetic construct
  source 1..75: mol_type = other DNA
cgttttgaccgtgacgttacgccggatattgactggctgcttcaacagggacgtacactggggagccgggccaaa

SEQ ID NO: 350160 - DNA, 75 bp, synthetic construct
  source 1..75: mol_type = other DNA
caattaaatcctcaggaggtacgtcatggagtttatcatggtccattatttactatgattgacgaaataagtgag

SEQ ID NO: 350161 - DNA, 75 bp, synthetic construct
  source 1..75: mol_type = other DNA
ttgcggataaacttttcccaatatttgatgatgatgatatttctatcgttgatattccccctgagcagcgtcgat

SEQ ID NO: 350162 - DNA, 75 bp, synthetic construct
  source 1..75: mol_type = other DNA
gcactgcgcaatttatcgttacagccatgcgaggcgagatcaaacgccgccagcgccgaaaggccaaagaatcag

SEQ ID NO: 350163 - DNA, 75 bp, synthetic construct
  source 1..75: mol_type = other DNA
tgacctgacggctggcagcactgacgcggttaacggctctcagctcaaaaccactaacgatgccgtggcagccaa

SEQ ID NO: 350164 - DNA, 75 bp, synthetic construct
  source 1..75: mol_type = other DNA
gcaggcggcgttcgctacgacaccaaagctgatggctctatcgactacagcaacatcactctcggtggcggcaat

SEQ ID NO: 350165 - DNA, 75 bp, synthetic construct
  source 1..75: mol_type = other DNA
cgttgtcgattggtgatgacggtaaatatcgtcaaatcatcaacgtcgcggatggttctgaagcccatgatgcgg

SEQ ID NO: 350166 - DNA, 75 bp, synthetic construct
  source 1..75: mol_type = other DNA
ctggcgatgaggaatgctgagaagcatcttctgaaaaaagcatggaaaaagaacgctgctgaaaaactgtctgag

SEQ ID NO: 350167 - DNA, 75 bp, synthetic construct
  source 1..75: mol_type = other DNA
agatctcggtggttttttaacgaacgaactggatttttatattaaaaatgaagtaatgaatctcgataatgtgca

SEQ ID NO: 350168 - DNA, 75 bp, synthetic construct
  source 1..75: mol_type = other DNA
gtacttattgagccacatgttcgtaccaaaattgatgaagaaggcgatgagtatgaacaagaatataagccagta

SEQ ID NO: 350169 - DNA, 75 bp, synthetic construct
  source 1..75: mol_type = other DNA
aatagttgtggttgggtattcgagggagcacataccgtttcttctctctgactacaacgataacccgctctttgg

SEQ ID NO: 350170 - DNA, 75 bp, synthetic construct
  source 1..75: mol_type = other DNA
ggagcaaatgagcatgaaaatgcagtattttcccatctgctcactttcttttcgcgttattatgacaacggcgat

SEQ ID NO: 350171 - DNA, 75 bp, synthetic construct
  source 1..75: mol_type = other DNA
acttgaaagttatgaggatgctcttaataatatacaattacgaagttattcattgcatcaggatatttctacatt

SEQ ID NO: 350172 - DNA, 75 bp, synthetic construct
  source 1..75: mol_type = other DNA
atggtgttctttaatgagttctcgtttagagataagtaaatccttattaaaagaaaatgcagctacttgtacaac

SEQ ID NO: 350173 - DNA, 75 bp, synthetic construct
  source 1..75: mol_type = other DNA
ttaattaacagccaatttcagtatataggtagcacggcggagggtatgcagttacggctgggatatacggcccgg

SEQ ID NO: 350174 - DNA, 75 bp, synthetic construct
  source 1..75: mol_type = other DNA
tagggaacacggcggacggtatgcaattacgcctgggatatacggcccgctacgctgaatgggtgcacaatatgc

SEQ ID NO: 350175 - DNA, 75 bp, synthetic construct
  source 1..75: mol_type = other DNA
tccgtgagagattaaagcaggagctaaaggaaatcaccgataaaaagacgcacgaagttttatggcgcgtcggta

SEQ ID NO: 350176 - DNA, 75 bp, synthetic construct
  source 1..75: mol_type = other DNA
cggcgtggcggggggttctctgctgctgatcccgctggcctgtaatatgttcggtatttcgaacgatatcgccat

SEQ ID NO: 350177 - DNA, 75 bp, synthetic construct
  source 1..75: mol_type = other DNA
cgcggagccggaattcttgcgcaaaggcattgacgaaaacttaggagaaattacgcgagagattgagcgaggtta

SEQ ID NO: 350178 - DNA, 75 bp, synthetic construct
  source 1..75: mol_type = other DNA
tcgagaaaaacggcaacggcctttgcctcagggttggatataccgcccgctatgctgaatgggtgcatgacatgc

SEQ ID NO: 350179 - DNA, 75 bp, synthetic construct
  source 1..75: mol_type = other DNA
gtacaggacaatttgtcactgcagcattaaaacgagaagttgagtaccgccagcgccgcaaggccaaagaactgg

SEQ ID NO: 350180 - DNA, 75 bp, synthetic construct
  source 1..75: mol_type = other DNA
cggattcatcgagcctcatgcaaatcaatcaacccgttaatcagcccaaaaaatcacgccggctttactactggc

SEQ ID NO: 350181 - DNA, 75 bp, synthetic construct
  source 1..75: mol_type = other DNA
cacgcaaagtgtgattcttgaggcgctgtttgacccgtggttaagccctgttcaggcgcgggcgttattacaaca

SEQ ID NO: 350182 - DNA, 75 bp, synthetic construct
  source 1..75: mol_type = other DNA
tggctttcccgctgcgcgatggcattccagttctgctggaaacggaagcccgtgtactgactgccgatgagagta

SEQ ID NO: 350183 - DNA, 75 bp, synthetic construct
  source 1..75: mol_type = other DNA
atccatagagcatcttgcaaaacgattaatcccttgaaacgcaagatcgataaaacaggattcacaactggagat

SEQ ID NO: 350184 - DNA, 75 bp, synthetic construct
  source 1..75: mol_type = other DNA
gaacataagagaataaaattacgctggcttaatgaggataatgacgaagtctgtatatgggcttataattacatt

SEQ ID NO: 350185 - DNA, 75 bp, synthetic construct
  source 1..75: mol_type = other DNA
gttggttaaaagaaaatgaaagagcgacgttctggctatggggcgtgatgtgtcttgattaccgctgtatggagt

SEQ ID NO: 350186 - DNA, 75 bp, synthetic construct
  source 1..75: mol_type = other DNA
accctggctctttgttctgggccagtggatgttgtcattatgggaagtgttaaggtcttgatatgcggcaaacca

SEQ ID NO: 350187 - DNA, 75 bp, synthetic construct
  source 1..75: mol_type = other DNA
ttatcgctggcgctgatgcgcaagctgtctgttgatgacttccagcgtctgtcgctggctacagagatgcacgac

SEQ ID NO: 350188 - DNA, 75 bp, synthetic construct
  source 1..75: mol_type = other DNA
tacgtggcattgaagttctggctcgctggaatatgccagatggcaaggtgttatctcctgatttgtttattcccc

SEQ ID NO: 350189 - DNA, 75 bp, synthetic construct
  source 1..75: mol_type = other DNA
ttgcctgcccggtatgcaacggaaaactgtggtataaccaggaaaaacaagagcttatttgtaaactggacaacc

SEQ ID NO: 350190 - DNA, 75 bp, synthetic construct
  source 1..75: mol_type = other DNA
aaaacatgatgaaatattagagttgggtagcgagttagggcttaattttactaaaagcaatgttcctgattcaat

SEQ ID NO: 350191 - DNA, 75 bp, synthetic construct
  source 1..75: mol_type = other DNA
tggggatcaagtttacaaaagaagcgaaaagatttttatgtaaacttattggtgaagaaaaacgttatacaacgc

SEQ ID NO: 350192 - DNA, 75 bp, synthetic construct
  source 1..75: mol_type = other DNA
cctgaaaaatgaaaagcgcgtgcatctggcgcagccgtgggcttccggccctcgttttttcccactgccgcaggg

SEQ ID NO: 350193 - DNA, 75 bp, synthetic construct
  source 1..75: mol_type = other DNA
aagcgcaggcggagtatggtcagtttgctgaacaacaacggcgcttaaaagaagccgaaggtgagaaggatatcg

SEQ ID NO: 350194 - DNA, 75 bp, synthetic construct
  source 1..75: mol_type = other DNA
tgccgaacaacaacggcgcttaaaagaagccgaaggcgagaaggatatcgctggtttgctacagtggaataaaga

SEQ ID NO: 350195 - DNA, 75 bp, synthetic construct
  source 1..75: mol_type = other DNA
atggaagtgcccgccgcgatattaatcatacttggctttttcacccgtccgctggcggtgctgtttattttctag

SEQ ID NO: 350196 - DNA, 75 bp, synthetic construct
  source 1..75: mol_type = other DNA
atggcaacgaaagcagttaatggaaaatccaaaaaacttgaggcacgagtcccccatgcaatagctgacgccgta

SEQ ID NO: 350197 - DNA, 75 bp, synthetic construct
  source 1..75: mol_type = other DNA
agtcacaaatgaccacagttcgaatcccccatgatgtgatggaagatatcgaactttttaaacatgaaggtgaaa

SEQ ID NO: 350198 - DNA, 75 bp, synthetic construct
  source 1..75: mol_type = other DNA
tgctgaacaacaacggcgcttaaaagaagccgaaggtgagaaggatatcgccggtttgctacaatggaaaacaga

SEQ ID NO: 350199 - DNA, 75 bp, synthetic construct
  source 1..75: mol_type = other DNA
gttacgaaaaagagttcgcacagctggcctttaaaaatcagccgatgatggtgggcaactgggcgcaaagcattt

SEQ ID NO: 350200 - DNA, 75 bp, synthetic construct
  source 1..75: mol_type = other DNA
ttcttgcgcagccgctacttgctgacgtcgatgagcgtactaaaaaacagctaaaaaccgtcctgagcgtggaca

SEQ ID NO: 350201 - DNA, 75 bp, synthetic construct
  source 1..75: mol_type = other DNA
gccgctaatcaaccgctggcggatatcagtgagatgcgcgtggtgcagggaatggacgccgggctttatcaaaaa

SEQ ID NO: 350202 - DNA, 75 bp, synthetic construct
  source 1..75: mol_type = other DNA
gatatgactggcgatgcggttgggccaaatatgattaatttctggaagaatatcagcattgctggcgcattcctg

SEQ ID NO: 350203 - DNA, 75 bp, synthetic construct
  source 1..75: mol_type = other DNA
ttaattttcattatttttggttttcccaaaatgatgggctttgacggtacggtccaatatatggcctcgttgggc

SEQ ID NO: 350204 - DNA, 75 bp, synthetic construct
  source 1..75: mol_type = other DNA
gcacatcacaattcatcattgcgtcaatgcaaggcgagatcaaacgccgccagcgacgcaaagccaaggagtcag

SEQ ID NO: 350205 - DNA, 75 bp, synthetic construct
  source 1..75: mol_type = other DNA
actacgtgattgctaacggcggtacgaccgtactgaccgaagttccagagatgttcggcgcagagcagttgctga

SEQ ID NO: 350206 - DNA, 75 bp, synthetic construct
  source 1..75: mol_type = other DNA
ttttgtgcgatgcgggagtcgaattcatccagtttattccggtggtcgagcgtctggctgatgaaacagctgccc

SEQ ID NO: 350207 - DNA, 75 bp, synthetic construct
  source 1..75: mol_type = other DNA
agttaccggcgcagtgtcgcagttgtaacgtgttaaaagcatgttggggaggctgcccgaaacaccgctttatgc

SEQ ID NO: 350208 - DNA, 75 bp, synthetic construct
  source 1..75: mol_type = other DNA
tcatttcttacacaagatcaaagtgctgaaaaatggcttctgtcgcagagagatttttgtgaattgatctctgtc

SEQ ID NO: 350209 - DNA, 75 bp, synthetic construct
  source 1..75: mol_type = other DNA
aacaaccaggttgccgcgttccgtgaaacgctgggtgatatcgatcctgaacgtgttcatttcatgatctgccaa

SEQ ID NO: 350210 - DNA, 75 bp, synthetic construct
  source 1..75: mol_type = other DNA
tcttcagccacacctacggctgctcacaactgggcgacgatcacattaatacccgcaccatgctgcaaaacatgg

SEQ ID NO: 350211 - DNA, 75 bp, synthetic construct
  source 1..75: mol_type = other DNA
ttgagaatatttatagatctctctgtaagcacttttgttgaagaaaacaagttacaatttaaggaaccacataga

SEQ ID NO: 350212 - DNA, 75 bp, synthetic construct
  source 1..75: mol_type = other DNA
gaatacaggtgtggataaacaggaagatgattattctagacatgtaggcacagaagagagtaaatctaaagtttc

SEQ ID NO: 350213 - DNA, 75 bp, synthetic construct
  source 1..75: mol_type = other DNA
atgaagtgatcagcgagaagctaaaccctgcgcaccatatcgacgccgttgagagcaaattgtttggcattggcg

SEQ ID NO: 350214 - DNA, 75 bp, synthetic construct
  source 1..75: mol_type = other DNA
accagcgcgcagcaaccgttgcaggtatatgattttttgtgcgatgcgggagtcgaattcatccagtttattccg

SEQ ID NO: 350215 - DNA, 75 bp, synthetic construct
  source 1..75: mol_type = other DNA
gaccaaaggcggcagaccaacgcataagctggtgatgcgcgcacttaaactactgcaaaaatatcacgttgatta

SEQ ID NO: 350216 - DNA, 75 bp, synthetic construct
  source 1..75: mol_type = other DNA
gttcgtcataaagacagttataatcaaaaaacgattgtcagtgatgatatcagaaatataatcagaagaatgagt

SEQ ID NO: 350217 - DNA, 75 bp, synthetic construct
  source 1..75: mol_type = other DNA
aaggaaaattatcagaaggattaatgacgattcttccgtgtcatcatatgtaaatgatgttttttatctgtatgg

SEQ ID NO: 350218 - DNA, 75 bp, synthetic construct
  source 1..75: mol_type = other DNA
tttatggctctggtcggggcattgttaggcagcattgcctggtacacccgacctcgtcccgcacgtagcagacgc

SEQ ID NO: 350219 - DNA, 75 bp, synthetic construct
  source 1..75: mol_type = other DNA
aaaaaagcacataagttgaaaatgaaaagattacaaagaatgcttgagaaaatggcatgtgaccgggtctcgcca

SEQ ID NO: 350220 - DNA, 75 bp, synthetic construct
  source 1..75: mol_type = other DNA
ctgatgagccgcaactttggcgcgaaatttgggcttctggaagccggttacaaagccgatttaaccatttgcgat

SEQ ID NO: 350221 - DNA, 75 bp, synthetic construct
  source 1..75: mol_type = other DNA
cattacgccgccagaaaaactgaaatttgccgggatcgccacttataacgatcaccgaatggcaatgtgtttctc

SEQ ID NO: 350222 - DNA, 75 bp, synthetic construct
  source 1..75: mol_type = other DNA
atatgtacaaaaaaatacaagctgaagcggctactaccgacatcaaaacactggaacagtttttgaagaagttcc

SEQ ID NO: 350223 - DNA, 75 bp, synthetic construct
  source 1..75: mol_type = other DNA
atggtcggggcattgttaggtggtattgcctggtacacccgaccacggcctgcgcgaagcagacgctatgagtaa

SEQ ID NO: 350224 - DNA, 75 bp, synthetic construct
  source 1..75: mol_type = other DNA
gcgatgctctgacgcagcgttatcctgacgccagctacaaagagatgcatggccggattgtgatgcctggtattg

SEQ ID NO: 350225 - DNA, 75 bp, synthetic construct
  source 1..75: mol_type = other DNA
acgtttcctacagtcaccattggtacggcaaagacctgctggcacgactggcgcaattcgatctcatcgacagca

SEQ ID NO: 350226 - DNA, 75 bp, synthetic construct
  source 1..75: mol_type = other DNA
catgtttgaggagatgaaattcgccttctttaaacaccgcgacgcgggaggaccactgtggccagacagttttgc

SEQ ID NO: 350227 - DNA, 75 bp, synthetic construct
  source 1..75: mol_type = other DNA
tctgtcgaaagaggatattgccctgcttaaccaacgtgacgcgttcctggtacataacgcccgttcaaacatgaa

SEQ ID NO: 350228 - DNA, 75 bp, synthetic construct
  source 1..75: mol_type = other DNA
tgggaaccgacggcatcggttcagacatgtttgaagagatgaaattcgccttctttaaacatcgtgacgctggtg

SEQ ID NO: 350229 - DNA, 75 bp, synthetic construct
  source 1..75: mol_type = other DNA
tacaactcgccgacgccgctgctggcagacaatatcgccgggcatatcgctttcggtatgggctcaggcagcgtt

SEQ ID NO: 350230 - DNA, 75 bp, synthetic construct
  source 1..75: mol_type = other DNA
agatcaaaccagagcacttcaaaaactgggttgaatgggcgaaagccaatcagctcggtctggattttaacccct

SEQ ID NO: 350231 - DNA, 75 bp, synthetic construct
  source 1..75: mol_type = other DNA
agcagtatgatgaggagtccggcctgtattataaccgccaccgctattatgacccgctgcaggggcggtatatca

SEQ ID NO: 350232 - DNA, 75 bp, synthetic construct
  source 1..75: mol_type = other DNA
cagcggtagcgccattatcaccaactacttctcttccggcgtcgcggtgtttgcctttctgggcacgtccgtaat

SEQ ID NO: 350233 - DNA, 75 bp, synthetic construct
  source 1..75: mol_type = other DNA
ctttatcaaaagaaaaccttattgcattggcggatttgaaaaaaagaaaacttattaatgaagccaacgagcaca

SEQ ID NO: 350234 - DNA, 75 bp, synthetic construct
  source 1..75: mol_type = other DNA
tctcgctcacttgaaggattcgctaaccaagaagctgataaattcaaagaggcgctacttgagacgctaaagacc

SEQ ID NO: 350235 - DNA, 75 bp, synthetic construct
  source 1..75: mol_type = other DNA
aaacttattaatgaagccaacgagcacatgaacagcagacaatggccaggtaaagcggctattggtcgtctgaaa

SEQ ID NO: 350236 - DNA, 75 bp, synthetic construct
  source 1..75: mol_type = other DNA
atgaaaatagtcagcaatcaggagggatatccggttttgacagagcaaccacctttatcaaaagaaaaccttatt

SEQ ID NO: 350237 - DNA, 75 bp, synthetic construct
  source 1..75: mol_type = other DNA
gttaatcaggtaaaagacgctggtctgaaagggcgcggtggcgcgggcttttctaccggcctgaaatggagcctg

SEQ ID NO: 350238 - DNA, 75 bp, synthetic construct
  source 1..75: mol_type = other DNA
aatttccagaaaaaactttggactaagaagaagtttgttgttgggcatgagtatcttgtgtcactttcaaatcta

SEQ ID NO: 350239 - DNA, 75 bp, synthetic construct
  source 1..75: mol_type = other DNA
agataatgaattagatcgctgctttgtacttattgagccacatgttcgtaccaaaattgatgaagaaggcgatga

SEQ ID NO: 350240 - DNA, 75 bp, synthetic construct
  source 1..75: mol_type = other DNA
tcagaaacctgcgtgggtcgcatccggtatctgggcgtgctgctttacgacgccgaccgcatcgaggaagcggcg

SEQ ID NO: 350241 - DNA, 75 bp, synthetic construct
  source 1..75: mol_type = other DNA
cggcggcgtcagatatacaggaagcgaaggaaattctcgtcgagcattacgataatatcgagcagaaaatcgatg

SEQ ID NO: 350242 - DNA, 75 bp, synthetic construct
  source 1..75: mol_type = other DNA
ttatgctcggcattggtagttctcttagcagccatgatgtcataaccctgatcccggtcctgggcaaccccgtgt

SEQ ID NO: 350243 - DNA, 75 bp, synthetic construct
  source 1..75: mol_type = other DNA
gaacgtatgaaagagttttttgcaaagcgatatcccacttcagagctgataattaaagtctttgaacctgatttc

SEQ ID NO: 350244 - DNA, 75 bp, synthetic construct
  source 1..75: mol_type = other DNA
tccgccagcacgccgtcgtgccattccgggtgtgcagctttgcattacctgtcaggaaatcgcagagctgaaagg

SEQ ID NO: 350245 - DNA, 75 bp, synthetic construct
  source 1..75: mol_type = other DNA
tgagagttgcagatggtaatgtgaatattggtttgttaaatgaatggtcgaatgttaaagatattttaattagac

SEQ ID NO: 350246 - DNA, 75 bp, synthetic construct
  source 1..75: mol_type = other DNA
ctcaaggcttctttatgaattatcaggcttaagaccggaggttattaatgtgagagttgcagatggtaatgtgaa

SEQ ID NO: 350247 - DNA, 75 bp, synthetic construct
  source 1..75: mol_type = other DNA
attctataccaagttctaaatattatgatttcactcagattaacagtgattcagatgtagagagaaatgagaatg

SEQ ID NO: 350248 - DNA, 75 bp, synthetic construct
  source 1..75: mol_type = other DNA
tcaaattaaaagacaactttaatattattggaacgttgtcatatggtaaagaaaattttattgccatgagtcata

SEQ ID NO: 350249 - DNA, 75 bp, synthetic construct
  source 1..75: mol_type = other DNA
atgaatactcaggaagcatcagatttgatagcgagatatgagcataatgttcttattgtagggaattctgccacc

SEQ ID NO: 350250 - DNA, 75 bp, synthetic construct
  source 1..75: mol_type = other DNA
tggaaccgacaaaatccagtctgcctgtgacgccgatgaccatgcgcggcatgtatttttatatggctgacgcgg

SEQ ID NO: 350251 - DNA, 75 bp, synthetic construct
  source 1..75: mol_type = other DNA
gcaaagttggcgcggcgtgctgccgtgtgccgattgcgaagggatcgaaacctctctgttcctcgaaaaagatgg

SEQ ID NO: 350252 - DNA, 75 bp, synthetic construct
  source 1..75: mol_type = other DNA
cggcgaccttcactgattgcgcgaccggaaaacgtttcatggtagcgaataacgcagagctggagcgtagctacc

SEQ ID NO: 350253 - DNA, 75 bp, synthetic construct
  source 1..75: mol_type = other DNA
agcaaccgaactgcccaacaacaattcgtctattcaggtgacgactcttgccagcggtgagctggcgctggtgta

SEQ ID NO: 350254 - DNA, 75 bp, synthetic construct
  source 1..75: mol_type = other DNA
atgattaaaaccaccacggaaaagcgcgcgaatgtgcatatttttgccggaagcgatccggcgcatattgcaacc

SEQ ID NO: 350255 - DNA, 75 bp, synthetic construct
  source 1..75: mol_type = other DNA
cgatgactgtaatcagtctctttactctaatgggatgtaataatcgggccgaagtagatatgctttccccagcgc

SEQ ID NO: 350256 - DNA, 75 bp, synthetic construct
  source 1..75: mol_type = other DNA
tggcattgtagaaattaccggagaaaacatcagggttgatgtttatcaggggcaaaatggtcaatcaatcactct

SEQ ID NO: 350257 - DNA, 75 bp, synthetic construct
  source 1..75: mol_type = other DNA
tttgcaacttcaggaaacagccaacagcagcaaagtagcaatcatcaaaatcatcctgaatatgacgattccatc

SEQ ID NO: 350258 - DNA, 75 bp, synthetic construct
  source 1..75: mol_type = other DNA
tttgcagcttcaggaaatggcccgcagcagcaaagtagtaaccagcagaacacccctgtatacgacgattccatc

SEQ ID NO: 350259 - DNA, 75 bp, synthetic construct
  source 1..75: mol_type = other DNA
ctggatttacgttaacggtgtgaaaaataaaggtctggagaaccgccgcgcgcgggaactggcctggtgcttaaa

SEQ ID NO: 350260 - DNA, 75 bp, synthetic construct
  source 1..75: mol_type = other DNA
tcaacgtcgagcaacggctcgcggtctgtgtgccggtggatatgccaccgcgcgtctatgactcgctggtcagtt

SEQ ID NO: 350261 - DNA, 75 bp, synthetic construct
  source 1..75: mol_type = other DNA
tcgcctgacaccttaccagtgcagcgcgggcgtgtggacgtcaggcatcggccacactgccggggtggtaccgaa

SEQ ID NO: 350262 - DNA, 75 bp, synthetic construct
  source 1..75: mol_type = other DNA
actggattaccgaccaaacgccaatgcccaggcgctggcaactcaggtgagcgataccgttggcgtggtggtgat

SEQ ID NO: 350263 - DNA, 75 bp, synthetic construct
  source 1..75: mol_type = other DNA
aatgcccaggcgctggcaactcaggttagcgataccattggcgtggtggtgatggacgtttctgatgcgtttttc

SEQ ID NO: 350264 - DNA, 75 bp, synthetic construct
  source 1..75: mol_type = other DNA
gcccaggcactggcaacccagatgagcgataccatcggcgtagtggtgatggatgtctctgatgcatttttcggc

SEQ ID NO: 350265 - DNA, 75 bp, synthetic construct
  source 1..75: mol_type = other DNA
gtgataggcatagataatacttatccgacaattatttttgatcagttgattagtctcggagataagtacgaaggc

SEQ ID NO: 350266 - DNA, 75 bp, synthetic construct
  source 1..75: mol_type = other DNA
atggcacactcgattactgtaagactaaacaagcccgcaagagagtttcaggccggggaaaatatcggattcaac

SEQ ID NO: 350267 - DNA, 75 bp, synthetic construct
  source 1..75: mol_type = other DNA
atggcacattcgattactgtaagactaaacaagcctgcaagagagtttcaggcaggtgaaaatatcggattcaat

SEQ ID NO: 350268 - DNA, 75 bp, synthetic construct
  source 1..75: mol_type = other DNA
gccttgtcgggaccgtgctagctattgctgccacgctgccgggttttcagcagcttcacacctccgtggagggac

SEQ ID NO: 350269 - DNA, 75 bp, synthetic construct
  source 1..75: mol_type = other DNA
aaattactcaatcagcggcgctgggaggatgcatgccgacagttgccgcgctgggtttatgtaaaaggtgtgttt

SEQ ID NO: 350270 - DNA, 75 bp, synthetic construct
  source 1..75: mol_type = other DNA
caaaaggtgtatgacgcggtggtgtcgtttgccttcaacgtggggacgggcaatgcctgcagttccacgctggtg

SEQ ID NO: 350271 - DNA, 75 bp, synthetic construct
  source 1..75: mol_type = other DNA
gcgctgggtttatgtgaaaggtgtttttaatcaggggctggataaccgccgtgcgcgggagatggcctggtgttt

SEQ ID NO: 350272 - DNA, 75 bp, synthetic construct
  source 1..75: mol_type = other DNA
cattggaggagagacaacgggaggacgtgccacttctgacatgatatttatttcagaaaaagccaataaattaat

SEQ ID NO: 350273 - DNA, 75 bp, synthetic construct
  source 1..75: mol_type = other DNA
atggcaaatcaaaataaaattaatgtatttcaggttgaatcaaaacataaaatacctgtgataaaacacgttcgc

SEQ ID NO: 350274 - DNA, 75 bp, synthetic construct
  source 1..75: mol_type = other DNA
ttggtaatacgtcgggcgtcattccgggcaaaaccattacggaacgacaggcagcggaagggctgatctctaacg

SEQ ID NO: 350275 - DNA, 75 bp, synthetic construct
  source 1..75: mol_type = other DNA
agcgcgggtgtatggactgacggcattggtaatacgtcgggcgtcattcgcggcaaaaccattacggaacgacag

SEQ ID NO: 350276 - DNA, 75 bp, synthetic construct
  source 1..75: mol_type = other DNA
cagaaagtgtatgacgcggtggtgtcatttgccttcaacgtggggacaggcaatgcctgcagttccacgctggtg

SEQ ID NO: 350277 - DNA, 75 bp, synthetic construct
  source 1..75: mol_type = other DNA
caatgcctgcagttccacactggtgaaattactcaatcagcggctctgggcggatgcgtgccgacagttgccgcg

SEQ ID NO: 350278 - DNA, 75 bp, synthetic construct
  source 1..75: mol_type = other DNA
tcccaagtagttttcatgaaagcatcccctttatgcagggcgaccgtcgtcaagaaattattgatgcctgccggg

SEQ ID NO: 350279 - DNA, 75 bp, synthetic construct
  source 1..75: mol_type = other DNA
tgacggcaaattaccatcagcaaatcagaaccagccgcctgctgacgatggatgtgatcccgtcagtatggggag

SEQ ID NO: 350280 - DNA, 75 bp, synthetic construct
  source 1..75: mol_type = other DNA
gcagcagaagggctgatctccaacgtgctacgtgtagagctggcgctggaaagatgtgtgaagcaacagccgccg

SEQ ID NO: 350281 - DNA, 75 bp, synthetic construct
  source 1..75: mol_type = other DNA
gcggcgatggttgaactgctggggcgcaatctacaacttaccgctgtatttgcttataacgacaatatggccgct

SEQ ID NO: 350282 - DNA, 75 bp, synthetic construct
  source 1..75: mol_type = other DNA
tgatgagttatcgggggttgtatttattgatgaaattgatgctcatttgcatgtttctttacaacggaaaatttt

SEQ ID NO: 350283 - DNA, 75 bp, synthetic construct
  source 1..75: mol_type = other DNA
gccatgaatataatatgcaactcgatggggattgaattttgccgtactggaattggtgatgaggggattgatgcc

SEQ ID NO: 350284 - DNA, 75 bp, synthetic construct
  source 1..75: mol_type = other DNA
cttctcaaatagcatttaccctagatataatttttaatcgtaggcttttttgctctgactggaaaatgttgaatg

SEQ ID NO: 350285 - DNA, 75 bp, synthetic construct
  source 1..75: mol_type = other DNA
ccgcattcgcgactggtcgattcagtttgtcgataccgtggcagataacgcctcctgcggggtgtatgtcatcgg

SEQ ID NO: 350286 - DNA, 75 bp, synthetic construct
  source 1..75: mol_type = other DNA
aaccattcctttttcccgtgttctgcaacctcgtattgaagcagagatcgcactggtgctaaaccgcgatttacc

SEQ ID NO: 350287 - DNA, 75 bp, synthetic construct
  source 1..75: mol_type = other DNA
gtaaagtgggcctgacgcatccgaaagtgcaacaacaactgggcgttgatcaaccggattttgggacgttatttg

SEQ ID NO: 350288 - DNA, 75 bp, synthetic construct
  source 1..75: mol_type = other DNA
ttctgtcatgataaaaggattcttgtaataaataatgagaacaatatgggagtggcacaatctcgtaacagagga

SEQ ID NO: 350289 - DNA, 75 bp, synthetic construct
  source 1..75: mol_type = other DNA
tatgctgatcggcggtctgattctgttgcctttttatgccagacaaggaacaaactttgtcgttaacggcagttt

SEQ ID NO: 350290 - DNA, 75 bp, synthetic construct
  source 1..75: mol_type = other DNA
accgaaacctacggccacatttttgcccgggatgccggagatatcgatctgcgggacagtattcacagtgaccgt

SEQ ID NO: 350291 - DNA, 75 bp, synthetic construct
  source 1..75: mol_type = other DNA
ggttctgataatcaaaagcgggaaagcgatgttaatgaacgggtaatttctgtttgcctgaatggccatgttctt

SEQ ID NO: 350292 - DNA, 75 bp, synthetic construct
  source 1..75: mol_type = other DNA
atggcagggcagacgatatcatcggactgtgacccgccccggggggggggggatcatccggcgaaaaaaacgatc

SEQ ID NO: 350293 - DNA, 75 bp, synthetic construct
  source 1..75: mol_type = other DNA
tggcgcagcgggcctacaataacggtatggcagcctccggttttggaacgggaggtaaataccagcaggcgatac

SEQ ID NO: 350294 - DNA, 75 bp, synthetic construct
  source 1..75: mol_type = other DNA
gaagcccatatcgaaggcataggttcagttgctgcgacattttcaagcgcagccccaaaaggaagtctgtcatga

SEQ ID NO: 350295 - DNA, 75 bp, synthetic construct
  source 1..75: mol_type = other DNA
gtcaaaggtaaatacatcactatcgaaaataacgatgcgctggcccagcttgctggtcacacgcgtaacgttgcc

SEQ ID NO: 350296 - DNA, 75 bp, synthetic construct
  source 1..75: mol_type = other DNA
acccgagtttcgcgcaggcgctggaaacctcgatggtatgtgaaatcccgttcgaaacgctggacgatttgtctg

SEQ ID NO: 350297 - DNA, 75 bp, synthetic construct
  source 1..75: mol_type = other DNA
gctttatgccatccgctccggtacgattaaaagttataccatcactgagcaaggcgacgagcaaattactggttt

SEQ ID NO: 350298 - DNA, 75 bp, synthetic construct
  source 1..75: mol_type = other DNA
gcaatctgcaacttactgctgtgtttgcttataacgacaatatggccgctggcgcactgacggcattaaaagata

SEQ ID NO: 350299 - DNA, 75 bp, synthetic construct
  source 1..75: mol_type = other DNA
tttacccgcaaagacaataatatcagcctcaataaagccggacaggaactataccaaaaactgtttccggtttat

SEQ ID NO: 350300 - DNA, 75 bp, synthetic construct
  source 1..75: mol_type = other DNA
gcgatctggacaactataacaaggcgctgtttgacgccctgacccatgcgggtgtgtgggaagacgacagtcagg

SEQ ID NO: 350301 - DNA, 75 bp, synthetic construct
  source 1..75: mol_type = other DNA
atgcctgatctgtttgcgcgaatgtgcagccggatggacctggcgaccgtacgcatgatggggaaaacggcggag

SEQ ID NO: 350302 - DNA, 75 bp, synthetic construct
  source 1..75: mol_type = other DNA
cctgggtgaaccgctgcgcgccggagatatcattcttaccggggcattaggtccgatggtggcggtgaatgcggg

SEQ ID NO: 350303 - DNA, 75 bp, synthetic construct
  source 1..75: mol_type = other DNA
cgctggtgctgaaccgcgatctgcccaataccgacaccacttttgacgagctttacaacgccatagagtgggtac

SEQ ID NO: 350304 - DNA, 75 bp, synthetic construct
  source 1..75: mol_type = other DNA
atgtttccgtattgttttgccattatagtgaggccattctgtgcttcattttacaatgaagagcttgattttgcc

SEQ ID NO: 350305 - DNA, 75 bp, synthetic construct
  source 1..75: mol_type = other DNA
ttcctcaacttttagatgctggttatacgtgtattgtaaaaccacatcctatggctaatgcttctgcagctagag

SEQ ID NO: 350306 - DNA, 75 bp, synthetic construct
  source 1..75: mol_type = other DNA
attataaagcatgataacatatcatatatctatgagagtttgaacacagaacctcttgtgaaaaaaaggcatttg

SEQ ID NO: 350307 - DNA, 75 bp, synthetic construct
  source 1..75: mol_type = other DNA
gggaatgctggtcattattctctgcggtatccgttttgccgccgatatcatcgtaccctttatccttgccctatt

SEQ ID NO: 350308 - DNA, 75 bp, synthetic construct
  source 1..75: mol_type = other DNA
attatgacaccgctgcaagctctcgaaccgttgttgcaacgcgtggggattgccatctcagttgaccaactggcg

SEQ ID NO: 350309 - DNA, 75 bp, synthetic construct
  source 1..75: mol_type = other DNA
taaatgatgactggctttttgcatggcagacaactgtatatacgaaggttaataatttcaggtacggtaatcata

SEQ ID NO: 350310 - DNA, 75 bp, synthetic construct
  source 1..75: mol_type = other DNA
cttcgcggtagcgttgagtcctccgaatacaagcacgtggtgttgagcctcgtgttcctgaaattcatcagcgac

SEQ ID NO: 350311 - DNA, 75 bp, synthetic construct
  source 1..75: mol_type = other DNA
aaacaaggggtgtataaggggaaagataataaacatgaaaatagttaccgtgtcggtgttctgattaatttttaa

SEQ ID NO: 350312 - DNA, 75 bp, synthetic construct
  source 1..75: mol_type = other DNA
tgtttatgctgctcgaagtgccacaacttcccggcaaactccagcaaatgatggcgcgcccggtcgaaggtatgg

SEQ ID NO: 350313 - DNA, 75 bp, synthetic construct
  source 1..75: mol_type = other DNA
atatcaaacagcgtttgcacgacggcgagattgtatcgtttggcctcgatccatactgcatgatgctggagcgtg

SEQ ID NO: 350314 - DNA, 75 bp, synthetic construct
  source 1..75: mol_type = other DNA
cgaacaggtcattccgttccgtaccaaatctatcggcaacatgccgccagccaatcaggataatgacacgccgct

SEQ ID NO: 350315 - DNA, 75 bp, synthetic construct
  source 1..75: mol_type = other DNA
catctggcgattatcgtcaacctggaatatgacccgacgacagcgtttcgtaatcaggtagtacatttcgatttc

SEQ ID NO: 350316 - DNA, 75 bp, synthetic construct
  source 1..75: mol_type = other DNA
agtaatggtcatatcaatttatccatcatctctttaataaccagctcactcttaacattcacggttggattggaa

SEQ ID NO: 350317 - DNA, 75 bp, synthetic construct
  source 1..75: mol_type = other DNA
taattcttggagcagcggctattttttcatctctcataatctctggcaacatctcctttaaagatgaacatatta

SEQ ID NO: 350318 - DNA, 75 bp, synthetic construct
  source 1..75: mol_type = other DNA
ccgccagcccgcaggatatcggcgtgctgacgcgtaaactgtacgccgcgtttgaagcattaccgggtaaagtga

SEQ ID NO: 350319 - DNA, 75 bp, synthetic construct
  source 1..75: mol_type = other DNA
ccttgagatggaagtgttctaccagcaggacaacattttctacctgccggaagaggcgcgctggtcttttatcaa

SEQ ID NO: 350320 - DNA, 75 bp, synthetic construct
  source 1..75: mol_type = other DNA
ggaactgtgcgcttttataaagcggtaactgatggtacaggtaagccgattcctggctatccgattacgcactgg

SEQ ID NO: 350321 - DNA, 75 bp, synthetic construct
  source 1..75: mol_type = other DNA
ctcaattcaaaacagtcttgaccaggttaaactacgttctacacctagcgtatatgagtcaatgaggcgctttat

SEQ ID NO: 350322 - DNA, 75 bp, synthetic construct
  source 1..75: mol_type = other DNA
acttacttatcaaagtttggttgatgcgtcaaacctcgctaactttgttgtagaacgtgagtcttatgactggaa

SEQ ID NO: 350323 - DNA, 75 bp, synthetic construct
  source 1..75: mol_type = other DNA
gttcaaggtgctggcatagtgagaaaaccaggtagctatcggcctaacgtcgatataaaactacgccctttcagt

SEQ ID NO: 350324 - DNA, 75 bp, synthetic construct
  source 1..75: mol_type = other DNA
attgtcgaaggtcatcaggtcggtgtaatcgtaccggttgaagaactgttgcacgttcaggcacaaaaatggcaa

SEQ ID NO: 350325 - DNA, 75 bp, synthetic construct
  source 1..75: mol_type = other DNA
ctgcaaaaacagctcgatgttcctgttttgctctctaacgtattgattgcaaggttggcagcggaattactgatg

SEQ ID NO: 350326 - DNA, 75 bp, synthetic construct
  source 1..75: mol_type = other DNA
ctggtggtgctaatgaccttaccgcgcatactggtcgaactttcgccgtttatcgcgttattgggtgggattgtt

SEQ ID NO: 350327 - DNA, 75 bp, synthetic construct
  source 1..75: mol_type = other DNA
tgtttattgatgcgcgtaacctcggcaccatgattagccgcacaactaaagagttaacagcggaagatattgcca

SEQ ID NO: 350328 - DNA, 75 bp, synthetic construct
  source 1..75: mol_type = other DNA
ccttctttagcgaccagcacccggacctgaaagccgactacattctggcgaacccgccgttcaacctgaaagact

SEQ ID NO: 350329 - DNA, 75 bp, synthetic construct
  source 1..75: mol_type = other DNA
tggcagcgcgcgaggaaggggcaacagtcctcgaccatagcggtgcgccactggatgaaaaacagaaaatgggca

SEQ ID NO: 350330 - DNA, 75 bp, synthetic construct
  source 1..75: mol_type = other DNA
catatgctctccaagctgtcggctaacggtacagcaggttttgtgctggcaaacggttcgatgagttctaacacc

SEQ ID NO: 350331 - DNA, 75 bp, synthetic construct
  source 1..75: mol_type = other DNA
gatgttcgtgcagtcggtgaagtttgtcgagagccatcagggtaaaagtcgtgatatcgcgctgtatggtcagga

SEQ ID NO: 350332 - DNA, 75 bp, synthetic construct
  source 1..75: mol_type = other DNA
gacgagaatggctttaatatctacattctcgacgaaagcaaccgggttgaggtgtatcaccactgcgaaggcagc

SEQ ID NO: 350333 - DNA, 75 bp, synthetic construct
  source 1..75: mol_type = other DNA
ttgctaaccattgaaaatgggaaagtaatttactcaaaacatctgttggataatgaattcgttggctgcatggat

SEQ ID NO: 350334 - DNA, 75 bp, synthetic construct
  source 1..75: mol_type = other DNA
atgtggtttgaacgagtagccaaggagcgcaaggattatcaaaaaaaggaggttgtatggaagacgcgctttacg

SEQ ID NO: 350335 - DNA, 75 bp, synthetic construct
  source 1..75: mol_type = other DNA
aattcttgatatccctgaaattgatttttactccaaggatgtagatgtccatttacttaatggactatgtaaagg

SEQ ID NO: 350336 - DNA, 75 bp, synthetic construct
  source 1..75: mol_type = other DNA
atggaagaaaaacaacagaacataacacatgaaaaagtaagagtgttgctaaccattgaaaatgggaaagtaatt

SEQ ID NO: 350337 - DNA, 75 bp, synthetic construct
  source 1..75: mol_type = other DNA
aaccaataatattgcccgggcggcagaaaaaatccatatgacggcttcgccatttggtaaaagcattgccgcgct

SEQ ID NO: 350338 - DNA, 75 bp, synthetic construct
  source 1..75: mol_type = other DNA
agacggcccgccttacagcttatgtgctttctgccacgcctggcattcactgaatggttatgccgcagcacaggg

SEQ ID NO: 350339 - DNA, 75 bp, synthetic construct
  source 1..75: mol_type = other DNA
gattgtttatcaaggtgcgcgaacgcggagacctgctacctgatattaacgaatacgcaactaatatgtggtggt

SEQ ID NO: 350340 - DNA, 75 bp, synthetic construct
  source 1..75: mol_type = other DNA
cttacccgccatctaataaccgctattaccgacattcacgaggttttcactatatcagcaaggttgggaaagaat

SEQ ID NO: 350341 - DNA, 75 bp, synthetic construct
  source 1..75: mol_type = other DNA
cctctcctgatggtgtatcaggcgcctatgcctcattagttcatgggcaggtattactggccggaggagcaaact

SEQ ID NO: 350342 - DNA, 75 bp, synthetic construct
  source 1..75: mol_type = other DNA
aacctgtcccgtcgttttgcccaacgcggcttctcccctcgtgaattccgcctgacgatgactcgtggcgatatc

SEQ ID NO: 350343 - DNA, 75 bp, synthetic construct
  source 1..75: mol_type = other DNA
aggaattggaaaagataaaagtggagtcataaccttacaaaaagatgtctattcctatgatattgctaaagataa

SEQ ID NO: 350344 - DNA, 75 bp, synthetic construct
  source 1..75: mol_type = other DNA
attggtatcacattgatagcggacagctacgcacaaatgaactggccaggtgtcattttccgtccgctcaaacag

SEQ ID NO: 350345 - DNA, 75 bp, synthetic construct
  source 1..75: mol_type = other DNA
cgccatgttcatgacgatgaacttgtaggaactctttcaacattcctgtttattgcagaaaaggcaggatatgac

SEQ ID NO: 350346 - DNA, 75 bp, synthetic construct
  source 1..75: mol_type = other DNA
cctcccattaaaagaaattgcccgcgaatatttccctgctaactatagcgctcatggtcgcccgaacattaaaga

SEQ ID NO: 350347 - DNA, 75 bp, synthetic construct
  source 1..75: mol_type = other DNA
gagcataaccacgctaccgcgccgatgacgcgcgctccggcaccggaatatgttccggaagcaccgcgtcacagt

SEQ ID NO: 350348 - DNA, 75 bp, synthetic construct
  source 1..75: mol_type = other DNA
atgctgccgaagctgcatgaagaagcaatggcgctgccgtcagaagaagagtttgcggagcgtaaacgtccggaa

SEQ ID NO: 350349 - DNA, 75 bp, synthetic construct
  source 1..75: mol_type = other DNA
cgtactcgcgtgcagcaactggtttctgagtgtattgaactgcgtctttccagcacccgccaggaaaccgggcgt

SEQ ID NO: 350350 - DNA, 75 bp, synthetic construct
  source 1..75: mol_type = other DNA
cttcactattcgaatgtgcgaggtgaaagctggcaagaaatcactggccaaatttgtgtgcagctcgtggcgcaa

SEQ ID NO: 350351 - DNA, 75 bp, synthetic construct
  source 1..75: mol_type = other DNA
cattgagcgcgatgttttaaattgtcgggtaattattgcccgtagtttaggtgagcttgtggccatttgcgaaga

SEQ ID NO: 350352 - DNA, 75 bp, synthetic construct
  source 1..75: mol_type = other DNA
aacttgctgcaccgatcgtcgctgaagtcgcggcgaaagtggaaacggtagcccctgttgtccctgaggtagtcg

SEQ ID NO: 350353 - DNA, 75 bp, synthetic construct
  source 1..75: mol_type = other DNA
aggagagcaacgtcatcgttcgcgcattccgcgattacttacgccaggacatcggcgaaatccttatcgataacc

SEQ ID NO: 350354 - DNA, 75 bp, synthetic construct
  source 1..75: mol_type = other DNA
ccactaccagatcgagtcgcagatcgaatccgccttccagcgtgaagtccgtctgccgtccggtggttccattgt

SEQ ID NO: 350355 - DNA, 75 bp, synthetic construct
  source 1..75: mol_type = other DNA
aggaagaacgtgtacgtccggttcaaccacgtcgtaaacagcgtcaactgaaccaaaaagtgcgttacgagcaaa

SEQ ID NO: 350356 - DNA, 75 bp, synthetic construct
  source 1..75: mol_type = other DNA
atgctgccaaaactgcatgaagaagcgatggcattaccttctgaggaagaattccctgaacgtaaacgcccggaa

SEQ ID NO: 350357 - DNA, 75 bp, synthetic construct
  source 1..75: mol_type = other DNA
caggttgccgaaccgcaaccggaagtggttgaaacgacgcatcctgaagtgattgccgccgcggtaactgaacag

SEQ ID NO: 350358 - DNA, 75 bp, synthetic construct
  source 1..75: mol_type = other DNA
tatttctgcgggcgaccgcgtagtgacggacggcattgatcgcctgaccgaaggggcgaaagtggaagtggtgga

SEQ ID NO: 350359 - DNA, 75 bp, synthetic construct
  source 1..75: mol_type = other DNA
gggtaatcgtaatcgtggtggttatcgccgccatcgccgcattctggttctggcaaggccgcaatgactcccaga

SEQ ID NO: 350360 - DNA, 75 bp, synthetic construct
  source 1..75: mol_type = other DNA
ctgagtgcatcgcgccgactggcatattttatcgtgtcatatattgccgggatcctttgctctgggttggttggc

SEQ ID NO: 350361 - DNA, 75 bp, synthetic construct
  source 1..75: mol_type = other DNA
caccattaaggctgatgaagcaagcgttgccagcgcacagctgcaactcgactggagccggattaccgcaccagt

SEQ ID NO: 350362 - DNA, 75 bp, synthetic construct
  source 1..75: mol_type = other DNA
aaggggcgaaagtggaagtggtggaagcccagagcgccaccgcaccggaagagaaagccaccagccgcgaatacg

SEQ ID NO: 350363 - DNA, 75 bp, synthetic construct
  source 1..75: mol_type = other DNA
ttccagtggcgataccaccgggattgtggtgatcacccagacgcatcctatcgatctggtctttactctgccgga

SEQ ID NO: 350364 - DNA, 75 bp, synthetic construct
  source 1..75: mol_type = other DNA
ataaaacagtacatgcaaaaatcaacaactatatatgttcattctgtttataatttattaaaggttataacgctc

SEQ ID NO: 350365 - DNA, 75 bp, synthetic construct
  source 1..75: mol_type = other DNA
cggcctgatgccggaaataggcgcgtgggtgctgggcgaggcctgtcgccagatgcacaagtggcaaggaccggc

SEQ ID NO: 350366 - DNA, 75 bp, synthetic construct
  source 1..75: mol_type = other DNA
ctgctggcgattgaagaggcggatgtggtgctgtttatggtggatgcacgcgcgggtctgatgccagcggatgaa

SEQ ID NO: 350367 - DNA, 75 bp, synthetic construct
  source 1..75: mol_type = other DNA
gcttagccggtggcgctctgacgggtgccagtatctatggcctgcttacaggcaccgattatggtgtggtatttg

SEQ ID NO: 350368 - DNA, 75 bp, synthetic construct
  source 1..75: mol_type = other DNA
attgattggcaacggttaccacaacgaacaaaaagagcgtcaggccattgagcaactgatccgccatcgctgtgc

SEQ ID NO: 350369 - DNA, 75 bp, synthetic construct
  source 1..75: mol_type = other DNA
gaactggctttggcgctggcggataatcgccctctcccggaaatcactaatgtctttagtccgacgctggtacgt

SEQ ID NO: 350370 - DNA, 75 bp, synthetic construct
  source 1..75: mol_type = other DNA
ggcagttggctaaagataaagccacgctcgctaatgcacgtcgtgatttagcccgctatcagcaactggtcaaaa

SEQ ID NO: 350371 - DNA, 75 bp, synthetic construct
  source 1..75: mol_type = other DNA
tgccatgtttatcgctatggtcgtggcgttcgtgctgttcggcaccgcacgcggtcacgatatgcaatgggtaat

SEQ ID NO: 350372 - DNA, 75 bp, synthetic construct
  source 1..75: mol_type = other DNA
cttgccggtgccgcaggcgcagccaccggagagatggtggggatgatagccacacagatgtacggtaagccggtg

SEQ ID NO: 350373 - DNA, 75 bp, synthetic construct
  source 1..75: mol_type = other DNA
ggtactgaatttgaagtttaagatcaactcgatggtggctttgctggtagcggcgttgtccgtcgggatgcttgc

SEQ ID NO: 350374 - DNA, 75 bp, synthetic construct
  source 1..75: mol_type = other DNA
acggcaatatctcgccctacatcatggcgtggctgatcaccgtactgattcgtctggcgaccggtcagggtgtgg

SEQ ID NO: 350375 - DNA, 75 bp, synthetic construct
  source 1..75: mol_type = other DNA
gttgccatggcaaacaagctggcgcgaacggtgtgggcaatagccgctcatggacgtaaatatgacaagaaccac

SEQ ID NO: 350376 - DNA, 75 bp, synthetic construct
  source 1..75: mol_type = other DNA
catcaaggacatccgtgcgacgtttgagaagcttcagacagagatgaactcgatcgcgcagcggattgatgatgt

SEQ ID NO: 350377 - DNA, 75 bp, synthetic construct
  source 1..75: mol_type = other DNA
atgaactggattggttctcggtggtggaaattcgacttccataatcacactccggcatcggacgattatggaaaa

SEQ ID NO: 350378 - DNA, 75 bp, synthetic construct
  source 1..75: mol_type = other DNA
tcagatttaatgaaggatgttcaaaagcaatcacatgaagatggtgttatcttcacagaaacactagtcaaatat

SEQ ID NO: 350379 - DNA, 75 bp, synthetic construct
  source 1..75: mol_type = other DNA
gatcaacaaactgcacaaagcacactacgttctgatgaacgttgaagctccgcaggaagtgatcgatgagctgga

SEQ ID NO: 350380 - DNA, 75 bp, synthetic construct
  source 1..75: mol_type = other DNA
acgatggttacgcagggctatgagtatcatcgtgatgacgatatggcgttatggagctctgcggatctgacttat

SEQ ID NO: 350381 - DNA, 75 bp, synthetic construct
  source 1..75: mol_type = other DNA
atgcccacgctggtggttataacccgccgattgtggtgattcatggtaaccaggtgaaagacctgcctgattcct

SEQ ID NO: 350382 - DNA, 75 bp, synthetic construct
  source 1..75: mol_type = other DNA
ggcgagccggagacggttgccttccccgccgtaaacaagcctgttaatgctgctcatgcccggcacaccacagac

SEQ ID NO: 350383 - DNA, 75 bp, synthetic construct
  source 1..75: mol_type = other DNA
caggagtgtgtggcctgccggagcttttcaccggcggcccgggtgagggggaagcacctgcactgacagatgaag

SEQ ID NO: 350384 - DNA, 75 bp, synthetic construct
  source 1..75: mol_type = other DNA
taatacacgttatcagatcctgtcagaactgtggcaggaaaccggagaagaccggtttttccgcgtccatgtgtt

SEQ ID NO: 350385 - DNA, 75 bp, synthetic construct
  source 1..75: mol_type = other DNA
gcaacggcggcggcgatcctcgggacgattgcggtagtggtactggtacgctttggtcggtttcgcggatcaaat

SEQ ID NO: 350386 - DNA, 75 bp, synthetic construct
  source 1..75: mol_type = other DNA
ggctttgcctttatgatcaccgcgccgctagtcatgccggatgtgatcactggcctgtcgctgttgttattgttc

SEQ ID NO: 350387 - DNA, 75 bp, synthetic construct
  source 1..75: mol_type = other DNA
atgaataatttaccggtcgttcgttcgccctggcgaatggtgattttgttgctgggcttcacctttctctatgcg

SEQ ID NO: 350388 - DNA, 75 bp, synthetic construct
  source 1..75: mol_type = other DNA
cggatgcggaatttgaccgtgtgttcggggaaagctgccggaagtttaattcgccggaactgtggtcactggaga

SEQ ID NO: 350389 - DNA, 75 bp, synthetic construct
  source 1..75: mol_type = other DNA
cgtatctggggacagtttgcggtggcaacagagaacgggggggattttgaccgcgtgtttggtgaatgctgcagc

SEQ ID NO: 350390 - DNA, 75 bp, synthetic construct
  source 1..75: mol_type = other DNA
gatgcgatctggtctgttccgggttatcaggatgatatcgaacatctgcagaatatggccttcatcatggcgtgg

SEQ ID NO: 350391 - DNA, 75 bp, synthetic construct
  source 1..75: mol_type = other DNA
gcgacacaacgtaatttgctgatgttgaatcgtgcttcagccgaggaaattcaggatcatcagtgtgagattttg

SEQ ID NO: 350392 - DNA, 75 bp, synthetic construct
  source 1..75: mol_type = other DNA
gtgaccgggttttttatttgtcacgattttgcgttacccttgcatctctttgaggtacagggaaaaaaagatgaa

SEQ ID NO: 350393 - DNA, 75 bp, synthetic construct
  source 1..75: mol_type = other DNA
tccgtgacagtggcacagtgctgtcaggtgcaccggtatcccgtacccggtctgaggcaccggagcgtctgccgg

SEQ ID NO: 350394 - DNA, 75 bp, synthetic construct
  source 1..75: mol_type = other DNA
tttatcgcctggtatttaatggcgcgcgcagaaaagcagcggatacgcgatatccagcgtgcaagacgtggctga

SEQ ID NO: 350395 - DNA, 75 bp, synthetic construct
  source 1..75: mol_type = other DNA
cttcgttattattttcctcagcatcatcgtgcgttatttcttcgcttccggtagtgcctatatcgttgctatgtt

SEQ ID NO: 350396 - DNA, 75 bp, synthetic construct
  source 1..75: mol_type = other DNA
aaccaccagctatatgttctttaccgcaatggcggggaacattctggcgctgaaaatgatcaacgacattctgca

SEQ ID NO: 350397 - DNA, 75 bp, synthetic construct
  source 1..75: mol_type = other DNA
ttgatggtcacggtaacgttgctttcttcgttattattttcctcagcattatcgtgcgttatttcttcgcttccg

SEQ ID NO: 350398 - DNA, 75 bp, synthetic construct
  source 1..75: mol_type = other DNA
gagtatgtactcattgacacagcaggtgtgcgtaagcgcggcaaaattactgatgcggtagagaagttctcggta

SEQ ID NO: 350399 - DNA, 75 bp, synthetic construct
  source 1..75: mol_type = other DNA
aaggggaaaacccgtatgcgaacaagcgtaacaccctgacgccaacccagatgcgtaaacgtaagcgtctgatga

SEQ ID NO: 350400 - DNA, 75 bp, synthetic construct
  source 1..75: mol_type = other DNA
cgaaggcgtggaaacatcggcgagtcttgatttgttgcgacaagcggactgcgacacaggacaaggcttcctgtt

SEQ ID NO: 350401 - DNA, 75 bp, synthetic construct
  source 1..75: mol_type = other DNA
agttaaaagaacaaaatcccggaaagtacgcgcgtgacatcgcaggtttaatgaatattagcgaagcagaactgg

SEQ ID NO: 350402 - DNA, 75 bp, synthetic construct
  source 1..75: mol_type = other DNA
ctatcgcggcggtggtgctggtgcgctttggcaggtttcgcggatcaaatggctttgcctttatgatcaccgcgc

SEQ ID NO: 350403 - DNA, 75 bp, synthetic construct
  source 1..75: mol_type = other DNA
catctggctggcgcatgtcactttctgtacggcttatgtggcagtcgttatttcgtcgcgtctgcgggaactgga

SEQ ID NO: 350404 - DNA, 75 bp, synthetic construct
  source 1..75: mol_type = other DNA
tggcgaccatgctgctgctgggtatcgttacctgggaagacgtggttaaaaataaaggcggctggaataccttaa

SEQ ID NO: 350405 - DNA, 75 bp, synthetic construct
  source 1..75: mol_type = other DNA
tggtcactccgctggtgatttacaccatgtatccgccagaaattaagaaagtggataacaaaaccatcgccaaag

SEQ ID NO: 350406 - DNA, 75 bp, synthetic construct
  source 1..75: mol_type = other DNA
gcgtactgaaggggaacaggaacaagcgcagtggcgtaaacagattgcagcgctgacgcaggaagatgttgcggc

SEQ ID NO: 350407 - DNA, 75 bp, synthetic construct
  source 1..75: mol_type = other DNA
ctggcttcatccgtgacgtccatgcctgcttacaccagtaaggctttagttatcgataccagtccgatagaaaaa

SEQ ID NO: 350408 - DNA, 75 bp, synthetic construct
  source 1..75: mol_type = other DNA
tgcactcaataaagctaaaaataatctggcaaatattgtgcgacaaacgaataaactatatttacaggataaaca

SEQ ID NO: 350409 - DNA, 75 bp, synthetic construct
  source 1..75: mol_type = other DNA
caccattaaaccgtcagccacaagtcattgaagctgcagatgcaaccaaagaagcctggttggcgcttaaacgta

SEQ ID NO: 350410 - DNA, 75 bp, synthetic construct
  source 1..75: mol_type = other DNA
tactgattgcaaaaaatggagatgttaaaaaaattaatgattggggggcggttaagtttgctattactgatattt

SEQ ID NO: 350411 - DNA, 75 bp, synthetic construct
  source 1..75: mol_type = other DNA
tttgttacacatggtgaaagccataaacttgcttctgtaaaaccgattataaaaatttatgattacgtagtcact

SEQ ID NO: 350412 - DNA, 75 bp, synthetic construct
  source 1..75: mol_type = other DNA
ccctcaacgctgattgcccgctatggcacgttaccggtcgtcggctggagtatgctcattggcggtctgatcctg

SEQ ID NO: 350413 - DNA, 75 bp, synthetic construct
  source 1..75: mol_type = other DNA
agcaaaaccagtacggcgatccaactcacctgcaatgcgctaaaaaacgctctctcaattccgctcactcctgaa

SEQ ID NO: 350414 - DNA, 75 bp, synthetic construct
  source 1..75: mol_type = other DNA
tcaggactatgttcacgctcacggtattggtttgcaggcactcggacaactggggtatacactgctgacagatta

SEQ ID NO: 350415 - DNA, 75 bp, synthetic construct
  source 1..75: mol_type = other DNA
tcacctgcaatgcgctaaaaaacgcactctcaattcctctcactcctgaagaacaggagcttgaagctcaaatgg

SEQ ID NO: 350416 - DNA, 75 bp, synthetic construct
  source 1..75: mol_type = other DNA
agcgaagcagggggttatttcaaaagaaacgctggagcataccaaagatacgttaataagtagcaaagcggcatt

SEQ ID NO: 350417 - DNA, 75 bp, synthetic construct
  source 1..75: mol_type = other DNA
attgcgttttcaggtgcctatgcctattggtcaatggaattagaagacatgattagtacagatgacgcctatgtc

SEQ ID NO: 350418 - DNA, 75 bp, synthetic construct
  source 1..75: mol_type = other DNA
aattggcggtccaaaagccagcattttgagctgtgcagaaccattaagtagcgcgctgctctctttgctgttgct

SEQ ID NO: 350419 - DNA, 75 bp, synthetic construct
  source 1..75: mol_type = other DNA
atatgccagtaagtggcctgaacgccttcaaaaaggtggcggactggtcatgtgtggtaagcctggaactggaaa

SEQ ID NO: 350420 - DNA, 75 bp, synthetic construct
  source 1..75: mol_type = other DNA
ggtaaaaaccacctcgccctggcgatcgcccgttatgtcatcgagaaccaccagagcccggtaattttcaccacc

SEQ ID NO: 350421 - DNA, 75 bp, synthetic construct
  source 1..75: mol_type = other DNA
agcgcctgaagcagggtggtggcctggtgatgtgcggcaagccgggaaccggtaaaaaccacctcgccctggcga

SEQ ID NO: 350422 - DNA, 75 bp, synthetic construct
  source 1..75: mol_type = other DNA
atgaaacagataacctttgctccccgtaatcacctgctcaccaataccaataccaataccaatacaaataccaat

SEQ ID NO: 350423 - DNA, 75 bp, synthetic construct
  source 1..75: mol_type = other DNA
aatacaaggagttggcggatgctgcagagggacagactcttgatgctattttgtgttattcagttcctgatattt

SEQ ID NO: 350424 - DNA, 75 bp, synthetic construct
  source 1..75: mol_type = other DNA
gatcgccggcgtgcatcctgattaccgcctgaacagggcattcagtcctgatgatatggtcaaagatcccgccac

SEQ ID NO: 350425 - DNA, 75 bp, synthetic construct
  source 1..75: mol_type = other DNA
tactattgcaaatagtctgaaaccagagttacttgcggcagttatttcagttgaaggaggcaggccgggcgctgt

SEQ ID NO: 350426 - DNA, 75 bp, synthetic construct
  source 1..75: mol_type = other DNA
agataacctttgctccccgtaatcacctgctcaccaataccaatacctggacgcccgacagccagtggctggtat

SEQ ID NO: 350427 - DNA, 75 bp, synthetic construct
  source 1..75: mol_type = other DNA
ttcactaaacctgacctgctaattatcgatgaggttggtgtgcagtttggaagcgaggcggaaaagatgatcatg

SEQ ID NO: 350428 - DNA, 75 bp, synthetic construct
  source 1..75: mol_type = other DNA
gggccaattaagtttgcctcaagacctagcgaatgcccggaatgcatgagagatgagcttattcggctacaggca

SEQ ID NO: 350429 - DNA, 75 bp, synthetic construct
  source 1..75: mol_type = other DNA
atggcattacgatttccatcaccgtcgcggcgtgattgttgaaggcggcaagatgaacaatctcgatgcaatgga

SEQ ID NO: 350430 - DNA, 75 bp, synthetic construct
  source 1..75: mol_type = other DNA
gaggtcgaggttatctatcgcgcgtcacagggcgcgcacgtcggcgtggtgaccgttcatccaaagtcagagaaa

SEQ ID NO: 350431 - DNA, 75 bp, synthetic construct
  source 1..75: mol_type = other DNA
gcgtggtgcaattatggcttatctctccacaggggggcgaaccacgccagttgacgcataacaaaacagatattc

SEQ ID NO: 350432 - DNA, 75 bp, synthetic construct
  source 1..75: mol_type = other DNA
gttactcgtttccagctatacgtggcatacaggctggtcgccccttctacatcgccacatgcccaatgaggatta

SEQ ID NO: 350433 - DNA, 75 bp, synthetic construct
  source 1..75: mol_type = other DNA
caaatggacaggatgtgaatatgcgtggctatgaccatcgcggcgtgttgatccttgttgatggtgttcgtcagg

SEQ ID NO: 350434 - DNA, 75 bp, synthetic construct
  source 1..75: mol_type = other DNA
cagcccagtctctgagcggtttagtgcgttactacaacaacgacgcgcgtgaaccaaaaaatccgcagaccgttg

SEQ ID NO: 350435 - DNA, 75 bp, synthetic construct
  source 1..75: mol_type = other DNA
ttccgatcgctcacagtggcttctctgttggttgggtcggtacgtttgccgatcgctcaacacatatcagcagca

SEQ ID NO: 350436 - DNA, 75 bp, synthetic construct
  source 1..75: mol_type = other DNA
aaaatcaaactgctacttcagccactgatttgctgcgtcatgttcctggaattactcttgatggtaccggacgaa

SEQ ID NO: 350437 - DNA, 75 bp, synthetic construct
  source 1..75: mol_type = other DNA
aggcttctgacagcagtaatccgctggtcaatcgttcaacgattcaacgcgatgcgcaactttcttataaactcg

SEQ ID NO: 350438 - DNA, 75 bp, synthetic construct
  source 1..75: mol_type = other DNA
gatgcgcagctttcttataaactcgccccgcagggcaacgactggttaaatgcagatgcaaaaatttactggtcg

SEQ ID NO: 350439 - DNA, 75 bp, synthetic construct
  source 1..75: mol_type = other DNA
cacgatggttcagcagggctatgactatcgtcgtgatgacgatatggcgttatggagctctgcagatttgactta

SEQ ID NO: 350440 - DNA, 75 bp, synthetic construct
  source 1..75: mol_type = other DNA
gagtatcgtcgtgatgacgatatggcgttatggagttctgcagatctgacttattccattacatacgagatgtga

SEQ ID NO: 350441 - DNA, 75 bp, synthetic construct
  source 1..75: mol_type = other DNA
gagcttgatcagtggatggaaagccggatttatccggcgatgattgcgatcccggcactggctggactgattacc

SEQ ID NO: 350442 - DNA, 75 bp, synthetic construct
  source 1..75: mol_type = other DNA
atcgcggtttatctgacggatgcagagtataccggtgaagagctggatgcagatacctggcgggccacactgcat

SEQ ID NO: 350443 - DNA, 75 bp, synthetic construct
  source 1..75: mol_type = other DNA
atttaaagccagctactttgataccaaagcgaaggattacatctccacgaccgtcgatttcgcggcggcgacgac

SEQ ID NO: 350444 - DNA, 75 bp, synthetic construct
  source 1..75: mol_type = other DNA
tccgcgtattgacccataaaggcagtcgagccagcaaaaaacttaatgaattgggtttaagtaataaaaaaacgg

SEQ ID NO: 350445 - DNA, 75 bp, synthetic construct
  source 1..75: mol_type = other DNA
ggatttacccggcgatggcggagatccctgcactggcaggcatgattaccacgatggttacgcagggctatgagt

SEQ ID NO: 350446 - DNA, 75 bp, synthetic construct
  source 1..75: mol_type = other DNA
gtgagaagcgtaataagacgctgaaagatcacttccagtatctgttcctgccgatgtgtggtgcgctgaccgttg

SEQ ID NO: 350447 - DNA, 75 bp, synthetic construct
  source 1..75: mol_type = other DNA
ttcctggatatgaaggtttatatgccgtaacagaggatgggcgagtatattctcactcacgtgttgttaaggctg

SEQ ID NO: 350448 - DNA, 75 bp, synthetic construct
  source 1..75: mol_type = other DNA
ttttttgctctcaaccattaataaaatacgcaaacccaatgcttattttattgagtggtctgttactgtctatca

SEQ ID NO: 350449 - DNA, 75 bp, synthetic construct
  source 1..75: mol_type = other DNA
aagcacttcatgacactgttaaaatcattgcgaatgatatactaagtgagttacatagtggtaatgggggattaa

SEQ ID NO: 350450 - DNA, 75 bp, synthetic construct
  source 1..75: mol_type = other DNA
tgacgctgtttgatacatttggtatcgtttcaggcctcacggatggtcatgtgccgacagcctatgcgttcgcat

SEQ ID NO: 350451 - DNA, 75 bp, synthetic construct
  source 1..75: mol_type = other DNA
atatttaccggaagttcgtagtcgcttgttgttgctgttttcgcgtcaggatgccgccgtactggcaactgaacc

SEQ ID NO: 350452 - DNA, 75 bp, synthetic construct
  source 1..75: mol_type = other DNA
agagcaagcgttcgctttggctcccgattctggtattcattactctcgcggcctgcgccagcgcaggttacagct

SEQ ID NO: 350453 - DNA, 75 bp, synthetic construct
  source 1..75: mol_type = other DNA
acttcccggatatctctcgttttaaagatccggatgcgtcacagcctgaaaccataccgcctattcgttgctggt

SEQ ID NO: 350454 - DNA, 75 bp, synthetic construct
  source 1..75: mol_type = other DNA
agatcacttccagtatctgttcctgccgatgtgtggtgcgctgaccgttggtgcgctgtgggttaacctggaaga

SEQ ID NO: 350455 - DNA, 75 bp, synthetic construct
  source 1..75: mol_type = other DNA
aagctcaatggttctgggtctgatctgggctgctatcggtctgatttacctggcttgcgtcaccaagagtttccg

SEQ ID NO: 350456 - DNA, 75 bp, synthetic construct
  source 1..75: mol_type = other DNA
cagcttcacttcttctgatctgcctgggctacgggctgcatattttatttaccccttcacaaccgcttcgctttg

SEQ ID NO: 350457 - DNA, 75 bp, synthetic construct
  source 1..75: mol_type = other DNA
atgcaggatatacagcaggaaacactgaatgagtgtacaaaatcggagcaatccgcgctggtcgtgctctgggaa

SEQ ID NO: 350458 - DNA, 75 bp, synthetic construct
  source 1..75: mol_type = other DNA
aggccaacgcttaaagtctctaatctgtacggcatggtcaccgggatggcggaagatctgcagagtctggtcggc

SEQ ID NO: 350459 - DNA, 75 bp, synthetic construct
  source 1..75: mol_type = other DNA
ttcacgacccactctgacggtttctaacctggacggtatggtcaccggaatggcggaagatctgcagagtctggt

SEQ ID NO: 350460 - DNA, 75 bp, synthetic construct
  source 1..75: mol_type = other DNA
ttcacgacctaccctgacggtttctaacctggacggtatggtcaccggaatggcggaagatatgcagagtctggt

SEQ ID NO: 350461 - DNA, 75 bp, synthetic construct
  source 1..75: mol_type = other DNA
ttcacgaccaaccctgacggtttctaacctggacggtatggtcaccggaatggcggaagatttgcagagtctggt

SEQ ID NO: 350462 - DNA, 75 bp, synthetic construct
  source 1..75: mol_type = other DNA
gaatgaaaaaggggagccggtcacctggcaggggcgtgaatatcaggcgtacccgattgacggcagcggctttga

SEQ ID NO: 350463 - DNA, 75 bp, synthetic construct
  source 1..75: mol_type = other DNA
tatttatgctatagacataaatcgttataacctctccgcaatagtttcagtaataggactgttcaaaaaagagtc

SEQ ID NO: 350464 - DNA, 75 bp, synthetic construct
  source 1..75: mol_type = other DNA
atagacataaatcgttataatctctcagctatagtctcagtaataggactgttcaaaaaagagtctgttagttaa

SEQ ID NO: 350465 - DNA, 75 bp, synthetic construct
  source 1..75: mol_type = other DNA
gctgacagccatgacggcctcgtttgtgctggccacaccgaccgagacggaaggggcgctgtttcccggtcgaat

SEQ ID NO: 350466 - DNA, 75 bp, synthetic construct
  source 1..75: mol_type = other DNA
gctgacagccatgacggcctcgtttgtgctggctacaccgaccgagacggatggggcgctgtttcccggtcggat

SEQ ID NO: 350467 - DNA, 75 bp, synthetic construct
  source 1..75: mol_type = other DNA
gctgacagccatgacggcctcgtttgtgctggcaacaccgaccgagacggatggggcgctgtttcccggtcgtat

SEQ ID NO: 350468 - DNA, 75 bp, synthetic construct
  source 1..75: mol_type = other DNA
acccgattgaggggagtggctttgagatgaacgggaagggcagcagtgccagaccgtcgctgacggtgtccaacc

SEQ ID NO: 350469 - DNA, 75 bp, synthetic construct
  source 1..75: mol_type = other DNA
taccgcggagatgaatgcgggtataacggtcctgcggtggcggatgagttcgacaaccccaccacggatatccgt

SEQ ID NO: 350470 - DNA, 75 bp, synthetic construct
  source 1..75: mol_type = other DNA
gctgacagccatgacggcctcgtttgtgctggcgacaccgaccgagacggacggggcgctgtttcccggtcgcat

SEQ ID NO: 350471 - DNA, 75 bp, synthetic construct
  source 1..75: mol_type = other DNA
ggttaagtcagagcagtcaccgcgggtggtactctgggaaatcgacctgacggtgcagggcggtgagcggtattt

SEQ ID NO: 350472 - DNA, 75 bp, synthetic construct
  source 1..75: mol_type = other DNA
ttgttcggggcgcgtctgcgccccttttttatgggcggatatatgcaggatattcacgaagaaagcctgaacgag

SEQ ID NO: 350473 - DNA, 75 bp, synthetic construct
  source 1..75: mol_type = other DNA
agcggtattttttctgtaatgagctgaatgaaaaaggggagccggtgacctggcaggggcgtaagtatcaggcat

SEQ ID NO: 350474 - DNA, 75 bp, synthetic construct
  source 1..75: mol_type = other DNA
gctggcgcgtcgagcagtgcagcgaactgagcgcggtcagtgcctcctttgtgttgtccacaccgacggaaacgg

SEQ ID NO: 350475 - DNA, 75 bp, synthetic construct
  source 1..75: mol_type = other DNA
ccaggcgatccgggactgggtaaatcagttctgattaatacgttgtcggaaatacagatatcatctgctcagaaa

SEQ ID NO: 350476 - DNA, 75 bp, synthetic construct
  source 1..75: mol_type = other DNA
acgaaggacagatgcagcaagtgcatgcgcgggtgtgagatgcgcggcatggtggctaattttggcggtttcctt

SEQ ID NO: 350477 - DNA, 75 bp, synthetic construct
  source 1..75: mol_type = other DNA
tgcggcgggtcgtagccatattgaaggggcgagcaaacaaagtgattttgtccaggcgggttacagtatggtttt

SEQ ID NO: 350478 - DNA, 75 bp, synthetic construct
  source 1..75: mol_type = other DNA
ctgggatatcggggtttttcgtctcgatttcagtgtcccgcaggcctgggtggaagaactggaaagtggcggtga

SEQ ID NO: 350479 - DNA, 75 bp, synthetic construct
  source 1..75: mol_type = other DNA
ccgctgtgccggggatgcagaccaccgctgaggctgagcgggcctactggctgagccgtgaacaggcggcggtga

SEQ ID NO: 350480 - DNA, 75 bp, synthetic construct
  source 1..75: mol_type = other DNA
gaacgaaaaaggtgaaccagtcacctggcaggggtggcagtatcaggcctatcccattcagggaagtggatttga

SEQ ID NO: 350481 - DNA, 75 bp, synthetic construct
  source 1..75: mol_type = other DNA
gcttacaacaacccatcaggcaagctacgcaggccgacagcgaccaagacgaacaggagaatgccatcagaagcc

SEQ ID NO: 350482 - DNA, 75 bp, synthetic construct
  source 1..75: mol_type = other DNA
cggctggcggtggatatgaaatagcgaatacggcagcaggctcaaggattggaatgaatgaatcagggcagatat

SEQ ID NO: 350483 - DNA, 75 bp, synthetic construct
  source 1..75: mol_type = other DNA
ttattcgacagtaaactggctaagcgctggagcacgcaatatgcacgtatttctccccatcctttttacatcgct

SEQ ID NO: 350484 - DNA, 75 bp, synthetic construct
  source 1..75: mol_type = other DNA
atctgagtcagtattacagcgactataaagcgtcgggtaataacaagagtacatatgtacgttttaacagcgggt

SEQ ID NO: 350485 - DNA, 75 bp, synthetic construct
  source 1..75: mol_type = other DNA
atgggaaatttcatcatcaagatttactggtaaacgcgttgttgatactgatgcgctggctgggatgctacaaaa

SEQ ID NO: 350486 - DNA, 75 bp, synthetic construct
  source 1..75: mol_type = other DNA
aaaaatgtctggcgtggatggagtgtcgcctgctacctgcaacttccgcgcaagaaaaatacgatacgctatttg

SEQ ID NO: 350487 - DNA, 75 bp, synthetic construct
  source 1..75: mol_type = other DNA
cggcccttccgggaatgaagtccaccgctgaagccgagcgtgcgtactggctgagccgagaaaagtcatacgtga

SEQ ID NO: 350488 - DNA, 75 bp, synthetic construct
  source 1..75: mol_type = other DNA
tgtacggtatggtcaccgggatggcggaggacctgcagagtctggtgggggccacggtggtccgccgccgggtgt

SEQ ID NO: 350489 - DNA, 75 bp, synthetic construct
  source 1..75: mol_type = other DNA
atgcaggatatacagcaggaaacacagaatgagtgtacaaaatcggagcaatccgcgctggtcgagctctgggaa

SEQ ID NO: 350490 - DNA, 75 bp, synthetic construct
  source 1..75: mol_type = other DNA
cagcttcacttcttctgatctgcctgggttacgggctgcatattttatttcccccctcacagccgcttcgctttg

SEQ ID NO: 350491 - DNA, 75 bp, synthetic construct
  source 1..75: mol_type = other DNA
cacttgccgatttcattcaatatttaaaacagcaaccgccacgtggattacagggcctggtatggtttcggctac

SEQ ID NO: 350492 - DNA, 75 bp, synthetic construct
  source 1..75: mol_type = other DNA
atgccagattttttttcctttattaacagcgtcctctggggctcggtaatgatttacctgctcttcggcgcaggt

SEQ ID NO: 350493 - DNA, 75 bp, synthetic construct
  source 1..75: mol_type = other DNA
gtcgtactggtctgaaccgctacgcaagccgcatggaaacgatggggtcaaagattcgcgcttcacgcgagatgg

SEQ ID NO: 350494 - DNA, 75 bp, synthetic construct
  source 1..75: mol_type = other DNA
actcccggacagcatccgggagcagttgcatcagatgctgcgggaaaagcggcacacgcaggaagaaatccgcga

SEQ ID NO: 350495 - DNA, 75 bp, synthetic construct
  source 1..75: mol_type = other DNA
gttcatccccaaccgggtggcttaacctcttttcagtcactgtgcactagtcttgccgcgcgcgtcggcagcggt

SEQ ID NO: 350496 - DNA, 75 bp, synthetic construct
  source 1..75: mol_type = other DNA
cggcaagcgccatgctgatattactggcgggtaacggcacaacctacatgccgctggaaggtattcagcttatcc

SEQ ID NO: 350497 - DNA, 75 bp, synthetic construct
  source 1..75: mol_type = other DNA
cgattactaacggctttcagcgcagtatgttttccaatgaagcggggatgggttctacgccaaacgcggctgcgg

SEQ ID NO: 350498 - DNA, 75 bp, synthetic construct
  source 1..75: mol_type = other DNA
ttcccgtccgaccctgacggtttctaacctgtacggtatggtcaccgggatggcggaagagctgcagagtctggt

SEQ ID NO: 350499 - DNA, 75 bp, synthetic construct
  source 1..75: mol_type = other DNA
ttcccgaccgaccctgacggtttctaacctgaacggtatggtcaccgggatggcggaagagctgcagagtctggt

SEQ ID NO: 350500 - DNA, 75 bp, synthetic construct
  source 1..75: mol_type = other DNA
tttcgttgcgggcaatccggaagcggacccggagcaggagctgagcgaccgctgggtggtggagcagatgtcgga

SEQ ID NO: 350501 - DNA, 75 bp, synthetic construct
  source 1..75: mol_type = other DNA
agcggtattttttctgcaatgagctgaatgaaaaaggggagccggtgacctggcaggggcgggaatatcaggcat

SEQ ID NO: 350502 - DNA, 75 bp, synthetic construct
  source 1..75: mol_type = other DNA
gagtggacccgaccttatcagcaacagcgatcgcaccgcccatgatgagcttgtcagaagactggctgaacgggt

SEQ ID NO: 350503 - DNA, 75 bp, synthetic construct
  source 1..75: mol_type = other DNA
ttcccggccaaccctgacggtttctaacctgaacggtatggtcaccgggatggcggaagagctgcagagtctggt

SEQ ID NO: 350504 - DNA, 75 bp, synthetic construct
  source 1..75: mol_type = other DNA
gaacgaaaaaggtgaaccggttacctggcaggggcgaaagtatcaggcgtaccccattcagggaagcggctttga

SEQ ID NO: 350505 - DNA, 75 bp, synthetic construct
  source 1..75: mol_type = other DNA
acgcccgttttctggatgcggtgaattttgtggcgggcaatccggaagcggacccggagcaggagctgagcgacc

SEQ ID NO: 350506 - DNA, 75 bp, synthetic construct
  source 1..75: mol_type = other DNA
acacatcatgagacgacacgcctcactcagtcagcccaggtggtgctctgggaaatcgatctgacagaggtcggt

SEQ ID NO: 350507 - DNA, 75 bp, synthetic construct
  source 1..75: mol_type = other DNA
ttcccggccgaccctgacggtttctaacctggacggtatggtcaccgggatggcggaagagctgcagagtctggt

SEQ ID NO: 350508 - DNA, 75 bp, synthetic construct
  source 1..75: mol_type = other DNA
ttcccggcccaccctgacggtttctaacctgcacggtatggtcaccgggatggcggaagagctgcagagtctggt

SEQ ID NO: 350509 - DNA, 75 bp, synthetic construct
  source 1..75: mol_type = other DNA
tgttcgggctggttaccgggatggcggaggatttgcagagcctggtgggggccacggtggttcgtcgccgggtgt

SEQ ID NO: 350510 - DNA, 75 bp, synthetic construct
  source 1..75: mol_type = other DNA
gaacgaaaaaggtgaaccggtcacctggcaggggcggcagtatcaggcgtatcctgtcaaaggggcggggtttga

SEQ ID NO: 350511 - DNA, 75 bp, synthetic construct
  source 1..75: mol_type = other DNA
tatgaatcatgccaggttaccgatctgcaaattacaaatgctggcgtcatgctcgctacaaatcaggatttaccc

SEQ ID NO: 350512 - DNA, 75 bp, synthetic construct
  source 1..75: mol_type = other DNA
gcagcaatctgacaccgtggaatgggatgacgcgcaaggtacgctgaaagcctggcgtcggctgcaaatcggtca

SEQ ID NO: 350513 - DNA, 75 bp, synthetic construct
  source 1..75: mol_type = other DNA
gcatatgagcggcgtgcattcactacgcggcctgaaatcactcgacatttatcaggcactacgcggattacttga

SEQ ID NO: 350514 - DNA, 75 bp, synthetic construct
  source 1..75: mol_type = other DNA
acatatgaccggcgtacattcactacgcggcctgaaatcactcgacatttatcaggcactacgcggattacttga

SEQ ID NO: 350515 - DNA, 75 bp, synthetic construct
  source 1..75: mol_type = other DNA
gtttgctgatggaattactgcaatggggatgcagcgatccggcgcagatgaactggttggatcaaccaccaacgg

SEQ ID NO: 350516 - DNA, 75 bp, synthetic construct
  source 1..75: mol_type = other DNA
tttgggggccttctggaaaggggcgtatcgtgaggtgcaaaaggagatgaaagggcgttatcccaaacacgtctg

SEQ ID NO: 350517 - DNA, 75 bp, synthetic construct
  source 1..75: mol_type = other DNA
ctggatagtgaattgcctgcgcattacactgtgccgacgggaagccggatcgccattcgttatcatgaagataac

SEQ ID NO: 350518 - DNA, 75 bp, synthetic construct
  source 1..75: mol_type = other DNA
gctggcggagctgcttaacgaaaagccaggcgataccgttggctaccggatgcgtgcgcaaaactgcgtcgggcc

SEQ ID NO: 350519 - DNA, 75 bp, synthetic construct
  source 1..75: mol_type = other DNA
tttttatgggcggatatatgcaggatattcacgaagaaagcctgaacgagtcggttaagtcagagcagtcaccgc

SEQ ID NO: 350520 - DNA, 75 bp, synthetic construct
  source 1..75: mol_type = other DNA
atctttacctgtgcaaagttaacccaaacaagaaaaacttcccgaaacttgaggcgttactccctaccttcaagc

SEQ ID NO: 350521 - DNA, 75 bp, synthetic construct
  source 1..75: mol_type = other DNA
attatccttctggagccgcgtcgtctggcggcgcgtaacgttgcgcaacgactggcggagctgcttaacgaaaag

SEQ ID NO: 350522 - DNA, 75 bp, synthetic construct
  source 1..75: mol_type = other DNA
gggatgcagcgatccggcgcagatgagctggctggatcaaccgccagtagtgaatctactggccgcgaaacgcct

SEQ ID NO: 350523 - DNA, 75 bp, synthetic construct
  source 1..75: mol_type = other DNA
gaaaccagtttaaccatcgaaggtattcgtctggtggtggattgtgcccaggaaagggtggcgcgttttgatccg

SEQ ID NO: 350524 - DNA, 75 bp, synthetic construct
  source 1..75: mol_type = other DNA
gtttgcgtttgctgtgtgctgcgaagtggctaccggaatatgactggccagcggttgatgaggcaaatttgctgg

SEQ ID NO: 350525 - DNA, 75 bp, synthetic construct
  source 1..75: mol_type = other DNA
gatttttacgattagtagatcaggcgcgacagcaaaaatttgaagtggctatttatgaatcatgccaggttaccg

SEQ ID NO: 350526 - DNA, 75 bp, synthetic construct
  source 1..75: mol_type = other DNA
actcgtttgacgtttttattgatgcccgcgggcagcgtccgcttaaagtgaaagatattcctttccctggactac

SEQ ID NO: 350527 - DNA, 75 bp, synthetic construct
  source 1..75: mol_type = other DNA
acggggcgctgtttcccggtcgtatcatgctggcgaacacctgtatgtgggattaccggggagatgaatgcgggt

SEQ ID NO: 350528 - DNA, 75 bp, synthetic construct
  source 1..75: mol_type = other DNA
gcgaacaattacagaaaacaggggatgaaatccctgatgttggcgaagattatacgctacagcaacccgaagaaa

SEQ ID NO: 350529 - DNA, 75 bp, synthetic construct
  source 1..75: mol_type = other DNA
gtgcagaaattggcgaggctatggcgcaggccattgtaaaacctgcatcccgtgcacgtcggcgtctttcggttg

SEQ ID NO: 350530 - DNA, 75 bp, synthetic construct
  source 1..75: mol_type = other DNA
aaaatctgcacattacgttgatgtcgcgcacgggcattttaccggaagccgatttctattgccccatcccctacg

SEQ ID NO: 350531 - DNA, 75 bp, synthetic construct
  source 1..75: mol_type = other DNA
gatcctgagcaggaggtgatcagccgctggcgcattgagcagtgcagcgaactgagctcggtcagcgcgagcttt

SEQ ID NO: 350532 - DNA, 75 bp, synthetic construct
  source 1..75: mol_type = other DNA
gtggaatactgacgcgctggcgacagtttggtaaacgctacttctggccgcatctcttattagggatggtcgcgg

SEQ ID NO: 350533 - DNA, 75 bp, synthetic construct
  source 1..75: mol_type = other DNA
tgtccttgacgtcatagccgactggccgataaaccgggtcggcgaattgctcccttggcgcgtagcactgccgac

SEQ ID NO: 350534 - DNA, 75 bp, synthetic construct
  source 1..75: mol_type = other DNA
atgtcatggttaaatgcccccagccgttgcctgaccttccagggcggcgtacctaagcagctcatccccgataac

SEQ ID NO: 350535 - DNA, 75 bp, synthetic construct
  source 1..75: mol_type = other DNA
cacgggacatggacaccggaacgccttatcgggcagggaaaacgtacaggcccgtccactggccgggtggttgaa

SEQ ID NO: 350536 - DNA, 75 bp, synthetic construct
  source 1..75: mol_type = other DNA
atgcctgacatgctgtacttcgatacggaaatgagaaaaccgggcgtgacgcgccagctgttgtggatggaatac

SEQ ID NO: 350537 - DNA, 75 bp, synthetic construct
  source 1..75: mol_type = other DNA
tggttcgcttacagcccggacagaaaaggcatccatccgcagactcatcttgcttgcttcagcggtgtgctgcaa

SEQ ID NO: 350538 - DNA, 75 bp, synthetic construct
  source 1..75: mol_type = other DNA
aactcattttcccgcccaaagacacctctgcgtcagagcttgttatgcctgacatgctgtacttcgatacggaaa

SEQ ID NO: 350539 - DNA, 75 bp, synthetic construct
  source 1..75: mol_type = other DNA
catccgcgcagcacacatgaatataaacacacaaccaatccgcttcacatgccagagcgccaccggcggcacggg

SEQ ID NO: 350540 - DNA, 75 bp, synthetic construct
  source 1..75: mol_type = other DNA
ttccggtccgcctgtcgggtgaagactccggtcgcggtaccttcttccatcgccatgcggtgatccacaaccagt

SEQ ID NO: 350541 - DNA, 75 bp, synthetic construct
  source 1..75: mol_type = other DNA
ttcgccatgtgcttgatgttatagctgactggccgataaaccgggtcagcgaactactcccctggcgcgtagcac

SEQ ID NO: 350542 - DNA, 75 bp, synthetic construct
  source 1..75: mol_type = other DNA
tcacaagtggcggcatttcctcgtgtgcgtgaggcgctgttgcgtcgacagcgcgcattccgtgagttacccgga

SEQ ID NO: 350543 - DNA, 75 bp, synthetic construct
  source 1..75: mol_type = other DNA
gacatgttgtacttcgatacggaaatgagaaaaccaggtgtgacgcggcaactgttgtggatggaatacaaggca

SEQ ID NO: 350544 - DNA, 75 bp, synthetic construct
  source 1..75: mol_type = other DNA
acgaaaagcgactgttgcctgcggcgccgtgctgcccgaactgcggcggttcactgagctatctggcgaggatac

SEQ ID NO: 350545 - DNA, 75 bp, synthetic construct
  source 1..75: mol_type = other DNA
cgtctgaacggtatcgatccggaagcgtatctgcgccatatcctgagcgtactgccggaatggccttccaaccga

SEQ ID NO: 350546 - DNA, 75 bp, synthetic construct
  source 1..75: mol_type = other DNA
gcatgaatggatggtggagaagaatggtacgctgtcgaaaaaatccagactgggcgaagcgttcagctatgtact

SEQ ID NO: 350547 - DNA, 75 bp, synthetic construct
  source 1..75: mol_type = other DNA
cttgacgtcattgctgactggccggtaaaccgggtaggtgaactgctgccgtggcggatcacactgcctgccgaa

SEQ ID NO: 350548 - DNA, 75 bp, synthetic construct
  source 1..75: mol_type = other DNA
acaaacccgctactggtttaacccggcggcgattagccagcacttcattatccccggtgcggtgaccattatcat

SEQ ID NO: 350549 - DNA, 75 bp, synthetic construct
  source 1..75: mol_type = other DNA
cctgaacaatggtgagtcactagccgtccgggagttatctgaggaatttaacgtttgcgaaaaaactatccgtcg

SEQ ID NO: 350550 - DNA, 75 bp, synthetic construct
  source 1..75: mol_type = other DNA
tacaaagctgtgaaggttggccctgactaccacgttgaatatgcccgtcactggtactccgttccacacgaactg

SEQ ID NO: 350551 - DNA, 75 bp, synthetic construct
  source 1..75: mol_type = other DNA
tccgaacgatccgaaagtcatcgagcaggcgattaaagacggtattccgctgagcgttattgaagccgcacagca

SEQ ID NO: 350552 - DNA, 75 bp, synthetic construct
  source 1..75: mol_type = other DNA
tgctggcgatgcgtcattacaaacgtgctgaaaccgttgacggtaaagtcgatacccgtgcgctggaagaggtcg

SEQ ID NO: 350553 - DNA, 75 bp, synthetic construct
  source 1..75: mol_type = other DNA
cagtcagaaatatacagccggcaaggtgtggagctgagccgttcactgctgtcgggctgggtggatgcatgctgc

SEQ ID NO: 350554 - DNA, 75 bp, synthetic construct
  source 1..75: mol_type = other DNA
ttcgcgtacgcacttaaccagtggccggcactgacgtactatgcgaacgatggctgggtggaaatcgacaacaac

SEQ ID NO: 350555 - DNA, 75 bp, synthetic construct
  source 1..75: mol_type = other DNA
gaagaagccctagagcagatcggtcagttgtacgccatagaggcggatataaggggaatgccggcagagcagcgg

SEQ ID NO: 350556 - DNA, 75 bp, synthetic construct
  source 1..75: mol_type = other DNA
ccagcaccgagaacgagaaagatctctaccagcgtcagctggaggtgttcctcgatccgaacgatccgaaagtca

SEQ ID NO: 350557 - DNA, 75 bp, synthetic construct
  source 1..75: mol_type = other DNA
cgaactgaccgccgctgaaggccttgaacgttacctcggcgcaaaattccctggcgcaaaacgcttctcgctgga

SEQ ID NO: 350558 - DNA, 75 bp, synthetic construct
  source 1..75: mol_type = other DNA
ccgaagaaacgcgttccggcgaatccggaaaaagtgctgaagctgactggcgcacgcggcaacaacctgaaagac

SEQ ID NO: 350559 - DNA, 75 bp, synthetic construct
  source 1..75: mol_type = other DNA
gagcggtaaacgcaagattgaagtgccgaagaaacgcgttccggcgaatccggaaaaagtgctgaagctgacggg

SEQ ID NO: 350560 - DNA, 75 bp, synthetic construct
  source 1..75: mol_type = other DNA
cataaactgcgcgatcagggcaacaccattgtggtgattgagcacaatctcgacgtgattaaaaccgctgactgg

SEQ ID NO: 350561 - DNA, 75 bp, synthetic construct
  source 1..75: mol_type = other DNA
ccggcgacctataccggcgtgtttacacctgtacgcgaactgttcgcaggcgtaccagaatcccgtgcgcgtggt

SEQ ID NO: 350562 - DNA, 75 bp, synthetic construct
  source 1..75: mol_type = other DNA
tatacgccaggacgtttcagctttaacgtccgtggcggacgctgcgaagcctgtcagggcgacggtgtgatcaaa

SEQ ID NO: 350563 - DNA, 75 bp, synthetic construct
  source 1..75: mol_type = other DNA
gtttgaaaccgcgctggagctttccggtggtacagcggtagtggcggatatggacgacccgaaagcggaagagct

SEQ ID NO: 350564 - DNA, 75 bp, synthetic construct
  source 1..75: mol_type = other DNA
ccgctggaagcgattatggcggtgccggagtcgttgaccgggcagtacatgagcggtaaacgcaagattgaagtg

SEQ ID NO: 350565 - DNA, 75 bp, synthetic construct
  source 1..75: mol_type = other DNA
gcaggcgcggatgtgatgcgtcaggacactaatatgctgtttgttcgcgtcggggaagaaaatgctgccgcgtta

SEQ ID NO: 350566 - DNA, 75 bp, synthetic construct
  source 1..75: mol_type = other DNA
gtgacgcatcttgacgtctcgcgcgaacaactggcggaagtcgccgcccactggcgcgcattcctggcgcgttaa

SEQ ID NO: 350567 - DNA, 75 bp, synthetic construct
  source 1..75: mol_type = other DNA
gagctttccggcggtacggcggtcgtcgccgatatggacgacgaaaaggcagaagagttactgttctccgcgaac

SEQ ID NO: 350568 - DNA, 75 bp, synthetic construct
  source 1..75: mol_type = other DNA
gagctttccggtggtaccgcggtagttgcggatatggacgacccgaaagcggaagagttgctgttctccgctaat

SEQ ID NO: 350569 - DNA, 75 bp, synthetic construct
  source 1..75: mol_type = other DNA
cataaactgcgcgatcagggcaataccattgtggtgattgagcacaatctcgacgtgatcaaaaccgctgactgg

SEQ ID NO: 350570 - DNA, 75 bp, synthetic construct
  source 1..75: mol_type = other DNA
atcagcaatcgtccgtgcgccagttgtgaagggacgcgtttgcgccgtgaagcgcgccatgtttatgtcgaaaat

SEQ ID NO: 350571 - DNA, 75 bp, synthetic construct
  source 1..75: mol_type = other DNA
cgagctgtatcgcaatggtgggataacggaagctgcctgctgggctcatgcccgccgaaagatccacgatgtgca

SEQ ID NO: 350572 - DNA, 75 bp, synthetic construct
  source 1..75: mol_type = other DNA
gtacgggaaaaacatgcctgtactcagtgcgatgtcatcgtgcaggcacctgcaccttcgcggcccatcgagcgg

SEQ ID NO: 350573 - DNA, 75 bp, synthetic construct
  source 1..75: mol_type = other DNA
gaccgggcggttgtgggcgtatgttcgtgatgaccgcaatgccgggtcagcgttggcacctgcagtgtggttcgc

SEQ ID NO: 350574 - DNA, 75 bp, synthetic construct
  source 1..75: mol_type = other DNA
ctggggcggtgcggaaaacctcgcttacgccacgctggttgatgaaggcattccggttcgcctgtcgggtgaaga

SEQ ID NO: 350575 - DNA, 75 bp, synthetic construct
  source 1..75: mol_type = other DNA
ggcgcaaaacgcttctcgctggaaggcggtgacgcgttaatcccgatgcttaaagagatgatccgccacgctggc

SEQ ID NO: 350576 - DNA, 75 bp, synthetic construct
  source 1..75: mol_type = other DNA
gcaaaatctacgctgacaagctggagcaggaaaaagtggcgacgctggaagatgccaccgagatggttaacctgt

SEQ ID NO: 350577 - DNA, 75 bp, synthetic construct
  source 1..75: mol_type = other DNA
ttgctgacaacgtgcgcgttgttcatgccggatgcggcgtgaacgccttatccggtctaccgatcctgcaccaat

SEQ ID NO: 350578 - DNA, 75 bp, synthetic construct
  source 1..75: mol_type = other DNA
ttcatggctatgtgctgactgacggtaagctccatgctgatgacacgcctgtcccggtgctgttgccaggcaata

SEQ ID NO: 350579 - DNA, 75 bp, synthetic construct
  source 1..75: mol_type = other DNA
acgtccgtggtgggcgctgcgaagcctgtcagggcgatggtgtaatcaaagtggaaatgcacttcctgccggata

SEQ ID NO: 350580 - DNA, 75 bp, synthetic construct
  source 1..75: mol_type = other DNA
tcagcactgacggaagaagccctggagcagatcggtcagttgtacgccatagaggcggatataaggggaatgccg

SEQ ID NO: 350581 - DNA, 75 bp, synthetic construct
  source 1..75: mol_type = other DNA
ggtatcgccggaccggggctgctggcccacgtgctgacctcgaagtatgcagagcacaccccgctgtatcgccag

SEQ ID NO: 350582 - DNA, 75 bp, synthetic construct
  source 1..75: mol_type = other DNA
acggaagccgcctgttgggctcacgcccgccgtaaaatccacgatgtgcacgttcgcacccccgtcagccctgac

SEQ ID NO: 350583 - DNA, 75 bp, synthetic construct
  source 1..75: mol_type = other DNA
ccagggcgtggagctgagccgcgccacgctggggcgctggacaggtgccgttgctgaactgctggagccgctgta

SEQ ID NO: 350584 - DNA, 75 bp, synthetic construct
  source 1..75: mol_type = other DNA
gcaactggataaactccgccggatgaacttcggcagtcgttccgaaaaagtctcccgccgtatcgcacaaatgga

SEQ ID NO: 350585 - DNA, 75 bp, synthetic construct
  source 1..75: mol_type = other DNA
cgccctctctcagctccttccttccccgacacactgcccggtacggaatacggcgctgacagcggtatccgtctt

SEQ ID NO: 350586 - DNA, 75 bp, synthetic construct
  source 1..75: mol_type = other DNA
ttatccggactgtacgtgaaaagcatgcctgtactcagtgcgatgccatcgtgcaggcccccgcgccttcacggc

SEQ ID NO: 350587 - DNA, 75 bp, synthetic construct
  source 1..75: mol_type = other DNA
aatgtggaggctcgctgagctatctgggtgaggatgccgccgaacagctggagctgatgcgcagcgccttccggg

SEQ ID NO: 350588 - DNA, 75 bp, synthetic construct
  source 1..75: mol_type = other DNA
gttgcgtcagacccgcacccgtaagtgtcaacgacggatgaaaagtgatccacttatatctccaccaacggccca

SEQ ID NO: 350589 - DNA, 75 bp, synthetic construct
  source 1..75: mol_type = other DNA
cgagctgtatcgcaatggtgggatgaagagctggctatcctccaaaaggccgcgacatacttcgcgaagcgcctg

SEQ ID NO: 350590 - DNA, 75 bp, synthetic construct
  source 1..75: mol_type = other DNA
atgaacgacatctcttctgacgacatccttctgctgaaacagcgcctggccgaacaggaagcgctgatccacgcc

SEQ ID NO: 350591 - DNA, 75 bp, synthetic construct
  source 1..75: mol_type = other DNA
gtctcggaaagaaaaactttatgttctttggcagcgatcacggcggcgagcgtggagcactgttgtacgggctga

SEQ ID NO: 350592 - DNA, 75 bp, synthetic construct
  source 1..75: mol_type = other DNA
gcgctcacagatgaagcgctgaaacggatcggcgagttgtatgccatcgaagcggatatcaggggaatgccggca

SEQ ID NO: 350593 - DNA, 75 bp, synthetic construct
  source 1..75: mol_type = other DNA
gtgtgctgcaggcggatgcctatgcggggttcaatgagctctaccgtgacggccatataaaggaagccgcatgct

SEQ ID NO: 350594 - DNA, 75 bp, synthetic construct
  source 1..75: mol_type = other DNA
acccgtaaaccgttccctgaatcactcccccgtgatgaaaagcggttgttccccacagagtcctgttgcccggag

SEQ ID NO: 350595 - DNA, 75 bp, synthetic construct
  source 1..75: mol_type = other DNA
acgaaaagcggctgttgcctgcggcgccgtgctgcccgaactgcggcggttcactgagctatctgggcgaggata

SEQ ID NO: 350596 - DNA, 75 bp, synthetic construct
  source 1..75: mol_type = other DNA
caccgcctgtcatcaacgacgaacaatccacatcaacaccgttaaccaccgctcagacgatgacgttggctgcgg

SEQ ID NO: 350597 - DNA, 75 bp, synthetic construct
  source 1..75: mol_type = other DNA
caaaaggcgagccgctggtcagcgatattgtttccgacgcgcaacaagcggatttactgatccctgtggatgaaa

SEQ ID NO: 350598 - DNA, 75 bp, synthetic construct
  source 1..75: mol_type = other DNA
gatttactgatccctgcgaatgaaacactgccagtcatcaacgacgaacaatccacatcaacaccgttaaccacc

SEQ ID NO: 350599 - DNA, 75 bp, synthetic construct
  source 1..75: mol_type = other DNA
agaactcccagttcgattttctccatccgtggtatgaaacgcctgataatctctttttcagtcagcatactctcc

SEQ ID NO: 350600 - DNA, 75 bp, synthetic construct
  source 1..75: mol_type = other DNA
acctggcaacctggcagcgcaatgcagaaacagcttgacccgaatgaagtcgctgcacggcgtagccttgcaggc

SEQ ID NO: 350601 - DNA, 75 bp, synthetic construct
  source 1..75: mol_type = other DNA
cagttaattatgcgcctgtgtgcccgctatgcggcgaacatggacagtgcccttgcaaccccggatcacgcaatt

SEQ ID NO: 350602 - DNA, 75 bp, synthetic construct
  source 1..75: mol_type = other DNA
ccatcgaggcagaggtccggggctgttcagcagaacagcgtctggcggcaagaaaagccagagccgcgccactga

SEQ ID NO: 350603 - DNA, 75 bp, synthetic construct
  source 1..75: mol_type = other DNA
ctggctgcgtgaaaagatgaaaaccctgtcgcgacactcagagctgacgaaagcgttcgcgtacgccctgaacca

SEQ ID NO: 350604 - DNA, 75 bp, synthetic construct
  source 1..75: mol_type = other DNA
tccgttatgtccttgacgtcattgctgactggccgataaaccgggtcagcgaactactcccctggcgcgtagcac

SEQ ID NO: 350605 - DNA, 75 bp, synthetic construct
  source 1..75: mol_type = other DNA
ggtgcgtaacggcaaaagcactgccggacatcagcgctatctctgctcttattgccgtaaaacatggcaactaca

SEQ ID NO: 350606 - DNA, 75 bp, synthetic construct
  source 1..75: mol_type = other DNA
tgtggttcgcttacagcccggacagaaaaggcatccatccgcagactcatcttgcctgcttcagcggtgtgctgc

SEQ ID NO: 350607 - DNA, 75 bp, synthetic construct
  source 1..75: mol_type = other DNA
gcgtcactgatgcagtcactgtatgactggatacagactcagatgaaaacactgtcgcgtcactcagatacggca

SEQ ID NO: 350608 - DNA, 75 bp, synthetic construct
  source 1..75: mol_type = other DNA
tccgcagacccatcttgcggggttcagtggtgtactgcaggcggatgcatacgccgggttcaacgagctgtaccg

SEQ ID NO: 350609 - DNA, 75 bp, synthetic construct
  source 1..75: mol_type = other DNA
ccagaaagctacctccgctatgtccttgacgtcatagccgactggccgataaaccgggtcggcgaactgctcccc

SEQ ID NO: 350610 - DNA, 75 bp, synthetic construct
  source 1..75: mol_type = other DNA
acgccatcgaggcagagataaggggaatgacggcggaacagcgccttgccgaacgtcagttgaaaacgaaaccgc

SEQ ID NO: 350611 - DNA, 75 bp, synthetic construct
  source 1..75: mol_type = other DNA
cagcgtccgttgcgtcagacccgcacccgtaagccgttccctgaatcactaccccgtgacgaaaagcgactgttg

SEQ ID NO: 350612 - DNA, 75 bp, synthetic construct
  source 1..75: mol_type = other DNA
atgagcagctcacttcctgacgatatcaatgcactgaaacgtctcctggccgaacaggaggcgctgatccacgcc

SEQ ID NO: 350613 - DNA, 75 bp, synthetic construct
  source 1..75: mol_type = other DNA
ctgacgacacaccggtaaaggtactggcaccgggcctgaaaaagacgaaaacagggcgcatctggacgtatgtcc

SEQ ID NO: 350614 - DNA, 75 bp, synthetic construct
  source 1..75: mol_type = other DNA
aacgcgaaatagaccatctgcaggcacagctggataagctgcgccggatgaacttcggcagcggctcagaaaaag

SEQ ID NO: 350615 - DNA, 75 bp, synthetic construct
  source 1..75: mol_type = other DNA
aacgcgaaatagaccatctgcaggcacagctggataagctgcgccggatgaacatcggcagctgctccgaaaaag

SEQ ID NO: 350616 - DNA, 75 bp, synthetic construct
  source 1..75: mol_type = other DNA
atgagcagctcacttcctgacgatatcaatgcactgaaacgtctccttgccgaacacctgaaggcacttcagaaa

SEQ ID NO: 350617 - DNA, 75 bp, synthetic construct
  source 1..75: mol_type = other DNA
cgaagaccgggcggttgtgggcgtatgttcgtgacgaccgtaacgccgggtcaacgctggcgccggcggtgtggt

SEQ ID NO: 350618 - DNA, 75 bp, synthetic construct
  source 1..75: mol_type = other DNA
agaccgcctgctgaacgtactgctgggtgataccgaaaacaatcccttcctgatcaagcaacgcccttatgagaa

SEQ ID NO: 350619 - DNA, 75 bp, synthetic construct
  source 1..75: mol_type = other DNA
aacgcgaaatagaccatctgcaggcacagctggataagctgcgccggatgaacctcggcagccgctctgaaaaag

SEQ ID NO: 350620 - DNA, 75 bp, synthetic construct
  source 1..75: mol_type = other DNA
gccctggagcagatcggtcagttgtacgccatagaggcggatataaggggaatgacggcagagcagcggcgtgct

SEQ ID NO: 350621 - DNA, 75 bp, synthetic construct
  source 1..75: mol_type = other DNA
cgatatcaacattgcctatctgaccgcgaccggtcatcgtgataccgacgtaccttacagcaacattgtggcgct

SEQ ID NO: 350622 - DNA, 75 bp, synthetic construct
  source 1..75: mol_type = other DNA
tgccggttgattactggcacaacgtcgaaccgctgccgacttccttctggactgaggacgtagaagtaattgcgc

SEQ ID NO: 350623 - DNA, 75 bp, synthetic construct
  source 1..75: mol_type = other DNA
ttcggctctggccatggtggtgagcggggagcgctactgtacagcctgatcgggacgtgcaaactgaatgacgtg

SEQ ID NO: 350624 - DNA, 75 bp, synthetic construct
  source 1..75: mol_type = other DNA
ggttcagcggtgtcctgcatgcggatgcgtacgccgggttcaacgagctgtatcgcaatggtgggataacggaag

SEQ ID NO: 350625 - DNA, 75 bp, synthetic construct
  source 1..75: mol_type = other DNA
ggttcagtggtgtcctgcacgcggatgcgtacgccgggttcaacgagctgtatcgcaatggtgggataacggaag

SEQ ID NO: 350626 - DNA, 75 bp, synthetic construct
  source 1..75: mol_type = other DNA
tacaccaaactggaccaccaggcaccggaagagatgcgcagcttcctgctggatgccggggccgaatataacggc

SEQ ID NO: 350627 - DNA, 75 bp, synthetic construct
  source 1..75: mol_type = other DNA
atctgcattatgtacttgatgtcatcgccgactggcctgtgaaccgggtgggtgctctgctcccgtggcgggtta

SEQ ID NO: 350628 - DNA, 75 bp, synthetic construct
  source 1..75: mol_type = other DNA
tatgcgggttacaatgctctttacgaaagcggtcaggtaaccgaagcggcttgtatggcacatgcccgacgcaag

SEQ ID NO: 350629 - DNA, 75 bp, synthetic construct
  source 1..75: mol_type = other DNA
ctgaacggagtggagccagaaagctacctccgctatgtccttgacgtcatagccgactggccgataaaccgggtc

SEQ ID NO: 350630 - DNA, 75 bp, synthetic construct
  source 1..75: mol_type = other DNA
gaacgtcagcgaaaaacgaaaccgctgttgaaatccctggaaagctggttgcgtgaaaagatgaagaccctgttc

SEQ ID NO: 350631 - DNA, 75 bp, synthetic construct
  source 1..75: mol_type = other DNA
cccgagtgctgacctcaaagtatgcagagcacacaccgctgtatcgccagtcggagaactatgcccgccagggtg

SEQ ID NO: 350632 - DNA, 75 bp, synthetic construct
  source 1..75: mol_type = other DNA
ggcaccaaaaagtgctgccgctgctggcgtcactggaggggtggctgcgggagaaacagaaaaccctctcaaggc

SEQ ID NO: 350633 - DNA, 75 bp, synthetic construct
  source 1..75: mol_type = other DNA
aggttgcgcaccgtggcccgcctgatcagctcacaatcagcgcccgcagcgcagactttcgcgacacgttcaacg

SEQ ID NO: 350634 - DNA, 75 bp, synthetic construct
  source 1..75: mol_type = other DNA
cgagcacaccattgataacagcggttttaccacgcagcttgagcttgaggcaaaaatcccggaatggatagcgga

SEQ ID NO: 350635 - DNA, 75 bp, synthetic construct
  source 1..75: mol_type = other DNA
atgtcatttctgaccagaatggcggaaatgttaggggccatcgccacggtaaaaaatggaagtctgctgtttatc

SEQ ID NO: 350636 - DNA, 75 bp, synthetic construct
  source 1..75: mol_type = other DNA
cggattatctgccgggaggcgcacacgggttttcatgtgtggatgaatgagcgtcaggtggacggcagggtggag

SEQ ID NO: 350637 - DNA, 75 bp, synthetic construct
  source 1..75: mol_type = other DNA
agcgcagattttcgggatgaatttaacgttaaacgtgaggtgtcctggcatgatgtgacccttgagcgtgtggta

SEQ ID NO: 350638 - DNA, 75 bp, synthetic construct
  source 1..75: mol_type = other DNA
gaccgacaaccggggatttgaggcggaccagctcaccatcacgctggatgatgcggatggtcagttgctgctacc

SEQ ID NO: 350639 - DNA, 75 bp, synthetic construct
  source 1..75: mol_type = other DNA
gcctactggctggatacacggcaggcaaaaaagcagtccactgacatgaagcgcaagacacggaaaaaccgtcca

SEQ ID NO: 350640 - DNA, 75 bp, synthetic construct
  source 1..75: mol_type = other DNA
gcctactggctggatacgcggcaggctaaaaagcagtcaactgacgtgaagcgcaagacacggaaaaaccttccg

SEQ ID NO: 350641 - DNA, 75 bp, synthetic construct
  source 1..75: mol_type = other DNA
acagccaccggttcagcatcgcggacagggaagcctataccggcgtaacggcctactggctggatacgcggcagg

SEQ ID NO: 350642 - DNA, 75 bp, synthetic construct
  source 1..75: mol_type = other DNA
gctggtttataagggcatctacacggttgatgaagtggcgcacgacgggccgcccgaccgtatcaccgtgaccgc

SEQ ID NO: 350643 - DNA, 75 bp, synthetic construct
  source 1..75: mol_type = other DNA
tactggcttgatctcaactttggcaagaaaccatccactaccgtgaagaaaaccacccgcaggcgacgaaccagc

SEQ ID NO: 350644 - DNA, 75 bp, synthetic construct
  source 1..75: mol_type = other DNA
atggacacgacagaaaaccgatattcgccgcgcccggcgttcagtattgagattgaaggtaagcagcttacggcg

SEQ ID NO: 350645 - DNA, 75 bp, synthetic construct
  source 1..75: mol_type = other DNA
atctgaaattcagaatgcaatcgaagctgaggctttatcttttgtaaatcatttggctaacgatcattacggtca

SEQ ID NO: 350646 - DNA, 75 bp, synthetic construct
  source 1..75: mol_type = other DNA
cactgcatggtcttcgcgggctacgttgcaactccgctgtttttaagcggtctggtggcgctttatccgctggtc

SEQ ID NO: 350647 - DNA, 75 bp, synthetic construct
  source 1..75: mol_type = other DNA
tcagtcagggcacagaccccgtaaaaatgccggattttgatattctcgcggagggtaaaacgctgtccggcgtgg

SEQ ID NO: 350648 - DNA, 75 bp, synthetic construct
  source 1..75: mol_type = other DNA
ccacggggcgcgcgcctgacggttctcattggctggaaaggagaaccgctgacagaaaaaggcacttacattgtt

SEQ ID NO: 350649 - DNA, 75 bp, synthetic construct
  source 1..75: mol_type = other DNA
gatggcgcgcaaatatccgcaacgtccatcccttgcgcactgtatggtctttgccggatatgtcgcaacgccgct

SEQ ID NO: 350650 - DNA, 75 bp, synthetic construct
  source 1..75: mol_type = other DNA
cccatcccgatcgtgaaatgcaggtgattaatcgtgaaaacgaaacgatttctcatcactacacccaccacgttt

SEQ ID NO: 350651 - DNA, 75 bp, synthetic construct
  source 1..75: mol_type = other DNA
cggtgatggggcgggtcatctggtggatggcgcgcaattatccgcagcgtccgtcacttgcgcactgcatggtct

SEQ ID NO: 350652 - DNA, 75 bp, synthetic construct
  source 1..75: mol_type = other DNA
ccgtaccgtgagtgctgatgccgcaggcatcatccttacctcccttgtgattaaccgccagttgtggctgtacca

SEQ ID NO: 350653 - DNA, 75 bp, synthetic construct
  source 1..75: mol_type = other DNA
gcgcggcggtgtggcgaaactggatgaaggtcaccggctggccgcactctggcaggcgctgccggaagagcttcg

SEQ ID NO: 350654 - DNA, 75 bp, synthetic construct
  source 1..75: mol_type = other DNA
cgaccgttttcatctggttaacggtgaaaactggtttgaccgcacggtcagtgctgatgccgcaggcatcatttt

SEQ ID NO: 350655 - DNA, 75 bp, synthetic construct
  source 1..75: mol_type = other DNA
tggcacttcatccgcctgccggacggtggcggttacatgatgccggacggtgaccgattccacatggtgaacggt

SEQ ID NO: 350656 - DNA, 75 bp, synthetic construct
  source 1..75: mol_type = other DNA
caccaaataacacctatctaaaatataatcccaaagctaaagggaatggagttacaattatcagacaagggagta

SEQ ID NO: 350657 - DNA, 75 bp, synthetic construct
  source 1..75: mol_type = other DNA
cgaccgttttcatctggttaacggtgaaaactggtttgaccgcacggtcagtgctgatgccgcaggcatcatcct

SEQ ID NO: 350658 - DNA, 75 bp, synthetic construct
  source 1..75: mol_type = other DNA
atctgttattcatccggcaggggcagggcaaaagcgccactggtaaaccactgccagtgatcactatcacacgca

SEQ ID NO: 350659 - DNA, 75 bp, synthetic construct
  source 1..75: mol_type = other DNA
gcggcaaagtggcagcagctacagcgcggtgcggcggagttctccatcacactggcacgcggtcgccccgacctg

SEQ ID NO: 350660 - DNA, 75 bp, synthetic construct
  source 1..75: mol_type = other DNA
ggacgcattaaagtatgccgctttactgcatagccgggcggcgcaacaaaccaataattttgcagtatcgcttcc

SEQ ID NO: 350661 - DNA, 75 bp, synthetic construct
  source 1..75: mol_type = other DNA
caggaaaacagtgaaaaactggcggccgatatgataatcagtcagaaacgcatgggtggcctgcaggccgtgcgt

SEQ ID NO: 350662 - DNA, 75 bp, synthetic construct
  source 1..75: mol_type = other DNA
gaccagctcaccatcacgctggatgatgccgatggccagttgcagctaccgccacggggcgcgcgcctgacggtt

SEQ ID NO: 350663 - DNA, 75 bp, synthetic construct
  source 1..75: mol_type = other DNA
ctggattattgcaaaagccgagcacaccattgataacagcggctttaccacgcagcttgagcttgaagcaaaaat

SEQ ID NO: 350664 - DNA, 75 bp, synthetic construct
  source 1..75: mol_type = other DNA
acgtgacggtggggcaggttgtttctgccatcgcgtaccgttacgggctgaaagcgcaaatcagcgcctcgctgg

SEQ ID NO: 350665 - DNA, 75 bp, synthetic construct
  source 1..75: mol_type = other DNA
gcgaacaggaacttaaagattgcggtgtggatattgacgcgatcaacaccttcagacttctggctggaccggaaa

SEQ ID NO: 350666 - DNA, 75 bp, synthetic construct
  source 1..75: mol_type = other DNA
accaccacgagataatgagcctagaataggaactcatcctgaatttaaacatcttgaattagataatagaactga

SEQ ID NO: 350667 - DNA, 75 bp, synthetic construct
  source 1..75: mol_type = other DNA
gctattttttctgagggttatggagagaactatgattcgcttaaattcaagtttcgtgttgtaaataatggaatt

SEQ ID NO: 350668 - DNA, 75 bp, synthetic construct
  source 1..75: mol_type = other DNA
caggaaaacagtgaaaaactggctgccgatatgattatcagtcagaaacgcatgggtggcctgcaggccgtgcgt

SEQ ID NO: 350669 - DNA, 75 bp, synthetic construct
  source 1..75: mol_type = other DNA
caggaaaacagtgaaaaactggcagccgatatgatgatcagtcagaaacgcatgggtggcctgcaggccgtgcgt

SEQ ID NO: 350670 - DNA, 75 bp, synthetic construct
  source 1..75: mol_type = other DNA
gcagtaccaccaaagacggcgtaaccactaaaggcgctgtgaaagtgggtaaaggcgcgtcggggctggatgaaa

SEQ ID NO: 350671 - DNA, 75 bp, synthetic construct
  source 1..75: mol_type = other DNA
tatccgccatcgctcatcggtatggtctgaaaccgcaaatcagcgaaatgctgatggatatcgaaatcgaccacg

SEQ ID NO: 350672 - DNA, 75 bp, synthetic construct
  source 1..75: mol_type = other DNA
gttgaggactaccgctgcgtcgcactggtggaaaacatccagattggtgatttcagcgccgccgcagcagaagcc

SEQ ID NO: 350673 - DNA, 75 bp, synthetic construct
  source 1..75: mol_type = other DNA
catgggtggcttgcaggccgtgcgtgcaccgttcttcccgccgaatgcactgctgatcacccgtctggataacct

SEQ ID NO: 350674 - DNA, 75 bp, synthetic construct
  source 1..75: mol_type = other DNA
gcgtctgaacggtgtagcagttgaagaactgtccagcaagttcactgtagagccgtctgtacagcagacgctgga

SEQ ID NO: 350675 - DNA, 75 bp, synthetic construct
  source 1..75: mol_type = other DNA
cgccgccgctcagttatcgacaacccgaaacgtgaccgaattgaaaactttgaatccgttaacgaagcctatgtg

SEQ ID NO: 350676 - DNA, 75 bp, synthetic construct
  source 1..75: mol_type = other DNA
cgccgccgttcagttatggacaacccgaaacgtgaccggattgaaaattttgaatccgttaacgaagcctatgtg

SEQ ID NO: 350677 - DNA, 75 bp, synthetic construct
  source 1..75: mol_type = other DNA
gttgaggactaccgctgcgctgcgctgcgctggtggaaaacatccagattggcgatttcagcgccgccgcagcag

SEQ ID NO: 350678 - DNA, 75 bp, synthetic construct
  source 1..75: mol_type = other DNA
ttgacgcggtggtgatggataccgtcaacgagctgatcgatgtggagtatcaggatgatgacgagctggttgttg

SEQ ID NO: 350679 - DNA, 75 bp, synthetic construct
  source 1..75: mol_type = other DNA
ccgaccagaccgaagaaagcgacatgtcctttcttacgcgcatggcggaaatgctgggcgcaatcaccacggtaa

SEQ ID NO: 350680 - DNA, 75 bp, synthetic construct
  source 1..75: mol_type = other DNA
cattgatttactgatcaaaacgggcgtattccgcggcctgaaaactgttctgcattatatggatgtcgtttctgt

SEQ ID NO: 350681 - DNA, 75 bp, synthetic construct
  source 1..75: mol_type = other DNA
ggggataaaacgcttcctgttgttgattatatggtggtgttgaatcatggaacaacagttgatggcgaagaaaaa

SEQ ID NO: 350682 - DNA, 75 bp, synthetic construct
  source 1..75: mol_type = other DNA
gcgcctgaacggtgtggaggttgaagaactctccagcaaattcaccgtggagccgacggtacagcagacgctgga

SEQ ID NO: 350683 - DNA, 75 bp, synthetic construct
  source 1..75: mol_type = other DNA
acgcatgggcggcctgcaggctgtgcgcgcgcctttcttcccggcaaatgccctgctgatcacccgtctggataa

SEQ ID NO: 350684 - DNA, 75 bp, synthetic construct
  source 1..75: mol_type = other DNA
ataatgttcttaacaatatacttttgtctttaggcggagtaagtactcagacaattagtgtgacaggcttggcat

SEQ ID NO: 350685 - DNA, 75 bp, synthetic construct
  source 1..75: mol_type = other DNA
cggtgccgccgtttctgccggtgacagcgtgttactgtccgccggtaatgacctgaacatgaacgcgatacaggc

SEQ ID NO: 350686 - DNA, 75 bp, synthetic construct
  source 1..75: mol_type = other DNA
cataaaattccagaagcgcaccggactcaggaaacagcaatctggcgcggcgcactggcaagtggtgaaatgggg

SEQ ID NO: 350687 - DNA, 75 bp, synthetic construct
  source 1..75: mol_type = other DNA
aagtctatctctagatgcacctgatggtcagatagagaatctgtatcacgatgagaaggacgggaagtatcacct

SEQ ID NO: 350688 - DNA, 75 bp, synthetic construct
  source 1..75: mol_type = other DNA
acacagcattctatgcacaatcagtcagatccttagccgggcttgaacagttactctcgtcaatatatcaaatca

SEQ ID NO: 350689 - DNA, 75 bp, synthetic construct
  source 1..75: mol_type = other DNA
aatcgtatataggcgatattctgaattttaaaatatatgtgctgatttatcccagcaatgatgatagtcaaataa

SEQ ID NO: 350690 - DNA, 75 bp, synthetic construct
  source 1..75: mol_type = other DNA
ataaatggtcacaaatagtaagcccgatggatcagctaaaaggcgaagttgaccccatccagcaggcgcaaaatg

SEQ ID NO: 350691 - DNA, 75 bp, synthetic construct
  source 1..75: mol_type = other DNA
attggcggtggcggcggcattagtatgcctgtcaatatcaacattcagaccacaaacggatttagcgacgaggac

SEQ ID NO: 350692 - DNA, 75 bp, synthetic construct
  source 1..75: mol_type = other DNA
attacgaggttgacgctaaaactggtcaacttctcgttgcacaacgccaggccgaccaggcttttgaccgtatag

SEQ ID NO: 350693 - DNA, 75 bp, synthetic construct
  source 1..75: mol_type = other DNA
aagggcgttaaaggacttggcgagggcgctaaattcgctaaaacatgctttgacactctcaaaacggctgggagt

SEQ ID NO: 350694 - DNA, 75 bp, synthetic construct
  source 1..75: mol_type = other DNA
attacgaagttgacgcaaaaacaggacaacttcttgtagcacaacgacaggcagaccaggcctttgaccgtatag

SEQ ID NO: 350695 - DNA, 75 bp, synthetic construct
  source 1..75: mol_type = other DNA
cagtacaacaaagacgccgccgccatgcgcaaagcgttagagaacggcaaggccattgatgctgcgttcgcccag

SEQ ID NO: 350696 - DNA, 75 bp, synthetic construct
  source 1..75: mol_type = other DNA
ataatagtggcttcacgacgtccttagaacttgaggtaaggctttctgatgtggagtacgaaacagaagatgatg

SEQ ID NO: 350697 - DNA, 75 bp, synthetic construct
  source 1..75: mol_type = other DNA
tggagatccgcatcccttcgcatcgtagtgctcgcattcaggaaatgcatatgctgacggtaaattgcctgtgcg

SEQ ID NO: 350698 - DNA, 75 bp, synthetic construct
  source 1..75: mol_type = other DNA
atgacgtatggaaggatgaccctgagtatgacggcgttaaaatttcaatttcaccggtgattgatgccgctacag

SEQ ID NO: 350699 - DNA, 75 bp, synthetic construct
  source 1..75: mol_type = other DNA
atatgtctacacagctgttccttgatcttgctataagatcattggaggcaagctggaagctttttcaggaagtga

SEQ ID NO: 350700 - DNA, 75 bp, synthetic construct
  source 1..75: mol_type = other DNA
acagagcctttctatacggcaaatcagccactggcggacatcagtgagatgcgaattgttaagggaatggatgca

SEQ ID NO: 350701 - DNA, 75 bp, synthetic construct
  source 1..75: mol_type = other DNA
cgcgtgatatgaccattgtggcattgaccggctatgacggcggcgaacttgcaggtttgttagggccacaggatg

SEQ ID NO: 350702 - DNA, 75 bp, synthetic construct
  source 1..75: mol_type = other DNA
gaaatgcatatgctgacggtaaattgcctgtgcgatctgatcgataacacgcttttccctcaccaggatgtttaa

SEQ ID NO: 350703 - DNA, 75 bp, synthetic construct
  source 1..75: mol_type = other DNA
atgaactggaatctttcgccagtgcagtcaccggacgtttccgtaacccgtacatcaaacatcagttgctatcta

SEQ ID NO: 350704 - DNA, 75 bp, synthetic construct
  source 1..75: mol_type = other DNA
ctggcagggcagaaggcaaacggcacacttccggcgcgccttactttcgcattagcggcattgattgcgttctat

SEQ ID NO: 350705 - DNA, 75 bp, synthetic construct
  source 1..75: mol_type = other DNA
gaatacatggcaggtgaagctgacaacgtttttgccctgactacggtatatgccacaaaagcgcaggccatgcgt

SEQ ID NO: 350706 - DNA, 75 bp, synthetic construct
  source 1..75: mol_type = other DNA
ggtgccggtggcgttccaggcagggctggataccgtcggcgaagcgatgaacgatgctgaaatttgcgcattcgt

SEQ ID NO: 350707 - DNA, 75 bp, synthetic construct
  source 1..75: mol_type = other DNA
aactcccggctcgtctcactttcgcgttagcggcactgattgcattctatcgcggtgagcgtaacggtgaaacct

SEQ ID NO: 350708 - DNA, 75 bp, synthetic construct
  source 1..75: mol_type = other DNA
tgcgtctggataaatatccgcttaacgtgctgattgttgacgatattaaaccgtataaagagcgcaaagtagcaa

SEQ ID NO: 350709 - DNA, 75 bp, synthetic construct
  source 1..75: mol_type = other DNA
gcgtcaactggtggtagctgggcggcggctggtgctgcggcgctttctgcgatcatgtcgctggcaacgtcaatc

SEQ ID NO: 350710 - DNA, 75 bp, synthetic construct
  source 1..75: mol_type = other DNA
gatgcgtgatgcgcagttgtggagccacatcgaatttcatcctgaatgcaacgcgatttacgcggcgctggactg

SEQ ID NO: 350711 - DNA, 75 bp, synthetic construct
  source 1..75: mol_type = other DNA
gtgccgatgccgcaggcatcattctgacttcccttgtgattaaccgccagttgtggctgtaccacgacagcgggg

SEQ ID NO: 350712 - DNA, 75 bp, synthetic construct
  source 1..75: mol_type = other DNA
gatgcgcgatgcgcagttgtggagccacatcgaatttcaccctgaatgcaacgcgatttacgcggcgctggactg

SEQ ID NO: 350713 - DNA, 75 bp, synthetic construct
  source 1..75: mol_type = other DNA
gatgcgtgatgcgcagttgtggagccacatcgaatttcatcccgaatgtaacgcgatttacgcggcactggactg

SEQ ID NO: 350714 - DNA, 75 bp, synthetic construct
  source 1..75: mol_type = other DNA
tgaacgttgaagagtgcgaccgtctctcctttctgccttacctgtttggcctggattttctgtatgccgaagcgt

SEQ ID NO: 350715 - DNA, 75 bp, synthetic construct
  source 1..75: mol_type = other DNA
gtgttgtgtgcgggctgtgccgtgcctccatcttagccgggctggcggggatgcaagggtacgcttcgccgctgc

SEQ ID NO: 350716 - DNA, 75 bp, synthetic construct
  source 1..75: mol_type = other DNA
attggctggaattttggcgatggcactattctgaagttatcctggtttaccggactggcgctggctgtcttgttt

SEQ ID NO: 350717 - DNA, 75 bp, synthetic construct
  source 1..75: mol_type = other DNA
cggactggcgctggctgtcttgttttatggcgttatgctggctggggttgcggtgatggggcgggtcatctggtg

SEQ ID NO: 350718 - DNA, 75 bp, synthetic construct
  source 1..75: mol_type = other DNA
ttcgacgctggcgattggcgtactggtgctggaagtgctgctcgctattaccgttattctgtgggggtacggtta

SEQ ID NO: 350719 - DNA, 75 bp, synthetic construct
  source 1..75: mol_type = other DNA
gaaaactggtttgaccgcacggtcagcgccgatgccgcaggcatcattctgacttcccttgtgattaaccgtcag

SEQ ID NO: 350720 - DNA, 75 bp, synthetic construct
  source 1..75: mol_type = other DNA
gaaaactggtttgaccgcacggtcagtgctgatgccgcaggcatcatccttacctcccttgtgattaaccgccag

SEQ ID NO: 350721 - DNA, 75 bp, synthetic construct
  source 1..75: mol_type = other DNA
cctgtcttttatgccgtacctgttcggcacggatttcatgctcgcggaattacaggtgtacgctctggccaaaaa

SEQ ID NO: 350722 - DNA, 75 bp, synthetic construct
  source 1..75: mol_type = other DNA
tggcagaaagagacggggtttgcctttccttccggccacacgatgtttgccgccagttgggccttgctcgccgtt

SEQ ID NO: 350723 - DNA, 75 bp, synthetic construct
  source 1..75: mol_type = other DNA
aacgcagtgggatgcgttggccggtaaaactcaaaggatttaaaacagccattgtaagtagcgatgaagcgccgc

SEQ ID NO: 350724 - DNA, 75 bp, synthetic construct
  source 1..75: mol_type = other DNA
ggccggacatatatcgcctcggcaaacaatattaaaaagcgaaaactttatattcgtaacctgactacaaaaaca

SEQ ID NO: 350725 - DNA, 75 bp, synthetic construct
  source 1..75: mol_type = other DNA
gtggttaccacagacggaaaatccgcttgatggcacttcagtgcccggggcatcaaaacagaaaaaaacgctcac

SEQ ID NO: 350726 - DNA, 75 bp, synthetic construct
  source 1..75: mol_type = other DNA
gatgggcaatataccaatcaaaccaacctcacccgcaaagcccgggaaaccatggcgctgaaacagcagtacacg

SEQ ID NO: 350727 - DNA, 75 bp, synthetic construct
  source 1..75: mol_type = other DNA
gatgccagtggtaatcgtcaaaagtaccgtgtggcgcatgaagttgcccgtgctgttaattttcgtgaagcaacg

SEQ ID NO: 350728 - DNA, 75 bp, synthetic construct
  source 1..75: mol_type = other DNA
gtaatttaagcaaaacgttccgctaccgaactggctggtttcgtcgtcagaccgtagaagccgtaaaacccttga

SEQ ID NO: 350729 - DNA, 75 bp, synthetic construct
  source 1..75: mol_type = other DNA
ttgggtcactgaaaccgtcactcagccctggggcgtcattacgcatcttattttattcggctggtttctctggtg

SEQ ID NO: 350730 - DNA, 75 bp, synthetic construct
  source 1..75: mol_type = other DNA
caggaaccgcgaccttttgttatctggctggaaaaaacacatcatattccggttgatgagttctacactttaaag

SEQ ID NO: 350731 - DNA, 75 bp, synthetic construct
  source 1..75: mol_type = other DNA
gcaacgtggcttacgcaacgaatttgtgggccattaacaccgcctgcggaagaaaatcgcgaaatagcgcaacga

SEQ ID NO: 350732 - DNA, 75 bp, synthetic construct
  source 1..75: mol_type = other DNA
gtttctcatcatgaggtactaagatggcggcgatatgttctcagagaaaaacaacaatcggcgcagacctggaac

SEQ ID NO: 350733 - DNA, 75 bp, synthetic construct
  source 1..75: mol_type = other DNA
tccgcaggttgagcagggaatgtggttttaatgtatccccccacagattcaggcacacactggcgacaaaactga

SEQ ID NO: 350734 - DNA, 75 bp, synthetic construct
  source 1..75: mol_type = other DNA
atgcaatatgcgaaacctgtcactctgaacgttgaagagtgtgaccgtctctcctttctgccttacctgtttggc

SEQ ID NO: 350735 - DNA, 75 bp, synthetic construct
  source 1..75: mol_type = other DNA
ctggattaacggggatcacaccgatctggtgccgttctccccgtcgaagtttgagaagtggatggaagggattgg

SEQ ID NO: 350736 - DNA, 75 bp, synthetic construct
  source 1..75: mol_type = other DNA
gatgaagcaaagcattatcgacagagacatcaccccagtatgggggcgcaagctgctgtcagagataaccccctc

SEQ ID NO: 350737 - DNA, 75 bp, synthetic construct
  source 1..75: mol_type = other DNA
ggatatgcgtcgctcagtctatgcccgagagctagaggggaaatttggcaaccaaaagctcacagaaattaccca

SEQ ID NO: 350738 - DNA, 75 bp, synthetic construct
  source 1..75: mol_type = other DNA
ttgagaggaaacctaacccgaccatgctgaccgataccaagctgcgcaacctcaagccaaaggacaagctctaca

SEQ ID NO: 350739 - DNA, 75 bp, synthetic construct
  source 1..75: mol_type = other DNA
acctcaaaccgcaggacaaactgtataaggtttcggatcgtgacggcttgtatgtagccgtgcttacttccggct

SEQ ID NO: 350740 - DNA, 75 bp, synthetic construct
  source 1..75: mol_type = other DNA
gagcgaacactgacaccagaagaaattggcctgttcttccgtacgctggatgccattggtgctatgggcactatg

SEQ ID NO: 350741 - DNA, 75 bp, synthetic construct
  source 1..75: mol_type = other DNA
tatctttaccggtatgaccgttacggcaggctgacagagaaaaccgacctcatcccggaaggggttatccgcacg

SEQ ID NO: 350742 - DNA, 75 bp, synthetic construct
  source 1..75: mol_type = other DNA
tgccattggtgctatgggcactatgaaaatggctttaaagctggtgcttatcactatggttcgtaaaggcgaatt

SEQ ID NO: 350743 - DNA, 75 bp, synthetic construct
  source 1..75: mol_type = other DNA
cagtgggccgatatgattgattcctggattaacggggagcatacggatctgattccgttctccccgtcgaagttt

SEQ ID NO: 350744 - DNA, 75 bp, synthetic construct
  source 1..75: mol_type = other DNA
gcatgggctgagaaatggttacgcggctatcaaatggctgaatcgacgcgtgatatgcggcgttcagtatatcaa

SEQ ID NO: 350745 - DNA, 75 bp, synthetic construct
  source 1..75: mol_type = other DNA
acctcaaaccgagggataaactctacaaagtgaatgaccgggacggcctttatgtggctgtcacccctgccggtt

SEQ ID NO: 350746 - DNA, 75 bp, synthetic construct
  source 1..75: mol_type = other DNA
gggcaaccgcttgctaaattcggcccgcacgacttgagacgaacagccagtaccttgctccatgaagccggttac

SEQ ID NO: 350747 - DNA, 75 bp, synthetic construct
  source 1..75: mol_type = other DNA
gagcgaacactgacaccagaagaaattggtctgttcttccgcacgctggatgccattggtgctatgggcactatg

SEQ ID NO: 350748 - DNA, 75 bp, synthetic construct
  source 1..75: mol_type = other DNA
acattcacattggaatcttagaaaacagggcaaatagagattttatatataggaagttttcatctttaaatttgg

SEQ ID NO: 350749 - DNA, 75 bp, synthetic construct
  source 1..75: mol_type = other DNA
tatgataagattcgtggtaataatttagataataccttttccctcggaaatggggggggggttatatattctgga

SEQ ID NO: 350750 - DNA, 75 bp, synthetic construct
  source 1..75: mol_type = other DNA
aagcggcgcccaaagggttccgttgggttttctgccgttaccgcaaggtgcgtgggaaatcaaaaaaagtccttg

SEQ ID NO: 350751 - DNA, 75 bp, synthetic construct
  source 1..75: mol_type = other DNA
tgctgatccgcaatgcgggatggttaaagcaggctttcgcgccactggcatatatcgccattgatgaattccatg

SEQ ID NO: 350752 - DNA, 75 bp, synthetic construct
  source 1..75: mol_type = other DNA
atccttcaaaaatactttatagactcatttgctaaaacaagtatctctgacagagaaaacaatatatatcctgtt

SEQ ID NO: 350753 - DNA, 75 bp, synthetic construct
  source 1..75: mol_type = other DNA
tgtgatattaaaaatacaaaacatacaaaataaaacagtagattttaatgaaacaagagagagggtgaaggaact

SEQ ID NO: 350754 - DNA, 75 bp, synthetic construct
  source 1..75: mol_type = other DNA
tattgatcttttaatcaggtttggtgtgttccggggattaaaaacagtacttcactatatgggaatcattgatgc

SEQ ID NO: 350755 - DNA, 75 bp, synthetic construct
  source 1..75: mol_type = other DNA
agccgtttataacaaagcggaatacgcagagcagcgccgtgatatgttgcagcagtgggcggatatggttgatgg

SEQ ID NO: 350756 - DNA, 75 bp, synthetic construct
  source 1..75: mol_type = other DNA
tattaaagatgcggagacttttggtgcgtggactgagaaatggttacgcggttatcaaatggctgaatcgacgcg

SEQ ID NO: 350757 - DNA, 75 bp, synthetic construct
  source 1..75: mol_type = other DNA
attttacaacattatataaacacgcattatttgtcagaggcgcaaactcagaagataaaagatattgtggatttt

SEQ ID NO: 350758 - DNA, 75 bp, synthetic construct
  source 1..75: mol_type = other DNA
attctcacggcgtggtatacccagctccatctgataagttatttgagttattaagaaggcatacaaattccaatt

SEQ ID NO: 350759 - DNA, 75 bp, synthetic construct
  source 1..75: mol_type = other DNA
gcctttgttcagagtgctgcagaacgagaatcagtactggaggttgttgctgatgaagcaaaaggcaggcttaag

SEQ ID NO: 350760 - DNA, 75 bp, synthetic construct
  source 1..75: mol_type = other DNA
ttccgttgggctatagaacgcggccagaaggttgagaacccggccgatctggtgcgcccgtcgaccattgcaaag

SEQ ID NO: 350761 - DNA, 75 bp, synthetic construct
  source 1..75: mol_type = other DNA
aagggcagcagtgcctgaccgtcgctgacggtgtcgaatctgttcggtctggtcaccggtatggcggaggacctg

SEQ ID NO: 350762 - DNA, 75 bp, synthetic construct
  source 1..75: mol_type = other DNA
gctggcgcatcgagcagtgcagcgaactgagcgcggtcagtgcttcctttgtgctctccacaccgacggaaacgg

SEQ ID NO: 350763 - DNA, 75 bp, synthetic construct
  source 1..75: mol_type = other DNA
aagggcagcagtgcctggccgtcgctgacggtgtcgaatctgtttggtctggtcaccggaatggcggaggacctg

SEQ ID NO: 350764 - DNA, 75 bp, synthetic construct
  source 1..75: mol_type = other DNA
aagggcagcagtgcctgtccgtcgctgacggtgtcgaatctgttaggtctggtcaccggaatggcggaggacctg

SEQ ID NO: 350765 - DNA, 75 bp, synthetic construct
  source 1..75: mol_type = other DNA
gctgacggccatgacggcctcgtttgtgctggccacaccgacggagacggacggagcgctgtttcccggtcgcat

SEQ ID NO: 350766 - DNA, 75 bp, synthetic construct
  source 1..75: mol_type = other DNA
ggctgacggccatgacggcctcgtttgtgctggccacaccgaccgagacggacggggcgctgtttcccggtcgta

SEQ ID NO: 350767 - DNA, 75 bp, synthetic construct
  source 1..75: mol_type = other DNA
gacgctgaatttattgaaaagttaaaagcaataattctaacagagaatgaagcaacttgtttttcagttaataaa

SEQ ID NO: 350768 - DNA, 75 bp, synthetic construct
  source 1..75: mol_type = other DNA
gctgacggccatgacagcctcgtttgtgctggcgacaccgacggagacggacggggcgctgtttcccggtcgcat

SEQ ID NO: 350769 - DNA, 75 bp, synthetic construct
  source 1..75: mol_type = other DNA
tggcagagacgacagtatcagccgtatcccattcaggggacgggatttgaactgaacggtaagggcagtgctgcc

SEQ ID NO: 350770 - DNA, 75 bp, synthetic construct
  source 1..75: mol_type = other DNA
gaatgaaaaaggggaggcggtcacctggcaggggcgggaatatcaggcatacccgattgacggcagcggttttga

SEQ ID NO: 350771 - DNA, 75 bp, synthetic construct
  source 1..75: mol_type = other DNA
catcttgtcgacggtctgattaacggtatcaaaaacaaatgggagtcgctcaaatccagtgtaaccggaatgggt

SEQ ID NO: 350772 - DNA, 75 bp, synthetic construct
  source 1..75: mol_type = other DNA
tgaacatggcaaaatttatccgggcgcagtcgctgctgctgctcgaaaaactcgacgtgctcgatcttgatgacg

SEQ ID NO: 350773 - DNA, 75 bp, synthetic construct
  source 1..75: mol_type = other DNA
ccaatgcaacgtgggatgaaatagattttaaaaaatggacatggacaattcctccagaccgcatgaagggaagcc

SEQ ID NO: 350774 - DNA, 75 bp, synthetic construct
  source 1..75: mol_type = other DNA
gcgaacactgacaccagaagaaattggcctgttcttccgcacgctggatgccattggtgctatgggtactatgaa

SEQ ID NO: 350775 - DNA, 75 bp, synthetic construct
  source 1..75: mol_type = other DNA
cagacagcgcgcctacatgttgcagcagtgggccgatatgattgattcttggattgacggggagcatacggatct

SEQ ID NO: 350776 - DNA, 75 bp, synthetic construct
  source 1..75: mol_type = other DNA
ctttatcttcagcctgatttgttcgctgggtgccggcccactgctaaatgcttatggctggaaaaccatgcacct

SEQ ID NO: 350777 - DNA, 75 bp, synthetic construct
  source 1..75: mol_type = other DNA
atgaccaaacaggaaaaaacagcccttaacatggctcgctttatcagaagccagacgctaaccctgctggaaaaa

SEQ ID NO: 350778 - DNA, 75 bp, synthetic construct
  source 1..75: mol_type = other DNA
ccagacgctgaccctgctggaaaaactcaacgagctggacgcggacgaacaggcagacatctgcgaatcacttca

SEQ ID NO: 350779 - DNA, 75 bp, synthetic construct
  source 1..75: mol_type = other DNA
gtgcctggggatgttttttctgggaatataccaggcctttgcgcagttttccgttttgctgcgggtgaagttgcg

SEQ ID NO: 350780 - DNA, 75 bp, synthetic construct
  source 1..75: mol_type = other DNA
tattggaaatctgattatctgcatcgttgttctgtatttcaggggcaatctggcgcggatagttgacgcattagg

SEQ ID NO: 350781 - DNA, 75 bp, synthetic construct
  source 1..75: mol_type = other DNA
cggtgcgttcaacgtggatttatgggagtacgtcatggaccgggaatacatctgcgcatcagaccctgaagcccg

SEQ ID NO: 350782 - DNA, 75 bp, synthetic construct
  source 1..75: mol_type = other DNA
cctgatagcttttgaccattacagcatctgtgcgcgttattgcggtgaaagcatttccagcgccattgcgtttgg

SEQ ID NO: 350783 - DNA, 75 bp, synthetic construct
  source 1..75: mol_type = other DNA
cacgcctgggctggtcagatgaacgcattggtacggagctgggtatggaccaggatgaagttctcagattgaaac

SEQ ID NO: 350784 - DNA, 75 bp, synthetic construct
  source 1..75: mol_type = other DNA
aataactaataatcctactttgttaattttcatctcattatgtcttttgggtatcgtaaatatcatctggtattc

SEQ ID NO: 350785 - DNA, 75 bp, synthetic construct
  source 1..75: mol_type = other DNA
tccattctttgcgttactattaatcgtaatggatagttatattaataagcgaattaattataagttatattgttt

SEQ ID NO: 350786 - DNA, 75 bp, synthetic construct
  source 1..75: mol_type = other DNA
atgaacgccagaatcagaaacgaaatccaggcattaattcgaatcaaaatgcgtaataacaatggcggagactta

SEQ ID NO: 350787 - DNA, 75 bp, synthetic construct
  source 1..75: mol_type = other DNA
ggacgcaggggacgtattcttcccttgccctgaaagcggttcagttatcgctgcggcatgttccgtcagtacggt

SEQ ID NO: 350788 - DNA, 75 bp, synthetic construct
  source 1..75: mol_type = other DNA
gccaaaggcgaaaagaactgaacctgacacaacaagcactggctgatttgactggtgtgaaccgtgtcacggtta

SEQ ID NO: 350789 - DNA, 75 bp, synthetic construct
  source 1..75: mol_type = other DNA
cctgattgcctttgaccattacagcatttgtgcacgttactgtggtgaatcgatattctgtgccattgtgtatgg

SEQ ID NO: 350790 - DNA, 75 bp, synthetic construct
  source 1..75: mol_type = other DNA
atagccctttcgcatacttgatgccacttaaccctgcctttaaacccatcccgatagatggtaattgccggattg

SEQ ID NO: 350791 - DNA, 75 bp, synthetic construct
  source 1..75: mol_type = other DNA
gcgactgtgaagaaacttgtttgggatagcccttactcatatctcatgccgcttaatcccgcctttaagccgatc

SEQ ID NO: 350792 - DNA, 75 bp, synthetic construct
  source 1..75: mol_type = other DNA
tatttaatggtagtaactatttttgttcccgagagggtgaaaataattcatcccccagttctactctacttacta

SEQ ID NO: 350793 - DNA, 75 bp, synthetic construct
  source 1..75: mol_type = other DNA
gacaatattagtgcaatagatcatgcaggagcagtatcagatataaaaaatattgtagacaaatttttaggcgga

SEQ ID NO: 350794 - DNA, 75 bp, synthetic construct
  source 1..75: mol_type = other DNA
ggtagtttattagaaaaattacagttaagtggctacgttttttctgacatcaacataattgcagaatacttattg

SEQ ID NO: 350795 - DNA, 75 bp, synthetic construct
  source 1..75: mol_type = other DNA
tttaactactgttttaaaactttcaccagacattctggatgactttaaatctacagtagagaaaaacaaaaaaga

SEQ ID NO: 350796 - DNA, 75 bp, synthetic construct
  source 1..75: mol_type = other DNA
cacacctctgaggtcatccgcgtgggtaagggcggtgattatgagcctcgatgcactggtgatggatgcgaccaa

SEQ ID NO: 350797 - DNA, 75 bp, synthetic construct
  source 1..75: mol_type = other DNA
tctcaggtttatatcgaaggtcagctgcgtacccgtaaatggaccgatcaatccggtcaggatcgctacaccact

SEQ ID NO: 350798 - DNA, 75 bp, synthetic construct
  source 1..75: mol_type = other DNA
atgagtgaaaagaaaacaacttactgtcaggtagcattgtctgataaggccaatgacaaacttggaaagtttcaa

SEQ ID NO: 350799 - DNA, 75 bp, synthetic construct
  source 1..75: mol_type = other DNA
gaggaatacctgcaaagaaatatttagaacacggtttgttttctgaatatagacaggacggtacaattccttatg

SEQ ID NO: 350800 - DNA, 75 bp, synthetic construct
  source 1..75: mol_type = other DNA
tttaaacaatatggatgtgattaataatgttattgttccacaaaaaacaataaagaaaaacaaattatctgtcgt

SEQ ID NO: 350801 - DNA, 75 bp, synthetic construct
  source 1..75: mol_type = other DNA
tacaaatatcgaatttcacccacaaagtcttctttttgatagagattcgaaaggaaagtgccttggtttatctct

SEQ ID NO: 350802 - DNA, 75 bp, synthetic construct
  source 1..75: mol_type = other DNA
gtgatgtttatcatatttcagatatctataaaatgtccagaggtagaaaattgtttaaattaaatgtagaaaaga

SEQ ID NO: 350803 - DNA, 75 bp, synthetic construct
  source 1..75: mol_type = other DNA
tcgcccctaatgaaaaaaaatttatttccctaatagagccagataagttgtcattcaatattgatgtttttagag

SEQ ID NO: 350804 - DNA, 75 bp, synthetic construct
  source 1..75: mol_type = other DNA
ccgataactattttttctcatgaagtaaaaaactatgctgtttatgtgaatcaaattaatgagcgccataagtta

SEQ ID NO: 350805 - DNA, 75 bp, synthetic construct
  source 1..75: mol_type = other DNA
ttattatttacagaaactcagcaagctgcatgttgttgggtctgacagagtcggtaaaggtagtgctgttcggtg

SEQ ID NO: 350806 - DNA, 75 bp, synthetic construct
  source 1..75: mol_type = other DNA
gacgagtatttaccagagactttgcttgctaaagggtatggggcacaggcgtatgatatagaaggaacgtgcatc

SEQ ID NO: 350807 - DNA, 75 bp, synthetic construct
  source 1..75: mol_type = other DNA
aaatttgcccacaacagctgtttgtacaatgacgcttgagttgggaattgatatcggtaaggttaaatcggttat

SEQ ID NO: 350808 - DNA, 75 bp, synthetic construct
  source 1..75: mol_type = other DNA
gctgggtattgatattggtaaggtgcagtctgtcatacaagtgacacctccgcattctgtttccagtctgcgtca

SEQ ID NO: 350809 - DNA, 75 bp, synthetic construct
  source 1..75: mol_type = other DNA
cagatccgtcgtgaacatcctgatctggtgctctataacggttacgacgaaatcttcgcctctggtcttctggcg

SEQ ID NO: 350810 - DNA, 75 bp, synthetic construct
  source 1..75: mol_type = other DNA
tttaaagcaaattcatttgctggcgttatagaaatcgataactccagtgtagcttccgttcagcacgcgctgaaa

SEQ ID NO: 350811 - DNA, 75 bp, synthetic construct
  source 1..75: mol_type = other DNA
atgagcagtgcctacaatagtctcgatccccgtgtccgtaggtgggtttataagcaaggctggtcatcattaagg

SEQ ID NO: 350812 - DNA, 75 bp, synthetic construct
  source 1..75: mol_type = other DNA
gacgagtatttaccagagtcccttcttgcgaaagggtatggtgcaaaggcgtatgaaacagaaggtacgcgcatc

SEQ ID NO: 350813 - DNA, 75 bp, synthetic construct
  source 1..75: mol_type = other DNA
agcaacggctggatgcgaaggttaacctggcgggcggcatcaacgagaattgttatcttgcacagcttgctgccc

SEQ ID NO: 350814 - DNA, 75 bp, synthetic construct
  source 1..75: mol_type = other DNA
cagaacacgctttcggctattacagggcagggcgctgaactggctgcgatgttgactaacggtaaaaccggggga

SEQ ID NO: 350815 - DNA, 75 bp, synthetic construct
  source 1..75: mol_type = other DNA
tccagaaaaattcttggataaatacgacgagtatttaccagaatccctgcttgcgaaaggatttggggaaaaagc

SEQ ID NO: 350816 - DNA, 75 bp, synthetic construct
  source 1..75: mol_type = other DNA
ctttgctaacagtcgaaagcgtactgaaagcatagcggcaacactgagcgacatgtgtgaagcaaatgtcgttcc

SEQ ID NO: 350817 - DNA, 75 bp, synthetic construct
  source 1..75: mol_type = other DNA
caattttagcccgtgatcgtgatgtactaattagtgcaggtacagctgcgggtaaaacagaggctttctttcttc

SEQ ID NO: 350818 - DNA, 75 bp, synthetic construct
  source 1..75: mol_type = other DNA
cctggcgggcggcatcaatgaggatttttatcttgcacagcttgctgccctgggcagaccagacgccaccatcac

SEQ ID NO: 350819 - DNA, 75 bp, synthetic construct
  source 1..75: mol_type = other DNA
tcgaatgataggtggggagtatggggcattatggcgtaatgatggcgctaaaacttacctgctgcttaccaatca

SEQ ID NO: 350820 - DNA, 75 bp, synthetic construct
  source 1..75: mol_type = other DNA
gggaagataacggtatcacccgttacgtcactgaaattcttgttaagaccacgggcaccgtgcagatgctgggac

SEQ ID NO: 350821 - DNA, 75 bp, synthetic construct
  source 1..75: mol_type = other DNA
actcagccggaagaggggcaacagttcagcggtcagcctcagccggaaccacaggcggaggccggtacgaaaaaa

SEQ ID NO: 350822 - DNA, 75 bp, synthetic construct
  source 1..75: mol_type = other DNA
tgcgctttattatctccgggaactgcaccgacagcatatagtggagcctgaccgcagtggtaagggaagcaccat

SEQ ID NO: 350823 - DNA, 75 bp, synthetic construct
  source 1..75: mol_type = other DNA
ttattatctccgggaattgaaccggctgcatatcgtggagcccgaccgtagtggtaagggaagcgccatctactg

SEQ ID NO: 350824 - DNA, 75 bp, synthetic construct
  source 1..75: mol_type = other DNA
taaccgccgcgcatgtggctgcttttgccagaagggcaacggatacgtatgccgatgcggatgggggcgttccat

SEQ ID NO: 350825 - DNA, 75 bp, synthetic construct
  source 1..75: mol_type = other DNA
ttttaccttgcacagcttgctgccctgggcagaccagacgccaccatcacgcgatacgacaaaagcacgttcacc

SEQ ID NO: 350826 - DNA, 75 bp, synthetic construct
  source 1..75: mol_type = other DNA
gggctggataccgtaggtgaagcgatgaacgatgctgaaatttgcgcattcgttgaaaaagccatctacgaagaa

SEQ ID NO: 350827 - DNA, 75 bp, synthetic construct
  source 1..75: mol_type = other DNA
taacaatcgaagatccgctggaaggacagatactgggagcaacacagactccgattatctgcgacaaatccgacg

SEQ ID NO: 350828 - DNA, 75 bp, synthetic construct
  source 1..75: mol_type = other DNA
atgacagagcgtgaactgtccattatccgtgcgctgggtgaagaattctccacagtgctggcggatttacagcgc

SEQ ID NO: 350829 - DNA, 75 bp, synthetic construct
  source 1..75: mol_type = other DNA
agctattcatattgatgaacctgtggtgacgccaatgcaggcgcggcaaattaacgcgctgatggcgaccagtgg

SEQ ID NO: 350830 - DNA, 75 bp, synthetic construct
  source 1..75: mol_type = other DNA
tctggcgggcggcatcaatgaggatttttatcttgcacagcttgctgccctgggcagaccagacgccactatcac

SEQ ID NO: 350831 - DNA, 75 bp, synthetic construct
  source 1..75: mol_type = other DNA
acttgctgcaaacccagagtttgtggaattgacggttgatgtggcggcgggaaaagtatcgttagaagatatcgt

SEQ ID NO: 350832 - DNA, 75 bp, synthetic construct
  source 1..75: mol_type = other DNA
gcttgctgtctggcggcggcgggcgaagtggcaaccattagcgatggtctggcgcgcattaagcaatcattttaa

SEQ ID NO: 350833 - DNA, 75 bp, synthetic construct
  source 1..75: mol_type = other DNA
gtttggccccgcttacaaaggtattccgatcgcgaccacaaccgctgtggcactggcggagcatcatgaccttga

SEQ ID NO: 350834 - DNA, 75 bp, synthetic construct
  source 1..75: mol_type = other DNA
tgaaagacctgattgcttacctggaagagaagccggaaatggcggaacatctggcggcggttaaggcctatcgcg

SEQ ID NO: 350835 - DNA, 75 bp, synthetic construct
  source 1..75: mol_type = other DNA
catctcatgcgttcgcgttactgcgcttttgtgatgcaagacgcagattatttaataaagacctggcatccctct

SEQ ID NO: 350836 - DNA, 75 bp, synthetic construct
  source 1..75: mol_type = other DNA
actatattgacggtacacgtccgcagtttggccgcaacgatccctgcccttgtggttcaggtaaaaaatttaaaa

SEQ ID NO: 350837 - DNA, 75 bp, synthetic construct
  source 1..75: mol_type = other DNA
tggcgaaactggcgacgccgtttgctgaaggtgaggcgctgcgtctttccagcgtctcacatcctgagtacatcg

SEQ ID NO: 350838 - DNA, 75 bp, synthetic construct
  source 1..75: mol_type = other DNA
gcgcctgcgctcaatgtcagcgaagaagaggtgacgaccggactggatcgctttgcagctgcttgcgaccacttt

SEQ ID NO: 350839 - DNA, 75 bp, synthetic construct
  source 1..75: mol_type = other DNA
tcaaagtttataaatgctcctatgattatattgatcaggttatgtcaacaattgatatgtataacgtcggatttt

SEQ ID NO: 350840 - DNA, 75 bp, synthetic construct
  source 1..75: mol_type = other DNA
tatcccggcagacgacgtatatttaccagtaagaccagtccggttgcgccctttgaaccagaagtcaaacgtcag

SEQ ID NO: 350841 - DNA, 75 bp, synthetic construct
  source 1..75: mol_type = other DNA
ccagtctgtcatttgcggaagttgaaaaagaggcaattattaacgcagcccaagtcacaggcggtcgcattcagg

SEQ ID NO: 350842 - DNA, 75 bp, synthetic construct
  source 1..75: mol_type = other DNA
ctggtgaccctcccggcgctgctgcgccgcgccatcaaacacgcccgtggcctgaatcacgtcgaagtcaccttt

SEQ ID NO: 350843 - DNA, 75 bp, synthetic construct
  source 1..75: mol_type = other DNA
ctaaatgcattgatggcattacagctaattccgatcgaactgcagagatggtaatgcattcctgcggtattgtga

SEQ ID NO: 350844 - DNA, 75 bp, synthetic construct
  source 1..75: mol_type = other DNA
gcgcatggcccggtaatgattttgaactgtatagcgtcattgagaaccttgccctgagcagcgacaacggacgca

SEQ ID NO: 350845 - DNA, 75 bp, synthetic construct
  source 1..75: mol_type = other DNA
cgccattaccttttatgggacggcggcactgcgccagttcgagatgctggggagctatccgctcaatgagtcggt

SEQ ID NO: 350846 - DNA, 75 bp, synthetic construct
  source 1..75: mol_type = other DNA
cgcatcgtgagcggtgcttacggcaaagcagcaagcgctctgcatcgggtgaagagtggtatctgtcagggaatt

SEQ ID NO: 350847 - DNA, 75 bp, synthetic construct
  source 1..75: mol_type = other DNA
ttctggcgcatcgtgagcggtgcttacggaaaagcagcaagcgcgctgcatcgggtgaagagtggtatctgtcag

SEQ ID NO: 350848 - DNA, 75 bp, synthetic construct
  source 1..75: mol_type = other DNA
aaatttttgagcgtaacgtaggttcagaaagcccgctgaaaattaaacgtgggcaaaataatctctggaataacg

SEQ ID NO: 350849 - DNA, 75 bp, synthetic construct
  source 1..75: mol_type = other DNA
actttcgttccaatttgcatcgcggtggttcagcaagtattgccaatatcacgccgcaggagcgcgaaattgcta

SEQ ID NO: 350850 - DNA, 75 bp, synthetic construct
  source 1..75: mol_type = other DNA
acgcagtgatcccgcgtattggtaccgccattaccttttatgggacggcggcactgcgccagttcgagatgctgg

SEQ ID NO: 350851 - DNA, 75 bp, synthetic construct
  source 1..75: mol_type = other DNA
atgagtctattgaatgacgttcagaaattcattgaagcccatccggggtgtacttccggtgacattgcggatgct

SEQ ID NO: 350852 - DNA, 75 bp, synthetic construct
  source 1..75: mol_type = other DNA
atgagtctatttaatgacgttcagaaattcattgaagcccatccggggtgtacttccggggacattgcggatgct

SEQ ID NO: 350853 - DNA, 75 bp, synthetic construct
  source 1..75: mol_type = other DNA
cctaaaaattgccaacatgcggtacaagtggctgatgcgagtattcgtactcctgataataagatcatattagag

SEQ ID NO: 350854 - DNA, 75 bp, synthetic construct
  source 1..75: mol_type = other DNA
gtgagcatgagtattttgaatgacgttcagaaattcattgaagcccatccggggtgtacttcaggtgacattgcg

SEQ ID NO: 350855 - DNA, 75 bp, synthetic construct
  source 1..75: mol_type = other DNA
atgtcggcactaacgatccccgggtgattttgtgcctgacccgccaggcggaagaactggagtccaggggcttat

SEQ ID NO: 350856 - DNA, 75 bp, synthetic construct
  source 1..75: mol_type = other DNA
atgagtctgtttaatgacgttcagaaattcattgaagcccatccggggtgtacttccggagacattgcggatgct

SEQ ID NO: 350857 - DNA, 75 bp, synthetic construct
  source 1..75: mol_type = other DNA
cccctgaccgcgcgcggtattgagcaagcgcaaaatctgcatacgctgctacatgatgtttcctttgacctggtt

SEQ ID NO: 350858 - DNA, 75 bp, synthetic construct
  source 1..75: mol_type = other DNA
gccgcgtaacgctggggcaacgttgtatggtgatgtggtggcgatggacgatctcatcgttcagccgttatctgg

SEQ ID NO: 350859 - DNA, 75 bp, synthetic construct
  source 1..75: mol_type = other DNA
gccaacgtcagtgcaggatgtggctggttggccgatgcagggtaatttctactggtcatcactggcggggatgag

SEQ ID NO: 350860 - DNA, 75 bp, synthetic construct
  source 1..75: mol_type = other DNA
tcgaccaaaactggcggcggaagtcgataatgaagacggtacggttaacgatcacaatgaaacctggtccacctt

SEQ ID NO: 350861 - DNA, 75 bp, synthetic construct
  source 1..75: mol_type = other DNA
atttcggtgcgctggcgacggtggtgctaacgtcagtgcaggatgtggctggctggccgatgcagggtaactact

SEQ ID NO: 350862 - DNA, 75 bp, synthetic construct
  source 1..75: mol_type = other DNA
gcgcgacggtttccagcgtcacactgacctcaacagcgtttgatgctgacagccaggcggcgaaagtgaaaaaag

SEQ ID NO: 350863 - DNA, 75 bp, synthetic construct
  source 1..75: mol_type = other DNA
catggtcatatatatatagtactcaaaaagcgacggcagattgttcgctggaatatcaaccgcgcctcagcgaat

SEQ ID NO: 350864 - DNA, 75 bp, synthetic construct
  source 1..75: mol_type = other DNA
ctggcaacgttatctggataaaaaagagcacatctctcatgaaatgttagatgtcagtgaaatcactaccaccgc

SEQ ID NO: 350865 - DNA, 75 bp, synthetic construct
  source 1..75: mol_type = other DNA
aggcaatgcgccgttttatgcgtttgttgagatgatcccgaaactggcgcactcttccggcattaacccggcgta

SEQ ID NO: 350866 - DNA, 75 bp, synthetic construct
  source 1..75: mol_type = other DNA
tgccgggatggcaaaaatttcgccttttgaagtggttaaacgcacctcggtgccggtgcttgttgggctggtgat

SEQ ID NO: 350867 - DNA, 75 bp, synthetic construct
  source 1..75: mol_type = other DNA
cgcctcgctggctggctgaagagttcgctgaatcattagggttacaggtattaccgttgccgttaaaacaaaata

SEQ ID NO: 350868 - DNA, 75 bp, synthetic construct
  source 1..75: mol_type = other DNA
atgccagaggtacaaacagatcaaccagagacggcggagttaagcaaaccacagctacgcatggtcgatctcaac

SEQ ID NO: 350869 - DNA, 75 bp, synthetic construct
  source 1..75: mol_type = other DNA
gcccgtaaggaggtggcgcatacctcacgacataacgagttttctatcggtgccagcgcctcgttgtgggaatgt

SEQ ID NO: 350870 - DNA, 75 bp, synthetic construct
  source 1..75: mol_type = other DNA
ggaagagcgtcttcaaccacctcggcattaatgctgtgcctggtaaaccctcatccagaagttgcgtccattgag

SEQ ID NO: 350871 - DNA, 75 bp, synthetic construct
  source 1..75: mol_type = other DNA
atggatgttacggctaaatatgaattgattggcctgatggcttatcctatccgccacagtttatcgcctgaaatg

SEQ ID NO: 350872 - DNA, 75 bp, synthetic construct
  source 1..75: mol_type = other DNA
gtgcatcaacggcaattggcgcgcagggcgcgattgaaggtttaaaagagattaaaatcttcaaccgtcgggatg

SEQ ID NO: 350873 - DNA, 75 bp, synthetic construct
  source 1..75: mol_type = other DNA
ttaccagtaagaccaacccggttgcgccctttgaaccagaagtcaaacgtcaggctgtcatggcactctgtacac

SEQ ID NO: 350874 - DNA, 75 bp, synthetic construct
  source 1..75: mol_type = other DNA
atcgcaaggcttagtgaatatcagcactatcagaatattttagtcgtcagccatcagggcgtactgagtctgtta

SEQ ID NO: 350875 - DNA, 75 bp, synthetic construct
  source 1..75: mol_type = other DNA
tatgtggcattttcgcgttgaccaggggtgttggagcgccattgatatcaaccaaaaattcgcgacgctacgcgt

SEQ ID NO: 350876 - DNA, 75 bp, synthetic construct
  source 1..75: mol_type = other DNA
ttggcgactgggagatgcgacatcatcgcgacctcatgcaagaagatgccgaaaactatagcgcgtggtgcaatg

SEQ ID NO: 350877 - DNA, 75 bp, synthetic construct
  source 1..75: mol_type = other DNA
atttgtcagttttgttgctcgatttaccgagggtggcaaaacaggtgcaataattgaacgttcgcgatttttgaa

SEQ ID NO: 350878 - DNA, 75 bp, synthetic construct
  source 1..75: mol_type = other DNA
gccgaacagggtaaaacaggagcgataattgaacgttcgcgatttttgaaagaaaacggtcagtggtactatatt

SEQ ID NO: 350879 - DNA, 75 bp, synthetic construct
  source 1..75: mol_type = other DNA
gtcgcacctgatccagaacatctcatgcgttcgcgttactgcgcttttgtgatgcaggacgcagattatttaatt

SEQ ID NO: 350880 - DNA, 75 bp, synthetic construct
  source 1..75: mol_type = other DNA
gccgcagacaatcgtatcctctatgccagcggttggtttatcgaccagaatcaaggcccttacatcagtcacggt

SEQ ID NO: 350881 - DNA, 75 bp, synthetic construct
  source 1..75: mol_type = other DNA
taccgaaatttgagatggcgatggaattaggtaactccgaggctatcaaacatgcggtgcgtcatgggttgggaa

SEQ ID NO: 350882 - DNA, 75 bp, synthetic construct
  source 1..75: mol_type = other DNA
aaacattaaaactaacaaggagagaaatgtctgaagaggatttttattatcctattttagctcacgggttggaac

SEQ ID NO: 350883 - DNA, 75 bp, synthetic construct
  source 1..75: mol_type = other DNA
acctgcgaagaacctttggtcgtgttgcagaaggactcacttcatatagtgtggtgaaaaggttgctcaaccatc

SEQ ID NO: 350884 - DNA, 75 bp, synthetic construct
  source 1..75: mol_type = other DNA
agataaacgcaaatgggtttttcctgcccggtcgtcgcgaagcaaagttgggcactattcagacagcaaaagcct

SEQ ID NO: 350885 - DNA, 75 bp, synthetic construct
  source 1..75: mol_type = other DNA
ttataatcaataagttatctatcgacgtgaaaccagatctcgaccagcaagggcgagtagcctacttacccaatc

SEQ ID NO: 350886 - DNA, 75 bp, synthetic construct
  source 1..75: mol_type = other DNA
acaacggttatgtcgggtgctgaatatcgatatcggtggcggcacggcgaactacgccctgttcgatgccggaaa

SEQ ID NO: 350887 - DNA, 75 bp, synthetic construct
  source 1..75: mol_type = other DNA
caaacgcgaaattagctggcaaagtccggtgttctttacccctgtcgataaacagggcggtttaaaagaagcgga

SEQ ID NO: 350888 - DNA, 75 bp, synthetic construct
  source 1..75: mol_type = other DNA
tcggtatcgatatcggcaccaccaccacccaggtgattttctcccacctggagctggttaaccgtgcggcggtgt

SEQ ID NO: 350889 - DNA, 75 bp, synthetic construct
  source 1..75: mol_type = other DNA
ctatcagtgaagtgtttgctcaataccgccagcatctgctgggtagagcaaaaccagctaaacccaacaccttgg

SEQ ID NO: 350890 - DNA, 75 bp, synthetic construct
  source 1..75: mol_type = other DNA
tgtcctgttaggtgccagaaaagaagaaacagcatctttgtgttggagggaagctatcaccaatgaagaagcaaa

SEQ ID NO: 350891 - DNA, 75 bp, synthetic construct
  source 1..75: mol_type = other DNA
acccaatccagagcgaaaaccgtatcttatcactgataatcacagggattcacccgttggttttggtgtcaaaat

SEQ ID NO: 350892 - DNA, 75 bp, synthetic construct
  source 1..75: mol_type = other DNA
actattctgatagtaaaagcttacgcgagtatatctgtctggaagccggaataataaagttgggaatgcacgatc

SEQ ID NO: 350893 - DNA, 75 bp, synthetic construct
  source 1..75: mol_type = other DNA
gctcaatatcgacagcatctgttaggaagatcaaaaccggcgaaacccaacacacttaatgttctgaacaaagca

SEQ ID NO: 350894 - DNA, 75 bp, synthetic construct
  source 1..75: mol_type = other DNA
gtttagaactcgttctgaactggaagacagctacaaagcaaaaggtgtcagaaatccgctttcgccaaaagatac

SEQ ID NO: 350895 - DNA, 75 bp, synthetic construct
  source 1..75: mol_type = other DNA
gttgatagtgctggtgggatgataaggcgctggagagatgcttacactctaatgtatggagaagatgctctcaaa

SEQ ID NO: 350896 - DNA, 75 bp, synthetic construct
  source 1..75: mol_type = other DNA
ttaattaataaacagttaggtcttatcgatgcagggacaattatttgggataaacgcaatcccatgaatggtggt

SEQ ID NO: 350897 - DNA, 75 bp, synthetic construct
  source 1..75: mol_type = other DNA
agcacttcctggagcggatacaagagacgaactcctagctaaggcccaggaatttgagcggaagcataagcccta

SEQ ID NO: 350898 - DNA, 75 bp, synthetic construct
  source 1..75: mol_type = other DNA
acaattacttctacagctcgggacagagcgccgggcagattatccgccagaacgtcacgatgaacgccctgcgca

SEQ ID NO: 350899 - DNA, 75 bp, synthetic construct
  source 1..75: mol_type = other DNA
gctatgtgtttgcccttatgtggctgcagacatggcctctgctgtacgccattctgaacagtgccatgacattct

SEQ ID NO: 350900 - DNA, 75 bp, synthetic construct
  source 1..75: mol_type = other DNA
catcttacaacttatacccagcgtaatacagcagactactttattcataaagatctcggtggttttttaactaac

SEQ ID NO: 350901 - DNA, 75 bp, synthetic construct
  source 1..75: mol_type = other DNA
atgaagaaaagtcggttcaggaaagaatgcccggggctgacagtccacaggaactgatgaaaagggcaaaggagt

SEQ ID NO: 350902 - DNA, 75 bp, synthetic construct
  source 1..75: mol_type = other DNA
gttcgtgaaaccagacctgtgcgcaatttctatgtcggcactaacgatccccgggtgattttgtgcctgacccgc

SEQ ID NO: 350903 - DNA, 75 bp, synthetic construct
  source 1..75: mol_type = other DNA
agagagcgcaggagccggaaccacaaccagttcgtgaaaccagacctgtgcgcaatttctatgtcggcactaacg

SEQ ID NO: 350904 - DNA, 75 bp, synthetic construct
  source 1..75: mol_type = other DNA
gaagtattaatacttcgttcctatattcatttggataatgattctgaaatacaaaagtcaatagaaagaataaca

SEQ ID NO: 350905 - DNA, 75 bp, synthetic construct
  source 1..75: mol_type = other DNA
gggaatacatgggatgcagttggtgcgtataatgcaggctactttaacacaccaaatgcagtagaactcagaaga

SEQ ID NO: 350906 - DNA, 75 bp, synthetic construct
  source 1..75: mol_type = other DNA
ctacaggttcaaaaaagtcttctgttatgtattgtcctttatgtatgttcttataaagacttcttgccaaagtaa

SEQ ID NO: 350907 - DNA, 75 bp, synthetic construct
  source 1..75: mol_type = other DNA
tcccgcgccagactgaggttttgcaggaatcggaaccgcaaccagttcgtgaaaccagacctgtgcgcaatttct

SEQ ID NO: 350908 - DNA, 75 bp, synthetic construct
  source 1..75: mol_type = other DNA
gtggccccatgtgaaaccgctttaaacccatgtaaatcgataaatttgtataccagaagtattctagctactatc

SEQ ID NO: 350909 - DNA, 75 bp, synthetic construct
  source 1..75: mol_type = other DNA
cacagacggaaaccgggataaatacgcccgctgagacctggcagattgatttcaccgcgcgtatggccggaatgg

SEQ ID NO: 350910 - DNA, 75 bp, synthetic construct
  source 1..75: mol_type = other DNA
cctgccactttccgctttgaatgcatcccatacgagggcctgggcaacagggaattcacgctgcgattaagcatt

SEQ ID NO: 350911 - DNA, 75 bp, synthetic construct
  source 1..75: mol_type = other DNA
gggatgagtcgccagatagcccctcaaacgcgctcaaaagctctcagacgcacgaaacgggttttagatgcccgc

SEQ ID NO: 350912 - DNA, 75 bp, synthetic construct
  source 1..75: mol_type = other DNA
atacgcacactgtcgggtttgccgttagtgtgcagtctggcggttcggattatggtgtacccagacaggataagg

SEQ ID NO: 350913 - DNA, 75 bp, synthetic construct
  source 1..75: mol_type = other DNA
aaaggtagcctgggagaacagcaggccagcagcgattttttgcgtaaggatgcaaaccttgctgatgttaacgac

SEQ ID NO: 350914 - DNA, 75 bp, synthetic construct
  source 1..75: mol_type = other DNA
acaccattacggttaatgctgcgggtacttcagaaaacactgttaaaaacattgcattaaactatatcgtgagac

SEQ ID NO: 350915 - DNA, 75 bp, synthetic construct
  source 1..75: mol_type = other DNA
gagcgtccgttcgtactcggcccaactcatgaagaagttattacagacctgattcgtaacgagcttagctcttac

SEQ ID NO: 350916 - DNA, 75 bp, synthetic construct
  source 1..75: mol_type = other DNA
gctggttgcgctgctggtgcgcggtgaccacgaactgaacgaagtaaaagcggagaaactgccgcaggttgccag

SEQ ID NO: 350917 - DNA, 75 bp, synthetic construct
  source 1..75: mol_type = other DNA
taaaatggcagtggtgtaaaaaacgcgaagtacaaggtaaatcaaccgaacctgatttgcgatcctgtgcaaata

SEQ ID NO: 350918 - DNA, 75 bp, synthetic construct
  source 1..75: mol_type = other DNA
tgcaagcctcgtcagccgtgatttttgccagatttcgaggttttcacgttcaacagctcctgcacgttttttgcc

SEQ ID NO: 350919 - DNA, 75 bp, synthetic construct
  source 1..75: mol_type = other DNA
gagcgtccgttcgtactcggcccgactcacgaagaagtgatcactgacctgattcgtaacgagcttagctcttac

SEQ ID NO: 350920 - DNA, 75 bp, synthetic construct
  source 1..75: mol_type = other DNA
gtatcggcgctcatgctcacactgtagcaataggcgcacacagtcacaccattaccgtcgcagcgtcgggtaaca

SEQ ID NO: 350921 - DNA, 75 bp, synthetic construct
  source 1..75: mol_type = other DNA
ccgtgactcaatttgagttttattggtttctcattttgcgtcacgaactgagacggaaactacttaaccaggccg

SEQ ID NO: 350922 - DNA, 75 bp, synthetic construct
  source 1..75: mol_type = other DNA
tcacatcctcaatttatatttgtttttgccgccgttcgtcgtgcagaacgtaaaccacgtatcagtatgctgcgt

SEQ ID NO: 350923 - DNA, 75 bp, synthetic construct
  source 1..75: mol_type = other DNA
catgcacgtctttcactggtccatgaatatgtgctttgccttgctgctcgcctgcctgtccgggaggtgatctaa

SEQ ID NO: 350924 - DNA, 75 bp, synthetic construct
  source 1..75: mol_type = other DNA
taactgcattgcataacaagagaagcttcaaccgccttgggtgcgattatctgctactaaccgttctcttaggtg

SEQ ID NO: 350925 - DNA, 75 bp, synthetic construct
  source 1..75: mol_type = other DNA
ttcttcgtaagtttgatgaaatcgcaagtagagcaagaaccgctgctgaacaaaccttccgttgggccaatgttg

SEQ ID NO: 350926 - DNA, 75 bp, synthetic construct
  source 1..75: mol_type = other DNA
tgactgcattacacaataagagaagcttcaaccgccttgggtgcgattatctgctactcaccgttctcttaggtg

SEQ ID NO: 350927 - DNA, 75 bp, synthetic construct
  source 1..75: mol_type = other DNA
cgagtttaaggaactgtgctgtaatcgtatcgtcgatgcagctgtgaaccacaatcaccctgtcgcgcagggcat

SEQ ID NO: 350928 - DNA, 75 bp, synthetic construct
  source 1..75: mol_type = other DNA
gctgaataaggccagcggaacgctggcgatgattgttcatgcaccggcgcagcaaaagctgaaaacgaaagaagg

SEQ ID NO: 350929 - DNA, 75 bp, synthetic construct
  source 1..75: mol_type = other DNA
aaaccgaaagcgcgaaaaaaccttgcactaggtgagctggcgacactcgacagaaatgatgtgttgccggtgggg

SEQ ID NO: 350930 - DNA, 75 bp, synthetic construct
  source 1..75: mol_type = other DNA
ttttacgtcgtagctcaggcacacccattttccgggctgtggtgtttgtgtgtacaccgtggttcattcaagata

SEQ ID NO: 350931 - DNA, 75 bp, synthetic construct
  source 1..75: mol_type = other DNA
atttttctggcttgcatcctgcagtcatttccaggtatattttttccgctgccgcaaaatcggcagccggaattg

SEQ ID NO: 350932 - DNA, 75 bp, synthetic construct
  source 1..75: mol_type = other DNA
acactcttcatcaggcgtgccgcttactggaattgaagaatggttggtcccattcaaacggtgcatatgtggtta

SEQ ID NO: 350933 - DNA, 75 bp, synthetic construct
  source 1..75: mol_type = other DNA
aaaagaacaaaggaaaatgaggaagcaaggaggaactctgttgacgcagactctcatatgcagaaagtatcctga

SEQ ID NO: 350934 - DNA, 75 bp, synthetic construct
  source 1..75: mol_type = other DNA
tgacatatccaagaatgaattccgtgtattaacctatatcttggagtatatggagtttggaaatctgatcaatct

SEQ ID NO: 350935 - DNA, 75 bp, synthetic construct
  source 1..75: mol_type = other DNA
tcatagttttattttagatgatcttaagaataaatatggaataaaaggatatctgatcgcttttgcttggcttaa

SEQ ID NO: 350936 - DNA, 75 bp, synthetic construct
  source 1..75: mol_type = other DNA
cgttgagagcggttcgccggccaccagttccgcgccatacagggtatataacattggcaacagctcgccagtgga

SEQ ID NO: 350937 - DNA, 75 bp, synthetic construct
  source 1..75: mol_type = other DNA
tccagctcggtttacggccttaaccgtaaaatgccgttctccaccgaagattccgtcgatcatccggtctccctg

SEQ ID NO: 350938 - DNA, 75 bp, synthetic construct
  source 1..75: mol_type = other DNA
gaagacggtttgcgttttgaagacgaatttgtgcgtcacaaaatgcttgacgcgatcggtgacttgttcatgtgt

SEQ ID NO: 350939 - DNA, 75 bp, synthetic construct
  source 1..75: mol_type = other DNA
ggtagttcaccaccagggaagggcatatgcaaatctaaatggtgttgttgctgtcaatttgaacgatgaaaatgc

SEQ ID NO: 350940 - DNA, 75 bp, synthetic construct
  source 1..75: mol_type = other DNA
gcgcaggcgataaaaaacggagatatgccaccagctattgactggttttccattcgcccaaccagggtgaaagca

SEQ ID NO: 350941 - DNA, 75 bp, synthetic construct
  source 1..75: mol_type = other DNA
gttgctccatataccagtttgctattacatcgggcatccggcatcaaagacattattcatctgatcaggctgctt

SEQ ID NO: 350942 - DNA, 75 bp, synthetic construct
  source 1..75: mol_type = other DNA
ttaagcaatgcaagaaatgttcaggctgagattgaacaataccctgatggttatcaaaatctttctcaacaggaa

SEQ ID NO: 350943 - DNA, 75 bp, synthetic construct
  source 1..75: mol_type = other DNA
actgtcattccggcatttttactgtcagatgacagtgagagatttaaaaacctctcacctttaaagcaaacaata

SEQ ID NO: 350944 - DNA, 75 bp, synthetic construct
  source 1..75: mol_type = other DNA
gagcgtgcgcttcagggacatttttcagaaccgatttgccagttactcgcacaactggttgggagcgcatcggca

SEQ ID NO: 350945 - DNA, 75 bp, synthetic construct
  source 1..75: mol_type = other DNA
cacctacatcgacgacatcgtcgaggcagtggtgcgcgttcaggatgtgatcccgcaggccaatgctgactggac

SEQ ID NO: 350946 - DNA, 75 bp, synthetic construct
  source 1..75: mol_type = other DNA
gtgtaaccacgaaggattcgcaggggaatcctgtaggaaataccgcatttaccctcaaacgaaactacagcgtga

SEQ ID NO: 350947 - DNA, 75 bp, synthetic construct
  source 1..75: mol_type = other DNA
acggtgacggctactgacggcacggtatttaaacgcccgcgcttactgaaagagtggtcaactcagtcctctctt

SEQ ID NO: 350948 - DNA, 75 bp, synthetic construct
  source 1..75: mol_type = other DNA
gagcggtatcgcgctgttagtggttggcgtggtcattgcagtcagagcaaaaccggaaaagcctttaactgaatc

SEQ ID NO: 350949 - DNA, 75 bp, synthetic construct
  source 1..75: mol_type = other DNA
cacgcggctgatgtgtctaaccgcagcgaagcgcaaaaaccagacagtacaaagtatatcgtgagctgtgtggat

SEQ ID NO: 350950 - DNA, 75 bp, synthetic construct
  source 1..75: mol_type = other DNA
tatcaacaatgaagactgggcgcgaccagatgcaaccaacaaagcgaacagttcgatctcaggctgcacttcgcc

SEQ ID NO: 350951 - DNA, 75 bp, synthetic construct
  source 1..75: mol_type = other DNA
acggaacggcgacgttgacggtatatcagttccataaaggatatggcgttcgtattccgttgttggcgaaactgg

SEQ ID NO: 350952 - DNA, 75 bp, synthetic construct
  source 1..75: mol_type = other DNA
gaaagatgatagtggcaactctgtaaaagaaggtgccttctcagcagttgcaaatttcaacctgacttatcagta

SEQ ID NO: 350953 - DNA, 75 bp, synthetic construct
  source 1..75: mol_type = other DNA
ctctgtagatcatcctgtttcgctttatgcagcaactaaaaaagcgaatgaactcatggcccatacgtattctca

SEQ ID NO: 350954 - DNA, 75 bp, synthetic construct
  source 1..75: mol_type = other DNA
ttggttttaaaccggaaacgccagtacagcaaggtgttaaaaactttgtagattggtataaagagtactatcaat

SEQ ID NO: 350955 - DNA, 75 bp, synthetic construct
  source 1..75: mol_type = other DNA
gcatcgtgctagcgttagtttccgtggtctgctgggcgtggtatgccctacgcaacgcccgctggctgcgggaaa

SEQ ID NO: 350956 - DNA, 75 bp, synthetic construct
  source 1..75: mol_type = other DNA
gcatcgtgctagcgttagtttccgtggtctgctgggcatggtatgccctgcgcaacgcccgctggctgcgggaaa

SEQ ID NO: 350957 - DNA, 75 bp, synthetic construct
  source 1..75: mol_type = other DNA
gtcacgctgccggtttctctcatcggctatctcgtcgcctgttactggctgaatatgcaaacgccggacttctcc

SEQ ID NO: 350958 - DNA, 75 bp, synthetic construct
  source 1..75: mol_type = other DNA
gcttagccgcagtaatgacacgtttattcgcggatttatgacgcaagttggtgccacacaggcggctggccttgt

SEQ ID NO: 350959 - DNA, 75 bp, synthetic construct
  source 1..75: mol_type = other DNA
catccggtttcacagtggcttgccagcccacaggagatcaaacacgatgcccgatacggggaggaaagtatgacg

SEQ ID NO: 350960 - DNA, 75 bp, synthetic construct
  source 1..75: mol_type = other DNA
accggcctgatggcgtcattatgttcgccacgcggatcaacggttacgtgaaaattcgcggcgtgcgcgtttcgc

SEQ ID NO: 350961 - DNA, 75 bp, synthetic construct
  source 1..75: mol_type = other DNA
atttcttgaccgcgaaaccagcattgcccttaacgtctgcgcacgtcagcatcacctgacgctcagcgcactgtt

SEQ ID NO: 350962 - DNA, 75 bp, synthetic construct
  source 1..75: mol_type = other DNA
tacgcggcgtattcagttaatcgccgaccgcgaatcgctgaatatttcgctgcgtgaggcgctctcgtattccca

SEQ ID NO: 350963 - DNA, 75 bp, synthetic construct
  source 1..75: mol_type = other DNA
gcagtattgccggacatctgtttagcggtgacgacaccagaacagcgctgatttgcggtgacagacgctggagct

SEQ ID NO: 350964 - DNA, 75 bp, synthetic construct
  source 1..75: mol_type = other DNA
gctaaaagtggattattcgccaacagcgtgctgtcggcagtcgtcctcgacacgctggcgctgtgggcggaggat

SEQ ID NO: 350965 - DNA, 75 bp, synthetic construct
  source 1..75: mol_type = other DNA
ctttttgtctatccatcattgaccgtgacctgggatggctgcgccacaaatcctcccaaaacacgcgcatttgga

SEQ ID NO: 350966 - DNA, 75 bp, synthetic construct
  source 1..75: mol_type = other DNA
ctaatgattggacactgcggcgggttacgtgagagtcagtccattggagattatgtcctggcacatgcctatttg

SEQ ID NO: 350967 - DNA, 75 bp, synthetic construct
  source 1..75: mol_type = other DNA
attttctccgctatcgcattttgatgcgcgccgggtagatttttccctcgcgcggttacgccattataccggcac

SEQ ID NO: 350968 - DNA, 75 bp, synthetic construct
  source 1..75: mol_type = other DNA
gcccgacaccccatgttgcgattgcgcatcagtgatgacggaaaacaatatgtggcggcggagcatcctccggct

SEQ ID NO: 350969 - DNA, 75 bp, synthetic construct
  source 1..75: mol_type = other DNA
ttaccggcggggagagtttcgcggagattgcccgtcgcccgggagggacggtagtgatgctctgcctgaaccccg

SEQ ID NO: 350970 - DNA, 75 bp, synthetic construct
  source 1..75: mol_type = other DNA
tcagacttcttgccagcattcaggaaggccgttattaaagcggatgatgcccgtggaattctgaaggcatttaag

SEQ ID NO: 350971 - DNA, 75 bp, synthetic construct
  source 1..75: mol_type = other DNA
tttttcatctcacacaatattttacctacggttaactttccattgttttgttcttcagcaatatattttctgctg

SEQ ID NO: 350972 - DNA, 75 bp, synthetic construct
  source 1..75: mol_type = other DNA
actgttagagaaattgctggataactgccctgccatggtgattgttatctccagctcatggcgtgagtgcgctaa

SEQ ID NO: 350973 - DNA, 75 bp, synthetic construct
  source 1..75: mol_type = other DNA
tgcgcgttctttcttaactgccacaacggcgtgattgcgtttgaagaactgtttaagggaactatcagcagcgtc

SEQ ID NO: 350974 - DNA, 75 bp, synthetic construct
  source 1..75: mol_type = other DNA
tatctgccttgatgacgatgcgaccctgtttcctccagagtacccgcacctgtttcgtacagattattacaccgg

SEQ ID NO: 350975 - DNA, 75 bp, synthetic construct
  source 1..75: mol_type = other DNA
tcagtttgccaaggactcaaatatttctgatcttcaggaaatggcagccagtgaaaaggcttttgttgatgccga

SEQ ID NO: 350976 - DNA, 75 bp, synthetic construct
  source 1..75: mol_type = other DNA
cgacctgaaaaggttgaatcaatgacggctccggtactggtgcgccgccggttaactaaggttgaccgcgttcag

SEQ ID NO: 350977 - DNA, 75 bp, synthetic construct
  source 1..75: mol_type = other DNA
tggtcagcagagattaatgaccctttattactttgtaaatggtgtattccctagaaaagagaaacgttctgaact

SEQ ID NO: 350978 - DNA, 75 bp, synthetic construct
  source 1..75: mol_type = other DNA
tcggcctggcgtgtgtgaatattgctgagttaaaccacggactccccaattttgactgggcacgttatacctctg

SEQ ID NO: 350979 - DNA, 75 bp, synthetic construct
  source 1..75: mol_type = other DNA
tgttagcagggttgatgtgggggcttatttttgtcgggccgttgatcgtaccggaatacccggcaatgttacaat

SEQ ID NO: 350980 - DNA, 75 bp, synthetic construct
  source 1..75: mol_type = other DNA
gtaaagtacgcctgctggggataagcaaacgtggtgacacttatctcagggcattatttatccacggtgcaagag

SEQ ID NO: 350981 - DNA, 75 bp, synthetic construct
  source 1..75: mol_type = other DNA
gtcagaatgaatcgttcgagaggatgcatttgattgagaggttacttgacgcgagtccttcaatgttcatcgtta

SEQ ID NO: 350982 - DNA, 75 bp, synthetic construct
  source 1..75: mol_type = other DNA
acaataggaaagctaaggcaatagcgtatacgatgtcgcttttaagcaggacaagtgaacccttaattgaggggg

SEQ ID NO: 350983 - DNA, 75 bp, synthetic construct
  source 1..75: mol_type = other DNA
gggatgataatgagattttttataaaaaaatgccagaaactcatcatgaactaataaaatccatagttaagcgct

SEQ ID NO: 350984 - DNA, 75 bp, synthetic construct
  source 1..75: mol_type = other DNA
agaaagaaaactcacactgattcaaagaaagagaggattaaaccgaagatgtattttgctggtggagggattaag

SEQ ID NO: 350985 - DNA, 75 bp, synthetic construct
  source 1..75: mol_type = other DNA
tgacgatgattttacttacagacccaaaaagaaaactcacaccgagccaaagaaagagggagttaaagtcagacg

SEQ ID NO: 350986 - DNA, 75 bp, synthetic construct
  source 1..75: mol_type = other DNA
tagataaaacattagataataatattatagataagggtaaagatactgaacttaatgatggcattaatgaagatg

SEQ ID NO: 350987 - DNA, 75 bp, synthetic construct
  source 1..75: mol_type = other DNA
cacaaaaaattgagaaattgcagataaaattgagcaaaattgaagaggaaaaaaacaagatacaatcaaagctgg

SEQ ID NO: 350988 - DNA, 75 bp, synthetic construct
  source 1..75: mol_type = other DNA
acgatgattttacttacagacccaaaaagaaaactcacaccgattcaaagaaagagaggattaaaccgaagatgt

SEQ ID NO: 350989 - DNA, 75 bp, synthetic construct
  source 1..75: mol_type = other DNA
ttacaccaaaaaagaaaactcacaccgagccaaagaaagaaaaagttaaagtcagacgtgtttatgctggaggga

SEQ ID NO: 350990 - DNA, 75 bp, synthetic construct
  source 1..75: mol_type = other DNA
gtacagattgctggcggcagtaattttcgccaggtcgacgcacatacctatgaaggcatgaccgacgccaacggc

SEQ ID NO: 350991 - DNA, 75 bp, synthetic construct
  source 1..75: mol_type = other DNA
aaatcattgtgcttctgggcatgttggcagcctttatgctgtctgactttgcacgggcagaggtggaatggcaga

SEQ ID NO: 350992 - DNA, 75 bp, synthetic construct
  source 1..75: mol_type = other DNA
atagtggtaatgcaatgagtacggtacagggatggccggtaaaagcgacctatctcaccaataccccaagtgaca

SEQ ID NO: 350993 - DNA, 75 bp, synthetic construct
  source 1..75: mol_type = other DNA
tttacggctacagatgccaaagacgtgatttttactgtgatcaccagcccggacagcgacaaagcgcggatgtgg

SEQ ID NO: 350994 - DNA, 75 bp, synthetic construct
  source 1..75: mol_type = other DNA
cccgctgttgttgaaggaactggcctatcagactgggcgaacatcaacgtctgaagacaatgaaaactgggcgtt

SEQ ID NO: 350995 - DNA, 75 bp, synthetic construct
  source 1..75: mol_type = other DNA
cgtcagcctggtaaatggttcgagaggccaatataatcccgctcatcaggcctgcctggttaacccgcgtgcgag

SEQ ID NO: 350996 - DNA, 75 bp, synthetic construct
  source 1..75: mol_type = other DNA
cggccagcaccatgcggcggatgtttcgaaccgcagcgaagcgcaaaaaccggacgatacgacgtttattgtgag

SEQ ID NO: 350997 - DNA, 75 bp, synthetic construct
  source 1..75: mol_type = other DNA
cagccgtagcgaagagttgagtaatcctgaactgctaagcgcgattatctcccggcgcgactactacaccgacgc

SEQ ID NO: 350998 - DNA, 75 bp, synthetic construct
  source 1..75: mol_type = other DNA
ccatcgcggcagagcgcggttcgagaattatttctgtcaacggcgcggcggctcactgcgccagcgtcggcgata

SEQ ID NO: 350999 - DNA, 75 bp, synthetic construct
  source 1..75: mol_type = other DNA
gccgttaaaccctcaatacccgatcattcccataaatggtaattgccgtattatcggcgtcgtggtcgatgcaaa

SEQ ID NO: 351000 - DNA, 75 bp, synthetic construct
  source 1..75: mol_type = other DNA
tgcgtttgttgagatgatcccgaaactggcgcactcttccggcattaacccggcgtatttgactatcccgatgct

SEQ ID NO: 351001 - DNA, 75 bp, synthetic construct
  source 1..75: mol_type = other DNA
cgtcaggatatggaacaaacggcgttaatggggctgcttaacgccattcgccgctacgggctgccggacgaaggt

SEQ ID NO: 351002 - DNA, 75 bp, synthetic construct
  source 1..75: mol_type = other DNA
ggctgccggggtagggatccggcgtgatgataccgaacgcttaaacgcgtttaatcgccactattcactggtggt

SEQ ID NO: 351003 - DNA, 75 bp, synthetic construct
  source 1..75: mol_type = other DNA
gacgagaatagtgctaccaccagtatcggtaccctggtggaagagggggaggcctggtctacgttcccgtcgggc

SEQ ID NO: 351004 - DNA, 75 bp, synthetic construct
  source 1..75: mol_type = other DNA
atcgctcgttttgcgctcagggccttgccgggcgtttgctggttgcctgggcgcagcctgatccccagcagacca

SEQ ID NO: 351005 - DNA, 75 bp, synthetic construct
  source 1..75: mol_type = other DNA
aaaaaaggcgaagccatgtccgttaccgtgacggtgaaagacagcgccgggaatacggtgccgaatgttgaattt

SEQ ID NO: 351006 - DNA, 75 bp, synthetic construct
  source 1..75: mol_type = other DNA
ggagactggatggaagcagtagaaccttatcaccgtagagcgatagatcgctggtatgacaccaccgttgaatgt

SEQ ID NO: 351007 - DNA, 75 bp, synthetic construct
  source 1..75: mol_type = other DNA
tggcgaaactggcgacgccatttgccgaaggtgaggcactgcgtctttccagcgtttcgcatccggaatacattg

SEQ ID NO: 351008 - DNA, 75 bp, synthetic construct
  source 1..75: mol_type = other DNA
tcatccccagttacaacggcgcgcgtaaacaggccaacctgacgccgttgctggcgattctgctgcacaaactcg

SEQ ID NO: 351009 - DNA, 75 bp, synthetic construct
  source 1..75: mol_type = other DNA
accgctatactggcgcgagatgtcgcaactaccagcgttcttgatgcgatctttaccgtcgtcaccagcccggat

SEQ ID NO: 351010 - DNA, 75 bp, synthetic construct
  source 1..75: mol_type = other DNA
ggataacgtgaagacttcattaccgacagattttccggagaacgtggtgacggcagttgaaagcaatgtgttgag

SEQ ID NO: 351011 - DNA, 75 bp, synthetic construct
  source 1..75: mol_type = other DNA
gagaggggagcagagtaaaacgcaagccaaccatgaaaaaagcagtatgtcccgcgtttacagttgggggtatga

SEQ ID NO: 351012 - DNA, 75 bp, synthetic construct
  source 1..75: mol_type = other DNA
aaaatgaaggccgacaacataaaacctgctcacgtgcggctgtatatggacaagcgggggctgaaaagcaaaaca

SEQ ID NO: 351013 - DNA, 75 bp, synthetic construct
  source 1..75: mol_type = other DNA
tcagggattaccactgattttacgttccatgatttgaaagctaaggggatttcagactatgagggaagcagccgg

SEQ ID NO: 351014 - DNA, 75 bp, synthetic construct
  source 1..75: mol_type = other DNA
gtgacgttaatacccgaagatgaaactattcaggctggcggcagttatcgactcacgccattttacgacatcatt

SEQ ID NO: 351015 - DNA, 75 bp, synthetic construct
  source 1..75: mol_type = other DNA
ttatgaaattccaggtcttccagtggttgattggcgcaacggacggtcatgcaaaaaacttctccgtatttattc

SEQ ID NO: 351016 - DNA, 75 bp, synthetic construct
  source 1..75: mol_type = other DNA
ttgaaagtatccttgctattgataataatgctgcagctataaatacctacaatgccaattttggtttgcatggag

SEQ ID NO: 351017 - DNA, 75 bp, synthetic construct
  source 1..75: mol_type = other DNA
caaaaccgaccactggatgctgtttaccccattgtttatcttgactgtatcgtcctgaaagttcggcaggacagt

SEQ ID NO: 351018 - DNA, 75 bp, synthetic construct
  source 1..75: mol_type = other DNA
cgcaacgaaagtacaacatcgacggcgggcaatttaatgctctgcctggttgacccgcacactgaggcaacgacg

SEQ ID NO: 351019 - DNA, 75 bp, synthetic construct
  source 1..75: mol_type = other DNA
ttgatgtcatgacgttcagtaaactctggaacaaatttcttagcagcacctactatctggaactcggtcagcgta

SEQ ID NO: 351020 - DNA, 75 bp, synthetic construct
  source 1..75: mol_type = other DNA
gcattatctggacactggggagttgctgcccccgctgcctttggcagaggttaagcgcttgctttgcgcgcacgt

SEQ ID NO: 351021 - DNA, 75 bp, synthetic construct
  source 1..75: mol_type = other DNA
atgataggccgcgcagctcagggaagaccctggatctttcgggaaatccagcattatctggacactggggagttg

SEQ ID NO: 351022 - DNA, 75 bp, synthetic construct
  source 1..75: mol_type = other DNA
aaacagaaactcaggtgctggtttacgatcgtaaagtcaaggtcacgccttcactaaatcttccgttagatgtca

SEQ ID NO: 351023 - DNA, 75 bp, synthetic construct
  source 1..75: mol_type = other DNA
gtgtatggcgtgaccgggccagacggaaccaccacgataacactccgacaggatgcgtccaccggacttaaaacc

SEQ ID NO: 351024 - DNA, 75 bp, synthetic construct
  source 1..75: mol_type = other DNA
gtgacggcattggtaccggcaaatacaaatggtgtgttgacgacaagtggagcaaaactgatcggcacgacggat

SEQ ID NO: 351025 - DNA, 75 bp, synthetic construct
  source 1..75: mol_type = other DNA
ggtaatggcaccagtgccatggtgtcaacgtcgacactggatctactgacctgtcaaaccacgccggtcaccacg

SEQ ID NO: 351026 - DNA, 75 bp, synthetic construct
  source 1..75: mol_type = other DNA
atacgccggtttacgtcagttgcctgacgacggcgaacaaacctgccagcagcattacgctggaggtggttgata

SEQ ID NO: 351027 - DNA, 75 bp, synthetic construct
  source 1..75: mol_type = other DNA
gggggcatatggcggaaacctttaccagcagcgaaggcgtcaccttcaaacggcctttcctcaaagctgaacttt

SEQ ID NO: 351028 - DNA, 75 bp, synthetic construct
  source 1..75: mol_type = other DNA
gaaccaccacgataacactccgacaggatgcgtccaccggacttaaaaccgacttttatgccctgttgaatgata

SEQ ID NO: 351029 - DNA, 75 bp, synthetic construct
  source 1..75: mol_type = other DNA
tcgtgctacaaacctgccgcacaacgccgttgacggctgctagccaaattacgctggaggcctcagaccccgcgc

SEQ ID NO: 351030 - DNA, 75 bp, synthetic construct
  source 1..75: mol_type = other DNA
gttgcacctcttcctgtttttatcgcaatggaaattgcctatctgtgtgcagcgagggtttccgatgtgttatcg

SEQ ID NO: 351031 - DNA, 75 bp, synthetic construct
  source 1..75: mol_type = other DNA
tcacgtggtgaatttgttgaagggattagcgacccgaatgatccgaaatgggttaaggggattgaaacccgcgat

SEQ ID NO: 351032 - DNA, 75 bp, synthetic construct
  source 1..75: mol_type = other DNA
tggtgttgaggaaggctctggcagtctcaactgtggcattcagcctgcgaaaacgccggggtttgcaacctgttt

SEQ ID NO: 351033 - DNA, 75 bp, synthetic construct
  source 1..75: mol_type = other DNA
ccgctgctgaaagccgaaaccagctcaggctcatcgattagctctaacggcgaagtttggtcatatatgagcaac

SEQ ID NO: 351034 - DNA, 75 bp, synthetic construct
  source 1..75: mol_type = other DNA
gaaggcttatttactgcccatccaggcaacgccatcggcacggaatatggctggcccaccgcacaacagagctac

SEQ ID NO: 351035 - DNA, 75 bp, synthetic construct
  source 1..75: mol_type = other DNA
ttgacggcattgacggcgagtcaatggatgacaaacataaaaatgaaattgaggtgctgagctggcgctggaata

SEQ ID NO: 351036 - DNA, 75 bp, synthetic construct
  source 1..75: mol_type = other DNA
accgcctgcggtaacgccaacagcagcgtcaacagcacgacaaaaaccatcatcatgtacgttggcgcactccag

SEQ ID NO: 351037 - DNA, 75 bp, synthetic construct
  source 1..75: mol_type = other DNA
caggaggaacactcgatgtggcagctacggcagcagcatgtacgaatgccacaagtaatacattagttttcacgt

SEQ ID NO: 351038 - DNA, 75 bp, synthetic construct
  source 1..75: mol_type = other DNA
gattgcactgctgaaactgcaacgcatcggtatgtggctttattctgccgcactgggcgctgcagctgtggccat

SEQ ID NO: 351039 - DNA, 75 bp, synthetic construct
  source 1..75: mol_type = other DNA
gcggccggtattgatgcggctgaacagttcgccgtgctgggacaactacaggccaccatgagtggcagcgaggcc

SEQ ID NO: 351040 - DNA, 75 bp, synthetic construct
  source 1..75: mol_type = other DNA
atgtcttatgatatttttctgaaaattgacggcattgacggcattgacggcgagtcaatggatgacaaacataaa

SEQ ID NO: 351041 - DNA, 75 bp, synthetic construct
  source 1..75: mol_type = other DNA
ttcacaaagagcacaggcagaatccaataacattgccaccatacaggcaggtgttaaagcgttatacacgtcggc

SEQ ID NO: 351042 - DNA, 75 bp, synthetic construct
  source 1..75: mol_type = other DNA
cggttcaggtaactctgcaacaccaatcaacgcattcaaaggtgctgtaacattaggtgtagctaacactggtcc

SEQ ID NO: 351043 - DNA, 75 bp, synthetic construct
  source 1..75: mol_type = other DNA
gaacttctatacagcgggtgttggtgaagcaggtaatgtgaaagctgcaggaggggtgctggatgtcgcagaaac

SEQ ID NO: 351044 - DNA, 75 bp, synthetic construct
  source 1..75: mol_type = other DNA
gtaggaaccaaggttgttaaagccgcaggaggaacactcgatgtggcagctacggcagcagcatgtacgaatgcc

SEQ ID NO: 351045 - DNA, 75 bp, synthetic construct
  source 1..75: mol_type = other DNA
atggttttattaaataacaaaagaaaaagtaagaaaggtttctcactactcgaactattgcttgtattaggcatc

SEQ ID NO: 351046 - DNA, 75 bp, synthetic construct
  source 1..75: mol_type = other DNA
ttcacaaagagcacaggcagaatccaataacattgccaccatacaggcaggtgttaaagcattatacacatcggc

SEQ ID NO: 351047 - DNA, 75 bp, synthetic construct
  source 1..75: mol_type = other DNA
tcgaagagcgccggactcgttacgacgattgggcgttcgcactcggtcgtatggtgatgcatgaggtggccacag

SEQ ID NO: 351048 - DNA, 75 bp, synthetic construct
  source 1..75: mol_type = other DNA
actgaccgggcgaccgattttacccagacatcaaagctggcgcgcctgaaatatccggagcttgactacaacgtg

SEQ ID NO: 351049 - DNA, 75 bp, synthetic construct
  source 1..75: mol_type = other DNA
ttgcatgggggtttatgagccacgatgacctggatcgccagatggtcagcgtccttacccactttgcacctgact

SEQ ID NO: 351050 - DNA, 75 bp, synthetic construct
  source 1..75: mol_type = other DNA
gaagcgctggatacggccattctgtatccgtctgcggagaacttccgccgttttatgatactccagaatttctgg

SEQ ID NO: 351051 - DNA, 75 bp, synthetic construct
  source 1..75: mol_type = other DNA
atgatgcgtgcacttgttgatttcatcgttggctggttgttctgttcttttttcgtattttcatgtatagccact

SEQ ID NO: 351052 - DNA, 75 bp, synthetic construct
  source 1..75: mol_type = other DNA
atgatgcgtgcacttattgacttcattatgggctggctattttgttctttttttgtattctcatgcatagctacg

SEQ ID NO: 351053 - DNA, 75 bp, synthetic construct
  source 1..75: mol_type = other DNA
tggaagcgcgtctcactgaagagagaaaggtacagaacgccgtcatccgtcaggtggcacaacgctacggcctgt

SEQ ID NO: 351054 - DNA, 75 bp, synthetic construct
  source 1..75: mol_type = other DNA
atcccgttatctctcccttgattgcagcgtcctgggagcgatgccgtaaactgatgacgcatgagtcatggtgcg

SEQ ID NO: 351055 - DNA, 75 bp, synthetic construct
  source 1..75: mol_type = other DNA
tctcgggggctgggagttgtaaataagagacagtgggtaggctacaggcgacggaacgcctggttttactacttc

SEQ ID NO: 351056 - DNA, 75 bp, synthetic construct
  source 1..75: mol_type = other DNA
cgctgaaaaacctgctgattgccgggcttaacctgggcgagaccggcgacgtggcggaccactaccgcatcagcg

SEQ ID NO: 351057 - DNA, 75 bp, synthetic construct
  source 1..75: mol_type = other DNA
gatgctgaacctattttggttggctgcgagaaagaatccactttttcaagtgtcatgaatgacattattttgcga

SEQ ID NO: 351058 - DNA, 75 bp, synthetic construct
  source 1..75: mol_type = other DNA
gatgccctcgctcgcctggtttcctgtgcatggcctggcaacgattttgaactttatagcgtcatcgagaatctt

SEQ ID NO: 351059 - DNA, 75 bp, synthetic construct
  source 1..75: mol_type = other DNA
gccagctgtattacgcgttgcatgcatttgaaattaccatcccgcctctgcgtatgcggcgtggcagcattccgg

SEQ ID NO: 351060 - DNA, 75 bp, synthetic construct
  source 1..75: mol_type = other DNA
taaactcaccactgagatggcattccgtctggcgaaagtttttgataccacagtcgatttttggctaaacctcca

SEQ ID NO: 351061 - DNA, 75 bp, synthetic construct
  source 1..75: mol_type = other DNA
tgcggtttattcagtgaaattcgtggattaggtttgttgattggctgtgtactgaatgccgattacgccgggcaa

SEQ ID NO: 351062 - DNA, 75 bp, synthetic construct
  source 1..75: mol_type = other DNA
gccaaagcgctgggcggcggtttccccgttggcgctctgttggcaaccgaagggtgcgccagcgtgatgactgtt

SEQ ID NO: 351063 - DNA, 75 bp, synthetic construct
  source 1..75: mol_type = other DNA
cgacttcgcggggggcattgcggtaaacgcgctgggccatgcgcatcccgaactgcgcgaggcgctgaacgaaca

SEQ ID NO: 351064 - DNA, 75 bp, synthetic construct
  source 1..75: mol_type = other DNA
ggcgctaacagcgcgtggtcagaatatcacgatgcgcggtcaggatttatcgatgcagagagcatcaatgaaagg

SEQ ID NO: 351065 - DNA, 75 bp, synthetic construct
  source 1..75: mol_type = other DNA
tgcagttgatacgttcagcactgcgcttgattctctcaacgagatagagcaaagccccggcctttcaaaagcagt

SEQ ID NO: 351066 - DNA, 75 bp, synthetic construct
  source 1..75: mol_type = other DNA
actgatgggattaggtcaatatcttctcttctgaatcctacgaatagtggtgcttattcagcgattattatttta

SEQ ID NO: 351067 - DNA, 75 bp, synthetic construct
  source 1..75: mol_type = other DNA
aaaaatcagtcattacctttagcggtttcttatgtcggtgaaacacctgaaggtgcgcagaaacagctggcgaag

SEQ ID NO: 351068 - DNA, 75 bp, synthetic construct
  source 1..75: mol_type = other DNA
taaatgaagaactggaacaagacctgaaagacaacatcgcgctgcaaatgaaaaacttgcaggatgatcctaccc

SEQ ID NO: 351069 - DNA, 75 bp, synthetic construct
  source 1..75: mol_type = other DNA
gcaatgctggggtcatggagatgattaacatcgacttactgacggcaatgctccttgagccacaactgccgcaaa

SEQ ID NO: 351070 - DNA, 75 bp, synthetic construct
  source 1..75: mol_type = other DNA
cgtgacgcccgatctgctcaccaccgctaaagcgctgggcggcggtttccccgttggcgctctgctggcaaccga

SEQ ID NO: 351071 - DNA, 75 bp, synthetic construct
  source 1..75: mol_type = other DNA
cgcttcctcgtcgattcgctcgctacgctcggtcatcgacttgcggcgagcgggatcacctctcgcatgttgtcg

SEQ ID NO: 351072 - DNA, 75 bp, synthetic construct
  source 1..75: mol_type = other DNA
gtcatcgacttgcggcgagcggaattacctctcgcatgttgtcggtgattccgcggttgctctttcggggatgag

SEQ ID NO: 351073 - DNA, 75 bp, synthetic construct
  source 1..75: mol_type = other DNA
aatccagcgtttgttgcacaggcacaacaggcgttttccggtcttaatgatcagcaacgcaacgatatgggcgat

SEQ ID NO: 351074 - DNA, 75 bp, synthetic construct
  source 1..75: mol_type = other DNA
agcaggtaatttctacattaccacggttggaaccaaggttgttaaagccgcaggaggaacactcgatgtggcagc

SEQ ID NO: 351075 - DNA, 75 bp, synthetic construct
  source 1..75: mol_type = other DNA
atggttttattaaagaataaaagaaaaagcaagaaaggtttctcactactcgaattattgcttgttttaggcatt

SEQ ID NO: 351076 - DNA, 75 bp, synthetic construct
  source 1..75: mol_type = other DNA
acgttaatgtcggtaatggagggaagaaatcatcaatgcaacagccgcctactcagcaatcagcaggaggtagct

SEQ ID NO: 351077 - DNA, 75 bp, synthetic construct
  source 1..75: mol_type = other DNA
caaaaaatgcagttttactcaacgccgggggctggagtgattcgcgcgcgtttacggctggttctctcctgggat

SEQ ID NO: 351078 - DNA, 75 bp, synthetic construct
  source 1..75: mol_type = other DNA
caaaaaatgcagttttactcaacgccgggtacaggaacgattcgtgcacgtttacggctggttctctcgtgggat

SEQ ID NO: 351079 - DNA, 75 bp, synthetic construct
  source 1..75: mol_type = other DNA
atgatcaaaatatctcagcgcagatccgcggcaaaataaagaattatgctgcggcgggtaaagttcagcagggcc

SEQ ID NO: 351080 - DNA, 75 bp, synthetic construct
  source 1..75: mol_type = other DNA
agtggcggacggaaaatccgggcgtcactctgcgcgctatccatgtgcatcacggtttaagcgccaatgctgatg

SEQ ID NO: 351081 - DNA, 75 bp, synthetic construct
  source 1..75: mol_type = other DNA
tggactatttaagtttgcccaggaaaatccagcgtttgttgcacaggcacaacaggcgttttccggtcttaatga

SEQ ID NO: 351082 - DNA, 75 bp, synthetic construct
  source 1..75: mol_type = other DNA
ctgccgattcaatgacaacgctcgctgacacgctggagagggagaagccaactcctggtttgttcggtaacgctg

SEQ ID NO: 351083 - DNA, 75 bp, synthetic construct
  source 1..75: mol_type = other DNA
tggctggagttgctgatatttataagcaggaacagcaacagaaagcgattagtgcgttcaataaggttcatgctg

SEQ ID NO: 351084 - DNA, 75 bp, synthetic construct
  source 1..75: mol_type = other DNA
cgacaggtttgttcggtaacgcacagaacatgttcgcaaaacttaccggaagcgatacgacattgcgtgatttgc

SEQ ID NO: 351085 - DNA, 75 bp, synthetic construct
  source 1..75: mol_type = other DNA
cttatccgcccgttgcttgcccgcacgcggggggaactggagcagtgggcgcgtcagtatgatttacgctggatt

SEQ ID NO: 351086 - DNA, 75 bp, synthetic construct
  source 1..75: mol_type = other DNA
gatcaacattccggaaggtcgcttccatgcctatggtcaggatctgattgtgcgtaaaggtgaactgctgttctc

SEQ ID NO: 351087 - DNA, 75 bp, synthetic construct
  source 1..75: mol_type = other DNA
cggtggatatggatttacgcgcccagacgcgactggcggaagccggattgccgctcaacgtggaagtgaacagca

SEQ ID NO: 351088 - DNA, 75 bp, synthetic construct
  source 1..75: mol_type = other DNA
aagtgagcagcattgacggcaatactaaactggacgccctggatatcgattccagtcaagggatcgtcaacgcca

SEQ ID NO: 351089 - DNA, 75 bp, synthetic construct
  source 1..75: mol_type = other DNA
aacggcgtcgattccgattaacagtaacctgattgtccacgttggcaacaatgtgcgcattgacgcctttggcct

SEQ ID NO: 351090 - DNA, 75 bp, synthetic construct
  source 1..75: mol_type = other DNA
gcggattcagggcgagccggtttccggacagctcaatctggcgggcagttttgatcgcaaagaagaacgctggaa

SEQ ID NO: 351091 - DNA, 75 bp, synthetic construct
  source 1..75: mol_type = other DNA
atcaccgtgagcaccatgctgctgaaagtgagcagcatcgacggcaataccaaactggacgcgctggatatcgac

SEQ ID NO: 351092 - DNA, 75 bp, synthetic construct
  source 1..75: mol_type = other DNA
aggcattgaaacccacgttatcgaatttgcccctatgctgatggcggaacagcttgatcagatgggcggcgagca

SEQ ID NO: 351093 - DNA, 75 bp, synthetic construct
  source 1..75: mol_type = other DNA
aatcaaaggttctgatactcaggactgctttgtctatcgcaccattgaagacctcaacgccattgaatcctgcgc

SEQ ID NO: 351094 - DNA, 75 bp, synthetic construct
  source 1..75: mol_type = other DNA
gttgctcggtgcggtactggtgggcgataccagcgactacggcaacctgctgcaactggtactgaacgccattga

SEQ ID NO: 351095 - DNA, 75 bp, synthetic construct
  source 1..75: mol_type = other DNA
aaaccgtcaacgatgcggcgctgccagtagcgtttcagacgctgaacctgacggcggagttgcgtaataaccgtg

SEQ ID NO: 351096 - DNA, 75 bp, synthetic construct
  source 1..75: mol_type = other DNA
cgtttgccgtagctggagtatgaccaaagacgggcctatgtacacgctaaacgcaacgtttgaacaagttgttgg

SEQ ID NO: 351097 - DNA, 75 bp, synthetic construct
  source 1..75: mol_type = other DNA
tgtttgccgtagctggagcatgactaaagacggtccgctatacacgctaaatgcaacatttgagcaagttattaa

SEQ ID NO: 351098 - DNA, 75 bp, synthetic construct
  source 1..75: mol_type = other DNA
atggtaaaccccatctttacgcgtggggaaaaagcggccgggatggtgagtgctaatttacgtctgggcggtgat

SEQ ID NO: 351099 - DNA, 75 bp, synthetic construct
  source 1..75: mol_type = other DNA
cacggtttaagtgccaatgccgatgcctgggttaggcattgcgaaaacgtctgccaacagtggcaggtgccgctg

SEQ ID NO: 351100 - DNA, 75 bp, synthetic construct
  source 1..75: mol_type = other DNA
gcaggacaatgcttaaagtggagtcattattttcagccatattttgagaatatccttgaatgtcgggtatgggtt

SEQ ID NO: 351101 - DNA, 75 bp, synthetic construct
  source 1..75: mol_type = other DNA
atgtttggccatctgttacgatactttagtttctgtaaaaaagatttattagtatttcatcctgaatctgattac

SEQ ID NO: 351102 - DNA, 75 bp, synthetic construct
  source 1..75: mol_type = other DNA
ctgccaacagtggcaggtgccgctggtggtcgagcgcgtgcaacttgcgcaagaaggactgggcattgaggccca

SEQ ID NO: 351103 - DNA, 75 bp, synthetic construct
  source 1..75: mol_type = other DNA
cacggtttaagtgccaatgccgatgcctgggttaggcattgcgagaacatctgccaacagtggcaggtgccgctg

SEQ ID NO: 351104 - DNA, 75 bp, synthetic construct
  source 1..75: mol_type = other DNA
gtgcggatctggcaggaagtggcgctggcgcgggaagatgcctccccctgtttacgtttgggcgcgtttgaaatc

SEQ ID NO: 351105 - DNA, 75 bp, synthetic construct
  source 1..75: mol_type = other DNA
atgagtttatggaaaaaaatcagcctcggcgtggttgtcgtcctcttattattgctggggtcggtggcatttctg

SEQ ID NO: 351106 - DNA, 75 bp, synthetic construct
  source 1..75: mol_type = other DNA
ttgcgcaaagtggccagattgtgggtaaaatcggcgagacgtttggcgtaagcaatttagcgctcgacacccagg

SEQ ID NO: 351107 - DNA, 75 bp, synthetic construct
  source 1..75: mol_type = other DNA
gttgacggaacgctgaaaggcaacagctatatgcagtggacgattccgggtctgcatctggaactgggaccaaac

SEQ ID NO: 351108 - DNA, 75 bp, synthetic construct
  source 1..75: mol_type = other DNA
acattgaagagtttaagggcgagcaactgcgcgtgacgggcgacacggacatcaccgtgcgcaccatgctgctga

SEQ ID NO: 351109 - DNA, 75 bp, synthetic construct
  source 1..75: mol_type = other DNA
attcaggtcaacatcgacagtaaaaaaatgcccccttcagagcaagcggaggaagaggaagatagcgggccgctg

SEQ ID NO: 351110 - DNA, 75 bp, synthetic construct
  source 1..75: mol_type = other DNA
tatgccggaaacgactcaggcaagcggtatctttacaggtaaagcagacgttgcctgggacaccaccaaagaagg

SEQ ID NO: 351111 - DNA, 75 bp, synthetic construct
  source 1..75: mol_type = other DNA
caggtggctgttgaccatattcttggtaacgaaaacgcctttgaaggtgccgatctcagcgccaaactgaaactg

SEQ ID NO: 351112 - DNA, 75 bp, synthetic construct
  source 1..75: mol_type = other DNA
tattccgcaatgatcgacgctttgaccgggaaactggacgccccgctacgctccggaaactacgtcgcatcggtt

SEQ ID NO: 351113 - DNA, 75 bp, synthetic construct
  source 1..75: mol_type = other DNA
aacggagcaggcgattgccgccgcgcagcaggcgtttccggcgtgggcgcgtcattctacgcttaagcgcgcgcg

SEQ ID NO: 351114 - DNA, 75 bp, synthetic construct
  source 1..75: mol_type = other DNA
cgccgcttttgtgaagaggtgcaggcgggtatggtgggggtcaacgtgccgatcccggtgccaatggcattccac

SEQ ID NO: 351115 - DNA, 75 bp, synthetic construct
  source 1..75: mol_type = other DNA
cactgcccgtaagcacaacatgattgaaagcgttaactccggcattcgcatgttgtcattgtcggctctggcgct

SEQ ID NO: 351116 - DNA, 75 bp, synthetic construct
  source 1..75: mol_type = other DNA
tccagaatgttttcaggccgttttgctgatggattagcaaaaaaaggagtcattatttccactcaccagccagat

SEQ ID NO: 351117 - DNA, 75 bp, synthetic construct
  source 1..75: mol_type = other DNA
tggcgctgaaaggggccgcgcttacgcgccgcccctttcattacgcggatgttctgctgtgtgcttctgtctttt

SEQ ID NO: 351118 - DNA, 75 bp, synthetic construct
  source 1..75: mol_type = other DNA
caaagtatggtccgacgcgcttggtgaactgactcgcggaatcgaagttgttgaattcgcctgcggcattccgca

SEQ ID NO: 351119 - DNA, 75 bp, synthetic construct
  source 1..75: mol_type = other DNA
tttcattaatgcagccgcttggggttgtggcaggcatcacaccgtttaacttcccggcaatggtgcctatgtgga

SEQ ID NO: 351120 - DNA, 75 bp, synthetic construct
  source 1..75: mol_type = other DNA
catgaggcttttccggcatggagtaaaatgactccgctacgccgggcacgtatcctttttgaattcaaagtatta

SEQ ID NO: 351121 - DNA, 75 bp, synthetic construct
  source 1..75: mol_type = other DNA
cgccgcttctgcgaagaggtgcaggcgggcatggtaggggttaacgtgccgatcccggtgccgatggcgttccac

SEQ ID NO: 351122 - DNA, 75 bp, synthetic construct
  source 1..75: mol_type = other DNA
ggaagcgcagggggcgaatctgcgcgtggacggccgcggctttagcgtgcagggtcacgagaagggctattttgt

SEQ ID NO: 351123 - DNA, 75 bp, synthetic construct
  source 1..75: mol_type = other DNA
tgaaaccgccgatgacctctgcgcccgtctggaaacacagattgccgcgctgcgcgttgggccagggctggacca

SEQ ID NO: 351124 - DNA, 75 bp, synthetic construct
  source 1..75: mol_type = other DNA
acggataataccgatctcgatctccatgtcgtcacgccggatggtgaacacgcctggtacggtaatacagcgctg

SEQ ID NO: 351125 - DNA, 75 bp, synthetic construct
  source 1..75: mol_type = other DNA
atcccgactcagtctgttctgaccatcacttctaacgttgtgtatggtaagaaaactggtaacaccccagacggt

SEQ ID NO: 351126 - DNA, 75 bp, synthetic construct
  source 1..75: mol_type = other DNA
agtacggcaacaacgacgagcgcgtagacagcattgcctgcgacctggttgaacgctttatgaagaaaattaaag

SEQ ID NO: 351127 - DNA, 75 bp, synthetic construct
  source 1..75: mol_type = other DNA
agctttgccaacctatcgcaatgctgtgccgacccaatcgattctgactatcacctctaacgtggtgtacggtca

SEQ ID NO: 351128 - DNA, 75 bp, synthetic construct
  source 1..75: mol_type = other DNA
gaaatattcagcatgagtccgcgtacctggcgtcgcaaagaagaacctgtcggaactgcaagcggtacagcactt

SEQ ID NO: 351129 - DNA, 75 bp, synthetic construct
  source 1..75: mol_type = other DNA
cctgacaatccgtgtctctggctacgccgtgcgcttcaacgcactgacccgtgaacagcaacaggatgttatttc

SEQ ID NO: 351130 - DNA, 75 bp, synthetic construct
  source 1..75: mol_type = other DNA
gtcattctgtacgggcgtgacgtatacgctgcagcgcgtgtggcgcaaattatgctttatgccggcgtgaaagat

SEQ ID NO: 351131 - DNA, 75 bp, synthetic construct
  source 1..75: mol_type = other DNA
ctggcttatattccaacgggaattgcttatgctatctggtcaggtgttggtatcgtgctgattagcttactgtcc

SEQ ID NO: 351132 - DNA, 75 bp, synthetic construct
  source 1..75: mol_type = other DNA
caaggggcctgatttttatgacggcgaaaaaaaaggtaatgactccaacttattgatagtgttttatgttcagat

SEQ ID NO: 351133 - DNA, 75 bp, synthetic construct
  source 1..75: mol_type = other DNA
tcaacatcggggaagacaccaccagtgatgtggatgagcttatcaccatcggggaggtgacatggctcacagcgt

SEQ ID NO: 351134 - DNA, 75 bp, synthetic construct
  source 1..75: mol_type = other DNA
gtaatttcgactacatccgtgcggcgcaggcgcttggcgtcagcgatcgcagtatcatcctgcgtcatatgttgc

SEQ ID NO: 351135 - DNA, 75 bp, synthetic construct
  source 1..75: mol_type = other DNA
ggcgatattattgtctttgctgatctttattggtgaagccgtccgcgacgcatttgatcctaataaggcggtgta

SEQ ID NO: 351136 - DNA, 75 bp, synthetic construct
  source 1..75: mol_type = other DNA
caagagagcaagcgggaagagacactttagaacgctataatgctcagatcagagcagcaagtattgcatgtttgt

SEQ ID NO: 351137 - DNA, 75 bp, synthetic construct
  source 1..75: mol_type = other DNA
atgagatgtatttcatcttatattagagatgaaatacatcaacctataatgggaatggattatatgatcaagcgg

SEQ ID NO: 351138 - DNA, 75 bp, synthetic construct
  source 1..75: mol_type = other DNA
cctgcacgcccttggggcgcacctcagcgccgaggaacggcaagccgtggctgacggcctgctgatccagccgct

SEQ ID NO: 351139 - DNA, 75 bp, synthetic construct
  source 1..75: mol_type = other DNA
gaaggtgccccaacattatgtgtctagattggttcgatggccttaagcgagcggctgcgggccgccgccttatga

SEQ ID NO: 351140 - DNA, 75 bp, synthetic construct
  source 1..75: mol_type = other DNA
gcatagtgcagacgcattgggctatccagtacatcgtaggtatccagtaaaaaaccgtgttattcttggtggttc

SEQ ID NO: 351141 - DNA, 75 bp, synthetic construct
  source 1..75: mol_type = other DNA
gcatttgattgattcactggaaaaagtcatctacaagcctggaacacgagatatggataagacaggtggcattga

SEQ ID NO: 351142 - DNA, 75 bp, synthetic construct
  source 1..75: mol_type = other DNA
aacaggaaatacaggtgttaaagatattgagcctccagatgttgttttgttaaactcattggcggaaaactcatc

SEQ ID NO: 351143 - DNA, 75 bp, synthetic construct
  source 1..75: mol_type = other DNA
ctacacaagactttaaagaggccagcgattactttaccagtcgcaaggtcagtgaatccggcagccatacggaca

SEQ ID NO: 351144 - DNA, 75 bp, synthetic construct
  source 1..75: mol_type = other DNA
tgtgatgaaacacgcaccgcaggatgccgaagctattctgacaaacaccagttcaccggagattgcagaacgccg

SEQ ID NO: 351145 - DNA, 75 bp, synthetic construct
  source 1..75: mol_type = other DNA
cgcaacagtttgcacagtatgtaatgaaacacgcgccacaggatgcagaagctattctgacaaacaccagttcac

SEQ ID NO: 351146 - DNA, 75 bp, synthetic construct
  source 1..75: mol_type = other DNA
cctggcgtgaatcccgtggagatataggtaacggaatggagagcgtaccttcgggtggtggcagccaggatatta

SEQ ID NO: 351147 - DNA, 75 bp, synthetic construct
  source 1..75: mol_type = other DNA
caggtacagcctggtgttgataatgcctggcgtgaatcccgtggggatattggtaaaggaatggagagcgtacct

SEQ ID NO: 351148 - DNA, 75 bp, synthetic construct
  source 1..75: mol_type = other DNA
acccggacgtgggattccattgaaaaaattgcgctcacattgtctgttctcgcggtggccgtaatgtgggtacag

SEQ ID NO: 351149 - DNA, 75 bp, synthetic construct
  source 1..75: mol_type = other DNA
cgaaaacatgtccggacgcgtttactacccgttcgaccgcaatgtgcatgtgaagccactccagttcaatccgaa

SEQ ID NO: 351150 - DNA, 75 bp, synthetic construct
  source 1..75: mol_type = other DNA
aattatctcattggcttacatgtgaaatccatcgaatctgatatcgcacgtggctatgtgcgtattgaaggaacg

SEQ ID NO: 351151 - DNA, 75 bp, synthetic construct
  source 1..75: mol_type = other DNA
cggctgatgaaatacctgaacctgagcagttgtcagcccggaaaacatcaatacaaaaatgcctgtcaggagcat

SEQ ID NO: 351152 - DNA, 75 bp, synthetic construct
  source 1..75: mol_type = other DNA
acattgatcaaataaagcagaccaacgcaggtgctgtatatcgcctgattgatcagcttggtcccatttcgcgta

SEQ ID NO: 351153 - DNA, 75 bp, synthetic construct
  source 1..75: mol_type = other DNA
aaccggggggtgcggacgatttcttggacggtttatacggacatcaatccgaccgcatgacgatactcgatggga

SEQ ID NO: 351154 - DNA, 75 bp, synthetic construct
  source 1..75: mol_type = other DNA
gacgcgatacggttaatccggcgcgagtcaggttgtgcagcgaaatacgccgggcgtggaaccaaagtaggggct

SEQ ID NO: 351155 - DNA, 75 bp, synthetic construct
  source 1..75: mol_type = other DNA
gagcttccagggaagtcatcttataatttagaagaaatgctatctgcgataaatttcaccattccatatatctat

SEQ ID NO: 351156 - DNA, 75 bp, synthetic construct
  source 1..75: mol_type = other DNA
aatccatgagttcgatgttacacggacagccgttaaccgtggactcattgtgccaggcggcactgcggggcgatc

SEQ ID NO: 351157 - DNA, 75 bp, synthetic construct
  source 1..75: mol_type = other DNA
acacagtgcggatgcgttgggttatccggttcatcgtaggtatccggtgaaaaatcgtgttattcttggtggatc

SEQ ID NO: 351158 - DNA, 75 bp, synthetic construct
  source 1..75: mol_type = other DNA
tgaactgtgggctgtggacgaattggtgttgttctcttctaacacggctgaagtgtgtgacgagctggagcgtcg

SEQ ID NO: 351159 - DNA, 75 bp, synthetic construct
  source 1..75: mol_type = other DNA
acccaattttctaatcaggggacaatggcgggggccgcgttggtaaaagacgcgatgtataacggttctttgttg

SEQ ID NO: 351160 - DNA, 75 bp, synthetic construct
  source 1..75: mol_type = other DNA
tgccaggcggcactgcggggagatctgctggcaaaagacatcattactggcgtgggcacacatgtcgggcgcatt

SEQ ID NO: 351161 - DNA, 75 bp, synthetic construct
  source 1..75: mol_type = other DNA
gtccgtgaaatgctcgaagcgcacctggtgcaagagctggaaattaaagaagcggggaaccgtggtcgtccagcg

SEQ ID NO: 351162 - DNA, 75 bp, synthetic construct
  source 1..75: mol_type = other DNA
agccgggataatgcactgaagtctcagattactaaacttctggccagcattcagaacaaggctgtcagtgacacg

SEQ ID NO: 351163 - DNA, 75 bp, synthetic construct
  source 1..75: mol_type = other DNA
gacagtacgatgagtgcacaggactccatgatggccagccgtatgcgcagtgcagtggaaagctatgcgaaggcg

SEQ ID NO: 351164 - DNA, 75 bp, synthetic construct
  source 1..75: mol_type = other DNA
ggccaaaattacacaagccagtggcggcaatgccgaacatgaaaacgccgtgttcagccacttgctgaccttctt

SEQ ID NO: 351165 - DNA, 75 bp, synthetic construct
  source 1..75: mol_type = other DNA
ctcgtgccgaatctgaaagtcaattttatggcatcgaagttgacaataataccctcgagattgtcaatgtaaccg

SEQ ID NO: 351166 - DNA, 75 bp, synthetic construct
  source 1..75: mol_type = other DNA
caactcggcgtgcgcgtgtttgctattccggatggcgacgtcgccgcctccattcttacctgtatgccggatagc

SEQ ID NO: 351167 - DNA, 75 bp, synthetic construct
  source 1..75: mol_type = other DNA
ctggcggtgctggcagtaggcgataaaggctgcttcctcaatgcgccagatatgtatatggagaagctgatcgtc

SEQ ID NO: 351168 - DNA, 75 bp, synthetic construct
  source 1..75: mol_type = other DNA
ggatcaccagttatgccgcacgtaatggtgattcagccagcctggtgaatctggccaccacgtcatcgatggaga

SEQ ID NO: 351169 - DNA, 75 bp, synthetic construct
  source 1..75: mol_type = other DNA
aacgctggtcgacgctacgccagcgttttagctgggttgaggatatgcataacacgccgcaagacccggagcatc

SEQ ID NO: 351170 - DNA, 75 bp, synthetic construct
  source 1..75: mol_type = other DNA
atgatttggcgacttaccgacgataaacgctggtcgacacttcgccagcgttttagctgggttgaggagatgcat

SEQ ID NO: 351171 - DNA, 75 bp, synthetic construct
  source 1..75: mol_type = other DNA
aggatgctttagtacagtccgctatttcaacaattctggcagataaaacagttcaacagcattgggttgatcttg

SEQ ID NO: 351172 - DNA, 75 bp, synthetic construct
  source 1..75: mol_type = other DNA
acaacaatggtatggccagtagatgaccaaggggttgagcggcgctggtactatgggcgagatcgtgttattcgc

SEQ ID NO: 351173 - DNA, 75 bp, synthetic construct
  source 1..75: mol_type = other DNA
gatggcctggtcttttgtgcaggaacaggtacagcctggtgttgataatgcctggcgggaatcccgtggcgatat

SEQ ID NO: 351174 - DNA, 75 bp, synthetic construct
  source 1..75: mol_type = other DNA
atcagccttgatgatatgcggcggcgaatcaatgccagtccggacgacaaaaccgctaccgggcgtattgtgcaa

SEQ ID NO: 351175 - DNA, 75 bp, synthetic construct
  source 1..75: mol_type = other DNA
ggcaccatcgtcattggtgaaggcgaaatcgacgaagcaccgatgctctacattggtgaaaaagtcggtactggt

SEQ ID NO: 351176 - DNA, 75 bp, synthetic construct
  source 1..75: mol_type = other DNA
cataatatcagtaatgagcaggcgactcaggaactggcatcaacaggttctaagttctcgtatggcggatatgca

SEQ ID NO: 351177 - DNA, 75 bp, synthetic construct
  source 1..75: mol_type = other DNA
tttgttcaaaaccagacgatggaaatattatttcaaattatattttatatgaaggtaaatatagcaatgcaataa

SEQ ID NO: 351178 - DNA, 75 bp, synthetic construct
  source 1..75: mol_type = other DNA
cggacccggacctgttattcagacaactggtcagtgacagttacagttatttctacggctccagtcagtctgcca

SEQ ID NO: 351179 - DNA, 75 bp, synthetic construct
  source 1..75: mol_type = other DNA
gcggggcgatgtcccggttaccggttggcatcaatgcaacgcgtcagattgcggcggcacaacaggaaatggccc

SEQ ID NO: 351180 - DNA, 75 bp, synthetic construct
  source 1..75: mol_type = other DNA
gatgctcatgctgaatggggggttaaacctaaaattcttggtgttggtggtggcgcaggtgtcagaggtggtggt

SEQ ID NO: 351181 - DNA, 75 bp, synthetic construct
  source 1..75: mol_type = other DNA
ccggcccagcccgctgcggggggtatatgacagaaataataattttgtcagctgcaaggatgcgtcggtcacgct

SEQ ID NO: 351182 - DNA, 75 bp, synthetic construct
  source 1..75: mol_type = other DNA
atcaggttgataatatggtcacagaataccgaggcaatatcggagatactcagagcagcatacgtggcgaagaaa

SEQ ID NO: 351183 - DNA, 75 bp, synthetic construct
  source 1..75: mol_type = other DNA
cagaccggacccggacctgttattcagacaactggtcagtgacagttacagttatttctacggctccagccagtc

SEQ ID NO: 351184 - DNA, 75 bp, synthetic construct
  source 1..75: mol_type = other DNA
cctgatccgaacctgttgttcagtacgctgattggcgacagttacagttacttctatggctcaagtaaatcagcc

SEQ ID NO: 351185 - DNA, 75 bp, synthetic construct
  source 1..75: mol_type = other DNA
ctacagcaagacaggcatgctgttcggggcgaatctgattgtgaaaagcaccgatttcctgtcccggaatccgga

SEQ ID NO: 351186 - DNA, 75 bp, synthetic construct
  source 1..75: mol_type = other DNA
ccacctacagcaagacaggcatgctgttcgggcgaacctgattgtgaaaagcacgattttctgtcccggaatccg

SEQ ID NO: 351187 - DNA, 75 bp, synthetic construct
  source 1..75: mol_type = other DNA
gctgaatggggggttaaacctaaaattcttggtgttggtggaggattaggcgttagaggtggtggtcgggctggt

SEQ ID NO: 351188 - DNA, 75 bp, synthetic construct
  source 1..75: mol_type = other DNA
gcgtgaatcccgtggcgatatcggtaaaggaatggagagcgtaccttcgggcggtggcagccaggatattattgc

SEQ ID NO: 351189 - DNA, 75 bp, synthetic construct
  source 1..75: mol_type = other DNA
agagcgagaaagtcaaaagataatacctgagccatcaggagaggctgtgaaaaaaatgattgatgataaaaagga

SEQ ID NO: 351190 - DNA, 75 bp, synthetic construct
  source 1..75: mol_type = other DNA
gagagcttctgccgggatgtatggagatgctcatgctgaatgggggttaaacctaaaattcttggtgttggtgga

SEQ ID NO: 351191 - DNA, 75 bp, synthetic construct
  source 1..75: mol_type = other DNA
aggactttaaagaggccagcgattactttaccagtcgcaaggtcagtgagtccggcagccatactgacaataatg

SEQ ID NO: 351192 - DNA, 75 bp, synthetic construct
  source 1..75: mol_type = other DNA
cgtgctgtctgaactctctcagatacagctgaaatactctgacctggcctctactgccgggtatctttcagccat

SEQ ID NO: 351193 - DNA, 75 bp, synthetic construct
  source 1..75: mol_type = other DNA
ttcctccatcagcccgactgccagtgccgcaggcagtgtggttgacggtaattactcctacggcaacatgcagac

SEQ ID NO: 351194 - DNA, 75 bp, synthetic construct
  source 1..75: mol_type = other DNA
ctttaaagaggccagcgattactttaccagtcgcaaggtcagtgaatccggcagccatactgacaataatgccga

SEQ ID NO: 351195 - DNA, 75 bp, synthetic construct
  source 1..75: mol_type = other DNA
tcagcccagccctttacgtcaggtgccgaataataattacagttttctgcaaagctcagagccgtttgtgtcctg

SEQ ID NO: 351196 - DNA, 75 bp, synthetic construct
  source 1..75: mol_type = other DNA
ttcttccatcacgccaaccgccagtgcggcaggcagtgtggttgacggtaattactcctacggcaacatgcagac

SEQ ID NO: 351197 - DNA, 75 bp, synthetic construct
  source 1..75: mol_type = other DNA
cataatatcagtaatgagcaggcgacaagagaactggcatcaagaagtacgagaggttctgcggggatgtatggc

SEQ ID NO: 351198 - DNA, 75 bp, synthetic construct
  source 1..75: mol_type = other DNA
gatggccagccgtatgcgcagcgcagtggaaagctatgcgaaggcgcataatatcagtaatgagcaggcgactca

SEQ ID NO: 351199 - DNA, 75 bp, synthetic construct
  source 1..75: mol_type = other DNA
gcaggtgtcagaggtggtggtcgggcaggtattgactggagcgatgatgatgcgcatcaggccagcagtggttca

SEQ ID NO: 351200 - DNA, 75 bp, synthetic construct
  source 1..75: mol_type = other DNA
cacgcgccgcaggatgcagaagctattctgacaaatactagttcaccggagatagcagaactgatcttacccagc

SEQ ID NO: 351201 - DNA, 75 bp, synthetic construct
  source 1..75: mol_type = other DNA
aaaatgaactgggcgactttgtgctgcatatggatggtcaggcgaatgattttctccctgatgcaggacgctggc

SEQ ID NO: 351202 - DNA, 75 bp, synthetic construct
  source 1..75: mol_type = other DNA
atgttgggtaaatataaagctgttctcgcgctgctattactgattattcttgtgccgttgacgttgctaatgacg

SEQ ID NO: 351203 - DNA, 75 bp, synthetic construct
  source 1..75: mol_type = other DNA
taaaccttaattaccatcatgaagagaatatttttacgctgtggcgcagtttacgctttggcgataatctccagg

SEQ ID NO: 351204 - DNA, 75 bp, synthetic construct
  source 1..75: mol_type = other DNA
tcaacaaagcacttgagcgtttttattttcgcttaagtgcatcaggcgctcatgctgaacgtgcagcccgtgact

SEQ ID NO: 351205 - DNA, 75 bp, synthetic construct
  source 1..75: mol_type = other DNA
gacatcgcaactggcgaaactgttgagttcgctgaagttctgatgatcgcaaacggtgaagaagtcaaaatcggc

SEQ ID NO: 351206 - DNA, 75 bp, synthetic construct
  source 1..75: mol_type = other DNA
atggacaaagaatataaaacactcatcaacaaagcacttgagcgtttttattttcgcttaagtgcatcaggctct

SEQ ID NO: 351207 - DNA, 75 bp, synthetic construct
  source 1..75: mol_type = other DNA
ttaacaaagcacttgagcgtttttattttcgcttaagcgcatcaggcgctcatgctgaacgtgcagcccgtgact

SEQ ID NO: 351208 - DNA, 75 bp, synthetic construct
  source 1..75: mol_type = other DNA
catgctgaacgtgcagcccgtgactcattgaccagggcaatccggagtctgtatgacgtggctttttacgctgat

SEQ ID NO: 351209 - DNA, 75 bp, synthetic construct
  source 1..75: mol_type = other DNA
ctcaggaactggcatcaacaggttctaagttctcgtatggcggatatgcagatgctcatgctgaatgggggatta

SEQ ID NO: 351210 - DNA, 75 bp, synthetic construct
  source 1..75: mol_type = other DNA
ggcgataatctccaggcatggctggaacagaatgcccgattcccggaaactggctgctcatcaggaaaagagtgt

SEQ ID NO: 351211 - DNA, 75 bp, synthetic construct
  source 1..75: mol_type = other DNA
ggctggcaaatagcgggccaatgaccttgcggctggataaagacaccgcagatgcggtggtgaaagacaatatga

SEQ ID NO: 351212 - DNA, 75 bp, synthetic construct
  source 1..75: mol_type = other DNA
agattgtcagcttgcgcatatcaccaacgccagcctttcacatcccagccgctggttattgaacgtcggcacggt

SEQ ID NO: 351213 - DNA, 75 bp, synthetic construct
  source 1..75: mol_type = other DNA
actgcagaatcaccataaaacagaggcattatctcagaataataaatataatgaagaaaagtcggctcaggaaag

SEQ ID NO: 351214 - DNA, 75 bp, synthetic construct
  source 1..75: mol_type = other DNA
cagcgtcaggcctcaccattataacggtgggctgacgccggaagagtcagagaacagataccatttttactgtaa

SEQ ID NO: 351215 - DNA, 75 bp, synthetic construct
  source 1..75: mol_type = other DNA
ctcaccattacaacggtgggttgacgccggaagaatcagagaacagataccgtttttactataaaaccgtggcca

SEQ ID NO: 351216 - DNA, 75 bp, synthetic construct
  source 1..75: mol_type = other DNA
aaaccagtgggctgggccatgtcgttctcgccggacagcaggctcaccatgaaagcgctggaaatggcatgggaa

SEQ ID NO: 351217 - DNA, 75 bp, synthetic construct
  source 1..75: mol_type = other DNA
cagctgaaatactccgacctggctgccactgccggatatatctctgccatgatacctccgttgtcatgggtgatg

SEQ ID NO: 351218 - DNA, 75 bp, synthetic construct
  source 1..75: mol_type = other DNA
acaggcaaagacgtggcccggcagcaaatcagcagttatattctgaattattacaatagcgtcaggcctcaccat

SEQ ID NO: 351219 - DNA, 75 bp, synthetic construct
  source 1..75: mol_type = other DNA
gtcagcgaatgccgatactgccctgataagcagtgccctgcggatggcgtatgaggtgcgtggtcagccgcggga

SEQ ID NO: 351220 - DNA, 75 bp, synthetic construct
  source 1..75: mol_type = other DNA
gctggctggaaaccggtgcttctgtttttccggtgctggctatcgtattgattgtgcgttcgtttatttatgaac

SEQ ID NO: 351221 - DNA, 75 bp, synthetic construct
  source 1..75: mol_type = other DNA
tctggtcggtcgggcaacggctatctggatgagcttcgataagcaagaaggcgaatggccgacaggtgtgcgctt

SEQ ID NO: 351222 - DNA, 75 bp, synthetic construct
  source 1..75: mol_type = other DNA
ttaaatatccggaagatccaaagcttgattacatcaagcgcgcggtgggtttaccgggcgataaagtcacttacg

SEQ ID NO: 351223 - DNA, 75 bp, synthetic construct
  source 1..75: mol_type = other DNA
gtgagacgcgtggtcaaccgcgtgatgtcatgttccatagcgaccagggaagccaatatacaggtctgaaatatc

SEQ ID NO: 351224 - DNA, 75 bp, synthetic construct
  source 1..75: mol_type = other DNA
gcagttgtcagcccggaaaacatcaatacaaaaatgcctgtcaggagcatacgtgtttgccgaatctgctcgagc

SEQ ID NO: 351225 - DNA, 75 bp, synthetic construct
  source 1..75: mol_type = other DNA
attgaaaacaccggaaatatcattgagtgtacagacttgcaagagacaaccaacgccattaaagttcatttttaa

SEQ ID NO: 351226 - DNA, 75 bp, synthetic construct
  source 1..75: mol_type = other DNA
atcaatgcaacgcgtcagattgcagcggcacaacaggaaatggcccgggaagcatcgaacagagcagaaagtgcc

SEQ ID NO: 351227 - DNA, 75 bp, synthetic construct
  source 1..75: mol_type = other DNA
tattactttgtatgaacgcgtcacgacccgtaaagagtttgcacgccacagagaacaagaaatcaaaaaattaca

SEQ ID NO: 351228 - DNA, 75 bp, synthetic construct
  source 1..75: mol_type = other DNA
atgggaatacaccgcagcagttaccggtactggcaaaaacgacgcgatacggtgaatccggtgcatgtcaggttg

SEQ ID NO: 351229 - DNA, 75 bp, synthetic construct
  source 1..75: mol_type = other DNA
ttgtgcagcgaaatacgccgggcgtggaaccaaagtcggggctctgcgggcgcgcgcactctggctgaaatgttg

SEQ ID NO: 351230 - DNA, 75 bp, synthetic construct
  source 1..75: mol_type = other DNA
tgacccgcagccatgaatatgctgaaatggcatcccgtactgaaagcatgagtgggcagatgagtgaagatctgt

SEQ ID NO: 351231 - DNA, 75 bp, synthetic construct
  source 1..75: mol_type = other DNA
gcactacttgcgcagccagaaaaataccatttgcaaaaggtggttatcgaaggtgttggcaatattgagtttgaa

SEQ ID NO: 351232 - DNA, 75 bp, synthetic construct
  source 1..75: mol_type = other DNA
aaatggccgccgaacgcatgtactgttgcagctggttatcaaacaaaatcacacagatatccaccggttactggg

SEQ ID NO: 351233 - DNA, 75 bp, synthetic construct
  source 1..75: mol_type = other DNA
gtgaatgaagtttatgtgattgccggtggtgagtggttgcgtaacaacctgaatgccattgcagcatttatgaat

SEQ ID NO: 351234 - DNA, 75 bp, synthetic construct
  source 1..75: mol_type = other DNA
tgacactgtccgtcctgaaaggctatgtgtttgccctgatgtggttccagagctggccgttgctgtatgccattc

SEQ ID NO: 351235 - DNA, 75 bp, synthetic construct
  source 1..75: mol_type = other DNA
gtgaatgaagtttatgtgattgccggtggtgagtggttgcggaataacctgaacgccattgccgcctttatgggg

SEQ ID NO: 351236 - DNA, 75 bp, synthetic construct
  source 1..75: mol_type = other DNA
gcagcaaatcagcagttatattctgaattattacaatagcgtcaggcctcaccattataacggagggctgacgcc

SEQ ID NO: 351237 - DNA, 75 bp, synthetic construct
  source 1..75: mol_type = other DNA
tgaaatactctgacctggcgtccactgccggatatatctctgccatgatacctccgttgtcatggatgatggtaa

SEQ ID NO: 351238 - DNA, 75 bp, synthetic construct
  source 1..75: mol_type = other DNA
ggagcatagaacagcaatataatgatttacataactttcataaaacagaagagatgtctcaagagcgtaaatata

SEQ ID NO: 351239 - DNA, 75 bp, synthetic construct
  source 1..75: mol_type = other DNA
gacaacattccgctcatcgactcactcagtatgtgcagaacatggtatccggaattctttatccagagaaagttg

SEQ ID NO: 351240 - DNA, 75 bp, synthetic construct
  source 1..75: mol_type = other DNA
catgaagagtcgttatcgtgtcgatgtttttaatggttctaaactttataagtcaaacaaaattacaagttatca

SEQ ID NO: 351241 - DNA, 75 bp, synthetic construct
  source 1..75: mol_type = other DNA
catgcaactgattgatgtttatccggatgcccgcattgcgttgctggaaaaagagtccggtccggcctgtcatca

SEQ ID NO: 351242 - DNA, 75 bp, synthetic construct
  source 1..75: mol_type = other DNA
cgtcgcaagaaatataggcatcgacaaatcctgggtaggttcgccatatgctcccgcaagtaaagaaacccgtac

SEQ ID NO: 351243 - DNA, 75 bp, synthetic construct
  source 1..75: mol_type = other DNA
actaatattgaaactggtgtttgttgtgaccttgttgttataaatcaggaggtttcttctttacctcgttttatt

SEQ ID NO: 351244 - DNA, 75 bp, synthetic construct
  source 1..75: mol_type = other DNA
tgcgattgccacacaggcattaaggaaacttggactgggaacactaagtgaaccgccccgattttcctggagagt

SEQ ID NO: 351245 - DNA, 75 bp, synthetic construct
  source 1..75: mol_type = other DNA
cctgcatgtacgtccggcctcccggctggtttataccttatcgacatttaatgccgatatgttgctggaaaaaaa

SEQ ID NO: 351246 - DNA, 75 bp, synthetic construct
  source 1..75: mol_type = other DNA
aagaaaggcagcttcgcttcccgtaaaacagatgacaaactgttgttacaggaaacagaacgtgcgctggcggat

SEQ ID NO: 351247 - DNA, 75 bp, synthetic construct
  source 1..75: mol_type = other DNA
cggtatatggctatcccgtgccaaccacaccgtggctgaatactgctcccggtttatttattgacggctatacat

SEQ ID NO: 351248 - DNA, 75 bp, synthetic construct
  source 1..75: mol_type = other DNA
gggctgatggctgaccggctggtgaaaatgctcggcctcgaaccgggctttattatctgcccgttccgtggcgag

SEQ ID NO: 351249 - DNA, 75 bp, synthetic construct
  source 1..75: mol_type = other DNA
cacagacgaaagaagaactgccgcaatttagcgcgccgactattttactggcggagaatatttacccttccacca

SEQ ID NO: 351250 - DNA, 75 bp, synthetic construct
  source 1..75: mol_type = other DNA
gcaaaggcagaggcaaacgggcttgacgatatcgccgcgatcttttccggccaccatactctgttagacgatcct

SEQ ID NO: 351251 - DNA, 75 bp, synthetic construct
  source 1..75: mol_type = other DNA
taacgccgaagtgagtgctctcagtgagcataaaaacggcgtggtcgtccgtacccgtcagggtagcgaatacga

SEQ ID NO: 351252 - DNA, 75 bp, synthetic construct
  source 1..75: mol_type = other DNA
caaggtttcgcggtgctgtcgtatgtgtatgaacacgaaaaacgcgacttagccagccgtattgtctccacccag

SEQ ID NO: 351253 - DNA, 75 bp, synthetic construct
  source 1..75: mol_type = other DNA
gctgacgaaaatggcgtttggttacggggtgatatattaggactattttgcggtaatgactccaacttactgata

SEQ ID NO: 351254 - DNA, 75 bp, synthetic construct
  source 1..75: mol_type = other DNA
ttatacatgctgaaaaagagtatcctgatgtaactgtattgccagaattacaatgttcaaagcgtgccgctgata

SEQ ID NO: 351255 - DNA, 75 bp, synthetic construct
  source 1..75: mol_type = other DNA
tatatgaacattctagtgcaggacgcgatttatatgctcctctttttaatcaattgggtgcagaggtcatttcct

SEQ ID NO: 351256 - DNA, 75 bp, synthetic construct
  source 1..75: mol_type = other DNA
tgttgttagcccgcacgagcaacagatgtgggccgccggtgtgctggcaaaagtgttgcccgatgatttatttgc

SEQ ID NO: 351257 - DNA, 75 bp, synthetic construct
  source 1..75: mol_type = other DNA
ggtttaaagcgcgacgaacttctcgattgtgcaatgcgcagtgagcagagtcgtgatttcaaaccctgcgttggt

SEQ ID NO: 351258 - DNA, 75 bp, synthetic construct
  source 1..75: mol_type = other DNA
gggctgatggctgaccggctggtgaaaatgctcggcctcgaaccgggctttatcatctgcccgttccgcggcgag

SEQ ID NO: 351259 - DNA, 75 bp, synthetic construct
  source 1..75: mol_type = other DNA
cgccacgtctgaactcgaaatggaacggatgcgcgcgttgtgggaacgcacggcggcgaacggtatcgagcgcga

SEQ ID NO: 351260 - DNA, 75 bp, synthetic construct
  source 1..75: mol_type = other DNA
tgatcgacggcagcgtgaccgtcgggccaaacgcggtgctggctttcaaacgcgaaggctatcgcaagcgcgact

SEQ ID NO: 351261 - DNA, 75 bp, synthetic construct
  source 1..75: mol_type = other DNA
tgtaacggctggagaaaacaaacctgtagatgttttacgtagcaatctgggcttgtatgcatcaaagctgatgcg

SEQ ID NO: 351262 - DNA, 75 bp, synthetic construct
  source 1..75: mol_type = other DNA
aagagtccggcccggcctgtccccagacgggccacaacagcggcgtgatccatgccggggtctattacacgcccg

SEQ ID NO: 351263 - DNA, 75 bp, synthetic construct
  source 1..75: mol_type = other DNA
aggccagaggcggtgagattatttataacgccgaagtcagcgccctcagtgagcataaaaacggcgtggtcgtcc

SEQ ID NO: 351264 - DNA, 75 bp, synthetic construct
  source 1..75: mol_type = other DNA
aaaaattgcctgttatcttgccagcatcagtaaactggataactttctcggtcagcttgatggtatccttcgccg

SEQ ID NO: 351265 - DNA, 75 bp, synthetic construct
  source 1..75: mol_type = other DNA
aatctgatttgtttgcgatgtttatgcagcacgccttttctttgctgaaagagaatggctttaacgcacaagtga

SEQ ID NO: 351266 - DNA, 75 bp, synthetic construct
  source 1..75: mol_type = other DNA
agagcacctgcaggaaaacctcgaatttatcgccgaaagtctctgtttatacgcgatcaagccgaaaaaaggcga

SEQ ID NO: 351267 - DNA, 75 bp, synthetic construct
  source 1..75: mol_type = other DNA
aaagatgctgtgattggcaaagtggtgaagagcgaagatattcctgccgccacccagctgtttacgccaaactgg

SEQ ID NO: 351268 - DNA, 75 bp, synthetic construct
  source 1..75: mol_type = other DNA
atgacgaccgcctgcgtcactatgctgatatgagaatcagtattgatctcgacgatggcgttaaggttaactacg

SEQ ID NO: 351269 - DNA, 75 bp, synthetic construct
  source 1..75: mol_type = other DNA
gccactgtatttagaaacaaccacatttcgacttaccaaggttcattctcttatgtcgaaaacggggtgatgctg

SEQ ID NO: 351270 - DNA, 75 bp, synthetic construct
  source 1..75: mol_type = other DNA
cgtattggttaaagggcatacataacttcaagcgagctaagctagctcattatttcttatcgggtggaagaaata

SEQ ID NO: 351271 - DNA, 75 bp, synthetic construct
  source 1..75: mol_type = other DNA
atgtgcaattcgctatatggagctacacggttatcttgagcacggcttccgtatgttgtcccacccggagacgcc

SEQ ID NO: 351272 - DNA, 75 bp, synthetic construct
  source 1..75: mol_type = other DNA
agatacctcacaaagtttattatcctactccatcggctgcatgatgggccgctactctctcgatcgcgaaggcct

SEQ ID NO: 351273 - DNA, 75 bp, synthetic construct
  source 1..75: mol_type = other DNA
cggagaaataaaaaaaattccattaaaaataatcaataatgacgatgaaatcaaagaattagtccaaatttatgc

SEQ ID NO: 351274 - DNA, 75 bp, synthetic construct
  source 1..75: mol_type = other DNA
cacccagctgtttacgccgaactggattgtgcagtatctggtacagaactccgttggccgccagtggttgcagac

SEQ ID NO: 351275 - DNA, 75 bp, synthetic construct
  source 1..75: mol_type = other DNA
tgaagagcgaagatattcctgccgccacccagctgtttacgccaaactggattgtgcagtatctggtacagaact

SEQ ID NO: 351276 - DNA, 75 bp, synthetic construct
  source 1..75: mol_type = other DNA
gatgaagctctgtaccgtgaactgctgctggggcagtgccacgccctgcaccacgcgatgccgttcctgttcgaa

SEQ ID NO: 351277 - DNA, 75 bp, synthetic construct
  source 1..75: mol_type = other DNA
acaactgattctggaaaataatatttttggtcttgatatcgacgaccgagcggcacagctttccggctttgcatt

SEQ ID NO: 351278 - DNA, 75 bp, synthetic construct
  source 1..75: mol_type = other DNA
cctaagcttcaagatgatgacaaggaaagtaaaaggtcagatttaaataaaatgtttatggacttggtggaaaat

SEQ ID NO: 351279 - DNA, 75 bp, synthetic construct
  source 1..75: mol_type = other DNA
gggagaattattgaaaactgcttaatacgttactttgatcctaagcttcaagatgatgacaaggaaagtaaaagg

SEQ ID NO: 351280 - DNA, 75 bp, synthetic construct
  source 1..75: mol_type = other DNA
ccgacggcgataaggccggtcgtccgcgttcctcaaccgtcgttatcgtgaaagccgacggcggtatgatcggca

SEQ ID NO: 351281 - DNA, 75 bp, synthetic construct
  source 1..75: mol_type = other DNA
cggacaacacaccccggattatattgtttttattcttttttgttgtttctgtcataaccacaattgcatgcggat

SEQ ID NO: 351282 - DNA, 75 bp, synthetic construct
  source 1..75: mol_type = other DNA
gtttttaacggagagaaaatagttcctgcggacggccttaagtcacagcctgtgattcttccgggcaagggaaaa

SEQ ID NO: 351283 - DNA, 75 bp, synthetic construct
  source 1..75: mol_type = other DNA
aaaataccaaagaaactgaaatcggcggcgccactggcgttggcgtacgtattctggacagccagagcggcgaag

SEQ ID NO: 351284 - DNA, 75 bp, synthetic construct
  source 1..75: mol_type = other DNA
cgcagaatatttacccgcgatgtacgtctgaatattgtctctttgcaggaaagtctgcatctggatatcgccaaa

SEQ ID NO: 351285 - DNA, 75 bp, synthetic construct
  source 1..75: mol_type = other DNA
cacccagctgtttacgccaaactggattgtgcagtatctggtgcagaactccgttggccgccagtggttgcagac

SEQ ID NO: 351286 - DNA, 75 bp, synthetic construct
  source 1..75: mol_type = other DNA
gaacttcttgattttgcagcaagcctgtatggttctccaaccagaacaataaaaaatatccctttttattttaga

SEQ ID NO: 351287 - DNA, 75 bp, synthetic construct
  source 1..75: mol_type = other DNA
atggatacgccacgcccacaattaccagattttcagtttcatcagaataacgacagttttaccctacattttcaa

SEQ ID NO: 351288 - DNA, 75 bp, synthetic construct
  source 1..75: mol_type = other DNA
gaagatcatatctacggctgcggcgaacaattctcctactttgatctgcgcggcaaaccgttcccgctgtggacc

SEQ ID NO: 351289 - DNA, 75 bp, synthetic construct
  source 1..75: mol_type = other DNA
tatccgcctctctgattttcgtggtgcatcaaaccaaggtcccaaaactcttgaagcgatacaacaccataattg

SEQ ID NO: 351290 - DNA, 75 bp, synthetic construct
  source 1..75: mol_type = other DNA
gttagtactggtttctccgataatatatcaaaacattatgtggcgtatgtcttatatttcatctggtagtgatgg

SEQ ID NO: 351291 - DNA, 75 bp, synthetic construct
  source 1..75: mol_type = other DNA
aagggctatcttgcattggagcatgaagttgatgctcgccttcgactgcatggtacgccagagggaatcgctaat

SEQ ID NO: 351292 - DNA, 75 bp, synthetic construct
  source 1..75: mol_type = other DNA
tcgttcagccaggcacaggataaaggactggcattgacggaatccccttttccaggtccacggcagaaagctgac

SEQ ID NO: 351293 - DNA, 75 bp, synthetic construct
  source 1..75: mol_type = other DNA
tcgcgtttcgtctgatgaaaaacaacacgccaggtaactataccttcatccttaaggggacgaaggaagtgccac

SEQ ID NO: 351294 - DNA, 75 bp, synthetic construct
  source 1..75: mol_type = other DNA
tatctcggacagaaaccgacaacggttatcgatctcactgatgacacaccagtcgtggtgcgtgaaggcgtaggt

SEQ ID NO: 351295 - DNA, 75 bp, synthetic construct
  source 1..75: mol_type = other DNA
aacaatcggtatgcgtgtgccttctaacccgattgcgcaggcgttgcttgaagcattgggcgaaccgatgctttc

SEQ ID NO: 351296 - DNA, 75 bp, synthetic construct
  source 1..75: mol_type = other DNA
cgactcatgcaacgcacggcgcaactactttgccaatggcgtaatccactttggcgggttcattggggcaacgcg

SEQ ID NO: 351297 - DNA, 75 bp, synthetic construct
  source 1..75: mol_type = other DNA
cgacgactgtctggaaatcgccgtgttgaaaggtgacatgggcgacgtgcagcattttgccgatgacgttatcgc

SEQ ID NO: 351298 - DNA, 75 bp, synthetic construct
  source 1..75: mol_type = other DNA
cagcctgagccagcgtcgtggttataacaaccgttccgaagctatccgcgatattctgcgtagcgccctggccca

SEQ ID NO: 351299 - DNA, 75 bp, synthetic construct
  source 1..75: mol_type = other DNA
tgcaactaaatcgctgttgagcctggcagaaattgttgatttgctcgtgttaccgtctggttttagtgtggacga

SEQ ID NO: 351300 - DNA, 75 bp, synthetic construct
  source 1..75: mol_type = other DNA
cgccatcattgatgacatcggtgcgtctggcggctactacatcgcctctgctgcggacgagatctatgctgaccg

SEQ ID NO: 351301 - DNA, 75 bp, synthetic construct
  source 1..75: mol_type = other DNA
tatgacgaagtgaaggcgcagcgagcccttcatccggagaaaaaggtctacgccatcattgatgacatcggtgcc

SEQ ID NO: 351302 - DNA, 75 bp, synthetic construct
  source 1..75: mol_type = other DNA
aaataagcggcggtgatgtgtcgcttgtcatgctggaaactatggctttttccgggcgcccgtggcccctgatag

SEQ ID NO: 351303 - DNA, 75 bp, synthetic construct
  source 1..75: mol_type = other DNA
tggtgtcatccgcgtttgacttcgcggatatcgccacaatgatcaatgcctctgtccgcgccggttaccagttta

SEQ ID NO: 351304 - DNA, 75 bp, synthetic construct
  source 1..75: mol_type = other DNA
cagattgttcctcttcgcccaggccaggcatatggcttgttcattaaccgtttcaatgagcttacggaatcacgc

SEQ ID NO: 351305 - DNA, 75 bp, synthetic construct
  source 1..75: mol_type = other DNA
aaagttattccactgtcgccaggccatgcctacgggatgtttatggaacgttttaacgagttatcggagttacgc

SEQ ID NO: 351306 - DNA, 75 bp, synthetic construct
  source 1..75: mol_type = other DNA
atggtagtgtccgctattgccagtacacctcactcttcacaggttctgtatatcgctacctcgcaaatccttgat

SEQ ID NO: 351307 - DNA, 75 bp, synthetic construct
  source 1..75: mol_type = other DNA
gttgattgctgcctgccaacgttgccccgcaaaggttgtattagtgactaacgaagtgggaatggggattgtgcc

SEQ ID NO: 351308 - DNA, 75 bp, synthetic construct
  source 1..75: mol_type = other DNA
cacggagcgggaagagtcgccatgcagaggcgcttattggggactcttcacaggttctgtatatcgccacctcac

SEQ ID NO: 351309 - DNA, 75 bp, synthetic construct
  source 1..75: mol_type = other DNA
ggaccggctgtacatgaccattgtttatcagcgtccggatgcggacacgacggaataccagaaattttatcaggt

SEQ ID NO: 351310 - DNA, 75 bp, synthetic construct
  source 1..75: mol_type = other DNA
cgaagaggctctggcctggatgaagtcggatggtattgcagcagcgatagaggctcagtcagagattgttttccc

SEQ ID NO: 351311 - DNA, 75 bp, synthetic construct
  source 1..75: mol_type = other DNA
acttagaagcggtgaagattttgaaatcagagacaaatatggctcaaaattaatcaaccccgttgattaccgatt

SEQ ID NO: 351312 - DNA, 75 bp, synthetic construct
  source 1..75: mol_type = other DNA
atgagctacattcagacattatccggcaaacattttaattacctcgatatccaacaggacgatatcgtgatcgag

SEQ ID NO: 351313 - DNA, 75 bp, synthetic construct
  source 1..75: mol_type = other DNA
gcatttgttgttggcaatggctgtgaccattggctcaatatcccagccgagacgacaaaagatgtggatcacgga

SEQ ID NO: 351314 - DNA, 75 bp, synthetic construct
  source 1..75: mol_type = other DNA
atgaaaaaagtaaatcattggatcaacggcaaaaatgttgcaggtaacgactacttccagaccaccaatccggca

SEQ ID NO: 351315 - DNA, 75 bp, synthetic construct
  source 1..75: mol_type = other DNA
atgacgatttactggagacgctggacagcctgagccagcgtcgtggttataacaaccgttccgaagctatccgcg

SEQ ID NO: 351316 - DNA, 75 bp, synthetic construct
  source 1..75: mol_type = other DNA
taatgaacccattatggtttttaacggagagaaaacgttcctgcagacagccttaagttacagctacttatttat

SEQ ID NO: 351317 - DNA, 75 bp, synthetic construct
  source 1..75: mol_type = other DNA
cagtgctaatcctgttcatcatgatggtcatgtgcagggaggctacagcgtgcccctgattattaccgccagtga

SEQ ID NO: 351318 - DNA, 75 bp, synthetic construct
  source 1..75: mol_type = other DNA
gtgatataatacataattcaaatattgcatttggaactagtggtgcaagaggtctagttgttgattttaaacagg

SEQ ID NO: 351319 - DNA, 75 bp, synthetic construct
  source 1..75: mol_type = other DNA
gaagataatgaacccgttatggtttttaacggggagaggaatgtaccggcagacagtctgaaaccgcagcctctg

SEQ ID NO: 351320 - DNA, 75 bp, synthetic construct
  source 1..75: mol_type = other DNA
cggacacatcaccgtggtcaccgtaacgggatggcactgctgctattcgtattatgctcagtaaacagttggccg

SEQ ID NO: 351321 - DNA, 75 bp, synthetic construct
  source 1..75: mol_type = other DNA
accgttttcctcaagaaaggcagctttgcttcccgtaaaacggatgacatgttgttgttacaggaaacagaacgt

SEQ ID NO: 351322 - DNA, 75 bp, synthetic construct
  source 1..75: mol_type = other DNA
ttcggttatcgaaaaacactttaagtttgacacagtggctgtagcaatagataacagacctagtagttttaatat

SEQ ID NO: 351323 - DNA, 75 bp, synthetic construct
  source 1..75: mol_type = other DNA
tcacccaataatttctttaataaattagggtatgaatcattatcctgttccactattgatgaaacggatggtgca

SEQ ID NO: 351324 - DNA, 75 bp, synthetic construct
  source 1..75: mol_type = other DNA
acggatggtgcaagatttactttaaataatggtgatattatacatctccgtccttccggtaatgctccagaactc

SEQ ID NO: 351325 - DNA, 75 bp, synthetic construct
  source 1..75: mol_type = other DNA
aaaattttggaagaagtaaaagtgatatactgttaaattatattcgtagtaatgcccctctctttattcatgagt

SEQ ID NO: 351326 - DNA, 75 bp, synthetic construct
  source 1..75: mol_type = other DNA
attggttctccatatgtgattgaggcgtttcaagacctgagtaaaaatcataaaaatattgcgggattcgaagcg

SEQ ID NO: 351327 - DNA, 75 bp, synthetic construct
  source 1..75: mol_type = other DNA
ttgaatatcatggtgtaattccgactcctgcattagctcattattcgatgcagaaaaacattccctgcataatgg

SEQ ID NO: 351328 - DNA, 75 bp, synthetic construct
  source 1..75: mol_type = other DNA
gggcaattgacactggaaccacaggtaatgatgacaaagactcgtgcctgggcgctggacgcagaaactgcgcct

SEQ ID NO: 351329 - DNA, 75 bp, synthetic construct
  source 1..75: mol_type = other DNA
ttatgctctgtaaacagctggccgttgcggatggttaaaggaactgttgtggggacaactgacacattgcgtgaa

SEQ ID NO: 351330 - DNA, 75 bp, synthetic construct
  source 1..75: mol_type = other DNA
cccctgattattaccgccagtgacatcacgtctcatcagtccgtcagcagaaaaatcagtgcccgtcatttcgca

SEQ ID NO: 351331 - DNA, 75 bp, synthetic construct
  source 1..75: mol_type = other DNA
gttctgttgtgcactgtatgcgcctgccggtatgacgtacggtaaaatcaacaacagttttattgtcgcgttgtt

SEQ ID NO: 351332 - DNA, 75 bp, synthetic construct
  source 1..75: mol_type = other DNA
ttatggtttttaacggagagaggaatgtactggcagacagtctgaaaccacagcctctgattcttccggtcaagg

SEQ ID NO: 351333 - DNA, 75 bp, synthetic construct
  source 1..75: mol_type = other DNA
cagcacatggtggatatccaatcagggaaaactgggggagcatgacacacgcatctctgttattgcttctgatgc

SEQ ID NO: 351334 - DNA, 75 bp, synthetic construct
  source 1..75: mol_type = other DNA
gtttttaacggagagaggaatgtaccggcagacagtctgaaaccgcagcctctgattcttccggacagaagataa

SEQ ID NO: 351335 - DNA, 75 bp, synthetic construct
  source 1..75: mol_type = other DNA
ttccggcatctgcctgttctccttttgccgttgaacgcatggcggcgcttttgcaacaaacagacgaccccgtga

SEQ ID NO: 351336 - DNA, 75 bp, synthetic construct
  source 1..75: mol_type = other DNA
agcgttgttccactgtcgccagacgcctggcaaatgttgagcgcgccgttgcgccagccgggcattgtggctttg

SEQ ID NO: 351337 - DNA, 75 bp, synthetic construct
  source 1..75: mol_type = other DNA
gcaaaagactcgacctggttgtccaaaattatccgcagcgctgtgatgaatttgtggccgtaacaacctacaaca

SEQ ID NO: 351338 - DNA, 75 bp, synthetic construct
  source 1..75: mol_type = other DNA
atgagcaaagacttttacgcaagactggcagctattcaggagaacttgaacgcgccaaagaatcagtacaactca

SEQ ID NO: 351339 - DNA, 75 bp, synthetic construct
  source 1..75: mol_type = other DNA
ctattacaaacacaaagataatttggcaactctcacgcaccactggctgtttggtgccgtactgttgtggtcaac

SEQ ID NO: 351340 - DNA, 75 bp, synthetic construct
  source 1..75: mol_type = other DNA
acccgtgccgccaaattagcaatggactatggctttaccgttctcaatctcggtgatgctgccaacttactgatt

SEQ ID NO: 351341 - DNA, 75 bp, synthetic construct
  source 1..75: mol_type = other DNA
agaaagctgtttttatagaaaatgaatatgctgcaacggattctctcgcaatgactggaggaatgcgactcgata

SEQ ID NO: 351342 - DNA, 75 bp, synthetic construct
  source 1..75: mol_type = other DNA
atcatgaaatctatggcagttactggaatccaagattgtatgctgtttataacctgaccgataatctcactctca

SEQ ID NO: 351343 - DNA, 75 bp, synthetic construct
  source 1..75: mol_type = other DNA
attatcgccgccgacagcaaccgcgacgctgaatttctgtttacctcaatgcagcaagcctttgtgaaactacgc

SEQ ID NO: 351344 - DNA, 75 bp, synthetic construct
  source 1..75: mol_type = other DNA
ttaacgggcagattttcgatcaccaggcgcgcctgcattcgtttgagctggcgatggatgttaaggaagagttac

SEQ ID NO: 351345 - DNA, 75 bp, synthetic construct
  source 1..75: mol_type = other DNA
ctataagctgtatctgatcgttgataaagagaatgaaaaagcgattcacatttaccgcaagcttggctttacggt

SEQ ID NO: 351346 - DNA, 75 bp, synthetic construct
  source 1..75: mol_type = other DNA
tttggtggcattccgcgccaggtttcagtaccgctggctgccgtgctggctatctacgcccgcgaaaatggcgca

SEQ ID NO: 351347 - DNA, 75 bp, synthetic construct
  source 1..75: mol_type = other DNA
agtttacagacggatactgacagctatattacctcattattagatgaaaacgcccaggtaatggaaacagcggat

SEQ ID NO: 351348 - DNA, 75 bp, synthetic construct
  source 1..75: mol_type = other DNA
tcagaaataagcctgtagcagatccgcaggatgccccctatctgaagggggtttatccactgacctcgccaatga

SEQ ID NO: 351349 - DNA, 75 bp, synthetic construct
  source 1..75: mol_type = other DNA
cagtaatgcccgttgctttagagaagcagcctgacggctggttttgcgatatgggcaagctggaagccgtgttgg

SEQ ID NO: 351350 - DNA, 75 bp, synthetic construct
  source 1..75: mol_type = other DNA
acggataataatagttatattgactcattattagatataagatatccgagtaatggaaacagagcatggtataac

SEQ ID NO: 351351 - DNA, 75 bp, synthetic construct
  source 1..75: mol_type = other DNA
tttttgaacgaatgaaagcgaaatacaccccagattttgcacgagtattggatgcatggaaatgggaaaatggcg

SEQ ID NO: 351352 - DNA, 75 bp, synthetic construct
  source 1..75: mol_type = other DNA
cgtcatatgagcggcgatattgataatttcccccgcgatgtcgcggagctggtggactggtttgatgcccgcgat

SEQ ID NO: 351353 - DNA, 75 bp, synthetic construct
  source 1..75: mol_type = other DNA
gttttttagggtttatgatgaaatttgggtggcagggcaggcacatattgacagatttaaaaatgcaggattcaa

SEQ ID NO: 351354 - DNA, 75 bp, synthetic construct
  source 1..75: mol_type = other DNA
tgatatttcagctgtagtaagtgaatgtatatcttcattatctccaattttcatttatattcctgaagatcgtaa

SEQ ID NO: 351355 - DNA, 75 bp, synthetic construct
  source 1..75: mol_type = other DNA
tttcactgatggatgaccagatggtcgacatggcatttatcactcaactgaacggcctgacagataagtggtttt

SEQ ID NO: 351356 - DNA, 75 bp, synthetic construct
  source 1..75: mol_type = other DNA
taagtattgcggatcacgcctggatcctggcggacaaaaaaaattgtcgctcatggcagtgcccaggcgttgcag

SEQ ID NO: 351357 - DNA, 75 bp, synthetic construct
  source 1..75: mol_type = other DNA
ttatcaagtgcaggcccatctactcattttttcaataatgaacatgttctgtactcaaaattacgcccttattta

SEQ ID NO: 351358 - DNA, 75 bp, synthetic construct
  source 1..75: mol_type = other DNA
gcgagcaagccatcaaactggctgatgattttttgcgtgctacgtttttggagatgtttggcgatcccgttcaaa

SEQ ID NO: 351359 - DNA, 75 bp, synthetic construct
  source 1..75: mol_type = other DNA
aagggaagccagtggtaaaataaaaaataaacgaaaagtgttaatcaattttgtaatgtcattgctcccaccatt

SEQ ID NO: 351360 - DNA, 75 bp, synthetic construct
  source 1..75: mol_type = other DNA
atgactgataaaaccattccgttttcgctactcgatctggcccccatccccgaaggttcaacggcgcgagaagcg

SEQ ID NO: 351361 - DNA, 75 bp, synthetic construct
  source 1..75: mol_type = other DNA
aatatgaccggcattgccagtgctgcaacgtcggtgttgattggctatctggcggcgaatactaccacgctgcac

SEQ ID NO: 351362 - DNA, 75 bp, synthetic construct
  source 1..75: mol_type = other DNA
ttaaagaacccggcaactctccggtaactccggatggttggataagctgtagtgatcgaatgccggataccaaaa

SEQ ID NO: 351363 - DNA, 75 bp, synthetic construct
  source 1..75: mol_type = other DNA
atatgctccgcacgctataccggaagcacctttcggcgcggagatgcaacgattaagcagggtaatggtattgag

SEQ ID NO: 351364 - DNA, 75 bp, synthetic construct
  source 1..75: mol_type = other DNA
ttgtggcagtggcgtttgtgtggggctggctggtcgcggactggcgcagggatagcctggagctggcgatcaata

SEQ ID NO: 351365 - DNA, 75 bp, synthetic construct
  source 1..75: mol_type = other DNA
cgtattgaaggtgtgtcaaacctgcgagaagcaagaaaatcagtacaggtaccgattattggaattgtaaaacgt

SEQ ID NO: 351366 - DNA, 75 bp, synthetic construct
  source 1..75: mol_type = other DNA
gttttaaaaacggtgtcttttttgcccaggccaaagggcggctgattattgatggtatagaggcactaaaatccg

SEQ ID NO: 351367 - DNA, 75 bp, synthetic construct
  source 1..75: mol_type = other DNA
gctggactacaaaagcctgtacccgtcgatcatccgcacctttctgattgatcccgtcggactggtggaaggcat

SEQ ID NO: 351368 - DNA, 75 bp, synthetic construct
  source 1..75: mol_type = other DNA
tcgccccttgcaatatcagaaccgcggcaccattaagtacgtatggaccaccaacggcccggagccgctggacta

SEQ ID NO: 351369 - DNA, 75 bp, synthetic construct
  source 1..75: mol_type = other DNA
tcaaacaacaggagccgcttttcattaaggcggccactgacgagcggatggtgtgggcgaaggaaagtcagttcg

SEQ ID NO: 351370 - DNA, 75 bp, synthetic construct
  source 1..75: mol_type = other DNA
ccaaccagcgcacagaacgccatcatcaatgttgcggcgatcggcatcaccttaaacccggctagcaaactggct

SEQ ID NO: 351371 - DNA, 75 bp, synthetic construct
  source 1..75: mol_type = other DNA
agaagcggcgaaaatcggtcgtgcactggtgcagcacgttaacgcctggtgggcggaaacgctgcaaaaacaacg

SEQ ID NO: 351372 - DNA, 75 bp, synthetic construct
  source 1..75: mol_type = other DNA
gggcgcgatgaagccaaacgtcagggtaataagccgctttcgcaggcgctgaagatcattatgaatgccttttat

SEQ ID NO: 351373 - DNA, 75 bp, synthetic construct
  source 1..75: mol_type = other DNA
accgtaaacgccttcgccgtccgctgagcgaatatcagcgtaatgtgccgcctcatgtacgcgccgctcgccttg

SEQ ID NO: 351374 - DNA, 75 bp, synthetic construct
  source 1..75: mol_type = other DNA
gtgctgcccagcctgaaataaaagtctataagctggctgatggcgaaggcatggtgttgctggttcaccctaacg

SEQ ID NO: 351375 - DNA, 75 bp, synthetic construct
  source 1..75: mol_type = other DNA
ctctattttccgcgtatgcatcgcgccggatatgtcgcccccaatctcggtgaagtgccgcctcacgccagccct

SEQ ID NO: 351376 - DNA, 75 bp, synthetic construct
  source 1..75: mol_type = other DNA
tgaccgccgtttcaccgaagataagcctgcactggcgacttataacctgaaagattgcgaactggtcacacagat

SEQ ID NO: 351377 - DNA, 75 bp, synthetic construct
  source 1..75: mol_type = other DNA
ccacccgccacggtgagctgtactgtatcggcctggaaggttgcgggcagcgcatcgtttatatgctggggccag

SEQ ID NO: 351378 - DNA, 75 bp, synthetic construct
  source 1..75: mol_type = other DNA
gcttctgcatctggcacaggtcacaggagccattcagtgggggcaatgcaaacttgtttacgagaaggacattta

SEQ ID NO: 351379 - DNA, 75 bp, synthetic construct
  source 1..75: mol_type = other DNA
ggttcttttctatcaagaacaaccattttctattccatattgttttaaaacaaatcaaaaaatactatccagatt

SEQ ID NO: 351380 - DNA, 75 bp, synthetic construct
  source 1..75: mol_type = other DNA
ggcgtaccgtatcagctgctggaatccagccgcctggcggaagtggagcccgcgctggcagaagtagcgcacaaa

SEQ ID NO: 351381 - DNA, 75 bp, synthetic construct
  source 1..75: mol_type = other DNA
gatctaagcgtagcgcgctacagccgtggatttacgccatcacgcccgggccatttacatggcgcacacagctaa

SEQ ID NO: 351382 - DNA, 75 bp, synthetic construct
  source 1..75: mol_type = other DNA
acaagataaataatcagggagggttgattgtttcctgtcagcctgttccggacagccctatggatcacccggaaa

SEQ ID NO: 351383 - DNA, 75 bp, synthetic construct
  source 1..75: mol_type = other DNA
acgctcatccggaggaatacgtggagcaatcaaacgcctacttccttctgaatttcttgagttcaacaatataaa

SEQ ID NO: 351384 - DNA, 75 bp, synthetic construct
  source 1..75: mol_type = other DNA
atcacaattacagaagcagaagttacgtgagcgaagagctgaattagcatacgctcgcgctcaggaaagagcccg

SEQ ID NO: 351385 - DNA, 75 bp, synthetic construct
  source 1..75: mol_type = other DNA
ctctcccaggtggtctattttatggatgacgatctgttcgatccgtcagccttaacggcgttgcccaaggcctac

SEQ ID NO: 351386 - DNA, 75 bp, synthetic construct
  source 1..75: mol_type = other DNA
cccgacgctggcctattttgaagcggcgatcagaagccgttttcccggcgcccggtgtcagctggtggatacctt

SEQ ID NO: 351387 - DNA, 75 bp, synthetic construct
  source 1..75: mol_type = other DNA
aaacgcttgattttgtcaaaaagaaagctgccagaaacaaggccacggcggaagcgaaagttcacgccaccacgg

SEQ ID NO: 351388 - DNA, 75 bp, synthetic construct
  source 1..75: mol_type = other DNA
aagatggtgcgccggtgtccactattctcgatgaaacctacaaaattgccattacacgtttcgataatcgcatcc

SEQ ID NO: 351389 - DNA, 75 bp, synthetic construct
  source 1..75: mol_type = other DNA
ccgcgtcgtgaaacgctggagatggtggttcgcgacctttatccgcgcggcggccatgttgagcaggccacgttc

SEQ ID NO: 351390 - DNA, 75 bp, synthetic construct
  source 1..75: mol_type = other DNA
ggaagaaaaatattggttgagacaaatcgtagagggggtattgggagaatgtccccgtgccagctttgaaatttt

SEQ ID NO: 351391 - DNA, 75 bp, synthetic construct
  source 1..75: mol_type = other DNA
ccgcacgcattcagcggtcagggtagccctgtaaacaccccccaaattatcgcggagctaaccacacatgactga

SEQ ID NO: 351392 - DNA, 75 bp, synthetic construct
  source 1..75: mol_type = other DNA
atgcacacagtttcatcagtaccatcttcctccactggcacgcacccgatgccggtttcagccccggctcaggaa

SEQ ID NO: 351393 - DNA, 75 bp, synthetic construct
  source 1..75: mol_type = other DNA
cttcagcgcctgccgccccattgatgccgctttctgatgtcgtccaggagcgttttattcgtctgcccgaagtga

SEQ ID NO: 351394 - DNA, 75 bp, synthetic construct
  source 1..75: mol_type = other DNA
gaaagtggtatggaaactctgaatatgtagtgaattgggaatttgatggtaaagaattgcttgaatatgctagct

SEQ ID NO: 351395 - DNA, 75 bp, synthetic construct
  source 1..75: mol_type = other DNA
tatgcgtaccgaatacgtagttcctctgcttgcgcgataccagggtaatatcgacctggtaaacgatcagcttaa

SEQ ID NO: 351396 - DNA, 75 bp, synthetic construct
  source 1..75: mol_type = other DNA
agcattgaacccgaaagtattaaagtgctcgacccggcctgcggctccggtcatattttgattgaagcctataat

SEQ ID NO: 351397 - DNA, 75 bp, synthetic construct
  source 1..75: mol_type = other DNA
gtggccatggtggtcacaatggactgaaagacatcatcagtaaattgggtaataaccctaactttcaccgtttac

SEQ ID NO: 351398 - DNA, 75 bp, synthetic construct
  source 1..75: mol_type = other DNA
tatgaatctcagcggcaaagccgttgcggcgatggccagttttttccgcattaatccggacgaaattctggtggc

SEQ ID NO: 351399 - DNA, 75 bp, synthetic construct
  source 1..75: mol_type = other DNA
aagcagaagagaaaggtgcaacggcctaccagattactgaagctcgcagcggtgatacctggcacgctacggcag

SEQ ID NO: 351400 - DNA, 75 bp, synthetic construct
  source 1..75: mol_type = other DNA
attcagtcatttaacagcaacatccgcaagaaaatggcacgcacctctgatggtccgaccgccattgcgtttatg

SEQ ID NO: 351401 - DNA, 75 bp, synthetic construct
  source 1..75: mol_type = other DNA
acgacttcacctcgtaagcgactggtttatctgcatattcctttttgcgcgacacactgcacgttttgtggtttt

SEQ ID NO: 351402 - DNA, 75 bp, synthetic construct
  source 1..75: mol_type = other DNA
cttctgcccctgccgcactactaatgccggcttctgatgccgttcaggagcgctttatccgcctgcctgaagtga

SEQ ID NO: 351403 - DNA, 75 bp, synthetic construct
  source 1..75: mol_type = other DNA
atggtaaagaaattaaggactatgttgtagatagatatccatatttaaatgggaattatgctttagttgtaaaaa

SEQ ID NO: 351404 - DNA, 75 bp, synthetic construct
  source 1..75: mol_type = other DNA
cgaatcctccctatatgggagcaaaaggaatgaatgcggacttaaaggatttcgcaaagataaatttccctaata

SEQ ID NO: 351405 - DNA, 75 bp, synthetic construct
  source 1..75: mol_type = other DNA
gctaatgagcactctagtcgagctacaagagtcaggcgactcaatgcaaaagcctgcggcgaagcaattgattga

SEQ ID NO: 351406 - DNA, 75 bp, synthetic construct
  source 1..75: mol_type = other DNA
ccaattctacatttctgaaaagaaagatcaggtaatgggtaaggtggtcaaaagtgaagacattcctgccgctac

SEQ ID NO: 351407 - DNA, 75 bp, synthetic construct
  source 1..75: mol_type = other DNA
ttgcgtttctggcatgaggtttctatacaaaatattggttttggttgcaaagatagagaagaagcatcgaactca

SEQ ID NO: 351408 - DNA, 75 bp, synthetic construct
  source 1..75: mol_type = other DNA
cgtatatgggtgggaaagggatgaacggtgaactgaaagagttcgctaagaaacaattcccggacagtaagtcag

SEQ ID NO: 351409 - DNA, 75 bp, synthetic construct
  source 1..75: mol_type = other DNA
taaggttaactacggcaaatttggcgatctgctggcggatgtcaaggcgatcaccggcagtgcgccacaggaggc

SEQ ID NO: 351410 - DNA, 75 bp, synthetic construct
  source 1..75: mol_type = other DNA
aacggttttaatgcgcaagtgaatatgcagtcatggatgttcctgtctagctatgaagcgcttcgtggatggttg

SEQ ID NO: 351411 - DNA, 75 bp, synthetic construct
  source 1..75: mol_type = other DNA
taatgaaatatcaattaactgtaatccattttttcgatatggaacatcacttacagacaatgagagaaatttaag

SEQ ID NO: 351412 - DNA, 75 bp, synthetic construct
  source 1..75: mol_type = other DNA
aagccgaacataagttggtcaaaaatttcttcaggcaatttagctatgagatattatccgaatggatatttattt

SEQ ID NO: 351413 - DNA, 75 bp, synthetic construct
  source 1..75: mol_type = other DNA
agtaaatggcgacctttcgaaaaggggggcgaatacagaaaatggtatggtaataattattatataattgactgg

SEQ ID NO: 351414 - DNA, 75 bp, synthetic construct
  source 1..75: mol_type = other DNA
aagcctgcatctggatatcgccaaactctggcagcaactcaatttccaccagcaggtacaaaccggcagtatggg

SEQ ID NO: 351415 - DNA, 75 bp, synthetic construct
  source 1..75: mol_type = other DNA
ggaactcgtgctgtgaaaggactagatacaaacgggtccattgatgtatttttgcgcagatggccggaagtcagc

SEQ ID NO: 351416 - DNA, 75 bp, synthetic construct
  source 1..75: mol_type = other DNA
gcattaagcgtactttctgttctctctttcggtgcattcgctgccgactccattgatgctgcacaagcacaaaat

SEQ ID NO: 351417 - DNA, 75 bp, synthetic construct
  source 1..75: mol_type = other DNA
gccagaattatggtgggctgggcaggggagccgaaaggctcgccggtttccgtatgcgccggtactgcgaaccct

SEQ ID NO: 351418 - DNA, 75 bp, synthetic construct
  source 1..75: mol_type = other DNA
atgatccgctacctgaatattgattctgcaatttcgggacgttacactgtctccgcaccttataaagcgggtgcc

SEQ ID NO: 351419 - DNA, 75 bp, synthetic construct
  source 1..75: mol_type = other DNA
ctgcattgaagcattccatgaaactgaaaccagtctcagtcacaccgctttccgtcgtaatcaatgggaggtgcg

SEQ ID NO: 351420 - DNA, 75 bp, synthetic construct
  source 1..75: mol_type = other DNA
gcgaaagcagaagccagcgggcttgacgatattgccgcaatcttttctggtcaccatacactgttagatgatccg

SEQ ID NO: 351421 - DNA, 75 bp, synthetic construct
  source 1..75: mol_type = other DNA
gattgcgaaagggccagaagctgaagaggcactgatcgctttccgtcagctggctgaagataactttggtgaaac

SEQ ID NO: 351422 - DNA, 75 bp, synthetic construct
  source 1..75: mol_type = other DNA
taagtctgcgcacaatgcggtactacgagagctgtattgaagcatttcatgaggccgaaaccagcctgactcaca

SEQ ID NO: 351423 - DNA, 75 bp, synthetic construct
  source 1..75: mol_type = other DNA
tacgggatatcatctgcctgccaaacaaaccatttctctgattgaacaacatcaactctggcgtgacgcttttta

SEQ ID NO: 351424 - DNA, 75 bp, synthetic construct
  source 1..75: mol_type = other DNA
atattatctgagtataataaaaatggaggtacagttgtcatggttactcatgatcttgagttaatcaatgaaaat

SEQ ID NO: 351425 - DNA, 75 bp, synthetic construct
  source 1..75: mol_type = other DNA
tgaagctgatttctgagctgaacagcgcgctgggcgtgacttgtgtggtggtttctcacgatgtgccggaagtgt

SEQ ID NO: 351426 - DNA, 75 bp, synthetic construct
  source 1..75: mol_type = other DNA
tgattgaatctggcgacagcgcacagagtcgccagcaggcagcaatggaaaaagagcaatggaatgacacgcgta

SEQ ID NO: 351427 - DNA, 75 bp, synthetic construct
  source 1..75: mol_type = other DNA
atgatttttaccaaaatcattaggggattcatcagcgcgcaaatgttatctgtagttaaacctcttcaggaattt

SEQ ID NO: 351428 - DNA, 75 bp, synthetic construct
  source 1..75: mol_type = other DNA
acaaattaatatcagaaggaaactgtacgggatatcatttgccagctaaacaaaccattacgcttattgaacaaa

SEQ ID NO: 351429 - DNA, 75 bp, synthetic construct
  source 1..75: mol_type = other DNA
ctggtttataccttatcgacatttaatgccgatatgttgctggagaaaaacggcaaatgcgtcacaccggagagt

SEQ ID NO: 351430 - DNA, 75 bp, synthetic construct
  source 1..75: mol_type = other DNA
tgcagaccaaatccaggtgggaaagacataaagtttagtgttgttacatttgaaagtgatgacggaagttcacga

SEQ ID NO: 351431 - DNA, 75 bp, synthetic construct
  source 1..75: mol_type = other DNA
aaaaaatcgctgctaacggtggcctgattgtctcctgccagccggttccggacagcccgctcgataaacccgaaa

SEQ ID NO: 351432 - DNA, 75 bp, synthetic construct
  source 1..75: mol_type = other DNA
ggcgacacttcccttgatgacgcctttgacggctggtacaggctgatcgcccaggccgcccgccgtcctggcagg

SEQ ID NO: 351433 - DNA, 75 bp, synthetic construct
  source 1..75: mol_type = other DNA
caggagccacctgtctggctggatatcgaaatcactactgatgagtatctgcatgatattcagcgcaaaatccag

SEQ ID NO: 351434 - DNA, 75 bp, synthetic construct
  source 1..75: mol_type = other DNA
cacaaaactttccaccagccgactacatcgcgctcgggcatattcaccgcgcgcagattattggcggcatggaac

SEQ ID NO: 351435 - DNA, 75 bp, synthetic construct
  source 1..75: mol_type = other DNA
ctaccattggttgatgactctagactgcggaaaaaggtttattgtcgaggtgtgcataaagatgaaaagacaggc

SEQ ID NO: 351436 - DNA, 75 bp, synthetic construct
  source 1..75: mol_type = other DNA
cgaagaaattagcaaaatgaacgagaacctgccgttgtacgcgttcgctaatacgtattccactctcgatgtaag

SEQ ID NO: 351437 - DNA, 75 bp, synthetic construct
  source 1..75: mol_type = other DNA
tattcttctgagcttatgtgatcaaccactagaacttgaaataaatataaatgactcggtcttcaaagaaattca

SEQ ID NO: 351438 - DNA, 75 bp, synthetic construct
  source 1..75: mol_type = other DNA
gtaattttgaatttaaggtcatcggacgtattacagataaagataagagttggttagaaagccagcctggcgttg

SEQ ID NO: 351439 - DNA, 75 bp, synthetic construct
  source 1..75: mol_type = other DNA
agcgatgcgaacattgacgacactatttacgcttatcttgcgaaaatagttgacggatccaaaaaccagcctctg

SEQ ID NO: 351440 - DNA, 75 bp, synthetic construct
  source 1..75: mol_type = other DNA
gtttctgctggaaatgccccacgctacgttgcacctaattctgatatcagccctggtaaggatatgtactctctt

SEQ ID NO: 351441 - DNA, 75 bp, synthetic construct
  source 1..75: mol_type = other DNA
tccatccactttgactccgcgtgggtaccttacaccaacttctcaccgatttacgaaggtaaatgcggtatgagc

SEQ ID NO: 351442 - DNA, 75 bp, synthetic construct
  source 1..75: mol_type = other DNA
ctgaagatttcttcaaccaggttgagtcaaaagagtatgtagaggatgcactgctgttttatctcgagaaagcta

SEQ ID NO: 351443 - DNA, 75 bp, synthetic construct
  source 1..75: mol_type = other DNA
gtcaaaagagtatgtagaggatgcactgctgttttatctggagaaggctaaggcagcctttcctgaaaaagattg

SEQ ID NO: 351444 - DNA, 75 bp, synthetic construct
  source 1..75: mol_type = other DNA
acgcaagaagagattaccgagaaatatacggcaatcgcagaccttggtaaaagtgccgcatctggcagcgttatg

SEQ ID NO: 351445 - DNA, 75 bp, synthetic construct
  source 1..75: mol_type = other DNA
ttattactattccggttgaagaaacattaccctgtggcacaatatgccgcggtatggtcgaaaaattatcgtatt

SEQ ID NO: 351446 - DNA, 75 bp, synthetic construct
  source 1..75: mol_type = other DNA
tctgccagggcactaaaatttaaaggtctgtgccttaagggatttcgttcgaataacgttctgaaggttgaataa

SEQ ID NO: 351447 - DNA, 75 bp, synthetic construct
  source 1..75: mol_type = other DNA
ccagcaaaatattgaagcgcattacggcaaaccgcttcatgaagttgtcggtatcgtgacgccttttagcgcgca

SEQ ID NO: 351448 - DNA, 75 bp, synthetic construct
  source 1..75: mol_type = other DNA
ctatccccttttaaagaggaacataaaatattcagggattgtccggagcaaaataccggggatgtaatcagactg

SEQ ID NO: 351449 - DNA, 75 bp, synthetic construct
  source 1..75: mol_type = other DNA
aatccgagcaactgataagactgaacgcaacatggcaaacgttaagccaggttcgggcggcgcgtgagcttattg

SEQ ID NO: 351450 - DNA, 75 bp, synthetic construct
  source 1..75: mol_type = other DNA
ttgctggccccaggagcaaaattcagcgacaggcttggacactccggagataagtttccgctggcaaaggctcag

SEQ ID NO: 351451 - DNA, 75 bp, synthetic construct
  source 1..75: mol_type = other DNA
cgcactgttaaggagattatcaataacgaaattgacgcattcctgttggaacagaagaaaaaaataaaagatttc

SEQ ID NO: 351452 - DNA, 75 bp, synthetic construct
  source 1..75: mol_type = other DNA
agtatcagtatgatcgtgttttatccggcgaactccacccattccctggcatatacgaggcggtttccgaacaaa

SEQ ID NO: 351453 - DNA, 75 bp, synthetic construct
  source 1..75: mol_type = other DNA
agaattcgtgaataatttgtgtcgggtcgccaactggtatgaaattaagtcaatatacgatgaatatgtccgtct

SEQ ID NO: 351454 - DNA, 75 bp, synthetic construct
  source 1..75: mol_type = other DNA
gagccgctgttcgagtccgagtttgtgctggtagccagtaagtcccgaacatgcaccggcaccaccacgctggag

SEQ ID NO: 351455 - DNA, 75 bp, synthetic construct
  source 1..75: mol_type = other DNA
aactggcgcgtctggcggctcccgttcttcacgcccgtactttacagccagtttctggcagcgaaatcgacctgc

SEQ ID NO: 351456 - DNA, 75 bp, synthetic construct
  source 1..75: mol_type = other DNA
aaacgaaatacggtatttctgaccgtcgcgacggcgttattgatggcaaaaccgatgttaacggtgacggaaaac

SEQ ID NO: 351457 - DNA, 75 bp, synthetic construct
  source 1..75: mol_type = other DNA
tcccgcttttatgccgacatcatcaaatcaaaacccgcccagggcaaatacctgaacggctggtttaaccgcatg

SEQ ID NO: 351458 - DNA, 75 bp, synthetic construct
  source 1..75: mol_type = other DNA
atgtcacaaatcgttcattttcagggtgttccggttacagtagctaattctatgccgcaggctagtagcaaagcg

SEQ ID NO: 351459 - DNA, 75 bp, synthetic construct
  source 1..75: mol_type = other DNA
tcgtctctctgcgcatcaggttcaacaaacgctacgtcgttatcagtgcgatctgattagcggcctgctacccgc

SEQ ID NO: 351460 - DNA, 75 bp, synthetic construct
  source 1..75: mol_type = other DNA
gggtatatagcgccgacccgcgtaaagtgaaagacgcctgcctgctgccgttgctgcgtctggatgaagccagcg

SEQ ID NO: 351461 - DNA, 75 bp, synthetic construct
  source 1..75: mol_type = other DNA
actgtaatacgctctgctatcacggtaagttgttgcctaaaagagggcgtgaagagagcaatttaatgcccgcaa

SEQ ID NO: 351462 - DNA, 75 bp, synthetic construct
  source 1..75: mol_type = other DNA
tccagaaagacggtgaagatggctacttccacggtaaatgggcacgcggcggccctgaaatcgtcaacaatttag

SEQ ID NO: 351463 - DNA, 75 bp, synthetic construct
  source 1..75: mol_type = other DNA
cgcaacacctggtagtctttcaggaagtcattagaagtggctctattggctcggctgcaaaagaattagggttaa

SEQ ID NO: 351464 - DNA, 75 bp, synthetic construct
  source 1..75: mol_type = other DNA
gttacttcgatatagaaattgaacataccttcgacccgactatccagggcagtaacgaaacgggtaaagacgtca

SEQ ID NO: 351465 - DNA, 75 bp, synthetic construct
  source 1..75: mol_type = other DNA
aactggttctttgaaaactttgaagatccggcaaatgcttgtccgtatgaaagtagagaaggtggctatgcttac

SEQ ID NO: 351466 - DNA, 75 bp, synthetic construct
  source 1..75: mol_type = other DNA
gtgccgttgtggttattgatgaaaatgacaatgtaatttttagccaactggtagatgaaatcactaccgagccga

SEQ ID NO: 351467 - DNA, 75 bp, synthetic construct
  source 1..75: mol_type = other DNA
tgttaatggacctccgggaaccggaaaaaccacgctggtgctttctatcatcgccacgcagtgggccagagcggc

SEQ ID NO: 351468 - DNA, 75 bp, synthetic construct
  source 1..75: mol_type = other DNA
gaaaaaatacattctgcattaattcatctgccgctgcataaccatatgtcgctccaggagcaaaacatcgttatc

SEQ ID NO: 351469 - DNA, 75 bp, synthetic construct
  source 1..75: mol_type = other DNA
atgggatacggtttactggatattgcgaatcagtcacgtcgagaggcattacagggaataagtgacgccgacagg

SEQ ID NO: 351470 - DNA, 75 bp, synthetic construct
  source 1..75: mol_type = other DNA
atcgtttacctccccgctggatgttcctgaaaattgaaaccgatgaaggcgtggtcggttggggcgagcccgtga

SEQ ID NO: 351471 - DNA, 75 bp, synthetic construct
  source 1..75: mol_type = other DNA
atgatgctggatgaggccaccgggaaactggtggtctgggacggacaaaaagccggtagtgcggttggcatactg

SEQ ID NO: 351472 - DNA, 75 bp, synthetic construct
  source 1..75: mol_type = other DNA
atgcaaaccagcccgctgttaacacagcttatggaagcactgcgctgtctgtcgggcgtgggcccgaagtcggca

SEQ ID NO: 351473 - DNA, 75 bp, synthetic construct
  source 1..75: mol_type = other DNA
gatcgcctggaacagcgtctggcagaggaaaaaatcactgaagtgatcctcgcaactaacccgacggtcgaaggt

SEQ ID NO: 351474 - DNA, 75 bp, synthetic construct
  source 1..75: mol_type = other DNA
gaatgacgcatacgttgcggcaatggtaagcgatagtccatcagagcaaactaagcagcaggcggtaagggatca

SEQ ID NO: 351475 - DNA, 75 bp, synthetic construct
  source 1..75: mol_type = other DNA
aaacagggtgtggttagctgcagccgttaatggtggtgttaatgagacagcaaaaaaggactccgtcctagcaca

SEQ ID NO: 351476 - DNA, 75 bp, synthetic construct
  source 1..75: mol_type = other DNA
gttgggattacggcaccagcgaactgaaatactacggtgagaaagtcgagaacaaaaccctggcaacagcagccc

SEQ ID NO: 351477 - DNA, 75 bp, synthetic construct
  source 1..75: mol_type = other DNA
caaactcacattccgctggcagcgggggagcgcatgttctcgcgcttcgattttaaacgcgtgctggaggcgggg

SEQ ID NO: 351478 - DNA, 75 bp, synthetic construct
  source 1..75: mol_type = other DNA
gtatcgcgccggtttttatcgtggcggccccattctgatgagcgccatcgccgggatcgaccaggcgttatggga

SEQ ID NO: 351479 - DNA, 75 bp, synthetic construct
  source 1..75: mol_type = other DNA
cttcaaactgaacggttgtgaagaactggggctaattgataactcccgcgcggtagatgcggcagtcaacaccgt

SEQ ID NO: 351480 - DNA, 75 bp, synthetic construct
  source 1..75: mol_type = other DNA
ggtgattattgatacattaatgaataatgtattccactcatcaatgctcaacaaaattgaacgtctgcaacctgt

SEQ ID NO: 351481 - DNA, 75 bp, synthetic construct
  source 1..75: mol_type = other DNA
ttctccgtcctggttctgatgcgcgcaaaagccgccgccatattcgcgcgctgcgtcgggattttgtcgatcaac

SEQ ID NO: 351482 - DNA, 75 bp, synthetic construct
  source 1..75: mol_type = other DNA
ttccgatggtcaatatcacggaagcaagccagttatgggatgtcgctcaggcgcgcgtttgcgaagtcatcgtcg

SEQ ID NO: 351483 - DNA, 75 bp, synthetic construct
  source 1..75: mol_type = other DNA
ttgtacgttgatgatgattggcgcatggagtattgcttcgcaatgggatgccggtgccaatgcattaacgctggc

SEQ ID NO: 351484 - DNA, 75 bp, synthetic construct
  source 1..75: mol_type = other DNA
cgaatgaaacgtcgctcaccgtgggcaccgtgcattctcttcagggggcggaaagagcgattgttatattctcgc

SEQ ID NO: 351485 - DNA, 75 bp, synthetic construct
  source 1..75: mol_type = other DNA
tcgggcattccacggctgatcttcctgactgcgccgctggcgttcctgctgcttcatgcctacatcatctatgcg

SEQ ID NO: 351486 - DNA, 75 bp, synthetic construct
  source 1..75: mol_type = other DNA
actgattgtatttatggggtcgtttatcgctgtcactaatcctccggtgtatgatttcgctgattttcttaatga

SEQ ID NO: 351487 - DNA, 75 bp, synthetic construct
  source 1..75: mol_type = other DNA
tgacgttgttgtacgacttgcgggactgaaagcctatgatttgcaggaaggggttccggatggtctgaaatggaa

SEQ ID NO: 351488 - DNA, 75 bp, synthetic construct
  source 1..75: mol_type = other DNA
ctttcctgttttgagaataagaacaaatggccctgggactgcaggaagtcagatactgaagatgtgcacagactg

SEQ ID NO: 351489 - DNA, 75 bp, synthetic construct
  source 1..75: mol_type = other DNA
gttttgttggtaagtaataaaaaaatacgaacagagaagattgacgttgttgtacgagttgcagggctgaaagcc

SEQ ID NO: 351490 - DNA, 75 bp, synthetic construct
  source 1..75: mol_type = other DNA
cagccagctgtgggatatcgctcaggcgcgcgtttgcgaggtgatagtcggtattttgtgcggcggcatgatgat

SEQ ID NO: 351491 - DNA, 75 bp, synthetic construct
  source 1..75: mol_type = other DNA
ttcaatattctgacagattgcaaagctcattgctcaccacttcccgctctggttcgacaaggatattgccatcag

SEQ ID NO: 351492 - DNA, 75 bp, synthetic construct
  source 1..75: mol_type = other DNA
tgcaggatgcggcaattaaccttgctggttgcctgcaatatgcataccgtaagttaatcaaccatgacgcccccc

SEQ ID NO: 351493 - DNA, 75 bp, synthetic construct
  source 1..75: mol_type = other DNA
cttcttcaacgatgaagcggttgagcaggatgaagagtcgttgttcctgtggatgcgcgcccatccgtatgatga

SEQ ID NO: 351494 - DNA, 75 bp, synthetic construct
  source 1..75: mol_type = other DNA
cccacgcgcgttataagcttactccagaggagatggaagccttcaactctgcggtcgatcaccggctggcagaac

SEQ ID NO: 351495 - DNA, 75 bp, synthetic construct
  source 1..75: mol_type = other DNA
ctatgttccagtcgattaatgccttcgcagttatgctgtgcggtgtgttcctggcgtgggtggttaaagaaagcg

SEQ ID NO: 351496 - DNA, 75 bp, synthetic construct
  source 1..75: mol_type = other DNA
ggtttagccgatgcgttatggggggccattatcggttacggtgcattcgccattatctactggggttatcgcata

SEQ ID NO: 351497 - DNA, 75 bp, synthetic construct
  source 1..75: mol_type = other DNA
atggagatgtgaagtttctcgccgcgctgggtgcctggcatacatggacattcctgccgcggctggttttccttg

SEQ ID NO: 351498 - DNA, 75 bp, synthetic construct
  source 1..75: mol_type = other DNA
ggtttagccgatgcgttatggggggcgattattggttacggcacattcgctgtcatttactgggggtatcgcata

SEQ ID NO: 351499 - DNA, 75 bp, synthetic construct
  source 1..75: mol_type = other DNA
gatgcgccaacctgaactccgtgaaatcggccattgcccgccacggctacgagccggtggtgagccgtgatccgg

SEQ ID NO: 351500 - DNA, 75 bp, synthetic construct
  source 1..75: mol_type = other DNA
aaaaaaagagtttctttggctcattgataaagtataaagagaaaataccatatacgggttccagttcaaataaaa

SEQ ID NO: 351501 - DNA, 75 bp, synthetic construct
  source 1..75: mol_type = other DNA
atatgcaggcaatccagatggttattctacttacataaatagtatttatcttaatgtgttgcctttttatggatt

SEQ ID NO: 351502 - DNA, 75 bp, synthetic construct
  source 1..75: mol_type = other DNA
ggcaaccgcctgtttcagggaattgaagacggcgcgtacttttactttgttcacagctacgcaatgccggtcaat

SEQ ID NO: 351503 - DNA, 75 bp, synthetic construct
  source 1..75: mol_type = other DNA
cgtcgatttactgggcatcatcgacgaagatgtgccgaaaatgaccgactttggtctgccactgccgcatatggg

SEQ ID NO: 351504 - DNA, 75 bp, synthetic construct
  source 1..75: mol_type = other DNA
atgaacgtggtgatccttgataccggctgcgccaacctgaactcggtgaagtctgccattgcgcgccacggttat

SEQ ID NO: 351505 - DNA, 75 bp, synthetic construct
  source 1..75: mol_type = other DNA
actttttttctgggatgcaaagcatggcttgttacctgacagattcacttgcccgttactctggtctggtctttt

SEQ ID NO: 351506 - DNA, 75 bp, synthetic construct
  source 1..75: mol_type = other DNA
cggtagatgcggcggtcaacaccgtggcacaaattcgtgaagcttttggcaatcagattgagtttggtcttgatt

SEQ ID NO: 351507 - DNA, 75 bp, synthetic construct
  source 1..75: mol_type = other DNA
tctcccatgcaggcggtattaccgaatgctacaaaattgccggaatggcagaagcctatgacgtgacccttgcgc

SEQ ID NO: 351508 - DNA, 75 bp, synthetic construct
  source 1..75: mol_type = other DNA
cgaatactacccgaaactggcggcacaaacgcatattccactggcggcgggtgaacgcatgttctcacgcttcga

SEQ ID NO: 351509 - DNA, 75 bp, synthetic construct
  source 1..75: mol_type = other DNA
gcacgacgtgtagatttttcgctggcacgcctacgtcactataccggtacgccagttgaacacttccagcctttc

SEQ ID NO: 351510 - DNA, 75 bp, synthetic construct
  source 1..75: mol_type = other DNA
attgcaattagtacaaaatgaattgccaggttcaggttttgaacccgcgagcagtgaacgtgtatttcatctttg

SEQ ID NO: 351511 - DNA, 75 bp, synthetic construct
  source 1..75: mol_type = other DNA
aaaatttccataagaactggccgcaggtagagatggattttaaatcgggcgtgacgtttgacccgcagcctgcgt

SEQ ID NO: 351512 - DNA, 75 bp, synthetic construct
  source 1..75: mol_type = other DNA
agctatatcaatagctggataaaaagcaaacaacccgaaaaggctatgcagcttctcagcctcgatgacaatgcc

SEQ ID NO: 351513 - DNA, 75 bp, synthetic construct
  source 1..75: mol_type = other DNA
cgattactgagcaaaaacaacggggcgtcatgggatttattaacgcacgaaacctataacaaagaggccgcgtta

SEQ ID NO: 351514 - DNA, 75 bp, synthetic construct
  source 1..75: mol_type = other DNA
cattaagctgtttctcagtaaacgctttagctcttactgagggcgtaatcgtccatgatgccaaatcagcaatag

SEQ ID NO: 351515 - DNA, 75 bp, synthetic construct
  source 1..75: mol_type = other DNA
ggtgatgagtatttgaaactcatgaatatctacgctaccaatggcaacaaagaaaaagcggtagttttatctcaa

SEQ ID NO: 351516 - DNA, 75 bp, synthetic construct
  source 1..75: mol_type = other DNA
tgttatgaagacaaagtcagcgcattaaaaatcctgtatagtcatcaggacaatgagctaatggacaaatatttc

SEQ ID NO: 351517 - DNA, 75 bp, synthetic construct
  source 1..75: mol_type = other DNA
atatcaaacaaaataacgcaagggaatagcaataaaaacgagtttgtcataaattctataatatggaagaaaaaa

SEQ ID NO: 351518 - DNA, 75 bp, synthetic construct
  source 1..75: mol_type = other DNA
caggtatcgacttattattactggaatcaggaaaaccgcaccgcctgttttttaatatttacggacagagaaaat

SEQ ID NO: 351519 - DNA, 75 bp, synthetic construct
  source 1..75: mol_type = other DNA
agtgccagaaccggcatcaacgagcgctactacttcgactatccacgtatcctcgacgacatcaccactctgcgc

SEQ ID NO: 351520 - DNA, 75 bp, synthetic construct
  source 1..75: mol_type = other DNA
ggtgataaatcagcacacggagtacatgacggatatccagcgggctgtccgtttcttttttatccagaagtgcgc

SEQ ID NO: 351521 - DNA, 75 bp, synthetic construct
  source 1..75: mol_type = other DNA
gcgaaagacaaaccgagctacggtatggcgaccgatatgcaaggtaatgtggttctgctggcgctggacgaagtg

SEQ ID NO: 351522 - DNA, 75 bp, synthetic construct
  source 1..75: mol_type = other DNA
aaaaaatagccgcgacaaaaatcgaccacacctttaaaaccgctaatgatttgtgggaaatgactattacccatc

SEQ ID NO: 351523 - DNA, 75 bp, synthetic construct
  source 1..75: mol_type = other DNA
aacctttcagggttgtcatttagtcatcccgcacaaacccgaagagatgccgctggcgcatctgggtaaagtgct

SEQ ID NO: 351524 - DNA, 75 bp, synthetic construct
  source 1..75: mol_type = other DNA
ctcaaaagccattcattcgaatcagcagagcaggcagcagcattccttggtgtagttccggtagaaaggagatct

SEQ ID NO: 351525 - DNA, 75 bp, synthetic construct
  source 1..75: mol_type = other DNA
atgaagtctgcgaagcgcatctggcaacgttacttgagcaacaaccgcacggcccttattacctgctggggtatt

SEQ ID NO: 351526 - DNA, 75 bp, synthetic construct
  source 1..75: mol_type = other DNA
attcatttgcaggaacaacacttccattaactattttattcgaagaacgcaaaggagaatactccggatctcaaa

SEQ ID NO: 351527 - DNA, 75 bp, synthetic construct
  source 1..75: mol_type = other DNA
tcgtgtcgcggcccttcgcgacaatgacggcaactatcagcaaaattgcaatgaacgctatgctgacgtgctttg

SEQ ID NO: 351528 - DNA, 75 bp, synthetic construct
  source 1..75: mol_type = other DNA
agcatgggacgctacgagcattacaagagtttgctgataagcataacgttgaggtgcgcagggaagggggaagta

SEQ ID NO: 351529 - DNA, 75 bp, synthetic construct
  source 1..75: mol_type = other DNA
acagcgccgctgcgttgctggagaaaatcaaagctgagcgcgcagccagcgggggtaaaaaagcctcgcgtaaaa

SEQ ID NO: 351530 - DNA, 75 bp, synthetic construct
  source 1..75: mol_type = other DNA
tgaccgaacaggaaatcgtcagctactacgagcaaaacaaaaacagcttcatgactccggaacaattccgcgtga

SEQ ID NO: 351531 - DNA, 75 bp, synthetic construct
  source 1..75: mol_type = other DNA
ggatgtgtgcccatccgtatgatgatttagtggtgctggatgttactgccagtcagcaattggcagatcaatacc

SEQ ID NO: 351532 - DNA, 75 bp, synthetic construct
  source 1..75: mol_type = other DNA
taaatgttttgcctttttatggtttacaaagaaggagtggatatgatttagaaatcatatccactcaacctaacg

SEQ ID NO: 351533 - DNA, 75 bp, synthetic construct
  source 1..75: mol_type = other DNA
ccgaggcaaaattactcaccgggaaagagacactggatgaaattgctgactgctttcttgcgtgcggcgtaaaaa

SEQ ID NO: 351534 - DNA, 75 bp, synthetic construct
  source 1..75: mol_type = other DNA
cgcgcctgatgtctgcggtacttaaccaacaaggactgcctgcgacctggcttgatgcccgcgaatttttacgcg

SEQ ID NO: 351535 - DNA, 75 bp, synthetic construct
  source 1..75: mol_type = other DNA
tcaaccataccgtgcgcgatctgatcgacagcggcgataccattttgtcgatcagtgggatcttctccggcacgc

SEQ ID NO: 351536 - DNA, 75 bp, synthetic construct
  source 1..75: mol_type = other DNA
tggcggcgctgctcgacagcggtattaacgacgcagtgtatgcggaagtggtgggccacggggaagtatggtcgg

SEQ ID NO: 351537 - DNA, 75 bp, synthetic construct
  source 1..75: mol_type = other DNA
acccacagatgacaatatctgggttgttttaggtgttaataaatcaggactggttcttttcgataaggcctttca

SEQ ID NO: 351538 - DNA, 75 bp, synthetic construct
  source 1..75: mol_type = other DNA
ctttcctgtggatattgggcaacccgtaatatctggtgacagaggtgatatttatagtgttaactttaagatcag

SEQ ID NO: 351539 - DNA, 75 bp, synthetic construct
  source 1..75: mol_type = other DNA
tctctggctggcgcagagcaggctgcgggcgttaaagccactcagactggctggttcagcaaagataacctgccg

SEQ ID NO: 351540 - DNA, 75 bp, synthetic construct
  source 1..75: mol_type = other DNA
atatttgtccgacttgtggtgcaagttataatgataatttgctaagtttttcatcgcaagaaaatctgatgacat

SEQ ID NO: 351541 - DNA, 75 bp, synthetic construct
  source 1..75: mol_type = other DNA
cctacgattggatatcaaaaaattcttccattcaatacctacgcatgaagtaaaaagcctactcgctcagcactt

SEQ ID NO: 351542 - DNA, 75 bp, synthetic construct
  source 1..75: mol_type = other DNA
cgtataaatgatagaataactaagtttgttctagataaaagtcccattaactcatccgcatgcggctttgttcaa

SEQ ID NO: 351543 - DNA, 75 bp, synthetic construct
  source 1..75: mol_type = other DNA
ggaaaacccctgtttgccctggtggatagccattcgttttacgtcattggttattttgaagaaaccaaattgcgc

SEQ ID NO: 351544 - DNA, 75 bp, synthetic construct
  source 1..75: mol_type = other DNA
gcgaatcgtcgtcgtcatctctcacaaaattttatttctgccgaagaactcgataccgctaacctcaatgttaaa

SEQ ID NO: 351545 - DNA, 75 bp, synthetic construct
  source 1..75: mol_type = other DNA
cctcacgggctgcaggtggagctgccggatattccgaccaccaccaccgtgcagaccgtccagctatgggactga

SEQ ID NO: 351546 - DNA, 75 bp, synthetic construct
  source 1..75: mol_type = other DNA
atgcgctgggcggtggcgcgcatccaggacaagccgcgctggcatcgtgagtcaaatctgatgaagacctttgcg

SEQ ID NO: 351547 - DNA, 75 bp, synthetic construct
  source 1..75: mol_type = other DNA
atttgtgtccggtattacgggcgcactgagggcgtggtcgagaccgtgctcgccgcaaatccgggactggctgaa

SEQ ID NO: 351548 - DNA, 75 bp, synthetic construct
  source 1..75: mol_type = other DNA
tttgcgctggataaagtcccaggcgatgtcacgctggtgtcgggcaccacctgtagcattgccgtaggtcaataa

SEQ ID NO: 351549 - DNA, 75 bp, synthetic construct
  source 1..75: mol_type = other DNA
ccacgatgaatacagggacattaccaccaggagaccatacactgtactcacctcaatatgttgtcacagcaaagc

SEQ ID NO: 351550 - DNA, 75 bp, synthetic construct
  source 1..75: mol_type = other DNA
atcatggggatatagaggcggcactcttgatttaaatggaaataatgtaacctttactcgtcttcaggctgcaga

SEQ ID NO: 351551 - DNA, 75 bp, synthetic construct
  source 1..75: mol_type = other DNA
atagagttgggtgtaagagggcattttgcaaaactgcgggtaaaagagcttattgcgtctaactcagtgtttctt

SEQ ID NO: 351552 - DNA, 75 bp, synthetic construct
  source 1..75: mol_type = other DNA
tttacctcacgggctgcaggtggagctgccggacattccggcaatcaccaccgtgcagaccgtccagctatggga

SEQ ID NO: 351553 - DNA, 75 bp, synthetic construct
  source 1..75: mol_type = other DNA
gagtggtattttcacaaataacactatggaaataaaagaaaacgcctctctgactctgacagggataccttctgt

SEQ ID NO: 351554 - DNA, 75 bp, synthetic construct
  source 1..75: mol_type = other DNA
ttggcgttctttcatcaggaagtgagcatggtaataactgggttgtcacaactcaagattttcttcatcagcaac

SEQ ID NO: 351555 - DNA, 75 bp, synthetic construct
  source 1..75: mol_type = other DNA
atctggcagattatcaatttcgccagatgggagcgggttggttggctgatcttatgctcccctggctgggcgttt

SEQ ID NO: 351556 - DNA, 75 bp, synthetic construct
  source 1..75: mol_type = other DNA
gctgggaaggcatgtgatggcgtaatggcggaatttgctgggaagatggtcaggattgctaacgaattaccgatg

SEQ ID NO: 351557 - DNA, 75 bp, synthetic construct
  source 1..75: mol_type = other DNA
tttgcgacatgtgcaaaagccagttggatctggtgcatatcgttattgatgctgggaaggcatgtgatggcgtaa

SEQ ID NO: 351558 - DNA, 75 bp, synthetic construct
  source 1..75: mol_type = other DNA
cttaactgtaattccttgtgatatgacatcaccttttggttctaatcaatttattactattccggttgaagaaac

SEQ ID NO: 351559 - DNA, 75 bp, synthetic construct
  source 1..75: mol_type = other DNA
gggctaccttatctgaaggttaagttgcgcgtatggggcgaacctgcacatgcacgacgttctgcattagttgtt

SEQ ID NO: 351560 - DNA, 75 bp, synthetic construct
  source 1..75: mol_type = other DNA
cctgcaacatcattgataaaactggtttagaaatcagcgagagcaatcggctagacatcattgaaaaagccgtca

SEQ ID NO: 351561 - DNA, 75 bp, synthetic construct
  source 1..75: mol_type = other DNA
aataccgttttttgtctttcaaacgacgaaactattgacgcggccattcaagaagcagttctagcaatgcgcagc

SEQ ID NO: 351562 - DNA, 75 bp, synthetic construct
  source 1..75: mol_type = other DNA
ccgttgtactggatgatccaaatgatatcgaatcttacttacaaccaatgaacctcagccaaaacgatcttatac

SEQ ID NO: 351563 - DNA, 75 bp, synthetic construct
  source 1..75: mol_type = other DNA
gaatgaagatgacatcaccaatagcaaagggaaaagcggccacaacagagtgcgttgcccagagtatcggtgggc

SEQ ID NO: 351564 - DNA, 75 bp, synthetic construct
  source 1..75: mol_type = other DNA
ttctgaggcggtggtggaagtctcatttggttttccttcattgattggttttacttttatgtcagggatgatcaa

SEQ ID NO: 351565 - DNA, 75 bp, synthetic construct
  source 1..75: mol_type = other DNA
atgaaaaatatggttaatgagataagcggtatgtcttctgaggcggtggtggaagtctcatttggttttccttca

SEQ ID NO: 351566 - DNA, 75 bp, synthetic construct
  source 1..75: mol_type = other DNA
gtggcgaaagagaaatagaaaaacgcgtccagactgcactggaacaggttggcttacctttcgacgccgctcgtc

SEQ ID NO: 351567 - DNA, 75 bp, synthetic construct
  source 1..75: mol_type = other DNA
agggtgagcttatcctggatgatagccagcttaagctggatttagacatgccggaaggtgatgttataccactgc

SEQ ID NO: 351568 - DNA, 75 bp, synthetic construct
  source 1..75: mol_type = other DNA
cctgaaggggtgataacgaaaaagtcaggtactctgatatttcaagggcatccggtgattcatgctggaatgaca

SEQ ID NO: 351569 - DNA, 75 bp, synthetic construct
  source 1..75: mol_type = other DNA
agattgacagcgatgcgctgtatctcgatgaaatcacgcttaccagcgagcaggatgcagttctgcgctatggtc

SEQ ID NO: 351570 - DNA, 75 bp, synthetic construct
  source 1..75: mol_type = other DNA
ctgataacccacaacagcgtttgattaatcaggcggtggagattgtgcgtaaaggcggggtgattgtttatccaa

SEQ ID NO: 351571 - DNA, 75 bp, synthetic construct
  source 1..75: mol_type = other DNA
tatctcgggcagaaaccgacaacggttattgatcttaccgatgatacgcctgtcgtattgcgtgaaggcgtaggt

SEQ ID NO: 351572 - DNA, 75 bp, synthetic construct
  source 1..75: mol_type = other DNA
gactacattgatgcaatggatgaaacgtatgctgatttgcccgatgatctgcgttcttacattgagcttcttaat

SEQ ID NO: 351573 - DNA, 75 bp, synthetic construct
  source 1..75: mol_type = other DNA
cgtgactcagaacgtggttattgctgtcacggctttgatcgcgattgctgccctctcggttgcggtgatttacca

SEQ ID NO: 351574 - DNA, 75 bp, synthetic construct
  source 1..75: mol_type = other DNA
acggttgtgctgctcaatagcgggggcgacgctacccaggcggctgctattttaagtggtttgaccgctgagcaa

SEQ ID NO: 351575 - DNA, 75 bp, synthetic construct
  source 1..75: mol_type = other DNA
gtaggtgacaccgggcgttataacttcggccagaaatgcgttttctgggcggcgattattttcctggtcctgttg

SEQ ID NO: 351576 - DNA, 75 bp, synthetic construct
  source 1..75: mol_type = other DNA
cgtgggaatggatgcccttgatacactggttcagatggtggatgacaatccggcaccgtaccttctggtctcgag

SEQ ID NO: 351577 - DNA, 75 bp, synthetic construct
  source 1..75: mol_type = other DNA
ccggtgcactggcgtacagtggaacgctggcaacagcttgatgagttaattaatgcggacattaatccgcaacac

SEQ ID NO: 351578 - DNA, 75 bp, synthetic construct
  source 1..75: mol_type = other DNA
tcggtcagaaatgcgttttctgggcggcaattattttcctggtcctgctgctggtgagcggtgtgattatctggc

SEQ ID NO: 351579 - DNA, 75 bp, synthetic construct
  source 1..75: mol_type = other DNA
gatgggttaccagcgcatgggcgaagaaacaccatccacgctggtatcgtgaagtccgcaagacaacggaaaaga

SEQ ID NO: 351580 - DNA, 75 bp, synthetic construct
  source 1..75: mol_type = other DNA
tcggtcagaaatgcgttttctgggcggcgattattttcctggtcctgttgctggtgagcggcgtgattatctggc

SEQ ID NO: 351581 - DNA, 75 bp, synthetic construct
  source 1..75: mol_type = other DNA
gtcgcctcccgcgtcatgctgtcgtttggtgagtttgaattcagtattaatacggctgcgtataacgcgatgaag

SEQ ID NO: 351582 - DNA, 75 bp, synthetic construct
  source 1..75: mol_type = other DNA
tgcgcgcgctacgtcaggtaagccctgccggaaatattcgcgatattccgttcgtcgttctggtgggcggttctt

SEQ ID NO: 351583 - DNA, 75 bp, synthetic construct
  source 1..75: mol_type = other DNA
tctgcaaatggcgatgatcgccagtgaaattaagcaaaaactgcatgttgatgttcaggtcggaggcgcagaagc

SEQ ID NO: 351584 - DNA, 75 bp, synthetic construct
  source 1..75: mol_type = other DNA
ctatggggccatcatcaccaataatagtgagaaaaaatcaacggtaacactcgaccttcagacattaaaagccag

SEQ ID NO: 351585 - DNA, 75 bp, synthetic construct
  source 1..75: mol_type = other DNA
accagttgaatgttaccggcaaactgcagggcagcaataatactattcttgttaactttttaacaaagcagccaa

SEQ ID NO: 351586 - DNA, 75 bp, synthetic construct
  source 1..75: mol_type = other DNA
tagccattctggacttaggcgcaggttctaccgatgcctccatcatcaatcaaaaaggggaaatgattgccactc

SEQ ID NO: 351587 - DNA, 75 bp, synthetic construct
  source 1..75: mol_type = other DNA
ggtcaccgacgcgctagcacattatcgactggtcgccgggcgggggaatatccgtggtagcgaaggtccgcgcaa

SEQ ID NO: 351588 - DNA, 75 bp, synthetic construct
  source 1..75: mol_type = other DNA
agcatgagctgaacggtctaaatttattcaccggtgcattactgacctatacagacagcaatgccagcagccagg

SEQ ID NO: 351589 - DNA, 75 bp, synthetic construct
  source 1..75: mol_type = other DNA
tccggtgattcatgctggaatgacaacctcagccggccagagtgattgggaaaatcgtcagtttacaatggataa

SEQ ID NO: 351590 - DNA, 75 bp, synthetic construct
  source 1..75: mol_type = other DNA
cggtgtggggatggatgcccttgatacgctggttcagatggtggataaaaatcctgcgccgcatctgctggtttc

SEQ ID NO: 351591 - DNA, 75 bp, synthetic construct
  source 1..75: mol_type = other DNA
gcgtcaggttataaatccttcctgacagaggtcaataatctgaacaagcgtatgggtgacctgcgggatactcag

SEQ ID NO: 351592 - DNA, 75 bp, synthetic construct
  source 1..75: mol_type = other DNA
cagctctgttgatattgccagcggtcgtccgacagttgtgctttccgacgcacagcaggtgaatccggataatat

SEQ ID NO: 351593 - DNA, 75 bp, synthetic construct
  source 1..75: mol_type = other DNA
cataaaattggcgaaggcaccctgacagtaaacgggaccggtgtgaatgcaggtggactcaaggtaggggacggt

SEQ ID NO: 351594 - DNA, 75 bp, synthetic construct
  source 1..75: mol_type = other DNA
cctgaaaccttacctgaaagaggccgtcgcgctgaatgcgaagtccggcctgccggttatgcgcccgctgttcct

SEQ ID NO: 351595 - DNA, 75 bp, synthetic construct
  source 1..75: mol_type = other DNA
gtgctgatggtgcacgatcacgcactaatggactggattggggccaactcctaccgtacctcgcattacccttac

SEQ ID NO: 351596 - DNA, 75 bp, synthetic construct
  source 1..75: mol_type = other DNA
cctggcaaactcagccagcgctgttgactgcatctgttgcgctgtatcgcgtatggcagcagcagggcggtaaag

SEQ ID NO: 351597 - DNA, 75 bp, synthetic construct
  source 1..75: mol_type = other DNA
tggcaggctgctcgtaagtcccccctgttggttggcatagcctgcgaccgggaaaagctgattgtgcattacaaa

SEQ ID NO: 351598 - DNA, 75 bp, synthetic construct
  source 1..75: mol_type = other DNA
tgggccgcgacattctggtcgctccggtgcacgagcaaggtcgcagcgactggacgctctatctgccagaggata

SEQ ID NO: 351599 - DNA, 75 bp, synthetic construct
  source 1..75: mol_type = other DNA
acagcgaaaactatccgcaactggattcgcgtattaaacagtggaacaaagaaggcgtgcagttcctcgcctaca

SEQ ID NO: 351600 - DNA, 75 bp, synthetic construct
  source 1..75: mol_type = other DNA
gttgatccgttccttgatatggggcgttccgcgacaaacgtcatgagcaacgcaatgggcgctgcgatggtgagt

SEQ ID NO: 351601 - DNA, 75 bp, synthetic construct
  source 1..75: mol_type = other DNA
cacatgccatgttaaagctcactggctacgtcatgctcttcgctcccctgaccgtattcgccgctatttcagcat

SEQ ID NO: 351602 - DNA, 75 bp, synthetic construct
  source 1..75: mol_type = other DNA
tacaatgggactgaccgtggcctattcatgttggcgaagcacttcacctgtctgtcctttggctgtctgcgtcat

SEQ ID NO: 351603 - DNA, 75 bp, synthetic construct
  source 1..75: mol_type = other DNA
aaaaatcacttttaacgccccaaccgttccggttgtgaacaacgttgatgtgaaatgcgaaaccaatggtgatgc

SEQ ID NO: 351604 - DNA, 75 bp, synthetic construct
  source 1..75: mol_type = other DNA
gctatgcgttctcgcagctcagaagatgtttgtggctgcttcttttcttatacgcgccctgtatacgattatctg

SEQ ID NO: 351605 - DNA, 75 bp, synthetic construct
  source 1..75: mol_type = other DNA
aacactgcttcaccggaaacagcaaaactctatgcgcaagaaatatcgatattcacgacgattttcttacgactg

SEQ ID NO: 351606 - DNA, 75 bp, synthetic construct
  source 1..75: mol_type = other DNA
atggaaagtaaagaacgtgcaccagccattgtcgtcatagtaatcggtgactgtatcagtacatggaatgaggtg

SEQ ID NO: 351607 - DNA, 75 bp, synthetic construct
  source 1..75: mol_type = other DNA
caaacgcatattccactggcggcgggtgagcgcatgttctcacgtttcgattttaaacgtgtgctggaggcgggt

SEQ ID NO: 351608 - DNA, 75 bp, synthetic construct
  source 1..75: mol_type = other DNA
gctgaccaaaccgggtctgggcgttgaaattgatgaggagaaggtcattgccctcagcaaaaatgccccggactg

SEQ ID NO: 351609 - DNA, 75 bp, synthetic construct
  source 1..75: mol_type = other DNA
tacctgattggtcaggatcccgcacgcattaacgatctgtgggaagtgatgtaccgcgccggtttttaccgtggc

SEQ ID NO: 351610 - DNA, 75 bp, synthetic construct
  source 1..75: mol_type = other DNA
cgttaccgtcgataccaccattcaggaacatcgcgatcgcggtgatacctataacggtcagttctttccagcgga

SEQ ID NO: 351611 - DNA, 75 bp, synthetic construct
  source 1..75: mol_type = other DNA
gtattcacccttatttaacctgcaacttaacatctgttgatgaatatctgttccagcttccggcaaaccaagttt

SEQ ID NO: 351612 - DNA, 75 bp, synthetic construct
  source 1..75: mol_type = other DNA
tcaggtctcgacttattattactggaaccagggaaaacgcaccgcctgttttttaatatttacgggcagcacggt

SEQ ID NO: 351613 - DNA, 75 bp, synthetic construct
  source 1..75: mol_type = other DNA
atgtcactgagcagaactcaaattgttaactggctcactcgttgtggcgatattttcagcaccgagagcgagcat

SEQ ID NO: 351614 - DNA, 75 bp, synthetic construct
  source 1..75: mol_type = other DNA
gggaaatcatcacccgtaaacgggccacctttgctgagcaggatgctttgctggatgacgtatttttccgttatc

SEQ ID NO: 351615 - DNA, 75 bp, synthetic construct
  source 1..75: mol_type = other DNA
gtccccttccaaagaaacctgcggtatgtgccaggggcatcggagatttactgatgccaaggcaatgttggttgc

SEQ ID NO: 351616 - DNA, 75 bp, synthetic construct
  source 1..75: mol_type = other DNA
aacgcagtattggtcaccaggatcctggcgcgacctccgtgatgtttatgatgcaaatgctggcgttagccgcga

SEQ ID NO: 351617 - DNA, 75 bp, synthetic construct
  source 1..75: mol_type = other DNA
gaaaaactccccgccattgaggacaaggatattggtttcatcctcaaaaataccggtatgacactgctttccagc

SEQ ID NO: 351618 - DNA, 75 bp, synthetic construct
  source 1..75: mol_type = other DNA
gcgacgctgaccacgggctaaatatgaaccgaggctttagcaaagtggtggaaaaactccctgctatcgcagata

SEQ ID NO: 351619 - DNA, 75 bp, synthetic construct
  source 1..75: mol_type = other DNA
atgactatgactaaagacgctttccagtttggcattcagcctgttcgtatcaccgacaccgacaacctccagatt

SEQ ID NO: 351620 - DNA, 75 bp, synthetic construct
  source 1..75: mol_type = other DNA
gaaataaatttcgaaacgggtgtcgatggtgagttttttatagccggtacaccttacgcgaaaataggcgtaaac

SEQ ID NO: 351621 - DNA, 75 bp, synthetic construct
  source 1..75: mol_type = other DNA
ttgagcaggatagctgttcggcagatgcagaagatgaattgccggacttatccggagccagagtggcgatttata

SEQ ID NO: 351622 - DNA, 75 bp, synthetic construct
  source 1..75: mol_type = other DNA
gtgacttctttggcaacggaaatttactgaagctggacaggttgctggacaacgttgaaaacgcctaccctgcag

SEQ ID NO: 351623 - DNA, 75 bp, synthetic construct
  source 1..75: mol_type = other DNA
gggttagatttagagctattgaatacatttattgcacaaatatttgatgcaaaaaattgtcgttcattattaaaa

SEQ ID NO: 351624 - DNA, 75 bp, synthetic construct
  source 1..75: mol_type = other DNA
acgcgaaattattaaggccgcagcctggcaaaataaacatcgcggcacgcgtggtgccgtcgaacgagcattatt

SEQ ID NO: 351625 - DNA, 75 bp, synthetic construct
  source 1..75: mol_type = other DNA
tgaaattaaatggcggattatatatatcaggctcgccaattgttagtttaaacgtggagatagacccaaatggct

SEQ ID NO: 351626 - DNA, 75 bp, synthetic construct
  source 1..75: mol_type = other DNA
cttctaaaaatgaacgagatggaattattacgtacattaacagattaaatggtgatgttgagcgagctatagagt

SEQ ID NO: 351627 - DNA, 75 bp, synthetic construct
  source 1..75: mol_type = other DNA
aggtgctagtgatgccgtaaatgtaatcagggagagcgaatattcgactctttgcgacatgtgcagaagtcagtt

SEQ ID NO: 351628 - DNA, 75 bp, synthetic construct
  source 1..75: mol_type = other DNA
actttgaagattacttgctgtcggtaaaagctgaaccaacattgtctctgaaagccgatttcgtcaccccgacaa

SEQ ID NO: 351629 - DNA, 75 bp, synthetic construct
  source 1..75: mol_type = other DNA
tgtgccaatgaaagactccggtgtggattggattggtaagattccagcgcattgggacgttaagaggttaaaata

SEQ ID NO: 351630 - DNA, 75 bp, synthetic construct
  source 1..75: mol_type = other DNA
ttcctcgacaagaaaaccgctctaatcgacgaagcgatttcgatcaaagagcagcaaattagcctgctgaaagag

SEQ ID NO: 351631 - DNA, 75 bp, synthetic construct
  source 1..75: mol_type = other DNA
agtatgatcaatatagtgactctggttatgagtggattggcgagattccagagcattgggacttggttaagttag

SEQ ID NO: 351632 - DNA, 75 bp, synthetic construct
  source 1..75: mol_type = other DNA
catctggagaaatttgaaaataaagaagttctcttcaggctaggtttcagctccgtaataaacatatcctcatca

SEQ ID NO: 351633 - DNA, 75 bp, synthetic construct
  source 1..75: mol_type = other DNA
gtcctgactggcagcctgaccaccaaggcagatgctatcatggacgcgctgtacgagaatacagagacatccttc

SEQ ID NO: 351634 - DNA, 75 bp, synthetic construct
  source 1..75: mol_type = other DNA
ccgtggtggtaagcgacctgaagtcgttaccgttccgtccggacaggagattgtagtcgaaccaattgaacaggc

SEQ ID NO: 351635 - DNA, 75 bp, synthetic construct
  source 1..75: mol_type = other DNA
agttcggcattgagccagtacgcattaccaacaccgacaacattcaggtcaatgaaggtctgcctactaacgctg

SEQ ID NO: 351636 - DNA, 75 bp, synthetic construct
  source 1..75: mol_type = other DNA
ggcttcggtggcgaagacgctattgtcgatatgctgggtacagacatcgcctactacaacggtgcagaccgtggc

SEQ ID NO: 351637 - DNA, 75 bp, synthetic construct
  source 1..75: mol_type = other DNA
gtttgagaacaccgagtcctctttcggctctgaagtgtctgattacggcatcatcgcccatgagtcccaactgaa

SEQ ID NO: 351638 - DNA, 75 bp, synthetic construct
  source 1..75: mol_type = other DNA
ctgaccgctctgtggtcgttcctgtccatggtggcaagcgacctgaagtcgtgaccgttccgtctggacaagaaa

SEQ ID NO: 351639 - DNA, 75 bp, synthetic construct
  source 1..75: mol_type = other DNA
cccagtctcacgaccttgagattctcggcaaggtgtttgttgtagctgaagctgctacgaccatcaagatgggta

SEQ ID NO: 351640 - DNA, 75 bp, synthetic construct
  source 1..75: mol_type = other DNA
tcgtcgatatgctggggactgacgtcgcctattacaacggtgaagaccgtggcgtgttcatgatggctaagcgtt

SEQ ID NO: 351641 - DNA, 75 bp, synthetic construct
  source 1..75: mol_type = other DNA
ggtgtgctggaaatttatatgggccactacatgcgagaatggctggcggagctggggatggtcacgtcaggcgaa

SEQ ID NO: 351642 - DNA, 75 bp, synthetic construct
  source 1..75: mol_type = other DNA
gggacgttgcagcaggacgctctgaacatctgcgataacgtggtgcgcactatcaatagccgcatggtcgatgtg

SEQ ID NO: 351643 - DNA, 75 bp, synthetic construct
  source 1..75: mol_type = other DNA
cctattgaacaggctatcctcgtgtctcaccagaccaagctatgggacgctaaggcctcaactggtttcactcag

SEQ ID NO: 351644 - DNA, 75 bp, synthetic construct
  source 1..75: mol_type = other DNA
ggttctgaggttgctgattacggcatcatcgcccatgagtcacacctcaaggcactgtcacgtcttgctgctaag

SEQ ID NO: 351645 - DNA, 75 bp, synthetic construct
  source 1..75: mol_type = other DNA
aaatgccgcacttgttggttgcggggactaccggttccggtaagtcagtcggtgtgaacgcgatgatcctgagca

SEQ ID NO: 351646 - DNA, 75 bp, synthetic construct
  source 1..75: mol_type = other DNA
aaggcatcccgcatctgttaacggaagtcgttactgatatgaaagatgccgccaacgcgctgcgctggtgtgtta

SEQ ID NO: 351647 - DNA, 75 bp, synthetic construct
  source 1..75: mol_type = other DNA
gatgctgccaacgctttgcgctggtgcgtaaatgaaatggaacgtcgttataagctgatgtccgccctaggtgtg

SEQ ID NO: 351648 - DNA, 75 bp, synthetic construct
  source 1..75: mol_type = other DNA
tgatccctcaacacagcaatggagttacgctggcgaatctccctggtacggaacggctggtgcggcggttgtgaa

SEQ ID NO: 351649 - DNA, 75 bp, synthetic construct
  source 1..75: mol_type = other DNA
cggtgaaactgcaggcggcaaagcggtgacggattcagttttgatttctgtgagagataataaagttactgtgca

SEQ ID NO: 351650 - DNA, 75 bp, synthetic construct
  source 1..75: mol_type = other DNA
caacagccagttgcgccgcagccgcagtatcagcagccacaacagccagttgcgccacagccgcaggataccctg

SEQ ID NO: 351651 - DNA, 75 bp, synthetic construct
  source 1..75: mol_type = other DNA
tttcccttgcctgctatgggatgaggctgccgggaaagttttgccaacaccgaacctccagacgctggtcaatgc

SEQ ID NO: 351652 - DNA, 75 bp, synthetic construct
  source 1..75: mol_type = other DNA
cttgtcatcaggtttctgacgctgttgaacagggtaccgacgtcatcaccgtgtttactctcgacaaagcacggg

SEQ ID NO: 351653 - DNA, 75 bp, synthetic construct
  source 1..75: mol_type = other DNA
atgtttgtagaagcattgaaacgccagaacccggcgctgatttccgccgcactaagcctgtggcagcagggcaag

SEQ ID NO: 351654 - DNA, 75 bp, synthetic construct
  source 1..75: mol_type = other DNA
agcaggttgcgccgcagccacaatatcagcagccgcaacaaccggttgcgccacagcagcaatatcagcagccgc

SEQ ID NO: 351655 - DNA, 75 bp, synthetic construct
  source 1..75: mol_type = other DNA
taagcgactgattgagacggcgcggctttacggcattgaactgtatctgatgaccaagcagtttggtcgtaatcc

SEQ ID NO: 351656 - DNA, 75 bp, synthetic construct
  source 1..75: mol_type = other DNA
cgaacctccagacgttggtcaatgcccgcaaccaactggcggaatctggtgttgctgttgagcaattaaacgcgc

SEQ ID NO: 351657 - DNA, 75 bp, synthetic construct
  source 1..75: mol_type = other DNA
cgttggtaaaaacaatgagggattaacacaggtattcaatgacgtccataaatataacccaaaaaacaatacctg

SEQ ID NO: 351658 - DNA, 75 bp, synthetic construct
  source 1..75: mol_type = other DNA
atgactgaacatttcccatttttggttcaagtgaatcaagcgtttaatgtcccggctcctgatgctttcgttctg

SEQ ID NO: 351659 - DNA, 75 bp, synthetic construct
  source 1..75: mol_type = other DNA
gacgtcctcttgtgatcgctcagaatggtggggaaatcatcaagccacatccgatgtttcgtgtggtcgttactg

SEQ ID NO: 351660 - DNA, 75 bp, synthetic construct
  source 1..75: mol_type = other DNA
cattccggagaaggtaactgccatcggctacgctgacggttcaaaccccttcatccctgccactgatacaaacta

SEQ ID NO: 351661 - DNA, 75 bp, synthetic construct
  source 1..75: mol_type = other DNA
tatatccaggagcaggtgcgttttggtgtgctgggggtatcagaggaaaccatgtgggaccgtgaaacacgtcag

SEQ ID NO: 351662 - DNA, 75 bp, synthetic construct
  source 1..75: mol_type = other DNA
aacgctggtatgaacaacgctctctcgatgcgctgaagtttcgccgtgaaaaagctgctgccgcaaagcgagcta

SEQ ID NO: 351663 - DNA, 75 bp, synthetic construct
  source 1..75: mol_type = other DNA
ttgtcaccctctggcactacgacgaatcggaccgcctcactcaccgcacggtgaacggcgaaccggcagagcagt

SEQ ID NO: 351664 - DNA, 75 bp, synthetic construct
  source 1..75: mol_type = other DNA
gtacggctggtgcggcggtagtaaataatggtgataaaacctggcttattaatggcgaagcaaaaccagggctgc

SEQ ID NO: 351665 - DNA, 75 bp, synthetic construct
  source 1..75: mol_type = other DNA
aggtattagcaatgactctcttatatttgccgggggagccggattcaaaggttcacgagaaaattaccagaacgg

SEQ ID NO: 351666 - DNA, 75 bp, synthetic construct
  source 1..75: mol_type = other DNA
aaaaaatcctacagtgctgatatttatctctggtataacggaaaatggggtaagtcaggtgaactaccacagggg

SEQ ID NO: 351667 - DNA, 75 bp, synthetic construct
  source 1..75: mol_type = other DNA
aaactgtttcttggtgaaaacggagaagatggtcagctcagcatcaccatgtccacccggacgttggtacgttgg

SEQ ID NO: 351668 - DNA, 75 bp, synthetic construct
  source 1..75: mol_type = other DNA
caggctggcgcggaatcactgctggggatgggggatatgctctactctgggccgaactccacgttgccggtacgt

SEQ ID NO: 351669 - DNA, 75 bp, synthetic construct
  source 1..75: mol_type = other DNA
tgcgtaatggcgacagccgtccgttgcataaaccgacgacgccgctgccttctctggatttgctgacaccgccgc

SEQ ID NO: 351670 - DNA, 75 bp, synthetic construct
  source 1..75: mol_type = other DNA
gccattgctggcggaatacggtgtgactcatgccgaacccggtcatgcgctgacgggcactattccggcaaacca

SEQ ID NO: 351671 - DNA, 75 bp, synthetic construct
  source 1..75: mol_type = other DNA
acgaagatacgctgatgccgctggctcgccagtttgaactggatctcgccgccaacaacggcacgcaacatgcgg

SEQ ID NO: 351672 - DNA, 75 bp, synthetic construct
  source 1..75: mol_type = other DNA
cgcgattgaaattgaagcgttacgcaacgtctatgcgcctcgcccgcaggacaggcgctgtgcgctcggttccgt

SEQ ID NO: 351673 - DNA, 75 bp, synthetic construct
  source 1..75: mol_type = other DNA
cgaggatacgctggccttagcggagaaagtgatagcagcgctcaccgccagcgcagccggattgattgtggttac

SEQ ID NO: 351674 - DNA, 75 bp, synthetic construct
  source 1..75: mol_type = other DNA
ttaaatcctgctaccaagactttaaaaagatgctagctttgacatctattgagttggctgaagggcaaaagaccc

SEQ ID NO: 351675 - DNA, 75 bp, synthetic construct
  source 1..75: mol_type = other DNA
tatgatgaatggcggtaatatacttgtgcttaaagaaattttaggccataccgatataaaaatgaccatgattta

SEQ ID NO: 351676 - DNA, 75 bp, synthetic construct
  source 1..75: mol_type = other DNA
ctggccccggaagaaattaaacgcctgctggatgcctgcgctgattctcaaagccccagcctgctgatgattgca

SEQ ID NO: 351677 - DNA, 75 bp, synthetic construct
  source 1..75: mol_type = other DNA
ttaagcgatgccgaaggctgctggcacctggaacaggcggtgatgcgcgtttttaccgacaaaatgcccccgtta

SEQ ID NO: 351678 - DNA, 75 bp, synthetic construct
  source 1..75: mol_type = other DNA
tcttgaagttggcggcggaaccggcggcaccaccgcgtggctgctgccggaactcaacggcgttccggcactgga

SEQ ID NO: 351679 - DNA, 75 bp, synthetic construct
  source 1..75: mol_type = other DNA
ggtacaacgctgtaccggcgatgccattgagaacggcgtggacgccatgaccatcatgcgccgtggacgtctgct

SEQ ID NO: 351680 - DNA, 75 bp, synthetic construct
  source 1..75: mol_type = other DNA
caaacccacgccagttgccgggggaattcggcgctggaaaaacaggtggctgaactctggcaatcgctgctgtct

SEQ ID NO: 351681 - DNA, 75 bp, synthetic construct
  source 1..75: mol_type = other DNA
gacggacgctatcttattctctactcttccgctgccgccaccctcggcgcgccgggtcagagcgcccatgcgctg

SEQ ID NO: 351682 - DNA, 75 bp, synthetic construct
  source 1..75: mol_type = other DNA
cggtaaaagcgcaggcggcaagccagctgttgcaaaccctgcgcaaccacgacggacgctatcttattctctact

SEQ ID NO: 351683 - DNA, 75 bp, synthetic construct
  source 1..75: mol_type = other DNA
tgaccatcctgacaacctgcgcctagttacaccacagcagaaccagtggaacagagacaaccttggaggcaaact

SEQ ID NO: 351684 - DNA, 75 bp, synthetic construct
  source 1..75: mol_type = other DNA
cacagcagcaatatcagcagccgcaacagccggttgcgccgcagccgcagtatcagcagccacaacagcaggttg

SEQ ID NO: 351685 - DNA, 75 bp, synthetic construct
  source 1..75: mol_type = other DNA
ctaacctctaaaatgtttgcccactatcgagataaacgcctgacaggcgagatctacttcagcgagaaatggaag

SEQ ID NO: 351686 - DNA, 75 bp, synthetic construct
  source 1..75: mol_type = other DNA
acagaagcatacctatcagtaaagagctttatgaagagatcatggcgctcgatgggttcaatttcttcacagact

SEQ ID NO: 351687 - DNA, 75 bp, synthetic construct
  source 1..75: mol_type = other DNA
acagcagcaatatcagcagccgcaacagccggttgcgccgcagccgcagtatcagcagccacaacagcaggttgc

SEQ ID NO: 351688 - DNA, 75 bp, synthetic construct
  source 1..75: mol_type = other DNA
ggcgggttataacgaaaaaattgctgaagccgatcgcatgatgcgtccgattccagacccgtactggaagccggg

SEQ ID NO: 351689 - DNA, 75 bp, synthetic construct
  source 1..75: mol_type = other DNA
cgcagccacaatatcagcagccgcaacaaccggttgcgccacagcagcaatatcagcagccgcaacaaccggttg

SEQ ID NO: 351690 - DNA, 75 bp, synthetic construct
  source 1..75: mol_type = other DNA
aagtcccagtctgctaatgattgccaagatttgtctggcaaccggggcaagatggagcgaagccgaaaacctgca

SEQ ID NO: 351691 - DNA, 75 bp, synthetic construct
  source 1..75: mol_type = other DNA
atcgagataaacgcctgacaggtgagatctatttcagcgagaaatggaaaaaaggagcaagcccggtcactatta

SEQ ID NO: 351692 - DNA, 75 bp, synthetic construct
  source 1..75: mol_type = other DNA
cgtaagcagtttgcaactaagggtgaagcattggcttttgagcgtcacacgatggaagaaaccggagcaaaaccc

SEQ ID NO: 351693 - DNA, 75 bp, synthetic construct
  source 1..75: mol_type = other DNA
atggcagtacgaaaactaaccacagggaaatggctttgcgaatgttaccccgccggacgaagtgggcgtcgtgtg

SEQ ID NO: 351694 - DNA, 75 bp, synthetic construct
  source 1..75: mol_type = other DNA
ggccgaactccacgttgccggtacgtgtccatggtgcttttgttcgcgatcaggaagttcatgccgtggtgcagg

SEQ ID NO: 351695 - DNA, 75 bp, synthetic construct
  source 1..75: mol_type = other DNA
tgattaccaaaattttcgccaacccggtagtgccgcagattgacgattactacgaacctttcaccttcgactacg

SEQ ID NO: 351696 - DNA, 75 bp, synthetic construct
  source 1..75: mol_type = other DNA
ttcgtctacaacatgttgctcactggctttgacgccaaacggctaaaaaaactctacctcgggcgggtgatcaga

SEQ ID NO: 351697 - DNA, 75 bp, synthetic construct
  source 1..75: mol_type = other DNA
gcgtgcagtttaacccgaccgaatccgtggccattgatattgcttatgaaggctccggcagtggtgactggcgca

SEQ ID NO: 351698 - DNA, 75 bp, synthetic construct
  source 1..75: mol_type = other DNA
tatcggaaatggctattggcggttaaatgacgaacaactacagagcgagctagacggcgcaaccatcgtcacacg

SEQ ID NO: 351699 - DNA, 75 bp, synthetic construct
  source 1..75: mol_type = other DNA
gatactcgtgccatcgacgaagtaggcctgagcgtcgcccaggtcgaagagatgtatcgctatctcgccattgcc

SEQ ID NO: 351700 - DNA, 75 bp, synthetic construct
  source 1..75: mol_type = other DNA
ccaaagggagcttcctggcgaacttaagccagtcggacaccaacgccatcaaaattggcctgaccggtacgcctc

SEQ ID NO: 351701 - DNA, 75 bp, synthetic construct
  source 1..75: mol_type = other DNA
aaacgctgcgccgtacccgcgaggcgctggccgcaaatttcgaccaacaggatccgcagtttgtcagcctgaaag

SEQ ID NO: 351702 - DNA, 75 bp, synthetic construct
  source 1..75: mol_type = other DNA
tatccggaaaacggcggaagagaaagtgaagaccgctgaacaggagcaggcagtacctgcttccccgtcagattt

SEQ ID NO: 351703 - DNA, 75 bp, synthetic construct
  source 1..75: mol_type = other DNA
ccacaccgttaccggaaaacgaaaaaatttctgatgagcagattgcccgtatcagggagatgtatccggaaattg

SEQ ID NO: 351704 - DNA, 75 bp, synthetic construct
  source 1..75: mol_type = other DNA
tgtccgcagccatttgtctggccgtatccggtgcgcctgtatgggcgtctgaacatcagtccacgctgagcgcgg

SEQ ID NO: 351705 - DNA, 75 bp, synthetic construct
  source 1..75: mol_type = other DNA
attttgtagcctcaataatttggcaaaaaattttcacagtcaaaaactcagcaaaatatttttctgatatgcatg

SEQ ID NO: 351706 - DNA, 75 bp, synthetic construct
  source 1..75: mol_type = other DNA
gtgggggcggttttcgctacctacgtttggctccctcactccttaagaaggaccaatggggcaattgggtgatca

SEQ ID NO: 351707 - DNA, 75 bp, synthetic construct
  source 1..75: mol_type = other DNA
ttcacctatgcgccaagtcagactcaatactggaatcatggttacagtacagaaactgattacatctacgtcact

SEQ ID NO: 351708 - DNA, 75 bp, synthetic construct
  source 1..75: mol_type = other DNA
tacgaacctttcaccttcgactacgaacatttgcatagcgcaccggaaggcaaacatatccctactgctcgcccg

SEQ ID NO: 351709 - DNA, 75 bp, synthetic construct
  source 1..75: mol_type = other DNA
gcctgttagtgatgatccgttgttcattgagtaccggaagactatttcacgcaagcaggcagcgccccaacgccg

SEQ ID NO: 351710 - DNA, 75 bp, synthetic construct
  source 1..75: mol_type = other DNA
atgaacaacaccgcagagaataacaacctttccacttttccggctgtaacgcagcaggcaatggaaaccctgaat

SEQ ID NO: 351711 - DNA, 75 bp, synthetic construct
  source 1..75: mol_type = other DNA
cacgccagcgcgcgctggagctgggggcaatagattttgtcaccaaaccgcaactgggtattcgcgaaggaatgc

SEQ ID NO: 351712 - DNA, 75 bp, synthetic construct
  source 1..75: mol_type = other DNA
atgtaccgacgtctgctcatactgcttgccctgtccggcatggtacaggcaaaaaacctgggtacatggggggag

SEQ ID NO: 351713 - DNA, 75 bp, synthetic construct
  source 1..75: mol_type = other DNA
tgctcaaatccacaatggggcgggaagccagtgctgttaccggggtggtgcattccgtaaacgatccggacacac

SEQ ID NO: 351714 - DNA, 75 bp, synthetic construct
  source 1..75: mol_type = other DNA
ctgctggcggctcaggaaagcgaaaatgcacttttgccgcagaaagctgcggaattagccggaaagtatatccac

SEQ ID NO: 351715 - DNA, 75 bp, synthetic construct
  source 1..75: mol_type = other DNA
ctcacaaaccgtggaaggcgtaacggatacccgcgccatcgacgaagtgggtttgagcgtcgctcaggtcgaaga

SEQ ID NO: 351716 - DNA, 75 bp, synthetic construct
  source 1..75: mol_type = other DNA
ttcaacctgttcaacagtagccgaatcgatgccatcgacattaccgaagtacgcaataaagcggagggggaataa

SEQ ID NO: 351717 - DNA, 75 bp, synthetic construct
  source 1..75: mol_type = other DNA
cctgtactgcgggcgctgaaacggatgatggcaatgcgccactatatgcgttcgcaaaccgtagaaggtgtaact

SEQ ID NO: 351718 - DNA, 75 bp, synthetic construct
  source 1..75: mol_type = other DNA
cgatgccttcgcagaacgcaacggctgcggttttacctttggcgacggttgtcacggttcggacagcaaattcaa

SEQ ID NO: 351719 - DNA, 75 bp, synthetic construct
  source 1..75: mol_type = other DNA
cggctgtcacacctgttcggtgacctgtaaaaacgtctggactggacgcgaaggtatggagtacgcgtggtttaa

SEQ ID NO: 351720 - DNA, 75 bp, synthetic construct
  source 1..75: mol_type = other DNA
caacgtcgaaaccaaaccgggcattggttatcctaaaaactgggaagatcagcaagagtggcaaggcggctgggt

SEQ ID NO: 351721 - DNA, 75 bp, synthetic construct
  source 1..75: mol_type = other DNA
attttgtccgcagccatctgtctgtccgtatccggtgcgcctgcatgggcgtctgaacatcagtccacactgagc

SEQ ID NO: 351722 - DNA, 75 bp, synthetic construct
  source 1..75: mol_type = other DNA
cataactcactgagaacccccgaagtgtatgctcaatatgatattgaatttcatagtatacttgctgatatacct

SEQ ID NO: 351723 - DNA, 75 bp, synthetic construct
  source 1..75: mol_type = other DNA
cagctgatggcatcaaggattttgaaagactacgcatcttttttgaaaccaaccttgtaagatatgcagcaaaaa

SEQ ID NO: 351724 - DNA, 75 bp, synthetic construct
  source 1..75: mol_type = other DNA
cgtgaacttatggcattctttggcgttggaagaccatctgtcagagaggctttatcatctctcagacataaaggg

SEQ ID NO: 351725 - DNA, 75 bp, synthetic construct
  source 1..75: mol_type = other DNA
gttgtcagcgattacattaagaattgttttaaaactgacttgccgtggtttagtcggattgatcctgataatgct

SEQ ID NO: 351726 - DNA, 75 bp, synthetic construct
  source 1..75: mol_type = other DNA
caacaatatgccgatgacaaagagaaagtggcgctgttaaaagcgctttggcagtacgcggaagagatcgtctaa

SEQ ID NO: 351727 - DNA, 75 bp, synthetic construct
  source 1..75: mol_type = other DNA
catttcgccattactggaactggatagcgacacattgcgcgagcgtttatataccgcaaaagccgatcttggcga

SEQ ID NO: 351728 - DNA, 75 bp, synthetic construct
  source 1..75: mol_type = other DNA
gtgatttttcaggtatttatggccgatttctgtcagattattggtcgaaatactatgataaatttaagttattac

SEQ ID NO: 351729 - DNA, 75 bp, synthetic construct
  source 1..75: mol_type = other DNA
cgtgttttcggtactctttcccttgacagtgcatgtgacagcactgttgtaaaatttgacgatcgctctacgcgt

SEQ ID NO: 351730 - DNA, 75 bp, synthetic construct
  source 1..75: mol_type = other DNA
tggggccgtgactggagctttgtgaagattgccatcccgctgatgattttatttctgccgctgagcctgagtttt

SEQ ID NO: 351731 - DNA, 75 bp, synthetic construct
  source 1..75: mol_type = other DNA
gaatgattcgccgtgaagaaattaaagaaggtgaatacctgccttcagaaagagagctgatggagttcttcggtg

SEQ ID NO: 351732 - DNA, 75 bp, synthetic construct
  source 1..75: mol_type = other DNA
cgctggtacgccagcgagtgcagcagagcatcagtccacactaagcgccgggtatcttcagacccatactgatat

SEQ ID NO: 351733 - DNA, 75 bp, synthetic construct
  source 1..75: mol_type = other DNA
aatggttcagtgcttatgcgatggcgggtatggcttacagccgtgtttcgactttctccggggattatctccgcg

SEQ ID NO: 351734 - DNA, 75 bp, synthetic construct
  source 1..75: mol_type = other DNA
atgggatcatcttgggaaatataaaacagaagtactgacactcactcaagccgctcttattaatattggttatcg

SEQ ID NO: 351735 - DNA, 75 bp, synthetic construct
  source 1..75: mol_type = other DNA
tgataactcatttgcggcgtttaccttactgactggttacagagacaaaagctacggcggatcaccattcgtgat

SEQ ID NO: 351736 - DNA, 75 bp, synthetic construct
  source 1..75: mol_type = other DNA
ttacagggtttattattcaatcgaagatggcgaaataattcttctgctcattggcgggaataaaaaaactcagac

SEQ ID NO: 351737 - DNA, 75 bp, synthetic construct
  source 1..75: mol_type = other DNA
gcgcagcctgacgcgccaaataaaacagcactgctgcgcgcggcactggctgacgaattgatgaccgagcaagtt

SEQ ID NO: 351738 - DNA, 75 bp, synthetic construct
  source 1..75: mol_type = other DNA
atttcctcttattcaccaaaaaacatggtggatgatgcgaccaattcccagctaactgctacaatcgtagataaa

SEQ ID NO: 351739 - DNA, 75 bp, synthetic construct
  source 1..75: mol_type = other DNA
ctgagaaacgaggcactgattggaaaggctgggcaaagatggtgcttaaagcaaatcctgactcaccaaataagg

SEQ ID NO: 351740 - DNA, 75 bp, synthetic construct
  source 1..75: mol_type = other DNA
gatgagcaaaaaacgcattacagcgatacccgctggcatgaagattccgttcgtaaccgctggttcagcgtaatg

SEQ ID NO: 351741 - DNA, 75 bp, synthetic construct
  source 1..75: mol_type = other DNA
atcaggactctgaatgaaacaaatatcgatatgtttttggaggaatatggaattaataaaaatagtatatccgaa

SEQ ID NO: 351742 - DNA, 75 bp, synthetic construct
  source 1..75: mol_type = other DNA
ctaaatggtattccaacattgaacacctatactggggaaattccatcagactcatcttcactcggctcaacttat

SEQ ID NO: 351743 - DNA, 75 bp, synthetic construct
  source 1..75: mol_type = other DNA
ccatgaacgccttaaatcgcagtgataatatatcactattattctttgatatttatggatattacgcatctgata

SEQ ID NO: 351744 - DNA, 75 bp, synthetic construct
  source 1..75: mol_type = other DNA
ggcgggcgtgctgatacaggggattgtgcgcaaccctctggcatcaccggatattctcggcgttaaccatgccgc

SEQ ID NO: 351745 - DNA, 75 bp, synthetic construct
  source 1..75: mol_type = other DNA
agcctgacggattatctgatgctctcgcgcccgcaggatgtgaacaacgccctgctgtggctgaccggcagctta

SEQ ID NO: 351746 - DNA, 75 bp, synthetic construct
  source 1..75: mol_type = other DNA
tcgtaaccgctggttcagcgtgatggcggggccatctgtgcgcgtgaatgaatggttcagcacgtatgcgatggc

SEQ ID NO: 351747 - DNA, 75 bp, synthetic construct
  source 1..75: mol_type = other DNA
tgacgatctctgctcactgcgcgccaatgaagtccgcccggtactggcatgccgcatgacgctctccgctgatgg

SEQ ID NO: 351748 - DNA, 75 bp, synthetic construct
  source 1..75: mol_type = other DNA
gtggcgattgccgatccaaccgcgtggattgcagaaggcagcaagctggacaaagccgcgaaaattcgcgcattc

SEQ ID NO: 351749 - DNA, 75 bp, synthetic construct
  source 1..75: mol_type = other DNA
ccgttggttattcacggcggctccggtatcgccccgagatattacgcagctttgttaattatcgcgtcgctaaag

SEQ ID NO: 351750 - DNA, 75 bp, synthetic construct
  source 1..75: mol_type = other DNA
atttaaagggaaagctcatcttgatacagatgtaatggctgattgggtagatactcaaaaagaaattaatttatt

SEQ ID NO: 351751 - DNA, 75 bp, synthetic construct
  source 1..75: mol_type = other DNA
tgccacctggacttcgccgattcgtaagtatggcgatatgatcaaccatcgtctgctgaaagccgtcataaaagg

SEQ ID NO: 351752 - DNA, 75 bp, synthetic construct
  source 1..75: mol_type = other DNA
cgtcataaccacgcactggtgtttaaagatcgcccggattaccgctttattctcggtgaaaaaggtgaagtgctg

SEQ ID NO: 351753 - DNA, 75 bp, synthetic construct
  source 1..75: mol_type = other DNA
cccaccaatgcacaactctcgggatacgattacatttatgaaatcgtgaaacgtcacgccgataaaatggatgtt

SEQ ID NO: 351754 - DNA, 75 bp, synthetic construct
  source 1..75: mol_type = other DNA
gttcaatgatgattgaaggacgtattgcgcgctttgtgtatatctcgctataccgaatgcatcagattgcgctgc

SEQ ID NO: 351755 - DNA, 75 bp, synthetic construct
  source 1..75: mol_type = other DNA
atattggtgggctggagaccaaccgtatcaaccagctggtggtggaaccgacgctgcaaaccacgcgcgatccag

SEQ ID NO: 351756 - DNA, 75 bp, synthetic construct
  source 1..75: mol_type = other DNA
cgcggatcgatatccccctgctgaagcgcattgccgaagtctgcccggtgccgctggttattcacggcggctccg

SEQ ID NO: 351757 - DNA, 75 bp, synthetic construct
  source 1..75: mol_type = other DNA
gtcatgattgacggtgccgcattatcttttgaagagaatatcgctttcacccaggaagctgtcgatttctgtaaa

SEQ ID NO: 351758 - DNA, 75 bp, synthetic construct
  source 1..75: mol_type = other DNA
ccggtcagtcttcatctggatcacgggaaaactcaggaggatgttaaacaggcggtgcgcgcgggctttacctcg

SEQ ID NO: 351759 - DNA, 75 bp, synthetic construct
  source 1..75: mol_type = other DNA
ctccaatatgcgaggcgataaaagaaacaaattcaaaatcaaaacaggctgtcttcaatatgtatttatcgaaca

SEQ ID NO: 351760 - DNA, 75 bp, synthetic construct
  source 1..75: mol_type = other DNA
atcgtcagcgcaaaggcggagtggcccggaaggtggattttgatgaaacctgggacgtttttctgccgaaattag

SEQ ID NO: 351761 - DNA, 75 bp, synthetic construct
  source 1..75: mol_type = other DNA
ctgccgtgggccaatattgacgggaaagagttccagaccgagccgctggtccgctttggcgtcaaaggcgatacc

SEQ ID NO: 351762 - DNA, 75 bp, synthetic construct
  source 1..75: mol_type = other DNA
tcgactggaattattgcacgacgcccgctcgcgctcgctgttcgaaacgcttaaacgcgatatcgccagcgtttc

SEQ ID NO: 351763 - DNA, 75 bp, synthetic construct
  source 1..75: mol_type = other DNA
tggaagaaatgctgaaactggttcgtcaacagcgcttcggtaaaaaatgtgaaacgctgtctggtatgcaacgct

SEQ ID NO: 351764 - DNA, 75 bp, synthetic construct
  source 1..75: mol_type = other DNA
tctcgccctgatgcgggtgacgttctctggcaagggcagcctttgcatcaggtacgcgacagctaccatcaaaac

SEQ ID NO: 351765 - DNA, 75 bp, synthetic construct
  source 1..75: mol_type = other DNA
gcgcacgcggaacagttaaaaccaaaaacagtgttatgggtggattctctgtatccggcgttaattgttaactgg

SEQ ID NO: 351766 - DNA, 75 bp, synthetic construct
  source 1..75: mol_type = other DNA
cgcctgtcgcgatcagtcacacgctggcgctcgccgcgacacttgatgcgcagggatacagtgttaacgacatca

SEQ ID NO: 351767 - DNA, 75 bp, synthetic construct
  source 1..75: mol_type = other DNA
aacaagctaatggtttcagtagtgtcgatgttctggaagtaacagacaaaggccaagcggttgagttttgggatc

SEQ ID NO: 351768 - DNA, 75 bp, synthetic construct
  source 1..75: mol_type = other DNA
atgggacttgattgtgtacctatatcaacctactgccgtgacgcaggagaaacgattgatgccgttaacaaacgg

SEQ ID NO: 351769 - DNA, 75 bp, synthetic construct
  source 1..75: mol_type = other DNA
tgggcgcagaggtggagaacatcgatctcttcgaccgaatgcaactggaaaacgtgattgccatttgtcgccagg

SEQ ID NO: 351770 - DNA, 75 bp, synthetic construct
  source 1..75: mol_type = other DNA
gcggtaactttcgcgagctttctgccagcgttacgcgcatggcaacctttgccactagcggacgcatcactctgg

SEQ ID NO: 351771 - DNA, 75 bp, synthetic construct
  source 1..75: mol_type = other DNA
taattcacatcaccaccggcacccacgtcgcgcagatttgttggtttctgctggcagaagcacgttacctgcccg

SEQ ID NO: 351772 - DNA, 75 bp, synthetic construct
  source 1..75: mol_type = other DNA
agtgctgatgaaggcggcctgcacactaaagatggcgaatatattgaggctgatctgatggtgtgggcagccggg

SEQ ID NO: 351773 - DNA, 75 bp, synthetic construct
  source 1..75: mol_type = other DNA
gcagaaaatcgctaaaacaatgcctgctctgctaattttgatcagcgtgggcctcctgattgggacatggatgat

SEQ ID NO: 351774 - DNA, 75 bp, synthetic construct
  source 1..75: mol_type = other DNA
gctgatttccctggcgttctgtaattcgttattaactcacgcatggatttgttatctctgcaacatacacagaga

SEQ ID NO: 351775 - DNA, 75 bp, synthetic construct
  source 1..75: mol_type = other DNA
taattcgtaatgggatcatgcagtctcagcactttaaaaccatctctgcctactgggataatctggatgtcgccc

SEQ ID NO: 351776 - DNA, 75 bp, synthetic construct
  source 1..75: mol_type = other DNA
caggatccgaaattactggataacctgttgaccaagaacgtcaaggttgtcggtgaaccgcctgaagaaccaagc

SEQ ID NO: 351777 - DNA, 75 bp, synthetic construct
  source 1..75: mol_type = other DNA
cggtgtttgttagcgtggtcgatcctggtgttggtacagagcgtaaatcggtagtgctgaaaaccaaaaacggtc

SEQ ID NO: 351778 - DNA, 75 bp, synthetic construct
  source 1..75: mol_type = other DNA
ctgtggtttaacaatgattagcgtgacctgtaattgtcaacgacggatgaaaagtgatccacttatatctccacc

SEQ ID NO: 351779 - DNA, 75 bp, synthetic construct
  source 1..75: mol_type = other DNA
gctggcgaacctattggaatactaacacgcgtagatgcgacgctctcttccggctgtcagctaatgattaacgcc

SEQ ID NO: 351780 - DNA, 75 bp, synthetic construct
  source 1..75: mol_type = other DNA
aggatccggtatataccaggcagggatgtatcaactgtctggtgaaactcaccggagttgacgaggaggagacgg

SEQ ID NO: 351781 - DNA, 75 bp, synthetic construct
  source 1..75: mol_type = other DNA
attcctgaaatcgcatcctgaaattgatattcagctcaccattgattatggtttgaccgatgtcgtttctgaacg

SEQ ID NO: 351782 - DNA, 75 bp, synthetic construct
  source 1..75: mol_type = other DNA
atggaaaacagtgacgatatccgtttgattgtgaagattgcccaactctattacgaacaggatatgacgcaggcg

SEQ ID NO: 351783 - DNA, 75 bp, synthetic construct
  source 1..75: mol_type = other DNA
aacgctaagccgggtgctggaatggccggtcgttgtatcaccagaagtagactggccccctgaatctccagacaa

SEQ ID NO: 351784 - DNA, 75 bp, synthetic construct
  source 1..75: mol_type = other DNA
gttgtatcaccagaaggcactgcgccacgccagcattcagatgcattagtgcagagccagggctgtaaaattcct

SEQ ID NO: 351785 - DNA, 75 bp, synthetic construct
  source 1..75: mol_type = other DNA
atggtgatgacggaagcgcagaaagaatcgacggcttaccacgaagcgggtcatgcgattatcggtcgcctggtg

SEQ ID NO: 351786 - DNA, 75 bp, synthetic construct
  source 1..75: mol_type = other DNA
cgcgcagatttgctggtttctgctggcggaagcgcgttacctgcccgccaggttaatacaatcttcgccaccgcg

SEQ ID NO: 351787 - DNA, 75 bp, synthetic construct
  source 1..75: mol_type = other DNA
atgcgtaaaacagtggcttttggctttgtcggtaccgtgctggattatgccgggcgcggcagtcagcgctggtcg

SEQ ID NO: 351788 - DNA, 75 bp, synthetic construct
  source 1..75: mol_type = other DNA
ggtttattacgcagcgccaacggcggaatgttgtttcttgatgagattggcgaatctgggcgcagacgaacaggc

SEQ ID NO: 351789 - DNA, 75 bp, synthetic construct
  source 1..75: mol_type = other DNA
ccggcattgccacgcgtaacccccacttcaaccgcatgattgagcagattgaaaaagtggcgattaaatcccgcg

SEQ ID NO: 351790 - DNA, 75 bp, synthetic construct
  source 1..75: mol_type = other DNA
cgtcacacgcatggcgacgtttgccgatagtgggcgtatcacccttgaaaccgtagaagatgagataaaccgtct

SEQ ID NO: 351791 - DNA, 75 bp, synthetic construct
  source 1..75: mol_type = other DNA
gagcgccacgcctcactcaccggcgacagcgtgcgttttaacaccgaagcgaggcgcgcctggctggcctttgcg

SEQ ID NO: 351792 - DNA, 75 bp, synthetic construct
  source 1..75: mol_type = other DNA
ggttgagtatctgcgcgagccgagccgcttccagaaactcggcggtaagatcccgaaaggcgtcctgatggtcgg

SEQ ID NO: 351793 - DNA, 75 bp, synthetic construct
  source 1..75: mol_type = other DNA
agtcgggagcatctaacaattctgacaataatggcactccaaaggcgccgcgtccggttgatgaaccacgtacgc

SEQ ID NO: 351794 - DNA, 75 bp, synthetic construct
  source 1..75: mol_type = other DNA
gcgcatgttgacggaagatcagatcaaaacgacctttgctgatgttgctggttgcgacgaagcaaaagaagaagt

SEQ ID NO: 351795 - DNA, 75 bp, synthetic construct
  source 1..75: mol_type = other DNA
atgcgtaaaacagtggcttttggttttgtcggaacggtgctggattatgccgggcgcggcagtcagcgctggtca

SEQ ID NO: 351796 - DNA, 75 bp, synthetic construct
  source 1..75: mol_type = other DNA
tcgccaggtgagcagtgattttcagctgatcgccggaacggtgcgcgatttgcgccagctggttgccgaaggcaa

SEQ ID NO: 351797 - DNA, 75 bp, synthetic construct
  source 1..75: mol_type = other DNA
gtgaaccgctgtgggccgtcaccgatgaaaccatgcgtaactggctgaagcaggccgttaagcgggccgaagctg

SEQ ID NO: 351798 - DNA, 75 bp, synthetic construct
  source 1..75: mol_type = other DNA
cctggcaagcttgcgccttatgagagtaatcaaactacccattactctgtagtggataaagacggtaacgcggtg

SEQ ID NO: 351799 - DNA, 75 bp, synthetic construct
  source 1..75: mol_type = other DNA
gctcagaaacctgtgtcggtcgtatccgttatcttggcgtgctgctgtacgatgccgacgcgattgaacgtgcag

SEQ ID NO: 351800 - DNA, 75 bp, synthetic construct
  source 1..75: mol_type = other DNA
gaactgggaagatgacctgggtggtgagtttgacaaactggcgaaagacaagaacttcgacaacatccagaaggc

SEQ ID NO: 351801 - DNA, 75 bp, synthetic construct
  source 1..75: mol_type = other DNA
cacgtttccaccatcagtggttgccggacgagctgcgtgtcgagaaaggatttagcccggatacgctcaagctgc

SEQ ID NO: 351802 - DNA, 75 bp, synthetic construct
  source 1..75: mol_type = other DNA
gatgccaacgccgtcgggccgaataaacgcccgctgtcgtcgatgtcaccaaccattgtggtcaaggatggtaaa

SEQ ID NO: 351803 - DNA, 75 bp, synthetic construct
  source 1..75: mol_type = other DNA
gccgccgtggcggtgggctacgcgctggcggtaacgcatccgcaggcggggaatctgggcggcggtggttttatg

SEQ ID NO: 351804 - DNA, 75 bp, synthetic construct
  source 1..75: mol_type = other DNA
aactgagcttccgtccgacgaaagatttaagcggtgcggatatgtggggcgccaccatgtttgaccaactggtgt

SEQ ID NO: 351805 - DNA, 75 bp, synthetic construct
  source 1..75: mol_type = other DNA
caggaacgttatgccagctcgattctggcgctgaatgccactaccgggaaactggcgtggagctatcagaccgtt

SEQ ID NO: 351806 - DNA, 75 bp, synthetic construct
  source 1..75: mol_type = other DNA
cggcggcgcttatctcttatggtttgcgtggtgcagcatgcgccgccagtcaacaccgcaaatgagcacactaca

SEQ ID NO: 351807 - DNA, 75 bp, synthetic construct
  source 1..75: mol_type = other DNA
tctgctgaccgccggtgataccaaaccggtactgcgcgcactgaaacgtatgttggcgatgcgtcattacaaacg

SEQ ID NO: 351808 - DNA, 75 bp, synthetic construct
  source 1..75: mol_type = other DNA
ccgatggtctggtacgtgccgcctctgtctccgattcagtctgcagcagacgcgggtgagctgggtagcaacggc

SEQ ID NO: 351809 - DNA, 75 bp, synthetic construct
  source 1..75: mol_type = other DNA
agcgccgatgccacacctgccgaagccatctctcccgtagccgatcaagactggccagcctatggtcgcaatcag

SEQ ID NO: 351810 - DNA, 75 bp, synthetic construct
  source 1..75: mol_type = other DNA
aatcactcacttcgcatctggcttccggcacgcccggtacggtcgctggtttctcgctggcgttggataagtacg

SEQ ID NO: 351811 - DNA, 75 bp, synthetic construct
  source 1..75: mol_type = other DNA
tataaaaatgactatgcgttatgcgcattttgctccaggtcatttagaggctgcagttgaattgaacccttttga

SEQ ID NO: 351812 - DNA, 75 bp, synthetic construct
  source 1..75: mol_type = other DNA
gaaaatggttgtgtgagtgctatcccaatggacgcaatggcaagcgcgtgcgtaagcaatttgctacgaaaggcg

SEQ ID NO: 351813 - DNA, 75 bp, synthetic construct
  source 1..75: mol_type = other DNA
atctggagcaaagctatctgagtggggtctttagcgagttagcccgactcggtgaatggacagcaccaaatccac

SEQ ID NO: 351814 - DNA, 75 bp, synthetic construct
  source 1..75: mol_type = other DNA
ctcttcccggatgagtacctaccccggtcgcgaagcattgaacgtgacagaagtcgcgcaggtaaaaggtctgca

SEQ ID NO: 351815 - DNA, 75 bp, synthetic construct
  source 1..75: mol_type = other DNA
gatgttctcagaagtaacggaagtgcgtgacgcgatccatctgctgacaccgcgcgctattaatgaagaggtcgg

SEQ ID NO: 351816 - DNA, 75 bp, synthetic construct
  source 1..75: mol_type = other DNA
gtcattaaaatggcgacccgcaccgaactggcaaaccgttggtttgacttaatggatatcaacgcaggcaccatc

SEQ ID NO: 351817 - DNA, 75 bp, synthetic construct
  source 1..75: mol_type = other DNA
ctattgccgatcaaatcgatatcaataaagcgaagccatccagcgaaattcgccccggcaagcttgcgccttatg

SEQ ID NO: 351818 - DNA, 75 bp, synthetic construct
  source 1..75: mol_type = other DNA
ttgcgccttatgagagtaatcaaactacccattactcagtggtggataaagacggtaacgcggtggcggtgacct

SEQ ID NO: 351819 - DNA, 75 bp, synthetic construct
  source 1..75: mol_type = other DNA
ggcacccgccaaagcgacccgcgatatgttccttgatgatcagggcaacccggacagcaaaaaatcactcacttc

SEQ ID NO: 351820 - DNA, 75 bp, synthetic construct
  source 1..75: mol_type = other DNA
acatcttgcccctgatcaccttgaaacagcactgcgtttcaatccattagccacactttccactaaagcaacgag

SEQ ID NO: 351821 - DNA, 75 bp, synthetic construct
  source 1..75: mol_type = other DNA
ttgcaaaaaatcctgggccaccacgatataaaaatgactatgcgctatgcacatcttgcccctgatcaccttgaa

SEQ ID NO: 351822 - DNA, 75 bp, synthetic construct
  source 1..75: mol_type = other DNA
cacgatagcggaacagattgcccaggagatgcagaaaaacggtggcttgatcagcaaagaagatttagcggcata

SEQ ID NO: 351823 - DNA, 75 bp, synthetic construct
  source 1..75: mol_type = other DNA
atgatgcagttagttcacttatttatggatgaaatcactatggatcctttgcatgccgtttacctgaccgtagga

SEQ ID NO: 351824 - DNA, 75 bp, synthetic construct
  source 1..75: mol_type = other DNA
tactttgtgttccgttggaccattctcaaatttaacctgatgactgtaggccgtgaagagtccagtcctgtcacg

SEQ ID NO: 351825 - DNA, 75 bp, synthetic construct
  source 1..75: mol_type = other DNA
gaacgcgtgacgataccttttggtttaaatcacctggtgacgtcagttttccgctttacccccatcggcggatcg

SEQ ID NO: 351826 - DNA, 75 bp, synthetic construct
  source 1..75: mol_type = other DNA
ttgtgatgagtggatttggtctgatcatcccttttatctggccgccatttttcaatcttttcatgctcattggcc

SEQ ID NO: 351827 - DNA, 75 bp, synthetic construct
  source 1..75: mol_type = other DNA
tcgacacatggacaaactatcattttggggatccagtcctataataccagtgtgctgggagggattgtttcaggt

SEQ ID NO: 351828 - DNA, 75 bp, synthetic construct
  source 1..75: mol_type = other DNA
caaaataccctacaagtcattatcggcactaaagtcatcgccctgcgtcgggatatggataactatatggggata

SEQ ID NO: 351829 - DNA, 75 bp, synthetic construct
  source 1..75: mol_type = other DNA
ccattcttaaatttaacctgatgaccgtaggccgtgaagagtccagtcctgtcacgctgaacgctcacgaagata

SEQ ID NO: 351830 - DNA, 75 bp, synthetic construct
  source 1..75: mol_type = other DNA
ggcgctgaaagaactggcaaaggatatctggagcagaccatggagcgaggaaagacgcaacgactggcagagatg

SEQ ID NO: 351831 - DNA, 75 bp, synthetic construct
  source 1..75: mol_type = other DNA
gaaagtcgtcgtcaggcaaagggaactcgcttcctgtggcagcacagcgataaatggatgaccgaatccaggcag

SEQ ID NO: 351832 - DNA, 75 bp, synthetic construct
  source 1..75: mol_type = other DNA
ctctatccacacaacggtctgagacaatcctgaaaaacattcactcgctaaccgactatgggtcggtgagtggca

SEQ ID NO: 351833 - DNA, 75 bp, synthetic construct
  source 1..75: mol_type = other DNA
aggcctcacttatgctaaaaatgcgttgtctgaacttaagttagcaggtgcaaatattaacattactataaaaaa

SEQ ID NO: 351834 - DNA, 75 bp, synthetic construct
  source 1..75: mol_type = other DNA
ataaaatgccgtcgaccaggctcatatcccagtcgtttgcaggcgttaaggaactgtgatcttacccagcaatag

SEQ ID NO: 351835 - DNA, 75 bp, synthetic construct
  source 1..75: mol_type = other DNA
aaacgatagggaaaaggttgtacggtatcctgaacgccatgcgccatggcgtatcaaacggaaatgcggaagcac

SEQ ID NO: 351836 - DNA, 75 bp, synthetic construct
  source 1..75: mol_type = other DNA
caggcgctggaacacaaccattttttcctgatggcccagccgattaccggtatgcgtggtgatgtttaccatgaa

SEQ ID NO: 351837 - DNA, 75 bp, synthetic construct
  source 1..75: mol_type = other DNA
gcagtgtgaggagattttttcgcttatcagaatcgtcggcggcgcttatctcttatggtttgcgtggtgcagcat

SEQ ID NO: 351838 - DNA, 75 bp, synthetic construct
  source 1..75: mol_type = other DNA
agaaaaatggctgcggctttacctttggtgatggctgccacggttcagataccaaattcaatctgttcaacagcc

SEQ ID NO: 351839 - DNA, 75 bp, synthetic construct
  source 1..75: mol_type = other DNA
caacagtaaacaatggccaggtaaagcatcaattggtcgtctgaaaggtgaggaactggtgcaatataatttgtg

SEQ ID NO: 351840 - DNA, 75 bp, synthetic construct
  source 1..75: mol_type = other DNA
tttttttaatccgggagccaatctctttgtggtagtacaaaccagcctggcttccggtcgacgcgcaggagtgct

SEQ ID NO: 351841 - DNA, 75 bp, synthetic construct
  source 1..75: mol_type = other DNA
catcagttatctggcgagtctttcttagtcaggcgttttctttgcccgctgtgcgtcgtgcttatgggcgtatgc

SEQ ID NO: 351842 - DNA, 75 bp, synthetic construct
  source 1..75: mol_type = other DNA
gtgcgtcgtgcttatgggcgtatgcaacgcgttgccagtcgggttattggtgtattcgcgctacgcctgatttac

SEQ ID NO: 351843 - DNA, 75 bp, synthetic construct
  source 1..75: mol_type = other DNA
gatcttgagtttcctactaatgaaattctaagacaacctgtagcagcaaatactatcgaaacaaacgcatggaga

SEQ ID NO: 351844 - DNA, 75 bp, synthetic construct
  source 1..75: mol_type = other DNA
caacatttgtaagatttctaacagatcagggcgcaccacgccctgaactattcgaaggatcatttttacgtttag

SEQ ID NO: 351845 - DNA, 75 bp, synthetic construct
  source 1..75: mol_type = other DNA
agatcgttaatttacgcattcctgaatcgttaggtttttatagcggcccacgtctggtgcctatcattacactga

SEQ ID NO: 351846 - DNA, 75 bp, synthetic construct
  source 1..75: mol_type = other DNA
aggtgaatcaaaatattatcagtgaatttatggctgaaccgccacaaggaaaaatccgtattgccggaggtgatg

SEQ ID NO: 351847 - DNA, 75 bp, synthetic construct
  source 1..75: mol_type = other DNA
catgaacagtaagcaatggcccggtaaagccgctattggtcgtctgaaaggggacgaactggcgcaatataattt

SEQ ID NO: 351848 - DNA, 75 bp, synthetic construct
  source 1..75: mol_type = other DNA
gcactccggcaagtgacactgacaagaaaaacctttcccggacaaacgaattcattaaacgcggtacgccgcaat

SEQ ID NO: 351849 - DNA, 75 bp, synthetic construct
  source 1..75: mol_type = other DNA
agatactgttctgatgacactctgccagcaactcatcccgcttattgggacgttctcccccaatacccaggagcg

SEQ ID NO: 351850 - DNA, 75 bp, synthetic construct
  source 1..75: mol_type = other DNA
ctgtgttatgcaacgcgctaaagtacatttgggtgaagcggaacgcactcaggaagaacgagatctgttagagca

SEQ ID NO: 351851 - DNA, 75 bp, synthetic construct
  source 1..75: mol_type = other DNA
ataatgcgtctgagaaatgagaagaaattaggtgaactgcatttcttctcagcagaatttaataaaaattctgca

SEQ ID NO: 351852 - DNA, 75 bp, synthetic construct
  source 1..75: mol_type = other DNA
ctgttccataatgcttctacagcatcgtattacagagcaatgcctgtttcgaaactattctctattattttcatt

SEQ ID NO: 351853 - DNA, 75 bp, synthetic construct
  source 1..75: mol_type = other DNA
gaaagtatagtaacgataacttttgtgtcgtatatgccgatgcgctcattgttaatttaaacactggtgaatata

SEQ ID NO: 351854 - DNA, 75 bp, synthetic construct
  source 1..75: mol_type = other DNA
tggatgatgagattgcagaggcggcgatttttgcgcaacagatcagcgctgacgatcatcttgcagtagcgcagt

SEQ ID NO: 351855 - DNA, 75 bp, synthetic construct
  source 1..75: mol_type = other DNA
gtattggtttgttgtacaactattctatcattgattatgatcatttttatttttttttataacatctttttttat

SEQ ID NO: 351856 - DNA, 75 bp, synthetic construct
  source 1..75: mol_type = other DNA
tttttttataacatctttttttataccaatagttattccttatgatataaaaatcttcctgcttacaataagatt

SEQ ID NO: 351857 - DNA, 75 bp, synthetic construct
  source 1..75: mol_type = other DNA
ctcgtgcgcctggcgctcgcgggcgaggtccagggcggccgtcttcacgttctgccttgcgcagatgagatagat

SEQ ID NO: 351858 - DNA, 75 bp, synthetic construct
  source 1..75: mol_type = other DNA
gtctccggtaacggtaaacgcagccgggggactggattttaaaggtaatctgctggacagaccctgccagattga

SEQ ID NO: 351859 - DNA, 75 bp, synthetic construct
  source 1..75: mol_type = other DNA
gaattatcaaaaacagcagaatactgttcttcaattggtaagcaattgtctgattctggtcctgcgtattgtgtg

SEQ ID NO: 351860 - DNA, 75 bp, synthetic construct
  source 1..75: mol_type = other DNA
aatgccatgatttatttgataagtctatagagactataattgaaggaaaatatgatattgttttcactttaaaca

SEQ ID NO: 351861 - DNA, 75 bp, synthetic construct
  source 1..75: mol_type = other DNA
gaagcagatttctgactacggtgtccctttcagaagttcacacactatccataaatacgaacttcgccaatatag

SEQ ID NO: 351862 - DNA, 75 bp, synthetic construct
  source 1..75: mol_type = other DNA
cgggatacgcgcaacgagcaggtcacgctgaaccagatagtcgaccgcagaacggcttcgatgcgcagtgtcgga

SEQ ID NO: 351863 - DNA, 75 bp, synthetic construct
  source 1..75: mol_type = other DNA
caactcgacgaaacccggaaaaccgttgccgccaccggggatgtgcagactgccgcccgatatcagagcatgatt

SEQ ID NO: 351864 - DNA, 75 bp, synthetic construct
  source 1..75: mol_type = other DNA
acgctgcgtgccaagctgcgcgccatcaaccccgatctttcaccgattaatactcatcgcggcatgggatatagc

SEQ ID NO: 351865 - DNA, 75 bp, synthetic construct
  source 1..75: mol_type = other DNA
tgataacggtggcagatgtgatgctggcgttacacggcagctacgacaacaagaactcgggcgaaaaatttttgc

SEQ ID NO: 351866 - DNA, 75 bp, synthetic construct
  source 1..75: mol_type = other DNA
agagataaaggggtacgattacgacacatataacttctatgccaaaaaaggccagaaggtgcatatcagtatctc

SEQ ID NO: 351867 - DNA, 75 bp, synthetic construct
  source 1..75: mol_type = other DNA
atacggtaattaaagcgggagtctctgcggatacacaatctgatttcggtgcgggtgtcggcgtggggtattcgt

SEQ ID NO: 351868 - DNA, 75 bp, synthetic construct
  source 1..75: mol_type = other DNA
aatgtacgagcaggagaaaggcgaaaaaggccagacgcgtatcgaaaacttagaggaactggtgacggcgacgcg

SEQ ID NO: 351869 - DNA, 75 bp, synthetic construct
  source 1..75: mol_type = other DNA
acgacttggaagctttacctgcattaaatggataaagagaagaagccaaagatttgataacgcactcagaagcgt

SEQ ID NO: 351870 - DNA, 75 bp, synthetic construct
  source 1..75: mol_type = other DNA
aatacgagcttcgtcagtatggtaaaaatagctcatgttatgttcataataatgccctaattattaataagaaca

SEQ ID NO: 351871 - DNA, 75 bp, synthetic construct
  source 1..75: mol_type = other DNA
acgctgcgtgccaagctgcgctgcatcaatcccgagctttcaccgattaatacccaccgcggcatgggatacagc

SEQ ID NO: 351872 - DNA, 75 bp, synthetic construct
  source 1..75: mol_type = other DNA
cgctaacgccctgattgaaaacaataacgggcgtctgggtaaaaaactgtggaccgatggcgcggacggtgagcc

SEQ ID NO: 351873 - DNA, 75 bp, synthetic construct
  source 1..75: mol_type = other DNA
actatccgtctggagcagaactaccgctctaccagcaatattctgagcgccgctaacgccctgattgaaaacaat

SEQ ID NO: 351874 - DNA, 75 bp, synthetic construct
  source 1..75: mol_type = other DNA
atgaggctgcaattctctgctctgtttttcttttttggctgtgtgtttgttcatggtgtttttgccggtccgttt

SEQ ID NO: 351875 - DNA, 75 bp, synthetic construct
  source 1..75: mol_type = other DNA
aagtgctggaaaaggttgcccgtcaggctccgcactggctttccagcgtcagttccgcttcgccaatgtgggtag

SEQ ID NO: 351876 - DNA, 75 bp, synthetic construct
  source 1..75: mol_type = other DNA
ttaaaagcgatttttaacgacgaagagaaatttagcgttcattcggcgttgccgcaggtagcgttgctcggtgat

SEQ ID NO: 351877 - DNA, 75 bp, synthetic construct
  source 1..75: mol_type = other DNA
gcgcgaagggcgggaagcactggatgtattgagccaattactgaatctcggttcggtttatccgttccagcgcga

SEQ ID NO: 351878 - DNA, 75 bp, synthetic construct
  source 1..75: mol_type = other DNA
ttatggcaatagaggtgcccacggcgcaggtttccgtgtcagatgcggtgtctacatatctgtttaacagccaac

SEQ ID NO: 351879 - DNA, 75 bp, synthetic construct
  source 1..75: mol_type = other DNA
gtccattcggcgttgccgcaggtagccttgctcggtgatgagggggcggcaaaccacaatcgtctcggcggtcat

SEQ ID NO: 351880 - DNA, 75 bp, synthetic construct
  source 1..75: mol_type = other DNA
atctgtttaacagccaactgctgagccgcgatgatggttccatgatgttggtgctgcctcaggagtgtcgggaac

SEQ ID NO: 351881 - DNA, 75 bp, synthetic construct
  source 1..75: mol_type = other DNA
cccatcaccaaagccactcctgaagttgaaacctcccttgagagtaaaaacaaacgcccatggctggctgatgat

SEQ ID NO: 351882 - DNA, 75 bp, synthetic construct
  source 1..75: mol_type = other DNA
gaaaaaggatttgaccacgaagtcatcctgacgctgacccgactttcaccagacgacctaatcgcgcaaagccac

SEQ ID NO: 351883 - DNA, 75 bp, synthetic construct
  source 1..75: mol_type = other DNA
gaatatgcactcagtcggtgtgatcgcgtggcggcgttaagaaaactcccggcagaaataaaaccggcagtgatg

SEQ ID NO: 351884 - DNA, 75 bp, synthetic construct
  source 1..75: mol_type = other DNA
tcgcccagcaaaacccggacgttatcgaccagggcgtttttcataatgacgtgattgccgtgagtaaccgccagg

SEQ ID NO: 351885 - DNA, 75 bp, synthetic construct
  source 1..75: mol_type = other DNA
atttaccggtacttcccattcctgccgtcacggatatcacaccaggaattacagagttaatcagtcatactgaca

SEQ ID NO: 351886 - DNA, 75 bp, synthetic construct
  source 1..75: mol_type = other DNA
gagttaatcagtcatactgacatatccagattcagtgaaatcgcgcaatatcaggcatcacagcaaacgttattt

SEQ ID NO: 351887 - DNA, 75 bp, synthetic construct
  source 1..75: mol_type = other DNA
tcgctgtccattcggcgttgccgcaggtggctttgctcggtgacgaaggagccgcgaatcataatcgtctcggcg

SEQ ID NO: 351888 - DNA, 75 bp, synthetic construct
  source 1..75: mol_type = other DNA
gaagcagacggtctcgacactggcaacggttgctgctggtctggccggtggtctggtgggagactcagggggggc

SEQ ID NO: 351889 - DNA, 75 bp, synthetic construct
  source 1..75: mol_type = other DNA
atagccactgaaacagcagctaatacggcagcagcaatagctggtgctacaggtaatgccagtaaggataccggg

SEQ ID NO: 351890 - DNA, 75 bp, synthetic construct
  source 1..75: mol_type = other DNA
cacggaacaggatgtggcacagcgggcctacaataacggtatggcagcctccggttttggaacgggaggcaaata

SEQ ID NO: 351891 - DNA, 75 bp, synthetic construct
  source 1..75: mol_type = other DNA
tcagaattgtgagaaacggaaaaaaacttgaagccggaaattattttgccgtgctgggattccgggtcgattatg

SEQ ID NO: 351892 - DNA, 75 bp, synthetic construct
  source 1..75: mol_type = other DNA
tggcgtccggggtgaaacgccggataagtttaatttatccggtcaggcaaaaggaattaatctgcagatagctga

SEQ ID NO: 351893 - DNA, 75 bp, synthetic construct
  source 1..75: mol_type = other DNA
ggtcaggtcattatacctgcctgtacgttggcgatggaagataggtatcaggtaatcgatatgggggaaacgcca

SEQ ID NO: 351894 - DNA, 75 bp, synthetic construct
  source 1..75: mol_type = other DNA
acaccgttgacctgctgtgcttccggcactacggcaccacgcagggcgtgaccgaaaaggtgctggccgccaatc

SEQ ID NO: 351895 - DNA, 75 bp, synthetic construct
  source 1..75: mol_type = other DNA
ccagcaggttacgcgcccggtggcttcagtgggtttgtatattcctggcggctccgccccgctcttctcaacggt

SEQ ID NO: 351896 - DNA, 75 bp, synthetic construct
  source 1..75: mol_type = other DNA
accgcttactggtgctgccagtaccgcgccattcggcggcattggtgcttccggtaaccatcgccccagcgcctg

SEQ ID NO: 351897 - DNA, 75 bp, synthetic construct
  source 1..75: mol_type = other DNA
aaaccgggctgactttaaaacggaacatcagagtgcagggctcagtaccggtggcagtgttgccggaaatttcct

SEQ ID NO: 351898 - DNA, 75 bp, synthetic construct
  source 1..75: mol_type = other DNA
agattgagcaaaactccagggatgaaaaaagtgagcgttttgggttcggtctgcgagccagttacagctgttcgg

SEQ ID NO: 351899 - DNA, 75 bp, synthetic construct
  source 1..75: mol_type = other DNA
tggaaccacaaatgcatcgggcagcgttaatctgggttctacatttgctgatgatcaagatgctttattgatcgt

SEQ ID NO: 351900 - DNA, 75 bp, synthetic construct
  source 1..75: mol_type = other DNA
aacttctatctgaacggtaacgaaaacatcaaggttgatggtcataaagcaatgggtattaaaaaccacaaaaac

SEQ ID NO: 351901 - DNA, 75 bp, synthetic construct
  source 1..75: mol_type = other DNA
acggtgctgttgttggtagcgtgcttcaaactgttatgccgttcgcccctgttggtgaaatccgccagacctttg

SEQ ID NO: 351902 - DNA, 75 bp, synthetic construct
  source 1..75: mol_type = other DNA
aacgccgttggcggcttcgagaaggaattctggaaagaaattgataaccagatcatcgaactgaataccgaagag

SEQ ID NO: 351903 - DNA, 75 bp, synthetic construct
  source 1..75: mol_type = other DNA
accgacttggtctgacccgcgaattactcgatctactggtgctgagaggcattgatttacgcggtattgagattg

SEQ ID NO: 351904 - DNA, 75 bp, synthetic construct
  source 1..75: mol_type = other DNA
tcttgtcgaactggtgcaaaaaggcgtgttccgtgaagatctctattatcgtctgaacgtgttgacgctcaatct

SEQ ID NO: 351905 - DNA, 75 bp, synthetic construct
  source 1..75: mol_type = other DNA
atgttgtttaataaacacaaccttgctaccaacagccgcattcgtgcccagtgggatcacctttgggcgcagcgc

SEQ ID NO: 351906 - DNA, 75 bp, synthetic construct
  source 1..75: mol_type = other DNA
tcccgatgtttaccgctggttacggtgtcaactggcgtttagctcatggcttaaacactgtgggcattgaccttg

SEQ ID NO: 351907 - DNA, 75 bp, synthetic construct
  source 1..75: mol_type = other DNA
aacttccgcatcatgtctgccgagggtctacagatcactgctgacatggctggtcgttcaggtgttgtctttggt

SEQ ID NO: 351908 - DNA, 75 bp, synthetic construct
  source 1..75: mol_type = other DNA
aacgctgttggtggcttcgctcaagagttctggaaagaaattgataaccagatcatcgaactgaacaccgaagaa

SEQ ID NO: 351909 - DNA, 75 bp, synthetic construct
  source 1..75: mol_type = other DNA
ccctggatagccagcgccttaaattgcgccagttcaacaaacgccgcgttaaattctaccttgaagggaatgacg

SEQ ID NO: 351910 - DNA, 75 bp, synthetic construct
  source 1..75: mol_type = other DNA
tacaacttccgcattatgtctgctgagggtcttcagatcacctgtgatatgaaaggtcgttcaggtgtggtctac

SEQ ID NO: 351911 - DNA, 75 bp, synthetic construct
  source 1..75: mol_type = other DNA
cagttctacctgaatggtaacgatcgcatcgtggttgatggtcataaagcaatgggtattaaaaaccacaaaaac

SEQ ID NO: 351912 - DNA, 75 bp, synthetic construct
  source 1..75: mol_type = other DNA
ggatcgcctgcgcaaccataccgccgcgcaattgattaacggctttaattttttacgctggctggaaagcgaacc

SEQ ID NO: 351913 - DNA, 75 bp, synthetic construct
  source 1..75: mol_type = other DNA
cagcggtggcgttgatggacgctcgttctattgcggcgactgcggcaaacggtggctatttaacctctgccagcg

SEQ ID NO: 351914 - DNA, 75 bp, synthetic construct
  source 1..75: mol_type = other DNA
ttgcgctgccattccacccgagcaacgtatgaaatcgacacgctgaaccagaacctgaccgacattctgcgtgag

SEQ ID NO: 351915 - DNA, 75 bp, synthetic construct
  source 1..75: mol_type = other DNA
atcacagccggtgtttatggatttagccaaaaaaggcgtggtagcagatttgattggcgcaggcgcaatcatcag

SEQ ID NO: 351916 - DNA, 75 bp, synthetic construct
  source 1..75: mol_type = other DNA
cgaacaggcgcagaaactggcgatgctaagcgcgccgctgctgattacgggtgacacaggtacaggtaaagatct

SEQ ID NO: 351917 - DNA, 75 bp, synthetic construct
  source 1..75: mol_type = other DNA
gggtgatttgcgctacgcagaagaatctggtcgaactggtgcaaaaaggcatgttccgtgaagatctctattatc

SEQ ID NO: 351918 - DNA, 75 bp, synthetic construct
  source 1..75: mol_type = other DNA
ttgccgaggagtacgcgactaaacgctaccgttctaacgtcatcaactgggggatgttaccgctgcagatggcgg

SEQ ID NO: 351919 - DNA, 75 bp, synthetic construct
  source 1..75: mol_type = other DNA
gacagtcgtcgtatcgcccctgattttgcttatgataatggcatatttacctttttaggttttaactcagggaaa

SEQ ID NO: 351920 - DNA, 75 bp, synthetic construct
  source 1..75: mol_type = other DNA
ataatatgatctccatacttcgggtctcactggaagtcctgaacactttcgagtcaagttctccgaagttcatta

SEQ ID NO: 351921 - DNA, 75 bp, synthetic construct
  source 1..75: mol_type = other DNA
gttatcacaattccaataagaagaactttaagtccagcctccagtcccgccaacccgaagtaaattatggtcgct

SEQ ID NO: 351922 - DNA, 75 bp, synthetic construct
  source 1..75: mol_type = other DNA
cgctgccgtatgtgctgaccaactgccataactcactctgcgccgtcggcggtactattaatggcgatgaccata

SEQ ID NO: 351923 - DNA, 75 bp, synthetic construct
  source 1..75: mol_type = other DNA
atgaaattcgttagttcacaggaagtgattgagtttcatgaccgcttgatttcgcgtgatggtggcgtggcgggt

SEQ ID NO: 351924 - DNA, 75 bp, synthetic construct
  source 1..75: mol_type = other DNA
tttcaacgatgcaaataagcgaacagccttgtttgttgcacaggtttttttaaaacggaatggtgtacatattat

SEQ ID NO: 351925 - DNA, 75 bp, synthetic construct
  source 1..75: mol_type = other DNA
atggtgaattaccgtcttatatcactggcgctgacacttgccgatccgctgcatctgatcctcggcgcacgttat

SEQ ID NO: 351926 - DNA, 75 bp, synthetic construct
  source 1..75: mol_type = other DNA
cgatcaggtcgaagcgatgacactagccgacaaaatcgtggtgctggacgccggtcgcgtggcgcaggttgggaa

SEQ ID NO: 351927 - DNA, 75 bp, synthetic construct
  source 1..75: mol_type = other DNA
tggttaccgtggctgatgtcatgagtgctctacacgccagctatgacgacgggcaatcaggtgaaaaatttttgc

SEQ ID NO: 351928 - DNA, 75 bp, synthetic construct
  source 1..75: mol_type = other DNA
gatgagcgcgttacatgccagctatgacgatgggctgtcaggggaaaaatttttgcgggaactgtgtgaagtgga

SEQ ID NO: 351929 - DNA, 75 bp, synthetic construct
  source 1..75: mol_type = other DNA
atctcgactggaatggtcgtcgtttgctggcaacgccgtcgacctgcgtgcagtttaaaccgcactgttccaact

SEQ ID NO: 351930 - DNA, 75 bp, synthetic construct
  source 1..75: mol_type = other DNA
ttgtcgcgacaggtgatttagcgcaggatcaatcctctgcggcctatcagcatttcgctgaaggcatcgcaagtt

SEQ ID NO: 351931 - DNA, 75 bp, synthetic construct
  source 1..75: mol_type = other DNA
aaccactttccaacctcgatgcagcgctgcgcgtacagatgcgtatcgaaatttcccgtctgcataaacggttgg

SEQ ID NO: 351932 - DNA, 75 bp, synthetic construct
  source 1..75: mol_type = other DNA
taccaggtgcagaacgacggtcagcgatacgcgttaagccaggcgaattccatcgccgatgaactgatgaccggg

SEQ ID NO: 351933 - DNA, 75 bp, synthetic construct
  source 1..75: mol_type = other DNA
atgctgacaaatcttaaccatgcagcgatgaatacacttctcggcgagcgggtgatggaccgcatgtccatgaac

SEQ ID NO: 351934 - DNA, 75 bp, synthetic construct
  source 1..75: mol_type = other DNA
atgctgacgaacctgaatcacgcagcgatgagcacactcctcggcgagcgggtgatggaccgtatgaccatgaac

SEQ ID NO: 351935 - DNA, 75 bp, synthetic construct
  source 1..75: mol_type = other DNA
tcgtcaccgtgtccgatgtcatgagcgtgttgcatgacggctacgacaacggcaagtccggggaaaaatttttac

SEQ ID NO: 351936 - DNA, 75 bp, synthetic construct
  source 1..75: mol_type = other DNA
gacagcatcactgtgcagtgtcgggatgttaacaaacctgaatcatgccgcaatgagtacgcttcttggtgagag

SEQ ID NO: 351937 - DNA, 75 bp, synthetic construct
  source 1..75: mol_type = other DNA
aatgccggaacgcatacagtgcttaaagcgggtgtttctgcggatacgcaatctgatttcggtgctggtgtcggt

SEQ ID NO: 351938 - DNA, 75 bp, synthetic construct
  source 1..75: mol_type = other DNA
ctctggaacgtattcgcaggctggtaccgcagcacgtgacaccgttgttccggacggcggaagaatggcaggagt

SEQ ID NO: 351939 - DNA, 75 bp, synthetic construct
  source 1..75: mol_type = other DNA
gcgggaaacacctgagcatgttcgtgttgctgaacgctggcaggtgccaaataagctggctgatcggagcggtgt

SEQ ID NO: 351940 - DNA, 75 bp, synthetic construct
  source 1..75: mol_type = other DNA
atttttacaggagctttgtggagttgaccttctggtccttgatgaaattggcatgcagcgggatacgcgcaacga

SEQ ID NO: 351941 - DNA, 75 bp, synthetic construct
  source 1..75: mol_type = other DNA
aggagctttgcggggttgatttgctggtcctggatgaaataggcgttcagcgggagacgaaaaacgagcaggtgg

SEQ ID NO: 351942 - DNA, 75 bp, synthetic construct
  source 1..75: mol_type = other DNA
tttagtagtctgatggcggaaatccgccgtattgcaggcgttaccgatgtgcgcacggtgccgtggatgccttcc

SEQ ID NO: 351943 - DNA, 75 bp, synthetic construct
  source 1..75: mol_type = other DNA
ctttatcgcaattatcccagcacgcgcaaactggcaaaacgtctgggcgtttcacataccgcgattgccaacaaa

SEQ ID NO: 351944 - DNA, 75 bp, synthetic construct
  source 1..75: mol_type = other DNA
gcaattgaaaaatgcgatttaccgtgcactaacgcaactggatggctacgaactgcgcccacaagatattttgct

SEQ ID NO: 351945 - DNA, 75 bp, synthetic construct
  source 1..75: mol_type = other DNA
ttcttgaacgtattcgcagaattgcaccacaggggggggttccaccgtaccgtacggtggaggagtggcgggaat

SEQ ID NO: 351946 - DNA, 75 bp, synthetic construct
  source 1..75: mol_type = other DNA
caccagacgcgggttgaaaaaatcctgaatcgttcgggcatccagccgcttcacaggaagtgctcattcgggaac

SEQ ID NO: 351947 - DNA, 75 bp, synthetic construct
  source 1..75: mol_type = other DNA
cgtcagttgcgggtggaaaaaattctgaatcgctcaggcatccagccgttgcatcgtaaatgctcgtttgcaaat

SEQ ID NO: 351948 - DNA, 75 bp, synthetic construct
  source 1..75: mol_type = other DNA
aacctggcaccgggaaaaatcaccttgcagcagcgattggcaactggctgatggcgaaggggagaagcgtgatta

SEQ ID NO: 351949 - DNA, 75 bp, synthetic construct
  source 1..75: mol_type = other DNA
gattatggatcgcatgaccatgaacggcggacgctgggtgaattttaactgggagagctggcgtccgaatgtcgt

SEQ ID NO: 351950 - DNA, 75 bp, synthetic construct
  source 1..75: mol_type = other DNA
cgatgaatacgctgcttggcgagcgcgtgatggaccgcatgaccatgaacggtggtcgctgggtgaattttaact

SEQ ID NO: 351951 - DNA, 75 bp, synthetic construct
  source 1..75: mol_type = other DNA
cgatgtgctgacaggaagtgatgatggtcgccacagcaacacgtctctggcatggggggctggcgtgcagtttaa

SEQ ID NO: 351952 - DNA, 75 bp, synthetic construct
  source 1..75: mol_type = other DNA
gcgggaccgtctgtacgcgtgaatgaagggttcagcgtgtatgcgatggcgggtgtggcttacagccgtgtgtcg

SEQ ID NO: 351953 - DNA, 75 bp, synthetic construct
  source 1..75: mol_type = other DNA
ttacggacacgctggggctggtgacgtcattcagctatgcaggagacaggaatcgccagcttacccgttacagtg

SEQ ID NO: 351954 - DNA, 75 bp, synthetic construct
  source 1..75: mol_type = other DNA
ttggatataaatcttttaacctcgaggccgtgcgtgcggcactgctggctgataaacccgtttcgcaaagcgatc

SEQ ID NO: 351955 - DNA, 75 bp, synthetic construct
  source 1..75: mol_type = other DNA
aagaatcgccagattacccgttacagcgatacccgctggcatgaagattccgtgcgtaaccgctggttcagcgtg

SEQ ID NO: 351956 - DNA, 75 bp, synthetic construct
  source 1..75: mol_type = other DNA
ttacggacacactggggatggtgacgtcattcagctatgcaggagacaagaatcgccagctgacccgttacagcg

SEQ ID NO: 351957 - DNA, 75 bp, synthetic construct
  source 1..75: mol_type = other DNA
gcgtcgcaaaccattttcgccatcaacaaagataaaaatgcgccgatcttccagtacgcggattacggcattgtt

SEQ ID NO: 351958 - DNA, 75 bp, synthetic construct
  source 1..75: mol_type = other DNA
tcacggacacgctggggctggtgacgtcattcagctatgcaggagacaggaatcgccagattacccgttacagcg

SEQ ID NO: 351959 - DNA, 75 bp, synthetic construct
  source 1..75: mol_type = other DNA
cgccacagcaacacgtctctggcgtggggagctggcgtgcagtttaacccgaccgaatccgtggccattgatatt

SEQ ID NO: 351960 - DNA, 75 bp, synthetic construct
  source 1..75: mol_type = other DNA
atgccggaattgtggttctgaccaacgaatcccccggtcagccaagtgctaactgggatatcgaaatcattgata

SEQ ID NO: 351961 - DNA, 75 bp, synthetic construct
  source 1..75: mol_type = other DNA
acccgctggcatgaagattccgtgcgtaaccgctggttcagcgtgatggcggggccgtctgtacgcgtgaatgaa

SEQ ID NO: 351962 - DNA, 75 bp, synthetic construct
  source 1..75: mol_type = other DNA
ttaacccgaccgaatccgtggccattgatattgcttatgaaggttctggcagtggtgactggcgcactgacgggt

SEQ ID NO: 351963 - DNA, 75 bp, synthetic construct
  source 1..75: mol_type = other DNA
aggtgagtgatgaagagcgggcggaaatactggcctggattgcaaaacagcgcgcggaatattacgccagcaatg

SEQ ID NO: 351964 - DNA, 75 bp, synthetic construct
  source 1..75: mol_type = other DNA
atccggtgcgcctgcatgggcgtctgaacatcagtccactctaagcgccgggtatcttcagacccatactgatat

SEQ ID NO: 351965 - DNA, 75 bp, synthetic construct
  source 1..75: mol_type = other DNA
agcaaaaaacgcactacaacgatacccgctggcatgaggattctgtgcgtaaccgctggttcagcgtgatggcgg

SEQ ID NO: 351966 - DNA, 75 bp, synthetic construct
  source 1..75: mol_type = other DNA
gaacatcagtccacgctgagcgcggggtatcttcatgcccggacgaacgttcccggcagtgatgatctgaacggg

SEQ ID NO: 351967 - DNA, 75 bp, synthetic construct
  source 1..75: mol_type = other DNA
ggtatcttcatgcccgtacgaacactcccggcagcgataatctgaacgggattaacgtgaaataccgttatgagt

SEQ ID NO: 351968 - DNA, 75 bp, synthetic construct
  source 1..75: mol_type = other DNA
ccgaatccgtggccattgacgtcgcttatgaaggctccggcagcggtgactggcgtaccaacagtttcatcgttg

SEQ ID NO: 351969 - DNA, 75 bp, synthetic construct
  source 1..75: mol_type = other DNA
ctggcgtggggagctggcgtgcagtttaacccgaccgaatccgtggccgttgacgtcgcttatgaaggctccggc

SEQ ID NO: 351970 - DNA, 75 bp, synthetic construct
  source 1..75: mol_type = other DNA
atcaggctggtgggccgccgttgaacccgattgaaatggcgtcaaaatcctgggacgaaatcatcgcgaagctgg

SEQ ID NO: 351971 - DNA, 75 bp, synthetic construct
  source 1..75: mol_type = other DNA
cgcaaaaagtggcgttagggtttgccctgtatcacgatccccgtttatcggctgatagcaccatttcttgcgctc

SEQ ID NO: 351972 - DNA, 75 bp, synthetic construct
  source 1..75: mol_type = other DNA
atcccgcaaaaattgcctactgatgcgcaaaaagtggcgctgggctttgcgctgtatcatgatccccgtttatca

SEQ ID NO: 351973 - DNA, 75 bp, synthetic construct
  source 1..75: mol_type = other DNA
tttaacccgaccgaatccgtggccattgatgtcgcttatgaaggttccggtagtggcgactggcgaacggatgca

SEQ ID NO: 351974 - DNA, 75 bp, synthetic construct
  source 1..75: mol_type = other DNA
agtccgtggccattgatgtcgcttatgaaggttccggcagtggtgactggcgcactgacggtttcatcgttggtg

SEQ ID NO: 351975 - DNA, 75 bp, synthetic construct
  source 1..75: mol_type = other DNA
gctggacggggcggtgaaactgatgctgcgctatcaggtaggcaaagagctgccgcaggaggatgtggatgatat

SEQ ID NO: 351976 - DNA, 75 bp, synthetic construct
  source 1..75: mol_type = other DNA
gctcgccctatcgtgtcacaatgaattacgcctttggtcaggttattgaaggttgtgccagcgatcgcgaagaag

SEQ ID NO: 351977 - DNA, 75 bp, synthetic construct
  source 1..75: mol_type = other DNA
gatcttgctggtgttaaagctgaattgtcggataccatcaacgctaataaaaatgcggctgctgtagcaactcag

SEQ ID NO: 351978 - DNA, 75 bp, synthetic construct
  source 1..75: mol_type = other DNA
gctcgtttggctgttaaaggtggtaattatggcttaatttttagaaatgatggtactagtttccatatactgact

SEQ ID NO: 351979 - DNA, 75 bp, synthetic construct
  source 1..75: mol_type = other DNA
atgtaggcgataaacctgtagctgaccatatctatgatgcatatacaatacactcctttaacagtttcagtaacc

SEQ ID NO: 351980 - DNA, 75 bp, synthetic construct
  source 1..75: mol_type = other DNA
attcttttggtaattggaataatcgcagaccattcagctataattttgaggacggtggactatatttaggtggca

SEQ ID NO: 351981 - DNA, 75 bp, synthetic construct
  source 1..75: mol_type = other DNA
catattctcaccgcatgtatcatgaaggtgataaacctactccggctgaaattggcgcatattcgaaagcagaaa

SEQ ID NO: 351982 - DNA, 75 bp, synthetic construct
  source 1..75: mol_type = other DNA
aaagccgtattgatgcagccgatggatcaagtgatggtaagtacatcaaaaagcacgtaaacacttgcactgatg

SEQ ID NO: 351983 - DNA, 75 bp, synthetic construct
  source 1..75: mol_type = other DNA
tcgcagggatgattgcactgacaatttcacacaccgctatggctgacgatattaaagtcgccgttgtcggcgcga

SEQ ID NO: 351984 - DNA, 75 bp, synthetic construct
  source 1..75: mol_type = other DNA
gttttgaacacatccccgcgcggatatcgcgcgacggccacgtgatgaaagtggaagaaattccggtatcaggag

SEQ ID NO: 351985 - DNA, 75 bp, synthetic construct
  source 1..75: mol_type = other DNA
cgacaagagtcctcgatacacgcatttacttcgatcaggatggctctctcagccgcaaatttgaactgaaaagta

SEQ ID NO: 351986 - DNA, 75 bp, synthetic construct
  source 1..75: mol_type = other DNA
actgaaccgtaaggtgatactggtcgggggaaatatccgtgatgccacaaaggtgctgaacacgcgaatttattt

SEQ ID NO: 351987 - DNA, 75 bp, synthetic construct
  source 1..75: mol_type = other DNA
ggatctgggagtgcagggtgacctctggtcggtgcaggagcagagcatgctttccctgatccatcaacggctgga

SEQ ID NO: 351988 - DNA, 75 bp, synthetic construct
  source 1..75: mol_type = other DNA
attaaagttgccgttgtcggcgcgatgtccggcccgattgcccagtggggcgatatggaatttaacggcgcgcgt

SEQ ID NO: 351989 - DNA, 75 bp, synthetic construct
  source 1..75: mol_type = other DNA
gacagtgctcatgctgtttggaaagcggttgattgggggcgtcaatatatcgctgctatggacgttcactgtccg

SEQ ID NO: 351990 - DNA, 75 bp, synthetic construct
  source 1..75: mol_type = other DNA
attaacgtgaaataccgttatgagtttacggacacgctgggggtggtgacgtcattcagctatgcaggagacaag

SEQ ID NO: 351991 - DNA, 75 bp, synthetic construct
  source 1..75: mol_type = other DNA
tgaataatgaatctgccgtcatgcagtttgccagagtggcacgaaaatcaggaaaacaactgatagtcgcagtaa

SEQ ID NO: 351992 - DNA, 75 bp, synthetic construct
  source 1..75: mol_type = other DNA
gttcccggtagacgtctaccagggcggcgcaggtacttccgtaaacatgaacaccaacgaagtgctggccaatat

SEQ ID NO: 351993 - DNA, 75 bp, synthetic construct
  source 1..75: mol_type = other DNA
tcagcgcggtattttcccgtggttttctcctggcgatcctattctctggtggtcgcctgatccacgtgcggtttt

SEQ ID NO: 351994 - DNA, 75 bp, synthetic construct
  source 1..75: mol_type = other DNA
gttatctcaatcagatgcgtctcggacgattaccgaataatttctgggtgccgcgacgattgttttcaccgcaag

SEQ ID NO: 351995 - DNA, 75 bp, synthetic construct
  source 1..75: mol_type = other DNA
cgaagcctaccatcgccttcacgaactcggccatgcccactccattgaagtctggcgtgaagatgagcttgtcgg

SEQ ID NO: 351996 - DNA, 75 bp, synthetic construct
  source 1..75: mol_type = other DNA
gtggtaactatggtttaatccttcgtaatgatggttctagcttccatattcttactaccgatttaaaagattcct

SEQ ID NO: 351997 - DNA, 75 bp, synthetic construct
  source 1..75: mol_type = other DNA
ttattcgtgttggatctgcggaaaactcacctgataacggacaccctcaagctgaaccgccccgggtttcctgga

SEQ ID NO: 351998 - DNA, 75 bp, synthetic construct
  source 1..75: mol_type = other DNA
cactggtacagatctccgtaatggttggtttggttttggtgatggtcagacgaaagattttatttggtggaacga

SEQ ID NO: 351999 - DNA, 75 bp, synthetic construct
  source 1..75: mol_type = other DNA
cgcatttaataacgaatggcatacgctgggcttccgttttgccggtaacaacagtattgaggtgacgccggtcat

SEQ ID NO: 352000 - DNA, 75 bp, synthetic construct
  source 1..75: mol_type = other DNA
ctcacctgctgctggtcatcctcaagctgtctacgagttccatcatgatggcactttctattctccaggtaatgg

SEQ ID NO: 352001 - DNA, 75 bp, synthetic construct
  source 1..75: mol_type = other DNA
tgattaaggcagaaactgaccgcactatcgcagcaaatcaagcctatgcggaaaatcagttaactgacacctaca

SEQ ID NO: 352002 - DNA, 75 bp, synthetic construct
  source 1..75: mol_type = other DNA
ccgaatacgtggccattgatattgcttatgaagggtccgggagtggtgactggcgcactgacggtttcatcgtgg

SEQ ID NO: 352003 - DNA, 75 bp, synthetic construct
  source 1..75: mol_type = other DNA
tctgaccggaagtgatgacggtcgccacagcaacacgtctctggcgtggggagctggcgtgcagtttaacccgac

SEQ ID NO: 352004 - DNA, 75 bp, synthetic construct
  source 1..75: mol_type = other DNA
acacactggggatggtgacgtctttcagctatgcaggagacaagaatcgccagctgacccattacagcgataccc

SEQ ID NO: 352005 - DNA, 75 bp, synthetic construct
  source 1..75: mol_type = other DNA
ccgaatgcgtggccattgatattgcttatgaagggtccggtagtggcgactggcgcactgacggtttcatcgtgg

SEQ ID NO: 352006 - DNA, 75 bp, synthetic construct
  source 1..75: mol_type = other DNA
ccgaatccgtggccattgatattgcttatgaagggtccggtagtggggactggcgcactgacggtttcatcgtgg

SEQ ID NO: 352007 - DNA, 75 bp, synthetic construct
  source 1..75: mol_type = other DNA
ccgaattcgtggccattgatattgcttatgaagggtccgggagtggagactggcgcactgacggtttcatcgtgg

SEQ ID NO: 352008 - DNA, 75 bp, synthetic construct
  source 1..75: mol_type = other DNA
aattgttcagcgcgtatgcgatggcgggagtggcttacagccgtgtgtcgactttttccggggattatctccgcg

SEQ ID NO: 352009 - DNA, 75 bp, synthetic construct
  source 1..75: mol_type = other DNA
cccgaccgaatccgtggccattaatgtcgcttatgaaggctccggcagtggtgactggcgcactgatgggttcat

SEQ ID NO: 352010 - DNA, 75 bp, synthetic construct
  source 1..75: mol_type = other DNA
gtggcttacagccgtatttctactttctccggggattatctccgcgtaactgacaacaaggggaaaacgcacgac

SEQ ID NO: 352011 - DNA, 75 bp, synthetic construct
  source 1..75: mol_type = other DNA
atgcgtaaagtttgtgcagcaattttgtccgcagccatttgtctggccgtatccggtgcgcctgtatgggcgtct

SEQ ID NO: 352012 - DNA, 75 bp, synthetic construct
  source 1..75: mol_type = other DNA
tgtccgcagccatctgtctgtccgtatctggtgcgcctgcatgggcgtctgaacatcagtccacactgagcgcgg

SEQ ID NO: 352013 - DNA, 75 bp, synthetic construct
  source 1..75: mol_type = other DNA
cgatacccgctggcatgaagattccgtgcgtaaccgctggttcagcgtgatggcggggccgtctgtgcgcgtgaa

SEQ ID NO: 352014 - DNA, 75 bp, synthetic construct
  source 1..75: mol_type = other DNA
agactaccatcaacggaggcatttaatgccatatgcaaagtgacgagtgctatcacgcttgatacgtggaaaaaa

SEQ ID NO: 352015 - DNA, 75 bp, synthetic construct
  source 1..75: mol_type = other DNA
caaatcagataacacgcgcgtcatgggaaaaaactgttaagcaattctatgacaagctggtggttcggtttgaca

SEQ ID NO: 352016 - DNA, 75 bp, synthetic construct
  source 1..75: mol_type = other DNA
gtatgaatgacagggaacgggcaacagaactgctgacagaatatgctctcagtcggtgcgatcgcgtggcggcgt

SEQ ID NO: 352017 - DNA, 75 bp, synthetic construct
  source 1..75: mol_type = other DNA
gtgcgctggcatgacttatgctatcagtccggtgatgacgaatctggatggcatgcgtgtagttttgagctgggg

SEQ ID NO: 352018 - DNA, 75 bp, synthetic construct
  source 1..75: mol_type = other DNA
cggccgatgtaaatatcgatattttaagtgcgacagtgaaagataaacgcattgagggagtatcggtgacgctgc

SEQ ID NO: 352019 - DNA, 75 bp, synthetic construct
  source 1..75: mol_type = other DNA
aaccagataacacgcgcgtcatgggaaaaaacagttaagaaattctatgatgcgctggtgacccggtttgatatt

SEQ ID NO: 352020 - DNA, 75 bp, synthetic construct
  source 1..75: mol_type = other DNA
gccctctctgccagccgcctgattgtggccagcgatctggcgcagtgcgtggcgatctccaacgcctacggcccg

SEQ ID NO: 352021 - DNA, 75 bp, synthetic construct
  source 1..75: mol_type = other DNA
gtaatacgcaactactgatcttctggaaggtgaagctgcgcgtaacacagcagcggtggacaacgcacgatgtgc

SEQ ID NO: 352022 - DNA, 75 bp, synthetic construct
  source 1..75: mol_type = other DNA
ccgaatccgtgaccattgaccttgcttatgaaggttccggtagtggcgactggcgaacggatgcatttattgttg

SEQ ID NO: 352023 - DNA, 75 bp, synthetic construct
  source 1..75: mol_type = other DNA
gaaaaaatcagtgaagcgcttttacgatacgttggtgattcggtttgacattgaagaggcatgggcggagcggca

SEQ ID NO: 352024 - DNA, 75 bp, synthetic construct
  source 1..75: mol_type = other DNA
tcttgtttatttaggcgaatggcatacacatcccgaagattttcctcaaccgtcttatacagacatgaaatcttg

SEQ ID NO: 352025 - DNA, 75 bp, synthetic construct
  source 1..75: mol_type = other DNA
cgagtgctatcacgcttgatacatggaaaaaatcagtgaaacgcttttacgatacgttggtggttcggtttgaca

SEQ ID NO: 352026 - DNA, 75 bp, synthetic construct
  source 1..75: mol_type = other DNA
tggcgtgcagtttaacccgaccgaatccgtggccattgatattgcttatgaaggctccggcagtggcgactggcg

SEQ ID NO: 352027 - DNA, 75 bp, synthetic construct
  source 1..75: mol_type = other DNA
cccgaccgaatccgtggccattgaaatagcttatgaaggctccggcagaggagactggcgaacaaacagtttcat

SEQ ID NO: 352028 - DNA, 75 bp, synthetic construct
  source 1..75: mol_type = other DNA
gcaggcgggctcttccatcatgccagcgaaagtaaacccggttgttcctgaagtggttaaccaggtctgcttcaa

SEQ ID NO: 352029 - DNA, 75 bp, synthetic construct
  source 1..75: mol_type = other DNA
cacactctgagagcgattgaaaacttctatatcagcaacagcaaaatcagcgatattcctgaatttgttcgcggt

SEQ ID NO: 352030 - DNA, 75 bp, synthetic construct
  source 1..75: mol_type = other DNA
ccaaagatgagcaaaaaacgcattacagcgatacccgctggcatgaagattccgcgcgtaaccgctggttcagcg

SEQ ID NO: 352031 - DNA, 75 bp, synthetic construct
  source 1..75: mol_type = other DNA
tgtccgcagccatttgtctgtccgtatccggtgcgcctgcatgggcgtctgagcagcaggccacgctgagcgcgg

SEQ ID NO: 352032 - DNA, 75 bp, synthetic construct
  source 1..75: mol_type = other DNA
aggccacgctgagcgcggggtatcttcatgcccggacgaacgctcccggtagcgataatcttaacgggattaacg

SEQ ID NO: 352033 - DNA, 75 bp, synthetic construct
  source 1..75: mol_type = other DNA
gccaggcagcgatgatctgaacgggattaacgtgaaataccgttatgaatttacggacacgctggggctggtgac

SEQ ID NO: 352034 - DNA, 75 bp, synthetic construct
  source 1..75: mol_type = other DNA
cgttgttccgaccatcctgtgaagtgtttcacgttgtcgtctcaacggaggcgcattatagggatcccaattttt

SEQ ID NO: 352035 - DNA, 75 bp, synthetic construct
  source 1..75: mol_type = other DNA
tttttccggggattaccttcgcgtaactgacaacaaggggaaaacgcacgatgtgctgaccggaagtgatgacgg

SEQ ID NO: 352036 - DNA, 75 bp, synthetic construct
  source 1..75: mol_type = other DNA
tgaacaacggaaaatgcatggatcagttcccgatagacgtctaccagggcggcgcaggtacttccgtaaacatga

SEQ ID NO: 352037 - DNA, 75 bp, synthetic construct
  source 1..75: mol_type = other DNA
gggtgtgtcttacagccgtgtgtcgactttctccggggattatctgcgggtgactgacaacaaggggaaaacgca

SEQ ID NO: 352038 - DNA, 75 bp, synthetic construct
  source 1..75: mol_type = other DNA
cccgaccgaatcggtggccattgatattgcttatgaaggctccggcagtggcgactggcgcactgacggtttcat

SEQ ID NO: 352039 - DNA, 75 bp, synthetic construct
  source 1..75: mol_type = other DNA
ccaaaggcacgggtacggaatccggcattcagccacagtacggtgtaccgtatggtgtcacgctcaacccattcc

SEQ ID NO: 352040 - DNA, 75 bp, synthetic construct
  source 1..75: mol_type = other DNA
tgaccgacaatacggggaaaacgcacgatgtgctgatcggaagtgatgacggtcgccacagcaacacgtctctgg

SEQ ID NO: 352041 - DNA, 75 bp, synthetic construct
  source 1..75: mol_type = other DNA
ctggcatgaagattccgttcgtaaccgctggttcagcgtgatggcggggccgtctgtgcgcgtgaatgaatggtt

SEQ ID NO: 352042 - DNA, 75 bp, synthetic construct
  source 1..75: mol_type = other DNA
gcccgtacaaaacaacttcgcaaggccaaaaaggcggatgtgctggccattgccagggcatggggtatcagtggt

SEQ ID NO: 352043 - DNA, 75 bp, synthetic construct
  source 1..75: mol_type = other DNA
ccgtctgtacgcgtgaatgaatggttcagcgcgtatgcgatggtgggtgtggcttacagccgtgtgtcgactttc

SEQ ID NO: 352044 - DNA, 75 bp, synthetic construct
  source 1..75: mol_type = other DNA
acacactggggatggtgacgtcattcagctatgcaggagacaggaatcgccagcttacccgttacagcgataccc

SEQ ID NO: 352045 - DNA, 75 bp, synthetic construct
  source 1..75: mol_type = other DNA
aatgtcagcgcgtatgcgatggcgggtgtgtcttacagccgtgtgtcgactttctccggggattatctccgcgta

SEQ ID NO: 352046 - DNA, 75 bp, synthetic construct
  source 1..75: mol_type = other DNA
tccgcaggaaatcaatggcactttaagcgccgatgccacacctaccgaagctatctcacccgttgccgatcagga

SEQ ID NO: 352047 - DNA, 75 bp, synthetic construct
  source 1..75: mol_type = other DNA
ccgttcaccacgacctgtgggatatggatcttccggcacaaccaacgctggcggatatcaccgttaacggtgata

SEQ ID NO: 352048 - DNA, 75 bp, synthetic construct
  source 1..75: mol_type = other DNA
cgtttggtctgccatgtaaacagccagcatggggttatatctcggcgctggatctgaaaaccaatgaagtggtgt

SEQ ID NO: 352049 - DNA, 75 bp, synthetic construct
  source 1..75: mol_type = other DNA
gaccgaatccgtggccattgatgtcgcttatgaaggctccggcagtggcgactggcgcactgacggtttcatcgt

SEQ ID NO: 352050 - DNA, 75 bp, synthetic construct
  source 1..75: mol_type = other DNA
gccatcatcagttatacgctgactgtagcaatgcttattccggtaagtggatggttggccgatcgctttggcacg

SEQ ID NO: 352051 - DNA, 75 bp, synthetic construct
  source 1..75: mol_type = other DNA
aacaaattaacgccgataacgtccacaacctgaaagaagcctgggtgttccgtacaggcgatgtgaaacagccga

SEQ ID NO: 352052 - DNA, 75 bp, synthetic construct
  source 1..75: mol_type = other DNA
gctggatcggatcatcggctgtatcggtgacgggtaagcgatggatgaaagaagcattaacagctttaaaagttc

SEQ ID NO: 352053 - DNA, 75 bp, synthetic construct
  source 1..75: mol_type = other DNA
aatggttaaataaaaatcattttttgaaaacgaaagaatggcaatataaaaatataaaacctaaaattataattg

SEQ ID NO: 352054 - DNA, 75 bp, synthetic construct
  source 1..75: mol_type = other DNA
cttcagtgtggatggcgtgacaacgaaagtgcgtattgacgccggtgtcgcgccagttgatcaccgcggtctggt

SEQ ID NO: 352055 - DNA, 75 bp, synthetic construct
  source 1..75: mol_type = other DNA
cctccatggtttattttctgcgtgatgcggtcgatgccggggtgctgacggaccgtaacggtttttatgatattc

SEQ ID NO: 352056 - DNA, 75 bp, synthetic construct
  source 1..75: mol_type = other DNA
gggcttattgggtatttctccggcacatcaagtcataatcatgattggcaaatggtcgaggatctattagccgag

SEQ ID NO: 352057 - DNA, 75 bp, synthetic construct
  source 1..75: mol_type = other DNA
gttgggtcggatcatcggctgtttctgtaactggtcaacggtggatgagcgcagcaatgaacgcattaaaggtta

SEQ ID NO: 352058 - DNA, 75 bp, synthetic construct
  source 1..75: mol_type = other DNA
tctggacctgcagactgaatctgttgttctgaaaggtctgagccactggagccggggacgcacaatggtggtggt

SEQ ID NO: 352059 - DNA, 75 bp, synthetic construct
  source 1..75: mol_type = other DNA
cacgctgctggcttttgtggatttgccgtttatcctgcttttcatcggtgtcatcgggcttgtggggggctggct

SEQ ID NO: 352060 - DNA, 75 bp, synthetic construct
  source 1..75: mol_type = other DNA
gttcagcgtcgctgggatagatatacagccagtgtcgcccgctcgtccattcgggtaaaaaataccagtaatgta

SEQ ID NO: 352061 - DNA, 75 bp, synthetic construct
  source 1..75: mol_type = other DNA
gtatcaccaccatgatcgaaatgccgctcaaccagctgcctgcaacggttgaccgcgcttcaattgaactgaagt

SEQ ID NO: 352062 - DNA, 75 bp, synthetic construct
  source 1..75: mol_type = other DNA
ccgctggtaattctggcaggaatattactgcagcgacctctttcccgccatattaatgactccatgagggaatca

SEQ ID NO: 352063 - DNA, 75 bp, synthetic construct
  source 1..75: mol_type = other DNA
tgctgcttgatgaaccgaccaccggtcttgatctgcagacggagtctgttgttctggacgggctcagccactggt

SEQ ID NO: 352064 - DNA, 75 bp, synthetic construct
  source 1..75: mol_type = other DNA
tgatcctgaatatgcccgtcgccttgttggcaatagagcatttcaaaacatagagattggtaacgcaagaggaga

SEQ ID NO: 352065 - DNA, 75 bp, synthetic construct
  source 1..75: mol_type = other DNA
acaggttctgaagtcactccgtttgcggttgtaactgacgacgctactggtcagaaatatccgctggcagactat

SEQ ID NO: 352066 - DNA, 75 bp, synthetic construct
  source 1..75: mol_type = other DNA
tgggtatcgtcgaagataaagtgatcaaaaaccactttgcttctgaatatatctacaacgcctataaagatgaaa

SEQ ID NO: 352067 - DNA, 75 bp, synthetic construct
  source 1..75: mol_type = other DNA
tgacgttgaatttagttgcggtaatgggacccatgtccgcggagactttatagatgtagtacgctcaatagaact

SEQ ID NO: 352068 - DNA, 75 bp, synthetic construct
  source 1..75: mol_type = other DNA
atgttgtggcacaaacttccgaaatctgtctacttccgccgtggctcactgccaatcgcgttggatgaagtgatt

SEQ ID NO: 352069 - DNA, 75 bp, synthetic construct
  source 1..75: mol_type = other DNA
gactctgggttgtggttcctggggcggtaactccatctctgaaaacgttggtccgaaacacctgatcaacaagaa

SEQ ID NO: 352070 - DNA, 75 bp, synthetic construct
  source 1..75: mol_type = other DNA
tggaagcttatgtttctgtactggcttctgagttctctgatggtcaggcgctgcaggctctgaaactgctgaaag

SEQ ID NO: 352071 - DNA, 75 bp, synthetic construct
  source 1..75: mol_type = other DNA
gttttatcaacatggcaacgggcggatttggaacacgcatcaccaccgaaacgccagagaaattaaaagccgcgc

SEQ ID NO: 352072 - DNA, 75 bp, synthetic construct
  source 1..75: mol_type = other DNA
cgcactagtcattggtattggtaacggccgtcaggcaggtggcggtcagcaattgtgcccgaacgcattaattaa

SEQ ID NO: 352073 - DNA, 75 bp, synthetic construct
  source 1..75: mol_type = other DNA
tggataaggcgctgaaactggcaattgccggtaacgccattgcgatagatatggcgcaggtcaacaaacaaacct

SEQ ID NO: 352074 - DNA, 75 bp, synthetic construct
  source 1..75: mol_type = other DNA
gaggggttagctctgctttatatccagtctaaagtgatctcatcagtaccattcaacataaacagatttggttag

SEQ ID NO: 352075 - DNA, 75 bp, synthetic construct
  source 1..75: mol_type = other DNA
atgctgttgcgtgaggaaggaatgacgatccatgtgcgggtcacctgggagaaaggcgatgccgcacgatttgta

SEQ ID NO: 352076 - DNA, 75 bp, synthetic construct
  source 1..75: mol_type = other DNA
aagccccacacgaaatcacttttaatcttgatggcgaaccgttgagtgggcaaaattttcatattgaaatacttc

SEQ ID NO: 352077 - DNA, 75 bp, synthetic construct
  source 1..75: mol_type = other DNA
gttgccattttgcatcaaaatcaaattcgggttaaaacaatgtatgccaatgttatatttctttgatgtatgtca

SEQ ID NO: 352078 - DNA, 75 bp, synthetic construct
  source 1..75: mol_type = other DNA
catatctggctactggtgaatgatgatcagcggctggagcagatgataagccagatagacaaactggaagatgtg

SEQ ID NO: 352079 - DNA, 75 bp, synthetic construct
  source 1..75: mol_type = other DNA
cttctggcaggcgctgcaccgccgcgatgtccaggttcctgaccttctgtctctgcgaggtaacgcccatgcgta

SEQ ID NO: 352080 - DNA, 75 bp, synthetic construct
  source 1..75: mol_type = other DNA
gaagatgtggtgaaagtgcagcgtaatcagtccgatccgacaatgtttaacaagattgcggtgttttttcagtaa

SEQ ID NO: 352081 - DNA, 75 bp, synthetic construct
  source 1..75: mol_type = other DNA
gtcattctgtacgggcgagacgtttacgccgcagcgcgcgtggcacagattatgctgtacgcaggggtgaaagat

SEQ ID NO: 352082 - DNA, 75 bp, synthetic construct
  source 1..75: mol_type = other DNA
acgacggcggctggtacgaatggagcagcgatccaaaaaatccggttgcaaccggtgaacgcggcccggacagca

SEQ ID NO: 352083 - DNA, 75 bp, synthetic construct
  source 1..75: mol_type = other DNA
tcctttctatgaagcattgctggaacaaaaaaccgatctttctgcggtacgctttggcgcaatcggcattggtag

SEQ ID NO: 352084 - DNA, 75 bp, synthetic construct
  source 1..75: mol_type = other DNA
tagtcgatagcgatattgcacgtttgttactcaagctcagaaagtctcgaaacttgactgttacagagcttgccc

SEQ ID NO: 352085 - DNA, 75 bp, synthetic construct
  source 1..75: mol_type = other DNA
cgttaaaacaagatccatatgctttagaaaccgcatatgtctctgtcattacctttgactcaactgcccgtcaga

SEQ ID NO: 352086 - DNA, 75 bp, synthetic construct
  source 1..75: mol_type = other DNA
ggacttaatgaattcaaagcagccaaaaaaggggtagttgtcgcatgtgctgccgggcatgatgcagatacggat

SEQ ID NO: 352087 - DNA, 75 bp, synthetic construct
  source 1..75: mol_type = other DNA
tatcaatgaccagcattgagattgcggagctggtgggaagccaacactctgacgttaaacgtagtattgagcgta

SEQ ID NO: 352088 - DNA, 75 bp, synthetic construct
  source 1..75: mol_type = other DNA
tagtcgatagcgatattgcacgtttattgctcaagcacagaaaggctcgaaatttgactgtaacagagcttgccc

SEQ ID NO: 352089 - DNA, 75 bp, synthetic construct
  source 1..75: mol_type = other DNA
tagtagatagcgatattgcacgtttattgcttaaacacaggaaggctcgcaatttgactgtaacagagcttgctc

SEQ ID NO: 352090 - DNA, 75 bp, synthetic construct
  source 1..75: mol_type = other DNA
ggcaaattgattcaaccttgaggaatttagaacttgaggaaaataaggtaaatgtaataacaggtgattctggca

SEQ ID NO: 352091 - DNA, 75 bp, synthetic construct
  source 1..75: mol_type = other DNA
atgatgcggtgtttaaacaatttttaatgcatgcggaaacggctcatgactttctggatatccatttgccagcgg

SEQ ID NO: 352092 - DNA, 75 bp, synthetic construct
  source 1..75: mol_type = other DNA
ctatttcgattatgaggcttacgcgcgggatctgttcagcagcggctatgtcttccatgaaggctatgtattcag

SEQ ID NO: 352093 - DNA, 75 bp, synthetic construct
  source 1..75: mol_type = other DNA
ttcaacttgtcagagctactcgatttacaaggactggaaaaagttctcattcgtcaggacgatggcaaagcgtat

SEQ ID NO: 352094 - DNA, 75 bp, synthetic construct
  source 1..75: mol_type = other DNA
caaaatttttctcttccatgcgaacgttagcatttttactgtcaacaattgcaaaaataatatttgcttattggc

SEQ ID NO: 352095 - DNA, 75 bp, synthetic construct
  source 1..75: mol_type = other DNA
aatgtaaagtctgttggtgggtttacgatcctgatgccggagattccttatcacaaattcctgctggcaccgcat

SEQ ID NO: 352096 - DNA, 75 bp, synthetic construct
  source 1..75: mol_type = other DNA
agtgatgtctccttttcttataagtccggattacccgaggcattgtccggtctgtcactcagtatccgacctgga

SEQ ID NO: 352097 - DNA, 75 bp, synthetic construct
  source 1..75: mol_type = other DNA
taaccattgtggatatccagcacatcaacacgctggtgtacaaacagcttctgaataacgagcaaatcgctgcgg

SEQ ID NO: 352098 - DNA, 75 bp, synthetic construct
  source 1..75: mol_type = other DNA
ggaaaaaaatcgcaacatttacgctacgtaaggccgcagagcttttcaacgcggcacctgaagatggctgcctga

SEQ ID NO: 352099 - DNA, 75 bp, synthetic construct
  source 1..75: mol_type = other DNA
ggtgagtcatttgatgctaaaaaagaacaaataacgctgaaagttggtgatgatgaatatcctataagttctatc

SEQ ID NO: 352100 - DNA, 75 bp, synthetic construct
  source 1..75: mol_type = other DNA
ctcatacaacggtgtggaaaattcattcgccagaatttcaggatgagttgacagttagtctgcatcacagaaatg

SEQ ID NO: 352101 - DNA, 75 bp, synthetic construct
  source 1..75: mol_type = other DNA
caatcctgcagaatttgaacaggtaaatatggtgttacaagggttcgttgaagcgaacgttttatctgtacttca

SEQ ID NO: 352102 - DNA, 75 bp, synthetic construct
  source 1..75: mol_type = other DNA
cgatgccgaaagctattaaagcgaagcctgagaaacctcagacgatgcgccgcctgtctagcgctgatcttgacg

SEQ ID NO: 352103 - DNA, 75 bp, synthetic construct
  source 1..75: mol_type = other DNA
gggggcctggtccggtggttaaaaaagcctttgaagccgactgtaattgcgaactgaaactggtggcgctggaag

SEQ ID NO: 352104 - DNA, 75 bp, synthetic construct
  source 1..75: mol_type = other DNA
catttcagcaccacgcgctacagccaggctatccgtcaggaggtgtgcgcaatgatggcgcttaatatgctgcgc

SEQ ID NO: 352105 - DNA, 75 bp, synthetic construct
  source 1..75: mol_type = other DNA
ccacagccgccagtttgtttgagattgaccacttttgggcgttcagaaagcgatctggcgcaaagtctggattac

SEQ ID NO: 352106 - DNA, 75 bp, synthetic construct
  source 1..75: mol_type = other DNA
gcggatggaaggcaaaaacagcaaagccgatgtggtgctggggctggataacaatctgttagatgccgccagcaa

SEQ ID NO: 352107 - DNA, 75 bp, synthetic construct
  source 1..75: mol_type = other DNA
agaaactggcgaagaaaacggtcacggtcaccaaaggctggagcgaagcctacggcctgtttttaaaaggtgaaa

SEQ ID NO: 352108 - DNA, 75 bp, synthetic construct
  source 1..75: mol_type = other DNA
gtgatttatcaggatccgcgcaccagtacgccggggctgggcctgctgttgtggatgcaaaaagtctatggcgat

SEQ ID NO: 352109 - DNA, 75 bp, synthetic construct
  source 1..75: mol_type = other DNA
cgctggctaaacggcctggatattgccagcgagcatggctggattgaggttgtggagtcgttgacgctgtcgcca

SEQ ID NO: 352110 - DNA, 75 bp, synthetic construct
  source 1..75: mol_type = other DNA
cgaagggcagctacgctggcggtgctggaattttgaacctgatgccggaaaacagctaaattcgtatctcgccag

SEQ ID NO: 352111 - DNA, 75 bp, synthetic construct
  source 1..75: mol_type = other DNA
gaagatgacgaagcagaagaaatggaagccctcgaaacagagattatgcttgctctggactatgaggatccgtac

SEQ ID NO: 352112 - DNA, 75 bp, synthetic construct
  source 1..75: mol_type = other DNA
cgctggctgaacggtcaggacattgccagcgagcatggctggattgaggttgttgaatctatgaccctaactgcc

SEQ ID NO: 352113 - DNA, 75 bp, synthetic construct
  source 1..75: mol_type = other DNA
cgctggctgaacgggcagaacatcgccagtgagcatggctggattgaggttgttgagtcgctgagactgtcgccg

SEQ ID NO: 352114 - DNA, 75 bp, synthetic construct
  source 1..75: mol_type = other DNA
cggcgggctggggccgaccagtgatgatttaagcgcactcgccgctgcgacagcaaaaggtgaaggcctggtgct

SEQ ID NO: 352115 - DNA, 75 bp, synthetic construct
  source 1..75: mol_type = other DNA
gcaaaaagtctatggcgatgacgccccacaagcctggcagaaactggcgaagaaaaccgtcaccgtcaccaaagg

SEQ ID NO: 352116 - DNA, 75 bp, synthetic construct
  source 1..75: mol_type = other DNA
agaaaaaagaagaaatctcgaaacagataacttcaaccacagcgccagcctatgttactgctgtccgttccggcg

SEQ ID NO: 352117 - DNA, 75 bp, synthetic construct
  source 1..75: mol_type = other DNA
ggtatcgacaccgctaaagagaaactggatgtcgatgtgttgcgtcctgatggtcgtcatcgcaccaaaaaattc

SEQ ID NO: 352118 - DNA, 75 bp, synthetic construct
  source 1..75: mol_type = other DNA
gggcgatttgattgctaaacactgggcggcgaatcagggttgggatctgaacaaagacggtcagattcagttcgt

SEQ ID NO: 352119 - DNA, 75 bp, synthetic construct
  source 1..75: mol_type = other DNA
gcagtaacacccaggctatccagaatcactcccgccagctgcaggagcataacgcacgcctgaacagccagcagc

SEQ ID NO: 352120 - DNA, 75 bp, synthetic construct
  source 1..75: mol_type = other DNA
tgggttaccgcttcaacgagcagaccgcagccaaagcaggtattgcggccagcgacggtgatgtttcctacaacg

SEQ ID NO: 352121 - DNA, 75 bp, synthetic construct
  source 1..75: mol_type = other DNA
ccttaaaaaaagatgtttcaaatgctatttctatcaaaacagcgccagcgtatgtgtctgcggttcgttcagggg

SEQ ID NO: 352122 - DNA, 75 bp, synthetic construct
  source 1..75: mol_type = other DNA
acgtgattaaagagctgaacgacaaaggcattaaaactgaacagttacagttagataccgctatgtgggataccg

SEQ ID NO: 352123 - DNA, 75 bp, synthetic construct
  source 1..75: mol_type = other DNA
gaaaaagcacgtgggcaaaacgtaccggtagttttctttaataaagagccgtctcgtaaggcgctggatagctat

SEQ ID NO: 352124 - DNA, 75 bp, synthetic construct
  source 1..75: mol_type = other DNA
atgccgggttgtacatcacgtttattacccgaaggccctttctcacgcgaacaggcggttgccgtcacaacagct

SEQ ID NO: 352125 - DNA, 75 bp, synthetic construct
  source 1..75: mol_type = other DNA
atgaatgattctcagaatgaccagtccaagcagaacgatcagatcgacgtattgctggcgaaaggggtgaaggca

SEQ ID NO: 352126 - DNA, 75 bp, synthetic construct
  source 1..75: mol_type = other DNA
acaaagatggtcagattcagttcgtactgctgaaaggtgaaccgggccatccggatgcagaagcgcgtaccacct

SEQ ID NO: 352127 - DNA, 75 bp, synthetic construct
  source 1..75: mol_type = other DNA
gaaaaacctggccgatggcaaaggtgcggctgatggcaccaactggaaaatcgacaacaaagtggtccgcgtacc

SEQ ID NO: 352128 - DNA, 75 bp, synthetic construct
  source 1..75: mol_type = other DNA
atgtgggactgtctccctgttttattgcccgaaggccctttctcacgcgaacaggcggttggcgtcacaacagct

SEQ ID NO: 352129 - DNA, 75 bp, synthetic construct
  source 1..75: mol_type = other DNA
agatattgttgtgcataaagccctctgtgctaatgctatttccgttgcagagatgactattctgatgatgctttc

SEQ ID NO: 352130 - DNA, 75 bp, synthetic construct
  source 1..75: mol_type = other DNA
attccgaaatctatccgtgaagctggcgttcaggaagcagacttcctggcgaacgtggataaactgtctgaagat

SEQ ID NO: 352131 - DNA, 75 bp, synthetic construct
  source 1..75: mol_type = other DNA
gcagcgaccattgcgggtatcgcgttcgctaacgccttcctgggggtatgtcactcgatggcgcataaactgggt

SEQ ID NO: 352132 - DNA, 75 bp, synthetic construct
  source 1..75: mol_type = other DNA
gaacgtcccctatctggaggacatcgacgactactttgcccgcgaagtgcttcctcatgtgccggatgcctggct

SEQ ID NO: 352133 - DNA, 75 bp, synthetic construct
  source 1..75: mol_type = other DNA
ggacttggtgcaattggtcaacatgttgctcatattgctcattctatgggaatgacgattactgctcatgatcct

SEQ ID NO: 352134 - DNA, 75 bp, synthetic construct
  source 1..75: mol_type = other DNA
acgtcagacttgtcggtcacgagttatatcaaaaaacgttggggttaattggcctcggtgcaatagggcaacacg

SEQ ID NO: 352135 - DNA, 75 bp, synthetic construct
  source 1..75: mol_type = other DNA
aagatattattggctggatcgatcaaccttccgttgaactgtccaacgcgctgatgcatcacccggacatcaacc

SEQ ID NO: 352136 - DNA, 75 bp, synthetic construct
  source 1..75: mol_type = other DNA
cggagccaacccacggtatccgttgatctctgaacttaaaaatattctgctctgtagctattacggcaagaattt

SEQ ID NO: 352137 - DNA, 75 bp, synthetic construct
  source 1..75: mol_type = other DNA
cttcctcggcgtgtgtcactccatggcacacaaactgggttcacagttccacattcctcacggtctggcgaacgc

SEQ ID NO: 352138 - DNA, 75 bp, synthetic construct
  source 1..75: mol_type = other DNA
cgtaaaggtgcagaactggcaaactccttcaagccagacgtgatcatcgcgctgggtggcggttccccgatggac

SEQ ID NO: 352139 - DNA, 75 bp, synthetic construct
  source 1..75: mol_type = other DNA
ggcagactacgcgctgactccggatatggcgattgttgacgccaacctggttatggatatgccgaagtccctgtg

SEQ ID NO: 352140 - DNA, 75 bp, synthetic construct
  source 1..75: mol_type = other DNA
cgacactttcggtactatcactatcgctgaaccaatcggtattatctgcggtatcgttccaacgactaacccgac

SEQ ID NO: 352141 - DNA, 75 bp, synthetic construct
  source 1..75: mol_type = other DNA
tgtacaagatttgccagaactttgccaagatcgacctgcacccggacgtggtgccggatcgggtgatgagtaaca

SEQ ID NO: 352142 - DNA, 75 bp, synthetic construct
  source 1..75: mol_type = other DNA
ctgtccaaaccagtttcactcggtttgcgactgttcggtaacatgtacgccggtgagctgattttcattctgatt

SEQ ID NO: 352143 - DNA, 75 bp, synthetic construct
  source 1..75: mol_type = other DNA
ctgccgtacattgctgaacatgtactgggtctgcctgcactgcgtgtggttccgtctgcggacgtgaacgtaacg

SEQ ID NO: 352144 - DNA, 75 bp, synthetic construct
  source 1..75: mol_type = other DNA
taaccttcagctggacctgcgtacattctcgctggtggatccacaacaccccccagccaccttctggacaatcaa

SEQ ID NO: 352145 - DNA, 75 bp, synthetic construct
  source 1..75: mol_type = other DNA
atgtcggactgccgccctgttttattgcccgaaggccctttctcacgcgaacaggcggttggcgtcacaacagct

SEQ ID NO: 352146 - DNA, 75 bp, synthetic construct
  source 1..75: mol_type = other DNA
atgttggactgtcaccctgttttattgcccgaaggccctttctcacgcgaacaggcggttggcgtcacaacagct

SEQ ID NO: 352147 - DNA, 75 bp, synthetic construct
  source 1..75: mol_type = other DNA
atgtaggactgaccccctgttttattgcccgaaggccctttctcacgcgaacaggcggttggcgtcacaacagct

SEQ ID NO: 352148 - DNA, 75 bp, synthetic construct
  source 1..75: mol_type = other DNA
ctaccacccagcaaaacaataactccatgggggtgaactatctcacaattcctgcgatatcaattatgttattgc

SEQ ID NO: 352149 - DNA, 75 bp, synthetic construct
  source 1..75: mol_type = other DNA
gtcattggcatgagtattttcttcatgctttctggttttgttttgacttataattactatggttccttgtcaaac

SEQ ID NO: 352150 - DNA, 75 bp, synthetic construct
  source 1..75: mol_type = other DNA
gggcggtttcctttccgatgccattagccaaattgaagaaatgggcagcagcgctaaagtcgtgccttttggtca

SEQ ID NO: 352151 - DNA, 75 bp, synthetic construct
  source 1..75: mol_type = other DNA
ctcatacgggcaggcggttgctgtcataacagcttaccgcaatgtgtttatccaggatgacccgggaatgcattt

SEQ ID NO: 352152 - DNA, 75 bp, synthetic construct
  source 1..75: mol_type = other DNA
tatggcgtgtataccaaagcacggcggaacggtattacaggcaaggtaatgccagcggctcccggaggctcttca

SEQ ID NO: 352153 - DNA, 75 bp, synthetic construct
  source 1..75: mol_type = other DNA
tttctgccctgctggtatcaacaggcgtactggctgattcgtccactcataccgggagcttaaaaaaccaggcca

SEQ ID NO: 352154 - DNA, 75 bp, synthetic construct
  source 1..75: mol_type = other DNA
agagaccctaatctaacgagggctaaaaatttttctttattacaagaggctgtagttaatcttgataaagctatc

SEQ ID NO: 352155 - DNA, 75 bp, synthetic construct
  source 1..75: mol_type = other DNA
ttttctgctggggggcatatcgcctcaacgggtggggaatcagattggtgatttcaaacgtgcttctgacagtaa

SEQ ID NO: 352156 - DNA, 75 bp, synthetic construct
  source 1..75: mol_type = other DNA
cgtcatcgtattggtgtattaggattttctgctggggggcatatcgcctcaacgtttgtgaatcagatttgtgat

SEQ ID NO: 352157 - DNA, 75 bp, synthetic construct
  source 1..75: mol_type = other DNA
cggcatacagaaccctggattgcgaccatagctgccgaatcataggcaaggtagttaaggctcagtggcctgaag

SEQ ID NO: 352158 - DNA, 75 bp, synthetic construct
  source 1..75: mol_type = other DNA
caaaagccagcgaaaaagctttctggcttgaggtgaaggggcattcaatgacggcgcctcagggggttcgtccaa

SEQ ID NO: 352159 - DNA, 75 bp, synthetic construct
  source 1..75: mol_type = other DNA
ctggttgccagtggttatgtatacaactccggctacgggttattcccgtctgaacaggcacgaaaggactggcaa

SEQ ID NO: 352160 - DNA, 75 bp, synthetic construct
  source 1..75: mol_type = other DNA
tgacaccggcagactttcgcgaatttgtttttgcgattgccgataaagtcggatttgctcgtgagcgtattattc

SEQ ID NO: 352161 - DNA, 75 bp, synthetic construct
  source 1..75: mol_type = other DNA
acagattcaggtgaaccattccctaccttccacccgtggtatacagatgatttatcagggcgttataagagcgta

SEQ ID NO: 352162 - DNA, 75 bp, synthetic construct
  source 1..75: mol_type = other DNA
atagcggataatgcaccaggggaaacccgctgcaccctcaggcccggaacatgttttgaagtgacaagtgtggat

SEQ ID NO: 352163 - DNA, 75 bp, synthetic construct
  source 1..75: mol_type = other DNA
aaaaaccggtgacagcgcataacgaaatgctgcatgtactggagttgcgcgagcccacgtatgacgaaatcgagg

SEQ ID NO: 352164 - DNA, 75 bp, synthetic construct
  source 1..75: mol_type = other DNA
atgaacgttacagaaattgttttaaaaaaaccggtgacagcgcataacgaaatgctgcatgtgctggagttgcgc

SEQ ID NO: 352165 - DNA, 75 bp, synthetic construct
  source 1..75: mol_type = other DNA
tcggcggcgatcatctggggccaaactgctggcagcaagaaaatgcggatgcgcgatggaaaaatccgtcgagct

SEQ ID NO: 352166 - DNA, 75 bp, synthetic construct
  source 1..75: mol_type = other DNA
atgattgttgcgccaaacggcaggcgtgatcacgcgcacattaatgaaggtataaaaaaagccggcatcatgccg

SEQ ID NO: 352167 - DNA, 75 bp, synthetic construct
  source 1..75: mol_type = other DNA
gcagcgcacagggtgagctgtgggaataccgccacgacgccagcggcagacgaacagagaaacgctgcgaccgga

SEQ ID NO: 352168 - DNA, 75 bp, synthetic construct
  source 1..75: mol_type = other DNA
ggtgactgaacaggggcacggcgttctcctgttcacaatggaaatggcgaacatccagattggtgaacgcatggt

SEQ ID NO: 352169 - DNA, 75 bp, synthetic construct
  source 1..75: mol_type = other DNA
ttgcggcgcaatgccgcactgcgcgatgcagaaaaaacactgactgaagcattacagaatttacgtgatgcgtat

SEQ ID NO: 352170 - DNA, 75 bp, synthetic construct
  source 1..75: mol_type = other DNA
atcatgcggtgagcgacctgacgggccgcccgctgatgctctttaacagtgaaggcaagacggtctggcgaccgg

SEQ ID NO: 352171 - DNA, 75 bp, synthetic construct
  source 1..75: mol_type = other DNA
atgcagaaaaaacactgaccgaagcattacagaatttacgtgatgcgcatacctgtgaagcagccgaggatgctc

SEQ ID NO: 352172 - DNA, 75 bp, synthetic construct
  source 1..75: mol_type = other DNA
ccaatgcagcagccccagccgcgcagatacagcaacaaacgaactgacagcagtaagatggagcgtttcttttga

SEQ ID NO: 352173 - DNA, 75 bp, synthetic construct
  source 1..75: mol_type = other DNA
acgacattctcacagattctattagatgccagaatgcagcacgcaaaaaatttgatacgcgtagaaggttcagtc

SEQ ID NO: 352174 - DNA, 75 bp, synthetic construct
  source 1..75: mol_type = other DNA
ctatcgtcagatgccggaaatcgttgaacgtggtcacgtctacatcgctcagccgccgctgtacaaagtgaagaa

SEQ ID NO: 352175 - DNA, 75 bp, synthetic construct
  source 1..75: mol_type = other DNA
ctcgatcctgatctgattctgcttgatctgaatatgcccggcatgaacggtctggaaacgctggataaactgcgc

SEQ ID NO: 352176 - DNA, 75 bp, synthetic construct
  source 1..75: mol_type = other DNA
ccgtatcagggaaagtgagaaacattgtcaatatgaagctggcacacccatggaaactaaaagatatttgtgatt

SEQ ID NO: 352177 - DNA, 75 bp, synthetic construct
  source 1..75: mol_type = other DNA
tgcgttccgcaaacatttcggcaacagtccaaagagagtttctaaggagtactgttgcatgattatttatgatct

SEQ ID NO: 352178 - DNA, 75 bp, synthetic construct
  source 1..75: mol_type = other DNA
ccgtttctgggaaagttagaaatattgtcaacatgaagctggcgcacccatggaagctgaaagatatttgtgact

SEQ ID NO: 352179 - DNA, 75 bp, synthetic construct
  source 1..75: mol_type = other DNA
taacgtttacgcagtcaagaaacgaaatgatcatcccagtcgaacagcaaaaattaatctatgcttttgataagt

SEQ ID NO: 352180 - DNA, 75 bp, synthetic construct
  source 1..75: mol_type = other DNA
tggctgcgccgcgtgaaagccatacgttaggcgcattattcgactttttacagcaaaatctggcacaaacgcata

SEQ ID NO: 352181 - DNA, 75 bp, synthetic construct
  source 1..75: mol_type = other DNA
attgccgagctgacggggtttggcaattcagccttactaaggcatcattttctacagcgttttttattatctcct

SEQ ID NO: 352182 - DNA, 75 bp, synthetic construct
  source 1..75: mol_type = other DNA
aaacatgacgcgtccgatggcttcgtcgcgagaaagccagacgtttggcgcattattcgactttttacagcaaaa

SEQ ID NO: 352183 - DNA, 75 bp, synthetic construct
  source 1..75: mol_type = other DNA
gcgggtgacacaaattgatgccagtgctgctgagaagactgggatggtgaatgtgcagcggctggagtttggacg

SEQ ID NO: 352184 - DNA, 75 bp, synthetic construct
  source 1..75: mol_type = other DNA
gtgtcgtttagccttgaggacgcgcaagaactggcgggctccgatgacaagaaaagcaatgcggtttcgctggta

SEQ ID NO: 352185 - DNA, 75 bp, synthetic construct
  source 1..75: mol_type = other DNA
tgacacccgcccgctggcttctcaatgagcgattaatacgagtggaagattatctgcaaaattcgtcgtttagca

SEQ ID NO: 352186 - DNA, 75 bp, synthetic construct
  source 1..75: mol_type = other DNA
tcgaagcttctcatccttccccgcatgggcagaatatttaattgcggattcgttgggaagttcagggacttttga

SEQ ID NO: 352187 - DNA, 75 bp, synthetic construct
  source 1..75: mol_type = other DNA
ggtgggatctggaccagatcgccgctgacaacggtttcgactttcatatcatcgacaatgaaatctattgggatg

SEQ ID NO: 352188 - DNA, 75 bp, synthetic construct
  source 1..75: mol_type = other DNA
ttctggtcgcagcgatgttttctgttgcaggctccgcattggcagtacaaaaggatattactgtaacggctaacg

SEQ ID NO: 352189 - DNA, 75 bp, synthetic construct
  source 1..75: mol_type = other DNA
tcccggttggcgtggagtagatgaaccggtgccagagatgctatgtgaggcgttacgcgaaactcaccagcgagg

SEQ ID NO: 352190 - DNA, 75 bp, synthetic construct
  source 1..75: mol_type = other DNA
gcgctgcacgcttcgcccttcgggtcgttgcctgcggcaacgctctctcgctggcgctcaagtcaaaccttggtc

SEQ ID NO: 352191 - DNA, 75 bp, synthetic construct
  source 1..75: mol_type = other DNA
attgcggattcgcttgagagttcagggacttttgaaagtgatggtggtgggggaaggattactcagcgctgcgcg

SEQ ID NO: 352192 - DNA, 75 bp, synthetic construct
  source 1..75: mol_type = other DNA
ggcggacggtcgagcgacattttcgcaaacatcaagctcgctgcccgccggaataccgcgagatcctcatcgaac

SEQ ID NO: 352193 - DNA, 75 bp, synthetic construct
  source 1..75: mol_type = other DNA
tagaccccaacaagaagcgttgggtgtctatcgctggcggcgtcttcgttctttttgcggtcgtgacaatgttct

SEQ ID NO: 352194 - DNA, 75 bp, synthetic construct
  source 1..75: mol_type = other DNA
ggggcaaattgctggctataacaatgccatgaatgttatctatggtcaggctgcaccgaaagtatcggatttaca

SEQ ID NO: 352195 - DNA, 75 bp, synthetic construct
  source 1..75: mol_type = other DNA
gtgctgctgggcggtatggtgggcgcggggattgtgttggggcgtaacgctctgcgtaattacaacgcgaaataa

SEQ ID NO: 352196 - DNA, 75 bp, synthetic construct
  source 1..75: mol_type = other DNA
gcgacgcatgtggttattcccaacgaggtcatggaacaagattgcctgctggcatacgacggcgaaacctatttt

SEQ ID NO: 352197 - DNA, 75 bp, synthetic construct
  source 1..75: mol_type = other DNA
aatttcaacccggccagcgctatgtgattcaggctaacctgcaactgccggacagcccggactgccccggttatt

SEQ ID NO: 352198 - DNA, 75 bp, synthetic construct
  source 1..75: mol_type = other DNA
ctggtggaaaaacatcctcttcatcagaggatgccagagccgatgttaatggtgcatctggtggtgatggtcagt

SEQ ID NO: 352199 - DNA, 75 bp, synthetic construct
  source 1..75: mol_type = other DNA
tcacagttttcaaatatgaaagaattacgcgtccaacatcagggaaacccggtacgtgctttttttgctttcgat

SEQ ID NO: 352200 - DNA, 75 bp, synthetic construct
  source 1..75: mol_type = other DNA
gtgcgggtgataaaacggggttaaatgagaaaaagttttatcgcgatatgatcaagctcgctgattctgaatacc

SEQ ID NO: 352201 - DNA, 75 bp, synthetic construct
  source 1..75: mol_type = other DNA
agaacccatgttctggcttgataccacgcaatattggtcaacttacgaatatggtctttctgcgggttatgattt

SEQ ID NO: 352202 - DNA, 75 bp, synthetic construct
  source 1..75: mol_type = other DNA
cttttggggagcgaagcgctggagtcgatgattaagcatgaggcgacccgtccgttggtgttctcaccaaactac

SEQ ID NO: 352203 - DNA, 75 bp, synthetic construct
  source 1..75: mol_type = other DNA
gaagctgaccattgagcctaccgttaaaaaccagccgttaccactggcggtgtcttatgttggtgaaacacctga

SEQ ID NO: 352204 - DNA, 75 bp, synthetic construct
  source 1..75: mol_type = other DNA
tgtcttattgcacaatacggtgaaaattacatgcatattgcctgcttatttctgcgtaaagcatacgggaaataa

SEQ ID NO: 352205 - DNA, 75 bp, synthetic construct
  source 1..75: mol_type = other DNA
atcccagccagaattggaatttctggcgaagaaccgccaacagagcaagagcttctaagtgtcttttaccagcaa

SEQ ID NO: 352206 - DNA, 75 bp, synthetic construct
  source 1..75: mol_type = other DNA
cgtgcgctacaaaaggctgcaacgcaaattgcatttggtgacgatcgccgccgtacaaccaaacacttctcaaaa

SEQ ID NO: 352207 - DNA, 75 bp, synthetic construct
  source 1..75: mol_type = other DNA
ttgaccaaggccagaaagttgtcagacgcacagaaaaaacgggcggcagcaaaagaagcggccttgcaacgtgag

SEQ ID NO: 352208 - DNA, 75 bp, synthetic construct
  source 1..75: mol_type = other DNA
gcggggctacgtgattatacgtacgaacggttttcgtatattgtatcggcattatcatcgatttgtgtattctcg

SEQ ID NO: 352209 - DNA, 75 bp, synthetic construct
  source 1..75: mol_type = other DNA
actggcggctgaagtttaccagccggaaggaccgctttgcggccaagctgaaaggcctgagagacttcctgtgga

SEQ ID NO: 352210 - DNA, 75 bp, synthetic construct
  source 1..75: mol_type = other DNA
gcgaagaaccgccaacagagcaagagcttctaagtgtcttttaccagcaatgcctgaaacatggctcatggggca

SEQ ID NO: 352211 - DNA, 75 bp, synthetic construct
  source 1..75: mol_type = other DNA
tactccacagaaaatgaaaagaaaactgctcttgataaagttttcaccggcacagaatcacgaacttatgagtta

SEQ ID NO: 352212 - DNA, 75 bp, synthetic construct
  source 1..75: mol_type = other DNA
gattctctacggcaagcgtgaaactcagcagatgccggaagtcggtcagcgtctgcgcgttggcgggatggtgat

SEQ ID NO: 352213 - DNA, 75 bp, synthetic construct
  source 1..75: mol_type = other DNA
ataacaataatattattattcattctaatgctaaaatatcatctgatgttaatgtaaatataattggtactgata

SEQ ID NO: 352214 - DNA, 75 bp, synthetic construct
  source 1..75: mol_type = other DNA
atcgtagcagtaaaacgaacgttgaagccgccaaacgcgaatggaggctctatcagaagcgccaggcagctttaa

SEQ ID NO: 352215 - DNA, 75 bp, synthetic construct
  source 1..75: mol_type = other DNA
tgattaatatccgcgtagaagcatcggatatatccgtccaccagcaccatatcgtccgtatacgctttgaagaat

SEQ ID NO: 352216 - DNA, 75 bp, synthetic construct
  source 1..75: mol_type = other DNA
gctcatttgtcagcacgacgccagcgccggtcagacgatattcccgcccttgcctggcagcaggccattgaggcg

SEQ ID NO: 352217 - DNA, 75 bp, synthetic construct
  source 1..75: mol_type = other DNA
gtttaaatgattttacattttataatatttctgcaatactggggcaatctgctttcctgttagtactaccattag

SEQ ID NO: 352218 - DNA, 75 bp, synthetic construct
  source 1..75: mol_type = other DNA
aaggtgaaaacgacattgcggtcggaaatatcattggcgcaaacatttttaatattgtcatcgtgttgggtttac

SEQ ID NO: 352219 - DNA, 75 bp, synthetic construct
  source 1..75: mol_type = other DNA
aatattgtcatcgtgttgggtttacccgcgctgataacgccaggagagattgatccactggcgtacagtcgtgac

SEQ ID NO: 352220 - DNA, 75 bp, synthetic construct
  source 1..75: mol_type = other DNA
cattgttaaacttgcacgtcaggctgaacgtcaggggactgacagcctgaccagagagcagcttgcagagctgcc

SEQ ID NO: 352221 - DNA, 75 bp, synthetic construct
  source 1..75: mol_type = other DNA
ttcaagcagcctggtcgatttcgggctgagttggaaaaagtgaagctgatgcagaaggagaaaggtcatgagtaa

SEQ ID NO: 352222 - DNA, 75 bp, synthetic construct
  source 1..75: mol_type = other DNA
aatcctggaacctggttatggaagccatcactaatccgccagcaccgaatgaccggctgaaacgagccgctaaac

SEQ ID NO: 352223 - DNA, 75 bp, synthetic construct
  source 1..75: mol_type = other DNA
gaccgtagtcagtattggtacgtcacttccagagattattgtttcacttgccgcgtcgctgcacgaacaacgaga

SEQ ID NO: 352224 - DNA, 75 bp, synthetic construct
  source 1..75: mol_type = other DNA
gaagggctaaaaccaattcttgccgagttcaaaccagacgtcgtgctggttcacggcgatactactacaacgctg

SEQ ID NO: 352225 - DNA, 75 bp, synthetic construct
  source 1..75: mol_type = other DNA
tattaccggcaataccgttatcgacgccttgctgtgggtgcgcgaccaggtgatgagcagcgatacgctgcgttc

SEQ ID NO: 352226 - DNA, 75 bp, synthetic construct
  source 1..75: mol_type = other DNA
aggaatggatacgagaacggctttccagcccagatcttgaggaggattctgaagaatggcagttacttgaaaagg

SEQ ID NO: 352227 - DNA, 75 bp, synthetic construct
  source 1..75: mol_type = other DNA
gcgtgacggcggattgcccgtcgcgttttttatggctcggcattgcgcttatcatcatgccagtggccacgcgga

SEQ ID NO: 352228 - DNA, 75 bp, synthetic construct
  source 1..75: mol_type = other DNA
gtatgcgggacagtggcgggatgcggaatcggggctgtgctataaccggttccggtactacgagccggaaaccgg

SEQ ID NO: 352229 - DNA, 75 bp, synthetic construct
  source 1..75: mol_type = other DNA
tggtgaccggtcacaggcgtgagagcttcggtcgtggctttgaagaaatctgccatgcactggcagacatcgcca

SEQ ID NO: 352230 - DNA, 75 bp, synthetic construct
  source 1..75: mol_type = other DNA
gatgcggattacgtctttgacgtacgtttcctgccgaacccgcactgggatcccaaactgcgtccgatgaccggt

SEQ ID NO: 352231 - DNA, 75 bp, synthetic construct
  source 1..75: mol_type = other DNA
atgacaaaaccgacaaatccggcatggcgtaacgatgacctggaaggtgccgtgattggcgcgttttttctgcgt

SEQ ID NO: 352232 - DNA, 75 bp, synthetic construct
  source 1..75: mol_type = other DNA
atgcgcaacaacgaaacaccacctgattaaacatccggaaacggcgctggtggtggttgattatctcgggctgat

SEQ ID NO: 352233 - DNA, 75 bp, synthetic construct
  source 1..75: mol_type = other DNA
aaacctgggtgaagtcttcactggagcactatgttgcagcgttgcggcgcaatgccgcattgcgcgatgcagaaa

SEQ ID NO: 352234 - DNA, 75 bp, synthetic construct
  source 1..75: mol_type = other DNA
atgaaacagaaaattacggattacctggacgaaatctacggtggaacatttaccgcaactcatttacagaaactt

SEQ ID NO: 352235 - DNA, 75 bp, synthetic construct
  source 1..75: mol_type = other DNA
catgtaaatattactaatctgcatggtcgggatctgattagggaaggtgcgaataagcaggtcatttcttcccaa

SEQ ID NO: 352236 - DNA, 75 bp, synthetic construct
  source 1..75: mol_type = other DNA
aaacccgctacggggcttgttgcctgaaagcgaaatattagagctggtcgaggcgttacagcaggaaggtgcatt

SEQ ID NO: 352237 - DNA, 75 bp, synthetic construct
  source 1..75: mol_type = other DNA
ccccatgaactcggacctgaaaaactccggggaaatagaggcggatgcagacatcattctgatgctttacaggga

SEQ ID NO: 352238 - DNA, 75 bp, synthetic construct
  source 1..75: mol_type = other DNA
acatcattctgatgctttacagggatgaagtgtacaacccggatacgcaggccaggggcatcgcagaaattaata

SEQ ID NO: 352239 - DNA, 75 bp, synthetic construct
  source 1..75: mol_type = other DNA
atttacgcgggaatttgcagacaggcacgtgtatccggcgtcattgaccccgtactgctgtgcaatgagatgccg

SEQ ID NO: 352240 - DNA, 75 bp, synthetic construct
  source 1..75: mol_type = other DNA
cggtctgattaaaacccgcagcacggggcgtcacgaccttgctgtgggggaaatctcaaagggacttaaaagcct

SEQ ID NO: 352241 - DNA, 75 bp, synthetic construct
  source 1..75: mol_type = other DNA
cgtgctgctgtgcaatgagatgccggaacttgccccggtgattaccgacaccgggcgcaaaacctgggtgaagtc

SEQ ID NO: 352242 - DNA, 75 bp, synthetic construct
  source 1..75: mol_type = other DNA
aaacctgggtgaagtcatctctggaacattatgttgcagcactgcgacgtaatgctgcactgcgtgatgcagaaa

SEQ ID NO: 352243 - DNA, 75 bp, synthetic construct
  source 1..75: mol_type = other DNA
aggcgctttgtgcgtgggcgcaaaacctgacactaccttccagcaacaccacctggtttaacttcctcgcctctc

SEQ ID NO: 352244 - DNA, 75 bp, synthetic construct
  source 1..75: mol_type = other DNA
cctgaagtgatggatattctggccacactaccggcggacgttttttctgtacgaccgtaccgggatatctacaca

SEQ ID NO: 352245 - DNA, 75 bp, synthetic construct
  source 1..75: mol_type = other DNA
tgaaggatgctcaaaacatgatggcctcattgtcgatggaaaaaggcgcaattcagccggtacatattgatgatg

SEQ ID NO: 352246 - DNA, 75 bp, synthetic construct
  source 1..75: mol_type = other DNA
cacaggttctttccaccccaatgcggcagccccagccgcgcagatacagcaatacacgtgccgacagcagtaaga

SEQ ID NO: 352247 - DNA, 75 bp, synthetic construct
  source 1..75: mol_type = other DNA
ttttatctaccagacgcgaagctatcttgagctatggttacctatgctggaaaccaacaaccgtagctacctgac

SEQ ID NO: 352248 - DNA, 75 bp, synthetic construct
  source 1..75: mol_type = other DNA
ggtcgccattggttgtaccggcgggaagcaccgttcggtgtatattgcagagcaactggcagactacttccgctc

SEQ ID NO: 352249 - DNA, 75 bp, synthetic construct
  source 1..75: mol_type = other DNA
tccgaaactgcgtccaatgacaggtcttgataaacctgtcgccgcgttcctcgaccgccacacagaagtacacaa

SEQ ID NO: 352250 - DNA, 75 bp, synthetic construct
  source 1..75: mol_type = other DNA
gtcgaaaaacttggatataatcgtgcgattaaccgtaaaaaatactctagtaaagagataacgacagaactgaac

SEQ ID NO: 352251 - DNA, 75 bp, synthetic construct
  source 1..75: mol_type = other DNA
atgtcacctatatggatgcgttgagccgccgtgagtgtagcgacgaagaacggtgtgccagcgatatatattcaa

SEQ ID NO: 352252 - DNA, 75 bp, synthetic construct
  source 1..75: mol_type = other DNA
gaaagcgagatattagcgctagtcgaggcgttacagcaggaaggggcattagtaaactggaaaaataatcccgat

SEQ ID NO: 352253 - DNA, 75 bp, synthetic construct
  source 1..75: mol_type = other DNA
ggcgcgtttcattaagggtgtggagctgatgaccggacgcaatatctggatggtggaccaggcgaacctgaccat

SEQ ID NO: 352254 - DNA, 75 bp, synthetic construct
  source 1..75: mol_type = other DNA
taccatcgatacggttaattcatccgtaatgtgtattcaaagaagcaacgcggatggtaattgtctgacaggatt

SEQ ID NO: 352255 - DNA, 75 bp, synthetic construct
  source 1..75: mol_type = other DNA
aactcgggcgcggcgatgtgcttccccatgacatggtcgaatcttccgctgctgcatggcgggatgaaatgagca

SEQ ID NO: 352256 - DNA, 75 bp, synthetic construct
  source 1..75: mol_type = other DNA
ctactgcggcactagggatattaccttcggttataggtcagtttcatcagcaacaaaaagagacgaccttgcaag

SEQ ID NO: 352257 - DNA, 75 bp, synthetic construct
  source 1..75: mol_type = other DNA
aactcgagcgcggcgatgtgcttccccatgacatggtcgagtcttctgctgcagcatggcgggatgaaatgagca

SEQ ID NO: 352258 - DNA, 75 bp, synthetic construct
  source 1..75: mol_type = other DNA
gcacgcttcctgaaagacaaagccgggaccgacacccgtttcgcggcggaaattgtcgatatcagccgtggcggc

SEQ ID NO: 352259 - DNA, 75 bp, synthetic construct
  source 1..75: mol_type = other DNA
aactcgaacgcggcgatgtgcttccccatgacatggtcgaatcttccgctgctgcatggcgggatgaaatgagca

SEQ ID NO: 352260 - DNA, 75 bp, synthetic construct
  source 1..75: mol_type = other DNA
aactcgggcgcggtgatgtgcttccccatgacatggtcgaatcctctgcgactgcatggcgggatgaaatgagca

SEQ ID NO: 352261 - DNA, 75 bp, synthetic construct
  source 1..75: mol_type = other DNA
ggtgcctcggagaattcaacccgctggggtgtggacaagccgctgtataaggaccttatcggtcgaacaaaagca

SEQ ID NO: 352262 - DNA, 75 bp, synthetic construct
  source 1..75: mol_type = other DNA
gacctgaatgtgatgtaccacaatgcgaaagtggcgacaaacaacctgaaactgggaagctttggcgcatttgat

SEQ ID NO: 352263 - DNA, 75 bp, synthetic construct
  source 1..75: mol_type = other DNA
ctaaacgcgggggcatcatcgacagtatcagaggtgcgtccgtcatcgccttccggtgcagaagtcacaggcgtc

SEQ ID NO: 352264 - DNA, 75 bp, synthetic construct
  source 1..75: mol_type = other DNA
acggcagcataatacctggttccgtgaccaggttgaggcaggacgtcagcaactcgagcacggcgatgtacttcc

SEQ ID NO: 352265 - DNA, 75 bp, synthetic construct
  source 1..75: mol_type = other DNA
aactcgagctcggtgatatgcttccccatgacatggtcgaatcctctgctgctccatggcgggatgaaatgagca

SEQ ID NO: 352266 - DNA, 75 bp, synthetic construct
  source 1..75: mol_type = other DNA
cagacatgtgttttcaggccctaacgaggccatcgacctggcagtggtcggcattgtcgatacgctttcgcgcta

SEQ ID NO: 352267 - DNA, 75 bp, synthetic construct
  source 1..75: mol_type = other DNA
caggcgactaatctggattttccgcgtatttatttgtttcgcccaatcccagcgattaatgcaaaactcactgtg

SEQ ID NO: 352268 - DNA, 75 bp, synthetic construct
  source 1..75: mol_type = other DNA
ggcgatcaacgtgaagccctgtttaacgctattgccgcctacgccagtaatattgaaaacctgcctgcgctgctg

SEQ ID NO: 352269 - DNA, 75 bp, synthetic construct
  source 1..75: mol_type = other DNA
ctcataacccagaactcaaagaaatttttaacatgagtaaccagcgtaatggcgatcaacgtgaagccctgttta

SEQ ID NO: 352270 - DNA, 75 bp, synthetic construct
  source 1..75: mol_type = other DNA
atccgggacaatacgtattactactgtagaacatgcagcaaaaacgatattgttaccagccatgcgcacattcct

SEQ ID NO: 352271 - DNA, 75 bp, synthetic construct
  source 1..75: mol_type = other DNA
ggtacagcaaatcgctggagattaatacgcggtggacgtgaagttctgatgaatcccctaatgattttggtaaaa

SEQ ID NO: 352272 - DNA, 75 bp, synthetic construct
  source 1..75: mol_type = other DNA
cgccagcaaagccggtggctgggaaggtactcgcgatttccgcattgtggctaaaacaccgcgcagcgcgcttat

SEQ ID NO: 352273 - DNA, 75 bp, synthetic construct
  source 1..75: mol_type = other DNA
cgtgaagctggtggctccggcgggtgatttctttatggatgtgacaaacgacacaccggtaaccttaatctctgc

SEQ ID NO: 352274 - DNA, 75 bp, synthetic construct
  source 1..75: mol_type = other DNA
aggatcaactgtacctaaatatttcgattccctggggaactagtagaacattgagctatggtatgcaacgaaatc

SEQ ID NO: 352275 - DNA, 75 bp, synthetic construct
  source 1..75: mol_type = other DNA
cgaataaactgggaagaagacaaccaggatcaactgtacctaaatatttcgattccctggggaaccagtagaaca

SEQ ID NO: 352276 - DNA, 75 bp, synthetic construct
  source 1..75: mol_type = other DNA
ctaactggatttgcccctatatttccagacacctgttatcacttaacccattactggcttgctgccgtagatatt

SEQ ID NO: 352277 - DNA, 75 bp, synthetic construct
  source 1..75: mol_type = other DNA
atgtgcagctccttatcgattacgggctgactgatgtcgtctctgagcgctttgatgccggagttcgcctggggg

SEQ ID NO: 352278 - DNA, 75 bp, synthetic construct
  source 1..75: mol_type = other DNA
cagcaaagctcaggcacccgaagcacgcacctggttgcttcagaacaaagcggaattcatcgctcttatgctggg

SEQ ID NO: 352279 - DNA, 75 bp, synthetic construct
  source 1..75: mol_type = other DNA
agcagggggcagggaacgcctattatgcggggatgcagtggcgcggtattacactcggacacgccgatgctgcag

SEQ ID NO: 352280 - DNA, 75 bp, synthetic construct
  source 1..75: mol_type = other DNA
atggcatttaaacactacgatgtggtcagggcggcatcgccgtcagaccttgctgaacgaataactcaaaaactg

SEQ ID NO: 352281 - DNA, 75 bp, synthetic construct
  source 1..75: mol_type = other DNA
atacggttcatggatgataattgataaattaatttttggtaataatgtacctggatacccttcaattcttgtatc

SEQ ID NO: 352282 - DNA, 75 bp, synthetic construct
  source 1..75: mol_type = other DNA
ttaattgggattggagtgctaggtgagtacatagggcgtatctacgttgaggttaagcagcgtccaaagtatata

SEQ ID NO: 352283 - DNA, 75 bp, synthetic construct
  source 1..75: mol_type = other DNA
ggaagcacaaagttcaatggatggaagctatggaacttggcgctggaagggatcactagcttctcaacattcccg

SEQ ID NO: 352284 - DNA, 75 bp, synthetic construct
  source 1..75: mol_type = other DNA
cagcgtcgtcacgccaacctggaaccgcggcgcattcctgccgtacctgctttatatgtaccgctatcaggatta

SEQ ID NO: 352285 - DNA, 75 bp, synthetic construct
  source 1..75: mol_type = other DNA
tattctgttccttggtggcattcagttgataggtattggcgtacttggtgaatacattggcaggatatatgtcga

SEQ ID NO: 352286 - DNA, 75 bp, synthetic construct
  source 1..75: mol_type = other DNA
gtcattcctcatctgattgagaaatggcagggcggagcagatatggtcctggctaagcgatctgaccgctcaact

SEQ ID NO: 352287 - DNA, 75 bp, synthetic construct
  source 1..75: mol_type = other DNA
taagccgctgtaccaggatctgttaagtcgcacgaaagtcgcgctggctaaaaatcccggaaatatcctgctggc

SEQ ID NO: 352288 - DNA, 75 bp, synthetic construct
  source 1..75: mol_type = other DNA
cctgtggaggatgctgcgttatcacaggatgcacctcagagaagaacggttgttgagtataattcagctgttgag

SEQ ID NO: 352289 - DNA, 75 bp, synthetic construct
  source 1..75: mol_type = other DNA
aaagaaaaatatgctgcgtcttatgaaactgtatacggtggatataaaaataaggcagcgcagaatattcacttt

SEQ ID NO: 352290 - DNA, 75 bp, synthetic construct
  source 1..75: mol_type = other DNA
gttattcctcacttgatagagaaatggcaggccggtgcagatatggttctggctaaacgctctgaccgctccact

SEQ ID NO: 352291 - DNA, 75 bp, synthetic construct
  source 1..75: mol_type = other DNA
cgcttgtggtttcgctgtcgttcacacgtaacttcggcaaagaacccgccctgttcgcaggtctggaccatgcta

SEQ ID NO: 352292 - DNA, 75 bp, synthetic construct
  source 1..75: mol_type = other DNA
tttatgaagggtgtgctgagctgggttggtggtcgaaccgaagtcgtagaatatgcgcgagcagaacgcgttgca

SEQ ID NO: 352293 - DNA, 75 bp, synthetic construct
  source 1..75: mol_type = other DNA
cgtttctggatgaaatgctggcgacgctaaaaagcatcgacgatccgcagctcaaaggaatgcgcttatctgaaa

SEQ ID NO: 352294 - DNA, 75 bp, synthetic construct
  source 1..75: mol_type = other DNA
ttcatgaagggtgtacttagttgggttggcggtcgtacagatgtcgttgaatatgcccgtgcagaacgcgttgca

SEQ ID NO: 352295 - DNA, 75 bp, synthetic construct
  source 1..75: mol_type = other DNA
aattacgagcttctcgacttttccgctacgtatgtggacttacatcggccttctcgtcgctggcttagcatttac

SEQ ID NO: 352296 - DNA, 75 bp, synthetic construct
  source 1..75: mol_type = other DNA
ctcattggtattggtgttcttggtgagtacattggacgaatttatattgaaacaaagcaaagacccaaatatata

SEQ ID NO: 352297 - DNA, 75 bp, synthetic construct
  source 1..75: mol_type = other DNA
ggtttcctctctgccgcagggtgtcaccctgacaggggatgcagggaataatctgctggcatcgttttacatcca

SEQ ID NO: 352298 - DNA, 75 bp, synthetic construct
  source 1..75: mol_type = other DNA
atcgccttccggtgcagaagccacaggcgtcacaacactgctctcttaccttgccagcgagtcagagggaagcct

SEQ ID NO: 352299 - DNA, 75 bp, synthetic construct
  source 1..75: mol_type = other DNA
tccctggatctgtggagatacgacgtatttctggaagcagaagaacgaatcctcgtaccagacggtgtacggcag

SEQ ID NO: 352300 - DNA, 75 bp, synthetic construct
  source 1..75: mol_type = other DNA
tttatgaaggggatactatcctgggtaggtggtaagacagatgtggttgaatacgttagagccgaaagagccgca

SEQ ID NO: 352301 - DNA, 75 bp, synthetic construct
  source 1..75: mol_type = other DNA
accgcccaatcatcactgccctacaggcgcaaggacaaagctgcacgctggtgatcaacgaccgcgtgtttaaac

SEQ ID NO: 352302 - DNA, 75 bp, synthetic construct
  source 1..75: mol_type = other DNA
tctggataaacgcccggatcgcttacagcagatccgtgaagaactcacattgctgcatattcctcctgagaagat

SEQ ID NO: 352303 - DNA, 75 bp, synthetic construct
  source 1..75: mol_type = other DNA
tttatgaagggcgtgctgagctgggttggcggacgcactgatgtcgttgaatatgcacgtgcagaacgagtcgca

SEQ ID NO: 352304 - DNA, 75 bp, synthetic construct
  source 1..75: mol_type = other DNA
gttattccccacctcatcgaaaagtggcaggcaggctctgatatggtgctggctaagcgaactgatcgctcaact

SEQ ID NO: 352305 - DNA, 75 bp, synthetic construct
  source 1..75: mol_type = other DNA
atatggcgcatggatgattctggacactctggcgtttggaaacccggttagaggttatccatccctgctggtatc

SEQ ID NO: 352306 - DNA, 75 bp, synthetic construct
  source 1..75: mol_type = other DNA
gcaattgttgaagtgctgtcgcccggtcaacacccgactaaacgcgtattaatttacgccgcgacgccagccagt

SEQ ID NO: 352307 - DNA, 75 bp, synthetic construct
  source 1..75: mol_type = other DNA
gcaattgttgaagtgctgtcgcccggtcaacacccgactaaacgcgaattaatttacgccgcgacgccagccagg

SEQ ID NO: 352308 - DNA, 75 bp, synthetic construct
  source 1..75: mol_type = other DNA
tctcaatatgggaaaaaccgaccgcagcgccaacccttcgccgggcaacgagaacggcggtctcgcaaacgtggt

SEQ ID NO: 352309 - DNA, 75 bp, synthetic construct
  source 1..75: mol_type = other DNA
gcaattgttgaagtgctgtcgcccggtcaactcccgactaaacgcggattaatttacgccgcgacgccagccagt

SEQ ID NO: 352310 - DNA, 75 bp, synthetic construct
  source 1..75: mol_type = other DNA
gcaattgttgaagtgctgtcgcccggtcaactcccgactaaacgcgtattaatttacgccgcgacgccagccagg

SEQ ID NO: 352311 - DNA, 75 bp, synthetic construct
  source 1..75: mol_type = other DNA
gcaattgttgaagtgctgtcgcccggtcaacacccgactaaacgcggattaatttacgccgcgacgccagccaga

SEQ ID NO: 352312 - DNA, 75 bp, synthetic construct
  source 1..75: mol_type = other DNA
tttgcaggatgaaaagcatgtcggttttcagtccatggtcgaggatattttgcaggtcgccgaacgccatttgca

SEQ ID NO: 352313 - DNA, 75 bp, synthetic construct
  source 1..75: mol_type = other DNA
ccggcggttggctatgcgtctgatctactggtgcgctgcggcgcaacggtgatgttctcagaaggcactcggctc

SEQ ID NO: 352314 - DNA, 75 bp, synthetic construct
  source 1..75: mol_type = other DNA
agcgcggggcaggtatccccgtctctctcccctgatgggcacgacaacacaacatcatcccgttcaccccgaaaa

SEQ ID NO: 352315 - DNA, 75 bp, synthetic construct
  source 1..75: mol_type = other DNA
tctcaatatgggaaaaaccgaccgcagcgccaacccttcgccgggcaacgacaatggcggactcgcaaacgtggt

SEQ ID NO: 352316 - DNA, 75 bp, synthetic construct
  source 1..75: mol_type = other DNA
tctcaatatgggaaaaaccgaccgcagcgccaacccttcgccgggcaacgataagggcggcctcgcaaacgtggt

SEQ ID NO: 352317 - DNA, 75 bp, synthetic construct
  source 1..75: mol_type = other DNA
tctcaatatgggaaaaaccgaccgcagcgccaacccttcgccgggcaacgaaaatggcggcctcgcaaacgtggt

SEQ ID NO: 352318 - DNA, 75 bp, synthetic construct
  source 1..75: mol_type = other DNA
gcaattgttgaagtgctgtcgcccggtcaacccccgactaaacgcgcattaatttacgccgcgacgccagccagg

SEQ ID NO: 352319 - DNA, 75 bp, synthetic construct
  source 1..75: mol_type = other DNA
gcatggtacaagctggatacacaggccaaagataaaagatggacagcgttagctgcattccctggcggaccgaga

SEQ ID NO: 352320 - DNA, 75 bp, synthetic construct
  source 1..75: mol_type = other DNA
cggaccgtggaaaccggcagcttcaactacaccgcctctgccgacaaacgaaacgcagaaaacgtcattgtcctt

SEQ ID NO: 352321 - DNA, 75 bp, synthetic construct
  source 1..75: mol_type = other DNA
ctcaaaaattgagagtaattcgaaaatcagagaaccttacccaagcaaaatttgcagaaatcaccggtatatcgc

SEQ ID NO: 352322 - DNA, 75 bp, synthetic construct
  source 1..75: mol_type = other DNA
cggtgaaactgcaggcggcaaagcggtgacggattcagttttgatctctgtgaaggataacaaagttactgtgca

SEQ ID NO: 352323 - DNA, 75 bp, synthetic construct
  source 1..75: mol_type = other DNA
taaatcgggtgaattatcgcaaggtcgggcctacggagtatcattgccctggaataatagtttattaattattgg

SEQ ID NO: 352324 - DNA, 75 bp, synthetic construct
  source 1..75: mol_type = other DNA
ctggttcgccggatcagtgctgacggcgaactgcctctcacgccattaaccggcgacgaagttgccgttgattca

SEQ ID NO: 352325 - DNA, 75 bp, synthetic construct
  source 1..75: mol_type = other DNA
caacaggtaccaccaaacatggcgctaacatcagtgtctttgatactgacaatgtttattatgtctccgataata

SEQ ID NO: 352326 - DNA, 75 bp, synthetic construct
  source 1..75: mol_type = other DNA
cgtgacgcgatccatctgctgacaccacgcgcagtgaacgaagaggtcggcaaacggctgctggaggagatggag

SEQ ID NO: 352327 - DNA, 75 bp, synthetic construct
  source 1..75: mol_type = other DNA
gcaattgttgaagtgctgtcgcccggtcaacgcccgactaaacgcggattaatttacgccgcgacgccagccagg

SEQ ID NO: 352328 - DNA, 75 bp, synthetic construct
  source 1..75: mol_type = other DNA
aggcagcaattctttgaattaactggaatacctgctggcacgcagaagtattacgagacaggaagagtggagagt

SEQ ID NO: 352329 - DNA, 75 bp, synthetic construct
  source 1..75: mol_type = other DNA
ctatattaaaaaaagactctctgtttatactgttacctgctttcactatggggcagcttgaagccgcattcaaaa

SEQ ID NO: 352330 - DNA, 75 bp, synthetic construct
  source 1..75: mol_type = other DNA
cacagccaatatttttaattattgtattttttcttttatcattactgcctatatttgttgttattggtacttcat

SEQ ID NO: 352331 - DNA, 75 bp, synthetic construct
  source 1..75: mol_type = other DNA
ctcagaaattgcgacaaatcaggaaggctgaagggctaacgcaatcatccttctcggagatgattggcattgctt

SEQ ID NO: 352332 - DNA, 75 bp, synthetic construct
  source 1..75: mol_type = other DNA
agcgcattttgtgttacagccactacagccagcaggcgctggaacatttcggcagcgcaaaagtggtcggcaacc

SEQ ID NO: 352333 - DNA, 75 bp, synthetic construct
  source 1..75: mol_type = other DNA
agattcgtcatcactattgcgatgcgtttatggatggcaaggcgggagaacgggcggcgatggtgattgtggagg

SEQ ID NO: 352334 - DNA, 75 bp, synthetic construct
  source 1..75: mol_type = other DNA
ggtgagaaaagttattccacggcagagagcgccgaccagcgaatccgcgaaatattgccggttgctcatgatgtt

SEQ ID NO: 352335 - DNA, 75 bp, synthetic construct
  source 1..75: mol_type = other DNA
aagttacccgtaaccaccaagccatccgcgttacccatcgccgacaccatcggcttttttatggaaacctcattc

SEQ ID NO: 352336 - DNA, 75 bp, synthetic construct
  source 1..75: mol_type = other DNA
cgcgcttcgacgcctggcataacgccacgttcgaccgcgcgttgccggaaaatatcaaactggacgagcgtaaac

SEQ ID NO: 352337 - DNA, 75 bp, synthetic construct
  source 1..75: mol_type = other DNA
agctggcggaaattcgccatcattattgcgatgcgtttatggatggcaaagcgggagaacgggcggcgatggtga

SEQ ID NO: 352338 - DNA, 75 bp, synthetic construct
  source 1..75: mol_type = other DNA
atatcgtccgcgatccgctgctacgcaacgcttatctgagtctgcataacgccactcatcaacaggcaatcaacc

SEQ ID NO: 352339 - DNA, 75 bp, synthetic construct
  source 1..75: mol_type = other DNA
cctggaatacataagtcttaaaaagggtgaggctattgagcatgtattgaacggcgataagtggttgcatgctgc

SEQ ID NO: 352340 - DNA, 75 bp, synthetic construct
  source 1..75: mol_type = other DNA
gcttacttctgttttctgctcaggtaaatagcgccgtgaccccgcaaggaagccgctacgacagcagaatgcaaa

SEQ ID NO: 352341 - DNA, 75 bp, synthetic construct
  source 1..75: mol_type = other DNA
cacacgcctgcgctcaatggcctggcggcggtgaacatccgcgctatgtacggcttagccaaagagacgtggaac

SEQ ID NO: 352342 - DNA, 75 bp, synthetic construct
  source 1..75: mol_type = other DNA
cacgccgactggaatcgtttttatcagcgcattttgtgttacagccactacagccagcaggcgctggcgcatttc

SEQ ID NO: 352343 - DNA, 75 bp, synthetic construct
  source 1..75: mol_type = other DNA
taaaatctcttacaccatcgccatgatgcaaaaacaccgggcgctcatctccggctccgatcagatccccatctg

SEQ ID NO: 352344 - DNA, 75 bp, synthetic construct
  source 1..75: mol_type = other DNA
tctggtgaacagccggtactacccacaactggcgcagcagatgagtaacgatgagcactcgctggaagacggctg

SEQ ID NO: 352345 - DNA, 75 bp, synthetic construct
  source 1..75: mol_type = other DNA
attgatgtcattctttttttcaaccataccagaatgactgaactgtattacgaacccgaagaaaaaaatcgcttt

SEQ ID NO: 352346 - DNA, 75 bp, synthetic construct
  source 1..75: mol_type = other DNA
gcggtggctgaaatggcacgagctggaaagctgccagcattctatatgacagacccgttaaagccgggcggtcat

SEQ ID NO: 352347 - DNA, 75 bp, synthetic construct
  source 1..75: mol_type = other DNA
gtgtgtttatcctgtccattgcttatactgcagataaatatggctgccatttagttatcacgtattggcgcttat

SEQ ID NO: 352348 - DNA, 75 bp, synthetic construct
  source 1..75: mol_type = other DNA
aacgtatacgaaagtgtaatacgcgccgtccatgacagccgtagcaggcttatcgatcagcatacagtcgatatg

SEQ ID NO: 352349 - DNA, 75 bp, synthetic construct
  source 1..75: mol_type = other DNA
tacttcgcacgctgattgatcaacataatctgacctatgcggatttgaagaacgaaatcggctctaaatccctgg

SEQ ID NO: 352350 - DNA, 75 bp, synthetic construct
  source 1..75: mol_type = other DNA
aggctcaataagtacgatccatgctaacaatacttatgcgtcgttctcgcggctggcgagcattgttaaacaatc

SEQ ID NO: 352351 - DNA, 75 bp, synthetic construct
  source 1..75: mol_type = other DNA
cacacgcctgcgctcaatggcctttcacccgtgaacatccgcgccatgtacggcttagctaaagagacgtggaac

SEQ ID NO: 352352 - DNA, 75 bp, synthetic construct
  source 1..75: mol_type = other DNA
tatccacgttgataagcgggtgatcctgctcgactttccgggcatgacggaactgctcgacggtgagaaaagtta

SEQ ID NO: 352353 - DNA, 75 bp, synthetic construct
  source 1..75: mol_type = other DNA
tgaacctgatttgcaaactgcaccacggtacctgctcgcgcccggaagaagccgcatcgctgaccctggcacgca

SEQ ID NO: 352354 - DNA, 75 bp, synthetic construct
  source 1..75: mol_type = other DNA
agcgacacattgcgcgagcgtttatataccgcaaaagccgatcttggcgataacgccgccgttccggttaagctg

SEQ ID NO: 352355 - DNA, 75 bp, synthetic construct
  source 1..75: mol_type = other DNA
gcaggtgatgatcctcggcggcgaaatttcgcagggaacgatgctaaaaagtttgccggggctggtgcacgcgcg

SEQ ID NO: 352356 - DNA, 75 bp, synthetic construct
  source 1..75: mol_type = other DNA
ctacggtgctctacgcccccacgtttggcgcattaagctccctgccccactgggcagaaaaattgggccgcttaa

SEQ ID NO: 352357 - DNA, 75 bp, synthetic construct
  source 1..75: mol_type = other DNA
catgagccgtcttaaccatccgaaagcagatgttgccaaaggacaatacggcactgttggtcaggggctgcatat

SEQ ID NO: 352358 - DNA, 75 bp, synthetic construct
  source 1..75: mol_type = other DNA
cgaatgaaaaacaggaaggtcgtcggggaaaaagtccaggatattgccgatgacctgaacgtatctatcagcaga

SEQ ID NO: 352359 - DNA, 75 bp, synthetic construct
  source 1..75: mol_type = other DNA
atcgcgcatttgaagtgctgccgactatggtaatgactccgtatgctgcgttccagaaagagctgcacggtatga

SEQ ID NO: 352360 - DNA, 75 bp, synthetic construct
  source 1..75: mol_type = other DNA
gctgaatctgcaaaacgcctggagtctggcagaggctgaaaaaacggtggatgtgtcgcgattacgccgtctggt

SEQ ID NO: 352361 - DNA, 75 bp, synthetic construct
  source 1..75: mol_type = other DNA
ggagtggctggcccggcattccaggtcataaaagacagtctgacagtggggctgaatgcgctgacgctgacggat

SEQ ID NO: 352362 - DNA, 75 bp, synthetic construct
  source 1..75: mol_type = other DNA
gctgcatatcgccaaaaaactgctgccgtttataccggcgaatgcgggcattttgctggttccgtgctgccgtgg

SEQ ID NO: 352363 - DNA, 75 bp, synthetic construct
  source 1..75: mol_type = other DNA
ccgtttataccggcgaatgcgggcattctgctggttccgtgctgccgtggtgcttcggcattcacaacgggtgca

SEQ ID NO: 352364 - DNA, 75 bp, synthetic construct
  source 1..75: mol_type = other DNA
tcagggcggcatcgccgtcagaccttgcggatgcgcttgctcaaaaaattcgtgaaggatggcagccatacggcg

SEQ ID NO: 352365 - DNA, 75 bp, synthetic construct
  source 1..75: mol_type = other DNA
ccggcgaatgcgggcattcttcttgttccgtgctgccgtggtggttcagctttcaccaccggaactgatggcaca

SEQ ID NO: 352366 - DNA, 75 bp, synthetic construct
  source 1..75: mol_type = other DNA
gcgaagctggatacgttcggggtctttgataacggatggcacacactggcttttgagtttgccggaaacaacagc

SEQ ID NO: 352367 - DNA, 75 bp, synthetic construct
  source 1..75: mol_type = other DNA
ctgcaactgaccgacatatcaaaagcagcgacgtatcaggtgctgattgacagtgtgaaggtggaagtgaacaac

SEQ ID NO: 352368 - DNA, 75 bp, synthetic construct
  source 1..75: mol_type = other DNA
tgcttcggcattcacaacgggtgcagacggcacatacagcgaatcagccggtgcatcggaaaattcactgcgctg

SEQ ID NO: 352369 - DNA, 75 bp, synthetic construct
  source 1..75: mol_type = other DNA
cattcgaaacgcgtgaagaggttctggcatatcataagcgggaaaaaataccctgtctggagtgtggcaagttgc

SEQ ID NO: 352370 - DNA, 75 bp, synthetic construct
  source 1..75: mol_type = other DNA
aaagagggctggcagccgtttggtagtcctgtggccataaccccttataccctgatgcaggcgattgccgcggag

SEQ ID NO: 352371 - DNA, 75 bp, synthetic construct
  source 1..75: mol_type = other DNA
gatgttgtttaccattacaacagtaatcaactgaaagatattggtacatttgatgcgtttgatcatgactggcat

SEQ ID NO: 352372 - DNA, 75 bp, synthetic construct
  source 1..75: mol_type = other DNA
ccatgcagggcgcacggctgaactgctgggcgggcaggccgtgacaccaccggatgagaagccatcacctgacac

SEQ ID NO: 352373 - DNA, 75 bp, synthetic construct
  source 1..75: mol_type = other DNA
atgacatttaaacattacgatgtggtcagggcggcgtcgccgtcagaccttgctgatgcacttgctcaaaaaatt

SEQ ID NO: 352374 - DNA, 75 bp, synthetic construct
  source 1..75: mol_type = other DNA
ggaagaagacccggacattccgggtatcgggtattacggttcgaaatggcgtgacagctcagccccctggacgtc

SEQ ID NO: 352375 - DNA, 75 bp, synthetic construct
  source 1..75: mol_type = other DNA
agtacggtgacaccgggcggtgcagcatgcaaatataacgacatcattccggcggaccattgtctgcatgatgtg

SEQ ID NO: 352376 - DNA, 75 bp, synthetic construct
  source 1..75: mol_type = other DNA
tgctggacaggctggaaggggaaatccgggcagaccgcgtgagcagtgagagccgggcgtggctggcgcagtgcg

SEQ ID NO: 352377 - DNA, 75 bp, synthetic construct
  source 1..75: mol_type = other DNA
tcaccagattttttctgtgctcaggcaataaagtcactcgcaaaagttcttcctagatggaacagcgagataaat

SEQ ID NO: 352378 - DNA, 75 bp, synthetic construct
  source 1..75: mol_type = other DNA
ccccatttatcgtataactgaagaggggtgtatttgcgttcttggtactctcattccggtgaggccagaaggcta

SEQ ID NO: 352379 - DNA, 75 bp, synthetic construct
  source 1..75: mol_type = other DNA
gaatattactttgttgttgttctggcggggcagtcaaatggcatggcctatggtgaagggcttccgttaccggat

SEQ ID NO: 352380 - DNA, 75 bp, synthetic construct
  source 1..75: mol_type = other DNA
ccggtcagtaaccgaaccctgatgagtttgctggcgtcaggcgaagacctggcatcacagggctggcgctattat

SEQ ID NO: 352381 - DNA, 75 bp, synthetic construct
  source 1..75: mol_type = other DNA
accgtctggcctcagctattatgctccatgcagggcgcacggctgaattgatgcgcgggcagaccgtgacaccac

SEQ ID NO: 352382 - DNA, 75 bp, synthetic construct
  source 1..75: mol_type = other DNA
ctcgtcagatggtcgaacagcagtcaggcgtcattattaatatgacatctgaagcaggtgttcagggatcgcgtg

SEQ ID NO: 352383 - DNA, 75 bp, synthetic construct
  source 1..75: mol_type = other DNA
ccatttttgttattggatttccattaactctgactgtcggtatctctttaatggcggcattaatgccgttaattg

SEQ ID NO: 352384 - DNA, 75 bp, synthetic construct
  source 1..75: mol_type = other DNA
actttcgctattgccccggcattaccagccaacgatgttcccgttttttcgttccatgccctgtggctagcggtg

SEQ ID NO: 352385 - DNA, 75 bp, synthetic construct
  source 1..75: mol_type = other DNA
ctcatttctaccgcgccaattctgagcgaacgcagcgtgccgaaacgggtaaaactgggtctggcaatgatgatc

SEQ ID NO: 352386 - DNA, 75 bp, synthetic construct
  source 1..75: mol_type = other DNA
ggatcgcaagtttcctgttctccctgattatcggggttaccgctgacaaaatcggctttaccccctgtttatcgc

SEQ ID NO: 352387 - DNA, 75 bp, synthetic construct
  source 1..75: mol_type = other DNA
ggatcgcaagtttcctgttctccctgattatcggggttaccgctgacaaaatcggctttaaccccctgtttatcg

SEQ ID NO: 352388 - DNA, 75 bp, synthetic construct
  source 1..75: mol_type = other DNA
aaaagcagcctagggattaccaccgaacaatattcctggattgtaggtgctttccagctcgcctataccctattc

SEQ ID NO: 352389 - DNA, 75 bp, synthetic construct
  source 1..75: mol_type = other DNA
cgcttcaacgagcagacagcagccaaagcaggtattgcagccagcgacggtgatgtttcctacaacgtaggtgtg

SEQ ID NO: 352390 - DNA, 75 bp, synthetic construct
  source 1..75: mol_type = other DNA
tgttgtggctgaagttgttgaggataccaccgttcgtgtggcagaagacggttccctgaccacagcccgtaacac

SEQ ID NO: 352391 - DNA, 75 bp, synthetic construct
  source 1..75: mol_type = other DNA
atgtatcaagtagaattacatcagagacagcacaaaattatattaatatagttaaaaacagtggtggggatactg

SEQ ID NO: 352392 - DNA, 75 bp, synthetic construct
  source 1..75: mol_type = other DNA
gctgaatctgcaaaatgcctggagtctggcagaggctgaaaaaacggtggatgtgtcgcgactgcgccgtctggt

SEQ ID NO: 352393 - DNA, 75 bp, synthetic construct
  source 1..75: mol_type = other DNA
tgcgcgaaggacttgaagccgcgctgattgtcagtttgattgccagctatcttagcgtacccagcgaggccgatg

SEQ ID NO: 352394 - DNA, 75 bp, synthetic construct
  source 1..75: mol_type = other DNA
ttcgtgtgaatgatgctgttgtcagcctcgacaacagaacccgcagtaacacccaggctatccagaatcactccc

SEQ ID NO: 352395 - DNA, 75 bp, synthetic construct
  source 1..75: mol_type = other DNA
cgggaaactgggtacatctggcgctgttgcgcttctttatgggcggtgcggaagccgcggcaaccccagcaaacg

SEQ ID NO: 352396 - DNA, 75 bp, synthetic construct
  source 1..75: mol_type = other DNA
gtaccgcgatgaagctgagcaaggagacaggagtggggtcatggtatctggagcatgatgccggtactggcgctg

SEQ ID NO: 352397 - DNA, 75 bp, synthetic construct
  source 1..75: mol_type = other DNA
ggcgctgaagctgacaaaacagaccggaaagtcatggtttatgcagcatgatgccggtaatggtgctgacctgct

SEQ ID NO: 352398 - DNA, 75 bp, synthetic construct
  source 1..75: mol_type = other DNA
gaaccctgatgagtctgctggcgtccggtgaagacctggcatcacagggctggcgctattatcacaaaccggcga

SEQ ID NO: 352399 - DNA, 75 bp, synthetic construct
  source 1..75: mol_type = other DNA
tgtcgtccctgccggagggagtgacgctgtcagaggaaggcaacgacatgctgatgtccttcttcctgcagacgg

SEQ ID NO: 352400 - DNA, 75 bp, synthetic construct
  source 1..75: mol_type = other DNA
gaggcagcgcatcagcggtaccgtggatttgcggggacacaacgtatttctggaagcagcgtcatgcggaagggt

SEQ ID NO: 352401 - DNA, 75 bp, synthetic construct
  source 1..75: mol_type = other DNA
gttcaccaccggagctgatggcacatacagtgacgctggcggtgcctcggagaattcagcgcgctggggtgtgga

SEQ ID NO: 352402 - DNA, 75 bp, synthetic construct
  source 1..75: mol_type = other DNA
cacacagataaccgacgatggtgatctacaggtgaacgggtatgctgaaaacacctatgtggatagtggcggaca

SEQ ID NO: 352403 - DNA, 75 bp, synthetic construct
  source 1..75: mol_type = other DNA
cacttctggcaagctgaccgtctgggatggtgctcatgctggcgcggcaatgggcatcctggctgtaaccgcaga

SEQ ID NO: 352404 - DNA, 75 bp, synthetic construct
  source 1..75: mol_type = other DNA
gtgaataccattcatgccgatggggtgtttgttctgcggagcctggaaactgttggctgggaggttgagtggcca

SEQ ID NO: 352405 - DNA, 75 bp, synthetic construct
  source 1..75: mol_type = other DNA
gatacattcggggtctttgataacggatggcacacgctggcttttgagtttgccggaaacaacagcattcaggtg

SEQ ID NO: 352406 - DNA, 75 bp, synthetic construct
  source 1..75: mol_type = other DNA
ggcgattcttgttcatgccgggagaacagctgaattcattaccggaaaacagcctgatacagtgaaaccgggtaa

SEQ ID NO: 352407 - DNA, 75 bp, synthetic construct
  source 1..75: mol_type = other DNA
ggtactcaacgaaggcgcaaaaacatccggcctgaccttagcgctggatggcgtactatccctgcaaaacagcag

SEQ ID NO: 352408 - DNA, 75 bp, synthetic construct
  source 1..75: mol_type = other DNA
gctgacggctcattcagtgaggcaaccggcgcatccgctgactctgcccgctggggcaccggtaaacccctgtat

SEQ ID NO: 352409 - DNA, 75 bp, synthetic construct
  source 1..75: mol_type = other DNA
cgcactggcgctgtactggccggtttcttcattgcctcagggtgtcacactggaaggtaatgccggtaacaatct

SEQ ID NO: 352410 - DNA, 75 bp, synthetic construct
  source 1..75: mol_type = other DNA
tgttgggcagcatgttgatatgtttgaaggtcttataaaggatctcaaggaatgtggacggttacgaaacattac

SEQ ID NO: 352411 - DNA, 75 bp, synthetic construct
  source 1..75: mol_type = other DNA
ggaacaatatcgtacggaccttgcagatatggtgggacagtgcgctggtggttctgctgacggtgttccctggat

SEQ ID NO: 352412 - DNA, 75 bp, synthetic construct
  source 1..75: mol_type = other DNA
tgcatgtgacagacattaccaggaatgcgacttacccggtgctgattgacagcattgcggtggaagtgaacagca

SEQ ID NO: 352413 - DNA, 75 bp, synthetic construct
  source 1..75: mol_type = other DNA
ggaaggtcttcgtggtttatgcagcatgatgccggtaatggcgcagaccttctggagaaaggcgggcttatcagc

SEQ ID NO: 352414 - DNA, 75 bp, synthetic construct
  source 1..75: mol_type = other DNA
agaccttgctgatgcacttgcgcaaaaaaattcgtgaaggatggcaaccatacggtgggccgttttcttcgtata

SEQ ID NO: 352415 - DNA, 75 bp, synthetic construct
  source 1..75: mol_type = other DNA
aagaccacccatgccacgcagtatgacgcattgtatggcgcttacaaaacgctgtcagcacagagcattttcttt

SEQ ID NO: 352416 - DNA, 75 bp, synthetic construct
  source 1..75: mol_type = other DNA
aggtcaaccctaaaaatattctgcttgcagtggtctggatgcagggcgagtttgatttgaaacagggtgcatacg

SEQ ID NO: 352417 - DNA, 75 bp, synthetic construct
  source 1..75: mol_type = other DNA
tatttaagatcaccaagcagagcaataaaacctggtccctgacgcatccggtggatgacgcaattaccctgctga

SEQ ID NO: 352418 - DNA, 75 bp, synthetic construct
  source 1..75: mol_type = other DNA
ctggtgctgaactgctgaaaaatggtggtttaatcagttgtcgttttaaagtacctggcgacctggtggcaaacc

SEQ ID NO: 352419 - DNA, 75 bp, synthetic construct
  source 1..75: mol_type = other DNA
gacaggagtggggtcatggtatctggagcatgatgccggtactggcgctgaactgctgaaaaatggcggtttaat

SEQ ID NO: 352420 - DNA, 75 bp, synthetic construct
  source 1..75: mol_type = other DNA
agggaaatgctggtcagaacacgaagctggggtcattcggcgcatttgataacgaatggcatacgctgggcttcc

SEQ ID NO: 352421 - DNA, 75 bp, synthetic construct
  source 1..75: mol_type = other DNA
gtgctggagtatgtcaatgacgagggcgtgacggtcagagaagagatgaagccggagatgggcgattacgggcgc

SEQ ID NO: 352422 - DNA, 75 bp, synthetic construct
  source 1..75: mol_type = other DNA
gaaatcgtggatgatgccggagcaggtagtggtaaggccatgaaactgaccaaggaaacaggcaaatcctcctgg

SEQ ID NO: 352423 - DNA, 75 bp, synthetic construct
  source 1..75: mol_type = other DNA
ttcttcctgcagacggatacgacgaacctgaacgcgatgcatcacaggaagccgaatgcgaagctggatacattc

SEQ ID NO: 352424 - DNA, 75 bp, synthetic construct
  source 1..75: mol_type = other DNA
atccatttcaccagcgatctcaacgaagtgctaaacgatcccgatgttaagctggttgttgtctgcacccatgcg

SEQ ID NO: 352425 - DNA, 75 bp, synthetic construct
  source 1..75: mol_type = other DNA
agaacaggctcccatttattcccatattcatttcaccagcgatctcgacgaagtgctaaacgatcctgacgttaa

SEQ ID NO: 352426 - DNA, 75 bp, synthetic construct
  source 1..75: mol_type = other DNA
gacagccacttcgagtatgcgaagcgcgcgctggaggccggaaaaaatgtgctggtcgaaaaaccgttcacccct

SEQ ID NO: 352427 - DNA, 75 bp, synthetic construct
  source 1..75: mol_type = other DNA
ttccggcggaccattgtctgcatgatgtgcaggacatgagccgtcttaaccatccgaaagcggaactgtcaaagg

SEQ ID NO: 352428 - DNA, 75 bp, synthetic construct
  source 1..75: mol_type = other DNA
cggtttaatcagctgccgctttaaggcatccggtgaactggtagcaaatcagtatgtcattgcactttactggcc

SEQ ID NO: 352429 - DNA, 75 bp, synthetic construct
  source 1..75: mol_type = other DNA
tattactggaaaaacgctggcaccgataaatatgaggcggtatacggtggctacaaaggcaaggaaactcagaat

SEQ ID NO: 352430 - DNA, 75 bp, synthetic construct
  source 1..75: mol_type = other DNA
ggcagacaagttacgcctgaccgatatcaccagtaatgcaacgtatccggtactgattgacagcattttggtgga

SEQ ID NO: 352431 - DNA, 75 bp, synthetic construct
  source 1..75: mol_type = other DNA
cagggcgttgccctgaccggcgatggggggaataacctgctggcagcgttctacatccagacggatgcaaaagac

SEQ ID NO: 352432 - DNA, 75 bp, synthetic construct
  source 1..75: mol_type = other DNA
cactgaagaagaacccgaaaaatgtgctgtttgccgtggtgtggatgcagggggaatttgattttggcggcacgc

SEQ ID NO: 352433 - DNA, 75 bp, synthetic construct
  source 1..75: mol_type = other DNA
acactgctctcttaccttgccagcgagtcagagggaagcctgaaagtacagggatggtcagccagtgtcggcaag

SEQ ID NO: 352434 - DNA, 75 bp, synthetic construct
  source 1..75: mol_type = other DNA
gtagcgcaaaatggtcgtgtactttatcaaaccacagtcgcgccaggcccttttactattactgatttgggtcaa

SEQ ID NO: 352435 - DNA, 75 bp, synthetic construct
  source 1..75: mol_type = other DNA
cgcgggttatcgcttctcagataaagattacgtgtcgatgagtgagtacctaagctcgcgtaatggcgatgagtc

SEQ ID NO: 352436 - DNA, 75 bp, synthetic construct
  source 1..75: mol_type = other DNA
atcggttattacggttcgaaatggcgtgacagctcagccacctggacgtcacaggacagggcgagccatttcagt

SEQ ID NO: 352437 - DNA, 75 bp, synthetic construct
  source 1..75: mol_type = other DNA
accattgtcttcatgatgttgaagatatgaccaggctaaaaccccccaaagctaaagatgcagaatacggttgtg

SEQ ID NO: 352438 - DNA, 75 bp, synthetic construct
  source 1..75: mol_type = other DNA
ggaagatggctttgtttatctcagcgggattcaagaaaacagtaccctacatttaacttggggtaataactcctg

SEQ ID NO: 352439 - DNA, 75 bp, synthetic construct
  source 1..75: mol_type = other DNA
gacagccctgccaatactaattactcgatatcagtaagcaaaaactttgatattggtgatttcaagggcatttcc

SEQ ID NO: 352440 - DNA, 75 bp, synthetic construct
  source 1..75: mol_type = other DNA
ggagcatgatgcagccggacagggtgcggagttactgaagaagggcggacgtgtgagcgtacggtttaagttgcc

SEQ ID NO: 352441 - DNA, 75 bp, synthetic construct
  source 1..75: mol_type = other DNA
aaggaggggtggcagccatttggcagcccggtggccatcacgccttatactctgatgcaggccattgcggcggaa

SEQ ID NO: 352442 - DNA, 75 bp, synthetic construct
  source 1..75: mol_type = other DNA
gacggcacatacagcgaatcagccggtgcatcggaaaattcactgcgctggggtgtgggtaagccgctgtatcag

SEQ ID NO: 352443 - DNA, 75 bp, synthetic construct
  source 1..75: mol_type = other DNA
cttgagacaaccagaaacaagtatgcctttggtttgtactggcgaatagcggaatggccgggtgtgaaccgcccc

SEQ ID NO: 352444 - DNA, 75 bp, synthetic construct
  source 1..75: mol_type = other DNA
aaaaaggcggggaaattgctgtccggtttaaaatccccgaaaacgtcaatcttgagacaaccagaaacaagtatg

SEQ ID NO: 352445 - DNA, 75 bp, synthetic construct
  source 1..75: mol_type = other DNA
aatggactcaacaggtttgtcattacggatattactgaaccgccccggaaatcctggagactaaacttcctgaga

SEQ ID NO: 352446 - DNA, 75 bp, synthetic construct
  source 1..75: mol_type = other DNA
ggtgtggatgggcaggcgtttgacctggtgaaatgggccaatactgctaatgaactcaacaggtttgtcattacg

SEQ ID NO: 352447 - DNA, 75 bp, synthetic construct
  source 1..75: mol_type = other DNA
aggggacattcagcgagtccacgggagccagtcaggattcggctcgctggggagtgggtaagccgttatatcagg

SEQ ID NO: 352448 - DNA, 75 bp, synthetic construct
  source 1..75: mol_type = other DNA
gcatcaaaataactaacaatggaatatctcaggaatatatccagtttgacctggggtcgttggaaagtatccttc

SEQ ID NO: 352449 - DNA, 75 bp, synthetic construct
  source 1..75: mol_type = other DNA
atgtcattttcctgtccactttgtcatcagcctttagcgcttgaaaaaaacagctatatctgtccccaacggcat

SEQ ID NO: 352450 - DNA, 75 bp, synthetic construct
  source 1..75: mol_type = other DNA
accactgtctgcatgatgtacaggacatgagccgtcttaaccatccgaaagctgacctgtcgaaaggtcagtacg

SEQ ID NO: 352451 - DNA, 75 bp, synthetic construct
  source 1..75: mol_type = other DNA
gctgcgcagggctggagcattaagaatggcggaattcagttgtcagagggtgtatttaagatcaccaagcagagc

SEQ ID NO: 352452 - DNA, 75 bp, synthetic construct
  source 1..75: mol_type = other DNA
cctcagctttcatcagtggtaaggcaccggaaatcaaaccctcgcccggcgtcgacacgccatcgggtccgtctg

SEQ ID NO: 352453 - DNA, 75 bp, synthetic construct
  source 1..75: mol_type = other DNA
tttctgccagtagcggtgatgaactgcaaaaaaagctggcagaaaaaataagtgaagggtggcagccatatggtt

SEQ ID NO: 352454 - DNA, 75 bp, synthetic construct
  source 1..75: mol_type = other DNA
taccttgagcatgatgccggtaatggtgcggacctgctgggtaaaggtggccttgtcagttgccggtttaaggtt

SEQ ID NO: 352455 - DNA, 75 bp, synthetic construct
  source 1..75: mol_type = other DNA
cggtgcttccgctgattcttcacgctggggtgccggtaaacccctgtatcaggacctggtaagccgcaccagagc

SEQ ID NO: 352456 - DNA, 75 bp, synthetic construct
  source 1..75: mol_type = other DNA
agcgcagaaatgatgcaagcgcgacgtgcatttttagatgccggacattataagcctctgcgcgatgcaattatc

SEQ ID NO: 352457 - DNA, 75 bp, synthetic construct
  source 1..75: mol_type = other DNA
tgaagtctggcaagcactggcagcaaaagaagtgttcgactgccagacggactttaatattcacctctggcagcg

SEQ ID NO: 352458 - DNA, 75 bp, synthetic construct
  source 1..75: mol_type = other DNA
atgtcaatctgctgcccgttcagcataaacggtctcgtgatccgggcgacagcgcggaaatgatacaagcacgcc

SEQ ID NO: 352459 - DNA, 75 bp, synthetic construct
  source 1..75: mol_type = other DNA
ccgaaatcgtcccggtaaatgttgtcactcggaagaaaaccttcgtcttcagtcaagacgaattcccgaaagcgg

SEQ ID NO: 352460 - DNA, 75 bp, synthetic construct
  source 1..75: mol_type = other DNA
tttgcctatacaaactggactgaagctcaacgcgtagccgaatttatttgccgaccgctggcactgaaagaacta

SEQ ID NO: 352461 - DNA, 75 bp, synthetic construct
  source 1..75: mol_type = other DNA
tacgaagcttcaggagaacaacacccagttcccggaagtggtggcaagcatcttcaaccatctgcctgactgggc

SEQ ID NO: 352462 - DNA, 75 bp, synthetic construct
  source 1..75: mol_type = other DNA
tccttaaaacctgtttgggcgagtcaatcaatggaattaaattggatgattgtgctattgatccttcaaccactt

SEQ ID NO: 352463 - DNA, 75 bp, synthetic construct
  source 1..75: mol_type = other DNA
gatatttagttcacaagcggcaacgaatgacgatattgcaacgcttatacagaatgaaatcagcgggaatacaca

SEQ ID NO: 352464 - DNA, 75 bp, synthetic construct
  source 1..75: mol_type = other DNA
gatatttagttcacaagcggcaaccaattgcgatattgcaacgcatatacaaaatgaaatcagcggaagtgcaca

SEQ ID NO: 352465 - DNA, 75 bp, synthetic construct
  source 1..75: mol_type = other DNA
taatatgcagcgcctggtctcacctgcgctcctgacgggcaatggtcagtaccgtcgggggattaactggacgac

SEQ ID NO: 352466 - DNA, 75 bp, synthetic construct
  source 1..75: mol_type = other DNA
aagtgatcgagcgctgcagggtgaataatccttcagattttatgctttactcgccagtcaggcgcggcggcagaa

SEQ ID NO: 352467 - DNA, 75 bp, synthetic construct
  source 1..75: mol_type = other DNA
ttgcacagcgattactgggccacaaaaatttaacaatgacgaaaaaatacctggacgcacgcggtgcagagtatg

SEQ ID NO: 352468 - DNA, 75 bp, synthetic construct
  source 1..75: mol_type = other DNA
gttccggatgatggcggtgatacgcctgttccgccagacgacggcggtgatacgccggttccgccagatgacggc

SEQ ID NO: 352469 - DNA, 75 bp, synthetic construct
  source 1..75: mol_type = other DNA
ctgatagagggctctcagtcggctatttcagggcaggctttgacttatgggcagtcgatcaccgatccttgtctg

SEQ ID NO: 352470 - DNA, 75 bp, synthetic construct
  source 1..75: mol_type = other DNA
tcgacaatttagtaactcccgataaattagcggcgaaattaccagcatctgctgacattattaataatgttattg

SEQ ID NO: 352471 - DNA, 75 bp, synthetic construct
  source 1..75: mol_type = other DNA
gagtttcttgatttgtggattgaaggagggaaaaacacaatggcaggatcaatgcgttctgtgttgtctgatatg

SEQ ID NO: 352472 - DNA, 75 bp, synthetic construct
  source 1..75: mol_type = other DNA
aaagaatttcaataacaaaatcctcaaacatataaaaagttatctaattatgttgagcgcatttgtcataggcgc

SEQ ID NO: 352473 - DNA, 75 bp, synthetic construct
  source 1..75: mol_type = other DNA
cgaacgtgaaagtaactttcgtgagatgaaattggccagatgttacatcaccactggtctctatactaaaaattt

SEQ ID NO: 352474 - DNA, 75 bp, synthetic construct
  source 1..75: mol_type = other DNA
aacagtcgggtaaggctgctactcccgccagtagatttgacggaactgttgcttgaaatagatgccagaacggga

SEQ ID NO: 352475 - DNA, 75 bp, synthetic construct
  source 1..75: mol_type = other DNA
gttgggtacaattcatgcgtcagaactcattcgctctttactgaaaagctcgcgcccatcaggactggcacaggc

SEQ ID NO: 352476 - DNA, 75 bp, synthetic construct
  source 1..75: mol_type = other DNA
atgcccggaagaacactacgtcgctttccgcgcattccgtgaagatccacaggcaaacccgttgaaaacaccttc

SEQ ID NO: 352477 - DNA, 75 bp, synthetic construct
  source 1..75: mol_type = other DNA
tcagcctgcccccgctgcggtggtgtgggcgaagtagacgatgatgaagacgacgaatacgaagaggaagaggaa

SEQ ID NO: 352478 - DNA, 75 bp, synthetic construct
  source 1..75: mol_type = other DNA
ctggcctcgctggcaaattccgacgtggatgcgctgattaaggtgctgccgcgcatgacgtatccggcactgacc

SEQ ID NO: 352479 - DNA, 75 bp, synthetic construct
  source 1..75: mol_type = other DNA
gttgcagcaactggcctcatcatttaatggcgtgctggagcgccaggaaatcgcctggcggcaacttgaaagttt

SEQ ID NO: 352480 - DNA, 75 bp, synthetic construct
  source 1..75: mol_type = other DNA
actggattcggggattaactgtaaaaaacatccgtggttatacttccctcttgcaaaatcctcaccgggggatga

SEQ ID NO: 352481 - DNA, 75 bp, synthetic construct
  source 1..75: mol_type = other DNA
agttcgataaatataaaacacggatactggattcggggattaactgtaaaaacatccgtggttatacttccctct

SEQ ID NO: 352482 - DNA, 75 bp, synthetic construct
  source 1..75: mol_type = other DNA
aaccatactctcgaacaaatggcgcaagccctgttcaaaagctggtttgtcgattttgaaccggtaaaagctaaa

SEQ ID NO: 352483 - DNA, 75 bp, synthetic construct
  source 1..75: mol_type = other DNA
aaaaccgaaaggtatttgtcttcccagggtgtcgaagcggtgcggaattgcttactgcctcaaaatagtattgcg

SEQ ID NO: 352484 - DNA, 75 bp, synthetic construct
  source 1..75: mol_type = other DNA
gtgagttgggaaatatccctgtgacatgggagttagggaagcttcaagatttgttggtattacagagaggttttg

SEQ ID NO: 352485 - DNA, 75 bp, synthetic construct
  source 1..75: mol_type = other DNA
aggaatatcagttacccattaatgaacatagttcaaaagccgctattcacggctgcttgcctggcgagactggca

SEQ ID NO: 352486 - DNA, 75 bp, synthetic construct
  source 1..75: mol_type = other DNA
gcgttattctgtattgcctgatatattcacacctataaatttagggctatttaaaaactgccaagactggtctaa

SEQ ID NO: 352487 - DNA, 75 bp, synthetic construct
  source 1..75: mol_type = other DNA
actgggtaatgaccacgacgcggttactcaacagtaaccgtgtgatcacggatgtggatactgatttgggtaaga

SEQ ID NO: 352488 - DNA, 75 bp, synthetic construct
  source 1..75: mol_type = other DNA
atgacgatggatccgggggagtatgcggtttcggtgacggtgaaagggaagacagctgtctacggacgtgtgcgt

SEQ ID NO: 352489 - DNA, 75 bp, synthetic construct
  source 1..75: mol_type = other DNA
tactgccgcaatggctggatggagatcgacaataaccagtgtgaaaacgccctccgggtagttgcactggggcgg

SEQ ID NO: 352490 - DNA, 75 bp, synthetic construct
  source 1..75: mol_type = other DNA
agccgttaaagactgggaaagccaaaaaagccacgaactagccagggtatttgcccactacctgtatcgcattcg

SEQ ID NO: 352491 - DNA, 75 bp, synthetic construct
  source 1..75: mol_type = other DNA
ctggcgtttccgtttcagctcgatcaaatcgtaattaatgggcggcgcttttttgaaatgattgcgcactaccaa

SEQ ID NO: 352492 - DNA, 75 bp, synthetic construct
  source 1..75: mol_type = other DNA
atgcagtcgctgtacggctggatacaacagcagatgaacacgctgtcgcgacactcagataccgcgaaggcactc

SEQ ID NO: 352493 - DNA, 75 bp, synthetic construct
  source 1..75: mol_type = other DNA
atcaggaagcactgggttgcgttgtgcaacttctgtgataacggtctggcggaagtggataataatgccgcggaa

SEQ ID NO: 352494 - DNA, 75 bp, synthetic construct
  source 1..75: mol_type = other DNA
ggtgcatttgcaattaactgggaggatttacaaaaaaactatcaggaaataaatgcttccattaaagactacgat

SEQ ID NO: 352495 - DNA, 75 bp, synthetic construct
  source 1..75: mol_type = other DNA
agtatatatatcaaccactatattaaagtcgttatttctactgttgatttttgttttttatacaatagtatgtta

SEQ ID NO: 352496 - DNA, 75 bp, synthetic construct
  source 1..75: mol_type = other DNA
aagtagccataacatttagtgaattttgtgatgagcggaaaagagaaatcgaggataaaaagccaactataaaaa

SEQ ID NO: 352497 - DNA, 75 bp, synthetic construct
  source 1..75: mol_type = other DNA
aatactttgcgcaggaattaaccattcgccacgctgaaaatggcgttgataaattgtctcaatctctttttgatg

SEQ ID NO: 352498 - DNA, 75 bp, synthetic construct
  source 1..75: mol_type = other DNA
cagaaatatattttgcaaaagttgtcatacttggtgaaggggatagcgaagaaattgtaatacctaaaatagcac

SEQ ID NO: 352499 - DNA, 75 bp, synthetic construct
  source 1..75: mol_type = other DNA
tttacggggaacgttaatctgacaaatggctcagccctgcgggtcaatgagaacttcagtggtggaattatcagt

SEQ ID NO: 352500 - DNA, 75 bp, synthetic construct
  source 1..75: mol_type = other DNA
tatgtccatcatcgtgacgattacacaatgcaaacattgggacttggtaaggcagacgatactgcccactcctgg

SEQ ID NO: 352501 - DNA, 75 bp, synthetic construct
  source 1..75: mol_type = other DNA
atgttatcgtgttggcagtttttttctttgacgacacggaatgattttatgtcagaagtagctgttgaacttgaa

SEQ ID NO: 352502 - DNA, 75 bp, synthetic construct
  source 1..75: mol_type = other DNA
gtccctgcgccagatttactttgccagcagtaacggtccggcgcccgatcttgcgtatcaggtcgattttccacg

SEQ ID NO: 352503 - DNA, 75 bp, synthetic construct
  source 1..75: mol_type = other DNA
gccggggctggtattggtgctggtctgggtggggcatttgggaagtatgcccccacagccgtggggaaaatctta

SEQ ID NO: 352504 - DNA, 75 bp, synthetic construct
  source 1..75: mol_type = other DNA
gtacaggggctggccggcggtaatctgagtgcagccctggcaggtggtgctgcgccgtatattgctgaaattatc

SEQ ID NO: 352505 - DNA, 75 bp, synthetic construct
  source 1..75: mol_type = other DNA
ctaggtgacttctctgtagtagtgaagttcaagactactaaatcaaaaattagtaaaatatttacatatatgttc

SEQ ID NO: 352506 - DNA, 75 bp, synthetic construct
  source 1..75: mol_type = other DNA
gatctgttccgtgaagggcagggcgttgtggtgcagggcgaactggaaaaaggcaatcatatcctcgcaaaagaa

SEQ ID NO: 352507 - DNA, 75 bp, synthetic construct
  source 1..75: mol_type = other DNA
taataagtgggtcctacagcatgctaaagttgcaaaacaaaaatacacattgaatccatctatagatggaggtgc

SEQ ID NO: 352508 - DNA, 75 bp, synthetic construct
  source 1..75: mol_type = other DNA
ctttctttaaatataatattggatttgattgggggaattatcatgaaatttaccttcagcaaggagatggctttt

SEQ ID NO: 352509 - DNA, 75 bp, synthetic construct
  source 1..75: mol_type = other DNA
attggcatcctcaaagaatcttgggggaagtcagagccagagaaggaagtatgagggctctggcccgtaaagctg

SEQ ID NO: 352510 - DNA, 75 bp, synthetic construct
  source 1..75: mol_type = other DNA
tgtcagttcaacaatttgaaagagtgcttctatgaggcattaaaggtcgcaatgcgcaactttccggtaattccg

SEQ ID NO: 352511 - DNA, 75 bp, synthetic construct
  source 1..75: mol_type = other DNA
cgccaattataagctgggcggtgcacagcaacacgatagcgtacgcctcgatccgtgggtgtttatgttctcagc

SEQ ID NO: 352512 - DNA, 75 bp, synthetic construct
  source 1..75: mol_type = other DNA
ctgctgaagttagcggtgaatcggacagtgtaaataatgcctccaaaaagaagaaagagcgcatattttggttag

SEQ ID NO: 352513 - DNA, 75 bp, synthetic construct
  source 1..75: mol_type = other DNA
ctttagctacttggacaaatagccattttaaagtatgggttttcgagcttgatgcaataccagaacaaagggatg

SEQ ID NO: 352514 - DNA, 75 bp, synthetic construct
  source 1..75: mol_type = other DNA
ggtaaagataccgaagaagacaatgcgcaggatgaggaagtacaaaccggctttgatttatctatgctacaggtc

SEQ ID NO: 352515 - DNA, 75 bp, synthetic construct
  source 1..75: mol_type = other DNA
aagaaacgctcgatatcatgcaaggtctttacgaaactcataagcttttgacctatccgcgaacagataaccgct

SEQ ID NO: 352516 - DNA, 75 bp, synthetic construct
  source 1..75: mol_type = other DNA
cagatatcagcgcattaatgctcgatattggttctaaattagatacatcagtatcgcttgttcagcaaacttgcg

SEQ ID NO: 352517 - DNA, 75 bp, synthetic construct
  source 1..75: mol_type = other DNA
acttaacccgttggtgatacgacgatgtatgcaccataaatcactggagtctcaagttccctacacaggtaaagg

SEQ ID NO: 352518 - DNA, 75 bp, synthetic construct
  source 1..75: mol_type = other DNA
ccatctgttttctctgctggcgcagcaggtgtcaggtgttcaggctgacgtgcgaattgtaaaccagaatgccag

SEQ ID NO: 352519 - DNA, 75 bp, synthetic construct
  source 1..75: mol_type = other DNA
cgacccgttatgggattatcaccgcaattgataacacctggccgacaccgctatttcaaaaaccgttaagtctgg

SEQ ID NO: 352520 - DNA, 75 bp, synthetic construct
  source 1..75: mol_type = other DNA
tcattataaataattgtgatgatgaacgtgtaaaaaataaagcacaagcatatatagaactcctgggcgatgatg

SEQ ID NO: 352521 - DNA, 75 bp, synthetic construct
  source 1..75: mol_type = other DNA
cagaaatttattataaatttttgtgcatttatgcgttcgaaaatcatgagtatctagaaggttttgcatcagtat

SEQ ID NO: 352522 - DNA, 75 bp, synthetic construct
  source 1..75: mol_type = other DNA
ctcatcggttcatattgaagtgcaagatggagcgtcgatcgatgagctattaattagtaatgttacaaaactatt

SEQ ID NO: 352523 - DNA, 75 bp, synthetic construct
  source 1..75: mol_type = other DNA
gatggtaaattaattgaaaatcacttagtcagaattggttactcaaaactactccttagatactttcctgagagc

SEQ ID NO: 352524 - DNA, 75 bp, synthetic construct
  source 1..75: mol_type = other DNA
gttgcgcgggcgctgaacgatagcgctgcaaacgccgcattcttgcgctcaatcagtgaaaaagaagccaaaggg

SEQ ID NO: 352525 - DNA, 75 bp, synthetic construct
  source 1..75: mol_type = other DNA
acctatagcctagaccctgtattgactcaatcaattggcggcccagagtcattttacatgtatcaagtaggtgtc

SEQ ID NO: 352526 - DNA, 75 bp, synthetic construct
  source 1..75: mol_type = other DNA
ccggacatggtgattgcttgttagtagactgcgatggtgtcaaattgttaattgacgctggcccaagtacattta

SEQ ID NO: 352527 - DNA, 75 bp, synthetic construct
  source 1..75: mol_type = other DNA
gataaggcggaatatctgcgcctggactgcaccatcaaggaagtccagttcaccgccggtcagaaacaggatatt

SEQ ID NO: 352528 - DNA, 75 bp, synthetic construct
  source 1..75: mol_type = other DNA
acggtaatgagtatgtgcggttgtctaatccgttaacttttgacaactcagccctgaccgtacctgtgcgactca

SEQ ID NO: 352529 - DNA, 75 bp, synthetic construct
  source 1..75: mol_type = other DNA
ccaacagtacaggaagccgagaacgcatatttgaatgcacgttataaccgcatcgaagaactaaaaattatatat

SEQ ID NO: 352530 - DNA, 75 bp, synthetic construct
  source 1..75: mol_type = other DNA
acaggctatacaccattgcagtatagaaagagcaatctatggaccttcaagaaccttacgggaccaaaggacctg

SEQ ID NO: 352531 - DNA, 75 bp, synthetic construct
  source 1..75: mol_type = other DNA
ttgcacatactggctaccgaatgatttatctgctgggtgcactattagtggtagtggctggtggagtctatgcgc

SEQ ID NO: 352532 - DNA, 75 bp, synthetic construct
  source 1..75: mol_type = other DNA
gattgaggcctatgaaagtatcaatgaaaccagtgagtacgtacagcaagtaagcctaatggctcctgttgcggt

SEQ ID NO: 352533 - DNA, 75 bp, synthetic construct
  source 1..75: mol_type = other DNA
agcatcttacccagatgggagtggctcttatctatcatgctcaggggaatactggtgtgttgcctggttatataa

SEQ ID NO: 352534 - DNA, 75 bp, synthetic construct
  source 1..75: mol_type = other DNA
tgcatgatttttttgctgaaaacggcgatgaccgtggctggtctccagaattctcagtttggtacgacagcagcc

SEQ ID NO: 352535 - DNA, 75 bp, synthetic construct
  source 1..75: mol_type = other DNA
tcggtgtgtccgggcgggatgacttcgggcaacccggtaaatccgctgccgggggaggcggtgtacagccgcagc

SEQ ID NO: 352536 - DNA, 75 bp, synthetic construct
  source 1..75: mol_type = other DNA
taattcgtcgccagatgtgtggcttttcaggactgtttagtttcgaattaaaaggagccggctttgaggaagtga

SEQ ID NO: 352537 - DNA, 75 bp, synthetic construct
  source 1..75: mol_type = other DNA
accaaacgaagtttttaaacgttatggtcgagcaataagatataattttcaagtggacaatgcaaaatatagacg

SEQ ID NO: 352538 - DNA, 75 bp, synthetic construct
  source 1..75: mol_type = other DNA
aatttgatgagagcgggaaaagcgaaccaacggacttatttacttggtacggtaaagataaaaaaggcgactctc

SEQ ID NO: 352539 - DNA, 75 bp, synthetic construct
  source 1..75: mol_type = other DNA
gcttatgatatctatccggatgatgaaacagatacccatcacccagtttctccttctctctatttgcaggataaa

SEQ ID NO: 352540 - DNA, 75 bp, synthetic construct
  source 1..75: mol_type = other DNA
ttggcaacgtctcaggcaatcattgatctgtccgcgataccggtaccggatgcggtggaggtaccggacaccgct

SEQ ID NO: 352541 - DNA, 75 bp, synthetic construct
  source 1..75: mol_type = other DNA
gtcttacactgacagcgtccaccggataggctcggtggcgtcacgttccggcatggatggtgctctgcaccagac

SEQ ID NO: 352542 - DNA, 75 bp, synthetic construct
  source 1..75: mol_type = other DNA
atgacgcggcaggaaggctcacggcgcagacggacgcggcgggacggcggacagagtacggtctgaatgtggtgt

SEQ ID NO: 352543 - DNA, 75 bp, synthetic construct
  source 1..75: mol_type = other DNA
gcctgggggttattgttgatcacatctccgatgtaaaagaaatcgaaaaaactcagcatttgtctctttatctga

SEQ ID NO: 352544 - DNA, 75 bp, synthetic construct
  source 1..75: mol_type = other DNA
tttgaactgcggttgccggcggagggtacacctgcagcatggcaggcagggctgaatgtgacggtcacggtacag

SEQ ID NO: 352545 - DNA, 75 bp, synthetic construct
  source 1..75: mol_type = other DNA
agaaagattttttctcaatatgtaataagtgtttcaaacagggaattgggattaaagtacatatgcttgatggtc

SEQ ID NO: 352546 - DNA, 75 bp, synthetic construct
  source 1..75: mol_type = other DNA
cgctggctggcatcgtgcggcctgacggtggagcagatgcaaaaccagatggacccggtgtacacgccggcgcga

SEQ ID NO: 352547 - DNA, 75 bp, synthetic construct
  source 1..75: mol_type = other DNA
caacagaatggtgcgcagaatacgatgaatggggcaacctgctgaatgaagagaacccgcatcagctgcagcagc

SEQ ID NO: 352548 - DNA, 75 bp, synthetic construct
  source 1..75: mol_type = other DNA
tgcataacaatacttaatatactatttggttacgcatattttatttttttcttgcccacaaattattcatcattc

SEQ ID NO: 352549 - DNA, 75 bp, synthetic construct
  source 1..75: mol_type = other DNA
cggcgggtgcccgcaacgcttaccgcttccatgcgaaatcggcggataccgatgtgctggatgctgaagcttatg

SEQ ID NO: 352550 - DNA, 75 bp, synthetic construct
  source 1..75: mol_type = other DNA
aagagtacatcgcgcggacttttggcgcggaacagagttatatcgttaccaacggaacatcgacgtcgaacaaaa

SEQ ID NO: 352551 - DNA, 75 bp, synthetic construct
  source 1..75: mol_type = other DNA
ggcgatgactatcaggagattttccgccagcaactgcgtgaaagccaggagcgacaggcagcgggtcttccccgc

SEQ ID NO: 352552 - DNA, 75 bp, synthetic construct
  source 1..75: mol_type = other DNA
tgcgtgccggggtggaaatcaaccggtacggaaaagcactggcctaccatgttcaggaagatgactggcccggtt

SEQ ID NO: 352553 - DNA, 75 bp, synthetic construct
  source 1..75: mol_type = other DNA
taattttgagattactggagctttactgcggcaggcaggagcttcataaacataaaactcatcagaaaaaattgc

SEQ ID NO: 352554 - DNA, 75 bp, synthetic construct
  source 1..75: mol_type = other DNA
gtatgaaactaagcgaactatccactaaatacggagtgagtgaaatgcaaatttccacaatccgcagaggaaacg

SEQ ID NO: 352555 - DNA, 75 bp, synthetic construct
  source 1..75: mol_type = other DNA
agatcgtgcagcttaaggcgcgatattaccagactgcaggctcgatcacgccaggtgcggcaaacggtacggcga

SEQ ID NO: 352556 - DNA, 75 bp, synthetic construct
  source 1..75: mol_type = other DNA
gtcttatacccggctggcaaaccggattaatggcatggtgccgctgtccgccatttacgccgcactgcaacagac

SEQ ID NO: 352557 - DNA, 75 bp, synthetic construct
  source 1..75: mol_type = other DNA
ccgctgacggattttgtgacggtgaaaagcgccattattaatgactataccgtgacggctgagctggaaataccg

SEQ ID NO: 352558 - DNA, 75 bp, synthetic construct
  source 1..75: mol_type = other DNA
catcacggctgaactggagatcccggacggcccggacgccacgacagttctgaacaatgccattgaagccttgca

SEQ ID NO: 352559 - DNA, 75 bp, synthetic construct
  source 1..75: mol_type = other DNA
ctggcgtcacagatgtttgcctgctggctggaggaagcccttattcgtggtgtgatccgtccgccgaaatcccgt

SEQ ID NO: 352560 - DNA, 75 bp, synthetic construct
  source 1..75: mol_type = other DNA
taacggtgaaatttttgtccagcccgtatgggatgcggaatccacgtcattattccggacgaaattcaaaaccat

SEQ ID NO: 352561 - DNA, 75 bp, synthetic construct
  source 1..75: mol_type = other DNA
ggtaatgcccgcgcggatgatctggtccgtaacaacggtattgcatcgaatgcagtggaaattcataaggatcat

SEQ ID NO: 352562 - DNA, 75 bp, synthetic construct
  source 1..75: mol_type = other DNA
ggattggattttaagggatgcttcttttctggacagaacttcagtaactatgatattcaatatgtgaactgggga

SEQ ID NO: 352563 - DNA, 75 bp, synthetic construct
  source 1..75: mol_type = other DNA
atgttagttagtaaaagcaacgaaattaacactagcacatttataaatagtggaaattgtaatgaaagaaaatcc

SEQ ID NO: 352564 - DNA, 75 bp, synthetic construct
  source 1..75: mol_type = other DNA
attttaagggatgcttcttttctggacagaacttcagtaactatgatattcaatatgtgaactggggaacgtcat

SEQ ID NO: 352565 - DNA, 75 bp, synthetic construct
  source 1..75: mol_type = other DNA
tgatgctggggaggctggagcgggaactgcgcgcgggagcggtgagtgcggagagtgaggcatggcttgcgcagt

SEQ ID NO: 352566 - DNA, 75 bp, synthetic construct
  source 1..75: mol_type = other DNA
aaacgcgtcagcgaaaacggtttaagtggagtcttgtctgatcgtaataataaaataaaactaatcacgggcgtg

SEQ ID NO: 352567 - DNA, 75 bp, synthetic construct
  source 1..75: mol_type = other DNA
cgtgtatttttaatgtgcctgatgacaataagagttatgataaattattaaaatccgtcagcgaaaatggtttaa

SEQ ID NO: 352568 - DNA, 75 bp, synthetic construct
  source 1..75: mol_type = other DNA
cgcacttgaaataaaacaaaacagagacgcgactagttgtgttaaaaatatgatcgcagacctagagaaaagtgc

SEQ ID NO: 352569 - DNA, 75 bp, synthetic construct
  source 1..75: mol_type = other DNA
cagaacagagatgcgacaagttgtgttaaaaatatgatcgcagacttagagaaaagcgccaaaattaaacgttct

SEQ ID NO: 352570 - DNA, 75 bp, synthetic construct
  source 1..75: mol_type = other DNA
atctaatatcattaggtggtcatgcaggacttggcgttgcgtttgctaaaaagaaaggtgaaatgttatctgata

SEQ ID NO: 352571 - DNA, 75 bp, synthetic construct
  source 1..75: mol_type = other DNA
cgtgtatttttaatacgcctgctaacaatgagagttatgaaaaatcattaaagcctgtgagcgaaaacggtttaa

SEQ ID NO: 352572 - DNA, 75 bp, synthetic construct
  source 1..75: mol_type = other DNA
gagcaatgcacttcaacaggattcatctttgttagagtcaaaggaacacaccatagatattcaagaaaaaacgaa

SEQ ID NO: 352573 - DNA, 75 bp, synthetic construct
  source 1..75: mol_type = other DNA
ttgttacggttagtcaggggattgcctgttctgctcctgcaaaaacggctgaacaaatagttgctgatgccgatg

SEQ ID NO: 352574 - DNA, 75 bp, synthetic construct
  source 1..75: mol_type = other DNA
ggtttcgtttatgagagtgacactaacacagaatggatgagtattgaagagctgtgtcaatggatcgaagataac

SEQ ID NO: 352575 - DNA, 75 bp, synthetic construct
  source 1..75: mol_type = other DNA
cattgcagggaaatgtgattagggagctaagcggctttttgtttattacaatggttgatggttcacttaaaggat

SEQ ID NO: 352576 - DNA, 75 bp, synthetic construct
  source 1..75: mol_type = other DNA
cgcttcccggattccctattggacctggcaaggcaaaaacttctcgcccctgctcaagcgcacaacgtgctgtca

SEQ ID NO: 352577 - DNA, 75 bp, synthetic construct
  source 1..75: mol_type = other DNA
cccaaaaaatcacgtacaacaaattgctaaaaaattgtggtattggttgtttgactgtcgttttagacaggactt

SEQ ID NO: 352578 - DNA, 75 bp, synthetic construct
  source 1..75: mol_type = other DNA
tacaaaggcatacggataattgactgggaacaatttaaaataaaaaatatgataactaactttaaaaatttgtta

SEQ ID NO: 352579 - DNA, 75 bp, synthetic construct
  source 1..75: mol_type = other DNA
tcagaatcatgccgatcgtctgggcattgaaggcagcattcgccgcattgtctatgaacacgatctcacgctgaa

SEQ ID NO: 352580 - DNA, 75 bp, synthetic construct
  source 1..75: mol_type = other DNA
aactgctgctggaaaatttcgatgaagatattcacgacttactcaaaattcagctagatgccgcgcagcaacgcc

SEQ ID NO: 352581 - DNA, 75 bp, synthetic construct
  source 1..75: mol_type = other DNA
aaatttgggggggcgttactttcgggtggggcggcgacttttgatgcagtcacgacggctatggcgtctgctgcc

SEQ ID NO: 352582 - DNA, 75 bp, synthetic construct
  source 1..75: mol_type = other DNA
ggcttcgtctatgaaagtgatagtaacgcagaatggatgagtattgaagaacttcgtcaatggatcgaggataat

SEQ ID NO: 352583 - DNA, 75 bp, synthetic construct
  source 1..75: mol_type = other DNA
atctgtatggtgcaacaaaattagcatccgataaacttttcgttgctggtaactcttattctggtgcgacaaaaa

SEQ ID NO: 352584 - DNA, 75 bp, synthetic construct
  source 1..75: mol_type = other DNA
aaatcgcgaactttcgccaacggtgctggatctggcgaatgagacgaatatcaagattttccccgcgagctggaa

SEQ ID NO: 352585 - DNA, 75 bp, synthetic construct
  source 1..75: mol_type = other DNA
ccagacagactacattccgcagcaaagtaaaaaatcagaattattattctgttgcagttaatgctggttactata

SEQ ID NO: 352586 - DNA, 75 bp, synthetic construct
  source 1..75: mol_type = other DNA
agcagatgctgttcgttatgaattggccacaggtgaaaaagttggtggtagaggacatgtattgaaagcacagga

SEQ ID NO: 352587 - DNA, 75 bp, synthetic construct
  source 1..75: mol_type = other DNA
atcgaaacaataaaattagctgaagacggcgacggtataatcgtaagattatatgagagttatggattagaaatt

SEQ ID NO: 352588 - DNA, 75 bp, synthetic construct
  source 1..75: mol_type = other DNA
ccgctgaacgtgcgcaccagacagaaatcatttgccgccttcttgaggtataccctgacaaacttacggatgccg

SEQ ID NO: 352589 - DNA, 75 bp, synthetic construct
  source 1..75: mol_type = other DNA
atctcgtcgatgcgcaattaaataaagcttatggtgaagcttatcgttatatagaacaagtgccacgcacaggtg

SEQ ID NO: 352590 - DNA, 75 bp, synthetic construct
  source 1..75: mol_type = other DNA
atgaatgaaggtggtggagtacgatggtttacatgggataaccccgagatatcttttgttcgcgcatcttttggc

SEQ ID NO: 352591 - DNA, 75 bp, synthetic construct
  source 1..75: mol_type = other DNA
aattacaagcctcagttgtgacaaaaattagtttttgtgcacttattatatcctcgatatttaaaagttacttgt

SEQ ID NO: 352592 - DNA, 75 bp, synthetic construct
  source 1..75: mol_type = other DNA
tcagtatgctagaacccttagtgggtttgtcaggtgtactaagcctacaaaaatttagtgtcgaatcattggagc

SEQ ID NO: 352593 - DNA, 75 bp, synthetic construct
  source 1..75: mol_type = other DNA
atatatccgcgatttccagtcttctggcgcgtctttccggcaatgtgtcggcatggttaattgcggagggagagc

SEQ ID NO: 352594 - DNA, 75 bp, synthetic construct
  source 1..75: mol_type = other DNA
gctggacaggctggagggggaaatccgggcaaactgcgtgagcagtgaaagccgccagtggcttgcgcagtgcgg

SEQ ID NO: 352595 - DNA, 75 bp, synthetic construct
  source 1..75: mol_type = other DNA
gtgtatcagccataccgtctgccggggcagcagtatgatgaggagtcggggctgtactacaatcgtcaccggtac

SEQ ID NO: 352596 - DNA, 75 bp, synthetic construct
  source 1..75: mol_type = other DNA
ctaacgagaacggcagtcacagcgacttcagctacgatgcgctggaccggctggtacagcagggcggctttgacg

SEQ ID NO: 352597 - DNA, 75 bp, synthetic construct
  source 1..75: mol_type = other DNA
cttatcgcatttgccacaaatcaatcaattgttttttttatgacgttttatcttataattagtaaaaagatggtg

SEQ ID NO: 352598 - DNA, 75 bp, synthetic construct
  source 1..75: mol_type = other DNA
ctgatgcagcagcaattgcagcagactgtgatgactcacggctggatttacaccgacgcccagctgttacgcgat

SEQ ID NO: 352599 - DNA, 75 bp, synthetic construct
  source 1..75: mol_type = other DNA
ctgaccacgcaggcgcagcgtgcggaagaggcccgcacctcttcgctatcttcttctgacagttcccgccctctc

SEQ ID NO: 352600 - DNA, 75 bp, synthetic construct
  source 1..75: mol_type = other DNA
gtatggtttatcttatttacggttagttcgagctgtgtatggattattaataaacttttccttaaatattttact

SEQ ID NO: 352601 - DNA, 75 bp, synthetic construct
  source 1..75: mol_type = other DNA
cggctgctagtcagtggaaacagggtggcatctttagggatgtgatcatttcatctgatacagtaattaactgga

SEQ ID NO: 352602 - DNA, 75 bp, synthetic construct
  source 1..75: mol_type = other DNA
cacgatcttctgccaatttttcgctcttccgcatcgcttttgcggtttttctcacctacatgaccgtagggttgc

SEQ ID NO: 352603 - DNA, 75 bp, synthetic construct
  source 1..75: mol_type = other DNA
gacggctaaaagggaatcaatctttcacttcagctcaacacgtgtagttctggctgaaaacccagagcaagagct

SEQ ID NO: 352604 - DNA, 75 bp, synthetic construct
  source 1..75: mol_type = other DNA
tatcgtgatggggaatcatatgttttactcgctgaaaaaatgacaactgtgatcagcgggcctaaaactacgatg

SEQ ID NO: 352605 - DNA, 75 bp, synthetic construct
  source 1..75: mol_type = other DNA
caatccaatccataattagtaaaaacaataatccttcagagttcaggattatggctactggtcatgcccatttag

SEQ ID NO: 352606 - DNA, 75 bp, synthetic construct
  source 1..75: mol_type = other DNA
tcgacctttctgatcaagaaactggcatagctttaatagcaaaaaaaaatatggctatcgtgtcaaagaccagac

SEQ ID NO: 352607 - DNA, 75 bp, synthetic construct
  source 1..75: mol_type = other DNA
tttgctgtgtcttttttatttttcgcttttttttcatataaaagaaattatatatcaattaatccaaaacatttc

SEQ ID NO: 352608 - DNA, 75 bp, synthetic construct
  source 1..75: mol_type = other DNA
tttttagcaataaccaatttaggtttcgataatgttctgattaacgagtttaatcagaataaaaagcataatgaa

SEQ ID NO: 352609 - DNA, 75 bp, synthetic construct
  source 1..75: mol_type = other DNA
tgcttcagaatacagtcaatgaccgttctaactttgggtctaacaggattaagacaattgtttacaatgctattt

SEQ ID NO: 352610 - DNA, 75 bp, synthetic construct
  source 1..75: mol_type = other DNA
gaatcagggcgagatcatcaatctgatcacaggcgaggatattgatttttccaacatctatacactgaggttgaa

SEQ ID NO: 352611 - DNA, 75 bp, synthetic construct
  source 1..75: mol_type = other DNA
atatatctataaaatatcgcagcagtataaatcatttccaaaacttagtgcgatactattacaaaaatcaaaata

SEQ ID NO: 352612 - DNA, 75 bp, synthetic construct
  source 1..75: mol_type = other DNA
tacgactacggtcatgagttctcgtatgttattggaatggcgagagacgttttaattaatcacacacgagatgtt

SEQ ID NO: 352613 - DNA, 75 bp, synthetic construct
  source 1..75: mol_type = other DNA
ggtggctgaacacgaagggcatatcgccgtattcacacttgatgaaatccatctgattcagcctttgcaggagac

SEQ ID NO: 352614 - DNA, 75 bp, synthetic construct
  source 1..75: mol_type = other DNA
ctccctgcgtgatagcaccagccaatccggttccttcgccttcagtagcattgtctttctggagactgattcagg

SEQ ID NO: 352615 - DNA, 75 bp, synthetic construct
  source 1..75: mol_type = other DNA
accgctggcgtagtgttattcaacgcagtctattcatggaacagtctacgtcgtcgtcgaataccccaggtatcg

SEQ ID NO: 352616 - DNA, 75 bp, synthetic construct
  source 1..75: mol_type = other DNA
cttggagctccagaaaacattgtcatctgttatccgtcagcattcagatacatcacgttttgttctgcgccagat

SEQ ID NO: 352617 - DNA, 75 bp, synthetic construct
  source 1..75: mol_type = other DNA
caggatggcgcgcctgccgaaccgcagtaacacattatcgactgaacgccggatacgacacatccggcgatttga

SEQ ID NO: 352618 - DNA, 75 bp, synthetic construct
  source 1..75: mol_type = other DNA
cggctgatgtatctggacctggaatatcagtccggttactgccgcttacgcactgctggcagtgagacacagatg

SEQ ID NO: 352619 - DNA, 75 bp, synthetic construct
  source 1..75: mol_type = other DNA
acgaggaagattttgaaacagatgactttgatatcaaaaaaaacgagagtgagatttatgatgaaaatgacgatc

SEQ ID NO: 352620 - DNA, 75 bp, synthetic construct
  source 1..75: mol_type = other DNA
tcaaccgagaaacggatgccgaattatttgctgacagagataagtatacagttctcttcgacggtaacctgaaaa

SEQ ID NO: 352621 - DNA, 75 bp, synthetic construct
  source 1..75: mol_type = other DNA
gatatgcgtcagcagttttcgctaacctataaagatagtacttctcatctctgcaaggttatttcttcagttcct

SEQ ID NO: 352622 - DNA, 75 bp, synthetic construct
  source 1..75: mol_type = other DNA
gcgggtactgaatcgcgaaaaagtagatttagtcatcagcgacctgcggatggatgaaatggacggtatgcagct

SEQ ID NO: 352623 - DNA, 75 bp, synthetic construct
  source 1..75: mol_type = other DNA
cattgatttctgtaagagaaactaatgaggtagcattagctgtaaggaaatatgcaaaggaaatcgggataccaa

SEQ ID NO: 352624 - DNA, 75 bp, synthetic construct
  source 1..75: mol_type = other DNA
ggcaacgctgatgggggataactccgtttcacaactggccagtcgactggaaaaccgcctggccgtgatagcgtc

SEQ ID NO: 352625 - DNA, 75 bp, synthetic construct
  source 1..75: mol_type = other DNA
gaaaagaaaatgtcccacaggtacagatagagttgctgcttatcatactcacggtgcagatagtcatggcgatta

SEQ ID NO: 352626 - DNA, 75 bp, synthetic construct
  source 1..75: mol_type = other DNA
tccgggatgcctgaaaaaggcgagtttttattgagttggggacaagctgcggatgaaaaatgtaaggcggcctat

SEQ ID NO: 352627 - DNA, 75 bp, synthetic construct
  source 1..75: mol_type = other DNA
cacgaacgttttgaacagacctacttctccaccttcaaaaatatgtatttcagcggcgacggcgcgcgtcgcgat

SEQ ID NO: 352628 - DNA, 75 bp, synthetic construct
  source 1..75: mol_type = other DNA
tatcttttaaagatatgcaggaaaatgcacaaaatatcattaacaatatgatagaaagtgaccgaattaagtttg

SEQ ID NO: 352629 - DNA, 75 bp, synthetic construct
  source 1..75: mol_type = other DNA
ggaaacaccccctctctgacgaagacattttgcaggcggtttaccgggtatgtttcagcccgtccggtgaaatca

SEQ ID NO: 352630 - DNA, 75 bp, synthetic construct
  source 1..75: mol_type = other DNA
acgacagccgtggacagttaattgccgtgaaagacacgcagggccatgaaacgcggtatgaatacaacgccgccg

SEQ ID NO: 352631 - DNA, 75 bp, synthetic construct
  source 1..75: mol_type = other DNA
gttcacaagagacaaatacaagctatctcaatctgcgcaatgggctaaatattggaccgtggcgattacgcaatt

SEQ ID NO: 352632 - DNA, 75 bp, synthetic construct
  source 1..75: mol_type = other DNA
tgtcggcagaggcgcgtgagcgtttagccgctctgaggctggggttgacgcgggaaaaaaatttgcttgagcagc

SEQ ID NO: 352633 - DNA, 75 bp, synthetic construct
  source 1..75: mol_type = other DNA
ggtgtgtttctgaagaaagccagtgatgcgtttgccgactttaccctgtcccgtttttccagcgaacaactccgg

SEQ ID NO: 352634 - DNA, 75 bp, synthetic construct
  source 1..75: mol_type = other DNA
gctacccgccagccagaatggctttgcacccgtggttcgggggattgcaaagtctaatgccacggtcattattcg

SEQ ID NO: 352635 - DNA, 75 bp, synthetic construct
  source 1..75: mol_type = other DNA
gtgggcatcgcggcgcaacagccctgaagacttttgggaaacaggtaaccgacgtagtcgcgtggagggaacgct

SEQ ID NO: 352636 - DNA, 75 bp, synthetic construct
  source 1..75: mol_type = other DNA
acctggttacagcgggatattgctgcgttaagaagccagattatgatcggcgatacgtggacggcgagtgatata

SEQ ID NO: 352637 - DNA, 75 bp, synthetic construct
  source 1..75: mol_type = other DNA
aacaataatgggaatgccttcgtcacggtcgaaattaaaggcgaaaatccacttaaatttacgcgtagcatgaat

SEQ ID NO: 352638 - DNA, 75 bp, synthetic construct
  source 1..75: mol_type = other DNA
tcgaatgacggagcaccacggtatgtgctggatactggacgccacttttcgggagcctatgtctctctgggcaac

SEQ ID NO: 352639 - DNA, 75 bp, synthetic construct
  source 1..75: mol_type = other DNA
tcagagatgtggcagttggcggcttaactcaggccgcgtaccgtgcagcaaatactgatgaatatacgataaaac

SEQ ID NO: 352640 - DNA, 75 bp, synthetic construct
  source 1..75: mol_type = other DNA
tctcgatgaaggcgacctgaagccagatgttgttaagcggttcgaagaactggtggtgcaggcgcagcagagcgc

SEQ ID NO: 352641 - DNA, 75 bp, synthetic construct
  source 1..75: mol_type = other DNA
gctttaagtggttcacttctgaagccatatataattacagtcgatgaaagtggtgaacagactcttcatattaaa

SEQ ID NO: 352642 - DNA, 75 bp, synthetic construct
  source 1..75: mol_type = other DNA
ggcgtcattgcgacgccagtgggcgcaggaattgggcgataagtttaatttaccaacgcaagtgcttgatgcaaa

SEQ ID NO: 352643 - DNA, 75 bp, synthetic construct
  source 1..75: mol_type = other DNA
aaacgatttgaggaaatggtggcgcaggcgcagcagggtgccgaaaccgcaacagaaagcgaacgacaggcaggg

SEQ ID NO: 352644 - DNA, 75 bp, synthetic construct
  source 1..75: mol_type = other DNA
acttcattgtttgatgttgatgcaccgtgtatttttaatgtgcctgatgacaataagagttatgagaaattatta

SEQ ID NO: 352645 - DNA, 75 bp, synthetic construct
  source 1..75: mol_type = other DNA
catcacgggcgtggcaccattcgatgatattttatttatggatgatgactttgatgatagttcctctgaggatga

SEQ ID NO: 352646 - DNA, 75 bp, synthetic construct
  source 1..75: mol_type = other DNA
ggtgctcttgaaactttacaaaaaatgatgtctgaatgtaaatataaagaaggcaacgcctttgtcattatggga

SEQ ID NO: 352647 - DNA, 75 bp, synthetic construct
  source 1..75: mol_type = other DNA
gccccacgtggcgcgtttgccatctgataacaagccagataaacggcatccgaggcgcgatgaggctgcggatgc

SEQ ID NO: 352648 - DNA, 75 bp, synthetic construct
  source 1..75: mol_type = other DNA
caccatagatattcaagaaaaaacagatgcgtttgtgaatgagttcaaggggatattatttgatcaaaatggaag

SEQ ID NO: 352649 - DNA, 75 bp, synthetic construct
  source 1..75: mol_type = other DNA
gttattttagaaacgccgccaaatgtctgtatggaatcacgtaattcatatgaaaacaaaatagatgagatttca

SEQ ID NO: 352650 - DNA, 75 bp, synthetic construct
  source 1..75: mol_type = other DNA
aatacggtgccctacacccttggagcactggaatcggcccaaagcgttgccgaacgtttcggtatttcggtggct

SEQ ID NO: 352651 - DNA, 75 bp, synthetic construct
  source 1..75: mol_type = other DNA
gataccactgcgaccatcgcggcctgccgctggcgctcatcagcacggaaggggcaacagcgtggtgcgcagaat

SEQ ID NO: 352652 - DNA, 75 bp, synthetic construct
  source 1..75: mol_type = other DNA
ttcgcttacaatgaggcggctaaagacctattccttgataaattccgtgattattccaacgttgatgtggttttt

SEQ ID NO: 352653 - DNA, 75 bp, synthetic construct
  source 1..75: mol_type = other DNA
cttattcaaatgagctggataaagaaggctctttgcttatagttttcggattttcttttgcggatgagcatattg

SEQ ID NO: 352654 - DNA, 75 bp, synthetic construct
  source 1..75: mol_type = other DNA
tcaggtcattgaactggcggttgcacgtaaaaataatccgcaggccaccattgatatcgctccgactttccgcga

SEQ ID NO: 352655 - DNA, 75 bp, synthetic construct
  source 1..75: mol_type = other DNA
ctccatcgcaatgctccggcgtgggaagaagcaaaacgcctttacgccgtcgccatcgggaggactcttcactga

SEQ ID NO: 352656 - DNA, 75 bp, synthetic construct
  source 1..75: mol_type = other DNA
atggtaaaccagcagcagatcagagaggcccaacggctcgcgtcgttcgcggtgctccatcgcaatgctccggcg

SEQ ID NO: 352657 - DNA, 75 bp, synthetic construct
  source 1..75: mol_type = other DNA
atttgctgccggagatccatcaggccatccagtagcagggggcgtgaatactgacaggcttggcaaggttctttc

SEQ ID NO: 352658 - DNA, 75 bp, synthetic construct
  source 1..75: mol_type = other DNA
cgcagacagtatttctgattctcaggcagcttcagacattattacaaatacacgttcgatttcgacgaccgttca

SEQ ID NO: 352659 - DNA, 75 bp, synthetic construct
  source 1..75: mol_type = other DNA
cggatcacggtggaaaacaccattgagctgttaagtatcgaaagcatcaagcgttgtgtcgcggcgaatatcggg

SEQ ID NO: 352660 - DNA, 75 bp, synthetic construct
  source 1..75: mol_type = other DNA
tgcggatcctgaatggatacaacgatatactggactttcggcagagcaaatgcaggcattagagcaacccttgcc

SEQ ID NO: 352661 - DNA, 75 bp, synthetic construct
  source 1..75: mol_type = other DNA
ggactgaccgagtccttttttgatgttgtcatcagtctggaagccgcacgttggctttatttttatgtcaaataa

SEQ ID NO: 352662 - DNA, 75 bp, synthetic construct
  source 1..75: mol_type = other DNA
ggccttgctgaaagctgggacaaagtaaacaaaacaccactaaccgctattaatgcactttccaccgagattatg

SEQ ID NO: 352663 - DNA, 75 bp, synthetic construct
  source 1..75: mol_type = other DNA
aatattttgcaggtacaaacctattaccaactggtggtgatgggcggattaattatcgcggctgtcgcccttgac

SEQ ID NO: 352664 - DNA, 75 bp, synthetic construct
  source 1..75: mol_type = other DNA
aattgcgcttagtgccagttggctggcaccgaagataatgcatattgcccatgcgtttaccaatacccctcccgt

SEQ ID NO: 352665 - DNA, 75 bp, synthetic construct
  source 1..75: mol_type = other DNA
aggcaaatccacttaaaacgccttccggtaagattgaaatttattccagcaagctggcggaaattgcccgtacct

SEQ ID NO: 352666 - DNA, 75 bp, synthetic construct
  source 1..75: mol_type = other DNA
actatttccgcatcgagcacggcattgaactgcccaactacagcgtagatcgccactggtgggagcagggtgaaa

SEQ ID NO: 352667 - DNA, 75 bp, synthetic construct
  source 1..75: mol_type = other DNA
attacttccgtactgagcacggtattacgttaccgaattacagcgtggatcgtcactggtgggagcagggcgaaa

SEQ ID NO: 352668 - DNA, 75 bp, synthetic construct
  source 1..75: mol_type = other DNA
aagaacctgggccgtggataaccgaactgaaaaaacgtcgtccggccagcgtggcaatcgtcgcaatggcaaaca

SEQ ID NO: 352669 - DNA, 75 bp, synthetic construct
  source 1..75: mol_type = other DNA
tttccgttctggatgaaacgataaaaaaagtcacaacaccaatagctcaatggaaaagaatgcgggcatttctct

SEQ ID NO: 352670 - DNA, 75 bp, synthetic construct
  source 1..75: mol_type = other DNA
aaatggtaggtcgtattaacgccaatatgatccttccgtatccgccgggagttcctctggtaatgccgggtgaaa

SEQ ID NO: 352671 - DNA, 75 bp, synthetic construct
  source 1..75: mol_type = other DNA
tccaagaaaaggaagggagaatttagaagcttcttatcttgacggtagatatggggctttaccactcattgggaa

SEQ ID NO: 352672 - DNA, 75 bp, synthetic construct
  source 1..75: mol_type = other DNA
agcatgaatggatcaaatatctccatgcgaaaacgaaggaacgtaaccctgagatgcccgactacgaggagatga

SEQ ID NO: 352673 - DNA, 75 bp, synthetic construct
  source 1..75: mol_type = other DNA
ggttatgtgtggcaagcctggtaccggtaaaaaccaccttgcgctggccattgcccgtcatgtgattgagcacca

SEQ ID NO: 352674 - DNA, 75 bp, synthetic construct
  source 1..75: mol_type = other DNA
cgggtatgcgaattttctccgtattcaaaaggccagggggaacaggccagagatgaaagtgcttcatctgcatct

SEQ ID NO: 352675 - DNA, 75 bp, synthetic construct
  source 1..75: mol_type = other DNA
ttatggcgcatgctgcagctgaatttcctcatgagtgttgcggcgtggtggcgcagaaaagccgcgttgaacgtt

SEQ ID NO: 352676 - DNA, 75 bp, synthetic construct
  source 1..75: mol_type = other DNA
aattagctgcattgagggcagaaaatgcccgtctggtctcattacttgaagctcatgggattgaatggagacgta

SEQ ID NO: 352677 - DNA, 75 bp, synthetic construct
  source 1..75: mol_type = other DNA
ttatccacggatgagaaagttgcgttatttcgtcggttgtttcgtgggcgtgatgatgtatgggcccttcgatag

SEQ ID NO: 352678 - DNA, 75 bp, synthetic construct
  source 1..75: mol_type = other DNA
cggcctcaatgtcgaccgtaatgtatctctttggtgtggtggacaacatgggcggaggtctgattgaccaggttt

SEQ ID NO: 352679 - DNA, 75 bp, synthetic construct
  source 1..75: mol_type = other DNA
tctaaatgataattcggagctgttgaaagagcgttataagcttatgaaggagggacgttatattgtttattctga

SEQ ID NO: 352680 - DNA, 75 bp, synthetic construct
  source 1..75: mol_type = other DNA
cgaatacagatcctctggggttagaagtttttcctagaccattccccttgccaattccatggcccaaaagccctg

SEQ ID NO: 352681 - DNA, 75 bp, synthetic construct
  source 1..75: mol_type = other DNA
ccactgccgtgaaggaaatgcgtttctatggcgtgtcgggagtgacagcaaatgacctccgcactgccgaagcca

SEQ ID NO: 352682 - DNA, 75 bp, synthetic construct
  source 1..75: mol_type = other DNA
tcaacattataattttgcgttaagccaaacgaatacaactattataaatggtggattaatttataagttattctc

SEQ ID NO: 352683 - DNA, 75 bp, synthetic construct
  source 1..75: mol_type = other DNA
ttggattaattcaaagctataatatgtataaaattcaccaaaagaatgaagtaattgagaaagattttattatta

SEQ ID NO: 352684 - DNA, 75 bp, synthetic construct
  source 1..75: mol_type = other DNA
ggctatgttcctgaattagaattgaatggaaaaaatgtgaaacttccggcacaacgaattgataccctgaattac

SEQ ID NO: 352685 - DNA, 75 bp, synthetic construct
  source 1..75: mol_type = other DNA
tgtagtaatgttttccgcttcagggaaaaaatagcatccagccgcagcacgttcttgcgcacgacgtgctgcggc

SEQ ID NO: 352686 - DNA, 75 bp, synthetic construct
  source 1..75: mol_type = other DNA
tgccatcagagcgttttcgggcatcatctactgaaaattctccccgcagttcccctgcatattcagtcggtctag

SEQ ID NO: 352687 - DNA, 75 bp, synthetic construct
  source 1..75: mol_type = other DNA
gtgttcagattaccaacaccccgactactcagcggactcaaatcagccctacgcccggcgatgccccggtttaaa

SEQ ID NO: 352688 - DNA, 75 bp, synthetic construct
  source 1..75: mol_type = other DNA
atgttcaaatataagaaaaaggcggcagtaatctgttttttgtattttttgttcgtcgctgtagtaacttgttat
